(19) United States
(12) Patent Application Publication
(10) Pub. No.: US 2025/0171800 A1
(43) Pub. Date: May 29, 2025

(54) Materials and Methods for Treatment of Hemoglobinopathies

(71) Applicant: Vertex Pharmaceuticals Incorporated, Boston, MA (US)

(72) Inventors: Matthew Hebden PORTEUS, Cambridge, MA (US); Melanie Ruth ALLEN, Cambridge, MA (US); Chad Albert COWAN, Cambridge, MA (US); Ante Sven LUNDBERG, Cambridge, MA (US); Michelle I-Ching LIN, Cambridge, MA (US); Jeffrey LI, Cambridge, MA (US); Thao Thi NGUYEN, Cambridge, MA (US)

(73) Assignee: Vertex Pharmaceuticals Incorporated, Boston, MA (US)

(21) Appl. No.: 18/752,371

(22) Filed: Jun. 24, 2024

Related U.S. Application Data
(62) Division of application No. 15/762,700, filed on Mar. 23, 2018, now Pat. No. 12,043,843.
(60) Provisional application No. 62/328,203, filed on Apr. 27, 2016.
(60) Provisional application No. 62/250,823, filed on Nov. 4, 2015.

(51) Int. Cl. C12N 15/85; A61K 48/00; A61P 7/00; C07K 14/805; C12N 9/22; C12N 15/10; C12N 15/11; C12N 15/113; C12N 15/63; C12N 15/90

(52) U.S. Cl. CPC C12N 15/85; A61P 7/00; C07K 14/805; C12N 9/22; C12N 15/11; C12N 15/907; A61K 48/00; C12N 15/102; C12N 15/113; C12N 15/63; C12N 2310/20; C12N 2800/80

(57) ABSTRACT

The present application provides materials and methods for treating hemoglobinopathies. More specifically, the application provides methods for producing progenitor cells that are genetically modified via genome editing to increase the production of fetal hemoglobin (HbF), as well as modified progenitor cells (including, for example, CD34⁺ human hematopoietic stem cells) producing increased levels of HbF, and methods of using such cells for treating hemoglobinopathies such as sickle cell anemia and β-thalassemia.

### CROSS REFERENCE TO RELATED APPLICATIONS

[0001] This application is a divisional of U.S. application Ser. No. 15/762,700, filed Mar. 23, 2018, which is a national stage under 35 USC § 371 of PCT Application No. PCT/IB2016/001750, filed Nov. 4, 2016, which claims the benefit of U.S. Provisional Application No. 62/250,823 filed on Nov. 4, 2015 and U.S. Provisional Application No. 62/328,203 filed on Apr. 27, 2016. The disclosures of these related applications, including their sequence listings, are herein incorporated by reference in their entirety. To the extent that there are any discrepancies between the disclosures of these related applications and the instant application, the disclosure of the instant application should control.

### REFERENCE TO ELECTRONIC SEQUENCE LISTING

[0002] The application contains a Sequence Listing which has been submitted electronically in .XML format and is hereby incorporated by reference in its entirety. Said .XML copy, created on Jun. 17, 2024, is named “01245-0050-01US.xml” and is 206,108,462 bytes in size. The sequence listing contained in this .XML file is part of the specification and is hereby incorporated by reference herein in its entirety.

### FIELD

[0003] The present application provides materials and methods for treating hemoglobinopathies. More specifically, the application provides methods for producing progenitor cells that are genetically modified via genome editing to increase the production of fetal hemoglobin (HbF), as well as modified progenitor cells, including for example CD34⁺ human hematopoietic stem cells (hHSCs) producing increased levels of HbF, and methods of using such cells for treating hemoglobinopathies such as sickle cell anemia and β-thalassemia.

### BACKGROUND

[0004] Hemoglobinopathies encompass a number of anemias that are associated with changes in the genetically determined structure or expression of hemoglobin. These include changes to the molecular structure of the hemoglobin chain, such as occurs with sickle cell anemia, as well as changes in which synthesis of one or more chains is reduced or absent, such as occurs in various thalassemias.

[0005] Disorders specifically associated with the β-globin protein are referred to generally as β-hemoglobinopathies. For example, β-thalassemias result from a partial or complete defect in the expression of the β-globin gene, leading to deficient or absent hemoglobin A (HbA). HbA is the most common human hemoglobin tetramer and consists of two α-chains and two β-chains (α₂β₂). β-thalassemias are due to mutations in the adult β-globin gene (HBB) on chromosome 11, and are inherited in an autosomal, recessive fashion. β-thalassemia or β-thal is classified into two clinically-significant types (which are a focus of symptom management, medical treatments and the present application) that are distinguished by the severity of symptoms: β-thalassemia major (or β⁰, in which mutations block production of β-globin chains, resulting in a severe condition that is also known as “Cooley's anemia”) and β-thalassemia intermedia (or β⁺, an intermediate condition in which mutations reduce but do not block production of β-globin chains). In contrast, β-thalassemia minor or β-thalassemia trait refers to the heterozygous situation in which only one of the β-globin alleles contains a mutation, so that β-globin chains can be produced via expression from the other (i.e. unmutated) chromosome 11 allele. While such individuals are carriers of a β-thalassemia mutant allele that they may pass on to their children, individuals with β-thalassemia minor are generally either asymptomatic or nearly asymptomatic themselves as a result of β-globin production from the unaffected allele.

[0006] The signs and symptoms of thalassemia major generally appear within the first 2 years of life, when children with the disease can develop life-threatening anemia. Children with thalassemia major often fail to gain sufficient weight or grow at the expected rate (failure to thrive) and may develop jaundice. Affected individuals may also have an enlarged spleen, liver, and heart, and their bones may be misshapen. Many people with thalassemia major have such severe symptoms that they need frequent blood transfusions to replenish their red blood cell supply, which is referred to as transfusion-dependent thalassemia. While transfusions have been a critical life-saver for many patients, they are expensive and are frequently associated with significant side effects. Among others, over time the administration of iron-containing hemoglobin from chronic blood transfusions tends to lead to a buildup of iron in the body, which can result in liver, heart, and endocrine problems.

[0007] Thalassemia intermedia is milder than thalassemia major. The signs and symptoms of thalassemia intermedia appear in early childhood or later in life. Although symptoms are less severe, affected individuals still have mild to moderate anemia and may also suffer from slow growth and bone abnormalities.

[0008] Sickle cell disease (SCD) is a group of disorders that affects millions of people worldwide. It is most common among people who live in or whose ancestors come from Africa; Mediterranean countries such as Greece, Turkey, and Italy; the Arabian Peninsula; India; Spanish-speaking regions in Central and South America, and parts of the Caribbean. However, SCD is also the most common inherited blood disorder in the United States. SCD includes sickle cell anemia, as well as sickle hemoglobin C disease (HbSC), sickle beta-plus-thalassemia (HbS/β⁺) and sickle beta-zero-thalassemia (HbS/β⁰).

[0009] Sickle cell anemia (SCA), which is the most prevalent form of SCD, is among the most common severe monogenic disorders worldwide, with approximately 250,000 children born with SCD every year. The incidence of SCA is greatest in West and Central Africa, where 1-2% of babies are born with the disease, and as many as 25% of people are heterozygous carriers. The SCA point mutation is believed to have been spread through selective advantage because heterozygosity provides modest protection against death from childhood malaria. In India, where malaria is also prevalent, it is estimated that there are more than 2.5 million heterozygous carriers of SCA and approximately 150,000 homozygotes with the disease.

[0010] Despite the relative absence of malaria in North America and Europe, the fact that each has large populations with genetic origins in affected areas has meant that both regions have substantial populations of heterozygous SCA carriers, and therefore affected homozygous individuals. For example, the US Centers for Disease Control (CDC) estimates that there are approximately 90,000 to 100,000 Americans with SCA; and incidence is also high in countries of Western Europe, particularly those with large immigrant populations, with an estimated 10,000 in France and 12,000 to 15,000 in the United Kingdom for example. Associated costs to healthcare systems are likewise substantial. In a five-year US study conducted from 1989 through 1993, the CDC estimated that SCD resulted in more than 75,000 hospitalizations annually, and cost approximately $0.5 billion. System wide costs would be expected to be substantially greater now given the steady rise in healthcare costs over the intervening two decades.

[0011] All forms of SCD are caused by mutations in the β-globin structural gene (HBB). Sickle cell anemia (SCA) is an autosomal recessive disease caused by a single missense mutation in the sixth codon of the β-globin gene (HBB; A→T) resulting in the substitution of glutamic acid by valine (Glu→Val). The mutant protein, when incorporated into hemoglobin (Hb), results in unstable hemoglobin HbS (which is α₂β₂^{S}) in contrast to normal adult hemoglobin or HbA (which is α₂β₂^{A}). Upon de-oxygenation, HbS polymerizes to form HbSS through hydrophobic interactions between β^{S}-6 valine of one tetramer and β-85 phenylalanine and β-88 leucine of an adjacent tetramer in the erythron, which leads to rigidity and vaso-occlusion [Atweh, Semin. Hematol. 38(4):367-73 (2001)].

[0012] When HbS is the predominant form of hemoglobin, as in individuals with SCA, their red blood cells (RBCs) tend to be distorted into a sickle or crescent shape. The sickle-shaped RBCs die prematurely, which can lead to anemia. In addition, the sickle-shaped cells are less flexible than normal RBCs and tend to get stuck in small blood vessels causing vaso-occlusive events. Such vaso-occlusive events are associated with tissue ischemia leading to acute and chronic pain as well as organ damage that can affect any organ in the body, including the bones, lungs, liver, kidneys, brain, eyes, and joints. The spleen is particularly subject to infarction and the majority of individuals with SCD are functionally asplenic in early childhood, increasing their risk for certain types of bacterial infections. Occlusions of small vessels can also cause acute episodic febrile illness called “crises,” which are associated with severe pain and multiple organ dysfunction. Over the course of decades there is progressive organ disease and premature death.

[0013] Children with SCD may be diagnosed by newborn screening but otherwise do not present until later, when levels of fetal hemoglobin (HbF) decline and levels of HbS increase as a result of the hemoglobin allelic “switch” from fetal hemoglobin (encoded by HBG1 (A-gamma, also written ^{A}γ) and HBG2 (G-gamma, also written ^{G}γ)) to the adult β form encoded by HBB). The switch from HbF to the adult form of β-globin (i.e. HbA in unaffected children or HbS in those with SCA) typically begins a few months prior to birth and is complete by about the age of 6 months. The clinical effects of SCD are not manifested until HbF levels become significantly low relative to HbS, which typically occurs two to three months after birth. SCD often first presents as dactylitis or “hand-foot syndrome,” a condition associated with pain in the hands and/or feet that may be accompanied by swelling. In addition, the spleen can become engorged with blood cells resulting in a condition known as “splenic sequestration.” Hemolysis associated with SCD can result in anemia, jaundice, cholelithiasis, as well as delayed growth. Individuals with the highest rates of SCD hemolysis also tend to experience pulmonary artery hypertension, priapism, and leg ulcers.

[0014] Sickle cell anemia (homozygous HbSS) accounts for 60%-70% of sickle cell disease in the US. The other forms of sickle cell disease result from coinheritance of HbS with other abnormal globin p chain variants, the most common forms being sickle-hemoglobin C disease (HbSC) and two types of sickle β-thalassemia (HbSβ+-thalassemia and HbSβ°-thalassemia). The β-thalassemias are divided into β+-thalassemia, in which reduced levels of normal β-globin chains are produced, and β°-thalassemia, in which there is no β-globin chain synthesis. Other globin β chain variants such as D-Punjab, 0-Arab, and E also result in sickle cell disease when coinherited with HbS.

[0015] Although improvements in the management of SCD have reduced mortality in affected children followed up since neonatal screening, the mainstay of treatment for the majority of individuals with SCD remains supportive. Current treatments aim at relieving symptoms and treating complications such as: pain from vaso-occlusive crisis, infection, anemia, stroke, priapism, pulmonary hypertension or chronic organ damage. Preventative therapies include infection prophylaxis with regular penicillin, vaccination against Streptococcus pneumoniae and Haemophilus influenzae, as well as regular transfusions in children with abnormal transcranial Doppler ultrasonography to prevent strokes and iron chelation for transfusional iron overload. Stroke is also considered an indication for bone marrow transplantation in children and adolescents, who have siblings with identical human leukocyte antigen (HLA). Effective treatment of acute pain is one of the most common problems raised by the management of SCA. Thus, at the present time, definitive therapies that substantially alter the natural history of the disease (such as regular transfusion or exchange transfusion, long-term hydroxycarbamide and HSC transplants) are limited.

[0016] WO2014/085593 relates to methods and compositions for treating hemoglobinopathies by targeting BCL11A distal regulatory elements that are purported to act as a stage specific regulator of fetal hemoglobin expression by repressing γ-globin induction. Thus, for example, claim 1 of WO2014/085593 is directed to a method for producing a progenitor cell having decreased BCL11A mRNA or protein expression, the method comprising contacting an isolated progenitor cell with an agent that binds the genomic DNA of the cell on chromosome 2 location 60,716,189-60,728,612 (according to UCSC Genome Browser hg 19 human genome assembly), thereby reducing the mRNA or protein expression of BCL11A.

[0017] For these and other targets, gene therapy has long been proposed as a potentially curative option for hemoglobinopathies (see, e.g., de Montalembert, BMJ, 337: a1397 (2008); Sheth et al., British Journal of Haematology, 162: 455-464 (2013), and references cited therein.

[0018] However, as recently summarized by Chandrakasan and Malik in a review entitled “Gene Therapy for Hemoglobinopathies: The State of the Field and the Future” [Hematol Oncol Clin North Am. 28(2): 199-216 (2014)] gene therapy for hemoglobinopathies has faced a number of challenges. For example, retroviral (RV) vectors were the first vectors to be used in clinical trials, and although vectors with long terminal repeats (LTRs) intact mediated high levels of transgene expression leading to clinical improvement, the success in the trials were soon marred by safety concerns from insertional oncogenesis from transactivation of cellular oncogenes by the RV LTR. The lympho-proliferation and leukemia in X-SCID was ascribed to insertion activation of the LMO2 oncogene. In the gene therapy trial for chronic granulomatous disease (CGD), after some initial success, there was silencing of transgene expression caused by methylation of the viral promoter, and myelodysplasia developed with monosomy 7 as a result of insertional activation of ecotropic viral integration site 1. Cf. Chandrakasan and Malik, supra, and references cited therein.

[0019] Bioengineering of HIV-1 devoid of any pathogenic elements resulted in the development of lentivirus (LV) vectors. Initial studies had established LV vectors as dependable vehicles for high-efficiency gene transfer. Bluebird Bio, Inc. is developing LentiGlobin® BB305, as a potential treatment in which autologous CD34⁺ hematopoietic stem cells (HSC) are transduced ex vivo with a lentiviral β^{A T87Q}-globin vector with the goal of inserting a fully functional human β-globin gene in patients with β-thalassemia major. The Bluebird study is intended to build on early clinical data from the LG001 study, in which the drug product had been administered to a patient with β-thalassemia major [Cavazzana-Calvo et al., Nature, 467: 318-322 (2010)].

[0020] Gene therapy using γ-globin has also been considered. However, γ-globin transcripts are known to be highly silenced in adults and so approaches to circumvent this have included driving γ-globin expression with β-globin promoters and enhancers, as described by Chandrakasan and Malik, supra.

[0021] However, the introduction of strong promoters and enhancers in the context of gene therapy, particularly with vectors that integrate at unpredictable locations within the genome (which include RV and LV vectors), raises safety concerns since the activation of a proto-oncogene or other harmful event can be triggered by the introduction of such elements. In the severe combined immunodeficiency disease (SCID) trials, for example, 5 of the 20 patients treated developed leukemia in connection with their treatment [Wu et al. Front Med. 5(4): 356-371 (2011)].

[0022] In sum, despite decades of efforts from researchers and medical professionals worldwide who have been trying to address hemoglobinopathies such 3-thalassemia and sickle cell disease, and despite the promise of gene therapy approaches, there still remains a critical need for developing safe and effective treatments for these and related diseases which are among the most prevalent and debilitating genetic disorders.

### SUMMARY

[0023] Provided herein are methods of increasing the level of fetal hemoglobin (HbF; two polypeptide chains of which are expressed from the γ-globin genes as described below) in human cells by genome editing, which can be used to treat hemoglobinopathies such as β-thalassemia and sickle cell disease, as well as components, kits and compositions for performing such methods, and cells produced by them, including without limitation autologous CD34⁺ human hematopoietic stem cells (hHSCs) that can be administered to a patient suffering from a hemoglobinopathy.

[0024] In one aspect, provided herein are methods of increasing the level of HbF in a human cell by genome editing using DNA endonuclease to effect a pair of double-strand breaks (DSBs), the first positioned at a 5′ DSB locus and the second positioned at a 3′ DSB locus within the δβ-globin region of human chromosome 11, causing a DNA deletion of the region between the 5′ DSB locus and the 3′ DSB locus that results in increased expression of either or both γ-globin genes, thereby bringing about an increase in the level of HbF in the cell.

[0025] In another aspect, provided herein are methods of increasing the level of HbF in a human cell by genome editing using DNA endonuclease to effect a pair of DSBs, the first positioned at a 5′ DSB locus and the second positioned at a 3′ DSB locus within the δβ-globin region of human chromosome 11, causing an inversion of the region between the 5′ DSB locus and the 3′ DSB locus that results in increased expression of γ-globin, thereby bringing about an increase in the level of HbF in the cell.

[0026] In another aspect, provided herein are methods of increasing the level of HbF in a human cell by genome editing using DNA endonuclease to effect a DSB positioned at one or more loci within the β-globin region of human chromosome 11, causing deletions or insertions of chromosomal DNA at the one or more loci that result in increased expression of γ-globin, thereby increasing the level of HbF in the cell. In one type of method exemplifying this aspect, at least one DSB is positioned within the γ-globin regulatory region of human chromosome 11. In another type of method exemplifying this aspect, at least one DSB is positioned within the δβ-globin region of human chromosome 11.

[0027] Exemplary DNA endonucleases that may be used include, e.g., a Cas9 endonuclease, a zinc finger nuclease, a transcription activator-like effector nuclease (TALEN), a homing endonuclease, a dCas9-FokI nuclease or a MegaTal nuclease. DNA endonucleases may be introduced into the cell by a variety of means, including by the introduction and/or expression one or more polynucleotides encoding the DNA endonuclease, as known in the art and as described and illustrated further herein. In certain embodiments, DNA endonucleases and/or other components of the genome editing systems, such as guide RNAs in the case of Cas9 genome editing, are encoded by RNAs introduced into the cells.

[0028] In some embodiments, the DNA endonuclease is a Cas9 endonuclease and the method comprises introducing into the cell one or more polynucleotides encoding Cas9 and two guide RNAs, the first guide RNA comprising a spacer sequence that is complementary to a segment of the 5′ DSB locus, and the second guide RNA comprising a spacer sequence that is complementary to a segment of the 3′ DSB locus. Both guide RNAs may be provided as single-molecule guide RNAs (comprising tracrRNA and crisprRNA), or either or both may be provided as double-molecule guide RNAs comprising a crisprRNA and a tracrRNA that are not joined to each other but rather are separate molecules.

[0029] In other embodiments, the DNA endonuclease is a zinc finger nuclease (ZFN) and the method comprises introducing into the cell one or more polynucleotides encoding a first pair of ZFNs that target a segment of the 5′ DSB locus, and a second pair of ZFNs that target a segment of the 3′ DSB locus. Alternatively, TALENs or other endonucleases may be used.

[0030] In some embodiments, the human cell to be modified is an isolated progenitor cell, and in some embodiments for the treatment of hemoglobinopathies it is a hematopoietic progenitor cell capable of giving rise to cells of the erythroid lineage. The isolated progenitor cell may also be an induced pluripotent stem cell.

[0031] In various embodiments, one or both DSB loci is proximal to a deletion associated with the hereditary persistence of fetal hemoglobin (HPFH) or δβ-thalassemia Corfu, as described and illustrated further herein. (The term “proximal to” refers herein to a position within, or nearby, a defined region either 5′ or 3′ of a particular reference point, is used herein with specific reference to these deletions, and is described in further detail below in the section entitled “Target Sequence Selection” and further illustrated by various exemplary embodiments provided herein.)

[0032] The deletions associated with HPFH and δβ-thalassemia Corfu are both associated with increases in HbF and are referred to herein collectively as HPFH deletions, a number of which are described and illustrated herein, and others are known in the art. Thus, the 5′ DSB locus may be proximal to the 5′ boundary of an HPFH deletion, the 3′ DSB locus may be proximal to the 3′ boundary of an HPFH deletion, or both, which would result in deletions that mimic naturally-occurring HPFH deletions. Exemplary deletions as illustrated herein include, e.g., the HPFH-4 deletion, the HPFH-5 deletion, the HPFH-Kenya deletion, the HPFH-Black deletion, the long Corfu deletion, and the short Corfu deletion.

[0033] Embodiments are also provided that have deletions sharing one or more segments that are deleted in HPFH, and that are associated with increased levels of HbF, but that are not co-terminus with naturally-occurring deletions.

[0034] In some aspects, deletions remove all or a portion of the δβ-globin region, as described further herein.

[0035] In some aspects, deletions remove all or a portion of the β-globin gene (HBB), as described further herein. In the context of sickle cell disease, disrupting or eliminating the β-globin gene can effectively reduce or eliminate the expression of sickle cell hemoglobin (HbS), which in addition to increasing the levels of fetal hemoglobin (HbF) can be of significant additional benefit to patients with SCD, such as sickle cell anemia. In certain embodiments, the method involves genome editing of cells from a patient with SCD, wherein HbF is increased and HbS is decreased.

[0036] In the context of β-thalassemias, problems associated with the lack of β-globin chains are exacerbated by the excess of unpaired α-globin chains, which interact with the red cell (RBC) membrane, causing oxidative damage to membrane skeletal components, and potentially other components resulting in shortened RBC survival, ineffective erythropoiesis and anemia. In certain embodiments, the method involves genome editing of cells from a patient with β-thalassemia, wherein HbF is increased and the level of unpaired α-globin chains is decreased.

[0037] Also provided are human cells that have been modified by the preceding methods to increase their levels of HbF. In certain embodiments, the cells are derived from a patient with SCD and the level of HbS in such cells is reduced. In certain other embodiments, the cells are derived from a patient with β-thalassemia and the level of unpaired α-globin chains in such cells is reduced. Such cells may be isolated progenitor cells, e.g., hematopoietic progenitor cells capable of giving rise to cells of the erythroid lineage. Isolated progenitor cells may be induced pluripotent stem cells.

[0038] Further provided herein are methods of ameliorating hemoglobinopathies by administration of cells that have been modified by the preceding methods to increase their levels of HbF. Exemplary hemoglobinopathies include, but are not limited to, sickle cell disease (including sickle cell anemia), hemoglobin C disease, hemoglobin C trait, hemoglobin S/C disease, hemoglobin D disease, hemoglobin E disease, a thalassemia, a condition associate with hemoglobin with increased oxygen affinity, a condition associated with hemoglobin with decreased oxygen affinity, unstable hemoglobin disease and methemoglobinemia.

[0039] In some aspects of the methods, the gRNA comprises a spacer sequence selected from the group consisting of the sequences in the Sequence Listing, application, or figures.

[0040] Provided herein is a guide ribonucleic acid (gRNA) comprising a spacer sequence selected from the group consisting of the sequences in the Sequence Listing, application, or figures for editing the globin locus in a cell from a hemoglobinopathy patient. In some aspects the gRNA is a single-molecule guide RNA (sgRNA). In some aspects, the gRNA or sgRNA is a modified gRNA or sgRNA.

[0041] Various other aspects are described and exemplified herein.

### BRIEF DESCRIPTION OF THE DRAWINGS

[0042] FIGS. 1A-1B shows the genomic location of CRISPR target sites for the HPFH5 deletion. (FIG. 1A) Restriction map of the HPFH5 deletion variant (lower part) compared with wild type β-globin locus (upper part), as defined by Camaschella et al, Haematologica, 75(Suppl 5): 26-30 (1990). (FIG. 1B) Schematic of the human β-globin locus with hollow boxes highlighting illustrative HPFH5-like 5′ and 3′ target sites for CRISPR. The 12.9 kb deletion starts 3 kb 5′ to the δ gene and ends 1.7 kb 3′ to the end of the β gene (690 bp downstream from the β polyA signal), as described by Camaschella et al., supra.

[0043] FIG. 2 shows a schematic of PCR primer locations for detection of inversions and deletions of the 13 kb fragment.

[0044] FIG. 3 shows a schematic of the genomic location of HPFH Corfu 3.5 kb and 7.2 kb deletions.

[0045] FIG. 4 shows a schematic of the β-globin locus showing the location of the Kenya deletion, 5′ (left box) and 3′ (right box).

[0046] FIGS. 5A-5B shows the location of the HPFH-SD 13 bp deletion. (FIG. 5A) Sequence alignment of wild type and 13 bp deletion variant of human γ-globin locus. Potential PAM sites for CRISPR are circled. (FIG. 5B) Sequence alignment of HBG1 and HBG2 genes showing the conserved target region (dotted box), along with the potential ˜5 kb deletion arising from cleavage at the target site in both genes (lower panel).

[0047] FIGS. 6A-6C shows other deletion and non-deletion modifications of the β-globin locus associated with HPFH. (FIG. 6A) Schematic showing location of HPFH-4 deletion. (FIG. 6B) Schematic showing location of the HPFH Black deletion. (FIG. 6C) Genomic sequence in the region of the ^{G}γ-175 (T to C) mutation. Potential PAM sites for S. pyogenes Cas9 are circled. Nucleotide T175 is shown in bold.

[0048] FIG. 7A is an illustration of a plasmid (referred to herein as “CTx-1”) comprising a codon optimized gene for S. pyogenes Cas9 endonuclease. The CTx-1 plasmid also comprises a gRNA scaffold sequence, which includes a spacer sequence from the sequence listing.

[0049] FIG. 7B is an illustration of a plasmid (referred to herein as “CTx-2”) comprising a different codon optimized gene for S. pyogenes Cas9 endonuclease. The CTx21 plasmid also comprises a gRNA scaffold sequence, which includes a spacer sequence from the sequence listing.

[0050] FIG. 7C is an illustration of a plasmid (referred to herein as “CTx-3”) comprising yet another different codon optimized gene for S. pyogenes Cas9 endonuclease. The CTx-3 plasmid also comprises a gRNA scaffold sequence, which includes a 20 bp spacer sequence from the sequence listing.

[0051] FIG. 8A is an illustration depicting the type II CRISPR/Cas system.

[0052] FIG. 8B is another illustration depicting the type II CRISPR/Cas system.

[0053] FIG. 9 presents a Corfu Large new guide map, showing 5′ and 3′ ends, as well as gRNA loci.

[0054] FIG. 10A presents and enlarged view of 5′ end of Corfu Large new guide map (showing 33 new gRNA).

[0055] FIG. 10B presents an enlarged view of 3′ end of Corfu Large new guide map (showing 30 new gRNA).

[0056] FIG. 11 presents the results of the editing efficiency screen results for Corfu Large gRNA.

[0057] FIG. 12 presents a Corfu Small guide map, showing 5′ and 3′ ends, as well as gRNA loci.

[0058] FIG. 13A presents a 5′ Enlarged view of 5′ end of Corfu Small guide map (showing 30 gRNA).

[0059] FIG. 13B presents an enlarged view of 3′ end of Corfu Small guide map (showing 16 gRNA).

[0060] FIG. 14 presents the results of the editing efficiency screen results for Corfu Small gRNA.

### BRIEF DESCRIPTION OF THE SEQUENCE LISTING

[0061] SEQ ID NOs:1-56,961 is a list of gRNA 20 bp spacer sequences, associated with PAM (NRG), for targeting the globin locus with a S. pyogenes Cas9 endonuclease.

[0062] SEQ ID NOs:56,962-64,104 is a list of gRNA 20 bp spacer sequences, associated with PAM (NNGRRT), for targeting the globin locus with a S. aureus Cas9 endonuclease.

[0063] SEQ ID NOs:64,105-66,998 is a list of gRNA 20 bp spacer sequences, associated with PAM (NNAGAAW), for targeting the globin locus with a S. thermophilus Cas9 endonuclease.

[0064] SEQ ID NOs:66,999-68,146 is a list of gRNA 20 bp spacer sequences, associated with PAM (NAAAAC), for targeting the globin locus with a T. denticola Cas9 endonuclease.

[0065] SEQ ID NOs: 68,147-75,145 is a list of gRNA 20 bp spacer sequences, associated with PAM (NNNNGHTT), for targeting the globin locus with a N. meningitides Cas9 endonuclease.

[0066] SEQ ID NOs:75,146-161,197 is a list of gRNA 22 bp spacer sequences, associated with PAM (YTN), for targeting the globin locus with a Cpf1 endonuclease from Acidominococcus, Lachnospiracease, and Franciscell Novicida.

[0067] SEQ ID NO:161,198 is an exemplary target nucleic acid.

[0068] SEQ ID NO:161,199 is a homing endonucleases (HE) recognition sequence.

[0069] SEQ ID NOs:161,200-161,312 are gRNA sequences for targeting the Corfu Region for deletion with a Cas9 endonuclease.

[0070] SEQ ID NOs:161,313-161,314 are sequences for HPFH-SD wild type and deletion variants of human γ-globin. See FIG. 5A and the corresponding description.

[0071] SEQ ID NO:161,315 is the genomic sequence in the region of the ^{G}γ-175 (T to C) mutation. See FIG. 6C and the corresponding description.

[0072] Note that where the guides are presented as DNA sequences (complementary to the target strand and identical to the non-target strand), the gRNA is the corresponding RNA sequence.

### DETAILED DESCRIPTION

### Hemoglobinopathies

[0073] Fetal hemoglobin (HbF) is a tetramer of two adult α-globin polypeptides and two fetal β-like γ-globin polypeptides. The γ-globin genes (HBG1 and HBG2) are normally expressed in the fetal liver, spleen and bone marrow. A tetramer of two γ-chains together with two α-chains constitute HbF. During gestation, the duplicated γ-globin genes constitute the predominant genes transcribed from the β-globin locus. Following birth, γ-globin becomes progressively replaced by adult β-globin, a process referred to as the “fetal switch.” This developmental switch from production of predominantly HbF (α2β2) to production of adult hemoglobin or HbA (α2β2) begins at about 28 to 34 weeks of gestation and continues shortly after birth at which point HbA becomes predominant. The switch results primarily from decreased transcription of the γ-globin genes and increased transcription of β-globin genes. On average, the blood of a normal adult contains only about 2% of total hemoglobin in the form of HbF, though residual HbF levels have a variance of over 20 fold in healthy adults (Atweh, Semin. Hematol. 38(4):367-73 (2001)). The two types of γ-chains differ at residue 136 where glycine is found in the G-γ-product (HBG2) and alanine is found in the A-γ-product (HBG1). The HBG1 hemoglobin gene (^{A}γ or A-gamma [Homo sapiens (human)] Gene ID: 3047), was updated on 16 Apr. 2014 (www.ncbi.nlm.nih.gov/gene/3047).

[0074] As used herein, the term “hemoglobinopathy” means any defect in the structure, function or expression of any hemoglobin of an individual, and includes defects in the primary, secondary, tertiary or quaternary structure of hemoglobin caused by any mutation, such as deletion mutations or substitution mutations in the coding regions of the β-globin gene, or mutations in, or deletions of, the promoters or enhancers of such genes that cause a reduction in the amount of hemoglobin produced as compared to a normal or standard condition. The term further includes any decrease in the amount or effectiveness of hemoglobin, whether normal or abnormal, caused by external factors such as disease, chemotherapy, toxins, poisons, or the like. 3-hemoglobinopathies contemplated herein include, but are not limited to, sickle cell disease (SCD, also referred to a sickle cell anemia or SCA), sickle cell trait, hemoglobin C disease, hemoglobin C trait, hemoglobin S/C disease, hemoglobin D disease, hemoglobin E disease, thalassemias, hemoglobins with increased oxygen affinity, hemoglobins with decreased oxygen affinity, unstable hemoglobin disease and methemoglobinemia.

[0075] The potential for addressing β-hemoglobinopathies by increasing levels of fetal hemoglobin (α₂γ₂; HbF) is supported by observations of the mild phenotype of individuals who have co-inherited homozygous β-thalassemia and hereditary persistence of fetal hemoglobin (HPFH), as well as by those patients with homozygous β-thalassemia who synthesize no adult hemoglobin, but in whom a reduced requirement for transfusions is observed in the presence of increased concentrations of HbF. Additional support comes from the observation that certain populations of adult patients with β chain abnormalities have higher than normal levels of HbF, and have been observed to have a milder clinical course of disease than patients with normal adult levels of HbF. For example, a group of Saudi Arabian sickle-cell anemia patients who express 20-30% HbF (as a percent of total hemoglobin) have only mild clinical manifestations of the disease [Pembrey et al., Br. J. Haematol. 40: 415-429 (1978)]. It is now accepted that β-hemoglobinopathies, such as sickle cell anemia and the β-thalassemias, are ameliorated by increased HbF production. [Reviewed in Jane and Cunningham, Br. J. Haematol. 102: 415-422 (1998) and Bunn, N. Engl. J. Med. 328: 129-131 (1993)].

[0076] The human β-globin locus is composed of five β-like genes and one pseudo-β gene located on a short region of chromosome 11 (approximately 45 kb), responsible for the creation of the β chains of hemoglobin. Expression of all of these genes is controlled by single locus control region (LCR), and the genes are differentially expressed throughout development. The order of the LCR and genes in the β-globin cluster, as illustrated in FIG. 1B, is as follows: 5′-[LCR]-ε(epsilon, HBE1) -Gγ(G-gamma, HBG1) -Aγ (A-gamma, HBG2) -[ψβ(psi-beta pseudogene)]-δ (delta, HBD) -β(beta, HBB) -3′.

[0077] The arrangement of the five β-like genes reflects the temporal differentiation of their expression during development, with the early-embryonic stage version HbE (encoded by the epsilon gene) being located closest to the LCR, followed by the fetal version HbF (encoded by the γ genes), the delta version, which begins shortly prior to birth and is expressed at low levels in adults as HbA-2 (constituting approximately 3% of adult hemoglobin in normal adults), and finally the beta gene, which encodes the predominant adult version HbA-1 (constituting the remaining 97% of HbA in normal adults).

[0078] Expression of the β-like genes is regulated in embryonic erythropoiesis by many transcription factors, including KLF1, which is associated with the upregulation of HbA in adult definitive erythrocytes, and KLF2, which is associated with the expression of embryonic hemoglobin. BCL11A is activated by KLF1 and is likewise known to be involved in the switch from fetal to adult hemoglobin. Down-regulation of BCL11A expression or disruption of its activity or binding to transcriptional regulatory sites has been a focus of long-terms efforts from various groups to increase levels of HbF. See, e.g., U.S. Pat. No. 8,383,604, US2014085593, US20140093913, and references cited therein.

[0079] Certain naturally-occurring genetic mutations within the human β-globin locus are associated with de-repression of γ-globin gene expression and the clinical manifestation of HPFH. Such mutations range from single base substitutions associated with various forms of non-deletional HFPF, to deletions spanning tens of kb in the case of some forms of deletional HPFH. A variety of naturally-occurring HPFHs were described in A Syllabus of Thalassemia Mutations(1997) by Titus H. J. Huisman, Marianne F. H. Carver, and Erol Baysal, published by The Sickle Cell Anemia Foundation in Augusta, GA, USA, and references cited therein, including both deletional and non-deletional types.

[0080] A number of different forms of deletional HPFH have been reported based on studies from individuals and families found to have deletions in a region referred to herein as the “δβ-globin region” which extends from the psi-beta pseudogene through delta, beta and the region downstream of beta that is deleted in the larger HPFH alleles such as HPFH-1, as described in the art.

[0081] In some cases of HPFH, nearly all of the hemoglobin produced is HbF. However, in most cases, HbF ranges from approximately 15-30% of total hemoglobin depending on the type of HPFH as well as variation among individuals.

Deletions Disrupting or Eliminating the β-globin Gene and Advantages of Such Deletions in Treating SCD

[0082] In certain embodiments as described and illustrated herein, in addition to increasing expression of the γ-globin gene product HbF, expression of the β-globin gene product is substantially reduced or eliminated by disruption or elimination of the β-globin gene in connection with the genome editing procedure. This occurs when the genome editing uses DNA endonuclease to effect a pair of DSBs, the first at a 5′ DSB locus and the second at a 3′ DSB locus within the δβ-globin region of human chromosome 11, causing a deletion of the chromosomal DNA between the 5′ DSB locus and the 3′ DSB locus that results in increased expression of γ-globin, the deletion also removes all or a portion of the β-globin gene (HBB) causing a concomitant decrease in expression of or elimination of the β-globin gene product, thereby resulting in a combination of (i) increasing the level of HbF in the cell, and (ii) reducing or eliminating expression of the β-globin gene product from at least one HBB allele on chromosome 11.

[0083] The combined effects of increased HbF and reduced or eliminated β-globin gene expression has particular additional advantages in the context of ameliorating hemoglobinopathies such as SCD in which the product of the variant β-globin allele (i.e. HbS) is harmful to cells expressing it, causing premature cell death (as well as other negative effects associated with HbS). Thus, not only do sickled RBCs cause multiple problems for patients, as discussed above and in the art, but sickled RBCs have a substantially reduced life span relative to normal RBCs. The presence of HbS and sickled RBCs also leads to numerous other negative effects as described herein and in the art.

[0084] In the case of embodiments in which the β-globin gene is effectively disrupted or eliminated as described herein, even “knocking down” (reducing) or “knocking out” (eliminating) only one of the β-globin alleles expressing HbS, e.g., by successfully editing only one of the two copies of the gene in homozygous SCD patients (who have two defective β-globin alleles, one on each copy of chromosome 11) can have a very substantial benefit. In particular, increasing levels of HbF to the range of about 20% is considered to substantially eliminate sickling. However, as a relatively continuous or incremental factor (often referred to as a “quantitative trait”) over a significant range, even lower levels HbF can have significant beneficial effects as described herein and in the art. In these embodiments, therefore, even though the SCD patient has two defective β-globin alleles, the combination of increasing HbF (which is itself helpful for reducing the effects of SCD) along with reducing HbS (which is itself a driver of many of the deleterious effects in a quantitative manner), by genome editing using the method described and illustrated for these embodiments can bring about a combination of effects that together ameliorate one of more symptoms of the disease.

[0085] In some cases, the genome editing procedure can effectively alter both copies of an allele. Such bi-allelic editing can in some cases be screened for or selected for, but even if not selected for it can naturally occur, albeit at lower frequency as compared to mono-allelic or single allele hits, since the same target site generally exists on each member of the pairs of chromosomes.

[0086] For technical reasons as noted above, however, embodiments as described and illustrated herein in which only one of the β-globin alleles is disrupted or eliminated—in addition to increasing levels of HbF—would be expected to have significant positive effects in ameliorating one or more symptoms or conditions associated with SCD.

[0087] The ability to generate these significant “cis-type” (on the same allele) effects using the types of genome editing reflected in such embodiments can be more advantageous than approaches depending on “trans-type” effects such as those involving knock out or knock down or a trans-acting factor such as a repressor. In particular, as noted above, the genome editing in embodiments in which the β-globin gene is effectively disrupted or eliminated can substantially ameliorate effects of HbS by successfully editing on one of the two alleles. In the case of trans-acting repressors, such as a repressor of γ-globin gene expression, knocking down or knocking out one copy of the repressor gene may not be sufficient since expression of the repressor from the other copy of the gene can still reduce γ-globin gene expression limiting the levels of HbF that might be achieved.

Effects of Increased of HbF in the Context of β-thalassemia

[0088] As noted above, β-thalassemias result from a partial or complete defect in the expression of the β-globin gene, leading to deficient or absent hemoglobin A (HbA). Since there is no production of HbS, RBCs in β-thal patients do not exhibit the sickling and associated problems associated with SCD. However, a different sort of RBC ‘toxicity’ and premature cell death occurs as a result of the lack of HbA in the context of β-thal. In particular, the excess of unpaired alpha globin (α-globin) chains in β thalassemia interact with the red cell (RBC) membrane, causing oxidative damage to membrane skeletal components, and potentially other components. This interaction results in a rigid, mechanically unstable membrane that causes increased apoptosis (i.e. programmed cell death) and shortened RBC survival, marked by ineffective erythropoiesis and anemia.

[0089] Increasing the levels of HbF in RBCs of such patients can significantly ameliorate one or more symptoms of β-thalassemia because the beta-chains produced by increasing γ-globin gene expression can pair with the previously unpaired alpha-chains to produce HbF, which not only results in a functioning hemoglobin tetramer but concomitantly reduces the levels of unpaired α-globin chains that are a contributing cause of the β-thalassemia condition because of premature RBC cell death.

### Positive Selective Advantages of Certain Edited Cells

[0090] In connection with the foregoing advantages provided in certain embodiments of the invention, in particular the advantages in terms of RBC survival for sickle cell RBCs that can be mediated by genome editing that not only increases levels of HbF but reduces levels of HbS, and the advantages in terms of RBC survival for β-thal RBCs that not only increases levels of HbF but reduces levels of unpaired alpha-chains, cells that are modified by such genome editing techniques as described and illustrated herein will have selective advantages relative to the population of diseased RBCs into which they may be introduced, e.g., by gene editing a patients' own HSC's or erythroid progenitor cells ex vivo and then reintroducing such cells to the patient, where reintroduced cells must generally successfully persist or “engraft” in order for beneficial effects to be sufficient and sustained.

[0091] As a result of the foregoing selective advantages, the introduction of even modest numbers of suitable stem cells edited as described herein would be expected over time to result in improved cells representing a significantly higher fraction of the overall population of RBCs than they were initially following introduction into a patient. By way of illustration, with successfully gene edited stem cells representing as few as several percent of corresponding cells initially (i.e., compared to the population of resident cells that carry the unedited hemoglobinopathy-associated alleles), the gene edited cells could come to represent a majority of cells as a result of selective survival advantages conveyed upon them through use of gene editing techniques as described further herein. The eventual numbers reflecting such positively selected engraftment will vary depending generally on both the degree to which the resident diseased cells exhibit reduced lifespan in a given patient, and the relative survival advantage exhibited by the gene edited cells. However, as noted above, the diseased cells associated with SCD and β-thalassemia have significantly reduced lifespans (due to the presence of HbS and unpaired alpha-chains respectively), and certain embodiments not only increase levels of HbF but reduce the levels of HbS (associated with SCD) or reduce the levels of unpaired alpha-chains (associated with β-thalassemia), and therefore the relative survival benefits and with them increased engraftment, are expected to be significant.

### Corfu and Corfu-Like Deletions

[0092] Although the Corfu chromosomal allele first discovered in a Greek child results in a δβ-thalassemia, it shares some important characteristics with various deletional forms of HPFH, in particular increased levels of HbF, and therefore the deletion associated with Corfu is included with deletional HPFH forms as described herein.

[0093] However, Corfu is different from forms of deletional HPFH in terms of HbF levels and β-globin expression. Extremely high levels of HbF are associated with Corfu, approaching 100% of total hemoglobin in the case of the first child identified—and this was particularly surprising because Corfu heterozygotes (the child's parents in the first case) were found to have only normal very low levels of HbF (1-2% of total hemoglobin)—a situation that's been referred to by hematologists as the “Corfu Paradox.”

[0094] A putative explanation is that the Corfu chromosomal allele was found to contain a splice site mutation in IVS-I position 5 (“IVS-I-5”) of the β-globin gene and lower levels of the β-globin gene transcript. It has been reported that the high levels of HbF observed are contributed to post-transcriptionally by enhanced mRNA maturation and/or stabilization of the γ-globin transcript, which is apparently associated with the reduced levels of β-globin mRNA; see, e.g., Chakalova, L. et al., Blood 105: 2154-2160 (2005).

[0095] Since the Corfu chromosomal allele contains both the large deletion and the IVS-I-5 mutation, and reduced levels of β-globin mRNA associated with the latter are believed to independently contribute to the unusually high levels of HbF produced, the IVS-I-5 “Corfu-related β-globin mutation” could be used alone or in combination with other gene edited alterations as described herein in order to increase HbF levels for use in ameliorating hemoglobinopathies.

### Target Sequence Selection

[0096] For the amelioration of hemoglobinopathies via gene editing, as described herein, it is desirable but not necessary to achieve levels of HbF at the high end of those observed in naturally-occurring cases in order to bring about relative improvements in the disease. In particular, while it had originally been assumed that relatively high levels of HbF were essential for ameliorative effects to be observed, especially with respect to certain complications, studies have shown that even small incremental increases of HbF can have beneficial effects on mortality. See, e.g., Powars et al., Blood 63(4):921-926 (1984); Platt et al., N Engl J Med 330(23):1639-1644 (1994); and Akinsheye et al., Blood 118: 19-27 (2011).

[0097] One reason for the beneficial effects of even low levels of HbF in the context of sickle cell disease, is that even small incremental increases in HbF have been shown to have some beneficial effects, and levels of less than 9% of HbF (relative to total hemoglobin, Hb) appear to be associated with significantly decreased mortality; see, e.g., Platt et al., supra.

[0098] Higher levels of HbF are associated with additional clinical benefits and further decreases in morbidity and mortality, as observed in the case of SCD co-inherited with certain naturally-occurring HPFH alleles and/or Corfu thalassemia alleles, in which HbF levels in the 20-30% range have been associated with very substantial to nearly complete normalization of the SCD phenotype.

[0099] Genetic modifications within the δβ-globin region that are contemplated for increasing HbF expression to ameliorate a hemoglobinopathy as described herein result in at least about 5%, at least about 9%, at least about 14%, at least about 20 at least about 25%, or above 30% HbF (relative to total Hb in a subject).

[0100] As described and illustrated further herein, exemplary genetic modifications within the δβ-globin region that are contemplated for increasing HbF expression to such levels include, but are not limited to, the following deletions, as well as variations thereof in which the size of the deletion is reduced (e.g., by shifting the 5′ boundary of the deletion specified below further toward the 3′ boundary of the deletion specified below or shifting the 3′ boundary of the deletion further toward the 5′ boundary) or increased (by shifting either boundary in the opposite direction). Deletions made by other combinations of two of the following deletion boundaries that increase HbF expression are also specifically contemplated by the disclosure.
[0101] A. Deletions in chromosome 11 within the region Chr11:5224779-5237723 based on the GRCh38/hg38 version of the human genome assembly, wherein the 3′ boundary of the deletion is proximal (as defined below) to Chr11:5224779 and the 5′ boundary of the deletion is proximal to Chr11:5237723;
[0102] B. Deletions in chromosome 11 within region Chr11:5234665-5238138 based on the GRCh38/hg38 version of the human genome assembly, wherein the 3′ boundary of the deletion is proximal to Chr11:5234665 and the 5′ boundary of the deletion is proximal to Chr11:5238138;
[0103] C. Deletions in chromosome 11 within region Chr11:5233055-5240389 based on the GRCh38/hg38 version of the human genome assembly, wherein the 3′ boundary of the deletion is proximal to Chr11:5233055 and the 5′ boundary of the deletion is proximal to Chr11:5240389;
[0104] D. Deletions in chromosome 11 within region Chr11:5226631-5249422 based on the GRCh38/hg38 version of the human genome assembly, wherein the 3′ boundary of the deletion is proximal to Chr11:5226631 and the 5′ boundary of the deletion is proximal to Chr11:5249422;
[0105] E. Deletions in chromosome 11 within region Chr11:5249959-5249971 based on the GRCh38/hg38 version of the human genome assembly wherein the 3′ boundary of the deletion is at or adjacent to Chr11:5249959 and the 5′ boundary of the deletion is at or adjacent to Chr11:5249971;
[0106] F. Deletions in chromosome 11 within region Chr11:5196709-5239223 based on the GRCh38/hg38 version of the human genome assembly, wherein the 3′ boundary of the deletion is proximal to Chr11:5196709 and the 5′ boundary of the deletion is proximal to Chr11:5239223;
[0107] G. Deletions in chromosome 11 within region Chr11:5225700-5236750 based on the GRCh38/hg38 version of the human genome assembly, wherein the 3′ boundary of the deletion is proximal to Chr11:5225700 and the 5′ boundary of the deletion is proximal to Chr11:5236750.

[0108] In another aspect, provided herein are methods of increasing the level of fetal hemoglobin (HbF) in a human cell by genome editing using DNA endonuclease to effect a double-strand break (DSB) positioned at one or more loci within the β-globin region of human chromosome 11, wherein at least one DSB is positioned within the γ-globin regulatory region of human chromosome 11, which is located within a region less than 2 kb, less than 1 kb, less than 0.5 kb, or less than 0.25 kb upstream of the start of one of the γ-globin genes (HBG1 or HBG2), causing deletions or insertions of chromosomal DNA at the one or more loci that results in increased expression of γ-globin, thereby increasing the level of HbF in the cell. In another type of method exemplifying this aspect, at least one DSB is positioned within the δβ-globin region of human chromosome 11.

[0109] Illustrative modifications in chromosome 11 in the γ-globin regulatory region include the creation of single base substitutions such as -175 (T to C), -202 (C to G), and -114 (C to T) in the ^{G}γ gene; and -196 (C to T), -175 (T to C), -117 (G to A) in the ^{A}γ gene.

[0110] Illustrative modifications within the δβ-globin region include deletions and insertions within or proximal to the HPFH deletion loci referred to above, and deletions within the δ-globin regulatory region of human chromosome 11 which is located within the region of less than 3 kb, less than 2 kb, less than 1 kb, less than 0.5 kb upstream of the start of the δ-globin gene (HBD), and deletions within the β-globin regulatory region of human chromosome 11, which is located within the region of less than 3 kb, less than 2 kb, and less than 1 kb, or less than 0.5 kb upstream of the start of the β-globin gene (HBB).

[0111] Given the relatively wide variations in deletions that are associated with various forms of HPFH, coupled with the fact that even low levels of HbF can provide significant levels of amelioration of hemoglobinopathy (as noted above), and the understanding from a variety of studies that there appear to be multiple loci and types of controls that can contribute to repression of HbF, it will be appreciated that numerous variations of the deletions referenced above (including without limitation larger as well as smaller deletions), would be expected to result in levels of HbF that are within the contemplated ranges, as noted above.

[0112] Such variants include deletions that are larger in the 5′ and/or 3′ direction than naturally-occurring HPFH deletions, or smaller in either direction. Accordingly, by “proximal” with respect to HPFH-like deletions, it is intended that the DSB locus associated with a desired deletion boundary (also referred to herein as an endpoint) may be within a region that is less than about 3 kb from the reference locus noted. In some embodiments, the DSB locus is more proximal and within 2 kb, within 1 kb, within 0.5 kb, or within 0.1 kb. In the case of small deletions such as that identified in group E, the desired endpoint is at or “adjacent to” the reference locus, by which it is intended that the endpoint is within 100 bp, within 50 bp, within 25 bp, or less than about 10 bp to 5 bp from the reference locus.

[0113] A group of embodiments comprise deletions within the “δ-region” (which includes the downstream half of the intergenic sequence between the ψβ1 pseudogene and the δ gene HBD, and proximal sequences downstream sequences in the δ). The δ-proximal-region appears to include a number of elements associated with repression of γ-globin. The 7.2 kb “Large Corfu” δβ thalassemia deletion described and exemplified further herein falls within the δ-region, deleting approximately 1 kb of the δ gene and 6 kb upstream, and is associated with a significant increase in levels of HbF. A 3.5 “Small Corfu” deletion, described further and illustrated herein, likewise has a deletion in the δ-region, and is also associated with increased levels of HbF. The δ-region is also deleted in all major forms of HPFH.

[0114] With respect to regions further downstream in the 3′ direction, which would be associated with larger deletions as described herein, HPFH-1 through HPFH-5 all have the δ and β genes deleted. Besides regulatory elements in the δ-region that may contribute to active repression of γ-globin, activity of the δ and β promoters may also indirectly contribute to suppression via competition for transcriptional factors required for γ-globin expression.

[0115] Many HPFH types also have even larger deletions extending further downstream, and these additional downstream regions can also be incorporated into deletions as described and illustrated herein, since they are known to be associated with substantial increases of HbF, well above the ranges of HbF known to ameliorate hemoglobinopathies as noted above.

[0116] One advantage for patients with hemoglobinopathies of replicating or mimicking aspects of deletions that are found naturally in individuals with HPFH is that such deletions are already known to be both safe and associated with the amelioration of hemoglobinopathy. However, among deletional HPFH, it is also clear that smaller deletions such as HPFH-5 are effective for generating substantial increases in HbF. Other embodiments comprising smaller deletions are expected to provide substantial increases, and as noted above, even modest levels of increase of HbF have beneficial effects. It is thus expected that many variations of the deletions described and illustrated herein will be effective for ameliorating hemoglobinopathies.

[0117] Preferentially, shifts in the location of the 5′ boundary and/or the 3′ boundary relative to particular reference loci are used to facilitate or enhance particular applications of gene editing, which depend in part on the endonuclease system selected for the editing, as further described and illustrated herein. In a first aspect of such target sequence selection, many endonuclease systems have rules or criteria that guide the initial selection of potential target sites for cleavage, such as the requirement of a PAM sequence motif in a particular position adjacent to the DNA cleavage sites in the case of Crispr Type II endonucleases.

[0118] In another aspect of target sequence selection or optimization, the frequency of “off-target” activity for a particular combination of target sequence and gene editing endonuclease (i.e. the frequency of DSBs occurring at sites other than the selected target sequence) is assessed relative to the frequency of on-target activity. In some cases, cells that have been correctly edited at the desired locus may have a selective advantage relative to other cells. Illustrative but nonlimiting examples of a selective advantage include the acquisition of attributes such as enhanced rates of replication, persistence, resistance to certain conditions, enhanced rates of successful engraftment or persistence in vivo following introduction into a patient, and other attributes associated with the maintenance or increased numbers or viability of such cells. In other cases, cells that have been correctly edited at the desired locus may be positively selected for by one or more screening methods used to identify, sort or otherwise select for cells that have been correctly edited. Both selective advantage and directed selection methods may take advantage of the phenotype associated with the correction.

[0119] Whether or not any selective advantage is applicable or any directed selection is to be applied in a particular case, target sequence selection is can also be guided by consideration of off-target frequencies in order to enhance the effectiveness of the application and/or reduce the potential for undesired alterations at sites other than the desired target. As described further and illustrated herein and in the art, the occurrence of off-target activity is influenced by a number of factors including similarities and dissimilarities between the target site and various off target sites, as well as the particular endonuclease used. In many cases, bioinformatics tools are available that assist in the prediction of off-target activity, and frequently such tools can also be used to identify the most likely sites of off-target activity, which can then be assessed in experimental settings to evaluate relative frequencies of off-target to on-target activity, thereby allowing the selection of sequences that have higher relative on-target activities. Illustrative examples of such techniques are provided herein and others are known in the art.

[0120] Another aspect of target sequence selection relates to homologous recombination events. It is well known that sequences sharing regions of homology can serve as focal points for homologous recombination events that result in deletion of intervening sequences. Such recombination events occur during the normal course of replication of chromosomes and other DNA sequences, and also at other times when DNA sequences are being synthesized, such as in the case of repairs of double-strand breaks (DSBs) which occur on a regular basis during the normal cycle but may also be enhanced by the occurrence of various events (such as UV light and other inducers of DNA breakage) or the presence of certain agents (such as various chemical inducers). Many such inducers cause DSBs to occur indiscriminately in the genome, and DSBs are regularly being induced and repaired in normal cells. During repair, the original sequence may be reconstructed with complete fidelity, however, in some cases, small insertions or deletions (referred to as “indels”) are introduced at the DSB site.

[0121] DSBs may also be specifically induced at particular locations, as in the case of the endonucleases systems described herein, which can be used to cause directed or preferential gene modification events at selected chromosomal locations. The tendency for homologous sequences to be subject to recombination in the context of DNA repair (as well as replication) can be taken advantage of in a number of circumstances, and is the basis for one application of gene editing systems such as Crispr in which homology directed repair (HDR) is used to insert a sequence of interest, provided through use of a “donor” polynucleotide, into a desired chromosomal location.

[0122] Regions of homology between particular sequences, which can be small regions of “microhomology” that may comprise as few as ten basepairs or less, can also be used to bring about desired deletions. For example, in the case of the so-called “small deletion” exemplified herein, a single DSB is introduced at a site that exhibits microhomology with a nearby sequence. During the normal course of repair of such DSB, a result that occurs with high frequency is the deletion of the intervening sequence as a result of recombination being facilitated by the DSB and concomitant cellular repair process. In the case of this small deletion, which is in the upstream region of the γ-globin gene as illustrated in FIG. 14B, the result of the deletion is to increase levels of HbF, apparently through disruption of a gene silencing sequence.

[0123] In some circumstances, however, selecting target sequences within regions of homology can also give rise to much larger deletions including gene fusions (when the deletions are in coding regions), which may or may not be desired given the particular circumstances. For example, as illustrated in FIG. 14D, the homologies that exist between the two closely-related γ-globin genes HBG1 and HBG2 can give rise to large deletions arising through homologous recombination between more distal sites of homology.

[0124] The examples provided herein further illustrate the selection of various target regions for the creation of DSBs designed to induce deletions that result in the increase of HbF levels in human cells, as well as the selection of specific target sequences within such regions that are designed to minimize off-target events relative to on-target events.

### Human Cells

[0125] For ameliorating hemoglobinopathies, as described and illustrated herein, the principal targets for gene editing will be human cells which, after being modified using the techniques as described, can give rise to red blood cells (RBCs) with increased levels of HbF in a patient suffering from a hemoglobinopathy such as β-thalassemia or sickle cell disease.

[0126] As described herein and in the art, even relatively modest and incremental increases in levels of HbF in a patient suffering from a hemoglobinopathy such as β-thalassemia or sickle cell disease can be beneficial for improvement of symptoms and/or survival. In some embodiments, the levels of HbF achieved will tend toward those observed in patients with HPFH, which vary among patients and type of HPFH but in a substantial number of cases result in HbF comprising in the range of 10-30% of total hemoglobin (versus 1-2% in typical adults). However, studies have shown that lower levels of HbF can nevertheless have effects that are significant enough to be regarded as decreasing overall mortality expectations among groups of patients with SCD; see, e.g., Platt et al., N Engl J Med. 330(23): 1639-1644 (1994). And even modest improvements of symptoms can have beneficial effects for patients. For example, a reduction in the need for transfusions, a lessening of the incidence or severity of one or more symptoms of a hemoglobinopathy, or a reduction of side effects as a result of reduced levels or frequency of treatments or procedures can all be meaningful and beneficial for patients. Accordingly, in some embodiments, the increase in HbF may be in the range of about 80%, 60%, 40% or 20% of the levels of HbF observed in patients with HPFH. Further considerations regarding levels of HbF that may be achieved are provided herein, including the detailed description and examples, as supplemented by references cited herein and/or published in the art.

[0127] By performing gene editing as described herein in progenitor cells such as erythroid progenitor cells, such as autologous progenitor cells that are derived from and therefore already completely matched with the patient in need, it is possible to generate cells that can be safely reintroduced into a patient and effectively give rise to a population of circulating RBCs that will be effective in ameliorating one or more clinical conditions associated with the patient's disease.

[0128] While the presence of significant numbers of RBCs having elevated levels of HbF is beneficial, in some embodiments more than one quarter of circulating red blood cells (RBCs) will have significantly elevated levels of HbF, in some embodiments at least half of circulating RBCs will have significantly elevated levels of HbF, and in some embodiments at least 80% of circulating RBCs will have significantly elevated levels of HbF in order to effectively prevent clinical erythrocyte sickling.

[0129] Progenitor cells (also referred to as stem cells herein), such as erythroid or hematopoietic progenitor cells, are capable of both proliferation and giving rise to more progenitor cells, these in turn having the ability to generate a large number of mother cells that can in turn give rise to differentiated or differentiable daughter cells. The daughter cells themselves can be induced to proliferate and produce progeny that subsequently differentiate into one or more mature cell types, while also retaining one or more cells with parental developmental potential. The term “stem cell” refers then, to a cell with the capacity or potential, under particular circumstances, to differentiate to a more specialized or differentiated phenotype, and which retains the capacity, under certain circumstances, to proliferate without substantially differentiating. In one embodiment, the term progenitor or stem cell refers to a generalized mother cell whose descendants (progeny) specialize, often in different directions, by differentiation, e.g., by acquiring completely individual characters, as occurs in progressive diversification of embryonic cells and tissues. Cellular differentiation is a complex process typically occurring through many cell divisions. A differentiated cell may derive from a multipotent cell which itself is derived from a multipotent cell, and so on. While each of these multipotent cells may be considered stem cells, the range of cell types each can give rise to may vary considerably. Some differentiated cells also have the capacity to give rise to cells of greater developmental potential. Such capacity may be natural or may be induced artificially upon treatment with various factors. In many biological instances, stem cells are also “multipotent” because they can produce progeny of more than one distinct cell type, but this is not required for “stem-ness.”

[0130] Self-renewal is another important aspect of the stem cell, as used in this document. In theory, self-renewal can occur by either of two major mechanisms. Stem cells may divide asymmetrically, with one daughter retaining the stem state and the other daughter expressing some distinct other specific function and phenotype. Alternatively, some of the stem cells in a population can divide symmetrically into two stems, thus maintaining some stem cells in the population as a whole, while other cells in the population give rise to differentiated progeny only. Generally, “progenitor cells” have a cellular phenotype that is more primitive (i.e., is at an earlier step along a developmental pathway or progression than is a fully differentiated cell). Often, progenitor cells also have significant or very high proliferative potential. Progenitor cells can give rise to multiple distinct differentiated cell types or to a single differentiated cell type, depending on the developmental pathway and on the environment in which the cells develop and differentiate.

[0131] In the context of cell ontogeny, the adjective “differentiated,” or “differentiating” is a relative term. A “differentiated cell” is a cell that has progressed further down the developmental pathway than the cell to which it is being compared. Thus, stem cells can differentiate to lineage-restricted precursor cells (such as a hematopoietic progenitor cell), which in turn can differentiate into other types of precursor cells further down the pathway (such as an erythrocyte precursor), and then to an end-stage differentiated cell, such as an erythrocyte, which plays a characteristic role in a certain tissue type, and may or may not retain the capacity to proliferate further.

[0132] “Hematopoietic progenitor cell” as the term is used herein, refers to cells of a stem cell lineage that give rise to all the blood cell types including the erythroid (erythrocytes or red blood cells (RBCs)), myeloid (monocytes and macrophages, neutrophils, basophils, eosinophils, megakaryocytes/platelets, and dendritic cells), and lymphoid (T-cells, B-cells, NK-cells).

[0133] A “cell of the erythroid lineage” indicates that the cell being contacted is a cell that undergoes erythropoiesis such that upon final differentiation it forms an erythrocyte or red blood cell. Such cells originate from bone marrow hematopoietic progenitor cells. Upon exposure to specific growth factors and other components of the hematopoietic microenvironment, hematopoietic progenitor cells can mature through a series of intermediate differentiation cellular types, all intermediates of the erythroid lineage, into RBCs. Thus, cells of the “erythroid lineage,” as the term is used herein, comprise hematopoietic progenitor cells, rubriblasts, prorubricytes, erythroblasts, metarubricytes, reticulocytes, and erythrocytes.

[0134] In some embodiments, the hematopoietic progenitor cell has at least one of the cell surface marker characteristic of hematopoietic progenitor cells: CD34+, CD59+, Thyl/CD90+, CD381o/−, and C-kit/CDI 17+. In some embodiments, the hematopoietic progenitor are CD34+.

[0135] In some embodiments, the hematopoietic progenitor cell is a peripheral blood stem cell obtained from the patient after the patient has been treated with granulocyte colony stimulating factor (optionally in combination with Plerixaflor). In illustrative embodiments, CD34+ cells are enriched using CliniMACS® Cell Selection System (Miltenyi Biotec). In some embodiments, CD34+ cells are weakly stimulated in serum-free medium (e.g., CellGrow SCGM media, CellGenix) with cytokines (e.g., SCF, rhTPO, rhFLT3) before genome editing. In some embodiments, addition of SR1 and dmPGE2 and/or other factors is contemplated to improve long-term engraftment.

[0136] In some embodiments, the hematopoietic progenitor cells of the erythroid lineage have the cell surface marker characteristic of the erythroid lineage: such as CD71 and TerI 19.

### Induced Pluripotent Stem Cells

[0137] In some embodiments, the genetically engineered human cells described herein are derived from induced pluripotent stem cells (iPSCs). An advantage of using iPSCs is that the cells can be derived from the same subject to which the progenitor cells are to be administered. That is, a somatic cell can be obtained from a subject, reprogrammed to an induced pluripotent stem cell, and then re-differentiated into a hematopoietic progenitor cell to be administered to the subject (e.g., autologous cells). Since the progenitors are essentially derived from an autologous source, the risk of engraftment rejection or allergic responses is reduced compared to the use of cells from another subject or group of subjects. In some embodiments, the hematopoietic progenitors are derived from non-autologous sources. In addition, the use of iPSCs negates the need for cells obtained from an embryonic source. Thus, in one embodiment, the stem cells used in the disclosed methods are not embryonic stem cells.

[0138] Although differentiation is generally irreversible under physiological contexts, several methods have been recently developed to reprogram somatic cells to iPSCs. Exemplary methods are known to those of skill in the art and are described briefly herein below.

[0139] As used herein, the term “reprogramming” refers to a process that alters or reverses the differentiation state of a differentiated cell (e.g., a somatic cell). Stated another way, reprogramming refers to a process of driving the differentiation of a cell backwards to a more undifferentiated or more primitive type of cell. It should be noted that placing many primary cells in culture can lead to some loss of fully differentiated characteristics. Thus, simply culturing such cells included in the term differentiated cells does not render these cells non-differentiated cells (e.g., undifferentiated cells) or pluripotent cells. The transition of a differentiated cell to pluripotency requires a reprogramming stimulus beyond the stimuli that lead to partial loss of differentiated character in culture. Reprogrammed cells also have the characteristic of the capacity of extended passaging without loss of growth potential, relative to primary cell parents, which generally have capacity for only a limited number of divisions in culture.

[0140] The cell to be reprogrammed can be either partially or terminally differentiated prior to reprogramming. In some embodiments, reprogramming encompasses complete reversion of the differentiation state of a differentiated cell (e.g., a somatic cell) to a pluripotent state or a multipotent state. In some embodiments, reprogramming encompasses complete or partial reversion of the differentiation state of a differentiated cell (e.g., a somatic cell) to an undifferentiated cell (e.g., an embryonic-like cell). Reprogramming can result in expression of particular genes by the cells, the expression of which further contributes to reprogramming. In certain embodiments described herein, reprogramming of a differentiated cell (e.g., a somatic cell) causes the differentiated cell to assume an undifferentiated state (e.g., is an undifferentiated cell). The resulting cells are referred to as “reprogrammed cells,” or “induced pluripotent stem cells (iPSCs or iPS cells).”

[0141] Reprogramming can involve alteration, e.g., reversal, of at least some of the heritable patterns of nucleic acid modification (e.g., methylation), chromatin condensation, epigenetic changes, genomic imprinting, etc., that occur during cellular differentiation. Reprogramming is distinct from simply maintaining the existing undifferentiated state of a cell that is already pluripotent or maintaining the existing less than fully differentiated state of a cell that is already a multipotent cell (e.g., a hematopoietic stem cell). Reprogramming is also distinct from promoting the self-renewal or proliferation of cells that are already pluripotent or multipotent, although the compositions and methods described herein can also be of use for such purposes, in some embodiments.

[0142] The specific approach or method used to generate pluripotent stem cells from somatic cells is not critical to the claimed invention. Thus, any method that reprograms a somatic cell to the pluripotent phenotype would be appropriate for use in the methods described herein.

[0143] Reprogramming methodologies for generating pluripotent cells using defined combinations of transcription factors have been described. Mouse somatic cells can be converted to ES cell-like cells with expanded developmental potential by the direct transduction of Oct4, Sox2, Klf4, and c-Myc; see, e.g., Takahashi and Yamanaka, Cell 126(4): 663-76 (2006). iPSCs resemble ES cells as they restore the pluripotency-associated transcriptional circuitry and much of the epigenetic landscape. In addition, mouse iPSCs satisfy all the standard assays for pluripotency: specifically, in vitro differentiation into cell types of the three germ layers, teratoma formation, contribution to chimeras, germline transmission [see, e.g., Maherali and Hochedlinger, Cell Stem Cell. 3(6):595-605 (2008)], and tetraploid complementation.

[0144] Human iPSCs can be obtained using similar transduction methods, and the transcription factor trio, OCT4, SOX2, and NANOG, has been established as the core set of transcription factors that govern pluripotency; see, e.g., Budniatzky and Gepstein, Stem Cells Transl Med. 3(4):448-57 (2014); Barrett et al., Stem Cells Trans Med 3:1-6 sctm.2014-0121 (2014); Focosi et al., Blood Cancer Journal 4: e211 (2014); and references cited therein. The production of iPSCs can be achieved by the introduction of nucleic acid sequences encoding stem cell-associated genes into an adult, somatic cell, historically using viral vectors.

[0145] iPSCs can be generated or derived from terminally differentiated somatic cells, as well as from adult stem cells, or somatic stem cells. That is, a non-pluripotent progenitor cell can be rendered pluripotent or multipotent by reprogramming. In such instances, it may not be necessary to include as many reprogramming factors as required to reprogram a terminally differentiated cell. Further, reprogramming can be induced by the non-viral introduction of reprogramming factors, e.g., by introducing the proteins themselves, or by introducing nucleic acids that encode the reprogramming factors, or by introducing messenger RNAs that upon translation produce the reprogramming factors (see e.g., Warren et al., Cell Stem Cell, 7(5):618-30 (2010).

[0146] Reprogramming can be achieved by introducing a combination of nucleic acids encoding stem cell-associated genes including, for example Oct-4 (also known as Oct-3/4 or Pouf51), Soxl, Sox2, Sox3, Sox 15, Sox 18, NANOG, Klfl, Klf2, Klf4, Klf5, NR5A2, c-Myc, 1-Myc, n-Myc, Rem2, Tert, and LIN28. In one embodiment, reprogramming using the methods and compositions described herein can further comprise introducing one or more of Oct-3/4, a member of the Sox family, a member of the Klf family, and a member of the Myc family to a somatic cell. In one embodiment, the methods and compositions described herein further comprise introducing one or more of each of Oct 4, Sox2, Nanog, c-MYC and Klf4 for reprogramming. As noted above, the exact method used for reprogramming is not necessarily critical to the methods and compositions described herein. However, where cells differentiated from the reprogrammed cells are to be used in, e.g., human therapy, in one embodiment the reprogramming is not effected by a method that alters the genome. Thus, in such embodiments, reprogramming is achieved, e.g., without the use of viral or plasmid vectors.

[0147] The efficiency of reprogramming (i.e., the number of reprogrammed cells) derived from a population of starting cells can be enhanced by the addition of various small molecules as shown by Shi et al., Cell-Stem Cell 2:525-528 (2008); Huangfu et al., Nature Biotechnology 26(7):795-797 (2008) and Marson et al., Cell-Stem Cell 3: 132-135 (2008). Thus, an agent or combination of agents that enhance the efficiency or rate of induced pluripotent stem cell production can be used in the production of patient-specific or disease-specific iPSCs. Some non-limiting examples of agents that enhance reprogramming efficiency include soluble Wnt, Wnt conditioned media, BIX-01294 (a G9a histone methyltransferase), PD0325901 (a MEK inhibitor), DNA methyltransferase inhibitors, histone deacetylase (HDAC) inhibitors, valproic acid, 5′-azacytidine, dexamethasone, suberoylanilide, hydroxamic acid (SAHA), vitamin C, and trichostatin (TSA), among others.

[0148] Other non-limiting examples of reprogramming enhancing agents include: Suberoylanilide Hydroxamic Acid (SAHA (e.g., MK0683, vorinostat) and other hydroxamic acids), BML-210, Depudecin (e.g., (−)-Depudecin), HC Toxin, Nullscript (4-(I,3-Dioxo-IH,3H-benzo[de]isoquinolin-2-yl)-N-hydroxybutanamide), Phenylbutyrate (e.g., sodium phenylbutyrate) and Valproic Acid ((VP A) and other short chain fatty acids), Scriptaid, Suramin Sodium, Trichostatin A (TSA), APHA Compound 8, Apicidin, Sodium Butyrate, pivaloyloxymethyl butyrate (Pivanex, AN-9), Trapoxin B, Chlamydocin, Depsipeptide (also known as FR901228 or FK228), benzamides (e.g., Cl-994 (e.g., N-acetyl dinaline) and MS-27-275), MGCD0103, NVP-LAQ-824, CBHA (m-carboxycinnaminic acid bishydroxamic acid), JNJ16241199, Tubacin, A-161906, proxamide, oxamflatin, 3-Cl-UCHA (e.g., 6-(3-chlorophenylureido)caproic hydroxamic acid), AOE (2-amino-8-oxo-9, 10-epoxydecanoic acid), CHAP31 and CHAP 50. Other reprogramming enhancing agents include, for example, dominant negative forms of the HDACs (e.g., catalytically inactive forms), siRNA inhibitors of the HDACs, and antibodies that specifically bind to the HDACs. Such inhibitors are available, e.g., from BIOMOL International, Fukasawa, Merck Biosciences, Novartis, Gloucester Pharmaceuticals, Titan Pharmaceuticals, MethylGene, and Sigma Aldrich.

[0149] To confirm the induction of pluripotent stem cells for use with the methods described herein, isolated clones can be tested for the expression of a stem cell marker. Such expression in a cell derived from a somatic cell identifies the cells as induced pluripotent stem cells. Stem cell markers are selected from the non-limiting group including SSEA3, SSEA4, CD9, Nanog, Fbxl5, Ecatl, Esgl, Eras, Gdf3, Fgf4, Cripto, Daxl, Zpf296, Slc2a3, Rexl, Utfl, and Natl. In one embodiment, a cell that expresses Oct4 or Nanog is identified as pluripotent. Methods for detecting the expression of such markers can include, for example, RT-PCR and immunological methods that detect the presence of the encoded polypeptides, such as Western blots or flow cytometric analyses. In some embodiments, detection does not involve only RT-PCR, but also includes detection of protein markers. Intracellular markers may be best identified via RT-PCR, or protein detection methods such as immunocytochemistry, while cell surface markers are readily identified, e.g., by immunocytochemistry.

[0150] The pluripotent stem cell character of isolated cells can be confirmed by tests evaluating the ability of the iPSCs to differentiate to cells of each of the three germ layers. As one example, teratoma formation in nude mice can be used to evaluate the pluripotent character of the isolated clones. The cells are introduced to nude mice and histology and/or immunohistochemistry is performed on a tumor arising from the cells. The growth of a tumor comprising cells from all three germ layers, for example, further indicates that the cells are pluripotent stem cells.

### Genome Editing

[0151] Genome editing generally refers to the process of modifying the nucleotide sequence of a genome, preferably in a precise or predetermined manner. Examples of methods of genome editing described herein include methods of using site-directed nucleases to cut DNA at precise target locations in the genome, thereby creating double-strand or single-strand DNA breaks at particular locations within the genome. Such breaks can be and regularly are repaired by natural, endogenous cellular processes such as homology-directed repair (HDR) and non-homologous end-joining (NHEJ), as recently reviewed in Cox et al., Nature Medicine 21(2), 121-31 (2015). NHEJ directly joins the DNA ends resulting from a double-strand break sometimes with the loss or addition of nucleotide sequence which may disrupt or enhance gene expression. HDR utilizes a homologous sequence, or donor sequence, as a template for inserting a defined DNA sequence at the break point. The homologous sequence may be in the endogenous genome, such as a sister chromatid. Alternatively, the donor may be an exogenous nucleic acid such as a plasmid, a single-strand oligonucleotide, a duplex oligonucleotide or a virus, that has regions of high homology with the nuclease-cleaved locus, but which may also contain additional sequence or sequence changes including deletions that can be incorporated into the cleaved target locus. A third repair mechanism is microhomology-mediated end joining (MMEJ), also referred to as “Alternative NHEJ, in which the genetic outcome is similar to NHEJ in that small deletions and insertions can occur at the cleavage site. MMEJ makes use of homologous sequences of a few basepairs flanking the DNA break site to drive a more favored DNA end joining repair outcome, and recent reports have further elucidated the molecular mechanism of this process; see, e.g., Cho and Greenberg, Nature 518, 174-76 (2015); Kent et al., Nature Structural and Molecular Biology, Adv. Online doi:10.1038/nsmb.2961(2015); Mateos-Gomez et al., Nature 518, 254-57 (2015); Ceccaldi et al., Nature 528, 258-62 (2015). In some instances it may be possible to predict likely repair outcomes based on analysis of potential microhomologies at the site of the DNA break.

[0152] Each of these genome editing mechanisms can be used to create desired genomic alterations. The first step in the genome editing process is to create typically one or two DNA breaks in the target locus as close as possible to the site of intended mutation. This can achieved via the use of targeted endonucleases, as described and illustrated herein.

[0153] Several distinct classes of nucleases have been engineered for use in genome editing. These include the zinc finger nucleases, transcription activator-like effector (TALE) nucleases, CRISPR/Cas nucleases, homing endonucleases (also termed meganucleases), and other nucleases; see, e.g., Hafez and Hausner, Genome 55, 553-69 (2012); Carroll, Ann. Rev. Biochem. 83, 409-39 (2014); Gupta and Musunuru, J. Clin. Invest. 124, 4154-61 (2014); and Cox et al., supra. These differ mainly in the way they bind DNA and create the targeted DNA double-strand (or single-strand) break (DSB). After creation of the DSB, essentially the same natural cellular DNA repair mechanisms of NHEJ or HDR are co-opted to achieve the desired genetic modification. Therefore, it is contemplated that genome editing technologies using any of these nucleases can be used to achieve genetic and therapeutic outcomes described herein.

### Zinc Finger Nucleases

[0154] Zinc finger nucleases (ZFNs) are modular proteins comprised of an engineered zinc finger DNA binding domain linked to the catalytic domain of the type II endonuclease FokI. Since FokI functions only as a dimer, a pair of ZFNs must be engineered to bind to cognate target “half-site” sequences on opposite DNA strands and with precise spacing between them to enable the catalytically active FokI dimer to form. Upon dimerization of the FokI domain, which itself has no sequence specificity per se, a DNA double-strand break is generated between the ZFN half-sites as the initiating step in genome editing.

[0155] The DNA binding domain of each ZFN is typically comprised of 3-6 zinc fingers of the abundant Cys2-His2 architecture, with each finger primarily recognizing a triplet of nucleotides on one strand of the target DNA sequence, although cross-strand interaction with a fourth nucleotide also can be important. Alteration of the amino acids of a finger in positions that make key contacts with the DNA alters the sequence specificity of a given finger. Thus, a four-finger zinc finger protein will selectively recognize a 12 bp target sequence, where the target sequence is a composite of the triplet preferences contributed by each finger, although triplet preference can be influenced to varying degrees by neighboring fingers. An important aspect then of ZFNs is that they can be readily retargeted to almost any genomic address simply by modifying individual fingers, although considerable expertise is required to do this well. In most applications of ZFNs, proteins of 4-6 fingers are used, recognizing 12-18 bp respectively. Hence, a pair of ZFNs will typically recognize a combined target sequence of 24-36 bp, not including the 5-7 bp spacer between half-sites. A target sequence of this length is likely to be unique in the human genome, assuming repetitive sequences or gene homologs are excluded during the design process. Nevertheless, the ZFN protein-DNA interactions are not absolute in their specificity and so off-target binding and cleavage events do occur, either as a heterodimer between the two ZFNs, or as a homodimer of one or other of the ZFNs. The latter possibility has been effectively eliminated by engineering the dimerization interface of the FokI domain to create “plus” and “minus” variants, also known as obligate heterodimer variants, which can only dimerize with each other and not with themselves. Forcing the obligate heterodimer prevents formation of the homodimer. This has greatly enhanced specificity of ZFNs as well as of any other nuclease that adopts these FokI variants.

[0156] A variety of ZFN-based systems have been described in the art, modifications thereof are regularly reported, and numerous references describe rules and parameters that are used to guide the design of ZFNs; see, e.g., Segal et al., Proc Natl Acad Sci USA 96(6):2758-63 (1999); Dreier B et al., J Mol Biol. 303(4):489-502 (2000); Liu Q et al., J Biol Chem. 277(6):3850-6 (2002); Dreier et al., J Biol Chem 280(42):35588-97 (2005); and Dreier et al., J Biol Chem. 276(31):29466-78 (2001).

### Transcription Activator-Like Effector Nucleases (TALENs)

[0157] TALENs represent another format of modular nucleases whereby, as with ZFNs, an engineered DNA binding domain is linked to the FokI nuclease domain, and a pair of TALENs operate in tandem to achieve targeted DNA cleavage. The major difference from ZFNs is the nature of the DNA binding domain and the associated target DNA sequence recognition properties. The TALEN DNA binding domain derives from TALE proteins originally described in the plant bacterial pathogen Xanthomonas sp. TALEs are comprised of tandem arrays of 33-35 amino acid repeats, with each repeat recognizing a single basepair in the target DNA sequence that is typically up to 20 bp in length, giving a total target sequence length of up to 40 bp. Nucleotide specificity of each repeat is determined by the repeat variable diresidue (RVD) which includes just two amino acids at positions 12 and 13. The bases guanine, adenine, cytosine and thymine are predominantly recognized by the four RVDs Asn-Asn, Asn-Ile, His-Asp and Asn-Gly, respectively. This constitutes a much simpler recognition code than for zinc fingers and thus represents an advantage over the latter for nuclease design. Nevertheless, as with ZFNs, the protein-DNA interactions of TALENs are not absolute in their specificity and TALENs have also benefitted from use of the obligate heterodimer variants of the FokI domain to reduce off-target activity.

[0158] Additional variants of the FokI domain have been created that are deactivated in their catalytic function. If one half of either a TALEN or a ZFN pair contains an inactive FokI domain then only single-strand DNA cleavage (nicking) will occur at the target site rather than a DSB. The outcome is comparable to the use of CRISPR/Cas9 “nickase” mutants in which one of the Cas9 cleavage domains has been deactivated. DNA nicks can be used to drive genome editing by HDR, but at lower efficiency than with a DSB. The main benefit is that off-target nicks are quickly and accurately repaired, unlike the DSB which is prone to NHEJ-mediated mis-repair.

[0159] A variety of TALEN-based systems have been described in the art, and modifications thereof are regularly reported; see, e.g., Boch, Science 326(5959):1509-12 (2009); Mak et al., Science 335(6069):716-9 (2012); and Moscou et al., Science 326(5959):1501 (2009). The use of TALENs based on the “Golden Gate” platform has been described by multiple groups; see, e.g., Cermak et al., Nucleic Acids Res. 39(12):e82 (2011); Li et al., Nucleic Acids Res. 39(14):6315-25(2011); Weber et al., PLoS One. 6(2):e16765 (2011); Wang et al., J Genet Genomics 41(6):339-47, Epub 2014 May 17 (2014); and Cermak T et al., Methods Mol Biol. 1239:133-59 (2015).

### Homing Endonucleases

[0160] Homing endonucleases (HE) are sequence-specific endonucleases that have long recognition sequences (14-44 base pairs) and cleave DNA with high specificity—often at sites unique in the genome. There are at least six known families of HE as classified by their structure, including LAGLIDADG (SEQ ID NO:161,199), GIY-YIG, His-Cis box, H-N-H, PD-(D/E)xK, and Vsr-like that are derived from a broad range of hosts including eukarya, protists, bacteria, archaea, cyanobacteria and phage. As with ZFNs and TALENs, HEs can be used to create a DSB at a target locus as the initial step in genome editing. In addition, some natural and engineered HEs cut only a single strand of the DNA, thereby functioning as site-specific nickases. The large target sequence of HEs and the specificity that offers has made them attractive candidates to create site-specific DSBs.

[0161] A variety of HE-based systems have been described in the art, and modifications thereof are regularly reported; see, e.g., the reviews by Steentoft et al., Glycobiology 24(8):663-80 (2014); Belfort and Bonocora, Methods Mol Biol. 1123:1-26 (2014); Hafez and Hausner, Genome 55(8):553-69 (2012); and references cited therein.

### MegaTAL/Tev-mTALEN/MegaTev

[0162] As further examples of hybrid nucleases, the MegaTAL platform and Tev-mTALEN platform use a fusion of the TALE DNA binding domains to catalytically active HEs, taking advantage of both the tunable DNA binding and specificity of the TALE as well as the cleavage sequence specificity of the HE; see, e.g., Boissel et al., NAR 42: 2591-2601 (2014); Kleinstiver et al., G3 4:1155-65 (2014); and Boissel and Scharenberg, Methods Mol. Biol. 1239: 171-96 (2015).

[0163] In a further variation, the MegaTev architecture is the fusion of a meganuclease (Mega) with the nuclease domain derived from the GIY-YIG homing endonuclease I-TevI (Tev). The two active sites are positioned ˜30 bp apart on DNA substrate and generate two DSBs with non-compatible cohesive ends; see, e.g., Wolfs et al., NAR 42, 8816-29 (2014). It is anticipated that other combinations of existing nuclease-based approaches will evolve and be useful in achieving the targeted genome modifications described herein.

dCas9-FokI and Other Nucleases

[0164] Combining the structural and functional properties of the nuclease platforms described above offers a further approach to genome editing that can potentially overcome some of the inherent deficiencies. As an example, the CRISPR genome editing system typically uses a single Cas9 endonuclease to create the DSB. The specificity of targeting is driven by a 20 nucleotide sequence in the guide RNA that undergoes Watson-Crick base-pairing with the target DNA (plus an additional 2 bases in the adjacent NAG or NGG PAM sequence in the case of Cas9 from S. pyogenes). Such a sequence is long enough to be unique in the human genome, however, the specificity of the RNA/DNA interaction is not absolute, with significant promiscuity sometimes tolerated particularly in the 5′ half of the target sequence, effectively reducing the number of bases that drive specificity. One solution to this has been to completely deactivate the Cas9 catalytic function—retaining only the RNA-guided DNA binding function—and instead fusing a FokI domain to the deactivated Cas9; see, e.g., Tsai et al., Nature Biotech 32: 569-76 (2014); and Guilinger et al., Nature Biotech. 32: 577-82 (2014). Since FokI must dimerize to become catalytically active, two guide RNAs are required to tether two Cas9-FokI fusions in close proximity to form the dimer and cleave DNA. This essentially doubles the number of bases in the combined target sites, thereby increasing the stringency of targeting by CRISPR-based systems.

[0165] As further example, fusion of the TALE DNA binding domain to a catalytically active HE such as I-TevI takes advantage of both the tunable DNA binding and specificity of the TALE as well as the cleavage sequence specificity of I-TevI, with the expectation that off-target cleavage may be further reduced.

### CRISPR/Cas Endonuclease System

[0166] A CRISPR (Clustered Regularly Interspaced Short Palindromic Repeats) genomic locus can be found in the genomes of many prokaryotes (e.g., bacteria and archaea). In prokaryotes, the CRISPR locus encodes products that function as a type of immune system to help defend the prokaryotes against foreign invaders such as virus and phage. There are three stages of CRISPR locus function: integration of new sequences into the locus, biogenesis of CRISPR RNA (crRNA), and silencing of foreign invader nucleic acid. Four types of CRISPR systems (e.g., Type I, Type II, Type III, Type U) have been identified.

[0167] A CRISPR locus includes a number of short repeating sequences referred to as “repeats.” The repeats can form hairpin structures and/or comprises unstructured single-stranded sequences. The repeats usually occur in clusters and frequently diverge between species. The repeats are regularly interspaced with unique intervening sequences referred to as “spacers,” resulting in a repeat-spacer-repeat locus architecture. The spacers are identical to or have high homology with known foreign invader sequences. A spacer-repeat unit encodes a crisprRNA (crRNA), which is processed into a mature form of the spacer-repeat unit. A crRNA comprises a “seed” or spacer sequence that is involved in targeting a target nucleic acid (in the naturally occurring form in prokaryotes the spacer sequence targets the foreign invader nucleic acid). A spacer sequence is located at the 5′ or 3′ end of the crRNA.

[0168] A CRISPR locus also comprises polynucleotide sequences encoding Crispr Associated (Cas) genes. Cas genes encode endonucleases involved in the biogenesis and the interference stages of crRNA function in prokaryotes. Some Cas genes comprises homologous secondary and/or tertiary structures.

### Type II CRISPR Systems

[0169] crRNA biogenesis in a Type II CRISPR system in nature requires a trans-activating CRISPR RNA (tracrRNA). The tracrRNA is modified by endogenous RNaseIII and then hybridizes to a crRNA repeat in the pre-crRNA array. Endogenous RNaseIII is recruited to cleave the pre-crRNA. Cleaved crRNAs are subjected to exoribonuclease trimming to produce the mature crRNA form (e.g., 5′ trimming). The tracrRNA remains hybridized to the crRNA, and the tracrRNA and the crRNA associate with a site-directed polypeptide (e.g., Cas9). The crRNA of the crRNA-tracrRNA-Cas9 complex guides the complex to a target nucleic acid to which the crRNA can hybridize. Hybridization of the crRNA to the target nucleic acid activates Cas9 for targeted nucleic acid cleavage. The target nucleic acid in a Type II CRISPR system is referred to as a protospacer adjacent motif (PAM). In nature, the PAM is essential to facilitate binding of a site-directed polypeptide (e.g., Cas9) to the target nucleic acid. Type II systems (also referred to as Nmeni or CASS4) are further subdivided into Type II-A (CASS4) and II-B (CASS4a). Jinek et al., Science, 337(6096):816-821 (2012) showed the CRISPR/Cas9 system is useful for RNA-programmable genome editing, and WO2013/176772 provides numerous examples and applications of the CRISPR/Cas endonuclease system for site-specific gene editing.

### Cas Genes/Polypeptides and Protospacer Adjacent Motifs

[0170] Exemplary CRISPR Cas polypeptides include Cas9 polypeptides in FIG. 1 of Fonfara et al., Nucleic Acids Research, 42: 2577-2590 (2014). The CRISPR-Cas gene naming system has undergone extensive rewriting since the Cas genes were discovered. FIG. 5 of Fonfara, supra, provides PAM sequences for Cas9 polypeptides from various species.

### Site-Directed Polypeptides

[0171] A site-directed polypeptide in the present disclosure is a nuclease used in genome editing to cleave DNA.

[0172] In the context of a CRISPR/Cas system herein, the site-directed polypeptide can bind to a guide RNA that, in turn, specifies the site in the target DNA to which the polypeptide is directed. In embodiments of CRISPR/Cas systems herein, the site-directed polypeptide is an endonuclease.

[0173] In some embodiments, a site-directed polypeptide comprises a plurality of nucleic acid-cleaving (i.e., nuclease) domains. Two or more nucleic acid-cleaving domains can be linked together via a linker. In some embodiments, the linker comprises a flexible linker. Linkers comprise 1, 2, 3, 4, 5, 6, 7, 8, 9, 10, 11, 12, 13, 14, 15, 16, 17, 18, 19, 20, 21, 22, 23, 24, 25, 30, 35, 40 or more amino acids in length.

[0174] Naturally-occurring wild-type Cas9 enzymes comprise two nuclease domains, an HNH nuclease domain and a RuvC domain. Herein, the “Cas9” refers to both naturally-occurring and recombinant Cas9s. Cas9 enzymes contemplated herein comprises a HNH or HNH-like nuclease domain and/or a RuvC or RuvC-like nuclease domain.

[0175] HNH or HNH-like domains comprise a McrA-like fold. HNH or HNH-like domains comprises two antiparallel β-strands and an α-helix. HNH or HNH-like domains comprises a metal binding site (e.g., divalent cation binding site). HNH or HNH-like domains can cleave one strand of a target nucleic acid (e.g., complementary strand of the crRNA targeted strand).

[0176] RuvC or RuvC-like domains comprise an RNaseH or RNaseH-like fold. RuvC/RNaseH domains are involved in a diverse set of nucleic acid-based functions including acting on both RNA and DNA. The RNaseH domain comprises 5 β-strands surrounded by a plurality of α-helices. RuvC/RNaseH or RuvC/RNaseH-like domains comprise a metal binding site (e.g., divalent cation binding site). RuvC/RNaseH or RuvC/RNaseH-like domains can cleave one strand of a target nucleic acid (e.g., non-complementary strand of double-stranded target DNA).

[0177] Site-directed polypeptides can introduce double-strand breaks or single-strand breaks in nucleic acid, (e.g., genomic DNA). The double-strand break can stimulate a cell's endogenous DNA-repair pathways (e.g., homology-dependent repair (HDR) and non-homologous end joining (NHEJ) or alternative non-homologous end joining (A-NHEJ) or microhomology-mediated end joining (MMEJ)). NHEJ can repair cleaved target nucleic acid without the need for a homologous template. This can sometimes result in small deletions or insertions (indels) in the target nucleic acid at the site of cleavage and can lead to disruption or alteration of gene expression. HDR can occur when a homologous repair template, or donor, is available. The homologous donor template comprises sequences that are homologous to sequences flanking the target nucleic acid cleavage site. The sister chromatid is generally used by the cell as the repair template. However, for the purposes of genome editing, the repair template is often supplied as an exogenous nucleic acid, such as a plasmid, duplex oligonucleotide, single-strand oligonucleotide or viral nucleic acid. With exogenous donor templates it is common to introduce additional nucleic acid sequence (such as a transgene) or modification (such as a single base change or a deletion) between the flanking regions of homology so additional or altered nucleic acid sequence also becomes incorporated into the target locus. MMEJ results in a genetic outcome that is similar to NHEJ in that small deletions and insertions can occur at the cleavage site. MMEJ makes use of homologous sequences of a few basepairs flanking the cleavage site to drive a favored end-joining DNA repair outcome. In some instances it may be possible to predict likely repair outcomes based on analysis of potential microhomologies in the nuclease target regions.

[0178] Thus, in some cases, homologous recombination is used to insert an exogenous polynucleotide sequence into the target nucleic acid cleavage site. An exogenous polynucleotide sequence is termed a donor polynucleotide herein. In some embodiments, the donor polynucleotide, a portion of the donor polynucleotide, a copy of the donor polynucleotide, or a portion of a copy of the donor polynucleotide is inserted into the target nucleic acid cleavage site. In some embodiments, the donor polynucleotide is an exogenous polynucleotide sequence, i.e., a sequence that does not naturally occur at the target nucleic acid cleavage site.

[0179] The modifications of the target DNA due to NHEJ and/or HDR can lead to, for example, mutations, deletions, alterations, integrations, gene correction, gene replacement, gene tagging, transgene insertion, nucleotide deletion, gene disruption, translocations and/or gene mutation. The processes of deleting genomic DNA and integrating non-native nucleic acid into genomic DNA are examples of genome editing.

[0180] In some embodiments, the site-directed polypeptide comprises an amino acid sequence having at least 10%, at least 15%, at least 20%, at least 30%, at least 40%, at least 50%, at least 60%, at least 70%, at least 75%, at least 80%, at least 85%, at least 90%, at least 95%, at least 99%, or 100%, amino acid sequence identity to a wild type exemplary site-directed polypeptide [e.g., Cas9 from S. pyogenes, US2014/0068797 Sequence ID No. 8 or Sapranauskas et al., Nucleic Acids Res, 39(21): 9275-9282 (2011)], and various other site-directed polypeptides).

[0181] In some embodiments, the site-directed polypeptide comprises an amino acid sequence having at least 10%, at least 15%, at least 20%, at least 30%, at least 40%, at least 50%, at least 60%, at least 70%, at least 75%, at least 80%, at least 85%, at least 90%, at least 95%, at least 99%, or 100%, amino acid sequence identity to the nuclease domain of a wild type exemplary site-directed polypeptide (e.g., Cas9 from S. pyogenes, supra).

[0182] In some embodiments, a site-directed polypeptide comprises at least 70, 75, 80, 85, 90, 95, 97, 99, or 100% identity to wild-type site-directed polypeptide (e.g., Cas9 from S. pyogenes, supra) over 10 contiguous amino acids. In some embodiments, a site-directed polypeptide comprises at most: 70, 75, 80, 85, 90, 95, 97, 99, or 100% identity to wild-type site-directed polypeptide (e.g., Cas9 from S. pyogenes, supra) over 10 contiguous amino acids. In some embodiments, a site-directed polypeptide comprises at least: 70, 75, 80, 85, 90, 95, 97, 99, or 100% identity to a wild-type site-directed polypeptide (e.g., Cas9 from S. pyogenes, supra) over 10 contiguous amino acids in a HNH nuclease domain of the site-directed polypeptide. In some embodiments, a site-directed polypeptide comprises at most: 70, 75, 80, 85, 90, 95, 97, 99, or 100% identity to a wild-type site-directed polypeptide (e.g., Cas9 from S. pyogenes, supra) over 10 contiguous amino acids in a HNH nuclease domain of the site-directed polypeptide. In some embodiments, a site-directed polypeptide comprises at least: 70, 75, 80, 85, 90, 95, 97, 99, or 100% identity to a wild-type site-directed polypeptide (e.g., Cas9 from S. pyogenes, supra) over 10 contiguous amino acids in a RuvC nuclease domain of the site-directed polypeptide. In some embodiments, a site-directed polypeptide comprises at most: 70, 75, 80, 85, 90, 95, 97, 99, or 100% identity to a wild-type site-directed polypeptide (e.g., Cas9 from S. pyogenes, supra) over 10 contiguous amino acids in a RuvC nuclease domain of the site-directed polypeptide.

[0183] In some embodiments, the site-directed polypeptide comprises a modified form of a wild type exemplary site-directed polypeptide. The modified form of the wild type exemplary site-directed polypeptide comprises a mutation that reduces the nucleic acid-cleaving activity of the site-directed polypeptide. In some embodiments, the modified form of the wild type exemplary site-directed polypeptide has less than 90%, less than 80%, less than 70%, less than 60%, less than 50%, less than 40%, less than 30%, less than 20%, less than 10%, less than 5%, or less than 1% of the nucleic acid-cleaving activity of the wild-type exemplary site-directed polypeptide (e.g., Cas9 from S. pyogenes, supra). The modified form of the site-directed polypeptide can have no substantial nucleic acid-cleaving activity. When a site-directed polypeptide is a modified form that has no substantial nucleic acid-cleaving activity, it is referred to herein as “enzymatically inactive.”

[0184] In some embodiments, the modified form of the site-directed polypeptide comprises a mutation such that it can induce a single-strand break (SSB) on a target nucleic acid (e.g., by cutting only one of the sugar-phosphate backbones of a double-strand target nucleic acid). In some embodiments, the mutation results in less than 90%, less than 80%, less than 70%, less than 60%, less than 50%, less than 40%, less than 30%, less than 20%, less than 10%, less than 5%, or less than 1% of the nucleic acid-cleaving activity in one or more of the plurality of nucleic acid-cleaving domains of the wild-type site directed polypeptide (e.g., Cas9 from S. pyogenes, supra). In some embodiments, the mutation results in one or more of the plurality of nucleic acid-cleaving domains retaining the ability to cleave the complementary strand of the target nucleic acid but reducing its ability to cleave the non-complementary strand of the target nucleic acid. In some embodiments, the mutation results in one or more of the plurality of nucleic acid-cleaving domains retaining the ability to cleave the non-complementary strand of the target nucleic acid but reducing its ability to cleave the complementary strand of the target nucleic acid. For example, residues in the wild type exemplary S. pyogenes Cas9 polypeptide such as Asp10, His840, Asn854 and Asn856 are mutated to inactivate one or more of the plurality of nucleic acid-cleaving domains (e.g., nuclease domains). In some embodiments, the residues to be mutated correspond to residues Asp10, His840, Asn854 and Asn856 in the wild type exemplary S. pyogenes Cas9 polypeptide (e.g., as determined by sequence and/or structural alignment). Non-limiting examples of mutations can include D10A, H840A, N854A or N856A. One skilled in the art will recognize that mutations other than alanine substitutions are suitable.

[0185] In some embodiments, a D10A mutation is combined with one or more of H840A, N854A, or N856A mutations to produce a site-directed polypeptide substantially lacking DNA cleavage activity. In some embodiments, a H840A mutation is combined with one or more of D10A, N854A, or N856A mutations to produce a site-directed polypeptide substantially lacking DNA cleavage activity. In some embodiments, a N854A mutation is combined with one or more of H840A, D10A, or N856A mutations to produce a site-directed polypeptide substantially lacking DNA cleavage activity. In some embodiments, a N856A mutation is combined with one or more of H840A, N854A, or D10A mutations to produce a site-directed polypeptide substantially lacking DNA cleavage activity. Site-directed polypeptides that comprise one substantially inactive nuclease domain are referred to herein as nickases.

[0186] Nickase variants of Cas9 can be used to increase the specificity of CRISPR-mediated genome editing. Wild type Cas9 is typically guided by a single guide RNA designed to hybridize with a specified ˜20 nt sequence in the target sequence (such as an endogenous genomic locus). However, several mismatches can be tolerated between the guide RNA and the target locus, effectively reducing the length of required homology in the target site to, for example, as little as 13 nt of homology and thereby resulting in elevated potential for binding and double-strand nucleic acid cleavage by the CRISPR/Cas9 complex elsewhere in the target genome—also known as off-target cleavage. Since nickase variants of Cas9 each only cut one strand, in order to create a double-strand break it is necessary for a pair of nickases to bind in close proximity and on opposite strands of the target nucleic acid, thereby creating a pair of nicks, which is the equivalent of a double-strand break. This requires that two separate guide RNAs—one for each nickase—must bind in close proximity and on opposite strands of the target nucleic acid. This requirement essentially doubles the minimum length of homology needed for the double-strand break to occur, thereby reducing the likelihood that a double-strand cleavage event will occur elsewhere in the genome, where the two guide RNA sites—if they exist—are unlikely to be sufficiently close to each other to enable the double-strand break to form. As described in the art, nickases can also be used to promote HDR versus NHEJ. HDR can be used to introduce selected changes into target sites in the genome through the use of specific donor sequences that effectively mediate the desired changes. Descriptions of various Crispr-Cas systems for use in gene editing can be found, e.g., in WO2013/176772, and in Nature Biotechnology 32, 347-355 (2014), and references cited therein.

[0187] Mutations contemplated include substitutions, additions, and deletions, or any combination thereof. In some embodiments, the mutation converts the mutated amino acid to alanine. In some embodiments, the mutation converts the mutated amino acid to another amino acid (e.g., glycine, serine, threonine, cysteine, valine, leucine, isoleucine, methionine, proline, phenylalanine, tyrosine, tryptophan, aspartic acid, glutamic acid, asparagines, glutamine, histidine, lysine, or arginine). In some embodiments, the mutation converts the mutated amino acid to a non-natural amino acid (e.g., selenomethionine). In some embodiments, the mutation converts the mutated amino acid to amino acid mimics (e.g., phosphomimics). In some embodiments, the mutation is a conservative mutation. For example, the mutation can convert the mutated amino acid to amino acids that resemble the size, shape, charge, polarity, conformation, and/or rotamers of the mutated amino acids (e.g., cysteine/serine mutation, lysine/asparagine mutation, histidine/phenylalanine mutation). In some embodiments, the mutation causes a shift in reading frame and/or the creation of a premature stop codon. In some embodiments mutations cause changes to regulatory regions of genes or loci that affect expression of one or more genes.

[0188] In some embodiments, the site-directed polypeptide (e.g., variant, mutated, enzymatically inactive and/or conditionally enzymatically inactive site-directed polypeptide) targets nucleic acid. In some embodiments, the site-directed polypeptide (e.g., variant, mutated, enzymatically inactive and/or conditionally enzymatically inactive endoribonuclease) can target RNA.

[0189] In some embodiments, the site-directed polypeptide comprises one or more non-native sequences (e.g., the site-directed polypeptide is a fusion protein).

[0190] In some embodiments, the site-directed polypeptide comprises an amino acid sequence comprising at least 15% amino acid identity to a Cas9 from a bacterium (e.g., S. pyogenes), a nucleic acid binding domain, and two nucleic acid cleaving domains (i.e., an HNH domain and a RuvC domain).

[0191] In some embodiments, the site-directed polypeptide comprises an amino acid sequence comprising at least 15% amino acid identity to a Cas9 from a bacterium (e.g., S. pyogenes), and two nucleic acid cleaving domains (i.e., an HNH domain and a RuvC domain).

[0192] In some embodiments, the site-directed polypeptide comprises an amino acid sequence comprising at least 15% amino acid identity to a Cas9 from a bacterium (e.g., S. pyogenes), and two nucleic acid cleaving domains, wherein one or both of the nucleic acid cleaving domains comprise at least 50% amino acid identity to a nuclease domain from Cas9 from a bacterium (e.g., S. pyogenes).

[0193] In some embodiments, the site-directed polypeptide comprises an amino acid sequence comprising at least 15% amino acid identity to a Cas9 from a bacterium (e.g., S. pyogenes), two nucleic acid cleaving domains (i.e., an HNH domain and a RuvC domain), and non-native sequence (for example, a nuclear localization signal) or a linker linking the site-directed polypeptide to a non-native sequence.

[0194] In some embodiments, the site-directed polypeptide comprises an amino acid sequence comprising at least 15% amino acid identity to a Cas9 from a bacterium (e.g., S. pyogenes), two nucleic acid cleaving domains (i.e., an HNH domain and a RuvC domain), wherein the site-directed polypeptide comprises a mutation in one or both of the nucleic acid cleaving domains that reduces the cleaving activity of the nuclease domains by at least 50%.

[0195] In some embodiments, the site-directed polypeptide comprises an amino acid sequence comprising at least 15% amino acid identity to a Cas9 from a bacterium (e.g., S. pyogenes), and two nucleic acid cleaving domains (i.e., an HNH domain and a RuvC domain), wherein one of the nuclease domains comprises mutation of aspartic acid 10, and/or wherein one of the nuclease domains comprises mutation of histidine 840, and wherein the mutation reduce the cleaving activity of the nuclease domain(s) by at least 50%.

### Nucleic Acid-Targeting Nucleic Acid

[0196] The present disclosure provides a nucleic acid-targeting nucleic acid that can direct the activities of an associated polypeptide (e.g., a site-directed polypeptide) to a specific target sequence within a target nucleic acid. In some embodiments, the nucleic acid-targeting nucleic acid is an RNA. A nucleic acid-targeting RNA is referred to as a “guide RNA” herein. A guide RNA comprises at least a spacer sequence that hybridizes to a target nucleic acid sequence of interest, a CRISPR repeat sequence and a tracrRNA sequence. In the guide RNA, the CRISPR repeat sequence and tracrRNA sequence hybridize to each other to form a duplex. The duplex binds a site-directed polypeptide such that the guide RNA and site-direct polypeptide form a complex. The nucleic acid-targeting nucleic acid provides target specificity to the complex by virtue of its association with the site-directed polypeptide. The nucleic acid-targeting nucleic acid thus directs the activity of the site-directed polypeptide.

[0197] gRNA spacer sequences for targeting the globin locus have been identified in SEQ ID NOs:1-161,197 and 161,200-161,312.

[0198] In some embodiments, the nucleic acid-targeting nucleic acid is a double-molecule guide RNA. In some embodiments, the nucleic acid-targeting nucleic acid is a single-molecule guide RNA.

[0199] A double-molecule guide RNA comprises two strands of RNA. The first strand comprises in the 5′ to 3′ direction, an optional spacer extension sequence, a spacer sequence and a minimum CRISPR repeat sequence. The second strand comprises a minimum tracrRNA sequence (complementary to the minimum CRISPR repeat sequence), a 3′ tracrRNA sequence and an optional tracrRNA extension sequence.

[0200] A single-molecule guide RNA comprises in the 5′ to 3′ direction, an optional spacer extension sequence, a spacer sequence, a minimum CRISPR repeat sequence, a single-molecule guide linker, a minimum tracrRNA sequence, a 3′ tracrRNA sequence and an optional tracrRNA extension sequence. The optional tracrRNA extension may comprise elements that contribute additional functionality (e.g., stability) to the guide RNA. The single-molecule guide linker links the minimum CRISPR repeat and the minimum tracrRNA sequence to form a hairpin structure. The optional tracrRNA extension comprises one or more hairpins.

[0201] By way of illustration, guide RNAs used in the Crispr-Cas system, or other smaller RNAs can be readily synthesized by chemical means as illustrated below and described in the art. While chemical synthetic procedures are continually expanding, purifications of such RNAs by procedures such as high performance liquid chromatography (HPLC, which avoids the use of gels such as PAGE) tends to become more challenging as polynucleotide lengths increase significantly beyond a hundred or so nucleotides. One approach used for generating RNAs of greater length is to produce two or more molecules that are ligated together. Much longer RNAs, such as those encoding a Cas9 endonuclease, are more readily generated enzymatically. Various types of RNA modifications can be introduced during or after chemical synthesis and/or enzymatic generation of RNAs, e.g., modifications that enhance stability, reduced the likelihood or degree of innate immune response, and/or enhance other attributes, as described in the art.

### Spacer Extension Sequence

[0202] In some embodiments of nucleic acid-targeting nucleic acids, a spacer extension sequence can provide stability and/or provide a location for modifications of a nucleic acid-targeting nucleic acid. In some embodiments, a spacer extension sequence is provided. A spacer extension sequence can have a length of more than 1, 5, 10, 15, 20, 25, 30, 35, 40, 45, 50, 60, 70, 80, 90, 100, 120, 140, 160, 180, 200, 220, 240, 260, 280, 300, 320, 340, 360, 380, 400, 1000, 2000, 3000, 4000, 5000, 6000, or 7000 or more nucleotides. A spacer extension sequence can have a length of less than 1, 5, 10, 15, 20, 25, 30, 35, 40, 45, 50, 60, 70, 80, 90, 100, 120, 140, 160, 180, 200, 220, 240, 260, 280, 300, 320, 340, 360, 380, 400, 1000, 2000, 3000, 4000, 5000, 6000, 7000 or more nucleotides. In some embodiments, a spacer extension sequence comprises less than 10 nucleotides in length. In some embodiments, a spacer extension sequence comprises between 10 and 30 nucleotides in length. In some embodiments, a spacer extension sequence comprises between 30-70 nucleotides in length.

[0203] In some embodiments, the spacer extension sequence comprises another moiety (e.g., a stability control sequence, an endoribonuclease binding sequence, a ribozyme). In some embodiments, the moiety increases the stability of a nucleic acid targeting nucleic acid. In some embodiments, the moiety is a transcriptional terminator segment (i.e., a transcription termination sequence). In some embodiments, the moiety functions in a eukaryotic cell. In some embodiments, the moiety functions in a prokaryotic cell. In some embodiments, the moiety functions in both eukaryotic and prokaryotic cells.

[0204] Non-limiting examples of suitable moieties include: 5′ cap (e.g., a 7-methylguanylate cap (m7 G)), a riboswitch sequence (e.g., to allow for regulated stability and/or regulated accessibility by proteins and protein complexes), a sequence that forms a dsRNA duplex (i.e., a hairpin), a sequence that targets the RNA to a subcellular location (e.g., nucleus, mitochondria, chloroplasts, and the like), a modification or sequence that provides for tracking (e.g., direct conjugation to a fluorescent molecule, conjugation to a moiety that facilitates fluorescent detection, a sequence that allows for fluorescent detection, etc.), and/or a modification or sequence that provides a binding site for proteins (e.g., proteins that act on DNA, including transcriptional activators, transcriptional repressors, DNA methyltransferases, DNA demethylases, histone acetyltransferases, histone deacetylases, and the like).

### Spacer Sequence

[0205] The spacer sequence hybridizes to a sequence in a target nucleic acid of interest. The spacer of a nucleic acid-targeting nucleic acid interacts with a target nucleic acid in a sequence-specific manner via hybridization (i.e., base pairing). The nucleotide sequence of the spacer thus varies depending on the sequence of the target nucleic acid of interest.

[0206] In a CRISPR/Cas system herein, the spacer sequence is designed to hybridize to a target nucleic acid that is located 5′ of a PAM of the Cas9 enzyme used in the system. Each Cas9 enzyme has a particular PAM sequence it recognizes in target DNA. For example, S. pyogenes recognizes in a target nucleic acid a PAM that comprises the sequence 5′-NRG-3′, where R comprises either A or G, where N is any nucleotide and N is immediately 3′ of the target nucleic acid sequence targeted by the spacer sequence.

[0207] In some embodiments, the target nucleic acid sequence comprises 20 nucleotides. In some embodiments, the target nucleic acid comprises less than 20 nucleotides. In some embodiments, the target nucleic acid comprises at least: 5, 10, 15, 16, 17, 18, 19, 20, 21, 22, 23, 24, 25, 30 or more nucleotides. In some embodiments, the target nucleic acid comprises at most: 5, 10, 15, 16, 17, 18, 19, 20, 21, 22, 23, 24, 25, 30 or more nucleotides. In some embodiments, the target nucleic acid sequence comprises 20 bases immediately 5′ of the first nucleotide of the PAM. For example, in a sequence comprising 5′-NNNNNNNNNNNNNNNNNNNNNRG-3′ (SEQ ID NO:161,198), the target nucleic acid comprises the sequence that corresponds to the Ns, wherein N is any nucleotide.

[0208] In some embodiments, the spacer sequence that hybridizes to the target nucleic acid has a length at least about 6 nt. The spacer sequence can be at least about 6 nt, at least about 10 nt, at least about 15 nt, at least about 18 nt, at least about 19 nt, at least about 20 nt, at least about 25 nt, at least about 30 nt, at least about 35 nt or at least about 40 nt, from about 6 nt to about 80 nt, from about 6 nt to about 50 nt, from about 6 nt to about 45 nt, from about 6 nt to about 40 nt, from about 6 nt to about 35 nt, from about 6 nt to about 30 nt, from about 6 nt to about 25 nt, from about 6 nt to about 20 nt, from about 6 nt to about 19 nt, from about 10 nt to about 50 nt, from about 10 nt to about 45 nt, from about 10 nt to about 40 nt, from about 10 nt to about 35 nt, from about 10 nt to about 30 nt, from about 10 nt to about 25 nt, from about 10 nt to about 20 nt, from about 10 nt to about 19 nt, from about 19 nt to about 25 nt, from about 19 nt to about 30 nt, from about 19 nt to about 35 nt, from about 19 nt to about 40 nt, from about 19 nt to about 45 nt, from about 19 nt to about 50 nt, from about 19 nt to about 60 nt, from about 20 nt to about 25 nt, from about 20 nt to about 30 nt, from about 20 nt to about 35 nt, from about 20 nt to about 40 nt, from about 20 nt to about 45 nt, from about 20 nt to about 50 nt, or from about 20 nt to about 60 nt. In some embodiments, the spacer sequence comprises 20 nucleotides. In some embodiments, the spacer comprises 19 nucleotides.

[0209] In some embodiments, the percent complementarity between the spacer sequence and the target nucleic acid is at least about 30%, at least about 40%, at least about 50%, at least about 60%, at least about 65%, at least about 70%, at least about 75%, at least about 80%, at least about 85%, at least about 90%, at least about 95%, at least about 97%, at least about 98%, at least about 99%, or 100%. In some embodiments, the percent complementarity between the spacer sequence and the target nucleic acid is at most about 30%, at most about 40%, at most about 50%, at most about 60%, at most about 65%, at most about 70%, at most about 75%, at most about 80%, at most about 85%, at most about 90%, at most about 95%, at most about 97%, at most about 98%, at most about 99%, or 100%. In some embodiments, the percent complementarity between the spacer sequence and the target nucleic acid is 100% over the six contiguous 5′-most nucleotides of the target sequence of the complementary strand of the target nucleic acid. In some embodiments, the percent complementarity between the spacer sequence and the target nucleic acid is at least 60% over about 20 contiguous nucleotides.

[0210] In some embodiments, a spacer sequence is designed or chosen using a computer program. The computer program can use variables such as predicted melting temperature, secondary structure formation, and predicted annealing temperature, sequence identity, genomic context, chromatin accessibility, % GC, frequency of genomic occurrence (e.g., of sequences that are identical or are similar but vary in one or more spots as a result of mismatch, insertion or deletion), methylation status, presence of SNPs, and the like.

### Minimum CRISPR Repeat Sequence

[0211] In some embodiments, a minimum CRISPR repeat sequence is a sequence with at least: about 30%, about 40%, about 50%, about 60%, about 65%, about 70%, about 75%, about 80%, about 85%, about 90%, about 95%, or 100% sequence identity to a reference CRISPR repeat sequence (e.g., crRNA from S. pyogenes).

[0212] A minimum CRISPR repeat comprises nucleotides that can hybridize to a minimum tracrRNA sequence in a cell. The minimum CRISPR repeat and a minimum tracrRNA sequence form a duplex, i.e. a base-paired double-stranded structure. Together, the minimum CRISPR repeat and the minimum tracrRNA sequence bind to the site-directed polypeptide. At least a part of the minimum CRISPR repeat sequence hybridizes to the minimum tracrRNA sequence. In some embodiments, at least a part of the minimum CRISPR repeat sequence comprises at least: about 30%, about 40%, about 50%, about 60%, about 65%, about 70%, about 75%, about 80%, about 85%, about 90%, about 95%, or 100% complementary to the minimum tracrRNA sequence. In some embodiments, at least a part of the minimum CRISPR repeat sequence comprises at most: about 30%, about 40%, about 50%, about 60%, about 65%, about 70%, about 75%, about 80%, about 85%, about 90%, about 95%, or 100% complementary to the minimum tracrRNA sequence.

[0213] The minimum CRISPR repeat sequence can have a length of from about 7 nucleotides to about 100 nucleotides. For example, the length of the minimum CRISPR repeat sequence is from about 7 nucleotides (nt) to about 50 nt, from about 7 nt to about 40 nt, from about 7 nt to about 30 nt, from about 7 nt to about 25 nt, from about 7 nt to about 20 nt, from about 7 nt to about 15 nt, from about 8 nt to about 40 nt, from about 8 nt to about 30 nt, from about 8 nt to about 25 nt, from about 8 nt to about 20 nt or from about 8 nt to about 15 nt, from about 15 nt to about 100 nt, from about 15 nt to about 80 nt, from about 15 nt to about 50 nt, from about 15 nt to about 40 nt, from about 15 nt to about 30 nt or from about 15 nt to about 25 nt. In some embodiments, the minimum CRISPR repeat sequence is approximately 9 nucleotides in length. In some embodiments, the minimum CRISPR repeat sequence is approximately 12 nucleotides in length.

[0214] In some embodiments, the minimum CRISPR repeat sequence is at least about 60% identical to a reference minimum CRISPR repeat sequence (e.g., wild type crRNA from S. pyogenes) over a stretch of at least 6, 7, or 8 contiguous nucleotides. For example, the minimum CRISPR repeat sequence is at least about 65% identical, at least about 70% identical, at least about 75% identical, at least about 80% identical, at least about 85% identical, at least about 90% identical, at least about 95% identical, at least about 98% identical, at least about 99% identical or 100% identical to a reference minimum CRISPR repeat sequence over a stretch of at least 6, 7, or 8 contiguous nucleotides.

Minimum tracrRNA Sequence

[0215] In some embodiments, a minimum tracrRNA sequence is a sequence with at least: about 30%, about 40%, about 50%, about 60%, about 65%, about 70%, about 75%, about 80%, about 85%, about 90%, about 95%, or 100% sequence identity to a reference tracrRNA sequence (e.g., wild type tracrRNA from S. pyogenes).

[0216] A minimum tracrRNA sequence comprises nucleotides that hybridize to a minimum CRISPR repeat sequence in a cell. A minimum tracrRNA sequence and a minimum CRISPR repeat sequence form a duplex, i.e. a base-paired double-stranded structure. Together, the minimum tracrRNA sequence and the minimum CRISPR repeat bind to a site-directed polypeptide. At least a part of the minimum tracrRNA sequence can hybridize to the minimum CRISPR repeat sequence. In some embodiments, the minimum tracrRNA sequence is at least: about 30%, about 40%, about 50%, about 60%, about 65%, about 70%, about 75%, about 80%, about 85%, about 90%, about 95%, or 100% complementary to the minimum CRISPR repeat sequence.

[0217] The minimum tracrRNA sequence can have a length of from about 7 nucleotides to about 100 nucleotides. For example, the minimum tracrRNA sequence can be from about 7 nucleotides (nt) to about 50 nt, from about 7 nt to about 40 nt, from about 7 nt to about 30 nt, from about 7 nt to about 25 nt, from about 7 nt to about 20 nt, from about 7 nt to about 15 nt, from about 8 nt to about 40 nt, from about 8 nt to about 30 nt, from about 8 nt to about 25 nt, from about 8 nt to about 20 nt or from about 8 nt to about 15 nt, from about 15 nt to about 100 nt, from about 15 nt to about 80 nt, from about 15 nt to about 50 nt, from about 15 nt to about 40 nt, from about 15 nt to about 30 nt or from about 15 nt to about 25 nt long. In some embodiments, the minimum tracrRNA sequence is approximately 9 nucleotides in length. In some embodiments, the minimum tracrRNA sequence is approximately 12 nucleotides. In some embodiments, the minimum tracrRNA consists of tracrRNA nt 23-48 described in Jinek et al., supra.

[0218] In some embodiments, the minimum tracrRNA sequence is at least about 60% identical to a reference minimum tracrRNA (e.g., wild type, tracrRNA from S. pyogenes) sequence over a stretch of at least: 6, 7, or 8 contiguous nucleotides. For example, the minimum tracrRNA sequence is at least: about 65% identical, about 70% identical, about 75% identical, about 80% identical, about 85% identical, about 90% identical, about 95% identical, about 98% identical, about 99% identical or 100% identical to a reference minimum tracrRNA sequence over a stretch of at least: 6, 7, or 8 contiguous nucleotides.

[0219] In some embodiments, the duplex between the minimum CRISPR RNA and the minimum tracrRNA comprises a double helix. In some embodiments, the duplex between the minimum CRISPR RNA and the minimum tracrRNA comprises at least about: 1, 2, 3, 4, 5, 6, 7, 8, 9, or 10 or more nucleotides. In some embodiments, the duplex between the minimum CRISPR RNA and the minimum tracrRNA comprises at most about: 1, 2, 3, 4, 5, 6, 7, 8, 9, or 10 or more nucleotides.

[0220] In some embodiments, the duplex comprises a mismatch (i.e., the two strands of the duplex are not 100% complementary). In some embodiments, the duplex comprises at least about: 1, 2, 3, 4, or 5 or mismatches. In some embodiments, the duplex comprises at most about: 1, 2, 3, 4, or 5 or mismatches. In some embodiments, the duplex comprises no more than 2 mismatches.

### Bulges

[0221] In some embodiments, there is a “bulge” in the duplex between the minimum CRISPR RNA and the minimum tracrRNA. The bulge is an unpaired region of nucleotides within the duplex. In some embodiments, the bulge contributes to the binding of the duplex to the site-directed polypeptide. A bulge comprises, on one side of the duplex, an unpaired 5′-XXXY-3′ where X is any purine and Y comprises a nucleotide that can form a wobble pair with a nucleotide on the opposite strand, and an unpaired nucleotide region on the other side of the duplex. The number of unpaired nucleotides on the two sides of the duplex can be different.

[0222] In one example, the bulge comprises an unpaired purine (e.g., adenine) on the minimum CRISPR repeat strand of the bulge. In some embodiments, a bulge comprises an unpaired 5′-AAGY-3′ of the minimum tracrRNA sequence strand of the bulge, where Y comprises a nucleotide that can form a wobble pairing with a nucleotide on the minimum CRISPR repeat strand.

[0223] In some embodiments, a bulge on the minimum CRISPR repeat side of the duplex comprises at least: 1, 2, 3, 4, or 5 or more unpaired nucleotides. In some embodiments, a bulge on the minimum CRISPR repeat side of the duplex comprises at most: 1, 2, 3, 4, or 5 or more unpaired nucleotides. In some embodiments, a bulge on the minimum CRISPR repeat side of the duplex comprises 1 unpaired nucleotide.

[0224] In some embodiments, a bulge on the minimum tracrRNA sequence side of the duplex comprises at least: 1, 2, 3, 4, 5, 6, 7, 8, 9, or 10 or more unpaired nucleotides. In some embodiments, a bulge on the minimum tracrRNA sequence side of the duplex comprises at most: 1, 2, 3, 4, 5, 6, 7, 8, 9, or 10 or more unpaired nucleotides. In some embodiments, a bulge on a second side of the duplex (e.g., the minimum tracrRNA sequence side of the duplex) comprises 4 unpaired nucleotides.

[0225] In some embodiments, a bulge comprises at least one wobble pairing. In some embodiments, a bulge comprises at most one wobble pairing. In some embodiments, a bulge comprises at least one purine nucleotide. In some embodiments, a bulge comprises at least 3 purine nucleotides. In some embodiments, a bulge sequence comprises at least 5 purine nucleotides. In some embodiments, a bulge sequence comprises at least one guanine nucleotide. In some embodiments, a bulge sequence comprises at least one adenine nucleotide.

### Hairpins

[0226] In various embodiments, one or more hairpins are located 3′ to the minimum tracrRNA in the 3′ tracrRNA sequence.

[0227] In some embodiments, the hairpin starts at least about: 1, 2, 3, 4, 5, 6, 7, 8, 9, 10, 15, or 20 or more nucleotides 3′ from the last paired nucleotide in the minimum CRISPR repeat and minimum tracrRNA sequence duplex. In some embodiments, the hairpin can start at most about: 1, 2, 3, 4, 5, 6, 7, 8, 9 or 10 or more nucleotides 3′ of the last paired nucleotide in the minimum CRISPR repeat and minimum tracrRNA sequence duplex.

[0228] In some embodiments, a hairpin comprises at least about: 1, 2, 3, 4, 5, 6, 7, 8, 9, 10, 15, or 20 or more consecutive nucleotides. In some embodiments, a hairpin comprises at most about: 1, 2, 3, 4, 5, 6, 7, 8, 9, 10, 15, or more consecutive nucleotides.

[0229] In some embodiments, a hairpin comprises a CC dinucleotide (i.e., two consecutive cytosine nucleotides).

[0230] In some embodiments, a hairpin comprises duplexed nucleotides (e.g., nucleotides in a hairpin, hybridized together). For example, a hairpin comprises a CC dinucleotide that is hybridized to a GG dinucleotide in a hairpin duplex of the 3′ tracrRNA sequence.

[0231] One or more of the hairpins can interact with guide RNA-interacting regions of a site-directed polypeptide.

[0232] In some embodiments, there are two or more hairpins, and in some embodiments there are three or more hairpins.

tracrRNA Sequence

[0233] In some embodiments, a 3′ tracr RNA sequence comprises a sequence with at least: about 30%, about 40%, about 50%, about 60%, about 65%, about 70%, about 75%, about 80%, about 85%, about 90%, about 95%, or 100% sequence identity to a reference tracrRNA sequence (e.g., a tracrRNA from S. pyogenes).

[0234] In some embodiments, the 3′ tracrRNA sequence has a length of from about 6 nucleotides to about 100 nucleotides. For example, the 3′ tracrRNA sequence can have a length of from about 6 nucleotides (nt) to about 50 nt, from about 6 nt to about 40 nt, from about 6 nt to about 30 nt, from about 6 nt to about 25 nt, from about 6 nt to about 20 nt, from about 6 nt to about 15 nt, from about 8 nt to about 40 nt, from about 8 nt to about 30 nt, from about 8 nt to about 25 nt, from about 8 nt to about 20 nt or from about 8 nt to about 15 nt, from about 15 nt to about 100 nt, from about 15 nt to about 80 nt, from about 15 nt to about 50 nt, from about 15 nt to about 40 nt, from about 15 nt to about 30 nt or from about 15 nt to about 25 nt. In some embodiments, the 3′ tracrRNA sequence has a length of approximately 14 nucleotides.

[0235] In some embodiments, the 3′ tracrRNA sequence is at least about 60% identical to a reference 3′ tracrRNA sequence (e.g., wild type 3′ tracrRNA sequence from S. pyogenes) over a stretch of at least: 6, 7, or 8 contiguous nucleotides. For example, the 3′ tracrRNA sequence is at least: about 60% identical, about 65% identical, about 70% identical, about 75% identical, about 80% identical, about 85% identical, about 90% identical, about 95% identical, about 98% identical, about 99% identical, or 100% identical, to a reference 3′ tracrRNA sequence (e.g., wild type 3′ tracrRNA sequence from S. pyogenes) over a stretch of at least 6, 7, or 8 contiguous nucleotides.

[0236] In some embodiments, a 3′ tracrRNA sequence comprises more than one duplexed region (e.g., hairpin, hybridized region). In some embodiments, a 3′ tracrRNA sequence comprises two duplexed regions.

[0237] In some embodiments, the 3′ tracrRNA sequence comprises a stem loop structure. In some embodiments, a stem loop structure in the 3′ tracrRNA) comprises at least: 1, 2, 3, 4, 5, 6, 7, 8, 9, 10, 15 or 20 or more nucleotides. In some embodiments, stem loop structure in the 3′ tracrRNA comprises at most: 1, 2, 3, 4, 5, 6, 7, 8, 9 or 10 or more nucleotides. In some embodiments, the stem loop structure comprises a functional moiety. For example, the stem loop structure may comprise an aptamer, a ribozyme, a protein-interacting hairpin, a CRISPR array, an intron, or an exon. In some embodiments, the stem loop structure comprises at least about: 1, 2, 3, 4, or 5 or more functional moieties. In some embodiments, the stem loop structure comprises at most about: 1, 2, 3, 4, or 5 or more functional moieties.

[0238] In some embodiments, the hairpin in the 3′ tracrRNA sequence comprises a P-domain. In some embodiments, the P-domain comprises a double-stranded region in the hairpin.

tracrRNA Extension Sequence

[0239] A tracrRNA extension sequence may be provided whether or not the tracrRNA is in the context of single-molecule guides or double-molecule guides. In some embodiments, a tracrRNA extension sequence has a length of from about 1 nucleotide to about 400 nucleotides. In some embodiments, a tracrRNA extension sequence has a length of more than: 1, 5, 10, 15, 20, 25, 30, 35, 40, 45, 50, 60, 70, 80, 90, 100, 120, 140, 160, 180, 200, 220, 240, 260, 280, 300, 320, 340, 360, 380, 400 nucleotides. In some embodiments, a tracrRNA extension sequence has a length from about 20 to about 5000 or more nucleotides. In some embodiments, a tracrRNA extension sequence has a length of more than 1000 nucleotides. In some embodiments, a tracrRNA extension sequence has a length of less than 1, 5, 10, 15, 20, 25, 30, 35, 40, 45, 50, 60, 70, 80, 90, 100, 120, 140, 160, 180, 200, 220, 240, 260, 280, 300, 320, 340, 360, 380, 400 or more nucleotides. In some embodiments, a tracrRNA extension sequence can have a length of less than 1000 nucleotides. In some embodiments, a tracrRNA extension sequence comprises less than 10 nucleotides in length. In some embodiments, a tracrRNA extension sequence is 10-30 nucleotides in length. In some embodiments, tracrRNA extension sequence is 30-70 nucleotides in length.

[0240] In some embodiments, the tracrRNA extension sequence comprises a functional moiety (e.g., stability control sequence, ribozyme, endoribonuclease binding sequence). In some embodiments, a functional moiety comprises a transcriptional terminator segment (i.e., a transcription termination sequence). In some embodiments, the functional moiety has a total length of from about 10 nucleotides to about 100 nucleotides, from about 10 nucleotides (nt) to about 20 nt, from about 20 nt to about 30 nt, from about 30 nt to about 40 nt, from about 40 nt to about 50 nt, from about 50 nt to about 60 nt, from about 60 nt to about 70 nt, from about 70 nt to about 80 nt, from about 80 nt to about 90 nt, or from about 90 nt to about 100 nt, from about 15 nucleotides (nt) to about 80 nt, from about 15 nt to about 50 nt, from about 15 nt to about 40 nt, from about 15 nt to about 30 nt or from about 15 nt to about 25 nt. In some embodiments, the functional moiety functions in a eukaryotic cell. In some embodiments, the functional moiety functions in a prokaryotic cell. In some embodiments, the functional moiety functions in both eukaryotic and prokaryotic cells.

[0241] Non-limiting examples of suitable tracrRNA extension functional moieties include: a 3′ poly-adenylated tail, a riboswitch sequence (e.g., to allow for regulated stability and/or regulated accessibility by proteins and protein complexes), a sequence that forms a dsRNA duplex (i.e., a hairpin), a sequence that targets the RNA to a subcellular location (e.g., nucleus, mitochondria, chloroplasts, and the like), a modification or sequence that provides for tracking (e.g., direct conjugation to a fluorescent molecule, conjugation to a moiety that facilitates fluorescent detection, a sequence that allows for fluorescent detection, etc.), and/or a modification or sequence that provides a binding site for proteins (e.g., proteins that act on DNA, including transcriptional activators, transcriptional repressors, DNA methyltransferases, DNA demethylases, histone acetyltransferases, histone deacetylases, and the like). In some embodiments, a tracrRNA extension sequence comprises a primer binding site, a molecular index (e.g., barcode sequence). In some embodiments, the tracrRNA extension sequence comprises one or more affinity tags.

### Single-Molecule Guide Linker Sequence

[0242] In some embodiments, the linker sequence of a single-molecule guide nucleic acid has a length of from about 3 nucleotides to about 100 nucleotides. In Jinek et al., supra, for example, a simple 4 nucleotide “tetraloop” (-GAAA-) was used, Science, 337(6096):816-821 (2012). An illustrative linker has a length of from about 3 nucleotides (nt) to about 90 nt, from about 3 nt to about 80 nt, from about 3 nt to about 70 nt, from about 3 nt to about 60 nt, from about 3 nt to about 50 nt, from about 3 nt to about 40 nt, from about 3 nt to about 30 nt, from about 3 nt to about 20 nt or from about 3 nt to about 10 nt. For example, the linker can have a length of from about 3 nt to about 5 nt, from about 5 nt to about 10 nt, from about 10 nt to about 15 nt, from about 15 nt to about 20 nt, from about 20 nt to about 25 nt, from about 25 nt to about 30 nt, from about 30 nt to about 35 nt, from about 35 nt to about 40 nt, from about 40 nt to about 50 nt, from about 50 nt to about 60 nt, from about 60 nt to about 70 nt, from about 70 nt to about 80 nt, from about 80 nt to about 90 nt, or from about 90 nt to about 100 nt. In some embodiments, the linker of a single-molecule guide nucleic acid is between 4 and 40 nucleotides. In some embodiments, a linker is at least about: 100, 500, 1000, 1500, 2000, 2500, 3000, 3500, 4000, 4500, 5000, 5500, 6000, 6500, or 7000 or more nucleotides. In some embodiments, a linker is at most about: 100, 500, 1000, 1500, 2000, 2500, 3000, 3500, 4000, 4500, 5000, 5500, 6000, 6500, or 7000 or more nucleotides.

[0243] Linkers can comprise any of a variety of sequences, although preferably the linker will not comprise sequences that have extensive regions of homology with other portions of the guide RNA, which might cause intramolecular binding that could interfere with other functional regions of the guide. In Jinek et al., supra, a simple 4 nucleotide sequence -GAAA- was used, Science, 337(6096):816-821 (2012), but numerous other sequences, including longer sequences can likewise be used.

[0244] In some embodiments, the linker sequence comprises a functional moiety. For example, the linker sequence may comprise an aptamer, a ribozyme, a protein-interacting hairpin, a CRISPR array, an intron, and an exon. In some embodiments, the linker sequence comprises at least about: 1, 2, 3, 4, or 5 or more functional moieties. In some embodiments, the linker sequence comprises at most about: 1, 2, 3, 4, or 5 or more functional moieties.

### Complexes of a Nucleic Acid-Targeting Nucleic Acid and a Site-Directed Polypeptide

[0245] A nucleic acid-targeting nucleic acid interacts with a site-directed polypeptide (e.g., a nucleic acid-guided nuclease such as Cas9), thereby forming a complex. The nucleic acid-targeting nucleic acid guides the site-directed polypeptide to a target nucleic acid.

### Codon-Optimization

[0246] In some embodiments, a polynucleotide encoding a site-directed polypeptide is codon-optimized according to methods standard in the art for expression in the cell containing the target DNA of interest. For example, if the intended target nucleic acid is in a human cell, a human codon-optimized polynucleotide encoding Cas9 is contemplated for use for producing the Cas9 polypeptide.

### Nucleic Acids Encoding System Components

[0247] In another aspect, the present disclosure provides a nucleic acid comprising a nucleotide sequence encoding a nucleic acid-targeting nucleic acid of the disclosure, a site-directed polypeptide of the disclosure, and/or any nucleic acid or proteinaceous molecule necessary to carry out the embodiments of the methods of the disclosure.

[0248] In some embodiments, the nucleic acid encoding a nucleic acid-targeting nucleic acid of the disclosure, a site-directed polypeptide of the disclosure, and/or any nucleic acid or proteinaceous molecule necessary to carry out the embodiments of the methods of the disclosure comprises a vector (e.g., a recombinant expression vector).

[0249] As used herein, the term “vector” refers to a nucleic acid molecule capable of transporting another nucleic acid to which it has been linked. One type of vector is a “plasmid,” which refers to a circular double-stranded DNA loop into which additional nucleic acid segments can be ligated. Another type of vector is a viral vector, wherein additional nucleic acid segments can be ligated into the viral genome. Certain vectors are capable of autonomous replication in a host cell into which they are introduced (e.g., bacterial vectors having a bacterial origin of replication and episomal mammalian vectors). Other vectors (e.g., non-episomal mammalian vectors) are integrated into the genome of a host cell upon introduction into the host cell, and thereby are replicated along with the host genome.

[0250] In some embodiments, vectors are capable of directing the expression of genes to which they are operatively linked. Such vectors are referred to herein as “recombinant expression vectors,” or more simply “expression vectors,” which serve equivalent functions.

[0251] The term “operably linked” is intended herein to mean that the nucleotide sequence of interest is linked to regulatory sequence(s) in a manner which allows for expression of the nucleotide sequence. The term “regulatory sequence” is intended to include, for example, promoters, enhancers and other expression control elements (e.g., polyadenylation signals). Such regulatory sequences are well known in the art and are described, for example, in Goeddel; Gene Expression Technology: Methods in Enzymology 185, Academic Press, San Diego, CA (1990). Regulatory sequences include those which direct constitutive expression of a nucleotide sequence in many types of host cell and those which direct expression of the nucleotide sequence only in certain host cells (e.g., tissue-specific regulatory sequences). It will be appreciated by those skilled in the art that the design of the expression vector can depend on such factors as the choice of the target cell, the level of expression desired, and the like.

[0252] Expression vectors contemplated include, but are not limited to, viral vectors based on vaccinia virus, poliovirus, adenovirus, adeno-associated virus, SV40, herpes simplex virus, human immunodeficiency virus, a retrovirus (e.g., Murine Leukemia Virus, spleen necrosis virus, and vectors derived from retroviruses such as Rous Sarcoma Virus, Harvey Sarcoma Virus, avian leukosis virus, a lentivirus, human immunodeficiency virus, myeloproliferative sarcoma virus, and mammary tumor virus) and other recombinant vectors. Other vector contemplated for eukaryotic target cells include, but are not limited to, the vectors pXT1, pSG5, pSVK3, pBPV, pMSG, and pSVLSV40 (Pharmacia). Other vectors may be used so long as they are compatible with the host cell.

[0253] In some embodiments, a vector comprises one or more transcription and/or translation control elements. Depending on the host/vector system utilized, any of a number of suitable transcription and translation control elements, including constitutive and inducible promoters, transcription enhancer elements, transcription terminators, etc. may be used in the expression vector.

[0254] Non-limiting examples of suitable eukaryotic promoters (i.e., promoters functional in a eukaryotic cell) include those from cytomegalovirus (CMV) immediate early, herpes simplex virus (HSV) thymidine kinase, early and late SV40, long terminal repeats (LTRs) from retrovirus, human elongation factor-1 promoter (EF1), a hybrid construct comprising the cytomegalovirus (CMV) enhancer fused to the chicken beta-actin promoter (CAG), murine stem cell virus promoter (MSCV), phosphoglycerate kinase-1 locus promoter (PGK) and mouse metallothionein-1.

[0255] For expressing small RNAs, including guide RNAs used in connection with Cas endonuclease, various promoters such as RNA polymerase III promoters, including for example U6 and H1, can be advantageous. Descriptions of and parameters for enhancing the use of such promoters are known in art and additional information and approaches are regularly being described; see, e.g., Ma, H. et al., Molecular Therapy—Nucleic Acids 3, 161 (2014) doi:10.1038/mtna.2014.12.

[0256] The expression vector may also contain a ribosome binding site for translation initiation and a transcription terminator. The expression vector may also include appropriate sequences for amplifying expression. The expression vector may also include nucleotide sequences encoding non-native tags (e.g., histidine tag, hemagglutinin tag, green fluorescent protein, etc.) that are fused to the site-directed polypeptide, thus resulting in a fusion protein.

[0257] In some embodiments, a promoter is an inducible promoter (e.g., heat shock promoter, tetracycline-regulated promoter, steroid-regulated promoter, metal-regulated promoter, estrogen receptor-regulated promoter, etc.). In some embodiments, a promoter is a constitutive promoter (e.g., CMV promoter, UBC promoter). In some embodiments, the promoter is a spatially restricted and/or temporally restricted promoter (e.g., a tissue specific promoter, a cell type specific promoter, etc.).

[0258] In some embodiments, the nucleic acid encoding a nucleic acid-targeting nucleic acid of the disclosure and/or a site-directed polypeptide are packaged into or on the surface of delivery vehicles for delivery to cells. Delivery vehicles contemplated include, but are not limited to, nanospheres, liposomes, quantum dots, nanoparticles, polyethylene glycol particles, hydrogels, and micelles. As described in the art, a variety of targeting moieties can be used to enhance the preferential interaction of such vehicles with desired cell types or locations.

[0259] Introduction of the complexes, polypeptides, and nucleic acids of the disclosure into cells can occur by viral or bacteriophage infection, transfection, conjugation, protoplast fusion, lipofection, electroporation, nucleofection, calcium phosphate precipitation, polyethyleneimine (PEI)-mediated transfection, DEAE-dextran mediated transfection, liposome-mediated transfection, particle gun technology, calcium phosphate precipitation, direct micro-injection, nanoparticle-mediated nucleic acid delivery, and the like.

### Kits

[0260] The present disclosure provides kits for carrying out the methods of the disclosure. A kit can include one or more of: a nucleic acid-targeting nucleic acid of the disclosure, a polynucleotide encoding a nucleic acid-targeting nucleic acid, a site-directed polypeptide of the disclosure, a polynucleotide encoding a site-directed polypeptide and/or any nucleic acid or proteinaceous molecule necessary to carry out the embodiments of the methods of the disclosure, or any combination thereof.

[0261] In some embodiments, a kit comprises: (1) a vector comprising a nucleotide sequence encoding a nucleic acid-targeting nucleic acid, and (2) a vector comprising a nucleotide sequence encoding the site-directed polypeptide and (3) a reagent for reconstitution and/or dilution of the vectors.

[0262] In some embodiments, a kit comprises: (1) a vector comprising (i) a nucleotide sequence encoding a nucleic acid-targeting nucleic acid, and (ii) a nucleotide sequence encoding the site-directed polypeptide and (2) a reagent for reconstitution and/or dilution of the vector.

[0263] In some embodiments of any of the above kits, the kit comprises a single-molecule guide nucleic acid-targeting nucleic acid. In some embodiments of any of the above kits, the kit comprises a double-molecule nucleic acid-targeting nucleic acid. In some embodiments of any of the above kits, the kit comprises two or more double-molecule guides or single-molecule guides. In some embodiments, the kits comprise a vector may encode the nucleic acid targeting nucleic acid.

[0264] In some embodiments of any of the above kits, the kit can further comprise a polynucleotide to be inserted to effect the desired genetic modification.

[0265] Components of a kit may be in separate containers; or combined in a single container.

[0266] In some embodiments, a kit described above further comprises one or more additional reagents, where such additional reagents are selected from: a buffer, a buffer for introducing the a polypeptide or polynucleotide item of the kit into a cell, a wash buffer, a control reagent, a control vector, a control RNA polynucleotide, a reagent for in vitro production of the polypeptide from DNA, adaptors for sequencing and the like. A buffer can be a stabilization buffer, a reconstituting buffer, or a diluting buffer or the like.

[0267] In addition to above-mentioned components, a kit can further include instructions for using the components of the kit to practice the methods. The instructions for practicing the methods are generally recorded on a suitable recording medium. For example, the instructions may be printed on a substrate, such as paper or plastic, etc. The instructions may be present in the kits as a package insert, in the labeling of the container of the kit or components thereof (i.e., associated with the packaging or subpackaging) etc. The instructions can be present as an electronic storage data file present on a suitable computer readable storage medium, e.g. CD-ROM, diskette, flash drive, etc. In some instances, the actual instructions are not present in the kit, but means for obtaining the instructions from a remote source (e.g. via the Internet), can be provided. An example of this embodiment is a kit that includes a web address where the instructions can be viewed and/or from which the instructions can be downloaded. As with the instructions, this means for obtaining the instructions can be recorded on a suitable substrate.

### Guide RNA Formulation

[0268] Guide RNAs of the invention are formulated with pharmaceutically acceptable excipients such as carriers, solvents, stabilizers, adjuvants, diluents, etc., depending upon the particular mode of administration and dosage form. Guide RNA compositions are generally formulated to achieve a physiologically compatible pH, and range from a pH of about 3 to a pH of about 11, about pH 3 to about pH 7, depending on the formulation and route of administration. In alternative embodiments, the pH is adjusted to a range from about pH 5.0 to about pH 8. In some embodiments, the compositions comprise a therapeutically effective amount of at least one compound as described herein, together with one or more pharmaceutically acceptable excipients. Optionally, the compositions comprise a combination of the compounds described herein, or may include a second active ingredient useful in the treatment or prevention of bacterial growth (for example and without limitation, anti-bacterial or anti-microbial agents), or may include a combination of reagents of the invention.

[0269] Suitable excipients include, for example, carrier molecules that include large, slowly metabolized macromolecules such as proteins, polysaccharides, polylactic acids, polyglycolic acids, polymeric amino acids, amino acid copolymers, and inactive virus particles. Other exemplary excipients include antioxidants (for example and without limitation, ascorbic acid), chelating agents (for example and without limitation, EDTA), carbohydrates (for example and without limitation, dextrin, hydroxyalkylcellulose, and hydroxyalkylmethylcellulose), stearic acid, liquids (for example and without limitation, oils, water, saline, glycerol and ethanol) wetting or emulsifying agents, pH buffering substances, and the like.

### Genetically Modified Cells

[0270] As used herein, the term “genetically modified cell” refers to a cell that comprises at least one genetic modification introduced by genome editing (e.g., using the CRISPR/Cas system). In some embodiments herein, the genetically modified cell is a genetically modified progenitor cell. A genetically modified cell comprising an exogenous nucleic acid-targeting nucleic acid and/or an exogenous nucleic acid encoding a nucleic acid-targeting nucleic acid is contemplated herein.

[0271] In connection with de-repressing γ-globin expression, the phrase “increasing γ-globin levels in a cell” or “increased γ-globin expression in a cell” indicates that γ-globin in a cell or population of cells is at least 2% higher in the cell or population of cells subject to genome editing than in a comparable, control population, in which there has been no genome editing. In some embodiments, the increase in γ-globin expression is at least about 2%, at least about 3%, at least about 4%, at least about 5%, at least about 6%, at least about 7%, at least about 8%, at least about 9%, at least about 10%, at least about 11%, at least about 12%, at least about 13%, at least about 14%, at least about 15%, at least about 16%, at least about 17%, at least about 18%, at least about 19%, at least about 20%, at least about 25%, at least about 30%, at least about 35%, at least about 40%, at least about 45%, at least about 50%, at least about 55%, at least about 60%, at least about 65%, at least about 70%, at least about 75%, at least about 80%, at least about 85%, at least about 90%, at least about 95%, at least about 99%, at least about 2-fold, at least about 3-fold, at least about 4-fold, at least about 5-fold, at least about 6-fold, at least about 7-fold, at least about 8-fold, at least about 9-fold, at least about 10-fold, at least about 15-fold, at least about 20-fold, at least about 25-fold, at least about 30-fold, at least about 35-fold, at least about 40-fold, at least about 45-fold, at least about 50-fold, at least about 100-fold or more than a comparable control treated population. The term “control treated population” is used herein to describe a population of cells that has been treated with identical media, viral induction, nucleic acid sequences, temperature, confluency, flask size, pH, etc., with the exception of the addition of the genome editing components. Any method known in the art can be used to measure an increase in γ-globin expression, for example, Western Blot analysis of γ-globin or quantifying γ-globin mRNA.

[0272] The term “isolated cell” as used herein refers to a cell that has been removed from an organism in which it was originally found, or a descendant of such a cell. Optionally the cell has been cultured in vitro, e.g., under defined conditions or in the presence of other cells. Optionally the cell is later introduced into a second organism or re-introduced into the organism from which it (or the cell from which it is descended) was isolated.

[0273] The term “isolated population” with respect to an isolated population of cells as used herein refers to a population of cells that has been removed and separated from a mixed or heterogeneous population of cells. In some embodiments, an isolated population is a substantially pure population of cells as compared to the heterogeneous population from which the cells were isolated or enriched. In some embodiments, the isolated population is an isolated population of human hematopoietic progenitor cells, e.g., a substantially pure population of human hematopoietic progenitor cells as compared to a heterogeneous population of cells comprising human hematopoietic progenitor cells and cells from which the human hematopoietic progenitor cells were derived.

[0274] The term “substantially enhanced,” with respect to a particular cell population, refers to a population of cells in which the occurrence of a particular type of cell is increased relative to preexisting or reference levels, by at least 2-fold, at least 3-, at least 4-, at least 5-, at least 6-, at least 7-, at least 8-, at least 9, at least 10-, at least 20-, at least 50-, at least 100-, at least 400-, at least 1000-, at least 5000-, at least 20000-, at least 100000- or more fold depending, e.g., on the desired levels of such cells for ameliorating a hemoglobinopathy.

[0275] The term “substantially enriched” with respect to a particular cell population, refers to a population of cells that is at least: about 10%, about 20%, about 30%, about 40%, about 50%, about 60%, about 70% or more with respect to the cells making up a total cell population.

[0276] The terms “substantially enriched” or “substantially pure” with respect to a particular cell population, refers to a population of cells that is at least about 75%, at least about 85%, at least about 90%, or at least about 95% pure, with respect to the cells making up a total cell population. That is, the terms “substantially pure” or “essentially purified,” with regard to a population of hematopoietic progenitor cells, refers to a population of cells that contain fewer than: about 20%, about 15%, about 10%, about 9%, about 8%, about 7%, about 6%, about 5%, about 4%, about 3%, about 2%, about 1%, or less than 1%, of cells that are not hematopoietic progenitor cells as defined by the terms herein.

### Pharmaceutically Acceptable Carriers

[0277] The methods of administering progenitor cells to a subject contemplated herein involve the use of therapeutic compositions comprising progenitor cells.

[0278] Therapeutic compositions contain a physiologically tolerable carrier together with the cell composition and optionally at least one additional bioactive agent as described herein, dissolved or dispersed therein as an active ingredient. In some embodiments, the therapeutic composition is not substantially immunogenic when administered to a mammal or human patient for therapeutic purposes, unless so desired.

[0279] In general, the progenitor cells described herein are administered as a suspension with a pharmaceutically acceptable carrier. One of skill in the art will recognize that a pharmaceutically acceptable carrier to be used in a cell composition will not include buffers, compounds, cryopreservation agents, preservatives, or other agents in amounts that substantially interfere with the viability of the cells to be delivered to the subject. A formulation comprising cells can include e.g., osmotic buffers that permit cell membrane integrity to be maintained, and optionally, nutrients to maintain cell viability or enhance engraftment upon administration. Such formulations and suspensions are known to those of skill in the art and/or can be adapted for use with the progenitor cells as described herein using routine experimentation.

[0280] A cell composition can also be emulsified or presented as a liposome composition, provided that the emulsification procedure does not adversely affect cell viability. The cells and any other active ingredient can be mixed with excipients which are pharmaceutically acceptable and compatible with the active ingredient and in amounts suitable for use in the therapeutic methods described herein.

[0281] Additional agents included in a cell composition as described herein can include pharmaceutically acceptable salts of the components therein. Pharmaceutically acceptable salts include the acid addition salts (formed with the free amino groups of the polypeptide) that are formed with inorganic acids such as, for example, hydrochloric or phosphoric acids, or such organic acids as acetic, tartaric, mandelic and the like. Salts formed with the free carboxyl groups can also be derived from inorganic bases such as, for example, sodium, potassium, ammonium, calcium or ferric hydroxides, and such organic bases as isopropylamine, trimethylamine, 2-ethylamino ethanol, histidine, procaine and the like.

[0282] Physiologically tolerable carriers are well known in the art. Exemplary liquid carriers are sterile aqueous solutions that contain no materials in addition to the active ingredients and water, or contain a buffer such as sodium phosphate at physiological pH value, physiological saline or both, such as phosphate-buffered saline. Still further, aqueous carriers can contain more than one buffer salt, as well as salts such as sodium and potassium chlorides, dextrose, polyethylene glycol and other solutes. Liquid compositions can also contain liquid phases in addition to and to the exclusion of water. Exemplary of such additional liquid phases are glycerin, vegetable oils such as cottonseed oil, and water-oil emulsions. The amount of an active compound used in the cell compositions as described herein that is effective in the treatment of a particular disorder or condition will depend on the nature of the disorder or condition, and can be determined by standard clinical techniques.

### Administration & Efficacy

[0283] As used herein, the terms “administering,” “introducing” and “transplanting” are used interchangeably in the context of the placement of cells, e.g., progenitor cells, as described herein into a subject, by a method or route which results in at least partial localization of the introduced cells at a desired site, such as a site of injury or repair, such that a desired effect(s) is produced. The cells e.g., progenitor cells, or their differentiated progeny can be administered by any appropriate route which results in delivery to a desired location in the subject where at least a portion of the implanted cells or components of the cells remain viable. The period of viability of the cells after administration to a subject can be as short as a few hours, e.g., twenty-four hours, to a few days, to as long as several years, i.e., long-term engraftment. For example, in some embodiments of the aspects described herein, an effective amount of hematopoietic progenitor cells is administered via a systemic route of administration, such as an intraperitoneal or intravenous route.

[0284] The terms “individual,” “subject,” “host” and “patient” are used interchangeably herein and refer to any subject for whom diagnosis, treatment or therapy is desired. In some embodiments, the subject is a mammal. In some embodiments, the subject is a human being.

[0285] When provided prophylactically, progenitor cells described herein can be administered to a subject in advance of any symptom of a hemoglobinopathy, e.g., prior to initiation of the switch from fetal γ-globin to predominantly β-globin and/or prior to the development of significant anemia or other symptom associated with the hemoglobinopathy. Accordingly, the prophylactic administration of a hematopoietic progenitor cell population serves to prevent a hemoglobinopathy, as disclosed herein.

[0286] When provided therapeutically, hematopoietic progenitor cells are provided at (or after) the onset of a symptom or indication of a hemoglobinopathy, e.g., upon the onset of sickle cell anemia or other SCD.

[0287] In some embodiments of the aspects described herein, the hematopoietic progenitor cell population being administered according to the methods described herein comprises allogeneic hematopoietic progenitor cells obtained from one or more donors. As used herein, “allogeneic” refers to a hematopoietic progenitor cell or biological samples comprising hematopoietic progenitor cells obtained from one or more different donors of the same species, where the genes at one or more loci are not identical. For example, a hematopoietic progenitor cell population being administered to a subject can be derived from umbilical cord blood obtained from one more unrelated donor subjects, or from one or more non-identical siblings. In some embodiments, syngeneic hematopoietic progenitor cell populations can be used, such as those obtained from genetically identical animals, or from identical twins. In other embodiments of this aspect, the hematopoietic progenitor cells are autologous cells, that is, the hematopoietic progenitor cells are obtained or isolated from a subject and administered to the same subject, i.e., the donor and recipient are the same.

[0288] In one embodiment, the term “effective amount” as used herein refers to the amount of a population of progenitor cells or their progeny needed to prevent or alleviate at least one or more sign or symptom of a hemoglobinopathy, and relates to a sufficient amount of a composition to provide the desired effect, e.g., treat a subject having a hemoglobinopathy. The term “therapeutically effective amount” therefore refers to an amount of progenitor cells or a composition comprising progenitor cells that is sufficient to promote a particular effect when administered to a typical subject, such as one who has or is at risk for a hemoglobinopathy. An effective amount as used herein would also include an amount sufficient to prevent or delay the development of a symptom of the disease, alter the course of a symptom disease (for example but not limited to, slow the progression of a symptom of the disease), or reverse a symptom of the disease. It is understood that for any given case, an appropriate “effective amount” can be determined by one of ordinary skill in the art using routine experimentation.

[0289] For use in the various aspects described herein, an effective amount of progenitor cells, comprises at least 10² progenitor cells, at least 5×10² progenitor cells, at least 10³ progenitor cells, at least 5×10³ progenitor cells, at least 10⁴ progenitor cells, at least 5×10⁴ progenitor cells, at least 10⁵ progenitor cells, at least 2×10⁵ progenitor cells, at least 3×10⁵ progenitor cells, at least 4×10⁵ progenitor cells, at least 5×10⁵ progenitor cells, at least 6×10⁵ progenitor cells, at least 7×10⁵ progenitor cells, at least 8×10⁵ progenitor cells, at least 9×10⁵ progenitor cells, at least 1×10⁶ progenitor cells, at least 2×10⁶ progenitor cells, at least 3×10⁶ progenitor cells, at least 4×10⁶ progenitor cells, at least 5×10⁶ progenitor cells, at least 6×10⁶ progenitor cells, at least 7×10⁶ progenitor cells, at least 8×10⁶ progenitor cells, at least 9×10⁶ progenitor cells, or multiples thereof. The progenitor cells are derived from one or more donors, or are obtained from an autologous source. In some embodiments of the aspects described herein, the progenitor cells are expanded in culture prior to administration to a subject in need thereof.

[0290] As discussed above, even modest and incremental increases in the levels of HbF expressed in cells of patients having a hemoglobinopathy can be beneficial for ameliorating one or more symptoms of the disease, for increasing long-term survival, and/or for reducing side effects associated with other treatments. Upon administration of such cells to human patients, the presence of RBCs that are producing increased levels of HbF is beneficial. In some embodiments, effective treatment of a subject gives rise to at least about 9% HbF relative to total Hb in the treated subject. In some embodiments, HbF will be at least about 14% of total Hb. In some embodiments HbF will be at least about 20% to 30% of total Hb. Similarly, the introduction of even relatively limited subpopulations of cells having significantly elevated levels of HbF (referred to as “F-cells”) can be beneficial in various patients since in some situations normalized cells will have a selective advantage relative to diseased cells. However, even modest levels of circulating RBCs with elevated levels of HbF can be beneficial for ameliorating one or more aspects of hemoglobinopathy in patients. In some embodiments, about 10%, about 20%, about 30%, about 40%, about 50%, about 60%, about 70%, about 80%, about 90% or more of the RBCs in patients to whom such cells are administered are producing increased levels of HbF as described herein.

[0291] As used herein, “administered” refers to the delivery of a progenitor cell composition as described herein into a subject by a method or route which results in at least partial localization of the cell composition at a desired site. A cell composition can be administered by any appropriate route which results in effective treatment in the subject, i.e. administration results in delivery to a desired location in the subject where at least a portion of the composition delivered, i.e. at least 1×10⁴ cells are delivered to the desired site for a period of time. Modes of administration include injection, infusion, instillation, or ingestion. “Injection” includes, without limitation, intravenous, intramuscular, intra-arterial, intrathecal, intraventricular, intracapsular, intraorbital, intracardiac, intradermal, intraperitoneal, transtracheal, subcutaneous, subcuticular, intraarticular, sub capsular, subarachnoid, intraspinal, intracerebro spinal, and intrasternal injection and infusion. In some embodiments, the route is intravenous. For the delivery of cells, administration by injection or infusion is generally preferred.

[0292] In one embodiment, the cells as described herein are administered systemically. The phrases “systemic administration,” “administered systemically,” “peripheral administration” and “administered peripherally” as used herein refer to the administration of a population of progenitor cells other than directly into a target site, tissue, or organ, such that it enters, instead, the subject's circulatory system and, thus, is subject to metabolism and other like processes.

[0293] The efficacy of a treatment comprising a composition as described herein for the treatment of a hemoglobinopathy can be determined by the skilled clinician. However, a treatment is considered “effective treatment,” as the term is used herein, if any one or all of the signs or symptoms of, as but one example, levels of fetal hemoglobin are altered in a beneficial manner (e.g., increased by at least 10%), other clinically accepted symptoms or markers of disease are improved or ameliorated, . Efficacy can also be measured by failure of an individual to worsen as assessed by hospitalization or need for medical interventions (e.g., reduced transfusion dependence, or progression of the disease is halted or at least slowed). Methods of measuring these indicators are known to those of skill in the art and/or described herein. Treatment includes any treatment of a disease in an individual or an animal (some non-limiting examples include a human, or a mammal) and includes: (1) inhibiting the disease, e.g., arresting, or slowing the progression of symptoms; or (2) relieving the disease, e.g., causing regression of symptoms; and (3) preventing or reducing the likelihood of the development of symptoms.

[0294] The treatment according to the present invention ameliorates one or more symptoms associated with a β-hemoglobinopathy by increasing the amount of fetal hemoglobin in the individual. Symptoms and signs typically associated with a hemoglobinopathy, include for example, anemia, tissue hypoxia, organ dysfunction, abnormal hematocrit values, ineffective erythropoiesis, abnormal reticulocyte (erythrocyte) count, abnormal iron load, the presence of ring sideroblasts, splenomegaly, hepatomegaly, impaired peripheral blood flow, dyspnea, increased hemolysis, jaundice, anemic pain crises, acute chest syndrome, splenic sequestration, priapism, stroke, hand-foot syndrome, and pain such as angina pectoris.

[0295] As used herein the term “comprising” or “comprises” is used in reference to compositions, methods, and respective component(s) thereof, that are essential to the invention, yet open to the inclusion of unspecified elements, whether essential or not.

[0296] As used herein the term “consisting essentially of” refers to those elements required for a given embodiment. The term permits the presence of additional elements that do not materially affect the basic and novel or functional characteristic(s) of that embodiment of the invention.

[0297] The term “consisting of” refers to compositions, methods, and respective components thereof as described herein, which are exclusive of any element not recited in that description of the embodiment.

[0298] As used in this specification and the appended claims, the singular forms “a,” “an,” and “the” include plural references unless the context clearly dictates otherwise.

[0299] Certain numerical values presented herein are preceded by the term “about.” The term “about” is used herein to provide literal support for the numerical value the term “about” precedes, as well as a numerical value that is approximately the numerical value, that is the approximating unrecited numerical value may be a number which, in the context it is presented, is the substantial equivalent of the specifically recited numerical value.

[0300] When a range of numerical values is presented herein, it is contemplated that each intervening value between the lower and upper limit of the range, the values that are the upper and lower limits of the range, and all stated values with the range are encompassed within the disclosure. All the possible sub-ranges within the lower and upper limits of the range are also contemplated by the disclosure.

### EXAMPLES

[0301] The invention will be more fully understood by reference to the following examples, which provide illustrative non-limiting embodiments of the invention.

[0302] The examples describe the use of the CRISPR/Cas system as an illustrative genome editing technique to create defined therapeutic genomic deletions or single base substitutions, collectively termed “genomic modifications” herein, in the β-globin gene cluster that lead to the upregulation of the expression of HbF. Exemplary therapeutic modifications are genetically and/or functionally similar or identical to those observed in hematopoietic cells of individuals with hemoglobinopathy such as sickle cell or β-thalassemia in which the modifications de-repress, or lead to the re-expression of, γ-globin and thus fetal hemoglobin. Introduction of the defined therapeutic modifications represents a novel therapeutic strategy for the potential amelioration of hemoglobinopathies as described and illustrated herein.

### Example 1

### Creation of Deletions Proximal to Chr11:5224779-5237723

[0303] In this example, we illustrate use of the methods described herein to generate certain deletions that are proximal to the region Chr11:5224779-5237723. Deletions in this region have been observed in human patients designated as HPFH-5 (or “HPFH Sicilian”) described in Camaschella et al., Haematologica, 75(Suppl 5):26-30 (1990). The 13 kb deletion variant in the human β-globin locus observed in the human patients was associated with the clinical phenotype of hereditary persistence of fetal hemoglobin (HPFH), in which the presence of fetal hemoglobin can complement the defect in adult hemoglobin synthesis or function, and ameliorate disease, in sickle cell anemia or 3-thalassemia.

[0304] In this example, we illustrate that the CRISPR/Cas system can be used to create deletions functionally resembling those associated with natural HPFH alleles such as HPFH-5. Guide RNAs were designed to eliminate the pathogenic sickle cell allele by deleting the δ and β globin genes as well as substantial portion of the γ globin gene 3′ region. FIG. 1A shows the human globin locus with hollow boxes highlighting the HPFH-5 5′ and 3′ target sites. The 13 kb deletion starts 3 kb 5′ to the ψβ1 gene and ends 1.7 kb 3′ to the end of the β gene (690 bp downstream from the β gene polyA signal). See FIG. 1B. In addition, guide RNAs were designed to target sites throughout the 13 kb region in order to determine the therapeutic potential of smaller deletions within this locus.

### EXPERIMENTAL METHODS

### Selection of Target Sites

[0305] Regions of the β-globin gene cluster were scanned for target sites, including the 5′ and 3′ regions associated with hereditary persistence of fetal hemoglobin-5 (HPFH-5). Each area was scanned for protospacer adjacent motifs (PAMs) having the sequence NGG and/or NRG. Guide strands corresponding to the PAMs were identified.

[0306] For this illustrative example, candidate guides were screened and selected in a multi-step process that involved both theoretical binding and experimentally assessed activity. By way of illustration, candidate guides having sequences that match a particular on-target site with adjacent PAM can be assessed for their potential to cleave at off-target sites having similar sequences, using one or more of a variety of bioinformatics tools available for assessing off-target binding, as described and illustrated in more detail below, in order to assess the likelihood of effects at chromosomal positions other than those intended. Candidates predicted to have relatively lower potential for off-target activity can then be assessed experimentally to measure their on-target activity, and then off-target activities at various sites. Preferred guides have sufficiently high on-target activity to achieve desired levels of gene editing at the selected locus, and relatively lower off-target activity, to reduce the likelihood of alterations at other chromosomal loci. The ratio of on-target to off-target activity is often referred to as the “specificity” of a guide.

[0307] For initial screening of predicted off-target activities, there are a number of bioinformatics tools known and publicly available that can be used to predict the most likely off-target sites; and since binding to target sites in the Crispr Cas9 nuclease system is driven by Watson-Crick base pairing between complementary sequences, the degree of dissimilarity (and therefore reduced potential for off-target binding) is essentially related to primary sequence differences: mismatches and bulges, i.e. bases that are changed to a non-complementary base, and insertions or deletions of bases in the potential off-target site relative to the target site. An exemplary bioinformatics tool called COSMID (CRISPR Off-target Sites with Mismatches, Insertions and Deletions) (available on the web at crispr.bme.gatech.edu) compiles such similarities.

### CRISPR Cloning

[0308] Plasmids expressing the Cas9 protein and guide strand RNA were assembled using a vector that expressed humanized Cas9 from S. pyogenes and the single-molecule guide RNA. Complementary oligonucleotides corresponding to the guide strand were obtained (Operon or IDT), kinase, annealed and cloned into the vector. Guide RNAs were tested in cells

[0309] The first three spacer sequences target the 5′ boundary of the region to be deleted, and the last three target the 3′ boundary of the region to be deleted.

### Cell Transfection

[0310] K-562 cells were cultured in RPMI media supplemented with 10% FBS and 2 mM fresh L-glutamine and passaged as they approached a confluency of 1×10⁵/ml. An Amaxa Nucleofector 4D was used to transfect 200,000 K-562 cells with 1 μg vector expressing HPFH5 targeting sgRNAs, and 1000 ng of plasmid expressing Cas9 following manufacturer's instructions. The genomic DNA was harvested after 3 days using QuickExtract DNA extraction solution (Epicentre, Madison, WI), as described.

[0311] Hek293T cells were seeded 24 hours prior to transfection in 24-well plates at a density of 80,000 cells per well and cultured in DMEM media supplemented with 10% FBS and 2 mM fresh L-glutamine. Cells were transfected with 1000 ng of plasmid expressing Cas9 and gRNA using 2 μl of Lipofectamine 2000 (Life technologies), according to manufacturer's instructions. Genomic DNA was harvested at 72 hours after transfection using QuickExtract DNA Extraction Solution (Epicenter).

### On- and Off-Target Mutation Detection by Sequencing

[0312] To sequence the on-target sites and putative off-target sites, the appropriate amplification primers were identified and reactions were set up with these primers using the genomic DNA harvested using QuickExtract DNA extraction solution (Epicentre) from treated cells three days post-transfection. The amplification primers contain the gene specific portion flanked by adapters. The forward primer's 5′ end includes a modified forward (read1) primer-binding site. The reverse primer's 5′ end contains a combined modified reverse (read2) and barcode primer-binding site, in opposite orientation. The individual PCR reactions were validated by separating on agarose gels, then purified and re-amplified. The second round forward primers contain the Illumina P5 sequence, followed by a proportion of the modified forward (read1) primer binding site. The second round reverse primers contain the Illumina P7 sequence (at the 5′ end), followed by the 6-base barcode and the combined modified reverse (read2) and barcode primer binding site. The second round amplifications were also checked on agarose gels, then purified, and quantitated using a NanoDrop spectrophotometer. The amplification products were pooled to match concentration and then submitted to the Emory Integrated Genomic core for library prepping and sequencing on an Illumina Miseq machine.

[0313] The sequencing reads were sorted by barcode and then aligned to the reference sequences supplied by bioinformatics for each product. Insertion and deletion rates in the aligned sequencing reads were detected in the region of the putative cut sites using software previously described; see, e.g., Lin et al., Nucleic Acids Res., 42: 7473-7485 (2014). The levels of insertions and deletions detected in this window were then compared to the level seen in the same location in genomic DNA isolated from in mock transfected cells to minimize the effects of sequencing artifacts.

### Mutation Detection Assays

[0314] The on- and off-target cleavage activities of Cas9 and guide RNA combinations were measured using the mutation rates resulting from the imperfect repair of double-strand breaks by NHEJ.

[0315] On-target loci were amplified using AccuPrime Taq DNA Polymerase High Fidelity (Life Technologies, Carlsbad, CA) following manufacturer's instructions for 40 cycles (94° C., 30 s; 52-60° C., 30 s; 68° C., 60 s) in 50 μl reactions containing 1 μl of the cell lysate, and 1 μl of each 10 μM amplification primer. T7EI mutation detection assays were performed, as per manufacturers protocol [Reyon et al., Nat. Biotechnol., 30: 460-465 (2012)], with the digestions separated on 2% agarose gels and quantified using ImageJ [Guschin et al., Methods Mol. Biol., 649: 247-256 (2010)]. The assays determine the percentage of insertions/deletions (“indels”) in the bulk population of cells.

### Detecting Inversions and Deletions by End-Point PCR

[0316] All end-point PCR reactions were performed using AccuPrime Taq DNA Polymerase High Fidelity (Life Technologies) following manufacturer's instructions for 40 cycles (94° C., 30 s; 60° C., 30 s; 68° C., 45 s) in a 50 μl reaction containing 1 μl of the cell lysate, and 1 μl of each 10 μM target region amplification primer.

Deletion Quantification Using Drop Digital PCR (ddPCR)

[0317] The level of joined chromosomal ends, indicating the intended chromosomal deletions, was quantitated using the BioRad (Hercules, CA) drop digital PCR machine (ddPCR) QX200. The machines allow absolute quantification by breaking individual PCR reactions into ˜20,000 droplets that are individually tested by end-point PCR using a Cyber green-like reagent and a reader that can effectively differentiate between PCR-positive and PCR-negative droplets. Genomic DNA for ddPCR was extracted from K-562 cells using the QiaAMP DNA mini kit (Qiagen, Valencia, CA). PCR reactions contained 2×ddPCR EvaGreen supermix, 200 ng of genomic DNA, primers, and Hindlil (1 U/reaction). Reactions were run for 40 cycles (94° C., 30 s; 55-65° C., 30 s; 72° C., 90 s).

[0318] FIG. 2 shows a schematic of PCR primer locations for detection of inversions and deletions of the 13 kb fragment.

### Example 2

### Creation of Deletions Proximal to Chr11:5233055-5240389

[0319] In this example, we illustrate use of the methods described herein to generate certain deletions that are proximal to the region Chr11:5233055-5240389. Deletions in this region have been observed in human patients with a 7.2 kb deletion in the human β-globin locus on chromosome 11 that is referred to herein as the “Corfu long” deletion. In the homozygous state, such a deletion is associated with a complete absence of hemoglobin A and A2 and a high level of fetal hemoglobin and HPFH [Wainscoat et al, Ann. NY Acad Sci 445:20 (1985) and Kulozik et al, Blood 71:457 (1988)]. This deletion is depicted in FIG. 3. We further determined that known binding sites for key regulators of γ-globin—BCL11a and Gata1—are located within a 3.5 kb subregion within the 7.2 kb region (FIG. 3). It is contemplated that deletion of this smaller region alone (deletion in chromosome 11 within region Chr11:5233055-5240389) might be sufficient to confer an HPFH phenotype comparable to that seen with the larger deletion and, moreover, may be achievable at a higher efficiently of genome editing than for the larger deletion. CRISPR guide RNAs were designed to effect cleavage at each end of the 7.2 kb and 3.5 kb regions and their ability to effect deletion of the intervening fragment was validated.

[0320] Individual guide RNAs directed towards the boundaries of each of the Corfu deletions were tested for their efficiency of gene editing.

### Example 3

### Creation of Deletions Proximal to Chr11:5226631-5249422

[0321] In this example, we illustrate use of the methods described herein to generate certain deletions that are proximal to the region Chr11:5226631-5249422. Deletions in this region have been observed in human patients with a large deletion in the human β-globin locus on chromosome 11 that is referred to herein as the HPFH Kenya-like variant [Huisman et al, Arch. Biochem. Biophys. 152:850 (1972) and Ojwang et al, Hemoglobin 7:115 (1983)]. The naturally-occurring variant appears to have resulted from non-homologous crossing over between amino acids 80-87 of the ^{A}γ and β-globin genes and deletion of the intervening ˜23 kb of sequence in chromosome 11 within region Chr11:5226631-5249422. The Kenya fusion protein contains amino acid residues 1-80 of the ^{A}γ chain and 87-146 of the β chain. CRISPR guide RNAs used to effect cleavage at each boundary of the ˜23 kb region (FIGS. 4 and 1B) were designed and validated. Vectors encoding the guide RNAs were generated and introduced into cells as described.

[0322] Combinations of these guides are expected to achieve the desired deletion.

### Example 4

### Creation of Deletions Proximal to Chr11:5249959-5249971

[0323] In this example, we illustrate use of the methods described herein to generate certain deletions that are proximal to the region Chr11:5249959-5249971. Deletions in this region have been observed in human patients with a small deletion variant of the β-globin locus in chromosome 11 within region Chr11:5249959-5249971 that was identified and shown to be associated with HPFH [Gilman et al, Nucleic acids Research 16(22):10635 (1988)]. This deletion spans -102 to -114 of the γ-globin gene and encompasses the distal CCAAT box believed important for regulation of the γ-gene promoter (FIG. 5A).

[0324] One approach is to cleave this locus within the 13 bp region and allow NHEJ to mis-repair the lesion with the expectation that in some instances the exact 13 bp deletion might be recapitulated. However, the repair outcome by NHEJ alone cannot be assured and it is unlikely that the precise 13 bp deletion will occur at a clinically significant frequency—rather than additional deletions or insertions, which may themselves have the desired therapeutic consequence. Alternatively, the DSB could be repaired by HDR in the presence of a co-delivered repair template donor that specifies the precise 13 bp deletion.

[0325] A third approach to creating the 13 bp deletion could be taken that makes use of microhomology at the intended mutation site and the repair pathway of MMEJ. In the present example analysis of the sequence encompassing and adjacent to the 13 bp deletion site revealed the presence of two 8 bp repeat sequences which we predicted would likely recombine during MMEJ-mediated repair to produce the 13 bp deletion in the presence of a single double-strand break.

### Example 5

### Creation of Deletions Proximal to Chr11:5196709-5239223

[0326] In this example, we illustrate use of the methods described herein to generate certain deletions that are proximal to the region Chr11:5196709-5239223. Deletions in this region have been observed in human patients with a large deletion in the human β-globin locus on chromosome 11 that is referred to as the HPFH-4 (or “HPFH Italian”) allele [Camaschella et al, Haematologia 75(5):26 (1990)] and is characterized by a 40 kb deletion (FIG. 6A) in chromosome 11 within region Chr11:5196709-5239223 that fully encompasses the shorter (13 kb) HPFH-5 allele. It is contemplated that genome editing technologies such as CRISPR can be used to create a targeted deletion of the corresponding or similar genomic region, or subset thereof, in hematopoietic cells of individuals with hemoglobinopathy such as sickle cell or β-thalassemia to de-repress, or lead to the re-expression of, γ-globin and thus fetal hemoglobin.

### Example 6

### Creation of Deletions Proximal to Chr11:5225700-5236750

[0327] In this example, we illustrate use of the methods described herein to generate certain deletions that are proximal to the region Chr11:5225700-5236750. Deletions in this region have been observed in human patients with the HPFH Black allele [Anagnou et al., Blood 65:1245 (1985)], which is characterized by a large deletion (FIG. 16B) in chromosome 11 within region Chr11:5225700-5236750 that overlaps completely with the HPFH-4 and HPFH-5 deletions. It is contemplated that genome editing technologies such as CRISPR can be used to create a targeted deletion of the corresponding or similar genomic region, or subset thereof, in hematopoietic cells of individuals with hemoglobinopathy such as sickle cell or β-thalassemia to de-repress, or lead to the re-expression of, γ-globin and thus fetal hemoglobin.

### Example 7

### Creation of HPFH-Associated Non-Deletion Mutations

[0328] The -175 (T to C) point mutation in the ^{G}γ or ^{A}γ gene of β-globin locus is associated with a phenotype of pancellular HPFH, i.e. across many cells with fairly uniform distribution; see, e.g., Ottolenghi et al., Blood 71:815 (1988) and Surrey et al., Blood 71:807 (1988). The HPFH phenotype is believed to be due to disruption of one or more cis-elements to which regulatory factors normally bind and repress γ-globin expression, or to enhancement of binding of regulatory factors that upregulate γ-globin expression. It is contemplated that genome editing technologies such as CRISPR can be used to create the point mutation, or other modification resulting in changes in regulatory factor binding, in hematopoietic cells of individuals with hemoglobinopathy such as sickle cell or β-thalassemia to de-repress, or lead to the re-expression of, γ-globin and thus fetal hemoglobin.

[0329] Multiple putative PAM sequences for S. pyogenes Cas9 are located adjacent to this target site (FIG. 6C).

### Example 8

### Clinical Studies and Pharmacology

[0330] It is well established that an increase in HbF levels reduces HbS polymerization and thereby ameliorates the phenotype of SCA, reducing clinical complications.

[0331] In the context of the CRISPR/Cas9 technology, or by using other endonucleases for gene editing as described herein, the main objectives of primary pharmacodynamic studies in human subjects/patients will be to demonstrate successful de-repression of γ-globin and concomitant increases and beneficial effects of HbF, and to determine the safety and efficacy of such genetic modifications for the treatment of hemoglobinopathies.

[0332] Cell-based studies can include both wild-type cells, such as normal CD34⁺ hHSCs, which do not normally express high levels of HbF, but are edited as described herein to increase their levels of HbF; as well as cells such as CD34⁺ cells that are derived from patients having a hemoglobinopathy such as β-thalassemia or SCD.

[0333] Total red cell HbF will be measured by cationic HPLC and the distribution of HbF in red cells will be quantified in F-cells (cells with detectable HbF levels) using FACS. Although even small incremental increases in HbF have been shown to have beneficial effects in the context of SCD, as discussed above, in some embodiments at least about 9% of total Hb in a subject will be HbF, which is associated with decreased mortality in SCD; see, e.g., Platt et al., N Engl J Med. 330(23): 1639-1644 (1994). In some embodiments, HbF will be at least about 14%, which is associated with additional clinical benefits, and in some embodiments HbF will be at least about 20% to 30%, which is associated with substantial normalization of phenotype in the context of SCD. Similarly, the introduction of even relatively limited subpopulations of cells having significantly elevated levels of HbF (referred to as “F-cells”) can be beneficial in various patients since in some situations normalized cells will have a selective advantage relative to diseased cells. Even modest levels of circulating RBCs with elevated levels of HbF can be beneficial for ameliorating one or more aspects of hemoglobinopathy in patients. However, it is generally contemplated that at least one tenth of circulating red blood cells (RBCs) will have elevated levels of HbF, more than one quarter of circulating RBCs will have elevated levels of HbF, or at least one third of circulating RBCs will have elevated levels of HbF. In some embodiments, at least about one half, and in some embodiments at least about three quarters or more of circulating RBCs will have elevated levels of HbF.

### Example 9

### Biodistribution

[0334] A preliminary feasibility study (non-GLP) will be performed to demonstrate engraftment of CD34⁺ hHSCs in NOD/SCID IL2Rγ mice. A GLP biodistribution and persistence study will be performed in immune-compromised NOD/SCID IL2Rγ mice. CRISPR/Cas9-modified human CD34⁺ HSCs will be administered by i.v. injection (or other routes, e.g. intraosseous) to NOD/SCID IL2Rγ mice. Non-modified CD34⁺ hHSCs will be used as a control.

### Example 10

### In Vivo Pharmacology Study

[0335] In an illustrative example of in vivo pharmacology, gene-edited HSCs are introduced into immunodeficient mice, and results such as HSC engraftment are assessed. For example, “NSG” or NOD scid gamma (NOD.Cg-Prkdc^{scid} II2rgtmlWjl/SzJ), is a strain of inbred laboratory mice, among the most immunodeficient described to date; see, e.g., Shultz et al., Nat. Rev. Immunol. 7(2): 118-130 (2007). Another immune-compromised mouse model applicable for investigating hematopoietic stem cell transplantation is the NOD/MrkBomTac-Prkdc^{scid} mouse (www.taconic.com/NODSC).

[0336] One illustrative approach employing an immune-compromised mouse model is to inject CRISPR/Cas9-modified CD34⁺ human HSCs into immune-compromised NOD/SCID/IL2rγ mice to demonstrate homing and engraftment capabilities.

[0337] It is also possible to consider studies in model animals, provided such models are reasonably predictive of one or more aspects of conditions in human patients. Development of animal models providing information relevant to certain aspects of various diseases continues to be the subject of regular improvements in the art, and the use of CRISPR/Cas-9 gene editing is greatly facilitating the more rapid creation of such disease-relevant animal models.

### Example 11

Use of Edited Cells for the Amelioration of β-thalassemia

[0338] Using the methods described and illustrated herein, human cells expressing increased levels of HbF can be produced. Such cells can include, for example, human hematopoietic stem cells (human HSCs) that are capable of giving rise to cells of the erythroid lineage such as red blood cells (RBCs). Such HSCs can therefore be used to ameliorate one or more symptoms associated with β-thalassemia.

[0339] For example, when the genome editing procedure is applied to increase the levels of HbF in cells of a patient suffering from a β-thalassemia, one or more symptoms or complications of the β-thalassemia can be ameliorated, as a result of the combination of two beneficial effects. First, HbF provides a functional form of hemoglobin that can play a significant role in ameliorating the anemia and associated clinical conditions of β-thalassemia (i.e. in β-thalassemia major and β-thalassemia intermedia), in which the adult β-globin chains that would normally be expressed from the HBB gene are absent or reduced. Second, the level of unpaired α-globin chains, which is a cause of a number of other problems associated clinically β-thalassemia, are reduced because the α-globin chains can be paired with β-globin chains encoded by the γ-globin genes, expression of which is increased as described herein.

[0340] As also noted herein, β-thalassemia RBCs have selective disadvantages compared to normal RBCs in terms of survival and other factors; and treatment of cells as described herein overcomes certain disadvantages by, e.g., increasing the levels of HbF, and concomitantly decreasing the levels of unpaired α-globin chains.

[0341] In addition, other techniques can be applied to enhance the delivery, expansion and/or persistence of cells modified by genome editing as described herein. These include ablation techniques in which some resident cells are eliminated prior to the introduction of cells. Such techniques are routinely used, for example, in the context of bone marrow transplantation and other procedures in which normal or corrected cells are introduced into patients. Numerous such procedures are known in the art and routinely practiced in connection with the treatment of human patients.

[0342] One illustrative and nonlimiting example of the use of such techniques for the amelioration of β-thalassemia is as follows.

[0343] In an autologous procedure, genome editing is performed on cells derived from a patient with β-thalassemia. Since the patient's own cells are already matched, they do not therefore raise the potential issues associated with use of allogeneic cells. Correction of such cells ex vivo followed by their reintroduction into the patient presents a means of ameliorating the disease.

[0344] As one illustrative example of cells that can be used, peripheral blood stem cells (PBSCs) from a patient with β-thalassemia can be derived from the bloodstream. A process called apheresis or leukapheresis can be used to obtain the PBSCs. For 4 or 5 days before apheresis, the patient may be given a medication to increase the number of stem cells released into the bloodstream. In apheresis, blood is removed through a large vein in the arm or a central venous catheter (a flexible tube that is placed in a large vein in the neck, chest, or groin area). The blood goes through a machine that removes stem cells.

[0345] As another illustrative example of cells that can be used, hematopoietic stem cells (HSCs) can be harvested from the patient's bone marrow using well known techniques.

[0346] CD34 is an antigen associated with hematopoietic stem cells, and isolation of CD34+ HSCs can likewise be accomplished by well-known and clinically-validated methods. For example, a magnetic bead separation process that has been FDA-approved for use in various transplantation contexts and that is available commercially from Miltenyi Biotec, along with preparations for the handling and maintenance of such cells, can be used.

[0347] For treating a human patient with β-thalassemia as described herein, a population of CD34+ HSCs adjusted to reflect the patient's weight can be used, e.g. a population comprising about ten million CD34+ HSCs per kilogram of weight. This population of cells is then modified using the genome editing methods described herein. By way of illustration, if Cas9 is the genome editing endonuclease, the protein can be introduced into the CD34+ HSCs by transfection of mRNA using various known techniques; along with the introduction, potentially simultaneously in the transfection, of guide RNAs (which can be single-molecule guides or double-molecule guides) that target loci as described herein. Depending on the procedure used, a portion of the cells (e.g., half the original cells) may then be used for reintroduction into the patient. If ablation is to be used to enhance engraftment of the newly-introduced cells, the patient may be subject to, e.g., mild bone marrow conditioning prior to introduction of the genome edited HSCs. Following any conditioning, the population of genome edited HSCs can be reintroduced into the patient, e.g., by transfusion. Over time, the HSCs give rise to cells of the erythroid lineage, including red blood cells (RBCs).

[0348] In the resulting RBCs, genome editing in the case of β-thalassemia results in an increase in the level of HbF, and a concomitant decrease in unpaired α-globin chains; as a result of which one or more symptoms or complications associated with the β-thalassemia are ameliorated.

### Example 12

### Use of Edited Cells for the Amelioration of Sickle Cell Anemia

[0349] Using the methods described and illustrated herein, human cells expressing increased levels of HbF can be produced. Such cells can include, for example, human hematopoietic stem cells (human HSCs) that are capable of giving rise to cells of the erythroid lineage such as red blood cells (RBCs). Such HSCs can therefore be used to ameliorate one or more symptoms associated with Sickle Cell Disease, such as Sickle Cell Anemia.

[0350] For example, when the genome editing procedure is applied to increase the levels of HbF in cells of a patient suffering from a Sickle Cell Anemia (SCA), one or more symptoms or complications of SCA can be ameliorated. In certain embodiments, at least one copy of the mutant β-globin gene is knocked down or eliminated, resulting in combination of two beneficial effects. First, HbF provides a functional form of hemoglobin that can play a significant role in ameliorating the anemia and associated clinical conditions of SCA. Second, the level of sickle cell hemoglobin (HbS) expressed from the mutant β-globin is reduced or eliminated. The presence of HbS causes a number of the problems associated clinically with SCA, and even modest reductions in the presence of HbS can be used to reduce or essentially prevent sickling, as described herein and in the art.

[0351] As also noted herein, sickle cell RBCs have selective disadvantages compared to normal RBCs in terms of survival and other factors; and treatment of cells as described herein overcomes certain disadvantages by, e.g., increasing the levels of HbF, and, in embodiments in which the mutant β-globin gene is knocked down or eliminated, concomitantly decreasing the levels of HbS.

[0352] In addition, other techniques can be applied to enhance the delivery, expansion and/or persistence of cells modified by genome editing as described herein. These include ablation techniques in which some resident cells are eliminated prior to the introduction of cells. Such techniques are routinely used, for example, in the context of bone marrow transplantation and other procedures in which normal or corrected cells are introduced into patients. Numerous such procedures are known in the art and routinely practiced in connection with the treatment of human patients.

[0353] One illustrative and nonlimiting example of the use of such techniques for the amelioration of SCA is as follows.

[0354] In an autologous procedure, genome editing is performed on cells derived from a patient with SCA. Since the patient's own cells are already matched, they do not therefore raise the potential issues associated with use of allogeneic cells. Correction of such cells ex vivo followed by their reintroduction into the patient presents a means of ameliorating the disease.

[0355] As one illustrative example of cells that can be used, PBSCs from a patient with SCA can be derived from the bloodstream, or HSCs can be harvested from the patient's bone marrow, each as described above in the preceding example using well-known techniques. CD34+ cells can then be derived, using procedures as described in the preceding example and well-known techniques.

[0356] For treating a human patient with SCA as described herein, a population of CD34+ HSCs adjusted to reflect the patient's weight can be used, e.g. a population comprising about ten million CD34+ HSCs per kilogram of weight. This population of cells is then modified using the genome editing methods described herein. By way of illustration, if Cas9 is the genome editing endonuclease, the protein can be introduced into the CD34+ HSCs by transfection of mRNA using various known techniques; along with the introduction, potentially simultaneously in the transfection, of guide RNAs (which can be single-molecule guides or double-molecule guides) that target loci as described herein. Depending on the procedure used, a portion of the cells (e.g., half the original cells) may then be used for reintroduction into the patient. If ablation is to be used to enhance engraftment of the newly-introduced cells, the patient may be subject to, e.g., mild bone marrow conditioning prior to introduction of the genome edited HSCs. Following any conditioning, the population of genome edited HSCs can be reintroduced into the patient, e.g., by transfusion. Over time, the HSCs give rise to cells of the erythroid lineage, including red blood cells (RBCs).

[0357] In the resulting RBCs, genome editing in the case of SCA results in an increase in the level of HbF, and in embodiments in which the mutant β-globin gene is knocked down or eliminated, concomitantly decreasing the levels of HbS; as a result of which one or more symptoms or complications associated with the β-thalassemia are ameliorated.

### Example 13—CRISPR/SpCas9 Target Sites for the Globin Locus

[0358] Regions of the globin locus were scanned for target sites. Each area was scanned for a protospacer adjacent motif (PAM) having the sequence NRG. gRNA 20 bp spacer sequences corresponding to the PAM were identified, as shown in SEQ ID NOs:1-56,961 of the Sequence Listing.

### Example 14—CRISPR/SaCas9 Target Sites for the Globin Locus

[0359] Regions of the globin locus were scanned for target sites. Each area was scanned for a protospacer adjacent motif (PAM) having the sequence NNGRRT. gRNA 20 bp spacer sequences corresponding to the PAM were identified, as shown in SEQ ID NOs:56,962-64,104 of the Sequence Listing.

### Example 15—CRISPR/StCas9 Target Sites for the Globin Locus

[0360] Regions of the globin locus were scanned for target sites. Each area was scanned for a protospacer adjacent motif (PAM) having the sequence NNAGAAW. gRNA 20 bp spacer sequences corresponding to the PAM were identified, as shown in SEQ ID NOs:64,105-66,998 of the Sequence Listing.

### Example 16—CRISPR/TdCas9 Target Sites for the Globin Locus

[0361] Regions of the globin locus were scanned for target sites. Each area was scanned for a protospacer adjacent motif (PAM) having the sequence NAAAAC. gRNA 20 bp spacer sequences corresponding to the PAM were identified, as shown in SEQ ID NOs:66,999-68,146 of the Sequence Listing.

### Example 17—CRISPR/NmCas9 Target Sites for the Globin Locus

[0362] Regions of the globin locus were scanned for target sites. Each area was scanned for a protospacer adjacent motif (PAM) having the sequence (NNNNGHTT). gRNA 20 bp spacer sequences corresponding to the PAM were identified, as shown in SEQ ID NOs:68,147-75,145 of the Sequence Listing.

### Example 18—CRISPR/Acidominococcus and Lachnospiracease Cpf1 Target Sites for the Globin Locus

[0363] Regions of the globin locus were scanned for target sites. Each area was scanned for a protospacer adjacent motif (PAM) having the sequence YTN. gRNA 22 bp spacer sequences corresponding to the PAM were identified, as shown in SEQ ID NOs:75,146-161,297 of the Sequence Listing.

### Example 19—Development of Corfu Guide RNA (In Vitro Transcription, IVT)

### Example 19A—Development of qRNA for Corfu Large Region

[0364] In this example, we illustrate use of the methods described herein in generating gRNAs for the Corfu Patient Deletion (located about ch11:5233163-5240389). Deletion of this “Corfu Large Region,” (“CL”) for example using the gRNA of the invention, may confer a HPFH phenotype. CRISPR gRNAs were designed to effect cleavage at each end of the Corfu Large Region and their respective editing efficiency was assayed. Efficient gRNA pairs can be selected and used for deletion of the Corfu Large Region. Methods for further refinement and selection of the gRNA pairs are also provided.

### Guide RNA Design

[0365] Guide RNAs were designed using the methods described herein. Briefly, COSMID (CRISPR Off-target Sites with Mismatches, Insertions and Deletions) (available on the web at crispr.bme.gatech.edu) was used with cutoffs>0.42, <13.0 to generate 33 gRNAs (14 AS, 19 S) for the 5′ to CL deletion. COSMID was used with cutoffs>0.48, <13.0 to generate 30 gRNAs (20 AS, 10 S). gRNA positions are shown graphically in FIGS. 9-10 and gRNA sequences are listed in Tables 1-2.

[0366] FIG. 9 presents a Corfu Large guide map, showing 5′ and 3′ ends, as well as gRNA loci.

[0367] FIG. 10A presents and enlarged view of 5′ end of Corfu Large guide map (showing 33 gRNA).

[0368] FIG. 10B presents an enlarged view of 3′ end of Corfu Large guide map (showing 30 gRNA).

TABLE 1
5′ gRNA. Note that where the guides are presented
as DNA sequences (e.g., Tables 1-4), the gRNA is
the corresponding RNA sequence.

| gRNA name | gRNA sequence | SEQ ID NO: |
|---|---|---|
| CL08_R15 | CAGAAATAGTGCGTCCTTT | 161, 200 |
| CL08_F19 | AAGGACGCACTATTTCTGA | 161, 201 |
| CL08_F18 | CAAGAAAAGAGAGAACTCG | 161, 202 |
| CL08_F17 | AAAAGAGAGAACTCGTGGG | 161, 203 |
| CL08_F16 | AACTCGTGGGTGGATTTAG | 161, 204 |
| CL08_F15 | CTCGTGGGTGGATTTAGTG | 161, 205 |
| CL08_F14 | TAGTGGGGTAGTTACTCCT | 161, 206 |
| CL08_F13 | GGTCAATGGAGGTACTCTT | 161, 207 |
| CL08_F12 | ACTCAGGATATAGCTCATT | 161, 208 |
| CL08_F11 | TTTCTCTTAACGTCTTCAA | 161, 209 |
| CL08_F10 | CTAACTTGGGTATAGTCAG | 161, 210 |
| CL08_F9 | CAAGCCCCCTGTTTGGATC | 161, 211 |
| CL08_R14 | ATTGCCAGATCCAAACAGG | 161, 212 |
| CL08_R13 | CATTGCCAGATCCAAACAG | 161, 213 |
| CL08_R12 | TCATTGCCAGATCCAAACA | 161, 214 |
| CL08_R11 | TTCATTGCCAGATCCAAAC | 161, 215 |
| CL08_R10 | TCCTAAGGGTCTTGGGTAC | 161, 216 |
| CL08_R9 | GGTGCTACATACTTCCTAA | 161, 217 |
| CL08_R8 | TATGGTGAGGTGAGCTCTT | 161, 218 |
| CL08_F8 | CTCACCATATCTCTTGAGT | 161, 219 |
| CL08_F7 | GTGGGAGCACATAGATAGG | 161, 220 |
| CL08_R6 | GCTTTGTGGGTTATTAGTG | 161, 221 |
| CL08_R5 | CTGCTTTGTGGGTTATTAG | 161, 222 |
| CL08_R4 | ATTATTGTACATGAGCAAC | 161, 223 |
| CL08_F6 | ACATAAGTACACATCTTAC | 161, 224 |
| CL08_F5 | CCAGTCAATCTAGAGAATT | 161, 225 |
| CL08_R3 | AAATTCTCTAGATTGACTG | 161, 226 |
| CL08_R2 | CAAATTCTCTAGATTGACT | 161, 227 |
| CL08_R1 | CCAAATTCTCTAGATTGAC | 161, 228 |
| CL08_F4 | ACATGCTGTTCATTTACTC | 161, 229 |
| CL08_F3 | ACCTAAACTGAGGAACCTT | 161, 230 |
| CL08_F2 | TATCAGTTAGGGTCCATCA | 161, 231 |
| CL08_F1 | GTTAGGGTCCATCAAGGAA | 161, 232 |
| CL08 | CCACTCAAGAGATATGGTG | 161, 309 |

TABLE 2
3′ gRNA

| gRNA name | gRNA sequence | SEQ ID NO: |
|---|---|---|
| CL01_F10 | ACTGCTGTCAATGCCCTGT | 161, 233 |
| CL01_F9 | AAGTGAACGTGGATGCAGT | 161, 234 |
| CL01_F8 | TTTCCTACCCTCAGATTAC | 161, 235 |
| CL01_R20 | CCACCAGTAATCTGAGGGT | 161, 236 |
| CL01_R19 | TAGACCACCAGTAATCTGA | 161, 237 |
| CL01_R18 | TTAAAATAGCAAGATTGTG | 161, 238 |
| CL01_F7 | TTGTCTCTCCACATGGGTA | 161, 239 |
| CL01_F6 | TGTCTCTCCACATGGGTAT | 161, 240 |
| CL01_R17 | AGCCTCTCCCATACCCATG | 161, 241 |
| CL01_F5 | TGGGGCAGAAGTCGTTGCT | 161, 242 |
| CL01_F4 | ATGCTGATGGGAATAACCT | 161, 243 |
| CL01_F3 | CTGGCCCGCAACTTTGGCA | 161, 244 |
| CL01_R16 | AATTCCTTGCCAAAGTTGC | 161, 245 |
| CL01_R15 | GAATTCCTTGCCAAAGTTG | 161, 246 |
| CL01_R14 | CAATGGTACTTGTGAGCCA | 161, 247 |
| CL01_R13 | GGTTATCAGGAAACAGTCC | 161, 248 |
| CL01_R12 | GGGTCTTCTTATGGTTATC | 161, 249 |
| CL01_R11 | GGGAAATAGGGTCTTCTTA | 161, 250 |
| CL01_R10 | AGGAACCTTCTTACACACC | 161, 251 |
| CL01_F2 | TTCCTGAGGCTCTACAGAT | 161, 252 |
| CL01_R9 | TCCCTATCTGTAGAGCCTC | 161, 253 |
| CL01_F1 | AAAGCAAGGGAACCGTACA | 161, 254 |
| CL01_R8 | CACCCATTAATGCCTTGTA | 161, 255 |
| CL01_R7 | AATCGTAGCATTACCCTTG | 161, 256 |
| CL01_R6 | TTGATGGGGTATAGTATTA | 161, 257 |
| CL01_R5 | GGAGCAGGAACACTTGATG | 161, 258 |
| CL01_R4 | TGGAGCAGGAACACTTGAT | 161, 259 |
| CL01_R3 | TAGAGAAGTTTATTGTGGC | 161, 260 |
| CL01_R2 | ACAAAGAAACACTGTGCGA | 161, 261 |
| CL01_R1 | ACACATTGTCAGTATATTC | 161, 262 |
| CL01 | GTGTGCTGGCCCGCAACTT | 161, 310 |

### Experimental

[0369] The gRNA described above were ordered from Thermo Fisher (at median concentration 158.2 ng/μL). Experiments were carried out in mobilized peripheral blood CD34+ cells at 2 days post-thaw (CD34 from AllCells, Donor A5036). 5 μL of each guide was complexed with 1.9 μg of Cas9 (Feldan) for 10 min at room temperature. The resulting RNP mixture was electroporated into 50K of CD34 per guide with Lonza Amaxa 4D program CA-137, and cultured at 37° C. for 48 hours prior to genomic DNA extraction for TIDE analysis for editing efficiency. The resulting editing efficiency values are presented in FIG. 11.

[0370] FIG. 11 presents the results of the editing efficiency screen results for Corfu Large gRNA.

[0371] These data show that a number of screened sequences acted as efficient guide RNA in one CD34 donor. Notably, these guide RNA were all used at lower concentration (0.5-1 μg) than typical synthetic guides, but still resulted in high editing efficiencies. Therefore, these data identify a number of guide RNA pairs that could be used to target the Corfu Large Region.

[0372] These data also identify a number of guide RNA pairs that could be used for further development. Improved guide strands could be identified using methods described herein. One such example would be to (1) repeat the screen in a separate CD34 donor, (2) short list high efficiency gRNAs as chemically modified gRNAs and matrix for deletion strategy to screen for HbF increase upon erythroid differentiation, and (3) examine and select pairs based upon their efficiency as well as their off-target activity in CD34+ cells.

### Example 19B—Development of gRNA for Corfu Small Region

[0373] In this example, we illustrate use of the methods described herein in generating gRNAs for the “Corfu Small Region” (“CS”), which is not a known naturally occurring deletion. Deletion of CS, for example using the gRNAs of the invention, may confer a HPFH phenotype. CRISPR gRNA were designed to effect cleavage at each end of the Corfu Small Region and their respective editing efficiency was assayed. Efficient gRNA pairs can be selected and used for deletion of the Corfu Small Region. Methods for further refinement and selection of the gRNA pairs are also provided.

### Guide RNA Design

[0374] Guide RNAs were designed using the methods described herein. Briefly, COSMID (CRISPR Off-target Sites with Mismatches, Insertions and Deletions) (available on the web at crispr.bme.gatech.edu) was used with cutoffs>0.40, <15.0 to generate 46 gRNAs (20 AS; 26 5). gRNA positions are shown graphically in FIGS. 12-13 and gRNA sequences are listed in Tables 3-4.

[0375] FIG. 12 presents a Corfu Small guide map, showing 5′ and 3′ ends, as well as gRNA loci.

[0376] FIG. 13A presents a 5′ Enlarged view of 5′ end of Corfu Small guide map (showing 30 gRNA).

[0377] FIG. 13B presents an enlarged view of 3′ end of Corfu Small guide map (showing 16 gRNA).

TABLE 3
5′ gRNA

| gRNA name | gRNA sequence | SEQ ID NO: |
|---|---|---|
| CS06_F17 | GAAAACCTCTTCCGCCATT | 161, 263 |
| CS06_R14 | CTAGGCCTAATGGCGGAAG | 161, 264 |
| CS06_F16 | TTCCGCCATTAGGCCTAGA | 161, 265 |
| CS06_F15 | TCCGCCATTAGGCCTAGAA | 161, 266 |
| CS06_R13 | GCCCTTCTAGGCCTAATGG | 161, 267 |
| CS06_R12 | GACCTCTGGTTATGGGCTC | 161, 268 |
| CS06_R11 | CCAGTGGACCTCTGGTTAT | 161, 269 |
| CS06_R10 | ACTGAATCCAGTGGACCTC | 161, 270 |
| CS06_F14 | CTGGATTCAGTGAGCTAGT | 161, 271 |
| CS06_F13 | GAGAGCCAGAACTGTCTAA | 161, 272 |
| CS06_F12 | GAGCCAGAACTGTCTAATG | 161, 273 |
| CS06_R9 | TGCCCCCATTAGACAGTTC | 161, 274 |
| CS06_R8 | TCGCATGTACATTCTGCAA | 161, 275 |
| CS06_F11 | GAATGTACATGCGACTGAA | 161, 276 |
| CS06_F10 | AATGTACATGCGACTGAAA | 161, 277 |
| CS06_F9 | ACATGCGACTGAAAGGGTG | 161, 278 |
| CS06_R7 | TGGTATGGGAGGTATACTA | 161, 279 |
| CS06_R6 | ATGAGCCACATGGTATGGG | 161, 280 |
| CS06_R5 | AGGATGAGCCACATGGTAT | 161, 281 |
| CS06_R4 | ATGGAAGTCAACTTGCTGT | 161, 282 |
| CS06_F7 | CTTCCATTCTAACCCACAT | 161, 283 |
| CS06_F6 | CTGAGTTCTAAAATCATCG | 161, 284 |
| CS06_F5 | CTAAAATCATCGGGGATTT | 161, 285 |
| CS06_F4 | TAAAATCATCGGGGATTTT | 161, 286 |
| CS06_F3 | GCTACTTGCCCATTCACCA | 161, 287 |
| CS06_R3 | CGAACTGTTGATTAGAGGT | 161, 288 |
| CS06_R2 | GAAACAATGAGGACCTGAC | 161, 289 |
| CS06_R1 | ATAGCATCTACTCTTGTTC | 161, 290 |
| CS06_F2 | CCACTTTTAGACCTTATCC | 161, 291 |
| CS06_F1 | TTTTAGACCTTATCCTGGC | 161, 292 |
| CS06 | GTATACCTCCCATACCATG | 161, 311 |

TABLE 4
3′ gRNA

| gRNA name | gRNA sequence | SEQ ID NO: |
|---|---|---|
| CS02_F10 | TTAAGTGGCTACCGGTTTG | 161, 293 |
| CS02_F9 | TCTGTACTAGCATATTCCC | 161, 294 |
| CS02_R7 | TAAATTTAACGAAGTTCCT | 161, 295 |
| CS02_R6 | TTAAATTTAACGAAGTTCC | 161, 296 |
| CS02_R5 | GTGTTTTAGGCTAATATAG | 161, 297 |
| CS02_F8 | ACTGCTGAAAGAGATGCGG | 161, 298 |
| CS02_F7 | TGCTGAAAGAGATGCGGTG | 161, 299 |
| CS02_F6 | CCAATCTCAGGGCAAGTTA | 161, 300 |
| CS02_R4 | TCTGCCCTGCCTTTTATGC | 161, 301 |
| CS02_F5 | ACTGCTGTCAATGCCCTGT | 161, 302 |
| CS02_F4 | CTGTGGGGCAAAGTGAACG | 161, 303 |
| CS02_R3 | CACGTTCACTTTGCCCCAC | 161, 304 |
| CS02_F3 | AAGTGAACGTGGATGCAGT | 161, 305 |
| CS02_F2 | TTTCCTACCCTCAGATTAC | 161, 306 |
| CS02_R2 | CCACCAGTAATCTGAGGGT | 161, 307 |
| CS02_F1 | ATTACTGGTGGTCTACCCT | 161, 308 |
| CS02 | TAGACCACCAGTAATCTGA | 161, 312 |

### Experimental

[0378] The gRNA described above were ordered from Thermo Fisher (at median concentration 160.6 ng/μL). Experiments were carried out in mobilized peripheral blood CD34+ cells at 2 days post-thaw (CD34 from AllCells, Donor A5036). 5 μL of each guide was complexed with 1.9 μg of Cas9 (Feldan) for 10 min at room temperature. The resulting RNP mixture was electroporated into 50K of CD34 per guide with Lonza Amaxa 4D program CA-137, and cultured at 37° C. for 48 hours prior to genomic DNA extraction for TIDE analysis for editing efficiency. The resulting editing efficiency values are presented in FIG. 14.

[0379] FIG. 14 presents the results of the editing efficiency screen results for Corfu Small gRNA.

[0380] These data show that most screened sequences acted as efficient guide RNA in one CD34 donor. Notably, these guide RNA were all used at lower concentration (0.5-1 μg) than typical synthetic guides, but still resulted in very high editing efficiencies. Therefore, these data identify a number of guide RNA pairs that could be used to target the Corfu Small Region.

[0381] These data also identify a number of guide RNA pairs that could be used for further development. Improved guide strands could be identified using methods described herein. One such example would be to (1) repeat the screen in a separate CD34 donor, (2) short list high efficiency gRNAs as chemically modified gRNAs and matrix for deletion strategy to screen for HbF increase upon erythroid differentiation, and (3) examine and select pairs based upon their efficiency as well as their off-target activity in CD34⁺ cells.

### NOTE REGARDING ILLUSTRATIVE EMBODIMENTS

[0382] While the present disclosure provides descriptions of various specific embodiments for purpose of illustrating various aspects of the present invention and/or its potential applications, it is understood that variations and modifications will occur to those skilled in the art. Accordingly, the invention or inventions described herein should be understood to be at least as broad as they are claimed, and not as more narrowly defined by particular illustrative embodiments provided herein.

[0383] All documents cited in this application are hereby incorporated by reference in their entirety, with particular attention to the disclosure for which they are referred.

The application's sequence listing, which the Patent Office published only in electronic form, follows.

SEQUENCE LISTING (161315 sequences)

SEQ ID NO: 1 - DNA, 20 bp, synthetic construct
  misc_feature 1..20: note = chemically synthesized
  source 1..20: mol_type = other DNA
aaaaaaatgatctatgacct

SEQ ID NO: 2 - DNA, 20 bp, synthetic construct
  misc_feature 1..20: note = chemically synthesized
  source 1..20: mol_type = other DNA
aaaaaatgatctatgacctg

SEQ ID NO: 3 - DNA, 20 bp, synthetic construct
  misc_feature 1..20: note = chemically synthesized
  source 1..20: mol_type = other DNA
tctatgacctgaggtttttc

SEQ ID NO: 4 - DNA, 20 bp, synthetic construct
  misc_feature 1..20: note = chemically synthesized
  source 1..20: mol_type = other DNA
gtttttcaagaacaattgac

SEQ ID NO: 5 - DNA, 20 bp, synthetic construct
  misc_feature 1..20: note = chemically synthesized
  source 1..20: mol_type = other DNA
aattcttatgccactaattt

SEQ ID NO: 6 - DNA, 20 bp, synthetic construct
  misc_feature 1..20: note = chemically synthesized
  source 1..20: mol_type = other DNA
gccactaattttagacaata

SEQ ID NO: 7 - DNA, 20 bp, synthetic construct
  misc_feature 1..20: note = chemically synthesized
  source 1..20: mol_type = other DNA
cctcctcttcactaacacaa

SEQ ID NO: 8 - DNA, 20 bp, synthetic construct
  misc_feature 1..20: note = chemically synthesized
  source 1..20: mol_type = other DNA
cttcactaacacaatagccc

SEQ ID NO: 9 - DNA, 20 bp, synthetic construct
  misc_feature 1..20: note = chemically synthesized
  source 1..20: mol_type = other DNA
acttatttatatttgctgtg

SEQ ID NO: 10 - DNA, 20 bp, synthetic construct
  misc_feature 1..20: note = chemically synthesized
  source 1..20: mol_type = other DNA
tggtatgctgccacatgccc

SEQ ID NO: 11 - DNA, 20 bp, synthetic construct
  misc_feature 1..20: note = chemically synthesized
  source 1..20: mol_type = other DNA
tatgctgccacatgcccaag

SEQ ID NO: 12 - DNA, 20 bp, synthetic construct
  misc_feature 1..20: note = chemically synthesized
  source 1..20: mol_type = other DNA
acacacacacgtcttacttg

SEQ ID NO: 13 - DNA, 20 bp, synthetic construct
  misc_feature 1..20: note = chemically synthesized
  source 1..20: mol_type = other DNA
acgtcttacttgtagaacac

SEQ ID NO: 14 - DNA, 20 bp, synthetic construct
  misc_feature 1..20: note = chemically synthesized
  source 1..20: mol_type = other DNA
aacaaatgaatactctccaa

SEQ ID NO: 15 - DNA, 20 bp, synthetic construct
  misc_feature 1..20: note = chemically synthesized
  source 1..20: mol_type = other DNA
tactctccaatggcacatta

SEQ ID NO: 16 - DNA, 20 bp, synthetic construct
  misc_feature 1..20: note = chemically synthesized
  source 1..20: mol_type = other DNA
caatggcacattatagcttt

SEQ ID NO: 17 - DNA, 20 bp, synthetic construct
  misc_feature 1..20: note = chemically synthesized
  source 1..20: mol_type = other DNA
acattatagcttttggaata

SEQ ID NO: 18 - DNA, 20 bp, synthetic construct
  misc_feature 1..20: note = chemically synthesized
  source 1..20: mol_type = other DNA
atagcttttggaataaagtc

SEQ ID NO: 19 - DNA, 20 bp, synthetic construct
  misc_feature 1..20: note = chemically synthesized
  source 1..20: mol_type = other DNA
gcaactctgcacaacattaa

SEQ ID NO: 20 - DNA, 20 bp, synthetic construct
  misc_feature 1..20: note = chemically synthesized
  source 1..20: mol_type = other DNA
catattttccttgtctcccc

SEQ ID NO: 21 - DNA, 20 bp, synthetic construct
  misc_feature 1..20: note = chemically synthesized
  source 1..20: mol_type = other DNA
tcataccatattgaaaaaac

SEQ ID NO: 22 - DNA, 20 bp, synthetic construct
  misc_feature 1..20: note = chemically synthesized
  source 1..20: mol_type = other DNA
ataccatattgaaaaaacta

SEQ ID NO: 23 - DNA, 20 bp, synthetic construct
  misc_feature 1..20: note = chemically synthesized
  source 1..20: mol_type = other DNA
ttaccttaaactacattatc

SEQ ID NO: 24 - DNA, 20 bp, synthetic construct
  misc_feature 1..20: note = chemically synthesized
  source 1..20: mol_type = other DNA
aatctcctctactatctacc

SEQ ID NO: 25 - DNA, 20 bp, synthetic construct
  misc_feature 1..20: note = chemically synthesized
  source 1..20: mol_type = other DNA
atgatgtgttcttacttcct

SEQ ID NO: 26 - DNA, 20 bp, synthetic construct
  misc_feature 1..20: note = chemically synthesized
  source 1..20: mol_type = other DNA
ctactcatccatcattcctc

SEQ ID NO: 27 - DNA, 20 bp, synthetic construct
  misc_feature 1..20: note = chemically synthesized
  source 1..20: mol_type = other DNA
atccatcattcctcaagaat

SEQ ID NO: 28 - DNA, 20 bp, synthetic construct
  misc_feature 1..20: note = chemically synthesized
  source 1..20: mol_type = other DNA
ccatcattcctcaagaatca

SEQ ID NO: 29 - DNA, 20 bp, synthetic construct
  misc_feature 1..20: note = chemically synthesized
  source 1..20: mol_type = other DNA
catcattcctcaagaatcag

SEQ ID NO: 30 - DNA, 20 bp, synthetic construct
  misc_feature 1..20: note = chemically synthesized
  source 1..20: mol_type = other DNA
taaatgcaactcccctgctt

SEQ ID NO: 31 - DNA, 20 bp, synthetic construct
  misc_feature 1..20: note = chemically synthesized
  source 1..20: mol_type = other DNA
tgcaactcccctgctttggt

SEQ ID NO: 32 - DNA, 20 bp, synthetic construct
  misc_feature 1..20: note = chemically synthesized
  source 1..20: mol_type = other DNA
ttccccacctctcttccttt

SEQ ID NO: 33 - DNA, 20 bp, synthetic construct
  misc_feature 1..20: note = chemically synthesized
  source 1..20: mol_type = other DNA
tcctttcagtctctcttttc

SEQ ID NO: 34 - DNA, 20 bp, synthetic construct
  misc_feature 1..20: note = chemically synthesized
  source 1..20: mol_type = other DNA
ctctcttttccagaattaca

SEQ ID NO: 35 - DNA, 20 bp, synthetic construct
  misc_feature 1..20: note = chemically synthesized
  source 1..20: mol_type = other DNA
tctcttttccagaattacat

SEQ ID NO: 36 - DNA, 20 bp, synthetic construct
  misc_feature 1..20: note = chemically synthesized
  source 1..20: mol_type = other DNA
ttacataggtacaaactcat

SEQ ID NO: 37 - DNA, 20 bp, synthetic construct
  misc_feature 1..20: note = chemically synthesized
  source 1..20: mol_type = other DNA
atgagaattattcactgtgc

SEQ ID NO: 38 - DNA, 20 bp, synthetic construct
  misc_feature 1..20: note = chemically synthesized
  source 1..20: mol_type = other DNA
actattatgtcacgattctg

SEQ ID NO: 39 - DNA, 20 bp, synthetic construct
  misc_feature 1..20: note = chemically synthesized
  source 1..20: mol_type = other DNA
tatgtcacgattctgtagta

SEQ ID NO: 40 - DNA, 20 bp, synthetic construct
  misc_feature 1..20: note = chemically synthesized
  source 1..20: mol_type = other DNA
gtatagtatttttaatattg

SEQ ID NO: 41 - DNA, 20 bp, synthetic construct
  misc_feature 1..20: note = chemically synthesized
  source 1..20: mol_type = other DNA
tatagtatttttaatattgc

SEQ ID NO: 42 - DNA, 20 bp, synthetic construct
  misc_feature 1..20: note = chemically synthesized
  source 1..20: mol_type = other DNA
gataaaatgatgaattaata

SEQ ID NO: 43 - DNA, 20 bp, synthetic construct
  misc_feature 1..20: note = chemically synthesized
  source 1..20: mol_type = other DNA
aaaatgatgaattaataaag

SEQ ID NO: 44 - DNA, 20 bp, synthetic construct
  misc_feature 1..20: note = chemically synthesized
  source 1..20: mol_type = other DNA
ttaataaagaagtaaatttt

SEQ ID NO: 45 - DNA, 20 bp, synthetic construct
  misc_feature 1..20: note = chemically synthesized
  source 1..20: mol_type = other DNA
taataaagaagtaaattttg

SEQ ID NO: 46 - DNA, 20 bp, synthetic construct
  misc_feature 1..20: note = chemically synthesized
  source 1..20: mol_type = other DNA
aaagaagtaaattttgaggt

SEQ ID NO: 47 - DNA, 20 bp, synthetic construct
  misc_feature 1..20: note = chemically synthesized
  source 1..20: mol_type = other DNA
gatgtgtcaaatgcaacacc

SEQ ID NO: 48 - DNA, 20 bp, synthetic construct
  misc_feature 1..20: note = chemically synthesized
  source 1..20: mol_type = other DNA
tgaaaatgtatttaaatttt

SEQ ID NO: 49 - DNA, 20 bp, synthetic construct
  misc_feature 1..20: note = chemically synthesized
  source 1..20: mol_type = other DNA
gaaaatgtatttaaattttt

SEQ ID NO: 50 - DNA, 20 bp, synthetic construct
  misc_feature 1..20: note = chemically synthesized
  source 1..20: mol_type = other DNA
tattgtctcttgatattcat

SEQ ID NO: 51 - DNA, 20 bp, synthetic construct
  misc_feature 1..20: note = chemically synthesized
  source 1..20: mol_type = other DNA
ttcataagattttctttgac

SEQ ID NO: 52 - DNA, 20 bp, synthetic construct
  misc_feature 1..20: note = chemically synthesized
  source 1..20: mol_type = other DNA
gattttctttgacaagaaca

SEQ ID NO: 53 - DNA, 20 bp, synthetic construct
  misc_feature 1..20: note = chemically synthesized
  source 1..20: mol_type = other DNA
ttcctttgattttttttttt

SEQ ID NO: 54 - DNA, 20 bp, synthetic construct
  misc_feature 1..20: note = chemically synthesized
  source 1..20: mol_type = other DNA
tcctttgattttttttttta

SEQ ID NO: 55 - DNA, 20 bp, synthetic construct
  misc_feature 1..20: note = chemically synthesized
  source 1..20: mol_type = other DNA
tttgatttttttttttaagg

SEQ ID NO: 56 - DNA, 20 bp, synthetic construct
  misc_feature 1..20: note = chemically synthesized
  source 1..20: mol_type = other DNA
ttgatttttttttttaaggc

SEQ ID NO: 57 - DNA, 20 bp, synthetic construct
  misc_feature 1..20: note = chemically synthesized
  source 1..20: mol_type = other DNA
tgatttttttttttaaggca

SEQ ID NO: 58 - DNA, 20 bp, synthetic construct
  misc_feature 1..20: note = chemically synthesized
  source 1..20: mol_type = other DNA
tttttaaggcagggatgatc

SEQ ID NO: 59 - DNA, 20 bp, synthetic construct
  misc_feature 1..20: note = chemically synthesized
  source 1..20: mol_type = other DNA
gcagggatgatcaagaaaat

SEQ ID NO: 60 - DNA, 20 bp, synthetic construct
  misc_feature 1..20: note = chemically synthesized
  source 1..20: mol_type = other DNA
agggatgatcaagaaaatga

SEQ ID NO: 61 - DNA, 20 bp, synthetic construct
  misc_feature 1..20: note = chemically synthesized
  source 1..20: mol_type = other DNA
gtcaacaacttgttttcatt

SEQ ID NO: 62 - DNA, 20 bp, synthetic construct
  misc_feature 1..20: note = chemically synthesized
  source 1..20: mol_type = other DNA
acttgttttcattgagtccc

SEQ ID NO: 63 - DNA, 20 bp, synthetic construct
  misc_feature 1..20: note = chemically synthesized
  source 1..20: mol_type = other DNA
cattgagtccctggatgttt

SEQ ID NO: 64 - DNA, 20 bp, synthetic construct
  misc_feature 1..20: note = chemically synthesized
  source 1..20: mol_type = other DNA
cctggatgtttcagaacaac

SEQ ID NO: 65 - DNA, 20 bp, synthetic construct
  misc_feature 1..20: note = chemically synthesized
  source 1..20: mol_type = other DNA
tgtttcagaacaacgagcct

SEQ ID NO: 66 - DNA, 20 bp, synthetic construct
  misc_feature 1..20: note = chemically synthesized
  source 1..20: mol_type = other DNA
gtttcagaacaacgagcctt

SEQ ID NO: 67 - DNA, 20 bp, synthetic construct
  misc_feature 1..20: note = chemically synthesized
  source 1..20: mol_type = other DNA
gccttaggtgcatttaaatt

SEQ ID NO: 68 - DNA, 20 bp, synthetic construct
  misc_feature 1..20: note = chemically synthesized
  source 1..20: mol_type = other DNA
tgcatttaaattcagtgaca

SEQ ID NO: 69 - DNA, 20 bp, synthetic construct
  misc_feature 1..20: note = chemically synthesized
  source 1..20: mol_type = other DNA
gcatttaaattcagtgacaa

SEQ ID NO: 70 - DNA, 20 bp, synthetic construct
  misc_feature 1..20: note = chemically synthesized
  source 1..20: mol_type = other DNA
gcataatttataaatcctcc

SEQ ID NO: 71 - DNA, 20 bp, synthetic construct
  misc_feature 1..20: note = chemically synthesized
  source 1..20: mol_type = other DNA
ataatttataaatcctcctg

SEQ ID NO: 72 - DNA, 20 bp, synthetic construct
  misc_feature 1..20: note = chemically synthesized
  source 1..20: mol_type = other DNA
tcctcctggagaaatattct

SEQ ID NO: 73 - DNA, 20 bp, synthetic construct
  misc_feature 1..20: note = chemically synthesized
  source 1..20: mol_type = other DNA
tcctggagaaatattcttag

SEQ ID NO: 74 - DNA, 20 bp, synthetic construct
  misc_feature 1..20: note = chemically synthesized
  source 1..20: mol_type = other DNA
tcttagaagaataactcaac

SEQ ID NO: 75 - DNA, 20 bp, synthetic construct
  misc_feature 1..20: note = chemically synthesized
  source 1..20: mol_type = other DNA
cttagaagaataactcaacc

SEQ ID NO: 76 - DNA, 20 bp, synthetic construct
  misc_feature 1..20: note = chemically synthesized
  source 1..20: mol_type = other DNA
ttagaagaataactcaacca

SEQ ID NO: 77 - DNA, 20 bp, synthetic construct
  misc_feature 1..20: note = chemically synthesized
  source 1..20: mol_type = other DNA
tagaagaataactcaaccag

SEQ ID NO: 78 - DNA, 20 bp, synthetic construct
  misc_feature 1..20: note = chemically synthesized
  source 1..20: mol_type = other DNA
aataactcaaccaggggcta

SEQ ID NO: 79 - DNA, 20 bp, synthetic construct
  misc_feature 1..20: note = chemically synthesized
  source 1..20: mol_type = other DNA
aaccaggggctaaagaataa

SEQ ID NO: 80 - DNA, 20 bp, synthetic construct
  misc_feature 1..20: note = chemically synthesized
  source 1..20: mol_type = other DNA
ccaggggctaaagaataaaa

SEQ ID NO: 81 - DNA, 20 bp, synthetic construct
  misc_feature 1..20: note = chemically synthesized
  source 1..20: mol_type = other DNA
ttcacacttctcactttcat

SEQ ID NO: 82 - DNA, 20 bp, synthetic construct
  misc_feature 1..20: note = chemically synthesized
  source 1..20: mol_type = other DNA
tctcactttcattagtcacg

SEQ ID NO: 83 - DNA, 20 bp, synthetic construct
  misc_feature 1..20: note = chemically synthesized
  source 1..20: mol_type = other DNA
acaatcccactgattgatat

SEQ ID NO: 84 - DNA, 20 bp, synthetic construct
  misc_feature 1..20: note = chemically synthesized
  source 1..20: mol_type = other DNA
gagccatgatgatctaaaac

SEQ ID NO: 85 - DNA, 20 bp, synthetic construct
  misc_feature 1..20: note = chemically synthesized
  source 1..20: mol_type = other DNA
tctaaaaccagctattgtgc

SEQ ID NO: 86 - DNA, 20 bp, synthetic construct
  misc_feature 1..20: note = chemically synthesized
  source 1..20: mol_type = other DNA
aaaaccagctattgtgctgg

SEQ ID NO: 87 - DNA, 20 bp, synthetic construct
  misc_feature 1..20: note = chemically synthesized
  source 1..20: mol_type = other DNA
gctggcagatttcacaaacc

SEQ ID NO: 88 - DNA, 20 bp, synthetic construct
  misc_feature 1..20: note = chemically synthesized
  source 1..20: mol_type = other DNA
ttttttgttttgttttgata

SEQ ID NO: 89 - DNA, 20 bp, synthetic construct
  misc_feature 1..20: note = chemically synthesized
  source 1..20: mol_type = other DNA
tgatatggttactactgcaa

SEQ ID NO: 90 - DNA, 20 bp, synthetic construct
  misc_feature 1..20: note = chemically synthesized
  source 1..20: mol_type = other DNA
gttactactgcaaaagaaaa

SEQ ID NO: 91 - DNA, 20 bp, synthetic construct
  misc_feature 1..20: note = chemically synthesized
  source 1..20: mol_type = other DNA
ctgcaaaagaaaaaagcatg

SEQ ID NO: 92 - DNA, 20 bp, synthetic construct
  misc_feature 1..20: note = chemically synthesized
  source 1..20: mol_type = other DNA
tgcaaaagaaaaaagcatgt

SEQ ID NO: 93 - DNA, 20 bp, synthetic construct
  misc_feature 1..20: note = chemically synthesized
  source 1..20: mol_type = other DNA
aaagcatgtaggcattaatt

SEQ ID NO: 94 - DNA, 20 bp, synthetic construct
  misc_feature 1..20: note = chemically synthesized
  source 1..20: mol_type = other DNA
aagcatgtaggcattaatta

SEQ ID NO: 95 - DNA, 20 bp, synthetic construct
  misc_feature 1..20: note = chemically synthesized
  source 1..20: mol_type = other DNA
catgtaggcattaattaagg

SEQ ID NO: 96 - DNA, 20 bp, synthetic construct
  misc_feature 1..20: note = chemically synthesized
  source 1..20: mol_type = other DNA
attaaggtggattttatgaa

SEQ ID NO: 97 - DNA, 20 bp, synthetic construct
  misc_feature 1..20: note = chemically synthesized
  source 1..20: mol_type = other DNA
cacatgaatgcgaatctgtg

SEQ ID NO: 98 - DNA, 20 bp, synthetic construct
  misc_feature 1..20: note = chemically synthesized
  source 1..20: mol_type = other DNA
tctgtgtggtctttgcacca

SEQ ID NO: 99 - DNA, 20 bp, synthetic construct
  misc_feature 1..20: note = chemically synthesized
  source 1..20: mol_type = other DNA
gtggtctttgcaccatagac

SEQ ID NO: 100 - DNA, 20 bp, synthetic construct
  misc_feature 1..20: note = chemically synthesized
  source 1..20: mol_type = other DNA
gtctttgcaccatagacaag

SEQ ID NO: 101 - DNA, 20 bp, synthetic construct
  misc_feature 1..20: note = chemically synthesized
  source 1..20: mol_type = other DNA
gcaccatagacaagtggatt

SEQ ID NO: 102 - DNA, 20 bp, synthetic construct
  misc_feature 1..20: note = chemically synthesized
  source 1..20: mol_type = other DNA
tagacaagtggattgagaaa

SEQ ID NO: 103 - DNA, 20 bp, synthetic construct
  misc_feature 1..20: note = chemically synthesized
  source 1..20: mol_type = other DNA
gacaagtggattgagaaatg

SEQ ID NO: 104 - DNA, 20 bp, synthetic construct
  misc_feature 1..20: note = chemically synthesized
  source 1..20: mol_type = other DNA
acaagtggattgagaaatgg

SEQ ID NO: 105 - DNA, 20 bp, synthetic construct
  misc_feature 1..20: note = chemically synthesized
  source 1..20: mol_type = other DNA
caagtggattgagaaatgga

SEQ ID NO: 106 - DNA, 20 bp, synthetic construct
  misc_feature 1..20: note = chemically synthesized
  source 1..20: mol_type = other DNA
ggattgagaaatggagggac

SEQ ID NO: 107 - DNA, 20 bp, synthetic construct
  misc_feature 1..20: note = chemically synthesized
  source 1..20: mol_type = other DNA
tgagaaatggagggaccagc

SEQ ID NO: 108 - DNA, 20 bp, synthetic construct
  misc_feature 1..20: note = chemically synthesized
  source 1..20: mol_type = other DNA
agggaccagcaagtaaatgc

SEQ ID NO: 109 - DNA, 20 bp, synthetic construct
  misc_feature 1..20: note = chemically synthesized
  source 1..20: mol_type = other DNA
ccagcaagtaaatgctagaa

SEQ ID NO: 110 - DNA, 20 bp, synthetic construct
  misc_feature 1..20: note = chemically synthesized
  source 1..20: mol_type = other DNA
agcaagtaaatgctagaaaa

SEQ ID NO: 111 - DNA, 20 bp, synthetic construct
  misc_feature 1..20: note = chemically synthesized
  source 1..20: mol_type = other DNA
aaatgctagaaaagagaata

SEQ ID NO: 112 - DNA, 20 bp, synthetic construct
  misc_feature 1..20: note = chemically synthesized
  source 1..20: mol_type = other DNA
agaaaagagaatatggatat

SEQ ID NO: 113 - DNA, 20 bp, synthetic construct
  misc_feature 1..20: note = chemically synthesized
  source 1..20: mol_type = other DNA
gaaaagagaatatggatata

SEQ ID NO: 114 - DNA, 20 bp, synthetic construct
  misc_feature 1..20: note = chemically synthesized
  source 1..20: mol_type = other DNA
aaaagagaatatggatataa

SEQ ID NO: 115 - DNA, 20 bp, synthetic construct
  misc_feature 1..20: note = chemically synthesized
  source 1..20: mol_type = other DNA
aaagagaatatggatataag

SEQ ID NO: 116 - DNA, 20 bp, synthetic construct
  misc_feature 1..20: note = chemically synthesized
  source 1..20: mol_type = other DNA
agagaatatggatataaggg

SEQ ID NO: 117 - DNA, 20 bp, synthetic construct
  misc_feature 1..20: note = chemically synthesized
  source 1..20: mol_type = other DNA
atggatataaggggagatgt

SEQ ID NO: 118 - DNA, 20 bp, synthetic construct
  misc_feature 1..20: note = chemically synthesized
  source 1..20: mol_type = other DNA
gagacccaaacctatgtgtg

SEQ ID NO: 119 - DNA, 20 bp, synthetic construct
  misc_feature 1..20: note = chemically synthesized
  source 1..20: mol_type = other DNA
acccaaacctatgtgtgaag

SEQ ID NO: 120 - DNA, 20 bp, synthetic construct
  misc_feature 1..20: note = chemically synthesized
  source 1..20: mol_type = other DNA
cccaaacctatgtgtgaaga

SEQ ID NO: 121 - DNA, 20 bp, synthetic construct
  misc_feature 1..20: note = chemically synthesized
  source 1..20: mol_type = other DNA
caaacctatgtgtgaagaag

SEQ ID NO: 122 - DNA, 20 bp, synthetic construct
  misc_feature 1..20: note = chemically synthesized
  source 1..20: mol_type = other DNA
acctatgtgtgaagaaggag

SEQ ID NO: 123 - DNA, 20 bp, synthetic construct
  misc_feature 1..20: note = chemically synthesized
  source 1..20: mol_type = other DNA
tatgtgtgaagaaggagaag

SEQ ID NO: 124 - DNA, 20 bp, synthetic construct
  misc_feature 1..20: note = chemically synthesized
  source 1..20: mol_type = other DNA
atgtgtgaagaaggagaaga

SEQ ID NO: 125 - DNA, 20 bp, synthetic construct
  misc_feature 1..20: note = chemically synthesized
  source 1..20: mol_type = other DNA
gtgaagaaggagaagaaggc

SEQ ID NO: 126 - DNA, 20 bp, synthetic construct
  misc_feature 1..20: note = chemically synthesized
  source 1..20: mol_type = other DNA
tgaagaaggagaagaaggca

SEQ ID NO: 127 - DNA, 20 bp, synthetic construct
  misc_feature 1..20: note = chemically synthesized
  source 1..20: mol_type = other DNA
aagaaggagaagaaggcaag

SEQ ID NO: 128 - DNA, 20 bp, synthetic construct
  misc_feature 1..20: note = chemically synthesized
  source 1..20: mol_type = other DNA
agaaggagaagaaggcaagg

SEQ ID NO: 129 - DNA, 20 bp, synthetic construct
  misc_feature 1..20: note = chemically synthesized
  source 1..20: mol_type = other DNA
aggagaagaaggcaaggagg

SEQ ID NO: 130 - DNA, 20 bp, synthetic construct
  misc_feature 1..20: note = chemically synthesized
  source 1..20: mol_type = other DNA
agaaggcaaggaggtagaac

SEQ ID NO: 131 - DNA, 20 bp, synthetic construct
  misc_feature 1..20: note = chemically synthesized
  source 1..20: mol_type = other DNA
aaggcaaggaggtagaactg

SEQ ID NO: 132 - DNA, 20 bp, synthetic construct
  misc_feature 1..20: note = chemically synthesized
  source 1..20: mol_type = other DNA
aggcaaggaggtagaactgg

SEQ ID NO: 133 - DNA, 20 bp, synthetic construct
  misc_feature 1..20: note = chemically synthesized
  source 1..20: mol_type = other DNA
caaggaggtagaactggagg

SEQ ID NO: 134 - DNA, 20 bp, synthetic construct
  misc_feature 1..20: note = chemically synthesized
  source 1..20: mol_type = other DNA
ggtagaactggaggaagaca

SEQ ID NO: 135 - DNA, 20 bp, synthetic construct
  misc_feature 1..20: note = chemically synthesized
  source 1..20: mol_type = other DNA
ctggaggaagacacagatgt

SEQ ID NO: 136 - DNA, 20 bp, synthetic construct
  misc_feature 1..20: note = chemically synthesized
  source 1..20: mol_type = other DNA
agacacagatgtgagcaatg

SEQ ID NO: 137 - DNA, 20 bp, synthetic construct
  misc_feature 1..20: note = chemically synthesized
  source 1..20: mol_type = other DNA
gacacagatgtgagcaatgc

SEQ ID NO: 138 - DNA, 20 bp, synthetic construct
  misc_feature 1..20: note = chemically synthesized
  source 1..20: mol_type = other DNA
ggtattgaatgctttaaacc

SEQ ID NO: 139 - DNA, 20 bp, synthetic construct
  misc_feature 1..20: note = chemically synthesized
  source 1..20: mol_type = other DNA
ctttaaacctagcctccttc

SEQ ID NO: 140 - DNA, 20 bp, synthetic construct
  misc_feature 1..20: note = chemically synthesized
  source 1..20: mol_type = other DNA
tttaaacctagcctccttct

SEQ ID NO: 141 - DNA, 20 bp, synthetic construct
  misc_feature 1..20: note = chemically synthesized
  source 1..20: mol_type = other DNA
ttaaacctagcctccttctg

SEQ ID NO: 142 - DNA, 20 bp, synthetic construct
  misc_feature 1..20: note = chemically synthesized
  source 1..20: mol_type = other DNA
gaaaaactgtgataaatatc

SEQ ID NO: 143 - DNA, 20 bp, synthetic construct
  misc_feature 1..20: note = chemically synthesized
  source 1..20: mol_type = other DNA
ctgtgataaatatctggatg

SEQ ID NO: 144 - DNA, 20 bp, synthetic construct
  misc_feature 1..20: note = chemically synthesized
  source 1..20: mol_type = other DNA
tgtgataaatatctggatgt

SEQ ID NO: 145 - DNA, 20 bp, synthetic construct
  misc_feature 1..20: note = chemically synthesized
  source 1..20: mol_type = other DNA
taggacaatgtgatgaatgt

SEQ ID NO: 146 - DNA, 20 bp, synthetic construct
  misc_feature 1..20: note = chemically synthesized
  source 1..20: mol_type = other DNA
aggacaatgtgatgaatgtg

SEQ ID NO: 147 - DNA, 20 bp, synthetic construct
  misc_feature 1..20: note = chemically synthesized
  source 1..20: mol_type = other DNA
tgtgaggtcaaatcctgcta

SEQ ID NO: 148 - DNA, 20 bp, synthetic construct
  misc_feature 1..20: note = chemically synthesized
  source 1..20: mol_type = other DNA
ggtcaaatcctgctacagtg

SEQ ID NO: 149 - DNA, 20 bp, synthetic construct
  misc_feature 1..20: note = chemically synthesized
  source 1..20: mol_type = other DNA
gtcaaatcctgctacagtga

SEQ ID NO: 150 - DNA, 20 bp, synthetic construct
  misc_feature 1..20: note = chemically synthesized
  source 1..20: mol_type = other DNA
tgaaggccacaaacaaacca

SEQ ID NO: 151 - DNA, 20 bp, synthetic construct
  misc_feature 1..20: note = chemically synthesized
  source 1..20: mol_type = other DNA
acttgaacatttgctgctgc

SEQ ID NO: 152 - DNA, 20 bp, synthetic construct
  misc_feature 1..20: note = chemically synthesized
  source 1..20: mol_type = other DNA
tgctgctgctagtttcacaa

SEQ ID NO: 153 - DNA, 20 bp, synthetic construct
  misc_feature 1..20: note = chemically synthesized
  source 1..20: mol_type = other DNA
tcacaatggccatatgctca

SEQ ID NO: 154 - DNA, 20 bp, synthetic construct
  misc_feature 1..20: note = chemically synthesized
  source 1..20: mol_type = other DNA
caatggccatatgctcacag

SEQ ID NO: 155 - DNA, 20 bp, synthetic construct
  misc_feature 1..20: note = chemically synthesized
  source 1..20: mol_type = other DNA
aatggccatatgctcacagt

SEQ ID NO: 156 - DNA, 20 bp, synthetic construct
  misc_feature 1..20: note = chemically synthesized
  source 1..20: mol_type = other DNA
tggccatatgctcacagtag

SEQ ID NO: 157 - DNA, 20 bp, synthetic construct
  misc_feature 1..20: note = chemically synthesized
  source 1..20: mol_type = other DNA
ccatatgctcacagtaggag

SEQ ID NO: 158 - DNA, 20 bp, synthetic construct
  misc_feature 1..20: note = chemically synthesized
  source 1..20: mol_type = other DNA
catatgctcacagtaggagt

SEQ ID NO: 159 - DNA, 20 bp, synthetic construct
  misc_feature 1..20: note = chemically synthesized
  source 1..20: mol_type = other DNA
tatgctcacagtaggagtgg

SEQ ID NO: 160 - DNA, 20 bp, synthetic construct
  misc_feature 1..20: note = chemically synthesized
  source 1..20: mol_type = other DNA
ttgtgtgataaaattgaaac

SEQ ID NO: 161 - DNA, 20 bp, synthetic construct
  misc_feature 1..20: note = chemically synthesized
  source 1..20: mol_type = other DNA
aattgaaaccggcactttat

SEQ ID NO: 162 - DNA, 20 bp, synthetic construct
  misc_feature 1..20: note = chemically synthesized
  source 1..20: mol_type = other DNA
aaccggcactttatcagtac

SEQ ID NO: 163 - DNA, 20 bp, synthetic construct
  misc_feature 1..20: note = chemically synthesized
  source 1..20: mol_type = other DNA
accggcactttatcagtact

SEQ ID NO: 164 - DNA, 20 bp, synthetic construct
  misc_feature 1..20: note = chemically synthesized
  source 1..20: mol_type = other DNA
cactttatcagtactaggca

SEQ ID NO: 165 - DNA, 20 bp, synthetic construct
  misc_feature 1..20: note = chemically synthesized
  source 1..20: mol_type = other DNA
actttatcagtactaggcat

SEQ ID NO: 166 - DNA, 20 bp, synthetic construct
  misc_feature 1..20: note = chemically synthesized
  source 1..20: mol_type = other DNA
ctttatcagtactaggcatg

SEQ ID NO: 167 - DNA, 20 bp, synthetic construct
  misc_feature 1..20: note = chemically synthesized
  source 1..20: mol_type = other DNA
agtactaggcatggggctac

SEQ ID NO: 168 - DNA, 20 bp, synthetic construct
  misc_feature 1..20: note = chemically synthesized
  source 1..20: mol_type = other DNA
taggcatggggctacaagaa

SEQ ID NO: 169 - DNA, 20 bp, synthetic construct
  misc_feature 1..20: note = chemically synthesized
  source 1..20: mol_type = other DNA
gcatggggctacaagaatag

SEQ ID NO: 170 - DNA, 20 bp, synthetic construct
  misc_feature 1..20: note = chemically synthesized
  source 1..20: mol_type = other DNA
gctacaagaatagcagccct

SEQ ID NO: 171 - DNA, 20 bp, synthetic construct
  misc_feature 1..20: note = chemically synthesized
  source 1..20: mol_type = other DNA
agcagccctgagtacgacca

SEQ ID NO: 172 - DNA, 20 bp, synthetic construct
  misc_feature 1..20: note = chemically synthesized
  source 1..20: mol_type = other DNA
atagttcctatctgaatgac

SEQ ID NO: 173 - DNA, 20 bp, synthetic construct
  misc_feature 1..20: note = chemically synthesized
  source 1..20: mol_type = other DNA
ttcctatctgaatgacaagc

SEQ ID NO: 174 - DNA, 20 bp, synthetic construct
  misc_feature 1..20: note = chemically synthesized
  source 1..20: mol_type = other DNA
ctatctgaatgacaagctgg

SEQ ID NO: 175 - DNA, 20 bp, synthetic construct
  misc_feature 1..20: note = chemically synthesized
  source 1..20: mol_type = other DNA
tatctgaatgacaagctggt

SEQ ID NO: 176 - DNA, 20 bp, synthetic construct
  misc_feature 1..20: note = chemically synthesized
  source 1..20: mol_type = other DNA
gaatgacaagctggtgggtg

SEQ ID NO: 177 - DNA, 20 bp, synthetic construct
  misc_feature 1..20: note = chemically synthesized
  source 1..20: mol_type = other DNA
aagctggtgggtgaagatgt

SEQ ID NO: 178 - DNA, 20 bp, synthetic construct
  misc_feature 1..20: note = chemically synthesized
  source 1..20: mol_type = other DNA
gtgaagatgttggcatgtct

SEQ ID NO: 179 - DNA, 20 bp, synthetic construct
  misc_feature 1..20: note = chemically synthesized
  source 1..20: mol_type = other DNA
aagatgttggcatgtcttag

SEQ ID NO: 180 - DNA, 20 bp, synthetic construct
  misc_feature 1..20: note = chemically synthesized
  source 1..20: mol_type = other DNA
tggcatgtcttagtggataa

SEQ ID NO: 181 - DNA, 20 bp, synthetic construct
  misc_feature 1..20: note = chemically synthesized
  source 1..20: mol_type = other DNA
atgtcttagtggataacaga

SEQ ID NO: 182 - DNA, 20 bp, synthetic construct
  misc_feature 1..20: note = chemically synthesized
  source 1..20: mol_type = other DNA
gataacagatggccacataa

SEQ ID NO: 183 - DNA, 20 bp, synthetic construct
  misc_feature 1..20: note = chemically synthesized
  source 1..20: mol_type = other DNA
cagatggccacataacggtc

SEQ ID NO: 184 - DNA, 20 bp, synthetic construct
  misc_feature 1..20: note = chemically synthesized
  source 1..20: mol_type = other DNA
agatggccacataacggtcc

SEQ ID NO: 185 - DNA, 20 bp, synthetic construct
  misc_feature 1..20: note = chemically synthesized
  source 1..20: mol_type = other DNA
gatggccacataacggtcca

SEQ ID NO: 186 - DNA, 20 bp, synthetic construct
  misc_feature 1..20: note = chemically synthesized
  source 1..20: mol_type = other DNA
cacataacggtccagggcca

SEQ ID NO: 187 - DNA, 20 bp, synthetic construct
  misc_feature 1..20: note = chemically synthesized
  source 1..20: mol_type = other DNA
cggtccagggccatggccac

SEQ ID NO: 188 - DNA, 20 bp, synthetic construct
  misc_feature 1..20: note = chemically synthesized
  source 1..20: mol_type = other DNA
ggtccagggccatggccaca

SEQ ID NO: 189 - DNA, 20 bp, synthetic construct
  misc_feature 1..20: note = chemically synthesized
  source 1..20: mol_type = other DNA
actctataccctgcaatgtg

SEQ ID NO: 190 - DNA, 20 bp, synthetic construct
  misc_feature 1..20: note = chemically synthesized
  source 1..20: mol_type = other DNA
gtgtggatgaaccacatttg

SEQ ID NO: 191 - DNA, 20 bp, synthetic construct
  misc_feature 1..20: note = chemically synthesized
  source 1..20: mol_type = other DNA
ggatgaaccacatttgaagc

SEQ ID NO: 192 - DNA, 20 bp, synthetic construct
  misc_feature 1..20: note = chemically synthesized
  source 1..20: mol_type = other DNA
tgaaccacatttgaagcaag

SEQ ID NO: 193 - DNA, 20 bp, synthetic construct
  misc_feature 1..20: note = chemically synthesized
  source 1..20: mol_type = other DNA
gaaccacatttgaagcaagc

SEQ ID NO: 194 - DNA, 20 bp, synthetic construct
  misc_feature 1..20: note = chemically synthesized
  source 1..20: mol_type = other DNA
gaagcaagcaggaatcaaaa

SEQ ID NO: 195 - DNA, 20 bp, synthetic construct
  misc_feature 1..20: note = chemically synthesized
  source 1..20: mol_type = other DNA
gcaggaatcaaaatagattt

SEQ ID NO: 196 - DNA, 20 bp, synthetic construct
  misc_feature 1..20: note = chemically synthesized
  source 1..20: mol_type = other DNA
caggaatcaaaatagatttc

SEQ ID NO: 197 - DNA, 20 bp, synthetic construct
  misc_feature 1..20: note = chemically synthesized
  source 1..20: mol_type = other DNA
agatttcaggcacattaaac

SEQ ID NO: 198 - DNA, 20 bp, synthetic construct
  misc_feature 1..20: note = chemically synthesized
  source 1..20: mol_type = other DNA
acattaaaccagaatattcc

SEQ ID NO: 199 - DNA, 20 bp, synthetic construct
  misc_feature 1..20: note = chemically synthesized
  source 1..20: mol_type = other DNA
cagaatattccaagcatctt

SEQ ID NO: 200 - DNA, 20 bp, synthetic construct
  misc_feature 1..20: note = chemically synthesized
  source 1..20: mol_type = other DNA
catctttggcataatgctgc

SEQ ID NO: 201 - DNA, 20 bp, synthetic construct
  misc_feature 1..20: note = chemically synthesized
  source 1..20: mol_type = other DNA
tttggcataatgctgctagc

SEQ ID NO: 202 - DNA, 20 bp, synthetic construct
  misc_feature 1..20: note = chemically synthesized
  source 1..20: mol_type = other DNA
gctagcaagtgcaatgtctg

SEQ ID NO: 203 - DNA, 20 bp, synthetic construct
  misc_feature 1..20: note = chemically synthesized
  source 1..20: mol_type = other DNA
agtgcaatgtctgtggctcc

SEQ ID NO: 204 - DNA, 20 bp, synthetic construct
  misc_feature 1..20: note = chemically synthesized
  source 1..20: mol_type = other DNA
ctgtggctcctagcatgcct

SEQ ID NO: 205 - DNA, 20 bp, synthetic construct
  misc_feature 1..20: note = chemically synthesized
  source 1..20: mol_type = other DNA
gcatgcctaagaaaatgtac

SEQ ID NO: 206 - DNA, 20 bp, synthetic construct
  misc_feature 1..20: note = chemically synthesized
  source 1..20: mol_type = other DNA
catgcctaagaaaatgtaca

SEQ ID NO: 207 - DNA, 20 bp, synthetic construct
  misc_feature 1..20: note = chemically synthesized
  source 1..20: mol_type = other DNA
atgcctaagaaaatgtacaa

SEQ ID NO: 208 - DNA, 20 bp, synthetic construct
  misc_feature 1..20: note = chemically synthesized
  source 1..20: mol_type = other DNA
agaaaatgtacaagggctca

SEQ ID NO: 209 - DNA, 20 bp, synthetic construct
  misc_feature 1..20: note = chemically synthesized
  source 1..20: mol_type = other DNA
aaaatgtacaagggctcatg

SEQ ID NO: 210 - DNA, 20 bp, synthetic construct
  misc_feature 1..20: note = chemically synthesized
  source 1..20: mol_type = other DNA
gggctcatggagactgcgct

SEQ ID NO: 211 - DNA, 20 bp, synthetic construct
  misc_feature 1..20: note = chemically synthesized
  source 1..20: mol_type = other DNA
cgctcagatttgatgatgct

SEQ ID NO: 212 - DNA, 20 bp, synthetic construct
  misc_feature 1..20: note = chemically synthesized
  source 1..20: mol_type = other DNA
tcagatttgatgatgctcag

SEQ ID NO: 213 - DNA, 20 bp, synthetic construct
  misc_feature 1..20: note = chemically synthesized
  source 1..20: mol_type = other DNA
atttgatgatgctcagaagc

SEQ ID NO: 214 - DNA, 20 bp, synthetic construct
  misc_feature 1..20: note = chemically synthesized
  source 1..20: mol_type = other DNA
tttgatgatgctcagaagca

SEQ ID NO: 215 - DNA, 20 bp, synthetic construct
  misc_feature 1..20: note = chemically synthesized
  source 1..20: mol_type = other DNA
aagcaaggaatttccaatca

SEQ ID NO: 216 - DNA, 20 bp, synthetic construct
  misc_feature 1..20: note = chemically synthesized
  source 1..20: mol_type = other DNA
gaatttccaatcatagcaat

SEQ ID NO: 217 - DNA, 20 bp, synthetic construct
  misc_feature 1..20: note = chemically synthesized
  source 1..20: mol_type = other DNA
aatcatagcaatgagataaa

SEQ ID NO: 218 - DNA, 20 bp, synthetic construct
  misc_feature 1..20: note = chemically synthesized
  source 1..20: mol_type = other DNA
tagcaatgagataaatggca

SEQ ID NO: 219 - DNA, 20 bp, synthetic construct
  misc_feature 1..20: note = chemically synthesized
  source 1..20: mol_type = other DNA
atgagataaatggcacagaa

SEQ ID NO: 220 - DNA, 20 bp, synthetic construct
  misc_feature 1..20: note = chemically synthesized
  source 1..20: mol_type = other DNA
cacagaatggaatcccaatc

SEQ ID NO: 221 - DNA, 20 bp, synthetic construct
  misc_feature 1..20: note = chemically synthesized
  source 1..20: mol_type = other DNA
aatcccaatccagcactgca

SEQ ID NO: 222 - DNA, 20 bp, synthetic construct
  misc_feature 1..20: note = chemically synthesized
  source 1..20: mol_type = other DNA
atccagcactgcacagattc

SEQ ID NO: 223 - DNA, 20 bp, synthetic construct
  misc_feature 1..20: note = chemically synthesized
  source 1..20: mol_type = other DNA
tccagcactgcacagattct

SEQ ID NO: 224 - DNA, 20 bp, synthetic construct
  misc_feature 1..20: note = chemically synthesized
  source 1..20: mol_type = other DNA
cactgcacagattctaggcc

SEQ ID NO: 225 - DNA, 20 bp, synthetic construct
  misc_feature 1..20: note = chemically synthesized
  source 1..20: mol_type = other DNA
actgcacagattctaggcct

SEQ ID NO: 226 - DNA, 20 bp, synthetic construct
  misc_feature 1..20: note = chemically synthesized
  source 1..20: mol_type = other DNA
tctaggcctgggatccctac

SEQ ID NO: 227 - DNA, 20 bp, synthetic construct
  misc_feature 1..20: note = chemically synthesized
  source 1..20: mol_type = other DNA
gatccctactagtgtcaaca

SEQ ID NO: 228 - DNA, 20 bp, synthetic construct
  misc_feature 1..20: note = chemically synthesized
  source 1..20: mol_type = other DNA
tccctactagtgtcaacaca

SEQ ID NO: 229 - DNA, 20 bp, synthetic construct
  misc_feature 1..20: note = chemically synthesized
  source 1..20: mol_type = other DNA
ccctactagtgtcaacacag

SEQ ID NO: 230 - DNA, 20 bp, synthetic construct
  misc_feature 1..20: note = chemically synthesized
  source 1..20: mol_type = other DNA
cctactagtgtcaacacaga

SEQ ID NO: 231 - DNA, 20 bp, synthetic construct
  misc_feature 1..20: note = chemically synthesized
  source 1..20: mol_type = other DNA
gtgtcaacacagagggcatg

SEQ ID NO: 232 - DNA, 20 bp, synthetic construct
  misc_feature 1..20: note = chemically synthesized
  source 1..20: mol_type = other DNA
gggcatgtagactgtgatgt

SEQ ID NO: 233 - DNA, 20 bp, synthetic construct
  misc_feature 1..20: note = chemically synthesized
  source 1..20: mol_type = other DNA
gtagactgtgatgttggaaa

SEQ ID NO: 234 - DNA, 20 bp, synthetic construct
  misc_feature 1..20: note = chemically synthesized
  source 1..20: mol_type = other DNA
tgtgatgttggaaatggaca

SEQ ID NO: 235 - DNA, 20 bp, synthetic construct
  misc_feature 1..20: note = chemically synthesized
  source 1..20: mol_type = other DNA
ggaaatggacatagtgtcgt

SEQ ID NO: 236 - DNA, 20 bp, synthetic construct
  misc_feature 1..20: note = chemically synthesized
  source 1..20: mol_type = other DNA
gaaatggacatagtgtcgtt

SEQ ID NO: 237 - DNA, 20 bp, synthetic construct
  misc_feature 1..20: note = chemically synthesized
  source 1..20: mol_type = other DNA
gggtctcctgatgcaaacaa

SEQ ID NO: 238 - DNA, 20 bp, synthetic construct
  misc_feature 1..20: note = chemically synthesized
  source 1..20: mol_type = other DNA
tctcctgatgcaaacaaaag

SEQ ID NO: 239 - DNA, 20 bp, synthetic construct
  misc_feature 1..20: note = chemically synthesized
  source 1..20: mol_type = other DNA
tgcaaacaaaagaagtttct

SEQ ID NO: 240 - DNA, 20 bp, synthetic construct
  misc_feature 1..20: note = chemically synthesized
  source 1..20: mol_type = other DNA
aacaaaagaagtttctcagt

SEQ ID NO: 241 - DNA, 20 bp, synthetic construct
  misc_feature 1..20: note = chemically synthesized
  source 1..20: mol_type = other DNA
ttctccaaactcattatatt

SEQ ID NO: 242 - DNA, 20 bp, synthetic construct
  misc_feature 1..20: note = chemically synthesized
  source 1..20: mol_type = other DNA
tatattgagtctgtctgatt

SEQ ID NO: 243 - DNA, 20 bp, synthetic construct
  misc_feature 1..20: note = chemically synthesized
  source 1..20: mol_type = other DNA
atattgagtctgtctgattt

SEQ ID NO: 244 - DNA, 20 bp, synthetic construct
  misc_feature 1..20: note = chemically synthesized
  source 1..20: mol_type = other DNA
aaaatcatccatcttattca

SEQ ID NO: 245 - DNA, 20 bp, synthetic construct
  misc_feature 1..20: note = chemically synthesized
  source 1..20: mol_type = other DNA
catcttattcacagttttga

SEQ ID NO: 246 - DNA, 20 bp, synthetic construct
  misc_feature 1..20: note = chemically synthesized
  source 1..20: mol_type = other DNA
atcttattcacagttttgaa

SEQ ID NO: 247 - DNA, 20 bp, synthetic construct
  misc_feature 1..20: note = chemically synthesized
  source 1..20: mol_type = other DNA
attcacagttttgaaaggaa

SEQ ID NO: 248 - DNA, 20 bp, synthetic construct
  misc_feature 1..20: note = chemically synthesized
  source 1..20: mol_type = other DNA
acagttttgaaaggaaaaga

SEQ ID NO: 249 - DNA, 20 bp, synthetic construct
  misc_feature 1..20: note = chemically synthesized
  source 1..20: mol_type = other DNA
gaaaggaaaagatggattca

SEQ ID NO: 250 - DNA, 20 bp, synthetic construct
  misc_feature 1..20: note = chemically synthesized
  source 1..20: mol_type = other DNA
aaggaaaagatggattcatg

SEQ ID NO: 251 - DNA, 20 bp, synthetic construct
  misc_feature 1..20: note = chemically synthesized
  source 1..20: mol_type = other DNA
tggagatacatcactgtttt

SEQ ID NO: 252 - DNA, 20 bp, synthetic construct
  misc_feature 1..20: note = chemically synthesized
  source 1..20: mol_type = other DNA
ggagatacatcactgttttc

SEQ ID NO: 253 - DNA, 20 bp, synthetic construct
  misc_feature 1..20: note = chemically synthesized
  source 1..20: mol_type = other DNA
gatacatcactgttttcagg

SEQ ID NO: 254 - DNA, 20 bp, synthetic construct
  misc_feature 1..20: note = chemically synthesized
  source 1..20: mol_type = other DNA
atacatcactgttttcaggt

SEQ ID NO: 255 - DNA, 20 bp, synthetic construct
  misc_feature 1..20: note = chemically synthesized
  source 1..20: mol_type = other DNA
tacatcactgttttcaggtg

SEQ ID NO: 256 - DNA, 20 bp, synthetic construct
  misc_feature 1..20: note = chemically synthesized
  source 1..20: mol_type = other DNA
gttttcaggtggggcattca

SEQ ID NO: 257 - DNA, 20 bp, synthetic construct
  misc_feature 1..20: note = chemically synthesized
  source 1..20: mol_type = other DNA
ttttcaggtggggcattcac

SEQ ID NO: 258 - DNA, 20 bp, synthetic construct
  misc_feature 1..20: note = chemically synthesized
  source 1..20: mol_type = other DNA
tcacaggcactgtgccataa

SEQ ID NO: 259 - DNA, 20 bp, synthetic construct
  misc_feature 1..20: note = chemically synthesized
  source 1..20: mol_type = other DNA
cacaggcactgtgccataat

SEQ ID NO: 260 - DNA, 20 bp, synthetic construct
  misc_feature 1..20: note = chemically synthesized
  source 1..20: mol_type = other DNA
ataataggatgttatgtgca

SEQ ID NO: 261 - DNA, 20 bp, synthetic construct
  misc_feature 1..20: note = chemically synthesized
  source 1..20: mol_type = other DNA
gcatggcaatccaaatacat

SEQ ID NO: 262 - DNA, 20 bp, synthetic construct
  misc_feature 1..20: note = chemically synthesized
  source 1..20: mol_type = other DNA
caatccaaatacattagaac

SEQ ID NO: 263 - DNA, 20 bp, synthetic construct
  misc_feature 1..20: note = chemically synthesized
  source 1..20: mol_type = other DNA
ttagaaccagcaaaatcacc

SEQ ID NO: 264 - DNA, 20 bp, synthetic construct
  misc_feature 1..20: note = chemically synthesized
  source 1..20: mol_type = other DNA
aaccagcaaaatcacctgga

SEQ ID NO: 265 - DNA, 20 bp, synthetic construct
  misc_feature 1..20: note = chemically synthesized
  source 1..20: mol_type = other DNA
accagcaaaatcacctggac

SEQ ID NO: 266 - DNA, 20 bp, synthetic construct
  misc_feature 1..20: note = chemically synthesized
  source 1..20: mol_type = other DNA
ccagcaaaatcacctggaca

SEQ ID NO: 267 - DNA, 20 bp, synthetic construct
  misc_feature 1..20: note = chemically synthesized
  source 1..20: mol_type = other DNA
cagcaaaatcacctggacag

SEQ ID NO: 268 - DNA, 20 bp, synthetic construct
  misc_feature 1..20: note = chemically synthesized
  source 1..20: mol_type = other DNA
aaatcacctggacaggggat

SEQ ID NO: 269 - DNA, 20 bp, synthetic construct
  misc_feature 1..20: note = chemically synthesized
  source 1..20: mol_type = other DNA
tggacaggggattggactac

SEQ ID NO: 270 - DNA, 20 bp, synthetic construct
  misc_feature 1..20: note = chemically synthesized
  source 1..20: mol_type = other DNA
caggggattggactactggc

SEQ ID NO: 271 - DNA, 20 bp, synthetic construct
  misc_feature 1..20: note = chemically synthesized
  source 1..20: mol_type = other DNA
gccagtctgttatttctttc

SEQ ID NO: 272 - DNA, 20 bp, synthetic construct
  misc_feature 1..20: note = chemically synthesized
  source 1..20: mol_type = other DNA
gttatttctttccagacctg

SEQ ID NO: 273 - DNA, 20 bp, synthetic construct
  misc_feature 1..20: note = chemically synthesized
  source 1..20: mol_type = other DNA
gacctgtggacaaaaaaaaa

SEQ ID NO: 274 - DNA, 20 bp, synthetic construct
  misc_feature 1..20: note = chemically synthesized
  source 1..20: mol_type = other DNA
ctgtggacaaaaaaaaaaag

SEQ ID NO: 275 - DNA, 20 bp, synthetic construct
  misc_feature 1..20: note = chemically synthesized
  source 1..20: mol_type = other DNA
aaaaagaagtttatttttat

SEQ ID NO: 276 - DNA, 20 bp, synthetic construct
  misc_feature 1..20: note = chemically synthesized
  source 1..20: mol_type = other DNA
ttggacattgcattttaatt

SEQ ID NO: 277 - DNA, 20 bp, synthetic construct
  misc_feature 1..20: note = chemically synthesized
  source 1..20: mol_type = other DNA
cctctccatatttcacattt

SEQ ID NO: 278 - DNA, 20 bp, synthetic construct
  misc_feature 1..20: note = chemically synthesized
  source 1..20: mol_type = other DNA
tcacatttcagctattcctc

SEQ ID NO: 279 - DNA, 20 bp, synthetic construct
  misc_feature 1..20: note = chemically synthesized
  source 1..20: mol_type = other DNA
aactatttccaattttcttt

SEQ ID NO: 280 - DNA, 20 bp, synthetic construct
  misc_feature 1..20: note = chemically synthesized
  source 1..20: mol_type = other DNA
aattttctttaagaacattt

SEQ ID NO: 281 - DNA, 20 bp, synthetic construct
  misc_feature 1..20: note = chemically synthesized
  source 1..20: mol_type = other DNA
tctttaagaacattttagac

SEQ ID NO: 282 - DNA, 20 bp, synthetic construct
  misc_feature 1..20: note = chemically synthesized
  source 1..20: mol_type = other DNA
attttagacaagcaaattaa

SEQ ID NO: 283 - DNA, 20 bp, synthetic construct
  misc_feature 1..20: note = chemically synthesized
  source 1..20: mol_type = other DNA
gcaaattaacagactctgac

SEQ ID NO: 284 - DNA, 20 bp, synthetic construct
  misc_feature 1..20: note = chemically synthesized
  source 1..20: mol_type = other DNA
acagactctgaccagtacat

SEQ ID NO: 285 - DNA, 20 bp, synthetic construct
  misc_feature 1..20: note = chemically synthesized
  source 1..20: mol_type = other DNA
tgaccagtacattggtgtaa

SEQ ID NO: 286 - DNA, 20 bp, synthetic construct
  misc_feature 1..20: note = chemically synthesized
  source 1..20: mol_type = other DNA
gtgtaaaagattcccaatga

SEQ ID NO: 287 - DNA, 20 bp, synthetic construct
  misc_feature 1..20: note = chemically synthesized
  source 1..20: mol_type = other DNA
gtaaaagattcccaatgaaa

SEQ ID NO: 288 - DNA, 20 bp, synthetic construct
  misc_feature 1..20: note = chemically synthesized
  source 1..20: mol_type = other DNA
agattcccaatgaaagagaa

SEQ ID NO: 289 - DNA, 20 bp, synthetic construct
  misc_feature 1..20: note = chemically synthesized
  source 1..20: mol_type = other DNA
attcccaatgaaagagaata

SEQ ID NO: 290 - DNA, 20 bp, synthetic construct
  misc_feature 1..20: note = chemically synthesized
  source 1..20: mol_type = other DNA
ttcccaatgaaagagaatag

SEQ ID NO: 291 - DNA, 20 bp, synthetic construct
  misc_feature 1..20: note = chemically synthesized
  source 1..20: mol_type = other DNA
ccaatgaaagagaatagagg

SEQ ID NO: 292 - DNA, 20 bp, synthetic construct
  misc_feature 1..20: note = chemically synthesized
  source 1..20: mol_type = other DNA
ggtagaaataattgacaccc

SEQ ID NO: 293 - DNA, 20 bp, synthetic construct
  misc_feature 1..20: note = chemically synthesized
  source 1..20: mol_type = other DNA
aatatatttctttttatatt

SEQ ID NO: 294 - DNA, 20 bp, synthetic construct
  misc_feature 1..20: note = chemically synthesized
  source 1..20: mol_type = other DNA
tttatattcagaataatgta

SEQ ID NO: 295 - DNA, 20 bp, synthetic construct
  misc_feature 1..20: note = chemically synthesized
  source 1..20: mol_type = other DNA
tatattcagaataatgtaaa

SEQ ID NO: 296 - DNA, 20 bp, synthetic construct
  misc_feature 1..20: note = chemically synthesized
  source 1..20: mol_type = other DNA
ataatgtaaagagaatgctt

SEQ ID NO: 297 - DNA, 20 bp, synthetic construct
  misc_feature 1..20: note = chemically synthesized
  source 1..20: mol_type = other DNA
tttatacttttgacaaatct

SEQ ID NO: 298 - DNA, 20 bp, synthetic construct
  misc_feature 1..20: note = chemically synthesized
  source 1..20: mol_type = other DNA
cttttgacaaatctgagcca

SEQ ID NO: 299 - DNA, 20 bp, synthetic construct
  misc_feature 1..20: note = chemically synthesized
  source 1..20: mol_type = other DNA
caaatctgagccaaagctcc

SEQ ID NO: 300 - DNA, 20 bp, synthetic construct
  misc_feature 1..20: note = chemically synthesized
  source 1..20: mol_type = other DNA
ttgctttttatatttcttta

SEQ ID NO: 301 - DNA, 20 bp, synthetic construct
  misc_feature 1..20: note = chemically synthesized
  source 1..20: mol_type = other DNA
tttatatttctttaaagtta

SEQ ID NO: 302 - DNA, 20 bp, synthetic construct
  misc_feature 1..20: note = chemically synthesized
  source 1..20: mol_type = other DNA
ttatatttctttaaagttaa

SEQ ID NO: 303 - DNA, 20 bp, synthetic construct
  misc_feature 1..20: note = chemically synthesized
  source 1..20: mol_type = other DNA
tatatttctttaaagttaaa

SEQ ID NO: 304 - DNA, 20 bp, synthetic construct
  misc_feature 1..20: note = chemically synthesized
  source 1..20: mol_type = other DNA
tttttcctatatattttaaa

SEQ ID NO: 305 - DNA, 20 bp, synthetic construct
  misc_feature 1..20: note = chemically synthesized
  source 1..20: mol_type = other DNA
tgaaactcttgaaatgttgt

SEQ ID NO: 306 - DNA, 20 bp, synthetic construct
  misc_feature 1..20: note = chemically synthesized
  source 1..20: mol_type = other DNA
taaaattttaatacacttta

SEQ ID NO: 307 - DNA, 20 bp, synthetic construct
  misc_feature 1..20: note = chemically synthesized
  source 1..20: mol_type = other DNA
aatacactttatggaatatc

SEQ ID NO: 308 - DNA, 20 bp, synthetic construct
  misc_feature 1..20: note = chemically synthesized
  source 1..20: mol_type = other DNA
tacactttatggaatatcta

SEQ ID NO: 309 - DNA, 20 bp, synthetic construct
  misc_feature 1..20: note = chemically synthesized
  source 1..20: mol_type = other DNA
cactttatggaatatctaga

SEQ ID NO: 310 - DNA, 20 bp, synthetic construct
  misc_feature 1..20: note = chemically synthesized
  source 1..20: mol_type = other DNA
tttatggaatatctagagag

SEQ ID NO: 311 - DNA, 20 bp, synthetic construct
  misc_feature 1..20: note = chemically synthesized
  source 1..20: mol_type = other DNA
ttatggaatatctagagaga

SEQ ID NO: 312 - DNA, 20 bp, synthetic construct
  misc_feature 1..20: note = chemically synthesized
  source 1..20: mol_type = other DNA
tctagagagaaggaactgct

SEQ ID NO: 313 - DNA, 20 bp, synthetic construct
  misc_feature 1..20: note = chemically synthesized
  source 1..20: mol_type = other DNA
ctagagagaaggaactgcta

SEQ ID NO: 314 - DNA, 20 bp, synthetic construct
  misc_feature 1..20: note = chemically synthesized
  source 1..20: mol_type = other DNA
tagagagaaggaactgctaa

SEQ ID NO: 315 - DNA, 20 bp, synthetic construct
  misc_feature 1..20: note = chemically synthesized
  source 1..20: mol_type = other DNA
agaaggaactgctaagggac

SEQ ID NO: 316 - DNA, 20 bp, synthetic construct
  misc_feature 1..20: note = chemically synthesized
  source 1..20: mol_type = other DNA
gaactgctaagggacaagat

SEQ ID NO: 317 - DNA, 20 bp, synthetic construct
  misc_feature 1..20: note = chemically synthesized
  source 1..20: mol_type = other DNA
ctgctaagggacaagatgag

SEQ ID NO: 318 - DNA, 20 bp, synthetic construct
  misc_feature 1..20: note = chemically synthesized
  source 1..20: mol_type = other DNA
ctaagggacaagatgagcag

SEQ ID NO: 319 - DNA, 20 bp, synthetic construct
  misc_feature 1..20: note = chemically synthesized
  source 1..20: mol_type = other DNA
atgagcagcagcaatgccta

SEQ ID NO: 320 - DNA, 20 bp, synthetic construct
  misc_feature 1..20: note = chemically synthesized
  source 1..20: mol_type = other DNA
gcagcagcaatgcctacggc

SEQ ID NO: 321 - DNA, 20 bp, synthetic construct
  misc_feature 1..20: note = chemically synthesized
  source 1..20: mol_type = other DNA
agcagcaatgcctacggcaa

SEQ ID NO: 322 - DNA, 20 bp, synthetic construct
  misc_feature 1..20: note = chemically synthesized
  source 1..20: mol_type = other DNA
aacttgctcctgataaacca

SEQ ID NO: 323 - DNA, 20 bp, synthetic construct
  misc_feature 1..20: note = chemically synthesized
  source 1..20: mol_type = other DNA
aaaccacagatactgaataa

SEQ ID NO: 324 - DNA, 20 bp, synthetic construct
  misc_feature 1..20: note = chemically synthesized
  source 1..20: mol_type = other DNA
aaccacagatactgaataat

SEQ ID NO: 325 - DNA, 20 bp, synthetic construct
  misc_feature 1..20: note = chemically synthesized
  source 1..20: mol_type = other DNA
taatgggcaaatgaatcatt

SEQ ID NO: 326 - DNA, 20 bp, synthetic construct
  misc_feature 1..20: note = chemically synthesized
  source 1..20: mol_type = other DNA
gggcaaatgaatcatttagc

SEQ ID NO: 327 - DNA, 20 bp, synthetic construct
  misc_feature 1..20: note = chemically synthesized
  source 1..20: mol_type = other DNA
aatgaatcatttagccagaa

SEQ ID NO: 328 - DNA, 20 bp, synthetic construct
  misc_feature 1..20: note = chemically synthesized
  source 1..20: mol_type = other DNA
tgaatcatttagccagaata

SEQ ID NO: 329 - DNA, 20 bp, synthetic construct
  misc_feature 1..20: note = chemically synthesized
  source 1..20: mol_type = other DNA
catttagccagaatagagtc

SEQ ID NO: 330 - DNA, 20 bp, synthetic construct
  misc_feature 1..20: note = chemically synthesized
  source 1..20: mol_type = other DNA
cagaatagagtccagtttcc

SEQ ID NO: 331 - DNA, 20 bp, synthetic construct
  misc_feature 1..20: note = chemically synthesized
  source 1..20: mol_type = other DNA
tttcctggttttaaaatgtt

SEQ ID NO: 332 - DNA, 20 bp, synthetic construct
  misc_feature 1..20: note = chemically synthesized
  source 1..20: mol_type = other DNA
tcctggttttaaaatgttca

SEQ ID NO: 333 - DNA, 20 bp, synthetic construct
  misc_feature 1..20: note = chemically synthesized
  source 1..20: mol_type = other DNA
aaaatgttcagagttataat

SEQ ID NO: 334 - DNA, 20 bp, synthetic construct
  misc_feature 1..20: note = chemically synthesized
  source 1..20: mol_type = other DNA
gagttataattagcataata

SEQ ID NO: 335 - DNA, 20 bp, synthetic construct
  misc_feature 1..20: note = chemically synthesized
  source 1..20: mol_type = other DNA
tagcataatatagcccaata

SEQ ID NO: 336 - DNA, 20 bp, synthetic construct
  misc_feature 1..20: note = chemically synthesized
  source 1..20: mol_type = other DNA
agcataatatagcccaataa

SEQ ID NO: 337 - DNA, 20 bp, synthetic construct
  misc_feature 1..20: note = chemically synthesized
  source 1..20: mol_type = other DNA
atagcccaataaaggctcat

SEQ ID NO: 338 - DNA, 20 bp, synthetic construct
  misc_feature 1..20: note = chemically synthesized
  source 1..20: mol_type = other DNA
cattagttcttaatgaaata

SEQ ID NO: 339 - DNA, 20 bp, synthetic construct
  misc_feature 1..20: note = chemically synthesized
  source 1..20: mol_type = other DNA
attagttcttaatgaaatat

SEQ ID NO: 340 - DNA, 20 bp, synthetic construct
  misc_feature 1..20: note = chemically synthesized
  source 1..20: mol_type = other DNA
gttcttaatgaaatataggt

SEQ ID NO: 341 - DNA, 20 bp, synthetic construct
  misc_feature 1..20: note = chemically synthesized
  source 1..20: mol_type = other DNA
agatgcttatataattttgt

SEQ ID NO: 342 - DNA, 20 bp, synthetic construct
  misc_feature 1..20: note = chemically synthesized
  source 1..20: mol_type = other DNA
aattttgtgagctctgacat

SEQ ID NO: 343 - DNA, 20 bp, synthetic construct
  misc_feature 1..20: note = chemically synthesized
  source 1..20: mol_type = other DNA
tgagctctgacataagaaat

SEQ ID NO: 344 - DNA, 20 bp, synthetic construct
  misc_feature 1..20: note = chemically synthesized
  source 1..20: mol_type = other DNA
agaaattagtaaaaataaaa

SEQ ID NO: 345 - DNA, 20 bp, synthetic construct
  misc_feature 1..20: note = chemically synthesized
  source 1..20: mol_type = other DNA
tagtaaaaataaaaaagcta

SEQ ID NO: 346 - DNA, 20 bp, synthetic construct
  misc_feature 1..20: note = chemically synthesized
  source 1..20: mol_type = other DNA
agtaaaaataaaaaagctaa

SEQ ID NO: 347 - DNA, 20 bp, synthetic construct
  misc_feature 1..20: note = chemically synthesized
  source 1..20: mol_type = other DNA
aaaataaaaaagctaaagga

SEQ ID NO: 348 - DNA, 20 bp, synthetic construct
  misc_feature 1..20: note = chemically synthesized
  source 1..20: mol_type = other DNA
aagctaaaggacagatttct

SEQ ID NO: 349 - DNA, 20 bp, synthetic construct
  misc_feature 1..20: note = chemically synthesized
  source 1..20: mol_type = other DNA
ctaaaggacagatttcttag

SEQ ID NO: 350 - DNA, 20 bp, synthetic construct
  misc_feature 1..20: note = chemically synthesized
  source 1..20: mol_type = other DNA
aaggacagatttcttagaag

SEQ ID NO: 351 - DNA, 20 bp, synthetic construct
  misc_feature 1..20: note = chemically synthesized
  source 1..20: mol_type = other DNA
ttcttagaagaagtcaaatg

SEQ ID NO: 352 - DNA, 20 bp, synthetic construct
  misc_feature 1..20: note = chemically synthesized
  source 1..20: mol_type = other DNA
gaagaagtcaaatgtagaac

SEQ ID NO: 353 - DNA, 20 bp, synthetic construct
  misc_feature 1..20: note = chemically synthesized
  source 1..20: mol_type = other DNA
aagtcaaatgtagaactaga

SEQ ID NO: 354 - DNA, 20 bp, synthetic construct
  misc_feature 1..20: note = chemically synthesized
  source 1..20: mol_type = other DNA
agtcaaatgtagaactagac

SEQ ID NO: 355 - DNA, 20 bp, synthetic construct
  misc_feature 1..20: note = chemically synthesized
  source 1..20: mol_type = other DNA
gtcaaatgtagaactagaca

SEQ ID NO: 356 - DNA, 20 bp, synthetic construct
  misc_feature 1..20: note = chemically synthesized
  source 1..20: mol_type = other DNA
aaatgtagaactagacaggg

SEQ ID NO: 357 - DNA, 20 bp, synthetic construct
  misc_feature 1..20: note = chemically synthesized
  source 1..20: mol_type = other DNA
gtagaactagacagggaaga

SEQ ID NO: 358 - DNA, 20 bp, synthetic construct
  misc_feature 1..20: note = chemically synthesized
  source 1..20: mol_type = other DNA
tagaactagacagggaagac

SEQ ID NO: 359 - DNA, 20 bp, synthetic construct
  misc_feature 1..20: note = chemically synthesized
  source 1..20: mol_type = other DNA
cagggaagacaggacaaact

SEQ ID NO: 360 - DNA, 20 bp, synthetic construct
  misc_feature 1..20: note = chemically synthesized
  source 1..20: mol_type = other DNA
agggaagacaggacaaactt

SEQ ID NO: 361 - DNA, 20 bp, synthetic construct
  misc_feature 1..20: note = chemically synthesized
  source 1..20: mol_type = other DNA
gggaagacaggacaaacttg

SEQ ID NO: 362 - DNA, 20 bp, synthetic construct
  misc_feature 1..20: note = chemically synthesized
  source 1..20: mol_type = other DNA
gaagacaggacaaacttggg

SEQ ID NO: 363 - DNA, 20 bp, synthetic construct
  misc_feature 1..20: note = chemically synthesized
  source 1..20: mol_type = other DNA
aacttggggagactaaaatt

SEQ ID NO: 364 - DNA, 20 bp, synthetic construct
  misc_feature 1..20: note = chemically synthesized
  source 1..20: mol_type = other DNA
acttggggagactaaaattg

SEQ ID NO: 365 - DNA, 20 bp, synthetic construct
  misc_feature 1..20: note = chemically synthesized
  source 1..20: mol_type = other DNA
ggggagactaaaattgagga

SEQ ID NO: 366 - DNA, 20 bp, synthetic construct
  misc_feature 1..20: note = chemically synthesized
  source 1..20: mol_type = other DNA
gaaagcactatgaataacca

SEQ ID NO: 367 - DNA, 20 bp, synthetic construct
  misc_feature 1..20: note = chemically synthesized
  source 1..20: mol_type = other DNA
atgaataaccaaagaaaatt

SEQ ID NO: 368 - DNA, 20 bp, synthetic construct
  misc_feature 1..20: note = chemically synthesized
  source 1..20: mol_type = other DNA
attgaattttctgaaaaacc

SEQ ID NO: 369 - DNA, 20 bp, synthetic construct
  misc_feature 1..20: note = chemically synthesized
  source 1..20: mol_type = other DNA
ttgaattttctgaaaaacct

SEQ ID NO: 370 - DNA, 20 bp, synthetic construct
  misc_feature 1..20: note = chemically synthesized
  source 1..20: mol_type = other DNA
ggctcttatgctttatataa

SEQ ID NO: 371 - DNA, 20 bp, synthetic construct
  misc_feature 1..20: note = chemically synthesized
  source 1..20: mol_type = other DNA
taaaagttctctgatcaaaa

SEQ ID NO: 372 - DNA, 20 bp, synthetic construct
  misc_feature 1..20: note = chemically synthesized
  source 1..20: mol_type = other DNA
aaaaattacatattttgaat

SEQ ID NO: 373 - DNA, 20 bp, synthetic construct
  misc_feature 1..20: note = chemically synthesized
  source 1..20: mol_type = other DNA
attttgaatcagtacatttt

SEQ ID NO: 374 - DNA, 20 bp, synthetic construct
  misc_feature 1..20: note = chemically synthesized
  source 1..20: mol_type = other DNA
gtacattttaagctatacat

SEQ ID NO: 375 - DNA, 20 bp, synthetic construct
  misc_feature 1..20: note = chemically synthesized
  source 1..20: mol_type = other DNA
acattttaagctatacatta

SEQ ID NO: 376 - DNA, 20 bp, synthetic construct
  misc_feature 1..20: note = chemically synthesized
  source 1..20: mol_type = other DNA
ttagagaaatgtttgtgata

SEQ ID NO: 377 - DNA, 20 bp, synthetic construct
  misc_feature 1..20: note = chemically synthesized
  source 1..20: mol_type = other DNA
aatgtttgtgatacagtgaa

SEQ ID NO: 378 - DNA, 20 bp, synthetic construct
  misc_feature 1..20: note = chemically synthesized
  source 1..20: mol_type = other DNA
ttgtgatacagtgaaaagta

SEQ ID NO: 379 - DNA, 20 bp, synthetic construct
  misc_feature 1..20: note = chemically synthesized
  source 1..20: mol_type = other DNA
aaagttacttcattctttcc

SEQ ID NO: 380 - DNA, 20 bp, synthetic construct
  misc_feature 1..20: note = chemically synthesized
  source 1..20: mol_type = other DNA
ctttcctagacacttcaata

SEQ ID NO: 381 - DNA, 20 bp, synthetic construct
  misc_feature 1..20: note = chemically synthesized
  source 1..20: mol_type = other DNA
tcaataaagttgttttatct

SEQ ID NO: 382 - DNA, 20 bp, synthetic construct
  misc_feature 1..20: note = chemically synthesized
  source 1..20: mol_type = other DNA
taaagttgttttatctcagt

SEQ ID NO: 383 - DNA, 20 bp, synthetic construct
  misc_feature 1..20: note = chemically synthesized
  source 1..20: mol_type = other DNA
atctcagtaagctcatgaat

SEQ ID NO: 384 - DNA, 20 bp, synthetic construct
  misc_feature 1..20: note = chemically synthesized
  source 1..20: mol_type = other DNA
gcttcatgtcaccaatatgc

SEQ ID NO: 385 - DNA, 20 bp, synthetic construct
  misc_feature 1..20: note = chemically synthesized
  source 1..20: mol_type = other DNA
tcaccaatatgctggaaatt

SEQ ID NO: 386 - DNA, 20 bp, synthetic construct
  misc_feature 1..20: note = chemically synthesized
  source 1..20: mol_type = other DNA
caccaatatgctggaaattc

SEQ ID NO: 387 - DNA, 20 bp, synthetic construct
  misc_feature 1..20: note = chemically synthesized
  source 1..20: mol_type = other DNA
caatatgctggaaattcagg

SEQ ID NO: 388 - DNA, 20 bp, synthetic construct
  misc_feature 1..20: note = chemically synthesized
  source 1..20: mol_type = other DNA
tatgctggaaattcaggaag

SEQ ID NO: 389 - DNA, 20 bp, synthetic construct
  misc_feature 1..20: note = chemically synthesized
  source 1..20: mol_type = other DNA
aggaagtagctgttctttga

SEQ ID NO: 390 - DNA, 20 bp, synthetic construct
  misc_feature 1..20: note = chemically synthesized
  source 1..20: mol_type = other DNA
tagctgttctttgaaagaaa

SEQ ID NO: 391 - DNA, 20 bp, synthetic construct
  misc_feature 1..20: note = chemically synthesized
  source 1..20: mol_type = other DNA
ctgttctttgaaagaaaaag

SEQ ID NO: 392 - DNA, 20 bp, synthetic construct
  misc_feature 1..20: note = chemically synthesized
  source 1..20: mol_type = other DNA
ttttttttttttttttttga

SEQ ID NO: 393 - DNA, 20 bp, synthetic construct
  misc_feature 1..20: note = chemically synthesized
  source 1..20: mol_type = other DNA
tttttttttttttgaaagaa

SEQ ID NO: 394 - DNA, 20 bp, synthetic construct
  misc_feature 1..20: note = chemically synthesized
  source 1..20: mol_type = other DNA
ttttttttttttgaaagaaa

SEQ ID NO: 395 - DNA, 20 bp, synthetic construct
  misc_feature 1..20: note = chemically synthesized
  source 1..20: mol_type = other DNA
tttttttttgaaagaaaagg

SEQ ID NO: 396 - DNA, 20 bp, synthetic construct
  misc_feature 1..20: note = chemically synthesized
  source 1..20: mol_type = other DNA
ttttttttgaaagaaaagga

SEQ ID NO: 397 - DNA, 20 bp, synthetic construct
  misc_feature 1..20: note = chemically synthesized
  source 1..20: mol_type = other DNA
ttttgaaagaaaaggaaggt

SEQ ID NO: 398 - DNA, 20 bp, synthetic construct
  misc_feature 1..20: note = chemically synthesized
  source 1..20: mol_type = other DNA
agaaaaggaaggtaagtaac

SEQ ID NO: 399 - DNA, 20 bp, synthetic construct
  misc_feature 1..20: note = chemically synthesized
  source 1..20: mol_type = other DNA
gaaaaggaaggtaagtaaca

SEQ ID NO: 400 - DNA, 20 bp, synthetic construct
  misc_feature 1..20: note = chemically synthesized
  source 1..20: mol_type = other DNA
aaggaaggtaagtaacaagg

SEQ ID NO: 401 - DNA, 20 bp, synthetic construct
  misc_feature 1..20: note = chemically synthesized
  source 1..20: mol_type = other DNA
aaggtaagtaacaaggaaga

SEQ ID NO: 402 - DNA, 20 bp, synthetic construct
  misc_feature 1..20: note = chemically synthesized
  source 1..20: mol_type = other DNA
ggtaagtaacaaggaagaaa

SEQ ID NO: 403 - DNA, 20 bp, synthetic construct
  misc_feature 1..20: note = chemically synthesized
  source 1..20: mol_type = other DNA
gtaacaaggaagaaagagaa

SEQ ID NO: 404 - DNA, 20 bp, synthetic construct
  misc_feature 1..20: note = chemically synthesized
  source 1..20: mol_type = other DNA
aacaaggaagaaagagaaaa

SEQ ID NO: 405 - DNA, 20 bp, synthetic construct
  misc_feature 1..20: note = chemically synthesized
  source 1..20: mol_type = other DNA
acaaggaagaaagagaaaag

SEQ ID NO: 406 - DNA, 20 bp, synthetic construct
  misc_feature 1..20: note = chemically synthesized
  source 1..20: mol_type = other DNA
aagaaagagaaaagaggaaa

SEQ ID NO: 407 - DNA, 20 bp, synthetic construct
  misc_feature 1..20: note = chemically synthesized
  source 1..20: mol_type = other DNA
agaaaagaggaaatggatac

SEQ ID NO: 408 - DNA, 20 bp, synthetic construct
  misc_feature 1..20: note = chemically synthesized
  source 1..20: mol_type = other DNA
tgctgctaaacttcaaatga

SEQ ID NO: 409 - DNA, 20 bp, synthetic construct
  misc_feature 1..20: note = chemically synthesized
  source 1..20: mol_type = other DNA
ttcaaatgaaagaaccaaat

SEQ ID NO: 410 - DNA, 20 bp, synthetic construct
  misc_feature 1..20: note = chemically synthesized
  source 1..20: mol_type = other DNA
aaatgaaagaaccaaatcag

SEQ ID NO: 411 - DNA, 20 bp, synthetic construct
  misc_feature 1..20: note = chemically synthesized
  source 1..20: mol_type = other DNA
atgaaagaaccaaatcagca

SEQ ID NO: 412 - DNA, 20 bp, synthetic construct
  misc_feature 1..20: note = chemically synthesized
  source 1..20: mol_type = other DNA
tgaaagaaccaaatcagcag

SEQ ID NO: 413 - DNA, 20 bp, synthetic construct
  misc_feature 1..20: note = chemically synthesized
  source 1..20: mol_type = other DNA
cagcagaggacatttcatga

SEQ ID NO: 414 - DNA, 20 bp, synthetic construct
  misc_feature 1..20: note = chemically synthesized
  source 1..20: mol_type = other DNA
agcagaggacatttcatgac

SEQ ID NO: 415 - DNA, 20 bp, synthetic construct
  misc_feature 1..20: note = chemically synthesized
  source 1..20: mol_type = other DNA
gcagaggacatttcatgaca

SEQ ID NO: 416 - DNA, 20 bp, synthetic construct
  misc_feature 1..20: note = chemically synthesized
  source 1..20: mol_type = other DNA
agaggacatttcatgacagg

SEQ ID NO: 417 - DNA, 20 bp, synthetic construct
  misc_feature 1..20: note = chemically synthesized
  source 1..20: mol_type = other DNA
gaggacatttcatgacaggg

SEQ ID NO: 418 - DNA, 20 bp, synthetic construct
  misc_feature 1..20: note = chemically synthesized
  source 1..20: mol_type = other DNA
tcatgacagggaggctgtat

SEQ ID NO: 419 - DNA, 20 bp, synthetic construct
  misc_feature 1..20: note = chemically synthesized
  source 1..20: mol_type = other DNA
aacatacatttaccgtaaac

SEQ ID NO: 420 - DNA, 20 bp, synthetic construct
  misc_feature 1..20: note = chemically synthesized
  source 1..20: mol_type = other DNA
atacatttaccgtaaactag

SEQ ID NO: 421 - DNA, 20 bp, synthetic construct
  misc_feature 1..20: note = chemically synthesized
  source 1..20: mol_type = other DNA
tacatttaccgtaaactagt

SEQ ID NO: 422 - DNA, 20 bp, synthetic construct
  misc_feature 1..20: note = chemically synthesized
  source 1..20: mol_type = other DNA
attaaatactttgatttcca

SEQ ID NO: 423 - DNA, 20 bp, synthetic construct
  misc_feature 1..20: note = chemically synthesized
  source 1..20: mol_type = other DNA
cagatttgatccccaatgct

SEQ ID NO: 424 - DNA, 20 bp, synthetic construct
  misc_feature 1..20: note = chemically synthesized
  source 1..20: mol_type = other DNA
tttatgacactcccatccat

SEQ ID NO: 425 - DNA, 20 bp, synthetic construct
  misc_feature 1..20: note = chemically synthesized
  source 1..20: mol_type = other DNA
cactcccatccataagtcac

SEQ ID NO: 426 - DNA, 20 bp, synthetic construct
  misc_feature 1..20: note = chemically synthesized
  source 1..20: mol_type = other DNA
aagtcactggctttttctaa

SEQ ID NO: 427 - DNA, 20 bp, synthetic construct
  misc_feature 1..20: note = chemically synthesized
  source 1..20: mol_type = other DNA
agtcactggctttttctaat

SEQ ID NO: 428 - DNA, 20 bp, synthetic construct
  misc_feature 1..20: note = chemically synthesized
  source 1..20: mol_type = other DNA
gtcactggctttttctaata

SEQ ID NO: 429 - DNA, 20 bp, synthetic construct
  misc_feature 1..20: note = chemically synthesized
  source 1..20: mol_type = other DNA
tcactggctttttctaatag

SEQ ID NO: 430 - DNA, 20 bp, synthetic construct
  misc_feature 1..20: note = chemically synthesized
  source 1..20: mol_type = other DNA
ggcaaattttttcttctcca

SEQ ID NO: 431 - DNA, 20 bp, synthetic construct
  misc_feature 1..20: note = chemically synthesized
  source 1..20: mol_type = other DNA
tctccaaagataatcacaat

SEQ ID NO: 432 - DNA, 20 bp, synthetic construct
  misc_feature 1..20: note = chemically synthesized
  source 1..20: mol_type = other DNA
aagataatcacaattagaat

SEQ ID NO: 433 - DNA, 20 bp, synthetic construct
  misc_feature 1..20: note = chemically synthesized
  source 1..20: mol_type = other DNA
ttagaataagaatcctttaa

SEQ ID NO: 434 - DNA, 20 bp, synthetic construct
  misc_feature 1..20: note = chemically synthesized
  source 1..20: mol_type = other DNA
tcacaatgtctgacttattc

SEQ ID NO: 435 - DNA, 20 bp, synthetic construct
  misc_feature 1..20: note = chemically synthesized
  source 1..20: mol_type = other DNA
gtctgacttattcaagacca

SEQ ID NO: 436 - DNA, 20 bp, synthetic construct
  misc_feature 1..20: note = chemically synthesized
  source 1..20: mol_type = other DNA
ctgacttattcaagaccaaa

SEQ ID NO: 437 - DNA, 20 bp, synthetic construct
  misc_feature 1..20: note = chemically synthesized
  source 1..20: mol_type = other DNA
agaccaaagagctgacatgt

SEQ ID NO: 438 - DNA, 20 bp, synthetic construct
  misc_feature 1..20: note = chemically synthesized
  source 1..20: mol_type = other DNA
gacatgtgagtactacctga

SEQ ID NO: 439 - DNA, 20 bp, synthetic construct
  misc_feature 1..20: note = chemically synthesized
  source 1..20: mol_type = other DNA
acatgtgagtactacctgac

SEQ ID NO: 440 - DNA, 20 bp, synthetic construct
  misc_feature 1..20: note = chemically synthesized
  source 1..20: mol_type = other DNA
tgagtactacctgacaggca

SEQ ID NO: 441 - DNA, 20 bp, synthetic construct
  misc_feature 1..20: note = chemically synthesized
  source 1..20: mol_type = other DNA
tactacctgacaggcacaga

SEQ ID NO: 442 - DNA, 20 bp, synthetic construct
  misc_feature 1..20: note = chemically synthesized
  source 1..20: mol_type = other DNA
tacctgacaggcacagatag

SEQ ID NO: 443 - DNA, 20 bp, synthetic construct
  misc_feature 1..20: note = chemically synthesized
  source 1..20: mol_type = other DNA
acctgacaggcacagatagc

SEQ ID NO: 444 - DNA, 20 bp, synthetic construct
  misc_feature 1..20: note = chemically synthesized
  source 1..20: mol_type = other DNA
cctgacaggcacagatagca

SEQ ID NO: 445 - DNA, 20 bp, synthetic construct
  misc_feature 1..20: note = chemically synthesized
  source 1..20: mol_type = other DNA
aggcacagatagcagggttg

SEQ ID NO: 446 - DNA, 20 bp, synthetic construct
  misc_feature 1..20: note = chemically synthesized
  source 1..20: mol_type = other DNA
ggcacagatagcagggttgc

SEQ ID NO: 447 - DNA, 20 bp, synthetic construct
  misc_feature 1..20: note = chemically synthesized
  source 1..20: mol_type = other DNA
acagatagcagggttgcagg

SEQ ID NO: 448 - DNA, 20 bp, synthetic construct
  misc_feature 1..20: note = chemically synthesized
  source 1..20: mol_type = other DNA
gatagcagggttgcaggtgg

SEQ ID NO: 449 - DNA, 20 bp, synthetic construct
  misc_feature 1..20: note = chemically synthesized
  source 1..20: mol_type = other DNA
ttgcaggtggtggtgtatgt

SEQ ID NO: 450 - DNA, 20 bp, synthetic construct
  misc_feature 1..20: note = chemically synthesized
  source 1..20: mol_type = other DNA
tggtggtgtatgtaagttcc

SEQ ID NO: 451 - DNA, 20 bp, synthetic construct
  misc_feature 1..20: note = chemically synthesized
  source 1..20: mol_type = other DNA
ggtgtatgtaagttcctggt

SEQ ID NO: 452 - DNA, 20 bp, synthetic construct
  misc_feature 1..20: note = chemically synthesized
  source 1..20: mol_type = other DNA
tatgtaagttcctggttagt

SEQ ID NO: 453 - DNA, 20 bp, synthetic construct
  misc_feature 1..20: note = chemically synthesized
  source 1..20: mol_type = other DNA
taagttcctggttagttgga

SEQ ID NO: 454 - DNA, 20 bp, synthetic construct
  misc_feature 1..20: note = chemically synthesized
  source 1..20: mol_type = other DNA
agttcctggttagttggata

SEQ ID NO: 455 - DNA, 20 bp, synthetic construct
  misc_feature 1..20: note = chemically synthesized
  source 1..20: mol_type = other DNA
ttggatagagtgattgttat

SEQ ID NO: 456 - DNA, 20 bp, synthetic construct
  misc_feature 1..20: note = chemically synthesized
  source 1..20: mol_type = other DNA
ggatagagtgattgttattg

SEQ ID NO: 457 - DNA, 20 bp, synthetic construct
  misc_feature 1..20: note = chemically synthesized
  source 1..20: mol_type = other DNA
tagagtgattgttattggag

SEQ ID NO: 458 - DNA, 20 bp, synthetic construct
  misc_feature 1..20: note = chemically synthesized
  source 1..20: mol_type = other DNA
gtgattgttattggagaagc

SEQ ID NO: 459 - DNA, 20 bp, synthetic construct
  misc_feature 1..20: note = chemically synthesized
  source 1..20: mol_type = other DNA
agaagctggtaattaaatta

SEQ ID NO: 460 - DNA, 20 bp, synthetic construct
  misc_feature 1..20: note = chemically synthesized
  source 1..20: mol_type = other DNA
aagctggtaattaaattatg

SEQ ID NO: 461 - DNA, 20 bp, synthetic construct
  misc_feature 1..20: note = chemically synthesized
  source 1..20: mol_type = other DNA
gctggtaattaaattatgga

SEQ ID NO: 462 - DNA, 20 bp, synthetic construct
  misc_feature 1..20: note = chemically synthesized
  source 1..20: mol_type = other DNA
ctggtaattaaattatggag

SEQ ID NO: 463 - DNA, 20 bp, synthetic construct
  misc_feature 1..20: note = chemically synthesized
  source 1..20: mol_type = other DNA
taaattatggagaggaaact

SEQ ID NO: 464 - DNA, 20 bp, synthetic construct
  misc_feature 1..20: note = chemically synthesized
  source 1..20: mol_type = other DNA
gagaggaaacttggaatcgt

SEQ ID NO: 465 - DNA, 20 bp, synthetic construct
  misc_feature 1..20: note = chemically synthesized
  source 1..20: mol_type = other DNA
cttactcctcaattattatt

SEQ ID NO: 466 - DNA, 20 bp, synthetic construct
  misc_feature 1..20: note = chemically synthesized
  source 1..20: mol_type = other DNA
tactcctcaattattattga

SEQ ID NO: 467 - DNA, 20 bp, synthetic construct
  misc_feature 1..20: note = chemically synthesized
  source 1..20: mol_type = other DNA
cctcaattattattgagagc

SEQ ID NO: 468 - DNA, 20 bp, synthetic construct
  misc_feature 1..20: note = chemically synthesized
  source 1..20: mol_type = other DNA
agagctggttttgctcttac

SEQ ID NO: 469 - DNA, 20 bp, synthetic construct
  misc_feature 1..20: note = chemically synthesized
  source 1..20: mol_type = other DNA
ttgctcttaccagatacctg

SEQ ID NO: 470 - DNA, 20 bp, synthetic construct
  misc_feature 1..20: note = chemically synthesized
  source 1..20: mol_type = other DNA
ctcaccaatttttcttctcc

SEQ ID NO: 471 - DNA, 20 bp, synthetic construct
  misc_feature 1..20: note = chemically synthesized
  source 1..20: mol_type = other DNA
tcaccaatttttcttctcca

SEQ ID NO: 472 - DNA, 20 bp, synthetic construct
  misc_feature 1..20: note = chemically synthesized
  source 1..20: mol_type = other DNA
tttttcttctccaaggattc

SEQ ID NO: 473 - DNA, 20 bp, synthetic construct
  misc_feature 1..20: note = chemically synthesized
  source 1..20: mol_type = other DNA
gattccagcttcattccctt

SEQ ID NO: 474 - DNA, 20 bp, synthetic construct
  misc_feature 1..20: note = chemically synthesized
  source 1..20: mol_type = other DNA
agcttcattcccttaagttg

SEQ ID NO: 475 - DNA, 20 bp, synthetic construct
  misc_feature 1..20: note = chemically synthesized
  source 1..20: mol_type = other DNA
gcttcattcccttaagttgt

SEQ ID NO: 476 - DNA, 20 bp, synthetic construct
  misc_feature 1..20: note = chemically synthesized
  source 1..20: mol_type = other DNA
ttaagttgtgggttctgtga

SEQ ID NO: 477 - DNA, 20 bp, synthetic construct
  misc_feature 1..20: note = chemically synthesized
  source 1..20: mol_type = other DNA
tctgtctgcactctgtgtaa

SEQ ID NO: 478 - DNA, 20 bp, synthetic construct
  misc_feature 1..20: note = chemically synthesized
  source 1..20: mol_type = other DNA
gcactctgtgtaacagcatc

SEQ ID NO: 479 - DNA, 20 bp, synthetic construct
  misc_feature 1..20: note = chemically synthesized
  source 1..20: mol_type = other DNA
gtcataaattttactctgtt

SEQ ID NO: 480 - DNA, 20 bp, synthetic construct
  misc_feature 1..20: note = chemically synthesized
  source 1..20: mol_type = other DNA
aattttactctgtttggtgc

SEQ ID NO: 481 - DNA, 20 bp, synthetic construct
  misc_feature 1..20: note = chemically synthesized
  source 1..20: mol_type = other DNA
attttactctgtttggtgcc

SEQ ID NO: 482 - DNA, 20 bp, synthetic construct
  misc_feature 1..20: note = chemically synthesized
  source 1..20: mol_type = other DNA
tgtgccaatataatatactg

SEQ ID NO: 483 - DNA, 20 bp, synthetic construct
  misc_feature 1..20: note = chemically synthesized
  source 1..20: mol_type = other DNA
aatatactgtggacattttg

SEQ ID NO: 484 - DNA, 20 bp, synthetic construct
  misc_feature 1..20: note = chemically synthesized
  source 1..20: mol_type = other DNA
cttttcatttatctctaaca

SEQ ID NO: 485 - DNA, 20 bp, synthetic construct
  misc_feature 1..20: note = chemically synthesized
  source 1..20: mol_type = other DNA
cggacatcttcttcttcttc

SEQ ID NO: 486 - DNA, 20 bp, synthetic construct
  misc_feature 1..20: note = chemically synthesized
  source 1..20: mol_type = other DNA
acatcttcttcttcttctgg

SEQ ID NO: 487 - DNA, 20 bp, synthetic construct
  misc_feature 1..20: note = chemically synthesized
  source 1..20: mol_type = other DNA
cttcttctggaagtctgtct

SEQ ID NO: 488 - DNA, 20 bp, synthetic construct
  misc_feature 1..20: note = chemically synthesized
  source 1..20: mol_type = other DNA
atctttgtgtgctcatcccc

SEQ ID NO: 489 - DNA, 20 bp, synthetic construct
  misc_feature 1..20: note = chemically synthesized
  source 1..20: mol_type = other DNA
tcatcccccagtaaaactca

SEQ ID NO: 490 - DNA, 20 bp, synthetic construct
  misc_feature 1..20: note = chemically synthesized
  source 1..20: mol_type = other DNA
cccccagtaaaactcatagt

SEQ ID NO: 491 - DNA, 20 bp, synthetic construct
  misc_feature 1..20: note = chemically synthesized
  source 1..20: mol_type = other DNA
ccccagtaaaactcatagtg

SEQ ID NO: 492 - DNA, 20 bp, synthetic construct
  misc_feature 1..20: note = chemically synthesized
  source 1..20: mol_type = other DNA
aaaactcatagtgaggtctg

SEQ ID NO: 493 - DNA, 20 bp, synthetic construct
  misc_feature 1..20: note = chemically synthesized
  source 1..20: mol_type = other DNA
gtctgtagcattctgaaaca

SEQ ID NO: 494 - DNA, 20 bp, synthetic construct
  misc_feature 1..20: note = chemically synthesized
  source 1..20: mol_type = other DNA
tctgtagcattctgaaacac

SEQ ID NO: 495 - DNA, 20 bp, synthetic construct
  misc_feature 1..20: note = chemically synthesized
  source 1..20: mol_type = other DNA
aaacacgggatgaatttatt

SEQ ID NO: 496 - DNA, 20 bp, synthetic construct
  misc_feature 1..20: note = chemically synthesized
  source 1..20: mol_type = other DNA
tgaatttattgagctcaaat

SEQ ID NO: 497 - DNA, 20 bp, synthetic construct
  misc_feature 1..20: note = chemically synthesized
  source 1..20: mol_type = other DNA
aatttattgagctcaaattg

SEQ ID NO: 498 - DNA, 20 bp, synthetic construct
  misc_feature 1..20: note = chemically synthesized
  source 1..20: mol_type = other DNA
tgagctcaaattggagaaaa

SEQ ID NO: 499 - DNA, 20 bp, synthetic construct
  misc_feature 1..20: note = chemically synthesized
  source 1..20: mol_type = other DNA
gctcaaattggagaaaaaag

SEQ ID NO: 500 - DNA, 20 bp, synthetic construct
  misc_feature 1..20: note = chemically synthesized
  source 1..20: mol_type = other DNA
aatattcctttatgaatgtg

SEQ ID NO: 501 - DNA, 20 bp, synthetic construct
  misc_feature 1..20: note = chemically synthesized
  source 1..20: mol_type = other DNA
tattcctttatgaatgtgtg

SEQ ID NO: 502 - DNA, 20 bp, synthetic construct
  misc_feature 1..20: note = chemically synthesized
  source 1..20: mol_type = other DNA
tcctttatgaatgtgtggag

SEQ ID NO: 503 - DNA, 20 bp, synthetic construct
  misc_feature 1..20: note = chemically synthesized
  source 1..20: mol_type = other DNA
tttatgaatgtgtggagaag

SEQ ID NO: 504 - DNA, 20 bp, synthetic construct
  misc_feature 1..20: note = chemically synthesized
  source 1..20: mol_type = other DNA
ttatgaatgtgtggagaagt

SEQ ID NO: 505 - DNA, 20 bp, synthetic construct
  misc_feature 1..20: note = chemically synthesized
  source 1..20: mol_type = other DNA
atgaatgtgtggagaagtag

SEQ ID NO: 506 - DNA, 20 bp, synthetic construct
  misc_feature 1..20: note = chemically synthesized
  source 1..20: mol_type = other DNA
tgaatgtgtggagaagtagg

SEQ ID NO: 507 - DNA, 20 bp, synthetic construct
  misc_feature 1..20: note = chemically synthesized
  source 1..20: mol_type = other DNA
aatgtgtggagaagtaggag

SEQ ID NO: 508 - DNA, 20 bp, synthetic construct
  misc_feature 1..20: note = chemically synthesized
  source 1..20: mol_type = other DNA
ggagaagtaggaggagttat

SEQ ID NO: 509 - DNA, 20 bp, synthetic construct
  misc_feature 1..20: note = chemically synthesized
  source 1..20: mol_type = other DNA
aggagttatgagcatgaaat

SEQ ID NO: 510 - DNA, 20 bp, synthetic construct
  misc_feature 1..20: note = chemically synthesized
  source 1..20: mol_type = other DNA
ggagttatgagcatgaaatg

SEQ ID NO: 511 - DNA, 20 bp, synthetic construct
  misc_feature 1..20: note = chemically synthesized
  source 1..20: mol_type = other DNA
gagttatgagcatgaaatga

SEQ ID NO: 512 - DNA, 20 bp, synthetic construct
  misc_feature 1..20: note = chemically synthesized
  source 1..20: mol_type = other DNA
gcatgaaatgagggatttcc

SEQ ID NO: 513 - DNA, 20 bp, synthetic construct
  misc_feature 1..20: note = chemically synthesized
  source 1..20: mol_type = other DNA
atgagggatttcctagttga

SEQ ID NO: 514 - DNA, 20 bp, synthetic construct
  misc_feature 1..20: note = chemically synthesized
  source 1..20: mol_type = other DNA
tagttgatagccaaaaccac

SEQ ID NO: 515 - DNA, 20 bp, synthetic construct
  misc_feature 1..20: note = chemically synthesized
  source 1..20: mol_type = other DNA
agttgatagccaaaaccacg

SEQ ID NO: 516 - DNA, 20 bp, synthetic construct
  misc_feature 1..20: note = chemically synthesized
  source 1..20: mol_type = other DNA
gttgatagccaaaaccacga

SEQ ID NO: 517 - DNA, 20 bp, synthetic construct
  misc_feature 1..20: note = chemically synthesized
  source 1..20: mol_type = other DNA
agccaaaaccacgagggacc

SEQ ID NO: 518 - DNA, 20 bp, synthetic construct
  misc_feature 1..20: note = chemically synthesized
  source 1..20: mol_type = other DNA
cgagggacccagcaaatttt

SEQ ID NO: 519 - DNA, 20 bp, synthetic construct
  misc_feature 1..20: note = chemically synthesized
  source 1..20: mol_type = other DNA
ggacccagcaaattttaagt

SEQ ID NO: 520 - DNA, 20 bp, synthetic construct
  misc_feature 1..20: note = chemically synthesized
  source 1..20: mol_type = other DNA
aaattttaagtcagccctct

SEQ ID NO: 521 - DNA, 20 bp, synthetic construct
  misc_feature 1..20: note = chemically synthesized
  source 1..20: mol_type = other DNA
aattttaagtcagccctctt

SEQ ID NO: 522 - DNA, 20 bp, synthetic construct
  misc_feature 1..20: note = chemically synthesized
  source 1..20: mol_type = other DNA
gtcagccctcttgggttcac

SEQ ID NO: 523 - DNA, 20 bp, synthetic construct
  misc_feature 1..20: note = chemically synthesized
  source 1..20: mol_type = other DNA
cgtaattatttctacacttg

SEQ ID NO: 524 - DNA, 20 bp, synthetic construct
  misc_feature 1..20: note = chemically synthesized
  source 1..20: mol_type = other DNA
tctctttttctcttttccca

SEQ ID NO: 525 - DNA, 20 bp, synthetic construct
  misc_feature 1..20: note = chemically synthesized
  source 1..20: mol_type = other DNA
ctctttttctcttttcccac

SEQ ID NO: 526 - DNA, 20 bp, synthetic construct
  misc_feature 1..20: note = chemically synthesized
  source 1..20: mol_type = other DNA
cttttcccacaggctaaatg

SEQ ID NO: 527 - DNA, 20 bp, synthetic construct
  misc_feature 1..20: note = chemically synthesized
  source 1..20: mol_type = other DNA
tatgcaaaaaatttttttac

SEQ ID NO: 528 - DNA, 20 bp, synthetic construct
  misc_feature 1..20: note = chemically synthesized
  source 1..20: mol_type = other DNA
tttctatttgcaaaattcta

SEQ ID NO: 529 - DNA, 20 bp, synthetic construct
  misc_feature 1..20: note = chemically synthesized
  source 1..20: mol_type = other DNA
tcctatttaaataaatatct

SEQ ID NO: 530 - DNA, 20 bp, synthetic construct
  misc_feature 1..20: note = chemically synthesized
  source 1..20: mol_type = other DNA
atcttggtgacattttcact

SEQ ID NO: 531 - DNA, 20 bp, synthetic construct
  misc_feature 1..20: note = chemically synthesized
  source 1..20: mol_type = other DNA
tcttggtgacattttcactg

SEQ ID NO: 532 - DNA, 20 bp, synthetic construct
  misc_feature 1..20: note = chemically synthesized
  source 1..20: mol_type = other DNA
ggtgacattttcactgaggc

SEQ ID NO: 533 - DNA, 20 bp, synthetic construct
  misc_feature 1..20: note = chemically synthesized
  source 1..20: mol_type = other DNA
gtgacattttcactgaggca

SEQ ID NO: 534 - DNA, 20 bp, synthetic construct
  misc_feature 1..20: note = chemically synthesized
  source 1..20: mol_type = other DNA
aaggtttttctctttttatt

SEQ ID NO: 535 - DNA, 20 bp, synthetic construct
  misc_feature 1..20: note = chemically synthesized
  source 1..20: mol_type = other DNA
ttttctctttttattcagaa

SEQ ID NO: 536 - DNA, 20 bp, synthetic construct
  misc_feature 1..20: note = chemically synthesized
  source 1..20: mol_type = other DNA
ttaccacacaattacttcct

SEQ ID NO: 537 - DNA, 20 bp, synthetic construct
  misc_feature 1..20: note = chemically synthesized
  source 1..20: mol_type = other DNA
attacttcctcagtcttctt

SEQ ID NO: 538 - DNA, 20 bp, synthetic construct
  misc_feature 1..20: note = chemically synthesized
  source 1..20: mol_type = other DNA
cttcccattttattttattg

SEQ ID NO: 539 - DNA, 20 bp, synthetic construct
  misc_feature 1..20: note = chemically synthesized
  source 1..20: mol_type = other DNA
ttgaagttttttttatcttt

SEQ ID NO: 540 - DNA, 20 bp, synthetic construct
  misc_feature 1..20: note = chemically synthesized
  source 1..20: mol_type = other DNA
tttttatcttttagtaaatt

SEQ ID NO: 541 - DNA, 20 bp, synthetic construct
  misc_feature 1..20: note = chemically synthesized
  source 1..20: mol_type = other DNA
taaattaagtaacattctta

SEQ ID NO: 542 - DNA, 20 bp, synthetic construct
  misc_feature 1..20: note = chemically synthesized
  source 1..20: mol_type = other DNA
cttatagtgacaaattataa

SEQ ID NO: 543 - DNA, 20 bp, synthetic construct
  misc_feature 1..20: note = chemically synthesized
  source 1..20: mol_type = other DNA
aaattataatggacatttct

SEQ ID NO: 544 - DNA, 20 bp, synthetic construct
  misc_feature 1..20: note = chemically synthesized
  source 1..20: mol_type = other DNA
ttctaagtcctacaaatgta

SEQ ID NO: 545 - DNA, 20 bp, synthetic construct
  misc_feature 1..20: note = chemically synthesized
  source 1..20: mol_type = other DNA
aagtcctacaaatgtaaagc

SEQ ID NO: 546 - DNA, 20 bp, synthetic construct
  misc_feature 1..20: note = chemically synthesized
  source 1..20: mol_type = other DNA
tcctacaaatgtaaagctgg

SEQ ID NO: 547 - DNA, 20 bp, synthetic construct
  misc_feature 1..20: note = chemically synthesized
  source 1..20: mol_type = other DNA
acaaatgtaaagctggaagc

SEQ ID NO: 548 - DNA, 20 bp, synthetic construct
  misc_feature 1..20: note = chemically synthesized
  source 1..20: mol_type = other DNA
aagcaagttgttgaacattt

SEQ ID NO: 549 - DNA, 20 bp, synthetic construct
  misc_feature 1..20: note = chemically synthesized
  source 1..20: mol_type = other DNA
tgttgaacatttgagtaaac

SEQ ID NO: 550 - DNA, 20 bp, synthetic construct
  misc_feature 1..20: note = chemically synthesized
  source 1..20: mol_type = other DNA
cttctttttctttcaaaaaa

SEQ ID NO: 551 - DNA, 20 bp, synthetic construct
  misc_feature 1..20: note = chemically synthesized
  source 1..20: mol_type = other DNA
attatattcctactatttat

SEQ ID NO: 552 - DNA, 20 bp, synthetic construct
  misc_feature 1..20: note = chemically synthesized
  source 1..20: mol_type = other DNA
tattcctactatttatgagt

SEQ ID NO: 553 - DNA, 20 bp, synthetic construct
  misc_feature 1..20: note = chemically synthesized
  source 1..20: mol_type = other DNA
aaatgaaatgaaaaaaatta

SEQ ID NO: 554 - DNA, 20 bp, synthetic construct
  misc_feature 1..20: note = chemically synthesized
  source 1..20: mol_type = other DNA
tagtcttacctttaaattat

SEQ ID NO: 555 - DNA, 20 bp, synthetic construct
  misc_feature 1..20: note = chemically synthesized
  source 1..20: mol_type = other DNA
cctttaaattattagtaaaa

SEQ ID NO: 556 - DNA, 20 bp, synthetic construct
  misc_feature 1..20: note = chemically synthesized
  source 1..20: mol_type = other DNA
ctttaaattattagtaaaat

SEQ ID NO: 557 - DNA, 20 bp, synthetic construct
  misc_feature 1..20: note = chemically synthesized
  source 1..20: mol_type = other DNA
tacaatttcatttatcacgt

SEQ ID NO: 558 - DNA, 20 bp, synthetic construct
  misc_feature 1..20: note = chemically synthesized
  source 1..20: mol_type = other DNA
gtaagtatctgataaattct

SEQ ID NO: 559 - DNA, 20 bp, synthetic construct
  misc_feature 1..20: note = chemically synthesized
  source 1..20: mol_type = other DNA
gtatctgataaattctaagc

SEQ ID NO: 560 - DNA, 20 bp, synthetic construct
  misc_feature 1..20: note = chemically synthesized
  source 1..20: mol_type = other DNA
ctattctccttgacatttta

SEQ ID NO: 561 - DNA, 20 bp, synthetic construct
  misc_feature 1..20: note = chemically synthesized
  source 1..20: mol_type = other DNA
tctccttgacattttacagc

SEQ ID NO: 562 - DNA, 20 bp, synthetic construct
  misc_feature 1..20: note = chemically synthesized
  source 1..20: mol_type = other DNA
gacattttacagctggtttc

SEQ ID NO: 563 - DNA, 20 bp, synthetic construct
  misc_feature 1..20: note = chemically synthesized
  source 1..20: mol_type = other DNA
acattttacagctggtttct

SEQ ID NO: 564 - DNA, 20 bp, synthetic construct
  misc_feature 1..20: note = chemically synthesized
  source 1..20: mol_type = other DNA
tttctaggctttcttgaatg

SEQ ID NO: 565 - DNA, 20 bp, synthetic construct
  misc_feature 1..20: note = chemically synthesized
  source 1..20: mol_type = other DNA
aggctttcttgaatgtagct

SEQ ID NO: 566 - DNA, 20 bp, synthetic construct
  misc_feature 1..20: note = chemically synthesized
  source 1..20: mol_type = other DNA
gctttcttgaatgtagctaa

SEQ ID NO: 567 - DNA, 20 bp, synthetic construct
  misc_feature 1..20: note = chemically synthesized
  source 1..20: mol_type = other DNA
gagacacttgatataatgtt

SEQ ID NO: 568 - DNA, 20 bp, synthetic construct
  misc_feature 1..20: note = chemically synthesized
  source 1..20: mol_type = other DNA
ttgatataatgtttagacat

SEQ ID NO: 569 - DNA, 20 bp, synthetic construct
  misc_feature 1..20: note = chemically synthesized
  source 1..20: mol_type = other DNA
tgtttagacattggcaaatt

SEQ ID NO: 570 - DNA, 20 bp, synthetic construct
  misc_feature 1..20: note = chemically synthesized
  source 1..20: mol_type = other DNA
gtttagacattggcaaattt

SEQ ID NO: 571 - DNA, 20 bp, synthetic construct
  misc_feature 1..20: note = chemically synthesized
  source 1..20: mol_type = other DNA
tagacattggcaaatttagg

SEQ ID NO: 572 - DNA, 20 bp, synthetic construct
  misc_feature 1..20: note = chemically synthesized
  source 1..20: mol_type = other DNA
aaatttaggaagcatactaa

SEQ ID NO: 573 - DNA, 20 bp, synthetic construct
  misc_feature 1..20: note = chemically synthesized
  source 1..20: mol_type = other DNA
tttaggaagcatactaatgg

SEQ ID NO: 574 - DNA, 20 bp, synthetic construct
  misc_feature 1..20: note = chemically synthesized
  source 1..20: mol_type = other DNA
taggaagcatactaatggtg

SEQ ID NO: 575 - DNA, 20 bp, synthetic construct
  misc_feature 1..20: note = chemically synthesized
  source 1..20: mol_type = other DNA
atggtggagaatatttataa

SEQ ID NO: 576 - DNA, 20 bp, synthetic construct
  misc_feature 1..20: note = chemically synthesized
  source 1..20: mol_type = other DNA
gaatatttataatggatttc

SEQ ID NO: 577 - DNA, 20 bp, synthetic construct
  misc_feature 1..20: note = chemically synthesized
  source 1..20: mol_type = other DNA
aatatttataatggatttcc

SEQ ID NO: 578 - DNA, 20 bp, synthetic construct
  misc_feature 1..20: note = chemically synthesized
  source 1..20: mol_type = other DNA
tatttataatggatttccag

SEQ ID NO: 579 - DNA, 20 bp, synthetic construct
  misc_feature 1..20: note = chemically synthesized
  source 1..20: mol_type = other DNA
taatggatttccaggagaac

SEQ ID NO: 580 - DNA, 20 bp, synthetic construct
  misc_feature 1..20: note = chemically synthesized
  source 1..20: mol_type = other DNA
aatggatttccaggagaaca

SEQ ID NO: 581 - DNA, 20 bp, synthetic construct
  misc_feature 1..20: note = chemically synthesized
  source 1..20: mol_type = other DNA
ttccaggagaacaaggaata

SEQ ID NO: 582 - DNA, 20 bp, synthetic construct
  misc_feature 1..20: note = chemically synthesized
  source 1..20: mol_type = other DNA
gaacaaggaatacagatgaa

SEQ ID NO: 583 - DNA, 20 bp, synthetic construct
  misc_feature 1..20: note = chemically synthesized
  source 1..20: mol_type = other DNA
aacaaggaatacagatgaaa

SEQ ID NO: 584 - DNA, 20 bp, synthetic construct
  misc_feature 1..20: note = chemically synthesized
  source 1..20: mol_type = other DNA
aggaatacagatgaaaaggc

SEQ ID NO: 585 - DNA, 20 bp, synthetic construct
  misc_feature 1..20: note = chemically synthesized
  source 1..20: mol_type = other DNA
ggaatacagatgaaaaggca

SEQ ID NO: 586 - DNA, 20 bp, synthetic construct
  misc_feature 1..20: note = chemically synthesized
  source 1..20: mol_type = other DNA
ggaaccccatgtgctctttc

SEQ ID NO: 587 - DNA, 20 bp, synthetic construct
  misc_feature 1..20: note = chemically synthesized
  source 1..20: mol_type = other DNA
tttccagaatttcctctgtg

SEQ ID NO: 588 - DNA, 20 bp, synthetic construct
  misc_feature 1..20: note = chemically synthesized
  source 1..20: mol_type = other DNA
ttccagaatttcctctgtga

SEQ ID NO: 589 - DNA, 20 bp, synthetic construct
  misc_feature 1..20: note = chemically synthesized
  source 1..20: mol_type = other DNA
ccagaatttcctctgtgaag

SEQ ID NO: 590 - DNA, 20 bp, synthetic construct
  misc_feature 1..20: note = chemically synthesized
  source 1..20: mol_type = other DNA
tgtgaaggagcataaaacaa

SEQ ID NO: 591 - DNA, 20 bp, synthetic construct
  misc_feature 1..20: note = chemically synthesized
  source 1..20: mol_type = other DNA
catgttgaatgaaattgatt

SEQ ID NO: 592 - DNA, 20 bp, synthetic construct
  misc_feature 1..20: note = chemically synthesized
  source 1..20: mol_type = other DNA
tgttgaatgaaattgattca

SEQ ID NO: 593 - DNA, 20 bp, synthetic construct
  misc_feature 1..20: note = chemically synthesized
  source 1..20: mol_type = other DNA
ttgaatgaaattgattcaga

SEQ ID NO: 594 - DNA, 20 bp, synthetic construct
  misc_feature 1..20: note = chemically synthesized
  source 1..20: mol_type = other DNA
aaattgattcagagagcata

SEQ ID NO: 595 - DNA, 20 bp, synthetic construct
  misc_feature 1..20: note = chemically synthesized
  source 1..20: mol_type = other DNA
aattgattcagagagcatat

SEQ ID NO: 596 - DNA, 20 bp, synthetic construct
  misc_feature 1..20: note = chemically synthesized
  source 1..20: mol_type = other DNA
tgattcagagagcatatagg

SEQ ID NO: 597 - DNA, 20 bp, synthetic construct
  misc_feature 1..20: note = chemically synthesized
  source 1..20: mol_type = other DNA
taggcagctaatctaatatt

SEQ ID NO: 598 - DNA, 20 bp, synthetic construct
  misc_feature 1..20: note = chemically synthesized
  source 1..20: mol_type = other DNA
aggcagctaatctaatattc

SEQ ID NO: 599 - DNA, 20 bp, synthetic construct
  misc_feature 1..20: note = chemically synthesized
  source 1..20: mol_type = other DNA
caggttattcttttgtcact

SEQ ID NO: 600 - DNA, 20 bp, synthetic construct
  misc_feature 1..20: note = chemically synthesized
  source 1..20: mol_type = other DNA
tttgtcactaagaaacaatt

SEQ ID NO: 601 - DNA, 20 bp, synthetic construct
  misc_feature 1..20: note = chemically synthesized
  source 1..20: mol_type = other DNA
cactaagaaacaatttagac

SEQ ID NO: 602 - DNA, 20 bp, synthetic construct
  misc_feature 1..20: note = chemically synthesized
  source 1..20: mol_type = other DNA
atttagactagtataccatt

SEQ ID NO: 603 - DNA, 20 bp, synthetic construct
  misc_feature 1..20: note = chemically synthesized
  source 1..20: mol_type = other DNA
atactgattttatttaaatt

SEQ ID NO: 604 - DNA, 20 bp, synthetic construct
  misc_feature 1..20: note = chemically synthesized
  source 1..20: mol_type = other DNA
tactgattttatttaaattt

SEQ ID NO: 605 - DNA, 20 bp, synthetic construct
  misc_feature 1..20: note = chemically synthesized
  source 1..20: mol_type = other DNA
actgattttatttaaatttg

SEQ ID NO: 606 - DNA, 20 bp, synthetic construct
  misc_feature 1..20: note = chemically synthesized
  source 1..20: mol_type = other DNA
ctgattttatttaaatttgg

SEQ ID NO: 607 - DNA, 20 bp, synthetic construct
  misc_feature 1..20: note = chemically synthesized
  source 1..20: mol_type = other DNA
ttaaatttgggggctctcca

SEQ ID NO: 608 - DNA, 20 bp, synthetic construct
  misc_feature 1..20: note = chemically synthesized
  source 1..20: mol_type = other DNA
ggctctccaaagttctatct

SEQ ID NO: 609 - DNA, 20 bp, synthetic construct
  misc_feature 1..20: note = chemically synthesized
  source 1..20: mol_type = other DNA
gctctccaaagttctatctt

SEQ ID NO: 610 - DNA, 20 bp, synthetic construct
  misc_feature 1..20: note = chemically synthesized
  source 1..20: mol_type = other DNA
ctaaaactattcacatgtgc

SEQ ID NO: 611 - DNA, 20 bp, synthetic construct
  misc_feature 1..20: note = chemically synthesized
  source 1..20: mol_type = other DNA
tccatctactccaaataatt

SEQ ID NO: 612 - DNA, 20 bp, synthetic construct
  misc_feature 1..20: note = chemically synthesized
  source 1..20: mol_type = other DNA
aactcctataacaatatttc

SEQ ID NO: 613 - DNA, 20 bp, synthetic construct
  misc_feature 1..20: note = chemically synthesized
  source 1..20: mol_type = other DNA
ctataacaatatttccagcc

SEQ ID NO: 614 - DNA, 20 bp, synthetic construct
  misc_feature 1..20: note = chemically synthesized
  source 1..20: mol_type = other DNA
agattttctccctctgttcc

SEQ ID NO: 615 - DNA, 20 bp, synthetic construct
  misc_feature 1..20: note = chemically synthesized
  source 1..20: mol_type = other DNA
ctccctctgttccaagtaca

SEQ ID NO: 616 - DNA, 20 bp, synthetic construct
  misc_feature 1..20: note = chemically synthesized
  source 1..20: mol_type = other DNA
tccctctgttccaagtacac

SEQ ID NO: 617 - DNA, 20 bp, synthetic construct
  misc_feature 1..20: note = chemically synthesized
  source 1..20: mol_type = other DNA
ctgttccaagtacacaggaa

SEQ ID NO: 618 - DNA, 20 bp, synthetic construct
  misc_feature 1..20: note = chemically synthesized
  source 1..20: mol_type = other DNA
agcatgtactgcccaaattt

SEQ ID NO: 619 - DNA, 20 bp, synthetic construct
  misc_feature 1..20: note = chemically synthesized
  source 1..20: mol_type = other DNA
tcctttgaaacattgtcaat

SEQ ID NO: 620 - DNA, 20 bp, synthetic construct
  misc_feature 1..20: note = chemically synthesized
  source 1..20: mol_type = other DNA
atgagttctacacttaattc

SEQ ID NO: 621 - DNA, 20 bp, synthetic construct
  misc_feature 1..20: note = chemically synthesized
  source 1..20: mol_type = other DNA
tgagttctacacttaattca

SEQ ID NO: 622 - DNA, 20 bp, synthetic construct
  misc_feature 1..20: note = chemically synthesized
  source 1..20: mol_type = other DNA
ttcattgtacttgtaaatat

SEQ ID NO: 623 - DNA, 20 bp, synthetic construct
  misc_feature 1..20: note = chemically synthesized
  source 1..20: mol_type = other DNA
attgtacttgtaaatattgg

SEQ ID NO: 624 - DNA, 20 bp, synthetic construct
  misc_feature 1..20: note = chemically synthesized
  source 1..20: mol_type = other DNA
tatgcatcaataactatctc

SEQ ID NO: 625 - DNA, 20 bp, synthetic construct
  misc_feature 1..20: note = chemically synthesized
  source 1..20: mol_type = other DNA
taactatctctggatttttt

SEQ ID NO: 626 - DNA, 20 bp, synthetic construct
  misc_feature 1..20: note = chemically synthesized
  source 1..20: mol_type = other DNA
tatctctggatttttttagc

SEQ ID NO: 627 - DNA, 20 bp, synthetic construct
  misc_feature 1..20: note = chemically synthesized
  source 1..20: mol_type = other DNA
attttttttttctttttttt

SEQ ID NO: 628 - DNA, 20 bp, synthetic construct
  misc_feature 1..20: note = chemically synthesized
  source 1..20: mol_type = other DNA
tttttttcttttttttgaga

SEQ ID NO: 629 - DNA, 20 bp, synthetic construct
  misc_feature 1..20: note = chemically synthesized
  source 1..20: mol_type = other DNA
tttttcttttttttgagaca

SEQ ID NO: 630 - DNA, 20 bp, synthetic construct
  misc_feature 1..20: note = chemically synthesized
  source 1..20: mol_type = other DNA
cagagtctctctctgtcgcc

SEQ ID NO: 631 - DNA, 20 bp, synthetic construct
  misc_feature 1..20: note = chemically synthesized
  source 1..20: mol_type = other DNA
agagtctctctctgtcgccc

SEQ ID NO: 632 - DNA, 20 bp, synthetic construct
  misc_feature 1..20: note = chemically synthesized
  source 1..20: mol_type = other DNA
tctctctctgtcgcccaggc

SEQ ID NO: 633 - DNA, 20 bp, synthetic construct
  misc_feature 1..20: note = chemically synthesized
  source 1..20: mol_type = other DNA
tctctctgtcgcccaggctg

SEQ ID NO: 634 - DNA, 20 bp, synthetic construct
  misc_feature 1..20: note = chemically synthesized
  source 1..20: mol_type = other DNA
ctgtcgcccaggctggagtg

SEQ ID NO: 635 - DNA, 20 bp, synthetic construct
  misc_feature 1..20: note = chemically synthesized
  source 1..20: mol_type = other DNA
tcgcccaggctggagtgcag

SEQ ID NO: 636 - DNA, 20 bp, synthetic construct
  misc_feature 1..20: note = chemically synthesized
  source 1..20: mol_type = other DNA
ccctgatctctgctcactgc

SEQ ID NO: 637 - DNA, 20 bp, synthetic construct
  misc_feature 1..20: note = chemically synthesized
  source 1..20: mol_type = other DNA
ttcacgccattctcccgcct

SEQ ID NO: 638 - DNA, 20 bp, synthetic construct
  misc_feature 1..20: note = chemically synthesized
  source 1..20: mol_type = other DNA
ttctcccgcctcagcctcca

SEQ ID NO: 639 - DNA, 20 bp, synthetic construct
  misc_feature 1..20: note = chemically synthesized
  source 1..20: mol_type = other DNA
tcccgcctcagcctccatag

SEQ ID NO: 640 - DNA, 20 bp, synthetic construct
  misc_feature 1..20: note = chemically synthesized
  source 1..20: mol_type = other DNA
gcctcagcctccatagtagc

SEQ ID NO: 641 - DNA, 20 bp, synthetic construct
  misc_feature 1..20: note = chemically synthesized
  source 1..20: mol_type = other DNA
cctcagcctccatagtagct

SEQ ID NO: 642 - DNA, 20 bp, synthetic construct
  misc_feature 1..20: note = chemically synthesized
  source 1..20: mol_type = other DNA
ctccatagtagctgggacta

SEQ ID NO: 643 - DNA, 20 bp, synthetic construct
  misc_feature 1..20: note = chemically synthesized
  source 1..20: mol_type = other DNA
tccatagtagctgggactac

SEQ ID NO: 644 - DNA, 20 bp, synthetic construct
  misc_feature 1..20: note = chemically synthesized
  source 1..20: mol_type = other DNA
gactacaggcacccgccacc

SEQ ID NO: 645 - DNA, 20 bp, synthetic construct
  misc_feature 1..20: note = chemically synthesized
  source 1..20: mol_type = other DNA
caggcacccgccaccaagcc

SEQ ID NO: 646 - DNA, 20 bp, synthetic construct
  misc_feature 1..20: note = chemically synthesized
  source 1..20: mol_type = other DNA
gctaattttttgtatttttt

SEQ ID NO: 647 - DNA, 20 bp, synthetic construct
  misc_feature 1..20: note = chemically synthesized
  source 1..20: mol_type = other DNA
aattttttgtatttttttag

SEQ ID NO: 648 - DNA, 20 bp, synthetic construct
  misc_feature 1..20: note = chemically synthesized
  source 1..20: mol_type = other DNA
ttttttgtatttttttagta

SEQ ID NO: 649 - DNA, 20 bp, synthetic construct
  misc_feature 1..20: note = chemically synthesized
  source 1..20: mol_type = other DNA
ttgtatttttttagtagaga

SEQ ID NO: 650 - DNA, 20 bp, synthetic construct
  misc_feature 1..20: note = chemically synthesized
  source 1..20: mol_type = other DNA
tgtatttttttagtagagac

SEQ ID NO: 651 - DNA, 20 bp, synthetic construct
  misc_feature 1..20: note = chemically synthesized
  source 1..20: mol_type = other DNA
gtatttttttagtagagacg

SEQ ID NO: 652 - DNA, 20 bp, synthetic construct
  misc_feature 1..20: note = chemically synthesized
  source 1..20: mol_type = other DNA
gagacggggtttcactgtgt

SEQ ID NO: 653 - DNA, 20 bp, synthetic construct
  misc_feature 1..20: note = chemically synthesized
  source 1..20: mol_type = other DNA
cggggtttcactgtgttagc

SEQ ID NO: 654 - DNA, 20 bp, synthetic construct
  misc_feature 1..20: note = chemically synthesized
  source 1..20: mol_type = other DNA
ggggtttcactgtgttagcc

SEQ ID NO: 655 - DNA, 20 bp, synthetic construct
  misc_feature 1..20: note = chemically synthesized
  source 1..20: mol_type = other DNA
tttcactgtgttagccagga

SEQ ID NO: 656 - DNA, 20 bp, synthetic construct
  misc_feature 1..20: note = chemically synthesized
  source 1..20: mol_type = other DNA
ccacccgcctccgcctccca

SEQ ID NO: 657 - DNA, 20 bp, synthetic construct
  misc_feature 1..20: note = chemically synthesized
  source 1..20: mol_type = other DNA
gcctccgcctcccaaagtgc

SEQ ID NO: 658 - DNA, 20 bp, synthetic construct
  misc_feature 1..20: note = chemically synthesized
  source 1..20: mol_type = other DNA
cctccgcctcccaaagtgct

SEQ ID NO: 659 - DNA, 20 bp, synthetic construct
  misc_feature 1..20: note = chemically synthesized
  source 1..20: mol_type = other DNA
ctcccaaagtgctgggatca

SEQ ID NO: 660 - DNA, 20 bp, synthetic construct
  misc_feature 1..20: note = chemically synthesized
  source 1..20: mol_type = other DNA
tcccaaagtgctgggatcac

SEQ ID NO: 661 - DNA, 20 bp, synthetic construct
  misc_feature 1..20: note = chemically synthesized
  source 1..20: mol_type = other DNA
agtgctgggatcacaggcgt

SEQ ID NO: 662 - DNA, 20 bp, synthetic construct
  misc_feature 1..20: note = chemically synthesized
  source 1..20: mol_type = other DNA
caggcgtgagccactgcacc

SEQ ID NO: 663 - DNA, 20 bp, synthetic construct
  misc_feature 1..20: note = chemically synthesized
  source 1..20: mol_type = other DNA
tttttaaatttatttttatt

SEQ ID NO: 664 - DNA, 20 bp, synthetic construct
  misc_feature 1..20: note = chemically synthesized
  source 1..20: mol_type = other DNA
ttttaaatttatttttatta

SEQ ID NO: 665 - DNA, 20 bp, synthetic construct
  misc_feature 1..20: note = chemically synthesized
  source 1..20: mol_type = other DNA
tttactttttttttttcctt

SEQ ID NO: 666 - DNA, 20 bp, synthetic construct
  misc_feature 1..20: note = chemically synthesized
  source 1..20: mol_type = other DNA
ctttttttttttccttgaga

SEQ ID NO: 667 - DNA, 20 bp, synthetic construct
  misc_feature 1..20: note = chemically synthesized
  source 1..20: mol_type = other DNA
ttttttttttccttgagacg

SEQ ID NO: 668 - DNA, 20 bp, synthetic construct
  misc_feature 1..20: note = chemically synthesized
  source 1..20: mol_type = other DNA
cggagtctcgctccgtcatc

SEQ ID NO: 669 - DNA, 20 bp, synthetic construct
  misc_feature 1..20: note = chemically synthesized
  source 1..20: mol_type = other DNA
ggagtctcgctccgtcatcc

SEQ ID NO: 670 - DNA, 20 bp, synthetic construct
  misc_feature 1..20: note = chemically synthesized
  source 1..20: mol_type = other DNA
tctcgctccgtcatccaggc

SEQ ID NO: 671 - DNA, 20 bp, synthetic construct
  misc_feature 1..20: note = chemically synthesized
  source 1..20: mol_type = other DNA
tcgctccgtcatccaggctg

SEQ ID NO: 672 - DNA, 20 bp, synthetic construct
  misc_feature 1..20: note = chemically synthesized
  source 1..20: mol_type = other DNA
ccgtcatccaggctggagtg

SEQ ID NO: 673 - DNA, 20 bp, synthetic construct
  misc_feature 1..20: note = chemically synthesized
  source 1..20: mol_type = other DNA
tcatccaggctggagtgcag

SEQ ID NO: 674 - DNA, 20 bp, synthetic construct
  misc_feature 1..20: note = chemically synthesized
  source 1..20: mol_type = other DNA
tccaggctggagtgcagtgg

SEQ ID NO: 675 - DNA, 20 bp, synthetic construct
  misc_feature 1..20: note = chemically synthesized
  source 1..20: mol_type = other DNA
ccaggctggagtgcagtggt

SEQ ID NO: 676 - DNA, 20 bp, synthetic construct
  misc_feature 1..20: note = chemically synthesized
  source 1..20: mol_type = other DNA
ggagtgcagtggtaggatct

SEQ ID NO: 677 - DNA, 20 bp, synthetic construct
  misc_feature 1..20: note = chemically synthesized
  source 1..20: mol_type = other DNA
actgcaacctccgcccccac

SEQ ID NO: 678 - DNA, 20 bp, synthetic construct
  misc_feature 1..20: note = chemically synthesized
  source 1..20: mol_type = other DNA
ctgcaacctccgcccccacc

SEQ ID NO: 679 - DNA, 20 bp, synthetic construct
  misc_feature 1..20: note = chemically synthesized
  source 1..20: mol_type = other DNA
cctccgcccccaccaggttc

SEQ ID NO: 680 - DNA, 20 bp, synthetic construct
  misc_feature 1..20: note = chemically synthesized
  source 1..20: mol_type = other DNA
ttcaagcgattctcctgccc

SEQ ID NO: 681 - DNA, 20 bp, synthetic construct
  misc_feature 1..20: note = chemically synthesized
  source 1..20: mol_type = other DNA
ttctcctgcccaagcctccc

SEQ ID NO: 682 - DNA, 20 bp, synthetic construct
  misc_feature 1..20: note = chemically synthesized
  source 1..20: mol_type = other DNA
tcctgcccaagcctcccaag

SEQ ID NO: 683 - DNA, 20 bp, synthetic construct
  misc_feature 1..20: note = chemically synthesized
  source 1..20: mol_type = other DNA
cctgcccaagcctcccaagt

SEQ ID NO: 684 - DNA, 20 bp, synthetic construct
  misc_feature 1..20: note = chemically synthesized
  source 1..20: mol_type = other DNA
gcccaagcctcccaagtagg

SEQ ID NO: 685 - DNA, 20 bp, synthetic construct
  misc_feature 1..20: note = chemically synthesized
  source 1..20: mol_type = other DNA
cccaagcctcccaagtaggt

SEQ ID NO: 686 - DNA, 20 bp, synthetic construct
  misc_feature 1..20: note = chemically synthesized
  source 1..20: mol_type = other DNA
ctcccaagtaggtgggatta

SEQ ID NO: 687 - DNA, 20 bp, synthetic construct
  misc_feature 1..20: note = chemically synthesized
  source 1..20: mol_type = other DNA
tcccaagtaggtgggattac

SEQ ID NO: 688 - DNA, 20 bp, synthetic construct
  misc_feature 1..20: note = chemically synthesized
  source 1..20: mol_type = other DNA
caggcgcctgccaccacgcc

SEQ ID NO: 689 - DNA, 20 bp, synthetic construct
  misc_feature 1..20: note = chemically synthesized
  source 1..20: mol_type = other DNA
tggctaattttttgtatttt

SEQ ID NO: 690 - DNA, 20 bp, synthetic construct
  misc_feature 1..20: note = chemically synthesized
  source 1..20: mol_type = other DNA
ctaattttttgtatttttag

SEQ ID NO: 691 - DNA, 20 bp, synthetic construct
  misc_feature 1..20: note = chemically synthesized
  source 1..20: mol_type = other DNA
aattttttgtatttttagta

SEQ ID NO: 692 - DNA, 20 bp, synthetic construct
  misc_feature 1..20: note = chemically synthesized
  source 1..20: mol_type = other DNA
ttttgtatttttagtagaga

SEQ ID NO: 693 - DNA, 20 bp, synthetic construct
  misc_feature 1..20: note = chemically synthesized
  source 1..20: mol_type = other DNA
tttgtatttttagtagagac

SEQ ID NO: 694 - DNA, 20 bp, synthetic construct
  misc_feature 1..20: note = chemically synthesized
  source 1..20: mol_type = other DNA
ttgtatttttagtagagaca

SEQ ID NO: 695 - DNA, 20 bp, synthetic construct
  misc_feature 1..20: note = chemically synthesized
  source 1..20: mol_type = other DNA
gagacagggtttcaccatgt

SEQ ID NO: 696 - DNA, 20 bp, synthetic construct
  misc_feature 1..20: note = chemically synthesized
  source 1..20: mol_type = other DNA
cagggtttcaccatgttggt

SEQ ID NO: 697 - DNA, 20 bp, synthetic construct
  misc_feature 1..20: note = chemically synthesized
  source 1..20: mol_type = other DNA
agggtttcaccatgttggtc

SEQ ID NO: 698 - DNA, 20 bp, synthetic construct
  misc_feature 1..20: note = chemically synthesized
  source 1..20: mol_type = other DNA
tttcaccatgttggtcaggc

SEQ ID NO: 699 - DNA, 20 bp, synthetic construct
  misc_feature 1..20: note = chemically synthesized
  source 1..20: mol_type = other DNA
catgttggtcaggctggtct

SEQ ID NO: 700 - DNA, 20 bp, synthetic construct
  misc_feature 1..20: note = chemically synthesized
  source 1..20: mol_type = other DNA
acctcatgatccacctgcct

SEQ ID NO: 701 - DNA, 20 bp, synthetic construct
  misc_feature 1..20: note = chemically synthesized
  source 1..20: mol_type = other DNA
ccacctgccttggcctccca

SEQ ID NO: 702 - DNA, 20 bp, synthetic construct
  misc_feature 1..20: note = chemically synthesized
  source 1..20: mol_type = other DNA
ccttggcctcccaaagtgct

SEQ ID NO: 703 - DNA, 20 bp, synthetic construct
  misc_feature 1..20: note = chemically synthesized
  source 1..20: mol_type = other DNA
ctcccaaagtgctgagatta

SEQ ID NO: 704 - DNA, 20 bp, synthetic construct
  misc_feature 1..20: note = chemically synthesized
  source 1..20: mol_type = other DNA
tcccaaagtgctgagattac

SEQ ID NO: 705 - DNA, 20 bp, synthetic construct
  misc_feature 1..20: note = chemically synthesized
  source 1..20: mol_type = other DNA
agtgctgagattacaggcat

SEQ ID NO: 706 - DNA, 20 bp, synthetic construct
  misc_feature 1..20: note = chemically synthesized
  source 1..20: mol_type = other DNA
caggcattggccaccgcacc

SEQ ID NO: 707 - DNA, 20 bp, synthetic construct
  misc_feature 1..20: note = chemically synthesized
  source 1..20: mol_type = other DNA
agcccatctttaccattttt

SEQ ID NO: 708 - DNA, 20 bp, synthetic construct
  misc_feature 1..20: note = chemically synthesized
  source 1..20: mol_type = other DNA
ctttaccatttttgagtgta

SEQ ID NO: 709 - DNA, 20 bp, synthetic construct
  misc_feature 1..20: note = chemically synthesized
  source 1..20: mol_type = other DNA
ccatttttgagtgtacggtt

SEQ ID NO: 710 - DNA, 20 bp, synthetic construct
  misc_feature 1..20: note = chemically synthesized
  source 1..20: mol_type = other DNA
tttttgagtgtacggttcag

SEQ ID NO: 711 - DNA, 20 bp, synthetic construct
  misc_feature 1..20: note = chemically synthesized
  source 1..20: mol_type = other DNA
tacatatgcacacatacaca

SEQ ID NO: 712 - DNA, 20 bp, synthetic construct
  misc_feature 1..20: note = chemically synthesized
  source 1..20: mol_type = other DNA
catatgcacacatacacaca

SEQ ID NO: 713 - DNA, 20 bp, synthetic construct
  misc_feature 1..20: note = chemically synthesized
  source 1..20: mol_type = other DNA
atatgcacacatacacacag

SEQ ID NO: 714 - DNA, 20 bp, synthetic construct
  misc_feature 1..20: note = chemically synthesized
  source 1..20: mol_type = other DNA
tatgcacacatacacacaga

SEQ ID NO: 715 - DNA, 20 bp, synthetic construct
  misc_feature 1..20: note = chemically synthesized
  source 1..20: mol_type = other DNA
tgcacacatacacacagagg

SEQ ID NO: 716 - DNA, 20 bp, synthetic construct
  misc_feature 1..20: note = chemically synthesized
  source 1..20: mol_type = other DNA
cacacatacacacagaggga

SEQ ID NO: 717 - DNA, 20 bp, synthetic construct
  misc_feature 1..20: note = chemically synthesized
  source 1..20: mol_type = other DNA
cacatacacacagagggaga

SEQ ID NO: 718 - DNA, 20 bp, synthetic construct
  misc_feature 1..20: note = chemically synthesized
  source 1..20: mol_type = other DNA
catacacacagagggagaga

SEQ ID NO: 719 - DNA, 20 bp, synthetic construct
  misc_feature 1..20: note = chemically synthesized
  source 1..20: mol_type = other DNA
tacacacagagggagagaga

SEQ ID NO: 720 - DNA, 20 bp, synthetic construct
  misc_feature 1..20: note = chemically synthesized
  source 1..20: mol_type = other DNA
cacacagagggagagagaga

SEQ ID NO: 721 - DNA, 20 bp, synthetic construct
  misc_feature 1..20: note = chemically synthesized
  source 1..20: mol_type = other DNA
acagagggagagagagagag

SEQ ID NO: 722 - DNA, 20 bp, synthetic construct
  misc_feature 1..20: note = chemically synthesized
  source 1..20: mol_type = other DNA
cagagggagagagagagagt

SEQ ID NO: 723 - DNA, 20 bp, synthetic construct
  misc_feature 1..20: note = chemically synthesized
  source 1..20: mol_type = other DNA
gagggagagagagagagtgg

SEQ ID NO: 724 - DNA, 20 bp, synthetic construct
  misc_feature 1..20: note = chemically synthesized
  source 1..20: mol_type = other DNA
agggagagagagagagtggg

SEQ ID NO: 725 - DNA, 20 bp, synthetic construct
  misc_feature 1..20: note = chemically synthesized
  source 1..20: mol_type = other DNA
gggagagagagagagtggga

SEQ ID NO: 726 - DNA, 20 bp, synthetic construct
  misc_feature 1..20: note = chemically synthesized
  source 1..20: mol_type = other DNA
cctttcttccctcccgccgc

SEQ ID NO: 727 - DNA, 20 bp, synthetic construct
  misc_feature 1..20: note = chemically synthesized
  source 1..20: mol_type = other DNA
aatctactctctgtcttcat

SEQ ID NO: 728 - DNA, 20 bp, synthetic construct
  misc_feature 1..20: note = chemically synthesized
  source 1..20: mol_type = other DNA
cacgtttttaacttccacac

SEQ ID NO: 729 - DNA, 20 bp, synthetic construct
  misc_feature 1..20: note = chemically synthesized
  source 1..20: mol_type = other DNA
tttttaacttccacacgagt

SEQ ID NO: 730 - DNA, 20 bp, synthetic construct
  misc_feature 1..20: note = chemically synthesized
  source 1..20: mol_type = other DNA
gatatttttctttctgtgct

SEQ ID NO: 731 - DNA, 20 bp, synthetic construct
  misc_feature 1..20: note = chemically synthesized
  source 1..20: mol_type = other DNA
tcacttaacgtaattgcttt

SEQ ID NO: 732 - DNA, 20 bp, synthetic construct
  misc_feature 1..20: note = chemically synthesized
  source 1..20: mol_type = other DNA
taatatttcattctttttta

SEQ ID NO: 733 - DNA, 20 bp, synthetic construct
  misc_feature 1..20: note = chemically synthesized
  source 1..20: mol_type = other DNA
ttatctgttgacgaatacat

SEQ ID NO: 734 - DNA, 20 bp, synthetic construct
  misc_feature 1..20: note = chemically synthesized
  source 1..20: mol_type = other DNA
catcagttgatttcaaatct

SEQ ID NO: 735 - DNA, 20 bp, synthetic construct
  misc_feature 1..20: note = chemically synthesized
  source 1..20: mol_type = other DNA
caaatcttggcgtttgtgaa

SEQ ID NO: 736 - DNA, 20 bp, synthetic construct
  misc_feature 1..20: note = chemically synthesized
  source 1..20: mol_type = other DNA
ttgtgaatagtgctataata

SEQ ID NO: 737 - DNA, 20 bp, synthetic construct
  misc_feature 1..20: note = chemically synthesized
  source 1..20: mol_type = other DNA
gaatagtgctataataaaga

SEQ ID NO: 738 - DNA, 20 bp, synthetic construct
  misc_feature 1..20: note = chemically synthesized
  source 1..20: mol_type = other DNA
aatagtgctataataaagat

SEQ ID NO: 739 - DNA, 20 bp, synthetic construct
  misc_feature 1..20: note = chemically synthesized
  source 1..20: mol_type = other DNA
tagtgctataataaagatgg

SEQ ID NO: 740 - DNA, 20 bp, synthetic construct
  misc_feature 1..20: note = chemically synthesized
  source 1..20: mol_type = other DNA
acatactaatttattctttt

SEQ ID NO: 741 - DNA, 20 bp, synthetic construct
  misc_feature 1..20: note = chemically synthesized
  source 1..20: mol_type = other DNA
catactaatttattctttta

SEQ ID NO: 742 - DNA, 20 bp, synthetic construct
  misc_feature 1..20: note = chemically synthesized
  source 1..20: mol_type = other DNA
atactaatttattcttttaa

SEQ ID NO: 743 - DNA, 20 bp, synthetic construct
  misc_feature 1..20: note = chemically synthesized
  source 1..20: mol_type = other DNA
ttcttttaagggtatatacc

SEQ ID NO: 744 - DNA, 20 bp, synthetic construct
  misc_feature 1..20: note = chemically synthesized
  source 1..20: mol_type = other DNA
tcttttaagggtatatacct

SEQ ID NO: 745 - DNA, 20 bp, synthetic construct
  misc_feature 1..20: note = chemically synthesized
  source 1..20: mol_type = other DNA
ttttaagggtatatacctag

SEQ ID NO: 746 - DNA, 20 bp, synthetic construct
  misc_feature 1..20: note = chemically synthesized
  source 1..20: mol_type = other DNA
atacctaggagtgatattgc

SEQ ID NO: 747 - DNA, 20 bp, synthetic construct
  misc_feature 1..20: note = chemically synthesized
  source 1..20: mol_type = other DNA
agtgatattgctggatcata

SEQ ID NO: 748 - DNA, 20 bp, synthetic construct
  misc_feature 1..20: note = chemically synthesized
  source 1..20: mol_type = other DNA
gatattgctggatcatatgg

SEQ ID NO: 749 - DNA, 20 bp, synthetic construct
  misc_feature 1..20: note = chemically synthesized
  source 1..20: mol_type = other DNA
ccaatttgtactcccaccaa

SEQ ID NO: 750 - DNA, 20 bp, synthetic construct
  misc_feature 1..20: note = chemically synthesized
  source 1..20: mol_type = other DNA
tgtactcccaccaacagtgt

SEQ ID NO: 751 - DNA, 20 bp, synthetic construct
  misc_feature 1..20: note = chemically synthesized
  source 1..20: mol_type = other DNA
tactcccaccaacagtgtaa

SEQ ID NO: 752 - DNA, 20 bp, synthetic construct
  misc_feature 1..20: note = chemically synthesized
  source 1..20: mol_type = other DNA
actcccaccaacagtgtaag

SEQ ID NO: 753 - DNA, 20 bp, synthetic construct
  misc_feature 1..20: note = chemically synthesized
  source 1..20: mol_type = other DNA
ctcccaccaacagtgtaaga

SEQ ID NO: 754 - DNA, 20 bp, synthetic construct
  misc_feature 1..20: note = chemically synthesized
  source 1..20: mol_type = other DNA
ccctttgtccacatccacac

SEQ ID NO: 755 - DNA, 20 bp, synthetic construct
  misc_feature 1..20: note = chemically synthesized
  source 1..20: mol_type = other DNA
atttccttttgttttgttat

SEQ ID NO: 756 - DNA, 20 bp, synthetic construct
  misc_feature 1..20: note = chemically synthesized
  source 1..20: mol_type = other DNA
tgttataagctattttaact

SEQ ID NO: 757 - DNA, 20 bp, synthetic construct
  misc_feature 1..20: note = chemically synthesized
  source 1..20: mol_type = other DNA
gttataagctattttaacta

SEQ ID NO: 758 - DNA, 20 bp, synthetic construct
  misc_feature 1..20: note = chemically synthesized
  source 1..20: mol_type = other DNA
taagctattttaactaaggt

SEQ ID NO: 759 - DNA, 20 bp, synthetic construct
  misc_feature 1..20: note = chemically synthesized
  source 1..20: mol_type = other DNA
ggtgagatgatatcacattg

SEQ ID NO: 760 - DNA, 20 bp, synthetic construct
  misc_feature 1..20: note = chemically synthesized
  source 1..20: mol_type = other DNA
cattgtggttttgatttatc

SEQ ID NO: 761 - DNA, 20 bp, synthetic construct
  misc_feature 1..20: note = chemically synthesized
  source 1..20: mol_type = other DNA
gttttgatttatctggtgat

SEQ ID NO: 762 - DNA, 20 bp, synthetic construct
  misc_feature 1..20: note = chemically synthesized
  source 1..20: mol_type = other DNA
aacattttttcaaatacctc

SEQ ID NO: 763 - DNA, 20 bp, synthetic construct
  misc_feature 1..20: note = chemically synthesized
  source 1..20: mol_type = other DNA
acattttttcaaatacctct

SEQ ID NO: 764 - DNA, 20 bp, synthetic construct
  misc_feature 1..20: note = chemically synthesized
  source 1..20: mol_type = other DNA
atacctctgggccatttgta

SEQ ID NO: 765 - DNA, 20 bp, synthetic construct
  misc_feature 1..20: note = chemically synthesized
  source 1..20: mol_type = other DNA
ccatttgtatggcttctttt

SEQ ID NO: 766 - DNA, 20 bp, synthetic construct
  misc_feature 1..20: note = chemically synthesized
  source 1..20: mol_type = other DNA
tcttttgagaaatatctatt

SEQ ID NO: 767 - DNA, 20 bp, synthetic construct
  misc_feature 1..20: note = chemically synthesized
  source 1..20: mol_type = other DNA
cttttgagaaatatctattc

SEQ ID NO: 768 - DNA, 20 bp, synthetic construct
  misc_feature 1..20: note = chemically synthesized
  source 1..20: mol_type = other DNA
aaatatctattcaggtcttt

SEQ ID NO: 769 - DNA, 20 bp, synthetic construct
  misc_feature 1..20: note = chemically synthesized
  source 1..20: mol_type = other DNA
ttatttatttattttctgtt

SEQ ID NO: 770 - DNA, 20 bp, synthetic construct
  misc_feature 1..20: note = chemically synthesized
  source 1..20: mol_type = other DNA
tattttctgttgagttgctt

SEQ ID NO: 771 - DNA, 20 bp, synthetic construct
  misc_feature 1..20: note = chemically synthesized
  source 1..20: mol_type = other DNA
cttgagtttcttgcatattc

SEQ ID NO: 772 - DNA, 20 bp, synthetic construct
  misc_feature 1..20: note = chemically synthesized
  source 1..20: mol_type = other DNA
tcaattccttgtaaaatata

SEQ ID NO: 773 - DNA, 20 bp, synthetic construct
  misc_feature 1..20: note = chemically synthesized
  source 1..20: mol_type = other DNA
aaatattttctcccattctt

SEQ ID NO: 774 - DNA, 20 bp, synthetic construct
  misc_feature 1..20: note = chemically synthesized
  source 1..20: mol_type = other DNA
aatattttctcccattcttt

SEQ ID NO: 775 - DNA, 20 bp, synthetic construct
  misc_feature 1..20: note = chemically synthesized
  source 1..20: mol_type = other DNA
ttattattttctttgctgtg

SEQ ID NO: 776 - DNA, 20 bp, synthetic construct
  misc_feature 1..20: note = chemically synthesized
  source 1..20: mol_type = other DNA
attattttctttgctgtgca

SEQ ID NO: 777 - DNA, 20 bp, synthetic construct
  misc_feature 1..20: note = chemically synthesized
  source 1..20: mol_type = other DNA
ccaattgtctatttttgttt

SEQ ID NO: 778 - DNA, 20 bp, synthetic construct
  misc_feature 1..20: note = chemically synthesized
  source 1..20: mol_type = other DNA
tttggttatttgtgcttttg

SEQ ID NO: 779 - DNA, 20 bp, synthetic construct
  misc_feature 1..20: note = chemically synthesized
  source 1..20: mol_type = other DNA
tttgtgcttttgaagtctca

SEQ ID NO: 780 - DNA, 20 bp, synthetic construct
  misc_feature 1..20: note = chemically synthesized
  source 1..20: mol_type = other DNA
tgcttttgaagtctcataga

SEQ ID NO: 781 - DNA, 20 bp, synthetic construct
  misc_feature 1..20: note = chemically synthesized
  source 1..20: mol_type = other DNA
gcccaaatcaatgaatgccc

SEQ ID NO: 782 - DNA, 20 bp, synthetic construct
  misc_feature 1..20: note = chemically synthesized
  source 1..20: mol_type = other DNA
ccaaatcaatgaatgccctg

SEQ ID NO: 783 - DNA, 20 bp, synthetic construct
  misc_feature 1..20: note = chemically synthesized
  source 1..20: mol_type = other DNA
caaatcaatgaatgccctgg

SEQ ID NO: 784 - DNA, 20 bp, synthetic construct
  misc_feature 1..20: note = chemically synthesized
  source 1..20: mol_type = other DNA
aaatcaatgaatgccctgga

SEQ ID NO: 785 - DNA, 20 bp, synthetic construct
  misc_feature 1..20: note = chemically synthesized
  source 1..20: mol_type = other DNA
gtttccccactgttttcttc

SEQ ID NO: 786 - DNA, 20 bp, synthetic construct
  misc_feature 1..20: note = chemically synthesized
  source 1..20: mol_type = other DNA
tccccactgttttcttccag

SEQ ID NO: 787 - DNA, 20 bp, synthetic construct
  misc_feature 1..20: note = chemically synthesized
  source 1..20: mol_type = other DNA
ttccagtagtttcataattt

SEQ ID NO: 788 - DNA, 20 bp, synthetic construct
  misc_feature 1..20: note = chemically synthesized
  source 1..20: mol_type = other DNA
tccagtagtttcataatttc

SEQ ID NO: 789 - DNA, 20 bp, synthetic construct
  misc_feature 1..20: note = chemically synthesized
  source 1..20: mol_type = other DNA
agtttcataatttcaggtat

SEQ ID NO: 790 - DNA, 20 bp, synthetic construct
  misc_feature 1..20: note = chemically synthesized
  source 1..20: mol_type = other DNA
taatttcaggtattggattc

SEQ ID NO: 791 - DNA, 20 bp, synthetic construct
  misc_feature 1..20: note = chemically synthesized
  source 1..20: mol_type = other DNA
cttgatttgatttttgtata

SEQ ID NO: 792 - DNA, 20 bp, synthetic construct
  misc_feature 1..20: note = chemically synthesized
  source 1..20: mol_type = other DNA
atttgatttttgtatatagt

SEQ ID NO: 793 - DNA, 20 bp, synthetic construct
  misc_feature 1..20: note = chemically synthesized
  source 1..20: mol_type = other DNA
ttgatttttgtatatagtga

SEQ ID NO: 794 - DNA, 20 bp, synthetic construct
  misc_feature 1..20: note = chemically synthesized
  source 1..20: mol_type = other DNA
tttttgtatatagtgagaga

SEQ ID NO: 795 - DNA, 20 bp, synthetic construct
  misc_feature 1..20: note = chemically synthesized
  source 1..20: mol_type = other DNA
ttttgtatatagtgagagat

SEQ ID NO: 796 - DNA, 20 bp, synthetic construct
  misc_feature 1..20: note = chemically synthesized
  source 1..20: mol_type = other DNA
tttgtatatagtgagagata

SEQ ID NO: 797 - DNA, 20 bp, synthetic construct
  misc_feature 1..20: note = chemically synthesized
  source 1..20: mol_type = other DNA
ttgtatatagtgagagatag

SEQ ID NO: 798 - DNA, 20 bp, synthetic construct
  misc_feature 1..20: note = chemically synthesized
  source 1..20: mol_type = other DNA
cgattttactcttttgcaaa

SEQ ID NO: 799 - DNA, 20 bp, synthetic construct
  misc_feature 1..20: note = chemically synthesized
  source 1..20: mol_type = other DNA
ctcttttgcaaatggatatc

SEQ ID NO: 800 - DNA, 20 bp, synthetic construct
  misc_feature 1..20: note = chemically synthesized
  source 1..20: mol_type = other DNA
aaatggatatccagttttcc

SEQ ID NO: 801 - DNA, 20 bp, synthetic construct
  misc_feature 1..20: note = chemically synthesized
  source 1..20: mol_type = other DNA
tcctagcactgtttcttgaa

SEQ ID NO: 802 - DNA, 20 bp, synthetic construct
  misc_feature 1..20: note = chemically synthesized
  source 1..20: mol_type = other DNA
cctttttttttttttttttt

SEQ ID NO: 803 - DNA, 20 bp, synthetic construct
  misc_feature 1..20: note = chemically synthesized
  source 1..20: mol_type = other DNA
ttttttttttttttttgaga

SEQ ID NO: 804 - DNA, 20 bp, synthetic construct
  misc_feature 1..20: note = chemically synthesized
  source 1..20: mol_type = other DNA
ttttttttttttttgagatg

SEQ ID NO: 805 - DNA, 20 bp, synthetic construct
  misc_feature 1..20: note = chemically synthesized
  source 1..20: mol_type = other DNA
gatggagtctcactgttgcc

SEQ ID NO: 806 - DNA, 20 bp, synthetic construct
  misc_feature 1..20: note = chemically synthesized
  source 1..20: mol_type = other DNA
atggagtctcactgttgccc

SEQ ID NO: 807 - DNA, 20 bp, synthetic construct
  misc_feature 1..20: note = chemically synthesized
  source 1..20: mol_type = other DNA
agtctcactgttgcccaggc

SEQ ID NO: 808 - DNA, 20 bp, synthetic construct
  misc_feature 1..20: note = chemically synthesized
  source 1..20: mol_type = other DNA
tctcactgttgcccaggctg

SEQ ID NO: 809 - DNA, 20 bp, synthetic construct
  misc_feature 1..20: note = chemically synthesized
  source 1..20: mol_type = other DNA
ctgttgcccaggctggagtg

SEQ ID NO: 810 - DNA, 20 bp, synthetic construct
  misc_feature 1..20: note = chemically synthesized
  source 1..20: mol_type = other DNA
ttgcccaggctggagtgcag

SEQ ID NO: 811 - DNA, 20 bp, synthetic construct
  misc_feature 1..20: note = chemically synthesized
  source 1..20: mol_type = other DNA
cccaggctggagtgcagtgg

SEQ ID NO: 812 - DNA, 20 bp, synthetic construct
  misc_feature 1..20: note = chemically synthesized
  source 1..20: mol_type = other DNA
gtgcagtggcagcacaatct

SEQ ID NO: 813 - DNA, 20 bp, synthetic construct
  misc_feature 1..20: note = chemically synthesized
  source 1..20: mol_type = other DNA
tcactgcaacttctgcctcc

SEQ ID NO: 814 - DNA, 20 bp, synthetic construct
  misc_feature 1..20: note = chemically synthesized
  source 1..20: mol_type = other DNA
cactgcaacttctgcctccc

SEQ ID NO: 815 - DNA, 20 bp, synthetic construct
  misc_feature 1..20: note = chemically synthesized
  source 1..20: mol_type = other DNA
aacttctgcctcccaggttc

SEQ ID NO: 816 - DNA, 20 bp, synthetic construct
  misc_feature 1..20: note = chemically synthesized
  source 1..20: mol_type = other DNA
ttcaagcgattctcctgcct

SEQ ID NO: 817 - DNA, 20 bp, synthetic construct
  misc_feature 1..20: note = chemically synthesized
  source 1..20: mol_type = other DNA
ttctcctgcctcagcctcct

SEQ ID NO: 818 - DNA, 20 bp, synthetic construct
  misc_feature 1..20: note = chemically synthesized
  source 1..20: mol_type = other DNA
gcctcagcctcctgagtatc

SEQ ID NO: 819 - DNA, 20 bp, synthetic construct
  misc_feature 1..20: note = chemically synthesized
  source 1..20: mol_type = other DNA
cctcagcctcctgagtatct

SEQ ID NO: 820 - DNA, 20 bp, synthetic construct
  misc_feature 1..20: note = chemically synthesized
  source 1..20: mol_type = other DNA
ctcctgagtatctgggatta

SEQ ID NO: 821 - DNA, 20 bp, synthetic construct
  misc_feature 1..20: note = chemically synthesized
  source 1..20: mol_type = other DNA
tcctgagtatctgggattac

SEQ ID NO: 822 - DNA, 20 bp, synthetic construct
  misc_feature 1..20: note = chemically synthesized
  source 1..20: mol_type = other DNA
ctgagtatctgggattacag

SEQ ID NO: 823 - DNA, 20 bp, synthetic construct
  misc_feature 1..20: note = chemically synthesized
  source 1..20: mol_type = other DNA
caggagcgccccaccatgcc

SEQ ID NO: 824 - DNA, 20 bp, synthetic construct
  misc_feature 1..20: note = chemically synthesized
  source 1..20: mol_type = other DNA
ctggctaatttttgtatttt

SEQ ID NO: 825 - DNA, 20 bp, synthetic construct
  misc_feature 1..20: note = chemically synthesized
  source 1..20: mol_type = other DNA
gctaatttttgtatttttag

SEQ ID NO: 826 - DNA, 20 bp, synthetic construct
  misc_feature 1..20: note = chemically synthesized
  source 1..20: mol_type = other DNA
taatttttgtatttttagta

SEQ ID NO: 827 - DNA, 20 bp, synthetic construct
  misc_feature 1..20: note = chemically synthesized
  source 1..20: mol_type = other DNA
ttttgtatttttagtagaga

SEQ ID NO: 828 - DNA, 20 bp, synthetic construct
  misc_feature 1..20: note = chemically synthesized
  source 1..20: mol_type = other DNA
ttgtatttttagtagagacg

SEQ ID NO: 829 - DNA, 20 bp, synthetic construct
  misc_feature 1..20: note = chemically synthesized
  source 1..20: mol_type = other DNA
gagacggagtgtcaccacgt

SEQ ID NO: 830 - DNA, 20 bp, synthetic construct
  misc_feature 1..20: note = chemically synthesized
  source 1..20: mol_type = other DNA
cggagtgtcaccacgttggt

SEQ ID NO: 831 - DNA, 20 bp, synthetic construct
  misc_feature 1..20: note = chemically synthesized
  source 1..20: mol_type = other DNA
ggagtgtcaccacgttggtc

SEQ ID NO: 832 - DNA, 20 bp, synthetic construct
  misc_feature 1..20: note = chemically synthesized
  source 1..20: mol_type = other DNA
tgtcaccacgttggtcaggc

SEQ ID NO: 833 - DNA, 20 bp, synthetic construct
  misc_feature 1..20: note = chemically synthesized
  source 1..20: mol_type = other DNA
acctcgtgatccccccacct

SEQ ID NO: 834 - DNA, 20 bp, synthetic construct
  misc_feature 1..20: note = chemically synthesized
  source 1..20: mol_type = other DNA
ccccccacctcagcctcaca

SEQ ID NO: 835 - DNA, 20 bp, synthetic construct
  misc_feature 1..20: note = chemically synthesized
  source 1..20: mol_type = other DNA
acctcagcctcacaaagtgc

SEQ ID NO: 836 - DNA, 20 bp, synthetic construct
  misc_feature 1..20: note = chemically synthesized
  source 1..20: mol_type = other DNA
cctcagcctcacaaagtgct

SEQ ID NO: 837 - DNA, 20 bp, synthetic construct
  misc_feature 1..20: note = chemically synthesized
  source 1..20: mol_type = other DNA
ctcacaaagtgctgggatta

SEQ ID NO: 838 - DNA, 20 bp, synthetic construct
  misc_feature 1..20: note = chemically synthesized
  source 1..20: mol_type = other DNA
tcacaaagtgctgggattac

SEQ ID NO: 839 - DNA, 20 bp, synthetic construct
  misc_feature 1..20: note = chemically synthesized
  source 1..20: mol_type = other DNA
agtgctgggattacaggtgt

SEQ ID NO: 840 - DNA, 20 bp, synthetic construct
  misc_feature 1..20: note = chemically synthesized
  source 1..20: mol_type = other DNA
caggtgtgagccactgcacc

SEQ ID NO: 841 - DNA, 20 bp, synthetic construct
  misc_feature 1..20: note = chemically synthesized
  source 1..20: mol_type = other DNA
tgttcttgatgcctttgtta

SEQ ID NO: 842 - DNA, 20 bp, synthetic construct
  misc_feature 1..20: note = chemically synthesized
  source 1..20: mol_type = other DNA
tgcctttgttaaagatgact

SEQ ID NO: 843 - DNA, 20 bp, synthetic construct
  misc_feature 1..20: note = chemically synthesized
  source 1..20: mol_type = other DNA
ttaaagatgacttggttgtt

SEQ ID NO: 844 - DNA, 20 bp, synthetic construct
  misc_feature 1..20: note = chemically synthesized
  source 1..20: mol_type = other DNA
tgacttggttgttaagtgcc

SEQ ID NO: 845 - DNA, 20 bp, synthetic construct
  misc_feature 1..20: note = chemically synthesized
  source 1..20: mol_type = other DNA
taagtgcctggatttgcatc

SEQ ID NO: 846 - DNA, 20 bp, synthetic construct
  misc_feature 1..20: note = chemically synthesized
  source 1..20: mol_type = other DNA
aagtgcctggatttgcatct

SEQ ID NO: 847 - DNA, 20 bp, synthetic construct
  misc_feature 1..20: note = chemically synthesized
  source 1..20: mol_type = other DNA
ggttctctatgctgttccat

SEQ ID NO: 848 - DNA, 20 bp, synthetic construct
  misc_feature 1..20: note = chemically synthesized
  source 1..20: mol_type = other DNA
gttctctatgctgttccatt

SEQ ID NO: 849 - DNA, 20 bp, synthetic construct
  misc_feature 1..20: note = chemically synthesized
  source 1..20: mol_type = other DNA
gctgtatgtctgtctttatg

SEQ ID NO: 850 - DNA, 20 bp, synthetic construct
  misc_feature 1..20: note = chemically synthesized
  source 1..20: mol_type = other DNA
ttatgcagtactgtgctgtt

SEQ ID NO: 851 - DNA, 20 bp, synthetic construct
  misc_feature 1..20: note = chemically synthesized
  source 1..20: mol_type = other DNA
actgtgctgtttggctactg

SEQ ID NO: 852 - DNA, 20 bp, synthetic construct
  misc_feature 1..20: note = chemically synthesized
  source 1..20: mol_type = other DNA
gtttggctactgtagctttg

SEQ ID NO: 853 - DNA, 20 bp, synthetic construct
  misc_feature 1..20: note = chemically synthesized
  source 1..20: mol_type = other DNA
tggctactgtagctttgtag

SEQ ID NO: 854 - DNA, 20 bp, synthetic construct
  misc_feature 1..20: note = chemically synthesized
  source 1..20: mol_type = other DNA
tagctttgtagtagattttg

SEQ ID NO: 855 - DNA, 20 bp, synthetic construct
  misc_feature 1..20: note = chemically synthesized
  source 1..20: mol_type = other DNA
tagtagattttgaagtcata

SEQ ID NO: 856 - DNA, 20 bp, synthetic construct
  misc_feature 1..20: note = chemically synthesized
  source 1..20: mol_type = other DNA
tttgaagtcatatagtgtga

SEQ ID NO: 857 - DNA, 20 bp, synthetic construct
  misc_feature 1..20: note = chemically synthesized
  source 1..20: mol_type = other DNA
gtcatatagtgtgatagctt

SEQ ID NO: 858 - DNA, 20 bp, synthetic construct
  misc_feature 1..20: note = chemically synthesized
  source 1..20: mol_type = other DNA
ttggttttgttctttttgct

SEQ ID NO: 859 - DNA, 20 bp, synthetic construct
  misc_feature 1..20: note = chemically synthesized
  source 1..20: mol_type = other DNA
tggttttgttctttttgctc

SEQ ID NO: 860 - DNA, 20 bp, synthetic construct
  misc_feature 1..20: note = chemically synthesized
  source 1..20: mol_type = other DNA
ctttttgctcaggattgctt

SEQ ID NO: 861 - DNA, 20 bp, synthetic construct
  misc_feature 1..20: note = chemically synthesized
  source 1..20: mol_type = other DNA
ctcaggattgctttagctat

SEQ ID NO: 862 - DNA, 20 bp, synthetic construct
  misc_feature 1..20: note = chemically synthesized
  source 1..20: mol_type = other DNA
tcaggattgctttagctatt

SEQ ID NO: 863 - DNA, 20 bp, synthetic construct
  misc_feature 1..20: note = chemically synthesized
  source 1..20: mol_type = other DNA
caggattgctttagctattg

SEQ ID NO: 864 - DNA, 20 bp, synthetic construct
  misc_feature 1..20: note = chemically synthesized
  source 1..20: mol_type = other DNA
tagctattggggatcttttg

SEQ ID NO: 865 - DNA, 20 bp, synthetic construct
  misc_feature 1..20: note = chemically synthesized
  source 1..20: mol_type = other DNA
ttgtggttccatataaatat

SEQ ID NO: 866 - DNA, 20 bp, synthetic construct
  misc_feature 1..20: note = chemically synthesized
  source 1..20: mol_type = other DNA
tgtggttccatataaatatt

SEQ ID NO: 867 - DNA, 20 bp, synthetic construct
  misc_feature 1..20: note = chemically synthesized
  source 1..20: mol_type = other DNA
tctatttctgtgaatgccat

SEQ ID NO: 868 - DNA, 20 bp, synthetic construct
  misc_feature 1..20: note = chemically synthesized
  source 1..20: mol_type = other DNA
gaatgccattggtattttga

SEQ ID NO: 869 - DNA, 20 bp, synthetic construct
  misc_feature 1..20: note = chemically synthesized
  source 1..20: mol_type = other DNA
actgaatctgtacattgctt

SEQ ID NO: 870 - DNA, 20 bp, synthetic construct
  misc_feature 1..20: note = chemically synthesized
  source 1..20: mol_type = other DNA
ctgaatctgtacattgcttt

SEQ ID NO: 871 - DNA, 20 bp, synthetic construct
  misc_feature 1..20: note = chemically synthesized
  source 1..20: mol_type = other DNA
aatctgtacattgctttggg

SEQ ID NO: 872 - DNA, 20 bp, synthetic construct
  misc_feature 1..20: note = chemically synthesized
  source 1..20: mol_type = other DNA
cattttaatattaattcttc

SEQ ID NO: 873 - DNA, 20 bp, synthetic construct
  misc_feature 1..20: note = chemically synthesized
  source 1..20: mol_type = other DNA
tattaattcttctagttcat

SEQ ID NO: 874 - DNA, 20 bp, synthetic construct
  misc_feature 1..20: note = chemically synthesized
  source 1..20: mol_type = other DNA
attcttctagttcatgagca

SEQ ID NO: 875 - DNA, 20 bp, synthetic construct
  misc_feature 1..20: note = chemically synthesized
  source 1..20: mol_type = other DNA
ccctcttctatttctttcac

SEQ ID NO: 876 - DNA, 20 bp, synthetic construct
  misc_feature 1..20: note = chemically synthesized
  source 1..20: mol_type = other DNA
ctcttctatttctttcacca

SEQ ID NO: 877 - DNA, 20 bp, synthetic construct
  misc_feature 1..20: note = chemically synthesized
  source 1..20: mol_type = other DNA
gagttttataatttttctta

SEQ ID NO: 878 - DNA, 20 bp, synthetic construct
  misc_feature 1..20: note = chemically synthesized
  source 1..20: mol_type = other DNA
gttttataatttttcttata

SEQ ID NO: 879 - DNA, 20 bp, synthetic construct
  misc_feature 1..20: note = chemically synthesized
  source 1..20: mol_type = other DNA
tatagagatcttttacttct

SEQ ID NO: 880 - DNA, 20 bp, synthetic construct
  misc_feature 1..20: note = chemically synthesized
  source 1..20: mol_type = other DNA
atagagatcttttacttctt

SEQ ID NO: 881 - DNA, 20 bp, synthetic construct
  misc_feature 1..20: note = chemically synthesized
  source 1..20: mol_type = other DNA
agatcttttacttcttgggt

SEQ ID NO: 882 - DNA, 20 bp, synthetic construct
  misc_feature 1..20: note = chemically synthesized
  source 1..20: mol_type = other DNA
tcttgggttagattgactcc

SEQ ID NO: 883 - DNA, 20 bp, synthetic construct
  misc_feature 1..20: note = chemically synthesized
  source 1..20: mol_type = other DNA
cttgggttagattgactcct

SEQ ID NO: 884 - DNA, 20 bp, synthetic construct
  misc_feature 1..20: note = chemically synthesized
  source 1..20: mol_type = other DNA
tttttattgctattgtaaat

SEQ ID NO: 885 - DNA, 20 bp, synthetic construct
  misc_feature 1..20: note = chemically synthesized
  source 1..20: mol_type = other DNA
tgttttattgattttttttg

SEQ ID NO: 886 - DNA, 20 bp, synthetic construct
  misc_feature 1..20: note = chemically synthesized
  source 1..20: mol_type = other DNA
atttttttaaatcgttttaa

SEQ ID NO: 887 - DNA, 20 bp, synthetic construct
  misc_feature 1..20: note = chemically synthesized
  source 1..20: mol_type = other DNA
taaatcgttttaatagtatt

SEQ ID NO: 888 - DNA, 20 bp, synthetic construct
  misc_feature 1..20: note = chemically synthesized
  source 1..20: mol_type = other DNA
cgttttaatagtatttagtg

SEQ ID NO: 889 - DNA, 20 bp, synthetic construct
  misc_feature 1..20: note = chemically synthesized
  source 1..20: mol_type = other DNA
atagtatttagtgaagtttt

SEQ ID NO: 890 - DNA, 20 bp, synthetic construct
  misc_feature 1..20: note = chemically synthesized
  source 1..20: mol_type = other DNA
tagtatttagtgaagttttt

SEQ ID NO: 891 - DNA, 20 bp, synthetic construct
  misc_feature 1..20: note = chemically synthesized
  source 1..20: mol_type = other DNA
gaagtttttaggttttttct

SEQ ID NO: 892 - DNA, 20 bp, synthetic construct
  misc_feature 1..20: note = chemically synthesized
  source 1..20: mol_type = other DNA
tttaggttttttctaagtat

SEQ ID NO: 893 - DNA, 20 bp, synthetic construct
  misc_feature 1..20: note = chemically synthesized
  source 1..20: mol_type = other DNA
agatcatgtcatctacaaac

SEQ ID NO: 894 - DNA, 20 bp, synthetic construct
  misc_feature 1..20: note = chemically synthesized
  source 1..20: mol_type = other DNA
gatcatgtcatctacaaact

SEQ ID NO: 895 - DNA, 20 bp, synthetic construct
  misc_feature 1..20: note = chemically synthesized
  source 1..20: mol_type = other DNA
taacttcttcctttccaatt

SEQ ID NO: 896 - DNA, 20 bp, synthetic construct
  misc_feature 1..20: note = chemically synthesized
  source 1..20: mol_type = other DNA
cttcctgaatttctctttcc

SEQ ID NO: 897 - DNA, 20 bp, synthetic construct
  misc_feature 1..20: note = chemically synthesized
  source 1..20: mol_type = other DNA
tccaatattatgttaaataa

SEQ ID NO: 898 - DNA, 20 bp, synthetic construct
  misc_feature 1..20: note = chemically synthesized
  source 1..20: mol_type = other DNA
atgttaaataatggcaatga

SEQ ID NO: 899 - DNA, 20 bp, synthetic construct
  misc_feature 1..20: note = chemically synthesized
  source 1..20: mol_type = other DNA
taaataatggcaatgaaagt

SEQ ID NO: 900 - DNA, 20 bp, synthetic construct
  misc_feature 1..20: note = chemically synthesized
  source 1..20: mol_type = other DNA
tgagcattcttgccttattt

SEQ ID NO: 901 - DNA, 20 bp, synthetic construct
  misc_feature 1..20: note = chemically synthesized
  source 1..20: mol_type = other DNA
tcttgccttatttcagtcct

SEQ ID NO: 902 - DNA, 20 bp, synthetic construct
  misc_feature 1..20: note = chemically synthesized
  source 1..20: mol_type = other DNA
ttgccttatttcagtcctta

SEQ ID NO: 903 - DNA, 20 bp, synthetic construct
  misc_feature 1..20: note = chemically synthesized
  source 1..20: mol_type = other DNA
tgccttatttcagtccttag

SEQ ID NO: 904 - DNA, 20 bp, synthetic construct
  misc_feature 1..20: note = chemically synthesized
  source 1..20: mol_type = other DNA
ttatttcagtccttagagga

SEQ ID NO: 905 - DNA, 20 bp, synthetic construct
  misc_feature 1..20: note = chemically synthesized
  source 1..20: mol_type = other DNA
tatttcagtccttagaggaa

SEQ ID NO: 906 - DNA, 20 bp, synthetic construct
  misc_feature 1..20: note = chemically synthesized
  source 1..20: mol_type = other DNA
gccttcaatgtttctctgtt

SEQ ID NO: 907 - DNA, 20 bp, synthetic construct
  misc_feature 1..20: note = chemically synthesized
  source 1..20: mol_type = other DNA
ttctctgttcagcataatgt

SEQ ID NO: 908 - DNA, 20 bp, synthetic construct
  misc_feature 1..20: note = chemically synthesized
  source 1..20: mol_type = other DNA
ttcagcataatgttagcact

SEQ ID NO: 909 - DNA, 20 bp, synthetic construct
  misc_feature 1..20: note = chemically synthesized
  source 1..20: mol_type = other DNA
agcacttggtttgtcctata

SEQ ID NO: 910 - DNA, 20 bp, synthetic construct
  misc_feature 1..20: note = chemically synthesized
  source 1..20: mol_type = other DNA
tatatggtttttattatttt

SEQ ID NO: 911 - DNA, 20 bp, synthetic construct
  misc_feature 1..20: note = chemically synthesized
  source 1..20: mol_type = other DNA
atatggtttttattattttg

SEQ ID NO: 912 - DNA, 20 bp, synthetic construct
  misc_feature 1..20: note = chemically synthesized
  source 1..20: mol_type = other DNA
gttcctactgtacctccttt

SEQ ID NO: 913 - DNA, 20 bp, synthetic construct
  misc_feature 1..20: note = chemically synthesized
  source 1..20: mol_type = other DNA
ttcctactgtacctcctttg

SEQ ID NO: 914 - DNA, 20 bp, synthetic construct
  misc_feature 1..20: note = chemically synthesized
  source 1..20: mol_type = other DNA
gtgcatttgttgttgtgtcc

SEQ ID NO: 915 - DNA, 20 bp, synthetic construct
  misc_feature 1..20: note = chemically synthesized
  source 1..20: mol_type = other DNA
tttgttgttgtgtcctggtc

SEQ ID NO: 916 - DNA, 20 bp, synthetic construct
  misc_feature 1..20: note = chemically synthesized
  source 1..20: mol_type = other DNA
tgttgtgtcctggtctggtt

SEQ ID NO: 917 - DNA, 20 bp, synthetic construct
  misc_feature 1..20: note = chemically synthesized
  source 1..20: mol_type = other DNA
gttgtgtcctggtctggttt

SEQ ID NO: 918 - DNA, 20 bp, synthetic construct
  misc_feature 1..20: note = chemically synthesized
  source 1..20: mol_type = other DNA
ctggtctggtttgggtatat

SEQ ID NO: 919 - DNA, 20 bp, synthetic construct
  misc_feature 1..20: note = chemically synthesized
  source 1..20: mol_type = other DNA
ggtctggtttgggtatatta

SEQ ID NO: 920 - DNA, 20 bp, synthetic construct
  misc_feature 1..20: note = chemically synthesized
  source 1..20: mol_type = other DNA
ttagagtaatgcttgcctca

SEQ ID NO: 921 - DNA, 20 bp, synthetic construct
  misc_feature 1..20: note = chemically synthesized
  source 1..20: mol_type = other DNA
taatgcttgcctcatagaat

SEQ ID NO: 922 - DNA, 20 bp, synthetic construct
  misc_feature 1..20: note = chemically synthesized
  source 1..20: mol_type = other DNA
cttgcctcatagaataagtt

SEQ ID NO: 923 - DNA, 20 bp, synthetic construct
  misc_feature 1..20: note = chemically synthesized
  source 1..20: mol_type = other DNA
gcctcatagaataagtttag

SEQ ID NO: 924 - DNA, 20 bp, synthetic construct
  misc_feature 1..20: note = chemically synthesized
  source 1..20: mol_type = other DNA
tcatagaataagtttagaag

SEQ ID NO: 925 - DNA, 20 bp, synthetic construct
  misc_feature 1..20: note = chemically synthesized
  source 1..20: mol_type = other DNA
catagaataagtttagaagt

SEQ ID NO: 926 - DNA, 20 bp, synthetic construct
  misc_feature 1..20: note = chemically synthesized
  source 1..20: mol_type = other DNA
tagaagtaggcccttctttt

SEQ ID NO: 927 - DNA, 20 bp, synthetic construct
  misc_feature 1..20: note = chemically synthesized
  source 1..20: mol_type = other DNA
ttttatttgtttgtttgttt

SEQ ID NO: 928 - DNA, 20 bp, synthetic construct
  misc_feature 1..20: note = chemically synthesized
  source 1..20: mol_type = other DNA
tttatttgtttgtttgtttg

SEQ ID NO: 929 - DNA, 20 bp, synthetic construct
  misc_feature 1..20: note = chemically synthesized
  source 1..20: mol_type = other DNA
tttgtttgtttgaggaattt

SEQ ID NO: 930 - DNA, 20 bp, synthetic construct
  misc_feature 1..20: note = chemically synthesized
  source 1..20: mol_type = other DNA
ttgaggaatttgagtacgat

SEQ ID NO: 931 - DNA, 20 bp, synthetic construct
  misc_feature 1..20: note = chemically synthesized
  source 1..20: mol_type = other DNA
aatttgagtacgattagtat

SEQ ID NO: 932 - DNA, 20 bp, synthetic construct
  misc_feature 1..20: note = chemically synthesized
  source 1..20: mol_type = other DNA
ttagttctacttgaaatgtt

SEQ ID NO: 933 - DNA, 20 bp, synthetic construct
  misc_feature 1..20: note = chemically synthesized
  source 1..20: mol_type = other DNA
gttctacttgaaatgtttgg

SEQ ID NO: 934 - DNA, 20 bp, synthetic construct
  misc_feature 1..20: note = chemically synthesized
  source 1..20: mol_type = other DNA
gaaatgtttggtagcccatc

SEQ ID NO: 935 - DNA, 20 bp, synthetic construct
  misc_feature 1..20: note = chemically synthesized
  source 1..20: mol_type = other DNA
tttggtagcccatcgagtcc

SEQ ID NO: 936 - DNA, 20 bp, synthetic construct
  misc_feature 1..20: note = chemically synthesized
  source 1..20: mol_type = other DNA
ttggtagcccatcgagtcct

SEQ ID NO: 937 - DNA, 20 bp, synthetic construct
  misc_feature 1..20: note = chemically synthesized
  source 1..20: mol_type = other DNA
agtcctgggcttttctttaa

SEQ ID NO: 938 - DNA, 20 bp, synthetic construct
  misc_feature 1..20: note = chemically synthesized
  source 1..20: mol_type = other DNA
gtcctgggcttttctttaat

SEQ ID NO: 939 - DNA, 20 bp, synthetic construct
  misc_feature 1..20: note = chemically synthesized
  source 1..20: mol_type = other DNA
ttattcattattgttctatt

SEQ ID NO: 940 - DNA, 20 bp, synthetic construct
  misc_feature 1..20: note = chemically synthesized
  source 1..20: mol_type = other DNA
tattcattattgttctattg

SEQ ID NO: 941 - DNA, 20 bp, synthetic construct
  misc_feature 1..20: note = chemically synthesized
  source 1..20: mol_type = other DNA
ttttctgtttctacatgctt

SEQ ID NO: 942 - DNA, 20 bp, synthetic construct
  misc_feature 1..20: note = chemically synthesized
  source 1..20: mol_type = other DNA
tctacatgcttcagtcttgc

SEQ ID NO: 943 - DNA, 20 bp, synthetic construct
  misc_feature 1..20: note = chemically synthesized
  source 1..20: mol_type = other DNA
ctacatgcttcagtcttgct

SEQ ID NO: 944 - DNA, 20 bp, synthetic construct
  misc_feature 1..20: note = chemically synthesized
  source 1..20: mol_type = other DNA
cttgctaggctgtatgtgtc

SEQ ID NO: 945 - DNA, 20 bp, synthetic construct
  misc_feature 1..20: note = chemically synthesized
  source 1..20: mol_type = other DNA
ttgctaggctgtatgtgtcc

SEQ ID NO: 946 - DNA, 20 bp, synthetic construct
  misc_feature 1..20: note = chemically synthesized
  source 1..20: mol_type = other DNA
aggaatttatccatttattc

SEQ ID NO: 947 - DNA, 20 bp, synthetic construct
  misc_feature 1..20: note = chemically synthesized
  source 1..20: mol_type = other DNA
ttctagattttccaatttgt

SEQ ID NO: 948 - DNA, 20 bp, synthetic construct
  misc_feature 1..20: note = chemically synthesized
  source 1..20: mol_type = other DNA
ttttccaatttgttggaata

SEQ ID NO: 949 - DNA, 20 bp, synthetic construct
  misc_feature 1..20: note = chemically synthesized
  source 1..20: mol_type = other DNA
tggaatacagttgttcataa

SEQ ID NO: 950 - DNA, 20 bp, synthetic construct
  misc_feature 1..20: note = chemically synthesized
  source 1..20: mol_type = other DNA
tgttcataatagtatctaat

SEQ ID NO: 951 - DNA, 20 bp, synthetic construct
  misc_feature 1..20: note = chemically synthesized
  source 1..20: mol_type = other DNA
taatgagtctttgtgttgct

SEQ ID NO: 952 - DNA, 20 bp, synthetic construct
  misc_feature 1..20: note = chemically synthesized
  source 1..20: mol_type = other DNA
aatgagtctttgtgttgctg

SEQ ID NO: 953 - DNA, 20 bp, synthetic construct
  misc_feature 1..20: note = chemically synthesized
  source 1..20: mol_type = other DNA
tatttgactcttttttctta

SEQ ID NO: 954 - DNA, 20 bp, synthetic construct
  misc_feature 1..20: note = chemically synthesized
  source 1..20: mol_type = other DNA
ttgattttgtttacctttcc

SEQ ID NO: 955 - DNA, 20 bp, synthetic construct
  misc_feature 1..20: note = chemically synthesized
  source 1..20: mol_type = other DNA
ttttgtttacctttccaaga

SEQ ID NO: 956 - DNA, 20 bp, synthetic construct
  misc_feature 1..20: note = chemically synthesized
  source 1..20: mol_type = other DNA
taatgattttctgtattttt

SEQ ID NO: 957 - DNA, 20 bp, synthetic construct
  misc_feature 1..20: note = chemically synthesized
  source 1..20: mol_type = other DNA
ccttctattaattttgcatt

SEQ ID NO: 958 - DNA, 20 bp, synthetic construct
  misc_feature 1..20: note = chemically synthesized
  source 1..20: mol_type = other DNA
tcttgctttcctatttcctt

SEQ ID NO: 959 - DNA, 20 bp, synthetic construct
  misc_feature 1..20: note = chemically synthesized
  source 1..20: mol_type = other DNA
cttgctttcctatttccttg

SEQ ID NO: 960 - DNA, 20 bp, synthetic construct
  misc_feature 1..20: note = chemically synthesized
  source 1..20: mol_type = other DNA
tttccttgaggtacattgtt

SEQ ID NO: 961 - DNA, 20 bp, synthetic construct
  misc_feature 1..20: note = chemically synthesized
  source 1..20: mol_type = other DNA
aggtacattgtttggttgct

SEQ ID NO: 962 - DNA, 20 bp, synthetic construct
  misc_feature 1..20: note = chemically synthesized
  source 1..20: mol_type = other DNA
attgtttggttgcttagttg

SEQ ID NO: 963 - DNA, 20 bp, synthetic construct
  misc_feature 1..20: note = chemically synthesized
  source 1..20: mol_type = other DNA
ttgaagcctttctacttttt

SEQ ID NO: 964 - DNA, 20 bp, synthetic construct
  misc_feature 1..20: note = chemically synthesized
  source 1..20: mol_type = other DNA
cctttctacttttttggata

SEQ ID NO: 965 - DNA, 20 bp, synthetic construct
  misc_feature 1..20: note = chemically synthesized
  source 1..20: mol_type = other DNA
ctttctacttttttggatat

SEQ ID NO: 966 - DNA, 20 bp, synthetic construct
  misc_feature 1..20: note = chemically synthesized
  source 1..20: mol_type = other DNA
attgctatgaacttccctct

SEQ ID NO: 967 - DNA, 20 bp, synthetic construct
  misc_feature 1..20: note = chemically synthesized
  source 1..20: mol_type = other DNA
actgcttttgccatatcctg

SEQ ID NO: 968 - DNA, 20 bp, synthetic construct
  misc_feature 1..20: note = chemically synthesized
  source 1..20: mol_type = other DNA
ctgcttttgccatatcctgt

SEQ ID NO: 969 - DNA, 20 bp, synthetic construct
  misc_feature 1..20: note = chemically synthesized
  source 1..20: mol_type = other DNA
ttgccatatcctgtaggttt

SEQ ID NO: 970 - DNA, 20 bp, synthetic construct
  misc_feature 1..20: note = chemically synthesized
  source 1..20: mol_type = other DNA
tttccattttcacttgtttc

SEQ ID NO: 971 - DNA, 20 bp, synthetic construct
  misc_feature 1..20: note = chemically synthesized
  source 1..20: mol_type = other DNA
ccattttcacttgtttcaag

SEQ ID NO: 972 - DNA, 20 bp, synthetic construct
  misc_feature 1..20: note = chemically synthesized
  source 1..20: mol_type = other DNA
aatttccttcttaatttctt

SEQ ID NO: 973 - DNA, 20 bp, synthetic construct
  misc_feature 1..20: note = chemically synthesized
  source 1..20: mol_type = other DNA
taatttctttagtgactcat

SEQ ID NO: 974 - DNA, 20 bp, synthetic construct
  misc_feature 1..20: note = chemically synthesized
  source 1..20: mol_type = other DNA
ttagtgactcattggttatt

SEQ ID NO: 975 - DNA, 20 bp, synthetic construct
  misc_feature 1..20: note = chemically synthesized
  source 1..20: mol_type = other DNA
agtttcatgcgcatccctgt

SEQ ID NO: 976 - DNA, 20 bp, synthetic construct
  misc_feature 1..20: note = chemically synthesized
  source 1..20: mol_type = other DNA
gtttcatgcgcatccctgtg

SEQ ID NO: 977 - DNA, 20 bp, synthetic construct
  misc_feature 1..20: note = chemically synthesized
  source 1..20: mol_type = other DNA
ttcatgcgcatccctgtgag

SEQ ID NO: 978 - DNA, 20 bp, synthetic construct
  misc_feature 1..20: note = chemically synthesized
  source 1..20: mol_type = other DNA
cctgtgaggagactaccaaa

SEQ ID NO: 979 - DNA, 20 bp, synthetic construct
  misc_feature 1..20: note = chemically synthesized
  source 1..20: mol_type = other DNA
ctgtgaggagactaccaaac

SEQ ID NO: 980 - DNA, 20 bp, synthetic construct
  misc_feature 1..20: note = chemically synthesized
  source 1..20: mol_type = other DNA
ctaccaaacaggctttgtgt

SEQ ID NO: 981 - DNA, 20 bp, synthetic construct
  misc_feature 1..20: note = chemically synthesized
  source 1..20: mol_type = other DNA
caggctttgtgtgagcaata

SEQ ID NO: 982 - DNA, 20 bp, synthetic construct
  misc_feature 1..20: note = chemically synthesized
  source 1..20: mol_type = other DNA
caataaagctttttatcacc

SEQ ID NO: 983 - DNA, 20 bp, synthetic construct
  misc_feature 1..20: note = chemically synthesized
  source 1..20: mol_type = other DNA
aataaagctttttatcacct

SEQ ID NO: 984 - DNA, 20 bp, synthetic construct
  misc_feature 1..20: note = chemically synthesized
  source 1..20: mol_type = other DNA
agctttttatcacctgggtg

SEQ ID NO: 985 - DNA, 20 bp, synthetic construct
  misc_feature 1..20: note = chemically synthesized
  source 1..20: mol_type = other DNA
gctttttatcacctgggtgc

SEQ ID NO: 986 - DNA, 20 bp, synthetic construct
  misc_feature 1..20: note = chemically synthesized
  source 1..20: mol_type = other DNA
ttttatcacctgggtgcagg

SEQ ID NO: 987 - DNA, 20 bp, synthetic construct
  misc_feature 1..20: note = chemically synthesized
  source 1..20: mol_type = other DNA
tttatcacctgggtgcaggc

SEQ ID NO: 988 - DNA, 20 bp, synthetic construct
  misc_feature 1..20: note = chemically synthesized
  source 1..20: mol_type = other DNA
cacctgggtgcaggcgggct

SEQ ID NO: 989 - DNA, 20 bp, synthetic construct
  misc_feature 1..20: note = chemically synthesized
  source 1..20: mol_type = other DNA
gcaggcgggctgagtccgaa

SEQ ID NO: 990 - DNA, 20 bp, synthetic construct
  misc_feature 1..20: note = chemically synthesized
  source 1..20: mol_type = other DNA
aggcgggctgagtccgaaaa

SEQ ID NO: 991 - DNA, 20 bp, synthetic construct
  misc_feature 1..20: note = chemically synthesized
  source 1..20: mol_type = other DNA
gcgggctgagtccgaaaaga

SEQ ID NO: 992 - DNA, 20 bp, synthetic construct
  misc_feature 1..20: note = chemically synthesized
  source 1..20: mol_type = other DNA
gctgagtccgaaaagagagt

SEQ ID NO: 993 - DNA, 20 bp, synthetic construct
  misc_feature 1..20: note = chemically synthesized
  source 1..20: mol_type = other DNA
gtccgaaaagagagtcagca

SEQ ID NO: 994 - DNA, 20 bp, synthetic construct
  misc_feature 1..20: note = chemically synthesized
  source 1..20: mol_type = other DNA
tccgaaaagagagtcagcaa

SEQ ID NO: 995 - DNA, 20 bp, synthetic construct
  misc_feature 1..20: note = chemically synthesized
  source 1..20: mol_type = other DNA
ccgaaaagagagtcagcaaa

SEQ ID NO: 996 - DNA, 20 bp, synthetic construct
  misc_feature 1..20: note = chemically synthesized
  source 1..20: mol_type = other DNA
gaaaagagagtcagcaaagg

SEQ ID NO: 997 - DNA, 20 bp, synthetic construct
  misc_feature 1..20: note = chemically synthesized
  source 1..20: mol_type = other DNA
agagagtcagcaaagggaga

SEQ ID NO: 998 - DNA, 20 bp, synthetic construct
  misc_feature 1..20: note = chemically synthesized
  source 1..20: mol_type = other DNA
gagagtcagcaaagggagat

SEQ ID NO: 999 - DNA, 20 bp, synthetic construct
  misc_feature 1..20: note = chemically synthesized
  source 1..20: mol_type = other DNA
gagtcagcaaagggagatag

SEQ ID NO: 1000 - DNA, 20 bp, synthetic construct
  misc_feature 1..20: note = chemically synthesized
  source 1..20: mol_type = other DNA
tcagcaaagggagataggag

SEQ ID NO: 1001 - DNA, 20 bp, synthetic construct
  misc_feature 1..20: note = chemically synthesized
  source 1..20: mol_type = other DNA
cagcaaagggagataggagt

SEQ ID NO: 1002 - DNA, 20 bp, synthetic construct
  misc_feature 1..20: note = chemically synthesized
  source 1..20: mol_type = other DNA
agcaaagggagataggagtg

SEQ ID NO: 1003 - DNA, 20 bp, synthetic construct
  misc_feature 1..20: note = chemically synthesized
  source 1..20: mol_type = other DNA
taggagtggggctgttttat

SEQ ID NO: 1004 - DNA, 20 bp, synthetic construct
  misc_feature 1..20: note = chemically synthesized
  source 1..20: mol_type = other DNA
tggggctgttttataagatt

SEQ ID NO: 1005 - DNA, 20 bp, synthetic construct
  misc_feature 1..20: note = chemically synthesized
  source 1..20: mol_type = other DNA
ggggctgttttataagattt

SEQ ID NO: 1006 - DNA, 20 bp, synthetic construct
  misc_feature 1..20: note = chemically synthesized
  source 1..20: mol_type = other DNA
gctgttttataagatttggg

SEQ ID NO: 1007 - DNA, 20 bp, synthetic construct
  misc_feature 1..20: note = chemically synthesized
  source 1..20: mol_type = other DNA
ctgttttataagatttgggt

SEQ ID NO: 1008 - DNA, 20 bp, synthetic construct
  misc_feature 1..20: note = chemically synthesized
  source 1..20: mol_type = other DNA
ttataagatttgggtaggta

SEQ ID NO: 1009 - DNA, 20 bp, synthetic construct
  misc_feature 1..20: note = chemically synthesized
  source 1..20: mol_type = other DNA
tataagatttgggtaggtaa

SEQ ID NO: 1010 - DNA, 20 bp, synthetic construct
  misc_feature 1..20: note = chemically synthesized
  source 1..20: mol_type = other DNA
gggtaggtaaaggaaaatta

SEQ ID NO: 1011 - DNA, 20 bp, synthetic construct
  misc_feature 1..20: note = chemically synthesized
  source 1..20: mol_type = other DNA
gtaaaggaaaattacagtca

SEQ ID NO: 1012 - DNA, 20 bp, synthetic construct
  misc_feature 1..20: note = chemically synthesized
  source 1..20: mol_type = other DNA
taaaggaaaattacagtcaa

SEQ ID NO: 1013 - DNA, 20 bp, synthetic construct
  misc_feature 1..20: note = chemically synthesized
  source 1..20: mol_type = other DNA
aaaggaaaattacagtcaaa

SEQ ID NO: 1014 - DNA, 20 bp, synthetic construct
  misc_feature 1..20: note = chemically synthesized
  source 1..20: mol_type = other DNA
aaggaaaattacagtcaaag

SEQ ID NO: 1015 - DNA, 20 bp, synthetic construct
  misc_feature 1..20: note = chemically synthesized
  source 1..20: mol_type = other DNA
aggaaaattacagtcaaagg

SEQ ID NO: 1016 - DNA, 20 bp, synthetic construct
  misc_feature 1..20: note = chemically synthesized
  source 1..20: mol_type = other DNA
ggaaaattacagtcaaaggg

SEQ ID NO: 1017 - DNA, 20 bp, synthetic construct
  misc_feature 1..20: note = chemically synthesized
  source 1..20: mol_type = other DNA
gtcaaaggggggttgttctc

SEQ ID NO: 1018 - DNA, 20 bp, synthetic construct
  misc_feature 1..20: note = chemically synthesized
  source 1..20: mol_type = other DNA
aaaggggggttgttctctgg

SEQ ID NO: 1019 - DNA, 20 bp, synthetic construct
  misc_feature 1..20: note = chemically synthesized
  source 1..20: mol_type = other DNA
aaggggggttgttctctggc

SEQ ID NO: 1020 - DNA, 20 bp, synthetic construct
  misc_feature 1..20: note = chemically synthesized
  source 1..20: mol_type = other DNA
gggggttgttctctggcggg

SEQ ID NO: 1021 - DNA, 20 bp, synthetic construct
  misc_feature 1..20: note = chemically synthesized
  source 1..20: mol_type = other DNA
ggggttgttctctggcgggc

SEQ ID NO: 1022 - DNA, 20 bp, synthetic construct
  misc_feature 1..20: note = chemically synthesized
  source 1..20: mol_type = other DNA
ggttgttctctggcgggcag

SEQ ID NO: 1023 - DNA, 20 bp, synthetic construct
  misc_feature 1..20: note = chemically synthesized
  source 1..20: mol_type = other DNA
tgttctctggcgggcaggag

SEQ ID NO: 1024 - DNA, 20 bp, synthetic construct
  misc_feature 1..20: note = chemically synthesized
  source 1..20: mol_type = other DNA
gttctctggcgggcaggagt

SEQ ID NO: 1025 - DNA, 20 bp, synthetic construct
  misc_feature 1..20: note = chemically synthesized
  source 1..20: mol_type = other DNA
ttctctggcgggcaggagtg

SEQ ID NO: 1026 - DNA, 20 bp, synthetic construct
  misc_feature 1..20: note = chemically synthesized
  source 1..20: mol_type = other DNA
tctctggcgggcaggagtgg

SEQ ID NO: 1027 - DNA, 20 bp, synthetic construct
  misc_feature 1..20: note = chemically synthesized
  source 1..20: mol_type = other DNA
ctctggcgggcaggagtggg

SEQ ID NO: 1028 - DNA, 20 bp, synthetic construct
  misc_feature 1..20: note = chemically synthesized
  source 1..20: mol_type = other DNA
gggcaggagtggggggtcac

SEQ ID NO: 1029 - DNA, 20 bp, synthetic construct
  misc_feature 1..20: note = chemically synthesized
  source 1..20: mol_type = other DNA
ggcaggagtggggggtcaca

SEQ ID NO: 1030 - DNA, 20 bp, synthetic construct
  misc_feature 1..20: note = chemically synthesized
  source 1..20: mol_type = other DNA
gtggggggtcacaaggtgct

SEQ ID NO: 1031 - DNA, 20 bp, synthetic construct
  misc_feature 1..20: note = chemically synthesized
  source 1..20: mol_type = other DNA
gggggtcacaaggtgctcag

SEQ ID NO: 1032 - DNA, 20 bp, synthetic construct
  misc_feature 1..20: note = chemically synthesized
  source 1..20: mol_type = other DNA
ggggtcacaaggtgctcagt

SEQ ID NO: 1033 - DNA, 20 bp, synthetic construct
  misc_feature 1..20: note = chemically synthesized
  source 1..20: mol_type = other DNA
gggtcacaaggtgctcagta

SEQ ID NO: 1034 - DNA, 20 bp, synthetic construct
  misc_feature 1..20: note = chemically synthesized
  source 1..20: mol_type = other DNA
ggtcacaaggtgctcagtag

SEQ ID NO: 1035 - DNA, 20 bp, synthetic construct
  misc_feature 1..20: note = chemically synthesized
  source 1..20: mol_type = other DNA
tcacaaggtgctcagtaggg

SEQ ID NO: 1036 - DNA, 20 bp, synthetic construct
  misc_feature 1..20: note = chemically synthesized
  source 1..20: mol_type = other DNA
tgctcagtaggggagctttt

SEQ ID NO: 1037 - DNA, 20 bp, synthetic construct
  misc_feature 1..20: note = chemically synthesized
  source 1..20: mol_type = other DNA
cagtaggggagcttttgagc

SEQ ID NO: 1038 - DNA, 20 bp, synthetic construct
  misc_feature 1..20: note = chemically synthesized
  source 1..20: mol_type = other DNA
agtaggggagcttttgagcc

SEQ ID NO: 1039 - DNA, 20 bp, synthetic construct
  misc_feature 1..20: note = chemically synthesized
  source 1..20: mol_type = other DNA
gggagcttttgagccaggat

SEQ ID NO: 1040 - DNA, 20 bp, synthetic construct
  misc_feature 1..20: note = chemically synthesized
  source 1..20: mol_type = other DNA
gcttttgagccaggatgagc

SEQ ID NO: 1041 - DNA, 20 bp, synthetic construct
  misc_feature 1..20: note = chemically synthesized
  source 1..20: mol_type = other DNA
cttttgagccaggatgagcc

SEQ ID NO: 1042 - DNA, 20 bp, synthetic construct
  misc_feature 1..20: note = chemically synthesized
  source 1..20: mol_type = other DNA
tttgagccaggatgagccag

SEQ ID NO: 1043 - DNA, 20 bp, synthetic construct
  misc_feature 1..20: note = chemically synthesized
  source 1..20: mol_type = other DNA
gagccaggatgagccaggag

SEQ ID NO: 1044 - DNA, 20 bp, synthetic construct
  misc_feature 1..20: note = chemically synthesized
  source 1..20: mol_type = other DNA
agccaggatgagccaggaga

SEQ ID NO: 1045 - DNA, 20 bp, synthetic construct
  misc_feature 1..20: note = chemically synthesized
  source 1..20: mol_type = other DNA
gccaggagaaggactttcac

SEQ ID NO: 1046 - DNA, 20 bp, synthetic construct
  misc_feature 1..20: note = chemically synthesized
  source 1..20: mol_type = other DNA
ctttcacaagacaatgtcat

SEQ ID NO: 1047 - DNA, 20 bp, synthetic construct
  misc_feature 1..20: note = chemically synthesized
  source 1..20: mol_type = other DNA
acaagacaatgtcatcagtt

SEQ ID NO: 1048 - DNA, 20 bp, synthetic construct
  misc_feature 1..20: note = chemically synthesized
  source 1..20: mol_type = other DNA
caagacaatgtcatcagtta

SEQ ID NO: 1049 - DNA, 20 bp, synthetic construct
  misc_feature 1..20: note = chemically synthesized
  source 1..20: mol_type = other DNA
gacaatgtcatcagttaagg

SEQ ID NO: 1050 - DNA, 20 bp, synthetic construct
  misc_feature 1..20: note = chemically synthesized
  source 1..20: mol_type = other DNA
acaatgtcatcagttaaggc

SEQ ID NO: 1051 - DNA, 20 bp, synthetic construct
  misc_feature 1..20: note = chemically synthesized
  source 1..20: mol_type = other DNA
gtcatcagttaaggcaggaa

SEQ ID NO: 1052 - DNA, 20 bp, synthetic construct
  misc_feature 1..20: note = chemically synthesized
  source 1..20: mol_type = other DNA
tcatcagttaaggcaggaac

SEQ ID NO: 1053 - DNA, 20 bp, synthetic construct
  misc_feature 1..20: note = chemically synthesized
  source 1..20: mol_type = other DNA
ggccattttcacttcttttg

SEQ ID NO: 1054 - DNA, 20 bp, synthetic construct
  misc_feature 1..20: note = chemically synthesized
  source 1..20: mol_type = other DNA
cattttcacttcttttgtgg

SEQ ID NO: 1055 - DNA, 20 bp, synthetic construct
  misc_feature 1..20: note = chemically synthesized
  source 1..20: mol_type = other DNA
cttttgtggtggaatgtcat

SEQ ID NO: 1056 - DNA, 20 bp, synthetic construct
  misc_feature 1..20: note = chemically synthesized
  source 1..20: mol_type = other DNA
gtggtggaatgtcatcagtt

SEQ ID NO: 1057 - DNA, 20 bp, synthetic construct
  misc_feature 1..20: note = chemically synthesized
  source 1..20: mol_type = other DNA
tggtggaatgtcatcagtta

SEQ ID NO: 1058 - DNA, 20 bp, synthetic construct
  misc_feature 1..20: note = chemically synthesized
  source 1..20: mol_type = other DNA
tggaatgtcatcagttaagg

SEQ ID NO: 1059 - DNA, 20 bp, synthetic construct
  misc_feature 1..20: note = chemically synthesized
  source 1..20: mol_type = other DNA
ggaatgtcatcagttaaggc

SEQ ID NO: 1060 - DNA, 20 bp, synthetic construct
  misc_feature 1..20: note = chemically synthesized
  source 1..20: mol_type = other DNA
tcatcagttaaggcaggaac

SEQ ID NO: 1061 - DNA, 20 bp, synthetic construct
  misc_feature 1..20: note = chemically synthesized
  source 1..20: mol_type = other DNA
gccatctgtatgtgtacctg

SEQ ID NO: 1062 - DNA, 20 bp, synthetic construct
  misc_feature 1..20: note = chemically synthesized
  source 1..20: mol_type = other DNA
ccatctgtatgtgtacctgc

SEQ ID NO: 1063 - DNA, 20 bp, synthetic construct
  misc_feature 1..20: note = chemically synthesized
  source 1..20: mol_type = other DNA
gtatgtgtacctgcaggtca

SEQ ID NO: 1064 - DNA, 20 bp, synthetic construct
  misc_feature 1..20: note = chemically synthesized
  source 1..20: mol_type = other DNA
tatgtgtacctgcaggtcac

SEQ ID NO: 1065 - DNA, 20 bp, synthetic construct
  misc_feature 1..20: note = chemically synthesized
  source 1..20: mol_type = other DNA
atgtgtacctgcaggtcaca

SEQ ID NO: 1066 - DNA, 20 bp, synthetic construct
  misc_feature 1..20: note = chemically synthesized
  source 1..20: mol_type = other DNA
tgtgtacctgcaggtcacag

SEQ ID NO: 1067 - DNA, 20 bp, synthetic construct
  misc_feature 1..20: note = chemically synthesized
  source 1..20: mol_type = other DNA
gcaggtcacaggggacatga

SEQ ID NO: 1068 - DNA, 20 bp, synthetic construct
  misc_feature 1..20: note = chemically synthesized
  source 1..20: mol_type = other DNA
tcacaggggacatgatggct

SEQ ID NO: 1069 - DNA, 20 bp, synthetic construct
  misc_feature 1..20: note = chemically synthesized
  source 1..20: mol_type = other DNA
ggggacatgatggcttagct

SEQ ID NO: 1070 - DNA, 20 bp, synthetic construct
  misc_feature 1..20: note = chemically synthesized
  source 1..20: mol_type = other DNA
gggacatgatggcttagctt

SEQ ID NO: 1071 - DNA, 20 bp, synthetic construct
  misc_feature 1..20: note = chemically synthesized
  source 1..20: mol_type = other DNA
atgatggcttagcttgggct

SEQ ID NO: 1072 - DNA, 20 bp, synthetic construct
  misc_feature 1..20: note = chemically synthesized
  source 1..20: mol_type = other DNA
gatggcttagcttgggctca

SEQ ID NO: 1073 - DNA, 20 bp, synthetic construct
  misc_feature 1..20: note = chemically synthesized
  source 1..20: mol_type = other DNA
atggcttagcttgggctcag

SEQ ID NO: 1074 - DNA, 20 bp, synthetic construct
  misc_feature 1..20: note = chemically synthesized
  source 1..20: mol_type = other DNA
tcctgtcttcttatattaat

SEQ ID NO: 1075 - DNA, 20 bp, synthetic construct
  misc_feature 1..20: note = chemically synthesized
  source 1..20: mol_type = other DNA
ataagaaaaataaaacataa

SEQ ID NO: 1076 - DNA, 20 bp, synthetic construct
  misc_feature 1..20: note = chemically synthesized
  source 1..20: mol_type = other DNA
aataaaacataatagtgttg

SEQ ID NO: 1077 - DNA, 20 bp, synthetic construct
  misc_feature 1..20: note = chemically synthesized
  source 1..20: mol_type = other DNA
acataatagtgttgaagtgt

SEQ ID NO: 1078 - DNA, 20 bp, synthetic construct
  misc_feature 1..20: note = chemically synthesized
  source 1..20: mol_type = other DNA
cataatagtgttgaagtgtt

SEQ ID NO: 1079 - DNA, 20 bp, synthetic construct
  misc_feature 1..20: note = chemically synthesized
  source 1..20: mol_type = other DNA
ataatagtgttgaagtgttg

SEQ ID NO: 1080 - DNA, 20 bp, synthetic construct
  misc_feature 1..20: note = chemically synthesized
  source 1..20: mol_type = other DNA
atagtgttgaagtgttgggg

SEQ ID NO: 1081 - DNA, 20 bp, synthetic construct
  misc_feature 1..20: note = chemically synthesized
  source 1..20: mol_type = other DNA
tgttggggcagcgaaaattt

SEQ ID NO: 1082 - DNA, 20 bp, synthetic construct
  misc_feature 1..20: note = chemically synthesized
  source 1..20: mol_type = other DNA
gttggggcagcgaaaatttt

SEQ ID NO: 1083 - DNA, 20 bp, synthetic construct
  misc_feature 1..20: note = chemically synthesized
  source 1..20: mol_type = other DNA
ttggggcagcgaaaattttg

SEQ ID NO: 1084 - DNA, 20 bp, synthetic construct
  misc_feature 1..20: note = chemically synthesized
  source 1..20: mol_type = other DNA
tggggcagcgaaaattttgg

SEQ ID NO: 1085 - DNA, 20 bp, synthetic construct
  misc_feature 1..20: note = chemically synthesized
  source 1..20: mol_type = other DNA
gcagcgaaaattttggggga

SEQ ID NO: 1086 - DNA, 20 bp, synthetic construct
  misc_feature 1..20: note = chemically synthesized
  source 1..20: mol_type = other DNA
gaaaattttgggggatggta

SEQ ID NO: 1087 - DNA, 20 bp, synthetic construct
  misc_feature 1..20: note = chemically synthesized
  source 1..20: mol_type = other DNA
aaattttgggggatggtatg

SEQ ID NO: 1088 - DNA, 20 bp, synthetic construct
  misc_feature 1..20: note = chemically synthesized
  source 1..20: mol_type = other DNA
attttgggggatggtatgga

SEQ ID NO: 1089 - DNA, 20 bp, synthetic construct
  misc_feature 1..20: note = chemically synthesized
  source 1..20: mol_type = other DNA
gggatggtatggagagataa

SEQ ID NO: 1090 - DNA, 20 bp, synthetic construct
  misc_feature 1..20: note = chemically synthesized
  source 1..20: mol_type = other DNA
ggatggtatggagagataat

SEQ ID NO: 1091 - DNA, 20 bp, synthetic construct
  misc_feature 1..20: note = chemically synthesized
  source 1..20: mol_type = other DNA
agataatgggcgatatttct

SEQ ID NO: 1092 - DNA, 20 bp, synthetic construct
  misc_feature 1..20: note = chemically synthesized
  source 1..20: mol_type = other DNA
gataatgggcgatatttctc

SEQ ID NO: 1093 - DNA, 20 bp, synthetic construct
  misc_feature 1..20: note = chemically synthesized
  source 1..20: mol_type = other DNA
ataatgggcgatatttctca

SEQ ID NO: 1094 - DNA, 20 bp, synthetic construct
  misc_feature 1..20: note = chemically synthesized
  source 1..20: mol_type = other DNA
atatttctcagggctgcttc

SEQ ID NO: 1095 - DNA, 20 bp, synthetic construct
  misc_feature 1..20: note = chemically synthesized
  source 1..20: mol_type = other DNA
tttctcagggctgcttcgag

SEQ ID NO: 1096 - DNA, 20 bp, synthetic construct
  misc_feature 1..20: note = chemically synthesized
  source 1..20: mol_type = other DNA
ttctcagggctgcttcgagc

SEQ ID NO: 1097 - DNA, 20 bp, synthetic construct
  misc_feature 1..20: note = chemically synthesized
  source 1..20: mol_type = other DNA
agggctgcttcgagcgggat

SEQ ID NO: 1098 - DNA, 20 bp, synthetic construct
  misc_feature 1..20: note = chemically synthesized
  source 1..20: mol_type = other DNA
gggctgcttcgagcgggatt

SEQ ID NO: 1099 - DNA, 20 bp, synthetic construct
  misc_feature 1..20: note = chemically synthesized
  source 1..20: mol_type = other DNA
ggctgcttcgagcgggatta

SEQ ID NO: 1100 - DNA, 20 bp, synthetic construct
  misc_feature 1..20: note = chemically synthesized
  source 1..20: mol_type = other DNA
gctgcttcgagcgggattag

SEQ ID NO: 1101 - DNA, 20 bp, synthetic construct
  misc_feature 1..20: note = chemically synthesized
  source 1..20: mol_type = other DNA
gcttcgagcgggattagggg

SEQ ID NO: 1102 - DNA, 20 bp, synthetic construct
  misc_feature 1..20: note = chemically synthesized
  source 1..20: mol_type = other DNA
gagcgggattaggggcggcg

SEQ ID NO: 1103 - DNA, 20 bp, synthetic construct
  misc_feature 1..20: note = chemically synthesized
  source 1..20: mol_type = other DNA
agcgggattaggggcggcgt

SEQ ID NO: 1104 - DNA, 20 bp, synthetic construct
  misc_feature 1..20: note = chemically synthesized
  source 1..20: mol_type = other DNA
ttaggggcggcgtgggaacc

SEQ ID NO: 1105 - DNA, 20 bp, synthetic construct
  misc_feature 1..20: note = chemically synthesized
  source 1..20: mol_type = other DNA
aggggcggcgtgggaaccta

SEQ ID NO: 1106 - DNA, 20 bp, synthetic construct
  misc_feature 1..20: note = chemically synthesized
  source 1..20: mol_type = other DNA
ggcggcgtgggaacctagag

SEQ ID NO: 1107 - DNA, 20 bp, synthetic construct
  misc_feature 1..20: note = chemically synthesized
  source 1..20: mol_type = other DNA
gcggcgtgggaacctagagt

SEQ ID NO: 1108 - DNA, 20 bp, synthetic construct
  misc_feature 1..20: note = chemically synthesized
  source 1..20: mol_type = other DNA
ggcgtgggaacctagagtgg

SEQ ID NO: 1109 - DNA, 20 bp, synthetic construct
  misc_feature 1..20: note = chemically synthesized
  source 1..20: mol_type = other DNA
cgtgggaacctagagtggga

SEQ ID NO: 1110 - DNA, 20 bp, synthetic construct
  misc_feature 1..20: note = chemically synthesized
  source 1..20: mol_type = other DNA
aacctagagtgggagagatt

SEQ ID NO: 1111 - DNA, 20 bp, synthetic construct
  misc_feature 1..20: note = chemically synthesized
  source 1..20: mol_type = other DNA
gagtgggagagattaagctg

SEQ ID NO: 1112 - DNA, 20 bp, synthetic construct
  misc_feature 1..20: note = chemically synthesized
  source 1..20: mol_type = other DNA
agtgggagagattaagctga

SEQ ID NO: 1113 - DNA, 20 bp, synthetic construct
  misc_feature 1..20: note = chemically synthesized
  source 1..20: mol_type = other DNA
gggagagattaagctgaagg

SEQ ID NO: 1114 - DNA, 20 bp, synthetic construct
  misc_feature 1..20: note = chemically synthesized
  source 1..20: mol_type = other DNA
taagctgaaggaagattttg

SEQ ID NO: 1115 - DNA, 20 bp, synthetic construct
  misc_feature 1..20: note = chemically synthesized
  source 1..20: mol_type = other DNA
ctgaaggaagattttgtggt

SEQ ID NO: 1116 - DNA, 20 bp, synthetic construct
  misc_feature 1..20: note = chemically synthesized
  source 1..20: mol_type = other DNA
tgaaggaagattttgtggta

SEQ ID NO: 1117 - DNA, 20 bp, synthetic construct
  misc_feature 1..20: note = chemically synthesized
  source 1..20: mol_type = other DNA
gaaggaagattttgtggtaa

SEQ ID NO: 1118 - DNA, 20 bp, synthetic construct
  misc_feature 1..20: note = chemically synthesized
  source 1..20: mol_type = other DNA
aaggaagattttgtggtaag

SEQ ID NO: 1119 - DNA, 20 bp, synthetic construct
  misc_feature 1..20: note = chemically synthesized
  source 1..20: mol_type = other DNA
tgtggtaaggggtgatattg

SEQ ID NO: 1120 - DNA, 20 bp, synthetic construct
  misc_feature 1..20: note = chemically synthesized
  source 1..20: mol_type = other DNA
gtggtaaggggtgatattgt

SEQ ID NO: 1121 - DNA, 20 bp, synthetic construct
  misc_feature 1..20: note = chemically synthesized
  source 1..20: mol_type = other DNA
tggtaaggggtgatattgtg

SEQ ID NO: 1122 - DNA, 20 bp, synthetic construct
  misc_feature 1..20: note = chemically synthesized
  source 1..20: mol_type = other DNA
gggtgatattgtggggttgt

SEQ ID NO: 1123 - DNA, 20 bp, synthetic construct
  misc_feature 1..20: note = chemically synthesized
  source 1..20: mol_type = other DNA
tgatattgtggggttgttag

SEQ ID NO: 1124 - DNA, 20 bp, synthetic construct
  misc_feature 1..20: note = chemically synthesized
  source 1..20: mol_type = other DNA
tagaagaaacatttgtcatg

SEQ ID NO: 1125 - DNA, 20 bp, synthetic construct
  misc_feature 1..20: note = chemically synthesized
  source 1..20: mol_type = other DNA
catttgtcatgtagaattat

SEQ ID NO: 1126 - DNA, 20 bp, synthetic construct
  misc_feature 1..20: note = chemically synthesized
  source 1..20: mol_type = other DNA
tcatgtagaattattggtga

SEQ ID NO: 1127 - DNA, 20 bp, synthetic construct
  misc_feature 1..20: note = chemically synthesized
  source 1..20: mol_type = other DNA
tagaattattggtgatggcc

SEQ ID NO: 1128 - DNA, 20 bp, synthetic construct
  misc_feature 1..20: note = chemically synthesized
  source 1..20: mol_type = other DNA
tattggtgatggcctggata

SEQ ID NO: 1129 - DNA, 20 bp, synthetic construct
  misc_feature 1..20: note = chemically synthesized
  source 1..20: mol_type = other DNA
ggcctggatacggttttgta

SEQ ID NO: 1130 - DNA, 20 bp, synthetic construct
  misc_feature 1..20: note = chemically synthesized
  source 1..20: mol_type = other DNA
gtatggattgaaaaaccaaa

SEQ ID NO: 1131 - DNA, 20 bp, synthetic construct
  misc_feature 1..20: note = chemically synthesized
  source 1..20: mol_type = other DNA
attgaaaaaccaaatggaat

SEQ ID NO: 1132 - DNA, 20 bp, synthetic construct
  misc_feature 1..20: note = chemically synthesized
  source 1..20: mol_type = other DNA
tgaaaaaccaaatggaataa

SEQ ID NO: 1133 - DNA, 20 bp, synthetic construct
  misc_feature 1..20: note = chemically synthesized
  source 1..20: mol_type = other DNA
aaaaccaaatggaataagag

SEQ ID NO: 1134 - DNA, 20 bp, synthetic construct
  misc_feature 1..20: note = chemically synthesized
  source 1..20: mol_type = other DNA
aaaccaaatggaataagaga

SEQ ID NO: 1135 - DNA, 20 bp, synthetic construct
  misc_feature 1..20: note = chemically synthesized
  source 1..20: mol_type = other DNA
accaaatggaataagagaag

SEQ ID NO: 1136 - DNA, 20 bp, synthetic construct
  misc_feature 1..20: note = chemically synthesized
  source 1..20: mol_type = other DNA
gaataagagaaggagaaaaa

SEQ ID NO: 1137 - DNA, 20 bp, synthetic construct
  misc_feature 1..20: note = chemically synthesized
  source 1..20: mol_type = other DNA
aataagagaaggagaaaaac

SEQ ID NO: 1138 - DNA, 20 bp, synthetic construct
  misc_feature 1..20: note = chemically synthesized
  source 1..20: mol_type = other DNA
aaggagaaaaacaggtatta

SEQ ID NO: 1139 - DNA, 20 bp, synthetic construct
  misc_feature 1..20: note = chemically synthesized
  source 1..20: mol_type = other DNA
aggagaaaaacaggtattaa

SEQ ID NO: 1140 - DNA, 20 bp, synthetic construct
  misc_feature 1..20: note = chemically synthesized
  source 1..20: mol_type = other DNA
aaaacaggtattaaaggact

SEQ ID NO: 1141 - DNA, 20 bp, synthetic construct
  misc_feature 1..20: note = chemically synthesized
  source 1..20: mol_type = other DNA
acaggtattaaaggactaag

SEQ ID NO: 1142 - DNA, 20 bp, synthetic construct
  misc_feature 1..20: note = chemically synthesized
  source 1..20: mol_type = other DNA
ggtattaaaggactaagaag

SEQ ID NO: 1143 - DNA, 20 bp, synthetic construct
  misc_feature 1..20: note = chemically synthesized
  source 1..20: mol_type = other DNA
gtattaaaggactaagaagt

SEQ ID NO: 1144 - DNA, 20 bp, synthetic construct
  misc_feature 1..20: note = chemically synthesized
  source 1..20: mol_type = other DNA
attaaaggactaagaagtgg

SEQ ID NO: 1145 - DNA, 20 bp, synthetic construct
  misc_feature 1..20: note = chemically synthesized
  source 1..20: mol_type = other DNA
ttaaaggactaagaagtggg

SEQ ID NO: 1146 - DNA, 20 bp, synthetic construct
  misc_feature 1..20: note = chemically synthesized
  source 1..20: mol_type = other DNA
gactaagaagtgggaggacc

SEQ ID NO: 1147 - DNA, 20 bp, synthetic construct
  misc_feature 1..20: note = chemically synthesized
  source 1..20: mol_type = other DNA
actaagaagtgggaggacct

SEQ ID NO: 1148 - DNA, 20 bp, synthetic construct
  misc_feature 1..20: note = chemically synthesized
  source 1..20: mol_type = other DNA
ggacctaggacatctgatta

SEQ ID NO: 1149 - DNA, 20 bp, synthetic construct
  misc_feature 1..20: note = chemically synthesized
  source 1..20: mol_type = other DNA
acctaggacatctgattaaa

SEQ ID NO: 1150 - DNA, 20 bp, synthetic construct
  misc_feature 1..20: note = chemically synthesized
  source 1..20: mol_type = other DNA
catctgattaaagagtgcct

SEQ ID NO: 1151 - DNA, 20 bp, synthetic construct
  misc_feature 1..20: note = chemically synthesized
  source 1..20: mol_type = other DNA
atctgattaaagagtgccta

SEQ ID NO: 1152 - DNA, 20 bp, synthetic construct
  misc_feature 1..20: note = chemically synthesized
  source 1..20: mol_type = other DNA
ctgattaaagagtgcctaag

SEQ ID NO: 1153 - DNA, 20 bp, synthetic construct
  misc_feature 1..20: note = chemically synthesized
  source 1..20: mol_type = other DNA
gtgcctaaggagattcaaca

SEQ ID NO: 1154 - DNA, 20 bp, synthetic construct
  misc_feature 1..20: note = chemically synthesized
  source 1..20: mol_type = other DNA
gagattcaacatagtcctgc

SEQ ID NO: 1155 - DNA, 20 bp, synthetic construct
  misc_feature 1..20: note = chemically synthesized
  source 1..20: mol_type = other DNA
tcaacatagtcctgccagca

SEQ ID NO: 1156 - DNA, 20 bp, synthetic construct
  misc_feature 1..20: note = chemically synthesized
  source 1..20: mol_type = other DNA
aaagattatttatttacttc

SEQ ID NO: 1157 - DNA, 20 bp, synthetic construct
  misc_feature 1..20: note = chemically synthesized
  source 1..20: mol_type = other DNA
agattatttatttacttcaa

SEQ ID NO: 1158 - DNA, 20 bp, synthetic construct
  misc_feature 1..20: note = chemically synthesized
  source 1..20: mol_type = other DNA
atttatttacttcaagagtt

SEQ ID NO: 1159 - DNA, 20 bp, synthetic construct
  misc_feature 1..20: note = chemically synthesized
  source 1..20: mol_type = other DNA
ttatttacttcaagagttaa

SEQ ID NO: 1160 - DNA, 20 bp, synthetic construct
  misc_feature 1..20: note = chemically synthesized
  source 1..20: mol_type = other DNA
tttacttcaagagttaagag

SEQ ID NO: 1161 - DNA, 20 bp, synthetic construct
  misc_feature 1..20: note = chemically synthesized
  source 1..20: mol_type = other DNA
acttcaagagttaagagtgg

SEQ ID NO: 1162 - DNA, 20 bp, synthetic construct
  misc_feature 1..20: note = chemically synthesized
  source 1..20: mol_type = other DNA
aagagttaagagtggcagtt

SEQ ID NO: 1163 - DNA, 20 bp, synthetic construct
  misc_feature 1..20: note = chemically synthesized
  source 1..20: mol_type = other DNA
agagttaagagtggcagttt

SEQ ID NO: 1164 - DNA, 20 bp, synthetic construct
  misc_feature 1..20: note = chemically synthesized
  source 1..20: mol_type = other DNA
gagttaagagtggcagtttg

SEQ ID NO: 1165 - DNA, 20 bp, synthetic construct
  misc_feature 1..20: note = chemically synthesized
  source 1..20: mol_type = other DNA
taagagtggcagtttgggga

SEQ ID NO: 1166 - DNA, 20 bp, synthetic construct
  misc_feature 1..20: note = chemically synthesized
  source 1..20: mol_type = other DNA
tggcagtttggggatagcac

SEQ ID NO: 1167 - DNA, 20 bp, synthetic construct
  misc_feature 1..20: note = chemically synthesized
  source 1..20: mol_type = other DNA
ggcagtttggggatagcacc

SEQ ID NO: 1168 - DNA, 20 bp, synthetic construct
  misc_feature 1..20: note = chemically synthesized
  source 1..20: mol_type = other DNA
cagtttggggatagcaccag

SEQ ID NO: 1169 - DNA, 20 bp, synthetic construct
  misc_feature 1..20: note = chemically synthesized
  source 1..20: mol_type = other DNA
gggatagcaccaggagatat

SEQ ID NO: 1170 - DNA, 20 bp, synthetic construct
  misc_feature 1..20: note = chemically synthesized
  source 1..20: mol_type = other DNA
ccaggagatatcagctgtga

SEQ ID NO: 1171 - DNA, 20 bp, synthetic construct
  misc_feature 1..20: note = chemically synthesized
  source 1..20: mol_type = other DNA
agatatcagctgtgatggct

SEQ ID NO: 1172 - DNA, 20 bp, synthetic construct
  misc_feature 1..20: note = chemically synthesized
  source 1..20: mol_type = other DNA
gctgtgatggcttggaaaaa

SEQ ID NO: 1173 - DNA, 20 bp, synthetic construct
  misc_feature 1..20: note = chemically synthesized
  source 1..20: mol_type = other DNA
cttggaaaaacagtgtaaac

SEQ ID NO: 1174 - DNA, 20 bp, synthetic construct
  misc_feature 1..20: note = chemically synthesized
  source 1..20: mol_type = other DNA
ggaaaaacagtgtaaaccgg

SEQ ID NO: 1175 - DNA, 20 bp, synthetic construct
  misc_feature 1..20: note = chemically synthesized
  source 1..20: mol_type = other DNA
tgtaaaccggcagtgtaaac

SEQ ID NO: 1176 - DNA, 20 bp, synthetic construct
  misc_feature 1..20: note = chemically synthesized
  source 1..20: mol_type = other DNA
taaaccggcagtgtaaacaa

SEQ ID NO: 1177 - DNA, 20 bp, synthetic construct
  misc_feature 1..20: note = chemically synthesized
  source 1..20: mol_type = other DNA
accggcagtgtaaacaagag

SEQ ID NO: 1178 - DNA, 20 bp, synthetic construct
  misc_feature 1..20: note = chemically synthesized
  source 1..20: mol_type = other DNA
ccggcagtgtaaacaagagc

SEQ ID NO: 1179 - DNA, 20 bp, synthetic construct
  misc_feature 1..20: note = chemically synthesized
  source 1..20: mol_type = other DNA
cggcagtgtaaacaagagca

SEQ ID NO: 1180 - DNA, 20 bp, synthetic construct
  misc_feature 1..20: note = chemically synthesized
  source 1..20: mol_type = other DNA
aacaagagcagggcatgtat

SEQ ID NO: 1181 - DNA, 20 bp, synthetic construct
  misc_feature 1..20: note = chemically synthesized
  source 1..20: mol_type = other DNA
aagagcagggcatgtatgag

SEQ ID NO: 1182 - DNA, 20 bp, synthetic construct
  misc_feature 1..20: note = chemically synthesized
  source 1..20: mol_type = other DNA
cagggcatgtatgagtagtt

SEQ ID NO: 1183 - DNA, 20 bp, synthetic construct
  misc_feature 1..20: note = chemically synthesized
  source 1..20: mol_type = other DNA
catgtatgagtagttgagaa

SEQ ID NO: 1184 - DNA, 20 bp, synthetic construct
  misc_feature 1..20: note = chemically synthesized
  source 1..20: mol_type = other DNA
gagtagttgagaatggtgaa

SEQ ID NO: 1185 - DNA, 20 bp, synthetic construct
  misc_feature 1..20: note = chemically synthesized
  source 1..20: mol_type = other DNA
agtagttgagaatggtgaat

SEQ ID NO: 1186 - DNA, 20 bp, synthetic construct
  misc_feature 1..20: note = chemically synthesized
  source 1..20: mol_type = other DNA
tagttgagaatggtgaatag

SEQ ID NO: 1187 - DNA, 20 bp, synthetic construct
  misc_feature 1..20: note = chemically synthesized
  source 1..20: mol_type = other DNA
atggtgaataggagtatgac

SEQ ID NO: 1188 - DNA, 20 bp, synthetic construct
  misc_feature 1..20: note = chemically synthesized
  source 1..20: mol_type = other DNA
tgaataggagtatgactaga

SEQ ID NO: 1189 - DNA, 20 bp, synthetic construct
  misc_feature 1..20: note = chemically synthesized
  source 1..20: mol_type = other DNA
ataggagtatgactagacag

SEQ ID NO: 1190 - DNA, 20 bp, synthetic construct
  misc_feature 1..20: note = chemically synthesized
  source 1..20: mol_type = other DNA
gagtatgactagacagaaga

SEQ ID NO: 1191 - DNA, 20 bp, synthetic construct
  misc_feature 1..20: note = chemically synthesized
  source 1..20: mol_type = other DNA
tatgactagacagaagatag

SEQ ID NO: 1192 - DNA, 20 bp, synthetic construct
  misc_feature 1..20: note = chemically synthesized
  source 1..20: mol_type = other DNA
atgactagacagaagatagc

SEQ ID NO: 1193 - DNA, 20 bp, synthetic construct
  misc_feature 1..20: note = chemically synthesized
  source 1..20: mol_type = other DNA
tgactagacagaagatagca

SEQ ID NO: 1194 - DNA, 20 bp, synthetic construct
  misc_feature 1..20: note = chemically synthesized
  source 1..20: mol_type = other DNA
cagaagatagcagggatgac

SEQ ID NO: 1195 - DNA, 20 bp, synthetic construct
  misc_feature 1..20: note = chemically synthesized
  source 1..20: mol_type = other DNA
gcagggatgacaagtttttt

SEQ ID NO: 1196 - DNA, 20 bp, synthetic construct
  misc_feature 1..20: note = chemically synthesized
  source 1..20: mol_type = other DNA
cagggatgacaagttttttt

SEQ ID NO: 1197 - DNA, 20 bp, synthetic construct
  misc_feature 1..20: note = chemically synthesized
  source 1..20: mol_type = other DNA
agggatgacaagtttttttg

SEQ ID NO: 1198 - DNA, 20 bp, synthetic construct
  misc_feature 1..20: note = chemically synthesized
  source 1..20: mol_type = other DNA
gtttttttggggcacattct

SEQ ID NO: 1199 - DNA, 20 bp, synthetic construct
  misc_feature 1..20: note = chemically synthesized
  source 1..20: mol_type = other DNA
ttttggggcacattctaagt

SEQ ID NO: 1200 - DNA, 20 bp, synthetic construct
  misc_feature 1..20: note = chemically synthesized
  source 1..20: mol_type = other DNA
gggcacattctaagttggtc

SEQ ID NO: 1201 - DNA, 20 bp, synthetic construct
  misc_feature 1..20: note = chemically synthesized
  source 1..20: mol_type = other DNA
ttctaagttggtctggtgtc

SEQ ID NO: 1202 - DNA, 20 bp, synthetic construct
  misc_feature 1..20: note = chemically synthesized
  source 1..20: mol_type = other DNA
gttggtctggtgtctggaat

SEQ ID NO: 1203 - DNA, 20 bp, synthetic construct
  misc_feature 1..20: note = chemically synthesized
  source 1..20: mol_type = other DNA
tctggtgtctggaattagac

SEQ ID NO: 1204 - DNA, 20 bp, synthetic construct
  misc_feature 1..20: note = chemically synthesized
  source 1..20: mol_type = other DNA
ctggtgtctggaattagact

SEQ ID NO: 1205 - DNA, 20 bp, synthetic construct
  misc_feature 1..20: note = chemically synthesized
  source 1..20: mol_type = other DNA
tggtgtctggaattagactg

SEQ ID NO: 1206 - DNA, 20 bp, synthetic construct
  misc_feature 1..20: note = chemically synthesized
  source 1..20: mol_type = other DNA
ttagactggggcctaataaa

SEQ ID NO: 1207 - DNA, 20 bp, synthetic construct
  misc_feature 1..20: note = chemically synthesized
  source 1..20: mol_type = other DNA
tagactggggcctaataaaa

SEQ ID NO: 1208 - DNA, 20 bp, synthetic construct
  misc_feature 1..20: note = chemically synthesized
  source 1..20: mol_type = other DNA
aataaaaaggcaaatctata

SEQ ID NO: 1209 - DNA, 20 bp, synthetic construct
  misc_feature 1..20: note = chemically synthesized
  source 1..20: mol_type = other DNA
ataaaaaggcaaatctatac

SEQ ID NO: 1210 - DNA, 20 bp, synthetic construct
  misc_feature 1..20: note = chemically synthesized
  source 1..20: mol_type = other DNA
aaaaaggcaaatctatacag

SEQ ID NO: 1211 - DNA, 20 bp, synthetic construct
  misc_feature 1..20: note = chemically synthesized
  source 1..20: mol_type = other DNA
aatctatacaggagctcaaa

SEQ ID NO: 1212 - DNA, 20 bp, synthetic construct
  misc_feature 1..20: note = chemically synthesized
  source 1..20: mol_type = other DNA
atctatacaggagctcaaat

SEQ ID NO: 1213 - DNA, 20 bp, synthetic construct
  misc_feature 1..20: note = chemically synthesized
  source 1..20: mol_type = other DNA
ctcaaatgggctgtaccctg

SEQ ID NO: 1214 - DNA, 20 bp, synthetic construct
  misc_feature 1..20: note = chemically synthesized
  source 1..20: mol_type = other DNA
gctgtaccctgtagcattct

SEQ ID NO: 1215 - DNA, 20 bp, synthetic construct
  misc_feature 1..20: note = chemically synthesized
  source 1..20: mol_type = other DNA
ctgtaccctgtagcattctg

SEQ ID NO: 1216 - DNA, 20 bp, synthetic construct
  misc_feature 1..20: note = chemically synthesized
  source 1..20: mol_type = other DNA
accctgtagcattctgagga

SEQ ID NO: 1217 - DNA, 20 bp, synthetic construct
  misc_feature 1..20: note = chemically synthesized
  source 1..20: mol_type = other DNA
ccctgtagcattctgaggac

SEQ ID NO: 1218 - DNA, 20 bp, synthetic construct
  misc_feature 1..20: note = chemically synthesized
  source 1..20: mol_type = other DNA
tgaggacaggtctgacttct

SEQ ID NO: 1219 - DNA, 20 bp, synthetic construct
  misc_feature 1..20: note = chemically synthesized
  source 1..20: mol_type = other DNA
gacaggtctgacttctgaga

SEQ ID NO: 1220 - DNA, 20 bp, synthetic construct
  misc_feature 1..20: note = chemically synthesized
  source 1..20: mol_type = other DNA
gtctgacttctgagaaagaa

SEQ ID NO: 1221 - DNA, 20 bp, synthetic construct
  misc_feature 1..20: note = chemically synthesized
  source 1..20: mol_type = other DNA
tgacttctgagaaagaaaag

SEQ ID NO: 1222 - DNA, 20 bp, synthetic construct
  misc_feature 1..20: note = chemically synthesized
  source 1..20: mol_type = other DNA
ctgagaaagaaaagtggtaa

SEQ ID NO: 1223 - DNA, 20 bp, synthetic construct
  misc_feature 1..20: note = chemically synthesized
  source 1..20: mol_type = other DNA
aaagtggtaaaagtattgtc

SEQ ID NO: 1224 - DNA, 20 bp, synthetic construct
  misc_feature 1..20: note = chemically synthesized
  source 1..20: mol_type = other DNA
agtattgtccagtccttttt

SEQ ID NO: 1225 - DNA, 20 bp, synthetic construct
  misc_feature 1..20: note = chemically synthesized
  source 1..20: mol_type = other DNA
ttgtccagtcctttttaagt

SEQ ID NO: 1226 - DNA, 20 bp, synthetic construct
  misc_feature 1..20: note = chemically synthesized
  source 1..20: mol_type = other DNA
tccagtcctttttaagttgg

SEQ ID NO: 1227 - DNA, 20 bp, synthetic construct
  misc_feature 1..20: note = chemically synthesized
  source 1..20: mol_type = other DNA
tcctttttaagttggtggct

SEQ ID NO: 1228 - DNA, 20 bp, synthetic construct
  misc_feature 1..20: note = chemically synthesized
  source 1..20: mol_type = other DNA
tttaagttggtggctgagct

SEQ ID NO: 1229 - DNA, 20 bp, synthetic construct
  misc_feature 1..20: note = chemically synthesized
  source 1..20: mol_type = other DNA
agttggtggctgagcttggt

SEQ ID NO: 1230 - DNA, 20 bp, synthetic construct
  misc_feature 1..20: note = chemically synthesized
  source 1..20: mol_type = other DNA
gttggtggctgagcttggtg

SEQ ID NO: 1231 - DNA, 20 bp, synthetic construct
  misc_feature 1..20: note = chemically synthesized
  source 1..20: mol_type = other DNA
ttggtgaggtgtgtttttaa

SEQ ID NO: 1232 - DNA, 20 bp, synthetic construct
  misc_feature 1..20: note = chemically synthesized
  source 1..20: mol_type = other DNA
gtgtgtttttaaaagacatt

SEQ ID NO: 1233 - DNA, 20 bp, synthetic construct
  misc_feature 1..20: note = chemically synthesized
  source 1..20: mol_type = other DNA
agtccgttctacttttcctg

SEQ ID NO: 1234 - DNA, 20 bp, synthetic construct
  misc_feature 1..20: note = chemically synthesized
  source 1..20: mol_type = other DNA
cgttctacttttcctgaaga

SEQ ID NO: 1235 - DNA, 20 bp, synthetic construct
  misc_feature 1..20: note = chemically synthesized
  source 1..20: mol_type = other DNA
ttctacttttcctgaagacg

SEQ ID NO: 1236 - DNA, 20 bp, synthetic construct
  misc_feature 1..20: note = chemically synthesized
  source 1..20: mol_type = other DNA
tctacttttcctgaagacgg

SEQ ID NO: 1237 - DNA, 20 bp, synthetic construct
  misc_feature 1..20: note = chemically synthesized
  source 1..20: mol_type = other DNA
tcctgaagacggaggaccgt

SEQ ID NO: 1238 - DNA, 20 bp, synthetic construct
  misc_feature 1..20: note = chemically synthesized
  source 1..20: mol_type = other DNA
cctgaagacggaggaccgta

SEQ ID NO: 1239 - DNA, 20 bp, synthetic construct
  misc_feature 1..20: note = chemically synthesized
  source 1..20: mol_type = other DNA
ctgaagacggaggaccgtaa

SEQ ID NO: 1240 - DNA, 20 bp, synthetic construct
  misc_feature 1..20: note = chemically synthesized
  source 1..20: mol_type = other DNA
ggaggaccgtaagggatata

SEQ ID NO: 1241 - DNA, 20 bp, synthetic construct
  misc_feature 1..20: note = chemically synthesized
  source 1..20: mol_type = other DNA
gaggaccgtaagggatataa

SEQ ID NO: 1242 - DNA, 20 bp, synthetic construct
  misc_feature 1..20: note = chemically synthesized
  source 1..20: mol_type = other DNA
taaaggttttactgaatact

SEQ ID NO: 1243 - DNA, 20 bp, synthetic construct
  misc_feature 1..20: note = chemically synthesized
  source 1..20: mol_type = other DNA
aaggttttactgaatactaa

SEQ ID NO: 1244 - DNA, 20 bp, synthetic construct
  misc_feature 1..20: note = chemically synthesized
  source 1..20: mol_type = other DNA
taagagcctgaaaaactgct

SEQ ID NO: 1245 - DNA, 20 bp, synthetic construct
  misc_feature 1..20: note = chemically synthesized
  source 1..20: mol_type = other DNA
cttggctgatttgactaata

SEQ ID NO: 1246 - DNA, 20 bp, synthetic construct
  misc_feature 1..20: note = chemically synthesized
  source 1..20: mol_type = other DNA
ttggctgatttgactaataa

SEQ ID NO: 1247 - DNA, 20 bp, synthetic construct
  misc_feature 1..20: note = chemically synthesized
  source 1..20: mol_type = other DNA
ctgatttgactaataaaggc

SEQ ID NO: 1248 - DNA, 20 bp, synthetic construct
  misc_feature 1..20: note = chemically synthesized
  source 1..20: mol_type = other DNA
aataaaggctggtctgttat

SEQ ID NO: 1249 - DNA, 20 bp, synthetic construct
  misc_feature 1..20: note = chemically synthesized
  source 1..20: mol_type = other DNA
tggtctgttatcagactgta

SEQ ID NO: 1250 - DNA, 20 bp, synthetic construct
  misc_feature 1..20: note = chemically synthesized
  source 1..20: mol_type = other DNA
gtctgttatcagactgtata

SEQ ID NO: 1251 - DNA, 20 bp, synthetic construct
  misc_feature 1..20: note = chemically synthesized
  source 1..20: mol_type = other DNA
tctgttatcagactgtatag

SEQ ID NO: 1252 - DNA, 20 bp, synthetic construct
  misc_feature 1..20: note = chemically synthesized
  source 1..20: mol_type = other DNA
gttatcagactgtatagagg

SEQ ID NO: 1253 - DNA, 20 bp, synthetic construct
  misc_feature 1..20: note = chemically synthesized
  source 1..20: mol_type = other DNA
ttatcagactgtatagaggt

SEQ ID NO: 1254 - DNA, 20 bp, synthetic construct
  misc_feature 1..20: note = chemically synthesized
  source 1..20: mol_type = other DNA
tcagactgtatagaggtagg

SEQ ID NO: 1255 - DNA, 20 bp, synthetic construct
  misc_feature 1..20: note = chemically synthesized
  source 1..20: mol_type = other DNA
cagactgtatagaggtagga

SEQ ID NO: 1256 - DNA, 20 bp, synthetic construct
  misc_feature 1..20: note = chemically synthesized
  source 1..20: mol_type = other DNA
agaggtaggaaggctaaact

SEQ ID NO: 1257 - DNA, 20 bp, synthetic construct
  misc_feature 1..20: note = chemically synthesized
  source 1..20: mol_type = other DNA
gaggtaggaaggctaaactg

SEQ ID NO: 1258 - DNA, 20 bp, synthetic construct
  misc_feature 1..20: note = chemically synthesized
  source 1..20: mol_type = other DNA
aactgaggaattatgtctga

SEQ ID NO: 1259 - DNA, 20 bp, synthetic construct
  misc_feature 1..20: note = chemically synthesized
  source 1..20: mol_type = other DNA
tgaggaattatgtctgacag

SEQ ID NO: 1260 - DNA, 20 bp, synthetic construct
  misc_feature 1..20: note = chemically synthesized
  source 1..20: mol_type = other DNA
gaggaattatgtctgacaga

SEQ ID NO: 1261 - DNA, 20 bp, synthetic construct
  misc_feature 1..20: note = chemically synthesized
  source 1..20: mol_type = other DNA
aggaattatgtctgacagaa

SEQ ID NO: 1262 - DNA, 20 bp, synthetic construct
  misc_feature 1..20: note = chemically synthesized
  source 1..20: mol_type = other DNA
aattatgtctgacagaaggg

SEQ ID NO: 1263 - DNA, 20 bp, synthetic construct
  misc_feature 1..20: note = chemically synthesized
  source 1..20: mol_type = other DNA
cagaagggaagaaatgactg

SEQ ID NO: 1264 - DNA, 20 bp, synthetic construct
  misc_feature 1..20: note = chemically synthesized
  source 1..20: mol_type = other DNA
aagggaagaaatgactgcgg

SEQ ID NO: 1265 - DNA, 20 bp, synthetic construct
  misc_feature 1..20: note = chemically synthesized
  source 1..20: mol_type = other DNA
aatgactgcggtggccttct

SEQ ID NO: 1266 - DNA, 20 bp, synthetic construct
  misc_feature 1..20: note = chemically synthesized
  source 1..20: mol_type = other DNA
ggtggccttctcagaccctg

SEQ ID NO: 1267 - DNA, 20 bp, synthetic construct
  misc_feature 1..20: note = chemically synthesized
  source 1..20: mol_type = other DNA
gtggccttctcagaccctgt

SEQ ID NO: 1268 - DNA, 20 bp, synthetic construct
  misc_feature 1..20: note = chemically synthesized
  source 1..20: mol_type = other DNA
ccttctcagaccctgtagga

SEQ ID NO: 1269 - DNA, 20 bp, synthetic construct
  misc_feature 1..20: note = chemically synthesized
  source 1..20: mol_type = other DNA
aggaaagacctctacttatc

SEQ ID NO: 1270 - DNA, 20 bp, synthetic construct
  misc_feature 1..20: note = chemically synthesized
  source 1..20: mol_type = other DNA
gacctctacttatccagtga

SEQ ID NO: 1271 - DNA, 20 bp, synthetic construct
  misc_feature 1..20: note = chemically synthesized
  source 1..20: mol_type = other DNA
atccagtgaaagtgtctacc

SEQ ID NO: 1272 - DNA, 20 bp, synthetic construct
  misc_feature 1..20: note = chemically synthesized
  source 1..20: mol_type = other DNA
tgaaagtgtctacctagact

SEQ ID NO: 1273 - DNA, 20 bp, synthetic construct
  misc_feature 1..20: note = chemically synthesized
  source 1..20: mol_type = other DNA
aaagtgtctacctagactaa

SEQ ID NO: 1274 - DNA, 20 bp, synthetic construct
  misc_feature 1..20: note = chemically synthesized
  source 1..20: mol_type = other DNA
aagtgtctacctagactaag

SEQ ID NO: 1275 - DNA, 20 bp, synthetic construct
  misc_feature 1..20: note = chemically synthesized
  source 1..20: mol_type = other DNA
acctagactaagaggtattt

SEQ ID NO: 1276 - DNA, 20 bp, synthetic construct
  misc_feature 1..20: note = chemically synthesized
  source 1..20: mol_type = other DNA
ggtattttagttatctgact

SEQ ID NO: 1277 - DNA, 20 bp, synthetic construct
  misc_feature 1..20: note = chemically synthesized
  source 1..20: mol_type = other DNA
gtattttagttatctgactc

SEQ ID NO: 1278 - DNA, 20 bp, synthetic construct
  misc_feature 1..20: note = chemically synthesized
  source 1..20: mol_type = other DNA
tattttagttatctgactca

SEQ ID NO: 1279 - DNA, 20 bp, synthetic construct
  misc_feature 1..20: note = chemically synthesized
  source 1..20: mol_type = other DNA
tatctgactcagggcatgtt

SEQ ID NO: 1280 - DNA, 20 bp, synthetic construct
  misc_feature 1..20: note = chemically synthesized
  source 1..20: mol_type = other DNA
gttgagtaaatctaatttgc

SEQ ID NO: 1281 - DNA, 20 bp, synthetic construct
  misc_feature 1..20: note = chemically synthesized
  source 1..20: mol_type = other DNA
taaatctaatttgccagtcc

SEQ ID NO: 1282 - DNA, 20 bp, synthetic construct
  misc_feature 1..20: note = chemically synthesized
  source 1..20: mol_type = other DNA
aaatctaatttgccagtcct

SEQ ID NO: 1283 - DNA, 20 bp, synthetic construct
  misc_feature 1..20: note = chemically synthesized
  source 1..20: mol_type = other DNA
tctaatttgccagtcctggg

SEQ ID NO: 1284 - DNA, 20 bp, synthetic construct
  misc_feature 1..20: note = chemically synthesized
  source 1..20: mol_type = other DNA
ctaatttgccagtcctgggt

SEQ ID NO: 1285 - DNA, 20 bp, synthetic construct
  misc_feature 1..20: note = chemically synthesized
  source 1..20: mol_type = other DNA
taatttgccagtcctgggtg

SEQ ID NO: 1286 - DNA, 20 bp, synthetic construct
  misc_feature 1..20: note = chemically synthesized
  source 1..20: mol_type = other DNA
aatttgccagtcctgggtgg

SEQ ID NO: 1287 - DNA, 20 bp, synthetic construct
  misc_feature 1..20: note = chemically synthesized
  source 1..20: mol_type = other DNA
ctgggtgggggcaaatcctc

SEQ ID NO: 1288 - DNA, 20 bp, synthetic construct
  misc_feature 1..20: note = chemically synthesized
  source 1..20: mol_type = other DNA
aaatcctcgagcttgatgtg

SEQ ID NO: 1289 - DNA, 20 bp, synthetic construct
  misc_feature 1..20: note = chemically synthesized
  source 1..20: mol_type = other DNA
aatcctcgagcttgatgtgt

SEQ ID NO: 1290 - DNA, 20 bp, synthetic construct
  misc_feature 1..20: note = chemically synthesized
  source 1..20: mol_type = other DNA
atcctcgagcttgatgtgta

SEQ ID NO: 1291 - DNA, 20 bp, synthetic construct
  misc_feature 1..20: note = chemically synthesized
  source 1..20: mol_type = other DNA
ctcgagcttgatgtgtaggg

SEQ ID NO: 1292 - DNA, 20 bp, synthetic construct
  misc_feature 1..20: note = chemically synthesized
  source 1..20: mol_type = other DNA
tcgagcttgatgtgtaggga

SEQ ID NO: 1293 - DNA, 20 bp, synthetic construct
  misc_feature 1..20: note = chemically synthesized
  source 1..20: mol_type = other DNA
cgagcttgatgtgtagggaa

SEQ ID NO: 1294 - DNA, 20 bp, synthetic construct
  misc_feature 1..20: note = chemically synthesized
  source 1..20: mol_type = other DNA
agcttgatgtgtagggaagg

SEQ ID NO: 1295 - DNA, 20 bp, synthetic construct
  misc_feature 1..20: note = chemically synthesized
  source 1..20: mol_type = other DNA
gcttgatgtgtagggaaggg

SEQ ID NO: 1296 - DNA, 20 bp, synthetic construct
  misc_feature 1..20: note = chemically synthesized
  source 1..20: mol_type = other DNA
cttgatgtgtagggaaggga

SEQ ID NO: 1297 - DNA, 20 bp, synthetic construct
  misc_feature 1..20: note = chemically synthesized
  source 1..20: mol_type = other DNA
ttgatgtgtagggaagggag

SEQ ID NO: 1298 - DNA, 20 bp, synthetic construct
  misc_feature 1..20: note = chemically synthesized
  source 1..20: mol_type = other DNA
tgatgtgtagggaagggagg

SEQ ID NO: 1299 - DNA, 20 bp, synthetic construct
  misc_feature 1..20: note = chemically synthesized
  source 1..20: mol_type = other DNA
agggggcctgaataatccct

SEQ ID NO: 1300 - DNA, 20 bp, synthetic construct
  misc_feature 1..20: note = chemically synthesized
  source 1..20: mol_type = other DNA
gggggcctgaataatccctg

SEQ ID NO: 1301 - DNA, 20 bp, synthetic construct
  misc_feature 1..20: note = chemically synthesized
  source 1..20: mol_type = other DNA
gggcctgaataatccctgag

SEQ ID NO: 1302 - DNA, 20 bp, synthetic construct
  misc_feature 1..20: note = chemically synthesized
  source 1..20: mol_type = other DNA
cctgaataatccctgaggag

SEQ ID NO: 1303 - DNA, 20 bp, synthetic construct
  misc_feature 1..20: note = chemically synthesized
  source 1..20: mol_type = other DNA
gaataatccctgaggagtag

SEQ ID NO: 1304 - DNA, 20 bp, synthetic construct
  misc_feature 1..20: note = chemically synthesized
  source 1..20: mol_type = other DNA
atccctgaggagtagcagaa

SEQ ID NO: 1305 - DNA, 20 bp, synthetic construct
  misc_feature 1..20: note = chemically synthesized
  source 1..20: mol_type = other DNA
cctgaggagtagcagaatag

SEQ ID NO: 1306 - DNA, 20 bp, synthetic construct
  misc_feature 1..20: note = chemically synthesized
  source 1..20: mol_type = other DNA
aggagtagcagaatagcaga

SEQ ID NO: 1307 - DNA, 20 bp, synthetic construct
  misc_feature 1..20: note = chemically synthesized
  source 1..20: mol_type = other DNA
agaatagcagatggaacact

SEQ ID NO: 1308 - DNA, 20 bp, synthetic construct
  misc_feature 1..20: note = chemically synthesized
  source 1..20: mol_type = other DNA
atagcagatggaacactgag

SEQ ID NO: 1309 - DNA, 20 bp, synthetic construct
  misc_feature 1..20: note = chemically synthesized
  source 1..20: mol_type = other DNA
cactgagaagttatttcttt

SEQ ID NO: 1310 - DNA, 20 bp, synthetic construct
  misc_feature 1..20: note = chemically synthesized
  source 1..20: mol_type = other DNA
actgagaagttatttctttg

SEQ ID NO: 1311 - DNA, 20 bp, synthetic construct
  misc_feature 1..20: note = chemically synthesized
  source 1..20: mol_type = other DNA
agaagttatttctttgagga

SEQ ID NO: 1312 - DNA, 20 bp, synthetic construct
  misc_feature 1..20: note = chemically synthesized
  source 1..20: mol_type = other DNA
ttgaggatagatttctacga

SEQ ID NO: 1313 - DNA, 20 bp, synthetic construct
  misc_feature 1..20: note = chemically synthesized
  source 1..20: mol_type = other DNA
ggatagatttctacgatgga

SEQ ID NO: 1314 - DNA, 20 bp, synthetic construct
  misc_feature 1..20: note = chemically synthesized
  source 1..20: mol_type = other DNA
gatagatttctacgatggaa

SEQ ID NO: 1315 - DNA, 20 bp, synthetic construct
  misc_feature 1..20: note = chemically synthesized
  source 1..20: mol_type = other DNA
ttctacgatggaaaggaaat

SEQ ID NO: 1316 - DNA, 20 bp, synthetic construct
  misc_feature 1..20: note = chemically synthesized
  source 1..20: mol_type = other DNA
ctacgatggaaaggaaatga

SEQ ID NO: 1317 - DNA, 20 bp, synthetic construct
  misc_feature 1..20: note = chemically synthesized
  source 1..20: mol_type = other DNA
tacgatggaaaggaaatgag

SEQ ID NO: 1318 - DNA, 20 bp, synthetic construct
  misc_feature 1..20: note = chemically synthesized
  source 1..20: mol_type = other DNA
gaaaggaaatgagaggttcg

SEQ ID NO: 1319 - DNA, 20 bp, synthetic construct
  misc_feature 1..20: note = chemically synthesized
  source 1..20: mol_type = other DNA
aaggaaatgagaggttcgaa

SEQ ID NO: 1320 - DNA, 20 bp, synthetic construct
  misc_feature 1..20: note = chemically synthesized
  source 1..20: mol_type = other DNA
aggaaatgagaggttcgaag

SEQ ID NO: 1321 - DNA, 20 bp, synthetic construct
  misc_feature 1..20: note = chemically synthesized
  source 1..20: mol_type = other DNA
aaatgagaggttcgaagagg

SEQ ID NO: 1322 - DNA, 20 bp, synthetic construct
  misc_feature 1..20: note = chemically synthesized
  source 1..20: mol_type = other DNA
aatgagaggttcgaagaggc

SEQ ID NO: 1323 - DNA, 20 bp, synthetic construct
  misc_feature 1..20: note = chemically synthesized
  source 1..20: mol_type = other DNA
agaggttcgaagaggcaggc

SEQ ID NO: 1324 - DNA, 20 bp, synthetic construct
  misc_feature 1..20: note = chemically synthesized
  source 1..20: mol_type = other DNA
ggttcgaagaggcaggctag

SEQ ID NO: 1325 - DNA, 20 bp, synthetic construct
  misc_feature 1..20: note = chemically synthesized
  source 1..20: mol_type = other DNA
caggctagtggtttgtacta

SEQ ID NO: 1326 - DNA, 20 bp, synthetic construct
  misc_feature 1..20: note = chemically synthesized
  source 1..20: mol_type = other DNA
tagtggtttgtactatagca

SEQ ID NO: 1327 - DNA, 20 bp, synthetic construct
  misc_feature 1..20: note = chemically synthesized
  source 1..20: mol_type = other DNA
atagcatagcctgcctttgc

SEQ ID NO: 1328 - DNA, 20 bp, synthetic construct
  misc_feature 1..20: note = chemically synthesized
  source 1..20: mol_type = other DNA
agcctgcctttgctggtgtg

SEQ ID NO: 1329 - DNA, 20 bp, synthetic construct
  misc_feature 1..20: note = chemically synthesized
  source 1..20: mol_type = other DNA
ctttgctggtgtgtggctat

SEQ ID NO: 1330 - DNA, 20 bp, synthetic construct
  misc_feature 1..20: note = chemically synthesized
  source 1..20: mol_type = other DNA
tttgctggtgtgtggctatt

SEQ ID NO: 1331 - DNA, 20 bp, synthetic construct
  misc_feature 1..20: note = chemically synthesized
  source 1..20: mol_type = other DNA
tggtgtgtggctattaggcc

SEQ ID NO: 1332 - DNA, 20 bp, synthetic construct
  misc_feature 1..20: note = chemically synthesized
  source 1..20: mol_type = other DNA
tgtgtggctattaggcctgg

SEQ ID NO: 1333 - DNA, 20 bp, synthetic construct
  misc_feature 1..20: note = chemically synthesized
  source 1..20: mol_type = other DNA
ggctattaggcctggtggaa

SEQ ID NO: 1334 - DNA, 20 bp, synthetic construct
  misc_feature 1..20: note = chemically synthesized
  source 1..20: mol_type = other DNA
ggaacggccatcaataaatc

SEQ ID NO: 1335 - DNA, 20 bp, synthetic construct
  misc_feature 1..20: note = chemically synthesized
  source 1..20: mol_type = other DNA
atcaataaatcaagtgtgat

SEQ ID NO: 1336 - DNA, 20 bp, synthetic construct
  misc_feature 1..20: note = chemically synthesized
  source 1..20: mol_type = other DNA
tcaataaatcaagtgtgatc

SEQ ID NO: 1337 - DNA, 20 bp, synthetic construct
  misc_feature 1..20: note = chemically synthesized
  source 1..20: mol_type = other DNA
caataaatcaagtgtgatca

SEQ ID NO: 1338 - DNA, 20 bp, synthetic construct
  misc_feature 1..20: note = chemically synthesized
  source 1..20: mol_type = other DNA
aaatcaagtgtgatcagggt

SEQ ID NO: 1339 - DNA, 20 bp, synthetic construct
  misc_feature 1..20: note = chemically synthesized
  source 1..20: mol_type = other DNA
aatcaagtgtgatcagggtg

SEQ ID NO: 1340 - DNA, 20 bp, synthetic construct
  misc_feature 1..20: note = chemically synthesized
  source 1..20: mol_type = other DNA
agtgtgatcagggtgaggaa

SEQ ID NO: 1341 - DNA, 20 bp, synthetic construct
  misc_feature 1..20: note = chemically synthesized
  source 1..20: mol_type = other DNA
gtgtgatcagggtgaggaac

SEQ ID NO: 1342 - DNA, 20 bp, synthetic construct
  misc_feature 1..20: note = chemically synthesized
  source 1..20: mol_type = other DNA
gatcagggtgaggaacagga

SEQ ID NO: 1343 - DNA, 20 bp, synthetic construct
  misc_feature 1..20: note = chemically synthesized
  source 1..20: mol_type = other DNA
cagggtgaggaacaggaaag

SEQ ID NO: 1344 - DNA, 20 bp, synthetic construct
  misc_feature 1..20: note = chemically synthesized
  source 1..20: mol_type = other DNA
agggtgaggaacaggaaaga

SEQ ID NO: 1345 - DNA, 20 bp, synthetic construct
  misc_feature 1..20: note = chemically synthesized
  source 1..20: mol_type = other DNA
tgaggaacaggaaagaagga

SEQ ID NO: 1346 - DNA, 20 bp, synthetic construct
  misc_feature 1..20: note = chemically synthesized
  source 1..20: mol_type = other DNA
ggaacaggaaagaaggaaag

SEQ ID NO: 1347 - DNA, 20 bp, synthetic construct
  misc_feature 1..20: note = chemically synthesized
  source 1..20: mol_type = other DNA
gaacaggaaagaaggaaaga

SEQ ID NO: 1348 - DNA, 20 bp, synthetic construct
  misc_feature 1..20: note = chemically synthesized
  source 1..20: mol_type = other DNA
aagaaggaaagaaggaaata

SEQ ID NO: 1349 - DNA, 20 bp, synthetic construct
  misc_feature 1..20: note = chemically synthesized
  source 1..20: mol_type = other DNA
agaaggaaagaaggaaatat

SEQ ID NO: 1350 - DNA, 20 bp, synthetic construct
  misc_feature 1..20: note = chemically synthesized
  source 1..20: mol_type = other DNA
gaaggaaagaaggaaatatg

SEQ ID NO: 1351 - DNA, 20 bp, synthetic construct
  misc_feature 1..20: note = chemically synthesized
  source 1..20: mol_type = other DNA
aagaaggaaatatggggaaa

SEQ ID NO: 1352 - DNA, 20 bp, synthetic construct
  misc_feature 1..20: note = chemically synthesized
  source 1..20: mol_type = other DNA
agaaggaaatatggggaaat

SEQ ID NO: 1353 - DNA, 20 bp, synthetic construct
  misc_feature 1..20: note = chemically synthesized
  source 1..20: mol_type = other DNA
gaaggaaatatggggaaatg

SEQ ID NO: 1354 - DNA, 20 bp, synthetic construct
  misc_feature 1..20: note = chemically synthesized
  source 1..20: mol_type = other DNA
tggggaaatggggtgaatgt

SEQ ID NO: 1355 - DNA, 20 bp, synthetic construct
  misc_feature 1..20: note = chemically synthesized
  source 1..20: mol_type = other DNA
ggggaaatggggtgaatgtc

SEQ ID NO: 1356 - DNA, 20 bp, synthetic construct
  misc_feature 1..20: note = chemically synthesized
  source 1..20: mol_type = other DNA
gaaatggggtgaatgtcagg

SEQ ID NO: 1357 - DNA, 20 bp, synthetic construct
  misc_feature 1..20: note = chemically synthesized
  source 1..20: mol_type = other DNA
ggggtgaatgtcaggtggat

SEQ ID NO: 1358 - DNA, 20 bp, synthetic construct
  misc_feature 1..20: note = chemically synthesized
  source 1..20: mol_type = other DNA
ggtgaatgtcaggtggatca

SEQ ID NO: 1359 - DNA, 20 bp, synthetic construct
  misc_feature 1..20: note = chemically synthesized
  source 1..20: mol_type = other DNA
tgaatgtcaggtggatcaga

SEQ ID NO: 1360 - DNA, 20 bp, synthetic construct
  misc_feature 1..20: note = chemically synthesized
  source 1..20: mol_type = other DNA
ggatcagagagatacaatca

SEQ ID NO: 1361 - DNA, 20 bp, synthetic construct
  misc_feature 1..20: note = chemically synthesized
  source 1..20: mol_type = other DNA
gatcagagagatacaatcat

SEQ ID NO: 1362 - DNA, 20 bp, synthetic construct
  misc_feature 1..20: note = chemically synthesized
  source 1..20: mol_type = other DNA
atcagagagatacaatcatg

SEQ ID NO: 1363 - DNA, 20 bp, synthetic construct
  misc_feature 1..20: note = chemically synthesized
  source 1..20: mol_type = other DNA
tcagagagatacaatcatgg

SEQ ID NO: 1364 - DNA, 20 bp, synthetic construct
  misc_feature 1..20: note = chemically synthesized
  source 1..20: mol_type = other DNA
agagatacaatcatgggggt

SEQ ID NO: 1365 - DNA, 20 bp, synthetic construct
  misc_feature 1..20: note = chemically synthesized
  source 1..20: mol_type = other DNA
gagatacaatcatgggggtc

SEQ ID NO: 1366 - DNA, 20 bp, synthetic construct
  misc_feature 1..20: note = chemically synthesized
  source 1..20: mol_type = other DNA
acaatcatgggggtcaggtg

SEQ ID NO: 1367 - DNA, 20 bp, synthetic construct
  misc_feature 1..20: note = chemically synthesized
  source 1..20: mol_type = other DNA
atgggggtcaggtgtggtat

SEQ ID NO: 1368 - DNA, 20 bp, synthetic construct
  misc_feature 1..20: note = chemically synthesized
  source 1..20: mol_type = other DNA
tgggggtcaggtgtggtatc

SEQ ID NO: 1369 - DNA, 20 bp, synthetic construct
  misc_feature 1..20: note = chemically synthesized
  source 1..20: mol_type = other DNA
gtgtggtatcaggaataatg

SEQ ID NO: 1370 - DNA, 20 bp, synthetic construct
  misc_feature 1..20: note = chemically synthesized
  source 1..20: mol_type = other DNA
tgtggtatcaggaataatgt

SEQ ID NO: 1371 - DNA, 20 bp, synthetic construct
  misc_feature 1..20: note = chemically synthesized
  source 1..20: mol_type = other DNA
tggtatcaggaataatgtgg

SEQ ID NO: 1372 - DNA, 20 bp, synthetic construct
  misc_feature 1..20: note = chemically synthesized
  source 1..20: mol_type = other DNA
ggtatcaggaataatgtggg

SEQ ID NO: 1373 - DNA, 20 bp, synthetic construct
  misc_feature 1..20: note = chemically synthesized
  source 1..20: mol_type = other DNA
tcaggaataatgtgggaggc

SEQ ID NO: 1374 - DNA, 20 bp, synthetic construct
  misc_feature 1..20: note = chemically synthesized
  source 1..20: mol_type = other DNA
taatgtgggaggccggattg

SEQ ID NO: 1375 - DNA, 20 bp, synthetic construct
  misc_feature 1..20: note = chemically synthesized
  source 1..20: mol_type = other DNA
tgggaggccggattgaagtc

SEQ ID NO: 1376 - DNA, 20 bp, synthetic construct
  misc_feature 1..20: note = chemically synthesized
  source 1..20: mol_type = other DNA
gggaggccggattgaagtcc

SEQ ID NO: 1377 - DNA, 20 bp, synthetic construct
  misc_feature 1..20: note = chemically synthesized
  source 1..20: mol_type = other DNA
ggccggattgaagtccgggc

SEQ ID NO: 1378 - DNA, 20 bp, synthetic construct
  misc_feature 1..20: note = chemically synthesized
  source 1..20: mol_type = other DNA
gccggattgaagtccgggcc

SEQ ID NO: 1379 - DNA, 20 bp, synthetic construct
  misc_feature 1..20: note = chemically synthesized
  source 1..20: mol_type = other DNA
gaagtccgggccaggaccaa

SEQ ID NO: 1380 - DNA, 20 bp, synthetic construct
  misc_feature 1..20: note = chemically synthesized
  source 1..20: mol_type = other DNA
gccaggaccaatggtaattg

SEQ ID NO: 1381 - DNA, 20 bp, synthetic construct
  misc_feature 1..20: note = chemically synthesized
  source 1..20: mol_type = other DNA
ccaggaccaatggtaattgt

SEQ ID NO: 1382 - DNA, 20 bp, synthetic construct
  misc_feature 1..20: note = chemically synthesized
  source 1..20: mol_type = other DNA
ggtaattgtgggacttaaca

SEQ ID NO: 1383 - DNA, 20 bp, synthetic construct
  misc_feature 1..20: note = chemically synthesized
  source 1..20: mol_type = other DNA
taattgtgggacttaacaaa

SEQ ID NO: 1384 - DNA, 20 bp, synthetic construct
  misc_feature 1..20: note = chemically synthesized
  source 1..20: mol_type = other DNA
tgtgggacttaacaaagagt

SEQ ID NO: 1385 - DNA, 20 bp, synthetic construct
  misc_feature 1..20: note = chemically synthesized
  source 1..20: mol_type = other DNA
gacttaacaaagagtgagta

SEQ ID NO: 1386 - DNA, 20 bp, synthetic construct
  misc_feature 1..20: note = chemically synthesized
  source 1..20: mol_type = other DNA
acaaagagtgagtacagctg

SEQ ID NO: 1387 - DNA, 20 bp, synthetic construct
  misc_feature 1..20: note = chemically synthesized
  source 1..20: mol_type = other DNA
caaagagtgagtacagctga

SEQ ID NO: 1388 - DNA, 20 bp, synthetic construct
  misc_feature 1..20: note = chemically synthesized
  source 1..20: mol_type = other DNA
aagagtgagtacagctgaag

SEQ ID NO: 1389 - DNA, 20 bp, synthetic construct
  misc_feature 1..20: note = chemically synthesized
  source 1..20: mol_type = other DNA
gtgagtacagctgaaggagc

SEQ ID NO: 1390 - DNA, 20 bp, synthetic construct
  misc_feature 1..20: note = chemically synthesized
  source 1..20: mol_type = other DNA
tgagtacagctgaaggagcc

SEQ ID NO: 1391 - DNA, 20 bp, synthetic construct
  misc_feature 1..20: note = chemically synthesized
  source 1..20: mol_type = other DNA
gagtacagctgaaggagccg

SEQ ID NO: 1392 - DNA, 20 bp, synthetic construct
  misc_feature 1..20: note = chemically synthesized
  source 1..20: mol_type = other DNA
cagctgaaggagccggggat

SEQ ID NO: 1393 - DNA, 20 bp, synthetic construct
  misc_feature 1..20: note = chemically synthesized
  source 1..20: mol_type = other DNA
tgaaggagccggggatcaga

SEQ ID NO: 1394 - DNA, 20 bp, synthetic construct
  misc_feature 1..20: note = chemically synthesized
  source 1..20: mol_type = other DNA
ggatcagaaagtatatgcat

SEQ ID NO: 1395 - DNA, 20 bp, synthetic construct
  misc_feature 1..20: note = chemically synthesized
  source 1..20: mol_type = other DNA
gatcagaaagtatatgcatc

SEQ ID NO: 1396 - DNA, 20 bp, synthetic construct
  misc_feature 1..20: note = chemically synthesized
  source 1..20: mol_type = other DNA
aaagtatatgcatcaggtat

SEQ ID NO: 1397 - DNA, 20 bp, synthetic construct
  misc_feature 1..20: note = chemically synthesized
  source 1..20: mol_type = other DNA
aagtatatgcatcaggtatg

SEQ ID NO: 1398 - DNA, 20 bp, synthetic construct
  misc_feature 1..20: note = chemically synthesized
  source 1..20: mol_type = other DNA
tatatgcatcaggtatgagg

SEQ ID NO: 1399 - DNA, 20 bp, synthetic construct
  misc_feature 1..20: note = chemically synthesized
  source 1..20: mol_type = other DNA
atcaggtatgaggaagaaaa

SEQ ID NO: 1400 - DNA, 20 bp, synthetic construct
  misc_feature 1..20: note = chemically synthesized
  source 1..20: mol_type = other DNA
atgaggaagaaaatagattt

SEQ ID NO: 1401 - DNA, 20 bp, synthetic construct
  misc_feature 1..20: note = chemically synthesized
  source 1..20: mol_type = other DNA
aggaagaaaatagattttag

SEQ ID NO: 1402 - DNA, 20 bp, synthetic construct
  misc_feature 1..20: note = chemically synthesized
  source 1..20: mol_type = other DNA
aaatagattttagaagttat

SEQ ID NO: 1403 - DNA, 20 bp, synthetic construct
  misc_feature 1..20: note = chemically synthesized
  source 1..20: mol_type = other DNA
tagaagttatgagaaatgtg

SEQ ID NO: 1404 - DNA, 20 bp, synthetic construct
  misc_feature 1..20: note = chemically synthesized
  source 1..20: mol_type = other DNA
gaagttatgagaaatgtgaa

SEQ ID NO: 1405 - DNA, 20 bp, synthetic construct
  misc_feature 1..20: note = chemically synthesized
  source 1..20: mol_type = other DNA
ttatgagaaatgtgaagagt

SEQ ID NO: 1406 - DNA, 20 bp, synthetic construct
  misc_feature 1..20: note = chemically synthesized
  source 1..20: mol_type = other DNA
agaaatgtgaagagtgagct

SEQ ID NO: 1407 - DNA, 20 bp, synthetic construct
  misc_feature 1..20: note = chemically synthesized
  source 1..20: mol_type = other DNA
tgtgaagagtgagctaagca

SEQ ID NO: 1408 - DNA, 20 bp, synthetic construct
  misc_feature 1..20: note = chemically synthesized
  source 1..20: mol_type = other DNA
taagcatagtttgtgatttt

SEQ ID NO: 1409 - DNA, 20 bp, synthetic construct
  misc_feature 1..20: note = chemically synthesized
  source 1..20: mol_type = other DNA
aagcatagtttgtgattttt

SEQ ID NO: 1410 - DNA, 20 bp, synthetic construct
  misc_feature 1..20: note = chemically synthesized
  source 1..20: mol_type = other DNA
agcatagtttgtgattttta

SEQ ID NO: 1411 - DNA, 20 bp, synthetic construct
  misc_feature 1..20: note = chemically synthesized
  source 1..20: mol_type = other DNA
gtgatttttagggcctctaa

SEQ ID NO: 1412 - DNA, 20 bp, synthetic construct
  misc_feature 1..20: note = chemically synthesized
  source 1..20: mol_type = other DNA
tagggcctctaaaagtatta

SEQ ID NO: 1413 - DNA, 20 bp, synthetic construct
  misc_feature 1..20: note = chemically synthesized
  source 1..20: mol_type = other DNA
ggcctctaaaagtattaaag

SEQ ID NO: 1414 - DNA, 20 bp, synthetic construct
  misc_feature 1..20: note = chemically synthesized
  source 1..20: mol_type = other DNA
ctctaaaagtattaaagcag

SEQ ID NO: 1415 - DNA, 20 bp, synthetic construct
  misc_feature 1..20: note = chemically synthesized
  source 1..20: mol_type = other DNA
taaaagtattaaagcagcgg

SEQ ID NO: 1416 - DNA, 20 bp, synthetic construct
  misc_feature 1..20: note = chemically synthesized
  source 1..20: mol_type = other DNA
gcagcggcagccactgcatg

SEQ ID NO: 1417 - DNA, 20 bp, synthetic construct
  misc_feature 1..20: note = chemically synthesized
  source 1..20: mol_type = other DNA
cagccactgcatgcagacct

SEQ ID NO: 1418 - DNA, 20 bp, synthetic construct
  misc_feature 1..20: note = chemically synthesized
  source 1..20: mol_type = other DNA
agccactgcatgcagacctg

SEQ ID NO: 1419 - DNA, 20 bp, synthetic construct
  misc_feature 1..20: note = chemically synthesized
  source 1..20: mol_type = other DNA
gccactgcatgcagacctga

SEQ ID NO: 1420 - DNA, 20 bp, synthetic construct
  misc_feature 1..20: note = chemically synthesized
  source 1..20: mol_type = other DNA
ctgcatgcagacctgagggc

SEQ ID NO: 1421 - DNA, 20 bp, synthetic construct
  misc_feature 1..20: note = chemically synthesized
  source 1..20: mol_type = other DNA
tgcatgcagacctgagggct

SEQ ID NO: 1422 - DNA, 20 bp, synthetic construct
  misc_feature 1..20: note = chemically synthesized
  source 1..20: mol_type = other DNA
acctgagggctaggctaaaa

SEQ ID NO: 1423 - DNA, 20 bp, synthetic construct
  misc_feature 1..20: note = chemically synthesized
  source 1..20: mol_type = other DNA
gagggctaggctaaaacagt

SEQ ID NO: 1424 - DNA, 20 bp, synthetic construct
  misc_feature 1..20: note = chemically synthesized
  source 1..20: mol_type = other DNA
agggctaggctaaaacagta

SEQ ID NO: 1425 - DNA, 20 bp, synthetic construct
  misc_feature 1..20: note = chemically synthesized
  source 1..20: mol_type = other DNA
taggctaaaacagtaaggtc

SEQ ID NO: 1426 - DNA, 20 bp, synthetic construct
  misc_feature 1..20: note = chemically synthesized
  source 1..20: mol_type = other DNA
aacagtaaggtcaagttatt

SEQ ID NO: 1427 - DNA, 20 bp, synthetic construct
  misc_feature 1..20: note = chemically synthesized
  source 1..20: mol_type = other DNA
gtaaggtcaagttatttgga

SEQ ID NO: 1428 - DNA, 20 bp, synthetic construct
  misc_feature 1..20: note = chemically synthesized
  source 1..20: mol_type = other DNA
ggtcaagttatttggacaga

SEQ ID NO: 1429 - DNA, 20 bp, synthetic construct
  misc_feature 1..20: note = chemically synthesized
  source 1..20: mol_type = other DNA
gtcaagttatttggacagaa

SEQ ID NO: 1430 - DNA, 20 bp, synthetic construct
  misc_feature 1..20: note = chemically synthesized
  source 1..20: mol_type = other DNA
ttatttggacagaaaggcta

SEQ ID NO: 1431 - DNA, 20 bp, synthetic construct
  misc_feature 1..20: note = chemically synthesized
  source 1..20: mol_type = other DNA
tatttggacagaaaggctac

SEQ ID NO: 1432 - DNA, 20 bp, synthetic construct
  misc_feature 1..20: note = chemically synthesized
  source 1..20: mol_type = other DNA
atttggacagaaaggctaca

SEQ ID NO: 1433 - DNA, 20 bp, synthetic construct
  misc_feature 1..20: note = chemically synthesized
  source 1..20: mol_type = other DNA
gacagaaaggctacagggtg

SEQ ID NO: 1434 - DNA, 20 bp, synthetic construct
  misc_feature 1..20: note = chemically synthesized
  source 1..20: mol_type = other DNA
aaggctacagggtgcagtcc

SEQ ID NO: 1435 - DNA, 20 bp, synthetic construct
  misc_feature 1..20: note = chemically synthesized
  source 1..20: mol_type = other DNA
tgcagtcctggatcttgtgt

SEQ ID NO: 1436 - DNA, 20 bp, synthetic construct
  misc_feature 1..20: note = chemically synthesized
  source 1..20: mol_type = other DNA
ctgaccgcactaactatgcc

SEQ ID NO: 1437 - DNA, 20 bp, synthetic construct
  misc_feature 1..20: note = chemically synthesized
  source 1..20: mol_type = other DNA
tgaccgcactaactatgcct

SEQ ID NO: 1438 - DNA, 20 bp, synthetic construct
  misc_feature 1..20: note = chemically synthesized
  source 1..20: mol_type = other DNA
ccgcactaactatgcctagg

SEQ ID NO: 1439 - DNA, 20 bp, synthetic construct
  misc_feature 1..20: note = chemically synthesized
  source 1..20: mol_type = other DNA
cgcactaactatgcctagga

SEQ ID NO: 1440 - DNA, 20 bp, synthetic construct
  misc_feature 1..20: note = chemically synthesized
  source 1..20: mol_type = other DNA
ctaactatgcctaggaagga

SEQ ID NO: 1441 - DNA, 20 bp, synthetic construct
  misc_feature 1..20: note = chemically synthesized
  source 1..20: mol_type = other DNA
taactatgcctaggaaggaa

SEQ ID NO: 1442 - DNA, 20 bp, synthetic construct
  misc_feature 1..20: note = chemically synthesized
  source 1..20: mol_type = other DNA
actatgcctaggaaggaaag

SEQ ID NO: 1443 - DNA, 20 bp, synthetic construct
  misc_feature 1..20: note = chemically synthesized
  source 1..20: mol_type = other DNA
ggaaaggagttgttgttttg

SEQ ID NO: 1444 - DNA, 20 bp, synthetic construct
  misc_feature 1..20: note = chemically synthesized
  source 1..20: mol_type = other DNA
aaggagttgttgttttgtag

SEQ ID NO: 1445 - DNA, 20 bp, synthetic construct
  misc_feature 1..20: note = chemically synthesized
  source 1..20: mol_type = other DNA
aggagttgttgttttgtaga

SEQ ID NO: 1446 - DNA, 20 bp, synthetic construct
  misc_feature 1..20: note = chemically synthesized
  source 1..20: mol_type = other DNA
ggagttgttgttttgtagaa

SEQ ID NO: 1447 - DNA, 20 bp, synthetic construct
  misc_feature 1..20: note = chemically synthesized
  source 1..20: mol_type = other DNA
gttgttttgtagaagggatt

SEQ ID NO: 1448 - DNA, 20 bp, synthetic construct
  misc_feature 1..20: note = chemically synthesized
  source 1..20: mol_type = other DNA
ttgttttgtagaagggattg

SEQ ID NO: 1449 - DNA, 20 bp, synthetic construct
  misc_feature 1..20: note = chemically synthesized
  source 1..20: mol_type = other DNA
ttgtagaagggattgaggtt

SEQ ID NO: 1450 - DNA, 20 bp, synthetic construct
  misc_feature 1..20: note = chemically synthesized
  source 1..20: mol_type = other DNA
tgtagaagggattgaggttt

SEQ ID NO: 1451 - DNA, 20 bp, synthetic construct
  misc_feature 1..20: note = chemically synthesized
  source 1..20: mol_type = other DNA
tagaagggattgaggtttgg

SEQ ID NO: 1452 - DNA, 20 bp, synthetic construct
  misc_feature 1..20: note = chemically synthesized
  source 1..20: mol_type = other DNA
ttgaggtttgggagattaat

SEQ ID NO: 1453 - DNA, 20 bp, synthetic construct
  misc_feature 1..20: note = chemically synthesized
  source 1..20: mol_type = other DNA
ggagattaatcggacacaat

SEQ ID NO: 1454 - DNA, 20 bp, synthetic construct
  misc_feature 1..20: note = chemically synthesized
  source 1..20: mol_type = other DNA
gattaatcggacacaatcag

SEQ ID NO: 1455 - DNA, 20 bp, synthetic construct
  misc_feature 1..20: note = chemically synthesized
  source 1..20: mol_type = other DNA
attaatcggacacaatcagc

SEQ ID NO: 1456 - DNA, 20 bp, synthetic construct
  misc_feature 1..20: note = chemically synthesized
  source 1..20: mol_type = other DNA
ttaatcggacacaatcagca

SEQ ID NO: 1457 - DNA, 20 bp, synthetic construct
  misc_feature 1..20: note = chemically synthesized
  source 1..20: mol_type = other DNA
aatcggacacaatcagcagg

SEQ ID NO: 1458 - DNA, 20 bp, synthetic construct
  misc_feature 1..20: note = chemically synthesized
  source 1..20: mol_type = other DNA
tcggacacaatcagcaggga

SEQ ID NO: 1459 - DNA, 20 bp, synthetic construct
  misc_feature 1..20: note = chemically synthesized
  source 1..20: mol_type = other DNA
gagagcacgtgtgtttttat

SEQ ID NO: 1460 - DNA, 20 bp, synthetic construct
  misc_feature 1..20: note = chemically synthesized
  source 1..20: mol_type = other DNA
gtttttatgagaattatgcc

SEQ ID NO: 1461 - DNA, 20 bp, synthetic construct
  misc_feature 1..20: note = chemically synthesized
  source 1..20: mol_type = other DNA
ttatgagaattatgccgaga

SEQ ID NO: 1462 - DNA, 20 bp, synthetic construct
  misc_feature 1..20: note = chemically synthesized
  source 1..20: mol_type = other DNA
tatgagaattatgccgagat

SEQ ID NO: 1463 - DNA, 20 bp, synthetic construct
  misc_feature 1..20: note = chemically synthesized
  source 1..20: mol_type = other DNA
tgccgagataggtaacacat

SEQ ID NO: 1464 - DNA, 20 bp, synthetic construct
  misc_feature 1..20: note = chemically synthesized
  source 1..20: mol_type = other DNA
gccgagataggtaacacatg

SEQ ID NO: 1465 - DNA, 20 bp, synthetic construct
  misc_feature 1..20: note = chemically synthesized
  source 1..20: mol_type = other DNA
taacacatgaggatgaaatt

SEQ ID NO: 1466 - DNA, 20 bp, synthetic construct
  misc_feature 1..20: note = chemically synthesized
  source 1..20: mol_type = other DNA
aacacatgaggatgaaattt

SEQ ID NO: 1467 - DNA, 20 bp, synthetic construct
  misc_feature 1..20: note = chemically synthesized
  source 1..20: mol_type = other DNA
atgaaatttgggcttgactg

SEQ ID NO: 1468 - DNA, 20 bp, synthetic construct
  misc_feature 1..20: note = chemically synthesized
  source 1..20: mol_type = other DNA
tttgggcttgactgaagtaa

SEQ ID NO: 1469 - DNA, 20 bp, synthetic construct
  misc_feature 1..20: note = chemically synthesized
  source 1..20: mol_type = other DNA
ttgggcttgactgaagtaat

SEQ ID NO: 1470 - DNA, 20 bp, synthetic construct
  misc_feature 1..20: note = chemically synthesized
  source 1..20: mol_type = other DNA
tgggcttgactgaagtaatg

SEQ ID NO: 1471 - DNA, 20 bp, synthetic construct
  misc_feature 1..20: note = chemically synthesized
  source 1..20: mol_type = other DNA
agtaatggggtctgtctgtg

SEQ ID NO: 1472 - DNA, 20 bp, synthetic construct
  misc_feature 1..20: note = chemically synthesized
  source 1..20: mol_type = other DNA
ggtctgtctgtgaagccttg

SEQ ID NO: 1473 - DNA, 20 bp, synthetic construct
  misc_feature 1..20: note = chemically synthesized
  source 1..20: mol_type = other DNA
ctgtctgtgaagccttgcag

SEQ ID NO: 1474 - DNA, 20 bp, synthetic construct
  misc_feature 1..20: note = chemically synthesized
  source 1..20: mol_type = other DNA
tgtgaagccttgcagcagta

SEQ ID NO: 1475 - DNA, 20 bp, synthetic construct
  misc_feature 1..20: note = chemically synthesized
  source 1..20: mol_type = other DNA
agccttgcagcagtacagcc

SEQ ID NO: 1476 - DNA, 20 bp, synthetic construct
  misc_feature 1..20: note = chemically synthesized
  source 1..20: mol_type = other DNA
gccttgcagcagtacagccc

SEQ ID NO: 1477 - DNA, 20 bp, synthetic construct
  misc_feature 1..20: note = chemically synthesized
  source 1..20: mol_type = other DNA
tacagcccaggtaatttgct

SEQ ID NO: 1478 - DNA, 20 bp, synthetic construct
  misc_feature 1..20: note = chemically synthesized
  source 1..20: mol_type = other DNA
aggtaatttgctgagcctaa

SEQ ID NO: 1479 - DNA, 20 bp, synthetic construct
  misc_feature 1..20: note = chemically synthesized
  source 1..20: mol_type = other DNA
ggtaatttgctgagcctaat

SEQ ID NO: 1480 - DNA, 20 bp, synthetic construct
  misc_feature 1..20: note = chemically synthesized
  source 1..20: mol_type = other DNA
ttgctgagcctaatgggtgt

SEQ ID NO: 1481 - DNA, 20 bp, synthetic construct
  misc_feature 1..20: note = chemically synthesized
  source 1..20: mol_type = other DNA
agcctaatgggtgtcagtgt

SEQ ID NO: 1482 - DNA, 20 bp, synthetic construct
  misc_feature 1..20: note = chemically synthesized
  source 1..20: mol_type = other DNA
atgggtgtcagtgtcagtcc

SEQ ID NO: 1483 - DNA, 20 bp, synthetic construct
  misc_feature 1..20: note = chemically synthesized
  source 1..20: mol_type = other DNA
gtcagtgtcagtccaagtga

SEQ ID NO: 1484 - DNA, 20 bp, synthetic construct
  misc_feature 1..20: note = chemically synthesized
  source 1..20: mol_type = other DNA
tgtcagtccaagtgaaagcg

SEQ ID NO: 1485 - DNA, 20 bp, synthetic construct
  misc_feature 1..20: note = chemically synthesized
  source 1..20: mol_type = other DNA
tcagtccaagtgaaagcgaa

SEQ ID NO: 1486 - DNA, 20 bp, synthetic construct
  misc_feature 1..20: note = chemically synthesized
  source 1..20: mol_type = other DNA
agtccaagtgaaagcgaaga

SEQ ID NO: 1487 - DNA, 20 bp, synthetic construct
  misc_feature 1..20: note = chemically synthesized
  source 1..20: mol_type = other DNA
gtccaagtgaaagcgaagag

SEQ ID NO: 1488 - DNA, 20 bp, synthetic construct
  misc_feature 1..20: note = chemically synthesized
  source 1..20: mol_type = other DNA
aagtgaaagcgaagagaggc

SEQ ID NO: 1489 - DNA, 20 bp, synthetic construct
  misc_feature 1..20: note = chemically synthesized
  source 1..20: mol_type = other DNA
agcgaagagaggctggaatg

SEQ ID NO: 1490 - DNA, 20 bp, synthetic construct
  misc_feature 1..20: note = chemically synthesized
  source 1..20: mol_type = other DNA
gcgaagagaggctggaatga

SEQ ID NO: 1491 - DNA, 20 bp, synthetic construct
  misc_feature 1..20: note = chemically synthesized
  source 1..20: mol_type = other DNA
cgaagagaggctggaatgaa

SEQ ID NO: 1492 - DNA, 20 bp, synthetic construct
  misc_feature 1..20: note = chemically synthesized
  source 1..20: mol_type = other DNA
aggctggaatgaagggtgca

SEQ ID NO: 1493 - DNA, 20 bp, synthetic construct
  misc_feature 1..20: note = chemically synthesized
  source 1..20: mol_type = other DNA
ggctggaatgaagggtgcaa

SEQ ID NO: 1494 - DNA, 20 bp, synthetic construct
  misc_feature 1..20: note = chemically synthesized
  source 1..20: mol_type = other DNA
gaatgaagggtgcaaaggaa

SEQ ID NO: 1495 - DNA, 20 bp, synthetic construct
  misc_feature 1..20: note = chemically synthesized
  source 1..20: mol_type = other DNA
aagggtgcaaaggaatagta

SEQ ID NO: 1496 - DNA, 20 bp, synthetic construct
  misc_feature 1..20: note = chemically synthesized
  source 1..20: mol_type = other DNA
gtgcaaaggaatagtaaaga

SEQ ID NO: 1497 - DNA, 20 bp, synthetic construct
  misc_feature 1..20: note = chemically synthesized
  source 1..20: mol_type = other DNA
atagtaaagaaagcatgttt

SEQ ID NO: 1498 - DNA, 20 bp, synthetic construct
  misc_feature 1..20: note = chemically synthesized
  source 1..20: mol_type = other DNA
aagaaagcatgtttgagatc

SEQ ID NO: 1499 - DNA, 20 bp, synthetic construct
  misc_feature 1..20: note = chemically synthesized
  source 1..20: mol_type = other DNA
agcatgtttgagatccagaa

SEQ ID NO: 1500 - DNA, 20 bp, synthetic construct
  misc_feature 1..20: note = chemically synthesized
  source 1..20: mol_type = other DNA
tgagatccagaacagaataa

SEQ ID NO: 1501 - DNA, 20 bp, synthetic construct
  misc_feature 1..20: note = chemically synthesized
  source 1..20: mol_type = other DNA
gagatccagaacagaataat

SEQ ID NO: 1502 - DNA, 20 bp, synthetic construct
  misc_feature 1..20: note = chemically synthesized
  source 1..20: mol_type = other DNA
cagaacagaataatgggtta

SEQ ID NO: 1503 - DNA, 20 bp, synthetic construct
  misc_feature 1..20: note = chemically synthesized
  source 1..20: mol_type = other DNA
acagaataatgggttataga

SEQ ID NO: 1504 - DNA, 20 bp, synthetic construct
  misc_feature 1..20: note = chemically synthesized
  source 1..20: mol_type = other DNA
agaataatgggttatagatg

SEQ ID NO: 1505 - DNA, 20 bp, synthetic construct
  misc_feature 1..20: note = chemically synthesized
  source 1..20: mol_type = other DNA
gaataatgggttatagatgg

SEQ ID NO: 1506 - DNA, 20 bp, synthetic construct
  misc_feature 1..20: note = chemically synthesized
  source 1..20: mol_type = other DNA
gggttatagatggaggtatt

SEQ ID NO: 1507 - DNA, 20 bp, synthetic construct
  misc_feature 1..20: note = chemically synthesized
  source 1..20: mol_type = other DNA
ggttatagatggaggtattg

SEQ ID NO: 1508 - DNA, 20 bp, synthetic construct
  misc_feature 1..20: note = chemically synthesized
  source 1..20: mol_type = other DNA
atagatggaggtattgagga

SEQ ID NO: 1509 - DNA, 20 bp, synthetic construct
  misc_feature 1..20: note = chemically synthesized
  source 1..20: mol_type = other DNA
tagatggaggtattgaggat

SEQ ID NO: 1510 - DNA, 20 bp, synthetic construct
  misc_feature 1..20: note = chemically synthesized
  source 1..20: mol_type = other DNA
gatggaggtattgaggatag

SEQ ID NO: 1511 - DNA, 20 bp, synthetic construct
  misc_feature 1..20: note = chemically synthesized
  source 1..20: mol_type = other DNA
tggaggtattgaggatagga

SEQ ID NO: 1512 - DNA, 20 bp, synthetic construct
  misc_feature 1..20: note = chemically synthesized
  source 1..20: mol_type = other DNA
attgaggataggagagtata

SEQ ID NO: 1513 - DNA, 20 bp, synthetic construct
  misc_feature 1..20: note = chemically synthesized
  source 1..20: mol_type = other DNA
ttgaggataggagagtatat

SEQ ID NO: 1514 - DNA, 20 bp, synthetic construct
  misc_feature 1..20: note = chemically synthesized
  source 1..20: mol_type = other DNA
gataggagagtatatgggtt

SEQ ID NO: 1515 - DNA, 20 bp, synthetic construct
  misc_feature 1..20: note = chemically synthesized
  source 1..20: mol_type = other DNA
agtatatgggtttggcacca

SEQ ID NO: 1516 - DNA, 20 bp, synthetic construct
  misc_feature 1..20: note = chemically synthesized
  source 1..20: mol_type = other DNA
gtatatgggtttggcaccat

SEQ ID NO: 1517 - DNA, 20 bp, synthetic construct
  misc_feature 1..20: note = chemically synthesized
  source 1..20: mol_type = other DNA
tatatgggtttggcaccatg

SEQ ID NO: 1518 - DNA, 20 bp, synthetic construct
  misc_feature 1..20: note = chemically synthesized
  source 1..20: mol_type = other DNA
atgggtttggcaccatgggg

SEQ ID NO: 1519 - DNA, 20 bp, synthetic construct
  misc_feature 1..20: note = chemically synthesized
  source 1..20: mol_type = other DNA
gtttggcaccatggggtgga

SEQ ID NO: 1520 - DNA, 20 bp, synthetic construct
  misc_feature 1..20: note = chemically synthesized
  source 1..20: mol_type = other DNA
tttggcaccatggggtggat

SEQ ID NO: 1521 - DNA, 20 bp, synthetic construct
  misc_feature 1..20: note = chemically synthesized
  source 1..20: mol_type = other DNA
ggtggataggcaaaacaatt

SEQ ID NO: 1522 - DNA, 20 bp, synthetic construct
  misc_feature 1..20: note = chemically synthesized
  source 1..20: mol_type = other DNA
ggcaaaacaatttggttgat

SEQ ID NO: 1523 - DNA, 20 bp, synthetic construct
  misc_feature 1..20: note = chemically synthesized
  source 1..20: mol_type = other DNA
acaatttggttgataagatg

SEQ ID NO: 1524 - DNA, 20 bp, synthetic construct
  misc_feature 1..20: note = chemically synthesized
  source 1..20: mol_type = other DNA
cagattctgaactaacctgt

SEQ ID NO: 1525 - DNA, 20 bp, synthetic construct
  misc_feature 1..20: note = chemically synthesized
  source 1..20: mol_type = other DNA
agattctgaactaacctgta

SEQ ID NO: 1526 - DNA, 20 bp, synthetic construct
  misc_feature 1..20: note = chemically synthesized
  source 1..20: mol_type = other DNA
actaacctgtaaggcttgtc

SEQ ID NO: 1527 - DNA, 20 bp, synthetic construct
  misc_feature 1..20: note = chemically synthesized
  source 1..20: mol_type = other DNA
ctgtaaggcttgtctggttt

SEQ ID NO: 1528 - DNA, 20 bp, synthetic construct
  misc_feature 1..20: note = chemically synthesized
  source 1..20: mol_type = other DNA
tgtaaggcttgtctggtttt

SEQ ID NO: 1529 - DNA, 20 bp, synthetic construct
  misc_feature 1..20: note = chemically synthesized
  source 1..20: mol_type = other DNA
aggcttgtctggttttagga

SEQ ID NO: 1530 - DNA, 20 bp, synthetic construct
  misc_feature 1..20: note = chemically synthesized
  source 1..20: mol_type = other DNA
ggcttgtctggttttaggac

SEQ ID NO: 1531 - DNA, 20 bp, synthetic construct
  misc_feature 1..20: note = chemically synthesized
  source 1..20: mol_type = other DNA
tggttttaggacaggtaaaa

SEQ ID NO: 1532 - DNA, 20 bp, synthetic construct
  misc_feature 1..20: note = chemically synthesized
  source 1..20: mol_type = other DNA
ggttttaggacaggtaaaat

SEQ ID NO: 1533 - DNA, 20 bp, synthetic construct
  misc_feature 1..20: note = chemically synthesized
  source 1..20: mol_type = other DNA
gttttaggacaggtaaaatg

SEQ ID NO: 1534 - DNA, 20 bp, synthetic construct
  misc_feature 1..20: note = chemically synthesized
  source 1..20: mol_type = other DNA
ttttaggacaggtaaaatgg

SEQ ID NO: 1535 - DNA, 20 bp, synthetic construct
  misc_feature 1..20: note = chemically synthesized
  source 1..20: mol_type = other DNA
ggacaggtaaaatgggggaa

SEQ ID NO: 1536 - DNA, 20 bp, synthetic construct
  misc_feature 1..20: note = chemically synthesized
  source 1..20: mol_type = other DNA
aggtaaaatgggggaatggt

SEQ ID NO: 1537 - DNA, 20 bp, synthetic construct
  misc_feature 1..20: note = chemically synthesized
  source 1..20: mol_type = other DNA
ggtaaaatgggggaatggta

SEQ ID NO: 1538 - DNA, 20 bp, synthetic construct
  misc_feature 1..20: note = chemically synthesized
  source 1..20: mol_type = other DNA
taaaatgggggaatggtaag

SEQ ID NO: 1539 - DNA, 20 bp, synthetic construct
  misc_feature 1..20: note = chemically synthesized
  source 1..20: mol_type = other DNA
aaatgggggaatggtaagga

SEQ ID NO: 1540 - DNA, 20 bp, synthetic construct
  misc_feature 1..20: note = chemically synthesized
  source 1..20: mol_type = other DNA
ggaatggtaaggagagttta

SEQ ID NO: 1541 - DNA, 20 bp, synthetic construct
  misc_feature 1..20: note = chemically synthesized
  source 1..20: mol_type = other DNA
gaatggtaaggagagtttat

SEQ ID NO: 1542 - DNA, 20 bp, synthetic construct
  misc_feature 1..20: note = chemically synthesized
  source 1..20: mol_type = other DNA
ggagagtttataggctttaa

SEQ ID NO: 1543 - DNA, 20 bp, synthetic construct
  misc_feature 1..20: note = chemically synthesized
  source 1..20: mol_type = other DNA
gagagtttataggctttaaa

SEQ ID NO: 1544 - DNA, 20 bp, synthetic construct
  misc_feature 1..20: note = chemically synthesized
  source 1..20: mol_type = other DNA
tttaaaaggccatgctgtaa

SEQ ID NO: 1545 - DNA, 20 bp, synthetic construct
  misc_feature 1..20: note = chemically synthesized
  source 1..20: mol_type = other DNA
ttaaaaggccatgctgtaac

SEQ ID NO: 1546 - DNA, 20 bp, synthetic construct
  misc_feature 1..20: note = chemically synthesized
  source 1..20: mol_type = other DNA
aaggccatgctgtaacaggc

SEQ ID NO: 1547 - DNA, 20 bp, synthetic construct
  misc_feature 1..20: note = chemically synthesized
  source 1..20: mol_type = other DNA
ctgtaacaggcaagtaataa

SEQ ID NO: 1548 - DNA, 20 bp, synthetic construct
  misc_feature 1..20: note = chemically synthesized
  source 1..20: mol_type = other DNA
tgtaacaggcaagtaataac

SEQ ID NO: 1549 - DNA, 20 bp, synthetic construct
  misc_feature 1..20: note = chemically synthesized
  source 1..20: mol_type = other DNA
aacaggctttaatcctttca

SEQ ID NO: 1550 - DNA, 20 bp, synthetic construct
  misc_feature 1..20: note = chemically synthesized
  source 1..20: mol_type = other DNA
aatcctttcaaagcatgctg

SEQ ID NO: 1551 - DNA, 20 bp, synthetic construct
  misc_feature 1..20: note = chemically synthesized
  source 1..20: mol_type = other DNA
atcctttcaaagcatgctgt

SEQ ID NO: 1552 - DNA, 20 bp, synthetic construct
  misc_feature 1..20: note = chemically synthesized
  source 1..20: mol_type = other DNA
tttcaaagcatgctgtggga

SEQ ID NO: 1553 - DNA, 20 bp, synthetic construct
  misc_feature 1..20: note = chemically synthesized
  source 1..20: mol_type = other DNA
ttcaaagcatgctgtgggat

SEQ ID NO: 1554 - DNA, 20 bp, synthetic construct
  misc_feature 1..20: note = chemically synthesized
  source 1..20: mol_type = other DNA
catgctgtgggatgggatac

SEQ ID NO: 1555 - DNA, 20 bp, synthetic construct
  misc_feature 1..20: note = chemically synthesized
  source 1..20: mol_type = other DNA
tgggatgggatactggcatt

SEQ ID NO: 1556 - DNA, 20 bp, synthetic construct
  misc_feature 1..20: note = chemically synthesized
  source 1..20: mol_type = other DNA
gatgggatactggcattgag

SEQ ID NO: 1557 - DNA, 20 bp, synthetic construct
  misc_feature 1..20: note = chemically synthesized
  source 1..20: mol_type = other DNA
atgggatactggcattgagc

SEQ ID NO: 1558 - DNA, 20 bp, synthetic construct
  misc_feature 1..20: note = chemically synthesized
  source 1..20: mol_type = other DNA
tgggatactggcattgagcg

SEQ ID NO: 1559 - DNA, 20 bp, synthetic construct
  misc_feature 1..20: note = chemically synthesized
  source 1..20: mol_type = other DNA
atactggcattgagcggggt

SEQ ID NO: 1560 - DNA, 20 bp, synthetic construct
  misc_feature 1..20: note = chemically synthesized
  source 1..20: mol_type = other DNA
actggcattgagcggggtaa

SEQ ID NO: 1561 - DNA, 20 bp, synthetic construct
  misc_feature 1..20: note = chemically synthesized
  source 1..20: mol_type = other DNA
ttgagcggggtaagagtgat

SEQ ID NO: 1562 - DNA, 20 bp, synthetic construct
  misc_feature 1..20: note = chemically synthesized
  source 1..20: mol_type = other DNA
tgagcggggtaagagtgatt

SEQ ID NO: 1563 - DNA, 20 bp, synthetic construct
  misc_feature 1..20: note = chemically synthesized
  source 1..20: mol_type = other DNA
taagagtgattaggttttaa

SEQ ID NO: 1564 - DNA, 20 bp, synthetic construct
  misc_feature 1..20: note = chemically synthesized
  source 1..20: mol_type = other DNA
aagagtgattaggttttaat

SEQ ID NO: 1565 - DNA, 20 bp, synthetic construct
  misc_feature 1..20: note = chemically synthesized
  source 1..20: mol_type = other DNA
gtgattaggttttaatggga

SEQ ID NO: 1566 - DNA, 20 bp, synthetic construct
  misc_feature 1..20: note = chemically synthesized
  source 1..20: mol_type = other DNA
ttaggttttaatgggatggt

SEQ ID NO: 1567 - DNA, 20 bp, synthetic construct
  misc_feature 1..20: note = chemically synthesized
  source 1..20: mol_type = other DNA
taggttttaatgggatggta

SEQ ID NO: 1568 - DNA, 20 bp, synthetic construct
  misc_feature 1..20: note = chemically synthesized
  source 1..20: mol_type = other DNA
aggttttaatgggatggtaa

SEQ ID NO: 1569 - DNA, 20 bp, synthetic construct
  misc_feature 1..20: note = chemically synthesized
  source 1..20: mol_type = other DNA
ggttttaatgggatggtaag

SEQ ID NO: 1570 - DNA, 20 bp, synthetic construct
  misc_feature 1..20: note = chemically synthesized
  source 1..20: mol_type = other DNA
gatggtaaggggcgcatgat

SEQ ID NO: 1571 - DNA, 20 bp, synthetic construct
  misc_feature 1..20: note = chemically synthesized
  source 1..20: mol_type = other DNA
ggggcgcatgatcggtcgcg

SEQ ID NO: 1572 - DNA, 20 bp, synthetic construct
  misc_feature 1..20: note = chemically synthesized
  source 1..20: mol_type = other DNA
gggcgcatgatcggtcgcga

SEQ ID NO: 1573 - DNA, 20 bp, synthetic construct
  misc_feature 1..20: note = chemically synthesized
  source 1..20: mol_type = other DNA
gcgcatgatcggtcgcgaag

SEQ ID NO: 1574 - DNA, 20 bp, synthetic construct
  misc_feature 1..20: note = chemically synthesized
  source 1..20: mol_type = other DNA
cgcatgatcggtcgcgaagg

SEQ ID NO: 1575 - DNA, 20 bp, synthetic construct
  misc_feature 1..20: note = chemically synthesized
  source 1..20: mol_type = other DNA
atgatcggtcgcgaaggagg

SEQ ID NO: 1576 - DNA, 20 bp, synthetic construct
  misc_feature 1..20: note = chemically synthesized
  source 1..20: mol_type = other DNA
atcggtcgcgaaggaggaag

SEQ ID NO: 1577 - DNA, 20 bp, synthetic construct
  misc_feature 1..20: note = chemically synthesized
  source 1..20: mol_type = other DNA
cggtcgcgaaggaggaagta

SEQ ID NO: 1578 - DNA, 20 bp, synthetic construct
  misc_feature 1..20: note = chemically synthesized
  source 1..20: mol_type = other DNA
ggtcgcgaaggaggaagtag

SEQ ID NO: 1579 - DNA, 20 bp, synthetic construct
  misc_feature 1..20: note = chemically synthesized
  source 1..20: mol_type = other DNA
gtagaggtgtcttatacttg

SEQ ID NO: 1580 - DNA, 20 bp, synthetic construct
  misc_feature 1..20: note = chemically synthesized
  source 1..20: mol_type = other DNA
gtgtcttatacttgtggatt

SEQ ID NO: 1581 - DNA, 20 bp, synthetic construct
  misc_feature 1..20: note = chemically synthesized
  source 1..20: mol_type = other DNA
tgtcttatacttgtggatta

SEQ ID NO: 1582 - DNA, 20 bp, synthetic construct
  misc_feature 1..20: note = chemically synthesized
  source 1..20: mol_type = other DNA
cttatacttgtggattaagg

SEQ ID NO: 1583 - DNA, 20 bp, synthetic construct
  misc_feature 1..20: note = chemically synthesized
  source 1..20: mol_type = other DNA
ttatacttgtggattaaggt

SEQ ID NO: 1584 - DNA, 20 bp, synthetic construct
  misc_feature 1..20: note = chemically synthesized
  source 1..20: mol_type = other DNA
tatacttgtggattaaggtg

SEQ ID NO: 1585 - DNA, 20 bp, synthetic construct
  misc_feature 1..20: note = chemically synthesized
  source 1..20: mol_type = other DNA
tacttgtggattaaggtggg

SEQ ID NO: 1586 - DNA, 20 bp, synthetic construct
  misc_feature 1..20: note = chemically synthesized
  source 1..20: mol_type = other DNA
ggattaaggtggggagatac

SEQ ID NO: 1587 - DNA, 20 bp, synthetic construct
  misc_feature 1..20: note = chemically synthesized
  source 1..20: mol_type = other DNA
gattaaggtggggagataca

SEQ ID NO: 1588 - DNA, 20 bp, synthetic construct
  misc_feature 1..20: note = chemically synthesized
  source 1..20: mol_type = other DNA
attaaggtggggagatacaa

SEQ ID NO: 1589 - DNA, 20 bp, synthetic construct
  misc_feature 1..20: note = chemically synthesized
  source 1..20: mol_type = other DNA
ttaaggtggggagatacaag

SEQ ID NO: 1590 - DNA, 20 bp, synthetic construct
  misc_feature 1..20: note = chemically synthesized
  source 1..20: mol_type = other DNA
aaggtggggagatacaaggg

SEQ ID NO: 1591 - DNA, 20 bp, synthetic construct
  misc_feature 1..20: note = chemically synthesized
  source 1..20: mol_type = other DNA
aggtggggagatacaagggg

SEQ ID NO: 1592 - DNA, 20 bp, synthetic construct
  misc_feature 1..20: note = chemically synthesized
  source 1..20: mol_type = other DNA
agatacaaggggaggatgtg

SEQ ID NO: 1593 - DNA, 20 bp, synthetic construct
  misc_feature 1..20: note = chemically synthesized
  source 1..20: mol_type = other DNA
gatacaaggggaggatgtga

SEQ ID NO: 1594 - DNA, 20 bp, synthetic construct
  misc_feature 1..20: note = chemically synthesized
  source 1..20: mol_type = other DNA
tacaaggggaggatgtgaag

SEQ ID NO: 1595 - DNA, 20 bp, synthetic construct
  misc_feature 1..20: note = chemically synthesized
  source 1..20: mol_type = other DNA
acaaggggaggatgtgaagg

SEQ ID NO: 1596 - DNA, 20 bp, synthetic construct
  misc_feature 1..20: note = chemically synthesized
  source 1..20: mol_type = other DNA
atgtgaaggaggctttgaac

SEQ ID NO: 1597 - DNA, 20 bp, synthetic construct
  misc_feature 1..20: note = chemically synthesized
  source 1..20: mol_type = other DNA
tgtgaaggaggctttgaact

SEQ ID NO: 1598 - DNA, 20 bp, synthetic construct
  misc_feature 1..20: note = chemically synthesized
  source 1..20: mol_type = other DNA
gtgaaggaggctttgaactg

SEQ ID NO: 1599 - DNA, 20 bp, synthetic construct
  misc_feature 1..20: note = chemically synthesized
  source 1..20: mol_type = other DNA
tgaaggaggctttgaactgg

SEQ ID NO: 1600 - DNA, 20 bp, synthetic construct
  misc_feature 1..20: note = chemically synthesized
  source 1..20: mol_type = other DNA
ctttgaactgggggaaaaca

SEQ ID NO: 1601 - DNA, 20 bp, synthetic construct
  misc_feature 1..20: note = chemically synthesized
  source 1..20: mol_type = other DNA
ctgggggaaaacatggcaat

SEQ ID NO: 1602 - DNA, 20 bp, synthetic construct
  misc_feature 1..20: note = chemically synthesized
  source 1..20: mol_type = other DNA
tgggggaaaacatggcaatg

SEQ ID NO: 1603 - DNA, 20 bp, synthetic construct
  misc_feature 1..20: note = chemically synthesized
  source 1..20: mol_type = other DNA
gaaaacatggcaatgaggta

SEQ ID NO: 1604 - DNA, 20 bp, synthetic construct
  misc_feature 1..20: note = chemically synthesized
  source 1..20: mol_type = other DNA
atggcaatgaggtatggctg

SEQ ID NO: 1605 - DNA, 20 bp, synthetic construct
  misc_feature 1..20: note = chemically synthesized
  source 1..20: mol_type = other DNA
aatgaggtatggctgtagcc

SEQ ID NO: 1606 - DNA, 20 bp, synthetic construct
  misc_feature 1..20: note = chemically synthesized
  source 1..20: mol_type = other DNA
atgaggtatggctgtagccc

SEQ ID NO: 1607 - DNA, 20 bp, synthetic construct
  misc_feature 1..20: note = chemically synthesized
  source 1..20: mol_type = other DNA
gtatggctgtagcccaggaa

SEQ ID NO: 1608 - DNA, 20 bp, synthetic construct
  misc_feature 1..20: note = chemically synthesized
  source 1..20: mol_type = other DNA
ggctgtagcccaggaatagt

SEQ ID NO: 1609 - DNA, 20 bp, synthetic construct
  misc_feature 1..20: note = chemically synthesized
  source 1..20: mol_type = other DNA
gctgtagcccaggaatagtc

SEQ ID NO: 1610 - DNA, 20 bp, synthetic construct
  misc_feature 1..20: note = chemically synthesized
  source 1..20: mol_type = other DNA
ctgtagcccaggaatagtca

SEQ ID NO: 1611 - DNA, 20 bp, synthetic construct
  misc_feature 1..20: note = chemically synthesized
  source 1..20: mol_type = other DNA
tagcccaggaatagtcaggg

SEQ ID NO: 1612 - DNA, 20 bp, synthetic construct
  misc_feature 1..20: note = chemically synthesized
  source 1..20: mol_type = other DNA
cccaggaatagtcagggaag

SEQ ID NO: 1613 - DNA, 20 bp, synthetic construct
  misc_feature 1..20: note = chemically synthesized
  source 1..20: mol_type = other DNA
agtcagggaagcagataatt

SEQ ID NO: 1614 - DNA, 20 bp, synthetic construct
  misc_feature 1..20: note = chemically synthesized
  source 1..20: mol_type = other DNA
ggaagcagataatttagtta

SEQ ID NO: 1615 - DNA, 20 bp, synthetic construct
  misc_feature 1..20: note = chemically synthesized
  source 1..20: mol_type = other DNA
ataatttagttaaagtgtct

SEQ ID NO: 1616 - DNA, 20 bp, synthetic construct
  misc_feature 1..20: note = chemically synthesized
  source 1..20: mol_type = other DNA
ttaaagtgtctcggcctaat

SEQ ID NO: 1617 - DNA, 20 bp, synthetic construct
  misc_feature 1..20: note = chemically synthesized
  source 1..20: mol_type = other DNA
taaagtgtctcggcctaata

SEQ ID NO: 1618 - DNA, 20 bp, synthetic construct
  misc_feature 1..20: note = chemically synthesized
  source 1..20: mol_type = other DNA
aaagtgtctcggcctaataa

SEQ ID NO: 1619 - DNA, 20 bp, synthetic construct
  misc_feature 1..20: note = chemically synthesized
  source 1..20: mol_type = other DNA
tctcggcctaataagggaac

SEQ ID NO: 1620 - DNA, 20 bp, synthetic construct
  misc_feature 1..20: note = chemically synthesized
  source 1..20: mol_type = other DNA
cggcctaataagggaactgg

SEQ ID NO: 1621 - DNA, 20 bp, synthetic construct
  misc_feature 1..20: note = chemically synthesized
  source 1..20: mol_type = other DNA
ggcctaataagggaactggc

SEQ ID NO: 1622 - DNA, 20 bp, synthetic construct
  misc_feature 1..20: note = chemically synthesized
  source 1..20: mol_type = other DNA
ctaataagggaactggcagg

SEQ ID NO: 1623 - DNA, 20 bp, synthetic construct
  misc_feature 1..20: note = chemically synthesized
  source 1..20: mol_type = other DNA
taataagggaactggcaggt

SEQ ID NO: 1624 - DNA, 20 bp, synthetic construct
  misc_feature 1..20: note = chemically synthesized
  source 1..20: mol_type = other DNA
aataagggaactggcaggtg

SEQ ID NO: 1625 - DNA, 20 bp, synthetic construct
  misc_feature 1..20: note = chemically synthesized
  source 1..20: mol_type = other DNA
ggcaggtggggataatgaaa

SEQ ID NO: 1626 - DNA, 20 bp, synthetic construct
  misc_feature 1..20: note = chemically synthesized
  source 1..20: mol_type = other DNA
gcaggtggggataatgaaaa

SEQ ID NO: 1627 - DNA, 20 bp, synthetic construct
  misc_feature 1..20: note = chemically synthesized
  source 1..20: mol_type = other DNA
aggtggggataatgaaaaag

SEQ ID NO: 1628 - DNA, 20 bp, synthetic construct
  misc_feature 1..20: note = chemically synthesized
  source 1..20: mol_type = other DNA
aatgaaaaaggagtgcttaa

SEQ ID NO: 1629 - DNA, 20 bp, synthetic construct
  misc_feature 1..20: note = chemically synthesized
  source 1..20: mol_type = other DNA
tgaaaaaggagtgcttaaaa

SEQ ID NO: 1630 - DNA, 20 bp, synthetic construct
  misc_feature 1..20: note = chemically synthesized
  source 1..20: mol_type = other DNA
tgcttaaaagagtatcgtct

SEQ ID NO: 1631 - DNA, 20 bp, synthetic construct
  misc_feature 1..20: note = chemically synthesized
  source 1..20: mol_type = other DNA
taaaagagtatcgtctcggt

SEQ ID NO: 1632 - DNA, 20 bp, synthetic construct
  misc_feature 1..20: note = chemically synthesized
  source 1..20: mol_type = other DNA
agtatcgtctcggttagcac

SEQ ID NO: 1633 - DNA, 20 bp, synthetic construct
  misc_feature 1..20: note = chemically synthesized
  source 1..20: mol_type = other DNA
tatcgtctcggttagcacca

SEQ ID NO: 1634 - DNA, 20 bp, synthetic construct
  misc_feature 1..20: note = chemically synthesized
  source 1..20: mol_type = other DNA
gtctcggttagcaccagagt

SEQ ID NO: 1635 - DNA, 20 bp, synthetic construct
  misc_feature 1..20: note = chemically synthesized
  source 1..20: mol_type = other DNA
tctcggttagcaccagagtt

SEQ ID NO: 1636 - DNA, 20 bp, synthetic construct
  misc_feature 1..20: note = chemically synthesized
  source 1..20: mol_type = other DNA
ctcggttagcaccagagttg

SEQ ID NO: 1637 - DNA, 20 bp, synthetic construct
  misc_feature 1..20: note = chemically synthesized
  source 1..20: mol_type = other DNA
caccagagttggggaatttt

SEQ ID NO: 1638 - DNA, 20 bp, synthetic construct
  misc_feature 1..20: note = chemically synthesized
  source 1..20: mol_type = other DNA
ccagagttggggaattttaa

SEQ ID NO: 1639 - DNA, 20 bp, synthetic construct
  misc_feature 1..20: note = chemically synthesized
  source 1..20: mol_type = other DNA
cagagttggggaattttaag

SEQ ID NO: 1640 - DNA, 20 bp, synthetic construct
  misc_feature 1..20: note = chemically synthesized
  source 1..20: mol_type = other DNA
ttggggaattttaagaggtt

SEQ ID NO: 1641 - DNA, 20 bp, synthetic construct
  misc_feature 1..20: note = chemically synthesized
  source 1..20: mol_type = other DNA
gggaattttaagaggtttag

SEQ ID NO: 1642 - DNA, 20 bp, synthetic construct
  misc_feature 1..20: note = chemically synthesized
  source 1..20: mol_type = other DNA
ttttaagaggtttagaagcc

SEQ ID NO: 1643 - DNA, 20 bp, synthetic construct
  misc_feature 1..20: note = chemically synthesized
  source 1..20: mol_type = other DNA
ctggccatcaatacctacaa

SEQ ID NO: 1644 - DNA, 20 bp, synthetic construct
  misc_feature 1..20: note = chemically synthesized
  source 1..20: mol_type = other DNA
atcaatacctacaacagtta

SEQ ID NO: 1645 - DNA, 20 bp, synthetic construct
  misc_feature 1..20: note = chemically synthesized
  source 1..20: mol_type = other DNA
caatacctacaacagttatg

SEQ ID NO: 1646 - DNA, 20 bp, synthetic construct
  misc_feature 1..20: note = chemically synthesized
  source 1..20: mol_type = other DNA
aatacctacaacagttatgg

SEQ ID NO: 1647 - DNA, 20 bp, synthetic construct
  misc_feature 1..20: note = chemically synthesized
  source 1..20: mol_type = other DNA
cctacaacagttatggaggc

SEQ ID NO: 1648 - DNA, 20 bp, synthetic construct
  misc_feature 1..20: note = chemically synthesized
  source 1..20: mol_type = other DNA
ctacaacagttatggaggca

SEQ ID NO: 1649 - DNA, 20 bp, synthetic construct
  misc_feature 1..20: note = chemically synthesized
  source 1..20: mol_type = other DNA
tacaacagttatggaggcaa

SEQ ID NO: 1650 - DNA, 20 bp, synthetic construct
  misc_feature 1..20: note = chemically synthesized
  source 1..20: mol_type = other DNA
agttatggaggcaagggaaa

SEQ ID NO: 1651 - DNA, 20 bp, synthetic construct
  misc_feature 1..20: note = chemically synthesized
  source 1..20: mol_type = other DNA
gttatggaggcaagggaaac

SEQ ID NO: 1652 - DNA, 20 bp, synthetic construct
  misc_feature 1..20: note = chemically synthesized
  source 1..20: mol_type = other DNA
aagggaaacaggcctttgaa

SEQ ID NO: 1653 - DNA, 20 bp, synthetic construct
  misc_feature 1..20: note = chemically synthesized
  source 1..20: mol_type = other DNA
ggaaacaggcctttgaaaag

SEQ ID NO: 1654 - DNA, 20 bp, synthetic construct
  misc_feature 1..20: note = chemically synthesized
  source 1..20: mol_type = other DNA
gaaacaggcctttgaaaaga

SEQ ID NO: 1655 - DNA, 20 bp, synthetic construct
  misc_feature 1..20: note = chemically synthesized
  source 1..20: mol_type = other DNA
cctttgaaaagaaggtaatg

SEQ ID NO: 1656 - DNA, 20 bp, synthetic construct
  misc_feature 1..20: note = chemically synthesized
  source 1..20: mol_type = other DNA
tttgaaaagaaggtaatgtg

SEQ ID NO: 1657 - DNA, 20 bp, synthetic construct
  misc_feature 1..20: note = chemically synthesized
  source 1..20: mol_type = other DNA
gaaaagaaggtaatgtggag

SEQ ID NO: 1658 - DNA, 20 bp, synthetic construct
  misc_feature 1..20: note = chemically synthesized
  source 1..20: mol_type = other DNA
aaaagaaggtaatgtggagt

SEQ ID NO: 1659 - DNA, 20 bp, synthetic construct
  misc_feature 1..20: note = chemically synthesized
  source 1..20: mol_type = other DNA
agaaggtaatgtggagtggg

SEQ ID NO: 1660 - DNA, 20 bp, synthetic construct
  misc_feature 1..20: note = chemically synthesized
  source 1..20: mol_type = other DNA
gggtagcctccatactgatt

SEQ ID NO: 1661 - DNA, 20 bp, synthetic construct
  misc_feature 1..20: note = chemically synthesized
  source 1..20: mol_type = other DNA
tagcctccatactgattaag

SEQ ID NO: 1662 - DNA, 20 bp, synthetic construct
  misc_feature 1..20: note = chemically synthesized
  source 1..20: mol_type = other DNA
agcctccatactgattaaga

SEQ ID NO: 1663 - DNA, 20 bp, synthetic construct
  misc_feature 1..20: note = chemically synthesized
  source 1..20: mol_type = other DNA
gcctccatactgattaagaa

SEQ ID NO: 1664 - DNA, 20 bp, synthetic construct
  misc_feature 1..20: note = chemically synthesized
  source 1..20: mol_type = other DNA
catactgattaagaagggta

SEQ ID NO: 1665 - DNA, 20 bp, synthetic construct
  misc_feature 1..20: note = chemically synthesized
  source 1..20: mol_type = other DNA
acagacttaccctccactgt

SEQ ID NO: 1666 - DNA, 20 bp, synthetic construct
  misc_feature 1..20: note = chemically synthesized
  source 1..20: mol_type = other DNA
tccactgtgagaattaccta

SEQ ID NO: 1667 - DNA, 20 bp, synthetic construct
  misc_feature 1..20: note = chemically synthesized
  source 1..20: mol_type = other DNA
tgtgagaattacctaaagct

SEQ ID NO: 1668 - DNA, 20 bp, synthetic construct
  misc_feature 1..20: note = chemically synthesized
  source 1..20: mol_type = other DNA
ctaaagctcggtgtctgtga

SEQ ID NO: 1669 - DNA, 20 bp, synthetic construct
  misc_feature 1..20: note = chemically synthesized
  source 1..20: mol_type = other DNA
tcggtgtctgtgatggtcta

SEQ ID NO: 1670 - DNA, 20 bp, synthetic construct
  misc_feature 1..20: note = chemically synthesized
  source 1..20: mol_type = other DNA
cggtgtctgtgatggtctac

SEQ ID NO: 1671 - DNA, 20 bp, synthetic construct
  misc_feature 1..20: note = chemically synthesized
  source 1..20: mol_type = other DNA
ggtgtctgtgatggtctaca

SEQ ID NO: 1672 - DNA, 20 bp, synthetic construct
  misc_feature 1..20: note = chemically synthesized
  source 1..20: mol_type = other DNA
tgatggtctacagggcttcc

SEQ ID NO: 1673 - DNA, 20 bp, synthetic construct
  misc_feature 1..20: note = chemically synthesized
  source 1..20: mol_type = other DNA
gatggtctacagggcttccg

SEQ ID NO: 1674 - DNA, 20 bp, synthetic construct
  misc_feature 1..20: note = chemically synthesized
  source 1..20: mol_type = other DNA
tacagggcttccgaggcgat

SEQ ID NO: 1675 - DNA, 20 bp, synthetic construct
  misc_feature 1..20: note = chemically synthesized
  source 1..20: mol_type = other DNA
acagggcttccgaggcgatc

SEQ ID NO: 1676 - DNA, 20 bp, synthetic construct
  misc_feature 1..20: note = chemically synthesized
  source 1..20: mol_type = other DNA
gggcttccgaggcgatcagg

SEQ ID NO: 1677 - DNA, 20 bp, synthetic construct
  misc_feature 1..20: note = chemically synthesized
  source 1..20: mol_type = other DNA
cttccgaggcgatcaggcag

SEQ ID NO: 1678 - DNA, 20 bp, synthetic construct
  misc_feature 1..20: note = chemically synthesized
  source 1..20: mol_type = other DNA
ccgaggcgatcaggcagtgg

SEQ ID NO: 1679 - DNA, 20 bp, synthetic construct
  misc_feature 1..20: note = chemically synthesized
  source 1..20: mol_type = other DNA
gatcaggcagtggcagtctt

SEQ ID NO: 1680 - DNA, 20 bp, synthetic construct
  misc_feature 1..20: note = chemically synthesized
  source 1..20: mol_type = other DNA
agtggcagtcttcagctgca

SEQ ID NO: 1681 - DNA, 20 bp, synthetic construct
  misc_feature 1..20: note = chemically synthesized
  source 1..20: mol_type = other DNA
cagtcttcagctgcaaagcc

SEQ ID NO: 1682 - DNA, 20 bp, synthetic construct
  misc_feature 1..20: note = chemically synthesized
  source 1..20: mol_type = other DNA
tcttcagctgcaaagccgag

SEQ ID NO: 1683 - DNA, 20 bp, synthetic construct
  misc_feature 1..20: note = chemically synthesized
  source 1..20: mol_type = other DNA
gctgcaaagccgagaagatc

SEQ ID NO: 1684 - DNA, 20 bp, synthetic construct
  misc_feature 1..20: note = chemically synthesized
  source 1..20: mol_type = other DNA
ctgcaaagccgagaagatct

SEQ ID NO: 1685 - DNA, 20 bp, synthetic construct
  misc_feature 1..20: note = chemically synthesized
  source 1..20: mol_type = other DNA
caaagccgagaagatctggg

SEQ ID NO: 1686 - DNA, 20 bp, synthetic construct
  misc_feature 1..20: note = chemically synthesized
  source 1..20: mol_type = other DNA
aaagccgagaagatctggga

SEQ ID NO: 1687 - DNA, 20 bp, synthetic construct
  misc_feature 1..20: note = chemically synthesized
  source 1..20: mol_type = other DNA
agccgagaagatctgggaag

SEQ ID NO: 1688 - DNA, 20 bp, synthetic construct
  misc_feature 1..20: note = chemically synthesized
  source 1..20: mol_type = other DNA
gagaagatctgggaaggagt

SEQ ID NO: 1689 - DNA, 20 bp, synthetic construct
  misc_feature 1..20: note = chemically synthesized
  source 1..20: mol_type = other DNA
agatctgggaaggagtcagt

SEQ ID NO: 1690 - DNA, 20 bp, synthetic construct
  misc_feature 1..20: note = chemically synthesized
  source 1..20: mol_type = other DNA
gatctgggaaggagtcagtc

SEQ ID NO: 1691 - DNA, 20 bp, synthetic construct
  misc_feature 1..20: note = chemically synthesized
  source 1..20: mol_type = other DNA
atctgggaaggagtcagtca

SEQ ID NO: 1692 - DNA, 20 bp, synthetic construct
  misc_feature 1..20: note = chemically synthesized
  source 1..20: mol_type = other DNA
ctgggaaggagtcagtcagg

SEQ ID NO: 1693 - DNA, 20 bp, synthetic construct
  misc_feature 1..20: note = chemically synthesized
  source 1..20: mol_type = other DNA
aggagtcagtcagggagcct

SEQ ID NO: 1694 - DNA, 20 bp, synthetic construct
  misc_feature 1..20: note = chemically synthesized
  source 1..20: mol_type = other DNA
ggagtcagtcagggagcctt

SEQ ID NO: 1695 - DNA, 20 bp, synthetic construct
  misc_feature 1..20: note = chemically synthesized
  source 1..20: mol_type = other DNA
tcagtcagggagccttgggc

SEQ ID NO: 1696 - DNA, 20 bp, synthetic construct
  misc_feature 1..20: note = chemically synthesized
  source 1..20: mol_type = other DNA
agtcagggagccttgggcca

SEQ ID NO: 1697 - DNA, 20 bp, synthetic construct
  misc_feature 1..20: note = chemically synthesized
  source 1..20: mol_type = other DNA
ggagccttgggccagagttc

SEQ ID NO: 1698 - DNA, 20 bp, synthetic construct
  misc_feature 1..20: note = chemically synthesized
  source 1..20: mol_type = other DNA
gagccttgggccagagttcc

SEQ ID NO: 1699 - DNA, 20 bp, synthetic construct
  misc_feature 1..20: note = chemically synthesized
  source 1..20: mol_type = other DNA
agccttgggccagagttcca

SEQ ID NO: 1700 - DNA, 20 bp, synthetic construct
  misc_feature 1..20: note = chemically synthesized
  source 1..20: mol_type = other DNA
gccttgggccagagttccag

SEQ ID NO: 1701 - DNA, 20 bp, synthetic construct
  misc_feature 1..20: note = chemically synthesized
  source 1..20: mol_type = other DNA
ggccagagttccaggggctc

SEQ ID NO: 1702 - DNA, 20 bp, synthetic construct
  misc_feature 1..20: note = chemically synthesized
  source 1..20: mol_type = other DNA
gccagagttccaggggctct

SEQ ID NO: 1703 - DNA, 20 bp, synthetic construct
  misc_feature 1..20: note = chemically synthesized
  source 1..20: mol_type = other DNA
cagagttccaggggctctag

SEQ ID NO: 1704 - DNA, 20 bp, synthetic construct
  misc_feature 1..20: note = chemically synthesized
  source 1..20: mol_type = other DNA
agttccaggggctctaggag

SEQ ID NO: 1705 - DNA, 20 bp, synthetic construct
  misc_feature 1..20: note = chemically synthesized
  source 1..20: mol_type = other DNA
ggggctctaggagtggctgc

SEQ ID NO: 1706 - DNA, 20 bp, synthetic construct
  misc_feature 1..20: note = chemically synthesized
  source 1..20: mol_type = other DNA
gggctctaggagtggctgcc

SEQ ID NO: 1707 - DNA, 20 bp, synthetic construct
  misc_feature 1..20: note = chemically synthesized
  source 1..20: mol_type = other DNA
tctaggagtggctgccaggt

SEQ ID NO: 1708 - DNA, 20 bp, synthetic construct
  misc_feature 1..20: note = chemically synthesized
  source 1..20: mol_type = other DNA
tggctgccaggtgagttgaa

SEQ ID NO: 1709 - DNA, 20 bp, synthetic construct
  misc_feature 1..20: note = chemically synthesized
  source 1..20: mol_type = other DNA
gagttgaacagtccgatttc

SEQ ID NO: 1710 - DNA, 20 bp, synthetic construct
  misc_feature 1..20: note = chemically synthesized
  source 1..20: mol_type = other DNA
ttgaacagtccgatttctag

SEQ ID NO: 1711 - DNA, 20 bp, synthetic construct
  misc_feature 1..20: note = chemically synthesized
  source 1..20: mol_type = other DNA
tgaacagtccgatttctagt

SEQ ID NO: 1712 - DNA, 20 bp, synthetic construct
  misc_feature 1..20: note = chemically synthesized
  source 1..20: mol_type = other DNA
gaacagtccgatttctagtg

SEQ ID NO: 1713 - DNA, 20 bp, synthetic construct
  misc_feature 1..20: note = chemically synthesized
  source 1..20: mol_type = other DNA
atttctagtggggtcctgca

SEQ ID NO: 1714 - DNA, 20 bp, synthetic construct
  misc_feature 1..20: note = chemically synthesized
  source 1..20: mol_type = other DNA
ctagtggggtcctgcacaga

SEQ ID NO: 1715 - DNA, 20 bp, synthetic construct
  misc_feature 1..20: note = chemically synthesized
  source 1..20: mol_type = other DNA
tagtggggtcctgcacagat

SEQ ID NO: 1716 - DNA, 20 bp, synthetic construct
  misc_feature 1..20: note = chemically synthesized
  source 1..20: mol_type = other DNA
ggtcctgcacagatgggaca

SEQ ID NO: 1717 - DNA, 20 bp, synthetic construct
  misc_feature 1..20: note = chemically synthesized
  source 1..20: mol_type = other DNA
tgcacagatgggacacggct

SEQ ID NO: 1718 - DNA, 20 bp, synthetic construct
  misc_feature 1..20: note = chemically synthesized
  source 1..20: mol_type = other DNA
gcacagatgggacacggctt

SEQ ID NO: 1719 - DNA, 20 bp, synthetic construct
  misc_feature 1..20: note = chemically synthesized
  source 1..20: mol_type = other DNA
acagatgggacacggcttag

SEQ ID NO: 1720 - DNA, 20 bp, synthetic construct
  misc_feature 1..20: note = chemically synthesized
  source 1..20: mol_type = other DNA
cagatgggacacggcttagg

SEQ ID NO: 1721 - DNA, 20 bp, synthetic construct
  misc_feature 1..20: note = chemically synthesized
  source 1..20: mol_type = other DNA
acacggcttaggaggaatcc

SEQ ID NO: 1722 - DNA, 20 bp, synthetic construct
  misc_feature 1..20: note = chemically synthesized
  source 1..20: mol_type = other DNA
cacggcttaggaggaatcct

SEQ ID NO: 1723 - DNA, 20 bp, synthetic construct
  misc_feature 1..20: note = chemically synthesized
  source 1..20: mol_type = other DNA
ttaggaggaatcctgggctg

SEQ ID NO: 1724 - DNA, 20 bp, synthetic construct
  misc_feature 1..20: note = chemically synthesized
  source 1..20: mol_type = other DNA
taggaggaatcctgggctgc

SEQ ID NO: 1725 - DNA, 20 bp, synthetic construct
  misc_feature 1..20: note = chemically synthesized
  source 1..20: mol_type = other DNA
cctgggctgcgggcattcct

SEQ ID NO: 1726 - DNA, 20 bp, synthetic construct
  misc_feature 1..20: note = chemically synthesized
  source 1..20: mol_type = other DNA
gctgcgggcattccttggcc

SEQ ID NO: 1727 - DNA, 20 bp, synthetic construct
  misc_feature 1..20: note = chemically synthesized
  source 1..20: mol_type = other DNA
gcgggcattccttggcctgg

SEQ ID NO: 1728 - DNA, 20 bp, synthetic construct
  misc_feature 1..20: note = chemically synthesized
  source 1..20: mol_type = other DNA
gcattccttggcctggtggc

SEQ ID NO: 1729 - DNA, 20 bp, synthetic construct
  misc_feature 1..20: note = chemically synthesized
  source 1..20: mol_type = other DNA
tggcctggtggccagatttc

SEQ ID NO: 1730 - DNA, 20 bp, synthetic construct
  misc_feature 1..20: note = chemically synthesized
  source 1..20: mol_type = other DNA
ggccagatttctggcacttg

SEQ ID NO: 1731 - DNA, 20 bp, synthetic construct
  misc_feature 1..20: note = chemically synthesized
  source 1..20: mol_type = other DNA
agatttctggcacttgtagc

SEQ ID NO: 1732 - DNA, 20 bp, synthetic construct
  misc_feature 1..20: note = chemically synthesized
  source 1..20: mol_type = other DNA
tggcacttgtagcaagctcc

SEQ ID NO: 1733 - DNA, 20 bp, synthetic construct
  misc_feature 1..20: note = chemically synthesized
  source 1..20: mol_type = other DNA
ggcacttgtagcaagctcct

SEQ ID NO: 1734 - DNA, 20 bp, synthetic construct
  misc_feature 1..20: note = chemically synthesized
  source 1..20: mol_type = other DNA
gcacttgtagcaagctcctg

SEQ ID NO: 1735 - DNA, 20 bp, synthetic construct
  misc_feature 1..20: note = chemically synthesized
  source 1..20: mol_type = other DNA
cacttgtagcaagctcctgg

SEQ ID NO: 1736 - DNA, 20 bp, synthetic construct
  misc_feature 1..20: note = chemically synthesized
  source 1..20: mol_type = other DNA
cttgtagcaagctcctgggg

SEQ ID NO: 1737 - DNA, 20 bp, synthetic construct
  misc_feature 1..20: note = chemically synthesized
  source 1..20: mol_type = other DNA
ttgtagcaagctcctggggg

SEQ ID NO: 1738 - DNA, 20 bp, synthetic construct
  misc_feature 1..20: note = chemically synthesized
  source 1..20: mol_type = other DNA
tagcaagctcctgggggagg

SEQ ID NO: 1739 - DNA, 20 bp, synthetic construct
  misc_feature 1..20: note = chemically synthesized
  source 1..20: mol_type = other DNA
gctcctgggggaggtggttc

SEQ ID NO: 1740 - DNA, 20 bp, synthetic construct
  misc_feature 1..20: note = chemically synthesized
  source 1..20: mol_type = other DNA
tcctgggggaggtggttccg

SEQ ID NO: 1741 - DNA, 20 bp, synthetic construct
  misc_feature 1..20: note = chemically synthesized
  source 1..20: mol_type = other DNA
cctgggggaggtggttccgg

SEQ ID NO: 1742 - DNA, 20 bp, synthetic construct
  misc_feature 1..20: note = chemically synthesized
  source 1..20: mol_type = other DNA
ggtggttccggaggaacgcc

SEQ ID NO: 1743 - DNA, 20 bp, synthetic construct
  misc_feature 1..20: note = chemically synthesized
  source 1..20: mol_type = other DNA
ggaggaacgcctggccactg

SEQ ID NO: 1744 - DNA, 20 bp, synthetic construct
  misc_feature 1..20: note = chemically synthesized
  source 1..20: mol_type = other DNA
aacgcctggccactgcggtt

SEQ ID NO: 1745 - DNA, 20 bp, synthetic construct
  misc_feature 1..20: note = chemically synthesized
  source 1..20: mol_type = other DNA
acgcctggccactgcggttt

SEQ ID NO: 1746 - DNA, 20 bp, synthetic construct
  misc_feature 1..20: note = chemically synthesized
  source 1..20: mol_type = other DNA
gccactgcggtttaggcatt

SEQ ID NO: 1747 - DNA, 20 bp, synthetic construct
  misc_feature 1..20: note = chemically synthesized
  source 1..20: mol_type = other DNA
actgcggtttaggcatttgg

SEQ ID NO: 1748 - DNA, 20 bp, synthetic construct
  misc_feature 1..20: note = chemically synthesized
  source 1..20: mol_type = other DNA
atttggaagttcttgtgtgc

SEQ ID NO: 1749 - DNA, 20 bp, synthetic construct
  misc_feature 1..20: note = chemically synthesized
  source 1..20: mol_type = other DNA
ttggaagttcttgtgtgctg

SEQ ID NO: 1750 - DNA, 20 bp, synthetic construct
  misc_feature 1..20: note = chemically synthesized
  source 1..20: mol_type = other DNA
gttcttgtgtgctggagatg

SEQ ID NO: 1751 - DNA, 20 bp, synthetic construct
  misc_feature 1..20: note = chemically synthesized
  source 1..20: mol_type = other DNA
ttgtgtgctggagatgtggc

SEQ ID NO: 1752 - DNA, 20 bp, synthetic construct
  misc_feature 1..20: note = chemically synthesized
  source 1..20: mol_type = other DNA
tgtgtgctggagatgtggct

SEQ ID NO: 1753 - DNA, 20 bp, synthetic construct
  misc_feature 1..20: note = chemically synthesized
  source 1..20: mol_type = other DNA
gtgtgctggagatgtggctg

SEQ ID NO: 1754 - DNA, 20 bp, synthetic construct
  misc_feature 1..20: note = chemically synthesized
  source 1..20: mol_type = other DNA
tgtggctggggtttgtctca

SEQ ID NO: 1755 - DNA, 20 bp, synthetic construct
  misc_feature 1..20: note = chemically synthesized
  source 1..20: mol_type = other DNA
ggctggggtttgtctcacag

SEQ ID NO: 1756 - DNA, 20 bp, synthetic construct
  misc_feature 1..20: note = chemically synthesized
  source 1..20: mol_type = other DNA
ctggggtttgtctcacagtg

SEQ ID NO: 1757 - DNA, 20 bp, synthetic construct
  misc_feature 1..20: note = chemically synthesized
  source 1..20: mol_type = other DNA
tggggtttgtctcacagtgg

SEQ ID NO: 1758 - DNA, 20 bp, synthetic construct
  misc_feature 1..20: note = chemically synthesized
  source 1..20: mol_type = other DNA
gtttgtctcacagtggaggc

SEQ ID NO: 1759 - DNA, 20 bp, synthetic construct
  misc_feature 1..20: note = chemically synthesized
  source 1..20: mol_type = other DNA
tttgtctcacagtggaggca

SEQ ID NO: 1760 - DNA, 20 bp, synthetic construct
  misc_feature 1..20: note = chemically synthesized
  source 1..20: mol_type = other DNA
ctcaaaaatatgttgctact

SEQ ID NO: 1761 - DNA, 20 bp, synthetic construct
  misc_feature 1..20: note = chemically synthesized
  source 1..20: mol_type = other DNA
ctctattattgtacaccttg

SEQ ID NO: 1762 - DNA, 20 bp, synthetic construct
  misc_feature 1..20: note = chemically synthesized
  source 1..20: mol_type = other DNA
tctattattgtacaccttga

SEQ ID NO: 1763 - DNA, 20 bp, synthetic construct
  misc_feature 1..20: note = chemically synthesized
  source 1..20: mol_type = other DNA
ttattgtacaccttgaaggt

SEQ ID NO: 1764 - DNA, 20 bp, synthetic construct
  misc_feature 1..20: note = chemically synthesized
  source 1..20: mol_type = other DNA
tattgtacaccttgaaggtg

SEQ ID NO: 1765 - DNA, 20 bp, synthetic construct
  misc_feature 1..20: note = chemically synthesized
  source 1..20: mol_type = other DNA
ccttgaaggtgaggttaatt

SEQ ID NO: 1766 - DNA, 20 bp, synthetic construct
  misc_feature 1..20: note = chemically synthesized
  source 1..20: mol_type = other DNA
aggttaattgagtcctgttg

SEQ ID NO: 1767 - DNA, 20 bp, synthetic construct
  misc_feature 1..20: note = chemically synthesized
  source 1..20: mol_type = other DNA
ggttaattgagtcctgttgt

SEQ ID NO: 1768 - DNA, 20 bp, synthetic construct
  misc_feature 1..20: note = chemically synthesized
  source 1..20: mol_type = other DNA
gttaattgagtcctgttgtg

SEQ ID NO: 1769 - DNA, 20 bp, synthetic construct
  misc_feature 1..20: note = chemically synthesized
  source 1..20: mol_type = other DNA
tgagtcctgttgtggggttt

SEQ ID NO: 1770 - DNA, 20 bp, synthetic construct
  misc_feature 1..20: note = chemically synthesized
  source 1..20: mol_type = other DNA
gagtcctgttgtggggtttg

SEQ ID NO: 1771 - DNA, 20 bp, synthetic construct
  misc_feature 1..20: note = chemically synthesized
  source 1..20: mol_type = other DNA
ctgttgtggggtttgaggtc

SEQ ID NO: 1772 - DNA, 20 bp, synthetic construct
  misc_feature 1..20: note = chemically synthesized
  source 1..20: mol_type = other DNA
gaggtccagaatttaatttt

SEQ ID NO: 1773 - DNA, 20 bp, synthetic construct
  misc_feature 1..20: note = chemically synthesized
  source 1..20: mol_type = other DNA
ggtccagaatttaatttttg

SEQ ID NO: 1774 - DNA, 20 bp, synthetic construct
  misc_feature 1..20: note = chemically synthesized
  source 1..20: mol_type = other DNA
tttggagttttatttaatgt

SEQ ID NO: 1775 - DNA, 20 bp, synthetic construct
  misc_feature 1..20: note = chemically synthesized
  source 1..20: mol_type = other DNA
ttggagttttatttaatgtc

SEQ ID NO: 1776 - DNA, 20 bp, synthetic construct
  misc_feature 1..20: note = chemically synthesized
  source 1..20: mol_type = other DNA
ggagttttatttaatgtcag

SEQ ID NO: 1777 - DNA, 20 bp, synthetic construct
  misc_feature 1..20: note = chemically synthesized
  source 1..20: mol_type = other DNA
gttttatttaatgtcaggag

SEQ ID NO: 1778 - DNA, 20 bp, synthetic construct
  misc_feature 1..20: note = chemically synthesized
  source 1..20: mol_type = other DNA
atttaatgtcaggagcagat

SEQ ID NO: 1779 - DNA, 20 bp, synthetic construct
  misc_feature 1..20: note = chemically synthesized
  source 1..20: mol_type = other DNA
tttaatgtcaggagcagatt

SEQ ID NO: 1780 - DNA, 20 bp, synthetic construct
  misc_feature 1..20: note = chemically synthesized
  source 1..20: mol_type = other DNA
tgggtaataaaatgtatatt

SEQ ID NO: 1781 - DNA, 20 bp, synthetic construct
  misc_feature 1..20: note = chemically synthesized
  source 1..20: mol_type = other DNA
taaaatgtatattgagaata

SEQ ID NO: 1782 - DNA, 20 bp, synthetic construct
  misc_feature 1..20: note = chemically synthesized
  source 1..20: mol_type = other DNA
aatgtatattgagaataaag

SEQ ID NO: 1783 - DNA, 20 bp, synthetic construct
  misc_feature 1..20: note = chemically synthesized
  source 1..20: mol_type = other DNA
aaagtggccttttgtccttt

SEQ ID NO: 1784 - DNA, 20 bp, synthetic construct
  misc_feature 1..20: note = chemically synthesized
  source 1..20: mol_type = other DNA
aagtggccttttgtcctttt

SEQ ID NO: 1785 - DNA, 20 bp, synthetic construct
  misc_feature 1..20: note = chemically synthesized
  source 1..20: mol_type = other DNA
agtggccttttgtcctttta

SEQ ID NO: 1786 - DNA, 20 bp, synthetic construct
  misc_feature 1..20: note = chemically synthesized
  source 1..20: mol_type = other DNA
ccttttgtccttttagggtc

SEQ ID NO: 1787 - DNA, 20 bp, synthetic construct
  misc_feature 1..20: note = chemically synthesized
  source 1..20: mol_type = other DNA
cttttgtccttttagggtct

SEQ ID NO: 1788 - DNA, 20 bp, synthetic construct
  misc_feature 1..20: note = chemically synthesized
  source 1..20: mol_type = other DNA
ttttgtccttttagggtcta

SEQ ID NO: 1789 - DNA, 20 bp, synthetic construct
  misc_feature 1..20: note = chemically synthesized
  source 1..20: mol_type = other DNA
ttttagggtctagggctgta

SEQ ID NO: 1790 - DNA, 20 bp, synthetic construct
  misc_feature 1..20: note = chemically synthesized
  source 1..20: mol_type = other DNA
tctagggctgtaaagcgtct

SEQ ID NO: 1791 - DNA, 20 bp, synthetic construct
  misc_feature 1..20: note = chemically synthesized
  source 1..20: mol_type = other DNA
ctagggctgtaaagcgtctc

SEQ ID NO: 1792 - DNA, 20 bp, synthetic construct
  misc_feature 1..20: note = chemically synthesized
  source 1..20: mol_type = other DNA
tagggctgtaaagcgtctca

SEQ ID NO: 1793 - DNA, 20 bp, synthetic construct
  misc_feature 1..20: note = chemically synthesized
  source 1..20: mol_type = other DNA
tctcagggttgctgccgaac

SEQ ID NO: 1794 - DNA, 20 bp, synthetic construct
  misc_feature 1..20: note = chemically synthesized
  source 1..20: mol_type = other DNA
ctgccgaacgagccatgaac

SEQ ID NO: 1795 - DNA, 20 bp, synthetic construct
  misc_feature 1..20: note = chemically synthesized
  source 1..20: mol_type = other DNA
tgccgaacgagccatgaact

SEQ ID NO: 1796 - DNA, 20 bp, synthetic construct
  misc_feature 1..20: note = chemically synthesized
  source 1..20: mol_type = other DNA
gaacgagccatgaactgggc

SEQ ID NO: 1797 - DNA, 20 bp, synthetic construct
  misc_feature 1..20: note = chemically synthesized
  source 1..20: mol_type = other DNA
aacgagccatgaactgggct

SEQ ID NO: 1798 - DNA, 20 bp, synthetic construct
  misc_feature 1..20: note = chemically synthesized
  source 1..20: mol_type = other DNA
gggtttttcatatttgatga

SEQ ID NO: 1799 - DNA, 20 bp, synthetic construct
  misc_feature 1..20: note = chemically synthesized
  source 1..20: mol_type = other DNA
gtttttcatatttgatgaaa

SEQ ID NO: 1800 - DNA, 20 bp, synthetic construct
  misc_feature 1..20: note = chemically synthesized
  source 1..20: mol_type = other DNA
agagcctaaacgctctgatt

SEQ ID NO: 1801 - DNA, 20 bp, synthetic construct
  misc_feature 1..20: note = chemically synthesized
  source 1..20: mol_type = other DNA
gagcctaaacgctctgattc

SEQ ID NO: 1802 - DNA, 20 bp, synthetic construct
  misc_feature 1..20: note = chemically synthesized
  source 1..20: mol_type = other DNA
gcctaaacgctctgattcgg

SEQ ID NO: 1803 - DNA, 20 bp, synthetic construct
  misc_feature 1..20: note = chemically synthesized
  source 1..20: mol_type = other DNA
ctaaacgctctgattcggga

SEQ ID NO: 1804 - DNA, 20 bp, synthetic construct
  misc_feature 1..20: note = chemically synthesized
  source 1..20: mol_type = other DNA
taaacgctctgattcgggag

SEQ ID NO: 1805 - DNA, 20 bp, synthetic construct
  misc_feature 1..20: note = chemically synthesized
  source 1..20: mol_type = other DNA
cgctctgattcgggagaggt

SEQ ID NO: 1806 - DNA, 20 bp, synthetic construct
  misc_feature 1..20: note = chemically synthesized
  source 1..20: mol_type = other DNA
gattcgggagaggtcggata

SEQ ID NO: 1807 - DNA, 20 bp, synthetic construct
  misc_feature 1..20: note = chemically synthesized
  source 1..20: mol_type = other DNA
ggagaggtcggataaagaaa

SEQ ID NO: 1808 - DNA, 20 bp, synthetic construct
  misc_feature 1..20: note = chemically synthesized
  source 1..20: mol_type = other DNA
gagaggtcggataaagaaaa

SEQ ID NO: 1809 - DNA, 20 bp, synthetic construct
  misc_feature 1..20: note = chemically synthesized
  source 1..20: mol_type = other DNA
gaggtcggataaagaaaaag

SEQ ID NO: 1810 - DNA, 20 bp, synthetic construct
  misc_feature 1..20: note = chemically synthesized
  source 1..20: mol_type = other DNA
attaaccttgactacgcctt

SEQ ID NO: 1811 - DNA, 20 bp, synthetic construct
  misc_feature 1..20: note = chemically synthesized
  source 1..20: mol_type = other DNA
cttgactacgcctttagctt

SEQ ID NO: 1812 - DNA, 20 bp, synthetic construct
  misc_feature 1..20: note = chemically synthesized
  source 1..20: mol_type = other DNA
agcttcagccaccttcttaa

SEQ ID NO: 1813 - DNA, 20 bp, synthetic construct
  misc_feature 1..20: note = chemically synthesized
  source 1..20: mol_type = other DNA
gcttcagccaccttcttaat

SEQ ID NO: 1814 - DNA, 20 bp, synthetic construct
  misc_feature 1..20: note = chemically synthesized
  source 1..20: mol_type = other DNA
ccttcttaataggaaattgc

SEQ ID NO: 1815 - DNA, 20 bp, synthetic construct
  misc_feature 1..20: note = chemically synthesized
  source 1..20: mol_type = other DNA
cttcttaataggaaattgct

SEQ ID NO: 1816 - DNA, 20 bp, synthetic construct
  misc_feature 1..20: note = chemically synthesized
  source 1..20: mol_type = other DNA
cttaataggaaattgctggg

SEQ ID NO: 1817 - DNA, 20 bp, synthetic construct
  misc_feature 1..20: note = chemically synthesized
  source 1..20: mol_type = other DNA
ttaataggaaattgctgggc

SEQ ID NO: 1818 - DNA, 20 bp, synthetic construct
  misc_feature 1..20: note = chemically synthesized
  source 1..20: mol_type = other DNA
taggaaattgctgggcaggt

SEQ ID NO: 1819 - DNA, 20 bp, synthetic construct
  misc_feature 1..20: note = chemically synthesized
  source 1..20: mol_type = other DNA
aggaaattgctgggcaggtt

SEQ ID NO: 1820 - DNA, 20 bp, synthetic construct
  misc_feature 1..20: note = chemically synthesized
  source 1..20: mol_type = other DNA
ggaaattgctgggcaggttg

SEQ ID NO: 1821 - DNA, 20 bp, synthetic construct
  misc_feature 1..20: note = chemically synthesized
  source 1..20: mol_type = other DNA
aaattgctgggcaggttggg

SEQ ID NO: 1822 - DNA, 20 bp, synthetic construct
  misc_feature 1..20: note = chemically synthesized
  source 1..20: mol_type = other DNA
aattgctgggcaggttgggg

SEQ ID NO: 1823 - DNA, 20 bp, synthetic construct
  misc_feature 1..20: note = chemically synthesized
  source 1..20: mol_type = other DNA
attgctgggcaggttgggga

SEQ ID NO: 1824 - DNA, 20 bp, synthetic construct
  misc_feature 1..20: note = chemically synthesized
  source 1..20: mol_type = other DNA
ctgggcaggttggggagggc

SEQ ID NO: 1825 - DNA, 20 bp, synthetic construct
  misc_feature 1..20: note = chemically synthesized
  source 1..20: mol_type = other DNA
aggttggggagggctagtca

SEQ ID NO: 1826 - DNA, 20 bp, synthetic construct
  misc_feature 1..20: note = chemically synthesized
  source 1..20: mol_type = other DNA
cacggaatgaaactgtaaac

SEQ ID NO: 1827 - DNA, 20 bp, synthetic construct
  misc_feature 1..20: note = chemically synthesized
  source 1..20: mol_type = other DNA
aatgaaactgtaaaccggac

SEQ ID NO: 1828 - DNA, 20 bp, synthetic construct
  misc_feature 1..20: note = chemically synthesized
  source 1..20: mol_type = other DNA
atgaaactgtaaaccggacc

SEQ ID NO: 1829 - DNA, 20 bp, synthetic construct
  misc_feature 1..20: note = chemically synthesized
  source 1..20: mol_type = other DNA
ctgtaaaccggaccgggtgt

SEQ ID NO: 1830 - DNA, 20 bp, synthetic construct
  misc_feature 1..20: note = chemically synthesized
  source 1..20: mol_type = other DNA
tgtaaaccggaccgggtgtg

SEQ ID NO: 1831 - DNA, 20 bp, synthetic construct
  misc_feature 1..20: note = chemically synthesized
  source 1..20: mol_type = other DNA
taaaccggaccgggtgtgag

SEQ ID NO: 1832 - DNA, 20 bp, synthetic construct
  misc_feature 1..20: note = chemically synthesized
  source 1..20: mol_type = other DNA
aaaccggaccgggtgtgagg

SEQ ID NO: 1833 - DNA, 20 bp, synthetic construct
  misc_feature 1..20: note = chemically synthesized
  source 1..20: mol_type = other DNA
aaccggaccgggtgtgagga

SEQ ID NO: 1834 - DNA, 20 bp, synthetic construct
  misc_feature 1..20: note = chemically synthesized
  source 1..20: mol_type = other DNA
accggaccgggtgtgaggag

SEQ ID NO: 1835 - DNA, 20 bp, synthetic construct
  misc_feature 1..20: note = chemically synthesized
  source 1..20: mol_type = other DNA
cggaccgggtgtgaggaggg

SEQ ID NO: 1836 - DNA, 20 bp, synthetic construct
  misc_feature 1..20: note = chemically synthesized
  source 1..20: mol_type = other DNA
ggaccgggtgtgaggagggg

SEQ ID NO: 1837 - DNA, 20 bp, synthetic construct
  misc_feature 1..20: note = chemically synthesized
  source 1..20: mol_type = other DNA
tgaggaggggaggtgataaa

SEQ ID NO: 1838 - DNA, 20 bp, synthetic construct
  misc_feature 1..20: note = chemically synthesized
  source 1..20: mol_type = other DNA
gggaggtgataaaaagatta

SEQ ID NO: 1839 - DNA, 20 bp, synthetic construct
  misc_feature 1..20: note = chemically synthesized
  source 1..20: mol_type = other DNA
ggaggtgataaaaagattac

SEQ ID NO: 1840 - DNA, 20 bp, synthetic construct
  misc_feature 1..20: note = chemically synthesized
  source 1..20: mol_type = other DNA
gaggtgataaaaagattaca

SEQ ID NO: 1841 - DNA, 20 bp, synthetic construct
  misc_feature 1..20: note = chemically synthesized
  source 1..20: mol_type = other DNA
gtgataaaaagattacaggg

SEQ ID NO: 1842 - DNA, 20 bp, synthetic construct
  misc_feature 1..20: note = chemically synthesized
  source 1..20: mol_type = other DNA
gataaaaagattacagggtg

SEQ ID NO: 1843 - DNA, 20 bp, synthetic construct
  misc_feature 1..20: note = chemically synthesized
  source 1..20: mol_type = other DNA
ataaaaagattacagggtgg

SEQ ID NO: 1844 - DNA, 20 bp, synthetic construct
  misc_feature 1..20: note = chemically synthesized
  source 1..20: mol_type = other DNA
aaaaagattacagggtggag

SEQ ID NO: 1845 - DNA, 20 bp, synthetic construct
  misc_feature 1..20: note = chemically synthesized
  source 1..20: mol_type = other DNA
gattacagggtggaggagct

SEQ ID NO: 1846 - DNA, 20 bp, synthetic construct
  misc_feature 1..20: note = chemically synthesized
  source 1..20: mol_type = other DNA
attacagggtggaggagctg

SEQ ID NO: 1847 - DNA, 20 bp, synthetic construct
  misc_feature 1..20: note = chemically synthesized
  source 1..20: mol_type = other DNA
agggtggaggagctgaggct

SEQ ID NO: 1848 - DNA, 20 bp, synthetic construct
  misc_feature 1..20: note = chemically synthesized
  source 1..20: mol_type = other DNA
gggtggaggagctgaggctg

SEQ ID NO: 1849 - DNA, 20 bp, synthetic construct
  misc_feature 1..20: note = chemically synthesized
  source 1..20: mol_type = other DNA
tggaggagctgaggctgagg

SEQ ID NO: 1850 - DNA, 20 bp, synthetic construct
  misc_feature 1..20: note = chemically synthesized
  source 1..20: mol_type = other DNA
agctgaggctgaggaagatt

SEQ ID NO: 1851 - DNA, 20 bp, synthetic construct
  misc_feature 1..20: note = chemically synthesized
  source 1..20: mol_type = other DNA
gctgaggctgaggaagattt

SEQ ID NO: 1852 - DNA, 20 bp, synthetic construct
  misc_feature 1..20: note = chemically synthesized
  source 1..20: mol_type = other DNA
gctgaggaagatttgggacc

SEQ ID NO: 1853 - DNA, 20 bp, synthetic construct
  misc_feature 1..20: note = chemically synthesized
  source 1..20: mol_type = other DNA
ggaagatttgggacctagct

SEQ ID NO: 1854 - DNA, 20 bp, synthetic construct
  misc_feature 1..20: note = chemically synthesized
  source 1..20: mol_type = other DNA
atttgggacctagctcggcc

SEQ ID NO: 1855 - DNA, 20 bp, synthetic construct
  misc_feature 1..20: note = chemically synthesized
  source 1..20: mol_type = other DNA
gggacctagctcggcctggc

SEQ ID NO: 1856 - DNA, 20 bp, synthetic construct
  misc_feature 1..20: note = chemically synthesized
  source 1..20: mol_type = other DNA
ggacctagctcggcctggca

SEQ ID NO: 1857 - DNA, 20 bp, synthetic construct
  misc_feature 1..20: note = chemically synthesized
  source 1..20: mol_type = other DNA
acctagctcggcctggcaag

SEQ ID NO: 1858 - DNA, 20 bp, synthetic construct
  misc_feature 1..20: note = chemically synthesized
  source 1..20: mol_type = other DNA
tagctcggcctggcaaggag

SEQ ID NO: 1859 - DNA, 20 bp, synthetic construct
  misc_feature 1..20: note = chemically synthesized
  source 1..20: mol_type = other DNA
cggcctggcaaggagcagcc

SEQ ID NO: 1860 - DNA, 20 bp, synthetic construct
  misc_feature 1..20: note = chemically synthesized
  source 1..20: mol_type = other DNA
ggcctggcaaggagcagcct

SEQ ID NO: 1861 - DNA, 20 bp, synthetic construct
  misc_feature 1..20: note = chemically synthesized
  source 1..20: mol_type = other DNA
gcctggcaaggagcagcctg

SEQ ID NO: 1862 - DNA, 20 bp, synthetic construct
  misc_feature 1..20: note = chemically synthesized
  source 1..20: mol_type = other DNA
ctggcaaggagcagcctggg

SEQ ID NO: 1863 - DNA, 20 bp, synthetic construct
  misc_feature 1..20: note = chemically synthesized
  source 1..20: mol_type = other DNA
tggcaaggagcagcctgggg

SEQ ID NO: 1864 - DNA, 20 bp, synthetic construct
  misc_feature 1..20: note = chemically synthesized
  source 1..20: mol_type = other DNA
gcaaggagcagcctggggag

SEQ ID NO: 1865 - DNA, 20 bp, synthetic construct
  misc_feature 1..20: note = chemically synthesized
  source 1..20: mol_type = other DNA
caaggagcagcctggggagg

SEQ ID NO: 1866 - DNA, 20 bp, synthetic construct
  misc_feature 1..20: note = chemically synthesized
  source 1..20: mol_type = other DNA
aaggagcagcctggggagga

SEQ ID NO: 1867 - DNA, 20 bp, synthetic construct
  misc_feature 1..20: note = chemically synthesized
  source 1..20: mol_type = other DNA
aggagcagcctggggaggag

SEQ ID NO: 1868 - DNA, 20 bp, synthetic construct
  misc_feature 1..20: note = chemically synthesized
  source 1..20: mol_type = other DNA
gagcagcctggggaggaggg

SEQ ID NO: 1869 - DNA, 20 bp, synthetic construct
  misc_feature 1..20: note = chemically synthesized
  source 1..20: mol_type = other DNA
ctggggaggaggggagacgt

SEQ ID NO: 1870 - DNA, 20 bp, synthetic construct
  misc_feature 1..20: note = chemically synthesized
  source 1..20: mol_type = other DNA
ggaggaggggagacgtcaga

SEQ ID NO: 1871 - DNA, 20 bp, synthetic construct
  misc_feature 1..20: note = chemically synthesized
  source 1..20: mol_type = other DNA
gaggaggggagacgtcagat

SEQ ID NO: 1872 - DNA, 20 bp, synthetic construct
  misc_feature 1..20: note = chemically synthesized
  source 1..20: mol_type = other DNA
ggagacgtcagatgggtctg

SEQ ID NO: 1873 - DNA, 20 bp, synthetic construct
  misc_feature 1..20: note = chemically synthesized
  source 1..20: mol_type = other DNA
cgtcagatgggtctgtagaa

SEQ ID NO: 1874 - DNA, 20 bp, synthetic construct
  misc_feature 1..20: note = chemically synthesized
  source 1..20: mol_type = other DNA
gtcagatgggtctgtagaaa

SEQ ID NO: 1875 - DNA, 20 bp, synthetic construct
  misc_feature 1..20: note = chemically synthesized
  source 1..20: mol_type = other DNA
agatgggtctgtagaaaagg

SEQ ID NO: 1876 - DNA, 20 bp, synthetic construct
  misc_feature 1..20: note = chemically synthesized
  source 1..20: mol_type = other DNA
ggtctgtagaaaaggaagat

SEQ ID NO: 1877 - DNA, 20 bp, synthetic construct
  misc_feature 1..20: note = chemically synthesized
  source 1..20: mol_type = other DNA
tgtagaaaaggaagattaga

SEQ ID NO: 1878 - DNA, 20 bp, synthetic construct
  misc_feature 1..20: note = chemically synthesized
  source 1..20: mol_type = other DNA
aaaggaagattagaaagact

SEQ ID NO: 1879 - DNA, 20 bp, synthetic construct
  misc_feature 1..20: note = chemically synthesized
  source 1..20: mol_type = other DNA
tagaaagactcagcgacgct

SEQ ID NO: 1880 - DNA, 20 bp, synthetic construct
  misc_feature 1..20: note = chemically synthesized
  source 1..20: mol_type = other DNA
gaaagactcagcgacgcttg

SEQ ID NO: 1881 - DNA, 20 bp, synthetic construct
  misc_feature 1..20: note = chemically synthesized
  source 1..20: mol_type = other DNA
gactcagcgacgcttggagt

SEQ ID NO: 1882 - DNA, 20 bp, synthetic construct
  misc_feature 1..20: note = chemically synthesized
  source 1..20: mol_type = other DNA
actcagcgacgcttggagtt

SEQ ID NO: 1883 - DNA, 20 bp, synthetic construct
  misc_feature 1..20: note = chemically synthesized
  source 1..20: mol_type = other DNA
cgacgcttggagttgggact

SEQ ID NO: 1884 - DNA, 20 bp, synthetic construct
  misc_feature 1..20: note = chemically synthesized
  source 1..20: mol_type = other DNA
gacgcttggagttgggactg

SEQ ID NO: 1885 - DNA, 20 bp, synthetic construct
  misc_feature 1..20: note = chemically synthesized
  source 1..20: mol_type = other DNA
acgcttggagttgggactga

SEQ ID NO: 1886 - DNA, 20 bp, synthetic construct
  misc_feature 1..20: note = chemically synthesized
  source 1..20: mol_type = other DNA
cgcttggagttgggactgag

SEQ ID NO: 1887 - DNA, 20 bp, synthetic construct
  misc_feature 1..20: note = chemically synthesized
  source 1..20: mol_type = other DNA
tggagttgggactgagggga

SEQ ID NO: 1888 - DNA, 20 bp, synthetic construct
  misc_feature 1..20: note = chemically synthesized
  source 1..20: mol_type = other DNA
ggagttgggactgaggggac

SEQ ID NO: 1889 - DNA, 20 bp, synthetic construct
  misc_feature 1..20: note = chemically synthesized
  source 1..20: mol_type = other DNA
gttgggactgaggggacagg

SEQ ID NO: 1890 - DNA, 20 bp, synthetic construct
  misc_feature 1..20: note = chemically synthesized
  source 1..20: mol_type = other DNA
ttgggactgaggggacaggc

SEQ ID NO: 1891 - DNA, 20 bp, synthetic construct
  misc_feature 1..20: note = chemically synthesized
  source 1..20: mol_type = other DNA
gggactgaggggacaggcgg

SEQ ID NO: 1892 - DNA, 20 bp, synthetic construct
  misc_feature 1..20: note = chemically synthesized
  source 1..20: mol_type = other DNA
ggactgaggggacaggcggg

SEQ ID NO: 1893 - DNA, 20 bp, synthetic construct
  misc_feature 1..20: note = chemically synthesized
  source 1..20: mol_type = other DNA
gactgaggggacaggcggga

SEQ ID NO: 1894 - DNA, 20 bp, synthetic construct
  misc_feature 1..20: note = chemically synthesized
  source 1..20: mol_type = other DNA
gaggggacaggcgggaggga

SEQ ID NO: 1895 - DNA, 20 bp, synthetic construct
  misc_feature 1..20: note = chemically synthesized
  source 1..20: mol_type = other DNA
gggacaggcgggagggaaag

SEQ ID NO: 1896 - DNA, 20 bp, synthetic construct
  misc_feature 1..20: note = chemically synthesized
  source 1..20: mol_type = other DNA
ggacaggcgggagggaaaga

SEQ ID NO: 1897 - DNA, 20 bp, synthetic construct
  misc_feature 1..20: note = chemically synthesized
  source 1..20: mol_type = other DNA
caggcgggagggaaagaagg

SEQ ID NO: 1898 - DNA, 20 bp, synthetic construct
  misc_feature 1..20: note = chemically synthesized
  source 1..20: mol_type = other DNA
ggagggaaagaaggaagatt

SEQ ID NO: 1899 - DNA, 20 bp, synthetic construct
  misc_feature 1..20: note = chemically synthesized
  source 1..20: mol_type = other DNA
gagggaaagaaggaagattt

SEQ ID NO: 1900 - DNA, 20 bp, synthetic construct
  misc_feature 1..20: note = chemically synthesized
  source 1..20: mol_type = other DNA
aaagaaggaagatttgggac

SEQ ID NO: 1901 - DNA, 20 bp, synthetic construct
  misc_feature 1..20: note = chemically synthesized
  source 1..20: mol_type = other DNA
agatttgggacaagttgcat

SEQ ID NO: 1902 - DNA, 20 bp, synthetic construct
  misc_feature 1..20: note = chemically synthesized
  source 1..20: mol_type = other DNA
gatttgggacaagttgcatt

SEQ ID NO: 1903 - DNA, 20 bp, synthetic construct
  misc_feature 1..20: note = chemically synthesized
  source 1..20: mol_type = other DNA
ttgggacaagttgcattggg

SEQ ID NO: 1904 - DNA, 20 bp, synthetic construct
  misc_feature 1..20: note = chemically synthesized
  source 1..20: mol_type = other DNA
gggacaagttgcattgggaa

SEQ ID NO: 1905 - DNA, 20 bp, synthetic construct
  misc_feature 1..20: note = chemically synthesized
  source 1..20: mol_type = other DNA
aagttgcattgggaagagac

SEQ ID NO: 1906 - DNA, 20 bp, synthetic construct
  misc_feature 1..20: note = chemically synthesized
  source 1..20: mol_type = other DNA
agttgcattgggaagagact

SEQ ID NO: 1907 - DNA, 20 bp, synthetic construct
  misc_feature 1..20: note = chemically synthesized
  source 1..20: mol_type = other DNA
gttgcattgggaagagacta

SEQ ID NO: 1908 - DNA, 20 bp, synthetic construct
  misc_feature 1..20: note = chemically synthesized
  source 1..20: mol_type = other DNA
tgcattgggaagagactagg

SEQ ID NO: 1909 - DNA, 20 bp, synthetic construct
  misc_feature 1..20: note = chemically synthesized
  source 1..20: mol_type = other DNA
gcattgggaagagactaggg

SEQ ID NO: 1910 - DNA, 20 bp, synthetic construct
  misc_feature 1..20: note = chemically synthesized
  source 1..20: mol_type = other DNA
cattgggaagagactaggga

SEQ ID NO: 1911 - DNA, 20 bp, synthetic construct
  misc_feature 1..20: note = chemically synthesized
  source 1..20: mol_type = other DNA
agggagggaccaatgtgtaa

SEQ ID NO: 1912 - DNA, 20 bp, synthetic construct
  misc_feature 1..20: note = chemically synthesized
  source 1..20: mol_type = other DNA
ccaatgtgtaaaagaatgcc

SEQ ID NO: 1913 - DNA, 20 bp, synthetic construct
  misc_feature 1..20: note = chemically synthesized
  source 1..20: mol_type = other DNA
gtaaaagaatgcctggacgt

SEQ ID NO: 1914 - DNA, 20 bp, synthetic construct
  misc_feature 1..20: note = chemically synthesized
  source 1..20: mol_type = other DNA
taaaagaatgcctggacgtc

SEQ ID NO: 1915 - DNA, 20 bp, synthetic construct
  misc_feature 1..20: note = chemically synthesized
  source 1..20: mol_type = other DNA
tgcctggacgtcaggcacct

SEQ ID NO: 1916 - DNA, 20 bp, synthetic construct
  misc_feature 1..20: note = chemically synthesized
  source 1..20: mol_type = other DNA
gttttacgacaaaaattatt

SEQ ID NO: 1917 - DNA, 20 bp, synthetic construct
  misc_feature 1..20: note = chemically synthesized
  source 1..20: mol_type = other DNA
caaaaattatttagatcttg

SEQ ID NO: 1918 - DNA, 20 bp, synthetic construct
  misc_feature 1..20: note = chemically synthesized
  source 1..20: mol_type = other DNA
attatttagatcttgaagaa

SEQ ID NO: 1919 - DNA, 20 bp, synthetic construct
  misc_feature 1..20: note = chemically synthesized
  source 1..20: mol_type = other DNA
ttgaagaatggaaaaattga

SEQ ID NO: 1920 - DNA, 20 bp, synthetic construct
  misc_feature 1..20: note = chemically synthesized
  source 1..20: mol_type = other DNA
aaattgaaagtgccattttc

SEQ ID NO: 1921 - DNA, 20 bp, synthetic construct
  misc_feature 1..20: note = chemically synthesized
  source 1..20: mol_type = other DNA
agtgccattttctggctatt

SEQ ID NO: 1922 - DNA, 20 bp, synthetic construct
  misc_feature 1..20: note = chemically synthesized
  source 1..20: mol_type = other DNA
ggctatttggaaccactgtc

SEQ ID NO: 1923 - DNA, 20 bp, synthetic construct
  misc_feature 1..20: note = chemically synthesized
  source 1..20: mol_type = other DNA
aaccactgtcgagtttgtat

SEQ ID NO: 1924 - DNA, 20 bp, synthetic construct
  misc_feature 1..20: note = chemically synthesized
  source 1..20: mol_type = other DNA
ccactgtcgagtttgtattg

SEQ ID NO: 1925 - DNA, 20 bp, synthetic construct
  misc_feature 1..20: note = chemically synthesized
  source 1..20: mol_type = other DNA
gtcgagtttgtattggagtc

SEQ ID NO: 1926 - DNA, 20 bp, synthetic construct
  misc_feature 1..20: note = chemically synthesized
  source 1..20: mol_type = other DNA
gagtttgtattggagtcaag

SEQ ID NO: 1927 - DNA, 20 bp, synthetic construct
  misc_feature 1..20: note = chemically synthesized
  source 1..20: mol_type = other DNA
attggagtcaagcggccttg

SEQ ID NO: 1928 - DNA, 20 bp, synthetic construct
  misc_feature 1..20: note = chemically synthesized
  source 1..20: mol_type = other DNA
ggagtcaagcggccttgcag

SEQ ID NO: 1929 - DNA, 20 bp, synthetic construct
  misc_feature 1..20: note = chemically synthesized
  source 1..20: mol_type = other DNA
gcggccttgcagaagaaaat

SEQ ID NO: 1930 - DNA, 20 bp, synthetic construct
  misc_feature 1..20: note = chemically synthesized
  source 1..20: mol_type = other DNA
cggccttgcagaagaaaata

SEQ ID NO: 1931 - DNA, 20 bp, synthetic construct
  misc_feature 1..20: note = chemically synthesized
  source 1..20: mol_type = other DNA
gcagaagaaaataaggcatt

SEQ ID NO: 1932 - DNA, 20 bp, synthetic construct
  misc_feature 1..20: note = chemically synthesized
  source 1..20: mol_type = other DNA
cagaagaaaataaggcattt

SEQ ID NO: 1933 - DNA, 20 bp, synthetic construct
  misc_feature 1..20: note = chemically synthesized
  source 1..20: mol_type = other DNA
aaaataaggcatttaggttt

SEQ ID NO: 1934 - DNA, 20 bp, synthetic construct
  misc_feature 1..20: note = chemically synthesized
  source 1..20: mol_type = other DNA
aaataaggcatttaggtttt

SEQ ID NO: 1935 - DNA, 20 bp, synthetic construct
  misc_feature 1..20: note = chemically synthesized
  source 1..20: mol_type = other DNA
aaggcatttaggttttaggt

SEQ ID NO: 1936 - DNA, 20 bp, synthetic construct
  misc_feature 1..20: note = chemically synthesized
  source 1..20: mol_type = other DNA
aggcatttaggttttaggtc

SEQ ID NO: 1937 - DNA, 20 bp, synthetic construct
  misc_feature 1..20: note = chemically synthesized
  source 1..20: mol_type = other DNA
ttaggttttaggtcaggtgt

SEQ ID NO: 1938 - DNA, 20 bp, synthetic construct
  misc_feature 1..20: note = chemically synthesized
  source 1..20: mol_type = other DNA
tttaggtcaggtgtgagttg

SEQ ID NO: 1939 - DNA, 20 bp, synthetic construct
  misc_feature 1..20: note = chemically synthesized
  source 1..20: mol_type = other DNA
taggtcaggtgtgagttgaa

SEQ ID NO: 1940 - DNA, 20 bp, synthetic construct
  misc_feature 1..20: note = chemically synthesized
  source 1..20: mol_type = other DNA
aggtcaggtgtgagttgaag

SEQ ID NO: 1941 - DNA, 20 bp, synthetic construct
  misc_feature 1..20: note = chemically synthesized
  source 1..20: mol_type = other DNA
gtgtgagttgaagaggtttt

SEQ ID NO: 1942 - DNA, 20 bp, synthetic construct
  misc_feature 1..20: note = chemically synthesized
  source 1..20: mol_type = other DNA
tgaagaggttttaagttctt

SEQ ID NO: 1943 - DNA, 20 bp, synthetic construct
  misc_feature 1..20: note = chemically synthesized
  source 1..20: mol_type = other DNA
aagaggttttaagttcttga

SEQ ID NO: 1944 - DNA, 20 bp, synthetic construct
  misc_feature 1..20: note = chemically synthesized
  source 1..20: mol_type = other DNA
gttttaagttcttgagagca

SEQ ID NO: 1945 - DNA, 20 bp, synthetic construct
  misc_feature 1..20: note = chemically synthesized
  source 1..20: mol_type = other DNA
ttttaagttcttgagagcac

SEQ ID NO: 1946 - DNA, 20 bp, synthetic construct
  misc_feature 1..20: note = chemically synthesized
  source 1..20: mol_type = other DNA
agttcttgagagcacaggct

SEQ ID NO: 1947 - DNA, 20 bp, synthetic construct
  misc_feature 1..20: note = chemically synthesized
  source 1..20: mol_type = other DNA
gttcttgagagcacaggcta

SEQ ID NO: 1948 - DNA, 20 bp, synthetic construct
  misc_feature 1..20: note = chemically synthesized
  source 1..20: mol_type = other DNA
ttcttgagagcacaggctaa

SEQ ID NO: 1949 - DNA, 20 bp, synthetic construct
  misc_feature 1..20: note = chemically synthesized
  source 1..20: mol_type = other DNA
cttgagagcacaggctaagg

SEQ ID NO: 1950 - DNA, 20 bp, synthetic construct
  misc_feature 1..20: note = chemically synthesized
  source 1..20: mol_type = other DNA
tgagagcacaggctaaggga

SEQ ID NO: 1951 - DNA, 20 bp, synthetic construct
  misc_feature 1..20: note = chemically synthesized
  source 1..20: mol_type = other DNA
gagagcacaggctaagggag

SEQ ID NO: 1952 - DNA, 20 bp, synthetic construct
  misc_feature 1..20: note = chemically synthesized
  source 1..20: mol_type = other DNA
agagcacaggctaagggaga

SEQ ID NO: 1953 - DNA, 20 bp, synthetic construct
  misc_feature 1..20: note = chemically synthesized
  source 1..20: mol_type = other DNA
agcacaggctaagggagagg

SEQ ID NO: 1954 - DNA, 20 bp, synthetic construct
  misc_feature 1..20: note = chemically synthesized
  source 1..20: mol_type = other DNA
gcacaggctaagggagaggg

SEQ ID NO: 1955 - DNA, 20 bp, synthetic construct
  misc_feature 1..20: note = chemically synthesized
  source 1..20: mol_type = other DNA
ggctaagggagagggaggaa

SEQ ID NO: 1956 - DNA, 20 bp, synthetic construct
  misc_feature 1..20: note = chemically synthesized
  source 1..20: mol_type = other DNA
ctaagggagagggaggaatg

SEQ ID NO: 1957 - DNA, 20 bp, synthetic construct
  misc_feature 1..20: note = chemically synthesized
  source 1..20: mol_type = other DNA
taagggagagggaggaatgg

SEQ ID NO: 1958 - DNA, 20 bp, synthetic construct
  misc_feature 1..20: note = chemically synthesized
  source 1..20: mol_type = other DNA
aagggagagggaggaatgga

SEQ ID NO: 1959 - DNA, 20 bp, synthetic construct
  misc_feature 1..20: note = chemically synthesized
  source 1..20: mol_type = other DNA
ggagagggaggaatggaggg

SEQ ID NO: 1960 - DNA, 20 bp, synthetic construct
  misc_feature 1..20: note = chemically synthesized
  source 1..20: mol_type = other DNA
gagggaggaatggagggtgg

SEQ ID NO: 1961 - DNA, 20 bp, synthetic construct
  misc_feature 1..20: note = chemically synthesized
  source 1..20: mol_type = other DNA
agggaggaatggagggtgga

SEQ ID NO: 1962 - DNA, 20 bp, synthetic construct
  misc_feature 1..20: note = chemically synthesized
  source 1..20: mol_type = other DNA
ggagggtggaaggttgcccc

SEQ ID NO: 1963 - DNA, 20 bp, synthetic construct
  misc_feature 1..20: note = chemically synthesized
  source 1..20: mol_type = other DNA
gtggaaggttgcccctagtg

SEQ ID NO: 1964 - DNA, 20 bp, synthetic construct
  misc_feature 1..20: note = chemically synthesized
  source 1..20: mol_type = other DNA
tggaaggttgcccctagtga

SEQ ID NO: 1965 - DNA, 20 bp, synthetic construct
  misc_feature 1..20: note = chemically synthesized
  source 1..20: mol_type = other DNA
gaaggttgcccctagtgaag

SEQ ID NO: 1966 - DNA, 20 bp, synthetic construct
  misc_feature 1..20: note = chemically synthesized
  source 1..20: mol_type = other DNA
aaggttgcccctagtgaagg

SEQ ID NO: 1967 - DNA, 20 bp, synthetic construct
  misc_feature 1..20: note = chemically synthesized
  source 1..20: mol_type = other DNA
ttgcccctagtgaaggaggc

SEQ ID NO: 1968 - DNA, 20 bp, synthetic construct
  misc_feature 1..20: note = chemically synthesized
  source 1..20: mol_type = other DNA
cctagtgaaggaggcaagcc

SEQ ID NO: 1969 - DNA, 20 bp, synthetic construct
  misc_feature 1..20: note = chemically synthesized
  source 1..20: mol_type = other DNA
tagtgaaggaggcaagccca

SEQ ID NO: 1970 - DNA, 20 bp, synthetic construct
  misc_feature 1..20: note = chemically synthesized
  source 1..20: mol_type = other DNA
aaggaggcaagcccagagaa

SEQ ID NO: 1971 - DNA, 20 bp, synthetic construct
  misc_feature 1..20: note = chemically synthesized
  source 1..20: mol_type = other DNA
aggcaagcccagagaaaaga

SEQ ID NO: 1972 - DNA, 20 bp, synthetic construct
  misc_feature 1..20: note = chemically synthesized
  source 1..20: mol_type = other DNA
gcaagcccagagaaaagaaa

SEQ ID NO: 1973 - DNA, 20 bp, synthetic construct
  misc_feature 1..20: note = chemically synthesized
  source 1..20: mol_type = other DNA
cccagagaaaagaaagagta

SEQ ID NO: 1974 - DNA, 20 bp, synthetic construct
  misc_feature 1..20: note = chemically synthesized
  source 1..20: mol_type = other DNA
gaaaagaaagagtacagaca

SEQ ID NO: 1975 - DNA, 20 bp, synthetic construct
  misc_feature 1..20: note = chemically synthesized
  source 1..20: mol_type = other DNA
aaagaaagagtacagacacg

SEQ ID NO: 1976 - DNA, 20 bp, synthetic construct
  misc_feature 1..20: note = chemically synthesized
  source 1..20: mol_type = other DNA
aagaaagagtacagacacgg

SEQ ID NO: 1977 - DNA, 20 bp, synthetic construct
  misc_feature 1..20: note = chemically synthesized
  source 1..20: mol_type = other DNA
agaaagagtacagacacgga

SEQ ID NO: 1978 - DNA, 20 bp, synthetic construct
  misc_feature 1..20: note = chemically synthesized
  source 1..20: mol_type = other DNA
aagagtacagacacggaggg

SEQ ID NO: 1979 - DNA, 20 bp, synthetic construct
  misc_feature 1..20: note = chemically synthesized
  source 1..20: mol_type = other DNA
agagtacagacacggaggga

SEQ ID NO: 1980 - DNA, 20 bp, synthetic construct
  misc_feature 1..20: note = chemically synthesized
  source 1..20: mol_type = other DNA
gagtacagacacggagggaa

SEQ ID NO: 1981 - DNA, 20 bp, synthetic construct
  misc_feature 1..20: note = chemically synthesized
  source 1..20: mol_type = other DNA
agtacagacacggagggaag

SEQ ID NO: 1982 - DNA, 20 bp, synthetic construct
  misc_feature 1..20: note = chemically synthesized
  source 1..20: mol_type = other DNA
agacacggagggaaggggtt

SEQ ID NO: 1983 - DNA, 20 bp, synthetic construct
  misc_feature 1..20: note = chemically synthesized
  source 1..20: mol_type = other DNA
gacacggagggaaggggttc

SEQ ID NO: 1984 - DNA, 20 bp, synthetic construct
  misc_feature 1..20: note = chemically synthesized
  source 1..20: mol_type = other DNA
acacggagggaaggggttcg

SEQ ID NO: 1985 - DNA, 20 bp, synthetic construct
  misc_feature 1..20: note = chemically synthesized
  source 1..20: mol_type = other DNA
cacggagggaaggggttcgg

SEQ ID NO: 1986 - DNA, 20 bp, synthetic construct
  misc_feature 1..20: note = chemically synthesized
  source 1..20: mol_type = other DNA
gttcgggggttcttactcac

SEQ ID NO: 1987 - DNA, 20 bp, synthetic construct
  misc_feature 1..20: note = chemically synthesized
  source 1..20: mol_type = other DNA
gttcttactcaccagaaaaa

SEQ ID NO: 1988 - DNA, 20 bp, synthetic construct
  misc_feature 1..20: note = chemically synthesized
  source 1..20: mol_type = other DNA
ttcttactcaccagaaaaat

SEQ ID NO: 1989 - DNA, 20 bp, synthetic construct
  misc_feature 1..20: note = chemically synthesized
  source 1..20: mol_type = other DNA
tactcaccagaaaaatgggc

SEQ ID NO: 1990 - DNA, 20 bp, synthetic construct
  misc_feature 1..20: note = chemically synthesized
  source 1..20: mol_type = other DNA
actcaccagaaaaatgggca

SEQ ID NO: 1991 - DNA, 20 bp, synthetic construct
  misc_feature 1..20: note = chemically synthesized
  source 1..20: mol_type = other DNA
ctcaccagaaaaatgggcaa

SEQ ID NO: 1992 - DNA, 20 bp, synthetic construct
  misc_feature 1..20: note = chemically synthesized
  source 1..20: mol_type = other DNA
tcaccagaaaaatgggcaag

SEQ ID NO: 1993 - DNA, 20 bp, synthetic construct
  misc_feature 1..20: note = chemically synthesized
  source 1..20: mol_type = other DNA
cagaaaaatgggcaaggggt

SEQ ID NO: 1994 - DNA, 20 bp, synthetic construct
  misc_feature 1..20: note = chemically synthesized
  source 1..20: mol_type = other DNA
agaaaaatgggcaaggggtt

SEQ ID NO: 1995 - DNA, 20 bp, synthetic construct
  misc_feature 1..20: note = chemically synthesized
  source 1..20: mol_type = other DNA
gaaaaatgggcaaggggttg

SEQ ID NO: 1996 - DNA, 20 bp, synthetic construct
  misc_feature 1..20: note = chemically synthesized
  source 1..20: mol_type = other DNA
atgggcaaggggttggggca

SEQ ID NO: 1997 - DNA, 20 bp, synthetic construct
  misc_feature 1..20: note = chemically synthesized
  source 1..20: mol_type = other DNA
aggggttggggcacggaaat

SEQ ID NO: 1998 - DNA, 20 bp, synthetic construct
  misc_feature 1..20: note = chemically synthesized
  source 1..20: mol_type = other DNA
ggggttggggcacggaaata

SEQ ID NO: 1999 - DNA, 20 bp, synthetic construct
  misc_feature 1..20: note = chemically synthesized
  source 1..20: mol_type = other DNA
gggttggggcacggaaataa

SEQ ID NO: 2000 - DNA, 20 bp, synthetic construct
  misc_feature 1..20: note = chemically synthesized
  source 1..20: mol_type = other DNA
ggttggggcacggaaataag

SEQ ID NO: 2001 - DNA, 20 bp, synthetic construct
  misc_feature 1..20: note = chemically synthesized
  source 1..20: mol_type = other DNA
ggggcacggaaataaggggt

SEQ ID NO: 2002 - DNA, 20 bp, synthetic construct
  misc_feature 1..20: note = chemically synthesized
  source 1..20: mol_type = other DNA
gggcacggaaataaggggtt

SEQ ID NO: 2003 - DNA, 20 bp, synthetic construct
  misc_feature 1..20: note = chemically synthesized
  source 1..20: mol_type = other DNA
ggcacggaaataaggggttg

SEQ ID NO: 2004 - DNA, 20 bp, synthetic construct
  misc_feature 1..20: note = chemically synthesized
  source 1..20: mol_type = other DNA
ggaaataaggggttggggtg

SEQ ID NO: 2005 - DNA, 20 bp, synthetic construct
  misc_feature 1..20: note = chemically synthesized
  source 1..20: mol_type = other DNA
aaataaggggttggggtgca

SEQ ID NO: 2006 - DNA, 20 bp, synthetic construct
  misc_feature 1..20: note = chemically synthesized
  source 1..20: mol_type = other DNA
aggggttggggtgcagagat

SEQ ID NO: 2007 - DNA, 20 bp, synthetic construct
  misc_feature 1..20: note = chemically synthesized
  source 1..20: mol_type = other DNA
gggttggggtgcagagataa

SEQ ID NO: 2008 - DNA, 20 bp, synthetic construct
  misc_feature 1..20: note = chemically synthesized
  source 1..20: mol_type = other DNA
ggttggggtgcagagataag

SEQ ID NO: 2009 - DNA, 20 bp, synthetic construct
  misc_feature 1..20: note = chemically synthesized
  source 1..20: mol_type = other DNA
ggggtgcagagataagaggt

SEQ ID NO: 2010 - DNA, 20 bp, synthetic construct
  misc_feature 1..20: note = chemically synthesized
  source 1..20: mol_type = other DNA
gggtgcagagataagaggtc

SEQ ID NO: 2011 - DNA, 20 bp, synthetic construct
  misc_feature 1..20: note = chemically synthesized
  source 1..20: mol_type = other DNA
ggtgcagagataagaggtca

SEQ ID NO: 2012 - DNA, 20 bp, synthetic construct
  misc_feature 1..20: note = chemically synthesized
  source 1..20: mol_type = other DNA
agagataagaggtcagggca

SEQ ID NO: 2013 - DNA, 20 bp, synthetic construct
  misc_feature 1..20: note = chemically synthesized
  source 1..20: mol_type = other DNA
agaggtcagggcacagaaat

SEQ ID NO: 2014 - DNA, 20 bp, synthetic construct
  misc_feature 1..20: note = chemically synthesized
  source 1..20: mol_type = other DNA
gaggtcagggcacagaaata

SEQ ID NO: 2015 - DNA, 20 bp, synthetic construct
  misc_feature 1..20: note = chemically synthesized
  source 1..20: mol_type = other DNA
aggtcagggcacagaaataa

SEQ ID NO: 2016 - DNA, 20 bp, synthetic construct
  misc_feature 1..20: note = chemically synthesized
  source 1..20: mol_type = other DNA
ggtcagggcacagaaataag

SEQ ID NO: 2017 - DNA, 20 bp, synthetic construct
  misc_feature 1..20: note = chemically synthesized
  source 1..20: mol_type = other DNA
agggcacagaaataaggggt

SEQ ID NO: 2018 - DNA, 20 bp, synthetic construct
  misc_feature 1..20: note = chemically synthesized
  source 1..20: mol_type = other DNA
gggcacagaaataaggggtt

SEQ ID NO: 2019 - DNA, 20 bp, synthetic construct
  misc_feature 1..20: note = chemically synthesized
  source 1..20: mol_type = other DNA
ggcacagaaataaggggttg

SEQ ID NO: 2020 - DNA, 20 bp, synthetic construct
  misc_feature 1..20: note = chemically synthesized
  source 1..20: mol_type = other DNA
agaaataaggggttggggtg

SEQ ID NO: 2021 - DNA, 20 bp, synthetic construct
  misc_feature 1..20: note = chemically synthesized
  source 1..20: mol_type = other DNA
aaataaggggttggggtgca

SEQ ID NO: 2022 - DNA, 20 bp, synthetic construct
  misc_feature 1..20: note = chemically synthesized
  source 1..20: mol_type = other DNA
aggggttggggtgcagagat

SEQ ID NO: 2023 - DNA, 20 bp, synthetic construct
  misc_feature 1..20: note = chemically synthesized
  source 1..20: mol_type = other DNA
gggttggggtgcagagataa

SEQ ID NO: 2024 - DNA, 20 bp, synthetic construct
  misc_feature 1..20: note = chemically synthesized
  source 1..20: mol_type = other DNA
ggttggggtgcagagataag

SEQ ID NO: 2025 - DNA, 20 bp, synthetic construct
  misc_feature 1..20: note = chemically synthesized
  source 1..20: mol_type = other DNA
ggggtgcagagataagaggt

SEQ ID NO: 2026 - DNA, 20 bp, synthetic construct
  misc_feature 1..20: note = chemically synthesized
  source 1..20: mol_type = other DNA
gggtgcagagataagaggtt

SEQ ID NO: 2027 - DNA, 20 bp, synthetic construct
  misc_feature 1..20: note = chemically synthesized
  source 1..20: mol_type = other DNA
ggtgcagagataagaggttg

SEQ ID NO: 2028 - DNA, 20 bp, synthetic construct
  misc_feature 1..20: note = chemically synthesized
  source 1..20: mol_type = other DNA
agagataagaggttggggca

SEQ ID NO: 2029 - DNA, 20 bp, synthetic construct
  misc_feature 1..20: note = chemically synthesized
  source 1..20: mol_type = other DNA
agaggttggggcacagaaat

SEQ ID NO: 2030 - DNA, 20 bp, synthetic construct
  misc_feature 1..20: note = chemically synthesized
  source 1..20: mol_type = other DNA
gaggttggggcacagaaata

SEQ ID NO: 2031 - DNA, 20 bp, synthetic construct
  misc_feature 1..20: note = chemically synthesized
  source 1..20: mol_type = other DNA
aggttggggcacagaaataa

SEQ ID NO: 2032 - DNA, 20 bp, synthetic construct
  misc_feature 1..20: note = chemically synthesized
  source 1..20: mol_type = other DNA
ggggcacagaaataagggat

SEQ ID NO: 2033 - DNA, 20 bp, synthetic construct
  misc_feature 1..20: note = chemically synthesized
  source 1..20: mol_type = other DNA
gggcacagaaataagggatc

SEQ ID NO: 2034 - DNA, 20 bp, synthetic construct
  misc_feature 1..20: note = chemically synthesized
  source 1..20: mol_type = other DNA
ggcacagaaataagggatcg

SEQ ID NO: 2035 - DNA, 20 bp, synthetic construct
  misc_feature 1..20: note = chemically synthesized
  source 1..20: mol_type = other DNA
agaaataagggatcggggtg

SEQ ID NO: 2036 - DNA, 20 bp, synthetic construct
  misc_feature 1..20: note = chemically synthesized
  source 1..20: mol_type = other DNA
aaataagggatcggggtgca

SEQ ID NO: 2037 - DNA, 20 bp, synthetic construct
  misc_feature 1..20: note = chemically synthesized
  source 1..20: mol_type = other DNA
agggatcggggtgcagagat

SEQ ID NO: 2038 - DNA, 20 bp, synthetic construct
  misc_feature 1..20: note = chemically synthesized
  source 1..20: mol_type = other DNA
ggatcggggtgcagagataa

SEQ ID NO: 2039 - DNA, 20 bp, synthetic construct
  misc_feature 1..20: note = chemically synthesized
  source 1..20: mol_type = other DNA
gatcggggtgcagagataag

SEQ ID NO: 2040 - DNA, 20 bp, synthetic construct
  misc_feature 1..20: note = chemically synthesized
  source 1..20: mol_type = other DNA
ggggtgcagagataagaggt

SEQ ID NO: 2041 - DNA, 20 bp, synthetic construct
  misc_feature 1..20: note = chemically synthesized
  source 1..20: mol_type = other DNA
gggtgcagagataagaggtt

SEQ ID NO: 2042 - DNA, 20 bp, synthetic construct
  misc_feature 1..20: note = chemically synthesized
  source 1..20: mol_type = other DNA
ggtgcagagataagaggttg

SEQ ID NO: 2043 - DNA, 20 bp, synthetic construct
  misc_feature 1..20: note = chemically synthesized
  source 1..20: mol_type = other DNA
agagataagaggttggggtg

SEQ ID NO: 2044 - DNA, 20 bp, synthetic construct
  misc_feature 1..20: note = chemically synthesized
  source 1..20: mol_type = other DNA
agaggttggggtgcagaaat

SEQ ID NO: 2045 - DNA, 20 bp, synthetic construct
  misc_feature 1..20: note = chemically synthesized
  source 1..20: mol_type = other DNA
gaggttggggtgcagaaata

SEQ ID NO: 2046 - DNA, 20 bp, synthetic construct
  misc_feature 1..20: note = chemically synthesized
  source 1..20: mol_type = other DNA
aggttggggtgcagaaataa

SEQ ID NO: 2047 - DNA, 20 bp, synthetic construct
  misc_feature 1..20: note = chemically synthesized
  source 1..20: mol_type = other DNA
ggggtgcagaaataagggat

SEQ ID NO: 2048 - DNA, 20 bp, synthetic construct
  misc_feature 1..20: note = chemically synthesized
  source 1..20: mol_type = other DNA
gggtgcagaaataagggatc

SEQ ID NO: 2049 - DNA, 20 bp, synthetic construct
  misc_feature 1..20: note = chemically synthesized
  source 1..20: mol_type = other DNA
ggtgcagaaataagggatca

SEQ ID NO: 2050 - DNA, 20 bp, synthetic construct
  misc_feature 1..20: note = chemically synthesized
  source 1..20: mol_type = other DNA
agaaataagggatcagggtg

SEQ ID NO: 2051 - DNA, 20 bp, synthetic construct
  misc_feature 1..20: note = chemically synthesized
  source 1..20: mol_type = other DNA
aaataagggatcagggtgca

SEQ ID NO: 2052 - DNA, 20 bp, synthetic construct
  misc_feature 1..20: note = chemically synthesized
  source 1..20: mol_type = other DNA
agggatcagggtgcagagat

SEQ ID NO: 2053 - DNA, 20 bp, synthetic construct
  misc_feature 1..20: note = chemically synthesized
  source 1..20: mol_type = other DNA
ggatcagggtgcagagataa

SEQ ID NO: 2054 - DNA, 20 bp, synthetic construct
  misc_feature 1..20: note = chemically synthesized
  source 1..20: mol_type = other DNA
gatcagggtgcagagataag

SEQ ID NO: 2055 - DNA, 20 bp, synthetic construct
  misc_feature 1..20: note = chemically synthesized
  source 1..20: mol_type = other DNA
agggtgcagagataagaggt

SEQ ID NO: 2056 - DNA, 20 bp, synthetic construct
  misc_feature 1..20: note = chemically synthesized
  source 1..20: mol_type = other DNA
gggtgcagagataagaggtc

SEQ ID NO: 2057 - DNA, 20 bp, synthetic construct
  misc_feature 1..20: note = chemically synthesized
  source 1..20: mol_type = other DNA
ggtgcagagataagaggtcg

SEQ ID NO: 2058 - DNA, 20 bp, synthetic construct
  misc_feature 1..20: note = chemically synthesized
  source 1..20: mol_type = other DNA
agagataagaggtcggggtg

SEQ ID NO: 2059 - DNA, 20 bp, synthetic construct
  misc_feature 1..20: note = chemically synthesized
  source 1..20: mol_type = other DNA
agaggtcggggtgcagaaat

SEQ ID NO: 2060 - DNA, 20 bp, synthetic construct
  misc_feature 1..20: note = chemically synthesized
  source 1..20: mol_type = other DNA
gaggtcggggtgcagaaata

SEQ ID NO: 2061 - DNA, 20 bp, synthetic construct
  misc_feature 1..20: note = chemically synthesized
  source 1..20: mol_type = other DNA
aggtcggggtgcagaaataa

SEQ ID NO: 2062 - DNA, 20 bp, synthetic construct
  misc_feature 1..20: note = chemically synthesized
  source 1..20: mol_type = other DNA
ggggtgcagaaataagggat

SEQ ID NO: 2063 - DNA, 20 bp, synthetic construct
  misc_feature 1..20: note = chemically synthesized
  source 1..20: mol_type = other DNA
gggtgcagaaataagggatt

SEQ ID NO: 2064 - DNA, 20 bp, synthetic construct
  misc_feature 1..20: note = chemically synthesized
  source 1..20: mol_type = other DNA
ggtgcagaaataagggattg

SEQ ID NO: 2065 - DNA, 20 bp, synthetic construct
  misc_feature 1..20: note = chemically synthesized
  source 1..20: mol_type = other DNA
agaaataagggattggggtg

SEQ ID NO: 2066 - DNA, 20 bp, synthetic construct
  misc_feature 1..20: note = chemically synthesized
  source 1..20: mol_type = other DNA
aaataagggattggggtgca

SEQ ID NO: 2067 - DNA, 20 bp, synthetic construct
  misc_feature 1..20: note = chemically synthesized
  source 1..20: mol_type = other DNA
agggattggggtgcagagat

SEQ ID NO: 2068 - DNA, 20 bp, synthetic construct
  misc_feature 1..20: note = chemically synthesized
  source 1..20: mol_type = other DNA
ggattggggtgcagagataa

SEQ ID NO: 2069 - DNA, 20 bp, synthetic construct
  misc_feature 1..20: note = chemically synthesized
  source 1..20: mol_type = other DNA
gattggggtgcagagataag

SEQ ID NO: 2070 - DNA, 20 bp, synthetic construct
  misc_feature 1..20: note = chemically synthesized
  source 1..20: mol_type = other DNA
ggggtgcagagataagagga

SEQ ID NO: 2071 - DNA, 20 bp, synthetic construct
  misc_feature 1..20: note = chemically synthesized
  source 1..20: mol_type = other DNA
gggtgcagagataagaggat

SEQ ID NO: 2072 - DNA, 20 bp, synthetic construct
  misc_feature 1..20: note = chemically synthesized
  source 1..20: mol_type = other DNA
ggtgcagagataagaggatg

SEQ ID NO: 2073 - DNA, 20 bp, synthetic construct
  misc_feature 1..20: note = chemically synthesized
  source 1..20: mol_type = other DNA
agagataagaggatggggcg

SEQ ID NO: 2074 - DNA, 20 bp, synthetic construct
  misc_feature 1..20: note = chemically synthesized
  source 1..20: mol_type = other DNA
agaggatggggcgtggaaat

SEQ ID NO: 2075 - DNA, 20 bp, synthetic construct
  misc_feature 1..20: note = chemically synthesized
  source 1..20: mol_type = other DNA
gaggatggggcgtggaaata

SEQ ID NO: 2076 - DNA, 20 bp, synthetic construct
  misc_feature 1..20: note = chemically synthesized
  source 1..20: mol_type = other DNA
aggatggggcgtggaaataa

SEQ ID NO: 2077 - DNA, 20 bp, synthetic construct
  misc_feature 1..20: note = chemically synthesized
  source 1..20: mol_type = other DNA
tggggcgtggaaataaggga

SEQ ID NO: 2078 - DNA, 20 bp, synthetic construct
  misc_feature 1..20: note = chemically synthesized
  source 1..20: mol_type = other DNA
ggggcgtggaaataagggat

SEQ ID NO: 2079 - DNA, 20 bp, synthetic construct
  misc_feature 1..20: note = chemically synthesized
  source 1..20: mol_type = other DNA
gggcgtggaaataagggatg

SEQ ID NO: 2080 - DNA, 20 bp, synthetic construct
  misc_feature 1..20: note = chemically synthesized
  source 1..20: mol_type = other DNA
gaaataagggatggggtgct

SEQ ID NO: 2081 - DNA, 20 bp, synthetic construct
  misc_feature 1..20: note = chemically synthesized
  source 1..20: mol_type = other DNA
aagggatggggtgctgagat

SEQ ID NO: 2082 - DNA, 20 bp, synthetic construct
  misc_feature 1..20: note = chemically synthesized
  source 1..20: mol_type = other DNA
gggatggggtgctgagataa

SEQ ID NO: 2083 - DNA, 20 bp, synthetic construct
  misc_feature 1..20: note = chemically synthesized
  source 1..20: mol_type = other DNA
ggatggggtgctgagataag

SEQ ID NO: 2084 - DNA, 20 bp, synthetic construct
  misc_feature 1..20: note = chemically synthesized
  source 1..20: mol_type = other DNA
ggggtgctgagataagaggt

SEQ ID NO: 2085 - DNA, 20 bp, synthetic construct
  misc_feature 1..20: note = chemically synthesized
  source 1..20: mol_type = other DNA
gggtgctgagataagaggtt

SEQ ID NO: 2086 - DNA, 20 bp, synthetic construct
  misc_feature 1..20: note = chemically synthesized
  source 1..20: mol_type = other DNA
ggtgctgagataagaggttg

SEQ ID NO: 2087 - DNA, 20 bp, synthetic construct
  misc_feature 1..20: note = chemically synthesized
  source 1..20: mol_type = other DNA
tgagataagaggttggggca

SEQ ID NO: 2088 - DNA, 20 bp, synthetic construct
  misc_feature 1..20: note = chemically synthesized
  source 1..20: mol_type = other DNA
agaggttggggcacagaaat

SEQ ID NO: 2089 - DNA, 20 bp, synthetic construct
  misc_feature 1..20: note = chemically synthesized
  source 1..20: mol_type = other DNA
gaggttggggcacagaaata

SEQ ID NO: 2090 - DNA, 20 bp, synthetic construct
  misc_feature 1..20: note = chemically synthesized
  source 1..20: mol_type = other DNA
aggttggggcacagaaataa

SEQ ID NO: 2091 - DNA, 20 bp, synthetic construct
  misc_feature 1..20: note = chemically synthesized
  source 1..20: mol_type = other DNA
ggggcacagaaataagggat

SEQ ID NO: 2092 - DNA, 20 bp, synthetic construct
  misc_feature 1..20: note = chemically synthesized
  source 1..20: mol_type = other DNA
gggcacagaaataagggatt

SEQ ID NO: 2093 - DNA, 20 bp, synthetic construct
  misc_feature 1..20: note = chemically synthesized
  source 1..20: mol_type = other DNA
ggcacagaaataagggattg

SEQ ID NO: 2094 - DNA, 20 bp, synthetic construct
  misc_feature 1..20: note = chemically synthesized
  source 1..20: mol_type = other DNA
gggattggggttcttgcccc

SEQ ID NO: 2095 - DNA, 20 bp, synthetic construct
  misc_feature 1..20: note = chemically synthesized
  source 1..20: mol_type = other DNA
tggggttcttgcccccagaa

SEQ ID NO: 2096 - DNA, 20 bp, synthetic construct
  misc_feature 1..20: note = chemically synthesized
  source 1..20: mol_type = other DNA
ggttcttgcccccagaaaag

SEQ ID NO: 2097 - DNA, 20 bp, synthetic construct
  misc_feature 1..20: note = chemically synthesized
  source 1..20: mol_type = other DNA
ttgcccccagaaaagcagtg

SEQ ID NO: 2098 - DNA, 20 bp, synthetic construct
  misc_feature 1..20: note = chemically synthesized
  source 1..20: mol_type = other DNA
tgcccccagaaaagcagtga

SEQ ID NO: 2099 - DNA, 20 bp, synthetic construct
  misc_feature 1..20: note = chemically synthesized
  source 1..20: mol_type = other DNA
gcccccagaaaagcagtgaa

SEQ ID NO: 2100 - DNA, 20 bp, synthetic construct
  misc_feature 1..20: note = chemically synthesized
  source 1..20: mol_type = other DNA
cccccagaaaagcagtgaag

SEQ ID NO: 2101 - DNA, 20 bp, synthetic construct
  misc_feature 1..20: note = chemically synthesized
  source 1..20: mol_type = other DNA
ccagaaaagcagtgaagggg

SEQ ID NO: 2102 - DNA, 20 bp, synthetic construct
  misc_feature 1..20: note = chemically synthesized
  source 1..20: mol_type = other DNA
agaaaagcagtgaaggggca

SEQ ID NO: 2103 - DNA, 20 bp, synthetic construct
  misc_feature 1..20: note = chemically synthesized
  source 1..20: mol_type = other DNA
gcagtgaaggggcagagaca

SEQ ID NO: 2104 - DNA, 20 bp, synthetic construct
  misc_feature 1..20: note = chemically synthesized
  source 1..20: mol_type = other DNA
agtgaaggggcagagacatg

SEQ ID NO: 2105 - DNA, 20 bp, synthetic construct
  misc_feature 1..20: note = chemically synthesized
  source 1..20: mol_type = other DNA
tgaaggggcagagacatgga

SEQ ID NO: 2106 - DNA, 20 bp, synthetic construct
  misc_feature 1..20: note = chemically synthesized
  source 1..20: mol_type = other DNA
aggggcagagacatggagag

SEQ ID NO: 2107 - DNA, 20 bp, synthetic construct
  misc_feature 1..20: note = chemically synthesized
  source 1..20: mol_type = other DNA
ggggcagagacatggagaga

SEQ ID NO: 2108 - DNA, 20 bp, synthetic construct
  misc_feature 1..20: note = chemically synthesized
  source 1..20: mol_type = other DNA
gggcagagacatggagagaa

SEQ ID NO: 2109 - DNA, 20 bp, synthetic construct
  misc_feature 1..20: note = chemically synthesized
  source 1..20: mol_type = other DNA
ggcagagacatggagagaag

SEQ ID NO: 2110 - DNA, 20 bp, synthetic construct
  misc_feature 1..20: note = chemically synthesized
  source 1..20: mol_type = other DNA
gagacatggagagaaggggt

SEQ ID NO: 2111 - DNA, 20 bp, synthetic construct
  misc_feature 1..20: note = chemically synthesized
  source 1..20: mol_type = other DNA
agacatggagagaaggggtt

SEQ ID NO: 2112 - DNA, 20 bp, synthetic construct
  misc_feature 1..20: note = chemically synthesized
  source 1..20: mol_type = other DNA
gacatggagagaaggggttg

SEQ ID NO: 2113 - DNA, 20 bp, synthetic construct
  misc_feature 1..20: note = chemically synthesized
  source 1..20: mol_type = other DNA
ttggggtacttacccccctc

SEQ ID NO: 2114 - DNA, 20 bp, synthetic construct
  misc_feature 1..20: note = chemically synthesized
  source 1..20: mol_type = other DNA
gtacttacccccctccagaa

SEQ ID NO: 2115 - DNA, 20 bp, synthetic construct
  misc_feature 1..20: note = chemically synthesized
  source 1..20: mol_type = other DNA
cttacccccctccagaaaag

SEQ ID NO: 2116 - DNA, 20 bp, synthetic construct
  misc_feature 1..20: note = chemically synthesized
  source 1..20: mol_type = other DNA
ttacccccctccagaaaagt

SEQ ID NO: 2117 - DNA, 20 bp, synthetic construct
  misc_feature 1..20: note = chemically synthesized
  source 1..20: mol_type = other DNA
gaaaagtgggatttgccgct

SEQ ID NO: 2118 - DNA, 20 bp, synthetic construct
  misc_feature 1..20: note = chemically synthesized
  source 1..20: mol_type = other DNA
aaaagtgggatttgccgcta

SEQ ID NO: 2119 - DNA, 20 bp, synthetic construct
  misc_feature 1..20: note = chemically synthesized
  source 1..20: mol_type = other DNA
aaagtgggatttgccgctaa

SEQ ID NO: 2120 - DNA, 20 bp, synthetic construct
  misc_feature 1..20: note = chemically synthesized
  source 1..20: mol_type = other DNA
gggatttgccgctaagggtg

SEQ ID NO: 2121 - DNA, 20 bp, synthetic construct
  misc_feature 1..20: note = chemically synthesized
  source 1..20: mol_type = other DNA
ggatttgccgctaagggtga

SEQ ID NO: 2122 - DNA, 20 bp, synthetic construct
  misc_feature 1..20: note = chemically synthesized
  source 1..20: mol_type = other DNA
gccgctaagggtgaaggacc

SEQ ID NO: 2123 - DNA, 20 bp, synthetic construct
  misc_feature 1..20: note = chemically synthesized
  source 1..20: mol_type = other DNA
ccgctaagggtgaaggacca

SEQ ID NO: 2124 - DNA, 20 bp, synthetic construct
  misc_feature 1..20: note = chemically synthesized
  source 1..20: mol_type = other DNA
ctaagggtgaaggaccaagg

SEQ ID NO: 2125 - DNA, 20 bp, synthetic construct
  misc_feature 1..20: note = chemically synthesized
  source 1..20: mol_type = other DNA
taagggtgaaggaccaaggc

SEQ ID NO: 2126 - DNA, 20 bp, synthetic construct
  misc_feature 1..20: note = chemically synthesized
  source 1..20: mol_type = other DNA
ccaaggcaggcatccctgcg

SEQ ID NO: 2127 - DNA, 20 bp, synthetic construct
  misc_feature 1..20: note = chemically synthesized
  source 1..20: mol_type = other DNA
ggtctgacacctctgaaaca

SEQ ID NO: 2128 - DNA, 20 bp, synthetic construct
  misc_feature 1..20: note = chemically synthesized
  source 1..20: mol_type = other DNA
ctgaaacatggtttaataat

SEQ ID NO: 2129 - DNA, 20 bp, synthetic construct
  misc_feature 1..20: note = chemically synthesized
  source 1..20: mol_type = other DNA
gaaacatggtttaataatca

SEQ ID NO: 2130 - DNA, 20 bp, synthetic construct
  misc_feature 1..20: note = chemically synthesized
  source 1..20: mol_type = other DNA
aacatggtttaataatcaga

SEQ ID NO: 2131 - DNA, 20 bp, synthetic construct
  misc_feature 1..20: note = chemically synthesized
  source 1..20: mol_type = other DNA
acatggtttaataatcagag

SEQ ID NO: 2132 - DNA, 20 bp, synthetic construct
  misc_feature 1..20: note = chemically synthesized
  source 1..20: mol_type = other DNA
ccctgcaatgattaaacacc

SEQ ID NO: 2133 - DNA, 20 bp, synthetic construct
  misc_feature 1..20: note = chemically synthesized
  source 1..20: mol_type = other DNA
cctgcaatgattaaacacca

SEQ ID NO: 2134 - DNA, 20 bp, synthetic construct
  misc_feature 1..20: note = chemically synthesized
  source 1..20: mol_type = other DNA
ctgcaatgattaaacaccaa

SEQ ID NO: 2135 - DNA, 20 bp, synthetic construct
  misc_feature 1..20: note = chemically synthesized
  source 1..20: mol_type = other DNA
caatgattaaacaccaaggg

SEQ ID NO: 2136 - DNA, 20 bp, synthetic construct
  misc_feature 1..20: note = chemically synthesized
  source 1..20: mol_type = other DNA
aatgattaaacaccaaggga

SEQ ID NO: 2137 - DNA, 20 bp, synthetic construct
  misc_feature 1..20: note = chemically synthesized
  source 1..20: mol_type = other DNA
ccaagggaaggctgccttcc

SEQ ID NO: 2138 - DNA, 20 bp, synthetic construct
  misc_feature 1..20: note = chemically synthesized
  source 1..20: mol_type = other DNA
ctgccttcccagtccgtgac

SEQ ID NO: 2139 - DNA, 20 bp, synthetic construct
  misc_feature 1..20: note = chemically synthesized
  source 1..20: mol_type = other DNA
tcccagtccgtgactggcac

SEQ ID NO: 2140 - DNA, 20 bp, synthetic construct
  misc_feature 1..20: note = chemically synthesized
  source 1..20: mol_type = other DNA
ccagtccgtgactggcaccg

SEQ ID NO: 2141 - DNA, 20 bp, synthetic construct
  misc_feature 1..20: note = chemically synthesized
  source 1..20: mol_type = other DNA
cgtgactggcaccggagttt

SEQ ID NO: 2142 - DNA, 20 bp, synthetic construct
  misc_feature 1..20: note = chemically synthesized
  source 1..20: mol_type = other DNA
gtgactggcaccggagtttt

SEQ ID NO: 2143 - DNA, 20 bp, synthetic construct
  misc_feature 1..20: note = chemically synthesized
  source 1..20: mol_type = other DNA
gcaccggagttttgggtcca

SEQ ID NO: 2144 - DNA, 20 bp, synthetic construct
  misc_feature 1..20: note = chemically synthesized
  source 1..20: mol_type = other DNA
catgtctcctttgtctctac

SEQ ID NO: 2145 - DNA, 20 bp, synthetic construct
  misc_feature 1..20: note = chemically synthesized
  source 1..20: mol_type = other DNA
ttgtctctactggaaaatga

SEQ ID NO: 2146 - DNA, 20 bp, synthetic construct
  misc_feature 1..20: note = chemically synthesized
  source 1..20: mol_type = other DNA
tgtctctactggaaaatgaa

SEQ ID NO: 2147 - DNA, 20 bp, synthetic construct
  misc_feature 1..20: note = chemically synthesized
  source 1..20: mol_type = other DNA
aaatgaaaggaattgaaatt

SEQ ID NO: 2148 - DNA, 20 bp, synthetic construct
  misc_feature 1..20: note = chemically synthesized
  source 1..20: mol_type = other DNA
atgaaaggaattgaaattaa

SEQ ID NO: 2149 - DNA, 20 bp, synthetic construct
  misc_feature 1..20: note = chemically synthesized
  source 1..20: mol_type = other DNA
aaaggaattgaaattaagag

SEQ ID NO: 2150 - DNA, 20 bp, synthetic construct
  misc_feature 1..20: note = chemically synthesized
  source 1..20: mol_type = other DNA
aaggaattgaaattaagaga

SEQ ID NO: 2151 - DNA, 20 bp, synthetic construct
  misc_feature 1..20: note = chemically synthesized
  source 1..20: mol_type = other DNA
aggaattgaaattaagagaa

SEQ ID NO: 2152 - DNA, 20 bp, synthetic construct
  misc_feature 1..20: note = chemically synthesized
  source 1..20: mol_type = other DNA
gaattgaaattaagagaagg

SEQ ID NO: 2153 - DNA, 20 bp, synthetic construct
  misc_feature 1..20: note = chemically synthesized
  source 1..20: mol_type = other DNA
ttaagagaagggagaaattg

SEQ ID NO: 2154 - DNA, 20 bp, synthetic construct
  misc_feature 1..20: note = chemically synthesized
  source 1..20: mol_type = other DNA
agaagggagaaattgaagtg

SEQ ID NO: 2155 - DNA, 20 bp, synthetic construct
  misc_feature 1..20: note = chemically synthesized
  source 1..20: mol_type = other DNA
agaaattgaagtgtggtgcc

SEQ ID NO: 2156 - DNA, 20 bp, synthetic construct
  misc_feature 1..20: note = chemically synthesized
  source 1..20: mol_type = other DNA
aagtgtggtgccaagattga

SEQ ID NO: 2157 - DNA, 20 bp, synthetic construct
  misc_feature 1..20: note = chemically synthesized
  source 1..20: mol_type = other DNA
agtgtggtgccaagattgaa

SEQ ID NO: 2158 - DNA, 20 bp, synthetic construct
  misc_feature 1..20: note = chemically synthesized
  source 1..20: mol_type = other DNA
tgtggtgccaagattgaaag

SEQ ID NO: 2159 - DNA, 20 bp, synthetic construct
  misc_feature 1..20: note = chemically synthesized
  source 1..20: mol_type = other DNA
gtgccaagattgaaaggaga

SEQ ID NO: 2160 - DNA, 20 bp, synthetic construct
  misc_feature 1..20: note = chemically synthesized
  source 1..20: mol_type = other DNA
ccaagattgaaaggagaaag

SEQ ID NO: 2161 - DNA, 20 bp, synthetic construct
  misc_feature 1..20: note = chemically synthesized
  source 1..20: mol_type = other DNA
attgaaaggagaaagaagtt

SEQ ID NO: 2162 - DNA, 20 bp, synthetic construct
  misc_feature 1..20: note = chemically synthesized
  source 1..20: mol_type = other DNA
ttgaaaggagaaagaagttg

SEQ ID NO: 2163 - DNA, 20 bp, synthetic construct
  misc_feature 1..20: note = chemically synthesized
  source 1..20: mol_type = other DNA
tgaaaggagaaagaagttga

SEQ ID NO: 2164 - DNA, 20 bp, synthetic construct
  misc_feature 1..20: note = chemically synthesized
  source 1..20: mol_type = other DNA
aggagaaagaagttgaggga

SEQ ID NO: 2165 - DNA, 20 bp, synthetic construct
  misc_feature 1..20: note = chemically synthesized
  source 1..20: mol_type = other DNA
gaaagaagttgagggatagt

SEQ ID NO: 2166 - DNA, 20 bp, synthetic construct
  misc_feature 1..20: note = chemically synthesized
  source 1..20: mol_type = other DNA
aaagaagttgagggatagtg

SEQ ID NO: 2167 - DNA, 20 bp, synthetic construct
  misc_feature 1..20: note = chemically synthesized
  source 1..20: mol_type = other DNA
aagaagttgagggatagtga

SEQ ID NO: 2168 - DNA, 20 bp, synthetic construct
  misc_feature 1..20: note = chemically synthesized
  source 1..20: mol_type = other DNA
gaagttgagggatagtgagg

SEQ ID NO: 2169 - DNA, 20 bp, synthetic construct
  misc_feature 1..20: note = chemically synthesized
  source 1..20: mol_type = other DNA
aagttgagggatagtgaggg

SEQ ID NO: 2170 - DNA, 20 bp, synthetic construct
  misc_feature 1..20: note = chemically synthesized
  source 1..20: mol_type = other DNA
tgagggatagtgagggaggt

SEQ ID NO: 2171 - DNA, 20 bp, synthetic construct
  misc_feature 1..20: note = chemically synthesized
  source 1..20: mol_type = other DNA
agggatagtgagggaggttg

SEQ ID NO: 2172 - DNA, 20 bp, synthetic construct
  misc_feature 1..20: note = chemically synthesized
  source 1..20: mol_type = other DNA
gatagtgagggaggttggag

SEQ ID NO: 2173 - DNA, 20 bp, synthetic construct
  misc_feature 1..20: note = chemically synthesized
  source 1..20: mol_type = other DNA
gtgagggaggttggagaaga

SEQ ID NO: 2174 - DNA, 20 bp, synthetic construct
  misc_feature 1..20: note = chemically synthesized
  source 1..20: mol_type = other DNA
aggttggagaagacagtaaa

SEQ ID NO: 2175 - DNA, 20 bp, synthetic construct
  misc_feature 1..20: note = chemically synthesized
  source 1..20: mol_type = other DNA
gttggagaagacagtaaaaa

SEQ ID NO: 2176 - DNA, 20 bp, synthetic construct
  misc_feature 1..20: note = chemically synthesized
  source 1..20: mol_type = other DNA
ttggagaagacagtaaaaag

SEQ ID NO: 2177 - DNA, 20 bp, synthetic construct
  misc_feature 1..20: note = chemically synthesized
  source 1..20: mol_type = other DNA
agtaaaaagaggccacttac

SEQ ID NO: 2178 - DNA, 20 bp, synthetic construct
  misc_feature 1..20: note = chemically synthesized
  source 1..20: mol_type = other DNA
ccacttaccggatttgaaat

SEQ ID NO: 2179 - DNA, 20 bp, synthetic construct
  misc_feature 1..20: note = chemically synthesized
  source 1..20: mol_type = other DNA
gaaattggtgaaatgtttct

SEQ ID NO: 2180 - DNA, 20 bp, synthetic construct
  misc_feature 1..20: note = chemically synthesized
  source 1..20: mol_type = other DNA
aaattggtgaaatgtttctt

SEQ ID NO: 2181 - DNA, 20 bp, synthetic construct
  misc_feature 1..20: note = chemically synthesized
  source 1..20: mol_type = other DNA
tggtgaaatgtttcttgggc

SEQ ID NO: 2182 - DNA, 20 bp, synthetic construct
  misc_feature 1..20: note = chemically synthesized
  source 1..20: mol_type = other DNA
gaaatgtttcttgggctggt

SEQ ID NO: 2183 - DNA, 20 bp, synthetic construct
  misc_feature 1..20: note = chemically synthesized
  source 1..20: mol_type = other DNA
tttcttgggctggtcagttt

SEQ ID NO: 2184 - DNA, 20 bp, synthetic construct
  misc_feature 1..20: note = chemically synthesized
  source 1..20: mol_type = other DNA
ttcttgggctggtcagtttg

SEQ ID NO: 2185 - DNA, 20 bp, synthetic construct
  misc_feature 1..20: note = chemically synthesized
  source 1..20: mol_type = other DNA
gctggtcagtttgaggacct

SEQ ID NO: 2186 - DNA, 20 bp, synthetic construct
  misc_feature 1..20: note = chemically synthesized
  source 1..20: mol_type = other DNA
ctggtcagtttgaggacctg

SEQ ID NO: 2187 - DNA, 20 bp, synthetic construct
  misc_feature 1..20: note = chemically synthesized
  source 1..20: mol_type = other DNA
agtttgaggacctgaggtcg

SEQ ID NO: 2188 - DNA, 20 bp, synthetic construct
  misc_feature 1..20: note = chemically synthesized
  source 1..20: mol_type = other DNA
gtttgaggacctgaggtcgt

SEQ ID NO: 2189 - DNA, 20 bp, synthetic construct
  misc_feature 1..20: note = chemically synthesized
  source 1..20: mol_type = other DNA
tgaggacctgaggtcgtagg

SEQ ID NO: 2190 - DNA, 20 bp, synthetic construct
  misc_feature 1..20: note = chemically synthesized
  source 1..20: mol_type = other DNA
tcgtaggtggatctttctca

SEQ ID NO: 2191 - DNA, 20 bp, synthetic construct
  misc_feature 1..20: note = chemically synthesized
  source 1..20: mol_type = other DNA
gtaggtggatctttctcacg

SEQ ID NO: 2192 - DNA, 20 bp, synthetic construct
  misc_feature 1..20: note = chemically synthesized
  source 1..20: mol_type = other DNA
tggatctttctcacggagca

SEQ ID NO: 2193 - DNA, 20 bp, synthetic construct
  misc_feature 1..20: note = chemically synthesized
  source 1..20: mol_type = other DNA
gatctttctcacggagcaaa

SEQ ID NO: 2194 - DNA, 20 bp, synthetic construct
  misc_feature 1..20: note = chemically synthesized
  source 1..20: mol_type = other DNA
ctttctcacggagcaaagag

SEQ ID NO: 2195 - DNA, 20 bp, synthetic construct
  misc_feature 1..20: note = chemically synthesized
  source 1..20: mol_type = other DNA
tttctcacggagcaaagagc

SEQ ID NO: 2196 - DNA, 20 bp, synthetic construct
  misc_feature 1..20: note = chemically synthesized
  source 1..20: mol_type = other DNA
tctcacggagcaaagagcag

SEQ ID NO: 2197 - DNA, 20 bp, synthetic construct
  misc_feature 1..20: note = chemically synthesized
  source 1..20: mol_type = other DNA
ctcacggagcaaagagcagg

SEQ ID NO: 2198 - DNA, 20 bp, synthetic construct
  misc_feature 1..20: note = chemically synthesized
  source 1..20: mol_type = other DNA
cggagcaaagagcaggagga

SEQ ID NO: 2199 - DNA, 20 bp, synthetic construct
  misc_feature 1..20: note = chemically synthesized
  source 1..20: mol_type = other DNA
ggagcaaagagcaggaggac

SEQ ID NO: 2200 - DNA, 20 bp, synthetic construct
  misc_feature 1..20: note = chemically synthesized
  source 1..20: mol_type = other DNA
gagcaaagagcaggaggaca

SEQ ID NO: 2201 - DNA, 20 bp, synthetic construct
  misc_feature 1..20: note = chemically synthesized
  source 1..20: mol_type = other DNA
agcaaagagcaggaggacag

SEQ ID NO: 2202 - DNA, 20 bp, synthetic construct
  misc_feature 1..20: note = chemically synthesized
  source 1..20: mol_type = other DNA
ggacaggggattgatctccc

SEQ ID NO: 2203 - DNA, 20 bp, synthetic construct
  misc_feature 1..20: note = chemically synthesized
  source 1..20: mol_type = other DNA
gacaggggattgatctccca

SEQ ID NO: 2204 - DNA, 20 bp, synthetic construct
  misc_feature 1..20: note = chemically synthesized
  source 1..20: mol_type = other DNA
acaggggattgatctcccaa

SEQ ID NO: 2205 - DNA, 20 bp, synthetic construct
  misc_feature 1..20: note = chemically synthesized
  source 1..20: mol_type = other DNA
aggggattgatctcccaagg

SEQ ID NO: 2206 - DNA, 20 bp, synthetic construct
  misc_feature 1..20: note = chemically synthesized
  source 1..20: mol_type = other DNA
ggggattgatctcccaaggg

SEQ ID NO: 2207 - DNA, 20 bp, synthetic construct
  misc_feature 1..20: note = chemically synthesized
  source 1..20: mol_type = other DNA
caagggaggtcccccaatct

SEQ ID NO: 2208 - DNA, 20 bp, synthetic construct
  misc_feature 1..20: note = chemically synthesized
  source 1..20: mol_type = other DNA
aggtcccccaatctgagtca

SEQ ID NO: 2209 - DNA, 20 bp, synthetic construct
  misc_feature 1..20: note = chemically synthesized
  source 1..20: mol_type = other DNA
atttcatgcgcgtccatatg

SEQ ID NO: 2210 - DNA, 20 bp, synthetic construct
  misc_feature 1..20: note = chemically synthesized
  source 1..20: mol_type = other DNA
ttcatgcgcgtccatatgaa

SEQ ID NO: 2211 - DNA, 20 bp, synthetic construct
  misc_feature 1..20: note = chemically synthesized
  source 1..20: mol_type = other DNA
catatgaagagactaccaaa

SEQ ID NO: 2212 - DNA, 20 bp, synthetic construct
  misc_feature 1..20: note = chemically synthesized
  source 1..20: mol_type = other DNA
atatgaagagactaccaaac

SEQ ID NO: 2213 - DNA, 20 bp, synthetic construct
  misc_feature 1..20: note = chemically synthesized
  source 1..20: mol_type = other DNA
ctaccaaacaggctttgtgt

SEQ ID NO: 2214 - DNA, 20 bp, synthetic construct
  misc_feature 1..20: note = chemically synthesized
  source 1..20: mol_type = other DNA
acaggctttgtgtaagcaac

SEQ ID NO: 2215 - DNA, 20 bp, synthetic construct
  misc_feature 1..20: note = chemically synthesized
  source 1..20: mol_type = other DNA
caggctttgtgtaagcaaca

SEQ ID NO: 2216 - DNA, 20 bp, synthetic construct
  misc_feature 1..20: note = chemically synthesized
  source 1..20: mol_type = other DNA
acaaggctgtttatttcacc

SEQ ID NO: 2217 - DNA, 20 bp, synthetic construct
  misc_feature 1..20: note = chemically synthesized
  source 1..20: mol_type = other DNA
caaggctgtttatttcacct

SEQ ID NO: 2218 - DNA, 20 bp, synthetic construct
  misc_feature 1..20: note = chemically synthesized
  source 1..20: mol_type = other DNA
ctgtttatttcacctgggtg

SEQ ID NO: 2219 - DNA, 20 bp, synthetic construct
  misc_feature 1..20: note = chemically synthesized
  source 1..20: mol_type = other DNA
tgtttatttcacctgggtgc

SEQ ID NO: 2220 - DNA, 20 bp, synthetic construct
  misc_feature 1..20: note = chemically synthesized
  source 1..20: mol_type = other DNA
ttatttcacctgggtgcagg

SEQ ID NO: 2221 - DNA, 20 bp, synthetic construct
  misc_feature 1..20: note = chemically synthesized
  source 1..20: mol_type = other DNA
tatttcacctgggtgcaggc

SEQ ID NO: 2222 - DNA, 20 bp, synthetic construct
  misc_feature 1..20: note = chemically synthesized
  source 1..20: mol_type = other DNA
cacctgggtgcaggcaggct

SEQ ID NO: 2223 - DNA, 20 bp, synthetic construct
  misc_feature 1..20: note = chemically synthesized
  source 1..20: mol_type = other DNA
gcaggcaggctgagtccaaa

SEQ ID NO: 2224 - DNA, 20 bp, synthetic construct
  misc_feature 1..20: note = chemically synthesized
  source 1..20: mol_type = other DNA
aggcaggctgagtccaaaaa

SEQ ID NO: 2225 - DNA, 20 bp, synthetic construct
  misc_feature 1..20: note = chemically synthesized
  source 1..20: mol_type = other DNA
gcaggctgagtccaaaaaga

SEQ ID NO: 2226 - DNA, 20 bp, synthetic construct
  misc_feature 1..20: note = chemically synthesized
  source 1..20: mol_type = other DNA
gctgagtccaaaaagagagt

SEQ ID NO: 2227 - DNA, 20 bp, synthetic construct
  misc_feature 1..20: note = chemically synthesized
  source 1..20: mol_type = other DNA
gtccaaaaagagagtcagca

SEQ ID NO: 2228 - DNA, 20 bp, synthetic construct
  misc_feature 1..20: note = chemically synthesized
  source 1..20: mol_type = other DNA
tccaaaaagagagtcagcaa

SEQ ID NO: 2229 - DNA, 20 bp, synthetic construct
  misc_feature 1..20: note = chemically synthesized
  source 1..20: mol_type = other DNA
ccaaaaagagagtcagcaaa

SEQ ID NO: 2230 - DNA, 20 bp, synthetic construct
  misc_feature 1..20: note = chemically synthesized
  source 1..20: mol_type = other DNA
aaaaagagagtcagcaaagg

SEQ ID NO: 2231 - DNA, 20 bp, synthetic construct
  misc_feature 1..20: note = chemically synthesized
  source 1..20: mol_type = other DNA
agagagtcagcaaagggaga

SEQ ID NO: 2232 - DNA, 20 bp, synthetic construct
  misc_feature 1..20: note = chemically synthesized
  source 1..20: mol_type = other DNA
gagagtcagcaaagggagat

SEQ ID NO: 2233 - DNA, 20 bp, synthetic construct
  misc_feature 1..20: note = chemically synthesized
  source 1..20: mol_type = other DNA
gagtcagcaaagggagatag

SEQ ID NO: 2234 - DNA, 20 bp, synthetic construct
  misc_feature 1..20: note = chemically synthesized
  source 1..20: mol_type = other DNA
tcagcaaagggagataggag

SEQ ID NO: 2235 - DNA, 20 bp, synthetic construct
  misc_feature 1..20: note = chemically synthesized
  source 1..20: mol_type = other DNA
cagcaaagggagataggagt

SEQ ID NO: 2236 - DNA, 20 bp, synthetic construct
  misc_feature 1..20: note = chemically synthesized
  source 1..20: mol_type = other DNA
agcaaagggagataggagtg

SEQ ID NO: 2237 - DNA, 20 bp, synthetic construct
  misc_feature 1..20: note = chemically synthesized
  source 1..20: mol_type = other DNA
taggagtggggctgttttat

SEQ ID NO: 2238 - DNA, 20 bp, synthetic construct
  misc_feature 1..20: note = chemically synthesized
  source 1..20: mol_type = other DNA
tggggctgttttataagatt

SEQ ID NO: 2239 - DNA, 20 bp, synthetic construct
  misc_feature 1..20: note = chemically synthesized
  source 1..20: mol_type = other DNA
ggggctgttttataagattt

SEQ ID NO: 2240 - DNA, 20 bp, synthetic construct
  misc_feature 1..20: note = chemically synthesized
  source 1..20: mol_type = other DNA
gctgttttataagatttggg

SEQ ID NO: 2241 - DNA, 20 bp, synthetic construct
  misc_feature 1..20: note = chemically synthesized
  source 1..20: mol_type = other DNA
ctgttttataagatttgggt

SEQ ID NO: 2242 - DNA, 20 bp, synthetic construct
  misc_feature 1..20: note = chemically synthesized
  source 1..20: mol_type = other DNA
ttataagatttgggtaggta

SEQ ID NO: 2243 - DNA, 20 bp, synthetic construct
  misc_feature 1..20: note = chemically synthesized
  source 1..20: mol_type = other DNA
tataagatttgggtaggtaa

SEQ ID NO: 2244 - DNA, 20 bp, synthetic construct
  misc_feature 1..20: note = chemically synthesized
  source 1..20: mol_type = other DNA
gggtaggtaaaggaaaatta

SEQ ID NO: 2245 - DNA, 20 bp, synthetic construct
  misc_feature 1..20: note = chemically synthesized
  source 1..20: mol_type = other DNA
gtaaaggaaaattacagtca

SEQ ID NO: 2246 - DNA, 20 bp, synthetic construct
  misc_feature 1..20: note = chemically synthesized
  source 1..20: mol_type = other DNA
taaaggaaaattacagtcaa

SEQ ID NO: 2247 - DNA, 20 bp, synthetic construct
  misc_feature 1..20: note = chemically synthesized
  source 1..20: mol_type = other DNA
aaaggaaaattacagtcaaa

SEQ ID NO: 2248 - DNA, 20 bp, synthetic construct
  misc_feature 1..20: note = chemically synthesized
  source 1..20: mol_type = other DNA
aaggaaaattacagtcaaag

SEQ ID NO: 2249 - DNA, 20 bp, synthetic construct
  misc_feature 1..20: note = chemically synthesized
  source 1..20: mol_type = other DNA
aggaaaattacagtcaaagg

SEQ ID NO: 2250 - DNA, 20 bp, synthetic construct
  misc_feature 1..20: note = chemically synthesized
  source 1..20: mol_type = other DNA
ggaaaattacagtcaaaggg

SEQ ID NO: 2251 - DNA, 20 bp, synthetic construct
  misc_feature 1..20: note = chemically synthesized
  source 1..20: mol_type = other DNA
gtcaaaggggggttgttctc

SEQ ID NO: 2252 - DNA, 20 bp, synthetic construct
  misc_feature 1..20: note = chemically synthesized
  source 1..20: mol_type = other DNA
aaaggggggttgttctctgg

SEQ ID NO: 2253 - DNA, 20 bp, synthetic construct
  misc_feature 1..20: note = chemically synthesized
  source 1..20: mol_type = other DNA
aaggggggttgttctctggc

SEQ ID NO: 2254 - DNA, 20 bp, synthetic construct
  misc_feature 1..20: note = chemically synthesized
  source 1..20: mol_type = other DNA
gggggttgttctctggcggg

SEQ ID NO: 2255 - DNA, 20 bp, synthetic construct
  misc_feature 1..20: note = chemically synthesized
  source 1..20: mol_type = other DNA
ggggttgttctctggcgggc

SEQ ID NO: 2256 - DNA, 20 bp, synthetic construct
  misc_feature 1..20: note = chemically synthesized
  source 1..20: mol_type = other DNA
ggttgttctctggcgggcag

SEQ ID NO: 2257 - DNA, 20 bp, synthetic construct
  misc_feature 1..20: note = chemically synthesized
  source 1..20: mol_type = other DNA
tgttctctggcgggcaggag

SEQ ID NO: 2258 - DNA, 20 bp, synthetic construct
  misc_feature 1..20: note = chemically synthesized
  source 1..20: mol_type = other DNA
gttctctggcgggcaggagt

SEQ ID NO: 2259 - DNA, 20 bp, synthetic construct
  misc_feature 1..20: note = chemically synthesized
  source 1..20: mol_type = other DNA
ttctctggcgggcaggagtg

SEQ ID NO: 2260 - DNA, 20 bp, synthetic construct
  misc_feature 1..20: note = chemically synthesized
  source 1..20: mol_type = other DNA
tctctggcgggcaggagtgg

SEQ ID NO: 2261 - DNA, 20 bp, synthetic construct
  misc_feature 1..20: note = chemically synthesized
  source 1..20: mol_type = other DNA
cgggcaggagtgggggtcac

SEQ ID NO: 2262 - DNA, 20 bp, synthetic construct
  misc_feature 1..20: note = chemically synthesized
  source 1..20: mol_type = other DNA
gggcaggagtgggggtcaca

SEQ ID NO: 2263 - DNA, 20 bp, synthetic construct
  misc_feature 1..20: note = chemically synthesized
  source 1..20: mol_type = other DNA
agtgggggtcacaaggtgct

SEQ ID NO: 2264 - DNA, 20 bp, synthetic construct
  misc_feature 1..20: note = chemically synthesized
  source 1..20: mol_type = other DNA
gggggtcacaaggtgctcag

SEQ ID NO: 2265 - DNA, 20 bp, synthetic construct
  misc_feature 1..20: note = chemically synthesized
  source 1..20: mol_type = other DNA
ggggtcacaaggtgctcagt

SEQ ID NO: 2266 - DNA, 20 bp, synthetic construct
  misc_feature 1..20: note = chemically synthesized
  source 1..20: mol_type = other DNA
gggtcacaaggtgctcagta

SEQ ID NO: 2267 - DNA, 20 bp, synthetic construct
  misc_feature 1..20: note = chemically synthesized
  source 1..20: mol_type = other DNA
ggtcacaaggtgctcagtag

SEQ ID NO: 2268 - DNA, 20 bp, synthetic construct
  misc_feature 1..20: note = chemically synthesized
  source 1..20: mol_type = other DNA
tcacaaggtgctcagtaggg

SEQ ID NO: 2269 - DNA, 20 bp, synthetic construct
  misc_feature 1..20: note = chemically synthesized
  source 1..20: mol_type = other DNA
tgctcagtaggggagctttt

SEQ ID NO: 2270 - DNA, 20 bp, synthetic construct
  misc_feature 1..20: note = chemically synthesized
  source 1..20: mol_type = other DNA
cagtaggggagcttttgagc

SEQ ID NO: 2271 - DNA, 20 bp, synthetic construct
  misc_feature 1..20: note = chemically synthesized
  source 1..20: mol_type = other DNA
agtaggggagcttttgagcc

SEQ ID NO: 2272 - DNA, 20 bp, synthetic construct
  misc_feature 1..20: note = chemically synthesized
  source 1..20: mol_type = other DNA
gggagcttttgagccaggat

SEQ ID NO: 2273 - DNA, 20 bp, synthetic construct
  misc_feature 1..20: note = chemically synthesized
  source 1..20: mol_type = other DNA
gcttttgagccaggatgagc

SEQ ID NO: 2274 - DNA, 20 bp, synthetic construct
  misc_feature 1..20: note = chemically synthesized
  source 1..20: mol_type = other DNA
cttttgagccaggatgagcc

SEQ ID NO: 2275 - DNA, 20 bp, synthetic construct
  misc_feature 1..20: note = chemically synthesized
  source 1..20: mol_type = other DNA
tttgagccaggatgagccag

SEQ ID NO: 2276 - DNA, 20 bp, synthetic construct
  misc_feature 1..20: note = chemically synthesized
  source 1..20: mol_type = other DNA
gagccaggatgagccaggag

SEQ ID NO: 2277 - DNA, 20 bp, synthetic construct
  misc_feature 1..20: note = chemically synthesized
  source 1..20: mol_type = other DNA
agccaggatgagccaggaga

SEQ ID NO: 2278 - DNA, 20 bp, synthetic construct
  misc_feature 1..20: note = chemically synthesized
  source 1..20: mol_type = other DNA
gccaggagaaggaatttcac

SEQ ID NO: 2279 - DNA, 20 bp, synthetic construct
  misc_feature 1..20: note = chemically synthesized
  source 1..20: mol_type = other DNA
atttcacaagacaatgtcat

SEQ ID NO: 2280 - DNA, 20 bp, synthetic construct
  misc_feature 1..20: note = chemically synthesized
  source 1..20: mol_type = other DNA
acaagacaatgtcatcagtt

SEQ ID NO: 2281 - DNA, 20 bp, synthetic construct
  misc_feature 1..20: note = chemically synthesized
  source 1..20: mol_type = other DNA
caagacaatgtcatcagtta

SEQ ID NO: 2282 - DNA, 20 bp, synthetic construct
  misc_feature 1..20: note = chemically synthesized
  source 1..20: mol_type = other DNA
gacaatgtcatcagttaagg

SEQ ID NO: 2283 - DNA, 20 bp, synthetic construct
  misc_feature 1..20: note = chemically synthesized
  source 1..20: mol_type = other DNA
acaatgtcatcagttaaggc

SEQ ID NO: 2284 - DNA, 20 bp, synthetic construct
  misc_feature 1..20: note = chemically synthesized
  source 1..20: mol_type = other DNA
gtcatcagttaaggcaggaa

SEQ ID NO: 2285 - DNA, 20 bp, synthetic construct
  misc_feature 1..20: note = chemically synthesized
  source 1..20: mol_type = other DNA
tcatcagttaaggcaggaac

SEQ ID NO: 2286 - DNA, 20 bp, synthetic construct
  misc_feature 1..20: note = chemically synthesized
  source 1..20: mol_type = other DNA
ggccattttcacttcttttg

SEQ ID NO: 2287 - DNA, 20 bp, synthetic construct
  misc_feature 1..20: note = chemically synthesized
  source 1..20: mol_type = other DNA
cattttcacttcttttgtgg

SEQ ID NO: 2288 - DNA, 20 bp, synthetic construct
  misc_feature 1..20: note = chemically synthesized
  source 1..20: mol_type = other DNA
cttttgtggtggaatgtcat

SEQ ID NO: 2289 - DNA, 20 bp, synthetic construct
  misc_feature 1..20: note = chemically synthesized
  source 1..20: mol_type = other DNA
gtggtggaatgtcatcagtt

SEQ ID NO: 2290 - DNA, 20 bp, synthetic construct
  misc_feature 1..20: note = chemically synthesized
  source 1..20: mol_type = other DNA
tggtggaatgtcatcagtta

SEQ ID NO: 2291 - DNA, 20 bp, synthetic construct
  misc_feature 1..20: note = chemically synthesized
  source 1..20: mol_type = other DNA
tggaatgtcatcagttaagg

SEQ ID NO: 2292 - DNA, 20 bp, synthetic construct
  misc_feature 1..20: note = chemically synthesized
  source 1..20: mol_type = other DNA
tcatcagttaaggcagaaac

SEQ ID NO: 2293 - DNA, 20 bp, synthetic construct
  misc_feature 1..20: note = chemically synthesized
  source 1..20: mol_type = other DNA
gccatctgtatgtgtatatg

SEQ ID NO: 2294 - DNA, 20 bp, synthetic construct
  misc_feature 1..20: note = chemically synthesized
  source 1..20: mol_type = other DNA
ccatctgtatgtgtatatgc

SEQ ID NO: 2295 - DNA, 20 bp, synthetic construct
  misc_feature 1..20: note = chemically synthesized
  source 1..20: mol_type = other DNA
gtatgtgtatatgcaggtca

SEQ ID NO: 2296 - DNA, 20 bp, synthetic construct
  misc_feature 1..20: note = chemically synthesized
  source 1..20: mol_type = other DNA
tatgtgtatatgcaggtcac

SEQ ID NO: 2297 - DNA, 20 bp, synthetic construct
  misc_feature 1..20: note = chemically synthesized
  source 1..20: mol_type = other DNA
atgtgtatatgcaggtcaca

SEQ ID NO: 2298 - DNA, 20 bp, synthetic construct
  misc_feature 1..20: note = chemically synthesized
  source 1..20: mol_type = other DNA
tgtgtatatgcaggtcacag

SEQ ID NO: 2299 - DNA, 20 bp, synthetic construct
  misc_feature 1..20: note = chemically synthesized
  source 1..20: mol_type = other DNA
gcaggtcacaggggacatga

SEQ ID NO: 2300 - DNA, 20 bp, synthetic construct
  misc_feature 1..20: note = chemically synthesized
  source 1..20: mol_type = other DNA
tcacaggggacatgatggct

SEQ ID NO: 2301 - DNA, 20 bp, synthetic construct
  misc_feature 1..20: note = chemically synthesized
  source 1..20: mol_type = other DNA
ggggacatgatggcttagct

SEQ ID NO: 2302 - DNA, 20 bp, synthetic construct
  misc_feature 1..20: note = chemically synthesized
  source 1..20: mol_type = other DNA
gggacatgatggcttagctt

SEQ ID NO: 2303 - DNA, 20 bp, synthetic construct
  misc_feature 1..20: note = chemically synthesized
  source 1..20: mol_type = other DNA
atgatggcttagcttgggct

SEQ ID NO: 2304 - DNA, 20 bp, synthetic construct
  misc_feature 1..20: note = chemically synthesized
  source 1..20: mol_type = other DNA
gatggcttagcttgggctca

SEQ ID NO: 2305 - DNA, 20 bp, synthetic construct
  misc_feature 1..20: note = chemically synthesized
  source 1..20: mol_type = other DNA
atggcttagcttgggctcag

SEQ ID NO: 2306 - DNA, 20 bp, synthetic construct
  misc_feature 1..20: note = chemically synthesized
  source 1..20: mol_type = other DNA
gggctcagaggcctgacatt

SEQ ID NO: 2307 - DNA, 20 bp, synthetic construct
  misc_feature 1..20: note = chemically synthesized
  source 1..20: mol_type = other DNA
ggctcagaggcctgacattc

SEQ ID NO: 2308 - DNA, 20 bp, synthetic construct
  misc_feature 1..20: note = chemically synthesized
  source 1..20: mol_type = other DNA
ctcagaggcctgacattcag

SEQ ID NO: 2309 - DNA, 20 bp, synthetic construct
  misc_feature 1..20: note = chemically synthesized
  source 1..20: mol_type = other DNA
atcttcttgttattcatttc

SEQ ID NO: 2310 - DNA, 20 bp, synthetic construct
  misc_feature 1..20: note = chemically synthesized
  source 1..20: mol_type = other DNA
tttctagttttattccactg

SEQ ID NO: 2311 - DNA, 20 bp, synthetic construct
  misc_feature 1..20: note = chemically synthesized
  source 1..20: mol_type = other DNA
tagttttattccactgtggt

SEQ ID NO: 2312 - DNA, 20 bp, synthetic construct
  misc_feature 1..20: note = chemically synthesized
  source 1..20: mol_type = other DNA
atttgtacaaacttaccttg

SEQ ID NO: 2313 - DNA, 20 bp, synthetic construct
  misc_feature 1..20: note = chemically synthesized
  source 1..20: mol_type = other DNA
ttaccttgtggcctaacata

SEQ ID NO: 2314 - DNA, 20 bp, synthetic construct
  misc_feature 1..20: note = chemically synthesized
  source 1..20: mol_type = other DNA
gcctaacatatggccttatt

SEQ ID NO: 2315 - DNA, 20 bp, synthetic construct
  misc_feature 1..20: note = chemically synthesized
  source 1..20: mol_type = other DNA
cctaacatatggccttattt

SEQ ID NO: 2316 - DNA, 20 bp, synthetic construct
  misc_feature 1..20: note = chemically synthesized
  source 1..20: mol_type = other DNA
atgttgtacatgctgcttta

SEQ ID NO: 2317 - DNA, 20 bp, synthetic construct
  misc_feature 1..20: note = chemically synthesized
  source 1..20: mol_type = other DNA
ttaaagaaatgtatcttctt

SEQ ID NO: 2318 - DNA, 20 bp, synthetic construct
  misc_feature 1..20: note = chemically synthesized
  source 1..20: mol_type = other DNA
aagaaatgtatcttcttcag

SEQ ID NO: 2319 - DNA, 20 bp, synthetic construct
  misc_feature 1..20: note = chemically synthesized
  source 1..20: mol_type = other DNA
aatgtatcttcttcagcagt

SEQ ID NO: 2320 - DNA, 20 bp, synthetic construct
  misc_feature 1..20: note = chemically synthesized
  source 1..20: mol_type = other DNA
atgtatcttcttcagcagtt

SEQ ID NO: 2321 - DNA, 20 bp, synthetic construct
  misc_feature 1..20: note = chemically synthesized
  source 1..20: mol_type = other DNA
tgtatcttcttcagcagttg

SEQ ID NO: 2322 - DNA, 20 bp, synthetic construct
  misc_feature 1..20: note = chemically synthesized
  source 1..20: mol_type = other DNA
gtatcttcttcagcagttgg

SEQ ID NO: 2323 - DNA, 20 bp, synthetic construct
  misc_feature 1..20: note = chemically synthesized
  source 1..20: mol_type = other DNA
ttcttcagcagttgggggac

SEQ ID NO: 2324 - DNA, 20 bp, synthetic construct
  misc_feature 1..20: note = chemically synthesized
  source 1..20: mol_type = other DNA
gggacaagttctgttaatgt

SEQ ID NO: 2325 - DNA, 20 bp, synthetic construct
  misc_feature 1..20: note = chemically synthesized
  source 1..20: mol_type = other DNA
caagttctgttaatgtcagt

SEQ ID NO: 2326 - DNA, 20 bp, synthetic construct
  misc_feature 1..20: note = chemically synthesized
  source 1..20: mol_type = other DNA
aagttctgttaatgtcagtt

SEQ ID NO: 2327 - DNA, 20 bp, synthetic construct
  misc_feature 1..20: note = chemically synthesized
  source 1..20: mol_type = other DNA
ttaatgtcagttgggtctat

SEQ ID NO: 2328 - DNA, 20 bp, synthetic construct
  misc_feature 1..20: note = chemically synthesized
  source 1..20: mol_type = other DNA
tcagttgggtctattagata

SEQ ID NO: 2329 - DNA, 20 bp, synthetic construct
  misc_feature 1..20: note = chemically synthesized
  source 1..20: mol_type = other DNA
gttgggtctattagatatag

SEQ ID NO: 2330 - DNA, 20 bp, synthetic construct
  misc_feature 1..20: note = chemically synthesized
  source 1..20: mol_type = other DNA
ttgggtctattagatatagt

SEQ ID NO: 2331 - DNA, 20 bp, synthetic construct
  misc_feature 1..20: note = chemically synthesized
  source 1..20: mol_type = other DNA
gttgttcatttgttgatttt

SEQ ID NO: 2332 - DNA, 20 bp, synthetic construct
  misc_feature 1..20: note = chemically synthesized
  source 1..20: mol_type = other DNA
tcatttgttgatttttagtc

SEQ ID NO: 2333 - DNA, 20 bp, synthetic construct
  misc_feature 1..20: note = chemically synthesized
  source 1..20: mol_type = other DNA
tggccgatctgttcattact

SEQ ID NO: 2334 - DNA, 20 bp, synthetic construct
  misc_feature 1..20: note = chemically synthesized
  source 1..20: mol_type = other DNA
tctgttcattactgagactg

SEQ ID NO: 2335 - DNA, 20 bp, synthetic construct
  misc_feature 1..20: note = chemically synthesized
  source 1..20: mol_type = other DNA
tactgagactgaagtgttta

SEQ ID NO: 2336 - DNA, 20 bp, synthetic construct
  misc_feature 1..20: note = chemically synthesized
  source 1..20: mol_type = other DNA
tccctactattattgtattg

SEQ ID NO: 2337 - DNA, 20 bp, synthetic construct
  misc_feature 1..20: note = chemically synthesized
  source 1..20: mol_type = other DNA
ttgcagtctgtctcgccctt

SEQ ID NO: 2338 - DNA, 20 bp, synthetic construct
  misc_feature 1..20: note = chemically synthesized
  source 1..20: mol_type = other DNA
tgcagtctgtctcgcccttt

SEQ ID NO: 2339 - DNA, 20 bp, synthetic construct
  misc_feature 1..20: note = chemically synthesized
  source 1..20: mol_type = other DNA
taatgttttccttatatact

SEQ ID NO: 2340 - DNA, 20 bp, synthetic construct
  misc_feature 1..20: note = chemically synthesized
  source 1..20: mol_type = other DNA
aatgttttccttatatactt

SEQ ID NO: 2341 - DNA, 20 bp, synthetic construct
  misc_feature 1..20: note = chemically synthesized
  source 1..20: mol_type = other DNA
atacttgggaactttgatgt

SEQ ID NO: 2342 - DNA, 20 bp, synthetic construct
  misc_feature 1..20: note = chemically synthesized
  source 1..20: mol_type = other DNA
ttgacccctttattattata

SEQ ID NO: 2343 - DNA, 20 bp, synthetic construct
  misc_feature 1..20: note = chemically synthesized
  source 1..20: mol_type = other DNA
accctccttatcttttctta

SEQ ID NO: 2344 - DNA, 20 bp, synthetic construct
  misc_feature 1..20: note = chemically synthesized
  source 1..20: mol_type = other DNA
tcttacagtttttaaatttg

SEQ ID NO: 2345 - DNA, 20 bp, synthetic construct
  misc_feature 1..20: note = chemically synthesized
  source 1..20: mol_type = other DNA
tagtctattttatctgattt

SEQ ID NO: 2346 - DNA, 20 bp, synthetic construct
  misc_feature 1..20: note = chemically synthesized
  source 1..20: mol_type = other DNA
acaattactactgctctttc

SEQ ID NO: 2347 - DNA, 20 bp, synthetic construct
  misc_feature 1..20: note = chemically synthesized
  source 1..20: mol_type = other DNA
ctactgctctttctggtttc

SEQ ID NO: 2348 - DNA, 20 bp, synthetic construct
  misc_feature 1..20: note = chemically synthesized
  source 1..20: mol_type = other DNA
tctttctggtttccagttca

SEQ ID NO: 2349 - DNA, 20 bp, synthetic construct
  misc_feature 1..20: note = chemically synthesized
  source 1..20: mol_type = other DNA
ttcatttatgtgtgccttta

SEQ ID NO: 2350 - DNA, 20 bp, synthetic construct
  misc_feature 1..20: note = chemically synthesized
  source 1..20: mol_type = other DNA
tcatttatgtgtgcctttat

SEQ ID NO: 2351 - DNA, 20 bp, synthetic construct
  misc_feature 1..20: note = chemically synthesized
  source 1..20: mol_type = other DNA
tatgtgtgcctttataggtg

SEQ ID NO: 2352 - DNA, 20 bp, synthetic construct
  misc_feature 1..20: note = chemically synthesized
  source 1..20: mol_type = other DNA
gtgtgcctttataggtgaag

SEQ ID NO: 2353 - DNA, 20 bp, synthetic construct
  misc_feature 1..20: note = chemically synthesized
  source 1..20: mol_type = other DNA
tgtgcctttataggtgaagt

SEQ ID NO: 2354 - DNA, 20 bp, synthetic construct
  misc_feature 1..20: note = chemically synthesized
  source 1..20: mol_type = other DNA
taggtgaagtgggtttcttg

SEQ ID NO: 2355 - DNA, 20 bp, synthetic construct
  misc_feature 1..20: note = chemically synthesized
  source 1..20: mol_type = other DNA
ggtttcttgaagatcgcata

SEQ ID NO: 2356 - DNA, 20 bp, synthetic construct
  misc_feature 1..20: note = chemically synthesized
  source 1..20: mol_type = other DNA
tcttgaagatcgcataaagt

SEQ ID NO: 2357 - DNA, 20 bp, synthetic construct
  misc_feature 1..20: note = chemically synthesized
  source 1..20: mol_type = other DNA
accattctattacttttaat

SEQ ID NO: 2358 - DNA, 20 bp, synthetic construct
  misc_feature 1..20: note = chemically synthesized
  source 1..20: mol_type = other DNA
ccattctattacttttaatt

SEQ ID NO: 2359 - DNA, 20 bp, synthetic construct
  misc_feature 1..20: note = chemically synthesized
  source 1..20: mol_type = other DNA
cattctattacttttaattg

SEQ ID NO: 2360 - DNA, 20 bp, synthetic construct
  misc_feature 1..20: note = chemically synthesized
  source 1..20: mol_type = other DNA
ttacttttaattggggaact

SEQ ID NO: 2361 - DNA, 20 bp, synthetic construct
  misc_feature 1..20: note = chemically synthesized
  source 1..20: mol_type = other DNA
gaactgagactatttacact

SEQ ID NO: 2362 - DNA, 20 bp, synthetic construct
  misc_feature 1..20: note = chemically synthesized
  source 1..20: mol_type = other DNA
gagactatttacactcagtg

SEQ ID NO: 2363 - DNA, 20 bp, synthetic construct
  misc_feature 1..20: note = chemically synthesized
  source 1..20: mol_type = other DNA
ttacactcagtgtagttact

SEQ ID NO: 2364 - DNA, 20 bp, synthetic construct
  misc_feature 1..20: note = chemically synthesized
  source 1..20: mol_type = other DNA
actcagtgtagttactaagt

SEQ ID NO: 2365 - DNA, 20 bp, synthetic construct
  misc_feature 1..20: note = chemically synthesized
  source 1..20: mol_type = other DNA
ctcagtgtagttactaagta

SEQ ID NO: 2366 - DNA, 20 bp, synthetic construct
  misc_feature 1..20: note = chemically synthesized
  source 1..20: mol_type = other DNA
tttttttttttgcttatttt

SEQ ID NO: 2367 - DNA, 20 bp, synthetic construct
  misc_feature 1..20: note = chemically synthesized
  source 1..20: mol_type = other DNA
tttgcttatttttggctgta

SEQ ID NO: 2368 - DNA, 20 bp, synthetic construct
  misc_feature 1..20: note = chemically synthesized
  source 1..20: mol_type = other DNA
tgcttatttttggctgtatg

SEQ ID NO: 2369 - DNA, 20 bp, synthetic construct
  misc_feature 1..20: note = chemically synthesized
  source 1..20: mol_type = other DNA
tcttccttttttttccttca

SEQ ID NO: 2370 - DNA, 20 bp, synthetic construct
  misc_feature 1..20: note = chemically synthesized
  source 1..20: mol_type = other DNA
catggttatgtgattatctc

SEQ ID NO: 2371 - DNA, 20 bp, synthetic construct
  misc_feature 1..20: note = chemically synthesized
  source 1..20: mol_type = other DNA
ggttatgtgattatctctgg

SEQ ID NO: 2372 - DNA, 20 bp, synthetic construct
  misc_feature 1..20: note = chemically synthesized
  source 1..20: mol_type = other DNA
aatttgttactttttatttt

SEQ ID NO: 2373 - DNA, 20 bp, synthetic construct
  misc_feature 1..20: note = chemically synthesized
  source 1..20: mol_type = other DNA
tatttttagtaaatctatta

SEQ ID NO: 2374 - DNA, 20 bp, synthetic construct
  misc_feature 1..20: note = chemically synthesized
  source 1..20: mol_type = other DNA
tattatagatttttgtgctg

SEQ ID NO: 2375 - DNA, 20 bp, synthetic construct
  misc_feature 1..20: note = chemically synthesized
  source 1..20: mol_type = other DNA
tttttgtgctgtggttacca

SEQ ID NO: 2376 - DNA, 20 bp, synthetic construct
  misc_feature 1..20: note = chemically synthesized
  source 1..20: mol_type = other DNA
ttttgtgctgtggttaccat

SEQ ID NO: 2377 - DNA, 20 bp, synthetic construct
  misc_feature 1..20: note = chemically synthesized
  source 1..20: mol_type = other DNA
tttgtgctgtggttaccatg

SEQ ID NO: 2378 - DNA, 20 bp, synthetic construct
  misc_feature 1..20: note = chemically synthesized
  source 1..20: mol_type = other DNA
gtggttaccatggggcttac

SEQ ID NO: 2379 - DNA, 20 bp, synthetic construct
  misc_feature 1..20: note = chemically synthesized
  source 1..20: mol_type = other DNA
caagaaacatcttataaata

SEQ ID NO: 2380 - DNA, 20 bp, synthetic construct
  misc_feature 1..20: note = chemically synthesized
  source 1..20: mol_type = other DNA
aaacatcttataaatatagc

SEQ ID NO: 2381 - DNA, 20 bp, synthetic construct
  misc_feature 1..20: note = chemically synthesized
  source 1..20: mol_type = other DNA
aaatatagcaagttatttta

SEQ ID NO: 2382 - DNA, 20 bp, synthetic construct
  misc_feature 1..20: note = chemically synthesized
  source 1..20: mol_type = other DNA
aatatagcaagttattttaa

SEQ ID NO: 2383 - DNA, 20 bp, synthetic construct
  misc_feature 1..20: note = chemically synthesized
  source 1..20: mol_type = other DNA
taaaggatgacgaattatct

SEQ ID NO: 2384 - DNA, 20 bp, synthetic construct
  misc_feature 1..20: note = chemically synthesized
  source 1..20: mol_type = other DNA
attatcttagatcgcaaata

SEQ ID NO: 2385 - DNA, 20 bp, synthetic construct
  misc_feature 1..20: note = chemically synthesized
  source 1..20: mol_type = other DNA
ttatcttagatcgcaaataa

SEQ ID NO: 2386 - DNA, 20 bp, synthetic construct
  misc_feature 1..20: note = chemically synthesized
  source 1..20: mol_type = other DNA
gcaaataaaggaatataaac

SEQ ID NO: 2387 - DNA, 20 bp, synthetic construct
  misc_feature 1..20: note = chemically synthesized
  source 1..20: mol_type = other DNA
caaataaaggaatataaaca

SEQ ID NO: 2388 - DNA, 20 bp, synthetic construct
  misc_feature 1..20: note = chemically synthesized
  source 1..20: mol_type = other DNA
aaataaaggaatataaacaa

SEQ ID NO: 2389 - DNA, 20 bp, synthetic construct
  misc_feature 1..20: note = chemically synthesized
  source 1..20: mol_type = other DNA
aatataaacaagggcaaaaa

SEQ ID NO: 2390 - DNA, 20 bp, synthetic construct
  misc_feature 1..20: note = chemically synthesized
  source 1..20: mol_type = other DNA
atataaacaagggcaaaaac

SEQ ID NO: 2391 - DNA, 20 bp, synthetic construct
  misc_feature 1..20: note = chemically synthesized
  source 1..20: mol_type = other DNA
ttatattacctacatcttaa

SEQ ID NO: 2392 - DNA, 20 bp, synthetic construct
  misc_feature 1..20: note = chemically synthesized
  source 1..20: mol_type = other DNA
tatattacctacatcttaaa

SEQ ID NO: 2393 - DNA, 20 bp, synthetic construct
  misc_feature 1..20: note = chemically synthesized
  source 1..20: mol_type = other DNA
tacatcttaaaaggttgcta

SEQ ID NO: 2394 - DNA, 20 bp, synthetic construct
  misc_feature 1..20: note = chemically synthesized
  source 1..20: mol_type = other DNA
atagctattactgtttttga

SEQ ID NO: 2395 - DNA, 20 bp, synthetic construct
  misc_feature 1..20: note = chemically synthesized
  source 1..20: mol_type = other DNA
tttttgaaagatttgttttt

SEQ ID NO: 2396 - DNA, 20 bp, synthetic construct
  misc_feature 1..20: note = chemically synthesized
  source 1..20: mol_type = other DNA
ttttgaaagatttgtttttt

SEQ ID NO: 2397 - DNA, 20 bp, synthetic construct
  misc_feature 1..20: note = chemically synthesized
  source 1..20: mol_type = other DNA
ttgttttttgggtttcatac

SEQ ID NO: 2398 - DNA, 20 bp, synthetic construct
  misc_feature 1..20: note = chemically synthesized
  source 1..20: mol_type = other DNA
gttttttgggtttcatactg

SEQ ID NO: 2399 - DNA, 20 bp, synthetic construct
  misc_feature 1..20: note = chemically synthesized
  source 1..20: mol_type = other DNA
tttcatactggagttctgtg

SEQ ID NO: 2400 - DNA, 20 bp, synthetic construct
  misc_feature 1..20: note = chemically synthesized
  source 1..20: mol_type = other DNA
ggattgcacaccaaaaaata

SEQ ID NO: 2401 - DNA, 20 bp, synthetic construct
  misc_feature 1..20: note = chemically synthesized
  source 1..20: mol_type = other DNA
cacaccaaaaaatacagtaa

SEQ ID NO: 2402 - DNA, 20 bp, synthetic construct
  misc_feature 1..20: note = chemically synthesized
  source 1..20: mol_type = other DNA
acaccaaaaaatacagtaat

SEQ ID NO: 2403 - DNA, 20 bp, synthetic construct
  misc_feature 1..20: note = chemically synthesized
  source 1..20: mol_type = other DNA
caccaaaaaatacagtaatg

SEQ ID NO: 2404 - DNA, 20 bp, synthetic construct
  misc_feature 1..20: note = chemically synthesized
  source 1..20: mol_type = other DNA
aatacagtaatggggtattc

SEQ ID NO: 2405 - DNA, 20 bp, synthetic construct
  misc_feature 1..20: note = chemically synthesized
  source 1..20: mol_type = other DNA
atacagtaatggggtattct

SEQ ID NO: 2406 - DNA, 20 bp, synthetic construct
  misc_feature 1..20: note = chemically synthesized
  source 1..20: mol_type = other DNA
gtctatgtacttaattttac

SEQ ID NO: 2407 - DNA, 20 bp, synthetic construct
  misc_feature 1..20: note = chemically synthesized
  source 1..20: mol_type = other DNA
tatgtacttaattttaccag

SEQ ID NO: 2408 - DNA, 20 bp, synthetic construct
  misc_feature 1..20: note = chemically synthesized
  source 1..20: mol_type = other DNA
atgtacttaattttaccagt

SEQ ID NO: 2409 - DNA, 20 bp, synthetic construct
  misc_feature 1..20: note = chemically synthesized
  source 1..20: mol_type = other DNA
agtgggtttcatactttgaa

SEQ ID NO: 2410 - DNA, 20 bp, synthetic construct
  misc_feature 1..20: note = chemically synthesized
  source 1..20: mol_type = other DNA
tgttaatgtcttttttcttt

SEQ ID NO: 2411 - DNA, 20 bp, synthetic construct
  misc_feature 1..20: note = chemically synthesized
  source 1..20: mol_type = other DNA
tcagattgcataactccctt

SEQ ID NO: 2412 - DNA, 20 bp, synthetic construct
  misc_feature 1..20: note = chemically synthesized
  source 1..20: mol_type = other DNA
ctccctttagcattttttgc

SEQ ID NO: 2413 - DNA, 20 bp, synthetic construct
  misc_feature 1..20: note = chemically synthesized
  source 1..20: mol_type = other DNA
ctttagcattttttgcaaga

SEQ ID NO: 2414 - DNA, 20 bp, synthetic construct
  misc_feature 1..20: note = chemically synthesized
  source 1..20: mol_type = other DNA
gcattttttgcaagatggtc

SEQ ID NO: 2415 - DNA, 20 bp, synthetic construct
  misc_feature 1..20: note = chemically synthesized
  source 1..20: mol_type = other DNA
tttgcaagatggtctggtgt

SEQ ID NO: 2416 - DNA, 20 bp, synthetic construct
  misc_feature 1..20: note = chemically synthesized
  source 1..20: mol_type = other DNA
tctctcaacttttgtttgtc

SEQ ID NO: 2417 - DNA, 20 bp, synthetic construct
  misc_feature 1..20: note = chemically synthesized
  source 1..20: mol_type = other DNA
ctctcaacttttgtttgtct

SEQ ID NO: 2418 - DNA, 20 bp, synthetic construct
  misc_feature 1..20: note = chemically synthesized
  source 1..20: mol_type = other DNA
caacttttgtttgtctggga

SEQ ID NO: 2419 - DNA, 20 bp, synthetic construct
  misc_feature 1..20: note = chemically synthesized
  source 1..20: mol_type = other DNA
tattgcttatatttgaataa

SEQ ID NO: 2420 - DNA, 20 bp, synthetic construct
  misc_feature 1..20: note = chemically synthesized
  source 1..20: mol_type = other DNA
tataaaatattcttgaatat

SEQ ID NO: 2421 - DNA, 20 bp, synthetic construct
  misc_feature 1..20: note = chemically synthesized
  source 1..20: mol_type = other DNA
atcagttttcttttatccct

SEQ ID NO: 2422 - DNA, 20 bp, synthetic construct
  misc_feature 1..20: note = chemically synthesized
  source 1..20: mol_type = other DNA
aatttcattcgactctctct

SEQ ID NO: 2423 - DNA, 20 bp, synthetic construct
  misc_feature 1..20: note = chemically synthesized
  source 1..20: mol_type = other DNA
tggactgtgtgatttctatt

SEQ ID NO: 2424 - DNA, 20 bp, synthetic construct
  misc_feature 1..20: note = chemically synthesized
  source 1..20: mol_type = other DNA
tattgagatgtttgttgtca

SEQ ID NO: 2425 - DNA, 20 bp, synthetic construct
  misc_feature 1..20: note = chemically synthesized
  source 1..20: mol_type = other DNA
attgagatgtttgttgtcac

SEQ ID NO: 2426 - DNA, 20 bp, synthetic construct
  misc_feature 1..20: note = chemically synthesized
  source 1..20: mol_type = other DNA
atgtttgttgtcacaggatt

SEQ ID NO: 2427 - DNA, 20 bp, synthetic construct
  misc_feature 1..20: note = chemically synthesized
  source 1..20: mol_type = other DNA
gtttgttgtcacaggatttg

SEQ ID NO: 2428 - DNA, 20 bp, synthetic construct
  misc_feature 1..20: note = chemically synthesized
  source 1..20: mol_type = other DNA
tttctcatctcttctgcttt

SEQ ID NO: 2429 - DNA, 20 bp, synthetic construct
  misc_feature 1..20: note = chemically synthesized
  source 1..20: mol_type = other DNA
ttctcatctcttctgctttt

SEQ ID NO: 2430 - DNA, 20 bp, synthetic construct
  misc_feature 1..20: note = chemically synthesized
  source 1..20: mol_type = other DNA
ttgtccttgacctgatgtct

SEQ ID NO: 2431 - DNA, 20 bp, synthetic construct
  misc_feature 1..20: note = chemically synthesized
  source 1..20: mol_type = other DNA
cttgacctgatgtcttggcg

SEQ ID NO: 2432 - DNA, 20 bp, synthetic construct
  misc_feature 1..20: note = chemically synthesized
  source 1..20: mol_type = other DNA
gcgtagtactctactatatc

SEQ ID NO: 2433 - DNA, 20 bp, synthetic construct
  misc_feature 1..20: note = chemically synthesized
  source 1..20: mol_type = other DNA
cgtagtactctactatatct

SEQ ID NO: 2434 - DNA, 20 bp, synthetic construct
  misc_feature 1..20: note = chemically synthesized
  source 1..20: mol_type = other DNA
actatatctaggactacact

SEQ ID NO: 2435 - DNA, 20 bp, synthetic construct
  misc_feature 1..20: note = chemically synthesized
  source 1..20: mol_type = other DNA
gaataatatgtaataaaaca

SEQ ID NO: 2436 - DNA, 20 bp, synthetic construct
  misc_feature 1..20: note = chemically synthesized
  source 1..20: mol_type = other DNA
aatatgtaataaaacatagt

SEQ ID NO: 2437 - DNA, 20 bp, synthetic construct
  misc_feature 1..20: note = chemically synthesized
  source 1..20: mol_type = other DNA
gtaataaaacatagtaagtg

SEQ ID NO: 2438 - DNA, 20 bp, synthetic construct
  misc_feature 1..20: note = chemically synthesized
  source 1..20: mol_type = other DNA
aaaacatagtaagtgaagtg

SEQ ID NO: 2439 - DNA, 20 bp, synthetic construct
  misc_feature 1..20: note = chemically synthesized
  source 1..20: mol_type = other DNA
agtaagtgaagtgaagttgc

SEQ ID NO: 2440 - DNA, 20 bp, synthetic construct
  misc_feature 1..20: note = chemically synthesized
  source 1..20: mol_type = other DNA
agtgaagttgctggcttaaa

SEQ ID NO: 2441 - DNA, 20 bp, synthetic construct
  misc_feature 1..20: note = chemically synthesized
  source 1..20: mol_type = other DNA
aaaaagtatttatttattgt

SEQ ID NO: 2442 - DNA, 20 bp, synthetic construct
  misc_feature 1..20: note = chemically synthesized
  source 1..20: mol_type = other DNA
tatttatttattgtaagcat

SEQ ID NO: 2443 - DNA, 20 bp, synthetic construct
  misc_feature 1..20: note = chemically synthesized
  source 1..20: mol_type = other DNA
aaatttgaccgatgtaatct

SEQ ID NO: 2444 - DNA, 20 bp, synthetic construct
  misc_feature 1..20: note = chemically synthesized
  source 1..20: mol_type = other DNA
accgatgtaatcttagatga

SEQ ID NO: 2445 - DNA, 20 bp, synthetic construct
  misc_feature 1..20: note = chemically synthesized
  source 1..20: mol_type = other DNA
atcttagatgatagttctaa

SEQ ID NO: 2446 - DNA, 20 bp, synthetic construct
  misc_feature 1..20: note = chemically synthesized
  source 1..20: mol_type = other DNA
gatgatagttctaaaagtgt

SEQ ID NO: 2447 - DNA, 20 bp, synthetic construct
  misc_feature 1..20: note = chemically synthesized
  source 1..20: mol_type = other DNA
tagttctaaaagtgttggtt

SEQ ID NO: 2448 - DNA, 20 bp, synthetic construct
  misc_feature 1..20: note = chemically synthesized
  source 1..20: mol_type = other DNA
agttctaaaagtgttggttg

SEQ ID NO: 2449 - DNA, 20 bp, synthetic construct
  misc_feature 1..20: note = chemically synthesized
  source 1..20: mol_type = other DNA
tctaaaagtgttggttgagg

SEQ ID NO: 2450 - DNA, 20 bp, synthetic construct
  misc_feature 1..20: note = chemically synthesized
  source 1..20: mol_type = other DNA
aaaagtgttggttgaggaag

SEQ ID NO: 2451 - DNA, 20 bp, synthetic construct
  misc_feature 1..20: note = chemically synthesized
  source 1..20: mol_type = other DNA
agtgttggttgaggaagtag

SEQ ID NO: 2452 - DNA, 20 bp, synthetic construct
  misc_feature 1..20: note = chemically synthesized
  source 1..20: mol_type = other DNA
tgttggttgaggaagtagaa

SEQ ID NO: 2453 - DNA, 20 bp, synthetic construct
  misc_feature 1..20: note = chemically synthesized
  source 1..20: mol_type = other DNA
ttgaggaagtagaagagaat

SEQ ID NO: 2454 - DNA, 20 bp, synthetic construct
  misc_feature 1..20: note = chemically synthesized
  source 1..20: mol_type = other DNA
gtagaagagaatcagtacct

SEQ ID NO: 2455 - DNA, 20 bp, synthetic construct
  misc_feature 1..20: note = chemically synthesized
  source 1..20: mol_type = other DNA
gaagagaatcagtacctaag

SEQ ID NO: 2456 - DNA, 20 bp, synthetic construct
  misc_feature 1..20: note = chemically synthesized
  source 1..20: mol_type = other DNA
cctaagcagttaaactaatg

SEQ ID NO: 2457 - DNA, 20 bp, synthetic construct
  misc_feature 1..20: note = chemically synthesized
  source 1..20: mol_type = other DNA
ctaagcagttaaactaatgt

SEQ ID NO: 2458 - DNA, 20 bp, synthetic construct
  misc_feature 1..20: note = chemically synthesized
  source 1..20: mol_type = other DNA
agcagttaaactaatgtggg

SEQ ID NO: 2459 - DNA, 20 bp, synthetic construct
  misc_feature 1..20: note = chemically synthesized
  source 1..20: mol_type = other DNA
gcagttaaactaatgtggga

SEQ ID NO: 2460 - DNA, 20 bp, synthetic construct
  misc_feature 1..20: note = chemically synthesized
  source 1..20: mol_type = other DNA
gtgggaaggccccttttata

SEQ ID NO: 2461 - DNA, 20 bp, synthetic construct
  misc_feature 1..20: note = chemically synthesized
  source 1..20: mol_type = other DNA
ccttttataaagatcctctt

SEQ ID NO: 2462 - DNA, 20 bp, synthetic construct
  misc_feature 1..20: note = chemically synthesized
  source 1..20: mol_type = other DNA
tattaatatatgactataat

SEQ ID NO: 2463 - DNA, 20 bp, synthetic construct
  misc_feature 1..20: note = chemically synthesized
  source 1..20: mol_type = other DNA
ttaatatatgactataatta

SEQ ID NO: 2464 - DNA, 20 bp, synthetic construct
  misc_feature 1..20: note = chemically synthesized
  source 1..20: mol_type = other DNA
taatatatgactataattag

SEQ ID NO: 2465 - DNA, 20 bp, synthetic construct
  misc_feature 1..20: note = chemically synthesized
  source 1..20: mol_type = other DNA
atgactataattagaggaaa

SEQ ID NO: 2466 - DNA, 20 bp, synthetic construct
  misc_feature 1..20: note = chemically synthesized
  source 1..20: mol_type = other DNA
gactataattagaggaaaca

SEQ ID NO: 2467 - DNA, 20 bp, synthetic construct
  misc_feature 1..20: note = chemically synthesized
  source 1..20: mol_type = other DNA
actataattagaggaaacag

SEQ ID NO: 2468 - DNA, 20 bp, synthetic construct
  misc_feature 1..20: note = chemically synthesized
  source 1..20: mol_type = other DNA
taattagaggaaacagaggt

SEQ ID NO: 2469 - DNA, 20 bp, synthetic construct
  misc_feature 1..20: note = chemically synthesized
  source 1..20: mol_type = other DNA
ttttgtcctcatgaatctca

SEQ ID NO: 2470 - DNA, 20 bp, synthetic construct
  misc_feature 1..20: note = chemically synthesized
  source 1..20: mol_type = other DNA
tttgtcctcatgaatctcaa

SEQ ID NO: 2471 - DNA, 20 bp, synthetic construct
  misc_feature 1..20: note = chemically synthesized
  source 1..20: mol_type = other DNA
tgtcctcatgaatctcaaag

SEQ ID NO: 2472 - DNA, 20 bp, synthetic construct
  misc_feature 1..20: note = chemically synthesized
  source 1..20: mol_type = other DNA
atgaatctcaaaggagaaaa

SEQ ID NO: 2473 - DNA, 20 bp, synthetic construct
  misc_feature 1..20: note = chemically synthesized
  source 1..20: mol_type = other DNA
tcaaaggagaaaatggttta

SEQ ID NO: 2474 - DNA, 20 bp, synthetic construct
  misc_feature 1..20: note = chemically synthesized
  source 1..20: mol_type = other DNA
aaatggtttacagaattgct

SEQ ID NO: 2475 - DNA, 20 bp, synthetic construct
  misc_feature 1..20: note = chemically synthesized
  source 1..20: mol_type = other DNA
cagaattgcttggtgttctt

SEQ ID NO: 2476 - DNA, 20 bp, synthetic construct
  misc_feature 1..20: note = chemically synthesized
  source 1..20: mol_type = other DNA
ttcttcagattccaatttta

SEQ ID NO: 2477 - DNA, 20 bp, synthetic construct
  misc_feature 1..20: note = chemically synthesized
  source 1..20: mol_type = other DNA
taaagtcaaatctgaatttt

SEQ ID NO: 2478 - DNA, 20 bp, synthetic construct
  misc_feature 1..20: note = chemically synthesized
  source 1..20: mol_type = other DNA
caaatctgaattttaagtta

SEQ ID NO: 2479 - DNA, 20 bp, synthetic construct
  misc_feature 1..20: note = chemically synthesized
  source 1..20: mol_type = other DNA
aaatctgaattttaagttat

SEQ ID NO: 2480 - DNA, 20 bp, synthetic construct
  misc_feature 1..20: note = chemically synthesized
  source 1..20: mol_type = other DNA
ttatgggaccactgataata

SEQ ID NO: 2481 - DNA, 20 bp, synthetic construct
  misc_feature 1..20: note = chemically synthesized
  source 1..20: mol_type = other DNA
tgggaccactgataatatgg

SEQ ID NO: 2482 - DNA, 20 bp, synthetic construct
  misc_feature 1..20: note = chemically synthesized
  source 1..20: mol_type = other DNA
gggaccactgataatatggt

SEQ ID NO: 2483 - DNA, 20 bp, synthetic construct
  misc_feature 1..20: note = chemically synthesized
  source 1..20: mol_type = other DNA
actgataatatggtgggcta

SEQ ID NO: 2484 - DNA, 20 bp, synthetic construct
  misc_feature 1..20: note = chemically synthesized
  source 1..20: mol_type = other DNA
aatatggtgggctaaagaat

SEQ ID NO: 2485 - DNA, 20 bp, synthetic construct
  misc_feature 1..20: note = chemically synthesized
  source 1..20: mol_type = other DNA
atatggtgggctaaagaatc

SEQ ID NO: 2486 - DNA, 20 bp, synthetic construct
  misc_feature 1..20: note = chemically synthesized
  source 1..20: mol_type = other DNA
gggctaaagaatcaggtttt

SEQ ID NO: 2487 - DNA, 20 bp, synthetic construct
  misc_feature 1..20: note = chemically synthesized
  source 1..20: mol_type = other DNA
taaagaatcaggtttttagt

SEQ ID NO: 2488 - DNA, 20 bp, synthetic construct
  misc_feature 1..20: note = chemically synthesized
  source 1..20: mol_type = other DNA
aggtttttagttggattgtc

SEQ ID NO: 2489 - DNA, 20 bp, synthetic construct
  misc_feature 1..20: note = chemically synthesized
  source 1..20: mol_type = other DNA
tagttggattgtctggtttt

SEQ ID NO: 2490 - DNA, 20 bp, synthetic construct
  misc_feature 1..20: note = chemically synthesized
  source 1..20: mol_type = other DNA
cacttattaactctttgact

SEQ ID NO: 2491 - DNA, 20 bp, synthetic construct
  misc_feature 1..20: note = chemically synthesized
  source 1..20: mol_type = other DNA
acttattaactctttgactt

SEQ ID NO: 2492 - DNA, 20 bp, synthetic construct
  misc_feature 1..20: note = chemically synthesized
  source 1..20: mol_type = other DNA
cttattaactctttgacttg

SEQ ID NO: 2493 - DNA, 20 bp, synthetic construct
  misc_feature 1..20: note = chemically synthesized
  source 1..20: mol_type = other DNA
gtttctacatttgtaacatg

SEQ ID NO: 2494 - DNA, 20 bp, synthetic construct
  misc_feature 1..20: note = chemically synthesized
  source 1..20: mol_type = other DNA
ttcttcatatatttgttccg

SEQ ID NO: 2495 - DNA, 20 bp, synthetic construct
  misc_feature 1..20: note = chemically synthesized
  source 1..20: mol_type = other DNA
actaatctatataaatcact

SEQ ID NO: 2496 - DNA, 20 bp, synthetic construct
  misc_feature 1..20: note = chemically synthesized
  source 1..20: mol_type = other DNA
tctatataaatcacttagta

SEQ ID NO: 2497 - DNA, 20 bp, synthetic construct
  misc_feature 1..20: note = chemically synthesized
  source 1..20: mol_type = other DNA
tcacttagtatggtacacta

SEQ ID NO: 2498 - DNA, 20 bp, synthetic construct
  misc_feature 1..20: note = chemically synthesized
  source 1..20: mol_type = other DNA
tggtacactatagctcgtga

SEQ ID NO: 2499 - DNA, 20 bp, synthetic construct
  misc_feature 1..20: note = chemically synthesized
  source 1..20: mol_type = other DNA
gtacactatagctcgtgaca

SEQ ID NO: 2500 - DNA, 20 bp, synthetic construct
  misc_feature 1..20: note = chemically synthesized
  source 1..20: mol_type = other DNA
actttaatttttatgtactt

SEQ ID NO: 2501 - DNA, 20 bp, synthetic construct
  misc_feature 1..20: note = chemically synthesized
  source 1..20: mol_type = other DNA
tatgtacttgagtttaaaat

SEQ ID NO: 2502 - DNA, 20 bp, synthetic construct
  misc_feature 1..20: note = chemically synthesized
  source 1..20: mol_type = other DNA
ttgagtttaaaattagcatt

SEQ ID NO: 2503 - DNA, 20 bp, synthetic construct
  misc_feature 1..20: note = chemically synthesized
  source 1..20: mol_type = other DNA
gagtttaaaattagcattta

SEQ ID NO: 2504 - DNA, 20 bp, synthetic construct
  misc_feature 1..20: note = chemically synthesized
  source 1..20: mol_type = other DNA
gtttaaaattagcatttaga

SEQ ID NO: 2505 - DNA, 20 bp, synthetic construct
  misc_feature 1..20: note = chemically synthesized
  source 1..20: mol_type = other DNA
ttagcatttagagagactgt

SEQ ID NO: 2506 - DNA, 20 bp, synthetic construct
  misc_feature 1..20: note = chemically synthesized
  source 1..20: mol_type = other DNA
tagcatttagagagactgtc

SEQ ID NO: 2507 - DNA, 20 bp, synthetic construct
  misc_feature 1..20: note = chemically synthesized
  source 1..20: mol_type = other DNA
gactgtgtattcacgtattg

SEQ ID NO: 2508 - DNA, 20 bp, synthetic construct
  misc_feature 1..20: note = chemically synthesized
  source 1..20: mol_type = other DNA
gtgtattcacgtattgtagt

SEQ ID NO: 2509 - DNA, 20 bp, synthetic construct
  misc_feature 1..20: note = chemically synthesized
  source 1..20: mol_type = other DNA
tcacgtattgtagtcagatt

SEQ ID NO: 2510 - DNA, 20 bp, synthetic construct
  misc_feature 1..20: note = chemically synthesized
  source 1..20: mol_type = other DNA
tgtagtcagatttggtgaaa

SEQ ID NO: 2511 - DNA, 20 bp, synthetic construct
  misc_feature 1..20: note = chemically synthesized
  source 1..20: mol_type = other DNA
ataaaatataattacttatt

SEQ ID NO: 2512 - DNA, 20 bp, synthetic construct
  misc_feature 1..20: note = chemically synthesized
  source 1..20: mol_type = other DNA
acttattgagcaaattttac

SEQ ID NO: 2513 - DNA, 20 bp, synthetic construct
  misc_feature 1..20: note = chemically synthesized
  source 1..20: mol_type = other DNA
cttattgagcaaattttact

SEQ ID NO: 2514 - DNA, 20 bp, synthetic construct
  misc_feature 1..20: note = chemically synthesized
  source 1..20: mol_type = other DNA
caccatttcatttaatcttc

SEQ ID NO: 2515 - DNA, 20 bp, synthetic construct
  misc_feature 1..20: note = chemically synthesized
  source 1..20: mol_type = other DNA
tttaatcttcaagatcataa

SEQ ID NO: 2516 - DNA, 20 bp, synthetic construct
  misc_feature 1..20: note = chemically synthesized
  source 1..20: mol_type = other DNA
atcttcaagatcataaaagc

SEQ ID NO: 2517 - DNA, 20 bp, synthetic construct
  misc_feature 1..20: note = chemically synthesized
  source 1..20: mol_type = other DNA
atgaataaattatattcaaa

SEQ ID NO: 2518 - DNA, 20 bp, synthetic construct
  misc_feature 1..20: note = chemically synthesized
  source 1..20: mol_type = other DNA
tgaataaattatattcaaac

SEQ ID NO: 2519 - DNA, 20 bp, synthetic construct
  misc_feature 1..20: note = chemically synthesized
  source 1..20: mol_type = other DNA
attcaaacaggtcatactac

SEQ ID NO: 2520 - DNA, 20 bp, synthetic construct
  misc_feature 1..20: note = chemically synthesized
  source 1..20: mol_type = other DNA
aaacaggtcatactactagc

SEQ ID NO: 2521 - DNA, 20 bp, synthetic construct
  misc_feature 1..20: note = chemically synthesized
  source 1..20: mol_type = other DNA
caagatcccacaattactaa

SEQ ID NO: 2522 - DNA, 20 bp, synthetic construct
  misc_feature 1..20: note = chemically synthesized
  source 1..20: mol_type = other DNA
atcccacaattactaatagc

SEQ ID NO: 2523 - DNA, 20 bp, synthetic construct
  misc_feature 1..20: note = chemically synthesized
  source 1..20: mol_type = other DNA
cacaattactaatagcaaga

SEQ ID NO: 2524 - DNA, 20 bp, synthetic construct
  misc_feature 1..20: note = chemically synthesized
  source 1..20: mol_type = other DNA
ttactaatagcaagatagct

SEQ ID NO: 2525 - DNA, 20 bp, synthetic construct
  misc_feature 1..20: note = chemically synthesized
  source 1..20: mol_type = other DNA
agatagctaagatttcaacc

SEQ ID NO: 2526 - DNA, 20 bp, synthetic construct
  misc_feature 1..20: note = chemically synthesized
  source 1..20: mol_type = other DNA
gatagctaagatttcaacct

SEQ ID NO: 2527 - DNA, 20 bp, synthetic construct
  misc_feature 1..20: note = chemically synthesized
  source 1..20: mol_type = other DNA
gatttcaacctaggtacatc

SEQ ID NO: 2528 - DNA, 20 bp, synthetic construct
  misc_feature 1..20: note = chemically synthesized
  source 1..20: mol_type = other DNA
aacctaggtacatctggttc

SEQ ID NO: 2529 - DNA, 20 bp, synthetic construct
  misc_feature 1..20: note = chemically synthesized
  source 1..20: mol_type = other DNA
caagtgtataacatcacact

SEQ ID NO: 2530 - DNA, 20 bp, synthetic construct
  misc_feature 1..20: note = chemically synthesized
  source 1..20: mol_type = other DNA
aagtgtataacatcacactg

SEQ ID NO: 2531 - DNA, 20 bp, synthetic construct
  misc_feature 1..20: note = chemically synthesized
  source 1..20: mol_type = other DNA
ataacatcacactgaggact

SEQ ID NO: 2532 - DNA, 20 bp, synthetic construct
  misc_feature 1..20: note = chemically synthesized
  source 1..20: mol_type = other DNA
cacactgaggacttggctct

SEQ ID NO: 2533 - DNA, 20 bp, synthetic construct
  misc_feature 1..20: note = chemically synthesized
  source 1..20: mol_type = other DNA
acactgaggacttggctctt

SEQ ID NO: 2534 - DNA, 20 bp, synthetic construct
  misc_feature 1..20: note = chemically synthesized
  source 1..20: mol_type = other DNA
gacttggctcttgggtgtac

SEQ ID NO: 2535 - DNA, 20 bp, synthetic construct
  misc_feature 1..20: note = chemically synthesized
  source 1..20: mol_type = other DNA
tccattgtgtgaacttgata

SEQ ID NO: 2536 - DNA, 20 bp, synthetic construct
  misc_feature 1..20: note = chemically synthesized
  source 1..20: mol_type = other DNA
aagttacaaaaattatctct

SEQ ID NO: 2537 - DNA, 20 bp, synthetic construct
  misc_feature 1..20: note = chemically synthesized
  source 1..20: mol_type = other DNA
agttttttcatgtataccat

SEQ ID NO: 2538 - DNA, 20 bp, synthetic construct
  misc_feature 1..20: note = chemically synthesized
  source 1..20: mol_type = other DNA
tttcatgtataccataagaa

SEQ ID NO: 2539 - DNA, 20 bp, synthetic construct
  misc_feature 1..20: note = chemically synthesized
  source 1..20: mol_type = other DNA
ataccataagaatagtaata

SEQ ID NO: 2540 - DNA, 20 bp, synthetic construct
  misc_feature 1..20: note = chemically synthesized
  source 1..20: mol_type = other DNA
taccataagaatagtaatac

SEQ ID NO: 2541 - DNA, 20 bp, synthetic construct
  misc_feature 1..20: note = chemically synthesized
  source 1..20: mol_type = other DNA
atagtaatacaggactgtaa

SEQ ID NO: 2542 - DNA, 20 bp, synthetic construct
  misc_feature 1..20: note = chemically synthesized
  source 1..20: mol_type = other DNA
agtaatacaggactgtaatg

SEQ ID NO: 2543 - DNA, 20 bp, synthetic construct
  misc_feature 1..20: note = chemically synthesized
  source 1..20: mol_type = other DNA
gtaatacaggactgtaatgg

SEQ ID NO: 2544 - DNA, 20 bp, synthetic construct
  misc_feature 1..20: note = chemically synthesized
  source 1..20: mol_type = other DNA
ggttaccaataattattgtt

SEQ ID NO: 2545 - DNA, 20 bp, synthetic construct
  misc_feature 1..20: note = chemically synthesized
  source 1..20: mol_type = other DNA
gttaccaataattattgtta

SEQ ID NO: 2546 - DNA, 20 bp, synthetic construct
  misc_feature 1..20: note = chemically synthesized
  source 1..20: mol_type = other DNA
accaataattattgttaagg

SEQ ID NO: 2547 - DNA, 20 bp, synthetic construct
  misc_feature 1..20: note = chemically synthesized
  source 1..20: mol_type = other DNA
ccaataattattgttaagga

SEQ ID NO: 2548 - DNA, 20 bp, synthetic construct
  misc_feature 1..20: note = chemically synthesized
  source 1..20: mol_type = other DNA
caataattattgttaaggaa

SEQ ID NO: 2549 - DNA, 20 bp, synthetic construct
  misc_feature 1..20: note = chemically synthesized
  source 1..20: mol_type = other DNA
ctaaattactctgaaatttt

SEQ ID NO: 2550 - DNA, 20 bp, synthetic construct
  misc_feature 1..20: note = chemically synthesized
  source 1..20: mol_type = other DNA
cactacattgaacactttca

SEQ ID NO: 2551 - DNA, 20 bp, synthetic construct
  misc_feature 1..20: note = chemically synthesized
  source 1..20: mol_type = other DNA
actacattgaacactttcaa

SEQ ID NO: 2552 - DNA, 20 bp, synthetic construct
  misc_feature 1..20: note = chemically synthesized
  source 1..20: mol_type = other DNA
tcatacattaaaaatttttt

SEQ ID NO: 2553 - DNA, 20 bp, synthetic construct
  misc_feature 1..20: note = chemically synthesized
  source 1..20: mol_type = other DNA
taagtccataaattaatttc

SEQ ID NO: 2554 - DNA, 20 bp, synthetic construct
  misc_feature 1..20: note = chemically synthesized
  source 1..20: mol_type = other DNA
aagtccataaattaatttcg

SEQ ID NO: 2555 - DNA, 20 bp, synthetic construct
  misc_feature 1..20: note = chemically synthesized
  source 1..20: mol_type = other DNA
taaattaatttcgaggaaaa

SEQ ID NO: 2556 - DNA, 20 bp, synthetic construct
  misc_feature 1..20: note = chemically synthesized
  source 1..20: mol_type = other DNA
tatttgaccaaaccttctat

SEQ ID NO: 2557 - DNA, 20 bp, synthetic construct
  misc_feature 1..20: note = chemically synthesized
  source 1..20: mol_type = other DNA
caaaccttctattagttact

SEQ ID NO: 2558 - DNA, 20 bp, synthetic construct
  misc_feature 1..20: note = chemically synthesized
  source 1..20: mol_type = other DNA
ccttctattagttacttggt

SEQ ID NO: 2559 - DNA, 20 bp, synthetic construct
  misc_feature 1..20: note = chemically synthesized
  source 1..20: mol_type = other DNA
tggttggctgataatcactc

SEQ ID NO: 2560 - DNA, 20 bp, synthetic construct
  misc_feature 1..20: note = chemically synthesized
  source 1..20: mol_type = other DNA
gataatcactcaagactgtg

SEQ ID NO: 2561 - DNA, 20 bp, synthetic construct
  misc_feature 1..20: note = chemically synthesized
  source 1..20: mol_type = other DNA
ctcaagactgtgtggtttaa

SEQ ID NO: 2562 - DNA, 20 bp, synthetic construct
  misc_feature 1..20: note = chemically synthesized
  source 1..20: mol_type = other DNA
tcaagactgtgtggtttaat

SEQ ID NO: 2563 - DNA, 20 bp, synthetic construct
  misc_feature 1..20: note = chemically synthesized
  source 1..20: mol_type = other DNA
gtttaataggatattcactg

SEQ ID NO: 2564 - DNA, 20 bp, synthetic construct
  misc_feature 1..20: note = chemically synthesized
  source 1..20: mol_type = other DNA
aggatattcactgtggttca

SEQ ID NO: 2565 - DNA, 20 bp, synthetic construct
  misc_feature 1..20: note = chemically synthesized
  source 1..20: mol_type = other DNA
tggaaattcaaaattatctg

SEQ ID NO: 2566 - DNA, 20 bp, synthetic construct
  misc_feature 1..20: note = chemically synthesized
  source 1..20: mol_type = other DNA
aattatctgaagaaaacaaa

SEQ ID NO: 2567 - DNA, 20 bp, synthetic construct
  misc_feature 1..20: note = chemically synthesized
  source 1..20: mol_type = other DNA
atctgaagaaaacaaaaagt

SEQ ID NO: 2568 - DNA, 20 bp, synthetic construct
  misc_feature 1..20: note = chemically synthesized
  source 1..20: mol_type = other DNA
tctgaagaaaacaaaaagtt

SEQ ID NO: 2569 - DNA, 20 bp, synthetic construct
  misc_feature 1..20: note = chemically synthesized
  source 1..20: mol_type = other DNA
gggctctgcaatccctgtct

SEQ ID NO: 2570 - DNA, 20 bp, synthetic construct
  misc_feature 1..20: note = chemically synthesized
  source 1..20: mol_type = other DNA
ggctctgcaatccctgtctg

SEQ ID NO: 2571 - DNA, 20 bp, synthetic construct
  misc_feature 1..20: note = chemically synthesized
  source 1..20: mol_type = other DNA
gctctgcaatccctgtctga

SEQ ID NO: 2572 - DNA, 20 bp, synthetic construct
  misc_feature 1..20: note = chemically synthesized
  source 1..20: mol_type = other DNA
tccctgtctgagggattttc

SEQ ID NO: 2573 - DNA, 20 bp, synthetic construct
  misc_feature 1..20: note = chemically synthesized
  source 1..20: mol_type = other DNA
gggattttctagaattcttc

SEQ ID NO: 2574 - DNA, 20 bp, synthetic construct
  misc_feature 1..20: note = chemically synthesized
  source 1..20: mol_type = other DNA
ctccctacctttttgtttgt

SEQ ID NO: 2575 - DNA, 20 bp, synthetic construct
  misc_feature 1..20: note = chemically synthesized
  source 1..20: mol_type = other DNA
cctacctttttgtttgtcag

SEQ ID NO: 2576 - DNA, 20 bp, synthetic construct
  misc_feature 1..20: note = chemically synthesized
  source 1..20: mol_type = other DNA
tcagaagcttgtctactacc

SEQ ID NO: 2577 - DNA, 20 bp, synthetic construct
  misc_feature 1..20: note = chemically synthesized
  source 1..20: mol_type = other DNA
ccgagtgattgatgtcacca

SEQ ID NO: 2578 - DNA, 20 bp, synthetic construct
  misc_feature 1..20: note = chemically synthesized
  source 1..20: mol_type = other DNA
gatgtcaccaaagactattg

SEQ ID NO: 2579 - DNA, 20 bp, synthetic construct
  misc_feature 1..20: note = chemically synthesized
  source 1..20: mol_type = other DNA
atgtcaccaaagactattgc

SEQ ID NO: 2580 - DNA, 20 bp, synthetic construct
  misc_feature 1..20: note = chemically synthesized
  source 1..20: mol_type = other DNA
gtcaccaaagactattgcag

SEQ ID NO: 2581 - DNA, 20 bp, synthetic construct
  misc_feature 1..20: note = chemically synthesized
  source 1..20: mol_type = other DNA
accaaagactattgcaggag

SEQ ID NO: 2582 - DNA, 20 bp, synthetic construct
  misc_feature 1..20: note = chemically synthesized
  source 1..20: mol_type = other DNA
ccaaagactattgcaggagt

SEQ ID NO: 2583 - DNA, 20 bp, synthetic construct
  misc_feature 1..20: note = chemically synthesized
  source 1..20: mol_type = other DNA
gccttgctttttctgttttt

SEQ ID NO: 2584 - DNA, 20 bp, synthetic construct
  misc_feature 1..20: note = chemically synthesized
  source 1..20: mol_type = other DNA
ttagttattttcttctaaaa

SEQ ID NO: 2585 - DNA, 20 bp, synthetic construct
  misc_feature 1..20: note = chemically synthesized
  source 1..20: mol_type = other DNA
tcttctaaaacagtattttc

SEQ ID NO: 2586 - DNA, 20 bp, synthetic construct
  misc_feature 1..20: note = chemically synthesized
  source 1..20: mol_type = other DNA
tctaaaacagtattttcaag

SEQ ID NO: 2587 - DNA, 20 bp, synthetic construct
  misc_feature 1..20: note = chemically synthesized
  source 1..20: mol_type = other DNA
acagtattttcaagtagttg

SEQ ID NO: 2588 - DNA, 20 bp, synthetic construct
  misc_feature 1..20: note = chemically synthesized
  source 1..20: mol_type = other DNA
gttgtggttttttttctttc

SEQ ID NO: 2589 - DNA, 20 bp, synthetic construct
  misc_feature 1..20: note = chemically synthesized
  source 1..20: mol_type = other DNA
tgaactcattaaaaataaaa

SEQ ID NO: 2590 - DNA, 20 bp, synthetic construct
  misc_feature 1..20: note = chemically synthesized
  source 1..20: mol_type = other DNA
aaaaataaaatagctttcta

SEQ ID NO: 2591 - DNA, 20 bp, synthetic construct
  misc_feature 1..20: note = chemically synthesized
  source 1..20: mol_type = other DNA
aatagctttctaaagccaaa

SEQ ID NO: 2592 - DNA, 20 bp, synthetic construct
  misc_feature 1..20: note = chemically synthesized
  source 1..20: mol_type = other DNA
ccaaacagtttcctcctgac

SEQ ID NO: 2593 - DNA, 20 bp, synthetic construct
  misc_feature 1..20: note = chemically synthesized
  source 1..20: mol_type = other DNA
gtttcctcctgaccagttaa

SEQ ID NO: 2594 - DNA, 20 bp, synthetic construct
  misc_feature 1..20: note = chemically synthesized
  source 1..20: mol_type = other DNA
taaaagttatctctgcttca

SEQ ID NO: 2595 - DNA, 20 bp, synthetic construct
  misc_feature 1..20: note = chemically synthesized
  source 1..20: mol_type = other DNA
ttcatggtgcatattcaatt

SEQ ID NO: 2596 - DNA, 20 bp, synthetic construct
  misc_feature 1..20: note = chemically synthesized
  source 1..20: mol_type = other DNA
attcaattaagatttaacat

SEQ ID NO: 2597 - DNA, 20 bp, synthetic construct
  misc_feature 1..20: note = chemically synthesized
  source 1..20: mol_type = other DNA
agatttaacattagcacact

SEQ ID NO: 2598 - DNA, 20 bp, synthetic construct
  misc_feature 1..20: note = chemically synthesized
  source 1..20: mol_type = other DNA
acactgagtataattttttt

SEQ ID NO: 2599 - DNA, 20 bp, synthetic construct
  misc_feature 1..20: note = chemically synthesized
  source 1..20: mol_type = other DNA
ttttaagaatctttttatta

SEQ ID NO: 2600 - DNA, 20 bp, synthetic construct
  misc_feature 1..20: note = chemically synthesized
  source 1..20: mol_type = other DNA
cagaaattgtaaactacaca

SEQ ID NO: 2601 - DNA, 20 bp, synthetic construct
  misc_feature 1..20: note = chemically synthesized
  source 1..20: mol_type = other DNA
tgtaaactacacaaagtaaa

SEQ ID NO: 2602 - DNA, 20 bp, synthetic construct
  misc_feature 1..20: note = chemically synthesized
  source 1..20: mol_type = other DNA
agaatattataattaatttc

SEQ ID NO: 2603 - DNA, 20 bp, synthetic construct
  misc_feature 1..20: note = chemically synthesized
  source 1..20: mol_type = other DNA
gaatattataattaatttcc

SEQ ID NO: 2604 - DNA, 20 bp, synthetic construct
  misc_feature 1..20: note = chemically synthesized
  source 1..20: mol_type = other DNA
tttttgttattattatcatt

SEQ ID NO: 2605 - DNA, 20 bp, synthetic construct
  misc_feature 1..20: note = chemically synthesized
  source 1..20: mol_type = other DNA
ttgttattattatcattcag

SEQ ID NO: 2606 - DNA, 20 bp, synthetic construct
  misc_feature 1..20: note = chemically synthesized
  source 1..20: mol_type = other DNA
tgatgtaaaattgatgtacc

SEQ ID NO: 2607 - DNA, 20 bp, synthetic construct
  misc_feature 1..20: note = chemically synthesized
  source 1..20: mol_type = other DNA
acctagaaatgtgcaaatct

SEQ ID NO: 2608 - DNA, 20 bp, synthetic construct
  misc_feature 1..20: note = chemically synthesized
  source 1..20: mol_type = other DNA
acaaaatatttccatctccc

SEQ ID NO: 2609 - DNA, 20 bp, synthetic construct
  misc_feature 1..20: note = chemically synthesized
  source 1..20: mol_type = other DNA
tcttccatctttatatccat

SEQ ID NO: 2610 - DNA, 20 bp, synthetic construct
  misc_feature 1..20: note = chemically synthesized
  source 1..20: mol_type = other DNA
ttccatctttatatccatca

SEQ ID NO: 2611 - DNA, 20 bp, synthetic construct
  misc_feature 1..20: note = chemically synthesized
  source 1..20: mol_type = other DNA
tccatctttatatccatcag

SEQ ID NO: 2612 - DNA, 20 bp, synthetic construct
  misc_feature 1..20: note = chemically synthesized
  source 1..20: mol_type = other DNA
tctttatatccatcagaggt

SEQ ID NO: 2613 - DNA, 20 bp, synthetic construct
  misc_feature 1..20: note = chemically synthesized
  source 1..20: mol_type = other DNA
ttatatccatcagaggtaag

SEQ ID NO: 2614 - DNA, 20 bp, synthetic construct
  misc_feature 1..20: note = chemically synthesized
  source 1..20: mol_type = other DNA
tatatccatcagaggtaagc

SEQ ID NO: 2615 - DNA, 20 bp, synthetic construct
  misc_feature 1..20: note = chemically synthesized
  source 1..20: mol_type = other DNA
atatccatcagaggtaagca

SEQ ID NO: 2616 - DNA, 20 bp, synthetic construct
  misc_feature 1..20: note = chemically synthesized
  source 1..20: mol_type = other DNA
ctgattttttgacattaaat

SEQ ID NO: 2617 - DNA, 20 bp, synthetic construct
  misc_feature 1..20: note = chemically synthesized
  source 1..20: mol_type = other DNA
tcctgattattttccttcac

SEQ ID NO: 2618 - DNA, 20 bp, synthetic construct
  misc_feature 1..20: note = chemically synthesized
  source 1..20: mol_type = other DNA
atcactaattttaatataac

SEQ ID NO: 2619 - DNA, 20 bp, synthetic construct
  misc_feature 1..20: note = chemically synthesized
  source 1..20: mol_type = other DNA
ccagaaacttaaacctcccc

SEQ ID NO: 2620 - DNA, 20 bp, synthetic construct
  misc_feature 1..20: note = chemically synthesized
  source 1..20: mol_type = other DNA
agactctttctacatattcc

SEQ ID NO: 2621 - DNA, 20 bp, synthetic construct
  misc_feature 1..20: note = chemically synthesized
  source 1..20: mol_type = other DNA
gaaccaaatgtcactgaatt

SEQ ID NO: 2622 - DNA, 20 bp, synthetic construct
  misc_feature 1..20: note = chemically synthesized
  source 1..20: mol_type = other DNA
tgtcactgaattgagtattc

SEQ ID NO: 2623 - DNA, 20 bp, synthetic construct
  misc_feature 1..20: note = chemically synthesized
  source 1..20: mol_type = other DNA
gtcactgaattgagtattca

SEQ ID NO: 2624 - DNA, 20 bp, synthetic construct
  misc_feature 1..20: note = chemically synthesized
  source 1..20: mol_type = other DNA
gaattgagtattcaaggatt

SEQ ID NO: 2625 - DNA, 20 bp, synthetic construct
  misc_feature 1..20: note = chemically synthesized
  source 1..20: mol_type = other DNA
attcaaggattcagcacaca

SEQ ID NO: 2626 - DNA, 20 bp, synthetic construct
  misc_feature 1..20: note = chemically synthesized
  source 1..20: mol_type = other DNA
cacacaaagtgtgtcatcac

SEQ ID NO: 2627 - DNA, 20 bp, synthetic construct
  misc_feature 1..20: note = chemically synthesized
  source 1..20: mol_type = other DNA
acacaaagtgtgtcatcacc

SEQ ID NO: 2628 - DNA, 20 bp, synthetic construct
  misc_feature 1..20: note = chemically synthesized
  source 1..20: mol_type = other DNA
agtgtgtcatcaccaggaca

SEQ ID NO: 2629 - DNA, 20 bp, synthetic construct
  misc_feature 1..20: note = chemically synthesized
  source 1..20: mol_type = other DNA
ctcctcccacaattttattt

SEQ ID NO: 2630 - DNA, 20 bp, synthetic construct
  misc_feature 1..20: note = chemically synthesized
  source 1..20: mol_type = other DNA
cctcccacaattttatttca

SEQ ID NO: 2631 - DNA, 20 bp, synthetic construct
  misc_feature 1..20: note = chemically synthesized
  source 1..20: mol_type = other DNA
gtaatgccatttcctattct

SEQ ID NO: 2632 - DNA, 20 bp, synthetic construct
  misc_feature 1..20: note = chemically synthesized
  source 1..20: mol_type = other DNA
taatgccatttcctattctc

SEQ ID NO: 2633 - DNA, 20 bp, synthetic construct
  misc_feature 1..20: note = chemically synthesized
  source 1..20: mol_type = other DNA
aatgccatttcctattctca

SEQ ID NO: 2634 - DNA, 20 bp, synthetic construct
  misc_feature 1..20: note = chemically synthesized
  source 1..20: mol_type = other DNA
tcttcatctacaaaatgtta

SEQ ID NO: 2635 - DNA, 20 bp, synthetic construct
  misc_feature 1..20: note = chemically synthesized
  source 1..20: mol_type = other DNA
aaatgttaaagctcattaac

SEQ ID NO: 2636 - DNA, 20 bp, synthetic construct
  misc_feature 1..20: note = chemically synthesized
  source 1..20: mol_type = other DNA
gctcattaacaagcaataat

SEQ ID NO: 2637 - DNA, 20 bp, synthetic construct
  misc_feature 1..20: note = chemically synthesized
  source 1..20: mol_type = other DNA
taacaagcaataataagcca

SEQ ID NO: 2638 - DNA, 20 bp, synthetic construct
  misc_feature 1..20: note = chemically synthesized
  source 1..20: mol_type = other DNA
tggaatttttcatatttgca

SEQ ID NO: 2639 - DNA, 20 bp, synthetic construct
  misc_feature 1..20: note = chemically synthesized
  source 1..20: mol_type = other DNA
atatttgcaaagctaatatt

SEQ ID NO: 2640 - DNA, 20 bp, synthetic construct
  misc_feature 1..20: note = chemically synthesized
  source 1..20: mol_type = other DNA
tatttgcaaagctaatattc

SEQ ID NO: 2641 - DNA, 20 bp, synthetic construct
  misc_feature 1..20: note = chemically synthesized
  source 1..20: mol_type = other DNA
aagctaatattcaggtaata

SEQ ID NO: 2642 - DNA, 20 bp, synthetic construct
  misc_feature 1..20: note = chemically synthesized
  source 1..20: mol_type = other DNA
caggtaataaagcctgatct

SEQ ID NO: 2643 - DNA, 20 bp, synthetic construct
  misc_feature 1..20: note = chemically synthesized
  source 1..20: mol_type = other DNA
gatctaagtgcctgtgctgt

SEQ ID NO: 2644 - DNA, 20 bp, synthetic construct
  misc_feature 1..20: note = chemically synthesized
  source 1..20: mol_type = other DNA
atctaagtgcctgtgctgtc

SEQ ID NO: 2645 - DNA, 20 bp, synthetic construct
  misc_feature 1..20: note = chemically synthesized
  source 1..20: mol_type = other DNA
tctaagtgcctgtgctgtca

SEQ ID NO: 2646 - DNA, 20 bp, synthetic construct
  misc_feature 1..20: note = chemically synthesized
  source 1..20: mol_type = other DNA
ctgtgctgtcagggtatctt

SEQ ID NO: 2647 - DNA, 20 bp, synthetic construct
  misc_feature 1..20: note = chemically synthesized
  source 1..20: mol_type = other DNA
agggtatcttcagtctccat

SEQ ID NO: 2648 - DNA, 20 bp, synthetic construct
  misc_feature 1..20: note = chemically synthesized
  source 1..20: mol_type = other DNA
ttagaactcacccctcttcc

SEQ ID NO: 2649 - DNA, 20 bp, synthetic construct
  misc_feature 1..20: note = chemically synthesized
  source 1..20: mol_type = other DNA
aactcacccctcttcctgga

SEQ ID NO: 2650 - DNA, 20 bp, synthetic construct
  misc_feature 1..20: note = chemically synthesized
  source 1..20: mol_type = other DNA
cccctcttcctggatagtgt

SEQ ID NO: 2651 - DNA, 20 bp, synthetic construct
  misc_feature 1..20: note = chemically synthesized
  source 1..20: mol_type = other DNA
tttctttgattttgatacta

SEQ ID NO: 2652 - DNA, 20 bp, synthetic construct
  misc_feature 1..20: note = chemically synthesized
  source 1..20: mol_type = other DNA
gattttgatactatagacaa

SEQ ID NO: 2653 - DNA, 20 bp, synthetic construct
  misc_feature 1..20: note = chemically synthesized
  source 1..20: mol_type = other DNA
attttgatactatagacaat

SEQ ID NO: 2654 - DNA, 20 bp, synthetic construct
  misc_feature 1..20: note = chemically synthesized
  source 1..20: mol_type = other DNA
ttttgatactatagacaatg

SEQ ID NO: 2655 - DNA, 20 bp, synthetic construct
  misc_feature 1..20: note = chemically synthesized
  source 1..20: mol_type = other DNA
atagacaatggggttgacca

SEQ ID NO: 2656 - DNA, 20 bp, synthetic construct
  misc_feature 1..20: note = chemically synthesized
  source 1..20: mol_type = other DNA
tagacaatggggttgaccac

SEQ ID NO: 2657 - DNA, 20 bp, synthetic construct
  misc_feature 1..20: note = chemically synthesized
  source 1..20: mol_type = other DNA
gacaatggggttgaccacag

SEQ ID NO: 2658 - DNA, 20 bp, synthetic construct
  misc_feature 1..20: note = chemically synthesized
  source 1..20: mol_type = other DNA
acaatggggttgaccacagg

SEQ ID NO: 2659 - DNA, 20 bp, synthetic construct
  misc_feature 1..20: note = chemically synthesized
  source 1..20: mol_type = other DNA
ggttgaccacaggaggaaaa

SEQ ID NO: 2660 - DNA, 20 bp, synthetic construct
  misc_feature 1..20: note = chemically synthesized
  source 1..20: mol_type = other DNA
ttgaccacaggaggaaaaaa

SEQ ID NO: 2661 - DNA, 20 bp, synthetic construct
  misc_feature 1..20: note = chemically synthesized
  source 1..20: mol_type = other DNA
tgaccacaggaggaaaaaag

SEQ ID NO: 2662 - DNA, 20 bp, synthetic construct
  misc_feature 1..20: note = chemically synthesized
  source 1..20: mol_type = other DNA
cacaggaggaaaaaagaggt

SEQ ID NO: 2663 - DNA, 20 bp, synthetic construct
  misc_feature 1..20: note = chemically synthesized
  source 1..20: mol_type = other DNA
aggaaaaaagaggtaagcat

SEQ ID NO: 2664 - DNA, 20 bp, synthetic construct
  misc_feature 1..20: note = chemically synthesized
  source 1..20: mol_type = other DNA
gaggtaagcattggccgtga

SEQ ID NO: 2665 - DNA, 20 bp, synthetic construct
  misc_feature 1..20: note = chemically synthesized
  source 1..20: mol_type = other DNA
aagcattggccgtgacagtc

SEQ ID NO: 2666 - DNA, 20 bp, synthetic construct
  misc_feature 1..20: note = chemically synthesized
  source 1..20: mol_type = other DNA
ttggccgtgacagtctggaa

SEQ ID NO: 2667 - DNA, 20 bp, synthetic construct
  misc_feature 1..20: note = chemically synthesized
  source 1..20: mol_type = other DNA
gccgtgacagtctggaaaag

SEQ ID NO: 2668 - DNA, 20 bp, synthetic construct
  misc_feature 1..20: note = chemically synthesized
  source 1..20: mol_type = other DNA
cgtgacagtctggaaaagtg

SEQ ID NO: 2669 - DNA, 20 bp, synthetic construct
  misc_feature 1..20: note = chemically synthesized
  source 1..20: mol_type = other DNA
gtgacagtctggaaaagtgg

SEQ ID NO: 2670 - DNA, 20 bp, synthetic construct
  misc_feature 1..20: note = chemically synthesized
  source 1..20: mol_type = other DNA
gtggaggtaaatgccgtcca

SEQ ID NO: 2671 - DNA, 20 bp, synthetic construct
  misc_feature 1..20: note = chemically synthesized
  source 1..20: mol_type = other DNA
gaggtaaatgccgtccaaag

SEQ ID NO: 2672 - DNA, 20 bp, synthetic construct
  misc_feature 1..20: note = chemically synthesized
  source 1..20: mol_type = other DNA
tgccgtccaaagcggtgcat

SEQ ID NO: 2673 - DNA, 20 bp, synthetic construct
  misc_feature 1..20: note = chemically synthesized
  source 1..20: mol_type = other DNA
gccgtccaaagcggtgcatc

SEQ ID NO: 2674 - DNA, 20 bp, synthetic construct
  misc_feature 1..20: note = chemically synthesized
  source 1..20: mol_type = other DNA
ccgtccaaagcggtgcatca

SEQ ID NO: 2675 - DNA, 20 bp, synthetic construct
  misc_feature 1..20: note = chemically synthesized
  source 1..20: mol_type = other DNA
gtccaaagcggtgcatcagg

SEQ ID NO: 2676 - DNA, 20 bp, synthetic construct
  misc_feature 1..20: note = chemically synthesized
  source 1..20: mol_type = other DNA
ccaaagcggtgcatcaggga

SEQ ID NO: 2677 - DNA, 20 bp, synthetic construct
  misc_feature 1..20: note = chemically synthesized
  source 1..20: mol_type = other DNA
caaagcggtgcatcagggag

SEQ ID NO: 2678 - DNA, 20 bp, synthetic construct
  misc_feature 1..20: note = chemically synthesized
  source 1..20: mol_type = other DNA
catcagggagaggctgatca

SEQ ID NO: 2679 - DNA, 20 bp, synthetic construct
  misc_feature 1..20: note = chemically synthesized
  source 1..20: mol_type = other DNA
atcagggagaggctgatcat

SEQ ID NO: 2680 - DNA, 20 bp, synthetic construct
  misc_feature 1..20: note = chemically synthesized
  source 1..20: mol_type = other DNA
agaggctgatcatgggcaca

SEQ ID NO: 2681 - DNA, 20 bp, synthetic construct
  misc_feature 1..20: note = chemically synthesized
  source 1..20: mol_type = other DNA
atcatgggcacatagtacac

SEQ ID NO: 2682 - DNA, 20 bp, synthetic construct
  misc_feature 1..20: note = chemically synthesized
  source 1..20: mol_type = other DNA
gggcacatagtacacaagca

SEQ ID NO: 2683 - DNA, 20 bp, synthetic construct
  misc_feature 1..20: note = chemically synthesized
  source 1..20: mol_type = other DNA
atgtgcgacacacatgtgtt

SEQ ID NO: 2684 - DNA, 20 bp, synthetic construct
  misc_feature 1..20: note = chemically synthesized
  source 1..20: mol_type = other DNA
tgcctgccaccgccctgctc

SEQ ID NO: 2685 - DNA, 20 bp, synthetic construct
  misc_feature 1..20: note = chemically synthesized
  source 1..20: mol_type = other DNA
ctgccaccgccctgctccag

SEQ ID NO: 2686 - DNA, 20 bp, synthetic construct
  misc_feature 1..20: note = chemically synthesized
  source 1..20: mol_type = other DNA
cctgctccagaagctatttc

SEQ ID NO: 2687 - DNA, 20 bp, synthetic construct
  misc_feature 1..20: note = chemically synthesized
  source 1..20: mol_type = other DNA
gctatttccagtactgtatg

SEQ ID NO: 2688 - DNA, 20 bp, synthetic construct
  misc_feature 1..20: note = chemically synthesized
  source 1..20: mol_type = other DNA
tccagtactgtatgaagaat

SEQ ID NO: 2689 - DNA, 20 bp, synthetic construct
  misc_feature 1..20: note = chemically synthesized
  source 1..20: mol_type = other DNA
tgtatgaagaatcagcacat

SEQ ID NO: 2690 - DNA, 20 bp, synthetic construct
  misc_feature 1..20: note = chemically synthesized
  source 1..20: mol_type = other DNA
aagaaaccacaatgaacaat

SEQ ID NO: 2691 - DNA, 20 bp, synthetic construct
  misc_feature 1..20: note = chemically synthesized
  source 1..20: mol_type = other DNA
accacaatgaacaataagtc

SEQ ID NO: 2692 - DNA, 20 bp, synthetic construct
  misc_feature 1..20: note = chemically synthesized
  source 1..20: mol_type = other DNA
ataagtccagtccaaatgtg

SEQ ID NO: 2693 - DNA, 20 bp, synthetic construct
  misc_feature 1..20: note = chemically synthesized
  source 1..20: mol_type = other DNA
taagtccagtccaaatgtga

SEQ ID NO: 2694 - DNA, 20 bp, synthetic construct
  misc_feature 1..20: note = chemically synthesized
  source 1..20: mol_type = other DNA
aatgtgaaggtaatgacaaa

SEQ ID NO: 2695 - DNA, 20 bp, synthetic construct
  misc_feature 1..20: note = chemically synthesized
  source 1..20: mol_type = other DNA
tgtgaaggtaatgacaaata

SEQ ID NO: 2696 - DNA, 20 bp, synthetic construct
  misc_feature 1..20: note = chemically synthesized
  source 1..20: mol_type = other DNA
aaggtaatgacaaatagagc

SEQ ID NO: 2697 - DNA, 20 bp, synthetic construct
  misc_feature 1..20: note = chemically synthesized
  source 1..20: mol_type = other DNA
aggtaatgacaaatagagcc

SEQ ID NO: 2698 - DNA, 20 bp, synthetic construct
  misc_feature 1..20: note = chemically synthesized
  source 1..20: mol_type = other DNA
aaatagagccaggatgctat

SEQ ID NO: 2699 - DNA, 20 bp, synthetic construct
  misc_feature 1..20: note = chemically synthesized
  source 1..20: mol_type = other DNA
aatagagccaggatgctatt

SEQ ID NO: 2700 - DNA, 20 bp, synthetic construct
  misc_feature 1..20: note = chemically synthesized
  source 1..20: mol_type = other DNA
tattgggacgtgtgtctcca

SEQ ID NO: 2701 - DNA, 20 bp, synthetic construct
  misc_feature 1..20: note = chemically synthesized
  source 1..20: mol_type = other DNA
attgggacgtgtgtctccac

SEQ ID NO: 2702 - DNA, 20 bp, synthetic construct
  misc_feature 1..20: note = chemically synthesized
  source 1..20: mol_type = other DNA
ttgggacgtgtgtctccaca

SEQ ID NO: 2703 - DNA, 20 bp, synthetic construct
  misc_feature 1..20: note = chemically synthesized
  source 1..20: mol_type = other DNA
tctccacagggcaatttgat

SEQ ID NO: 2704 - DNA, 20 bp, synthetic construct
  misc_feature 1..20: note = chemically synthesized
  source 1..20: mol_type = other DNA
agggcaatttgatcagatct

SEQ ID NO: 2705 - DNA, 20 bp, synthetic construct
  misc_feature 1..20: note = chemically synthesized
  source 1..20: mol_type = other DNA
gcaatttgatcagatctgag

SEQ ID NO: 2706 - DNA, 20 bp, synthetic construct
  misc_feature 1..20: note = chemically synthesized
  source 1..20: mol_type = other DNA
aatttgatcagatctgagtg

SEQ ID NO: 2707 - DNA, 20 bp, synthetic construct
  misc_feature 1..20: note = chemically synthesized
  source 1..20: mol_type = other DNA
atttgatcagatctgagtgg

SEQ ID NO: 2708 - DNA, 20 bp, synthetic construct
  misc_feature 1..20: note = chemically synthesized
  source 1..20: mol_type = other DNA
cagatctgagtggaggcaat

SEQ ID NO: 2709 - DNA, 20 bp, synthetic construct
  misc_feature 1..20: note = chemically synthesized
  source 1..20: mol_type = other DNA
gatctgagtggaggcaataa

SEQ ID NO: 2710 - DNA, 20 bp, synthetic construct
  misc_feature 1..20: note = chemically synthesized
  source 1..20: mol_type = other DNA
tggaggcaataagagtgtgt

SEQ ID NO: 2711 - DNA, 20 bp, synthetic construct
  misc_feature 1..20: note = chemically synthesized
  source 1..20: mol_type = other DNA
ggaggcaataagagtgtgtg

SEQ ID NO: 2712 - DNA, 20 bp, synthetic construct
  misc_feature 1..20: note = chemically synthesized
  source 1..20: mol_type = other DNA
gaggcaataagagtgtgtga

SEQ ID NO: 2713 - DNA, 20 bp, synthetic construct
  misc_feature 1..20: note = chemically synthesized
  source 1..20: mol_type = other DNA
aagagtgtgtgagggtattg

SEQ ID NO: 2714 - DNA, 20 bp, synthetic construct
  misc_feature 1..20: note = chemically synthesized
  source 1..20: mol_type = other DNA
gtgtgagggtattgtggcca

SEQ ID NO: 2715 - DNA, 20 bp, synthetic construct
  misc_feature 1..20: note = chemically synthesized
  source 1..20: mol_type = other DNA
gagggtattgtggccacaga

SEQ ID NO: 2716 - DNA, 20 bp, synthetic construct
  misc_feature 1..20: note = chemically synthesized
  source 1..20: mol_type = other DNA
agggtattgtggccacagaa

SEQ ID NO: 2717 - DNA, 20 bp, synthetic construct
  misc_feature 1..20: note = chemically synthesized
  source 1..20: mol_type = other DNA
gtattgtggccacagaaagg

SEQ ID NO: 2718 - DNA, 20 bp, synthetic construct
  misc_feature 1..20: note = chemically synthesized
  source 1..20: mol_type = other DNA
ccacagaaaggcagacgcct

SEQ ID NO: 2719 - DNA, 20 bp, synthetic construct
  misc_feature 1..20: note = chemically synthesized
  source 1..20: mol_type = other DNA
cacagaaaggcagacgcctc

SEQ ID NO: 2720 - DNA, 20 bp, synthetic construct
  misc_feature 1..20: note = chemically synthesized
  source 1..20: mol_type = other DNA
cagaaaggcagacgcctcag

SEQ ID NO: 2721 - DNA, 20 bp, synthetic construct
  misc_feature 1..20: note = chemically synthesized
  source 1..20: mol_type = other DNA
aaggcagacgcctcaggaga

SEQ ID NO: 2722 - DNA, 20 bp, synthetic construct
  misc_feature 1..20: note = chemically synthesized
  source 1..20: mol_type = other DNA
ggcagacgcctcaggagaaa

SEQ ID NO: 2723 - DNA, 20 bp, synthetic construct
  misc_feature 1..20: note = chemically synthesized
  source 1..20: mol_type = other DNA
agacgcctcaggagaaagag

SEQ ID NO: 2724 - DNA, 20 bp, synthetic construct
  misc_feature 1..20: note = chemically synthesized
  source 1..20: mol_type = other DNA
cgcctcaggagaaagagcag

SEQ ID NO: 2725 - DNA, 20 bp, synthetic construct
  misc_feature 1..20: note = chemically synthesized
  source 1..20: mol_type = other DNA
gcctcaggagaaagagcagt

SEQ ID NO: 2726 - DNA, 20 bp, synthetic construct
  misc_feature 1..20: note = chemically synthesized
  source 1..20: mol_type = other DNA
ctcaggagaaagagcagtgg

SEQ ID NO: 2727 - DNA, 20 bp, synthetic construct
  misc_feature 1..20: note = chemically synthesized
  source 1..20: mol_type = other DNA
agaaagagcagtgggagcat

SEQ ID NO: 2728 - DNA, 20 bp, synthetic construct
  misc_feature 1..20: note = chemically synthesized
  source 1..20: mol_type = other DNA
gcataagcattacactgcgc

SEQ ID NO: 2729 - DNA, 20 bp, synthetic construct
  misc_feature 1..20: note = chemically synthesized
  source 1..20: mol_type = other DNA
cataagcattacactgcgca

SEQ ID NO: 2730 - DNA, 20 bp, synthetic construct
  misc_feature 1..20: note = chemically synthesized
  source 1..20: mol_type = other DNA
cattacactgcgcaaggcaa

SEQ ID NO: 2731 - DNA, 20 bp, synthetic construct
  misc_feature 1..20: note = chemically synthesized
  source 1..20: mol_type = other DNA
tacactgcgcaaggcaatgg

SEQ ID NO: 2732 - DNA, 20 bp, synthetic construct
  misc_feature 1..20: note = chemically synthesized
  source 1..20: mol_type = other DNA
ggcaatggcggcacccgtcc

SEQ ID NO: 2733 - DNA, 20 bp, synthetic construct
  misc_feature 1..20: note = chemically synthesized
  source 1..20: mol_type = other DNA
cggcacccgtcccagaaatg

SEQ ID NO: 2734 - DNA, 20 bp, synthetic construct
  misc_feature 1..20: note = chemically synthesized
  source 1..20: mol_type = other DNA
ggcacccgtcccagaaatgc

SEQ ID NO: 2735 - DNA, 20 bp, synthetic construct
  misc_feature 1..20: note = chemically synthesized
  source 1..20: mol_type = other DNA
ccagaaatgcaggcaattgt

SEQ ID NO: 2736 - DNA, 20 bp, synthetic construct
  misc_feature 1..20: note = chemically synthesized
  source 1..20: mol_type = other DNA
aatgcaggcaattgtcagaa

SEQ ID NO: 2737 - DNA, 20 bp, synthetic construct
  misc_feature 1..20: note = chemically synthesized
  source 1..20: mol_type = other DNA
caattgtcagaatggttgtg

SEQ ID NO: 2738 - DNA, 20 bp, synthetic construct
  misc_feature 1..20: note = chemically synthesized
  source 1..20: mol_type = other DNA
gtcagaatggttgtgtagcg

SEQ ID NO: 2739 - DNA, 20 bp, synthetic construct
  misc_feature 1..20: note = chemically synthesized
  source 1..20: mol_type = other DNA
agaatggttgtgtagcgcag

SEQ ID NO: 2740 - DNA, 20 bp, synthetic construct
  misc_feature 1..20: note = chemically synthesized
  source 1..20: mol_type = other DNA
gaatggttgtgtagcgcagt

SEQ ID NO: 2741 - DNA, 20 bp, synthetic construct
  misc_feature 1..20: note = chemically synthesized
  source 1..20: mol_type = other DNA
ttgtgtagcgcagtgggctg

SEQ ID NO: 2742 - DNA, 20 bp, synthetic construct
  misc_feature 1..20: note = chemically synthesized
  source 1..20: mol_type = other DNA
gtagcgcagtgggctgtaga

SEQ ID NO: 2743 - DNA, 20 bp, synthetic construct
  misc_feature 1..20: note = chemically synthesized
  source 1..20: mol_type = other DNA
gtgggctgtagatggccaca

SEQ ID NO: 2744 - DNA, 20 bp, synthetic construct
  misc_feature 1..20: note = chemically synthesized
  source 1..20: mol_type = other DNA
ggctgtagatggccacaaag

SEQ ID NO: 2745 - DNA, 20 bp, synthetic construct
  misc_feature 1..20: note = chemically synthesized
  source 1..20: mol_type = other DNA
aagcggtccactgacattgc

SEQ ID NO: 2746 - DNA, 20 bp, synthetic construct
  misc_feature 1..20: note = chemically synthesized
  source 1..20: mol_type = other DNA
cggtccactgacattgccag

SEQ ID NO: 2747 - DNA, 20 bp, synthetic construct
  misc_feature 1..20: note = chemically synthesized
  source 1..20: mol_type = other DNA
ggtccactgacattgccaga

SEQ ID NO: 2748 - DNA, 20 bp, synthetic construct
  misc_feature 1..20: note = chemically synthesized
  source 1..20: mol_type = other DNA
agaaggacacctgactccat

SEQ ID NO: 2749 - DNA, 20 bp, synthetic construct
  misc_feature 1..20: note = chemically synthesized
  source 1..20: mol_type = other DNA
aaggacacctgactccataa

SEQ ID NO: 2750 - DNA, 20 bp, synthetic construct
  misc_feature 1..20: note = chemically synthesized
  source 1..20: mol_type = other DNA
acctgactccataagagtga

SEQ ID NO: 2751 - DNA, 20 bp, synthetic construct
  misc_feature 1..20: note = chemically synthesized
  source 1..20: mol_type = other DNA
ctgactccataagagtgaaa

SEQ ID NO: 2752 - DNA, 20 bp, synthetic construct
  misc_feature 1..20: note = chemically synthesized
  source 1..20: mol_type = other DNA
cataagagtgaaagagtgca

SEQ ID NO: 2753 - DNA, 20 bp, synthetic construct
  misc_feature 1..20: note = chemically synthesized
  source 1..20: mol_type = other DNA
aagagtgcatagaaaacatc

SEQ ID NO: 2754 - DNA, 20 bp, synthetic construct
  misc_feature 1..20: note = chemically synthesized
  source 1..20: mol_type = other DNA
gagtgcatagaaaacatctg

SEQ ID NO: 2755 - DNA, 20 bp, synthetic construct
  misc_feature 1..20: note = chemically synthesized
  source 1..20: mol_type = other DNA
tgcatagaaaacatctggag

SEQ ID NO: 2756 - DNA, 20 bp, synthetic construct
  misc_feature 1..20: note = chemically synthesized
  source 1..20: mol_type = other DNA
gcatagaaaacatctggagc

SEQ ID NO: 2757 - DNA, 20 bp, synthetic construct
  misc_feature 1..20: note = chemically synthesized
  source 1..20: mol_type = other DNA
aactgacatcgttaatgcca

SEQ ID NO: 2758 - DNA, 20 bp, synthetic construct
  misc_feature 1..20: note = chemically synthesized
  source 1..20: mol_type = other DNA
ctgacatcgttaatgccaaa

SEQ ID NO: 2759 - DNA, 20 bp, synthetic construct
  misc_feature 1..20: note = chemically synthesized
  source 1..20: mol_type = other DNA
tgacatcgttaatgccaaag

SEQ ID NO: 2760 - DNA, 20 bp, synthetic construct
  misc_feature 1..20: note = chemically synthesized
  source 1..20: mol_type = other DNA
aaagaggaatatgcttaaca

SEQ ID NO: 2761 - DNA, 20 bp, synthetic construct
  misc_feature 1..20: note = chemically synthesized
  source 1..20: mol_type = other DNA
gaggaatatgcttaacacag

SEQ ID NO: 2762 - DNA, 20 bp, synthetic construct
  misc_feature 1..20: note = chemically synthesized
  source 1..20: mol_type = other DNA
aggaatatgcttaacacagt

SEQ ID NO: 2763 - DNA, 20 bp, synthetic construct
  misc_feature 1..20: note = chemically synthesized
  source 1..20: mol_type = other DNA
tatgcttaacacagtgggca

SEQ ID NO: 2764 - DNA, 20 bp, synthetic construct
  misc_feature 1..20: note = chemically synthesized
  source 1..20: mol_type = other DNA
gcttaacacagtgggcatgg

SEQ ID NO: 2765 - DNA, 20 bp, synthetic construct
  misc_feature 1..20: note = chemically synthesized
  source 1..20: mol_type = other DNA
taacacagtgggcatggtgg

SEQ ID NO: 2766 - DNA, 20 bp, synthetic construct
  misc_feature 1..20: note = chemically synthesized
  source 1..20: mol_type = other DNA
cacagtgggcatggtggaag

SEQ ID NO: 2767 - DNA, 20 bp, synthetic construct
  misc_feature 1..20: note = chemically synthesized
  source 1..20: mol_type = other DNA
cagtgggcatggtggaagca

SEQ ID NO: 2768 - DNA, 20 bp, synthetic construct
  misc_feature 1..20: note = chemically synthesized
  source 1..20: mol_type = other DNA
atggtggaagcagagacacc

SEQ ID NO: 2769 - DNA, 20 bp, synthetic construct
  misc_feature 1..20: note = chemically synthesized
  source 1..20: mol_type = other DNA
cagagacaccaagttcaaca

SEQ ID NO: 2770 - DNA, 20 bp, synthetic construct
  misc_feature 1..20: note = chemically synthesized
  source 1..20: mol_type = other DNA
agagacaccaagttcaacaa

SEQ ID NO: 2771 - DNA, 20 bp, synthetic construct
  misc_feature 1..20: note = chemically synthesized
  source 1..20: mol_type = other DNA
acaccaagttcaacaaaggc

SEQ ID NO: 2772 - DNA, 20 bp, synthetic construct
  misc_feature 1..20: note = chemically synthesized
  source 1..20: mol_type = other DNA
aagttcaacaaaggccggca

SEQ ID NO: 2773 - DNA, 20 bp, synthetic construct
  misc_feature 1..20: note = chemically synthesized
  source 1..20: mol_type = other DNA
tcaacaaaggccggcatggc

SEQ ID NO: 2774 - DNA, 20 bp, synthetic construct
  misc_feature 1..20: note = chemically synthesized
  source 1..20: mol_type = other DNA
aggccggcatggccagaaaa

SEQ ID NO: 2775 - DNA, 20 bp, synthetic construct
  misc_feature 1..20: note = chemically synthesized
  source 1..20: mol_type = other DNA
catggccagaaaatagtaca

SEQ ID NO: 2776 - DNA, 20 bp, synthetic construct
  misc_feature 1..20: note = chemically synthesized
  source 1..20: mol_type = other DNA
atggccagaaaatagtacat

SEQ ID NO: 2777 - DNA, 20 bp, synthetic construct
  misc_feature 1..20: note = chemically synthesized
  source 1..20: mol_type = other DNA
ccagaaaatagtacatgggt

SEQ ID NO: 2778 - DNA, 20 bp, synthetic construct
  misc_feature 1..20: note = chemically synthesized
  source 1..20: mol_type = other DNA
aatagtacatgggttggtgc

SEQ ID NO: 2779 - DNA, 20 bp, synthetic construct
  misc_feature 1..20: note = chemically synthesized
  source 1..20: mol_type = other DNA
atagtacatgggttggtgca

SEQ ID NO: 2780 - DNA, 20 bp, synthetic construct
  misc_feature 1..20: note = chemically synthesized
  source 1..20: mol_type = other DNA
gtacatgggttggtgcaagg

SEQ ID NO: 2781 - DNA, 20 bp, synthetic construct
  misc_feature 1..20: note = chemically synthesized
  source 1..20: mol_type = other DNA
acatgggttggtgcaaggaa

SEQ ID NO: 2782 - DNA, 20 bp, synthetic construct
  misc_feature 1..20: note = chemically synthesized
  source 1..20: mol_type = other DNA
ggtgcaaggaagagtcaatt

SEQ ID NO: 2783 - DNA, 20 bp, synthetic construct
  misc_feature 1..20: note = chemically synthesized
  source 1..20: mol_type = other DNA
gagtcaattcggatgatgtg

SEQ ID NO: 2784 - DNA, 20 bp, synthetic construct
  misc_feature 1..20: note = chemically synthesized
  source 1..20: mol_type = other DNA
tgaagaatgatgccatttcc

SEQ ID NO: 2785 - DNA, 20 bp, synthetic construct
  misc_feature 1..20: note = chemically synthesized
  source 1..20: mol_type = other DNA
gaatgatgccatttcccgga

SEQ ID NO: 2786 - DNA, 20 bp, synthetic construct
  misc_feature 1..20: note = chemically synthesized
  source 1..20: mol_type = other DNA
gccatttcccggaaagatga

SEQ ID NO: 2787 - DNA, 20 bp, synthetic construct
  misc_feature 1..20: note = chemically synthesized
  source 1..20: mol_type = other DNA
ggaaagatgatggtgtatat

SEQ ID NO: 2788 - DNA, 20 bp, synthetic construct
  misc_feature 1..20: note = chemically synthesized
  source 1..20: mol_type = other DNA
gaaagatgatggtgtatatc

SEQ ID NO: 2789 - DNA, 20 bp, synthetic construct
  misc_feature 1..20: note = chemically synthesized
  source 1..20: mol_type = other DNA
agatgatggtgtatatcagg

SEQ ID NO: 2790 - DNA, 20 bp, synthetic construct
  misc_feature 1..20: note = chemically synthesized
  source 1..20: mol_type = other DNA
tgatggtgtatatcaggcag

SEQ ID NO: 2791 - DNA, 20 bp, synthetic construct
  misc_feature 1..20: note = chemically synthesized
  source 1..20: mol_type = other DNA
gatggtgtatatcaggcaga

SEQ ID NO: 2792 - DNA, 20 bp, synthetic construct
  misc_feature 1..20: note = chemically synthesized
  source 1..20: mol_type = other DNA
atggtgtatatcaggcagaa

SEQ ID NO: 2793 - DNA, 20 bp, synthetic construct
  misc_feature 1..20: note = chemically synthesized
  source 1..20: mol_type = other DNA
tggtgtatatcaggcagaag

SEQ ID NO: 2794 - DNA, 20 bp, synthetic construct
  misc_feature 1..20: note = chemically synthesized
  source 1..20: mol_type = other DNA
gtatatcaggcagaagggga

SEQ ID NO: 2795 - DNA, 20 bp, synthetic construct
  misc_feature 1..20: note = chemically synthesized
  source 1..20: mol_type = other DNA
tccacataatgttctgcctc

SEQ ID NO: 2796 - DNA, 20 bp, synthetic construct
  misc_feature 1..20: note = chemically synthesized
  source 1..20: mol_type = other DNA
taatgttctgcctccagtcc

SEQ ID NO: 2797 - DNA, 20 bp, synthetic construct
  misc_feature 1..20: note = chemically synthesized
  source 1..20: mol_type = other DNA
aatgttctgcctccagtccc

SEQ ID NO: 2798 - DNA, 20 bp, synthetic construct
  misc_feature 1..20: note = chemically synthesized
  source 1..20: mol_type = other DNA
tccagtcccgggatgccaac

SEQ ID NO: 2799 - DNA, 20 bp, synthetic construct
  misc_feature 1..20: note = chemically synthesized
  source 1..20: mol_type = other DNA
cagtcccgggatgccaacga

SEQ ID NO: 2800 - DNA, 20 bp, synthetic construct
  misc_feature 1..20: note = chemically synthesized
  source 1..20: mol_type = other DNA
gccaacgagagtgaatgttg

SEQ ID NO: 2801 - DNA, 20 bp, synthetic construct
  misc_feature 1..20: note = chemically synthesized
  source 1..20: mol_type = other DNA
ccaacgagagtgaatgttgt

SEQ ID NO: 2802 - DNA, 20 bp, synthetic construct
  misc_feature 1..20: note = chemically synthesized
  source 1..20: mol_type = other DNA
tgttgtaggtgtgaatgtta

SEQ ID NO: 2803 - DNA, 20 bp, synthetic construct
  misc_feature 1..20: note = chemically synthesized
  source 1..20: mol_type = other DNA
tggaacgtttgaaaacgtca

SEQ ID NO: 2804 - DNA, 20 bp, synthetic construct
  misc_feature 1..20: note = chemically synthesized
  source 1..20: mol_type = other DNA
tcatggtgatacttcctctg

SEQ ID NO: 2805 - DNA, 20 bp, synthetic construct
  misc_feature 1..20: note = chemically synthesized
  source 1..20: mol_type = other DNA
atacttcctctgaagatatt

SEQ ID NO: 2806 - DNA, 20 bp, synthetic construct
  misc_feature 1..20: note = chemically synthesized
  source 1..20: mol_type = other DNA
cttcctctgaagatattgag

SEQ ID NO: 2807 - DNA, 20 bp, synthetic construct
  misc_feature 1..20: note = chemically synthesized
  source 1..20: mol_type = other DNA
tgaagatattgagaagcaca

SEQ ID NO: 2808 - DNA, 20 bp, synthetic construct
  misc_feature 1..20: note = chemically synthesized
  source 1..20: mol_type = other DNA
aagatattgagaagcacatg

SEQ ID NO: 2809 - DNA, 20 bp, synthetic construct
  misc_feature 1..20: note = chemically synthesized
  source 1..20: mol_type = other DNA
attgagaagcacatggagac

SEQ ID NO: 2810 - DNA, 20 bp, synthetic construct
  misc_feature 1..20: note = chemically synthesized
  source 1..20: mol_type = other DNA
acatggagactggaatatat

SEQ ID NO: 2811 - DNA, 20 bp, synthetic construct
  misc_feature 1..20: note = chemically synthesized
  source 1..20: mol_type = other DNA
ggaatatataagtttctact

SEQ ID NO: 2812 - DNA, 20 bp, synthetic construct
  misc_feature 1..20: note = chemically synthesized
  source 1..20: mol_type = other DNA
ctactcagttattgcacatc

SEQ ID NO: 2813 - DNA, 20 bp, synthetic construct
  misc_feature 1..20: note = chemically synthesized
  source 1..20: mol_type = other DNA
gttattgcacatcaagttct

SEQ ID NO: 2814 - DNA, 20 bp, synthetic construct
  misc_feature 1..20: note = chemically synthesized
  source 1..20: mol_type = other DNA
cacatcaagttctgagctaa

SEQ ID NO: 2815 - DNA, 20 bp, synthetic construct
  misc_feature 1..20: note = chemically synthesized
  source 1..20: mol_type = other DNA
ctgagctaacagtcatatct

SEQ ID NO: 2816 - DNA, 20 bp, synthetic construct
  misc_feature 1..20: note = chemically synthesized
  source 1..20: mol_type = other DNA
tcatatctaagacatttcct

SEQ ID NO: 2817 - DNA, 20 bp, synthetic construct
  misc_feature 1..20: note = chemically synthesized
  source 1..20: mol_type = other DNA
ctaagacatttcctcagaaa

SEQ ID NO: 2818 - DNA, 20 bp, synthetic construct
  misc_feature 1..20: note = chemically synthesized
  source 1..20: mol_type = other DNA
taagacatttcctcagaaaa

SEQ ID NO: 2819 - DNA, 20 bp, synthetic construct
  misc_feature 1..20: note = chemically synthesized
  source 1..20: mol_type = other DNA
aagacatttcctcagaaaaa

SEQ ID NO: 2820 - DNA, 20 bp, synthetic construct
  misc_feature 1..20: note = chemically synthesized
  source 1..20: mol_type = other DNA
aaaaaatttatttctgaaac

SEQ ID NO: 2821 - DNA, 20 bp, synthetic construct
  misc_feature 1..20: note = chemically synthesized
  source 1..20: mol_type = other DNA
aaaaatttatttctgaaaca

SEQ ID NO: 2822 - DNA, 20 bp, synthetic construct
  misc_feature 1..20: note = chemically synthesized
  source 1..20: mol_type = other DNA
aaaatttatttctgaaacaa

SEQ ID NO: 2823 - DNA, 20 bp, synthetic construct
  misc_feature 1..20: note = chemically synthesized
  source 1..20: mol_type = other DNA
ttatttctgaaacaagggca

SEQ ID NO: 2824 - DNA, 20 bp, synthetic construct
  misc_feature 1..20: note = chemically synthesized
  source 1..20: mol_type = other DNA
tatttctgaaacaagggcac

SEQ ID NO: 2825 - DNA, 20 bp, synthetic construct
  misc_feature 1..20: note = chemically synthesized
  source 1..20: mol_type = other DNA
tctgaaacaagggcacaggt

SEQ ID NO: 2826 - DNA, 20 bp, synthetic construct
  misc_feature 1..20: note = chemically synthesized
  source 1..20: mol_type = other DNA
acaagggcacaggtaagcca

SEQ ID NO: 2827 - DNA, 20 bp, synthetic construct
  misc_feature 1..20: note = chemically synthesized
  source 1..20: mol_type = other DNA
gggcacaggtaagccacagt

SEQ ID NO: 2828 - DNA, 20 bp, synthetic construct
  misc_feature 1..20: note = chemically synthesized
  source 1..20: mol_type = other DNA
cacaggtaagccacagtgag

SEQ ID NO: 2829 - DNA, 20 bp, synthetic construct
  misc_feature 1..20: note = chemically synthesized
  source 1..20: mol_type = other DNA
aggtaagccacagtgagtgg

SEQ ID NO: 2830 - DNA, 20 bp, synthetic construct
  misc_feature 1..20: note = chemically synthesized
  source 1..20: mol_type = other DNA
gtaagccacagtgagtggaa

SEQ ID NO: 2831 - DNA, 20 bp, synthetic construct
  misc_feature 1..20: note = chemically synthesized
  source 1..20: mol_type = other DNA
tgagtggaagagaaacctaa

SEQ ID NO: 2832 - DNA, 20 bp, synthetic construct
  misc_feature 1..20: note = chemically synthesized
  source 1..20: mol_type = other DNA
gagtggaagagaaacctaat

SEQ ID NO: 2833 - DNA, 20 bp, synthetic construct
  misc_feature 1..20: note = chemically synthesized
  source 1..20: mol_type = other DNA
gagaaacctaatgggtcatg

SEQ ID NO: 2834 - DNA, 20 bp, synthetic construct
  misc_feature 1..20: note = chemically synthesized
  source 1..20: mol_type = other DNA
acctaatgggtcatgcagaa

SEQ ID NO: 2835 - DNA, 20 bp, synthetic construct
  misc_feature 1..20: note = chemically synthesized
  source 1..20: mol_type = other DNA
tgcagaaaagtattccaaca

SEQ ID NO: 2836 - DNA, 20 bp, synthetic construct
  misc_feature 1..20: note = chemically synthesized
  source 1..20: mol_type = other DNA
ttccaacatagcctatatgc

SEQ ID NO: 2837 - DNA, 20 bp, synthetic construct
  misc_feature 1..20: note = chemically synthesized
  source 1..20: mol_type = other DNA
acatagcctatatgccagat

SEQ ID NO: 2838 - DNA, 20 bp, synthetic construct
  misc_feature 1..20: note = chemically synthesized
  source 1..20: mol_type = other DNA
catagcctatatgccagata

SEQ ID NO: 2839 - DNA, 20 bp, synthetic construct
  misc_feature 1..20: note = chemically synthesized
  source 1..20: mol_type = other DNA
tatgccagataaggcattaa

SEQ ID NO: 2840 - DNA, 20 bp, synthetic construct
  misc_feature 1..20: note = chemically synthesized
  source 1..20: mol_type = other DNA
aaggcattaatagaaatctc

SEQ ID NO: 2841 - DNA, 20 bp, synthetic construct
  misc_feature 1..20: note = chemically synthesized
  source 1..20: mol_type = other DNA
cattaatagaaatctcaagt

SEQ ID NO: 2842 - DNA, 20 bp, synthetic construct
  misc_feature 1..20: note = chemically synthesized
  source 1..20: mol_type = other DNA
attaatagaaatctcaagtt

SEQ ID NO: 2843 - DNA, 20 bp, synthetic construct
  misc_feature 1..20: note = chemically synthesized
  source 1..20: mol_type = other DNA
atctcaagttgggtcatcta

SEQ ID NO: 2844 - DNA, 20 bp, synthetic construct
  misc_feature 1..20: note = chemically synthesized
  source 1..20: mol_type = other DNA
tcaagttgggtcatctatgg

SEQ ID NO: 2845 - DNA, 20 bp, synthetic construct
  misc_feature 1..20: note = chemically synthesized
  source 1..20: mol_type = other DNA
tcatctatggcagtgaaaaa

SEQ ID NO: 2846 - DNA, 20 bp, synthetic construct
  misc_feature 1..20: note = chemically synthesized
  source 1..20: mol_type = other DNA
cagtgaaaaacagttaaaat

SEQ ID NO: 2847 - DNA, 20 bp, synthetic construct
  misc_feature 1..20: note = chemically synthesized
  source 1..20: mol_type = other DNA
aaaaacagttaaaataagca

SEQ ID NO: 2848 - DNA, 20 bp, synthetic construct
  misc_feature 1..20: note = chemically synthesized
  source 1..20: mol_type = other DNA
aaacagttaaaataagcata

SEQ ID NO: 2849 - DNA, 20 bp, synthetic construct
  misc_feature 1..20: note = chemically synthesized
  source 1..20: mol_type = other DNA
taaaataagcatagagatga

SEQ ID NO: 2850 - DNA, 20 bp, synthetic construct
  misc_feature 1..20: note = chemically synthesized
  source 1..20: mol_type = other DNA
atagagatgacagattcaca

SEQ ID NO: 2851 - DNA, 20 bp, synthetic construct
  misc_feature 1..20: note = chemically synthesized
  source 1..20: mol_type = other DNA
tcacatggaaattatgactg

SEQ ID NO: 2852 - DNA, 20 bp, synthetic construct
  misc_feature 1..20: note = chemically synthesized
  source 1..20: mol_type = other DNA
ctgaagaaactgctaacttg

SEQ ID NO: 2853 - DNA, 20 bp, synthetic construct
  misc_feature 1..20: note = chemically synthesized
  source 1..20: mol_type = other DNA
gctaacttgtagtgtttata

SEQ ID NO: 2854 - DNA, 20 bp, synthetic construct
  misc_feature 1..20: note = chemically synthesized
  source 1..20: mol_type = other DNA
taacttgtagtgtttataaa

SEQ ID NO: 2855 - DNA, 20 bp, synthetic construct
  misc_feature 1..20: note = chemically synthesized
  source 1..20: mol_type = other DNA
acttgtagtgtttataaaga

SEQ ID NO: 2856 - DNA, 20 bp, synthetic construct
  misc_feature 1..20: note = chemically synthesized
  source 1..20: mol_type = other DNA
tgtagtgtttataaagagag

SEQ ID NO: 2857 - DNA, 20 bp, synthetic construct
  misc_feature 1..20: note = chemically synthesized
  source 1..20: mol_type = other DNA
ttataaagagagtagatgaa

SEQ ID NO: 2858 - DNA, 20 bp, synthetic construct
  misc_feature 1..20: note = chemically synthesized
  source 1..20: mol_type = other DNA
agagagtagatgaatagcta

SEQ ID NO: 2859 - DNA, 20 bp, synthetic construct
  misc_feature 1..20: note = chemically synthesized
  source 1..20: mol_type = other DNA
aaagtaatataacactaata

SEQ ID NO: 2860 - DNA, 20 bp, synthetic construct
  misc_feature 1..20: note = chemically synthesized
  source 1..20: mol_type = other DNA
agtaatataacactaataaa

SEQ ID NO: 2861 - DNA, 20 bp, synthetic construct
  misc_feature 1..20: note = chemically synthesized
  source 1..20: mol_type = other DNA
acactaataaagagtattga

SEQ ID NO: 2862 - DNA, 20 bp, synthetic construct
  misc_feature 1..20: note = chemically synthesized
  source 1..20: mol_type = other DNA
atttaattgacgtgtaatct

SEQ ID NO: 2863 - DNA, 20 bp, synthetic construct
  misc_feature 1..20: note = chemically synthesized
  source 1..20: mol_type = other DNA
tttaattgacgtgtaatctt

SEQ ID NO: 2864 - DNA, 20 bp, synthetic construct
  misc_feature 1..20: note = chemically synthesized
  source 1..20: mol_type = other DNA
gtaatcttgggattatatta

SEQ ID NO: 2865 - DNA, 20 bp, synthetic construct
  misc_feature 1..20: note = chemically synthesized
  source 1..20: mol_type = other DNA
ttaaagttgatttatattgc

SEQ ID NO: 2866 - DNA, 20 bp, synthetic construct
  misc_feature 1..20: note = chemically synthesized
  source 1..20: mol_type = other DNA
atttatattgcaagttatct

SEQ ID NO: 2867 - DNA, 20 bp, synthetic construct
  misc_feature 1..20: note = chemically synthesized
  source 1..20: mol_type = other DNA
attgcaagttatctgagacc

SEQ ID NO: 2868 - DNA, 20 bp, synthetic construct
  misc_feature 1..20: note = chemically synthesized
  source 1..20: mol_type = other DNA
agacccagatatttgctata

SEQ ID NO: 2869 - DNA, 20 bp, synthetic construct
  misc_feature 1..20: note = chemically synthesized
  source 1..20: mol_type = other DNA
atttgctataaagacaataa

SEQ ID NO: 2870 - DNA, 20 bp, synthetic construct
  misc_feature 1..20: note = chemically synthesized
  source 1..20: mol_type = other DNA
aagacaataatagtatttta

SEQ ID NO: 2871 - DNA, 20 bp, synthetic construct
  misc_feature 1..20: note = chemically synthesized
  source 1..20: mol_type = other DNA
atattgtttatcattatatg

SEQ ID NO: 2872 - DNA, 20 bp, synthetic construct
  misc_feature 1..20: note = chemically synthesized
  source 1..20: mol_type = other DNA
ttatcattatatgtggaata

SEQ ID NO: 2873 - DNA, 20 bp, synthetic construct
  misc_feature 1..20: note = chemically synthesized
  source 1..20: mol_type = other DNA
tatagtaaatattaaatgta

SEQ ID NO: 2874 - DNA, 20 bp, synthetic construct
  misc_feature 1..20: note = chemically synthesized
  source 1..20: mol_type = other DNA
tattaaatgtatagaataaa

SEQ ID NO: 2875 - DNA, 20 bp, synthetic construct
  misc_feature 1..20: note = chemically synthesized
  source 1..20: mol_type = other DNA
aaaagaacaatttaatatat

SEQ ID NO: 2876 - DNA, 20 bp, synthetic construct
  misc_feature 1..20: note = chemically synthesized
  source 1..20: mol_type = other DNA
aatttaatatattagaacac

SEQ ID NO: 2877 - DNA, 20 bp, synthetic construct
  misc_feature 1..20: note = chemically synthesized
  source 1..20: mol_type = other DNA
atttaatatattagaacaca

SEQ ID NO: 2878 - DNA, 20 bp, synthetic construct
  misc_feature 1..20: note = chemically synthesized
  source 1..20: mol_type = other DNA
aatatattagaacacaagga

SEQ ID NO: 2879 - DNA, 20 bp, synthetic construct
  misc_feature 1..20: note = chemically synthesized
  source 1..20: mol_type = other DNA
aacacaaggatagtttctcc

SEQ ID NO: 2880 - DNA, 20 bp, synthetic construct
  misc_feature 1..20: note = chemically synthesized
  source 1..20: mol_type = other DNA
ggatagtttctcctagaata

SEQ ID NO: 2881 - DNA, 20 bp, synthetic construct
  misc_feature 1..20: note = chemically synthesized
  source 1..20: mol_type = other DNA
catttttttctttaacttac

SEQ ID NO: 2882 - DNA, 20 bp, synthetic construct
  misc_feature 1..20: note = chemically synthesized
  source 1..20: mol_type = other DNA
ctttctccacctgctatcca

SEQ ID NO: 2883 - DNA, 20 bp, synthetic construct
  misc_feature 1..20: note = chemically synthesized
  source 1..20: mol_type = other DNA
tccacctgctatccatagat

SEQ ID NO: 2884 - DNA, 20 bp, synthetic construct
  misc_feature 1..20: note = chemically synthesized
  source 1..20: mol_type = other DNA
ctgctatccatagattagaa

SEQ ID NO: 2885 - DNA, 20 bp, synthetic construct
  misc_feature 1..20: note = chemically synthesized
  source 1..20: mol_type = other DNA
aaaagctcctctgtattttg

SEQ ID NO: 2886 - DNA, 20 bp, synthetic construct
  misc_feature 1..20: note = chemically synthesized
  source 1..20: mol_type = other DNA
agctcctctgtattttgcag

SEQ ID NO: 2887 - DNA, 20 bp, synthetic construct
  misc_feature 1..20: note = chemically synthesized
  source 1..20: mol_type = other DNA
gctcctctgtattttgcaga

SEQ ID NO: 2888 - DNA, 20 bp, synthetic construct
  misc_feature 1..20: note = chemically synthesized
  source 1..20: mol_type = other DNA
ctcctctgtattttgcagaa

SEQ ID NO: 2889 - DNA, 20 bp, synthetic construct
  misc_feature 1..20: note = chemically synthesized
  source 1..20: mol_type = other DNA
tctgtattttgcagaagggt

SEQ ID NO: 2890 - DNA, 20 bp, synthetic construct
  misc_feature 1..20: note = chemically synthesized
  source 1..20: mol_type = other DNA
cagaagggtcagtcttctgc

SEQ ID NO: 2891 - DNA, 20 bp, synthetic construct
  misc_feature 1..20: note = chemically synthesized
  source 1..20: mol_type = other DNA
ggtcagtcttctgctggaac

SEQ ID NO: 2892 - DNA, 20 bp, synthetic construct
  misc_feature 1..20: note = chemically synthesized
  source 1..20: mol_type = other DNA
gtcagtcttctgctggaacc

SEQ ID NO: 2893 - DNA, 20 bp, synthetic construct
  misc_feature 1..20: note = chemically synthesized
  source 1..20: mol_type = other DNA
gtcttctgctggaaccgggt

SEQ ID NO: 2894 - DNA, 20 bp, synthetic construct
  misc_feature 1..20: note = chemically synthesized
  source 1..20: mol_type = other DNA
tcttctgctggaaccgggtc

SEQ ID NO: 2895 - DNA, 20 bp, synthetic construct
  misc_feature 1..20: note = chemically synthesized
  source 1..20: mol_type = other DNA
cttctgctggaaccgggtca

SEQ ID NO: 2896 - DNA, 20 bp, synthetic construct
  misc_feature 1..20: note = chemically synthesized
  source 1..20: mol_type = other DNA
tctgctggaaccgggtcagg

SEQ ID NO: 2897 - DNA, 20 bp, synthetic construct
  misc_feature 1..20: note = chemically synthesized
  source 1..20: mol_type = other DNA
ctggaaccgggtcagggagc

SEQ ID NO: 2898 - DNA, 20 bp, synthetic construct
  misc_feature 1..20: note = chemically synthesized
  source 1..20: mol_type = other DNA
accgggtcagggagcaagat

SEQ ID NO: 2899 - DNA, 20 bp, synthetic construct
  misc_feature 1..20: note = chemically synthesized
  source 1..20: mol_type = other DNA
gggtcagggagcaagatcag

SEQ ID NO: 2900 - DNA, 20 bp, synthetic construct
  misc_feature 1..20: note = chemically synthesized
  source 1..20: mol_type = other DNA
gggagcaagatcagaagcat

SEQ ID NO: 2901 - DNA, 20 bp, synthetic construct
  misc_feature 1..20: note = chemically synthesized
  source 1..20: mol_type = other DNA
cagaagcatcagtatctcac

SEQ ID NO: 2902 - DNA, 20 bp, synthetic construct
  misc_feature 1..20: note = chemically synthesized
  source 1..20: mol_type = other DNA
atctcacaagtcacatgtga

SEQ ID NO: 2903 - DNA, 20 bp, synthetic construct
  misc_feature 1..20: note = chemically synthesized
  source 1..20: mol_type = other DNA
tcacaagtcacatgtgatgg

SEQ ID NO: 2904 - DNA, 20 bp, synthetic construct
  misc_feature 1..20: note = chemically synthesized
  source 1..20: mol_type = other DNA
cacaagtcacatgtgatggt

SEQ ID NO: 2905 - DNA, 20 bp, synthetic construct
  misc_feature 1..20: note = chemically synthesized
  source 1..20: mol_type = other DNA
acaagtcacatgtgatggtg

SEQ ID NO: 2906 - DNA, 20 bp, synthetic construct
  misc_feature 1..20: note = chemically synthesized
  source 1..20: mol_type = other DNA
gtcacatgtgatggtggggc

SEQ ID NO: 2907 - DNA, 20 bp, synthetic construct
  misc_feature 1..20: note = chemically synthesized
  source 1..20: mol_type = other DNA
tcacatgtgatggtggggct

SEQ ID NO: 2908 - DNA, 20 bp, synthetic construct
  misc_feature 1..20: note = chemically synthesized
  source 1..20: mol_type = other DNA
cacatgtgatggtggggcta

SEQ ID NO: 2909 - DNA, 20 bp, synthetic construct
  misc_feature 1..20: note = chemically synthesized
  source 1..20: mol_type = other DNA
gtgatggtggggctagggta

SEQ ID NO: 2910 - DNA, 20 bp, synthetic construct
  misc_feature 1..20: note = chemically synthesized
  source 1..20: mol_type = other DNA
tgatggtggggctagggtac

SEQ ID NO: 2911 - DNA, 20 bp, synthetic construct
  misc_feature 1..20: note = chemically synthesized
  source 1..20: mol_type = other DNA
gtggggctagggtacaggct

SEQ ID NO: 2912 - DNA, 20 bp, synthetic construct
  misc_feature 1..20: note = chemically synthesized
  source 1..20: mol_type = other DNA
ggggctagggtacaggctta

SEQ ID NO: 2913 - DNA, 20 bp, synthetic construct
  misc_feature 1..20: note = chemically synthesized
  source 1..20: mol_type = other DNA
caggcttagagatatttatc

SEQ ID NO: 2914 - DNA, 20 bp, synthetic construct
  misc_feature 1..20: note = chemically synthesized
  source 1..20: mol_type = other DNA
aggcttagagatatttatct

SEQ ID NO: 2915 - DNA, 20 bp, synthetic construct
  misc_feature 1..20: note = chemically synthesized
  source 1..20: mol_type = other DNA
agagatatttatctgggaac

SEQ ID NO: 2916 - DNA, 20 bp, synthetic construct
  misc_feature 1..20: note = chemically synthesized
  source 1..20: mol_type = other DNA
gaacaagtttattaacacta

SEQ ID NO: 2917 - DNA, 20 bp, synthetic construct
  misc_feature 1..20: note = chemically synthesized
  source 1..20: mol_type = other DNA
actaaagttccacttatctg

SEQ ID NO: 2918 - DNA, 20 bp, synthetic construct
  misc_feature 1..20: note = chemically synthesized
  source 1..20: mol_type = other DNA
aaagttccacttatctgcag

SEQ ID NO: 2919 - DNA, 20 bp, synthetic construct
  misc_feature 1..20: note = chemically synthesized
  source 1..20: mol_type = other DNA
agttccacttatctgcagca

SEQ ID NO: 2920 - DNA, 20 bp, synthetic construct
  misc_feature 1..20: note = chemically synthesized
  source 1..20: mol_type = other DNA
acttatctgcagcagagcct

SEQ ID NO: 2921 - DNA, 20 bp, synthetic construct
  misc_feature 1..20: note = chemically synthesized
  source 1..20: mol_type = other DNA
cttatctgcagcagagcctt

SEQ ID NO: 2922 - DNA, 20 bp, synthetic construct
  misc_feature 1..20: note = chemically synthesized
  source 1..20: mol_type = other DNA
agagccttaggtattaacgt

SEQ ID NO: 2923 - DNA, 20 bp, synthetic construct
  misc_feature 1..20: note = chemically synthesized
  source 1..20: mol_type = other DNA
agccttaggtattaacgttg

SEQ ID NO: 2924 - DNA, 20 bp, synthetic construct
  misc_feature 1..20: note = chemically synthesized
  source 1..20: mol_type = other DNA
gccttaggtattaacgttgg

SEQ ID NO: 2925 - DNA, 20 bp, synthetic construct
  misc_feature 1..20: note = chemically synthesized
  source 1..20: mol_type = other DNA
taggtattaacgttggaggc

SEQ ID NO: 2926 - DNA, 20 bp, synthetic construct
  misc_feature 1..20: note = chemically synthesized
  source 1..20: mol_type = other DNA
ttaacgttggaggccagaaa

SEQ ID NO: 2927 - DNA, 20 bp, synthetic construct
  misc_feature 1..20: note = chemically synthesized
  source 1..20: mol_type = other DNA
tggaggccagaaatggaatt

SEQ ID NO: 2928 - DNA, 20 bp, synthetic construct
  misc_feature 1..20: note = chemically synthesized
  source 1..20: mol_type = other DNA
ggaggccagaaatggaattc

SEQ ID NO: 2929 - DNA, 20 bp, synthetic construct
  misc_feature 1..20: note = chemically synthesized
  source 1..20: mol_type = other DNA
gccagaaatggaattcagga

SEQ ID NO: 2930 - DNA, 20 bp, synthetic construct
  misc_feature 1..20: note = chemically synthesized
  source 1..20: mol_type = other DNA
ccagaaatggaattcaggat

SEQ ID NO: 2931 - DNA, 20 bp, synthetic construct
  misc_feature 1..20: note = chemically synthesized
  source 1..20: mol_type = other DNA
cagaaatggaattcaggatg

SEQ ID NO: 2932 - DNA, 20 bp, synthetic construct
  misc_feature 1..20: note = chemically synthesized
  source 1..20: mol_type = other DNA
atggaattcaggatggggct

SEQ ID NO: 2933 - DNA, 20 bp, synthetic construct
  misc_feature 1..20: note = chemically synthesized
  source 1..20: mol_type = other DNA
tcaggatggggctcagaaat

SEQ ID NO: 2934 - DNA, 20 bp, synthetic construct
  misc_feature 1..20: note = chemically synthesized
  source 1..20: mol_type = other DNA
tcagaaataagaatgtgacc

SEQ ID NO: 2935 - DNA, 20 bp, synthetic construct
  misc_feature 1..20: note = chemically synthesized
  source 1..20: mol_type = other DNA
cagaaataagaatgtgacca

SEQ ID NO: 2936 - DNA, 20 bp, synthetic construct
  misc_feature 1..20: note = chemically synthesized
  source 1..20: mol_type = other DNA
ctgaactcttcttcccgtgt

SEQ ID NO: 2937 - DNA, 20 bp, synthetic construct
  misc_feature 1..20: note = chemically synthesized
  source 1..20: mol_type = other DNA
tgaactcttcttcccgtgtt

SEQ ID NO: 2938 - DNA, 20 bp, synthetic construct
  misc_feature 1..20: note = chemically synthesized
  source 1..20: mol_type = other DNA
ctcttcttcccgtgttgggc

SEQ ID NO: 2939 - DNA, 20 bp, synthetic construct
  misc_feature 1..20: note = chemically synthesized
  source 1..20: mol_type = other DNA
tcttcttcccgtgttgggcc

SEQ ID NO: 2940 - DNA, 20 bp, synthetic construct
  misc_feature 1..20: note = chemically synthesized
  source 1..20: mol_type = other DNA
cttcttcccgtgttgggcca

SEQ ID NO: 2941 - DNA, 20 bp, synthetic construct
  misc_feature 1..20: note = chemically synthesized
  source 1..20: mol_type = other DNA
gttgggccagggctcttcgt

SEQ ID NO: 2942 - DNA, 20 bp, synthetic construct
  misc_feature 1..20: note = chemically synthesized
  source 1..20: mol_type = other DNA
ttgggccagggctcttcgtt

SEQ ID NO: 2943 - DNA, 20 bp, synthetic construct
  misc_feature 1..20: note = chemically synthesized
  source 1..20: mol_type = other DNA
ggctcttcgttaggcataat

SEQ ID NO: 2944 - DNA, 20 bp, synthetic construct
  misc_feature 1..20: note = chemically synthesized
  source 1..20: mol_type = other DNA
tcttcgttaggcataatcag

SEQ ID NO: 2945 - DNA, 20 bp, synthetic construct
  misc_feature 1..20: note = chemically synthesized
  source 1..20: mol_type = other DNA
cttcgttaggcataatcagt

SEQ ID NO: 2946 - DNA, 20 bp, synthetic construct
  misc_feature 1..20: note = chemically synthesized
  source 1..20: mol_type = other DNA
gttaggcataatcagtggga

SEQ ID NO: 2947 - DNA, 20 bp, synthetic construct
  misc_feature 1..20: note = chemically synthesized
  source 1..20: mol_type = other DNA
aaaaatgccctgatttttac

SEQ ID NO: 2948 - DNA, 20 bp, synthetic construct
  misc_feature 1..20: note = chemically synthesized
  source 1..20: mol_type = other DNA
actcctaccatgatcaattt

SEQ ID NO: 2949 - DNA, 20 bp, synthetic construct
  misc_feature 1..20: note = chemically synthesized
  source 1..20: mol_type = other DNA
tgatcaatttcagactacca

SEQ ID NO: 2950 - DNA, 20 bp, synthetic construct
  misc_feature 1..20: note = chemically synthesized
  source 1..20: mol_type = other DNA
atcaatttcagactaccaaa

SEQ ID NO: 2951 - DNA, 20 bp, synthetic construct
  misc_feature 1..20: note = chemically synthesized
  source 1..20: mol_type = other DNA
caaagagatgctattaaatg

SEQ ID NO: 2952 - DNA, 20 bp, synthetic construct
  misc_feature 1..20: note = chemically synthesized
  source 1..20: mol_type = other DNA
aagagatgctattaaatgca

SEQ ID NO: 2953 - DNA, 20 bp, synthetic construct
  misc_feature 1..20: note = chemically synthesized
  source 1..20: mol_type = other DNA
atgctattaaatgcagagct

SEQ ID NO: 2954 - DNA, 20 bp, synthetic construct
  misc_feature 1..20: note = chemically synthesized
  source 1..20: mol_type = other DNA
attaaatgcagagctgagat

SEQ ID NO: 2955 - DNA, 20 bp, synthetic construct
  misc_feature 1..20: note = chemically synthesized
  source 1..20: mol_type = other DNA
agagctgagatgagcataat

SEQ ID NO: 2956 - DNA, 20 bp, synthetic construct
  misc_feature 1..20: note = chemically synthesized
  source 1..20: mol_type = other DNA
tgagcataatcagctttcct

SEQ ID NO: 2957 - DNA, 20 bp, synthetic construct
  misc_feature 1..20: note = chemically synthesized
  source 1..20: mol_type = other DNA
cataatcagctttcctaagc

SEQ ID NO: 2958 - DNA, 20 bp, synthetic construct
  misc_feature 1..20: note = chemically synthesized
  source 1..20: mol_type = other DNA
cagctttcctaagctggtgc

SEQ ID NO: 2959 - DNA, 20 bp, synthetic construct
  misc_feature 1..20: note = chemically synthesized
  source 1..20: mol_type = other DNA
tttcctaagctggtgcaagc

SEQ ID NO: 2960 - DNA, 20 bp, synthetic construct
  misc_feature 1..20: note = chemically synthesized
  source 1..20: mol_type = other DNA
aagccagcacattataccat

SEQ ID NO: 2961 - DNA, 20 bp, synthetic construct
  misc_feature 1..20: note = chemically synthesized
  source 1..20: mol_type = other DNA
agccagcacattataccatt

SEQ ID NO: 2962 - DNA, 20 bp, synthetic construct
  misc_feature 1..20: note = chemically synthesized
  source 1..20: mol_type = other DNA
tataccattaggcataacta

SEQ ID NO: 2963 - DNA, 20 bp, synthetic construct
  misc_feature 1..20: note = chemically synthesized
  source 1..20: mol_type = other DNA
ggcataactatagttgatcc

SEQ ID NO: 2964 - DNA, 20 bp, synthetic construct
  misc_feature 1..20: note = chemically synthesized
  source 1..20: mol_type = other DNA
ctatagttgatcctagacct

SEQ ID NO: 2965 - DNA, 20 bp, synthetic construct
  misc_feature 1..20: note = chemically synthesized
  source 1..20: mol_type = other DNA
ctagacctcagatacttacc

SEQ ID NO: 2966 - DNA, 20 bp, synthetic construct
  misc_feature 1..20: note = chemically synthesized
  source 1..20: mol_type = other DNA
tagacctcagatacttacct

SEQ ID NO: 2967 - DNA, 20 bp, synthetic construct
  misc_feature 1..20: note = chemically synthesized
  source 1..20: mol_type = other DNA
acctcagatacttacctagg

SEQ ID NO: 2968 - DNA, 20 bp, synthetic construct
  misc_feature 1..20: note = chemically synthesized
  source 1..20: mol_type = other DNA
atacttacctaggtggaact

SEQ ID NO: 2969 - DNA, 20 bp, synthetic construct
  misc_feature 1..20: note = chemically synthesized
  source 1..20: mol_type = other DNA
acttacctaggtggaactga

SEQ ID NO: 2970 - DNA, 20 bp, synthetic construct
  misc_feature 1..20: note = chemically synthesized
  source 1..20: mol_type = other DNA
tgttactgtttactttcaac

SEQ ID NO: 2971 - DNA, 20 bp, synthetic construct
  misc_feature 1..20: note = chemically synthesized
  source 1..20: mol_type = other DNA
gttactgtttactttcaact

SEQ ID NO: 2972 - DNA, 20 bp, synthetic construct
  misc_feature 1..20: note = chemically synthesized
  source 1..20: mol_type = other DNA
gtttactttcaactgggctg

SEQ ID NO: 2973 - DNA, 20 bp, synthetic construct
  misc_feature 1..20: note = chemically synthesized
  source 1..20: mol_type = other DNA
tttcaactgggctgtggaca

SEQ ID NO: 2974 - DNA, 20 bp, synthetic construct
  misc_feature 1..20: note = chemically synthesized
  source 1..20: mol_type = other DNA
tacctccctgtatatgtgct

SEQ ID NO: 2975 - DNA, 20 bp, synthetic construct
  misc_feature 1..20: note = chemically synthesized
  source 1..20: mol_type = other DNA
tgtatatgtgcttagttgac

SEQ ID NO: 2976 - DNA, 20 bp, synthetic construct
  misc_feature 1..20: note = chemically synthesized
  source 1..20: mol_type = other DNA
tatatgtgcttagttgactg

SEQ ID NO: 2977 - DNA, 20 bp, synthetic construct
  misc_feature 1..20: note = chemically synthesized
  source 1..20: mol_type = other DNA
atatgtgcttagttgactgg

SEQ ID NO: 2978 - DNA, 20 bp, synthetic construct
  misc_feature 1..20: note = chemically synthesized
  source 1..20: mol_type = other DNA
gcttagttgactggaggaca

SEQ ID NO: 2979 - DNA, 20 bp, synthetic construct
  misc_feature 1..20: note = chemically synthesized
  source 1..20: mol_type = other DNA
ttagttgactggaggacata

SEQ ID NO: 2980 - DNA, 20 bp, synthetic construct
  misc_feature 1..20: note = chemically synthesized
  source 1..20: mol_type = other DNA
ttgactggaggacatagaga

SEQ ID NO: 2981 - DNA, 20 bp, synthetic construct
  misc_feature 1..20: note = chemically synthesized
  source 1..20: mol_type = other DNA
gacatagagacagaatgatt

SEQ ID NO: 2982 - DNA, 20 bp, synthetic construct
  misc_feature 1..20: note = chemically synthesized
  source 1..20: mol_type = other DNA
agaatgattcagtatccctc

SEQ ID NO: 2983 - DNA, 20 bp, synthetic construct
  misc_feature 1..20: note = chemically synthesized
  source 1..20: mol_type = other DNA
atgattcagtatccctcaag

SEQ ID NO: 2984 - DNA, 20 bp, synthetic construct
  misc_feature 1..20: note = chemically synthesized
  source 1..20: mol_type = other DNA
ccctcaagaagcaattaacc

SEQ ID NO: 2985 - DNA, 20 bp, synthetic construct
  misc_feature 1..20: note = chemically synthesized
  source 1..20: mol_type = other DNA
taaccaagaataattattcc

SEQ ID NO: 2986 - DNA, 20 bp, synthetic construct
  misc_feature 1..20: note = chemically synthesized
  source 1..20: mol_type = other DNA
ataattattcccagaaactt

SEQ ID NO: 2987 - DNA, 20 bp, synthetic construct
  misc_feature 1..20: note = chemically synthesized
  source 1..20: mol_type = other DNA
taattattcccagaaacttc

SEQ ID NO: 2988 - DNA, 20 bp, synthetic construct
  misc_feature 1..20: note = chemically synthesized
  source 1..20: mol_type = other DNA
cccagaaacttcgggtgtat

SEQ ID NO: 2989 - DNA, 20 bp, synthetic construct
  misc_feature 1..20: note = chemically synthesized
  source 1..20: mol_type = other DNA
cagaaacttcgggtgtatta

SEQ ID NO: 2990 - DNA, 20 bp, synthetic construct
  misc_feature 1..20: note = chemically synthesized
  source 1..20: mol_type = other DNA
gaaacttcgggtgtattaga

SEQ ID NO: 2991 - DNA, 20 bp, synthetic construct
  misc_feature 1..20: note = chemically synthesized
  source 1..20: mol_type = other DNA
cttcgggtgtattagagaga

SEQ ID NO: 2992 - DNA, 20 bp, synthetic construct
  misc_feature 1..20: note = chemically synthesized
  source 1..20: mol_type = other DNA
ttcgggtgtattagagagaa

SEQ ID NO: 2993 - DNA, 20 bp, synthetic construct
  misc_feature 1..20: note = chemically synthesized
  source 1..20: mol_type = other DNA
tcgggtgtattagagagaaa

SEQ ID NO: 2994 - DNA, 20 bp, synthetic construct
  misc_feature 1..20: note = chemically synthesized
  source 1..20: mol_type = other DNA
cgggtgtattagagagaaag

SEQ ID NO: 2995 - DNA, 20 bp, synthetic construct
  misc_feature 1..20: note = chemically synthesized
  source 1..20: mol_type = other DNA
gggtgtattagagagaaagg

SEQ ID NO: 2996 - DNA, 20 bp, synthetic construct
  misc_feature 1..20: note = chemically synthesized
  source 1..20: mol_type = other DNA
ggtgtattagagagaaaggg

SEQ ID NO: 2997 - DNA, 20 bp, synthetic construct
  misc_feature 1..20: note = chemically synthesized
  source 1..20: mol_type = other DNA
attagagagaaaggggggaa

SEQ ID NO: 2998 - DNA, 20 bp, synthetic construct
  misc_feature 1..20: note = chemically synthesized
  source 1..20: mol_type = other DNA
gaaaggggggaatagttcct

SEQ ID NO: 2999 - DNA, 20 bp, synthetic construct
  misc_feature 1..20: note = chemically synthesized
  source 1..20: mol_type = other DNA
aggggggaatagttcctgag

SEQ ID NO: 3000 - DNA, 20 bp, synthetic construct
  misc_feature 1..20: note = chemically synthesized
  source 1..20: mol_type = other DNA
atagttcctgagaagcatgc

SEQ ID NO: 3001 - DNA, 20 bp, synthetic construct
  misc_feature 1..20: note = chemically synthesized
  source 1..20: mol_type = other DNA
agttcctgagaagcatgctg

SEQ ID NO: 3002 - DNA, 20 bp, synthetic construct
  misc_feature 1..20: note = chemically synthesized
  source 1..20: mol_type = other DNA
ttcctgagaagcatgctgga

SEQ ID NO: 3003 - DNA, 20 bp, synthetic construct
  misc_feature 1..20: note = chemically synthesized
  source 1..20: mol_type = other DNA
cctgagaagcatgctggaga

SEQ ID NO: 3004 - DNA, 20 bp, synthetic construct
  misc_feature 1..20: note = chemically synthesized
  source 1..20: mol_type = other DNA
atgctggagagagtatacat

SEQ ID NO: 3005 - DNA, 20 bp, synthetic construct
  misc_feature 1..20: note = chemically synthesized
  source 1..20: mol_type = other DNA
aaacccaaataaacataaaa

SEQ ID NO: 3006 - DNA, 20 bp, synthetic construct
  misc_feature 1..20: note = chemically synthesized
  source 1..20: mol_type = other DNA
attaattataatttaaatat

SEQ ID NO: 3007 - DNA, 20 bp, synthetic construct
  misc_feature 1..20: note = chemically synthesized
  source 1..20: mol_type = other DNA
ataatttaaatataagacat

SEQ ID NO: 3008 - DNA, 20 bp, synthetic construct
  misc_feature 1..20: note = chemically synthesized
  source 1..20: mol_type = other DNA
tcatttacaaaacttttatg

SEQ ID NO: 3009 - DNA, 20 bp, synthetic construct
  misc_feature 1..20: note = chemically synthesized
  source 1..20: mol_type = other DNA
ttacaaaacttttatgtagt

SEQ ID NO: 3010 - DNA, 20 bp, synthetic construct
  misc_feature 1..20: note = chemically synthesized
  source 1..20: mol_type = other DNA
tacaaaacttttatgtagtc

SEQ ID NO: 3011 - DNA, 20 bp, synthetic construct
  misc_feature 1..20: note = chemically synthesized
  source 1..20: mol_type = other DNA
attatatacttttcattctt

SEQ ID NO: 3012 - DNA, 20 bp, synthetic construct
  misc_feature 1..20: note = chemically synthesized
  source 1..20: mol_type = other DNA
atatacttttcattcttaag

SEQ ID NO: 3013 - DNA, 20 bp, synthetic construct
  misc_feature 1..20: note = chemically synthesized
  source 1..20: mol_type = other DNA
aagaagctattccatataca

SEQ ID NO: 3014 - DNA, 20 bp, synthetic construct
  misc_feature 1..20: note = chemically synthesized
  source 1..20: mol_type = other DNA
tattccatatacaaagtaaa

SEQ ID NO: 3015 - DNA, 20 bp, synthetic construct
  misc_feature 1..20: note = chemically synthesized
  source 1..20: mol_type = other DNA
tccatatacaaagtaaaaag

SEQ ID NO: 3016 - DNA, 20 bp, synthetic construct
  misc_feature 1..20: note = chemically synthesized
  source 1..20: mol_type = other DNA
catatacaaagtaaaaagtg

SEQ ID NO: 3017 - DNA, 20 bp, synthetic construct
  misc_feature 1..20: note = chemically synthesized
  source 1..20: mol_type = other DNA
tatacaaagtaaaaagtgga

SEQ ID NO: 3018 - DNA, 20 bp, synthetic construct
  misc_feature 1..20: note = chemically synthesized
  source 1..20: mol_type = other DNA
aagtaaaaagtggagagatg

SEQ ID NO: 3019 - DNA, 20 bp, synthetic construct
  misc_feature 1..20: note = chemically synthesized
  source 1..20: mol_type = other DNA
gtaaaaagtggagagatgca

SEQ ID NO: 3020 - DNA, 20 bp, synthetic construct
  misc_feature 1..20: note = chemically synthesized
  source 1..20: mol_type = other DNA
aaagtggagagatgcagagt

SEQ ID NO: 3021 - DNA, 20 bp, synthetic construct
  misc_feature 1..20: note = chemically synthesized
  source 1..20: mol_type = other DNA
gagagatgcagagttggatc

SEQ ID NO: 3022 - DNA, 20 bp, synthetic construct
  misc_feature 1..20: note = chemically synthesized
  source 1..20: mol_type = other DNA
gagatgcagagttggatcta

SEQ ID NO: 3023 - DNA, 20 bp, synthetic construct
  misc_feature 1..20: note = chemically synthesized
  source 1..20: mol_type = other DNA
tgcagagttggatctagagc

SEQ ID NO: 3024 - DNA, 20 bp, synthetic construct
  misc_feature 1..20: note = chemically synthesized
  source 1..20: mol_type = other DNA
cagagttggatctagagcta

SEQ ID NO: 3025 - DNA, 20 bp, synthetic construct
  misc_feature 1..20: note = chemically synthesized
  source 1..20: mol_type = other DNA
gttggatctagagctagaga

SEQ ID NO: 3026 - DNA, 20 bp, synthetic construct
  misc_feature 1..20: note = chemically synthesized
  source 1..20: mol_type = other DNA
tagagctagagacggaactg

SEQ ID NO: 3027 - DNA, 20 bp, synthetic construct
  misc_feature 1..20: note = chemically synthesized
  source 1..20: mol_type = other DNA
gctagagacggaactgcaga

SEQ ID NO: 3028 - DNA, 20 bp, synthetic construct
  misc_feature 1..20: note = chemically synthesized
  source 1..20: mol_type = other DNA
ctagagacggaactgcagat

SEQ ID NO: 3029 - DNA, 20 bp, synthetic construct
  misc_feature 1..20: note = chemically synthesized
  source 1..20: mol_type = other DNA
tagagacggaactgcagata

SEQ ID NO: 3030 - DNA, 20 bp, synthetic construct
  misc_feature 1..20: note = chemically synthesized
  source 1..20: mol_type = other DNA
gacggaactgcagataggga

SEQ ID NO: 3031 - DNA, 20 bp, synthetic construct
  misc_feature 1..20: note = chemically synthesized
  source 1..20: mol_type = other DNA
ggaactgcagatagggatag

SEQ ID NO: 3032 - DNA, 20 bp, synthetic construct
  misc_feature 1..20: note = chemically synthesized
  source 1..20: mol_type = other DNA
tgcagatagggatagtggtg

SEQ ID NO: 3033 - DNA, 20 bp, synthetic construct
  misc_feature 1..20: note = chemically synthesized
  source 1..20: mol_type = other DNA
gatagggatagtggtgtaga

SEQ ID NO: 3034 - DNA, 20 bp, synthetic construct
  misc_feature 1..20: note = chemically synthesized
  source 1..20: mol_type = other DNA
tagtggtgtagatagtaata

SEQ ID NO: 3035 - DNA, 20 bp, synthetic construct
  misc_feature 1..20: note = chemically synthesized
  source 1..20: mol_type = other DNA
agtggtgtagatagtaataa

SEQ ID NO: 3036 - DNA, 20 bp, synthetic construct
  misc_feature 1..20: note = chemically synthesized
  source 1..20: mol_type = other DNA
gtggtgtagatagtaataaa

SEQ ID NO: 3037 - DNA, 20 bp, synthetic construct
  misc_feature 1..20: note = chemically synthesized
  source 1..20: mol_type = other DNA
tggtgtagatagtaataaag

SEQ ID NO: 3038 - DNA, 20 bp, synthetic construct
  misc_feature 1..20: note = chemically synthesized
  source 1..20: mol_type = other DNA
ggtgtagatagtaataaagg

SEQ ID NO: 3039 - DNA, 20 bp, synthetic construct
  misc_feature 1..20: note = chemically synthesized
  source 1..20: mol_type = other DNA
tagatagtaataaaggggga

SEQ ID NO: 3040 - DNA, 20 bp, synthetic construct
  misc_feature 1..20: note = chemically synthesized
  source 1..20: mol_type = other DNA
gatagtaataaagggggata

SEQ ID NO: 3041 - DNA, 20 bp, synthetic construct
  misc_feature 1..20: note = chemically synthesized
  source 1..20: mol_type = other DNA
gtaataaagggggatagaga

SEQ ID NO: 3042 - DNA, 20 bp, synthetic construct
  misc_feature 1..20: note = chemically synthesized
  source 1..20: mol_type = other DNA
tagagacagtaatcatgata

SEQ ID NO: 3043 - DNA, 20 bp, synthetic construct
  misc_feature 1..20: note = chemically synthesized
  source 1..20: mol_type = other DNA
gacagtaatcatgataaaga

SEQ ID NO: 3044 - DNA, 20 bp, synthetic construct
  misc_feature 1..20: note = chemically synthesized
  source 1..20: mol_type = other DNA
acagtaatcatgataaagac

SEQ ID NO: 3045 - DNA, 20 bp, synthetic construct
  misc_feature 1..20: note = chemically synthesized
  source 1..20: mol_type = other DNA
atgataaagacaggtaataa

SEQ ID NO: 3046 - DNA, 20 bp, synthetic construct
  misc_feature 1..20: note = chemically synthesized
  source 1..20: mol_type = other DNA
aagacaggtaataatagtgt

SEQ ID NO: 3047 - DNA, 20 bp, synthetic construct
  misc_feature 1..20: note = chemically synthesized
  source 1..20: mol_type = other DNA
gacaggtaataatagtgtta

SEQ ID NO: 3048 - DNA, 20 bp, synthetic construct
  misc_feature 1..20: note = chemically synthesized
  source 1..20: mol_type = other DNA
gattccacctgaaatttgtt

SEQ ID NO: 3049 - DNA, 20 bp, synthetic construct
  misc_feature 1..20: note = chemically synthesized
  source 1..20: mol_type = other DNA
attccacctgaaatttgttt

SEQ ID NO: 3050 - DNA, 20 bp, synthetic construct
  misc_feature 1..20: note = chemically synthesized
  source 1..20: mol_type = other DNA
ttccacctgaaatttgtttg

SEQ ID NO: 3051 - DNA, 20 bp, synthetic construct
  misc_feature 1..20: note = chemically synthesized
  source 1..20: mol_type = other DNA
tccacctgaaatttgtttgg

SEQ ID NO: 3052 - DNA, 20 bp, synthetic construct
  misc_feature 1..20: note = chemically synthesized
  source 1..20: mol_type = other DNA
tgaaatttgtttgggggact

SEQ ID NO: 3053 - DNA, 20 bp, synthetic construct
  misc_feature 1..20: note = chemically synthesized
  source 1..20: mol_type = other DNA
gaaatttgtttgggggactt

SEQ ID NO: 3054 - DNA, 20 bp, synthetic construct
  misc_feature 1..20: note = chemically synthesized
  source 1..20: mol_type = other DNA
gtttgggggacttgggtaat

SEQ ID NO: 3055 - DNA, 20 bp, synthetic construct
  misc_feature 1..20: note = chemically synthesized
  source 1..20: mol_type = other DNA
gggtaattagaattttactt

SEQ ID NO: 3056 - DNA, 20 bp, synthetic construct
  misc_feature 1..20: note = chemically synthesized
  source 1..20: mol_type = other DNA
taaacaatttttctaatacc

SEQ ID NO: 3057 - DNA, 20 bp, synthetic construct
  misc_feature 1..20: note = chemically synthesized
  source 1..20: mol_type = other DNA
atttttctaataccaagtat

SEQ ID NO: 3058 - DNA, 20 bp, synthetic construct
  misc_feature 1..20: note = chemically synthesized
  source 1..20: mol_type = other DNA
ctaataccaagtataagatc

SEQ ID NO: 3059 - DNA, 20 bp, synthetic construct
  misc_feature 1..20: note = chemically synthesized
  source 1..20: mol_type = other DNA
taataccaagtataagatca

SEQ ID NO: 3060 - DNA, 20 bp, synthetic construct
  misc_feature 1..20: note = chemically synthesized
  source 1..20: mol_type = other DNA
aataccaagtataagatcaa

SEQ ID NO: 3061 - DNA, 20 bp, synthetic construct
  misc_feature 1..20: note = chemically synthesized
  source 1..20: mol_type = other DNA
ccaagtataagatcaagggt

SEQ ID NO: 3062 - DNA, 20 bp, synthetic construct
  misc_feature 1..20: note = chemically synthesized
  source 1..20: mol_type = other DNA
aagatcaagggttggtctcc

SEQ ID NO: 3063 - DNA, 20 bp, synthetic construct
  misc_feature 1..20: note = chemically synthesized
  source 1..20: mol_type = other DNA
ggttggtctccaagcatgat

SEQ ID NO: 3064 - DNA, 20 bp, synthetic construct
  misc_feature 1..20: note = chemically synthesized
  source 1..20: mol_type = other DNA
gttggtctccaagcatgatg

SEQ ID NO: 3065 - DNA, 20 bp, synthetic construct
  misc_feature 1..20: note = chemically synthesized
  source 1..20: mol_type = other DNA
ttggtctccaagcatgatga

SEQ ID NO: 3066 - DNA, 20 bp, synthetic construct
  misc_feature 1..20: note = chemically synthesized
  source 1..20: mol_type = other DNA
tttatatttttatataaata

SEQ ID NO: 3067 - DNA, 20 bp, synthetic construct
  misc_feature 1..20: note = chemically synthesized
  source 1..20: mol_type = other DNA
tataaatatggatctaattc

SEQ ID NO: 3068 - DNA, 20 bp, synthetic construct
  misc_feature 1..20: note = chemically synthesized
  source 1..20: mol_type = other DNA
tatacaacttcatattcaat

SEQ ID NO: 3069 - DNA, 20 bp, synthetic construct
  misc_feature 1..20: note = chemically synthesized
  source 1..20: mol_type = other DNA
aacttcatattcaattggtc

SEQ ID NO: 3070 - DNA, 20 bp, synthetic construct
  misc_feature 1..20: note = chemically synthesized
  source 1..20: mol_type = other DNA
aactttgtattctttcaaat

SEQ ID NO: 3071 - DNA, 20 bp, synthetic construct
  misc_feature 1..20: note = chemically synthesized
  source 1..20: mol_type = other DNA
actttgtattctttcaaata

SEQ ID NO: 3072 - DNA, 20 bp, synthetic construct
  misc_feature 1..20: note = chemically synthesized
  source 1..20: mol_type = other DNA
ttctttcaaataaggattaa

SEQ ID NO: 3073 - DNA, 20 bp, synthetic construct
  misc_feature 1..20: note = chemically synthesized
  source 1..20: mol_type = other DNA
ttcaaataaggattaaaagc

SEQ ID NO: 3074 - DNA, 20 bp, synthetic construct
  misc_feature 1..20: note = chemically synthesized
  source 1..20: mol_type = other DNA
taatgacctaaattgaacta

SEQ ID NO: 3075 - DNA, 20 bp, synthetic construct
  misc_feature 1..20: note = chemically synthesized
  source 1..20: mol_type = other DNA
aactaaagccataacaccct

SEQ ID NO: 3076 - DNA, 20 bp, synthetic construct
  misc_feature 1..20: note = chemically synthesized
  source 1..20: mol_type = other DNA
taaagccataacaccctcgg

SEQ ID NO: 3077 - DNA, 20 bp, synthetic construct
  misc_feature 1..20: note = chemically synthesized
  source 1..20: mol_type = other DNA
aaagccataacaccctcgga

SEQ ID NO: 3078 - DNA, 20 bp, synthetic construct
  misc_feature 1..20: note = chemically synthesized
  source 1..20: mol_type = other DNA
gccataacaccctcggaagg

SEQ ID NO: 3079 - DNA, 20 bp, synthetic construct
  misc_feature 1..20: note = chemically synthesized
  source 1..20: mol_type = other DNA
aacaccctcggaaggaagca

SEQ ID NO: 3080 - DNA, 20 bp, synthetic construct
  misc_feature 1..20: note = chemically synthesized
  source 1..20: mol_type = other DNA
acaccctcggaaggaagcat

SEQ ID NO: 3081 - DNA, 20 bp, synthetic construct
  misc_feature 1..20: note = chemically synthesized
  source 1..20: mol_type = other DNA
catgaactttgattttacaa

SEQ ID NO: 3082 - DNA, 20 bp, synthetic construct
  misc_feature 1..20: note = chemically synthesized
  source 1..20: mol_type = other DNA
ttgattttacaatagattct

SEQ ID NO: 3083 - DNA, 20 bp, synthetic construct
  misc_feature 1..20: note = chemically synthesized
  source 1..20: mol_type = other DNA
attcttagatatgacacaaa

SEQ ID NO: 3084 - DNA, 20 bp, synthetic construct
  misc_feature 1..20: note = chemically synthesized
  source 1..20: mol_type = other DNA
agatatgacacaaaaagtat

SEQ ID NO: 3085 - DNA, 20 bp, synthetic construct
  misc_feature 1..20: note = chemically synthesized
  source 1..20: mol_type = other DNA
caaaaaataaatacataaat

SEQ ID NO: 3086 - DNA, 20 bp, synthetic construct
  misc_feature 1..20: note = chemically synthesized
  source 1..20: mol_type = other DNA
taaattggatttcatttaaa

SEQ ID NO: 3087 - DNA, 20 bp, synthetic construct
  misc_feature 1..20: note = chemically synthesized
  source 1..20: mol_type = other DNA
ttcatgcaacaaacgacttt

SEQ ID NO: 3088 - DNA, 20 bp, synthetic construct
  misc_feature 1..20: note = chemically synthesized
  source 1..20: mol_type = other DNA
tgcaacaaacgactttaaga

SEQ ID NO: 3089 - DNA, 20 bp, synthetic construct
  misc_feature 1..20: note = chemically synthesized
  source 1..20: mol_type = other DNA
aacgactttaagaaagtaaa

SEQ ID NO: 3090 - DNA, 20 bp, synthetic construct
  misc_feature 1..20: note = chemically synthesized
  source 1..20: mol_type = other DNA
aaagtaaaaagacaacctat

SEQ ID NO: 3091 - DNA, 20 bp, synthetic construct
  misc_feature 1..20: note = chemically synthesized
  source 1..20: mol_type = other DNA
aaaaagacaacctataagat

SEQ ID NO: 3092 - DNA, 20 bp, synthetic construct
  misc_feature 1..20: note = chemically synthesized
  source 1..20: mol_type = other DNA
aaagacaacctataagatga

SEQ ID NO: 3093 - DNA, 20 bp, synthetic construct
  misc_feature 1..20: note = chemically synthesized
  source 1..20: mol_type = other DNA
ttgcaaattatgtatttcat

SEQ ID NO: 3094 - DNA, 20 bp, synthetic construct
  misc_feature 1..20: note = chemically synthesized
  source 1..20: mol_type = other DNA
tatttcataagtttaatatc

SEQ ID NO: 3095 - DNA, 20 bp, synthetic construct
  misc_feature 1..20: note = chemically synthesized
  source 1..20: mol_type = other DNA
aatatccagaatgtatgaaa

SEQ ID NO: 3096 - DNA, 20 bp, synthetic construct
  misc_feature 1..20: note = chemically synthesized
  source 1..20: mol_type = other DNA
tcctacaactcaaaaacaaa

SEQ ID NO: 3097 - DNA, 20 bp, synthetic construct
  misc_feature 1..20: note = chemically synthesized
  source 1..20: mol_type = other DNA
atttaaaaatatgcaaatga

SEQ ID NO: 3098 - DNA, 20 bp, synthetic construct
  misc_feature 1..20: note = chemically synthesized
  source 1..20: mol_type = other DNA
tttaaaaatatgcaaatgat

SEQ ID NO: 3099 - DNA, 20 bp, synthetic construct
  misc_feature 1..20: note = chemically synthesized
  source 1..20: mol_type = other DNA
aatatgcaaatgatgggaat

SEQ ID NO: 3100 - DNA, 20 bp, synthetic construct
  misc_feature 1..20: note = chemically synthesized
  source 1..20: mol_type = other DNA
tgatgggaatgagtaatttc

SEQ ID NO: 3101 - DNA, 20 bp, synthetic construct
  misc_feature 1..20: note = chemically synthesized
  source 1..20: mol_type = other DNA
gggaatgagtaatttctaga

SEQ ID NO: 3102 - DNA, 20 bp, synthetic construct
  misc_feature 1..20: note = chemically synthesized
  source 1..20: mol_type = other DNA
aatgagtaatttctagaaag

SEQ ID NO: 3103 - DNA, 20 bp, synthetic construct
  misc_feature 1..20: note = chemically synthesized
  source 1..20: mol_type = other DNA
gaagatatacaaatgaacat

SEQ ID NO: 3104 - DNA, 20 bp, synthetic construct
  misc_feature 1..20: note = chemically synthesized
  source 1..20: mol_type = other DNA
atgcaaaccaaaaccacaat

SEQ ID NO: 3105 - DNA, 20 bp, synthetic construct
  misc_feature 1..20: note = chemically synthesized
  source 1..20: mol_type = other DNA
agacactacttcaaacttac

SEQ ID NO: 3106 - DNA, 20 bp, synthetic construct
  misc_feature 1..20: note = chemically synthesized
  source 1..20: mol_type = other DNA
tactagaatgtctatacttt

SEQ ID NO: 3107 - DNA, 20 bp, synthetic construct
  misc_feature 1..20: note = chemically synthesized
  source 1..20: mol_type = other DNA
ctagaatgtctatactttaa

SEQ ID NO: 3108 - DNA, 20 bp, synthetic construct
  misc_feature 1..20: note = chemically synthesized
  source 1..20: mol_type = other DNA
agagaaacaaaacaaatgaa

SEQ ID NO: 3109 - DNA, 20 bp, synthetic construct
  misc_feature 1..20: note = chemically synthesized
  source 1..20: mol_type = other DNA
caaaacaaatgaaaagtaac

SEQ ID NO: 3110 - DNA, 20 bp, synthetic construct
  misc_feature 1..20: note = chemically synthesized
  source 1..20: mol_type = other DNA
aaaagtaacaagtgttgaca

SEQ ID NO: 3111 - DNA, 20 bp, synthetic construct
  misc_feature 1..20: note = chemically synthesized
  source 1..20: mol_type = other DNA
acaagtgttgacaaagatat

SEQ ID NO: 3112 - DNA, 20 bp, synthetic construct
  misc_feature 1..20: note = chemically synthesized
  source 1..20: mol_type = other DNA
tgacaaagatataagaaaat

SEQ ID NO: 3113 - DNA, 20 bp, synthetic construct
  misc_feature 1..20: note = chemically synthesized
  source 1..20: mol_type = other DNA
atattgctgctaaaaatgtt

SEQ ID NO: 3114 - DNA, 20 bp, synthetic construct
  misc_feature 1..20: note = chemically synthesized
  source 1..20: mol_type = other DNA
ttgctgctaaaaatgttaag

SEQ ID NO: 3115 - DNA, 20 bp, synthetic construct
  misc_feature 1..20: note = chemically synthesized
  source 1..20: mol_type = other DNA
gttaagtggtgcaacttctg

SEQ ID NO: 3116 - DNA, 20 bp, synthetic construct
  misc_feature 1..20: note = chemically synthesized
  source 1..20: mol_type = other DNA
ttctgtagaaaatattttga

SEQ ID NO: 3117 - DNA, 20 bp, synthetic construct
  misc_feature 1..20: note = chemically synthesized
  source 1..20: mol_type = other DNA
ttgacagttcttcaaaaact

SEQ ID NO: 3118 - DNA, 20 bp, synthetic construct
  misc_feature 1..20: note = chemically synthesized
  source 1..20: mol_type = other DNA
tgacagttcttcaaaaactt

SEQ ID NO: 3119 - DNA, 20 bp, synthetic construct
  misc_feature 1..20: note = chemically synthesized
  source 1..20: mol_type = other DNA
tgaccccaaaattcctctcc

SEQ ID NO: 3120 - DNA, 20 bp, synthetic construct
  misc_feature 1..20: note = chemically synthesized
  source 1..20: mol_type = other DNA
gaccccaaaattcctctcct

SEQ ID NO: 3121 - DNA, 20 bp, synthetic construct
  misc_feature 1..20: note = chemically synthesized
  source 1..20: mol_type = other DNA
atatattaaaaatatatata

SEQ ID NO: 3122 - DNA, 20 bp, synthetic construct
  misc_feature 1..20: note = chemically synthesized
  source 1..20: mol_type = other DNA
aatatatataaagatttaaa

SEQ ID NO: 3123 - DNA, 20 bp, synthetic construct
  misc_feature 1..20: note = chemically synthesized
  source 1..20: mol_type = other DNA
atatatataaagatttaaac

SEQ ID NO: 3124 - DNA, 20 bp, synthetic construct
  misc_feature 1..20: note = chemically synthesized
  source 1..20: mol_type = other DNA
ttgtactgaaatgttcattg

SEQ ID NO: 3125 - DNA, 20 bp, synthetic construct
  misc_feature 1..20: note = chemically synthesized
  source 1..20: mol_type = other DNA
cattgtagcattattcacaa

SEQ ID NO: 3126 - DNA, 20 bp, synthetic construct
  misc_feature 1..20: note = chemically synthesized
  source 1..20: mol_type = other DNA
gcattattcacaatagccaa

SEQ ID NO: 3127 - DNA, 20 bp, synthetic construct
  misc_feature 1..20: note = chemically synthesized
  source 1..20: mol_type = other DNA
cattattcacaatagccaaa

SEQ ID NO: 3128 - DNA, 20 bp, synthetic construct
  misc_feature 1..20: note = chemically synthesized
  source 1..20: mol_type = other DNA
tattcacaatagccaaaagg

SEQ ID NO: 3129 - DNA, 20 bp, synthetic construct
  misc_feature 1..20: note = chemically synthesized
  source 1..20: mol_type = other DNA
agccaaaaggtggaaacaac

SEQ ID NO: 3130 - DNA, 20 bp, synthetic construct
  misc_feature 1..20: note = chemically synthesized
  source 1..20: mol_type = other DNA
acaaccagaatgtacataaa

SEQ ID NO: 3131 - DNA, 20 bp, synthetic construct
  misc_feature 1..20: note = chemically synthesized
  source 1..20: mol_type = other DNA
aatgtgatatatacacacaa

SEQ ID NO: 3132 - DNA, 20 bp, synthetic construct
  misc_feature 1..20: note = chemically synthesized
  source 1..20: mol_type = other DNA
acacacaatggaatattatg

SEQ ID NO: 3133 - DNA, 20 bp, synthetic construct
  misc_feature 1..20: note = chemically synthesized
  source 1..20: mol_type = other DNA
aatattatgtagcaataaaa

SEQ ID NO: 3134 - DNA, 20 bp, synthetic construct
  misc_feature 1..20: note = chemically synthesized
  source 1..20: mol_type = other DNA
tgtagcaataaaaaagaatg

SEQ ID NO: 3135 - DNA, 20 bp, synthetic construct
  misc_feature 1..20: note = chemically synthesized
  source 1..20: mol_type = other DNA
caataaaaaagaatgaagta

SEQ ID NO: 3136 - DNA, 20 bp, synthetic construct
  misc_feature 1..20: note = chemically synthesized
  source 1..20: mol_type = other DNA
aaaagaatgaagtacagatg

SEQ ID NO: 3137 - DNA, 20 bp, synthetic construct
  misc_feature 1..20: note = chemically synthesized
  source 1..20: mol_type = other DNA
gaatgaagtacagatgcagt

SEQ ID NO: 3138 - DNA, 20 bp, synthetic construct
  misc_feature 1..20: note = chemically synthesized
  source 1..20: mol_type = other DNA
tccttatttaatgtcatgaa

SEQ ID NO: 3139 - DNA, 20 bp, synthetic construct
  misc_feature 1..20: note = chemically synthesized
  source 1..20: mol_type = other DNA
ccttatttaatgtcatgaat

SEQ ID NO: 3140 - DNA, 20 bp, synthetic construct
  misc_feature 1..20: note = chemically synthesized
  source 1..20: mol_type = other DNA
taatgtcatgaataggtttt

SEQ ID NO: 3141 - DNA, 20 bp, synthetic construct
  misc_feature 1..20: note = chemically synthesized
  source 1..20: mol_type = other DNA
catgaataggtttttggaaa

SEQ ID NO: 3142 - DNA, 20 bp, synthetic construct
  misc_feature 1..20: note = chemically synthesized
  source 1..20: mol_type = other DNA
tttttggaaatggcaacttt

SEQ ID NO: 3143 - DNA, 20 bp, synthetic construct
  misc_feature 1..20: note = chemically synthesized
  source 1..20: mol_type = other DNA
ttaagtgaaatgatgtaaaa

SEQ ID NO: 3144 - DNA, 20 bp, synthetic construct
  misc_feature 1..20: note = chemically synthesized
  source 1..20: mol_type = other DNA
atcctcaaataacactgttt

SEQ ID NO: 3145 - DNA, 20 bp, synthetic construct
  misc_feature 1..20: note = chemically synthesized
  source 1..20: mol_type = other DNA
actgttttagccaacactgt

SEQ ID NO: 3146 - DNA, 20 bp, synthetic construct
  misc_feature 1..20: note = chemically synthesized
  source 1..20: mol_type = other DNA
tttagccaacactgttagat

SEQ ID NO: 3147 - DNA, 20 bp, synthetic construct
  misc_feature 1..20: note = chemically synthesized
  source 1..20: mol_type = other DNA
ctgttagatgagaaaaaaaa

SEQ ID NO: 3148 - DNA, 20 bp, synthetic construct
  misc_feature 1..20: note = chemically synthesized
  source 1..20: mol_type = other DNA
ggatatcattatatgtcact

SEQ ID NO: 3149 - DNA, 20 bp, synthetic construct
  misc_feature 1..20: note = chemically synthesized
  source 1..20: mol_type = other DNA
attatatgtcacttggctta

SEQ ID NO: 3150 - DNA, 20 bp, synthetic construct
  misc_feature 1..20: note = chemically synthesized
  source 1..20: mol_type = other DNA
tgtcacttggcttaaagttt

SEQ ID NO: 3151 - DNA, 20 bp, synthetic construct
  misc_feature 1..20: note = chemically synthesized
  source 1..20: mol_type = other DNA
ggcttaaagtttcagtttcc

SEQ ID NO: 3152 - DNA, 20 bp, synthetic construct
  misc_feature 1..20: note = chemically synthesized
  source 1..20: mol_type = other DNA
agtttccaagaatctatgaa

SEQ ID NO: 3153 - DNA, 20 bp, synthetic construct
  misc_feature 1..20: note = chemically synthesized
  source 1..20: mol_type = other DNA
atctatgaatggacaacatt

SEQ ID NO: 3154 - DNA, 20 bp, synthetic construct
  misc_feature 1..20: note = chemically synthesized
  source 1..20: mol_type = other DNA
tgaatggacaacattaagca

SEQ ID NO: 3155 - DNA, 20 bp, synthetic construct
  misc_feature 1..20: note = chemically synthesized
  source 1..20: mol_type = other DNA
acttaccactatacatgtta

SEQ ID NO: 3156 - DNA, 20 bp, synthetic construct
  misc_feature 1..20: note = chemically synthesized
  source 1..20: mol_type = other DNA
ccactatacatgttatggca

SEQ ID NO: 3157 - DNA, 20 bp, synthetic construct
  misc_feature 1..20: note = chemically synthesized
  source 1..20: mol_type = other DNA
tatacatgttatggcatgga

SEQ ID NO: 3158 - DNA, 20 bp, synthetic construct
  misc_feature 1..20: note = chemically synthesized
  source 1..20: mol_type = other DNA
tggactttgaaaccttatgt

SEQ ID NO: 3159 - DNA, 20 bp, synthetic construct
  misc_feature 1..20: note = chemically synthesized
  source 1..20: mol_type = other DNA
ggactttgaaaccttatgtt

SEQ ID NO: 3160 - DNA, 20 bp, synthetic construct
  misc_feature 1..20: note = chemically synthesized
  source 1..20: mol_type = other DNA
aaccttatgttgggtaaaat

SEQ ID NO: 3161 - DNA, 20 bp, synthetic construct
  misc_feature 1..20: note = chemically synthesized
  source 1..20: mol_type = other DNA
ttatgttgggtaaaataagc

SEQ ID NO: 3162 - DNA, 20 bp, synthetic construct
  misc_feature 1..20: note = chemically synthesized
  source 1..20: mol_type = other DNA
tttatatgaattatctaaaa

SEQ ID NO: 3163 - DNA, 20 bp, synthetic construct
  misc_feature 1..20: note = chemically synthesized
  source 1..20: mol_type = other DNA
ttatctaaaatagactgatt

SEQ ID NO: 3164 - DNA, 20 bp, synthetic construct
  misc_feature 1..20: note = chemically synthesized
  source 1..20: mol_type = other DNA
atctaaaatagactgattta

SEQ ID NO: 3165 - DNA, 20 bp, synthetic construct
  misc_feature 1..20: note = chemically synthesized
  source 1..20: mol_type = other DNA
gactgatttagagaaacata

SEQ ID NO: 3166 - DNA, 20 bp, synthetic construct
  misc_feature 1..20: note = chemically synthesized
  source 1..20: mol_type = other DNA
tgatttagagaaacatatag

SEQ ID NO: 3167 - DNA, 20 bp, synthetic construct
  misc_feature 1..20: note = chemically synthesized
  source 1..20: mol_type = other DNA
tagagaaacatatagtagat

SEQ ID NO: 3168 - DNA, 20 bp, synthetic construct
  misc_feature 1..20: note = chemically synthesized
  source 1..20: mol_type = other DNA
gagaaacatatagtagatta

SEQ ID NO: 3169 - DNA, 20 bp, synthetic construct
  misc_feature 1..20: note = chemically synthesized
  source 1..20: mol_type = other DNA
agaaacatatagtagattag

SEQ ID NO: 3170 - DNA, 20 bp, synthetic construct
  misc_feature 1..20: note = chemically synthesized
  source 1..20: mol_type = other DNA
tagtagattagaggttacta

SEQ ID NO: 3171 - DNA, 20 bp, synthetic construct
  misc_feature 1..20: note = chemically synthesized
  source 1..20: mol_type = other DNA
agtagattagaggttactat

SEQ ID NO: 3172 - DNA, 20 bp, synthetic construct
  misc_feature 1..20: note = chemically synthesized
  source 1..20: mol_type = other DNA
attagaggttactatgggac

SEQ ID NO: 3173 - DNA, 20 bp, synthetic construct
  misc_feature 1..20: note = chemically synthesized
  source 1..20: mol_type = other DNA
ttagaggttactatgggact

SEQ ID NO: 3174 - DNA, 20 bp, synthetic construct
  misc_feature 1..20: note = chemically synthesized
  source 1..20: mol_type = other DNA
tagaggttactatgggactg

SEQ ID NO: 3175 - DNA, 20 bp, synthetic construct
  misc_feature 1..20: note = chemically synthesized
  source 1..20: mol_type = other DNA
gaggttactatgggactggg

SEQ ID NO: 3176 - DNA, 20 bp, synthetic construct
  misc_feature 1..20: note = chemically synthesized
  source 1..20: mol_type = other DNA
ctggggagttactgcctaac

SEQ ID NO: 3177 - DNA, 20 bp, synthetic construct
  misc_feature 1..20: note = chemically synthesized
  source 1..20: mol_type = other DNA
gagttactgcctaacaagta

SEQ ID NO: 3178 - DNA, 20 bp, synthetic construct
  misc_feature 1..20: note = chemically synthesized
  source 1..20: mol_type = other DNA
acaagtatagcatttctgct

SEQ ID NO: 3179 - DNA, 20 bp, synthetic construct
  misc_feature 1..20: note = chemically synthesized
  source 1..20: mol_type = other DNA
tttctgcttggatgatgaaa

SEQ ID NO: 3180 - DNA, 20 bp, synthetic construct
  misc_feature 1..20: note = chemically synthesized
  source 1..20: mol_type = other DNA
cttggatgatgaaaaagttt

SEQ ID NO: 3181 - DNA, 20 bp, synthetic construct
  misc_feature 1..20: note = chemically synthesized
  source 1..20: mol_type = other DNA
tgatgaaaaagttttggcat

SEQ ID NO: 3182 - DNA, 20 bp, synthetic construct
  misc_feature 1..20: note = chemically synthesized
  source 1..20: mol_type = other DNA
aaagttttggcatgagatca

SEQ ID NO: 3183 - DNA, 20 bp, synthetic construct
  misc_feature 1..20: note = chemically synthesized
  source 1..20: mol_type = other DNA
ttggcatgagatcatggtga

SEQ ID NO: 3184 - DNA, 20 bp, synthetic construct
  misc_feature 1..20: note = chemically synthesized
  source 1..20: mol_type = other DNA
gcatgagatcatggtgatag

SEQ ID NO: 3185 - DNA, 20 bp, synthetic construct
  misc_feature 1..20: note = chemically synthesized
  source 1..20: mol_type = other DNA
cacataattatacttaaaaa

SEQ ID NO: 3186 - DNA, 20 bp, synthetic construct
  misc_feature 1..20: note = chemically synthesized
  source 1..20: mol_type = other DNA
atacttaaaaatggttaata

SEQ ID NO: 3187 - DNA, 20 bp, synthetic construct
  misc_feature 1..20: note = chemically synthesized
  source 1..20: mol_type = other DNA
ttaaaaatggttaatatggt

SEQ ID NO: 3188 - DNA, 20 bp, synthetic construct
  misc_feature 1..20: note = chemically synthesized
  source 1..20: mol_type = other DNA
gctttattatatatgatata

SEQ ID NO: 3189 - DNA, 20 bp, synthetic construct
  misc_feature 1..20: note = chemically synthesized
  source 1..20: mol_type = other DNA
atgatatacggtattatatg

SEQ ID NO: 3190 - DNA, 20 bp, synthetic construct
  misc_feature 1..20: note = chemically synthesized
  source 1..20: mol_type = other DNA
aaactttatcacaataaaaa

SEQ ID NO: 3191 - DNA, 20 bp, synthetic construct
  misc_feature 1..20: note = chemically synthesized
  source 1..20: mol_type = other DNA
tttatcacaataaaaatgga

SEQ ID NO: 3192 - DNA, 20 bp, synthetic construct
  misc_feature 1..20: note = chemically synthesized
  source 1..20: mol_type = other DNA
aatggaaagaaatttaaaac

SEQ ID NO: 3193 - DNA, 20 bp, synthetic construct
  misc_feature 1..20: note = chemically synthesized
  source 1..20: mol_type = other DNA
agacaaatttttattttgat

SEQ ID NO: 3194 - DNA, 20 bp, synthetic construct
  misc_feature 1..20: note = chemically synthesized
  source 1..20: mol_type = other DNA
gacaaatttttattttgatt

SEQ ID NO: 3195 - DNA, 20 bp, synthetic construct
  misc_feature 1..20: note = chemically synthesized
  source 1..20: mol_type = other DNA
acaaatttttattttgatta

SEQ ID NO: 3196 - DNA, 20 bp, synthetic construct
  misc_feature 1..20: note = chemically synthesized
  source 1..20: mol_type = other DNA
ggttgaattgaatttattat

SEQ ID NO: 3197 - DNA, 20 bp, synthetic construct
  misc_feature 1..20: note = chemically synthesized
  source 1..20: mol_type = other DNA
atttattatgagttgtttct

SEQ ID NO: 3198 - DNA, 20 bp, synthetic construct
  misc_feature 1..20: note = chemically synthesized
  source 1..20: mol_type = other DNA
ttattatgagttgtttctga

SEQ ID NO: 3199 - DNA, 20 bp, synthetic construct
  misc_feature 1..20: note = chemically synthesized
  source 1..20: mol_type = other DNA
aacaattatttcatttattt

SEQ ID NO: 3200 - DNA, 20 bp, synthetic construct
  misc_feature 1..20: note = chemically synthesized
  source 1..20: mol_type = other DNA
acaattatttcatttatttt

SEQ ID NO: 3201 - DNA, 20 bp, synthetic construct
  misc_feature 1..20: note = chemically synthesized
  source 1..20: mol_type = other DNA
atttattttaggcacatata

SEQ ID NO: 3202 - DNA, 20 bp, synthetic construct
  misc_feature 1..20: note = chemically synthesized
  source 1..20: mol_type = other DNA
atacagttctattatcattt

SEQ ID NO: 3203 - DNA, 20 bp, synthetic construct
  misc_feature 1..20: note = chemically synthesized
  source 1..20: mol_type = other DNA
tacagttctattatcatttt

SEQ ID NO: 3204 - DNA, 20 bp, synthetic construct
  misc_feature 1..20: note = chemically synthesized
  source 1..20: mol_type = other DNA
gtttttgttttacgtatttt

SEQ ID NO: 3205 - DNA, 20 bp, synthetic construct
  misc_feature 1..20: note = chemically synthesized
  source 1..20: mol_type = other DNA
tacgtatttttggttttttt

SEQ ID NO: 3206 - DNA, 20 bp, synthetic construct
  misc_feature 1..20: note = chemically synthesized
  source 1..20: mol_type = other DNA
tatttttggtttttttgaga

SEQ ID NO: 3207 - DNA, 20 bp, synthetic construct
  misc_feature 1..20: note = chemically synthesized
  source 1..20: mol_type = other DNA
tttttggtttttttgagatg

SEQ ID NO: 3208 - DNA, 20 bp, synthetic construct
  misc_feature 1..20: note = chemically synthesized
  source 1..20: mol_type = other DNA
tgagatggagtctctctctg

SEQ ID NO: 3209 - DNA, 20 bp, synthetic construct
  misc_feature 1..20: note = chemically synthesized
  source 1..20: mol_type = other DNA
tggagtctctctctgtggtc

SEQ ID NO: 3210 - DNA, 20 bp, synthetic construct
  misc_feature 1..20: note = chemically synthesized
  source 1..20: mol_type = other DNA
ggagtctctctctgtggtcc

SEQ ID NO: 3211 - DNA, 20 bp, synthetic construct
  misc_feature 1..20: note = chemically synthesized
  source 1..20: mol_type = other DNA
tctctctctgtggtccaggc

SEQ ID NO: 3212 - DNA, 20 bp, synthetic construct
  misc_feature 1..20: note = chemically synthesized
  source 1..20: mol_type = other DNA
tctctctgtggtccaggcta

SEQ ID NO: 3213 - DNA, 20 bp, synthetic construct
  misc_feature 1..20: note = chemically synthesized
  source 1..20: mol_type = other DNA
tctgtggtccaggctagagt

SEQ ID NO: 3214 - DNA, 20 bp, synthetic construct
  misc_feature 1..20: note = chemically synthesized
  source 1..20: mol_type = other DNA
ctgtggtccaggctagagtg

SEQ ID NO: 3215 - DNA, 20 bp, synthetic construct
  misc_feature 1..20: note = chemically synthesized
  source 1..20: mol_type = other DNA
agagtgaggtgacgcgatct

SEQ ID NO: 3216 - DNA, 20 bp, synthetic construct
  misc_feature 1..20: note = chemically synthesized
  source 1..20: mol_type = other DNA
ctcactgcaacctccgcctc

SEQ ID NO: 3217 - DNA, 20 bp, synthetic construct
  misc_feature 1..20: note = chemically synthesized
  source 1..20: mol_type = other DNA
ttcaaatcattctcctgcct

SEQ ID NO: 3218 - DNA, 20 bp, synthetic construct
  misc_feature 1..20: note = chemically synthesized
  source 1..20: mol_type = other DNA
tcctgcctcagcctcccatg

SEQ ID NO: 3219 - DNA, 20 bp, synthetic construct
  misc_feature 1..20: note = chemically synthesized
  source 1..20: mol_type = other DNA
gcctcagcctcccatgtagc

SEQ ID NO: 3220 - DNA, 20 bp, synthetic construct
  misc_feature 1..20: note = chemically synthesized
  source 1..20: mol_type = other DNA
cctcagcctcccatgtagct

SEQ ID NO: 3221 - DNA, 20 bp, synthetic construct
  misc_feature 1..20: note = chemically synthesized
  source 1..20: mol_type = other DNA
ctcccatgtagctgggatta

SEQ ID NO: 3222 - DNA, 20 bp, synthetic construct
  misc_feature 1..20: note = chemically synthesized
  source 1..20: mol_type = other DNA
tcccatgtagctgggattac

SEQ ID NO: 3223 - DNA, 20 bp, synthetic construct
  misc_feature 1..20: note = chemically synthesized
  source 1..20: mol_type = other DNA
caggtgtgcgccaccacgtc

SEQ ID NO: 3224 - DNA, 20 bp, synthetic construct
  misc_feature 1..20: note = chemically synthesized
  source 1..20: mol_type = other DNA
ttcccattctattttcctat

SEQ ID NO: 3225 - DNA, 20 bp, synthetic construct
  misc_feature 1..20: note = chemically synthesized
  source 1..20: mol_type = other DNA
tattttcctattggttcttg

SEQ ID NO: 3226 - DNA, 20 bp, synthetic construct
  misc_feature 1..20: note = chemically synthesized
  source 1..20: mol_type = other DNA
tatataactctttttacttt

SEQ ID NO: 3227 - DNA, 20 bp, synthetic construct
  misc_feature 1..20: note = chemically synthesized
  source 1..20: mol_type = other DNA
atataactctttttactttc

SEQ ID NO: 3228 - DNA, 20 bp, synthetic construct
  misc_feature 1..20: note = chemically synthesized
  source 1..20: mol_type = other DNA
aatgatcatatcatatacaa

SEQ ID NO: 3229 - DNA, 20 bp, synthetic construct
  misc_feature 1..20: note = chemically synthesized
  source 1..20: mol_type = other DNA
atcatatcatatacaaaaga

SEQ ID NO: 3230 - DNA, 20 bp, synthetic construct
  misc_feature 1..20: note = chemically synthesized
  source 1..20: mol_type = other DNA
caaaagaaagttaaaaaata

SEQ ID NO: 3231 - DNA, 20 bp, synthetic construct
  misc_feature 1..20: note = chemically synthesized
  source 1..20: mol_type = other DNA
aaaagaaagttaaaaaataa

SEQ ID NO: 3232 - DNA, 20 bp, synthetic construct
  misc_feature 1..20: note = chemically synthesized
  source 1..20: mol_type = other DNA
aaagttaaaaaataaaggca

SEQ ID NO: 3233 - DNA, 20 bp, synthetic construct
  misc_feature 1..20: note = chemically synthesized
  source 1..20: mol_type = other DNA
taaaggcaaagatgtaaata

SEQ ID NO: 3234 - DNA, 20 bp, synthetic construct
  misc_feature 1..20: note = chemically synthesized
  source 1..20: mol_type = other DNA
gtaaataaagaaatacaccc

SEQ ID NO: 3235 - DNA, 20 bp, synthetic construct
  misc_feature 1..20: note = chemically synthesized
  source 1..20: mol_type = other DNA
atacaccccagattacaatt

SEQ ID NO: 3236 - DNA, 20 bp, synthetic construct
  misc_feature 1..20: note = chemically synthesized
  source 1..20: mol_type = other DNA
ttgcttgattgatattaact

SEQ ID NO: 3237 - DNA, 20 bp, synthetic construct
  misc_feature 1..20: note = chemically synthesized
  source 1..20: mol_type = other DNA
attgatattaactaagacct

SEQ ID NO: 3238 - DNA, 20 bp, synthetic construct
  misc_feature 1..20: note = chemically synthesized
  source 1..20: mol_type = other DNA
agacctcagttataaaacaa

SEQ ID NO: 3239 - DNA, 20 bp, synthetic construct
  misc_feature 1..20: note = chemically synthesized
  source 1..20: mol_type = other DNA
agttataaaacaatagtctg

SEQ ID NO: 3240 - DNA, 20 bp, synthetic construct
  misc_feature 1..20: note = chemically synthesized
  source 1..20: mol_type = other DNA
tataaaacaatagtctgtag

SEQ ID NO: 3241 - DNA, 20 bp, synthetic construct
  misc_feature 1..20: note = chemically synthesized
  source 1..20: mol_type = other DNA
acaatagtctgtagtggtac

SEQ ID NO: 3242 - DNA, 20 bp, synthetic construct
  misc_feature 1..20: note = chemically synthesized
  source 1..20: mol_type = other DNA
gtctgtagtggtactggtct

SEQ ID NO: 3243 - DNA, 20 bp, synthetic construct
  misc_feature 1..20: note = chemically synthesized
  source 1..20: mol_type = other DNA
ttctcaccttatcaatcact

SEQ ID NO: 3244 - DNA, 20 bp, synthetic construct
  misc_feature 1..20: note = chemically synthesized
  source 1..20: mol_type = other DNA
ttgtttttgctaattctgtc

SEQ ID NO: 3245 - DNA, 20 bp, synthetic construct
  misc_feature 1..20: note = chemically synthesized
  source 1..20: mol_type = other DNA
ttctgtctagaacaccatat

SEQ ID NO: 3246 - DNA, 20 bp, synthetic construct
  misc_feature 1..20: note = chemically synthesized
  source 1..20: mol_type = other DNA
ctagaacaccatatcagttt

SEQ ID NO: 3247 - DNA, 20 bp, synthetic construct
  misc_feature 1..20: note = chemically synthesized
  source 1..20: mol_type = other DNA
acaccatatcagttttagct

SEQ ID NO: 3248 - DNA, 20 bp, synthetic construct
  misc_feature 1..20: note = chemically synthesized
  source 1..20: mol_type = other DNA
ctccctgctttaaaattgtt

SEQ ID NO: 3249 - DNA, 20 bp, synthetic construct
  misc_feature 1..20: note = chemically synthesized
  source 1..20: mol_type = other DNA
gtttggtttctgcccttttt

SEQ ID NO: 3250 - DNA, 20 bp, synthetic construct
  misc_feature 1..20: note = chemically synthesized
  source 1..20: mol_type = other DNA
ttccctttcccttcctgctg

SEQ ID NO: 3251 - DNA, 20 bp, synthetic construct
  misc_feature 1..20: note = chemically synthesized
  source 1..20: mol_type = other DNA
tccctttcccttcctgctga

SEQ ID NO: 3252 - DNA, 20 bp, synthetic construct
  misc_feature 1..20: note = chemically synthesized
  source 1..20: mol_type = other DNA
ccttcctgctgaaggattac

SEQ ID NO: 3253 - DNA, 20 bp, synthetic construct
  misc_feature 1..20: note = chemically synthesized
  source 1..20: mol_type = other DNA
ctgctgaaggattactggtt

SEQ ID NO: 3254 - DNA, 20 bp, synthetic construct
  misc_feature 1..20: note = chemically synthesized
  source 1..20: mol_type = other DNA
tgctgaaggattactggtta

SEQ ID NO: 3255 - DNA, 20 bp, synthetic construct
  misc_feature 1..20: note = chemically synthesized
  source 1..20: mol_type = other DNA
ctgaaggattactggttaag

SEQ ID NO: 3256 - DNA, 20 bp, synthetic construct
  misc_feature 1..20: note = chemically synthesized
  source 1..20: mol_type = other DNA
aggattactggttaaggaga

SEQ ID NO: 3257 - DNA, 20 bp, synthetic construct
  misc_feature 1..20: note = chemically synthesized
  source 1..20: mol_type = other DNA
attactggttaaggagacag

SEQ ID NO: 3258 - DNA, 20 bp, synthetic construct
  misc_feature 1..20: note = chemically synthesized
  source 1..20: mol_type = other DNA
tgaaaacttcttctcatgtc

SEQ ID NO: 3259 - DNA, 20 bp, synthetic construct
  misc_feature 1..20: note = chemically synthesized
  source 1..20: mol_type = other DNA
gaaaacttcttctcatgtcc

SEQ ID NO: 3260 - DNA, 20 bp, synthetic construct
  misc_feature 1..20: note = chemically synthesized
  source 1..20: mol_type = other DNA
aaaacttcttctcatgtcca

SEQ ID NO: 3261 - DNA, 20 bp, synthetic construct
  misc_feature 1..20: note = chemically synthesized
  source 1..20: mol_type = other DNA
tcttctcatgtccagggcaa

SEQ ID NO: 3262 - DNA, 20 bp, synthetic construct
  misc_feature 1..20: note = chemically synthesized
  source 1..20: mol_type = other DNA
tcatgtccagggcaatggct

SEQ ID NO: 3263 - DNA, 20 bp, synthetic construct
  misc_feature 1..20: note = chemically synthesized
  source 1..20: mol_type = other DNA
tggctcagtaatgttaaatt

SEQ ID NO: 3264 - DNA, 20 bp, synthetic construct
  misc_feature 1..20: note = chemically synthesized
  source 1..20: mol_type = other DNA
ctcagtaatgttaaattcag

SEQ ID NO: 3265 - DNA, 20 bp, synthetic construct
  misc_feature 1..20: note = chemically synthesized
  source 1..20: mol_type = other DNA
tgttaaattcagcagctgca

SEQ ID NO: 3266 - DNA, 20 bp, synthetic construct
  misc_feature 1..20: note = chemically synthesized
  source 1..20: mol_type = other DNA
attcagcagctgcatagcaa

SEQ ID NO: 3267 - DNA, 20 bp, synthetic construct
  misc_feature 1..20: note = chemically synthesized
  source 1..20: mol_type = other DNA
agccatttcctaaatccttt

SEQ ID NO: 3268 - DNA, 20 bp, synthetic construct
  misc_feature 1..20: note = chemically synthesized
  source 1..20: mol_type = other DNA
cctaaatcctttcagaatct

SEQ ID NO: 3269 - DNA, 20 bp, synthetic construct
  misc_feature 1..20: note = chemically synthesized
  source 1..20: mol_type = other DNA
gaatctgagtgctcaactga

SEQ ID NO: 3270 - DNA, 20 bp, synthetic construct
  misc_feature 1..20: note = chemically synthesized
  source 1..20: mol_type = other DNA
tgctcaactgaaagtttatt

SEQ ID NO: 3271 - DNA, 20 bp, synthetic construct
  misc_feature 1..20: note = chemically synthesized
  source 1..20: mol_type = other DNA
ctcaactgaaagtttattta

SEQ ID NO: 3272 - DNA, 20 bp, synthetic construct
  misc_feature 1..20: note = chemically synthesized
  source 1..20: mol_type = other DNA
gacatgtatatgttactgtg

SEQ ID NO: 3273 - DNA, 20 bp, synthetic construct
  misc_feature 1..20: note = chemically synthesized
  source 1..20: mol_type = other DNA
atatattcatatacctattt

SEQ ID NO: 3274 - DNA, 20 bp, synthetic construct
  misc_feature 1..20: note = chemically synthesized
  source 1..20: mol_type = other DNA
atatcatgttgcatgcattt

SEQ ID NO: 3275 - DNA, 20 bp, synthetic construct
  misc_feature 1..20: note = chemically synthesized
  source 1..20: mol_type = other DNA
atgcattttggatgtgaaat

SEQ ID NO: 3276 - DNA, 20 bp, synthetic construct
  misc_feature 1..20: note = chemically synthesized
  source 1..20: mol_type = other DNA
atgtgaaattggcattttct

SEQ ID NO: 3277 - DNA, 20 bp, synthetic construct
  misc_feature 1..20: note = chemically synthesized
  source 1..20: mol_type = other DNA
agctccccactgctaaaatc

SEQ ID NO: 3278 - DNA, 20 bp, synthetic construct
  misc_feature 1..20: note = chemically synthesized
  source 1..20: mol_type = other DNA
tacaaaatcttcctaccttt

SEQ ID NO: 3279 - DNA, 20 bp, synthetic construct
  misc_feature 1..20: note = chemically synthesized
  source 1..20: mol_type = other DNA
ccatcatattattactttta

SEQ ID NO: 3280 - DNA, 20 bp, synthetic construct
  misc_feature 1..20: note = chemically synthesized
  source 1..20: mol_type = other DNA
atcatattattacttttatg

SEQ ID NO: 3281 - DNA, 20 bp, synthetic construct
  misc_feature 1..20: note = chemically synthesized
  source 1..20: mol_type = other DNA
ttatggagaaatgcaacgct

SEQ ID NO: 3282 - DNA, 20 bp, synthetic construct
  misc_feature 1..20: note = chemically synthesized
  source 1..20: mol_type = other DNA
gctgagtgtaaatttcacat

SEQ ID NO: 3283 - DNA, 20 bp, synthetic construct
  misc_feature 1..20: note = chemically synthesized
  source 1..20: mol_type = other DNA
agaatgtccaaaacattgtg

SEQ ID NO: 3284 - DNA, 20 bp, synthetic construct
  misc_feature 1..20: note = chemically synthesized
  source 1..20: mol_type = other DNA
aatgtccaaaacattgtgta

SEQ ID NO: 3285 - DNA, 20 bp, synthetic construct
  misc_feature 1..20: note = chemically synthesized
  source 1..20: mol_type = other DNA
gtccaaaacattgtgtagag

SEQ ID NO: 3286 - DNA, 20 bp, synthetic construct
  misc_feature 1..20: note = chemically synthesized
  source 1..20: mol_type = other DNA
gtagaaaaaaaaactatatg

SEQ ID NO: 3287 - DNA, 20 bp, synthetic construct
  misc_feature 1..20: note = chemically synthesized
  source 1..20: mol_type = other DNA
aaaaactatatgaagtttaa

SEQ ID NO: 3288 - DNA, 20 bp, synthetic construct
  misc_feature 1..20: note = chemically synthesized
  source 1..20: mol_type = other DNA
tgaagtttaacagatgtact

SEQ ID NO: 3289 - DNA, 20 bp, synthetic construct
  misc_feature 1..20: note = chemically synthesized
  source 1..20: mol_type = other DNA
tgagaaatgcaaatattttg

SEQ ID NO: 3290 - DNA, 20 bp, synthetic construct
  misc_feature 1..20: note = chemically synthesized
  source 1..20: mol_type = other DNA
attttgaagacaattcaaaa

SEQ ID NO: 3291 - DNA, 20 bp, synthetic construct
  misc_feature 1..20: note = chemically synthesized
  source 1..20: mol_type = other DNA
caaaatagcacttaaatatt

SEQ ID NO: 3292 - DNA, 20 bp, synthetic construct
  misc_feature 1..20: note = chemically synthesized
  source 1..20: mol_type = other DNA
tagcacttaaatatttagtg

SEQ ID NO: 3293 - DNA, 20 bp, synthetic construct
  misc_feature 1..20: note = chemically synthesized
  source 1..20: mol_type = other DNA
ttaaatatttagtgtagtac

SEQ ID NO: 3294 - DNA, 20 bp, synthetic construct
  misc_feature 1..20: note = chemically synthesized
  source 1..20: mol_type = other DNA
aatatttagtgtagtactag

SEQ ID NO: 3295 - DNA, 20 bp, synthetic construct
  misc_feature 1..20: note = chemically synthesized
  source 1..20: mol_type = other DNA
actagcagaaacaaattaat

SEQ ID NO: 3296 - DNA, 20 bp, synthetic construct
  misc_feature 1..20: note = chemically synthesized
  source 1..20: mol_type = other DNA
aacaaattaattagattttt

SEQ ID NO: 3297 - DNA, 20 bp, synthetic construct
  misc_feature 1..20: note = chemically synthesized
  source 1..20: mol_type = other DNA
gtattctcccttcccaataa

SEQ ID NO: 3298 - DNA, 20 bp, synthetic construct
  misc_feature 1..20: note = chemically synthesized
  source 1..20: mol_type = other DNA
tcccaataatggaaatactg

SEQ ID NO: 3299 - DNA, 20 bp, synthetic construct
  misc_feature 1..20: note = chemically synthesized
  source 1..20: mol_type = other DNA
cccaataatggaaatactgt

SEQ ID NO: 3300 - DNA, 20 bp, synthetic construct
  misc_feature 1..20: note = chemically synthesized
  source 1..20: mol_type = other DNA
aataatggaaatactgtagg

SEQ ID NO: 3301 - DNA, 20 bp, synthetic construct
  misc_feature 1..20: note = chemically synthesized
  source 1..20: mol_type = other DNA
tttctaactttcttattctt

SEQ ID NO: 3302 - DNA, 20 bp, synthetic construct
  misc_feature 1..20: note = chemically synthesized
  source 1..20: mol_type = other DNA
tgtgtgtgtacatatatatg

SEQ ID NO: 3303 - DNA, 20 bp, synthetic construct
  misc_feature 1..20: note = chemically synthesized
  source 1..20: mol_type = other DNA
gtgtgtgtacatatatatga

SEQ ID NO: 3304 - DNA, 20 bp, synthetic construct
  misc_feature 1..20: note = chemically synthesized
  source 1..20: mol_type = other DNA
ggtacatccacatataaatg

SEQ ID NO: 3305 - DNA, 20 bp, synthetic construct
  misc_feature 1..20: note = chemically synthesized
  source 1..20: mol_type = other DNA
catataaatgtagataaatt

SEQ ID NO: 3306 - DNA, 20 bp, synthetic construct
  misc_feature 1..20: note = chemically synthesized
  source 1..20: mol_type = other DNA
gtgtgtgtatatgtaaatct

SEQ ID NO: 3307 - DNA, 20 bp, synthetic construct
  misc_feature 1..20: note = chemically synthesized
  source 1..20: mol_type = other DNA
ataaatttctataaaaatca

SEQ ID NO: 3308 - DNA, 20 bp, synthetic construct
  misc_feature 1..20: note = chemically synthesized
  source 1..20: mol_type = other DNA
ttctataaaaatcacagaaa

SEQ ID NO: 3309 - DNA, 20 bp, synthetic construct
  misc_feature 1..20: note = chemically synthesized
  source 1..20: mol_type = other DNA
taaaaatcacagaaaaagct

SEQ ID NO: 3310 - DNA, 20 bp, synthetic construct
  misc_feature 1..20: note = chemically synthesized
  source 1..20: mol_type = other DNA
tcacagaaaaagctaagcat

SEQ ID NO: 3311 - DNA, 20 bp, synthetic construct
  misc_feature 1..20: note = chemically synthesized
  source 1..20: mol_type = other DNA
gaaaaagctaagcataagcc

SEQ ID NO: 3312 - DNA, 20 bp, synthetic construct
  misc_feature 1..20: note = chemically synthesized
  source 1..20: mol_type = other DNA
gctaagcataagccaagcat

SEQ ID NO: 3313 - DNA, 20 bp, synthetic construct
  misc_feature 1..20: note = chemically synthesized
  source 1..20: mol_type = other DNA
aagcataagccaagcatgag

SEQ ID NO: 3314 - DNA, 20 bp, synthetic construct
  misc_feature 1..20: note = chemically synthesized
  source 1..20: mol_type = other DNA
gccaagcatgagtagatttc

SEQ ID NO: 3315 - DNA, 20 bp, synthetic construct
  misc_feature 1..20: note = chemically synthesized
  source 1..20: mol_type = other DNA
tgagtagatttcaagtgttt

SEQ ID NO: 3316 - DNA, 20 bp, synthetic construct
  misc_feature 1..20: note = chemically synthesized
  source 1..20: mol_type = other DNA
tagatttcaagtgtttaaga

SEQ ID NO: 3317 - DNA, 20 bp, synthetic construct
  misc_feature 1..20: note = chemically synthesized
  source 1..20: mol_type = other DNA
aagtgtttaagatagtacct

SEQ ID NO: 3318 - DNA, 20 bp, synthetic construct
  misc_feature 1..20: note = chemically synthesized
  source 1..20: mol_type = other DNA
atagtacctcagatttctca

SEQ ID NO: 3319 - DNA, 20 bp, synthetic construct
  misc_feature 1..20: note = chemically synthesized
  source 1..20: mol_type = other DNA
gttttttttttgtctttctt

SEQ ID NO: 3320 - DNA, 20 bp, synthetic construct
  misc_feature 1..20: note = chemically synthesized
  source 1..20: mol_type = other DNA
ttttttttttgtctttcttt

SEQ ID NO: 3321 - DNA, 20 bp, synthetic construct
  misc_feature 1..20: note = chemically synthesized
  source 1..20: mol_type = other DNA
gtctttctttaggtgtaaat

SEQ ID NO: 3322 - DNA, 20 bp, synthetic construct
  misc_feature 1..20: note = chemically synthesized
  source 1..20: mol_type = other DNA
tctttctttaggtgtaaata

SEQ ID NO: 3323 - DNA, 20 bp, synthetic construct
  misc_feature 1..20: note = chemically synthesized
  source 1..20: mol_type = other DNA
tcattttttaaacattctca

SEQ ID NO: 3324 - DNA, 20 bp, synthetic construct
  misc_feature 1..20: note = chemically synthesized
  source 1..20: mol_type = other DNA
acattctcatggcattgttc

SEQ ID NO: 3325 - DNA, 20 bp, synthetic construct
  misc_feature 1..20: note = chemically synthesized
  source 1..20: mol_type = other DNA
cattctcatggcattgttct

SEQ ID NO: 3326 - DNA, 20 bp, synthetic construct
  misc_feature 1..20: note = chemically synthesized
  source 1..20: mol_type = other DNA
tggcattgttctaggctttt

SEQ ID NO: 3327 - DNA, 20 bp, synthetic construct
  misc_feature 1..20: note = chemically synthesized
  source 1..20: mol_type = other DNA
cattgttctaggcttttaag

SEQ ID NO: 3328 - DNA, 20 bp, synthetic construct
  misc_feature 1..20: note = chemically synthesized
  source 1..20: mol_type = other DNA
attgttctaggcttttaaga

SEQ ID NO: 3329 - DNA, 20 bp, synthetic construct
  misc_feature 1..20: note = chemically synthesized
  source 1..20: mol_type = other DNA
tgttctaggcttttaagaag

SEQ ID NO: 3330 - DNA, 20 bp, synthetic construct
  misc_feature 1..20: note = chemically synthesized
  source 1..20: mol_type = other DNA
ttctaggcttttaagaagga

SEQ ID NO: 3331 - DNA, 20 bp, synthetic construct
  misc_feature 1..20: note = chemically synthesized
  source 1..20: mol_type = other DNA
taaaaatttgtattgatgtg

SEQ ID NO: 3332 - DNA, 20 bp, synthetic construct
  misc_feature 1..20: note = chemically synthesized
  source 1..20: mol_type = other DNA
aaaaatttgtattgatgtga

SEQ ID NO: 3333 - DNA, 20 bp, synthetic construct
  misc_feature 1..20: note = chemically synthesized
  source 1..20: mol_type = other DNA
aaaatttgtattgatgtgaa

SEQ ID NO: 3334 - DNA, 20 bp, synthetic construct
  misc_feature 1..20: note = chemically synthesized
  source 1..20: mol_type = other DNA
tgtattgatgtgaagggatt

SEQ ID NO: 3335 - DNA, 20 bp, synthetic construct
  misc_feature 1..20: note = chemically synthesized
  source 1..20: mol_type = other DNA
gtattgatgtgaagggatta

SEQ ID NO: 3336 - DNA, 20 bp, synthetic construct
  misc_feature 1..20: note = chemically synthesized
  source 1..20: mol_type = other DNA
gatgtgaagggattaaggta

SEQ ID NO: 3337 - DNA, 20 bp, synthetic construct
  misc_feature 1..20: note = chemically synthesized
  source 1..20: mol_type = other DNA
agggattaaggtatagtctg

SEQ ID NO: 3338 - DNA, 20 bp, synthetic construct
  misc_feature 1..20: note = chemically synthesized
  source 1..20: mol_type = other DNA
atagtctgtagataatatca

SEQ ID NO: 3339 - DNA, 20 bp, synthetic construct
  misc_feature 1..20: note = chemically synthesized
  source 1..20: mol_type = other DNA
tcatagataattacttttgc

SEQ ID NO: 3340 - DNA, 20 bp, synthetic construct
  misc_feature 1..20: note = chemically synthesized
  source 1..20: mol_type = other DNA
catagataattacttttgct

SEQ ID NO: 3341 - DNA, 20 bp, synthetic construct
  misc_feature 1..20: note = chemically synthesized
  source 1..20: mol_type = other DNA
gattacattcttttttattt

SEQ ID NO: 3342 - DNA, 20 bp, synthetic construct
  misc_feature 1..20: note = chemically synthesized
  source 1..20: mol_type = other DNA
tcttttttatttaagtttct

SEQ ID NO: 3343 - DNA, 20 bp, synthetic construct
  misc_feature 1..20: note = chemically synthesized
  source 1..20: mol_type = other DNA
atattctccttaatcttctc

SEQ ID NO: 3344 - DNA, 20 bp, synthetic construct
  misc_feature 1..20: note = chemically synthesized
  source 1..20: mol_type = other DNA
ttaaaaatttatttatcacc

SEQ ID NO: 3345 - DNA, 20 bp, synthetic construct
  misc_feature 1..20: note = chemically synthesized
  source 1..20: mol_type = other DNA
taaaaatttatttatcaccc

SEQ ID NO: 3346 - DNA, 20 bp, synthetic construct
  misc_feature 1..20: note = chemically synthesized
  source 1..20: mol_type = other DNA
atttatttatcacccaggta

SEQ ID NO: 3347 - DNA, 20 bp, synthetic construct
  misc_feature 1..20: note = chemically synthesized
  source 1..20: mol_type = other DNA
tttcaatcattttacttctt

SEQ ID NO: 3348 - DNA, 20 bp, synthetic construct
  misc_feature 1..20: note = chemically synthesized
  source 1..20: mol_type = other DNA
atgatgctccattgatgact

SEQ ID NO: 3349 - DNA, 20 bp, synthetic construct
  misc_feature 1..20: note = chemically synthesized
  source 1..20: mol_type = other DNA
tgatgctccattgatgactt

SEQ ID NO: 3350 - DNA, 20 bp, synthetic construct
  misc_feature 1..20: note = chemically synthesized
  source 1..20: mol_type = other DNA
tgggtctaaaatctccacta

SEQ ID NO: 3351 - DNA, 20 bp, synthetic construct
  misc_feature 1..20: note = chemically synthesized
  source 1..20: mol_type = other DNA
gggtctaaaatctccactat

SEQ ID NO: 3352 - DNA, 20 bp, synthetic construct
  misc_feature 1..20: note = chemically synthesized
  source 1..20: mol_type = other DNA
ggtctaaaatctccactata

SEQ ID NO: 3353 - DNA, 20 bp, synthetic construct
  misc_feature 1..20: note = chemically synthesized
  source 1..20: mol_type = other DNA
gtctaaaatctccactatag

SEQ ID NO: 3354 - DNA, 20 bp, synthetic construct
  misc_feature 1..20: note = chemically synthesized
  source 1..20: mol_type = other DNA
tctaaaatctccactatagg

SEQ ID NO: 3355 - DNA, 20 bp, synthetic construct
  misc_feature 1..20: note = chemically synthesized
  source 1..20: mol_type = other DNA
ctatagggggaaatgtgtat

SEQ ID NO: 3356 - DNA, 20 bp, synthetic construct
  misc_feature 1..20: note = chemically synthesized
  source 1..20: mol_type = other DNA
gtatcagattttacatcatc

SEQ ID NO: 3357 - DNA, 20 bp, synthetic construct
  misc_feature 1..20: note = chemically synthesized
  source 1..20: mol_type = other DNA
tatcagattttacatcatcc

SEQ ID NO: 3358 - DNA, 20 bp, synthetic construct
  misc_feature 1..20: note = chemically synthesized
  source 1..20: mol_type = other DNA
catatttgttaatttaatat

SEQ ID NO: 3359 - DNA, 20 bp, synthetic construct
  misc_feature 1..20: note = chemically synthesized
  source 1..20: mol_type = other DNA
attatgtgtctattccatac

SEQ ID NO: 3360 - DNA, 20 bp, synthetic construct
  misc_feature 1..20: note = chemically synthesized
  source 1..20: mol_type = other DNA
tatgtgtctattccatacaa

SEQ ID NO: 3361 - DNA, 20 bp, synthetic construct
  misc_feature 1..20: note = chemically synthesized
  source 1..20: mol_type = other DNA
ttccatacaagagactttgt

SEQ ID NO: 3362 - DNA, 20 bp, synthetic construct
  misc_feature 1..20: note = chemically synthesized
  source 1..20: mol_type = other DNA
caagagactttgtgagatgt

SEQ ID NO: 3363 - DNA, 20 bp, synthetic construct
  misc_feature 1..20: note = chemically synthesized
  source 1..20: mol_type = other DNA
agactttgtgagatgtcagt

SEQ ID NO: 3364 - DNA, 20 bp, synthetic construct
  misc_feature 1..20: note = chemically synthesized
  source 1..20: mol_type = other DNA
tttgtgagatgtcagtgagt

SEQ ID NO: 3365 - DNA, 20 bp, synthetic construct
  misc_feature 1..20: note = chemically synthesized
  source 1..20: mol_type = other DNA
cagtgagttagaaaatattc

SEQ ID NO: 3366 - DNA, 20 bp, synthetic construct
  misc_feature 1..20: note = chemically synthesized
  source 1..20: mol_type = other DNA
agtgagttagaaaatattct

SEQ ID NO: 3367 - DNA, 20 bp, synthetic construct
  misc_feature 1..20: note = chemically synthesized
  source 1..20: mol_type = other DNA
gtgagttagaaaatattcta

SEQ ID NO: 3368 - DNA, 20 bp, synthetic construct
  misc_feature 1..20: note = chemically synthesized
  source 1..20: mol_type = other DNA
tagggataacattttaactt

SEQ ID NO: 3369 - DNA, 20 bp, synthetic construct
  misc_feature 1..20: note = chemically synthesized
  source 1..20: mol_type = other DNA
taacattttaacttaagtaa

SEQ ID NO: 3370 - DNA, 20 bp, synthetic construct
  misc_feature 1..20: note = chemically synthesized
  source 1..20: mol_type = other DNA
aacattttaacttaagtaac

SEQ ID NO: 3371 - DNA, 20 bp, synthetic construct
  misc_feature 1..20: note = chemically synthesized
  source 1..20: mol_type = other DNA
tgttgacaaaaataatatta

SEQ ID NO: 3372 - DNA, 20 bp, synthetic construct
  misc_feature 1..20: note = chemically synthesized
  source 1..20: mol_type = other DNA
atattatggcttcatgttat

SEQ ID NO: 3373 - DNA, 20 bp, synthetic construct
  misc_feature 1..20: note = chemically synthesized
  source 1..20: mol_type = other DNA
tggcttcatgttattggttc

SEQ ID NO: 3374 - DNA, 20 bp, synthetic construct
  misc_feature 1..20: note = chemically synthesized
  source 1..20: mol_type = other DNA
gttattggttcaagtctctg

SEQ ID NO: 3375 - DNA, 20 bp, synthetic construct
  misc_feature 1..20: note = chemically synthesized
  source 1..20: mol_type = other DNA
tattggttcaagtctctgca

SEQ ID NO: 3376 - DNA, 20 bp, synthetic construct
  misc_feature 1..20: note = chemically synthesized
  source 1..20: mol_type = other DNA
gttcaagtctctgcagagta

SEQ ID NO: 3377 - DNA, 20 bp, synthetic construct
  misc_feature 1..20: note = chemically synthesized
  source 1..20: mol_type = other DNA
caagtctctgcagagtacag

SEQ ID NO: 3378 - DNA, 20 bp, synthetic construct
  misc_feature 1..20: note = chemically synthesized
  source 1..20: mol_type = other DNA
aagtctctgcagagtacagc

SEQ ID NO: 3379 - DNA, 20 bp, synthetic construct
  misc_feature 1..20: note = chemically synthesized
  source 1..20: mol_type = other DNA
gtctctgcagagtacagcgg

SEQ ID NO: 3380 - DNA, 20 bp, synthetic construct
  misc_feature 1..20: note = chemically synthesized
  source 1..20: mol_type = other DNA
agcgggagtgttgtacattt

SEQ ID NO: 3381 - DNA, 20 bp, synthetic construct
  misc_feature 1..20: note = chemically synthesized
  source 1..20: mol_type = other DNA
gggagtgttgtacatttcag

SEQ ID NO: 3382 - DNA, 20 bp, synthetic construct
  misc_feature 1..20: note = chemically synthesized
  source 1..20: mol_type = other DNA
tgtacatttcagcagaattt

SEQ ID NO: 3383 - DNA, 20 bp, synthetic construct
  misc_feature 1..20: note = chemically synthesized
  source 1..20: mol_type = other DNA
aatttcagactgactataaa

SEQ ID NO: 3384 - DNA, 20 bp, synthetic construct
  misc_feature 1..20: note = chemically synthesized
  source 1..20: mol_type = other DNA
cagactgactataaaaagcc

SEQ ID NO: 3385 - DNA, 20 bp, synthetic construct
  misc_feature 1..20: note = chemically synthesized
  source 1..20: mol_type = other DNA
tgactcaaaaccccacttcc

SEQ ID NO: 3386 - DNA, 20 bp, synthetic construct
  misc_feature 1..20: note = chemically synthesized
  source 1..20: mol_type = other DNA
ccccacttcctagctctacg

SEQ ID NO: 3387 - DNA, 20 bp, synthetic construct
  misc_feature 1..20: note = chemically synthesized
  source 1..20: mol_type = other DNA
cccacttcctagctctacgt

SEQ ID NO: 3388 - DNA, 20 bp, synthetic construct
  misc_feature 1..20: note = chemically synthesized
  source 1..20: mol_type = other DNA
ttcctagctctacgtaggaa

SEQ ID NO: 3389 - DNA, 20 bp, synthetic construct
  misc_feature 1..20: note = chemically synthesized
  source 1..20: mol_type = other DNA
ctacgtaggaaaagtcaatc

SEQ ID NO: 3390 - DNA, 20 bp, synthetic construct
  misc_feature 1..20: note = chemically synthesized
  source 1..20: mol_type = other DNA
gattatctttatatattttt

SEQ ID NO: 3391 - DNA, 20 bp, synthetic construct
  misc_feature 1..20: note = chemically synthesized
  source 1..20: mol_type = other DNA
taagttaaaattcatgaaaa

SEQ ID NO: 3392 - DNA, 20 bp, synthetic construct
  misc_feature 1..20: note = chemically synthesized
  source 1..20: mol_type = other DNA
aaatagtatttctgaaaaaa

SEQ ID NO: 3393 - DNA, 20 bp, synthetic construct
  misc_feature 1..20: note = chemically synthesized
  source 1..20: mol_type = other DNA
atagtatttctgaaaaaatg

SEQ ID NO: 3394 - DNA, 20 bp, synthetic construct
  misc_feature 1..20: note = chemically synthesized
  source 1..20: mol_type = other DNA
aaaaatggagaatttcatta

SEQ ID NO: 3395 - DNA, 20 bp, synthetic construct
  misc_feature 1..20: note = chemically synthesized
  source 1..20: mol_type = other DNA
tttcaaaacctttgatcttt

SEQ ID NO: 3396 - DNA, 20 bp, synthetic construct
  misc_feature 1..20: note = chemically synthesized
  source 1..20: mol_type = other DNA
cctttgatctttgagtgcct

SEQ ID NO: 3397 - DNA, 20 bp, synthetic construct
  misc_feature 1..20: note = chemically synthesized
  source 1..20: mol_type = other DNA
agtgccttagcaaaattccg

SEQ ID NO: 3398 - DNA, 20 bp, synthetic construct
  misc_feature 1..20: note = chemically synthesized
  source 1..20: mol_type = other DNA
aaattccgtggacactttga

SEQ ID NO: 3399 - DNA, 20 bp, synthetic construct
  misc_feature 1..20: note = chemically synthesized
  source 1..20: mol_type = other DNA
ttgatagacaccatcatttt

SEQ ID NO: 3400 - DNA, 20 bp, synthetic construct
  misc_feature 1..20: note = chemically synthesized
  source 1..20: mol_type = other DNA
ccatcattttaagtgtgttt

SEQ ID NO: 3401 - DNA, 20 bp, synthetic construct
  misc_feature 1..20: note = chemically synthesized
  source 1..20: mol_type = other DNA
catcattttaagtgtgtttg

SEQ ID NO: 3402 - DNA, 20 bp, synthetic construct
  misc_feature 1..20: note = chemically synthesized
  source 1..20: mol_type = other DNA
agtgtgtttgaggatttcta

SEQ ID NO: 3403 - DNA, 20 bp, synthetic construct
  misc_feature 1..20: note = chemically synthesized
  source 1..20: mol_type = other DNA
atttattctattccctaaaa

SEQ ID NO: 3404 - DNA, 20 bp, synthetic construct
  misc_feature 1..20: note = chemically synthesized
  source 1..20: mol_type = other DNA
aacagactttttaatcttaa

SEQ ID NO: 3405 - DNA, 20 bp, synthetic construct
  misc_feature 1..20: note = chemically synthesized
  source 1..20: mol_type = other DNA
atcttaacagcatacactga

SEQ ID NO: 3406 - DNA, 20 bp, synthetic construct
  misc_feature 1..20: note = chemically synthesized
  source 1..20: mol_type = other DNA
tcttaacagcatacactgat

SEQ ID NO: 3407 - DNA, 20 bp, synthetic construct
  misc_feature 1..20: note = chemically synthesized
  source 1..20: mol_type = other DNA
ttaacagcatacactgatag

SEQ ID NO: 3408 - DNA, 20 bp, synthetic construct
  misc_feature 1..20: note = chemically synthesized
  source 1..20: mol_type = other DNA
aacagcatacactgatagga

SEQ ID NO: 3409 - DNA, 20 bp, synthetic construct
  misc_feature 1..20: note = chemically synthesized
  source 1..20: mol_type = other DNA
catacactgataggagagaa

SEQ ID NO: 3410 - DNA, 20 bp, synthetic construct
  misc_feature 1..20: note = chemically synthesized
  source 1..20: mol_type = other DNA
cactcgatctttaatttgtt

SEQ ID NO: 3411 - DNA, 20 bp, synthetic construct
  misc_feature 1..20: note = chemically synthesized
  source 1..20: mol_type = other DNA
ggtcttcaccccataaatga

SEQ ID NO: 3412 - DNA, 20 bp, synthetic construct
  misc_feature 1..20: note = chemically synthesized
  source 1..20: mol_type = other DNA
gtcttcaccccataaatgat

SEQ ID NO: 3413 - DNA, 20 bp, synthetic construct
  misc_feature 1..20: note = chemically synthesized
  source 1..20: mol_type = other DNA
tcttcaccccataaatgatg

SEQ ID NO: 3414 - DNA, 20 bp, synthetic construct
  misc_feature 1..20: note = chemically synthesized
  source 1..20: mol_type = other DNA
accccataaatgatggggtt

SEQ ID NO: 3415 - DNA, 20 bp, synthetic construct
  misc_feature 1..20: note = chemically synthesized
  source 1..20: mol_type = other DNA
ataaatgatggggtttagca

SEQ ID NO: 3416 - DNA, 20 bp, synthetic construct
  misc_feature 1..20: note = chemically synthesized
  source 1..20: mol_type = other DNA
taaatgatggggtttagcat

SEQ ID NO: 3417 - DNA, 20 bp, synthetic construct
  misc_feature 1..20: note = chemically synthesized
  source 1..20: mol_type = other DNA
aaatgatggggtttagcata

SEQ ID NO: 3418 - DNA, 20 bp, synthetic construct
  misc_feature 1..20: note = chemically synthesized
  source 1..20: mol_type = other DNA
aatgatggggtttagcatag

SEQ ID NO: 3419 - DNA, 20 bp, synthetic construct
  misc_feature 1..20: note = chemically synthesized
  source 1..20: mol_type = other DNA
atgatggggtttagcatagg

SEQ ID NO: 3420 - DNA, 20 bp, synthetic construct
  misc_feature 1..20: note = chemically synthesized
  source 1..20: mol_type = other DNA
gcatagggggcactaacaca

SEQ ID NO: 3421 - DNA, 20 bp, synthetic construct
  misc_feature 1..20: note = chemically synthesized
  source 1..20: mol_type = other DNA
atagggggcactaacacata

SEQ ID NO: 3422 - DNA, 20 bp, synthetic construct
  misc_feature 1..20: note = chemically synthesized
  source 1..20: mol_type = other DNA
aacacatagagactgcccac

SEQ ID NO: 3423 - DNA, 20 bp, synthetic construct
  misc_feature 1..20: note = chemically synthesized
  source 1..20: mol_type = other DNA
acacatagagactgcccact

SEQ ID NO: 3424 - DNA, 20 bp, synthetic construct
  misc_feature 1..20: note = chemically synthesized
  source 1..20: mol_type = other DNA
tgcccactaggatgtgaatg

SEQ ID NO: 3425 - DNA, 20 bp, synthetic construct
  misc_feature 1..20: note = chemically synthesized
  source 1..20: mol_type = other DNA
cactaggatgtgaatgtggt

SEQ ID NO: 3426 - DNA, 20 bp, synthetic construct
  misc_feature 1..20: note = chemically synthesized
  source 1..20: mol_type = other DNA
actaggatgtgaatgtggtg

SEQ ID NO: 3427 - DNA, 20 bp, synthetic construct
  misc_feature 1..20: note = chemically synthesized
  source 1..20: mol_type = other DNA
ctaggatgtgaatgtggtga

SEQ ID NO: 3428 - DNA, 20 bp, synthetic construct
  misc_feature 1..20: note = chemically synthesized
  source 1..20: mol_type = other DNA
gatgtgaatgtggtgaggga

SEQ ID NO: 3429 - DNA, 20 bp, synthetic construct
  misc_feature 1..20: note = chemically synthesized
  source 1..20: mol_type = other DNA
gagggatggttttacctcca

SEQ ID NO: 3430 - DNA, 20 bp, synthetic construct
  misc_feature 1..20: note = chemically synthesized
  source 1..20: mol_type = other DNA
tggttttacctccaaagcga

SEQ ID NO: 3431 - DNA, 20 bp, synthetic construct
  misc_feature 1..20: note = chemically synthesized
  source 1..20: mol_type = other DNA
ggttttacctccaaagcgat

SEQ ID NO: 3432 - DNA, 20 bp, synthetic construct
  misc_feature 1..20: note = chemically synthesized
  source 1..20: mol_type = other DNA
ttacctccaaagcgatgggc

SEQ ID NO: 3433 - DNA, 20 bp, synthetic construct
  misc_feature 1..20: note = chemically synthesized
  source 1..20: mol_type = other DNA
agcgatgggcaagaaatgaa

SEQ ID NO: 3434 - DNA, 20 bp, synthetic construct
  misc_feature 1..20: note = chemically synthesized
  source 1..20: mol_type = other DNA
gcaagaaatgaaaagaatgc

SEQ ID NO: 3435 - DNA, 20 bp, synthetic construct
  misc_feature 1..20: note = chemically synthesized
  source 1..20: mol_type = other DNA
caagaaatgaaaagaatgct

SEQ ID NO: 3436 - DNA, 20 bp, synthetic construct
  misc_feature 1..20: note = chemically synthesized
  source 1..20: mol_type = other DNA
aagaaatgaaaagaatgctg

SEQ ID NO: 3437 - DNA, 20 bp, synthetic construct
  misc_feature 1..20: note = chemically synthesized
  source 1..20: mol_type = other DNA
atgaaaagaatgctggggta

SEQ ID NO: 3438 - DNA, 20 bp, synthetic construct
  misc_feature 1..20: note = chemically synthesized
  source 1..20: mol_type = other DNA
tatagaacataaatatgaca

SEQ ID NO: 3439 - DNA, 20 bp, synthetic construct
  misc_feature 1..20: note = chemically synthesized
  source 1..20: mol_type = other DNA
cataaatatgacacagatat

SEQ ID NO: 3440 - DNA, 20 bp, synthetic construct
  misc_feature 1..20: note = chemically synthesized
  source 1..20: mol_type = other DNA
taaatatgacacagatatga

SEQ ID NO: 3441 - DNA, 20 bp, synthetic construct
  misc_feature 1..20: note = chemically synthesized
  source 1..20: mol_type = other DNA
atatgagagccgcacgtact

SEQ ID NO: 3442 - DNA, 20 bp, synthetic construct
  misc_feature 1..20: note = chemically synthesized
  source 1..20: mol_type = other DNA
tatgagagccgcacgtacta

SEQ ID NO: 3443 - DNA, 20 bp, synthetic construct
  misc_feature 1..20: note = chemically synthesized
  source 1..20: mol_type = other DNA
atgagagccgcacgtactaa

SEQ ID NO: 3444 - DNA, 20 bp, synthetic construct
  misc_feature 1..20: note = chemically synthesized
  source 1..20: mol_type = other DNA
cgtactaagggccttgaacc

SEQ ID NO: 3445 - DNA, 20 bp, synthetic construct
  misc_feature 1..20: note = chemically synthesized
  source 1..20: mol_type = other DNA
actaagggccttgaacctgg

SEQ ID NO: 3446 - DNA, 20 bp, synthetic construct
  misc_feature 1..20: note = chemically synthesized
  source 1..20: mol_type = other DNA
gggccttgaacctggcagcc

SEQ ID NO: 3447 - DNA, 20 bp, synthetic construct
  misc_feature 1..20: note = chemically synthesized
  source 1..20: mol_type = other DNA
ggccttgaacctggcagccc

SEQ ID NO: 3448 - DNA, 20 bp, synthetic construct
  misc_feature 1..20: note = chemically synthesized
  source 1..20: mol_type = other DNA
cttgaacctggcagcccagg

SEQ ID NO: 3449 - DNA, 20 bp, synthetic construct
  misc_feature 1..20: note = chemically synthesized
  source 1..20: mol_type = other DNA
aggaagatatctgaaacact

SEQ ID NO: 3450 - DNA, 20 bp, synthetic construct
  misc_feature 1..20: note = chemically synthesized
  source 1..20: mol_type = other DNA
gatatctgaaacactgagtg

SEQ ID NO: 3451 - DNA, 20 bp, synthetic construct
  misc_feature 1..20: note = chemically synthesized
  source 1..20: mol_type = other DNA
atatctgaaacactgagtga

SEQ ID NO: 3452 - DNA, 20 bp, synthetic construct
  misc_feature 1..20: note = chemically synthesized
  source 1..20: mol_type = other DNA
ctgagtgaaggatcattgtg

SEQ ID NO: 3453 - DNA, 20 bp, synthetic construct
  misc_feature 1..20: note = chemically synthesized
  source 1..20: mol_type = other DNA
tgagtgaaggatcattgtgt

SEQ ID NO: 3454 - DNA, 20 bp, synthetic construct
  misc_feature 1..20: note = chemically synthesized
  source 1..20: mol_type = other DNA
attgtgtaggatataatgat

SEQ ID NO: 3455 - DNA, 20 bp, synthetic construct
  misc_feature 1..20: note = chemically synthesized
  source 1..20: mol_type = other DNA
ataatgataagcactatatc

SEQ ID NO: 3456 - DNA, 20 bp, synthetic construct
  misc_feature 1..20: note = chemically synthesized
  source 1..20: mol_type = other DNA
aagcactatatccagtcctg

SEQ ID NO: 3457 - DNA, 20 bp, synthetic construct
  misc_feature 1..20: note = chemically synthesized
  source 1..20: mol_type = other DNA
gcactatatccagtcctgta

SEQ ID NO: 3458 - DNA, 20 bp, synthetic construct
  misc_feature 1..20: note = chemically synthesized
  source 1..20: mol_type = other DNA
actatatccagtcctgtaga

SEQ ID NO: 3459 - DNA, 20 bp, synthetic construct
  misc_feature 1..20: note = chemically synthesized
  source 1..20: mol_type = other DNA
atatccagtcctgtagagag

SEQ ID NO: 3460 - DNA, 20 bp, synthetic construct
  misc_feature 1..20: note = chemically synthesized
  source 1..20: mol_type = other DNA
tatccagtcctgtagagagt

SEQ ID NO: 3461 - DNA, 20 bp, synthetic construct
  misc_feature 1..20: note = chemically synthesized
  source 1..20: mol_type = other DNA
atccagtcctgtagagagta

SEQ ID NO: 3462 - DNA, 20 bp, synthetic construct
  misc_feature 1..20: note = chemically synthesized
  source 1..20: mol_type = other DNA
tcctgtagagagtagggcca

SEQ ID NO: 3463 - DNA, 20 bp, synthetic construct
  misc_feature 1..20: note = chemically synthesized
  source 1..20: mol_type = other DNA
gtagagagtagggccacagt

SEQ ID NO: 3464 - DNA, 20 bp, synthetic construct
  misc_feature 1..20: note = chemically synthesized
  source 1..20: mol_type = other DNA
tagagagtagggccacagtg

SEQ ID NO: 3465 - DNA, 20 bp, synthetic construct
  misc_feature 1..20: note = chemically synthesized
  source 1..20: mol_type = other DNA
attgacattgatattgccac

SEQ ID NO: 3466 - DNA, 20 bp, synthetic construct
  misc_feature 1..20: note = chemically synthesized
  source 1..20: mol_type = other DNA
gatattgccacaagccaatc

SEQ ID NO: 3467 - DNA, 20 bp, synthetic construct
  misc_feature 1..20: note = chemically synthesized
  source 1..20: mol_type = other DNA
ccaatctggcaatgtgctca

SEQ ID NO: 3468 - DNA, 20 bp, synthetic construct
  misc_feature 1..20: note = chemically synthesized
  source 1..20: mol_type = other DNA
atctggcaatgtgctcacag

SEQ ID NO: 3469 - DNA, 20 bp, synthetic construct
  misc_feature 1..20: note = chemically synthesized
  source 1..20: mol_type = other DNA
tctggcaatgtgctcacagt

SEQ ID NO: 3470 - DNA, 20 bp, synthetic construct
  misc_feature 1..20: note = chemically synthesized
  source 1..20: mol_type = other DNA
aatgtgctcacagtaggaat

SEQ ID NO: 3471 - DNA, 20 bp, synthetic construct
  misc_feature 1..20: note = chemically synthesized
  source 1..20: mol_type = other DNA
atgtgctcacagtaggaatg

SEQ ID NO: 3472 - DNA, 20 bp, synthetic construct
  misc_feature 1..20: note = chemically synthesized
  source 1..20: mol_type = other DNA
atgtttctcccacaatatgt

SEQ ID NO: 3473 - DNA, 20 bp, synthetic construct
  misc_feature 1..20: note = chemically synthesized
  source 1..20: mol_type = other DNA
ttctcccacaatatgtaagt

SEQ ID NO: 3474 - DNA, 20 bp, synthetic construct
  misc_feature 1..20: note = chemically synthesized
  source 1..20: mol_type = other DNA
caatatgtaagtcggtatac

SEQ ID NO: 3475 - DNA, 20 bp, synthetic construct
  misc_feature 1..20: note = chemically synthesized
  source 1..20: mol_type = other DNA
aatatgtaagtcggtatacc

SEQ ID NO: 3476 - DNA, 20 bp, synthetic construct
  misc_feature 1..20: note = chemically synthesized
  source 1..20: mol_type = other DNA
atgtaagtcggtataccagg

SEQ ID NO: 3477 - DNA, 20 bp, synthetic construct
  misc_feature 1..20: note = chemically synthesized
  source 1..20: mol_type = other DNA
cggtataccaggaagatgaa

SEQ ID NO: 3478 - DNA, 20 bp, synthetic construct
  misc_feature 1..20: note = chemically synthesized
  source 1..20: mol_type = other DNA
ataccaggaagatgaacgga

SEQ ID NO: 3479 - DNA, 20 bp, synthetic construct
  misc_feature 1..20: note = chemically synthesized
  source 1..20: mol_type = other DNA
ccaggaagatgaacggacag

SEQ ID NO: 3480 - DNA, 20 bp, synthetic construct
  misc_feature 1..20: note = chemically synthesized
  source 1..20: mol_type = other DNA
tgaacggacagcagatgaaa

SEQ ID NO: 3481 - DNA, 20 bp, synthetic construct
  misc_feature 1..20: note = chemically synthesized
  source 1..20: mol_type = other DNA
gatgaaaaagctcctgacca

SEQ ID NO: 3482 - DNA, 20 bp, synthetic construct
  misc_feature 1..20: note = chemically synthesized
  source 1..20: mol_type = other DNA
tgctatgccaatcttcctga

SEQ ID NO: 3483 - DNA, 20 bp, synthetic construct
  misc_feature 1..20: note = chemically synthesized
  source 1..20: mol_type = other DNA
caatcttcctgacggctgat

SEQ ID NO: 3484 - DNA, 20 bp, synthetic construct
  misc_feature 1..20: note = chemically synthesized
  source 1..20: mol_type = other DNA
aatcttcctgacggctgatg

SEQ ID NO: 3485 - DNA, 20 bp, synthetic construct
  misc_feature 1..20: note = chemically synthesized
  source 1..20: mol_type = other DNA
gacggctgatgaggttaaaa

SEQ ID NO: 3486 - DNA, 20 bp, synthetic construct
  misc_feature 1..20: note = chemically synthesized
  source 1..20: mol_type = other DNA
gaggttaaaatggtgtatct

SEQ ID NO: 3487 - DNA, 20 bp, synthetic construct
  misc_feature 1..20: note = chemically synthesized
  source 1..20: mol_type = other DNA
gttaaaatggtgtatctcag

SEQ ID NO: 3488 - DNA, 20 bp, synthetic construct
  misc_feature 1..20: note = chemically synthesized
  source 1..20: mol_type = other DNA
ttaaaatggtgtatctcagt

SEQ ID NO: 3489 - DNA, 20 bp, synthetic construct
  misc_feature 1..20: note = chemically synthesized
  source 1..20: mol_type = other DNA
tggtgtatctcagtgggtaa

SEQ ID NO: 3490 - DNA, 20 bp, synthetic construct
  misc_feature 1..20: note = chemically synthesized
  source 1..20: mol_type = other DNA
gtatctcagtgggtaacaga

SEQ ID NO: 3491 - DNA, 20 bp, synthetic construct
  misc_feature 1..20: note = chemically synthesized
  source 1..20: mol_type = other DNA
gtgggtaacagatggccaca

SEQ ID NO: 3492 - DNA, 20 bp, synthetic construct
  misc_feature 1..20: note = chemically synthesized
  source 1..20: mol_type = other DNA
ggtaacagatggccacatag

SEQ ID NO: 3493 - DNA, 20 bp, synthetic construct
  misc_feature 1..20: note = chemically synthesized
  source 1..20: mol_type = other DNA
tagcggtcaaatgccattgc

SEQ ID NO: 3494 - DNA, 20 bp, synthetic construct
  misc_feature 1..20: note = chemically synthesized
  source 1..20: mol_type = other DNA
agcggtcaaatgccattgcc

SEQ ID NO: 3495 - DNA, 20 bp, synthetic construct
  misc_feature 1..20: note = chemically synthesized
  source 1..20: mol_type = other DNA
cggtcaaatgccattgccag

SEQ ID NO: 3496 - DNA, 20 bp, synthetic construct
  misc_feature 1..20: note = chemically synthesized
  source 1..20: mol_type = other DNA
aaatgccattgccaggagaa

SEQ ID NO: 3497 - DNA, 20 bp, synthetic construct
  misc_feature 1..20: note = chemically synthesized
  source 1..20: mol_type = other DNA
tgccattgccaggagaatag

SEQ ID NO: 3498 - DNA, 20 bp, synthetic construct
  misc_feature 1..20: note = chemically synthesized
  source 1..20: mol_type = other DNA
gaatagcagattctgccaca

SEQ ID NO: 3499 - DNA, 20 bp, synthetic construct
  misc_feature 1..20: note = chemically synthesized
  source 1..20: mol_type = other DNA
ccacaaagatgaaatgtatg

SEQ ID NO: 3500 - DNA, 20 bp, synthetic construct
  misc_feature 1..20: note = chemically synthesized
  source 1..20: mol_type = other DNA
gaaatgtatgaagaacatct

SEQ ID NO: 3501 - DNA, 20 bp, synthetic construct
  misc_feature 1..20: note = chemically synthesized
  source 1..20: mol_type = other DNA
tctgagacacacaactacca

SEQ ID NO: 3502 - DNA, 20 bp, synthetic construct
  misc_feature 1..20: note = chemically synthesized
  source 1..20: mol_type = other DNA
ctgagacacacaactaccaa

SEQ ID NO: 3503 - DNA, 20 bp, synthetic construct
  misc_feature 1..20: note = chemically synthesized
  source 1..20: mol_type = other DNA
actaccaaaggatatgtcca

SEQ ID NO: 3504 - DNA, 20 bp, synthetic construct
  misc_feature 1..20: note = chemically synthesized
  source 1..20: mol_type = other DNA
taccaaaggatatgtccatg

SEQ ID NO: 3505 - DNA, 20 bp, synthetic construct
  misc_feature 1..20: note = chemically synthesized
  source 1..20: mol_type = other DNA
caaaggatatgtccatggag

SEQ ID NO: 3506 - DNA, 20 bp, synthetic construct
  misc_feature 1..20: note = chemically synthesized
  source 1..20: mol_type = other DNA
atatgtccatggagtggaac

SEQ ID NO: 3507 - DNA, 20 bp, synthetic construct
  misc_feature 1..20: note = chemically synthesized
  source 1..20: mol_type = other DNA
atgtccatggagtggaacca

SEQ ID NO: 3508 - DNA, 20 bp, synthetic construct
  misc_feature 1..20: note = chemically synthesized
  source 1..20: mol_type = other DNA
tgtccatggagtggaaccag

SEQ ID NO: 3509 - DNA, 20 bp, synthetic construct
  misc_feature 1..20: note = chemically synthesized
  source 1..20: mol_type = other DNA
catggagtggaaccagagga

SEQ ID NO: 3510 - DNA, 20 bp, synthetic construct
  misc_feature 1..20: note = chemically synthesized
  source 1..20: mol_type = other DNA
gagtggaaccagaggatagc

SEQ ID NO: 3511 - DNA, 20 bp, synthetic construct
  misc_feature 1..20: note = chemically synthesized
  source 1..20: mol_type = other DNA
ccagaggatagccagcacct

SEQ ID NO: 3512 - DNA, 20 bp, synthetic construct
  misc_feature 1..20: note = chemically synthesized
  source 1..20: mol_type = other DNA
cagaggatagccagcacctt

SEQ ID NO: 3513 - DNA, 20 bp, synthetic construct
  misc_feature 1..20: note = chemically synthesized
  source 1..20: mol_type = other DNA
agaggatagccagcacctta

SEQ ID NO: 3514 - DNA, 20 bp, synthetic construct
  misc_feature 1..20: note = chemically synthesized
  source 1..20: mol_type = other DNA
gaggatagccagcaccttag

SEQ ID NO: 3515 - DNA, 20 bp, synthetic construct
  misc_feature 1..20: note = chemically synthesized
  source 1..20: mol_type = other DNA
agccagcaccttaggggctg

SEQ ID NO: 3516 - DNA, 20 bp, synthetic construct
  misc_feature 1..20: note = chemically synthesized
  source 1..20: mol_type = other DNA
cagcaccttaggggctgcag

SEQ ID NO: 3517 - DNA, 20 bp, synthetic construct
  misc_feature 1..20: note = chemically synthesized
  source 1..20: mol_type = other DNA
caccttaggggctgcagcag

SEQ ID NO: 3518 - DNA, 20 bp, synthetic construct
  misc_feature 1..20: note = chemically synthesized
  source 1..20: mol_type = other DNA
ttaggggctgcagcagtggc

SEQ ID NO: 3519 - DNA, 20 bp, synthetic construct
  misc_feature 1..20: note = chemically synthesized
  source 1..20: mol_type = other DNA
ggggctgcagcagtggcgag

SEQ ID NO: 3520 - DNA, 20 bp, synthetic construct
  misc_feature 1..20: note = chemically synthesized
  source 1..20: mol_type = other DNA
gggctgcagcagtggcgagc

SEQ ID NO: 3521 - DNA, 20 bp, synthetic construct
  misc_feature 1..20: note = chemically synthesized
  source 1..20: mol_type = other DNA
ctgcagcagtggcgagcagg

SEQ ID NO: 3522 - DNA, 20 bp, synthetic construct
  misc_feature 1..20: note = chemically synthesized
  source 1..20: mol_type = other DNA
agcagtggcgagcaggaagt

SEQ ID NO: 3523 - DNA, 20 bp, synthetic construct
  misc_feature 1..20: note = chemically synthesized
  source 1..20: mol_type = other DNA
tggcgagcaggaagtcggct

SEQ ID NO: 3524 - DNA, 20 bp, synthetic construct
  misc_feature 1..20: note = chemically synthesized
  source 1..20: mol_type = other DNA
ggcgagcaggaagtcggctg

SEQ ID NO: 3525 - DNA, 20 bp, synthetic construct
  misc_feature 1..20: note = chemically synthesized
  source 1..20: mol_type = other DNA
agcaggaagtcggctgaggc

SEQ ID NO: 3526 - DNA, 20 bp, synthetic construct
  misc_feature 1..20: note = chemically synthesized
  source 1..20: mol_type = other DNA
gaagtcggctgaggccagca

SEQ ID NO: 3527 - DNA, 20 bp, synthetic construct
  misc_feature 1..20: note = chemically synthesized
  source 1..20: mol_type = other DNA
tcggctgaggccagcatgga

SEQ ID NO: 3528 - DNA, 20 bp, synthetic construct
  misc_feature 1..20: note = chemically synthesized
  source 1..20: mol_type = other DNA
cggctgaggccagcatggat

SEQ ID NO: 3529 - DNA, 20 bp, synthetic construct
  misc_feature 1..20: note = chemically synthesized
  source 1..20: mol_type = other DNA
ctgaggccagcatggatagg

SEQ ID NO: 3530 - DNA, 20 bp, synthetic construct
  misc_feature 1..20: note = chemically synthesized
  source 1..20: mol_type = other DNA
gaggccagcatggataggaa

SEQ ID NO: 3531 - DNA, 20 bp, synthetic construct
  misc_feature 1..20: note = chemically synthesized
  source 1..20: mol_type = other DNA
catggataggaagagataca

SEQ ID NO: 3532 - DNA, 20 bp, synthetic construct
  misc_feature 1..20: note = chemically synthesized
  source 1..20: mol_type = other DNA
atggataggaagagatacat

SEQ ID NO: 3533 - DNA, 20 bp, synthetic construct
  misc_feature 1..20: note = chemically synthesized
  source 1..20: mol_type = other DNA
ggaagagatacatgggctca

SEQ ID NO: 3534 - DNA, 20 bp, synthetic construct
  misc_feature 1..20: note = chemically synthesized
  source 1..20: mol_type = other DNA
aagagatacatgggctcatg

SEQ ID NO: 3535 - DNA, 20 bp, synthetic construct
  misc_feature 1..20: note = chemically synthesized
  source 1..20: mol_type = other DNA
gggctcatggagactgcgct

SEQ ID NO: 3536 - DNA, 20 bp, synthetic construct
  misc_feature 1..20: note = chemically synthesized
  source 1..20: mol_type = other DNA
agactgcgctcagtcatgat

SEQ ID NO: 3537 - DNA, 20 bp, synthetic construct
  misc_feature 1..20: note = chemically synthesized
  source 1..20: mol_type = other DNA
gactgcgctcagtcatgatc

SEQ ID NO: 3538 - DNA, 20 bp, synthetic construct
  misc_feature 1..20: note = chemically synthesized
  source 1..20: mol_type = other DNA
tgcgctcagtcatgatcagg

SEQ ID NO: 3539 - DNA, 20 bp, synthetic construct
  misc_feature 1..20: note = chemically synthesized
  source 1..20: mol_type = other DNA
cagtcatgatcaggaagatc

SEQ ID NO: 3540 - DNA, 20 bp, synthetic construct
  misc_feature 1..20: note = chemically synthesized
  source 1..20: mol_type = other DNA
tcatgatcaggaagatcaag

SEQ ID NO: 3541 - DNA, 20 bp, synthetic construct
  misc_feature 1..20: note = chemically synthesized
  source 1..20: mol_type = other DNA
caagaagatattgcctgcaa

SEQ ID NO: 3542 - DNA, 20 bp, synthetic construct
  misc_feature 1..20: note = chemically synthesized
  source 1..20: mol_type = other DNA
aacagccacaatgtacataa

SEQ ID NO: 3543 - DNA, 20 bp, synthetic construct
  misc_feature 1..20: note = chemically synthesized
  source 1..20: mol_type = other DNA
cacaatgtacataaaagaaa

SEQ ID NO: 3544 - DNA, 20 bp, synthetic construct
  misc_feature 1..20: note = chemically synthesized
  source 1..20: mol_type = other DNA
acaatgtacataaaagaaaa

SEQ ID NO: 3545 - DNA, 20 bp, synthetic construct
  misc_feature 1..20: note = chemically synthesized
  source 1..20: mol_type = other DNA
caatgtacataaaagaaaaa

SEQ ID NO: 3546 - DNA, 20 bp, synthetic construct
  misc_feature 1..20: note = chemically synthesized
  source 1..20: mol_type = other DNA
gtacataaaagaaaaaggga

SEQ ID NO: 3547 - DNA, 20 bp, synthetic construct
  misc_feature 1..20: note = chemically synthesized
  source 1..20: mol_type = other DNA
acataaaagaaaaagggatg

SEQ ID NO: 3548 - DNA, 20 bp, synthetic construct
  misc_feature 1..20: note = chemically synthesized
  source 1..20: mol_type = other DNA
aagaaaaagggatggagatc

SEQ ID NO: 3549 - DNA, 20 bp, synthetic construct
  misc_feature 1..20: note = chemically synthesized
  source 1..20: mol_type = other DNA
agaaaaagggatggagatcc

SEQ ID NO: 3550 - DNA, 20 bp, synthetic construct
  misc_feature 1..20: note = chemically synthesized
  source 1..20: mol_type = other DNA
ggatggagatccaggtatgc

SEQ ID NO: 3551 - DNA, 20 bp, synthetic construct
  misc_feature 1..20: note = chemically synthesized
  source 1..20: mol_type = other DNA
atccaggtatgcaagccttc

SEQ ID NO: 3552 - DNA, 20 bp, synthetic construct
  misc_feature 1..20: note = chemically synthesized
  source 1..20: mol_type = other DNA
gtatgcaagccttccagccc

SEQ ID NO: 3553 - DNA, 20 bp, synthetic construct
  misc_feature 1..20: note = chemically synthesized
  source 1..20: mol_type = other DNA
tatgcaagccttccagccct

SEQ ID NO: 3554 - DNA, 20 bp, synthetic construct
  misc_feature 1..20: note = chemically synthesized
  source 1..20: mol_type = other DNA
tccagccctgggattcccat

SEQ ID NO: 3555 - DNA, 20 bp, synthetic construct
  misc_feature 1..20: note = chemically synthesized
  source 1..20: mol_type = other DNA
ccagccctgggattcccatc

SEQ ID NO: 3556 - DNA, 20 bp, synthetic construct
  misc_feature 1..20: note = chemically synthesized
  source 1..20: mol_type = other DNA
tcaggacataccacacatcc

SEQ ID NO: 3557 - DNA, 20 bp, synthetic construct
  misc_feature 1..20: note = chemically synthesized
  source 1..20: mol_type = other DNA
caggacataccacacatcct

SEQ ID NO: 3558 - DNA, 20 bp, synthetic construct
  misc_feature 1..20: note = chemically synthesized
  source 1..20: mol_type = other DNA
ataccacacatcctgggaat

SEQ ID NO: 3559 - DNA, 20 bp, synthetic construct
  misc_feature 1..20: note = chemically synthesized
  source 1..20: mol_type = other DNA
gggaattagtgtgattgcga

SEQ ID NO: 3560 - DNA, 20 bp, synthetic construct
  misc_feature 1..20: note = chemically synthesized
  source 1..20: mol_type = other DNA
attagtgtgattgcgaaaga

SEQ ID NO: 3561 - DNA, 20 bp, synthetic construct
  misc_feature 1..20: note = chemically synthesized
  source 1..20: mol_type = other DNA
ttagtgtgattgcgaaagaa

SEQ ID NO: 3562 - DNA, 20 bp, synthetic construct
  misc_feature 1..20: note = chemically synthesized
  source 1..20: mol_type = other DNA
agtgtgattgcgaaagaaag

SEQ ID NO: 3563 - DNA, 20 bp, synthetic construct
  misc_feature 1..20: note = chemically synthesized
  source 1..20: mol_type = other DNA
aaagaaaggagccgtatgta

SEQ ID NO: 3564 - DNA, 20 bp, synthetic construct
  misc_feature 1..20: note = chemically synthesized
  source 1..20: mol_type = other DNA
gccgtatgtacagtttattc

SEQ ID NO: 3565 - DNA, 20 bp, synthetic construct
  misc_feature 1..20: note = chemically synthesized
  source 1..20: mol_type = other DNA
ccgtatgtacagtttattcc

SEQ ID NO: 3566 - DNA, 20 bp, synthetic construct
  misc_feature 1..20: note = chemically synthesized
  source 1..20: mol_type = other DNA
tgtacagtttattccaggcc

SEQ ID NO: 3567 - DNA, 20 bp, synthetic construct
  misc_feature 1..20: note = chemically synthesized
  source 1..20: mol_type = other DNA
tattccaggcctagtgccat

SEQ ID NO: 3568 - DNA, 20 bp, synthetic construct
  misc_feature 1..20: note = chemically synthesized
  source 1..20: mol_type = other DNA
aggcctagtgccattagtga

SEQ ID NO: 3569 - DNA, 20 bp, synthetic construct
  misc_feature 1..20: note = chemically synthesized
  source 1..20: mol_type = other DNA
gccattagtgaaagactaca

SEQ ID NO: 3570 - DNA, 20 bp, synthetic construct
  misc_feature 1..20: note = chemically synthesized
  source 1..20: mol_type = other DNA
tagtgaaagactacaaagtt

SEQ ID NO: 3571 - DNA, 20 bp, synthetic construct
  misc_feature 1..20: note = chemically synthesized
  source 1..20: mol_type = other DNA
agtgaaagactacaaagttg

SEQ ID NO: 3572 - DNA, 20 bp, synthetic construct
  misc_feature 1..20: note = chemically synthesized
  source 1..20: mol_type = other DNA
agactacaaagttgaggatt

SEQ ID NO: 3573 - DNA, 20 bp, synthetic construct
  misc_feature 1..20: note = chemically synthesized
  source 1..20: mol_type = other DNA
aggatttagaaacactacct

SEQ ID NO: 3574 - DNA, 20 bp, synthetic construct
  misc_feature 1..20: note = chemically synthesized
  source 1..20: mol_type = other DNA
ggatttagaaacactacctt

SEQ ID NO: 3575 - DNA, 20 bp, synthetic construct
  misc_feature 1..20: note = chemically synthesized
  source 1..20: mol_type = other DNA
aacactaccttaggctgaat

SEQ ID NO: 3576 - DNA, 20 bp, synthetic construct
  misc_feature 1..20: note = chemically synthesized
  source 1..20: mol_type = other DNA
acactaccttaggctgaatg

SEQ ID NO: 3577 - DNA, 20 bp, synthetic construct
  misc_feature 1..20: note = chemically synthesized
  source 1..20: mol_type = other DNA
taggctgaatgaggtctcat

SEQ ID NO: 3578 - DNA, 20 bp, synthetic construct
  misc_feature 1..20: note = chemically synthesized
  source 1..20: mol_type = other DNA
ctttccaatgttttcttctc

SEQ ID NO: 3579 - DNA, 20 bp, synthetic construct
  misc_feature 1..20: note = chemically synthesized
  source 1..20: mol_type = other DNA
tttccaatgttttcttctct

SEQ ID NO: 3580 - DNA, 20 bp, synthetic construct
  misc_feature 1..20: note = chemically synthesized
  source 1..20: mol_type = other DNA
caatgttttcttctctggga

SEQ ID NO: 3581 - DNA, 20 bp, synthetic construct
  misc_feature 1..20: note = chemically synthesized
  source 1..20: mol_type = other DNA
aatgttttcttctctgggaa

SEQ ID NO: 3582 - DNA, 20 bp, synthetic construct
  misc_feature 1..20: note = chemically synthesized
  source 1..20: mol_type = other DNA
tgttttcttctctgggaaag

SEQ ID NO: 3583 - DNA, 20 bp, synthetic construct
  misc_feature 1..20: note = chemically synthesized
  source 1..20: mol_type = other DNA
ttttcttctctgggaaagga

SEQ ID NO: 3584 - DNA, 20 bp, synthetic construct
  misc_feature 1..20: note = chemically synthesized
  source 1..20: mol_type = other DNA
tctgggaaaggagagtaaaa

SEQ ID NO: 3585 - DNA, 20 bp, synthetic construct
  misc_feature 1..20: note = chemically synthesized
  source 1..20: mol_type = other DNA
ctgggaaaggagagtaaaat

SEQ ID NO: 3586 - DNA, 20 bp, synthetic construct
  misc_feature 1..20: note = chemically synthesized
  source 1..20: mol_type = other DNA
aggagagtaaaatgggttaa

SEQ ID NO: 3587 - DNA, 20 bp, synthetic construct
  misc_feature 1..20: note = chemically synthesized
  source 1..20: mol_type = other DNA
ggttaatagaccgaatatat

SEQ ID NO: 3588 - DNA, 20 bp, synthetic construct
  misc_feature 1..20: note = chemically synthesized
  source 1..20: mol_type = other DNA
ttttttgtaccttaaaaaat

SEQ ID NO: 3589 - DNA, 20 bp, synthetic construct
  misc_feature 1..20: note = chemically synthesized
  source 1..20: mol_type = other DNA
tttgtaccttaaaaaattag

SEQ ID NO: 3590 - DNA, 20 bp, synthetic construct
  misc_feature 1..20: note = chemically synthesized
  source 1..20: mol_type = other DNA
cttcacaataacctattgaa

SEQ ID NO: 3591 - DNA, 20 bp, synthetic construct
  misc_feature 1..20: note = chemically synthesized
  source 1..20: mol_type = other DNA
tataaatactattatttcta

SEQ ID NO: 3592 - DNA, 20 bp, synthetic construct
  misc_feature 1..20: note = chemically synthesized
  source 1..20: mol_type = other DNA
acagatgtaaaaaaaaccca

SEQ ID NO: 3593 - DNA, 20 bp, synthetic construct
  misc_feature 1..20: note = chemically synthesized
  source 1..20: mol_type = other DNA
aaaaaaaacccacagacttt

SEQ ID NO: 3594 - DNA, 20 bp, synthetic construct
  misc_feature 1..20: note = chemically synthesized
  source 1..20: mol_type = other DNA
agactttcagcctcttaccc

SEQ ID NO: 3595 - DNA, 20 bp, synthetic construct
  misc_feature 1..20: note = chemically synthesized
  source 1..20: mol_type = other DNA
gactttcagcctcttaccct

SEQ ID NO: 3596 - DNA, 20 bp, synthetic construct
  misc_feature 1..20: note = chemically synthesized
  source 1..20: mol_type = other DNA
cctcttaccctaggccctac

SEQ ID NO: 3597 - DNA, 20 bp, synthetic construct
  misc_feature 1..20: note = chemically synthesized
  source 1..20: mol_type = other DNA
cctaggccctactggattta

SEQ ID NO: 3598 - DNA, 20 bp, synthetic construct
  misc_feature 1..20: note = chemically synthesized
  source 1..20: mol_type = other DNA
ggccctactggatttaaagt

SEQ ID NO: 3599 - DNA, 20 bp, synthetic construct
  misc_feature 1..20: note = chemically synthesized
  source 1..20: mol_type = other DNA
gccctactggatttaaagta

SEQ ID NO: 3600 - DNA, 20 bp, synthetic construct
  misc_feature 1..20: note = chemically synthesized
  source 1..20: mol_type = other DNA
ctactggatttaaagtaagg

SEQ ID NO: 3601 - DNA, 20 bp, synthetic construct
  misc_feature 1..20: note = chemically synthesized
  source 1..20: mol_type = other DNA
tactggatttaaagtaaggc

SEQ ID NO: 3602 - DNA, 20 bp, synthetic construct
  misc_feature 1..20: note = chemically synthesized
  source 1..20: mol_type = other DNA
gtaaggcaggataaatctga

SEQ ID NO: 3603 - DNA, 20 bp, synthetic construct
  misc_feature 1..20: note = chemically synthesized
  source 1..20: mol_type = other DNA
accatccaatgctgcctatc

SEQ ID NO: 3604 - DNA, 20 bp, synthetic construct
  misc_feature 1..20: note = chemically synthesized
  source 1..20: mol_type = other DNA
ccatccaatgctgcctatca

SEQ ID NO: 3605 - DNA, 20 bp, synthetic construct
  misc_feature 1..20: note = chemically synthesized
  source 1..20: mol_type = other DNA
gctgcctatcaaggtaaaac

SEQ ID NO: 3606 - DNA, 20 bp, synthetic construct
  misc_feature 1..20: note = chemically synthesized
  source 1..20: mol_type = other DNA
gtaaaactagatataaaacg

SEQ ID NO: 3607 - DNA, 20 bp, synthetic construct
  misc_feature 1..20: note = chemically synthesized
  source 1..20: mol_type = other DNA
tttttactgatcatatccct

SEQ ID NO: 3608 - DNA, 20 bp, synthetic construct
  misc_feature 1..20: note = chemically synthesized
  source 1..20: mol_type = other DNA
ttttactgatcatatcccta

SEQ ID NO: 3609 - DNA, 20 bp, synthetic construct
  misc_feature 1..20: note = chemically synthesized
  source 1..20: mol_type = other DNA
gatcatatccctaaggaaaa

SEQ ID NO: 3610 - DNA, 20 bp, synthetic construct
  misc_feature 1..20: note = chemically synthesized
  source 1..20: mol_type = other DNA
tcatatccctaaggaaaata

SEQ ID NO: 3611 - DNA, 20 bp, synthetic construct
  misc_feature 1..20: note = chemically synthesized
  source 1..20: mol_type = other DNA
atatccctaaggaaaataga

SEQ ID NO: 3612 - DNA, 20 bp, synthetic construct
  misc_feature 1..20: note = chemically synthesized
  source 1..20: mol_type = other DNA
aaatagagagttatgaaatt

SEQ ID NO: 3613 - DNA, 20 bp, synthetic construct
  misc_feature 1..20: note = chemically synthesized
  source 1..20: mol_type = other DNA
aaatttagttgtgctgctta

SEQ ID NO: 3614 - DNA, 20 bp, synthetic construct
  misc_feature 1..20: note = chemically synthesized
  source 1..20: mol_type = other DNA
agttgtgctgcttacagaaa

SEQ ID NO: 3615 - DNA, 20 bp, synthetic construct
  misc_feature 1..20: note = chemically synthesized
  source 1..20: mol_type = other DNA
gttgtgctgcttacagaaat

SEQ ID NO: 3616 - DNA, 20 bp, synthetic construct
  misc_feature 1..20: note = chemically synthesized
  source 1..20: mol_type = other DNA
tgtgctgcttacagaaatgg

SEQ ID NO: 3617 - DNA, 20 bp, synthetic construct
  misc_feature 1..20: note = chemically synthesized
  source 1..20: mol_type = other DNA
gtgctgcttacagaaatggg

SEQ ID NO: 3618 - DNA, 20 bp, synthetic construct
  misc_feature 1..20: note = chemically synthesized
  source 1..20: mol_type = other DNA
tgctgcttacagaaatggga

SEQ ID NO: 3619 - DNA, 20 bp, synthetic construct
  misc_feature 1..20: note = chemically synthesized
  source 1..20: mol_type = other DNA
tacagaaatgggagggaatt

SEQ ID NO: 3620 - DNA, 20 bp, synthetic construct
  misc_feature 1..20: note = chemically synthesized
  source 1..20: mol_type = other DNA
gggaattaagtctgacaaaa

SEQ ID NO: 3621 - DNA, 20 bp, synthetic construct
  misc_feature 1..20: note = chemically synthesized
  source 1..20: mol_type = other DNA
agtctgacaaaatagatttc

SEQ ID NO: 3622 - DNA, 20 bp, synthetic construct
  misc_feature 1..20: note = chemically synthesized
  source 1..20: mol_type = other DNA
aaaatagatttcaagcaata

SEQ ID NO: 3623 - DNA, 20 bp, synthetic construct
  misc_feature 1..20: note = chemically synthesized
  source 1..20: mol_type = other DNA
atgccttcttccacattgat

SEQ ID NO: 3624 - DNA, 20 bp, synthetic construct
  misc_feature 1..20: note = chemically synthesized
  source 1..20: mol_type = other DNA
attggccttaacttattgtt

SEQ ID NO: 3625 - DNA, 20 bp, synthetic construct
  misc_feature 1..20: note = chemically synthesized
  source 1..20: mol_type = other DNA
cttattgttaagccatatgc

SEQ ID NO: 3626 - DNA, 20 bp, synthetic construct
  misc_feature 1..20: note = chemically synthesized
  source 1..20: mol_type = other DNA
aagccatatgctagccattg

SEQ ID NO: 3627 - DNA, 20 bp, synthetic construct
  misc_feature 1..20: note = chemically synthesized
  source 1..20: mol_type = other DNA
tgctagccattgaagacata

SEQ ID NO: 3628 - DNA, 20 bp, synthetic construct
  misc_feature 1..20: note = chemically synthesized
  source 1..20: mol_type = other DNA
taatctatttctcaaaaata

SEQ ID NO: 3629 - DNA, 20 bp, synthetic construct
  misc_feature 1..20: note = chemically synthesized
  source 1..20: mol_type = other DNA
aatctatttctcaaaaatat

SEQ ID NO: 3630 - DNA, 20 bp, synthetic construct
  misc_feature 1..20: note = chemically synthesized
  source 1..20: mol_type = other DNA
ggataaaacattataaactt

SEQ ID NO: 3631 - DNA, 20 bp, synthetic construct
  misc_feature 1..20: note = chemically synthesized
  source 1..20: mol_type = other DNA
taaactttagatatttgcaa

SEQ ID NO: 3632 - DNA, 20 bp, synthetic construct
  misc_feature 1..20: note = chemically synthesized
  source 1..20: mol_type = other DNA
actttagatatttgcaatgg

SEQ ID NO: 3633 - DNA, 20 bp, synthetic construct
  misc_feature 1..20: note = chemically synthesized
  source 1..20: mol_type = other DNA
tagatatttgcaatggcaga

SEQ ID NO: 3634 - DNA, 20 bp, synthetic construct
  misc_feature 1..20: note = chemically synthesized
  source 1..20: mol_type = other DNA
gatatttgcaatggcagacg

SEQ ID NO: 3635 - DNA, 20 bp, synthetic construct
  misc_feature 1..20: note = chemically synthesized
  source 1..20: mol_type = other DNA
tttgcaatggcagacggagc

SEQ ID NO: 3636 - DNA, 20 bp, synthetic construct
  misc_feature 1..20: note = chemically synthesized
  source 1..20: mol_type = other DNA
ttgcaatggcagacggagct

SEQ ID NO: 3637 - DNA, 20 bp, synthetic construct
  misc_feature 1..20: note = chemically synthesized
  source 1..20: mol_type = other DNA
gggtttttaaatctatatgc

SEQ ID NO: 3638 - DNA, 20 bp, synthetic construct
  misc_feature 1..20: note = chemically synthesized
  source 1..20: mol_type = other DNA
tttaaatctatatgccagcc

SEQ ID NO: 3639 - DNA, 20 bp, synthetic construct
  misc_feature 1..20: note = chemically synthesized
  source 1..20: mol_type = other DNA
atctatatgccagcctggca

SEQ ID NO: 3640 - DNA, 20 bp, synthetic construct
  misc_feature 1..20: note = chemically synthesized
  source 1..20: mol_type = other DNA
tatatgccagcctggcacgg

SEQ ID NO: 3641 - DNA, 20 bp, synthetic construct
  misc_feature 1..20: note = chemically synthesized
  source 1..20: mol_type = other DNA
gtggctcacacctgtaatcc

SEQ ID NO: 3642 - DNA, 20 bp, synthetic construct
  misc_feature 1..20: note = chemically synthesized
  source 1..20: mol_type = other DNA
acctgtaatcccagcacttt

SEQ ID NO: 3643 - DNA, 20 bp, synthetic construct
  misc_feature 1..20: note = chemically synthesized
  source 1..20: mol_type = other DNA
ctgtaatcccagcactttga

SEQ ID NO: 3644 - DNA, 20 bp, synthetic construct
  misc_feature 1..20: note = chemically synthesized
  source 1..20: mol_type = other DNA
tgtaatcccagcactttgag

SEQ ID NO: 3645 - DNA, 20 bp, synthetic construct
  misc_feature 1..20: note = chemically synthesized
  source 1..20: mol_type = other DNA
tcccagcactttgagaggct

SEQ ID NO: 3646 - DNA, 20 bp, synthetic construct
  misc_feature 1..20: note = chemically synthesized
  source 1..20: mol_type = other DNA
cccagcactttgagaggctg

SEQ ID NO: 3647 - DNA, 20 bp, synthetic construct
  misc_feature 1..20: note = chemically synthesized
  source 1..20: mol_type = other DNA
agcactttgagaggctgagg

SEQ ID NO: 3648 - DNA, 20 bp, synthetic construct
  misc_feature 1..20: note = chemically synthesized
  source 1..20: mol_type = other DNA
gcactttgagaggctgaggc

SEQ ID NO: 3649 - DNA, 20 bp, synthetic construct
  misc_feature 1..20: note = chemically synthesized
  source 1..20: mol_type = other DNA
ctttgagaggctgaggcggg

SEQ ID NO: 3650 - DNA, 20 bp, synthetic construct
  misc_feature 1..20: note = chemically synthesized
  source 1..20: mol_type = other DNA
ggctgaggcgggtagatcac

SEQ ID NO: 3651 - DNA, 20 bp, synthetic construct
  misc_feature 1..20: note = chemically synthesized
  source 1..20: mol_type = other DNA
gctgaggcgggtagatcaca

SEQ ID NO: 3652 - DNA, 20 bp, synthetic construct
  misc_feature 1..20: note = chemically synthesized
  source 1..20: mol_type = other DNA
aggcgggtagatcacaaggt

SEQ ID NO: 3653 - DNA, 20 bp, synthetic construct
  misc_feature 1..20: note = chemically synthesized
  source 1..20: mol_type = other DNA
ggcgggtagatcacaaggtc

SEQ ID NO: 3654 - DNA, 20 bp, synthetic construct
  misc_feature 1..20: note = chemically synthesized
  source 1..20: mol_type = other DNA
cgggtagatcacaaggtcag

SEQ ID NO: 3655 - DNA, 20 bp, synthetic construct
  misc_feature 1..20: note = chemically synthesized
  source 1..20: mol_type = other DNA
gatcacaaggtcaggagttc

SEQ ID NO: 3656 - DNA, 20 bp, synthetic construct
  misc_feature 1..20: note = chemically synthesized
  source 1..20: mol_type = other DNA
caaggtcaggagttccagac

SEQ ID NO: 3657 - DNA, 20 bp, synthetic construct
  misc_feature 1..20: note = chemically synthesized
  source 1..20: mol_type = other DNA
tctactaaaaatacaaaaat

SEQ ID NO: 3658 - DNA, 20 bp, synthetic construct
  misc_feature 1..20: note = chemically synthesized
  source 1..20: mol_type = other DNA
ctaaaaatacaaaaattagc

SEQ ID NO: 3659 - DNA, 20 bp, synthetic construct
  misc_feature 1..20: note = chemically synthesized
  source 1..20: mol_type = other DNA
taaaaatacaaaaattagct

SEQ ID NO: 3660 - DNA, 20 bp, synthetic construct
  misc_feature 1..20: note = chemically synthesized
  source 1..20: mol_type = other DNA
atacaaaaattagctgggca

SEQ ID NO: 3661 - DNA, 20 bp, synthetic construct
  misc_feature 1..20: note = chemically synthesized
  source 1..20: mol_type = other DNA
caaaaattagctgggcatag

SEQ ID NO: 3662 - DNA, 20 bp, synthetic construct
  misc_feature 1..20: note = chemically synthesized
  source 1..20: mol_type = other DNA
gtggtgtgcacctttaatcc

SEQ ID NO: 3663 - DNA, 20 bp, synthetic construct
  misc_feature 1..20: note = chemically synthesized
  source 1..20: mol_type = other DNA
acctttaatcccagctactc

SEQ ID NO: 3664 - DNA, 20 bp, synthetic construct
  misc_feature 1..20: note = chemically synthesized
  source 1..20: mol_type = other DNA
ctttaatcccagctactcaa

SEQ ID NO: 3665 - DNA, 20 bp, synthetic construct
  misc_feature 1..20: note = chemically synthesized
  source 1..20: mol_type = other DNA
tttaatcccagctactcaag

SEQ ID NO: 3666 - DNA, 20 bp, synthetic construct
  misc_feature 1..20: note = chemically synthesized
  source 1..20: mol_type = other DNA
tcccagctactcaagaggct

SEQ ID NO: 3667 - DNA, 20 bp, synthetic construct
  misc_feature 1..20: note = chemically synthesized
  source 1..20: mol_type = other DNA
cccagctactcaagaggctg

SEQ ID NO: 3668 - DNA, 20 bp, synthetic construct
  misc_feature 1..20: note = chemically synthesized
  source 1..20: mol_type = other DNA
agctactcaagaggctgagg

SEQ ID NO: 3669 - DNA, 20 bp, synthetic construct
  misc_feature 1..20: note = chemically synthesized
  source 1..20: mol_type = other DNA
gctactcaagaggctgaggc

SEQ ID NO: 3670 - DNA, 20 bp, synthetic construct
  misc_feature 1..20: note = chemically synthesized
  source 1..20: mol_type = other DNA
tactcaagaggctgaggcag

SEQ ID NO: 3671 - DNA, 20 bp, synthetic construct
  misc_feature 1..20: note = chemically synthesized
  source 1..20: mol_type = other DNA
gcaggagaatcgcttgaacc

SEQ ID NO: 3672 - DNA, 20 bp, synthetic construct
  misc_feature 1..20: note = chemically synthesized
  source 1..20: mol_type = other DNA
caggagaatcgcttgaacct

SEQ ID NO: 3673 - DNA, 20 bp, synthetic construct
  misc_feature 1..20: note = chemically synthesized
  source 1..20: mol_type = other DNA
ggagaatcgcttgaacctgg

SEQ ID NO: 3674 - DNA, 20 bp, synthetic construct
  misc_feature 1..20: note = chemically synthesized
  source 1..20: mol_type = other DNA
gagaatcgcttgaacctggg

SEQ ID NO: 3675 - DNA, 20 bp, synthetic construct
  misc_feature 1..20: note = chemically synthesized
  source 1..20: mol_type = other DNA
aatcgcttgaacctgggagg

SEQ ID NO: 3676 - DNA, 20 bp, synthetic construct
  misc_feature 1..20: note = chemically synthesized
  source 1..20: mol_type = other DNA
cgcttgaacctgggaggcag

SEQ ID NO: 3677 - DNA, 20 bp, synthetic construct
  misc_feature 1..20: note = chemically synthesized
  source 1..20: mol_type = other DNA
aacctgggaggcagaagttt

SEQ ID NO: 3678 - DNA, 20 bp, synthetic construct
  misc_feature 1..20: note = chemically synthesized
  source 1..20: mol_type = other DNA
tgggaggcagaagtttcagt

SEQ ID NO: 3679 - DNA, 20 bp, synthetic construct
  misc_feature 1..20: note = chemically synthesized
  source 1..20: mol_type = other DNA
gaggcagaagtttcagtgag

SEQ ID NO: 3680 - DNA, 20 bp, synthetic construct
  misc_feature 1..20: note = chemically synthesized
  source 1..20: mol_type = other DNA
ggcagaagtttcagtgagca

SEQ ID NO: 3681 - DNA, 20 bp, synthetic construct
  misc_feature 1..20: note = chemically synthesized
  source 1..20: mol_type = other DNA
gagatcgcgcaactgcactc

SEQ ID NO: 3682 - DNA, 20 bp, synthetic construct
  misc_feature 1..20: note = chemically synthesized
  source 1..20: mol_type = other DNA
cgcgcaactgcactccagcc

SEQ ID NO: 3683 - DNA, 20 bp, synthetic construct
  misc_feature 1..20: note = chemically synthesized
  source 1..20: mol_type = other DNA
gcgcaactgcactccagcct

SEQ ID NO: 3684 - DNA, 20 bp, synthetic construct
  misc_feature 1..20: note = chemically synthesized
  source 1..20: mol_type = other DNA
ctgcactccagcctaggtga

SEQ ID NO: 3685 - DNA, 20 bp, synthetic construct
  misc_feature 1..20: note = chemically synthesized
  source 1..20: mol_type = other DNA
gcactccagcctaggtgaca

SEQ ID NO: 3686 - DNA, 20 bp, synthetic construct
  misc_feature 1..20: note = chemically synthesized
  source 1..20: mol_type = other DNA
tccagcctaggtgacagagc

SEQ ID NO: 3687 - DNA, 20 bp, synthetic construct
  misc_feature 1..20: note = chemically synthesized
  source 1..20: mol_type = other DNA
agactccctctcaaaaaaaa

SEQ ID NO: 3688 - DNA, 20 bp, synthetic construct
  misc_feature 1..20: note = chemically synthesized
  source 1..20: mol_type = other DNA
aaaaaaaagtatatgcctca

SEQ ID NO: 3689 - DNA, 20 bp, synthetic construct
  misc_feature 1..20: note = chemically synthesized
  source 1..20: mol_type = other DNA
aaaaaaagtatatgcctcat

SEQ ID NO: 3690 - DNA, 20 bp, synthetic construct
  misc_feature 1..20: note = chemically synthesized
  source 1..20: mol_type = other DNA
aaaagtatatgcctcatagg

SEQ ID NO: 3691 - DNA, 20 bp, synthetic construct
  misc_feature 1..20: note = chemically synthesized
  source 1..20: mol_type = other DNA
tatatgcctcataggtggta

SEQ ID NO: 3692 - DNA, 20 bp, synthetic construct
  misc_feature 1..20: note = chemically synthesized
  source 1..20: mol_type = other DNA
tattttgtttctttccactt

SEQ ID NO: 3693 - DNA, 20 bp, synthetic construct
  misc_feature 1..20: note = chemically synthesized
  source 1..20: mol_type = other DNA
ttcagtcactgattgaaaat

SEQ ID NO: 3694 - DNA, 20 bp, synthetic construct
  misc_feature 1..20: note = chemically synthesized
  source 1..20: mol_type = other DNA
atatatgtttattatacttt

SEQ ID NO: 3695 - DNA, 20 bp, synthetic construct
  misc_feature 1..20: note = chemically synthesized
  source 1..20: mol_type = other DNA
gtttattatactttaagttc

SEQ ID NO: 3696 - DNA, 20 bp, synthetic construct
  misc_feature 1..20: note = chemically synthesized
  source 1..20: mol_type = other DNA
tttattatactttaagttct

SEQ ID NO: 3697 - DNA, 20 bp, synthetic construct
  misc_feature 1..20: note = chemically synthesized
  source 1..20: mol_type = other DNA
ttattatactttaagttcta

SEQ ID NO: 3698 - DNA, 20 bp, synthetic construct
  misc_feature 1..20: note = chemically synthesized
  source 1..20: mol_type = other DNA
gggtacatgtgcacaacatg

SEQ ID NO: 3699 - DNA, 20 bp, synthetic construct
  misc_feature 1..20: note = chemically synthesized
  source 1..20: mol_type = other DNA
ggtacatgtgcacaacatgc

SEQ ID NO: 3700 - DNA, 20 bp, synthetic construct
  misc_feature 1..20: note = chemically synthesized
  source 1..20: mol_type = other DNA
tatgtatacatgtgccatgt

SEQ ID NO: 3701 - DNA, 20 bp, synthetic construct
  misc_feature 1..20: note = chemically synthesized
  source 1..20: mol_type = other DNA
cattaactcgtcatttacat

SEQ ID NO: 3702 - DNA, 20 bp, synthetic construct
  misc_feature 1..20: note = chemically synthesized
  source 1..20: mol_type = other DNA
attaactcgtcatttacatt

SEQ ID NO: 3703 - DNA, 20 bp, synthetic construct
  misc_feature 1..20: note = chemically synthesized
  source 1..20: mol_type = other DNA
cctaatgctatccctccccc

SEQ ID NO: 3704 - DNA, 20 bp, synthetic construct
  misc_feature 1..20: note = chemically synthesized
  source 1..20: mol_type = other DNA
ccccggcccccaccccacaa

SEQ ID NO: 3705 - DNA, 20 bp, synthetic construct
  misc_feature 1..20: note = chemically synthesized
  source 1..20: mol_type = other DNA
cccggcccccaccccacaac

SEQ ID NO: 3706 - DNA, 20 bp, synthetic construct
  misc_feature 1..20: note = chemically synthesized
  source 1..20: mol_type = other DNA
ccccaccccacaacaggccc

SEQ ID NO: 3707 - DNA, 20 bp, synthetic construct
  misc_feature 1..20: note = chemically synthesized
  source 1..20: mol_type = other DNA
attgttcaactcccacctat

SEQ ID NO: 3708 - DNA, 20 bp, synthetic construct
  misc_feature 1..20: note = chemically synthesized
  source 1..20: mol_type = other DNA
ttcaactcccacctatgagt

SEQ ID NO: 3709 - DNA, 20 bp, synthetic construct
  misc_feature 1..20: note = chemically synthesized
  source 1..20: mol_type = other DNA
cacctatgagtgagaatatg

SEQ ID NO: 3710 - DNA, 20 bp, synthetic construct
  misc_feature 1..20: note = chemically synthesized
  source 1..20: mol_type = other DNA
gagtgagaatatgtggtgtt

SEQ ID NO: 3711 - DNA, 20 bp, synthetic construct
  misc_feature 1..20: note = chemically synthesized
  source 1..20: mol_type = other DNA
cgtccttgcgatactttgct

SEQ ID NO: 3712 - DNA, 20 bp, synthetic construct
  misc_feature 1..20: note = chemically synthesized
  source 1..20: mol_type = other DNA
cgatactttgctcagaatga

SEQ ID NO: 3713 - DNA, 20 bp, synthetic construct
  misc_feature 1..20: note = chemically synthesized
  source 1..20: mol_type = other DNA
ttgctcagaatgatggtttc

SEQ ID NO: 3714 - DNA, 20 bp, synthetic construct
  misc_feature 1..20: note = chemically synthesized
  source 1..20: mol_type = other DNA
gtttcatccatgtccctaca

SEQ ID NO: 3715 - DNA, 20 bp, synthetic construct
  misc_feature 1..20: note = chemically synthesized
  source 1..20: mol_type = other DNA
tttcatccatgtccctacaa

SEQ ID NO: 3716 - DNA, 20 bp, synthetic construct
  misc_feature 1..20: note = chemically synthesized
  source 1..20: mol_type = other DNA
catgaactcatcatttttta

SEQ ID NO: 3717 - DNA, 20 bp, synthetic construct
  misc_feature 1..20: note = chemically synthesized
  source 1..20: mol_type = other DNA
catcattttttatggctgca

SEQ ID NO: 3718 - DNA, 20 bp, synthetic construct
  misc_feature 1..20: note = chemically synthesized
  source 1..20: mol_type = other DNA
tgtgccacattttcttaatc

SEQ ID NO: 3719 - DNA, 20 bp, synthetic construct
  misc_feature 1..20: note = chemically synthesized
  source 1..20: mol_type = other DNA
ttaatccagtctatcattgt

SEQ ID NO: 3720 - DNA, 20 bp, synthetic construct
  misc_feature 1..20: note = chemically synthesized
  source 1..20: mol_type = other DNA
gtctatcattgttggacatt

SEQ ID NO: 3721 - DNA, 20 bp, synthetic construct
  misc_feature 1..20: note = chemically synthesized
  source 1..20: mol_type = other DNA
tctatcattgttggacattt

SEQ ID NO: 3722 - DNA, 20 bp, synthetic construct
  misc_feature 1..20: note = chemically synthesized
  source 1..20: mol_type = other DNA
tcattgttggacatttgggt

SEQ ID NO: 3723 - DNA, 20 bp, synthetic construct
  misc_feature 1..20: note = chemically synthesized
  source 1..20: mol_type = other DNA
tggacatttgggttggttcc

SEQ ID NO: 3724 - DNA, 20 bp, synthetic construct
  misc_feature 1..20: note = chemically synthesized
  source 1..20: mol_type = other DNA
caagtctttgctattgtgaa

SEQ ID NO: 3725 - DNA, 20 bp, synthetic construct
  misc_feature 1..20: note = chemically synthesized
  source 1..20: mol_type = other DNA
tacgtgtgcatgtgtcttta

SEQ ID NO: 3726 - DNA, 20 bp, synthetic construct
  misc_feature 1..20: note = chemically synthesized
  source 1..20: mol_type = other DNA
gtgtgcatgtgtctttatag

SEQ ID NO: 3727 - DNA, 20 bp, synthetic construct
  misc_feature 1..20: note = chemically synthesized
  source 1..20: mol_type = other DNA
cagcatgatttacattcctt

SEQ ID NO: 3728 - DNA, 20 bp, synthetic construct
  misc_feature 1..20: note = chemically synthesized
  source 1..20: mol_type = other DNA
agcatgatttacattccttt

SEQ ID NO: 3729 - DNA, 20 bp, synthetic construct
  misc_feature 1..20: note = chemically synthesized
  source 1..20: mol_type = other DNA
cattcctttgggtatatacc

SEQ ID NO: 3730 - DNA, 20 bp, synthetic construct
  misc_feature 1..20: note = chemically synthesized
  source 1..20: mol_type = other DNA
tttgggtatatacccagtaa

SEQ ID NO: 3731 - DNA, 20 bp, synthetic construct
  misc_feature 1..20: note = chemically synthesized
  source 1..20: mol_type = other DNA
ttgggtatatacccagtaat

SEQ ID NO: 3732 - DNA, 20 bp, synthetic construct
  misc_feature 1..20: note = chemically synthesized
  source 1..20: mol_type = other DNA
gtatatacccagtaatagga

SEQ ID NO: 3733 - DNA, 20 bp, synthetic construct
  misc_feature 1..20: note = chemically synthesized
  source 1..20: mol_type = other DNA
atacccagtaataggatggc

SEQ ID NO: 3734 - DNA, 20 bp, synthetic construct
  misc_feature 1..20: note = chemically synthesized
  source 1..20: mol_type = other DNA
tacccagtaataggatggct

SEQ ID NO: 3735 - DNA, 20 bp, synthetic construct
  misc_feature 1..20: note = chemically synthesized
  source 1..20: mol_type = other DNA
aataggatggctgggtcaaa

SEQ ID NO: 3736 - DNA, 20 bp, synthetic construct
  misc_feature 1..20: note = chemically synthesized
  source 1..20: mol_type = other DNA
gctgggtcaaatggtatttc

SEQ ID NO: 3737 - DNA, 20 bp, synthetic construct
  misc_feature 1..20: note = chemically synthesized
  source 1..20: mol_type = other DNA
tcaaatggtatttctagttc

SEQ ID NO: 3738 - DNA, 20 bp, synthetic construct
  misc_feature 1..20: note = chemically synthesized
  source 1..20: mol_type = other DNA
atttctagttctagatccct

SEQ ID NO: 3739 - DNA, 20 bp, synthetic construct
  misc_feature 1..20: note = chemically synthesized
  source 1..20: mol_type = other DNA
tttctagttctagatccctg

SEQ ID NO: 3740 - DNA, 20 bp, synthetic construct
  misc_feature 1..20: note = chemically synthesized
  source 1..20: mol_type = other DNA
tgccacactgacttccacaa

SEQ ID NO: 3741 - DNA, 20 bp, synthetic construct
  misc_feature 1..20: note = chemically synthesized
  source 1..20: mol_type = other DNA
gacttccacaatggttgaac

SEQ ID NO: 3742 - DNA, 20 bp, synthetic construct
  misc_feature 1..20: note = chemically synthesized
  source 1..20: mol_type = other DNA
acaatggttgaactagttta

SEQ ID NO: 3743 - DNA, 20 bp, synthetic construct
  misc_feature 1..20: note = chemically synthesized
  source 1..20: mol_type = other DNA
ctagtttatagtcccaccaa

SEQ ID NO: 3744 - DNA, 20 bp, synthetic construct
  misc_feature 1..20: note = chemically synthesized
  source 1..20: mol_type = other DNA
tagtcccaccaacagtgtaa

SEQ ID NO: 3745 - DNA, 20 bp, synthetic construct
  misc_feature 1..20: note = chemically synthesized
  source 1..20: mol_type = other DNA
ctatttctccacatcctctc

SEQ ID NO: 3746 - DNA, 20 bp, synthetic construct
  misc_feature 1..20: note = chemically synthesized
  source 1..20: mol_type = other DNA
cacatcctctccagcacctg

SEQ ID NO: 3747 - DNA, 20 bp, synthetic construct
  misc_feature 1..20: note = chemically synthesized
  source 1..20: mol_type = other DNA
ttaatgatcaccattctaac

SEQ ID NO: 3748 - DNA, 20 bp, synthetic construct
  misc_feature 1..20: note = chemically synthesized
  source 1..20: mol_type = other DNA
atcaccattctaactggtgt

SEQ ID NO: 3749 - DNA, 20 bp, synthetic construct
  misc_feature 1..20: note = chemically synthesized
  source 1..20: mol_type = other DNA
tgtgagatgatatctcattg

SEQ ID NO: 3750 - DNA, 20 bp, synthetic construct
  misc_feature 1..20: note = chemically synthesized
  source 1..20: mol_type = other DNA
tttgatttgcatttctctga

SEQ ID NO: 3751 - DNA, 20 bp, synthetic construct
  misc_feature 1..20: note = chemically synthesized
  source 1..20: mol_type = other DNA
atttgcatttctctgatggc

SEQ ID NO: 3752 - DNA, 20 bp, synthetic construct
  misc_feature 1..20: note = chemically synthesized
  source 1..20: mol_type = other DNA
ctctgatggccagtgatgat

SEQ ID NO: 3753 - DNA, 20 bp, synthetic construct
  misc_feature 1..20: note = chemically synthesized
  source 1..20: mol_type = other DNA
gcattttttcatgtgttttt

SEQ ID NO: 3754 - DNA, 20 bp, synthetic construct
  misc_feature 1..20: note = chemically synthesized
  source 1..20: mol_type = other DNA
ctgcataaatgtcttctttt

SEQ ID NO: 3755 - DNA, 20 bp, synthetic construct
  misc_feature 1..20: note = chemically synthesized
  source 1..20: mol_type = other DNA
cataaatgtcttcttttgag

SEQ ID NO: 3756 - DNA, 20 bp, synthetic construct
  misc_feature 1..20: note = chemically synthesized
  source 1..20: mol_type = other DNA
ccttcacccccttgttgatg

SEQ ID NO: 3757 - DNA, 20 bp, synthetic construct
  misc_feature 1..20: note = chemically synthesized
  source 1..20: mol_type = other DNA
tttttcttgtaaatttgttt

SEQ ID NO: 3758 - DNA, 20 bp, synthetic construct
  misc_feature 1..20: note = chemically synthesized
  source 1..20: mol_type = other DNA
aaatttgtttgagttcattg

SEQ ID NO: 3759 - DNA, 20 bp, synthetic construct
  misc_feature 1..20: note = chemically synthesized
  source 1..20: mol_type = other DNA
tttgagttcattgtagattc

SEQ ID NO: 3760 - DNA, 20 bp, synthetic construct
  misc_feature 1..20: note = chemically synthesized
  source 1..20: mol_type = other DNA
tcattgtagattctggatat

SEQ ID NO: 3761 - DNA, 20 bp, synthetic construct
  misc_feature 1..20: note = chemically synthesized
  source 1..20: mol_type = other DNA
tctggatattagccctttgt

SEQ ID NO: 3762 - DNA, 20 bp, synthetic construct
  misc_feature 1..20: note = chemically synthesized
  source 1..20: mol_type = other DNA
atattagccctttgtcagat

SEQ ID NO: 3763 - DNA, 20 bp, synthetic construct
  misc_feature 1..20: note = chemically synthesized
  source 1..20: mol_type = other DNA
ttagccctttgtcagatgag

SEQ ID NO: 3764 - DNA, 20 bp, synthetic construct
  misc_feature 1..20: note = chemically synthesized
  source 1..20: mol_type = other DNA
aaaaattttctcccattgtg

SEQ ID NO: 3765 - DNA, 20 bp, synthetic construct
  misc_feature 1..20: note = chemically synthesized
  source 1..20: mol_type = other DNA
aaaattttctcccattgtgt

SEQ ID NO: 3766 - DNA, 20 bp, synthetic construct
  misc_feature 1..20: note = chemically synthesized
  source 1..20: mol_type = other DNA
aggttgcctgttcactctga

SEQ ID NO: 3767 - DNA, 20 bp, synthetic construct
  misc_feature 1..20: note = chemically synthesized
  source 1..20: mol_type = other DNA
ttgcctgttcactctgatgg

SEQ ID NO: 3768 - DNA, 20 bp, synthetic construct
  misc_feature 1..20: note = chemically synthesized
  source 1..20: mol_type = other DNA
tggtagtttcttttgctgtg

SEQ ID NO: 3769 - DNA, 20 bp, synthetic construct
  misc_feature 1..20: note = chemically synthesized
  source 1..20: mol_type = other DNA
tagtttcttttgctgtgcag

SEQ ID NO: 3770 - DNA, 20 bp, synthetic construct
  misc_feature 1..20: note = chemically synthesized
  source 1..20: mol_type = other DNA
tttgctgtgcagaagctctt

SEQ ID NO: 3771 - DNA, 20 bp, synthetic construct
  misc_feature 1..20: note = chemically synthesized
  source 1..20: mol_type = other DNA
cagaagctctttagtttaat

SEQ ID NO: 3772 - DNA, 20 bp, synthetic construct
  misc_feature 1..20: note = chemically synthesized
  source 1..20: mol_type = other DNA
tcttttgttgccattgcttt

SEQ ID NO: 3773 - DNA, 20 bp, synthetic construct
  misc_feature 1..20: note = chemically synthesized
  source 1..20: mol_type = other DNA
tgccattgcttttggtgttt

SEQ ID NO: 3774 - DNA, 20 bp, synthetic construct
  misc_feature 1..20: note = chemically synthesized
  source 1..20: mol_type = other DNA
cttttggtgttttagacatg

SEQ ID NO: 3775 - DNA, 20 bp, synthetic construct
  misc_feature 1..20: note = chemically synthesized
  source 1..20: mol_type = other DNA
gcccatgcctatgtcctgaa

SEQ ID NO: 3776 - DNA, 20 bp, synthetic construct
  misc_feature 1..20: note = chemically synthesized
  source 1..20: mol_type = other DNA
atgtcctgaatggtattgct

SEQ ID NO: 3777 - DNA, 20 bp, synthetic construct
  misc_feature 1..20: note = chemically synthesized
  source 1..20: mol_type = other DNA
tgtcctgaatggtattgctt

SEQ ID NO: 3778 - DNA, 20 bp, synthetic construct
  misc_feature 1..20: note = chemically synthesized
  source 1..20: mol_type = other DNA
tattgcttaggttttcttct

SEQ ID NO: 3779 - DNA, 20 bp, synthetic construct
  misc_feature 1..20: note = chemically synthesized
  source 1..20: mol_type = other DNA
attgcttaggttttcttcta

SEQ ID NO: 3780 - DNA, 20 bp, synthetic construct
  misc_feature 1..20: note = chemically synthesized
  source 1..20: mol_type = other DNA
gttttcttctaaggttttta

SEQ ID NO: 3781 - DNA, 20 bp, synthetic construct
  misc_feature 1..20: note = chemically synthesized
  source 1..20: mol_type = other DNA
ttctaaggtttttatggttt

SEQ ID NO: 3782 - DNA, 20 bp, synthetic construct
  misc_feature 1..20: note = chemically synthesized
  source 1..20: mol_type = other DNA
tctaaggtttttatggtttt

SEQ ID NO: 3783 - DNA, 20 bp, synthetic construct
  misc_feature 1..20: note = chemically synthesized
  source 1..20: mol_type = other DNA
tggttttaggtctaacatgt

SEQ ID NO: 3784 - DNA, 20 bp, synthetic construct
  misc_feature 1..20: note = chemically synthesized
  source 1..20: mol_type = other DNA
tcttgaaataatttttgtat

SEQ ID NO: 3785 - DNA, 20 bp, synthetic construct
  misc_feature 1..20: note = chemically synthesized
  source 1..20: mol_type = other DNA
cttgaaataatttttgtata

SEQ ID NO: 3786 - DNA, 20 bp, synthetic construct
  misc_feature 1..20: note = chemically synthesized
  source 1..20: mol_type = other DNA
ataatttttgtataaggtgt

SEQ ID NO: 3787 - DNA, 20 bp, synthetic construct
  misc_feature 1..20: note = chemically synthesized
  source 1..20: mol_type = other DNA
taatttttgtataaggtgta

SEQ ID NO: 3788 - DNA, 20 bp, synthetic construct
  misc_feature 1..20: note = chemically synthesized
  source 1..20: mol_type = other DNA
tttttgtataaggtgtaagg

SEQ ID NO: 3789 - DNA, 20 bp, synthetic construct
  misc_feature 1..20: note = chemically synthesized
  source 1..20: mol_type = other DNA
ttttgtataaggtgtaagga

SEQ ID NO: 3790 - DNA, 20 bp, synthetic construct
  misc_feature 1..20: note = chemically synthesized
  source 1..20: mol_type = other DNA
tttgtataaggtgtaaggaa

SEQ ID NO: 3791 - DNA, 20 bp, synthetic construct
  misc_feature 1..20: note = chemically synthesized
  source 1..20: mol_type = other DNA
taaggtgtaaggaagggatc

SEQ ID NO: 3792 - DNA, 20 bp, synthetic construct
  misc_feature 1..20: note = chemically synthesized
  source 1..20: mol_type = other DNA
gtaaggaagggatccagttt

SEQ ID NO: 3793 - DNA, 20 bp, synthetic construct
  misc_feature 1..20: note = chemically synthesized
  source 1..20: mol_type = other DNA
cagtttcagctttctacata

SEQ ID NO: 3794 - DNA, 20 bp, synthetic construct
  misc_feature 1..20: note = chemically synthesized
  source 1..20: mol_type = other DNA
ttcagctttctacatatggc

SEQ ID NO: 3795 - DNA, 20 bp, synthetic construct
  misc_feature 1..20: note = chemically synthesized
  source 1..20: mol_type = other DNA
gctttctacatatggctagc

SEQ ID NO: 3796 - DNA, 20 bp, synthetic construct
  misc_feature 1..20: note = chemically synthesized
  source 1..20: mol_type = other DNA
atatggctagccagttttcc

SEQ ID NO: 3797 - DNA, 20 bp, synthetic construct
  misc_feature 1..20: note = chemically synthesized
  source 1..20: mol_type = other DNA
tcccagcatcatttattaaa

SEQ ID NO: 3798 - DNA, 20 bp, synthetic construct
  misc_feature 1..20: note = chemically synthesized
  source 1..20: mol_type = other DNA
cccagcatcatttattaaat

SEQ ID NO: 3799 - DNA, 20 bp, synthetic construct
  misc_feature 1..20: note = chemically synthesized
  source 1..20: mol_type = other DNA
ccagcatcatttattaaata

SEQ ID NO: 3800 - DNA, 20 bp, synthetic construct
  misc_feature 1..20: note = chemically synthesized
  source 1..20: mol_type = other DNA
tccccattgcttgtttttgt

SEQ ID NO: 3801 - DNA, 20 bp, synthetic construct
  misc_feature 1..20: note = chemically synthesized
  source 1..20: mol_type = other DNA
ccccattgcttgtttttgtc

SEQ ID NO: 3802 - DNA, 20 bp, synthetic construct
  misc_feature 1..20: note = chemically synthesized
  source 1..20: mol_type = other DNA
tgtttttgtcaggtttgtca

SEQ ID NO: 3803 - DNA, 20 bp, synthetic construct
  misc_feature 1..20: note = chemically synthesized
  source 1..20: mol_type = other DNA
ttgtcaggtttgtcaaagat

SEQ ID NO: 3804 - DNA, 20 bp, synthetic construct
  misc_feature 1..20: note = chemically synthesized
  source 1..20: mol_type = other DNA
caggtttgtcaaagatcaga

SEQ ID NO: 3805 - DNA, 20 bp, synthetic construct
  misc_feature 1..20: note = chemically synthesized
  source 1..20: mol_type = other DNA
tgtcaaagatcagatagttg

SEQ ID NO: 3806 - DNA, 20 bp, synthetic construct
  misc_feature 1..20: note = chemically synthesized
  source 1..20: mol_type = other DNA
atcagatagttgtggatgtg

SEQ ID NO: 3807 - DNA, 20 bp, synthetic construct
  misc_feature 1..20: note = chemically synthesized
  source 1..20: mol_type = other DNA
ggatgtgtggtattatttct

SEQ ID NO: 3808 - DNA, 20 bp, synthetic construct
  misc_feature 1..20: note = chemically synthesized
  source 1..20: mol_type = other DNA
atgtgtggtattatttctga

SEQ ID NO: 3809 - DNA, 20 bp, synthetic construct
  misc_feature 1..20: note = chemically synthesized
  source 1..20: mol_type = other DNA
agagctctgttctgctccat

SEQ ID NO: 3810 - DNA, 20 bp, synthetic construct
  misc_feature 1..20: note = chemically synthesized
  source 1..20: mol_type = other DNA
attggtctacatctctgttt

SEQ ID NO: 3811 - DNA, 20 bp, synthetic construct
  misc_feature 1..20: note = chemically synthesized
  source 1..20: mol_type = other DNA
ctacatctctgttttggtac

SEQ ID NO: 3812 - DNA, 20 bp, synthetic construct
  misc_feature 1..20: note = chemically synthesized
  source 1..20: mol_type = other DNA
gtaccagtaccatgttgttt

SEQ ID NO: 3813 - DNA, 20 bp, synthetic construct
  misc_feature 1..20: note = chemically synthesized
  source 1..20: mol_type = other DNA
gttttggttactgtaccttg

SEQ ID NO: 3814 - DNA, 20 bp, synthetic construct
  misc_feature 1..20: note = chemically synthesized
  source 1..20: mol_type = other DNA
ggttactgtaccttgtagta

SEQ ID NO: 3815 - DNA, 20 bp, synthetic construct
  misc_feature 1..20: note = chemically synthesized
  source 1..20: mol_type = other DNA
gtaccttgtagtatagtttg

SEQ ID NO: 3816 - DNA, 20 bp, synthetic construct
  misc_feature 1..20: note = chemically synthesized
  source 1..20: mol_type = other DNA
cttgtagtatagtttgaagt

SEQ ID NO: 3817 - DNA, 20 bp, synthetic construct
  misc_feature 1..20: note = chemically synthesized
  source 1..20: mol_type = other DNA
ttgtagtatagtttgaagtc

SEQ ID NO: 3818 - DNA, 20 bp, synthetic construct
  misc_feature 1..20: note = chemically synthesized
  source 1..20: mol_type = other DNA
tagtatagtttgaagtcagg

SEQ ID NO: 3819 - DNA, 20 bp, synthetic construct
  misc_feature 1..20: note = chemically synthesized
  source 1..20: mol_type = other DNA
gtcaggtagcatgatgcctc

SEQ ID NO: 3820 - DNA, 20 bp, synthetic construct
  misc_feature 1..20: note = chemically synthesized
  source 1..20: mol_type = other DNA
tgcctctagctttgttcttt

SEQ ID NO: 3821 - DNA, 20 bp, synthetic construct
  misc_feature 1..20: note = chemically synthesized
  source 1..20: mol_type = other DNA
ctagctttgttcttttggct

SEQ ID NO: 3822 - DNA, 20 bp, synthetic construct
  misc_feature 1..20: note = chemically synthesized
  source 1..20: mol_type = other DNA
tagctttgttcttttggctt

SEQ ID NO: 3823 - DNA, 20 bp, synthetic construct
  misc_feature 1..20: note = chemically synthesized
  source 1..20: mol_type = other DNA
ttaggattgacttgtcaatg

SEQ ID NO: 3824 - DNA, 20 bp, synthetic construct
  misc_feature 1..20: note = chemically synthesized
  source 1..20: mol_type = other DNA
taggattgacttgtcaatgc

SEQ ID NO: 3825 - DNA, 20 bp, synthetic construct
  misc_feature 1..20: note = chemically synthesized
  source 1..20: mol_type = other DNA
tgtcaatgcgggctcttttt

SEQ ID NO: 3826 - DNA, 20 bp, synthetic construct
  misc_feature 1..20: note = chemically synthesized
  source 1..20: mol_type = other DNA
ttggttccatatgaacttta

SEQ ID NO: 3827 - DNA, 20 bp, synthetic construct
  misc_feature 1..20: note = chemically synthesized
  source 1..20: mol_type = other DNA
gttccatatgaactttaaag

SEQ ID NO: 3828 - DNA, 20 bp, synthetic construct
  misc_feature 1..20: note = chemically synthesized
  source 1..20: mol_type = other DNA
tagttttttccaattctgtg

SEQ ID NO: 3829 - DNA, 20 bp, synthetic construct
  misc_feature 1..20: note = chemically synthesized
  source 1..20: mol_type = other DNA
tttttccaattctgtgaaga

SEQ ID NO: 3830 - DNA, 20 bp, synthetic construct
  misc_feature 1..20: note = chemically synthesized
  source 1..20: mol_type = other DNA
aattctgtgaagaaagtcat

SEQ ID NO: 3831 - DNA, 20 bp, synthetic construct
  misc_feature 1..20: note = chemically synthesized
  source 1..20: mol_type = other DNA
tctgtgaagaaagtcattgg

SEQ ID NO: 3832 - DNA, 20 bp, synthetic construct
  misc_feature 1..20: note = chemically synthesized
  source 1..20: mol_type = other DNA
gaaagtcattggtagcttga

SEQ ID NO: 3833 - DNA, 20 bp, synthetic construct
  misc_feature 1..20: note = chemically synthesized
  source 1..20: mol_type = other DNA
aaagtcattggtagcttgat

SEQ ID NO: 3834 - DNA, 20 bp, synthetic construct
  misc_feature 1..20: note = chemically synthesized
  source 1..20: mol_type = other DNA
aagtcattggtagcttgatg

SEQ ID NO: 3835 - DNA, 20 bp, synthetic construct
  misc_feature 1..20: note = chemically synthesized
  source 1..20: mol_type = other DNA
cattggtagcttgatgggga

SEQ ID NO: 3836 - DNA, 20 bp, synthetic construct
  misc_feature 1..20: note = chemically synthesized
  source 1..20: mol_type = other DNA
attgaatctataaattacct

SEQ ID NO: 3837 - DNA, 20 bp, synthetic construct
  misc_feature 1..20: note = chemically synthesized
  source 1..20: mol_type = other DNA
ttgaatctataaattacctt

SEQ ID NO: 3838 - DNA, 20 bp, synthetic construct
  misc_feature 1..20: note = chemically synthesized
  source 1..20: mol_type = other DNA
aatctataaattaccttggg

SEQ ID NO: 3839 - DNA, 20 bp, synthetic construct
  misc_feature 1..20: note = chemically synthesized
  source 1..20: mol_type = other DNA
tataaattaccttgggcagt

SEQ ID NO: 3840 - DNA, 20 bp, synthetic construct
  misc_feature 1..20: note = chemically synthesized
  source 1..20: mol_type = other DNA
ataaattaccttgggcagta

SEQ ID NO: 3841 - DNA, 20 bp, synthetic construct
  misc_feature 1..20: note = chemically synthesized
  source 1..20: mol_type = other DNA
tattgattcttcctatccat

SEQ ID NO: 3842 - DNA, 20 bp, synthetic construct
  misc_feature 1..20: note = chemically synthesized
  source 1..20: mol_type = other DNA
attcttcctatccatgagca

SEQ ID NO: 3843 - DNA, 20 bp, synthetic construct
  misc_feature 1..20: note = chemically synthesized
  source 1..20: mol_type = other DNA
gtatcctcttttatttcgtt

SEQ ID NO: 3844 - DNA, 20 bp, synthetic construct
  misc_feature 1..20: note = chemically synthesized
  source 1..20: mol_type = other DNA
tcctcttttatttcgttgag

SEQ ID NO: 3845 - DNA, 20 bp, synthetic construct
  misc_feature 1..20: note = chemically synthesized
  source 1..20: mol_type = other DNA
gtgttttgttgttctccttg

SEQ ID NO: 3846 - DNA, 20 bp, synthetic construct
  misc_feature 1..20: note = chemically synthesized
  source 1..20: mol_type = other DNA
gttttgttgttctccttgaa

SEQ ID NO: 3847 - DNA, 20 bp, synthetic construct
  misc_feature 1..20: note = chemically synthesized
  source 1..20: mol_type = other DNA
ttttgttgttctccttgaag

SEQ ID NO: 3848 - DNA, 20 bp, synthetic construct
  misc_feature 1..20: note = chemically synthesized
  source 1..20: mol_type = other DNA
aggtccttcacatcccttgt

SEQ ID NO: 3849 - DNA, 20 bp, synthetic construct
  misc_feature 1..20: note = chemically synthesized
  source 1..20: mol_type = other DNA
ccttcacatcccttgtaagt

SEQ ID NO: 3850 - DNA, 20 bp, synthetic construct
  misc_feature 1..20: note = chemically synthesized
  source 1..20: mol_type = other DNA
tcccttgtaagttggattcc

SEQ ID NO: 3851 - DNA, 20 bp, synthetic construct
  misc_feature 1..20: note = chemically synthesized
  source 1..20: mol_type = other DNA
cccttgtaagttggattcct

SEQ ID NO: 3852 - DNA, 20 bp, synthetic construct
  misc_feature 1..20: note = chemically synthesized
  source 1..20: mol_type = other DNA
ctaggtattttattctcttt

SEQ ID NO: 3853 - DNA, 20 bp, synthetic construct
  misc_feature 1..20: note = chemically synthesized
  source 1..20: mol_type = other DNA
taggtattttattctctttg

SEQ ID NO: 3854 - DNA, 20 bp, synthetic construct
  misc_feature 1..20: note = chemically synthesized
  source 1..20: mol_type = other DNA
ctctttgaggcaattgtgaa

SEQ ID NO: 3855 - DNA, 20 bp, synthetic construct
  misc_feature 1..20: note = chemically synthesized
  source 1..20: mol_type = other DNA
tctttgaggcaattgtgaat

SEQ ID NO: 3856 - DNA, 20 bp, synthetic construct
  misc_feature 1..20: note = chemically synthesized
  source 1..20: mol_type = other DNA
tttgaggcaattgtgaatgg

SEQ ID NO: 3857 - DNA, 20 bp, synthetic construct
  misc_feature 1..20: note = chemically synthesized
  source 1..20: mol_type = other DNA
atgggagttcactcatgatt

SEQ ID NO: 3858 - DNA, 20 bp, synthetic construct
  misc_feature 1..20: note = chemically synthesized
  source 1..20: mol_type = other DNA
gctctctgtttgtctgttat

SEQ ID NO: 3859 - DNA, 20 bp, synthetic construct
  misc_feature 1..20: note = chemically synthesized
  source 1..20: mol_type = other DNA
gtttgtctgttattggtgta

SEQ ID NO: 3860 - DNA, 20 bp, synthetic construct
  misc_feature 1..20: note = chemically synthesized
  source 1..20: mol_type = other DNA
tttgtctgttattggtgtat

SEQ ID NO: 3861 - DNA, 20 bp, synthetic construct
  misc_feature 1..20: note = chemically synthesized
  source 1..20: mol_type = other DNA
gcacattgattttgtatgct

SEQ ID NO: 3862 - DNA, 20 bp, synthetic construct
  misc_feature 1..20: note = chemically synthesized
  source 1..20: mol_type = other DNA
tgtatgctgagacttttctg

SEQ ID NO: 3863 - DNA, 20 bp, synthetic construct
  misc_feature 1..20: note = chemically synthesized
  source 1..20: mol_type = other DNA
acttttctgaagttgcttat

SEQ ID NO: 3864 - DNA, 20 bp, synthetic construct
  misc_feature 1..20: note = chemically synthesized
  source 1..20: mol_type = other DNA
ctgaagttgcttatcagctt

SEQ ID NO: 3865 - DNA, 20 bp, synthetic construct
  misc_feature 1..20: note = chemically synthesized
  source 1..20: mol_type = other DNA
tgaagttgcttatcagctta

SEQ ID NO: 3866 - DNA, 20 bp, synthetic construct
  misc_feature 1..20: note = chemically synthesized
  source 1..20: mol_type = other DNA
aagttgcttatcagcttaag

SEQ ID NO: 3867 - DNA, 20 bp, synthetic construct
  misc_feature 1..20: note = chemically synthesized
  source 1..20: mol_type = other DNA
ttatcagcttaaggagattt

SEQ ID NO: 3868 - DNA, 20 bp, synthetic construct
  misc_feature 1..20: note = chemically synthesized
  source 1..20: mol_type = other DNA
tatcagcttaaggagatttt

SEQ ID NO: 3869 - DNA, 20 bp, synthetic construct
  misc_feature 1..20: note = chemically synthesized
  source 1..20: mol_type = other DNA
gcttaaggagattttgggct

SEQ ID NO: 3870 - DNA, 20 bp, synthetic construct
  misc_feature 1..20: note = chemically synthesized
  source 1..20: mol_type = other DNA
gagattttgggctgagacga

SEQ ID NO: 3871 - DNA, 20 bp, synthetic construct
  misc_feature 1..20: note = chemically synthesized
  source 1..20: mol_type = other DNA
agattttgggctgagacgat

SEQ ID NO: 3872 - DNA, 20 bp, synthetic construct
  misc_feature 1..20: note = chemically synthesized
  source 1..20: mol_type = other DNA
gattttgggctgagacgatg

SEQ ID NO: 3873 - DNA, 20 bp, synthetic construct
  misc_feature 1..20: note = chemically synthesized
  source 1..20: mol_type = other DNA
gctgagacgatggggttttc

SEQ ID NO: 3874 - DNA, 20 bp, synthetic construct
  misc_feature 1..20: note = chemically synthesized
  source 1..20: mol_type = other DNA
acaatcacgtcatctgcaaa

SEQ ID NO: 3875 - DNA, 20 bp, synthetic construct
  misc_feature 1..20: note = chemically synthesized
  source 1..20: mol_type = other DNA
caatcacgtcatctgcaaac

SEQ ID NO: 3876 - DNA, 20 bp, synthetic construct
  misc_feature 1..20: note = chemically synthesized
  source 1..20: mol_type = other DNA
aatcacgtcatctgcaaaca

SEQ ID NO: 3877 - DNA, 20 bp, synthetic construct
  misc_feature 1..20: note = chemically synthesized
  source 1..20: mol_type = other DNA
tttctcttgcctgattgccc

SEQ ID NO: 3878 - DNA, 20 bp, synthetic construct
  misc_feature 1..20: note = chemically synthesized
  source 1..20: mol_type = other DNA
tcttgcctgattgccctggc

SEQ ID NO: 3879 - DNA, 20 bp, synthetic construct
  misc_feature 1..20: note = chemically synthesized
  source 1..20: mol_type = other DNA
acttccaacactatgttgaa

SEQ ID NO: 3880 - DNA, 20 bp, synthetic construct
  misc_feature 1..20: note = chemically synthesized
  source 1..20: mol_type = other DNA
cttccaacactatgttgaat

SEQ ID NO: 3881 - DNA, 20 bp, synthetic construct
  misc_feature 1..20: note = chemically synthesized
  source 1..20: mol_type = other DNA
tccaacactatgttgaatag

SEQ ID NO: 3882 - DNA, 20 bp, synthetic construct
  misc_feature 1..20: note = chemically synthesized
  source 1..20: mol_type = other DNA
aacactatgttgaataggag

SEQ ID NO: 3883 - DNA, 20 bp, synthetic construct
  misc_feature 1..20: note = chemically synthesized
  source 1..20: mol_type = other DNA
ctatgttgaataggagtggt

SEQ ID NO: 3884 - DNA, 20 bp, synthetic construct
  misc_feature 1..20: note = chemically synthesized
  source 1..20: mol_type = other DNA
atgttgaataggagtggtga

SEQ ID NO: 3885 - DNA, 20 bp, synthetic construct
  misc_feature 1..20: note = chemically synthesized
  source 1..20: mol_type = other DNA
gttgaataggagtggtgaga

SEQ ID NO: 3886 - DNA, 20 bp, synthetic construct
  misc_feature 1..20: note = chemically synthesized
  source 1..20: mol_type = other DNA
ttgaataggagtggtgagag

SEQ ID NO: 3887 - DNA, 20 bp, synthetic construct
  misc_feature 1..20: note = chemically synthesized
  source 1..20: mol_type = other DNA
tgaataggagtggtgagaga

SEQ ID NO: 3888 - DNA, 20 bp, synthetic construct
  misc_feature 1..20: note = chemically synthesized
  source 1..20: mol_type = other DNA
agggcatccctgtcttgtgc

SEQ ID NO: 3889 - DNA, 20 bp, synthetic construct
  misc_feature 1..20: note = chemically synthesized
  source 1..20: mol_type = other DNA
ctgtcttgtgccagttttca

SEQ ID NO: 3890 - DNA, 20 bp, synthetic construct
  misc_feature 1..20: note = chemically synthesized
  source 1..20: mol_type = other DNA
tgtcttgtgccagttttcaa

SEQ ID NO: 3891 - DNA, 20 bp, synthetic construct
  misc_feature 1..20: note = chemically synthesized
  source 1..20: mol_type = other DNA
gtcttgtgccagttttcaaa

SEQ ID NO: 3892 - DNA, 20 bp, synthetic construct
  misc_feature 1..20: note = chemically synthesized
  source 1..20: mol_type = other DNA
gttttcaaagggaatgcttc

SEQ ID NO: 3893 - DNA, 20 bp, synthetic construct
  misc_feature 1..20: note = chemically synthesized
  source 1..20: mol_type = other DNA
gcttccagtttttgtccatt

SEQ ID NO: 3894 - DNA, 20 bp, synthetic construct
  misc_feature 1..20: note = chemically synthesized
  source 1..20: mol_type = other DNA
ttgtccattcagtatgatat

SEQ ID NO: 3895 - DNA, 20 bp, synthetic construct
  misc_feature 1..20: note = chemically synthesized
  source 1..20: mol_type = other DNA
attcagtatgatattggctg

SEQ ID NO: 3896 - DNA, 20 bp, synthetic construct
  misc_feature 1..20: note = chemically synthesized
  source 1..20: mol_type = other DNA
ttcagtatgatattggctgt

SEQ ID NO: 3897 - DNA, 20 bp, synthetic construct
  misc_feature 1..20: note = chemically synthesized
  source 1..20: mol_type = other DNA
tattggctgtgggtttgtca

SEQ ID NO: 3898 - DNA, 20 bp, synthetic construct
  misc_feature 1..20: note = chemically synthesized
  source 1..20: mol_type = other DNA
ggctgtgggtttgtcataga

SEQ ID NO: 3899 - DNA, 20 bp, synthetic construct
  misc_feature 1..20: note = chemically synthesized
  source 1..20: mol_type = other DNA
tagatagctcttattatttt

SEQ ID NO: 3900 - DNA, 20 bp, synthetic construct
  misc_feature 1..20: note = chemically synthesized
  source 1..20: mol_type = other DNA
ccatcgatacctaatttatt

SEQ ID NO: 3901 - DNA, 20 bp, synthetic construct
  misc_feature 1..20: note = chemically synthesized
  source 1..20: mol_type = other DNA
atcgatacctaatttattga

SEQ ID NO: 3902 - DNA, 20 bp, synthetic construct
  misc_feature 1..20: note = chemically synthesized
  source 1..20: mol_type = other DNA
cctaatttattgagagtttt

SEQ ID NO: 3903 - DNA, 20 bp, synthetic construct
  misc_feature 1..20: note = chemically synthesized
  source 1..20: mol_type = other DNA
tattgagagtttttagtatg

SEQ ID NO: 3904 - DNA, 20 bp, synthetic construct
  misc_feature 1..20: note = chemically synthesized
  source 1..20: mol_type = other DNA
agcattgttgaattttgtca

SEQ ID NO: 3905 - DNA, 20 bp, synthetic construct
  misc_feature 1..20: note = chemically synthesized
  source 1..20: mol_type = other DNA
gcattgttgaattttgtcaa

SEQ ID NO: 3906 - DNA, 20 bp, synthetic construct
  misc_feature 1..20: note = chemically synthesized
  source 1..20: mol_type = other DNA
aggccttttctgcatctatt

SEQ ID NO: 3907 - DNA, 20 bp, synthetic construct
  misc_feature 1..20: note = chemically synthesized
  source 1..20: mol_type = other DNA
catctattgagataatcatg

SEQ ID NO: 3908 - DNA, 20 bp, synthetic construct
  misc_feature 1..20: note = chemically synthesized
  source 1..20: mol_type = other DNA
aatcatgtggtttgtgtctt

SEQ ID NO: 3909 - DNA, 20 bp, synthetic construct
  misc_feature 1..20: note = chemically synthesized
  source 1..20: mol_type = other DNA
ctttggttctgtttatatgc

SEQ ID NO: 3910 - DNA, 20 bp, synthetic construct
  misc_feature 1..20: note = chemically synthesized
  source 1..20: mol_type = other DNA
ttgatttgcatatgttgaac

SEQ ID NO: 3911 - DNA, 20 bp, synthetic construct
  misc_feature 1..20: note = chemically synthesized
  source 1..20: mol_type = other DNA
gttgaaccagccctgcatcc

SEQ ID NO: 3912 - DNA, 20 bp, synthetic construct
  misc_feature 1..20: note = chemically synthesized
  source 1..20: mol_type = other DNA
ttgaaccagccctgcatccc

SEQ ID NO: 3913 - DNA, 20 bp, synthetic construct
  misc_feature 1..20: note = chemically synthesized
  source 1..20: mol_type = other DNA
tgaaccagccctgcatccca

SEQ ID NO: 3914 - DNA, 20 bp, synthetic construct
  misc_feature 1..20: note = chemically synthesized
  source 1..20: mol_type = other DNA
agccctgcatcccagggatg

SEQ ID NO: 3915 - DNA, 20 bp, synthetic construct
  misc_feature 1..20: note = chemically synthesized
  source 1..20: mol_type = other DNA
ggatgaagcccacttgatca

SEQ ID NO: 3916 - DNA, 20 bp, synthetic construct
  misc_feature 1..20: note = chemically synthesized
  source 1..20: mol_type = other DNA
tgaagcccacttgatcatgg

SEQ ID NO: 3917 - DNA, 20 bp, synthetic construct
  misc_feature 1..20: note = chemically synthesized
  source 1..20: mol_type = other DNA
cccacttgatcatggtggat

SEQ ID NO: 3918 - DNA, 20 bp, synthetic construct
  misc_feature 1..20: note = chemically synthesized
  source 1..20: mol_type = other DNA
taagctttttgatgtgctcc

SEQ ID NO: 3919 - DNA, 20 bp, synthetic construct
  misc_feature 1..20: note = chemically synthesized
  source 1..20: mol_type = other DNA
ttttgatgtgctcctggatt

SEQ ID NO: 3920 - DNA, 20 bp, synthetic construct
  misc_feature 1..20: note = chemically synthesized
  source 1..20: mol_type = other DNA
tgctcctggatttggtttgc

SEQ ID NO: 3921 - DNA, 20 bp, synthetic construct
  misc_feature 1..20: note = chemically synthesized
  source 1..20: mol_type = other DNA
tggtttgccagtattttact

SEQ ID NO: 3922 - DNA, 20 bp, synthetic construct
  misc_feature 1..20: note = chemically synthesized
  source 1..20: mol_type = other DNA
ggtttgccagtattttactg

SEQ ID NO: 3923 - DNA, 20 bp, synthetic construct
  misc_feature 1..20: note = chemically synthesized
  source 1..20: mol_type = other DNA
atttttgcatcgatgttcat

SEQ ID NO: 3924 - DNA, 20 bp, synthetic construct
  misc_feature 1..20: note = chemically synthesized
  source 1..20: mol_type = other DNA
tttttgcatcgatgttcatc

SEQ ID NO: 3925 - DNA, 20 bp, synthetic construct
  misc_feature 1..20: note = chemically synthesized
  source 1..20: mol_type = other DNA
ttttgcatcgatgttcatca

SEQ ID NO: 3926 - DNA, 20 bp, synthetic construct
  misc_feature 1..20: note = chemically synthesized
  source 1..20: mol_type = other DNA
tcgatgttcatcagggatat

SEQ ID NO: 3927 - DNA, 20 bp, synthetic construct
  misc_feature 1..20: note = chemically synthesized
  source 1..20: mol_type = other DNA
tttttttgttgtgtgtctgc

SEQ ID NO: 3928 - DNA, 20 bp, synthetic construct
  misc_feature 1..20: note = chemically synthesized
  source 1..20: mol_type = other DNA
ttttttgttgtgtgtctgct

SEQ ID NO: 3929 - DNA, 20 bp, synthetic construct
  misc_feature 1..20: note = chemically synthesized
  source 1..20: mol_type = other DNA
gttgtgtgtctgctaggctt

SEQ ID NO: 3930 - DNA, 20 bp, synthetic construct
  misc_feature 1..20: note = chemically synthesized
  source 1..20: mol_type = other DNA
gtctgctaggctttggtatc

SEQ ID NO: 3931 - DNA, 20 bp, synthetic construct
  misc_feature 1..20: note = chemically synthesized
  source 1..20: mol_type = other DNA
ctttggtatcaagatgatgc

SEQ ID NO: 3932 - DNA, 20 bp, synthetic construct
  misc_feature 1..20: note = chemically synthesized
  source 1..20: mol_type = other DNA
tgatgctggcctcataaaat

SEQ ID NO: 3933 - DNA, 20 bp, synthetic construct
  misc_feature 1..20: note = chemically synthesized
  source 1..20: mol_type = other DNA
gctggcctcataaaatgagt

SEQ ID NO: 3934 - DNA, 20 bp, synthetic construct
  misc_feature 1..20: note = chemically synthesized
  source 1..20: mol_type = other DNA
ctggcctcataaaatgagtt

SEQ ID NO: 3935 - DNA, 20 bp, synthetic construct
  misc_feature 1..20: note = chemically synthesized
  source 1..20: mol_type = other DNA
tggcctcataaaatgagtta

SEQ ID NO: 3936 - DNA, 20 bp, synthetic construct
  misc_feature 1..20: note = chemically synthesized
  source 1..20: mol_type = other DNA
gcctcataaaatgagttagg

SEQ ID NO: 3937 - DNA, 20 bp, synthetic construct
  misc_feature 1..20: note = chemically synthesized
  source 1..20: mol_type = other DNA
cctcataaaatgagttaggg

SEQ ID NO: 3938 - DNA, 20 bp, synthetic construct
  misc_feature 1..20: note = chemically synthesized
  source 1..20: mol_type = other DNA
ttccctctttttctattgat

SEQ ID NO: 3939 - DNA, 20 bp, synthetic construct
  misc_feature 1..20: note = chemically synthesized
  source 1..20: mol_type = other DNA
tctttttctattgattggaa

SEQ ID NO: 3940 - DNA, 20 bp, synthetic construct
  misc_feature 1..20: note = chemically synthesized
  source 1..20: mol_type = other DNA
tctattgattggaatagttt

SEQ ID NO: 3941 - DNA, 20 bp, synthetic construct
  misc_feature 1..20: note = chemically synthesized
  source 1..20: mol_type = other DNA
attgattggaatagtttcag

SEQ ID NO: 3942 - DNA, 20 bp, synthetic construct
  misc_feature 1..20: note = chemically synthesized
  source 1..20: mol_type = other DNA
ttgattggaatagtttcaga

SEQ ID NO: 3943 - DNA, 20 bp, synthetic construct
  misc_feature 1..20: note = chemically synthesized
  source 1..20: mol_type = other DNA
tggaatagtttcagaaggaa

SEQ ID NO: 3944 - DNA, 20 bp, synthetic construct
  misc_feature 1..20: note = chemically synthesized
  source 1..20: mol_type = other DNA
agtttcagaaggaatggtac

SEQ ID NO: 3945 - DNA, 20 bp, synthetic construct
  misc_feature 1..20: note = chemically synthesized
  source 1..20: mol_type = other DNA
ccagctcctccttgtacctc

SEQ ID NO: 3946 - DNA, 20 bp, synthetic construct
  misc_feature 1..20: note = chemically synthesized
  source 1..20: mol_type = other DNA
gctcctccttgtacctctgg

SEQ ID NO: 3947 - DNA, 20 bp, synthetic construct
  misc_feature 1..20: note = chemically synthesized
  source 1..20: mol_type = other DNA
cttgtacctctggtagaatt

SEQ ID NO: 3948 - DNA, 20 bp, synthetic construct
  misc_feature 1..20: note = chemically synthesized
  source 1..20: mol_type = other DNA
aattcggctgtgaatccatc

SEQ ID NO: 3949 - DNA, 20 bp, synthetic construct
  misc_feature 1..20: note = chemically synthesized
  source 1..20: mol_type = other DNA
gctgtgaatccatctggtcc

SEQ ID NO: 3950 - DNA, 20 bp, synthetic construct
  misc_feature 1..20: note = chemically synthesized
  source 1..20: mol_type = other DNA
atctggtcctggactttttt

SEQ ID NO: 3951 - DNA, 20 bp, synthetic construct
  misc_feature 1..20: note = chemically synthesized
  source 1..20: mol_type = other DNA
ggtcctggactttttttggt

SEQ ID NO: 3952 - DNA, 20 bp, synthetic construct
  misc_feature 1..20: note = chemically synthesized
  source 1..20: mol_type = other DNA
ctggactttttttggttggt

SEQ ID NO: 3953 - DNA, 20 bp, synthetic construct
  misc_feature 1..20: note = chemically synthesized
  source 1..20: mol_type = other DNA
ttttggttggtaagcttcat

SEQ ID NO: 3954 - DNA, 20 bp, synthetic construct
  misc_feature 1..20: note = chemically synthesized
  source 1..20: mol_type = other DNA
gttggtaagcttcataagtg

SEQ ID NO: 3955 - DNA, 20 bp, synthetic construct
  misc_feature 1..20: note = chemically synthesized
  source 1..20: mol_type = other DNA
ttggtaagcttcataagtga

SEQ ID NO: 3956 - DNA, 20 bp, synthetic construct
  misc_feature 1..20: note = chemically synthesized
  source 1..20: mol_type = other DNA
ggtaagcttcataagtgaag

SEQ ID NO: 3957 - DNA, 20 bp, synthetic construct
  misc_feature 1..20: note = chemically synthesized
  source 1..20: mol_type = other DNA
aggagaaataaaatacttta

SEQ ID NO: 3958 - DNA, 20 bp, synthetic construct
  misc_feature 1..20: note = chemically synthesized
  source 1..20: mol_type = other DNA
aaataaaatactttacagac

SEQ ID NO: 3959 - DNA, 20 bp, synthetic construct
  misc_feature 1..20: note = chemically synthesized
  source 1..20: mol_type = other DNA
attgctgattttgtcaccac

SEQ ID NO: 3960 - DNA, 20 bp, synthetic construct
  misc_feature 1..20: note = chemically synthesized
  source 1..20: mol_type = other DNA
ttgctgattttgtcaccacc

SEQ ID NO: 3961 - DNA, 20 bp, synthetic construct
  misc_feature 1..20: note = chemically synthesized
  source 1..20: mol_type = other DNA
caccaccaggcctgccctaa

SEQ ID NO: 3962 - DNA, 20 bp, synthetic construct
  misc_feature 1..20: note = chemically synthesized
  source 1..20: mol_type = other DNA
ccaccaggcctgccctaaaa

SEQ ID NO: 3963 - DNA, 20 bp, synthetic construct
  misc_feature 1..20: note = chemically synthesized
  source 1..20: mol_type = other DNA
ctgccctaaaagagctcctg

SEQ ID NO: 3964 - DNA, 20 bp, synthetic construct
  misc_feature 1..20: note = chemically synthesized
  source 1..20: mol_type = other DNA
tgccctaaaagagctcctga

SEQ ID NO: 3965 - DNA, 20 bp, synthetic construct
  misc_feature 1..20: note = chemically synthesized
  source 1..20: mol_type = other DNA
cctaaaagagctcctgaagg

SEQ ID NO: 3966 - DNA, 20 bp, synthetic construct
  misc_feature 1..20: note = chemically synthesized
  source 1..20: mol_type = other DNA
aaaagagctcctgaaggaag

SEQ ID NO: 3967 - DNA, 20 bp, synthetic construct
  misc_feature 1..20: note = chemically synthesized
  source 1..20: mol_type = other DNA
cctgaaggaagcagtaaaca

SEQ ID NO: 3968 - DNA, 20 bp, synthetic construct
  misc_feature 1..20: note = chemically synthesized
  source 1..20: mol_type = other DNA
aaggaagcagtaaacatgga

SEQ ID NO: 3969 - DNA, 20 bp, synthetic construct
  misc_feature 1..20: note = chemically synthesized
  source 1..20: mol_type = other DNA
taaacatggaaagaaacaac

SEQ ID NO: 3970 - DNA, 20 bp, synthetic construct
  misc_feature 1..20: note = chemically synthesized
  source 1..20: mol_type = other DNA
tggaaagaaacaaccagtac

SEQ ID NO: 3971 - DNA, 20 bp, synthetic construct
  misc_feature 1..20: note = chemically synthesized
  source 1..20: mol_type = other DNA
caaaaacatgccaaattgta

SEQ ID NO: 3972 - DNA, 20 bp, synthetic construct
  misc_feature 1..20: note = chemically synthesized
  source 1..20: mol_type = other DNA
gccaaattgtaaagaccatc

SEQ ID NO: 3973 - DNA, 20 bp, synthetic construct
  misc_feature 1..20: note = chemically synthesized
  source 1..20: mol_type = other DNA
ccaaattgtaaagaccatca

SEQ ID NO: 3974 - DNA, 20 bp, synthetic construct
  misc_feature 1..20: note = chemically synthesized
  source 1..20: mol_type = other DNA
attgtaaagaccatcaaggc

SEQ ID NO: 3975 - DNA, 20 bp, synthetic construct
  misc_feature 1..20: note = chemically synthesized
  source 1..20: mol_type = other DNA
ttgtaaagaccatcaaggct

SEQ ID NO: 3976 - DNA, 20 bp, synthetic construct
  misc_feature 1..20: note = chemically synthesized
  source 1..20: mol_type = other DNA
tgtaaagaccatcaaggcta

SEQ ID NO: 3977 - DNA, 20 bp, synthetic construct
  misc_feature 1..20: note = chemically synthesized
  source 1..20: mol_type = other DNA
taaagaccatcaaggctagg

SEQ ID NO: 3978 - DNA, 20 bp, synthetic construct
  misc_feature 1..20: note = chemically synthesized
  source 1..20: mol_type = other DNA
tagggagaaactgcatcaac

SEQ ID NO: 3979 - DNA, 20 bp, synthetic construct
  misc_feature 1..20: note = chemically synthesized
  source 1..20: mol_type = other DNA
gagaaactgcatcaactagc

SEQ ID NO: 3980 - DNA, 20 bp, synthetic construct
  misc_feature 1..20: note = chemically synthesized
  source 1..20: mol_type = other DNA
caactagcaagcaaaataac

SEQ ID NO: 3981 - DNA, 20 bp, synthetic construct
  misc_feature 1..20: note = chemically synthesized
  source 1..20: mol_type = other DNA
accagctaacatcataatga

SEQ ID NO: 3982 - DNA, 20 bp, synthetic construct
  misc_feature 1..20: note = chemically synthesized
  source 1..20: mol_type = other DNA
ccagctaacatcataatgac

SEQ ID NO: 3983 - DNA, 20 bp, synthetic construct
  misc_feature 1..20: note = chemically synthesized
  source 1..20: mol_type = other DNA
tattaaccttaaatgtaaat

SEQ ID NO: 3984 - DNA, 20 bp, synthetic construct
  misc_feature 1..20: note = chemically synthesized
  source 1..20: mol_type = other DNA
gagctaaatgctccaattaa

SEQ ID NO: 3985 - DNA, 20 bp, synthetic construct
  misc_feature 1..20: note = chemically synthesized
  source 1..20: mol_type = other DNA
aatgctccaattaaaagaca

SEQ ID NO: 3986 - DNA, 20 bp, synthetic construct
  misc_feature 1..20: note = chemically synthesized
  source 1..20: mol_type = other DNA
tccaattaaaagacacagac

SEQ ID NO: 3987 - DNA, 20 bp, synthetic construct
  misc_feature 1..20: note = chemically synthesized
  source 1..20: mol_type = other DNA
aaagacacagactggcaaat

SEQ ID NO: 3988 - DNA, 20 bp, synthetic construct
  misc_feature 1..20: note = chemically synthesized
  source 1..20: mol_type = other DNA
acagactggcaaattggata

SEQ ID NO: 3989 - DNA, 20 bp, synthetic construct
  misc_feature 1..20: note = chemically synthesized
  source 1..20: mol_type = other DNA
agactggcaaattggataaa

SEQ ID NO: 3990 - DNA, 20 bp, synthetic construct
  misc_feature 1..20: note = chemically synthesized
  source 1..20: mol_type = other DNA
ggcaaattggataaagagtc

SEQ ID NO: 3991 - DNA, 20 bp, synthetic construct
  misc_feature 1..20: note = chemically synthesized
  source 1..20: mol_type = other DNA
gataaagagtcaagacctat

SEQ ID NO: 3992 - DNA, 20 bp, synthetic construct
  misc_feature 1..20: note = chemically synthesized
  source 1..20: mol_type = other DNA
acctatcagtgtgctgtatt

SEQ ID NO: 3993 - DNA, 20 bp, synthetic construct
  misc_feature 1..20: note = chemically synthesized
  source 1..20: mol_type = other DNA
cctatcagtgtgctgtattc

SEQ ID NO: 3994 - DNA, 20 bp, synthetic construct
  misc_feature 1..20: note = chemically synthesized
  source 1..20: mol_type = other DNA
ttcaggaaaccaatctcatg

SEQ ID NO: 3995 - DNA, 20 bp, synthetic construct
  misc_feature 1..20: note = chemically synthesized
  source 1..20: mol_type = other DNA
caggaaaccaatctcatgtg

SEQ ID NO: 3996 - DNA, 20 bp, synthetic construct
  misc_feature 1..20: note = chemically synthesized
  source 1..20: mol_type = other DNA
ggaaaccaatctcatgtgga

SEQ ID NO: 3997 - DNA, 20 bp, synthetic construct
  misc_feature 1..20: note = chemically synthesized
  source 1..20: mol_type = other DNA
ctcatgtggagagacacaca

SEQ ID NO: 3998 - DNA, 20 bp, synthetic construct
  misc_feature 1..20: note = chemically synthesized
  source 1..20: mol_type = other DNA
tcatgtggagagacacacat

SEQ ID NO: 3999 - DNA, 20 bp, synthetic construct
  misc_feature 1..20: note = chemically synthesized
  source 1..20: mol_type = other DNA
acacacataggctcaaaata

SEQ ID NO: 4000 - DNA, 20 bp, synthetic construct
  misc_feature 1..20: note = chemically synthesized
  source 1..20: mol_type = other DNA
cacacataggctcaaaataa

SEQ ID NO: 4001 - DNA, 20 bp, synthetic construct
  misc_feature 1..20: note = chemically synthesized
  source 1..20: mol_type = other DNA
acacataggctcaaaataaa

SEQ ID NO: 4002 - DNA, 20 bp, synthetic construct
  misc_feature 1..20: note = chemically synthesized
  source 1..20: mol_type = other DNA
ataggctcaaaataaaggga

SEQ ID NO: 4003 - DNA, 20 bp, synthetic construct
  misc_feature 1..20: note = chemically synthesized
  source 1..20: mol_type = other DNA
aggctcaaaataaagggatg

SEQ ID NO: 4004 - DNA, 20 bp, synthetic construct
  misc_feature 1..20: note = chemically synthesized
  source 1..20: mol_type = other DNA
ggctcaaaataaagggatgg

SEQ ID NO: 4005 - DNA, 20 bp, synthetic construct
  misc_feature 1..20: note = chemically synthesized
  source 1..20: mol_type = other DNA
tcaaaataaagggatggagg

SEQ ID NO: 4006 - DNA, 20 bp, synthetic construct
  misc_feature 1..20: note = chemically synthesized
  source 1..20: mol_type = other DNA
gggatggaggaagatctacc

SEQ ID NO: 4007 - DNA, 20 bp, synthetic construct
  misc_feature 1..20: note = chemically synthesized
  source 1..20: mol_type = other DNA
aggaagatctaccaagcaaa

SEQ ID NO: 4008 - DNA, 20 bp, synthetic construct
  misc_feature 1..20: note = chemically synthesized
  source 1..20: mol_type = other DNA
agcaaatggaaaacaaaaaa

SEQ ID NO: 4009 - DNA, 20 bp, synthetic construct
  misc_feature 1..20: note = chemically synthesized
  source 1..20: mol_type = other DNA
gcaaatggaaaacaaaaaaa

SEQ ID NO: 4010 - DNA, 20 bp, synthetic construct
  misc_feature 1..20: note = chemically synthesized
  source 1..20: mol_type = other DNA
aatggaaaacaaaaaaaagg

SEQ ID NO: 4011 - DNA, 20 bp, synthetic construct
  misc_feature 1..20: note = chemically synthesized
  source 1..20: mol_type = other DNA
atggaaaacaaaaaaaaggc

SEQ ID NO: 4012 - DNA, 20 bp, synthetic construct
  misc_feature 1..20: note = chemically synthesized
  source 1..20: mol_type = other DNA
tggaaaacaaaaaaaaggca

SEQ ID NO: 4013 - DNA, 20 bp, synthetic construct
  misc_feature 1..20: note = chemically synthesized
  source 1..20: mol_type = other DNA
aaaggcagggtttgcaatct

SEQ ID NO: 4014 - DNA, 20 bp, synthetic construct
  misc_feature 1..20: note = chemically synthesized
  source 1..20: mol_type = other DNA
aatcttagtctctgataaaa

SEQ ID NO: 4015 - DNA, 20 bp, synthetic construct
  misc_feature 1..20: note = chemically synthesized
  source 1..20: mol_type = other DNA
aaacagactttaaaccaaca

SEQ ID NO: 4016 - DNA, 20 bp, synthetic construct
  misc_feature 1..20: note = chemically synthesized
  source 1..20: mol_type = other DNA
tttaaaccaacaaagatcaa

SEQ ID NO: 4017 - DNA, 20 bp, synthetic construct
  misc_feature 1..20: note = chemically synthesized
  source 1..20: mol_type = other DNA
taaaccaacaaagatcaaaa

SEQ ID NO: 4018 - DNA, 20 bp, synthetic construct
  misc_feature 1..20: note = chemically synthesized
  source 1..20: mol_type = other DNA
aacaaagatcaaaagagaca

SEQ ID NO: 4019 - DNA, 20 bp, synthetic construct
  misc_feature 1..20: note = chemically synthesized
  source 1..20: mol_type = other DNA
aaagatcaaaagagacaaag

SEQ ID NO: 4020 - DNA, 20 bp, synthetic construct
  misc_feature 1..20: note = chemically synthesized
  source 1..20: mol_type = other DNA
aagatcaaaagagacaaaga

SEQ ID NO: 4021 - DNA, 20 bp, synthetic construct
  misc_feature 1..20: note = chemically synthesized
  source 1..20: mol_type = other DNA
caaagaaggccattacatac

SEQ ID NO: 4022 - DNA, 20 bp, synthetic construct
  misc_feature 1..20: note = chemically synthesized
  source 1..20: mol_type = other DNA
aaggccattacatactggta

SEQ ID NO: 4023 - DNA, 20 bp, synthetic construct
  misc_feature 1..20: note = chemically synthesized
  source 1..20: mol_type = other DNA
aggccattacatactggtaa

SEQ ID NO: 4024 - DNA, 20 bp, synthetic construct
  misc_feature 1..20: note = chemically synthesized
  source 1..20: mol_type = other DNA
ggccattacatactggtaaa

SEQ ID NO: 4025 - DNA, 20 bp, synthetic construct
  misc_feature 1..20: note = chemically synthesized
  source 1..20: mol_type = other DNA
ggtaaagggatcaattcaac

SEQ ID NO: 4026 - DNA, 20 bp, synthetic construct
  misc_feature 1..20: note = chemically synthesized
  source 1..20: mol_type = other DNA
aaagggatcaattcaacaag

SEQ ID NO: 4027 - DNA, 20 bp, synthetic construct
  misc_feature 1..20: note = chemically synthesized
  source 1..20: mol_type = other DNA
agggatcaattcaacaagaa

SEQ ID NO: 4028 - DNA, 20 bp, synthetic construct
  misc_feature 1..20: note = chemically synthesized
  source 1..20: mol_type = other DNA
aaatatatatgcacccaata

SEQ ID NO: 4029 - DNA, 20 bp, synthetic construct
  misc_feature 1..20: note = chemically synthesized
  source 1..20: mol_type = other DNA
tatatatgcacccaatacag

SEQ ID NO: 4030 - DNA, 20 bp, synthetic construct
  misc_feature 1..20: note = chemically synthesized
  source 1..20: mol_type = other DNA
gcacccaatacagcagcacc

SEQ ID NO: 4031 - DNA, 20 bp, synthetic construct
  misc_feature 1..20: note = chemically synthesized
  source 1..20: mol_type = other DNA
cagcagcacccagattcata

SEQ ID NO: 4032 - DNA, 20 bp, synthetic construct
  misc_feature 1..20: note = chemically synthesized
  source 1..20: mol_type = other DNA
agcacccagattcataaagc

SEQ ID NO: 4033 - DNA, 20 bp, synthetic construct
  misc_feature 1..20: note = chemically synthesized
  source 1..20: mol_type = other DNA
agattcataaagcaagtcct

SEQ ID NO: 4034 - DNA, 20 bp, synthetic construct
  misc_feature 1..20: note = chemically synthesized
  source 1..20: mol_type = other DNA
attcataaagcaagtcctta

SEQ ID NO: 4035 - DNA, 20 bp, synthetic construct
  misc_feature 1..20: note = chemically synthesized
  source 1..20: mol_type = other DNA
caagtccttagagacctaca

SEQ ID NO: 4036 - DNA, 20 bp, synthetic construct
  misc_feature 1..20: note = chemically synthesized
  source 1..20: mol_type = other DNA
agtccttagagacctacaaa

SEQ ID NO: 4037 - DNA, 20 bp, synthetic construct
  misc_feature 1..20: note = chemically synthesized
  source 1..20: mol_type = other DNA
tagagacctacaaagagact

SEQ ID NO: 4038 - DNA, 20 bp, synthetic construct
  misc_feature 1..20: note = chemically synthesized
  source 1..20: mol_type = other DNA
agactcccacacaataataa

SEQ ID NO: 4039 - DNA, 20 bp, synthetic construct
  misc_feature 1..20: note = chemically synthesized
  source 1..20: mol_type = other DNA
gactcccacacaataataat

SEQ ID NO: 4040 - DNA, 20 bp, synthetic construct
  misc_feature 1..20: note = chemically synthesized
  source 1..20: mol_type = other DNA
ctcccacacaataataatgg

SEQ ID NO: 4041 - DNA, 20 bp, synthetic construct
  misc_feature 1..20: note = chemically synthesized
  source 1..20: mol_type = other DNA
taacaccccactgtcaacat

SEQ ID NO: 4042 - DNA, 20 bp, synthetic construct
  misc_feature 1..20: note = chemically synthesized
  source 1..20: mol_type = other DNA
accccactgtcaacattaga

SEQ ID NO: 4043 - DNA, 20 bp, synthetic construct
  misc_feature 1..20: note = chemically synthesized
  source 1..20: mol_type = other DNA
tcaacattagacagatcaac

SEQ ID NO: 4044 - DNA, 20 bp, synthetic construct
  misc_feature 1..20: note = chemically synthesized
  source 1..20: mol_type = other DNA
cattagacagatcaacgaga

SEQ ID NO: 4045 - DNA, 20 bp, synthetic construct
  misc_feature 1..20: note = chemically synthesized
  source 1..20: mol_type = other DNA
agacagatcaacgagacaga

SEQ ID NO: 4046 - DNA, 20 bp, synthetic construct
  misc_feature 1..20: note = chemically synthesized
  source 1..20: mol_type = other DNA
caacgagacagaaagttaac

SEQ ID NO: 4047 - DNA, 20 bp, synthetic construct
  misc_feature 1..20: note = chemically synthesized
  source 1..20: mol_type = other DNA
aacgagacagaaagttaaca

SEQ ID NO: 4048 - DNA, 20 bp, synthetic construct
  misc_feature 1..20: note = chemically synthesized
  source 1..20: mol_type = other DNA
agaaagttaacaaggatatc

SEQ ID NO: 4049 - DNA, 20 bp, synthetic construct
  misc_feature 1..20: note = chemically synthesized
  source 1..20: mol_type = other DNA
gaaagttaacaaggatatcc

SEQ ID NO: 4050 - DNA, 20 bp, synthetic construct
  misc_feature 1..20: note = chemically synthesized
  source 1..20: mol_type = other DNA
ggatatccaggaattgaatt

SEQ ID NO: 4051 - DNA, 20 bp, synthetic construct
  misc_feature 1..20: note = chemically synthesized
  source 1..20: mol_type = other DNA
attgaattcagctctgcacc

SEQ ID NO: 4052 - DNA, 20 bp, synthetic construct
  misc_feature 1..20: note = chemically synthesized
  source 1..20: mol_type = other DNA
gaattcagctctgcaccaag

SEQ ID NO: 4053 - DNA, 20 bp, synthetic construct
  misc_feature 1..20: note = chemically synthesized
  source 1..20: mol_type = other DNA
tctgcaccaagcagacctaa

SEQ ID NO: 4054 - DNA, 20 bp, synthetic construct
  misc_feature 1..20: note = chemically synthesized
  source 1..20: mol_type = other DNA
gcagacctaatagacatcta

SEQ ID NO: 4055 - DNA, 20 bp, synthetic construct
  misc_feature 1..20: note = chemically synthesized
  source 1..20: mol_type = other DNA
aactctccatcccaaatcaa

SEQ ID NO: 4056 - DNA, 20 bp, synthetic construct
  misc_feature 1..20: note = chemically synthesized
  source 1..20: mol_type = other DNA
aatagaatatacattcttct

SEQ ID NO: 4057 - DNA, 20 bp, synthetic construct
  misc_feature 1..20: note = chemically synthesized
  source 1..20: mol_type = other DNA
gcaccacaccacacctattc

SEQ ID NO: 4058 - DNA, 20 bp, synthetic construct
  misc_feature 1..20: note = chemically synthesized
  source 1..20: mol_type = other DNA
acctattccagttgaccaca

SEQ ID NO: 4059 - DNA, 20 bp, synthetic construct
  misc_feature 1..20: note = chemically synthesized
  source 1..20: mol_type = other DNA
attccagttgaccacatagt

SEQ ID NO: 4060 - DNA, 20 bp, synthetic construct
  misc_feature 1..20: note = chemically synthesized
  source 1..20: mol_type = other DNA
ccagttgaccacatagttgg

SEQ ID NO: 4061 - DNA, 20 bp, synthetic construct
  misc_feature 1..20: note = chemically synthesized
  source 1..20: mol_type = other DNA
tgaccacatagttggaagtg

SEQ ID NO: 4062 - DNA, 20 bp, synthetic construct
  misc_feature 1..20: note = chemically synthesized
  source 1..20: mol_type = other DNA
gttggaagtgaagcactcct

SEQ ID NO: 4063 - DNA, 20 bp, synthetic construct
  misc_feature 1..20: note = chemically synthesized
  source 1..20: mol_type = other DNA
gcactcctcagcaaacgtaa

SEQ ID NO: 4064 - DNA, 20 bp, synthetic construct
  misc_feature 1..20: note = chemically synthesized
  source 1..20: mol_type = other DNA
cctcagcaaacgtaaaagaa

SEQ ID NO: 4065 - DNA, 20 bp, synthetic construct
  misc_feature 1..20: note = chemically synthesized
  source 1..20: mol_type = other DNA
aacaataacaaactgtctct

SEQ ID NO: 4066 - DNA, 20 bp, synthetic construct
  misc_feature 1..20: note = chemically synthesized
  source 1..20: mol_type = other DNA
acaaactgtctctcagacca

SEQ ID NO: 4067 - DNA, 20 bp, synthetic construct
  misc_feature 1..20: note = chemically synthesized
  source 1..20: mol_type = other DNA
agaccacagtgcaatcaaac

SEQ ID NO: 4068 - DNA, 20 bp, synthetic construct
  misc_feature 1..20: note = chemically synthesized
  source 1..20: mol_type = other DNA
agtgcaatcaaactagaact

SEQ ID NO: 4069 - DNA, 20 bp, synthetic construct
  misc_feature 1..20: note = chemically synthesized
  source 1..20: mol_type = other DNA
gtgcaatcaaactagaactc

SEQ ID NO: 4070 - DNA, 20 bp, synthetic construct
  misc_feature 1..20: note = chemically synthesized
  source 1..20: mol_type = other DNA
tcaaactagaactcaggatt

SEQ ID NO: 4071 - DNA, 20 bp, synthetic construct
  misc_feature 1..20: note = chemically synthesized
  source 1..20: mol_type = other DNA
ctcaaaaccactcaactaca

SEQ ID NO: 4072 - DNA, 20 bp, synthetic construct
  misc_feature 1..20: note = chemically synthesized
  source 1..20: mol_type = other DNA
tcaactacatggaaactgaa

SEQ ID NO: 4073 - DNA, 20 bp, synthetic construct
  misc_feature 1..20: note = chemically synthesized
  source 1..20: mol_type = other DNA
gcctgctcctgaatgactac

SEQ ID NO: 4074 - DNA, 20 bp, synthetic construct
  misc_feature 1..20: note = chemically synthesized
  source 1..20: mol_type = other DNA
cctgctcctgaatgactact

SEQ ID NO: 4075 - DNA, 20 bp, synthetic construct
  misc_feature 1..20: note = chemically synthesized
  source 1..20: mol_type = other DNA
actgggtacataacaaaatg

SEQ ID NO: 4076 - DNA, 20 bp, synthetic construct
  misc_feature 1..20: note = chemically synthesized
  source 1..20: mol_type = other DNA
ctgggtacataacaaaatga

SEQ ID NO: 4077 - DNA, 20 bp, synthetic construct
  misc_feature 1..20: note = chemically synthesized
  source 1..20: mol_type = other DNA
ggtacataacaaaatgaagg

SEQ ID NO: 4078 - DNA, 20 bp, synthetic construct
  misc_feature 1..20: note = chemically synthesized
  source 1..20: mol_type = other DNA
acaaaatgaaggcagaaata

SEQ ID NO: 4079 - DNA, 20 bp, synthetic construct
  misc_feature 1..20: note = chemically synthesized
  source 1..20: mol_type = other DNA
agatgttctttgaaaccaac

SEQ ID NO: 4080 - DNA, 20 bp, synthetic construct
  misc_feature 1..20: note = chemically synthesized
  source 1..20: mol_type = other DNA
ctttgaaaccaacgagaata

SEQ ID NO: 4081 - DNA, 20 bp, synthetic construct
  misc_feature 1..20: note = chemically synthesized
  source 1..20: mol_type = other DNA
agaataaagatacaacaaaa

SEQ ID NO: 4082 - DNA, 20 bp, synthetic construct
  misc_feature 1..20: note = chemically synthesized
  source 1..20: mol_type = other DNA
atacaacaaaacagaatctc

SEQ ID NO: 4083 - DNA, 20 bp, synthetic construct
  misc_feature 1..20: note = chemically synthesized
  source 1..20: mol_type = other DNA
tacaacaaaacagaatctct

SEQ ID NO: 4084 - DNA, 20 bp, synthetic construct
  misc_feature 1..20: note = chemically synthesized
  source 1..20: mol_type = other DNA
gaatctctgggacacattta

SEQ ID NO: 4085 - DNA, 20 bp, synthetic construct
  misc_feature 1..20: note = chemically synthesized
  source 1..20: mol_type = other DNA
tctctgggacacatttaaag

SEQ ID NO: 4086 - DNA, 20 bp, synthetic construct
  misc_feature 1..20: note = chemically synthesized
  source 1..20: mol_type = other DNA
gacacatttaaagcagtgtg

SEQ ID NO: 4087 - DNA, 20 bp, synthetic construct
  misc_feature 1..20: note = chemically synthesized
  source 1..20: mol_type = other DNA
cacatttaaagcagtgtgta

SEQ ID NO: 4088 - DNA, 20 bp, synthetic construct
  misc_feature 1..20: note = chemically synthesized
  source 1..20: mol_type = other DNA
acatttaaagcagtgtgtag

SEQ ID NO: 4089 - DNA, 20 bp, synthetic construct
  misc_feature 1..20: note = chemically synthesized
  source 1..20: mol_type = other DNA
catttaaagcagtgtgtaga

SEQ ID NO: 4090 - DNA, 20 bp, synthetic construct
  misc_feature 1..20: note = chemically synthesized
  source 1..20: mol_type = other DNA
agtgtgtagagggaaattta

SEQ ID NO: 4091 - DNA, 20 bp, synthetic construct
  misc_feature 1..20: note = chemically synthesized
  source 1..20: mol_type = other DNA
atagcactaaatgcccacaa

SEQ ID NO: 4092 - DNA, 20 bp, synthetic construct
  misc_feature 1..20: note = chemically synthesized
  source 1..20: mol_type = other DNA
cactaaatgcccacaaaaga

SEQ ID NO: 4093 - DNA, 20 bp, synthetic construct
  misc_feature 1..20: note = chemically synthesized
  source 1..20: mol_type = other DNA
taaatgcccacaaaagaaag

SEQ ID NO: 4094 - DNA, 20 bp, synthetic construct
  misc_feature 1..20: note = chemically synthesized
  source 1..20: mol_type = other DNA
aaatgcccacaaaagaaagc

SEQ ID NO: 4095 - DNA, 20 bp, synthetic construct
  misc_feature 1..20: note = chemically synthesized
  source 1..20: mol_type = other DNA
gcccacaaaagaaagcagga

SEQ ID NO: 4096 - DNA, 20 bp, synthetic construct
  misc_feature 1..20: note = chemically synthesized
  source 1..20: mol_type = other DNA
caccctaacatcacaattaa

SEQ ID NO: 4097 - DNA, 20 bp, synthetic construct
  misc_feature 1..20: note = chemically synthesized
  source 1..20: mol_type = other DNA
aacatcacaattaaaagaac

SEQ ID NO: 4098 - DNA, 20 bp, synthetic construct
  misc_feature 1..20: note = chemically synthesized
  source 1..20: mol_type = other DNA
catcacaattaaaagaacta

SEQ ID NO: 4099 - DNA, 20 bp, synthetic construct
  misc_feature 1..20: note = chemically synthesized
  source 1..20: mol_type = other DNA
cacaattaaaagaactagag

SEQ ID NO: 4100 - DNA, 20 bp, synthetic construct
  misc_feature 1..20: note = chemically synthesized
  source 1..20: mol_type = other DNA
attaaaagaactagagaagc

SEQ ID NO: 4101 - DNA, 20 bp, synthetic construct
  misc_feature 1..20: note = chemically synthesized
  source 1..20: mol_type = other DNA
taaaagaactagagaagcaa

SEQ ID NO: 4102 - DNA, 20 bp, synthetic construct
  misc_feature 1..20: note = chemically synthesized
  source 1..20: mol_type = other DNA
gcaagagcaaacactttcaa

SEQ ID NO: 4103 - DNA, 20 bp, synthetic construct
  misc_feature 1..20: note = chemically synthesized
  source 1..20: mol_type = other DNA
gagcaaacactttcaaaagc

SEQ ID NO: 4104 - DNA, 20 bp, synthetic construct
  misc_feature 1..20: note = chemically synthesized
  source 1..20: mol_type = other DNA
caaacactttcaaaagctag

SEQ ID NO: 4105 - DNA, 20 bp, synthetic construct
  misc_feature 1..20: note = chemically synthesized
  source 1..20: mol_type = other DNA
acactttcaaaagctagcgg

SEQ ID NO: 4106 - DNA, 20 bp, synthetic construct
  misc_feature 1..20: note = chemically synthesized
  source 1..20: mol_type = other DNA
cactttcaaaagctagcgga

SEQ ID NO: 4107 - DNA, 20 bp, synthetic construct
  misc_feature 1..20: note = chemically synthesized
  source 1..20: mol_type = other DNA
ttcaaaagctagcggaaggc

SEQ ID NO: 4108 - DNA, 20 bp, synthetic construct
  misc_feature 1..20: note = chemically synthesized
  source 1..20: mol_type = other DNA
gctagcggaaggcaagaaat

SEQ ID NO: 4109 - DNA, 20 bp, synthetic construct
  misc_feature 1..20: note = chemically synthesized
  source 1..20: mol_type = other DNA
gcggaaggcaagaaataagt

SEQ ID NO: 4110 - DNA, 20 bp, synthetic construct
  misc_feature 1..20: note = chemically synthesized
  source 1..20: mol_type = other DNA
aggcaagaaataagtaagat

SEQ ID NO: 4111 - DNA, 20 bp, synthetic construct
  misc_feature 1..20: note = chemically synthesized
  source 1..20: mol_type = other DNA
gcaagaaataagtaagatca

SEQ ID NO: 4112 - DNA, 20 bp, synthetic construct
  misc_feature 1..20: note = chemically synthesized
  source 1..20: mol_type = other DNA
agaaataagtaagatcagag

SEQ ID NO: 4113 - DNA, 20 bp, synthetic construct
  misc_feature 1..20: note = chemically synthesized
  source 1..20: mol_type = other DNA
aataagtaagatcagagcag

SEQ ID NO: 4114 - DNA, 20 bp, synthetic construct
  misc_feature 1..20: note = chemically synthesized
  source 1..20: mol_type = other DNA
gtaagatcagagcagaagtg

SEQ ID NO: 4115 - DNA, 20 bp, synthetic construct
  misc_feature 1..20: note = chemically synthesized
  source 1..20: mol_type = other DNA
taagatcagagcagaagtga

SEQ ID NO: 4116 - DNA, 20 bp, synthetic construct
  misc_feature 1..20: note = chemically synthesized
  source 1..20: mol_type = other DNA
agatcagagcagaagtgaag

SEQ ID NO: 4117 - DNA, 20 bp, synthetic construct
  misc_feature 1..20: note = chemically synthesized
  source 1..20: mol_type = other DNA
gagcagaagtgaaggagatt

SEQ ID NO: 4118 - DNA, 20 bp, synthetic construct
  misc_feature 1..20: note = chemically synthesized
  source 1..20: mol_type = other DNA
cttaaaaaaatcaatgaatc

SEQ ID NO: 4119 - DNA, 20 bp, synthetic construct
  misc_feature 1..20: note = chemically synthesized
  source 1..20: mol_type = other DNA
ttaaaaaaatcaatgaatcc

SEQ ID NO: 4120 - DNA, 20 bp, synthetic construct
  misc_feature 1..20: note = chemically synthesized
  source 1..20: mol_type = other DNA
aaaaaaatcaatgaatccag

SEQ ID NO: 4121 - DNA, 20 bp, synthetic construct
  misc_feature 1..20: note = chemically synthesized
  source 1..20: mol_type = other DNA
aaatcaatgaatccaggagc

SEQ ID NO: 4122 - DNA, 20 bp, synthetic construct
  misc_feature 1..20: note = chemically synthesized
  source 1..20: mol_type = other DNA
ccaggagctggttttttgaa

SEQ ID NO: 4123 - DNA, 20 bp, synthetic construct
  misc_feature 1..20: note = chemically synthesized
  source 1..20: mol_type = other DNA
gaaaagatcaacaaaattga

SEQ ID NO: 4124 - DNA, 20 bp, synthetic construct
  misc_feature 1..20: note = chemically synthesized
  source 1..20: mol_type = other DNA
caacaaaattgatagactgc

SEQ ID NO: 4125 - DNA, 20 bp, synthetic construct
  misc_feature 1..20: note = chemically synthesized
  source 1..20: mol_type = other DNA
aaaattgatagactgctagc

SEQ ID NO: 4126 - DNA, 20 bp, synthetic construct
  misc_feature 1..20: note = chemically synthesized
  source 1..20: mol_type = other DNA
gactgctagcaagactaata

SEQ ID NO: 4127 - DNA, 20 bp, synthetic construct
  misc_feature 1..20: note = chemically synthesized
  source 1..20: mol_type = other DNA
tgctagcaagactaataaag

SEQ ID NO: 4128 - DNA, 20 bp, synthetic construct
  misc_feature 1..20: note = chemically synthesized
  source 1..20: mol_type = other DNA
gcaagactaataaagaagaa

SEQ ID NO: 4129 - DNA, 20 bp, synthetic construct
  misc_feature 1..20: note = chemically synthesized
  source 1..20: mol_type = other DNA
aagactaataaagaagaaaa

SEQ ID NO: 4130 - DNA, 20 bp, synthetic construct
  misc_feature 1..20: note = chemically synthesized
  source 1..20: mol_type = other DNA
gactaataaagaagaaaaga

SEQ ID NO: 4131 - DNA, 20 bp, synthetic construct
  misc_feature 1..20: note = chemically synthesized
  source 1..20: mol_type = other DNA
taataaagaagaaaagagag

SEQ ID NO: 4132 - DNA, 20 bp, synthetic construct
  misc_feature 1..20: note = chemically synthesized
  source 1..20: mol_type = other DNA
gaaaagagagaagactcaaa

SEQ ID NO: 4133 - DNA, 20 bp, synthetic construct
  misc_feature 1..20: note = chemically synthesized
  source 1..20: mol_type = other DNA
aagactcaaatagatgcaat

SEQ ID NO: 4134 - DNA, 20 bp, synthetic construct
  misc_feature 1..20: note = chemically synthesized
  source 1..20: mol_type = other DNA
agatgcaataagaaatgata

SEQ ID NO: 4135 - DNA, 20 bp, synthetic construct
  misc_feature 1..20: note = chemically synthesized
  source 1..20: mol_type = other DNA
gatgcaataagaaatgataa

SEQ ID NO: 4136 - DNA, 20 bp, synthetic construct
  misc_feature 1..20: note = chemically synthesized
  source 1..20: mol_type = other DNA
atgcaataagaaatgataaa

SEQ ID NO: 4137 - DNA, 20 bp, synthetic construct
  misc_feature 1..20: note = chemically synthesized
  source 1..20: mol_type = other DNA
tgcaataagaaatgataaag

SEQ ID NO: 4138 - DNA, 20 bp, synthetic construct
  misc_feature 1..20: note = chemically synthesized
  source 1..20: mol_type = other DNA
ggatatcaccaccaatccca

SEQ ID NO: 4139 - DNA, 20 bp, synthetic construct
  misc_feature 1..20: note = chemically synthesized
  source 1..20: mol_type = other DNA
acagacatacaaactaccat

SEQ ID NO: 4140 - DNA, 20 bp, synthetic construct
  misc_feature 1..20: note = chemically synthesized
  source 1..20: mol_type = other DNA
agacatacaaactaccatca

SEQ ID NO: 4141 - DNA, 20 bp, synthetic construct
  misc_feature 1..20: note = chemically synthesized
  source 1..20: mol_type = other DNA
acacctctacgcaaataaac

SEQ ID NO: 4142 - DNA, 20 bp, synthetic construct
  misc_feature 1..20: note = chemically synthesized
  source 1..20: mol_type = other DNA
cgcaaataaactagaaaatc

SEQ ID NO: 4143 - DNA, 20 bp, synthetic construct
  misc_feature 1..20: note = chemically synthesized
  source 1..20: mol_type = other DNA
aaataaactagaaaatctag

SEQ ID NO: 4144 - DNA, 20 bp, synthetic construct
  misc_feature 1..20: note = chemically synthesized
  source 1..20: mol_type = other DNA
actagaaaatctagtagaaa

SEQ ID NO: 4145 - DNA, 20 bp, synthetic construct
  misc_feature 1..20: note = chemically synthesized
  source 1..20: mol_type = other DNA
ctcgacacatacaccctccc

SEQ ID NO: 4146 - DNA, 20 bp, synthetic construct
  misc_feature 1..20: note = chemically synthesized
  source 1..20: mol_type = other DNA
acaccctcccaagactaaac

SEQ ID NO: 4147 - DNA, 20 bp, synthetic construct
  misc_feature 1..20: note = chemically synthesized
  source 1..20: mol_type = other DNA
caccctcccaagactaaacc

SEQ ID NO: 4148 - DNA, 20 bp, synthetic construct
  misc_feature 1..20: note = chemically synthesized
  source 1..20: mol_type = other DNA
accctcccaagactaaacca

SEQ ID NO: 4149 - DNA, 20 bp, synthetic construct
  misc_feature 1..20: note = chemically synthesized
  source 1..20: mol_type = other DNA
cctcccaagactaaaccagg

SEQ ID NO: 4150 - DNA, 20 bp, synthetic construct
  misc_feature 1..20: note = chemically synthesized
  source 1..20: mol_type = other DNA
ggagaaattgaatctcttaa

SEQ ID NO: 4151 - DNA, 20 bp, synthetic construct
  misc_feature 1..20: note = chemically synthesized
  source 1..20: mol_type = other DNA
atctcttaatagacaaataa

SEQ ID NO: 4152 - DNA, 20 bp, synthetic construct
  misc_feature 1..20: note = chemically synthesized
  source 1..20: mol_type = other DNA
tctcttaatagacaaataat

SEQ ID NO: 4153 - DNA, 20 bp, synthetic construct
  misc_feature 1..20: note = chemically synthesized
  source 1..20: mol_type = other DNA
aaataataggctctgaaatt

SEQ ID NO: 4154 - DNA, 20 bp, synthetic construct
  misc_feature 1..20: note = chemically synthesized
  source 1..20: mol_type = other DNA
gaaattgagacaataattaa

SEQ ID NO: 4155 - DNA, 20 bp, synthetic construct
  misc_feature 1..20: note = chemically synthesized
  source 1..20: mol_type = other DNA
agtttacacattgtatatct

SEQ ID NO: 4156 - DNA, 20 bp, synthetic construct
  misc_feature 1..20: note = chemically synthesized
  source 1..20: mol_type = other DNA
tgtatatctaagtaccacca

SEQ ID NO: 4157 - DNA, 20 bp, synthetic construct
  misc_feature 1..20: note = chemically synthesized
  source 1..20: mol_type = other DNA
atatctaagtaccaccacag

SEQ ID NO: 4158 - DNA, 20 bp, synthetic construct
  misc_feature 1..20: note = chemically synthesized
  source 1..20: mol_type = other DNA
ctaagtaccaccacagcagc

SEQ ID NO: 4159 - DNA, 20 bp, synthetic construct
  misc_feature 1..20: note = chemically synthesized
  source 1..20: mol_type = other DNA
aatgttttcacattataaaa

SEQ ID NO: 4160 - DNA, 20 bp, synthetic construct
  misc_feature 1..20: note = chemically synthesized
  source 1..20: mol_type = other DNA
atgttttcacattataaaac

SEQ ID NO: 4161 - DNA, 20 bp, synthetic construct
  misc_feature 1..20: note = chemically synthesized
  source 1..20: mol_type = other DNA
gttttcacattataaaacag

SEQ ID NO: 4162 - DNA, 20 bp, synthetic construct
  misc_feature 1..20: note = chemically synthesized
  source 1..20: mol_type = other DNA
tacttgttattactaattac

SEQ ID NO: 4163 - DNA, 20 bp, synthetic construct
  misc_feature 1..20: note = chemically synthesized
  source 1..20: mol_type = other DNA
attactagttctaaaaaatg

SEQ ID NO: 4164 - DNA, 20 bp, synthetic construct
  misc_feature 1..20: note = chemically synthesized
  source 1..20: mol_type = other DNA
ctagttctaaaaaatgtgga

SEQ ID NO: 4165 - DNA, 20 bp, synthetic construct
  misc_feature 1..20: note = chemically synthesized
  source 1..20: mol_type = other DNA
gttctaaaaaatgtggatag

SEQ ID NO: 4166 - DNA, 20 bp, synthetic construct
  misc_feature 1..20: note = chemically synthesized
  source 1..20: mol_type = other DNA
taaaaaatgtggatagaagc

SEQ ID NO: 4167 - DNA, 20 bp, synthetic construct
  misc_feature 1..20: note = chemically synthesized
  source 1..20: mol_type = other DNA
atagaagcaagtttaatatt

SEQ ID NO: 4168 - DNA, 20 bp, synthetic construct
  misc_feature 1..20: note = chemically synthesized
  source 1..20: mol_type = other DNA
gaagcaagtttaatattgag

SEQ ID NO: 4169 - DNA, 20 bp, synthetic construct
  misc_feature 1..20: note = chemically synthesized
  source 1..20: mol_type = other DNA
tttaatattgagtggaaaat

SEQ ID NO: 4170 - DNA, 20 bp, synthetic construct
  misc_feature 1..20: note = chemically synthesized
  source 1..20: mol_type = other DNA
tattgagtggaaaataagat

SEQ ID NO: 4171 - DNA, 20 bp, synthetic construct
  misc_feature 1..20: note = chemically synthesized
  source 1..20: mol_type = other DNA
attgagtggaaaataagatt

SEQ ID NO: 4172 - DNA, 20 bp, synthetic construct
  misc_feature 1..20: note = chemically synthesized
  source 1..20: mol_type = other DNA
tgagtggaaaataagattag

SEQ ID NO: 4173 - DNA, 20 bp, synthetic construct
  misc_feature 1..20: note = chemically synthesized
  source 1..20: mol_type = other DNA
aagattaggagatgcaacac

SEQ ID NO: 4174 - DNA, 20 bp, synthetic construct
  misc_feature 1..20: note = chemically synthesized
  source 1..20: mol_type = other DNA
agattaggagatgcaacacc

SEQ ID NO: 4175 - DNA, 20 bp, synthetic construct
  misc_feature 1..20: note = chemically synthesized
  source 1..20: mol_type = other DNA
gattaggagatgcaacacca

SEQ ID NO: 4176 - DNA, 20 bp, synthetic construct
  misc_feature 1..20: note = chemically synthesized
  source 1..20: mol_type = other DNA
taggagatgcaacaccaggg

SEQ ID NO: 4177 - DNA, 20 bp, synthetic construct
  misc_feature 1..20: note = chemically synthesized
  source 1..20: mol_type = other DNA
aggagatgcaacaccagggt

SEQ ID NO: 4178 - DNA, 20 bp, synthetic construct
  misc_feature 1..20: note = chemically synthesized
  source 1..20: mol_type = other DNA
accagggtaggtgacatata

SEQ ID NO: 4179 - DNA, 20 bp, synthetic construct
  misc_feature 1..20: note = chemically synthesized
  source 1..20: mol_type = other DNA
cagggtaggtgacatataca

SEQ ID NO: 4180 - DNA, 20 bp, synthetic construct
  misc_feature 1..20: note = chemically synthesized
  source 1..20: mol_type = other DNA
gtaggtgacatatacagaga

SEQ ID NO: 4181 - DNA, 20 bp, synthetic construct
  misc_feature 1..20: note = chemically synthesized
  source 1..20: mol_type = other DNA
tgacatatacagagatagat

SEQ ID NO: 4182 - DNA, 20 bp, synthetic construct
  misc_feature 1..20: note = chemically synthesized
  source 1..20: mol_type = other DNA
atatacagagatagattaga

SEQ ID NO: 4183 - DNA, 20 bp, synthetic construct
  misc_feature 1..20: note = chemically synthesized
  source 1..20: mol_type = other DNA
tatacagagatagattagat

SEQ ID NO: 4184 - DNA, 20 bp, synthetic construct
  misc_feature 1..20: note = chemically synthesized
  source 1..20: mol_type = other DNA
acagagatagattagatagg

SEQ ID NO: 4185 - DNA, 20 bp, synthetic construct
  misc_feature 1..20: note = chemically synthesized
  source 1..20: mol_type = other DNA
agatagattagataggtaga

SEQ ID NO: 4186 - DNA, 20 bp, synthetic construct
  misc_feature 1..20: note = chemically synthesized
  source 1..20: mol_type = other DNA
agattagataggtagatagc

SEQ ID NO: 4187 - DNA, 20 bp, synthetic construct
  misc_feature 1..20: note = chemically synthesized
  source 1..20: mol_type = other DNA
tagataggtagatagctagc

SEQ ID NO: 4188 - DNA, 20 bp, synthetic construct
  misc_feature 1..20: note = chemically synthesized
  source 1..20: mol_type = other DNA
taggtagatagctagctagc

SEQ ID NO: 4189 - DNA, 20 bp, synthetic construct
  misc_feature 1..20: note = chemically synthesized
  source 1..20: mol_type = other DNA
tagatagctagctagctagc

SEQ ID NO: 4190 - DNA, 20 bp, synthetic construct
  misc_feature 1..20: note = chemically synthesized
  source 1..20: mol_type = other DNA
tagctagctagctagctagc

SEQ ID NO: 4191 - DNA, 20 bp, synthetic construct
  misc_feature 1..20: note = chemically synthesized
  source 1..20: mol_type = other DNA
tagctagctagctagctagc

SEQ ID NO: 4192 - DNA, 20 bp, synthetic construct
  misc_feature 1..20: note = chemically synthesized
  source 1..20: mol_type = other DNA
tagctagctagctagctagc

SEQ ID NO: 4193 - DNA, 20 bp, synthetic construct
  misc_feature 1..20: note = chemically synthesized
  source 1..20: mol_type = other DNA
tagctagctagctagctaga

SEQ ID NO: 4194 - DNA, 20 bp, synthetic construct
  misc_feature 1..20: note = chemically synthesized
  source 1..20: mol_type = other DNA
tagctagctagctagaaaga

SEQ ID NO: 4195 - DNA, 20 bp, synthetic construct
  misc_feature 1..20: note = chemically synthesized
  source 1..20: mol_type = other DNA
tagctagctagaaagataga

SEQ ID NO: 4196 - DNA, 20 bp, synthetic construct
  misc_feature 1..20: note = chemically synthesized
  source 1..20: mol_type = other DNA
tagctagaaagatagataga

SEQ ID NO: 4197 - DNA, 20 bp, synthetic construct
  misc_feature 1..20: note = chemically synthesized
  source 1..20: mol_type = other DNA
tagaaagatagatagataga

SEQ ID NO: 4198 - DNA, 20 bp, synthetic construct
  misc_feature 1..20: note = chemically synthesized
  source 1..20: mol_type = other DNA
aagatagatagatagataga

SEQ ID NO: 4199 - DNA, 20 bp, synthetic construct
  misc_feature 1..20: note = chemically synthesized
  source 1..20: mol_type = other DNA
tagatagatagatagataga

SEQ ID NO: 4200 - DNA, 20 bp, synthetic construct
  misc_feature 1..20: note = chemically synthesized
  source 1..20: mol_type = other DNA
tagatagatagatagataga

SEQ ID NO: 4201 - DNA, 20 bp, synthetic construct
  misc_feature 1..20: note = chemically synthesized
  source 1..20: mol_type = other DNA
tagatagatagatagataga

SEQ ID NO: 4202 - DNA, 20 bp, synthetic construct
  misc_feature 1..20: note = chemically synthesized
  source 1..20: mol_type = other DNA
tagatagatagatagataga

SEQ ID NO: 4203 - DNA, 20 bp, synthetic construct
  misc_feature 1..20: note = chemically synthesized
  source 1..20: mol_type = other DNA
tagatagatagatagataga

SEQ ID NO: 4204 - DNA, 20 bp, synthetic construct
  misc_feature 1..20: note = chemically synthesized
  source 1..20: mol_type = other DNA
tagatagatagatagataga

SEQ ID NO: 4205 - DNA, 20 bp, synthetic construct
  misc_feature 1..20: note = chemically synthesized
  source 1..20: mol_type = other DNA
tagatagatagatagataga

SEQ ID NO: 4206 - DNA, 20 bp, synthetic construct
  misc_feature 1..20: note = chemically synthesized
  source 1..20: mol_type = other DNA
tagatagatagatagatgca

SEQ ID NO: 4207 - DNA, 20 bp, synthetic construct
  misc_feature 1..20: note = chemically synthesized
  source 1..20: mol_type = other DNA
agatagatagatagatgcat

SEQ ID NO: 4208 - DNA, 20 bp, synthetic construct
  misc_feature 1..20: note = chemically synthesized
  source 1..20: mol_type = other DNA
tagatgcatgggtataaaca

SEQ ID NO: 4209 - DNA, 20 bp, synthetic construct
  misc_feature 1..20: note = chemically synthesized
  source 1..20: mol_type = other DNA
agataataatatgtgaatga

SEQ ID NO: 4210 - DNA, 20 bp, synthetic construct
  misc_feature 1..20: note = chemically synthesized
  source 1..20: mol_type = other DNA
gataataatatgtgaatgac

SEQ ID NO: 4211 - DNA, 20 bp, synthetic construct
  misc_feature 1..20: note = chemically synthesized
  source 1..20: mol_type = other DNA
aataatatgtgaatgacagg

SEQ ID NO: 4212 - DNA, 20 bp, synthetic construct
  misc_feature 1..20: note = chemically synthesized
  source 1..20: mol_type = other DNA
aggtggcttctatactctct

SEQ ID NO: 4213 - DNA, 20 bp, synthetic construct
  misc_feature 1..20: note = chemically synthesized
  source 1..20: mol_type = other DNA
ctctctaagttccctttctc

SEQ ID NO: 4214 - DNA, 20 bp, synthetic construct
  misc_feature 1..20: note = chemically synthesized
  source 1..20: mol_type = other DNA
aagttccctttctcaagtaa

SEQ ID NO: 4215 - DNA, 20 bp, synthetic construct
  misc_feature 1..20: note = chemically synthesized
  source 1..20: mol_type = other DNA
tccctttctcaagtaaaagc

SEQ ID NO: 4216 - DNA, 20 bp, synthetic construct
  misc_feature 1..20: note = chemically synthesized
  source 1..20: mol_type = other DNA
tctcaagtaaaagctggcta

SEQ ID NO: 4217 - DNA, 20 bp, synthetic construct
  misc_feature 1..20: note = chemically synthesized
  source 1..20: mol_type = other DNA
ggctaaagttcttgtttttt

SEQ ID NO: 4218 - DNA, 20 bp, synthetic construct
  misc_feature 1..20: note = chemically synthesized
  source 1..20: mol_type = other DNA
gctaaagttcttgttttttg

SEQ ID NO: 4219 - DNA, 20 bp, synthetic construct
  misc_feature 1..20: note = chemically synthesized
  source 1..20: mol_type = other DNA
aaagttcttgttttttgagg

SEQ ID NO: 4220 - DNA, 20 bp, synthetic construct
  misc_feature 1..20: note = chemically synthesized
  source 1..20: mol_type = other DNA
tcttgttttttgaggtggca

SEQ ID NO: 4221 - DNA, 20 bp, synthetic construct
  misc_feature 1..20: note = chemically synthesized
  source 1..20: mol_type = other DNA
cttgttttttgaggtggcac

SEQ ID NO: 4222 - DNA, 20 bp, synthetic construct
  misc_feature 1..20: note = chemically synthesized
  source 1..20: mol_type = other DNA
ttgttttttgaggtggcaca

SEQ ID NO: 4223 - DNA, 20 bp, synthetic construct
  misc_feature 1..20: note = chemically synthesized
  source 1..20: mol_type = other DNA
tgttttttgaggtggcacag

SEQ ID NO: 4224 - DNA, 20 bp, synthetic construct
  misc_feature 1..20: note = chemically synthesized
  source 1..20: mol_type = other DNA
ttgaggtggcacaggggctt

SEQ ID NO: 4225 - DNA, 20 bp, synthetic construct
  misc_feature 1..20: note = chemically synthesized
  source 1..20: mol_type = other DNA
cccatctcttgattccatta

SEQ ID NO: 4226 - DNA, 20 bp, synthetic construct
  misc_feature 1..20: note = chemically synthesized
  source 1..20: mol_type = other DNA
tcaatatactgatcattgta

SEQ ID NO: 4227 - DNA, 20 bp, synthetic construct
  misc_feature 1..20: note = chemically synthesized
  source 1..20: mol_type = other DNA
atactgatcattgtatagca

SEQ ID NO: 4228 - DNA, 20 bp, synthetic construct
  misc_feature 1..20: note = chemically synthesized
  source 1..20: mol_type = other DNA
cctttacttttgtttttgct

SEQ ID NO: 4229 - DNA, 20 bp, synthetic construct
  misc_feature 1..20: note = chemically synthesized
  source 1..20: mol_type = other DNA
ttgctaagtgctaaatattc

SEQ ID NO: 4230 - DNA, 20 bp, synthetic construct
  misc_feature 1..20: note = chemically synthesized
  source 1..20: mol_type = other DNA
tggtctcaaattttatatga

SEQ ID NO: 4231 - DNA, 20 bp, synthetic construct
  misc_feature 1..20: note = chemically synthesized
  source 1..20: mol_type = other DNA
ttttatatgatggaaatgtt

SEQ ID NO: 4232 - DNA, 20 bp, synthetic construct
  misc_feature 1..20: note = chemically synthesized
  source 1..20: mol_type = other DNA
tttatatgatggaaatgttt

SEQ ID NO: 4233 - DNA, 20 bp, synthetic construct
  misc_feature 1..20: note = chemically synthesized
  source 1..20: mol_type = other DNA
atgtttgggtcccatttttt

SEQ ID NO: 4234 - DNA, 20 bp, synthetic construct
  misc_feature 1..20: note = chemically synthesized
  source 1..20: mol_type = other DNA
gggtcccattttttgagtta

SEQ ID NO: 4235 - DNA, 20 bp, synthetic construct
  misc_feature 1..20: note = chemically synthesized
  source 1..20: mol_type = other DNA
ccattttttgagttacagtt

SEQ ID NO: 4236 - DNA, 20 bp, synthetic construct
  misc_feature 1..20: note = chemically synthesized
  source 1..20: mol_type = other DNA
tagaatttaaaatacccaca

SEQ ID NO: 4237 - DNA, 20 bp, synthetic construct
  misc_feature 1..20: note = chemically synthesized
  source 1..20: mol_type = other DNA
tttaaaatacccacacagct

SEQ ID NO: 4238 - DNA, 20 bp, synthetic construct
  misc_feature 1..20: note = chemically synthesized
  source 1..20: mol_type = other DNA
gagcaatttacccttgcttt

SEQ ID NO: 4239 - DNA, 20 bp, synthetic construct
  misc_feature 1..20: note = chemically synthesized
  source 1..20: mol_type = other DNA
aatttacccttgctttaagt

SEQ ID NO: 4240 - DNA, 20 bp, synthetic construct
  misc_feature 1..20: note = chemically synthesized
  source 1..20: mol_type = other DNA
cccttgctttaagttggaat

SEQ ID NO: 4241 - DNA, 20 bp, synthetic construct
  misc_feature 1..20: note = chemically synthesized
  source 1..20: mol_type = other DNA
ccttgctttaagttggaatg

SEQ ID NO: 4242 - DNA, 20 bp, synthetic construct
  misc_feature 1..20: note = chemically synthesized
  source 1..20: mol_type = other DNA
tgaggttctttaaaaatatt

SEQ ID NO: 4243 - DNA, 20 bp, synthetic construct
  misc_feature 1..20: note = chemically synthesized
  source 1..20: mol_type = other DNA
aaatattaagataaaatttg

SEQ ID NO: 4244 - DNA, 20 bp, synthetic construct
  misc_feature 1..20: note = chemically synthesized
  source 1..20: mol_type = other DNA
tttgaagttatttaactctg

SEQ ID NO: 4245 - DNA, 20 bp, synthetic construct
  misc_feature 1..20: note = chemically synthesized
  source 1..20: mol_type = other DNA
taatatatatctcacattgt

SEQ ID NO: 4246 - DNA, 20 bp, synthetic construct
  misc_feature 1..20: note = chemically synthesized
  source 1..20: mol_type = other DNA
tcacattgttagaatatttt

SEQ ID NO: 4247 - DNA, 20 bp, synthetic construct
  misc_feature 1..20: note = chemically synthesized
  source 1..20: mol_type = other DNA
taagtaaactgttgatgttt

SEQ ID NO: 4248 - DNA, 20 bp, synthetic construct
  misc_feature 1..20: note = chemically synthesized
  source 1..20: mol_type = other DNA
agtaaactgttgatgtttca

SEQ ID NO: 4249 - DNA, 20 bp, synthetic construct
  misc_feature 1..20: note = chemically synthesized
  source 1..20: mol_type = other DNA
aactgttgatgtttcagaga

SEQ ID NO: 4250 - DNA, 20 bp, synthetic construct
  misc_feature 1..20: note = chemically synthesized
  source 1..20: mol_type = other DNA
actgttgatgtttcagagaa

SEQ ID NO: 4251 - DNA, 20 bp, synthetic construct
  misc_feature 1..20: note = chemically synthesized
  source 1..20: mol_type = other DNA
ttgatgtttcagagaaagga

SEQ ID NO: 4252 - DNA, 20 bp, synthetic construct
  misc_feature 1..20: note = chemically synthesized
  source 1..20: mol_type = other DNA
gaaaggaaagaataattttg

SEQ ID NO: 4253 - DNA, 20 bp, synthetic construct
  misc_feature 1..20: note = chemically synthesized
  source 1..20: mol_type = other DNA
attttgaagcattcctgaca

SEQ ID NO: 4254 - DNA, 20 bp, synthetic construct
  misc_feature 1..20: note = chemically synthesized
  source 1..20: mol_type = other DNA
aagcattcctgacacagttc

SEQ ID NO: 4255 - DNA, 20 bp, synthetic construct
  misc_feature 1..20: note = chemically synthesized
  source 1..20: mol_type = other DNA
agcattcctgacacagttct

SEQ ID NO: 4256 - DNA, 20 bp, synthetic construct
  misc_feature 1..20: note = chemically synthesized
  source 1..20: mol_type = other DNA
ttcctgacacagttctaggc

SEQ ID NO: 4257 - DNA, 20 bp, synthetic construct
  misc_feature 1..20: note = chemically synthesized
  source 1..20: mol_type = other DNA
cctgacacagttctaggcca

SEQ ID NO: 4258 - DNA, 20 bp, synthetic construct
  misc_feature 1..20: note = chemically synthesized
  source 1..20: mol_type = other DNA
taggccagagccatgcatgt

SEQ ID NO: 4259 - DNA, 20 bp, synthetic construct
  misc_feature 1..20: note = chemically synthesized
  source 1..20: mol_type = other DNA
cagagccatgcatgtgagtg

SEQ ID NO: 4260 - DNA, 20 bp, synthetic construct
  misc_feature 1..20: note = chemically synthesized
  source 1..20: mol_type = other DNA
ccatgcatgtgagtgaagcg

SEQ ID NO: 4261 - DNA, 20 bp, synthetic construct
  misc_feature 1..20: note = chemically synthesized
  source 1..20: mol_type = other DNA
atgtgagtgaagcgtagtta

SEQ ID NO: 4262 - DNA, 20 bp, synthetic construct
  misc_feature 1..20: note = chemically synthesized
  source 1..20: mol_type = other DNA
tgagtgaagcgtagttatag

SEQ ID NO: 4263 - DNA, 20 bp, synthetic construct
  misc_feature 1..20: note = chemically synthesized
  source 1..20: mol_type = other DNA
tgaagcgtagttatagaagt

SEQ ID NO: 4264 - DNA, 20 bp, synthetic construct
  misc_feature 1..20: note = chemically synthesized
  source 1..20: mol_type = other DNA
gaagcgtagttatagaagtg

SEQ ID NO: 4265 - DNA, 20 bp, synthetic construct
  misc_feature 1..20: note = chemically synthesized
  source 1..20: mol_type = other DNA
aagcgtagttatagaagtga

SEQ ID NO: 4266 - DNA, 20 bp, synthetic construct
  misc_feature 1..20: note = chemically synthesized
  source 1..20: mol_type = other DNA
agttatagaagtgagggtta

SEQ ID NO: 4267 - DNA, 20 bp, synthetic construct
  misc_feature 1..20: note = chemically synthesized
  source 1..20: mol_type = other DNA
gaagtgagggttacagtgac

SEQ ID NO: 4268 - DNA, 20 bp, synthetic construct
  misc_feature 1..20: note = chemically synthesized
  source 1..20: mol_type = other DNA
aagtgagggttacagtgact

SEQ ID NO: 4269 - DNA, 20 bp, synthetic construct
  misc_feature 1..20: note = chemically synthesized
  source 1..20: mol_type = other DNA
agtgagggttacagtgactg

SEQ ID NO: 4270 - DNA, 20 bp, synthetic construct
  misc_feature 1..20: note = chemically synthesized
  source 1..20: mol_type = other DNA
tacagtgactggggcttcat

SEQ ID NO: 4271 - DNA, 20 bp, synthetic construct
  misc_feature 1..20: note = chemically synthesized
  source 1..20: mol_type = other DNA
acagtgactggggcttcatc

SEQ ID NO: 4272 - DNA, 20 bp, synthetic construct
  misc_feature 1..20: note = chemically synthesized
  source 1..20: mol_type = other DNA
ctggggcttcatcaggacat

SEQ ID NO: 4273 - DNA, 20 bp, synthetic construct
  misc_feature 1..20: note = chemically synthesized
  source 1..20: mol_type = other DNA
tggggcttcatcaggacatt

SEQ ID NO: 4274 - DNA, 20 bp, synthetic construct
  misc_feature 1..20: note = chemically synthesized
  source 1..20: mol_type = other DNA
ggggcttcatcaggacatta

SEQ ID NO: 4275 - DNA, 20 bp, synthetic construct
  misc_feature 1..20: note = chemically synthesized
  source 1..20: mol_type = other DNA
cttcatcaggacattaggga

SEQ ID NO: 4276 - DNA, 20 bp, synthetic construct
  misc_feature 1..20: note = chemically synthesized
  source 1..20: mol_type = other DNA
ttcatcaggacattagggat

SEQ ID NO: 4277 - DNA, 20 bp, synthetic construct
  misc_feature 1..20: note = chemically synthesized
  source 1..20: mol_type = other DNA
catcaggacattagggatgg

SEQ ID NO: 4278 - DNA, 20 bp, synthetic construct
  misc_feature 1..20: note = chemically synthesized
  source 1..20: mol_type = other DNA
tcaggacattagggatggga

SEQ ID NO: 4279 - DNA, 20 bp, synthetic construct
  misc_feature 1..20: note = chemically synthesized
  source 1..20: mol_type = other DNA
ggacattagggatgggagag

SEQ ID NO: 4280 - DNA, 20 bp, synthetic construct
  misc_feature 1..20: note = chemically synthesized
  source 1..20: mol_type = other DNA
gggatgggagagaagaatct

SEQ ID NO: 4281 - DNA, 20 bp, synthetic construct
  misc_feature 1..20: note = chemically synthesized
  source 1..20: mol_type = other DNA
atctaagtgaaaaaaaaata

SEQ ID NO: 4282 - DNA, 20 bp, synthetic construct
  misc_feature 1..20: note = chemically synthesized
  source 1..20: mol_type = other DNA
tctaagtgaaaaaaaaatac

SEQ ID NO: 4283 - DNA, 20 bp, synthetic construct
  misc_feature 1..20: note = chemically synthesized
  source 1..20: mol_type = other DNA
gaaaaaaaaatacaggaatg

SEQ ID NO: 4284 - DNA, 20 bp, synthetic construct
  misc_feature 1..20: note = chemically synthesized
  source 1..20: mol_type = other DNA
aaaaatacaggaatgaagat

SEQ ID NO: 4285 - DNA, 20 bp, synthetic construct
  misc_feature 1..20: note = chemically synthesized
  source 1..20: mol_type = other DNA
aaaatacaggaatgaagata

SEQ ID NO: 4286 - DNA, 20 bp, synthetic construct
  misc_feature 1..20: note = chemically synthesized
  source 1..20: mol_type = other DNA
aaatacaggaatgaagataa

SEQ ID NO: 4287 - DNA, 20 bp, synthetic construct
  misc_feature 1..20: note = chemically synthesized
  source 1..20: mol_type = other DNA
aatacaggaatgaagataag

SEQ ID NO: 4288 - DNA, 20 bp, synthetic construct
  misc_feature 1..20: note = chemically synthesized
  source 1..20: mol_type = other DNA
atacaggaatgaagataagg

SEQ ID NO: 4289 - DNA, 20 bp, synthetic construct
  misc_feature 1..20: note = chemically synthesized
  source 1..20: mol_type = other DNA
aggaatgaagataaggggga

SEQ ID NO: 4290 - DNA, 20 bp, synthetic construct
  misc_feature 1..20: note = chemically synthesized
  source 1..20: mol_type = other DNA
aagataagggggaaagaaaa

SEQ ID NO: 4291 - DNA, 20 bp, synthetic construct
  misc_feature 1..20: note = chemically synthesized
  source 1..20: mol_type = other DNA
gggaaagaaaacagattttc

SEQ ID NO: 4292 - DNA, 20 bp, synthetic construct
  misc_feature 1..20: note = chemically synthesized
  source 1..20: mol_type = other DNA
tctggcctttaaattttttc

SEQ ID NO: 4293 - DNA, 20 bp, synthetic construct
  misc_feature 1..20: note = chemically synthesized
  source 1..20: mol_type = other DNA
gtgatcttttgtgataccta

SEQ ID NO: 4294 - DNA, 20 bp, synthetic construct
  misc_feature 1..20: note = chemically synthesized
  source 1..20: mol_type = other DNA
atatgtgatgacccaaatta

SEQ ID NO: 4295 - DNA, 20 bp, synthetic construct
  misc_feature 1..20: note = chemically synthesized
  source 1..20: mol_type = other DNA
tatgtgatgacccaaattat

SEQ ID NO: 4296 - DNA, 20 bp, synthetic construct
  misc_feature 1..20: note = chemically synthesized
  source 1..20: mol_type = other DNA
gatgacccaaattataggcc

SEQ ID NO: 4297 - DNA, 20 bp, synthetic construct
  misc_feature 1..20: note = chemically synthesized
  source 1..20: mol_type = other DNA
atgacccaaattataggcct

SEQ ID NO: 4298 - DNA, 20 bp, synthetic construct
  misc_feature 1..20: note = chemically synthesized
  source 1..20: mol_type = other DNA
ttataggcctgggttccttg

SEQ ID NO: 4299 - DNA, 20 bp, synthetic construct
  misc_feature 1..20: note = chemically synthesized
  source 1..20: mol_type = other DNA
ggttccttgtagcattattc

SEQ ID NO: 4300 - DNA, 20 bp, synthetic construct
  misc_feature 1..20: note = chemically synthesized
  source 1..20: mol_type = other DNA
gttccttgtagcattattct

SEQ ID NO: 4301 - DNA, 20 bp, synthetic construct
  misc_feature 1..20: note = chemically synthesized
  source 1..20: mol_type = other DNA
ttattctaggatatttctga

SEQ ID NO: 4302 - DNA, 20 bp, synthetic construct
  misc_feature 1..20: note = chemically synthesized
  source 1..20: mol_type = other DNA
ctgaatcatgaatgtatcca

SEQ ID NO: 4303 - DNA, 20 bp, synthetic construct
  misc_feature 1..20: note = chemically synthesized
  source 1..20: mol_type = other DNA
gaatcatgaatgtatccacg

SEQ ID NO: 4304 - DNA, 20 bp, synthetic construct
  misc_feature 1..20: note = chemically synthesized
  source 1..20: mol_type = other DNA
atgaatgtatccacggagca

SEQ ID NO: 4305 - DNA, 20 bp, synthetic construct
  misc_feature 1..20: note = chemically synthesized
  source 1..20: mol_type = other DNA
atgtatccacggagcaaaga

SEQ ID NO: 4306 - DNA, 20 bp, synthetic construct
  misc_feature 1..20: note = chemically synthesized
  source 1..20: mol_type = other DNA
tccacggagcaaagatagtg

SEQ ID NO: 4307 - DNA, 20 bp, synthetic construct
  misc_feature 1..20: note = chemically synthesized
  source 1..20: mol_type = other DNA
gcaaagatagtgtggtgtaa

SEQ ID NO: 4308 - DNA, 20 bp, synthetic construct
  misc_feature 1..20: note = chemically synthesized
  source 1..20: mol_type = other DNA
atagtgtggtgtaatagaaa

SEQ ID NO: 4309 - DNA, 20 bp, synthetic construct
  misc_feature 1..20: note = chemically synthesized
  source 1..20: mol_type = other DNA
gtggtgtaatagaaacagta

SEQ ID NO: 4310 - DNA, 20 bp, synthetic construct
  misc_feature 1..20: note = chemically synthesized
  source 1..20: mol_type = other DNA
aatagaaacagtatagctct

SEQ ID NO: 4311 - DNA, 20 bp, synthetic construct
  misc_feature 1..20: note = chemically synthesized
  source 1..20: mol_type = other DNA
atagaaacagtatagctcta

SEQ ID NO: 4312 - DNA, 20 bp, synthetic construct
  misc_feature 1..20: note = chemically synthesized
  source 1..20: mol_type = other DNA
tatagctctaaggacatata

SEQ ID NO: 4313 - DNA, 20 bp, synthetic construct
  misc_feature 1..20: note = chemically synthesized
  source 1..20: mol_type = other DNA
atatagttgtatttaaatac

SEQ ID NO: 4314 - DNA, 20 bp, synthetic construct
  misc_feature 1..20: note = chemically synthesized
  source 1..20: mol_type = other DNA
ttattctgactctatgaccc

SEQ ID NO: 4315 - DNA, 20 bp, synthetic construct
  misc_feature 1..20: note = chemically synthesized
  source 1..20: mol_type = other DNA
acgtcatttaatttaaactt

SEQ ID NO: 4316 - DNA, 20 bp, synthetic construct
  misc_feature 1..20: note = chemically synthesized
  source 1..20: mol_type = other DNA
cttgtaaaatacctaacaat

SEQ ID NO: 4317 - DNA, 20 bp, synthetic construct
  misc_feature 1..20: note = chemically synthesized
  source 1..20: mol_type = other DNA
taagcataaatttaaaatgt

SEQ ID NO: 4318 - DNA, 20 bp, synthetic construct
  misc_feature 1..20: note = chemically synthesized
  source 1..20: mol_type = other DNA
taaaatgtgagtcttttctg

SEQ ID NO: 4319 - DNA, 20 bp, synthetic construct
  misc_feature 1..20: note = chemically synthesized
  source 1..20: mol_type = other DNA
atgtgagtcttttctgaagt

SEQ ID NO: 4320 - DNA, 20 bp, synthetic construct
  misc_feature 1..20: note = chemically synthesized
  source 1..20: mol_type = other DNA
cttttctgaagtcagtgtct

SEQ ID NO: 4321 - DNA, 20 bp, synthetic construct
  misc_feature 1..20: note = chemically synthesized
  source 1..20: mol_type = other DNA
ttttctgaagtcagtgtctt

SEQ ID NO: 4322 - DNA, 20 bp, synthetic construct
  misc_feature 1..20: note = chemically synthesized
  source 1..20: mol_type = other DNA
tctgaagtcagtgtcttagg

SEQ ID NO: 4323 - DNA, 20 bp, synthetic construct
  misc_feature 1..20: note = chemically synthesized
  source 1..20: mol_type = other DNA
ctgaagtcagtgtcttagga

SEQ ID NO: 4324 - DNA, 20 bp, synthetic construct
  misc_feature 1..20: note = chemically synthesized
  source 1..20: mol_type = other DNA
aagtcagtgtcttaggaagg

SEQ ID NO: 4325 - DNA, 20 bp, synthetic construct
  misc_feature 1..20: note = chemically synthesized
  source 1..20: mol_type = other DNA
tcttaggaaggtagctacat

SEQ ID NO: 4326 - DNA, 20 bp, synthetic construct
  misc_feature 1..20: note = chemically synthesized
  source 1..20: mol_type = other DNA
ttatatctctatcccaacaa

SEQ ID NO: 4327 - DNA, 20 bp, synthetic construct
  misc_feature 1..20: note = chemically synthesized
  source 1..20: mol_type = other DNA
atcccaacaatagatgacat

SEQ ID NO: 4328 - DNA, 20 bp, synthetic construct
  misc_feature 1..20: note = chemically synthesized
  source 1..20: mol_type = other DNA
tcccaacaatagatgacatc

SEQ ID NO: 4329 - DNA, 20 bp, synthetic construct
  misc_feature 1..20: note = chemically synthesized
  source 1..20: mol_type = other DNA
tcaggacactaacaaaattg

SEQ ID NO: 4330 - DNA, 20 bp, synthetic construct
  misc_feature 1..20: note = chemically synthesized
  source 1..20: mol_type = other DNA
ctaacaaaattgtagcaatt

SEQ ID NO: 4331 - DNA, 20 bp, synthetic construct
  misc_feature 1..20: note = chemically synthesized
  source 1..20: mol_type = other DNA
agaccaaaattattgtcaac

SEQ ID NO: 4332 - DNA, 20 bp, synthetic construct
  misc_feature 1..20: note = chemically synthesized
  source 1..20: mol_type = other DNA
aaattattgtcaactggaat

SEQ ID NO: 4333 - DNA, 20 bp, synthetic construct
  misc_feature 1..20: note = chemically synthesized
  source 1..20: mol_type = other DNA
actggaataagtttaacttt

SEQ ID NO: 4334 - DNA, 20 bp, synthetic construct
  misc_feature 1..20: note = chemically synthesized
  source 1..20: mol_type = other DNA
ctggaataagtttaactttc

SEQ ID NO: 4335 - DNA, 20 bp, synthetic construct
  misc_feature 1..20: note = chemically synthesized
  source 1..20: mol_type = other DNA
aagtttaactttcaggactt

SEQ ID NO: 4336 - DNA, 20 bp, synthetic construct
  misc_feature 1..20: note = chemically synthesized
  source 1..20: mol_type = other DNA
agtttaactttcaggacttc

SEQ ID NO: 4337 - DNA, 20 bp, synthetic construct
  misc_feature 1..20: note = chemically synthesized
  source 1..20: mol_type = other DNA
ggcttattatccatcaaact

SEQ ID NO: 4338 - DNA, 20 bp, synthetic construct
  misc_feature 1..20: note = chemically synthesized
  source 1..20: mol_type = other DNA
aaactgagattgaattgatt

SEQ ID NO: 4339 - DNA, 20 bp, synthetic construct
  misc_feature 1..20: note = chemically synthesized
  source 1..20: mol_type = other DNA
actgagattgaattgattta

SEQ ID NO: 4340 - DNA, 20 bp, synthetic construct
  misc_feature 1..20: note = chemically synthesized
  source 1..20: mol_type = other DNA
tttagagtatccataaatac

SEQ ID NO: 4341 - DNA, 20 bp, synthetic construct
  misc_feature 1..20: note = chemically synthesized
  source 1..20: mol_type = other DNA
ttagagtatccataaatact

SEQ ID NO: 4342 - DNA, 20 bp, synthetic construct
  misc_feature 1..20: note = chemically synthesized
  source 1..20: mol_type = other DNA
ttttaataaatttcttatac

SEQ ID NO: 4343 - DNA, 20 bp, synthetic construct
  misc_feature 1..20: note = chemically synthesized
  source 1..20: mol_type = other DNA
tttaataaatttcttatact

SEQ ID NO: 4344 - DNA, 20 bp, synthetic construct
  misc_feature 1..20: note = chemically synthesized
  source 1..20: mol_type = other DNA
aatttcttatactgggcaca

SEQ ID NO: 4345 - DNA, 20 bp, synthetic construct
  misc_feature 1..20: note = chemically synthesized
  source 1..20: mol_type = other DNA
actgggcacatggtatcaat

SEQ ID NO: 4346 - DNA, 20 bp, synthetic construct
  misc_feature 1..20: note = chemically synthesized
  source 1..20: mol_type = other DNA
tatctgtcatttacttttat

SEQ ID NO: 4347 - DNA, 20 bp, synthetic construct
  misc_feature 1..20: note = chemically synthesized
  source 1..20: mol_type = other DNA
atctgtcatttacttttata

SEQ ID NO: 4348 - DNA, 20 bp, synthetic construct
  misc_feature 1..20: note = chemically synthesized
  source 1..20: mol_type = other DNA
ttacttttataaggtgcaaa

SEQ ID NO: 4349 - DNA, 20 bp, synthetic construct
  misc_feature 1..20: note = chemically synthesized
  source 1..20: mol_type = other DNA
tttataaggtgcaaatagtt

SEQ ID NO: 4350 - DNA, 20 bp, synthetic construct
  misc_feature 1..20: note = chemically synthesized
  source 1..20: mol_type = other DNA
aaggtgcaaatagttcagca

SEQ ID NO: 4351 - DNA, 20 bp, synthetic construct
  misc_feature 1..20: note = chemically synthesized
  source 1..20: mol_type = other DNA
caaatagttcagcatggtga

SEQ ID NO: 4352 - DNA, 20 bp, synthetic construct
  misc_feature 1..20: note = chemically synthesized
  source 1..20: mol_type = other DNA
cagacacatgaattttgaaa

SEQ ID NO: 4353 - DNA, 20 bp, synthetic construct
  misc_feature 1..20: note = chemically synthesized
  source 1..20: mol_type = other DNA
gacacatgaattttgaaatg

SEQ ID NO: 4354 - DNA, 20 bp, synthetic construct
  misc_feature 1..20: note = chemically synthesized
  source 1..20: mol_type = other DNA
ttttatttttgccccatcac

SEQ ID NO: 4355 - DNA, 20 bp, synthetic construct
  misc_feature 1..20: note = chemically synthesized
  source 1..20: mol_type = other DNA
agtataatatctttgttaca

SEQ ID NO: 4356 - DNA, 20 bp, synthetic construct
  misc_feature 1..20: note = chemically synthesized
  source 1..20: mol_type = other DNA
gtataatatctttgttacat

SEQ ID NO: 4357 - DNA, 20 bp, synthetic construct
  misc_feature 1..20: note = chemically synthesized
  source 1..20: mol_type = other DNA
tataatatctttgttacata

SEQ ID NO: 4358 - DNA, 20 bp, synthetic construct
  misc_feature 1..20: note = chemically synthesized
  source 1..20: mol_type = other DNA
aatatctttgttacataggg

SEQ ID NO: 4359 - DNA, 20 bp, synthetic construct
  misc_feature 1..20: note = chemically synthesized
  source 1..20: mol_type = other DNA
tatctttgttacatagggaa

SEQ ID NO: 4360 - DNA, 20 bp, synthetic construct
  misc_feature 1..20: note = chemically synthesized
  source 1..20: mol_type = other DNA
tctttgttacatagggaaga

SEQ ID NO: 4361 - DNA, 20 bp, synthetic construct
  misc_feature 1..20: note = chemically synthesized
  source 1..20: mol_type = other DNA
gggaagagagttaaaaattt

SEQ ID NO: 4362 - DNA, 20 bp, synthetic construct
  misc_feature 1..20: note = chemically synthesized
  source 1..20: mol_type = other DNA
gaagagagttaaaaattttg

SEQ ID NO: 4363 - DNA, 20 bp, synthetic construct
  misc_feature 1..20: note = chemically synthesized
  source 1..20: mol_type = other DNA
agttaaaaattttggagtgc

SEQ ID NO: 4364 - DNA, 20 bp, synthetic construct
  misc_feature 1..20: note = chemically synthesized
  source 1..20: mol_type = other DNA
ccagcttcttaatctgtgcc

SEQ ID NO: 4365 - DNA, 20 bp, synthetic construct
  misc_feature 1..20: note = chemically synthesized
  source 1..20: mol_type = other DNA
tgcctagactattacctgat

SEQ ID NO: 4366 - DNA, 20 bp, synthetic construct
  misc_feature 1..20: note = chemically synthesized
  source 1..20: mol_type = other DNA
gactattacctgatgagtaa

SEQ ID NO: 4367 - DNA, 20 bp, synthetic construct
  misc_feature 1..20: note = chemically synthesized
  source 1..20: mol_type = other DNA
gagtaatagtcaataaacta

SEQ ID NO: 4368 - DNA, 20 bp, synthetic construct
  misc_feature 1..20: note = chemically synthesized
  source 1..20: mol_type = other DNA
tactaaaattttttattact

SEQ ID NO: 4369 - DNA, 20 bp, synthetic construct
  misc_feature 1..20: note = chemically synthesized
  source 1..20: mol_type = other DNA
ctgagccttgttttaactac

SEQ ID NO: 4370 - DNA, 20 bp, synthetic construct
  misc_feature 1..20: note = chemically synthesized
  source 1..20: mol_type = other DNA
acattcaaatctgcatatca

SEQ ID NO: 4371 - DNA, 20 bp, synthetic construct
  misc_feature 1..20: note = chemically synthesized
  source 1..20: mol_type = other DNA
atctgcatatcaaagaaaat

SEQ ID NO: 4372 - DNA, 20 bp, synthetic construct
  misc_feature 1..20: note = chemically synthesized
  source 1..20: mol_type = other DNA
gcattatttaaacatattct

SEQ ID NO: 4373 - DNA, 20 bp, synthetic construct
  misc_feature 1..20: note = chemically synthesized
  source 1..20: mol_type = other DNA
attatttaaacatattctaa

SEQ ID NO: 4374 - DNA, 20 bp, synthetic construct
  misc_feature 1..20: note = chemically synthesized
  source 1..20: mol_type = other DNA
gaaaatgacttacttaatac

SEQ ID NO: 4375 - DNA, 20 bp, synthetic construct
  misc_feature 1..20: note = chemically synthesized
  source 1..20: mol_type = other DNA
ctacaattgcaaatcaactc

SEQ ID NO: 4376 - DNA, 20 bp, synthetic construct
  misc_feature 1..20: note = chemically synthesized
  source 1..20: mol_type = other DNA
ttgcaaatcaactccagcta

SEQ ID NO: 4377 - DNA, 20 bp, synthetic construct
  misc_feature 1..20: note = chemically synthesized
  source 1..20: mol_type = other DNA
aatcaactccagctaaagcc

SEQ ID NO: 4378 - DNA, 20 bp, synthetic construct
  misc_feature 1..20: note = chemically synthesized
  source 1..20: mol_type = other DNA
actccagctaaagccaagtc

SEQ ID NO: 4379 - DNA, 20 bp, synthetic construct
  misc_feature 1..20: note = chemically synthesized
  source 1..20: mol_type = other DNA
aagccaagtctagtattcca

SEQ ID NO: 4380 - DNA, 20 bp, synthetic construct
  misc_feature 1..20: note = chemically synthesized
  source 1..20: mol_type = other DNA
agccaagtctagtattccat

SEQ ID NO: 4381 - DNA, 20 bp, synthetic construct
  misc_feature 1..20: note = chemically synthesized
  source 1..20: mol_type = other DNA
tattccatgggtcaaaaatc

SEQ ID NO: 4382 - DNA, 20 bp, synthetic construct
  misc_feature 1..20: note = chemically synthesized
  source 1..20: mol_type = other DNA
attccatgggtcaaaaatca

SEQ ID NO: 4383 - DNA, 20 bp, synthetic construct
  misc_feature 1..20: note = chemically synthesized
  source 1..20: mol_type = other DNA
tcaaaaatcaaggaaaatgt

SEQ ID NO: 4384 - DNA, 20 bp, synthetic construct
  misc_feature 1..20: note = chemically synthesized
  source 1..20: mol_type = other DNA
aaggaaaatgttagatgatt

SEQ ID NO: 4385 - DNA, 20 bp, synthetic construct
  misc_feature 1..20: note = chemically synthesized
  source 1..20: mol_type = other DNA
atgttagatgattaagttat

SEQ ID NO: 4386 - DNA, 20 bp, synthetic construct
  misc_feature 1..20: note = chemically synthesized
  source 1..20: mol_type = other DNA
ttagatgattaagttatcgg

SEQ ID NO: 4387 - DNA, 20 bp, synthetic construct
  misc_feature 1..20: note = chemically synthesized
  source 1..20: mol_type = other DNA
gattaagttatcggaagaat

SEQ ID NO: 4388 - DNA, 20 bp, synthetic construct
  misc_feature 1..20: note = chemically synthesized
  source 1..20: mol_type = other DNA
ggaagaatgagctgcttctg

SEQ ID NO: 4389 - DNA, 20 bp, synthetic construct
  misc_feature 1..20: note = chemically synthesized
  source 1..20: mol_type = other DNA
tttcttgccttttttttttc

SEQ ID NO: 4390 - DNA, 20 bp, synthetic construct
  misc_feature 1..20: note = chemically synthesized
  source 1..20: mol_type = other DNA
tttctggtgttattttctac

SEQ ID NO: 4391 - DNA, 20 bp, synthetic construct
  misc_feature 1..20: note = chemically synthesized
  source 1..20: mol_type = other DNA
attttctacaagttttcatt

SEQ ID NO: 4392 - DNA, 20 bp, synthetic construct
  misc_feature 1..20: note = chemically synthesized
  source 1..20: mol_type = other DNA
agttttcattgagcataact

SEQ ID NO: 4393 - DNA, 20 bp, synthetic construct
  misc_feature 1..20: note = chemically synthesized
  source 1..20: mol_type = other DNA
gtttacttacttgcattttc

SEQ ID NO: 4394 - DNA, 20 bp, synthetic construct
  misc_feature 1..20: note = chemically synthesized
  source 1..20: mol_type = other DNA
ttgcattttctagaatcctg

SEQ ID NO: 4395 - DNA, 20 bp, synthetic construct
  misc_feature 1..20: note = chemically synthesized
  source 1..20: mol_type = other DNA
tctagaatcctgaagatatt

SEQ ID NO: 4396 - DNA, 20 bp, synthetic construct
  misc_feature 1..20: note = chemically synthesized
  source 1..20: mol_type = other DNA
agaatcctgaagatatttag

SEQ ID NO: 4397 - DNA, 20 bp, synthetic construct
  misc_feature 1..20: note = chemically synthesized
  source 1..20: mol_type = other DNA
gaatcctgaagatatttagc

SEQ ID NO: 4398 - DNA, 20 bp, synthetic construct
  misc_feature 1..20: note = chemically synthesized
  source 1..20: mol_type = other DNA
ctgaagatatttagcaggtt

SEQ ID NO: 4399 - DNA, 20 bp, synthetic construct
  misc_feature 1..20: note = chemically synthesized
  source 1..20: mol_type = other DNA
gaagatatttagcaggttga

SEQ ID NO: 4400 - DNA, 20 bp, synthetic construct
  misc_feature 1..20: note = chemically synthesized
  source 1..20: mol_type = other DNA
aagatatttagcaggttgag

SEQ ID NO: 4401 - DNA, 20 bp, synthetic construct
  misc_feature 1..20: note = chemically synthesized
  source 1..20: mol_type = other DNA
gatatttagcaggttgagag

SEQ ID NO: 4402 - DNA, 20 bp, synthetic construct
  misc_feature 1..20: note = chemically synthesized
  source 1..20: mol_type = other DNA
gaggagacaaaataaatgca

SEQ ID NO: 4403 - DNA, 20 bp, synthetic construct
  misc_feature 1..20: note = chemically synthesized
  source 1..20: mol_type = other DNA
ggagacaaaataaatgcaaa

SEQ ID NO: 4404 - DNA, 20 bp, synthetic construct
  misc_feature 1..20: note = chemically synthesized
  source 1..20: mol_type = other DNA
caaaataaatgcaaagagat

SEQ ID NO: 4405 - DNA, 20 bp, synthetic construct
  misc_feature 1..20: note = chemically synthesized
  source 1..20: mol_type = other DNA
aaaataaatgcaaagagatt

SEQ ID NO: 4406 - DNA, 20 bp, synthetic construct
  misc_feature 1..20: note = chemically synthesized
  source 1..20: mol_type = other DNA
tgcaaagagattaggaaatc

SEQ ID NO: 4407 - DNA, 20 bp, synthetic construct
  misc_feature 1..20: note = chemically synthesized
  source 1..20: mol_type = other DNA
aactatttatacttctttta

SEQ ID NO: 4408 - DNA, 20 bp, synthetic construct
  misc_feature 1..20: note = chemically synthesized
  source 1..20: mol_type = other DNA
acttcttttaaagcatgtct

SEQ ID NO: 4409 - DNA, 20 bp, synthetic construct
  misc_feature 1..20: note = chemically synthesized
  source 1..20: mol_type = other DNA
cttcttttaaagcatgtctt

SEQ ID NO: 4410 - DNA, 20 bp, synthetic construct
  misc_feature 1..20: note = chemically synthesized
  source 1..20: mol_type = other DNA
ttaaagcatgtcttgggccc

SEQ ID NO: 4411 - DNA, 20 bp, synthetic construct
  misc_feature 1..20: note = chemically synthesized
  source 1..20: mol_type = other DNA
taaagcatgtcttgggccca

SEQ ID NO: 4412 - DNA, 20 bp, synthetic construct
  misc_feature 1..20: note = chemically synthesized
  source 1..20: mol_type = other DNA
tgtcttgggcccaaggtttt

SEQ ID NO: 4413 - DNA, 20 bp, synthetic construct
  misc_feature 1..20: note = chemically synthesized
  source 1..20: mol_type = other DNA
gggcccaaggttttcagctt

SEQ ID NO: 4414 - DNA, 20 bp, synthetic construct
  misc_feature 1..20: note = chemically synthesized
  source 1..20: mol_type = other DNA
gcccaaggttttcagcttaa

SEQ ID NO: 4415 - DNA, 20 bp, synthetic construct
  misc_feature 1..20: note = chemically synthesized
  source 1..20: mol_type = other DNA
cccaaggttttcagcttaag

SEQ ID NO: 4416 - DNA, 20 bp, synthetic construct
  misc_feature 1..20: note = chemically synthesized
  source 1..20: mol_type = other DNA
gacgaattttactcctccca

SEQ ID NO: 4417 - DNA, 20 bp, synthetic construct
  misc_feature 1..20: note = chemically synthesized
  source 1..20: mol_type = other DNA
gaattttactcctcccatgg

SEQ ID NO: 4418 - DNA, 20 bp, synthetic construct
  misc_feature 1..20: note = chemically synthesized
  source 1..20: mol_type = other DNA
aattttactcctcccatgga

SEQ ID NO: 4419 - DNA, 20 bp, synthetic construct
  misc_feature 1..20: note = chemically synthesized
  source 1..20: mol_type = other DNA
ttttactcctcccatggaag

SEQ ID NO: 4420 - DNA, 20 bp, synthetic construct
  misc_feature 1..20: note = chemically synthesized
  source 1..20: mol_type = other DNA
tcccatggaaggagatgaca

SEQ ID NO: 4421 - DNA, 20 bp, synthetic construct
  misc_feature 1..20: note = chemically synthesized
  source 1..20: mol_type = other DNA
ccatggaaggagatgacaca

SEQ ID NO: 4422 - DNA, 20 bp, synthetic construct
  misc_feature 1..20: note = chemically synthesized
  source 1..20: mol_type = other DNA
agatgacacagagctgcttc

SEQ ID NO: 4423 - DNA, 20 bp, synthetic construct
  misc_feature 1..20: note = chemically synthesized
  source 1..20: mol_type = other DNA
acagagctgcttctggtaca

SEQ ID NO: 4424 - DNA, 20 bp, synthetic construct
  misc_feature 1..20: note = chemically synthesized
  source 1..20: mol_type = other DNA
tgcttctggtacatagtcca

SEQ ID NO: 4425 - DNA, 20 bp, synthetic construct
  misc_feature 1..20: note = chemically synthesized
  source 1..20: mol_type = other DNA
gcttctggtacatagtccac

SEQ ID NO: 4426 - DNA, 20 bp, synthetic construct
  misc_feature 1..20: note = chemically synthesized
  source 1..20: mol_type = other DNA
cttctggtacatagtccaca

SEQ ID NO: 4427 - DNA, 20 bp, synthetic construct
  misc_feature 1..20: note = chemically synthesized
  source 1..20: mol_type = other DNA
tctggtacatagtccacagg

SEQ ID NO: 4428 - DNA, 20 bp, synthetic construct
  misc_feature 1..20: note = chemically synthesized
  source 1..20: mol_type = other DNA
atttgtgcattttttttctt

SEQ ID NO: 4429 - DNA, 20 bp, synthetic construct
  misc_feature 1..20: note = chemically synthesized
  source 1..20: mol_type = other DNA
gccaccactctctgacacct

SEQ ID NO: 4430 - DNA, 20 bp, synthetic construct
  misc_feature 1..20: note = chemically synthesized
  source 1..20: mol_type = other DNA
aatacatacatctacatgtc

SEQ ID NO: 4431 - DNA, 20 bp, synthetic construct
  misc_feature 1..20: note = chemically synthesized
  source 1..20: mol_type = other DNA
atacatacatctacatgtcc

SEQ ID NO: 4432 - DNA, 20 bp, synthetic construct
  misc_feature 1..20: note = chemically synthesized
  source 1..20: mol_type = other DNA
tgtcatatattgtttccaat

SEQ ID NO: 4433 - DNA, 20 bp, synthetic construct
  misc_feature 1..20: note = chemically synthesized
  source 1..20: mol_type = other DNA
tattgtttccaatgagccat

SEQ ID NO: 4434 - DNA, 20 bp, synthetic construct
  misc_feature 1..20: note = chemically synthesized
  source 1..20: mol_type = other DNA
caatgagccattggcaaata

SEQ ID NO: 4435 - DNA, 20 bp, synthetic construct
  misc_feature 1..20: note = chemically synthesized
  source 1..20: mol_type = other DNA
aatgagccattggcaaatat

SEQ ID NO: 4436 - DNA, 20 bp, synthetic construct
  misc_feature 1..20: note = chemically synthesized
  source 1..20: mol_type = other DNA
attggcaaatataggttgca

SEQ ID NO: 4437 - DNA, 20 bp, synthetic construct
  misc_feature 1..20: note = chemically synthesized
  source 1..20: mol_type = other DNA
ttggcaaatataggttgcaa

SEQ ID NO: 4438 - DNA, 20 bp, synthetic construct
  misc_feature 1..20: note = chemically synthesized
  source 1..20: mol_type = other DNA
ggcaaatataggttgcaaag

SEQ ID NO: 4439 - DNA, 20 bp, synthetic construct
  misc_feature 1..20: note = chemically synthesized
  source 1..20: mol_type = other DNA
taggttgcaaaggagacatg

SEQ ID NO: 4440 - DNA, 20 bp, synthetic construct
  misc_feature 1..20: note = chemically synthesized
  source 1..20: mol_type = other DNA
aggttgcaaaggagacatgt

SEQ ID NO: 4441 - DNA, 20 bp, synthetic construct
  misc_feature 1..20: note = chemically synthesized
  source 1..20: mol_type = other DNA
gttgcaaaggagacatgtgg

SEQ ID NO: 4442 - DNA, 20 bp, synthetic construct
  misc_feature 1..20: note = chemically synthesized
  source 1..20: mol_type = other DNA
gcaaaggagacatgtgggag

SEQ ID NO: 4443 - DNA, 20 bp, synthetic construct
  misc_feature 1..20: note = chemically synthesized
  source 1..20: mol_type = other DNA
caaaggagacatgtgggaga

SEQ ID NO: 4444 - DNA, 20 bp, synthetic construct
  misc_feature 1..20: note = chemically synthesized
  source 1..20: mol_type = other DNA
gagaaggactttacacatct

SEQ ID NO: 4445 - DNA, 20 bp, synthetic construct
  misc_feature 1..20: note = chemically synthesized
  source 1..20: mol_type = other DNA
aggactttacacatcttaga

SEQ ID NO: 4446 - DNA, 20 bp, synthetic construct
  misc_feature 1..20: note = chemically synthesized
  source 1..20: mol_type = other DNA
acatcttagatggcacctaa

SEQ ID NO: 4447 - DNA, 20 bp, synthetic construct
  misc_feature 1..20: note = chemically synthesized
  source 1..20: mol_type = other DNA
tttatttccctttaattttt

SEQ ID NO: 4448 - DNA, 20 bp, synthetic construct
  misc_feature 1..20: note = chemically synthesized
  source 1..20: mol_type = other DNA
ttatttccctttaattttta

SEQ ID NO: 4449 - DNA, 20 bp, synthetic construct
  misc_feature 1..20: note = chemically synthesized
  source 1..20: mol_type = other DNA
ttgctttccctgctttttct

SEQ ID NO: 4450 - DNA, 20 bp, synthetic construct
  misc_feature 1..20: note = chemically synthesized
  source 1..20: mol_type = other DNA
cctgctttttcttggtcaca

SEQ ID NO: 4451 - DNA, 20 bp, synthetic construct
  misc_feature 1..20: note = chemically synthesized
  source 1..20: mol_type = other DNA
tttcttggtcacatggtaaa

SEQ ID NO: 4452 - DNA, 20 bp, synthetic construct
  misc_feature 1..20: note = chemically synthesized
  source 1..20: mol_type = other DNA
ttcttggtcacatggtaaat

SEQ ID NO: 4453 - DNA, 20 bp, synthetic construct
  misc_feature 1..20: note = chemically synthesized
  source 1..20: mol_type = other DNA
tggtcacatggtaaatgggt

SEQ ID NO: 4454 - DNA, 20 bp, synthetic construct
  misc_feature 1..20: note = chemically synthesized
  source 1..20: mol_type = other DNA
ggtaaatgggtcagaatctg

SEQ ID NO: 4455 - DNA, 20 bp, synthetic construct
  misc_feature 1..20: note = chemically synthesized
  source 1..20: mol_type = other DNA
gtaaatgggtcagaatctga

SEQ ID NO: 4456 - DNA, 20 bp, synthetic construct
  misc_feature 1..20: note = chemically synthesized
  source 1..20: mol_type = other DNA
taaatgggtcagaatctgaa

SEQ ID NO: 4457 - DNA, 20 bp, synthetic construct
  misc_feature 1..20: note = chemically synthesized
  source 1..20: mol_type = other DNA
gggtcagaatctgaagggcc

SEQ ID NO: 4458 - DNA, 20 bp, synthetic construct
  misc_feature 1..20: note = chemically synthesized
  source 1..20: mol_type = other DNA
gaagggccaagaaattatat

SEQ ID NO: 4459 - DNA, 20 bp, synthetic construct
  misc_feature 1..20: note = chemically synthesized
  source 1..20: mol_type = other DNA
agaaattatattagctactg

SEQ ID NO: 4460 - DNA, 20 bp, synthetic construct
  misc_feature 1..20: note = chemically synthesized
  source 1..20: mol_type = other DNA
gtagatatcccattctcttg

SEQ ID NO: 4461 - DNA, 20 bp, synthetic construct
  misc_feature 1..20: note = chemically synthesized
  source 1..20: mol_type = other DNA
tagatatcccattctcttga

SEQ ID NO: 4462 - DNA, 20 bp, synthetic construct
  misc_feature 1..20: note = chemically synthesized
  source 1..20: mol_type = other DNA
ctcttgaaggatactttaat

SEQ ID NO: 4463 - DNA, 20 bp, synthetic construct
  misc_feature 1..20: note = chemically synthesized
  source 1..20: mol_type = other DNA
tcttgaaggatactttaatg

SEQ ID NO: 4464 - DNA, 20 bp, synthetic construct
  misc_feature 1..20: note = chemically synthesized
  source 1..20: mol_type = other DNA
ggatactttaatgaggaata

SEQ ID NO: 4465 - DNA, 20 bp, synthetic construct
  misc_feature 1..20: note = chemically synthesized
  source 1..20: mol_type = other DNA
tttaatgaggaatacagatg

SEQ ID NO: 4466 - DNA, 20 bp, synthetic construct
  misc_feature 1..20: note = chemically synthesized
  source 1..20: mol_type = other DNA
ggaatacagatgaagataaa

SEQ ID NO: 4467 - DNA, 20 bp, synthetic construct
  misc_feature 1..20: note = chemically synthesized
  source 1..20: mol_type = other DNA
tacagatgaagataaaaaga

SEQ ID NO: 4468 - DNA, 20 bp, synthetic construct
  misc_feature 1..20: note = chemically synthesized
  source 1..20: mol_type = other DNA
aacaaataccatgatattca

SEQ ID NO: 4469 - DNA, 20 bp, synthetic construct
  misc_feature 1..20: note = chemically synthesized
  source 1..20: mol_type = other DNA
atattcatggaattaaaaac

SEQ ID NO: 4470 - DNA, 20 bp, synthetic construct
  misc_feature 1..20: note = chemically synthesized
  source 1..20: mol_type = other DNA
aaaactggcttcacactgat

SEQ ID NO: 4471 - DNA, 20 bp, synthetic construct
  misc_feature 1..20: note = chemically synthesized
  source 1..20: mol_type = other DNA
ctggcttcacactgataagc

SEQ ID NO: 4472 - DNA, 20 bp, synthetic construct
  misc_feature 1..20: note = chemically synthesized
  source 1..20: mol_type = other DNA
acactgataagccagattta

SEQ ID NO: 4473 - DNA, 20 bp, synthetic construct
  misc_feature 1..20: note = chemically synthesized
  source 1..20: mol_type = other DNA
actgataagccagatttatg

SEQ ID NO: 4474 - DNA, 20 bp, synthetic construct
  misc_feature 1..20: note = chemically synthesized
  source 1..20: mol_type = other DNA
tgataagccagatttatgga

SEQ ID NO: 4475 - DNA, 20 bp, synthetic construct
  misc_feature 1..20: note = chemically synthesized
  source 1..20: mol_type = other DNA
ataagccagatttatggaga

SEQ ID NO: 4476 - DNA, 20 bp, synthetic construct
  misc_feature 1..20: note = chemically synthesized
  source 1..20: mol_type = other DNA
agatgtttccttattctctc

SEQ ID NO: 4477 - DNA, 20 bp, synthetic construct
  misc_feature 1..20: note = chemically synthesized
  source 1..20: mol_type = other DNA
tgtttccttattctctcaag

SEQ ID NO: 4478 - DNA, 20 bp, synthetic construct
  misc_feature 1..20: note = chemically synthesized
  source 1..20: mol_type = other DNA
tttccttattctctcaagtg

SEQ ID NO: 4479 - DNA, 20 bp, synthetic construct
  misc_feature 1..20: note = chemically synthesized
  source 1..20: mol_type = other DNA
tgattttctgatatttttca

SEQ ID NO: 4480 - DNA, 20 bp, synthetic construct
  misc_feature 1..20: note = chemically synthesized
  source 1..20: mol_type = other DNA
gatatttttcaaagaatccc

SEQ ID NO: 4481 - DNA, 20 bp, synthetic construct
  misc_feature 1..20: note = chemically synthesized
  source 1..20: mol_type = other DNA
atttttcaaagaatccctag

SEQ ID NO: 4482 - DNA, 20 bp, synthetic construct
  misc_feature 1..20: note = chemically synthesized
  source 1..20: mol_type = other DNA
ctagaagcttttttcaccta

SEQ ID NO: 4483 - DNA, 20 bp, synthetic construct
  misc_feature 1..20: note = chemically synthesized
  source 1..20: mol_type = other DNA
gaagcttttttcacctatag

SEQ ID NO: 4484 - DNA, 20 bp, synthetic construct
  misc_feature 1..20: note = chemically synthesized
  source 1..20: mol_type = other DNA
tcacctatagtagtaaaact

SEQ ID NO: 4485 - DNA, 20 bp, synthetic construct
  misc_feature 1..20: note = chemically synthesized
  source 1..20: mol_type = other DNA
taaaacttagtaaaaaaaaa

SEQ ID NO: 4486 - DNA, 20 bp, synthetic construct
  misc_feature 1..20: note = chemically synthesized
  source 1..20: mol_type = other DNA
ataaatatgatgtttgacat

SEQ ID NO: 4487 - DNA, 20 bp, synthetic construct
  misc_feature 1..20: note = chemically synthesized
  source 1..20: mol_type = other DNA
tgacatcagctgaccctgac

SEQ ID NO: 4488 - DNA, 20 bp, synthetic construct
  misc_feature 1..20: note = chemically synthesized
  source 1..20: mol_type = other DNA
cctgactggatgatcttgat

SEQ ID NO: 4489 - DNA, 20 bp, synthetic construct
  misc_feature 1..20: note = chemically synthesized
  source 1..20: mol_type = other DNA
ggatgatcttgattggatgc

SEQ ID NO: 4490 - DNA, 20 bp, synthetic construct
  misc_feature 1..20: note = chemically synthesized
  source 1..20: mol_type = other DNA
gatgatcttgattggatgct

SEQ ID NO: 4491 - DNA, 20 bp, synthetic construct
  misc_feature 1..20: note = chemically synthesized
  source 1..20: mol_type = other DNA
atcttgattggatgctaggc

SEQ ID NO: 4492 - DNA, 20 bp, synthetic construct
  misc_feature 1..20: note = chemically synthesized
  source 1..20: mol_type = other DNA
ttggatgctaggcaagtgcc

SEQ ID NO: 4493 - DNA, 20 bp, synthetic construct
  misc_feature 1..20: note = chemically synthesized
  source 1..20: mol_type = other DNA
tggatgctaggcaagtgccc

SEQ ID NO: 4494 - DNA, 20 bp, synthetic construct
  misc_feature 1..20: note = chemically synthesized
  source 1..20: mol_type = other DNA
aagtgcccaggtcctccaat

SEQ ID NO: 4495 - DNA, 20 bp, synthetic construct
  misc_feature 1..20: note = chemically synthesized
  source 1..20: mol_type = other DNA
aggtcctccaatcagtcatc

SEQ ID NO: 4496 - DNA, 20 bp, synthetic construct
  misc_feature 1..20: note = chemically synthesized
  source 1..20: mol_type = other DNA
ggtcctccaatcagtcatct

SEQ ID NO: 4497 - DNA, 20 bp, synthetic construct
  misc_feature 1..20: note = chemically synthesized
  source 1..20: mol_type = other DNA
aatcagtcatctaggcatct

SEQ ID NO: 4498 - DNA, 20 bp, synthetic construct
  misc_feature 1..20: note = chemically synthesized
  source 1..20: mol_type = other DNA
ctaggcatcttagttctcac

SEQ ID NO: 4499 - DNA, 20 bp, synthetic construct
  misc_feature 1..20: note = chemically synthesized
  source 1..20: mol_type = other DNA
catcttagttctcactggct

SEQ ID NO: 4500 - DNA, 20 bp, synthetic construct
  misc_feature 1..20: note = chemically synthesized
  source 1..20: mol_type = other DNA
tcttagttctcactggctaa

SEQ ID NO: 4501 - DNA, 20 bp, synthetic construct
  misc_feature 1..20: note = chemically synthesized
  source 1..20: mol_type = other DNA
ttagttctcactggctaaga

SEQ ID NO: 4502 - DNA, 20 bp, synthetic construct
  misc_feature 1..20: note = chemically synthesized
  source 1..20: mol_type = other DNA
tagttctcactggctaagag

SEQ ID NO: 4503 - DNA, 20 bp, synthetic construct
  misc_feature 1..20: note = chemically synthesized
  source 1..20: mol_type = other DNA
gaggtcatattttattacgt

SEQ ID NO: 4504 - DNA, 20 bp, synthetic construct
  misc_feature 1..20: note = chemically synthesized
  source 1..20: mol_type = other DNA
atattttattacgtaagtgt

SEQ ID NO: 4505 - DNA, 20 bp, synthetic construct
  misc_feature 1..20: note = chemically synthesized
  source 1..20: mol_type = other DNA
acgtaagtgtgagtgctata

SEQ ID NO: 4506 - DNA, 20 bp, synthetic construct
  misc_feature 1..20: note = chemically synthesized
  source 1..20: mol_type = other DNA
taagtgtgagtgctatatgg

SEQ ID NO: 4507 - DNA, 20 bp, synthetic construct
  misc_feature 1..20: note = chemically synthesized
  source 1..20: mol_type = other DNA
aagtgtgagtgctatatggt

SEQ ID NO: 4508 - DNA, 20 bp, synthetic construct
  misc_feature 1..20: note = chemically synthesized
  source 1..20: mol_type = other DNA
gtgtgagtgctatatggtgg

SEQ ID NO: 4509 - DNA, 20 bp, synthetic construct
  misc_feature 1..20: note = chemically synthesized
  source 1..20: mol_type = other DNA
tgctatatggtgggagatat

SEQ ID NO: 4510 - DNA, 20 bp, synthetic construct
  misc_feature 1..20: note = chemically synthesized
  source 1..20: mol_type = other DNA
agaattatcacatgcatttc

SEQ ID NO: 4511 - DNA, 20 bp, synthetic construct
  misc_feature 1..20: note = chemically synthesized
  source 1..20: mol_type = other DNA
tttcaagtgctttccattca

SEQ ID NO: 4512 - DNA, 20 bp, synthetic construct
  misc_feature 1..20: note = chemically synthesized
  source 1..20: mol_type = other DNA
ttcaagtgctttccattcaa

SEQ ID NO: 4513 - DNA, 20 bp, synthetic construct
  misc_feature 1..20: note = chemically synthesized
  source 1..20: mol_type = other DNA
attcaaaggtcttgaaacca

SEQ ID NO: 4514 - DNA, 20 bp, synthetic construct
  misc_feature 1..20: note = chemically synthesized
  source 1..20: mol_type = other DNA
aaaggtcttgaaaccatagt

SEQ ID NO: 4515 - DNA, 20 bp, synthetic construct
  misc_feature 1..20: note = chemically synthesized
  source 1..20: mol_type = other DNA
aaggtcttgaaaccatagtg

SEQ ID NO: 4516 - DNA, 20 bp, synthetic construct
  misc_feature 1..20: note = chemically synthesized
  source 1..20: mol_type = other DNA
aggtcttgaaaccatagtga

SEQ ID NO: 4517 - DNA, 20 bp, synthetic construct
  misc_feature 1..20: note = chemically synthesized
  source 1..20: mol_type = other DNA
aaaccatagtgagggtaaat

SEQ ID NO: 4518 - DNA, 20 bp, synthetic construct
  misc_feature 1..20: note = chemically synthesized
  source 1..20: mol_type = other DNA
catagtgagggtaaattgga

SEQ ID NO: 4519 - DNA, 20 bp, synthetic construct
  misc_feature 1..20: note = chemically synthesized
  source 1..20: mol_type = other DNA
atggcttcaccttgcttttt

SEQ ID NO: 4520 - DNA, 20 bp, synthetic construct
  misc_feature 1..20: note = chemically synthesized
  source 1..20: mol_type = other DNA
ccttgcttttttagacatta

SEQ ID NO: 4521 - DNA, 20 bp, synthetic construct
  misc_feature 1..20: note = chemically synthesized
  source 1..20: mol_type = other DNA
gcttttttagacattaaaga

SEQ ID NO: 4522 - DNA, 20 bp, synthetic construct
  misc_feature 1..20: note = chemically synthesized
  source 1..20: mol_type = other DNA
cttttttagacattaaagaa

SEQ ID NO: 4523 - DNA, 20 bp, synthetic construct
  misc_feature 1..20: note = chemically synthesized
  source 1..20: mol_type = other DNA
tttagacattaaagaaagga

SEQ ID NO: 4524 - DNA, 20 bp, synthetic construct
  misc_feature 1..20: note = chemically synthesized
  source 1..20: mol_type = other DNA
cttatcttcccacctatcct

SEQ ID NO: 4525 - DNA, 20 bp, synthetic construct
  misc_feature 1..20: note = chemically synthesized
  source 1..20: mol_type = other DNA
cttcccacctatccttggaa

SEQ ID NO: 4526 - DNA, 20 bp, synthetic construct
  misc_feature 1..20: note = chemically synthesized
  source 1..20: mol_type = other DNA
tatccttggaaaagaaatta

SEQ ID NO: 4527 - DNA, 20 bp, synthetic construct
  misc_feature 1..20: note = chemically synthesized
  source 1..20: mol_type = other DNA
atccttggaaaagaaattaa

SEQ ID NO: 4528 - DNA, 20 bp, synthetic construct
  misc_feature 1..20: note = chemically synthesized
  source 1..20: mol_type = other DNA
aaaagaaattaaaggaatca

SEQ ID NO: 4529 - DNA, 20 bp, synthetic construct
  misc_feature 1..20: note = chemically synthesized
  source 1..20: mol_type = other DNA
aaagaaattaaaggaatcaa

SEQ ID NO: 4530 - DNA, 20 bp, synthetic construct
  misc_feature 1..20: note = chemically synthesized
  source 1..20: mol_type = other DNA
aaaggaatcaaaggatatta

SEQ ID NO: 4531 - DNA, 20 bp, synthetic construct
  misc_feature 1..20: note = chemically synthesized
  source 1..20: mol_type = other DNA
atcaaaggatattatagaaa

SEQ ID NO: 4532 - DNA, 20 bp, synthetic construct
  misc_feature 1..20: note = chemically synthesized
  source 1..20: mol_type = other DNA
caaaggatattatagaaaaa

SEQ ID NO: 4533 - DNA, 20 bp, synthetic construct
  misc_feature 1..20: note = chemically synthesized
  source 1..20: mol_type = other DNA
ggatattatagaaaaagaga

SEQ ID NO: 4534 - DNA, 20 bp, synthetic construct
  misc_feature 1..20: note = chemically synthesized
  source 1..20: mol_type = other DNA
atattatagaaaaagagatg

SEQ ID NO: 4535 - DNA, 20 bp, synthetic construct
  misc_feature 1..20: note = chemically synthesized
  source 1..20: mol_type = other DNA
tatagaaaaagagatggaga

SEQ ID NO: 4536 - DNA, 20 bp, synthetic construct
  misc_feature 1..20: note = chemically synthesized
  source 1..20: mol_type = other DNA
atagaaaaagagatggagaa

SEQ ID NO: 4537 - DNA, 20 bp, synthetic construct
  misc_feature 1..20: note = chemically synthesized
  source 1..20: mol_type = other DNA
aaaagagatggagaaaggac

SEQ ID NO: 4538 - DNA, 20 bp, synthetic construct
  misc_feature 1..20: note = chemically synthesized
  source 1..20: mol_type = other DNA
aaagagatggagaaaggaca

SEQ ID NO: 4539 - DNA, 20 bp, synthetic construct
  misc_feature 1..20: note = chemically synthesized
  source 1..20: mol_type = other DNA
agagatggagaaaggacaag

SEQ ID NO: 4540 - DNA, 20 bp, synthetic construct
  misc_feature 1..20: note = chemically synthesized
  source 1..20: mol_type = other DNA
gagaaaggacaaggagaatt

SEQ ID NO: 4541 - DNA, 20 bp, synthetic construct
  misc_feature 1..20: note = chemically synthesized
  source 1..20: mol_type = other DNA
agaaaggacaaggagaattt

SEQ ID NO: 4542 - DNA, 20 bp, synthetic construct
  misc_feature 1..20: note = chemically synthesized
  source 1..20: mol_type = other DNA
gaaaggacaaggagaattta

SEQ ID NO: 4543 - DNA, 20 bp, synthetic construct
  misc_feature 1..20: note = chemically synthesized
  source 1..20: mol_type = other DNA
aaaggacaaggagaatttag

SEQ ID NO: 4544 - DNA, 20 bp, synthetic construct
  misc_feature 1..20: note = chemically synthesized
  source 1..20: mol_type = other DNA
aaggagaatttaggggacaa

SEQ ID NO: 4545 - DNA, 20 bp, synthetic construct
  misc_feature 1..20: note = chemically synthesized
  source 1..20: mol_type = other DNA
gtctgcatctgactacctga

SEQ ID NO: 4546 - DNA, 20 bp, synthetic construct
  misc_feature 1..20: note = chemically synthesized
  source 1..20: mol_type = other DNA
atctgactacctgatagtga

SEQ ID NO: 4547 - DNA, 20 bp, synthetic construct
  misc_feature 1..20: note = chemically synthesized
  source 1..20: mol_type = other DNA
tctgactacctgatagtgac

SEQ ID NO: 4548 - DNA, 20 bp, synthetic construct
  misc_feature 1..20: note = chemically synthesized
  source 1..20: mol_type = other DNA
gactacctgatagtgacagg

SEQ ID NO: 4549 - DNA, 20 bp, synthetic construct
  misc_feature 1..20: note = chemically synthesized
  source 1..20: mol_type = other DNA
tgatagtgacaggaagaaca

SEQ ID NO: 4550 - DNA, 20 bp, synthetic construct
  misc_feature 1..20: note = chemically synthesized
  source 1..20: mol_type = other DNA
gtgacaggaagaacaaagaa

SEQ ID NO: 4551 - DNA, 20 bp, synthetic construct
  misc_feature 1..20: note = chemically synthesized
  source 1..20: mol_type = other DNA
aagaacaaagaatagaatcc

SEQ ID NO: 4552 - DNA, 20 bp, synthetic construct
  misc_feature 1..20: note = chemically synthesized
  source 1..20: mol_type = other DNA
gaacaaagaatagaatccaa

SEQ ID NO: 4553 - DNA, 20 bp, synthetic construct
  misc_feature 1..20: note = chemically synthesized
  source 1..20: mol_type = other DNA
aacaaagaatagaatccaag

SEQ ID NO: 4554 - DNA, 20 bp, synthetic construct
  misc_feature 1..20: note = chemically synthesized
  source 1..20: mol_type = other DNA
tattataatgtttttaaatc

SEQ ID NO: 4555 - DNA, 20 bp, synthetic construct
  misc_feature 1..20: note = chemically synthesized
  source 1..20: mol_type = other DNA
attataatgtttttaaatct

SEQ ID NO: 4556 - DNA, 20 bp, synthetic construct
  misc_feature 1..20: note = chemically synthesized
  source 1..20: mol_type = other DNA
ttataatgtttttaaatctg

SEQ ID NO: 4557 - DNA, 20 bp, synthetic construct
  misc_feature 1..20: note = chemically synthesized
  source 1..20: mol_type = other DNA
tctggggactctaaaacttg

SEQ ID NO: 4558 - DNA, 20 bp, synthetic construct
  misc_feature 1..20: note = chemically synthesized
  source 1..20: mol_type = other DNA
aacttgaagaattttttttt

SEQ ID NO: 4559 - DNA, 20 bp, synthetic construct
  misc_feature 1..20: note = chemically synthesized
  source 1..20: mol_type = other DNA
tttttttgagcaaatgtttt

SEQ ID NO: 4560 - DNA, 20 bp, synthetic construct
  misc_feature 1..20: note = chemically synthesized
  source 1..20: mol_type = other DNA
ttctgataaatataatatgc

SEQ ID NO: 4561 - DNA, 20 bp, synthetic construct
  misc_feature 1..20: note = chemically synthesized
  source 1..20: mol_type = other DNA
ctgataaatataatatgcaa

SEQ ID NO: 4562 - DNA, 20 bp, synthetic construct
  misc_feature 1..20: note = chemically synthesized
  source 1..20: mol_type = other DNA
tgataaatataatatgcaag

SEQ ID NO: 4563 - DNA, 20 bp, synthetic construct
  misc_feature 1..20: note = chemically synthesized
  source 1..20: mol_type = other DNA
gataaatataatatgcaaga

SEQ ID NO: 4564 - DNA, 20 bp, synthetic construct
  misc_feature 1..20: note = chemically synthesized
  source 1..20: mol_type = other DNA
aaatataatatgcaagaggg

SEQ ID NO: 4565 - DNA, 20 bp, synthetic construct
  misc_feature 1..20: note = chemically synthesized
  source 1..20: mol_type = other DNA
gagggcagtgatccaaacta

SEQ ID NO: 4566 - DNA, 20 bp, synthetic construct
  misc_feature 1..20: note = chemically synthesized
  source 1..20: mol_type = other DNA
aactacggctgctgtgatac

SEQ ID NO: 4567 - DNA, 20 bp, synthetic construct
  misc_feature 1..20: note = chemically synthesized
  source 1..20: mol_type = other DNA
actactttaaaacacacctt

SEQ ID NO: 4568 - DNA, 20 bp, synthetic construct
  misc_feature 1..20: note = chemically synthesized
  source 1..20: mol_type = other DNA
accttcagcaatattctatg

SEQ ID NO: 4569 - DNA, 20 bp, synthetic construct
  misc_feature 1..20: note = chemically synthesized
  source 1..20: mol_type = other DNA
attctatgcagatgaaataa

SEQ ID NO: 4570 - DNA, 20 bp, synthetic construct
  misc_feature 1..20: note = chemically synthesized
  source 1..20: mol_type = other DNA
tatgtttaatttaatatgtt

SEQ ID NO: 4571 - DNA, 20 bp, synthetic construct
  misc_feature 1..20: note = chemically synthesized
  source 1..20: mol_type = other DNA
taatatgtttagttttctta

SEQ ID NO: 4572 - DNA, 20 bp, synthetic construct
  misc_feature 1..20: note = chemically synthesized
  source 1..20: mol_type = other DNA
tatgtttagttttcttatag

SEQ ID NO: 4573 - DNA, 20 bp, synthetic construct
  misc_feature 1..20: note = chemically synthesized
  source 1..20: mol_type = other DNA
agttttcttatagaagtcta

SEQ ID NO: 4574 - DNA, 20 bp, synthetic construct
  misc_feature 1..20: note = chemically synthesized
  source 1..20: mol_type = other DNA
tatagaagtctacagtcttt

SEQ ID NO: 4575 - DNA, 20 bp, synthetic construct
  misc_feature 1..20: note = chemically synthesized
  source 1..20: mol_type = other DNA
agtctttgagccacatgctt

SEQ ID NO: 4576 - DNA, 20 bp, synthetic construct
  misc_feature 1..20: note = chemically synthesized
  source 1..20: mol_type = other DNA
tatataatattattgacatc

SEQ ID NO: 4577 - DNA, 20 bp, synthetic construct
  misc_feature 1..20: note = chemically synthesized
  source 1..20: mol_type = other DNA
acatcaagtaacaatatcat

SEQ ID NO: 4578 - DNA, 20 bp, synthetic construct
  misc_feature 1..20: note = chemically synthesized
  source 1..20: mol_type = other DNA
taacaatatcattggaatct

SEQ ID NO: 4579 - DNA, 20 bp, synthetic construct
  misc_feature 1..20: note = chemically synthesized
  source 1..20: mol_type = other DNA
atatgattatctaatatacc

SEQ ID NO: 4580 - DNA, 20 bp, synthetic construct
  misc_feature 1..20: note = chemically synthesized
  source 1..20: mol_type = other DNA
aatatacctagatatttttg

SEQ ID NO: 4581 - DNA, 20 bp, synthetic construct
  misc_feature 1..20: note = chemically synthesized
  source 1..20: mol_type = other DNA
atatacctagatatttttgc

SEQ ID NO: 4582 - DNA, 20 bp, synthetic construct
  misc_feature 1..20: note = chemically synthesized
  source 1..20: mol_type = other DNA
tatacctagatatttttgca

SEQ ID NO: 4583 - DNA, 20 bp, synthetic construct
  misc_feature 1..20: note = chemically synthesized
  source 1..20: mol_type = other DNA
tatttttgcagggaacatgt

SEQ ID NO: 4584 - DNA, 20 bp, synthetic construct
  misc_feature 1..20: note = chemically synthesized
  source 1..20: mol_type = other DNA
gggaacatgtaagtattatg

SEQ ID NO: 4585 - DNA, 20 bp, synthetic construct
  misc_feature 1..20: note = chemically synthesized
  source 1..20: mol_type = other DNA
agtattatgtagaataaata

SEQ ID NO: 4586 - DNA, 20 bp, synthetic construct
  misc_feature 1..20: note = chemically synthesized
  source 1..20: mol_type = other DNA
gattataaaaattctcacat

SEQ ID NO: 4587 - DNA, 20 bp, synthetic construct
  misc_feature 1..20: note = chemically synthesized
  source 1..20: mol_type = other DNA
attctcacataagttcatgt

SEQ ID NO: 4588 - DNA, 20 bp, synthetic construct
  misc_feature 1..20: note = chemically synthesized
  source 1..20: mol_type = other DNA
gtcagaaattgccatcactt

SEQ ID NO: 4589 - DNA, 20 bp, synthetic construct
  misc_feature 1..20: note = chemically synthesized
  source 1..20: mol_type = other DNA
cagaaattgccatcacttta

SEQ ID NO: 4590 - DNA, 20 bp, synthetic construct
  misc_feature 1..20: note = chemically synthesized
  source 1..20: mol_type = other DNA
aaattgccatcactttagag

SEQ ID NO: 4591 - DNA, 20 bp, synthetic construct
  misc_feature 1..20: note = chemically synthesized
  source 1..20: mol_type = other DNA
agagcagattgtgctgttaa

SEQ ID NO: 4592 - DNA, 20 bp, synthetic construct
  misc_feature 1..20: note = chemically synthesized
  source 1..20: mol_type = other DNA
gattgtgctgttaaaagact

SEQ ID NO: 4593 - DNA, 20 bp, synthetic construct
  misc_feature 1..20: note = chemically synthesized
  source 1..20: mol_type = other DNA
actcagtttttaaatttcta

SEQ ID NO: 4594 - DNA, 20 bp, synthetic construct
  misc_feature 1..20: note = chemically synthesized
  source 1..20: mol_type = other DNA
tttaaatttctatggatttc

SEQ ID NO: 4595 - DNA, 20 bp, synthetic construct
  misc_feature 1..20: note = chemically synthesized
  source 1..20: mol_type = other DNA
ttaaatttctatggatttca

SEQ ID NO: 4596 - DNA, 20 bp, synthetic construct
  misc_feature 1..20: note = chemically synthesized
  source 1..20: mol_type = other DNA
ttctatggatttcaaggaaa

SEQ ID NO: 4597 - DNA, 20 bp, synthetic construct
  misc_feature 1..20: note = chemically synthesized
  source 1..20: mol_type = other DNA
aggaaatggataaatgattg

SEQ ID NO: 4598 - DNA, 20 bp, synthetic construct
  misc_feature 1..20: note = chemically synthesized
  source 1..20: mol_type = other DNA
tgtggccctgttaaccaaaa

SEQ ID NO: 4599 - DNA, 20 bp, synthetic construct
  misc_feature 1..20: note = chemically synthesized
  source 1..20: mol_type = other DNA
ggccctgttaaccaaaatag

SEQ ID NO: 4600 - DNA, 20 bp, synthetic construct
  misc_feature 1..20: note = chemically synthesized
  source 1..20: mol_type = other DNA
aaccaaaatagcagtaaaaa

SEQ ID NO: 4601 - DNA, 20 bp, synthetic construct
  misc_feature 1..20: note = chemically synthesized
  source 1..20: mol_type = other DNA
aatagcagtaaaaatggctt

SEQ ID NO: 4602 - DNA, 20 bp, synthetic construct
  misc_feature 1..20: note = chemically synthesized
  source 1..20: mol_type = other DNA
aatggctttggctactgatt

SEQ ID NO: 4603 - DNA, 20 bp, synthetic construct
  misc_feature 1..20: note = chemically synthesized
  source 1..20: mol_type = other DNA
tgatttagtatctgtaaatt

SEQ ID NO: 4604 - DNA, 20 bp, synthetic construct
  misc_feature 1..20: note = chemically synthesized
  source 1..20: mol_type = other DNA
gatttagtatctgtaaatta

SEQ ID NO: 4605 - DNA, 20 bp, synthetic construct
  misc_feature 1..20: note = chemically synthesized
  source 1..20: mol_type = other DNA
tatctgtaaattaaggatgt

SEQ ID NO: 4606 - DNA, 20 bp, synthetic construct
  misc_feature 1..20: note = chemically synthesized
  source 1..20: mol_type = other DNA
ttaaggatgttggattgctt

SEQ ID NO: 4607 - DNA, 20 bp, synthetic construct
  misc_feature 1..20: note = chemically synthesized
  source 1..20: mol_type = other DNA
tgttggattgcttgagattt

SEQ ID NO: 4608 - DNA, 20 bp, synthetic construct
  misc_feature 1..20: note = chemically synthesized
  source 1..20: mol_type = other DNA
ctaactctgcttcaatatgt

SEQ ID NO: 4609 - DNA, 20 bp, synthetic construct
  misc_feature 1..20: note = chemically synthesized
  source 1..20: mol_type = other DNA
tatgtaagatacttctaatt

SEQ ID NO: 4610 - DNA, 20 bp, synthetic construct
  misc_feature 1..20: note = chemically synthesized
  source 1..20: mol_type = other DNA
aagatacttctaattgagtc

SEQ ID NO: 4611 - DNA, 20 bp, synthetic construct
  misc_feature 1..20: note = chemically synthesized
  source 1..20: mol_type = other DNA
gagtctagataattgttcta

SEQ ID NO: 4612 - DNA, 20 bp, synthetic construct
  misc_feature 1..20: note = chemically synthesized
  source 1..20: mol_type = other DNA
agtctagataattgttctat

SEQ ID NO: 4613 - DNA, 20 bp, synthetic construct
  misc_feature 1..20: note = chemically synthesized
  source 1..20: mol_type = other DNA
taattgttctataggtaaat

SEQ ID NO: 4614 - DNA, 20 bp, synthetic construct
  misc_feature 1..20: note = chemically synthesized
  source 1..20: mol_type = other DNA
ctataggtaaattagtgtcc

SEQ ID NO: 4615 - DNA, 20 bp, synthetic construct
  misc_feature 1..20: note = chemically synthesized
  source 1..20: mol_type = other DNA
taaattagtgtcctggatgc

SEQ ID NO: 4616 - DNA, 20 bp, synthetic construct
  misc_feature 1..20: note = chemically synthesized
  source 1..20: mol_type = other DNA
tgtcctggatgctagtgctt

SEQ ID NO: 4617 - DNA, 20 bp, synthetic construct
  misc_feature 1..20: note = chemically synthesized
  source 1..20: mol_type = other DNA
gcttcagccaaaaaatgaaa

SEQ ID NO: 4618 - DNA, 20 bp, synthetic construct
  misc_feature 1..20: note = chemically synthesized
  source 1..20: mol_type = other DNA
aaaaagatacaattaaatga

SEQ ID NO: 4619 - DNA, 20 bp, synthetic construct
  misc_feature 1..20: note = chemically synthesized
  source 1..20: mol_type = other DNA
tgaaagcctttatcttacta

SEQ ID NO: 4620 - DNA, 20 bp, synthetic construct
  misc_feature 1..20: note = chemically synthesized
  source 1..20: mol_type = other DNA
gaaagcctttatcttactat

SEQ ID NO: 4621 - DNA, 20 bp, synthetic construct
  misc_feature 1..20: note = chemically synthesized
  source 1..20: mol_type = other DNA
tttatcttactatgggactt

SEQ ID NO: 4622 - DNA, 20 bp, synthetic construct
  misc_feature 1..20: note = chemically synthesized
  source 1..20: mol_type = other DNA
atcttactatgggacttgag

SEQ ID NO: 4623 - DNA, 20 bp, synthetic construct
  misc_feature 1..20: note = chemically synthesized
  source 1..20: mol_type = other DNA
cttactatgggacttgagtg

SEQ ID NO: 4624 - DNA, 20 bp, synthetic construct
  misc_feature 1..20: note = chemically synthesized
  source 1..20: mol_type = other DNA
ttactatgggacttgagtgg

SEQ ID NO: 4625 - DNA, 20 bp, synthetic construct
  misc_feature 1..20: note = chemically synthesized
  source 1..20: mol_type = other DNA
gacttgagtggaggaaatcc

SEQ ID NO: 4626 - DNA, 20 bp, synthetic construct
  misc_feature 1..20: note = chemically synthesized
  source 1..20: mol_type = other DNA
gagtggaggaaatccaagaa

SEQ ID NO: 4627 - DNA, 20 bp, synthetic construct
  misc_feature 1..20: note = chemically synthesized
  source 1..20: mol_type = other DNA
gaaatccaagaaaagaattc

SEQ ID NO: 4628 - DNA, 20 bp, synthetic construct
  misc_feature 1..20: note = chemically synthesized
  source 1..20: mol_type = other DNA
agatgatcctttcttcgaac

SEQ ID NO: 4629 - DNA, 20 bp, synthetic construct
  misc_feature 1..20: note = chemically synthesized
  source 1..20: mol_type = other DNA
ctttcttcgaacaagtaatt

SEQ ID NO: 4630 - DNA, 20 bp, synthetic construct
  misc_feature 1..20: note = chemically synthesized
  source 1..20: mol_type = other DNA
aacaagtaatttggcataat

SEQ ID NO: 4631 - DNA, 20 bp, synthetic construct
  misc_feature 1..20: note = chemically synthesized
  source 1..20: mol_type = other DNA
atttggcataattggacacc

SEQ ID NO: 4632 - DNA, 20 bp, synthetic construct
  misc_feature 1..20: note = chemically synthesized
  source 1..20: mol_type = other DNA
cctggtttcttctcatttgt

SEQ ID NO: 4633 - DNA, 20 bp, synthetic construct
  misc_feature 1..20: note = chemically synthesized
  source 1..20: mol_type = other DNA
gtttcttctcatttgtaagt

SEQ ID NO: 4634 - DNA, 20 bp, synthetic construct
  misc_feature 1..20: note = chemically synthesized
  source 1..20: mol_type = other DNA
ttctcatttgtaagttagta

SEQ ID NO: 4635 - DNA, 20 bp, synthetic construct
  misc_feature 1..20: note = chemically synthesized
  source 1..20: mol_type = other DNA
catttgtaagttagtaaagc

SEQ ID NO: 4636 - DNA, 20 bp, synthetic construct
  misc_feature 1..20: note = chemically synthesized
  source 1..20: mol_type = other DNA
atttgtaagttagtaaagct

SEQ ID NO: 4637 - DNA, 20 bp, synthetic construct
  misc_feature 1..20: note = chemically synthesized
  source 1..20: mol_type = other DNA
ttgtaagttagtaaagctgg

SEQ ID NO: 4638 - DNA, 20 bp, synthetic construct
  misc_feature 1..20: note = chemically synthesized
  source 1..20: mol_type = other DNA
aagttagtaaagctgggagt

SEQ ID NO: 4639 - DNA, 20 bp, synthetic construct
  misc_feature 1..20: note = chemically synthesized
  source 1..20: mol_type = other DNA
gtaaagctgggagttggtgc

SEQ ID NO: 4640 - DNA, 20 bp, synthetic construct
  misc_feature 1..20: note = chemically synthesized
  source 1..20: mol_type = other DNA
gctgggagttggtgctagta

SEQ ID NO: 4641 - DNA, 20 bp, synthetic construct
  misc_feature 1..20: note = chemically synthesized
  source 1..20: mol_type = other DNA
ggagttggtgctagtaaagc

SEQ ID NO: 4642 - DNA, 20 bp, synthetic construct
  misc_feature 1..20: note = chemically synthesized
  source 1..20: mol_type = other DNA
gagttggtgctagtaaagct

SEQ ID NO: 4643 - DNA, 20 bp, synthetic construct
  misc_feature 1..20: note = chemically synthesized
  source 1..20: mol_type = other DNA
gttggtgctagtaaagctgg

SEQ ID NO: 4644 - DNA, 20 bp, synthetic construct
  misc_feature 1..20: note = chemically synthesized
  source 1..20: mol_type = other DNA
gtgctagtaaagctgggagt

SEQ ID NO: 4645 - DNA, 20 bp, synthetic construct
  misc_feature 1..20: note = chemically synthesized
  source 1..20: mol_type = other DNA
gtaaagctgggagttggtgc

SEQ ID NO: 4646 - DNA, 20 bp, synthetic construct
  misc_feature 1..20: note = chemically synthesized
  source 1..20: mol_type = other DNA
gctgggagttggtgccagaa

SEQ ID NO: 4647 - DNA, 20 bp, synthetic construct
  misc_feature 1..20: note = chemically synthesized
  source 1..20: mol_type = other DNA
tgggagttggtgccagaaaa

SEQ ID NO: 4648 - DNA, 20 bp, synthetic construct
  misc_feature 1..20: note = chemically synthesized
  source 1..20: mol_type = other DNA
gttggtgccagaaaagagaa

SEQ ID NO: 4649 - DNA, 20 bp, synthetic construct
  misc_feature 1..20: note = chemically synthesized
  source 1..20: mol_type = other DNA
atttatttcttccttgtttg

SEQ ID NO: 4650 - DNA, 20 bp, synthetic construct
  misc_feature 1..20: note = chemically synthesized
  source 1..20: mol_type = other DNA
tttatttcttccttgtttgt

SEQ ID NO: 4651 - DNA, 20 bp, synthetic construct
  misc_feature 1..20: note = chemically synthesized
  source 1..20: mol_type = other DNA
tcttccttgtttgtaggctg

SEQ ID NO: 4652 - DNA, 20 bp, synthetic construct
  misc_feature 1..20: note = chemically synthesized
  source 1..20: mol_type = other DNA
ttccttgtttgtaggctgta

SEQ ID NO: 4653 - DNA, 20 bp, synthetic construct
  misc_feature 1..20: note = chemically synthesized
  source 1..20: mol_type = other DNA
ttgtttgtaggctgtagagc

SEQ ID NO: 4654 - DNA, 20 bp, synthetic construct
  misc_feature 1..20: note = chemically synthesized
  source 1..20: mol_type = other DNA
gagcaagcttgtccaacctg

SEQ ID NO: 4655 - DNA, 20 bp, synthetic construct
  misc_feature 1..20: note = chemically synthesized
  source 1..20: mol_type = other DNA
cttgtccaacctgtggcccg

SEQ ID NO: 4656 - DNA, 20 bp, synthetic construct
  misc_feature 1..20: note = chemically synthesized
  source 1..20: mol_type = other DNA
ttgtccaacctgtggcccgt

SEQ ID NO: 4657 - DNA, 20 bp, synthetic construct
  misc_feature 1..20: note = chemically synthesized
  source 1..20: mol_type = other DNA
ccgtgggctgcatgcatccc

SEQ ID NO: 4658 - DNA, 20 bp, synthetic construct
  misc_feature 1..20: note = chemically synthesized
  source 1..20: mol_type = other DNA
gggctgcatgcatcccaaga

SEQ ID NO: 4659 - DNA, 20 bp, synthetic construct
  misc_feature 1..20: note = chemically synthesized
  source 1..20: mol_type = other DNA
caactttcttaaaacattat

SEQ ID NO: 4660 - DNA, 20 bp, synthetic construct
  misc_feature 1..20: note = chemically synthesized
  source 1..20: mol_type = other DNA
taaaacattatgagatttta

SEQ ID NO: 4661 - DNA, 20 bp, synthetic construct
  misc_feature 1..20: note = chemically synthesized
  source 1..20: mol_type = other DNA
aaaacattatgagattttat

SEQ ID NO: 4662 - DNA, 20 bp, synthetic construct
  misc_feature 1..20: note = chemically synthesized
  source 1..20: mol_type = other DNA
ttgtgatttttttttttttt

SEQ ID NO: 4663 - DNA, 20 bp, synthetic construct
  misc_feature 1..20: note = chemically synthesized
  source 1..20: mol_type = other DNA
tttttttttttttggctcat

SEQ ID NO: 4664 - DNA, 20 bp, synthetic construct
  misc_feature 1..20: note = chemically synthesized
  source 1..20: mol_type = other DNA
tttggctcatgagctgtcat

SEQ ID NO: 4665 - DNA, 20 bp, synthetic construct
  misc_feature 1..20: note = chemically synthesized
  source 1..20: mol_type = other DNA
tcatgagctgtcattagtgt

SEQ ID NO: 4666 - DNA, 20 bp, synthetic construct
  misc_feature 1..20: note = chemically synthesized
  source 1..20: mol_type = other DNA
gtgttagtatattttatgtg

SEQ ID NO: 4667 - DNA, 20 bp, synthetic construct
  misc_feature 1..20: note = chemically synthesized
  source 1..20: mol_type = other DNA
agtatattttatgtgtggcc

SEQ ID NO: 4668 - DNA, 20 bp, synthetic construct
  misc_feature 1..20: note = chemically synthesized
  source 1..20: mol_type = other DNA
gtatattttatgtgtggccc

SEQ ID NO: 4669 - DNA, 20 bp, synthetic construct
  misc_feature 1..20: note = chemically synthesized
  source 1..20: mol_type = other DNA
tatattttatgtgtggccca

SEQ ID NO: 4670 - DNA, 20 bp, synthetic construct
  misc_feature 1..20: note = chemically synthesized
  source 1..20: mol_type = other DNA
attttatgtgtggcccaggg

SEQ ID NO: 4671 - DNA, 20 bp, synthetic construct
  misc_feature 1..20: note = chemically synthesized
  source 1..20: mol_type = other DNA
gtgtggcccagggaagccaa

SEQ ID NO: 4672 - DNA, 20 bp, synthetic construct
  misc_feature 1..20: note = chemically synthesized
  source 1..20: mol_type = other DNA
gcccagggaagccaaaagat

SEQ ID NO: 4673 - DNA, 20 bp, synthetic construct
  misc_feature 1..20: note = chemically synthesized
  source 1..20: mol_type = other DNA
aagattggacatccctgctg

SEQ ID NO: 4674 - DNA, 20 bp, synthetic construct
  misc_feature 1..20: note = chemically synthesized
  source 1..20: mol_type = other DNA
gattggacatccctgctgta

SEQ ID NO: 4675 - DNA, 20 bp, synthetic construct
  misc_feature 1..20: note = chemically synthesized
  source 1..20: mol_type = other DNA
atccctgctgtagagtttct

SEQ ID NO: 4676 - DNA, 20 bp, synthetic construct
  misc_feature 1..20: note = chemically synthesized
  source 1..20: mol_type = other DNA
cctgctgtagagtttctcag

SEQ ID NO: 4677 - DNA, 20 bp, synthetic construct
  misc_feature 1..20: note = chemically synthesized
  source 1..20: mol_type = other DNA
ctgtagagtttctcagtggt

SEQ ID NO: 4678 - DNA, 20 bp, synthetic construct
  misc_feature 1..20: note = chemically synthesized
  source 1..20: mol_type = other DNA
gtggttggaatcaatatttg

SEQ ID NO: 4679 - DNA, 20 bp, synthetic construct
  misc_feature 1..20: note = chemically synthesized
  source 1..20: mol_type = other DNA
ggttggaatcaatatttgca

SEQ ID NO: 4680 - DNA, 20 bp, synthetic construct
  misc_feature 1..20: note = chemically synthesized
  source 1..20: mol_type = other DNA
tcaatatttgcagagtcttg

SEQ ID NO: 4681 - DNA, 20 bp, synthetic construct
  misc_feature 1..20: note = chemically synthesized
  source 1..20: mol_type = other DNA
agagtcttgtagctttttca

SEQ ID NO: 4682 - DNA, 20 bp, synthetic construct
  misc_feature 1..20: note = chemically synthesized
  source 1..20: mol_type = other DNA
atttttcccctgccacattg

SEQ ID NO: 4683 - DNA, 20 bp, synthetic construct
  misc_feature 1..20: note = chemically synthesized
  source 1..20: mol_type = other DNA
tcccctgccacattgaagaa

SEQ ID NO: 4684 - DNA, 20 bp, synthetic construct
  misc_feature 1..20: note = chemically synthesized
  source 1..20: mol_type = other DNA
gccacattgaagaatagctt

SEQ ID NO: 4685 - DNA, 20 bp, synthetic construct
  misc_feature 1..20: note = chemically synthesized
  source 1..20: mol_type = other DNA
ttgaagaatagcttgagcaa

SEQ ID NO: 4686 - DNA, 20 bp, synthetic construct
  misc_feature 1..20: note = chemically synthesized
  source 1..20: mol_type = other DNA
gcaatagccactcttctttc

SEQ ID NO: 4687 - DNA, 20 bp, synthetic construct
  misc_feature 1..20: note = chemically synthesized
  source 1..20: mol_type = other DNA
caatagccactcttctttcc

SEQ ID NO: 4688 - DNA, 20 bp, synthetic construct
  misc_feature 1..20: note = chemically synthesized
  source 1..20: mol_type = other DNA
tagccactcttctttccagg

SEQ ID NO: 4689 - DNA, 20 bp, synthetic construct
  misc_feature 1..20: note = chemically synthesized
  source 1..20: mol_type = other DNA
gccactcttctttccaggtg

SEQ ID NO: 4690 - DNA, 20 bp, synthetic construct
  misc_feature 1..20: note = chemically synthesized
  source 1..20: mol_type = other DNA
gtggagtttgtgaattactt

SEQ ID NO: 4691 - DNA, 20 bp, synthetic construct
  misc_feature 1..20: note = chemically synthesized
  source 1..20: mol_type = other DNA
ggagtttgtgaattacttta

SEQ ID NO: 4692 - DNA, 20 bp, synthetic construct
  misc_feature 1..20: note = chemically synthesized
  source 1..20: mol_type = other DNA
ctttagagatgatctttatc

SEQ ID NO: 4693 - DNA, 20 bp, synthetic construct
  misc_feature 1..20: note = chemically synthesized
  source 1..20: mol_type = other DNA
tttagagatgatctttatct

SEQ ID NO: 4694 - DNA, 20 bp, synthetic construct
  misc_feature 1..20: note = chemically synthesized
  source 1..20: mol_type = other DNA
agagatgatctttatctggg

SEQ ID NO: 4695 - DNA, 20 bp, synthetic construct
  misc_feature 1..20: note = chemically synthesized
  source 1..20: mol_type = other DNA
taatatattatctcttcgtt

SEQ ID NO: 4696 - DNA, 20 bp, synthetic construct
  misc_feature 1..20: note = chemically synthesized
  source 1..20: mol_type = other DNA
tctcttcgtttagctaacgt

SEQ ID NO: 4697 - DNA, 20 bp, synthetic construct
  misc_feature 1..20: note = chemically synthesized
  source 1..20: mol_type = other DNA
ctcttcgtttagctaacgta

SEQ ID NO: 4698 - DNA, 20 bp, synthetic construct
  misc_feature 1..20: note = chemically synthesized
  source 1..20: mol_type = other DNA
tttagctaacgtaaggttat

SEQ ID NO: 4699 - DNA, 20 bp, synthetic construct
  misc_feature 1..20: note = chemically synthesized
  source 1..20: mol_type = other DNA
gttattagatacttttcttt

SEQ ID NO: 4700 - DNA, 20 bp, synthetic construct
  misc_feature 1..20: note = chemically synthesized
  source 1..20: mol_type = other DNA
ttattagatacttttcttta

SEQ ID NO: 4701 - DNA, 20 bp, synthetic construct
  misc_feature 1..20: note = chemically synthesized
  source 1..20: mol_type = other DNA
ttagatacttttctttaagg

SEQ ID NO: 4702 - DNA, 20 bp, synthetic construct
  misc_feature 1..20: note = chemically synthesized
  source 1..20: mol_type = other DNA
tagatacttttctttaagga

SEQ ID NO: 4703 - DNA, 20 bp, synthetic construct
  misc_feature 1..20: note = chemically synthesized
  source 1..20: mol_type = other DNA
ttctttaaggaaggatacac

SEQ ID NO: 4704 - DNA, 20 bp, synthetic construct
  misc_feature 1..20: note = chemically synthesized
  source 1..20: mol_type = other DNA
tctttaaggaaggatacacc

SEQ ID NO: 4705 - DNA, 20 bp, synthetic construct
  misc_feature 1..20: note = chemically synthesized
  source 1..20: mol_type = other DNA
acaccaggacctgccttaat

SEQ ID NO: 4706 - DNA, 20 bp, synthetic construct
  misc_feature 1..20: note = chemically synthesized
  source 1..20: mol_type = other DNA
caccaggacctgccttaata

SEQ ID NO: 4707 - DNA, 20 bp, synthetic construct
  misc_feature 1..20: note = chemically synthesized
  source 1..20: mol_type = other DNA
atcataatatgtgtgtcgtg

SEQ ID NO: 4708 - DNA, 20 bp, synthetic construct
  misc_feature 1..20: note = chemically synthesized
  source 1..20: mol_type = other DNA
cataatatgtgtgtcgtgca

SEQ ID NO: 4709 - DNA, 20 bp, synthetic construct
  misc_feature 1..20: note = chemically synthesized
  source 1..20: mol_type = other DNA
cgtgcagagataaacttgta

SEQ ID NO: 4710 - DNA, 20 bp, synthetic construct
  misc_feature 1..20: note = chemically synthesized
  source 1..20: mol_type = other DNA
gcagagataaacttgtatag

SEQ ID NO: 4711 - DNA, 20 bp, synthetic construct
  misc_feature 1..20: note = chemically synthesized
  source 1..20: mol_type = other DNA
caatacgactgcttgtatta

SEQ ID NO: 4712 - DNA, 20 bp, synthetic construct
  misc_feature 1..20: note = chemically synthesized
  source 1..20: mol_type = other DNA
ctgcttgtattaaagaaaca

SEQ ID NO: 4713 - DNA, 20 bp, synthetic construct
  misc_feature 1..20: note = chemically synthesized
  source 1..20: mol_type = other DNA
gttgaattgtgtttaatcac

SEQ ID NO: 4714 - DNA, 20 bp, synthetic construct
  misc_feature 1..20: note = chemically synthesized
  source 1..20: mol_type = other DNA
tgaattgtgtttaatcacaa

SEQ ID NO: 4715 - DNA, 20 bp, synthetic construct
  misc_feature 1..20: note = chemically synthesized
  source 1..20: mol_type = other DNA
agagtaatgcatgcctgata

SEQ ID NO: 4716 - DNA, 20 bp, synthetic construct
  misc_feature 1..20: note = chemically synthesized
  source 1..20: mol_type = other DNA
aatgcatgcctgatatggtt

SEQ ID NO: 4717 - DNA, 20 bp, synthetic construct
  misc_feature 1..20: note = chemically synthesized
  source 1..20: mol_type = other DNA
ctccaccctaatctcatgtt

SEQ ID NO: 4718 - DNA, 20 bp, synthetic construct
  misc_feature 1..20: note = chemically synthesized
  source 1..20: mol_type = other DNA
tcatgttcagctgtaatccc

SEQ ID NO: 4719 - DNA, 20 bp, synthetic construct
  misc_feature 1..20: note = chemically synthesized
  source 1..20: mol_type = other DNA
agctgtaatccccagtgttg

SEQ ID NO: 4720 - DNA, 20 bp, synthetic construct
  misc_feature 1..20: note = chemically synthesized
  source 1..20: mol_type = other DNA
gtaatccccagtgttgaaga

SEQ ID NO: 4721 - DNA, 20 bp, synthetic construct
  misc_feature 1..20: note = chemically synthesized
  source 1..20: mol_type = other DNA
taatccccagtgttgaagat

SEQ ID NO: 4722 - DNA, 20 bp, synthetic construct
  misc_feature 1..20: note = chemically synthesized
  source 1..20: mol_type = other DNA
aatccccagtgttgaagatg

SEQ ID NO: 4723 - DNA, 20 bp, synthetic construct
  misc_feature 1..20: note = chemically synthesized
  source 1..20: mol_type = other DNA
ccagtgttgaagatggggcc

SEQ ID NO: 4724 - DNA, 20 bp, synthetic construct
  misc_feature 1..20: note = chemically synthesized
  source 1..20: mol_type = other DNA
gtgttgaagatggggcctgg

SEQ ID NO: 4725 - DNA, 20 bp, synthetic construct
  misc_feature 1..20: note = chemically synthesized
  source 1..20: mol_type = other DNA
tgttgaagatggggcctggt

SEQ ID NO: 4726 - DNA, 20 bp, synthetic construct
  misc_feature 1..20: note = chemically synthesized
  source 1..20: mol_type = other DNA
tgaagatggggcctggtggg

SEQ ID NO: 4727 - DNA, 20 bp, synthetic construct
  misc_feature 1..20: note = chemically synthesized
  source 1..20: mol_type = other DNA
ggggcctggtgggaagtgat

SEQ ID NO: 4728 - DNA, 20 bp, synthetic construct
  misc_feature 1..20: note = chemically synthesized
  source 1..20: mol_type = other DNA
ggtgggaagtgattggatca

SEQ ID NO: 4729 - DNA, 20 bp, synthetic construct
  misc_feature 1..20: note = chemically synthesized
  source 1..20: mol_type = other DNA
gtgggaagtgattggatcat

SEQ ID NO: 4730 - DNA, 20 bp, synthetic construct
  misc_feature 1..20: note = chemically synthesized
  source 1..20: mol_type = other DNA
gggaagtgattggatcatag

SEQ ID NO: 4731 - DNA, 20 bp, synthetic construct
  misc_feature 1..20: note = chemically synthesized
  source 1..20: mol_type = other DNA
aagtgattggatcataggag

SEQ ID NO: 4732 - DNA, 20 bp, synthetic construct
  misc_feature 1..20: note = chemically synthesized
  source 1..20: mol_type = other DNA
gtgattggatcataggagca

SEQ ID NO: 4733 - DNA, 20 bp, synthetic construct
  misc_feature 1..20: note = chemically synthesized
  source 1..20: mol_type = other DNA
aggagcagagttatcataaa

SEQ ID NO: 4734 - DNA, 20 bp, synthetic construct
  misc_feature 1..20: note = chemically synthesized
  source 1..20: mol_type = other DNA
tatcataaatagcttaatat

SEQ ID NO: 4735 - DNA, 20 bp, synthetic construct
  misc_feature 1..20: note = chemically synthesized
  source 1..20: mol_type = other DNA
agcttaatatcagtcccttt

SEQ ID NO: 4736 - DNA, 20 bp, synthetic construct
  misc_feature 1..20: note = chemically synthesized
  source 1..20: mol_type = other DNA
tcagtcccttttggtacgta

SEQ ID NO: 4737 - DNA, 20 bp, synthetic construct
  misc_feature 1..20: note = chemically synthesized
  source 1..20: mol_type = other DNA
gtcccttttggtacgtatag

SEQ ID NO: 4738 - DNA, 20 bp, synthetic construct
  misc_feature 1..20: note = chemically synthesized
  source 1..20: mol_type = other DNA
tcccttttggtacgtatagt

SEQ ID NO: 4739 - DNA, 20 bp, synthetic construct
  misc_feature 1..20: note = chemically synthesized
  source 1..20: mol_type = other DNA
ttttggtacgtatagtgggt

SEQ ID NO: 4740 - DNA, 20 bp, synthetic construct
  misc_feature 1..20: note = chemically synthesized
  source 1..20: mol_type = other DNA
tatagtgggtgagttctcat

SEQ ID NO: 4741 - DNA, 20 bp, synthetic construct
  misc_feature 1..20: note = chemically synthesized
  source 1..20: mol_type = other DNA
gggtgagttctcatgagata

SEQ ID NO: 4742 - DNA, 20 bp, synthetic construct
  misc_feature 1..20: note = chemically synthesized
  source 1..20: mol_type = other DNA
cctgcctcttcttcctgctc

SEQ ID NO: 4743 - DNA, 20 bp, synthetic construct
  misc_feature 1..20: note = chemically synthesized
  source 1..20: mol_type = other DNA
cttcctgctccagccatgtg

SEQ ID NO: 4744 - DNA, 20 bp, synthetic construct
  misc_feature 1..20: note = chemically synthesized
  source 1..20: mol_type = other DNA
tttctctctgccatgattat

SEQ ID NO: 4745 - DNA, 20 bp, synthetic construct
  misc_feature 1..20: note = chemically synthesized
  source 1..20: mol_type = other DNA
taagtttcctgaaacctccc

SEQ ID NO: 4746 - DNA, 20 bp, synthetic construct
  misc_feature 1..20: note = chemically synthesized
  source 1..20: mol_type = other DNA
gtttcctgaaacctccctag

SEQ ID NO: 4747 - DNA, 20 bp, synthetic construct
  misc_feature 1..20: note = chemically synthesized
  source 1..20: mol_type = other DNA
ctgaaacctccctagaagct

SEQ ID NO: 4748 - DNA, 20 bp, synthetic construct
  misc_feature 1..20: note = chemically synthesized
  source 1..20: mol_type = other DNA
aaacctccctagaagctgag

SEQ ID NO: 4749 - DNA, 20 bp, synthetic construct
  misc_feature 1..20: note = chemically synthesized
  source 1..20: mol_type = other DNA
acgttgccatgcttcctgta

SEQ ID NO: 4750 - DNA, 20 bp, synthetic construct
  misc_feature 1..20: note = chemically synthesized
  source 1..20: mol_type = other DNA
catgcttcctgtacagcctt

SEQ ID NO: 4751 - DNA, 20 bp, synthetic construct
  misc_feature 1..20: note = chemically synthesized
  source 1..20: mol_type = other DNA
tgtacagcctttagaactgt

SEQ ID NO: 4752 - DNA, 20 bp, synthetic construct
  misc_feature 1..20: note = chemically synthesized
  source 1..20: mol_type = other DNA
tctgttcttcaccatttacc

SEQ ID NO: 4753 - DNA, 20 bp, synthetic construct
  misc_feature 1..20: note = chemically synthesized
  source 1..20: mol_type = other DNA
cttcaccatttacccagtct

SEQ ID NO: 4754 - DNA, 20 bp, synthetic construct
  misc_feature 1..20: note = chemically synthesized
  source 1..20: mol_type = other DNA
ttcaccatttacccagtctc

SEQ ID NO: 4755 - DNA, 20 bp, synthetic construct
  misc_feature 1..20: note = chemically synthesized
  source 1..20: mol_type = other DNA
cagtctcaggtatttcctta

SEQ ID NO: 4756 - DNA, 20 bp, synthetic construct
  misc_feature 1..20: note = chemically synthesized
  source 1..20: mol_type = other DNA
ctcaggtatttccttatagc

SEQ ID NO: 4757 - DNA, 20 bp, synthetic construct
  misc_feature 1..20: note = chemically synthesized
  source 1..20: mol_type = other DNA
gtatttccttatagcaagat

SEQ ID NO: 4758 - DNA, 20 bp, synthetic construct
  misc_feature 1..20: note = chemically synthesized
  source 1..20: mol_type = other DNA
tccttatagcaagatgagaa

SEQ ID NO: 4759 - DNA, 20 bp, synthetic construct
  misc_feature 1..20: note = chemically synthesized
  source 1..20: mol_type = other DNA
atagcaagatgagaatggac

SEQ ID NO: 4760 - DNA, 20 bp, synthetic construct
  misc_feature 1..20: note = chemically synthesized
  source 1..20: mol_type = other DNA
aagatgagaatggaccagta

SEQ ID NO: 4761 - DNA, 20 bp, synthetic construct
  misc_feature 1..20: note = chemically synthesized
  source 1..20: mol_type = other DNA
aatggaccagtacagaaaat

SEQ ID NO: 4762 - DNA, 20 bp, synthetic construct
  misc_feature 1..20: note = chemically synthesized
  source 1..20: mol_type = other DNA
gtacagaaaattggtaccaa

SEQ ID NO: 4763 - DNA, 20 bp, synthetic construct
  misc_feature 1..20: note = chemically synthesized
  source 1..20: mol_type = other DNA
cagaaaattggtaccaaaag

SEQ ID NO: 4764 - DNA, 20 bp, synthetic construct
  misc_feature 1..20: note = chemically synthesized
  source 1..20: mol_type = other DNA
agaaaattggtaccaaaagt

SEQ ID NO: 4765 - DNA, 20 bp, synthetic construct
  misc_feature 1..20: note = chemically synthesized
  source 1..20: mol_type = other DNA
gaaaattggtaccaaaagtg

SEQ ID NO: 4766 - DNA, 20 bp, synthetic construct
  misc_feature 1..20: note = chemically synthesized
  source 1..20: mol_type = other DNA
aaaagtggggtactgctata

SEQ ID NO: 4767 - DNA, 20 bp, synthetic construct
  misc_feature 1..20: note = chemically synthesized
  source 1..20: mol_type = other DNA
tataaagatacatgaaaatg

SEQ ID NO: 4768 - DNA, 20 bp, synthetic construct
  misc_feature 1..20: note = chemically synthesized
  source 1..20: mol_type = other DNA
aaagatacatgaaaatgtgg

SEQ ID NO: 4769 - DNA, 20 bp, synthetic construct
  misc_feature 1..20: note = chemically synthesized
  source 1..20: mol_type = other DNA
tgaaaatgtggaagcaactt

SEQ ID NO: 4770 - DNA, 20 bp, synthetic construct
  misc_feature 1..20: note = chemically synthesized
  source 1..20: mol_type = other DNA
tgtggaagcaactttggcat

SEQ ID NO: 4771 - DNA, 20 bp, synthetic construct
  misc_feature 1..20: note = chemically synthesized
  source 1..20: mol_type = other DNA
gcaactttggcattggataa

SEQ ID NO: 4772 - DNA, 20 bp, synthetic construct
  misc_feature 1..20: note = chemically synthesized
  source 1..20: mol_type = other DNA
caactttggcattggataac

SEQ ID NO: 4773 - DNA, 20 bp, synthetic construct
  misc_feature 1..20: note = chemically synthesized
  source 1..20: mol_type = other DNA
ctttggcattggataacagg

SEQ ID NO: 4774 - DNA, 20 bp, synthetic construct
  misc_feature 1..20: note = chemically synthesized
  source 1..20: mol_type = other DNA
tggcattggataacaggcag

SEQ ID NO: 4775 - DNA, 20 bp, synthetic construct
  misc_feature 1..20: note = chemically synthesized
  source 1..20: mol_type = other DNA
attggataacaggcagaagt

SEQ ID NO: 4776 - DNA, 20 bp, synthetic construct
  misc_feature 1..20: note = chemically synthesized
  source 1..20: mol_type = other DNA
ggataacaggcagaagttgg

SEQ ID NO: 4777 - DNA, 20 bp, synthetic construct
  misc_feature 1..20: note = chemically synthesized
  source 1..20: mol_type = other DNA
ataacaggcagaagttggaa

SEQ ID NO: 4778 - DNA, 20 bp, synthetic construct
  misc_feature 1..20: note = chemically synthesized
  source 1..20: mol_type = other DNA
aggcagaagttggaagagtg

SEQ ID NO: 4779 - DNA, 20 bp, synthetic construct
  misc_feature 1..20: note = chemically synthesized
  source 1..20: mol_type = other DNA
agaagttggaagagtgtgga

SEQ ID NO: 4780 - DNA, 20 bp, synthetic construct
  misc_feature 1..20: note = chemically synthesized
  source 1..20: mol_type = other DNA
ttggaagagtgtggacggct

SEQ ID NO: 4781 - DNA, 20 bp, synthetic construct
  misc_feature 1..20: note = chemically synthesized
  source 1..20: mol_type = other DNA
gaagagtgtggacggctcag

SEQ ID NO: 4782 - DNA, 20 bp, synthetic construct
  misc_feature 1..20: note = chemically synthesized
  source 1..20: mol_type = other DNA
gagtgtggacggctcagaag

SEQ ID NO: 4783 - DNA, 20 bp, synthetic construct
  misc_feature 1..20: note = chemically synthesized
  source 1..20: mol_type = other DNA
gtggacggctcagaagaaga

SEQ ID NO: 4784 - DNA, 20 bp, synthetic construct
  misc_feature 1..20: note = chemically synthesized
  source 1..20: mol_type = other DNA
tggacggctcagaagaagac

SEQ ID NO: 4785 - DNA, 20 bp, synthetic construct
  misc_feature 1..20: note = chemically synthesized
  source 1..20: mol_type = other DNA
ggacggctcagaagaagaca

SEQ ID NO: 4786 - DNA, 20 bp, synthetic construct
  misc_feature 1..20: note = chemically synthesized
  source 1..20: mol_type = other DNA
acggctcagaagaagacagg

SEQ ID NO: 4787 - DNA, 20 bp, synthetic construct
  misc_feature 1..20: note = chemically synthesized
  source 1..20: mol_type = other DNA
tcagaagaagacagggagat

SEQ ID NO: 4788 - DNA, 20 bp, synthetic construct
  misc_feature 1..20: note = chemically synthesized
  source 1..20: mol_type = other DNA
cagaagaagacagggagatg

SEQ ID NO: 4789 - DNA, 20 bp, synthetic construct
  misc_feature 1..20: note = chemically synthesized
  source 1..20: mol_type = other DNA
agaagaagacagggagatga

SEQ ID NO: 4790 - DNA, 20 bp, synthetic construct
  misc_feature 1..20: note = chemically synthesized
  source 1..20: mol_type = other DNA
aagaagacagggagatgagg

SEQ ID NO: 4791 - DNA, 20 bp, synthetic construct
  misc_feature 1..20: note = chemically synthesized
  source 1..20: mol_type = other DNA
cagggagatgagggagaatt

SEQ ID NO: 4792 - DNA, 20 bp, synthetic construct
  misc_feature 1..20: note = chemically synthesized
  source 1..20: mol_type = other DNA
agggagaatttggaactttc

SEQ ID NO: 4793 - DNA, 20 bp, synthetic construct
  misc_feature 1..20: note = chemically synthesized
  source 1..20: mol_type = other DNA
ggagaatttggaactttcta

SEQ ID NO: 4794 - DNA, 20 bp, synthetic construct
  misc_feature 1..20: note = chemically synthesized
  source 1..20: mol_type = other DNA
tggaactttctagagacttg

SEQ ID NO: 4795 - DNA, 20 bp, synthetic construct
  misc_feature 1..20: note = chemically synthesized
  source 1..20: mol_type = other DNA
ctttctagagacttgtggaa

SEQ ID NO: 4796 - DNA, 20 bp, synthetic construct
  misc_feature 1..20: note = chemically synthesized
  source 1..20: mol_type = other DNA
ggttgtgaccaaaattctga

SEQ ID NO: 4797 - DNA, 20 bp, synthetic construct
  misc_feature 1..20: note = chemically synthesized
  source 1..20: mol_type = other DNA
ccaaaattctgatagtgata

SEQ ID NO: 4798 - DNA, 20 bp, synthetic construct
  misc_feature 1..20: note = chemically synthesized
  source 1..20: mol_type = other DNA
tgatagtgatatggacaatg

SEQ ID NO: 4799 - DNA, 20 bp, synthetic construct
  misc_feature 1..20: note = chemically synthesized
  source 1..20: mol_type = other DNA
gtgatatggacaatgaagtc

SEQ ID NO: 4800 - DNA, 20 bp, synthetic construct
  misc_feature 1..20: note = chemically synthesized
  source 1..20: mol_type = other DNA
tgatatggacaatgaagtcc

SEQ ID NO: 4801 - DNA, 20 bp, synthetic construct
  misc_feature 1..20: note = chemically synthesized
  source 1..20: mol_type = other DNA
tggacaatgaagtccaggct

SEQ ID NO: 4802 - DNA, 20 bp, synthetic construct
  misc_feature 1..20: note = chemically synthesized
  source 1..20: mol_type = other DNA
ggacaatgaagtccaggctg

SEQ ID NO: 4803 - DNA, 20 bp, synthetic construct
  misc_feature 1..20: note = chemically synthesized
  source 1..20: mol_type = other DNA
caatgaagtccaggctgagg

SEQ ID NO: 4804 - DNA, 20 bp, synthetic construct
  misc_feature 1..20: note = chemically synthesized
  source 1..20: mol_type = other DNA
agtccaggctgaggtggtct

SEQ ID NO: 4805 - DNA, 20 bp, synthetic construct
  misc_feature 1..20: note = chemically synthesized
  source 1..20: mol_type = other DNA
caggctgaggtggtctcaga

SEQ ID NO: 4806 - DNA, 20 bp, synthetic construct
  misc_feature 1..20: note = chemically synthesized
  source 1..20: mol_type = other DNA
tcagatggaaatgaatttat

SEQ ID NO: 4807 - DNA, 20 bp, synthetic construct
  misc_feature 1..20: note = chemically synthesized
  source 1..20: mol_type = other DNA
gaaatgaatttattggaaac

SEQ ID NO: 4808 - DNA, 20 bp, synthetic construct
  misc_feature 1..20: note = chemically synthesized
  source 1..20: mol_type = other DNA
aatgaatttattggaaactg

SEQ ID NO: 4809 - DNA, 20 bp, synthetic construct
  misc_feature 1..20: note = chemically synthesized
  source 1..20: mol_type = other DNA
atttattggaaactggagca

SEQ ID NO: 4810 - DNA, 20 bp, synthetic construct
  misc_feature 1..20: note = chemically synthesized
  source 1..20: mol_type = other DNA
tttattggaaactggagcaa

SEQ ID NO: 4811 - DNA, 20 bp, synthetic construct
  misc_feature 1..20: note = chemically synthesized
  source 1..20: mol_type = other DNA
aggtcacttttgttatacat

SEQ ID NO: 4812 - DNA, 20 bp, synthetic construct
  misc_feature 1..20: note = chemically synthesized
  source 1..20: mol_type = other DNA
acttttgttatacattagca

SEQ ID NO: 4813 - DNA, 20 bp, synthetic construct
  misc_feature 1..20: note = chemically synthesized
  source 1..20: mol_type = other DNA
ttttgttatacattagcaaa

SEQ ID NO: 4814 - DNA, 20 bp, synthetic construct
  misc_feature 1..20: note = chemically synthesized
  source 1..20: mol_type = other DNA
tttgttatacattagcaaag

SEQ ID NO: 4815 - DNA, 20 bp, synthetic construct
  misc_feature 1..20: note = chemically synthesized
  source 1..20: mol_type = other DNA
actgcactgtgcctctacct

SEQ ID NO: 4816 - DNA, 20 bp, synthetic construct
  misc_feature 1..20: note = chemically synthesized
  source 1..20: mol_type = other DNA
tgcactgtgcctctacctta

SEQ ID NO: 4817 - DNA, 20 bp, synthetic construct
  misc_feature 1..20: note = chemically synthesized
  source 1..20: mol_type = other DNA
cctctaccttagagaatctg

SEQ ID NO: 4818 - DNA, 20 bp, synthetic construct
  misc_feature 1..20: note = chemically synthesized
  source 1..20: mol_type = other DNA
agagaatctgtggaaattcg

SEQ ID NO: 4819 - DNA, 20 bp, synthetic construct
  misc_feature 1..20: note = chemically synthesized
  source 1..20: mol_type = other DNA
cgaagttgataatattattt

SEQ ID NO: 4820 - DNA, 20 bp, synthetic construct
  misc_feature 1..20: note = chemically synthesized
  source 1..20: mol_type = other DNA
atattatttaagttatgtga

SEQ ID NO: 4821 - DNA, 20 bp, synthetic construct
  misc_feature 1..20: note = chemically synthesized
  source 1..20: mol_type = other DNA
ttatttaagttatgtgacag

SEQ ID NO: 4822 - DNA, 20 bp, synthetic construct
  misc_feature 1..20: note = chemically synthesized
  source 1..20: mol_type = other DNA
gttatgtgacagaagtttct

SEQ ID NO: 4823 - DNA, 20 bp, synthetic construct
  misc_feature 1..20: note = chemically synthesized
  source 1..20: mol_type = other DNA
atgtgacagaagtttctaag

SEQ ID NO: 4824 - DNA, 20 bp, synthetic construct
  misc_feature 1..20: note = chemically synthesized
  source 1..20: mol_type = other DNA
gacagaagtttctaagcagc

SEQ ID NO: 4825 - DNA, 20 bp, synthetic construct
  misc_feature 1..20: note = chemically synthesized
  source 1..20: mol_type = other DNA
acagaagtttctaagcagca

SEQ ID NO: 4826 - DNA, 20 bp, synthetic construct
  misc_feature 1..20: note = chemically synthesized
  source 1..20: mol_type = other DNA
ttctaagcagcaaggtgttc

SEQ ID NO: 4827 - DNA, 20 bp, synthetic construct
  misc_feature 1..20: note = chemically synthesized
  source 1..20: mol_type = other DNA
aaggtgttcaagatgtgtcc

SEQ ID NO: 4828 - DNA, 20 bp, synthetic construct
  misc_feature 1..20: note = chemically synthesized
  source 1..20: mol_type = other DNA
caacctatgctcatatgtgt

SEQ ID NO: 4829 - DNA, 20 bp, synthetic construct
  misc_feature 1..20: note = chemically synthesized
  source 1..20: mol_type = other DNA
tatgctcatatgtgtgagca

SEQ ID NO: 4830 - DNA, 20 bp, synthetic construct
  misc_feature 1..20: note = chemically synthesized
  source 1..20: mol_type = other DNA
gcaaagaaataacataaaat

SEQ ID NO: 4831 - DNA, 20 bp, synthetic construct
  misc_feature 1..20: note = chemically synthesized
  source 1..20: mol_type = other DNA
aaatcagaacttatatttaa

SEQ ID NO: 4832 - DNA, 20 bp, synthetic construct
  misc_feature 1..20: note = chemically synthesized
  source 1..20: mol_type = other DNA
aatcagaacttatatttaaa

SEQ ID NO: 4833 - DNA, 20 bp, synthetic construct
  misc_feature 1..20: note = chemically synthesized
  source 1..20: mol_type = other DNA
atcagaacttatatttaaaa

SEQ ID NO: 4834 - DNA, 20 bp, synthetic construct
  misc_feature 1..20: note = chemically synthesized
  source 1..20: mol_type = other DNA
agaacttatatttaaaaggg

SEQ ID NO: 4835 - DNA, 20 bp, synthetic construct
  misc_feature 1..20: note = chemically synthesized
  source 1..20: mol_type = other DNA
acttatatttaaaagggaag

SEQ ID NO: 4836 - DNA, 20 bp, synthetic construct
  misc_feature 1..20: note = chemically synthesized
  source 1..20: mol_type = other DNA
ttatatttaaaagggaagca

SEQ ID NO: 4837 - DNA, 20 bp, synthetic construct
  misc_feature 1..20: note = chemically synthesized
  source 1..20: mol_type = other DNA
aaaagggaagcagagcataa

SEQ ID NO: 4838 - DNA, 20 bp, synthetic construct
  misc_feature 1..20: note = chemically synthesized
  source 1..20: mol_type = other DNA
ggaagcagagcataaaagtt

SEQ ID NO: 4839 - DNA, 20 bp, synthetic construct
  misc_feature 1..20: note = chemically synthesized
  source 1..20: mol_type = other DNA
agtttggaaaattatctgct

SEQ ID NO: 4840 - DNA, 20 bp, synthetic construct
  misc_feature 1..20: note = chemically synthesized
  source 1..20: mol_type = other DNA
aaattatctgctcggccatg

SEQ ID NO: 4841 - DNA, 20 bp, synthetic construct
  misc_feature 1..20: note = chemically synthesized
  source 1..20: mol_type = other DNA
ttatctgctcggccatgtgg

SEQ ID NO: 4842 - DNA, 20 bp, synthetic construct
  misc_feature 1..20: note = chemically synthesized
  source 1..20: mol_type = other DNA
ctcggccatgtggtagaaaa

SEQ ID NO: 4843 - DNA, 20 bp, synthetic construct
  misc_feature 1..20: note = chemically synthesized
  source 1..20: mol_type = other DNA
ggccatgtggtagaaaacag

SEQ ID NO: 4844 - DNA, 20 bp, synthetic construct
  misc_feature 1..20: note = chemically synthesized
  source 1..20: mol_type = other DNA
aaaacagaagctcattttca

SEQ ID NO: 4845 - DNA, 20 bp, synthetic construct
  misc_feature 1..20: note = chemically synthesized
  source 1..20: mol_type = other DNA
aaacagaagctcattttcaa

SEQ ID NO: 4846 - DNA, 20 bp, synthetic construct
  misc_feature 1..20: note = chemically synthesized
  source 1..20: mol_type = other DNA
acagaagctcattttcaaag

SEQ ID NO: 4847 - DNA, 20 bp, synthetic construct
  misc_feature 1..20: note = chemically synthesized
  source 1..20: mol_type = other DNA
cattttcaaaggagcaattc

SEQ ID NO: 4848 - DNA, 20 bp, synthetic construct
  misc_feature 1..20: note = chemically synthesized
  source 1..20: mol_type = other DNA
tttcaaaggagcaattcaag

SEQ ID NO: 4849 - DNA, 20 bp, synthetic construct
  misc_feature 1..20: note = chemically synthesized
  source 1..20: mol_type = other DNA
ttcaaaggagcaattcaagc

SEQ ID NO: 4850 - DNA, 20 bp, synthetic construct
  misc_feature 1..20: note = chemically synthesized
  source 1..20: mol_type = other DNA
ggagcaattcaagcaggctg

SEQ ID NO: 4851 - DNA, 20 bp, synthetic construct
  misc_feature 1..20: note = chemically synthesized
  source 1..20: mol_type = other DNA
tgtagaaatttgcataaatg

SEQ ID NO: 4852 - DNA, 20 bp, synthetic construct
  misc_feature 1..20: note = chemically synthesized
  source 1..20: mol_type = other DNA
tagaaatttgcataaatgaa

SEQ ID NO: 4853 - DNA, 20 bp, synthetic construct
  misc_feature 1..20: note = chemically synthesized
  source 1..20: mol_type = other DNA
agaaatttgcataaatgaag

SEQ ID NO: 4854 - DNA, 20 bp, synthetic construct
  misc_feature 1..20: note = chemically synthesized
  source 1..20: mol_type = other DNA
aaatttgcataaatgaagag

SEQ ID NO: 4855 - DNA, 20 bp, synthetic construct
  misc_feature 1..20: note = chemically synthesized
  source 1..20: mol_type = other DNA
tgcataaatgaagaggagcc

SEQ ID NO: 4856 - DNA, 20 bp, synthetic construct
  misc_feature 1..20: note = chemically synthesized
  source 1..20: mol_type = other DNA
gaagaggagccgagttctaa

SEQ ID NO: 4857 - DNA, 20 bp, synthetic construct
  misc_feature 1..20: note = chemically synthesized
  source 1..20: mol_type = other DNA
gagttctaatagccaaaata

SEQ ID NO: 4858 - DNA, 20 bp, synthetic construct
  misc_feature 1..20: note = chemically synthesized
  source 1..20: mol_type = other DNA
agttctaatagccaaaataa

SEQ ID NO: 4859 - DNA, 20 bp, synthetic construct
  misc_feature 1..20: note = chemically synthesized
  source 1..20: mol_type = other DNA
gttctaatagccaaaataaa

SEQ ID NO: 4860 - DNA, 20 bp, synthetic construct
  misc_feature 1..20: note = chemically synthesized
  source 1..20: mol_type = other DNA
ttctaatagccaaaataaag

SEQ ID NO: 4861 - DNA, 20 bp, synthetic construct
  misc_feature 1..20: note = chemically synthesized
  source 1..20: mol_type = other DNA
ctaatagccaaaataaaggg

SEQ ID NO: 4862 - DNA, 20 bp, synthetic construct
  misc_feature 1..20: note = chemically synthesized
  source 1..20: mol_type = other DNA
ataaaggggagaatgcctca

SEQ ID NO: 4863 - DNA, 20 bp, synthetic construct
  misc_feature 1..20: note = chemically synthesized
  source 1..20: mol_type = other DNA
agaatgcctcaaagacattt

SEQ ID NO: 4864 - DNA, 20 bp, synthetic construct
  misc_feature 1..20: note = chemically synthesized
  source 1..20: mol_type = other DNA
aatgcctcaaagacatttca

SEQ ID NO: 4865 - DNA, 20 bp, synthetic construct
  misc_feature 1..20: note = chemically synthesized
  source 1..20: mol_type = other DNA
agacatttcagagacccttg

SEQ ID NO: 4866 - DNA, 20 bp, synthetic construct
  misc_feature 1..20: note = chemically synthesized
  source 1..20: mol_type = other DNA
catttcagagacccttgtag

SEQ ID NO: 4867 - DNA, 20 bp, synthetic construct
  misc_feature 1..20: note = chemically synthesized
  source 1..20: mol_type = other DNA
tgtagcagcccctcacatca

SEQ ID NO: 4868 - DNA, 20 bp, synthetic construct
  misc_feature 1..20: note = chemically synthesized
  source 1..20: mol_type = other DNA
gtagcagcccctcacatcac

SEQ ID NO: 4869 - DNA, 20 bp, synthetic construct
  misc_feature 1..20: note = chemically synthesized
  source 1..20: mol_type = other DNA
agcccctcacatcacaggcc

SEQ ID NO: 4870 - DNA, 20 bp, synthetic construct
  misc_feature 1..20: note = chemically synthesized
  source 1..20: mol_type = other DNA
ccctcacatcacaggcctgg

SEQ ID NO: 4871 - DNA, 20 bp, synthetic construct
  misc_feature 1..20: note = chemically synthesized
  source 1..20: mol_type = other DNA
acatcacaggcctggtggcc

SEQ ID NO: 4872 - DNA, 20 bp, synthetic construct
  misc_feature 1..20: note = chemically synthesized
  source 1..20: mol_type = other DNA
catcacaggcctggtggcct

SEQ ID NO: 4873 - DNA, 20 bp, synthetic construct
  misc_feature 1..20: note = chemically synthesized
  source 1..20: mol_type = other DNA
tcacaggcctggtggcctag

SEQ ID NO: 4874 - DNA, 20 bp, synthetic construct
  misc_feature 1..20: note = chemically synthesized
  source 1..20: mol_type = other DNA
aggagtactgaatgattttg

SEQ ID NO: 4875 - DNA, 20 bp, synthetic construct
  misc_feature 1..20: note = chemically synthesized
  source 1..20: mol_type = other DNA
ggagtactgaatgattttgt

SEQ ID NO: 4876 - DNA, 20 bp, synthetic construct
  misc_feature 1..20: note = chemically synthesized
  source 1..20: mol_type = other DNA
tactgaatgattttgtgggt

SEQ ID NO: 4877 - DNA, 20 bp, synthetic construct
  misc_feature 1..20: note = chemically synthesized
  source 1..20: mol_type = other DNA
atgattttgtgggtgagatt

SEQ ID NO: 4878 - DNA, 20 bp, synthetic construct
  misc_feature 1..20: note = chemically synthesized
  source 1..20: mol_type = other DNA
tgattttgtgggtgagattc

SEQ ID NO: 4879 - DNA, 20 bp, synthetic construct
  misc_feature 1..20: note = chemically synthesized
  source 1..20: mol_type = other DNA
attcaggaccctgctgcctt

SEQ ID NO: 4880 - DNA, 20 bp, synthetic construct
  misc_feature 1..20: note = chemically synthesized
  source 1..20: mol_type = other DNA
caggaccctgctgccttgag

SEQ ID NO: 4881 - DNA, 20 bp, synthetic construct
  misc_feature 1..20: note = chemically synthesized
  source 1..20: mol_type = other DNA
cctgctgccttgagcagctt

SEQ ID NO: 4882 - DNA, 20 bp, synthetic construct
  misc_feature 1..20: note = chemically synthesized
  source 1..20: mol_type = other DNA
ctgctgccttgagcagcttc

SEQ ID NO: 4883 - DNA, 20 bp, synthetic construct
  misc_feature 1..20: note = chemically synthesized
  source 1..20: mol_type = other DNA
ggacactgttccttgcatcc

SEQ ID NO: 4884 - DNA, 20 bp, synthetic construct
  misc_feature 1..20: note = chemically synthesized
  source 1..20: mol_type = other DNA
tccttgcatcctggctgctc

SEQ ID NO: 4885 - DNA, 20 bp, synthetic construct
  misc_feature 1..20: note = chemically synthesized
  source 1..20: mol_type = other DNA
catcctggctgctccagcac

SEQ ID NO: 4886 - DNA, 20 bp, synthetic construct
  misc_feature 1..20: note = chemically synthesized
  source 1..20: mol_type = other DNA
ggctgctccagcaccagctg

SEQ ID NO: 4887 - DNA, 20 bp, synthetic construct
  misc_feature 1..20: note = chemically synthesized
  source 1..20: mol_type = other DNA
ccagcaccagctgtggctca

SEQ ID NO: 4888 - DNA, 20 bp, synthetic construct
  misc_feature 1..20: note = chemically synthesized
  source 1..20: mol_type = other DNA
cagcaccagctgtggctcaa

SEQ ID NO: 4889 - DNA, 20 bp, synthetic construct
  misc_feature 1..20: note = chemically synthesized
  source 1..20: mol_type = other DNA
agcaccagctgtggctcaaa

SEQ ID NO: 4890 - DNA, 20 bp, synthetic construct
  misc_feature 1..20: note = chemically synthesized
  source 1..20: mol_type = other DNA
gcaccagctgtggctcaaag

SEQ ID NO: 4891 - DNA, 20 bp, synthetic construct
  misc_feature 1..20: note = chemically synthesized
  source 1..20: mol_type = other DNA
gctgtggctcaaaggggccc

SEQ ID NO: 4892 - DNA, 20 bp, synthetic construct
  misc_feature 1..20: note = chemically synthesized
  source 1..20: mol_type = other DNA
ggctcaaaggggcccaagaa

SEQ ID NO: 4893 - DNA, 20 bp, synthetic construct
  misc_feature 1..20: note = chemically synthesized
  source 1..20: mol_type = other DNA
aaaggggcccaagaacagct

SEQ ID NO: 4894 - DNA, 20 bp, synthetic construct
  misc_feature 1..20: note = chemically synthesized
  source 1..20: mol_type = other DNA
aaggggcccaagaacagcta

SEQ ID NO: 4895 - DNA, 20 bp, synthetic construct
  misc_feature 1..20: note = chemically synthesized
  source 1..20: mol_type = other DNA
aacagctaaggccactgctt

SEQ ID NO: 4896 - DNA, 20 bp, synthetic construct
  misc_feature 1..20: note = chemically synthesized
  source 1..20: mol_type = other DNA
cagctaaggccactgcttca

SEQ ID NO: 4897 - DNA, 20 bp, synthetic construct
  misc_feature 1..20: note = chemically synthesized
  source 1..20: mol_type = other DNA
agctaaggccactgcttcag

SEQ ID NO: 4898 - DNA, 20 bp, synthetic construct
  misc_feature 1..20: note = chemically synthesized
  source 1..20: mol_type = other DNA
gctaaggccactgcttcaga

SEQ ID NO: 4899 - DNA, 20 bp, synthetic construct
  misc_feature 1..20: note = chemically synthesized
  source 1..20: mol_type = other DNA
gccactgcttcagagggtgc

SEQ ID NO: 4900 - DNA, 20 bp, synthetic construct
  misc_feature 1..20: note = chemically synthesized
  source 1..20: mol_type = other DNA
cttcagagggtgcaagacat

SEQ ID NO: 4901 - DNA, 20 bp, synthetic construct
  misc_feature 1..20: note = chemically synthesized
  source 1..20: mol_type = other DNA
agggtgcaagacataagcct

SEQ ID NO: 4902 - DNA, 20 bp, synthetic construct
  misc_feature 1..20: note = chemically synthesized
  source 1..20: mol_type = other DNA
ggtgcaagacataagccttg

SEQ ID NO: 4903 - DNA, 20 bp, synthetic construct
  misc_feature 1..20: note = chemically synthesized
  source 1..20: mol_type = other DNA
gtgcaagacataagccttgg

SEQ ID NO: 4904 - DNA, 20 bp, synthetic construct
  misc_feature 1..20: note = chemically synthesized
  source 1..20: mol_type = other DNA
aagccttggaggcttccaca

SEQ ID NO: 4905 - DNA, 20 bp, synthetic construct
  misc_feature 1..20: note = chemically synthesized
  source 1..20: mol_type = other DNA
cttccacatggtgataaatc

SEQ ID NO: 4906 - DNA, 20 bp, synthetic construct
  misc_feature 1..20: note = chemically synthesized
  source 1..20: mol_type = other DNA
ttccacatggtgataaatct

SEQ ID NO: 4907 - DNA, 20 bp, synthetic construct
  misc_feature 1..20: note = chemically synthesized
  source 1..20: mol_type = other DNA
ccacatggtgataaatctgg

SEQ ID NO: 4908 - DNA, 20 bp, synthetic construct
  misc_feature 1..20: note = chemically synthesized
  source 1..20: mol_type = other DNA
gataaatctgggagtgtgca

SEQ ID NO: 4909 - DNA, 20 bp, synthetic construct
  misc_feature 1..20: note = chemically synthesized
  source 1..20: mol_type = other DNA
ataaatctgggagtgtgcaa

SEQ ID NO: 4910 - DNA, 20 bp, synthetic construct
  misc_feature 1..20: note = chemically synthesized
  source 1..20: mol_type = other DNA
gggagtgtgcaaaggtcaaa

SEQ ID NO: 4911 - DNA, 20 bp, synthetic construct
  misc_feature 1..20: note = chemically synthesized
  source 1..20: mol_type = other DNA
tgtgcaaaggtcaaaaagtt

SEQ ID NO: 4912 - DNA, 20 bp, synthetic construct
  misc_feature 1..20: note = chemically synthesized
  source 1..20: mol_type = other DNA
gtgcaaaggtcaaaaagttg

SEQ ID NO: 4913 - DNA, 20 bp, synthetic construct
  misc_feature 1..20: note = chemically synthesized
  source 1..20: mol_type = other DNA
gtcaaaaagttgaggcttgt

SEQ ID NO: 4914 - DNA, 20 bp, synthetic construct
  misc_feature 1..20: note = chemically synthesized
  source 1..20: mol_type = other DNA
gaggcttgtaagcctccacc

SEQ ID NO: 4915 - DNA, 20 bp, synthetic construct
  misc_feature 1..20: note = chemically synthesized
  source 1..20: mol_type = other DNA
gtaagcctccacctagattt

SEQ ID NO: 4916 - DNA, 20 bp, synthetic construct
  misc_feature 1..20: note = chemically synthesized
  source 1..20: mol_type = other DNA
aagcctccacctagatttca

SEQ ID NO: 4917 - DNA, 20 bp, synthetic construct
  misc_feature 1..20: note = chemically synthesized
  source 1..20: mol_type = other DNA
agcctccacctagatttcag

SEQ ID NO: 4918 - DNA, 20 bp, synthetic construct
  misc_feature 1..20: note = chemically synthesized
  source 1..20: mol_type = other DNA
cctagatttcagaggatgtg

SEQ ID NO: 4919 - DNA, 20 bp, synthetic construct
  misc_feature 1..20: note = chemically synthesized
  source 1..20: mol_type = other DNA
atttcagaggatgtgtagaa

SEQ ID NO: 4920 - DNA, 20 bp, synthetic construct
  misc_feature 1..20: note = chemically synthesized
  source 1..20: mol_type = other DNA
gaggatgtgtagaaaagcct

SEQ ID NO: 4921 - DNA, 20 bp, synthetic construct
  misc_feature 1..20: note = chemically synthesized
  source 1..20: mol_type = other DNA
tgtagaaaagcctgagtgtt

SEQ ID NO: 4922 - DNA, 20 bp, synthetic construct
  misc_feature 1..20: note = chemically synthesized
  source 1..20: mol_type = other DNA
gtagaaaagcctgagtgttc

SEQ ID NO: 4923 - DNA, 20 bp, synthetic construct
  misc_feature 1..20: note = chemically synthesized
  source 1..20: mol_type = other DNA
gaaaagcctgagtgttcagg

SEQ ID NO: 4924 - DNA, 20 bp, synthetic construct
  misc_feature 1..20: note = chemically synthesized
  source 1..20: mol_type = other DNA
aagcctgagtgttcaggcag

SEQ ID NO: 4925 - DNA, 20 bp, synthetic construct
  misc_feature 1..20: note = chemically synthesized
  source 1..20: mol_type = other DNA
gttcaggcagaagcctcctg

SEQ ID NO: 4926 - DNA, 20 bp, synthetic construct
  misc_feature 1..20: note = chemically synthesized
  source 1..20: mol_type = other DNA
ttcaggcagaagcctcctgc

SEQ ID NO: 4927 - DNA, 20 bp, synthetic construct
  misc_feature 1..20: note = chemically synthesized
  source 1..20: mol_type = other DNA
tcaggcagaagcctcctgca

SEQ ID NO: 4928 - DNA, 20 bp, synthetic construct
  misc_feature 1..20: note = chemically synthesized
  source 1..20: mol_type = other DNA
caggcagaagcctcctgcag

SEQ ID NO: 4929 - DNA, 20 bp, synthetic construct
  misc_feature 1..20: note = chemically synthesized
  source 1..20: mol_type = other DNA
gcagaagcctcctgcagggg

SEQ ID NO: 4930 - DNA, 20 bp, synthetic construct
  misc_feature 1..20: note = chemically synthesized
  source 1..20: mol_type = other DNA
gcaggggcagaaccctcatg

SEQ ID NO: 4931 - DNA, 20 bp, synthetic construct
  misc_feature 1..20: note = chemically synthesized
  source 1..20: mol_type = other DNA
ccctcatgaagaacctctaa

SEQ ID NO: 4932 - DNA, 20 bp, synthetic construct
  misc_feature 1..20: note = chemically synthesized
  source 1..20: mol_type = other DNA
cctcatgaagaacctctaat

SEQ ID NO: 4933 - DNA, 20 bp, synthetic construct
  misc_feature 1..20: note = chemically synthesized
  source 1..20: mol_type = other DNA
ctcatgaagaacctctaata

SEQ ID NO: 4934 - DNA, 20 bp, synthetic construct
  misc_feature 1..20: note = chemically synthesized
  source 1..20: mol_type = other DNA
gaacctctaatagggcaatg

SEQ ID NO: 4935 - DNA, 20 bp, synthetic construct
  misc_feature 1..20: note = chemically synthesized
  source 1..20: mol_type = other DNA
acctctaatagggcaatgtg

SEQ ID NO: 4936 - DNA, 20 bp, synthetic construct
  misc_feature 1..20: note = chemically synthesized
  source 1..20: mol_type = other DNA
cctctaatagggcaatgtgg

SEQ ID NO: 4937 - DNA, 20 bp, synthetic construct
  misc_feature 1..20: note = chemically synthesized
  source 1..20: mol_type = other DNA
gcaatgtggaggaaaaatat

SEQ ID NO: 4938 - DNA, 20 bp, synthetic construct
  misc_feature 1..20: note = chemically synthesized
  source 1..20: mol_type = other DNA
caatgtggaggaaaaatatg

SEQ ID NO: 4939 - DNA, 20 bp, synthetic construct
  misc_feature 1..20: note = chemically synthesized
  source 1..20: mol_type = other DNA
gtggaggaaaaatatgaggt

SEQ ID NO: 4940 - DNA, 20 bp, synthetic construct
  misc_feature 1..20: note = chemically synthesized
  source 1..20: mol_type = other DNA
atgaggttggaaccccctca

SEQ ID NO: 4941 - DNA, 20 bp, synthetic construct
  misc_feature 1..20: note = chemically synthesized
  source 1..20: mol_type = other DNA
gaggttggaaccccctcaca

SEQ ID NO: 4942 - DNA, 20 bp, synthetic construct
  misc_feature 1..20: note = chemically synthesized
  source 1..20: mol_type = other DNA
ccccctcacagagtctccac

SEQ ID NO: 4943 - DNA, 20 bp, synthetic construct
  misc_feature 1..20: note = chemically synthesized
  source 1..20: mol_type = other DNA
cccctcacagagtctccact

SEQ ID NO: 4944 - DNA, 20 bp, synthetic construct
  misc_feature 1..20: note = chemically synthesized
  source 1..20: mol_type = other DNA
ccctcacagagtctccactg

SEQ ID NO: 4945 - DNA, 20 bp, synthetic construct
  misc_feature 1..20: note = chemically synthesized
  source 1..20: mol_type = other DNA
gtctccactggggcactgcc

SEQ ID NO: 4946 - DNA, 20 bp, synthetic construct
  misc_feature 1..20: note = chemically synthesized
  source 1..20: mol_type = other DNA
tccactggggcactgcctag

SEQ ID NO: 4947 - DNA, 20 bp, synthetic construct
  misc_feature 1..20: note = chemically synthesized
  source 1..20: mol_type = other DNA
cactggggcactgcctagca

SEQ ID NO: 4948 - DNA, 20 bp, synthetic construct
  misc_feature 1..20: note = chemically synthesized
  source 1..20: mol_type = other DNA
gcactgcctagcagagctat

SEQ ID NO: 4949 - DNA, 20 bp, synthetic construct
  misc_feature 1..20: note = chemically synthesized
  source 1..20: mol_type = other DNA
gcctagcagagctatgagaa

SEQ ID NO: 4950 - DNA, 20 bp, synthetic construct
  misc_feature 1..20: note = chemically synthesized
  source 1..20: mol_type = other DNA
cctagcagagctatgagaaa

SEQ ID NO: 4951 - DNA, 20 bp, synthetic construct
  misc_feature 1..20: note = chemically synthesized
  source 1..20: mol_type = other DNA
ctagcagagctatgagaaaa

SEQ ID NO: 4952 - DNA, 20 bp, synthetic construct
  misc_feature 1..20: note = chemically synthesized
  source 1..20: mol_type = other DNA
agaaaagggccaccgtcctc

SEQ ID NO: 4953 - DNA, 20 bp, synthetic construct
  misc_feature 1..20: note = chemically synthesized
  source 1..20: mol_type = other DNA
ggccaccgtcctccagaccc

SEQ ID NO: 4954 - DNA, 20 bp, synthetic construct
  misc_feature 1..20: note = chemically synthesized
  source 1..20: mol_type = other DNA
ccgtcctccagaccccagaa

SEQ ID NO: 4955 - DNA, 20 bp, synthetic construct
  misc_feature 1..20: note = chemically synthesized
  source 1..20: mol_type = other DNA
tcctccagaccccagaatgg

SEQ ID NO: 4956 - DNA, 20 bp, synthetic construct
  misc_feature 1..20: note = chemically synthesized
  source 1..20: mol_type = other DNA
cagaatggtagatccactga

SEQ ID NO: 4957 - DNA, 20 bp, synthetic construct
  misc_feature 1..20: note = chemically synthesized
  source 1..20: mol_type = other DNA
gacagtttgcaccgtgcacc

SEQ ID NO: 4958 - DNA, 20 bp, synthetic construct
  misc_feature 1..20: note = chemically synthesized
  source 1..20: mol_type = other DNA
tttgcaccgtgcacctagaa

SEQ ID NO: 4959 - DNA, 20 bp, synthetic construct
  misc_feature 1..20: note = chemically synthesized
  source 1..20: mol_type = other DNA
aacactcaatacaatctctt

SEQ ID NO: 4960 - DNA, 20 bp, synthetic construct
  misc_feature 1..20: note = chemically synthesized
  source 1..20: mol_type = other DNA
cactcaatacaatctcttaa

SEQ ID NO: 4961 - DNA, 20 bp, synthetic construct
  misc_feature 1..20: note = chemically synthesized
  source 1..20: mol_type = other DNA
tcaatacaatctcttaagag

SEQ ID NO: 4962 - DNA, 20 bp, synthetic construct
  misc_feature 1..20: note = chemically synthesized
  source 1..20: mol_type = other DNA
atacaatctcttaagagcag

SEQ ID NO: 4963 - DNA, 20 bp, synthetic construct
  misc_feature 1..20: note = chemically synthesized
  source 1..20: mol_type = other DNA
caatctcttaagagcagcag

SEQ ID NO: 4964 - DNA, 20 bp, synthetic construct
  misc_feature 1..20: note = chemically synthesized
  source 1..20: mol_type = other DNA
aatctcttaagagcagcagc

SEQ ID NO: 4965 - DNA, 20 bp, synthetic construct
  misc_feature 1..20: note = chemically synthesized
  source 1..20: mol_type = other DNA
atctcttaagagcagcagca

SEQ ID NO: 4966 - DNA, 20 bp, synthetic construct
  misc_feature 1..20: note = chemically synthesized
  source 1..20: mol_type = other DNA
tctcttaagagcagcagcag

SEQ ID NO: 4967 - DNA, 20 bp, synthetic construct
  misc_feature 1..20: note = chemically synthesized
  source 1..20: mol_type = other DNA
agcaggggctaaactgtgca

SEQ ID NO: 4968 - DNA, 20 bp, synthetic construct
  misc_feature 1..20: note = chemically synthesized
  source 1..20: mol_type = other DNA
ggctaaactgtgcaaagcaa

SEQ ID NO: 4969 - DNA, 20 bp, synthetic construct
  misc_feature 1..20: note = chemically synthesized
  source 1..20: mol_type = other DNA
gctaaactgtgcaaagcaat

SEQ ID NO: 4970 - DNA, 20 bp, synthetic construct
  misc_feature 1..20: note = chemically synthesized
  source 1..20: mol_type = other DNA
ctaaactgtgcaaagcaata

SEQ ID NO: 4971 - DNA, 20 bp, synthetic construct
  misc_feature 1..20: note = chemically synthesized
  source 1..20: mol_type = other DNA
taaactgtgcaaagcaatag

SEQ ID NO: 4972 - DNA, 20 bp, synthetic construct
  misc_feature 1..20: note = chemically synthesized
  source 1..20: mol_type = other DNA
actgtgcaaagcaatagggg

SEQ ID NO: 4973 - DNA, 20 bp, synthetic construct
  misc_feature 1..20: note = chemically synthesized
  source 1..20: mol_type = other DNA
caataggggtggaactgccc

SEQ ID NO: 4974 - DNA, 20 bp, synthetic construct
  misc_feature 1..20: note = chemically synthesized
  source 1..20: mol_type = other DNA
aataggggtggaactgccca

SEQ ID NO: 4975 - DNA, 20 bp, synthetic construct
  misc_feature 1..20: note = chemically synthesized
  source 1..20: mol_type = other DNA
ggtggaactgcccaaggcct

SEQ ID NO: 4976 - DNA, 20 bp, synthetic construct
  misc_feature 1..20: note = chemically synthesized
  source 1..20: mol_type = other DNA
gtggaactgcccaaggcctt

SEQ ID NO: 4977 - DNA, 20 bp, synthetic construct
  misc_feature 1..20: note = chemically synthesized
  source 1..20: mol_type = other DNA
ggaactgcccaaggccttgg

SEQ ID NO: 4978 - DNA, 20 bp, synthetic construct
  misc_feature 1..20: note = chemically synthesized
  source 1..20: mol_type = other DNA
tgggagcccacctcttgcat

SEQ ID NO: 4979 - DNA, 20 bp, synthetic construct
  misc_feature 1..20: note = chemically synthesized
  source 1..20: mol_type = other DNA
catcagtgtgtccctgatat

SEQ ID NO: 4980 - DNA, 20 bp, synthetic construct
  misc_feature 1..20: note = chemically synthesized
  source 1..20: mol_type = other DNA
tgtgtccctgatatgagaca

SEQ ID NO: 4981 - DNA, 20 bp, synthetic construct
  misc_feature 1..20: note = chemically synthesized
  source 1..20: mol_type = other DNA
gtgtccctgatatgagacat

SEQ ID NO: 4982 - DNA, 20 bp, synthetic construct
  misc_feature 1..20: note = chemically synthesized
  source 1..20: mol_type = other DNA
tgtccctgatatgagacatg

SEQ ID NO: 4983 - DNA, 20 bp, synthetic construct
  misc_feature 1..20: note = chemically synthesized
  source 1..20: mol_type = other DNA
tgatatgagacatggggtca

SEQ ID NO: 4984 - DNA, 20 bp, synthetic construct
  misc_feature 1..20: note = chemically synthesized
  source 1..20: mol_type = other DNA
gatatgagacatggggtcaa

SEQ ID NO: 4985 - DNA, 20 bp, synthetic construct
  misc_feature 1..20: note = chemically synthesized
  source 1..20: mol_type = other DNA
tatgagacatggggtcaaag

SEQ ID NO: 4986 - DNA, 20 bp, synthetic construct
  misc_feature 1..20: note = chemically synthesized
  source 1..20: mol_type = other DNA
ggggtcaaaggagattattt

SEQ ID NO: 4987 - DNA, 20 bp, synthetic construct
  misc_feature 1..20: note = chemically synthesized
  source 1..20: mol_type = other DNA
ggtcaaaggagattattttg

SEQ ID NO: 4988 - DNA, 20 bp, synthetic construct
  misc_feature 1..20: note = chemically synthesized
  source 1..20: mol_type = other DNA
ggagattattttggagtgtt

SEQ ID NO: 4989 - DNA, 20 bp, synthetic construct
  misc_feature 1..20: note = chemically synthesized
  source 1..20: mol_type = other DNA
gagattattttggagtgtta

SEQ ID NO: 4990 - DNA, 20 bp, synthetic construct
  misc_feature 1..20: note = chemically synthesized
  source 1..20: mol_type = other DNA
gtccgttttaaactgctatg

SEQ ID NO: 4991 - DNA, 20 bp, synthetic construct
  misc_feature 1..20: note = chemically synthesized
  source 1..20: mol_type = other DNA
actgctatgaagaaataccc

SEQ ID NO: 4992 - DNA, 20 bp, synthetic construct
  misc_feature 1..20: note = chemically synthesized
  source 1..20: mol_type = other DNA
tatgaagaaatacccgagac

SEQ ID NO: 4993 - DNA, 20 bp, synthetic construct
  misc_feature 1..20: note = chemically synthesized
  source 1..20: mol_type = other DNA
atgaagaaatacccgagact

SEQ ID NO: 4994 - DNA, 20 bp, synthetic construct
  misc_feature 1..20: note = chemically synthesized
  source 1..20: mol_type = other DNA
ccgagactgggtaatttata

SEQ ID NO: 4995 - DNA, 20 bp, synthetic construct
  misc_feature 1..20: note = chemically synthesized
  source 1..20: mol_type = other DNA
ctgggtaatttataaagaaa

SEQ ID NO: 4996 - DNA, 20 bp, synthetic construct
  misc_feature 1..20: note = chemically synthesized
  source 1..20: mol_type = other DNA
gggtaatttataaagaaaaa

SEQ ID NO: 4997 - DNA, 20 bp, synthetic construct
  misc_feature 1..20: note = chemically synthesized
  source 1..20: mol_type = other DNA
ataaagaaaaagagatttaa

SEQ ID NO: 4998 - DNA, 20 bp, synthetic construct
  misc_feature 1..20: note = chemically synthesized
  source 1..20: mol_type = other DNA
aaagagatttaatggactca

SEQ ID NO: 4999 - DNA, 20 bp, synthetic construct
  misc_feature 1..20: note = chemically synthesized
  source 1..20: mol_type = other DNA
gactcatagatccacattgc

SEQ ID NO: 5000 - DNA, 20 bp, synthetic construct
  misc_feature 1..20: note = chemically synthesized
  source 1..20: mol_type = other DNA
actcatagatccacattgct

SEQ ID NO: 5001 - DNA, 20 bp, synthetic construct
  misc_feature 1..20: note = chemically synthesized
  source 1..20: mol_type = other DNA
ctcatagatccacattgctg

SEQ ID NO: 5002 - DNA, 20 bp, synthetic construct
  misc_feature 1..20: note = chemically synthesized
  source 1..20: mol_type = other DNA
catagatccacattgctggg

SEQ ID NO: 5003 - DNA, 20 bp, synthetic construct
  misc_feature 1..20: note = chemically synthesized
  source 1..20: mol_type = other DNA
atagatccacattgctgggg

SEQ ID NO: 5004 - DNA, 20 bp, synthetic construct
  misc_feature 1..20: note = chemically synthesized
  source 1..20: mol_type = other DNA
ctggggaggccttacaatca

SEQ ID NO: 5005 - DNA, 20 bp, synthetic construct
  misc_feature 1..20: note = chemically synthesized
  source 1..20: mol_type = other DNA
gggaggccttacaatcatgg

SEQ ID NO: 5006 - DNA, 20 bp, synthetic construct
  misc_feature 1..20: note = chemically synthesized
  source 1..20: mol_type = other DNA
aggccttacaatcatggtgg

SEQ ID NO: 5007 - DNA, 20 bp, synthetic construct
  misc_feature 1..20: note = chemically synthesized
  source 1..20: mol_type = other DNA
ggccttacaatcatggtgga

SEQ ID NO: 5008 - DNA, 20 bp, synthetic construct
  misc_feature 1..20: note = chemically synthesized
  source 1..20: mol_type = other DNA
tacaatcatggtggaaggtg

SEQ ID NO: 5009 - DNA, 20 bp, synthetic construct
  misc_feature 1..20: note = chemically synthesized
  source 1..20: mol_type = other DNA
acaatcatggtggaaggtga

SEQ ID NO: 5010 - DNA, 20 bp, synthetic construct
  misc_feature 1..20: note = chemically synthesized
  source 1..20: mol_type = other DNA
aatcatggtggaaggtgaag

SEQ ID NO: 5011 - DNA, 20 bp, synthetic construct
  misc_feature 1..20: note = chemically synthesized
  source 1..20: mol_type = other DNA
atcatggtggaaggtgaagg

SEQ ID NO: 5012 - DNA, 20 bp, synthetic construct
  misc_feature 1..20: note = chemically synthesized
  source 1..20: mol_type = other DNA
catggtggaaggtgaaggag

SEQ ID NO: 5013 - DNA, 20 bp, synthetic construct
  misc_feature 1..20: note = chemically synthesized
  source 1..20: mol_type = other DNA
tggaaggtgaaggaggagca

SEQ ID NO: 5014 - DNA, 20 bp, synthetic construct
  misc_feature 1..20: note = chemically synthesized
  source 1..20: mol_type = other DNA
gagcaaagtcacatctgaca

SEQ ID NO: 5015 - DNA, 20 bp, synthetic construct
  misc_feature 1..20: note = chemically synthesized
  source 1..20: mol_type = other DNA
caaagtcacatctgacatgg

SEQ ID NO: 5016 - DNA, 20 bp, synthetic construct
  misc_feature 1..20: note = chemically synthesized
  source 1..20: mol_type = other DNA
agtcacatctgacatggtgg

SEQ ID NO: 5017 - DNA, 20 bp, synthetic construct
  misc_feature 1..20: note = chemically synthesized
  source 1..20: mol_type = other DNA
gtcacatctgacatggtggc

SEQ ID NO: 5018 - DNA, 20 bp, synthetic construct
  misc_feature 1..20: note = chemically synthesized
  source 1..20: mol_type = other DNA
catctgacatggtggcaggc

SEQ ID NO: 5019 - DNA, 20 bp, synthetic construct
  misc_feature 1..20: note = chemically synthesized
  source 1..20: mol_type = other DNA
tctgacatggtggcaggcaa

SEQ ID NO: 5020 - DNA, 20 bp, synthetic construct
  misc_feature 1..20: note = chemically synthesized
  source 1..20: mol_type = other DNA
tgacatggtggcaggcaaga

SEQ ID NO: 5021 - DNA, 20 bp, synthetic construct
  misc_feature 1..20: note = chemically synthesized
  source 1..20: mol_type = other DNA
gcaggcaagagagcatgtgc

SEQ ID NO: 5022 - DNA, 20 bp, synthetic construct
  misc_feature 1..20: note = chemically synthesized
  source 1..20: mol_type = other DNA
caggcaagagagcatgtgca

SEQ ID NO: 5023 - DNA, 20 bp, synthetic construct
  misc_feature 1..20: note = chemically synthesized
  source 1..20: mol_type = other DNA
aggcaagagagcatgtgcaa

SEQ ID NO: 5024 - DNA, 20 bp, synthetic construct
  misc_feature 1..20: note = chemically synthesized
  source 1..20: mol_type = other DNA
aatgccctttataaaaccat

SEQ ID NO: 5025 - DNA, 20 bp, synthetic construct
  misc_feature 1..20: note = chemically synthesized
  source 1..20: mol_type = other DNA
ataaaaccatcagatcttgt

SEQ ID NO: 5026 - DNA, 20 bp, synthetic construct
  misc_feature 1..20: note = chemically synthesized
  source 1..20: mol_type = other DNA
tgagacttactcactatcat

SEQ ID NO: 5027 - DNA, 20 bp, synthetic construct
  misc_feature 1..20: note = chemically synthesized
  source 1..20: mol_type = other DNA
cttactcactatcatgagaa

SEQ ID NO: 5028 - DNA, 20 bp, synthetic construct
  misc_feature 1..20: note = chemically synthesized
  source 1..20: mol_type = other DNA
cccatgattcaattacatcc

SEQ ID NO: 5029 - DNA, 20 bp, synthetic construct
  misc_feature 1..20: note = chemically synthesized
  source 1..20: mol_type = other DNA
ccagtgtgttccttccatga

SEQ ID NO: 5030 - DNA, 20 bp, synthetic construct
  misc_feature 1..20: note = chemically synthesized
  source 1..20: mol_type = other DNA
cagtgtgttccttccatgac

SEQ ID NO: 5031 - DNA, 20 bp, synthetic construct
  misc_feature 1..20: note = chemically synthesized
  source 1..20: mol_type = other DNA
tgtgttccttccatgacagg

SEQ ID NO: 5032 - DNA, 20 bp, synthetic construct
  misc_feature 1..20: note = chemically synthesized
  source 1..20: mol_type = other DNA
gtgttccttccatgacaggc

SEQ ID NO: 5033 - DNA, 20 bp, synthetic construct
  misc_feature 1..20: note = chemically synthesized
  source 1..20: mol_type = other DNA
tgttccttccatgacaggca

SEQ ID NO: 5034 - DNA, 20 bp, synthetic construct
  misc_feature 1..20: note = chemically synthesized
  source 1..20: mol_type = other DNA
tccatgacaggcagggatta

SEQ ID NO: 5035 - DNA, 20 bp, synthetic construct
  misc_feature 1..20: note = chemically synthesized
  source 1..20: mol_type = other DNA
ccatgacaggcagggattat

SEQ ID NO: 5036 - DNA, 20 bp, synthetic construct
  misc_feature 1..20: note = chemically synthesized
  source 1..20: mol_type = other DNA
gattatgggacctactattc

SEQ ID NO: 5037 - DNA, 20 bp, synthetic construct
  misc_feature 1..20: note = chemically synthesized
  source 1..20: mol_type = other DNA
tatgggacctactattcaag

SEQ ID NO: 5038 - DNA, 20 bp, synthetic construct
  misc_feature 1..20: note = chemically synthesized
  source 1..20: mol_type = other DNA
ctactattcaagaagaaatt

SEQ ID NO: 5039 - DNA, 20 bp, synthetic construct
  misc_feature 1..20: note = chemically synthesized
  source 1..20: mol_type = other DNA
tactattcaagaagaaattt

SEQ ID NO: 5040 - DNA, 20 bp, synthetic construct
  misc_feature 1..20: note = chemically synthesized
  source 1..20: mol_type = other DNA
tattcaagaagaaatttggg

SEQ ID NO: 5041 - DNA, 20 bp, synthetic construct
  misc_feature 1..20: note = chemically synthesized
  source 1..20: mol_type = other DNA
attcaagaagaaatttgggt

SEQ ID NO: 5042 - DNA, 20 bp, synthetic construct
  misc_feature 1..20: note = chemically synthesized
  source 1..20: mol_type = other DNA
gaaaactgccaaaccatatc

SEQ ID NO: 5043 - DNA, 20 bp, synthetic construct
  misc_feature 1..20: note = chemically synthesized
  source 1..20: mol_type = other DNA
aaaactgccaaaccatatca

SEQ ID NO: 5044 - DNA, 20 bp, synthetic construct
  misc_feature 1..20: note = chemically synthesized
  source 1..20: mol_type = other DNA
aggtgtaatgactgccctgc

SEQ ID NO: 5045 - DNA, 20 bp, synthetic construct
  misc_feature 1..20: note = chemically synthesized
  source 1..20: mol_type = other DNA
ggtgtaatgactgccctgct

SEQ ID NO: 5046 - DNA, 20 bp, synthetic construct
  misc_feature 1..20: note = chemically synthesized
  source 1..20: mol_type = other DNA
tgctgggttttctactcgtg

SEQ ID NO: 5047 - DNA, 20 bp, synthetic construct
  misc_feature 1..20: note = chemically synthesized
  source 1..20: mol_type = other DNA
gctgggttttctactcgtgt

SEQ ID NO: 5048 - DNA, 20 bp, synthetic construct
  misc_feature 1..20: note = chemically synthesized
  source 1..20: mol_type = other DNA
ttctactcgtgtgggatctt

SEQ ID NO: 5049 - DNA, 20 bp, synthetic construct
  misc_feature 1..20: note = chemically synthesized
  source 1..20: mol_type = other DNA
gatctttagcccctttcttt

SEQ ID NO: 5050 - DNA, 20 bp, synthetic construct
  misc_feature 1..20: note = chemically synthesized
  source 1..20: mol_type = other DNA
tttggtgcatttctctcttt

SEQ ID NO: 5051 - DNA, 20 bp, synthetic construct
  misc_feature 1..20: note = chemically synthesized
  source 1..20: mol_type = other DNA
tgcatttctctcttttggaa

SEQ ID NO: 5052 - DNA, 20 bp, synthetic construct
  misc_feature 1..20: note = chemically synthesized
  source 1..20: mol_type = other DNA
gcatttctctcttttggaat

SEQ ID NO: 5053 - DNA, 20 bp, synthetic construct
  misc_feature 1..20: note = chemically synthesized
  source 1..20: mol_type = other DNA
tgggaatttgtacccaatgc

SEQ ID NO: 5054 - DNA, 20 bp, synthetic construct
  misc_feature 1..20: note = chemically synthesized
  source 1..20: mol_type = other DNA
ccagtacctccattatgtct

SEQ ID NO: 5055 - DNA, 20 bp, synthetic construct
  misc_feature 1..20: note = chemically synthesized
  source 1..20: mol_type = other DNA
gtacctccattatgtcttgg

SEQ ID NO: 5056 - DNA, 20 bp, synthetic construct
  misc_feature 1..20: note = chemically synthesized
  source 1..20: mol_type = other DNA
ctaacttgtttttgatttta

SEQ ID NO: 5057 - DNA, 20 bp, synthetic construct
  misc_feature 1..20: note = chemically synthesized
  source 1..20: mol_type = other DNA
taacttgtttttgattttac

SEQ ID NO: 5058 - DNA, 20 bp, synthetic construct
  misc_feature 1..20: note = chemically synthesized
  source 1..20: mol_type = other DNA
tttttgattttacaggctca

SEQ ID NO: 5059 - DNA, 20 bp, synthetic construct
  misc_feature 1..20: note = chemically synthesized
  source 1..20: mol_type = other DNA
ttttgattttacaggctcat

SEQ ID NO: 5060 - DNA, 20 bp, synthetic construct
  misc_feature 1..20: note = chemically synthesized
  source 1..20: mol_type = other DNA
ttttacaggctcataggttg

SEQ ID NO: 5061 - DNA, 20 bp, synthetic construct
  misc_feature 1..20: note = chemically synthesized
  source 1..20: mol_type = other DNA
tttacaggctcataggttga

SEQ ID NO: 5062 - DNA, 20 bp, synthetic construct
  misc_feature 1..20: note = chemically synthesized
  source 1..20: mol_type = other DNA
ttacaggctcataggttgaa

SEQ ID NO: 5063 - DNA, 20 bp, synthetic construct
  misc_feature 1..20: note = chemically synthesized
  source 1..20: mol_type = other DNA
tgaagggacttgccttgtct

SEQ ID NO: 5064 - DNA, 20 bp, synthetic construct
  misc_feature 1..20: note = chemically synthesized
  source 1..20: mol_type = other DNA
ggacttgccttgtcttggat

SEQ ID NO: 5065 - DNA, 20 bp, synthetic construct
  misc_feature 1..20: note = chemically synthesized
  source 1..20: mol_type = other DNA
ccttgtcttggataagactt

SEQ ID NO: 5066 - DNA, 20 bp, synthetic construct
  misc_feature 1..20: note = chemically synthesized
  source 1..20: mol_type = other DNA
ttggataagactttggactt

SEQ ID NO: 5067 - DNA, 20 bp, synthetic construct
  misc_feature 1..20: note = chemically synthesized
  source 1..20: mol_type = other DNA
actttggactttggactttt

SEQ ID NO: 5068 - DNA, 20 bp, synthetic construct
  misc_feature 1..20: note = chemically synthesized
  source 1..20: mol_type = other DNA
ttggacttttgagttaatgc

SEQ ID NO: 5069 - DNA, 20 bp, synthetic construct
  misc_feature 1..20: note = chemically synthesized
  source 1..20: mol_type = other DNA
ttttgagttaatgctggaat

SEQ ID NO: 5070 - DNA, 20 bp, synthetic construct
  misc_feature 1..20: note = chemically synthesized
  source 1..20: mol_type = other DNA
agttaatgctggaatgagtt

SEQ ID NO: 5071 - DNA, 20 bp, synthetic construct
  misc_feature 1..20: note = chemically synthesized
  source 1..20: mol_type = other DNA
tggaatgagttaagactttg

SEQ ID NO: 5072 - DNA, 20 bp, synthetic construct
  misc_feature 1..20: note = chemically synthesized
  source 1..20: mol_type = other DNA
ggaatgagttaagactttgt

SEQ ID NO: 5073 - DNA, 20 bp, synthetic construct
  misc_feature 1..20: note = chemically synthesized
  source 1..20: mol_type = other DNA
ttaagactttgtaggactgt

SEQ ID NO: 5074 - DNA, 20 bp, synthetic construct
  misc_feature 1..20: note = chemically synthesized
  source 1..20: mol_type = other DNA
taagactttgtaggactgtt

SEQ ID NO: 5075 - DNA, 20 bp, synthetic construct
  misc_feature 1..20: note = chemically synthesized
  source 1..20: mol_type = other DNA
gactttgtaggactgttggg

SEQ ID NO: 5076 - DNA, 20 bp, synthetic construct
  misc_feature 1..20: note = chemically synthesized
  source 1..20: mol_type = other DNA
atgattgtattttgtgatgt

SEQ ID NO: 5077 - DNA, 20 bp, synthetic construct
  misc_feature 1..20: note = chemically synthesized
  source 1..20: mol_type = other DNA
attgtattttgtgatgtgag

SEQ ID NO: 5078 - DNA, 20 bp, synthetic construct
  misc_feature 1..20: note = chemically synthesized
  source 1..20: mol_type = other DNA
ttgtgatgtgagaagaacat

SEQ ID NO: 5079 - DNA, 20 bp, synthetic construct
  misc_feature 1..20: note = chemically synthesized
  source 1..20: mol_type = other DNA
tgtgagaagaacatgagatt

SEQ ID NO: 5080 - DNA, 20 bp, synthetic construct
  misc_feature 1..20: note = chemically synthesized
  source 1..20: mol_type = other DNA
gagaagaacatgagatttgg

SEQ ID NO: 5081 - DNA, 20 bp, synthetic construct
  misc_feature 1..20: note = chemically synthesized
  source 1..20: mol_type = other DNA
agaagaacatgagatttgga

SEQ ID NO: 5082 - DNA, 20 bp, synthetic construct
  misc_feature 1..20: note = chemically synthesized
  source 1..20: mol_type = other DNA
gaagaacatgagatttggaa

SEQ ID NO: 5083 - DNA, 20 bp, synthetic construct
  misc_feature 1..20: note = chemically synthesized
  source 1..20: mol_type = other DNA
aagaacatgagatttggaag

SEQ ID NO: 5084 - DNA, 20 bp, synthetic construct
  misc_feature 1..20: note = chemically synthesized
  source 1..20: mol_type = other DNA
acatgagatttggaaggggc

SEQ ID NO: 5085 - DNA, 20 bp, synthetic construct
  misc_feature 1..20: note = chemically synthesized
  source 1..20: mol_type = other DNA
atgagatttggaaggggcca

SEQ ID NO: 5086 - DNA, 20 bp, synthetic construct
  misc_feature 1..20: note = chemically synthesized
  source 1..20: mol_type = other DNA
tgagatttggaaggggccag

SEQ ID NO: 5087 - DNA, 20 bp, synthetic construct
  misc_feature 1..20: note = chemically synthesized
  source 1..20: mol_type = other DNA
gatttggaaggggccagagg

SEQ ID NO: 5088 - DNA, 20 bp, synthetic construct
  misc_feature 1..20: note = chemically synthesized
  source 1..20: mol_type = other DNA
ttggaaggggccagaggtgg

SEQ ID NO: 5089 - DNA, 20 bp, synthetic construct
  misc_feature 1..20: note = chemically synthesized
  source 1..20: mol_type = other DNA
tggaaggggccagaggtgga

SEQ ID NO: 5090 - DNA, 20 bp, synthetic construct
  misc_feature 1..20: note = chemically synthesized
  source 1..20: mol_type = other DNA
gggccagaggtggaaggata

SEQ ID NO: 5091 - DNA, 20 bp, synthetic construct
  misc_feature 1..20: note = chemically synthesized
  source 1..20: mol_type = other DNA
agaggtggaaggatatggtt

SEQ ID NO: 5092 - DNA, 20 bp, synthetic construct
  misc_feature 1..20: note = chemically synthesized
  source 1..20: mol_type = other DNA
tcatgttaaattataatcac

SEQ ID NO: 5093 - DNA, 20 bp, synthetic construct
  misc_feature 1..20: note = chemically synthesized
  source 1..20: mol_type = other DNA
taaattataatcaccagcgt

SEQ ID NO: 5094 - DNA, 20 bp, synthetic construct
  misc_feature 1..20: note = chemically synthesized
  source 1..20: mol_type = other DNA
aattataatcaccagcgttg

SEQ ID NO: 5095 - DNA, 20 bp, synthetic construct
  misc_feature 1..20: note = chemically synthesized
  source 1..20: mol_type = other DNA
attataatcaccagcgttgg

SEQ ID NO: 5096 - DNA, 20 bp, synthetic construct
  misc_feature 1..20: note = chemically synthesized
  source 1..20: mol_type = other DNA
ataatcaccagcgttggagg

SEQ ID NO: 5097 - DNA, 20 bp, synthetic construct
  misc_feature 1..20: note = chemically synthesized
  source 1..20: mol_type = other DNA
taatcaccagcgttggaggt

SEQ ID NO: 5098 - DNA, 20 bp, synthetic construct
  misc_feature 1..20: note = chemically synthesized
  source 1..20: mol_type = other DNA
aatcaccagcgttggaggtg

SEQ ID NO: 5099 - DNA, 20 bp, synthetic construct
  misc_feature 1..20: note = chemically synthesized
  source 1..20: mol_type = other DNA
gcgttggaggtggggccttg

SEQ ID NO: 5100 - DNA, 20 bp, synthetic construct
  misc_feature 1..20: note = chemically synthesized
  source 1..20: mol_type = other DNA
cgttggaggtggggccttgt

SEQ ID NO: 5101 - DNA, 20 bp, synthetic construct
  misc_feature 1..20: note = chemically synthesized
  source 1..20: mol_type = other DNA
ttggaggtggggccttgtgg

SEQ ID NO: 5102 - DNA, 20 bp, synthetic construct
  misc_feature 1..20: note = chemically synthesized
  source 1..20: mol_type = other DNA
tggaggtggggccttgtggg

SEQ ID NO: 5103 - DNA, 20 bp, synthetic construct
  misc_feature 1..20: note = chemically synthesized
  source 1..20: mol_type = other DNA
tgtgggaggtaattcaatca

SEQ ID NO: 5104 - DNA, 20 bp, synthetic construct
  misc_feature 1..20: note = chemically synthesized
  source 1..20: mol_type = other DNA
gggaggtaattcaatcatgg

SEQ ID NO: 5105 - DNA, 20 bp, synthetic construct
  misc_feature 1..20: note = chemically synthesized
  source 1..20: mol_type = other DNA
aggtaattcaatcatggtgg

SEQ ID NO: 5106 - DNA, 20 bp, synthetic construct
  misc_feature 1..20: note = chemically synthesized
  source 1..20: mol_type = other DNA
gtaattcaatcatggtggca

SEQ ID NO: 5107 - DNA, 20 bp, synthetic construct
  misc_feature 1..20: note = chemically synthesized
  source 1..20: mol_type = other DNA
catggtggcagagttctcat

SEQ ID NO: 5108 - DNA, 20 bp, synthetic construct
  misc_feature 1..20: note = chemically synthesized
  source 1..20: mol_type = other DNA
cagagttctcatcagcgatt

SEQ ID NO: 5109 - DNA, 20 bp, synthetic construct
  misc_feature 1..20: note = chemically synthesized
  source 1..20: mol_type = other DNA
cgatttagtaccatccccct

SEQ ID NO: 5110 - DNA, 20 bp, synthetic construct
  misc_feature 1..20: note = chemically synthesized
  source 1..20: mol_type = other DNA
ccatcccccttggtactgta

SEQ ID NO: 5111 - DNA, 20 bp, synthetic construct
  misc_feature 1..20: note = chemically synthesized
  source 1..20: mol_type = other DNA
cccccttggtactgtatagt

SEQ ID NO: 5112 - DNA, 20 bp, synthetic construct
  misc_feature 1..20: note = chemically synthesized
  source 1..20: mol_type = other DNA
gtactgtatagtgagttctc

SEQ ID NO: 5113 - DNA, 20 bp, synthetic construct
  misc_feature 1..20: note = chemically synthesized
  source 1..20: mol_type = other DNA
actgtatagtgagttctcaa

SEQ ID NO: 5114 - DNA, 20 bp, synthetic construct
  misc_feature 1..20: note = chemically synthesized
  source 1..20: mol_type = other DNA
ctgtatagtgagttctcaag

SEQ ID NO: 5115 - DNA, 20 bp, synthetic construct
  misc_feature 1..20: note = chemically synthesized
  source 1..20: mol_type = other DNA
atagtgagttctcaagaggc

SEQ ID NO: 5116 - DNA, 20 bp, synthetic construct
  misc_feature 1..20: note = chemically synthesized
  source 1..20: mol_type = other DNA
tcaagaggctggttgtttga

SEQ ID NO: 5117 - DNA, 20 bp, synthetic construct
  misc_feature 1..20: note = chemically synthesized
  source 1..20: mol_type = other DNA
gctggttgtttgaaagtgtg

SEQ ID NO: 5118 - DNA, 20 bp, synthetic construct
  misc_feature 1..20: note = chemically synthesized
  source 1..20: mol_type = other DNA
taccctgcttctccctgtcc

SEQ ID NO: 5119 - DNA, 20 bp, synthetic construct
  misc_feature 1..20: note = chemically synthesized
  source 1..20: mol_type = other DNA
ctccctgtcctggccatgtg

SEQ ID NO: 5120 - DNA, 20 bp, synthetic construct
  misc_feature 1..20: note = chemically synthesized
  source 1..20: mol_type = other DNA
ttgtcttctgccatgattgt

SEQ ID NO: 5121 - DNA, 20 bp, synthetic construct
  misc_feature 1..20: note = chemically synthesized
  source 1..20: mol_type = other DNA
gccatgattgtaagtttctt

SEQ ID NO: 5122 - DNA, 20 bp, synthetic construct
  misc_feature 1..20: note = chemically synthesized
  source 1..20: mol_type = other DNA
ccatgattgtaagtttcttg

SEQ ID NO: 5123 - DNA, 20 bp, synthetic construct
  misc_feature 1..20: note = chemically synthesized
  source 1..20: mol_type = other DNA
taagtttcttgaggtctccc

SEQ ID NO: 5124 - DNA, 20 bp, synthetic construct
  misc_feature 1..20: note = chemically synthesized
  source 1..20: mol_type = other DNA
gtttcttgaggtctccctag

SEQ ID NO: 5125 - DNA, 20 bp, synthetic construct
  misc_feature 1..20: note = chemically synthesized
  source 1..20: mol_type = other DNA
ttgaggtctccctagaagct

SEQ ID NO: 5126 - DNA, 20 bp, synthetic construct
  misc_feature 1..20: note = chemically synthesized
  source 1..20: mol_type = other DNA
aggtctccctagaagctgag

SEQ ID NO: 5127 - DNA, 20 bp, synthetic construct
  misc_feature 1..20: note = chemically synthesized
  source 1..20: mol_type = other DNA
atgctgccatgcttcttgta

SEQ ID NO: 5128 - DNA, 20 bp, synthetic construct
  misc_feature 1..20: note = chemically synthesized
  source 1..20: mol_type = other DNA
catgcttcttgtacagcctg

SEQ ID NO: 5129 - DNA, 20 bp, synthetic construct
  misc_feature 1..20: note = chemically synthesized
  source 1..20: mol_type = other DNA
tgtacagcctgaagaacttt

SEQ ID NO: 5130 - DNA, 20 bp, synthetic construct
  misc_feature 1..20: note = chemically synthesized
  source 1..20: mol_type = other DNA
tctgttctttataaattacc

SEQ ID NO: 5131 - DNA, 20 bp, synthetic construct
  misc_feature 1..20: note = chemically synthesized
  source 1..20: mol_type = other DNA
ctttataaattacccagtct

SEQ ID NO: 5132 - DNA, 20 bp, synthetic construct
  misc_feature 1..20: note = chemically synthesized
  source 1..20: mol_type = other DNA
tttataaattacccagtctc

SEQ ID NO: 5133 - DNA, 20 bp, synthetic construct
  misc_feature 1..20: note = chemically synthesized
  source 1..20: mol_type = other DNA
cagtctcaggtattttttta

SEQ ID NO: 5134 - DNA, 20 bp, synthetic construct
  misc_feature 1..20: note = chemically synthesized
  source 1..20: mol_type = other DNA
tctcaggtatttttttacag

SEQ ID NO: 5135 - DNA, 20 bp, synthetic construct
  misc_feature 1..20: note = chemically synthesized
  source 1..20: mol_type = other DNA
ctttgatactcaatgtgatc

SEQ ID NO: 5136 - DNA, 20 bp, synthetic construct
  misc_feature 1..20: note = chemically synthesized
  source 1..20: mol_type = other DNA
tactcaatgtgatcaagatt

SEQ ID NO: 5137 - DNA, 20 bp, synthetic construct
  misc_feature 1..20: note = chemically synthesized
  source 1..20: mol_type = other DNA
actcaatgtgatcaagattt

SEQ ID NO: 5138 - DNA, 20 bp, synthetic construct
  misc_feature 1..20: note = chemically synthesized
  source 1..20: mol_type = other DNA
tcaatgtgatcaagatttgg

SEQ ID NO: 5139 - DNA, 20 bp, synthetic construct
  misc_feature 1..20: note = chemically synthesized
  source 1..20: mol_type = other DNA
ctcctctttactcatgtcca

SEQ ID NO: 5140 - DNA, 20 bp, synthetic construct
  misc_feature 1..20: note = chemically synthesized
  source 1..20: mol_type = other DNA
gtgacatgaaacctgtatct

SEQ ID NO: 5141 - DNA, 20 bp, synthetic construct
  misc_feature 1..20: note = chemically synthesized
  source 1..20: mol_type = other DNA
atctaagtgtgttatctcca

SEQ ID NO: 5142 - DNA, 20 bp, synthetic construct
  misc_feature 1..20: note = chemically synthesized
  source 1..20: mol_type = other DNA
tctaagtgtgttatctccat

SEQ ID NO: 5143 - DNA, 20 bp, synthetic construct
  misc_feature 1..20: note = chemically synthesized
  source 1..20: mol_type = other DNA
aagtgtgttatctccatggg

SEQ ID NO: 5144 - DNA, 20 bp, synthetic construct
  misc_feature 1..20: note = chemically synthesized
  source 1..20: mol_type = other DNA
atctatttcattctatgcaa

SEQ ID NO: 5145 - DNA, 20 bp, synthetic construct
  misc_feature 1..20: note = chemically synthesized
  source 1..20: mol_type = other DNA
tgcaatagctgtctgaaact

SEQ ID NO: 5146 - DNA, 20 bp, synthetic construct
  misc_feature 1..20: note = chemically synthesized
  source 1..20: mol_type = other DNA
agctgtctgaaactaagtca

SEQ ID NO: 5147 - DNA, 20 bp, synthetic construct
  misc_feature 1..20: note = chemically synthesized
  source 1..20: mol_type = other DNA
ttgaatatctatatttgttt

SEQ ID NO: 5148 - DNA, 20 bp, synthetic construct
  misc_feature 1..20: note = chemically synthesized
  source 1..20: mol_type = other DNA
tgaatatctatatttgtttg

SEQ ID NO: 5149 - DNA, 20 bp, synthetic construct
  misc_feature 1..20: note = chemically synthesized
  source 1..20: mol_type = other DNA
tttgtttgaggaataataat

SEQ ID NO: 5150 - DNA, 20 bp, synthetic construct
  misc_feature 1..20: note = chemically synthesized
  source 1..20: mol_type = other DNA
ttgaggaataataatcagaa

SEQ ID NO: 5151 - DNA, 20 bp, synthetic construct
  misc_feature 1..20: note = chemically synthesized
  source 1..20: mol_type = other DNA
aggaataataatcagaacag

SEQ ID NO: 5152 - DNA, 20 bp, synthetic construct
  misc_feature 1..20: note = chemically synthesized
  source 1..20: mol_type = other DNA
ggaataataatcagaacaga

SEQ ID NO: 5153 - DNA, 20 bp, synthetic construct
  misc_feature 1..20: note = chemically synthesized
  source 1..20: mol_type = other DNA
atcagaacagaaggatatga

SEQ ID NO: 5154 - DNA, 20 bp, synthetic construct
  misc_feature 1..20: note = chemically synthesized
  source 1..20: mol_type = other DNA
cagaaggatatgaaagacta

SEQ ID NO: 5155 - DNA, 20 bp, synthetic construct
  misc_feature 1..20: note = chemically synthesized
  source 1..20: mol_type = other DNA
agaaggatatgaaagactat

SEQ ID NO: 5156 - DNA, 20 bp, synthetic construct
  misc_feature 1..20: note = chemically synthesized
  source 1..20: mol_type = other DNA
gatatgaaagactataggaa

SEQ ID NO: 5157 - DNA, 20 bp, synthetic construct
  misc_feature 1..20: note = chemically synthesized
  source 1..20: mol_type = other DNA
atgaaagactataggaatgg

SEQ ID NO: 5158 - DNA, 20 bp, synthetic construct
  misc_feature 1..20: note = chemically synthesized
  source 1..20: mol_type = other DNA
taggaatggaagtttctcaa

SEQ ID NO: 5159 - DNA, 20 bp, synthetic construct
  misc_feature 1..20: note = chemically synthesized
  source 1..20: mol_type = other DNA
aatggaagtttctcaacagc

SEQ ID NO: 5160 - DNA, 20 bp, synthetic construct
  misc_feature 1..20: note = chemically synthesized
  source 1..20: mol_type = other DNA
ttctcaacagcaagataaaa

SEQ ID NO: 5161 - DNA, 20 bp, synthetic construct
  misc_feature 1..20: note = chemically synthesized
  source 1..20: mol_type = other DNA
tctcaacagcaagataaaat

SEQ ID NO: 5162 - DNA, 20 bp, synthetic construct
  misc_feature 1..20: note = chemically synthesized
  source 1..20: mol_type = other DNA
agcaagataaaataggttaa

SEQ ID NO: 5163 - DNA, 20 bp, synthetic construct
  misc_feature 1..20: note = chemically synthesized
  source 1..20: mol_type = other DNA
caagataaaataggttaatg

SEQ ID NO: 5164 - DNA, 20 bp, synthetic construct
  misc_feature 1..20: note = chemically synthesized
  source 1..20: mol_type = other DNA
taggttaatggagtaatatg

SEQ ID NO: 5165 - DNA, 20 bp, synthetic construct
  misc_feature 1..20: note = chemically synthesized
  source 1..20: mol_type = other DNA
ggttaatggagtaatatgta

SEQ ID NO: 5166 - DNA, 20 bp, synthetic construct
  misc_feature 1..20: note = chemically synthesized
  source 1..20: mol_type = other DNA
gagaatgatgactataatta

SEQ ID NO: 5167 - DNA, 20 bp, synthetic construct
  misc_feature 1..20: note = chemically synthesized
  source 1..20: mol_type = other DNA
ataattaaagaaaatgaatt

SEQ ID NO: 5168 - DNA, 20 bp, synthetic construct
  misc_feature 1..20: note = chemically synthesized
  source 1..20: mol_type = other DNA
aattaagcaatatacaatta

SEQ ID NO: 5169 - DNA, 20 bp, synthetic construct
  misc_feature 1..20: note = chemically synthesized
  source 1..20: mol_type = other DNA
aagctctttatgtcttttca

SEQ ID NO: 5170 - DNA, 20 bp, synthetic construct
  misc_feature 1..20: note = chemically synthesized
  source 1..20: mol_type = other DNA
tatgtcttttcacagcttga

SEQ ID NO: 5171 - DNA, 20 bp, synthetic construct
  misc_feature 1..20: note = chemically synthesized
  source 1..20: mol_type = other DNA
ctgaataatattctatccta

SEQ ID NO: 5172 - DNA, 20 bp, synthetic construct
  misc_feature 1..20: note = chemically synthesized
  source 1..20: mol_type = other DNA
tctatcctatggatgttcca

SEQ ID NO: 5173 - DNA, 20 bp, synthetic construct
  misc_feature 1..20: note = chemically synthesized
  source 1..20: mol_type = other DNA
cacagtttatccattcatct

SEQ ID NO: 5174 - DNA, 20 bp, synthetic construct
  misc_feature 1..20: note = chemically synthesized
  source 1..20: mol_type = other DNA
tcttggttactttcaacttt

SEQ ID NO: 5175 - DNA, 20 bp, synthetic construct
  misc_feature 1..20: note = chemically synthesized
  source 1..20: mol_type = other DNA
tttcaacttttggcaattat

SEQ ID NO: 5176 - DNA, 20 bp, synthetic construct
  misc_feature 1..20: note = chemically synthesized
  source 1..20: mol_type = other DNA
acttttggcaattatgagta

SEQ ID NO: 5177 - DNA, 20 bp, synthetic construct
  misc_feature 1..20: note = chemically synthesized
  source 1..20: mol_type = other DNA
agtaaagttcctataaacct

SEQ ID NO: 5178 - DNA, 20 bp, synthetic construct
  misc_feature 1..20: note = chemically synthesized
  source 1..20: mol_type = other DNA
aagttcctataaaccttggt

SEQ ID NO: 5179 - DNA, 20 bp, synthetic construct
  misc_feature 1..20: note = chemically synthesized
  source 1..20: mol_type = other DNA
ggttagttcatgtctgtgtg

SEQ ID NO: 5180 - DNA, 20 bp, synthetic construct
  misc_feature 1..20: note = chemically synthesized
  source 1..20: mol_type = other DNA
acataaatttttgactcatt

SEQ ID NO: 5181 - DNA, 20 bp, synthetic construct
  misc_feature 1..20: note = chemically synthesized
  source 1..20: mol_type = other DNA
cataaatttttgactcattt

SEQ ID NO: 5182 - DNA, 20 bp, synthetic construct
  misc_feature 1..20: note = chemically synthesized
  source 1..20: mol_type = other DNA
gactcatttgggtaaataca

SEQ ID NO: 5183 - DNA, 20 bp, synthetic construct
  misc_feature 1..20: note = chemically synthesized
  source 1..20: mol_type = other DNA
actcatttgggtaaatacat

SEQ ID NO: 5184 - DNA, 20 bp, synthetic construct
  misc_feature 1..20: note = chemically synthesized
  source 1..20: mol_type = other DNA
tcatttgggtaaatacatag

SEQ ID NO: 5185 - DNA, 20 bp, synthetic construct
  misc_feature 1..20: note = chemically synthesized
  source 1..20: mol_type = other DNA
atacataggagtgtgattgt

SEQ ID NO: 5186 - DNA, 20 bp, synthetic construct
  misc_feature 1..20: note = chemically synthesized
  source 1..20: mol_type = other DNA
tacataggagtgtgattgtt

SEQ ID NO: 5187 - DNA, 20 bp, synthetic construct
  misc_feature 1..20: note = chemically synthesized
  source 1..20: mol_type = other DNA
tgattgttgggtcacatgaa

SEQ ID NO: 5188 - DNA, 20 bp, synthetic construct
  misc_feature 1..20: note = chemically synthesized
  source 1..20: mol_type = other DNA
gttgggtcacatgaaaagac

SEQ ID NO: 5189 - DNA, 20 bp, synthetic construct
  misc_feature 1..20: note = chemically synthesized
  source 1..20: mol_type = other DNA
catgaaaagactagttttgt

SEQ ID NO: 5190 - DNA, 20 bp, synthetic construct
  misc_feature 1..20: note = chemically synthesized
  source 1..20: mol_type = other DNA
ctgtaaactgtcttccaatt

SEQ ID NO: 5191 - DNA, 20 bp, synthetic construct
  misc_feature 1..20: note = chemically synthesized
  source 1..20: mol_type = other DNA
gcactatttctcatccctac

SEQ ID NO: 5192 - DNA, 20 bp, synthetic construct
  misc_feature 1..20: note = chemically synthesized
  source 1..20: mol_type = other DNA
ttctcatccctacaagcaat

SEQ ID NO: 5193 - DNA, 20 bp, synthetic construct
  misc_feature 1..20: note = chemically synthesized
  source 1..20: mol_type = other DNA
catccctacaagcaataagt

SEQ ID NO: 5194 - DNA, 20 bp, synthetic construct
  misc_feature 1..20: note = chemically synthesized
  source 1..20: mol_type = other DNA
tccctacaagcaataagtga

SEQ ID NO: 5195 - DNA, 20 bp, synthetic construct
  misc_feature 1..20: note = chemically synthesized
  source 1..20: mol_type = other DNA
ctgttgctccacttcgttgc

SEQ ID NO: 5196 - DNA, 20 bp, synthetic construct
  misc_feature 1..20: note = chemically synthesized
  source 1..20: mol_type = other DNA
tccacttcgttgccagtgtt

SEQ ID NO: 5197 - DNA, 20 bp, synthetic construct
  misc_feature 1..20: note = chemically synthesized
  source 1..20: mol_type = other DNA
acttcgttgccagtgtttgg

SEQ ID NO: 5198 - DNA, 20 bp, synthetic construct
  misc_feature 1..20: note = chemically synthesized
  source 1..20: mol_type = other DNA
tgccagtgtttggtggatgt

SEQ ID NO: 5199 - DNA, 20 bp, synthetic construct
  misc_feature 1..20: note = chemically synthesized
  source 1..20: mol_type = other DNA
tttggtggatgtcagtattt

SEQ ID NO: 5200 - DNA, 20 bp, synthetic construct
  misc_feature 1..20: note = chemically synthesized
  source 1..20: mol_type = other DNA
gatgtcagtattttggaatt

SEQ ID NO: 5201 - DNA, 20 bp, synthetic construct
  misc_feature 1..20: note = chemically synthesized
  source 1..20: mol_type = other DNA
ttggccttctaatatgtgtg

SEQ ID NO: 5202 - DNA, 20 bp, synthetic construct
  misc_feature 1..20: note = chemically synthesized
  source 1..20: mol_type = other DNA
gccttctaatatgtgtgtag

SEQ ID NO: 5203 - DNA, 20 bp, synthetic construct
  misc_feature 1..20: note = chemically synthesized
  source 1..20: mol_type = other DNA
tctaatatgtgtgtagtggt

SEQ ID NO: 5204 - DNA, 20 bp, synthetic construct
  misc_feature 1..20: note = chemically synthesized
  source 1..20: mol_type = other DNA
tatcttcttgttttaatgtg

SEQ ID NO: 5205 - DNA, 20 bp, synthetic construct
  misc_feature 1..20: note = chemically synthesized
  source 1..20: mol_type = other DNA
tcttaatgacatgtgttact

SEQ ID NO: 5206 - DNA, 20 bp, synthetic construct
  misc_feature 1..20: note = chemically synthesized
  source 1..20: mol_type = other DNA
tgcaatctatatatcttctt

SEQ ID NO: 5207 - DNA, 20 bp, synthetic construct
  misc_feature 1..20: note = chemically synthesized
  source 1..20: mol_type = other DNA
tctatatatcttctttggta

SEQ ID NO: 5208 - DNA, 20 bp, synthetic construct
  misc_feature 1..20: note = chemically synthesized
  source 1..20: mol_type = other DNA
tctttggtaaagtgtctgtt

SEQ ID NO: 5209 - DNA, 20 bp, synthetic construct
  misc_feature 1..20: note = chemically synthesized
  source 1..20: mol_type = other DNA
tcttttgcccactttgcaat

SEQ ID NO: 5210 - DNA, 20 bp, synthetic construct
  misc_feature 1..20: note = chemically synthesized
  source 1..20: mol_type = other DNA
ggattgtttgttttttattg

SEQ ID NO: 5211 - DNA, 20 bp, synthetic construct
  misc_feature 1..20: note = chemically synthesized
  source 1..20: mol_type = other DNA
tttttattgtagaattttaa

SEQ ID NO: 5212 - DNA, 20 bp, synthetic construct
  misc_feature 1..20: note = chemically synthesized
  source 1..20: mol_type = other DNA
tctttgtataatatgtatac

SEQ ID NO: 5213 - DNA, 20 bp, synthetic construct
  misc_feature 1..20: note = chemically synthesized
  source 1..20: mol_type = other DNA
tatgtatacaagtcctttat

SEQ ID NO: 5214 - DNA, 20 bp, synthetic construct
  misc_feature 1..20: note = chemically synthesized
  source 1..20: mol_type = other DNA
ttttgcaaatatgttctctg

SEQ ID NO: 5215 - DNA, 20 bp, synthetic construct
  misc_feature 1..20: note = chemically synthesized
  source 1..20: mol_type = other DNA
tattttattttattttgttc

SEQ ID NO: 5216 - DNA, 20 bp, synthetic construct
  misc_feature 1..20: note = chemically synthesized
  source 1..20: mol_type = other DNA
attttattttattttgttct

SEQ ID NO: 5217 - DNA, 20 bp, synthetic construct
  misc_feature 1..20: note = chemically synthesized
  source 1..20: mol_type = other DNA
attttgttctgggtattttg

SEQ ID NO: 5218 - DNA, 20 bp, synthetic construct
  misc_feature 1..20: note = chemically synthesized
  source 1..20: mol_type = other DNA
aactgctgtgttcttttgtt

SEQ ID NO: 5219 - DNA, 20 bp, synthetic construct
  misc_feature 1..20: note = chemically synthesized
  source 1..20: mol_type = other DNA
aattgtcttgtattgatctc

SEQ ID NO: 5220 - DNA, 20 bp, synthetic construct
  misc_feature 1..20: note = chemically synthesized
  source 1..20: mol_type = other DNA
gtcttgtattgatctctagt

SEQ ID NO: 5221 - DNA, 20 bp, synthetic construct
  misc_feature 1..20: note = chemically synthesized
  source 1..20: mol_type = other DNA
tttcactctctcctgaactc

SEQ ID NO: 5222 - DNA, 20 bp, synthetic construct
  misc_feature 1..20: note = chemically synthesized
  source 1..20: mol_type = other DNA
ctctctcctgaactccagtt

SEQ ID NO: 5223 - DNA, 20 bp, synthetic construct
  misc_feature 1..20: note = chemically synthesized
  source 1..20: mol_type = other DNA
ctgaactccagttaagattt

SEQ ID NO: 5224 - DNA, 20 bp, synthetic construct
  misc_feature 1..20: note = chemically synthesized
  source 1..20: mol_type = other DNA
gaactccagttaagattttg

SEQ ID NO: 5225 - DNA, 20 bp, synthetic construct
  misc_feature 1..20: note = chemically synthesized
  source 1..20: mol_type = other DNA
ctacttcctgtcccccttat

SEQ ID NO: 5226 - DNA, 20 bp, synthetic construct
  misc_feature 1..20: note = chemically synthesized
  source 1..20: mol_type = other DNA
tactattctgttcaaatatc

SEQ ID NO: 5227 - DNA, 20 bp, synthetic construct
  misc_feature 1..20: note = chemically synthesized
  source 1..20: mol_type = other DNA
actattctgttcaaatatca

SEQ ID NO: 5228 - DNA, 20 bp, synthetic construct
  misc_feature 1..20: note = chemically synthesized
  source 1..20: mol_type = other DNA
aaatatcaaggatctaaaat

SEQ ID NO: 5229 - DNA, 20 bp, synthetic construct
  misc_feature 1..20: note = chemically synthesized
  source 1..20: mol_type = other DNA
tatcaaggatctaaaatgag

SEQ ID NO: 5230 - DNA, 20 bp, synthetic construct
  misc_feature 1..20: note = chemically synthesized
  source 1..20: mol_type = other DNA
aaatgagtggttatttaatt

SEQ ID NO: 5231 - DNA, 20 bp, synthetic construct
  misc_feature 1..20: note = chemically synthesized
  source 1..20: mol_type = other DNA
ttatgcacctcttttattat

SEQ ID NO: 5232 - DNA, 20 bp, synthetic construct
  misc_feature 1..20: note = chemically synthesized
  source 1..20: mol_type = other DNA
ttttattttctgccctgaat

SEQ ID NO: 5233 - DNA, 20 bp, synthetic construct
  misc_feature 1..20: note = chemically synthesized
  source 1..20: mol_type = other DNA
gaataagctgtgctccaaat

SEQ ID NO: 5234 - DNA, 20 bp, synthetic construct
  misc_feature 1..20: note = chemically synthesized
  source 1..20: mol_type = other DNA
ttctttattaaaattgattc

SEQ ID NO: 5235 - DNA, 20 bp, synthetic construct
  misc_feature 1..20: note = chemically synthesized
  source 1..20: mol_type = other DNA
tctttattaaaattgattct

SEQ ID NO: 5236 - DNA, 20 bp, synthetic construct
  misc_feature 1..20: note = chemically synthesized
  source 1..20: mol_type = other DNA
taggtatgtaatttttgtgt

SEQ ID NO: 5237 - DNA, 20 bp, synthetic construct
  misc_feature 1..20: note = chemically synthesized
  source 1..20: mol_type = other DNA
gtatgtaatttttgtgttgg

SEQ ID NO: 5238 - DNA, 20 bp, synthetic construct
  misc_feature 1..20: note = chemically synthesized
  source 1..20: mol_type = other DNA
tttgtccatccttctgtgtc

SEQ ID NO: 5239 - DNA, 20 bp, synthetic construct
  misc_feature 1..20: note = chemically synthesized
  source 1..20: mol_type = other DNA
catccttctgtgtccggaat

SEQ ID NO: 5240 - DNA, 20 bp, synthetic construct
  misc_feature 1..20: note = chemically synthesized
  source 1..20: mol_type = other DNA
ccttctgtgtccggaattgg

SEQ ID NO: 5241 - DNA, 20 bp, synthetic construct
  misc_feature 1..20: note = chemically synthesized
  source 1..20: mol_type = other DNA
cttctgtgtccggaattggt

SEQ ID NO: 5242 - DNA, 20 bp, synthetic construct
  misc_feature 1..20: note = chemically synthesized
  source 1..20: mol_type = other DNA
gtccggaattggtgggttct

SEQ ID NO: 5243 - DNA, 20 bp, synthetic construct
  misc_feature 1..20: note = chemically synthesized
  source 1..20: mol_type = other DNA
ttcttggtctcgctgactta

SEQ ID NO: 5244 - DNA, 20 bp, synthetic construct
  misc_feature 1..20: note = chemically synthesized
  source 1..20: mol_type = other DNA
tctcgctgacttaaagaatg

SEQ ID NO: 5245 - DNA, 20 bp, synthetic construct
  misc_feature 1..20: note = chemically synthesized
  source 1..20: mol_type = other DNA
aatgaagccgcgaaccctcg

SEQ ID NO: 5246 - DNA, 20 bp, synthetic construct
  misc_feature 1..20: note = chemically synthesized
  source 1..20: mol_type = other DNA
aagccgcgaaccctcgtggt

SEQ ID NO: 5247 - DNA, 20 bp, synthetic construct
  misc_feature 1..20: note = chemically synthesized
  source 1..20: mol_type = other DNA
ggtgagtgttacaattctta

SEQ ID NO: 5248 - DNA, 20 bp, synthetic construct
  misc_feature 1..20: note = chemically synthesized
  source 1..20: mol_type = other DNA
agtgttacaattcttaaaga

SEQ ID NO: 5249 - DNA, 20 bp, synthetic construct
  misc_feature 1..20: note = chemically synthesized
  source 1..20: mol_type = other DNA
tcttaaagatggtgtgttca

SEQ ID NO: 5250 - DNA, 20 bp, synthetic construct
  misc_feature 1..20: note = chemically synthesized
  source 1..20: mol_type = other DNA
cttaaagatggtgtgttcaa

SEQ ID NO: 5251 - DNA, 20 bp, synthetic construct
  misc_feature 1..20: note = chemically synthesized
  source 1..20: mol_type = other DNA
aagatggtgtgttcaaagga

SEQ ID NO: 5252 - DNA, 20 bp, synthetic construct
  misc_feature 1..20: note = chemically synthesized
  source 1..20: mol_type = other DNA
ttcaaaggatggtgtgtcca

SEQ ID NO: 5253 - DNA, 20 bp, synthetic construct
  misc_feature 1..20: note = chemically synthesized
  source 1..20: mol_type = other DNA
gtgtccaaagtttgttactt

SEQ ID NO: 5254 - DNA, 20 bp, synthetic construct
  misc_feature 1..20: note = chemically synthesized
  source 1..20: mol_type = other DNA
tttgttacttcagatgtgtc

SEQ ID NO: 5255 - DNA, 20 bp, synthetic construct
  misc_feature 1..20: note = chemically synthesized
  source 1..20: mol_type = other DNA
tgttacttcagatgtgtcca

SEQ ID NO: 5256 - DNA, 20 bp, synthetic construct
  misc_feature 1..20: note = chemically synthesized
  source 1..20: mol_type = other DNA
tgtccagagtttcttccttc

SEQ ID NO: 5257 - DNA, 20 bp, synthetic construct
  misc_feature 1..20: note = chemically synthesized
  source 1..20: mol_type = other DNA
tcttccttctggtgtgttca

SEQ ID NO: 5258 - DNA, 20 bp, synthetic construct
  misc_feature 1..20: note = chemically synthesized
  source 1..20: mol_type = other DNA
tggtgtgttcacggtcttgc

SEQ ID NO: 5259 - DNA, 20 bp, synthetic construct
  misc_feature 1..20: note = chemically synthesized
  source 1..20: mol_type = other DNA
gttcacggtcttgctggctc

SEQ ID NO: 5260 - DNA, 20 bp, synthetic construct
  misc_feature 1..20: note = chemically synthesized
  source 1..20: mol_type = other DNA
ttcacggtcttgctggctcc

SEQ ID NO: 5261 - DNA, 20 bp, synthetic construct
  misc_feature 1..20: note = chemically synthesized
  source 1..20: mol_type = other DNA
cacggtcttgctggctccag

SEQ ID NO: 5262 - DNA, 20 bp, synthetic construct
  misc_feature 1..20: note = chemically synthesized
  source 1..20: mol_type = other DNA
tcttgctggctccaggagtg

SEQ ID NO: 5263 - DNA, 20 bp, synthetic construct
  misc_feature 1..20: note = chemically synthesized
  source 1..20: mol_type = other DNA
tggctccaggagtgaagctg

SEQ ID NO: 5264 - DNA, 20 bp, synthetic construct
  misc_feature 1..20: note = chemically synthesized
  source 1..20: mol_type = other DNA
agtgaagctgcagaccccca

SEQ ID NO: 5265 - DNA, 20 bp, synthetic construct
  misc_feature 1..20: note = chemically synthesized
  source 1..20: mol_type = other DNA
gtgaagctgcagacccccac

SEQ ID NO: 5266 - DNA, 20 bp, synthetic construct
  misc_feature 1..20: note = chemically synthesized
  source 1..20: mol_type = other DNA
tgaagctgcagacccccacg

SEQ ID NO: 5267 - DNA, 20 bp, synthetic construct
  misc_feature 1..20: note = chemically synthesized
  source 1..20: mol_type = other DNA
aagctgcagacccccacggg

SEQ ID NO: 5268 - DNA, 20 bp, synthetic construct
  misc_feature 1..20: note = chemically synthesized
  source 1..20: mol_type = other DNA
gacccccacggggagtgtta

SEQ ID NO: 5269 - DNA, 20 bp, synthetic construct
  misc_feature 1..20: note = chemically synthesized
  source 1..20: mol_type = other DNA
ggggagtgttacagctctta

SEQ ID NO: 5270 - DNA, 20 bp, synthetic construct
  misc_feature 1..20: note = chemically synthesized
  source 1..20: mol_type = other DNA
gggagtgttacagctcttaa

SEQ ID NO: 5271 - DNA, 20 bp, synthetic construct
  misc_feature 1..20: note = chemically synthesized
  source 1..20: mol_type = other DNA
agtgttacagctcttaaagg

SEQ ID NO: 5272 - DNA, 20 bp, synthetic construct
  misc_feature 1..20: note = chemically synthesized
  source 1..20: mol_type = other DNA
tgttacagctcttaaaggcg

SEQ ID NO: 5273 - DNA, 20 bp, synthetic construct
  misc_feature 1..20: note = chemically synthesized
  source 1..20: mol_type = other DNA
gctcttaaaggcggagcgta

SEQ ID NO: 5274 - DNA, 20 bp, synthetic construct
  misc_feature 1..20: note = chemically synthesized
  source 1..20: mol_type = other DNA
tcttaaaggcggagcgtatg

SEQ ID NO: 5275 - DNA, 20 bp, synthetic construct
  misc_feature 1..20: note = chemically synthesized
  source 1..20: mol_type = other DNA
gttgctcattcctcctgtct

SEQ ID NO: 5276 - DNA, 20 bp, synthetic construct
  misc_feature 1..20: note = chemically synthesized
  source 1..20: mol_type = other DNA
ttgctcattcctcctgtctt

SEQ ID NO: 5277 - DNA, 20 bp, synthetic construct
  misc_feature 1..20: note = chemically synthesized
  source 1..20: mol_type = other DNA
gggttgttcatcccccatgc

SEQ ID NO: 5278 - DNA, 20 bp, synthetic construct
  misc_feature 1..20: note = chemically synthesized
  source 1..20: mol_type = other DNA
ggttgttcatcccccatgct

SEQ ID NO: 5279 - DNA, 20 bp, synthetic construct
  misc_feature 1..20: note = chemically synthesized
  source 1..20: mol_type = other DNA
catcccccatgctgggttcg

SEQ ID NO: 5280 - DNA, 20 bp, synthetic construct
  misc_feature 1..20: note = chemically synthesized
  source 1..20: mol_type = other DNA
tgctgggttcgtggtcttgc

SEQ ID NO: 5281 - DNA, 20 bp, synthetic construct
  misc_feature 1..20: note = chemically synthesized
  source 1..20: mol_type = other DNA
gttcgtggtcttgctggctt

SEQ ID NO: 5282 - DNA, 20 bp, synthetic construct
  misc_feature 1..20: note = chemically synthesized
  source 1..20: mol_type = other DNA
cgtggtcttgctggcttcag

SEQ ID NO: 5283 - DNA, 20 bp, synthetic construct
  misc_feature 1..20: note = chemically synthesized
  source 1..20: mol_type = other DNA
tcttgctggcttcagaagtg

SEQ ID NO: 5284 - DNA, 20 bp, synthetic construct
  misc_feature 1..20: note = chemically synthesized
  source 1..20: mol_type = other DNA
tggcttcagaagtgaagccg

SEQ ID NO: 5285 - DNA, 20 bp, synthetic construct
  misc_feature 1..20: note = chemically synthesized
  source 1..20: mol_type = other DNA
agtgaagccgcagaccttcg

SEQ ID NO: 5286 - DNA, 20 bp, synthetic construct
  misc_feature 1..20: note = chemically synthesized
  source 1..20: mol_type = other DNA
aagccgcagaccttcgcagt

SEQ ID NO: 5287 - DNA, 20 bp, synthetic construct
  misc_feature 1..20: note = chemically synthesized
  source 1..20: mol_type = other DNA
gaccttcgcagtgagtgtta

SEQ ID NO: 5288 - DNA, 20 bp, synthetic construct
  misc_feature 1..20: note = chemically synthesized
  source 1..20: mol_type = other DNA
agtgagtgttacagctcata

SEQ ID NO: 5289 - DNA, 20 bp, synthetic construct
  misc_feature 1..20: note = chemically synthesized
  source 1..20: mol_type = other DNA
gtgagtgttacagctcataa

SEQ ID NO: 5290 - DNA, 20 bp, synthetic construct
  misc_feature 1..20: note = chemically synthesized
  source 1..20: mol_type = other DNA
agtgttacagctcataaagg

SEQ ID NO: 5291 - DNA, 20 bp, synthetic construct
  misc_feature 1..20: note = chemically synthesized
  source 1..20: mol_type = other DNA
tacagctcataaaggcagcg

SEQ ID NO: 5292 - DNA, 20 bp, synthetic construct
  misc_feature 1..20: note = chemically synthesized
  source 1..20: mol_type = other DNA
ataaaggcagcgcggatcca

SEQ ID NO: 5293 - DNA, 20 bp, synthetic construct
  misc_feature 1..20: note = chemically synthesized
  source 1..20: mol_type = other DNA
aaaggcagcgcggatccaaa

SEQ ID NO: 5294 - DNA, 20 bp, synthetic construct
  misc_feature 1..20: note = chemically synthesized
  source 1..20: mol_type = other DNA
gcagcgcggatccaaagagt

SEQ ID NO: 5295 - DNA, 20 bp, synthetic construct
  misc_feature 1..20: note = chemically synthesized
  source 1..20: mol_type = other DNA
gcgcggatccaaagagtgag

SEQ ID NO: 5296 - DNA, 20 bp, synthetic construct
  misc_feature 1..20: note = chemically synthesized
  source 1..20: mol_type = other DNA
cggatccaaagagtgagcag

SEQ ID NO: 5297 - DNA, 20 bp, synthetic construct
  misc_feature 1..20: note = chemically synthesized
  source 1..20: mol_type = other DNA
tccaaagagtgagcagcagt

SEQ ID NO: 5298 - DNA, 20 bp, synthetic construct
  misc_feature 1..20: note = chemically synthesized
  source 1..20: mol_type = other DNA
cagcagtaagatttattgtg

SEQ ID NO: 5299 - DNA, 20 bp, synthetic construct
  misc_feature 1..20: note = chemically synthesized
  source 1..20: mol_type = other DNA
agatttattgtgaagaataa

SEQ ID NO: 5300 - DNA, 20 bp, synthetic construct
  misc_feature 1..20: note = chemically synthesized
  source 1..20: mol_type = other DNA
ttgtgaagaataaaagaaca

SEQ ID NO: 5301 - DNA, 20 bp, synthetic construct
  misc_feature 1..20: note = chemically synthesized
  source 1..20: mol_type = other DNA
ataaaagaacaaagcttcca

SEQ ID NO: 5302 - DNA, 20 bp, synthetic construct
  misc_feature 1..20: note = chemically synthesized
  source 1..20: mol_type = other DNA
agaacaaagcttccacagca

SEQ ID NO: 5303 - DNA, 20 bp, synthetic construct
  misc_feature 1..20: note = chemically synthesized
  source 1..20: mol_type = other DNA
acaaagcttccacagcatgg

SEQ ID NO: 5304 - DNA, 20 bp, synthetic construct
  misc_feature 1..20: note = chemically synthesized
  source 1..20: mol_type = other DNA
caaagcttccacagcatggt

SEQ ID NO: 5305 - DNA, 20 bp, synthetic construct
  misc_feature 1..20: note = chemically synthesized
  source 1..20: mol_type = other DNA
aaagcttccacagcatggta

SEQ ID NO: 5306 - DNA, 20 bp, synthetic construct
  misc_feature 1..20: note = chemically synthesized
  source 1..20: mol_type = other DNA
cacagcatggtagggaaccc

SEQ ID NO: 5307 - DNA, 20 bp, synthetic construct
  misc_feature 1..20: note = chemically synthesized
  source 1..20: mol_type = other DNA
gcatggtagggaacccaagt

SEQ ID NO: 5308 - DNA, 20 bp, synthetic construct
  misc_feature 1..20: note = chemically synthesized
  source 1..20: mol_type = other DNA
ggaacccaagtcagttgtca

SEQ ID NO: 5309 - DNA, 20 bp, synthetic construct
  misc_feature 1..20: note = chemically synthesized
  source 1..20: mol_type = other DNA
cccaagtcagttgtcacagc

SEQ ID NO: 5310 - DNA, 20 bp, synthetic construct
  misc_feature 1..20: note = chemically synthesized
  source 1..20: mol_type = other DNA
tcagttgtcacagctggctc

SEQ ID NO: 5311 - DNA, 20 bp, synthetic construct
  misc_feature 1..20: note = chemically synthesized
  source 1..20: mol_type = other DNA
gttgtcacagctggctccgg

SEQ ID NO: 5312 - DNA, 20 bp, synthetic construct
  misc_feature 1..20: note = chemically synthesized
  source 1..20: mol_type = other DNA
cccacccacatcctgctgat

SEQ ID NO: 5313 - DNA, 20 bp, synthetic construct
  misc_feature 1..20: note = chemically synthesized
  source 1..20: mol_type = other DNA
ctgctgattggtccatttta

SEQ ID NO: 5314 - DNA, 20 bp, synthetic construct
  misc_feature 1..20: note = chemically synthesized
  source 1..20: mol_type = other DNA
gctgattggtccattttaca

SEQ ID NO: 5315 - DNA, 20 bp, synthetic construct
  misc_feature 1..20: note = chemically synthesized
  source 1..20: mol_type = other DNA
tgattggtccattttacaga

SEQ ID NO: 5316 - DNA, 20 bp, synthetic construct
  misc_feature 1..20: note = chemically synthesized
  source 1..20: mol_type = other DNA
ccattttacagagagctgat

SEQ ID NO: 5317 - DNA, 20 bp, synthetic construct
  misc_feature 1..20: note = chemically synthesized
  source 1..20: mol_type = other DNA
gagctgattggcccatttta

SEQ ID NO: 5318 - DNA, 20 bp, synthetic construct
  misc_feature 1..20: note = chemically synthesized
  source 1..20: mol_type = other DNA
gctgattggcccattttaca

SEQ ID NO: 5319 - DNA, 20 bp, synthetic construct
  misc_feature 1..20: note = chemically synthesized
  source 1..20: mol_type = other DNA
tgattggcccattttacaga

SEQ ID NO: 5320 - DNA, 20 bp, synthetic construct
  misc_feature 1..20: note = chemically synthesized
  source 1..20: mol_type = other DNA
tggcccattttacagagagc

SEQ ID NO: 5321 - DNA, 20 bp, synthetic construct
  misc_feature 1..20: note = chemically synthesized
  source 1..20: mol_type = other DNA
ccattttacagagagctggt

SEQ ID NO: 5322 - DNA, 20 bp, synthetic construct
  misc_feature 1..20: note = chemically synthesized
  source 1..20: mol_type = other DNA
gagagctggttggtccgttt

SEQ ID NO: 5323 - DNA, 20 bp, synthetic construct
  misc_feature 1..20: note = chemically synthesized
  source 1..20: mol_type = other DNA
agctggttggtccgttttgg

SEQ ID NO: 5324 - DNA, 20 bp, synthetic construct
  misc_feature 1..20: note = chemically synthesized
  source 1..20: mol_type = other DNA
ctggttggtccgttttggca

SEQ ID NO: 5325 - DNA, 20 bp, synthetic construct
  misc_feature 1..20: note = chemically synthesized
  source 1..20: mol_type = other DNA
cgttttggcagagtgctgat

SEQ ID NO: 5326 - DNA, 20 bp, synthetic construct
  misc_feature 1..20: note = chemically synthesized
  source 1..20: mol_type = other DNA
ttggtgcatttacaaacctt

SEQ ID NO: 5327 - DNA, 20 bp, synthetic construct
  misc_feature 1..20: note = chemically synthesized
  source 1..20: mol_type = other DNA
tgcatttacaaaccttgagc

SEQ ID NO: 5328 - DNA, 20 bp, synthetic construct
  misc_feature 1..20: note = chemically synthesized
  source 1..20: mol_type = other DNA
tacaaaccttgagctagaca

SEQ ID NO: 5329 - DNA, 20 bp, synthetic construct
  misc_feature 1..20: note = chemically synthesized
  source 1..20: mol_type = other DNA
caaaccttgagctagacaca

SEQ ID NO: 5330 - DNA, 20 bp, synthetic construct
  misc_feature 1..20: note = chemically synthesized
  source 1..20: mol_type = other DNA
gctagacacagagtgctgat

SEQ ID NO: 5331 - DNA, 20 bp, synthetic construct
  misc_feature 1..20: note = chemically synthesized
  source 1..20: mol_type = other DNA
ttagtgcatttacaatcctt

SEQ ID NO: 5332 - DNA, 20 bp, synthetic construct
  misc_feature 1..20: note = chemically synthesized
  source 1..20: mol_type = other DNA
tgcatttacaatcctttagc

SEQ ID NO: 5333 - DNA, 20 bp, synthetic construct
  misc_feature 1..20: note = chemically synthesized
  source 1..20: mol_type = other DNA
aatcctttagctagacacaa

SEQ ID NO: 5334 - DNA, 20 bp, synthetic construct
  misc_feature 1..20: note = chemically synthesized
  source 1..20: mol_type = other DNA
gctagacacaaaagttctcc

SEQ ID NO: 5335 - DNA, 20 bp, synthetic construct
  misc_feature 1..20: note = chemically synthesized
  source 1..20: mol_type = other DNA
aaagttctccaagtccccac

SEQ ID NO: 5336 - DNA, 20 bp, synthetic construct
  misc_feature 1..20: note = chemically synthesized
  source 1..20: mol_type = other DNA
tctccaagtccccactagat

SEQ ID NO: 5337 - DNA, 20 bp, synthetic construct
  misc_feature 1..20: note = chemically synthesized
  source 1..20: mol_type = other DNA
caagtccccactagattagc

SEQ ID NO: 5338 - DNA, 20 bp, synthetic construct
  misc_feature 1..20: note = chemically synthesized
  source 1..20: mol_type = other DNA
cccactagattagctagaca

SEQ ID NO: 5339 - DNA, 20 bp, synthetic construct
  misc_feature 1..20: note = chemically synthesized
  source 1..20: mol_type = other DNA
cactagattagctagacaca

SEQ ID NO: 5340 - DNA, 20 bp, synthetic construct
  misc_feature 1..20: note = chemically synthesized
  source 1..20: mol_type = other DNA
gctagacacagagcactgat

SEQ ID NO: 5341 - DNA, 20 bp, synthetic construct
  misc_feature 1..20: note = chemically synthesized
  source 1..20: mol_type = other DNA
ttggtgcatttacaaacctt

SEQ ID NO: 5342 - DNA, 20 bp, synthetic construct
  misc_feature 1..20: note = chemically synthesized
  source 1..20: mol_type = other DNA
tgcatttacaaaccttgagt

SEQ ID NO: 5343 - DNA, 20 bp, synthetic construct
  misc_feature 1..20: note = chemically synthesized
  source 1..20: mol_type = other DNA
tacaaaccttgagttagaca

SEQ ID NO: 5344 - DNA, 20 bp, synthetic construct
  misc_feature 1..20: note = chemically synthesized
  source 1..20: mol_type = other DNA
gttagacacagattgctgat

SEQ ID NO: 5345 - DNA, 20 bp, synthetic construct
  misc_feature 1..20: note = chemically synthesized
  source 1..20: mol_type = other DNA
ttggtgcatttacaaacctt

SEQ ID NO: 5346 - DNA, 20 bp, synthetic construct
  misc_feature 1..20: note = chemically synthesized
  source 1..20: mol_type = other DNA
tgcatttacaaacctttagc

SEQ ID NO: 5347 - DNA, 20 bp, synthetic construct
  misc_feature 1..20: note = chemically synthesized
  source 1..20: mol_type = other DNA
aaacctttagctagacatga

SEQ ID NO: 5348 - DNA, 20 bp, synthetic construct
  misc_feature 1..20: note = chemically synthesized
  source 1..20: mol_type = other DNA
agctagacatgaaagttctc

SEQ ID NO: 5349 - DNA, 20 bp, synthetic construct
  misc_feature 1..20: note = chemically synthesized
  source 1..20: mol_type = other DNA
ttctccagttccatatttca

SEQ ID NO: 5350 - DNA, 20 bp, synthetic construct
  misc_feature 1..20: note = chemically synthesized
  source 1..20: mol_type = other DNA
ccagttccatatttcatggt

SEQ ID NO: 5351 - DNA, 20 bp, synthetic construct
  misc_feature 1..20: note = chemically synthesized
  source 1..20: mol_type = other DNA
cagttccatatttcatggtg

SEQ ID NO: 5352 - DNA, 20 bp, synthetic construct
  misc_feature 1..20: note = chemically synthesized
  source 1..20: mol_type = other DNA
atatttcatggtgaggaaca

SEQ ID NO: 5353 - DNA, 20 bp, synthetic construct
  misc_feature 1..20: note = chemically synthesized
  source 1..20: mol_type = other DNA
atggtgaggaacaaagaata

SEQ ID NO: 5354 - DNA, 20 bp, synthetic construct
  misc_feature 1..20: note = chemically synthesized
  source 1..20: mol_type = other DNA
gtgaggaacaaagaatatag

SEQ ID NO: 5355 - DNA, 20 bp, synthetic construct
  misc_feature 1..20: note = chemically synthesized
  source 1..20: mol_type = other DNA
tgaggaacaaagaatatagt

SEQ ID NO: 5356 - DNA, 20 bp, synthetic construct
  misc_feature 1..20: note = chemically synthesized
  source 1..20: mol_type = other DNA
gaggaacaaagaatatagtg

SEQ ID NO: 5357 - DNA, 20 bp, synthetic construct
  misc_feature 1..20: note = chemically synthesized
  source 1..20: mol_type = other DNA
ttgttcctcaccatgaaata

SEQ ID NO: 5358 - DNA, 20 bp, synthetic construct
  misc_feature 1..20: note = chemically synthesized
  source 1..20: mol_type = other DNA
ctcaccatgaaatatggaac

SEQ ID NO: 5359 - DNA, 20 bp, synthetic construct
  misc_feature 1..20: note = chemically synthesized
  source 1..20: mol_type = other DNA
caccatgaaatatggaactg

SEQ ID NO: 5360 - DNA, 20 bp, synthetic construct
  misc_feature 1..20: note = chemically synthesized
  source 1..20: mol_type = other DNA
aactggagaactttcatgtc

SEQ ID NO: 5361 - DNA, 20 bp, synthetic construct
  misc_feature 1..20: note = chemically synthesized
  source 1..20: mol_type = other DNA
agaactttcatgtctagcta

SEQ ID NO: 5362 - DNA, 20 bp, synthetic construct
  misc_feature 1..20: note = chemically synthesized
  source 1..20: mol_type = other DNA
gaactttcatgtctagctaa

SEQ ID NO: 5363 - DNA, 20 bp, synthetic construct
  misc_feature 1..20: note = chemically synthesized
  source 1..20: mol_type = other DNA
tttgtaaatgcaatttattg

SEQ ID NO: 5364 - DNA, 20 bp, synthetic construct
  misc_feature 1..20: note = chemically synthesized
  source 1..20: mol_type = other DNA
tattgcggcactattcacaa

SEQ ID NO: 5365 - DNA, 20 bp, synthetic construct
  misc_feature 1..20: note = chemically synthesized
  source 1..20: mol_type = other DNA
cggcactattcacaatagca

SEQ ID NO: 5366 - DNA, 20 bp, synthetic construct
  misc_feature 1..20: note = chemically synthesized
  source 1..20: mol_type = other DNA
tattcacaatagcaaagact

SEQ ID NO: 5367 - DNA, 20 bp, synthetic construct
  misc_feature 1..20: note = chemically synthesized
  source 1..20: mol_type = other DNA
acccaaatgtccaacaatga

SEQ ID NO: 5368 - DNA, 20 bp, synthetic construct
  misc_feature 1..20: note = chemically synthesized
  source 1..20: mol_type = other DNA
aatgtccaacaatgatagac

SEQ ID NO: 5369 - DNA, 20 bp, synthetic construct
  misc_feature 1..20: note = chemically synthesized
  source 1..20: mol_type = other DNA
caacaatgatagactggatt

SEQ ID NO: 5370 - DNA, 20 bp, synthetic construct
  misc_feature 1..20: note = chemically synthesized
  source 1..20: mol_type = other DNA
tagactggattaagaaaatg

SEQ ID NO: 5371 - DNA, 20 bp, synthetic construct
  misc_feature 1..20: note = chemically synthesized
  source 1..20: mol_type = other DNA
aatgtggcacatacacacca

SEQ ID NO: 5372 - DNA, 20 bp, synthetic construct
  misc_feature 1..20: note = chemically synthesized
  source 1..20: mol_type = other DNA
acacaccatggaatactatg

SEQ ID NO: 5373 - DNA, 20 bp, synthetic construct
  misc_feature 1..20: note = chemically synthesized
  source 1..20: mol_type = other DNA
aatactatgcagccataaaa

SEQ ID NO: 5374 - DNA, 20 bp, synthetic construct
  misc_feature 1..20: note = chemically synthesized
  source 1..20: mol_type = other DNA
atactatgcagccataaaaa

SEQ ID NO: 5375 - DNA, 20 bp, synthetic construct
  misc_feature 1..20: note = chemically synthesized
  source 1..20: mol_type = other DNA
atgcagccataaaaaaggat

SEQ ID NO: 5376 - DNA, 20 bp, synthetic construct
  misc_feature 1..20: note = chemically synthesized
  source 1..20: mol_type = other DNA
ggatgagttcatgtcctttg

SEQ ID NO: 5377 - DNA, 20 bp, synthetic construct
  misc_feature 1..20: note = chemically synthesized
  source 1..20: mol_type = other DNA
gatgagttcatgtcctttgt

SEQ ID NO: 5378 - DNA, 20 bp, synthetic construct
  misc_feature 1..20: note = chemically synthesized
  source 1..20: mol_type = other DNA
atgagttcatgtcctttgta

SEQ ID NO: 5379 - DNA, 20 bp, synthetic construct
  misc_feature 1..20: note = chemically synthesized
  source 1..20: mol_type = other DNA
tcatgtcctttgtagggaca

SEQ ID NO: 5380 - DNA, 20 bp, synthetic construct
  misc_feature 1..20: note = chemically synthesized
  source 1..20: mol_type = other DNA
tgtagggacatggatgaaat

SEQ ID NO: 5381 - DNA, 20 bp, synthetic construct
  misc_feature 1..20: note = chemically synthesized
  source 1..20: mol_type = other DNA
aaattggaaatcatcattct

SEQ ID NO: 5382 - DNA, 20 bp, synthetic construct
  misc_feature 1..20: note = chemically synthesized
  source 1..20: mol_type = other DNA
cattctcagtaaactatcgc

SEQ ID NO: 5383 - DNA, 20 bp, synthetic construct
  misc_feature 1..20: note = chemically synthesized
  source 1..20: mol_type = other DNA
attctcagtaaactatcgca

SEQ ID NO: 5384 - DNA, 20 bp, synthetic construct
  misc_feature 1..20: note = chemically synthesized
  source 1..20: mol_type = other DNA
acactgcatgttctcactca

SEQ ID NO: 5385 - DNA, 20 bp, synthetic construct
  misc_feature 1..20: note = chemically synthesized
  source 1..20: mol_type = other DNA
cactgcatgttctcactcat

SEQ ID NO: 5386 - DNA, 20 bp, synthetic construct
  misc_feature 1..20: note = chemically synthesized
  source 1..20: mol_type = other DNA
tgcatgttctcactcatagg

SEQ ID NO: 5387 - DNA, 20 bp, synthetic construct
  misc_feature 1..20: note = chemically synthesized
  source 1..20: mol_type = other DNA
gcatgttctcactcataggt

SEQ ID NO: 5388 - DNA, 20 bp, synthetic construct
  misc_feature 1..20: note = chemically synthesized
  source 1..20: mol_type = other DNA
ataggtgggaattgaacaat

SEQ ID NO: 5389 - DNA, 20 bp, synthetic construct
  misc_feature 1..20: note = chemically synthesized
  source 1..20: mol_type = other DNA
aattgaacaatgagaacaca

SEQ ID NO: 5390 - DNA, 20 bp, synthetic construct
  misc_feature 1..20: note = chemically synthesized
  source 1..20: mol_type = other DNA
acaatgagaacacatggaca

SEQ ID NO: 5391 - DNA, 20 bp, synthetic construct
  misc_feature 1..20: note = chemically synthesized
  source 1..20: mol_type = other DNA
caatgagaacacatggacac

SEQ ID NO: 5392 - DNA, 20 bp, synthetic construct
  misc_feature 1..20: note = chemically synthesized
  source 1..20: mol_type = other DNA
tgagaacacatggacacagg

SEQ ID NO: 5393 - DNA, 20 bp, synthetic construct
  misc_feature 1..20: note = chemically synthesized
  source 1..20: mol_type = other DNA
gagaacacatggacacagga

SEQ ID NO: 5394 - DNA, 20 bp, synthetic construct
  misc_feature 1..20: note = chemically synthesized
  source 1..20: mol_type = other DNA
agaacacatggacacaggaa

SEQ ID NO: 5395 - DNA, 20 bp, synthetic construct
  misc_feature 1..20: note = chemically synthesized
  source 1..20: mol_type = other DNA
gaacacatggacacaggaag

SEQ ID NO: 5396 - DNA, 20 bp, synthetic construct
  misc_feature 1..20: note = chemically synthesized
  source 1..20: mol_type = other DNA
ggaaggggaacatcacactc

SEQ ID NO: 5397 - DNA, 20 bp, synthetic construct
  misc_feature 1..20: note = chemically synthesized
  source 1..20: mol_type = other DNA
gaaggggaacatcacactct

SEQ ID NO: 5398 - DNA, 20 bp, synthetic construct
  misc_feature 1..20: note = chemically synthesized
  source 1..20: mol_type = other DNA
aaggggaacatcacactctg

SEQ ID NO: 5399 - DNA, 20 bp, synthetic construct
  misc_feature 1..20: note = chemically synthesized
  source 1..20: mol_type = other DNA
tcacactctggggactgttg

SEQ ID NO: 5400 - DNA, 20 bp, synthetic construct
  misc_feature 1..20: note = chemically synthesized
  source 1..20: mol_type = other DNA
cacactctggggactgttgt

SEQ ID NO: 5401 - DNA, 20 bp, synthetic construct
  misc_feature 1..20: note = chemically synthesized
  source 1..20: mol_type = other DNA
acactctggggactgttgtg

SEQ ID NO: 5402 - DNA, 20 bp, synthetic construct
  misc_feature 1..20: note = chemically synthesized
  source 1..20: mol_type = other DNA
ctctggggactgttgtgggg

SEQ ID NO: 5403 - DNA, 20 bp, synthetic construct
  misc_feature 1..20: note = chemically synthesized
  source 1..20: mol_type = other DNA
tctggggactgttgtggggt

SEQ ID NO: 5404 - DNA, 20 bp, synthetic construct
  misc_feature 1..20: note = chemically synthesized
  source 1..20: mol_type = other DNA
ctggggactgttgtggggtg

SEQ ID NO: 5405 - DNA, 20 bp, synthetic construct
  misc_feature 1..20: note = chemically synthesized
  source 1..20: mol_type = other DNA
tggggactgttgtggggtgg

SEQ ID NO: 5406 - DNA, 20 bp, synthetic construct
  misc_feature 1..20: note = chemically synthesized
  source 1..20: mol_type = other DNA
ggggactgttgtggggtggg

SEQ ID NO: 5407 - DNA, 20 bp, synthetic construct
  misc_feature 1..20: note = chemically synthesized
  source 1..20: mol_type = other DNA
ggactgttgtggggtggggg

SEQ ID NO: 5408 - DNA, 20 bp, synthetic construct
  misc_feature 1..20: note = chemically synthesized
  source 1..20: mol_type = other DNA
gactgttgtggggtgggggg

SEQ ID NO: 5409 - DNA, 20 bp, synthetic construct
  misc_feature 1..20: note = chemically synthesized
  source 1..20: mol_type = other DNA
actgttgtggggtgggggga

SEQ ID NO: 5410 - DNA, 20 bp, synthetic construct
  misc_feature 1..20: note = chemically synthesized
  source 1..20: mol_type = other DNA
tgttgtggggtggggggagg

SEQ ID NO: 5411 - DNA, 20 bp, synthetic construct
  misc_feature 1..20: note = chemically synthesized
  source 1..20: mol_type = other DNA
gttgtggggtggggggaggg

SEQ ID NO: 5412 - DNA, 20 bp, synthetic construct
  misc_feature 1..20: note = chemically synthesized
  source 1..20: mol_type = other DNA
tgtggggtggggggagggag

SEQ ID NO: 5413 - DNA, 20 bp, synthetic construct
  misc_feature 1..20: note = chemically synthesized
  source 1..20: mol_type = other DNA
gtggggtggggggagggagg

SEQ ID NO: 5414 - DNA, 20 bp, synthetic construct
  misc_feature 1..20: note = chemically synthesized
  source 1..20: mol_type = other DNA
tggggtggggggagggagga

SEQ ID NO: 5415 - DNA, 20 bp, synthetic construct
  misc_feature 1..20: note = chemically synthesized
  source 1..20: mol_type = other DNA
gtggggggagggaggaggga

SEQ ID NO: 5416 - DNA, 20 bp, synthetic construct
  misc_feature 1..20: note = chemically synthesized
  source 1..20: mol_type = other DNA
ggagggaggagggatagcat

SEQ ID NO: 5417 - DNA, 20 bp, synthetic construct
  misc_feature 1..20: note = chemically synthesized
  source 1..20: mol_type = other DNA
gagggaggagggatagcatt

SEQ ID NO: 5418 - DNA, 20 bp, synthetic construct
  misc_feature 1..20: note = chemically synthesized
  source 1..20: mol_type = other DNA
gggaggagggatagcattag

SEQ ID NO: 5419 - DNA, 20 bp, synthetic construct
  misc_feature 1..20: note = chemically synthesized
  source 1..20: mol_type = other DNA
tatacctaatgctaaatgat

SEQ ID NO: 5420 - DNA, 20 bp, synthetic construct
  misc_feature 1..20: note = chemically synthesized
  source 1..20: mol_type = other DNA
aatgctaaatgatgagttaa

SEQ ID NO: 5421 - DNA, 20 bp, synthetic construct
  misc_feature 1..20: note = chemically synthesized
  source 1..20: mol_type = other DNA
atgctaaatgatgagttaat

SEQ ID NO: 5422 - DNA, 20 bp, synthetic construct
  misc_feature 1..20: note = chemically synthesized
  source 1..20: mol_type = other DNA
aaatgatgagttaatgggtg

SEQ ID NO: 5423 - DNA, 20 bp, synthetic construct
  misc_feature 1..20: note = chemically synthesized
  source 1..20: mol_type = other DNA
agttaatgggtgaagcacac

SEQ ID NO: 5424 - DNA, 20 bp, synthetic construct
  misc_feature 1..20: note = chemically synthesized
  source 1..20: mol_type = other DNA
atgggtgaagcacaccagca

SEQ ID NO: 5425 - DNA, 20 bp, synthetic construct
  misc_feature 1..20: note = chemically synthesized
  source 1..20: mol_type = other DNA
cacatgtaccctaaaactta

SEQ ID NO: 5426 - DNA, 20 bp, synthetic construct
  misc_feature 1..20: note = chemically synthesized
  source 1..20: mol_type = other DNA
taaaataaaataattttaaa

SEQ ID NO: 5427 - DNA, 20 bp, synthetic construct
  misc_feature 1..20: note = chemically synthesized
  source 1..20: mol_type = other DNA
aaataaaataattttaaaaa

SEQ ID NO: 5428 - DNA, 20 bp, synthetic construct
  misc_feature 1..20: note = chemically synthesized
  source 1..20: mol_type = other DNA
aaataattttaaaaagagta

SEQ ID NO: 5429 - DNA, 20 bp, synthetic construct
  misc_feature 1..20: note = chemically synthesized
  source 1..20: mol_type = other DNA
taattttaaaaagagtatag

SEQ ID NO: 5430 - DNA, 20 bp, synthetic construct
  misc_feature 1..20: note = chemically synthesized
  source 1..20: mol_type = other DNA
aattttaaaaagagtatagt

SEQ ID NO: 5431 - DNA, 20 bp, synthetic construct
  misc_feature 1..20: note = chemically synthesized
  source 1..20: mol_type = other DNA
attttaaaaagagtatagtg

SEQ ID NO: 5432 - DNA, 20 bp, synthetic construct
  misc_feature 1..20: note = chemically synthesized
  source 1..20: mol_type = other DNA
agtggggatttctatgaaca

SEQ ID NO: 5433 - DNA, 20 bp, synthetic construct
  misc_feature 1..20: note = chemically synthesized
  source 1..20: mol_type = other DNA
ttctatgaacacggtacaat

SEQ ID NO: 5434 - DNA, 20 bp, synthetic construct
  misc_feature 1..20: note = chemically synthesized
  source 1..20: mol_type = other DNA
acacggtacaattagttatc

SEQ ID NO: 5435 - DNA, 20 bp, synthetic construct
  misc_feature 1..20: note = chemically synthesized
  source 1..20: mol_type = other DNA
ggtacaattagttatctggc

SEQ ID NO: 5436 - DNA, 20 bp, synthetic construct
  misc_feature 1..20: note = chemically synthesized
  source 1..20: mol_type = other DNA
ttatctggccagttactttg

SEQ ID NO: 5437 - DNA, 20 bp, synthetic construct
  misc_feature 1..20: note = chemically synthesized
  source 1..20: mol_type = other DNA
tatctggccagttactttga

SEQ ID NO: 5438 - DNA, 20 bp, synthetic construct
  misc_feature 1..20: note = chemically synthesized
  source 1..20: mol_type = other DNA
cagttactttgaaggctgat

SEQ ID NO: 5439 - DNA, 20 bp, synthetic construct
  misc_feature 1..20: note = chemically synthesized
  source 1..20: mol_type = other DNA
tactttgaaggctgatcaga

SEQ ID NO: 5440 - DNA, 20 bp, synthetic construct
  misc_feature 1..20: note = chemically synthesized
  source 1..20: mol_type = other DNA
tttgaaggctgatcagaaag

SEQ ID NO: 5441 - DNA, 20 bp, synthetic construct
  misc_feature 1..20: note = chemically synthesized
  source 1..20: mol_type = other DNA
aggctgatcagaaagaagcc

SEQ ID NO: 5442 - DNA, 20 bp, synthetic construct
  misc_feature 1..20: note = chemically synthesized
  source 1..20: mol_type = other DNA
agaaagaagcctagctaatc

SEQ ID NO: 5443 - DNA, 20 bp, synthetic construct
  misc_feature 1..20: note = chemically synthesized
  source 1..20: mol_type = other DNA
agaagcctagctaatccagt

SEQ ID NO: 5444 - DNA, 20 bp, synthetic construct
  misc_feature 1..20: note = chemically synthesized
  source 1..20: mol_type = other DNA
actcaaatgccaatatctat

SEQ ID NO: 5445 - DNA, 20 bp, synthetic construct
  misc_feature 1..20: note = chemically synthesized
  source 1..20: mol_type = other DNA
atctattagtcctttctctt

SEQ ID NO: 5446 - DNA, 20 bp, synthetic construct
  misc_feature 1..20: note = chemically synthesized
  source 1..20: mol_type = other DNA
attagtcctttctcttgaga

SEQ ID NO: 5447 - DNA, 20 bp, synthetic construct
  misc_feature 1..20: note = chemically synthesized
  source 1..20: mol_type = other DNA
ctgtttcatatattacacct

SEQ ID NO: 5448 - DNA, 20 bp, synthetic construct
  misc_feature 1..20: note = chemically synthesized
  source 1..20: mol_type = other DNA
catatattacaccttagtcc

SEQ ID NO: 5449 - DNA, 20 bp, synthetic construct
  misc_feature 1..20: note = chemically synthesized
  source 1..20: mol_type = other DNA
atcctttgcactgaatttcc

SEQ ID NO: 5450 - DNA, 20 bp, synthetic construct
  misc_feature 1..20: note = chemically synthesized
  source 1..20: mol_type = other DNA
gcactgaatttcccagtgtc

SEQ ID NO: 5451 - DNA, 20 bp, synthetic construct
  misc_feature 1..20: note = chemically synthesized
  source 1..20: mol_type = other DNA
tgtctggatcatcattgatt

SEQ ID NO: 5452 - DNA, 20 bp, synthetic construct
  misc_feature 1..20: note = chemically synthesized
  source 1..20: mol_type = other DNA
catcattgatttggttacta

SEQ ID NO: 5453 - DNA, 20 bp, synthetic construct
  misc_feature 1..20: note = chemically synthesized
  source 1..20: mol_type = other DNA
acagacactaatcattttgc

SEQ ID NO: 5454 - DNA, 20 bp, synthetic construct
  misc_feature 1..20: note = chemically synthesized
  source 1..20: mol_type = other DNA
taatcattttgccagaacta

SEQ ID NO: 5455 - DNA, 20 bp, synthetic construct
  misc_feature 1..20: note = chemically synthesized
  source 1..20: mol_type = other DNA
atcattttgccagaactaaa

SEQ ID NO: 5456 - DNA, 20 bp, synthetic construct
  misc_feature 1..20: note = chemically synthesized
  source 1..20: mol_type = other DNA
tgccagaactaaagagaaat

SEQ ID NO: 5457 - DNA, 20 bp, synthetic construct
  misc_feature 1..20: note = chemically synthesized
  source 1..20: mol_type = other DNA
actaaagagaaatgagtacc

SEQ ID NO: 5458 - DNA, 20 bp, synthetic construct
  misc_feature 1..20: note = chemically synthesized
  source 1..20: mol_type = other DNA
atgagtacctggctatcttt

SEQ ID NO: 5459 - DNA, 20 bp, synthetic construct
  misc_feature 1..20: note = chemically synthesized
  source 1..20: mol_type = other DNA
tgagtacctggctatctttt

SEQ ID NO: 5460 - DNA, 20 bp, synthetic construct
  misc_feature 1..20: note = chemically synthesized
  source 1..20: mol_type = other DNA
atcttttaggcaaccttaaa

SEQ ID NO: 5461 - DNA, 20 bp, synthetic construct
  misc_feature 1..20: note = chemically synthesized
  source 1..20: mol_type = other DNA
tcttttaggcaaccttaaac

SEQ ID NO: 5462 - DNA, 20 bp, synthetic construct
  misc_feature 1..20: note = chemically synthesized
  source 1..20: mol_type = other DNA
ttcaccttttctaccatttt

SEQ ID NO: 5463 - DNA, 20 bp, synthetic construct
  misc_feature 1..20: note = chemically synthesized
  source 1..20: mol_type = other DNA
acccctcacgaatgctttat

SEQ ID NO: 5464 - DNA, 20 bp, synthetic construct
  misc_feature 1..20: note = chemically synthesized
  source 1..20: mol_type = other DNA
aagtaatttctgtgtttttc

SEQ ID NO: 5465 - DNA, 20 bp, synthetic construct
  misc_feature 1..20: note = chemically synthesized
  source 1..20: mol_type = other DNA
tttccagaaaatgctctttg

SEQ ID NO: 5466 - DNA, 20 bp, synthetic construct
  misc_feature 1..20: note = chemically synthesized
  source 1..20: mol_type = other DNA
cagataacgttttttctcat

SEQ ID NO: 5467 - DNA, 20 bp, synthetic construct
  misc_feature 1..20: note = chemically synthesized
  source 1..20: mol_type = other DNA
ctcattggtatccttttctg

SEQ ID NO: 5468 - DNA, 20 bp, synthetic construct
  misc_feature 1..20: note = chemically synthesized
  source 1..20: mol_type = other DNA
tatccttttctgtagacata

SEQ ID NO: 5469 - DNA, 20 bp, synthetic construct
  misc_feature 1..20: note = chemically synthesized
  source 1..20: mol_type = other DNA
ttctgtagacatatagattt

SEQ ID NO: 5470 - DNA, 20 bp, synthetic construct
  misc_feature 1..20: note = chemically synthesized
  source 1..20: mol_type = other DNA
atattgtgctattttcttca

SEQ ID NO: 5471 - DNA, 20 bp, synthetic construct
  misc_feature 1..20: note = chemically synthesized
  source 1..20: mol_type = other DNA
agtgtctctgtgtacatcta

SEQ ID NO: 5472 - DNA, 20 bp, synthetic construct
  misc_feature 1..20: note = chemically synthesized
  source 1..20: mol_type = other DNA
tctgtgtacatctatagctt

SEQ ID NO: 5473 - DNA, 20 bp, synthetic construct
  misc_feature 1..20: note = chemically synthesized
  source 1..20: mol_type = other DNA
gtgtacatctatagctttag

SEQ ID NO: 5474 - DNA, 20 bp, synthetic construct
  misc_feature 1..20: note = chemically synthesized
  source 1..20: mol_type = other DNA
catctatagctttagtggat

SEQ ID NO: 5475 - DNA, 20 bp, synthetic construct
  misc_feature 1..20: note = chemically synthesized
  source 1..20: mol_type = other DNA
tctatagctttagtggatta

SEQ ID NO: 5476 - DNA, 20 bp, synthetic construct
  misc_feature 1..20: note = chemically synthesized
  source 1..20: mol_type = other DNA
tagctttagtggattagaga

SEQ ID NO: 5477 - DNA, 20 bp, synthetic construct
  misc_feature 1..20: note = chemically synthesized
  source 1..20: mol_type = other DNA
ctttagtggattagagaaag

SEQ ID NO: 5478 - DNA, 20 bp, synthetic construct
  misc_feature 1..20: note = chemically synthesized
  source 1..20: mol_type = other DNA
tagtggattagagaaagtag

SEQ ID NO: 5479 - DNA, 20 bp, synthetic construct
  misc_feature 1..20: note = chemically synthesized
  source 1..20: mol_type = other DNA
agcagaaatgaacacatatt

SEQ ID NO: 5480 - DNA, 20 bp, synthetic construct
  misc_feature 1..20: note = chemically synthesized
  source 1..20: mol_type = other DNA
tgaacacatattcagtctgc

SEQ ID NO: 5481 - DNA, 20 bp, synthetic construct
  misc_feature 1..20: note = chemically synthesized
  source 1..20: mol_type = other DNA
gaacacatattcagtctgcc

SEQ ID NO: 5482 - DNA, 20 bp, synthetic construct
  misc_feature 1..20: note = chemically synthesized
  source 1..20: mol_type = other DNA
taaatttatattttattatt

SEQ ID NO: 5483 - DNA, 20 bp, synthetic construct
  misc_feature 1..20: note = chemically synthesized
  source 1..20: mol_type = other DNA
ttatattttattattcagta

SEQ ID NO: 5484 - DNA, 20 bp, synthetic construct
  misc_feature 1..20: note = chemically synthesized
  source 1..20: mol_type = other DNA
acagaaaaatacataaataa

SEQ ID NO: 5485 - DNA, 20 bp, synthetic construct
  misc_feature 1..20: note = chemically synthesized
  source 1..20: mol_type = other DNA
aaaatacataaataaaagta

SEQ ID NO: 5486 - DNA, 20 bp, synthetic construct
  misc_feature 1..20: note = chemically synthesized
  source 1..20: mol_type = other DNA
ttgttaaattgacacaaaat

SEQ ID NO: 5487 - DNA, 20 bp, synthetic construct
  misc_feature 1..20: note = chemically synthesized
  source 1..20: mol_type = other DNA
aattgacacaaaattagcaa

SEQ ID NO: 5488 - DNA, 20 bp, synthetic construct
  misc_feature 1..20: note = chemically synthesized
  source 1..20: mol_type = other DNA
aaaagcttttaacaaacact

SEQ ID NO: 5489 - DNA, 20 bp, synthetic construct
  misc_feature 1..20: note = chemically synthesized
  source 1..20: mol_type = other DNA
ttttaacaaacactcagacc

SEQ ID NO: 5490 - DNA, 20 bp, synthetic construct
  misc_feature 1..20: note = chemically synthesized
  source 1..20: mol_type = other DNA
aacaaacactcagaccaaga

SEQ ID NO: 5491 - DNA, 20 bp, synthetic construct
  misc_feature 1..20: note = chemically synthesized
  source 1..20: mol_type = other DNA
caaacactcagaccaagaaa

SEQ ID NO: 5492 - DNA, 20 bp, synthetic construct
  misc_feature 1..20: note = chemically synthesized
  source 1..20: mol_type = other DNA
accaagaaagagaacattac

SEQ ID NO: 5493 - DNA, 20 bp, synthetic construct
  misc_feature 1..20: note = chemically synthesized
  source 1..20: mol_type = other DNA
gaacattaccagcatctcaa

SEQ ID NO: 5494 - DNA, 20 bp, synthetic construct
  misc_feature 1..20: note = chemically synthesized
  source 1..20: mol_type = other DNA
ctaaacaccgattgattcct

SEQ ID NO: 5495 - DNA, 20 bp, synthetic construct
  misc_feature 1..20: note = chemically synthesized
  source 1..20: mol_type = other DNA
accgattgattcctcagttc

SEQ ID NO: 5496 - DNA, 20 bp, synthetic construct
  misc_feature 1..20: note = chemically synthesized
  source 1..20: mol_type = other DNA
cagttctggctgcaacctga

SEQ ID NO: 5497 - DNA, 20 bp, synthetic construct
  misc_feature 1..20: note = chemically synthesized
  source 1..20: mol_type = other DNA
attttctatgtgccattaca

SEQ ID NO: 5498 - DNA, 20 bp, synthetic construct
  misc_feature 1..20: note = chemically synthesized
  source 1..20: mol_type = other DNA
atgtgccattacatggtgcc

SEQ ID NO: 5499 - DNA, 20 bp, synthetic construct
  misc_feature 1..20: note = chemically synthesized
  source 1..20: mol_type = other DNA
attacatggtgccaagactg

SEQ ID NO: 5500 - DNA, 20 bp, synthetic construct
  misc_feature 1..20: note = chemically synthesized
  source 1..20: mol_type = other DNA
ttacatggtgccaagactgc

SEQ ID NO: 5501 - DNA, 20 bp, synthetic construct
  misc_feature 1..20: note = chemically synthesized
  source 1..20: mol_type = other DNA
tacatggtgccaagactgca

SEQ ID NO: 5502 - DNA, 20 bp, synthetic construct
  misc_feature 1..20: note = chemically synthesized
  source 1..20: mol_type = other DNA
acatggtgccaagactgcag

SEQ ID NO: 5503 - DNA, 20 bp, synthetic construct
  misc_feature 1..20: note = chemically synthesized
  source 1..20: mol_type = other DNA
tggtgccaagactgcagggg

SEQ ID NO: 5504 - DNA, 20 bp, synthetic construct
  misc_feature 1..20: note = chemically synthesized
  source 1..20: mol_type = other DNA
ggcagaaaccacacttttac

SEQ ID NO: 5505 - DNA, 20 bp, synthetic construct
  misc_feature 1..20: note = chemically synthesized
  source 1..20: mol_type = other DNA
aaaccacacttttactggaa

SEQ ID NO: 5506 - DNA, 20 bp, synthetic construct
  misc_feature 1..20: note = chemically synthesized
  source 1..20: mol_type = other DNA
cacttttactggaaaagctt

SEQ ID NO: 5507 - DNA, 20 bp, synthetic construct
  misc_feature 1..20: note = chemically synthesized
  source 1..20: mol_type = other DNA
acttttactggaaaagcttt

SEQ ID NO: 5508 - DNA, 20 bp, synthetic construct
  misc_feature 1..20: note = chemically synthesized
  source 1..20: mol_type = other DNA
taggacatcgactcctactg

SEQ ID NO: 5509 - DNA, 20 bp, synthetic construct
  misc_feature 1..20: note = chemically synthesized
  source 1..20: mol_type = other DNA
aggacatcgactcctactgc

SEQ ID NO: 5510 - DNA, 20 bp, synthetic construct
  misc_feature 1..20: note = chemically synthesized
  source 1..20: mol_type = other DNA
ggacatcgactcctactgca

SEQ ID NO: 5511 - DNA, 20 bp, synthetic construct
  misc_feature 1..20: note = chemically synthesized
  source 1..20: mol_type = other DNA
gacatcgactcctactgcag

SEQ ID NO: 5512 - DNA, 20 bp, synthetic construct
  misc_feature 1..20: note = chemically synthesized
  source 1..20: mol_type = other DNA
tcctactgcaggggtgttct

SEQ ID NO: 5513 - DNA, 20 bp, synthetic construct
  misc_feature 1..20: note = chemically synthesized
  source 1..20: mol_type = other DNA
actgcaggggtgttcttggc

SEQ ID NO: 5514 - DNA, 20 bp, synthetic construct
  misc_feature 1..20: note = chemically synthesized
  source 1..20: mol_type = other DNA
ctgcaggggtgttcttggct

SEQ ID NO: 5515 - DNA, 20 bp, synthetic construct
  misc_feature 1..20: note = chemically synthesized
  source 1..20: mol_type = other DNA
aggggtgttcttggctaggt

SEQ ID NO: 5516 - DNA, 20 bp, synthetic construct
  misc_feature 1..20: note = chemically synthesized
  source 1..20: mol_type = other DNA
ctaggttggcattaattttt

SEQ ID NO: 5517 - DNA, 20 bp, synthetic construct
  misc_feature 1..20: note = chemically synthesized
  source 1..20: mol_type = other DNA
attaatttttaagtttctgc

SEQ ID NO: 5518 - DNA, 20 bp, synthetic construct
  misc_feature 1..20: note = chemically synthesized
  source 1..20: mol_type = other DNA
taatttttaagtttctgcaa

SEQ ID NO: 5519 - DNA, 20 bp, synthetic construct
  misc_feature 1..20: note = chemically synthesized
  source 1..20: mol_type = other DNA
aagtttctgcaagagacttc

SEQ ID NO: 5520 - DNA, 20 bp, synthetic construct
  misc_feature 1..20: note = chemically synthesized
  source 1..20: mol_type = other DNA
agtttctgcaagagacttct

SEQ ID NO: 5521 - DNA, 20 bp, synthetic construct
  misc_feature 1..20: note = chemically synthesized
  source 1..20: mol_type = other DNA
gcaagagacttctgggaaaa

SEQ ID NO: 5522 - DNA, 20 bp, synthetic construct
  misc_feature 1..20: note = chemically synthesized
  source 1..20: mol_type = other DNA
ctatttttatttccttcatc

SEQ ID NO: 5523 - DNA, 20 bp, synthetic construct
  misc_feature 1..20: note = chemically synthesized
  source 1..20: mol_type = other DNA
atttttatttccttcatctg

SEQ ID NO: 5524 - DNA, 20 bp, synthetic construct
  misc_feature 1..20: note = chemically synthesized
  source 1..20: mol_type = other DNA
tttttatttccttcatctgg

SEQ ID NO: 5525 - DNA, 20 bp, synthetic construct
  misc_feature 1..20: note = chemically synthesized
  source 1..20: mol_type = other DNA
gaggcctctattcactactc

SEQ ID NO: 5526 - DNA, 20 bp, synthetic construct
  misc_feature 1..20: note = chemically synthesized
  source 1..20: mol_type = other DNA
ctctagcaattatcttctgc

SEQ ID NO: 5527 - DNA, 20 bp, synthetic construct
  misc_feature 1..20: note = chemically synthesized
  source 1..20: mol_type = other DNA
caattatcttctgcaagtaa

SEQ ID NO: 5528 - DNA, 20 bp, synthetic construct
  misc_feature 1..20: note = chemically synthesized
  source 1..20: mol_type = other DNA
agtaatggtaacaaatatcc

SEQ ID NO: 5529 - DNA, 20 bp, synthetic construct
  misc_feature 1..20: note = chemically synthesized
  source 1..20: mol_type = other DNA
gtaatggtaacaaatatcct

SEQ ID NO: 5530 - DNA, 20 bp, synthetic construct
  misc_feature 1..20: note = chemically synthesized
  source 1..20: mol_type = other DNA
taatggtaacaaatatccta

SEQ ID NO: 5531 - DNA, 20 bp, synthetic construct
  misc_feature 1..20: note = chemically synthesized
  source 1..20: mol_type = other DNA
gtaacaaatatcctagggaa

SEQ ID NO: 5532 - DNA, 20 bp, synthetic construct
  misc_feature 1..20: note = chemically synthesized
  source 1..20: mol_type = other DNA
aacaaatatcctagggaatg

SEQ ID NO: 5533 - DNA, 20 bp, synthetic construct
  misc_feature 1..20: note = chemically synthesized
  source 1..20: mol_type = other DNA
gggaatggagacacaacctc

SEQ ID NO: 5534 - DNA, 20 bp, synthetic construct
  misc_feature 1..20: note = chemically synthesized
  source 1..20: mol_type = other DNA
aatggagacacaacctcaag

SEQ ID NO: 5535 - DNA, 20 bp, synthetic construct
  misc_feature 1..20: note = chemically synthesized
  source 1..20: mol_type = other DNA
cctcaagtagaacatctctt

SEQ ID NO: 5536 - DNA, 20 bp, synthetic construct
  misc_feature 1..20: note = chemically synthesized
  source 1..20: mol_type = other DNA
tttaacaatacgattttgat

SEQ ID NO: 5537 - DNA, 20 bp, synthetic construct
  misc_feature 1..20: note = chemically synthesized
  source 1..20: mol_type = other DNA
caatacgattttgataagcc

SEQ ID NO: 5538 - DNA, 20 bp, synthetic construct
  misc_feature 1..20: note = chemically synthesized
  source 1..20: mol_type = other DNA
aatacgattttgataagcct

SEQ ID NO: 5539 - DNA, 20 bp, synthetic construct
  misc_feature 1..20: note = chemically synthesized
  source 1..20: mol_type = other DNA
ttttgataagcctaggaaaa

SEQ ID NO: 5540 - DNA, 20 bp, synthetic construct
  misc_feature 1..20: note = chemically synthesized
  source 1..20: mol_type = other DNA
tttgataagcctaggaaaat

SEQ ID NO: 5541 - DNA, 20 bp, synthetic construct
  misc_feature 1..20: note = chemically synthesized
  source 1..20: mol_type = other DNA
ttgataagcctaggaaaata

SEQ ID NO: 5542 - DNA, 20 bp, synthetic construct
  misc_feature 1..20: note = chemically synthesized
  source 1..20: mol_type = other DNA
gataagcctaggaaaatagg

SEQ ID NO: 5543 - DNA, 20 bp, synthetic construct
  misc_feature 1..20: note = chemically synthesized
  source 1..20: mol_type = other DNA
ataagcctaggaaaataggg

SEQ ID NO: 5544 - DNA, 20 bp, synthetic construct
  misc_feature 1..20: note = chemically synthesized
  source 1..20: mol_type = other DNA
cctaggaaaatagggaggta

SEQ ID NO: 5545 - DNA, 20 bp, synthetic construct
  misc_feature 1..20: note = chemically synthesized
  source 1..20: mol_type = other DNA
gaaaatagggaggtatagtg

SEQ ID NO: 5546 - DNA, 20 bp, synthetic construct
  misc_feature 1..20: note = chemically synthesized
  source 1..20: mol_type = other DNA
aaatagggaggtatagtgta

SEQ ID NO: 5547 - DNA, 20 bp, synthetic construct
  misc_feature 1..20: note = chemically synthesized
  source 1..20: mol_type = other DNA
tagggaggtatagtgtagag

SEQ ID NO: 5548 - DNA, 20 bp, synthetic construct
  misc_feature 1..20: note = chemically synthesized
  source 1..20: mol_type = other DNA
ggtatagtgtagagcagtcc

SEQ ID NO: 5549 - DNA, 20 bp, synthetic construct
  misc_feature 1..20: note = chemically synthesized
  source 1..20: mol_type = other DNA
gagcagtcctggccacttac

SEQ ID NO: 5550 - DNA, 20 bp, synthetic construct
  misc_feature 1..20: note = chemically synthesized
  source 1..20: mol_type = other DNA
tcctggccacttaccagtac

SEQ ID NO: 5551 - DNA, 20 bp, synthetic construct
  misc_feature 1..20: note = chemically synthesized
  source 1..20: mol_type = other DNA
cacttaccagtactggtccg

SEQ ID NO: 5552 - DNA, 20 bp, synthetic construct
  misc_feature 1..20: note = chemically synthesized
  source 1..20: mol_type = other DNA
agtactggtccgtggcctgc

SEQ ID NO: 5553 - DNA, 20 bp, synthetic construct
  misc_feature 1..20: note = chemically synthesized
  source 1..20: mol_type = other DNA
gtactggtccgtggcctgct

SEQ ID NO: 5554 - DNA, 20 bp, synthetic construct
  misc_feature 1..20: note = chemically synthesized
  source 1..20: mol_type = other DNA
tccgtggcctgctaggaacc

SEQ ID NO: 5555 - DNA, 20 bp, synthetic construct
  misc_feature 1..20: note = chemically synthesized
  source 1..20: mol_type = other DNA
ctgctaggaacctggtctca

SEQ ID NO: 5556 - DNA, 20 bp, synthetic construct
  misc_feature 1..20: note = chemically synthesized
  source 1..20: mol_type = other DNA
ctaggaacctggtctcacag

SEQ ID NO: 5557 - DNA, 20 bp, synthetic construct
  misc_feature 1..20: note = chemically synthesized
  source 1..20: mol_type = other DNA
taggaacctggtctcacagc

SEQ ID NO: 5558 - DNA, 20 bp, synthetic construct
  misc_feature 1..20: note = chemically synthesized
  source 1..20: mol_type = other DNA
aggaacctggtctcacagca

SEQ ID NO: 5559 - DNA, 20 bp, synthetic construct
  misc_feature 1..20: note = chemically synthesized
  source 1..20: mol_type = other DNA
ggaacctggtctcacagcag

SEQ ID NO: 5560 - DNA, 20 bp, synthetic construct
  misc_feature 1..20: note = chemically synthesized
  source 1..20: mol_type = other DNA
gaacctggtctcacagcagg

SEQ ID NO: 5561 - DNA, 20 bp, synthetic construct
  misc_feature 1..20: note = chemically synthesized
  source 1..20: mol_type = other DNA
tggtctcacagcagggggat

SEQ ID NO: 5562 - DNA, 20 bp, synthetic construct
  misc_feature 1..20: note = chemically synthesized
  source 1..20: mol_type = other DNA
ctcacagcagggggatgagc

SEQ ID NO: 5563 - DNA, 20 bp, synthetic construct
  misc_feature 1..20: note = chemically synthesized
  source 1..20: mol_type = other DNA
atgagcaagcattactgcct

SEQ ID NO: 5564 - DNA, 20 bp, synthetic construct
  misc_feature 1..20: note = chemically synthesized
  source 1..20: mol_type = other DNA
agctcctcctcctgtcacat

SEQ ID NO: 5565 - DNA, 20 bp, synthetic construct
  misc_feature 1..20: note = chemically synthesized
  source 1..20: mol_type = other DNA
tcctcctcctgtcacatcgg

SEQ ID NO: 5566 - DNA, 20 bp, synthetic construct
  misc_feature 1..20: note = chemically synthesized
  source 1..20: mol_type = other DNA
tcctcctgtcacatcggcag

SEQ ID NO: 5567 - DNA, 20 bp, synthetic construct
  misc_feature 1..20: note = chemically synthesized
  source 1..20: mol_type = other DNA
tcctgtcacatcggcagtgg

SEQ ID NO: 5568 - DNA, 20 bp, synthetic construct
  misc_feature 1..20: note = chemically synthesized
  source 1..20: mol_type = other DNA
cacatcggcagtggcggcat

SEQ ID NO: 5569 - DNA, 20 bp, synthetic construct
  misc_feature 1..20: note = chemically synthesized
  source 1..20: mol_type = other DNA
gtggcggcattagattctca

SEQ ID NO: 5570 - DNA, 20 bp, synthetic construct
  misc_feature 1..20: note = chemically synthesized
  source 1..20: mol_type = other DNA
ggcggcattagattctcata

SEQ ID NO: 5571 - DNA, 20 bp, synthetic construct
  misc_feature 1..20: note = chemically synthesized
  source 1..20: mol_type = other DNA
gcggcattagattctcatag

SEQ ID NO: 5572 - DNA, 20 bp, synthetic construct
  misc_feature 1..20: note = chemically synthesized
  source 1..20: mol_type = other DNA
agattctcatagaggcatgc

SEQ ID NO: 5573 - DNA, 20 bp, synthetic construct
  misc_feature 1..20: note = chemically synthesized
  source 1..20: mol_type = other DNA
gattctcatagaggcatgca

SEQ ID NO: 5574 - DNA, 20 bp, synthetic construct
  misc_feature 1..20: note = chemically synthesized
  source 1..20: mol_type = other DNA
attctcatagaggcatgcaa

SEQ ID NO: 5575 - DNA, 20 bp, synthetic construct
  misc_feature 1..20: note = chemically synthesized
  source 1..20: mol_type = other DNA
atagaggcatgcaagggatc

SEQ ID NO: 5576 - DNA, 20 bp, synthetic construct
  misc_feature 1..20: note = chemically synthesized
  source 1..20: mol_type = other DNA
tagaggcatgcaagggatct

SEQ ID NO: 5577 - DNA, 20 bp, synthetic construct
  misc_feature 1..20: note = chemically synthesized
  source 1..20: mol_type = other DNA
catgcaagggatctaggttg

SEQ ID NO: 5578 - DNA, 20 bp, synthetic construct
  misc_feature 1..20: note = chemically synthesized
  source 1..20: mol_type = other DNA
tctaggttgcggcttcttat

SEQ ID NO: 5579 - DNA, 20 bp, synthetic construct
  misc_feature 1..20: note = chemically synthesized
  source 1..20: mol_type = other DNA
aatctaatgcctaatgctct

SEQ ID NO: 5580 - DNA, 20 bp, synthetic construct
  misc_feature 1..20: note = chemically synthesized
  source 1..20: mol_type = other DNA
atctaatgcctaatgctctg

SEQ ID NO: 5581 - DNA, 20 bp, synthetic construct
  misc_feature 1..20: note = chemically synthesized
  source 1..20: mol_type = other DNA
taatgcctaatgctctgagg

SEQ ID NO: 5582 - DNA, 20 bp, synthetic construct
  misc_feature 1..20: note = chemically synthesized
  source 1..20: mol_type = other DNA
cctaatgctctgaggtggaa

SEQ ID NO: 5583 - DNA, 20 bp, synthetic construct
  misc_feature 1..20: note = chemically synthesized
  source 1..20: mol_type = other DNA
ctgcaccttgtcttccacaa

SEQ ID NO: 5584 - DNA, 20 bp, synthetic construct
  misc_feature 1..20: note = chemically synthesized
  source 1..20: mol_type = other DNA
caccttgtcttccacaaaag

SEQ ID NO: 5585 - DNA, 20 bp, synthetic construct
  misc_feature 1..20: note = chemically synthesized
  source 1..20: mol_type = other DNA
tcttccacaaaagcagtccc

SEQ ID NO: 5586 - DNA, 20 bp, synthetic construct
  misc_feature 1..20: note = chemically synthesized
  source 1..20: mol_type = other DNA
ccctggtaccaaaaacattg

SEQ ID NO: 5587 - DNA, 20 bp, synthetic construct
  misc_feature 1..20: note = chemically synthesized
  source 1..20: mol_type = other DNA
ccaaaaacattgaagactgc

SEQ ID NO: 5588 - DNA, 20 bp, synthetic construct
  misc_feature 1..20: note = chemically synthesized
  source 1..20: mol_type = other DNA
cattgaagactgctggtgta

SEQ ID NO: 5589 - DNA, 20 bp, synthetic construct
  misc_feature 1..20: note = chemically synthesized
  source 1..20: mol_type = other DNA
gtacagtgaacatctgcctg

SEQ ID NO: 5590 - DNA, 20 bp, synthetic construct
  misc_feature 1..20: note = chemically synthesized
  source 1..20: mol_type = other DNA
tctgcctgtggatttattat

SEQ ID NO: 5591 - DNA, 20 bp, synthetic construct
  misc_feature 1..20: note = chemically synthesized
  source 1..20: mol_type = other DNA
gcctgtggatttattattag

SEQ ID NO: 5592 - DNA, 20 bp, synthetic construct
  misc_feature 1..20: note = chemically synthesized
  source 1..20: mol_type = other DNA
aatcatgtcctctcacttct

SEQ ID NO: 5593 - DNA, 20 bp, synthetic construct
  misc_feature 1..20: note = chemically synthesized
  source 1..20: mol_type = other DNA
gaatcactgatttctcccac

SEQ ID NO: 5594 - DNA, 20 bp, synthetic construct
  misc_feature 1..20: note = chemically synthesized
  source 1..20: mol_type = other DNA
tgatttctcccactggacct

SEQ ID NO: 5595 - DNA, 20 bp, synthetic construct
  misc_feature 1..20: note = chemically synthesized
  source 1..20: mol_type = other DNA
cccactggaccttagctttt

SEQ ID NO: 5596 - DNA, 20 bp, synthetic construct
  misc_feature 1..20: note = chemically synthesized
  source 1..20: mol_type = other DNA
ggaccttagcttttcggtgt

SEQ ID NO: 5597 - DNA, 20 bp, synthetic construct
  misc_feature 1..20: note = chemically synthesized
  source 1..20: mol_type = other DNA
accttagcttttcggtgtaa

SEQ ID NO: 5598 - DNA, 20 bp, synthetic construct
  misc_feature 1..20: note = chemically synthesized
  source 1..20: mol_type = other DNA
cggtgtaagagttaaatgaa

SEQ ID NO: 5599 - DNA, 20 bp, synthetic construct
  misc_feature 1..20: note = chemically synthesized
  source 1..20: mol_type = other DNA
ttaaatgaatagcaattgaa

SEQ ID NO: 5600 - DNA, 20 bp, synthetic construct
  misc_feature 1..20: note = chemically synthesized
  source 1..20: mol_type = other DNA
tgaatagcaattgaatggac

SEQ ID NO: 5601 - DNA, 20 bp, synthetic construct
  misc_feature 1..20: note = chemically synthesized
  source 1..20: mol_type = other DNA
tacttttgtcaccttgttct

SEQ ID NO: 5602 - DNA, 20 bp, synthetic construct
  misc_feature 1..20: note = chemically synthesized
  source 1..20: mol_type = other DNA
taataaccgtgacttcattt

SEQ ID NO: 5603 - DNA, 20 bp, synthetic construct
  misc_feature 1..20: note = chemically synthesized
  source 1..20: mol_type = other DNA
aataaccgtgacttcattta

SEQ ID NO: 5604 - DNA, 20 bp, synthetic construct
  misc_feature 1..20: note = chemically synthesized
  source 1..20: mol_type = other DNA
aaccgtgacttcatttaagg

SEQ ID NO: 5605 - DNA, 20 bp, synthetic construct
  misc_feature 1..20: note = chemically synthesized
  source 1..20: mol_type = other DNA
cgtgacttcatttaaggcag

SEQ ID NO: 5606 - DNA, 20 bp, synthetic construct
  misc_feature 1..20: note = chemically synthesized
  source 1..20: mol_type = other DNA
cagcagttacaatgatatga

SEQ ID NO: 5607 - DNA, 20 bp, synthetic construct
  misc_feature 1..20: note = chemically synthesized
  source 1..20: mol_type = other DNA
gtctacctattaaaaaaaaa

SEQ ID NO: 5608 - DNA, 20 bp, synthetic construct
  misc_feature 1..20: note = chemically synthesized
  source 1..20: mol_type = other DNA
tctacctattaaaaaaaaaa

SEQ ID NO: 5609 - DNA, 20 bp, synthetic construct
  misc_feature 1..20: note = chemically synthesized
  source 1..20: mol_type = other DNA
tattaaaaaaaaaaaggcaa

SEQ ID NO: 5610 - DNA, 20 bp, synthetic construct
  misc_feature 1..20: note = chemically synthesized
  source 1..20: mol_type = other DNA
ttaaaaaaaaaaaggcaaaa

SEQ ID NO: 5611 - DNA, 20 bp, synthetic construct
  misc_feature 1..20: note = chemically synthesized
  source 1..20: mol_type = other DNA
gtgtttccctaacatcactg

SEQ ID NO: 5612 - DNA, 20 bp, synthetic construct
  misc_feature 1..20: note = chemically synthesized
  source 1..20: mol_type = other DNA
gctgttttcgtaacgtttct

SEQ ID NO: 5613 - DNA, 20 bp, synthetic construct
  misc_feature 1..20: note = chemically synthesized
  source 1..20: mol_type = other DNA
gtaacgtttctcagtgacgc

SEQ ID NO: 5614 - DNA, 20 bp, synthetic construct
  misc_feature 1..20: note = chemically synthesized
  source 1..20: mol_type = other DNA
cgtttctcagtgacgctgga

SEQ ID NO: 5615 - DNA, 20 bp, synthetic construct
  misc_feature 1..20: note = chemically synthesized
  source 1..20: mol_type = other DNA
ttctcagtgacgctggatag

SEQ ID NO: 5616 - DNA, 20 bp, synthetic construct
  misc_feature 1..20: note = chemically synthesized
  source 1..20: mol_type = other DNA
gacgctggatagtagccttg

SEQ ID NO: 5617 - DNA, 20 bp, synthetic construct
  misc_feature 1..20: note = chemically synthesized
  source 1..20: mol_type = other DNA
acgctggatagtagccttgc

SEQ ID NO: 5618 - DNA, 20 bp, synthetic construct
  misc_feature 1..20: note = chemically synthesized
  source 1..20: mol_type = other DNA
gtagccttgcaggccttaca

SEQ ID NO: 5619 - DNA, 20 bp, synthetic construct
  misc_feature 1..20: note = chemically synthesized
  source 1..20: mol_type = other DNA
tagccttgcaggccttacaa

SEQ ID NO: 5620 - DNA, 20 bp, synthetic construct
  misc_feature 1..20: note = chemically synthesized
  source 1..20: mol_type = other DNA
atctgataactgcttctcac

SEQ ID NO: 5621 - DNA, 20 bp, synthetic construct
  misc_feature 1..20: note = chemically synthesized
  source 1..20: mol_type = other DNA
actgcttctcactggctctg

SEQ ID NO: 5622 - DNA, 20 bp, synthetic construct
  misc_feature 1..20: note = chemically synthesized
  source 1..20: mol_type = other DNA
ctgcttctcactggctctgc

SEQ ID NO: 5623 - DNA, 20 bp, synthetic construct
  misc_feature 1..20: note = chemically synthesized
  source 1..20: mol_type = other DNA
gcaggctaccacatcaacaa

SEQ ID NO: 5624 - DNA, 20 bp, synthetic construct
  misc_feature 1..20: note = chemically synthesized
  source 1..20: mol_type = other DNA
taccacatcaacaacagttt

SEQ ID NO: 5625 - DNA, 20 bp, synthetic construct
  misc_feature 1..20: note = chemically synthesized
  source 1..20: mol_type = other DNA
agctgttgttgcctaattca

SEQ ID NO: 5626 - DNA, 20 bp, synthetic construct
  misc_feature 1..20: note = chemically synthesized
  source 1..20: mol_type = other DNA
ttgcctaattcatggaaaac

SEQ ID NO: 5627 - DNA, 20 bp, synthetic construct
  misc_feature 1..20: note = chemically synthesized
  source 1..20: mol_type = other DNA
tcatggaaaacaagtttcct

SEQ ID NO: 5628 - DNA, 20 bp, synthetic construct
  misc_feature 1..20: note = chemically synthesized
  source 1..20: mol_type = other DNA
tggaaaacaagtttccttag

SEQ ID NO: 5629 - DNA, 20 bp, synthetic construct
  misc_feature 1..20: note = chemically synthesized
  source 1..20: mol_type = other DNA
aaacaagtttccttagaagc

SEQ ID NO: 5630 - DNA, 20 bp, synthetic construct
  misc_feature 1..20: note = chemically synthesized
  source 1..20: mol_type = other DNA
tccttagaagctggcttttt

SEQ ID NO: 5631 - DNA, 20 bp, synthetic construct
  misc_feature 1..20: note = chemically synthesized
  source 1..20: mol_type = other DNA
agctggctttttgagatata

SEQ ID NO: 5632 - DNA, 20 bp, synthetic construct
  misc_feature 1..20: note = chemically synthesized
  source 1..20: mol_type = other DNA
tatggaaaaatgtctccacc

SEQ ID NO: 5633 - DNA, 20 bp, synthetic construct
  misc_feature 1..20: note = chemically synthesized
  source 1..20: mol_type = other DNA
gtctccacctggctactatg

SEQ ID NO: 5634 - DNA, 20 bp, synthetic construct
  misc_feature 1..20: note = chemically synthesized
  source 1..20: mol_type = other DNA
tactatgtagcttttcaaaa

SEQ ID NO: 5635 - DNA, 20 bp, synthetic construct
  misc_feature 1..20: note = chemically synthesized
  source 1..20: mol_type = other DNA
atgtagcttttcaaaacaga

SEQ ID NO: 5636 - DNA, 20 bp, synthetic construct
  misc_feature 1..20: note = chemically synthesized
  source 1..20: mol_type = other DNA
tctccatctgctcttccttt

SEQ ID NO: 5637 - DNA, 20 bp, synthetic construct
  misc_feature 1..20: note = chemically synthesized
  source 1..20: mol_type = other DNA
ctccatctgctcttcctttc

SEQ ID NO: 5638 - DNA, 20 bp, synthetic construct
  misc_feature 1..20: note = chemically synthesized
  source 1..20: mol_type = other DNA
ctgctcttcctttcaggacc

SEQ ID NO: 5639 - DNA, 20 bp, synthetic construct
  misc_feature 1..20: note = chemically synthesized
  source 1..20: mol_type = other DNA
tgctcttcctttcaggacct

SEQ ID NO: 5640 - DNA, 20 bp, synthetic construct
  misc_feature 1..20: note = chemically synthesized
  source 1..20: mol_type = other DNA
tgaaattgccttttcttcct

SEQ ID NO: 5641 - DNA, 20 bp, synthetic construct
  misc_feature 1..20: note = chemically synthesized
  source 1..20: mol_type = other DNA
gaaattgccttttcttcctc

SEQ ID NO: 5642 - DNA, 20 bp, synthetic construct
  misc_feature 1..20: note = chemically synthesized
  source 1..20: mol_type = other DNA
aattgccttttcttcctcag

SEQ ID NO: 5643 - DNA, 20 bp, synthetic construct
  misc_feature 1..20: note = chemically synthesized
  source 1..20: mol_type = other DNA
ttgccttttcttcctcagga

SEQ ID NO: 5644 - DNA, 20 bp, synthetic construct
  misc_feature 1..20: note = chemically synthesized
  source 1..20: mol_type = other DNA
tgccttttcttcctcaggag

SEQ ID NO: 5645 - DNA, 20 bp, synthetic construct
  misc_feature 1..20: note = chemically synthesized
  source 1..20: mol_type = other DNA
tttcttcctcaggagaggtt

SEQ ID NO: 5646 - DNA, 20 bp, synthetic construct
  misc_feature 1..20: note = chemically synthesized
  source 1..20: mol_type = other DNA
agaggtttagttattttttt

SEQ ID NO: 5647 - DNA, 20 bp, synthetic construct
  misc_feature 1..20: note = chemically synthesized
  source 1..20: mol_type = other DNA
tttttttaagtaattgcttc

SEQ ID NO: 5648 - DNA, 20 bp, synthetic construct
  misc_feature 1..20: note = chemically synthesized
  source 1..20: mol_type = other DNA
tttaagtaattgcttccaga

SEQ ID NO: 5649 - DNA, 20 bp, synthetic construct
  misc_feature 1..20: note = chemically synthesized
  source 1..20: mol_type = other DNA
taagtaattgcttccagata

SEQ ID NO: 5650 - DNA, 20 bp, synthetic construct
  misc_feature 1..20: note = chemically synthesized
  source 1..20: mol_type = other DNA
aagtaattgcttccagatag

SEQ ID NO: 5651 - DNA, 20 bp, synthetic construct
  misc_feature 1..20: note = chemically synthesized
  source 1..20: mol_type = other DNA
aacctgtttctttctgtata

SEQ ID NO: 5652 - DNA, 20 bp, synthetic construct
  misc_feature 1..20: note = chemically synthesized
  source 1..20: mol_type = other DNA
gtttctttctgtataaagcc

SEQ ID NO: 5653 - DNA, 20 bp, synthetic construct
  misc_feature 1..20: note = chemically synthesized
  source 1..20: mol_type = other DNA
taaagcccagtaatcatata

SEQ ID NO: 5654 - DNA, 20 bp, synthetic construct
  misc_feature 1..20: note = chemically synthesized
  source 1..20: mol_type = other DNA
catataaagtttactttcat

SEQ ID NO: 5655 - DNA, 20 bp, synthetic construct
  misc_feature 1..20: note = chemically synthesized
  source 1..20: mol_type = other DNA
tttactgattttcctccctt

SEQ ID NO: 5656 - DNA, 20 bp, synthetic construct
  misc_feature 1..20: note = chemically synthesized
  source 1..20: mol_type = other DNA
ctccctttggctgaattgta

SEQ ID NO: 5657 - DNA, 20 bp, synthetic construct
  misc_feature 1..20: note = chemically synthesized
  source 1..20: mol_type = other DNA
gctgaattgtaaagattctg

SEQ ID NO: 5658 - DNA, 20 bp, synthetic construct
  misc_feature 1..20: note = chemically synthesized
  source 1..20: mol_type = other DNA
cttcataaatcttatcatca

SEQ ID NO: 5659 - DNA, 20 bp, synthetic construct
  misc_feature 1..20: note = chemically synthesized
  source 1..20: mol_type = other DNA
atcatcatagtacaattata

SEQ ID NO: 5660 - DNA, 20 bp, synthetic construct
  misc_feature 1..20: note = chemically synthesized
  source 1..20: mol_type = other DNA
caattatatagctctaaaat

SEQ ID NO: 5661 - DNA, 20 bp, synthetic construct
  misc_feature 1..20: note = chemically synthesized
  source 1..20: mol_type = other DNA
taaaataagcaatgatttct

SEQ ID NO: 5662 - DNA, 20 bp, synthetic construct
  misc_feature 1..20: note = chemically synthesized
  source 1..20: mol_type = other DNA
aaaataagcaatgatttctg

SEQ ID NO: 5663 - DNA, 20 bp, synthetic construct
  misc_feature 1..20: note = chemically synthesized
  source 1..20: mol_type = other DNA
atgatttctgaggatactct

SEQ ID NO: 5664 - DNA, 20 bp, synthetic construct
  misc_feature 1..20: note = chemically synthesized
  source 1..20: mol_type = other DNA
tgatttctgaggatactctt

SEQ ID NO: 5665 - DNA, 20 bp, synthetic construct
  misc_feature 1..20: note = chemically synthesized
  source 1..20: mol_type = other DNA
ttttattaactgttttgtca

SEQ ID NO: 5666 - DNA, 20 bp, synthetic construct
  misc_feature 1..20: note = chemically synthesized
  source 1..20: mol_type = other DNA
gccattatttcaaactattt

SEQ ID NO: 5667 - DNA, 20 bp, synthetic construct
  misc_feature 1..20: note = chemically synthesized
  source 1..20: mol_type = other DNA
ctattttggttcacattcta

SEQ ID NO: 5668 - DNA, 20 bp, synthetic construct
  misc_feature 1..20: note = chemically synthesized
  source 1..20: mol_type = other DNA
tattttggttcacattctat

SEQ ID NO: 5669 - DNA, 20 bp, synthetic construct
  misc_feature 1..20: note = chemically synthesized
  source 1..20: mol_type = other DNA
tctataggttgcctaatctg

SEQ ID NO: 5670 - DNA, 20 bp, synthetic construct
  misc_feature 1..20: note = chemically synthesized
  source 1..20: mol_type = other DNA
atctgaagcacaaacactca

SEQ ID NO: 5671 - DNA, 20 bp, synthetic construct
  misc_feature 1..20: note = chemically synthesized
  source 1..20: mol_type = other DNA
gcacaaacactcatagtatg

SEQ ID NO: 5672 - DNA, 20 bp, synthetic construct
  misc_feature 1..20: note = chemically synthesized
  source 1..20: mol_type = other DNA
cactcatagtatgaagtctt

SEQ ID NO: 5673 - DNA, 20 bp, synthetic construct
  misc_feature 1..20: note = chemically synthesized
  source 1..20: mol_type = other DNA
atagtatgaagtcttcagat

SEQ ID NO: 5674 - DNA, 20 bp, synthetic construct
  misc_feature 1..20: note = chemically synthesized
  source 1..20: mol_type = other DNA
taactctcaaaccaacaact

SEQ ID NO: 5675 - DNA, 20 bp, synthetic construct
  misc_feature 1..20: note = chemically synthesized
  source 1..20: mol_type = other DNA
aaccaacaactcagttgtgt

SEQ ID NO: 5676 - DNA, 20 bp, synthetic construct
  misc_feature 1..20: note = chemically synthesized
  source 1..20: mol_type = other DNA
tcattctgatgcttccctat

SEQ ID NO: 5677 - DNA, 20 bp, synthetic construct
  misc_feature 1..20: note = chemically synthesized
  source 1..20: mol_type = other DNA
ttctgatgcttccctatgag

SEQ ID NO: 5678 - DNA, 20 bp, synthetic construct
  misc_feature 1..20: note = chemically synthesized
  source 1..20: mol_type = other DNA
gatgcttccctatgagtggc

SEQ ID NO: 5679 - DNA, 20 bp, synthetic construct
  misc_feature 1..20: note = chemically synthesized
  source 1..20: mol_type = other DNA
gcttccctatgagtggctgg

SEQ ID NO: 5680 - DNA, 20 bp, synthetic construct
  misc_feature 1..20: note = chemically synthesized
  source 1..20: mol_type = other DNA
gctggtggaaaacatattgt

SEQ ID NO: 5681 - DNA, 20 bp, synthetic construct
  misc_feature 1..20: note = chemically synthesized
  source 1..20: mol_type = other DNA
aaacatattgtcagttgttg

SEQ ID NO: 5682 - DNA, 20 bp, synthetic construct
  misc_feature 1..20: note = chemically synthesized
  source 1..20: mol_type = other DNA
tgaagaattctctgcttccc

SEQ ID NO: 5683 - DNA, 20 bp, synthetic construct
  misc_feature 1..20: note = chemically synthesized
  source 1..20: mol_type = other DNA
ctgcttccccagtgttgtgt

SEQ ID NO: 5684 - DNA, 20 bp, synthetic construct
  misc_feature 1..20: note = chemically synthesized
  source 1..20: mol_type = other DNA
ccagtgttgtgtcagctctc

SEQ ID NO: 5685 - DNA, 20 bp, synthetic construct
  misc_feature 1..20: note = chemically synthesized
  source 1..20: mol_type = other DNA
tgtgtcagctctccggcgta

SEQ ID NO: 5686 - DNA, 20 bp, synthetic construct
  misc_feature 1..20: note = chemically synthesized
  source 1..20: mol_type = other DNA
gtgtcagctctccggcgtat

SEQ ID NO: 5687 - DNA, 20 bp, synthetic construct
  misc_feature 1..20: note = chemically synthesized
  source 1..20: mol_type = other DNA
gtcagctctccggcgtatgg

SEQ ID NO: 5688 - DNA, 20 bp, synthetic construct
  misc_feature 1..20: note = chemically synthesized
  source 1..20: mol_type = other DNA
tcagctctccggcgtatggg

SEQ ID NO: 5689 - DNA, 20 bp, synthetic construct
  misc_feature 1..20: note = chemically synthesized
  source 1..20: mol_type = other DNA
cagctctccggcgtatggga

SEQ ID NO: 5690 - DNA, 20 bp, synthetic construct
  misc_feature 1..20: note = chemically synthesized
  source 1..20: mol_type = other DNA
ctctccggcgtatgggaggg

SEQ ID NO: 5691 - DNA, 20 bp, synthetic construct
  misc_feature 1..20: note = chemically synthesized
  source 1..20: mol_type = other DNA
tggatgcttattcactttca

SEQ ID NO: 5692 - DNA, 20 bp, synthetic construct
  misc_feature 1..20: note = chemically synthesized
  source 1..20: mol_type = other DNA
cttattcactttcaaagcat

SEQ ID NO: 5693 - DNA, 20 bp, synthetic construct
  misc_feature 1..20: note = chemically synthesized
  source 1..20: mol_type = other DNA
attcactttcaaagcattag

SEQ ID NO: 5694 - DNA, 20 bp, synthetic construct
  misc_feature 1..20: note = chemically synthesized
  source 1..20: mol_type = other DNA
ttcactttcaaagcattaga

SEQ ID NO: 5695 - DNA, 20 bp, synthetic construct
  misc_feature 1..20: note = chemically synthesized
  source 1..20: mol_type = other DNA
actttcaaagcattagaagg

SEQ ID NO: 5696 - DNA, 20 bp, synthetic construct
  misc_feature 1..20: note = chemically synthesized
  source 1..20: mol_type = other DNA
gcattagaaggaagcttctt

SEQ ID NO: 5697 - DNA, 20 bp, synthetic construct
  misc_feature 1..20: note = chemically synthesized
  source 1..20: mol_type = other DNA
aggaagcttctttggccatt

SEQ ID NO: 5698 - DNA, 20 bp, synthetic construct
  misc_feature 1..20: note = chemically synthesized
  source 1..20: mol_type = other DNA
ttggccattgagaaatctat

SEQ ID NO: 5699 - DNA, 20 bp, synthetic construct
  misc_feature 1..20: note = chemically synthesized
  source 1..20: mol_type = other DNA
agacattcacatgacctcta

SEQ ID NO: 5700 - DNA, 20 bp, synthetic construct
  misc_feature 1..20: note = chemically synthesized
  source 1..20: mol_type = other DNA
tcacatgacctctacagatt

SEQ ID NO: 5701 - DNA, 20 bp, synthetic construct
  misc_feature 1..20: note = chemically synthesized
  source 1..20: mol_type = other DNA
catgacctctacagattcag

SEQ ID NO: 5702 - DNA, 20 bp, synthetic construct
  misc_feature 1..20: note = chemically synthesized
  source 1..20: mol_type = other DNA
ttctcttttcattataaaac

SEQ ID NO: 5703 - DNA, 20 bp, synthetic construct
  misc_feature 1..20: note = chemically synthesized
  source 1..20: mol_type = other DNA
tctcttttcattataaaact

SEQ ID NO: 5704 - DNA, 20 bp, synthetic construct
  misc_feature 1..20: note = chemically synthesized
  source 1..20: mol_type = other DNA
ctcttttcattataaaactg

SEQ ID NO: 5705 - DNA, 20 bp, synthetic construct
  misc_feature 1..20: note = chemically synthesized
  source 1..20: mol_type = other DNA
ttcattataaaactggggca

SEQ ID NO: 5706 - DNA, 20 bp, synthetic construct
  misc_feature 1..20: note = chemically synthesized
  source 1..20: mol_type = other DNA
tcattataaaactggggcat

SEQ ID NO: 5707 - DNA, 20 bp, synthetic construct
  misc_feature 1..20: note = chemically synthesized
  source 1..20: mol_type = other DNA
ctggggcataggaatcttgt

SEQ ID NO: 5708 - DNA, 20 bp, synthetic construct
  misc_feature 1..20: note = chemically synthesized
  source 1..20: mol_type = other DNA
gcataggaatcttgtcagat

SEQ ID NO: 5709 - DNA, 20 bp, synthetic construct
  misc_feature 1..20: note = chemically synthesized
  source 1..20: mol_type = other DNA
ttgtcagattggccacattc

SEQ ID NO: 5710 - DNA, 20 bp, synthetic construct
  misc_feature 1..20: note = chemically synthesized
  source 1..20: mol_type = other DNA
cagattggccacattccagt

SEQ ID NO: 5711 - DNA, 20 bp, synthetic construct
  misc_feature 1..20: note = chemically synthesized
  source 1..20: mol_type = other DNA
ttggccacattccagtcggc

SEQ ID NO: 5712 - DNA, 20 bp, synthetic construct
  misc_feature 1..20: note = chemically synthesized
  source 1..20: mol_type = other DNA
tggccacattccagtcggcc

SEQ ID NO: 5713 - DNA, 20 bp, synthetic construct
  misc_feature 1..20: note = chemically synthesized
  source 1..20: mol_type = other DNA
gccacattccagtcggccag

SEQ ID NO: 5714 - DNA, 20 bp, synthetic construct
  misc_feature 1..20: note = chemically synthesized
  source 1..20: mol_type = other DNA
ccacattccagtcggccagg

SEQ ID NO: 5715 - DNA, 20 bp, synthetic construct
  misc_feature 1..20: note = chemically synthesized
  source 1..20: mol_type = other DNA
cacattccagtcggccagga

SEQ ID NO: 5716 - DNA, 20 bp, synthetic construct
  misc_feature 1..20: note = chemically synthesized
  source 1..20: mol_type = other DNA
gtcggccaggagggaccatg

SEQ ID NO: 5717 - DNA, 20 bp, synthetic construct
  misc_feature 1..20: note = chemically synthesized
  source 1..20: mol_type = other DNA
atgcagacatttattatcat

SEQ ID NO: 5718 - DNA, 20 bp, synthetic construct
  misc_feature 1..20: note = chemically synthesized
  source 1..20: mol_type = other DNA
tgcagacatttattatcatt

SEQ ID NO: 5719 - DNA, 20 bp, synthetic construct
  misc_feature 1..20: note = chemically synthesized
  source 1..20: mol_type = other DNA
gcagacatttattatcatta

SEQ ID NO: 5720 - DNA, 20 bp, synthetic construct
  misc_feature 1..20: note = chemically synthesized
  source 1..20: mol_type = other DNA
tttattatcattagggaacc

SEQ ID NO: 5721 - DNA, 20 bp, synthetic construct
  misc_feature 1..20: note = chemically synthesized
  source 1..20: mol_type = other DNA
tattatcattagggaacctg

SEQ ID NO: 5722 - DNA, 20 bp, synthetic construct
  misc_feature 1..20: note = chemically synthesized
  source 1..20: mol_type = other DNA
tatcattagggaacctggag

SEQ ID NO: 5723 - DNA, 20 bp, synthetic construct
  misc_feature 1..20: note = chemically synthesized
  source 1..20: mol_type = other DNA
ctcttttttttttttttttt

SEQ ID NO: 5724 - DNA, 20 bp, synthetic construct
  misc_feature 1..20: note = chemically synthesized
  source 1..20: mol_type = other DNA
ttttttttttttttttgaga

SEQ ID NO: 5725 - DNA, 20 bp, synthetic construct
  misc_feature 1..20: note = chemically synthesized
  source 1..20: mol_type = other DNA
ttttttttttttttgagaca

SEQ ID NO: 5726 - DNA, 20 bp, synthetic construct
  misc_feature 1..20: note = chemically synthesized
  source 1..20: mol_type = other DNA
cagagtctctctctgtcgcc

SEQ ID NO: 5727 - DNA, 20 bp, synthetic construct
  misc_feature 1..20: note = chemically synthesized
  source 1..20: mol_type = other DNA
agagtctctctctgtcgccc

SEQ ID NO: 5728 - DNA, 20 bp, synthetic construct
  misc_feature 1..20: note = chemically synthesized
  source 1..20: mol_type = other DNA
tctctctctgtcgcccaggc

SEQ ID NO: 5729 - DNA, 20 bp, synthetic construct
  misc_feature 1..20: note = chemically synthesized
  source 1..20: mol_type = other DNA
tctctctgtcgcccaggctg

SEQ ID NO: 5730 - DNA, 20 bp, synthetic construct
  misc_feature 1..20: note = chemically synthesized
  source 1..20: mol_type = other DNA
ctgtcgcccaggctggagtg

SEQ ID NO: 5731 - DNA, 20 bp, synthetic construct
  misc_feature 1..20: note = chemically synthesized
  source 1..20: mol_type = other DNA
tcgcccaggctggagtgcag

SEQ ID NO: 5732 - DNA, 20 bp, synthetic construct
  misc_feature 1..20: note = chemically synthesized
  source 1..20: mol_type = other DNA
gcgtgatctcgactcactgc

SEQ ID NO: 5733 - DNA, 20 bp, synthetic construct
  misc_feature 1..20: note = chemically synthesized
  source 1..20: mol_type = other DNA
tcactgcaagctccacctcc

SEQ ID NO: 5734 - DNA, 20 bp, synthetic construct
  misc_feature 1..20: note = chemically synthesized
  source 1..20: mol_type = other DNA
cactgcaagctccacctccc

SEQ ID NO: 5735 - DNA, 20 bp, synthetic construct
  misc_feature 1..20: note = chemically synthesized
  source 1..20: mol_type = other DNA
ttcacgccattctcctgtct

SEQ ID NO: 5736 - DNA, 20 bp, synthetic construct
  misc_feature 1..20: note = chemically synthesized
  source 1..20: mol_type = other DNA
ttctcctgtctcagcctccc

SEQ ID NO: 5737 - DNA, 20 bp, synthetic construct
  misc_feature 1..20: note = chemically synthesized
  source 1..20: mol_type = other DNA
gtctcagcctcccgagtacc

SEQ ID NO: 5738 - DNA, 20 bp, synthetic construct
  misc_feature 1..20: note = chemically synthesized
  source 1..20: mol_type = other DNA
tctcagcctcccgagtacct

SEQ ID NO: 5739 - DNA, 20 bp, synthetic construct
  misc_feature 1..20: note = chemically synthesized
  source 1..20: mol_type = other DNA
ctcccgagtacctgggacta

SEQ ID NO: 5740 - DNA, 20 bp, synthetic construct
  misc_feature 1..20: note = chemically synthesized
  source 1..20: mol_type = other DNA
tcccgagtacctgggactac

SEQ ID NO: 5741 - DNA, 20 bp, synthetic construct
  misc_feature 1..20: note = chemically synthesized
  source 1..20: mol_type = other DNA
caggtgcccgccaccacgcc

SEQ ID NO: 5742 - DNA, 20 bp, synthetic construct
  misc_feature 1..20: note = chemically synthesized
  source 1..20: mol_type = other DNA
gatactttcttgtgtttttt

SEQ ID NO: 5743 - DNA, 20 bp, synthetic construct
  misc_feature 1..20: note = chemically synthesized
  source 1..20: mol_type = other DNA
actttcttgtgtttttttag

SEQ ID NO: 5744 - DNA, 20 bp, synthetic construct
  misc_feature 1..20: note = chemically synthesized
  source 1..20: mol_type = other DNA
tttcttgtgtttttttagta

SEQ ID NO: 5745 - DNA, 20 bp, synthetic construct
  misc_feature 1..20: note = chemically synthesized
  source 1..20: mol_type = other DNA
ttgtgtttttttagtagaga

SEQ ID NO: 5746 - DNA, 20 bp, synthetic construct
  misc_feature 1..20: note = chemically synthesized
  source 1..20: mol_type = other DNA
tgtgtttttttagtagagac

SEQ ID NO: 5747 - DNA, 20 bp, synthetic construct
  misc_feature 1..20: note = chemically synthesized
  source 1..20: mol_type = other DNA
gtgtttttttagtagagacg

SEQ ID NO: 5748 - DNA, 20 bp, synthetic construct
  misc_feature 1..20: note = chemically synthesized
  source 1..20: mol_type = other DNA
agacggggtttcaccattgc

SEQ ID NO: 5749 - DNA, 20 bp, synthetic construct
  misc_feature 1..20: note = chemically synthesized
  source 1..20: mol_type = other DNA
ggggtttcaccattgctggc

SEQ ID NO: 5750 - DNA, 20 bp, synthetic construct
  misc_feature 1..20: note = chemically synthesized
  source 1..20: mol_type = other DNA
gggtttcaccattgctggcc

SEQ ID NO: 5751 - DNA, 20 bp, synthetic construct
  misc_feature 1..20: note = chemically synthesized
  source 1..20: mol_type = other DNA
ttcaccattgctggccagga

SEQ ID NO: 5752 - DNA, 20 bp, synthetic construct
  misc_feature 1..20: note = chemically synthesized
  source 1..20: mol_type = other DNA
acctcatgatccgcccgcct

SEQ ID NO: 5753 - DNA, 20 bp, synthetic construct
  misc_feature 1..20: note = chemically synthesized
  source 1..20: mol_type = other DNA
tcatgatccgcccgcctcgg

SEQ ID NO: 5754 - DNA, 20 bp, synthetic construct
  misc_feature 1..20: note = chemically synthesized
  source 1..20: mol_type = other DNA
cggcagctactatgattata

SEQ ID NO: 5755 - DNA, 20 bp, synthetic construct
  misc_feature 1..20: note = chemically synthesized
  source 1..20: mol_type = other DNA
tatattgacattttcccctc

SEQ ID NO: 5756 - DNA, 20 bp, synthetic construct
  misc_feature 1..20: note = chemically synthesized
  source 1..20: mol_type = other DNA
cccctctagaacctacctca

SEQ ID NO: 5757 - DNA, 20 bp, synthetic construct
  misc_feature 1..20: note = chemically synthesized
  source 1..20: mol_type = other DNA
ctcacagttttcacttctga

SEQ ID NO: 5758 - DNA, 20 bp, synthetic construct
  misc_feature 1..20: note = chemically synthesized
  source 1..20: mol_type = other DNA
ttcacttctgatagctatac

SEQ ID NO: 5759 - DNA, 20 bp, synthetic construct
  misc_feature 1..20: note = chemically synthesized
  source 1..20: mol_type = other DNA
acttctgatagctataccag

SEQ ID NO: 5760 - DNA, 20 bp, synthetic construct
  misc_feature 1..20: note = chemically synthesized
  source 1..20: mol_type = other DNA
agctataccagaagatgcac

SEQ ID NO: 5761 - DNA, 20 bp, synthetic construct
  misc_feature 1..20: note = chemically synthesized
  source 1..20: mol_type = other DNA
cactagatcctctttgacat

SEQ ID NO: 5762 - DNA, 20 bp, synthetic construct
  misc_feature 1..20: note = chemically synthesized
  source 1..20: mol_type = other DNA
actagatcctctttgacatc

SEQ ID NO: 5763 - DNA, 20 bp, synthetic construct
  misc_feature 1..20: note = chemically synthesized
  source 1..20: mol_type = other DNA
attaaccttatactgtaacc

SEQ ID NO: 5764 - DNA, 20 bp, synthetic construct
  misc_feature 1..20: note = chemically synthesized
  source 1..20: mol_type = other DNA
aaccttatactgtaacccag

SEQ ID NO: 5765 - DNA, 20 bp, synthetic construct
  misc_feature 1..20: note = chemically synthesized
  source 1..20: mol_type = other DNA
gaagacctaatttattgttc

SEQ ID NO: 5766 - DNA, 20 bp, synthetic construct
  misc_feature 1..20: note = chemically synthesized
  source 1..20: mol_type = other DNA
aagacctaatttattgttct

SEQ ID NO: 5767 - DNA, 20 bp, synthetic construct
  misc_feature 1..20: note = chemically synthesized
  source 1..20: mol_type = other DNA
tttacacttatctttctaac

SEQ ID NO: 5768 - DNA, 20 bp, synthetic construct
  misc_feature 1..20: note = chemically synthesized
  source 1..20: mol_type = other DNA
accagatactttactctgtc

SEQ ID NO: 5769 - DNA, 20 bp, synthetic construct
  misc_feature 1..20: note = chemically synthesized
  source 1..20: mol_type = other DNA
agaaacaatttcctcacttt

SEQ ID NO: 5770 - DNA, 20 bp, synthetic construct
  misc_feature 1..20: note = chemically synthesized
  source 1..20: mol_type = other DNA
gaaacaatttcctcactttg

SEQ ID NO: 5771 - DNA, 20 bp, synthetic construct
  misc_feature 1..20: note = chemically synthesized
  source 1..20: mol_type = other DNA
atttcctcactttgaggctt

SEQ ID NO: 5772 - DNA, 20 bp, synthetic construct
  misc_feature 1..20: note = chemically synthesized
  source 1..20: mol_type = other DNA
cactttgaggcttaagctat

SEQ ID NO: 5773 - DNA, 20 bp, synthetic construct
  misc_feature 1..20: note = chemically synthesized
  source 1..20: mol_type = other DNA
gcttaagctattagaaacca

SEQ ID NO: 5774 - DNA, 20 bp, synthetic construct
  misc_feature 1..20: note = chemically synthesized
  source 1..20: mol_type = other DNA
ctgtatttttgtttccctct

SEQ ID NO: 5775 - DNA, 20 bp, synthetic construct
  misc_feature 1..20: note = chemically synthesized
  source 1..20: mol_type = other DNA
tgtttccctctgagtcaaat

SEQ ID NO: 5776 - DNA, 20 bp, synthetic construct
  misc_feature 1..20: note = chemically synthesized
  source 1..20: mol_type = other DNA
ttccctctgagtcaaataag

SEQ ID NO: 5777 - DNA, 20 bp, synthetic construct
  misc_feature 1..20: note = chemically synthesized
  source 1..20: mol_type = other DNA
ctctgagtcaaataagtaga

SEQ ID NO: 5778 - DNA, 20 bp, synthetic construct
  misc_feature 1..20: note = chemically synthesized
  source 1..20: mol_type = other DNA
ctgagtcaaataagtagaca

SEQ ID NO: 5779 - DNA, 20 bp, synthetic construct
  misc_feature 1..20: note = chemically synthesized
  source 1..20: mol_type = other DNA
tgagtcaaataagtagacag

SEQ ID NO: 5780 - DNA, 20 bp, synthetic construct
  misc_feature 1..20: note = chemically synthesized
  source 1..20: mol_type = other DNA
agaggctatgttattgaatg

SEQ ID NO: 5781 - DNA, 20 bp, synthetic construct
  misc_feature 1..20: note = chemically synthesized
  source 1..20: mol_type = other DNA
atgttattgaatgaagtcca

SEQ ID NO: 5782 - DNA, 20 bp, synthetic construct
  misc_feature 1..20: note = chemically synthesized
  source 1..20: mol_type = other DNA
ttgaatgaagtccaaagtga

SEQ ID NO: 5783 - DNA, 20 bp, synthetic construct
  misc_feature 1..20: note = chemically synthesized
  source 1..20: mol_type = other DNA
tgaatgaagtccaaagtgaa

SEQ ID NO: 5784 - DNA, 20 bp, synthetic construct
  misc_feature 1..20: note = chemically synthesized
  source 1..20: mol_type = other DNA
tgaagtccaaagtgaaagga

SEQ ID NO: 5785 - DNA, 20 bp, synthetic construct
  misc_feature 1..20: note = chemically synthesized
  source 1..20: mol_type = other DNA
gaagtccaaagtgaaaggaa

SEQ ID NO: 5786 - DNA, 20 bp, synthetic construct
  misc_feature 1..20: note = chemically synthesized
  source 1..20: mol_type = other DNA
gtccaaagtgaaaggaaagg

SEQ ID NO: 5787 - DNA, 20 bp, synthetic construct
  misc_feature 1..20: note = chemically synthesized
  source 1..20: mol_type = other DNA
tccaaagtgaaaggaaagga

SEQ ID NO: 5788 - DNA, 20 bp, synthetic construct
  misc_feature 1..20: note = chemically synthesized
  source 1..20: mol_type = other DNA
aggaaaggaaggcataatta

SEQ ID NO: 5789 - DNA, 20 bp, synthetic construct
  misc_feature 1..20: note = chemically synthesized
  source 1..20: mol_type = other DNA
ggaaaggaaggcataattac

SEQ ID NO: 5790 - DNA, 20 bp, synthetic construct
  misc_feature 1..20: note = chemically synthesized
  source 1..20: mol_type = other DNA
aaggaaggcataattacagg

SEQ ID NO: 5791 - DNA, 20 bp, synthetic construct
  misc_feature 1..20: note = chemically synthesized
  source 1..20: mol_type = other DNA
taattacaggaagacaaatc

SEQ ID NO: 5792 - DNA, 20 bp, synthetic construct
  misc_feature 1..20: note = chemically synthesized
  source 1..20: mol_type = other DNA
gaagacaaatctggttgttt

SEQ ID NO: 5793 - DNA, 20 bp, synthetic construct
  misc_feature 1..20: note = chemically synthesized
  source 1..20: mol_type = other DNA
aaaaataaatatttgctttt

SEQ ID NO: 5794 - DNA, 20 bp, synthetic construct
  misc_feature 1..20: note = chemically synthesized
  source 1..20: mol_type = other DNA
aattttaacacttaccttct

SEQ ID NO: 5795 - DNA, 20 bp, synthetic construct
  misc_feature 1..20: note = chemically synthesized
  source 1..20: mol_type = other DNA
ttaccttcttagatacctaa

SEQ ID NO: 5796 - DNA, 20 bp, synthetic construct
  misc_feature 1..20: note = chemically synthesized
  source 1..20: mol_type = other DNA
cttagatacctaatagaata

SEQ ID NO: 5797 - DNA, 20 bp, synthetic construct
  misc_feature 1..20: note = chemically synthesized
  source 1..20: mol_type = other DNA
ttagatacctaatagaatat

SEQ ID NO: 5798 - DNA, 20 bp, synthetic construct
  misc_feature 1..20: note = chemically synthesized
  source 1..20: mol_type = other DNA
gatacctaatagaatatagg

SEQ ID NO: 5799 - DNA, 20 bp, synthetic construct
  misc_feature 1..20: note = chemically synthesized
  source 1..20: mol_type = other DNA
attttcttgttatccatgca

SEQ ID NO: 5800 - DNA, 20 bp, synthetic construct
  misc_feature 1..20: note = chemically synthesized
  source 1..20: mol_type = other DNA
ccttcctttctttccttctt

SEQ ID NO: 5801 - DNA, 20 bp, synthetic construct
  misc_feature 1..20: note = chemically synthesized
  source 1..20: mol_type = other DNA
cctttctttccttctttgga

SEQ ID NO: 5802 - DNA, 20 bp, synthetic construct
  misc_feature 1..20: note = chemically synthesized
  source 1..20: mol_type = other DNA
ccttctttggaaagctgcac

SEQ ID NO: 5803 - DNA, 20 bp, synthetic construct
  misc_feature 1..20: note = chemically synthesized
  source 1..20: mol_type = other DNA
gaaagctgcactagcttact

SEQ ID NO: 5804 - DNA, 20 bp, synthetic construct
  misc_feature 1..20: note = chemically synthesized
  source 1..20: mol_type = other DNA
ctgcactagcttacttagaa

SEQ ID NO: 5805 - DNA, 20 bp, synthetic construct
  misc_feature 1..20: note = chemically synthesized
  source 1..20: mol_type = other DNA
tatcttttttcttttaaact

SEQ ID NO: 5806 - DNA, 20 bp, synthetic construct
  misc_feature 1..20: note = chemically synthesized
  source 1..20: mol_type = other DNA
ttttcttttaaactcagaat

SEQ ID NO: 5807 - DNA, 20 bp, synthetic construct
  misc_feature 1..20: note = chemically synthesized
  source 1..20: mol_type = other DNA
cttttaaactcagaataagt

SEQ ID NO: 5808 - DNA, 20 bp, synthetic construct
  misc_feature 1..20: note = chemically synthesized
  source 1..20: mol_type = other DNA
ttaaactcagaataagtcgg

SEQ ID NO: 5809 - DNA, 20 bp, synthetic construct
  misc_feature 1..20: note = chemically synthesized
  source 1..20: mol_type = other DNA
aactcagaataagtcggtag

SEQ ID NO: 5810 - DNA, 20 bp, synthetic construct
  misc_feature 1..20: note = chemically synthesized
  source 1..20: mol_type = other DNA
cagaataagtcggtagcgga

SEQ ID NO: 5811 - DNA, 20 bp, synthetic construct
  misc_feature 1..20: note = chemically synthesized
  source 1..20: mol_type = other DNA
agcggacagtctcatctgtt

SEQ ID NO: 5812 - DNA, 20 bp, synthetic construct
  misc_feature 1..20: note = chemically synthesized
  source 1..20: mol_type = other DNA
ggacagtctcatctgttcag

SEQ ID NO: 5813 - DNA, 20 bp, synthetic construct
  misc_feature 1..20: note = chemically synthesized
  source 1..20: mol_type = other DNA
tgttcagaagatcccccact

SEQ ID NO: 5814 - DNA, 20 bp, synthetic construct
  misc_feature 1..20: note = chemically synthesized
  source 1..20: mol_type = other DNA
gatcccccacttagatataa

SEQ ID NO: 5815 - DNA, 20 bp, synthetic construct
  misc_feature 1..20: note = chemically synthesized
  source 1..20: mol_type = other DNA
ccacttagatataaaagcaa

SEQ ID NO: 5816 - DNA, 20 bp, synthetic construct
  misc_feature 1..20: note = chemically synthesized
  source 1..20: mol_type = other DNA
agatataaaagcaaaagatc

SEQ ID NO: 5817 - DNA, 20 bp, synthetic construct
  misc_feature 1..20: note = chemically synthesized
  source 1..20: mol_type = other DNA
atataaaagcaaaagatcta

SEQ ID NO: 5818 - DNA, 20 bp, synthetic construct
  misc_feature 1..20: note = chemically synthesized
  source 1..20: mol_type = other DNA
tctagagcaaaatctgcttc

SEQ ID NO: 5819 - DNA, 20 bp, synthetic construct
  misc_feature 1..20: note = chemically synthesized
  source 1..20: mol_type = other DNA
aaaatctgcttccagccttg

SEQ ID NO: 5820 - DNA, 20 bp, synthetic construct
  misc_feature 1..20: note = chemically synthesized
  source 1..20: mol_type = other DNA
atctgcttccagccttgtag

SEQ ID NO: 5821 - DNA, 20 bp, synthetic construct
  misc_feature 1..20: note = chemically synthesized
  source 1..20: mol_type = other DNA
tgcttccagccttgtagcag

SEQ ID NO: 5822 - DNA, 20 bp, synthetic construct
  misc_feature 1..20: note = chemically synthesized
  source 1..20: mol_type = other DNA
cttccagccttgtagcagtg

SEQ ID NO: 5823 - DNA, 20 bp, synthetic construct
  misc_feature 1..20: note = chemically synthesized
  source 1..20: mol_type = other DNA
acatataaaatctaaaaaat

SEQ ID NO: 5824 - DNA, 20 bp, synthetic construct
  misc_feature 1..20: note = chemically synthesized
  source 1..20: mol_type = other DNA
catataaaatctaaaaaata

SEQ ID NO: 5825 - DNA, 20 bp, synthetic construct
  misc_feature 1..20: note = chemically synthesized
  source 1..20: mol_type = other DNA
ataaggattctaatttaaat

SEQ ID NO: 5826 - DNA, 20 bp, synthetic construct
  misc_feature 1..20: note = chemically synthesized
  source 1..20: mol_type = other DNA
attctaatttaaattagaca

SEQ ID NO: 5827 - DNA, 20 bp, synthetic construct
  misc_feature 1..20: note = chemically synthesized
  source 1..20: mol_type = other DNA
ctaatttaaattagacatgg

SEQ ID NO: 5828 - DNA, 20 bp, synthetic construct
  misc_feature 1..20: note = chemically synthesized
  source 1..20: mol_type = other DNA
atttaaattagacatggtag

SEQ ID NO: 5829 - DNA, 20 bp, synthetic construct
  misc_feature 1..20: note = chemically synthesized
  source 1..20: mol_type = other DNA
catggtagaagttgaatcca

SEQ ID NO: 5830 - DNA, 20 bp, synthetic construct
  misc_feature 1..20: note = chemically synthesized
  source 1..20: mol_type = other DNA
tgtgtcctctttatgaactg

SEQ ID NO: 5831 - DNA, 20 bp, synthetic construct
  misc_feature 1..20: note = chemically synthesized
  source 1..20: mol_type = other DNA
tgtagcttccctgtccaata

SEQ ID NO: 5832 - DNA, 20 bp, synthetic construct
  misc_feature 1..20: note = chemically synthesized
  source 1..20: mol_type = other DNA
agcttccctgtccaatatag

SEQ ID NO: 5833 - DNA, 20 bp, synthetic construct
  misc_feature 1..20: note = chemically synthesized
  source 1..20: mol_type = other DNA
tgaactgaactgtccaatac

SEQ ID NO: 5834 - DNA, 20 bp, synthetic construct
  misc_feature 1..20: note = chemically synthesized
  source 1..20: mol_type = other DNA
gaactgaactgtccaataca

SEQ ID NO: 5835 - DNA, 20 bp, synthetic construct
  misc_feature 1..20: note = chemically synthesized
  source 1..20: mol_type = other DNA
tttaaatataaattaactta

SEQ ID NO: 5836 - DNA, 20 bp, synthetic construct
  misc_feature 1..20: note = chemically synthesized
  source 1..20: mol_type = other DNA
agtaactgaaattgtaaatg

SEQ ID NO: 5837 - DNA, 20 bp, synthetic construct
  misc_feature 1..20: note = chemically synthesized
  source 1..20: mol_type = other DNA
aattacactaccatcatttc

SEQ ID NO: 5838 - DNA, 20 bp, synthetic construct
  misc_feature 1..20: note = chemically synthesized
  source 1..20: mol_type = other DNA
ctaccatcatttcaagcgca

SEQ ID NO: 5839 - DNA, 20 bp, synthetic construct
  misc_feature 1..20: note = chemically synthesized
  source 1..20: mol_type = other DNA
taccatcatttcaagcgcac

SEQ ID NO: 5840 - DNA, 20 bp, synthetic construct
  misc_feature 1..20: note = chemically synthesized
  source 1..20: mol_type = other DNA
ccatcatttcaagcgcacag

SEQ ID NO: 5841 - DNA, 20 bp, synthetic construct
  misc_feature 1..20: note = chemically synthesized
  source 1..20: mol_type = other DNA
aggagccatatattccactt

SEQ ID NO: 5842 - DNA, 20 bp, synthetic construct
  misc_feature 1..20: note = chemically synthesized
  source 1..20: mol_type = other DNA
attccactttagccatttta

SEQ ID NO: 5843 - DNA, 20 bp, synthetic construct
  misc_feature 1..20: note = chemically synthesized
  source 1..20: mol_type = other DNA
agccattttatggtatttta

SEQ ID NO: 5844 - DNA, 20 bp, synthetic construct
  misc_feature 1..20: note = chemically synthesized
  source 1..20: mol_type = other DNA
attttatagaacatcgccat

SEQ ID NO: 5845 - DNA, 20 bp, synthetic construct
  misc_feature 1..20: note = chemically synthesized
  source 1..20: mol_type = other DNA
atagaacatcgccatcagtt

SEQ ID NO: 5846 - DNA, 20 bp, synthetic construct
  misc_feature 1..20: note = chemically synthesized
  source 1..20: mol_type = other DNA
acatcgccatcagtttagaa

SEQ ID NO: 5847 - DNA, 20 bp, synthetic construct
  misc_feature 1..20: note = chemically synthesized
  source 1..20: mol_type = other DNA
tcagtttagaaaagttccct

SEQ ID NO: 5848 - DNA, 20 bp, synthetic construct
  misc_feature 1..20: note = chemically synthesized
  source 1..20: mol_type = other DNA
aaagttcccttggacaattc

SEQ ID NO: 5849 - DNA, 20 bp, synthetic construct
  misc_feature 1..20: note = chemically synthesized
  source 1..20: mol_type = other DNA
ttggacaattctggtccata

SEQ ID NO: 5850 - DNA, 20 bp, synthetic construct
  misc_feature 1..20: note = chemically synthesized
  source 1..20: mol_type = other DNA
agatatcacaacattcctgt

SEQ ID NO: 5851 - DNA, 20 bp, synthetic construct
  misc_feature 1..20: note = chemically synthesized
  source 1..20: mol_type = other DNA
atcacaacattcctgtgagt

SEQ ID NO: 5852 - DNA, 20 bp, synthetic construct
  misc_feature 1..20: note = chemically synthesized
  source 1..20: mol_type = other DNA
acattcctgtgagttggcta

SEQ ID NO: 5853 - DNA, 20 bp, synthetic construct
  misc_feature 1..20: note = chemically synthesized
  source 1..20: mol_type = other DNA
tggctatagtctccattttg

SEQ ID NO: 5854 - DNA, 20 bp, synthetic construct
  misc_feature 1..20: note = chemically synthesized
  source 1..20: mol_type = other DNA
ggctatagtctccattttga

SEQ ID NO: 5855 - DNA, 20 bp, synthetic construct
  misc_feature 1..20: note = chemically synthesized
  source 1..20: mol_type = other DNA
ctccattttgaaggttaatt

SEQ ID NO: 5856 - DNA, 20 bp, synthetic construct
  misc_feature 1..20: note = chemically synthesized
  source 1..20: mol_type = other DNA
aaggttaattaagtaaacct

SEQ ID NO: 5857 - DNA, 20 bp, synthetic construct
  misc_feature 1..20: note = chemically synthesized
  source 1..20: mol_type = other DNA
ggttaattaagtaaacctca

SEQ ID NO: 5858 - DNA, 20 bp, synthetic construct
  misc_feature 1..20: note = chemically synthesized
  source 1..20: mol_type = other DNA
aagtaaacctcagagaatga

SEQ ID NO: 5859 - DNA, 20 bp, synthetic construct
  misc_feature 1..20: note = chemically synthesized
  source 1..20: mol_type = other DNA
cagagaatgaaagaaacttc

SEQ ID NO: 5860 - DNA, 20 bp, synthetic construct
  misc_feature 1..20: note = chemically synthesized
  source 1..20: mol_type = other DNA
tactttgaaacttgaaaacc

SEQ ID NO: 5861 - DNA, 20 bp, synthetic construct
  misc_feature 1..20: note = chemically synthesized
  source 1..20: mol_type = other DNA
actttgaaacttgaaaacct

SEQ ID NO: 5862 - DNA, 20 bp, synthetic construct
  misc_feature 1..20: note = chemically synthesized
  source 1..20: mol_type = other DNA
gaaaacctaggtttttaatc

SEQ ID NO: 5863 - DNA, 20 bp, synthetic construct
  misc_feature 1..20: note = chemically synthesized
  source 1..20: mol_type = other DNA
tttaatccagctttgtttta

SEQ ID NO: 5864 - DNA, 20 bp, synthetic construct
  misc_feature 1..20: note = chemically synthesized
  source 1..20: mol_type = other DNA
tccagctttgttttacagca

SEQ ID NO: 5865 - DNA, 20 bp, synthetic construct
  misc_feature 1..20: note = chemically synthesized
  source 1..20: mol_type = other DNA
ccagctttgttttacagcaa

SEQ ID NO: 5866 - DNA, 20 bp, synthetic construct
  misc_feature 1..20: note = chemically synthesized
  source 1..20: mol_type = other DNA
acagcaaaggaaatgctcaa

SEQ ID NO: 5867 - DNA, 20 bp, synthetic construct
  misc_feature 1..20: note = chemically synthesized
  source 1..20: mol_type = other DNA
aaatgctcaaaagtacattt

SEQ ID NO: 5868 - DNA, 20 bp, synthetic construct
  misc_feature 1..20: note = chemically synthesized
  source 1..20: mol_type = other DNA
aatgctcaaaagtacatttc

SEQ ID NO: 5869 - DNA, 20 bp, synthetic construct
  misc_feature 1..20: note = chemically synthesized
  source 1..20: mol_type = other DNA
tttttcctctttcttaaata

SEQ ID NO: 5870 - DNA, 20 bp, synthetic construct
  misc_feature 1..20: note = chemically synthesized
  source 1..20: mol_type = other DNA
tcctctttcttaaatatggt

SEQ ID NO: 5871 - DNA, 20 bp, synthetic construct
  misc_feature 1..20: note = chemically synthesized
  source 1..20: mol_type = other DNA
cttaaatatggtcagactga

SEQ ID NO: 5872 - DNA, 20 bp, synthetic construct
  misc_feature 1..20: note = chemically synthesized
  source 1..20: mol_type = other DNA
taaatatggtcagactgata

SEQ ID NO: 5873 - DNA, 20 bp, synthetic construct
  misc_feature 1..20: note = chemically synthesized
  source 1..20: mol_type = other DNA
tagagtgacctacatgtgtc

SEQ ID NO: 5874 - DNA, 20 bp, synthetic construct
  misc_feature 1..20: note = chemically synthesized
  source 1..20: mol_type = other DNA
agagtgacctacatgtgtcc

SEQ ID NO: 5875 - DNA, 20 bp, synthetic construct
  misc_feature 1..20: note = chemically synthesized
  source 1..20: mol_type = other DNA
atgtgtccaggctgacacaa

SEQ ID NO: 5876 - DNA, 20 bp, synthetic construct
  misc_feature 1..20: note = chemically synthesized
  source 1..20: mol_type = other DNA
actatatttaaatatttttt

SEQ ID NO: 5877 - DNA, 20 bp, synthetic construct
  misc_feature 1..20: note = chemically synthesized
  source 1..20: mol_type = other DNA
ctatatttaaatatttttta

SEQ ID NO: 5878 - DNA, 20 bp, synthetic construct
  misc_feature 1..20: note = chemically synthesized
  source 1..20: mol_type = other DNA
ttttttaaggtcatttgtca

SEQ ID NO: 5879 - DNA, 20 bp, synthetic construct
  misc_feature 1..20: note = chemically synthesized
  source 1..20: mol_type = other DNA
aaggtcatttgtcatggact

SEQ ID NO: 5880 - DNA, 20 bp, synthetic construct
  misc_feature 1..20: note = chemically synthesized
  source 1..20: mol_type = other DNA
ggtcatttgtcatggactca

SEQ ID NO: 5881 - DNA, 20 bp, synthetic construct
  misc_feature 1..20: note = chemically synthesized
  source 1..20: mol_type = other DNA
taataattttttctttttta

SEQ ID NO: 5882 - DNA, 20 bp, synthetic construct
  misc_feature 1..20: note = chemically synthesized
  source 1..20: mol_type = other DNA
ctgcttttctttcttttttt

SEQ ID NO: 5883 - DNA, 20 bp, synthetic construct
  misc_feature 1..20: note = chemically synthesized
  source 1..20: mol_type = other DNA
tgcttttctttctttttttt

SEQ ID NO: 5884 - DNA, 20 bp, synthetic construct
  misc_feature 1..20: note = chemically synthesized
  source 1..20: mol_type = other DNA
aatatctctcaatatctttt

SEQ ID NO: 5885 - DNA, 20 bp, synthetic construct
  misc_feature 1..20: note = chemically synthesized
  source 1..20: mol_type = other DNA
tatctctcaatatcttttca

SEQ ID NO: 5886 - DNA, 20 bp, synthetic construct
  misc_feature 1..20: note = chemically synthesized
  source 1..20: mol_type = other DNA
ctcaatatcttttcagagaa

SEQ ID NO: 5887 - DNA, 20 bp, synthetic construct
  misc_feature 1..20: note = chemically synthesized
  source 1..20: mol_type = other DNA
caatatcttttcagagaaaa

SEQ ID NO: 5888 - DNA, 20 bp, synthetic construct
  misc_feature 1..20: note = chemically synthesized
  source 1..20: mol_type = other DNA
cttttcagagaaaagagtct

SEQ ID NO: 5889 - DNA, 20 bp, synthetic construct
  misc_feature 1..20: note = chemically synthesized
  source 1..20: mol_type = other DNA
agaaaagagtctaagcattc

SEQ ID NO: 5890 - DNA, 20 bp, synthetic construct
  misc_feature 1..20: note = chemically synthesized
  source 1..20: mol_type = other DNA
gcattctggtatgaatctgt

SEQ ID NO: 5891 - DNA, 20 bp, synthetic construct
  misc_feature 1..20: note = chemically synthesized
  source 1..20: mol_type = other DNA
cattctggtatgaatctgtt

SEQ ID NO: 5892 - DNA, 20 bp, synthetic construct
  misc_feature 1..20: note = chemically synthesized
  source 1..20: mol_type = other DNA
tctgttgggtcttgacactg

SEQ ID NO: 5893 - DNA, 20 bp, synthetic construct
  misc_feature 1..20: note = chemically synthesized
  source 1..20: mol_type = other DNA
ggtcttgacactgtagatga

SEQ ID NO: 5894 - DNA, 20 bp, synthetic construct
  misc_feature 1..20: note = chemically synthesized
  source 1..20: mol_type = other DNA
gtcttgacactgtagatgat

SEQ ID NO: 5895 - DNA, 20 bp, synthetic construct
  misc_feature 1..20: note = chemically synthesized
  source 1..20: mol_type = other DNA
gtagatgatgggattcatta

SEQ ID NO: 5896 - DNA, 20 bp, synthetic construct
  misc_feature 1..20: note = chemically synthesized
  source 1..20: mol_type = other DNA
tagatgatgggattcattaa

SEQ ID NO: 5897 - DNA, 20 bp, synthetic construct
  misc_feature 1..20: note = chemically synthesized
  source 1..20: mol_type = other DNA
atgatgggattcattaaagg

SEQ ID NO: 5898 - DNA, 20 bp, synthetic construct
  misc_feature 1..20: note = chemically synthesized
  source 1..20: mol_type = other DNA
tgatgggattcattaaaggt

SEQ ID NO: 5899 - DNA, 20 bp, synthetic construct
  misc_feature 1..20: note = chemically synthesized
  source 1..20: mol_type = other DNA
ggattcattaaaggtgggaa

SEQ ID NO: 5900 - DNA, 20 bp, synthetic construct
  misc_feature 1..20: note = chemically synthesized
  source 1..20: mol_type = other DNA
gattcattaaaggtgggaaa

SEQ ID NO: 5901 - DNA, 20 bp, synthetic construct
  misc_feature 1..20: note = chemically synthesized
  source 1..20: mol_type = other DNA
ttaaaggtgggaaaaggatg

SEQ ID NO: 5902 - DNA, 20 bp, synthetic construct
  misc_feature 1..20: note = chemically synthesized
  source 1..20: mol_type = other DNA
aggatgtagatgttgccaat

SEQ ID NO: 5903 - DNA, 20 bp, synthetic construct
  misc_feature 1..20: note = chemically synthesized
  source 1..20: mol_type = other DNA
agatgttgccaatgagaacg

SEQ ID NO: 5904 - DNA, 20 bp, synthetic construct
  misc_feature 1..20: note = chemically synthesized
  source 1..20: mol_type = other DNA
gatgttgccaatgagaacgt

SEQ ID NO: 5905 - DNA, 20 bp, synthetic construct
  misc_feature 1..20: note = chemically synthesized
  source 1..20: mol_type = other DNA
gccaatgagaacgtgggcca

SEQ ID NO: 5906 - DNA, 20 bp, synthetic construct
  misc_feature 1..20: note = chemically synthesized
  source 1..20: mol_type = other DNA
ccaatgagaacgtgggccac

SEQ ID NO: 5907 - DNA, 20 bp, synthetic construct
  misc_feature 1..20: note = chemically synthesized
  source 1..20: mol_type = other DNA
caatgagaacgtgggccacg

SEQ ID NO: 5908 - DNA, 20 bp, synthetic construct
  misc_feature 1..20: note = chemically synthesized
  source 1..20: mol_type = other DNA
aatgagaacgtgggccacgg

SEQ ID NO: 5909 - DNA, 20 bp, synthetic construct
  misc_feature 1..20: note = chemically synthesized
  source 1..20: mol_type = other DNA
agaacgtgggccacggggga

SEQ ID NO: 5910 - DNA, 20 bp, synthetic construct
  misc_feature 1..20: note = chemically synthesized
  source 1..20: mol_type = other DNA
gaacgtgggccacgggggaa

SEQ ID NO: 5911 - DNA, 20 bp, synthetic construct
  misc_feature 1..20: note = chemically synthesized
  source 1..20: mol_type = other DNA
gggaaaggtgcttgccaaaa

SEQ ID NO: 5912 - DNA, 20 bp, synthetic construct
  misc_feature 1..20: note = chemically synthesized
  source 1..20: mol_type = other DNA
ccaaaacggtgcaccattgt

SEQ ID NO: 5913 - DNA, 20 bp, synthetic construct
  misc_feature 1..20: note = chemically synthesized
  source 1..20: mol_type = other DNA
caaaacggtgcaccattgtg

SEQ ID NO: 5914 - DNA, 20 bp, synthetic construct
  misc_feature 1..20: note = chemically synthesized
  source 1..20: mol_type = other DNA
caccattgtgaggctaatga

SEQ ID NO: 5915 - DNA, 20 bp, synthetic construct
  misc_feature 1..20: note = chemically synthesized
  source 1..20: mol_type = other DNA
accattgtgaggctaatgat

SEQ ID NO: 5916 - DNA, 20 bp, synthetic construct
  misc_feature 1..20: note = chemically synthesized
  source 1..20: mol_type = other DNA
ccattgtgaggctaatgata

SEQ ID NO: 5917 - DNA, 20 bp, synthetic construct
  misc_feature 1..20: note = chemically synthesized
  source 1..20: mol_type = other DNA
tgaggctaatgatagggatg

SEQ ID NO: 5918 - DNA, 20 bp, synthetic construct
  misc_feature 1..20: note = chemically synthesized
  source 1..20: mol_type = other DNA
atgatagggatgtagaacac

SEQ ID NO: 5919 - DNA, 20 bp, synthetic construct
  misc_feature 1..20: note = chemically synthesized
  source 1..20: mol_type = other DNA
tgatagggatgtagaacaca

SEQ ID NO: 5920 - DNA, 20 bp, synthetic construct
  misc_feature 1..20: note = chemically synthesized
  source 1..20: mol_type = other DNA
agggatgtagaacacaagga

SEQ ID NO: 5921 - DNA, 20 bp, synthetic construct
  misc_feature 1..20: note = chemically synthesized
  source 1..20: mol_type = other DNA
tgtagaacacaaggacagca

SEQ ID NO: 5922 - DNA, 20 bp, synthetic construct
  misc_feature 1..20: note = chemically synthesized
  source 1..20: mol_type = other DNA
acacaaggacagcacagatg

SEQ ID NO: 5923 - DNA, 20 bp, synthetic construct
  misc_feature 1..20: note = chemically synthesized
  source 1..20: mol_type = other DNA
cacaaggacagcacagatgt

SEQ ID NO: 5924 - DNA, 20 bp, synthetic construct
  misc_feature 1..20: note = chemically synthesized
  source 1..20: mol_type = other DNA
caaggacagcacagatgtgg

SEQ ID NO: 5925 - DNA, 20 bp, synthetic construct
  misc_feature 1..20: note = chemically synthesized
  source 1..20: mol_type = other DNA
cagcacagatgtgggagatg

SEQ ID NO: 5926 - DNA, 20 bp, synthetic construct
  misc_feature 1..20: note = chemically synthesized
  source 1..20: mol_type = other DNA
agcacagatgtgggagatgc

SEQ ID NO: 5927 - DNA, 20 bp, synthetic construct
  misc_feature 1..20: note = chemically synthesized
  source 1..20: mol_type = other DNA
taatttatgcctctcttcct

SEQ ID NO: 5928 - DNA, 20 bp, synthetic construct
  misc_feature 1..20: note = chemically synthesized
  source 1..20: mol_type = other DNA
atttatgcctctcttcctga

SEQ ID NO: 5929 - DNA, 20 bp, synthetic construct
  misc_feature 1..20: note = chemically synthesized
  source 1..20: mol_type = other DNA
tttatgcctctcttcctgag

SEQ ID NO: 5930 - DNA, 20 bp, synthetic construct
  misc_feature 1..20: note = chemically synthesized
  source 1..20: mol_type = other DNA
tcttcctgagaggcaactgc

SEQ ID NO: 5931 - DNA, 20 bp, synthetic construct
  misc_feature 1..20: note = chemically synthesized
  source 1..20: mol_type = other DNA
cttcctgagaggcaactgcc

SEQ ID NO: 5932 - DNA, 20 bp, synthetic construct
  misc_feature 1..20: note = chemically synthesized
  source 1..20: mol_type = other DNA
gcaactgccaggactgactt

SEQ ID NO: 5933 - DNA, 20 bp, synthetic construct
  misc_feature 1..20: note = chemically synthesized
  source 1..20: mol_type = other DNA
gccaggactgacttaagaat

SEQ ID NO: 5934 - DNA, 20 bp, synthetic construct
  misc_feature 1..20: note = chemically synthesized
  source 1..20: mol_type = other DNA
ccaggactgacttaagaatc

SEQ ID NO: 5935 - DNA, 20 bp, synthetic construct
  misc_feature 1..20: note = chemically synthesized
  source 1..20: mol_type = other DNA
ctgacttaagaatcaggatg

SEQ ID NO: 5936 - DNA, 20 bp, synthetic construct
  misc_feature 1..20: note = chemically synthesized
  source 1..20: mol_type = other DNA
tgacttaagaatcaggatgt

SEQ ID NO: 5937 - DNA, 20 bp, synthetic construct
  misc_feature 1..20: note = chemically synthesized
  source 1..20: mol_type = other DNA
acttaagaatcaggatgtag

SEQ ID NO: 5938 - DNA, 20 bp, synthetic construct
  misc_feature 1..20: note = chemically synthesized
  source 1..20: mol_type = other DNA
agaatcaggatgtaggagaa

SEQ ID NO: 5939 - DNA, 20 bp, synthetic construct
  misc_feature 1..20: note = chemically synthesized
  source 1..20: mol_type = other DNA
gaatcaggatgtaggagaaa

SEQ ID NO: 5940 - DNA, 20 bp, synthetic construct
  misc_feature 1..20: note = chemically synthesized
  source 1..20: mol_type = other DNA
aggatgtaggagaaaaggat

SEQ ID NO: 5941 - DNA, 20 bp, synthetic construct
  misc_feature 1..20: note = chemically synthesized
  source 1..20: mol_type = other DNA
gtaggagaaaaggatgagta

SEQ ID NO: 5942 - DNA, 20 bp, synthetic construct
  misc_feature 1..20: note = chemically synthesized
  source 1..20: mol_type = other DNA
atgagtatagcatccaacaa

SEQ ID NO: 5943 - DNA, 20 bp, synthetic construct
  misc_feature 1..20: note = chemically synthesized
  source 1..20: mol_type = other DNA
aacaacagtatgcaaataac

SEQ ID NO: 5944 - DNA, 20 bp, synthetic construct
  misc_feature 1..20: note = chemically synthesized
  source 1..20: mol_type = other DNA
agtatgcaaataaccagcat

SEQ ID NO: 5945 - DNA, 20 bp, synthetic construct
  misc_feature 1..20: note = chemically synthesized
  source 1..20: mol_type = other DNA
gtatgcaaataaccagcatc

SEQ ID NO: 5946 - DNA, 20 bp, synthetic construct
  misc_feature 1..20: note = chemically synthesized
  source 1..20: mol_type = other DNA
tatgcaaataaccagcatca

SEQ ID NO: 5947 - DNA, 20 bp, synthetic construct
  misc_feature 1..20: note = chemically synthesized
  source 1..20: mol_type = other DNA
aaataaccagcatcagggca

SEQ ID NO: 5948 - DNA, 20 bp, synthetic construct
  misc_feature 1..20: note = chemically synthesized
  source 1..20: mol_type = other DNA
gggcatagtaactattgaat

SEQ ID NO: 5949 - DNA, 20 bp, synthetic construct
  misc_feature 1..20: note = chemically synthesized
  source 1..20: mol_type = other DNA
tattgaatcggatgtctgaa

SEQ ID NO: 5950 - DNA, 20 bp, synthetic construct
  misc_feature 1..20: note = chemically synthesized
  source 1..20: mol_type = other DNA
attgaatcggatgtctgaac

SEQ ID NO: 5951 - DNA, 20 bp, synthetic construct
  misc_feature 1..20: note = chemically synthesized
  source 1..20: mol_type = other DNA
atcggatgtctgaacaggct

SEQ ID NO: 5952 - DNA, 20 bp, synthetic construct
  misc_feature 1..20: note = chemically synthesized
  source 1..20: mol_type = other DNA
ggatgtctgaacaggctaag

SEQ ID NO: 5953 - DNA, 20 bp, synthetic construct
  misc_feature 1..20: note = chemically synthesized
  source 1..20: mol_type = other DNA
atgtctgaacaggctaagcg

SEQ ID NO: 5954 - DNA, 20 bp, synthetic construct
  misc_feature 1..20: note = chemically synthesized
  source 1..20: mol_type = other DNA
tctgaacaggctaagcggag

SEQ ID NO: 5955 - DNA, 20 bp, synthetic construct
  misc_feature 1..20: note = chemically synthesized
  source 1..20: mol_type = other DNA
aggctaagcggagaagatcc

SEQ ID NO: 5956 - DNA, 20 bp, synthetic construct
  misc_feature 1..20: note = chemically synthesized
  source 1..20: mol_type = other DNA
aagcggagaagatcctggtg

SEQ ID NO: 5957 - DNA, 20 bp, synthetic construct
  misc_feature 1..20: note = chemically synthesized
  source 1..20: mol_type = other DNA
agcggagaagatcctggtgc

SEQ ID NO: 5958 - DNA, 20 bp, synthetic construct
  misc_feature 1..20: note = chemically synthesized
  source 1..20: mol_type = other DNA
ggagaagatcctggtgcagg

SEQ ID NO: 5959 - DNA, 20 bp, synthetic construct
  misc_feature 1..20: note = chemically synthesized
  source 1..20: mol_type = other DNA
aagatcctggtgcaggcaga

SEQ ID NO: 5960 - DNA, 20 bp, synthetic construct
  misc_feature 1..20: note = chemically synthesized
  source 1..20: mol_type = other DNA
gatcctggtgcaggcagaaa

SEQ ID NO: 5961 - DNA, 20 bp, synthetic construct
  misc_feature 1..20: note = chemically synthesized
  source 1..20: mol_type = other DNA
ctggtgcaggcagaaagagt

SEQ ID NO: 5962 - DNA, 20 bp, synthetic construct
  misc_feature 1..20: note = chemically synthesized
  source 1..20: mol_type = other DNA
tgcaggcagaaagagtgaga

SEQ ID NO: 5963 - DNA, 20 bp, synthetic construct
  misc_feature 1..20: note = chemically synthesized
  source 1..20: mol_type = other DNA
gcaggcagaaagagtgagaa

SEQ ID NO: 5964 - DNA, 20 bp, synthetic construct
  misc_feature 1..20: note = chemically synthesized
  source 1..20: mol_type = other DNA
agaaagagtgagaaaggatg

SEQ ID NO: 5965 - DNA, 20 bp, synthetic construct
  misc_feature 1..20: note = chemically synthesized
  source 1..20: mol_type = other DNA
gagaaaggatgtggaaatga

SEQ ID NO: 5966 - DNA, 20 bp, synthetic construct
  misc_feature 1..20: note = chemically synthesized
  source 1..20: mol_type = other DNA
tgacagtaattaaaaaattt

SEQ ID NO: 5967 - DNA, 20 bp, synthetic construct
  misc_feature 1..20: note = chemically synthesized
  source 1..20: mol_type = other DNA
agtaattaaaaaatttcaga

SEQ ID NO: 5968 - DNA, 20 bp, synthetic construct
  misc_feature 1..20: note = chemically synthesized
  source 1..20: mol_type = other DNA
aaaaaatttcagacagatga

SEQ ID NO: 5969 - DNA, 20 bp, synthetic construct
  misc_feature 1..20: note = chemically synthesized
  source 1..20: mol_type = other DNA
aaaaatttcagacagatgat

SEQ ID NO: 5970 - DNA, 20 bp, synthetic construct
  misc_feature 1..20: note = chemically synthesized
  source 1..20: mol_type = other DNA
aaaatttcagacagatgatg

SEQ ID NO: 5971 - DNA, 20 bp, synthetic construct
  misc_feature 1..20: note = chemically synthesized
  source 1..20: mol_type = other DNA
aaatttcagacagatgatgg

SEQ ID NO: 5972 - DNA, 20 bp, synthetic construct
  misc_feature 1..20: note = chemically synthesized
  source 1..20: mol_type = other DNA
aatttcagacagatgatggg

SEQ ID NO: 5973 - DNA, 20 bp, synthetic construct
  misc_feature 1..20: note = chemically synthesized
  source 1..20: mol_type = other DNA
agatgatggggggtgtaata

SEQ ID NO: 5974 - DNA, 20 bp, synthetic construct
  misc_feature 1..20: note = chemically synthesized
  source 1..20: mol_type = other DNA
gaaaaaactcctacctatta

SEQ ID NO: 5975 - DNA, 20 bp, synthetic construct
  misc_feature 1..20: note = chemically synthesized
  source 1..20: mol_type = other DNA
aaactcctacctattatagt

SEQ ID NO: 5976 - DNA, 20 bp, synthetic construct
  misc_feature 1..20: note = chemically synthesized
  source 1..20: mol_type = other DNA
gagcccaattttgataattc

SEQ ID NO: 5977 - DNA, 20 bp, synthetic construct
  misc_feature 1..20: note = chemically synthesized
  source 1..20: mol_type = other DNA
aattttgataattctggaat

SEQ ID NO: 5978 - DNA, 20 bp, synthetic construct
  misc_feature 1..20: note = chemically synthesized
  source 1..20: mol_type = other DNA
ttgataattctggaattagt

SEQ ID NO: 5979 - DNA, 20 bp, synthetic construct
  misc_feature 1..20: note = chemically synthesized
  source 1..20: mol_type = other DNA
tgataattctggaattagtc

SEQ ID NO: 5980 - DNA, 20 bp, synthetic construct
  misc_feature 1..20: note = chemically synthesized
  source 1..20: mol_type = other DNA
aattctggaattagtcagga

SEQ ID NO: 5981 - DNA, 20 bp, synthetic construct
  misc_feature 1..20: note = chemically synthesized
  source 1..20: mol_type = other DNA
ttctggaattagtcaggatg

SEQ ID NO: 5982 - DNA, 20 bp, synthetic construct
  misc_feature 1..20: note = chemically synthesized
  source 1..20: mol_type = other DNA
tctggaattagtcaggatgg

SEQ ID NO: 5983 - DNA, 20 bp, synthetic construct
  misc_feature 1..20: note = chemically synthesized
  source 1..20: mol_type = other DNA
gtcaggatggaggaataacg

SEQ ID NO: 5984 - DNA, 20 bp, synthetic construct
  misc_feature 1..20: note = chemically synthesized
  source 1..20: mol_type = other DNA
aggatggaggaataacgtag

SEQ ID NO: 5985 - DNA, 20 bp, synthetic construct
  misc_feature 1..20: note = chemically synthesized
  source 1..20: mol_type = other DNA
gattgcaaattgcaatgtac

SEQ ID NO: 5986 - DNA, 20 bp, synthetic construct
  misc_feature 1..20: note = chemically synthesized
  source 1..20: mol_type = other DNA
aaattgcaatgtaccggtca

SEQ ID NO: 5987 - DNA, 20 bp, synthetic construct
  misc_feature 1..20: note = chemically synthesized
  source 1..20: mol_type = other DNA
aattgcaatgtaccggtcaa

SEQ ID NO: 5988 - DNA, 20 bp, synthetic construct
  misc_feature 1..20: note = chemically synthesized
  source 1..20: mol_type = other DNA
aatgtaccggtcaaaggcca

SEQ ID NO: 5989 - DNA, 20 bp, synthetic construct
  misc_feature 1..20: note = chemically synthesized
  source 1..20: mol_type = other DNA
taccggtcaaaggccatagt

SEQ ID NO: 5990 - DNA, 20 bp, synthetic construct
  misc_feature 1..20: note = chemically synthesized
  source 1..20: mol_type = other DNA
accggtcaaaggccatagtg

SEQ ID NO: 5991 - DNA, 20 bp, synthetic construct
  misc_feature 1..20: note = chemically synthesized
  source 1..20: mol_type = other DNA
cggtcaaaggccatagtgag

SEQ ID NO: 5992 - DNA, 20 bp, synthetic construct
  misc_feature 1..20: note = chemically synthesized
  source 1..20: mol_type = other DNA
ggtcaaaggccatagtgagg

SEQ ID NO: 5993 - DNA, 20 bp, synthetic construct
  misc_feature 1..20: note = chemically synthesized
  source 1..20: mol_type = other DNA
aaaggccatagtgaggagga

SEQ ID NO: 5994 - DNA, 20 bp, synthetic construct
  misc_feature 1..20: note = chemically synthesized
  source 1..20: mol_type = other DNA
aggccatagtgaggaggaca

SEQ ID NO: 5995 - DNA, 20 bp, synthetic construct
  misc_feature 1..20: note = chemically synthesized
  source 1..20: mol_type = other DNA
ggccatagtgaggaggacag

SEQ ID NO: 5996 - DNA, 20 bp, synthetic construct
  misc_feature 1..20: note = chemically synthesized
  source 1..20: mol_type = other DNA
ggaggacagaggactccatg

SEQ ID NO: 5997 - DNA, 20 bp, synthetic construct
  misc_feature 1..20: note = chemically synthesized
  source 1..20: mol_type = other DNA
gaggacagaggactccatga

SEQ ID NO: 5998 - DNA, 20 bp, synthetic construct
  misc_feature 1..20: note = chemically synthesized
  source 1..20: mol_type = other DNA
acagaggactccatgaagga

SEQ ID NO: 5999 - DNA, 20 bp, synthetic construct
  misc_feature 1..20: note = chemically synthesized
  source 1..20: mol_type = other DNA
actccatgaaggacagacca

SEQ ID NO: 6000 - DNA, 20 bp, synthetic construct
  misc_feature 1..20: note = chemically synthesized
  source 1..20: mol_type = other DNA
aggacagaccatggatgaaa

SEQ ID NO: 6001 - DNA, 20 bp, synthetic construct
  misc_feature 1..20: note = chemically synthesized
  source 1..20: mol_type = other DNA
ggacagaccatggatgaaat

SEQ ID NO: 6002 - DNA, 20 bp, synthetic construct
  misc_feature 1..20: note = chemically synthesized
  source 1..20: mol_type = other DNA
gaccatggatgaaataggac

SEQ ID NO: 6003 - DNA, 20 bp, synthetic construct
  misc_feature 1..20: note = chemically synthesized
  source 1..20: mol_type = other DNA
accatggatgaaataggact

SEQ ID NO: 6004 - DNA, 20 bp, synthetic construct
  misc_feature 1..20: note = chemically synthesized
  source 1..20: mol_type = other DNA
tgaaataggactgggcaatg

SEQ ID NO: 6005 - DNA, 20 bp, synthetic construct
  misc_feature 1..20: note = chemically synthesized
  source 1..20: mol_type = other DNA
gaaataggactgggcaatgc

SEQ ID NO: 6006 - DNA, 20 bp, synthetic construct
  misc_feature 1..20: note = chemically synthesized
  source 1..20: mol_type = other DNA
actgggcaatgcaggaatcc

SEQ ID NO: 6007 - DNA, 20 bp, synthetic construct
  misc_feature 1..20: note = chemically synthesized
  source 1..20: mol_type = other DNA
atctctcgaatgatccccca

SEQ ID NO: 6008 - DNA, 20 bp, synthetic construct
  misc_feature 1..20: note = chemically synthesized
  source 1..20: mol_type = other DNA
tctctcgaatgatcccccac

SEQ ID NO: 6009 - DNA, 20 bp, synthetic construct
  misc_feature 1..20: note = chemically synthesized
  source 1..20: mol_type = other DNA
atgatcccccacaggatccc

SEQ ID NO: 6010 - DNA, 20 bp, synthetic construct
  misc_feature 1..20: note = chemically synthesized
  source 1..20: mol_type = other DNA
gatccccagcactgtgtaca

SEQ ID NO: 6011 - DNA, 20 bp, synthetic construct
  misc_feature 1..20: note = chemically synthesized
  source 1..20: mol_type = other DNA
ccccagcactgtgtacacag

SEQ ID NO: 6012 - DNA, 20 bp, synthetic construct
  misc_feature 1..20: note = chemically synthesized
  source 1..20: mol_type = other DNA
agcactgtgtacacagtgga

SEQ ID NO: 6013 - DNA, 20 bp, synthetic construct
  misc_feature 1..20: note = chemically synthesized
  source 1..20: mol_type = other DNA
acagtggacagccccatgca

SEQ ID NO: 6014 - DNA, 20 bp, synthetic construct
  misc_feature 1..20: note = chemically synthesized
  source 1..20: mol_type = other DNA
cagtggacagccccatgcac

SEQ ID NO: 6015 - DNA, 20 bp, synthetic construct
  misc_feature 1..20: note = chemically synthesized
  source 1..20: mol_type = other DNA
ggacagccccatgcacaggt

SEQ ID NO: 6016 - DNA, 20 bp, synthetic construct
  misc_feature 1..20: note = chemically synthesized
  source 1..20: mol_type = other DNA
agccccatgcacaggtcagt

SEQ ID NO: 6017 - DNA, 20 bp, synthetic construct
  misc_feature 1..20: note = chemically synthesized
  source 1..20: mol_type = other DNA
gccccatgcacaggtcagtg

SEQ ID NO: 6018 - DNA, 20 bp, synthetic construct
  misc_feature 1..20: note = chemically synthesized
  source 1..20: mol_type = other DNA
ccccatgcacaggtcagtga

SEQ ID NO: 6019 - DNA, 20 bp, synthetic construct
  misc_feature 1..20: note = chemically synthesized
  source 1..20: mol_type = other DNA
atgcacaggtcagtgagggc

SEQ ID NO: 6020 - DNA, 20 bp, synthetic construct
  misc_feature 1..20: note = chemically synthesized
  source 1..20: mol_type = other DNA
caggtcagtgagggccagca

SEQ ID NO: 6021 - DNA, 20 bp, synthetic construct
  misc_feature 1..20: note = chemically synthesized
  source 1..20: mol_type = other DNA
tcagtgagggccagcatgga

SEQ ID NO: 6022 - DNA, 20 bp, synthetic construct
  misc_feature 1..20: note = chemically synthesized
  source 1..20: mol_type = other DNA
cagtgagggccagcatggac

SEQ ID NO: 6023 - DNA, 20 bp, synthetic construct
  misc_feature 1..20: note = chemically synthesized
  source 1..20: mol_type = other DNA
tgagggccagcatggacagg

SEQ ID NO: 6024 - DNA, 20 bp, synthetic construct
  misc_feature 1..20: note = chemically synthesized
  source 1..20: mol_type = other DNA
catggacaggaagtaaaaca

SEQ ID NO: 6025 - DNA, 20 bp, synthetic construct
  misc_feature 1..20: note = chemically synthesized
  source 1..20: mol_type = other DNA
atggacaggaagtaaaacat

SEQ ID NO: 6026 - DNA, 20 bp, synthetic construct
  misc_feature 1..20: note = chemically synthesized
  source 1..20: mol_type = other DNA
acaggaagtaaaacataggc

SEQ ID NO: 6027 - DNA, 20 bp, synthetic construct
  misc_feature 1..20: note = chemically synthesized
  source 1..20: mol_type = other DNA
aagtaaaacataggctggtg

SEQ ID NO: 6028 - DNA, 20 bp, synthetic construct
  misc_feature 1..20: note = chemically synthesized
  source 1..20: mol_type = other DNA
agtaaaacataggctggtgc

SEQ ID NO: 6029 - DNA, 20 bp, synthetic construct
  misc_feature 1..20: note = chemically synthesized
  source 1..20: mol_type = other DNA
aacataggctggtgcaggct

SEQ ID NO: 6030 - DNA, 20 bp, synthetic construct
  misc_feature 1..20: note = chemically synthesized
  source 1..20: mol_type = other DNA
aggctggtgcaggcttggct

SEQ ID NO: 6031 - DNA, 20 bp, synthetic construct
  misc_feature 1..20: note = chemically synthesized
  source 1..20: mol_type = other DNA
ttggctcagtccatatcaca

SEQ ID NO: 6032 - DNA, 20 bp, synthetic construct
  misc_feature 1..20: note = chemically synthesized
  source 1..20: mol_type = other DNA
ggctcagtccatatcacatg

SEQ ID NO: 6033 - DNA, 20 bp, synthetic construct
  misc_feature 1..20: note = chemically synthesized
  source 1..20: mol_type = other DNA
agaaccatgcaattgcccaa

SEQ ID NO: 6034 - DNA, 20 bp, synthetic construct
  misc_feature 1..20: note = chemically synthesized
  source 1..20: mol_type = other DNA
gcaattgcccaaaagcacca

SEQ ID NO: 6035 - DNA, 20 bp, synthetic construct
  misc_feature 1..20: note = chemically synthesized
  source 1..20: mol_type = other DNA
tgcccaaaagcaccatggca

SEQ ID NO: 6036 - DNA, 20 bp, synthetic construct
  misc_feature 1..20: note = chemically synthesized
  source 1..20: mol_type = other DNA
aaagcaccatggcatagatt

SEQ ID NO: 6037 - DNA, 20 bp, synthetic construct
  misc_feature 1..20: note = chemically synthesized
  source 1..20: mol_type = other DNA
aagcaccatggcatagattg

SEQ ID NO: 6038 - DNA, 20 bp, synthetic construct
  misc_feature 1..20: note = chemically synthesized
  source 1..20: mol_type = other DNA
gcaccatggcatagattgag

SEQ ID NO: 6039 - DNA, 20 bp, synthetic construct
  misc_feature 1..20: note = chemically synthesized
  source 1..20: mol_type = other DNA
ccatggcatagattgaggag

SEQ ID NO: 6040 - DNA, 20 bp, synthetic construct
  misc_feature 1..20: note = chemically synthesized
  source 1..20: mol_type = other DNA
catggcatagattgaggaga

SEQ ID NO: 6041 - DNA, 20 bp, synthetic construct
  misc_feature 1..20: note = chemically synthesized
  source 1..20: mol_type = other DNA
atggcatagattgaggagaa

SEQ ID NO: 6042 - DNA, 20 bp, synthetic construct
  misc_feature 1..20: note = chemically synthesized
  source 1..20: mol_type = other DNA
tggcatagattgaggagaag

SEQ ID NO: 6043 - DNA, 20 bp, synthetic construct
  misc_feature 1..20: note = chemically synthesized
  source 1..20: mol_type = other DNA
atagattgaggagaagggga

SEQ ID NO: 6044 - DNA, 20 bp, synthetic construct
  misc_feature 1..20: note = chemically synthesized
  source 1..20: mol_type = other DNA
attgaggagaaggggatgga

SEQ ID NO: 6045 - DNA, 20 bp, synthetic construct
  misc_feature 1..20: note = chemically synthesized
  source 1..20: mol_type = other DNA
aggagaaggggatggaaagc

SEQ ID NO: 6046 - DNA, 20 bp, synthetic construct
  misc_feature 1..20: note = chemically synthesized
  source 1..20: mol_type = other DNA
ggagaaggggatggaaagcc

SEQ ID NO: 6047 - DNA, 20 bp, synthetic construct
  misc_feature 1..20: note = chemically synthesized
  source 1..20: mol_type = other DNA
gagaaggggatggaaagcca

SEQ ID NO: 6048 - DNA, 20 bp, synthetic construct
  misc_feature 1..20: note = chemically synthesized
  source 1..20: mol_type = other DNA
agaaggggatggaaagccag

SEQ ID NO: 6049 - DNA, 20 bp, synthetic construct
  misc_feature 1..20: note = chemically synthesized
  source 1..20: mol_type = other DNA
ggggtattgctgctccatgc

SEQ ID NO: 6050 - DNA, 20 bp, synthetic construct
  misc_feature 1..20: note = chemically synthesized
  source 1..20: mol_type = other DNA
ctgctccatgccagaaaatc

SEQ ID NO: 6051 - DNA, 20 bp, synthetic construct
  misc_feature 1..20: note = chemically synthesized
  source 1..20: mol_type = other DNA
tccatgccagaaaatccagt

SEQ ID NO: 6052 - DNA, 20 bp, synthetic construct
  misc_feature 1..20: note = chemically synthesized
  source 1..20: mol_type = other DNA
atgccagaaaatccagtgag

SEQ ID NO: 6053 - DNA, 20 bp, synthetic construct
  misc_feature 1..20: note = chemically synthesized
  source 1..20: mol_type = other DNA
cagaaaatccagtgagaaga

SEQ ID NO: 6054 - DNA, 20 bp, synthetic construct
  misc_feature 1..20: note = chemically synthesized
  source 1..20: mol_type = other DNA
agaaaatccagtgagaagaa

SEQ ID NO: 6055 - DNA, 20 bp, synthetic construct
  misc_feature 1..20: note = chemically synthesized
  source 1..20: mol_type = other DNA
aaatccagtgagaagaaagg

SEQ ID NO: 6056 - DNA, 20 bp, synthetic construct
  misc_feature 1..20: note = chemically synthesized
  source 1..20: mol_type = other DNA
aagaaaggaagaattcgtgc

SEQ ID NO: 6057 - DNA, 20 bp, synthetic construct
  misc_feature 1..20: note = chemically synthesized
  source 1..20: mol_type = other DNA
ggaagaattcgtgctggtgc

SEQ ID NO: 6058 - DNA, 20 bp, synthetic construct
  misc_feature 1..20: note = chemically synthesized
  source 1..20: mol_type = other DNA
gaagaattcgtgctggtgct

SEQ ID NO: 6059 - DNA, 20 bp, synthetic construct
  misc_feature 1..20: note = chemically synthesized
  source 1..20: mol_type = other DNA
aagaattcgtgctggtgcta

SEQ ID NO: 6060 - DNA, 20 bp, synthetic construct
  misc_feature 1..20: note = chemically synthesized
  source 1..20: mol_type = other DNA
gctggtgctagggcttactg

SEQ ID NO: 6061 - DNA, 20 bp, synthetic construct
  misc_feature 1..20: note = chemically synthesized
  source 1..20: mol_type = other DNA
gcttactgaagtaatcattc

SEQ ID NO: 6062 - DNA, 20 bp, synthetic construct
  misc_feature 1..20: note = chemically synthesized
  source 1..20: mol_type = other DNA
gaagtaatcattctggaact

SEQ ID NO: 6063 - DNA, 20 bp, synthetic construct
  misc_feature 1..20: note = chemically synthesized
  source 1..20: mol_type = other DNA
tctggaactgagaaacatgt

SEQ ID NO: 6064 - DNA, 20 bp, synthetic construct
  misc_feature 1..20: note = chemically synthesized
  source 1..20: mol_type = other DNA
tggaactgagaaacatgtga

SEQ ID NO: 6065 - DNA, 20 bp, synthetic construct
  misc_feature 1..20: note = chemically synthesized
  source 1..20: mol_type = other DNA
catgtgagagtattttttca

SEQ ID NO: 6066 - DNA, 20 bp, synthetic construct
  misc_feature 1..20: note = chemically synthesized
  source 1..20: mol_type = other DNA
atgtgagagtattttttcaa

SEQ ID NO: 6067 - DNA, 20 bp, synthetic construct
  misc_feature 1..20: note = chemically synthesized
  source 1..20: mol_type = other DNA
ctgaatacaatgaaatttct

SEQ ID NO: 6068 - DNA, 20 bp, synthetic construct
  misc_feature 1..20: note = chemically synthesized
  source 1..20: mol_type = other DNA
acttactgacttaaaaaaaa

SEQ ID NO: 6069 - DNA, 20 bp, synthetic construct
  misc_feature 1..20: note = chemically synthesized
  source 1..20: mol_type = other DNA
ctgacttaaaaaaaacagct

SEQ ID NO: 6070 - DNA, 20 bp, synthetic construct
  misc_feature 1..20: note = chemically synthesized
  source 1..20: mol_type = other DNA
ctgagaaattctgtttcttt

SEQ ID NO: 6071 - DNA, 20 bp, synthetic construct
  misc_feature 1..20: note = chemically synthesized
  source 1..20: mol_type = other DNA
aattctgtttctttgagaca

SEQ ID NO: 6072 - DNA, 20 bp, synthetic construct
  misc_feature 1..20: note = chemically synthesized
  source 1..20: mol_type = other DNA
acatagtatccattgccttt

SEQ ID NO: 6073 - DNA, 20 bp, synthetic construct
  misc_feature 1..20: note = chemically synthesized
  source 1..20: mol_type = other DNA
atccattgcctttgagaaaa

SEQ ID NO: 6074 - DNA, 20 bp, synthetic construct
  misc_feature 1..20: note = chemically synthesized
  source 1..20: mol_type = other DNA
cttcttttgatgtcatttaa

SEQ ID NO: 6075 - DNA, 20 bp, synthetic construct
  misc_feature 1..20: note = chemically synthesized
  source 1..20: mol_type = other DNA
gtcattattttttcactgtc

SEQ ID NO: 6076 - DNA, 20 bp, synthetic construct
  misc_feature 1..20: note = chemically synthesized
  source 1..20: mol_type = other DNA
tctggatgtgaacatatcct

SEQ ID NO: 6077 - DNA, 20 bp, synthetic construct
  misc_feature 1..20: note = chemically synthesized
  source 1..20: mol_type = other DNA
ggatgtgaacatatccttag

SEQ ID NO: 6078 - DNA, 20 bp, synthetic construct
  misc_feature 1..20: note = chemically synthesized
  source 1..20: mol_type = other DNA
aacatatccttagaagccat

SEQ ID NO: 6079 - DNA, 20 bp, synthetic construct
  misc_feature 1..20: note = chemically synthesized
  source 1..20: mol_type = other DNA
agccataagcaaaaacaaat

SEQ ID NO: 6080 - DNA, 20 bp, synthetic construct
  misc_feature 1..20: note = chemically synthesized
  source 1..20: mol_type = other DNA
gccataagcaaaaacaaata

SEQ ID NO: 6081 - DNA, 20 bp, synthetic construct
  misc_feature 1..20: note = chemically synthesized
  source 1..20: mol_type = other DNA
ataagcaaaaacaaataagg

SEQ ID NO: 6082 - DNA, 20 bp, synthetic construct
  misc_feature 1..20: note = chemically synthesized
  source 1..20: mol_type = other DNA
aagcaaaaacaaataaggaa

SEQ ID NO: 6083 - DNA, 20 bp, synthetic construct
  misc_feature 1..20: note = chemically synthesized
  source 1..20: mol_type = other DNA
aaaacaaataaggaagagat

SEQ ID NO: 6084 - DNA, 20 bp, synthetic construct
  misc_feature 1..20: note = chemically synthesized
  source 1..20: mol_type = other DNA
aataaggaagagattagtaa

SEQ ID NO: 6085 - DNA, 20 bp, synthetic construct
  misc_feature 1..20: note = chemically synthesized
  source 1..20: mol_type = other DNA
ataaggaagagattagtaaa

SEQ ID NO: 6086 - DNA, 20 bp, synthetic construct
  misc_feature 1..20: note = chemically synthesized
  source 1..20: mol_type = other DNA
aaggaagagattagtaaaag

SEQ ID NO: 6087 - DNA, 20 bp, synthetic construct
  misc_feature 1..20: note = chemically synthesized
  source 1..20: mol_type = other DNA
gaagagattagtaaaaggag

SEQ ID NO: 6088 - DNA, 20 bp, synthetic construct
  misc_feature 1..20: note = chemically synthesized
  source 1..20: mol_type = other DNA
aagagattagtaaaaggaga

SEQ ID NO: 6089 - DNA, 20 bp, synthetic construct
  misc_feature 1..20: note = chemically synthesized
  source 1..20: mol_type = other DNA
gattagtaaaaggagaaggc

SEQ ID NO: 6090 - DNA, 20 bp, synthetic construct
  misc_feature 1..20: note = chemically synthesized
  source 1..20: mol_type = other DNA
ttttaaaaaaatacgttgct

SEQ ID NO: 6091 - DNA, 20 bp, synthetic construct
  misc_feature 1..20: note = chemically synthesized
  source 1..20: mol_type = other DNA
cgttgcttagacattttccc

SEQ ID NO: 6092 - DNA, 20 bp, synthetic construct
  misc_feature 1..20: note = chemically synthesized
  source 1..20: mol_type = other DNA
gttgcttagacattttccca

SEQ ID NO: 6093 - DNA, 20 bp, synthetic construct
  misc_feature 1..20: note = chemically synthesized
  source 1..20: mol_type = other DNA
cttagacattttcccaagga

SEQ ID NO: 6094 - DNA, 20 bp, synthetic construct
  misc_feature 1..20: note = chemically synthesized
  source 1..20: mol_type = other DNA
agacattttcccaaggatag

SEQ ID NO: 6095 - DNA, 20 bp, synthetic construct
  misc_feature 1..20: note = chemically synthesized
  source 1..20: mol_type = other DNA
tagtggtaaaaattttatac

SEQ ID NO: 6096 - DNA, 20 bp, synthetic construct
  misc_feature 1..20: note = chemically synthesized
  source 1..20: mol_type = other DNA
gtaaaaattttataccagta

SEQ ID NO: 6097 - DNA, 20 bp, synthetic construct
  misc_feature 1..20: note = chemically synthesized
  source 1..20: mol_type = other DNA
aaaaattttataccagtaaa

SEQ ID NO: 6098 - DNA, 20 bp, synthetic construct
  misc_feature 1..20: note = chemically synthesized
  source 1..20: mol_type = other DNA
ttttataccagtaaagagcc

SEQ ID NO: 6099 - DNA, 20 bp, synthetic construct
  misc_feature 1..20: note = chemically synthesized
  source 1..20: mol_type = other DNA
tttataccagtaaagagccg

SEQ ID NO: 6100 - DNA, 20 bp, synthetic construct
  misc_feature 1..20: note = chemically synthesized
  source 1..20: mol_type = other DNA
tccaattcattaaacattcg

SEQ ID NO: 6101 - DNA, 20 bp, synthetic construct
  misc_feature 1..20: note = chemically synthesized
  source 1..20: mol_type = other DNA
ttcattaaacattcgaagtg

SEQ ID NO: 6102 - DNA, 20 bp, synthetic construct
  misc_feature 1..20: note = chemically synthesized
  source 1..20: mol_type = other DNA
cattaaacattcgaagtgaa

SEQ ID NO: 6103 - DNA, 20 bp, synthetic construct
  misc_feature 1..20: note = chemically synthesized
  source 1..20: mol_type = other DNA
tcgaagtgaagagtaatctt

SEQ ID NO: 6104 - DNA, 20 bp, synthetic construct
  misc_feature 1..20: note = chemically synthesized
  source 1..20: mol_type = other DNA
cgaagtgaagagtaatcttt

SEQ ID NO: 6105 - DNA, 20 bp, synthetic construct
  misc_feature 1..20: note = chemically synthesized
  source 1..20: mol_type = other DNA
ctttgggctttaaatatcat

SEQ ID NO: 6106 - DNA, 20 bp, synthetic construct
  misc_feature 1..20: note = chemically synthesized
  source 1..20: mol_type = other DNA
aatatcataagtctattaaa

SEQ ID NO: 6107 - DNA, 20 bp, synthetic construct
  misc_feature 1..20: note = chemically synthesized
  source 1..20: mol_type = other DNA
ttccattttgtgccgtctcc

SEQ ID NO: 6108 - DNA, 20 bp, synthetic construct
  misc_feature 1..20: note = chemically synthesized
  source 1..20: mol_type = other DNA
tctccaaatactatttaatg

SEQ ID NO: 6109 - DNA, 20 bp, synthetic construct
  misc_feature 1..20: note = chemically synthesized
  source 1..20: mol_type = other DNA
actcctgttttctccccctc

SEQ ID NO: 6110 - DNA, 20 bp, synthetic construct
  misc_feature 1..20: note = chemically synthesized
  source 1..20: mol_type = other DNA
ttctccccctccagatgacg

SEQ ID NO: 6111 - DNA, 20 bp, synthetic construct
  misc_feature 1..20: note = chemically synthesized
  source 1..20: mol_type = other DNA
ccccctccagatgacgtagc

SEQ ID NO: 6112 - DNA, 20 bp, synthetic construct
  misc_feature 1..20: note = chemically synthesized
  source 1..20: mol_type = other DNA
agcaattactttttcttcat

SEQ ID NO: 6113 - DNA, 20 bp, synthetic construct
  misc_feature 1..20: note = chemically synthesized
  source 1..20: mol_type = other DNA
actttttcttcattggtgat

SEQ ID NO: 6114 - DNA, 20 bp, synthetic construct
  misc_feature 1..20: note = chemically synthesized
  source 1..20: mol_type = other DNA
ttttcttcattggtgataag

SEQ ID NO: 6115 - DNA, 20 bp, synthetic construct
  misc_feature 1..20: note = chemically synthesized
  source 1..20: mol_type = other DNA
cttcattggtgataagcaga

SEQ ID NO: 6116 - DNA, 20 bp, synthetic construct
  misc_feature 1..20: note = chemically synthesized
  source 1..20: mol_type = other DNA
ttcattggtgataagcagac

SEQ ID NO: 6117 - DNA, 20 bp, synthetic construct
  misc_feature 1..20: note = chemically synthesized
  source 1..20: mol_type = other DNA
agacaggaatatttatgcat

SEQ ID NO: 6118 - DNA, 20 bp, synthetic construct
  misc_feature 1..20: note = chemically synthesized
  source 1..20: mol_type = other DNA
aatatttatgcatgagacct

SEQ ID NO: 6119 - DNA, 20 bp, synthetic construct
  misc_feature 1..20: note = chemically synthesized
  source 1..20: mol_type = other DNA
atatttatgcatgagacctt

SEQ ID NO: 6120 - DNA, 20 bp, synthetic construct
  misc_feature 1..20: note = chemically synthesized
  source 1..20: mol_type = other DNA
ttgggtaaatgatttctcac

SEQ ID NO: 6121 - DNA, 20 bp, synthetic construct
  misc_feature 1..20: note = chemically synthesized
  source 1..20: mol_type = other DNA
gggtaaatgatttctcactg

SEQ ID NO: 6122 - DNA, 20 bp, synthetic construct
  misc_feature 1..20: note = chemically synthesized
  source 1..20: mol_type = other DNA
atgatttctcactggagctc

SEQ ID NO: 6123 - DNA, 20 bp, synthetic construct
  misc_feature 1..20: note = chemically synthesized
  source 1..20: mol_type = other DNA
cactggagctctggcctctt

SEQ ID NO: 6124 - DNA, 20 bp, synthetic construct
  misc_feature 1..20: note = chemically synthesized
  source 1..20: mol_type = other DNA
tcatttgtgcctttgtgatg

SEQ ID NO: 6125 - DNA, 20 bp, synthetic construct
  misc_feature 1..20: note = chemically synthesized
  source 1..20: mol_type = other DNA
atttgtgcctttgtgatgta

SEQ ID NO: 6126 - DNA, 20 bp, synthetic construct
  misc_feature 1..20: note = chemically synthesized
  source 1..20: mol_type = other DNA
gcctttgtgatgtagagaat

SEQ ID NO: 6127 - DNA, 20 bp, synthetic construct
  misc_feature 1..20: note = chemically synthesized
  source 1..20: mol_type = other DNA
tgatgtagagaattagattg

SEQ ID NO: 6128 - DNA, 20 bp, synthetic construct
  misc_feature 1..20: note = chemically synthesized
  source 1..20: mol_type = other DNA
agaattagattgaagacact

SEQ ID NO: 6129 - DNA, 20 bp, synthetic construct
  misc_feature 1..20: note = chemically synthesized
  source 1..20: mol_type = other DNA
tgaagacactgagcctttga

SEQ ID NO: 6130 - DNA, 20 bp, synthetic construct
  misc_feature 1..20: note = chemically synthesized
  source 1..20: mol_type = other DNA
agacactgagcctttgatag

SEQ ID NO: 6131 - DNA, 20 bp, synthetic construct
  misc_feature 1..20: note = chemically synthesized
  source 1..20: mol_type = other DNA
ctgagcctttgatagcagct

SEQ ID NO: 6132 - DNA, 20 bp, synthetic construct
  misc_feature 1..20: note = chemically synthesized
  source 1..20: mol_type = other DNA
ttcccattcctttatttatt

SEQ ID NO: 6133 - DNA, 20 bp, synthetic construct
  misc_feature 1..20: note = chemically synthesized
  source 1..20: mol_type = other DNA
cctttatttattcagttaat

SEQ ID NO: 6134 - DNA, 20 bp, synthetic construct
  misc_feature 1..20: note = chemically synthesized
  source 1..20: mol_type = other DNA
tatacatttattcaatgtat

SEQ ID NO: 6135 - DNA, 20 bp, synthetic construct
  misc_feature 1..20: note = chemically synthesized
  source 1..20: mol_type = other DNA
gccaattgtgttttctttct

SEQ ID NO: 6136 - DNA, 20 bp, synthetic construct
  misc_feature 1..20: note = chemically synthesized
  source 1..20: mol_type = other DNA
gttttctttcttagaacctg

SEQ ID NO: 6137 - DNA, 20 bp, synthetic construct
  misc_feature 1..20: note = chemically synthesized
  source 1..20: mol_type = other DNA
tcttagaacctgcagttcta

SEQ ID NO: 6138 - DNA, 20 bp, synthetic construct
  misc_feature 1..20: note = chemically synthesized
  source 1..20: mol_type = other DNA
ctgcagttctacagatcaca

SEQ ID NO: 6139 - DNA, 20 bp, synthetic construct
  misc_feature 1..20: note = chemically synthesized
  source 1..20: mol_type = other DNA
agttctacagatcacaaagc

SEQ ID NO: 6140 - DNA, 20 bp, synthetic construct
  misc_feature 1..20: note = chemically synthesized
  source 1..20: mol_type = other DNA
gttctacagatcacaaagcc

SEQ ID NO: 6141 - DNA, 20 bp, synthetic construct
  misc_feature 1..20: note = chemically synthesized
  source 1..20: mol_type = other DNA
tcacaaagccaggctcaaac

SEQ ID NO: 6142 - DNA, 20 bp, synthetic construct
  misc_feature 1..20: note = chemically synthesized
  source 1..20: mol_type = other DNA
aaagccaggctcaaacaagc

SEQ ID NO: 6143 - DNA, 20 bp, synthetic construct
  misc_feature 1..20: note = chemically synthesized
  source 1..20: mol_type = other DNA
aagcaagcttataatttcaa

SEQ ID NO: 6144 - DNA, 20 bp, synthetic construct
  misc_feature 1..20: note = chemically synthesized
  source 1..20: mol_type = other DNA
ttataatttcaaaagcctca

SEQ ID NO: 6145 - DNA, 20 bp, synthetic construct
  misc_feature 1..20: note = chemically synthesized
  source 1..20: mol_type = other DNA
taatttcaaaagcctcatgg

SEQ ID NO: 6146 - DNA, 20 bp, synthetic construct
  misc_feature 1..20: note = chemically synthesized
  source 1..20: mol_type = other DNA
tttcaaaagcctcatggtag

SEQ ID NO: 6147 - DNA, 20 bp, synthetic construct
  misc_feature 1..20: note = chemically synthesized
  source 1..20: mol_type = other DNA
ctcatggtagcagaatcaat

SEQ ID NO: 6148 - DNA, 20 bp, synthetic construct
  misc_feature 1..20: note = chemically synthesized
  source 1..20: mol_type = other DNA
ttacattgtttgcctgcttt

SEQ ID NO: 6149 - DNA, 20 bp, synthetic construct
  misc_feature 1..20: note = chemically synthesized
  source 1..20: mol_type = other DNA
tgtttgcctgctttaagttc

SEQ ID NO: 6150 - DNA, 20 bp, synthetic construct
  misc_feature 1..20: note = chemically synthesized
  source 1..20: mol_type = other DNA
ctgctttaagttccagacct

SEQ ID NO: 6151 - DNA, 20 bp, synthetic construct
  misc_feature 1..20: note = chemically synthesized
  source 1..20: mol_type = other DNA
ccagacctgagaatcatcat

SEQ ID NO: 6152 - DNA, 20 bp, synthetic construct
  misc_feature 1..20: note = chemically synthesized
  source 1..20: mol_type = other DNA
aatcatcataagttttttta

SEQ ID NO: 6153 - DNA, 20 bp, synthetic construct
  misc_feature 1..20: note = chemically synthesized
  source 1..20: mol_type = other DNA
taaagctctaataatgtaaa

SEQ ID NO: 6154 - DNA, 20 bp, synthetic construct
  misc_feature 1..20: note = chemically synthesized
  source 1..20: mol_type = other DNA
taatgtaaacagatgttcaa

SEQ ID NO: 6155 - DNA, 20 bp, synthetic construct
  misc_feature 1..20: note = chemically synthesized
  source 1..20: mol_type = other DNA
ccatactttcatgtttgatt

SEQ ID NO: 6156 - DNA, 20 bp, synthetic construct
  misc_feature 1..20: note = chemically synthesized
  source 1..20: mol_type = other DNA
atgtttgattgagtaacttc

SEQ ID NO: 6157 - DNA, 20 bp, synthetic construct
  misc_feature 1..20: note = chemically synthesized
  source 1..20: mol_type = other DNA
tgagtaacttcgagatgtta

SEQ ID NO: 6158 - DNA, 20 bp, synthetic construct
  misc_feature 1..20: note = chemically synthesized
  source 1..20: mol_type = other DNA
tcgagatgttaaagtaactt

SEQ ID NO: 6159 - DNA, 20 bp, synthetic construct
  misc_feature 1..20: note = chemically synthesized
  source 1..20: mol_type = other DNA
tgttaaagtaacttcagatt

SEQ ID NO: 6160 - DNA, 20 bp, synthetic construct
  misc_feature 1..20: note = chemically synthesized
  source 1..20: mol_type = other DNA
gttaaagtaacttcagattt

SEQ ID NO: 6161 - DNA, 20 bp, synthetic construct
  misc_feature 1..20: note = chemically synthesized
  source 1..20: mol_type = other DNA
gccctttatgtcctactttt

SEQ ID NO: 6162 - DNA, 20 bp, synthetic construct
  misc_feature 1..20: note = chemically synthesized
  source 1..20: mol_type = other DNA
acttttcagctttgtcttat

SEQ ID NO: 6163 - DNA, 20 bp, synthetic construct
  misc_feature 1..20: note = chemically synthesized
  source 1..20: mol_type = other DNA
gtcttattagcctcacaaca

SEQ ID NO: 6164 - DNA, 20 bp, synthetic construct
  misc_feature 1..20: note = chemically synthesized
  source 1..20: mol_type = other DNA
agcctcacaacacagttcca

SEQ ID NO: 6165 - DNA, 20 bp, synthetic construct
  misc_feature 1..20: note = chemically synthesized
  source 1..20: mol_type = other DNA
tatactacactgacgtcttc

SEQ ID NO: 6166 - DNA, 20 bp, synthetic construct
  misc_feature 1..20: note = chemically synthesized
  source 1..20: mol_type = other DNA
actacactgacgtcttctag

SEQ ID NO: 6167 - DNA, 20 bp, synthetic construct
  misc_feature 1..20: note = chemically synthesized
  source 1..20: mol_type = other DNA
ttcttgccctgactccttct

SEQ ID NO: 6168 - DNA, 20 bp, synthetic construct
  misc_feature 1..20: note = chemically synthesized
  source 1..20: mol_type = other DNA
cttctcagcattgaataact

SEQ ID NO: 6169 - DNA, 20 bp, synthetic construct
  misc_feature 1..20: note = chemically synthesized
  source 1..20: mol_type = other DNA
ttttaatacttttttctcca

SEQ ID NO: 6170 - DNA, 20 bp, synthetic construct
  misc_feature 1..20: note = chemically synthesized
  source 1..20: mol_type = other DNA
ttttctccatagaatgcttg

SEQ ID NO: 6171 - DNA, 20 bp, synthetic construct
  misc_feature 1..20: note = chemically synthesized
  source 1..20: mol_type = other DNA
tgaagtttcttcgtttcttg

SEQ ID NO: 6172 - DNA, 20 bp, synthetic construct
  misc_feature 1..20: note = chemically synthesized
  source 1..20: mol_type = other DNA
aagtttcttcgtttcttgca

SEQ ID NO: 6173 - DNA, 20 bp, synthetic construct
  misc_feature 1..20: note = chemically synthesized
  source 1..20: mol_type = other DNA
agtttcttcgtttcttgcag

SEQ ID NO: 6174 - DNA, 20 bp, synthetic construct
  misc_feature 1..20: note = chemically synthesized
  source 1..20: mol_type = other DNA
gtttcttgcagaggattttt

SEQ ID NO: 6175 - DNA, 20 bp, synthetic construct
  misc_feature 1..20: note = chemically synthesized
  source 1..20: mol_type = other DNA
caactcaacaatcacttttc

SEQ ID NO: 6176 - DNA, 20 bp, synthetic construct
  misc_feature 1..20: note = chemically synthesized
  source 1..20: mol_type = other DNA
ctcaacaatcacttttcaag

SEQ ID NO: 6177 - DNA, 20 bp, synthetic construct
  misc_feature 1..20: note = chemically synthesized
  source 1..20: mol_type = other DNA
cacttttcaagaagtttctt

SEQ ID NO: 6178 - DNA, 20 bp, synthetic construct
  misc_feature 1..20: note = chemically synthesized
  source 1..20: mol_type = other DNA
tatccatatatctattattt

SEQ ID NO: 6179 - DNA, 20 bp, synthetic construct
  misc_feature 1..20: note = chemically synthesized
  source 1..20: mol_type = other DNA
acttataattttgtatttat

SEQ ID NO: 6180 - DNA, 20 bp, synthetic construct
  misc_feature 1..20: note = chemically synthesized
  source 1..20: mol_type = other DNA
tctgttacaaactaaattct

SEQ ID NO: 6181 - DNA, 20 bp, synthetic construct
  misc_feature 1..20: note = chemically synthesized
  source 1..20: mol_type = other DNA
attctcagttccttaatgtg

SEQ ID NO: 6182 - DNA, 20 bp, synthetic construct
  misc_feature 1..20: note = chemically synthesized
  source 1..20: mol_type = other DNA
tctgattcctgaccactcct

SEQ ID NO: 6183 - DNA, 20 bp, synthetic construct
  misc_feature 1..20: note = chemically synthesized
  source 1..20: mol_type = other DNA
tgattcctgaccactcctga

SEQ ID NO: 6184 - DNA, 20 bp, synthetic construct
  misc_feature 1..20: note = chemically synthesized
  source 1..20: mol_type = other DNA
ctcaaattcatgaatacaac

SEQ ID NO: 6185 - DNA, 20 bp, synthetic construct
  misc_feature 1..20: note = chemically synthesized
  source 1..20: mol_type = other DNA
gctatttaatatattcatct

SEQ ID NO: 6186 - DNA, 20 bp, synthetic construct
  misc_feature 1..20: note = chemically synthesized
  source 1..20: mol_type = other DNA
tgagtgtttaatcttaaaat

SEQ ID NO: 6187 - DNA, 20 bp, synthetic construct
  misc_feature 1..20: note = chemically synthesized
  source 1..20: mol_type = other DNA
aaataagaatgatgccaata

SEQ ID NO: 6188 - DNA, 20 bp, synthetic construct
  misc_feature 1..20: note = chemically synthesized
  source 1..20: mol_type = other DNA
ccttttctcctaatattata

SEQ ID NO: 6189 - DNA, 20 bp, synthetic construct
  misc_feature 1..20: note = chemically synthesized
  source 1..20: mol_type = other DNA
caccaataacacaattgcat

SEQ ID NO: 6190 - DNA, 20 bp, synthetic construct
  misc_feature 1..20: note = chemically synthesized
  source 1..20: mol_type = other DNA
ataacacaattgcataagac

SEQ ID NO: 6191 - DNA, 20 bp, synthetic construct
  misc_feature 1..20: note = chemically synthesized
  source 1..20: mol_type = other DNA
aattgcataagacaagtctt

SEQ ID NO: 6192 - DNA, 20 bp, synthetic construct
  misc_feature 1..20: note = chemically synthesized
  source 1..20: mol_type = other DNA
tcaatttctaccatttctac

SEQ ID NO: 6193 - DNA, 20 bp, synthetic construct
  misc_feature 1..20: note = chemically synthesized
  source 1..20: mol_type = other DNA
tttctaccagaaacacatcc

SEQ ID NO: 6194 - DNA, 20 bp, synthetic construct
  misc_feature 1..20: note = chemically synthesized
  source 1..20: mol_type = other DNA
taccagaaacacatcccaga

SEQ ID NO: 6195 - DNA, 20 bp, synthetic construct
  misc_feature 1..20: note = chemically synthesized
  source 1..20: mol_type = other DNA
accagaaacacatcccagat

SEQ ID NO: 6196 - DNA, 20 bp, synthetic construct
  misc_feature 1..20: note = chemically synthesized
  source 1..20: mol_type = other DNA
cttttacacattgcccgtct

SEQ ID NO: 6197 - DNA, 20 bp, synthetic construct
  misc_feature 1..20: note = chemically synthesized
  source 1..20: mol_type = other DNA
ttataatatcattgtttccc

SEQ ID NO: 6198 - DNA, 20 bp, synthetic construct
  misc_feature 1..20: note = chemically synthesized
  source 1..20: mol_type = other DNA
taataatttaatattattac

SEQ ID NO: 6199 - DNA, 20 bp, synthetic construct
  misc_feature 1..20: note = chemically synthesized
  source 1..20: mol_type = other DNA
tctaaaaaatgtattatctc

SEQ ID NO: 6200 - DNA, 20 bp, synthetic construct
  misc_feature 1..20: note = chemically synthesized
  source 1..20: mol_type = other DNA
ctaaaaaatgtattatctcc

SEQ ID NO: 6201 - DNA, 20 bp, synthetic construct
  misc_feature 1..20: note = chemically synthesized
  source 1..20: mol_type = other DNA
taaaaaatgtattatctcca

SEQ ID NO: 6202 - DNA, 20 bp, synthetic construct
  misc_feature 1..20: note = chemically synthesized
  source 1..20: mol_type = other DNA
ttgttgaaaaaactctttga

SEQ ID NO: 6203 - DNA, 20 bp, synthetic construct
  misc_feature 1..20: note = chemically synthesized
  source 1..20: mol_type = other DNA
aaaatacaaattctttatca

SEQ ID NO: 6204 - DNA, 20 bp, synthetic construct
  misc_feature 1..20: note = chemically synthesized
  source 1..20: mol_type = other DNA
aattctttatcatagtcaaa

SEQ ID NO: 6205 - DNA, 20 bp, synthetic construct
  misc_feature 1..20: note = chemically synthesized
  source 1..20: mol_type = other DNA
tcaaaaagccttgtataacg

SEQ ID NO: 6206 - DNA, 20 bp, synthetic construct
  misc_feature 1..20: note = chemically synthesized
  source 1..20: mol_type = other DNA
tgcctcttctattacatctt

SEQ ID NO: 6207 - DNA, 20 bp, synthetic construct
  misc_feature 1..20: note = chemically synthesized
  source 1..20: mol_type = other DNA
tgcctacactccttaatatt

SEQ ID NO: 6208 - DNA, 20 bp, synthetic construct
  misc_feature 1..20: note = chemically synthesized
  source 1..20: mol_type = other DNA
gcctacactccttaatattt

SEQ ID NO: 6209 - DNA, 20 bp, synthetic construct
  misc_feature 1..20: note = chemically synthesized
  source 1..20: mol_type = other DNA
atctttatcttcctcaaaac

SEQ ID NO: 6210 - DNA, 20 bp, synthetic construct
  misc_feature 1..20: note = chemically synthesized
  source 1..20: mol_type = other DNA
tatcttcctcaaaacaagct

SEQ ID NO: 6211 - DNA, 20 bp, synthetic construct
  misc_feature 1..20: note = chemically synthesized
  source 1..20: mol_type = other DNA
agctaagtacatgcatgtct

SEQ ID NO: 6212 - DNA, 20 bp, synthetic construct
  misc_feature 1..20: note = chemically synthesized
  source 1..20: mol_type = other DNA
gctaagtacatgcatgtctc

SEQ ID NO: 6213 - DNA, 20 bp, synthetic construct
  misc_feature 1..20: note = chemically synthesized
  source 1..20: mol_type = other DNA
tgtctcaggatctttgccca

SEQ ID NO: 6214 - DNA, 20 bp, synthetic construct
  misc_feature 1..20: note = chemically synthesized
  source 1..20: mol_type = other DNA
tgctccgaattatctacccc

SEQ ID NO: 6215 - DNA, 20 bp, synthetic construct
  misc_feature 1..20: note = chemically synthesized
  source 1..20: mol_type = other DNA
atctaccccaagtatttgca

SEQ ID NO: 6216 - DNA, 20 bp, synthetic construct
  misc_feature 1..20: note = chemically synthesized
  source 1..20: mol_type = other DNA
tcctttcaccattaactttt

SEQ ID NO: 6217 - DNA, 20 bp, synthetic construct
  misc_feature 1..20: note = chemically synthesized
  source 1..20: mol_type = other DNA
agttaaaatgattacttcct

SEQ ID NO: 6218 - DNA, 20 bp, synthetic construct
  misc_feature 1..20: note = chemically synthesized
  source 1..20: mol_type = other DNA
gttaaaatgattacttcctc

SEQ ID NO: 6219 - DNA, 20 bp, synthetic construct
  misc_feature 1..20: note = chemically synthesized
  source 1..20: mol_type = other DNA
ttaaaatgattacttcctca

SEQ ID NO: 6220 - DNA, 20 bp, synthetic construct
  misc_feature 1..20: note = chemically synthesized
  source 1..20: mol_type = other DNA
taaaatgattacttcctcag

SEQ ID NO: 6221 - DNA, 20 bp, synthetic construct
  misc_feature 1..20: note = chemically synthesized
  source 1..20: mol_type = other DNA
aaaatgattacttcctcagg

SEQ ID NO: 6222 - DNA, 20 bp, synthetic construct
  misc_feature 1..20: note = chemically synthesized
  source 1..20: mol_type = other DNA
ttctaatactgctccccacc

SEQ ID NO: 6223 - DNA, 20 bp, synthetic construct
  misc_feature 1..20: note = chemically synthesized
  source 1..20: mol_type = other DNA
taactaacttactctcatca

SEQ ID NO: 6224 - DNA, 20 bp, synthetic construct
  misc_feature 1..20: note = chemically synthesized
  source 1..20: mol_type = other DNA
ttactctcatcacagtatac

SEQ ID NO: 6225 - DNA, 20 bp, synthetic construct
  misc_feature 1..20: note = chemically synthesized
  source 1..20: mol_type = other DNA
attatacactgaatttccat

SEQ ID NO: 6226 - DNA, 20 bp, synthetic construct
  misc_feature 1..20: note = chemically synthesized
  source 1..20: mol_type = other DNA
tgaatttccattagattcat

SEQ ID NO: 6227 - DNA, 20 bp, synthetic construct
  misc_feature 1..20: note = chemically synthesized
  source 1..20: mol_type = other DNA
aatttccattagattcatta

SEQ ID NO: 6228 - DNA, 20 bp, synthetic construct
  misc_feature 1..20: note = chemically synthesized
  source 1..20: mol_type = other DNA
atttccattagattcattag

SEQ ID NO: 6229 - DNA, 20 bp, synthetic construct
  misc_feature 1..20: note = chemically synthesized
  source 1..20: mol_type = other DNA
attagattcattagaggctg

SEQ ID NO: 6230 - DNA, 20 bp, synthetic construct
  misc_feature 1..20: note = chemically synthesized
  source 1..20: mol_type = other DNA
agattcattagaggctgtag

SEQ ID NO: 6231 - DNA, 20 bp, synthetic construct
  misc_feature 1..20: note = chemically synthesized
  source 1..20: mol_type = other DNA
cattagaggctgtagaagat

SEQ ID NO: 6232 - DNA, 20 bp, synthetic construct
  misc_feature 1..20: note = chemically synthesized
  source 1..20: mol_type = other DNA
attagaggctgtagaagatt

SEQ ID NO: 6233 - DNA, 20 bp, synthetic construct
  misc_feature 1..20: note = chemically synthesized
  source 1..20: mol_type = other DNA
accatatctgttttttgctc

SEQ ID NO: 6234 - DNA, 20 bp, synthetic construct
  misc_feature 1..20: note = chemically synthesized
  source 1..20: mol_type = other DNA
tgctcaagaatatgaaaaat

SEQ ID NO: 6235 - DNA, 20 bp, synthetic construct
  misc_feature 1..20: note = chemically synthesized
  source 1..20: mol_type = other DNA
gctcaagaatatgaaaaata

SEQ ID NO: 6236 - DNA, 20 bp, synthetic construct
  misc_feature 1..20: note = chemically synthesized
  source 1..20: mol_type = other DNA
ctcaagaatatgaaaaataa

SEQ ID NO: 6237 - DNA, 20 bp, synthetic construct
  misc_feature 1..20: note = chemically synthesized
  source 1..20: mol_type = other DNA
agaatatgaaaaataagggt

SEQ ID NO: 6238 - DNA, 20 bp, synthetic construct
  misc_feature 1..20: note = chemically synthesized
  source 1..20: mol_type = other DNA
atgaaaaataagggttagca

SEQ ID NO: 6239 - DNA, 20 bp, synthetic construct
  misc_feature 1..20: note = chemically synthesized
  source 1..20: mol_type = other DNA
aaataagggttagcatagaa

SEQ ID NO: 6240 - DNA, 20 bp, synthetic construct
  misc_feature 1..20: note = chemically synthesized
  source 1..20: mol_type = other DNA
aataagggttagcatagaat

SEQ ID NO: 6241 - DNA, 20 bp, synthetic construct
  misc_feature 1..20: note = chemically synthesized
  source 1..20: mol_type = other DNA
aattaattattctatgaaat

SEQ ID NO: 6242 - DNA, 20 bp, synthetic construct
  misc_feature 1..20: note = chemically synthesized
  source 1..20: mol_type = other DNA
ttaattattctatgaaataa

SEQ ID NO: 6243 - DNA, 20 bp, synthetic construct
  misc_feature 1..20: note = chemically synthesized
  source 1..20: mol_type = other DNA
ttattctatgaaataagagc

SEQ ID NO: 6244 - DNA, 20 bp, synthetic construct
  misc_feature 1..20: note = chemically synthesized
  source 1..20: mol_type = other DNA
aaataagagctagacaatca

SEQ ID NO: 6245 - DNA, 20 bp, synthetic construct
  misc_feature 1..20: note = chemically synthesized
  source 1..20: mol_type = other DNA
ataagagctagacaatcaca

SEQ ID NO: 6246 - DNA, 20 bp, synthetic construct
  misc_feature 1..20: note = chemically synthesized
  source 1..20: mol_type = other DNA
tagacaatcacagagatata

SEQ ID NO: 6247 - DNA, 20 bp, synthetic construct
  misc_feature 1..20: note = chemically synthesized
  source 1..20: mol_type = other DNA
gaatgtgaacactcctatca

SEQ ID NO: 6248 - DNA, 20 bp, synthetic construct
  misc_feature 1..20: note = chemically synthesized
  source 1..20: mol_type = other DNA
taaaatcatctgtgtacact

SEQ ID NO: 6249 - DNA, 20 bp, synthetic construct
  misc_feature 1..20: note = chemically synthesized
  source 1..20: mol_type = other DNA
acttagtcttttctgacctt

SEQ ID NO: 6250 - DNA, 20 bp, synthetic construct
  misc_feature 1..20: note = chemically synthesized
  source 1..20: mol_type = other DNA
ctgacctttggccaccaatt

SEQ ID NO: 6251 - DNA, 20 bp, synthetic construct
  misc_feature 1..20: note = chemically synthesized
  source 1..20: mol_type = other DNA
caattgagtcatcatatacc

SEQ ID NO: 6252 - DNA, 20 bp, synthetic construct
  misc_feature 1..20: note = chemically synthesized
  source 1..20: mol_type = other DNA
catcatataccaagtttgaa

SEQ ID NO: 6253 - DNA, 20 bp, synthetic construct
  misc_feature 1..20: note = chemically synthesized
  source 1..20: mol_type = other DNA
agtttgaatggtttataaaa

SEQ ID NO: 6254 - DNA, 20 bp, synthetic construct
  misc_feature 1..20: note = chemically synthesized
  source 1..20: mol_type = other DNA
ttataaaacagatgctgctc

SEQ ID NO: 6255 - DNA, 20 bp, synthetic construct
  misc_feature 1..20: note = chemically synthesized
  source 1..20: mol_type = other DNA
tataaaacagatgctgctcc

SEQ ID NO: 6256 - DNA, 20 bp, synthetic construct
  misc_feature 1..20: note = chemically synthesized
  source 1..20: mol_type = other DNA
ataaaacagatgctgctcca

SEQ ID NO: 6257 - DNA, 20 bp, synthetic construct
  misc_feature 1..20: note = chemically synthesized
  source 1..20: mol_type = other DNA
aacatgatttctctcatttc

SEQ ID NO: 6258 - DNA, 20 bp, synthetic construct
  misc_feature 1..20: note = chemically synthesized
  source 1..20: mol_type = other DNA
ctctcatttccagcctgact

SEQ ID NO: 6259 - DNA, 20 bp, synthetic construct
  misc_feature 1..20: note = chemically synthesized
  source 1..20: mol_type = other DNA
cctgactcagacatatcgtc

SEQ ID NO: 6260 - DNA, 20 bp, synthetic construct
  misc_feature 1..20: note = chemically synthesized
  source 1..20: mol_type = other DNA
ctgactcagacatatcgtca

SEQ ID NO: 6261 - DNA, 20 bp, synthetic construct
  misc_feature 1..20: note = chemically synthesized
  source 1..20: mol_type = other DNA
cagacatatcgtcaaggatc

SEQ ID NO: 6262 - DNA, 20 bp, synthetic construct
  misc_feature 1..20: note = chemically synthesized
  source 1..20: mol_type = other DNA
agacatatcgtcaaggatct

SEQ ID NO: 6263 - DNA, 20 bp, synthetic construct
  misc_feature 1..20: note = chemically synthesized
  source 1..20: mol_type = other DNA
ggatctgggattgatcacaa

SEQ ID NO: 6264 - DNA, 20 bp, synthetic construct
  misc_feature 1..20: note = chemically synthesized
  source 1..20: mol_type = other DNA
gatttaatattctgtgaatg

SEQ ID NO: 6265 - DNA, 20 bp, synthetic construct
  misc_feature 1..20: note = chemically synthesized
  source 1..20: mol_type = other DNA
atttaatattctgtgaatgt

SEQ ID NO: 6266 - DNA, 20 bp, synthetic construct
  misc_feature 1..20: note = chemically synthesized
  source 1..20: mol_type = other DNA
tgaatgtaggtatgtgttaa

SEQ ID NO: 6267 - DNA, 20 bp, synthetic construct
  misc_feature 1..20: note = chemically synthesized
  source 1..20: mol_type = other DNA
gtgttaaaagtatctacttt

SEQ ID NO: 6268 - DNA, 20 bp, synthetic construct
  misc_feature 1..20: note = chemically synthesized
  source 1..20: mol_type = other DNA
taaaagtatctactttcagc

SEQ ID NO: 6269 - DNA, 20 bp, synthetic construct
  misc_feature 1..20: note = chemically synthesized
  source 1..20: mol_type = other DNA
aaaagtatctactttcagcc

SEQ ID NO: 6270 - DNA, 20 bp, synthetic construct
  misc_feature 1..20: note = chemically synthesized
  source 1..20: mol_type = other DNA
tatctactttcagccaggct

SEQ ID NO: 6271 - DNA, 20 bp, synthetic construct
  misc_feature 1..20: note = chemically synthesized
  source 1..20: mol_type = other DNA
ctactttcagccaggcttgg

SEQ ID NO: 6272 - DNA, 20 bp, synthetic construct
  misc_feature 1..20: note = chemically synthesized
  source 1..20: mol_type = other DNA
gtggctcacgcctgtaatcc

SEQ ID NO: 6273 - DNA, 20 bp, synthetic construct
  misc_feature 1..20: note = chemically synthesized
  source 1..20: mol_type = other DNA
cgcctgtaatcctagcactt

SEQ ID NO: 6274 - DNA, 20 bp, synthetic construct
  misc_feature 1..20: note = chemically synthesized
  source 1..20: mol_type = other DNA
gcctgtaatcctagcacttt

SEQ ID NO: 6275 - DNA, 20 bp, synthetic construct
  misc_feature 1..20: note = chemically synthesized
  source 1..20: mol_type = other DNA
ctgtaatcctagcactttgg

SEQ ID NO: 6276 - DNA, 20 bp, synthetic construct
  misc_feature 1..20: note = chemically synthesized
  source 1..20: mol_type = other DNA
tgtaatcctagcactttggg

SEQ ID NO: 6277 - DNA, 20 bp, synthetic construct
  misc_feature 1..20: note = chemically synthesized
  source 1..20: mol_type = other DNA
tcctagcactttgggaggcc

SEQ ID NO: 6278 - DNA, 20 bp, synthetic construct
  misc_feature 1..20: note = chemically synthesized
  source 1..20: mol_type = other DNA
cctagcactttgggaggccg

SEQ ID NO: 6279 - DNA, 20 bp, synthetic construct
  misc_feature 1..20: note = chemically synthesized
  source 1..20: mol_type = other DNA
agcactttgggaggccgagg

SEQ ID NO: 6280 - DNA, 20 bp, synthetic construct
  misc_feature 1..20: note = chemically synthesized
  source 1..20: mol_type = other DNA
gcactttgggaggccgaggc

SEQ ID NO: 6281 - DNA, 20 bp, synthetic construct
  misc_feature 1..20: note = chemically synthesized
  source 1..20: mol_type = other DNA
ctttgggaggccgaggcagg

SEQ ID NO: 6282 - DNA, 20 bp, synthetic construct
  misc_feature 1..20: note = chemically synthesized
  source 1..20: mol_type = other DNA
ggaggccgaggcaggtggat

SEQ ID NO: 6283 - DNA, 20 bp, synthetic construct
  misc_feature 1..20: note = chemically synthesized
  source 1..20: mol_type = other DNA
ccgaggcaggtggattggct

SEQ ID NO: 6284 - DNA, 20 bp, synthetic construct
  misc_feature 1..20: note = chemically synthesized
  source 1..20: mol_type = other DNA
gcaggtggattggctgagct

SEQ ID NO: 6285 - DNA, 20 bp, synthetic construct
  misc_feature 1..20: note = chemically synthesized
  source 1..20: mol_type = other DNA
caggtggattggctgagctc

SEQ ID NO: 6286 - DNA, 20 bp, synthetic construct
  misc_feature 1..20: note = chemically synthesized
  source 1..20: mol_type = other DNA
ggtggattggctgagctcag

SEQ ID NO: 6287 - DNA, 20 bp, synthetic construct
  misc_feature 1..20: note = chemically synthesized
  source 1..20: mol_type = other DNA
gattggctgagctcaggagt

SEQ ID NO: 6288 - DNA, 20 bp, synthetic construct
  misc_feature 1..20: note = chemically synthesized
  source 1..20: mol_type = other DNA
ttggctgagctcaggagttg

SEQ ID NO: 6289 - DNA, 20 bp, synthetic construct
  misc_feature 1..20: note = chemically synthesized
  source 1..20: mol_type = other DNA
tcaggagttggagaccaacc

SEQ ID NO: 6290 - DNA, 20 bp, synthetic construct
  misc_feature 1..20: note = chemically synthesized
  source 1..20: mol_type = other DNA
caggagttggagaccaacct

SEQ ID NO: 6291 - DNA, 20 bp, synthetic construct
  misc_feature 1..20: note = chemically synthesized
  source 1..20: mol_type = other DNA
ggagaccaacctgggcaaaa

SEQ ID NO: 6292 - DNA, 20 bp, synthetic construct
  misc_feature 1..20: note = chemically synthesized
  source 1..20: mol_type = other DNA
tactaaaacacaaaaataat

SEQ ID NO: 6293 - DNA, 20 bp, synthetic construct
  misc_feature 1..20: note = chemically synthesized
  source 1..20: mol_type = other DNA
aaaacacaaaaataattagc

SEQ ID NO: 6294 - DNA, 20 bp, synthetic construct
  misc_feature 1..20: note = chemically synthesized
  source 1..20: mol_type = other DNA
aaacacaaaaataattagct

SEQ ID NO: 6295 - DNA, 20 bp, synthetic construct
  misc_feature 1..20: note = chemically synthesized
  source 1..20: mol_type = other DNA
caaaaataattagctgggca

SEQ ID NO: 6296 - DNA, 20 bp, synthetic construct
  misc_feature 1..20: note = chemically synthesized
  source 1..20: mol_type = other DNA
aaataattagctgggcatgg

SEQ ID NO: 6297 - DNA, 20 bp, synthetic construct
  misc_feature 1..20: note = chemically synthesized
  source 1..20: mol_type = other DNA
gcagtgtgctcctgtaatcc

SEQ ID NO: 6298 - DNA, 20 bp, synthetic construct
  misc_feature 1..20: note = chemically synthesized
  source 1..20: mol_type = other DNA
ctcctgtaatcccagttact

SEQ ID NO: 6299 - DNA, 20 bp, synthetic construct
  misc_feature 1..20: note = chemically synthesized
  source 1..20: mol_type = other DNA
tcctgtaatcccagttactt

SEQ ID NO: 6300 - DNA, 20 bp, synthetic construct
  misc_feature 1..20: note = chemically synthesized
  source 1..20: mol_type = other DNA
ctgtaatcccagttacttgg

SEQ ID NO: 6301 - DNA, 20 bp, synthetic construct
  misc_feature 1..20: note = chemically synthesized
  source 1..20: mol_type = other DNA
tcccagttacttgggagact

SEQ ID NO: 6302 - DNA, 20 bp, synthetic construct
  misc_feature 1..20: note = chemically synthesized
  source 1..20: mol_type = other DNA
cccagttacttgggagactg

SEQ ID NO: 6303 - DNA, 20 bp, synthetic construct
  misc_feature 1..20: note = chemically synthesized
  source 1..20: mol_type = other DNA
agttacttgggagactgagg

SEQ ID NO: 6304 - DNA, 20 bp, synthetic construct
  misc_feature 1..20: note = chemically synthesized
  source 1..20: mol_type = other DNA
gttacttgggagactgaggc

SEQ ID NO: 6305 - DNA, 20 bp, synthetic construct
  misc_feature 1..20: note = chemically synthesized
  source 1..20: mol_type = other DNA
tacttgggagactgaggcag

SEQ ID NO: 6306 - DNA, 20 bp, synthetic construct
  misc_feature 1..20: note = chemically synthesized
  source 1..20: mol_type = other DNA
gcaggagaattgcttgatcc

SEQ ID NO: 6307 - DNA, 20 bp, synthetic construct
  misc_feature 1..20: note = chemically synthesized
  source 1..20: mol_type = other DNA
caggagaattgcttgatcct

SEQ ID NO: 6308 - DNA, 20 bp, synthetic construct
  misc_feature 1..20: note = chemically synthesized
  source 1..20: mol_type = other DNA
ggagaattgcttgatcctgg

SEQ ID NO: 6309 - DNA, 20 bp, synthetic construct
  misc_feature 1..20: note = chemically synthesized
  source 1..20: mol_type = other DNA
gagaattgcttgatcctggg

SEQ ID NO: 6310 - DNA, 20 bp, synthetic construct
  misc_feature 1..20: note = chemically synthesized
  source 1..20: mol_type = other DNA
aattgcttgatcctgggagg

SEQ ID NO: 6311 - DNA, 20 bp, synthetic construct
  misc_feature 1..20: note = chemically synthesized
  source 1..20: mol_type = other DNA
tgcttgatcctgggaggtgg

SEQ ID NO: 6312 - DNA, 20 bp, synthetic construct
  misc_feature 1..20: note = chemically synthesized
  source 1..20: mol_type = other DNA
atcctgggaggtggaagttg

SEQ ID NO: 6313 - DNA, 20 bp, synthetic construct
  misc_feature 1..20: note = chemically synthesized
  source 1..20: mol_type = other DNA
tgggaggtggaagttgcagt

SEQ ID NO: 6314 - DNA, 20 bp, synthetic construct
  misc_feature 1..20: note = chemically synthesized
  source 1..20: mol_type = other DNA
ggtggaagttgcagtgagcc

SEQ ID NO: 6315 - DNA, 20 bp, synthetic construct
  misc_feature 1..20: note = chemically synthesized
  source 1..20: mol_type = other DNA
gagatcgcgccattgcactc

SEQ ID NO: 6316 - DNA, 20 bp, synthetic construct
  misc_feature 1..20: note = chemically synthesized
  source 1..20: mol_type = other DNA
cgcgccattgcactccagtc

SEQ ID NO: 6317 - DNA, 20 bp, synthetic construct
  misc_feature 1..20: note = chemically synthesized
  source 1..20: mol_type = other DNA
gcgccattgcactccagtct

SEQ ID NO: 6318 - DNA, 20 bp, synthetic construct
  misc_feature 1..20: note = chemically synthesized
  source 1..20: mol_type = other DNA
ttgcactccagtctgggcga

SEQ ID NO: 6319 - DNA, 20 bp, synthetic construct
  misc_feature 1..20: note = chemically synthesized
  source 1..20: mol_type = other DNA
gcactccagtctgggcgaca

SEQ ID NO: 6320 - DNA, 20 bp, synthetic construct
  misc_feature 1..20: note = chemically synthesized
  source 1..20: mol_type = other DNA
tccagtctgggcgacagagc

SEQ ID NO: 6321 - DNA, 20 bp, synthetic construct
  misc_feature 1..20: note = chemically synthesized
  source 1..20: mol_type = other DNA
cagagcaagactctgtccca

SEQ ID NO: 6322 - DNA, 20 bp, synthetic construct
  misc_feature 1..20: note = chemically synthesized
  source 1..20: mol_type = other DNA
agagcaagactctgtcccaa

SEQ ID NO: 6323 - DNA, 20 bp, synthetic construct
  misc_feature 1..20: note = chemically synthesized
  source 1..20: mol_type = other DNA
aaaaaaaatctattttcatg

SEQ ID NO: 6324 - DNA, 20 bp, synthetic construct
  misc_feature 1..20: note = chemically synthesized
  source 1..20: mol_type = other DNA
aaaaaaatctattttcatgc

SEQ ID NO: 6325 - DNA, 20 bp, synthetic construct
  misc_feature 1..20: note = chemically synthesized
  source 1..20: mol_type = other DNA
tattttcatgcaggtttctt

SEQ ID NO: 6326 - DNA, 20 bp, synthetic construct
  misc_feature 1..20: note = chemically synthesized
  source 1..20: mol_type = other DNA
gtttcttcagactgactaca

SEQ ID NO: 6327 - DNA, 20 bp, synthetic construct
  misc_feature 1..20: note = chemically synthesized
  source 1..20: mol_type = other DNA
tttcttcagactgactacaa

SEQ ID NO: 6328 - DNA, 20 bp, synthetic construct
  misc_feature 1..20: note = chemically synthesized
  source 1..20: mol_type = other DNA
cagactgactacaaaggctt

SEQ ID NO: 6329 - DNA, 20 bp, synthetic construct
  misc_feature 1..20: note = chemically synthesized
  source 1..20: mol_type = other DNA
tgactacaaaggcttcagac

SEQ ID NO: 6330 - DNA, 20 bp, synthetic construct
  misc_feature 1..20: note = chemically synthesized
  source 1..20: mol_type = other DNA
aaggcttcagactagctaca

SEQ ID NO: 6331 - DNA, 20 bp, synthetic construct
  misc_feature 1..20: note = chemically synthesized
  source 1..20: mol_type = other DNA
cttaaaaatctactttcatt

SEQ ID NO: 6332 - DNA, 20 bp, synthetic construct
  misc_feature 1..20: note = chemically synthesized
  source 1..20: mol_type = other DNA
ttaaaaatctactttcattc

SEQ ID NO: 6333 - DNA, 20 bp, synthetic construct
  misc_feature 1..20: note = chemically synthesized
  source 1..20: mol_type = other DNA
tactttcattcaggcttctt

SEQ ID NO: 6334 - DNA, 20 bp, synthetic construct
  misc_feature 1..20: note = chemically synthesized
  source 1..20: mol_type = other DNA
tcattcaggcttcttcagac

SEQ ID NO: 6335 - DNA, 20 bp, synthetic construct
  misc_feature 1..20: note = chemically synthesized
  source 1..20: mol_type = other DNA
aggcttcttcagactagata

SEQ ID NO: 6336 - DNA, 20 bp, synthetic construct
  misc_feature 1..20: note = chemically synthesized
  source 1..20: mol_type = other DNA
cttcttcagactagatacag

SEQ ID NO: 6337 - DNA, 20 bp, synthetic construct
  misc_feature 1..20: note = chemically synthesized
  source 1..20: mol_type = other DNA
agactagatacagaagaaat

SEQ ID NO: 6338 - DNA, 20 bp, synthetic construct
  misc_feature 1..20: note = chemically synthesized
  source 1..20: mol_type = other DNA
acagaagaaatgagaccatc

SEQ ID NO: 6339 - DNA, 20 bp, synthetic construct
  misc_feature 1..20: note = chemically synthesized
  source 1..20: mol_type = other DNA
aagaaatgagaccatctaga

SEQ ID NO: 6340 - DNA, 20 bp, synthetic construct
  misc_feature 1..20: note = chemically synthesized
  source 1..20: mol_type = other DNA
agaaatgagaccatctagat

SEQ ID NO: 6341 - DNA, 20 bp, synthetic construct
  misc_feature 1..20: note = chemically synthesized
  source 1..20: mol_type = other DNA
gaaatgagaccatctagatg

SEQ ID NO: 6342 - DNA, 20 bp, synthetic construct
  misc_feature 1..20: note = chemically synthesized
  source 1..20: mol_type = other DNA
gagaccatctagatggggaa

SEQ ID NO: 6343 - DNA, 20 bp, synthetic construct
  misc_feature 1..20: note = chemically synthesized
  source 1..20: mol_type = other DNA
tattatccatgttgccacca

SEQ ID NO: 6344 - DNA, 20 bp, synthetic construct
  misc_feature 1..20: note = chemically synthesized
  source 1..20: mol_type = other DNA
ttatccatgttgccaccata

SEQ ID NO: 6345 - DNA, 20 bp, synthetic construct
  misc_feature 1..20: note = chemically synthesized
  source 1..20: mol_type = other DNA
gttgccaccatagagactat

SEQ ID NO: 6346 - DNA, 20 bp, synthetic construct
  misc_feature 1..20: note = chemically synthesized
  source 1..20: mol_type = other DNA
catagagactatcagccttt

SEQ ID NO: 6347 - DNA, 20 bp, synthetic construct
  misc_feature 1..20: note = chemically synthesized
  source 1..20: mol_type = other DNA
atagagactatcagcctttt

SEQ ID NO: 6348 - DNA, 20 bp, synthetic construct
  misc_feature 1..20: note = chemically synthesized
  source 1..20: mol_type = other DNA
tatcagccttttgggattac

SEQ ID NO: 6349 - DNA, 20 bp, synthetic construct
  misc_feature 1..20: note = chemically synthesized
  source 1..20: mol_type = other DNA
tcagccttttgggattacca

SEQ ID NO: 6350 - DNA, 20 bp, synthetic construct
  misc_feature 1..20: note = chemically synthesized
  source 1..20: mol_type = other DNA
taccagagcaaaatacatgt

SEQ ID NO: 6351 - DNA, 20 bp, synthetic construct
  misc_feature 1..20: note = chemically synthesized
  source 1..20: mol_type = other DNA
ccagagcaaaatacatgttg

SEQ ID NO: 6352 - DNA, 20 bp, synthetic construct
  misc_feature 1..20: note = chemically synthesized
  source 1..20: mol_type = other DNA
cagagcaaaatacatgttgg

SEQ ID NO: 6353 - DNA, 20 bp, synthetic construct
  misc_feature 1..20: note = chemically synthesized
  source 1..20: mol_type = other DNA
ttttttaaaatatgttttga

SEQ ID NO: 6354 - DNA, 20 bp, synthetic construct
  misc_feature 1..20: note = chemically synthesized
  source 1..20: mol_type = other DNA
tttttaaaatatgttttgaa

SEQ ID NO: 6355 - DNA, 20 bp, synthetic construct
  misc_feature 1..20: note = chemically synthesized
  source 1..20: mol_type = other DNA
ttaaaatatgttttgaaagg

SEQ ID NO: 6356 - DNA, 20 bp, synthetic construct
  misc_feature 1..20: note = chemically synthesized
  source 1..20: mol_type = other DNA
taaaatatgttttgaaaggt

SEQ ID NO: 6357 - DNA, 20 bp, synthetic construct
  misc_feature 1..20: note = chemically synthesized
  source 1..20: mol_type = other DNA
tgttttgaaaggtaggatga

SEQ ID NO: 6358 - DNA, 20 bp, synthetic construct
  misc_feature 1..20: note = chemically synthesized
  source 1..20: mol_type = other DNA
ttttgaaaggtaggatgaaa

SEQ ID NO: 6359 - DNA, 20 bp, synthetic construct
  misc_feature 1..20: note = chemically synthesized
  source 1..20: mol_type = other DNA
aaaggtaggatgaaagagca

SEQ ID NO: 6360 - DNA, 20 bp, synthetic construct
  misc_feature 1..20: note = chemically synthesized
  source 1..20: mol_type = other DNA
tgaaagagcatagttttgat

SEQ ID NO: 6361 - DNA, 20 bp, synthetic construct
  misc_feature 1..20: note = chemically synthesized
  source 1..20: mol_type = other DNA
gaaagagcatagttttgata

SEQ ID NO: 6362 - DNA, 20 bp, synthetic construct
  misc_feature 1..20: note = chemically synthesized
  source 1..20: mol_type = other DNA
tttgataaggtaaataaatg

SEQ ID NO: 6363 - DNA, 20 bp, synthetic construct
  misc_feature 1..20: note = chemically synthesized
  source 1..20: mol_type = other DNA
ggtaaataaatgaagattta

SEQ ID NO: 6364 - DNA, 20 bp, synthetic construct
  misc_feature 1..20: note = chemically synthesized
  source 1..20: mol_type = other DNA
atgaagatttaaagaaaaac

SEQ ID NO: 6365 - DNA, 20 bp, synthetic construct
  misc_feature 1..20: note = chemically synthesized
  source 1..20: mol_type = other DNA
gaaaaacaagatcaatatgt

SEQ ID NO: 6366 - DNA, 20 bp, synthetic construct
  misc_feature 1..20: note = chemically synthesized
  source 1..20: mol_type = other DNA
aaaaacaagatcaatatgtc

SEQ ID NO: 6367 - DNA, 20 bp, synthetic construct
  misc_feature 1..20: note = chemically synthesized
  source 1..20: mol_type = other DNA
gatcaatatgtcaggtgtgc

SEQ ID NO: 6368 - DNA, 20 bp, synthetic construct
  misc_feature 1..20: note = chemically synthesized
  source 1..20: mol_type = other DNA
acctgtatttaaaaaacaaa

SEQ ID NO: 6369 - DNA, 20 bp, synthetic construct
  misc_feature 1..20: note = chemically synthesized
  source 1..20: mol_type = other DNA
ttaaaaaacaaaaagattta

SEQ ID NO: 6370 - DNA, 20 bp, synthetic construct
  misc_feature 1..20: note = chemically synthesized
  source 1..20: mol_type = other DNA
aaaaagatttacagttttcc

SEQ ID NO: 6371 - DNA, 20 bp, synthetic construct
  misc_feature 1..20: note = chemically synthesized
  source 1..20: mol_type = other DNA
catgttgtgttatgctatct

SEQ ID NO: 6372 - DNA, 20 bp, synthetic construct
  misc_feature 1..20: note = chemically synthesized
  source 1..20: mol_type = other DNA
tgttgtgttatgctatctga

SEQ ID NO: 6373 - DNA, 20 bp, synthetic construct
  misc_feature 1..20: note = chemically synthesized
  source 1..20: mol_type = other DNA
gtgttatgctatctgagagt

SEQ ID NO: 6374 - DNA, 20 bp, synthetic construct
  misc_feature 1..20: note = chemically synthesized
  source 1..20: mol_type = other DNA
gctatctgagagtcagtgta

SEQ ID NO: 6375 - DNA, 20 bp, synthetic construct
  misc_feature 1..20: note = chemically synthesized
  source 1..20: mol_type = other DNA
agagtcagtgtatggtatct

SEQ ID NO: 6376 - DNA, 20 bp, synthetic construct
  misc_feature 1..20: note = chemically synthesized
  source 1..20: mol_type = other DNA
agtgtatggtatctcagtct

SEQ ID NO: 6377 - DNA, 20 bp, synthetic construct
  misc_feature 1..20: note = chemically synthesized
  source 1..20: mol_type = other DNA
ggtatctcagtctgagttcc

SEQ ID NO: 6378 - DNA, 20 bp, synthetic construct
  misc_feature 1..20: note = chemically synthesized
  source 1..20: mol_type = other DNA
cagtctgagttcccagcaac

SEQ ID NO: 6379 - DNA, 20 bp, synthetic construct
  misc_feature 1..20: note = chemically synthesized
  source 1..20: mol_type = other DNA
aatgcctataataaaataaa

SEQ ID NO: 6380 - DNA, 20 bp, synthetic construct
  misc_feature 1..20: note = chemically synthesized
  source 1..20: mol_type = other DNA
tgcctataataaaataaata

SEQ ID NO: 6381 - DNA, 20 bp, synthetic construct
  misc_feature 1..20: note = chemically synthesized
  source 1..20: mol_type = other DNA
ctataataaaataaatagag

SEQ ID NO: 6382 - DNA, 20 bp, synthetic construct
  misc_feature 1..20: note = chemically synthesized
  source 1..20: mol_type = other DNA
aaataaatagagaagacaaa

SEQ ID NO: 6383 - DNA, 20 bp, synthetic construct
  misc_feature 1..20: note = chemically synthesized
  source 1..20: mol_type = other DNA
taaatagagaagacaaatag

SEQ ID NO: 6384 - DNA, 20 bp, synthetic construct
  misc_feature 1..20: note = chemically synthesized
  source 1..20: mol_type = other DNA
agacaaatagcagtgaattt

SEQ ID NO: 6385 - DNA, 20 bp, synthetic construct
  misc_feature 1..20: note = chemically synthesized
  source 1..20: mol_type = other DNA
aatagcagtgaatttgagtc

SEQ ID NO: 6386 - DNA, 20 bp, synthetic construct
  misc_feature 1..20: note = chemically synthesized
  source 1..20: mol_type = other DNA
tagcagtgaatttgagtctg

SEQ ID NO: 6387 - DNA, 20 bp, synthetic construct
  misc_feature 1..20: note = chemically synthesized
  source 1..20: mol_type = other DNA
atttgagtctggagaaataa

SEQ ID NO: 6388 - DNA, 20 bp, synthetic construct
  misc_feature 1..20: note = chemically synthesized
  source 1..20: mol_type = other DNA
tttgagtctggagaaataaa

SEQ ID NO: 6389 - DNA, 20 bp, synthetic construct
  misc_feature 1..20: note = chemically synthesized
  source 1..20: mol_type = other DNA
ttgagtctggagaaataaaa

SEQ ID NO: 6390 - DNA, 20 bp, synthetic construct
  misc_feature 1..20: note = chemically synthesized
  source 1..20: mol_type = other DNA
agggttttcgtatcccctct

SEQ ID NO: 6391 - DNA, 20 bp, synthetic construct
  misc_feature 1..20: note = chemically synthesized
  source 1..20: mol_type = other DNA
tatcccctctgagcactgtc

SEQ ID NO: 6392 - DNA, 20 bp, synthetic construct
  misc_feature 1..20: note = chemically synthesized
  source 1..20: mol_type = other DNA
cactgtctggaatgttgact

SEQ ID NO: 6393 - DNA, 20 bp, synthetic construct
  misc_feature 1..20: note = chemically synthesized
  source 1..20: mol_type = other DNA
gtctggaatgttgacttgga

SEQ ID NO: 6394 - DNA, 20 bp, synthetic construct
  misc_feature 1..20: note = chemically synthesized
  source 1..20: mol_type = other DNA
aaatctgtgattataataac

SEQ ID NO: 6395 - DNA, 20 bp, synthetic construct
  misc_feature 1..20: note = chemically synthesized
  source 1..20: mol_type = other DNA
aatctgtgattataataacc

SEQ ID NO: 6396 - DNA, 20 bp, synthetic construct
  misc_feature 1..20: note = chemically synthesized
  source 1..20: mol_type = other DNA
taataaccaggtcattcttt

SEQ ID NO: 6397 - DNA, 20 bp, synthetic construct
  misc_feature 1..20: note = chemically synthesized
  source 1..20: mol_type = other DNA
aataaccaggtcattctttc

SEQ ID NO: 6398 - DNA, 20 bp, synthetic construct
  misc_feature 1..20: note = chemically synthesized
  source 1..20: mol_type = other DNA
taaccaggtcattctttcag

SEQ ID NO: 6399 - DNA, 20 bp, synthetic construct
  misc_feature 1..20: note = chemically synthesized
  source 1..20: mol_type = other DNA
ttaaaactgacctacatatg

SEQ ID NO: 6400 - DNA, 20 bp, synthetic construct
  misc_feature 1..20: note = chemically synthesized
  source 1..20: mol_type = other DNA
ctacatatgcagaaatctct

SEQ ID NO: 6401 - DNA, 20 bp, synthetic construct
  misc_feature 1..20: note = chemically synthesized
  source 1..20: mol_type = other DNA
tttttttttttctgtctttt

SEQ ID NO: 6402 - DNA, 20 bp, synthetic construct
  misc_feature 1..20: note = chemically synthesized
  source 1..20: mol_type = other DNA
attacttgcttactttaaaa

SEQ ID NO: 6403 - DNA, 20 bp, synthetic construct
  misc_feature 1..20: note = chemically synthesized
  source 1..20: mol_type = other DNA
ttacttgcttactttaaaat

SEQ ID NO: 6404 - DNA, 20 bp, synthetic construct
  misc_feature 1..20: note = chemically synthesized
  source 1..20: mol_type = other DNA
tacttgcttactttaaaata

SEQ ID NO: 6405 - DNA, 20 bp, synthetic construct
  misc_feature 1..20: note = chemically synthesized
  source 1..20: mol_type = other DNA
taaaatagggtaatgaccaa

SEQ ID NO: 6406 - DNA, 20 bp, synthetic construct
  misc_feature 1..20: note = chemically synthesized
  source 1..20: mol_type = other DNA
gaccaatagtcattgttcca

SEQ ID NO: 6407 - DNA, 20 bp, synthetic construct
  misc_feature 1..20: note = chemically synthesized
  source 1..20: mol_type = other DNA
tagtcattgttccaaagaca

SEQ ID NO: 6408 - DNA, 20 bp, synthetic construct
  misc_feature 1..20: note = chemically synthesized
  source 1..20: mol_type = other DNA
gtcattgttccaaagacata

SEQ ID NO: 6409 - DNA, 20 bp, synthetic construct
  misc_feature 1..20: note = chemically synthesized
  source 1..20: mol_type = other DNA
ttgttccaaagacatagaga

SEQ ID NO: 6410 - DNA, 20 bp, synthetic construct
  misc_feature 1..20: note = chemically synthesized
  source 1..20: mol_type = other DNA
agaaagtatattgtgtttaa

SEQ ID NO: 6411 - DNA, 20 bp, synthetic construct
  misc_feature 1..20: note = chemically synthesized
  source 1..20: mol_type = other DNA
agtatattgtgtttaaaaga

SEQ ID NO: 6412 - DNA, 20 bp, synthetic construct
  misc_feature 1..20: note = chemically synthesized
  source 1..20: mol_type = other DNA
acagcttctttataattcta

SEQ ID NO: 6413 - DNA, 20 bp, synthetic construct
  misc_feature 1..20: note = chemically synthesized
  source 1..20: mol_type = other DNA
ctaaaacattcctatttgcc

SEQ ID NO: 6414 - DNA, 20 bp, synthetic construct
  misc_feature 1..20: note = chemically synthesized
  source 1..20: mol_type = other DNA
taaaacattcctatttgcca

SEQ ID NO: 6415 - DNA, 20 bp, synthetic construct
  misc_feature 1..20: note = chemically synthesized
  source 1..20: mol_type = other DNA
aacattcctatttgccaagg

SEQ ID NO: 6416 - DNA, 20 bp, synthetic construct
  misc_feature 1..20: note = chemically synthesized
  source 1..20: mol_type = other DNA
attcctatttgccaaggcag

SEQ ID NO: 6417 - DNA, 20 bp, synthetic construct
  misc_feature 1..20: note = chemically synthesized
  source 1..20: mol_type = other DNA
tcctatttgccaaggcagtg

SEQ ID NO: 6418 - DNA, 20 bp, synthetic construct
  misc_feature 1..20: note = chemically synthesized
  source 1..20: mol_type = other DNA
agtggagtttttgctgttct

SEQ ID NO: 6419 - DNA, 20 bp, synthetic construct
  misc_feature 1..20: note = chemically synthesized
  source 1..20: mol_type = other DNA
tcttagaacataattactga

SEQ ID NO: 6420 - DNA, 20 bp, synthetic construct
  misc_feature 1..20: note = chemically synthesized
  source 1..20: mol_type = other DNA
cacccacacatgtcctgcct

SEQ ID NO: 6421 - DNA, 20 bp, synthetic construct
  misc_feature 1..20: note = chemically synthesized
  source 1..20: mol_type = other DNA
aattgtatgtccatccttta

SEQ ID NO: 6422 - DNA, 20 bp, synthetic construct
  misc_feature 1..20: note = chemically synthesized
  source 1..20: mol_type = other DNA
attgtatgtccatcctttaa

SEQ ID NO: 6423 - DNA, 20 bp, synthetic construct
  misc_feature 1..20: note = chemically synthesized
  source 1..20: mol_type = other DNA
tttaaaggtcattcctttaa

SEQ ID NO: 6424 - DNA, 20 bp, synthetic construct
  misc_feature 1..20: note = chemically synthesized
  source 1..20: mol_type = other DNA
attcctttaatggtcttttc

SEQ ID NO: 6425 - DNA, 20 bp, synthetic construct
  misc_feature 1..20: note = chemically synthesized
  source 1..20: mol_type = other DNA
tggtcttttctggacaccac

SEQ ID NO: 6426 - DNA, 20 bp, synthetic construct
  misc_feature 1..20: note = chemically synthesized
  source 1..20: mol_type = other DNA
ggtcttttctggacaccact

SEQ ID NO: 6427 - DNA, 20 bp, synthetic construct
  misc_feature 1..20: note = chemically synthesized
  source 1..20: mol_type = other DNA
gtcttttctggacaccacta

SEQ ID NO: 6428 - DNA, 20 bp, synthetic construct
  misc_feature 1..20: note = chemically synthesized
  source 1..20: mol_type = other DNA
tcttttctggacaccactag

SEQ ID NO: 6429 - DNA, 20 bp, synthetic construct
  misc_feature 1..20: note = chemically synthesized
  source 1..20: mol_type = other DNA
ttctggacaccactaggggt

SEQ ID NO: 6430 - DNA, 20 bp, synthetic construct
  misc_feature 1..20: note = chemically synthesized
  source 1..20: mol_type = other DNA
tggacaccactaggggtcag

SEQ ID NO: 6431 - DNA, 20 bp, synthetic construct
  misc_feature 1..20: note = chemically synthesized
  source 1..20: mol_type = other DNA
acaccactaggggtcagaag

SEQ ID NO: 6432 - DNA, 20 bp, synthetic construct
  misc_feature 1..20: note = chemically synthesized
  source 1..20: mol_type = other DNA
actttcttccctccctactt

SEQ ID NO: 6433 - DNA, 20 bp, synthetic construct
  misc_feature 1..20: note = chemically synthesized
  source 1..20: mol_type = other DNA
tccctacttcagtgatgcat

SEQ ID NO: 6434 - DNA, 20 bp, synthetic construct
  misc_feature 1..20: note = chemically synthesized
  source 1..20: mol_type = other DNA
ccctacttcagtgatgcata

SEQ ID NO: 6435 - DNA, 20 bp, synthetic construct
  misc_feature 1..20: note = chemically synthesized
  source 1..20: mol_type = other DNA
tacttcagtgatgcataagg

SEQ ID NO: 6436 - DNA, 20 bp, synthetic construct
  misc_feature 1..20: note = chemically synthesized
  source 1..20: mol_type = other DNA
tgcataaggcagatctgctt

SEQ ID NO: 6437 - DNA, 20 bp, synthetic construct
  misc_feature 1..20: note = chemically synthesized
  source 1..20: mol_type = other DNA
aggcagatctgctttagtgt

SEQ ID NO: 6438 - DNA, 20 bp, synthetic construct
  misc_feature 1..20: note = chemically synthesized
  source 1..20: mol_type = other DNA
agatctgctttagtgtaagc

SEQ ID NO: 6439 - DNA, 20 bp, synthetic construct
  misc_feature 1..20: note = chemically synthesized
  source 1..20: mol_type = other DNA
gatctgctttagtgtaagcg

SEQ ID NO: 6440 - DNA, 20 bp, synthetic construct
  misc_feature 1..20: note = chemically synthesized
  source 1..20: mol_type = other DNA
tgctttagtgtaagcgaggt

SEQ ID NO: 6441 - DNA, 20 bp, synthetic construct
  misc_feature 1..20: note = chemically synthesized
  source 1..20: mol_type = other DNA
gctttagtgtaagcgaggtc

SEQ ID NO: 6442 - DNA, 20 bp, synthetic construct
  misc_feature 1..20: note = chemically synthesized
  source 1..20: mol_type = other DNA
gtaagcgaggtcaggccctc

SEQ ID NO: 6443 - DNA, 20 bp, synthetic construct
  misc_feature 1..20: note = chemically synthesized
  source 1..20: mol_type = other DNA
aagcgaggtcaggccctcaa

SEQ ID NO: 6444 - DNA, 20 bp, synthetic construct
  misc_feature 1..20: note = chemically synthesized
  source 1..20: mol_type = other DNA
ggtcaggccctcaagagtct

SEQ ID NO: 6445 - DNA, 20 bp, synthetic construct
  misc_feature 1..20: note = chemically synthesized
  source 1..20: mol_type = other DNA
gtcaggccctcaagagtctt

SEQ ID NO: 6446 - DNA, 20 bp, synthetic construct
  misc_feature 1..20: note = chemically synthesized
  source 1..20: mol_type = other DNA
ggccctcaagagtcttggga

SEQ ID NO: 6447 - DNA, 20 bp, synthetic construct
  misc_feature 1..20: note = chemically synthesized
  source 1..20: mol_type = other DNA
caagagtcttgggatggctg

SEQ ID NO: 6448 - DNA, 20 bp, synthetic construct
  misc_feature 1..20: note = chemically synthesized
  source 1..20: mol_type = other DNA
agagtcttgggatggctgaa

SEQ ID NO: 6449 - DNA, 20 bp, synthetic construct
  misc_feature 1..20: note = chemically synthesized
  source 1..20: mol_type = other DNA
gagtcttgggatggctgaag

SEQ ID NO: 6450 - DNA, 20 bp, synthetic construct
  misc_feature 1..20: note = chemically synthesized
  source 1..20: mol_type = other DNA
cttgggatggctgaagaggt

SEQ ID NO: 6451 - DNA, 20 bp, synthetic construct
  misc_feature 1..20: note = chemically synthesized
  source 1..20: mol_type = other DNA
aagaggtaagaacattctat

SEQ ID NO: 6452 - DNA, 20 bp, synthetic construct
  misc_feature 1..20: note = chemically synthesized
  source 1..20: mol_type = other DNA
cattctataagacttgtcca

SEQ ID NO: 6453 - DNA, 20 bp, synthetic construct
  misc_feature 1..20: note = chemically synthesized
  source 1..20: mol_type = other DNA
tttaatgattctgaatatgc

SEQ ID NO: 6454 - DNA, 20 bp, synthetic construct
  misc_feature 1..20: note = chemically synthesized
  source 1..20: mol_type = other DNA
tgattctgaatatgctagtt

SEQ ID NO: 6455 - DNA, 20 bp, synthetic construct
  misc_feature 1..20: note = chemically synthesized
  source 1..20: mol_type = other DNA
attctgaatatgctagttca

SEQ ID NO: 6456 - DNA, 20 bp, synthetic construct
  misc_feature 1..20: note = chemically synthesized
  source 1..20: mol_type = other DNA
tctgaatatgctagttcaga

SEQ ID NO: 6457 - DNA, 20 bp, synthetic construct
  misc_feature 1..20: note = chemically synthesized
  source 1..20: mol_type = other DNA
atctatttaccacaaacctg

SEQ ID NO: 6458 - DNA, 20 bp, synthetic construct
  misc_feature 1..20: note = chemically synthesized
  source 1..20: mol_type = other DNA
tatttaccacaaacctgaag

SEQ ID NO: 6459 - DNA, 20 bp, synthetic construct
  misc_feature 1..20: note = chemically synthesized
  source 1..20: mol_type = other DNA
atttaccacaaacctgaagt

SEQ ID NO: 6460 - DNA, 20 bp, synthetic construct
  misc_feature 1..20: note = chemically synthesized
  source 1..20: mol_type = other DNA
ctgaagtaggcttaaatttc

SEQ ID NO: 6461 - DNA, 20 bp, synthetic construct
  misc_feature 1..20: note = chemically synthesized
  source 1..20: mol_type = other DNA
aaatttccagtttacctgaa

SEQ ID NO: 6462 - DNA, 20 bp, synthetic construct
  misc_feature 1..20: note = chemically synthesized
  source 1..20: mol_type = other DNA
ctgaatggttatgacctaat

SEQ ID NO: 6463 - DNA, 20 bp, synthetic construct
  misc_feature 1..20: note = chemically synthesized
  source 1..20: mol_type = other DNA
gaatggttatgacctaatta

SEQ ID NO: 6464 - DNA, 20 bp, synthetic construct
  misc_feature 1..20: note = chemically synthesized
  source 1..20: mol_type = other DNA
aatggttatgacctaattag

SEQ ID NO: 6465 - DNA, 20 bp, synthetic construct
  misc_feature 1..20: note = chemically synthesized
  source 1..20: mol_type = other DNA
aatgactttataaacatata

SEQ ID NO: 6466 - DNA, 20 bp, synthetic construct
  misc_feature 1..20: note = chemically synthesized
  source 1..20: mol_type = other DNA
catatatagatacaaatata

SEQ ID NO: 6467 - DNA, 20 bp, synthetic construct
  misc_feature 1..20: note = chemically synthesized
  source 1..20: mol_type = other DNA
atatttattatatattatat

SEQ ID NO: 6468 - DNA, 20 bp, synthetic construct
  misc_feature 1..20: note = chemically synthesized
  source 1..20: mol_type = other DNA
tatataagcataaaatgtaa

SEQ ID NO: 6469 - DNA, 20 bp, synthetic construct
  misc_feature 1..20: note = chemically synthesized
  source 1..20: mol_type = other DNA
tatgtatatacacatttatc

SEQ ID NO: 6470 - DNA, 20 bp, synthetic construct
  misc_feature 1..20: note = chemically synthesized
  source 1..20: mol_type = other DNA
tatttcattatatattttat

SEQ ID NO: 6471 - DNA, 20 bp, synthetic construct
  misc_feature 1..20: note = chemically synthesized
  source 1..20: mol_type = other DNA
ctaaaatattttttaaaaat

SEQ ID NO: 6472 - DNA, 20 bp, synthetic construct
  misc_feature 1..20: note = chemically synthesized
  source 1..20: mol_type = other DNA
tttaaaaattagccatacct

SEQ ID NO: 6473 - DNA, 20 bp, synthetic construct
  misc_feature 1..20: note = chemically synthesized
  source 1..20: mol_type = other DNA
aaaaattagccataccttag

SEQ ID NO: 6474 - DNA, 20 bp, synthetic construct
  misc_feature 1..20: note = chemically synthesized
  source 1..20: mol_type = other DNA
attataaaaaatatatgaca

SEQ ID NO: 6475 - DNA, 20 bp, synthetic construct
  misc_feature 1..20: note = chemically synthesized
  source 1..20: mol_type = other DNA
atggtccatctgttcaactg

SEQ ID NO: 6476 - DNA, 20 bp, synthetic construct
  misc_feature 1..20: note = chemically synthesized
  source 1..20: mol_type = other DNA
ctgtagccatctaaccattt

SEQ ID NO: 6477 - DNA, 20 bp, synthetic construct
  misc_feature 1..20: note = chemically synthesized
  source 1..20: mol_type = other DNA
tagccatctaaccatttgag

SEQ ID NO: 6478 - DNA, 20 bp, synthetic construct
  misc_feature 1..20: note = chemically synthesized
  source 1..20: mol_type = other DNA
accatttgagaagtttttat

SEQ ID NO: 6479 - DNA, 20 bp, synthetic construct
  misc_feature 1..20: note = chemically synthesized
  source 1..20: mol_type = other DNA
agaagtttttataagattta

SEQ ID NO: 6480 - DNA, 20 bp, synthetic construct
  misc_feature 1..20: note = chemically synthesized
  source 1..20: mol_type = other DNA
tgacataaatcatctcatgc

SEQ ID NO: 6481 - DNA, 20 bp, synthetic construct
  misc_feature 1..20: note = chemically synthesized
  source 1..20: mol_type = other DNA
ataaatcatctcatgcaaga

SEQ ID NO: 6482 - DNA, 20 bp, synthetic construct
  misc_feature 1..20: note = chemically synthesized
  source 1..20: mol_type = other DNA
agatagtgtatttgttttgt

SEQ ID NO: 6483 - DNA, 20 bp, synthetic construct
  misc_feature 1..20: note = chemically synthesized
  source 1..20: mol_type = other DNA
ttaatatgttcccttttctt

SEQ ID NO: 6484 - DNA, 20 bp, synthetic construct
  misc_feature 1..20: note = chemically synthesized
  source 1..20: mol_type = other DNA
cccttttcttcagaaaatgt

SEQ ID NO: 6485 - DNA, 20 bp, synthetic construct
  misc_feature 1..20: note = chemically synthesized
  source 1..20: mol_type = other DNA
tttcttcagaaaatgtgaga

SEQ ID NO: 6486 - DNA, 20 bp, synthetic construct
  misc_feature 1..20: note = chemically synthesized
  source 1..20: mol_type = other DNA
cttaaaataaaattaactat

SEQ ID NO: 6487 - DNA, 20 bp, synthetic construct
  misc_feature 1..20: note = chemically synthesized
  source 1..20: mol_type = other DNA
taaaattaactataagaaac

SEQ ID NO: 6488 - DNA, 20 bp, synthetic construct
  misc_feature 1..20: note = chemically synthesized
  source 1..20: mol_type = other DNA
aactggtaaacactgaatga

SEQ ID NO: 6489 - DNA, 20 bp, synthetic construct
  misc_feature 1..20: note = chemically synthesized
  source 1..20: mol_type = other DNA
tggtaaacactgaatgaaag

SEQ ID NO: 6490 - DNA, 20 bp, synthetic construct
  misc_feature 1..20: note = chemically synthesized
  source 1..20: mol_type = other DNA
ctgaatgaaagaagaaaacc

SEQ ID NO: 6491 - DNA, 20 bp, synthetic construct
  misc_feature 1..20: note = chemically synthesized
  source 1..20: mol_type = other DNA
aatgaaagaagaaaaccaag

SEQ ID NO: 6492 - DNA, 20 bp, synthetic construct
  misc_feature 1..20: note = chemically synthesized
  source 1..20: mol_type = other DNA
aagaagaaaaccaagcagaa

SEQ ID NO: 6493 - DNA, 20 bp, synthetic construct
  misc_feature 1..20: note = chemically synthesized
  source 1..20: mol_type = other DNA
aaaaccaagcagaaaagtaa

SEQ ID NO: 6494 - DNA, 20 bp, synthetic construct
  misc_feature 1..20: note = chemically synthesized
  source 1..20: mol_type = other DNA
aaaccaagcagaaaagtaaa

SEQ ID NO: 6495 - DNA, 20 bp, synthetic construct
  misc_feature 1..20: note = chemically synthesized
  source 1..20: mol_type = other DNA
accaagcagaaaagtaaaag

SEQ ID NO: 6496 - DNA, 20 bp, synthetic construct
  misc_feature 1..20: note = chemically synthesized
  source 1..20: mol_type = other DNA
ccaagcagaaaagtaaaagg

SEQ ID NO: 6497 - DNA, 20 bp, synthetic construct
  misc_feature 1..20: note = chemically synthesized
  source 1..20: mol_type = other DNA
aaaaacattttttatttgcc

SEQ ID NO: 6498 - DNA, 20 bp, synthetic construct
  misc_feature 1..20: note = chemically synthesized
  source 1..20: mol_type = other DNA
ttatttgcctggcaaataat

SEQ ID NO: 6499 - DNA, 20 bp, synthetic construct
  misc_feature 1..20: note = chemically synthesized
  source 1..20: mol_type = other DNA
ataataagtgcatatattaa

SEQ ID NO: 6500 - DNA, 20 bp, synthetic construct
  misc_feature 1..20: note = chemically synthesized
  source 1..20: mol_type = other DNA
ataatatatataatatgtta

SEQ ID NO: 6501 - DNA, 20 bp, synthetic construct
  misc_feature 1..20: note = chemically synthesized
  source 1..20: mol_type = other DNA
taatatatataatatgttat

SEQ ID NO: 6502 - DNA, 20 bp, synthetic construct
  misc_feature 1..20: note = chemically synthesized
  source 1..20: mol_type = other DNA
tttgatctatatatacattg

SEQ ID NO: 6503 - DNA, 20 bp, synthetic construct
  misc_feature 1..20: note = chemically synthesized
  source 1..20: mol_type = other DNA
tgatctatatatacattgta

SEQ ID NO: 6504 - DNA, 20 bp, synthetic construct
  misc_feature 1..20: note = chemically synthesized
  source 1..20: mol_type = other DNA
atctatatatacattgtaga

SEQ ID NO: 6505 - DNA, 20 bp, synthetic construct
  misc_feature 1..20: note = chemically synthesized
  source 1..20: mol_type = other DNA
ctatatatacattgtagaga

SEQ ID NO: 6506 - DNA, 20 bp, synthetic construct
  misc_feature 1..20: note = chemically synthesized
  source 1..20: mol_type = other DNA
cattgtagagagagtctatc

SEQ ID NO: 6507 - DNA, 20 bp, synthetic construct
  misc_feature 1..20: note = chemically synthesized
  source 1..20: mol_type = other DNA
agagagtctatcaagctaat

SEQ ID NO: 6508 - DNA, 20 bp, synthetic construct
  misc_feature 1..20: note = chemically synthesized
  source 1..20: mol_type = other DNA
tcaccttccaactttttttg

SEQ ID NO: 6509 - DNA, 20 bp, synthetic construct
  misc_feature 1..20: note = chemically synthesized
  source 1..20: mol_type = other DNA
cttccaactttttttgtggt

SEQ ID NO: 6510 - DNA, 20 bp, synthetic construct
  misc_feature 1..20: note = chemically synthesized
  source 1..20: mol_type = other DNA
aacataaaatatttattttt

SEQ ID NO: 6511 - DNA, 20 bp, synthetic construct
  misc_feature 1..20: note = chemically synthesized
  source 1..20: mol_type = other DNA
tattaactgtgttcactatg

SEQ ID NO: 6512 - DNA, 20 bp, synthetic construct
  misc_feature 1..20: note = chemically synthesized
  source 1..20: mol_type = other DNA
ctgtgttcactatgcagtgt

SEQ ID NO: 6513 - DNA, 20 bp, synthetic construct
  misc_feature 1..20: note = chemically synthesized
  source 1..20: mol_type = other DNA
gtgttcactatgcagtgtga

SEQ ID NO: 6514 - DNA, 20 bp, synthetic construct
  misc_feature 1..20: note = chemically synthesized
  source 1..20: mol_type = other DNA
atcactaaaacttattcctc

SEQ ID NO: 6515 - DNA, 20 bp, synthetic construct
  misc_feature 1..20: note = chemically synthesized
  source 1..20: mol_type = other DNA
ttattcctctagtctaactg

SEQ ID NO: 6516 - DNA, 20 bp, synthetic construct
  misc_feature 1..20: note = chemically synthesized
  source 1..20: mol_type = other DNA
ccatccctcctctacactct

SEQ ID NO: 6517 - DNA, 20 bp, synthetic construct
  misc_feature 1..20: note = chemically synthesized
  source 1..20: mol_type = other DNA
ccctcctctacactctcagt

SEQ ID NO: 6518 - DNA, 20 bp, synthetic construct
  misc_feature 1..20: note = chemically synthesized
  source 1..20: mol_type = other DNA
ctacactctcagtcagccta

SEQ ID NO: 6519 - DNA, 20 bp, synthetic construct
  misc_feature 1..20: note = chemically synthesized
  source 1..20: mol_type = other DNA
cttaaatatattaaaatgaa

SEQ ID NO: 6520 - DNA, 20 bp, synthetic construct
  misc_feature 1..20: note = chemically synthesized
  source 1..20: mol_type = other DNA
aaatgaacagttaaatttat

SEQ ID NO: 6521 - DNA, 20 bp, synthetic construct
  misc_feature 1..20: note = chemically synthesized
  source 1..20: mol_type = other DNA
aatgaacagttaaatttatg

SEQ ID NO: 6522 - DNA, 20 bp, synthetic construct
  misc_feature 1..20: note = chemically synthesized
  source 1..20: mol_type = other DNA
aaaactattacacatatttt

SEQ ID NO: 6523 - DNA, 20 bp, synthetic construct
  misc_feature 1..20: note = chemically synthesized
  source 1..20: mol_type = other DNA
aagttgtcctctgaaaattc

SEQ ID NO: 6524 - DNA, 20 bp, synthetic construct
  misc_feature 1..20: note = chemically synthesized
  source 1..20: mol_type = other DNA
acttcaatacccttattttt

SEQ ID NO: 6525 - DNA, 20 bp, synthetic construct
  misc_feature 1..20: note = chemically synthesized
  source 1..20: mol_type = other DNA
atacccttatttttaagata

SEQ ID NO: 6526 - DNA, 20 bp, synthetic construct
  misc_feature 1..20: note = chemically synthesized
  source 1..20: mol_type = other DNA
tacccttatttttaagataa

SEQ ID NO: 6527 - DNA, 20 bp, synthetic construct
  misc_feature 1..20: note = chemically synthesized
  source 1..20: mol_type = other DNA
ttaagataaaggaaattgta

SEQ ID NO: 6528 - DNA, 20 bp, synthetic construct
  misc_feature 1..20: note = chemically synthesized
  source 1..20: mol_type = other DNA
taagataaaggaaattgtaa

SEQ ID NO: 6529 - DNA, 20 bp, synthetic construct
  misc_feature 1..20: note = chemically synthesized
  source 1..20: mol_type = other DNA
ggaaattgtaaaggctttct

SEQ ID NO: 6530 - DNA, 20 bp, synthetic construct
  misc_feature 1..20: note = chemically synthesized
  source 1..20: mol_type = other DNA
taaaggctttctaagaaatc

SEQ ID NO: 6531 - DNA, 20 bp, synthetic construct
  misc_feature 1..20: note = chemically synthesized
  source 1..20: mol_type = other DNA
agaaatcgagtacccatacc

SEQ ID NO: 6532 - DNA, 20 bp, synthetic construct
  misc_feature 1..20: note = chemically synthesized
  source 1..20: mol_type = other DNA
gaaatcgagtacccatacct

SEQ ID NO: 6533 - DNA, 20 bp, synthetic construct
  misc_feature 1..20: note = chemically synthesized
  source 1..20: mol_type = other DNA
agtacccatacctaggctgc

SEQ ID NO: 6534 - DNA, 20 bp, synthetic construct
  misc_feature 1..20: note = chemically synthesized
  source 1..20: mol_type = other DNA
atacctaggctgctagactc

SEQ ID NO: 6535 - DNA, 20 bp, synthetic construct
  misc_feature 1..20: note = chemically synthesized
  source 1..20: mol_type = other DNA
tacctaggctgctagactcc

SEQ ID NO: 6536 - DNA, 20 bp, synthetic construct
  misc_feature 1..20: note = chemically synthesized
  source 1..20: mol_type = other DNA
ctccaggtccaatttttctc

SEQ ID NO: 6537 - DNA, 20 bp, synthetic construct
  misc_feature 1..20: note = chemically synthesized
  source 1..20: mol_type = other DNA
tccaggtccaatttttctcc

SEQ ID NO: 6538 - DNA, 20 bp, synthetic construct
  misc_feature 1..20: note = chemically synthesized
  source 1..20: mol_type = other DNA
ccaggtccaatttttctcca

SEQ ID NO: 6539 - DNA, 20 bp, synthetic construct
  misc_feature 1..20: note = chemically synthesized
  source 1..20: mol_type = other DNA
caggtccaatttttctccag

SEQ ID NO: 6540 - DNA, 20 bp, synthetic construct
  misc_feature 1..20: note = chemically synthesized
  source 1..20: mol_type = other DNA
aggtccaatttttctccagg

SEQ ID NO: 6541 - DNA, 20 bp, synthetic construct
  misc_feature 1..20: note = chemically synthesized
  source 1..20: mol_type = other DNA
ttttctccagggggttacta

SEQ ID NO: 6542 - DNA, 20 bp, synthetic construct
  misc_feature 1..20: note = chemically synthesized
  source 1..20: mol_type = other DNA
ccagggggttactatggctt

SEQ ID NO: 6543 - DNA, 20 bp, synthetic construct
  misc_feature 1..20: note = chemically synthesized
  source 1..20: mol_type = other DNA
cagggggttactatggcttc

SEQ ID NO: 6544 - DNA, 20 bp, synthetic construct
  misc_feature 1..20: note = chemically synthesized
  source 1..20: mol_type = other DNA
agggggttactatggcttca

SEQ ID NO: 6545 - DNA, 20 bp, synthetic construct
  misc_feature 1..20: note = chemically synthesized
  source 1..20: mol_type = other DNA
gggttactatggcttcaggg

SEQ ID NO: 6546 - DNA, 20 bp, synthetic construct
  misc_feature 1..20: note = chemically synthesized
  source 1..20: mol_type = other DNA
ctatctataatcaccatctc

SEQ ID NO: 6547 - DNA, 20 bp, synthetic construct
  misc_feature 1..20: note = chemically synthesized
  source 1..20: mol_type = other DNA
ctcactttctcatcaccaca

SEQ ID NO: 6548 - DNA, 20 bp, synthetic construct
  misc_feature 1..20: note = chemically synthesized
  source 1..20: mol_type = other DNA
actttctcatcaccacacag

SEQ ID NO: 6549 - DNA, 20 bp, synthetic construct
  misc_feature 1..20: note = chemically synthesized
  source 1..20: mol_type = other DNA
tcatcaccacacagtggaat

SEQ ID NO: 6550 - DNA, 20 bp, synthetic construct
  misc_feature 1..20: note = chemically synthesized
  source 1..20: mol_type = other DNA
accacacagtggaataagaa

SEQ ID NO: 6551 - DNA, 20 bp, synthetic construct
  misc_feature 1..20: note = chemically synthesized
  source 1..20: mol_type = other DNA
cagtggaataagaatagttt

SEQ ID NO: 6552 - DNA, 20 bp, synthetic construct
  misc_feature 1..20: note = chemically synthesized
  source 1..20: mol_type = other DNA
tggaataagaatagttttgg

SEQ ID NO: 6553 - DNA, 20 bp, synthetic construct
  misc_feature 1..20: note = chemically synthesized
  source 1..20: mol_type = other DNA
tagttttggcagcaataaaa

SEQ ID NO: 6554 - DNA, 20 bp, synthetic construct
  misc_feature 1..20: note = chemically synthesized
  source 1..20: mol_type = other DNA
aaagtaatgccatatcaaat

SEQ ID NO: 6555 - DNA, 20 bp, synthetic construct
  misc_feature 1..20: note = chemically synthesized
  source 1..20: mol_type = other DNA
aatgccatatcaaattagta

SEQ ID NO: 6556 - DNA, 20 bp, synthetic construct
  misc_feature 1..20: note = chemically synthesized
  source 1..20: mol_type = other DNA
tatcaaattagtaaagcctt

SEQ ID NO: 6557 - DNA, 20 bp, synthetic construct
  misc_feature 1..20: note = chemically synthesized
  source 1..20: mol_type = other DNA
attagtaaagccttcagaaa

SEQ ID NO: 6558 - DNA, 20 bp, synthetic construct
  misc_feature 1..20: note = chemically synthesized
  source 1..20: mol_type = other DNA
gaaaaagtatgaatattaca

SEQ ID NO: 6559 - DNA, 20 bp, synthetic construct
  misc_feature 1..20: note = chemically synthesized
  source 1..20: mol_type = other DNA
ttacacagttacacttatat

SEQ ID NO: 6560 - DNA, 20 bp, synthetic construct
  misc_feature 1..20: note = chemically synthesized
  source 1..20: mol_type = other DNA
tgtctgattaaatgttatta

SEQ ID NO: 6561 - DNA, 20 bp, synthetic construct
  misc_feature 1..20: note = chemically synthesized
  source 1..20: mol_type = other DNA
tatatactactattaatttc

SEQ ID NO: 6562 - DNA, 20 bp, synthetic construct
  misc_feature 1..20: note = chemically synthesized
  source 1..20: mol_type = other DNA
ccagttctatctttctgttc

SEQ ID NO: 6563 - DNA, 20 bp, synthetic construct
  misc_feature 1..20: note = chemically synthesized
  source 1..20: mol_type = other DNA
tctatctttctgttcaagaa

SEQ ID NO: 6564 - DNA, 20 bp, synthetic construct
  misc_feature 1..20: note = chemically synthesized
  source 1..20: mol_type = other DNA
tctgttcaagaaaagaatgt

SEQ ID NO: 6565 - DNA, 20 bp, synthetic construct
  misc_feature 1..20: note = chemically synthesized
  source 1..20: mol_type = other DNA
gttcaagaaaagaatgtgag

SEQ ID NO: 6566 - DNA, 20 bp, synthetic construct
  misc_feature 1..20: note = chemically synthesized
  source 1..20: mol_type = other DNA
aaagaatgtgagaagtaaat

SEQ ID NO: 6567 - DNA, 20 bp, synthetic construct
  misc_feature 1..20: note = chemically synthesized
  source 1..20: mol_type = other DNA
tttgcctacttcatccccaa

SEQ ID NO: 6568 - DNA, 20 bp, synthetic construct
  misc_feature 1..20: note = chemically synthesized
  source 1..20: mol_type = other DNA
tgcctacttcatccccaaca

SEQ ID NO: 6569 - DNA, 20 bp, synthetic construct
  misc_feature 1..20: note = chemically synthesized
  source 1..20: mol_type = other DNA
gcctacttcatccccaacag

SEQ ID NO: 6570 - DNA, 20 bp, synthetic construct
  misc_feature 1..20: note = chemically synthesized
  source 1..20: mol_type = other DNA
ctacttcatccccaacagag

SEQ ID NO: 6571 - DNA, 20 bp, synthetic construct
  misc_feature 1..20: note = chemically synthesized
  source 1..20: mol_type = other DNA
gatcatgactatatcaataa

SEQ ID NO: 6572 - DNA, 20 bp, synthetic construct
  misc_feature 1..20: note = chemically synthesized
  source 1..20: mol_type = other DNA
tcatgactatatcaataatg

SEQ ID NO: 6573 - DNA, 20 bp, synthetic construct
  misc_feature 1..20: note = chemically synthesized
  source 1..20: mol_type = other DNA
actatatcaataatggagcc

SEQ ID NO: 6574 - DNA, 20 bp, synthetic construct
  misc_feature 1..20: note = chemically synthesized
  source 1..20: mol_type = other DNA
ctatatcaataatggagcct

SEQ ID NO: 6575 - DNA, 20 bp, synthetic construct
  misc_feature 1..20: note = chemically synthesized
  source 1..20: mol_type = other DNA
tcaataatggagcctgggcc

SEQ ID NO: 6576 - DNA, 20 bp, synthetic construct
  misc_feature 1..20: note = chemically synthesized
  source 1..20: mol_type = other DNA
ggagcctgggcccagacaac

SEQ ID NO: 6577 - DNA, 20 bp, synthetic construct
  misc_feature 1..20: note = chemically synthesized
  source 1..20: mol_type = other DNA
ctgggcccagacaactggtt

SEQ ID NO: 6578 - DNA, 20 bp, synthetic construct
  misc_feature 1..20: note = chemically synthesized
  source 1..20: mol_type = other DNA
gggcccagacaactggttaa

SEQ ID NO: 6579 - DNA, 20 bp, synthetic construct
  misc_feature 1..20: note = chemically synthesized
  source 1..20: mol_type = other DNA
gcccagacaactggttaaga

SEQ ID NO: 6580 - DNA, 20 bp, synthetic construct
  misc_feature 1..20: note = chemically synthesized
  source 1..20: mol_type = other DNA
ccagacaactggttaagaga

SEQ ID NO: 6581 - DNA, 20 bp, synthetic construct
  misc_feature 1..20: note = chemically synthesized
  source 1..20: mol_type = other DNA
cagacaactggttaagagag

SEQ ID NO: 6582 - DNA, 20 bp, synthetic construct
  misc_feature 1..20: note = chemically synthesized
  source 1..20: mol_type = other DNA
gagagaggtcattctgacct

SEQ ID NO: 6583 - DNA, 20 bp, synthetic construct
  misc_feature 1..20: note = chemically synthesized
  source 1..20: mol_type = other DNA
gtcattctgacctcagaaca

SEQ ID NO: 6584 - DNA, 20 bp, synthetic construct
  misc_feature 1..20: note = chemically synthesized
  source 1..20: mol_type = other DNA
tcattctgacctcagaacat

SEQ ID NO: 6585 - DNA, 20 bp, synthetic construct
  misc_feature 1..20: note = chemically synthesized
  source 1..20: mol_type = other DNA
attctgacctcagaacatag

SEQ ID NO: 6586 - DNA, 20 bp, synthetic construct
  misc_feature 1..20: note = chemically synthesized
  source 1..20: mol_type = other DNA
tctgacctcagaacatagga

SEQ ID NO: 6587 - DNA, 20 bp, synthetic construct
  misc_feature 1..20: note = chemically synthesized
  source 1..20: mol_type = other DNA
acctcagaacataggagaga

SEQ ID NO: 6588 - DNA, 20 bp, synthetic construct
  misc_feature 1..20: note = chemically synthesized
  source 1..20: mol_type = other DNA
gagatggatattgtacacca

SEQ ID NO: 6589 - DNA, 20 bp, synthetic construct
  misc_feature 1..20: note = chemically synthesized
  source 1..20: mol_type = other DNA
gatggatattgtacaccaca

SEQ ID NO: 6590 - DNA, 20 bp, synthetic construct
  misc_feature 1..20: note = chemically synthesized
  source 1..20: mol_type = other DNA
atattgtacaccacagagtc

SEQ ID NO: 6591 - DNA, 20 bp, synthetic construct
  misc_feature 1..20: note = chemically synthesized
  source 1..20: mol_type = other DNA
tattgtacaccacagagtcc

SEQ ID NO: 6592 - DNA, 20 bp, synthetic construct
  misc_feature 1..20: note = chemically synthesized
  source 1..20: mol_type = other DNA
accacagagtccaggatgac

SEQ ID NO: 6593 - DNA, 20 bp, synthetic construct
  misc_feature 1..20: note = chemically synthesized
  source 1..20: mol_type = other DNA
acagagtccaggatgactag

SEQ ID NO: 6594 - DNA, 20 bp, synthetic construct
  misc_feature 1..20: note = chemically synthesized
  source 1..20: mol_type = other DNA
gtccaggatgactagcagtg

SEQ ID NO: 6595 - DNA, 20 bp, synthetic construct
  misc_feature 1..20: note = chemically synthesized
  source 1..20: mol_type = other DNA
tccaggatgactagcagtga

SEQ ID NO: 6596 - DNA, 20 bp, synthetic construct
  misc_feature 1..20: note = chemically synthesized
  source 1..20: mol_type = other DNA
cagtgaaggattcaaatgcc

SEQ ID NO: 6597 - DNA, 20 bp, synthetic construct
  misc_feature 1..20: note = chemically synthesized
  source 1..20: mol_type = other DNA
ggcgaaatctcctatacaac

SEQ ID NO: 6598 - DNA, 20 bp, synthetic construct
  misc_feature 1..20: note = chemically synthesized
  source 1..20: mol_type = other DNA
cgaaatctcctatacaaccg

SEQ ID NO: 6599 - DNA, 20 bp, synthetic construct
  misc_feature 1..20: note = chemically synthesized
  source 1..20: mol_type = other DNA
aaatctcctatacaaccgga

SEQ ID NO: 6600 - DNA, 20 bp, synthetic construct
  misc_feature 1..20: note = chemically synthesized
  source 1..20: mol_type = other DNA
ctatacaaccggagagaccc

SEQ ID NO: 6601 - DNA, 20 bp, synthetic construct
  misc_feature 1..20: note = chemically synthesized
  source 1..20: mol_type = other DNA
cggagagacccaagtcccca

SEQ ID NO: 6602 - DNA, 20 bp, synthetic construct
  misc_feature 1..20: note = chemically synthesized
  source 1..20: mol_type = other DNA
agacccaagtccccaaagac

SEQ ID NO: 6603 - DNA, 20 bp, synthetic construct
  misc_feature 1..20: note = chemically synthesized
  source 1..20: mol_type = other DNA
cccaagtccccaaagacaag

SEQ ID NO: 6604 - DNA, 20 bp, synthetic construct
  misc_feature 1..20: note = chemically synthesized
  source 1..20: mol_type = other DNA
ccaagtccccaaagacaaga

SEQ ID NO: 6605 - DNA, 20 bp, synthetic construct
  misc_feature 1..20: note = chemically synthesized
  source 1..20: mol_type = other DNA
caagtccccaaagacaagaa

SEQ ID NO: 6606 - DNA, 20 bp, synthetic construct
  misc_feature 1..20: note = chemically synthesized
  source 1..20: mol_type = other DNA
gacaagaagggatgatgaaa

SEQ ID NO: 6607 - DNA, 20 bp, synthetic construct
  misc_feature 1..20: note = chemically synthesized
  source 1..20: mol_type = other DNA
gcatgacatgacttgcctat

SEQ ID NO: 6608 - DNA, 20 bp, synthetic construct
  misc_feature 1..20: note = chemically synthesized
  source 1..20: mol_type = other DNA
atgagccctcccattgctat

SEQ ID NO: 6609 - DNA, 20 bp, synthetic construct
  misc_feature 1..20: note = chemically synthesized
  source 1..20: mol_type = other DNA
tgagccctcccattgctata

SEQ ID NO: 6610 - DNA, 20 bp, synthetic construct
  misc_feature 1..20: note = chemically synthesized
  source 1..20: mol_type = other DNA
ccctcccattgctataagga

SEQ ID NO: 6611 - DNA, 20 bp, synthetic construct
  misc_feature 1..20: note = chemically synthesized
  source 1..20: mol_type = other DNA
cctcccattgctataaggat

SEQ ID NO: 6612 - DNA, 20 bp, synthetic construct
  misc_feature 1..20: note = chemically synthesized
  source 1..20: mol_type = other DNA
ctcccattgctataaggatg

SEQ ID NO: 6613 - DNA, 20 bp, synthetic construct
  misc_feature 1..20: note = chemically synthesized
  source 1..20: mol_type = other DNA
tgctataaggatggggatct

SEQ ID NO: 6614 - DNA, 20 bp, synthetic construct
  misc_feature 1..20: note = chemically synthesized
  source 1..20: mol_type = other DNA
taaggatggggatcttagca

SEQ ID NO: 6615 - DNA, 20 bp, synthetic construct
  misc_feature 1..20: note = chemically synthesized
  source 1..20: mol_type = other DNA
agcacagtgccttgtgtgaa

SEQ ID NO: 6616 - DNA, 20 bp, synthetic construct
  misc_feature 1..20: note = chemically synthesized
  source 1..20: mol_type = other DNA
ccttgtgtgaacagtaatgc

SEQ ID NO: 6617 - DNA, 20 bp, synthetic construct
  misc_feature 1..20: note = chemically synthesized
  source 1..20: mol_type = other DNA
tgctagccttgattttacca

SEQ ID NO: 6618 - DNA, 20 bp, synthetic construct
  misc_feature 1..20: note = chemically synthesized
  source 1..20: mol_type = other DNA
agccttgattttaccatggc

SEQ ID NO: 6619 - DNA, 20 bp, synthetic construct
  misc_feature 1..20: note = chemically synthesized
  source 1..20: mol_type = other DNA
tttaccatggcaagtttgtt

SEQ ID NO: 6620 - DNA, 20 bp, synthetic construct
  misc_feature 1..20: note = chemically synthesized
  source 1..20: mol_type = other DNA
ttaccatggcaagtttgttt

SEQ ID NO: 6621 - DNA, 20 bp, synthetic construct
  misc_feature 1..20: note = chemically synthesized
  source 1..20: mol_type = other DNA
taccatggcaagtttgttta

SEQ ID NO: 6622 - DNA, 20 bp, synthetic construct
  misc_feature 1..20: note = chemically synthesized
  source 1..20: mol_type = other DNA
aattccaacctcaaccaaat

SEQ ID NO: 6623 - DNA, 20 bp, synthetic construct
  misc_feature 1..20: note = chemically synthesized
  source 1..20: mol_type = other DNA
attccaacctcaaccaaatg

SEQ ID NO: 6624 - DNA, 20 bp, synthetic construct
  misc_feature 1..20: note = chemically synthesized
  source 1..20: mol_type = other DNA
ttccaacctcaaccaaatga

SEQ ID NO: 6625 - DNA, 20 bp, synthetic construct
  misc_feature 1..20: note = chemically synthesized
  source 1..20: mol_type = other DNA
aacctcaaccaaatgaggga

SEQ ID NO: 6626 - DNA, 20 bp, synthetic construct
  misc_feature 1..20: note = chemically synthesized
  source 1..20: mol_type = other DNA
tcaaccaaatgagggatggc

SEQ ID NO: 6627 - DNA, 20 bp, synthetic construct
  misc_feature 1..20: note = chemically synthesized
  source 1..20: mol_type = other DNA
caaccaaatgagggatggct

SEQ ID NO: 6628 - DNA, 20 bp, synthetic construct
  misc_feature 1..20: note = chemically synthesized
  source 1..20: mol_type = other DNA
aaccaaatgagggatggctg

SEQ ID NO: 6629 - DNA, 20 bp, synthetic construct
  misc_feature 1..20: note = chemically synthesized
  source 1..20: mol_type = other DNA
tggctggggatgcaaccaca

SEQ ID NO: 6630 - DNA, 20 bp, synthetic construct
  misc_feature 1..20: note = chemically synthesized
  source 1..20: mol_type = other DNA
accacaaagatactgtatct

SEQ ID NO: 6631 - DNA, 20 bp, synthetic construct
  misc_feature 1..20: note = chemically synthesized
  source 1..20: mol_type = other DNA
ccacaaagatactgtatctt

SEQ ID NO: 6632 - DNA, 20 bp, synthetic construct
  misc_feature 1..20: note = chemically synthesized
  source 1..20: mol_type = other DNA
acaaagatactgtatcttag

SEQ ID NO: 6633 - DNA, 20 bp, synthetic construct
  misc_feature 1..20: note = chemically synthesized
  source 1..20: mol_type = other DNA
caaagatactgtatcttagg

SEQ ID NO: 6634 - DNA, 20 bp, synthetic construct
  misc_feature 1..20: note = chemically synthesized
  source 1..20: mol_type = other DNA
aaagatactgtatcttagga

SEQ ID NO: 6635 - DNA, 20 bp, synthetic construct
  misc_feature 1..20: note = chemically synthesized
  source 1..20: mol_type = other DNA
aagatactgtatcttaggag

SEQ ID NO: 6636 - DNA, 20 bp, synthetic construct
  misc_feature 1..20: note = chemically synthesized
  source 1..20: mol_type = other DNA
gatactgtatcttaggaggg

SEQ ID NO: 6637 - DNA, 20 bp, synthetic construct
  misc_feature 1..20: note = chemically synthesized
  source 1..20: mol_type = other DNA
aggggagtttttttttttta

SEQ ID NO: 6638 - DNA, 20 bp, synthetic construct
  misc_feature 1..20: note = chemically synthesized
  source 1..20: mol_type = other DNA
ttttttttatagaaactcgt

SEQ ID NO: 6639 - DNA, 20 bp, synthetic construct
  misc_feature 1..20: note = chemically synthesized
  source 1..20: mol_type = other DNA
tttttttatagaaactcgtc

SEQ ID NO: 6640 - DNA, 20 bp, synthetic construct
  misc_feature 1..20: note = chemically synthesized
  source 1..20: mol_type = other DNA
actcgtcaggatattattgc

SEQ ID NO: 6641 - DNA, 20 bp, synthetic construct
  misc_feature 1..20: note = chemically synthesized
  source 1..20: mol_type = other DNA
ctcgtcaggatattattgct

SEQ ID NO: 6642 - DNA, 20 bp, synthetic construct
  misc_feature 1..20: note = chemically synthesized
  source 1..20: mol_type = other DNA
ttgctaggatgtgttgttac

SEQ ID NO: 6643 - DNA, 20 bp, synthetic construct
  misc_feature 1..20: note = chemically synthesized
  source 1..20: mol_type = other DNA
tgctaggatgtgttgttact

SEQ ID NO: 6644 - DNA, 20 bp, synthetic construct
  misc_feature 1..20: note = chemically synthesized
  source 1..20: mol_type = other DNA
atgtgttgttactgggaaaa

SEQ ID NO: 6645 - DNA, 20 bp, synthetic construct
  misc_feature 1..20: note = chemically synthesized
  source 1..20: mol_type = other DNA
gttactgggaaaaaagctga

SEQ ID NO: 6646 - DNA, 20 bp, synthetic construct
  misc_feature 1..20: note = chemically synthesized
  source 1..20: mol_type = other DNA
aaaaagctgatggaatacaa

SEQ ID NO: 6647 - DNA, 20 bp, synthetic construct
  misc_feature 1..20: note = chemically synthesized
  source 1..20: mol_type = other DNA
aaagctgatggaatacaaaa

SEQ ID NO: 6648 - DNA, 20 bp, synthetic construct
  misc_feature 1..20: note = chemically synthesized
  source 1..20: mol_type = other DNA
gctgatggaatacaaaagag

SEQ ID NO: 6649 - DNA, 20 bp, synthetic construct
  misc_feature 1..20: note = chemically synthesized
  source 1..20: mol_type = other DNA
caaaagagtagacatcccca

SEQ ID NO: 6650 - DNA, 20 bp, synthetic construct
  misc_feature 1..20: note = chemically synthesized
  source 1..20: mol_type = other DNA
aaaagagtagacatccccac

SEQ ID NO: 6651 - DNA, 20 bp, synthetic construct
  misc_feature 1..20: note = chemically synthesized
  source 1..20: mol_type = other DNA
aaagagtagacatccccaca

SEQ ID NO: 6652 - DNA, 20 bp, synthetic construct
  misc_feature 1..20: note = chemically synthesized
  source 1..20: mol_type = other DNA
catccccacagggattattt

SEQ ID NO: 6653 - DNA, 20 bp, synthetic construct
  misc_feature 1..20: note = chemically synthesized
  source 1..20: mol_type = other DNA
atccccacagggattatttg

SEQ ID NO: 6654 - DNA, 20 bp, synthetic construct
  misc_feature 1..20: note = chemically synthesized
  source 1..20: mol_type = other DNA
cagggattatttgaggcaat

SEQ ID NO: 6655 - DNA, 20 bp, synthetic construct
  misc_feature 1..20: note = chemically synthesized
  source 1..20: mol_type = other DNA
accactttgctttctctatg

SEQ ID NO: 6656 - DNA, 20 bp, synthetic construct
  misc_feature 1..20: note = chemically synthesized
  source 1..20: mol_type = other DNA
ccactttgctttctctatgc

SEQ ID NO: 6657 - DNA, 20 bp, synthetic construct
  misc_feature 1..20: note = chemically synthesized
  source 1..20: mol_type = other DNA
aggtgtcatctattgtgata

SEQ ID NO: 6658 - DNA, 20 bp, synthetic construct
  misc_feature 1..20: note = chemically synthesized
  source 1..20: mol_type = other DNA
catctattgtgatatagtgc

SEQ ID NO: 6659 - DNA, 20 bp, synthetic construct
  misc_feature 1..20: note = chemically synthesized
  source 1..20: mol_type = other DNA
atctattgtgatatagtgcc

SEQ ID NO: 6660 - DNA, 20 bp, synthetic construct
  misc_feature 1..20: note = chemically synthesized
  source 1..20: mol_type = other DNA
ctattgtgatatagtgccag

SEQ ID NO: 6661 - DNA, 20 bp, synthetic construct
  misc_feature 1..20: note = chemically synthesized
  source 1..20: mol_type = other DNA
tattgtgatatagtgccagg

SEQ ID NO: 6662 - DNA, 20 bp, synthetic construct
  misc_feature 1..20: note = chemically synthesized
  source 1..20: mol_type = other DNA
ccaggaggttgcctttgctg

SEQ ID NO: 6663 - DNA, 20 bp, synthetic construct
  misc_feature 1..20: note = chemically synthesized
  source 1..20: mol_type = other DNA
tttgctgtggctttcgaccc

SEQ ID NO: 6664 - DNA, 20 bp, synthetic construct
  misc_feature 1..20: note = chemically synthesized
  source 1..20: mol_type = other DNA
aataaaatgtccgtgtttat

SEQ ID NO: 6665 - DNA, 20 bp, synthetic construct
  misc_feature 1..20: note = chemically synthesized
  source 1..20: mol_type = other DNA
attgttatattgtgaaattg

SEQ ID NO: 6666 - DNA, 20 bp, synthetic construct
  misc_feature 1..20: note = chemically synthesized
  source 1..20: mol_type = other DNA
gttatattgtgaaattgtag

SEQ ID NO: 6667 - DNA, 20 bp, synthetic construct
  misc_feature 1..20: note = chemically synthesized
  source 1..20: mol_type = other DNA
gatctaaaattgtaatttct

SEQ ID NO: 6668 - DNA, 20 bp, synthetic construct
  misc_feature 1..20: note = chemically synthesized
  source 1..20: mol_type = other DNA
attgtaatttcttggattcc

SEQ ID NO: 6669 - DNA, 20 bp, synthetic construct
  misc_feature 1..20: note = chemically synthesized
  source 1..20: mol_type = other DNA
tcctagaatttctaaatctg

SEQ ID NO: 6670 - DNA, 20 bp, synthetic construct
  misc_feature 1..20: note = chemically synthesized
  source 1..20: mol_type = other DNA
tttctaaatctgtggatttt

SEQ ID NO: 6671 - DNA, 20 bp, synthetic construct
  misc_feature 1..20: note = chemically synthesized
  source 1..20: mol_type = other DNA
tgtggatttttagaattctc

SEQ ID NO: 6672 - DNA, 20 bp, synthetic construct
  misc_feature 1..20: note = chemically synthesized
  source 1..20: mol_type = other DNA
tggatttttagaattctcta

SEQ ID NO: 6673 - DNA, 20 bp, synthetic construct
  misc_feature 1..20: note = chemically synthesized
  source 1..20: mol_type = other DNA
ggatttttagaattctctag

SEQ ID NO: 6674 - DNA, 20 bp, synthetic construct
  misc_feature 1..20: note = chemically synthesized
  source 1..20: mol_type = other DNA
agaattctctagaggtgaca

SEQ ID NO: 6675 - DNA, 20 bp, synthetic construct
  misc_feature 1..20: note = chemically synthesized
  source 1..20: mol_type = other DNA
gaattctctagaggtgacaa

SEQ ID NO: 6676 - DNA, 20 bp, synthetic construct
  misc_feature 1..20: note = chemically synthesized
  source 1..20: mol_type = other DNA
gtgacaaaggtttattatct

SEQ ID NO: 6677 - DNA, 20 bp, synthetic construct
  misc_feature 1..20: note = chemically synthesized
  source 1..20: mol_type = other DNA
aggtttattatctaagctac

SEQ ID NO: 6678 - DNA, 20 bp, synthetic construct
  misc_feature 1..20: note = chemically synthesized
  source 1..20: mol_type = other DNA
gtttattatctaagctaccg

SEQ ID NO: 6679 - DNA, 20 bp, synthetic construct
  misc_feature 1..20: note = chemically synthesized
  source 1..20: mol_type = other DNA
ctaccggagctatgtacttt

SEQ ID NO: 6680 - DNA, 20 bp, synthetic construct
  misc_feature 1..20: note = chemically synthesized
  source 1..20: mol_type = other DNA
agctatgtacttttggatat

SEQ ID NO: 6681 - DNA, 20 bp, synthetic construct
  misc_feature 1..20: note = chemically synthesized
  source 1..20: mol_type = other DNA
ctatgtacttttggatataa

SEQ ID NO: 6682 - DNA, 20 bp, synthetic construct
  misc_feature 1..20: note = chemically synthesized
  source 1..20: mol_type = other DNA
atctccattgccttacaaat

SEQ ID NO: 6683 - DNA, 20 bp, synthetic construct
  misc_feature 1..20: note = chemically synthesized
  source 1..20: mol_type = other DNA
tctccattgccttacaaatc

SEQ ID NO: 6684 - DNA, 20 bp, synthetic construct
  misc_feature 1..20: note = chemically synthesized
  source 1..20: mol_type = other DNA
ttgccttacaaatcaggtgt

SEQ ID NO: 6685 - DNA, 20 bp, synthetic construct
  misc_feature 1..20: note = chemically synthesized
  source 1..20: mol_type = other DNA
cttacaaatcaggtgtgagc

SEQ ID NO: 6686 - DNA, 20 bp, synthetic construct
  misc_feature 1..20: note = chemically synthesized
  source 1..20: mol_type = other DNA
ttacaaatcaggtgtgagcc

SEQ ID NO: 6687 - DNA, 20 bp, synthetic construct
  misc_feature 1..20: note = chemically synthesized
  source 1..20: mol_type = other DNA
tgtgagccaggcatgtctct

SEQ ID NO: 6688 - DNA, 20 bp, synthetic construct
  misc_feature 1..20: note = chemically synthesized
  source 1..20: mol_type = other DNA
gccaggcatgtctctcagac

SEQ ID NO: 6689 - DNA, 20 bp, synthetic construct
  misc_feature 1..20: note = chemically synthesized
  source 1..20: mol_type = other DNA
gcatgtctctcagactggaa

SEQ ID NO: 6690 - DNA, 20 bp, synthetic construct
  misc_feature 1..20: note = chemically synthesized
  source 1..20: mol_type = other DNA
catgtctctcagactggaaa

SEQ ID NO: 6691 - DNA, 20 bp, synthetic construct
  misc_feature 1..20: note = chemically synthesized
  source 1..20: mol_type = other DNA
gactggaaaaggtaactaat

SEQ ID NO: 6692 - DNA, 20 bp, synthetic construct
  misc_feature 1..20: note = chemically synthesized
  source 1..20: mol_type = other DNA
tggaaaaggtaactaatcag

SEQ ID NO: 6693 - DNA, 20 bp, synthetic construct
  misc_feature 1..20: note = chemically synthesized
  source 1..20: mol_type = other DNA
ggaaaaggtaactaatcaga

SEQ ID NO: 6694 - DNA, 20 bp, synthetic construct
  misc_feature 1..20: note = chemically synthesized
  source 1..20: mol_type = other DNA
atcagaaggaaccattgtcc

SEQ ID NO: 6695 - DNA, 20 bp, synthetic construct
  misc_feature 1..20: note = chemically synthesized
  source 1..20: mol_type = other DNA
aaggaaccattgtcctagaa

SEQ ID NO: 6696 - DNA, 20 bp, synthetic construct
  misc_feature 1..20: note = chemically synthesized
  source 1..20: mol_type = other DNA
aggaaccattgtcctagaat

SEQ ID NO: 6697 - DNA, 20 bp, synthetic construct
  misc_feature 1..20: note = chemically synthesized
  source 1..20: mol_type = other DNA
ggaaccattgtcctagaatg

SEQ ID NO: 6698 - DNA, 20 bp, synthetic construct
  misc_feature 1..20: note = chemically synthesized
  source 1..20: mol_type = other DNA
ccattgtcctagaatggggc

SEQ ID NO: 6699 - DNA, 20 bp, synthetic construct
  misc_feature 1..20: note = chemically synthesized
  source 1..20: mol_type = other DNA
tggggcaagtgtacaatacc

SEQ ID NO: 6700 - DNA, 20 bp, synthetic construct
  misc_feature 1..20: note = chemically synthesized
  source 1..20: mol_type = other DNA
gcaagtgtacaatacccaga

SEQ ID NO: 6701 - DNA, 20 bp, synthetic construct
  misc_feature 1..20: note = chemically synthesized
  source 1..20: mol_type = other DNA
acaatacccagaaagaccac

SEQ ID NO: 6702 - DNA, 20 bp, synthetic construct
  misc_feature 1..20: note = chemically synthesized
  source 1..20: mol_type = other DNA
cagaaagaccactggtgccg

SEQ ID NO: 6703 - DNA, 20 bp, synthetic construct
  misc_feature 1..20: note = chemically synthesized
  source 1..20: mol_type = other DNA
tatttattttatttatttat

SEQ ID NO: 6704 - DNA, 20 bp, synthetic construct
  misc_feature 1..20: note = chemically synthesized
  source 1..20: mol_type = other DNA
tttattttatttatttatta

SEQ ID NO: 6705 - DNA, 20 bp, synthetic construct
  misc_feature 1..20: note = chemically synthesized
  source 1..20: mol_type = other DNA
tatttatttattagagatca

SEQ ID NO: 6706 - DNA, 20 bp, synthetic construct
  misc_feature 1..20: note = chemically synthesized
  source 1..20: mol_type = other DNA
gtgtgtgcaacacctatgtc

SEQ ID NO: 6707 - DNA, 20 bp, synthetic construct
  misc_feature 1..20: note = chemically synthesized
  source 1..20: mol_type = other DNA
tgtgtgcaacacctatgtcc

SEQ ID NO: 6708 - DNA, 20 bp, synthetic construct
  misc_feature 1..20: note = chemically synthesized
  source 1..20: mol_type = other DNA
acacctatgtccaggttctg

SEQ ID NO: 6709 - DNA, 20 bp, synthetic construct
  misc_feature 1..20: note = chemically synthesized
  source 1..20: mol_type = other DNA
ccaggttctgtggtaaacgt

SEQ ID NO: 6710 - DNA, 20 bp, synthetic construct
  misc_feature 1..20: note = chemically synthesized
  source 1..20: mol_type = other DNA
ttctgtggtaaacgtcagcg

SEQ ID NO: 6711 - DNA, 20 bp, synthetic construct
  misc_feature 1..20: note = chemically synthesized
  source 1..20: mol_type = other DNA
ctgtggtaaacgtcagcgtg

SEQ ID NO: 6712 - DNA, 20 bp, synthetic construct
  misc_feature 1..20: note = chemically synthesized
  source 1..20: mol_type = other DNA
aaacgtcagcgtggagaaat

SEQ ID NO: 6713 - DNA, 20 bp, synthetic construct
  misc_feature 1..20: note = chemically synthesized
  source 1..20: mol_type = other DNA
cgtcagcgtggagaaattag

SEQ ID NO: 6714 - DNA, 20 bp, synthetic construct
  misc_feature 1..20: note = chemically synthesized
  source 1..20: mol_type = other DNA
gtggagaaattagtagctat

SEQ ID NO: 6715 - DNA, 20 bp, synthetic construct
  misc_feature 1..20: note = chemically synthesized
  source 1..20: mol_type = other DNA
agtagctattagatcataaa

SEQ ID NO: 6716 - DNA, 20 bp, synthetic construct
  misc_feature 1..20: note = chemically synthesized
  source 1..20: mol_type = other DNA
gtagctattagatcataaaa

SEQ ID NO: 6717 - DNA, 20 bp, synthetic construct
  misc_feature 1..20: note = chemically synthesized
  source 1..20: mol_type = other DNA
ctattagatcataaaaaggt

SEQ ID NO: 6718 - DNA, 20 bp, synthetic construct
  misc_feature 1..20: note = chemically synthesized
  source 1..20: mol_type = other DNA
tattagatcataaaaaggtg

SEQ ID NO: 6719 - DNA, 20 bp, synthetic construct
  misc_feature 1..20: note = chemically synthesized
  source 1..20: mol_type = other DNA
gcataatcatatttgtcttt

SEQ ID NO: 6720 - DNA, 20 bp, synthetic construct
  misc_feature 1..20: note = chemically synthesized
  source 1..20: mol_type = other DNA
taatcatatttgtctttgag

SEQ ID NO: 6721 - DNA, 20 bp, synthetic construct
  misc_feature 1..20: note = chemically synthesized
  source 1..20: mol_type = other DNA
tgtctttgagaagctgactg

SEQ ID NO: 6722 - DNA, 20 bp, synthetic construct
  misc_feature 1..20: note = chemically synthesized
  source 1..20: mol_type = other DNA
tgagaagctgactgtggcta

SEQ ID NO: 6723 - DNA, 20 bp, synthetic construct
  misc_feature 1..20: note = chemically synthesized
  source 1..20: mol_type = other DNA
gagaagctgactgtggctat

SEQ ID NO: 6724 - DNA, 20 bp, synthetic construct
  misc_feature 1..20: note = chemically synthesized
  source 1..20: mol_type = other DNA
gctgactgtggctataggtg

SEQ ID NO: 6725 - DNA, 20 bp, synthetic construct
  misc_feature 1..20: note = chemically synthesized
  source 1..20: mol_type = other DNA
gaagaaaaaaattataattt

SEQ ID NO: 6726 - DNA, 20 bp, synthetic construct
  misc_feature 1..20: note = chemically synthesized
  source 1..20: mol_type = other DNA
accatgatcatcatgataaa

SEQ ID NO: 6727 - DNA, 20 bp, synthetic construct
  misc_feature 1..20: note = chemically synthesized
  source 1..20: mol_type = other DNA
gataaaaagttaatatttac

SEQ ID NO: 6728 - DNA, 20 bp, synthetic construct
  misc_feature 1..20: note = chemically synthesized
  source 1..20: mol_type = other DNA
ataaaaagttaatatttact

SEQ ID NO: 6729 - DNA, 20 bp, synthetic construct
  misc_feature 1..20: note = chemically synthesized
  source 1..20: mol_type = other DNA
atatttactgggaacttatt

SEQ ID NO: 6730 - DNA, 20 bp, synthetic construct
  misc_feature 1..20: note = chemically synthesized
  source 1..20: mol_type = other DNA
atttggtttgtcatttttcg

SEQ ID NO: 6731 - DNA, 20 bp, synthetic construct
  misc_feature 1..20: note = chemically synthesized
  source 1..20: mol_type = other DNA
tttggtttgtcatttttcga

SEQ ID NO: 6732 - DNA, 20 bp, synthetic construct
  misc_feature 1..20: note = chemically synthesized
  source 1..20: mol_type = other DNA
tatgttaatttactcactat

SEQ ID NO: 6733 - DNA, 20 bp, synthetic construct
  misc_feature 1..20: note = chemically synthesized
  source 1..20: mol_type = other DNA
ctcactataagaaatttata

SEQ ID NO: 6734 - DNA, 20 bp, synthetic construct
  misc_feature 1..20: note = chemically synthesized
  source 1..20: mol_type = other DNA
actataagaaatttataaag

SEQ ID NO: 6735 - DNA, 20 bp, synthetic construct
  misc_feature 1..20: note = chemically synthesized
  source 1..20: mol_type = other DNA
ttataaagtagattccatta

SEQ ID NO: 6736 - DNA, 20 bp, synthetic construct
  misc_feature 1..20: note = chemically synthesized
  source 1..20: mol_type = other DNA
atagctcttaatttattatt

SEQ ID NO: 6737 - DNA, 20 bp, synthetic construct
  misc_feature 1..20: note = chemically synthesized
  source 1..20: mol_type = other DNA
tagctcttaatttattattg

SEQ ID NO: 6738 - DNA, 20 bp, synthetic construct
  misc_feature 1..20: note = chemically synthesized
  source 1..20: mol_type = other DNA
aatttattattgaggaatgt

SEQ ID NO: 6739 - DNA, 20 bp, synthetic construct
  misc_feature 1..20: note = chemically synthesized
  source 1..20: mol_type = other DNA
atttattattgaggaatgta

SEQ ID NO: 6740 - DNA, 20 bp, synthetic construct
  misc_feature 1..20: note = chemically synthesized
  source 1..20: mol_type = other DNA
ttattgaggaatgtaaggca

SEQ ID NO: 6741 - DNA, 20 bp, synthetic construct
  misc_feature 1..20: note = chemically synthesized
  source 1..20: mol_type = other DNA
attgaggaatgtaaggcata

SEQ ID NO: 6742 - DNA, 20 bp, synthetic construct
  misc_feature 1..20: note = chemically synthesized
  source 1..20: mol_type = other DNA
gaggaatgtaaggcatagag

SEQ ID NO: 6743 - DNA, 20 bp, synthetic construct
  misc_feature 1..20: note = chemically synthesized
  source 1..20: mol_type = other DNA
agtaacttatcctcaaaaca

SEQ ID NO: 6744 - DNA, 20 bp, synthetic construct
  misc_feature 1..20: note = chemically synthesized
  source 1..20: mol_type = other DNA
aaaacaaagctattaactta

SEQ ID NO: 6745 - DNA, 20 bp, synthetic construct
  misc_feature 1..20: note = chemically synthesized
  source 1..20: mol_type = other DNA
agctattaacttatggacct

SEQ ID NO: 6746 - DNA, 20 bp, synthetic construct
  misc_feature 1..20: note = chemically synthesized
  source 1..20: mol_type = other DNA
ctattaacttatggacctga

SEQ ID NO: 6747 - DNA, 20 bp, synthetic construct
  misc_feature 1..20: note = chemically synthesized
  source 1..20: mol_type = other DNA
ttaacttatggacctgagag

SEQ ID NO: 6748 - DNA, 20 bp, synthetic construct
  misc_feature 1..20: note = chemically synthesized
  source 1..20: mol_type = other DNA
aacttatggacctgagagta

SEQ ID NO: 6749 - DNA, 20 bp, synthetic construct
  misc_feature 1..20: note = chemically synthesized
  source 1..20: mol_type = other DNA
atggacctgagagtagagcc

SEQ ID NO: 6750 - DNA, 20 bp, synthetic construct
  misc_feature 1..20: note = chemically synthesized
  source 1..20: mol_type = other DNA
tggacctgagagtagagccc

SEQ ID NO: 6751 - DNA, 20 bp, synthetic construct
  misc_feature 1..20: note = chemically synthesized
  source 1..20: mol_type = other DNA
gagcccgggctgtctcatgc

SEQ ID NO: 6752 - DNA, 20 bp, synthetic construct
  misc_feature 1..20: note = chemically synthesized
  source 1..20: mol_type = other DNA
aacctattatcccatgttgc

SEQ ID NO: 6753 - DNA, 20 bp, synthetic construct
  misc_feature 1..20: note = chemically synthesized
  source 1..20: mol_type = other DNA
cccatgttgcaagacacaaa

SEQ ID NO: 6754 - DNA, 20 bp, synthetic construct
  misc_feature 1..20: note = chemically synthesized
  source 1..20: mol_type = other DNA
ccatgttgcaagacacaaat

SEQ ID NO: 6755 - DNA, 20 bp, synthetic construct
  misc_feature 1..20: note = chemically synthesized
  source 1..20: mol_type = other DNA
gcaagacacaaataggaaaa

SEQ ID NO: 6756 - DNA, 20 bp, synthetic construct
  misc_feature 1..20: note = chemically synthesized
  source 1..20: mol_type = other DNA
cacaaataggaaaatagaac

SEQ ID NO: 6757 - DNA, 20 bp, synthetic construct
  misc_feature 1..20: note = chemically synthesized
  source 1..20: mol_type = other DNA
aataggaaaatagaaccggt

SEQ ID NO: 6758 - DNA, 20 bp, synthetic construct
  misc_feature 1..20: note = chemically synthesized
  source 1..20: mol_type = other DNA
aggaaaatagaaccggttag

SEQ ID NO: 6759 - DNA, 20 bp, synthetic construct
  misc_feature 1..20: note = chemically synthesized
  source 1..20: mol_type = other DNA
gaaccggttagaagttattg

SEQ ID NO: 6760 - DNA, 20 bp, synthetic construct
  misc_feature 1..20: note = chemically synthesized
  source 1..20: mol_type = other DNA
aaccggttagaagttattga

SEQ ID NO: 6761 - DNA, 20 bp, synthetic construct
  misc_feature 1..20: note = chemically synthesized
  source 1..20: mol_type = other DNA
accggttagaagttattgaa

SEQ ID NO: 6762 - DNA, 20 bp, synthetic construct
  misc_feature 1..20: note = chemically synthesized
  source 1..20: mol_type = other DNA
tattgaagggcatgaaataa

SEQ ID NO: 6763 - DNA, 20 bp, synthetic construct
  misc_feature 1..20: note = chemically synthesized
  source 1..20: mol_type = other DNA
tgaagggcatgaaataatag

SEQ ID NO: 6764 - DNA, 20 bp, synthetic construct
  misc_feature 1..20: note = chemically synthesized
  source 1..20: mol_type = other DNA
ataatagtggtttgaaattt

SEQ ID NO: 6765 - DNA, 20 bp, synthetic construct
  misc_feature 1..20: note = chemically synthesized
  source 1..20: mol_type = other DNA
atagtggtttgaaatttgag

SEQ ID NO: 6766 - DNA, 20 bp, synthetic construct
  misc_feature 1..20: note = chemically synthesized
  source 1..20: mol_type = other DNA
agtggtttgaaatttgagta

SEQ ID NO: 6767 - DNA, 20 bp, synthetic construct
  misc_feature 1..20: note = chemically synthesized
  source 1..20: mol_type = other DNA
ggtttgaaatttgagtagag

SEQ ID NO: 6768 - DNA, 20 bp, synthetic construct
  misc_feature 1..20: note = chemically synthesized
  source 1..20: mol_type = other DNA
gtttgaaatttgagtagagt

SEQ ID NO: 6769 - DNA, 20 bp, synthetic construct
  misc_feature 1..20: note = chemically synthesized
  source 1..20: mol_type = other DNA
aatttgagtagagtaggacc

SEQ ID NO: 6770 - DNA, 20 bp, synthetic construct
  misc_feature 1..20: note = chemically synthesized
  source 1..20: mol_type = other DNA
gaccaagaaaatgcatattt

SEQ ID NO: 6771 - DNA, 20 bp, synthetic construct
  misc_feature 1..20: note = chemically synthesized
  source 1..20: mol_type = other DNA
accaagaaaatgcatatttc

SEQ ID NO: 6772 - DNA, 20 bp, synthetic construct
  misc_feature 1..20: note = chemically synthesized
  source 1..20: mol_type = other DNA
ccaagaaaatgcatatttca

SEQ ID NO: 6773 - DNA, 20 bp, synthetic construct
  misc_feature 1..20: note = chemically synthesized
  source 1..20: mol_type = other DNA
gcatatttcagggaatacct

SEQ ID NO: 6774 - DNA, 20 bp, synthetic construct
  misc_feature 1..20: note = chemically synthesized
  source 1..20: mol_type = other DNA
atatttcagggaatacctga

SEQ ID NO: 6775 - DNA, 20 bp, synthetic construct
  misc_feature 1..20: note = chemically synthesized
  source 1..20: mol_type = other DNA
tatttcagggaatacctgag

SEQ ID NO: 6776 - DNA, 20 bp, synthetic construct
  misc_feature 1..20: note = chemically synthesized
  source 1..20: mol_type = other DNA
gaggaaaaaaaaaaactatg

SEQ ID NO: 6777 - DNA, 20 bp, synthetic construct
  misc_feature 1..20: note = chemically synthesized
  source 1..20: mol_type = other DNA
aggaaaaaaaaaaactatga

SEQ ID NO: 6778 - DNA, 20 bp, synthetic construct
  misc_feature 1..20: note = chemically synthesized
  source 1..20: mol_type = other DNA
aaaaaaactatgaaggaacg

SEQ ID NO: 6779 - DNA, 20 bp, synthetic construct
  misc_feature 1..20: note = chemically synthesized
  source 1..20: mol_type = other DNA
ctatgaaggaacgcagtaat

SEQ ID NO: 6780 - DNA, 20 bp, synthetic construct
  misc_feature 1..20: note = chemically synthesized
  source 1..20: mol_type = other DNA
gaacgcagtaattagctcct

SEQ ID NO: 6781 - DNA, 20 bp, synthetic construct
  misc_feature 1..20: note = chemically synthesized
  source 1..20: mol_type = other DNA
gtaattagctccttagctga

SEQ ID NO: 6782 - DNA, 20 bp, synthetic construct
  misc_feature 1..20: note = chemically synthesized
  source 1..20: mol_type = other DNA
tagctgaaagaatgatcttc

SEQ ID NO: 6783 - DNA, 20 bp, synthetic construct
  misc_feature 1..20: note = chemically synthesized
  source 1..20: mol_type = other DNA
tgaaagaatgatcttctggt

SEQ ID NO: 6784 - DNA, 20 bp, synthetic construct
  misc_feature 1..20: note = chemically synthesized
  source 1..20: mol_type = other DNA
agaatgatcttctggtcagt

SEQ ID NO: 6785 - DNA, 20 bp, synthetic construct
  misc_feature 1..20: note = chemically synthesized
  source 1..20: mol_type = other DNA
atcttctggtcagtgagaac

SEQ ID NO: 6786 - DNA, 20 bp, synthetic construct
  misc_feature 1..20: note = chemically synthesized
  source 1..20: mol_type = other DNA
tgagaactggtttcaaatct

SEQ ID NO: 6787 - DNA, 20 bp, synthetic construct
  misc_feature 1..20: note = chemically synthesized
  source 1..20: mol_type = other DNA
atcttggttttgtcatttct

SEQ ID NO: 6788 - DNA, 20 bp, synthetic construct
  misc_feature 1..20: note = chemically synthesized
  source 1..20: mol_type = other DNA
tcttggttttgtcatttctt

SEQ ID NO: 6789 - DNA, 20 bp, synthetic construct
  misc_feature 1..20: note = chemically synthesized
  source 1..20: mol_type = other DNA
tttcttaggtatataatttt

SEQ ID NO: 6790 - DNA, 20 bp, synthetic construct
  misc_feature 1..20: note = chemically synthesized
  source 1..20: mol_type = other DNA
ataatttttagctcaacact

SEQ ID NO: 6791 - DNA, 20 bp, synthetic construct
  misc_feature 1..20: note = chemically synthesized
  source 1..20: mol_type = other DNA
acaatttttaaaaatattgt

SEQ ID NO: 6792 - DNA, 20 bp, synthetic construct
  misc_feature 1..20: note = chemically synthesized
  source 1..20: mol_type = other DNA
atgatgataatatataaaaa

SEQ ID NO: 6793 - DNA, 20 bp, synthetic construct
  misc_feature 1..20: note = chemically synthesized
  source 1..20: mol_type = other DNA
gctcattatctgccactcaa

SEQ ID NO: 6794 - DNA, 20 bp, synthetic construct
  misc_feature 1..20: note = chemically synthesized
  source 1..20: mol_type = other DNA
atctgccactcaaaagctat

SEQ ID NO: 6795 - DNA, 20 bp, synthetic construct
  misc_feature 1..20: note = chemically synthesized
  source 1..20: mol_type = other DNA
agtatttatgataataattc

SEQ ID NO: 6796 - DNA, 20 bp, synthetic construct
  misc_feature 1..20: note = chemically synthesized
  source 1..20: mol_type = other DNA
atgataataattctagttgt

SEQ ID NO: 6797 - DNA, 20 bp, synthetic construct
  misc_feature 1..20: note = chemically synthesized
  source 1..20: mol_type = other DNA
attgattattaaatatatat

SEQ ID NO: 6798 - DNA, 20 bp, synthetic construct
  misc_feature 1..20: note = chemically synthesized
  source 1..20: mol_type = other DNA
ttgattattaaatatatata

SEQ ID NO: 6799 - DNA, 20 bp, synthetic construct
  misc_feature 1..20: note = chemically synthesized
  source 1..20: mol_type = other DNA
tgattattaaatatatataa

SEQ ID NO: 6800 - DNA, 20 bp, synthetic construct
  misc_feature 1..20: note = chemically synthesized
  source 1..20: mol_type = other DNA
tattaaatatatataaggga

SEQ ID NO: 6801 - DNA, 20 bp, synthetic construct
  misc_feature 1..20: note = chemically synthesized
  source 1..20: mol_type = other DNA
taaatatatataagggatag

SEQ ID NO: 6802 - DNA, 20 bp, synthetic construct
  misc_feature 1..20: note = chemically synthesized
  source 1..20: mol_type = other DNA
aatatatataagggatagaa

SEQ ID NO: 6803 - DNA, 20 bp, synthetic construct
  misc_feature 1..20: note = chemically synthesized
  source 1..20: mol_type = other DNA
tatatataagggatagaaga

SEQ ID NO: 6804 - DNA, 20 bp, synthetic construct
  misc_feature 1..20: note = chemically synthesized
  source 1..20: mol_type = other DNA
atataagggatagaagagag

SEQ ID NO: 6805 - DNA, 20 bp, synthetic construct
  misc_feature 1..20: note = chemically synthesized
  source 1..20: mol_type = other DNA
ataagggatagaagagagtg

SEQ ID NO: 6806 - DNA, 20 bp, synthetic construct
  misc_feature 1..20: note = chemically synthesized
  source 1..20: mol_type = other DNA
aagggatagaagagagtgga

SEQ ID NO: 6807 - DNA, 20 bp, synthetic construct
  misc_feature 1..20: note = chemically synthesized
  source 1..20: mol_type = other DNA
atagaagagagtggagagta

SEQ ID NO: 6808 - DNA, 20 bp, synthetic construct
  misc_feature 1..20: note = chemically synthesized
  source 1..20: mol_type = other DNA
tagaagagagtggagagtaa

SEQ ID NO: 6809 - DNA, 20 bp, synthetic construct
  misc_feature 1..20: note = chemically synthesized
  source 1..20: mol_type = other DNA
tgattgacaaaattttgtct

SEQ ID NO: 6810 - DNA, 20 bp, synthetic construct
  misc_feature 1..20: note = chemically synthesized
  source 1..20: mol_type = other DNA
aaattttgtcttggaaatct

SEQ ID NO: 6811 - DNA, 20 bp, synthetic construct
  misc_feature 1..20: note = chemically synthesized
  source 1..20: mol_type = other DNA
atctgagtgaaccattcatc

SEQ ID NO: 6812 - DNA, 20 bp, synthetic construct
  misc_feature 1..20: note = chemically synthesized
  source 1..20: mol_type = other DNA
agtgaaccattcatcaagtt

SEQ ID NO: 6813 - DNA, 20 bp, synthetic construct
  misc_feature 1..20: note = chemically synthesized
  source 1..20: mol_type = other DNA
gaaccattcatcaagtttgg

SEQ ID NO: 6814 - DNA, 20 bp, synthetic construct
  misc_feature 1..20: note = chemically synthesized
  source 1..20: mol_type = other DNA
ttcatcaagtttggaagcat

SEQ ID NO: 6815 - DNA, 20 bp, synthetic construct
  misc_feature 1..20: note = chemically synthesized
  source 1..20: mol_type = other DNA
catcaagtttggaagcatta

SEQ ID NO: 6816 - DNA, 20 bp, synthetic construct
  misc_feature 1..20: note = chemically synthesized
  source 1..20: mol_type = other DNA
atcaagtttggaagcattag

SEQ ID NO: 6817 - DNA, 20 bp, synthetic construct
  misc_feature 1..20: note = chemically synthesized
  source 1..20: mol_type = other DNA
gaagcattagaggaaactga

SEQ ID NO: 6818 - DNA, 20 bp, synthetic construct
  misc_feature 1..20: note = chemically synthesized
  source 1..20: mol_type = other DNA
gcattagaggaaactgaaag

SEQ ID NO: 6819 - DNA, 20 bp, synthetic construct
  misc_feature 1..20: note = chemically synthesized
  source 1..20: mol_type = other DNA
ttagaggaaactgaaagaag

SEQ ID NO: 6820 - DNA, 20 bp, synthetic construct
  misc_feature 1..20: note = chemically synthesized
  source 1..20: mol_type = other DNA
agaggaaactgaaagaagtg

SEQ ID NO: 6821 - DNA, 20 bp, synthetic construct
  misc_feature 1..20: note = chemically synthesized
  source 1..20: mol_type = other DNA
gaggaaactgaaagaagtgg

SEQ ID NO: 6822 - DNA, 20 bp, synthetic construct
  misc_feature 1..20: note = chemically synthesized
  source 1..20: mol_type = other DNA
tactatcttttcaactcgct

SEQ ID NO: 6823 - DNA, 20 bp, synthetic construct
  misc_feature 1..20: note = chemically synthesized
  source 1..20: mol_type = other DNA
cttttcaactcgctgagttt

SEQ ID NO: 6824 - DNA, 20 bp, synthetic construct
  misc_feature 1..20: note = chemically synthesized
  source 1..20: mol_type = other DNA
tttcaactcgctgagtttaa

SEQ ID NO: 6825 - DNA, 20 bp, synthetic construct
  misc_feature 1..20: note = chemically synthesized
  source 1..20: mol_type = other DNA
ttcaactcgctgagtttaag

SEQ ID NO: 6826 - DNA, 20 bp, synthetic construct
  misc_feature 1..20: note = chemically synthesized
  source 1..20: mol_type = other DNA
cgctgagtttaagaggtcca

SEQ ID NO: 6827 - DNA, 20 bp, synthetic construct
  misc_feature 1..20: note = chemically synthesized
  source 1..20: mol_type = other DNA
gctgagtttaagaggtccat

SEQ ID NO: 6828 - DNA, 20 bp, synthetic construct
  misc_feature 1..20: note = chemically synthesized
  source 1..20: mol_type = other DNA
aagaggtccataggtcatat

SEQ ID NO: 6829 - DNA, 20 bp, synthetic construct
  misc_feature 1..20: note = chemically synthesized
  source 1..20: mol_type = other DNA
aggtccataggtcatataag

SEQ ID NO: 6830 - DNA, 20 bp, synthetic construct
  misc_feature 1..20: note = chemically synthesized
  source 1..20: mol_type = other DNA
gtccataggtcatataagtg

SEQ ID NO: 6831 - DNA, 20 bp, synthetic construct
  misc_feature 1..20: note = chemically synthesized
  source 1..20: mol_type = other DNA
tccataggtcatataagtgg

SEQ ID NO: 6832 - DNA, 20 bp, synthetic construct
  misc_feature 1..20: note = chemically synthesized
  source 1..20: mol_type = other DNA
tataagtggaggtgacctgt

SEQ ID NO: 6833 - DNA, 20 bp, synthetic construct
  misc_feature 1..20: note = chemically synthesized
  source 1..20: mol_type = other DNA
aaatgttaatgtatccctaa

SEQ ID NO: 6834 - DNA, 20 bp, synthetic construct
  misc_feature 1..20: note = chemically synthesized
  source 1..20: mol_type = other DNA
atgttaatgtatccctaaca

SEQ ID NO: 6835 - DNA, 20 bp, synthetic construct
  misc_feature 1..20: note = chemically synthesized
  source 1..20: mol_type = other DNA
gttaatgtatccctaacaga

SEQ ID NO: 6836 - DNA, 20 bp, synthetic construct
  misc_feature 1..20: note = chemically synthesized
  source 1..20: mol_type = other DNA
atccctaacagagagcaatg

SEQ ID NO: 6837 - DNA, 20 bp, synthetic construct
  misc_feature 1..20: note = chemically synthesized
  source 1..20: mol_type = other DNA
gagagcaatgaagttctttt

SEQ ID NO: 6838 - DNA, 20 bp, synthetic construct
  misc_feature 1..20: note = chemically synthesized
  source 1..20: mol_type = other DNA
agcaatgaagttctttttag

SEQ ID NO: 6839 - DNA, 20 bp, synthetic construct
  misc_feature 1..20: note = chemically synthesized
  source 1..20: mol_type = other DNA
caatgaagttctttttagtg

SEQ ID NO: 6840 - DNA, 20 bp, synthetic construct
  misc_feature 1..20: note = chemically synthesized
  source 1..20: mol_type = other DNA
ggagtttctctttcttgaca

SEQ ID NO: 6841 - DNA, 20 bp, synthetic construct
  misc_feature 1..20: note = chemically synthesized
  source 1..20: mol_type = other DNA
tttcttgacatagtaccatg

SEQ ID NO: 6842 - DNA, 20 bp, synthetic construct
  misc_feature 1..20: note = chemically synthesized
  source 1..20: mol_type = other DNA
tgacatagtaccatgtagtg

SEQ ID NO: 6843 - DNA, 20 bp, synthetic construct
  misc_feature 1..20: note = chemically synthesized
  source 1..20: mol_type = other DNA
agtgaagacactgctgactt

SEQ ID NO: 6844 - DNA, 20 bp, synthetic construct
  misc_feature 1..20: note = chemically synthesized
  source 1..20: mol_type = other DNA
actgctgactttggaattga

SEQ ID NO: 6845 - DNA, 20 bp, synthetic construct
  misc_feature 1..20: note = chemically synthesized
  source 1..20: mol_type = other DNA
ctttggaattgaaagaatct

SEQ ID NO: 6846 - DNA, 20 bp, synthetic construct
  misc_feature 1..20: note = chemically synthesized
  source 1..20: mol_type = other DNA
gaattgaaagaatcttagct

SEQ ID NO: 6847 - DNA, 20 bp, synthetic construct
  misc_feature 1..20: note = chemically synthesized
  source 1..20: mol_type = other DNA
atcttagctcagctacttac

SEQ ID NO: 6848 - DNA, 20 bp, synthetic construct
  misc_feature 1..20: note = chemically synthesized
  source 1..20: mol_type = other DNA
agctcagctacttactagct

SEQ ID NO: 6849 - DNA, 20 bp, synthetic construct
  misc_feature 1..20: note = chemically synthesized
  source 1..20: mol_type = other DNA
tcagctacttactagctgag

SEQ ID NO: 6850 - DNA, 20 bp, synthetic construct
  misc_feature 1..20: note = chemically synthesized
  source 1..20: mol_type = other DNA
aacaccttaatgcccatccc

SEQ ID NO: 6851 - DNA, 20 bp, synthetic construct
  misc_feature 1..20: note = chemically synthesized
  source 1..20: mol_type = other DNA
ccttaatgcccatcccaaga

SEQ ID NO: 6852 - DNA, 20 bp, synthetic construct
  misc_feature 1..20: note = chemically synthesized
  source 1..20: mol_type = other DNA
tcccaagacagtgtgtgtaa

SEQ ID NO: 6853 - DNA, 20 bp, synthetic construct
  misc_feature 1..20: note = chemically synthesized
  source 1..20: mol_type = other DNA
aaagacgaataacaacatct

SEQ ID NO: 6854 - DNA, 20 bp, synthetic construct
  misc_feature 1..20: note = chemically synthesized
  source 1..20: mol_type = other DNA
aagacgaataacaacatctc

SEQ ID NO: 6855 - DNA, 20 bp, synthetic construct
  misc_feature 1..20: note = chemically synthesized
  source 1..20: mol_type = other DNA
acgaataacaacatctcagg

SEQ ID NO: 6856 - DNA, 20 bp, synthetic construct
  misc_feature 1..20: note = chemically synthesized
  source 1..20: mol_type = other DNA
taacaacatctcaggaagca

SEQ ID NO: 6857 - DNA, 20 bp, synthetic construct
  misc_feature 1..20: note = chemically synthesized
  source 1..20: mol_type = other DNA
aacaacatctcaggaagcac

SEQ ID NO: 6858 - DNA, 20 bp, synthetic construct
  misc_feature 1..20: note = chemically synthesized
  source 1..20: mol_type = other DNA
tcaggaagcacaggatgtac

SEQ ID NO: 6859 - DNA, 20 bp, synthetic construct
  misc_feature 1..20: note = chemically synthesized
  source 1..20: mol_type = other DNA
aggaagcacaggatgtacca

SEQ ID NO: 6860 - DNA, 20 bp, synthetic construct
  misc_feature 1..20: note = chemically synthesized
  source 1..20: mol_type = other DNA
gaagcacaggatgtaccaga

SEQ ID NO: 6861 - DNA, 20 bp, synthetic construct
  misc_feature 1..20: note = chemically synthesized
  source 1..20: mol_type = other DNA
atcttttcatgttgctttcc

SEQ ID NO: 6862 - DNA, 20 bp, synthetic construct
  misc_feature 1..20: note = chemically synthesized
  source 1..20: mol_type = other DNA
tcttttcatgttgctttcct

SEQ ID NO: 6863 - DNA, 20 bp, synthetic construct
  misc_feature 1..20: note = chemically synthesized
  source 1..20: mol_type = other DNA
ggctttttatttccctcctc

SEQ ID NO: 6864 - DNA, 20 bp, synthetic construct
  misc_feature 1..20: note = chemically synthesized
  source 1..20: mol_type = other DNA
gctttttatttccctcctct

SEQ ID NO: 6865 - DNA, 20 bp, synthetic construct
  misc_feature 1..20: note = chemically synthesized
  source 1..20: mol_type = other DNA
attatttcttccctcttctt

SEQ ID NO: 6866 - DNA, 20 bp, synthetic construct
  misc_feature 1..20: note = chemically synthesized
  source 1..20: mol_type = other DNA
ttatttcttccctcttcttc

SEQ ID NO: 6867 - DNA, 20 bp, synthetic construct
  misc_feature 1..20: note = chemically synthesized
  source 1..20: mol_type = other DNA
tttcttccctcttcttcagg

SEQ ID NO: 6868 - DNA, 20 bp, synthetic construct
  misc_feature 1..20: note = chemically synthesized
  source 1..20: mol_type = other DNA
tccctcttcttcaggaagtt

SEQ ID NO: 6869 - DNA, 20 bp, synthetic construct
  misc_feature 1..20: note = chemically synthesized
  source 1..20: mol_type = other DNA
tcttcttcaggaagttaaga

SEQ ID NO: 6870 - DNA, 20 bp, synthetic construct
  misc_feature 1..20: note = chemically synthesized
  source 1..20: mol_type = other DNA
ggaagttaagacagtctacc

SEQ ID NO: 6871 - DNA, 20 bp, synthetic construct
  misc_feature 1..20: note = chemically synthesized
  source 1..20: mol_type = other DNA
taagacagtctacctagatt

SEQ ID NO: 6872 - DNA, 20 bp, synthetic construct
  misc_feature 1..20: note = chemically synthesized
  source 1..20: mol_type = other DNA
gacagtctacctagatttag

SEQ ID NO: 6873 - DNA, 20 bp, synthetic construct
  misc_feature 1..20: note = chemically synthesized
  source 1..20: mol_type = other DNA
tttagaagcaaatgtttata

SEQ ID NO: 6874 - DNA, 20 bp, synthetic construct
  misc_feature 1..20: note = chemically synthesized
  source 1..20: mol_type = other DNA
agaagcaaatgtttatatag

SEQ ID NO: 6875 - DNA, 20 bp, synthetic construct
  misc_feature 1..20: note = chemically synthesized
  source 1..20: mol_type = other DNA
ttatatagtggtgaaattta

SEQ ID NO: 6876 - DNA, 20 bp, synthetic construct
  misc_feature 1..20: note = chemically synthesized
  source 1..20: mol_type = other DNA
atttaaagcctaattgacta

SEQ ID NO: 6877 - DNA, 20 bp, synthetic construct
  misc_feature 1..20: note = chemically synthesized
  source 1..20: mol_type = other DNA
ctaattgactaaagccattt

SEQ ID NO: 6878 - DNA, 20 bp, synthetic construct
  misc_feature 1..20: note = chemically synthesized
  source 1..20: mol_type = other DNA
catttaagaatgtaatatct

SEQ ID NO: 6879 - DNA, 20 bp, synthetic construct
  misc_feature 1..20: note = chemically synthesized
  source 1..20: mol_type = other DNA
taagaatgtaatatctcagt

SEQ ID NO: 6880 - DNA, 20 bp, synthetic construct
  misc_feature 1..20: note = chemically synthesized
  source 1..20: mol_type = other DNA
tatgcacttcttgaaatgca

SEQ ID NO: 6881 - DNA, 20 bp, synthetic construct
  misc_feature 1..20: note = chemically synthesized
  source 1..20: mol_type = other DNA
cttcttgaaatgcaaagaaa

SEQ ID NO: 6882 - DNA, 20 bp, synthetic construct
  misc_feature 1..20: note = chemically synthesized
  source 1..20: mol_type = other DNA
tctgacttttttccattgtt

SEQ ID NO: 6883 - DNA, 20 bp, synthetic construct
  misc_feature 1..20: note = chemically synthesized
  source 1..20: mol_type = other DNA
cattgtttagtttctaaatt

SEQ ID NO: 6884 - DNA, 20 bp, synthetic construct
  misc_feature 1..20: note = chemically synthesized
  source 1..20: mol_type = other DNA
agtttttattttaatatttt

SEQ ID NO: 6885 - DNA, 20 bp, synthetic construct
  misc_feature 1..20: note = chemically synthesized
  source 1..20: mol_type = other DNA
ttattttaatattttaagta

SEQ ID NO: 6886 - DNA, 20 bp, synthetic construct
  misc_feature 1..20: note = chemically synthesized
  source 1..20: mol_type = other DNA
agtacagcatgcatatataa

SEQ ID NO: 6887 - DNA, 20 bp, synthetic construct
  misc_feature 1..20: note = chemically synthesized
  source 1..20: mol_type = other DNA
gtacacaaattatacatgca

SEQ ID NO: 6888 - DNA, 20 bp, synthetic construct
  misc_feature 1..20: note = chemically synthesized
  source 1..20: mol_type = other DNA
tgcacagctgaattaacttt

SEQ ID NO: 6889 - DNA, 20 bp, synthetic construct
  misc_feature 1..20: note = chemically synthesized
  source 1..20: mol_type = other DNA
acagctgaattaacttttgg

SEQ ID NO: 6890 - DNA, 20 bp, synthetic construct
  misc_feature 1..20: note = chemically synthesized
  source 1..20: mol_type = other DNA
cagctgaattaacttttgga

SEQ ID NO: 6891 - DNA, 20 bp, synthetic construct
  misc_feature 1..20: note = chemically synthesized
  source 1..20: mol_type = other DNA
acacccatgtaacaactaat

SEQ ID NO: 6892 - DNA, 20 bp, synthetic construct
  misc_feature 1..20: note = chemically synthesized
  source 1..20: mol_type = other DNA
ccatgtaacaactaataaga

SEQ ID NO: 6893 - DNA, 20 bp, synthetic construct
  misc_feature 1..20: note = chemically synthesized
  source 1..20: mol_type = other DNA
catgtaacaactaataagat

SEQ ID NO: 6894 - DNA, 20 bp, synthetic construct
  misc_feature 1..20: note = chemically synthesized
  source 1..20: mol_type = other DNA
actaataagataggaaatta

SEQ ID NO: 6895 - DNA, 20 bp, synthetic construct
  misc_feature 1..20: note = chemically synthesized
  source 1..20: mol_type = other DNA
taataagataggaaattaaa

SEQ ID NO: 6896 - DNA, 20 bp, synthetic construct
  misc_feature 1..20: note = chemically synthesized
  source 1..20: mol_type = other DNA
cattccactaattgtctcca

SEQ ID NO: 6897 - DNA, 20 bp, synthetic construct
  misc_feature 1..20: note = chemically synthesized
  source 1..20: mol_type = other DNA
actcatgtccctttttttaa

SEQ ID NO: 6898 - DNA, 20 bp, synthetic construct
  misc_feature 1..20: note = chemically synthesized
  source 1..20: mol_type = other DNA
tttgtgaattgcattcatac

SEQ ID NO: 6899 - DNA, 20 bp, synthetic construct
  misc_feature 1..20: note = chemically synthesized
  source 1..20: mol_type = other DNA
ttcatactagtgtatgactg

SEQ ID NO: 6900 - DNA, 20 bp, synthetic construct
  misc_feature 1..20: note = chemically synthesized
  source 1..20: mol_type = other DNA
caatatatttattgactcca

SEQ ID NO: 6901 - DNA, 20 bp, synthetic construct
  misc_feature 1..20: note = chemically synthesized
  source 1..20: mol_type = other DNA
tttattgactccacagttga

SEQ ID NO: 6902 - DNA, 20 bp, synthetic construct
  misc_feature 1..20: note = chemically synthesized
  source 1..20: mol_type = other DNA
tccacagttgatagatattt

SEQ ID NO: 6903 - DNA, 20 bp, synthetic construct
  misc_feature 1..20: note = chemically synthesized
  source 1..20: mol_type = other DNA
atagatatttgagtaccttc

SEQ ID NO: 6904 - DNA, 20 bp, synthetic construct
  misc_feature 1..20: note = chemically synthesized
  source 1..20: mol_type = other DNA
tttgagtaccttctagcttt

SEQ ID NO: 6905 - DNA, 20 bp, synthetic construct
  misc_feature 1..20: note = chemically synthesized
  source 1..20: mol_type = other DNA
taatataaattgctgctatg

SEQ ID NO: 6906 - DNA, 20 bp, synthetic construct
  misc_feature 1..20: note = chemically synthesized
  source 1..20: mol_type = other DNA
atatatattctgtaaattgc

SEQ ID NO: 6907 - DNA, 20 bp, synthetic construct
  misc_feature 1..20: note = chemically synthesized
  source 1..20: mol_type = other DNA
tatatattctgtaaattgct

SEQ ID NO: 6908 - DNA, 20 bp, synthetic construct
  misc_feature 1..20: note = chemically synthesized
  source 1..20: mol_type = other DNA
cactataatttaatgtcatt

SEQ ID NO: 6909 - DNA, 20 bp, synthetic construct
  misc_feature 1..20: note = chemically synthesized
  source 1..20: mol_type = other DNA
ttggtcaacctataatatca

SEQ ID NO: 6910 - DNA, 20 bp, synthetic construct
  misc_feature 1..20: note = chemically synthesized
  source 1..20: mol_type = other DNA
atcatagatgttttctctta

SEQ ID NO: 6911 - DNA, 20 bp, synthetic construct
  misc_feature 1..20: note = chemically synthesized
  source 1..20: mol_type = other DNA
atagatgttttctcttatag

SEQ ID NO: 6912 - DNA, 20 bp, synthetic construct
  misc_feature 1..20: note = chemically synthesized
  source 1..20: mol_type = other DNA
tatagcagcctgcatgtgcc

SEQ ID NO: 6913 - DNA, 20 bp, synthetic construct
  misc_feature 1..20: note = chemically synthesized
  source 1..20: mol_type = other DNA
atcctttgtatatttacatt

SEQ ID NO: 6914 - DNA, 20 bp, synthetic construct
  misc_feature 1..20: note = chemically synthesized
  source 1..20: mol_type = other DNA
tagttctgtattattacaat

SEQ ID NO: 6915 - DNA, 20 bp, synthetic construct
  misc_feature 1..20: note = chemically synthesized
  source 1..20: mol_type = other DNA
gtattattacaattagttcg

SEQ ID NO: 6916 - DNA, 20 bp, synthetic construct
  misc_feature 1..20: note = chemically synthesized
  source 1..20: mol_type = other DNA
gttattattattctcatttg

SEQ ID NO: 6917 - DNA, 20 bp, synthetic construct
  misc_feature 1..20: note = chemically synthesized
  source 1..20: mol_type = other DNA
attattctcatttgtagttg

SEQ ID NO: 6918 - DNA, 20 bp, synthetic construct
  misc_feature 1..20: note = chemically synthesized
  source 1..20: mol_type = other DNA
tagttgaagaaattgcactc

SEQ ID NO: 6919 - DNA, 20 bp, synthetic construct
  misc_feature 1..20: note = chemically synthesized
  source 1..20: mol_type = other DNA
tgaagaaattgcactccagc

SEQ ID NO: 6920 - DNA, 20 bp, synthetic construct
  misc_feature 1..20: note = chemically synthesized
  source 1..20: mol_type = other DNA
cagcaagtttaaattgctcc

SEQ ID NO: 6921 - DNA, 20 bp, synthetic construct
  misc_feature 1..20: note = chemically synthesized
  source 1..20: mol_type = other DNA
aattgctcctggctacatcc

SEQ ID NO: 6922 - DNA, 20 bp, synthetic construct
  misc_feature 1..20: note = chemically synthesized
  source 1..20: mol_type = other DNA
actttttgcccctacttgac

SEQ ID NO: 6923 - DNA, 20 bp, synthetic construct
  misc_feature 1..20: note = chemically synthesized
  source 1..20: mol_type = other DNA
ctttttgcccctacttgact

SEQ ID NO: 6924 - DNA, 20 bp, synthetic construct
  misc_feature 1..20: note = chemically synthesized
  source 1..20: mol_type = other DNA
acttgactaggaattgtata

SEQ ID NO: 6925 - DNA, 20 bp, synthetic construct
  misc_feature 1..20: note = chemically synthesized
  source 1..20: mol_type = other DNA
ttgactaggaattgtataaa

SEQ ID NO: 6926 - DNA, 20 bp, synthetic construct
  misc_feature 1..20: note = chemically synthesized
  source 1..20: mol_type = other DNA
taggaattgtataaagagaa

SEQ ID NO: 6927 - DNA, 20 bp, synthetic construct
  misc_feature 1..20: note = chemically synthesized
  source 1..20: mol_type = other DNA
aaagagaacagttattcttc

SEQ ID NO: 6928 - DNA, 20 bp, synthetic construct
  misc_feature 1..20: note = chemically synthesized
  source 1..20: mol_type = other DNA
gagaacagttattcttctag

SEQ ID NO: 6929 - DNA, 20 bp, synthetic construct
  misc_feature 1..20: note = chemically synthesized
  source 1..20: mol_type = other DNA
agaacagttattcttctagt

SEQ ID NO: 6930 - DNA, 20 bp, synthetic construct
  misc_feature 1..20: note = chemically synthesized
  source 1..20: mol_type = other DNA
acagttattcttctagtggg

SEQ ID NO: 6931 - DNA, 20 bp, synthetic construct
  misc_feature 1..20: note = chemically synthesized
  source 1..20: mol_type = other DNA
ttattcttctagtgggaagc

SEQ ID NO: 6932 - DNA, 20 bp, synthetic construct
  misc_feature 1..20: note = chemically synthesized
  source 1..20: mol_type = other DNA
tcttctagtgggaagcaagc

SEQ ID NO: 6933 - DNA, 20 bp, synthetic construct
  misc_feature 1..20: note = chemically synthesized
  source 1..20: mol_type = other DNA
ggaagcaagctggcctcaac

SEQ ID NO: 6934 - DNA, 20 bp, synthetic construct
  misc_feature 1..20: note = chemically synthesized
  source 1..20: mol_type = other DNA
caagctggcctcaactggaa

SEQ ID NO: 6935 - DNA, 20 bp, synthetic construct
  misc_feature 1..20: note = chemically synthesized
  source 1..20: mol_type = other DNA
ggcctcaactggaacagaat

SEQ ID NO: 6936 - DNA, 20 bp, synthetic construct
  misc_feature 1..20: note = chemically synthesized
  source 1..20: mol_type = other DNA
cctcaactggaacagaatga

SEQ ID NO: 6937 - DNA, 20 bp, synthetic construct
  misc_feature 1..20: note = chemically synthesized
  source 1..20: mol_type = other DNA
gaacagaatgagagaaatgc

SEQ ID NO: 6938 - DNA, 20 bp, synthetic construct
  misc_feature 1..20: note = chemically synthesized
  source 1..20: mol_type = other DNA
caagacatctaataatccaa

SEQ ID NO: 6939 - DNA, 20 bp, synthetic construct
  misc_feature 1..20: note = chemically synthesized
  source 1..20: mol_type = other DNA
gtactttttccttttcccca

SEQ ID NO: 6940 - DNA, 20 bp, synthetic construct
  misc_feature 1..20: note = chemically synthesized
  source 1..20: mol_type = other DNA
actttttccttttccccatg

SEQ ID NO: 6941 - DNA, 20 bp, synthetic construct
  misc_feature 1..20: note = chemically synthesized
  source 1..20: mol_type = other DNA
ttccttttccccatggagtc

SEQ ID NO: 6942 - DNA, 20 bp, synthetic construct
  misc_feature 1..20: note = chemically synthesized
  source 1..20: mol_type = other DNA
tccttttccccatggagtca

SEQ ID NO: 6943 - DNA, 20 bp, synthetic construct
  misc_feature 1..20: note = chemically synthesized
  source 1..20: mol_type = other DNA
aggctatctaaacttccttt

SEQ ID NO: 6944 - DNA, 20 bp, synthetic construct
  misc_feature 1..20: note = chemically synthesized
  source 1..20: mol_type = other DNA
taaacttcctttaagtgcac

SEQ ID NO: 6945 - DNA, 20 bp, synthetic construct
  misc_feature 1..20: note = chemically synthesized
  source 1..20: mol_type = other DNA
tttaagtgcacaagctaata

SEQ ID NO: 6946 - DNA, 20 bp, synthetic construct
  misc_feature 1..20: note = chemically synthesized
  source 1..20: mol_type = other DNA
aagtgcacaagctaatatgg

SEQ ID NO: 6947 - DNA, 20 bp, synthetic construct
  misc_feature 1..20: note = chemically synthesized
  source 1..20: mol_type = other DNA
agtgcacaagctaatatggt

SEQ ID NO: 6948 - DNA, 20 bp, synthetic construct
  misc_feature 1..20: note = chemically synthesized
  source 1..20: mol_type = other DNA
gtgcacaagctaatatggta

SEQ ID NO: 6949 - DNA, 20 bp, synthetic construct
  misc_feature 1..20: note = chemically synthesized
  source 1..20: mol_type = other DNA
taatatggtagggaaatata

SEQ ID NO: 6950 - DNA, 20 bp, synthetic construct
  misc_feature 1..20: note = chemically synthesized
  source 1..20: mol_type = other DNA
taaagcctaatcctgccatc

SEQ ID NO: 6951 - DNA, 20 bp, synthetic construct
  misc_feature 1..20: note = chemically synthesized
  source 1..20: mol_type = other DNA
ctaatcctgccatccagaat

SEQ ID NO: 6952 - DNA, 20 bp, synthetic construct
  misc_feature 1..20: note = chemically synthesized
  source 1..20: mol_type = other DNA
tcctgccatccagaatgagc

SEQ ID NO: 6953 - DNA, 20 bp, synthetic construct
  misc_feature 1..20: note = chemically synthesized
  source 1..20: mol_type = other DNA
tgccatccagaatgagcaag

SEQ ID NO: 6954 - DNA, 20 bp, synthetic construct
  misc_feature 1..20: note = chemically synthesized
  source 1..20: mol_type = other DNA
atccagaatgagcaagtgga

SEQ ID NO: 6955 - DNA, 20 bp, synthetic construct
  misc_feature 1..20: note = chemically synthesized
  source 1..20: mol_type = other DNA
tccagaatgagcaagtggat

SEQ ID NO: 6956 - DNA, 20 bp, synthetic construct
  misc_feature 1..20: note = chemically synthesized
  source 1..20: mol_type = other DNA
ccagaatgagcaagtggatg

SEQ ID NO: 6957 - DNA, 20 bp, synthetic construct
  misc_feature 1..20: note = chemically synthesized
  source 1..20: mol_type = other DNA
atgagcaagtggatggggaa

SEQ ID NO: 6958 - DNA, 20 bp, synthetic construct
  misc_feature 1..20: note = chemically synthesized
  source 1..20: mol_type = other DNA
tgagcaagtggatggggaaa

SEQ ID NO: 6959 - DNA, 20 bp, synthetic construct
  misc_feature 1..20: note = chemically synthesized
  source 1..20: mol_type = other DNA
gagcaagtggatggggaaaa

SEQ ID NO: 6960 - DNA, 20 bp, synthetic construct
  misc_feature 1..20: note = chemically synthesized
  source 1..20: mol_type = other DNA
caagtggatggggaaaaggg

SEQ ID NO: 6961 - DNA, 20 bp, synthetic construct
  misc_feature 1..20: note = chemically synthesized
  source 1..20: mol_type = other DNA
aagtggatggggaaaaggga

SEQ ID NO: 6962 - DNA, 20 bp, synthetic construct
  misc_feature 1..20: note = chemically synthesized
  source 1..20: mol_type = other DNA
agtggatggggaaaagggaa

SEQ ID NO: 6963 - DNA, 20 bp, synthetic construct
  misc_feature 1..20: note = chemically synthesized
  source 1..20: mol_type = other DNA
tggggaaaagggaagggaaa

SEQ ID NO: 6964 - DNA, 20 bp, synthetic construct
  misc_feature 1..20: note = chemically synthesized
  source 1..20: mol_type = other DNA
ggggaaaagggaagggaaaa

SEQ ID NO: 6965 - DNA, 20 bp, synthetic construct
  misc_feature 1..20: note = chemically synthesized
  source 1..20: mol_type = other DNA
ggaaaagggaagggaaaaag

SEQ ID NO: 6966 - DNA, 20 bp, synthetic construct
  misc_feature 1..20: note = chemically synthesized
  source 1..20: mol_type = other DNA
aaagggaagggaaaaaggag

SEQ ID NO: 6967 - DNA, 20 bp, synthetic construct
  misc_feature 1..20: note = chemically synthesized
  source 1..20: mol_type = other DNA
aaaaaggagcagaatctgcc

SEQ ID NO: 6968 - DNA, 20 bp, synthetic construct
  misc_feature 1..20: note = chemically synthesized
  source 1..20: mol_type = other DNA
tgtttctcccacttgctctg

SEQ ID NO: 6969 - DNA, 20 bp, synthetic construct
  misc_feature 1..20: note = chemically synthesized
  source 1..20: mol_type = other DNA
gtttctcccacttgctctgc

SEQ ID NO: 6970 - DNA, 20 bp, synthetic construct
  misc_feature 1..20: note = chemically synthesized
  source 1..20: mol_type = other DNA
ctcccacttgctctgcagga

SEQ ID NO: 6971 - DNA, 20 bp, synthetic construct
  misc_feature 1..20: note = chemically synthesized
  source 1..20: mol_type = other DNA
acttgctctgcaggatggct

SEQ ID NO: 6972 - DNA, 20 bp, synthetic construct
  misc_feature 1..20: note = chemically synthesized
  source 1..20: mol_type = other DNA
tgctctgcaggatggcttag

SEQ ID NO: 6973 - DNA, 20 bp, synthetic construct
  misc_feature 1..20: note = chemically synthesized
  source 1..20: mol_type = other DNA
caggatggcttagcagctcc

SEQ ID NO: 6974 - DNA, 20 bp, synthetic construct
  misc_feature 1..20: note = chemically synthesized
  source 1..20: mol_type = other DNA
tggcttagcagctcccagct

SEQ ID NO: 6975 - DNA, 20 bp, synthetic construct
  misc_feature 1..20: note = chemically synthesized
  source 1..20: mol_type = other DNA
ggcttagcagctcccagctc

SEQ ID NO: 6976 - DNA, 20 bp, synthetic construct
  misc_feature 1..20: note = chemically synthesized
  source 1..20: mol_type = other DNA
gcttagcagctcccagctca

SEQ ID NO: 6977 - DNA, 20 bp, synthetic construct
  misc_feature 1..20: note = chemically synthesized
  source 1..20: mol_type = other DNA
gctcccagctcagggcctat

SEQ ID NO: 6978 - DNA, 20 bp, synthetic construct
  misc_feature 1..20: note = chemically synthesized
  source 1..20: mol_type = other DNA
tcccagctcagggcctatca

SEQ ID NO: 6979 - DNA, 20 bp, synthetic construct
  misc_feature 1..20: note = chemically synthesized
  source 1..20: mol_type = other DNA
cccagctcagggcctatcag

SEQ ID NO: 6980 - DNA, 20 bp, synthetic construct
  misc_feature 1..20: note = chemically synthesized
  source 1..20: mol_type = other DNA
ctcagggcctatcagaggct

SEQ ID NO: 6981 - DNA, 20 bp, synthetic construct
  misc_feature 1..20: note = chemically synthesized
  source 1..20: mol_type = other DNA
agggcctatcagaggctgag

SEQ ID NO: 6982 - DNA, 20 bp, synthetic construct
  misc_feature 1..20: note = chemically synthesized
  source 1..20: mol_type = other DNA
gggcctatcagaggctgaga

SEQ ID NO: 6983 - DNA, 20 bp, synthetic construct
  misc_feature 1..20: note = chemically synthesized
  source 1..20: mol_type = other DNA
ctatcagaggctgagaaggt

SEQ ID NO: 6984 - DNA, 20 bp, synthetic construct
  misc_feature 1..20: note = chemically synthesized
  source 1..20: mol_type = other DNA
attttattccttcactaaca

SEQ ID NO: 6985 - DNA, 20 bp, synthetic construct
  misc_feature 1..20: note = chemically synthesized
  source 1..20: mol_type = other DNA
cttcactaacaaagcaaacc

SEQ ID NO: 6986 - DNA, 20 bp, synthetic construct
  misc_feature 1..20: note = chemically synthesized
  source 1..20: mol_type = other DNA
ctctcctctatgcactctct

SEQ ID NO: 6987 - DNA, 20 bp, synthetic construct
  misc_feature 1..20: note = chemically synthesized
  source 1..20: mol_type = other DNA
tctcctctatgcactctctc

SEQ ID NO: 6988 - DNA, 20 bp, synthetic construct
  misc_feature 1..20: note = chemically synthesized
  source 1..20: mol_type = other DNA
ctcctctatgcactctctcg

SEQ ID NO: 6989 - DNA, 20 bp, synthetic construct
  misc_feature 1..20: note = chemically synthesized
  source 1..20: mol_type = other DNA
ggggcacttcctaatctcgt

SEQ ID NO: 6990 - DNA, 20 bp, synthetic construct
  misc_feature 1..20: note = chemically synthesized
  source 1..20: mol_type = other DNA
ctcgttagtaccttttgaat

SEQ ID NO: 6991 - DNA, 20 bp, synthetic construct
  misc_feature 1..20: note = chemically synthesized
  source 1..20: mol_type = other DNA
taccttttgaattagttttc

SEQ ID NO: 6992 - DNA, 20 bp, synthetic construct
  misc_feature 1..20: note = chemically synthesized
  source 1..20: mol_type = other DNA
ttttgaattagttttcaaga

SEQ ID NO: 6993 - DNA, 20 bp, synthetic construct
  misc_feature 1..20: note = chemically synthesized
  source 1..20: mol_type = other DNA
tttgaattagttttcaagat

SEQ ID NO: 6994 - DNA, 20 bp, synthetic construct
  misc_feature 1..20: note = chemically synthesized
  source 1..20: mol_type = other DNA
tagttttcaagataggactt

SEQ ID NO: 6995 - DNA, 20 bp, synthetic construct
  misc_feature 1..20: note = chemically synthesized
  source 1..20: mol_type = other DNA
gataggacttgagttcctcg

SEQ ID NO: 6996 - DNA, 20 bp, synthetic construct
  misc_feature 1..20: note = chemically synthesized
  source 1..20: mol_type = other DNA
ataggacttgagttcctcga

SEQ ID NO: 6997 - DNA, 20 bp, synthetic construct
  misc_feature 1..20: note = chemically synthesized
  source 1..20: mol_type = other DNA
acttgagttcctcgaaggat

SEQ ID NO: 6998 - DNA, 20 bp, synthetic construct
  misc_feature 1..20: note = chemically synthesized
  source 1..20: mol_type = other DNA
ctcgaaggattagaaaataa

SEQ ID NO: 6999 - DNA, 20 bp, synthetic construct
  misc_feature 1..20: note = chemically synthesized
  source 1..20: mol_type = other DNA
ggattagaaaataacagtaa

SEQ ID NO: 7000 - DNA, 20 bp, synthetic construct
  misc_feature 1..20: note = chemically synthesized
  source 1..20: mol_type = other DNA
cagtaacagttcatgttgtc

SEQ ID NO: 7001 - DNA, 20 bp, synthetic construct
  misc_feature 1..20: note = chemically synthesized
  source 1..20: mol_type = other DNA
agtaacagttcatgttgtct

SEQ ID NO: 7002 - DNA, 20 bp, synthetic construct
  misc_feature 1..20: note = chemically synthesized
  source 1..20: mol_type = other DNA
cagttcatgttgtctgggcc

SEQ ID NO: 7003 - DNA, 20 bp, synthetic construct
  misc_feature 1..20: note = chemically synthesized
  source 1..20: mol_type = other DNA
catgttgtctgggccaagca

SEQ ID NO: 7004 - DNA, 20 bp, synthetic construct
  misc_feature 1..20: note = chemically synthesized
  source 1..20: mol_type = other DNA
gttgtctgggccaagcacag

SEQ ID NO: 7005 - DNA, 20 bp, synthetic construct
  misc_feature 1..20: note = chemically synthesized
  source 1..20: mol_type = other DNA
gtggctcacacctgtaatca

SEQ ID NO: 7006 - DNA, 20 bp, synthetic construct
  misc_feature 1..20: note = chemically synthesized
  source 1..20: mol_type = other DNA
tcacacctgtaatcacagcc

SEQ ID NO: 7007 - DNA, 20 bp, synthetic construct
  misc_feature 1..20: note = chemically synthesized
  source 1..20: mol_type = other DNA
cacacctgtaatcacagccg

SEQ ID NO: 7008 - DNA, 20 bp, synthetic construct
  misc_feature 1..20: note = chemically synthesized
  source 1..20: mol_type = other DNA
cctgtaatcacagccgaggc

SEQ ID NO: 7009 - DNA, 20 bp, synthetic construct
  misc_feature 1..20: note = chemically synthesized
  source 1..20: mol_type = other DNA
tgtaatcacagccgaggccg

SEQ ID NO: 7010 - DNA, 20 bp, synthetic construct
  misc_feature 1..20: note = chemically synthesized
  source 1..20: mol_type = other DNA
gtaatcacagccgaggccgg

SEQ ID NO: 7011 - DNA, 20 bp, synthetic construct
  misc_feature 1..20: note = chemically synthesized
  source 1..20: mol_type = other DNA
taatcacagccgaggccgga

SEQ ID NO: 7012 - DNA, 20 bp, synthetic construct
  misc_feature 1..20: note = chemically synthesized
  source 1..20: mol_type = other DNA
atcacagccgaggccggagg

SEQ ID NO: 7013 - DNA, 20 bp, synthetic construct
  misc_feature 1..20: note = chemically synthesized
  source 1..20: mol_type = other DNA
ggccggagggagaacgattt

SEQ ID NO: 7014 - DNA, 20 bp, synthetic construct
  misc_feature 1..20: note = chemically synthesized
  source 1..20: mol_type = other DNA
gagggagaacgatttgagct

SEQ ID NO: 7015 - DNA, 20 bp, synthetic construct
  misc_feature 1..20: note = chemically synthesized
  source 1..20: mol_type = other DNA
agggagaacgatttgagctc

SEQ ID NO: 7016 - DNA, 20 bp, synthetic construct
  misc_feature 1..20: note = chemically synthesized
  source 1..20: mol_type = other DNA
ggagaacgatttgagctcag

SEQ ID NO: 7017 - DNA, 20 bp, synthetic construct
  misc_feature 1..20: note = chemically synthesized
  source 1..20: mol_type = other DNA
aacgatttgagctcaggagt

SEQ ID NO: 7018 - DNA, 20 bp, synthetic construct
  misc_feature 1..20: note = chemically synthesized
  source 1..20: mol_type = other DNA
cgatttgagctcaggagttg

SEQ ID NO: 7019 - DNA, 20 bp, synthetic construct
  misc_feature 1..20: note = chemically synthesized
  source 1..20: mol_type = other DNA
tgagctcaggagttggagac

SEQ ID NO: 7020 - DNA, 20 bp, synthetic construct
  misc_feature 1..20: note = chemically synthesized
  source 1..20: mol_type = other DNA
tcaggagttggagaccagct

SEQ ID NO: 7021 - DNA, 20 bp, synthetic construct
  misc_feature 1..20: note = chemically synthesized
  source 1..20: mol_type = other DNA
caggagttggagaccagctt

SEQ ID NO: 7022 - DNA, 20 bp, synthetic construct
  misc_feature 1..20: note = chemically synthesized
  source 1..20: mol_type = other DNA
ggagaccagcttgggcaaca

SEQ ID NO: 7023 - DNA, 20 bp, synthetic construct
  misc_feature 1..20: note = chemically synthesized
  source 1..20: mol_type = other DNA
agaccagcttgggcaacatg

SEQ ID NO: 7024 - DNA, 20 bp, synthetic construct
  misc_feature 1..20: note = chemically synthesized
  source 1..20: mol_type = other DNA
tctctacaaaaaattttaaa

SEQ ID NO: 7025 - DNA, 20 bp, synthetic construct
  misc_feature 1..20: note = chemically synthesized
  source 1..20: mol_type = other DNA
ctacaaaaaattttaaaaag

SEQ ID NO: 7026 - DNA, 20 bp, synthetic construct
  misc_feature 1..20: note = chemically synthesized
  source 1..20: mol_type = other DNA
ttttaaaaagtagccgaata

SEQ ID NO: 7027 - DNA, 20 bp, synthetic construct
  misc_feature 1..20: note = chemically synthesized
  source 1..20: mol_type = other DNA
aatatggtgttacgtgcctg

SEQ ID NO: 7028 - DNA, 20 bp, synthetic construct
  misc_feature 1..20: note = chemically synthesized
  source 1..20: mol_type = other DNA
gtgttacgtgcctgtagtcc

SEQ ID NO: 7029 - DNA, 20 bp, synthetic construct
  misc_feature 1..20: note = chemically synthesized
  source 1..20: mol_type = other DNA
tgcctgtagtcccagctact

SEQ ID NO: 7030 - DNA, 20 bp, synthetic construct
  misc_feature 1..20: note = chemically synthesized
  source 1..20: mol_type = other DNA
gcctgtagtcccagctactt

SEQ ID NO: 7031 - DNA, 20 bp, synthetic construct
  misc_feature 1..20: note = chemically synthesized
  source 1..20: mol_type = other DNA
ctgtagtcccagctacttgg

SEQ ID NO: 7032 - DNA, 20 bp, synthetic construct
  misc_feature 1..20: note = chemically synthesized
  source 1..20: mol_type = other DNA
tgtagtcccagctacttggg

SEQ ID NO: 7033 - DNA, 20 bp, synthetic construct
  misc_feature 1..20: note = chemically synthesized
  source 1..20: mol_type = other DNA
tcccagctacttgggaggct

SEQ ID NO: 7034 - DNA, 20 bp, synthetic construct
  misc_feature 1..20: note = chemically synthesized
  source 1..20: mol_type = other DNA
cccagctacttgggaggctg

SEQ ID NO: 7035 - DNA, 20 bp, synthetic construct
  misc_feature 1..20: note = chemically synthesized
  source 1..20: mol_type = other DNA
agctacttgggaggctgagg

SEQ ID NO: 7036 - DNA, 20 bp, synthetic construct
  misc_feature 1..20: note = chemically synthesized
  source 1..20: mol_type = other DNA
tacttgggaggctgaggtgg

SEQ ID NO: 7037 - DNA, 20 bp, synthetic construct
  misc_feature 1..20: note = chemically synthesized
  source 1..20: mol_type = other DNA
acttgggaggctgaggtgga

SEQ ID NO: 7038 - DNA, 20 bp, synthetic construct
  misc_feature 1..20: note = chemically synthesized
  source 1..20: mol_type = other DNA
ctgaggtggaaggatatctt

SEQ ID NO: 7039 - DNA, 20 bp, synthetic construct
  misc_feature 1..20: note = chemically synthesized
  source 1..20: mol_type = other DNA
gtggaaggatatcttgagcc

SEQ ID NO: 7040 - DNA, 20 bp, synthetic construct
  misc_feature 1..20: note = chemically synthesized
  source 1..20: mol_type = other DNA
tggaaggatatcttgagcca

SEQ ID NO: 7041 - DNA, 20 bp, synthetic construct
  misc_feature 1..20: note = chemically synthesized
  source 1..20: mol_type = other DNA
gaaggatatcttgagccaag

SEQ ID NO: 7042 - DNA, 20 bp, synthetic construct
  misc_feature 1..20: note = chemically synthesized
  source 1..20: mol_type = other DNA
aaggatatcttgagccaagg

SEQ ID NO: 7043 - DNA, 20 bp, synthetic construct
  misc_feature 1..20: note = chemically synthesized
  source 1..20: mol_type = other DNA
aggatatcttgagccaagga

SEQ ID NO: 7044 - DNA, 20 bp, synthetic construct
  misc_feature 1..20: note = chemically synthesized
  source 1..20: mol_type = other DNA
ggatatcttgagccaaggag

SEQ ID NO: 7045 - DNA, 20 bp, synthetic construct
  misc_feature 1..20: note = chemically synthesized
  source 1..20: mol_type = other DNA
gatatcttgagccaaggagg

SEQ ID NO: 7046 - DNA, 20 bp, synthetic construct
  misc_feature 1..20: note = chemically synthesized
  source 1..20: mol_type = other DNA
tatcttgagccaaggagggg

SEQ ID NO: 7047 - DNA, 20 bp, synthetic construct
  misc_feature 1..20: note = chemically synthesized
  source 1..20: mol_type = other DNA
agccaaggagggggagattg

SEQ ID NO: 7048 - DNA, 20 bp, synthetic construct
  misc_feature 1..20: note = chemically synthesized
  source 1..20: mol_type = other DNA
aaggagggggagattgcagt

SEQ ID NO: 7049 - DNA, 20 bp, synthetic construct
  misc_feature 1..20: note = chemically synthesized
  source 1..20: mol_type = other DNA
gggggagattgcagtgagca

SEQ ID NO: 7050 - DNA, 20 bp, synthetic construct
  misc_feature 1..20: note = chemically synthesized
  source 1..20: mol_type = other DNA
tgtaccactgcactccaacc

SEQ ID NO: 7051 - DNA, 20 bp, synthetic construct
  misc_feature 1..20: note = chemically synthesized
  source 1..20: mol_type = other DNA
gtaccactgcactccaacct

SEQ ID NO: 7052 - DNA, 20 bp, synthetic construct
  misc_feature 1..20: note = chemically synthesized
  source 1..20: mol_type = other DNA
gcactccaacctgggcaaca

SEQ ID NO: 7053 - DNA, 20 bp, synthetic construct
  misc_feature 1..20: note = chemically synthesized
  source 1..20: mol_type = other DNA
tccaacctgggcaacacagc

SEQ ID NO: 7054 - DNA, 20 bp, synthetic construct
  misc_feature 1..20: note = chemically synthesized
  source 1..20: mol_type = other DNA
accctgtcaaaaaaaaaaaa

SEQ ID NO: 7055 - DNA, 20 bp, synthetic construct
  misc_feature 1..20: note = chemically synthesized
  source 1..20: mol_type = other DNA
cctgtcaaaaaaaaaaaaaa

SEQ ID NO: 7056 - DNA, 20 bp, synthetic construct
  misc_feature 1..20: note = chemically synthesized
  source 1..20: mol_type = other DNA
tgtcaaaaaaaaaaaaaaga

SEQ ID NO: 7057 - DNA, 20 bp, synthetic construct
  misc_feature 1..20: note = chemically synthesized
  source 1..20: mol_type = other DNA
aaaaaaaaaaaaaagagagc

SEQ ID NO: 7058 - DNA, 20 bp, synthetic construct
  misc_feature 1..20: note = chemically synthesized
  source 1..20: mol_type = other DNA
aaaaaaaaaagagagctaga

SEQ ID NO: 7059 - DNA, 20 bp, synthetic construct
  misc_feature 1..20: note = chemically synthesized
  source 1..20: mol_type = other DNA
aaaaaagagagctagaaaga

SEQ ID NO: 7060 - DNA, 20 bp, synthetic construct
  misc_feature 1..20: note = chemically synthesized
  source 1..20: mol_type = other DNA
aaagaaagaaattaacaatt

SEQ ID NO: 7061 - DNA, 20 bp, synthetic construct
  misc_feature 1..20: note = chemically synthesized
  source 1..20: mol_type = other DNA
aagaaagaaattaacaattc

SEQ ID NO: 7062 - DNA, 20 bp, synthetic construct
  misc_feature 1..20: note = chemically synthesized
  source 1..20: mol_type = other DNA
aaattaacaattcaggttgt

SEQ ID NO: 7063 - DNA, 20 bp, synthetic construct
  misc_feature 1..20: note = chemically synthesized
  source 1..20: mol_type = other DNA
ttaacaattcaggttgtcag

SEQ ID NO: 7064 - DNA, 20 bp, synthetic construct
  misc_feature 1..20: note = chemically synthesized
  source 1..20: mol_type = other DNA
aactgaatgtctttaacaaa

SEQ ID NO: 7065 - DNA, 20 bp, synthetic construct
  misc_feature 1..20: note = chemically synthesized
  source 1..20: mol_type = other DNA
actgaatgtctttaacaaat

SEQ ID NO: 7066 - DNA, 20 bp, synthetic construct
  misc_feature 1..20: note = chemically synthesized
  source 1..20: mol_type = other DNA
tgaatgtctttaacaaatag

SEQ ID NO: 7067 - DNA, 20 bp, synthetic construct
  misc_feature 1..20: note = chemically synthesized
  source 1..20: mol_type = other DNA
tctttaacaaataggagcca

SEQ ID NO: 7068 - DNA, 20 bp, synthetic construct
  misc_feature 1..20: note = chemically synthesized
  source 1..20: mol_type = other DNA
ctttaacaaataggagccat

SEQ ID NO: 7069 - DNA, 20 bp, synthetic construct
  misc_feature 1..20: note = chemically synthesized
  source 1..20: mol_type = other DNA
taaattgctcacattatttt

SEQ ID NO: 7070 - DNA, 20 bp, synthetic construct
  misc_feature 1..20: note = chemically synthesized
  source 1..20: mol_type = other DNA
aaattgctcacattattttg

SEQ ID NO: 7071 - DNA, 20 bp, synthetic construct
  misc_feature 1..20: note = chemically synthesized
  source 1..20: mol_type = other DNA
aattgctcacattattttga

SEQ ID NO: 7072 - DNA, 20 bp, synthetic construct
  misc_feature 1..20: note = chemically synthesized
  source 1..20: mol_type = other DNA
ttttacctccaacatatata

SEQ ID NO: 7073 - DNA, 20 bp, synthetic construct
  misc_feature 1..20: note = chemically synthesized
  source 1..20: mol_type = other DNA
cagtttttatatttactata

SEQ ID NO: 7074 - DNA, 20 bp, synthetic construct
  misc_feature 1..20: note = chemically synthesized
  source 1..20: mol_type = other DNA
agtttttatatttactatat

SEQ ID NO: 7075 - DNA, 20 bp, synthetic construct
  misc_feature 1..20: note = chemically synthesized
  source 1..20: mol_type = other DNA
ttgcataaaatcaaattaca

SEQ ID NO: 7076 - DNA, 20 bp, synthetic construct
  misc_feature 1..20: note = chemically synthesized
  source 1..20: mol_type = other DNA
cataaaatcaaattacaaag

SEQ ID NO: 7077 - DNA, 20 bp, synthetic construct
  misc_feature 1..20: note = chemically synthesized
  source 1..20: mol_type = other DNA
ataaaatcaaattacaaaga

SEQ ID NO: 7078 - DNA, 20 bp, synthetic construct
  misc_feature 1..20: note = chemically synthesized
  source 1..20: mol_type = other DNA
aatcaaattacaaagaagga

SEQ ID NO: 7079 - DNA, 20 bp, synthetic construct
  misc_feature 1..20: note = chemically synthesized
  source 1..20: mol_type = other DNA
tcaaattacaaagaaggaca

SEQ ID NO: 7080 - DNA, 20 bp, synthetic construct
  misc_feature 1..20: note = chemically synthesized
  source 1..20: mol_type = other DNA
cgcataaaacaacattttgt

SEQ ID NO: 7081 - DNA, 20 bp, synthetic construct
  misc_feature 1..20: note = chemically synthesized
  source 1..20: mol_type = other DNA
attttgttagacttaaaaac

SEQ ID NO: 7082 - DNA, 20 bp, synthetic construct
  misc_feature 1..20: note = chemically synthesized
  source 1..20: mol_type = other DNA
aagctgattataactataaa

SEQ ID NO: 7083 - DNA, 20 bp, synthetic construct
  misc_feature 1..20: note = chemically synthesized
  source 1..20: mol_type = other DNA
ataaaaagatatgtgactaa

SEQ ID NO: 7084 - DNA, 20 bp, synthetic construct
  misc_feature 1..20: note = chemically synthesized
  source 1..20: mol_type = other DNA
taaaaagatatgtgactaat

SEQ ID NO: 7085 - DNA, 20 bp, synthetic construct
  misc_feature 1..20: note = chemically synthesized
  source 1..20: mol_type = other DNA
aaagatatgtgactaatagg

SEQ ID NO: 7086 - DNA, 20 bp, synthetic construct
  misc_feature 1..20: note = chemically synthesized
  source 1..20: mol_type = other DNA
atatgtgactaataggtgga

SEQ ID NO: 7087 - DNA, 20 bp, synthetic construct
  misc_feature 1..20: note = chemically synthesized
  source 1..20: mol_type = other DNA
atgtgactaataggtggaaa

SEQ ID NO: 7088 - DNA, 20 bp, synthetic construct
  misc_feature 1..20: note = chemically synthesized
  source 1..20: mol_type = other DNA
tgtgactaataggtggaaag

SEQ ID NO: 7089 - DNA, 20 bp, synthetic construct
  misc_feature 1..20: note = chemically synthesized
  source 1..20: mol_type = other DNA
tgactaataggtggaaagag

SEQ ID NO: 7090 - DNA, 20 bp, synthetic construct
  misc_feature 1..20: note = chemically synthesized
  source 1..20: mol_type = other DNA
taataggtggaaagaggagc

SEQ ID NO: 7091 - DNA, 20 bp, synthetic construct
  misc_feature 1..20: note = chemically synthesized
  source 1..20: mol_type = other DNA
aataggtggaaagaggagca

SEQ ID NO: 7092 - DNA, 20 bp, synthetic construct
  misc_feature 1..20: note = chemically synthesized
  source 1..20: mol_type = other DNA
aggtggaaagaggagcaagg

SEQ ID NO: 7093 - DNA, 20 bp, synthetic construct
  misc_feature 1..20: note = chemically synthesized
  source 1..20: mol_type = other DNA
aggagcaaggaagaataaaa

SEQ ID NO: 7094 - DNA, 20 bp, synthetic construct
  misc_feature 1..20: note = chemically synthesized
  source 1..20: mol_type = other DNA
ggagcaaggaagaataaaat

SEQ ID NO: 7095 - DNA, 20 bp, synthetic construct
  misc_feature 1..20: note = chemically synthesized
  source 1..20: mol_type = other DNA
agcaaggaagaataaaatgg

SEQ ID NO: 7096 - DNA, 20 bp, synthetic construct
  misc_feature 1..20: note = chemically synthesized
  source 1..20: mol_type = other DNA
gcaaggaagaataaaatggg

SEQ ID NO: 7097 - DNA, 20 bp, synthetic construct
  misc_feature 1..20: note = chemically synthesized
  source 1..20: mol_type = other DNA
ggaagaataaaatgggagga

SEQ ID NO: 7098 - DNA, 20 bp, synthetic construct
  misc_feature 1..20: note = chemically synthesized
  source 1..20: mol_type = other DNA
atgggaggaaagaactgcta

SEQ ID NO: 7099 - DNA, 20 bp, synthetic construct
  misc_feature 1..20: note = chemically synthesized
  source 1..20: mol_type = other DNA
gaactgctaaagactcacga

SEQ ID NO: 7100 - DNA, 20 bp, synthetic construct
  misc_feature 1..20: note = chemically synthesized
  source 1..20: mol_type = other DNA
actcacgatggtttgttaca

SEQ ID NO: 7101 - DNA, 20 bp, synthetic construct
  misc_feature 1..20: note = chemically synthesized
  source 1..20: mol_type = other DNA
acatagctaaacacatgtca

SEQ ID NO: 7102 - DNA, 20 bp, synthetic construct
  misc_feature 1..20: note = chemically synthesized
  source 1..20: mol_type = other DNA
catagctaaacacatgtcat

SEQ ID NO: 7103 - DNA, 20 bp, synthetic construct
  misc_feature 1..20: note = chemically synthesized
  source 1..20: mol_type = other DNA
catgtcatgggtttgtcgta

SEQ ID NO: 7104 - DNA, 20 bp, synthetic construct
  misc_feature 1..20: note = chemically synthesized
  source 1..20: mol_type = other DNA
gtacagattatttcatctcc

SEQ ID NO: 7105 - DNA, 20 bp, synthetic construct
  misc_feature 1..20: note = chemically synthesized
  source 1..20: mol_type = other DNA
tttcatctcccagtactcaa

SEQ ID NO: 7106 - DNA, 20 bp, synthetic construct
  misc_feature 1..20: note = chemically synthesized
  source 1..20: mol_type = other DNA
tcccaccctccaaactcaat

SEQ ID NO: 7107 - DNA, 20 bp, synthetic construct
  misc_feature 1..20: note = chemically synthesized
  source 1..20: mol_type = other DNA
cccaccctccaaactcaatt

SEQ ID NO: 7108 - DNA, 20 bp, synthetic construct
  misc_feature 1..20: note = chemically synthesized
  source 1..20: mol_type = other DNA
ctccaaactcaattaggctg

SEQ ID NO: 7109 - DNA, 20 bp, synthetic construct
  misc_feature 1..20: note = chemically synthesized
  source 1..20: mol_type = other DNA
gtgcatgttttctcatcatt

SEQ ID NO: 7110 - DNA, 20 bp, synthetic construct
  misc_feature 1..20: note = chemically synthesized
  source 1..20: mol_type = other DNA
atcatttagttcctacttgt

SEQ ID NO: 7111 - DNA, 20 bp, synthetic construct
  misc_feature 1..20: note = chemically synthesized
  source 1..20: mol_type = other DNA
tacttgtaagtgataatatg

SEQ ID NO: 7112 - DNA, 20 bp, synthetic construct
  misc_feature 1..20: note = chemically synthesized
  source 1..20: mol_type = other DNA
aagtgataatatgtagtatt

SEQ ID NO: 7113 - DNA, 20 bp, synthetic construct
  misc_feature 1..20: note = chemically synthesized
  source 1..20: mol_type = other DNA
ttggttttctgttcttacat

SEQ ID NO: 7114 - DNA, 20 bp, synthetic construct
  misc_feature 1..20: note = chemically synthesized
  source 1..20: mol_type = other DNA
tgttcttacattagtttgtt

SEQ ID NO: 7115 - DNA, 20 bp, synthetic construct
  misc_feature 1..20: note = chemically synthesized
  source 1..20: mol_type = other DNA
gttcttacattagtttgtta

SEQ ID NO: 7116 - DNA, 20 bp, synthetic construct
  misc_feature 1..20: note = chemically synthesized
  source 1..20: mol_type = other DNA
cattagtttgttaaggataa

SEQ ID NO: 7117 - DNA, 20 bp, synthetic construct
  misc_feature 1..20: note = chemically synthesized
  source 1..20: mol_type = other DNA
ttgttaaggataatggtgtc

SEQ ID NO: 7118 - DNA, 20 bp, synthetic construct
  misc_feature 1..20: note = chemically synthesized
  source 1..20: mol_type = other DNA
gctccatccatgttcctgca

SEQ ID NO: 7119 - DNA, 20 bp, synthetic construct
  misc_feature 1..20: note = chemically synthesized
  source 1..20: mol_type = other DNA
ctccatccatgttcctgcaa

SEQ ID NO: 7120 - DNA, 20 bp, synthetic construct
  misc_feature 1..20: note = chemically synthesized
  source 1..20: mol_type = other DNA
catgatctcattctttttta

SEQ ID NO: 7121 - DNA, 20 bp, synthetic construct
  misc_feature 1..20: note = chemically synthesized
  source 1..20: mol_type = other DNA
cattcttttttatggccaca

SEQ ID NO: 7122 - DNA, 20 bp, synthetic construct
  misc_feature 1..20: note = chemically synthesized
  source 1..20: mol_type = other DNA
tatggccacatagtattcca

SEQ ID NO: 7123 - DNA, 20 bp, synthetic construct
  misc_feature 1..20: note = chemically synthesized
  source 1..20: mol_type = other DNA
tatatgtacatgttctttat

SEQ ID NO: 7124 - DNA, 20 bp, synthetic construct
  misc_feature 1..20: note = chemically synthesized
  source 1..20: mol_type = other DNA
ctttatcggtataccactaa

SEQ ID NO: 7125 - DNA, 20 bp, synthetic construct
  misc_feature 1..20: note = chemically synthesized
  source 1..20: mol_type = other DNA
tttatcggtataccactaat

SEQ ID NO: 7126 - DNA, 20 bp, synthetic construct
  misc_feature 1..20: note = chemically synthesized
  source 1..20: mol_type = other DNA
gtataccactaatgggcctt

SEQ ID NO: 7127 - DNA, 20 bp, synthetic construct
  misc_feature 1..20: note = chemically synthesized
  source 1..20: mol_type = other DNA
tataccactaatgggccttc

SEQ ID NO: 7128 - DNA, 20 bp, synthetic construct
  misc_feature 1..20: note = chemically synthesized
  source 1..20: mol_type = other DNA
ctattgtgattatgctgcaa

SEQ ID NO: 7129 - DNA, 20 bp, synthetic construct
  misc_feature 1..20: note = chemically synthesized
  source 1..20: mol_type = other DNA
tgattatgctgcaatggaca

SEQ ID NO: 7130 - DNA, 20 bp, synthetic construct
  misc_feature 1..20: note = chemically synthesized
  source 1..20: mol_type = other DNA
gattatgctgcaatggacac

SEQ ID NO: 7131 - DNA, 20 bp, synthetic construct
  misc_feature 1..20: note = chemically synthesized
  source 1..20: mol_type = other DNA
gtgtgcatgtgtctttgtga

SEQ ID NO: 7132 - DNA, 20 bp, synthetic construct
  misc_feature 1..20: note = chemically synthesized
  source 1..20: mol_type = other DNA
catgtgtctttgtgatagaa

SEQ ID NO: 7133 - DNA, 20 bp, synthetic construct
  misc_feature 1..20: note = chemically synthesized
  source 1..20: mol_type = other DNA
tagaatggtttattttcctt

SEQ ID NO: 7134 - DNA, 20 bp, synthetic construct
  misc_feature 1..20: note = chemically synthesized
  source 1..20: mol_type = other DNA
agaatggtttattttccttt

SEQ ID NO: 7135 - DNA, 20 bp, synthetic construct
  misc_feature 1..20: note = chemically synthesized
  source 1..20: mol_type = other DNA
tttaggtatatactcaataa

SEQ ID NO: 7136 - DNA, 20 bp, synthetic construct
  misc_feature 1..20: note = chemically synthesized
  source 1..20: mol_type = other DNA
ttaggtatatactcaataat

SEQ ID NO: 7137 - DNA, 20 bp, synthetic construct
  misc_feature 1..20: note = chemically synthesized
  source 1..20: mol_type = other DNA
atactcaataataggattgt

SEQ ID NO: 7138 - DNA, 20 bp, synthetic construct
  misc_feature 1..20: note = chemically synthesized
  source 1..20: mol_type = other DNA
tactcaataataggattgtt

SEQ ID NO: 7139 - DNA, 20 bp, synthetic construct
  misc_feature 1..20: note = chemically synthesized
  source 1..20: mol_type = other DNA
aataggattgttgggttaaa

SEQ ID NO: 7140 - DNA, 20 bp, synthetic construct
  misc_feature 1..20: note = chemically synthesized
  source 1..20: mol_type = other DNA
ttaaatggtatttctgtttt

SEQ ID NO: 7141 - DNA, 20 bp, synthetic construct
  misc_feature 1..20: note = chemically synthesized
  source 1..20: mol_type = other DNA
taaatggtatttctgttttt

SEQ ID NO: 7142 - DNA, 20 bp, synthetic construct
  misc_feature 1..20: note = chemically synthesized
  source 1..20: mol_type = other DNA
tatttctgtttttaggtctt

SEQ ID NO: 7143 - DNA, 20 bp, synthetic construct
  misc_feature 1..20: note = chemically synthesized
  source 1..20: mol_type = other DNA
atttctgtttttaggtcttt

SEQ ID NO: 7144 - DNA, 20 bp, synthetic construct
  misc_feature 1..20: note = chemically synthesized
  source 1..20: mol_type = other DNA
tttctgtttttaggtcttta

SEQ ID NO: 7145 - DNA, 20 bp, synthetic construct
  misc_feature 1..20: note = chemically synthesized
  source 1..20: mol_type = other DNA
tgccacactgctgtctacaa

SEQ ID NO: 7146 - DNA, 20 bp, synthetic construct
  misc_feature 1..20: note = chemically synthesized
  source 1..20: mol_type = other DNA
ctaatttatattgccaccaa

SEQ ID NO: 7147 - DNA, 20 bp, synthetic construct
  misc_feature 1..20: note = chemically synthesized
  source 1..20: mol_type = other DNA
attttttgactatttaatta

SEQ ID NO: 7148 - DNA, 20 bp, synthetic construct
  misc_feature 1..20: note = chemically synthesized
  source 1..20: mol_type = other DNA
tatttaattatagatatttt

SEQ ID NO: 7149 - DNA, 20 bp, synthetic construct
  misc_feature 1..20: note = chemically synthesized
  source 1..20: mol_type = other DNA
atagatattttaagtgatgt

SEQ ID NO: 7150 - DNA, 20 bp, synthetic construct
  misc_feature 1..20: note = chemically synthesized
  source 1..20: mol_type = other DNA
atattttaagtgatgtgaga

SEQ ID NO: 7151 - DNA, 20 bp, synthetic construct
  misc_feature 1..20: note = chemically synthesized
  source 1..20: mol_type = other DNA
tgtgagatagtatctcattt

SEQ ID NO: 7152 - DNA, 20 bp, synthetic construct
  misc_feature 1..20: note = chemically synthesized
  source 1..20: mol_type = other DNA
gtgagatagtatctcatttt

SEQ ID NO: 7153 - DNA, 20 bp, synthetic construct
  misc_feature 1..20: note = chemically synthesized
  source 1..20: mol_type = other DNA
tatctcattttgggtttgat

SEQ ID NO: 7154 - DNA, 20 bp, synthetic construct
  misc_feature 1..20: note = chemically synthesized
  source 1..20: mol_type = other DNA
attggcatttctctaatgat

SEQ ID NO: 7155 - DNA, 20 bp, synthetic construct
  misc_feature 1..20: note = chemically synthesized
  source 1..20: mol_type = other DNA
ctctaatgatcagtgacact

SEQ ID NO: 7156 - DNA, 20 bp, synthetic construct
  misc_feature 1..20: note = chemically synthesized
  source 1..20: mol_type = other DNA
ctgagcttttttcatatgct

SEQ ID NO: 7157 - DNA, 20 bp, synthetic construct
  misc_feature 1..20: note = chemically synthesized
  source 1..20: mol_type = other DNA
agcttttttcatatgcttgg

SEQ ID NO: 7158 - DNA, 20 bp, synthetic construct
  misc_feature 1..20: note = chemically synthesized
  source 1..20: mol_type = other DNA
tgtcctttacccattttttg

SEQ ID NO: 7159 - DNA, 20 bp, synthetic construct
  misc_feature 1..20: note = chemically synthesized
  source 1..20: mol_type = other DNA
cattgtttgttttgttcttg

SEQ ID NO: 7160 - DNA, 20 bp, synthetic construct
  misc_feature 1..20: note = chemically synthesized
  source 1..20: mol_type = other DNA
ttgttcttgtagattcattt

SEQ ID NO: 7161 - DNA, 20 bp, synthetic construct
  misc_feature 1..20: note = chemically synthesized
  source 1..20: mol_type = other DNA
agattcatttaagttcctta

SEQ ID NO: 7162 - DNA, 20 bp, synthetic construct
  misc_feature 1..20: note = chemically synthesized
  source 1..20: mol_type = other DNA
tccttatagattctgaatat

SEQ ID NO: 7163 - DNA, 20 bp, synthetic construct
  misc_feature 1..20: note = chemically synthesized
  source 1..20: mol_type = other DNA
ccttatagattctgaatatt

SEQ ID NO: 7164 - DNA, 20 bp, synthetic construct
  misc_feature 1..20: note = chemically synthesized
  source 1..20: mol_type = other DNA
tctgaatattaggcctttgt

SEQ ID NO: 7165 - DNA, 20 bp, synthetic construct
  misc_feature 1..20: note = chemically synthesized
  source 1..20: mol_type = other DNA
ttaggcctttgttggatgca

SEQ ID NO: 7166 - DNA, 20 bp, synthetic construct
  misc_feature 1..20: note = chemically synthesized
  source 1..20: mol_type = other DNA
aaaaattttctcccattcta

SEQ ID NO: 7167 - DNA, 20 bp, synthetic construct
  misc_feature 1..20: note = chemically synthesized
  source 1..20: mol_type = other DNA
aaaattttctcccattctat

SEQ ID NO: 7168 - DNA, 20 bp, synthetic construct
  misc_feature 1..20: note = chemically synthesized
  source 1..20: mol_type = other DNA
cattctataggttgtttact

SEQ ID NO: 7169 - DNA, 20 bp, synthetic construct
  misc_feature 1..20: note = chemically synthesized
  source 1..20: mol_type = other DNA
taggttgtttactcagttga

SEQ ID NO: 7170 - DNA, 20 bp, synthetic construct
  misc_feature 1..20: note = chemically synthesized
  source 1..20: mol_type = other DNA
tgatagtttcttttgctgtg

SEQ ID NO: 7171 - DNA, 20 bp, synthetic construct
  misc_feature 1..20: note = chemically synthesized
  source 1..20: mol_type = other DNA
tgcagaaactttattttaat

SEQ ID NO: 7172 - DNA, 20 bp, synthetic construct
  misc_feature 1..20: note = chemically synthesized
  source 1..20: mol_type = other DNA
gcttttgctgcaatgactgt

SEQ ID NO: 7173 - DNA, 20 bp, synthetic construct
  misc_feature 1..20: note = chemically synthesized
  source 1..20: mol_type = other DNA
tctttgcccctgcttatgtc

SEQ ID NO: 7174 - DNA, 20 bp, synthetic construct
  misc_feature 1..20: note = chemically synthesized
  source 1..20: mol_type = other DNA
gcccctgcttatgtccggaa

SEQ ID NO: 7175 - DNA, 20 bp, synthetic construct
  misc_feature 1..20: note = chemically synthesized
  source 1..20: mol_type = other DNA
atgtccggaatggtattgcc

SEQ ID NO: 7176 - DNA, 20 bp, synthetic construct
  misc_feature 1..20: note = chemically synthesized
  source 1..20: mol_type = other DNA
tgtccggaatggtattgcct

SEQ ID NO: 7177 - DNA, 20 bp, synthetic construct
  misc_feature 1..20: note = chemically synthesized
  source 1..20: mol_type = other DNA
gtattgcctaggttgctttc

SEQ ID NO: 7178 - DNA, 20 bp, synthetic construct
  misc_feature 1..20: note = chemically synthesized
  source 1..20: mol_type = other DNA
gttgctttcaagcattttta

SEQ ID NO: 7179 - DNA, 20 bp, synthetic construct
  misc_feature 1..20: note = chemically synthesized
  source 1..20: mol_type = other DNA
tttcaagcatttttatagtt

SEQ ID NO: 7180 - DNA, 20 bp, synthetic construct
  misc_feature 1..20: note = chemically synthesized
  source 1..20: mol_type = other DNA
ttcaagcatttttatagttt

SEQ ID NO: 7181 - DNA, 20 bp, synthetic construct
  misc_feature 1..20: note = chemically synthesized
  source 1..20: mol_type = other DNA
atagtttgggttttgcattt

SEQ ID NO: 7182 - DNA, 20 bp, synthetic construct
  misc_feature 1..20: note = chemically synthesized
  source 1..20: mol_type = other DNA
ttaagtctctaatccatctt

SEQ ID NO: 7183 - DNA, 20 bp, synthetic construct
  misc_feature 1..20: note = chemically synthesized
  source 1..20: mol_type = other DNA
gtttatttgtgtatatgata

SEQ ID NO: 7184 - DNA, 20 bp, synthetic construct
  misc_feature 1..20: note = chemically synthesized
  source 1..20: mol_type = other DNA
tttgtgtatatgatatagaa

SEQ ID NO: 7185 - DNA, 20 bp, synthetic construct
  misc_feature 1..20: note = chemically synthesized
  source 1..20: mol_type = other DNA
ttgtgtatatgatatagaac

SEQ ID NO: 7186 - DNA, 20 bp, synthetic construct
  misc_feature 1..20: note = chemically synthesized
  source 1..20: mol_type = other DNA
tgtgtatatgatatagaacg

SEQ ID NO: 7187 - DNA, 20 bp, synthetic construct
  misc_feature 1..20: note = chemically synthesized
  source 1..20: mol_type = other DNA
atatgatatagaacggggtc

SEQ ID NO: 7188 - DNA, 20 bp, synthetic construct
  misc_feature 1..20: note = chemically synthesized
  source 1..20: mol_type = other DNA
tggtttcaatcttctacata

SEQ ID NO: 7189 - DNA, 20 bp, synthetic construct
  misc_feature 1..20: note = chemically synthesized
  source 1..20: mol_type = other DNA
ttcaatcttctacatacggt

SEQ ID NO: 7190 - DNA, 20 bp, synthetic construct
  misc_feature 1..20: note = chemically synthesized
  source 1..20: mol_type = other DNA
atcttctacatacggttagt

SEQ ID NO: 7191 - DNA, 20 bp, synthetic construct
  misc_feature 1..20: note = chemically synthesized
  source 1..20: mol_type = other DNA
tcccaacaccacttgttgaa

SEQ ID NO: 7192 - DNA, 20 bp, synthetic construct
  misc_feature 1..20: note = chemically synthesized
  source 1..20: mol_type = other DNA
cccaacaccacttgttgaat

SEQ ID NO: 7193 - DNA, 20 bp, synthetic construct
  misc_feature 1..20: note = chemically synthesized
  source 1..20: mol_type = other DNA
ccaacaccacttgttgaata

SEQ ID NO: 7194 - DNA, 20 bp, synthetic construct
  misc_feature 1..20: note = chemically synthesized
  source 1..20: mol_type = other DNA
tcctcattgcttgtttttat

SEQ ID NO: 7195 - DNA, 20 bp, synthetic construct
  misc_feature 1..20: note = chemically synthesized
  source 1..20: mol_type = other DNA
tgtttttatcagctttgtca

SEQ ID NO: 7196 - DNA, 20 bp, synthetic construct
  misc_feature 1..20: note = chemically synthesized
  source 1..20: mol_type = other DNA
ttatcagctttgtcaaagat

SEQ ID NO: 7197 - DNA, 20 bp, synthetic construct
  misc_feature 1..20: note = chemically synthesized
  source 1..20: mol_type = other DNA
cagctttgtcaaagatcaga

SEQ ID NO: 7198 - DNA, 20 bp, synthetic construct
  misc_feature 1..20: note = chemically synthesized
  source 1..20: mol_type = other DNA
tgtcaaagatcagatggttg

SEQ ID NO: 7199 - DNA, 20 bp, synthetic construct
  misc_feature 1..20: note = chemically synthesized
  source 1..20: mol_type = other DNA
gtcaaagatcagatggttgt

SEQ ID NO: 7200 - DNA, 20 bp, synthetic construct
  misc_feature 1..20: note = chemically synthesized
  source 1..20: mol_type = other DNA
atcagatggttgtaggcatg

SEQ ID NO: 7201 - DNA, 20 bp, synthetic construct
  misc_feature 1..20: note = chemically synthesized
  source 1..20: mol_type = other DNA
taggcatgtggtcttatttc

SEQ ID NO: 7202 - DNA, 20 bp, synthetic construct
  misc_feature 1..20: note = chemically synthesized
  source 1..20: mol_type = other DNA
aggcatgtggtcttatttct

SEQ ID NO: 7203 - DNA, 20 bp, synthetic construct
  misc_feature 1..20: note = chemically synthesized
  source 1..20: mol_type = other DNA
tctgtgtgtcttttctgtaa

SEQ ID NO: 7204 - DNA, 20 bp, synthetic construct
  misc_feature 1..20: note = chemically synthesized
  source 1..20: mol_type = other DNA
gtaacagtaccacactgttt

SEQ ID NO: 7205 - DNA, 20 bp, synthetic construct
  misc_feature 1..20: note = chemically synthesized
  source 1..20: mol_type = other DNA
ccacactgttttggttactg

SEQ ID NO: 7206 - DNA, 20 bp, synthetic construct
  misc_feature 1..20: note = chemically synthesized
  source 1..20: mol_type = other DNA
ttttggttactgtagccctg

SEQ ID NO: 7207 - DNA, 20 bp, synthetic construct
  misc_feature 1..20: note = chemically synthesized
  source 1..20: mol_type = other DNA
gttactgtagccctgtggta

SEQ ID NO: 7208 - DNA, 20 bp, synthetic construct
  misc_feature 1..20: note = chemically synthesized
  source 1..20: mol_type = other DNA
tagccctgtggtatggtttg

SEQ ID NO: 7209 - DNA, 20 bp, synthetic construct
  misc_feature 1..20: note = chemically synthesized
  source 1..20: mol_type = other DNA
cctgtggtatggtttgaagt

SEQ ID NO: 7210 - DNA, 20 bp, synthetic construct
  misc_feature 1..20: note = chemically synthesized
  source 1..20: mol_type = other DNA
ctgtggtatggtttgaagtt

SEQ ID NO: 7211 - DNA, 20 bp, synthetic construct
  misc_feature 1..20: note = chemically synthesized
  source 1..20: mol_type = other DNA
gttaggcaatgtattatctc

SEQ ID NO: 7212 - DNA, 20 bp, synthetic construct
  misc_feature 1..20: note = chemically synthesized
  source 1..20: mol_type = other DNA
tttttttttttttgtactct

SEQ ID NO: 7213 - DNA, 20 bp, synthetic construct
  misc_feature 1..20: note = chemically synthesized
  source 1..20: mol_type = other DNA
tttttgtactctaagttcta

SEQ ID NO: 7214 - DNA, 20 bp, synthetic construct
  misc_feature 1..20: note = chemically synthesized
  source 1..20: mol_type = other DNA
taagttctacggtacctgtg

SEQ ID NO: 7215 - DNA, 20 bp, synthetic construct
  misc_feature 1..20: note = chemically synthesized
  source 1..20: mol_type = other DNA
tatgtatacgtgtgccatat

SEQ ID NO: 7216 - DNA, 20 bp, synthetic construct
  misc_feature 1..20: note = chemically synthesized
  source 1..20: mol_type = other DNA
cgttaactcgtcatttacat

SEQ ID NO: 7217 - DNA, 20 bp, synthetic construct
  misc_feature 1..20: note = chemically synthesized
  source 1..20: mol_type = other DNA
tctctcctaccaccccacga

SEQ ID NO: 7218 - DNA, 20 bp, synthetic construct
  misc_feature 1..20: note = chemically synthesized
  source 1..20: mol_type = other DNA
ctctcctaccaccccacgac

SEQ ID NO: 7219 - DNA, 20 bp, synthetic construct
  misc_feature 1..20: note = chemically synthesized
  source 1..20: mol_type = other DNA
taccaccccacgacaggccc

SEQ ID NO: 7220 - DNA, 20 bp, synthetic construct
  misc_feature 1..20: note = chemically synthesized
  source 1..20: mol_type = other DNA
atgttccccaccctgtgtcc

SEQ ID NO: 7221 - DNA, 20 bp, synthetic construct
  misc_feature 1..20: note = chemically synthesized
  source 1..20: mol_type = other DNA
atttttcaattcccacctgt

SEQ ID NO: 7222 - DNA, 20 bp, synthetic construct
  misc_feature 1..20: note = chemically synthesized
  source 1..20: mol_type = other DNA
caattcccacctgtgagtat

SEQ ID NO: 7223 - DNA, 20 bp, synthetic construct
  misc_feature 1..20: note = chemically synthesized
  source 1..20: mol_type = other DNA
aattcccacctgtgagtatt

SEQ ID NO: 7224 - DNA, 20 bp, synthetic construct
  misc_feature 1..20: note = chemically synthesized
  source 1..20: mol_type = other DNA
ctgtgagtattaggatttcc

SEQ ID NO: 7225 - DNA, 20 bp, synthetic construct
  misc_feature 1..20: note = chemically synthesized
  source 1..20: mol_type = other DNA
tgtgagtattaggatttcct

SEQ ID NO: 7226 - DNA, 20 bp, synthetic construct
  misc_feature 1..20: note = chemically synthesized
  source 1..20: mol_type = other DNA
ttaggatttcctaggctatt

SEQ ID NO: 7227 - DNA, 20 bp, synthetic construct
  misc_feature 1..20: note = chemically synthesized
  source 1..20: mol_type = other DNA
gttgttccatatgaacttta

SEQ ID NO: 7228 - DNA, 20 bp, synthetic construct
  misc_feature 1..20: note = chemically synthesized
  source 1..20: mol_type = other DNA
aactttaaagtgtatttttc

SEQ ID NO: 7229 - DNA, 20 bp, synthetic construct
  misc_feature 1..20: note = chemically synthesized
  source 1..20: mol_type = other DNA
tgtatttttctagttctgtg

SEQ ID NO: 7230 - DNA, 20 bp, synthetic construct
  misc_feature 1..20: note = chemically synthesized
  source 1..20: mol_type = other DNA
agttctgtgaagaatgtcat

SEQ ID NO: 7231 - DNA, 20 bp, synthetic construct
  misc_feature 1..20: note = chemically synthesized
  source 1..20: mol_type = other DNA
tctgtgaagaatgtcattgg

SEQ ID NO: 7232 - DNA, 20 bp, synthetic construct
  misc_feature 1..20: note = chemically synthesized
  source 1..20: mol_type = other DNA
gaatgtcattggtagtttga

SEQ ID NO: 7233 - DNA, 20 bp, synthetic construct
  misc_feature 1..20: note = chemically synthesized
  source 1..20: mol_type = other DNA
aatgtcattggtagtttgat

SEQ ID NO: 7234 - DNA, 20 bp, synthetic construct
  misc_feature 1..20: note = chemically synthesized
  source 1..20: mol_type = other DNA
cattggtagtttgataggaa

SEQ ID NO: 7235 - DNA, 20 bp, synthetic construct
  misc_feature 1..20: note = chemically synthesized
  source 1..20: mol_type = other DNA
tttgaaactgtaaattgctc

SEQ ID NO: 7236 - DNA, 20 bp, synthetic construct
  misc_feature 1..20: note = chemically synthesized
  source 1..20: mol_type = other DNA
ttgaaactgtaaattgctct

SEQ ID NO: 7237 - DNA, 20 bp, synthetic construct
  misc_feature 1..20: note = chemically synthesized
  source 1..20: mol_type = other DNA
aaactgtaaattgctctagg

SEQ ID NO: 7238 - DNA, 20 bp, synthetic construct
  misc_feature 1..20: note = chemically synthesized
  source 1..20: mol_type = other DNA
gtaaattgctctaggcagta

SEQ ID NO: 7239 - DNA, 20 bp, synthetic construct
  misc_feature 1..20: note = chemically synthesized
  source 1..20: mol_type = other DNA
tattgattctttttatccat

SEQ ID NO: 7240 - DNA, 20 bp, synthetic construct
  misc_feature 1..20: note = chemically synthesized
  source 1..20: mol_type = other DNA
attctttttatccatgagca

SEQ ID NO: 7241 - DNA, 20 bp, synthetic construct
  misc_feature 1..20: note = chemically synthesized
  source 1..20: mol_type = other DNA
tttttatccatgagcatgga

SEQ ID NO: 7242 - DNA, 20 bp, synthetic construct
  misc_feature 1..20: note = chemically synthesized
  source 1..20: mol_type = other DNA
gtttttccatttgtttctat

SEQ ID NO: 7243 - DNA, 20 bp, synthetic construct
  misc_feature 1..20: note = chemically synthesized
  source 1..20: mol_type = other DNA
ctatcagctctgatttcttt

SEQ ID NO: 7244 - DNA, 20 bp, synthetic construct
  misc_feature 1..20: note = chemically synthesized
  source 1..20: mol_type = other DNA
tcagctctgatttctttgag

SEQ ID NO: 7245 - DNA, 20 bp, synthetic construct
  misc_feature 1..20: note = chemically synthesized
  source 1..20: mol_type = other DNA
gtgttttgtaaatctcattg

SEQ ID NO: 7246 - DNA, 20 bp, synthetic construct
  misc_feature 1..20: note = chemically synthesized
  source 1..20: mol_type = other DNA
gttttgtaaatctcattgta

SEQ ID NO: 7247 - DNA, 20 bp, synthetic construct
  misc_feature 1..20: note = chemically synthesized
  source 1..20: mol_type = other DNA
gtagagatctttcaactgct

SEQ ID NO: 7248 - DNA, 20 bp, synthetic construct
  misc_feature 1..20: note = chemically synthesized
  source 1..20: mol_type = other DNA
agatctttcaactgcttggt

SEQ ID NO: 7249 - DNA, 20 bp, synthetic construct
  misc_feature 1..20: note = chemically synthesized
  source 1..20: mol_type = other DNA
tgcttggttagatatatcct

SEQ ID NO: 7250 - DNA, 20 bp, synthetic construct
  misc_feature 1..20: note = chemically synthesized
  source 1..20: mol_type = other DNA
gcttggttagatatatcctt

SEQ ID NO: 7251 - DNA, 20 bp, synthetic construct
  misc_feature 1..20: note = chemically synthesized
  source 1..20: mol_type = other DNA
taggtattttattctttttg

SEQ ID NO: 7252 - DNA, 20 bp, synthetic construct
  misc_feature 1..20: note = chemically synthesized
  source 1..20: mol_type = other DNA
ttttattctttttgtggcaa

SEQ ID NO: 7253 - DNA, 20 bp, synthetic construct
  misc_feature 1..20: note = chemically synthesized
  source 1..20: mol_type = other DNA
ctttttgtggcaacggtaaa

SEQ ID NO: 7254 - DNA, 20 bp, synthetic construct
  misc_feature 1..20: note = chemically synthesized
  source 1..20: mol_type = other DNA
tttttgtggcaacggtaaat

SEQ ID NO: 7255 - DNA, 20 bp, synthetic construct
  misc_feature 1..20: note = chemically synthesized
  source 1..20: mol_type = other DNA
atgggattgacttcctgatt

SEQ ID NO: 7256 - DNA, 20 bp, synthetic construct
  misc_feature 1..20: note = chemically synthesized
  source 1..20: mol_type = other DNA
ttgacttcctgatttggctc

SEQ ID NO: 7257 - DNA, 20 bp, synthetic construct
  misc_feature 1..20: note = chemically synthesized
  source 1..20: mol_type = other DNA
tgacttcctgatttggctct

SEQ ID NO: 7258 - DNA, 20 bp, synthetic construct
  misc_feature 1..20: note = chemically synthesized
  source 1..20: mol_type = other DNA
tcctgatttggctctaggct

SEQ ID NO: 7259 - DNA, 20 bp, synthetic construct
  misc_feature 1..20: note = chemically synthesized
  source 1..20: mol_type = other DNA
gcttggctattgttgatgta

SEQ ID NO: 7260 - DNA, 20 bp, synthetic construct
  misc_feature 1..20: note = chemically synthesized
  source 1..20: mol_type = other DNA
cttggctattgttgatgtat

SEQ ID NO: 7261 - DNA, 20 bp, synthetic construct
  misc_feature 1..20: note = chemically synthesized
  source 1..20: mol_type = other DNA
ttgttgatgtatgggaatgc

SEQ ID NO: 7262 - DNA, 20 bp, synthetic construct
  misc_feature 1..20: note = chemically synthesized
  source 1..20: mol_type = other DNA
tatatcctgaaactttgctg

SEQ ID NO: 7263 - DNA, 20 bp, synthetic construct
  misc_feature 1..20: note = chemically synthesized
  source 1..20: mol_type = other DNA
tgaaactttgctgaagttat

SEQ ID NO: 7264 - DNA, 20 bp, synthetic construct
  misc_feature 1..20: note = chemically synthesized
  source 1..20: mol_type = other DNA
tttgctgaagttatcagctg

SEQ ID NO: 7265 - DNA, 20 bp, synthetic construct
  misc_feature 1..20: note = chemically synthesized
  source 1..20: mol_type = other DNA
ttgctgaagttatcagctga

SEQ ID NO: 7266 - DNA, 20 bp, synthetic construct
  misc_feature 1..20: note = chemically synthesized
  source 1..20: mol_type = other DNA
gctgaagttatcagctgaag

SEQ ID NO: 7267 - DNA, 20 bp, synthetic construct
  misc_feature 1..20: note = chemically synthesized
  source 1..20: mol_type = other DNA
ttatcagctgaaggagcttt

SEQ ID NO: 7268 - DNA, 20 bp, synthetic construct
  misc_feature 1..20: note = chemically synthesized
  source 1..20: mol_type = other DNA
tatcagctgaaggagctttt

SEQ ID NO: 7269 - DNA, 20 bp, synthetic construct
  misc_feature 1..20: note = chemically synthesized
  source 1..20: mol_type = other DNA
gagcttttgggccttgacta

SEQ ID NO: 7270 - DNA, 20 bp, synthetic construct
  misc_feature 1..20: note = chemically synthesized
  source 1..20: mol_type = other DNA
gccttgactatggtgttttc

SEQ ID NO: 7271 - DNA, 20 bp, synthetic construct
  misc_feature 1..20: note = chemically synthesized
  source 1..20: mol_type = other DNA
actatggtgttttctagata

SEQ ID NO: 7272 - DNA, 20 bp, synthetic construct
  misc_feature 1..20: note = chemically synthesized
  source 1..20: mol_type = other DNA
tgttttctagatacagaaaa

SEQ ID NO: 7273 - DNA, 20 bp, synthetic construct
  misc_feature 1..20: note = chemically synthesized
  source 1..20: mol_type = other DNA
gttttctagatacagaaaac

SEQ ID NO: 7274 - DNA, 20 bp, synthetic construct
  misc_feature 1..20: note = chemically synthesized
  source 1..20: mol_type = other DNA
ttttctagatacagaaaaca

SEQ ID NO: 7275 - DNA, 20 bp, synthetic construct
  misc_feature 1..20: note = chemically synthesized
  source 1..20: mol_type = other DNA
tgactttctctcttcctatt

SEQ ID NO: 7276 - DNA, 20 bp, synthetic construct
  misc_feature 1..20: note = chemically synthesized
  source 1..20: mol_type = other DNA
cttctcttgcctgattgctc

SEQ ID NO: 7277 - DNA, 20 bp, synthetic construct
  misc_feature 1..20: note = chemically synthesized
  source 1..20: mol_type = other DNA
tcttgcctgattgctctggc

SEQ ID NO: 7278 - DNA, 20 bp, synthetic construct
  misc_feature 1..20: note = chemically synthesized
  source 1..20: mol_type = other DNA
cttgcctgattgctctggcc

SEQ ID NO: 7279 - DNA, 20 bp, synthetic construct
  misc_feature 1..20: note = chemically synthesized
  source 1..20: mol_type = other DNA
attgctctggccaggactgc

SEQ ID NO: 7280 - DNA, 20 bp, synthetic construct
  misc_feature 1..20: note = chemically synthesized
  source 1..20: mol_type = other DNA
actgccagtactatactgaa

SEQ ID NO: 7281 - DNA, 20 bp, synthetic construct
  misc_feature 1..20: note = chemically synthesized
  source 1..20: mol_type = other DNA
gccagtactatactgaatag

SEQ ID NO: 7282 - DNA, 20 bp, synthetic construct
  misc_feature 1..20: note = chemically synthesized
  source 1..20: mol_type = other DNA
agtactatactgaatagcag

SEQ ID NO: 7283 - DNA, 20 bp, synthetic construct
  misc_feature 1..20: note = chemically synthesized
  source 1..20: mol_type = other DNA
ctatactgaatagcagtggt

SEQ ID NO: 7284 - DNA, 20 bp, synthetic construct
  misc_feature 1..20: note = chemically synthesized
  source 1..20: mol_type = other DNA
atactgaatagcagtggtga

SEQ ID NO: 7285 - DNA, 20 bp, synthetic construct
  misc_feature 1..20: note = chemically synthesized
  source 1..20: mol_type = other DNA
actgaatagcagtggtgaga

SEQ ID NO: 7286 - DNA, 20 bp, synthetic construct
  misc_feature 1..20: note = chemically synthesized
  source 1..20: mol_type = other DNA
ctgaatagcagtggtgagag

SEQ ID NO: 7287 - DNA, 20 bp, synthetic construct
  misc_feature 1..20: note = chemically synthesized
  source 1..20: mol_type = other DNA
tgaatagcagtggtgagaga

SEQ ID NO: 7288 - DNA, 20 bp, synthetic construct
  misc_feature 1..20: note = chemically synthesized
  source 1..20: mol_type = other DNA
agggcatccttgtcttgtgc

SEQ ID NO: 7289 - DNA, 20 bp, synthetic construct
  misc_feature 1..20: note = chemically synthesized
  source 1..20: mol_type = other DNA
cttgtcttgtgccagttttc

SEQ ID NO: 7290 - DNA, 20 bp, synthetic construct
  misc_feature 1..20: note = chemically synthesized
  source 1..20: mol_type = other DNA
gtcttgtgccagttttcaag

SEQ ID NO: 7291 - DNA, 20 bp, synthetic construct
  misc_feature 1..20: note = chemically synthesized
  source 1..20: mol_type = other DNA
gttttcaagaagaatgcttc

SEQ ID NO: 7292 - DNA, 20 bp, synthetic construct
  misc_feature 1..20: note = chemically synthesized
  source 1..20: mol_type = other DNA
ttttcaagaagaatgcttcc

SEQ ID NO: 7293 - DNA, 20 bp, synthetic construct
  misc_feature 1..20: note = chemically synthesized
  source 1..20: mol_type = other DNA
ttgcccattctgtatgatgt

SEQ ID NO: 7294 - DNA, 20 bp, synthetic construct
  misc_feature 1..20: note = chemically synthesized
  source 1..20: mol_type = other DNA
attctgtatgatgttggctg

SEQ ID NO: 7295 - DNA, 20 bp, synthetic construct
  misc_feature 1..20: note = chemically synthesized
  source 1..20: mol_type = other DNA
ttctgtatgatgttggctgt

SEQ ID NO: 7296 - DNA, 20 bp, synthetic construct
  misc_feature 1..20: note = chemically synthesized
  source 1..20: mol_type = other DNA
tgttggctgtgggtttgtca

SEQ ID NO: 7297 - DNA, 20 bp, synthetic construct
  misc_feature 1..20: note = chemically synthesized
  source 1..20: mol_type = other DNA
ggctgtgggtttgtcataga

SEQ ID NO: 7298 - DNA, 20 bp, synthetic construct
  misc_feature 1..20: note = chemically synthesized
  source 1..20: mol_type = other DNA
tagatggctcatattatttt

SEQ ID NO: 7299 - DNA, 20 bp, synthetic construct
  misc_feature 1..20: note = chemically synthesized
  source 1..20: mol_type = other DNA
agatggctcatattattttg

SEQ ID NO: 7300 - DNA, 20 bp, synthetic construct
  misc_feature 1..20: note = chemically synthesized
  source 1..20: mol_type = other DNA
tttgaggtcatgtccttaaa

SEQ ID NO: 7301 - DNA, 20 bp, synthetic construct
  misc_feature 1..20: note = chemically synthesized
  source 1..20: mol_type = other DNA
aggtcatgtccttaaatagc

SEQ ID NO: 7302 - DNA, 20 bp, synthetic construct
  misc_feature 1..20: note = chemically synthesized
  source 1..20: mol_type = other DNA
ccttaaatagctagtttgtt

SEQ ID NO: 7303 - DNA, 20 bp, synthetic construct
  misc_feature 1..20: note = chemically synthesized
  source 1..20: mol_type = other DNA
ttaaatagctagtttgttga

SEQ ID NO: 7304 - DNA, 20 bp, synthetic construct
  misc_feature 1..20: note = chemically synthesized
  source 1..20: mol_type = other DNA
taaatagctagtttgttgag

SEQ ID NO: 7305 - DNA, 20 bp, synthetic construct
  misc_feature 1..20: note = chemically synthesized
  source 1..20: mol_type = other DNA
tgttgagaggttttaacatg

SEQ ID NO: 7306 - DNA, 20 bp, synthetic construct
  misc_feature 1..20: note = chemically synthesized
  source 1..20: mol_type = other DNA
agaggttttaacatgaagtg

SEQ ID NO: 7307 - DNA, 20 bp, synthetic construct
  misc_feature 1..20: note = chemically synthesized
  source 1..20: mol_type = other DNA
cacatattgaaatgatcatg

SEQ ID NO: 7308 - DNA, 20 bp, synthetic construct
  misc_feature 1..20: note = chemically synthesized
  source 1..20: mol_type = other DNA
gatcatgtggtttctgtttt

SEQ ID NO: 7309 - DNA, 20 bp, synthetic construct
  misc_feature 1..20: note = chemically synthesized
  source 1..20: mol_type = other DNA
gctgaaccaatcttgcttct

SEQ ID NO: 7310 - DNA, 20 bp, synthetic construct
  misc_feature 1..20: note = chemically synthesized
  source 1..20: mol_type = other DNA
ctgaaccaatcttgcttctc

SEQ ID NO: 7311 - DNA, 20 bp, synthetic construct
  misc_feature 1..20: note = chemically synthesized
  source 1..20: mol_type = other DNA
tgaaccaatcttgcttctca

SEQ ID NO: 7312 - DNA, 20 bp, synthetic construct
  misc_feature 1..20: note = chemically synthesized
  source 1..20: mol_type = other DNA
aatcttgcttctcagggata

SEQ ID NO: 7313 - DNA, 20 bp, synthetic construct
  misc_feature 1..20: note = chemically synthesized
  source 1..20: mol_type = other DNA
gggataaagcctacttgatt

SEQ ID NO: 7314 - DNA, 20 bp, synthetic construct
  misc_feature 1..20: note = chemically synthesized
  source 1..20: mol_type = other DNA
ggataaagcctacttgattg

SEQ ID NO: 7315 - DNA, 20 bp, synthetic construct
  misc_feature 1..20: note = chemically synthesized
  source 1..20: mol_type = other DNA
taaagcctacttgattgagg

SEQ ID NO: 7316 - DNA, 20 bp, synthetic construct
  misc_feature 1..20: note = chemically synthesized
  source 1..20: mol_type = other DNA
cctacttgattgaggtggat

SEQ ID NO: 7317 - DNA, 20 bp, synthetic construct
  misc_feature 1..20: note = chemically synthesized
  source 1..20: mol_type = other DNA
ttagctttgtgatgtgttgc

SEQ ID NO: 7318 - DNA, 20 bp, synthetic construct
  misc_feature 1..20: note = chemically synthesized
  source 1..20: mol_type = other DNA
ttgtgatgtgttgctggatt

SEQ ID NO: 7319 - DNA, 20 bp, synthetic construct
  misc_feature 1..20: note = chemically synthesized
  source 1..20: mol_type = other DNA
tgttgctggatttggcttgc

SEQ ID NO: 7320 - DNA, 20 bp, synthetic construct
  misc_feature 1..20: note = chemically synthesized
  source 1..20: mol_type = other DNA
gtatttttgcatcaatgttc

SEQ ID NO: 7321 - DNA, 20 bp, synthetic construct
  misc_feature 1..20: note = chemically synthesized
  source 1..20: mol_type = other DNA
tatttttgcatcaatgttca

SEQ ID NO: 7322 - DNA, 20 bp, synthetic construct
  misc_feature 1..20: note = chemically synthesized
  source 1..20: mol_type = other DNA
gcatcaatgttcaaggatat

SEQ ID NO: 7323 - DNA, 20 bp, synthetic construct
  misc_feature 1..20: note = chemically synthesized
  source 1..20: mol_type = other DNA
tgttcaaggatattggcctg

SEQ ID NO: 7324 - DNA, 20 bp, synthetic construct
  misc_feature 1..20: note = chemically synthesized
  source 1..20: mol_type = other DNA
ttttgttgttgtgtgtctat

SEQ ID NO: 7325 - DNA, 20 bp, synthetic construct
  misc_feature 1..20: note = chemically synthesized
  source 1..20: mol_type = other DNA
tttgttgttgtgtgtctatc

SEQ ID NO: 7326 - DNA, 20 bp, synthetic construct
  misc_feature 1..20: note = chemically synthesized
  source 1..20: mol_type = other DNA
gttgtgtgtctatcaggttt

SEQ ID NO: 7327 - DNA, 20 bp, synthetic construct
  misc_feature 1..20: note = chemically synthesized
  source 1..20: mol_type = other DNA
tgtctatcaggttttggtat

SEQ ID NO: 7328 - DNA, 20 bp, synthetic construct
  misc_feature 1..20: note = chemically synthesized
  source 1..20: mol_type = other DNA
gtctatcaggttttggtatc

SEQ ID NO: 7329 - DNA, 20 bp, synthetic construct
  misc_feature 1..20: note = chemically synthesized
  source 1..20: mol_type = other DNA
ttttggtatcaggatgatgc

SEQ ID NO: 7330 - DNA, 20 bp, synthetic construct
  misc_feature 1..20: note = chemically synthesized
  source 1..20: mol_type = other DNA
tgatgctggcctcataaaat

SEQ ID NO: 7331 - DNA, 20 bp, synthetic construct
  misc_feature 1..20: note = chemically synthesized
  source 1..20: mol_type = other DNA
ctggcctcataaaatgagct

SEQ ID NO: 7332 - DNA, 20 bp, synthetic construct
  misc_feature 1..20: note = chemically synthesized
  source 1..20: mol_type = other DNA
tggcctcataaaatgagctg

SEQ ID NO: 7333 - DNA, 20 bp, synthetic construct
  misc_feature 1..20: note = chemically synthesized
  source 1..20: mol_type = other DNA
atccctccccctcaattttt

SEQ ID NO: 7334 - DNA, 20 bp, synthetic construct
  misc_feature 1..20: note = chemically synthesized
  source 1..20: mol_type = other DNA
ccctccccctcaattttttg

SEQ ID NO: 7335 - DNA, 20 bp, synthetic construct
  misc_feature 1..20: note = chemically synthesized
  source 1..20: mol_type = other DNA
tccccctcaattttttggag

SEQ ID NO: 7336 - DNA, 20 bp, synthetic construct
  misc_feature 1..20: note = chemically synthesized
  source 1..20: mol_type = other DNA
tcaattttttggagtagctt

SEQ ID NO: 7337 - DNA, 20 bp, synthetic construct
  misc_feature 1..20: note = chemically synthesized
  source 1..20: mol_type = other DNA
attttttggagtagcttcag

SEQ ID NO: 7338 - DNA, 20 bp, synthetic construct
  misc_feature 1..20: note = chemically synthesized
  source 1..20: mol_type = other DNA
ttttttggagtagcttcagt

SEQ ID NO: 7339 - DNA, 20 bp, synthetic construct
  misc_feature 1..20: note = chemically synthesized
  source 1..20: mol_type = other DNA
actcttctttgtgcatctga

SEQ ID NO: 7340 - DNA, 20 bp, synthetic construct
  misc_feature 1..20: note = chemically synthesized
  source 1..20: mol_type = other DNA
tttgtgcatctgatagaatt

SEQ ID NO: 7341 - DNA, 20 bp, synthetic construct
  misc_feature 1..20: note = chemically synthesized
  source 1..20: mol_type = other DNA
tggttgtgaatcatattgtc

SEQ ID NO: 7342 - DNA, 20 bp, synthetic construct
  misc_feature 1..20: note = chemically synthesized
  source 1..20: mol_type = other DNA
ggttgtgaatcatattgtcc

SEQ ID NO: 7343 - DNA, 20 bp, synthetic construct
  misc_feature 1..20: note = chemically synthesized
  source 1..20: mol_type = other DNA
gttgtgaatcatattgtcca

SEQ ID NO: 7344 - DNA, 20 bp, synthetic construct
  misc_feature 1..20: note = chemically synthesized
  source 1..20: mol_type = other DNA
ccagggctttttttgtttga

SEQ ID NO: 7345 - DNA, 20 bp, synthetic construct
  misc_feature 1..20: note = chemically synthesized
  source 1..20: mol_type = other DNA
cagggctttttttgtttgat

SEQ ID NO: 7346 - DNA, 20 bp, synthetic construct
  misc_feature 1..20: note = chemically synthesized
  source 1..20: mol_type = other DNA
atttattactgaatcatttt

SEQ ID NO: 7347 - DNA, 20 bp, synthetic construct
  misc_feature 1..20: note = chemically synthesized
  source 1..20: mol_type = other DNA
ttattactgaatcattttca

SEQ ID NO: 7348 - DNA, 20 bp, synthetic construct
  misc_feature 1..20: note = chemically synthesized
  source 1..20: mol_type = other DNA
atcattttcagagctcatca

SEQ ID NO: 7349 - DNA, 20 bp, synthetic construct
  misc_feature 1..20: note = chemically synthesized
  source 1..20: mol_type = other DNA
gagctcatcatggatctctt

SEQ ID NO: 7350 - DNA, 20 bp, synthetic construct
  misc_feature 1..20: note = chemically synthesized
  source 1..20: mol_type = other DNA
agctcatcatggatctcttc

SEQ ID NO: 7351 - DNA, 20 bp, synthetic construct
  misc_feature 1..20: note = chemically synthesized
  source 1..20: mol_type = other DNA
tcaggaaattgatttcttcc

SEQ ID NO: 7352 - DNA, 20 bp, synthetic construct
  misc_feature 1..20: note = chemically synthesized
  source 1..20: mol_type = other DNA
aaattgatttcttcctggtt

SEQ ID NO: 7353 - DNA, 20 bp, synthetic construct
  misc_feature 1..20: note = chemically synthesized
  source 1..20: mol_type = other DNA
atttcttcctggttcagcct

SEQ ID NO: 7354 - DNA, 20 bp, synthetic construct
  misc_feature 1..20: note = chemically synthesized
  source 1..20: mol_type = other DNA
tttcttcctggttcagcctt

SEQ ID NO: 7355 - DNA, 20 bp, synthetic construct
  misc_feature 1..20: note = chemically synthesized
  source 1..20: mol_type = other DNA
tcttcctggttcagccttgg

SEQ ID NO: 7356 - DNA, 20 bp, synthetic construct
  misc_feature 1..20: note = chemically synthesized
  source 1..20: mol_type = other DNA
cttcctggttcagccttggg

SEQ ID NO: 7357 - DNA, 20 bp, synthetic construct
  misc_feature 1..20: note = chemically synthesized
  source 1..20: mol_type = other DNA
ggaggacctaaaacaatcct

SEQ ID NO: 7358 - DNA, 20 bp, synthetic construct
  misc_feature 1..20: note = chemically synthesized
  source 1..20: mol_type = other DNA
aaaatcatatcaatcactct

SEQ ID NO: 7359 - DNA, 20 bp, synthetic construct
  misc_feature 1..20: note = chemically synthesized
  source 1..20: mol_type = other DNA
tatcaatcactctcagacca

SEQ ID NO: 7360 - DNA, 20 bp, synthetic construct
  misc_feature 1..20: note = chemically synthesized
  source 1..20: mol_type = other DNA
tcaatcactctcagaccaca

SEQ ID NO: 7361 - DNA, 20 bp, synthetic construct
  misc_feature 1..20: note = chemically synthesized
  source 1..20: mol_type = other DNA
caatcactctcagaccacag

SEQ ID NO: 7362 - DNA, 20 bp, synthetic construct
  misc_feature 1..20: note = chemically synthesized
  source 1..20: mol_type = other DNA
agaccacagaggaataaaaa

SEQ ID NO: 7363 - DNA, 20 bp, synthetic construct
  misc_feature 1..20: note = chemically synthesized
  source 1..20: mol_type = other DNA
gaggaataaaaatagatttc

SEQ ID NO: 7364 - DNA, 20 bp, synthetic construct
  misc_feature 1..20: note = chemically synthesized
  source 1..20: mol_type = other DNA
tagatttcaagactaatgaa

SEQ ID NO: 7365 - DNA, 20 bp, synthetic construct
  misc_feature 1..20: note = chemically synthesized
  source 1..20: mol_type = other DNA
ctgaaaactatgcaattaca

SEQ ID NO: 7366 - DNA, 20 bp, synthetic construct
  misc_feature 1..20: note = chemically synthesized
  source 1..20: mol_type = other DNA
acctgctcctgaatgaattt

SEQ ID NO: 7367 - DNA, 20 bp, synthetic construct
  misc_feature 1..20: note = chemically synthesized
  source 1..20: mol_type = other DNA
cctgctcctgaatgaatttt

SEQ ID NO: 7368 - DNA, 20 bp, synthetic construct
  misc_feature 1..20: note = chemically synthesized
  source 1..20: mol_type = other DNA
ttgggtaaataatgaaaact

SEQ ID NO: 7369 - DNA, 20 bp, synthetic construct
  misc_feature 1..20: note = chemically synthesized
  source 1..20: mol_type = other DNA
tgggtaaataatgaaaacta

SEQ ID NO: 7370 - DNA, 20 bp, synthetic construct
  misc_feature 1..20: note = chemically synthesized
  source 1..20: mol_type = other DNA
aaactaaggcaaaaataaaa

SEQ ID NO: 7371 - DNA, 20 bp, synthetic construct
  misc_feature 1..20: note = chemically synthesized
  source 1..20: mol_type = other DNA
aatagttctttgaaactaat

SEQ ID NO: 7372 - DNA, 20 bp, synthetic construct
  misc_feature 1..20: note = chemically synthesized
  source 1..20: mol_type = other DNA
ctttgaaactaatgagaaca

SEQ ID NO: 7373 - DNA, 20 bp, synthetic construct
  misc_feature 1..20: note = chemically synthesized
  source 1..20: mol_type = other DNA
agaacaaagatacaatatac

SEQ ID NO: 7374 - DNA, 20 bp, synthetic construct
  misc_feature 1..20: note = chemically synthesized
  source 1..20: mol_type = other DNA
atacaatataccggaatctc

SEQ ID NO: 7375 - DNA, 20 bp, synthetic construct
  misc_feature 1..20: note = chemically synthesized
  source 1..20: mol_type = other DNA
tacaatataccggaatctct

SEQ ID NO: 7376 - DNA, 20 bp, synthetic construct
  misc_feature 1..20: note = chemically synthesized
  source 1..20: mol_type = other DNA
ataccggaatctctgggaca

SEQ ID NO: 7377 - DNA, 20 bp, synthetic construct
  misc_feature 1..20: note = chemically synthesized
  source 1..20: mol_type = other DNA
ggaatctctgggacacagct

SEQ ID NO: 7378 - DNA, 20 bp, synthetic construct
  misc_feature 1..20: note = chemically synthesized
  source 1..20: mol_type = other DNA
tctctgggacacagcttaga

SEQ ID NO: 7379 - DNA, 20 bp, synthetic construct
  misc_feature 1..20: note = chemically synthesized
  source 1..20: mol_type = other DNA
gacacagcttagacagtgtt

SEQ ID NO: 7380 - DNA, 20 bp, synthetic construct
  misc_feature 1..20: note = chemically synthesized
  source 1..20: mol_type = other DNA
cacagcttagacagtgttaa

SEQ ID NO: 7381 - DNA, 20 bp, synthetic construct
  misc_feature 1..20: note = chemically synthesized
  source 1..20: mol_type = other DNA
cagcttagacagtgttaaga

SEQ ID NO: 7382 - DNA, 20 bp, synthetic construct
  misc_feature 1..20: note = chemically synthesized
  source 1..20: mol_type = other DNA
cactaaatgcccacatcaaa

SEQ ID NO: 7383 - DNA, 20 bp, synthetic construct
  misc_feature 1..20: note = chemically synthesized
  source 1..20: mol_type = other DNA
gcccacatcaaaaagtctta

SEQ ID NO: 7384 - DNA, 20 bp, synthetic construct
  misc_feature 1..20: note = chemically synthesized
  source 1..20: mol_type = other DNA
caacctaatgtcacaactaa

SEQ ID NO: 7385 - DNA, 20 bp, synthetic construct
  misc_feature 1..20: note = chemically synthesized
  source 1..20: mol_type = other DNA
aatgtcacaactaaaagaac

SEQ ID NO: 7386 - DNA, 20 bp, synthetic construct
  misc_feature 1..20: note = chemically synthesized
  source 1..20: mol_type = other DNA
tgtcacaactaaaagaacca

SEQ ID NO: 7387 - DNA, 20 bp, synthetic construct
  misc_feature 1..20: note = chemically synthesized
  source 1..20: mol_type = other DNA
actaaaagaaccagagaacc

SEQ ID NO: 7388 - DNA, 20 bp, synthetic construct
  misc_feature 1..20: note = chemically synthesized
  source 1..20: mol_type = other DNA
taaaagaaccagagaaccaa

SEQ ID NO: 7389 - DNA, 20 bp, synthetic construct
  misc_feature 1..20: note = chemically synthesized
  source 1..20: mol_type = other DNA
gagcaaaccaaccctaaatc

SEQ ID NO: 7390 - DNA, 20 bp, synthetic construct
  misc_feature 1..20: note = chemically synthesized
  source 1..20: mol_type = other DNA
caaaccaaccctaaatctag

SEQ ID NO: 7391 - DNA, 20 bp, synthetic construct
  misc_feature 1..20: note = chemically synthesized
  source 1..20: mol_type = other DNA
accaaccctaaatctagcag

SEQ ID NO: 7392 - DNA, 20 bp, synthetic construct
  misc_feature 1..20: note = chemically synthesized
  source 1..20: mol_type = other DNA
ccctaaatctagcagaagac

SEQ ID NO: 7393 - DNA, 20 bp, synthetic construct
  misc_feature 1..20: note = chemically synthesized
  source 1..20: mol_type = other DNA
gcagaagacaagaaataaac

SEQ ID NO: 7394 - DNA, 20 bp, synthetic construct
  misc_feature 1..20: note = chemically synthesized
  source 1..20: mol_type = other DNA
acaagaaataaacaagatca

SEQ ID NO: 7395 - DNA, 20 bp, synthetic construct
  misc_feature 1..20: note = chemically synthesized
  source 1..20: mol_type = other DNA
aacaagatcaaagctaactg

SEQ ID NO: 7396 - DNA, 20 bp, synthetic construct
  misc_feature 1..20: note = chemically synthesized
  source 1..20: mol_type = other DNA
acaagatcaaagctaactga

SEQ ID NO: 7397 - DNA, 20 bp, synthetic construct
  misc_feature 1..20: note = chemically synthesized
  source 1..20: mol_type = other DNA
aaacacaaaataccattcaa

SEQ ID NO: 7398 - DNA, 20 bp, synthetic construct
  misc_feature 1..20: note = chemically synthesized
  source 1..20: mol_type = other DNA
ataccattcaaaagattaat

SEQ ID NO: 7399 - DNA, 20 bp, synthetic construct
  misc_feature 1..20: note = chemically synthesized
  source 1..20: mol_type = other DNA
ttcaaaagattaatgagtcc

SEQ ID NO: 7400 - DNA, 20 bp, synthetic construct
  misc_feature 1..20: note = chemically synthesized
  source 1..20: mol_type = other DNA
caaaagattaatgagtccaa

SEQ ID NO: 7401 - DNA, 20 bp, synthetic construct
  misc_feature 1..20: note = chemically synthesized
  source 1..20: mol_type = other DNA
agattaatgagtccaagagc

SEQ ID NO: 7402 - DNA, 20 bp, synthetic construct
  misc_feature 1..20: note = chemically synthesized
  source 1..20: mol_type = other DNA
ggttttgtgaaaaaattaat

SEQ ID NO: 7403 - DNA, 20 bp, synthetic construct
  misc_feature 1..20: note = chemically synthesized
  source 1..20: mol_type = other DNA
gttttgtgaaaaaattaata

SEQ ID NO: 7404 - DNA, 20 bp, synthetic construct
  misc_feature 1..20: note = chemically synthesized
  source 1..20: mol_type = other DNA
ttgtgaaaaaattaataagg

SEQ ID NO: 7405 - DNA, 20 bp, synthetic construct
  misc_feature 1..20: note = chemically synthesized
  source 1..20: mol_type = other DNA
aaattaataaggtagatcac

SEQ ID NO: 7406 - DNA, 20 bp, synthetic construct
  misc_feature 1..20: note = chemically synthesized
  source 1..20: mol_type = other DNA
taataaggtagatcactagc

SEQ ID NO: 7407 - DNA, 20 bp, synthetic construct
  misc_feature 1..20: note = chemically synthesized
  source 1..20: mol_type = other DNA
gatcactagctagactaata

SEQ ID NO: 7408 - DNA, 20 bp, synthetic construct
  misc_feature 1..20: note = chemically synthesized
  source 1..20: mol_type = other DNA
cactagctagactaataaag

SEQ ID NO: 7409 - DNA, 20 bp, synthetic construct
  misc_feature 1..20: note = chemically synthesized
  source 1..20: mol_type = other DNA
gctagactaataaagaagac

SEQ ID NO: 7410 - DNA, 20 bp, synthetic construct
  misc_feature 1..20: note = chemically synthesized
  source 1..20: mol_type = other DNA
tagactaataaagaagacaa

SEQ ID NO: 7411 - DNA, 20 bp, synthetic construct
  misc_feature 1..20: note = chemically synthesized
  source 1..20: mol_type = other DNA
gactaataaagaagacaaga

SEQ ID NO: 7412 - DNA, 20 bp, synthetic construct
  misc_feature 1..20: note = chemically synthesized
  source 1..20: mol_type = other DNA
taataaagaagacaagagag

SEQ ID NO: 7413 - DNA, 20 bp, synthetic construct
  misc_feature 1..20: note = chemically synthesized
  source 1..20: mol_type = other DNA
acaagagagaagatccaaat

SEQ ID NO: 7414 - DNA, 20 bp, synthetic construct
  misc_feature 1..20: note = chemically synthesized
  source 1..20: mol_type = other DNA
agagaagatccaaataagca

SEQ ID NO: 7415 - DNA, 20 bp, synthetic construct
  misc_feature 1..20: note = chemically synthesized
  source 1..20: mol_type = other DNA
aagatccaaataagcacagt

SEQ ID NO: 7416 - DNA, 20 bp, synthetic construct
  misc_feature 1..20: note = chemically synthesized
  source 1..20: mol_type = other DNA
aagcacagttagaaatgaaa

SEQ ID NO: 7417 - DNA, 20 bp, synthetic construct
  misc_feature 1..20: note = chemically synthesized
  source 1..20: mol_type = other DNA
agcacagttagaaatgaaaa

SEQ ID NO: 7418 - DNA, 20 bp, synthetic construct
  misc_feature 1..20: note = chemically synthesized
  source 1..20: mol_type = other DNA
gcacagttagaaatgaaaaa

SEQ ID NO: 7419 - DNA, 20 bp, synthetic construct
  misc_feature 1..20: note = chemically synthesized
  source 1..20: mol_type = other DNA
gaatattatcactcacccca

SEQ ID NO: 7420 - DNA, 20 bp, synthetic construct
  misc_feature 1..20: note = chemically synthesized
  source 1..20: mol_type = other DNA
acatctctatgtacataaac

SEQ ID NO: 7421 - DNA, 20 bp, synthetic construct
  misc_feature 1..20: note = chemically synthesized
  source 1..20: mol_type = other DNA
acataaactagaaaatctaa

SEQ ID NO: 7422 - DNA, 20 bp, synthetic construct
  misc_feature 1..20: note = chemically synthesized
  source 1..20: mol_type = other DNA
actagaaaatctaaaagaaa

SEQ ID NO: 7423 - DNA, 20 bp, synthetic construct
  misc_feature 1..20: note = chemically synthesized
  source 1..20: mol_type = other DNA
aaaagaaatggataacttcc

SEQ ID NO: 7424 - DNA, 20 bp, synthetic construct
  misc_feature 1..20: note = chemically synthesized
  source 1..20: mol_type = other DNA
tcctggactgctcattgtct

SEQ ID NO: 7425 - DNA, 20 bp, synthetic construct
  misc_feature 1..20: note = chemically synthesized
  source 1..20: mol_type = other DNA
cctggactgctcattgtctt

SEQ ID NO: 7426 - DNA, 20 bp, synthetic construct
  misc_feature 1..20: note = chemically synthesized
  source 1..20: mol_type = other DNA
actgctcattgtcttaggca

SEQ ID NO: 7427 - DNA, 20 bp, synthetic construct
  misc_feature 1..20: note = chemically synthesized
  source 1..20: mol_type = other DNA
gctcattgtcttaggcaaag

SEQ ID NO: 7428 - DNA, 20 bp, synthetic construct
  misc_feature 1..20: note = chemically synthesized
  source 1..20: mol_type = other DNA
ttgtcttaggcaaagaagac

SEQ ID NO: 7429 - DNA, 20 bp, synthetic construct
  misc_feature 1..20: note = chemically synthesized
  source 1..20: mol_type = other DNA
agactagccgtactttattt

SEQ ID NO: 7430 - DNA, 20 bp, synthetic construct
  misc_feature 1..20: note = chemically synthesized
  source 1..20: mol_type = other DNA
gactagccgtactttatttg

SEQ ID NO: 7431 - DNA, 20 bp, synthetic construct
  misc_feature 1..20: note = chemically synthesized
  source 1..20: mol_type = other DNA
actagccgtactttatttga

SEQ ID NO: 7432 - DNA, 20 bp, synthetic construct
  misc_feature 1..20: note = chemically synthesized
  source 1..20: mol_type = other DNA
actttatttgagggctcttt

SEQ ID NO: 7433 - DNA, 20 bp, synthetic construct
  misc_feature 1..20: note = chemically synthesized
  source 1..20: mol_type = other DNA
ttatttgagggctctttgag

SEQ ID NO: 7434 - DNA, 20 bp, synthetic construct
  misc_feature 1..20: note = chemically synthesized
  source 1..20: mol_type = other DNA
atttgagggctctttgagta

SEQ ID NO: 7435 - DNA, 20 bp, synthetic construct
  misc_feature 1..20: note = chemically synthesized
  source 1..20: mol_type = other DNA
caactctatgtccccctccc

SEQ ID NO: 7436 - DNA, 20 bp, synthetic construct
  misc_feature 1..20: note = chemically synthesized
  source 1..20: mol_type = other DNA
gtccccctccccagaataca

SEQ ID NO: 7437 - DNA, 20 bp, synthetic construct
  misc_feature 1..20: note = chemically synthesized
  source 1..20: mol_type = other DNA
gatgcctcctttgcttcttt

SEQ ID NO: 7438 - DNA, 20 bp, synthetic construct
  misc_feature 1..20: note = chemically synthesized
  source 1..20: mol_type = other DNA
ctgtgttatatctgaatata

SEQ ID NO: 7439 - DNA, 20 bp, synthetic construct
  misc_feature 1..20: note = chemically synthesized
  source 1..20: mol_type = other DNA
tatatctgaatatatggctc

SEQ ID NO: 7440 - DNA, 20 bp, synthetic construct
  misc_feature 1..20: note = chemically synthesized
  source 1..20: mol_type = other DNA
tatctgaatatatggctcta

SEQ ID NO: 7441 - DNA, 20 bp, synthetic construct
  misc_feature 1..20: note = chemically synthesized
  source 1..20: mol_type = other DNA
atatggctctagagaatccc

SEQ ID NO: 7442 - DNA, 20 bp, synthetic construct
  misc_feature 1..20: note = chemically synthesized
  source 1..20: mol_type = other DNA
ctctagagaatcccaagaaa

SEQ ID NO: 7443 - DNA, 20 bp, synthetic construct
  misc_feature 1..20: note = chemically synthesized
  source 1..20: mol_type = other DNA
agaatcccaagaaatagaaa

SEQ ID NO: 7444 - DNA, 20 bp, synthetic construct
  misc_feature 1..20: note = chemically synthesized
  source 1..20: mol_type = other DNA
tcccaagaaatagaaaaagc

SEQ ID NO: 7445 - DNA, 20 bp, synthetic construct
  misc_feature 1..20: note = chemically synthesized
  source 1..20: mol_type = other DNA
aaaaagctagtccaaaatcc

SEQ ID NO: 7446 - DNA, 20 bp, synthetic construct
  misc_feature 1..20: note = chemically synthesized
  source 1..20: mol_type = other DNA
ccaaaatccaagctctgaat

SEQ ID NO: 7447 - DNA, 20 bp, synthetic construct
  misc_feature 1..20: note = chemically synthesized
  source 1..20: mol_type = other DNA
aatccaagctctgaataaga

SEQ ID NO: 7448 - DNA, 20 bp, synthetic construct
  misc_feature 1..20: note = chemically synthesized
  source 1..20: mol_type = other DNA
atccaagctctgaataagac

SEQ ID NO: 7449 - DNA, 20 bp, synthetic construct
  misc_feature 1..20: note = chemically synthesized
  source 1..20: mol_type = other DNA
aagctctgaataagacaggt

SEQ ID NO: 7450 - DNA, 20 bp, synthetic construct
  misc_feature 1..20: note = chemically synthesized
  source 1..20: mol_type = other DNA
aataagacaggtgagacctt

SEQ ID NO: 7451 - DNA, 20 bp, synthetic construct
  misc_feature 1..20: note = chemically synthesized
  source 1..20: mol_type = other DNA
tggatgaatatcttttcaca

SEQ ID NO: 7452 - DNA, 20 bp, synthetic construct
  misc_feature 1..20: note = chemically synthesized
  source 1..20: mol_type = other DNA
gaatatcttttcacaaagtt

SEQ ID NO: 7453 - DNA, 20 bp, synthetic construct
  misc_feature 1..20: note = chemically synthesized
  source 1..20: mol_type = other DNA
tatcttttcacaaagttgag

SEQ ID NO: 7454 - DNA, 20 bp, synthetic construct
  misc_feature 1..20: note = chemically synthesized
  source 1..20: mol_type = other DNA
cacaaagttgagaagatgtg

SEQ ID NO: 7455 - DNA, 20 bp, synthetic construct
  misc_feature 1..20: note = chemically synthesized
  source 1..20: mol_type = other DNA
tgagaagatgtgaagaaccc

SEQ ID NO: 7456 - DNA, 20 bp, synthetic construct
  misc_feature 1..20: note = chemically synthesized
  source 1..20: mol_type = other DNA
tgaagaacccaagaatccac

SEQ ID NO: 7457 - DNA, 20 bp, synthetic construct
  misc_feature 1..20: note = chemically synthesized
  source 1..20: mol_type = other DNA
aagaacccaagaatccactg

SEQ ID NO: 7458 - DNA, 20 bp, synthetic construct
  misc_feature 1..20: note = chemically synthesized
  source 1..20: mol_type = other DNA
ccaagaatccactggagaaa

SEQ ID NO: 7459 - DNA, 20 bp, synthetic construct
  misc_feature 1..20: note = chemically synthesized
  source 1..20: mol_type = other DNA
tccactggagaaacagcccc

SEQ ID NO: 7460 - DNA, 20 bp, synthetic construct
  misc_feature 1..20: note = chemically synthesized
  source 1..20: mol_type = other DNA
ccactggagaaacagccccg

SEQ ID NO: 7461 - DNA, 20 bp, synthetic construct
  misc_feature 1..20: note = chemically synthesized
  source 1..20: mol_type = other DNA
aaacagccccgaggcactgc

SEQ ID NO: 7462 - DNA, 20 bp, synthetic construct
  misc_feature 1..20: note = chemically synthesized
  source 1..20: mol_type = other DNA
aacagccccgaggcactgca

SEQ ID NO: 7463 - DNA, 20 bp, synthetic construct
  misc_feature 1..20: note = chemically synthesized
  source 1..20: mol_type = other DNA
acagccccgaggcactgcaa

SEQ ID NO: 7464 - DNA, 20 bp, synthetic construct
  misc_feature 1..20: note = chemically synthesized
  source 1..20: mol_type = other DNA
cagccccgaggcactgcaag

SEQ ID NO: 7465 - DNA, 20 bp, synthetic construct
  misc_feature 1..20: note = chemically synthesized
  source 1..20: mol_type = other DNA
ccgaggcactgcaaggggtt

SEQ ID NO: 7466 - DNA, 20 bp, synthetic construct
  misc_feature 1..20: note = chemically synthesized
  source 1..20: mol_type = other DNA
caaggggttcagacctgtgt

SEQ ID NO: 7467 - DNA, 20 bp, synthetic construct
  misc_feature 1..20: note = chemically synthesized
  source 1..20: mol_type = other DNA
aggggttcagacctgtgttg

SEQ ID NO: 7468 - DNA, 20 bp, synthetic construct
  misc_feature 1..20: note = chemically synthesized
  source 1..20: mol_type = other DNA
cttgtttgtttgtttttcct

SEQ ID NO: 7469 - DNA, 20 bp, synthetic construct
  misc_feature 1..20: note = chemically synthesized
  source 1..20: mol_type = other DNA
tgtttgtttgtttttcctca

SEQ ID NO: 7470 - DNA, 20 bp, synthetic construct
  misc_feature 1..20: note = chemically synthesized
  source 1..20: mol_type = other DNA
tgtttgtttttcctcagaga

SEQ ID NO: 7471 - DNA, 20 bp, synthetic construct
  misc_feature 1..20: note = chemically synthesized
  source 1..20: mol_type = other DNA
gtttgtttttcctcagagac

SEQ ID NO: 7472 - DNA, 20 bp, synthetic construct
  misc_feature 1..20: note = chemically synthesized
  source 1..20: mol_type = other DNA
tttcctcagagacaggatct

SEQ ID NO: 7473 - DNA, 20 bp, synthetic construct
  misc_feature 1..20: note = chemically synthesized
  source 1..20: mol_type = other DNA
gagacaggatctcagtcacc

SEQ ID NO: 7474 - DNA, 20 bp, synthetic construct
  misc_feature 1..20: note = chemically synthesized
  source 1..20: mol_type = other DNA
agacaggatctcagtcacca

SEQ ID NO: 7475 - DNA, 20 bp, synthetic construct
  misc_feature 1..20: note = chemically synthesized
  source 1..20: mol_type = other DNA
aggatctcagtcaccaaggc

SEQ ID NO: 7476 - DNA, 20 bp, synthetic construct
  misc_feature 1..20: note = chemically synthesized
  source 1..20: mol_type = other DNA
gatctcagtcaccaaggcta

SEQ ID NO: 7477 - DNA, 20 bp, synthetic construct
  misc_feature 1..20: note = chemically synthesized
  source 1..20: mol_type = other DNA
tctcagtcaccaaggctaga

SEQ ID NO: 7478 - DNA, 20 bp, synthetic construct
  misc_feature 1..20: note = chemically synthesized
  source 1..20: mol_type = other DNA
cagtcaccaaggctagagag

SEQ ID NO: 7479 - DNA, 20 bp, synthetic construct
  misc_feature 1..20: note = chemically synthesized
  source 1..20: mol_type = other DNA
tcaccaaggctagagagcag

SEQ ID NO: 7480 - DNA, 20 bp, synthetic construct
  misc_feature 1..20: note = chemically synthesized
  source 1..20: mol_type = other DNA
tcactgcaaccctgaaatcc

SEQ ID NO: 7481 - DNA, 20 bp, synthetic construct
  misc_feature 1..20: note = chemically synthesized
  source 1..20: mol_type = other DNA
cactgcaaccctgaaatcct

SEQ ID NO: 7482 - DNA, 20 bp, synthetic construct
  misc_feature 1..20: note = chemically synthesized
  source 1..20: mol_type = other DNA
aaccctgaaatcctgggctc

SEQ ID NO: 7483 - DNA, 20 bp, synthetic construct
  misc_feature 1..20: note = chemically synthesized
  source 1..20: mol_type = other DNA
ctcaagtgatcctatcactt

SEQ ID NO: 7484 - DNA, 20 bp, synthetic construct
  misc_feature 1..20: note = chemically synthesized
  source 1..20: mol_type = other DNA
atcctatcacttcagcctcc

SEQ ID NO: 7485 - DNA, 20 bp, synthetic construct
  misc_feature 1..20: note = chemically synthesized
  source 1..20: mol_type = other DNA
tcctatcacttcagcctcct

SEQ ID NO: 7486 - DNA, 20 bp, synthetic construct
  misc_feature 1..20: note = chemically synthesized
  source 1..20: mol_type = other DNA
acttcagcctcctgggttac

SEQ ID NO: 7487 - DNA, 20 bp, synthetic construct
  misc_feature 1..20: note = chemically synthesized
  source 1..20: mol_type = other DNA
cttcagcctcctgggttact

SEQ ID NO: 7488 - DNA, 20 bp, synthetic construct
  misc_feature 1..20: note = chemically synthesized
  source 1..20: mol_type = other DNA
ctcctgggttactgggacta

SEQ ID NO: 7489 - DNA, 20 bp, synthetic construct
  misc_feature 1..20: note = chemically synthesized
  source 1..20: mol_type = other DNA
gttactgggactacagatgc

SEQ ID NO: 7490 - DNA, 20 bp, synthetic construct
  misc_feature 1..20: note = chemically synthesized
  source 1..20: mol_type = other DNA
cagatgcaagccactgtgcc

SEQ ID NO: 7491 - DNA, 20 bp, synthetic construct
  misc_feature 1..20: note = chemically synthesized
  source 1..20: mol_type = other DNA
gcaagccactgtgcccagct

SEQ ID NO: 7492 - DNA, 20 bp, synthetic construct
  misc_feature 1..20: note = chemically synthesized
  source 1..20: mol_type = other DNA
ctctttctttttattttaat

SEQ ID NO: 7493 - DNA, 20 bp, synthetic construct
  misc_feature 1..20: note = chemically synthesized
  source 1..20: mol_type = other DNA
ttaattggtcactttgtttt

SEQ ID NO: 7494 - DNA, 20 bp, synthetic construct
  misc_feature 1..20: note = chemically synthesized
  source 1..20: mol_type = other DNA
tcacctctgacttgacctcc

SEQ ID NO: 7495 - DNA, 20 bp, synthetic construct
  misc_feature 1..20: note = chemically synthesized
  source 1..20: mol_type = other DNA
ttgtcaaatatttgacttaa

SEQ ID NO: 7496 - DNA, 20 bp, synthetic construct
  misc_feature 1..20: note = chemically synthesized
  source 1..20: mol_type = other DNA
tgtcaaatatttgacttaat

SEQ ID NO: 7497 - DNA, 20 bp, synthetic construct
  misc_feature 1..20: note = chemically synthesized
  source 1..20: mol_type = other DNA
tcaaatatttgacttaatgg

SEQ ID NO: 7498 - DNA, 20 bp, synthetic construct
  misc_feature 1..20: note = chemically synthesized
  source 1..20: mol_type = other DNA
cttaatgggagactttcccc

SEQ ID NO: 7499 - DNA, 20 bp, synthetic construct
  misc_feature 1..20: note = chemically synthesized
  source 1..20: mol_type = other DNA
ttcccctagcttgttgattc

SEQ ID NO: 7500 - DNA, 20 bp, synthetic construct
  misc_feature 1..20: note = chemically synthesized
  source 1..20: mol_type = other DNA
ccagaaattcaactttattc

SEQ ID NO: 7501 - DNA, 20 bp, synthetic construct
  misc_feature 1..20: note = chemically synthesized
  source 1..20: mol_type = other DNA
cagaaattcaactttattct

SEQ ID NO: 7502 - DNA, 20 bp, synthetic construct
  misc_feature 1..20: note = chemically synthesized
  source 1..20: mol_type = other DNA
attcaactttattctaggct

SEQ ID NO: 7503 - DNA, 20 bp, synthetic construct
  misc_feature 1..20: note = chemically synthesized
  source 1..20: mol_type = other DNA
ttctaggcttggctcctgtt

SEQ ID NO: 7504 - DNA, 20 bp, synthetic construct
  misc_feature 1..20: note = chemically synthesized
  source 1..20: mol_type = other DNA
ctgtttagtattgctgcttt

SEQ ID NO: 7505 - DNA, 20 bp, synthetic construct
  misc_feature 1..20: note = chemically synthesized
  source 1..20: mol_type = other DNA
ttgctgctttgagattgttc

SEQ ID NO: 7506 - DNA, 20 bp, synthetic construct
  misc_feature 1..20: note = chemically synthesized
  source 1..20: mol_type = other DNA
tgttctggttcatgaaaaac

SEQ ID NO: 7507 - DNA, 20 bp, synthetic construct
  misc_feature 1..20: note = chemically synthesized
  source 1..20: mol_type = other DNA
ctaaattcttataaacaaat

SEQ ID NO: 7508 - DNA, 20 bp, synthetic construct
  misc_feature 1..20: note = chemically synthesized
  source 1..20: mol_type = other DNA
aattcttataaacaaataag

SEQ ID NO: 7509 - DNA, 20 bp, synthetic construct
  misc_feature 1..20: note = chemically synthesized
  source 1..20: mol_type = other DNA
attcttataaacaaataaga

SEQ ID NO: 7510 - DNA, 20 bp, synthetic construct
  misc_feature 1..20: note = chemically synthesized
  source 1..20: mol_type = other DNA
cttataaacaaataagaagg

SEQ ID NO: 7511 - DNA, 20 bp, synthetic construct
  misc_feature 1..20: note = chemically synthesized
  source 1..20: mol_type = other DNA
caaataagaaggaagactct

SEQ ID NO: 7512 - DNA, 20 bp, synthetic construct
  misc_feature 1..20: note = chemically synthesized
  source 1..20: mol_type = other DNA
ggaagactctcagaaatata

SEQ ID NO: 7513 - DNA, 20 bp, synthetic construct
  misc_feature 1..20: note = chemically synthesized
  source 1..20: mol_type = other DNA
aagactctcagaaatatatg

SEQ ID NO: 7514 - DNA, 20 bp, synthetic construct
  misc_feature 1..20: note = chemically synthesized
  source 1..20: mol_type = other DNA
gactctcagaaatatatgga

SEQ ID NO: 7515 - DNA, 20 bp, synthetic construct
  misc_feature 1..20: note = chemically synthesized
  source 1..20: mol_type = other DNA
cagaaatatatggagagact

SEQ ID NO: 7516 - DNA, 20 bp, synthetic construct
  misc_feature 1..20: note = chemically synthesized
  source 1..20: mol_type = other DNA
agaaatatatggagagactg

SEQ ID NO: 7517 - DNA, 20 bp, synthetic construct
  misc_feature 1..20: note = chemically synthesized
  source 1..20: mol_type = other DNA
atatatggagagactgaggt

SEQ ID NO: 7518 - DNA, 20 bp, synthetic construct
  misc_feature 1..20: note = chemically synthesized
  source 1..20: mol_type = other DNA
atatggagagactgaggtta

SEQ ID NO: 7519 - DNA, 20 bp, synthetic construct
  misc_feature 1..20: note = chemically synthesized
  source 1..20: mol_type = other DNA
gagagactgaggttagagtt

SEQ ID NO: 7520 - DNA, 20 bp, synthetic construct
  misc_feature 1..20: note = chemically synthesized
  source 1..20: mol_type = other DNA
gactgaggttagagttgagc

SEQ ID NO: 7521 - DNA, 20 bp, synthetic construct
  misc_feature 1..20: note = chemically synthesized
  source 1..20: mol_type = other DNA
actgaggttagagttgagca

SEQ ID NO: 7522 - DNA, 20 bp, synthetic construct
  misc_feature 1..20: note = chemically synthesized
  source 1..20: mol_type = other DNA
aaattttgtcacaactaatc

SEQ ID NO: 7523 - DNA, 20 bp, synthetic construct
  misc_feature 1..20: note = chemically synthesized
  source 1..20: mol_type = other DNA
tgtcacaactaatctagttg

SEQ ID NO: 7524 - DNA, 20 bp, synthetic construct
  misc_feature 1..20: note = chemically synthesized
  source 1..20: mol_type = other DNA
gtcacaactaatctagttga

SEQ ID NO: 7525 - DNA, 20 bp, synthetic construct
  misc_feature 1..20: note = chemically synthesized
  source 1..20: mol_type = other DNA
tgaaggaatgttaactgact

SEQ ID NO: 7526 - DNA, 20 bp, synthetic construct
  misc_feature 1..20: note = chemically synthesized
  source 1..20: mol_type = other DNA
ctaaatttctgtctatttca

SEQ ID NO: 7527 - DNA, 20 bp, synthetic construct
  misc_feature 1..20: note = chemically synthesized
  source 1..20: mol_type = other DNA
aaatttctgtctatttcaaa

SEQ ID NO: 7528 - DNA, 20 bp, synthetic construct
  misc_feature 1..20: note = chemically synthesized
  source 1..20: mol_type = other DNA
ttctgtctatttcaaagaga

SEQ ID NO: 7529 - DNA, 20 bp, synthetic construct
  misc_feature 1..20: note = chemically synthesized
  source 1..20: mol_type = other DNA
caaagagaaagacttgataa

SEQ ID NO: 7530 - DNA, 20 bp, synthetic construct
  misc_feature 1..20: note = chemically synthesized
  source 1..20: mol_type = other DNA
aagacttgataatggctcta

SEQ ID NO: 7531 - DNA, 20 bp, synthetic construct
  misc_feature 1..20: note = chemically synthesized
  source 1..20: mol_type = other DNA
taatggctctacggatgtgt

SEQ ID NO: 7532 - DNA, 20 bp, synthetic construct
  misc_feature 1..20: note = chemically synthesized
  source 1..20: mol_type = other DNA
gctctacggatgtgtgagat

SEQ ID NO: 7533 - DNA, 20 bp, synthetic construct
  misc_feature 1..20: note = chemically synthesized
  source 1..20: mol_type = other DNA
atgtgtgagatcagttttaa

SEQ ID NO: 7534 - DNA, 20 bp, synthetic construct
  misc_feature 1..20: note = chemically synthesized
  source 1..20: mol_type = other DNA
tgtgtgagatcagttttaat

SEQ ID NO: 7535 - DNA, 20 bp, synthetic construct
  misc_feature 1..20: note = chemically synthesized
  source 1..20: mol_type = other DNA
tttttttattattatacttc

SEQ ID NO: 7536 - DNA, 20 bp, synthetic construct
  misc_feature 1..20: note = chemically synthesized
  source 1..20: mol_type = other DNA
tattattatacttcaagttt

SEQ ID NO: 7537 - DNA, 20 bp, synthetic construct
  misc_feature 1..20: note = chemically synthesized
  source 1..20: mol_type = other DNA
attattatacttcaagtttt

SEQ ID NO: 7538 - DNA, 20 bp, synthetic construct
  misc_feature 1..20: note = chemically synthesized
  source 1..20: mol_type = other DNA
ttattatacttcaagtttta

SEQ ID NO: 7539 - DNA, 20 bp, synthetic construct
  misc_feature 1..20: note = chemically synthesized
  source 1..20: mol_type = other DNA
gggtacatgtgcacaacatg

SEQ ID NO: 7540 - DNA, 20 bp, synthetic construct
  misc_feature 1..20: note = chemically synthesized
  source 1..20: mol_type = other DNA
ggtacatgtgcacaacatgc

SEQ ID NO: 7541 - DNA, 20 bp, synthetic construct
  misc_feature 1..20: note = chemically synthesized
  source 1..20: mol_type = other DNA
tatgtatacatgtgccatgt

SEQ ID NO: 7542 - DNA, 20 bp, synthetic construct
  misc_feature 1..20: note = chemically synthesized
  source 1..20: mol_type = other DNA
gcacccattaactcgtcatt

SEQ ID NO: 7543 - DNA, 20 bp, synthetic construct
  misc_feature 1..20: note = chemically synthesized
  source 1..20: mol_type = other DNA
attaactcgtcatttagcat

SEQ ID NO: 7544 - DNA, 20 bp, synthetic construct
  misc_feature 1..20: note = chemically synthesized
  source 1..20: mol_type = other DNA
ttaactcgtcatttagcatt

SEQ ID NO: 7545 - DNA, 20 bp, synthetic construct
  misc_feature 1..20: note = chemically synthesized
  source 1..20: mol_type = other DNA
ttagcattaggtatatctcc

SEQ ID NO: 7546 - DNA, 20 bp, synthetic construct
  misc_feature 1..20: note = chemically synthesized
  source 1..20: mol_type = other DNA
ccctgccccccaccccataa

SEQ ID NO: 7547 - DNA, 20 bp, synthetic construct
  misc_feature 1..20: note = chemically synthesized
  source 1..20: mol_type = other DNA
ccccaccccataacagtccc

SEQ ID NO: 7548 - DNA, 20 bp, synthetic construct
  misc_feature 1..20: note = chemically synthesized
  source 1..20: mol_type = other DNA
ccaccccataacagtcccca

SEQ ID NO: 7549 - DNA, 20 bp, synthetic construct
  misc_feature 1..20: note = chemically synthesized
  source 1..20: mol_type = other DNA
attgttcaattcccacctat

SEQ ID NO: 7550 - DNA, 20 bp, synthetic construct
  misc_feature 1..20: note = chemically synthesized
  source 1..20: mol_type = other DNA
ttcaattcccacctatgagt

SEQ ID NO: 7551 - DNA, 20 bp, synthetic construct
  misc_feature 1..20: note = chemically synthesized
  source 1..20: mol_type = other DNA
cacctatgagtgagaacatg

SEQ ID NO: 7552 - DNA, 20 bp, synthetic construct
  misc_feature 1..20: note = chemically synthesized
  source 1..20: mol_type = other DNA
gagtgagaacatgcggtgtt

SEQ ID NO: 7553 - DNA, 20 bp, synthetic construct
  misc_feature 1..20: note = chemically synthesized
  source 1..20: mol_type = other DNA
ttggtttattctccttgtga

SEQ ID NO: 7554 - DNA, 20 bp, synthetic construct
  misc_feature 1..20: note = chemically synthesized
  source 1..20: mol_type = other DNA
tctccttgtgatagtttgct

SEQ ID NO: 7555 - DNA, 20 bp, synthetic construct
  misc_feature 1..20: note = chemically synthesized
  source 1..20: mol_type = other DNA
tgatagtttgctgagaatga

SEQ ID NO: 7556 - DNA, 20 bp, synthetic construct
  misc_feature 1..20: note = chemically synthesized
  source 1..20: mol_type = other DNA
ttgctgagaatgatagtttc

SEQ ID NO: 7557 - DNA, 20 bp, synthetic construct
  misc_feature 1..20: note = chemically synthesized
  source 1..20: mol_type = other DNA
gcttcatccatgtccctaca

SEQ ID NO: 7558 - DNA, 20 bp, synthetic construct
  misc_feature 1..20: note = chemically synthesized
  source 1..20: mol_type = other DNA
cttcatccatgtccctacaa

SEQ ID NO: 7559 - DNA, 20 bp, synthetic construct
  misc_feature 1..20: note = chemically synthesized
  source 1..20: mol_type = other DNA
catgaactcatcatttttta

SEQ ID NO: 7560 - DNA, 20 bp, synthetic construct
  misc_feature 1..20: note = chemically synthesized
  source 1..20: mol_type = other DNA
catcattttttatggctgca

SEQ ID NO: 7561 - DNA, 20 bp, synthetic construct
  misc_feature 1..20: note = chemically synthesized
  source 1..20: mol_type = other DNA
tatggctgcatagtattcca

SEQ ID NO: 7562 - DNA, 20 bp, synthetic construct
  misc_feature 1..20: note = chemically synthesized
  source 1..20: mol_type = other DNA
tgtgccacattttcttaatc

SEQ ID NO: 7563 - DNA, 20 bp, synthetic construct
  misc_feature 1..20: note = chemically synthesized
  source 1..20: mol_type = other DNA
ttaatccagtctatcgttgt

SEQ ID NO: 7564 - DNA, 20 bp, synthetic construct
  misc_feature 1..20: note = chemically synthesized
  source 1..20: mol_type = other DNA
gtctatcgttgttggacatt

SEQ ID NO: 7565 - DNA, 20 bp, synthetic construct
  misc_feature 1..20: note = chemically synthesized
  source 1..20: mol_type = other DNA
tctatcgttgttggacattt

SEQ ID NO: 7566 - DNA, 20 bp, synthetic construct
  misc_feature 1..20: note = chemically synthesized
  source 1..20: mol_type = other DNA
tcgttgttggacatttgggt

SEQ ID NO: 7567 - DNA, 20 bp, synthetic construct
  misc_feature 1..20: note = chemically synthesized
  source 1..20: mol_type = other DNA
tggacatttgggttggttcc

SEQ ID NO: 7568 - DNA, 20 bp, synthetic construct
  misc_feature 1..20: note = chemically synthesized
  source 1..20: mol_type = other DNA
caagtctttgctattgtgaa

SEQ ID NO: 7569 - DNA, 20 bp, synthetic construct
  misc_feature 1..20: note = chemically synthesized
  source 1..20: mol_type = other DNA
tacgtgtgcatgtgtcttta

SEQ ID NO: 7570 - DNA, 20 bp, synthetic construct
  misc_feature 1..20: note = chemically synthesized
  source 1..20: mol_type = other DNA
gtgtgcatgtgtctttatag

SEQ ID NO: 7571 - DNA, 20 bp, synthetic construct
  misc_feature 1..20: note = chemically synthesized
  source 1..20: mol_type = other DNA
cagcatgatttataatcctt

SEQ ID NO: 7572 - DNA, 20 bp, synthetic construct
  misc_feature 1..20: note = chemically synthesized
  source 1..20: mol_type = other DNA
agcatgatttataatccttt

SEQ ID NO: 7573 - DNA, 20 bp, synthetic construct
  misc_feature 1..20: note = chemically synthesized
  source 1..20: mol_type = other DNA
taatcctttgggtatgtacc

SEQ ID NO: 7574 - DNA, 20 bp, synthetic construct
  misc_feature 1..20: note = chemically synthesized
  source 1..20: mol_type = other DNA
tttgggtatgtacccagtaa

SEQ ID NO: 7575 - DNA, 20 bp, synthetic construct
  misc_feature 1..20: note = chemically synthesized
  source 1..20: mol_type = other DNA
ttgggtatgtacccagtaat

SEQ ID NO: 7576 - DNA, 20 bp, synthetic construct
  misc_feature 1..20: note = chemically synthesized
  source 1..20: mol_type = other DNA
gtatgtacccagtaatggga

SEQ ID NO: 7577 - DNA, 20 bp, synthetic construct
  misc_feature 1..20: note = chemically synthesized
  source 1..20: mol_type = other DNA
gtacccagtaatgggatggc

SEQ ID NO: 7578 - DNA, 20 bp, synthetic construct
  misc_feature 1..20: note = chemically synthesized
  source 1..20: mol_type = other DNA
tacccagtaatgggatggct

SEQ ID NO: 7579 - DNA, 20 bp, synthetic construct
  misc_feature 1..20: note = chemically synthesized
  source 1..20: mol_type = other DNA
aatgggatggctgggtcaaa

SEQ ID NO: 7580 - DNA, 20 bp, synthetic construct
  misc_feature 1..20: note = chemically synthesized
  source 1..20: mol_type = other DNA
gctgggtcaaatggtatttc

SEQ ID NO: 7581 - DNA, 20 bp, synthetic construct
  misc_feature 1..20: note = chemically synthesized
  source 1..20: mol_type = other DNA
tcaaatggtatttctagttc

SEQ ID NO: 7582 - DNA, 20 bp, synthetic construct
  misc_feature 1..20: note = chemically synthesized
  source 1..20: mol_type = other DNA
atttctagttctagattcct

SEQ ID NO: 7583 - DNA, 20 bp, synthetic construct
  misc_feature 1..20: note = chemically synthesized
  source 1..20: mol_type = other DNA
tttctagttctagattcctg

SEQ ID NO: 7584 - DNA, 20 bp, synthetic construct
  misc_feature 1..20: note = chemically synthesized
  source 1..20: mol_type = other DNA
tgccacactgacttccgcaa

SEQ ID NO: 7585 - DNA, 20 bp, synthetic construct
  misc_feature 1..20: note = chemically synthesized
  source 1..20: mol_type = other DNA
gacttccgcaatggttgaac

SEQ ID NO: 7586 - DNA, 20 bp, synthetic construct
  misc_feature 1..20: note = chemically synthesized
  source 1..20: mol_type = other DNA
gcaatggttgaactagttta

SEQ ID NO: 7587 - DNA, 20 bp, synthetic construct
  misc_feature 1..20: note = chemically synthesized
  source 1..20: mol_type = other DNA
ctagtttacagtcccaccaa

SEQ ID NO: 7588 - DNA, 20 bp, synthetic construct
  misc_feature 1..20: note = chemically synthesized
  source 1..20: mol_type = other DNA
cagtcccaccaacagtgtaa

SEQ ID NO: 7589 - DNA, 20 bp, synthetic construct
  misc_feature 1..20: note = chemically synthesized
  source 1..20: mol_type = other DNA
ctgtttctccacatcctctc

SEQ ID NO: 7590 - DNA, 20 bp, synthetic construct
  misc_feature 1..20: note = chemically synthesized
  source 1..20: mol_type = other DNA
ttaatgatcgccattctaac

SEQ ID NO: 7591 - DNA, 20 bp, synthetic construct
  misc_feature 1..20: note = chemically synthesized
  source 1..20: mol_type = other DNA
atcgccattctaactggtgt

SEQ ID NO: 7592 - DNA, 20 bp, synthetic construct
  misc_feature 1..20: note = chemically synthesized
  source 1..20: mol_type = other DNA
ccattctaactggtgtgaga

SEQ ID NO: 7593 - DNA, 20 bp, synthetic construct
  misc_feature 1..20: note = chemically synthesized
  source 1..20: mol_type = other DNA
tgtgagatggtatctcattg

SEQ ID NO: 7594 - DNA, 20 bp, synthetic construct
  misc_feature 1..20: note = chemically synthesized
  source 1..20: mol_type = other DNA
tttgatttgcatttctctga

SEQ ID NO: 7595 - DNA, 20 bp, synthetic construct
  misc_feature 1..20: note = chemically synthesized
  source 1..20: mol_type = other DNA
atttgcatttctctgatggc

SEQ ID NO: 7596 - DNA, 20 bp, synthetic construct
  misc_feature 1..20: note = chemically synthesized
  source 1..20: mol_type = other DNA
ctctgatggctagtgatgat

SEQ ID NO: 7597 - DNA, 20 bp, synthetic construct
  misc_feature 1..20: note = chemically synthesized
  source 1..20: mol_type = other DNA
cataaatgtcttcttttgcg

SEQ ID NO: 7598 - DNA, 20 bp, synthetic construct
  misc_feature 1..20: note = chemically synthesized
  source 1..20: mol_type = other DNA
atcctttgcccactttttga

SEQ ID NO: 7599 - DNA, 20 bp, synthetic construct
  misc_feature 1..20: note = chemically synthesized
  source 1..20: mol_type = other DNA
tcctttgcccactttttgat

SEQ ID NO: 7600 - DNA, 20 bp, synthetic construct
  misc_feature 1..20: note = chemically synthesized
  source 1..20: mol_type = other DNA
cctttgcccactttttgatg

SEQ ID NO: 7601 - DNA, 20 bp, synthetic construct
  misc_feature 1..20: note = chemically synthesized
  source 1..20: mol_type = other DNA
tttttcttgtaaatttgttt

SEQ ID NO: 7602 - DNA, 20 bp, synthetic construct
  misc_feature 1..20: note = chemically synthesized
  source 1..20: mol_type = other DNA
aaatttgtttgagttcattg

SEQ ID NO: 7603 - DNA, 20 bp, synthetic construct
  misc_feature 1..20: note = chemically synthesized
  source 1..20: mol_type = other DNA
tttgagttcattgtagattc

SEQ ID NO: 7604 - DNA, 20 bp, synthetic construct
  misc_feature 1..20: note = chemically synthesized
  source 1..20: mol_type = other DNA
tcattgtagattctggatat

SEQ ID NO: 7605 - DNA, 20 bp, synthetic construct
  misc_feature 1..20: note = chemically synthesized
  source 1..20: mol_type = other DNA
tctggatattagccctttgt

SEQ ID NO: 7606 - DNA, 20 bp, synthetic construct
  misc_feature 1..20: note = chemically synthesized
  source 1..20: mol_type = other DNA
atattagccctttgtcagat

SEQ ID NO: 7607 - DNA, 20 bp, synthetic construct
  misc_feature 1..20: note = chemically synthesized
  source 1..20: mol_type = other DNA
ttagccctttgtcagatgag

SEQ ID NO: 7608 - DNA, 20 bp, synthetic construct
  misc_feature 1..20: note = chemically synthesized
  source 1..20: mol_type = other DNA
aaaaattttctcccattttg

SEQ ID NO: 7609 - DNA, 20 bp, synthetic construct
  misc_feature 1..20: note = chemically synthesized
  source 1..20: mol_type = other DNA
aaaattttctcccattttgt

SEQ ID NO: 7610 - DNA, 20 bp, synthetic construct
  misc_feature 1..20: note = chemically synthesized
  source 1..20: mol_type = other DNA
aggttgcctgttcactctga

SEQ ID NO: 7611 - DNA, 20 bp, synthetic construct
  misc_feature 1..20: note = chemically synthesized
  source 1..20: mol_type = other DNA
ttgcctgttcactctgatgg

SEQ ID NO: 7612 - DNA, 20 bp, synthetic construct
  misc_feature 1..20: note = chemically synthesized
  source 1..20: mol_type = other DNA
cactctgatggtagtttctt

SEQ ID NO: 7613 - DNA, 20 bp, synthetic construct
  misc_feature 1..20: note = chemically synthesized
  source 1..20: mol_type = other DNA
tggtagtttctttagctgtg

SEQ ID NO: 7614 - DNA, 20 bp, synthetic construct
  misc_feature 1..20: note = chemically synthesized
  source 1..20: mol_type = other DNA
tagtttctttagctgtgcag

SEQ ID NO: 7615 - DNA, 20 bp, synthetic construct
  misc_feature 1..20: note = chemically synthesized
  source 1..20: mol_type = other DNA
ttagctgtgcagaagctctt

SEQ ID NO: 7616 - DNA, 20 bp, synthetic construct
  misc_feature 1..20: note = chemically synthesized
  source 1..20: mol_type = other DNA
cagaagctctttagtttaat

SEQ ID NO: 7617 - DNA, 20 bp, synthetic construct
  misc_feature 1..20: note = chemically synthesized
  source 1..20: mol_type = other DNA
tcttttgttgccattgcttt

SEQ ID NO: 7618 - DNA, 20 bp, synthetic construct
  misc_feature 1..20: note = chemically synthesized
  source 1..20: mol_type = other DNA
tgccattgcttttggtgttt

SEQ ID NO: 7619 - DNA, 20 bp, synthetic construct
  misc_feature 1..20: note = chemically synthesized
  source 1..20: mol_type = other DNA
cttttggtgttttagacatg

SEQ ID NO: 7620 - DNA, 20 bp, synthetic construct
  misc_feature 1..20: note = chemically synthesized
  source 1..20: mol_type = other DNA
gcccatgcctatgtcctgaa

SEQ ID NO: 7621 - DNA, 20 bp, synthetic construct
  misc_feature 1..20: note = chemically synthesized
  source 1..20: mol_type = other DNA
atgtcctgaatggtattgcc

SEQ ID NO: 7622 - DNA, 20 bp, synthetic construct
  misc_feature 1..20: note = chemically synthesized
  source 1..20: mol_type = other DNA
tgtcctgaatggtattgcct

SEQ ID NO: 7623 - DNA, 20 bp, synthetic construct
  misc_feature 1..20: note = chemically synthesized
  source 1..20: mol_type = other DNA
gtattgcctaggtttttttc

SEQ ID NO: 7624 - DNA, 20 bp, synthetic construct
  misc_feature 1..20: note = chemically synthesized
  source 1..20: mol_type = other DNA
tattgcctaggtttttttct

SEQ ID NO: 7625 - DNA, 20 bp, synthetic construct
  misc_feature 1..20: note = chemically synthesized
  source 1..20: mol_type = other DNA
attgcctaggtttttttcta

SEQ ID NO: 7626 - DNA, 20 bp, synthetic construct
  misc_feature 1..20: note = chemically synthesized
  source 1..20: mol_type = other DNA
gtttttttctagggttttta

SEQ ID NO: 7627 - DNA, 20 bp, synthetic construct
  misc_feature 1..20: note = chemically synthesized
  source 1..20: mol_type = other DNA
ttctagggtttttatggttt

SEQ ID NO: 7628 - DNA, 20 bp, synthetic construct
  misc_feature 1..20: note = chemically synthesized
  source 1..20: mol_type = other DNA
tctagggtttttatggtttt

SEQ ID NO: 7629 - DNA, 20 bp, synthetic construct
  misc_feature 1..20: note = chemically synthesized
  source 1..20: mol_type = other DNA
tggttttaggtctaacatgt

SEQ ID NO: 7630 - DNA, 20 bp, synthetic construct
  misc_feature 1..20: note = chemically synthesized
  source 1..20: mol_type = other DNA
tcttgaattaatttttgtat

SEQ ID NO: 7631 - DNA, 20 bp, synthetic construct
  misc_feature 1..20: note = chemically synthesized
  source 1..20: mol_type = other DNA
cttgaattaatttttgtata

SEQ ID NO: 7632 - DNA, 20 bp, synthetic construct
  misc_feature 1..20: note = chemically synthesized
  source 1..20: mol_type = other DNA
ttaatttttgtataaggtgt

SEQ ID NO: 7633 - DNA, 20 bp, synthetic construct
  misc_feature 1..20: note = chemically synthesized
  source 1..20: mol_type = other DNA
taatttttgtataaggtgta

SEQ ID NO: 7634 - DNA, 20 bp, synthetic construct
  misc_feature 1..20: note = chemically synthesized
  source 1..20: mol_type = other DNA
tttttgtataaggtgtaagg

SEQ ID NO: 7635 - DNA, 20 bp, synthetic construct
  misc_feature 1..20: note = chemically synthesized
  source 1..20: mol_type = other DNA
ttttgtataaggtgtaagga

SEQ ID NO: 7636 - DNA, 20 bp, synthetic construct
  misc_feature 1..20: note = chemically synthesized
  source 1..20: mol_type = other DNA
tttgtataaggtgtaaggaa

SEQ ID NO: 7637 - DNA, 20 bp, synthetic construct
  misc_feature 1..20: note = chemically synthesized
  source 1..20: mol_type = other DNA
taaggtgtaaggaagggatc

SEQ ID NO: 7638 - DNA, 20 bp, synthetic construct
  misc_feature 1..20: note = chemically synthesized
  source 1..20: mol_type = other DNA
gtaaggaagggatccagttt

SEQ ID NO: 7639 - DNA, 20 bp, synthetic construct
  misc_feature 1..20: note = chemically synthesized
  source 1..20: mol_type = other DNA
cagtttcagctttctacata

SEQ ID NO: 7640 - DNA, 20 bp, synthetic construct
  misc_feature 1..20: note = chemically synthesized
  source 1..20: mol_type = other DNA
ttcagctttctacatatggc

SEQ ID NO: 7641 - DNA, 20 bp, synthetic construct
  misc_feature 1..20: note = chemically synthesized
  source 1..20: mol_type = other DNA
gctttctacatatggctagc

SEQ ID NO: 7642 - DNA, 20 bp, synthetic construct
  misc_feature 1..20: note = chemically synthesized
  source 1..20: mol_type = other DNA
atatggctagccagttttcc

SEQ ID NO: 7643 - DNA, 20 bp, synthetic construct
  misc_feature 1..20: note = chemically synthesized
  source 1..20: mol_type = other DNA
tcccagcaccatttattaaa

SEQ ID NO: 7644 - DNA, 20 bp, synthetic construct
  misc_feature 1..20: note = chemically synthesized
  source 1..20: mol_type = other DNA
cccagcaccatttattaaat

SEQ ID NO: 7645 - DNA, 20 bp, synthetic construct
  misc_feature 1..20: note = chemically synthesized
  source 1..20: mol_type = other DNA
ccagcaccatttattaaata

SEQ ID NO: 7646 - DNA, 20 bp, synthetic construct
  misc_feature 1..20: note = chemically synthesized
  source 1..20: mol_type = other DNA
tccccattgcttgtttctct

SEQ ID NO: 7647 - DNA, 20 bp, synthetic construct
  misc_feature 1..20: note = chemically synthesized
  source 1..20: mol_type = other DNA
ccccattgcttgtttctctc

SEQ ID NO: 7648 - DNA, 20 bp, synthetic construct
  misc_feature 1..20: note = chemically synthesized
  source 1..20: mol_type = other DNA
tgtttctctcaggtttgtca

SEQ ID NO: 7649 - DNA, 20 bp, synthetic construct
  misc_feature 1..20: note = chemically synthesized
  source 1..20: mol_type = other DNA
ctctcaggtttgtcaaagat

SEQ ID NO: 7650 - DNA, 20 bp, synthetic construct
  misc_feature 1..20: note = chemically synthesized
  source 1..20: mol_type = other DNA
caggtttgtcaaagatcaga

SEQ ID NO: 7651 - DNA, 20 bp, synthetic construct
  misc_feature 1..20: note = chemically synthesized
  source 1..20: mol_type = other DNA
tgtcaaagatcagatagttg

SEQ ID NO: 7652 - DNA, 20 bp, synthetic construct
  misc_feature 1..20: note = chemically synthesized
  source 1..20: mol_type = other DNA
atcagatagttgtagatatg

SEQ ID NO: 7653 - DNA, 20 bp, synthetic construct
  misc_feature 1..20: note = chemically synthesized
  source 1..20: mol_type = other DNA
agatatgcggcattatttct

SEQ ID NO: 7654 - DNA, 20 bp, synthetic construct
  misc_feature 1..20: note = chemically synthesized
  source 1..20: mol_type = other DNA
gatatgcggcattatttctg

SEQ ID NO: 7655 - DNA, 20 bp, synthetic construct
  misc_feature 1..20: note = chemically synthesized
  source 1..20: mol_type = other DNA
atatgcggcattatttctga

SEQ ID NO: 7656 - DNA, 20 bp, synthetic construct
  misc_feature 1..20: note = chemically synthesized
  source 1..20: mol_type = other DNA
agggctctgttctgttccat

SEQ ID NO: 7657 - DNA, 20 bp, synthetic construct
  misc_feature 1..20: note = chemically synthesized
  source 1..20: mol_type = other DNA
tctgttctgttccattggtc

SEQ ID NO: 7658 - DNA, 20 bp, synthetic construct
  misc_feature 1..20: note = chemically synthesized
  source 1..20: mol_type = other DNA
attggtctagatctctgttt

SEQ ID NO: 7659 - DNA, 20 bp, synthetic construct
  misc_feature 1..20: note = chemically synthesized
  source 1..20: mol_type = other DNA
ctagatctctgttttggtac

SEQ ID NO: 7660 - DNA, 20 bp, synthetic construct
  misc_feature 1..20: note = chemically synthesized
  source 1..20: mol_type = other DNA
gtaccagtaccatgctgttt

SEQ ID NO: 7661 - DNA, 20 bp, synthetic construct
  misc_feature 1..20: note = chemically synthesized
  source 1..20: mol_type = other DNA
ccatgctgttttggttaccg

SEQ ID NO: 7662 - DNA, 20 bp, synthetic construct
  misc_feature 1..20: note = chemically synthesized
  source 1..20: mol_type = other DNA
ttttggttaccgtagcattg

SEQ ID NO: 7663 - DNA, 20 bp, synthetic construct
  misc_feature 1..20: note = chemically synthesized
  source 1..20: mol_type = other DNA
gttaccgtagcattgtagta

SEQ ID NO: 7664 - DNA, 20 bp, synthetic construct
  misc_feature 1..20: note = chemically synthesized
  source 1..20: mol_type = other DNA
tagcattgtagtatagtttg

SEQ ID NO: 7665 - DNA, 20 bp, synthetic construct
  misc_feature 1..20: note = chemically synthesized
  source 1..20: mol_type = other DNA
attgtagtatagtttgaagt

SEQ ID NO: 7666 - DNA, 20 bp, synthetic construct
  misc_feature 1..20: note = chemically synthesized
  source 1..20: mol_type = other DNA
ttgtagtatagtttgaagtc

SEQ ID NO: 7667 - DNA, 20 bp, synthetic construct
  misc_feature 1..20: note = chemically synthesized
  source 1..20: mol_type = other DNA
tagtatagtttgaagtcagg

SEQ ID NO: 7668 - DNA, 20 bp, synthetic construct
  misc_feature 1..20: note = chemically synthesized
  source 1..20: mol_type = other DNA
gtcaggtagcgtgatgcctc

SEQ ID NO: 7669 - DNA, 20 bp, synthetic construct
  misc_feature 1..20: note = chemically synthesized
  source 1..20: mol_type = other DNA
tgcctccagctttgttcttt

SEQ ID NO: 7670 - DNA, 20 bp, synthetic construct
  misc_feature 1..20: note = chemically synthesized
  source 1..20: mol_type = other DNA
ccagctttgttcttttggct

SEQ ID NO: 7671 - DNA, 20 bp, synthetic construct
  misc_feature 1..20: note = chemically synthesized
  source 1..20: mol_type = other DNA
cagctttgttcttttggctt

SEQ ID NO: 7672 - DNA, 20 bp, synthetic construct
  misc_feature 1..20: note = chemically synthesized
  source 1..20: mol_type = other DNA
cttttggcttaggattgcct

SEQ ID NO: 7673 - DNA, 20 bp, synthetic construct
  misc_feature 1..20: note = chemically synthesized
  source 1..20: mol_type = other DNA
ttaggattgccttggtgatg

SEQ ID NO: 7674 - DNA, 20 bp, synthetic construct
  misc_feature 1..20: note = chemically synthesized
  source 1..20: mol_type = other DNA
taggattgccttggtgatgt

SEQ ID NO: 7675 - DNA, 20 bp, synthetic construct
  misc_feature 1..20: note = chemically synthesized
  source 1..20: mol_type = other DNA
tggtgatgtgggctcttttt

SEQ ID NO: 7676 - DNA, 20 bp, synthetic construct
  misc_feature 1..20: note = chemically synthesized
  source 1..20: mol_type = other DNA
ttggttccatatgaacttta

SEQ ID NO: 7677 - DNA, 20 bp, synthetic construct
  misc_feature 1..20: note = chemically synthesized
  source 1..20: mol_type = other DNA
gttccatatgaactttaaag

SEQ ID NO: 7678 - DNA, 20 bp, synthetic construct
  misc_feature 1..20: note = chemically synthesized
  source 1..20: mol_type = other DNA
aactttaaagtagttttttc

SEQ ID NO: 7679 - DNA, 20 bp, synthetic construct
  misc_feature 1..20: note = chemically synthesized
  source 1..20: mol_type = other DNA
tagttttttccagttctgtg

SEQ ID NO: 7680 - DNA, 20 bp, synthetic construct
  misc_feature 1..20: note = chemically synthesized
  source 1..20: mol_type = other DNA
tttttccagttctgtgaaga

SEQ ID NO: 7681 - DNA, 20 bp, synthetic construct
  misc_feature 1..20: note = chemically synthesized
  source 1..20: mol_type = other DNA
agttctgtgaagaaagtcat

SEQ ID NO: 7682 - DNA, 20 bp, synthetic construct
  misc_feature 1..20: note = chemically synthesized
  source 1..20: mol_type = other DNA
tctgtgaagaaagtcattgg

SEQ ID NO: 7683 - DNA, 20 bp, synthetic construct
  misc_feature 1..20: note = chemically synthesized
  source 1..20: mol_type = other DNA
gaaagtcattggtagcttga

SEQ ID NO: 7684 - DNA, 20 bp, synthetic construct
  misc_feature 1..20: note = chemically synthesized
  source 1..20: mol_type = other DNA
aaagtcattggtagcttgat

SEQ ID NO: 7685 - DNA, 20 bp, synthetic construct
  misc_feature 1..20: note = chemically synthesized
  source 1..20: mol_type = other DNA
aagtcattggtagcttgatg

SEQ ID NO: 7686 - DNA, 20 bp, synthetic construct
  misc_feature 1..20: note = chemically synthesized
  source 1..20: mol_type = other DNA
cattggtagcttgatgggga

SEQ ID NO: 7687 - DNA, 20 bp, synthetic construct
  misc_feature 1..20: note = chemically synthesized
  source 1..20: mol_type = other DNA
attgaatctataaattacct

SEQ ID NO: 7688 - DNA, 20 bp, synthetic construct
  misc_feature 1..20: note = chemically synthesized
  source 1..20: mol_type = other DNA
ttgaatctataaattacctt

SEQ ID NO: 7689 - DNA, 20 bp, synthetic construct
  misc_feature 1..20: note = chemically synthesized
  source 1..20: mol_type = other DNA
aatctataaattaccttggg

SEQ ID NO: 7690 - DNA, 20 bp, synthetic construct
  misc_feature 1..20: note = chemically synthesized
  source 1..20: mol_type = other DNA
tattgattcttcctacccat

SEQ ID NO: 7691 - DNA, 20 bp, synthetic construct
  misc_feature 1..20: note = chemically synthesized
  source 1..20: mol_type = other DNA
attcttcctacccatgagca

SEQ ID NO: 7692 - DNA, 20 bp, synthetic construct
  misc_feature 1..20: note = chemically synthesized
  source 1..20: mol_type = other DNA
gtatcctcttttatttcatt

SEQ ID NO: 7693 - DNA, 20 bp, synthetic construct
  misc_feature 1..20: note = chemically synthesized
  source 1..20: mol_type = other DNA
tcctcttttatttcattgag

SEQ ID NO: 7694 - DNA, 20 bp, synthetic construct
  misc_feature 1..20: note = chemically synthesized
  source 1..20: mol_type = other DNA
tcttttatttcattgagcag

SEQ ID NO: 7695 - DNA, 20 bp, synthetic construct
  misc_feature 1..20: note = chemically synthesized
  source 1..20: mol_type = other DNA
tttcattgagcagtggtttg

SEQ ID NO: 7696 - DNA, 20 bp, synthetic construct
  misc_feature 1..20: note = chemically synthesized
  source 1..20: mol_type = other DNA
gtggtttgtagttctccttg

SEQ ID NO: 7697 - DNA, 20 bp, synthetic construct
  misc_feature 1..20: note = chemically synthesized
  source 1..20: mol_type = other DNA
ggtttgtagttctccttgaa

SEQ ID NO: 7698 - DNA, 20 bp, synthetic construct
  misc_feature 1..20: note = chemically synthesized
  source 1..20: mol_type = other DNA
gtttgtagttctccttgaag

SEQ ID NO: 7699 - DNA, 20 bp, synthetic construct
  misc_feature 1..20: note = chemically synthesized
  source 1..20: mol_type = other DNA
aggtccttcacatcccttgt

SEQ ID NO: 7700 - DNA, 20 bp, synthetic construct
  misc_feature 1..20: note = chemically synthesized
  source 1..20: mol_type = other DNA
ccttcacatcccttgtaagt

SEQ ID NO: 7701 - DNA, 20 bp, synthetic construct
  misc_feature 1..20: note = chemically synthesized
  source 1..20: mol_type = other DNA
tcccttgtaagttggattcc

SEQ ID NO: 7702 - DNA, 20 bp, synthetic construct
  misc_feature 1..20: note = chemically synthesized
  source 1..20: mol_type = other DNA
cccttgtaagttggattcct

SEQ ID NO: 7703 - DNA, 20 bp, synthetic construct
  misc_feature 1..20: note = chemically synthesized
  source 1..20: mol_type = other DNA
taggtattttattctctttg

SEQ ID NO: 7704 - DNA, 20 bp, synthetic construct
  misc_feature 1..20: note = chemically synthesized
  source 1..20: mol_type = other DNA
ctctttgaagcaattgtgaa

SEQ ID NO: 7705 - DNA, 20 bp, synthetic construct
  misc_feature 1..20: note = chemically synthesized
  source 1..20: mol_type = other DNA
tctttgaagcaattgtgaat

SEQ ID NO: 7706 - DNA, 20 bp, synthetic construct
  misc_feature 1..20: note = chemically synthesized
  source 1..20: mol_type = other DNA
tttgaagcaattgtgaatgg

SEQ ID NO: 7707 - DNA, 20 bp, synthetic construct
  misc_feature 1..20: note = chemically synthesized
  source 1..20: mol_type = other DNA
atgggagttcactcatgatt

SEQ ID NO: 7708 - DNA, 20 bp, synthetic construct
  misc_feature 1..20: note = chemically synthesized
  source 1..20: mol_type = other DNA
gctctctgtttgtctgttat

SEQ ID NO: 7709 - DNA, 20 bp, synthetic construct
  misc_feature 1..20: note = chemically synthesized
  source 1..20: mol_type = other DNA
gtttgtctgttattggtgca

SEQ ID NO: 7710 - DNA, 20 bp, synthetic construct
  misc_feature 1..20: note = chemically synthesized
  source 1..20: mol_type = other DNA
tttgtctgttattggtgcat

SEQ ID NO: 7711 - DNA, 20 bp, synthetic construct
  misc_feature 1..20: note = chemically synthesized
  source 1..20: mol_type = other DNA
gcacactgattttatatcct

SEQ ID NO: 7712 - DNA, 20 bp, synthetic construct
  misc_feature 1..20: note = chemically synthesized
  source 1..20: mol_type = other DNA
tatatcctgagactttgctg

SEQ ID NO: 7713 - DNA, 20 bp, synthetic construct
  misc_feature 1..20: note = chemically synthesized
  source 1..20: mol_type = other DNA
actttgctgaagttgcttat

SEQ ID NO: 7714 - DNA, 20 bp, synthetic construct
  misc_feature 1..20: note = chemically synthesized
  source 1..20: mol_type = other DNA
ctgaagttgcttatcagctt

SEQ ID NO: 7715 - DNA, 20 bp, synthetic construct
  misc_feature 1..20: note = chemically synthesized
  source 1..20: mol_type = other DNA
tgaagttgcttatcagctta

SEQ ID NO: 7716 - DNA, 20 bp, synthetic construct
  misc_feature 1..20: note = chemically synthesized
  source 1..20: mol_type = other DNA
aagttgcttatcagcttaag

SEQ ID NO: 7717 - DNA, 20 bp, synthetic construct
  misc_feature 1..20: note = chemically synthesized
  source 1..20: mol_type = other DNA
ttatcagcttaaggagattt

SEQ ID NO: 7718 - DNA, 20 bp, synthetic construct
  misc_feature 1..20: note = chemically synthesized
  source 1..20: mol_type = other DNA
tatcagcttaaggagatttt

SEQ ID NO: 7719 - DNA, 20 bp, synthetic construct
  misc_feature 1..20: note = chemically synthesized
  source 1..20: mol_type = other DNA
gcttaaggagattttgggct

SEQ ID NO: 7720 - DNA, 20 bp, synthetic construct
  misc_feature 1..20: note = chemically synthesized
  source 1..20: mol_type = other DNA
gagattttgggctgagacaa

SEQ ID NO: 7721 - DNA, 20 bp, synthetic construct
  misc_feature 1..20: note = chemically synthesized
  source 1..20: mol_type = other DNA
agattttgggctgagacaat

SEQ ID NO: 7722 - DNA, 20 bp, synthetic construct
  misc_feature 1..20: note = chemically synthesized
  source 1..20: mol_type = other DNA
gattttgggctgagacaatg

SEQ ID NO: 7723 - DNA, 20 bp, synthetic construct
  misc_feature 1..20: note = chemically synthesized
  source 1..20: mol_type = other DNA
gctgagacaatggggttttc

SEQ ID NO: 7724 - DNA, 20 bp, synthetic construct
  misc_feature 1..20: note = chemically synthesized
  source 1..20: mol_type = other DNA
acaatcatgtcatctgcaaa

SEQ ID NO: 7725 - DNA, 20 bp, synthetic construct
  misc_feature 1..20: note = chemically synthesized
  source 1..20: mol_type = other DNA
caatcatgtcatctgcaaac

SEQ ID NO: 7726 - DNA, 20 bp, synthetic construct
  misc_feature 1..20: note = chemically synthesized
  source 1..20: mol_type = other DNA
aatcatgtcatctgcaaaca

SEQ ID NO: 7727 - DNA, 20 bp, synthetic construct
  misc_feature 1..20: note = chemically synthesized
  source 1..20: mol_type = other DNA
cttctcctgcctgattgccc

SEQ ID NO: 7728 - DNA, 20 bp, synthetic construct
  misc_feature 1..20: note = chemically synthesized
  source 1..20: mol_type = other DNA
tcctgcctgattgccctggc

SEQ ID NO: 7729 - DNA, 20 bp, synthetic construct
  misc_feature 1..20: note = chemically synthesized
  source 1..20: mol_type = other DNA
acttacaacactatgttgaa

SEQ ID NO: 7730 - DNA, 20 bp, synthetic construct
  misc_feature 1..20: note = chemically synthesized
  source 1..20: mol_type = other DNA
cttacaacactatgttgaat

SEQ ID NO: 7731 - DNA, 20 bp, synthetic construct
  misc_feature 1..20: note = chemically synthesized
  source 1..20: mol_type = other DNA
tacaacactatgttgaatag

SEQ ID NO: 7732 - DNA, 20 bp, synthetic construct
  misc_feature 1..20: note = chemically synthesized
  source 1..20: mol_type = other DNA
aacactatgttgaataggag

SEQ ID NO: 7733 - DNA, 20 bp, synthetic construct
  misc_feature 1..20: note = chemically synthesized
  source 1..20: mol_type = other DNA
ctatgttgaataggagtggt

SEQ ID NO: 7734 - DNA, 20 bp, synthetic construct
  misc_feature 1..20: note = chemically synthesized
  source 1..20: mol_type = other DNA
atgttgaataggagtggtga

SEQ ID NO: 7735 - DNA, 20 bp, synthetic construct
  misc_feature 1..20: note = chemically synthesized
  source 1..20: mol_type = other DNA
gttgaataggagtggtgaga

SEQ ID NO: 7736 - DNA, 20 bp, synthetic construct
  misc_feature 1..20: note = chemically synthesized
  source 1..20: mol_type = other DNA
ttgaataggagtggtgagag

SEQ ID NO: 7737 - DNA, 20 bp, synthetic construct
  misc_feature 1..20: note = chemically synthesized
  source 1..20: mol_type = other DNA
tgaataggagtggtgagaga

SEQ ID NO: 7738 - DNA, 20 bp, synthetic construct
  misc_feature 1..20: note = chemically synthesized
  source 1..20: mol_type = other DNA
agggcatccctgccttgtgc

SEQ ID NO: 7739 - DNA, 20 bp, synthetic construct
  misc_feature 1..20: note = chemically synthesized
  source 1..20: mol_type = other DNA
ctgccttgtgccagttttca

SEQ ID NO: 7740 - DNA, 20 bp, synthetic construct
  misc_feature 1..20: note = chemically synthesized
  source 1..20: mol_type = other DNA
tgccttgtgccagttttcaa

SEQ ID NO: 7741 - DNA, 20 bp, synthetic construct
  misc_feature 1..20: note = chemically synthesized
  source 1..20: mol_type = other DNA
gccttgtgccagttttcaaa

SEQ ID NO: 7742 - DNA, 20 bp, synthetic construct
  misc_feature 1..20: note = chemically synthesized
  source 1..20: mol_type = other DNA
gttttcaaagggaatgcttc

SEQ ID NO: 7743 - DNA, 20 bp, synthetic construct
  misc_feature 1..20: note = chemically synthesized
  source 1..20: mol_type = other DNA
gcttccagtttttgtccact

SEQ ID NO: 7744 - DNA, 20 bp, synthetic construct
  misc_feature 1..20: note = chemically synthesized
  source 1..20: mol_type = other DNA
ttgtccactcagtatgatat

SEQ ID NO: 7745 - DNA, 20 bp, synthetic construct
  misc_feature 1..20: note = chemically synthesized
  source 1..20: mol_type = other DNA
actcagtatgatattggctg

SEQ ID NO: 7746 - DNA, 20 bp, synthetic construct
  misc_feature 1..20: note = chemically synthesized
  source 1..20: mol_type = other DNA
ctcagtatgatattggctgt

SEQ ID NO: 7747 - DNA, 20 bp, synthetic construct
  misc_feature 1..20: note = chemically synthesized
  source 1..20: mol_type = other DNA
tattggctgtgggtttgtca

SEQ ID NO: 7748 - DNA, 20 bp, synthetic construct
  misc_feature 1..20: note = chemically synthesized
  source 1..20: mol_type = other DNA
ggctgtgggtttgtcataga

SEQ ID NO: 7749 - DNA, 20 bp, synthetic construct
  misc_feature 1..20: note = chemically synthesized
  source 1..20: mol_type = other DNA
tagatagctcttattatttt

SEQ ID NO: 7750 - DNA, 20 bp, synthetic construct
  misc_feature 1..20: note = chemically synthesized
  source 1..20: mol_type = other DNA
ccatcaatacctaatttatt

SEQ ID NO: 7751 - DNA, 20 bp, synthetic construct
  misc_feature 1..20: note = chemically synthesized
  source 1..20: mol_type = other DNA
atcaatacctaatttattga

SEQ ID NO: 7752 - DNA, 20 bp, synthetic construct
  misc_feature 1..20: note = chemically synthesized
  source 1..20: mol_type = other DNA
cctaatttattgagagtttt

SEQ ID NO: 7753 - DNA, 20 bp, synthetic construct
  misc_feature 1..20: note = chemically synthesized
  source 1..20: mol_type = other DNA
tattgagagtttttagcatg

SEQ ID NO: 7754 - DNA, 20 bp, synthetic construct
  misc_feature 1..20: note = chemically synthesized
  source 1..20: mol_type = other DNA
agcgttgttgaattttgtca

SEQ ID NO: 7755 - DNA, 20 bp, synthetic construct
  misc_feature 1..20: note = chemically synthesized
  source 1..20: mol_type = other DNA
gcgttgttgaattttgtcaa

SEQ ID NO: 7756 - DNA, 20 bp, synthetic construct
  misc_feature 1..20: note = chemically synthesized
  source 1..20: mol_type = other DNA
aggccttttctgcatctatt

SEQ ID NO: 7757 - DNA, 20 bp, synthetic construct
  misc_feature 1..20: note = chemically synthesized
  source 1..20: mol_type = other DNA
catctattgagataatcata

SEQ ID NO: 7758 - DNA, 20 bp, synthetic construct
  misc_feature 1..20: note = chemically synthesized
  source 1..20: mol_type = other DNA
aatcatatggtttgtgtctt

SEQ ID NO: 7759 - DNA, 20 bp, synthetic construct
  misc_feature 1..20: note = chemically synthesized
  source 1..20: mol_type = other DNA
ctttggttctgtttatatgc

SEQ ID NO: 7760 - DNA, 20 bp, synthetic construct
  misc_feature 1..20: note = chemically synthesized
  source 1..20: mol_type = other DNA
ttgattttcgtatgttgaac

SEQ ID NO: 7761 - DNA, 20 bp, synthetic construct
  misc_feature 1..20: note = chemically synthesized
  source 1..20: mol_type = other DNA
tatgttgaaccagccttgca

SEQ ID NO: 7762 - DNA, 20 bp, synthetic construct
  misc_feature 1..20: note = chemically synthesized
  source 1..20: mol_type = other DNA
gttgaaccagccttgcatgg

SEQ ID NO: 7763 - DNA, 20 bp, synthetic construct
  misc_feature 1..20: note = chemically synthesized
  source 1..20: mol_type = other DNA
ttgaaccagccttgcatggc

SEQ ID NO: 7764 - DNA, 20 bp, synthetic construct
  misc_feature 1..20: note = chemically synthesized
  source 1..20: mol_type = other DNA
tgaaccagccttgcatggca

SEQ ID NO: 7765 - DNA, 20 bp, synthetic construct
  misc_feature 1..20: note = chemically synthesized
  source 1..20: mol_type = other DNA
agccttgcatggcagggatg

SEQ ID NO: 7766 - DNA, 20 bp, synthetic construct
  misc_feature 1..20: note = chemically synthesized
  source 1..20: mol_type = other DNA
ggatgaagcccacttgatca

SEQ ID NO: 7767 - DNA, 20 bp, synthetic construct
  misc_feature 1..20: note = chemically synthesized
  source 1..20: mol_type = other DNA
tgaagcccacttgatcatgg

SEQ ID NO: 7768 - DNA, 20 bp, synthetic construct
  misc_feature 1..20: note = chemically synthesized
  source 1..20: mol_type = other DNA
cccacttgatcatggtggat

SEQ ID NO: 7769 - DNA, 20 bp, synthetic construct
  misc_feature 1..20: note = chemically synthesized
  source 1..20: mol_type = other DNA
atcatggtggatcagtttgc

SEQ ID NO: 7770 - DNA, 20 bp, synthetic construct
  misc_feature 1..20: note = chemically synthesized
  source 1..20: mol_type = other DNA
cagtttgccagtattttatt

SEQ ID NO: 7771 - DNA, 20 bp, synthetic construct
  misc_feature 1..20: note = chemically synthesized
  source 1..20: mol_type = other DNA
agtttgccagtattttattg

SEQ ID NO: 7772 - DNA, 20 bp, synthetic construct
  misc_feature 1..20: note = chemically synthesized
  source 1..20: mol_type = other DNA
tttttgcatcaatgttcatc

SEQ ID NO: 7773 - DNA, 20 bp, synthetic construct
  misc_feature 1..20: note = chemically synthesized
  source 1..20: mol_type = other DNA
ttttgcatcaatgttcatca

SEQ ID NO: 7774 - DNA, 20 bp, synthetic construct
  misc_feature 1..20: note = chemically synthesized
  source 1..20: mol_type = other DNA
tcaatgttcatcaaggatat

SEQ ID NO: 7775 - DNA, 20 bp, synthetic construct
  misc_feature 1..20: note = chemically synthesized
  source 1..20: mol_type = other DNA
tttttttgttgtgtctctgt

SEQ ID NO: 7776 - DNA, 20 bp, synthetic construct
  misc_feature 1..20: note = chemically synthesized
  source 1..20: mol_type = other DNA
ttttttgttgtgtctctgtc

SEQ ID NO: 7777 - DNA, 20 bp, synthetic construct
  misc_feature 1..20: note = chemically synthesized
  source 1..20: mol_type = other DNA
gttgtgtctctgtcaggctt

SEQ ID NO: 7778 - DNA, 20 bp, synthetic construct
  misc_feature 1..20: note = chemically synthesized
  source 1..20: mol_type = other DNA
tctctgtcaggctttggtat

SEQ ID NO: 7779 - DNA, 20 bp, synthetic construct
  misc_feature 1..20: note = chemically synthesized
  source 1..20: mol_type = other DNA
ctctgtcaggctttggtatc

SEQ ID NO: 7780 - DNA, 20 bp, synthetic construct
  misc_feature 1..20: note = chemically synthesized
  source 1..20: mol_type = other DNA
ctttggtatcaggatgatgc

SEQ ID NO: 7781 - DNA, 20 bp, synthetic construct
  misc_feature 1..20: note = chemically synthesized
  source 1..20: mol_type = other DNA
tgatgctggcctcataaaat

SEQ ID NO: 7782 - DNA, 20 bp, synthetic construct
  misc_feature 1..20: note = chemically synthesized
  source 1..20: mol_type = other DNA
gctggcctcataaaatgagt

SEQ ID NO: 7783 - DNA, 20 bp, synthetic construct
  misc_feature 1..20: note = chemically synthesized
  source 1..20: mol_type = other DNA
ctggcctcataaaatgagtt

SEQ ID NO: 7784 - DNA, 20 bp, synthetic construct
  misc_feature 1..20: note = chemically synthesized
  source 1..20: mol_type = other DNA
tggcctcataaaatgagtta

SEQ ID NO: 7785 - DNA, 20 bp, synthetic construct
  misc_feature 1..20: note = chemically synthesized
  source 1..20: mol_type = other DNA
gcctcataaaatgagttagg

SEQ ID NO: 7786 - DNA, 20 bp, synthetic construct
  misc_feature 1..20: note = chemically synthesized
  source 1..20: mol_type = other DNA
cctcataaaatgagttaggg

SEQ ID NO: 7787 - DNA, 20 bp, synthetic construct
  misc_feature 1..20: note = chemically synthesized
  source 1..20: mol_type = other DNA
ttccctctttttctattgat

SEQ ID NO: 7788 - DNA, 20 bp, synthetic construct
  misc_feature 1..20: note = chemically synthesized
  source 1..20: mol_type = other DNA
tctttttctattgattggaa

SEQ ID NO: 7789 - DNA, 20 bp, synthetic construct
  misc_feature 1..20: note = chemically synthesized
  source 1..20: mol_type = other DNA
tctattgattggaatagttt

SEQ ID NO: 7790 - DNA, 20 bp, synthetic construct
  misc_feature 1..20: note = chemically synthesized
  source 1..20: mol_type = other DNA
attgattggaatagtttcag

SEQ ID NO: 7791 - DNA, 20 bp, synthetic construct
  misc_feature 1..20: note = chemically synthesized
  source 1..20: mol_type = other DNA
ttgattggaatagtttcaga

SEQ ID NO: 7792 - DNA, 20 bp, synthetic construct
  misc_feature 1..20: note = chemically synthesized
  source 1..20: mol_type = other DNA
tggaatagtttcagaaggaa

SEQ ID NO: 7793 - DNA, 20 bp, synthetic construct
  misc_feature 1..20: note = chemically synthesized
  source 1..20: mol_type = other DNA
agtttcagaaggaatggtac

SEQ ID NO: 7794 - DNA, 20 bp, synthetic construct
  misc_feature 1..20: note = chemically synthesized
  source 1..20: mol_type = other DNA
ccagctcctccttgtacctc

SEQ ID NO: 7795 - DNA, 20 bp, synthetic construct
  misc_feature 1..20: note = chemically synthesized
  source 1..20: mol_type = other DNA
gctcctccttgtacctctgg

SEQ ID NO: 7796 - DNA, 20 bp, synthetic construct
  misc_feature 1..20: note = chemically synthesized
  source 1..20: mol_type = other DNA
cttgtacctctggtagaatt

SEQ ID NO: 7797 - DNA, 20 bp, synthetic construct
  misc_feature 1..20: note = chemically synthesized
  source 1..20: mol_type = other DNA
aattcggctatgaatcctac

SEQ ID NO: 7798 - DNA, 20 bp, synthetic construct
  misc_feature 1..20: note = chemically synthesized
  source 1..20: mol_type = other DNA
gctatgaatcctactggtcc

SEQ ID NO: 7799 - DNA, 20 bp, synthetic construct
  misc_feature 1..20: note = chemically synthesized
  source 1..20: mol_type = other DNA
tactggtcccggactttttt

SEQ ID NO: 7800 - DNA, 20 bp, synthetic construct
  misc_feature 1..20: note = chemically synthesized
  source 1..20: mol_type = other DNA
ccggactttttttggttgat

SEQ ID NO: 7801 - DNA, 20 bp, synthetic construct
  misc_feature 1..20: note = chemically synthesized
  source 1..20: mol_type = other DNA
attaattattgcctcaattt

SEQ ID NO: 7802 - DNA, 20 bp, synthetic construct
  misc_feature 1..20: note = chemically synthesized
  source 1..20: mol_type = other DNA
taattattgcctcaatttca

SEQ ID NO: 7803 - DNA, 20 bp, synthetic construct
  misc_feature 1..20: note = chemically synthesized
  source 1..20: mol_type = other DNA
tcaatttcagagcctgttat

SEQ ID NO: 7804 - DNA, 20 bp, synthetic construct
  misc_feature 1..20: note = chemically synthesized
  source 1..20: mol_type = other DNA
gagcctgttattggtctatt

SEQ ID NO: 7805 - DNA, 20 bp, synthetic construct
  misc_feature 1..20: note = chemically synthesized
  source 1..20: mol_type = other DNA
gcctgttattggtctattca

SEQ ID NO: 7806 - DNA, 20 bp, synthetic construct
  misc_feature 1..20: note = chemically synthesized
  source 1..20: mol_type = other DNA
tcagagatacaacttcttcc

SEQ ID NO: 7807 - DNA, 20 bp, synthetic construct
  misc_feature 1..20: note = chemically synthesized
  source 1..20: mol_type = other DNA
gatacaacttcttcctggtt

SEQ ID NO: 7808 - DNA, 20 bp, synthetic construct
  misc_feature 1..20: note = chemically synthesized
  source 1..20: mol_type = other DNA
acttcttcctggtttagtct

SEQ ID NO: 7809 - DNA, 20 bp, synthetic construct
  misc_feature 1..20: note = chemically synthesized
  source 1..20: mol_type = other DNA
tcttcctggtttagtcttgg

SEQ ID NO: 7810 - DNA, 20 bp, synthetic construct
  misc_feature 1..20: note = chemically synthesized
  source 1..20: mol_type = other DNA
ttcctggtttagtcttggca

SEQ ID NO: 7811 - DNA, 20 bp, synthetic construct
  misc_feature 1..20: note = chemically synthesized
  source 1..20: mol_type = other DNA
cttggcagagtgtatgtgtc

SEQ ID NO: 7812 - DNA, 20 bp, synthetic construct
  misc_feature 1..20: note = chemically synthesized
  source 1..20: mol_type = other DNA
ttggcagagtgtatgtgtcg

SEQ ID NO: 7813 - DNA, 20 bp, synthetic construct
  misc_feature 1..20: note = chemically synthesized
  source 1..20: mol_type = other DNA
aggaatttatccatttcttc

SEQ ID NO: 7814 - DNA, 20 bp, synthetic construct
  misc_feature 1..20: note = chemically synthesized
  source 1..20: mol_type = other DNA
tccatttcttctagattttc

SEQ ID NO: 7815 - DNA, 20 bp, synthetic construct
  misc_feature 1..20: note = chemically synthesized
  source 1..20: mol_type = other DNA
gattttctagtttatttgcg

SEQ ID NO: 7816 - DNA, 20 bp, synthetic construct
  misc_feature 1..20: note = chemically synthesized
  source 1..20: mol_type = other DNA
ttttctagtttatttgcgta

SEQ ID NO: 7817 - DNA, 20 bp, synthetic construct
  misc_feature 1..20: note = chemically synthesized
  source 1..20: mol_type = other DNA
tttctagtttatttgcgtag

SEQ ID NO: 7818 - DNA, 20 bp, synthetic construct
  misc_feature 1..20: note = chemically synthesized
  source 1..20: mol_type = other DNA
tatttgcgtagaggtgttta

SEQ ID NO: 7819 - DNA, 20 bp, synthetic construct
  misc_feature 1..20: note = chemically synthesized
  source 1..20: mol_type = other DNA
gtgtttatagtattctctga

SEQ ID NO: 7820 - DNA, 20 bp, synthetic construct
  misc_feature 1..20: note = chemically synthesized
  source 1..20: mol_type = other DNA
tttatagtattctctgacgg

SEQ ID NO: 7821 - DNA, 20 bp, synthetic construct
  misc_feature 1..20: note = chemically synthesized
  source 1..20: mol_type = other DNA
gacggtagtttgtatttctg

SEQ ID NO: 7822 - DNA, 20 bp, synthetic construct
  misc_feature 1..20: note = chemically synthesized
  source 1..20: mol_type = other DNA
acggtagtttgtatttctgt

SEQ ID NO: 7823 - DNA, 20 bp, synthetic construct
  misc_feature 1..20: note = chemically synthesized
  source 1..20: mol_type = other DNA
agtttgtatttctgtgggat

SEQ ID NO: 7824 - DNA, 20 bp, synthetic construct
  misc_feature 1..20: note = chemically synthesized
  source 1..20: mol_type = other DNA
ttgtatttctgtgggatcag

SEQ ID NO: 7825 - DNA, 20 bp, synthetic construct
  misc_feature 1..20: note = chemically synthesized
  source 1..20: mol_type = other DNA
ttctctcttttcttctttat

SEQ ID NO: 7826 - DNA, 20 bp, synthetic construct
  misc_feature 1..20: note = chemically synthesized
  source 1..20: mol_type = other DNA
ttcttctttattagtcttgc

SEQ ID NO: 7827 - DNA, 20 bp, synthetic construct
  misc_feature 1..20: note = chemically synthesized
  source 1..20: mol_type = other DNA
ttctttattagtcttgctag

SEQ ID NO: 7828 - DNA, 20 bp, synthetic construct
  misc_feature 1..20: note = chemically synthesized
  source 1..20: mol_type = other DNA
tgttgatcttttcaaaaaaa

SEQ ID NO: 7829 - DNA, 20 bp, synthetic construct
  misc_feature 1..20: note = chemically synthesized
  source 1..20: mol_type = other DNA
cttttcaaaaaaacagcttc

SEQ ID NO: 7830 - DNA, 20 bp, synthetic construct
  misc_feature 1..20: note = chemically synthesized
  source 1..20: mol_type = other DNA
tggattcattgatttttttg

SEQ ID NO: 7831 - DNA, 20 bp, synthetic construct
  misc_feature 1..20: note = chemically synthesized
  source 1..20: mol_type = other DNA
ggattcattgatttttttga

SEQ ID NO: 7832 - DNA, 20 bp, synthetic construct
  misc_feature 1..20: note = chemically synthesized
  source 1..20: mol_type = other DNA
gattcattgatttttttgaa

SEQ ID NO: 7833 - DNA, 20 bp, synthetic construct
  misc_feature 1..20: note = chemically synthesized
  source 1..20: mol_type = other DNA
cttcacttctgctctgatct

SEQ ID NO: 7834 - DNA, 20 bp, synthetic construct
  misc_feature 1..20: note = chemically synthesized
  source 1..20: mol_type = other DNA
agttatttcttgtcttctgt

SEQ ID NO: 7835 - DNA, 20 bp, synthetic construct
  misc_feature 1..20: note = chemically synthesized
  source 1..20: mol_type = other DNA
tgtgtttgctcctgcttctc

SEQ ID NO: 7836 - DNA, 20 bp, synthetic construct
  misc_feature 1..20: note = chemically synthesized
  source 1..20: mol_type = other DNA
tagttttttaattgtgatgt

SEQ ID NO: 7837 - DNA, 20 bp, synthetic construct
  misc_feature 1..20: note = chemically synthesized
  source 1..20: mol_type = other DNA
agttttttaattgtgatgtt

SEQ ID NO: 7838 - DNA, 20 bp, synthetic construct
  misc_feature 1..20: note = chemically synthesized
  source 1..20: mol_type = other DNA
gttttttaattgtgatgtta

SEQ ID NO: 7839 - DNA, 20 bp, synthetic construct
  misc_feature 1..20: note = chemically synthesized
  source 1..20: mol_type = other DNA
tgatgttagggtgtcaattt

SEQ ID NO: 7840 - DNA, 20 bp, synthetic construct
  misc_feature 1..20: note = chemically synthesized
  source 1..20: mol_type = other DNA
atctttcctgctttcccttg

SEQ ID NO: 7841 - DNA, 20 bp, synthetic construct
  misc_feature 1..20: note = chemically synthesized
  source 1..20: mol_type = other DNA
tctttcctgctttcccttgt

SEQ ID NO: 7842 - DNA, 20 bp, synthetic construct
  misc_feature 1..20: note = chemically synthesized
  source 1..20: mol_type = other DNA
tgctttcccttgtgggcatt

SEQ ID NO: 7843 - DNA, 20 bp, synthetic construct
  misc_feature 1..20: note = chemically synthesized
  source 1..20: mol_type = other DNA
acactgctttgaatgtgtct

SEQ ID NO: 7844 - DNA, 20 bp, synthetic construct
  misc_feature 1..20: note = chemically synthesized
  source 1..20: mol_type = other DNA
actgctttgaatgtgtctca

SEQ ID NO: 7845 - DNA, 20 bp, synthetic construct
  misc_feature 1..20: note = chemically synthesized
  source 1..20: mol_type = other DNA
tgaatgtgtctcagagattc

SEQ ID NO: 7846 - DNA, 20 bp, synthetic construct
  misc_feature 1..20: note = chemically synthesized
  source 1..20: mol_type = other DNA
tgttgtgtctttgttctcgt

SEQ ID NO: 7847 - DNA, 20 bp, synthetic construct
  misc_feature 1..20: note = chemically synthesized
  source 1..20: mol_type = other DNA
ctttgttctcgttggtttca

SEQ ID NO: 7848 - DNA, 20 bp, synthetic construct
  misc_feature 1..20: note = chemically synthesized
  source 1..20: mol_type = other DNA
ccttcattttgttatgtacc

SEQ ID NO: 7849 - DNA, 20 bp, synthetic construct
  misc_feature 1..20: note = chemically synthesized
  source 1..20: mol_type = other DNA
tcattttgttatgtacccag

SEQ ID NO: 7850 - DNA, 20 bp, synthetic construct
  misc_feature 1..20: note = chemically synthesized
  source 1..20: mol_type = other DNA
ttatgtacccagtagtcatt

SEQ ID NO: 7851 - DNA, 20 bp, synthetic construct
  misc_feature 1..20: note = chemically synthesized
  source 1..20: mol_type = other DNA
tatgtacccagtagtcattc

SEQ ID NO: 7852 - DNA, 20 bp, synthetic construct
  misc_feature 1..20: note = chemically synthesized
  source 1..20: mol_type = other DNA
tgtacccagtagtcattcag

SEQ ID NO: 7853 - DNA, 20 bp, synthetic construct
  misc_feature 1..20: note = chemically synthesized
  source 1..20: mol_type = other DNA
acccagtagtcattcaggag

SEQ ID NO: 7854 - DNA, 20 bp, synthetic construct
  misc_feature 1..20: note = chemically synthesized
  source 1..20: mol_type = other DNA
cccagtagtcattcaggagc

SEQ ID NO: 7855 - DNA, 20 bp, synthetic construct
  misc_feature 1..20: note = chemically synthesized
  source 1..20: mol_type = other DNA
tcattcaggagcaggctgtt

SEQ ID NO: 7856 - DNA, 20 bp, synthetic construct
  misc_feature 1..20: note = chemically synthesized
  source 1..20: mol_type = other DNA
caggctgttcagtttccatg

SEQ ID NO: 7857 - DNA, 20 bp, synthetic construct
  misc_feature 1..20: note = chemically synthesized
  source 1..20: mol_type = other DNA
tgttcagtttccatgtagct

SEQ ID NO: 7858 - DNA, 20 bp, synthetic construct
  misc_feature 1..20: note = chemically synthesized
  source 1..20: mol_type = other DNA
tcagtttccatgtagctgag

SEQ ID NO: 7859 - DNA, 20 bp, synthetic construct
  misc_feature 1..20: note = chemically synthesized
  source 1..20: mol_type = other DNA
ccatgtagctgagtggtttt

SEQ ID NO: 7860 - DNA, 20 bp, synthetic construct
  misc_feature 1..20: note = chemically synthesized
  source 1..20: mol_type = other DNA
gtagctgagtggttttgagt

SEQ ID NO: 7861 - DNA, 20 bp, synthetic construct
  misc_feature 1..20: note = chemically synthesized
  source 1..20: mol_type = other DNA
tgagtgagtttcttaatcct

SEQ ID NO: 7862 - DNA, 20 bp, synthetic construct
  misc_feature 1..20: note = chemically synthesized
  source 1..20: mol_type = other DNA
agtttcttaatcctgagttc

SEQ ID NO: 7863 - DNA, 20 bp, synthetic construct
  misc_feature 1..20: note = chemically synthesized
  source 1..20: mol_type = other DNA
gttctagtttgattgcactg

SEQ ID NO: 7864 - DNA, 20 bp, synthetic construct
  misc_feature 1..20: note = chemically synthesized
  source 1..20: mol_type = other DNA
gtttgattgcactgtggtct

SEQ ID NO: 7865 - DNA, 20 bp, synthetic construct
  misc_feature 1..20: note = chemically synthesized
  source 1..20: mol_type = other DNA
ttgattgcactgtggtctga

SEQ ID NO: 7866 - DNA, 20 bp, synthetic construct
  misc_feature 1..20: note = chemically synthesized
  source 1..20: mol_type = other DNA
ttgcactgtggtctgagaga

SEQ ID NO: 7867 - DNA, 20 bp, synthetic construct
  misc_feature 1..20: note = chemically synthesized
  source 1..20: mol_type = other DNA
gtctgagagacagtttgtta

SEQ ID NO: 7868 - DNA, 20 bp, synthetic construct
  misc_feature 1..20: note = chemically synthesized
  source 1..20: mol_type = other DNA
tctgttcttttacatttgct

SEQ ID NO: 7869 - DNA, 20 bp, synthetic construct
  misc_feature 1..20: note = chemically synthesized
  source 1..20: mol_type = other DNA
ctgttcttttacatttgctg

SEQ ID NO: 7870 - DNA, 20 bp, synthetic construct
  misc_feature 1..20: note = chemically synthesized
  source 1..20: mol_type = other DNA
gttcttttacatttgctgag

SEQ ID NO: 7871 - DNA, 20 bp, synthetic construct
  misc_feature 1..20: note = chemically synthesized
  source 1..20: mol_type = other DNA
tcttttacatttgctgagga

SEQ ID NO: 7872 - DNA, 20 bp, synthetic construct
  misc_feature 1..20: note = chemically synthesized
  source 1..20: mol_type = other DNA
gagctttacttccaactatg

SEQ ID NO: 7873 - DNA, 20 bp, synthetic construct
  misc_feature 1..20: note = chemically synthesized
  source 1..20: mol_type = other DNA
tttacttccaactatgtggt

SEQ ID NO: 7874 - DNA, 20 bp, synthetic construct
  misc_feature 1..20: note = chemically synthesized
  source 1..20: mol_type = other DNA
tccaactatgtggtcagttt

SEQ ID NO: 7875 - DNA, 20 bp, synthetic construct
  misc_feature 1..20: note = chemically synthesized
  source 1..20: mol_type = other DNA
ctatgtggtcagttttggaa

SEQ ID NO: 7876 - DNA, 20 bp, synthetic construct
  misc_feature 1..20: note = chemically synthesized
  source 1..20: mol_type = other DNA
tatgtggtcagttttggaat

SEQ ID NO: 7877 - DNA, 20 bp, synthetic construct
  misc_feature 1..20: note = chemically synthesized
  source 1..20: mol_type = other DNA
ggtcagttttggaataggtg

SEQ ID NO: 7878 - DNA, 20 bp, synthetic construct
  misc_feature 1..20: note = chemically synthesized
  source 1..20: mol_type = other DNA
gttttggaataggtgtggtg

SEQ ID NO: 7879 - DNA, 20 bp, synthetic construct
  misc_feature 1..20: note = chemically synthesized
  source 1..20: mol_type = other DNA
aggtgtggtgtggtgctgaa

SEQ ID NO: 7880 - DNA, 20 bp, synthetic construct
  misc_feature 1..20: note = chemically synthesized
  source 1..20: mol_type = other DNA
gaatgtatattctgttgatt

SEQ ID NO: 7881 - DNA, 20 bp, synthetic construct
  misc_feature 1..20: note = chemically synthesized
  source 1..20: mol_type = other DNA
aatgtatattctgttgattt

SEQ ID NO: 7882 - DNA, 20 bp, synthetic construct
  misc_feature 1..20: note = chemically synthesized
  source 1..20: mol_type = other DNA
atgtatattctgttgatttg

SEQ ID NO: 7883 - DNA, 20 bp, synthetic construct
  misc_feature 1..20: note = chemically synthesized
  source 1..20: mol_type = other DNA
tatattctgttgatttgggg

SEQ ID NO: 7884 - DNA, 20 bp, synthetic construct
  misc_feature 1..20: note = chemically synthesized
  source 1..20: mol_type = other DNA
tattctgttgatttggggtg

SEQ ID NO: 7885 - DNA, 20 bp, synthetic construct
  misc_feature 1..20: note = chemically synthesized
  source 1..20: mol_type = other DNA
ttctgttgatttggggtgga

SEQ ID NO: 7886 - DNA, 20 bp, synthetic construct
  misc_feature 1..20: note = chemically synthesized
  source 1..20: mol_type = other DNA
atttggggtggagagttctg

SEQ ID NO: 7887 - DNA, 20 bp, synthetic construct
  misc_feature 1..20: note = chemically synthesized
  source 1..20: mol_type = other DNA
agagttctgtagatgtctat

SEQ ID NO: 7888 - DNA, 20 bp, synthetic construct
  misc_feature 1..20: note = chemically synthesized
  source 1..20: mol_type = other DNA
gagttctgtagatgtctatt

SEQ ID NO: 7889 - DNA, 20 bp, synthetic construct
  misc_feature 1..20: note = chemically synthesized
  source 1..20: mol_type = other DNA
agatgtctattaggtctgct

SEQ ID NO: 7890 - DNA, 20 bp, synthetic construct
  misc_feature 1..20: note = chemically synthesized
  source 1..20: mol_type = other DNA
tctattaggtctgcttggtg

SEQ ID NO: 7891 - DNA, 20 bp, synthetic construct
  misc_feature 1..20: note = chemically synthesized
  source 1..20: mol_type = other DNA
tattaggtctgcttggtgca

SEQ ID NO: 7892 - DNA, 20 bp, synthetic construct
  misc_feature 1..20: note = chemically synthesized
  source 1..20: mol_type = other DNA
ggtctgcttggtgcagagct

SEQ ID NO: 7893 - DNA, 20 bp, synthetic construct
  misc_feature 1..20: note = chemically synthesized
  source 1..20: mol_type = other DNA
gcagagctgagtccaattcc

SEQ ID NO: 7894 - DNA, 20 bp, synthetic construct
  misc_feature 1..20: note = chemically synthesized
  source 1..20: mol_type = other DNA
gttgatctgtctaatgttga

SEQ ID NO: 7895 - DNA, 20 bp, synthetic construct
  misc_feature 1..20: note = chemically synthesized
  source 1..20: mol_type = other DNA
gatctgtctaatgttgacag

SEQ ID NO: 7896 - DNA, 20 bp, synthetic construct
  misc_feature 1..20: note = chemically synthesized
  source 1..20: mol_type = other DNA
atctgtctaatgttgacagt

SEQ ID NO: 7897 - DNA, 20 bp, synthetic construct
  misc_feature 1..20: note = chemically synthesized
  source 1..20: mol_type = other DNA
tctgtctaatgttgacagtg

SEQ ID NO: 7898 - DNA, 20 bp, synthetic construct
  misc_feature 1..20: note = chemically synthesized
  source 1..20: mol_type = other DNA
atgttgacagtggggtgtta

SEQ ID NO: 7899 - DNA, 20 bp, synthetic construct
  misc_feature 1..20: note = chemically synthesized
  source 1..20: mol_type = other DNA
agtctcccattattattgtg

SEQ ID NO: 7900 - DNA, 20 bp, synthetic construct
  misc_feature 1..20: note = chemically synthesized
  source 1..20: mol_type = other DNA
gtctcccattattattgtgt

SEQ ID NO: 7901 - DNA, 20 bp, synthetic construct
  misc_feature 1..20: note = chemically synthesized
  source 1..20: mol_type = other DNA
ttattattgtgtgggcatct

SEQ ID NO: 7902 - DNA, 20 bp, synthetic construct
  misc_feature 1..20: note = chemically synthesized
  source 1..20: mol_type = other DNA
tgggcatctaagtctctttg

SEQ ID NO: 7903 - DNA, 20 bp, synthetic construct
  misc_feature 1..20: note = chemically synthesized
  source 1..20: mol_type = other DNA
gggcatctaagtctctttgt

SEQ ID NO: 7904 - DNA, 20 bp, synthetic construct
  misc_feature 1..20: note = chemically synthesized
  source 1..20: mol_type = other DNA
aagtctctttgtaggtcact

SEQ ID NO: 7905 - DNA, 20 bp, synthetic construct
  misc_feature 1..20: note = chemically synthesized
  source 1..20: mol_type = other DNA
agtctctttgtaggtcactc

SEQ ID NO: 7906 - DNA, 20 bp, synthetic construct
  misc_feature 1..20: note = chemically synthesized
  source 1..20: mol_type = other DNA
caggacttgttttatgaatc

SEQ ID NO: 7907 - DNA, 20 bp, synthetic construct
  misc_feature 1..20: note = chemically synthesized
  source 1..20: mol_type = other DNA
aggacttgttttatgaatct

SEQ ID NO: 7908 - DNA, 20 bp, synthetic construct
  misc_feature 1..20: note = chemically synthesized
  source 1..20: mol_type = other DNA
gaatctgggtgctcctgtat

SEQ ID NO: 7909 - DNA, 20 bp, synthetic construct
  misc_feature 1..20: note = chemically synthesized
  source 1..20: mol_type = other DNA
aatctgggtgctcctgtatt

SEQ ID NO: 7910 - DNA, 20 bp, synthetic construct
  misc_feature 1..20: note = chemically synthesized
  source 1..20: mol_type = other DNA
gtattgggtgcatatatatt

SEQ ID NO: 7911 - DNA, 20 bp, synthetic construct
  misc_feature 1..20: note = chemically synthesized
  source 1..20: mol_type = other DNA
gggtgcatatatatttagta

SEQ ID NO: 7912 - DNA, 20 bp, synthetic construct
  misc_feature 1..20: note = chemically synthesized
  source 1..20: mol_type = other DNA
gcatatatatttagtatagt

SEQ ID NO: 7913 - DNA, 20 bp, synthetic construct
  misc_feature 1..20: note = chemically synthesized
  source 1..20: mol_type = other DNA
agttagttcttcttcttgaa

SEQ ID NO: 7914 - DNA, 20 bp, synthetic construct
  misc_feature 1..20: note = chemically synthesized
  source 1..20: mol_type = other DNA
atccctttgccattatgtaa

SEQ ID NO: 7915 - DNA, 20 bp, synthetic construct
  misc_feature 1..20: note = chemically synthesized
  source 1..20: mol_type = other DNA
ttgtctcttttgatctttgt

SEQ ID NO: 7916 - DNA, 20 bp, synthetic construct
  misc_feature 1..20: note = chemically synthesized
  source 1..20: mol_type = other DNA
tggtttaaaatctgttttat

SEQ ID NO: 7917 - DNA, 20 bp, synthetic construct
  misc_feature 1..20: note = chemically synthesized
  source 1..20: mol_type = other DNA
gtttaaaatctgttttatca

SEQ ID NO: 7918 - DNA, 20 bp, synthetic construct
  misc_feature 1..20: note = chemically synthesized
  source 1..20: mol_type = other DNA
aaatctgttttatcagagac

SEQ ID NO: 7919 - DNA, 20 bp, synthetic construct
  misc_feature 1..20: note = chemically synthesized
  source 1..20: mol_type = other DNA
aatctgttttatcagagact

SEQ ID NO: 7920 - DNA, 20 bp, synthetic construct
  misc_feature 1..20: note = chemically synthesized
  source 1..20: mol_type = other DNA
ttttttgttttccatttgct

SEQ ID NO: 7921 - DNA, 20 bp, synthetic construct
  misc_feature 1..20: note = chemically synthesized
  source 1..20: mol_type = other DNA
tttgttttccatttgcttgg

SEQ ID NO: 7922 - DNA, 20 bp, synthetic construct
  misc_feature 1..20: note = chemically synthesized
  source 1..20: mol_type = other DNA
ttcctccatccttttatttc

SEQ ID NO: 7923 - DNA, 20 bp, synthetic construct
  misc_feature 1..20: note = chemically synthesized
  source 1..20: mol_type = other DNA
ctatgtgtgtctctgcacgt

SEQ ID NO: 7924 - DNA, 20 bp, synthetic construct
  misc_feature 1..20: note = chemically synthesized
  source 1..20: mol_type = other DNA
gtgtgtctctgcacgtgaga

SEQ ID NO: 7925 - DNA, 20 bp, synthetic construct
  misc_feature 1..20: note = chemically synthesized
  source 1..20: mol_type = other DNA
tgtgtctctgcacgtgagat

SEQ ID NO: 7926 - DNA, 20 bp, synthetic construct
  misc_feature 1..20: note = chemically synthesized
  source 1..20: mol_type = other DNA
tgagatgggtttcctgaata

SEQ ID NO: 7927 - DNA, 20 bp, synthetic construct
  misc_feature 1..20: note = chemically synthesized
  source 1..20: mol_type = other DNA
ggtttcctgaatacagaaca

SEQ ID NO: 7928 - DNA, 20 bp, synthetic construct
  misc_feature 1..20: note = chemically synthesized
  source 1..20: mol_type = other DNA
tcctgaatacagaacacaga

SEQ ID NO: 7929 - DNA, 20 bp, synthetic construct
  misc_feature 1..20: note = chemically synthesized
  source 1..20: mol_type = other DNA
cctgaatacagaacacagat

SEQ ID NO: 7930 - DNA, 20 bp, synthetic construct
  misc_feature 1..20: note = chemically synthesized
  source 1..20: mol_type = other DNA
tgactccttatccaatttgc

SEQ ID NO: 7931 - DNA, 20 bp, synthetic construct
  misc_feature 1..20: note = chemically synthesized
  source 1..20: mol_type = other DNA
gccagtctgtgtcttttaat

SEQ ID NO: 7932 - DNA, 20 bp, synthetic construct
  misc_feature 1..20: note = chemically synthesized
  source 1..20: mol_type = other DNA
cagtctgtgtcttttaattg

SEQ ID NO: 7933 - DNA, 20 bp, synthetic construct
  misc_feature 1..20: note = chemically synthesized
  source 1..20: mol_type = other DNA
tgtcttttaattggagcatt

SEQ ID NO: 7934 - DNA, 20 bp, synthetic construct
  misc_feature 1..20: note = chemically synthesized
  source 1..20: mol_type = other DNA
catttagcctatttacattt

SEQ ID NO: 7935 - DNA, 20 bp, synthetic construct
  misc_feature 1..20: note = chemically synthesized
  source 1..20: mol_type = other DNA
atttagcctatttacattta

SEQ ID NO: 7936 - DNA, 20 bp, synthetic construct
  misc_feature 1..20: note = chemically synthesized
  source 1..20: mol_type = other DNA
agcctatttacatttaaggt

SEQ ID NO: 7937 - DNA, 20 bp, synthetic construct
  misc_feature 1..20: note = chemically synthesized
  source 1..20: mol_type = other DNA
tgatcctgtcattatgatgt

SEQ ID NO: 7938 - DNA, 20 bp, synthetic construct
  misc_feature 1..20: note = chemically synthesized
  source 1..20: mol_type = other DNA
cctgtcattatgatgttagc

SEQ ID NO: 7939 - DNA, 20 bp, synthetic construct
  misc_feature 1..20: note = chemically synthesized
  source 1..20: mol_type = other DNA
ggttattttgctcgttgatg

SEQ ID NO: 7940 - DNA, 20 bp, synthetic construct
  misc_feature 1..20: note = chemically synthesized
  source 1..20: mol_type = other DNA
tcgttgatgcagtttcttcc

SEQ ID NO: 7941 - DNA, 20 bp, synthetic construct
  misc_feature 1..20: note = chemically synthesized
  source 1..20: mol_type = other DNA
cagtttcttcctagccttga

SEQ ID NO: 7942 - DNA, 20 bp, synthetic construct
  misc_feature 1..20: note = chemically synthesized
  source 1..20: mol_type = other DNA
ccttgatggtctttacaatt

SEQ ID NO: 7943 - DNA, 20 bp, synthetic construct
  misc_feature 1..20: note = chemically synthesized
  source 1..20: mol_type = other DNA
tacaatttggcatgtttttg

SEQ ID NO: 7944 - DNA, 20 bp, synthetic construct
  misc_feature 1..20: note = chemically synthesized
  source 1..20: mol_type = other DNA
aatttggcatgtttttgcag

SEQ ID NO: 7945 - DNA, 20 bp, synthetic construct
  misc_feature 1..20: note = chemically synthesized
  source 1..20: mol_type = other DNA
gtttttgcagtggctgatac

SEQ ID NO: 7946 - DNA, 20 bp, synthetic construct
  misc_feature 1..20: note = chemically synthesized
  source 1..20: mol_type = other DNA
tagttgttcctttccatgtt

SEQ ID NO: 7947 - DNA, 20 bp, synthetic construct
  misc_feature 1..20: note = chemically synthesized
  source 1..20: mol_type = other DNA
tccatgtttagtgcttcctt

SEQ ID NO: 7948 - DNA, 20 bp, synthetic construct
  misc_feature 1..20: note = chemically synthesized
  source 1..20: mol_type = other DNA
ccatgtttagtgcttccttc

SEQ ID NO: 7949 - DNA, 20 bp, synthetic construct
  misc_feature 1..20: note = chemically synthesized
  source 1..20: mol_type = other DNA
atgtttagtgcttccttcag

SEQ ID NO: 7950 - DNA, 20 bp, synthetic construct
  misc_feature 1..20: note = chemically synthesized
  source 1..20: mol_type = other DNA
gcttccttcaggagctcttg

SEQ ID NO: 7951 - DNA, 20 bp, synthetic construct
  misc_feature 1..20: note = chemically synthesized
  source 1..20: mol_type = other DNA
cttccttcaggagctcttgt

SEQ ID NO: 7952 - DNA, 20 bp, synthetic construct
  misc_feature 1..20: note = chemically synthesized
  source 1..20: mol_type = other DNA
ttccttcaggagctcttgta

SEQ ID NO: 7953 - DNA, 20 bp, synthetic construct
  misc_feature 1..20: note = chemically synthesized
  source 1..20: mol_type = other DNA
cttcaggagctcttgtaggg

SEQ ID NO: 7954 - DNA, 20 bp, synthetic construct
  misc_feature 1..20: note = chemically synthesized
  source 1..20: mol_type = other DNA
ttcaggagctcttgtagggc

SEQ ID NO: 7955 - DNA, 20 bp, synthetic construct
  misc_feature 1..20: note = chemically synthesized
  source 1..20: mol_type = other DNA
gagctcttgtagggcaggcc

SEQ ID NO: 7956 - DNA, 20 bp, synthetic construct
  misc_feature 1..20: note = chemically synthesized
  source 1..20: mol_type = other DNA
ctcttgtagggcaggcctgg

SEQ ID NO: 7957 - DNA, 20 bp, synthetic construct
  misc_feature 1..20: note = chemically synthesized
  source 1..20: mol_type = other DNA
ctggtggtgacaaaatctct

SEQ ID NO: 7958 - DNA, 20 bp, synthetic construct
  misc_feature 1..20: note = chemically synthesized
  source 1..20: mol_type = other DNA
tcagcatttgcttgtctgta

SEQ ID NO: 7959 - DNA, 20 bp, synthetic construct
  misc_feature 1..20: note = chemically synthesized
  source 1..20: mol_type = other DNA
cagcatttgcttgtctgtaa

SEQ ID NO: 7960 - DNA, 20 bp, synthetic construct
  misc_feature 1..20: note = chemically synthesized
  source 1..20: mol_type = other DNA
ttatttctccttcacttatg

SEQ ID NO: 7961 - DNA, 20 bp, synthetic construct
  misc_feature 1..20: note = chemically synthesized
  source 1..20: mol_type = other DNA
tctccttcacttatgaagct

SEQ ID NO: 7962 - DNA, 20 bp, synthetic construct
  misc_feature 1..20: note = chemically synthesized
  source 1..20: mol_type = other DNA
ttcacttatgaagcttagtt

SEQ ID NO: 7963 - DNA, 20 bp, synthetic construct
  misc_feature 1..20: note = chemically synthesized
  source 1..20: mol_type = other DNA
cttatgaagcttagtttggc

SEQ ID NO: 7964 - DNA, 20 bp, synthetic construct
  misc_feature 1..20: note = chemically synthesized
  source 1..20: mol_type = other DNA
tttggctggatatgaaattc

SEQ ID NO: 7965 - DNA, 20 bp, synthetic construct
  misc_feature 1..20: note = chemically synthesized
  source 1..20: mol_type = other DNA
ttggctggatatgaaattct

SEQ ID NO: 7966 - DNA, 20 bp, synthetic construct
  misc_feature 1..20: note = chemically synthesized
  source 1..20: mol_type = other DNA
tctttaacaatgttgaatat

SEQ ID NO: 7967 - DNA, 20 bp, synthetic construct
  misc_feature 1..20: note = chemically synthesized
  source 1..20: mol_type = other DNA
tattggcccccactttcttc

SEQ ID NO: 7968 - DNA, 20 bp, synthetic construct
  misc_feature 1..20: note = chemically synthesized
  source 1..20: mol_type = other DNA
ccccactttcttctggcttg

SEQ ID NO: 7969 - DNA, 20 bp, synthetic construct
  misc_feature 1..20: note = chemically synthesized
  source 1..20: mol_type = other DNA
ccactttcttctggcttgta

SEQ ID NO: 7970 - DNA, 20 bp, synthetic construct
  misc_feature 1..20: note = chemically synthesized
  source 1..20: mol_type = other DNA
gcttgtagagtttctgccga

SEQ ID NO: 7971 - DNA, 20 bp, synthetic construct
  misc_feature 1..20: note = chemically synthesized
  source 1..20: mol_type = other DNA
tagagtttctgccgatagat

SEQ ID NO: 7972 - DNA, 20 bp, synthetic construct
  misc_feature 1..20: note = chemically synthesized
  source 1..20: mol_type = other DNA
tctgccgatagatcagctgt

SEQ ID NO: 7973 - DNA, 20 bp, synthetic construct
  misc_feature 1..20: note = chemically synthesized
  source 1..20: mol_type = other DNA
tagatcagctgttagtctga

SEQ ID NO: 7974 - DNA, 20 bp, synthetic construct
  misc_feature 1..20: note = chemically synthesized
  source 1..20: mol_type = other DNA
agatcagctgttagtctgat

SEQ ID NO: 7975 - DNA, 20 bp, synthetic construct
  misc_feature 1..20: note = chemically synthesized
  source 1..20: mol_type = other DNA
gtctgatgggcttccctttg

SEQ ID NO: 7976 - DNA, 20 bp, synthetic construct
  misc_feature 1..20: note = chemically synthesized
  source 1..20: mol_type = other DNA
tctgatgggcttccctttgt

SEQ ID NO: 7977 - DNA, 20 bp, synthetic construct
  misc_feature 1..20: note = chemically synthesized
  source 1..20: mol_type = other DNA
ggtaacccgacctttctctc

SEQ ID NO: 7978 - DNA, 20 bp, synthetic construct
  misc_feature 1..20: note = chemically synthesized
  source 1..20: mol_type = other DNA
tttttccttcatttcaactt

SEQ ID NO: 7979 - DNA, 20 bp, synthetic construct
  misc_feature 1..20: note = chemically synthesized
  source 1..20: mol_type = other DNA
ttcaactttggtgaatctga

SEQ ID NO: 7980 - DNA, 20 bp, synthetic construct
  misc_feature 1..20: note = chemically synthesized
  source 1..20: mol_type = other DNA
aatctgacagttatgtgtct

SEQ ID NO: 7981 - DNA, 20 bp, synthetic construct
  misc_feature 1..20: note = chemically synthesized
  source 1..20: mol_type = other DNA
tctgacagttatgtgtcttg

SEQ ID NO: 7982 - DNA, 20 bp, synthetic construct
  misc_feature 1..20: note = chemically synthesized
  source 1..20: mol_type = other DNA
gtcttggagttgcttttctc

SEQ ID NO: 7983 - DNA, 20 bp, synthetic construct
  misc_feature 1..20: note = chemically synthesized
  source 1..20: mol_type = other DNA
tcttggagttgcttttctct

SEQ ID NO: 7984 - DNA, 20 bp, synthetic construct
  misc_feature 1..20: note = chemically synthesized
  source 1..20: mol_type = other DNA
ttggagttgcttttctctag

SEQ ID NO: 7985 - DNA, 20 bp, synthetic construct
  misc_feature 1..20: note = chemically synthesized
  source 1..20: mol_type = other DNA
tttctctaggagtatctttg

SEQ ID NO: 7986 - DNA, 20 bp, synthetic construct
  misc_feature 1..20: note = chemically synthesized
  source 1..20: mol_type = other DNA
gtatttcctgaatgtgaatt

SEQ ID NO: 7987 - DNA, 20 bp, synthetic construct
  misc_feature 1..20: note = chemically synthesized
  source 1..20: mol_type = other DNA
tatttcctgaatgtgaattt

SEQ ID NO: 7988 - DNA, 20 bp, synthetic construct
  misc_feature 1..20: note = chemically synthesized
  source 1..20: mol_type = other DNA
tgaatttgggcttgccttgc

SEQ ID NO: 7989 - DNA, 20 bp, synthetic construct
  misc_feature 1..20: note = chemically synthesized
  source 1..20: mol_type = other DNA
ttgggcttgccttgctagat

SEQ ID NO: 7990 - DNA, 20 bp, synthetic construct
  misc_feature 1..20: note = chemically synthesized
  source 1..20: mol_type = other DNA
tgggcttgccttgctagatt

SEQ ID NO: 7991 - DNA, 20 bp, synthetic construct
  misc_feature 1..20: note = chemically synthesized
  source 1..20: mol_type = other DNA
gggcttgccttgctagattg

SEQ ID NO: 7992 - DNA, 20 bp, synthetic construct
  misc_feature 1..20: note = chemically synthesized
  source 1..20: mol_type = other DNA
cttgccttgctagattgggg

SEQ ID NO: 7993 - DNA, 20 bp, synthetic construct
  misc_feature 1..20: note = chemically synthesized
  source 1..20: mol_type = other DNA
ctagattggggaagttctcc

SEQ ID NO: 7994 - DNA, 20 bp, synthetic construct
  misc_feature 1..20: note = chemically synthesized
  source 1..20: mol_type = other DNA
ttctcctggataatatcctg

SEQ ID NO: 7995 - DNA, 20 bp, synthetic construct
  misc_feature 1..20: note = chemically synthesized
  source 1..20: mol_type = other DNA
ctcctggataatatcctgca

SEQ ID NO: 7996 - DNA, 20 bp, synthetic construct
  misc_feature 1..20: note = chemically synthesized
  source 1..20: mol_type = other DNA
ctgcagagtgttttccaact

SEQ ID NO: 7997 - DNA, 20 bp, synthetic construct
  misc_feature 1..20: note = chemically synthesized
  source 1..20: mol_type = other DNA
tccattctccccatcacttt

SEQ ID NO: 7998 - DNA, 20 bp, synthetic construct
  misc_feature 1..20: note = chemically synthesized
  source 1..20: mol_type = other DNA
tcactttcagctacaccaat

SEQ ID NO: 7999 - DNA, 20 bp, synthetic construct
  misc_feature 1..20: note = chemically synthesized
  source 1..20: mol_type = other DNA
tcagctacaccaattagatg

SEQ ID NO: 8000 - DNA, 20 bp, synthetic construct
  misc_feature 1..20: note = chemically synthesized
  source 1..20: mol_type = other DNA
acaccaattagatgtagatt

SEQ ID NO: 8001 - DNA, 20 bp, synthetic construct
  misc_feature 1..20: note = chemically synthesized
  source 1..20: mol_type = other DNA
gtagatttggtcttttcaca

SEQ ID NO: 8002 - DNA, 20 bp, synthetic construct
  misc_feature 1..20: note = chemically synthesized
  source 1..20: mol_type = other DNA
tcacatagtcccatatttct

SEQ ID NO: 8003 - DNA, 20 bp, synthetic construct
  misc_feature 1..20: note = chemically synthesized
  source 1..20: mol_type = other DNA
acatagtcccatatttcttg

SEQ ID NO: 8004 - DNA, 20 bp, synthetic construct
  misc_feature 1..20: note = chemically synthesized
  source 1..20: mol_type = other DNA
catagtcccatatttcttgg

SEQ ID NO: 8005 - DNA, 20 bp, synthetic construct
  misc_feature 1..20: note = chemically synthesized
  source 1..20: mol_type = other DNA
gtcattgataccctttcttc

SEQ ID NO: 8006 - DNA, 20 bp, synthetic construct
  misc_feature 1..20: note = chemically synthesized
  source 1..20: mol_type = other DNA
tttcttccagttgatctcat

SEQ ID NO: 8007 - DNA, 20 bp, synthetic construct
  misc_feature 1..20: note = chemically synthesized
  source 1..20: mol_type = other DNA
agttgatctcatcggttact

SEQ ID NO: 8008 - DNA, 20 bp, synthetic construct
  misc_feature 1..20: note = chemically synthesized
  source 1..20: mol_type = other DNA
gttgatctcatcggttactg

SEQ ID NO: 8009 - DNA, 20 bp, synthetic construct
  misc_feature 1..20: note = chemically synthesized
  source 1..20: mol_type = other DNA
aggcttgtgtatttgtcacg

SEQ ID NO: 8010 - DNA, 20 bp, synthetic construct
  misc_feature 1..20: note = chemically synthesized
  source 1..20: mol_type = other DNA
gtcacgtagttctcctgcct

SEQ ID NO: 8011 - DNA, 20 bp, synthetic construct
  misc_feature 1..20: note = chemically synthesized
  source 1..20: mol_type = other DNA
agttctcctgccttggtttt

SEQ ID NO: 8012 - DNA, 20 bp, synthetic construct
  misc_feature 1..20: note = chemically synthesized
  source 1..20: mol_type = other DNA
gccttggttttcagctccat

SEQ ID NO: 8013 - DNA, 20 bp, synthetic construct
  misc_feature 1..20: note = chemically synthesized
  source 1..20: mol_type = other DNA
ccttggttttcagctccatc

SEQ ID NO: 8014 - DNA, 20 bp, synthetic construct
  misc_feature 1..20: note = chemically synthesized
  source 1..20: mol_type = other DNA
tcagctccatcaggtccttt

SEQ ID NO: 8015 - DNA, 20 bp, synthetic construct
  misc_feature 1..20: note = chemically synthesized
  source 1..20: mol_type = other DNA
cagctccatcaggtccttta

SEQ ID NO: 8016 - DNA, 20 bp, synthetic construct
  misc_feature 1..20: note = chemically synthesized
  source 1..20: mol_type = other DNA
ctttaaggacttctgtgcat

SEQ ID NO: 8017 - DNA, 20 bp, synthetic construct
  misc_feature 1..20: note = chemically synthesized
  source 1..20: mol_type = other DNA
cttctgtgcattggttattc

SEQ ID NO: 8018 - DNA, 20 bp, synthetic construct
  misc_feature 1..20: note = chemically synthesized
  source 1..20: mol_type = other DNA
attcatctaattttttttca

SEQ ID NO: 8019 - DNA, 20 bp, synthetic construct
  misc_feature 1..20: note = chemically synthesized
  source 1..20: mol_type = other DNA
tttgttcgaacttcctcctt

SEQ ID NO: 8020 - DNA, 20 bp, synthetic construct
  misc_feature 1..20: note = chemically synthesized
  source 1..20: mol_type = other DNA
tcgaacttcctcctttagct

SEQ ID NO: 8021 - DNA, 20 bp, synthetic construct
  misc_feature 1..20: note = chemically synthesized
  source 1..20: mol_type = other DNA
gaacttcctcctttagcttg

SEQ ID NO: 8022 - DNA, 20 bp, synthetic construct
  misc_feature 1..20: note = chemically synthesized
  source 1..20: mol_type = other DNA
cttcctcctttagcttggag

SEQ ID NO: 8023 - DNA, 20 bp, synthetic construct
  misc_feature 1..20: note = chemically synthesized
  source 1..20: mol_type = other DNA
tggagtagtttgatcttctg

SEQ ID NO: 8024 - DNA, 20 bp, synthetic construct
  misc_feature 1..20: note = chemically synthesized
  source 1..20: mol_type = other DNA
cttcctctctcaactcgtca

SEQ ID NO: 8025 - DNA, 20 bp, synthetic construct
  misc_feature 1..20: note = chemically synthesized
  source 1..20: mol_type = other DNA
cgtcaaagtcattctctgcc

SEQ ID NO: 8026 - DNA, 20 bp, synthetic construct
  misc_feature 1..20: note = chemically synthesized
  source 1..20: mol_type = other DNA
gcccagctttgttccattgc

SEQ ID NO: 8027 - DNA, 20 bp, synthetic construct
  misc_feature 1..20: note = chemically synthesized
  source 1..20: mol_type = other DNA
agctttgttccattgctggt

SEQ ID NO: 8028 - DNA, 20 bp, synthetic construct
  misc_feature 1..20: note = chemically synthesized
  source 1..20: mol_type = other DNA
gctttgttccattgctggtg

SEQ ID NO: 8029 - DNA, 20 bp, synthetic construct
  misc_feature 1..20: note = chemically synthesized
  source 1..20: mol_type = other DNA
tttgttccattgctggtgag

SEQ ID NO: 8030 - DNA, 20 bp, synthetic construct
  misc_feature 1..20: note = chemically synthesized
  source 1..20: mol_type = other DNA
ggtgaggagctgcgttactt

SEQ ID NO: 8031 - DNA, 20 bp, synthetic construct
  misc_feature 1..20: note = chemically synthesized
  source 1..20: mol_type = other DNA
tgaggagctgcgttactttg

SEQ ID NO: 8032 - DNA, 20 bp, synthetic construct
  misc_feature 1..20: note = chemically synthesized
  source 1..20: mol_type = other DNA
gaggagctgcgttactttgg

SEQ ID NO: 8033 - DNA, 20 bp, synthetic construct
  misc_feature 1..20: note = chemically synthesized
  source 1..20: mol_type = other DNA
ggagctgcgttactttggag

SEQ ID NO: 8034 - DNA, 20 bp, synthetic construct
  misc_feature 1..20: note = chemically synthesized
  source 1..20: mol_type = other DNA
gagctgcgttactttggagg

SEQ ID NO: 8035 - DNA, 20 bp, synthetic construct
  misc_feature 1..20: note = chemically synthesized
  source 1..20: mol_type = other DNA
gctgcgttactttggaggag

SEQ ID NO: 8036 - DNA, 20 bp, synthetic construct
  misc_feature 1..20: note = chemically synthesized
  source 1..20: mol_type = other DNA
tgcgttactttggaggagga

SEQ ID NO: 8037 - DNA, 20 bp, synthetic construct
  misc_feature 1..20: note = chemically synthesized
  source 1..20: mol_type = other DNA
gcgttactttggaggaggag

SEQ ID NO: 8038 - DNA, 20 bp, synthetic construct
  misc_feature 1..20: note = chemically synthesized
  source 1..20: mol_type = other DNA
aggagaggcactctcatttt

SEQ ID NO: 8039 - DNA, 20 bp, synthetic construct
  misc_feature 1..20: note = chemically synthesized
  source 1..20: mol_type = other DNA
gagaggcactctcattttta

SEQ ID NO: 8040 - DNA, 20 bp, synthetic construct
  misc_feature 1..20: note = chemically synthesized
  source 1..20: mol_type = other DNA
actctcatttttagagtgtc

SEQ ID NO: 8041 - DNA, 20 bp, synthetic construct
  misc_feature 1..20: note = chemically synthesized
  source 1..20: mol_type = other DNA
ctgctttttccccatcttta

SEQ ID NO: 8042 - DNA, 20 bp, synthetic construct
  misc_feature 1..20: note = chemically synthesized
  source 1..20: mol_type = other DNA
tttatggttttatctacctt

SEQ ID NO: 8043 - DNA, 20 bp, synthetic construct
  misc_feature 1..20: note = chemically synthesized
  source 1..20: mol_type = other DNA
ctacctttggtctttgatga

SEQ ID NO: 8044 - DNA, 20 bp, synthetic construct
  misc_feature 1..20: note = chemically synthesized
  source 1..20: mol_type = other DNA
tctttgatgatggcgatgta

SEQ ID NO: 8045 - DNA, 20 bp, synthetic construct
  misc_feature 1..20: note = chemically synthesized
  source 1..20: mol_type = other DNA
tgatgatggcgatgtacaga

SEQ ID NO: 8046 - DNA, 20 bp, synthetic construct
  misc_feature 1..20: note = chemically synthesized
  source 1..20: mol_type = other DNA
gatgatggcgatgtacagat

SEQ ID NO: 8047 - DNA, 20 bp, synthetic construct
  misc_feature 1..20: note = chemically synthesized
  source 1..20: mol_type = other DNA
gcgatgtacagatgggtttt

SEQ ID NO: 8048 - DNA, 20 bp, synthetic construct
  misc_feature 1..20: note = chemically synthesized
  source 1..20: mol_type = other DNA
gtacagatgggtttttggtg

SEQ ID NO: 8049 - DNA, 20 bp, synthetic construct
  misc_feature 1..20: note = chemically synthesized
  source 1..20: mol_type = other DNA
tggatgtcctttctgtttgt

SEQ ID NO: 8050 - DNA, 20 bp, synthetic construct
  misc_feature 1..20: note = chemically synthesized
  source 1..20: mol_type = other DNA
tttgttagttttccttctaa

SEQ ID NO: 8051 - DNA, 20 bp, synthetic construct
  misc_feature 1..20: note = chemically synthesized
  source 1..20: mol_type = other DNA
ttagttttccttctaacagt

SEQ ID NO: 8052 - DNA, 20 bp, synthetic construct
  misc_feature 1..20: note = chemically synthesized
  source 1..20: mol_type = other DNA
tagttttccttctaacagtc

SEQ ID NO: 8053 - DNA, 20 bp, synthetic construct
  misc_feature 1..20: note = chemically synthesized
  source 1..20: mol_type = other DNA
cttctaacagtcaggaccct

SEQ ID NO: 8054 - DNA, 20 bp, synthetic construct
  misc_feature 1..20: note = chemically synthesized
  source 1..20: mol_type = other DNA
acagtcaggaccctcagctg

SEQ ID NO: 8055 - DNA, 20 bp, synthetic construct
  misc_feature 1..20: note = chemically synthesized
  source 1..20: mol_type = other DNA
cagtcaggaccctcagctgc

SEQ ID NO: 8056 - DNA, 20 bp, synthetic construct
  misc_feature 1..20: note = chemically synthesized
  source 1..20: mol_type = other DNA
accctcagctgcaggtctgt

SEQ ID NO: 8057 - DNA, 20 bp, synthetic construct
  misc_feature 1..20: note = chemically synthesized
  source 1..20: mol_type = other DNA
cctcagctgcaggtctgttg

SEQ ID NO: 8058 - DNA, 20 bp, synthetic construct
  misc_feature 1..20: note = chemically synthesized
  source 1..20: mol_type = other DNA
gcaggtctgttggagtttac

SEQ ID NO: 8059 - DNA, 20 bp, synthetic construct
  misc_feature 1..20: note = chemically synthesized
  source 1..20: mol_type = other DNA
aggtctgttggagtttactg

SEQ ID NO: 8060 - DNA, 20 bp, synthetic construct
  misc_feature 1..20: note = chemically synthesized
  source 1..20: mol_type = other DNA
ggtctgttggagtttactgg

SEQ ID NO: 8061 - DNA, 20 bp, synthetic construct
  misc_feature 1..20: note = chemically synthesized
  source 1..20: mol_type = other DNA
agtttactggaggtccactc

SEQ ID NO: 8062 - DNA, 20 bp, synthetic construct
  misc_feature 1..20: note = chemically synthesized
  source 1..20: mol_type = other DNA
ttactggaggtccactccag

SEQ ID NO: 8063 - DNA, 20 bp, synthetic construct
  misc_feature 1..20: note = chemically synthesized
  source 1..20: mol_type = other DNA
cactccagaagctgttttcc

SEQ ID NO: 8064 - DNA, 20 bp, synthetic construct
  misc_feature 1..20: note = chemically synthesized
  source 1..20: mol_type = other DNA
actccagaagctgttttcct

SEQ ID NO: 8065 - DNA, 20 bp, synthetic construct
  misc_feature 1..20: note = chemically synthesized
  source 1..20: mol_type = other DNA
gctgttttcctgggtatcaa

SEQ ID NO: 8066 - DNA, 20 bp, synthetic construct
  misc_feature 1..20: note = chemically synthesized
  source 1..20: mol_type = other DNA
gttttcctgggtatcaacag

SEQ ID NO: 8067 - DNA, 20 bp, synthetic construct
  misc_feature 1..20: note = chemically synthesized
  source 1..20: mol_type = other DNA
ttcctgggtatcaacagcgg

SEQ ID NO: 8068 - DNA, 20 bp, synthetic construct
  misc_feature 1..20: note = chemically synthesized
  source 1..20: mol_type = other DNA
ggtatcaacagcggtggctg

SEQ ID NO: 8069 - DNA, 20 bp, synthetic construct
  misc_feature 1..20: note = chemically synthesized
  source 1..20: mol_type = other DNA
caacagcggtggctgcagaa

SEQ ID NO: 8070 - DNA, 20 bp, synthetic construct
  misc_feature 1..20: note = chemically synthesized
  source 1..20: mol_type = other DNA
cagcggtggctgcagaacag

SEQ ID NO: 8071 - DNA, 20 bp, synthetic construct
  misc_feature 1..20: note = chemically synthesized
  source 1..20: mol_type = other DNA
ggctgcagaacagtggatat

SEQ ID NO: 8072 - DNA, 20 bp, synthetic construct
  misc_feature 1..20: note = chemically synthesized
  source 1..20: mol_type = other DNA
ctgctgcctgatcattcctc

SEQ ID NO: 8073 - DNA, 20 bp, synthetic construct
  misc_feature 1..20: note = chemically synthesized
  source 1..20: mol_type = other DNA
ctgcctgatcattcctctgg

SEQ ID NO: 8074 - DNA, 20 bp, synthetic construct
  misc_feature 1..20: note = chemically synthesized
  source 1..20: mol_type = other DNA
ttcctctggaagttttgtct

SEQ ID NO: 8075 - DNA, 20 bp, synthetic construct
  misc_feature 1..20: note = chemically synthesized
  source 1..20: mol_type = other DNA
cctctggaagttttgtctta

SEQ ID NO: 8076 - DNA, 20 bp, synthetic construct
  misc_feature 1..20: note = chemically synthesized
  source 1..20: mol_type = other DNA
ctctggaagttttgtcttag

SEQ ID NO: 8077 - DNA, 20 bp, synthetic construct
  misc_feature 1..20: note = chemically synthesized
  source 1..20: mol_type = other DNA
ctggaagttttgtcttagag

SEQ ID NO: 8078 - DNA, 20 bp, synthetic construct
  misc_feature 1..20: note = chemically synthesized
  source 1..20: mol_type = other DNA
gttttgtcttagaggagtac

SEQ ID NO: 8079 - DNA, 20 bp, synthetic construct
  misc_feature 1..20: note = chemically synthesized
  source 1..20: mol_type = other DNA
tagaggagtaccagccatgt

SEQ ID NO: 8080 - DNA, 20 bp, synthetic construct
  misc_feature 1..20: note = chemically synthesized
  source 1..20: mol_type = other DNA
agaggagtaccagccatgtg

SEQ ID NO: 8081 - DNA, 20 bp, synthetic construct
  misc_feature 1..20: note = chemically synthesized
  source 1..20: mol_type = other DNA
gtaccagccatgtgaggtgt

SEQ ID NO: 8082 - DNA, 20 bp, synthetic construct
  misc_feature 1..20: note = chemically synthesized
  source 1..20: mol_type = other DNA
aggtgtcagtctgcccctac

SEQ ID NO: 8083 - DNA, 20 bp, synthetic construct
  misc_feature 1..20: note = chemically synthesized
  source 1..20: mol_type = other DNA
ggtgtcagtctgcccctact

SEQ ID NO: 8084 - DNA, 20 bp, synthetic construct
  misc_feature 1..20: note = chemically synthesized
  source 1..20: mol_type = other DNA
gtgtcagtctgcccctactg

SEQ ID NO: 8085 - DNA, 20 bp, synthetic construct
  misc_feature 1..20: note = chemically synthesized
  source 1..20: mol_type = other DNA
tgtcagtctgcccctactgg

SEQ ID NO: 8086 - DNA, 20 bp, synthetic construct
  misc_feature 1..20: note = chemically synthesized
  source 1..20: mol_type = other DNA
ccctactgggggatgcctcc

SEQ ID NO: 8087 - DNA, 20 bp, synthetic construct
  misc_feature 1..20: note = chemically synthesized
  source 1..20: mol_type = other DNA
actgggggatgcctcccagt

SEQ ID NO: 8088 - DNA, 20 bp, synthetic construct
  misc_feature 1..20: note = chemically synthesized
  source 1..20: mol_type = other DNA
ctgggggatgcctcccagtt

SEQ ID NO: 8089 - DNA, 20 bp, synthetic construct
  misc_feature 1..20: note = chemically synthesized
  source 1..20: mol_type = other DNA
tgcctcccagttaggctact

SEQ ID NO: 8090 - DNA, 20 bp, synthetic construct
  misc_feature 1..20: note = chemically synthesized
  source 1..20: mol_type = other DNA
gcctcccagttaggctactc

SEQ ID NO: 8091 - DNA, 20 bp, synthetic construct
  misc_feature 1..20: note = chemically synthesized
  source 1..20: mol_type = other DNA
cctcccagttaggctactcg

SEQ ID NO: 8092 - DNA, 20 bp, synthetic construct
  misc_feature 1..20: note = chemically synthesized
  source 1..20: mol_type = other DNA
ctcccagttaggctactcgg

SEQ ID NO: 8093 - DNA, 20 bp, synthetic construct
  misc_feature 1..20: note = chemically synthesized
  source 1..20: mol_type = other DNA
cagttaggctactcgggggt

SEQ ID NO: 8094 - DNA, 20 bp, synthetic construct
  misc_feature 1..20: note = chemically synthesized
  source 1..20: mol_type = other DNA
agttaggctactcgggggtc

SEQ ID NO: 8095 - DNA, 20 bp, synthetic construct
  misc_feature 1..20: note = chemically synthesized
  source 1..20: mol_type = other DNA
gttaggctactcgggggtca

SEQ ID NO: 8096 - DNA, 20 bp, synthetic construct
  misc_feature 1..20: note = chemically synthesized
  source 1..20: mol_type = other DNA
cgggggtcagggacccactt

SEQ ID NO: 8097 - DNA, 20 bp, synthetic construct
  misc_feature 1..20: note = chemically synthesized
  source 1..20: mol_type = other DNA
gggggtcagggacccacttg

SEQ ID NO: 8098 - DNA, 20 bp, synthetic construct
  misc_feature 1..20: note = chemically synthesized
  source 1..20: mol_type = other DNA
gggtcagggacccacttgag

SEQ ID NO: 8099 - DNA, 20 bp, synthetic construct
  misc_feature 1..20: note = chemically synthesized
  source 1..20: mol_type = other DNA
ggtcagggacccacttgagg

SEQ ID NO: 8100 - DNA, 20 bp, synthetic construct
  misc_feature 1..20: note = chemically synthesized
  source 1..20: mol_type = other DNA
cagggacccacttgaggagg

SEQ ID NO: 8101 - DNA, 20 bp, synthetic construct
  misc_feature 1..20: note = chemically synthesized
  source 1..20: mol_type = other DNA
ggaggcagtctgcctgttct

SEQ ID NO: 8102 - DNA, 20 bp, synthetic construct
  misc_feature 1..20: note = chemically synthesized
  source 1..20: mol_type = other DNA
tctgcctgttctcagatctg

SEQ ID NO: 8103 - DNA, 20 bp, synthetic construct
  misc_feature 1..20: note = chemically synthesized
  source 1..20: mol_type = other DNA
tcagatctgaagctatgtgc

SEQ ID NO: 8104 - DNA, 20 bp, synthetic construct
  misc_feature 1..20: note = chemically synthesized
  source 1..20: mol_type = other DNA
cagatctgaagctatgtgct

SEQ ID NO: 8105 - DNA, 20 bp, synthetic construct
  misc_feature 1..20: note = chemically synthesized
  source 1..20: mol_type = other DNA
gatctgaagctatgtgctgg

SEQ ID NO: 8106 - DNA, 20 bp, synthetic construct
  misc_feature 1..20: note = chemically synthesized
  source 1..20: mol_type = other DNA
gagaaccactactctcttca

SEQ ID NO: 8107 - DNA, 20 bp, synthetic construct
  misc_feature 1..20: note = chemically synthesized
  source 1..20: mol_type = other DNA
actactctcttcaaagctgt

SEQ ID NO: 8108 - DNA, 20 bp, synthetic construct
  misc_feature 1..20: note = chemically synthesized
  source 1..20: mol_type = other DNA
ctctcttcaaagctgtcaga

SEQ ID NO: 8109 - DNA, 20 bp, synthetic construct
  misc_feature 1..20: note = chemically synthesized
  source 1..20: mol_type = other DNA
tctcttcaaagctgtcagac

SEQ ID NO: 8110 - DNA, 20 bp, synthetic construct
  misc_feature 1..20: note = chemically synthesized
  source 1..20: mol_type = other DNA
ctcttcaaagctgtcagaca

SEQ ID NO: 8111 - DNA, 20 bp, synthetic construct
  misc_feature 1..20: note = chemically synthesized
  source 1..20: mol_type = other DNA
gctgtcagacagggacattt

SEQ ID NO: 8112 - DNA, 20 bp, synthetic construct
  misc_feature 1..20: note = chemically synthesized
  source 1..20: mol_type = other DNA
gacagggacatttaagtctg

SEQ ID NO: 8113 - DNA, 20 bp, synthetic construct
  misc_feature 1..20: note = chemically synthesized
  source 1..20: mol_type = other DNA
cagggacatttaagtctgca

SEQ ID NO: 8114 - DNA, 20 bp, synthetic construct
  misc_feature 1..20: note = chemically synthesized
  source 1..20: mol_type = other DNA
agggacatttaagtctgcag

SEQ ID NO: 8115 - DNA, 20 bp, synthetic construct
  misc_feature 1..20: note = chemically synthesized
  source 1..20: mol_type = other DNA
gtttgtctgtgccctgcccc

SEQ ID NO: 8116 - DNA, 20 bp, synthetic construct
  misc_feature 1..20: note = chemically synthesized
  source 1..20: mol_type = other DNA
ttgtctgtgccctgccccta

SEQ ID NO: 8117 - DNA, 20 bp, synthetic construct
  misc_feature 1..20: note = chemically synthesized
  source 1..20: mol_type = other DNA
tgtctgtgccctgcccctag

SEQ ID NO: 8118 - DNA, 20 bp, synthetic construct
  misc_feature 1..20: note = chemically synthesized
  source 1..20: mol_type = other DNA
ctgtgccctgcccctagagg

SEQ ID NO: 8119 - DNA, 20 bp, synthetic construct
  misc_feature 1..20: note = chemically synthesized
  source 1..20: mol_type = other DNA
gtgccctgcccctagaggtg

SEQ ID NO: 8120 - DNA, 20 bp, synthetic construct
  misc_feature 1..20: note = chemically synthesized
  source 1..20: mol_type = other DNA
gcccctagaggtggagccta

SEQ ID NO: 8121 - DNA, 20 bp, synthetic construct
  misc_feature 1..20: note = chemically synthesized
  source 1..20: mol_type = other DNA
ccctagaggtggagcctaca

SEQ ID NO: 8122 - DNA, 20 bp, synthetic construct
  misc_feature 1..20: note = chemically synthesized
  source 1..20: mol_type = other DNA
cctagaggtggagcctacag

SEQ ID NO: 8123 - DNA, 20 bp, synthetic construct
  misc_feature 1..20: note = chemically synthesized
  source 1..20: mol_type = other DNA
agaggtggagcctacagagg

SEQ ID NO: 8124 - DNA, 20 bp, synthetic construct
  misc_feature 1..20: note = chemically synthesized
  source 1..20: mol_type = other DNA
gaggtggagcctacagaggc

SEQ ID NO: 8125 - DNA, 20 bp, synthetic construct
  misc_feature 1..20: note = chemically synthesized
  source 1..20: mol_type = other DNA
gtggagcctacagaggcagg

SEQ ID NO: 8126 - DNA, 20 bp, synthetic construct
  misc_feature 1..20: note = chemically synthesized
  source 1..20: mol_type = other DNA
tggagcctacagaggcaggc

SEQ ID NO: 8127 - DNA, 20 bp, synthetic construct
  misc_feature 1..20: note = chemically synthesized
  source 1..20: mol_type = other DNA
agaggcaggcaggcctcctt

SEQ ID NO: 8128 - DNA, 20 bp, synthetic construct
  misc_feature 1..20: note = chemically synthesized
  source 1..20: mol_type = other DNA
aggcaggcctccttgagctg

SEQ ID NO: 8129 - DNA, 20 bp, synthetic construct
  misc_feature 1..20: note = chemically synthesized
  source 1..20: mol_type = other DNA
caggcctccttgagctgtgg

SEQ ID NO: 8130 - DNA, 20 bp, synthetic construct
  misc_feature 1..20: note = chemically synthesized
  source 1..20: mol_type = other DNA
aggcctccttgagctgtggt

SEQ ID NO: 8131 - DNA, 20 bp, synthetic construct
  misc_feature 1..20: note = chemically synthesized
  source 1..20: mol_type = other DNA
gagctgtggtgggctccacc

SEQ ID NO: 8132 - DNA, 20 bp, synthetic construct
  misc_feature 1..20: note = chemically synthesized
  source 1..20: mol_type = other DNA
tggtgggctccacccagttc

SEQ ID NO: 8133 - DNA, 20 bp, synthetic construct
  misc_feature 1..20: note = chemically synthesized
  source 1..20: mol_type = other DNA
ctccacccagttcgagcttc

SEQ ID NO: 8134 - DNA, 20 bp, synthetic construct
  misc_feature 1..20: note = chemically synthesized
  source 1..20: mol_type = other DNA
tccacccagttcgagcttcc

SEQ ID NO: 8135 - DNA, 20 bp, synthetic construct
  misc_feature 1..20: note = chemically synthesized
  source 1..20: mol_type = other DNA
acccagttcgagcttccagg

SEQ ID NO: 8136 - DNA, 20 bp, synthetic construct
  misc_feature 1..20: note = chemically synthesized
  source 1..20: mol_type = other DNA
gcggctttgtttacctgctc

SEQ ID NO: 8137 - DNA, 20 bp, synthetic construct
  misc_feature 1..20: note = chemically synthesized
  source 1..20: mol_type = other DNA
tttgtttacctgctcaagcc

SEQ ID NO: 8138 - DNA, 20 bp, synthetic construct
  misc_feature 1..20: note = chemically synthesized
  source 1..20: mol_type = other DNA
acctgctcaagcctggacaa

SEQ ID NO: 8139 - DNA, 20 bp, synthetic construct
  misc_feature 1..20: note = chemically synthesized
  source 1..20: mol_type = other DNA
tgctcaagcctggacaatgg

SEQ ID NO: 8140 - DNA, 20 bp, synthetic construct
  misc_feature 1..20: note = chemically synthesized
  source 1..20: mol_type = other DNA
gctcaagcctggacaatggt

SEQ ID NO: 8141 - DNA, 20 bp, synthetic construct
  misc_feature 1..20: note = chemically synthesized
  source 1..20: mol_type = other DNA
aatggtgggcacccctcccc

SEQ ID NO: 8142 - DNA, 20 bp, synthetic construct
  misc_feature 1..20: note = chemically synthesized
  source 1..20: mol_type = other DNA
ccagcctcactgccaccttg

SEQ ID NO: 8143 - DNA, 20 bp, synthetic construct
  misc_feature 1..20: note = chemically synthesized
  source 1..20: mol_type = other DNA
gccaccttgcagtttgacct

SEQ ID NO: 8144 - DNA, 20 bp, synthetic construct
  misc_feature 1..20: note = chemically synthesized
  source 1..20: mol_type = other DNA
ttgacctcagactgctgtgc

SEQ ID NO: 8145 - DNA, 20 bp, synthetic construct
  misc_feature 1..20: note = chemically synthesized
  source 1..20: mol_type = other DNA
cagactgctgtgctagcaat

SEQ ID NO: 8146 - DNA, 20 bp, synthetic construct
  misc_feature 1..20: note = chemically synthesized
  source 1..20: mol_type = other DNA
ctgctgtgctagcaatgagc

SEQ ID NO: 8147 - DNA, 20 bp, synthetic construct
  misc_feature 1..20: note = chemically synthesized
  source 1..20: mol_type = other DNA
tgctgtgctagcaatgagcg

SEQ ID NO: 8148 - DNA, 20 bp, synthetic construct
  misc_feature 1..20: note = chemically synthesized
  source 1..20: mol_type = other DNA
tagcaatgagcgaggctcca

SEQ ID NO: 8149 - DNA, 20 bp, synthetic construct
  misc_feature 1..20: note = chemically synthesized
  source 1..20: mol_type = other DNA
agcaatgagcgaggctccat

SEQ ID NO: 8150 - DNA, 20 bp, synthetic construct
  misc_feature 1..20: note = chemically synthesized
  source 1..20: mol_type = other DNA
tgagcgaggctccatgggcg

SEQ ID NO: 8151 - DNA, 20 bp, synthetic construct
  misc_feature 1..20: note = chemically synthesized
  source 1..20: mol_type = other DNA
gagcgaggctccatgggcgt

SEQ ID NO: 8152 - DNA, 20 bp, synthetic construct
  misc_feature 1..20: note = chemically synthesized
  source 1..20: mol_type = other DNA
ccatgggcgtaggaccctct

SEQ ID NO: 8153 - DNA, 20 bp, synthetic construct
  misc_feature 1..20: note = chemically synthesized
  source 1..20: mol_type = other DNA
gggcgtaggaccctctgagc

SEQ ID NO: 8154 - DNA, 20 bp, synthetic construct
  misc_feature 1..20: note = chemically synthesized
  source 1..20: mol_type = other DNA
ggcgtaggaccctctgagcc

SEQ ID NO: 8155 - DNA, 20 bp, synthetic construct
  misc_feature 1..20: note = chemically synthesized
  source 1..20: mol_type = other DNA
aggaccctctgagccaggca

SEQ ID NO: 8156 - DNA, 20 bp, synthetic construct
  misc_feature 1..20: note = chemically synthesized
  source 1..20: mol_type = other DNA
ggaccctctgagccaggcat

SEQ ID NO: 8157 - DNA, 20 bp, synthetic construct
  misc_feature 1..20: note = chemically synthesized
  source 1..20: mol_type = other DNA
aggcatgggatataatctcc

SEQ ID NO: 8158 - DNA, 20 bp, synthetic construct
  misc_feature 1..20: note = chemically synthesized
  source 1..20: mol_type = other DNA
ctcctggtgtgccatttgtt

SEQ ID NO: 8159 - DNA, 20 bp, synthetic construct
  misc_feature 1..20: note = chemically synthesized
  source 1..20: mol_type = other DNA
gtgccatttgttaagcttgt

SEQ ID NO: 8160 - DNA, 20 bp, synthetic construct
  misc_feature 1..20: note = chemically synthesized
  source 1..20: mol_type = other DNA
ccatttgttaagcttgttgg

SEQ ID NO: 8161 - DNA, 20 bp, synthetic construct
  misc_feature 1..20: note = chemically synthesized
  source 1..20: mol_type = other DNA
atttgttaagcttgttggaa

SEQ ID NO: 8162 - DNA, 20 bp, synthetic construct
  misc_feature 1..20: note = chemically synthesized
  source 1..20: mol_type = other DNA
ttaagcttgttggaagagcg

SEQ ID NO: 8163 - DNA, 20 bp, synthetic construct
  misc_feature 1..20: note = chemically synthesized
  source 1..20: mol_type = other DNA
ttgttggaagagcgcagtat

SEQ ID NO: 8164 - DNA, 20 bp, synthetic construct
  misc_feature 1..20: note = chemically synthesized
  source 1..20: mol_type = other DNA
tgttggaagagcgcagtatt

SEQ ID NO: 8165 - DNA, 20 bp, synthetic construct
  misc_feature 1..20: note = chemically synthesized
  source 1..20: mol_type = other DNA
gttggaagagcgcagtatta

SEQ ID NO: 8166 - DNA, 20 bp, synthetic construct
  misc_feature 1..20: note = chemically synthesized
  source 1..20: mol_type = other DNA
ggaagagcgcagtattaggg

SEQ ID NO: 8167 - DNA, 20 bp, synthetic construct
  misc_feature 1..20: note = chemically synthesized
  source 1..20: mol_type = other DNA
gaagagcgcagtattagggc

SEQ ID NO: 8168 - DNA, 20 bp, synthetic construct
  misc_feature 1..20: note = chemically synthesized
  source 1..20: mol_type = other DNA
agagcgcagtattagggcgg

SEQ ID NO: 8169 - DNA, 20 bp, synthetic construct
  misc_feature 1..20: note = chemically synthesized
  source 1..20: mol_type = other DNA
gcgggagtgacccgattttc

SEQ ID NO: 8170 - DNA, 20 bp, synthetic construct
  misc_feature 1..20: note = chemically synthesized
  source 1..20: mol_type = other DNA
cgggagtgacccgattttcc

SEQ ID NO: 8171 - DNA, 20 bp, synthetic construct
  misc_feature 1..20: note = chemically synthesized
  source 1..20: mol_type = other DNA
ctgtcacccttttctttgac

SEQ ID NO: 8172 - DNA, 20 bp, synthetic construct
  misc_feature 1..20: note = chemically synthesized
  source 1..20: mol_type = other DNA
tgtcacccttttctttgact

SEQ ID NO: 8173 - DNA, 20 bp, synthetic construct
  misc_feature 1..20: note = chemically synthesized
  source 1..20: mol_type = other DNA
acccttttctttgactagga

SEQ ID NO: 8174 - DNA, 20 bp, synthetic construct
  misc_feature 1..20: note = chemically synthesized
  source 1..20: mol_type = other DNA
cccttttctttgactaggaa

SEQ ID NO: 8175 - DNA, 20 bp, synthetic construct
  misc_feature 1..20: note = chemically synthesized
  source 1..20: mol_type = other DNA
ccttttctttgactaggaaa

SEQ ID NO: 8176 - DNA, 20 bp, synthetic construct
  misc_feature 1..20: note = chemically synthesized
  source 1..20: mol_type = other DNA
ccctgaccccttgtgcttcc

SEQ ID NO: 8177 - DNA, 20 bp, synthetic construct
  misc_feature 1..20: note = chemically synthesized
  source 1..20: mol_type = other DNA
cctgaccccttgtgcttccc

SEQ ID NO: 8178 - DNA, 20 bp, synthetic construct
  misc_feature 1..20: note = chemically synthesized
  source 1..20: mol_type = other DNA
accccttgtgcttcccgggt

SEQ ID NO: 8179 - DNA, 20 bp, synthetic construct
  misc_feature 1..20: note = chemically synthesized
  source 1..20: mol_type = other DNA
ccccttgtgcttcccgggtg

SEQ ID NO: 8180 - DNA, 20 bp, synthetic construct
  misc_feature 1..20: note = chemically synthesized
  source 1..20: mol_type = other DNA
ggtgatgcctcgccctgctt

SEQ ID NO: 8181 - DNA, 20 bp, synthetic construct
  misc_feature 1..20: note = chemically synthesized
  source 1..20: mol_type = other DNA
gccctgctttggctcatgca

SEQ ID NO: 8182 - DNA, 20 bp, synthetic construct
  misc_feature 1..20: note = chemically synthesized
  source 1..20: mol_type = other DNA
actgtcctgcacccactgcc

SEQ ID NO: 8183 - DNA, 20 bp, synthetic construct
  misc_feature 1..20: note = chemically synthesized
  source 1..20: mol_type = other DNA
actgcctggcacttccctgt

SEQ ID NO: 8184 - DNA, 20 bp, synthetic construct
  misc_feature 1..20: note = chemically synthesized
  source 1..20: mol_type = other DNA
acttccctgtgagatgaacc

SEQ ID NO: 8185 - DNA, 20 bp, synthetic construct
  misc_feature 1..20: note = chemically synthesized
  source 1..20: mol_type = other DNA
gtgagatgaacctggtacct

SEQ ID NO: 8186 - DNA, 20 bp, synthetic construct
  misc_feature 1..20: note = chemically synthesized
  source 1..20: mol_type = other DNA
gatgaacctggtacctcagt

SEQ ID NO: 8187 - DNA, 20 bp, synthetic construct
  misc_feature 1..20: note = chemically synthesized
  source 1..20: mol_type = other DNA
tggtacctcagttggaaatg

SEQ ID NO: 8188 - DNA, 20 bp, synthetic construct
  misc_feature 1..20: note = chemically synthesized
  source 1..20: mol_type = other DNA
gtcttctgcgtcactcacga

SEQ ID NO: 8189 - DNA, 20 bp, synthetic construct
  misc_feature 1..20: note = chemically synthesized
  source 1..20: mol_type = other DNA
tcttctgcgtcactcacgat

SEQ ID NO: 8190 - DNA, 20 bp, synthetic construct
  misc_feature 1..20: note = chemically synthesized
  source 1..20: mol_type = other DNA
ttctgcgtcactcacgatgg

SEQ ID NO: 8191 - DNA, 20 bp, synthetic construct
  misc_feature 1..20: note = chemically synthesized
  source 1..20: mol_type = other DNA
gtcactcacgatgggagcta

SEQ ID NO: 8192 - DNA, 20 bp, synthetic construct
  misc_feature 1..20: note = chemically synthesized
  source 1..20: mol_type = other DNA
tcacgatgggagctatagac

SEQ ID NO: 8193 - DNA, 20 bp, synthetic construct
  misc_feature 1..20: note = chemically synthesized
  source 1..20: mol_type = other DNA
acgatgggagctatagactg

SEQ ID NO: 8194 - DNA, 20 bp, synthetic construct
  misc_feature 1..20: note = chemically synthesized
  source 1..20: mol_type = other DNA
agactggagctgttcctatt

SEQ ID NO: 8195 - DNA, 20 bp, synthetic construct
  misc_feature 1..20: note = chemically synthesized
  source 1..20: mol_type = other DNA
ctgttcctattcggtcatct

SEQ ID NO: 8196 - DNA, 20 bp, synthetic construct
  misc_feature 1..20: note = chemically synthesized
  source 1..20: mol_type = other DNA
tttttcttttttttttgtga

SEQ ID NO: 8197 - DNA, 20 bp, synthetic construct
  misc_feature 1..20: note = chemically synthesized
  source 1..20: mol_type = other DNA
tttcttttttttttgtgacg

SEQ ID NO: 8198 - DNA, 20 bp, synthetic construct
  misc_feature 1..20: note = chemically synthesized
  source 1..20: mol_type = other DNA
cggagtctcatgctgtcacc

SEQ ID NO: 8199 - DNA, 20 bp, synthetic construct
  misc_feature 1..20: note = chemically synthesized
  source 1..20: mol_type = other DNA
ggagtctcatgctgtcacct

SEQ ID NO: 8200 - DNA, 20 bp, synthetic construct
  misc_feature 1..20: note = chemically synthesized
  source 1..20: mol_type = other DNA
tctcatgctgtcacctgggc

SEQ ID NO: 8201 - DNA, 20 bp, synthetic construct
  misc_feature 1..20: note = chemically synthesized
  source 1..20: mol_type = other DNA
ctgtcacctgggctggaatg

SEQ ID NO: 8202 - DNA, 20 bp, synthetic construct
  misc_feature 1..20: note = chemically synthesized
  source 1..20: mol_type = other DNA
tcacctgggctggaatgcag

SEQ ID NO: 8203 - DNA, 20 bp, synthetic construct
  misc_feature 1..20: note = chemically synthesized
  source 1..20: mol_type = other DNA
ggaatgcagtggcacaatct

SEQ ID NO: 8204 - DNA, 20 bp, synthetic construct
  misc_feature 1..20: note = chemically synthesized
  source 1..20: mol_type = other DNA
tcactgcaacctctgcctcc

SEQ ID NO: 8205 - DNA, 20 bp, synthetic construct
  misc_feature 1..20: note = chemically synthesized
  source 1..20: mol_type = other DNA
cactgcaacctctgcctccc

SEQ ID NO: 8206 - DNA, 20 bp, synthetic construct
  misc_feature 1..20: note = chemically synthesized
  source 1..20: mol_type = other DNA
aacctctgcctcccaggatc

SEQ ID NO: 8207 - DNA, 20 bp, synthetic construct
  misc_feature 1..20: note = chemically synthesized
  source 1..20: mol_type = other DNA
atcaagcgattctcctgcct

SEQ ID NO: 8208 - DNA, 20 bp, synthetic construct
  misc_feature 1..20: note = chemically synthesized
  source 1..20: mol_type = other DNA
gcctcagcctcccaaattgc

SEQ ID NO: 8209 - DNA, 20 bp, synthetic construct
  misc_feature 1..20: note = chemically synthesized
  source 1..20: mol_type = other DNA
cctcagcctcccaaattgct

SEQ ID NO: 8210 - DNA, 20 bp, synthetic construct
  misc_feature 1..20: note = chemically synthesized
  source 1..20: mol_type = other DNA
acacatgcctgccaccacgc

SEQ ID NO: 8211 - DNA, 20 bp, synthetic construct
  misc_feature 1..20: note = chemically synthesized
  source 1..20: mol_type = other DNA
cacatgcctgccaccacgcc

SEQ ID NO: 8212 - DNA, 20 bp, synthetic construct
  misc_feature 1..20: note = chemically synthesized
  source 1..20: mol_type = other DNA
gcctgccaccacgccaggct

SEQ ID NO: 8213 - DNA, 20 bp, synthetic construct
  misc_feature 1..20: note = chemically synthesized
  source 1..20: mol_type = other DNA
aggctaagtttttatatttt

SEQ ID NO: 8214 - DNA, 20 bp, synthetic construct
  misc_feature 1..20: note = chemically synthesized
  source 1..20: mol_type = other DNA
ctaagtttttatatttttag

SEQ ID NO: 8215 - DNA, 20 bp, synthetic construct
  misc_feature 1..20: note = chemically synthesized
  source 1..20: mol_type = other DNA
tttatatttttagtagcgat

SEQ ID NO: 8216 - DNA, 20 bp, synthetic construct
  misc_feature 1..20: note = chemically synthesized
  source 1..20: mol_type = other DNA
ttatatttttagtagcgatg

SEQ ID NO: 8217 - DNA, 20 bp, synthetic construct
  misc_feature 1..20: note = chemically synthesized
  source 1..20: mol_type = other DNA
gcgatgaggtttcactatgt

SEQ ID NO: 8218 - DNA, 20 bp, synthetic construct
  misc_feature 1..20: note = chemically synthesized
  source 1..20: mol_type = other DNA
tgaggtttcactatgttggc

SEQ ID NO: 8219 - DNA, 20 bp, synthetic construct
  misc_feature 1..20: note = chemically synthesized
  source 1..20: mol_type = other DNA
gaggtttcactatgttggcc

SEQ ID NO: 8220 - DNA, 20 bp, synthetic construct
  misc_feature 1..20: note = chemically synthesized
  source 1..20: mol_type = other DNA
gacgtcgtgatccgcctgtc

SEQ ID NO: 8221 - DNA, 20 bp, synthetic construct
  misc_feature 1..20: note = chemically synthesized
  source 1..20: mol_type = other DNA
acgtcgtgatccgcctgtct

SEQ ID NO: 8222 - DNA, 20 bp, synthetic construct
  misc_feature 1..20: note = chemically synthesized
  source 1..20: mol_type = other DNA
ccgcctgtctaggcctccca

SEQ ID NO: 8223 - DNA, 20 bp, synthetic construct
  misc_feature 1..20: note = chemically synthesized
  source 1..20: mol_type = other DNA
ctcccaaagtgctgcaattg

SEQ ID NO: 8224 - DNA, 20 bp, synthetic construct
  misc_feature 1..20: note = chemically synthesized
  source 1..20: mol_type = other DNA
tcccaaagtgctgcaattgc

SEQ ID NO: 8225 - DNA, 20 bp, synthetic construct
  misc_feature 1..20: note = chemically synthesized
  source 1..20: mol_type = other DNA
agtgctgcaattgcaggtgt

SEQ ID NO: 8226 - DNA, 20 bp, synthetic construct
  misc_feature 1..20: note = chemically synthesized
  source 1..20: mol_type = other DNA
caggtgtgagccaccgctcc

SEQ ID NO: 8227 - DNA, 20 bp, synthetic construct
  misc_feature 1..20: note = chemically synthesized
  source 1..20: mol_type = other DNA
gtgagccaccgctcccagcc

SEQ ID NO: 8228 - DNA, 20 bp, synthetic construct
  misc_feature 1..20: note = chemically synthesized
  source 1..20: mol_type = other DNA
tgaatttatttctcccttga

SEQ ID NO: 8229 - DNA, 20 bp, synthetic construct
  misc_feature 1..20: note = chemically synthesized
  source 1..20: mol_type = other DNA
tcccttgatagtttctactt

SEQ ID NO: 8230 - DNA, 20 bp, synthetic construct
  misc_feature 1..20: note = chemically synthesized
  source 1..20: mol_type = other DNA
cccttgatagtttctacttt

SEQ ID NO: 8231 - DNA, 20 bp, synthetic construct
  misc_feature 1..20: note = chemically synthesized
  source 1..20: mol_type = other DNA
ttgggttgataattaaataa

SEQ ID NO: 8232 - DNA, 20 bp, synthetic construct
  misc_feature 1..20: note = chemically synthesized
  source 1..20: mol_type = other DNA
taaataacagtgttatctct

SEQ ID NO: 8233 - DNA, 20 bp, synthetic construct
  misc_feature 1..20: note = chemically synthesized
  source 1..20: mol_type = other DNA
gtcttcccatatttttattc

SEQ ID NO: 8234 - DNA, 20 bp, synthetic construct
  misc_feature 1..20: note = chemically synthesized
  source 1..20: mol_type = other DNA
cctaattgtgtaatcgattg

SEQ ID NO: 8235 - DNA, 20 bp, synthetic construct
  misc_feature 1..20: note = chemically synthesized
  source 1..20: mol_type = other DNA
gtaatcgattgtggtatatg

SEQ ID NO: 8236 - DNA, 20 bp, synthetic construct
  misc_feature 1..20: note = chemically synthesized
  source 1..20: mol_type = other DNA
cgattgtggtatatgcagtt

SEQ ID NO: 8237 - DNA, 20 bp, synthetic construct
  misc_feature 1..20: note = chemically synthesized
  source 1..20: mol_type = other DNA
ttcactttactcttttcaaa

SEQ ID NO: 8238 - DNA, 20 bp, synthetic construct
  misc_feature 1..20: note = chemically synthesized
  source 1..20: mol_type = other DNA
tttactcttttcaaaaagta

SEQ ID NO: 8239 - DNA, 20 bp, synthetic construct
  misc_feature 1..20: note = chemically synthesized
  source 1..20: mol_type = other DNA
actgtttgttttttatttcc

SEQ ID NO: 8240 - DNA, 20 bp, synthetic construct
  misc_feature 1..20: note = chemically synthesized
  source 1..20: mol_type = other DNA
tatttccaagctaaatttaa

SEQ ID NO: 8241 - DNA, 20 bp, synthetic construct
  misc_feature 1..20: note = chemically synthesized
  source 1..20: mol_type = other DNA
tatatcacattattatattt

SEQ ID NO: 8242 - DNA, 20 bp, synthetic construct
  misc_feature 1..20: note = chemically synthesized
  source 1..20: mol_type = other DNA
tcacattattatattttagt

SEQ ID NO: 8243 - DNA, 20 bp, synthetic construct
  misc_feature 1..20: note = chemically synthesized
  source 1..20: mol_type = other DNA
tattatattttagtgagatt

SEQ ID NO: 8244 - DNA, 20 bp, synthetic construct
  misc_feature 1..20: note = chemically synthesized
  source 1..20: mol_type = other DNA
ttttagtgagatttagtttt

SEQ ID NO: 8245 - DNA, 20 bp, synthetic construct
  misc_feature 1..20: note = chemically synthesized
  source 1..20: mol_type = other DNA
ccactatcttacttacacat

SEQ ID NO: 8246 - DNA, 20 bp, synthetic construct
  misc_feature 1..20: note = chemically synthesized
  source 1..20: mol_type = other DNA
ctatcttacttacacatgag

SEQ ID NO: 8247 - DNA, 20 bp, synthetic construct
  misc_feature 1..20: note = chemically synthesized
  source 1..20: mol_type = other DNA
gtattaatttaacatgattt

SEQ ID NO: 8248 - DNA, 20 bp, synthetic construct
  misc_feature 1..20: note = chemically synthesized
  source 1..20: mol_type = other DNA
tttaacatgattttagaatg

SEQ ID NO: 8249 - DNA, 20 bp, synthetic construct
  misc_feature 1..20: note = chemically synthesized
  source 1..20: mol_type = other DNA
attttagaatgaagaaaatg

SEQ ID NO: 8250 - DNA, 20 bp, synthetic construct
  misc_feature 1..20: note = chemically synthesized
  source 1..20: mol_type = other DNA
gaagaaaatgaagccatttt

SEQ ID NO: 8251 - DNA, 20 bp, synthetic construct
  misc_feature 1..20: note = chemically synthesized
  source 1..20: mol_type = other DNA
gccatttttagataaaccaa

SEQ ID NO: 8252 - DNA, 20 bp, synthetic construct
  misc_feature 1..20: note = chemically synthesized
  source 1..20: mol_type = other DNA
caaaagtaacaatgtatttc

SEQ ID NO: 8253 - DNA, 20 bp, synthetic construct
  misc_feature 1..20: note = chemically synthesized
  source 1..20: mol_type = other DNA
aagtaacaatgtatttccag

SEQ ID NO: 8254 - DNA, 20 bp, synthetic construct
  misc_feature 1..20: note = chemically synthesized
  source 1..20: mol_type = other DNA
aacaatgtatttccagcaga

SEQ ID NO: 8255 - DNA, 20 bp, synthetic construct
  misc_feature 1..20: note = chemically synthesized
  source 1..20: mol_type = other DNA
caatgtatttccagcagaaa

SEQ ID NO: 8256 - DNA, 20 bp, synthetic construct
  misc_feature 1..20: note = chemically synthesized
  source 1..20: mol_type = other DNA
cagcagaaagagataatatt

SEQ ID NO: 8257 - DNA, 20 bp, synthetic construct
  misc_feature 1..20: note = chemically synthesized
  source 1..20: mol_type = other DNA
agcagaaagagataatatta

SEQ ID NO: 8258 - DNA, 20 bp, synthetic construct
  misc_feature 1..20: note = chemically synthesized
  source 1..20: mol_type = other DNA
gagataatattaaggataat

SEQ ID NO: 8259 - DNA, 20 bp, synthetic construct
  misc_feature 1..20: note = chemically synthesized
  source 1..20: mol_type = other DNA
taaggataatcagaaaaaaa

SEQ ID NO: 8260 - DNA, 20 bp, synthetic construct
  misc_feature 1..20: note = chemically synthesized
  source 1..20: mol_type = other DNA
agaaaaaaatagaataaact

SEQ ID NO: 8261 - DNA, 20 bp, synthetic construct
  misc_feature 1..20: note = chemically synthesized
  source 1..20: mol_type = other DNA
aaaaaaatagaataaactta

SEQ ID NO: 8262 - DNA, 20 bp, synthetic construct
  misc_feature 1..20: note = chemically synthesized
  source 1..20: mol_type = other DNA
aaaaatagaataaacttaga

SEQ ID NO: 8263 - DNA, 20 bp, synthetic construct
  misc_feature 1..20: note = chemically synthesized
  source 1..20: mol_type = other DNA
aataaacttagagagaatgt

SEQ ID NO: 8264 - DNA, 20 bp, synthetic construct
  misc_feature 1..20: note = chemically synthesized
  source 1..20: mol_type = other DNA
tagagagaatgttagaaatg

SEQ ID NO: 8265 - DNA, 20 bp, synthetic construct
  misc_feature 1..20: note = chemically synthesized
  source 1..20: mol_type = other DNA
agaatgttagaaatgaagaa

SEQ ID NO: 8266 - DNA, 20 bp, synthetic construct
  misc_feature 1..20: note = chemically synthesized
  source 1..20: mol_type = other DNA
atgcaaaacattttgtacat

SEQ ID NO: 8267 - DNA, 20 bp, synthetic construct
  misc_feature 1..20: note = chemically synthesized
  source 1..20: mol_type = other DNA
tcactatttaataataacac

SEQ ID NO: 8268 - DNA, 20 bp, synthetic construct
  misc_feature 1..20: note = chemically synthesized
  source 1..20: mol_type = other DNA
aataataacactagaaaatc

SEQ ID NO: 8269 - DNA, 20 bp, synthetic construct
  misc_feature 1..20: note = chemically synthesized
  source 1..20: mol_type = other DNA
ataataacactagaaaatct

SEQ ID NO: 8270 - DNA, 20 bp, synthetic construct
  misc_feature 1..20: note = chemically synthesized
  source 1..20: mol_type = other DNA
taataacactagaaaatcta

SEQ ID NO: 8271 - DNA, 20 bp, synthetic construct
  misc_feature 1..20: note = chemically synthesized
  source 1..20: mol_type = other DNA
ataacactagaaaatctagg

SEQ ID NO: 8272 - DNA, 20 bp, synthetic construct
  misc_feature 1..20: note = chemically synthesized
  source 1..20: mol_type = other DNA
aatatatatatatataatta

SEQ ID NO: 8273 - DNA, 20 bp, synthetic construct
  misc_feature 1..20: note = chemically synthesized
  source 1..20: mol_type = other DNA
atatatatataattatagat

SEQ ID NO: 8274 - DNA, 20 bp, synthetic construct
  misc_feature 1..20: note = chemically synthesized
  source 1..20: mol_type = other DNA
tatatatataattatagatt

SEQ ID NO: 8275 - DNA, 20 bp, synthetic construct
  misc_feature 1..20: note = chemically synthesized
  source 1..20: mol_type = other DNA
atatataattatagattggg

SEQ ID NO: 8276 - DNA, 20 bp, synthetic construct
  misc_feature 1..20: note = chemically synthesized
  source 1..20: mol_type = other DNA
tatataattatagattggga

SEQ ID NO: 8277 - DNA, 20 bp, synthetic construct
  misc_feature 1..20: note = chemically synthesized
  source 1..20: mol_type = other DNA
atataattatagattgggaa

SEQ ID NO: 8278 - DNA, 20 bp, synthetic construct
  misc_feature 1..20: note = chemically synthesized
  source 1..20: mol_type = other DNA
tataattatagattgggaag

SEQ ID NO: 8279 - DNA, 20 bp, synthetic construct
  misc_feature 1..20: note = chemically synthesized
  source 1..20: mol_type = other DNA
agattgggaaggggaaaatg

SEQ ID NO: 8280 - DNA, 20 bp, synthetic construct
  misc_feature 1..20: note = chemically synthesized
  source 1..20: mol_type = other DNA
ggaaggggaaaatgaagata

SEQ ID NO: 8281 - DNA, 20 bp, synthetic construct
  misc_feature 1..20: note = chemically synthesized
  source 1..20: mol_type = other DNA
taaaatttattgtattgttt

SEQ ID NO: 8282 - DNA, 20 bp, synthetic construct
  misc_feature 1..20: note = chemically synthesized
  source 1..20: mol_type = other DNA
tttattgtattgttttggaa

SEQ ID NO: 8283 - DNA, 20 bp, synthetic construct
  misc_feature 1..20: note = chemically synthesized
  source 1..20: mol_type = other DNA
tattgtattgttttggaaaa

SEQ ID NO: 8284 - DNA, 20 bp, synthetic construct
  misc_feature 1..20: note = chemically synthesized
  source 1..20: mol_type = other DNA
ttgttttggaaaagagtaaa

SEQ ID NO: 8285 - DNA, 20 bp, synthetic construct
  misc_feature 1..20: note = chemically synthesized
  source 1..20: mol_type = other DNA
gaaaagagtaaacagtcaaa

SEQ ID NO: 8286 - DNA, 20 bp, synthetic construct
  misc_feature 1..20: note = chemically synthesized
  source 1..20: mol_type = other DNA
atatttgtatctgaaaaatc

SEQ ID NO: 8287 - DNA, 20 bp, synthetic construct
  misc_feature 1..20: note = chemically synthesized
  source 1..20: mol_type = other DNA
agaatgcaattctaatcatc

SEQ ID NO: 8288 - DNA, 20 bp, synthetic construct
  misc_feature 1..20: note = chemically synthesized
  source 1..20: mol_type = other DNA
agatgcatttttttattttt

SEQ ID NO: 8289 - DNA, 20 bp, synthetic construct
  misc_feature 1..20: note = chemically synthesized
  source 1..20: mol_type = other DNA
tattattcttcaactttatt

SEQ ID NO: 8290 - DNA, 20 bp, synthetic construct
  misc_feature 1..20: note = chemically synthesized
  source 1..20: mol_type = other DNA
attattcttcaactttattg

SEQ ID NO: 8291 - DNA, 20 bp, synthetic construct
  misc_feature 1..20: note = chemically synthesized
  source 1..20: mol_type = other DNA
aataaaaattgtatatattt

SEQ ID NO: 8292 - DNA, 20 bp, synthetic construct
  misc_feature 1..20: note = chemically synthesized
  source 1..20: mol_type = other DNA
ataaaaattgtatatattta

SEQ ID NO: 8293 - DNA, 20 bp, synthetic construct
  misc_feature 1..20: note = chemically synthesized
  source 1..20: mol_type = other DNA
gtgaaatgattaccacaatc

SEQ ID NO: 8294 - DNA, 20 bp, synthetic construct
  misc_feature 1..20: note = chemically synthesized
  source 1..20: mol_type = other DNA
aacatacccattatctcaca

SEQ ID NO: 8295 - DNA, 20 bp, synthetic construct
  misc_feature 1..20: note = chemically synthesized
  source 1..20: mol_type = other DNA
acatagttacctttttcttg

SEQ ID NO: 8296 - DNA, 20 bp, synthetic construct
  misc_feature 1..20: note = chemically synthesized
  source 1..20: mol_type = other DNA
ttcttgtggtaaatgctttt

SEQ ID NO: 8297 - DNA, 20 bp, synthetic construct
  misc_feature 1..20: note = chemically synthesized
  source 1..20: mol_type = other DNA
atgcttttaagatctactct

SEQ ID NO: 8298 - DNA, 20 bp, synthetic construct
  misc_feature 1..20: note = chemically synthesized
  source 1..20: mol_type = other DNA
ttttaagatctactctcggc

SEQ ID NO: 8299 - DNA, 20 bp, synthetic construct
  misc_feature 1..20: note = chemically synthesized
  source 1..20: mol_type = other DNA
tttaagatctactctcggcc

SEQ ID NO: 8300 - DNA, 20 bp, synthetic construct
  misc_feature 1..20: note = chemically synthesized
  source 1..20: mol_type = other DNA
gatctactctcggccaggcc

SEQ ID NO: 8301 - DNA, 20 bp, synthetic construct
  misc_feature 1..20: note = chemically synthesized
  source 1..20: mol_type = other DNA
ctactctcggccaggcccgg

SEQ ID NO: 8302 - DNA, 20 bp, synthetic construct
  misc_feature 1..20: note = chemically synthesized
  source 1..20: mol_type = other DNA
gtggctcacgcctgtaatcc

SEQ ID NO: 8303 - DNA, 20 bp, synthetic construct
  misc_feature 1..20: note = chemically synthesized
  source 1..20: mol_type = other DNA
cgcctgtaatcccagccctt

SEQ ID NO: 8304 - DNA, 20 bp, synthetic construct
  misc_feature 1..20: note = chemically synthesized
  source 1..20: mol_type = other DNA
gcctgtaatcccagcccttt

SEQ ID NO: 8305 - DNA, 20 bp, synthetic construct
  misc_feature 1..20: note = chemically synthesized
  source 1..20: mol_type = other DNA
tgtaatcccagccctttggg

SEQ ID NO: 8306 - DNA, 20 bp, synthetic construct
  misc_feature 1..20: note = chemically synthesized
  source 1..20: mol_type = other DNA
tcccagccctttgggtggcc

SEQ ID NO: 8307 - DNA, 20 bp, synthetic construct
  misc_feature 1..20: note = chemically synthesized
  source 1..20: mol_type = other DNA
cccagccctttgggtggccg

SEQ ID NO: 8308 - DNA, 20 bp, synthetic construct
  misc_feature 1..20: note = chemically synthesized
  source 1..20: mol_type = other DNA
agccctttgggtggccgagg

SEQ ID NO: 8309 - DNA, 20 bp, synthetic construct
  misc_feature 1..20: note = chemically synthesized
  source 1..20: mol_type = other DNA
gccctttgggtggccgaggc

SEQ ID NO: 8310 - DNA, 20 bp, synthetic construct
  misc_feature 1..20: note = chemically synthesized
  source 1..20: mol_type = other DNA
ctttgggtggccgaggcagg

SEQ ID NO: 8311 - DNA, 20 bp, synthetic construct
  misc_feature 1..20: note = chemically synthesized
  source 1..20: mol_type = other DNA
ggtggccgaggcaggcggat

SEQ ID NO: 8312 - DNA, 20 bp, synthetic construct
  misc_feature 1..20: note = chemically synthesized
  source 1..20: mol_type = other DNA
gcggatcagcctgaccaaca

SEQ ID NO: 8313 - DNA, 20 bp, synthetic construct
  misc_feature 1..20: note = chemically synthesized
  source 1..20: mol_type = other DNA
ggatcagcctgaccaacatg

SEQ ID NO: 8314 - DNA, 20 bp, synthetic construct
  misc_feature 1..20: note = chemically synthesized
  source 1..20: mol_type = other DNA
ctctactaaaaatacaaaat

SEQ ID NO: 8315 - DNA, 20 bp, synthetic construct
  misc_feature 1..20: note = chemically synthesized
  source 1..20: mol_type = other DNA
actaaaaatacaaaattagc

SEQ ID NO: 8316 - DNA, 20 bp, synthetic construct
  misc_feature 1..20: note = chemically synthesized
  source 1..20: mol_type = other DNA
ctaaaaatacaaaattagct

SEQ ID NO: 8317 - DNA, 20 bp, synthetic construct
  misc_feature 1..20: note = chemically synthesized
  source 1..20: mol_type = other DNA
aatacaaaattagctgggca

SEQ ID NO: 8318 - DNA, 20 bp, synthetic construct
  misc_feature 1..20: note = chemically synthesized
  source 1..20: mol_type = other DNA
gtgtcgcatgcctgtaatcc

SEQ ID NO: 8319 - DNA, 20 bp, synthetic construct
  misc_feature 1..20: note = chemically synthesized
  source 1..20: mol_type = other DNA
tgcctgtaatcccagctact

SEQ ID NO: 8320 - DNA, 20 bp, synthetic construct
  misc_feature 1..20: note = chemically synthesized
  source 1..20: mol_type = other DNA
gcctgtaatcccagctactc

SEQ ID NO: 8321 - DNA, 20 bp, synthetic construct
  misc_feature 1..20: note = chemically synthesized
  source 1..20: mol_type = other DNA
ctgtaatcccagctactcgg

SEQ ID NO: 8322 - DNA, 20 bp, synthetic construct
  misc_feature 1..20: note = chemically synthesized
  source 1..20: mol_type = other DNA
tgtaatcccagctactcggg

SEQ ID NO: 8323 - DNA, 20 bp, synthetic construct
  misc_feature 1..20: note = chemically synthesized
  source 1..20: mol_type = other DNA
tcccagctactcgggaggct

SEQ ID NO: 8324 - DNA, 20 bp, synthetic construct
  misc_feature 1..20: note = chemically synthesized
  source 1..20: mol_type = other DNA
cccagctactcgggaggctg

SEQ ID NO: 8325 - DNA, 20 bp, synthetic construct
  misc_feature 1..20: note = chemically synthesized
  source 1..20: mol_type = other DNA
agctactcgggaggctgagg

SEQ ID NO: 8326 - DNA, 20 bp, synthetic construct
  misc_feature 1..20: note = chemically synthesized
  source 1..20: mol_type = other DNA
gctactcgggaggctgaggc

SEQ ID NO: 8327 - DNA, 20 bp, synthetic construct
  misc_feature 1..20: note = chemically synthesized
  source 1..20: mol_type = other DNA
tactcgggaggctgaggcag

SEQ ID NO: 8328 - DNA, 20 bp, synthetic construct
  misc_feature 1..20: note = chemically synthesized
  source 1..20: mol_type = other DNA
gcaggagatttgcttgaacc

SEQ ID NO: 8329 - DNA, 20 bp, synthetic construct
  misc_feature 1..20: note = chemically synthesized
  source 1..20: mol_type = other DNA
caggagatttgcttgaaccc

SEQ ID NO: 8330 - DNA, 20 bp, synthetic construct
  misc_feature 1..20: note = chemically synthesized
  source 1..20: mol_type = other DNA
ggagatttgcttgaacccag

SEQ ID NO: 8331 - DNA, 20 bp, synthetic construct
  misc_feature 1..20: note = chemically synthesized
  source 1..20: mol_type = other DNA
gagatttgcttgaacccagg

SEQ ID NO: 8332 - DNA, 20 bp, synthetic construct
  misc_feature 1..20: note = chemically synthesized
  source 1..20: mol_type = other DNA
atttgcttgaacccaggagg

SEQ ID NO: 8333 - DNA, 20 bp, synthetic construct
  misc_feature 1..20: note = chemically synthesized
  source 1..20: mol_type = other DNA
ttgcttgaacccaggaggcg

SEQ ID NO: 8334 - DNA, 20 bp, synthetic construct
  misc_feature 1..20: note = chemically synthesized
  source 1..20: mol_type = other DNA
tgcttgaacccaggaggcgg

SEQ ID NO: 8335 - DNA, 20 bp, synthetic construct
  misc_feature 1..20: note = chemically synthesized
  source 1..20: mol_type = other DNA
aacccaggaggcggaggttg

SEQ ID NO: 8336 - DNA, 20 bp, synthetic construct
  misc_feature 1..20: note = chemically synthesized
  source 1..20: mol_type = other DNA
caggaggcggaggttgcagt

SEQ ID NO: 8337 - DNA, 20 bp, synthetic construct
  misc_feature 1..20: note = chemically synthesized
  source 1..20: mol_type = other DNA
ggcggaggttgcagtgagcc

SEQ ID NO: 8338 - DNA, 20 bp, synthetic construct
  misc_feature 1..20: note = chemically synthesized
  source 1..20: mol_type = other DNA
aagatcttgccattgcactc

SEQ ID NO: 8339 - DNA, 20 bp, synthetic construct
  misc_feature 1..20: note = chemically synthesized
  source 1..20: mol_type = other DNA
cttgccattgcactccagcc

SEQ ID NO: 8340 - DNA, 20 bp, synthetic construct
  misc_feature 1..20: note = chemically synthesized
  source 1..20: mol_type = other DNA
tgcactccagcctggacaac

SEQ ID NO: 8341 - DNA, 20 bp, synthetic construct
  misc_feature 1..20: note = chemically synthesized
  source 1..20: mol_type = other DNA
cactccagcctggacaacaa

SEQ ID NO: 8342 - DNA, 20 bp, synthetic construct
  misc_feature 1..20: note = chemically synthesized
  source 1..20: mol_type = other DNA
gcaaattttaaatatactta

SEQ ID NO: 8343 - DNA, 20 bp, synthetic construct
  misc_feature 1..20: note = chemically synthesized
  source 1..20: mol_type = other DNA
acttacagtacaattaacta

SEQ ID NO: 8344 - DNA, 20 bp, synthetic construct
  misc_feature 1..20: note = chemically synthesized
  source 1..20: mol_type = other DNA
acagtcacgatgctgtacat

SEQ ID NO: 8345 - DNA, 20 bp, synthetic construct
  misc_feature 1..20: note = chemically synthesized
  source 1..20: mol_type = other DNA
gatgctgtacattagatatc

SEQ ID NO: 8346 - DNA, 20 bp, synthetic construct
  misc_feature 1..20: note = chemically synthesized
  source 1..20: mol_type = other DNA
actgaaattttatacccttt

SEQ ID NO: 8347 - DNA, 20 bp, synthetic construct
  misc_feature 1..20: note = chemically synthesized
  source 1..20: mol_type = other DNA
attttataccctttgagtaa

SEQ ID NO: 8348 - DNA, 20 bp, synthetic construct
  misc_feature 1..20: note = chemically synthesized
  source 1..20: mol_type = other DNA
attctcccacccccaacccc

SEQ ID NO: 8349 - DNA, 20 bp, synthetic construct
  misc_feature 1..20: note = chemically synthesized
  source 1..20: mol_type = other DNA
cctctactgtctgtttccat

SEQ ID NO: 8350 - DNA, 20 bp, synthetic construct
  misc_feature 1..20: note = chemically synthesized
  source 1..20: mol_type = other DNA
tctactgtctgtttccatga

SEQ ID NO: 8351 - DNA, 20 bp, synthetic construct
  misc_feature 1..20: note = chemically synthesized
  source 1..20: mol_type = other DNA
cttttttatgtttcacatat

SEQ ID NO: 8352 - DNA, 20 bp, synthetic construct
  misc_feature 1..20: note = chemically synthesized
  source 1..20: mol_type = other DNA
tttatgtttcacatatgagc

SEQ ID NO: 8353 - DNA, 20 bp, synthetic construct
  misc_feature 1..20: note = chemically synthesized
  source 1..20: mol_type = other DNA
ttatgtttcacatatgagca

SEQ ID NO: 8354 - DNA, 20 bp, synthetic construct
  misc_feature 1..20: note = chemically synthesized
  source 1..20: mol_type = other DNA
cacatatgagcaaggttgtg

SEQ ID NO: 8355 - DNA, 20 bp, synthetic construct
  misc_feature 1..20: note = chemically synthesized
  source 1..20: mol_type = other DNA
tagtatttgtctttttgtgt

SEQ ID NO: 8356 - DNA, 20 bp, synthetic construct
  misc_feature 1..20: note = chemically synthesized
  source 1..20: mol_type = other DNA
agtatttgtctttttgtgtc

SEQ ID NO: 8357 - DNA, 20 bp, synthetic construct
  misc_feature 1..20: note = chemically synthesized
  source 1..20: mol_type = other DNA
tgtgtcaggcttatttttct

SEQ ID NO: 8358 - DNA, 20 bp, synthetic construct
  misc_feature 1..20: note = chemically synthesized
  source 1..20: mol_type = other DNA
tttcttagttttacatcctc

SEQ ID NO: 8359 - DNA, 20 bp, synthetic construct
  misc_feature 1..20: note = chemically synthesized
  source 1..20: mol_type = other DNA
ttcttagttttacatcctcc

SEQ ID NO: 8360 - DNA, 20 bp, synthetic construct
  misc_feature 1..20: note = chemically synthesized
  source 1..20: mol_type = other DNA
ttcatcaattctgccataaa

SEQ ID NO: 8361 - DNA, 20 bp, synthetic construct
  misc_feature 1..20: note = chemically synthesized
  source 1..20: mol_type = other DNA
atcaattctgccataaatgg

SEQ ID NO: 8362 - DNA, 20 bp, synthetic construct
  misc_feature 1..20: note = chemically synthesized
  source 1..20: mol_type = other DNA
tcaattctgccataaatggc

SEQ ID NO: 8363 - DNA, 20 bp, synthetic construct
  misc_feature 1..20: note = chemically synthesized
  source 1..20: mol_type = other DNA
tctgtgtttcttatatattt

SEQ ID NO: 8364 - DNA, 20 bp, synthetic construct
  misc_feature 1..20: note = chemically synthesized
  source 1..20: mol_type = other DNA
ggatattaaccaaaatattt

SEQ ID NO: 8365 - DNA, 20 bp, synthetic construct
  misc_feature 1..20: note = chemically synthesized
  source 1..20: mol_type = other DNA
caaaatatttaagaaatatt

SEQ ID NO: 8366 - DNA, 20 bp, synthetic construct
  misc_feature 1..20: note = chemically synthesized
  source 1..20: mol_type = other DNA
tttgcaaatatgccatttca

SEQ ID NO: 8367 - DNA, 20 bp, synthetic construct
  misc_feature 1..20: note = chemically synthesized
  source 1..20: mol_type = other DNA
tcattgttttgttttttgtg

SEQ ID NO: 8368 - DNA, 20 bp, synthetic construct
  misc_feature 1..20: note = chemically synthesized
  source 1..20: mol_type = other DNA
ttttttgtgtggaaattttt

SEQ ID NO: 8369 - DNA, 20 bp, synthetic construct
  misc_feature 1..20: note = chemically synthesized
  source 1..20: mol_type = other DNA
ggaaattttttagtttgatg

SEQ ID NO: 8370 - DNA, 20 bp, synthetic construct
  misc_feature 1..20: note = chemically synthesized
  source 1..20: mol_type = other DNA
ctcatatcaaattcaaaaaa

SEQ ID NO: 8371 - DNA, 20 bp, synthetic construct
  misc_feature 1..20: note = chemically synthesized
  source 1..20: mol_type = other DNA
aacggctgcaacgtgaatat

SEQ ID NO: 8372 - DNA, 20 bp, synthetic construct
  misc_feature 1..20: note = chemically synthesized
  source 1..20: mol_type = other DNA
gatttctttaaaaattttta

SEQ ID NO: 8373 - DNA, 20 bp, synthetic construct
  misc_feature 1..20: note = chemically synthesized
  source 1..20: mol_type = other DNA
tttaaaaatttttatggttt

SEQ ID NO: 8374 - DNA, 20 bp, synthetic construct
  misc_feature 1..20: note = chemically synthesized
  source 1..20: mol_type = other DNA
ttaaaaatttttatggtttt

SEQ ID NO: 8375 - DNA, 20 bp, synthetic construct
  misc_feature 1..20: note = chemically synthesized
  source 1..20: mol_type = other DNA
atttttatggttttaggtct

SEQ ID NO: 8376 - DNA, 20 bp, synthetic construct
  misc_feature 1..20: note = chemically synthesized
  source 1..20: mol_type = other DNA
ttcaaatttatttttgttta

SEQ ID NO: 8377 - DNA, 20 bp, synthetic construct
  misc_feature 1..20: note = chemically synthesized
  source 1..20: mol_type = other DNA
tttatttttgtttatggtgt

SEQ ID NO: 8378 - DNA, 20 bp, synthetic construct
  misc_feature 1..20: note = chemically synthesized
  source 1..20: mol_type = other DNA
ttttgtttatggtgtaagac

SEQ ID NO: 8379 - DNA, 20 bp, synthetic construct
  misc_feature 1..20: note = chemically synthesized
  source 1..20: mol_type = other DNA
tttgtttatggtgtaagaca

SEQ ID NO: 8380 - DNA, 20 bp, synthetic construct
  misc_feature 1..20: note = chemically synthesized
  source 1..20: mol_type = other DNA
ttgtttatggtgtaagacaa

SEQ ID NO: 8381 - DNA, 20 bp, synthetic construct
  misc_feature 1..20: note = chemically synthesized
  source 1..20: mol_type = other DNA
gtctgatttcatttcatttt

SEQ ID NO: 8382 - DNA, 20 bp, synthetic construct
  misc_feature 1..20: note = chemically synthesized
  source 1..20: mol_type = other DNA
tctgatttcatttcattttg

SEQ ID NO: 8383 - DNA, 20 bp, synthetic construct
  misc_feature 1..20: note = chemically synthesized
  source 1..20: mol_type = other DNA
ctgatttcatttcattttga

SEQ ID NO: 8384 - DNA, 20 bp, synthetic construct
  misc_feature 1..20: note = chemically synthesized
  source 1..20: mol_type = other DNA
ctgattatatgccttgattt

SEQ ID NO: 8385 - DNA, 20 bp, synthetic construct
  misc_feature 1..20: note = chemically synthesized
  source 1..20: mol_type = other DNA
gatttcagaatcttgccaac

SEQ ID NO: 8386 - DNA, 20 bp, synthetic construct
  misc_feature 1..20: note = chemically synthesized
  source 1..20: mol_type = other DNA
agaatcttgccaactagatt

SEQ ID NO: 8387 - DNA, 20 bp, synthetic construct
  misc_feature 1..20: note = chemically synthesized
  source 1..20: mol_type = other DNA
aactagattcagaatttgac

SEQ ID NO: 8388 - DNA, 20 bp, synthetic construct
  misc_feature 1..20: note = chemically synthesized
  source 1..20: mol_type = other DNA
actagattcagaatttgact

SEQ ID NO: 8389 - DNA, 20 bp, synthetic construct
  misc_feature 1..20: note = chemically synthesized
  source 1..20: mol_type = other DNA
tagattcagaatttgactgg

SEQ ID NO: 8390 - DNA, 20 bp, synthetic construct
  misc_feature 1..20: note = chemically synthesized
  source 1..20: mol_type = other DNA
gattcagaatttgactggga

SEQ ID NO: 8391 - DNA, 20 bp, synthetic construct
  misc_feature 1..20: note = chemically synthesized
  source 1..20: mol_type = other DNA
ttcagaatttgactgggaga

SEQ ID NO: 8392 - DNA, 20 bp, synthetic construct
  misc_feature 1..20: note = chemically synthesized
  source 1..20: mol_type = other DNA
tcagaatttgactgggagag

SEQ ID NO: 8393 - DNA, 20 bp, synthetic construct
  misc_feature 1..20: note = chemically synthesized
  source 1..20: mol_type = other DNA
atttgactgggagagaggac

SEQ ID NO: 8394 - DNA, 20 bp, synthetic construct
  misc_feature 1..20: note = chemically synthesized
  source 1..20: mol_type = other DNA
tttgactgggagagaggaca

SEQ ID NO: 8395 - DNA, 20 bp, synthetic construct
  misc_feature 1..20: note = chemically synthesized
  source 1..20: mol_type = other DNA
agagaggacaaggaccactt

SEQ ID NO: 8396 - DNA, 20 bp, synthetic construct
  misc_feature 1..20: note = chemically synthesized
  source 1..20: mol_type = other DNA
tgagactcatattttatttc

SEQ ID NO: 8397 - DNA, 20 bp, synthetic construct
  misc_feature 1..20: note = chemically synthesized
  source 1..20: mol_type = other DNA
catattttatttccagaatc

SEQ ID NO: 8398 - DNA, 20 bp, synthetic construct
  misc_feature 1..20: note = chemically synthesized
  source 1..20: mol_type = other DNA
gaatctagcatctacctacc

SEQ ID NO: 8399 - DNA, 20 bp, synthetic construct
  misc_feature 1..20: note = chemically synthesized
  source 1..20: mol_type = other DNA
aatctagcatctacctacct

SEQ ID NO: 8400 - DNA, 20 bp, synthetic construct
  misc_feature 1..20: note = chemically synthesized
  source 1..20: mol_type = other DNA
tacctacctaggtattgaat

SEQ ID NO: 8401 - DNA, 20 bp, synthetic construct
  misc_feature 1..20: note = chemically synthesized
  source 1..20: mol_type = other DNA
ggtattgaataagaaaaatg

SEQ ID NO: 8402 - DNA, 20 bp, synthetic construct
  misc_feature 1..20: note = chemically synthesized
  source 1..20: mol_type = other DNA
tgaataagaaaaatgaagtt

SEQ ID NO: 8403 - DNA, 20 bp, synthetic construct
  misc_feature 1..20: note = chemically synthesized
  source 1..20: mol_type = other DNA
gaataagaaaaatgaagtta

SEQ ID NO: 8404 - DNA, 20 bp, synthetic construct
  misc_feature 1..20: note = chemically synthesized
  source 1..20: mol_type = other DNA
taagaaaaatgaagttaagg

SEQ ID NO: 8405 - DNA, 20 bp, synthetic construct
  misc_feature 1..20: note = chemically synthesized
  source 1..20: mol_type = other DNA
aatgaagttaaggtggttga

SEQ ID NO: 8406 - DNA, 20 bp, synthetic construct
  misc_feature 1..20: note = chemically synthesized
  source 1..20: mol_type = other DNA
taacactatgctaataactg

SEQ ID NO: 8407 - DNA, 20 bp, synthetic construct
  misc_feature 1..20: note = chemically synthesized
  source 1..20: mol_type = other DNA
acactatgctaataactgca

SEQ ID NO: 8408 - DNA, 20 bp, synthetic construct
  misc_feature 1..20: note = chemically synthesized
  source 1..20: mol_type = other DNA
tatgctaataactgcagagc

SEQ ID NO: 8409 - DNA, 20 bp, synthetic construct
  misc_feature 1..20: note = chemically synthesized
  source 1..20: mol_type = other DNA
gctaataactgcagagccag

SEQ ID NO: 8410 - DNA, 20 bp, synthetic construct
  misc_feature 1..20: note = chemically synthesized
  source 1..20: mol_type = other DNA
tgcagagccagaagcaccat

SEQ ID NO: 8411 - DNA, 20 bp, synthetic construct
  misc_feature 1..20: note = chemically synthesized
  source 1..20: mol_type = other DNA
gcagagccagaagcaccata

SEQ ID NO: 8412 - DNA, 20 bp, synthetic construct
  misc_feature 1..20: note = chemically synthesized
  source 1..20: mol_type = other DNA
cagagccagaagcaccataa

SEQ ID NO: 8413 - DNA, 20 bp, synthetic construct
  misc_feature 1..20: note = chemically synthesized
  source 1..20: mol_type = other DNA
agcaccataagggacatgat

SEQ ID NO: 8414 - DNA, 20 bp, synthetic construct
  misc_feature 1..20: note = chemically synthesized
  source 1..20: mol_type = other DNA
gcaccataagggacatgata

SEQ ID NO: 8415 - DNA, 20 bp, synthetic construct
  misc_feature 1..20: note = chemically synthesized
  source 1..20: mol_type = other DNA
caccataagggacatgataa

SEQ ID NO: 8416 - DNA, 20 bp, synthetic construct
  misc_feature 1..20: note = chemically synthesized
  source 1..20: mol_type = other DNA
ccataagggacatgataagg

SEQ ID NO: 8417 - DNA, 20 bp, synthetic construct
  misc_feature 1..20: note = chemically synthesized
  source 1..20: mol_type = other DNA
aagggacatgataagggagc

SEQ ID NO: 8418 - DNA, 20 bp, synthetic construct
  misc_feature 1..20: note = chemically synthesized
  source 1..20: mol_type = other DNA
ggacatgataagggagccag

SEQ ID NO: 8419 - DNA, 20 bp, synthetic construct
  misc_feature 1..20: note = chemically synthesized
  source 1..20: mol_type = other DNA
atgctaatcttaaacatcct

SEQ ID NO: 8420 - DNA, 20 bp, synthetic construct
  misc_feature 1..20: note = chemically synthesized
  source 1..20: mol_type = other DNA
tgctaatcttaaacatcctg

SEQ ID NO: 8421 - DNA, 20 bp, synthetic construct
  misc_feature 1..20: note = chemically synthesized
  source 1..20: mol_type = other DNA
taatcttaaacatcctgagg

SEQ ID NO: 8422 - DNA, 20 bp, synthetic construct
  misc_feature 1..20: note = chemically synthesized
  source 1..20: mol_type = other DNA
ttaaacatcctgaggaagaa

SEQ ID NO: 8423 - DNA, 20 bp, synthetic construct
  misc_feature 1..20: note = chemically synthesized
  source 1..20: mol_type = other DNA
taaacatcctgaggaagaat

SEQ ID NO: 8424 - DNA, 20 bp, synthetic construct
  misc_feature 1..20: note = chemically synthesized
  source 1..20: mol_type = other DNA
ggaagaatgggacttccatt

SEQ ID NO: 8425 - DNA, 20 bp, synthetic construct
  misc_feature 1..20: note = chemically synthesized
  source 1..20: mol_type = other DNA
gaagaatgggacttccattt

SEQ ID NO: 8426 - DNA, 20 bp, synthetic construct
  misc_feature 1..20: note = chemically synthesized
  source 1..20: mol_type = other DNA
aagaatgggacttccatttg

SEQ ID NO: 8427 - DNA, 20 bp, synthetic construct
  misc_feature 1..20: note = chemically synthesized
  source 1..20: mol_type = other DNA
aatgggacttccatttgggg

SEQ ID NO: 8428 - DNA, 20 bp, synthetic construct
  misc_feature 1..20: note = chemically synthesized
  source 1..20: mol_type = other DNA
atgggacttccatttggggt

SEQ ID NO: 8429 - DNA, 20 bp, synthetic construct
  misc_feature 1..20: note = chemically synthesized
  source 1..20: mol_type = other DNA
catttggggtgggcctatga

SEQ ID NO: 8430 - DNA, 20 bp, synthetic construct
  misc_feature 1..20: note = chemically synthesized
  source 1..20: mol_type = other DNA
atttggggtgggcctatgac

SEQ ID NO: 8431 - DNA, 20 bp, synthetic construct
  misc_feature 1..20: note = chemically synthesized
  source 1..20: mol_type = other DNA
tttggggtgggcctatgaca

SEQ ID NO: 8432 - DNA, 20 bp, synthetic construct
  misc_feature 1..20: note = chemically synthesized
  source 1..20: mol_type = other DNA
tgggcctatgacagggtaat

SEQ ID NO: 8433 - DNA, 20 bp, synthetic construct
  misc_feature 1..20: note = chemically synthesized
  source 1..20: mol_type = other DNA
cctatgacagggtaataaga

SEQ ID NO: 8434 - DNA, 20 bp, synthetic construct
  misc_feature 1..20: note = chemically synthesized
  source 1..20: mol_type = other DNA
atgacagggtaataagacag

SEQ ID NO: 8435 - DNA, 20 bp, synthetic construct
  misc_feature 1..20: note = chemically synthesized
  source 1..20: mol_type = other DNA
ataagacagtagtgaatatc

SEQ ID NO: 8436 - DNA, 20 bp, synthetic construct
  misc_feature 1..20: note = chemically synthesized
  source 1..20: mol_type = other DNA
agtgaatatcaagctacaaa

SEQ ID NO: 8437 - DNA, 20 bp, synthetic construct
  misc_feature 1..20: note = chemically synthesized
  source 1..20: mol_type = other DNA
gccgcctttcaaattcttct

SEQ ID NO: 8438 - DNA, 20 bp, synthetic construct
  misc_feature 1..20: note = chemically synthesized
  source 1..20: mol_type = other DNA
cagtcctaacttttcatact

SEQ ID NO: 8439 - DNA, 20 bp, synthetic construct
  misc_feature 1..20: note = chemically synthesized
  source 1..20: mol_type = other DNA
ctaacttttcatactaagcc

SEQ ID NO: 8440 - DNA, 20 bp, synthetic construct
  misc_feature 1..20: note = chemically synthesized
  source 1..20: mol_type = other DNA
tactaagcccagtccttcca

SEQ ID NO: 8441 - DNA, 20 bp, synthetic construct
  misc_feature 1..20: note = chemically synthesized
  source 1..20: mol_type = other DNA
taagcccagtccttccaaag

SEQ ID NO: 8442 - DNA, 20 bp, synthetic construct
  misc_feature 1..20: note = chemically synthesized
  source 1..20: mol_type = other DNA
ccttccaaagcagactgtga

SEQ ID NO: 8443 - DNA, 20 bp, synthetic construct
  misc_feature 1..20: note = chemically synthesized
  source 1..20: mol_type = other DNA
ttccaaagcagactgtgaaa

SEQ ID NO: 8444 - DNA, 20 bp, synthetic construct
  misc_feature 1..20: note = chemically synthesized
  source 1..20: mol_type = other DNA
agcagactgtgaaagagtga

SEQ ID NO: 8445 - DNA, 20 bp, synthetic construct
  misc_feature 1..20: note = chemically synthesized
  source 1..20: mol_type = other DNA
ctgtgaaagagtgatagttc

SEQ ID NO: 8446 - DNA, 20 bp, synthetic construct
  misc_feature 1..20: note = chemically synthesized
  source 1..20: mol_type = other DNA
tgtgaaagagtgatagttcc

SEQ ID NO: 8447 - DNA, 20 bp, synthetic construct
  misc_feature 1..20: note = chemically synthesized
  source 1..20: mol_type = other DNA
tgaaagagtgatagttccgg

SEQ ID NO: 8448 - DNA, 20 bp, synthetic construct
  misc_feature 1..20: note = chemically synthesized
  source 1..20: mol_type = other DNA
gagtgatagttccgggagac

SEQ ID NO: 8449 - DNA, 20 bp, synthetic construct
  misc_feature 1..20: note = chemically synthesized
  source 1..20: mol_type = other DNA
gttccgggagactagcactg

SEQ ID NO: 8450 - DNA, 20 bp, synthetic construct
  misc_feature 1..20: note = chemically synthesized
  source 1..20: mol_type = other DNA
gagactagcactgcagattc

SEQ ID NO: 8451 - DNA, 20 bp, synthetic construct
  misc_feature 1..20: note = chemically synthesized
  source 1..20: mol_type = other DNA
agactagcactgcagattcc

SEQ ID NO: 8452 - DNA, 20 bp, synthetic construct
  misc_feature 1..20: note = chemically synthesized
  source 1..20: mol_type = other DNA
tgcagattccgggtcactgt

SEQ ID NO: 8453 - DNA, 20 bp, synthetic construct
  misc_feature 1..20: note = chemically synthesized
  source 1..20: mol_type = other DNA
agattccgggtcactgtgag

SEQ ID NO: 8454 - DNA, 20 bp, synthetic construct
  misc_feature 1..20: note = chemically synthesized
  source 1..20: mol_type = other DNA
gattccgggtcactgtgagt

SEQ ID NO: 8455 - DNA, 20 bp, synthetic construct
  misc_feature 1..20: note = chemically synthesized
  source 1..20: mol_type = other DNA
attccgggtcactgtgagtg

SEQ ID NO: 8456 - DNA, 20 bp, synthetic construct
  misc_feature 1..20: note = chemically synthesized
  source 1..20: mol_type = other DNA
ttccgggtcactgtgagtgg

SEQ ID NO: 8457 - DNA, 20 bp, synthetic construct
  misc_feature 1..20: note = chemically synthesized
  source 1..20: mol_type = other DNA
ccgggtcactgtgagtgggg

SEQ ID NO: 8458 - DNA, 20 bp, synthetic construct
  misc_feature 1..20: note = chemically synthesized
  source 1..20: mol_type = other DNA
cgggtcactgtgagtggggg

SEQ ID NO: 8459 - DNA, 20 bp, synthetic construct
  misc_feature 1..20: note = chemically synthesized
  source 1..20: mol_type = other DNA
gtcactgtgagtgggggagg

SEQ ID NO: 8460 - DNA, 20 bp, synthetic construct
  misc_feature 1..20: note = chemically synthesized
  source 1..20: mol_type = other DNA
tcactgtgagtgggggaggc

SEQ ID NO: 8461 - DNA, 20 bp, synthetic construct
  misc_feature 1..20: note = chemically synthesized
  source 1..20: mol_type = other DNA
cactgtgagtgggggaggca

SEQ ID NO: 8462 - DNA, 20 bp, synthetic construct
  misc_feature 1..20: note = chemically synthesized
  source 1..20: mol_type = other DNA
tgtgagtgggggaggcaggg

SEQ ID NO: 8463 - DNA, 20 bp, synthetic construct
  misc_feature 1..20: note = chemically synthesized
  source 1..20: mol_type = other DNA
gagtgggggaggcagggaag

SEQ ID NO: 8464 - DNA, 20 bp, synthetic construct
  misc_feature 1..20: note = chemically synthesized
  source 1..20: mol_type = other DNA
agtgggggaggcagggaaga

SEQ ID NO: 8465 - DNA, 20 bp, synthetic construct
  misc_feature 1..20: note = chemically synthesized
  source 1..20: mol_type = other DNA
gtgggggaggcagggaagaa

SEQ ID NO: 8466 - DNA, 20 bp, synthetic construct
  misc_feature 1..20: note = chemically synthesized
  source 1..20: mol_type = other DNA
aggcagggaagaagggctca

SEQ ID NO: 8467 - DNA, 20 bp, synthetic construct
  misc_feature 1..20: note = chemically synthesized
  source 1..20: mol_type = other DNA
ggcagggaagaagggctcac

SEQ ID NO: 8468 - DNA, 20 bp, synthetic construct
  misc_feature 1..20: note = chemically synthesized
  source 1..20: mol_type = other DNA
gggaagaagggctcacagga

SEQ ID NO: 8469 - DNA, 20 bp, synthetic construct
  misc_feature 1..20: note = chemically synthesized
  source 1..20: mol_type = other DNA
acccctgtttttccttcttc

SEQ ID NO: 8470 - DNA, 20 bp, synthetic construct
  misc_feature 1..20: note = chemically synthesized
  source 1..20: mol_type = other DNA
cctgtttttccttcttcaag

SEQ ID NO: 8471 - DNA, 20 bp, synthetic construct
  misc_feature 1..20: note = chemically synthesized
  source 1..20: mol_type = other DNA
ttcttcaagtagacctctat

SEQ ID NO: 8472 - DNA, 20 bp, synthetic construct
  misc_feature 1..20: note = chemically synthesized
  source 1..20: mol_type = other DNA
agtagacctctataagacaa

SEQ ID NO: 8473 - DNA, 20 bp, synthetic construct
  misc_feature 1..20: note = chemically synthesized
  source 1..20: mol_type = other DNA
tagacctctataagacaaca

SEQ ID NO: 8474 - DNA, 20 bp, synthetic construct
  misc_feature 1..20: note = chemically synthesized
  source 1..20: mol_type = other DNA
ataagacaacagagacaact

SEQ ID NO: 8475 - DNA, 20 bp, synthetic construct
  misc_feature 1..20: note = chemically synthesized
  source 1..20: mol_type = other DNA
taagacaacagagacaacta

SEQ ID NO: 8476 - DNA, 20 bp, synthetic construct
  misc_feature 1..20: note = chemically synthesized
  source 1..20: mol_type = other DNA
caacagagacaactaaggct

SEQ ID NO: 8477 - DNA, 20 bp, synthetic construct
  misc_feature 1..20: note = chemically synthesized
  source 1..20: mol_type = other DNA
cagagacaactaaggctgag

SEQ ID NO: 8478 - DNA, 20 bp, synthetic construct
  misc_feature 1..20: note = chemically synthesized
  source 1..20: mol_type = other DNA
gacaactaaggctgagtggc

SEQ ID NO: 8479 - DNA, 20 bp, synthetic construct
  misc_feature 1..20: note = chemically synthesized
  source 1..20: mol_type = other DNA
acaactaaggctgagtggcc

SEQ ID NO: 8480 - DNA, 20 bp, synthetic construct
  misc_feature 1..20: note = chemically synthesized
  source 1..20: mol_type = other DNA
ctaaggctgagtggccaggc

SEQ ID NO: 8481 - DNA, 20 bp, synthetic construct
  misc_feature 1..20: note = chemically synthesized
  source 1..20: mol_type = other DNA
taaggctgagtggccaggcg

SEQ ID NO: 8482 - DNA, 20 bp, synthetic construct
  misc_feature 1..20: note = chemically synthesized
  source 1..20: mol_type = other DNA
aggctgagtggccaggcgag

SEQ ID NO: 8483 - DNA, 20 bp, synthetic construct
  misc_feature 1..20: note = chemically synthesized
  source 1..20: mol_type = other DNA
aaccatctcgccgtaaaaca

SEQ ID NO: 8484 - DNA, 20 bp, synthetic construct
  misc_feature 1..20: note = chemically synthesized
  source 1..20: mol_type = other DNA
catctcgccgtaaaacatgg

SEQ ID NO: 8485 - DNA, 20 bp, synthetic construct
  misc_feature 1..20: note = chemically synthesized
  source 1..20: mol_type = other DNA
atctcgccgtaaaacatgga

SEQ ID NO: 8486 - DNA, 20 bp, synthetic construct
  misc_feature 1..20: note = chemically synthesized
  source 1..20: mol_type = other DNA
aaaacatggaaggaacactt

SEQ ID NO: 8487 - DNA, 20 bp, synthetic construct
  misc_feature 1..20: note = chemically synthesized
  source 1..20: mol_type = other DNA
aaacatggaaggaacacttc

SEQ ID NO: 8488 - DNA, 20 bp, synthetic construct
  misc_feature 1..20: note = chemically synthesized
  source 1..20: mol_type = other DNA
aacatggaaggaacacttca

SEQ ID NO: 8489 - DNA, 20 bp, synthetic construct
  misc_feature 1..20: note = chemically synthesized
  source 1..20: mol_type = other DNA
acatggaaggaacacttcag

SEQ ID NO: 8490 - DNA, 20 bp, synthetic construct
  misc_feature 1..20: note = chemically synthesized
  source 1..20: mol_type = other DNA
ggaaggaacacttcagggga

SEQ ID NO: 8491 - DNA, 20 bp, synthetic construct
  misc_feature 1..20: note = chemically synthesized
  source 1..20: mol_type = other DNA
gaaggaacacttcaggggaa

SEQ ID NO: 8492 - DNA, 20 bp, synthetic construct
  misc_feature 1..20: note = chemically synthesized
  source 1..20: mol_type = other DNA
ggaacacttcaggggaaagg

SEQ ID NO: 8493 - DNA, 20 bp, synthetic construct
  misc_feature 1..20: note = chemically synthesized
  source 1..20: mol_type = other DNA
aggggaaaggtggtatctct

SEQ ID NO: 8494 - DNA, 20 bp, synthetic construct
  misc_feature 1..20: note = chemically synthesized
  source 1..20: mol_type = other DNA
gaaaggtggtatctctaagc

SEQ ID NO: 8495 - DNA, 20 bp, synthetic construct
  misc_feature 1..20: note = chemically synthesized
  source 1..20: mol_type = other DNA
aaggtggtatctctaagcaa

SEQ ID NO: 8496 - DNA, 20 bp, synthetic construct
  misc_feature 1..20: note = chemically synthesized
  source 1..20: mol_type = other DNA
tatctctaagcaagagaact

SEQ ID NO: 8497 - DNA, 20 bp, synthetic construct
  misc_feature 1..20: note = chemically synthesized
  source 1..20: mol_type = other DNA
ctctaagcaagagaactgag

SEQ ID NO: 8498 - DNA, 20 bp, synthetic construct
  misc_feature 1..20: note = chemically synthesized
  source 1..20: mol_type = other DNA
ctaagcaagagaactgagtg

SEQ ID NO: 8499 - DNA, 20 bp, synthetic construct
  misc_feature 1..20: note = chemically synthesized
  source 1..20: mol_type = other DNA
caagagaactgagtggagtc

SEQ ID NO: 8500 - DNA, 20 bp, synthetic construct
  misc_feature 1..20: note = chemically synthesized
  source 1..20: mol_type = other DNA
aagagaactgagtggagtca

SEQ ID NO: 8501 - DNA, 20 bp, synthetic construct
  misc_feature 1..20: note = chemically synthesized
  source 1..20: mol_type = other DNA
aactgagtggagtcaaggct

SEQ ID NO: 8502 - DNA, 20 bp, synthetic construct
  misc_feature 1..20: note = chemically synthesized
  source 1..20: mol_type = other DNA
ctgagtggagtcaaggctga

SEQ ID NO: 8503 - DNA, 20 bp, synthetic construct
  misc_feature 1..20: note = chemically synthesized
  source 1..20: mol_type = other DNA
ggagtcaaggctgagagatg

SEQ ID NO: 8504 - DNA, 20 bp, synthetic construct
  misc_feature 1..20: note = chemically synthesized
  source 1..20: mol_type = other DNA
gagtcaaggctgagagatgc

SEQ ID NO: 8505 - DNA, 20 bp, synthetic construct
  misc_feature 1..20: note = chemically synthesized
  source 1..20: mol_type = other DNA
aaggctgagagatgcaggat

SEQ ID NO: 8506 - DNA, 20 bp, synthetic construct
  misc_feature 1..20: note = chemically synthesized
  source 1..20: mol_type = other DNA
agagatgcaggataagcaaa

SEQ ID NO: 8507 - DNA, 20 bp, synthetic construct
  misc_feature 1..20: note = chemically synthesized
  source 1..20: mol_type = other DNA
gagatgcaggataagcaaat

SEQ ID NO: 8508 - DNA, 20 bp, synthetic construct
  misc_feature 1..20: note = chemically synthesized
  source 1..20: mol_type = other DNA
atgcaggataagcaaatggg

SEQ ID NO: 8509 - DNA, 20 bp, synthetic construct
  misc_feature 1..20: note = chemically synthesized
  source 1..20: mol_type = other DNA
ataagcaaatgggtagtgaa

SEQ ID NO: 8510 - DNA, 20 bp, synthetic construct
  misc_feature 1..20: note = chemically synthesized
  source 1..20: mol_type = other DNA
ggtagtgaaaagacattcat

SEQ ID NO: 8511 - DNA, 20 bp, synthetic construct
  misc_feature 1..20: note = chemically synthesized
  source 1..20: mol_type = other DNA
gtagtgaaaagacattcatg

SEQ ID NO: 8512 - DNA, 20 bp, synthetic construct
  misc_feature 1..20: note = chemically synthesized
  source 1..20: mol_type = other DNA
tgaaaagacattcatgagga

SEQ ID NO: 8513 - DNA, 20 bp, synthetic construct
  misc_feature 1..20: note = chemically synthesized
  source 1..20: mol_type = other DNA
atgaggacagctaaaacaat

SEQ ID NO: 8514 - DNA, 20 bp, synthetic construct
  misc_feature 1..20: note = chemically synthesized
  source 1..20: mol_type = other DNA
acaataagtaatgtaaaata

SEQ ID NO: 8515 - DNA, 20 bp, synthetic construct
  misc_feature 1..20: note = chemically synthesized
  source 1..20: mol_type = other DNA
aagtaatgtaaaatacagca

SEQ ID NO: 8516 - DNA, 20 bp, synthetic construct
  misc_feature 1..20: note = chemically synthesized
  source 1..20: mol_type = other DNA
aaaactttaacctccaaatc

SEQ ID NO: 8517 - DNA, 20 bp, synthetic construct
  misc_feature 1..20: note = chemically synthesized
  source 1..20: mol_type = other DNA
ctctacttgaatccttttct

SEQ ID NO: 8518 - DNA, 20 bp, synthetic construct
  misc_feature 1..20: note = chemically synthesized
  source 1..20: mol_type = other DNA
tctacttgaatccttttctg

SEQ ID NO: 8519 - DNA, 20 bp, synthetic construct
  misc_feature 1..20: note = chemically synthesized
  source 1..20: mol_type = other DNA
ctacttgaatccttttctga

SEQ ID NO: 8520 - DNA, 20 bp, synthetic construct
  misc_feature 1..20: note = chemically synthesized
  source 1..20: mol_type = other DNA
tccttttctgagggatgaat

SEQ ID NO: 8521 - DNA, 20 bp, synthetic construct
  misc_feature 1..20: note = chemically synthesized
  source 1..20: mol_type = other DNA
ccttttctgagggatgaata

SEQ ID NO: 8522 - DNA, 20 bp, synthetic construct
  misc_feature 1..20: note = chemically synthesized
  source 1..20: mol_type = other DNA
gatgaataaggcatatgcat

SEQ ID NO: 8523 - DNA, 20 bp, synthetic construct
  misc_feature 1..20: note = chemically synthesized
  source 1..20: mol_type = other DNA
atgaataaggcatatgcatc

SEQ ID NO: 8524 - DNA, 20 bp, synthetic construct
  misc_feature 1..20: note = chemically synthesized
  source 1..20: mol_type = other DNA
tgaataaggcatatgcatca

SEQ ID NO: 8525 - DNA, 20 bp, synthetic construct
  misc_feature 1..20: note = chemically synthesized
  source 1..20: mol_type = other DNA
gaataaggcatatgcatcag

SEQ ID NO: 8526 - DNA, 20 bp, synthetic construct
  misc_feature 1..20: note = chemically synthesized
  source 1..20: mol_type = other DNA
gggctgttgccaatgtgcat

SEQ ID NO: 8527 - DNA, 20 bp, synthetic construct
  misc_feature 1..20: note = chemically synthesized
  source 1..20: mol_type = other DNA
caatgtgcattagctgtttg

SEQ ID NO: 8528 - DNA, 20 bp, synthetic construct
  misc_feature 1..20: note = chemically synthesized
  source 1..20: mol_type = other DNA
tgcagcctcaccttctttca

SEQ ID NO: 8529 - DNA, 20 bp, synthetic construct
  misc_feature 1..20: note = chemically synthesized
  source 1..20: mol_type = other DNA
cagcctcaccttctttcatg

SEQ ID NO: 8530 - DNA, 20 bp, synthetic construct
  misc_feature 1..20: note = chemically synthesized
  source 1..20: mol_type = other DNA
caccttctttcatggagttt

SEQ ID NO: 8531 - DNA, 20 bp, synthetic construct
  misc_feature 1..20: note = chemically synthesized
  source 1..20: mol_type = other DNA
ctttcatggagtttaagata

SEQ ID NO: 8532 - DNA, 20 bp, synthetic construct
  misc_feature 1..20: note = chemically synthesized
  source 1..20: mol_type = other DNA
aagatatagtgtattttccc

SEQ ID NO: 8533 - DNA, 20 bp, synthetic construct
  misc_feature 1..20: note = chemically synthesized
  source 1..20: mol_type = other DNA
agatatagtgtattttccca

SEQ ID NO: 8534 - DNA, 20 bp, synthetic construct
  misc_feature 1..20: note = chemically synthesized
  source 1..20: mol_type = other DNA
tattttcccaaggtttgaac

SEQ ID NO: 8535 - DNA, 20 bp, synthetic construct
  misc_feature 1..20: note = chemically synthesized
  source 1..20: mol_type = other DNA
gacctcccacattccctttt

SEQ ID NO: 8536 - DNA, 20 bp, synthetic construct
  misc_feature 1..20: note = chemically synthesized
  source 1..20: mol_type = other DNA
tccctttttagtaaaatatt

SEQ ID NO: 8537 - DNA, 20 bp, synthetic construct
  misc_feature 1..20: note = chemically synthesized
  source 1..20: mol_type = other DNA
tgaaaataaatgttttttat

SEQ ID NO: 8538 - DNA, 20 bp, synthetic construct
  misc_feature 1..20: note = chemically synthesized
  source 1..20: mol_type = other DNA
gaaaataaatgttttttatt

SEQ ID NO: 8539 - DNA, 20 bp, synthetic construct
  misc_feature 1..20: note = chemically synthesized
  source 1..20: mol_type = other DNA
aataaatgttttttattagg

SEQ ID NO: 8540 - DNA, 20 bp, synthetic construct
  misc_feature 1..20: note = chemically synthesized
  source 1..20: mol_type = other DNA
gttttttattaggcagaatc

SEQ ID NO: 8541 - DNA, 20 bp, synthetic construct
  misc_feature 1..20: note = chemically synthesized
  source 1..20: mol_type = other DNA
taggcagaatccagatgctc

SEQ ID NO: 8542 - DNA, 20 bp, synthetic construct
  misc_feature 1..20: note = chemically synthesized
  source 1..20: mol_type = other DNA
aggcagaatccagatgctca

SEQ ID NO: 8543 - DNA, 20 bp, synthetic construct
  misc_feature 1..20: note = chemically synthesized
  source 1..20: mol_type = other DNA
aggcccttcataatatcccc

SEQ ID NO: 8544 - DNA, 20 bp, synthetic construct
  misc_feature 1..20: note = chemically synthesized
  source 1..20: mol_type = other DNA
cttcataatatcccccagtt

SEQ ID NO: 8545 - DNA, 20 bp, synthetic construct
  misc_feature 1..20: note = chemically synthesized
  source 1..20: mol_type = other DNA
cataatatcccccagtttag

SEQ ID NO: 8546 - DNA, 20 bp, synthetic construct
  misc_feature 1..20: note = chemically synthesized
  source 1..20: mol_type = other DNA
atatcccccagtttagtagt

SEQ ID NO: 8547 - DNA, 20 bp, synthetic construct
  misc_feature 1..20: note = chemically synthesized
  source 1..20: mol_type = other DNA
cccagtttagtagttggact

SEQ ID NO: 8548 - DNA, 20 bp, synthetic construct
  misc_feature 1..20: note = chemically synthesized
  source 1..20: mol_type = other DNA
ccagtttagtagttggactt

SEQ ID NO: 8549 - DNA, 20 bp, synthetic construct
  misc_feature 1..20: note = chemically synthesized
  source 1..20: mol_type = other DNA
cagtttagtagttggactta

SEQ ID NO: 8550 - DNA, 20 bp, synthetic construct
  misc_feature 1..20: note = chemically synthesized
  source 1..20: mol_type = other DNA
gtagttggacttagggaaca

SEQ ID NO: 8551 - DNA, 20 bp, synthetic construct
  misc_feature 1..20: note = chemically synthesized
  source 1..20: mol_type = other DNA
tagttggacttagggaacaa

SEQ ID NO: 8552 - DNA, 20 bp, synthetic construct
  misc_feature 1..20: note = chemically synthesized
  source 1..20: mol_type = other DNA
gggaacaaaggaacctttaa

SEQ ID NO: 8553 - DNA, 20 bp, synthetic construct
  misc_feature 1..20: note = chemically synthesized
  source 1..20: mol_type = other DNA
aaggaacctttaatagaaat

SEQ ID NO: 8554 - DNA, 20 bp, synthetic construct
  misc_feature 1..20: note = chemically synthesized
  source 1..20: mol_type = other DNA
aacctttaatagaaattgga

SEQ ID NO: 8555 - DNA, 20 bp, synthetic construct
  misc_feature 1..20: note = chemically synthesized
  source 1..20: mol_type = other DNA
tttaatagaaattggacagc

SEQ ID NO: 8556 - DNA, 20 bp, synthetic construct
  misc_feature 1..20: note = chemically synthesized
  source 1..20: mol_type = other DNA
atagaaattggacagcaaga

SEQ ID NO: 8557 - DNA, 20 bp, synthetic construct
  misc_feature 1..20: note = chemically synthesized
  source 1..20: mol_type = other DNA
aaattggacagcaagaaagc

SEQ ID NO: 8558 - DNA, 20 bp, synthetic construct
  misc_feature 1..20: note = chemically synthesized
  source 1..20: mol_type = other DNA
ggacagcaagaaagcgagct

SEQ ID NO: 8559 - DNA, 20 bp, synthetic construct
  misc_feature 1..20: note = chemically synthesized
  source 1..20: mol_type = other DNA
agcgagcttagtgatacttg

SEQ ID NO: 8560 - DNA, 20 bp, synthetic construct
  misc_feature 1..20: note = chemically synthesized
  source 1..20: mol_type = other DNA
gcgagcttagtgatacttgt

SEQ ID NO: 8561 - DNA, 20 bp, synthetic construct
  misc_feature 1..20: note = chemically synthesized
  source 1..20: mol_type = other DNA
gcttagtgatacttgtgggc

SEQ ID NO: 8562 - DNA, 20 bp, synthetic construct
  misc_feature 1..20: note = chemically synthesized
  source 1..20: mol_type = other DNA
cttagtgatacttgtgggcc

SEQ ID NO: 8563 - DNA, 20 bp, synthetic construct
  misc_feature 1..20: note = chemically synthesized
  source 1..20: mol_type = other DNA
ttagtgatacttgtgggcca

SEQ ID NO: 8564 - DNA, 20 bp, synthetic construct
  misc_feature 1..20: note = chemically synthesized
  source 1..20: mol_type = other DNA
atacttgtgggccagggcat

SEQ ID NO: 8565 - DNA, 20 bp, synthetic construct
  misc_feature 1..20: note = chemically synthesized
  source 1..20: mol_type = other DNA
ggccagggcattagccacac

SEQ ID NO: 8566 - DNA, 20 bp, synthetic construct
  misc_feature 1..20: note = chemically synthesized
  source 1..20: mol_type = other DNA
caccagccaccactttctga

SEQ ID NO: 8567 - DNA, 20 bp, synthetic construct
  misc_feature 1..20: note = chemically synthesized
  source 1..20: mol_type = other DNA
accagccaccactttctgat

SEQ ID NO: 8568 - DNA, 20 bp, synthetic construct
  misc_feature 1..20: note = chemically synthesized
  source 1..20: mol_type = other DNA
agccaccactttctgatagg

SEQ ID NO: 8569 - DNA, 20 bp, synthetic construct
  misc_feature 1..20: note = chemically synthesized
  source 1..20: mol_type = other DNA
ttctgataggcagcctgcac

SEQ ID NO: 8570 - DNA, 20 bp, synthetic construct
  misc_feature 1..20: note = chemically synthesized
  source 1..20: mol_type = other DNA
tgataggcagcctgcactgg

SEQ ID NO: 8571 - DNA, 20 bp, synthetic construct
  misc_feature 1..20: note = chemically synthesized
  source 1..20: mol_type = other DNA
gataggcagcctgcactggt

SEQ ID NO: 8572 - DNA, 20 bp, synthetic construct
  misc_feature 1..20: note = chemically synthesized
  source 1..20: mol_type = other DNA
ataggcagcctgcactggtg

SEQ ID NO: 8573 - DNA, 20 bp, synthetic construct
  misc_feature 1..20: note = chemically synthesized
  source 1..20: mol_type = other DNA
gtggggtgaattctttgcca

SEQ ID NO: 8574 - DNA, 20 bp, synthetic construct
  misc_feature 1..20: note = chemically synthesized
  source 1..20: mol_type = other DNA
tgaattctttgccaaagtga

SEQ ID NO: 8575 - DNA, 20 bp, synthetic construct
  misc_feature 1..20: note = chemically synthesized
  source 1..20: mol_type = other DNA
gaattctttgccaaagtgat

SEQ ID NO: 8576 - DNA, 20 bp, synthetic construct
  misc_feature 1..20: note = chemically synthesized
  source 1..20: mol_type = other DNA
tctttgccaaagtgatgggc

SEQ ID NO: 8577 - DNA, 20 bp, synthetic construct
  misc_feature 1..20: note = chemically synthesized
  source 1..20: mol_type = other DNA
caaagtgatgggccagcaca

SEQ ID NO: 8578 - DNA, 20 bp, synthetic construct
  misc_feature 1..20: note = chemically synthesized
  source 1..20: mol_type = other DNA
tgatgggccagcacacagac

SEQ ID NO: 8579 - DNA, 20 bp, synthetic construct
  misc_feature 1..20: note = chemically synthesized
  source 1..20: mol_type = other DNA
acacagaccagcacgttgcc

SEQ ID NO: 8580 - DNA, 20 bp, synthetic construct
  misc_feature 1..20: note = chemically synthesized
  source 1..20: mol_type = other DNA
cacagaccagcacgttgccc

SEQ ID NO: 8581 - DNA, 20 bp, synthetic construct
  misc_feature 1..20: note = chemically synthesized
  source 1..20: mol_type = other DNA
cagaccagcacgttgcccag

SEQ ID NO: 8582 - DNA, 20 bp, synthetic construct
  misc_feature 1..20: note = chemically synthesized
  source 1..20: mol_type = other DNA
agcacgttgcccaggagctg

SEQ ID NO: 8583 - DNA, 20 bp, synthetic construct
  misc_feature 1..20: note = chemically synthesized
  source 1..20: mol_type = other DNA
gcacgttgcccaggagctgt

SEQ ID NO: 8584 - DNA, 20 bp, synthetic construct
  misc_feature 1..20: note = chemically synthesized
  source 1..20: mol_type = other DNA
acgttgcccaggagctgtgg

SEQ ID NO: 8585 - DNA, 20 bp, synthetic construct
  misc_feature 1..20: note = chemically synthesized
  source 1..20: mol_type = other DNA
cgttgcccaggagctgtggg

SEQ ID NO: 8586 - DNA, 20 bp, synthetic construct
  misc_feature 1..20: note = chemically synthesized
  source 1..20: mol_type = other DNA
tgcccaggagctgtgggagg

SEQ ID NO: 8587 - DNA, 20 bp, synthetic construct
  misc_feature 1..20: note = chemically synthesized
  source 1..20: mol_type = other DNA
aggagctgtgggaggaagat

SEQ ID NO: 8588 - DNA, 20 bp, synthetic construct
  misc_feature 1..20: note = chemically synthesized
  source 1..20: mol_type = other DNA
gagctgtgggaggaagataa

SEQ ID NO: 8589 - DNA, 20 bp, synthetic construct
  misc_feature 1..20: note = chemically synthesized
  source 1..20: mol_type = other DNA
agctgtgggaggaagataag

SEQ ID NO: 8590 - DNA, 20 bp, synthetic construct
  misc_feature 1..20: note = chemically synthesized
  source 1..20: mol_type = other DNA
ataagaggtatgaacatgat

SEQ ID NO: 8591 - DNA, 20 bp, synthetic construct
  misc_feature 1..20: note = chemically synthesized
  source 1..20: mol_type = other DNA
ggtatgaacatgattagcaa

SEQ ID NO: 8592 - DNA, 20 bp, synthetic construct
  misc_feature 1..20: note = chemically synthesized
  source 1..20: mol_type = other DNA
gtatgaacatgattagcaaa

SEQ ID NO: 8593 - DNA, 20 bp, synthetic construct
  misc_feature 1..20: note = chemically synthesized
  source 1..20: mol_type = other DNA
tatgaacatgattagcaaaa

SEQ ID NO: 8594 - DNA, 20 bp, synthetic construct
  misc_feature 1..20: note = chemically synthesized
  source 1..20: mol_type = other DNA
acatgattagcaaaagggcc

SEQ ID NO: 8595 - DNA, 20 bp, synthetic construct
  misc_feature 1..20: note = chemically synthesized
  source 1..20: mol_type = other DNA
attagcaaaagggcctagct

SEQ ID NO: 8596 - DNA, 20 bp, synthetic construct
  misc_feature 1..20: note = chemically synthesized
  source 1..20: mol_type = other DNA
aaaagggcctagcttggact

SEQ ID NO: 8597 - DNA, 20 bp, synthetic construct
  misc_feature 1..20: note = chemically synthesized
  source 1..20: mol_type = other DNA
agcttggactcagaataatc

SEQ ID NO: 8598 - DNA, 20 bp, synthetic construct
  misc_feature 1..20: note = chemically synthesized
  source 1..20: mol_type = other DNA
ttatcccaaccataaaataa

SEQ ID NO: 8599 - DNA, 20 bp, synthetic construct
  misc_feature 1..20: note = chemically synthesized
  source 1..20: mol_type = other DNA
tcccaaccataaaataaaag

SEQ ID NO: 8600 - DNA, 20 bp, synthetic construct
  misc_feature 1..20: note = chemically synthesized
  source 1..20: mol_type = other DNA
accataaaataaaagcagaa

SEQ ID NO: 8601 - DNA, 20 bp, synthetic construct
  misc_feature 1..20: note = chemically synthesized
  source 1..20: mol_type = other DNA
ataaaataaaagcagaatgg

SEQ ID NO: 8602 - DNA, 20 bp, synthetic construct
  misc_feature 1..20: note = chemically synthesized
  source 1..20: mol_type = other DNA
aataaaagcagaatggtagc

SEQ ID NO: 8603 - DNA, 20 bp, synthetic construct
  misc_feature 1..20: note = chemically synthesized
  source 1..20: mol_type = other DNA
gcagaatggtagctggattg

SEQ ID NO: 8604 - DNA, 20 bp, synthetic construct
  misc_feature 1..20: note = chemically synthesized
  source 1..20: mol_type = other DNA
agctggattgtagctgctat

SEQ ID NO: 8605 - DNA, 20 bp, synthetic construct
  misc_feature 1..20: note = chemically synthesized
  source 1..20: mol_type = other DNA
caatatgaaacctcttacat

SEQ ID NO: 8606 - DNA, 20 bp, synthetic construct
  misc_feature 1..20: note = chemically synthesized
  source 1..20: mol_type = other DNA
catcagttacaatttatatg

SEQ ID NO: 8607 - DNA, 20 bp, synthetic construct
  misc_feature 1..20: note = chemically synthesized
  source 1..20: mol_type = other DNA
tatgcagaaatatttatatg

SEQ ID NO: 8608 - DNA, 20 bp, synthetic construct
  misc_feature 1..20: note = chemically synthesized
  source 1..20: mol_type = other DNA
tgcagaaatatttatatgca

SEQ ID NO: 8609 - DNA, 20 bp, synthetic construct
  misc_feature 1..20: note = chemically synthesized
  source 1..20: mol_type = other DNA
atattgctattgccttaacc

SEQ ID NO: 8610 - DNA, 20 bp, synthetic construct
  misc_feature 1..20: note = chemically synthesized
  source 1..20: mol_type = other DNA
aaattatcactgttattctt

SEQ ID NO: 8611 - DNA, 20 bp, synthetic construct
  misc_feature 1..20: note = chemically synthesized
  source 1..20: mol_type = other DNA
atcactgttattctttagaa

SEQ ID NO: 8612 - DNA, 20 bp, synthetic construct
  misc_feature 1..20: note = chemically synthesized
  source 1..20: mol_type = other DNA
ttattctttagaatggtgca

SEQ ID NO: 8613 - DNA, 20 bp, synthetic construct
  misc_feature 1..20: note = chemically synthesized
  source 1..20: mol_type = other DNA
attctttagaatggtgcaaa

SEQ ID NO: 8614 - DNA, 20 bp, synthetic construct
  misc_feature 1..20: note = chemically synthesized
  source 1..20: mol_type = other DNA
ttctttagaatggtgcaaag

SEQ ID NO: 8615 - DNA, 20 bp, synthetic construct
  misc_feature 1..20: note = chemically synthesized
  source 1..20: mol_type = other DNA
ttgtatcattattgccctga

SEQ ID NO: 8616 - DNA, 20 bp, synthetic construct
  misc_feature 1..20: note = chemically synthesized
  source 1..20: mol_type = other DNA
atcattattgccctgaaaga

SEQ ID NO: 8617 - DNA, 20 bp, synthetic construct
  misc_feature 1..20: note = chemically synthesized
  source 1..20: mol_type = other DNA
cattattgccctgaaagaaa

SEQ ID NO: 8618 - DNA, 20 bp, synthetic construct
  misc_feature 1..20: note = chemically synthesized
  source 1..20: mol_type = other DNA
ttgccctgaaagaaagagat

SEQ ID NO: 8619 - DNA, 20 bp, synthetic construct
  misc_feature 1..20: note = chemically synthesized
  source 1..20: mol_type = other DNA
tgccctgaaagaaagagatt

SEQ ID NO: 8620 - DNA, 20 bp, synthetic construct
  misc_feature 1..20: note = chemically synthesized
  source 1..20: mol_type = other DNA
gccctgaaagaaagagatta

SEQ ID NO: 8621 - DNA, 20 bp, synthetic construct
  misc_feature 1..20: note = chemically synthesized
  source 1..20: mol_type = other DNA
tgaaagaaagagattaggga

SEQ ID NO: 8622 - DNA, 20 bp, synthetic construct
  misc_feature 1..20: note = chemically synthesized
  source 1..20: mol_type = other DNA
aaagagattagggaaagtat

SEQ ID NO: 8623 - DNA, 20 bp, synthetic construct
  misc_feature 1..20: note = chemically synthesized
  source 1..20: mol_type = other DNA
ttagggaaagtattagaaat

SEQ ID NO: 8624 - DNA, 20 bp, synthetic construct
  misc_feature 1..20: note = chemically synthesized
  source 1..20: mol_type = other DNA
tagaaataagataaacaaaa

SEQ ID NO: 8625 - DNA, 20 bp, synthetic construct
  misc_feature 1..20: note = chemically synthesized
  source 1..20: mol_type = other DNA
taaacaaaaaagtatattaa

SEQ ID NO: 8626 - DNA, 20 bp, synthetic construct
  misc_feature 1..20: note = chemically synthesized
  source 1..20: mol_type = other DNA
acaaaaaagtatattaaaag

SEQ ID NO: 8627 - DNA, 20 bp, synthetic construct
  misc_feature 1..20: note = chemically synthesized
  source 1..20: mol_type = other DNA
aaaagtatattaaaagaaga

SEQ ID NO: 8628 - DNA, 20 bp, synthetic construct
  misc_feature 1..20: note = chemically synthesized
  source 1..20: mol_type = other DNA
aatgcaaaattaccctgatt

SEQ ID NO: 8629 - DNA, 20 bp, synthetic construct
  misc_feature 1..20: note = chemically synthesized
  source 1..20: mol_type = other DNA
tatgtatcaattaaaaataa

SEQ ID NO: 8630 - DNA, 20 bp, synthetic construct
  misc_feature 1..20: note = chemically synthesized
  source 1..20: mol_type = other DNA
attaaaaataaaagaaaata

SEQ ID NO: 8631 - DNA, 20 bp, synthetic construct
  misc_feature 1..20: note = chemically synthesized
  source 1..20: mol_type = other DNA
aaaaataaaagaaaataaag

SEQ ID NO: 8632 - DNA, 20 bp, synthetic construct
  misc_feature 1..20: note = chemically synthesized
  source 1..20: mol_type = other DNA
aaaataaaagaaaataaagt

SEQ ID NO: 8633 - DNA, 20 bp, synthetic construct
  misc_feature 1..20: note = chemically synthesized
  source 1..20: mol_type = other DNA
aaataaaagaaaataaagta

SEQ ID NO: 8634 - DNA, 20 bp, synthetic construct
  misc_feature 1..20: note = chemically synthesized
  source 1..20: mol_type = other DNA
ataaaagaaaataaagtagg

SEQ ID NO: 8635 - DNA, 20 bp, synthetic construct
  misc_feature 1..20: note = chemically synthesized
  source 1..20: mol_type = other DNA
gagattatgaatatgcaaat

SEQ ID NO: 8636 - DNA, 20 bp, synthetic construct
  misc_feature 1..20: note = chemically synthesized
  source 1..20: mol_type = other DNA
aagcacacatatattccaaa

SEQ ID NO: 8637 - DNA, 20 bp, synthetic construct
  misc_feature 1..20: note = chemically synthesized
  source 1..20: mol_type = other DNA
tattccaaatagtaatgtac

SEQ ID NO: 8638 - DNA, 20 bp, synthetic construct
  misc_feature 1..20: note = chemically synthesized
  source 1..20: mol_type = other DNA
attccaaatagtaatgtact

SEQ ID NO: 8639 - DNA, 20 bp, synthetic construct
  misc_feature 1..20: note = chemically synthesized
  source 1..20: mol_type = other DNA
ccaaatagtaatgtactagg

SEQ ID NO: 8640 - DNA, 20 bp, synthetic construct
  misc_feature 1..20: note = chemically synthesized
  source 1..20: mol_type = other DNA
tgtactaggcagactgtgta

SEQ ID NO: 8641 - DNA, 20 bp, synthetic construct
  misc_feature 1..20: note = chemically synthesized
  source 1..20: mol_type = other DNA
actgtgtaaagttttttttt

SEQ ID NO: 8642 - DNA, 20 bp, synthetic construct
  misc_feature 1..20: note = chemically synthesized
  source 1..20: mol_type = other DNA
ttaagttacttaatgtatct

SEQ ID NO: 8643 - DNA, 20 bp, synthetic construct
  misc_feature 1..20: note = chemically synthesized
  source 1..20: mol_type = other DNA
aagttacttaatgtatctca

SEQ ID NO: 8644 - DNA, 20 bp, synthetic construct
  misc_feature 1..20: note = chemically synthesized
  source 1..20: mol_type = other DNA
cttttgttatacacaatgtt

SEQ ID NO: 8645 - DNA, 20 bp, synthetic construct
  misc_feature 1..20: note = chemically synthesized
  source 1..20: mol_type = other DNA
ttttgttatacacaatgtta

SEQ ID NO: 8646 - DNA, 20 bp, synthetic construct
  misc_feature 1..20: note = chemically synthesized
  source 1..20: mol_type = other DNA
atacacaatgttaaggcatt

SEQ ID NO: 8647 - DNA, 20 bp, synthetic construct
  misc_feature 1..20: note = chemically synthesized
  source 1..20: mol_type = other DNA
tgttaaggcattaagtataa

SEQ ID NO: 8648 - DNA, 20 bp, synthetic construct
  misc_feature 1..20: note = chemically synthesized
  source 1..20: mol_type = other DNA
aagtataatagtaaaaattg

SEQ ID NO: 8649 - DNA, 20 bp, synthetic construct
  misc_feature 1..20: note = chemically synthesized
  source 1..20: mol_type = other DNA
gtataatagtaaaaattgcg

SEQ ID NO: 8650 - DNA, 20 bp, synthetic construct
  misc_feature 1..20: note = chemically synthesized
  source 1..20: mol_type = other DNA
taatagtaaaaattgcggag

SEQ ID NO: 8651 - DNA, 20 bp, synthetic construct
  misc_feature 1..20: note = chemically synthesized
  source 1..20: mol_type = other DNA
aattgcggagaagaaaaaaa

SEQ ID NO: 8652 - DNA, 20 bp, synthetic construct
  misc_feature 1..20: note = chemically synthesized
  source 1..20: mol_type = other DNA
gcggagaagaaaaaaaaaga

SEQ ID NO: 8653 - DNA, 20 bp, synthetic construct
  misc_feature 1..20: note = chemically synthesized
  source 1..20: mol_type = other DNA
agaagaaaaaaaaagaaagc

SEQ ID NO: 8654 - DNA, 20 bp, synthetic construct
  misc_feature 1..20: note = chemically synthesized
  source 1..20: mol_type = other DNA
agaaagcaagaattaaacaa

SEQ ID NO: 8655 - DNA, 20 bp, synthetic construct
  misc_feature 1..20: note = chemically synthesized
  source 1..20: mol_type = other DNA
aagaaaacaattgttatgaa

SEQ ID NO: 8656 - DNA, 20 bp, synthetic construct
  misc_feature 1..20: note = chemically synthesized
  source 1..20: mol_type = other DNA
ttgttatgaacagcaaataa

SEQ ID NO: 8657 - DNA, 20 bp, synthetic construct
  misc_feature 1..20: note = chemically synthesized
  source 1..20: mol_type = other DNA
aaagaaactaaaacgatcct

SEQ ID NO: 8658 - DNA, 20 bp, synthetic construct
  misc_feature 1..20: note = chemically synthesized
  source 1..20: mol_type = other DNA
ctatgacatgaacttaacca

SEQ ID NO: 8659 - DNA, 20 bp, synthetic construct
  misc_feature 1..20: note = chemically synthesized
  source 1..20: mol_type = other DNA
acatgaacttaaccatagaa

SEQ ID NO: 8660 - DNA, 20 bp, synthetic construct
  misc_feature 1..20: note = chemically synthesized
  source 1..20: mol_type = other DNA
tgaacttaaccatagaaaag

SEQ ID NO: 8661 - DNA, 20 bp, synthetic construct
  misc_feature 1..20: note = chemically synthesized
  source 1..20: mol_type = other DNA
gaacttaaccatagaaaaga

SEQ ID NO: 8662 - DNA, 20 bp, synthetic construct
  misc_feature 1..20: note = chemically synthesized
  source 1..20: mol_type = other DNA
aacttaaccatagaaaagaa

SEQ ID NO: 8663 - DNA, 20 bp, synthetic construct
  misc_feature 1..20: note = chemically synthesized
  source 1..20: mol_type = other DNA
acttaaccatagaaaagaag

SEQ ID NO: 8664 - DNA, 20 bp, synthetic construct
  misc_feature 1..20: note = chemically synthesized
  source 1..20: mol_type = other DNA
aaccatagaaaagaagggga

SEQ ID NO: 8665 - DNA, 20 bp, synthetic construct
  misc_feature 1..20: note = chemically synthesized
  source 1..20: mol_type = other DNA
agaaggggaaagaaaacatc

SEQ ID NO: 8666 - DNA, 20 bp, synthetic construct
  misc_feature 1..20: note = chemically synthesized
  source 1..20: mol_type = other DNA
agaaaacatcaagcgtccca

SEQ ID NO: 8667 - DNA, 20 bp, synthetic construct
  misc_feature 1..20: note = chemically synthesized
  source 1..20: mol_type = other DNA
cgtcccatagactcaccctg

SEQ ID NO: 8668 - DNA, 20 bp, synthetic construct
  misc_feature 1..20: note = chemically synthesized
  source 1..20: mol_type = other DNA
tagactcaccctgaagttct

SEQ ID NO: 8669 - DNA, 20 bp, synthetic construct
  misc_feature 1..20: note = chemically synthesized
  source 1..20: mol_type = other DNA
agactcaccctgaagttctc

SEQ ID NO: 8670 - DNA, 20 bp, synthetic construct
  misc_feature 1..20: note = chemically synthesized
  source 1..20: mol_type = other DNA
aagttctcaggatccacgtg

SEQ ID NO: 8671 - DNA, 20 bp, synthetic construct
  misc_feature 1..20: note = chemically synthesized
  source 1..20: mol_type = other DNA
gatccacgtgcagcttgtca

SEQ ID NO: 8672 - DNA, 20 bp, synthetic construct
  misc_feature 1..20: note = chemically synthesized
  source 1..20: mol_type = other DNA
acgtgcagcttgtcacagtg

SEQ ID NO: 8673 - DNA, 20 bp, synthetic construct
  misc_feature 1..20: note = chemically synthesized
  source 1..20: mol_type = other DNA
ttgtcacagtgcagctcact

SEQ ID NO: 8674 - DNA, 20 bp, synthetic construct
  misc_feature 1..20: note = chemically synthesized
  source 1..20: mol_type = other DNA
acagtgcagctcactcagtg

SEQ ID NO: 8675 - DNA, 20 bp, synthetic construct
  misc_feature 1..20: note = chemically synthesized
  source 1..20: mol_type = other DNA
gcagctcactcagtgtggca

SEQ ID NO: 8676 - DNA, 20 bp, synthetic construct
  misc_feature 1..20: note = chemically synthesized
  source 1..20: mol_type = other DNA
cagctcactcagtgtggcaa

SEQ ID NO: 8677 - DNA, 20 bp, synthetic construct
  misc_feature 1..20: note = chemically synthesized
  source 1..20: mol_type = other DNA
agtgtggcaaaggtgccctt

SEQ ID NO: 8678 - DNA, 20 bp, synthetic construct
  misc_feature 1..20: note = chemically synthesized
  source 1..20: mol_type = other DNA
gtgtggcaaaggtgcccttg

SEQ ID NO: 8679 - DNA, 20 bp, synthetic construct
  misc_feature 1..20: note = chemically synthesized
  source 1..20: mol_type = other DNA
aaggtgcccttgaggttgtc

SEQ ID NO: 8680 - DNA, 20 bp, synthetic construct
  misc_feature 1..20: note = chemically synthesized
  source 1..20: mol_type = other DNA
aggtgcccttgaggttgtcc

SEQ ID NO: 8681 - DNA, 20 bp, synthetic construct
  misc_feature 1..20: note = chemically synthesized
  source 1..20: mol_type = other DNA
gcccttgaggttgtccaggt

SEQ ID NO: 8682 - DNA, 20 bp, synthetic construct
  misc_feature 1..20: note = chemically synthesized
  source 1..20: mol_type = other DNA
ttgaggttgtccaggtgagc

SEQ ID NO: 8683 - DNA, 20 bp, synthetic construct
  misc_feature 1..20: note = chemically synthesized
  source 1..20: mol_type = other DNA
tgaggttgtccaggtgagcc

SEQ ID NO: 8684 - DNA, 20 bp, synthetic construct
  misc_feature 1..20: note = chemically synthesized
  source 1..20: mol_type = other DNA
ggtgagccaggccatcacta

SEQ ID NO: 8685 - DNA, 20 bp, synthetic construct
  misc_feature 1..20: note = chemically synthesized
  source 1..20: mol_type = other DNA
gtgagccaggccatcactaa

SEQ ID NO: 8686 - DNA, 20 bp, synthetic construct
  misc_feature 1..20: note = chemically synthesized
  source 1..20: mol_type = other DNA
aggccatcactaaaggcacc

SEQ ID NO: 8687 - DNA, 20 bp, synthetic construct
  misc_feature 1..20: note = chemically synthesized
  source 1..20: mol_type = other DNA
accgagcactttcttgccat

SEQ ID NO: 8688 - DNA, 20 bp, synthetic construct
  misc_feature 1..20: note = chemically synthesized
  source 1..20: mol_type = other DNA
cttgccatgagccttcacct

SEQ ID NO: 8689 - DNA, 20 bp, synthetic construct
  misc_feature 1..20: note = chemically synthesized
  source 1..20: mol_type = other DNA
ttgccatgagccttcacctt

SEQ ID NO: 8690 - DNA, 20 bp, synthetic construct
  misc_feature 1..20: note = chemically synthesized
  source 1..20: mol_type = other DNA
tgccatgagccttcacctta

SEQ ID NO: 8691 - DNA, 20 bp, synthetic construct
  misc_feature 1..20: note = chemically synthesized
  source 1..20: mol_type = other DNA
caccttagggttgcccataa

SEQ ID NO: 8692 - DNA, 20 bp, synthetic construct
  misc_feature 1..20: note = chemically synthesized
  source 1..20: mol_type = other DNA
agggttgcccataacagcat

SEQ ID NO: 8693 - DNA, 20 bp, synthetic construct
  misc_feature 1..20: note = chemically synthesized
  source 1..20: mol_type = other DNA
gggttgcccataacagcatc

SEQ ID NO: 8694 - DNA, 20 bp, synthetic construct
  misc_feature 1..20: note = chemically synthesized
  source 1..20: mol_type = other DNA
gttgcccataacagcatcag

SEQ ID NO: 8695 - DNA, 20 bp, synthetic construct
  misc_feature 1..20: note = chemically synthesized
  source 1..20: mol_type = other DNA
gcccataacagcatcaggag

SEQ ID NO: 8696 - DNA, 20 bp, synthetic construct
  misc_feature 1..20: note = chemically synthesized
  source 1..20: mol_type = other DNA
ataacagcatcaggagtgga

SEQ ID NO: 8697 - DNA, 20 bp, synthetic construct
  misc_feature 1..20: note = chemically synthesized
  source 1..20: mol_type = other DNA
caggagtggacagatcccca

SEQ ID NO: 8698 - DNA, 20 bp, synthetic construct
  misc_feature 1..20: note = chemically synthesized
  source 1..20: mol_type = other DNA
aggagtggacagatccccaa

SEQ ID NO: 8699 - DNA, 20 bp, synthetic construct
  misc_feature 1..20: note = chemically synthesized
  source 1..20: mol_type = other DNA
acagatccccaaaggactca

SEQ ID NO: 8700 - DNA, 20 bp, synthetic construct
  misc_feature 1..20: note = chemically synthesized
  source 1..20: mol_type = other DNA
caaaggactcaaagaacctc

SEQ ID NO: 8701 - DNA, 20 bp, synthetic construct
  misc_feature 1..20: note = chemically synthesized
  source 1..20: mol_type = other DNA
aaaggactcaaagaacctct

SEQ ID NO: 8702 - DNA, 20 bp, synthetic construct
  misc_feature 1..20: note = chemically synthesized
  source 1..20: mol_type = other DNA
ctcaaagaacctctgggtcc

SEQ ID NO: 8703 - DNA, 20 bp, synthetic construct
  misc_feature 1..20: note = chemically synthesized
  source 1..20: mol_type = other DNA
tcaaagaacctctgggtcca

SEQ ID NO: 8704 - DNA, 20 bp, synthetic construct
  misc_feature 1..20: note = chemically synthesized
  source 1..20: mol_type = other DNA
caaagaacctctgggtccaa

SEQ ID NO: 8705 - DNA, 20 bp, synthetic construct
  misc_feature 1..20: note = chemically synthesized
  source 1..20: mol_type = other DNA
agaacctctgggtccaaggg

SEQ ID NO: 8706 - DNA, 20 bp, synthetic construct
  misc_feature 1..20: note = chemically synthesized
  source 1..20: mol_type = other DNA
tgggtccaagggtagaccac

SEQ ID NO: 8707 - DNA, 20 bp, synthetic construct
  misc_feature 1..20: note = chemically synthesized
  source 1..20: mol_type = other DNA
gtccaagggtagaccaccag

SEQ ID NO: 8708 - DNA, 20 bp, synthetic construct
  misc_feature 1..20: note = chemically synthesized
  source 1..20: mol_type = other DNA
gggtagaccaccagcagcct

SEQ ID NO: 8709 - DNA, 20 bp, synthetic construct
  misc_feature 1..20: note = chemically synthesized
  source 1..20: mol_type = other DNA
ggtagaccaccagcagccta

SEQ ID NO: 8710 - DNA, 20 bp, synthetic construct
  misc_feature 1..20: note = chemically synthesized
  source 1..20: mol_type = other DNA
gtagaccaccagcagcctaa

SEQ ID NO: 8711 - DNA, 20 bp, synthetic construct
  misc_feature 1..20: note = chemically synthesized
  source 1..20: mol_type = other DNA
gaccaccagcagcctaaggg

SEQ ID NO: 8712 - DNA, 20 bp, synthetic construct
  misc_feature 1..20: note = chemically synthesized
  source 1..20: mol_type = other DNA
accaccagcagcctaagggt

SEQ ID NO: 8713 - DNA, 20 bp, synthetic construct
  misc_feature 1..20: note = chemically synthesized
  source 1..20: mol_type = other DNA
gcagcctaagggtgggaaaa

SEQ ID NO: 8714 - DNA, 20 bp, synthetic construct
  misc_feature 1..20: note = chemically synthesized
  source 1..20: mol_type = other DNA
agggtgggaaaatagaccaa

SEQ ID NO: 8715 - DNA, 20 bp, synthetic construct
  misc_feature 1..20: note = chemically synthesized
  source 1..20: mol_type = other DNA
gggtgggaaaatagaccaat

SEQ ID NO: 8716 - DNA, 20 bp, synthetic construct
  misc_feature 1..20: note = chemically synthesized
  source 1..20: mol_type = other DNA
tgggaaaatagaccaatagg

SEQ ID NO: 8717 - DNA, 20 bp, synthetic construct
  misc_feature 1..20: note = chemically synthesized
  source 1..20: mol_type = other DNA
ggaaaatagaccaataggca

SEQ ID NO: 8718 - DNA, 20 bp, synthetic construct
  misc_feature 1..20: note = chemically synthesized
  source 1..20: mol_type = other DNA
aaaatagaccaataggcaga

SEQ ID NO: 8719 - DNA, 20 bp, synthetic construct
  misc_feature 1..20: note = chemically synthesized
  source 1..20: mol_type = other DNA
aatagaccaataggcagaga

SEQ ID NO: 8720 - DNA, 20 bp, synthetic construct
  misc_feature 1..20: note = chemically synthesized
  source 1..20: mol_type = other DNA
gaccaataggcagagagagt

SEQ ID NO: 8721 - DNA, 20 bp, synthetic construct
  misc_feature 1..20: note = chemically synthesized
  source 1..20: mol_type = other DNA
cagagagagtcagtgcctat

SEQ ID NO: 8722 - DNA, 20 bp, synthetic construct
  misc_feature 1..20: note = chemically synthesized
  source 1..20: mol_type = other DNA
tcagtgcctatcagaaaccc

SEQ ID NO: 8723 - DNA, 20 bp, synthetic construct
  misc_feature 1..20: note = chemically synthesized
  source 1..20: mol_type = other DNA
agtgcctatcagaaacccaa

SEQ ID NO: 8724 - DNA, 20 bp, synthetic construct
  misc_feature 1..20: note = chemically synthesized
  source 1..20: mol_type = other DNA
cttctctgtctccacatgcc

SEQ ID NO: 8725 - DNA, 20 bp, synthetic construct
  misc_feature 1..20: note = chemically synthesized
  source 1..20: mol_type = other DNA
tccacatgcccagtttctat

SEQ ID NO: 8726 - DNA, 20 bp, synthetic construct
  misc_feature 1..20: note = chemically synthesized
  source 1..20: mol_type = other DNA
aaccttgataccaacctgcc

SEQ ID NO: 8727 - DNA, 20 bp, synthetic construct
  misc_feature 1..20: note = chemically synthesized
  source 1..20: mol_type = other DNA
accttgataccaacctgccc

SEQ ID NO: 8728 - DNA, 20 bp, synthetic construct
  misc_feature 1..20: note = chemically synthesized
  source 1..20: mol_type = other DNA
ccttgataccaacctgccca

SEQ ID NO: 8729 - DNA, 20 bp, synthetic construct
  misc_feature 1..20: note = chemically synthesized
  source 1..20: mol_type = other DNA
tccacgttcaccttgcccca

SEQ ID NO: 8730 - DNA, 20 bp, synthetic construct
  misc_feature 1..20: note = chemically synthesized
  source 1..20: mol_type = other DNA
ccacgttcaccttgccccac

SEQ ID NO: 8731 - DNA, 20 bp, synthetic construct
  misc_feature 1..20: note = chemically synthesized
  source 1..20: mol_type = other DNA
cacgttcaccttgccccaca

SEQ ID NO: 8732 - DNA, 20 bp, synthetic construct
  misc_feature 1..20: note = chemically synthesized
  source 1..20: mol_type = other DNA
gttcaccttgccccacaggg

SEQ ID NO: 8733 - DNA, 20 bp, synthetic construct
  misc_feature 1..20: note = chemically synthesized
  source 1..20: mol_type = other DNA
cttgccccacagggcagtaa

SEQ ID NO: 8734 - DNA, 20 bp, synthetic construct
  misc_feature 1..20: note = chemically synthesized
  source 1..20: mol_type = other DNA
gccccacagggcagtaacgg

SEQ ID NO: 8735 - DNA, 20 bp, synthetic construct
  misc_feature 1..20: note = chemically synthesized
  source 1..20: mol_type = other DNA
agtaacggcagacttctcct

SEQ ID NO: 8736 - DNA, 20 bp, synthetic construct
  misc_feature 1..20: note = chemically synthesized
  source 1..20: mol_type = other DNA
gtaacggcagacttctcctc

SEQ ID NO: 8737 - DNA, 20 bp, synthetic construct
  misc_feature 1..20: note = chemically synthesized
  source 1..20: mol_type = other DNA
aacggcagacttctcctcag

SEQ ID NO: 8738 - DNA, 20 bp, synthetic construct
  misc_feature 1..20: note = chemically synthesized
  source 1..20: mol_type = other DNA
gcagacttctcctcaggagt

SEQ ID NO: 8739 - DNA, 20 bp, synthetic construct
  misc_feature 1..20: note = chemically synthesized
  source 1..20: mol_type = other DNA
ctcaggagtcagatgcacca

SEQ ID NO: 8740 - DNA, 20 bp, synthetic construct
  misc_feature 1..20: note = chemically synthesized
  source 1..20: mol_type = other DNA
atgcaccatggtgtctgttt

SEQ ID NO: 8741 - DNA, 20 bp, synthetic construct
  misc_feature 1..20: note = chemically synthesized
  source 1..20: mol_type = other DNA
tgcaccatggtgtctgtttg

SEQ ID NO: 8742 - DNA, 20 bp, synthetic construct
  misc_feature 1..20: note = chemically synthesized
  source 1..20: mol_type = other DNA
tggtgtctgtttgaggttgc

SEQ ID NO: 8743 - DNA, 20 bp, synthetic construct
  misc_feature 1..20: note = chemically synthesized
  source 1..20: mol_type = other DNA
tttgaggttgctagtgaaca

SEQ ID NO: 8744 - DNA, 20 bp, synthetic construct
  misc_feature 1..20: note = chemically synthesized
  source 1..20: mol_type = other DNA
gctagtgaacacagttgtgt

SEQ ID NO: 8745 - DNA, 20 bp, synthetic construct
  misc_feature 1..20: note = chemically synthesized
  source 1..20: mol_type = other DNA
agtgaacacagttgtgtcag

SEQ ID NO: 8746 - DNA, 20 bp, synthetic construct
  misc_feature 1..20: note = chemically synthesized
  source 1..20: mol_type = other DNA
gttgtgtcagaagcaaatgt

SEQ ID NO: 8747 - DNA, 20 bp, synthetic construct
  misc_feature 1..20: note = chemically synthesized
  source 1..20: mol_type = other DNA
tcagaagcaaatgtaagcaa

SEQ ID NO: 8748 - DNA, 20 bp, synthetic construct
  misc_feature 1..20: note = chemically synthesized
  source 1..20: mol_type = other DNA
aagcaaatgtaagcaataga

SEQ ID NO: 8749 - DNA, 20 bp, synthetic construct
  misc_feature 1..20: note = chemically synthesized
  source 1..20: mol_type = other DNA
tctgccctgacttttatgcc

SEQ ID NO: 8750 - DNA, 20 bp, synthetic construct
  misc_feature 1..20: note = chemically synthesized
  source 1..20: mol_type = other DNA
ctgacttttatgcccagccc

SEQ ID NO: 8751 - DNA, 20 bp, synthetic construct
  misc_feature 1..20: note = chemically synthesized
  source 1..20: mol_type = other DNA
gctcctgccctccctgctcc

SEQ ID NO: 8752 - DNA, 20 bp, synthetic construct
  misc_feature 1..20: note = chemically synthesized
  source 1..20: mol_type = other DNA
ctcctgccctccctgctcct

SEQ ID NO: 8753 - DNA, 20 bp, synthetic construct
  misc_feature 1..20: note = chemically synthesized
  source 1..20: mol_type = other DNA
cctgccctccctgctcctgg

SEQ ID NO: 8754 - DNA, 20 bp, synthetic construct
  misc_feature 1..20: note = chemically synthesized
  source 1..20: mol_type = other DNA
gccctccctgctcctgggag

SEQ ID NO: 8755 - DNA, 20 bp, synthetic construct
  misc_feature 1..20: note = chemically synthesized
  source 1..20: mol_type = other DNA
ccctgctcctgggagtagat

SEQ ID NO: 8756 - DNA, 20 bp, synthetic construct
  misc_feature 1..20: note = chemically synthesized
  source 1..20: mol_type = other DNA
gggagtagattggccaaccc

SEQ ID NO: 8757 - DNA, 20 bp, synthetic construct
  misc_feature 1..20: note = chemically synthesized
  source 1..20: mol_type = other DNA
ggagtagattggccaaccct

SEQ ID NO: 8758 - DNA, 20 bp, synthetic construct
  misc_feature 1..20: note = chemically synthesized
  source 1..20: mol_type = other DNA
gagtagattggccaacccta

SEQ ID NO: 8759 - DNA, 20 bp, synthetic construct
  misc_feature 1..20: note = chemically synthesized
  source 1..20: mol_type = other DNA
gattggccaaccctagggtg

SEQ ID NO: 8760 - DNA, 20 bp, synthetic construct
  misc_feature 1..20: note = chemically synthesized
  source 1..20: mol_type = other DNA
aaccctagggtgtggctcca

SEQ ID NO: 8761 - DNA, 20 bp, synthetic construct
  misc_feature 1..20: note = chemically synthesized
  source 1..20: mol_type = other DNA
accctagggtgtggctccac

SEQ ID NO: 8762 - DNA, 20 bp, synthetic construct
  misc_feature 1..20: note = chemically synthesized
  source 1..20: mol_type = other DNA
ccctagggtgtggctccaca

SEQ ID NO: 8763 - DNA, 20 bp, synthetic construct
  misc_feature 1..20: note = chemically synthesized
  source 1..20: mol_type = other DNA
agggtgtggctccacagggt

SEQ ID NO: 8764 - DNA, 20 bp, synthetic construct
  misc_feature 1..20: note = chemically synthesized
  source 1..20: mol_type = other DNA
gggtgtggctccacagggtg

SEQ ID NO: 8765 - DNA, 20 bp, synthetic construct
  misc_feature 1..20: note = chemically synthesized
  source 1..20: mol_type = other DNA
ggctccacagggtgaggtct

SEQ ID NO: 8766 - DNA, 20 bp, synthetic construct
  misc_feature 1..20: note = chemically synthesized
  source 1..20: mol_type = other DNA
gggtgaggtctaagtgatga

SEQ ID NO: 8767 - DNA, 20 bp, synthetic construct
  misc_feature 1..20: note = chemically synthesized
  source 1..20: mol_type = other DNA
atgacagccgtacctgtcct

SEQ ID NO: 8768 - DNA, 20 bp, synthetic construct
  misc_feature 1..20: note = chemically synthesized
  source 1..20: mol_type = other DNA
gtacctgtccttggctcttc

SEQ ID NO: 8769 - DNA, 20 bp, synthetic construct
  misc_feature 1..20: note = chemically synthesized
  source 1..20: mol_type = other DNA
gtccttggctcttctggcac

SEQ ID NO: 8770 - DNA, 20 bp, synthetic construct
  misc_feature 1..20: note = chemically synthesized
  source 1..20: mol_type = other DNA
tggctcttctggcactggct

SEQ ID NO: 8771 - DNA, 20 bp, synthetic construct
  misc_feature 1..20: note = chemically synthesized
  source 1..20: mol_type = other DNA
ggctcttctggcactggctt

SEQ ID NO: 8772 - DNA, 20 bp, synthetic construct
  misc_feature 1..20: note = chemically synthesized
  source 1..20: mol_type = other DNA
ctcttctggcactggcttag

SEQ ID NO: 8773 - DNA, 20 bp, synthetic construct
  misc_feature 1..20: note = chemically synthesized
  source 1..20: mol_type = other DNA
tctggcactggcttaggagt

SEQ ID NO: 8774 - DNA, 20 bp, synthetic construct
  misc_feature 1..20: note = chemically synthesized
  source 1..20: mol_type = other DNA
ggagttggacttcaaaccct

SEQ ID NO: 8775 - DNA, 20 bp, synthetic construct
  misc_feature 1..20: note = chemically synthesized
  source 1..20: mol_type = other DNA
aaaccctcagccctccctct

SEQ ID NO: 8776 - DNA, 20 bp, synthetic construct
  misc_feature 1..20: note = chemically synthesized
  source 1..20: mol_type = other DNA
tccctctaagatatatctct

SEQ ID NO: 8777 - DNA, 20 bp, synthetic construct
  misc_feature 1..20: note = chemically synthesized
  source 1..20: mol_type = other DNA
atctcttggccccataccat

SEQ ID NO: 8778 - DNA, 20 bp, synthetic construct
  misc_feature 1..20: note = chemically synthesized
  source 1..20: mol_type = other DNA
ctaaaaacatcctcctttgc

SEQ ID NO: 8779 - DNA, 20 bp, synthetic construct
  misc_feature 1..20: note = chemically synthesized
  source 1..20: mol_type = other DNA
aagtgtatttacgtaatatt

SEQ ID NO: 8780 - DNA, 20 bp, synthetic construct
  misc_feature 1..20: note = chemically synthesized
  source 1..20: mol_type = other DNA
ttacgtaatatttggaatca

SEQ ID NO: 8781 - DNA, 20 bp, synthetic construct
  misc_feature 1..20: note = chemically synthesized
  source 1..20: mol_type = other DNA
taatatttggaatcacagct

SEQ ID NO: 8782 - DNA, 20 bp, synthetic construct
  misc_feature 1..20: note = chemically synthesized
  source 1..20: mol_type = other DNA
atttggaatcacagcttggt

SEQ ID NO: 8783 - DNA, 20 bp, synthetic construct
  misc_feature 1..20: note = chemically synthesized
  source 1..20: mol_type = other DNA
acagcttggtaagcatattg

SEQ ID NO: 8784 - DNA, 20 bp, synthetic construct
  misc_feature 1..20: note = chemically synthesized
  source 1..20: mol_type = other DNA
aattttcttattacacaaat

SEQ ID NO: 8785 - DNA, 20 bp, synthetic construct
  misc_feature 1..20: note = chemically synthesized
  source 1..20: mol_type = other DNA
tttcttattacacaaataag

SEQ ID NO: 8786 - DNA, 20 bp, synthetic construct
  misc_feature 1..20: note = chemically synthesized
  source 1..20: mol_type = other DNA
ataagaagttgatgcactaa

SEQ ID NO: 8787 - DNA, 20 bp, synthetic construct
  misc_feature 1..20: note = chemically synthesized
  source 1..20: mol_type = other DNA
agaagttgatgcactaaaag

SEQ ID NO: 8788 - DNA, 20 bp, synthetic construct
  misc_feature 1..20: note = chemically synthesized
  source 1..20: mol_type = other DNA
agttgatgcactaaaagtgg

SEQ ID NO: 8789 - DNA, 20 bp, synthetic construct
  misc_feature 1..20: note = chemically synthesized
  source 1..20: mol_type = other DNA
ttgatgcactaaaagtggaa

SEQ ID NO: 8790 - DNA, 20 bp, synthetic construct
  misc_feature 1..20: note = chemically synthesized
  source 1..20: mol_type = other DNA
gagttttgtctaccataatt

SEQ ID NO: 8791 - DNA, 20 bp, synthetic construct
  misc_feature 1..20: note = chemically synthesized
  source 1..20: mol_type = other DNA
tgtctaccataattcagctt

SEQ ID NO: 8792 - DNA, 20 bp, synthetic construct
  misc_feature 1..20: note = chemically synthesized
  source 1..20: mol_type = other DNA
gtctaccataattcagcttt

SEQ ID NO: 8793 - DNA, 20 bp, synthetic construct
  misc_feature 1..20: note = chemically synthesized
  source 1..20: mol_type = other DNA
taattcagctttgggatatg

SEQ ID NO: 8794 - DNA, 20 bp, synthetic construct
  misc_feature 1..20: note = chemically synthesized
  source 1..20: mol_type = other DNA
tcagctttgggatatgtaga

SEQ ID NO: 8795 - DNA, 20 bp, synthetic construct
  misc_feature 1..20: note = chemically synthesized
  source 1..20: mol_type = other DNA
tggatctcttcctgcgtctc

SEQ ID NO: 8796 - DNA, 20 bp, synthetic construct
  misc_feature 1..20: note = chemically synthesized
  source 1..20: mol_type = other DNA
cagaatatgcaaaatactta

SEQ ID NO: 8797 - DNA, 20 bp, synthetic construct
  misc_feature 1..20: note = chemically synthesized
  source 1..20: mol_type = other DNA
agaatatgcaaaatacttac

SEQ ID NO: 8798 - DNA, 20 bp, synthetic construct
  misc_feature 1..20: note = chemically synthesized
  source 1..20: mol_type = other DNA
tatgcaaaatacttacagga

SEQ ID NO: 8799 - DNA, 20 bp, synthetic construct
  misc_feature 1..20: note = chemically synthesized
  source 1..20: mol_type = other DNA
aaaatacttacaggacagaa

SEQ ID NO: 8800 - DNA, 20 bp, synthetic construct
  misc_feature 1..20: note = chemically synthesized
  source 1..20: mol_type = other DNA
aatggatgaaaactctacct

SEQ ID NO: 8801 - DNA, 20 bp, synthetic construct
  misc_feature 1..20: note = chemically synthesized
  source 1..20: mol_type = other DNA
gaaaactctacctcggttct

SEQ ID NO: 8802 - DNA, 20 bp, synthetic construct
  misc_feature 1..20: note = chemically synthesized
  source 1..20: mol_type = other DNA
aagcatatcttctccttatt

SEQ ID NO: 8803 - DNA, 20 bp, synthetic construct
  misc_feature 1..20: note = chemically synthesized
  source 1..20: mol_type = other DNA
ttatttggattaaaaccttc

SEQ ID NO: 8804 - DNA, 20 bp, synthetic construct
  misc_feature 1..20: note = chemically synthesized
  source 1..20: mol_type = other DNA
ttggattaaaaccttctggt

SEQ ID NO: 8805 - DNA, 20 bp, synthetic construct
  misc_feature 1..20: note = chemically synthesized
  source 1..20: mol_type = other DNA
ttaaaaccttctggtaagaa

SEQ ID NO: 8806 - DNA, 20 bp, synthetic construct
  misc_feature 1..20: note = chemically synthesized
  source 1..20: mol_type = other DNA
taataaattatgtctaaaaa

SEQ ID NO: 8807 - DNA, 20 bp, synthetic construct
  misc_feature 1..20: note = chemically synthesized
  source 1..20: mol_type = other DNA
aatcaatgtgctctgtgcat

SEQ ID NO: 8808 - DNA, 20 bp, synthetic construct
  misc_feature 1..20: note = chemically synthesized
  source 1..20: mol_type = other DNA
tctgtgcattagttacttat

SEQ ID NO: 8809 - DNA, 20 bp, synthetic construct
  misc_feature 1..20: note = chemically synthesized
  source 1..20: mol_type = other DNA
ctgtgcattagttacttatt

SEQ ID NO: 8810 - DNA, 20 bp, synthetic construct
  misc_feature 1..20: note = chemically synthesized
  source 1..20: mol_type = other DNA
attagttacttattaggttt

SEQ ID NO: 8811 - DNA, 20 bp, synthetic construct
  misc_feature 1..20: note = chemically synthesized
  source 1..20: mol_type = other DNA
ttagttacttattaggtttt

SEQ ID NO: 8812 - DNA, 20 bp, synthetic construct
  misc_feature 1..20: note = chemically synthesized
  source 1..20: mol_type = other DNA
cttattaggttttgggaaac

SEQ ID NO: 8813 - DNA, 20 bp, synthetic construct
  misc_feature 1..20: note = chemically synthesized
  source 1..20: mol_type = other DNA
tattaggttttgggaaacaa

SEQ ID NO: 8814 - DNA, 20 bp, synthetic construct
  misc_feature 1..20: note = chemically synthesized
  source 1..20: mol_type = other DNA
ggaaacaagagataaaaaac

SEQ ID NO: 8815 - DNA, 20 bp, synthetic construct
  misc_feature 1..20: note = chemically synthesized
  source 1..20: mol_type = other DNA
aaacaagagataaaaaacta

SEQ ID NO: 8816 - DNA, 20 bp, synthetic construct
  misc_feature 1..20: note = chemically synthesized
  source 1..20: mol_type = other DNA
aaactagagacctcttaatg

SEQ ID NO: 8817 - DNA, 20 bp, synthetic construct
  misc_feature 1..20: note = chemically synthesized
  source 1..20: mol_type = other DNA
caaaaatacaaataaataaa

SEQ ID NO: 8818 - DNA, 20 bp, synthetic construct
  misc_feature 1..20: note = chemically synthesized
  source 1..20: mol_type = other DNA
aaaaagtcacttacaaccca

SEQ ID NO: 8819 - DNA, 20 bp, synthetic construct
  misc_feature 1..20: note = chemically synthesized
  source 1..20: mol_type = other DNA
acccaaagtgtgactatcaa

SEQ ID NO: 8820 - DNA, 20 bp, synthetic construct
  misc_feature 1..20: note = chemically synthesized
  source 1..20: mol_type = other DNA
cccaaagtgtgactatcaat

SEQ ID NO: 8821 - DNA, 20 bp, synthetic construct
  misc_feature 1..20: note = chemically synthesized
  source 1..20: mol_type = other DNA
ccaaagtgtgactatcaatg

SEQ ID NO: 8822 - DNA, 20 bp, synthetic construct
  misc_feature 1..20: note = chemically synthesized
  source 1..20: mol_type = other DNA
gtgactatcaatggggtaat

SEQ ID NO: 8823 - DNA, 20 bp, synthetic construct
  misc_feature 1..20: note = chemically synthesized
  source 1..20: mol_type = other DNA
actatcaatggggtaatcag

SEQ ID NO: 8824 - DNA, 20 bp, synthetic construct
  misc_feature 1..20: note = chemically synthesized
  source 1..20: mol_type = other DNA
gggtaatcagtggtgtcaaa

SEQ ID NO: 8825 - DNA, 20 bp, synthetic construct
  misc_feature 1..20: note = chemically synthesized
  source 1..20: mol_type = other DNA
ggtaatcagtggtgtcaaat

SEQ ID NO: 8826 - DNA, 20 bp, synthetic construct
  misc_feature 1..20: note = chemically synthesized
  source 1..20: mol_type = other DNA
taatcagtggtgtcaaatag

SEQ ID NO: 8827 - DNA, 20 bp, synthetic construct
  misc_feature 1..20: note = chemically synthesized
  source 1..20: mol_type = other DNA
aatcagtggtgtcaaatagg

SEQ ID NO: 8828 - DNA, 20 bp, synthetic construct
  misc_feature 1..20: note = chemically synthesized
  source 1..20: mol_type = other DNA
gtgtcaaataggaggttaac

SEQ ID NO: 8829 - DNA, 20 bp, synthetic construct
  misc_feature 1..20: note = chemically synthesized
  source 1..20: mol_type = other DNA
tgtcaaataggaggttaact

SEQ ID NO: 8830 - DNA, 20 bp, synthetic construct
  misc_feature 1..20: note = chemically synthesized
  source 1..20: mol_type = other DNA
gtcaaataggaggttaactg

SEQ ID NO: 8831 - DNA, 20 bp, synthetic construct
  misc_feature 1..20: note = chemically synthesized
  source 1..20: mol_type = other DNA
gacatctaactgtttctgcc

SEQ ID NO: 8832 - DNA, 20 bp, synthetic construct
  misc_feature 1..20: note = chemically synthesized
  source 1..20: mol_type = other DNA
ttctgcctggactaatctgc

SEQ ID NO: 8833 - DNA, 20 bp, synthetic construct
  misc_feature 1..20: note = chemically synthesized
  source 1..20: mol_type = other DNA
ctgcctggactaatctgcaa

SEQ ID NO: 8834 - DNA, 20 bp, synthetic construct
  misc_feature 1..20: note = chemically synthesized
  source 1..20: mol_type = other DNA
gactaatctgcaagagtgtc

SEQ ID NO: 8835 - DNA, 20 bp, synthetic construct
  misc_feature 1..20: note = chemically synthesized
  source 1..20: mol_type = other DNA
actaatctgcaagagtgtct

SEQ ID NO: 8836 - DNA, 20 bp, synthetic construct
  misc_feature 1..20: note = chemically synthesized
  source 1..20: mol_type = other DNA
ctaatctgcaagagtgtctg

SEQ ID NO: 8837 - DNA, 20 bp, synthetic construct
  misc_feature 1..20: note = chemically synthesized
  source 1..20: mol_type = other DNA
taatctgcaagagtgtctgg

SEQ ID NO: 8838 - DNA, 20 bp, synthetic construct
  misc_feature 1..20: note = chemically synthesized
  source 1..20: mol_type = other DNA
agagtgtctgggggaacaaa

SEQ ID NO: 8839 - DNA, 20 bp, synthetic construct
  misc_feature 1..20: note = chemically synthesized
  source 1..20: mol_type = other DNA
aacaaaaagcctctgtgact

SEQ ID NO: 8840 - DNA, 20 bp, synthetic construct
  misc_feature 1..20: note = chemically synthesized
  source 1..20: mol_type = other DNA
aaaagcctctgtgacttaga

SEQ ID NO: 8841 - DNA, 20 bp, synthetic construct
  misc_feature 1..20: note = chemically synthesized
  source 1..20: mol_type = other DNA
agcctctgtgacttagaaag

SEQ ID NO: 8842 - DNA, 20 bp, synthetic construct
  misc_feature 1..20: note = chemically synthesized
  source 1..20: mol_type = other DNA
gcctctgtgacttagaaagt

SEQ ID NO: 8843 - DNA, 20 bp, synthetic construct
  misc_feature 1..20: note = chemically synthesized
  source 1..20: mol_type = other DNA
cctctgtgacttagaaagta

SEQ ID NO: 8844 - DNA, 20 bp, synthetic construct
  misc_feature 1..20: note = chemically synthesized
  source 1..20: mol_type = other DNA
ctctgtgacttagaaagtag

SEQ ID NO: 8845 - DNA, 20 bp, synthetic construct
  misc_feature 1..20: note = chemically synthesized
  source 1..20: mol_type = other DNA
tgtgacttagaaagtagggg

SEQ ID NO: 8846 - DNA, 20 bp, synthetic construct
  misc_feature 1..20: note = chemically synthesized
  source 1..20: mol_type = other DNA
gtgacttagaaagtaggggt

SEQ ID NO: 8847 - DNA, 20 bp, synthetic construct
  misc_feature 1..20: note = chemically synthesized
  source 1..20: mol_type = other DNA
gacttagaaagtaggggtag

SEQ ID NO: 8848 - DNA, 20 bp, synthetic construct
  misc_feature 1..20: note = chemically synthesized
  source 1..20: mol_type = other DNA
acttagaaagtaggggtagg

SEQ ID NO: 8849 - DNA, 20 bp, synthetic construct
  misc_feature 1..20: note = chemically synthesized
  source 1..20: mol_type = other DNA
cttagaaagtaggggtagga

SEQ ID NO: 8850 - DNA, 20 bp, synthetic construct
  misc_feature 1..20: note = chemically synthesized
  source 1..20: mol_type = other DNA
ttagaaagtaggggtaggag

SEQ ID NO: 8851 - DNA, 20 bp, synthetic construct
  misc_feature 1..20: note = chemically synthesized
  source 1..20: mol_type = other DNA
aagtaggggtaggaggggaa

SEQ ID NO: 8852 - DNA, 20 bp, synthetic construct
  misc_feature 1..20: note = chemically synthesized
  source 1..20: mol_type = other DNA
agtaggggtaggaggggaaa

SEQ ID NO: 8853 - DNA, 20 bp, synthetic construct
  misc_feature 1..20: note = chemically synthesized
  source 1..20: mol_type = other DNA
aggggaaaaggtcttctact

SEQ ID NO: 8854 - DNA, 20 bp, synthetic construct
  misc_feature 1..20: note = chemically synthesized
  source 1..20: mol_type = other DNA
aaaaggtcttctacttggct

SEQ ID NO: 8855 - DNA, 20 bp, synthetic construct
  misc_feature 1..20: note = chemically synthesized
  source 1..20: mol_type = other DNA
ctcagattatttttttcctc

SEQ ID NO: 8856 - DNA, 20 bp, synthetic construct
  misc_feature 1..20: note = chemically synthesized
  source 1..20: mol_type = other DNA
tttttttcctctagtccact

SEQ ID NO: 8857 - DNA, 20 bp, synthetic construct
  misc_feature 1..20: note = chemically synthesized
  source 1..20: mol_type = other DNA
taaaatcatttccttgattc

SEQ ID NO: 8858 - DNA, 20 bp, synthetic construct
  misc_feature 1..20: note = chemically synthesized
  source 1..20: mol_type = other DNA
aatttactcttctttctcta

SEQ ID NO: 8859 - DNA, 20 bp, synthetic construct
  misc_feature 1..20: note = chemically synthesized
  source 1..20: mol_type = other DNA
cttgtactaaattaactcct

SEQ ID NO: 8860 - DNA, 20 bp, synthetic construct
  misc_feature 1..20: note = chemically synthesized
  source 1..20: mol_type = other DNA
ttgtactaaattaactcctc

SEQ ID NO: 8861 - DNA, 20 bp, synthetic construct
  misc_feature 1..20: note = chemically synthesized
  source 1..20: mol_type = other DNA
actaaattaactcctcaggt

SEQ ID NO: 8862 - DNA, 20 bp, synthetic construct
  misc_feature 1..20: note = chemically synthesized
  source 1..20: mol_type = other DNA
ctaaattaactcctcaggtg

SEQ ID NO: 8863 - DNA, 20 bp, synthetic construct
  misc_feature 1..20: note = chemically synthesized
  source 1..20: mol_type = other DNA
caggtgaggaaaaacttttg

SEQ ID NO: 8864 - DNA, 20 bp, synthetic construct
  misc_feature 1..20: note = chemically synthesized
  source 1..20: mol_type = other DNA
gaggaaaaacttttgaagtg

SEQ ID NO: 8865 - DNA, 20 bp, synthetic construct
  misc_feature 1..20: note = chemically synthesized
  source 1..20: mol_type = other DNA
ggaaaaacttttgaagtgca

SEQ ID NO: 8866 - DNA, 20 bp, synthetic construct
  misc_feature 1..20: note = chemically synthesized
  source 1..20: mol_type = other DNA
gttctgcttcctgctattaa

SEQ ID NO: 8867 - DNA, 20 bp, synthetic construct
  misc_feature 1..20: note = chemically synthesized
  source 1..20: mol_type = other DNA
attaaaagatgtaattaaaa

SEQ ID NO: 8868 - DNA, 20 bp, synthetic construct
  misc_feature 1..20: note = chemically synthesized
  source 1..20: mol_type = other DNA
aagatgtaattaaaacagca

SEQ ID NO: 8869 - DNA, 20 bp, synthetic construct
  misc_feature 1..20: note = chemically synthesized
  source 1..20: mol_type = other DNA
agatgtaattaaaacagcaa

SEQ ID NO: 8870 - DNA, 20 bp, synthetic construct
  misc_feature 1..20: note = chemically synthesized
  source 1..20: mol_type = other DNA
tgtaattaaaacagcaaagg

SEQ ID NO: 8871 - DNA, 20 bp, synthetic construct
  misc_feature 1..20: note = chemically synthesized
  source 1..20: mol_type = other DNA
attaaaacagcaaaggtagc

SEQ ID NO: 8872 - DNA, 20 bp, synthetic construct
  misc_feature 1..20: note = chemically synthesized
  source 1..20: mol_type = other DNA
caaaggtagcaagcatttat

SEQ ID NO: 8873 - DNA, 20 bp, synthetic construct
  misc_feature 1..20: note = chemically synthesized
  source 1..20: mol_type = other DNA
aaaggtagcaagcatttatg

SEQ ID NO: 8874 - DNA, 20 bp, synthetic construct
  misc_feature 1..20: note = chemically synthesized
  source 1..20: mol_type = other DNA
gtagcaagcatttatgaggt

SEQ ID NO: 8875 - DNA, 20 bp, synthetic construct
  misc_feature 1..20: note = chemically synthesized
  source 1..20: mol_type = other DNA
aagcatttatgaggtcagcg

SEQ ID NO: 8876 - DNA, 20 bp, synthetic construct
  misc_feature 1..20: note = chemically synthesized
  source 1..20: mol_type = other DNA
agcatttatgaggtcagcgt

SEQ ID NO: 8877 - DNA, 20 bp, synthetic construct
  misc_feature 1..20: note = chemically synthesized
  source 1..20: mol_type = other DNA
gcatttatgaggtcagcgta

SEQ ID NO: 8878 - DNA, 20 bp, synthetic construct
  misc_feature 1..20: note = chemically synthesized
  source 1..20: mol_type = other DNA
atgaggtcagcgtagggtct

SEQ ID NO: 8879 - DNA, 20 bp, synthetic construct
  misc_feature 1..20: note = chemically synthesized
  source 1..20: mol_type = other DNA
gtagggtctcagtgttccct

SEQ ID NO: 8880 - DNA, 20 bp, synthetic construct
  misc_feature 1..20: note = chemically synthesized
  source 1..20: mol_type = other DNA
tagggtctcagtgttcccta

SEQ ID NO: 8881 - DNA, 20 bp, synthetic construct
  misc_feature 1..20: note = chemically synthesized
  source 1..20: mol_type = other DNA
agggtctcagtgttccctaa

SEQ ID NO: 8882 - DNA, 20 bp, synthetic construct
  misc_feature 1..20: note = chemically synthesized
  source 1..20: mol_type = other DNA
gtgttccctaagggccctgt

SEQ ID NO: 8883 - DNA, 20 bp, synthetic construct
  misc_feature 1..20: note = chemically synthesized
  source 1..20: mol_type = other DNA
tcctgaatcctgcccctacc

SEQ ID NO: 8884 - DNA, 20 bp, synthetic construct
  misc_feature 1..20: note = chemically synthesized
  source 1..20: mol_type = other DNA
ccctacctggaaacccatgt

SEQ ID NO: 8885 - DNA, 20 bp, synthetic construct
  misc_feature 1..20: note = chemically synthesized
  source 1..20: mol_type = other DNA
cctggaaacccatgtcggtt

SEQ ID NO: 8886 - DNA, 20 bp, synthetic construct
  misc_feature 1..20: note = chemically synthesized
  source 1..20: mol_type = other DNA
gaaacccatgtcggtttagt

SEQ ID NO: 8887 - DNA, 20 bp, synthetic construct
  misc_feature 1..20: note = chemically synthesized
  source 1..20: mol_type = other DNA
aaacccatgtcggtttagta

SEQ ID NO: 8888 - DNA, 20 bp, synthetic construct
  misc_feature 1..20: note = chemically synthesized
  source 1..20: mol_type = other DNA
ccatgtcggtttagtaagga

SEQ ID NO: 8889 - DNA, 20 bp, synthetic construct
  misc_feature 1..20: note = chemically synthesized
  source 1..20: mol_type = other DNA
tttctcctacttcttccttt

SEQ ID NO: 8890 - DNA, 20 bp, synthetic construct
  misc_feature 1..20: note = chemically synthesized
  source 1..20: mol_type = other DNA
caataaaatgaaataaaatt

SEQ ID NO: 8891 - DNA, 20 bp, synthetic construct
  misc_feature 1..20: note = chemically synthesized
  source 1..20: mol_type = other DNA
aataaaatgaaataaaattt

SEQ ID NO: 8892 - DNA, 20 bp, synthetic construct
  misc_feature 1..20: note = chemically synthesized
  source 1..20: mol_type = other DNA
ataaaatttaggttaaccaa

SEQ ID NO: 8893 - DNA, 20 bp, synthetic construct
  misc_feature 1..20: note = chemically synthesized
  source 1..20: mol_type = other DNA
ttaggttaaccaaaagaaac

SEQ ID NO: 8894 - DNA, 20 bp, synthetic construct
  misc_feature 1..20: note = chemically synthesized
  source 1..20: mol_type = other DNA
gaaactggatcctctatttc

SEQ ID NO: 8895 - DNA, 20 bp, synthetic construct
  misc_feature 1..20: note = chemically synthesized
  source 1..20: mol_type = other DNA
gatcctctatttctagttat

SEQ ID NO: 8896 - DNA, 20 bp, synthetic construct
  misc_feature 1..20: note = chemically synthesized
  source 1..20: mol_type = other DNA
cctctatttctagttatcag

SEQ ID NO: 8897 - DNA, 20 bp, synthetic construct
  misc_feature 1..20: note = chemically synthesized
  source 1..20: mol_type = other DNA
ctctatttctagttatcaga

SEQ ID NO: 8898 - DNA, 20 bp, synthetic construct
  misc_feature 1..20: note = chemically synthesized
  source 1..20: mol_type = other DNA
ctctattattgctaaataaa

SEQ ID NO: 8899 - DNA, 20 bp, synthetic construct
  misc_feature 1..20: note = chemically synthesized
  source 1..20: mol_type = other DNA
ctattattgctaaataaata

SEQ ID NO: 8900 - DNA, 20 bp, synthetic construct
  misc_feature 1..20: note = chemically synthesized
  source 1..20: mol_type = other DNA
ctacctgtctcaaccctcat

SEQ ID NO: 8901 - DNA, 20 bp, synthetic construct
  misc_feature 1..20: note = chemically synthesized
  source 1..20: mol_type = other DNA
tacctgtctcaaccctcatc

SEQ ID NO: 8902 - DNA, 20 bp, synthetic construct
  misc_feature 1..20: note = chemically synthesized
  source 1..20: mol_type = other DNA
tctgattattctcacacacg

SEQ ID NO: 8903 - DNA, 20 bp, synthetic construct
  misc_feature 1..20: note = chemically synthesized
  source 1..20: mol_type = other DNA
attattctcacacacgcaga

SEQ ID NO: 8904 - DNA, 20 bp, synthetic construct
  misc_feature 1..20: note = chemically synthesized
  source 1..20: mol_type = other DNA
tcacacacgcagaaagtgtt

SEQ ID NO: 8905 - DNA, 20 bp, synthetic construct
  misc_feature 1..20: note = chemically synthesized
  source 1..20: mol_type = other DNA
gaaagtgtttggttcttcta

SEQ ID NO: 8906 - DNA, 20 bp, synthetic construct
  misc_feature 1..20: note = chemically synthesized
  source 1..20: mol_type = other DNA
ttggttcttctatggctatc

SEQ ID NO: 8907 - DNA, 20 bp, synthetic construct
  misc_feature 1..20: note = chemically synthesized
  source 1..20: mol_type = other DNA
ggttcttctatggctatctg

SEQ ID NO: 8908 - DNA, 20 bp, synthetic construct
  misc_feature 1..20: note = chemically synthesized
  source 1..20: mol_type = other DNA
ttctatggctatctggagcc

SEQ ID NO: 8909 - DNA, 20 bp, synthetic construct
  misc_feature 1..20: note = chemically synthesized
  source 1..20: mol_type = other DNA
tctatggctatctggagcct

SEQ ID NO: 8910 - DNA, 20 bp, synthetic construct
  misc_feature 1..20: note = chemically synthesized
  source 1..20: mol_type = other DNA
attatgcctatgtatgatta

SEQ ID NO: 8911 - DNA, 20 bp, synthetic construct
  misc_feature 1..20: note = chemically synthesized
  source 1..20: mol_type = other DNA
tatgcctatgtatgattata

SEQ ID NO: 8912 - DNA, 20 bp, synthetic construct
  misc_feature 1..20: note = chemically synthesized
  source 1..20: mol_type = other DNA
atgcctatgtatgattatag

SEQ ID NO: 8913 - DNA, 20 bp, synthetic construct
  misc_feature 1..20: note = chemically synthesized
  source 1..20: mol_type = other DNA
ctatgtatgattatagaggt

SEQ ID NO: 8914 - DNA, 20 bp, synthetic construct
  misc_feature 1..20: note = chemically synthesized
  source 1..20: mol_type = other DNA
atgtatgattatagaggtaa

SEQ ID NO: 8915 - DNA, 20 bp, synthetic construct
  misc_feature 1..20: note = chemically synthesized
  source 1..20: mol_type = other DNA
tgtatgattatagaggtaag

SEQ ID NO: 8916 - DNA, 20 bp, synthetic construct
  misc_feature 1..20: note = chemically synthesized
  source 1..20: mol_type = other DNA
gtatgattatagaggtaaga

SEQ ID NO: 8917 - DNA, 20 bp, synthetic construct
  misc_feature 1..20: note = chemically synthesized
  source 1..20: mol_type = other DNA
aggtaagagggataaaattt

SEQ ID NO: 8918 - DNA, 20 bp, synthetic construct
  misc_feature 1..20: note = chemically synthesized
  source 1..20: mol_type = other DNA
cattcctctgtaaaaaacta

SEQ ID NO: 8919 - DNA, 20 bp, synthetic construct
  misc_feature 1..20: note = chemically synthesized
  source 1..20: mol_type = other DNA
ctgtaaaaaactaaagcaat

SEQ ID NO: 8920 - DNA, 20 bp, synthetic construct
  misc_feature 1..20: note = chemically synthesized
  source 1..20: mol_type = other DNA
tgtaaaaaactaaagcaatg

SEQ ID NO: 8921 - DNA, 20 bp, synthetic construct
  misc_feature 1..20: note = chemically synthesized
  source 1..20: mol_type = other DNA
aaactaaagcaatgaggatc

SEQ ID NO: 8922 - DNA, 20 bp, synthetic construct
  misc_feature 1..20: note = chemically synthesized
  source 1..20: mol_type = other DNA
aactaaagcaatgaggatct

SEQ ID NO: 8923 - DNA, 20 bp, synthetic construct
  misc_feature 1..20: note = chemically synthesized
  source 1..20: mol_type = other DNA
ctaggcacacgtgtatccct

SEQ ID NO: 8924 - DNA, 20 bp, synthetic construct
  misc_feature 1..20: note = chemically synthesized
  source 1..20: mol_type = other DNA
cacacgtgtatccctgagaa

SEQ ID NO: 8925 - DNA, 20 bp, synthetic construct
  misc_feature 1..20: note = chemically synthesized
  source 1..20: mol_type = other DNA
agatttcacatgttgaatcc

SEQ ID NO: 8926 - DNA, 20 bp, synthetic construct
  misc_feature 1..20: note = chemically synthesized
  source 1..20: mol_type = other DNA
gatttcacatgttgaatcct

SEQ ID NO: 8927 - DNA, 20 bp, synthetic construct
  misc_feature 1..20: note = chemically synthesized
  source 1..20: mol_type = other DNA
cacatgttgaatcctgggaa

SEQ ID NO: 8928 - DNA, 20 bp, synthetic construct
  misc_feature 1..20: note = chemically synthesized
  source 1..20: mol_type = other DNA
attttaaatgttaaaacatg

SEQ ID NO: 8929 - DNA, 20 bp, synthetic construct
  misc_feature 1..20: note = chemically synthesized
  source 1..20: mol_type = other DNA
taaaacatgcagatttgact

SEQ ID NO: 8930 - DNA, 20 bp, synthetic construct
  misc_feature 1..20: note = chemically synthesized
  source 1..20: mol_type = other DNA
tgcagatttgacttggctgt

SEQ ID NO: 8931 - DNA, 20 bp, synthetic construct
  misc_feature 1..20: note = chemically synthesized
  source 1..20: mol_type = other DNA
ttgacttggctgttagattt

SEQ ID NO: 8932 - DNA, 20 bp, synthetic construct
  misc_feature 1..20: note = chemically synthesized
  source 1..20: mol_type = other DNA
tattaaatttaaacctgcat

SEQ ID NO: 8933 - DNA, 20 bp, synthetic construct
  misc_feature 1..20: note = chemically synthesized
  source 1..20: mol_type = other DNA
aacctgcattagcattgttt

SEQ ID NO: 8934 - DNA, 20 bp, synthetic construct
  misc_feature 1..20: note = chemically synthesized
  source 1..20: mol_type = other DNA
cattagcattgttttagatt

SEQ ID NO: 8935 - DNA, 20 bp, synthetic construct
  misc_feature 1..20: note = chemically synthesized
  source 1..20: mol_type = other DNA
agcattgttttagatttaga

SEQ ID NO: 8936 - DNA, 20 bp, synthetic construct
  misc_feature 1..20: note = chemically synthesized
  source 1..20: mol_type = other DNA
tttagatttagacagttttc

SEQ ID NO: 8937 - DNA, 20 bp, synthetic construct
  misc_feature 1..20: note = chemically synthesized
  source 1..20: mol_type = other DNA
ctgtttcacatccctgatat

SEQ ID NO: 8938 - DNA, 20 bp, synthetic construct
  misc_feature 1..20: note = chemically synthesized
  source 1..20: mol_type = other DNA
gtttcacatccctgatataa

SEQ ID NO: 8939 - DNA, 20 bp, synthetic construct
  misc_feature 1..20: note = chemically synthesized
  source 1..20: mol_type = other DNA
tttcacatccctgatataag

SEQ ID NO: 8940 - DNA, 20 bp, synthetic construct
  misc_feature 1..20: note = chemically synthesized
  source 1..20: mol_type = other DNA
aggcatgtatatgtgaaata

SEQ ID NO: 8941 - DNA, 20 bp, synthetic construct
  misc_feature 1..20: note = chemically synthesized
  source 1..20: mol_type = other DNA
atgtgaaataaagtgttctg

SEQ ID NO: 8942 - DNA, 20 bp, synthetic construct
  misc_feature 1..20: note = chemically synthesized
  source 1..20: mol_type = other DNA
tgaaataaagtgttctgcgg

SEQ ID NO: 8943 - DNA, 20 bp, synthetic construct
  misc_feature 1..20: note = chemically synthesized
  source 1..20: mol_type = other DNA
tatgtcttttgcaaatatcc

SEQ ID NO: 8944 - DNA, 20 bp, synthetic construct
  misc_feature 1..20: note = chemically synthesized
  source 1..20: mol_type = other DNA
atgtcttttgcaaatatcct

SEQ ID NO: 8945 - DNA, 20 bp, synthetic construct
  misc_feature 1..20: note = chemically synthesized
  source 1..20: mol_type = other DNA
tttgcaaatatcctgggtca

SEQ ID NO: 8946 - DNA, 20 bp, synthetic construct
  misc_feature 1..20: note = chemically synthesized
  source 1..20: mol_type = other DNA
cctgggtcaaagaaaatgca

SEQ ID NO: 8947 - DNA, 20 bp, synthetic construct
  misc_feature 1..20: note = chemically synthesized
  source 1..20: mol_type = other DNA
gactttatgaaattataata

SEQ ID NO: 8948 - DNA, 20 bp, synthetic construct
  misc_feature 1..20: note = chemically synthesized
  source 1..20: mol_type = other DNA
actttatgaaattataatat

SEQ ID NO: 8949 - DNA, 20 bp, synthetic construct
  misc_feature 1..20: note = chemically synthesized
  source 1..20: mol_type = other DNA
tataatataggttatattta

SEQ ID NO: 8950 - DNA, 20 bp, synthetic construct
  misc_feature 1..20: note = chemically synthesized
  source 1..20: mol_type = other DNA
ttatatttatagtattctga

SEQ ID NO: 8951 - DNA, 20 bp, synthetic construct
  misc_feature 1..20: note = chemically synthesized
  source 1..20: mol_type = other DNA
ctgaaagaccaaaattgtca

SEQ ID NO: 8952 - DNA, 20 bp, synthetic construct
  misc_feature 1..20: note = chemically synthesized
  source 1..20: mol_type = other DNA
aagaccaaaattgtcaaagc

SEQ ID NO: 8953 - DNA, 20 bp, synthetic construct
  misc_feature 1..20: note = chemically synthesized
  source 1..20: mol_type = other DNA
gaccaaaattgtcaaagcaa

SEQ ID NO: 8954 - DNA, 20 bp, synthetic construct
  misc_feature 1..20: note = chemically synthesized
  source 1..20: mol_type = other DNA
aagagctttgaaatcctgat

SEQ ID NO: 8955 - DNA, 20 bp, synthetic construct
  misc_feature 1..20: note = chemically synthesized
  source 1..20: mol_type = other DNA
agctttgaaatcctgattgg

SEQ ID NO: 8956 - DNA, 20 bp, synthetic construct
  misc_feature 1..20: note = chemically synthesized
  source 1..20: mol_type = other DNA
cagaaattgtcaccttctta

SEQ ID NO: 8957 - DNA, 20 bp, synthetic construct
  misc_feature 1..20: note = chemically synthesized
  source 1..20: mol_type = other DNA
accctacaacttcttatgct

SEQ ID NO: 8958 - DNA, 20 bp, synthetic construct
  misc_feature 1..20: note = chemically synthesized
  source 1..20: mol_type = other DNA
caacttcttatgctcagaaa

SEQ ID NO: 8959 - DNA, 20 bp, synthetic construct
  misc_feature 1..20: note = chemically synthesized
  source 1..20: mol_type = other DNA
cttttttaaatgatgaacta

SEQ ID NO: 8960 - DNA, 20 bp, synthetic construct
  misc_feature 1..20: note = chemically synthesized
  source 1..20: mol_type = other DNA
tatggatccttctcttgtgt

SEQ ID NO: 8961 - DNA, 20 bp, synthetic construct
  misc_feature 1..20: note = chemically synthesized
  source 1..20: mol_type = other DNA
tcttgtgttggcaactgctg

SEQ ID NO: 8962 - DNA, 20 bp, synthetic construct
  misc_feature 1..20: note = chemically synthesized
  source 1..20: mol_type = other DNA
tgctgcagataccatcatcc

SEQ ID NO: 8963 - DNA, 20 bp, synthetic construct
  misc_feature 1..20: note = chemically synthesized
  source 1..20: mol_type = other DNA
gataccatcatcctggcttc

SEQ ID NO: 8964 - DNA, 20 bp, synthetic construct
  misc_feature 1..20: note = chemically synthesized
  source 1..20: mol_type = other DNA
ataccatcatcctggcttca

SEQ ID NO: 8965 - DNA, 20 bp, synthetic construct
  misc_feature 1..20: note = chemically synthesized
  source 1..20: mol_type = other DNA
ccatcatcctggcttcaagg

SEQ ID NO: 8966 - DNA, 20 bp, synthetic construct
  misc_feature 1..20: note = chemically synthesized
  source 1..20: mol_type = other DNA
catcatcctggcttcaaggc

SEQ ID NO: 8967 - DNA, 20 bp, synthetic construct
  misc_feature 1..20: note = chemically synthesized
  source 1..20: mol_type = other DNA
atcatcctggcttcaaggca

SEQ ID NO: 8968 - DNA, 20 bp, synthetic construct
  misc_feature 1..20: note = chemically synthesized
  source 1..20: mol_type = other DNA
tcatcctggcttcaaggcag

SEQ ID NO: 8969 - DNA, 20 bp, synthetic construct
  misc_feature 1..20: note = chemically synthesized
  source 1..20: mol_type = other DNA
ggcaggggttgcttttccaa

SEQ ID NO: 8970 - DNA, 20 bp, synthetic construct
  misc_feature 1..20: note = chemically synthesized
  source 1..20: mol_type = other DNA
aggggttgcttttccaatgg

SEQ ID NO: 8971 - DNA, 20 bp, synthetic construct
  misc_feature 1..20: note = chemically synthesized
  source 1..20: mol_type = other DNA
cttttccaatggtagttact

SEQ ID NO: 8972 - DNA, 20 bp, synthetic construct
  misc_feature 1..20: note = chemically synthesized
  source 1..20: mol_type = other DNA
tggtagttacttagtgtgac

SEQ ID NO: 8973 - DNA, 20 bp, synthetic construct
  misc_feature 1..20: note = chemically synthesized
  source 1..20: mol_type = other DNA
gtagttacttagtgtgacta

SEQ ID NO: 8974 - DNA, 20 bp, synthetic construct
  misc_feature 1..20: note = chemically synthesized
  source 1..20: mol_type = other DNA
agtgtgactagagtgtaacg

SEQ ID NO: 8975 - DNA, 20 bp, synthetic construct
  misc_feature 1..20: note = chemically synthesized
  source 1..20: mol_type = other DNA
ctattacccataataccctg

SEQ ID NO: 8976 - DNA, 20 bp, synthetic construct
  misc_feature 1..20: note = chemically synthesized
  source 1..20: mol_type = other DNA
tattacccataataccctgc

SEQ ID NO: 8977 - DNA, 20 bp, synthetic construct
  misc_feature 1..20: note = chemically synthesized
  source 1..20: mol_type = other DNA
attacccataataccctgca

SEQ ID NO: 8978 - DNA, 20 bp, synthetic construct
  misc_feature 1..20: note = chemically synthesized
  source 1..20: mol_type = other DNA
ccataataccctgcagggac

SEQ ID NO: 8979 - DNA, 20 bp, synthetic construct
  misc_feature 1..20: note = chemically synthesized
  source 1..20: mol_type = other DNA
cataataccctgcagggaca

SEQ ID NO: 8980 - DNA, 20 bp, synthetic construct
  misc_feature 1..20: note = chemically synthesized
  source 1..20: mol_type = other DNA
ccctgcagggacaaggctgc

SEQ ID NO: 8981 - DNA, 20 bp, synthetic construct
  misc_feature 1..20: note = chemically synthesized
  source 1..20: mol_type = other DNA
acaaggctgcaagctatact

SEQ ID NO: 8982 - DNA, 20 bp, synthetic construct
  misc_feature 1..20: note = chemically synthesized
  source 1..20: mol_type = other DNA
agctatactaagaccatcaa

SEQ ID NO: 8983 - DNA, 20 bp, synthetic construct
  misc_feature 1..20: note = chemically synthesized
  source 1..20: mol_type = other DNA
tactaagaccatcaaaagcc

SEQ ID NO: 8984 - DNA, 20 bp, synthetic construct
  misc_feature 1..20: note = chemically synthesized
  source 1..20: mol_type = other DNA
actaagaccatcaaaagccc

SEQ ID NO: 8985 - DNA, 20 bp, synthetic construct
  misc_feature 1..20: note = chemically synthesized
  source 1..20: mol_type = other DNA
catcaaaagcccaggcatac

SEQ ID NO: 8986 - DNA, 20 bp, synthetic construct
  misc_feature 1..20: note = chemically synthesized
  source 1..20: mol_type = other DNA
atcaaaagcccaggcatacc

SEQ ID NO: 8987 - DNA, 20 bp, synthetic construct
  misc_feature 1..20: note = chemically synthesized
  source 1..20: mol_type = other DNA
cccaggcataccaggcaaat

SEQ ID NO: 8988 - DNA, 20 bp, synthetic construct
  misc_feature 1..20: note = chemically synthesized
  source 1..20: mol_type = other DNA
ataccaggcaaataagtttc

SEQ ID NO: 8989 - DNA, 20 bp, synthetic construct
  misc_feature 1..20: note = chemically synthesized
  source 1..20: mol_type = other DNA
ccaggcaaataagtttcaag

SEQ ID NO: 8990 - DNA, 20 bp, synthetic construct
  misc_feature 1..20: note = chemically synthesized
  source 1..20: mol_type = other DNA
aagtttcaagaagcaataaa

SEQ ID NO: 8991 - DNA, 20 bp, synthetic construct
  misc_feature 1..20: note = chemically synthesized
  source 1..20: mol_type = other DNA
agcaataaatagtgcaaatt

SEQ ID NO: 8992 - DNA, 20 bp, synthetic construct
  misc_feature 1..20: note = chemically synthesized
  source 1..20: mol_type = other DNA
aaatagtgcaaatttggtta

SEQ ID NO: 8993 - DNA, 20 bp, synthetic construct
  misc_feature 1..20: note = chemically synthesized
  source 1..20: mol_type = other DNA
agtgcaaatttggttatggt

SEQ ID NO: 8994 - DNA, 20 bp, synthetic construct
  misc_feature 1..20: note = chemically synthesized
  source 1..20: mol_type = other DNA
tgcaaatttggttatggtca

SEQ ID NO: 8995 - DNA, 20 bp, synthetic construct
  misc_feature 1..20: note = chemically synthesized
  source 1..20: mol_type = other DNA
tttggttatggtcagagcct

SEQ ID NO: 8996 - DNA, 20 bp, synthetic construct
  misc_feature 1..20: note = chemically synthesized
  source 1..20: mol_type = other DNA
cctcagtttcaaatctaaat

SEQ ID NO: 8997 - DNA, 20 bp, synthetic construct
  misc_feature 1..20: note = chemically synthesized
  source 1..20: mol_type = other DNA
caaatctaaatcagcattca

SEQ ID NO: 8998 - DNA, 20 bp, synthetic construct
  misc_feature 1..20: note = chemically synthesized
  source 1..20: mol_type = other DNA
aagttcctgaaaaactattc

SEQ ID NO: 8999 - DNA, 20 bp, synthetic construct
  misc_feature 1..20: note = chemically synthesized
  source 1..20: mol_type = other DNA
actgacatcttcactattgt

SEQ ID NO: 9000 - DNA, 20 bp, synthetic construct
  misc_feature 1..20: note = chemically synthesized
  source 1..20: mol_type = other DNA
gcttgcttctactctgtgaa

SEQ ID NO: 9001 - DNA, 20 bp, synthetic construct
  misc_feature 1..20: note = chemically synthesized
  source 1..20: mol_type = other DNA
tactctgtgaatggatgcca

SEQ ID NO: 9002 - DNA, 20 bp, synthetic construct
  misc_feature 1..20: note = chemically synthesized
  source 1..20: mol_type = other DNA
tctgtgaatggatgccacag

SEQ ID NO: 9003 - DNA, 20 bp, synthetic construct
  misc_feature 1..20: note = chemically synthesized
  source 1..20: mol_type = other DNA
ctgtgaatggatgccacagc

SEQ ID NO: 9004 - DNA, 20 bp, synthetic construct
  misc_feature 1..20: note = chemically synthesized
  source 1..20: mol_type = other DNA
aatggatgccacagcaggtg

SEQ ID NO: 9005 - DNA, 20 bp, synthetic construct
  misc_feature 1..20: note = chemically synthesized
  source 1..20: mol_type = other DNA
atggatgccacagcaggtgc

SEQ ID NO: 9006 - DNA, 20 bp, synthetic construct
  misc_feature 1..20: note = chemically synthesized
  source 1..20: mol_type = other DNA
ggtctattctacttttattc

SEQ ID NO: 9007 - DNA, 20 bp, synthetic construct
  misc_feature 1..20: note = chemically synthesized
  source 1..20: mol_type = other DNA
acacacacacacacacacac

SEQ ID NO: 9008 - DNA, 20 bp, synthetic construct
  misc_feature 1..20: note = chemically synthesized
  source 1..20: mol_type = other DNA
acacacacaagtcctcaaaa

SEQ ID NO: 9009 - DNA, 20 bp, synthetic construct
  misc_feature 1..20: note = chemically synthesized
  source 1..20: mol_type = other DNA
acacacaagtcctcaaaaaa

SEQ ID NO: 9010 - DNA, 20 bp, synthetic construct
  misc_feature 1..20: note = chemically synthesized
  source 1..20: mol_type = other DNA
acaagtcctcaaaaaagaga

SEQ ID NO: 9011 - DNA, 20 bp, synthetic construct
  misc_feature 1..20: note = chemically synthesized
  source 1..20: mol_type = other DNA
gtcctcaaaaaagagacagc

SEQ ID NO: 9012 - DNA, 20 bp, synthetic construct
  misc_feature 1..20: note = chemically synthesized
  source 1..20: mol_type = other DNA
cctcaaaaaagagacagcga

SEQ ID NO: 9013 - DNA, 20 bp, synthetic construct
  misc_feature 1..20: note = chemically synthesized
  source 1..20: mol_type = other DNA
tcaaaaaagagacagcgaga

SEQ ID NO: 9014 - DNA, 20 bp, synthetic construct
  misc_feature 1..20: note = chemically synthesized
  source 1..20: mol_type = other DNA
aaaagagacagcgagagaga

SEQ ID NO: 9015 - DNA, 20 bp, synthetic construct
  misc_feature 1..20: note = chemically synthesized
  source 1..20: mol_type = other DNA
aagagacagcgagagagaca

SEQ ID NO: 9016 - DNA, 20 bp, synthetic construct
  misc_feature 1..20: note = chemically synthesized
  source 1..20: mol_type = other DNA
agagacagcgagagagacag

SEQ ID NO: 9017 - DNA, 20 bp, synthetic construct
  misc_feature 1..20: note = chemically synthesized
  source 1..20: mol_type = other DNA
gaggtccatttcctttactc

SEQ ID NO: 9018 - DNA, 20 bp, synthetic construct
  misc_feature 1..20: note = chemically synthesized
  source 1..20: mol_type = other DNA
ccagtctattaatctttctt

SEQ ID NO: 9019 - DNA, 20 bp, synthetic construct
  misc_feature 1..20: note = chemically synthesized
  source 1..20: mol_type = other DNA
taagtcctaatgttttatat

SEQ ID NO: 9020 - DNA, 20 bp, synthetic construct
  misc_feature 1..20: note = chemically synthesized
  source 1..20: mol_type = other DNA
cctaatgttttatatcagaa

SEQ ID NO: 9021 - DNA, 20 bp, synthetic construct
  misc_feature 1..20: note = chemically synthesized
  source 1..20: mol_type = other DNA
gttttatatcagaatggccc

SEQ ID NO: 9022 - DNA, 20 bp, synthetic construct
  misc_feature 1..20: note = chemically synthesized
  source 1..20: mol_type = other DNA
atatcagaatggccctagtc

SEQ ID NO: 9023 - DNA, 20 bp, synthetic construct
  misc_feature 1..20: note = chemically synthesized
  source 1..20: mol_type = other DNA
tatcagaatggccctagtct

SEQ ID NO: 9024 - DNA, 20 bp, synthetic construct
  misc_feature 1..20: note = chemically synthesized
  source 1..20: mol_type = other DNA
ggccctagtctgggtatact

SEQ ID NO: 9025 - DNA, 20 bp, synthetic construct
  misc_feature 1..20: note = chemically synthesized
  source 1..20: mol_type = other DNA
ccctagtctgggtatactta

SEQ ID NO: 9026 - DNA, 20 bp, synthetic construct
  misc_feature 1..20: note = chemically synthesized
  source 1..20: mol_type = other DNA
cctagtctgggtatacttag

SEQ ID NO: 9027 - DNA, 20 bp, synthetic construct
  misc_feature 1..20: note = chemically synthesized
  source 1..20: mol_type = other DNA
aaaatcatgacactcatcta

SEQ ID NO: 9028 - DNA, 20 bp, synthetic construct
  misc_feature 1..20: note = chemically synthesized
  source 1..20: mol_type = other DNA
aaatcatgacactcatctat

SEQ ID NO: 9029 - DNA, 20 bp, synthetic construct
  misc_feature 1..20: note = chemically synthesized
  source 1..20: mol_type = other DNA
atcatgacactcatctatgg

SEQ ID NO: 9030 - DNA, 20 bp, synthetic construct
  misc_feature 1..20: note = chemically synthesized
  source 1..20: mol_type = other DNA
gacactcatctatgggagtg

SEQ ID NO: 9031 - DNA, 20 bp, synthetic construct
  misc_feature 1..20: note = chemically synthesized
  source 1..20: mol_type = other DNA
ggttttatcatttgtttcaa

SEQ ID NO: 9032 - DNA, 20 bp, synthetic construct
  misc_feature 1..20: note = chemically synthesized
  source 1..20: mol_type = other DNA
tttatcatttgtttcaaaag

SEQ ID NO: 9033 - DNA, 20 bp, synthetic construct
  misc_feature 1..20: note = chemically synthesized
  source 1..20: mol_type = other DNA
tttcaaaagcagcacttgac

SEQ ID NO: 9034 - DNA, 20 bp, synthetic construct
  misc_feature 1..20: note = chemically synthesized
  source 1..20: mol_type = other DNA
tcaaaagcagcacttgacta

SEQ ID NO: 9035 - DNA, 20 bp, synthetic construct
  misc_feature 1..20: note = chemically synthesized
  source 1..20: mol_type = other DNA
tttatacatgctctactgtt

SEQ ID NO: 9036 - DNA, 20 bp, synthetic construct
  misc_feature 1..20: note = chemically synthesized
  source 1..20: mol_type = other DNA
tgtttagtctaaaattcccc

SEQ ID NO: 9037 - DNA, 20 bp, synthetic construct
  misc_feature 1..20: note = chemically synthesized
  source 1..20: mol_type = other DNA
tagtctaaaattccccaagt

SEQ ID NO: 9038 - DNA, 20 bp, synthetic construct
  misc_feature 1..20: note = chemically synthesized
  source 1..20: mol_type = other DNA
attccccaagtgagacattt

SEQ ID NO: 9039 - DNA, 20 bp, synthetic construct
  misc_feature 1..20: note = chemically synthesized
  source 1..20: mol_type = other DNA
caatctactgtatatgttcc

SEQ ID NO: 9040 - DNA, 20 bp, synthetic construct
  misc_feature 1..20: note = chemically synthesized
  source 1..20: mol_type = other DNA
aatctactgtatatgttcct

SEQ ID NO: 9041 - DNA, 20 bp, synthetic construct
  misc_feature 1..20: note = chemically synthesized
  source 1..20: mol_type = other DNA
actgtatatgttcctaggtc

SEQ ID NO: 9042 - DNA, 20 bp, synthetic construct
  misc_feature 1..20: note = chemically synthesized
  source 1..20: mol_type = other DNA
atatgttcctaggtcaagca

SEQ ID NO: 9043 - DNA, 20 bp, synthetic construct
  misc_feature 1..20: note = chemically synthesized
  source 1..20: mol_type = other DNA
ttcctaggtcaagcacagtc

SEQ ID NO: 9044 - DNA, 20 bp, synthetic construct
  misc_feature 1..20: note = chemically synthesized
  source 1..20: mol_type = other DNA
cacagtctagctacttgcta

SEQ ID NO: 9045 - DNA, 20 bp, synthetic construct
  misc_feature 1..20: note = chemically synthesized
  source 1..20: mol_type = other DNA
cttgctacagacttctctcg

SEQ ID NO: 9046 - DNA, 20 bp, synthetic construct
  misc_feature 1..20: note = chemically synthesized
  source 1..20: mol_type = other DNA
ctcgcagatacacaatctct

SEQ ID NO: 9047 - DNA, 20 bp, synthetic construct
  misc_feature 1..20: note = chemically synthesized
  source 1..20: mol_type = other DNA
atctctcagtaaacacaact

SEQ ID NO: 9048 - DNA, 20 bp, synthetic construct
  misc_feature 1..20: note = chemically synthesized
  source 1..20: mol_type = other DNA
tctcagtaaacacaactcag

SEQ ID NO: 9049 - DNA, 20 bp, synthetic construct
  misc_feature 1..20: note = chemically synthesized
  source 1..20: mol_type = other DNA
aaacacaactcagcagctct

SEQ ID NO: 9050 - DNA, 20 bp, synthetic construct
  misc_feature 1..20: note = chemically synthesized
  source 1..20: mol_type = other DNA
aaatgaaataaaaatgctcc

SEQ ID NO: 9051 - DNA, 20 bp, synthetic construct
  misc_feature 1..20: note = chemically synthesized
  source 1..20: mol_type = other DNA
taaaaatgctccaagaaaac

SEQ ID NO: 9052 - DNA, 20 bp, synthetic construct
  misc_feature 1..20: note = chemically synthesized
  source 1..20: mol_type = other DNA
tccaagaaaaccagaaccca

SEQ ID NO: 9053 - DNA, 20 bp, synthetic construct
  misc_feature 1..20: note = chemically synthesized
  source 1..20: mol_type = other DNA
caaaccgcacacacacaaaa

SEQ ID NO: 9054 - DNA, 20 bp, synthetic construct
  misc_feature 1..20: note = chemically synthesized
  source 1..20: mol_type = other DNA
cgcacacacacaaaatagtt

SEQ ID NO: 9055 - DNA, 20 bp, synthetic construct
  misc_feature 1..20: note = chemically synthesized
  source 1..20: mol_type = other DNA
cacacaaaatagtttggaaa

SEQ ID NO: 9056 - DNA, 20 bp, synthetic construct
  misc_feature 1..20: note = chemically synthesized
  source 1..20: mol_type = other DNA
acacaaaatagtttggaaat

SEQ ID NO: 9057 - DNA, 20 bp, synthetic construct
  misc_feature 1..20: note = chemically synthesized
  source 1..20: mol_type = other DNA
aaaatagtttggaaatagga

SEQ ID NO: 9058 - DNA, 20 bp, synthetic construct
  misc_feature 1..20: note = chemically synthesized
  source 1..20: mol_type = other DNA
agtttggaaataggatagtt

SEQ ID NO: 9059 - DNA, 20 bp, synthetic construct
  misc_feature 1..20: note = chemically synthesized
  source 1..20: mol_type = other DNA
atagtttagttcactttaaa

SEQ ID NO: 9060 - DNA, 20 bp, synthetic construct
  misc_feature 1..20: note = chemically synthesized
  source 1..20: mol_type = other DNA
aagttgtatttcttaccaaa

SEQ ID NO: 9061 - DNA, 20 bp, synthetic construct
  misc_feature 1..20: note = chemically synthesized
  source 1..20: mol_type = other DNA
tttcttaccaaaaagcaata

SEQ ID NO: 9062 - DNA, 20 bp, synthetic construct
  misc_feature 1..20: note = chemically synthesized
  source 1..20: mol_type = other DNA
aaaaagcaataaagtcaaca

SEQ ID NO: 9063 - DNA, 20 bp, synthetic construct
  misc_feature 1..20: note = chemically synthesized
  source 1..20: mol_type = other DNA
agcaataaagtcaacataga

SEQ ID NO: 9064 - DNA, 20 bp, synthetic construct
  misc_feature 1..20: note = chemically synthesized
  source 1..20: mol_type = other DNA
acatagacagaactttgcta

SEQ ID NO: 9065 - DNA, 20 bp, synthetic construct
  misc_feature 1..20: note = chemically synthesized
  source 1..20: mol_type = other DNA
aagtatatgcataattatta

SEQ ID NO: 9066 - DNA, 20 bp, synthetic construct
  misc_feature 1..20: note = chemically synthesized
  source 1..20: mol_type = other DNA
ttacagaaaaatttatattt

SEQ ID NO: 9067 - DNA, 20 bp, synthetic construct
  misc_feature 1..20: note = chemically synthesized
  source 1..20: mol_type = other DNA
ttcattaatatttcctccac

SEQ ID NO: 9068 - DNA, 20 bp, synthetic construct
  misc_feature 1..20: note = chemically synthesized
  source 1..20: mol_type = other DNA
tcattaatatttcctccact

SEQ ID NO: 9069 - DNA, 20 bp, synthetic construct
  misc_feature 1..20: note = chemically synthesized
  source 1..20: mol_type = other DNA
aatatttcctccactgggct

SEQ ID NO: 9070 - DNA, 20 bp, synthetic construct
  misc_feature 1..20: note = chemically synthesized
  source 1..20: mol_type = other DNA
actgggctcagattttcatt

SEQ ID NO: 9071 - DNA, 20 bp, synthetic construct
  misc_feature 1..20: note = chemically synthesized
  source 1..20: mol_type = other DNA
ctcagattttcattcagaat

SEQ ID NO: 9072 - DNA, 20 bp, synthetic construct
  misc_feature 1..20: note = chemically synthesized
  source 1..20: mol_type = other DNA
agcttttttttaacctcatt

SEQ ID NO: 9073 - DNA, 20 bp, synthetic construct
  misc_feature 1..20: note = chemically synthesized
  source 1..20: mol_type = other DNA
ttttttttaacctcattaag

SEQ ID NO: 9074 - DNA, 20 bp, synthetic construct
  misc_feature 1..20: note = chemically synthesized
  source 1..20: mol_type = other DNA
tttttttaacctcattaagt

SEQ ID NO: 9075 - DNA, 20 bp, synthetic construct
  misc_feature 1..20: note = chemically synthesized
  source 1..20: mol_type = other DNA
taacctcattaagtgggcca

SEQ ID NO: 9076 - DNA, 20 bp, synthetic construct
  misc_feature 1..20: note = chemically synthesized
  source 1..20: mol_type = other DNA
tgggccatggtgtcaattta

SEQ ID NO: 9077 - DNA, 20 bp, synthetic construct
  misc_feature 1..20: note = chemically synthesized
  source 1..20: mol_type = other DNA
ggccatggtgtcaatttatg

SEQ ID NO: 9078 - DNA, 20 bp, synthetic construct
  misc_feature 1..20: note = chemically synthesized
  source 1..20: mol_type = other DNA
ccatggtgtcaatttatgga

SEQ ID NO: 9079 - DNA, 20 bp, synthetic construct
  misc_feature 1..20: note = chemically synthesized
  source 1..20: mol_type = other DNA
tggtgtcaatttatggagag

SEQ ID NO: 9080 - DNA, 20 bp, synthetic construct
  misc_feature 1..20: note = chemically synthesized
  source 1..20: mol_type = other DNA
gtgtcaatttatggagagca

SEQ ID NO: 9081 - DNA, 20 bp, synthetic construct
  misc_feature 1..20: note = chemically synthesized
  source 1..20: mol_type = other DNA
tgtcaatttatggagagcag

SEQ ID NO: 9082 - DNA, 20 bp, synthetic construct
  misc_feature 1..20: note = chemically synthesized
  source 1..20: mol_type = other DNA
atttatggagagcagaggta

SEQ ID NO: 9083 - DNA, 20 bp, synthetic construct
  misc_feature 1..20: note = chemically synthesized
  source 1..20: mol_type = other DNA
gagagcagaggtacagtctt

SEQ ID NO: 9084 - DNA, 20 bp, synthetic construct
  misc_feature 1..20: note = chemically synthesized
  source 1..20: mol_type = other DNA
tacagtcttcagataaattt

SEQ ID NO: 9085 - DNA, 20 bp, synthetic construct
  misc_feature 1..20: note = chemically synthesized
  source 1..20: mol_type = other DNA
aatttgagattgcatctctt

SEQ ID NO: 9086 - DNA, 20 bp, synthetic construct
  misc_feature 1..20: note = chemically synthesized
  source 1..20: mol_type = other DNA
tttgagattgcatctcttta

SEQ ID NO: 9087 - DNA, 20 bp, synthetic construct
  misc_feature 1..20: note = chemically synthesized
  source 1..20: mol_type = other DNA
ttgagattgcatctctttag

SEQ ID NO: 9088 - DNA, 20 bp, synthetic construct
  misc_feature 1..20: note = chemically synthesized
  source 1..20: mol_type = other DNA
agattgcatctctttagagg

SEQ ID NO: 9089 - DNA, 20 bp, synthetic construct
  misc_feature 1..20: note = chemically synthesized
  source 1..20: mol_type = other DNA
tctctttagaggtagaatct

SEQ ID NO: 9090 - DNA, 20 bp, synthetic construct
  misc_feature 1..20: note = chemically synthesized
  source 1..20: mol_type = other DNA
tagaggtagaatcttggctt

SEQ ID NO: 9091 - DNA, 20 bp, synthetic construct
  misc_feature 1..20: note = chemically synthesized
  source 1..20: mol_type = other DNA
gaacaccctttacaaacatg

SEQ ID NO: 9092 - DNA, 20 bp, synthetic construct
  misc_feature 1..20: note = chemically synthesized
  source 1..20: mol_type = other DNA
aacaccctttacaaacatgt

SEQ ID NO: 9093 - DNA, 20 bp, synthetic construct
  misc_feature 1..20: note = chemically synthesized
  source 1..20: mol_type = other DNA
caaacatgtaggcattaatt

SEQ ID NO: 9094 - DNA, 20 bp, synthetic construct
  misc_feature 1..20: note = chemically synthesized
  source 1..20: mol_type = other DNA
aacatgtaggcattaattca

SEQ ID NO: 9095 - DNA, 20 bp, synthetic construct
  misc_feature 1..20: note = chemically synthesized
  source 1..20: mol_type = other DNA
acatgtaggcattaattcag

SEQ ID NO: 9096 - DNA, 20 bp, synthetic construct
  misc_feature 1..20: note = chemically synthesized
  source 1..20: mol_type = other DNA
taattcagaggactgctctg

SEQ ID NO: 9097 - DNA, 20 bp, synthetic construct
  misc_feature 1..20: note = chemically synthesized
  source 1..20: mol_type = other DNA
agaggactgctctgaagctc

SEQ ID NO: 9098 - DNA, 20 bp, synthetic construct
  misc_feature 1..20: note = chemically synthesized
  source 1..20: mol_type = other DNA
aggactgctctgaagctcaa

SEQ ID NO: 9099 - DNA, 20 bp, synthetic construct
  misc_feature 1..20: note = chemically synthesized
  source 1..20: mol_type = other DNA
ctgctctgaagctcaagaga

SEQ ID NO: 9100 - DNA, 20 bp, synthetic construct
  misc_feature 1..20: note = chemically synthesized
  source 1..20: mol_type = other DNA
agctcaagagatggatgatt

SEQ ID NO: 9101 - DNA, 20 bp, synthetic construct
  misc_feature 1..20: note = chemically synthesized
  source 1..20: mol_type = other DNA
gctcaagagatggatgattt

SEQ ID NO: 9102 - DNA, 20 bp, synthetic construct
  misc_feature 1..20: note = chemically synthesized
  source 1..20: mol_type = other DNA
tcaagagatggatgatttag

SEQ ID NO: 9103 - DNA, 20 bp, synthetic construct
  misc_feature 1..20: note = chemically synthesized
  source 1..20: mol_type = other DNA
tggatgatttaggagactat

SEQ ID NO: 9104 - DNA, 20 bp, synthetic construct
  misc_feature 1..20: note = chemically synthesized
  source 1..20: mol_type = other DNA
ggatgatttaggagactatt

SEQ ID NO: 9105 - DNA, 20 bp, synthetic construct
  misc_feature 1..20: note = chemically synthesized
  source 1..20: mol_type = other DNA
cacacacacaccctttcatt

SEQ ID NO: 9106 - DNA, 20 bp, synthetic construct
  misc_feature 1..20: note = chemically synthesized
  source 1..20: mol_type = other DNA
tcattcagacatactgaaca

SEQ ID NO: 9107 - DNA, 20 bp, synthetic construct
  misc_feature 1..20: note = chemically synthesized
  source 1..20: mol_type = other DNA
catactgaacatagtttata

SEQ ID NO: 9108 - DNA, 20 bp, synthetic construct
  misc_feature 1..20: note = chemically synthesized
  source 1..20: mol_type = other DNA
tagtttataaagcaacgcca

SEQ ID NO: 9109 - DNA, 20 bp, synthetic construct
  misc_feature 1..20: note = chemically synthesized
  source 1..20: mol_type = other DNA
ttataaagcaacgccatagt

SEQ ID NO: 9110 - DNA, 20 bp, synthetic construct
  misc_feature 1..20: note = chemically synthesized
  source 1..20: mol_type = other DNA
aagcaacgccatagtgagaa

SEQ ID NO: 9111 - DNA, 20 bp, synthetic construct
  misc_feature 1..20: note = chemically synthesized
  source 1..20: mol_type = other DNA
taaattatcaaataaaatta

SEQ ID NO: 9112 - DNA, 20 bp, synthetic construct
  misc_feature 1..20: note = chemically synthesized
  source 1..20: mol_type = other DNA
taaaattaaagccaaatctt

SEQ ID NO: 9113 - DNA, 20 bp, synthetic construct
  misc_feature 1..20: note = chemically synthesized
  source 1..20: mol_type = other DNA
aaaattaaagccaaatcttg

SEQ ID NO: 9114 - DNA, 20 bp, synthetic construct
  misc_feature 1..20: note = chemically synthesized
  source 1..20: mol_type = other DNA
tttaactttcattttaaatt

SEQ ID NO: 9115 - DNA, 20 bp, synthetic construct
  misc_feature 1..20: note = chemically synthesized
  source 1..20: mol_type = other DNA
ttaactttcattttaaattt

SEQ ID NO: 9116 - DNA, 20 bp, synthetic construct
  misc_feature 1..20: note = chemically synthesized
  source 1..20: mol_type = other DNA
taactttcattttaaatttg

SEQ ID NO: 9117 - DNA, 20 bp, synthetic construct
  misc_feature 1..20: note = chemically synthesized
  source 1..20: mol_type = other DNA
aactttcattttaaatttgg

SEQ ID NO: 9118 - DNA, 20 bp, synthetic construct
  misc_feature 1..20: note = chemically synthesized
  source 1..20: mol_type = other DNA
aaatttgggggtacatgtac

SEQ ID NO: 9119 - DNA, 20 bp, synthetic construct
  misc_feature 1..20: note = chemically synthesized
  source 1..20: mol_type = other DNA
gggtacatgtacaagttata

SEQ ID NO: 9120 - DNA, 20 bp, synthetic construct
  misc_feature 1..20: note = chemically synthesized
  source 1..20: mol_type = other DNA
ggtacatgtacaagttatat

SEQ ID NO: 9121 - DNA, 20 bp, synthetic construct
  misc_feature 1..20: note = chemically synthesized
  source 1..20: mol_type = other DNA
ataggtaaattgcatatcac

SEQ ID NO: 9122 - DNA, 20 bp, synthetic construct
  misc_feature 1..20: note = chemically synthesized
  source 1..20: mol_type = other DNA
taggtaaattgcatatcact

SEQ ID NO: 9123 - DNA, 20 bp, synthetic construct
  misc_feature 1..20: note = chemically synthesized
  source 1..20: mol_type = other DNA
tatcactgggtcttgatgta

SEQ ID NO: 9124 - DNA, 20 bp, synthetic construct
  misc_feature 1..20: note = chemically synthesized
  source 1..20: mol_type = other DNA
gtacagattatttcatcact

SEQ ID NO: 9125 - DNA, 20 bp, synthetic construct
  misc_feature 1..20: note = chemically synthesized
  source 1..20: mol_type = other DNA
gtgatgaacttaatacccaa

SEQ ID NO: 9126 - DNA, 20 bp, synthetic construct
  misc_feature 1..20: note = chemically synthesized
  source 1..20: mol_type = other DNA
tgatgaacttaatacccaat

SEQ ID NO: 9127 - DNA, 20 bp, synthetic construct
  misc_feature 1..20: note = chemically synthesized
  source 1..20: mol_type = other DNA
tcttcccaccctcaaccctc

SEQ ID NO: 9128 - DNA, 20 bp, synthetic construct
  misc_feature 1..20: note = chemically synthesized
  source 1..20: mol_type = other DNA
tcccaccctcaaccctcaag

SEQ ID NO: 9129 - DNA, 20 bp, synthetic construct
  misc_feature 1..20: note = chemically synthesized
  source 1..20: mol_type = other DNA
cccaccctcaaccctcaagt

SEQ ID NO: 9130 - DNA, 20 bp, synthetic construct
  misc_feature 1..20: note = chemically synthesized
  source 1..20: mol_type = other DNA
cctcaaccctcaagtaggcc

SEQ ID NO: 9131 - DNA, 20 bp, synthetic construct
  misc_feature 1..20: note = chemically synthesized
  source 1..20: mol_type = other DNA
ctcaaccctcaagtaggcct

SEQ ID NO: 9132 - DNA, 20 bp, synthetic construct
  misc_feature 1..20: note = chemically synthesized
  source 1..20: mol_type = other DNA
tgtccatgtgtatcatcatt

SEQ ID NO: 9133 - DNA, 20 bp, synthetic construct
  misc_feature 1..20: note = chemically synthesized
  source 1..20: mol_type = other DNA
tcatttagctcccacactcc

SEQ ID NO: 9134 - DNA, 20 bp, synthetic construct
  misc_feature 1..20: note = chemically synthesized
  source 1..20: mol_type = other DNA
acactcctagactcttacaa

SEQ ID NO: 9135 - DNA, 20 bp, synthetic construct
  misc_feature 1..20: note = chemically synthesized
  source 1..20: mol_type = other DNA
aataattttaatataacaac

SEQ ID NO: 9136 - DNA, 20 bp, synthetic construct
  misc_feature 1..20: note = chemically synthesized
  source 1..20: mol_type = other DNA
ataattttaatataacaaca

SEQ ID NO: 9137 - DNA, 20 bp, synthetic construct
  misc_feature 1..20: note = chemically synthesized
  source 1..20: mol_type = other DNA
taatataacaacaaggtgcc

SEQ ID NO: 9138 - DNA, 20 bp, synthetic construct
  misc_feature 1..20: note = chemically synthesized
  source 1..20: mol_type = other DNA
acctcctcatcttcaatatg

SEQ ID NO: 9139 - DNA, 20 bp, synthetic construct
  misc_feature 1..20: note = chemically synthesized
  source 1..20: mol_type = other DNA
cctcatcttcaatatgaaga

SEQ ID NO: 9140 - DNA, 20 bp, synthetic construct
  misc_feature 1..20: note = chemically synthesized
  source 1..20: mol_type = other DNA
aatatgaagatagcaatgcc

SEQ ID NO: 9141 - DNA, 20 bp, synthetic construct
  misc_feature 1..20: note = chemically synthesized
  source 1..20: mol_type = other DNA
agatagcaatgcctagcata

SEQ ID NO: 9142 - DNA, 20 bp, synthetic construct
  misc_feature 1..20: note = chemically synthesized
  source 1..20: mol_type = other DNA
atatagtaattgtgtgtgct

SEQ ID NO: 9143 - DNA, 20 bp, synthetic construct
  misc_feature 1..20: note = chemically synthesized
  source 1..20: mol_type = other DNA
tgctcggcacatgtcccatc

SEQ ID NO: 9144 - DNA, 20 bp, synthetic construct
  misc_feature 1..20: note = chemically synthesized
  source 1..20: mol_type = other DNA
gctcggcacatgtcccatcc

SEQ ID NO: 9145 - DNA, 20 bp, synthetic construct
  misc_feature 1..20: note = chemically synthesized
  source 1..20: mol_type = other DNA
tgatgttctcatgaattctc

SEQ ID NO: 9146 - DNA, 20 bp, synthetic construct
  misc_feature 1..20: note = chemically synthesized
  source 1..20: mol_type = other DNA
ctcatgaattctctggtatt

SEQ ID NO: 9147 - DNA, 20 bp, synthetic construct
  misc_feature 1..20: note = chemically synthesized
  source 1..20: mol_type = other DNA
ttctctggtatttggatttt

SEQ ID NO: 9148 - DNA, 20 bp, synthetic construct
  misc_feature 1..20: note = chemically synthesized
  source 1..20: mol_type = other DNA
tctctggtatttggattttt

SEQ ID NO: 9149 - DNA, 20 bp, synthetic construct
  misc_feature 1..20: note = chemically synthesized
  source 1..20: mol_type = other DNA
ctctggtatttggattttta

SEQ ID NO: 9150 - DNA, 20 bp, synthetic construct
  misc_feature 1..20: note = chemically synthesized
  source 1..20: mol_type = other DNA
tttagggccaacatcttgcc

SEQ ID NO: 9151 - DNA, 20 bp, synthetic construct
  misc_feature 1..20: note = chemically synthesized
  source 1..20: mol_type = other DNA
gactcactgactacttctaa

SEQ ID NO: 9152 - DNA, 20 bp, synthetic construct
  misc_feature 1..20: note = chemically synthesized
  source 1..20: mol_type = other DNA
actgactacttctaatggtg

SEQ ID NO: 9153 - DNA, 20 bp, synthetic construct
  misc_feature 1..20: note = chemically synthesized
  source 1..20: mol_type = other DNA
ctgactacttctaatggtgt

SEQ ID NO: 9154 - DNA, 20 bp, synthetic construct
  misc_feature 1..20: note = chemically synthesized
  source 1..20: mol_type = other DNA
tacttctaatggtgtaggaa

SEQ ID NO: 9155 - DNA, 20 bp, synthetic construct
  misc_feature 1..20: note = chemically synthesized
  source 1..20: mol_type = other DNA
ttctaatggtgtaggaatag

SEQ ID NO: 9156 - DNA, 20 bp, synthetic construct
  misc_feature 1..20: note = chemically synthesized
  source 1..20: mol_type = other DNA
tctaatggtgtaggaataga

SEQ ID NO: 9157 - DNA, 20 bp, synthetic construct
  misc_feature 1..20: note = chemically synthesized
  source 1..20: mol_type = other DNA
tggtgtaggaatagaaggta

SEQ ID NO: 9158 - DNA, 20 bp, synthetic construct
  misc_feature 1..20: note = chemically synthesized
  source 1..20: mol_type = other DNA
gtaggaatagaaggtatagt

SEQ ID NO: 9159 - DNA, 20 bp, synthetic construct
  misc_feature 1..20: note = chemically synthesized
  source 1..20: mol_type = other DNA
tgctctttttttttgacttt

SEQ ID NO: 9160 - DNA, 20 bp, synthetic construct
  misc_feature 1..20: note = chemically synthesized
  source 1..20: mol_type = other DNA
ctctttttttttgacttttg

SEQ ID NO: 9161 - DNA, 20 bp, synthetic construct
  misc_feature 1..20: note = chemically synthesized
  source 1..20: mol_type = other DNA
ttttttttgacttttggaga

SEQ ID NO: 9162 - DNA, 20 bp, synthetic construct
  misc_feature 1..20: note = chemically synthesized
  source 1..20: mol_type = other DNA
tttttttgacttttggagaa

SEQ ID NO: 9163 - DNA, 20 bp, synthetic construct
  misc_feature 1..20: note = chemically synthesized
  source 1..20: mol_type = other DNA
gacttttggagaaaggaatg

SEQ ID NO: 9164 - DNA, 20 bp, synthetic construct
  misc_feature 1..20: note = chemically synthesized
  source 1..20: mol_type = other DNA
tgtagtttgttttccctatc

SEQ ID NO: 9165 - DNA, 20 bp, synthetic construct
  misc_feature 1..20: note = chemically synthesized
  source 1..20: mol_type = other DNA
gttttccctatcaagatcat

SEQ ID NO: 9166 - DNA, 20 bp, synthetic construct
  misc_feature 1..20: note = chemically synthesized
  source 1..20: mol_type = other DNA
ttttccctatcaagatcata

SEQ ID NO: 9167 - DNA, 20 bp, synthetic construct
  misc_feature 1..20: note = chemically synthesized
  source 1..20: mol_type = other DNA
ctgtctttcgaataccacac

SEQ ID NO: 9168 - DNA, 20 bp, synthetic construct
  misc_feature 1..20: note = chemically synthesized
  source 1..20: mol_type = other DNA
ttttaatatcttactcttat

SEQ ID NO: 9169 - DNA, 20 bp, synthetic construct
  misc_feature 1..20: note = chemically synthesized
  source 1..20: mol_type = other DNA
tatgagaacttccctatgct

SEQ ID NO: 9170 - DNA, 20 bp, synthetic construct
  misc_feature 1..20: note = chemically synthesized
  source 1..20: mol_type = other DNA
atgagaacttccctatgctc

SEQ ID NO: 9171 - DNA, 20 bp, synthetic construct
  misc_feature 1..20: note = chemically synthesized
  source 1..20: mol_type = other DNA
ccctatgctcaggaatgtga

SEQ ID NO: 9172 - DNA, 20 bp, synthetic construct
  misc_feature 1..20: note = chemically synthesized
  source 1..20: mol_type = other DNA
gatcttccccaaaatgccct

SEQ ID NO: 9173 - DNA, 20 bp, synthetic construct
  misc_feature 1..20: note = chemically synthesized
  source 1..20: mol_type = other DNA
cttccccaaaatgccctgag

SEQ ID NO: 9174 - DNA, 20 bp, synthetic construct
  misc_feature 1..20: note = chemically synthesized
  source 1..20: mol_type = other DNA
tctgcttctgatatgtaaac

SEQ ID NO: 9175 - DNA, 20 bp, synthetic construct
  misc_feature 1..20: note = chemically synthesized
  source 1..20: mol_type = other DNA
gcttctgatatgtaaaccag

SEQ ID NO: 9176 - DNA, 20 bp, synthetic construct
  misc_feature 1..20: note = chemically synthesized
  source 1..20: mol_type = other DNA
tggttcctaaatatcttatt

SEQ ID NO: 9177 - DNA, 20 bp, synthetic construct
  misc_feature 1..20: note = chemically synthesized
  source 1..20: mol_type = other DNA
aaatatcttattcagatata

SEQ ID NO: 9178 - DNA, 20 bp, synthetic construct
  misc_feature 1..20: note = chemically synthesized
  source 1..20: mol_type = other DNA
atatcttattcagatataaa

SEQ ID NO: 9179 - DNA, 20 bp, synthetic construct
  misc_feature 1..20: note = chemically synthesized
  source 1..20: mol_type = other DNA
attcagatataaagagttct

SEQ ID NO: 9180 - DNA, 20 bp, synthetic construct
  misc_feature 1..20: note = chemically synthesized
  source 1..20: mol_type = other DNA
cctactatgtataatgactt

SEQ ID NO: 9181 - DNA, 20 bp, synthetic construct
  misc_feature 1..20: note = chemically synthesized
  source 1..20: mol_type = other DNA
ctactatgtataatgactta

SEQ ID NO: 9182 - DNA, 20 bp, synthetic construct
  misc_feature 1..20: note = chemically synthesized
  source 1..20: mol_type = other DNA
aatgacttaaggaaaacaca

SEQ ID NO: 9183 - DNA, 20 bp, synthetic construct
  misc_feature 1..20: note = chemically synthesized
  source 1..20: mol_type = other DNA
aggaaaacacatggatataa

SEQ ID NO: 9184 - DNA, 20 bp, synthetic construct
  misc_feature 1..20: note = chemically synthesized
  source 1..20: mol_type = other DNA
gaaaacacatggatataaaa

SEQ ID NO: 9185 - DNA, 20 bp, synthetic construct
  misc_feature 1..20: note = chemically synthesized
  source 1..20: mol_type = other DNA
tataaaagagcttctgctgc

SEQ ID NO: 9186 - DNA, 20 bp, synthetic construct
  misc_feature 1..20: note = chemically synthesized
  source 1..20: mol_type = other DNA
tcaaaatgttgtgatcaaaa

SEQ ID NO: 9187 - DNA, 20 bp, synthetic construct
  misc_feature 1..20: note = chemically synthesized
  source 1..20: mol_type = other DNA
agttaactataacacattgt

SEQ ID NO: 9188 - DNA, 20 bp, synthetic construct
  misc_feature 1..20: note = chemically synthesized
  source 1..20: mol_type = other DNA
aacacattgtcagtatattc

SEQ ID NO: 9189 - DNA, 20 bp, synthetic construct
  misc_feature 1..20: note = chemically synthesized
  source 1..20: mol_type = other DNA
acattgtcagtatattctgg

SEQ ID NO: 9190 - DNA, 20 bp, synthetic construct
  misc_feature 1..20: note = chemically synthesized
  source 1..20: mol_type = other DNA
gtcagtatattctggcagta

SEQ ID NO: 9191 - DNA, 20 bp, synthetic construct
  misc_feature 1..20: note = chemically synthesized
  source 1..20: mol_type = other DNA
gtatattctggcagtacaga

SEQ ID NO: 9192 - DNA, 20 bp, synthetic construct
  misc_feature 1..20: note = chemically synthesized
  source 1..20: mol_type = other DNA
atattctggcagtacagaca

SEQ ID NO: 9193 - DNA, 20 bp, synthetic construct
  misc_feature 1..20: note = chemically synthesized
  source 1..20: mol_type = other DNA
tacagacagagttactgtga

SEQ ID NO: 9194 - DNA, 20 bp, synthetic construct
  misc_feature 1..20: note = chemically synthesized
  source 1..20: mol_type = other DNA
gtgaaagcactttcaaacac

SEQ ID NO: 9195 - DNA, 20 bp, synthetic construct
  misc_feature 1..20: note = chemically synthesized
  source 1..20: mol_type = other DNA
tgaaagcactttcaaacaca

SEQ ID NO: 9196 - DNA, 20 bp, synthetic construct
  misc_feature 1..20: note = chemically synthesized
  source 1..20: mol_type = other DNA
tttcaaacacaaggaaacaa

SEQ ID NO: 9197 - DNA, 20 bp, synthetic construct
  misc_feature 1..20: note = chemically synthesized
  source 1..20: mol_type = other DNA
aggaaacaacagattctgtt

SEQ ID NO: 9198 - DNA, 20 bp, synthetic construct
  misc_feature 1..20: note = chemically synthesized
  source 1..20: mol_type = other DNA
ggaaacaacagattctgttt

SEQ ID NO: 9199 - DNA, 20 bp, synthetic construct
  misc_feature 1..20: note = chemically synthesized
  source 1..20: mol_type = other DNA
cagattctgtttaggtattc

SEQ ID NO: 9200 - DNA, 20 bp, synthetic construct
  misc_feature 1..20: note = chemically synthesized
  source 1..20: mol_type = other DNA
ttctgtttaggtattcaagt

SEQ ID NO: 9201 - DNA, 20 bp, synthetic construct
  misc_feature 1..20: note = chemically synthesized
  source 1..20: mol_type = other DNA
taatcaacatgcatataata

SEQ ID NO: 9202 - DNA, 20 bp, synthetic construct
  misc_feature 1..20: note = chemically synthesized
  source 1..20: mol_type = other DNA
ttttaaaaatgtatacaact

SEQ ID NO: 9203 - DNA, 20 bp, synthetic construct
  misc_feature 1..20: note = chemically synthesized
  source 1..20: mol_type = other DNA
aaaaatgtatacaactgaga

SEQ ID NO: 9204 - DNA, 20 bp, synthetic construct
  misc_feature 1..20: note = chemically synthesized
  source 1..20: mol_type = other DNA
aatccttctaattttaccta

SEQ ID NO: 9205 - DNA, 20 bp, synthetic construct
  misc_feature 1..20: note = chemically synthesized
  source 1..20: mol_type = other DNA
aattttacctatggcaaaaa

SEQ ID NO: 9206 - DNA, 20 bp, synthetic construct
  misc_feature 1..20: note = chemically synthesized
  source 1..20: mol_type = other DNA
ctatggcaaaaatggtgctc

SEQ ID NO: 9207 - DNA, 20 bp, synthetic construct
  misc_feature 1..20: note = chemically synthesized
  source 1..20: mol_type = other DNA
tatggcaaaaatggtgctca

SEQ ID NO: 9208 - DNA, 20 bp, synthetic construct
  misc_feature 1..20: note = chemically synthesized
  source 1..20: mol_type = other DNA
aaaaatattactcctatgat

SEQ ID NO: 9209 - DNA, 20 bp, synthetic construct
  misc_feature 1..20: note = chemically synthesized
  source 1..20: mol_type = other DNA
atattactcctatgatcaga

SEQ ID NO: 9210 - DNA, 20 bp, synthetic construct
  misc_feature 1..20: note = chemically synthesized
  source 1..20: mol_type = other DNA
tattactcctatgatcagaa

SEQ ID NO: 9211 - DNA, 20 bp, synthetic construct
  misc_feature 1..20: note = chemically synthesized
  source 1..20: mol_type = other DNA
tcagaaaggaaataactgtt

SEQ ID NO: 9212 - DNA, 20 bp, synthetic construct
  misc_feature 1..20: note = chemically synthesized
  source 1..20: mol_type = other DNA
tgcttcctctttgtatgttg

SEQ ID NO: 9213 - DNA, 20 bp, synthetic construct
  misc_feature 1..20: note = chemically synthesized
  source 1..20: mol_type = other DNA
atgttgtagcattaacaaca

SEQ ID NO: 9214 - DNA, 20 bp, synthetic construct
  misc_feature 1..20: note = chemically synthesized
  source 1..20: mol_type = other DNA
aacaaagaaacactgtgcga

SEQ ID NO: 9215 - DNA, 20 bp, synthetic construct
  misc_feature 1..20: note = chemically synthesized
  source 1..20: mol_type = other DNA
ttaatattgtcctctaattc

SEQ ID NO: 9216 - DNA, 20 bp, synthetic construct
  misc_feature 1..20: note = chemically synthesized
  source 1..20: mol_type = other DNA
atattgtcctctaattccag

SEQ ID NO: 9217 - DNA, 20 bp, synthetic construct
  misc_feature 1..20: note = chemically synthesized
  source 1..20: mol_type = other DNA
ctctaattccagaagttcta

SEQ ID NO: 9218 - DNA, 20 bp, synthetic construct
  misc_feature 1..20: note = chemically synthesized
  source 1..20: mol_type = other DNA
aattccagaagttctaaagc

SEQ ID NO: 9219 - DNA, 20 bp, synthetic construct
  misc_feature 1..20: note = chemically synthesized
  source 1..20: mol_type = other DNA
attccagaagttctaaagca

SEQ ID NO: 9220 - DNA, 20 bp, synthetic construct
  misc_feature 1..20: note = chemically synthesized
  source 1..20: mol_type = other DNA
cccattgatgaatttaatat

SEQ ID NO: 9221 - DNA, 20 bp, synthetic construct
  misc_feature 1..20: note = chemically synthesized
  source 1..20: mol_type = other DNA
ccattgatgaatttaatatg

SEQ ID NO: 9222 - DNA, 20 bp, synthetic construct
  misc_feature 1..20: note = chemically synthesized
  source 1..20: mol_type = other DNA
gatgaatttaatatgaggca

SEQ ID NO: 9223 - DNA, 20 bp, synthetic construct
  misc_feature 1..20: note = chemically synthesized
  source 1..20: mol_type = other DNA
gaatttaatatgaggcacag

SEQ ID NO: 9224 - DNA, 20 bp, synthetic construct
  misc_feature 1..20: note = chemically synthesized
  source 1..20: mol_type = other DNA
aatttaatatgaggcacagt

SEQ ID NO: 9225 - DNA, 20 bp, synthetic construct
  misc_feature 1..20: note = chemically synthesized
  source 1..20: mol_type = other DNA
atgaggcacagtaggcatgt

SEQ ID NO: 9226 - DNA, 20 bp, synthetic construct
  misc_feature 1..20: note = chemically synthesized
  source 1..20: mol_type = other DNA
aggcacagtaggcatgtaag

SEQ ID NO: 9227 - DNA, 20 bp, synthetic construct
  misc_feature 1..20: note = chemically synthesized
  source 1..20: mol_type = other DNA
ggcacagtaggcatgtaaga

SEQ ID NO: 9228 - DNA, 20 bp, synthetic construct
  misc_feature 1..20: note = chemically synthesized
  source 1..20: mol_type = other DNA
acagtaggcatgtaagaagg

SEQ ID NO: 9229 - DNA, 20 bp, synthetic construct
  misc_feature 1..20: note = chemically synthesized
  source 1..20: mol_type = other DNA
agtaggcatgtaagaaggta

SEQ ID NO: 9230 - DNA, 20 bp, synthetic construct
  misc_feature 1..20: note = chemically synthesized
  source 1..20: mol_type = other DNA
gcatgtaagaaggtagagaa

SEQ ID NO: 9231 - DNA, 20 bp, synthetic construct
  misc_feature 1..20: note = chemically synthesized
  source 1..20: mol_type = other DNA
catgtaagaaggtagagaat

SEQ ID NO: 9232 - DNA, 20 bp, synthetic construct
  misc_feature 1..20: note = chemically synthesized
  source 1..20: mol_type = other DNA
gtaagaaggtagagaatagg

SEQ ID NO: 9233 - DNA, 20 bp, synthetic construct
  misc_feature 1..20: note = chemically synthesized
  source 1..20: mol_type = other DNA
aataggcagaattgcttata

SEQ ID NO: 9234 - DNA, 20 bp, synthetic construct
  misc_feature 1..20: note = chemically synthesized
  source 1..20: mol_type = other DNA
gcagaattgcttataaagca

SEQ ID NO: 9235 - DNA, 20 bp, synthetic construct
  misc_feature 1..20: note = chemically synthesized
  source 1..20: mol_type = other DNA
agaattgcttataaagcacg

SEQ ID NO: 9236 - DNA, 20 bp, synthetic construct
  misc_feature 1..20: note = chemically synthesized
  source 1..20: mol_type = other DNA
tgtgtgtgcatgaaataaat

SEQ ID NO: 9237 - DNA, 20 bp, synthetic construct
  misc_feature 1..20: note = chemically synthesized
  source 1..20: mol_type = other DNA
aaatataaaaatataaaaaa

SEQ ID NO: 9238 - DNA, 20 bp, synthetic construct
  misc_feature 1..20: note = chemically synthesized
  source 1..20: mol_type = other DNA
taaaaatataaaaaatggtg

SEQ ID NO: 9239 - DNA, 20 bp, synthetic construct
  misc_feature 1..20: note = chemically synthesized
  source 1..20: mol_type = other DNA
aaaaatataaaaaatggtgt

SEQ ID NO: 9240 - DNA, 20 bp, synthetic construct
  misc_feature 1..20: note = chemically synthesized
  source 1..20: mol_type = other DNA
aaaatataaaaaatggtgtg

SEQ ID NO: 9241 - DNA, 20 bp, synthetic construct
  misc_feature 1..20: note = chemically synthesized
  source 1..20: mol_type = other DNA
aaatataaaaaatggtgtgg

SEQ ID NO: 9242 - DNA, 20 bp, synthetic construct
  misc_feature 1..20: note = chemically synthesized
  source 1..20: mol_type = other DNA
atataaaaaatggtgtgggg

SEQ ID NO: 9243 - DNA, 20 bp, synthetic construct
  misc_feature 1..20: note = chemically synthesized
  source 1..20: mol_type = other DNA
tataaaaaatggtgtggggg

SEQ ID NO: 9244 - DNA, 20 bp, synthetic construct
  misc_feature 1..20: note = chemically synthesized
  source 1..20: mol_type = other DNA
ataaaaaatggtgtggggga

SEQ ID NO: 9245 - DNA, 20 bp, synthetic construct
  misc_feature 1..20: note = chemically synthesized
  source 1..20: mol_type = other DNA
aaatggtgtgggggagggtt

SEQ ID NO: 9246 - DNA, 20 bp, synthetic construct
  misc_feature 1..20: note = chemically synthesized
  source 1..20: mol_type = other DNA
ggtgtgggggagggtttgga

SEQ ID NO: 9247 - DNA, 20 bp, synthetic construct
  misc_feature 1..20: note = chemically synthesized
  source 1..20: mol_type = other DNA
gagggtttggaaagattttt

SEQ ID NO: 9248 - DNA, 20 bp, synthetic construct
  misc_feature 1..20: note = chemically synthesized
  source 1..20: mol_type = other DNA
agggtttggaaagatttttt

SEQ ID NO: 9249 - DNA, 20 bp, synthetic construct
  misc_feature 1..20: note = chemically synthesized
  source 1..20: mol_type = other DNA
gtttggaaagattttttggg

SEQ ID NO: 9250 - DNA, 20 bp, synthetic construct
  misc_feature 1..20: note = chemically synthesized
  source 1..20: mol_type = other DNA
gaaagattttttgggtagta

SEQ ID NO: 9251 - DNA, 20 bp, synthetic construct
  misc_feature 1..20: note = chemically synthesized
  source 1..20: mol_type = other DNA
aagattttttgggtagtata

SEQ ID NO: 9252 - DNA, 20 bp, synthetic construct
  misc_feature 1..20: note = chemically synthesized
  source 1..20: mol_type = other DNA
attttttgggtagtatagag

SEQ ID NO: 9253 - DNA, 20 bp, synthetic construct
  misc_feature 1..20: note = chemically synthesized
  source 1..20: mol_type = other DNA
tagtatagagaagtttattg

SEQ ID NO: 9254 - DNA, 20 bp, synthetic construct
  misc_feature 1..20: note = chemically synthesized
  source 1..20: mol_type = other DNA
atagagaagtttattgtggc

SEQ ID NO: 9255 - DNA, 20 bp, synthetic construct
  misc_feature 1..20: note = chemically synthesized
  source 1..20: mol_type = other DNA
tagagaagtttattgtggct

SEQ ID NO: 9256 - DNA, 20 bp, synthetic construct
  misc_feature 1..20: note = chemically synthesized
  source 1..20: mol_type = other DNA
agagaagtttattgtggctg

SEQ ID NO: 9257 - DNA, 20 bp, synthetic construct
  misc_feature 1..20: note = chemically synthesized
  source 1..20: mol_type = other DNA
agtttattgtggctggggtc

SEQ ID NO: 9258 - DNA, 20 bp, synthetic construct
  misc_feature 1..20: note = chemically synthesized
  source 1..20: mol_type = other DNA
tttattgtggctggggtcaa

SEQ ID NO: 9259 - DNA, 20 bp, synthetic construct
  misc_feature 1..20: note = chemically synthesized
  source 1..20: mol_type = other DNA
tattgtggctggggtcaaga

SEQ ID NO: 9260 - DNA, 20 bp, synthetic construct
  misc_feature 1..20: note = chemically synthesized
  source 1..20: mol_type = other DNA
attgtggctggggtcaagag

SEQ ID NO: 9261 - DNA, 20 bp, synthetic construct
  misc_feature 1..20: note = chemically synthesized
  source 1..20: mol_type = other DNA
ctggggtcaagagaggtcac

SEQ ID NO: 9262 - DNA, 20 bp, synthetic construct
  misc_feature 1..20: note = chemically synthesized
  source 1..20: mol_type = other DNA
agaggtcacaagtaatacgt

SEQ ID NO: 9263 - DNA, 20 bp, synthetic construct
  misc_feature 1..20: note = chemically synthesized
  source 1..20: mol_type = other DNA
aatgaatcttgactgaaata

SEQ ID NO: 9264 - DNA, 20 bp, synthetic construct
  misc_feature 1..20: note = chemically synthesized
  source 1..20: mol_type = other DNA
atgaatcttgactgaaatat

SEQ ID NO: 9265 - DNA, 20 bp, synthetic construct
  misc_feature 1..20: note = chemically synthesized
  source 1..20: mol_type = other DNA
aatcttgactgaaatatggg

SEQ ID NO: 9266 - DNA, 20 bp, synthetic construct
  misc_feature 1..20: note = chemically synthesized
  source 1..20: mol_type = other DNA
tgactgaaatatgggaagat

SEQ ID NO: 9267 - DNA, 20 bp, synthetic construct
  misc_feature 1..20: note = chemically synthesized
  source 1..20: mol_type = other DNA
actgaaatatgggaagataa

SEQ ID NO: 9268 - DNA, 20 bp, synthetic construct
  misc_feature 1..20: note = chemically synthesized
  source 1..20: mol_type = other DNA
ctgaaatatgggaagataag

SEQ ID NO: 9269 - DNA, 20 bp, synthetic construct
  misc_feature 1..20: note = chemically synthesized
  source 1..20: mol_type = other DNA
agataagaggaaattcttta

SEQ ID NO: 9270 - DNA, 20 bp, synthetic construct
  misc_feature 1..20: note = chemically synthesized
  source 1..20: mol_type = other DNA
ataagaggaaattctttaca

SEQ ID NO: 9271 - DNA, 20 bp, synthetic construct
  misc_feature 1..20: note = chemically synthesized
  source 1..20: mol_type = other DNA
aattctttacagagatgttc

SEQ ID NO: 9272 - DNA, 20 bp, synthetic construct
  misc_feature 1..20: note = chemically synthesized
  source 1..20: mol_type = other DNA
attctttacagagatgttct

SEQ ID NO: 9273 - DNA, 20 bp, synthetic construct
  misc_feature 1..20: note = chemically synthesized
  source 1..20: mol_type = other DNA
ttctttacagagatgttctg

SEQ ID NO: 9274 - DNA, 20 bp, synthetic construct
  misc_feature 1..20: note = chemically synthesized
  source 1..20: mol_type = other DNA
ttacagagatgttctggggc

SEQ ID NO: 9275 - DNA, 20 bp, synthetic construct
  misc_feature 1..20: note = chemically synthesized
  source 1..20: mol_type = other DNA
agagatgttctggggcaagt

SEQ ID NO: 9276 - DNA, 20 bp, synthetic construct
  misc_feature 1..20: note = chemically synthesized
  source 1..20: mol_type = other DNA
agatgttctggggcaagtaa

SEQ ID NO: 9277 - DNA, 20 bp, synthetic construct
  misc_feature 1..20: note = chemically synthesized
  source 1..20: mol_type = other DNA
gatgttctggggcaagtaag

SEQ ID NO: 9278 - DNA, 20 bp, synthetic construct
  misc_feature 1..20: note = chemically synthesized
  source 1..20: mol_type = other DNA
tgttctggggcaagtaagag

SEQ ID NO: 9279 - DNA, 20 bp, synthetic construct
  misc_feature 1..20: note = chemically synthesized
  source 1..20: mol_type = other DNA
gttctggggcaagtaagagg

SEQ ID NO: 9280 - DNA, 20 bp, synthetic construct
  misc_feature 1..20: note = chemically synthesized
  source 1..20: mol_type = other DNA
ctggggcaagtaagaggagg

SEQ ID NO: 9281 - DNA, 20 bp, synthetic construct
  misc_feature 1..20: note = chemically synthesized
  source 1..20: mol_type = other DNA
aagaggaggaagctatttct

SEQ ID NO: 9282 - DNA, 20 bp, synthetic construct
  misc_feature 1..20: note = chemically synthesized
  source 1..20: mol_type = other DNA
gaggaggaagctatttcttg

SEQ ID NO: 9283 - DNA, 20 bp, synthetic construct
  misc_feature 1..20: note = chemically synthesized
  source 1..20: mol_type = other DNA
gaggaagctatttcttggag

SEQ ID NO: 9284 - DNA, 20 bp, synthetic construct
  misc_feature 1..20: note = chemically synthesized
  source 1..20: mol_type = other DNA
aggaagctatttcttggagc

SEQ ID NO: 9285 - DNA, 20 bp, synthetic construct
  misc_feature 1..20: note = chemically synthesized
  source 1..20: mol_type = other DNA
cttggagcaggaacacttga

SEQ ID NO: 9286 - DNA, 20 bp, synthetic construct
  misc_feature 1..20: note = chemically synthesized
  source 1..20: mol_type = other DNA
ttggagcaggaacacttgat

SEQ ID NO: 9287 - DNA, 20 bp, synthetic construct
  misc_feature 1..20: note = chemically synthesized
  source 1..20: mol_type = other DNA
tggagcaggaacacttgatg

SEQ ID NO: 9288 - DNA, 20 bp, synthetic construct
  misc_feature 1..20: note = chemically synthesized
  source 1..20: mol_type = other DNA
caggaacacttgatggggta

SEQ ID NO: 9289 - DNA, 20 bp, synthetic construct
  misc_feature 1..20: note = chemically synthesized
  source 1..20: mol_type = other DNA
cttgatggggtatagtatta

SEQ ID NO: 9290 - DNA, 20 bp, synthetic construct
  misc_feature 1..20: note = chemically synthesized
  source 1..20: mol_type = other DNA
ttgatggggtatagtattat

SEQ ID NO: 9291 - DNA, 20 bp, synthetic construct
  misc_feature 1..20: note = chemically synthesized
  source 1..20: mol_type = other DNA
gtattatgggctacaatgtg

SEQ ID NO: 9292 - DNA, 20 bp, synthetic construct
  misc_feature 1..20: note = chemically synthesized
  source 1..20: mol_type = other DNA
tattatgggctacaatgtgc

SEQ ID NO: 9293 - DNA, 20 bp, synthetic construct
  misc_feature 1..20: note = chemically synthesized
  source 1..20: mol_type = other DNA
tgggctacaatgtgcaggca

SEQ ID NO: 9294 - DNA, 20 bp, synthetic construct
  misc_feature 1..20: note = chemically synthesized
  source 1..20: mol_type = other DNA
gggctacaatgtgcaggcaa

SEQ ID NO: 9295 - DNA, 20 bp, synthetic construct
  misc_feature 1..20: note = chemically synthesized
  source 1..20: mol_type = other DNA
ctacaatgtgcaggcaaagg

SEQ ID NO: 9296 - DNA, 20 bp, synthetic construct
  misc_feature 1..20: note = chemically synthesized
  source 1..20: mol_type = other DNA
tacaatgtgcaggcaaagga

SEQ ID NO: 9297 - DNA, 20 bp, synthetic construct
  misc_feature 1..20: note = chemically synthesized
  source 1..20: mol_type = other DNA
caatgtgcaggcaaaggaag

SEQ ID NO: 9298 - DNA, 20 bp, synthetic construct
  misc_feature 1..20: note = chemically synthesized
  source 1..20: mol_type = other DNA
aatgtgcaggcaaaggaagg

SEQ ID NO: 9299 - DNA, 20 bp, synthetic construct
  misc_feature 1..20: note = chemically synthesized
  source 1..20: mol_type = other DNA
gtgcaggcaaaggaaggagg

SEQ ID NO: 9300 - DNA, 20 bp, synthetic construct
  misc_feature 1..20: note = chemically synthesized
  source 1..20: mol_type = other DNA
aggcaaaggaaggaggaaga

SEQ ID NO: 9301 - DNA, 20 bp, synthetic construct
  misc_feature 1..20: note = chemically synthesized
  source 1..20: mol_type = other DNA
agacaacataacattgtctt

SEQ ID NO: 9302 - DNA, 20 bp, synthetic construct
  misc_feature 1..20: note = chemically synthesized
  source 1..20: mol_type = other DNA
taatcattatgcctttaatt

SEQ ID NO: 9303 - DNA, 20 bp, synthetic construct
  misc_feature 1..20: note = chemically synthesized
  source 1..20: mol_type = other DNA
aattgagcacattattttct

SEQ ID NO: 9304 - DNA, 20 bp, synthetic construct
  misc_feature 1..20: note = chemically synthesized
  source 1..20: mol_type = other DNA
attattttctcagtaattgt

SEQ ID NO: 9305 - DNA, 20 bp, synthetic construct
  misc_feature 1..20: note = chemically synthesized
  source 1..20: mol_type = other DNA
tattttctcagtaattgttg

SEQ ID NO: 9306 - DNA, 20 bp, synthetic construct
  misc_feature 1..20: note = chemically synthesized
  source 1..20: mol_type = other DNA
taattgttggagtttaatcg

SEQ ID NO: 9307 - DNA, 20 bp, synthetic construct
  misc_feature 1..20: note = chemically synthesized
  source 1..20: mol_type = other DNA
ttaatcgtagcattaccctt

SEQ ID NO: 9308 - DNA, 20 bp, synthetic construct
  misc_feature 1..20: note = chemically synthesized
  source 1..20: mol_type = other DNA
taatcgtagcattacccttg

SEQ ID NO: 9309 - DNA, 20 bp, synthetic construct
  misc_feature 1..20: note = chemically synthesized
  source 1..20: mol_type = other DNA
ttacccttgaggctatgtct

SEQ ID NO: 9310 - DNA, 20 bp, synthetic construct
  misc_feature 1..20: note = chemically synthesized
  source 1..20: mol_type = other DNA
tacccttgaggctatgtctt

SEQ ID NO: 9311 - DNA, 20 bp, synthetic construct
  misc_feature 1..20: note = chemically synthesized
  source 1..20: mol_type = other DNA
acccttgaggctatgtctta

SEQ ID NO: 9312 - DNA, 20 bp, synthetic construct
  misc_feature 1..20: note = chemically synthesized
  source 1..20: mol_type = other DNA
tgaggctatgtcttagggtt

SEQ ID NO: 9313 - DNA, 20 bp, synthetic construct
  misc_feature 1..20: note = chemically synthesized
  source 1..20: mol_type = other DNA
gaggctatgtcttagggttg

SEQ ID NO: 9314 - DNA, 20 bp, synthetic construct
  misc_feature 1..20: note = chemically synthesized
  source 1..20: mol_type = other DNA
cttagggttgaggtcttccc

SEQ ID NO: 9315 - DNA, 20 bp, synthetic construct
  misc_feature 1..20: note = chemically synthesized
  source 1..20: mol_type = other DNA
ggtcttccctagaacctctg

SEQ ID NO: 9316 - DNA, 20 bp, synthetic construct
  misc_feature 1..20: note = chemically synthesized
  source 1..20: mol_type = other DNA
ccctagaacctctgcagtgc

SEQ ID NO: 9317 - DNA, 20 bp, synthetic construct
  misc_feature 1..20: note = chemically synthesized
  source 1..20: mol_type = other DNA
gccagtattatctttgtatc

SEQ ID NO: 9318 - DNA, 20 bp, synthetic construct
  misc_feature 1..20: note = chemically synthesized
  source 1..20: mol_type = other DNA
cagtattatctttgtatcaa

SEQ ID NO: 9319 - DNA, 20 bp, synthetic construct
  misc_feature 1..20: note = chemically synthesized
  source 1..20: mol_type = other DNA
tcttgataatttctgctctt

SEQ ID NO: 9320 - DNA, 20 bp, synthetic construct
  misc_feature 1..20: note = chemically synthesized
  source 1..20: mol_type = other DNA
ttgataatttctgctctttg

SEQ ID NO: 9321 - DNA, 20 bp, synthetic construct
  misc_feature 1..20: note = chemically synthesized
  source 1..20: mol_type = other DNA
tgataatttctgctctttgg

SEQ ID NO: 9322 - DNA, 20 bp, synthetic construct
  misc_feature 1..20: note = chemically synthesized
  source 1..20: mol_type = other DNA
taatttctgctctttggagg

SEQ ID NO: 9323 - DNA, 20 bp, synthetic construct
  misc_feature 1..20: note = chemically synthesized
  source 1..20: mol_type = other DNA
tttctgctctttggaggtag

SEQ ID NO: 9324 - DNA, 20 bp, synthetic construct
  misc_feature 1..20: note = chemically synthesized
  source 1..20: mol_type = other DNA
tcacccattaatgccttgta

SEQ ID NO: 9325 - DNA, 20 bp, synthetic construct
  misc_feature 1..20: note = chemically synthesized
  source 1..20: mol_type = other DNA
gtactctttgtaaaataaac

SEQ ID NO: 9326 - DNA, 20 bp, synthetic construct
  misc_feature 1..20: note = chemically synthesized
  source 1..20: mol_type = other DNA
aaacaagtgctccctatctg

SEQ ID NO: 9327 - DNA, 20 bp, synthetic construct
  misc_feature 1..20: note = chemically synthesized
  source 1..20: mol_type = other DNA
acaagtgctccctatctgta

SEQ ID NO: 9328 - DNA, 20 bp, synthetic construct
  misc_feature 1..20: note = chemically synthesized
  source 1..20: mol_type = other DNA
gctccctatctgtagagcct

SEQ ID NO: 9329 - DNA, 20 bp, synthetic construct
  misc_feature 1..20: note = chemically synthesized
  source 1..20: mol_type = other DNA
ctccctatctgtagagcctc

SEQ ID NO: 9330 - DNA, 20 bp, synthetic construct
  misc_feature 1..20: note = chemically synthesized
  source 1..20: mol_type = other DNA
caggaaccttcttacacacc

SEQ ID NO: 9331 - DNA, 20 bp, synthetic construct
  misc_feature 1..20: note = chemically synthesized
  source 1..20: mol_type = other DNA
cctggacaaaaaaatgaaat

SEQ ID NO: 9332 - DNA, 20 bp, synthetic construct
  misc_feature 1..20: note = chemically synthesized
  source 1..20: mol_type = other DNA
atgaaataagtgaaattaat

SEQ ID NO: 9333 - DNA, 20 bp, synthetic construct
  misc_feature 1..20: note = chemically synthesized
  source 1..20: mol_type = other DNA
tgaaataagtgaaattaatc

SEQ ID NO: 9334 - DNA, 20 bp, synthetic construct
  misc_feature 1..20: note = chemically synthesized
  source 1..20: mol_type = other DNA
aataagtgaaattaatcagg

SEQ ID NO: 9335 - DNA, 20 bp, synthetic construct
  misc_feature 1..20: note = chemically synthesized
  source 1..20: mol_type = other DNA
gtgaaattaatcaggaagtt

SEQ ID NO: 9336 - DNA, 20 bp, synthetic construct
  misc_feature 1..20: note = chemically synthesized
  source 1..20: mol_type = other DNA
ttgagctgaacattctttat

SEQ ID NO: 9337 - DNA, 20 bp, synthetic construct
  misc_feature 1..20: note = chemically synthesized
  source 1..20: mol_type = other DNA
tgagctgaacattctttatt

SEQ ID NO: 9338 - DNA, 20 bp, synthetic construct
  misc_feature 1..20: note = chemically synthesized
  source 1..20: mol_type = other DNA
gctgaacattctttattagg

SEQ ID NO: 9339 - DNA, 20 bp, synthetic construct
  misc_feature 1..20: note = chemically synthesized
  source 1..20: mol_type = other DNA
gaacattctttattaggcag

SEQ ID NO: 9340 - DNA, 20 bp, synthetic construct
  misc_feature 1..20: note = chemically synthesized
  source 1..20: mol_type = other DNA
aggcagaagccatacccttg

SEQ ID NO: 9341 - DNA, 20 bp, synthetic construct
  misc_feature 1..20: note = chemically synthesized
  source 1..20: mol_type = other DNA
cagaagccatacccttgaag

SEQ ID NO: 9342 - DNA, 20 bp, synthetic construct
  misc_feature 1..20: note = chemically synthesized
  source 1..20: mol_type = other DNA
agaagccatacccttgaagt

SEQ ID NO: 9343 - DNA, 20 bp, synthetic construct
  misc_feature 1..20: note = chemically synthesized
  source 1..20: mol_type = other DNA
gaagtaggcattgtgttccc

SEQ ID NO: 9344 - DNA, 20 bp, synthetic construct
  misc_feature 1..20: note = chemically synthesized
  source 1..20: mol_type = other DNA
aggcattgtgttcccaagtt

SEQ ID NO: 9345 - DNA, 20 bp, synthetic construct
  misc_feature 1..20: note = chemically synthesized
  source 1..20: mol_type = other DNA
gtgttcccaagttcagaaaa

SEQ ID NO: 9346 - DNA, 20 bp, synthetic construct
  misc_feature 1..20: note = chemically synthesized
  source 1..20: mol_type = other DNA
caagttcagaaaatagaatc

SEQ ID NO: 9347 - DNA, 20 bp, synthetic construct
  misc_feature 1..20: note = chemically synthesized
  source 1..20: mol_type = other DNA
aagttcagaaaatagaatct

SEQ ID NO: 9348 - DNA, 20 bp, synthetic construct
  misc_feature 1..20: note = chemically synthesized
  source 1..20: mol_type = other DNA
agttcagaaaatagaatcta

SEQ ID NO: 9349 - DNA, 20 bp, synthetic construct
  misc_feature 1..20: note = chemically synthesized
  source 1..20: mol_type = other DNA
gaaaatagaatctagggaaa

SEQ ID NO: 9350 - DNA, 20 bp, synthetic construct
  misc_feature 1..20: note = chemically synthesized
  source 1..20: mol_type = other DNA
aaaatagaatctagggaaat

SEQ ID NO: 9351 - DNA, 20 bp, synthetic construct
  misc_feature 1..20: note = chemically synthesized
  source 1..20: mol_type = other DNA
aaatagaatctagggaaata

SEQ ID NO: 9352 - DNA, 20 bp, synthetic construct
  misc_feature 1..20: note = chemically synthesized
  source 1..20: mol_type = other DNA
agggaaatagggtcttctta

SEQ ID NO: 9353 - DNA, 20 bp, synthetic construct
  misc_feature 1..20: note = chemically synthesized
  source 1..20: mol_type = other DNA
tagggtcttcttatggttat

SEQ ID NO: 9354 - DNA, 20 bp, synthetic construct
  misc_feature 1..20: note = chemically synthesized
  source 1..20: mol_type = other DNA
agggtcttcttatggttatc

SEQ ID NO: 9355 - DNA, 20 bp, synthetic construct
  misc_feature 1..20: note = chemically synthesized
  source 1..20: mol_type = other DNA
ttcttatggttatcaggaaa

SEQ ID NO: 9356 - DNA, 20 bp, synthetic construct
  misc_feature 1..20: note = chemically synthesized
  source 1..20: mol_type = other DNA
atggttatcaggaaacagtc

SEQ ID NO: 9357 - DNA, 20 bp, synthetic construct
  misc_feature 1..20: note = chemically synthesized
  source 1..20: mol_type = other DNA
tggttatcaggaaacagtcc

SEQ ID NO: 9358 - DNA, 20 bp, synthetic construct
  misc_feature 1..20: note = chemically synthesized
  source 1..20: mol_type = other DNA
gaaacagtccaggatctcaa

SEQ ID NO: 9359 - DNA, 20 bp, synthetic construct
  misc_feature 1..20: note = chemically synthesized
  source 1..20: mol_type = other DNA
aggatctcaatggtacttgt

SEQ ID NO: 9360 - DNA, 20 bp, synthetic construct
  misc_feature 1..20: note = chemically synthesized
  source 1..20: mol_type = other DNA
tctcaatggtacttgtgagc

SEQ ID NO: 9361 - DNA, 20 bp, synthetic construct
  misc_feature 1..20: note = chemically synthesized
  source 1..20: mol_type = other DNA
ctcaatggtacttgtgagcc

SEQ ID NO: 9362 - DNA, 20 bp, synthetic construct
  misc_feature 1..20: note = chemically synthesized
  source 1..20: mol_type = other DNA
tcaatggtacttgtgagcca

SEQ ID NO: 9363 - DNA, 20 bp, synthetic construct
  misc_feature 1..20: note = chemically synthesized
  source 1..20: mol_type = other DNA
gtacttgtgagccagggcat

SEQ ID NO: 9364 - DNA, 20 bp, synthetic construct
  misc_feature 1..20: note = chemically synthesized
  source 1..20: mol_type = other DNA
agccagggcattagccacac

SEQ ID NO: 9365 - DNA, 20 bp, synthetic construct
  misc_feature 1..20: note = chemically synthesized
  source 1..20: mol_type = other DNA
caccagccaccaccttctga

SEQ ID NO: 9366 - DNA, 20 bp, synthetic construct
  misc_feature 1..20: note = chemically synthesized
  source 1..20: mol_type = other DNA
accagccaccaccttctgat

SEQ ID NO: 9367 - DNA, 20 bp, synthetic construct
  misc_feature 1..20: note = chemically synthesized
  source 1..20: mol_type = other DNA
agccaccaccttctgatagg

SEQ ID NO: 9368 - DNA, 20 bp, synthetic construct
  misc_feature 1..20: note = chemically synthesized
  source 1..20: mol_type = other DNA
tgataggcagcctgcatttg

SEQ ID NO: 9369 - DNA, 20 bp, synthetic construct
  misc_feature 1..20: note = chemically synthesized
  source 1..20: mol_type = other DNA
gataggcagcctgcatttgt

SEQ ID NO: 9370 - DNA, 20 bp, synthetic construct
  misc_feature 1..20: note = chemically synthesized
  source 1..20: mol_type = other DNA
ataggcagcctgcatttgtg

SEQ ID NO: 9371 - DNA, 20 bp, synthetic construct
  misc_feature 1..20: note = chemically synthesized
  source 1..20: mol_type = other DNA
gtggggtgaattccttgcca

SEQ ID NO: 9372 - DNA, 20 bp, synthetic construct
  misc_feature 1..20: note = chemically synthesized
  source 1..20: mol_type = other DNA
tgaattccttgccaaagttg

SEQ ID NO: 9373 - DNA, 20 bp, synthetic construct
  misc_feature 1..20: note = chemically synthesized
  source 1..20: mol_type = other DNA
gaattccttgccaaagttgc

SEQ ID NO: 9374 - DNA, 20 bp, synthetic construct
  misc_feature 1..20: note = chemically synthesized
  source 1..20: mol_type = other DNA
tccttgccaaagttgcgggc

SEQ ID NO: 9375 - DNA, 20 bp, synthetic construct
  misc_feature 1..20: note = chemically synthesized
  source 1..20: mol_type = other DNA
ttgcgggccagcacacacac

SEQ ID NO: 9376 - DNA, 20 bp, synthetic construct
  misc_feature 1..20: note = chemically synthesized
  source 1..20: mol_type = other DNA
cacacaccagcacattgccc

SEQ ID NO: 9377 - DNA, 20 bp, synthetic construct
  misc_feature 1..20: note = chemically synthesized
  source 1..20: mol_type = other DNA
cacaccagcacattgcccaa

SEQ ID NO: 9378 - DNA, 20 bp, synthetic construct
  misc_feature 1..20: note = chemically synthesized
  source 1..20: mol_type = other DNA
agcacattgcccaagagctg

SEQ ID NO: 9379 - DNA, 20 bp, synthetic construct
  misc_feature 1..20: note = chemically synthesized
  source 1..20: mol_type = other DNA
cacattgcccaagagctgcg

SEQ ID NO: 9380 - DNA, 20 bp, synthetic construct
  misc_feature 1..20: note = chemically synthesized
  source 1..20: mol_type = other DNA
attgcccaagagctgcggag

SEQ ID NO: 9381 - DNA, 20 bp, synthetic construct
  misc_feature 1..20: note = chemically synthesized
  source 1..20: mol_type = other DNA
tgcccaagagctgcggagaa

SEQ ID NO: 9382 - DNA, 20 bp, synthetic construct
  misc_feature 1..20: note = chemically synthesized
  source 1..20: mol_type = other DNA
gcccaagagctgcggagaag

SEQ ID NO: 9383 - DNA, 20 bp, synthetic construct
  misc_feature 1..20: note = chemically synthesized
  source 1..20: mol_type = other DNA
caagagctgcggagaagagg

SEQ ID NO: 9384 - DNA, 20 bp, synthetic construct
  misc_feature 1..20: note = chemically synthesized
  source 1..20: mol_type = other DNA
aagagctgcggagaagaggt

SEQ ID NO: 9385 - DNA, 20 bp, synthetic construct
  misc_feature 1..20: note = chemically synthesized
  source 1..20: mol_type = other DNA
agctgcggagaagaggtagg

SEQ ID NO: 9386 - DNA, 20 bp, synthetic construct
  misc_feature 1..20: note = chemically synthesized
  source 1..20: mol_type = other DNA
ggtaggcagatacatgcata

SEQ ID NO: 9387 - DNA, 20 bp, synthetic construct
  misc_feature 1..20: note = chemically synthesized
  source 1..20: mol_type = other DNA
agatacatgcatatggttaa

SEQ ID NO: 9388 - DNA, 20 bp, synthetic construct
  misc_feature 1..20: note = chemically synthesized
  source 1..20: mol_type = other DNA
atacatgcatatggttaaca

SEQ ID NO: 9389 - DNA, 20 bp, synthetic construct
  misc_feature 1..20: note = chemically synthesized
  source 1..20: mol_type = other DNA
atatggttaacagagaaata

SEQ ID NO: 9390 - DNA, 20 bp, synthetic construct
  misc_feature 1..20: note = chemically synthesized
  source 1..20: mol_type = other DNA
gttaacagagaaataaagac

SEQ ID NO: 9391 - DNA, 20 bp, synthetic construct
  misc_feature 1..20: note = chemically synthesized
  source 1..20: mol_type = other DNA
agaaataaagactggcttct

SEQ ID NO: 9392 - DNA, 20 bp, synthetic construct
  misc_feature 1..20: note = chemically synthesized
  source 1..20: mol_type = other DNA
agactggcttctgagaaact

SEQ ID NO: 9393 - DNA, 20 bp, synthetic construct
  misc_feature 1..20: note = chemically synthesized
  source 1..20: mol_type = other DNA
atttttttctgcccaaatct

SEQ ID NO: 9394 - DNA, 20 bp, synthetic construct
  misc_feature 1..20: note = chemically synthesized
  source 1..20: mol_type = other DNA
tcttagacaaaactgatccc

SEQ ID NO: 9395 - DNA, 20 bp, synthetic construct
  misc_feature 1..20: note = chemically synthesized
  source 1..20: mol_type = other DNA
cttagacaaaactgatcccc

SEQ ID NO: 9396 - DNA, 20 bp, synthetic construct
  misc_feature 1..20: note = chemically synthesized
  source 1..20: mol_type = other DNA
gatccccaggttattcccat

SEQ ID NO: 9397 - DNA, 20 bp, synthetic construct
  misc_feature 1..20: note = chemically synthesized
  source 1..20: mol_type = other DNA
ttattcccatcagcataaat

SEQ ID NO: 9398 - DNA, 20 bp, synthetic construct
  misc_feature 1..20: note = chemically synthesized
  source 1..20: mol_type = other DNA
acatcctctatgtacttaac

SEQ ID NO: 9399 - DNA, 20 bp, synthetic construct
  misc_feature 1..20: note = chemically synthesized
  source 1..20: mol_type = other DNA
ctatgtacttaactagcatg

SEQ ID NO: 9400 - DNA, 20 bp, synthetic construct
  misc_feature 1..20: note = chemically synthesized
  source 1..20: mol_type = other DNA
tatacaaattaattccaaat

SEQ ID NO: 9401 - DNA, 20 bp, synthetic construct
  misc_feature 1..20: note = chemically synthesized
  source 1..20: mol_type = other DNA
tttaattttgtatgtgtata

SEQ ID NO: 9402 - DNA, 20 bp, synthetic construct
  misc_feature 1..20: note = chemically synthesized
  source 1..20: mol_type = other DNA
tacaaattaattactataaa

SEQ ID NO: 9403 - DNA, 20 bp, synthetic construct
  misc_feature 1..20: note = chemically synthesized
  source 1..20: mol_type = other DNA
aattactataaacagattaa

SEQ ID NO: 9404 - DNA, 20 bp, synthetic construct
  misc_feature 1..20: note = chemically synthesized
  source 1..20: mol_type = other DNA
atacaaattaattgattaat

SEQ ID NO: 9405 - DNA, 20 bp, synthetic construct
  misc_feature 1..20: note = chemically synthesized
  source 1..20: mol_type = other DNA
ttgattaatcagtgtgatga

SEQ ID NO: 9406 - DNA, 20 bp, synthetic construct
  misc_feature 1..20: note = chemically synthesized
  source 1..20: mol_type = other DNA
tgattaatcagtgtgatgat

SEQ ID NO: 9407 - DNA, 20 bp, synthetic construct
  misc_feature 1..20: note = chemically synthesized
  source 1..20: mol_type = other DNA
tgtgatgatgggctgtctcc

SEQ ID NO: 9408 - DNA, 20 bp, synthetic construct
  misc_feature 1..20: note = chemically synthesized
  source 1..20: mol_type = other DNA
aacgacttctgccccacctc

SEQ ID NO: 9409 - DNA, 20 bp, synthetic construct
  misc_feature 1..20: note = chemically synthesized
  source 1..20: mol_type = other DNA
ccacctccagtgtaactgcc

SEQ ID NO: 9410 - DNA, 20 bp, synthetic construct
  misc_feature 1..20: note = chemically synthesized
  source 1..20: mol_type = other DNA
cctttccattccatttacta

SEQ ID NO: 9411 - DNA, 20 bp, synthetic construct
  misc_feature 1..20: note = chemically synthesized
  source 1..20: mol_type = other DNA
ccttattgtaaaatgattta

SEQ ID NO: 9412 - DNA, 20 bp, synthetic construct
  misc_feature 1..20: note = chemically synthesized
  source 1..20: mol_type = other DNA
atgatttatagcctctaaaa

SEQ ID NO: 9413 - DNA, 20 bp, synthetic construct
  misc_feature 1..20: note = chemically synthesized
  source 1..20: mol_type = other DNA
attctatgcctctcatcttt

SEQ ID NO: 9414 - DNA, 20 bp, synthetic construct
  misc_feature 1..20: note = chemically synthesized
  source 1..20: mol_type = other DNA
tatgcctctcatctttgagt

SEQ ID NO: 9415 - DNA, 20 bp, synthetic construct
  misc_feature 1..20: note = chemically synthesized
  source 1..20: mol_type = other DNA
tgcctctcatctttgagttg

SEQ ID NO: 9416 - DNA, 20 bp, synthetic construct
  misc_feature 1..20: note = chemically synthesized
  source 1..20: mol_type = other DNA
gagcctctcccatacccatg

SEQ ID NO: 9417 - DNA, 20 bp, synthetic construct
  misc_feature 1..20: note = chemically synthesized
  source 1..20: mol_type = other DNA
gcctctcccatacccatgtg

SEQ ID NO: 9418 - DNA, 20 bp, synthetic construct
  misc_feature 1..20: note = chemically synthesized
  source 1..20: mol_type = other DNA
ctctcccatacccatgtgga

SEQ ID NO: 9419 - DNA, 20 bp, synthetic construct
  misc_feature 1..20: note = chemically synthesized
  source 1..20: mol_type = other DNA
atacccatgtggagagacaa

SEQ ID NO: 9420 - DNA, 20 bp, synthetic construct
  misc_feature 1..20: note = chemically synthesized
  source 1..20: mol_type = other DNA
tacccatgtggagagacaaa

SEQ ID NO: 9421 - DNA, 20 bp, synthetic construct
  misc_feature 1..20: note = chemically synthesized
  source 1..20: mol_type = other DNA
agagacaaaaggattattct

SEQ ID NO: 9422 - DNA, 20 bp, synthetic construct
  misc_feature 1..20: note = chemically synthesized
  source 1..20: mol_type = other DNA
caaaaggattattctaagtg

SEQ ID NO: 9423 - DNA, 20 bp, synthetic construct
  misc_feature 1..20: note = chemically synthesized
  source 1..20: mol_type = other DNA
gattattctaagtgcagaat

SEQ ID NO: 9424 - DNA, 20 bp, synthetic construct
  misc_feature 1..20: note = chemically synthesized
  source 1..20: mol_type = other DNA
tattctaagtgcagaattag

SEQ ID NO: 9425 - DNA, 20 bp, synthetic construct
  misc_feature 1..20: note = chemically synthesized
  source 1..20: mol_type = other DNA
attctaagtgcagaattagc

SEQ ID NO: 9426 - DNA, 20 bp, synthetic construct
  misc_feature 1..20: note = chemically synthesized
  source 1..20: mol_type = other DNA
taagtgcagaattagcaggt

SEQ ID NO: 9427 - DNA, 20 bp, synthetic construct
  misc_feature 1..20: note = chemically synthesized
  source 1..20: mol_type = other DNA
agtgcagaattagcaggtga

SEQ ID NO: 9428 - DNA, 20 bp, synthetic construct
  misc_feature 1..20: note = chemically synthesized
  source 1..20: mol_type = other DNA
cagaattagcaggtgagagc

SEQ ID NO: 9429 - DNA, 20 bp, synthetic construct
  misc_feature 1..20: note = chemically synthesized
  source 1..20: mol_type = other DNA
agagctggtatgcataattt

SEQ ID NO: 9430 - DNA, 20 bp, synthetic construct
  misc_feature 1..20: note = chemically synthesized
  source 1..20: mol_type = other DNA
tgcataatttgagttgttgt

SEQ ID NO: 9431 - DNA, 20 bp, synthetic construct
  misc_feature 1..20: note = chemically synthesized
  source 1..20: mol_type = other DNA
cataatttgagttgttgtta

SEQ ID NO: 9432 - DNA, 20 bp, synthetic construct
  misc_feature 1..20: note = chemically synthesized
  source 1..20: mol_type = other DNA
aatttgagttgttgttagag

SEQ ID NO: 9433 - DNA, 20 bp, synthetic construct
  misc_feature 1..20: note = chemically synthesized
  source 1..20: mol_type = other DNA
atttgagttgttgttagaga

SEQ ID NO: 9434 - DNA, 20 bp, synthetic construct
  misc_feature 1..20: note = chemically synthesized
  source 1..20: mol_type = other DNA
ttgttagagaaggaaaaatg

SEQ ID NO: 9435 - DNA, 20 bp, synthetic construct
  misc_feature 1..20: note = chemically synthesized
  source 1..20: mol_type = other DNA
tgttagagaaggaaaaatga

SEQ ID NO: 9436 - DNA, 20 bp, synthetic construct
  misc_feature 1..20: note = chemically synthesized
  source 1..20: mol_type = other DNA
gttagagaaggaaaaatgaa

SEQ ID NO: 9437 - DNA, 20 bp, synthetic construct
  misc_feature 1..20: note = chemically synthesized
  source 1..20: mol_type = other DNA
tagagaaggaaaaatgaagg

SEQ ID NO: 9438 - DNA, 20 bp, synthetic construct
  misc_feature 1..20: note = chemically synthesized
  source 1..20: mol_type = other DNA
agagaaggaaaaatgaaggg

SEQ ID NO: 9439 - DNA, 20 bp, synthetic construct
  misc_feature 1..20: note = chemically synthesized
  source 1..20: mol_type = other DNA
gagaaggaaaaatgaaggga

SEQ ID NO: 9440 - DNA, 20 bp, synthetic construct
  misc_feature 1..20: note = chemically synthesized
  source 1..20: mol_type = other DNA
agaaggaaaaatgaagggag

SEQ ID NO: 9441 - DNA, 20 bp, synthetic construct
  misc_feature 1..20: note = chemically synthesized
  source 1..20: mol_type = other DNA
gaaggaaaaatgaagggagg

SEQ ID NO: 9442 - DNA, 20 bp, synthetic construct
  misc_feature 1..20: note = chemically synthesized
  source 1..20: mol_type = other DNA
gaaaaatgaagggagggggt

SEQ ID NO: 9443 - DNA, 20 bp, synthetic construct
  misc_feature 1..20: note = chemically synthesized
  source 1..20: mol_type = other DNA
aaaaatgaagggagggggtt

SEQ ID NO: 9444 - DNA, 20 bp, synthetic construct
  misc_feature 1..20: note = chemically synthesized
  source 1..20: mol_type = other DNA
aaatgaagggagggggttgg

SEQ ID NO: 9445 - DNA, 20 bp, synthetic construct
  misc_feature 1..20: note = chemically synthesized
  source 1..20: mol_type = other DNA
atgaagggagggggttggga

SEQ ID NO: 9446 - DNA, 20 bp, synthetic construct
  misc_feature 1..20: note = chemically synthesized
  source 1..20: mol_type = other DNA
agggagggggttgggagaga

SEQ ID NO: 9447 - DNA, 20 bp, synthetic construct
  misc_feature 1..20: note = chemically synthesized
  source 1..20: mol_type = other DNA
agggggttgggagagaaaga

SEQ ID NO: 9448 - DNA, 20 bp, synthetic construct
  misc_feature 1..20: note = chemically synthesized
  source 1..20: mol_type = other DNA
gggggttgggagagaaagac

SEQ ID NO: 9449 - DNA, 20 bp, synthetic construct
  misc_feature 1..20: note = chemically synthesized
  source 1..20: mol_type = other DNA
ggatattaaataatttaaaa

SEQ ID NO: 9450 - DNA, 20 bp, synthetic construct
  misc_feature 1..20: note = chemically synthesized
  source 1..20: mol_type = other DNA
attaaataatttaaaatagc

SEQ ID NO: 9451 - DNA, 20 bp, synthetic construct
  misc_feature 1..20: note = chemically synthesized
  source 1..20: mol_type = other DNA
atttaaaatagcaagattgt

SEQ ID NO: 9452 - DNA, 20 bp, synthetic construct
  misc_feature 1..20: note = chemically synthesized
  source 1..20: mol_type = other DNA
tttaaaatagcaagattgtg

SEQ ID NO: 9453 - DNA, 20 bp, synthetic construct
  misc_feature 1..20: note = chemically synthesized
  source 1..20: mol_type = other DNA
aaaatagcaagattgtgagg

SEQ ID NO: 9454 - DNA, 20 bp, synthetic construct
  misc_feature 1..20: note = chemically synthesized
  source 1..20: mol_type = other DNA
aaatagcaagattgtgagga

SEQ ID NO: 9455 - DNA, 20 bp, synthetic construct
  misc_feature 1..20: note = chemically synthesized
  source 1..20: mol_type = other DNA
ttgtgaggaaggaaaaaatg

SEQ ID NO: 9456 - DNA, 20 bp, synthetic construct
  misc_feature 1..20: note = chemically synthesized
  source 1..20: mol_type = other DNA
ataaaaaattaacaaaattt

SEQ ID NO: 9457 - DNA, 20 bp, synthetic construct
  misc_feature 1..20: note = chemically synthesized
  source 1..20: mol_type = other DNA
aaaaattaacaaaattttag

SEQ ID NO: 9458 - DNA, 20 bp, synthetic construct
  misc_feature 1..20: note = chemically synthesized
  source 1..20: mol_type = other DNA
aagcattaaatgataaaata

SEQ ID NO: 9459 - DNA, 20 bp, synthetic construct
  misc_feature 1..20: note = chemically synthesized
  source 1..20: mol_type = other DNA
atagtaaaatgacaaaaatg

SEQ ID NO: 9460 - DNA, 20 bp, synthetic construct
  misc_feature 1..20: note = chemically synthesized
  source 1..20: mol_type = other DNA
tagtaaaatgacaaaaatgt

SEQ ID NO: 9461 - DNA, 20 bp, synthetic construct
  misc_feature 1..20: note = chemically synthesized
  source 1..20: mol_type = other DNA
gtaaaatgacaaaaatgtgg

SEQ ID NO: 9462 - DNA, 20 bp, synthetic construct
  misc_feature 1..20: note = chemically synthesized
  source 1..20: mol_type = other DNA
aaatgacaaaaatgtgggag

SEQ ID NO: 9463 - DNA, 20 bp, synthetic construct
  misc_feature 1..20: note = chemically synthesized
  source 1..20: mol_type = other DNA
atgacaaaaatgtgggagaa

SEQ ID NO: 9464 - DNA, 20 bp, synthetic construct
  misc_feature 1..20: note = chemically synthesized
  source 1..20: mol_type = other DNA
acaaaaatgtgggagaagag

SEQ ID NO: 9465 - DNA, 20 bp, synthetic construct
  misc_feature 1..20: note = chemically synthesized
  source 1..20: mol_type = other DNA
caaaaatgtgggagaagagc

SEQ ID NO: 9466 - DNA, 20 bp, synthetic construct
  misc_feature 1..20: note = chemically synthesized
  source 1..20: mol_type = other DNA
aaatgtgggagaagagcagg

SEQ ID NO: 9467 - DNA, 20 bp, synthetic construct
  misc_feature 1..20: note = chemically synthesized
  source 1..20: mol_type = other DNA
aatgtgggagaagagcaggt

SEQ ID NO: 9468 - DNA, 20 bp, synthetic construct
  misc_feature 1..20: note = chemically synthesized
  source 1..20: mol_type = other DNA
ggagaagagcaggtaggtaa

SEQ ID NO: 9469 - DNA, 20 bp, synthetic construct
  misc_feature 1..20: note = chemically synthesized
  source 1..20: mol_type = other DNA
aggtaaaagaaccaaaatgt

SEQ ID NO: 9470 - DNA, 20 bp, synthetic construct
  misc_feature 1..20: note = chemically synthesized
  source 1..20: mol_type = other DNA
aaagaaccaaaatgtaagat

SEQ ID NO: 9471 - DNA, 20 bp, synthetic construct
  misc_feature 1..20: note = chemically synthesized
  source 1..20: mol_type = other DNA
aaccaaaatgtaagattaga

SEQ ID NO: 9472 - DNA, 20 bp, synthetic construct
  misc_feature 1..20: note = chemically synthesized
  source 1..20: mol_type = other DNA
atgtaagattagaaagtaaa

SEQ ID NO: 9473 - DNA, 20 bp, synthetic construct
  misc_feature 1..20: note = chemically synthesized
  source 1..20: mol_type = other DNA
gtaagattagaaagtaaaaa

SEQ ID NO: 9474 - DNA, 20 bp, synthetic construct
  misc_feature 1..20: note = chemically synthesized
  source 1..20: mol_type = other DNA
attagaaagtaaaaagagaa

SEQ ID NO: 9475 - DNA, 20 bp, synthetic construct
  misc_feature 1..20: note = chemically synthesized
  source 1..20: mol_type = other DNA
aaagtaaaaagagaaaagtg

SEQ ID NO: 9476 - DNA, 20 bp, synthetic construct
  misc_feature 1..20: note = chemically synthesized
  source 1..20: mol_type = other DNA
gagaaaagtgaagcatctcc

SEQ ID NO: 9477 - DNA, 20 bp, synthetic construct
  misc_feature 1..20: note = chemically synthesized
  source 1..20: mol_type = other DNA
catctcctggactcaccctg

SEQ ID NO: 9478 - DNA, 20 bp, synthetic construct
  misc_feature 1..20: note = chemically synthesized
  source 1..20: mol_type = other DNA
tggactcaccctgaagttct

SEQ ID NO: 9479 - DNA, 20 bp, synthetic construct
  misc_feature 1..20: note = chemically synthesized
  source 1..20: mol_type = other DNA
ggactcaccctgaagttctc

SEQ ID NO: 9480 - DNA, 20 bp, synthetic construct
  misc_feature 1..20: note = chemically synthesized
  source 1..20: mol_type = other DNA
aagttctcaggatccacgtg

SEQ ID NO: 9481 - DNA, 20 bp, synthetic construct
  misc_feature 1..20: note = chemically synthesized
  source 1..20: mol_type = other DNA
gatccacgtgcagcttgtca

SEQ ID NO: 9482 - DNA, 20 bp, synthetic construct
  misc_feature 1..20: note = chemically synthesized
  source 1..20: mol_type = other DNA
acgtgcagcttgtcacagtg

SEQ ID NO: 9483 - DNA, 20 bp, synthetic construct
  misc_feature 1..20: note = chemically synthesized
  source 1..20: mol_type = other DNA
ttgtcacagtgcagctcact

SEQ ID NO: 9484 - DNA, 20 bp, synthetic construct
  misc_feature 1..20: note = chemically synthesized
  source 1..20: mol_type = other DNA
acagtgcagctcactcagct

SEQ ID NO: 9485 - DNA, 20 bp, synthetic construct
  misc_feature 1..20: note = chemically synthesized
  source 1..20: mol_type = other DNA
cagctcactcagctgagaaa

SEQ ID NO: 9486 - DNA, 20 bp, synthetic construct
  misc_feature 1..20: note = chemically synthesized
  source 1..20: mol_type = other DNA
agctgagaaaaagtgccctt

SEQ ID NO: 9487 - DNA, 20 bp, synthetic construct
  misc_feature 1..20: note = chemically synthesized
  source 1..20: mol_type = other DNA
gctgagaaaaagtgcccttg

SEQ ID NO: 9488 - DNA, 20 bp, synthetic construct
  misc_feature 1..20: note = chemically synthesized
  source 1..20: mol_type = other DNA
aaagtgcccttgaggttgtc

SEQ ID NO: 9489 - DNA, 20 bp, synthetic construct
  misc_feature 1..20: note = chemically synthesized
  source 1..20: mol_type = other DNA
aagtgcccttgaggttgtcc

SEQ ID NO: 9490 - DNA, 20 bp, synthetic construct
  misc_feature 1..20: note = chemically synthesized
  source 1..20: mol_type = other DNA
gcccttgaggttgtccaggt

SEQ ID NO: 9491 - DNA, 20 bp, synthetic construct
  misc_feature 1..20: note = chemically synthesized
  source 1..20: mol_type = other DNA
ttgaggttgtccaggtgagc

SEQ ID NO: 9492 - DNA, 20 bp, synthetic construct
  misc_feature 1..20: note = chemically synthesized
  source 1..20: mol_type = other DNA
tgaggttgtccaggtgagcc

SEQ ID NO: 9493 - DNA, 20 bp, synthetic construct
  misc_feature 1..20: note = chemically synthesized
  source 1..20: mol_type = other DNA
ggtgagccaggccatcacta

SEQ ID NO: 9494 - DNA, 20 bp, synthetic construct
  misc_feature 1..20: note = chemically synthesized
  source 1..20: mol_type = other DNA
gtgagccaggccatcactaa

SEQ ID NO: 9495 - DNA, 20 bp, synthetic construct
  misc_feature 1..20: note = chemically synthesized
  source 1..20: mol_type = other DNA
aggccatcactaaaggcacc

SEQ ID NO: 9496 - DNA, 20 bp, synthetic construct
  misc_feature 1..20: note = chemically synthesized
  source 1..20: mol_type = other DNA
acctagcaccttcttgccat

SEQ ID NO: 9497 - DNA, 20 bp, synthetic construct
  misc_feature 1..20: note = chemically synthesized
  source 1..20: mol_type = other DNA
cttgccatgagccttcacct

SEQ ID NO: 9498 - DNA, 20 bp, synthetic construct
  misc_feature 1..20: note = chemically synthesized
  source 1..20: mol_type = other DNA
ttgccatgagccttcacctt

SEQ ID NO: 9499 - DNA, 20 bp, synthetic construct
  misc_feature 1..20: note = chemically synthesized
  source 1..20: mol_type = other DNA
tgccatgagccttcacctta

SEQ ID NO: 9500 - DNA, 20 bp, synthetic construct
  misc_feature 1..20: note = chemically synthesized
  source 1..20: mol_type = other DNA
caccttagggttgcccataa

SEQ ID NO: 9501 - DNA, 20 bp, synthetic construct
  misc_feature 1..20: note = chemically synthesized
  source 1..20: mol_type = other DNA
agggttgcccataacagcat

SEQ ID NO: 9502 - DNA, 20 bp, synthetic construct
  misc_feature 1..20: note = chemically synthesized
  source 1..20: mol_type = other DNA
gggttgcccataacagcatc

SEQ ID NO: 9503 - DNA, 20 bp, synthetic construct
  misc_feature 1..20: note = chemically synthesized
  source 1..20: mol_type = other DNA
gttgcccataacagcatcag

SEQ ID NO: 9504 - DNA, 20 bp, synthetic construct
  misc_feature 1..20: note = chemically synthesized
  source 1..20: mol_type = other DNA
tgcccataacagcatcagga

SEQ ID NO: 9505 - DNA, 20 bp, synthetic construct
  misc_feature 1..20: note = chemically synthesized
  source 1..20: mol_type = other DNA
gcccataacagcatcaggag

SEQ ID NO: 9506 - DNA, 20 bp, synthetic construct
  misc_feature 1..20: note = chemically synthesized
  source 1..20: mol_type = other DNA
ataacagcatcaggagagga

SEQ ID NO: 9507 - DNA, 20 bp, synthetic construct
  misc_feature 1..20: note = chemically synthesized
  source 1..20: mol_type = other DNA
caggagaggacagatcccca

SEQ ID NO: 9508 - DNA, 20 bp, synthetic construct
  misc_feature 1..20: note = chemically synthesized
  source 1..20: mol_type = other DNA
aggagaggacagatccccaa

SEQ ID NO: 9509 - DNA, 20 bp, synthetic construct
  misc_feature 1..20: note = chemically synthesized
  source 1..20: mol_type = other DNA
acagatccccaaaggactca

SEQ ID NO: 9510 - DNA, 20 bp, synthetic construct
  misc_feature 1..20: note = chemically synthesized
  source 1..20: mol_type = other DNA
caaaggactcaaagaacctc

SEQ ID NO: 9511 - DNA, 20 bp, synthetic construct
  misc_feature 1..20: note = chemically synthesized
  source 1..20: mol_type = other DNA
aaaggactcaaagaacctct

SEQ ID NO: 9512 - DNA, 20 bp, synthetic construct
  misc_feature 1..20: note = chemically synthesized
  source 1..20: mol_type = other DNA
ctcaaagaacctctgggtcc

SEQ ID NO: 9513 - DNA, 20 bp, synthetic construct
  misc_feature 1..20: note = chemically synthesized
  source 1..20: mol_type = other DNA
tcaaagaacctctgggtcca

SEQ ID NO: 9514 - DNA, 20 bp, synthetic construct
  misc_feature 1..20: note = chemically synthesized
  source 1..20: mol_type = other DNA
caaagaacctctgggtccaa

SEQ ID NO: 9515 - DNA, 20 bp, synthetic construct
  misc_feature 1..20: note = chemically synthesized
  source 1..20: mol_type = other DNA
agaacctctgggtccaaggg

SEQ ID NO: 9516 - DNA, 20 bp, synthetic construct
  misc_feature 1..20: note = chemically synthesized
  source 1..20: mol_type = other DNA
tgggtccaagggtagaccac

SEQ ID NO: 9517 - DNA, 20 bp, synthetic construct
  misc_feature 1..20: note = chemically synthesized
  source 1..20: mol_type = other DNA
gggtagaccaccagtaatct

SEQ ID NO: 9518 - DNA, 20 bp, synthetic construct
  misc_feature 1..20: note = chemically synthesized
  source 1..20: mol_type = other DNA
ggtagaccaccagtaatctg

SEQ ID NO: 9519 - DNA, 20 bp, synthetic construct
  misc_feature 1..20: note = chemically synthesized
  source 1..20: mol_type = other DNA
gtagaccaccagtaatctga

SEQ ID NO: 9520 - DNA, 20 bp, synthetic construct
  misc_feature 1..20: note = chemically synthesized
  source 1..20: mol_type = other DNA
gaccaccagtaatctgaggg

SEQ ID NO: 9521 - DNA, 20 bp, synthetic construct
  misc_feature 1..20: note = chemically synthesized
  source 1..20: mol_type = other DNA
accaccagtaatctgagggt

SEQ ID NO: 9522 - DNA, 20 bp, synthetic construct
  misc_feature 1..20: note = chemically synthesized
  source 1..20: mol_type = other DNA
gtaatctgagggtaggaaaa

SEQ ID NO: 9523 - DNA, 20 bp, synthetic construct
  misc_feature 1..20: note = chemically synthesized
  source 1..20: mol_type = other DNA
tgagggtaggaaaacagccc

SEQ ID NO: 9524 - DNA, 20 bp, synthetic construct
  misc_feature 1..20: note = chemically synthesized
  source 1..20: mol_type = other DNA
gagggtaggaaaacagccca

SEQ ID NO: 9525 - DNA, 20 bp, synthetic construct
  misc_feature 1..20: note = chemically synthesized
  source 1..20: mol_type = other DNA
agggtaggaaaacagcccaa

SEQ ID NO: 9526 - DNA, 20 bp, synthetic construct
  misc_feature 1..20: note = chemically synthesized
  source 1..20: mol_type = other DNA
taggaaaacagcccaaggga

SEQ ID NO: 9527 - DNA, 20 bp, synthetic construct
  misc_feature 1..20: note = chemically synthesized
  source 1..20: mol_type = other DNA
ggaaaacagcccaagggaca

SEQ ID NO: 9528 - DNA, 20 bp, synthetic construct
  misc_feature 1..20: note = chemically synthesized
  source 1..20: mol_type = other DNA
aaaacagcccaagggacaga

SEQ ID NO: 9529 - DNA, 20 bp, synthetic construct
  misc_feature 1..20: note = chemically synthesized
  source 1..20: mol_type = other DNA
cagcccaagggacagagagt

SEQ ID NO: 9530 - DNA, 20 bp, synthetic construct
  misc_feature 1..20: note = chemically synthesized
  source 1..20: mol_type = other DNA
gacagagagtcagtgcctat

SEQ ID NO: 9531 - DNA, 20 bp, synthetic construct
  misc_feature 1..20: note = chemically synthesized
  source 1..20: mol_type = other DNA
tcagtgcctatcagaaaccc

SEQ ID NO: 9532 - DNA, 20 bp, synthetic construct
  misc_feature 1..20: note = chemically synthesized
  source 1..20: mol_type = other DNA
agtgcctatcagaaacccaa

SEQ ID NO: 9533 - DNA, 20 bp, synthetic construct
  misc_feature 1..20: note = chemically synthesized
  source 1..20: mol_type = other DNA
cttctctgtctacacatgcc

SEQ ID NO: 9534 - DNA, 20 bp, synthetic construct
  misc_feature 1..20: note = chemically synthesized
  source 1..20: mol_type = other DNA
cagtttccatttgcctcctt

SEQ ID NO: 9535 - DNA, 20 bp, synthetic construct
  misc_feature 1..20: note = chemically synthesized
  source 1..20: mol_type = other DNA
aaccttgataccaacctgcc

SEQ ID NO: 9536 - DNA, 20 bp, synthetic construct
  misc_feature 1..20: note = chemically synthesized
  source 1..20: mol_type = other DNA
accttgataccaacctgccc

SEQ ID NO: 9537 - DNA, 20 bp, synthetic construct
  misc_feature 1..20: note = chemically synthesized
  source 1..20: mol_type = other DNA
ccttgataccaacctgccca

SEQ ID NO: 9538 - DNA, 20 bp, synthetic construct
  misc_feature 1..20: note = chemically synthesized
  source 1..20: mol_type = other DNA
tccacgttcactttgcccca

SEQ ID NO: 9539 - DNA, 20 bp, synthetic construct
  misc_feature 1..20: note = chemically synthesized
  source 1..20: mol_type = other DNA
ccacgttcactttgccccac

SEQ ID NO: 9540 - DNA, 20 bp, synthetic construct
  misc_feature 1..20: note = chemically synthesized
  source 1..20: mol_type = other DNA
cacgttcactttgccccaca

SEQ ID NO: 9541 - DNA, 20 bp, synthetic construct
  misc_feature 1..20: note = chemically synthesized
  source 1..20: mol_type = other DNA
tttgccccacagggcattga

SEQ ID NO: 9542 - DNA, 20 bp, synthetic construct
  misc_feature 1..20: note = chemically synthesized
  source 1..20: mol_type = other DNA
gccccacagggcattgacag

SEQ ID NO: 9543 - DNA, 20 bp, synthetic construct
  misc_feature 1..20: note = chemically synthesized
  source 1..20: mol_type = other DNA
attgacagcagtcttctcct

SEQ ID NO: 9544 - DNA, 20 bp, synthetic construct
  misc_feature 1..20: note = chemically synthesized
  source 1..20: mol_type = other DNA
ttgacagcagtcttctcctc

SEQ ID NO: 9545 - DNA, 20 bp, synthetic construct
  misc_feature 1..20: note = chemically synthesized
  source 1..20: mol_type = other DNA
gacagcagtcttctcctcag

SEQ ID NO: 9546 - DNA, 20 bp, synthetic construct
  misc_feature 1..20: note = chemically synthesized
  source 1..20: mol_type = other DNA
gcagtcttctcctcaggagt

SEQ ID NO: 9547 - DNA, 20 bp, synthetic construct
  misc_feature 1..20: note = chemically synthesized
  source 1..20: mol_type = other DNA
ctcaggagtcagatgcacca

SEQ ID NO: 9548 - DNA, 20 bp, synthetic construct
  misc_feature 1..20: note = chemically synthesized
  source 1..20: mol_type = other DNA
atgcaccatggtgtctgttt

SEQ ID NO: 9549 - DNA, 20 bp, synthetic construct
  misc_feature 1..20: note = chemically synthesized
  source 1..20: mol_type = other DNA
tgcaccatggtgtctgtttg

SEQ ID NO: 9550 - DNA, 20 bp, synthetic construct
  misc_feature 1..20: note = chemically synthesized
  source 1..20: mol_type = other DNA
tggtgtctgtttgaggttgc

SEQ ID NO: 9551 - DNA, 20 bp, synthetic construct
  misc_feature 1..20: note = chemically synthesized
  source 1..20: mol_type = other DNA
gctagtgaacactgttatgt

SEQ ID NO: 9552 - DNA, 20 bp, synthetic construct
  misc_feature 1..20: note = chemically synthesized
  source 1..20: mol_type = other DNA
agtgaacactgttatgtcag

SEQ ID NO: 9553 - DNA, 20 bp, synthetic construct
  misc_feature 1..20: note = chemically synthesized
  source 1..20: mol_type = other DNA
aacactgttatgtcagaaga

SEQ ID NO: 9554 - DNA, 20 bp, synthetic construct
  misc_feature 1..20: note = chemically synthesized
  source 1..20: mol_type = other DNA
gttatgtcagaagaaagtgt

SEQ ID NO: 9555 - DNA, 20 bp, synthetic construct
  misc_feature 1..20: note = chemically synthesized
  source 1..20: mol_type = other DNA
tcagaagaaagtgtaagcaa

SEQ ID NO: 9556 - DNA, 20 bp, synthetic construct
  misc_feature 1..20: note = chemically synthesized
  source 1..20: mol_type = other DNA
ctctgccctgccttttatgc

SEQ ID NO: 9557 - DNA, 20 bp, synthetic construct
  misc_feature 1..20: note = chemically synthesized
  source 1..20: mol_type = other DNA
tggtcctgtcctccctgctc

SEQ ID NO: 9558 - DNA, 20 bp, synthetic construct
  misc_feature 1..20: note = chemically synthesized
  source 1..20: mol_type = other DNA
cctgtcctccctgctccagt

SEQ ID NO: 9559 - DNA, 20 bp, synthetic construct
  misc_feature 1..20: note = chemically synthesized
  source 1..20: mol_type = other DNA
gtcctccctgctccagtgag

SEQ ID NO: 9560 - DNA, 20 bp, synthetic construct
  misc_feature 1..20: note = chemically synthesized
  source 1..20: mol_type = other DNA
tcctccctgctccagtgagc

SEQ ID NO: 9561 - DNA, 20 bp, synthetic construct
  misc_feature 1..20: note = chemically synthesized
  source 1..20: mol_type = other DNA
ccctgctccagtgagcaggt

SEQ ID NO: 9562 - DNA, 20 bp, synthetic construct
  misc_feature 1..20: note = chemically synthesized
  source 1..20: mol_type = other DNA
tccagtgagcaggttggttt

SEQ ID NO: 9563 - DNA, 20 bp, synthetic construct
  misc_feature 1..20: note = chemically synthesized
  source 1..20: mol_type = other DNA
tgagcaggttggtttaagat

SEQ ID NO: 9564 - DNA, 20 bp, synthetic construct
  misc_feature 1..20: note = chemically synthesized
  source 1..20: mol_type = other DNA
gcaggttggtttaagataag

SEQ ID NO: 9565 - DNA, 20 bp, synthetic construct
  misc_feature 1..20: note = chemically synthesized
  source 1..20: mol_type = other DNA
caggttggtttaagataagc

SEQ ID NO: 9566 - DNA, 20 bp, synthetic construct
  misc_feature 1..20: note = chemically synthesized
  source 1..20: mol_type = other DNA
aggttggtttaagataagca

SEQ ID NO: 9567 - DNA, 20 bp, synthetic construct
  misc_feature 1..20: note = chemically synthesized
  source 1..20: mol_type = other DNA
taagataagcagggtttcat

SEQ ID NO: 9568 - DNA, 20 bp, synthetic construct
  misc_feature 1..20: note = chemically synthesized
  source 1..20: mol_type = other DNA
gcagggtttcattagtttgt

SEQ ID NO: 9569 - DNA, 20 bp, synthetic construct
  misc_feature 1..20: note = chemically synthesized
  source 1..20: mol_type = other DNA
ctattcccttaacttgccct

SEQ ID NO: 9570 - DNA, 20 bp, synthetic construct
  misc_feature 1..20: note = chemically synthesized
  source 1..20: mol_type = other DNA
cccttaacttgccctgagat

SEQ ID NO: 9571 - DNA, 20 bp, synthetic construct
  misc_feature 1..20: note = chemically synthesized
  source 1..20: mol_type = other DNA
ctgtcatgtgtgtcttgact

SEQ ID NO: 9572 - DNA, 20 bp, synthetic construct
  misc_feature 1..20: note = chemically synthesized
  source 1..20: mol_type = other DNA
tctccccaccgcatctcttt

SEQ ID NO: 9573 - DNA, 20 bp, synthetic construct
  misc_feature 1..20: note = chemically synthesized
  source 1..20: mol_type = other DNA
ccccaccgcatctctttcag

SEQ ID NO: 9574 - DNA, 20 bp, synthetic construct
  misc_feature 1..20: note = chemically synthesized
  source 1..20: mol_type = other DNA
tgtttctaaaaatatcctcc

SEQ ID NO: 9575 - DNA, 20 bp, synthetic construct
  misc_feature 1..20: note = chemically synthesized
  source 1..20: mol_type = other DNA
tcctcctagtttcatttttg

SEQ ID NO: 9576 - DNA, 20 bp, synthetic construct
  misc_feature 1..20: note = chemically synthesized
  source 1..20: mol_type = other DNA
tcctagtttcatttttgcag

SEQ ID NO: 9577 - DNA, 20 bp, synthetic construct
  misc_feature 1..20: note = chemically synthesized
  source 1..20: mol_type = other DNA
tcatttttgcagaagtgttt

SEQ ID NO: 9578 - DNA, 20 bp, synthetic construct
  misc_feature 1..20: note = chemically synthesized
  source 1..20: mol_type = other DNA
catttttgcagaagtgtttt

SEQ ID NO: 9579 - DNA, 20 bp, synthetic construct
  misc_feature 1..20: note = chemically synthesized
  source 1..20: mol_type = other DNA
agaagtgttttaggctaata

SEQ ID NO: 9580 - DNA, 20 bp, synthetic construct
  misc_feature 1..20: note = chemically synthesized
  source 1..20: mol_type = other DNA
agtgttttaggctaatatag

SEQ ID NO: 9581 - DNA, 20 bp, synthetic construct
  misc_feature 1..20: note = chemically synthesized
  source 1..20: mol_type = other DNA
taatatagtggaatgtatct

SEQ ID NO: 9582 - DNA, 20 bp, synthetic construct
  misc_feature 1..20: note = chemically synthesized
  source 1..20: mol_type = other DNA
atatagtggaatgtatctta

SEQ ID NO: 9583 - DNA, 20 bp, synthetic construct
  misc_feature 1..20: note = chemically synthesized
  source 1..20: mol_type = other DNA
tgtttctgtcactttatact

SEQ ID NO: 9584 - DNA, 20 bp, synthetic construct
  misc_feature 1..20: note = chemically synthesized
  source 1..20: mol_type = other DNA
tactaagaaaacttatctaa

SEQ ID NO: 9585 - DNA, 20 bp, synthetic construct
  misc_feature 1..20: note = chemically synthesized
  source 1..20: mol_type = other DNA
taagaaaacttatctaaaag

SEQ ID NO: 9586 - DNA, 20 bp, synthetic construct
  misc_feature 1..20: note = chemically synthesized
  source 1..20: mol_type = other DNA
ctaaaagcagatgttttaac

SEQ ID NO: 9587 - DNA, 20 bp, synthetic construct
  misc_feature 1..20: note = chemically synthesized
  source 1..20: mol_type = other DNA
taacaagttgactcaatata

SEQ ID NO: 9588 - DNA, 20 bp, synthetic construct
  misc_feature 1..20: note = chemically synthesized
  source 1..20: mol_type = other DNA
ataaagttcttctttgcctc

SEQ ID NO: 9589 - DNA, 20 bp, synthetic construct
  misc_feature 1..20: note = chemically synthesized
  source 1..20: mol_type = other DNA
aaagttcttctttgcctcta

SEQ ID NO: 9590 - DNA, 20 bp, synthetic construct
  misc_feature 1..20: note = chemically synthesized
  source 1..20: mol_type = other DNA
ctctagagatttttgtctcc

SEQ ID NO: 9591 - DNA, 20 bp, synthetic construct
  misc_feature 1..20: note = chemically synthesized
  source 1..20: mol_type = other DNA
tctagagatttttgtctcca

SEQ ID NO: 9592 - DNA, 20 bp, synthetic construct
  misc_feature 1..20: note = chemically synthesized
  source 1..20: mol_type = other DNA
ctagagatttttgtctccaa

SEQ ID NO: 9593 - DNA, 20 bp, synthetic construct
  misc_feature 1..20: note = chemically synthesized
  source 1..20: mol_type = other DNA
tttgtctccaagggaatttt

SEQ ID NO: 9594 - DNA, 20 bp, synthetic construct
  misc_feature 1..20: note = chemically synthesized
  source 1..20: mol_type = other DNA
tgtctccaagggaattttga

SEQ ID NO: 9595 - DNA, 20 bp, synthetic construct
  misc_feature 1..20: note = chemically synthesized
  source 1..20: mol_type = other DNA
gtctccaagggaattttgag

SEQ ID NO: 9596 - DNA, 20 bp, synthetic construct
  misc_feature 1..20: note = chemically synthesized
  source 1..20: mol_type = other DNA
ccaagggaattttgagaggt

SEQ ID NO: 9597 - DNA, 20 bp, synthetic construct
  misc_feature 1..20: note = chemically synthesized
  source 1..20: mol_type = other DNA
ggaattttgagaggttggaa

SEQ ID NO: 9598 - DNA, 20 bp, synthetic construct
  misc_feature 1..20: note = chemically synthesized
  source 1..20: mol_type = other DNA
aatggacaaatctattgctg

SEQ ID NO: 9599 - DNA, 20 bp, synthetic construct
  misc_feature 1..20: note = chemically synthesized
  source 1..20: mol_type = other DNA
tgcttgcttcctccttcttt

SEQ ID NO: 9600 - DNA, 20 bp, synthetic construct
  misc_feature 1..20: note = chemically synthesized
  source 1..20: mol_type = other DNA
ttgaaataaatatccattaa

SEQ ID NO: 9601 - DNA, 20 bp, synthetic construct
  misc_feature 1..20: note = chemically synthesized
  source 1..20: mol_type = other DNA
aagaatatttaaaaaatgaa

SEQ ID NO: 9602 - DNA, 20 bp, synthetic construct
  misc_feature 1..20: note = chemically synthesized
  source 1..20: mol_type = other DNA
aatgaatagtgtttatttac

SEQ ID NO: 9603 - DNA, 20 bp, synthetic construct
  misc_feature 1..20: note = chemically synthesized
  source 1..20: mol_type = other DNA
ttatttaccagttattgaaa

SEQ ID NO: 9604 - DNA, 20 bp, synthetic construct
  misc_feature 1..20: note = chemically synthesized
  source 1..20: mol_type = other DNA
tatttaccagttattgaaat

SEQ ID NO: 9605 - DNA, 20 bp, synthetic construct
  misc_feature 1..20: note = chemically synthesized
  source 1..20: mol_type = other DNA
ccagttattgaaataggttc

SEQ ID NO: 9606 - DNA, 20 bp, synthetic construct
  misc_feature 1..20: note = chemically synthesized
  source 1..20: mol_type = other DNA
gttctggaaacatgaatttt

SEQ ID NO: 9607 - DNA, 20 bp, synthetic construct
  misc_feature 1..20: note = chemically synthesized
  source 1..20: mol_type = other DNA
ttctggaaacatgaatttta

SEQ ID NO: 9608 - DNA, 20 bp, synthetic construct
  misc_feature 1..20: note = chemically synthesized
  source 1..20: mol_type = other DNA
taaggttaacattttaatga

SEQ ID NO: 9609 - DNA, 20 bp, synthetic construct
  misc_feature 1..20: note = chemically synthesized
  source 1..20: mol_type = other DNA
attttgaatgtttaaaatta

SEQ ID NO: 9610 - DNA, 20 bp, synthetic construct
  misc_feature 1..20: note = chemically synthesized
  source 1..20: mol_type = other DNA
ttaaaattatggtatgacta

SEQ ID NO: 9611 - DNA, 20 bp, synthetic construct
  misc_feature 1..20: note = chemically synthesized
  source 1..20: mol_type = other DNA
aattatggtatgactaaaga

SEQ ID NO: 9612 - DNA, 20 bp, synthetic construct
  misc_feature 1..20: note = chemically synthesized
  source 1..20: mol_type = other DNA
atgactaaagaaagaatgca

SEQ ID NO: 9613 - DNA, 20 bp, synthetic construct
  misc_feature 1..20: note = chemically synthesized
  source 1..20: mol_type = other DNA
aagaaagaatgcaaagtgaa

SEQ ID NO: 9614 - DNA, 20 bp, synthetic construct
  misc_feature 1..20: note = chemically synthesized
  source 1..20: mol_type = other DNA
aaagaatgcaaagtgaaaag

SEQ ID NO: 9615 - DNA, 20 bp, synthetic construct
  misc_feature 1..20: note = chemically synthesized
  source 1..20: mol_type = other DNA
aaaagtagatttaccatatt

SEQ ID NO: 9616 - DNA, 20 bp, synthetic construct
  misc_feature 1..20: note = chemically synthesized
  source 1..20: mol_type = other DNA
gtagatttaccatattcagc

SEQ ID NO: 9617 - DNA, 20 bp, synthetic construct
  misc_feature 1..20: note = chemically synthesized
  source 1..20: mol_type = other DNA
cagccagattaaatttaacg

SEQ ID NO: 9618 - DNA, 20 bp, synthetic construct
  misc_feature 1..20: note = chemically synthesized
  source 1..20: mol_type = other DNA
attaaatttaacgaagttcc

SEQ ID NO: 9619 - DNA, 20 bp, synthetic construct
  misc_feature 1..20: note = chemically synthesized
  source 1..20: mol_type = other DNA
ttaaatttaacgaagttcct

SEQ ID NO: 9620 - DNA, 20 bp, synthetic construct
  misc_feature 1..20: note = chemically synthesized
  source 1..20: mol_type = other DNA
cgaagttcctgggaatatgc

SEQ ID NO: 9621 - DNA, 20 bp, synthetic construct
  misc_feature 1..20: note = chemically synthesized
  source 1..20: mol_type = other DNA
ttcctgggaatatgctagta

SEQ ID NO: 9622 - DNA, 20 bp, synthetic construct
  misc_feature 1..20: note = chemically synthesized
  source 1..20: mol_type = other DNA
gctagtacagaacattttta

SEQ ID NO: 9623 - DNA, 20 bp, synthetic construct
  misc_feature 1..20: note = chemically synthesized
  source 1..20: mol_type = other DNA
tgtgttcttaaaaaaaaatg

SEQ ID NO: 9624 - DNA, 20 bp, synthetic construct
  misc_feature 1..20: note = chemically synthesized
  source 1..20: mol_type = other DNA
cttaaaaaaaaatgtggaat

SEQ ID NO: 9625 - DNA, 20 bp, synthetic construct
  misc_feature 1..20: note = chemically synthesized
  source 1..20: mol_type = other DNA
aaaaaatgtggaattagacc

SEQ ID NO: 9626 - DNA, 20 bp, synthetic construct
  misc_feature 1..20: note = chemically synthesized
  source 1..20: mol_type = other DNA
aaaaatgtggaattagaccc

SEQ ID NO: 9627 - DNA, 20 bp, synthetic construct
  misc_feature 1..20: note = chemically synthesized
  source 1..20: mol_type = other DNA
tggaattagacccaggaatg

SEQ ID NO: 9628 - DNA, 20 bp, synthetic construct
  misc_feature 1..20: note = chemically synthesized
  source 1..20: mol_type = other DNA
agacccaggaatgaagatcc

SEQ ID NO: 9629 - DNA, 20 bp, synthetic construct
  misc_feature 1..20: note = chemically synthesized
  source 1..20: mol_type = other DNA
cccaggaatgaagatcccag

SEQ ID NO: 9630 - DNA, 20 bp, synthetic construct
  misc_feature 1..20: note = chemically synthesized
  source 1..20: mol_type = other DNA
gaattcaaataatgccacaa

SEQ ID NO: 9631 - DNA, 20 bp, synthetic construct
  misc_feature 1..20: note = chemically synthesized
  source 1..20: mol_type = other DNA
ttcaaataatgccacaatgg

SEQ ID NO: 9632 - DNA, 20 bp, synthetic construct
  misc_feature 1..20: note = chemically synthesized
  source 1..20: mol_type = other DNA
gcagacaaatacacacccat

SEQ ID NO: 9633 - DNA, 20 bp, synthetic construct
  misc_feature 1..20: note = chemically synthesized
  source 1..20: mol_type = other DNA
acacccatgagcatatccaa

SEQ ID NO: 9634 - DNA, 20 bp, synthetic construct
  misc_feature 1..20: note = chemically synthesized
  source 1..20: mol_type = other DNA
cacccatgagcatatccaaa

SEQ ID NO: 9635 - DNA, 20 bp, synthetic construct
  misc_feature 1..20: note = chemically synthesized
  source 1..20: mol_type = other DNA
ccatgagcatatccaaaagg

SEQ ID NO: 9636 - DNA, 20 bp, synthetic construct
  misc_feature 1..20: note = chemically synthesized
  source 1..20: mol_type = other DNA
catgagcatatccaaaagga

SEQ ID NO: 9637 - DNA, 20 bp, synthetic construct
  misc_feature 1..20: note = chemically synthesized
  source 1..20: mol_type = other DNA
atatccaaaaggaaggattg

SEQ ID NO: 9638 - DNA, 20 bp, synthetic construct
  misc_feature 1..20: note = chemically synthesized
  source 1..20: mol_type = other DNA
tatccaaaaggaaggattga

SEQ ID NO: 9639 - DNA, 20 bp, synthetic construct
  misc_feature 1..20: note = chemically synthesized
  source 1..20: mol_type = other DNA
caaaaggaaggattgaagga

SEQ ID NO: 9640 - DNA, 20 bp, synthetic construct
  misc_feature 1..20: note = chemically synthesized
  source 1..20: mol_type = other DNA
aaaggaaggattgaaggaaa

SEQ ID NO: 9641 - DNA, 20 bp, synthetic construct
  misc_feature 1..20: note = chemically synthesized
  source 1..20: mol_type = other DNA
aaggaaggattgaaggaaag

SEQ ID NO: 9642 - DNA, 20 bp, synthetic construct
  misc_feature 1..20: note = chemically synthesized
  source 1..20: mol_type = other DNA
ggaaggattgaaggaaagag

SEQ ID NO: 9643 - DNA, 20 bp, synthetic construct
  misc_feature 1..20: note = chemically synthesized
  source 1..20: mol_type = other DNA
gaaggattgaaggaaagagg

SEQ ID NO: 9644 - DNA, 20 bp, synthetic construct
  misc_feature 1..20: note = chemically synthesized
  source 1..20: mol_type = other DNA
ggattgaaggaaagaggagg

SEQ ID NO: 9645 - DNA, 20 bp, synthetic construct
  misc_feature 1..20: note = chemically synthesized
  source 1..20: mol_type = other DNA
aaggaaagaggaggaagaaa

SEQ ID NO: 9646 - DNA, 20 bp, synthetic construct
  misc_feature 1..20: note = chemically synthesized
  source 1..20: mol_type = other DNA
ggaaagaggaggaagaaatg

SEQ ID NO: 9647 - DNA, 20 bp, synthetic construct
  misc_feature 1..20: note = chemically synthesized
  source 1..20: mol_type = other DNA
agaggaggaagaaatggaga

SEQ ID NO: 9648 - DNA, 20 bp, synthetic construct
  misc_feature 1..20: note = chemically synthesized
  source 1..20: mol_type = other DNA
gaggaggaagaaatggagaa

SEQ ID NO: 9649 - DNA, 20 bp, synthetic construct
  misc_feature 1..20: note = chemically synthesized
  source 1..20: mol_type = other DNA
gaggaagaaatggagaaagg

SEQ ID NO: 9650 - DNA, 20 bp, synthetic construct
  misc_feature 1..20: note = chemically synthesized
  source 1..20: mol_type = other DNA
aggaagaaatggagaaagga

SEQ ID NO: 9651 - DNA, 20 bp, synthetic construct
  misc_feature 1..20: note = chemically synthesized
  source 1..20: mol_type = other DNA
aagaaatggagaaaggaagg

SEQ ID NO: 9652 - DNA, 20 bp, synthetic construct
  misc_feature 1..20: note = chemically synthesized
  source 1..20: mol_type = other DNA
agaaatggagaaaggaagga

SEQ ID NO: 9653 - DNA, 20 bp, synthetic construct
  misc_feature 1..20: note = chemically synthesized
  source 1..20: mol_type = other DNA
aatggagaaaggaaggaagg

SEQ ID NO: 9654 - DNA, 20 bp, synthetic construct
  misc_feature 1..20: note = chemically synthesized
  source 1..20: mol_type = other DNA
tggagaaaggaaggaaggaa

SEQ ID NO: 9655 - DNA, 20 bp, synthetic construct
  misc_feature 1..20: note = chemically synthesized
  source 1..20: mol_type = other DNA
ggagaaaggaaggaaggaag

SEQ ID NO: 9656 - DNA, 20 bp, synthetic construct
  misc_feature 1..20: note = chemically synthesized
  source 1..20: mol_type = other DNA
gagaaaggaaggaaggaaga

SEQ ID NO: 9657 - DNA, 20 bp, synthetic construct
  misc_feature 1..20: note = chemically synthesized
  source 1..20: mol_type = other DNA
agaaaggaaggaaggaagag

SEQ ID NO: 9658 - DNA, 20 bp, synthetic construct
  misc_feature 1..20: note = chemically synthesized
  source 1..20: mol_type = other DNA
aaggaaggaaggaagagggg

SEQ ID NO: 9659 - DNA, 20 bp, synthetic construct
  misc_feature 1..20: note = chemically synthesized
  source 1..20: mol_type = other DNA
ggaaggaaggaagaggggaa

SEQ ID NO: 9660 - DNA, 20 bp, synthetic construct
  misc_feature 1..20: note = chemically synthesized
  source 1..20: mol_type = other DNA
aaggaaggaagaggggaaga

SEQ ID NO: 9661 - DNA, 20 bp, synthetic construct
  misc_feature 1..20: note = chemically synthesized
  source 1..20: mol_type = other DNA
ggaaggaagaggggaagaga

SEQ ID NO: 9662 - DNA, 20 bp, synthetic construct
  misc_feature 1..20: note = chemically synthesized
  source 1..20: mol_type = other DNA
gaaggaagaggggaagagag

SEQ ID NO: 9663 - DNA, 20 bp, synthetic construct
  misc_feature 1..20: note = chemically synthesized
  source 1..20: mol_type = other DNA
gaagaggggaagagagagga

SEQ ID NO: 9664 - DNA, 20 bp, synthetic construct
  misc_feature 1..20: note = chemically synthesized
  source 1..20: mol_type = other DNA
gaggggaagagagaggatgg

SEQ ID NO: 9665 - DNA, 20 bp, synthetic construct
  misc_feature 1..20: note = chemically synthesized
  source 1..20: mol_type = other DNA
aggggaagagagaggatgga

SEQ ID NO: 9666 - DNA, 20 bp, synthetic construct
  misc_feature 1..20: note = chemically synthesized
  source 1..20: mol_type = other DNA
ggggaagagagaggatggaa

SEQ ID NO: 9667 - DNA, 20 bp, synthetic construct
  misc_feature 1..20: note = chemically synthesized
  source 1..20: mol_type = other DNA
aagagagaggatggaaggga

SEQ ID NO: 9668 - DNA, 20 bp, synthetic construct
  misc_feature 1..20: note = chemically synthesized
  source 1..20: mol_type = other DNA
gagagaggatggaagggatg

SEQ ID NO: 9669 - DNA, 20 bp, synthetic construct
  misc_feature 1..20: note = chemically synthesized
  source 1..20: mol_type = other DNA
agagaggatggaagggatgg

SEQ ID NO: 9670 - DNA, 20 bp, synthetic construct
  misc_feature 1..20: note = chemically synthesized
  source 1..20: mol_type = other DNA
agaggatggaagggatggag

SEQ ID NO: 9671 - DNA, 20 bp, synthetic construct
  misc_feature 1..20: note = chemically synthesized
  source 1..20: mol_type = other DNA
ggatggaagggatggaggag

SEQ ID NO: 9672 - DNA, 20 bp, synthetic construct
  misc_feature 1..20: note = chemically synthesized
  source 1..20: mol_type = other DNA
tggaagggatggaggagaag

SEQ ID NO: 9673 - DNA, 20 bp, synthetic construct
  misc_feature 1..20: note = chemically synthesized
  source 1..20: mol_type = other DNA
ggaagggatggaggagaaga

SEQ ID NO: 9674 - DNA, 20 bp, synthetic construct
  misc_feature 1..20: note = chemically synthesized
  source 1..20: mol_type = other DNA
gaagaaggaaaaataaataa

SEQ ID NO: 9675 - DNA, 20 bp, synthetic construct
  misc_feature 1..20: note = chemically synthesized
  source 1..20: mol_type = other DNA
agaaggaaaaataaataatg

SEQ ID NO: 9676 - DNA, 20 bp, synthetic construct
  misc_feature 1..20: note = chemically synthesized
  source 1..20: mol_type = other DNA
aaggaaaaataaataatgga

SEQ ID NO: 9677 - DNA, 20 bp, synthetic construct
  misc_feature 1..20: note = chemically synthesized
  source 1..20: mol_type = other DNA
aggaaaaataaataatggag

SEQ ID NO: 9678 - DNA, 20 bp, synthetic construct
  misc_feature 1..20: note = chemically synthesized
  source 1..20: mol_type = other DNA
gaaaaataaataatggagag

SEQ ID NO: 9679 - DNA, 20 bp, synthetic construct
  misc_feature 1..20: note = chemically synthesized
  source 1..20: mol_type = other DNA
aaaataaataatggagagga

SEQ ID NO: 9680 - DNA, 20 bp, synthetic construct
  misc_feature 1..20: note = chemically synthesized
  source 1..20: mol_type = other DNA
aaataaataatggagaggag

SEQ ID NO: 9681 - DNA, 20 bp, synthetic construct
  misc_feature 1..20: note = chemically synthesized
  source 1..20: mol_type = other DNA
ataaataatggagaggagag

SEQ ID NO: 9682 - DNA, 20 bp, synthetic construct
  misc_feature 1..20: note = chemically synthesized
  source 1..20: mol_type = other DNA
atggagaggagaggagaaaa

SEQ ID NO: 9683 - DNA, 20 bp, synthetic construct
  misc_feature 1..20: note = chemically synthesized
  source 1..20: mol_type = other DNA
tggagaggagaggagaaaaa

SEQ ID NO: 9684 - DNA, 20 bp, synthetic construct
  misc_feature 1..20: note = chemically synthesized
  source 1..20: mol_type = other DNA
gagaggagaggagaaaaaag

SEQ ID NO: 9685 - DNA, 20 bp, synthetic construct
  misc_feature 1..20: note = chemically synthesized
  source 1..20: mol_type = other DNA
agaggagaggagaaaaaagg

SEQ ID NO: 9686 - DNA, 20 bp, synthetic construct
  misc_feature 1..20: note = chemically synthesized
  source 1..20: mol_type = other DNA
gaggagaggagaaaaaagga

SEQ ID NO: 9687 - DNA, 20 bp, synthetic construct
  misc_feature 1..20: note = chemically synthesized
  source 1..20: mol_type = other DNA
aggagaggagaaaaaaggag

SEQ ID NO: 9688 - DNA, 20 bp, synthetic construct
  misc_feature 1..20: note = chemically synthesized
  source 1..20: mol_type = other DNA
gagaggagaaaaaaggaggg

SEQ ID NO: 9689 - DNA, 20 bp, synthetic construct
  misc_feature 1..20: note = chemically synthesized
  source 1..20: mol_type = other DNA
gaggagaaaaaaggagggga

SEQ ID NO: 9690 - DNA, 20 bp, synthetic construct
  misc_feature 1..20: note = chemically synthesized
  source 1..20: mol_type = other DNA
aggagaaaaaaggaggggag

SEQ ID NO: 9691 - DNA, 20 bp, synthetic construct
  misc_feature 1..20: note = chemically synthesized
  source 1..20: mol_type = other DNA
gagaaaaaaggaggggagag

SEQ ID NO: 9692 - DNA, 20 bp, synthetic construct
  misc_feature 1..20: note = chemically synthesized
  source 1..20: mol_type = other DNA
gaaaaaaggaggggagagga

SEQ ID NO: 9693 - DNA, 20 bp, synthetic construct
  misc_feature 1..20: note = chemically synthesized
  source 1..20: mol_type = other DNA
aaaaaaggaggggagaggag

SEQ ID NO: 9694 - DNA, 20 bp, synthetic construct
  misc_feature 1..20: note = chemically synthesized
  source 1..20: mol_type = other DNA
aaaaggaggggagaggagag

SEQ ID NO: 9695 - DNA, 20 bp, synthetic construct
  misc_feature 1..20: note = chemically synthesized
  source 1..20: mol_type = other DNA
aggaggggagaggagaggag

SEQ ID NO: 9696 - DNA, 20 bp, synthetic construct
  misc_feature 1..20: note = chemically synthesized
  source 1..20: mol_type = other DNA
ggaggggagaggagaggaga

SEQ ID NO: 9697 - DNA, 20 bp, synthetic construct
  misc_feature 1..20: note = chemically synthesized
  source 1..20: mol_type = other DNA
gaggggagaggagaggagaa

SEQ ID NO: 9698 - DNA, 20 bp, synthetic construct
  misc_feature 1..20: note = chemically synthesized
  source 1..20: mol_type = other DNA
ggagaggagaggagaaggga

SEQ ID NO: 9699 - DNA, 20 bp, synthetic construct
  misc_feature 1..20: note = chemically synthesized
  source 1..20: mol_type = other DNA
gagaggagaggagaagggat

SEQ ID NO: 9700 - DNA, 20 bp, synthetic construct
  misc_feature 1..20: note = chemically synthesized
  source 1..20: mol_type = other DNA
agaggagaggagaagggata

SEQ ID NO: 9701 - DNA, 20 bp, synthetic construct
  misc_feature 1..20: note = chemically synthesized
  source 1..20: mol_type = other DNA
ggagaggagaagggataggg

SEQ ID NO: 9702 - DNA, 20 bp, synthetic construct
  misc_feature 1..20: note = chemically synthesized
  source 1..20: mol_type = other DNA
agaggagaagggatagggaa

SEQ ID NO: 9703 - DNA, 20 bp, synthetic construct
  misc_feature 1..20: note = chemically synthesized
  source 1..20: mol_type = other DNA
gagaagggatagggaagaga

SEQ ID NO: 9704 - DNA, 20 bp, synthetic construct
  misc_feature 1..20: note = chemically synthesized
  source 1..20: mol_type = other DNA
gaagggatagggaagagaaa

SEQ ID NO: 9705 - DNA, 20 bp, synthetic construct
  misc_feature 1..20: note = chemically synthesized
  source 1..20: mol_type = other DNA
ggatagggaagagaaagaga

SEQ ID NO: 9706 - DNA, 20 bp, synthetic construct
  misc_feature 1..20: note = chemically synthesized
  source 1..20: mol_type = other DNA
gatagggaagagaaagagaa

SEQ ID NO: 9707 - DNA, 20 bp, synthetic construct
  misc_feature 1..20: note = chemically synthesized
  source 1..20: mol_type = other DNA
atagggaagagaaagagaaa

SEQ ID NO: 9708 - DNA, 20 bp, synthetic construct
  misc_feature 1..20: note = chemically synthesized
  source 1..20: mol_type = other DNA
gggaagagaaagagaaaggg

SEQ ID NO: 9709 - DNA, 20 bp, synthetic construct
  misc_feature 1..20: note = chemically synthesized
  source 1..20: mol_type = other DNA
ggaagagaaagagaaaggga

SEQ ID NO: 9710 - DNA, 20 bp, synthetic construct
  misc_feature 1..20: note = chemically synthesized
  source 1..20: mol_type = other DNA
gaagagaaagagaaagggaa

SEQ ID NO: 9711 - DNA, 20 bp, synthetic construct
  misc_feature 1..20: note = chemically synthesized
  source 1..20: mol_type = other DNA
gagaaagagaaagggaaggg

SEQ ID NO: 9712 - DNA, 20 bp, synthetic construct
  misc_feature 1..20: note = chemically synthesized
  source 1..20: mol_type = other DNA
gaaagagaaagggaagggaa

SEQ ID NO: 9713 - DNA, 20 bp, synthetic construct
  misc_feature 1..20: note = chemically synthesized
  source 1..20: mol_type = other DNA
aagagaaagggaagggaaga

SEQ ID NO: 9714 - DNA, 20 bp, synthetic construct
  misc_feature 1..20: note = chemically synthesized
  source 1..20: mol_type = other DNA
agagaaagggaagggaagag

SEQ ID NO: 9715 - DNA, 20 bp, synthetic construct
  misc_feature 1..20: note = chemically synthesized
  source 1..20: mol_type = other DNA
aaagggaagggaagagagga

SEQ ID NO: 9716 - DNA, 20 bp, synthetic construct
  misc_feature 1..20: note = chemically synthesized
  source 1..20: mol_type = other DNA
gggaagggaagagaggaaag

SEQ ID NO: 9717 - DNA, 20 bp, synthetic construct
  misc_feature 1..20: note = chemically synthesized
  source 1..20: mol_type = other DNA
gaagggaagagaggaaagaa

SEQ ID NO: 9718 - DNA, 20 bp, synthetic construct
  misc_feature 1..20: note = chemically synthesized
  source 1..20: mol_type = other DNA
gggaagagaggaaagaagag

SEQ ID NO: 9719 - DNA, 20 bp, synthetic construct
  misc_feature 1..20: note = chemically synthesized
  source 1..20: mol_type = other DNA
gaagagaggaaagaagagaa

SEQ ID NO: 9720 - DNA, 20 bp, synthetic construct
  misc_feature 1..20: note = chemically synthesized
  source 1..20: mol_type = other DNA
aagagaggaaagaagagaag

SEQ ID NO: 9721 - DNA, 20 bp, synthetic construct
  misc_feature 1..20: note = chemically synthesized
  source 1..20: mol_type = other DNA
gagaggaaagaagagaagag

SEQ ID NO: 9722 - DNA, 20 bp, synthetic construct
  misc_feature 1..20: note = chemically synthesized
  source 1..20: mol_type = other DNA
gaggaaagaagagaagagga

SEQ ID NO: 9723 - DNA, 20 bp, synthetic construct
  misc_feature 1..20: note = chemically synthesized
  source 1..20: mol_type = other DNA
aagaagagaagaggagagaa

SEQ ID NO: 9724 - DNA, 20 bp, synthetic construct
  misc_feature 1..20: note = chemically synthesized
  source 1..20: mol_type = other DNA
aagaggagagaaaagaaacg

SEQ ID NO: 9725 - DNA, 20 bp, synthetic construct
  misc_feature 1..20: note = chemically synthesized
  source 1..20: mol_type = other DNA
gaggagagaaaagaaacgaa

SEQ ID NO: 9726 - DNA, 20 bp, synthetic construct
  misc_feature 1..20: note = chemically synthesized
  source 1..20: mol_type = other DNA
ggagagaaaagaaacgaaga

SEQ ID NO: 9727 - DNA, 20 bp, synthetic construct
  misc_feature 1..20: note = chemically synthesized
  source 1..20: mol_type = other DNA
gagagaaaagaaacgaagag

SEQ ID NO: 9728 - DNA, 20 bp, synthetic construct
  misc_feature 1..20: note = chemically synthesized
  source 1..20: mol_type = other DNA
agagaaaagaaacgaagaga

SEQ ID NO: 9729 - DNA, 20 bp, synthetic construct
  misc_feature 1..20: note = chemically synthesized
  source 1..20: mol_type = other DNA
gagaaaagaaacgaagagag

SEQ ID NO: 9730 - DNA, 20 bp, synthetic construct
  misc_feature 1..20: note = chemically synthesized
  source 1..20: mol_type = other DNA
aaaagaaacgaagagagggg

SEQ ID NO: 9731 - DNA, 20 bp, synthetic construct
  misc_feature 1..20: note = chemically synthesized
  source 1..20: mol_type = other DNA
aaagaaacgaagagagggga

SEQ ID NO: 9732 - DNA, 20 bp, synthetic construct
  misc_feature 1..20: note = chemically synthesized
  source 1..20: mol_type = other DNA
aagaaacgaagagaggggaa

SEQ ID NO: 9733 - DNA, 20 bp, synthetic construct
  misc_feature 1..20: note = chemically synthesized
  source 1..20: mol_type = other DNA
aaacgaagagaggggaaggg

SEQ ID NO: 9734 - DNA, 20 bp, synthetic construct
  misc_feature 1..20: note = chemically synthesized
  source 1..20: mol_type = other DNA
aacgaagagaggggaaggga

SEQ ID NO: 9735 - DNA, 20 bp, synthetic construct
  misc_feature 1..20: note = chemically synthesized
  source 1..20: mol_type = other DNA
aggggaagggaaggaaaaaa

SEQ ID NO: 9736 - DNA, 20 bp, synthetic construct
  misc_feature 1..20: note = chemically synthesized
  source 1..20: mol_type = other DNA
gggaagggaaggaaaaaaaa

SEQ ID NO: 9737 - DNA, 20 bp, synthetic construct
  misc_feature 1..20: note = chemically synthesized
  source 1..20: mol_type = other DNA
ggaagggaaggaaaaaaaag

SEQ ID NO: 9738 - DNA, 20 bp, synthetic construct
  misc_feature 1..20: note = chemically synthesized
  source 1..20: mol_type = other DNA
aaggaaaaaaaagaggaaaa

SEQ ID NO: 9739 - DNA, 20 bp, synthetic construct
  misc_feature 1..20: note = chemically synthesized
  source 1..20: mol_type = other DNA
ggaaaaaaaagaggaaaaaa

SEQ ID NO: 9740 - DNA, 20 bp, synthetic construct
  misc_feature 1..20: note = chemically synthesized
  source 1..20: mol_type = other DNA
aaaaagaggaaaaaagagac

SEQ ID NO: 9741 - DNA, 20 bp, synthetic construct
  misc_feature 1..20: note = chemically synthesized
  source 1..20: mol_type = other DNA
aaagaggaaaaaagagacaa

SEQ ID NO: 9742 - DNA, 20 bp, synthetic construct
  misc_feature 1..20: note = chemically synthesized
  source 1..20: mol_type = other DNA
gaggaaaaaagagacaagag

SEQ ID NO: 9743 - DNA, 20 bp, synthetic construct
  misc_feature 1..20: note = chemically synthesized
  source 1..20: mol_type = other DNA
ggaaaaaagagacaagagaa

SEQ ID NO: 9744 - DNA, 20 bp, synthetic construct
  misc_feature 1..20: note = chemically synthesized
  source 1..20: mol_type = other DNA
aaagagacaagagaagagat

SEQ ID NO: 9745 - DNA, 20 bp, synthetic construct
  misc_feature 1..20: note = chemically synthesized
  source 1..20: mol_type = other DNA
aagagaagagataagactga

SEQ ID NO: 9746 - DNA, 20 bp, synthetic construct
  misc_feature 1..20: note = chemically synthesized
  source 1..20: mol_type = other DNA
aagactgacagttcaaattt

SEQ ID NO: 9747 - DNA, 20 bp, synthetic construct
  misc_feature 1..20: note = chemically synthesized
  source 1..20: mol_type = other DNA
actgacagttcaaattttgg

SEQ ID NO: 9748 - DNA, 20 bp, synthetic construct
  misc_feature 1..20: note = chemically synthesized
  source 1..20: mol_type = other DNA
ttcaaattttggtggtgata

SEQ ID NO: 9749 - DNA, 20 bp, synthetic construct
  misc_feature 1..20: note = chemically synthesized
  source 1..20: mol_type = other DNA
ttggtggtgatatggatcaa

SEQ ID NO: 9750 - DNA, 20 bp, synthetic construct
  misc_feature 1..20: note = chemically synthesized
  source 1..20: mol_type = other DNA
aatagaaactcaaactctgt

SEQ ID NO: 9751 - DNA, 20 bp, synthetic construct
  misc_feature 1..20: note = chemically synthesized
  source 1..20: mol_type = other DNA
ctgttggtgacactgtacaa

SEQ ID NO: 9752 - DNA, 20 bp, synthetic construct
  misc_feature 1..20: note = chemically synthesized
  source 1..20: mol_type = other DNA
gtacaatagtataacccctt

SEQ ID NO: 9753 - DNA, 20 bp, synthetic construct
  misc_feature 1..20: note = chemically synthesized
  source 1..20: mol_type = other DNA
cccctttggaaaacctttaa

SEQ ID NO: 9754 - DNA, 20 bp, synthetic construct
  misc_feature 1..20: note = chemically synthesized
  source 1..20: mol_type = other DNA
ttaatagtatccacaaatgc

SEQ ID NO: 9755 - DNA, 20 bp, synthetic construct
  misc_feature 1..20: note = chemically synthesized
  source 1..20: mol_type = other DNA
acaaatgctggatgcttgat

SEQ ID NO: 9756 - DNA, 20 bp, synthetic construct
  misc_feature 1..20: note = chemically synthesized
  source 1..20: mol_type = other DNA
tgcttgataagtctattacc

SEQ ID NO: 9757 - DNA, 20 bp, synthetic construct
  misc_feature 1..20: note = chemically synthesized
  source 1..20: mol_type = other DNA
ttacctagcaattacatttt

SEQ ID NO: 9758 - DNA, 20 bp, synthetic construct
  misc_feature 1..20: note = chemically synthesized
  source 1..20: mol_type = other DNA
caattacatttttagatatt

SEQ ID NO: 9759 - DNA, 20 bp, synthetic construct
  misc_feature 1..20: note = chemically synthesized
  source 1..20: mol_type = other DNA
cacatgcatgtgtgtatcca

SEQ ID NO: 9760 - DNA, 20 bp, synthetic construct
  misc_feature 1..20: note = chemically synthesized
  source 1..20: mol_type = other DNA
tgtgtatccaaagacatgta

SEQ ID NO: 9761 - DNA, 20 bp, synthetic construct
  misc_feature 1..20: note = chemically synthesized
  source 1..20: mol_type = other DNA
atgtatagaaatgcttatga

SEQ ID NO: 9762 - DNA, 20 bp, synthetic construct
  misc_feature 1..20: note = chemically synthesized
  source 1..20: mol_type = other DNA
taatcataaaaacctcaaac

SEQ ID NO: 9763 - DNA, 20 bp, synthetic construct
  misc_feature 1..20: note = chemically synthesized
  source 1..20: mol_type = other DNA
tcataaaaacctcaaaccgg

SEQ ID NO: 9764 - DNA, 20 bp, synthetic construct
  misc_feature 1..20: note = chemically synthesized
  source 1..20: mol_type = other DNA
gccacttaaatgcttaccaa

SEQ ID NO: 9765 - DNA, 20 bp, synthetic construct
  misc_feature 1..20: note = chemically synthesized
  source 1..20: mol_type = other DNA
acttaaatgcttaccaacag

SEQ ID NO: 9766 - DNA, 20 bp, synthetic construct
  misc_feature 1..20: note = chemically synthesized
  source 1..20: mol_type = other DNA
acagtagaattgataaatta

SEQ ID NO: 9767 - DNA, 20 bp, synthetic construct
  misc_feature 1..20: note = chemically synthesized
  source 1..20: mol_type = other DNA
agaattgataaattacggta

SEQ ID NO: 9768 - DNA, 20 bp, synthetic construct
  misc_feature 1..20: note = chemically synthesized
  source 1..20: mol_type = other DNA
gataaattacggtatagtca

SEQ ID NO: 9769 - DNA, 20 bp, synthetic construct
  misc_feature 1..20: note = chemically synthesized
  source 1..20: mol_type = other DNA
attacggtatagtcaaagaa

SEQ ID NO: 9770 - DNA, 20 bp, synthetic construct
  misc_feature 1..20: note = chemically synthesized
  source 1..20: mol_type = other DNA
tcaaagaatagaatattaca

SEQ ID NO: 9771 - DNA, 20 bp, synthetic construct
  misc_feature 1..20: note = chemically synthesized
  source 1..20: mol_type = other DNA
gaatattacacagaaatgaa

SEQ ID NO: 9772 - DNA, 20 bp, synthetic construct
  misc_feature 1..20: note = chemically synthesized
  source 1..20: mol_type = other DNA
atcaactactgcttaacacg

SEQ ID NO: 9773 - DNA, 20 bp, synthetic construct
  misc_feature 1..20: note = chemically synthesized
  source 1..20: mol_type = other DNA
agcgatacaaatgcatttta

SEQ ID NO: 9774 - DNA, 20 bp, synthetic construct
  misc_feature 1..20: note = chemically synthesized
  source 1..20: mol_type = other DNA
caaatgcattttacagcatt

SEQ ID NO: 9775 - DNA, 20 bp, synthetic construct
  misc_feature 1..20: note = chemically synthesized
  source 1..20: mol_type = other DNA
tacagcatttggttgattaa

SEQ ID NO: 9776 - DNA, 20 bp, synthetic construct
  misc_feature 1..20: note = chemically synthesized
  source 1..20: mol_type = other DNA
tttggttgattaaaagtaac

SEQ ID NO: 9777 - DNA, 20 bp, synthetic construct
  misc_feature 1..20: note = chemically synthesized
  source 1..20: mol_type = other DNA
tggttgattaaaagtaacca

SEQ ID NO: 9778 - DNA, 20 bp, synthetic construct
  misc_feature 1..20: note = chemically synthesized
  source 1..20: mol_type = other DNA
ggttgattaaaagtaaccag

SEQ ID NO: 9779 - DNA, 20 bp, synthetic construct
  misc_feature 1..20: note = chemically synthesized
  source 1..20: mol_type = other DNA
gattaaaagtaaccagaggt

SEQ ID NO: 9780 - DNA, 20 bp, synthetic construct
  misc_feature 1..20: note = chemically synthesized
  source 1..20: mol_type = other DNA
tatatgactttatttgtata

SEQ ID NO: 9781 - DNA, 20 bp, synthetic construct
  misc_feature 1..20: note = chemically synthesized
  source 1..20: mol_type = other DNA
tgactttatttgtatataga

SEQ ID NO: 9782 - DNA, 20 bp, synthetic construct
  misc_feature 1..20: note = chemically synthesized
  source 1..20: mol_type = other DNA
tttatttgtatatagaaaga

SEQ ID NO: 9783 - DNA, 20 bp, synthetic construct
  misc_feature 1..20: note = chemically synthesized
  source 1..20: mol_type = other DNA
gaaagatggatgatgtgcct

SEQ ID NO: 9784 - DNA, 20 bp, synthetic construct
  misc_feature 1..20: note = chemically synthesized
  source 1..20: mol_type = other DNA
gtgcctgagattctgatcac

SEQ ID NO: 9785 - DNA, 20 bp, synthetic construct
  misc_feature 1..20: note = chemically synthesized
  source 1..20: mol_type = other DNA
tgcctgagattctgatcaca

SEQ ID NO: 9786 - DNA, 20 bp, synthetic construct
  misc_feature 1..20: note = chemically synthesized
  source 1..20: mol_type = other DNA
gcctgagattctgatcacaa

SEQ ID NO: 9787 - DNA, 20 bp, synthetic construct
  misc_feature 1..20: note = chemically synthesized
  source 1..20: mol_type = other DNA
cctgagattctgatcacaag

SEQ ID NO: 9788 - DNA, 20 bp, synthetic construct
  misc_feature 1..20: note = chemically synthesized
  source 1..20: mol_type = other DNA
caaggggaaatgttataaaa

SEQ ID NO: 9789 - DNA, 20 bp, synthetic construct
  misc_feature 1..20: note = chemically synthesized
  source 1..20: mol_type = other DNA
aaggggaaatgttataaaat

SEQ ID NO: 9790 - DNA, 20 bp, synthetic construct
  misc_feature 1..20: note = chemically synthesized
  source 1..20: mol_type = other DNA
aggggaaatgttataaaata

SEQ ID NO: 9791 - DNA, 20 bp, synthetic construct
  misc_feature 1..20: note = chemically synthesized
  source 1..20: mol_type = other DNA
ggaaatgttataaaataggg

SEQ ID NO: 9792 - DNA, 20 bp, synthetic construct
  misc_feature 1..20: note = chemically synthesized
  source 1..20: mol_type = other DNA
aaatgttataaaatagggta

SEQ ID NO: 9793 - DNA, 20 bp, synthetic construct
  misc_feature 1..20: note = chemically synthesized
  source 1..20: mol_type = other DNA
atgttataaaatagggtaga

SEQ ID NO: 9794 - DNA, 20 bp, synthetic construct
  misc_feature 1..20: note = chemically synthesized
  source 1..20: mol_type = other DNA
tgttataaaatagggtagag

SEQ ID NO: 9795 - DNA, 20 bp, synthetic construct
  misc_feature 1..20: note = chemically synthesized
  source 1..20: mol_type = other DNA
ttataaaatagggtagagag

SEQ ID NO: 9796 - DNA, 20 bp, synthetic construct
  misc_feature 1..20: note = chemically synthesized
  source 1..20: mol_type = other DNA
tgacctttaaactttgttac

SEQ ID NO: 9797 - DNA, 20 bp, synthetic construct
  misc_feature 1..20: note = chemically synthesized
  source 1..20: mol_type = other DNA
caagttatttttctgtaacc

SEQ ID NO: 9798 - DNA, 20 bp, synthetic construct
  misc_feature 1..20: note = chemically synthesized
  source 1..20: mol_type = other DNA
gttatttttctgtaacctgg

SEQ ID NO: 9799 - DNA, 20 bp, synthetic construct
  misc_feature 1..20: note = chemically synthesized
  source 1..20: mol_type = other DNA
tgtaacctggaagccaacga

SEQ ID NO: 9800 - DNA, 20 bp, synthetic construct
  misc_feature 1..20: note = chemically synthesized
  source 1..20: mol_type = other DNA
cgaaagatattgaataattc

SEQ ID NO: 9801 - DNA, 20 bp, synthetic construct
  misc_feature 1..20: note = chemically synthesized
  source 1..20: mol_type = other DNA
agatattgaataattcaaga

SEQ ID NO: 9802 - DNA, 20 bp, synthetic construct
  misc_feature 1..20: note = chemically synthesized
  source 1..20: mol_type = other DNA
gatattgaataattcaagaa

SEQ ID NO: 9803 - DNA, 20 bp, synthetic construct
  misc_feature 1..20: note = chemically synthesized
  source 1..20: mol_type = other DNA
attgaataattcaagaaagg

SEQ ID NO: 9804 - DNA, 20 bp, synthetic construct
  misc_feature 1..20: note = chemically synthesized
  source 1..20: mol_type = other DNA
gaataattcaagaaaggtgg

SEQ ID NO: 9805 - DNA, 20 bp, synthetic construct
  misc_feature 1..20: note = chemically synthesized
  source 1..20: mol_type = other DNA
attcaagaaaggtggtggca

SEQ ID NO: 9806 - DNA, 20 bp, synthetic construct
  misc_feature 1..20: note = chemically synthesized
  source 1..20: mol_type = other DNA
ggtttgatttgtgtctttaa

SEQ ID NO: 9807 - DNA, 20 bp, synthetic construct
  misc_feature 1..20: note = chemically synthesized
  source 1..20: mol_type = other DNA
tttaaaagattattctcact

SEQ ID NO: 9808 - DNA, 20 bp, synthetic construct
  misc_feature 1..20: note = chemically synthesized
  source 1..20: mol_type = other DNA
aagattattctcacttagtg

SEQ ID NO: 9809 - DNA, 20 bp, synthetic construct
  misc_feature 1..20: note = chemically synthesized
  source 1..20: mol_type = other DNA
cttagtgaagaaatgtattt

SEQ ID NO: 9810 - DNA, 20 bp, synthetic construct
  misc_feature 1..20: note = chemically synthesized
  source 1..20: mol_type = other DNA
agtgaagaaatgtattttag

SEQ ID NO: 9811 - DNA, 20 bp, synthetic construct
  misc_feature 1..20: note = chemically synthesized
  source 1..20: mol_type = other DNA
gaagaaatgtattttagaag

SEQ ID NO: 9812 - DNA, 20 bp, synthetic construct
  misc_feature 1..20: note = chemically synthesized
  source 1..20: mol_type = other DNA
agaaatgtattttagaagta

SEQ ID NO: 9813 - DNA, 20 bp, synthetic construct
  misc_feature 1..20: note = chemically synthesized
  source 1..20: mol_type = other DNA
tattttagaagtagagaaaa

SEQ ID NO: 9814 - DNA, 20 bp, synthetic construct
  misc_feature 1..20: note = chemically synthesized
  source 1..20: mol_type = other DNA
attttagaagtagagaaaat

SEQ ID NO: 9815 - DNA, 20 bp, synthetic construct
  misc_feature 1..20: note = chemically synthesized
  source 1..20: mol_type = other DNA
tttagaagtagagaaaatgg

SEQ ID NO: 9816 - DNA, 20 bp, synthetic construct
  misc_feature 1..20: note = chemically synthesized
  source 1..20: mol_type = other DNA
tagagaaaatgggagacaaa

SEQ ID NO: 9817 - DNA, 20 bp, synthetic construct
  misc_feature 1..20: note = chemically synthesized
  source 1..20: mol_type = other DNA
gaaaatgggagacaaatagc

SEQ ID NO: 9818 - DNA, 20 bp, synthetic construct
  misc_feature 1..20: note = chemically synthesized
  source 1..20: mol_type = other DNA
aaaatgggagacaaatagct

SEQ ID NO: 9819 - DNA, 20 bp, synthetic construct
  misc_feature 1..20: note = chemically synthesized
  source 1..20: mol_type = other DNA
aaatagctgggcttctgttg

SEQ ID NO: 9820 - DNA, 20 bp, synthetic construct
  misc_feature 1..20: note = chemically synthesized
  source 1..20: mol_type = other DNA
tagctgggcttctgttgcag

SEQ ID NO: 9821 - DNA, 20 bp, synthetic construct
  misc_feature 1..20: note = chemically synthesized
  source 1..20: mol_type = other DNA
agctgggcttctgttgcagt

SEQ ID NO: 9822 - DNA, 20 bp, synthetic construct
  misc_feature 1..20: note = chemically synthesized
  source 1..20: mol_type = other DNA
gctgggcttctgttgcagta

SEQ ID NO: 9823 - DNA, 20 bp, synthetic construct
  misc_feature 1..20: note = chemically synthesized
  source 1..20: mol_type = other DNA
gggcttctgttgcagtaggg

SEQ ID NO: 9824 - DNA, 20 bp, synthetic construct
  misc_feature 1..20: note = chemically synthesized
  source 1..20: mol_type = other DNA
ttctgttgcagtagggaaga

SEQ ID NO: 9825 - DNA, 20 bp, synthetic construct
  misc_feature 1..20: note = chemically synthesized
  source 1..20: mol_type = other DNA
gacaatgccatttctattat

SEQ ID NO: 9826 - DNA, 20 bp, synthetic construct
  misc_feature 1..20: note = chemically synthesized
  source 1..20: mol_type = other DNA
gccatttctattatcagact

SEQ ID NO: 9827 - DNA, 20 bp, synthetic construct
  misc_feature 1..20: note = chemically synthesized
  source 1..20: mol_type = other DNA
ttatcagacttggaccatga

SEQ ID NO: 9828 - DNA, 20 bp, synthetic construct
  misc_feature 1..20: note = chemically synthesized
  source 1..20: mol_type = other DNA
ttggaccatgacggtgatgt

SEQ ID NO: 9829 - DNA, 20 bp, synthetic construct
  misc_feature 1..20: note = chemically synthesized
  source 1..20: mol_type = other DNA
gtgatgtcagtcgtgaacac

SEQ ID NO: 9830 - DNA, 20 bp, synthetic construct
  misc_feature 1..20: note = chemically synthesized
  source 1..20: mol_type = other DNA
gtcagtcgtgaacacaagaa

SEQ ID NO: 9831 - DNA, 20 bp, synthetic construct
  misc_feature 1..20: note = chemically synthesized
  source 1..20: mol_type = other DNA
tcagtcgtgaacacaagaat

SEQ ID NO: 9832 - DNA, 20 bp, synthetic construct
  misc_feature 1..20: note = chemically synthesized
  source 1..20: mol_type = other DNA
cagtcgtgaacacaagaata

SEQ ID NO: 9833 - DNA, 20 bp, synthetic construct
  misc_feature 1..20: note = chemically synthesized
  source 1..20: mol_type = other DNA
aagaatagggccacatttgt

SEQ ID NO: 9834 - DNA, 20 bp, synthetic construct
  misc_feature 1..20: note = chemically synthesized
  source 1..20: mol_type = other DNA
tagggccacatttgtgagtt

SEQ ID NO: 9835 - DNA, 20 bp, synthetic construct
  misc_feature 1..20: note = chemically synthesized
  source 1..20: mol_type = other DNA
ggccacatttgtgagtttag

SEQ ID NO: 9836 - DNA, 20 bp, synthetic construct
  misc_feature 1..20: note = chemically synthesized
  source 1..20: mol_type = other DNA
gtttagtggtacgataaaat

SEQ ID NO: 9837 - DNA, 20 bp, synthetic construct
  misc_feature 1..20: note = chemically synthesized
  source 1..20: mol_type = other DNA
gtacgataaaatcagaaata

SEQ ID NO: 9838 - DNA, 20 bp, synthetic construct
  misc_feature 1..20: note = chemically synthesized
  source 1..20: mol_type = other DNA
taaaatcagaaatacagtct

SEQ ID NO: 9839 - DNA, 20 bp, synthetic construct
  misc_feature 1..20: note = chemically synthesized
  source 1..20: mol_type = other DNA
gcactcttgtaaaatgcaaa

SEQ ID NO: 9840 - DNA, 20 bp, synthetic construct
  misc_feature 1..20: note = chemically synthesized
  source 1..20: mol_type = other DNA
aaaatgcaaaaagatgtact

SEQ ID NO: 9841 - DNA, 20 bp, synthetic construct
  misc_feature 1..20: note = chemically synthesized
  source 1..20: mol_type = other DNA
aaaagatgtacttagatatg

SEQ ID NO: 9842 - DNA, 20 bp, synthetic construct
  misc_feature 1..20: note = chemically synthesized
  source 1..20: mol_type = other DNA
tgtacttagatatgtggatc

SEQ ID NO: 9843 - DNA, 20 bp, synthetic construct
  misc_feature 1..20: note = chemically synthesized
  source 1..20: mol_type = other DNA
tacttagatatgtggatctg

SEQ ID NO: 9844 - DNA, 20 bp, synthetic construct
  misc_feature 1..20: note = chemically synthesized
  source 1..20: mol_type = other DNA
agatatgtggatctggagct

SEQ ID NO: 9845 - DNA, 20 bp, synthetic construct
  misc_feature 1..20: note = chemically synthesized
  source 1..20: mol_type = other DNA
atgtggatctggagctcaga

SEQ ID NO: 9846 - DNA, 20 bp, synthetic construct
  misc_feature 1..20: note = chemically synthesized
  source 1..20: mol_type = other DNA
gagctcagaaagaatacaac

SEQ ID NO: 9847 - DNA, 20 bp, synthetic construct
  misc_feature 1..20: note = chemically synthesized
  source 1..20: mol_type = other DNA
agctcagaaagaatacaacc

SEQ ID NO: 9848 - DNA, 20 bp, synthetic construct
  misc_feature 1..20: note = chemically synthesized
  source 1..20: mol_type = other DNA
agaaagaatacaaccaggtc

SEQ ID NO: 9849 - DNA, 20 bp, synthetic construct
  misc_feature 1..20: note = chemically synthesized
  source 1..20: mol_type = other DNA
atacaaccaggtcaagaata

SEQ ID NO: 9850 - DNA, 20 bp, synthetic construct
  misc_feature 1..20: note = chemically synthesized
  source 1..20: mol_type = other DNA
accaggtcaagaatacagaa

SEQ ID NO: 9851 - DNA, 20 bp, synthetic construct
  misc_feature 1..20: note = chemically synthesized
  source 1..20: mol_type = other DNA
gtcaagaatacagaatggaa

SEQ ID NO: 9852 - DNA, 20 bp, synthetic construct
  misc_feature 1..20: note = chemically synthesized
  source 1..20: mol_type = other DNA
cagaatggaacagaacatac

SEQ ID NO: 9853 - DNA, 20 bp, synthetic construct
  misc_feature 1..20: note = chemically synthesized
  source 1..20: mol_type = other DNA
tggaacagaacatacaagaa

SEQ ID NO: 9854 - DNA, 20 bp, synthetic construct
  misc_feature 1..20: note = chemically synthesized
  source 1..20: mol_type = other DNA
ccactacctgttaaaaatga

SEQ ID NO: 9855 - DNA, 20 bp, synthetic construct
  misc_feature 1..20: note = chemically synthesized
  source 1..20: mol_type = other DNA
tcaatatctccttaaaatct

SEQ ID NO: 9856 - DNA, 20 bp, synthetic construct
  misc_feature 1..20: note = chemically synthesized
  source 1..20: mol_type = other DNA
aaatcttagaatgtgtttgt

SEQ ID NO: 9857 - DNA, 20 bp, synthetic construct
  misc_feature 1..20: note = chemically synthesized
  source 1..20: mol_type = other DNA
aatcttagaatgtgtttgtg

SEQ ID NO: 9858 - DNA, 20 bp, synthetic construct
  misc_feature 1..20: note = chemically synthesized
  source 1..20: mol_type = other DNA
atcttagaatgtgtttgtga

SEQ ID NO: 9859 - DNA, 20 bp, synthetic construct
  misc_feature 1..20: note = chemically synthesized
  source 1..20: mol_type = other DNA
cttagaatgtgtttgtgagg

SEQ ID NO: 9860 - DNA, 20 bp, synthetic construct
  misc_feature 1..20: note = chemically synthesized
  source 1..20: mol_type = other DNA
ttagaatgtgtttgtgaggg

SEQ ID NO: 9861 - DNA, 20 bp, synthetic construct
  misc_feature 1..20: note = chemically synthesized
  source 1..20: mol_type = other DNA
tatgtttccaattcatatat

SEQ ID NO: 9862 - DNA, 20 bp, synthetic construct
  misc_feature 1..20: note = chemically synthesized
  source 1..20: mol_type = other DNA
attgattctaaaaaaaatgt

SEQ ID NO: 9863 - DNA, 20 bp, synthetic construct
  misc_feature 1..20: note = chemically synthesized
  source 1..20: mol_type = other DNA
ttgattctaaaaaaaatgtt

SEQ ID NO: 9864 - DNA, 20 bp, synthetic construct
  misc_feature 1..20: note = chemically synthesized
  source 1..20: mol_type = other DNA
aaaatgttaggtaaattctt

SEQ ID NO: 9865 - DNA, 20 bp, synthetic construct
  misc_feature 1..20: note = chemically synthesized
  source 1..20: mol_type = other DNA
aaatgttaggtaaattctta

SEQ ID NO: 9866 - DNA, 20 bp, synthetic construct
  misc_feature 1..20: note = chemically synthesized
  source 1..20: mol_type = other DNA
aggtaaattcttaaggccat

SEQ ID NO: 9867 - DNA, 20 bp, synthetic construct
  misc_feature 1..20: note = chemically synthesized
  source 1..20: mol_type = other DNA
ggtaaattcttaaggccatg

SEQ ID NO: 9868 - DNA, 20 bp, synthetic construct
  misc_feature 1..20: note = chemically synthesized
  source 1..20: mol_type = other DNA
atctttgtctgttaattcca

SEQ ID NO: 9869 - DNA, 20 bp, synthetic construct
  misc_feature 1..20: note = chemically synthesized
  source 1..20: mol_type = other DNA
gtctgttaattccaaagact

SEQ ID NO: 9870 - DNA, 20 bp, synthetic construct
  misc_feature 1..20: note = chemically synthesized
  source 1..20: mol_type = other DNA
cctgaaatgattttacacat

SEQ ID NO: 9871 - DNA, 20 bp, synthetic construct
  misc_feature 1..20: note = chemically synthesized
  source 1..20: mol_type = other DNA
ctgaaatgattttacacatt

SEQ ID NO: 9872 - DNA, 20 bp, synthetic construct
  misc_feature 1..20: note = chemically synthesized
  source 1..20: mol_type = other DNA
gaaatgattttacacattgg

SEQ ID NO: 9873 - DNA, 20 bp, synthetic construct
  misc_feature 1..20: note = chemically synthesized
  source 1..20: mol_type = other DNA
attttacacattgggagatc

SEQ ID NO: 9874 - DNA, 20 bp, synthetic construct
  misc_feature 1..20: note = chemically synthesized
  source 1..20: mol_type = other DNA
ggttacatgtttattctata

SEQ ID NO: 9875 - DNA, 20 bp, synthetic construct
  misc_feature 1..20: note = chemically synthesized
  source 1..20: mol_type = other DNA
tattctatatggattgcatt

SEQ ID NO: 9876 - DNA, 20 bp, synthetic construct
  misc_feature 1..20: note = chemically synthesized
  source 1..20: mol_type = other DNA
ttctatatggattgcattga

SEQ ID NO: 9877 - DNA, 20 bp, synthetic construct
  misc_feature 1..20: note = chemically synthesized
  source 1..20: mol_type = other DNA
tctatatggattgcattgag

SEQ ID NO: 9878 - DNA, 20 bp, synthetic construct
  misc_feature 1..20: note = chemically synthesized
  source 1..20: mol_type = other DNA
cattgagaggatttgtataa

SEQ ID NO: 9879 - DNA, 20 bp, synthetic construct
  misc_feature 1..20: note = chemically synthesized
  source 1..20: mol_type = other DNA
gaggatttgtataacagaat

SEQ ID NO: 9880 - DNA, 20 bp, synthetic construct
  misc_feature 1..20: note = chemically synthesized
  source 1..20: mol_type = other DNA
aggatttgtataacagaata

SEQ ID NO: 9881 - DNA, 20 bp, synthetic construct
  misc_feature 1..20: note = chemically synthesized
  source 1..20: mol_type = other DNA
ctttttttcttttctcttct

SEQ ID NO: 9882 - DNA, 20 bp, synthetic construct
  misc_feature 1..20: note = chemically synthesized
  source 1..20: mol_type = other DNA
ttttcttttctcttctgaga

SEQ ID NO: 9883 - DNA, 20 bp, synthetic construct
  misc_feature 1..20: note = chemically synthesized
  source 1..20: mol_type = other DNA
ttcttttctcttctgagatg

SEQ ID NO: 9884 - DNA, 20 bp, synthetic construct
  misc_feature 1..20: note = chemically synthesized
  source 1..20: mol_type = other DNA
gagtttcatccctattgccc

SEQ ID NO: 9885 - DNA, 20 bp, synthetic construct
  misc_feature 1..20: note = chemically synthesized
  source 1..20: mol_type = other DNA
ttcatccctattgcccaagc

SEQ ID NO: 9886 - DNA, 20 bp, synthetic construct
  misc_feature 1..20: note = chemically synthesized
  source 1..20: mol_type = other DNA
catccctattgcccaagcta

SEQ ID NO: 9887 - DNA, 20 bp, synthetic construct
  misc_feature 1..20: note = chemically synthesized
  source 1..20: mol_type = other DNA
ttgcccaagctagagtgcaa

SEQ ID NO: 9888 - DNA, 20 bp, synthetic construct
  misc_feature 1..20: note = chemically synthesized
  source 1..20: mol_type = other DNA
tagagtgcaatggtgcaatc

SEQ ID NO: 9889 - DNA, 20 bp, synthetic construct
  misc_feature 1..20: note = chemically synthesized
  source 1..20: mol_type = other DNA
agagtgcaatggtgcaatct

SEQ ID NO: 9890 - DNA, 20 bp, synthetic construct
  misc_feature 1..20: note = chemically synthesized
  source 1..20: mol_type = other DNA
tcaccgcaacctctgcctcc

SEQ ID NO: 9891 - DNA, 20 bp, synthetic construct
  misc_feature 1..20: note = chemically synthesized
  source 1..20: mol_type = other DNA
caccgcaacctctgcctcct

SEQ ID NO: 9892 - DNA, 20 bp, synthetic construct
  misc_feature 1..20: note = chemically synthesized
  source 1..20: mol_type = other DNA
aacctctgcctcctgggttc

SEQ ID NO: 9893 - DNA, 20 bp, synthetic construct
  misc_feature 1..20: note = chemically synthesized
  source 1..20: mol_type = other DNA
ttcaagcaattctcctgcct

SEQ ID NO: 9894 - DNA, 20 bp, synthetic construct
  misc_feature 1..20: note = chemically synthesized
  source 1..20: mol_type = other DNA
tcctgcctcagccacctgaa

SEQ ID NO: 9895 - DNA, 20 bp, synthetic construct
  misc_feature 1..20: note = chemically synthesized
  source 1..20: mol_type = other DNA
gcctcagccacctgaatagc

SEQ ID NO: 9896 - DNA, 20 bp, synthetic construct
  misc_feature 1..20: note = chemically synthesized
  source 1..20: mol_type = other DNA
cctcagccacctgaatagct

SEQ ID NO: 9897 - DNA, 20 bp, synthetic construct
  misc_feature 1..20: note = chemically synthesized
  source 1..20: mol_type = other DNA
cacctgaatagctgggactg

SEQ ID NO: 9898 - DNA, 20 bp, synthetic construct
  misc_feature 1..20: note = chemically synthesized
  source 1..20: mol_type = other DNA
acctgaatagctgggactgc

SEQ ID NO: 9899 - DNA, 20 bp, synthetic construct
  misc_feature 1..20: note = chemically synthesized
  source 1..20: mol_type = other DNA
gcaggcatgcaccacacgcc

SEQ ID NO: 9900 - DNA, 20 bp, synthetic construct
  misc_feature 1..20: note = chemically synthesized
  source 1..20: mol_type = other DNA
cccggctgattttgtatttt

SEQ ID NO: 9901 - DNA, 20 bp, synthetic construct
  misc_feature 1..20: note = chemically synthesized
  source 1..20: mol_type = other DNA
ggctgattttgtatttttag

SEQ ID NO: 9902 - DNA, 20 bp, synthetic construct
  misc_feature 1..20: note = chemically synthesized
  source 1..20: mol_type = other DNA
ctgattttgtatttttagta

SEQ ID NO: 9903 - DNA, 20 bp, synthetic construct
  misc_feature 1..20: note = chemically synthesized
  source 1..20: mol_type = other DNA
ttttgtatttttagtagaga

SEQ ID NO: 9904 - DNA, 20 bp, synthetic construct
  misc_feature 1..20: note = chemically synthesized
  source 1..20: mol_type = other DNA
tttgtatttttagtagagat

SEQ ID NO: 9905 - DNA, 20 bp, synthetic construct
  misc_feature 1..20: note = chemically synthesized
  source 1..20: mol_type = other DNA
ttgtatttttagtagagatg

SEQ ID NO: 9906 - DNA, 20 bp, synthetic construct
  misc_feature 1..20: note = chemically synthesized
  source 1..20: mol_type = other DNA
gagatggggtttcaccatgt

SEQ ID NO: 9907 - DNA, 20 bp, synthetic construct
  misc_feature 1..20: note = chemically synthesized
  source 1..20: mol_type = other DNA
tggggtttcaccatgttggt

SEQ ID NO: 9908 - DNA, 20 bp, synthetic construct
  misc_feature 1..20: note = chemically synthesized
  source 1..20: mol_type = other DNA
ggggtttcaccatgttggtc

SEQ ID NO: 9909 - DNA, 20 bp, synthetic construct
  misc_feature 1..20: note = chemically synthesized
  source 1..20: mol_type = other DNA
tttcaccatgttggtcaggc

SEQ ID NO: 9910 - DNA, 20 bp, synthetic construct
  misc_feature 1..20: note = chemically synthesized
  source 1..20: mol_type = other DNA
ggtcttgaactcctgacctc

SEQ ID NO: 9911 - DNA, 20 bp, synthetic construct
  misc_feature 1..20: note = chemically synthesized
  source 1..20: mol_type = other DNA
ctcaagtgatctgcctgcct

SEQ ID NO: 9912 - DNA, 20 bp, synthetic construct
  misc_feature 1..20: note = chemically synthesized
  source 1..20: mol_type = other DNA
ctgcctgccttggcctccca

SEQ ID NO: 9913 - DNA, 20 bp, synthetic construct
  misc_feature 1..20: note = chemically synthesized
  source 1..20: mol_type = other DNA
gccttggcctcccaaagtgc

SEQ ID NO: 9914 - DNA, 20 bp, synthetic construct
  misc_feature 1..20: note = chemically synthesized
  source 1..20: mol_type = other DNA
ccttggcctcccaaagtgct

SEQ ID NO: 9915 - DNA, 20 bp, synthetic construct
  misc_feature 1..20: note = chemically synthesized
  source 1..20: mol_type = other DNA
tcccaaagtgctgggtttac

SEQ ID NO: 9916 - DNA, 20 bp, synthetic construct
  misc_feature 1..20: note = chemically synthesized
  source 1..20: mol_type = other DNA
agtgctgggtttacaagcct

SEQ ID NO: 9917 - DNA, 20 bp, synthetic construct
  misc_feature 1..20: note = chemically synthesized
  source 1..20: mol_type = other DNA
caagcctgagccaccgcatc

SEQ ID NO: 9918 - DNA, 20 bp, synthetic construct
  misc_feature 1..20: note = chemically synthesized
  source 1..20: mol_type = other DNA
cctgagccaccgcatccagc

SEQ ID NO: 9919 - DNA, 20 bp, synthetic construct
  misc_feature 1..20: note = chemically synthesized
  source 1..20: mol_type = other DNA
ctgagccaccgcatccagcc

SEQ ID NO: 9920 - DNA, 20 bp, synthetic construct
  misc_feature 1..20: note = chemically synthesized
  source 1..20: mol_type = other DNA
ccaccgcatccagccaggat

SEQ ID NO: 9921 - DNA, 20 bp, synthetic construct
  misc_feature 1..20: note = chemically synthesized
  source 1..20: mol_type = other DNA
caccgcatccagccaggata

SEQ ID NO: 9922 - DNA, 20 bp, synthetic construct
  misc_feature 1..20: note = chemically synthesized
  source 1..20: mol_type = other DNA
ccagccaggataaggtctaa

SEQ ID NO: 9923 - DNA, 20 bp, synthetic construct
  misc_feature 1..20: note = chemically synthesized
  source 1..20: mol_type = other DNA
gccaggataaggtctaaaag

SEQ ID NO: 9924 - DNA, 20 bp, synthetic construct
  misc_feature 1..20: note = chemically synthesized
  source 1..20: mol_type = other DNA
ggataaggtctaaaagtgga

SEQ ID NO: 9925 - DNA, 20 bp, synthetic construct
  misc_feature 1..20: note = chemically synthesized
  source 1..20: mol_type = other DNA
aggtctaaaagtggaaagaa

SEQ ID NO: 9926 - DNA, 20 bp, synthetic construct
  misc_feature 1..20: note = chemically synthesized
  source 1..20: mol_type = other DNA
gaatagcatctactcttgtt

SEQ ID NO: 9927 - DNA, 20 bp, synthetic construct
  misc_feature 1..20: note = chemically synthesized
  source 1..20: mol_type = other DNA
aatagcatctactcttgttc

SEQ ID NO: 9928 - DNA, 20 bp, synthetic construct
  misc_feature 1..20: note = chemically synthesized
  source 1..20: mol_type = other DNA
actcttgttcaggaaacaat

SEQ ID NO: 9929 - DNA, 20 bp, synthetic construct
  misc_feature 1..20: note = chemically synthesized
  source 1..20: mol_type = other DNA
ctcttgttcaggaaacaatg

SEQ ID NO: 9930 - DNA, 20 bp, synthetic construct
  misc_feature 1..20: note = chemically synthesized
  source 1..20: mol_type = other DNA
ggaaacaatgaggacctgac

SEQ ID NO: 9931 - DNA, 20 bp, synthetic construct
  misc_feature 1..20: note = chemically synthesized
  source 1..20: mol_type = other DNA
gaaacaatgaggacctgact

SEQ ID NO: 9932 - DNA, 20 bp, synthetic construct
  misc_feature 1..20: note = chemically synthesized
  source 1..20: mol_type = other DNA
acaatgaggacctgactggg

SEQ ID NO: 9933 - DNA, 20 bp, synthetic construct
  misc_feature 1..20: note = chemically synthesized
  source 1..20: mol_type = other DNA
tgaggacctgactgggcagt

SEQ ID NO: 9934 - DNA, 20 bp, synthetic construct
  misc_feature 1..20: note = chemically synthesized
  source 1..20: mol_type = other DNA
aggacctgactgggcagtaa

SEQ ID NO: 9935 - DNA, 20 bp, synthetic construct
  misc_feature 1..20: note = chemically synthesized
  source 1..20: mol_type = other DNA
acctgactgggcagtaagag

SEQ ID NO: 9936 - DNA, 20 bp, synthetic construct
  misc_feature 1..20: note = chemically synthesized
  source 1..20: mol_type = other DNA
gcagtaagagtggtgattaa

SEQ ID NO: 9937 - DNA, 20 bp, synthetic construct
  misc_feature 1..20: note = chemically synthesized
  source 1..20: mol_type = other DNA
taagagtggtgattaataga

SEQ ID NO: 9938 - DNA, 20 bp, synthetic construct
  misc_feature 1..20: note = chemically synthesized
  source 1..20: mol_type = other DNA
aagagtggtgattaatagat

SEQ ID NO: 9939 - DNA, 20 bp, synthetic construct
  misc_feature 1..20: note = chemically synthesized
  source 1..20: mol_type = other DNA
agagtggtgattaatagata

SEQ ID NO: 9940 - DNA, 20 bp, synthetic construct
  misc_feature 1..20: note = chemically synthesized
  source 1..20: mol_type = other DNA
taatagatagggacaaattg

SEQ ID NO: 9941 - DNA, 20 bp, synthetic construct
  misc_feature 1..20: note = chemically synthesized
  source 1..20: mol_type = other DNA
tagatagggacaaattgaag

SEQ ID NO: 9942 - DNA, 20 bp, synthetic construct
  misc_feature 1..20: note = chemically synthesized
  source 1..20: mol_type = other DNA
agcagaatcgaactgttgat

SEQ ID NO: 9943 - DNA, 20 bp, synthetic construct
  misc_feature 1..20: note = chemically synthesized
  source 1..20: mol_type = other DNA
cagaatcgaactgttgatta

SEQ ID NO: 9944 - DNA, 20 bp, synthetic construct
  misc_feature 1..20: note = chemically synthesized
  source 1..20: mol_type = other DNA
agaatcgaactgttgattag

SEQ ID NO: 9945 - DNA, 20 bp, synthetic construct
  misc_feature 1..20: note = chemically synthesized
  source 1..20: mol_type = other DNA
atcgaactgttgattagagg

SEQ ID NO: 9946 - DNA, 20 bp, synthetic construct
  misc_feature 1..20: note = chemically synthesized
  source 1..20: mol_type = other DNA
tcgaactgttgattagaggt

SEQ ID NO: 9947 - DNA, 20 bp, synthetic construct
  misc_feature 1..20: note = chemically synthesized
  source 1..20: mol_type = other DNA
cgaactgttgattagaggta

SEQ ID NO: 9948 - DNA, 20 bp, synthetic construct
  misc_feature 1..20: note = chemically synthesized
  source 1..20: mol_type = other DNA
atgattttaatctgtgacct

SEQ ID NO: 9949 - DNA, 20 bp, synthetic construct
  misc_feature 1..20: note = chemically synthesized
  source 1..20: mol_type = other DNA
taatctgtgaccttggtgaa

SEQ ID NO: 9950 - DNA, 20 bp, synthetic construct
  misc_feature 1..20: note = chemically synthesized
  source 1..20: mol_type = other DNA
aatctgtgaccttggtgaat

SEQ ID NO: 9951 - DNA, 20 bp, synthetic construct
  misc_feature 1..20: note = chemically synthesized
  source 1..20: mol_type = other DNA
tgtgaccttggtgaatgggc

SEQ ID NO: 9952 - DNA, 20 bp, synthetic construct
  misc_feature 1..20: note = chemically synthesized
  source 1..20: mol_type = other DNA
gaccttggtgaatgggcaag

SEQ ID NO: 9953 - DNA, 20 bp, synthetic construct
  misc_feature 1..20: note = chemically synthesized
  source 1..20: mol_type = other DNA
tagctatctaatgactaaaa

SEQ ID NO: 9954 - DNA, 20 bp, synthetic construct
  misc_feature 1..20: note = chemically synthesized
  source 1..20: mol_type = other DNA
atgactaaaatggaaaacac

SEQ ID NO: 9955 - DNA, 20 bp, synthetic construct
  misc_feature 1..20: note = chemically synthesized
  source 1..20: mol_type = other DNA
actaaaatggaaaacactgg

SEQ ID NO: 9956 - DNA, 20 bp, synthetic construct
  misc_feature 1..20: note = chemically synthesized
  source 1..20: mol_type = other DNA
taaaatggaaaacactggaa

SEQ ID NO: 9957 - DNA, 20 bp, synthetic construct
  misc_feature 1..20: note = chemically synthesized
  source 1..20: mol_type = other DNA
ggaaaacactggaagagaaa

SEQ ID NO: 9958 - DNA, 20 bp, synthetic construct
  misc_feature 1..20: note = chemically synthesized
  source 1..20: mol_type = other DNA
cactggaagagaaacagttt

SEQ ID NO: 9959 - DNA, 20 bp, synthetic construct
  misc_feature 1..20: note = chemically synthesized
  source 1..20: mol_type = other DNA
agaaacagttttagtataac

SEQ ID NO: 9960 - DNA, 20 bp, synthetic construct
  misc_feature 1..20: note = chemically synthesized
  source 1..20: mol_type = other DNA
acaagtgaaatacccatgct

SEQ ID NO: 9961 - DNA, 20 bp, synthetic construct
  misc_feature 1..20: note = chemically synthesized
  source 1..20: mol_type = other DNA
gaaatacccatgctgagtct

SEQ ID NO: 9962 - DNA, 20 bp, synthetic construct
  misc_feature 1..20: note = chemically synthesized
  source 1..20: mol_type = other DNA
aaatacccatgctgagtctg

SEQ ID NO: 9963 - DNA, 20 bp, synthetic construct
  misc_feature 1..20: note = chemically synthesized
  source 1..20: mol_type = other DNA
tgctgagtctgaggtgccta

SEQ ID NO: 9964 - DNA, 20 bp, synthetic construct
  misc_feature 1..20: note = chemically synthesized
  source 1..20: mol_type = other DNA
gctgagtctgaggtgcctat

SEQ ID NO: 9965 - DNA, 20 bp, synthetic construct
  misc_feature 1..20: note = chemically synthesized
  source 1..20: mol_type = other DNA
tataggacatctatataaat

SEQ ID NO: 9966 - DNA, 20 bp, synthetic construct
  misc_feature 1..20: note = chemically synthesized
  source 1..20: mol_type = other DNA
gacatctatataaataagcc

SEQ ID NO: 9967 - DNA, 20 bp, synthetic construct
  misc_feature 1..20: note = chemically synthesized
  source 1..20: mol_type = other DNA
ccagtacattgtttgatata

SEQ ID NO: 9968 - DNA, 20 bp, synthetic construct
  misc_feature 1..20: note = chemically synthesized
  source 1..20: mol_type = other DNA
cagtacattgtttgatatat

SEQ ID NO: 9969 - DNA, 20 bp, synthetic construct
  misc_feature 1..20: note = chemically synthesized
  source 1..20: mol_type = other DNA
cattgtttgatatatgggtt

SEQ ID NO: 9970 - DNA, 20 bp, synthetic construct
  misc_feature 1..20: note = chemically synthesized
  source 1..20: mol_type = other DNA
tgatatatgggtttggcact

SEQ ID NO: 9971 - DNA, 20 bp, synthetic construct
  misc_feature 1..20: note = chemically synthesized
  source 1..20: mol_type = other DNA
gatatatgggtttggcactg

SEQ ID NO: 9972 - DNA, 20 bp, synthetic construct
  misc_feature 1..20: note = chemically synthesized
  source 1..20: mol_type = other DNA
tatgggtttggcactgaggt

SEQ ID NO: 9973 - DNA, 20 bp, synthetic construct
  misc_feature 1..20: note = chemically synthesized
  source 1..20: mol_type = other DNA
tgggtttggcactgaggttg

SEQ ID NO: 9974 - DNA, 20 bp, synthetic construct
  misc_feature 1..20: note = chemically synthesized
  source 1..20: mol_type = other DNA
gggtttggcactgaggttgg

SEQ ID NO: 9975 - DNA, 20 bp, synthetic construct
  misc_feature 1..20: note = chemically synthesized
  source 1..20: mol_type = other DNA
ttggcactgaggttggaggt

SEQ ID NO: 9976 - DNA, 20 bp, synthetic construct
  misc_feature 1..20: note = chemically synthesized
  source 1..20: mol_type = other DNA
ggcactgaggttggaggtca

SEQ ID NO: 9977 - DNA, 20 bp, synthetic construct
  misc_feature 1..20: note = chemically synthesized
  source 1..20: mol_type = other DNA
gcactgaggttggaggtcag

SEQ ID NO: 9978 - DNA, 20 bp, synthetic construct
  misc_feature 1..20: note = chemically synthesized
  source 1..20: mol_type = other DNA
tgaggttggaggtcagaggt

SEQ ID NO: 9979 - DNA, 20 bp, synthetic construct
  misc_feature 1..20: note = chemically synthesized
  source 1..20: mol_type = other DNA
ggaggtcagaggttagaaat

SEQ ID NO: 9980 - DNA, 20 bp, synthetic construct
  misc_feature 1..20: note = chemically synthesized
  source 1..20: mol_type = other DNA
aggtcagaggttagaaatca

SEQ ID NO: 9981 - DNA, 20 bp, synthetic construct
  misc_feature 1..20: note = chemically synthesized
  source 1..20: mol_type = other DNA
cagaggttagaaatcagagt

SEQ ID NO: 9982 - DNA, 20 bp, synthetic construct
  misc_feature 1..20: note = chemically synthesized
  source 1..20: mol_type = other DNA
agaggttagaaatcagagtt

SEQ ID NO: 9983 - DNA, 20 bp, synthetic construct
  misc_feature 1..20: note = chemically synthesized
  source 1..20: mol_type = other DNA
tagaaatcagagttgggaat

SEQ ID NO: 9984 - DNA, 20 bp, synthetic construct
  misc_feature 1..20: note = chemically synthesized
  source 1..20: mol_type = other DNA
agaaatcagagttgggaatt

SEQ ID NO: 9985 - DNA, 20 bp, synthetic construct
  misc_feature 1..20: note = chemically synthesized
  source 1..20: mol_type = other DNA
agttgggaattgggattata

SEQ ID NO: 9986 - DNA, 20 bp, synthetic construct
  misc_feature 1..20: note = chemically synthesized
  source 1..20: mol_type = other DNA
gttgggaattgggattatac

SEQ ID NO: 9987 - DNA, 20 bp, synthetic construct
  misc_feature 1..20: note = chemically synthesized
  source 1..20: mol_type = other DNA
ggattatacaggctgtattt

SEQ ID NO: 9988 - DNA, 20 bp, synthetic construct
  misc_feature 1..20: note = chemically synthesized
  source 1..20: mol_type = other DNA
attatacaggctgtatttaa

SEQ ID NO: 9989 - DNA, 20 bp, synthetic construct
  misc_feature 1..20: note = chemically synthesized
  source 1..20: mol_type = other DNA
acaggctgtatttaagagtt

SEQ ID NO: 9990 - DNA, 20 bp, synthetic construct
  misc_feature 1..20: note = chemically synthesized
  source 1..20: mol_type = other DNA
ttagatataactgtgaatcc

SEQ ID NO: 9991 - DNA, 20 bp, synthetic construct
  misc_feature 1..20: note = chemically synthesized
  source 1..20: mol_type = other DNA
agatataactgtgaatccaa

SEQ ID NO: 9992 - DNA, 20 bp, synthetic construct
  misc_feature 1..20: note = chemically synthesized
  source 1..20: mol_type = other DNA
ccaagagtgtgatgaataca

SEQ ID NO: 9993 - DNA, 20 bp, synthetic construct
  misc_feature 1..20: note = chemically synthesized
  source 1..20: mol_type = other DNA
gatgaatacaaagttaaatg

SEQ ID NO: 9994 - DNA, 20 bp, synthetic construct
  misc_feature 1..20: note = chemically synthesized
  source 1..20: mol_type = other DNA
atgaatacaaagttaaatga

SEQ ID NO: 9995 - DNA, 20 bp, synthetic construct
  misc_feature 1..20: note = chemically synthesized
  source 1..20: mol_type = other DNA
aacatttaatgtgaaatctc

SEQ ID NO: 9996 - DNA, 20 bp, synthetic construct
  misc_feature 1..20: note = chemically synthesized
  source 1..20: mol_type = other DNA
acatttaatgtgaaatctca

SEQ ID NO: 9997 - DNA, 20 bp, synthetic construct
  misc_feature 1..20: note = chemically synthesized
  source 1..20: mol_type = other DNA
tttaatgtgaaatctcaagg

SEQ ID NO: 9998 - DNA, 20 bp, synthetic construct
  misc_feature 1..20: note = chemically synthesized
  source 1..20: mol_type = other DNA
tgaaatctcaaggaagtatg

SEQ ID NO: 9999 - DNA, 20 bp, synthetic construct
  misc_feature 1..20: note = chemically synthesized
  source 1..20: mol_type = other DNA
atctcaaggaagtatgaagt

SEQ ID NO: 10000 - DNA, 20 bp, synthetic construct
  misc_feature 1..20: note = chemically synthesized
  source 1..20: mol_type = other DNA
aggaagtatgaagtaagaca

SEQ ID NO: 10001 - DNA, 20 bp, synthetic construct
  misc_feature 1..20: note = chemically synthesized
  source 1..20: mol_type = other DNA
cccaaaatccccgatgattt

SEQ ID NO: 10002 - DNA, 20 bp, synthetic construct
  misc_feature 1..20: note = chemically synthesized
  source 1..20: mol_type = other DNA
tccccgatgattttagaact

SEQ ID NO: 10003 - DNA, 20 bp, synthetic construct
  misc_feature 1..20: note = chemically synthesized
  source 1..20: mol_type = other DNA
aactcagtatcgattttaat

SEQ ID NO: 10004 - DNA, 20 bp, synthetic construct
  misc_feature 1..20: note = chemically synthesized
  source 1..20: mol_type = other DNA
taattagtgtaatgccaatg

SEQ ID NO: 10005 - DNA, 20 bp, synthetic construct
  misc_feature 1..20: note = chemically synthesized
  source 1..20: mol_type = other DNA
aattagtgtaatgccaatgt

SEQ ID NO: 10006 - DNA, 20 bp, synthetic construct
  misc_feature 1..20: note = chemically synthesized
  source 1..20: mol_type = other DNA
agtgtaatgccaatgtgggt

SEQ ID NO: 10007 - DNA, 20 bp, synthetic construct
  misc_feature 1..20: note = chemically synthesized
  source 1..20: mol_type = other DNA
aatgccaatgtgggttagaa

SEQ ID NO: 10008 - DNA, 20 bp, synthetic construct
  misc_feature 1..20: note = chemically synthesized
  source 1..20: mol_type = other DNA
gccaatgtgggttagaatgg

SEQ ID NO: 10009 - DNA, 20 bp, synthetic construct
  misc_feature 1..20: note = chemically synthesized
  source 1..20: mol_type = other DNA
aatggaagtcaacttgctgt

SEQ ID NO: 10010 - DNA, 20 bp, synthetic construct
  misc_feature 1..20: note = chemically synthesized
  source 1..20: mol_type = other DNA
agtcaacttgctgttggttt

SEQ ID NO: 10011 - DNA, 20 bp, synthetic construct
  misc_feature 1..20: note = chemically synthesized
  source 1..20: mol_type = other DNA
tcaacttgctgttggtttca

SEQ ID NO: 10012 - DNA, 20 bp, synthetic construct
  misc_feature 1..20: note = chemically synthesized
  source 1..20: mol_type = other DNA
acttgctgttggtttcagag

SEQ ID NO: 10013 - DNA, 20 bp, synthetic construct
  misc_feature 1..20: note = chemically synthesized
  source 1..20: mol_type = other DNA
cttgctgttggtttcagagc

SEQ ID NO: 10014 - DNA, 20 bp, synthetic construct
  misc_feature 1..20: note = chemically synthesized
  source 1..20: mol_type = other DNA
gctgttggtttcagagcagg

SEQ ID NO: 10015 - DNA, 20 bp, synthetic construct
  misc_feature 1..20: note = chemically synthesized
  source 1..20: mol_type = other DNA
ctgttggtttcagagcaggt

SEQ ID NO: 10016 - DNA, 20 bp, synthetic construct
  misc_feature 1..20: note = chemically synthesized
  source 1..20: mol_type = other DNA
gttggtttcagagcaggtag

SEQ ID NO: 10017 - DNA, 20 bp, synthetic construct
  misc_feature 1..20: note = chemically synthesized
  source 1..20: mol_type = other DNA
tttcagagcaggtaggagat

SEQ ID NO: 10018 - DNA, 20 bp, synthetic construct
  misc_feature 1..20: note = chemically synthesized
  source 1..20: mol_type = other DNA
ttcagagcaggtaggagata

SEQ ID NO: 10019 - DNA, 20 bp, synthetic construct
  misc_feature 1..20: note = chemically synthesized
  source 1..20: mol_type = other DNA
gcaggtaggagataaggttc

SEQ ID NO: 10020 - DNA, 20 bp, synthetic construct
  misc_feature 1..20: note = chemically synthesized
  source 1..20: mol_type = other DNA
taaggttctagattttgaca

SEQ ID NO: 10021 - DNA, 20 bp, synthetic construct
  misc_feature 1..20: note = chemically synthesized
  source 1..20: mol_type = other DNA
ctagattttgacacagtgaa

SEQ ID NO: 10022 - DNA, 20 bp, synthetic construct
  misc_feature 1..20: note = chemically synthesized
  source 1..20: mol_type = other DNA
cagtgaaaagctgaaacaaa

SEQ ID NO: 10023 - DNA, 20 bp, synthetic construct
  misc_feature 1..20: note = chemically synthesized
  source 1..20: mol_type = other DNA
agtgaaaagctgaaacaaaa

SEQ ID NO: 10024 - DNA, 20 bp, synthetic construct
  misc_feature 1..20: note = chemically synthesized
  source 1..20: mol_type = other DNA
aaagctgaaacaaaaaggaa

SEQ ID NO: 10025 - DNA, 20 bp, synthetic construct
  misc_feature 1..20: note = chemically synthesized
  source 1..20: mol_type = other DNA
aagctgaaacaaaaaggaaa

SEQ ID NO: 10026 - DNA, 20 bp, synthetic construct
  misc_feature 1..20: note = chemically synthesized
  source 1..20: mol_type = other DNA
ctgaaacaaaaaggaaaagg

SEQ ID NO: 10027 - DNA, 20 bp, synthetic construct
  misc_feature 1..20: note = chemically synthesized
  source 1..20: mol_type = other DNA
tgaaacaaaaaggaaaaggt

SEQ ID NO: 10028 - DNA, 20 bp, synthetic construct
  misc_feature 1..20: note = chemically synthesized
  source 1..20: mol_type = other DNA
gaaacaaaaaggaaaaggta

SEQ ID NO: 10029 - DNA, 20 bp, synthetic construct
  misc_feature 1..20: note = chemically synthesized
  source 1..20: mol_type = other DNA
aaaaggaaaaggtagggtga

SEQ ID NO: 10030 - DNA, 20 bp, synthetic construct
  misc_feature 1..20: note = chemically synthesized
  source 1..20: mol_type = other DNA
ggaaaaggtagggtgaaaga

SEQ ID NO: 10031 - DNA, 20 bp, synthetic construct
  misc_feature 1..20: note = chemically synthesized
  source 1..20: mol_type = other DNA
gaaaaggtagggtgaaagat

SEQ ID NO: 10032 - DNA, 20 bp, synthetic construct
  misc_feature 1..20: note = chemically synthesized
  source 1..20: mol_type = other DNA
gaaagatgggaaatgtatgt

SEQ ID NO: 10033 - DNA, 20 bp, synthetic construct
  misc_feature 1..20: note = chemically synthesized
  source 1..20: mol_type = other DNA
aaagatgggaaatgtatgta

SEQ ID NO: 10034 - DNA, 20 bp, synthetic construct
  misc_feature 1..20: note = chemically synthesized
  source 1..20: mol_type = other DNA
agatgggaaatgtatgtaag

SEQ ID NO: 10035 - DNA, 20 bp, synthetic construct
  misc_feature 1..20: note = chemically synthesized
  source 1..20: mol_type = other DNA
gatgggaaatgtatgtaagg

SEQ ID NO: 10036 - DNA, 20 bp, synthetic construct
  misc_feature 1..20: note = chemically synthesized
  source 1..20: mol_type = other DNA
gaaatgtatgtaaggaggat

SEQ ID NO: 10037 - DNA, 20 bp, synthetic construct
  misc_feature 1..20: note = chemically synthesized
  source 1..20: mol_type = other DNA
tgtaaggaggatgagccaca

SEQ ID NO: 10038 - DNA, 20 bp, synthetic construct
  misc_feature 1..20: note = chemically synthesized
  source 1..20: mol_type = other DNA
ggaggatgagccacatggta

SEQ ID NO: 10039 - DNA, 20 bp, synthetic construct
  misc_feature 1..20: note = chemically synthesized
  source 1..20: mol_type = other DNA
gaggatgagccacatggtat

SEQ ID NO: 10040 - DNA, 20 bp, synthetic construct
  misc_feature 1..20: note = chemically synthesized
  source 1..20: mol_type = other DNA
ggatgagccacatggtatgg

SEQ ID NO: 10041 - DNA, 20 bp, synthetic construct
  misc_feature 1..20: note = chemically synthesized
  source 1..20: mol_type = other DNA
gatgagccacatggtatggg

SEQ ID NO: 10042 - DNA, 20 bp, synthetic construct
  misc_feature 1..20: note = chemically synthesized
  source 1..20: mol_type = other DNA
catggtatgggaggtatact

SEQ ID NO: 10043 - DNA, 20 bp, synthetic construct
  misc_feature 1..20: note = chemically synthesized
  source 1..20: mol_type = other DNA
atggtatgggaggtatacta

SEQ ID NO: 10044 - DNA, 20 bp, synthetic construct
  misc_feature 1..20: note = chemically synthesized
  source 1..20: mol_type = other DNA
gggaggtatactaaggactc

SEQ ID NO: 10045 - DNA, 20 bp, synthetic construct
  misc_feature 1..20: note = chemically synthesized
  source 1..20: mol_type = other DNA
ggaggtatactaaggactct

SEQ ID NO: 10046 - DNA, 20 bp, synthetic construct
  misc_feature 1..20: note = chemically synthesized
  source 1..20: mol_type = other DNA
gaggtatactaaggactcta

SEQ ID NO: 10047 - DNA, 20 bp, synthetic construct
  misc_feature 1..20: note = chemically synthesized
  source 1..20: mol_type = other DNA
tatactaaggactctagggt

SEQ ID NO: 10048 - DNA, 20 bp, synthetic construct
  misc_feature 1..20: note = chemically synthesized
  source 1..20: mol_type = other DNA
tactaaggactctagggtca

SEQ ID NO: 10049 - DNA, 20 bp, synthetic construct
  misc_feature 1..20: note = chemically synthesized
  source 1..20: mol_type = other DNA
actctagggtcagagaaata

SEQ ID NO: 10050 - DNA, 20 bp, synthetic construct
  misc_feature 1..20: note = chemically synthesized
  source 1..20: mol_type = other DNA
ctctagggtcagagaaatat

SEQ ID NO: 10051 - DNA, 20 bp, synthetic construct
  misc_feature 1..20: note = chemically synthesized
  source 1..20: mol_type = other DNA
ttctacaaaattcacattct

SEQ ID NO: 10052 - DNA, 20 bp, synthetic construct
  misc_feature 1..20: note = chemically synthesized
  source 1..20: mol_type = other DNA
acaaaattcacattcttggc

SEQ ID NO: 10053 - DNA, 20 bp, synthetic construct
  misc_feature 1..20: note = chemically synthesized
  source 1..20: mol_type = other DNA
caaaattcacattcttggct

SEQ ID NO: 10054 - DNA, 20 bp, synthetic construct
  misc_feature 1..20: note = chemically synthesized
  source 1..20: mol_type = other DNA
ttcacattcttggctgggtg

SEQ ID NO: 10055 - DNA, 20 bp, synthetic construct
  misc_feature 1..20: note = chemically synthesized
  source 1..20: mol_type = other DNA
acattcttggctgggtgtgg

SEQ ID NO: 10056 - DNA, 20 bp, synthetic construct
  misc_feature 1..20: note = chemically synthesized
  source 1..20: mol_type = other DNA
gtggctcacgcctgtgatcc

SEQ ID NO: 10057 - DNA, 20 bp, synthetic construct
  misc_feature 1..20: note = chemically synthesized
  source 1..20: mol_type = other DNA
gcctgtgatcccagcacttt

SEQ ID NO: 10058 - DNA, 20 bp, synthetic construct
  misc_feature 1..20: note = chemically synthesized
  source 1..20: mol_type = other DNA
ctgtgatcccagcactttca

SEQ ID NO: 10059 - DNA, 20 bp, synthetic construct
  misc_feature 1..20: note = chemically synthesized
  source 1..20: mol_type = other DNA
tgtgatcccagcactttcag

SEQ ID NO: 10060 - DNA, 20 bp, synthetic construct
  misc_feature 1..20: note = chemically synthesized
  source 1..20: mol_type = other DNA
tcccagcactttcagaggcc

SEQ ID NO: 10061 - DNA, 20 bp, synthetic construct
  misc_feature 1..20: note = chemically synthesized
  source 1..20: mol_type = other DNA
cccagcactttcagaggccg

SEQ ID NO: 10062 - DNA, 20 bp, synthetic construct
  misc_feature 1..20: note = chemically synthesized
  source 1..20: mol_type = other DNA
cagcactttcagaggccgag

SEQ ID NO: 10063 - DNA, 20 bp, synthetic construct
  misc_feature 1..20: note = chemically synthesized
  source 1..20: mol_type = other DNA
agcactttcagaggccgagg

SEQ ID NO: 10064 - DNA, 20 bp, synthetic construct
  misc_feature 1..20: note = chemically synthesized
  source 1..20: mol_type = other DNA
gcactttcagaggccgagga

SEQ ID NO: 10065 - DNA, 20 bp, synthetic construct
  misc_feature 1..20: note = chemically synthesized
  source 1..20: mol_type = other DNA
ctttcagaggccgaggaggg

SEQ ID NO: 10066 - DNA, 20 bp, synthetic construct
  misc_feature 1..20: note = chemically synthesized
  source 1..20: mol_type = other DNA
gagggtggatcacctgatgt

SEQ ID NO: 10067 - DNA, 20 bp, synthetic construct
  misc_feature 1..20: note = chemically synthesized
  source 1..20: mol_type = other DNA
agggtggatcacctgatgtt

SEQ ID NO: 10068 - DNA, 20 bp, synthetic construct
  misc_feature 1..20: note = chemically synthesized
  source 1..20: mol_type = other DNA
ggtggatcacctgatgttag

SEQ ID NO: 10069 - DNA, 20 bp, synthetic construct
  misc_feature 1..20: note = chemically synthesized
  source 1..20: mol_type = other DNA
tcacctgatgttaggagttc

SEQ ID NO: 10070 - DNA, 20 bp, synthetic construct
  misc_feature 1..20: note = chemically synthesized
  source 1..20: mol_type = other DNA
tgatgttaggagttcgagat

SEQ ID NO: 10071 - DNA, 20 bp, synthetic construct
  misc_feature 1..20: note = chemically synthesized
  source 1..20: mol_type = other DNA
cgagatcagcctgaccaaca

SEQ ID NO: 10072 - DNA, 20 bp, synthetic construct
  misc_feature 1..20: note = chemically synthesized
  source 1..20: mol_type = other DNA
aaccccctatctactaaaaa

SEQ ID NO: 10073 - DNA, 20 bp, synthetic construct
  misc_feature 1..20: note = chemically synthesized
  source 1..20: mol_type = other DNA
atctactaaaaatagaaaat

SEQ ID NO: 10074 - DNA, 20 bp, synthetic construct
  misc_feature 1..20: note = chemically synthesized
  source 1..20: mol_type = other DNA
actaaaaatagaaaattagc

SEQ ID NO: 10075 - DNA, 20 bp, synthetic construct
  misc_feature 1..20: note = chemically synthesized
  source 1..20: mol_type = other DNA
ctaaaaatagaaaattagcc

SEQ ID NO: 10076 - DNA, 20 bp, synthetic construct
  misc_feature 1..20: note = chemically synthesized
  source 1..20: mol_type = other DNA
aatagaaaattagccaggca

SEQ ID NO: 10077 - DNA, 20 bp, synthetic construct
  misc_feature 1..20: note = chemically synthesized
  source 1..20: mol_type = other DNA
agaaaattagccaggcatgg

SEQ ID NO: 10078 - DNA, 20 bp, synthetic construct
  misc_feature 1..20: note = chemically synthesized
  source 1..20: mol_type = other DNA
aaattagccaggcatggtgg

SEQ ID NO: 10079 - DNA, 20 bp, synthetic construct
  misc_feature 1..20: note = chemically synthesized
  source 1..20: mol_type = other DNA
atggtggtggcacatgcctg

SEQ ID NO: 10080 - DNA, 20 bp, synthetic construct
  misc_feature 1..20: note = chemically synthesized
  source 1..20: mol_type = other DNA
gtggcacatgcctgtagtgc

SEQ ID NO: 10081 - DNA, 20 bp, synthetic construct
  misc_feature 1..20: note = chemically synthesized
  source 1..20: mol_type = other DNA
tgcctgtagtgccagctact

SEQ ID NO: 10082 - DNA, 20 bp, synthetic construct
  misc_feature 1..20: note = chemically synthesized
  source 1..20: mol_type = other DNA
gcctgtagtgccagctactt

SEQ ID NO: 10083 - DNA, 20 bp, synthetic construct
  misc_feature 1..20: note = chemically synthesized
  source 1..20: mol_type = other DNA
ctgtagtgccagctacttgg

SEQ ID NO: 10084 - DNA, 20 bp, synthetic construct
  misc_feature 1..20: note = chemically synthesized
  source 1..20: mol_type = other DNA
tgtagtgccagctacttggg

SEQ ID NO: 10085 - DNA, 20 bp, synthetic construct
  misc_feature 1..20: note = chemically synthesized
  source 1..20: mol_type = other DNA
tgccagctacttgggaggct

SEQ ID NO: 10086 - DNA, 20 bp, synthetic construct
  misc_feature 1..20: note = chemically synthesized
  source 1..20: mol_type = other DNA
gccagctacttgggaggctg

SEQ ID NO: 10087 - DNA, 20 bp, synthetic construct
  misc_feature 1..20: note = chemically synthesized
  source 1..20: mol_type = other DNA
agctacttgggaggctgagg

SEQ ID NO: 10088 - DNA, 20 bp, synthetic construct
  misc_feature 1..20: note = chemically synthesized
  source 1..20: mol_type = other DNA
gctacttgggaggctgaggc

SEQ ID NO: 10089 - DNA, 20 bp, synthetic construct
  misc_feature 1..20: note = chemically synthesized
  source 1..20: mol_type = other DNA
tacttgggaggctgaggcag

SEQ ID NO: 10090 - DNA, 20 bp, synthetic construct
  misc_feature 1..20: note = chemically synthesized
  source 1..20: mol_type = other DNA
gcaggagaatcgcttgaacc

SEQ ID NO: 10091 - DNA, 20 bp, synthetic construct
  misc_feature 1..20: note = chemically synthesized
  source 1..20: mol_type = other DNA
caggagaatcgcttgaacct

SEQ ID NO: 10092 - DNA, 20 bp, synthetic construct
  misc_feature 1..20: note = chemically synthesized
  source 1..20: mol_type = other DNA
ggagaatcgcttgaacctgg

SEQ ID NO: 10093 - DNA, 20 bp, synthetic construct
  misc_feature 1..20: note = chemically synthesized
  source 1..20: mol_type = other DNA
gagaatcgcttgaacctggg

SEQ ID NO: 10094 - DNA, 20 bp, synthetic construct
  misc_feature 1..20: note = chemically synthesized
  source 1..20: mol_type = other DNA
aatcgcttgaacctgggagg

SEQ ID NO: 10095 - DNA, 20 bp, synthetic construct
  misc_feature 1..20: note = chemically synthesized
  source 1..20: mol_type = other DNA
aacctgggaggcagatgttg

SEQ ID NO: 10096 - DNA, 20 bp, synthetic construct
  misc_feature 1..20: note = chemically synthesized
  source 1..20: mol_type = other DNA
tgggaggcagatgttgcagt

SEQ ID NO: 10097 - DNA, 20 bp, synthetic construct
  misc_feature 1..20: note = chemically synthesized
  source 1..20: mol_type = other DNA
ggcagatgttgcagtgagcc

SEQ ID NO: 10098 - DNA, 20 bp, synthetic construct
  misc_feature 1..20: note = chemically synthesized
  source 1..20: mol_type = other DNA
tggatcatgccattgcactc

SEQ ID NO: 10099 - DNA, 20 bp, synthetic construct
  misc_feature 1..20: note = chemically synthesized
  source 1..20: mol_type = other DNA
catgccattgcactccagcc

SEQ ID NO: 10100 - DNA, 20 bp, synthetic construct
  misc_feature 1..20: note = chemically synthesized
  source 1..20: mol_type = other DNA
atgccattgcactccagcct

SEQ ID NO: 10101 - DNA, 20 bp, synthetic construct
  misc_feature 1..20: note = chemically synthesized
  source 1..20: mol_type = other DNA
cactccagcctgggcaacca

SEQ ID NO: 10102 - DNA, 20 bp, synthetic construct
  misc_feature 1..20: note = chemically synthesized
  source 1..20: mol_type = other DNA
accatagcaatgctctatct

SEQ ID NO: 10103 - DNA, 20 bp, synthetic construct
  misc_feature 1..20: note = chemically synthesized
  source 1..20: mol_type = other DNA
atctcagaaaaaaaaaaaaa

SEQ ID NO: 10104 - DNA, 20 bp, synthetic construct
  misc_feature 1..20: note = chemically synthesized
  source 1..20: mol_type = other DNA
cctgaaaaaataaattattt

SEQ ID NO: 10105 - DNA, 20 bp, synthetic construct
  misc_feature 1..20: note = chemically synthesized
  source 1..20: mol_type = other DNA
tgtacctaattcataatttt

SEQ ID NO: 10106 - DNA, 20 bp, synthetic construct
  misc_feature 1..20: note = chemically synthesized
  source 1..20: mol_type = other DNA
attttcagataatgaatatt

SEQ ID NO: 10107 - DNA, 20 bp, synthetic construct
  misc_feature 1..20: note = chemically synthesized
  source 1..20: mol_type = other DNA
atattgagatgatatatgca

SEQ ID NO: 10108 - DNA, 20 bp, synthetic construct
  misc_feature 1..20: note = chemically synthesized
  source 1..20: mol_type = other DNA
tatatgcacagaacaatgcc

SEQ ID NO: 10109 - DNA, 20 bp, synthetic construct
  misc_feature 1..20: note = chemically synthesized
  source 1..20: mol_type = other DNA
tatgcacagaacaatgccta

SEQ ID NO: 10110 - DNA, 20 bp, synthetic construct
  misc_feature 1..20: note = chemically synthesized
  source 1..20: mol_type = other DNA
aatgcctagagacacattct

SEQ ID NO: 10111 - DNA, 20 bp, synthetic construct
  misc_feature 1..20: note = chemically synthesized
  source 1..20: mol_type = other DNA
agtgtgacattcttaaatgc

SEQ ID NO: 10112 - DNA, 20 bp, synthetic construct
  misc_feature 1..20: note = chemically synthesized
  source 1..20: mol_type = other DNA
gctctccacaattctaatct

SEQ ID NO: 10113 - DNA, 20 bp, synthetic construct
  misc_feature 1..20: note = chemically synthesized
  source 1..20: mol_type = other DNA
cactgtaattattcatttac

SEQ ID NO: 10114 - DNA, 20 bp, synthetic construct
  misc_feature 1..20: note = chemically synthesized
  source 1..20: mol_type = other DNA
ttcatttactggacacatcc

SEQ ID NO: 10115 - DNA, 20 bp, synthetic construct
  misc_feature 1..20: note = chemically synthesized
  source 1..20: mol_type = other DNA
tttatttctcatccttccct

SEQ ID NO: 10116 - DNA, 20 bp, synthetic construct
  misc_feature 1..20: note = chemically synthesized
  source 1..20: mol_type = other DNA
cctcagtgttctctgtattt

SEQ ID NO: 10117 - DNA, 20 bp, synthetic construct
  misc_feature 1..20: note = chemically synthesized
  source 1..20: mol_type = other DNA
ctcagtgttctctgtatttg

SEQ ID NO: 10118 - DNA, 20 bp, synthetic construct
  misc_feature 1..20: note = chemically synthesized
  source 1..20: mol_type = other DNA
tttgaggaactgacatttcc

SEQ ID NO: 10119 - DNA, 20 bp, synthetic construct
  misc_feature 1..20: note = chemically synthesized
  source 1..20: mol_type = other DNA
ttgaggaactgacatttccc

SEQ ID NO: 10120 - DNA, 20 bp, synthetic construct
  misc_feature 1..20: note = chemically synthesized
  source 1..20: mol_type = other DNA
cccaggtttcctcacccttt

SEQ ID NO: 10121 - DNA, 20 bp, synthetic construct
  misc_feature 1..20: note = chemically synthesized
  source 1..20: mol_type = other DNA
gtcgcatgtacattctgcaa

SEQ ID NO: 10122 - DNA, 20 bp, synthetic construct
  misc_feature 1..20: note = chemically synthesized
  source 1..20: mol_type = other DNA
cattctgcaatggtaaacac

SEQ ID NO: 10123 - DNA, 20 bp, synthetic construct
  misc_feature 1..20: note = chemically synthesized
  source 1..20: mol_type = other DNA
tgcaatggtaaacactggct

SEQ ID NO: 10124 - DNA, 20 bp, synthetic construct
  misc_feature 1..20: note = chemically synthesized
  source 1..20: mol_type = other DNA
gcaatggtaaacactggctg

SEQ ID NO: 10125 - DNA, 20 bp, synthetic construct
  misc_feature 1..20: note = chemically synthesized
  source 1..20: mol_type = other DNA
caatggtaaacactggctga

SEQ ID NO: 10126 - DNA, 20 bp, synthetic construct
  misc_feature 1..20: note = chemically synthesized
  source 1..20: mol_type = other DNA
ggtaaacactggctgaggga

SEQ ID NO: 10127 - DNA, 20 bp, synthetic construct
  misc_feature 1..20: note = chemically synthesized
  source 1..20: mol_type = other DNA
cactggctgagggaaagcat

SEQ ID NO: 10128 - DNA, 20 bp, synthetic construct
  misc_feature 1..20: note = chemically synthesized
  source 1..20: mol_type = other DNA
ggctgagggaaagcataagc

SEQ ID NO: 10129 - DNA, 20 bp, synthetic construct
  misc_feature 1..20: note = chemically synthesized
  source 1..20: mol_type = other DNA
agcataagcaagattatttc

SEQ ID NO: 10130 - DNA, 20 bp, synthetic construct
  misc_feature 1..20: note = chemically synthesized
  source 1..20: mol_type = other DNA
ggtctctctctctctctgaa

SEQ ID NO: 10131 - DNA, 20 bp, synthetic construct
  misc_feature 1..20: note = chemically synthesized
  source 1..20: mol_type = other DNA
ctctctgaacggatctccta

SEQ ID NO: 10132 - DNA, 20 bp, synthetic construct
  misc_feature 1..20: note = chemically synthesized
  source 1..20: mol_type = other DNA
tctgaacggatctcctacag

SEQ ID NO: 10133 - DNA, 20 bp, synthetic construct
  misc_feature 1..20: note = chemically synthesized
  source 1..20: mol_type = other DNA
aacggatctcctacagcaga

SEQ ID NO: 10134 - DNA, 20 bp, synthetic construct
  misc_feature 1..20: note = chemically synthesized
  source 1..20: mol_type = other DNA
acagcagacagtctttttta

SEQ ID NO: 10135 - DNA, 20 bp, synthetic construct
  misc_feature 1..20: note = chemically synthesized
  source 1..20: mol_type = other DNA
gtcttttttatggtttttta

SEQ ID NO: 10136 - DNA, 20 bp, synthetic construct
  misc_feature 1..20: note = chemically synthesized
  source 1..20: mol_type = other DNA
tgatactttgatgcccccat

SEQ ID NO: 10137 - DNA, 20 bp, synthetic construct
  misc_feature 1..20: note = chemically synthesized
  source 1..20: mol_type = other DNA
actttgatgcccccattaga

SEQ ID NO: 10138 - DNA, 20 bp, synthetic construct
  misc_feature 1..20: note = chemically synthesized
  source 1..20: mol_type = other DNA
atgcccccattagacagttc

SEQ ID NO: 10139 - DNA, 20 bp, synthetic construct
  misc_feature 1..20: note = chemically synthesized
  source 1..20: mol_type = other DNA
agacagttctggctctctcc

SEQ ID NO: 10140 - DNA, 20 bp, synthetic construct
  misc_feature 1..20: note = chemically synthesized
  source 1..20: mol_type = other DNA
gacagttctggctctctcca

SEQ ID NO: 10141 - DNA, 20 bp, synthetic construct
  misc_feature 1..20: note = chemically synthesized
  source 1..20: mol_type = other DNA
cagttctggctctctccaag

SEQ ID NO: 10142 - DNA, 20 bp, synthetic construct
  misc_feature 1..20: note = chemically synthesized
  source 1..20: mol_type = other DNA
tctctccaaggagcacccac

SEQ ID NO: 10143 - DNA, 20 bp, synthetic construct
  misc_feature 1..20: note = chemically synthesized
  source 1..20: mol_type = other DNA
acccactagctcactgaatc

SEQ ID NO: 10144 - DNA, 20 bp, synthetic construct
  misc_feature 1..20: note = chemically synthesized
  source 1..20: mol_type = other DNA
cactagctcactgaatccag

SEQ ID NO: 10145 - DNA, 20 bp, synthetic construct
  misc_feature 1..20: note = chemically synthesized
  source 1..20: mol_type = other DNA
cactgaatccagtggacctc

SEQ ID NO: 10146 - DNA, 20 bp, synthetic construct
  misc_feature 1..20: note = chemically synthesized
  source 1..20: mol_type = other DNA
atccagtggacctctggtta

SEQ ID NO: 10147 - DNA, 20 bp, synthetic construct
  misc_feature 1..20: note = chemically synthesized
  source 1..20: mol_type = other DNA
tccagtggacctctggttat

SEQ ID NO: 10148 - DNA, 20 bp, synthetic construct
  misc_feature 1..20: note = chemically synthesized
  source 1..20: mol_type = other DNA
ggacctctggttatgggctc

SEQ ID NO: 10149 - DNA, 20 bp, synthetic construct
  misc_feature 1..20: note = chemically synthesized
  source 1..20: mol_type = other DNA
ctggttatgggctctggttc

SEQ ID NO: 10150 - DNA, 20 bp, synthetic construct
  misc_feature 1..20: note = chemically synthesized
  source 1..20: mol_type = other DNA
tgggctctggttctggactc

SEQ ID NO: 10151 - DNA, 20 bp, synthetic construct
  misc_feature 1..20: note = chemically synthesized
  source 1..20: mol_type = other DNA
gctctggttctggactctgg

SEQ ID NO: 10152 - DNA, 20 bp, synthetic construct
  misc_feature 1..20: note = chemically synthesized
  source 1..20: mol_type = other DNA
attttctccttctgcccttc

SEQ ID NO: 10153 - DNA, 20 bp, synthetic construct
  misc_feature 1..20: note = chemically synthesized
  source 1..20: mol_type = other DNA
ttttctccttctgcccttct

SEQ ID NO: 10154 - DNA, 20 bp, synthetic construct
  misc_feature 1..20: note = chemically synthesized
  source 1..20: mol_type = other DNA
ttctgcccttctaggcctaa

SEQ ID NO: 10155 - DNA, 20 bp, synthetic construct
  misc_feature 1..20: note = chemically synthesized
  source 1..20: mol_type = other DNA
tgcccttctaggcctaatgg

SEQ ID NO: 10156 - DNA, 20 bp, synthetic construct
  misc_feature 1..20: note = chemically synthesized
  source 1..20: mol_type = other DNA
ccttctaggcctaatggcgg

SEQ ID NO: 10157 - DNA, 20 bp, synthetic construct
  misc_feature 1..20: note = chemically synthesized
  source 1..20: mol_type = other DNA
ttctaggcctaatggcggaa

SEQ ID NO: 10158 - DNA, 20 bp, synthetic construct
  misc_feature 1..20: note = chemically synthesized
  source 1..20: mol_type = other DNA
tctaggcctaatggcggaag

SEQ ID NO: 10159 - DNA, 20 bp, synthetic construct
  misc_feature 1..20: note = chemically synthesized
  source 1..20: mol_type = other DNA
tttctgatgttactaacatc

SEQ ID NO: 10160 - DNA, 20 bp, synthetic construct
  misc_feature 1..20: note = chemically synthesized
  source 1..20: mol_type = other DNA
ctgtcctttatttgatattt

SEQ ID NO: 10161 - DNA, 20 bp, synthetic construct
  misc_feature 1..20: note = chemically synthesized
  source 1..20: mol_type = other DNA
tattttagctcttccaatac

SEQ ID NO: 10162 - DNA, 20 bp, synthetic construct
  misc_feature 1..20: note = chemically synthesized
  source 1..20: mol_type = other DNA
attttagctcttccaataca

SEQ ID NO: 10163 - DNA, 20 bp, synthetic construct
  misc_feature 1..20: note = chemically synthesized
  source 1..20: mol_type = other DNA
tacaaggataattaactatt

SEQ ID NO: 10164 - DNA, 20 bp, synthetic construct
  misc_feature 1..20: note = chemically synthesized
  source 1..20: mol_type = other DNA
caaggataattaactattaa

SEQ ID NO: 10165 - DNA, 20 bp, synthetic construct
  misc_feature 1..20: note = chemically synthesized
  source 1..20: mol_type = other DNA
ttaagagctgtatttaattc

SEQ ID NO: 10166 - DNA, 20 bp, synthetic construct
  misc_feature 1..20: note = chemically synthesized
  source 1..20: mol_type = other DNA
taagagctgtatttaattct

SEQ ID NO: 10167 - DNA, 20 bp, synthetic construct
  misc_feature 1..20: note = chemically synthesized
  source 1..20: mol_type = other DNA
gctgtatttaattctaggtt

SEQ ID NO: 10168 - DNA, 20 bp, synthetic construct
  misc_feature 1..20: note = chemically synthesized
  source 1..20: mol_type = other DNA
ctaggttgagtaactgataa

SEQ ID NO: 10169 - DNA, 20 bp, synthetic construct
  misc_feature 1..20: note = chemically synthesized
  source 1..20: mol_type = other DNA
atggtttgtcctttccttga

SEQ ID NO: 10170 - DNA, 20 bp, synthetic construct
  misc_feature 1..20: note = chemically synthesized
  source 1..20: mol_type = other DNA
cttctgatactatgtcttat

SEQ ID NO: 10171 - DNA, 20 bp, synthetic construct
  misc_feature 1..20: note = chemically synthesized
  source 1..20: mol_type = other DNA
cttgttgactaatcaaacta

SEQ ID NO: 10172 - DNA, 20 bp, synthetic construct
  misc_feature 1..20: note = chemically synthesized
  source 1..20: mol_type = other DNA
gttgactaatcaaactatag

SEQ ID NO: 10173 - DNA, 20 bp, synthetic construct
  misc_feature 1..20: note = chemically synthesized
  source 1..20: mol_type = other DNA
tgactaatcaaactatagca

SEQ ID NO: 10174 - DNA, 20 bp, synthetic construct
  misc_feature 1..20: note = chemically synthesized
  source 1..20: mol_type = other DNA
gactaatcaaactatagcag

SEQ ID NO: 10175 - DNA, 20 bp, synthetic construct
  misc_feature 1..20: note = chemically synthesized
  source 1..20: mol_type = other DNA
taatcaaactatagcagagg

SEQ ID NO: 10176 - DNA, 20 bp, synthetic construct
  misc_feature 1..20: note = chemically synthesized
  source 1..20: mol_type = other DNA
atcaaactatagcagaggca

SEQ ID NO: 10177 - DNA, 20 bp, synthetic construct
  misc_feature 1..20: note = chemically synthesized
  source 1..20: mol_type = other DNA
tcaaactatagcagaggcag

SEQ ID NO: 10178 - DNA, 20 bp, synthetic construct
  misc_feature 1..20: note = chemically synthesized
  source 1..20: mol_type = other DNA
aactatagcagaggcagagg

SEQ ID NO: 10179 - DNA, 20 bp, synthetic construct
  misc_feature 1..20: note = chemically synthesized
  source 1..20: mol_type = other DNA
actatagcagaggcagagga

SEQ ID NO: 10180 - DNA, 20 bp, synthetic construct
  misc_feature 1..20: note = chemically synthesized
  source 1..20: mol_type = other DNA
cctcatgacctataaatact

SEQ ID NO: 10181 - DNA, 20 bp, synthetic construct
  misc_feature 1..20: note = chemically synthesized
  source 1..20: mol_type = other DNA
ataaatactaagatatcaca

SEQ ID NO: 10182 - DNA, 20 bp, synthetic construct
  misc_feature 1..20: note = chemically synthesized
  source 1..20: mol_type = other DNA
aagatatcacatagtcattt

SEQ ID NO: 10183 - DNA, 20 bp, synthetic construct
  misc_feature 1..20: note = chemically synthesized
  source 1..20: mol_type = other DNA
acatagtcattttagaacca

SEQ ID NO: 10184 - DNA, 20 bp, synthetic construct
  misc_feature 1..20: note = chemically synthesized
  source 1..20: mol_type = other DNA
catagtcattttagaaccaa

SEQ ID NO: 10185 - DNA, 20 bp, synthetic construct
  misc_feature 1..20: note = chemically synthesized
  source 1..20: mol_type = other DNA
ttttagaaccaaaggttcct

SEQ ID NO: 10186 - DNA, 20 bp, synthetic construct
  misc_feature 1..20: note = chemically synthesized
  source 1..20: mol_type = other DNA
gaaccaaaggttcctcagtt

SEQ ID NO: 10187 - DNA, 20 bp, synthetic construct
  misc_feature 1..20: note = chemically synthesized
  source 1..20: mol_type = other DNA
aaccaaaggttcctcagttt

SEQ ID NO: 10188 - DNA, 20 bp, synthetic construct
  misc_feature 1..20: note = chemically synthesized
  source 1..20: mol_type = other DNA
gtctcaaacaaacttctcta

SEQ ID NO: 10189 - DNA, 20 bp, synthetic construct
  misc_feature 1..20: note = chemically synthesized
  source 1..20: mol_type = other DNA
caaacaaacttctctatgga

SEQ ID NO: 10190 - DNA, 20 bp, synthetic construct
  misc_feature 1..20: note = chemically synthesized
  source 1..20: mol_type = other DNA
atagtgtaatactcataatg

SEQ ID NO: 10191 - DNA, 20 bp, synthetic construct
  misc_feature 1..20: note = chemically synthesized
  source 1..20: mol_type = other DNA
gtaatactcataatgtagaa

SEQ ID NO: 10192 - DNA, 20 bp, synthetic construct
  misc_feature 1..20: note = chemically synthesized
  source 1..20: mol_type = other DNA
aatactcataatgtagaaaa

SEQ ID NO: 10193 - DNA, 20 bp, synthetic construct
  misc_feature 1..20: note = chemically synthesized
  source 1..20: mol_type = other DNA
tactcataatgtagaaaaga

SEQ ID NO: 10194 - DNA, 20 bp, synthetic construct
  misc_feature 1..20: note = chemically synthesized
  source 1..20: mol_type = other DNA
agaaaagagagatctaattt

SEQ ID NO: 10195 - DNA, 20 bp, synthetic construct
  misc_feature 1..20: note = chemically synthesized
  source 1..20: mol_type = other DNA
tttttttcatctccaaatac

SEQ ID NO: 10196 - DNA, 20 bp, synthetic construct
  misc_feature 1..20: note = chemically synthesized
  source 1..20: mol_type = other DNA
ttttttcatctccaaatact

SEQ ID NO: 10197 - DNA, 20 bp, synthetic construct
  misc_feature 1..20: note = chemically synthesized
  source 1..20: mol_type = other DNA
tttttcatctccaaatacta

SEQ ID NO: 10198 - DNA, 20 bp, synthetic construct
  misc_feature 1..20: note = chemically synthesized
  source 1..20: mol_type = other DNA
tctccaaatactagggaaat

SEQ ID NO: 10199 - DNA, 20 bp, synthetic construct
  misc_feature 1..20: note = chemically synthesized
  source 1..20: mol_type = other DNA
tccaaatactagggaaataa

SEQ ID NO: 10200 - DNA, 20 bp, synthetic construct
  misc_feature 1..20: note = chemically synthesized
  source 1..20: mol_type = other DNA
ctagggaaataagagtttac

SEQ ID NO: 10201 - DNA, 20 bp, synthetic construct
  misc_feature 1..20: note = chemically synthesized
  source 1..20: mol_type = other DNA
agacaatgtctctaccataa

SEQ ID NO: 10202 - DNA, 20 bp, synthetic construct
  misc_feature 1..20: note = chemically synthesized
  source 1..20: mol_type = other DNA
acaatgtctctaccataaaa

SEQ ID NO: 10203 - DNA, 20 bp, synthetic construct
  misc_feature 1..20: note = chemically synthesized
  source 1..20: mol_type = other DNA
caatgtctctaccataaaag

SEQ ID NO: 10204 - DNA, 20 bp, synthetic construct
  misc_feature 1..20: note = chemically synthesized
  source 1..20: mol_type = other DNA
ccataaaagaggttaaaatt

SEQ ID NO: 10205 - DNA, 20 bp, synthetic construct
  misc_feature 1..20: note = chemically synthesized
  source 1..20: mol_type = other DNA
taaaagaggttaaaatttag

SEQ ID NO: 10206 - DNA, 20 bp, synthetic construct
  misc_feature 1..20: note = chemically synthesized
  source 1..20: mol_type = other DNA
aagaggttaaaatttagtgg

SEQ ID NO: 10207 - DNA, 20 bp, synthetic construct
  misc_feature 1..20: note = chemically synthesized
  source 1..20: mol_type = other DNA
agaggttaaaatttagtggt

SEQ ID NO: 10208 - DNA, 20 bp, synthetic construct
  misc_feature 1..20: note = chemically synthesized
  source 1..20: mol_type = other DNA
tagtggtaggaatatacaat

SEQ ID NO: 10209 - DNA, 20 bp, synthetic construct
  misc_feature 1..20: note = chemically synthesized
  source 1..20: mol_type = other DNA
tggtaggaatatacaatgag

SEQ ID NO: 10210 - DNA, 20 bp, synthetic construct
  misc_feature 1..20: note = chemically synthesized
  source 1..20: mol_type = other DNA
gaatatacaatgagcagatt

SEQ ID NO: 10211 - DNA, 20 bp, synthetic construct
  misc_feature 1..20: note = chemically synthesized
  source 1..20: mol_type = other DNA
aatgagcagattaagtacat

SEQ ID NO: 10212 - DNA, 20 bp, synthetic construct
  misc_feature 1..20: note = chemically synthesized
  source 1..20: mol_type = other DNA
gagcagattaagtacattag

SEQ ID NO: 10213 - DNA, 20 bp, synthetic construct
  misc_feature 1..20: note = chemically synthesized
  source 1..20: mol_type = other DNA
agcagattaagtacattagt

SEQ ID NO: 10214 - DNA, 20 bp, synthetic construct
  misc_feature 1..20: note = chemically synthesized
  source 1..20: mol_type = other DNA
ggaaaaacactaaatattat

SEQ ID NO: 10215 - DNA, 20 bp, synthetic construct
  misc_feature 1..20: note = chemically synthesized
  source 1..20: mol_type = other DNA
aaacactaaatattataaga

SEQ ID NO: 10216 - DNA, 20 bp, synthetic construct
  misc_feature 1..20: note = chemically synthesized
  source 1..20: mol_type = other DNA
acactaaatattataagaaa

SEQ ID NO: 10217 - DNA, 20 bp, synthetic construct
  misc_feature 1..20: note = chemically synthesized
  source 1..20: mol_type = other DNA
taagaaagagcccataattg

SEQ ID NO: 10218 - DNA, 20 bp, synthetic construct
  misc_feature 1..20: note = chemically synthesized
  source 1..20: mol_type = other DNA
gaaagagcccataattgtag

SEQ ID NO: 10219 - DNA, 20 bp, synthetic construct
  misc_feature 1..20: note = chemically synthesized
  source 1..20: mol_type = other DNA
aagagcccataattgtagca

SEQ ID NO: 10220 - DNA, 20 bp, synthetic construct
  misc_feature 1..20: note = chemically synthesized
  source 1..20: mol_type = other DNA
cataattgtagcagagttta

SEQ ID NO: 10221 - DNA, 20 bp, synthetic construct
  misc_feature 1..20: note = chemically synthesized
  source 1..20: mol_type = other DNA
attgtagcagagtttataga

SEQ ID NO: 10222 - DNA, 20 bp, synthetic construct
  misc_feature 1..20: note = chemically synthesized
  source 1..20: mol_type = other DNA
ttgtagcagagtttatagac

SEQ ID NO: 10223 - DNA, 20 bp, synthetic construct
  misc_feature 1..20: note = chemically synthesized
  source 1..20: mol_type = other DNA
tgtagcagagtttatagaca

SEQ ID NO: 10224 - DNA, 20 bp, synthetic construct
  misc_feature 1..20: note = chemically synthesized
  source 1..20: mol_type = other DNA
gagtttatagacagggcttt

SEQ ID NO: 10225 - DNA, 20 bp, synthetic construct
  misc_feature 1..20: note = chemically synthesized
  source 1..20: mol_type = other DNA
tatagacagggctttaagcc

SEQ ID NO: 10226 - DNA, 20 bp, synthetic construct
  misc_feature 1..20: note = chemically synthesized
  source 1..20: mol_type = other DNA
cagttaaaattaaaaaaaaa

SEQ ID NO: 10227 - DNA, 20 bp, synthetic construct
  misc_feature 1..20: note = chemically synthesized
  source 1..20: mol_type = other DNA
attaaaaaaaaatagcttct

SEQ ID NO: 10228 - DNA, 20 bp, synthetic construct
  misc_feature 1..20: note = chemically synthesized
  source 1..20: mol_type = other DNA
aaaaaaatagcttcttagtt

SEQ ID NO: 10229 - DNA, 20 bp, synthetic construct
  misc_feature 1..20: note = chemically synthesized
  source 1..20: mol_type = other DNA
tcttagttgagataacatat

SEQ ID NO: 10230 - DNA, 20 bp, synthetic construct
  misc_feature 1..20: note = chemically synthesized
  source 1..20: mol_type = other DNA
agttgagataacatataagt

SEQ ID NO: 10231 - DNA, 20 bp, synthetic construct
  misc_feature 1..20: note = chemically synthesized
  source 1..20: mol_type = other DNA
gttgagataacatataagtt

SEQ ID NO: 10232 - DNA, 20 bp, synthetic construct
  misc_feature 1..20: note = chemically synthesized
  source 1..20: mol_type = other DNA
aacatataagttaggactta

SEQ ID NO: 10233 - DNA, 20 bp, synthetic construct
  misc_feature 1..20: note = chemically synthesized
  source 1..20: mol_type = other DNA
taagttaggacttaaagtat

SEQ ID NO: 10234 - DNA, 20 bp, synthetic construct
  misc_feature 1..20: note = chemically synthesized
  source 1..20: mol_type = other DNA
aggacttaaagtatgagtac

SEQ ID NO: 10235 - DNA, 20 bp, synthetic construct
  misc_feature 1..20: note = chemically synthesized
  source 1..20: mol_type = other DNA
cttaaagtatgagtacaaga

SEQ ID NO: 10236 - DNA, 20 bp, synthetic construct
  misc_feature 1..20: note = chemically synthesized
  source 1..20: mol_type = other DNA
agtatgagtacaagatagac

SEQ ID NO: 10237 - DNA, 20 bp, synthetic construct
  misc_feature 1..20: note = chemically synthesized
  source 1..20: mol_type = other DNA
gtatgagtacaagatagaca

SEQ ID NO: 10238 - DNA, 20 bp, synthetic construct
  misc_feature 1..20: note = chemically synthesized
  source 1..20: mol_type = other DNA
caagatagacaaggcaaaat

SEQ ID NO: 10239 - DNA, 20 bp, synthetic construct
  misc_feature 1..20: note = chemically synthesized
  source 1..20: mol_type = other DNA
aagatagacaaggcaaaatg

SEQ ID NO: 10240 - DNA, 20 bp, synthetic construct
  misc_feature 1..20: note = chemically synthesized
  source 1..20: mol_type = other DNA
agatagacaaggcaaaatga

SEQ ID NO: 10241 - DNA, 20 bp, synthetic construct
  misc_feature 1..20: note = chemically synthesized
  source 1..20: mol_type = other DNA
agacaaggcaaaatgaggga

SEQ ID NO: 10242 - DNA, 20 bp, synthetic construct
  misc_feature 1..20: note = chemically synthesized
  source 1..20: mol_type = other DNA
aatgagggaaagacatcacc

SEQ ID NO: 10243 - DNA, 20 bp, synthetic construct
  misc_feature 1..20: note = chemically synthesized
  source 1..20: mol_type = other DNA
tgagggaaagacatcaccca

SEQ ID NO: 10244 - DNA, 20 bp, synthetic construct
  misc_feature 1..20: note = chemically synthesized
  source 1..20: mol_type = other DNA
catcacccagagtaaatgaa

SEQ ID NO: 10245 - DNA, 20 bp, synthetic construct
  misc_feature 1..20: note = chemically synthesized
  source 1..20: mol_type = other DNA
gtaaatgaacagcatgtaca

SEQ ID NO: 10246 - DNA, 20 bp, synthetic construct
  misc_feature 1..20: note = chemically synthesized
  source 1..20: mol_type = other DNA
aacagcatgtacaaagctaa

SEQ ID NO: 10247 - DNA, 20 bp, synthetic construct
  misc_feature 1..20: note = chemically synthesized
  source 1..20: mol_type = other DNA
cagcatgtacaaagctaaca

SEQ ID NO: 10248 - DNA, 20 bp, synthetic construct
  misc_feature 1..20: note = chemically synthesized
  source 1..20: mol_type = other DNA
aaagctaacagagtcaaatg

SEQ ID NO: 10249 - DNA, 20 bp, synthetic construct
  misc_feature 1..20: note = chemically synthesized
  source 1..20: mol_type = other DNA
atgcagaaatccaaattctc

SEQ ID NO: 10250 - DNA, 20 bp, synthetic construct
  misc_feature 1..20: note = chemically synthesized
  source 1..20: mol_type = other DNA
tccaaattctctagattgac

SEQ ID NO: 10251 - DNA, 20 bp, synthetic construct
  misc_feature 1..20: note = chemically synthesized
  source 1..20: mol_type = other DNA
ccaaattctctagattgact

SEQ ID NO: 10252 - DNA, 20 bp, synthetic construct
  misc_feature 1..20: note = chemically synthesized
  source 1..20: mol_type = other DNA
caaattctctagattgactg

SEQ ID NO: 10253 - DNA, 20 bp, synthetic construct
  misc_feature 1..20: note = chemically synthesized
  source 1..20: mol_type = other DNA
gtaattttgtcaatgcactc

SEQ ID NO: 10254 - DNA, 20 bp, synthetic construct
  misc_feature 1..20: note = chemically synthesized
  source 1..20: mol_type = other DNA
actcaagtatgcatctgtaa

SEQ ID NO: 10255 - DNA, 20 bp, synthetic construct
  misc_feature 1..20: note = chemically synthesized
  source 1..20: mol_type = other DNA
tgtgtgttcttatgtgtgca

SEQ ID NO: 10256 - DNA, 20 bp, synthetic construct
  misc_feature 1..20: note = chemically synthesized
  source 1..20: mol_type = other DNA
gtgcatggaatgtttgttca

SEQ ID NO: 10257 - DNA, 20 bp, synthetic construct
  misc_feature 1..20: note = chemically synthesized
  source 1..20: mol_type = other DNA
gcatggaatgtttgttcatg

SEQ ID NO: 10258 - DNA, 20 bp, synthetic construct
  misc_feature 1..20: note = chemically synthesized
  source 1..20: mol_type = other DNA
aatgtttgttcatggagcat

SEQ ID NO: 10259 - DNA, 20 bp, synthetic construct
  misc_feature 1..20: note = chemically synthesized
  source 1..20: mol_type = other DNA
atggagcataagaaattgtg

SEQ ID NO: 10260 - DNA, 20 bp, synthetic construct
  misc_feature 1..20: note = chemically synthesized
  source 1..20: mol_type = other DNA
taagaaattgtgtagacata

SEQ ID NO: 10261 - DNA, 20 bp, synthetic construct
  misc_feature 1..20: note = chemically synthesized
  source 1..20: mol_type = other DNA
acacatctgtatgtgtatat

SEQ ID NO: 10262 - DNA, 20 bp, synthetic construct
  misc_feature 1..20: note = chemically synthesized
  source 1..20: mol_type = other DNA
acatctgtatgtgtatatca

SEQ ID NO: 10263 - DNA, 20 bp, synthetic construct
  misc_feature 1..20: note = chemically synthesized
  source 1..20: mol_type = other DNA
gagaatgtttacattgctac

SEQ ID NO: 10264 - DNA, 20 bp, synthetic construct
  misc_feature 1..20: note = chemically synthesized
  source 1..20: mol_type = other DNA
ttttatatgactacatgcac

SEQ ID NO: 10265 - DNA, 20 bp, synthetic construct
  misc_feature 1..20: note = chemically synthesized
  source 1..20: mol_type = other DNA
caagcattcatgctacatgt

SEQ ID NO: 10266 - DNA, 20 bp, synthetic construct
  misc_feature 1..20: note = chemically synthesized
  source 1..20: mol_type = other DNA
attcatgctacatgtcagtt

SEQ ID NO: 10267 - DNA, 20 bp, synthetic construct
  misc_feature 1..20: note = chemically synthesized
  source 1..20: mol_type = other DNA
gtttggtatatttttcctgt

SEQ ID NO: 10268 - DNA, 20 bp, synthetic construct
  misc_feature 1..20: note = chemically synthesized
  source 1..20: mol_type = other DNA
tacttatgtgttttccacta

SEQ ID NO: 10269 - DNA, 20 bp, synthetic construct
  misc_feature 1..20: note = chemically synthesized
  source 1..20: mol_type = other DNA
acttatgtgttttccactaa

SEQ ID NO: 10270 - DNA, 20 bp, synthetic construct
  misc_feature 1..20: note = chemically synthesized
  source 1..20: mol_type = other DNA
gaatgtgaaaactcctcatc

SEQ ID NO: 10271 - DNA, 20 bp, synthetic construct
  misc_feature 1..20: note = chemically synthesized
  source 1..20: mol_type = other DNA
ctcatcgagaaatgaacaat

SEQ ID NO: 10272 - DNA, 20 bp, synthetic construct
  misc_feature 1..20: note = chemically synthesized
  source 1..20: mol_type = other DNA
gaaatgaacaataagtaaca

SEQ ID NO: 10273 - DNA, 20 bp, synthetic construct
  misc_feature 1..20: note = chemically synthesized
  source 1..20: mol_type = other DNA
aaatgaacaataagtaacac

SEQ ID NO: 10274 - DNA, 20 bp, synthetic construct
  misc_feature 1..20: note = chemically synthesized
  source 1..20: mol_type = other DNA
tcatctcttcatttaaaata

SEQ ID NO: 10275 - DNA, 20 bp, synthetic construct
  misc_feature 1..20: note = chemically synthesized
  source 1..20: mol_type = other DNA
atctcttcatttaaaataca

SEQ ID NO: 10276 - DNA, 20 bp, synthetic construct
  misc_feature 1..20: note = chemically synthesized
  source 1..20: mol_type = other DNA
ttaaaatacagagtgacatt

SEQ ID NO: 10277 - DNA, 20 bp, synthetic construct
  misc_feature 1..20: note = chemically synthesized
  source 1..20: mol_type = other DNA
aaatacagagtgacattcag

SEQ ID NO: 10278 - DNA, 20 bp, synthetic construct
  misc_feature 1..20: note = chemically synthesized
  source 1..20: mol_type = other DNA
aatacagagtgacattcaga

SEQ ID NO: 10279 - DNA, 20 bp, synthetic construct
  misc_feature 1..20: note = chemically synthesized
  source 1..20: mol_type = other DNA
atacagagtgacattcagaa

SEQ ID NO: 10280 - DNA, 20 bp, synthetic construct
  misc_feature 1..20: note = chemically synthesized
  source 1..20: mol_type = other DNA
agagtgacattcagaagggc

SEQ ID NO: 10281 - DNA, 20 bp, synthetic construct
  misc_feature 1..20: note = chemically synthesized
  source 1..20: mol_type = other DNA
gagtgacattcagaagggca

SEQ ID NO: 10282 - DNA, 20 bp, synthetic construct
  misc_feature 1..20: note = chemically synthesized
  source 1..20: mol_type = other DNA
agtgacattcagaagggcaa

SEQ ID NO: 10283 - DNA, 20 bp, synthetic construct
  misc_feature 1..20: note = chemically synthesized
  source 1..20: mol_type = other DNA
acattcagaagggcaaggga

SEQ ID NO: 10284 - DNA, 20 bp, synthetic construct
  misc_feature 1..20: note = chemically synthesized
  source 1..20: mol_type = other DNA
agaagggcaagggatagcac

SEQ ID NO: 10285 - DNA, 20 bp, synthetic construct
  misc_feature 1..20: note = chemically synthesized
  source 1..20: mol_type = other DNA
gcaagggatagcacaagtgt

SEQ ID NO: 10286 - DNA, 20 bp, synthetic construct
  misc_feature 1..20: note = chemically synthesized
  source 1..20: mol_type = other DNA
agcacaagtgtgagatttta

SEQ ID NO: 10287 - DNA, 20 bp, synthetic construct
  misc_feature 1..20: note = chemically synthesized
  source 1..20: mol_type = other DNA
gattttaaagtgtgattgtt

SEQ ID NO: 10288 - DNA, 20 bp, synthetic construct
  misc_feature 1..20: note = chemically synthesized
  source 1..20: mol_type = other DNA
aaagtgtgattgtttggaca

SEQ ID NO: 10289 - DNA, 20 bp, synthetic construct
  misc_feature 1..20: note = chemically synthesized
  source 1..20: mol_type = other DNA
ttggacacagtaattattca

SEQ ID NO: 10290 - DNA, 20 bp, synthetic construct
  misc_feature 1..20: note = chemically synthesized
  source 1..20: mol_type = other DNA
gcttaattaatgtatgctac

SEQ ID NO: 10291 - DNA, 20 bp, synthetic construct
  misc_feature 1..20: note = chemically synthesized
  source 1..20: mol_type = other DNA
aattaatgtatgctacaaga

SEQ ID NO: 10292 - DNA, 20 bp, synthetic construct
  misc_feature 1..20: note = chemically synthesized
  source 1..20: mol_type = other DNA
taatgtatgctacaagacag

SEQ ID NO: 10293 - DNA, 20 bp, synthetic construct
  misc_feature 1..20: note = chemically synthesized
  source 1..20: mol_type = other DNA
tatgctacaagacagcagtt

SEQ ID NO: 10294 - DNA, 20 bp, synthetic construct
  misc_feature 1..20: note = chemically synthesized
  source 1..20: mol_type = other DNA
gttgagtgattattgtacat

SEQ ID NO: 10295 - DNA, 20 bp, synthetic construct
  misc_feature 1..20: note = chemically synthesized
  source 1..20: mol_type = other DNA
gattattgtacatgagcaac

SEQ ID NO: 10296 - DNA, 20 bp, synthetic construct
  misc_feature 1..20: note = chemically synthesized
  source 1..20: mol_type = other DNA
ctggtatttattctgctttg

SEQ ID NO: 10297 - DNA, 20 bp, synthetic construct
  misc_feature 1..20: note = chemically synthesized
  source 1..20: mol_type = other DNA
tggtatttattctgctttgt

SEQ ID NO: 10298 - DNA, 20 bp, synthetic construct
  misc_feature 1..20: note = chemically synthesized
  source 1..20: mol_type = other DNA
tattctgctttgtgggttat

SEQ ID NO: 10299 - DNA, 20 bp, synthetic construct
  misc_feature 1..20: note = chemically synthesized
  source 1..20: mol_type = other DNA
tctgctttgtgggttattag

SEQ ID NO: 10300 - DNA, 20 bp, synthetic construct
  misc_feature 1..20: note = chemically synthesized
  source 1..20: mol_type = other DNA
ctgctttgtgggttattagt

SEQ ID NO: 10301 - DNA, 20 bp, synthetic construct
  misc_feature 1..20: note = chemically synthesized
  source 1..20: mol_type = other DNA
tgctttgtgggttattagtg

SEQ ID NO: 10302 - DNA, 20 bp, synthetic construct
  misc_feature 1..20: note = chemically synthesized
  source 1..20: mol_type = other DNA
ggggactcaaaaatatgaca

SEQ ID NO: 10303 - DNA, 20 bp, synthetic construct
  misc_feature 1..20: note = chemically synthesized
  source 1..20: mol_type = other DNA
gggactcaaaaatatgacaa

SEQ ID NO: 10304 - DNA, 20 bp, synthetic construct
  misc_feature 1..20: note = chemically synthesized
  source 1..20: mol_type = other DNA
aaaatatgacaaaggaattt

SEQ ID NO: 10305 - DNA, 20 bp, synthetic construct
  misc_feature 1..20: note = chemically synthesized
  source 1..20: mol_type = other DNA
atatgacaaaggaatttcag

SEQ ID NO: 10306 - DNA, 20 bp, synthetic construct
  misc_feature 1..20: note = chemically synthesized
  source 1..20: mol_type = other DNA
aaaggaatttcagaagctgt

SEQ ID NO: 10307 - DNA, 20 bp, synthetic construct
  misc_feature 1..20: note = chemically synthesized
  source 1..20: mol_type = other DNA
gaatttcagaagctgttaga

SEQ ID NO: 10308 - DNA, 20 bp, synthetic construct
  misc_feature 1..20: note = chemically synthesized
  source 1..20: mol_type = other DNA
tttcagaagctgttagatgg

SEQ ID NO: 10309 - DNA, 20 bp, synthetic construct
  misc_feature 1..20: note = chemically synthesized
  source 1..20: mol_type = other DNA
ctatctatgtgctcccactc

SEQ ID NO: 10310 - DNA, 20 bp, synthetic construct
  misc_feature 1..20: note = chemically synthesized
  source 1..20: mol_type = other DNA
atctatgtgctcccactcaa

SEQ ID NO: 10311 - DNA, 20 bp, synthetic construct
  misc_feature 1..20: note = chemically synthesized
  source 1..20: mol_type = other DNA
gtgctcccactcaagagata

SEQ ID NO: 10312 - DNA, 20 bp, synthetic construct
  misc_feature 1..20: note = chemically synthesized
  source 1..20: mol_type = other DNA
tcccactcaagagatatggt

SEQ ID NO: 10313 - DNA, 20 bp, synthetic construct
  misc_feature 1..20: note = chemically synthesized
  source 1..20: mol_type = other DNA
cccactcaagagatatggtg

SEQ ID NO: 10314 - DNA, 20 bp, synthetic construct
  misc_feature 1..20: note = chemically synthesized
  source 1..20: mol_type = other DNA
ctcaagagatatggtgaggt

SEQ ID NO: 10315 - DNA, 20 bp, synthetic construct
  misc_feature 1..20: note = chemically synthesized
  source 1..20: mol_type = other DNA
atatggtgaggtgagctctt

SEQ ID NO: 10316 - DNA, 20 bp, synthetic construct
  misc_feature 1..20: note = chemically synthesized
  source 1..20: mol_type = other DNA
tatggtgaggtgagctcttt

SEQ ID NO: 10317 - DNA, 20 bp, synthetic construct
  misc_feature 1..20: note = chemically synthesized
  source 1..20: mol_type = other DNA
atggtgaggtgagctctttg

SEQ ID NO: 10318 - DNA, 20 bp, synthetic construct
  misc_feature 1..20: note = chemically synthesized
  source 1..20: mol_type = other DNA
gtgaggtgagctctttgggg

SEQ ID NO: 10319 - DNA, 20 bp, synthetic construct
  misc_feature 1..20: note = chemically synthesized
  source 1..20: mol_type = other DNA
agctctttggggtggacaca

SEQ ID NO: 10320 - DNA, 20 bp, synthetic construct
  misc_feature 1..20: note = chemically synthesized
  source 1..20: mol_type = other DNA
ctctttggggtggacacata

SEQ ID NO: 10321 - DNA, 20 bp, synthetic construct
  misc_feature 1..20: note = chemically synthesized
  source 1..20: mol_type = other DNA
tctttggggtggacacatag

SEQ ID NO: 10322 - DNA, 20 bp, synthetic construct
  misc_feature 1..20: note = chemically synthesized
  source 1..20: mol_type = other DNA
acacatagaggaaatacttt

SEQ ID NO: 10323 - DNA, 20 bp, synthetic construct
  misc_feature 1..20: note = chemically synthesized
  source 1..20: mol_type = other DNA
atagaggaaatactttgaga

SEQ ID NO: 10324 - DNA, 20 bp, synthetic construct
  misc_feature 1..20: note = chemically synthesized
  source 1..20: mol_type = other DNA
agaggaaatactttgagaaa

SEQ ID NO: 10325 - DNA, 20 bp, synthetic construct
  misc_feature 1..20: note = chemically synthesized
  source 1..20: mol_type = other DNA
gaggaaatactttgagaaag

SEQ ID NO: 10326 - DNA, 20 bp, synthetic construct
  misc_feature 1..20: note = chemically synthesized
  source 1..20: mol_type = other DNA
atactttgagaaagaggttt

SEQ ID NO: 10327 - DNA, 20 bp, synthetic construct
  misc_feature 1..20: note = chemically synthesized
  source 1..20: mol_type = other DNA
tactttgagaaagaggtttt

SEQ ID NO: 10328 - DNA, 20 bp, synthetic construct
  misc_feature 1..20: note = chemically synthesized
  source 1..20: mol_type = other DNA
ggttttgggattaatgaaac

SEQ ID NO: 10329 - DNA, 20 bp, synthetic construct
  misc_feature 1..20: note = chemically synthesized
  source 1..20: mol_type = other DNA
ttttgggattaatgaaactg

SEQ ID NO: 10330 - DNA, 20 bp, synthetic construct
  misc_feature 1..20: note = chemically synthesized
  source 1..20: mol_type = other DNA
tgggattaatgaaactggag

SEQ ID NO: 10331 - DNA, 20 bp, synthetic construct
  misc_feature 1..20: note = chemically synthesized
  source 1..20: mol_type = other DNA
attaatgaaactggagaaga

SEQ ID NO: 10332 - DNA, 20 bp, synthetic construct
  misc_feature 1..20: note = chemically synthesized
  source 1..20: mol_type = other DNA
ttaatgaaactggagaagaa

SEQ ID NO: 10333 - DNA, 20 bp, synthetic construct
  misc_feature 1..20: note = chemically synthesized
  source 1..20: mol_type = other DNA
taatgaaactggagaagaaa

SEQ ID NO: 10334 - DNA, 20 bp, synthetic construct
  misc_feature 1..20: note = chemically synthesized
  source 1..20: mol_type = other DNA
cttctaaaacctctttcttt

SEQ ID NO: 10335 - DNA, 20 bp, synthetic construct
  misc_feature 1..20: note = chemically synthesized
  source 1..20: mol_type = other DNA
ttctaaaacctctttctttg

SEQ ID NO: 10336 - DNA, 20 bp, synthetic construct
  misc_feature 1..20: note = chemically synthesized
  source 1..20: mol_type = other DNA
aacctctttctttgaggttt

SEQ ID NO: 10337 - DNA, 20 bp, synthetic construct
  misc_feature 1..20: note = chemically synthesized
  source 1..20: mol_type = other DNA
acctctttctttgaggtttt

SEQ ID NO: 10338 - DNA, 20 bp, synthetic construct
  misc_feature 1..20: note = chemically synthesized
  source 1..20: mol_type = other DNA
ttctttgaggttttaggttt

SEQ ID NO: 10339 - DNA, 20 bp, synthetic construct
  misc_feature 1..20: note = chemically synthesized
  source 1..20: mol_type = other DNA
tctttgaggttttaggtttg

SEQ ID NO: 10340 - DNA, 20 bp, synthetic construct
  misc_feature 1..20: note = chemically synthesized
  source 1..20: mol_type = other DNA
ctttgaggttttaggtttga

SEQ ID NO: 10341 - DNA, 20 bp, synthetic construct
  misc_feature 1..20: note = chemically synthesized
  source 1..20: mol_type = other DNA
gagggtgctacatacttcct

SEQ ID NO: 10342 - DNA, 20 bp, synthetic construct
  misc_feature 1..20: note = chemically synthesized
  source 1..20: mol_type = other DNA
agggtgctacatacttccta

SEQ ID NO: 10343 - DNA, 20 bp, synthetic construct
  misc_feature 1..20: note = chemically synthesized
  source 1..20: mol_type = other DNA
gggtgctacatacttcctaa

SEQ ID NO: 10344 - DNA, 20 bp, synthetic construct
  misc_feature 1..20: note = chemically synthesized
  source 1..20: mol_type = other DNA
tacatacttcctaagggtct

SEQ ID NO: 10345 - DNA, 20 bp, synthetic construct
  misc_feature 1..20: note = chemically synthesized
  source 1..20: mol_type = other DNA
acatacttcctaagggtctt

SEQ ID NO: 10346 - DNA, 20 bp, synthetic construct
  misc_feature 1..20: note = chemically synthesized
  source 1..20: mol_type = other DNA
cttcctaagggtcttgggta

SEQ ID NO: 10347 - DNA, 20 bp, synthetic construct
  misc_feature 1..20: note = chemically synthesized
  source 1..20: mol_type = other DNA
ttcctaagggtcttgggtac

SEQ ID NO: 10348 - DNA, 20 bp, synthetic construct
  misc_feature 1..20: note = chemically synthesized
  source 1..20: mol_type = other DNA
cctaagggtcttgggtacag

SEQ ID NO: 10349 - DNA, 20 bp, synthetic construct
  misc_feature 1..20: note = chemically synthesized
  source 1..20: mol_type = other DNA
gtcttgggtacaggagtttg

SEQ ID NO: 10350 - DNA, 20 bp, synthetic construct
  misc_feature 1..20: note = chemically synthesized
  source 1..20: mol_type = other DNA
ggagtttgaagtgattgcca

SEQ ID NO: 10351 - DNA, 20 bp, synthetic construct
  misc_feature 1..20: note = chemically synthesized
  source 1..20: mol_type = other DNA
ttgaagtgattgccacagaa

SEQ ID NO: 10352 - DNA, 20 bp, synthetic construct
  misc_feature 1..20: note = chemically synthesized
  source 1..20: mol_type = other DNA
agaatggctacgttcattgc

SEQ ID NO: 10353 - DNA, 20 bp, synthetic construct
  misc_feature 1..20: note = chemically synthesized
  source 1..20: mol_type = other DNA
cgttcattgccagatccaaa

SEQ ID NO: 10354 - DNA, 20 bp, synthetic construct
  misc_feature 1..20: note = chemically synthesized
  source 1..20: mol_type = other DNA
gttcattgccagatccaaac

SEQ ID NO: 10355 - DNA, 20 bp, synthetic construct
  misc_feature 1..20: note = chemically synthesized
  source 1..20: mol_type = other DNA
ttcattgccagatccaaaca

SEQ ID NO: 10356 - DNA, 20 bp, synthetic construct
  misc_feature 1..20: note = chemically synthesized
  source 1..20: mol_type = other DNA
tcattgccagatccaaacag

SEQ ID NO: 10357 - DNA, 20 bp, synthetic construct
  misc_feature 1..20: note = chemically synthesized
  source 1..20: mol_type = other DNA
cattgccagatccaaacagg

SEQ ID NO: 10358 - DNA, 20 bp, synthetic construct
  misc_feature 1..20: note = chemically synthesized
  source 1..20: mol_type = other DNA
agatccaaacagggggcttg

SEQ ID NO: 10359 - DNA, 20 bp, synthetic construct
  misc_feature 1..20: note = chemically synthesized
  source 1..20: mol_type = other DNA
gatccaaacagggggcttgt

SEQ ID NO: 10360 - DNA, 20 bp, synthetic construct
  misc_feature 1..20: note = chemically synthesized
  source 1..20: mol_type = other DNA
aatttccttcttttcattca

SEQ ID NO: 10361 - DNA, 20 bp, synthetic construct
  misc_feature 1..20: note = chemically synthesized
  source 1..20: mol_type = other DNA
tccttcttttcattcacaga

SEQ ID NO: 10362 - DNA, 20 bp, synthetic construct
  misc_feature 1..20: note = chemically synthesized
  source 1..20: mol_type = other DNA
ccttcttttcattcacagac

SEQ ID NO: 10363 - DNA, 20 bp, synthetic construct
  misc_feature 1..20: note = chemically synthesized
  source 1..20: mol_type = other DNA
cttcttttcattcacagaca

SEQ ID NO: 10364 - DNA, 20 bp, synthetic construct
  misc_feature 1..20: note = chemically synthesized
  source 1..20: mol_type = other DNA
tcattcacagacagggattt

SEQ ID NO: 10365 - DNA, 20 bp, synthetic construct
  misc_feature 1..20: note = chemically synthesized
  source 1..20: mol_type = other DNA
ctctgtttcacaatgttttc

SEQ ID NO: 10366 - DNA, 20 bp, synthetic construct
  misc_feature 1..20: note = chemically synthesized
  source 1..20: mol_type = other DNA
ctgtgcaatcactgccacaa

SEQ ID NO: 10367 - DNA, 20 bp, synthetic construct
  misc_feature 1..20: note = chemically synthesized
  source 1..20: mol_type = other DNA
ttcattgtttccatcaactt

SEQ ID NO: 10368 - DNA, 20 bp, synthetic construct
  misc_feature 1..20: note = chemically synthesized
  source 1..20: mol_type = other DNA
ccatcacctcaatataatta

SEQ ID NO: 10369 - DNA, 20 bp, synthetic construct
  misc_feature 1..20: note = chemically synthesized
  source 1..20: mol_type = other DNA
cacctcaatataattacagc

SEQ ID NO: 10370 - DNA, 20 bp, synthetic construct
  misc_feature 1..20: note = chemically synthesized
  source 1..20: mol_type = other DNA
aagctcctctgactataccc

SEQ ID NO: 10371 - DNA, 20 bp, synthetic construct
  misc_feature 1..20: note = chemically synthesized
  source 1..20: mol_type = other DNA
tcctctgactatacccaagt

SEQ ID NO: 10372 - DNA, 20 bp, synthetic construct
  misc_feature 1..20: note = chemically synthesized
  source 1..20: mol_type = other DNA
caagttagactttgtctaat

SEQ ID NO: 10373 - DNA, 20 bp, synthetic construct
  misc_feature 1..20: note = chemically synthesized
  source 1..20: mol_type = other DNA
attatgtcactctcatatgc

SEQ ID NO: 10374 - DNA, 20 bp, synthetic construct
  misc_feature 1..20: note = chemically synthesized
  source 1..20: mol_type = other DNA
ctctcatatgcaagaaactt

SEQ ID NO: 10375 - DNA, 20 bp, synthetic construct
  misc_feature 1..20: note = chemically synthesized
  source 1..20: mol_type = other DNA
gtgatttttgctcaaaacga

SEQ ID NO: 10376 - DNA, 20 bp, synthetic construct
  misc_feature 1..20: note = chemically synthesized
  source 1..20: mol_type = other DNA
gctatttttcttacttcatc

SEQ ID NO: 10377 - DNA, 20 bp, synthetic construct
  misc_feature 1..20: note = chemically synthesized
  source 1..20: mol_type = other DNA
cttcatctggtctctgcatc

SEQ ID NO: 10378 - DNA, 20 bp, synthetic construct
  misc_feature 1..20: note = chemically synthesized
  source 1..20: mol_type = other DNA
acgtgctgtttcctaaatct

SEQ ID NO: 10379 - DNA, 20 bp, synthetic construct
  misc_feature 1..20: note = chemically synthesized
  source 1..20: mol_type = other DNA
ttgctcacataaacaaaaat

SEQ ID NO: 10380 - DNA, 20 bp, synthetic construct
  misc_feature 1..20: note = chemically synthesized
  source 1..20: mol_type = other DNA
ctcacataaacaaaaatcag

SEQ ID NO: 10381 - DNA, 20 bp, synthetic construct
  misc_feature 1..20: note = chemically synthesized
  source 1..20: mol_type = other DNA
cacatgtgtgtgtatatata

SEQ ID NO: 10382 - DNA, 20 bp, synthetic construct
  misc_feature 1..20: note = chemically synthesized
  source 1..20: mol_type = other DNA
tgtgtgtgtatatatataga

SEQ ID NO: 10383 - DNA, 20 bp, synthetic construct
  misc_feature 1..20: note = chemically synthesized
  source 1..20: mol_type = other DNA
tgtgtgtatatatatagaaa

SEQ ID NO: 10384 - DNA, 20 bp, synthetic construct
  misc_feature 1..20: note = chemically synthesized
  source 1..20: mol_type = other DNA
ataaaacttgtacatattta

SEQ ID NO: 10385 - DNA, 20 bp, synthetic construct
  misc_feature 1..20: note = chemically synthesized
  source 1..20: mol_type = other DNA
cttgtacatatttatagaaa

SEQ ID NO: 10386 - DNA, 20 bp, synthetic construct
  misc_feature 1..20: note = chemically synthesized
  source 1..20: mol_type = other DNA
tgtacatatttatagaaaca

SEQ ID NO: 10387 - DNA, 20 bp, synthetic construct
  misc_feature 1..20: note = chemically synthesized
  source 1..20: mol_type = other DNA
tacatatttatagaaacaga

SEQ ID NO: 10388 - DNA, 20 bp, synthetic construct
  misc_feature 1..20: note = chemically synthesized
  source 1..20: mol_type = other DNA
tagaaacagagagctgaaca

SEQ ID NO: 10389 - DNA, 20 bp, synthetic construct
  misc_feature 1..20: note = chemically synthesized
  source 1..20: mol_type = other DNA
gaaacagagagctgaacaaa

SEQ ID NO: 10390 - DNA, 20 bp, synthetic construct
  misc_feature 1..20: note = chemically synthesized
  source 1..20: mol_type = other DNA
caaagagatttattatttat

SEQ ID NO: 10391 - DNA, 20 bp, synthetic construct
  misc_feature 1..20: note = chemically synthesized
  source 1..20: mol_type = other DNA
aaagagatttattatttatt

SEQ ID NO: 10392 - DNA, 20 bp, synthetic construct
  misc_feature 1..20: note = chemically synthesized
  source 1..20: mol_type = other DNA
gagatttattatttattggg

SEQ ID NO: 10393 - DNA, 20 bp, synthetic construct
  misc_feature 1..20: note = chemically synthesized
  source 1..20: mol_type = other DNA
atttattgggtagtgtgata

SEQ ID NO: 10394 - DNA, 20 bp, synthetic construct
  misc_feature 1..20: note = chemically synthesized
  source 1..20: mol_type = other DNA
gtagtgtgataaagacttta

SEQ ID NO: 10395 - DNA, 20 bp, synthetic construct
  misc_feature 1..20: note = chemically synthesized
  source 1..20: mol_type = other DNA
tagtgtgataaagactttac

SEQ ID NO: 10396 - DNA, 20 bp, synthetic construct
  misc_feature 1..20: note = chemically synthesized
  source 1..20: mol_type = other DNA
tttacaggtatcaattcaat

SEQ ID NO: 10397 - DNA, 20 bp, synthetic construct
  misc_feature 1..20: note = chemically synthesized
  source 1..20: mol_type = other DNA
agttcttacaaaaatccttt

SEQ ID NO: 10398 - DNA, 20 bp, synthetic construct
  misc_feature 1..20: note = chemically synthesized
  source 1..20: mol_type = other DNA
gttcttacaaaaatccttta

SEQ ID NO: 10399 - DNA, 20 bp, synthetic construct
  misc_feature 1..20: note = chemically synthesized
  source 1..20: mol_type = other DNA
tgataaatctatcatatgca

SEQ ID NO: 10400 - DNA, 20 bp, synthetic construct
  misc_feature 1..20: note = chemically synthesized
  source 1..20: mol_type = other DNA
ctatcatatgcacagcttaa

SEQ ID NO: 10401 - DNA, 20 bp, synthetic construct
  misc_feature 1..20: note = chemically synthesized
  source 1..20: mol_type = other DNA
atggaattataaatatgttt

SEQ ID NO: 10402 - DNA, 20 bp, synthetic construct
  misc_feature 1..20: note = chemically synthesized
  source 1..20: mol_type = other DNA
tggaattataaatatgtttc

SEQ ID NO: 10403 - DNA, 20 bp, synthetic construct
  misc_feature 1..20: note = chemically synthesized
  source 1..20: mol_type = other DNA
tataaatatgtttcaggtca

SEQ ID NO: 10404 - DNA, 20 bp, synthetic construct
  misc_feature 1..20: note = chemically synthesized
  source 1..20: mol_type = other DNA
taaatatgtttcaggtcaca

SEQ ID NO: 10405 - DNA, 20 bp, synthetic construct
  misc_feature 1..20: note = chemically synthesized
  source 1..20: mol_type = other DNA
aaatatgtttcaggtcacag

SEQ ID NO: 10406 - DNA, 20 bp, synthetic construct
  misc_feature 1..20: note = chemically synthesized
  source 1..20: mol_type = other DNA
tatgtttcaggtcacagagg

SEQ ID NO: 10407 - DNA, 20 bp, synthetic construct
  misc_feature 1..20: note = chemically synthesized
  source 1..20: mol_type = other DNA
gtttcaggtcacagaggtag

SEQ ID NO: 10408 - DNA, 20 bp, synthetic construct
  misc_feature 1..20: note = chemically synthesized
  source 1..20: mol_type = other DNA
ggtcacagaggtagcagatg

SEQ ID NO: 10409 - DNA, 20 bp, synthetic construct
  misc_feature 1..20: note = chemically synthesized
  source 1..20: mol_type = other DNA
cagaggtagcagatgaagta

SEQ ID NO: 10410 - DNA, 20 bp, synthetic construct
  misc_feature 1..20: note = chemically synthesized
  source 1..20: mol_type = other DNA
atgaagtacagatgaaaacc

SEQ ID NO: 10411 - DNA, 20 bp, synthetic construct
  misc_feature 1..20: note = chemically synthesized
  source 1..20: mol_type = other DNA
agtacagatgaaaaccaaga

SEQ ID NO: 10412 - DNA, 20 bp, synthetic construct
  misc_feature 1..20: note = chemically synthesized
  source 1..20: mol_type = other DNA
cagatgaaaaccaagacagc

SEQ ID NO: 10413 - DNA, 20 bp, synthetic construct
  misc_feature 1..20: note = chemically synthesized
  source 1..20: mol_type = other DNA
gacagccagttcacatgcct

SEQ ID NO: 10414 - DNA, 20 bp, synthetic construct
  misc_feature 1..20: note = chemically synthesized
  source 1..20: mol_type = other DNA
cagccagttcacatgcctta

SEQ ID NO: 10415 - DNA, 20 bp, synthetic construct
  misc_feature 1..20: note = chemically synthesized
  source 1..20: mol_type = other DNA
attctctattaataccattg

SEQ ID NO: 10416 - DNA, 20 bp, synthetic construct
  misc_feature 1..20: note = chemically synthesized
  source 1..20: mol_type = other DNA
ttaataccattgaagacgtt

SEQ ID NO: 10417 - DNA, 20 bp, synthetic construct
  misc_feature 1..20: note = chemically synthesized
  source 1..20: mol_type = other DNA
aataccattgaagacgttaa

SEQ ID NO: 10418 - DNA, 20 bp, synthetic construct
  misc_feature 1..20: note = chemically synthesized
  source 1..20: mol_type = other DNA
ccattgaagacgttaagaga

SEQ ID NO: 10419 - DNA, 20 bp, synthetic construct
  misc_feature 1..20: note = chemically synthesized
  source 1..20: mol_type = other DNA
aagacgttaagagaaagttc

SEQ ID NO: 10420 - DNA, 20 bp, synthetic construct
  misc_feature 1..20: note = chemically synthesized
  source 1..20: mol_type = other DNA
agacgttaagagaaagttca

SEQ ID NO: 10421 - DNA, 20 bp, synthetic construct
  misc_feature 1..20: note = chemically synthesized
  source 1..20: mol_type = other DNA
ttaagagaaagttcaaggtt

SEQ ID NO: 10422 - DNA, 20 bp, synthetic construct
  misc_feature 1..20: note = chemically synthesized
  source 1..20: mol_type = other DNA
ttcaaggtttggcccttgat

SEQ ID NO: 10423 - DNA, 20 bp, synthetic construct
  misc_feature 1..20: note = chemically synthesized
  source 1..20: mol_type = other DNA
tttggcccttgattggtctc

SEQ ID NO: 10424 - DNA, 20 bp, synthetic construct
  misc_feature 1..20: note = chemically synthesized
  source 1..20: mol_type = other DNA
ttggcccttgattggtctct

SEQ ID NO: 10425 - DNA, 20 bp, synthetic construct
  misc_feature 1..20: note = chemically synthesized
  source 1..20: mol_type = other DNA
gcccttgattggtctctagg

SEQ ID NO: 10426 - DNA, 20 bp, synthetic construct
  misc_feature 1..20: note = chemically synthesized
  source 1..20: mol_type = other DNA
aaaaatatgttgtttaaaat

SEQ ID NO: 10427 - DNA, 20 bp, synthetic construct
  misc_feature 1..20: note = chemically synthesized
  source 1..20: mol_type = other DNA
aatatgttgtttaaaataag

SEQ ID NO: 10428 - DNA, 20 bp, synthetic construct
  misc_feature 1..20: note = chemically synthesized
  source 1..20: mol_type = other DNA
atgttgtttaaaataagtag

SEQ ID NO: 10429 - DNA, 20 bp, synthetic construct
  misc_feature 1..20: note = chemically synthesized
  source 1..20: mol_type = other DNA
aaataagtagaagtgaactg

SEQ ID NO: 10430 - DNA, 20 bp, synthetic construct
  misc_feature 1..20: note = chemically synthesized
  source 1..20: mol_type = other DNA
gtgaactgcagtcaccaaat

SEQ ID NO: 10431 - DNA, 20 bp, synthetic construct
  misc_feature 1..20: note = chemically synthesized
  source 1..20: mol_type = other DNA
caccaaatgagctatatcct

SEQ ID NO: 10432 - DNA, 20 bp, synthetic construct
  misc_feature 1..20: note = chemically synthesized
  source 1..20: mol_type = other DNA
cctgagtttcatacaaataa

SEQ ID NO: 10433 - DNA, 20 bp, synthetic construct
  misc_feature 1..20: note = chemically synthesized
  source 1..20: mol_type = other DNA
catacaaataatagcctata

SEQ ID NO: 10434 - DNA, 20 bp, synthetic construct
  misc_feature 1..20: note = chemically synthesized
  source 1..20: mol_type = other DNA
ctatacagaacttctaattt

SEQ ID NO: 10435 - DNA, 20 bp, synthetic construct
  misc_feature 1..20: note = chemically synthesized
  source 1..20: mol_type = other DNA
acaatcctcttacacctcca

SEQ ID NO: 10436 - DNA, 20 bp, synthetic construct
  misc_feature 1..20: note = chemically synthesized
  source 1..20: mol_type = other DNA
aatcctcttacacctccaaa

SEQ ID NO: 10437 - DNA, 20 bp, synthetic construct
  misc_feature 1..20: note = chemically synthesized
  source 1..20: mol_type = other DNA
gtaaaaacattgtcttattc

SEQ ID NO: 10438 - DNA, 20 bp, synthetic construct
  misc_feature 1..20: note = chemically synthesized
  source 1..20: mol_type = other DNA
aaaaacattgtcttattcta

SEQ ID NO: 10439 - DNA, 20 bp, synthetic construct
  misc_feature 1..20: note = chemically synthesized
  source 1..20: mol_type = other DNA
tagagacgatttccccttcc

SEQ ID NO: 10440 - DNA, 20 bp, synthetic construct
  misc_feature 1..20: note = chemically synthesized
  source 1..20: mol_type = other DNA
agagacgatttccccttcct

SEQ ID NO: 10441 - DNA, 20 bp, synthetic construct
  misc_feature 1..20: note = chemically synthesized
  source 1..20: mol_type = other DNA
agacgatttccccttcctag

SEQ ID NO: 10442 - DNA, 20 bp, synthetic construct
  misc_feature 1..20: note = chemically synthesized
  source 1..20: mol_type = other DNA
accccactaaatccacccac

SEQ ID NO: 10443 - DNA, 20 bp, synthetic construct
  misc_feature 1..20: note = chemically synthesized
  source 1..20: mol_type = other DNA
acgagttctctcttttcttg

SEQ ID NO: 10444 - DNA, 20 bp, synthetic construct
  misc_feature 1..20: note = chemically synthesized
  source 1..20: mol_type = other DNA
cgagttctctcttttcttgc

SEQ ID NO: 10445 - DNA, 20 bp, synthetic construct
  misc_feature 1..20: note = chemically synthesized
  source 1..20: mol_type = other DNA
ctcttttcttgcaggattgc

SEQ ID NO: 10446 - DNA, 20 bp, synthetic construct
  misc_feature 1..20: note = chemically synthesized
  source 1..20: mol_type = other DNA
tttcttgcaggattgcaaga

SEQ ID NO: 10447 - DNA, 20 bp, synthetic construct
  misc_feature 1..20: note = chemically synthesized
  source 1..20: mol_type = other DNA
tccaacattctcatttccat

SEQ ID NO: 10448 - DNA, 20 bp, synthetic construct
  misc_feature 1..20: note = chemically synthesized
  source 1..20: mol_type = other DNA
attctcatttccatcagaaa

SEQ ID NO: 10449 - DNA, 20 bp, synthetic construct
  misc_feature 1..20: note = chemically synthesized
  source 1..20: mol_type = other DNA
tcagaaatagtgcgtccttt

SEQ ID NO: 10450 - DNA, 20 bp, synthetic construct
  misc_feature 1..20: note = chemically synthesized
  source 1..20: mol_type = other DNA
gtgcgtccttttggctgaat

SEQ ID NO: 10451 - DNA, 20 bp, synthetic construct
  misc_feature 1..20: note = chemically synthesized
  source 1..20: mol_type = other DNA
tgcgtccttttggctgaatc

SEQ ID NO: 10452 - DNA, 20 bp, synthetic construct
  misc_feature 1..20: note = chemically synthesized
  source 1..20: mol_type = other DNA
gcgtccttttggctgaatca

SEQ ID NO: 10453 - DNA, 20 bp, synthetic construct
  misc_feature 1..20: note = chemically synthesized
  source 1..20: mol_type = other DNA
ctgaatcagggtaaaatata

SEQ ID NO: 10454 - DNA, 20 bp, synthetic construct
  misc_feature 1..20: note = chemically synthesized
  source 1..20: mol_type = other DNA
atcagggtaaaatataaaga

SEQ ID NO: 10455 - DNA, 20 bp, synthetic construct
  misc_feature 1..20: note = chemically synthesized
  source 1..20: mol_type = other DNA
gtaaaatataaagacagaaa

SEQ ID NO: 10456 - DNA, 20 bp, synthetic construct
  misc_feature 1..20: note = chemically synthesized
  source 1..20: mol_type = other DNA
aaaatataaagacagaaaaa

SEQ ID NO: 10457 - DNA, 20 bp, synthetic construct
  misc_feature 1..20: note = chemically synthesized
  source 1..20: mol_type = other DNA
aagagtacaatgatatttct

SEQ ID NO: 10458 - DNA, 20 bp, synthetic construct
  misc_feature 1..20: note = chemically synthesized
  source 1..20: mol_type = other DNA
gagtacaatgatatttctta

SEQ ID NO: 10459 - DNA, 20 bp, synthetic construct
  misc_feature 1..20: note = chemically synthesized
  source 1..20: mol_type = other DNA
gtacaatgatatttcttaga

SEQ ID NO: 10460 - DNA, 20 bp, synthetic construct
  misc_feature 1..20: note = chemically synthesized
  source 1..20: mol_type = other DNA
tttattctatttttatcatg

SEQ ID NO: 10461 - DNA, 20 bp, synthetic construct
  misc_feature 1..20: note = chemically synthesized
  source 1..20: mol_type = other DNA
ttattctatttttatcatgc

SEQ ID NO: 10462 - DNA, 20 bp, synthetic construct
  misc_feature 1..20: note = chemically synthesized
  source 1..20: mol_type = other DNA
ttatcatgcaggaactgaat

SEQ ID NO: 10463 - DNA, 20 bp, synthetic construct
  misc_feature 1..20: note = chemically synthesized
  source 1..20: mol_type = other DNA
tcatgcaggaactgaatcag

SEQ ID NO: 10464 - DNA, 20 bp, synthetic construct
  misc_feature 1..20: note = chemically synthesized
  source 1..20: mol_type = other DNA
catgcaggaactgaatcagc

SEQ ID NO: 10465 - DNA, 20 bp, synthetic construct
  misc_feature 1..20: note = chemically synthesized
  source 1..20: mol_type = other DNA
gcaggaactgaatcagcagg

SEQ ID NO: 10466 - DNA, 20 bp, synthetic construct
  misc_feature 1..20: note = chemically synthesized
  source 1..20: mol_type = other DNA
caggaactgaatcagcaggc

SEQ ID NO: 10467 - DNA, 20 bp, synthetic construct
  misc_feature 1..20: note = chemically synthesized
  source 1..20: mol_type = other DNA
tccccaacctcccccatcta

SEQ ID NO: 10468 - DNA, 20 bp, synthetic construct
  misc_feature 1..20: note = chemically synthesized
  source 1..20: mol_type = other DNA
ccccaacctcccccatctaa

SEQ ID NO: 10469 - DNA, 20 bp, synthetic construct
  misc_feature 1..20: note = chemically synthesized
  source 1..20: mol_type = other DNA
ccaacctcccccatctaaag

SEQ ID NO: 10470 - DNA, 20 bp, synthetic construct
  misc_feature 1..20: note = chemically synthesized
  source 1..20: mol_type = other DNA
ctcccccatctaaaggagat

SEQ ID NO: 10471 - DNA, 20 bp, synthetic construct
  misc_feature 1..20: note = chemically synthesized
  source 1..20: mol_type = other DNA
atctaaaggagatgagattt

SEQ ID NO: 10472 - DNA, 20 bp, synthetic construct
  misc_feature 1..20: note = chemically synthesized
  source 1..20: mol_type = other DNA
tctaaaggagatgagatttt

SEQ ID NO: 10473 - DNA, 20 bp, synthetic construct
  misc_feature 1..20: note = chemically synthesized
  source 1..20: mol_type = other DNA
ggagatgagattttgggaca

SEQ ID NO: 10474 - DNA, 20 bp, synthetic construct
  misc_feature 1..20: note = chemically synthesized
  source 1..20: mol_type = other DNA
gagatgagattttgggacat

SEQ ID NO: 10475 - DNA, 20 bp, synthetic construct
  misc_feature 1..20: note = chemically synthesized
  source 1..20: mol_type = other DNA
ttgggacataggtacaaaca

SEQ ID NO: 10476 - DNA, 20 bp, synthetic construct
  misc_feature 1..20: note = chemically synthesized
  source 1..20: mol_type = other DNA
ggacataggtacaaacatag

SEQ ID NO: 10477 - DNA, 20 bp, synthetic construct
  misc_feature 1..20: note = chemically synthesized
  source 1..20: mol_type = other DNA
ggtacaaacatagtggacca

SEQ ID NO: 10478 - DNA, 20 bp, synthetic construct
  misc_feature 1..20: note = chemically synthesized
  source 1..20: mol_type = other DNA
gtacaaacatagtggaccat

SEQ ID NO: 10479 - DNA, 20 bp, synthetic construct
  misc_feature 1..20: note = chemically synthesized
  source 1..20: mol_type = other DNA
gtggaccataggtacaaaca

SEQ ID NO: 10480 - DNA, 20 bp, synthetic construct
  misc_feature 1..20: note = chemically synthesized
  source 1..20: mol_type = other DNA
gaccataggtacaaacatag

SEQ ID NO: 10481 - DNA, 20 bp, synthetic construct
  misc_feature 1..20: note = chemically synthesized
  source 1..20: mol_type = other DNA
ataggtacaaacatagtgga

SEQ ID NO: 10482 - DNA, 20 bp, synthetic construct
  misc_feature 1..20: note = chemically synthesized
  source 1..20: mol_type = other DNA
taggtacaaacatagtggac

SEQ ID NO: 10483 - DNA, 20 bp, synthetic construct
  misc_feature 1..20: note = chemically synthesized
  source 1..20: mol_type = other DNA
aggtacaaacatagtggaca

SEQ ID NO: 10484 - DNA, 20 bp, synthetic construct
  misc_feature 1..20: note = chemically synthesized
  source 1..20: mol_type = other DNA
aacatagtggacagggaact

SEQ ID NO: 10485 - DNA, 20 bp, synthetic construct
  misc_feature 1..20: note = chemically synthesized
  source 1..20: mol_type = other DNA
atagtggacagggaactcag

SEQ ID NO: 10486 - DNA, 20 bp, synthetic construct
  misc_feature 1..20: note = chemically synthesized
  source 1..20: mol_type = other DNA
cagggaactcagtggtcttg

SEQ ID NO: 10487 - DNA, 20 bp, synthetic construct
  misc_feature 1..20: note = chemically synthesized
  source 1..20: mol_type = other DNA
agggaactcagtggtcttgt

SEQ ID NO: 10488 - DNA, 20 bp, synthetic construct
  misc_feature 1..20: note = chemically synthesized
  source 1..20: mol_type = other DNA
ctcagtggtcttgtgggcta

SEQ ID NO: 10489 - DNA, 20 bp, synthetic construct
  misc_feature 1..20: note = chemically synthesized
  source 1..20: mol_type = other DNA
gtgggctacagcattaacca

SEQ ID NO: 10490 - DNA, 20 bp, synthetic construct
  misc_feature 1..20: note = chemically synthesized
  source 1..20: mol_type = other DNA
gcattaaccacagcatttgt

SEQ ID NO: 10491 - DNA, 20 bp, synthetic construct
  misc_feature 1..20: note = chemically synthesized
  source 1..20: mol_type = other DNA
agcatttgttagttactgcc

SEQ ID NO: 10492 - DNA, 20 bp, synthetic construct
  misc_feature 1..20: note = chemically synthesized
  source 1..20: mol_type = other DNA
atttgttagttactgccaag

SEQ ID NO: 10493 - DNA, 20 bp, synthetic construct
  misc_feature 1..20: note = chemically synthesized
  source 1..20: mol_type = other DNA
tgccaagaagcctgtatctg

SEQ ID NO: 10494 - DNA, 20 bp, synthetic construct
  misc_feature 1..20: note = chemically synthesized
  source 1..20: mol_type = other DNA
gccaagaagcctgtatctgt

SEQ ID NO: 10495 - DNA, 20 bp, synthetic construct
  misc_feature 1..20: note = chemically synthesized
  source 1..20: mol_type = other DNA
ccaagaagcctgtatctgta

SEQ ID NO: 10496 - DNA, 20 bp, synthetic construct
  misc_feature 1..20: note = chemically synthesized
  source 1..20: mol_type = other DNA
gtagggtaaaatcctcgctg

SEQ ID NO: 10497 - DNA, 20 bp, synthetic construct
  misc_feature 1..20: note = chemically synthesized
  source 1..20: mol_type = other DNA
gggtaaaatcctcgctgaag

SEQ ID NO: 10498 - DNA, 20 bp, synthetic construct
  misc_feature 1..20: note = chemically synthesized
  source 1..20: mol_type = other DNA
ggtaaaatcctcgctgaagt

SEQ ID NO: 10499 - DNA, 20 bp, synthetic construct
  misc_feature 1..20: note = chemically synthesized
  source 1..20: mol_type = other DNA
caatcaatatcacgttgcct

SEQ ID NO: 10500 - DNA, 20 bp, synthetic construct
  misc_feature 1..20: note = chemically synthesized
  source 1..20: mol_type = other DNA
atcaatatcacgttgcctaa

SEQ ID NO: 10501 - DNA, 20 bp, synthetic construct
  misc_feature 1..20: note = chemically synthesized
  source 1..20: mol_type = other DNA
atatcacgttgcctaagagc

SEQ ID NO: 10502 - DNA, 20 bp, synthetic construct
  misc_feature 1..20: note = chemically synthesized
  source 1..20: mol_type = other DNA
tatcacgttgcctaagagct

SEQ ID NO: 10503 - DNA, 20 bp, synthetic construct
  misc_feature 1..20: note = chemically synthesized
  source 1..20: mol_type = other DNA
atcacgttgcctaagagctg

SEQ ID NO: 10504 - DNA, 20 bp, synthetic construct
  misc_feature 1..20: note = chemically synthesized
  source 1..20: mol_type = other DNA
cacgttgcctaagagctggg

SEQ ID NO: 10505 - DNA, 20 bp, synthetic construct
  misc_feature 1..20: note = chemically synthesized
  source 1..20: mol_type = other DNA
acgttgcctaagagctgggg

SEQ ID NO: 10506 - DNA, 20 bp, synthetic construct
  misc_feature 1..20: note = chemically synthesized
  source 1..20: mol_type = other DNA
cgttgcctaagagctgggga

SEQ ID NO: 10507 - DNA, 20 bp, synthetic construct
  misc_feature 1..20: note = chemically synthesized
  source 1..20: mol_type = other DNA
ttgcctaagagctggggagg

SEQ ID NO: 10508 - DNA, 20 bp, synthetic construct
  misc_feature 1..20: note = chemically synthesized
  source 1..20: mol_type = other DNA
taagagctggggagggagtg

SEQ ID NO: 10509 - DNA, 20 bp, synthetic construct
  misc_feature 1..20: note = chemically synthesized
  source 1..20: mol_type = other DNA
gggagggagtgaagataaaa

SEQ ID NO: 10510 - DNA, 20 bp, synthetic construct
  misc_feature 1..20: note = chemically synthesized
  source 1..20: mol_type = other DNA
agtgaagataaaaaagaaaa

SEQ ID NO: 10511 - DNA, 20 bp, synthetic construct
  misc_feature 1..20: note = chemically synthesized
  source 1..20: mol_type = other DNA
ataaaaaagaaaatggtaca

SEQ ID NO: 10512 - DNA, 20 bp, synthetic construct
  misc_feature 1..20: note = chemically synthesized
  source 1..20: mol_type = other DNA
agaaaatggtacatagtgaa

SEQ ID NO: 10513 - DNA, 20 bp, synthetic construct
  misc_feature 1..20: note = chemically synthesized
  source 1..20: mol_type = other DNA
aaatggtacatagtgaatag

SEQ ID NO: 10514 - DNA, 20 bp, synthetic construct
  misc_feature 1..20: note = chemically synthesized
  source 1..20: mol_type = other DNA
aatggtacatagtgaataga

SEQ ID NO: 10515 - DNA, 20 bp, synthetic construct
  misc_feature 1..20: note = chemically synthesized
  source 1..20: mol_type = other DNA
catagtgaatagaaggcctc

SEQ ID NO: 10516 - DNA, 20 bp, synthetic construct
  misc_feature 1..20: note = chemically synthesized
  source 1..20: mol_type = other DNA
gtgaatagaaggcctcaagc

SEQ ID NO: 10517 - DNA, 20 bp, synthetic construct
  misc_feature 1..20: note = chemically synthesized
  source 1..20: mol_type = other DNA
aaggcctcaagctggacttg

SEQ ID NO: 10518 - DNA, 20 bp, synthetic construct
  misc_feature 1..20: note = chemically synthesized
  source 1..20: mol_type = other DNA
caagctggacttgcagtaaa

SEQ ID NO: 10519 - DNA, 20 bp, synthetic construct
  misc_feature 1..20: note = chemically synthesized
  source 1..20: mol_type = other DNA
acacttacatcctttttcac

SEQ ID NO: 10520 - DNA, 20 bp, synthetic construct
  misc_feature 1..20: note = chemically synthesized
  source 1..20: mol_type = other DNA
acttacatcctttttcacca

SEQ ID NO: 10521 - DNA, 20 bp, synthetic construct
  misc_feature 1..20: note = chemically synthesized
  source 1..20: mol_type = other DNA
atcctttttcaccagagttt

SEQ ID NO: 10522 - DNA, 20 bp, synthetic construct
  misc_feature 1..20: note = chemically synthesized
  source 1..20: mol_type = other DNA
ttgagcaactctcaccatta

SEQ ID NO: 10523 - DNA, 20 bp, synthetic construct
  misc_feature 1..20: note = chemically synthesized
  source 1..20: mol_type = other DNA
tgagcaactctcaccattat

SEQ ID NO: 10524 - DNA, 20 bp, synthetic construct
  misc_feature 1..20: note = chemically synthesized
  source 1..20: mol_type = other DNA
caactctcaccattatgggc

SEQ ID NO: 10525 - DNA, 20 bp, synthetic construct
  misc_feature 1..20: note = chemically synthesized
  source 1..20: mol_type = other DNA
caccattatgggctagatat

SEQ ID NO: 10526 - DNA, 20 bp, synthetic construct
  misc_feature 1..20: note = chemically synthesized
  source 1..20: mol_type = other DNA
gatatcagcttcaatatgac

SEQ ID NO: 10527 - DNA, 20 bp, synthetic construct
  misc_feature 1..20: note = chemically synthesized
  source 1..20: mol_type = other DNA
atcagcttcaatatgactgg

SEQ ID NO: 10528 - DNA, 20 bp, synthetic construct
  misc_feature 1..20: note = chemically synthesized
  source 1..20: mol_type = other DNA
tgattgtttcattttttttt

SEQ ID NO: 10529 - DNA, 20 bp, synthetic construct
  misc_feature 1..20: note = chemically synthesized
  source 1..20: mol_type = other DNA
attgtttcatttttttttta

SEQ ID NO: 10530 - DNA, 20 bp, synthetic construct
  misc_feature 1..20: note = chemically synthesized
  source 1..20: mol_type = other DNA
agagacttcgtccttttaaa

SEQ ID NO: 10531 - DNA, 20 bp, synthetic construct
  misc_feature 1..20: note = chemically synthesized
  source 1..20: mol_type = other DNA
gacttcgtccttttaaaaag

SEQ ID NO: 10532 - DNA, 20 bp, synthetic construct
  misc_feature 1..20: note = chemically synthesized
  source 1..20: mol_type = other DNA
acttcgtccttttaaaaagt

SEQ ID NO: 10533 - DNA, 20 bp, synthetic construct
  misc_feature 1..20: note = chemically synthesized
  source 1..20: mol_type = other DNA
ccttttaaaaagtaggataa

SEQ ID NO: 10534 - DNA, 20 bp, synthetic construct
  misc_feature 1..20: note = chemically synthesized
  source 1..20: mol_type = other DNA
aagtaggataatagtacttc

SEQ ID NO: 10535 - DNA, 20 bp, synthetic construct
  misc_feature 1..20: note = chemically synthesized
  source 1..20: mol_type = other DNA
agtaggataatagtacttca

SEQ ID NO: 10536 - DNA, 20 bp, synthetic construct
  misc_feature 1..20: note = chemically synthesized
  source 1..20: mol_type = other DNA
gataatagtacttcaaggaa

SEQ ID NO: 10537 - DNA, 20 bp, synthetic construct
  misc_feature 1..20: note = chemically synthesized
  source 1..20: mol_type = other DNA
agtacttcaaggaacagtaa

SEQ ID NO: 10538 - DNA, 20 bp, synthetic construct
  misc_feature 1..20: note = chemically synthesized
  source 1..20: mol_type = other DNA
cttcaaggaacagtaatgga

SEQ ID NO: 10539 - DNA, 20 bp, synthetic construct
  misc_feature 1..20: note = chemically synthesized
  source 1..20: mol_type = other DNA
ttcaaggaacagtaatggat

SEQ ID NO: 10540 - DNA, 20 bp, synthetic construct
  misc_feature 1..20: note = chemically synthesized
  source 1..20: mol_type = other DNA
ggaacagtaatggataggat

SEQ ID NO: 10541 - DNA, 20 bp, synthetic construct
  misc_feature 1..20: note = chemically synthesized
  source 1..20: mol_type = other DNA
taatggataggataagtccc

SEQ ID NO: 10542 - DNA, 20 bp, synthetic construct
  misc_feature 1..20: note = chemically synthesized
  source 1..20: mol_type = other DNA
tttcccaaacactcataaca

SEQ ID NO: 10543 - DNA, 20 bp, synthetic construct
  misc_feature 1..20: note = chemically synthesized
  source 1..20: mol_type = other DNA
atcctgtaccatgcgtacaa

SEQ ID NO: 10544 - DNA, 20 bp, synthetic construct
  misc_feature 1..20: note = chemically synthesized
  source 1..20: mol_type = other DNA
aaaagtataccatcatcatt

SEQ ID NO: 10545 - DNA, 20 bp, synthetic construct
  misc_feature 1..20: note = chemically synthesized
  source 1..20: mol_type = other DNA
aagtataccatcatcattcg

SEQ ID NO: 10546 - DNA, 20 bp, synthetic construct
  misc_feature 1..20: note = chemically synthesized
  source 1..20: mol_type = other DNA
agtataccatcatcattcgg

SEQ ID NO: 10547 - DNA, 20 bp, synthetic construct
  misc_feature 1..20: note = chemically synthesized
  source 1..20: mol_type = other DNA
gtataccatcatcattcgga

SEQ ID NO: 10548 - DNA, 20 bp, synthetic construct
  misc_feature 1..20: note = chemically synthesized
  source 1..20: mol_type = other DNA
ggaaacaatcctctttttaa

SEQ ID NO: 10549 - DNA, 20 bp, synthetic construct
  misc_feature 1..20: note = chemically synthesized
  source 1..20: mol_type = other DNA
cagcttcccactactttgtt

SEQ ID NO: 10550 - DNA, 20 bp, synthetic construct
  misc_feature 1..20: note = chemically synthesized
  source 1..20: mol_type = other DNA
gttgatctttttctaacctc

SEQ ID NO: 10551 - DNA, 20 bp, synthetic construct
  misc_feature 1..20: note = chemically synthesized
  source 1..20: mol_type = other DNA
ttgatctttttctaacctcc

SEQ ID NO: 10552 - DNA, 20 bp, synthetic construct
  misc_feature 1..20: note = chemically synthesized
  source 1..20: mol_type = other DNA
ttctaacctccaggactatg

SEQ ID NO: 10553 - DNA, 20 bp, synthetic construct
  misc_feature 1..20: note = chemically synthesized
  source 1..20: mol_type = other DNA
acctccaggactatgcagaa

SEQ ID NO: 10554 - DNA, 20 bp, synthetic construct
  misc_feature 1..20: note = chemically synthesized
  source 1..20: mol_type = other DNA
aaagtgactattaattttta

SEQ ID NO: 10555 - DNA, 20 bp, synthetic construct
  misc_feature 1..20: note = chemically synthesized
  source 1..20: mol_type = other DNA
atagaaaatttcgctgacca

SEQ ID NO: 10556 - DNA, 20 bp, synthetic construct
  misc_feature 1..20: note = chemically synthesized
  source 1..20: mol_type = other DNA
tagaaaatttcgctgaccaa

SEQ ID NO: 10557 - DNA, 20 bp, synthetic construct
  misc_feature 1..20: note = chemically synthesized
  source 1..20: mol_type = other DNA
aaatttcgctgaccaaagga

SEQ ID NO: 10558 - DNA, 20 bp, synthetic construct
  misc_feature 1..20: note = chemically synthesized
  source 1..20: mol_type = other DNA
ttccctcatccaaaaacact

SEQ ID NO: 10559 - DNA, 20 bp, synthetic construct
  misc_feature 1..20: note = chemically synthesized
  source 1..20: mol_type = other DNA
aaaaacactcagtttgattt

SEQ ID NO: 10560 - DNA, 20 bp, synthetic construct
  misc_feature 1..20: note = chemically synthesized
  source 1..20: mol_type = other DNA
acactcagtttgattttggc

SEQ ID NO: 10561 - DNA, 20 bp, synthetic construct
  misc_feature 1..20: note = chemically synthesized
  source 1..20: mol_type = other DNA
ttttggccagaattttttat

SEQ ID NO: 10562 - DNA, 20 bp, synthetic construct
  misc_feature 1..20: note = chemically synthesized
  source 1..20: mol_type = other DNA
tttttataagatgtgttttt

SEQ ID NO: 10563 - DNA, 20 bp, synthetic construct
  misc_feature 1..20: note = chemically synthesized
  source 1..20: mol_type = other DNA
tttataagatgtgtttttca

SEQ ID NO: 10564 - DNA, 20 bp, synthetic construct
  misc_feature 1..20: note = chemically synthesized
  source 1..20: mol_type = other DNA
tgtttttcagagctatcaaa

SEQ ID NO: 10565 - DNA, 20 bp, synthetic construct
  misc_feature 1..20: note = chemically synthesized
  source 1..20: mol_type = other DNA
tttcagagctatcaaatggt

SEQ ID NO: 10566 - DNA, 20 bp, synthetic construct
  misc_feature 1..20: note = chemically synthesized
  source 1..20: mol_type = other DNA
cagagctatcaaatggtaag

SEQ ID NO: 10567 - DNA, 20 bp, synthetic construct
  misc_feature 1..20: note = chemically synthesized
  source 1..20: mol_type = other DNA
aagtggccttccattattca

SEQ ID NO: 10568 - DNA, 20 bp, synthetic construct
  misc_feature 1..20: note = chemically synthesized
  source 1..20: mol_type = other DNA
gtccttgctctaccaaattt

SEQ ID NO: 10569 - DNA, 20 bp, synthetic construct
  misc_feature 1..20: note = chemically synthesized
  source 1..20: mol_type = other DNA
aattttagttatgttattta

SEQ ID NO: 10570 - DNA, 20 bp, synthetic construct
  misc_feature 1..20: note = chemically synthesized
  source 1..20: mol_type = other DNA
tgctgaaatatcatatccca

SEQ ID NO: 10571 - DNA, 20 bp, synthetic construct
  misc_feature 1..20: note = chemically synthesized
  source 1..20: mol_type = other DNA
ccatagctgactcataacac

SEQ ID NO: 10572 - DNA, 20 bp, synthetic construct
  misc_feature 1..20: note = chemically synthesized
  source 1..20: mol_type = other DNA
atagctgactcataacacaa

SEQ ID NO: 10573 - DNA, 20 bp, synthetic construct
  misc_feature 1..20: note = chemically synthesized
  source 1..20: mol_type = other DNA
ctgactcataacacaagaga

SEQ ID NO: 10574 - DNA, 20 bp, synthetic construct
  misc_feature 1..20: note = chemically synthesized
  source 1..20: mol_type = other DNA
aaagccacctctgctttcaa

SEQ ID NO: 10575 - DNA, 20 bp, synthetic construct
  misc_feature 1..20: note = chemically synthesized
  source 1..20: mol_type = other DNA
tctgctttcaaaagtaccca

SEQ ID NO: 10576 - DNA, 20 bp, synthetic construct
  misc_feature 1..20: note = chemically synthesized
  source 1..20: mol_type = other DNA
tacccatagtgcaaatatct

SEQ ID NO: 10577 - DNA, 20 bp, synthetic construct
  misc_feature 1..20: note = chemically synthesized
  source 1..20: mol_type = other DNA
acccatagtgcaaatatcta

SEQ ID NO: 10578 - DNA, 20 bp, synthetic construct
  misc_feature 1..20: note = chemically synthesized
  source 1..20: mol_type = other DNA
cccatagtgcaaatatctaa

SEQ ID NO: 10579 - DNA, 20 bp, synthetic construct
  misc_feature 1..20: note = chemically synthesized
  source 1..20: mol_type = other DNA
agtgcaaatatctaagggta

SEQ ID NO: 10580 - DNA, 20 bp, synthetic construct
  misc_feature 1..20: note = chemically synthesized
  source 1..20: mol_type = other DNA
gcaaatatctaagggtaaag

SEQ ID NO: 10581 - DNA, 20 bp, synthetic construct
  misc_feature 1..20: note = chemically synthesized
  source 1..20: mol_type = other DNA
atatctaagggtaaagaaga

SEQ ID NO: 10582 - DNA, 20 bp, synthetic construct
  misc_feature 1..20: note = chemically synthesized
  source 1..20: mol_type = other DNA
aagggtaaagaagaaagcgt

SEQ ID NO: 10583 - DNA, 20 bp, synthetic construct
  misc_feature 1..20: note = chemically synthesized
  source 1..20: mol_type = other DNA
tgagtgtacttactactcac

SEQ ID NO: 10584 - DNA, 20 bp, synthetic construct
  misc_feature 1..20: note = chemically synthesized
  source 1..20: mol_type = other DNA
gagtgtacttactactcacc

SEQ ID NO: 10585 - DNA, 20 bp, synthetic construct
  misc_feature 1..20: note = chemically synthesized
  source 1..20: mol_type = other DNA
tgtacttactactcaccagg

SEQ ID NO: 10586 - DNA, 20 bp, synthetic construct
  misc_feature 1..20: note = chemically synthesized
  source 1..20: mol_type = other DNA
actactcaccaggaagttct

SEQ ID NO: 10587 - DNA, 20 bp, synthetic construct
  misc_feature 1..20: note = chemically synthesized
  source 1..20: mol_type = other DNA
ctactcaccaggaagttctc

SEQ ID NO: 10588 - DNA, 20 bp, synthetic construct
  misc_feature 1..20: note = chemically synthesized
  source 1..20: mol_type = other DNA
tactcaccaggaagttctca

SEQ ID NO: 10589 - DNA, 20 bp, synthetic construct
  misc_feature 1..20: note = chemically synthesized
  source 1..20: mol_type = other DNA
aagttctcagggtccacgtg

SEQ ID NO: 10590 - DNA, 20 bp, synthetic construct
  misc_feature 1..20: note = chemically synthesized
  source 1..20: mol_type = other DNA
ggtccacgtgcagcttgtta

SEQ ID NO: 10591 - DNA, 20 bp, synthetic construct
  misc_feature 1..20: note = chemically synthesized
  source 1..20: mol_type = other DNA
acgtgcagcttgttacagtg

SEQ ID NO: 10592 - DNA, 20 bp, synthetic construct
  misc_feature 1..20: note = chemically synthesized
  source 1..20: mol_type = other DNA
cgtgcagcttgttacagtgc

SEQ ID NO: 10593 - DNA, 20 bp, synthetic construct
  misc_feature 1..20: note = chemically synthesized
  source 1..20: mol_type = other DNA
ttgttacagtgcaggtcact

SEQ ID NO: 10594 - DNA, 20 bp, synthetic construct
  misc_feature 1..20: note = chemically synthesized
  source 1..20: mol_type = other DNA
acagtgcaggtcactcagtg

SEQ ID NO: 10595 - DNA, 20 bp, synthetic construct
  misc_feature 1..20: note = chemically synthesized
  source 1..20: mol_type = other DNA
gcaggtcactcagtgtagca

SEQ ID NO: 10596 - DNA, 20 bp, synthetic construct
  misc_feature 1..20: note = chemically synthesized
  source 1..20: mol_type = other DNA
caggtcactcagtgtagcaa

SEQ ID NO: 10597 - DNA, 20 bp, synthetic construct
  misc_feature 1..20: note = chemically synthesized
  source 1..20: mol_type = other DNA
agtgtagcaaaggtgccttt

SEQ ID NO: 10598 - DNA, 20 bp, synthetic construct
  misc_feature 1..20: note = chemically synthesized
  source 1..20: mol_type = other DNA
gtgtagcaaaggtgcctttg

SEQ ID NO: 10599 - DNA, 20 bp, synthetic construct
  misc_feature 1..20: note = chemically synthesized
  source 1..20: mol_type = other DNA
gtgcctttgaggtcatccgt

SEQ ID NO: 10600 - DNA, 20 bp, synthetic construct
  misc_feature 1..20: note = chemically synthesized
  source 1..20: mol_type = other DNA
gaggtcatccgtgagcataa

SEQ ID NO: 10601 - DNA, 20 bp, synthetic construct
  misc_feature 1..20: note = chemically synthesized
  source 1..20: mol_type = other DNA
tgagcataacagcttttccg

SEQ ID NO: 10602 - DNA, 20 bp, synthetic construct
  misc_feature 1..20: note = chemically synthesized
  source 1..20: mol_type = other DNA
gagcataacagcttttccga

SEQ ID NO: 10603 - DNA, 20 bp, synthetic construct
  misc_feature 1..20: note = chemically synthesized
  source 1..20: mol_type = other DNA
gcataacagcttttccgaag

SEQ ID NO: 10604 - DNA, 20 bp, synthetic construct
  misc_feature 1..20: note = chemically synthesized
  source 1..20: mol_type = other DNA
acagcttttccgaaggagat

SEQ ID NO: 10605 - DNA, 20 bp, synthetic construct
  misc_feature 1..20: note = chemically synthesized
  source 1..20: mol_type = other DNA
cttgccatgtgccttgactt

SEQ ID NO: 10606 - DNA, 20 bp, synthetic construct
  misc_feature 1..20: note = chemically synthesized
  source 1..20: mol_type = other DNA
ttgccatgtgccttgacttt

SEQ ID NO: 10607 - DNA, 20 bp, synthetic construct
  misc_feature 1..20: note = chemically synthesized
  source 1..20: mol_type = other DNA
tgccatgtgccttgactttg

SEQ ID NO: 10608 - DNA, 20 bp, synthetic construct
  misc_feature 1..20: note = chemically synthesized
  source 1..20: mol_type = other DNA
tggggttgcccattattgca

SEQ ID NO: 10609 - DNA, 20 bp, synthetic construct
  misc_feature 1..20: note = chemically synthesized
  source 1..20: mol_type = other DNA
gttgcccattattgcacagt

SEQ ID NO: 10610 - DNA, 20 bp, synthetic construct
  misc_feature 1..20: note = chemically synthesized
  source 1..20: mol_type = other DNA
tgcccattattgcacagtca

SEQ ID NO: 10611 - DNA, 20 bp, synthetic construct
  misc_feature 1..20: note = chemically synthesized
  source 1..20: mol_type = other DNA
attattgcacagtcagagcc

SEQ ID NO: 10612 - DNA, 20 bp, synthetic construct
  misc_feature 1..20: note = chemically synthesized
  source 1..20: mol_type = other DNA
ccagatatccaaaactttca

SEQ ID NO: 10613 - DNA, 20 bp, synthetic construct
  misc_feature 1..20: note = chemically synthesized
  source 1..20: mol_type = other DNA
caaaactttcaaagtacctc

SEQ ID NO: 10614 - DNA, 20 bp, synthetic construct
  misc_feature 1..20: note = chemically synthesized
  source 1..20: mol_type = other DNA
aaaactttcaaagtacctct

SEQ ID NO: 10615 - DNA, 20 bp, synthetic construct
  misc_feature 1..20: note = chemically synthesized
  source 1..20: mol_type = other DNA
tcaaagtacctctaggtcca

SEQ ID NO: 10616 - DNA, 20 bp, synthetic construct
  misc_feature 1..20: note = chemically synthesized
  source 1..20: mol_type = other DNA
caaagtacctctaggtccat

SEQ ID NO: 10617 - DNA, 20 bp, synthetic construct
  misc_feature 1..20: note = chemically synthesized
  source 1..20: mol_type = other DNA
agtacctctaggtccatggg

SEQ ID NO: 10618 - DNA, 20 bp, synthetic construct
  misc_feature 1..20: note = chemically synthesized
  source 1..20: mol_type = other DNA
taggtccatgggtagacaac

SEQ ID NO: 10619 - DNA, 20 bp, synthetic construct
  misc_feature 1..20: note = chemically synthesized
  source 1..20: mol_type = other DNA
aggtccatgggtagacaacc

SEQ ID NO: 10620 - DNA, 20 bp, synthetic construct
  misc_feature 1..20: note = chemically synthesized
  source 1..20: mol_type = other DNA
gtccatgggtagacaaccag

SEQ ID NO: 10621 - DNA, 20 bp, synthetic construct
  misc_feature 1..20: note = chemically synthesized
  source 1..20: mol_type = other DNA
ggtagacaaccaggagactg

SEQ ID NO: 10622 - DNA, 20 bp, synthetic construct
  misc_feature 1..20: note = chemically synthesized
  source 1..20: mol_type = other DNA
gtagacaaccaggagactgt

SEQ ID NO: 10623 - DNA, 20 bp, synthetic construct
  misc_feature 1..20: note = chemically synthesized
  source 1..20: mol_type = other DNA
acaaccaggagactgtggga

SEQ ID NO: 10624 - DNA, 20 bp, synthetic construct
  misc_feature 1..20: note = chemically synthesized
  source 1..20: mol_type = other DNA
ctgtgggatagtcataatca

SEQ ID NO: 10625 - DNA, 20 bp, synthetic construct
  misc_feature 1..20: note = chemically synthesized
  source 1..20: mol_type = other DNA
gtgggatagtcataatcaca

SEQ ID NO: 10626 - DNA, 20 bp, synthetic construct
  misc_feature 1..20: note = chemically synthesized
  source 1..20: mol_type = other DNA
ggatagtcataatcacagag

SEQ ID NO: 10627 - DNA, 20 bp, synthetic construct
  misc_feature 1..20: note = chemically synthesized
  source 1..20: mol_type = other DNA
gatagtcataatcacagagc

SEQ ID NO: 10628 - DNA, 20 bp, synthetic construct
  misc_feature 1..20: note = chemically synthesized
  source 1..20: mol_type = other DNA
ataatcacagagcaggtgca

SEQ ID NO: 10629 - DNA, 20 bp, synthetic construct
  misc_feature 1..20: note = chemically synthesized
  source 1..20: mol_type = other DNA
tcacagagcaggtgcaaagt

SEQ ID NO: 10630 - DNA, 20 bp, synthetic construct
  misc_feature 1..20: note = chemically synthesized
  source 1..20: mol_type = other DNA
ggtgcaaagtcagactatgt

SEQ ID NO: 10631 - DNA, 20 bp, synthetic construct
  misc_feature 1..20: note = chemically synthesized
  source 1..20: mol_type = other DNA
agtcagactatgtaagacaa

SEQ ID NO: 10632 - DNA, 20 bp, synthetic construct
  misc_feature 1..20: note = chemically synthesized
  source 1..20: mol_type = other DNA
gtcagactatgtaagacaac

SEQ ID NO: 10633 - DNA, 20 bp, synthetic construct
  misc_feature 1..20: note = chemically synthesized
  source 1..20: mol_type = other DNA
caacgggctaatccctcttt

SEQ ID NO: 10634 - DNA, 20 bp, synthetic construct
  misc_feature 1..20: note = chemically synthesized
  source 1..20: mol_type = other DNA
tgcctttctgcaccttgtcc

SEQ ID NO: 10635 - DNA, 20 bp, synthetic construct
  misc_feature 1..20: note = chemically synthesized
  source 1..20: mol_type = other DNA
ctgcaccttgtcccggcttc

SEQ ID NO: 10636 - DNA, 20 bp, synthetic construct
  misc_feature 1..20: note = chemically synthesized
  source 1..20: mol_type = other DNA
gcttccagtacctacctgcc

SEQ ID NO: 10637 - DNA, 20 bp, synthetic construct
  misc_feature 1..20: note = chemically synthesized
  source 1..20: mol_type = other DNA
cctgcccagaatctcacctc

SEQ ID NO: 10638 - DNA, 20 bp, synthetic construct
  misc_feature 1..20: note = chemically synthesized
  source 1..20: mol_type = other DNA
ctcaccttaaccttgcttca

SEQ ID NO: 10639 - DNA, 20 bp, synthetic construct
  misc_feature 1..20: note = chemically synthesized
  source 1..20: mol_type = other DNA
tcaccttaaccttgcttcac

SEQ ID NO: 10640 - DNA, 20 bp, synthetic construct
  misc_feature 1..20: note = chemically synthesized
  source 1..20: mol_type = other DNA
cttaaccttgcttcacaggc

SEQ ID NO: 10641 - DNA, 20 bp, synthetic construct
  misc_feature 1..20: note = chemically synthesized
  source 1..20: mol_type = other DNA
aaccttgcttcacaggctgg

SEQ ID NO: 10642 - DNA, 20 bp, synthetic construct
  misc_feature 1..20: note = chemically synthesized
  source 1..20: mol_type = other DNA
cttgcttcacaggctggtgg

SEQ ID NO: 10643 - DNA, 20 bp, synthetic construct
  misc_feature 1..20: note = chemically synthesized
  source 1..20: mol_type = other DNA
gcttcacaggctggtggcag

SEQ ID NO: 10644 - DNA, 20 bp, synthetic construct
  misc_feature 1..20: note = chemically synthesized
  source 1..20: mol_type = other DNA
ggtggcagcagccttcttgt

SEQ ID NO: 10645 - DNA, 20 bp, synthetic construct
  misc_feature 1..20: note = chemically synthesized
  source 1..20: mol_type = other DNA
ggcagcagccttcttgtcag

SEQ ID NO: 10646 - DNA, 20 bp, synthetic construct
  misc_feature 1..20: note = chemically synthesized
  source 1..20: mol_type = other DNA
gtcagcagtgaaatgcacta

SEQ ID NO: 10647 - DNA, 20 bp, synthetic construct
  misc_feature 1..20: note = chemically synthesized
  source 1..20: mol_type = other DNA
agtgaaatgcactacagtgt

SEQ ID NO: 10648 - DNA, 20 bp, synthetic construct
  misc_feature 1..20: note = chemically synthesized
  source 1..20: mol_type = other DNA
atgcactacagtgtcagatc

SEQ ID NO: 10649 - DNA, 20 bp, synthetic construct
  misc_feature 1..20: note = chemically synthesized
  source 1..20: mol_type = other DNA
tgcactacagtgtcagatct

SEQ ID NO: 10650 - DNA, 20 bp, synthetic construct
  misc_feature 1..20: note = chemically synthesized
  source 1..20: mol_type = other DNA
cactacagtgtcagatctgg

SEQ ID NO: 10651 - DNA, 20 bp, synthetic construct
  misc_feature 1..20: note = chemically synthesized
  source 1..20: mol_type = other DNA
tgtcagatctgggagtttcc

SEQ ID NO: 10652 - DNA, 20 bp, synthetic construct
  misc_feature 1..20: note = chemically synthesized
  source 1..20: mol_type = other DNA
tgggagtttcctggtgatca

SEQ ID NO: 10653 - DNA, 20 bp, synthetic construct
  misc_feature 1..20: note = chemically synthesized
  source 1..20: mol_type = other DNA
gtttcctggtgatcacagat

SEQ ID NO: 10654 - DNA, 20 bp, synthetic construct
  misc_feature 1..20: note = chemically synthesized
  source 1..20: mol_type = other DNA
cctggtgatcacagatgagc

SEQ ID NO: 10655 - DNA, 20 bp, synthetic construct
  misc_feature 1..20: note = chemically synthesized
  source 1..20: mol_type = other DNA
ggtgatcacagatgagccag

SEQ ID NO: 10656 - DNA, 20 bp, synthetic construct
  misc_feature 1..20: note = chemically synthesized
  source 1..20: mol_type = other DNA
ctgcattgctgcttcatgtg

SEQ ID NO: 10657 - DNA, 20 bp, synthetic construct
  misc_feature 1..20: note = chemically synthesized
  source 1..20: mol_type = other DNA
ggctttttacttctcctctc

SEQ ID NO: 10658 - DNA, 20 bp, synthetic construct
  misc_feature 1..20: note = chemically synthesized
  source 1..20: mol_type = other DNA
tacttctcctctctggcccc

SEQ ID NO: 10659 - DNA, 20 bp, synthetic construct
  misc_feature 1..20: note = chemically synthesized
  source 1..20: mol_type = other DNA
ccccagccctttgcctctcc

SEQ ID NO: 10660 - DNA, 20 bp, synthetic construct
  misc_feature 1..20: note = chemically synthesized
  source 1..20: mol_type = other DNA
agtgaaatgaatctattgac

SEQ ID NO: 10661 - DNA, 20 bp, synthetic construct
  misc_feature 1..20: note = chemically synthesized
  source 1..20: mol_type = other DNA
gaccagccctttgcctccct

SEQ ID NO: 10662 - DNA, 20 bp, synthetic construct
  misc_feature 1..20: note = chemically synthesized
  source 1..20: mol_type = other DNA
cctcagtaaaatgaatctat

SEQ ID NO: 10663 - DNA, 20 bp, synthetic construct
  misc_feature 1..20: note = chemically synthesized
  source 1..20: mol_type = other DNA
gtaaaatgaatctattggtc

SEQ ID NO: 10664 - DNA, 20 bp, synthetic construct
  misc_feature 1..20: note = chemically synthesized
  source 1..20: mol_type = other DNA
taaaatgaatctattggtca

SEQ ID NO: 10665 - DNA, 20 bp, synthetic construct
  misc_feature 1..20: note = chemically synthesized
  source 1..20: mol_type = other DNA
aaaatgaatctattggtcaa

SEQ ID NO: 10666 - DNA, 20 bp, synthetic construct
  misc_feature 1..20: note = chemically synthesized
  source 1..20: mol_type = other DNA
atgaatctattggtcaaggg

SEQ ID NO: 10667 - DNA, 20 bp, synthetic construct
  misc_feature 1..20: note = chemically synthesized
  source 1..20: mol_type = other DNA
tgaatctattggtcaagggt

SEQ ID NO: 10668 - DNA, 20 bp, synthetic construct
  misc_feature 1..20: note = chemically synthesized
  source 1..20: mol_type = other DNA
tcaagggtgggttgtgactc

SEQ ID NO: 10669 - DNA, 20 bp, synthetic construct
  misc_feature 1..20: note = chemically synthesized
  source 1..20: mol_type = other DNA
caagggtgggttgtgactcc

SEQ ID NO: 10670 - DNA, 20 bp, synthetic construct
  misc_feature 1..20: note = chemically synthesized
  source 1..20: mol_type = other DNA
aagggtgggttgtgactcca

SEQ ID NO: 10671 - DNA, 20 bp, synthetic construct
  misc_feature 1..20: note = chemically synthesized
  source 1..20: mol_type = other DNA
agggtgggttgtgactccag

SEQ ID NO: 10672 - DNA, 20 bp, synthetic construct
  misc_feature 1..20: note = chemically synthesized
  source 1..20: mol_type = other DNA
gtgggttgtgactccagggg

SEQ ID NO: 10673 - DNA, 20 bp, synthetic construct
  misc_feature 1..20: note = chemically synthesized
  source 1..20: mol_type = other DNA
tgggttgtgactccaggggt

SEQ ID NO: 10674 - DNA, 20 bp, synthetic construct
  misc_feature 1..20: note = chemically synthesized
  source 1..20: mol_type = other DNA
gggttgtgactccaggggtg

SEQ ID NO: 10675 - DNA, 20 bp, synthetic construct
  misc_feature 1..20: note = chemically synthesized
  source 1..20: mol_type = other DNA
gtgactccaggggtggggtt

SEQ ID NO: 10676 - DNA, 20 bp, synthetic construct
  misc_feature 1..20: note = chemically synthesized
  source 1..20: mol_type = other DNA
tgactccaggggtggggttt

SEQ ID NO: 10677 - DNA, 20 bp, synthetic construct
  misc_feature 1..20: note = chemically synthesized
  source 1..20: mol_type = other DNA
tccaggggtggggtttgggc

SEQ ID NO: 10678 - DNA, 20 bp, synthetic construct
  misc_feature 1..20: note = chemically synthesized
  source 1..20: mol_type = other DNA
ccaggggtggggtttgggca

SEQ ID NO: 10679 - DNA, 20 bp, synthetic construct
  misc_feature 1..20: note = chemically synthesized
  source 1..20: mol_type = other DNA
ggggtggggtttgggcaagg

SEQ ID NO: 10680 - DNA, 20 bp, synthetic construct
  misc_feature 1..20: note = chemically synthesized
  source 1..20: mol_type = other DNA
tttgggcaaggaagttttgc

SEQ ID NO: 10681 - DNA, 20 bp, synthetic construct
  misc_feature 1..20: note = chemically synthesized
  source 1..20: mol_type = other DNA
ggcaaggaagttttgcaaga

SEQ ID NO: 10682 - DNA, 20 bp, synthetic construct
  misc_feature 1..20: note = chemically synthesized
  source 1..20: mol_type = other DNA
gttttgcaagatggacattc

SEQ ID NO: 10683 - DNA, 20 bp, synthetic construct
  misc_feature 1..20: note = chemically synthesized
  source 1..20: mol_type = other DNA
atggacattcgagtttctga

SEQ ID NO: 10684 - DNA, 20 bp, synthetic construct
  misc_feature 1..20: note = chemically synthesized
  source 1..20: mol_type = other DNA
ttcgagtttctgatagaatc

SEQ ID NO: 10685 - DNA, 20 bp, synthetic construct
  misc_feature 1..20: note = chemically synthesized
  source 1..20: mol_type = other DNA
tcgagtttctgatagaatcc

SEQ ID NO: 10686 - DNA, 20 bp, synthetic construct
  misc_feature 1..20: note = chemically synthesized
  source 1..20: mol_type = other DNA
agtttctgatagaatccagg

SEQ ID NO: 10687 - DNA, 20 bp, synthetic construct
  misc_feature 1..20: note = chemically synthesized
  source 1..20: mol_type = other DNA
tagaatccaggtggccttct

SEQ ID NO: 10688 - DNA, 20 bp, synthetic construct
  misc_feature 1..20: note = chemically synthesized
  source 1..20: mol_type = other DNA
agaatccaggtggccttctc

SEQ ID NO: 10689 - DNA, 20 bp, synthetic construct
  misc_feature 1..20: note = chemically synthesized
  source 1..20: mol_type = other DNA
gaatccaggtggccttctca

SEQ ID NO: 10690 - DNA, 20 bp, synthetic construct
  misc_feature 1..20: note = chemically synthesized
  source 1..20: mol_type = other DNA
aatccaggtggccttctcag

SEQ ID NO: 10691 - DNA, 20 bp, synthetic construct
  misc_feature 1..20: note = chemically synthesized
  source 1..20: mol_type = other DNA
ctcaggggaactttgctgtt

SEQ ID NO: 10692 - DNA, 20 bp, synthetic construct
  misc_feature 1..20: note = chemically synthesized
  source 1..20: mol_type = other DNA
tcaggggaactttgctgttc

SEQ ID NO: 10693 - DNA, 20 bp, synthetic construct
  misc_feature 1..20: note = chemically synthesized
  source 1..20: mol_type = other DNA
cctacactacccccaccatc

SEQ ID NO: 10694 - DNA, 20 bp, synthetic construct
  misc_feature 1..20: note = chemically synthesized
  source 1..20: mol_type = other DNA
tacccccaccatccagtgtg

SEQ ID NO: 10695 - DNA, 20 bp, synthetic construct
  misc_feature 1..20: note = chemically synthesized
  source 1..20: mol_type = other DNA
cagtgtgcagtttatttctc

SEQ ID NO: 10696 - DNA, 20 bp, synthetic construct
  misc_feature 1..20: note = chemically synthesized
  source 1..20: mol_type = other DNA
agtgtgcagtttatttctca

SEQ ID NO: 10697 - DNA, 20 bp, synthetic construct
  misc_feature 1..20: note = chemically synthesized
  source 1..20: mol_type = other DNA
ttatttctcaaggacttcgc

SEQ ID NO: 10698 - DNA, 20 bp, synthetic construct
  misc_feature 1..20: note = chemically synthesized
  source 1..20: mol_type = other DNA
tttctcaaggacttcgccag

SEQ ID NO: 10699 - DNA, 20 bp, synthetic construct
  misc_feature 1..20: note = chemically synthesized
  source 1..20: mol_type = other DNA
ataacctgaatgctgacaaa

SEQ ID NO: 10700 - DNA, 20 bp, synthetic construct
  misc_feature 1..20: note = chemically synthesized
  source 1..20: mol_type = other DNA
taacctgaatgctgacaaat

SEQ ID NO: 10701 - DNA, 20 bp, synthetic construct
  misc_feature 1..20: note = chemically synthesized
  source 1..20: mol_type = other DNA
gaatgctgacaaataggaat

SEQ ID NO: 10702 - DNA, 20 bp, synthetic construct
  misc_feature 1..20: note = chemically synthesized
  source 1..20: mol_type = other DNA
aggaataagttacaactgaa

SEQ ID NO: 10703 - DNA, 20 bp, synthetic construct
  misc_feature 1..20: note = chemically synthesized
  source 1..20: mol_type = other DNA
ggaataagttacaactgaaa

SEQ ID NO: 10704 - DNA, 20 bp, synthetic construct
  misc_feature 1..20: note = chemically synthesized
  source 1..20: mol_type = other DNA
aagttacaactgaaaaggat

SEQ ID NO: 10705 - DNA, 20 bp, synthetic construct
  misc_feature 1..20: note = chemically synthesized
  source 1..20: mol_type = other DNA
gataagaattacgaatatct

SEQ ID NO: 10706 - DNA, 20 bp, synthetic construct
  misc_feature 1..20: note = chemically synthesized
  source 1..20: mol_type = other DNA
atatcttagccatcaattcc

SEQ ID NO: 10707 - DNA, 20 bp, synthetic construct
  misc_feature 1..20: note = chemically synthesized
  source 1..20: mol_type = other DNA
ttagccatcaattcctggat

SEQ ID NO: 10708 - DNA, 20 bp, synthetic construct
  misc_feature 1..20: note = chemically synthesized
  source 1..20: mol_type = other DNA
tagccatcaattcctggatc

SEQ ID NO: 10709 - DNA, 20 bp, synthetic construct
  misc_feature 1..20: note = chemically synthesized
  source 1..20: mol_type = other DNA
gccatcaattcctggatcag

SEQ ID NO: 10710 - DNA, 20 bp, synthetic construct
  misc_feature 1..20: note = chemically synthesized
  source 1..20: mol_type = other DNA
gtgttatcctgttattcatc

SEQ ID NO: 10711 - DNA, 20 bp, synthetic construct
  misc_feature 1..20: note = chemically synthesized
  source 1..20: mol_type = other DNA
tgttatcctgttattcatcc

SEQ ID NO: 10712 - DNA, 20 bp, synthetic construct
  misc_feature 1..20: note = chemically synthesized
  source 1..20: mol_type = other DNA
ttattcatccaggctttatg

SEQ ID NO: 10713 - DNA, 20 bp, synthetic construct
  misc_feature 1..20: note = chemically synthesized
  source 1..20: mol_type = other DNA
ttcatccaggctttatgtgg

SEQ ID NO: 10714 - DNA, 20 bp, synthetic construct
  misc_feature 1..20: note = chemically synthesized
  source 1..20: mol_type = other DNA
atccaggctttatgtggaag

SEQ ID NO: 10715 - DNA, 20 bp, synthetic construct
  misc_feature 1..20: note = chemically synthesized
  source 1..20: mol_type = other DNA
gctttatgtggaagaagcca

SEQ ID NO: 10716 - DNA, 20 bp, synthetic construct
  misc_feature 1..20: note = chemically synthesized
  source 1..20: mol_type = other DNA
gaagaagccacagcctttct

SEQ ID NO: 10717 - DNA, 20 bp, synthetic construct
  misc_feature 1..20: note = chemically synthesized
  source 1..20: mol_type = other DNA
tcttggttttcaattctctt

SEQ ID NO: 10718 - DNA, 20 bp, synthetic construct
  misc_feature 1..20: note = chemically synthesized
  source 1..20: mol_type = other DNA
cattgaatacacaatttcat

SEQ ID NO: 10719 - DNA, 20 bp, synthetic construct
  misc_feature 1..20: note = chemically synthesized
  source 1..20: mol_type = other DNA
tttttttttttttttttttt

SEQ ID NO: 10720 - DNA, 20 bp, synthetic construct
  misc_feature 1..20: note = chemically synthesized
  source 1..20: mol_type = other DNA
ttttttttttttttttgaga

SEQ ID NO: 10721 - DNA, 20 bp, synthetic construct
  misc_feature 1..20: note = chemically synthesized
  source 1..20: mol_type = other DNA
ttttttttttttttgagatg

SEQ ID NO: 10722 - DNA, 20 bp, synthetic construct
  misc_feature 1..20: note = chemically synthesized
  source 1..20: mol_type = other DNA
tggagtctcgctttgtcacc

SEQ ID NO: 10723 - DNA, 20 bp, synthetic construct
  misc_feature 1..20: note = chemically synthesized
  source 1..20: mol_type = other DNA
ggagtctcgctttgtcaccc

SEQ ID NO: 10724 - DNA, 20 bp, synthetic construct
  misc_feature 1..20: note = chemically synthesized
  source 1..20: mol_type = other DNA
tctcgctttgtcacccaggc

SEQ ID NO: 10725 - DNA, 20 bp, synthetic construct
  misc_feature 1..20: note = chemically synthesized
  source 1..20: mol_type = other DNA
tcgctttgtcacccaggctg

SEQ ID NO: 10726 - DNA, 20 bp, synthetic construct
  misc_feature 1..20: note = chemically synthesized
  source 1..20: mol_type = other DNA
gtcacccaggctggagtgtg

SEQ ID NO: 10727 - DNA, 20 bp, synthetic construct
  misc_feature 1..20: note = chemically synthesized
  source 1..20: mol_type = other DNA
acccaggctggagtgtgcag

SEQ ID NO: 10728 - DNA, 20 bp, synthetic construct
  misc_feature 1..20: note = chemically synthesized
  source 1..20: mol_type = other DNA
gcgcgatctctgctcaccgc

SEQ ID NO: 10729 - DNA, 20 bp, synthetic construct
  misc_feature 1..20: note = chemically synthesized
  source 1..20: mol_type = other DNA
tcaccgcaagctctgcctcc

SEQ ID NO: 10730 - DNA, 20 bp, synthetic construct
  misc_feature 1..20: note = chemically synthesized
  source 1..20: mol_type = other DNA
caccgcaagctctgcctccc

SEQ ID NO: 10731 - DNA, 20 bp, synthetic construct
  misc_feature 1..20: note = chemically synthesized
  source 1..20: mol_type = other DNA
ttcacgccattctcctgcct

SEQ ID NO: 10732 - DNA, 20 bp, synthetic construct
  misc_feature 1..20: note = chemically synthesized
  source 1..20: mol_type = other DNA
ttctcctgcctcagcctccc

SEQ ID NO: 10733 - DNA, 20 bp, synthetic construct
  misc_feature 1..20: note = chemically synthesized
  source 1..20: mol_type = other DNA
tcctgcctcagcctcccgag

SEQ ID NO: 10734 - DNA, 20 bp, synthetic construct
  misc_feature 1..20: note = chemically synthesized
  source 1..20: mol_type = other DNA
gcctcagcctcccgagtagc

SEQ ID NO: 10735 - DNA, 20 bp, synthetic construct
  misc_feature 1..20: note = chemically synthesized
  source 1..20: mol_type = other DNA
cctcagcctcccgagtagct

SEQ ID NO: 10736 - DNA, 20 bp, synthetic construct
  misc_feature 1..20: note = chemically synthesized
  source 1..20: mol_type = other DNA
ctcccgagtagctgggacta

SEQ ID NO: 10737 - DNA, 20 bp, synthetic construct
  misc_feature 1..20: note = chemically synthesized
  source 1..20: mol_type = other DNA
tcccgagtagctgggactac

SEQ ID NO: 10738 - DNA, 20 bp, synthetic construct
  misc_feature 1..20: note = chemically synthesized
  source 1..20: mol_type = other DNA
caggcacccgccactgtctc

SEQ ID NO: 10739 - DNA, 20 bp, synthetic construct
  misc_feature 1..20: note = chemically synthesized
  source 1..20: mol_type = other DNA
tggctaattttttgtatttt

SEQ ID NO: 10740 - DNA, 20 bp, synthetic construct
  misc_feature 1..20: note = chemically synthesized
  source 1..20: mol_type = other DNA
ctaattttttgtatttttag

SEQ ID NO: 10741 - DNA, 20 bp, synthetic construct
  misc_feature 1..20: note = chemically synthesized
  source 1..20: mol_type = other DNA
aattttttgtatttttagta

SEQ ID NO: 10742 - DNA, 20 bp, synthetic construct
  misc_feature 1..20: note = chemically synthesized
  source 1..20: mol_type = other DNA
ttttgtatttttagtagaga

SEQ ID NO: 10743 - DNA, 20 bp, synthetic construct
  misc_feature 1..20: note = chemically synthesized
  source 1..20: mol_type = other DNA
tttgtatttttagtagagat

SEQ ID NO: 10744 - DNA, 20 bp, synthetic construct
  misc_feature 1..20: note = chemically synthesized
  source 1..20: mol_type = other DNA
ttgtatttttagtagagatg

SEQ ID NO: 10745 - DNA, 20 bp, synthetic construct
  misc_feature 1..20: note = chemically synthesized
  source 1..20: mol_type = other DNA
gagatggggtttcaccatgt

SEQ ID NO: 10746 - DNA, 20 bp, synthetic construct
  misc_feature 1..20: note = chemically synthesized
  source 1..20: mol_type = other DNA
tggggtttcaccatgttagc

SEQ ID NO: 10747 - DNA, 20 bp, synthetic construct
  misc_feature 1..20: note = chemically synthesized
  source 1..20: mol_type = other DNA
ggggtttcaccatgttagcc

SEQ ID NO: 10748 - DNA, 20 bp, synthetic construct
  misc_feature 1..20: note = chemically synthesized
  source 1..20: mol_type = other DNA
tttcaccatgttagccagga

SEQ ID NO: 10749 - DNA, 20 bp, synthetic construct
  misc_feature 1..20: note = chemically synthesized
  source 1..20: mol_type = other DNA
acctcgtgatccgcccacct

SEQ ID NO: 10750 - DNA, 20 bp, synthetic construct
  misc_feature 1..20: note = chemically synthesized
  source 1..20: mol_type = other DNA
ccgcccacctcagcctccca

SEQ ID NO: 10751 - DNA, 20 bp, synthetic construct
  misc_feature 1..20: note = chemically synthesized
  source 1..20: mol_type = other DNA
acctcagcctcccaaagtgc

SEQ ID NO: 10752 - DNA, 20 bp, synthetic construct
  misc_feature 1..20: note = chemically synthesized
  source 1..20: mol_type = other DNA
cctcagcctcccaaagtgct

SEQ ID NO: 10753 - DNA, 20 bp, synthetic construct
  misc_feature 1..20: note = chemically synthesized
  source 1..20: mol_type = other DNA
ctcccaaagtgctgggatta

SEQ ID NO: 10754 - DNA, 20 bp, synthetic construct
  misc_feature 1..20: note = chemically synthesized
  source 1..20: mol_type = other DNA
tcccaaagtgctgggattac

SEQ ID NO: 10755 - DNA, 20 bp, synthetic construct
  misc_feature 1..20: note = chemically synthesized
  source 1..20: mol_type = other DNA
agtgctgggattacaggtgt

SEQ ID NO: 10756 - DNA, 20 bp, synthetic construct
  misc_feature 1..20: note = chemically synthesized
  source 1..20: mol_type = other DNA
caggtgtgagccaccgcgcc

SEQ ID NO: 10757 - DNA, 20 bp, synthetic construct
  misc_feature 1..20: note = chemically synthesized
  source 1..20: mol_type = other DNA
cggccaatttcatcactttt

SEQ ID NO: 10758 - DNA, 20 bp, synthetic construct
  misc_feature 1..20: note = chemically synthesized
  source 1..20: mol_type = other DNA
aatttcatcactttttagaa

SEQ ID NO: 10759 - DNA, 20 bp, synthetic construct
  misc_feature 1..20: note = chemically synthesized
  source 1..20: mol_type = other DNA
tagaaataaacacctctatc

SEQ ID NO: 10760 - DNA, 20 bp, synthetic construct
  misc_feature 1..20: note = chemically synthesized
  source 1..20: mol_type = other DNA
acctctatccagcatcaact

SEQ ID NO: 10761 - DNA, 20 bp, synthetic construct
  misc_feature 1..20: note = chemically synthesized
  source 1..20: mol_type = other DNA
tctatccagcatcaacttgg

SEQ ID NO: 10762 - DNA, 20 bp, synthetic construct
  misc_feature 1..20: note = chemically synthesized
  source 1..20: mol_type = other DNA
tccagcatcaacttggaaga

SEQ ID NO: 10763 - DNA, 20 bp, synthetic construct
  misc_feature 1..20: note = chemically synthesized
  source 1..20: mol_type = other DNA
agcatcaacttggaagaaag

SEQ ID NO: 10764 - DNA, 20 bp, synthetic construct
  misc_feature 1..20: note = chemically synthesized
  source 1..20: mol_type = other DNA
aacttggaagaaagcagaat

SEQ ID NO: 10765 - DNA, 20 bp, synthetic construct
  misc_feature 1..20: note = chemically synthesized
  source 1..20: mol_type = other DNA
aagcagaataagaaacaaac

SEQ ID NO: 10766 - DNA, 20 bp, synthetic construct
  misc_feature 1..20: note = chemically synthesized
  source 1..20: mol_type = other DNA
agcagaataagaaacaaact

SEQ ID NO: 10767 - DNA, 20 bp, synthetic construct
  misc_feature 1..20: note = chemically synthesized
  source 1..20: mol_type = other DNA
gcagaataagaaacaaacta

SEQ ID NO: 10768 - DNA, 20 bp, synthetic construct
  misc_feature 1..20: note = chemically synthesized
  source 1..20: mol_type = other DNA
gaataagaaacaaactaggg

SEQ ID NO: 10769 - DNA, 20 bp, synthetic construct
  misc_feature 1..20: note = chemically synthesized
  source 1..20: mol_type = other DNA
aagaaacaaactagggaagt

SEQ ID NO: 10770 - DNA, 20 bp, synthetic construct
  misc_feature 1..20: note = chemically synthesized
  source 1..20: mol_type = other DNA
agaaacaaactagggaagta

SEQ ID NO: 10771 - DNA, 20 bp, synthetic construct
  misc_feature 1..20: note = chemically synthesized
  source 1..20: mol_type = other DNA
gaaacaaactagggaagtaa

SEQ ID NO: 10772 - DNA, 20 bp, synthetic construct
  misc_feature 1..20: note = chemically synthesized
  source 1..20: mol_type = other DNA
aaacaaactagggaagtaag

SEQ ID NO: 10773 - DNA, 20 bp, synthetic construct
  misc_feature 1..20: note = chemically synthesized
  source 1..20: mol_type = other DNA
tagggaagtaaggggaaaac

SEQ ID NO: 10774 - DNA, 20 bp, synthetic construct
  misc_feature 1..20: note = chemically synthesized
  source 1..20: mol_type = other DNA
agggaagtaaggggaaaact

SEQ ID NO: 10775 - DNA, 20 bp, synthetic construct
  misc_feature 1..20: note = chemically synthesized
  source 1..20: mol_type = other DNA
actgtgttttttaatccatt

SEQ ID NO: 10776 - DNA, 20 bp, synthetic construct
  misc_feature 1..20: note = chemically synthesized
  source 1..20: mol_type = other DNA
gtgttttttaatccatttag

SEQ ID NO: 10777 - DNA, 20 bp, synthetic construct
  misc_feature 1..20: note = chemically synthesized
  source 1..20: mol_type = other DNA
tttttaatccatttagtagt

SEQ ID NO: 10778 - DNA, 20 bp, synthetic construct
  misc_feature 1..20: note = chemically synthesized
  source 1..20: mol_type = other DNA
tcagtgtacttatctgaaca

SEQ ID NO: 10779 - DNA, 20 bp, synthetic construct
  misc_feature 1..20: note = chemically synthesized
  source 1..20: mol_type = other DNA
cagtgtacttatctgaacaa

SEQ ID NO: 10780 - DNA, 20 bp, synthetic construct
  misc_feature 1..20: note = chemically synthesized
  source 1..20: mol_type = other DNA
gtgtacttatctgaacaaag

SEQ ID NO: 10781 - DNA, 20 bp, synthetic construct
  misc_feature 1..20: note = chemically synthesized
  source 1..20: mol_type = other DNA
tcctctgaatcattgaacaa

SEQ ID NO: 10782 - DNA, 20 bp, synthetic construct
  misc_feature 1..20: note = chemically synthesized
  source 1..20: mol_type = other DNA
acatatctacaaaattatgc

SEQ ID NO: 10783 - DNA, 20 bp, synthetic construct
  misc_feature 1..20: note = chemically synthesized
  source 1..20: mol_type = other DNA
aattatgccagaacatctaa

SEQ ID NO: 10784 - DNA, 20 bp, synthetic construct
  misc_feature 1..20: note = chemically synthesized
  source 1..20: mol_type = other DNA
gccagaacatctaatagtgt

SEQ ID NO: 10785 - DNA, 20 bp, synthetic construct
  misc_feature 1..20: note = chemically synthesized
  source 1..20: mol_type = other DNA
ccagaacatctaatagtgtt

SEQ ID NO: 10786 - DNA, 20 bp, synthetic construct
  misc_feature 1..20: note = chemically synthesized
  source 1..20: mol_type = other DNA
cagaacatctaatagtgttg

SEQ ID NO: 10787 - DNA, 20 bp, synthetic construct
  misc_feature 1..20: note = chemically synthesized
  source 1..20: mol_type = other DNA
agaacatctaatagtgttgg

SEQ ID NO: 10788 - DNA, 20 bp, synthetic construct
  misc_feature 1..20: note = chemically synthesized
  source 1..20: mol_type = other DNA
aacatctaatagtgttgggg

SEQ ID NO: 10789 - DNA, 20 bp, synthetic construct
  misc_feature 1..20: note = chemically synthesized
  source 1..20: mol_type = other DNA
atctaatagtgttgggggag

SEQ ID NO: 10790 - DNA, 20 bp, synthetic construct
  misc_feature 1..20: note = chemically synthesized
  source 1..20: mol_type = other DNA
agaagtgtgctgctctgttc

SEQ ID NO: 10791 - DNA, 20 bp, synthetic construct
  misc_feature 1..20: note = chemically synthesized
  source 1..20: mol_type = other DNA
gtgtgctgctctgttcaagc

SEQ ID NO: 10792 - DNA, 20 bp, synthetic construct
  misc_feature 1..20: note = chemically synthesized
  source 1..20: mol_type = other DNA
gtgctgctctgttcaagcaa

SEQ ID NO: 10793 - DNA, 20 bp, synthetic construct
  misc_feature 1..20: note = chemically synthesized
  source 1..20: mol_type = other DNA
tgctgctctgttcaagcaag

SEQ ID NO: 10794 - DNA, 20 bp, synthetic construct
  misc_feature 1..20: note = chemically synthesized
  source 1..20: mol_type = other DNA
gctctgttcaagcaagagga

SEQ ID NO: 10795 - DNA, 20 bp, synthetic construct
  misc_feature 1..20: note = chemically synthesized
  source 1..20: mol_type = other DNA
ctctgttcaagcaagaggat

SEQ ID NO: 10796 - DNA, 20 bp, synthetic construct
  misc_feature 1..20: note = chemically synthesized
  source 1..20: mol_type = other DNA
ctgttcaagcaagaggatag

SEQ ID NO: 10797 - DNA, 20 bp, synthetic construct
  misc_feature 1..20: note = chemically synthesized
  source 1..20: mol_type = other DNA
caagaggataggagattccg

SEQ ID NO: 10798 - DNA, 20 bp, synthetic construct
  misc_feature 1..20: note = chemically synthesized
  source 1..20: mol_type = other DNA
ggagattccgtggcccgtgc

SEQ ID NO: 10799 - DNA, 20 bp, synthetic construct
  misc_feature 1..20: note = chemically synthesized
  source 1..20: mol_type = other DNA
gagattccgtggcccgtgct

SEQ ID NO: 10800 - DNA, 20 bp, synthetic construct
  misc_feature 1..20: note = chemically synthesized
  source 1..20: mol_type = other DNA
ccgtggcccgtgctgggcat

SEQ ID NO: 10801 - DNA, 20 bp, synthetic construct
  misc_feature 1..20: note = chemically synthesized
  source 1..20: mol_type = other DNA
cgtggcccgtgctgggcatt

SEQ ID NO: 10802 - DNA, 20 bp, synthetic construct
  misc_feature 1..20: note = chemically synthesized
  source 1..20: mol_type = other DNA
ggcattaggtcatttgtgtc

SEQ ID NO: 10803 - DNA, 20 bp, synthetic construct
  misc_feature 1..20: note = chemically synthesized
  source 1..20: mol_type = other DNA
taggtcatttgtgtctggca

SEQ ID NO: 10804 - DNA, 20 bp, synthetic construct
  misc_feature 1..20: note = chemically synthesized
  source 1..20: mol_type = other DNA
aggtcatttgtgtctggcac

SEQ ID NO: 10805 - DNA, 20 bp, synthetic construct
  misc_feature 1..20: note = chemically synthesized
  source 1..20: mol_type = other DNA
tctggcacaggcttgatcta

SEQ ID NO: 10806 - DNA, 20 bp, synthetic construct
  misc_feature 1..20: note = chemically synthesized
  source 1..20: mol_type = other DNA
aacttgtctttatatctaat

SEQ ID NO: 10807 - DNA, 20 bp, synthetic construct
  misc_feature 1..20: note = chemically synthesized
  source 1..20: mol_type = other DNA
acttgtctttatatctaatc

SEQ ID NO: 10808 - DNA, 20 bp, synthetic construct
  misc_feature 1..20: note = chemically synthesized
  source 1..20: mol_type = other DNA
tctttatatctaatcaggca

SEQ ID NO: 10809 - DNA, 20 bp, synthetic construct
  misc_feature 1..20: note = chemically synthesized
  source 1..20: mol_type = other DNA
tcttcactgacaatattcca

SEQ ID NO: 10810 - DNA, 20 bp, synthetic construct
  misc_feature 1..20: note = chemically synthesized
  source 1..20: mol_type = other DNA
cttcactgacaatattccac

SEQ ID NO: 10811 - DNA, 20 bp, synthetic construct
  misc_feature 1..20: note = chemically synthesized
  source 1..20: mol_type = other DNA
acgtctcatgcgtctcaaac

SEQ ID NO: 10812 - DNA, 20 bp, synthetic construct
  misc_feature 1..20: note = chemically synthesized
  source 1..20: mol_type = other DNA
gcgtctcaaacaagcaattt

SEQ ID NO: 10813 - DNA, 20 bp, synthetic construct
  misc_feature 1..20: note = chemically synthesized
  source 1..20: mol_type = other DNA
cgtctcaaacaagcaatttc

SEQ ID NO: 10814 - DNA, 20 bp, synthetic construct
  misc_feature 1..20: note = chemically synthesized
  source 1..20: mol_type = other DNA
caaacaagcaatttcaggaa

SEQ ID NO: 10815 - DNA, 20 bp, synthetic construct
  misc_feature 1..20: note = chemically synthesized
  source 1..20: mol_type = other DNA
caagcaatttcaggaataga

SEQ ID NO: 10816 - DNA, 20 bp, synthetic construct
  misc_feature 1..20: note = chemically synthesized
  source 1..20: mol_type = other DNA
aagcaatttcaggaatagac

SEQ ID NO: 10817 - DNA, 20 bp, synthetic construct
  misc_feature 1..20: note = chemically synthesized
  source 1..20: mol_type = other DNA
agcaatttcaggaatagaca

SEQ ID NO: 10818 - DNA, 20 bp, synthetic construct
  misc_feature 1..20: note = chemically synthesized
  source 1..20: mol_type = other DNA
tagacagggcacacttccac

SEQ ID NO: 10819 - DNA, 20 bp, synthetic construct
  misc_feature 1..20: note = chemically synthesized
  source 1..20: mol_type = other DNA
acagggcacacttccaccgg

SEQ ID NO: 10820 - DNA, 20 bp, synthetic construct
  misc_feature 1..20: note = chemically synthesized
  source 1..20: mol_type = other DNA
agggcacacttccaccggca

SEQ ID NO: 10821 - DNA, 20 bp, synthetic construct
  misc_feature 1..20: note = chemically synthesized
  source 1..20: mol_type = other DNA
ggcacacttccaccggcaga

SEQ ID NO: 10822 - DNA, 20 bp, synthetic construct
  misc_feature 1..20: note = chemically synthesized
  source 1..20: mol_type = other DNA
acacttccaccggcagagag

SEQ ID NO: 10823 - DNA, 20 bp, synthetic construct
  misc_feature 1..20: note = chemically synthesized
  source 1..20: mol_type = other DNA
tccaccggcagagagaagaa

SEQ ID NO: 10824 - DNA, 20 bp, synthetic construct
  misc_feature 1..20: note = chemically synthesized
  source 1..20: mol_type = other DNA
acagtttattttatattctt

SEQ ID NO: 10825 - DNA, 20 bp, synthetic construct
  misc_feature 1..20: note = chemically synthesized
  source 1..20: mol_type = other DNA
cagtttattttatattctta

SEQ ID NO: 10826 - DNA, 20 bp, synthetic construct
  misc_feature 1..20: note = chemically synthesized
  source 1..20: mol_type = other DNA
aggcttactgtcctcatact

SEQ ID NO: 10827 - DNA, 20 bp, synthetic construct
  misc_feature 1..20: note = chemically synthesized
  source 1..20: mol_type = other DNA
gcttactgtcctcatactta

SEQ ID NO: 10828 - DNA, 20 bp, synthetic construct
  misc_feature 1..20: note = chemically synthesized
  source 1..20: mol_type = other DNA
cttactgtcctcatacttag

SEQ ID NO: 10829 - DNA, 20 bp, synthetic construct
  misc_feature 1..20: note = chemically synthesized
  source 1..20: mol_type = other DNA
tgtcctcatacttagaggtt

SEQ ID NO: 10830 - DNA, 20 bp, synthetic construct
  misc_feature 1..20: note = chemically synthesized
  source 1..20: mol_type = other DNA
gtcctcatacttagaggttc

SEQ ID NO: 10831 - DNA, 20 bp, synthetic construct
  misc_feature 1..20: note = chemically synthesized
  source 1..20: mol_type = other DNA
tacttagaggttcaggatgc

SEQ ID NO: 10832 - DNA, 20 bp, synthetic construct
  misc_feature 1..20: note = chemically synthesized
  source 1..20: mol_type = other DNA
ctggtttgtgtgttacccct

SEQ ID NO: 10833 - DNA, 20 bp, synthetic construct
  misc_feature 1..20: note = chemically synthesized
  source 1..20: mol_type = other DNA
cccctgagataaatccttac

SEQ ID NO: 10834 - DNA, 20 bp, synthetic construct
  misc_feature 1..20: note = chemically synthesized
  source 1..20: mol_type = other DNA
ataaatccttacaagaaata

SEQ ID NO: 10835 - DNA, 20 bp, synthetic construct
  misc_feature 1..20: note = chemically synthesized
  source 1..20: mol_type = other DNA
tccttacaagaaataaagtt

SEQ ID NO: 10836 - DNA, 20 bp, synthetic construct
  misc_feature 1..20: note = chemically synthesized
  source 1..20: mol_type = other DNA
ccttacaagaaataaagttt

SEQ ID NO: 10837 - DNA, 20 bp, synthetic construct
  misc_feature 1..20: note = chemically synthesized
  source 1..20: mol_type = other DNA
atcacccccatgtgtatttc

SEQ ID NO: 10838 - DNA, 20 bp, synthetic construct
  misc_feature 1..20: note = chemically synthesized
  source 1..20: mol_type = other DNA
tcacccccatgtgtatttca

SEQ ID NO: 10839 - DNA, 20 bp, synthetic construct
  misc_feature 1..20: note = chemically synthesized
  source 1..20: mol_type = other DNA
acccccatgtgtatttcaag

SEQ ID NO: 10840 - DNA, 20 bp, synthetic construct
  misc_feature 1..20: note = chemically synthesized
  source 1..20: mol_type = other DNA
caaggagactctaaatttca

SEQ ID NO: 10841 - DNA, 20 bp, synthetic construct
  misc_feature 1..20: note = chemically synthesized
  source 1..20: mol_type = other DNA
aggagactctaaatttcaaa

SEQ ID NO: 10842 - DNA, 20 bp, synthetic construct
  misc_feature 1..20: note = chemically synthesized
  source 1..20: mol_type = other DNA
gagttaaacccaatatatta

SEQ ID NO: 10843 - DNA, 20 bp, synthetic construct
  misc_feature 1..20: note = chemically synthesized
  source 1..20: mol_type = other DNA
taaagctgaatttctgatat

SEQ ID NO: 10844 - DNA, 20 bp, synthetic construct
  misc_feature 1..20: note = chemically synthesized
  source 1..20: mol_type = other DNA
aagctgaatttctgatatta

SEQ ID NO: 10845 - DNA, 20 bp, synthetic construct
  misc_feature 1..20: note = chemically synthesized
  source 1..20: mol_type = other DNA
atattagagacacaatattt

SEQ ID NO: 10846 - DNA, 20 bp, synthetic construct
  misc_feature 1..20: note = chemically synthesized
  source 1..20: mol_type = other DNA
atattttagtctacttgata

SEQ ID NO: 10847 - DNA, 20 bp, synthetic construct
  misc_feature 1..20: note = chemically synthesized
  source 1..20: mol_type = other DNA
ttagtctacttgatatagtt

SEQ ID NO: 10848 - DNA, 20 bp, synthetic construct
  misc_feature 1..20: note = chemically synthesized
  source 1..20: mol_type = other DNA
agtctacttgatatagttga

SEQ ID NO: 10849 - DNA, 20 bp, synthetic construct
  misc_feature 1..20: note = chemically synthesized
  source 1..20: mol_type = other DNA
gtctacttgatatagttgag

SEQ ID NO: 10850 - DNA, 20 bp, synthetic construct
  misc_feature 1..20: note = chemically synthesized
  source 1..20: mol_type = other DNA
tacttgatatagttgagagg

SEQ ID NO: 10851 - DNA, 20 bp, synthetic construct
  misc_feature 1..20: note = chemically synthesized
  source 1..20: mol_type = other DNA
aggcagttacctgttttact

SEQ ID NO: 10852 - DNA, 20 bp, synthetic construct
  misc_feature 1..20: note = chemically synthesized
  source 1..20: mol_type = other DNA
ggcagttacctgttttactt

SEQ ID NO: 10853 - DNA, 20 bp, synthetic construct
  misc_feature 1..20: note = chemically synthesized
  source 1..20: mol_type = other DNA
acctgttttacttaggaaca

SEQ ID NO: 10854 - DNA, 20 bp, synthetic construct
  misc_feature 1..20: note = chemically synthesized
  source 1..20: mol_type = other DNA
cctgttttacttaggaacat

SEQ ID NO: 10855 - DNA, 20 bp, synthetic construct
  misc_feature 1..20: note = chemically synthesized
  source 1..20: mol_type = other DNA
ctgttttacttaggaacatg

SEQ ID NO: 10856 - DNA, 20 bp, synthetic construct
  misc_feature 1..20: note = chemically synthesized
  source 1..20: mol_type = other DNA
tttacttaggaacatgggga

SEQ ID NO: 10857 - DNA, 20 bp, synthetic construct
  misc_feature 1..20: note = chemically synthesized
  source 1..20: mol_type = other DNA
aggaacatggggaaagtttg

SEQ ID NO: 10858 - DNA, 20 bp, synthetic construct
  misc_feature 1..20: note = chemically synthesized
  source 1..20: mol_type = other DNA
ggaaagtttgtagtgacaaa

SEQ ID NO: 10859 - DNA, 20 bp, synthetic construct
  misc_feature 1..20: note = chemically synthesized
  source 1..20: mol_type = other DNA
tttgtagtgacaaacagttt

SEQ ID NO: 10860 - DNA, 20 bp, synthetic construct
  misc_feature 1..20: note = chemically synthesized
  source 1..20: mol_type = other DNA
ttgtagtgacaaacagtttg

SEQ ID NO: 10861 - DNA, 20 bp, synthetic construct
  misc_feature 1..20: note = chemically synthesized
  source 1..20: mol_type = other DNA
aaacagtttgaggcaaaacc

SEQ ID NO: 10862 - DNA, 20 bp, synthetic construct
  misc_feature 1..20: note = chemically synthesized
  source 1..20: mol_type = other DNA
gcaaaaccaagattatcttt

SEQ ID NO: 10863 - DNA, 20 bp, synthetic construct
  misc_feature 1..20: note = chemically synthesized
  source 1..20: mol_type = other DNA
aaaaccaagattatctttaa

SEQ ID NO: 10864 - DNA, 20 bp, synthetic construct
  misc_feature 1..20: note = chemically synthesized
  source 1..20: mol_type = other DNA
accaagattatctttaagag

SEQ ID NO: 10865 - DNA, 20 bp, synthetic construct
  misc_feature 1..20: note = chemically synthesized
  source 1..20: mol_type = other DNA
caagattatctttaagagca

SEQ ID NO: 10866 - DNA, 20 bp, synthetic construct
  misc_feature 1..20: note = chemically synthesized
  source 1..20: mol_type = other DNA
gagcagagatcgatgatatg

SEQ ID NO: 10867 - DNA, 20 bp, synthetic construct
  misc_feature 1..20: note = chemically synthesized
  source 1..20: mol_type = other DNA
agatcgatgatatgaagaaa

SEQ ID NO: 10868 - DNA, 20 bp, synthetic construct
  misc_feature 1..20: note = chemically synthesized
  source 1..20: mol_type = other DNA
tcgatgatatgaagaaaaag

SEQ ID NO: 10869 - DNA, 20 bp, synthetic construct
  misc_feature 1..20: note = chemically synthesized
  source 1..20: mol_type = other DNA
atgatatgaagaaaaagaag

SEQ ID NO: 10870 - DNA, 20 bp, synthetic construct
  misc_feature 1..20: note = chemically synthesized
  source 1..20: mol_type = other DNA
gtggcaactttgactatatg

SEQ ID NO: 10871 - DNA, 20 bp, synthetic construct
  misc_feature 1..20: note = chemically synthesized
  source 1..20: mol_type = other DNA
tggcaactttgactatatgc

SEQ ID NO: 10872 - DNA, 20 bp, synthetic construct
  misc_feature 1..20: note = chemically synthesized
  source 1..20: mol_type = other DNA
gcaggaaacacatttatatt

SEQ ID NO: 10873 - DNA, 20 bp, synthetic construct
  misc_feature 1..20: note = chemically synthesized
  source 1..20: mol_type = other DNA
aacacatttatattgagttg

SEQ ID NO: 10874 - DNA, 20 bp, synthetic construct
  misc_feature 1..20: note = chemically synthesized
  source 1..20: mol_type = other DNA
acacatttatattgagttgt

SEQ ID NO: 10875 - DNA, 20 bp, synthetic construct
  misc_feature 1..20: note = chemically synthesized
  source 1..20: mol_type = other DNA
cacatttatattgagttgtg

SEQ ID NO: 10876 - DNA, 20 bp, synthetic construct
  misc_feature 1..20: note = chemically synthesized
  source 1..20: mol_type = other DNA
ttatattgagttgtggggac

SEQ ID NO: 10877 - DNA, 20 bp, synthetic construct
  misc_feature 1..20: note = chemically synthesized
  source 1..20: mol_type = other DNA
tgagttgtggggactggcct

SEQ ID NO: 10878 - DNA, 20 bp, synthetic construct
  misc_feature 1..20: note = chemically synthesized
  source 1..20: mol_type = other DNA
agttgtggggactggcctca

SEQ ID NO: 10879 - DNA, 20 bp, synthetic construct
  misc_feature 1..20: note = chemically synthesized
  source 1..20: mol_type = other DNA
gttgtggggactggcctcag

SEQ ID NO: 10880 - DNA, 20 bp, synthetic construct
  misc_feature 1..20: note = chemically synthesized
  source 1..20: mol_type = other DNA
actggcctcagaggaaactt

SEQ ID NO: 10881 - DNA, 20 bp, synthetic construct
  misc_feature 1..20: note = chemically synthesized
  source 1..20: mol_type = other DNA
ctggcctcagaggaaacttc

SEQ ID NO: 10882 - DNA, 20 bp, synthetic construct
  misc_feature 1..20: note = chemically synthesized
  source 1..20: mol_type = other DNA
cttcaggtcatgtcctttaa

SEQ ID NO: 10883 - DNA, 20 bp, synthetic construct
  misc_feature 1..20: note = chemically synthesized
  source 1..20: mol_type = other DNA
gccctaaaactcattcccaa

SEQ ID NO: 10884 - DNA, 20 bp, synthetic construct
  misc_feature 1..20: note = chemically synthesized
  source 1..20: mol_type = other DNA
attgccatacctcatatcct

SEQ ID NO: 10885 - DNA, 20 bp, synthetic construct
  misc_feature 1..20: note = chemically synthesized
  source 1..20: mol_type = other DNA
ttgccatacctcatatcctt

SEQ ID NO: 10886 - DNA, 20 bp, synthetic construct
  misc_feature 1..20: note = chemically synthesized
  source 1..20: mol_type = other DNA
acatctaaaaccctgcgtac

SEQ ID NO: 10887 - DNA, 20 bp, synthetic construct
  misc_feature 1..20: note = chemically synthesized
  source 1..20: mol_type = other DNA
aaaccctgcgtaccagtgaa

SEQ ID NO: 10888 - DNA, 20 bp, synthetic construct
  misc_feature 1..20: note = chemically synthesized
  source 1..20: mol_type = other DNA
cagctgccccatctttccat

SEQ ID NO: 10889 - DNA, 20 bp, synthetic construct
  misc_feature 1..20: note = chemically synthesized
  source 1..20: mol_type = other DNA
ccatctttccatcagccaac

SEQ ID NO: 10890 - DNA, 20 bp, synthetic construct
  misc_feature 1..20: note = chemically synthesized
  source 1..20: mol_type = other DNA
catctttccatcagccaacc

SEQ ID NO: 10891 - DNA, 20 bp, synthetic construct
  misc_feature 1..20: note = chemically synthesized
  source 1..20: mol_type = other DNA
ccatcagccaaccaggaatt

SEQ ID NO: 10892 - DNA, 20 bp, synthetic construct
  misc_feature 1..20: note = chemically synthesized
  source 1..20: mol_type = other DNA
tcagccaaccaggaattcag

SEQ ID NO: 10893 - DNA, 20 bp, synthetic construct
  misc_feature 1..20: note = chemically synthesized
  source 1..20: mol_type = other DNA
cacttttctctcacccgctc

SEQ ID NO: 10894 - DNA, 20 bp, synthetic construct
  misc_feature 1..20: note = chemically synthesized
  source 1..20: mol_type = other DNA
acttttctctcacccgctcc

SEQ ID NO: 10895 - DNA, 20 bp, synthetic construct
  misc_feature 1..20: note = chemically synthesized
  source 1..20: mol_type = other DNA
tctctcacccgctccaggaa

SEQ ID NO: 10896 - DNA, 20 bp, synthetic construct
  misc_feature 1..20: note = chemically synthesized
  source 1..20: mol_type = other DNA
gctccaggaaaagtgacctg

SEQ ID NO: 10897 - DNA, 20 bp, synthetic construct
  misc_feature 1..20: note = chemically synthesized
  source 1..20: mol_type = other DNA
gtgacctgcagtcactttcc

SEQ ID NO: 10898 - DNA, 20 bp, synthetic construct
  misc_feature 1..20: note = chemically synthesized
  source 1..20: mol_type = other DNA
acctgcagtcactttcctgg

SEQ ID NO: 10899 - DNA, 20 bp, synthetic construct
  misc_feature 1..20: note = chemically synthesized
  source 1..20: mol_type = other DNA
tattgattctttcttgtttg

SEQ ID NO: 10900 - DNA, 20 bp, synthetic construct
  misc_feature 1..20: note = chemically synthesized
  source 1..20: mol_type = other DNA
attgcttctactgtgatcta

SEQ ID NO: 10901 - DNA, 20 bp, synthetic construct
  misc_feature 1..20: note = chemically synthesized
  source 1..20: mol_type = other DNA
gactcttatatcatcaatac

SEQ ID NO: 10902 - DNA, 20 bp, synthetic construct
  misc_feature 1..20: note = chemically synthesized
  source 1..20: mol_type = other DNA
actcttatatcatcaatacc

SEQ ID NO: 10903 - DNA, 20 bp, synthetic construct
  misc_feature 1..20: note = chemically synthesized
  source 1..20: mol_type = other DNA
tcaataccaggttatcattg

SEQ ID NO: 10904 - DNA, 20 bp, synthetic construct
  misc_feature 1..20: note = chemically synthesized
  source 1..20: mol_type = other DNA
ttaattcaacaaatacatat

SEQ ID NO: 10905 - DNA, 20 bp, synthetic construct
  misc_feature 1..20: note = chemically synthesized
  source 1..20: mol_type = other DNA
gattccatatgtcatccatg

SEQ ID NO: 10906 - DNA, 20 bp, synthetic construct
  misc_feature 1..20: note = chemically synthesized
  source 1..20: mol_type = other DNA
catccatttttcttaattct

SEQ ID NO: 10907 - DNA, 20 bp, synthetic construct
  misc_feature 1..20: note = chemically synthesized
  source 1..20: mol_type = other DNA
tctgagaatcttacatgaac

SEQ ID NO: 10908 - DNA, 20 bp, synthetic construct
  misc_feature 1..20: note = chemically synthesized
  source 1..20: mol_type = other DNA
agaatcttacatgaactaga

SEQ ID NO: 10909 - DNA, 20 bp, synthetic construct
  misc_feature 1..20: note = chemically synthesized
  source 1..20: mol_type = other DNA
tcttacatgaactagacaga

SEQ ID NO: 10910 - DNA, 20 bp, synthetic construct
  misc_feature 1..20: note = chemically synthesized
  source 1..20: mol_type = other DNA
aactagacagacagattctc

SEQ ID NO: 10911 - DNA, 20 bp, synthetic construct
  misc_feature 1..20: note = chemically synthesized
  source 1..20: mol_type = other DNA
cagacagattctctggctaa

SEQ ID NO: 10912 - DNA, 20 bp, synthetic construct
  misc_feature 1..20: note = chemically synthesized
  source 1..20: mol_type = other DNA
ggctaatggtgccctcacta

SEQ ID NO: 10913 - DNA, 20 bp, synthetic construct
  misc_feature 1..20: note = chemically synthesized
  source 1..20: mol_type = other DNA
aatggtgccctcactatagt

SEQ ID NO: 10914 - DNA, 20 bp, synthetic construct
  misc_feature 1..20: note = chemically synthesized
  source 1..20: mol_type = other DNA
ggtgccctcactatagtgag

SEQ ID NO: 10915 - DNA, 20 bp, synthetic construct
  misc_feature 1..20: note = chemically synthesized
  source 1..20: mol_type = other DNA
tgccctcactatagtgagca

SEQ ID NO: 10916 - DNA, 20 bp, synthetic construct
  misc_feature 1..20: note = chemically synthesized
  source 1..20: mol_type = other DNA
gccctcactatagtgagcag

SEQ ID NO: 10917 - DNA, 20 bp, synthetic construct
  misc_feature 1..20: note = chemically synthesized
  source 1..20: mol_type = other DNA
cctcactatagtgagcagag

SEQ ID NO: 10918 - DNA, 20 bp, synthetic construct
  misc_feature 1..20: note = chemically synthesized
  source 1..20: mol_type = other DNA
ctatagtgagcagaggagac

SEQ ID NO: 10919 - DNA, 20 bp, synthetic construct
  misc_feature 1..20: note = chemically synthesized
  source 1..20: mol_type = other DNA
gagaccagcatacatactaa

SEQ ID NO: 10920 - DNA, 20 bp, synthetic construct
  misc_feature 1..20: note = chemically synthesized
  source 1..20: mol_type = other DNA
actaaaagaaatgaattaat

SEQ ID NO: 10921 - DNA, 20 bp, synthetic construct
  misc_feature 1..20: note = chemically synthesized
  source 1..20: mol_type = other DNA
taaaagaaatgaattaataa

SEQ ID NO: 10922 - DNA, 20 bp, synthetic construct
  misc_feature 1..20: note = chemically synthesized
  source 1..20: mol_type = other DNA
aatgaattaataagagattt

SEQ ID NO: 10923 - DNA, 20 bp, synthetic construct
  misc_feature 1..20: note = chemically synthesized
  source 1..20: mol_type = other DNA
aattaataagagatttcaga

SEQ ID NO: 10924 - DNA, 20 bp, synthetic construct
  misc_feature 1..20: note = chemically synthesized
  source 1..20: mol_type = other DNA
agatggtattatatgacttg

SEQ ID NO: 10925 - DNA, 20 bp, synthetic construct
  misc_feature 1..20: note = chemically synthesized
  source 1..20: mol_type = other DNA
atattgtacctacaaccatc

SEQ ID NO: 10926 - DNA, 20 bp, synthetic construct
  misc_feature 1..20: note = chemically synthesized
  source 1..20: mol_type = other DNA
cctacaaccatctggtcttt

SEQ ID NO: 10927 - DNA, 20 bp, synthetic construct
  misc_feature 1..20: note = chemically synthesized
  source 1..20: mol_type = other DNA
gtcttttagaaacctgacaa

SEQ ID NO: 10928 - DNA, 20 bp, synthetic construct
  misc_feature 1..20: note = chemically synthesized
  source 1..20: mol_type = other DNA
tttagaaacctgacaaaagc

SEQ ID NO: 10929 - DNA, 20 bp, synthetic construct
  misc_feature 1..20: note = chemically synthesized
  source 1..20: mol_type = other DNA
aacctgacaaaagcaagcaa

SEQ ID NO: 10930 - DNA, 20 bp, synthetic construct
  misc_feature 1..20: note = chemically synthesized
  source 1..20: mol_type = other DNA
acctgacaaaagcaagcaat

SEQ ID NO: 10931 - DNA, 20 bp, synthetic construct
  misc_feature 1..20: note = chemically synthesized
  source 1..20: mol_type = other DNA
cctgacaaaagcaagcaatg

SEQ ID NO: 10932 - DNA, 20 bp, synthetic construct
  misc_feature 1..20: note = chemically synthesized
  source 1..20: mol_type = other DNA
acaaaagcaagcaatgggga

SEQ ID NO: 10933 - DNA, 20 bp, synthetic construct
  misc_feature 1..20: note = chemically synthesized
  source 1..20: mol_type = other DNA
caaaagcaagcaatggggaa

SEQ ID NO: 10934 - DNA, 20 bp, synthetic construct
  misc_feature 1..20: note = chemically synthesized
  source 1..20: mol_type = other DNA
attttcaatttaataaatga

SEQ ID NO: 10935 - DNA, 20 bp, synthetic construct
  misc_feature 1..20: note = chemically synthesized
  source 1..20: mol_type = other DNA
ttttcaatttaataaatgat

SEQ ID NO: 10936 - DNA, 20 bp, synthetic construct
  misc_feature 1..20: note = chemically synthesized
  source 1..20: mol_type = other DNA
tttcaatttaataaatgatg

SEQ ID NO: 10937 - DNA, 20 bp, synthetic construct
  misc_feature 1..20: note = chemically synthesized
  source 1..20: mol_type = other DNA
ttcaatttaataaatgatgg

SEQ ID NO: 10938 - DNA, 20 bp, synthetic construct
  misc_feature 1..20: note = chemically synthesized
  source 1..20: mol_type = other DNA
caatttaataaatgatgggg

SEQ ID NO: 10939 - DNA, 20 bp, synthetic construct
  misc_feature 1..20: note = chemically synthesized
  source 1..20: mol_type = other DNA
aataaatgatgggggagaac

SEQ ID NO: 10940 - DNA, 20 bp, synthetic construct
  misc_feature 1..20: note = chemically synthesized
  source 1..20: mol_type = other DNA
aatgatgggggagaactggc

SEQ ID NO: 10941 - DNA, 20 bp, synthetic construct
  misc_feature 1..20: note = chemically synthesized
  source 1..20: mol_type = other DNA
catatgctgaaaaatgaaac

SEQ ID NO: 10942 - DNA, 20 bp, synthetic construct
  misc_feature 1..20: note = chemically synthesized
  source 1..20: mol_type = other DNA
accttatccaaaattaactc

SEQ ID NO: 10943 - DNA, 20 bp, synthetic construct
  misc_feature 1..20: note = chemically synthesized
  source 1..20: mol_type = other DNA
tatccaaaattaactccaga

SEQ ID NO: 10944 - DNA, 20 bp, synthetic construct
  misc_feature 1..20: note = chemically synthesized
  source 1..20: mol_type = other DNA
aaaattaactccagatggat

SEQ ID NO: 10945 - DNA, 20 bp, synthetic construct
  misc_feature 1..20: note = chemically synthesized
  source 1..20: mol_type = other DNA
aattaactccagatggatta

SEQ ID NO: 10946 - DNA, 20 bp, synthetic construct
  misc_feature 1..20: note = chemically synthesized
  source 1..20: mol_type = other DNA
gaaaaaccccaaactataaa

SEQ ID NO: 10947 - DNA, 20 bp, synthetic construct
  misc_feature 1..20: note = chemically synthesized
  source 1..20: mol_type = other DNA
accccaaactataaaaagcc

SEQ ID NO: 10948 - DNA, 20 bp, synthetic construct
  misc_feature 1..20: note = chemically synthesized
  source 1..20: mol_type = other DNA
aaaaagcctagaaaaaaatc

SEQ ID NO: 10949 - DNA, 20 bp, synthetic construct
  misc_feature 1..20: note = chemically synthesized
  source 1..20: mol_type = other DNA
aaaagcctagaaaaaaatca

SEQ ID NO: 10950 - DNA, 20 bp, synthetic construct
  misc_feature 1..20: note = chemically synthesized
  source 1..20: mol_type = other DNA
tactattcatgatataaaca

SEQ ID NO: 10951 - DNA, 20 bp, synthetic construct
  misc_feature 1..20: note = chemically synthesized
  source 1..20: mol_type = other DNA
actattcatgatataaacac

SEQ ID NO: 10952 - DNA, 20 bp, synthetic construct
  misc_feature 1..20: note = chemically synthesized
  source 1..20: mol_type = other DNA
tcatgatataaacacgggca

SEQ ID NO: 10953 - DNA, 20 bp, synthetic construct
  misc_feature 1..20: note = chemically synthesized
  source 1..20: mol_type = other DNA
gggcacagatttcatgatga

SEQ ID NO: 10954 - DNA, 20 bp, synthetic construct
  misc_feature 1..20: note = chemically synthesized
  source 1..20: mol_type = other DNA
tttcatgatgaaagcgtgaa

SEQ ID NO: 10955 - DNA, 20 bp, synthetic construct
  misc_feature 1..20: note = chemically synthesized
  source 1..20: mol_type = other DNA
gaaagcgtgaaaagcaattg

SEQ ID NO: 10956 - DNA, 20 bp, synthetic construct
  misc_feature 1..20: note = chemically synthesized
  source 1..20: mol_type = other DNA
gtgaaaagcaattgcagcaa

SEQ ID NO: 10957 - DNA, 20 bp, synthetic construct
  misc_feature 1..20: note = chemically synthesized
  source 1..20: mol_type = other DNA
caaaagcaaaaattgaccaa

SEQ ID NO: 10958 - DNA, 20 bp, synthetic construct
  misc_feature 1..20: note = chemically synthesized
  source 1..20: mol_type = other DNA
aatggaatctaattaaacta

SEQ ID NO: 10959 - DNA, 20 bp, synthetic construct
  misc_feature 1..20: note = chemically synthesized
  source 1..20: mol_type = other DNA
tggaatctaattaaactaaa

SEQ ID NO: 10960 - DNA, 20 bp, synthetic construct
  misc_feature 1..20: note = chemically synthesized
  source 1..20: mol_type = other DNA
taaactaaagagctcctgct

SEQ ID NO: 10961 - DNA, 20 bp, synthetic construct
  misc_feature 1..20: note = chemically synthesized
  source 1..20: mol_type = other DNA
aaagagctcctgctcagcaa

SEQ ID NO: 10962 - DNA, 20 bp, synthetic construct
  misc_feature 1..20: note = chemically synthesized
  source 1..20: mol_type = other DNA
tcagcaaaagaaactaccat

SEQ ID NO: 10963 - DNA, 20 bp, synthetic construct
  misc_feature 1..20: note = chemically synthesized
  source 1..20: mol_type = other DNA
agcaaaagaaactaccatca

SEQ ID NO: 10964 - DNA, 20 bp, synthetic construct
  misc_feature 1..20: note = chemically synthesized
  source 1..20: mol_type = other DNA
agaaactaccatcagagcga

SEQ ID NO: 10965 - DNA, 20 bp, synthetic construct
  misc_feature 1..20: note = chemically synthesized
  source 1..20: mol_type = other DNA
tcagagcgaaagacaatcta

SEQ ID NO: 10966 - DNA, 20 bp, synthetic construct
  misc_feature 1..20: note = chemically synthesized
  source 1..20: mol_type = other DNA
gcgaaagacaatctacagaa

SEQ ID NO: 10967 - DNA, 20 bp, synthetic construct
  misc_feature 1..20: note = chemically synthesized
  source 1..20: mol_type = other DNA
cgaaagacaatctacagaat

SEQ ID NO: 10968 - DNA, 20 bp, synthetic construct
  misc_feature 1..20: note = chemically synthesized
  source 1..20: mol_type = other DNA
acaatctacagaatgggaaa

SEQ ID NO: 10969 - DNA, 20 bp, synthetic construct
  misc_feature 1..20: note = chemically synthesized
  source 1..20: mol_type = other DNA
tccaatctattcttctgaca

SEQ ID NO: 10970 - DNA, 20 bp, synthetic construct
  misc_feature 1..20: note = chemically synthesized
  source 1..20: mol_type = other DNA
ccaatctattcttctgacaa

SEQ ID NO: 10971 - DNA, 20 bp, synthetic construct
  misc_feature 1..20: note = chemically synthesized
  source 1..20: mol_type = other DNA
tctgacaaaggcctaatatc

SEQ ID NO: 10972 - DNA, 20 bp, synthetic construct
  misc_feature 1..20: note = chemically synthesized
  source 1..20: mol_type = other DNA
tgacaaaggcctaatatcca

SEQ ID NO: 10973 - DNA, 20 bp, synthetic construct
  misc_feature 1..20: note = chemically synthesized
  source 1..20: mol_type = other DNA
gcctaatatccagagtaaac

SEQ ID NO: 10974 - DNA, 20 bp, synthetic construct
  misc_feature 1..20: note = chemically synthesized
  source 1..20: mol_type = other DNA
agaaacttaaacaactttac

SEQ ID NO: 10975 - DNA, 20 bp, synthetic construct
  misc_feature 1..20: note = chemically synthesized
  source 1..20: mol_type = other DNA
aaaaaaacccattaaaacca

SEQ ID NO: 10976 - DNA, 20 bp, synthetic construct
  misc_feature 1..20: note = chemically synthesized
  source 1..20: mol_type = other DNA
gtacgtgtacccctgaattt

SEQ ID NO: 10977 - DNA, 20 bp, synthetic construct
  misc_feature 1..20: note = chemically synthesized
  source 1..20: mol_type = other DNA
tacgtgtacccctgaattta

SEQ ID NO: 10978 - DNA, 20 bp, synthetic construct
  misc_feature 1..20: note = chemically synthesized
  source 1..20: mol_type = other DNA
tacccctgaatttaaggtaa

SEQ ID NO: 10979 - DNA, 20 bp, synthetic construct
  misc_feature 1..20: note = chemically synthesized
  source 1..20: mol_type = other DNA
gtaacagtaaattaaattaa

SEQ ID NO: 10980 - DNA, 20 bp, synthetic construct
  misc_feature 1..20: note = chemically synthesized
  source 1..20: mol_type = other DNA
aaattaaaagaaaaatgcca

SEQ ID NO: 10981 - DNA, 20 bp, synthetic construct
  misc_feature 1..20: note = chemically synthesized
  source 1..20: mol_type = other DNA
gaaaaatgccatggcaatgt

SEQ ID NO: 10982 - DNA, 20 bp, synthetic construct
  misc_feature 1..20: note = chemically synthesized
  source 1..20: mol_type = other DNA
aatgccatggcaatgtcaga

SEQ ID NO: 10983 - DNA, 20 bp, synthetic construct
  misc_feature 1..20: note = chemically synthesized
  source 1..20: mol_type = other DNA
tgtcagaaagttaccctata

SEQ ID NO: 10984 - DNA, 20 bp, synthetic construct
  misc_feature 1..20: note = chemically synthesized
  source 1..20: mol_type = other DNA
gttaccctatatggcctaaa

SEQ ID NO: 10985 - DNA, 20 bp, synthetic construct
  misc_feature 1..20: note = chemically synthesized
  source 1..20: mol_type = other DNA
taccctatatggcctaaaaa

SEQ ID NO: 10986 - DNA, 20 bp, synthetic construct
  misc_feature 1..20: note = chemically synthesized
  source 1..20: mol_type = other DNA
cctatatggcctaaaaagag

SEQ ID NO: 10987 - DNA, 20 bp, synthetic construct
  misc_feature 1..20: note = chemically synthesized
  source 1..20: mol_type = other DNA
ctatatggcctaaaaagaga

SEQ ID NO: 10988 - DNA, 20 bp, synthetic construct
  misc_feature 1..20: note = chemically synthesized
  source 1..20: mol_type = other DNA
aacttgtttaacatatcatc

SEQ ID NO: 10989 - DNA, 20 bp, synthetic construct
  misc_feature 1..20: note = chemically synthesized
  source 1..20: mol_type = other DNA
tcatcaagaaataaccataa

SEQ ID NO: 10990 - DNA, 20 bp, synthetic construct
  misc_feature 1..20: note = chemically synthesized
  source 1..20: mol_type = other DNA
catcaagaaataaccataaa

SEQ ID NO: 10991 - DNA, 20 bp, synthetic construct
  misc_feature 1..20: note = chemically synthesized
  source 1..20: mol_type = other DNA
ataaccataaaaggaacaac

SEQ ID NO: 10992 - DNA, 20 bp, synthetic construct
  misc_feature 1..20: note = chemically synthesized
  source 1..20: mol_type = other DNA
accataaaaggaacaaccag

SEQ ID NO: 10993 - DNA, 20 bp, synthetic construct
  misc_feature 1..20: note = chemically synthesized
  source 1..20: mol_type = other DNA
aaggaacaaccagcggccct

SEQ ID NO: 10994 - DNA, 20 bp, synthetic construct
  misc_feature 1..20: note = chemically synthesized
  source 1..20: mol_type = other DNA
aggaacaaccagcggccctc

SEQ ID NO: 10995 - DNA, 20 bp, synthetic construct
  misc_feature 1..20: note = chemically synthesized
  source 1..20: mol_type = other DNA
ggaacaaccagcggccctcg

SEQ ID NO: 10996 - DNA, 20 bp, synthetic construct
  misc_feature 1..20: note = chemically synthesized
  source 1..20: mol_type = other DNA
tcggggctgctctgcctatg

SEQ ID NO: 10997 - DNA, 20 bp, synthetic construct
  misc_feature 1..20: note = chemically synthesized
  source 1..20: mol_type = other DNA
gggctgctctgcctatgcag

SEQ ID NO: 10998 - DNA, 20 bp, synthetic construct
  misc_feature 1..20: note = chemically synthesized
  source 1..20: mol_type = other DNA
gtttatttctttactctctc

SEQ ID NO: 10999 - DNA, 20 bp, synthetic construct
  misc_feature 1..20: note = chemically synthesized
  source 1..20: mol_type = other DNA
aaaaaaaacaaaaaacaaaa

SEQ ID NO: 11000 - DNA, 20 bp, synthetic construct
  misc_feature 1..20: note = chemically synthesized
  source 1..20: mol_type = other DNA
aaaacaaaaaacaaaaaaga

SEQ ID NO: 11001 - DNA, 20 bp, synthetic construct
  misc_feature 1..20: note = chemically synthesized
  source 1..20: mol_type = other DNA
caaaaaacaaaaaagaaaga

SEQ ID NO: 11002 - DNA, 20 bp, synthetic construct
  misc_feature 1..20: note = chemically synthesized
  source 1..20: mol_type = other DNA
agaaagtgcatattctgaaa

SEQ ID NO: 11003 - DNA, 20 bp, synthetic construct
  misc_feature 1..20: note = chemically synthesized
  source 1..20: mol_type = other DNA
aagtgcatattctgaaacgg

SEQ ID NO: 11004 - DNA, 20 bp, synthetic construct
  misc_feature 1..20: note = chemically synthesized
  source 1..20: mol_type = other DNA
aacggtagtgactgcatttg

SEQ ID NO: 11005 - DNA, 20 bp, synthetic construct
  misc_feature 1..20: note = chemically synthesized
  source 1..20: mol_type = other DNA
ggtagtgactgcatttgaag

SEQ ID NO: 11006 - DNA, 20 bp, synthetic construct
  misc_feature 1..20: note = chemically synthesized
  source 1..20: mol_type = other DNA
gtagtgactgcatttgaagt

SEQ ID NO: 11007 - DNA, 20 bp, synthetic construct
  misc_feature 1..20: note = chemically synthesized
  source 1..20: mol_type = other DNA
gtgggacctttatgatatga

SEQ ID NO: 11008 - DNA, 20 bp, synthetic construct
  misc_feature 1..20: note = chemically synthesized
  source 1..20: mol_type = other DNA
gggacctttatgatatgatg

SEQ ID NO: 11009 - DNA, 20 bp, synthetic construct
  misc_feature 1..20: note = chemically synthesized
  source 1..20: mol_type = other DNA
cctttatgatatgatggagc

SEQ ID NO: 11010 - DNA, 20 bp, synthetic construct
  misc_feature 1..20: note = chemically synthesized
  source 1..20: mol_type = other DNA
ctttatgatatgatggagcc

SEQ ID NO: 11011 - DNA, 20 bp, synthetic construct
  misc_feature 1..20: note = chemically synthesized
  source 1..20: mol_type = other DNA
tatgatatgatggagccagg

SEQ ID NO: 11012 - DNA, 20 bp, synthetic construct
  misc_feature 1..20: note = chemically synthesized
  source 1..20: mol_type = other DNA
tgatatgatggagccaggca

SEQ ID NO: 11013 - DNA, 20 bp, synthetic construct
  misc_feature 1..20: note = chemically synthesized
  source 1..20: mol_type = other DNA
atggagccaggcagagatgt

SEQ ID NO: 11014 - DNA, 20 bp, synthetic construct
  misc_feature 1..20: note = chemically synthesized
  source 1..20: mol_type = other DNA
ggagccaggcagagatgttg

SEQ ID NO: 11015 - DNA, 20 bp, synthetic construct
  misc_feature 1..20: note = chemically synthesized
  source 1..20: mol_type = other DNA
gccaggcagagatgttggag

SEQ ID NO: 11016 - DNA, 20 bp, synthetic construct
  misc_feature 1..20: note = chemically synthesized
  source 1..20: mol_type = other DNA
gatgttggagaagttcctga

SEQ ID NO: 11017 - DNA, 20 bp, synthetic construct
  misc_feature 1..20: note = chemically synthesized
  source 1..20: mol_type = other DNA
gttggagaagttcctgaaag

SEQ ID NO: 11018 - DNA, 20 bp, synthetic construct
  misc_feature 1..20: note = chemically synthesized
  source 1..20: mol_type = other DNA
ttggagaagttcctgaaaga

SEQ ID NO: 11019 - DNA, 20 bp, synthetic construct
  misc_feature 1..20: note = chemically synthesized
  source 1..20: mol_type = other DNA
gagaagttcctgaaagaagg

SEQ ID NO: 11020 - DNA, 20 bp, synthetic construct
  misc_feature 1..20: note = chemically synthesized
  source 1..20: mol_type = other DNA
agaagttcctgaaagaagga

SEQ ID NO: 11021 - DNA, 20 bp, synthetic construct
  misc_feature 1..20: note = chemically synthesized
  source 1..20: mol_type = other DNA
gaagttcctgaaagaaggaa

SEQ ID NO: 11022 - DNA, 20 bp, synthetic construct
  misc_feature 1..20: note = chemically synthesized
  source 1..20: mol_type = other DNA
aagggcatgtgccaaattct

SEQ ID NO: 11023 - DNA, 20 bp, synthetic construct
  misc_feature 1..20: note = chemically synthesized
  source 1..20: mol_type = other DNA
agggcatgtgccaaattctg

SEQ ID NO: 11024 - DNA, 20 bp, synthetic construct
  misc_feature 1..20: note = chemically synthesized
  source 1..20: mol_type = other DNA
atgtgccaaattctgaggct

SEQ ID NO: 11025 - DNA, 20 bp, synthetic construct
  misc_feature 1..20: note = chemically synthesized
  source 1..20: mol_type = other DNA
tgtgccaaattctgaggctg

SEQ ID NO: 11026 - DNA, 20 bp, synthetic construct
  misc_feature 1..20: note = chemically synthesized
  source 1..20: mol_type = other DNA
tgccaaattctgaggctgag

SEQ ID NO: 11027 - DNA, 20 bp, synthetic construct
  misc_feature 1..20: note = chemically synthesized
  source 1..20: mol_type = other DNA
ttctgaggctgaggagaaaa

SEQ ID NO: 11028 - DNA, 20 bp, synthetic construct
  misc_feature 1..20: note = chemically synthesized
  source 1..20: mol_type = other DNA
gaggctgaggagaaaaaaga

SEQ ID NO: 11029 - DNA, 20 bp, synthetic construct
  misc_feature 1..20: note = chemically synthesized
  source 1..20: mol_type = other DNA
ctgaggagaaaaaagaaaga

SEQ ID NO: 11030 - DNA, 20 bp, synthetic construct
  misc_feature 1..20: note = chemically synthesized
  source 1..20: mol_type = other DNA
aaaaaagaaagaaagaaaaa

SEQ ID NO: 11031 - DNA, 20 bp, synthetic construct
  misc_feature 1..20: note = chemically synthesized
  source 1..20: mol_type = other DNA
aaagaaagaaaaaaagaata

SEQ ID NO: 11032 - DNA, 20 bp, synthetic construct
  misc_feature 1..20: note = chemically synthesized
  source 1..20: mol_type = other DNA
tttacatttcactgtatgta

SEQ ID NO: 11033 - DNA, 20 bp, synthetic construct
  misc_feature 1..20: note = chemically synthesized
  source 1..20: mol_type = other DNA
actgtatgtaaagacattac

SEQ ID NO: 11034 - DNA, 20 bp, synthetic construct
  misc_feature 1..20: note = chemically synthesized
  source 1..20: mol_type = other DNA
ctgtatgtaaagacattaca

SEQ ID NO: 11035 - DNA, 20 bp, synthetic construct
  misc_feature 1..20: note = chemically synthesized
  source 1..20: mol_type = other DNA
atgtaaagacattacaaggc

SEQ ID NO: 11036 - DNA, 20 bp, synthetic construct
  misc_feature 1..20: note = chemically synthesized
  source 1..20: mol_type = other DNA
gtaaagacattacaaggcta

SEQ ID NO: 11037 - DNA, 20 bp, synthetic construct
  misc_feature 1..20: note = chemically synthesized
  source 1..20: mol_type = other DNA
gacattacaaggctagagta

SEQ ID NO: 11038 - DNA, 20 bp, synthetic construct
  misc_feature 1..20: note = chemically synthesized
  source 1..20: mol_type = other DNA
ggctagagtaaagcatgttg

SEQ ID NO: 11039 - DNA, 20 bp, synthetic construct
  misc_feature 1..20: note = chemically synthesized
  source 1..20: mol_type = other DNA
aaagcatgttgaagtaaaaa

SEQ ID NO: 11040 - DNA, 20 bp, synthetic construct
  misc_feature 1..20: note = chemically synthesized
  source 1..20: mol_type = other DNA
aagcatgttgaagtaaaaat

SEQ ID NO: 11041 - DNA, 20 bp, synthetic construct
  misc_feature 1..20: note = chemically synthesized
  source 1..20: mol_type = other DNA
gcatgttgaagtaaaaatag

SEQ ID NO: 11042 - DNA, 20 bp, synthetic construct
  misc_feature 1..20: note = chemically synthesized
  source 1..20: mol_type = other DNA
agtaaaaataggagaaatca

SEQ ID NO: 11043 - DNA, 20 bp, synthetic construct
  misc_feature 1..20: note = chemically synthesized
  source 1..20: mol_type = other DNA
aaaataggagaaatcaaagt

SEQ ID NO: 11044 - DNA, 20 bp, synthetic construct
  misc_feature 1..20: note = chemically synthesized
  source 1..20: mol_type = other DNA
aataggagaaatcaaagtta

SEQ ID NO: 11045 - DNA, 20 bp, synthetic construct
  misc_feature 1..20: note = chemically synthesized
  source 1..20: mol_type = other DNA
taggagaaatcaaagttaga

SEQ ID NO: 11046 - DNA, 20 bp, synthetic construct
  misc_feature 1..20: note = chemically synthesized
  source 1..20: mol_type = other DNA
gagaaatcaaagttagagag

SEQ ID NO: 11047 - DNA, 20 bp, synthetic construct
  misc_feature 1..20: note = chemically synthesized
  source 1..20: mol_type = other DNA
agaaatcaaagttagagaga

SEQ ID NO: 11048 - DNA, 20 bp, synthetic construct
  misc_feature 1..20: note = chemically synthesized
  source 1..20: mol_type = other DNA
gaaatcaaagttagagagaa

SEQ ID NO: 11049 - DNA, 20 bp, synthetic construct
  misc_feature 1..20: note = chemically synthesized
  source 1..20: mol_type = other DNA
caaagttagagagaagggcg

SEQ ID NO: 11050 - DNA, 20 bp, synthetic construct
  misc_feature 1..20: note = chemically synthesized
  source 1..20: mol_type = other DNA
aaagttagagagaagggcgc

SEQ ID NO: 11051 - DNA, 20 bp, synthetic construct
  misc_feature 1..20: note = chemically synthesized
  source 1..20: mol_type = other DNA
aagggcgcaggcttattatt

SEQ ID NO: 11052 - DNA, 20 bp, synthetic construct
  misc_feature 1..20: note = chemically synthesized
  source 1..20: mol_type = other DNA
agggcgcaggcttattattt

SEQ ID NO: 11053 - DNA, 20 bp, synthetic construct
  misc_feature 1..20: note = chemically synthesized
  source 1..20: mol_type = other DNA
ggcttattatttgggtctta

SEQ ID NO: 11054 - DNA, 20 bp, synthetic construct
  misc_feature 1..20: note = chemically synthesized
  source 1..20: mol_type = other DNA
attatttgggtcttatagat

SEQ ID NO: 11055 - DNA, 20 bp, synthetic construct
  misc_feature 1..20: note = chemically synthesized
  source 1..20: mol_type = other DNA
tatttgggtcttatagatga

SEQ ID NO: 11056 - DNA, 20 bp, synthetic construct
  misc_feature 1..20: note = chemically synthesized
  source 1..20: mol_type = other DNA
ttgggtcttatagatgagag

SEQ ID NO: 11057 - DNA, 20 bp, synthetic construct
  misc_feature 1..20: note = chemically synthesized
  source 1..20: mol_type = other DNA
ggtcttatagatgagagtag

SEQ ID NO: 11058 - DNA, 20 bp, synthetic construct
  misc_feature 1..20: note = chemically synthesized
  source 1..20: mol_type = other DNA
tcttatagatgagagtagta

SEQ ID NO: 11059 - DNA, 20 bp, synthetic construct
  misc_feature 1..20: note = chemically synthesized
  source 1..20: mol_type = other DNA
tatagatgagagtagtagag

SEQ ID NO: 11060 - DNA, 20 bp, synthetic construct
  misc_feature 1..20: note = chemically synthesized
  source 1..20: mol_type = other DNA
atagatgagagtagtagagt

SEQ ID NO: 11061 - DNA, 20 bp, synthetic construct
  misc_feature 1..20: note = chemically synthesized
  source 1..20: mol_type = other DNA
aggtattttatactgaaaca

SEQ ID NO: 11062 - DNA, 20 bp, synthetic construct
  misc_feature 1..20: note = chemically synthesized
  source 1..20: mol_type = other DNA
ggtattttatactgaaacat

SEQ ID NO: 11063 - DNA, 20 bp, synthetic construct
  misc_feature 1..20: note = chemically synthesized
  source 1..20: mol_type = other DNA
gtattttatactgaaacata

SEQ ID NO: 11064 - DNA, 20 bp, synthetic construct
  misc_feature 1..20: note = chemically synthesized
  source 1..20: mol_type = other DNA
tattttatactgaaacatag

SEQ ID NO: 11065 - DNA, 20 bp, synthetic construct
  misc_feature 1..20: note = chemically synthesized
  source 1..20: mol_type = other DNA
tatactgaaacataggggac

SEQ ID NO: 11066 - DNA, 20 bp, synthetic construct
  misc_feature 1..20: note = chemically synthesized
  source 1..20: mol_type = other DNA
atactgaaacataggggacg

SEQ ID NO: 11067 - DNA, 20 bp, synthetic construct
  misc_feature 1..20: note = chemically synthesized
  source 1..20: mol_type = other DNA
tactgaaacataggggacga

SEQ ID NO: 11068 - DNA, 20 bp, synthetic construct
  misc_feature 1..20: note = chemically synthesized
  source 1..20: mol_type = other DNA
actgaaacataggggacgag

SEQ ID NO: 11069 - DNA, 20 bp, synthetic construct
  misc_feature 1..20: note = chemically synthesized
  source 1..20: mol_type = other DNA
tgaaacataggggacgaggg

SEQ ID NO: 11070 - DNA, 20 bp, synthetic construct
  misc_feature 1..20: note = chemically synthesized
  source 1..20: mol_type = other DNA
gaggggagctttgcaaacct

SEQ ID NO: 11071 - DNA, 20 bp, synthetic construct
  misc_feature 1..20: note = chemically synthesized
  source 1..20: mol_type = other DNA
ttgcaaacctgagataaaca

SEQ ID NO: 11072 - DNA, 20 bp, synthetic construct
  misc_feature 1..20: note = chemically synthesized
  source 1..20: mol_type = other DNA
cctgagataaacatggtctg

SEQ ID NO: 11073 - DNA, 20 bp, synthetic construct
  misc_feature 1..20: note = chemically synthesized
  source 1..20: mol_type = other DNA
ctgtagtccactcaaaaccc

SEQ ID NO: 11074 - DNA, 20 bp, synthetic construct
  misc_feature 1..20: note = chemically synthesized
  source 1..20: mol_type = other DNA
ccttcttcatctgccttact

SEQ ID NO: 11075 - DNA, 20 bp, synthetic construct
  misc_feature 1..20: note = chemically synthesized
  source 1..20: mol_type = other DNA
tcatctgccttactcagtgc

SEQ ID NO: 11076 - DNA, 20 bp, synthetic construct
  misc_feature 1..20: note = chemically synthesized
  source 1..20: mol_type = other DNA
catctgccttactcagtgca

SEQ ID NO: 11077 - DNA, 20 bp, synthetic construct
  misc_feature 1..20: note = chemically synthesized
  source 1..20: mol_type = other DNA
ggtgctataacaaaatacaa

SEQ ID NO: 11078 - DNA, 20 bp, synthetic construct
  misc_feature 1..20: note = chemically synthesized
  source 1..20: mol_type = other DNA
tataacaaaatacaaaagac

SEQ ID NO: 11079 - DNA, 20 bp, synthetic construct
  misc_feature 1..20: note = chemically synthesized
  source 1..20: mol_type = other DNA
ataacaaaatacaaaagact

SEQ ID NO: 11080 - DNA, 20 bp, synthetic construct
  misc_feature 1..20: note = chemically synthesized
  source 1..20: mol_type = other DNA
acaaaatacaaaagactggg

SEQ ID NO: 11081 - DNA, 20 bp, synthetic construct
  misc_feature 1..20: note = chemically synthesized
  source 1..20: mol_type = other DNA
agactgggtggcttcaacaa

SEQ ID NO: 11082 - DNA, 20 bp, synthetic construct
  misc_feature 1..20: note = chemically synthesized
  source 1..20: mol_type = other DNA
actgggtggcttcaacaaca

SEQ ID NO: 11083 - DNA, 20 bp, synthetic construct
  misc_feature 1..20: note = chemically synthesized
  source 1..20: mol_type = other DNA
agttttttctcacatttctg

SEQ ID NO: 11084 - DNA, 20 bp, synthetic construct
  misc_feature 1..20: note = chemically synthesized
  source 1..20: mol_type = other DNA
gttttttctcacatttctga

SEQ ID NO: 11085 - DNA, 20 bp, synthetic construct
  misc_feature 1..20: note = chemically synthesized
  source 1..20: mol_type = other DNA
catttctgaaggctgactcg

SEQ ID NO: 11086 - DNA, 20 bp, synthetic construct
  misc_feature 1..20: note = chemically synthesized
  source 1..20: mol_type = other DNA
tctgaaggctgactcgtggt

SEQ ID NO: 11087 - DNA, 20 bp, synthetic construct
  misc_feature 1..20: note = chemically synthesized
  source 1..20: mol_type = other DNA
ctgaaggctgactcgtggtc

SEQ ID NO: 11088 - DNA, 20 bp, synthetic construct
  misc_feature 1..20: note = chemically synthesized
  source 1..20: mol_type = other DNA
tgaaggctgactcgtggtca

SEQ ID NO: 11089 - DNA, 20 bp, synthetic construct
  misc_feature 1..20: note = chemically synthesized
  source 1..20: mol_type = other DNA
cgtggtcagggttctcttcc

SEQ ID NO: 11090 - DNA, 20 bp, synthetic construct
  misc_feature 1..20: note = chemically synthesized
  source 1..20: mol_type = other DNA
agggttctcttcctggattg

SEQ ID NO: 11091 - DNA, 20 bp, synthetic construct
  misc_feature 1..20: note = chemically synthesized
  source 1..20: mol_type = other DNA
ttctcttcctggattgcaga

SEQ ID NO: 11092 - DNA, 20 bp, synthetic construct
  misc_feature 1..20: note = chemically synthesized
  source 1..20: mol_type = other DNA
tcttcctggattgcagatgg

SEQ ID NO: 11093 - DNA, 20 bp, synthetic construct
  misc_feature 1..20: note = chemically synthesized
  source 1..20: mol_type = other DNA
acttctcactgtgtcctcac

SEQ ID NO: 11094 - DNA, 20 bp, synthetic construct
  misc_feature 1..20: note = chemically synthesized
  source 1..20: mol_type = other DNA
cttctcactgtgtcctcacc

SEQ ID NO: 11095 - DNA, 20 bp, synthetic construct
  misc_feature 1..20: note = chemically synthesized
  source 1..20: mol_type = other DNA
tctcactgtgtcctcaccgg

SEQ ID NO: 11096 - DNA, 20 bp, synthetic construct
  misc_feature 1..20: note = chemically synthesized
  source 1..20: mol_type = other DNA
ctcactgtgtcctcaccggg

SEQ ID NO: 11097 - DNA, 20 bp, synthetic construct
  misc_feature 1..20: note = chemically synthesized
  source 1..20: mol_type = other DNA
ctgtgtcctcaccgggagga

SEQ ID NO: 11098 - DNA, 20 bp, synthetic construct
  misc_feature 1..20: note = chemically synthesized
  source 1..20: mol_type = other DNA
gtgtcctcaccgggaggaaa

SEQ ID NO: 11099 - DNA, 20 bp, synthetic construct
  misc_feature 1..20: note = chemically synthesized
  source 1..20: mol_type = other DNA
tcaccgggaggaaagagaaa

SEQ ID NO: 11100 - DNA, 20 bp, synthetic construct
  misc_feature 1..20: note = chemically synthesized
  source 1..20: mol_type = other DNA
cttgtctctctgcttctgat

SEQ ID NO: 11101 - DNA, 20 bp, synthetic construct
  misc_feature 1..20: note = chemically synthesized
  source 1..20: mol_type = other DNA
ttgtctctctgcttctgata

SEQ ID NO: 11102 - DNA, 20 bp, synthetic construct
  misc_feature 1..20: note = chemically synthesized
  source 1..20: mol_type = other DNA
taaggaaaataattttatga

SEQ ID NO: 11103 - DNA, 20 bp, synthetic construct
  misc_feature 1..20: note = chemically synthesized
  source 1..20: mol_type = other DNA
aaggaaaataattttatgat

SEQ ID NO: 11104 - DNA, 20 bp, synthetic construct
  misc_feature 1..20: note = chemically synthesized
  source 1..20: mol_type = other DNA
aggaaaataattttatgatg

SEQ ID NO: 11105 - DNA, 20 bp, synthetic construct
  misc_feature 1..20: note = chemically synthesized
  source 1..20: mol_type = other DNA
tgatggggatctgctcttat

SEQ ID NO: 11106 - DNA, 20 bp, synthetic construct
  misc_feature 1..20: note = chemically synthesized
  source 1..20: mol_type = other DNA
taaacctaattacttttcaa

SEQ ID NO: 11107 - DNA, 20 bp, synthetic construct
  misc_feature 1..20: note = chemically synthesized
  source 1..20: mol_type = other DNA
cttttcaaaagcctccccca

SEQ ID NO: 11108 - DNA, 20 bp, synthetic construct
  misc_feature 1..20: note = chemically synthesized
  source 1..20: mol_type = other DNA
caaaagcctcccccacagat

SEQ ID NO: 11109 - DNA, 20 bp, synthetic construct
  misc_feature 1..20: note = chemically synthesized
  source 1..20: mol_type = other DNA
aaaagcctcccccacagata

SEQ ID NO: 11110 - DNA, 20 bp, synthetic construct
  misc_feature 1..20: note = chemically synthesized
  source 1..20: mol_type = other DNA
gcctcccccacagataaggt

SEQ ID NO: 11111 - DNA, 20 bp, synthetic construct
  misc_feature 1..20: note = chemically synthesized
  source 1..20: mol_type = other DNA
cccccacagataaggtcagt

SEQ ID NO: 11112 - DNA, 20 bp, synthetic construct
  misc_feature 1..20: note = chemically synthesized
  source 1..20: mol_type = other DNA
ccccacagataaggtcagtt

SEQ ID NO: 11113 - DNA, 20 bp, synthetic construct
  misc_feature 1..20: note = chemically synthesized
  source 1..20: mol_type = other DNA
ccacagataaggtcagttgg

SEQ ID NO: 11114 - DNA, 20 bp, synthetic construct
  misc_feature 1..20: note = chemically synthesized
  source 1..20: mol_type = other DNA
agataaggtcagttgggagt

SEQ ID NO: 11115 - DNA, 20 bp, synthetic construct
  misc_feature 1..20: note = chemically synthesized
  source 1..20: mol_type = other DNA
gataaggtcagttgggagtt

SEQ ID NO: 11116 - DNA, 20 bp, synthetic construct
  misc_feature 1..20: note = chemically synthesized
  source 1..20: mol_type = other DNA
ataaggtcagttgggagttg

SEQ ID NO: 11117 - DNA, 20 bp, synthetic construct
  misc_feature 1..20: note = chemically synthesized
  source 1..20: mol_type = other DNA
tcagttgggagttggggatt

SEQ ID NO: 11118 - DNA, 20 bp, synthetic construct
  misc_feature 1..20: note = chemically synthesized
  source 1..20: mol_type = other DNA
ggattcagcatgtgaatttt

SEQ ID NO: 11119 - DNA, 20 bp, synthetic construct
  misc_feature 1..20: note = chemically synthesized
  source 1..20: mol_type = other DNA
gattcagcatgtgaattttg

SEQ ID NO: 11120 - DNA, 20 bp, synthetic construct
  misc_feature 1..20: note = chemically synthesized
  source 1..20: mol_type = other DNA
ttcagcatgtgaattttgag

SEQ ID NO: 11121 - DNA, 20 bp, synthetic construct
  misc_feature 1..20: note = chemically synthesized
  source 1..20: mol_type = other DNA
ttttgaggagacacaaacat

SEQ ID NO: 11122 - DNA, 20 bp, synthetic construct
  misc_feature 1..20: note = chemically synthesized
  source 1..20: mol_type = other DNA
tttgaggagacacaaacatt

SEQ ID NO: 11123 - DNA, 20 bp, synthetic construct
  misc_feature 1..20: note = chemically synthesized
  source 1..20: mol_type = other DNA
tcatattaaactcttactta

SEQ ID NO: 11124 - DNA, 20 bp, synthetic construct
  misc_feature 1..20: note = chemically synthesized
  source 1..20: mol_type = other DNA
atattaaactcttacttata

SEQ ID NO: 11125 - DNA, 20 bp, synthetic construct
  misc_feature 1..20: note = chemically synthesized
  source 1..20: mol_type = other DNA
aactatacaaaaattccatt

SEQ ID NO: 11126 - DNA, 20 bp, synthetic construct
  misc_feature 1..20: note = chemically synthesized
  source 1..20: mol_type = other DNA
atacaaaaattccattaagt

SEQ ID NO: 11127 - DNA, 20 bp, synthetic construct
  misc_feature 1..20: note = chemically synthesized
  source 1..20: mol_type = other DNA
cccactacattttgatctca

SEQ ID NO: 11128 - DNA, 20 bp, synthetic construct
  misc_feature 1..20: note = chemically synthesized
  source 1..20: mol_type = other DNA
acattttgatctcacagtgc

SEQ ID NO: 11129 - DNA, 20 bp, synthetic construct
  misc_feature 1..20: note = chemically synthesized
  source 1..20: mol_type = other DNA
cacagtgctggtctgtttct

SEQ ID NO: 11130 - DNA, 20 bp, synthetic construct
  misc_feature 1..20: note = chemically synthesized
  source 1..20: mol_type = other DNA
acatgctcatgctgacttgt

SEQ ID NO: 11131 - DNA, 20 bp, synthetic construct
  misc_feature 1..20: note = chemically synthesized
  source 1..20: mol_type = other DNA
ctgattcatttcttacacct

SEQ ID NO: 11132 - DNA, 20 bp, synthetic construct
  misc_feature 1..20: note = chemically synthesized
  source 1..20: mol_type = other DNA
acctaagtccccacctcccc

SEQ ID NO: 11133 - DNA, 20 bp, synthetic construct
  misc_feature 1..20: note = chemically synthesized
  source 1..20: mol_type = other DNA
ctaagtccccacctccccca

SEQ ID NO: 11134 - DNA, 20 bp, synthetic construct
  misc_feature 1..20: note = chemically synthesized
  source 1..20: mol_type = other DNA
ctcccccagagtcttacaat

SEQ ID NO: 11135 - DNA, 20 bp, synthetic construct
  misc_feature 1..20: note = chemically synthesized
  source 1..20: mol_type = other DNA
tcccccagagtcttacaatg

SEQ ID NO: 11136 - DNA, 20 bp, synthetic construct
  misc_feature 1..20: note = chemically synthesized
  source 1..20: mol_type = other DNA
tgtgaccaatctgcacactt

SEQ ID NO: 11137 - DNA, 20 bp, synthetic construct
  misc_feature 1..20: note = chemically synthesized
  source 1..20: mol_type = other DNA
gtgaccaatctgcacacttg

SEQ ID NO: 11138 - DNA, 20 bp, synthetic construct
  misc_feature 1..20: note = chemically synthesized
  source 1..20: mol_type = other DNA
tgaccaatctgcacacttga

SEQ ID NO: 11139 - DNA, 20 bp, synthetic construct
  misc_feature 1..20: note = chemically synthesized
  source 1..20: mol_type = other DNA
aatctgcacacttgagggca

SEQ ID NO: 11140 - DNA, 20 bp, synthetic construct
  misc_feature 1..20: note = chemically synthesized
  source 1..20: mol_type = other DNA
atctgcacacttgagggcat

SEQ ID NO: 11141 - DNA, 20 bp, synthetic construct
  misc_feature 1..20: note = chemically synthesized
  source 1..20: mol_type = other DNA
tgggattaatttcactttct

SEQ ID NO: 11142 - DNA, 20 bp, synthetic construct
  misc_feature 1..20: note = chemically synthesized
  source 1..20: mol_type = other DNA
gggattaatttcactttctt

SEQ ID NO: 11143 - DNA, 20 bp, synthetic construct
  misc_feature 1..20: note = chemically synthesized
  source 1..20: mol_type = other DNA
tcactttcttaggcatccac

SEQ ID NO: 11144 - DNA, 20 bp, synthetic construct
  misc_feature 1..20: note = chemically synthesized
  source 1..20: mol_type = other DNA
cactttcttaggcatccaca

SEQ ID NO: 11145 - DNA, 20 bp, synthetic construct
  misc_feature 1..20: note = chemically synthesized
  source 1..20: mol_type = other DNA
actttcttaggcatccacaa

SEQ ID NO: 11146 - DNA, 20 bp, synthetic construct
  misc_feature 1..20: note = chemically synthesized
  source 1..20: mol_type = other DNA
gcatccacaagggctgtgaa

SEQ ID NO: 11147 - DNA, 20 bp, synthetic construct
  misc_feature 1..20: note = chemically synthesized
  source 1..20: mol_type = other DNA
cacaagggctgtgaaaagct

SEQ ID NO: 11148 - DNA, 20 bp, synthetic construct
  misc_feature 1..20: note = chemically synthesized
  source 1..20: mol_type = other DNA
tgtgaaaagctaagtgccat

SEQ ID NO: 11149 - DNA, 20 bp, synthetic construct
  misc_feature 1..20: note = chemically synthesized
  source 1..20: mol_type = other DNA
aagctaagtgccattagaaa

SEQ ID NO: 11150 - DNA, 20 bp, synthetic construct
  misc_feature 1..20: note = chemically synthesized
  source 1..20: mol_type = other DNA
tagtattcctcctaataaaa

SEQ ID NO: 11151 - DNA, 20 bp, synthetic construct
  misc_feature 1..20: note = chemically synthesized
  source 1..20: mol_type = other DNA
gactaaaccttgaattccta

SEQ ID NO: 11152 - DNA, 20 bp, synthetic construct
  misc_feature 1..20: note = chemically synthesized
  source 1..20: mol_type = other DNA
aaccttgaattcctaaagct

SEQ ID NO: 11153 - DNA, 20 bp, synthetic construct
  misc_feature 1..20: note = chemically synthesized
  source 1..20: mol_type = other DNA
tggaacactttcccttcctt

SEQ ID NO: 11154 - DNA, 20 bp, synthetic construct
  misc_feature 1..20: note = chemically synthesized
  source 1..20: mol_type = other DNA
taagaaccatccttgctact

SEQ ID NO: 11155 - DNA, 20 bp, synthetic construct
  misc_feature 1..20: note = chemically synthesized
  source 1..20: mol_type = other DNA
ctactcagctgcaatcaatc

SEQ ID NO: 11156 - DNA, 20 bp, synthetic construct
  misc_feature 1..20: note = chemically synthesized
  source 1..20: mol_type = other DNA
gctgcaatcaatccagcccc

SEQ ID NO: 11157 - DNA, 20 bp, synthetic construct
  misc_feature 1..20: note = chemically synthesized
  source 1..20: mol_type = other DNA
ctgcaatcaatccagccccc

SEQ ID NO: 11158 - DNA, 20 bp, synthetic construct
  misc_feature 1..20: note = chemically synthesized
  source 1..20: mol_type = other DNA
cttccaaaacatctgtttct

SEQ ID NO: 11159 - DNA, 20 bp, synthetic construct
  misc_feature 1..20: note = chemically synthesized
  source 1..20: mol_type = other DNA
ccaaaacatctgtttctgag

SEQ ID NO: 11160 - DNA, 20 bp, synthetic construct
  misc_feature 1..20: note = chemically synthesized
  source 1..20: mol_type = other DNA
ttctgagaagtcctgtccta

SEQ ID NO: 11161 - DNA, 20 bp, synthetic construct
  misc_feature 1..20: note = chemically synthesized
  source 1..20: mol_type = other DNA
ctgagaagtcctgtcctata

SEQ ID NO: 11162 - DNA, 20 bp, synthetic construct
  misc_feature 1..20: note = chemically synthesized
  source 1..20: mol_type = other DNA
tgagaagtcctgtcctatag

SEQ ID NO: 11163 - DNA, 20 bp, synthetic construct
  misc_feature 1..20: note = chemically synthesized
  source 1..20: mol_type = other DNA
atagaggtctttcttcccac

SEQ ID NO: 11164 - DNA, 20 bp, synthetic construct
  misc_feature 1..20: note = chemically synthesized
  source 1..20: mol_type = other DNA
acaccatttactcccacttg

SEQ ID NO: 11165 - DNA, 20 bp, synthetic construct
  misc_feature 1..20: note = chemically synthesized
  source 1..20: mol_type = other DNA
cttgcagaactcccgtgtac

SEQ ID NO: 11166 - DNA, 20 bp, synthetic construct
  misc_feature 1..20: note = chemically synthesized
  source 1..20: mol_type = other DNA
catctcatataaaaataaat

SEQ ID NO: 11167 - DNA, 20 bp, synthetic construct
  misc_feature 1..20: note = chemically synthesized
  source 1..20: mol_type = other DNA
atctcatataaaaataaatg

SEQ ID NO: 11168 - DNA, 20 bp, synthetic construct
  misc_feature 1..20: note = chemically synthesized
  source 1..20: mol_type = other DNA
ctcatataaaaataaatgag

SEQ ID NO: 11169 - DNA, 20 bp, synthetic construct
  misc_feature 1..20: note = chemically synthesized
  source 1..20: mol_type = other DNA
gcacacaccacaaacacaaa

SEQ ID NO: 11170 - DNA, 20 bp, synthetic construct
  misc_feature 1..20: note = chemically synthesized
  source 1..20: mol_type = other DNA
cacacaccacaaacacaaac

SEQ ID NO: 11171 - DNA, 20 bp, synthetic construct
  misc_feature 1..20: note = chemically synthesized
  source 1..20: mol_type = other DNA
cacaaacacaaacaggcatg

SEQ ID NO: 11172 - DNA, 20 bp, synthetic construct
  misc_feature 1..20: note = chemically synthesized
  source 1..20: mol_type = other DNA
ccctcaatataaaccctttg

SEQ ID NO: 11173 - DNA, 20 bp, synthetic construct
  misc_feature 1..20: note = chemically synthesized
  source 1..20: mol_type = other DNA
ttgtggctcatatatttaaa

SEQ ID NO: 11174 - DNA, 20 bp, synthetic construct
  misc_feature 1..20: note = chemically synthesized
  source 1..20: mol_type = other DNA
atttaaaaagatgtaaaaaa

SEQ ID NO: 11175 - DNA, 20 bp, synthetic construct
  misc_feature 1..20: note = chemically synthesized
  source 1..20: mol_type = other DNA
ttaaaaagatgtaaaaaaaa

SEQ ID NO: 11176 - DNA, 20 bp, synthetic construct
  misc_feature 1..20: note = chemically synthesized
  source 1..20: mol_type = other DNA
agatgtaaaaaaaagagctg

SEQ ID NO: 11177 - DNA, 20 bp, synthetic construct
  misc_feature 1..20: note = chemically synthesized
  source 1..20: mol_type = other DNA
gaaaatcatgtgtgatctct

SEQ ID NO: 11178 - DNA, 20 bp, synthetic construct
  misc_feature 1..20: note = chemically synthesized
  source 1..20: mol_type = other DNA
aatcatgtgtgatctctcag

SEQ ID NO: 11179 - DNA, 20 bp, synthetic construct
  misc_feature 1..20: note = chemically synthesized
  source 1..20: mol_type = other DNA
tgtgtgatctctcagcagaa

SEQ ID NO: 11180 - DNA, 20 bp, synthetic construct
  misc_feature 1..20: note = chemically synthesized
  source 1..20: mol_type = other DNA
tttattatttgtattgcttg

SEQ ID NO: 11181 - DNA, 20 bp, synthetic construct
  misc_feature 1..20: note = chemically synthesized
  source 1..20: mol_type = other DNA
tttgtattgcttgcagaata

SEQ ID NO: 11182 - DNA, 20 bp, synthetic construct
  misc_feature 1..20: note = chemically synthesized
  source 1..20: mol_type = other DNA
agaataaagcctatccttga

SEQ ID NO: 11183 - DNA, 20 bp, synthetic construct
  misc_feature 1..20: note = chemically synthesized
  source 1..20: mol_type = other DNA
tccttgaaagctctgaatca

SEQ ID NO: 11184 - DNA, 20 bp, synthetic construct
  misc_feature 1..20: note = chemically synthesized
  source 1..20: mol_type = other DNA
ccttgaaagctctgaatcat

SEQ ID NO: 11185 - DNA, 20 bp, synthetic construct
  misc_feature 1..20: note = chemically synthesized
  source 1..20: mol_type = other DNA
tgaaagctctgaatcatggg

SEQ ID NO: 11186 - DNA, 20 bp, synthetic construct
  misc_feature 1..20: note = chemically synthesized
  source 1..20: mol_type = other DNA
agctctgaatcatgggcagt

SEQ ID NO: 11187 - DNA, 20 bp, synthetic construct
  misc_feature 1..20: note = chemically synthesized
  source 1..20: mol_type = other DNA
tgaatcatgggcagtgagct

SEQ ID NO: 11188 - DNA, 20 bp, synthetic construct
  misc_feature 1..20: note = chemically synthesized
  source 1..20: mol_type = other DNA
atcatgggcagtgagctcag

SEQ ID NO: 11189 - DNA, 20 bp, synthetic construct
  misc_feature 1..20: note = chemically synthesized
  source 1..20: mol_type = other DNA
gcagtgagctcagtggtatc

SEQ ID NO: 11190 - DNA, 20 bp, synthetic construct
  misc_feature 1..20: note = chemically synthesized
  source 1..20: mol_type = other DNA
agtgagctcagtggtatctg

SEQ ID NO: 11191 - DNA, 20 bp, synthetic construct
  misc_feature 1..20: note = chemically synthesized
  source 1..20: mol_type = other DNA
gtgagctcagtggtatctgg

SEQ ID NO: 11192 - DNA, 20 bp, synthetic construct
  misc_feature 1..20: note = chemically synthesized
  source 1..20: mol_type = other DNA
gctcagtggtatctggagga

SEQ ID NO: 11193 - DNA, 20 bp, synthetic construct
  misc_feature 1..20: note = chemically synthesized
  source 1..20: mol_type = other DNA
ctcagtggtatctggaggac

SEQ ID NO: 11194 - DNA, 20 bp, synthetic construct
  misc_feature 1..20: note = chemically synthesized
  source 1..20: mol_type = other DNA
tcagtggtatctggaggaca

SEQ ID NO: 11195 - DNA, 20 bp, synthetic construct
  misc_feature 1..20: note = chemically synthesized
  source 1..20: mol_type = other DNA
gtatctggaggacagggcac

SEQ ID NO: 11196 - DNA, 20 bp, synthetic construct
  misc_feature 1..20: note = chemically synthesized
  source 1..20: mol_type = other DNA
ggacagggcactggccactg

SEQ ID NO: 11197 - DNA, 20 bp, synthetic construct
  misc_feature 1..20: note = chemically synthesized
  source 1..20: mol_type = other DNA
ctgcagtcaccatcttctgc

SEQ ID NO: 11198 - DNA, 20 bp, synthetic construct
  misc_feature 1..20: note = chemically synthesized
  source 1..20: mol_type = other DNA
tgcagtcaccatcttctgcc

SEQ ID NO: 11199 - DNA, 20 bp, synthetic construct
  misc_feature 1..20: note = chemically synthesized
  source 1..20: mol_type = other DNA
agtcaccatcttctgccagg

SEQ ID NO: 11200 - DNA, 20 bp, synthetic construct
  misc_feature 1..20: note = chemically synthesized
  source 1..20: mol_type = other DNA
ctgccaggaagcctgcacct

SEQ ID NO: 11201 - DNA, 20 bp, synthetic construct
  misc_feature 1..20: note = chemically synthesized
  source 1..20: mol_type = other DNA
tgccaggaagcctgcacctc

SEQ ID NO: 11202 - DNA, 20 bp, synthetic construct
  misc_feature 1..20: note = chemically synthesized
  source 1..20: mol_type = other DNA
gccaggaagcctgcacctca

SEQ ID NO: 11203 - DNA, 20 bp, synthetic construct
  misc_feature 1..20: note = chemically synthesized
  source 1..20: mol_type = other DNA
ccaggaagcctgcacctcag

SEQ ID NO: 11204 - DNA, 20 bp, synthetic construct
  misc_feature 1..20: note = chemically synthesized
  source 1..20: mol_type = other DNA
gggtgaattctttgccgaaa

SEQ ID NO: 11205 - DNA, 20 bp, synthetic construct
  misc_feature 1..20: note = chemically synthesized
  source 1..20: mol_type = other DNA
gccgaaatggattgccaaaa

SEQ ID NO: 11206 - DNA, 20 bp, synthetic construct
  misc_feature 1..20: note = chemically synthesized
  source 1..20: mol_type = other DNA
tggattgccaaaacggtcac

SEQ ID NO: 11207 - DNA, 20 bp, synthetic construct
  misc_feature 1..20: note = chemically synthesized
  source 1..20: mol_type = other DNA
acggtcaccagcacatttcc

SEQ ID NO: 11208 - DNA, 20 bp, synthetic construct
  misc_feature 1..20: note = chemically synthesized
  source 1..20: mol_type = other DNA
cggtcaccagcacatttccc

SEQ ID NO: 11209 - DNA, 20 bp, synthetic construct
  misc_feature 1..20: note = chemically synthesized
  source 1..20: mol_type = other DNA
gtcaccagcacatttcccag

SEQ ID NO: 11210 - DNA, 20 bp, synthetic construct
  misc_feature 1..20: note = chemically synthesized
  source 1..20: mol_type = other DNA
cacatttcccaggagctgtt

SEQ ID NO: 11211 - DNA, 20 bp, synthetic construct
  misc_feature 1..20: note = chemically synthesized
  source 1..20: mol_type = other DNA
cccaggagctgttgagatga

SEQ ID NO: 11212 - DNA, 20 bp, synthetic construct
  misc_feature 1..20: note = chemically synthesized
  source 1..20: mol_type = other DNA
ccaggagctgttgagatgaa

SEQ ID NO: 11213 - DNA, 20 bp, synthetic construct
  misc_feature 1..20: note = chemically synthesized
  source 1..20: mol_type = other DNA
aggagctgttgagatgaaag

SEQ ID NO: 11214 - DNA, 20 bp, synthetic construct
  misc_feature 1..20: note = chemically synthesized
  source 1..20: mol_type = other DNA
tgagatgaaaggagacaata

SEQ ID NO: 11215 - DNA, 20 bp, synthetic construct
  misc_feature 1..20: note = chemically synthesized
  source 1..20: mol_type = other DNA
agacaataaagatgaaccca

SEQ ID NO: 11216 - DNA, 20 bp, synthetic construct
  misc_feature 1..20: note = chemically synthesized
  source 1..20: mol_type = other DNA
aataaagatgaacccatagt

SEQ ID NO: 11217 - DNA, 20 bp, synthetic construct
  misc_feature 1..20: note = chemically synthesized
  source 1..20: mol_type = other DNA
agatgaacccatagtgagct

SEQ ID NO: 11218 - DNA, 20 bp, synthetic construct
  misc_feature 1..20: note = chemically synthesized
  source 1..20: mol_type = other DNA
atgaacccatagtgagctga

SEQ ID NO: 11219 - DNA, 20 bp, synthetic construct
  misc_feature 1..20: note = chemically synthesized
  source 1..20: mol_type = other DNA
ccatagtgagctgagagctc

SEQ ID NO: 11220 - DNA, 20 bp, synthetic construct
  misc_feature 1..20: note = chemically synthesized
  source 1..20: mol_type = other DNA
gtgagctgagagctccagcc

SEQ ID NO: 11221 - DNA, 20 bp, synthetic construct
  misc_feature 1..20: note = chemically synthesized
  source 1..20: mol_type = other DNA
gagagctccagcctggcctc

SEQ ID NO: 11222 - DNA, 20 bp, synthetic construct
  misc_feature 1..20: note = chemically synthesized
  source 1..20: mol_type = other DNA
cctccagataactacacacc

SEQ ID NO: 11223 - DNA, 20 bp, synthetic construct
  misc_feature 1..20: note = chemically synthesized
  source 1..20: mol_type = other DNA
ctacacaccaagcttccacc

SEQ ID NO: 11224 - DNA, 20 bp, synthetic construct
  misc_feature 1..20: note = chemically synthesized
  source 1..20: mol_type = other DNA
ccaagcttccacccagaatc

SEQ ID NO: 11225 - DNA, 20 bp, synthetic construct
  misc_feature 1..20: note = chemically synthesized
  source 1..20: mol_type = other DNA
gcctatgttaacttccctca

SEQ ID NO: 11226 - DNA, 20 bp, synthetic construct
  misc_feature 1..20: note = chemically synthesized
  source 1..20: mol_type = other DNA
gttaacttccctcaaagcct

SEQ ID NO: 11227 - DNA, 20 bp, synthetic construct
  misc_feature 1..20: note = chemically synthesized
  source 1..20: mol_type = other DNA
ttttgccttcccattaaatg

SEQ ID NO: 11228 - DNA, 20 bp, synthetic construct
  misc_feature 1..20: note = chemically synthesized
  source 1..20: mol_type = other DNA
tttgccttcccattaaatgc

SEQ ID NO: 11229 - DNA, 20 bp, synthetic construct
  misc_feature 1..20: note = chemically synthesized
  source 1..20: mol_type = other DNA
gccttcccattaaatgcagg

SEQ ID NO: 11230 - DNA, 20 bp, synthetic construct
  misc_feature 1..20: note = chemically synthesized
  source 1..20: mol_type = other DNA
gcaggtagttgttccccttc

SEQ ID NO: 11231 - DNA, 20 bp, synthetic construct
  misc_feature 1..20: note = chemically synthesized
  source 1..20: mol_type = other DNA
agttgttccccttcaagcac

SEQ ID NO: 11232 - DNA, 20 bp, synthetic construct
  misc_feature 1..20: note = chemically synthesized
  source 1..20: mol_type = other DNA
ccccttcaagcactagtcac

SEQ ID NO: 11233 - DNA, 20 bp, synthetic construct
  misc_feature 1..20: note = chemically synthesized
  source 1..20: mol_type = other DNA
accatgaaccctgtatgttg

SEQ ID NO: 11234 - DNA, 20 bp, synthetic construct
  misc_feature 1..20: note = chemically synthesized
  source 1..20: mol_type = other DNA
ccatgaaccctgtatgttgt

SEQ ID NO: 11235 - DNA, 20 bp, synthetic construct
  misc_feature 1..20: note = chemically synthesized
  source 1..20: mol_type = other DNA
accctgtatgttgtaggctg

SEQ ID NO: 11236 - DNA, 20 bp, synthetic construct
  misc_feature 1..20: note = chemically synthesized
  source 1..20: mol_type = other DNA
ttgtaggctgaagacgttaa

SEQ ID NO: 11237 - DNA, 20 bp, synthetic construct
  misc_feature 1..20: note = chemically synthesized
  source 1..20: mol_type = other DNA
cgcacacacacacacacaca

SEQ ID NO: 11238 - DNA, 20 bp, synthetic construct
  misc_feature 1..20: note = chemically synthesized
  source 1..20: mol_type = other DNA
cacacacacacacacacaca

SEQ ID NO: 11239 - DNA, 20 bp, synthetic construct
  misc_feature 1..20: note = chemically synthesized
  source 1..20: mol_type = other DNA
ctgactttcaaaatctactc

SEQ ID NO: 11240 - DNA, 20 bp, synthetic construct
  misc_feature 1..20: note = chemically synthesized
  source 1..20: mol_type = other DNA
tttcaattgttcctcacccc

SEQ ID NO: 11241 - DNA, 20 bp, synthetic construct
  misc_feature 1..20: note = chemically synthesized
  source 1..20: mol_type = other DNA
ggacatactttgcccccatc

SEQ ID NO: 11242 - DNA, 20 bp, synthetic construct
  misc_feature 1..20: note = chemically synthesized
  source 1..20: mol_type = other DNA
tttgcccccatctggaatta

SEQ ID NO: 11243 - DNA, 20 bp, synthetic construct
  misc_feature 1..20: note = chemically synthesized
  source 1..20: mol_type = other DNA
ttgcccccatctggaattaa

SEQ ID NO: 11244 - DNA, 20 bp, synthetic construct
  misc_feature 1..20: note = chemically synthesized
  source 1..20: mol_type = other DNA
catctggaattaaaggatat

SEQ ID NO: 11245 - DNA, 20 bp, synthetic construct
  misc_feature 1..20: note = chemically synthesized
  source 1..20: mol_type = other DNA
aaggatataagtttgtaatg

SEQ ID NO: 11246 - DNA, 20 bp, synthetic construct
  misc_feature 1..20: note = chemically synthesized
  source 1..20: mol_type = other DNA
ataagtttgtaatgaagcat

SEQ ID NO: 11247 - DNA, 20 bp, synthetic construct
  misc_feature 1..20: note = chemically synthesized
  source 1..20: mol_type = other DNA
agtttgtaatgaagcattag

SEQ ID NO: 11248 - DNA, 20 bp, synthetic construct
  misc_feature 1..20: note = chemically synthesized
  source 1..20: mol_type = other DNA
agcagcattttatatgtgtc

SEQ ID NO: 11249 - DNA, 20 bp, synthetic construct
  misc_feature 1..20: note = chemically synthesized
  source 1..20: mol_type = other DNA
ttatatgtgtccagctgata

SEQ ID NO: 11250 - DNA, 20 bp, synthetic construct
  misc_feature 1..20: note = chemically synthesized
  source 1..20: mol_type = other DNA
tatatgtgtccagctgatat

SEQ ID NO: 11251 - DNA, 20 bp, synthetic construct
  misc_feature 1..20: note = chemically synthesized
  source 1..20: mol_type = other DNA
gtgtccagctgatataggaa

SEQ ID NO: 11252 - DNA, 20 bp, synthetic construct
  misc_feature 1..20: note = chemically synthesized
  source 1..20: mol_type = other DNA
agctgatataggaatagcct

SEQ ID NO: 11253 - DNA, 20 bp, synthetic construct
  misc_feature 1..20: note = chemically synthesized
  source 1..20: mol_type = other DNA
tagccttagcaatgtatgtt

SEQ ID NO: 11254 - DNA, 20 bp, synthetic construct
  misc_feature 1..20: note = chemically synthesized
  source 1..20: mol_type = other DNA
caatgtatgtttggccacca

SEQ ID NO: 11255 - DNA, 20 bp, synthetic construct
  misc_feature 1..20: note = chemically synthesized
  source 1..20: mol_type = other DNA
caaagttccccactttgact

SEQ ID NO: 11256 - DNA, 20 bp, synthetic construct
  misc_feature 1..20: note = chemically synthesized
  source 1..20: mol_type = other DNA
gaccatacttgtcctgcctc

SEQ ID NO: 11257 - DNA, 20 bp, synthetic construct
  misc_feature 1..20: note = chemically synthesized
  source 1..20: mol_type = other DNA
atacttgtcctgcctccaga

SEQ ID NO: 11258 - DNA, 20 bp, synthetic construct
  misc_feature 1..20: note = chemically synthesized
  source 1..20: mol_type = other DNA
tgttttaaaacaacaaaaat

SEQ ID NO: 11259 - DNA, 20 bp, synthetic construct
  misc_feature 1..20: note = chemically synthesized
  source 1..20: mol_type = other DNA
gttttaaaacaacaaaaatg

SEQ ID NO: 11260 - DNA, 20 bp, synthetic construct
  misc_feature 1..20: note = chemically synthesized
  source 1..20: mol_type = other DNA
ttttaaaacaacaaaaatga

SEQ ID NO: 11261 - DNA, 20 bp, synthetic construct
  misc_feature 1..20: note = chemically synthesized
  source 1..20: mol_type = other DNA
aaaacaacaaaaatgaggga

SEQ ID NO: 11262 - DNA, 20 bp, synthetic construct
  misc_feature 1..20: note = chemically synthesized
  source 1..20: mol_type = other DNA
caaaaatgagggaaagatga

SEQ ID NO: 11263 - DNA, 20 bp, synthetic construct
  misc_feature 1..20: note = chemically synthesized
  source 1..20: mol_type = other DNA
aagatgaaagttctttctac

SEQ ID NO: 11264 - DNA, 20 bp, synthetic construct
  misc_feature 1..20: note = chemically synthesized
  source 1..20: mol_type = other DNA
ctttctactggaatctaata

SEQ ID NO: 11265 - DNA, 20 bp, synthetic construct
  misc_feature 1..20: note = chemically synthesized
  source 1..20: mol_type = other DNA
tactggaatctaataaagaa

SEQ ID NO: 11266 - DNA, 20 bp, synthetic construct
  misc_feature 1..20: note = chemically synthesized
  source 1..20: mol_type = other DNA
tttccacctctcttttctca

SEQ ID NO: 11267 - DNA, 20 bp, synthetic construct
  misc_feature 1..20: note = chemically synthesized
  source 1..20: mol_type = other DNA
caaagtcaaaattgtccatc

SEQ ID NO: 11268 - DNA, 20 bp, synthetic construct
  misc_feature 1..20: note = chemically synthesized
  source 1..20: mol_type = other DNA
aaattgtccatctagatttt

SEQ ID NO: 11269 - DNA, 20 bp, synthetic construct
  misc_feature 1..20: note = chemically synthesized
  source 1..20: mol_type = other DNA
attgtccatctagattttta

SEQ ID NO: 11270 - DNA, 20 bp, synthetic construct
  misc_feature 1..20: note = chemically synthesized
  source 1..20: mol_type = other DNA
ttgtccatctagatttttag

SEQ ID NO: 11271 - DNA, 20 bp, synthetic construct
  misc_feature 1..20: note = chemically synthesized
  source 1..20: mol_type = other DNA
agatttttagaggcactcct

SEQ ID NO: 11272 - DNA, 20 bp, synthetic construct
  misc_feature 1..20: note = chemically synthesized
  source 1..20: mol_type = other DNA
gatttttagaggcactcctt

SEQ ID NO: 11273 - DNA, 20 bp, synthetic construct
  misc_feature 1..20: note = chemically synthesized
  source 1..20: mol_type = other DNA
aggccctaaaacattaccac

SEQ ID NO: 11274 - DNA, 20 bp, synthetic construct
  misc_feature 1..20: note = chemically synthesized
  source 1..20: mol_type = other DNA
ggccctaaaacattaccact

SEQ ID NO: 11275 - DNA, 20 bp, synthetic construct
  misc_feature 1..20: note = chemically synthesized
  source 1..20: mol_type = other DNA
aaaacattaccactgggtct

SEQ ID NO: 11276 - DNA, 20 bp, synthetic construct
  misc_feature 1..20: note = chemically synthesized
  source 1..20: mol_type = other DNA
attaccactgggtctcagcc

SEQ ID NO: 11277 - DNA, 20 bp, synthetic construct
  misc_feature 1..20: note = chemically synthesized
  source 1..20: mol_type = other DNA
ccactgggtctcagcccagt

SEQ ID NO: 11278 - DNA, 20 bp, synthetic construct
  misc_feature 1..20: note = chemically synthesized
  source 1..20: mol_type = other DNA
tcagcccagttagtcctctg

SEQ ID NO: 11279 - DNA, 20 bp, synthetic construct
  misc_feature 1..20: note = chemically synthesized
  source 1..20: mol_type = other DNA
agtttcttcacccccaaccc

SEQ ID NO: 11280 - DNA, 20 bp, synthetic construct
  misc_feature 1..20: note = chemically synthesized
  source 1..20: mol_type = other DNA
ccaaccccagtatcttcaaa

SEQ ID NO: 11281 - DNA, 20 bp, synthetic construct
  misc_feature 1..20: note = chemically synthesized
  source 1..20: mol_type = other DNA
agctcacaccctgctgtgct

SEQ ID NO: 11282 - DNA, 20 bp, synthetic construct
  misc_feature 1..20: note = chemically synthesized
  source 1..20: mol_type = other DNA
agatcaatactccgttgtct

SEQ ID NO: 11283 - DNA, 20 bp, synthetic construct
  misc_feature 1..20: note = chemically synthesized
  source 1..20: mol_type = other DNA
tccgttgtctaagttgcctc

SEQ ID NO: 11284 - DNA, 20 bp, synthetic construct
  misc_feature 1..20: note = chemically synthesized
  source 1..20: mol_type = other DNA
tctaagttgcctcgagacta

SEQ ID NO: 11285 - DNA, 20 bp, synthetic construct
  misc_feature 1..20: note = chemically synthesized
  source 1..20: mol_type = other DNA
ctaagttgcctcgagactaa

SEQ ID NO: 11286 - DNA, 20 bp, synthetic construct
  misc_feature 1..20: note = chemically synthesized
  source 1..20: mol_type = other DNA
tgcctcgagactaaaggcaa

SEQ ID NO: 11287 - DNA, 20 bp, synthetic construct
  misc_feature 1..20: note = chemically synthesized
  source 1..20: mol_type = other DNA
gcctcgagactaaaggcaac

SEQ ID NO: 11288 - DNA, 20 bp, synthetic construct
  misc_feature 1..20: note = chemically synthesized
  source 1..20: mol_type = other DNA
cctcgagactaaaggcaaca

SEQ ID NO: 11289 - DNA, 20 bp, synthetic construct
  misc_feature 1..20: note = chemically synthesized
  source 1..20: mol_type = other DNA
aacagggctgaaacatctcc

SEQ ID NO: 11290 - DNA, 20 bp, synthetic construct
  misc_feature 1..20: note = chemically synthesized
  source 1..20: mol_type = other DNA
catctcctggactcaccttg

SEQ ID NO: 11291 - DNA, 20 bp, synthetic construct
  misc_feature 1..20: note = chemically synthesized
  source 1..20: mol_type = other DNA
tggactcaccttgaagttct

SEQ ID NO: 11292 - DNA, 20 bp, synthetic construct
  misc_feature 1..20: note = chemically synthesized
  source 1..20: mol_type = other DNA
ggactcaccttgaagttctc

SEQ ID NO: 11293 - DNA, 20 bp, synthetic construct
  misc_feature 1..20: note = chemically synthesized
  source 1..20: mol_type = other DNA
aagttctcaggatccacatg

SEQ ID NO: 11294 - DNA, 20 bp, synthetic construct
  misc_feature 1..20: note = chemically synthesized
  source 1..20: mol_type = other DNA
gatccacatgcagcttgtca

SEQ ID NO: 11295 - DNA, 20 bp, synthetic construct
  misc_feature 1..20: note = chemically synthesized
  source 1..20: mol_type = other DNA
acatgcagcttgtcacagtg

SEQ ID NO: 11296 - DNA, 20 bp, synthetic construct
  misc_feature 1..20: note = chemically synthesized
  source 1..20: mol_type = other DNA
ttgtcacagtgcagttcact

SEQ ID NO: 11297 - DNA, 20 bp, synthetic construct
  misc_feature 1..20: note = chemically synthesized
  source 1..20: mol_type = other DNA
cacagtgcagttcactcagc

SEQ ID NO: 11298 - DNA, 20 bp, synthetic construct
  misc_feature 1..20: note = chemically synthesized
  source 1..20: mol_type = other DNA
acagtgcagttcactcagct

SEQ ID NO: 11299 - DNA, 20 bp, synthetic construct
  misc_feature 1..20: note = chemically synthesized
  source 1..20: mol_type = other DNA
gcagttcactcagctgggca

SEQ ID NO: 11300 - DNA, 20 bp, synthetic construct
  misc_feature 1..20: note = chemically synthesized
  source 1..20: mol_type = other DNA
cagttcactcagctgggcaa

SEQ ID NO: 11301 - DNA, 20 bp, synthetic construct
  misc_feature 1..20: note = chemically synthesized
  source 1..20: mol_type = other DNA
agctgggcaaaggtgccctt

SEQ ID NO: 11302 - DNA, 20 bp, synthetic construct
  misc_feature 1..20: note = chemically synthesized
  source 1..20: mol_type = other DNA
aaggtgcccttgagatcatc

SEQ ID NO: 11303 - DNA, 20 bp, synthetic construct
  misc_feature 1..20: note = chemically synthesized
  source 1..20: mol_type = other DNA
aggtgcccttgagatcatcc

SEQ ID NO: 11304 - DNA, 20 bp, synthetic construct
  misc_feature 1..20: note = chemically synthesized
  source 1..20: mol_type = other DNA
gagatcatccaggtgctttg

SEQ ID NO: 11305 - DNA, 20 bp, synthetic construct
  misc_feature 1..20: note = chemically synthesized
  source 1..20: mol_type = other DNA
ggtgctttgtggcatctccc

SEQ ID NO: 11306 - DNA, 20 bp, synthetic construct
  misc_feature 1..20: note = chemically synthesized
  source 1..20: mol_type = other DNA
gtgctttgtggcatctccca

SEQ ID NO: 11307 - DNA, 20 bp, synthetic construct
  misc_feature 1..20: note = chemically synthesized
  source 1..20: mol_type = other DNA
ctttgtggcatctcccaagg

SEQ ID NO: 11308 - DNA, 20 bp, synthetic construct
  misc_feature 1..20: note = chemically synthesized
  source 1..20: mol_type = other DNA
gtggcatctcccaaggaagt

SEQ ID NO: 11309 - DNA, 20 bp, synthetic construct
  misc_feature 1..20: note = chemically synthesized
  source 1..20: mol_type = other DNA
cttgccatgtgccttgactt

SEQ ID NO: 11310 - DNA, 20 bp, synthetic construct
  misc_feature 1..20: note = chemically synthesized
  source 1..20: mol_type = other DNA
ttgccatgtgccttgacttt

SEQ ID NO: 11311 - DNA, 20 bp, synthetic construct
  misc_feature 1..20: note = chemically synthesized
  source 1..20: mol_type = other DNA
tgccatgtgccttgactttg

SEQ ID NO: 11312 - DNA, 20 bp, synthetic construct
  misc_feature 1..20: note = chemically synthesized
  source 1..20: mol_type = other DNA
gactttggggttgcccatga

SEQ ID NO: 11313 - DNA, 20 bp, synthetic construct
  misc_feature 1..20: note = chemically synthesized
  source 1..20: mol_type = other DNA
tttggggttgcccatgatgg

SEQ ID NO: 11314 - DNA, 20 bp, synthetic construct
  misc_feature 1..20: note = chemically synthesized
  source 1..20: mol_type = other DNA
tggggttgcccatgatggca

SEQ ID NO: 11315 - DNA, 20 bp, synthetic construct
  misc_feature 1..20: note = chemically synthesized
  source 1..20: mol_type = other DNA
ggggttgcccatgatggcag

SEQ ID NO: 11316 - DNA, 20 bp, synthetic construct
  misc_feature 1..20: note = chemically synthesized
  source 1..20: mol_type = other DNA
gttgcccatgatggcagagg

SEQ ID NO: 11317 - DNA, 20 bp, synthetic construct
  misc_feature 1..20: note = chemically synthesized
  source 1..20: mol_type = other DNA
tgcccatgatggcagaggca

SEQ ID NO: 11318 - DNA, 20 bp, synthetic construct
  misc_feature 1..20: note = chemically synthesized
  source 1..20: mol_type = other DNA
gcccatgatggcagaggcag

SEQ ID NO: 11319 - DNA, 20 bp, synthetic construct
  misc_feature 1..20: note = chemically synthesized
  source 1..20: mol_type = other DNA
atgatggcagaggcagagga

SEQ ID NO: 11320 - DNA, 20 bp, synthetic construct
  misc_feature 1..20: note = chemically synthesized
  source 1..20: mol_type = other DNA
tgatggcagaggcagaggac

SEQ ID NO: 11321 - DNA, 20 bp, synthetic construct
  misc_feature 1..20: note = chemically synthesized
  source 1..20: mol_type = other DNA
aggcagaggacaggttgcca

SEQ ID NO: 11322 - DNA, 20 bp, synthetic construct
  misc_feature 1..20: note = chemically synthesized
  source 1..20: mol_type = other DNA
acaggttgccaaagctgtca

SEQ ID NO: 11323 - DNA, 20 bp, synthetic construct
  misc_feature 1..20: note = chemically synthesized
  source 1..20: mol_type = other DNA
caaagctgtcaaagaacctc

SEQ ID NO: 11324 - DNA, 20 bp, synthetic construct
  misc_feature 1..20: note = chemically synthesized
  source 1..20: mol_type = other DNA
aaagctgtcaaagaacctct

SEQ ID NO: 11325 - DNA, 20 bp, synthetic construct
  misc_feature 1..20: note = chemically synthesized
  source 1..20: mol_type = other DNA
tcaaagaacctctgggtcca

SEQ ID NO: 11326 - DNA, 20 bp, synthetic construct
  misc_feature 1..20: note = chemically synthesized
  source 1..20: mol_type = other DNA
caaagaacctctgggtccat

SEQ ID NO: 11327 - DNA, 20 bp, synthetic construct
  misc_feature 1..20: note = chemically synthesized
  source 1..20: mol_type = other DNA
agaacctctgggtccatggg

SEQ ID NO: 11328 - DNA, 20 bp, synthetic construct
  misc_feature 1..20: note = chemically synthesized
  source 1..20: mol_type = other DNA
tgggtccatgggtagacaac

SEQ ID NO: 11329 - DNA, 20 bp, synthetic construct
  misc_feature 1..20: note = chemically synthesized
  source 1..20: mol_type = other DNA
gggtccatgggtagacaacc

SEQ ID NO: 11330 - DNA, 20 bp, synthetic construct
  misc_feature 1..20: note = chemically synthesized
  source 1..20: mol_type = other DNA
gtccatgggtagacaaccag

SEQ ID NO: 11331 - DNA, 20 bp, synthetic construct
  misc_feature 1..20: note = chemically synthesized
  source 1..20: mol_type = other DNA
gtagacaaccaggagcctgt

SEQ ID NO: 11332 - DNA, 20 bp, synthetic construct
  misc_feature 1..20: note = chemically synthesized
  source 1..20: mol_type = other DNA
caggagcctgtgagattgac

SEQ ID NO: 11333 - DNA, 20 bp, synthetic construct
  misc_feature 1..20: note = chemically synthesized
  source 1..20: mol_type = other DNA
gcctgtgagattgacaagaa

SEQ ID NO: 11334 - DNA, 20 bp, synthetic construct
  misc_feature 1..20: note = chemically synthesized
  source 1..20: mol_type = other DNA
gattgacaagaacagtttga

SEQ ID NO: 11335 - DNA, 20 bp, synthetic construct
  misc_feature 1..20: note = chemically synthesized
  source 1..20: mol_type = other DNA
gacaagaacagtttgacagt

SEQ ID NO: 11336 - DNA, 20 bp, synthetic construct
  misc_feature 1..20: note = chemically synthesized
  source 1..20: mol_type = other DNA
aagaacagtttgacagtcag

SEQ ID NO: 11337 - DNA, 20 bp, synthetic construct
  misc_feature 1..20: note = chemically synthesized
  source 1..20: mol_type = other DNA
agaacagtttgacagtcaga

SEQ ID NO: 11338 - DNA, 20 bp, synthetic construct
  misc_feature 1..20: note = chemically synthesized
  source 1..20: mol_type = other DNA
cagaaggtgccacaaatcct

SEQ ID NO: 11339 - DNA, 20 bp, synthetic construct
  misc_feature 1..20: note = chemically synthesized
  source 1..20: mol_type = other DNA
aaggtgccacaaatcctgag

SEQ ID NO: 11340 - DNA, 20 bp, synthetic construct
  misc_feature 1..20: note = chemically synthesized
  source 1..20: mol_type = other DNA
acaaatcctgagaagcgacc

SEQ ID NO: 11341 - DNA, 20 bp, synthetic construct
  misc_feature 1..20: note = chemically synthesized
  source 1..20: mol_type = other DNA
gaagcgacctggacttttgc

SEQ ID NO: 11342 - DNA, 20 bp, synthetic construct
  misc_feature 1..20: note = chemically synthesized
  source 1..20: mol_type = other DNA
aagcgacctggacttttgcc

SEQ ID NO: 11343 - DNA, 20 bp, synthetic construct
  misc_feature 1..20: note = chemically synthesized
  source 1..20: mol_type = other DNA
acctggacttttgccaggca

SEQ ID NO: 11344 - DNA, 20 bp, synthetic construct
  misc_feature 1..20: note = chemically synthesized
  source 1..20: mol_type = other DNA
cctggacttttgccaggcac

SEQ ID NO: 11345 - DNA, 20 bp, synthetic construct
  misc_feature 1..20: note = chemically synthesized
  source 1..20: mol_type = other DNA
ctggacttttgccaggcaca

SEQ ID NO: 11346 - DNA, 20 bp, synthetic construct
  misc_feature 1..20: note = chemically synthesized
  source 1..20: mol_type = other DNA
cttccttccctcccttgtcc

SEQ ID NO: 11347 - DNA, 20 bp, synthetic construct
  misc_feature 1..20: note = chemically synthesized
  source 1..20: mol_type = other DNA
ccctcccttgtcctggtcac

SEQ ID NO: 11348 - DNA, 20 bp, synthetic construct
  misc_feature 1..20: note = chemically synthesized
  source 1..20: mol_type = other DNA
ctcccttgtcctggtcacca

SEQ ID NO: 11349 - DNA, 20 bp, synthetic construct
  misc_feature 1..20: note = chemically synthesized
  source 1..20: mol_type = other DNA
gtcaccagagcctaccttcc

SEQ ID NO: 11350 - DNA, 20 bp, synthetic construct
  misc_feature 1..20: note = chemically synthesized
  source 1..20: mol_type = other DNA
tcaccagagcctaccttccc

SEQ ID NO: 11351 - DNA, 20 bp, synthetic construct
  misc_feature 1..20: note = chemically synthesized
  source 1..20: mol_type = other DNA
caccagagcctaccttccca

SEQ ID NO: 11352 - DNA, 20 bp, synthetic construct
  misc_feature 1..20: note = chemically synthesized
  source 1..20: mol_type = other DNA
ccttcccagggtttctcctc

SEQ ID NO: 11353 - DNA, 20 bp, synthetic construct
  misc_feature 1..20: note = chemically synthesized
  source 1..20: mol_type = other DNA
tccacattcaccttgcccca

SEQ ID NO: 11354 - DNA, 20 bp, synthetic construct
  misc_feature 1..20: note = chemically synthesized
  source 1..20: mol_type = other DNA
ccacattcaccttgccccac

SEQ ID NO: 11355 - DNA, 20 bp, synthetic construct
  misc_feature 1..20: note = chemically synthesized
  source 1..20: mol_type = other DNA
cttgccccacaggcttgtga

SEQ ID NO: 11356 - DNA, 20 bp, synthetic construct
  misc_feature 1..20: note = chemically synthesized
  source 1..20: mol_type = other DNA
gccccacaggcttgtgatag

SEQ ID NO: 11357 - DNA, 20 bp, synthetic construct
  misc_feature 1..20: note = chemically synthesized
  source 1..20: mol_type = other DNA
ctcctctgtgaaatgaccca

SEQ ID NO: 11358 - DNA, 20 bp, synthetic construct
  misc_feature 1..20: note = chemically synthesized
  source 1..20: mol_type = other DNA
gtgaaatgacccatggcgtc

SEQ ID NO: 11359 - DNA, 20 bp, synthetic construct
  misc_feature 1..20: note = chemically synthesized
  source 1..20: mol_type = other DNA
atgacccatggcgtctggac

SEQ ID NO: 11360 - DNA, 20 bp, synthetic construct
  misc_feature 1..20: note = chemically synthesized
  source 1..20: mol_type = other DNA
tgacccatggcgtctggact

SEQ ID NO: 11361 - DNA, 20 bp, synthetic construct
  misc_feature 1..20: note = chemically synthesized
  source 1..20: mol_type = other DNA
acccatggcgtctggactag

SEQ ID NO: 11362 - DNA, 20 bp, synthetic construct
  misc_feature 1..20: note = chemically synthesized
  source 1..20: mol_type = other DNA
taggagcttattgataacct

SEQ ID NO: 11363 - DNA, 20 bp, synthetic construct
  misc_feature 1..20: note = chemically synthesized
  source 1..20: mol_type = other DNA
attgataacctcagacgttc

SEQ ID NO: 11364 - DNA, 20 bp, synthetic construct
  misc_feature 1..20: note = chemically synthesized
  source 1..20: mol_type = other DNA
gataacctcagacgttccag

SEQ ID NO: 11365 - DNA, 20 bp, synthetic construct
  misc_feature 1..20: note = chemically synthesized
  source 1..20: mol_type = other DNA
acctcagacgttccagaagc

SEQ ID NO: 11366 - DNA, 20 bp, synthetic construct
  misc_feature 1..20: note = chemically synthesized
  source 1..20: mol_type = other DNA
acgttccagaagcgagtgtg

SEQ ID NO: 11367 - DNA, 20 bp, synthetic construct
  misc_feature 1..20: note = chemically synthesized
  source 1..20: mol_type = other DNA
gcgagtgtgtggaactgctg

SEQ ID NO: 11368 - DNA, 20 bp, synthetic construct
  misc_feature 1..20: note = chemically synthesized
  source 1..20: mol_type = other DNA
cgagtgtgtggaactgctga

SEQ ID NO: 11369 - DNA, 20 bp, synthetic construct
  misc_feature 1..20: note = chemically synthesized
  source 1..20: mol_type = other DNA
gagtgtgtggaactgctgaa

SEQ ID NO: 11370 - DNA, 20 bp, synthetic construct
  misc_feature 1..20: note = chemically synthesized
  source 1..20: mol_type = other DNA
ttccttttattcttcatccc

SEQ ID NO: 11371 - DNA, 20 bp, synthetic construct
  misc_feature 1..20: note = chemically synthesized
  source 1..20: mol_type = other DNA
ttttattcttcatccctagc

SEQ ID NO: 11372 - DNA, 20 bp, synthetic construct
  misc_feature 1..20: note = chemically synthesized
  source 1..20: mol_type = other DNA
cttcatccctagccagccgc

SEQ ID NO: 11373 - DNA, 20 bp, synthetic construct
  misc_feature 1..20: note = chemically synthesized
  source 1..20: mol_type = other DNA
cctagccagccgccggcccc

SEQ ID NO: 11374 - DNA, 20 bp, synthetic construct
  misc_feature 1..20: note = chemically synthesized
  source 1..20: mol_type = other DNA
ccgccggcccctggcctcac

SEQ ID NO: 11375 - DNA, 20 bp, synthetic construct
  misc_feature 1..20: note = chemically synthesized
  source 1..20: mol_type = other DNA
ctggcctcactggatactct

SEQ ID NO: 11376 - DNA, 20 bp, synthetic construct
  misc_feature 1..20: note = chemically synthesized
  source 1..20: mol_type = other DNA
actggatactctaagactat

SEQ ID NO: 11377 - DNA, 20 bp, synthetic construct
  misc_feature 1..20: note = chemically synthesized
  source 1..20: mol_type = other DNA
atactctaagactattggtc

SEQ ID NO: 11378 - DNA, 20 bp, synthetic construct
  misc_feature 1..20: note = chemically synthesized
  source 1..20: mol_type = other DNA
ttggtcaagtttgccttgtc

SEQ ID NO: 11379 - DNA, 20 bp, synthetic construct
  misc_feature 1..20: note = chemically synthesized
  source 1..20: mol_type = other DNA
tggtcaagtttgccttgtca

SEQ ID NO: 11380 - DNA, 20 bp, synthetic construct
  misc_feature 1..20: note = chemically synthesized
  source 1..20: mol_type = other DNA
gtttgccttgtcaaggctat

SEQ ID NO: 11381 - DNA, 20 bp, synthetic construct
  misc_feature 1..20: note = chemically synthesized
  source 1..20: mol_type = other DNA
ccttgtcaaggctattggtc

SEQ ID NO: 11382 - DNA, 20 bp, synthetic construct
  misc_feature 1..20: note = chemically synthesized
  source 1..20: mol_type = other DNA
cttgtcaaggctattggtca

SEQ ID NO: 11383 - DNA, 20 bp, synthetic construct
  misc_feature 1..20: note = chemically synthesized
  source 1..20: mol_type = other DNA
tcaaggctattggtcaaggc

SEQ ID NO: 11384 - DNA, 20 bp, synthetic construct
  misc_feature 1..20: note = chemically synthesized
  source 1..20: mol_type = other DNA
caaggctattggtcaaggca

SEQ ID NO: 11385 - DNA, 20 bp, synthetic construct
  misc_feature 1..20: note = chemically synthesized
  source 1..20: mol_type = other DNA
gctattggtcaaggcaaggc

SEQ ID NO: 11386 - DNA, 20 bp, synthetic construct
  misc_feature 1..20: note = chemically synthesized
  source 1..20: mol_type = other DNA
aggcaaggctggccaaccca

SEQ ID NO: 11387 - DNA, 20 bp, synthetic construct
  misc_feature 1..20: note = chemically synthesized
  source 1..20: mol_type = other DNA
ggcaaggctggccaacccat

SEQ ID NO: 11388 - DNA, 20 bp, synthetic construct
  misc_feature 1..20: note = chemically synthesized
  source 1..20: mol_type = other DNA
aaggctggccaacccatggg

SEQ ID NO: 11389 - DNA, 20 bp, synthetic construct
  misc_feature 1..20: note = chemically synthesized
  source 1..20: mol_type = other DNA
ggctggccaacccatgggtg

SEQ ID NO: 11390 - DNA, 20 bp, synthetic construct
  misc_feature 1..20: note = chemically synthesized
  source 1..20: mol_type = other DNA
gccaacccatgggtggagtt

SEQ ID NO: 11391 - DNA, 20 bp, synthetic construct
  misc_feature 1..20: note = chemically synthesized
  source 1..20: mol_type = other DNA
acccatgggtggagtttagc

SEQ ID NO: 11392 - DNA, 20 bp, synthetic construct
  misc_feature 1..20: note = chemically synthesized
  source 1..20: mol_type = other DNA
cccatgggtggagtttagcc

SEQ ID NO: 11393 - DNA, 20 bp, synthetic construct
  misc_feature 1..20: note = chemically synthesized
  source 1..20: mol_type = other DNA
ccatgggtggagtttagcca

SEQ ID NO: 11394 - DNA, 20 bp, synthetic construct
  misc_feature 1..20: note = chemically synthesized
  source 1..20: mol_type = other DNA
agtttagccagggaccgttt

SEQ ID NO: 11395 - DNA, 20 bp, synthetic construct
  misc_feature 1..20: note = chemically synthesized
  source 1..20: mol_type = other DNA
tagccagggaccgtttcaga

SEQ ID NO: 11396 - DNA, 20 bp, synthetic construct
  misc_feature 1..20: note = chemically synthesized
  source 1..20: mol_type = other DNA
ttcagacagatatttgcatt

SEQ ID NO: 11397 - DNA, 20 bp, synthetic construct
  misc_feature 1..20: note = chemically synthesized
  source 1..20: mol_type = other DNA
gacagatatttgcattgaga

SEQ ID NO: 11398 - DNA, 20 bp, synthetic construct
  misc_feature 1..20: note = chemically synthesized
  source 1..20: mol_type = other DNA
atatttgcattgagatagtg

SEQ ID NO: 11399 - DNA, 20 bp, synthetic construct
  misc_feature 1..20: note = chemically synthesized
  source 1..20: mol_type = other DNA
tatttgcattgagatagtgt

SEQ ID NO: 11400 - DNA, 20 bp, synthetic construct
  misc_feature 1..20: note = chemically synthesized
  source 1..20: mol_type = other DNA
atttgcattgagatagtgtg

SEQ ID NO: 11401 - DNA, 20 bp, synthetic construct
  misc_feature 1..20: note = chemically synthesized
  source 1..20: mol_type = other DNA
tgcattgagatagtgtgggg

SEQ ID NO: 11402 - DNA, 20 bp, synthetic construct
  misc_feature 1..20: note = chemically synthesized
  source 1..20: mol_type = other DNA
gcattgagatagtgtgggga

SEQ ID NO: 11403 - DNA, 20 bp, synthetic construct
  misc_feature 1..20: note = chemically synthesized
  source 1..20: mol_type = other DNA
cattgagatagtgtggggaa

SEQ ID NO: 11404 - DNA, 20 bp, synthetic construct
  misc_feature 1..20: note = chemically synthesized
  source 1..20: mol_type = other DNA
attgagatagtgtggggaag

SEQ ID NO: 11405 - DNA, 20 bp, synthetic construct
  misc_feature 1..20: note = chemically synthesized
  source 1..20: mol_type = other DNA
agtgtggggaaggggccccc

SEQ ID NO: 11406 - DNA, 20 bp, synthetic construct
  misc_feature 1..20: note = chemically synthesized
  source 1..20: mol_type = other DNA
tgtggggaaggggcccccaa

SEQ ID NO: 11407 - DNA, 20 bp, synthetic construct
  misc_feature 1..20: note = chemically synthesized
  source 1..20: mol_type = other DNA
gtggggaaggggcccccaag

SEQ ID NO: 11408 - DNA, 20 bp, synthetic construct
  misc_feature 1..20: note = chemically synthesized
  source 1..20: mol_type = other DNA
gatactgctaatttttttta

SEQ ID NO: 11409 - DNA, 20 bp, synthetic construct
  misc_feature 1..20: note = chemically synthesized
  source 1..20: mol_type = other DNA
gcctttgccttgttccgatt

SEQ ID NO: 11410 - DNA, 20 bp, synthetic construct
  misc_feature 1..20: note = chemically synthesized
  source 1..20: mol_type = other DNA
ttgttccgattcagtcattc

SEQ ID NO: 11411 - DNA, 20 bp, synthetic construct
  misc_feature 1..20: note = chemically synthesized
  source 1..20: mol_type = other DNA
ctctaatttattcttccctt

SEQ ID NO: 11412 - DNA, 20 bp, synthetic construct
  misc_feature 1..20: note = chemically synthesized
  source 1..20: mol_type = other DNA
aatttattcttccctttagc

SEQ ID NO: 11413 - DNA, 20 bp, synthetic construct
  misc_feature 1..20: note = chemically synthesized
  source 1..20: mol_type = other DNA
ctagtttccttctcccatca

SEQ ID NO: 11414 - DNA, 20 bp, synthetic construct
  misc_feature 1..20: note = chemically synthesized
  source 1..20: mol_type = other DNA
agtttccttctcccatcata

SEQ ID NO: 11415 - DNA, 20 bp, synthetic construct
  misc_feature 1..20: note = chemically synthesized
  source 1..20: mol_type = other DNA
gtttccttctcccatcatag

SEQ ID NO: 11416 - DNA, 20 bp, synthetic construct
  misc_feature 1..20: note = chemically synthesized
  source 1..20: mol_type = other DNA
tctcccatcatagaggatac

SEQ ID NO: 11417 - DNA, 20 bp, synthetic construct
  misc_feature 1..20: note = chemically synthesized
  source 1..20: mol_type = other DNA
ctcccatcatagaggatacc

SEQ ID NO: 11418 - DNA, 20 bp, synthetic construct
  misc_feature 1..20: note = chemically synthesized
  source 1..20: mol_type = other DNA
gataccaggacttcttttgt

SEQ ID NO: 11419 - DNA, 20 bp, synthetic construct
  misc_feature 1..20: note = chemically synthesized
  source 1..20: mol_type = other DNA
gttttttaccttcttgtctc

SEQ ID NO: 11420 - DNA, 20 bp, synthetic construct
  misc_feature 1..20: note = chemically synthesized
  source 1..20: mol_type = other DNA
taccttcttgtctctagctc

SEQ ID NO: 11421 - DNA, 20 bp, synthetic construct
  misc_feature 1..20: note = chemically synthesized
  source 1..20: mol_type = other DNA
ttcttgtctctagctccagt

SEQ ID NO: 11422 - DNA, 20 bp, synthetic construct
  misc_feature 1..20: note = chemically synthesized
  source 1..20: mol_type = other DNA
tcttgtctctagctccagtg

SEQ ID NO: 11423 - DNA, 20 bp, synthetic construct
  misc_feature 1..20: note = chemically synthesized
  source 1..20: mol_type = other DNA
tctagctccagtgaggcctg

SEQ ID NO: 11424 - DNA, 20 bp, synthetic construct
  misc_feature 1..20: note = chemically synthesized
  source 1..20: mol_type = other DNA
ccagtgaggcctgtagttta

SEQ ID NO: 11425 - DNA, 20 bp, synthetic construct
  misc_feature 1..20: note = chemically synthesized
  source 1..20: mol_type = other DNA
aggcctgtagtttaaagcta

SEQ ID NO: 11426 - DNA, 20 bp, synthetic construct
  misc_feature 1..20: note = chemically synthesized
  source 1..20: mol_type = other DNA
agcatgtaccaatttttgaa

SEQ ID NO: 11427 - DNA, 20 bp, synthetic construct
  misc_feature 1..20: note = chemically synthesized
  source 1..20: mol_type = other DNA
gtaccaatttttgaaaagtt

SEQ ID NO: 11428 - DNA, 20 bp, synthetic construct
  misc_feature 1..20: note = chemically synthesized
  source 1..20: mol_type = other DNA
taccaatttttgaaaagttc

SEQ ID NO: 11429 - DNA, 20 bp, synthetic construct
  misc_feature 1..20: note = chemically synthesized
  source 1..20: mol_type = other DNA
accaatttttgaaaagttca

SEQ ID NO: 11430 - DNA, 20 bp, synthetic construct
  misc_feature 1..20: note = chemically synthesized
  source 1..20: mol_type = other DNA
agggattgtgaaatgtgttt

SEQ ID NO: 11431 - DNA, 20 bp, synthetic construct
  misc_feature 1..20: note = chemically synthesized
  source 1..20: mol_type = other DNA
gggattgtgaaatgtgtttt

SEQ ID NO: 11432 - DNA, 20 bp, synthetic construct
  misc_feature 1..20: note = chemically synthesized
  source 1..20: mol_type = other DNA
tgtgaaatgtgttttaggca

SEQ ID NO: 11433 - DNA, 20 bp, synthetic construct
  misc_feature 1..20: note = chemically synthesized
  source 1..20: mol_type = other DNA
gtgaaatgtgttttaggcat

SEQ ID NO: 11434 - DNA, 20 bp, synthetic construct
  misc_feature 1..20: note = chemically synthesized
  source 1..20: mol_type = other DNA
atgtgttttaggcataggtc

SEQ ID NO: 11435 - DNA, 20 bp, synthetic construct
  misc_feature 1..20: note = chemically synthesized
  source 1..20: mol_type = other DNA
tgtgttttaggcataggtcc

SEQ ID NO: 11436 - DNA, 20 bp, synthetic construct
  misc_feature 1..20: note = chemically synthesized
  source 1..20: mol_type = other DNA
cataggtccaggatttttga

SEQ ID NO: 11437 - DNA, 20 bp, synthetic construct
  misc_feature 1..20: note = chemically synthesized
  source 1..20: mol_type = other DNA
ataggtccaggatttttgac

SEQ ID NO: 11438 - DNA, 20 bp, synthetic construct
  misc_feature 1..20: note = chemically synthesized
  source 1..20: mol_type = other DNA
atttttgacgggacaaatct

SEQ ID NO: 11439 - DNA, 20 bp, synthetic construct
  misc_feature 1..20: note = chemically synthesized
  source 1..20: mol_type = other DNA
ggacaaatcttagtctcttt

SEQ ID NO: 11440 - DNA, 20 bp, synthetic construct
  misc_feature 1..20: note = chemically synthesized
  source 1..20: mol_type = other DNA
aaatcttagtctctttcagt

SEQ ID NO: 11441 - DNA, 20 bp, synthetic construct
  misc_feature 1..20: note = chemically synthesized
  source 1..20: mol_type = other DNA
tcttagtctctttcagttag

SEQ ID NO: 11442 - DNA, 20 bp, synthetic construct
  misc_feature 1..20: note = chemically synthesized
  source 1..20: mol_type = other DNA
tagtctctttcagttagcag

SEQ ID NO: 11443 - DNA, 20 bp, synthetic construct
  misc_feature 1..20: note = chemically synthesized
  source 1..20: mol_type = other DNA
ttcagttagcagtggtttct

SEQ ID NO: 11444 - DNA, 20 bp, synthetic construct
  misc_feature 1..20: note = chemically synthesized
  source 1..20: mol_type = other DNA
tcagttagcagtggtttcta

SEQ ID NO: 11445 - DNA, 20 bp, synthetic construct
  misc_feature 1..20: note = chemically synthesized
  source 1..20: mol_type = other DNA
agcagtggtttctaaggaaa

SEQ ID NO: 11446 - DNA, 20 bp, synthetic construct
  misc_feature 1..20: note = chemically synthesized
  source 1..20: mol_type = other DNA
attatctcttaatttctcaa

SEQ ID NO: 11447 - DNA, 20 bp, synthetic construct
  misc_feature 1..20: note = chemically synthesized
  source 1..20: mol_type = other DNA
ctcttaatttctcaatagtg

SEQ ID NO: 11448 - DNA, 20 bp, synthetic construct
  misc_feature 1..20: note = chemically synthesized
  source 1..20: mol_type = other DNA
cagtgaaaacaatttctata

SEQ ID NO: 11449 - DNA, 20 bp, synthetic construct
  misc_feature 1..20: note = chemically synthesized
  source 1..20: mol_type = other DNA
aaacaatttctataaagcca

SEQ ID NO: 11450 - DNA, 20 bp, synthetic construct
  misc_feature 1..20: note = chemically synthesized
  source 1..20: mol_type = other DNA
tttctataaagccacagttt

SEQ ID NO: 11451 - DNA, 20 bp, synthetic construct
  misc_feature 1..20: note = chemically synthesized
  source 1..20: mol_type = other DNA
ataaagccacagtttcagcg

SEQ ID NO: 11452 - DNA, 20 bp, synthetic construct
  misc_feature 1..20: note = chemically synthesized
  source 1..20: mol_type = other DNA
ccacagtttcagcgcagtaa

SEQ ID NO: 11453 - DNA, 20 bp, synthetic construct
  misc_feature 1..20: note = chemically synthesized
  source 1..20: mol_type = other DNA
gtttcagcgcagtaatagat

SEQ ID NO: 11454 - DNA, 20 bp, synthetic construct
  misc_feature 1..20: note = chemically synthesized
  source 1..20: mol_type = other DNA
agattagtgttacataatat

SEQ ID NO: 11455 - DNA, 20 bp, synthetic construct
  misc_feature 1..20: note = chemically synthesized
  source 1..20: mol_type = other DNA
aaatcatgactgtttcatct

SEQ ID NO: 11456 - DNA, 20 bp, synthetic construct
  misc_feature 1..20: note = chemically synthesized
  source 1..20: mol_type = other DNA
aaaatatttgattccatatt

SEQ ID NO: 11457 - DNA, 20 bp, synthetic construct
  misc_feature 1..20: note = chemically synthesized
  source 1..20: mol_type = other DNA
aaatatttgattccatattc

SEQ ID NO: 11458 - DNA, 20 bp, synthetic construct
  misc_feature 1..20: note = chemically synthesized
  source 1..20: mol_type = other DNA
tcaggtatgtatgtatacac

SEQ ID NO: 11459 - DNA, 20 bp, synthetic construct
  misc_feature 1..20: note = chemically synthesized
  source 1..20: mol_type = other DNA
agatgatgtgtatttaccac

SEQ ID NO: 11460 - DNA, 20 bp, synthetic construct
  misc_feature 1..20: note = chemically synthesized
  source 1..20: mol_type = other DNA
atgtgtatttaccactggat

SEQ ID NO: 11461 - DNA, 20 bp, synthetic construct
  misc_feature 1..20: note = chemically synthesized
  source 1..20: mol_type = other DNA
cactggataagtgtgtgtgc

SEQ ID NO: 11462 - DNA, 20 bp, synthetic construct
  misc_feature 1..20: note = chemically synthesized
  source 1..20: mol_type = other DNA
gtgtgtgctggctgatgacc

SEQ ID NO: 11463 - DNA, 20 bp, synthetic construct
  misc_feature 1..20: note = chemically synthesized
  source 1..20: mol_type = other DNA
tgtgtgctggctgatgaccc

SEQ ID NO: 11464 - DNA, 20 bp, synthetic construct
  misc_feature 1..20: note = chemically synthesized
  source 1..20: mol_type = other DNA
gtgtgctggctgatgaccca

SEQ ID NO: 11465 - DNA, 20 bp, synthetic construct
  misc_feature 1..20: note = chemically synthesized
  source 1..20: mol_type = other DNA
tggctgatgacccagggttt

SEQ ID NO: 11466 - DNA, 20 bp, synthetic construct
  misc_feature 1..20: note = chemically synthesized
  source 1..20: mol_type = other DNA
gatgacccagggttttggcg

SEQ ID NO: 11467 - DNA, 20 bp, synthetic construct
  misc_feature 1..20: note = chemically synthesized
  source 1..20: mol_type = other DNA
tggcgtagctcttctatgct

SEQ ID NO: 11468 - DNA, 20 bp, synthetic construct
  misc_feature 1..20: note = chemically synthesized
  source 1..20: mol_type = other DNA
tagctcttctatgctcagta

SEQ ID NO: 11469 - DNA, 20 bp, synthetic construct
  misc_feature 1..20: note = chemically synthesized
  source 1..20: mol_type = other DNA
tctatgctcagtaaagatga

SEQ ID NO: 11470 - DNA, 20 bp, synthetic construct
  misc_feature 1..20: note = chemically synthesized
  source 1..20: mol_type = other DNA
atgctcagtaaagatgatgg

SEQ ID NO: 11471 - DNA, 20 bp, synthetic construct
  misc_feature 1..20: note = chemically synthesized
  source 1..20: mol_type = other DNA
gatgatggtagaatgttctt

SEQ ID NO: 11472 - DNA, 20 bp, synthetic construct
  misc_feature 1..20: note = chemically synthesized
  source 1..20: mol_type = other DNA
gatggtagaatgttctttgg

SEQ ID NO: 11473 - DNA, 20 bp, synthetic construct
  misc_feature 1..20: note = chemically synthesized
  source 1..20: mol_type = other DNA
atggtagaatgttctttggc

SEQ ID NO: 11474 - DNA, 20 bp, synthetic construct
  misc_feature 1..20: note = chemically synthesized
  source 1..20: mol_type = other DNA
atgttctttggcaggtactg

SEQ ID NO: 11475 - DNA, 20 bp, synthetic construct
  misc_feature 1..20: note = chemically synthesized
  source 1..20: mol_type = other DNA
ctttggcaggtactgtggat

SEQ ID NO: 11476 - DNA, 20 bp, synthetic construct
  misc_feature 1..20: note = chemically synthesized
  source 1..20: mol_type = other DNA
taattatcttgtataaatgc

SEQ ID NO: 11477 - DNA, 20 bp, synthetic construct
  misc_feature 1..20: note = chemically synthesized
  source 1..20: mol_type = other DNA
aattatcttgtataaatgct

SEQ ID NO: 11478 - DNA, 20 bp, synthetic construct
  misc_feature 1..20: note = chemically synthesized
  source 1..20: mol_type = other DNA
taaatgctaggttcacttct

SEQ ID NO: 11479 - DNA, 20 bp, synthetic construct
  misc_feature 1..20: note = chemically synthesized
  source 1..20: mol_type = other DNA
aaatgctaggttcacttctc

SEQ ID NO: 11480 - DNA, 20 bp, synthetic construct
  misc_feature 1..20: note = chemically synthesized
  source 1..20: mol_type = other DNA
aatgctaggttcacttctca

SEQ ID NO: 11481 - DNA, 20 bp, synthetic construct
  misc_feature 1..20: note = chemically synthesized
  source 1..20: mol_type = other DNA
ttctcagggaatcttactct

SEQ ID NO: 11482 - DNA, 20 bp, synthetic construct
  misc_feature 1..20: note = chemically synthesized
  source 1..20: mol_type = other DNA
ggaatcttactctaagacat

SEQ ID NO: 11483 - DNA, 20 bp, synthetic construct
  misc_feature 1..20: note = chemically synthesized
  source 1..20: mol_type = other DNA
acataagatgtgcgtgtaca

SEQ ID NO: 11484 - DNA, 20 bp, synthetic construct
  misc_feature 1..20: note = chemically synthesized
  source 1..20: mol_type = other DNA
gtacatggaaaacaactcta

SEQ ID NO: 11485 - DNA, 20 bp, synthetic construct
  misc_feature 1..20: note = chemically synthesized
  source 1..20: mol_type = other DNA
acatggaaaacaactctaaa

SEQ ID NO: 11486 - DNA, 20 bp, synthetic construct
  misc_feature 1..20: note = chemically synthesized
  source 1..20: mol_type = other DNA
catggaaaacaactctaaag

SEQ ID NO: 11487 - DNA, 20 bp, synthetic construct
  misc_feature 1..20: note = chemically synthesized
  source 1..20: mol_type = other DNA
gaaaacaactctaaagaggc

SEQ ID NO: 11488 - DNA, 20 bp, synthetic construct
  misc_feature 1..20: note = chemically synthesized
  source 1..20: mol_type = other DNA
aaaacaactctaaagaggca

SEQ ID NO: 11489 - DNA, 20 bp, synthetic construct
  misc_feature 1..20: note = chemically synthesized
  source 1..20: mol_type = other DNA
aaacaactctaaagaggcaa

SEQ ID NO: 11490 - DNA, 20 bp, synthetic construct
  misc_feature 1..20: note = chemically synthesized
  source 1..20: mol_type = other DNA
gggttgtttttattgactaa

SEQ ID NO: 11491 - DNA, 20 bp, synthetic construct
  misc_feature 1..20: note = chemically synthesized
  source 1..20: mol_type = other DNA
cactattataactcgaatat

SEQ ID NO: 11492 - DNA, 20 bp, synthetic construct
  misc_feature 1..20: note = chemically synthesized
  source 1..20: mol_type = other DNA
actcgaatattagtgtactt

SEQ ID NO: 11493 - DNA, 20 bp, synthetic construct
  misc_feature 1..20: note = chemically synthesized
  source 1..20: mol_type = other DNA
gaatattagtgtactttaga

SEQ ID NO: 11494 - DNA, 20 bp, synthetic construct
  misc_feature 1..20: note = chemically synthesized
  source 1..20: mol_type = other DNA
agacagctttatttctaaca

SEQ ID NO: 11495 - DNA, 20 bp, synthetic construct
  misc_feature 1..20: note = chemically synthesized
  source 1..20: mol_type = other DNA
cagtgctgtttctgacatat

SEQ ID NO: 11496 - DNA, 20 bp, synthetic construct
  misc_feature 1..20: note = chemically synthesized
  source 1..20: mol_type = other DNA
ctgacatattggaccattaa

SEQ ID NO: 11497 - DNA, 20 bp, synthetic construct
  misc_feature 1..20: note = chemically synthesized
  source 1..20: mol_type = other DNA
tgacatattggaccattaac

SEQ ID NO: 11498 - DNA, 20 bp, synthetic construct
  misc_feature 1..20: note = chemically synthesized
  source 1..20: mol_type = other DNA
gacatattggaccattaaca

SEQ ID NO: 11499 - DNA, 20 bp, synthetic construct
  misc_feature 1..20: note = chemically synthesized
  source 1..20: mol_type = other DNA
atattggaccattaacaggg

SEQ ID NO: 11500 - DNA, 20 bp, synthetic construct
  misc_feature 1..20: note = chemically synthesized
  source 1..20: mol_type = other DNA
tattggaccattaacagggt

SEQ ID NO: 11501 - DNA, 20 bp, synthetic construct
  misc_feature 1..20: note = chemically synthesized
  source 1..20: mol_type = other DNA
tggaccattaacagggtagg

SEQ ID NO: 11502 - DNA, 20 bp, synthetic construct
  misc_feature 1..20: note = chemically synthesized
  source 1..20: mol_type = other DNA
aacagggtaggaagtattta

SEQ ID NO: 11503 - DNA, 20 bp, synthetic construct
  misc_feature 1..20: note = chemically synthesized
  source 1..20: mol_type = other DNA
agggtaggaagtatttatgg

SEQ ID NO: 11504 - DNA, 20 bp, synthetic construct
  misc_feature 1..20: note = chemically synthesized
  source 1..20: mol_type = other DNA
aagtatttatggtggttttt

SEQ ID NO: 11505 - DNA, 20 bp, synthetic construct
  misc_feature 1..20: note = chemically synthesized
  source 1..20: mol_type = other DNA
ttttggttctgttttgcttt

SEQ ID NO: 11506 - DNA, 20 bp, synthetic construct
  misc_feature 1..20: note = chemically synthesized
  source 1..20: mol_type = other DNA
ggttctgttttgcttttggt

SEQ ID NO: 11507 - DNA, 20 bp, synthetic construct
  misc_feature 1..20: note = chemically synthesized
  source 1..20: mol_type = other DNA
ttgtttttgtttttctctga

SEQ ID NO: 11508 - DNA, 20 bp, synthetic construct
  misc_feature 1..20: note = chemically synthesized
  source 1..20: mol_type = other DNA
tccatgatctctaaccttgc

SEQ ID NO: 11509 - DNA, 20 bp, synthetic construct
  misc_feature 1..20: note = chemically synthesized
  source 1..20: mol_type = other DNA
accttgctagattataatgc

SEQ ID NO: 11510 - DNA, 20 bp, synthetic construct
  misc_feature 1..20: note = chemically synthesized
  source 1..20: mol_type = other DNA
ttgctagattataatgccag

SEQ ID NO: 11511 - DNA, 20 bp, synthetic construct
  misc_feature 1..20: note = chemically synthesized
  source 1..20: mol_type = other DNA
gattataatgccagaagctc

SEQ ID NO: 11512 - DNA, 20 bp, synthetic construct
  misc_feature 1..20: note = chemically synthesized
  source 1..20: mol_type = other DNA
tgccagaagctctggaattc

SEQ ID NO: 11513 - DNA, 20 bp, synthetic construct
  misc_feature 1..20: note = chemically synthesized
  source 1..20: mol_type = other DNA
gctctggaattctggcttat

SEQ ID NO: 11514 - DNA, 20 bp, synthetic construct
  misc_feature 1..20: note = chemically synthesized
  source 1..20: mol_type = other DNA
tctggaattctggcttatcg

SEQ ID NO: 11515 - DNA, 20 bp, synthetic construct
  misc_feature 1..20: note = chemically synthesized
  source 1..20: mol_type = other DNA
ctggaattctggcttatcgg

SEQ ID NO: 11516 - DNA, 20 bp, synthetic construct
  misc_feature 1..20: note = chemically synthesized
  source 1..20: mol_type = other DNA
aattctggcttatcggaggc

SEQ ID NO: 11517 - DNA, 20 bp, synthetic construct
  misc_feature 1..20: note = chemically synthesized
  source 1..20: mol_type = other DNA
ggcaagctgtatcttcaaat

SEQ ID NO: 11518 - DNA, 20 bp, synthetic construct
  misc_feature 1..20: note = chemically synthesized
  source 1..20: mol_type = other DNA
ttcaaattagtttatcccct

SEQ ID NO: 11519 - DNA, 20 bp, synthetic construct
  misc_feature 1..20: note = chemically synthesized
  source 1..20: mol_type = other DNA
tagtttatcccctaagctat

SEQ ID NO: 11520 - DNA, 20 bp, synthetic construct
  misc_feature 1..20: note = chemically synthesized
  source 1..20: mol_type = other DNA
agtttatcccctaagctatc

SEQ ID NO: 11521 - DNA, 20 bp, synthetic construct
  misc_feature 1..20: note = chemically synthesized
  source 1..20: mol_type = other DNA
gattgaaattattataatat

SEQ ID NO: 11522 - DNA, 20 bp, synthetic construct
  misc_feature 1..20: note = chemically synthesized
  source 1..20: mol_type = other DNA
atccttcatgatcctgtgta

SEQ ID NO: 11523 - DNA, 20 bp, synthetic construct
  misc_feature 1..20: note = chemically synthesized
  source 1..20: mol_type = other DNA
cttatatctgctcattgata

SEQ ID NO: 11524 - DNA, 20 bp, synthetic construct
  misc_feature 1..20: note = chemically synthesized
  source 1..20: mol_type = other DNA
tatctgctcattgatacaga

SEQ ID NO: 11525 - DNA, 20 bp, synthetic construct
  misc_feature 1..20: note = chemically synthesized
  source 1..20: mol_type = other DNA
tcattgatacagatggctaa

SEQ ID NO: 11526 - DNA, 20 bp, synthetic construct
  misc_feature 1..20: note = chemically synthesized
  source 1..20: mol_type = other DNA
cattgatacagatggctaaa

SEQ ID NO: 11527 - DNA, 20 bp, synthetic construct
  misc_feature 1..20: note = chemically synthesized
  source 1..20: mol_type = other DNA
gatacagatggctaaaaggc

SEQ ID NO: 11528 - DNA, 20 bp, synthetic construct
  misc_feature 1..20: note = chemically synthesized
  source 1..20: mol_type = other DNA
cagatggctaaaaggccaga

SEQ ID NO: 11529 - DNA, 20 bp, synthetic construct
  misc_feature 1..20: note = chemically synthesized
  source 1..20: mol_type = other DNA
cacacatttacccatgtaac

SEQ ID NO: 11530 - DNA, 20 bp, synthetic construct
  misc_feature 1..20: note = chemically synthesized
  source 1..20: mol_type = other DNA
atgaaatgaaataaaattaa

SEQ ID NO: 11531 - DNA, 20 bp, synthetic construct
  misc_feature 1..20: note = chemically synthesized
  source 1..20: mol_type = other DNA
tgaaatgaaataaaattaaa

SEQ ID NO: 11532 - DNA, 20 bp, synthetic construct
  misc_feature 1..20: note = chemically synthesized
  source 1..20: mol_type = other DNA
ttaaaaggaaaaaaatgcca

SEQ ID NO: 11533 - DNA, 20 bp, synthetic construct
  misc_feature 1..20: note = chemically synthesized
  source 1..20: mol_type = other DNA
aaaaaatgccatggcaacat

SEQ ID NO: 11534 - DNA, 20 bp, synthetic construct
  misc_feature 1..20: note = chemically synthesized
  source 1..20: mol_type = other DNA
aaaaatgccatggcaacatc

SEQ ID NO: 11535 - DNA, 20 bp, synthetic construct
  misc_feature 1..20: note = chemically synthesized
  source 1..20: mol_type = other DNA
aatgccatggcaacatcagg

SEQ ID NO: 11536 - DNA, 20 bp, synthetic construct
  misc_feature 1..20: note = chemically synthesized
  source 1..20: mol_type = other DNA
catcaggaagttatctttta

SEQ ID NO: 11537 - DNA, 20 bp, synthetic construct
  misc_feature 1..20: note = chemically synthesized
  source 1..20: mol_type = other DNA
tatcttttatggtctaaaaa

SEQ ID NO: 11538 - DNA, 20 bp, synthetic construct
  misc_feature 1..20: note = chemically synthesized
  source 1..20: mol_type = other DNA
atcttttatggtctaaaaat

SEQ ID NO: 11539 - DNA, 20 bp, synthetic construct
  misc_feature 1..20: note = chemically synthesized
  source 1..20: mol_type = other DNA
ttttatggtctaaaaatggg

SEQ ID NO: 11540 - DNA, 20 bp, synthetic construct
  misc_feature 1..20: note = chemically synthesized
  source 1..20: mol_type = other DNA
taaataatctaccccttgtt

SEQ ID NO: 11541 - DNA, 20 bp, synthetic construct
  misc_feature 1..20: note = chemically synthesized
  source 1..20: mol_type = other DNA
tgaaaaataacaataaaaat

SEQ ID NO: 11542 - DNA, 20 bp, synthetic construct
  misc_feature 1..20: note = chemically synthesized
  source 1..20: mol_type = other DNA
taacaataaaaatcggcaac

SEQ ID NO: 11543 - DNA, 20 bp, synthetic construct
  misc_feature 1..20: note = chemically synthesized
  source 1..20: mol_type = other DNA
caataaaaatcggcaaccag

SEQ ID NO: 11544 - DNA, 20 bp, synthetic construct
  misc_feature 1..20: note = chemically synthesized
  source 1..20: mol_type = other DNA
ttgcgtctactctgcctatg

SEQ ID NO: 11545 - DNA, 20 bp, synthetic construct
  misc_feature 1..20: note = chemically synthesized
  source 1..20: mol_type = other DNA
cgtctactctgcctatgaag

SEQ ID NO: 11546 - DNA, 20 bp, synthetic construct
  misc_feature 1..20: note = chemically synthesized
  source 1..20: mol_type = other DNA
cttgttttactaaaaaaaaa

SEQ ID NO: 11547 - DNA, 20 bp, synthetic construct
  misc_feature 1..20: note = chemically synthesized
  source 1..20: mol_type = other DNA
ttgttttactaaaaaaaaaa

SEQ ID NO: 11548 - DNA, 20 bp, synthetic construct
  misc_feature 1..20: note = chemically synthesized
  source 1..20: mol_type = other DNA
tactaaaaaaaaaaaggaca

SEQ ID NO: 11549 - DNA, 20 bp, synthetic construct
  misc_feature 1..20: note = chemically synthesized
  source 1..20: mol_type = other DNA
aaaaaaaaaaaggacaaaga

SEQ ID NO: 11550 - DNA, 20 bp, synthetic construct
  misc_feature 1..20: note = chemically synthesized
  source 1..20: mol_type = other DNA
aaaaaaaggacaaagaaaga

SEQ ID NO: 11551 - DNA, 20 bp, synthetic construct
  misc_feature 1..20: note = chemically synthesized
  source 1..20: mol_type = other DNA
agaaagtgcgaattgtgaaa

SEQ ID NO: 11552 - DNA, 20 bp, synthetic construct
  misc_feature 1..20: note = chemically synthesized
  source 1..20: mol_type = other DNA
aagtgcgaattgtgaaatgg

SEQ ID NO: 11553 - DNA, 20 bp, synthetic construct
  misc_feature 1..20: note = chemically synthesized
  source 1..20: mol_type = other DNA
gcgaattgtgaaatggtagt

SEQ ID NO: 11554 - DNA, 20 bp, synthetic construct
  misc_feature 1..20: note = chemically synthesized
  source 1..20: mol_type = other DNA
tgtgaaatggtagtgagtga

SEQ ID NO: 11555 - DNA, 20 bp, synthetic construct
  misc_feature 1..20: note = chemically synthesized
  source 1..20: mol_type = other DNA
gtagtgagtgatggcatttg

SEQ ID NO: 11556 - DNA, 20 bp, synthetic construct
  misc_feature 1..20: note = chemically synthesized
  source 1..20: mol_type = other DNA
gtgagtgatggcatttgaag

SEQ ID NO: 11557 - DNA, 20 bp, synthetic construct
  misc_feature 1..20: note = chemically synthesized
  source 1..20: mol_type = other DNA
tgagtgatggcatttgaagt

SEQ ID NO: 11558 - DNA, 20 bp, synthetic construct
  misc_feature 1..20: note = chemically synthesized
  source 1..20: mol_type = other DNA
gtgggtcctttatgatttga

SEQ ID NO: 11559 - DNA, 20 bp, synthetic construct
  misc_feature 1..20: note = chemically synthesized
  source 1..20: mol_type = other DNA
gggtcctttatgatttgatg

SEQ ID NO: 11560 - DNA, 20 bp, synthetic construct
  misc_feature 1..20: note = chemically synthesized
  source 1..20: mol_type = other DNA
cctttatgatttgatggagc

SEQ ID NO: 11561 - DNA, 20 bp, synthetic construct
  misc_feature 1..20: note = chemically synthesized
  source 1..20: mol_type = other DNA
ctttatgatttgatggagcc

SEQ ID NO: 11562 - DNA, 20 bp, synthetic construct
  misc_feature 1..20: note = chemically synthesized
  source 1..20: mol_type = other DNA
tatgatttgatggagccagg

SEQ ID NO: 11563 - DNA, 20 bp, synthetic construct
  misc_feature 1..20: note = chemically synthesized
  source 1..20: mol_type = other DNA
gatttgatggagccaggcag

SEQ ID NO: 11564 - DNA, 20 bp, synthetic construct
  misc_feature 1..20: note = chemically synthesized
  source 1..20: mol_type = other DNA
ggagccaggcagaagacgtt

SEQ ID NO: 11565 - DNA, 20 bp, synthetic construct
  misc_feature 1..20: note = chemically synthesized
  source 1..20: mol_type = other DNA
agccaggcagaagacgtttg

SEQ ID NO: 11566 - DNA, 20 bp, synthetic construct
  misc_feature 1..20: note = chemically synthesized
  source 1..20: mol_type = other DNA
aggcagaagacgtttggaga

SEQ ID NO: 11567 - DNA, 20 bp, synthetic construct
  misc_feature 1..20: note = chemically synthesized
  source 1..20: mol_type = other DNA
cagaagacgtttggagaaag

SEQ ID NO: 11568 - DNA, 20 bp, synthetic construct
  misc_feature 1..20: note = chemically synthesized
  source 1..20: mol_type = other DNA
ttggagaaagaagttcctga

SEQ ID NO: 11569 - DNA, 20 bp, synthetic construct
  misc_feature 1..20: note = chemically synthesized
  source 1..20: mol_type = other DNA
gagaaagaagttcctgaaag

SEQ ID NO: 11570 - DNA, 20 bp, synthetic construct
  misc_feature 1..20: note = chemically synthesized
  source 1..20: mol_type = other DNA
agaaagaagttcctgaaagt

SEQ ID NO: 11571 - DNA, 20 bp, synthetic construct
  misc_feature 1..20: note = chemically synthesized
  source 1..20: mol_type = other DNA
aagaagttcctgaaagtagg

SEQ ID NO: 11572 - DNA, 20 bp, synthetic construct
  misc_feature 1..20: note = chemically synthesized
  source 1..20: mol_type = other DNA
agaagttcctgaaagtagga

SEQ ID NO: 11573 - DNA, 20 bp, synthetic construct
  misc_feature 1..20: note = chemically synthesized
  source 1..20: mol_type = other DNA
gaagttcctgaaagtaggaa

SEQ ID NO: 11574 - DNA, 20 bp, synthetic construct
  misc_feature 1..20: note = chemically synthesized
  source 1..20: mol_type = other DNA
ctgaaagtaggaagggcatg

SEQ ID NO: 11575 - DNA, 20 bp, synthetic construct
  misc_feature 1..20: note = chemically synthesized
  source 1..20: mol_type = other DNA
aagggcatgtggaaaactct

SEQ ID NO: 11576 - DNA, 20 bp, synthetic construct
  misc_feature 1..20: note = chemically synthesized
  source 1..20: mol_type = other DNA
agggcatgtggaaaactctg

SEQ ID NO: 11577 - DNA, 20 bp, synthetic construct
  misc_feature 1..20: note = chemically synthesized
  source 1..20: mol_type = other DNA
atgtggaaaactctgaggct

SEQ ID NO: 11578 - DNA, 20 bp, synthetic construct
  misc_feature 1..20: note = chemically synthesized
  source 1..20: mol_type = other DNA
tgtggaaaactctgaggctg

SEQ ID NO: 11579 - DNA, 20 bp, synthetic construct
  misc_feature 1..20: note = chemically synthesized
  source 1..20: mol_type = other DNA
ctctgaggctgaggaaaaaa

SEQ ID NO: 11580 - DNA, 20 bp, synthetic construct
  misc_feature 1..20: note = chemically synthesized
  source 1..20: mol_type = other DNA
gaggctgaggaaaaaaaaga

SEQ ID NO: 11581 - DNA, 20 bp, synthetic construct
  misc_feature 1..20: note = chemically synthesized
  source 1..20: mol_type = other DNA
ctgaggaaaaaaaagaaaga

SEQ ID NO: 11582 - DNA, 20 bp, synthetic construct
  misc_feature 1..20: note = chemically synthesized
  source 1..20: mol_type = other DNA
aaaagaaagaaagaaatata

SEQ ID NO: 11583 - DNA, 20 bp, synthetic construct
  misc_feature 1..20: note = chemically synthesized
  source 1..20: mol_type = other DNA
gaaagaaagaaatataaaga

SEQ ID NO: 11584 - DNA, 20 bp, synthetic construct
  misc_feature 1..20: note = chemically synthesized
  source 1..20: mol_type = other DNA
actgtatataaacacattac

SEQ ID NO: 11585 - DNA, 20 bp, synthetic construct
  misc_feature 1..20: note = chemically synthesized
  source 1..20: mol_type = other DNA
ataaacacattacaagccta

SEQ ID NO: 11586 - DNA, 20 bp, synthetic construct
  misc_feature 1..20: note = chemically synthesized
  source 1..20: mol_type = other DNA
tacaagcctaaagtacgttg

SEQ ID NO: 11587 - DNA, 20 bp, synthetic construct
  misc_feature 1..20: note = chemically synthesized
  source 1..20: mol_type = other DNA
aaagtacgttgaagaaaaaa

SEQ ID NO: 11588 - DNA, 20 bp, synthetic construct
  misc_feature 1..20: note = chemically synthesized
  source 1..20: mol_type = other DNA
tgaagaaaaaatagaattca

SEQ ID NO: 11589 - DNA, 20 bp, synthetic construct
  misc_feature 1..20: note = chemically synthesized
  source 1..20: mol_type = other DNA
gaaaaaatagaattcaaagt

SEQ ID NO: 11590 - DNA, 20 bp, synthetic construct
  misc_feature 1..20: note = chemically synthesized
  source 1..20: mol_type = other DNA
aaatagaattcaaagttaga

SEQ ID NO: 11591 - DNA, 20 bp, synthetic construct
  misc_feature 1..20: note = chemically synthesized
  source 1..20: mol_type = other DNA
tagaattcaaagttagacag

SEQ ID NO: 11592 - DNA, 20 bp, synthetic construct
  misc_feature 1..20: note = chemically synthesized
  source 1..20: mol_type = other DNA
agaattcaaagttagacaga

SEQ ID NO: 11593 - DNA, 20 bp, synthetic construct
  misc_feature 1..20: note = chemically synthesized
  source 1..20: mol_type = other DNA
gaattcaaagttagacagaa

SEQ ID NO: 11594 - DNA, 20 bp, synthetic construct
  misc_feature 1..20: note = chemically synthesized
  source 1..20: mol_type = other DNA
caaagttagacagaagggct

SEQ ID NO: 11595 - DNA, 20 bp, synthetic construct
  misc_feature 1..20: note = chemically synthesized
  source 1..20: mol_type = other DNA
aaagttagacagaagggctc

SEQ ID NO: 11596 - DNA, 20 bp, synthetic construct
  misc_feature 1..20: note = chemically synthesized
  source 1..20: mol_type = other DNA
ggcttactatttgcatctta

SEQ ID NO: 11597 - DNA, 20 bp, synthetic construct
  misc_feature 1..20: note = chemically synthesized
  source 1..20: mol_type = other DNA
actatttgcatcttacagat

SEQ ID NO: 11598 - DNA, 20 bp, synthetic construct
  misc_feature 1..20: note = chemically synthesized
  source 1..20: mol_type = other DNA
tatttgcatcttacagatga

SEQ ID NO: 11599 - DNA, 20 bp, synthetic construct
  misc_feature 1..20: note = chemically synthesized
  source 1..20: mol_type = other DNA
ttgcatcttacagatgagag

SEQ ID NO: 11600 - DNA, 20 bp, synthetic construct
  misc_feature 1..20: note = chemically synthesized
  source 1..20: mol_type = other DNA
catcttacagatgagagtag

SEQ ID NO: 11601 - DNA, 20 bp, synthetic construct
  misc_feature 1..20: note = chemically synthesized
  source 1..20: mol_type = other DNA
tcttacagatgagagtagta

SEQ ID NO: 11602 - DNA, 20 bp, synthetic construct
  misc_feature 1..20: note = chemically synthesized
  source 1..20: mol_type = other DNA
acagatgagagtagtagagt

SEQ ID NO: 11603 - DNA, 20 bp, synthetic construct
  misc_feature 1..20: note = chemically synthesized
  source 1..20: mol_type = other DNA
tggtattttattctgaaaca

SEQ ID NO: 11604 - DNA, 20 bp, synthetic construct
  misc_feature 1..20: note = chemically synthesized
  source 1..20: mol_type = other DNA
gtattttattctgaaacaca

SEQ ID NO: 11605 - DNA, 20 bp, synthetic construct
  misc_feature 1..20: note = chemically synthesized
  source 1..20: mol_type = other DNA
tattttattctgaaacacag

SEQ ID NO: 11606 - DNA, 20 bp, synthetic construct
  misc_feature 1..20: note = chemically synthesized
  source 1..20: mol_type = other DNA
tattctgaaacacagaggac

SEQ ID NO: 11607 - DNA, 20 bp, synthetic construct
  misc_feature 1..20: note = chemically synthesized
  source 1..20: mol_type = other DNA
tctgaaacacagaggacaag

SEQ ID NO: 11608 - DNA, 20 bp, synthetic construct
  misc_feature 1..20: note = chemically synthesized
  source 1..20: mol_type = other DNA
tgaaacacagaggacaagtg

SEQ ID NO: 11609 - DNA, 20 bp, synthetic construct
  misc_feature 1..20: note = chemically synthesized
  source 1..20: mol_type = other DNA
aagtggagatttgtaaacct

SEQ ID NO: 11610 - DNA, 20 bp, synthetic construct
  misc_feature 1..20: note = chemically synthesized
  source 1..20: mol_type = other DNA
ttgtaaacctgagataaaca

SEQ ID NO: 11611 - DNA, 20 bp, synthetic construct
  misc_feature 1..20: note = chemically synthesized
  source 1..20: mol_type = other DNA
ttctaatccactgaacaccg

SEQ ID NO: 11612 - DNA, 20 bp, synthetic construct
  misc_feature 1..20: note = chemically synthesized
  source 1..20: mol_type = other DNA
ctttcttcatctgccttact

SEQ ID NO: 11613 - DNA, 20 bp, synthetic construct
  misc_feature 1..20: note = chemically synthesized
  source 1..20: mol_type = other DNA
tcatctgccttacttagtgc

SEQ ID NO: 11614 - DNA, 20 bp, synthetic construct
  misc_feature 1..20: note = chemically synthesized
  source 1..20: mol_type = other DNA
catctgccttacttagtgca

SEQ ID NO: 11615 - DNA, 20 bp, synthetic construct
  misc_feature 1..20: note = chemically synthesized
  source 1..20: mol_type = other DNA
tgcaaggtgctataacaaaa

SEQ ID NO: 11616 - DNA, 20 bp, synthetic construct
  misc_feature 1..20: note = chemically synthesized
  source 1..20: mol_type = other DNA
ggtgctataacaaaatagca

SEQ ID NO: 11617 - DNA, 20 bp, synthetic construct
  misc_feature 1..20: note = chemically synthesized
  source 1..20: mol_type = other DNA
tataacaaaatagcatagac

SEQ ID NO: 11618 - DNA, 20 bp, synthetic construct
  misc_feature 1..20: note = chemically synthesized
  source 1..20: mol_type = other DNA
ataacaaaatagcatagact

SEQ ID NO: 11619 - DNA, 20 bp, synthetic construct
  misc_feature 1..20: note = chemically synthesized
  source 1..20: mol_type = other DNA
agactgggtgacttcaacaa

SEQ ID NO: 11620 - DNA, 20 bp, synthetic construct
  misc_feature 1..20: note = chemically synthesized
  source 1..20: mol_type = other DNA
gactgggtgacttcaacaac

SEQ ID NO: 11621 - DNA, 20 bp, synthetic construct
  misc_feature 1..20: note = chemically synthesized
  source 1..20: mol_type = other DNA
attttttctcacttttctgc

SEQ ID NO: 11622 - DNA, 20 bp, synthetic construct
  misc_feature 1..20: note = chemically synthesized
  source 1..20: mol_type = other DNA
ctcacttttctgctggttcc

SEQ ID NO: 11623 - DNA, 20 bp, synthetic construct
  misc_feature 1..20: note = chemically synthesized
  source 1..20: mol_type = other DNA
cttttctgctggttcctggt

SEQ ID NO: 11624 - DNA, 20 bp, synthetic construct
  misc_feature 1..20: note = chemically synthesized
  source 1..20: mol_type = other DNA
ttttctgctggttcctggtc

SEQ ID NO: 11625 - DNA, 20 bp, synthetic construct
  misc_feature 1..20: note = chemically synthesized
  source 1..20: mol_type = other DNA
tttctgctggttcctggtca

SEQ ID NO: 11626 - DNA, 20 bp, synthetic construct
  misc_feature 1..20: note = chemically synthesized
  source 1..20: mol_type = other DNA
cctggtcagggctctcttcc

SEQ ID NO: 11627 - DNA, 20 bp, synthetic construct
  misc_feature 1..20: note = chemically synthesized
  source 1..20: mol_type = other DNA
ctggtcagggctctcttcct

SEQ ID NO: 11628 - DNA, 20 bp, synthetic construct
  misc_feature 1..20: note = chemically synthesized
  source 1..20: mol_type = other DNA
agggctctcttcctgggttg

SEQ ID NO: 11629 - DNA, 20 bp, synthetic construct
  misc_feature 1..20: note = chemically synthesized
  source 1..20: mol_type = other DNA
gggctctcttcctgggttgc

SEQ ID NO: 11630 - DNA, 20 bp, synthetic construct
  misc_feature 1..20: note = chemically synthesized
  source 1..20: mol_type = other DNA
ctctcttcctgggttgcagg

SEQ ID NO: 11631 - DNA, 20 bp, synthetic construct
  misc_feature 1..20: note = chemically synthesized
  source 1..20: mol_type = other DNA
acttcccactgtgtcctcac

SEQ ID NO: 11632 - DNA, 20 bp, synthetic construct
  misc_feature 1..20: note = chemically synthesized
  source 1..20: mol_type = other DNA
tcccactgtgtcctcaccag

SEQ ID NO: 11633 - DNA, 20 bp, synthetic construct
  misc_feature 1..20: note = chemically synthesized
  source 1..20: mol_type = other DNA
cccactgtgtcctcaccaga

SEQ ID NO: 11634 - DNA, 20 bp, synthetic construct
  misc_feature 1..20: note = chemically synthesized
  source 1..20: mol_type = other DNA
actgtgtcctcaccagaagg

SEQ ID NO: 11635 - DNA, 20 bp, synthetic construct
  misc_feature 1..20: note = chemically synthesized
  source 1..20: mol_type = other DNA
tgtgtcctcaccagaaggaa

SEQ ID NO: 11636 - DNA, 20 bp, synthetic construct
  misc_feature 1..20: note = chemically synthesized
  source 1..20: mol_type = other DNA
ctcaccagaaggaagagaaa

SEQ ID NO: 11637 - DNA, 20 bp, synthetic construct
  misc_feature 1..20: note = chemically synthesized
  source 1..20: mol_type = other DNA
ctaatctctctgcttctgat

SEQ ID NO: 11638 - DNA, 20 bp, synthetic construct
  misc_feature 1..20: note = chemically synthesized
  source 1..20: mol_type = other DNA
taatctctctgcttctgatg

SEQ ID NO: 11639 - DNA, 20 bp, synthetic construct
  misc_feature 1..20: note = chemically synthesized
  source 1..20: mol_type = other DNA
tgaggaaaataattctatga

SEQ ID NO: 11640 - DNA, 20 bp, synthetic construct
  misc_feature 1..20: note = chemically synthesized
  source 1..20: mol_type = other DNA
gaggaaaataattctatgat

SEQ ID NO: 11641 - DNA, 20 bp, synthetic construct
  misc_feature 1..20: note = chemically synthesized
  source 1..20: mol_type = other DNA
aggaaaataattctatgatg

SEQ ID NO: 11642 - DNA, 20 bp, synthetic construct
  misc_feature 1..20: note = chemically synthesized
  source 1..20: mol_type = other DNA
tgatggggatctgctctcat

SEQ ID NO: 11643 - DNA, 20 bp, synthetic construct
  misc_feature 1..20: note = chemically synthesized
  source 1..20: mol_type = other DNA
taaacctgattacttttcca

SEQ ID NO: 11644 - DNA, 20 bp, synthetic construct
  misc_feature 1..20: note = chemically synthesized
  source 1..20: mol_type = other DNA
tccaaagcctcccccacaaa

SEQ ID NO: 11645 - DNA, 20 bp, synthetic construct
  misc_feature 1..20: note = chemically synthesized
  source 1..20: mol_type = other DNA
caaagcctcccccacaaatg

SEQ ID NO: 11646 - DNA, 20 bp, synthetic construct
  misc_feature 1..20: note = chemically synthesized
  source 1..20: mol_type = other DNA
cccccacaaatggagccaat

SEQ ID NO: 11647 - DNA, 20 bp, synthetic construct
  misc_feature 1..20: note = chemically synthesized
  source 1..20: mol_type = other DNA
ccccacaaatggagccaatt

SEQ ID NO: 11648 - DNA, 20 bp, synthetic construct
  misc_feature 1..20: note = chemically synthesized
  source 1..20: mol_type = other DNA
ccacaaatggagccaattgg

SEQ ID NO: 11649 - DNA, 20 bp, synthetic construct
  misc_feature 1..20: note = chemically synthesized
  source 1..20: mol_type = other DNA
aaatggagccaattgggagt

SEQ ID NO: 11650 - DNA, 20 bp, synthetic construct
  misc_feature 1..20: note = chemically synthesized
  source 1..20: mol_type = other DNA
aatggagccaattgggagtt

SEQ ID NO: 11651 - DNA, 20 bp, synthetic construct
  misc_feature 1..20: note = chemically synthesized
  source 1..20: mol_type = other DNA
atggagccaattgggagttg

SEQ ID NO: 11652 - DNA, 20 bp, synthetic construct
  misc_feature 1..20: note = chemically synthesized
  source 1..20: mol_type = other DNA
ccaattgggagttggggatt

SEQ ID NO: 11653 - DNA, 20 bp, synthetic construct
  misc_feature 1..20: note = chemically synthesized
  source 1..20: mol_type = other DNA
gattcagcatgtgaattttc

SEQ ID NO: 11654 - DNA, 20 bp, synthetic construct
  misc_feature 1..20: note = chemically synthesized
  source 1..20: mol_type = other DNA
ttcagcatgtgaattttctg

SEQ ID NO: 11655 - DNA, 20 bp, synthetic construct
  misc_feature 1..20: note = chemically synthesized
  source 1..20: mol_type = other DNA
tgtgaattttctggagacac

SEQ ID NO: 11656 - DNA, 20 bp, synthetic construct
  misc_feature 1..20: note = chemically synthesized
  source 1..20: mol_type = other DNA
tttctggagacacaagcgtt

SEQ ID NO: 11657 - DNA, 20 bp, synthetic construct
  misc_feature 1..20: note = chemically synthesized
  source 1..20: mol_type = other DNA
gcattaactttcaattatat

SEQ ID NO: 11658 - DNA, 20 bp, synthetic construct
  misc_feature 1..20: note = chemically synthesized
  source 1..20: mol_type = other DNA
tttcaattatataagaactc

SEQ ID NO: 11659 - DNA, 20 bp, synthetic construct
  misc_feature 1..20: note = chemically synthesized
  source 1..20: mol_type = other DNA
gaccgtgctgttctgctgct

SEQ ID NO: 11660 - DNA, 20 bp, synthetic construct
  misc_feature 1..20: note = chemically synthesized
  source 1..20: mol_type = other DNA
acacgctgatgctgacttgt

SEQ ID NO: 11661 - DNA, 20 bp, synthetic construct
  misc_feature 1..20: note = chemically synthesized
  source 1..20: mol_type = other DNA
gctgacttgtgagcttctgc

SEQ ID NO: 11662 - DNA, 20 bp, synthetic construct
  misc_feature 1..20: note = chemically synthesized
  source 1..20: mol_type = other DNA
ctggctcatttccttcacct

SEQ ID NO: 11663 - DNA, 20 bp, synthetic construct
  misc_feature 1..20: note = chemically synthesized
  source 1..20: mol_type = other DNA
cacctaagtccccacctccc

SEQ ID NO: 11664 - DNA, 20 bp, synthetic construct
  misc_feature 1..20: note = chemically synthesized
  source 1..20: mol_type = other DNA
ctaagtccccacctccctag

SEQ ID NO: 11665 - DNA, 20 bp, synthetic construct
  misc_feature 1..20: note = chemically synthesized
  source 1..20: mol_type = other DNA
cctccctagaagcttacaat

SEQ ID NO: 11666 - DNA, 20 bp, synthetic construct
  misc_feature 1..20: note = chemically synthesized
  source 1..20: mol_type = other DNA
ctccctagaagcttacaatg

SEQ ID NO: 11667 - DNA, 20 bp, synthetic construct
  misc_feature 1..20: note = chemically synthesized
  source 1..20: mol_type = other DNA
cctccttgaaatgctgtgac

SEQ ID NO: 11668 - DNA, 20 bp, synthetic construct
  misc_feature 1..20: note = chemically synthesized
  source 1..20: mol_type = other DNA
gaaatgctgtgaccagtctg

SEQ ID NO: 11669 - DNA, 20 bp, synthetic construct
  misc_feature 1..20: note = chemically synthesized
  source 1..20: mol_type = other DNA
tgtgaccagtctgtagactt

SEQ ID NO: 11670 - DNA, 20 bp, synthetic construct
  misc_feature 1..20: note = chemically synthesized
  source 1..20: mol_type = other DNA
gtgaccagtctgtagactta

SEQ ID NO: 11671 - DNA, 20 bp, synthetic construct
  misc_feature 1..20: note = chemically synthesized
  source 1..20: mol_type = other DNA
tgaccagtctgtagacttaa

SEQ ID NO: 11672 - DNA, 20 bp, synthetic construct
  misc_feature 1..20: note = chemically synthesized
  source 1..20: mol_type = other DNA
agtctgtagacttaagggta

SEQ ID NO: 11673 - DNA, 20 bp, synthetic construct
  misc_feature 1..20: note = chemically synthesized
  source 1..20: mol_type = other DNA
gtctgtagacttaagggtat

SEQ ID NO: 11674 - DNA, 20 bp, synthetic construct
  misc_feature 1..20: note = chemically synthesized
  source 1..20: mol_type = other DNA
tgggattaatttcacctctt

SEQ ID NO: 11675 - DNA, 20 bp, synthetic construct
  misc_feature 1..20: note = chemically synthesized
  source 1..20: mol_type = other DNA
gggattaatttcacctcttt

SEQ ID NO: 11676 - DNA, 20 bp, synthetic construct
  misc_feature 1..20: note = chemically synthesized
  source 1..20: mol_type = other DNA
gcgtcaacacttaaaatgaa

SEQ ID NO: 11677 - DNA, 20 bp, synthetic construct
  misc_feature 1..20: note = chemically synthesized
  source 1..20: mol_type = other DNA
acttaaaatgaaaagttcct

SEQ ID NO: 11678 - DNA, 20 bp, synthetic construct
  misc_feature 1..20: note = chemically synthesized
  source 1..20: mol_type = other DNA
aaatgaaaagttccttagta

SEQ ID NO: 11679 - DNA, 20 bp, synthetic construct
  misc_feature 1..20: note = chemically synthesized
  source 1..20: mol_type = other DNA
gaaaagttccttagtaaagt

SEQ ID NO: 11680 - DNA, 20 bp, synthetic construct
  misc_feature 1..20: note = chemically synthesized
  source 1..20: mol_type = other DNA
aaaagttccttagtaaagta

SEQ ID NO: 11681 - DNA, 20 bp, synthetic construct
  misc_feature 1..20: note = chemically synthesized
  source 1..20: mol_type = other DNA
aagtaaggatcacttcattg

SEQ ID NO: 11682 - DNA, 20 bp, synthetic construct
  misc_feature 1..20: note = chemically synthesized
  source 1..20: mol_type = other DNA
tcacttcattgtagttaccg

SEQ ID NO: 11683 - DNA, 20 bp, synthetic construct
  misc_feature 1..20: note = chemically synthesized
  source 1..20: mol_type = other DNA
ttcattgtagttaccgtgga

SEQ ID NO: 11684 - DNA, 20 bp, synthetic construct
  misc_feature 1..20: note = chemically synthesized
  source 1..20: mol_type = other DNA
ctaacacctcaacctccctg

SEQ ID NO: 11685 - DNA, 20 bp, synthetic construct
  misc_feature 1..20: note = chemically synthesized
  source 1..20: mol_type = other DNA
aacacctcaacctccctgta

SEQ ID NO: 11686 - DNA, 20 bp, synthetic construct
  misc_feature 1..20: note = chemically synthesized
  source 1..20: mol_type = other DNA
acctccctgtagagcctcac

SEQ ID NO: 11687 - DNA, 20 bp, synthetic construct
  misc_feature 1..20: note = chemically synthesized
  source 1..20: mol_type = other DNA
cctccctgtagagcctcaca

SEQ ID NO: 11688 - DNA, 20 bp, synthetic construct
  misc_feature 1..20: note = chemically synthesized
  source 1..20: mol_type = other DNA
ctccctgtagagcctcacaa

SEQ ID NO: 11689 - DNA, 20 bp, synthetic construct
  misc_feature 1..20: note = chemically synthesized
  source 1..20: mol_type = other DNA
tgtagagcctcacaagggct

SEQ ID NO: 11690 - DNA, 20 bp, synthetic construct
  misc_feature 1..20: note = chemically synthesized
  source 1..20: mol_type = other DNA
agcctcacaagggctgagaa

SEQ ID NO: 11691 - DNA, 20 bp, synthetic construct
  misc_feature 1..20: note = chemically synthesized
  source 1..20: mol_type = other DNA
tcacaagggctgagaaaagc

SEQ ID NO: 11692 - DNA, 20 bp, synthetic construct
  misc_feature 1..20: note = chemically synthesized
  source 1..20: mol_type = other DNA
tgagaaaagccagatgccgt

SEQ ID NO: 11693 - DNA, 20 bp, synthetic construct
  misc_feature 1..20: note = chemically synthesized
  source 1..20: mol_type = other DNA
aagccagatgccgttggaaa

SEQ ID NO: 11694 - DNA, 20 bp, synthetic construct
  misc_feature 1..20: note = chemically synthesized
  source 1..20: mol_type = other DNA
tagtattgcccctaataaaa

SEQ ID NO: 11695 - DNA, 20 bp, synthetic construct
  misc_feature 1..20: note = chemically synthesized
  source 1..20: mol_type = other DNA
ttgcccctaataaaatagaa

SEQ ID NO: 11696 - DNA, 20 bp, synthetic construct
  misc_feature 1..20: note = chemically synthesized
  source 1..20: mol_type = other DNA
gcctaaaccttgacttccta

SEQ ID NO: 11697 - DNA, 20 bp, synthetic construct
  misc_feature 1..20: note = chemically synthesized
  source 1..20: mol_type = other DNA
aaccttgacttcctaaagct

SEQ ID NO: 11698 - DNA, 20 bp, synthetic construct
  misc_feature 1..20: note = chemically synthesized
  source 1..20: mol_type = other DNA
tggaacactttttcttcgtt

SEQ ID NO: 11699 - DNA, 20 bp, synthetic construct
  misc_feature 1..20: note = chemically synthesized
  source 1..20: mol_type = other DNA
ctcgctgctgtgctgcaatc

SEQ ID NO: 11700 - DNA, 20 bp, synthetic construct
  misc_feature 1..20: note = chemically synthesized
  source 1..20: mol_type = other DNA
tcgctgctgtgctgcaatcc

SEQ ID NO: 11701 - DNA, 20 bp, synthetic construct
  misc_feature 1..20: note = chemically synthesized
  source 1..20: mol_type = other DNA
cgctgctgtgctgcaatcca

SEQ ID NO: 11702 - DNA, 20 bp, synthetic construct
  misc_feature 1..20: note = chemically synthesized
  source 1..20: mol_type = other DNA
tgctgtgctgcaatccaggg

SEQ ID NO: 11703 - DNA, 20 bp, synthetic construct
  misc_feature 1..20: note = chemically synthesized
  source 1..20: mol_type = other DNA
gctgtgctgcaatccaggga

SEQ ID NO: 11704 - DNA, 20 bp, synthetic construct
  misc_feature 1..20: note = chemically synthesized
  source 1..20: mol_type = other DNA
ctgtgctgcaatccagggaa

SEQ ID NO: 11705 - DNA, 20 bp, synthetic construct
  misc_feature 1..20: note = chemically synthesized
  source 1..20: mol_type = other DNA
tgtgctgcaatccagggaag

SEQ ID NO: 11706 - DNA, 20 bp, synthetic construct
  misc_feature 1..20: note = chemically synthesized
  source 1..20: mol_type = other DNA
gtgctgcaatccagggaagg

SEQ ID NO: 11707 - DNA, 20 bp, synthetic construct
  misc_feature 1..20: note = chemically synthesized
  source 1..20: mol_type = other DNA
gcaatccagggaagggggtt

SEQ ID NO: 11708 - DNA, 20 bp, synthetic construct
  misc_feature 1..20: note = chemically synthesized
  source 1..20: mol_type = other DNA
cttccaaaacatctgtttct

SEQ ID NO: 11709 - DNA, 20 bp, synthetic construct
  misc_feature 1..20: note = chemically synthesized
  source 1..20: mol_type = other DNA
ttccaaaacatctgtttctg

SEQ ID NO: 11710 - DNA, 20 bp, synthetic construct
  misc_feature 1..20: note = chemically synthesized
  source 1..20: mol_type = other DNA
ccaaaacatctgtttctgag

SEQ ID NO: 11711 - DNA, 20 bp, synthetic construct
  misc_feature 1..20: note = chemically synthesized
  source 1..20: mol_type = other DNA
ttctgaggagtcctgtccta

SEQ ID NO: 11712 - DNA, 20 bp, synthetic construct
  misc_feature 1..20: note = chemically synthesized
  source 1..20: mol_type = other DNA
ctgaggagtcctgtcctata

SEQ ID NO: 11713 - DNA, 20 bp, synthetic construct
  misc_feature 1..20: note = chemically synthesized
  source 1..20: mol_type = other DNA
tgaggagtcctgtcctatag

SEQ ID NO: 11714 - DNA, 20 bp, synthetic construct
  misc_feature 1..20: note = chemically synthesized
  source 1..20: mol_type = other DNA
atagaggtctttcttccaac

SEQ ID NO: 11715 - DNA, 20 bp, synthetic construct
  misc_feature 1..20: note = chemically synthesized
  source 1..20: mol_type = other DNA
gcaccttttactcccacttg

SEQ ID NO: 11716 - DNA, 20 bp, synthetic construct
  misc_feature 1..20: note = chemically synthesized
  source 1..20: mol_type = other DNA
cttgcagaactcccatgtac

SEQ ID NO: 11717 - DNA, 20 bp, synthetic construct
  misc_feature 1..20: note = chemically synthesized
  source 1..20: mol_type = other DNA
gtacaagtttctttattgcc

SEQ ID NO: 11718 - DNA, 20 bp, synthetic construct
  misc_feature 1..20: note = chemically synthesized
  source 1..20: mol_type = other DNA
cacatctaacgtaaacaaaa

SEQ ID NO: 11719 - DNA, 20 bp, synthetic construct
  misc_feature 1..20: note = chemically synthesized
  source 1..20: mol_type = other DNA
ctaacgtaaacaaaaaagtg

SEQ ID NO: 11720 - DNA, 20 bp, synthetic construct
  misc_feature 1..20: note = chemically synthesized
  source 1..20: mol_type = other DNA
aacgtaaacaaaaaagtgtg

SEQ ID NO: 11721 - DNA, 20 bp, synthetic construct
  misc_feature 1..20: note = chemically synthesized
  source 1..20: mol_type = other DNA
gcacatgacacaaacacaca

SEQ ID NO: 11722 - DNA, 20 bp, synthetic construct
  misc_feature 1..20: note = chemically synthesized
  source 1..20: mol_type = other DNA
cctcaacataaaaccctttg

SEQ ID NO: 11723 - DNA, 20 bp, synthetic construct
  misc_feature 1..20: note = chemically synthesized
  source 1..20: mol_type = other DNA
ttgtggctcatatatttaaa

SEQ ID NO: 11724 - DNA, 20 bp, synthetic construct
  misc_feature 1..20: note = chemically synthesized
  source 1..20: mol_type = other DNA
tatttaaaaagacataaaaa

SEQ ID NO: 11725 - DNA, 20 bp, synthetic construct
  misc_feature 1..20: note = chemically synthesized
  source 1..20: mol_type = other DNA
aagacataaaaaaagaactg

SEQ ID NO: 11726 - DNA, 20 bp, synthetic construct
  misc_feature 1..20: note = chemically synthesized
  source 1..20: mol_type = other DNA
gacaaccatgtgtgatctct

SEQ ID NO: 11727 - DNA, 20 bp, synthetic construct
  misc_feature 1..20: note = chemically synthesized
  source 1..20: mol_type = other DNA
aaccatgtgtgatctcttag

SEQ ID NO: 11728 - DNA, 20 bp, synthetic construct
  misc_feature 1..20: note = chemically synthesized
  source 1..20: mol_type = other DNA
tgtgtgatctcttagcagaa

SEQ ID NO: 11729 - DNA, 20 bp, synthetic construct
  misc_feature 1..20: note = chemically synthesized
  source 1..20: mol_type = other DNA
atttattatttgattgcttg

SEQ ID NO: 11730 - DNA, 20 bp, synthetic construct
  misc_feature 1..20: note = chemically synthesized
  source 1..20: mol_type = other DNA
atttgattgcttgcagaata

SEQ ID NO: 11731 - DNA, 20 bp, synthetic construct
  misc_feature 1..20: note = chemically synthesized
  source 1..20: mol_type = other DNA
agaataaagcctatccttga

SEQ ID NO: 11732 - DNA, 20 bp, synthetic construct
  misc_feature 1..20: note = chemically synthesized
  source 1..20: mol_type = other DNA
tccttgaaagctctgcatca

SEQ ID NO: 11733 - DNA, 20 bp, synthetic construct
  misc_feature 1..20: note = chemically synthesized
  source 1..20: mol_type = other DNA
ccttgaaagctctgcatcat

SEQ ID NO: 11734 - DNA, 20 bp, synthetic construct
  misc_feature 1..20: note = chemically synthesized
  source 1..20: mol_type = other DNA
tgaaagctctgcatcatggg

SEQ ID NO: 11735 - DNA, 20 bp, synthetic construct
  misc_feature 1..20: note = chemically synthesized
  source 1..20: mol_type = other DNA
agctctgcatcatgggcagt

SEQ ID NO: 11736 - DNA, 20 bp, synthetic construct
  misc_feature 1..20: note = chemically synthesized
  source 1..20: mol_type = other DNA
tgcatcatgggcagtgagct

SEQ ID NO: 11737 - DNA, 20 bp, synthetic construct
  misc_feature 1..20: note = chemically synthesized
  source 1..20: mol_type = other DNA
atcatgggcagtgagctcag

SEQ ID NO: 11738 - DNA, 20 bp, synthetic construct
  misc_feature 1..20: note = chemically synthesized
  source 1..20: mol_type = other DNA
gcagtgagctcagtggtatc

SEQ ID NO: 11739 - DNA, 20 bp, synthetic construct
  misc_feature 1..20: note = chemically synthesized
  source 1..20: mol_type = other DNA
agtgagctcagtggtatctg

SEQ ID NO: 11740 - DNA, 20 bp, synthetic construct
  misc_feature 1..20: note = chemically synthesized
  source 1..20: mol_type = other DNA
gtgagctcagtggtatctgg

SEQ ID NO: 11741 - DNA, 20 bp, synthetic construct
  misc_feature 1..20: note = chemically synthesized
  source 1..20: mol_type = other DNA
gctcagtggtatctggagga

SEQ ID NO: 11742 - DNA, 20 bp, synthetic construct
  misc_feature 1..20: note = chemically synthesized
  source 1..20: mol_type = other DNA
ctcagtggtatctggaggac

SEQ ID NO: 11743 - DNA, 20 bp, synthetic construct
  misc_feature 1..20: note = chemically synthesized
  source 1..20: mol_type = other DNA
tcagtggtatctggaggaca

SEQ ID NO: 11744 - DNA, 20 bp, synthetic construct
  misc_feature 1..20: note = chemically synthesized
  source 1..20: mol_type = other DNA
gtatctggaggacagggcac

SEQ ID NO: 11745 - DNA, 20 bp, synthetic construct
  misc_feature 1..20: note = chemically synthesized
  source 1..20: mol_type = other DNA
ggacagggcactggccactc

SEQ ID NO: 11746 - DNA, 20 bp, synthetic construct
  misc_feature 1..20: note = chemically synthesized
  source 1..20: mol_type = other DNA
ctccagtcaccatcttctgc

SEQ ID NO: 11747 - DNA, 20 bp, synthetic construct
  misc_feature 1..20: note = chemically synthesized
  source 1..20: mol_type = other DNA
tccagtcaccatcttctgcc

SEQ ID NO: 11748 - DNA, 20 bp, synthetic construct
  misc_feature 1..20: note = chemically synthesized
  source 1..20: mol_type = other DNA
agtcaccatcttctgccagg

SEQ ID NO: 11749 - DNA, 20 bp, synthetic construct
  misc_feature 1..20: note = chemically synthesized
  source 1..20: mol_type = other DNA
ctgccaggaagcctgcacct

SEQ ID NO: 11750 - DNA, 20 bp, synthetic construct
  misc_feature 1..20: note = chemically synthesized
  source 1..20: mol_type = other DNA
tgccaggaagcctgcacctc

SEQ ID NO: 11751 - DNA, 20 bp, synthetic construct
  misc_feature 1..20: note = chemically synthesized
  source 1..20: mol_type = other DNA
gccaggaagcctgcacctca

SEQ ID NO: 11752 - DNA, 20 bp, synthetic construct
  misc_feature 1..20: note = chemically synthesized
  source 1..20: mol_type = other DNA
ccaggaagcctgcacctcag

SEQ ID NO: 11753 - DNA, 20 bp, synthetic construct
  misc_feature 1..20: note = chemically synthesized
  source 1..20: mol_type = other DNA
gggtgaattctttgccgaaa

SEQ ID NO: 11754 - DNA, 20 bp, synthetic construct
  misc_feature 1..20: note = chemically synthesized
  source 1..20: mol_type = other DNA
gccgaaatggattgccaaaa

SEQ ID NO: 11755 - DNA, 20 bp, synthetic construct
  misc_feature 1..20: note = chemically synthesized
  source 1..20: mol_type = other DNA
tggattgccaaaacggtcac

SEQ ID NO: 11756 - DNA, 20 bp, synthetic construct
  misc_feature 1..20: note = chemically synthesized
  source 1..20: mol_type = other DNA
acggtcaccagcacatttcc

SEQ ID NO: 11757 - DNA, 20 bp, synthetic construct
  misc_feature 1..20: note = chemically synthesized
  source 1..20: mol_type = other DNA
cggtcaccagcacatttccc

SEQ ID NO: 11758 - DNA, 20 bp, synthetic construct
  misc_feature 1..20: note = chemically synthesized
  source 1..20: mol_type = other DNA
gtcaccagcacatttcccag

SEQ ID NO: 11759 - DNA, 20 bp, synthetic construct
  misc_feature 1..20: note = chemically synthesized
  source 1..20: mol_type = other DNA
cacatttcccaggagctgtt

SEQ ID NO: 11760 - DNA, 20 bp, synthetic construct
  misc_feature 1..20: note = chemically synthesized
  source 1..20: mol_type = other DNA
cccaggagctgttgagatga

SEQ ID NO: 11761 - DNA, 20 bp, synthetic construct
  misc_feature 1..20: note = chemically synthesized
  source 1..20: mol_type = other DNA
ccaggagctgttgagatgaa

SEQ ID NO: 11762 - DNA, 20 bp, synthetic construct
  misc_feature 1..20: note = chemically synthesized
  source 1..20: mol_type = other DNA
aggagctgttgagatgaaag

SEQ ID NO: 11763 - DNA, 20 bp, synthetic construct
  misc_feature 1..20: note = chemically synthesized
  source 1..20: mol_type = other DNA
tgagatgaaaggagacaata

SEQ ID NO: 11764 - DNA, 20 bp, synthetic construct
  misc_feature 1..20: note = chemically synthesized
  source 1..20: mol_type = other DNA
agacaataaagatgaaccca

SEQ ID NO: 11765 - DNA, 20 bp, synthetic construct
  misc_feature 1..20: note = chemically synthesized
  source 1..20: mol_type = other DNA
aataaagatgaacccatagt

SEQ ID NO: 11766 - DNA, 20 bp, synthetic construct
  misc_feature 1..20: note = chemically synthesized
  source 1..20: mol_type = other DNA
agatgaacccatagtgagct

SEQ ID NO: 11767 - DNA, 20 bp, synthetic construct
  misc_feature 1..20: note = chemically synthesized
  source 1..20: mol_type = other DNA
atgaacccatagtgagctga

SEQ ID NO: 11768 - DNA, 20 bp, synthetic construct
  misc_feature 1..20: note = chemically synthesized
  source 1..20: mol_type = other DNA
ccatagtgagctgagagctc

SEQ ID NO: 11769 - DNA, 20 bp, synthetic construct
  misc_feature 1..20: note = chemically synthesized
  source 1..20: mol_type = other DNA
gtgagctgagagctccagcc

SEQ ID NO: 11770 - DNA, 20 bp, synthetic construct
  misc_feature 1..20: note = chemically synthesized
  source 1..20: mol_type = other DNA
gagagctccagcctggcctc

SEQ ID NO: 11771 - DNA, 20 bp, synthetic construct
  misc_feature 1..20: note = chemically synthesized
  source 1..20: mol_type = other DNA
cctccagataactacacacc

SEQ ID NO: 11772 - DNA, 20 bp, synthetic construct
  misc_feature 1..20: note = chemically synthesized
  source 1..20: mol_type = other DNA
ctacacaccaagcttccacc

SEQ ID NO: 11773 - DNA, 20 bp, synthetic construct
  misc_feature 1..20: note = chemically synthesized
  source 1..20: mol_type = other DNA
ccaagcttccacccagaatc

SEQ ID NO: 11774 - DNA, 20 bp, synthetic construct
  misc_feature 1..20: note = chemically synthesized
  source 1..20: mol_type = other DNA
gcctatgttaacttccctca

SEQ ID NO: 11775 - DNA, 20 bp, synthetic construct
  misc_feature 1..20: note = chemically synthesized
  source 1..20: mol_type = other DNA
gttaacttccctcaaagcct

SEQ ID NO: 11776 - DNA, 20 bp, synthetic construct
  misc_feature 1..20: note = chemically synthesized
  source 1..20: mol_type = other DNA
ttttgctttcccattaaatg

SEQ ID NO: 11777 - DNA, 20 bp, synthetic construct
  misc_feature 1..20: note = chemically synthesized
  source 1..20: mol_type = other DNA
tttgctttcccattaaatgc

SEQ ID NO: 11778 - DNA, 20 bp, synthetic construct
  misc_feature 1..20: note = chemically synthesized
  source 1..20: mol_type = other DNA
gctttcccattaaatgcagg

SEQ ID NO: 11779 - DNA, 20 bp, synthetic construct
  misc_feature 1..20: note = chemically synthesized
  source 1..20: mol_type = other DNA
gcaggtagttgttcttcttg

SEQ ID NO: 11780 - DNA, 20 bp, synthetic construct
  misc_feature 1..20: note = chemically synthesized
  source 1..20: mol_type = other DNA
agttgttcttcttgcagcac

SEQ ID NO: 11781 - DNA, 20 bp, synthetic construct
  misc_feature 1..20: note = chemically synthesized
  source 1..20: mol_type = other DNA
cttcttgcagcactagtcac

SEQ ID NO: 11782 - DNA, 20 bp, synthetic construct
  misc_feature 1..20: note = chemically synthesized
  source 1..20: mol_type = other DNA
accatgaaccctgtatgctg

SEQ ID NO: 11783 - DNA, 20 bp, synthetic construct
  misc_feature 1..20: note = chemically synthesized
  source 1..20: mol_type = other DNA
ccatgaaccctgtatgctgt

SEQ ID NO: 11784 - DNA, 20 bp, synthetic construct
  misc_feature 1..20: note = chemically synthesized
  source 1..20: mol_type = other DNA
ctgtaggctgaaaacgttaa

SEQ ID NO: 11785 - DNA, 20 bp, synthetic construct
  misc_feature 1..20: note = chemically synthesized
  source 1..20: mol_type = other DNA
cacacacacacacacacaca

SEQ ID NO: 11786 - DNA, 20 bp, synthetic construct
  misc_feature 1..20: note = chemically synthesized
  source 1..20: mol_type = other DNA
cacacacacacacacacaca

SEQ ID NO: 11787 - DNA, 20 bp, synthetic construct
  misc_feature 1..20: note = chemically synthesized
  source 1..20: mol_type = other DNA
ctgactttcaaaatctactc

SEQ ID NO: 11788 - DNA, 20 bp, synthetic construct
  misc_feature 1..20: note = chemically synthesized
  source 1..20: mol_type = other DNA
tttcaattgttcctcacccc

SEQ ID NO: 11789 - DNA, 20 bp, synthetic construct
  misc_feature 1..20: note = chemically synthesized
  source 1..20: mol_type = other DNA
ggacatactttgcccccatc

SEQ ID NO: 11790 - DNA, 20 bp, synthetic construct
  misc_feature 1..20: note = chemically synthesized
  source 1..20: mol_type = other DNA
tttgcccccatctggaatta

SEQ ID NO: 11791 - DNA, 20 bp, synthetic construct
  misc_feature 1..20: note = chemically synthesized
  source 1..20: mol_type = other DNA
ttgcccccatctggaattaa

SEQ ID NO: 11792 - DNA, 20 bp, synthetic construct
  misc_feature 1..20: note = chemically synthesized
  source 1..20: mol_type = other DNA
catctggaattaaaggatat

SEQ ID NO: 11793 - DNA, 20 bp, synthetic construct
  misc_feature 1..20: note = chemically synthesized
  source 1..20: mol_type = other DNA
aaggatataagtttgtaatg

SEQ ID NO: 11794 - DNA, 20 bp, synthetic construct
  misc_feature 1..20: note = chemically synthesized
  source 1..20: mol_type = other DNA
ataagtttgtaatgaagcat

SEQ ID NO: 11795 - DNA, 20 bp, synthetic construct
  misc_feature 1..20: note = chemically synthesized
  source 1..20: mol_type = other DNA
agtttgtaatgaagcattag

SEQ ID NO: 11796 - DNA, 20 bp, synthetic construct
  misc_feature 1..20: note = chemically synthesized
  source 1..20: mol_type = other DNA
agcagcattttatatgtgtc

SEQ ID NO: 11797 - DNA, 20 bp, synthetic construct
  misc_feature 1..20: note = chemically synthesized
  source 1..20: mol_type = other DNA
ttatatgtgtccagctgata

SEQ ID NO: 11798 - DNA, 20 bp, synthetic construct
  misc_feature 1..20: note = chemically synthesized
  source 1..20: mol_type = other DNA
tatatgtgtccagctgatat

SEQ ID NO: 11799 - DNA, 20 bp, synthetic construct
  misc_feature 1..20: note = chemically synthesized
  source 1..20: mol_type = other DNA
gtgtccagctgatataggaa

SEQ ID NO: 11800 - DNA, 20 bp, synthetic construct
  misc_feature 1..20: note = chemically synthesized
  source 1..20: mol_type = other DNA
agctgatataggaatagcct

SEQ ID NO: 11801 - DNA, 20 bp, synthetic construct
  misc_feature 1..20: note = chemically synthesized
  source 1..20: mol_type = other DNA
tagccttagcaatgtatgtt

SEQ ID NO: 11802 - DNA, 20 bp, synthetic construct
  misc_feature 1..20: note = chemically synthesized
  source 1..20: mol_type = other DNA
caatgtatgtttggccacca

SEQ ID NO: 11803 - DNA, 20 bp, synthetic construct
  misc_feature 1..20: note = chemically synthesized
  source 1..20: mol_type = other DNA
caaagttccccactttgact

SEQ ID NO: 11804 - DNA, 20 bp, synthetic construct
  misc_feature 1..20: note = chemically synthesized
  source 1..20: mol_type = other DNA
gaccatacttgtcctgcctc

SEQ ID NO: 11805 - DNA, 20 bp, synthetic construct
  misc_feature 1..20: note = chemically synthesized
  source 1..20: mol_type = other DNA
atacttgtcctgcctccaga

SEQ ID NO: 11806 - DNA, 20 bp, synthetic construct
  misc_feature 1..20: note = chemically synthesized
  source 1..20: mol_type = other DNA
tttaaaacgaataacaaaaa

SEQ ID NO: 11807 - DNA, 20 bp, synthetic construct
  misc_feature 1..20: note = chemically synthesized
  source 1..20: mol_type = other DNA
ttaaaacgaataacaaaaat

SEQ ID NO: 11808 - DNA, 20 bp, synthetic construct
  misc_feature 1..20: note = chemically synthesized
  source 1..20: mol_type = other DNA
taaaacgaataacaaaaata

SEQ ID NO: 11809 - DNA, 20 bp, synthetic construct
  misc_feature 1..20: note = chemically synthesized
  source 1..20: mol_type = other DNA
aaaacgaataacaaaaatag

SEQ ID NO: 11810 - DNA, 20 bp, synthetic construct
  misc_feature 1..20: note = chemically synthesized
  source 1..20: mol_type = other DNA
cgaataacaaaaatagggga

SEQ ID NO: 11811 - DNA, 20 bp, synthetic construct
  misc_feature 1..20: note = chemically synthesized
  source 1..20: mol_type = other DNA
gaataacaaaaataggggaa

SEQ ID NO: 11812 - DNA, 20 bp, synthetic construct
  misc_feature 1..20: note = chemically synthesized
  source 1..20: mol_type = other DNA
caaaaataggggaaaggtga

SEQ ID NO: 11813 - DNA, 20 bp, synthetic construct
  misc_feature 1..20: note = chemically synthesized
  source 1..20: mol_type = other DNA
ctttctaccgaaatctaata

SEQ ID NO: 11814 - DNA, 20 bp, synthetic construct
  misc_feature 1..20: note = chemically synthesized
  source 1..20: mol_type = other DNA
taccgaaatctaataaagaa

SEQ ID NO: 11815 - DNA, 20 bp, synthetic construct
  misc_feature 1..20: note = chemically synthesized
  source 1..20: mol_type = other DNA
tttccacctctcttttctca

SEQ ID NO: 11816 - DNA, 20 bp, synthetic construct
  misc_feature 1..20: note = chemically synthesized
  source 1..20: mol_type = other DNA
cctctcttttctcaaagtca

SEQ ID NO: 11817 - DNA, 20 bp, synthetic construct
  misc_feature 1..20: note = chemically synthesized
  source 1..20: mol_type = other DNA
caaagtcaaagttgtccatc

SEQ ID NO: 11818 - DNA, 20 bp, synthetic construct
  misc_feature 1..20: note = chemically synthesized
  source 1..20: mol_type = other DNA
aagttgtccatctagatttt

SEQ ID NO: 11819 - DNA, 20 bp, synthetic construct
  misc_feature 1..20: note = chemically synthesized
  source 1..20: mol_type = other DNA
gttgtccatctagattttca

SEQ ID NO: 11820 - DNA, 20 bp, synthetic construct
  misc_feature 1..20: note = chemically synthesized
  source 1..20: mol_type = other DNA
ttgtccatctagattttcag

SEQ ID NO: 11821 - DNA, 20 bp, synthetic construct
  misc_feature 1..20: note = chemically synthesized
  source 1..20: mol_type = other DNA
agattttcagaggcactcct

SEQ ID NO: 11822 - DNA, 20 bp, synthetic construct
  misc_feature 1..20: note = chemically synthesized
  source 1..20: mol_type = other DNA
gattttcagaggcactcctt

SEQ ID NO: 11823 - DNA, 20 bp, synthetic construct
  misc_feature 1..20: note = chemically synthesized
  source 1..20: mol_type = other DNA
aggccctaaaacattgccac

SEQ ID NO: 11824 - DNA, 20 bp, synthetic construct
  misc_feature 1..20: note = chemically synthesized
  source 1..20: mol_type = other DNA
ggccctaaaacattgccact

SEQ ID NO: 11825 - DNA, 20 bp, synthetic construct
  misc_feature 1..20: note = chemically synthesized
  source 1..20: mol_type = other DNA
aaaacattgccactgggtct

SEQ ID NO: 11826 - DNA, 20 bp, synthetic construct
  misc_feature 1..20: note = chemically synthesized
  source 1..20: mol_type = other DNA
attgccactgggtctcagcc

SEQ ID NO: 11827 - DNA, 20 bp, synthetic construct
  misc_feature 1..20: note = chemically synthesized
  source 1..20: mol_type = other DNA
ccactgggtctcagcccagt

SEQ ID NO: 11828 - DNA, 20 bp, synthetic construct
  misc_feature 1..20: note = chemically synthesized
  source 1..20: mol_type = other DNA
tcagcccagttagtcctctg

SEQ ID NO: 11829 - DNA, 20 bp, synthetic construct
  misc_feature 1..20: note = chemically synthesized
  source 1..20: mol_type = other DNA
agtttcttcactcccaaccc

SEQ ID NO: 11830 - DNA, 20 bp, synthetic construct
  misc_feature 1..20: note = chemically synthesized
  source 1..20: mol_type = other DNA
ccaaccccagtatcttcaaa

SEQ ID NO: 11831 - DNA, 20 bp, synthetic construct
  misc_feature 1..20: note = chemically synthesized
  source 1..20: mol_type = other DNA
agctcacaccctgctgtgct

SEQ ID NO: 11832 - DNA, 20 bp, synthetic construct
  misc_feature 1..20: note = chemically synthesized
  source 1..20: mol_type = other DNA
gctgtgctcagatcaatact

SEQ ID NO: 11833 - DNA, 20 bp, synthetic construct
  misc_feature 1..20: note = chemically synthesized
  source 1..20: mol_type = other DNA
agatcaatactcagttgtct

SEQ ID NO: 11834 - DNA, 20 bp, synthetic construct
  misc_feature 1..20: note = chemically synthesized
  source 1..20: mol_type = other DNA
tcagttgtctaagttgcctc

SEQ ID NO: 11835 - DNA, 20 bp, synthetic construct
  misc_feature 1..20: note = chemically synthesized
  source 1..20: mol_type = other DNA
tctaagttgcctcgagacta

SEQ ID NO: 11836 - DNA, 20 bp, synthetic construct
  misc_feature 1..20: note = chemically synthesized
  source 1..20: mol_type = other DNA
ctaagttgcctcgagactaa

SEQ ID NO: 11837 - DNA, 20 bp, synthetic construct
  misc_feature 1..20: note = chemically synthesized
  source 1..20: mol_type = other DNA
tgcctcgagactaaaggcaa

SEQ ID NO: 11838 - DNA, 20 bp, synthetic construct
  misc_feature 1..20: note = chemically synthesized
  source 1..20: mol_type = other DNA
aacagtgctgaaacatctcc

SEQ ID NO: 11839 - DNA, 20 bp, synthetic construct
  misc_feature 1..20: note = chemically synthesized
  source 1..20: mol_type = other DNA
catctcctggactcaccttg

SEQ ID NO: 11840 - DNA, 20 bp, synthetic construct
  misc_feature 1..20: note = chemically synthesized
  source 1..20: mol_type = other DNA
tggactcaccttgaagttct

SEQ ID NO: 11841 - DNA, 20 bp, synthetic construct
  misc_feature 1..20: note = chemically synthesized
  source 1..20: mol_type = other DNA
ggactcaccttgaagttctc

SEQ ID NO: 11842 - DNA, 20 bp, synthetic construct
  misc_feature 1..20: note = chemically synthesized
  source 1..20: mol_type = other DNA
aagttctcaggatccacatg

SEQ ID NO: 11843 - DNA, 20 bp, synthetic construct
  misc_feature 1..20: note = chemically synthesized
  source 1..20: mol_type = other DNA
gatccacatgcagcttgtca

SEQ ID NO: 11844 - DNA, 20 bp, synthetic construct
  misc_feature 1..20: note = chemically synthesized
  source 1..20: mol_type = other DNA
acatgcagcttgtcacagtg

SEQ ID NO: 11845 - DNA, 20 bp, synthetic construct
  misc_feature 1..20: note = chemically synthesized
  source 1..20: mol_type = other DNA
ttgtcacagtgcagttcact

SEQ ID NO: 11846 - DNA, 20 bp, synthetic construct
  misc_feature 1..20: note = chemically synthesized
  source 1..20: mol_type = other DNA
cacagtgcagttcactcagc

SEQ ID NO: 11847 - DNA, 20 bp, synthetic construct
  misc_feature 1..20: note = chemically synthesized
  source 1..20: mol_type = other DNA
acagtgcagttcactcagct

SEQ ID NO: 11848 - DNA, 20 bp, synthetic construct
  misc_feature 1..20: note = chemically synthesized
  source 1..20: mol_type = other DNA
gcagttcactcagctgggca

SEQ ID NO: 11849 - DNA, 20 bp, synthetic construct
  misc_feature 1..20: note = chemically synthesized
  source 1..20: mol_type = other DNA
cagttcactcagctgggcaa

SEQ ID NO: 11850 - DNA, 20 bp, synthetic construct
  misc_feature 1..20: note = chemically synthesized
  source 1..20: mol_type = other DNA
agctgggcaaaggtgccctt

SEQ ID NO: 11851 - DNA, 20 bp, synthetic construct
  misc_feature 1..20: note = chemically synthesized
  source 1..20: mol_type = other DNA
aaggtgcccttgagatcatc

SEQ ID NO: 11852 - DNA, 20 bp, synthetic construct
  misc_feature 1..20: note = chemically synthesized
  source 1..20: mol_type = other DNA
aggtgcccttgagatcatcc

SEQ ID NO: 11853 - DNA, 20 bp, synthetic construct
  misc_feature 1..20: note = chemically synthesized
  source 1..20: mol_type = other DNA
gagatcatccaggtgcttta

SEQ ID NO: 11854 - DNA, 20 bp, synthetic construct
  misc_feature 1..20: note = chemically synthesized
  source 1..20: mol_type = other DNA
ggtgctttatggcatctccc

SEQ ID NO: 11855 - DNA, 20 bp, synthetic construct
  misc_feature 1..20: note = chemically synthesized
  source 1..20: mol_type = other DNA
gtgctttatggcatctccca

SEQ ID NO: 11856 - DNA, 20 bp, synthetic construct
  misc_feature 1..20: note = chemically synthesized
  source 1..20: mol_type = other DNA
ctttatggcatctcccaagg

SEQ ID NO: 11857 - DNA, 20 bp, synthetic construct
  misc_feature 1..20: note = chemically synthesized
  source 1..20: mol_type = other DNA
atggcatctcccaaggaagt

SEQ ID NO: 11858 - DNA, 20 bp, synthetic construct
  misc_feature 1..20: note = chemically synthesized
  source 1..20: mol_type = other DNA
cttgccatgtgccttgactt

SEQ ID NO: 11859 - DNA, 20 bp, synthetic construct
  misc_feature 1..20: note = chemically synthesized
  source 1..20: mol_type = other DNA
ttgccatgtgccttgacttt

SEQ ID NO: 11860 - DNA, 20 bp, synthetic construct
  misc_feature 1..20: note = chemically synthesized
  source 1..20: mol_type = other DNA
tgccatgtgccttgactttg

SEQ ID NO: 11861 - DNA, 20 bp, synthetic construct
  misc_feature 1..20: note = chemically synthesized
  source 1..20: mol_type = other DNA
gactttggggttgcccatga

SEQ ID NO: 11862 - DNA, 20 bp, synthetic construct
  misc_feature 1..20: note = chemically synthesized
  source 1..20: mol_type = other DNA
tttggggttgcccatgatgg

SEQ ID NO: 11863 - DNA, 20 bp, synthetic construct
  misc_feature 1..20: note = chemically synthesized
  source 1..20: mol_type = other DNA
tggggttgcccatgatggca

SEQ ID NO: 11864 - DNA, 20 bp, synthetic construct
  misc_feature 1..20: note = chemically synthesized
  source 1..20: mol_type = other DNA
ggggttgcccatgatggcag

SEQ ID NO: 11865 - DNA, 20 bp, synthetic construct
  misc_feature 1..20: note = chemically synthesized
  source 1..20: mol_type = other DNA
gttgcccatgatggcagagg

SEQ ID NO: 11866 - DNA, 20 bp, synthetic construct
  misc_feature 1..20: note = chemically synthesized
  source 1..20: mol_type = other DNA
tgcccatgatggcagaggca

SEQ ID NO: 11867 - DNA, 20 bp, synthetic construct
  misc_feature 1..20: note = chemically synthesized
  source 1..20: mol_type = other DNA
gcccatgatggcagaggcag

SEQ ID NO: 11868 - DNA, 20 bp, synthetic construct
  misc_feature 1..20: note = chemically synthesized
  source 1..20: mol_type = other DNA
atgatggcagaggcagagga

SEQ ID NO: 11869 - DNA, 20 bp, synthetic construct
  misc_feature 1..20: note = chemically synthesized
  source 1..20: mol_type = other DNA
tgatggcagaggcagaggac

SEQ ID NO: 11870 - DNA, 20 bp, synthetic construct
  misc_feature 1..20: note = chemically synthesized
  source 1..20: mol_type = other DNA
aggcagaggacaggttgcca

SEQ ID NO: 11871 - DNA, 20 bp, synthetic construct
  misc_feature 1..20: note = chemically synthesized
  source 1..20: mol_type = other DNA
acaggttgccaaagctgtca

SEQ ID NO: 11872 - DNA, 20 bp, synthetic construct
  misc_feature 1..20: note = chemically synthesized
  source 1..20: mol_type = other DNA
caaagctgtcaaagaacctc

SEQ ID NO: 11873 - DNA, 20 bp, synthetic construct
  misc_feature 1..20: note = chemically synthesized
  source 1..20: mol_type = other DNA
aaagctgtcaaagaacctct

SEQ ID NO: 11874 - DNA, 20 bp, synthetic construct
  misc_feature 1..20: note = chemically synthesized
  source 1..20: mol_type = other DNA
tcaaagaacctctgggtcca

SEQ ID NO: 11875 - DNA, 20 bp, synthetic construct
  misc_feature 1..20: note = chemically synthesized
  source 1..20: mol_type = other DNA
caaagaacctctgggtccat

SEQ ID NO: 11876 - DNA, 20 bp, synthetic construct
  misc_feature 1..20: note = chemically synthesized
  source 1..20: mol_type = other DNA
agaacctctgggtccatggg

SEQ ID NO: 11877 - DNA, 20 bp, synthetic construct
  misc_feature 1..20: note = chemically synthesized
  source 1..20: mol_type = other DNA
tgggtccatgggtagacaac

SEQ ID NO: 11878 - DNA, 20 bp, synthetic construct
  misc_feature 1..20: note = chemically synthesized
  source 1..20: mol_type = other DNA
gggtccatgggtagacaacc

SEQ ID NO: 11879 - DNA, 20 bp, synthetic construct
  misc_feature 1..20: note = chemically synthesized
  source 1..20: mol_type = other DNA
gtccatgggtagacaaccag

SEQ ID NO: 11880 - DNA, 20 bp, synthetic construct
  misc_feature 1..20: note = chemically synthesized
  source 1..20: mol_type = other DNA
gtagacaaccaggagcctgt

SEQ ID NO: 11881 - DNA, 20 bp, synthetic construct
  misc_feature 1..20: note = chemically synthesized
  source 1..20: mol_type = other DNA
caggagcctgtgagattgac

SEQ ID NO: 11882 - DNA, 20 bp, synthetic construct
  misc_feature 1..20: note = chemically synthesized
  source 1..20: mol_type = other DNA
gcctgtgagattgacaagaa

SEQ ID NO: 11883 - DNA, 20 bp, synthetic construct
  misc_feature 1..20: note = chemically synthesized
  source 1..20: mol_type = other DNA
gattgacaagaacagtttga

SEQ ID NO: 11884 - DNA, 20 bp, synthetic construct
  misc_feature 1..20: note = chemically synthesized
  source 1..20: mol_type = other DNA
gacaagaacagtttgacagt

SEQ ID NO: 11885 - DNA, 20 bp, synthetic construct
  misc_feature 1..20: note = chemically synthesized
  source 1..20: mol_type = other DNA
aagaacagtttgacagtcag

SEQ ID NO: 11886 - DNA, 20 bp, synthetic construct
  misc_feature 1..20: note = chemically synthesized
  source 1..20: mol_type = other DNA
agaacagtttgacagtcaga

SEQ ID NO: 11887 - DNA, 20 bp, synthetic construct
  misc_feature 1..20: note = chemically synthesized
  source 1..20: mol_type = other DNA
cagaaggtgccacaaatcct

SEQ ID NO: 11888 - DNA, 20 bp, synthetic construct
  misc_feature 1..20: note = chemically synthesized
  source 1..20: mol_type = other DNA
aaggtgccacaaatcctgag

SEQ ID NO: 11889 - DNA, 20 bp, synthetic construct
  misc_feature 1..20: note = chemically synthesized
  source 1..20: mol_type = other DNA
acaaatcctgagaagcgacc

SEQ ID NO: 11890 - DNA, 20 bp, synthetic construct
  misc_feature 1..20: note = chemically synthesized
  source 1..20: mol_type = other DNA
gaagcgacctggacttttgc

SEQ ID NO: 11891 - DNA, 20 bp, synthetic construct
  misc_feature 1..20: note = chemically synthesized
  source 1..20: mol_type = other DNA
aagcgacctggacttttgcc

SEQ ID NO: 11892 - DNA, 20 bp, synthetic construct
  misc_feature 1..20: note = chemically synthesized
  source 1..20: mol_type = other DNA
acctggacttttgccaggca

SEQ ID NO: 11893 - DNA, 20 bp, synthetic construct
  misc_feature 1..20: note = chemically synthesized
  source 1..20: mol_type = other DNA
cctggacttttgccaggcac

SEQ ID NO: 11894 - DNA, 20 bp, synthetic construct
  misc_feature 1..20: note = chemically synthesized
  source 1..20: mol_type = other DNA
ctggacttttgccaggcaca

SEQ ID NO: 11895 - DNA, 20 bp, synthetic construct
  misc_feature 1..20: note = chemically synthesized
  source 1..20: mol_type = other DNA
cttccttccctcccttgtcc

SEQ ID NO: 11896 - DNA, 20 bp, synthetic construct
  misc_feature 1..20: note = chemically synthesized
  source 1..20: mol_type = other DNA
ccctcccttgtcctggtcac

SEQ ID NO: 11897 - DNA, 20 bp, synthetic construct
  misc_feature 1..20: note = chemically synthesized
  source 1..20: mol_type = other DNA
ctcccttgtcctggtcacca

SEQ ID NO: 11898 - DNA, 20 bp, synthetic construct
  misc_feature 1..20: note = chemically synthesized
  source 1..20: mol_type = other DNA
gtcaccagagcctaccttcc

SEQ ID NO: 11899 - DNA, 20 bp, synthetic construct
  misc_feature 1..20: note = chemically synthesized
  source 1..20: mol_type = other DNA
tcaccagagcctaccttccc

SEQ ID NO: 11900 - DNA, 20 bp, synthetic construct
  misc_feature 1..20: note = chemically synthesized
  source 1..20: mol_type = other DNA
caccagagcctaccttccca

SEQ ID NO: 11901 - DNA, 20 bp, synthetic construct
  misc_feature 1..20: note = chemically synthesized
  source 1..20: mol_type = other DNA
ccttcccagggtttctcctc

SEQ ID NO: 11902 - DNA, 20 bp, synthetic construct
  misc_feature 1..20: note = chemically synthesized
  source 1..20: mol_type = other DNA
tccacattcaccttgcccca

SEQ ID NO: 11903 - DNA, 20 bp, synthetic construct
  misc_feature 1..20: note = chemically synthesized
  source 1..20: mol_type = other DNA
ccacattcaccttgccccac

SEQ ID NO: 11904 - DNA, 20 bp, synthetic construct
  misc_feature 1..20: note = chemically synthesized
  source 1..20: mol_type = other DNA
cttgccccacaggcttgtga

SEQ ID NO: 11905 - DNA, 20 bp, synthetic construct
  misc_feature 1..20: note = chemically synthesized
  source 1..20: mol_type = other DNA
gccccacaggcttgtgatag

SEQ ID NO: 11906 - DNA, 20 bp, synthetic construct
  misc_feature 1..20: note = chemically synthesized
  source 1..20: mol_type = other DNA
ctcctctgtgaaatgaccca

SEQ ID NO: 11907 - DNA, 20 bp, synthetic construct
  misc_feature 1..20: note = chemically synthesized
  source 1..20: mol_type = other DNA
gtgaaatgacccatggcgtc

SEQ ID NO: 11908 - DNA, 20 bp, synthetic construct
  misc_feature 1..20: note = chemically synthesized
  source 1..20: mol_type = other DNA
atgacccatggcgtctggac

SEQ ID NO: 11909 - DNA, 20 bp, synthetic construct
  misc_feature 1..20: note = chemically synthesized
  source 1..20: mol_type = other DNA
tgacccatggcgtctggact

SEQ ID NO: 11910 - DNA, 20 bp, synthetic construct
  misc_feature 1..20: note = chemically synthesized
  source 1..20: mol_type = other DNA
acccatggcgtctggactag

SEQ ID NO: 11911 - DNA, 20 bp, synthetic construct
  misc_feature 1..20: note = chemically synthesized
  source 1..20: mol_type = other DNA
taggagcttattgataacct

SEQ ID NO: 11912 - DNA, 20 bp, synthetic construct
  misc_feature 1..20: note = chemically synthesized
  source 1..20: mol_type = other DNA
attgataacctcagacgttc

SEQ ID NO: 11913 - DNA, 20 bp, synthetic construct
  misc_feature 1..20: note = chemically synthesized
  source 1..20: mol_type = other DNA
gataacctcagacgttccag

SEQ ID NO: 11914 - DNA, 20 bp, synthetic construct
  misc_feature 1..20: note = chemically synthesized
  source 1..20: mol_type = other DNA
acctcagacgttccagaagc

SEQ ID NO: 11915 - DNA, 20 bp, synthetic construct
  misc_feature 1..20: note = chemically synthesized
  source 1..20: mol_type = other DNA
acgttccagaagcgagtgtg

SEQ ID NO: 11916 - DNA, 20 bp, synthetic construct
  misc_feature 1..20: note = chemically synthesized
  source 1..20: mol_type = other DNA
gcgagtgtgtggaactgctg

SEQ ID NO: 11917 - DNA, 20 bp, synthetic construct
  misc_feature 1..20: note = chemically synthesized
  source 1..20: mol_type = other DNA
cgagtgtgtggaactgctga

SEQ ID NO: 11918 - DNA, 20 bp, synthetic construct
  misc_feature 1..20: note = chemically synthesized
  source 1..20: mol_type = other DNA
gagtgtgtggaactgctgaa

SEQ ID NO: 11919 - DNA, 20 bp, synthetic construct
  misc_feature 1..20: note = chemically synthesized
  source 1..20: mol_type = other DNA
ttccttttattcttcatccc

SEQ ID NO: 11920 - DNA, 20 bp, synthetic construct
  misc_feature 1..20: note = chemically synthesized
  source 1..20: mol_type = other DNA
ttttattcttcatccctagc

SEQ ID NO: 11921 - DNA, 20 bp, synthetic construct
  misc_feature 1..20: note = chemically synthesized
  source 1..20: mol_type = other DNA
cttcatccctagccagccgc

SEQ ID NO: 11922 - DNA, 20 bp, synthetic construct
  misc_feature 1..20: note = chemically synthesized
  source 1..20: mol_type = other DNA
cctagccagccgccggcccc

SEQ ID NO: 11923 - DNA, 20 bp, synthetic construct
  misc_feature 1..20: note = chemically synthesized
  source 1..20: mol_type = other DNA
ccgccggcccctggcctcac

SEQ ID NO: 11924 - DNA, 20 bp, synthetic construct
  misc_feature 1..20: note = chemically synthesized
  source 1..20: mol_type = other DNA
ctggcctcactggatactct

SEQ ID NO: 11925 - DNA, 20 bp, synthetic construct
  misc_feature 1..20: note = chemically synthesized
  source 1..20: mol_type = other DNA
actggatactctaagactat

SEQ ID NO: 11926 - DNA, 20 bp, synthetic construct
  misc_feature 1..20: note = chemically synthesized
  source 1..20: mol_type = other DNA
atactctaagactattggtc

SEQ ID NO: 11927 - DNA, 20 bp, synthetic construct
  misc_feature 1..20: note = chemically synthesized
  source 1..20: mol_type = other DNA
ttggtcaagtttgccttgtc

SEQ ID NO: 11928 - DNA, 20 bp, synthetic construct
  misc_feature 1..20: note = chemically synthesized
  source 1..20: mol_type = other DNA
tggtcaagtttgccttgtca

SEQ ID NO: 11929 - DNA, 20 bp, synthetic construct
  misc_feature 1..20: note = chemically synthesized
  source 1..20: mol_type = other DNA
gtttgccttgtcaaggctat

SEQ ID NO: 11930 - DNA, 20 bp, synthetic construct
  misc_feature 1..20: note = chemically synthesized
  source 1..20: mol_type = other DNA
ccttgtcaaggctattggtc

SEQ ID NO: 11931 - DNA, 20 bp, synthetic construct
  misc_feature 1..20: note = chemically synthesized
  source 1..20: mol_type = other DNA
cttgtcaaggctattggtca

SEQ ID NO: 11932 - DNA, 20 bp, synthetic construct
  misc_feature 1..20: note = chemically synthesized
  source 1..20: mol_type = other DNA
tcaaggctattggtcaaggc

SEQ ID NO: 11933 - DNA, 20 bp, synthetic construct
  misc_feature 1..20: note = chemically synthesized
  source 1..20: mol_type = other DNA
caaggctattggtcaaggca

SEQ ID NO: 11934 - DNA, 20 bp, synthetic construct
  misc_feature 1..20: note = chemically synthesized
  source 1..20: mol_type = other DNA
gctattggtcaaggcaaggc

SEQ ID NO: 11935 - DNA, 20 bp, synthetic construct
  misc_feature 1..20: note = chemically synthesized
  source 1..20: mol_type = other DNA
aggcaaggctggccaaccca

SEQ ID NO: 11936 - DNA, 20 bp, synthetic construct
  misc_feature 1..20: note = chemically synthesized
  source 1..20: mol_type = other DNA
ggcaaggctggccaacccat

SEQ ID NO: 11937 - DNA, 20 bp, synthetic construct
  misc_feature 1..20: note = chemically synthesized
  source 1..20: mol_type = other DNA
aaggctggccaacccatggg

SEQ ID NO: 11938 - DNA, 20 bp, synthetic construct
  misc_feature 1..20: note = chemically synthesized
  source 1..20: mol_type = other DNA
ggctggccaacccatgggtg

SEQ ID NO: 11939 - DNA, 20 bp, synthetic construct
  misc_feature 1..20: note = chemically synthesized
  source 1..20: mol_type = other DNA
gccaacccatgggtggagtt

SEQ ID NO: 11940 - DNA, 20 bp, synthetic construct
  misc_feature 1..20: note = chemically synthesized
  source 1..20: mol_type = other DNA
acccatgggtggagtttagc

SEQ ID NO: 11941 - DNA, 20 bp, synthetic construct
  misc_feature 1..20: note = chemically synthesized
  source 1..20: mol_type = other DNA
cccatgggtggagtttagcc

SEQ ID NO: 11942 - DNA, 20 bp, synthetic construct
  misc_feature 1..20: note = chemically synthesized
  source 1..20: mol_type = other DNA
ccatgggtggagtttagcca

SEQ ID NO: 11943 - DNA, 20 bp, synthetic construct
  misc_feature 1..20: note = chemically synthesized
  source 1..20: mol_type = other DNA
agtttagccagggaccgttt

SEQ ID NO: 11944 - DNA, 20 bp, synthetic construct
  misc_feature 1..20: note = chemically synthesized
  source 1..20: mol_type = other DNA
tagccagggaccgtttcaga

SEQ ID NO: 11945 - DNA, 20 bp, synthetic construct
  misc_feature 1..20: note = chemically synthesized
  source 1..20: mol_type = other DNA
ttcagacagatatttgcatt

SEQ ID NO: 11946 - DNA, 20 bp, synthetic construct
  misc_feature 1..20: note = chemically synthesized
  source 1..20: mol_type = other DNA
gacagatatttgcattgaga

SEQ ID NO: 11947 - DNA, 20 bp, synthetic construct
  misc_feature 1..20: note = chemically synthesized
  source 1..20: mol_type = other DNA
atatttgcattgagatagtg

SEQ ID NO: 11948 - DNA, 20 bp, synthetic construct
  misc_feature 1..20: note = chemically synthesized
  source 1..20: mol_type = other DNA
tatttgcattgagatagtgt

SEQ ID NO: 11949 - DNA, 20 bp, synthetic construct
  misc_feature 1..20: note = chemically synthesized
  source 1..20: mol_type = other DNA
atttgcattgagatagtgtg

SEQ ID NO: 11950 - DNA, 20 bp, synthetic construct
  misc_feature 1..20: note = chemically synthesized
  source 1..20: mol_type = other DNA
tgcattgagatagtgtgggg

SEQ ID NO: 11951 - DNA, 20 bp, synthetic construct
  misc_feature 1..20: note = chemically synthesized
  source 1..20: mol_type = other DNA
gcattgagatagtgtgggga

SEQ ID NO: 11952 - DNA, 20 bp, synthetic construct
  misc_feature 1..20: note = chemically synthesized
  source 1..20: mol_type = other DNA
cattgagatagtgtggggaa

SEQ ID NO: 11953 - DNA, 20 bp, synthetic construct
  misc_feature 1..20: note = chemically synthesized
  source 1..20: mol_type = other DNA
attgagatagtgtggggaag

SEQ ID NO: 11954 - DNA, 20 bp, synthetic construct
  misc_feature 1..20: note = chemically synthesized
  source 1..20: mol_type = other DNA
agtgtggggaaggggccccc

SEQ ID NO: 11955 - DNA, 20 bp, synthetic construct
  misc_feature 1..20: note = chemically synthesized
  source 1..20: mol_type = other DNA
tgtggggaaggggcccccaa

SEQ ID NO: 11956 - DNA, 20 bp, synthetic construct
  misc_feature 1..20: note = chemically synthesized
  source 1..20: mol_type = other DNA
gtggggaaggggcccccaag

SEQ ID NO: 11957 - DNA, 20 bp, synthetic construct
  misc_feature 1..20: note = chemically synthesized
  source 1..20: mol_type = other DNA
ctgctgcttaatttttttta

SEQ ID NO: 11958 - DNA, 20 bp, synthetic construct
  misc_feature 1..20: note = chemically synthesized
  source 1..20: mol_type = other DNA
gcctttgccttgttccgatt

SEQ ID NO: 11959 - DNA, 20 bp, synthetic construct
  misc_feature 1..20: note = chemically synthesized
  source 1..20: mol_type = other DNA
ctctaatttattcttccctt

SEQ ID NO: 11960 - DNA, 20 bp, synthetic construct
  misc_feature 1..20: note = chemically synthesized
  source 1..20: mol_type = other DNA
aatttattcttccctttagc

SEQ ID NO: 11961 - DNA, 20 bp, synthetic construct
  misc_feature 1..20: note = chemically synthesized
  source 1..20: mol_type = other DNA
ctagttttcttctcccacca

SEQ ID NO: 11962 - DNA, 20 bp, synthetic construct
  misc_feature 1..20: note = chemically synthesized
  source 1..20: mol_type = other DNA
gttttcttctcccaccatag

SEQ ID NO: 11963 - DNA, 20 bp, synthetic construct
  misc_feature 1..20: note = chemically synthesized
  source 1..20: mol_type = other DNA
tctcccaccatagaagatac

SEQ ID NO: 11964 - DNA, 20 bp, synthetic construct
  misc_feature 1..20: note = chemically synthesized
  source 1..20: mol_type = other DNA
ctcccaccatagaagatacc

SEQ ID NO: 11965 - DNA, 20 bp, synthetic construct
  misc_feature 1..20: note = chemically synthesized
  source 1..20: mol_type = other DNA
gataccaggacttcttttgt

SEQ ID NO: 11966 - DNA, 20 bp, synthetic construct
  misc_feature 1..20: note = chemically synthesized
  source 1..20: mol_type = other DNA
gtttttcaccttcttgtctg

SEQ ID NO: 11967 - DNA, 20 bp, synthetic construct
  misc_feature 1..20: note = chemically synthesized
  source 1..20: mol_type = other DNA
caccttcttgtctgtagctc

SEQ ID NO: 11968 - DNA, 20 bp, synthetic construct
  misc_feature 1..20: note = chemically synthesized
  source 1..20: mol_type = other DNA
ttcttgtctgtagctccagt

SEQ ID NO: 11969 - DNA, 20 bp, synthetic construct
  misc_feature 1..20: note = chemically synthesized
  source 1..20: mol_type = other DNA
tcttgtctgtagctccagtg

SEQ ID NO: 11970 - DNA, 20 bp, synthetic construct
  misc_feature 1..20: note = chemically synthesized
  source 1..20: mol_type = other DNA
tgtagctccagtgaggcctg

SEQ ID NO: 11971 - DNA, 20 bp, synthetic construct
  misc_feature 1..20: note = chemically synthesized
  source 1..20: mol_type = other DNA
ccagtgaggcctgtagttta

SEQ ID NO: 11972 - DNA, 20 bp, synthetic construct
  misc_feature 1..20: note = chemically synthesized
  source 1..20: mol_type = other DNA
aggcctgtagtttaaagtta

SEQ ID NO: 11973 - DNA, 20 bp, synthetic construct
  misc_feature 1..20: note = chemically synthesized
  source 1..20: mol_type = other DNA
agcatgtaccaatttttgaa

SEQ ID NO: 11974 - DNA, 20 bp, synthetic construct
  misc_feature 1..20: note = chemically synthesized
  source 1..20: mol_type = other DNA
gtaccaatttttgaaaagtt

SEQ ID NO: 11975 - DNA, 20 bp, synthetic construct
  misc_feature 1..20: note = chemically synthesized
  source 1..20: mol_type = other DNA
taccaatttttgaaaagttc

SEQ ID NO: 11976 - DNA, 20 bp, synthetic construct
  misc_feature 1..20: note = chemically synthesized
  source 1..20: mol_type = other DNA
accaatttttgaaaagttca

SEQ ID NO: 11977 - DNA, 20 bp, synthetic construct
  misc_feature 1..20: note = chemically synthesized
  source 1..20: mol_type = other DNA
agggattgtgaaatgtgttt

SEQ ID NO: 11978 - DNA, 20 bp, synthetic construct
  misc_feature 1..20: note = chemically synthesized
  source 1..20: mol_type = other DNA
gggattgtgaaatgtgtttt

SEQ ID NO: 11979 - DNA, 20 bp, synthetic construct
  misc_feature 1..20: note = chemically synthesized
  source 1..20: mol_type = other DNA
tgtgaaatgtgttttaggca

SEQ ID NO: 11980 - DNA, 20 bp, synthetic construct
  misc_feature 1..20: note = chemically synthesized
  source 1..20: mol_type = other DNA
gtgaaatgtgttttaggcat

SEQ ID NO: 11981 - DNA, 20 bp, synthetic construct
  misc_feature 1..20: note = chemically synthesized
  source 1..20: mol_type = other DNA
atgtgttttaggcataggtc

SEQ ID NO: 11982 - DNA, 20 bp, synthetic construct
  misc_feature 1..20: note = chemically synthesized
  source 1..20: mol_type = other DNA
tgtgttttaggcataggtcc

SEQ ID NO: 11983 - DNA, 20 bp, synthetic construct
  misc_feature 1..20: note = chemically synthesized
  source 1..20: mol_type = other DNA
cataggtccaggatttttga

SEQ ID NO: 11984 - DNA, 20 bp, synthetic construct
  misc_feature 1..20: note = chemically synthesized
  source 1..20: mol_type = other DNA
ataggtccaggatttttgat

SEQ ID NO: 11985 - DNA, 20 bp, synthetic construct
  misc_feature 1..20: note = chemically synthesized
  source 1..20: mol_type = other DNA
atttttgatgggacacgtct

SEQ ID NO: 11986 - DNA, 20 bp, synthetic construct
  misc_feature 1..20: note = chemically synthesized
  source 1..20: mol_type = other DNA
ggacacgtcttagtctcatt

SEQ ID NO: 11987 - DNA, 20 bp, synthetic construct
  misc_feature 1..20: note = chemically synthesized
  source 1..20: mol_type = other DNA
acgtcttagtctcatttagt

SEQ ID NO: 11988 - DNA, 20 bp, synthetic construct
  misc_feature 1..20: note = chemically synthesized
  source 1..20: mol_type = other DNA
tagtctcatttagtaagcat

SEQ ID NO: 11989 - DNA, 20 bp, synthetic construct
  misc_feature 1..20: note = chemically synthesized
  source 1..20: mol_type = other DNA
gtaagcattggtttccaaat

SEQ ID NO: 11990 - DNA, 20 bp, synthetic construct
  misc_feature 1..20: note = chemically synthesized
  source 1..20: mol_type = other DNA
agcattggtttccaaataag

SEQ ID NO: 11991 - DNA, 20 bp, synthetic construct
  misc_feature 1..20: note = chemically synthesized
  source 1..20: mol_type = other DNA
atctttgaatatactctctg

SEQ ID NO: 11992 - DNA, 20 bp, synthetic construct
  misc_feature 1..20: note = chemically synthesized
  source 1..20: mol_type = other DNA
gaatatactctctgtggttt

SEQ ID NO: 11993 - DNA, 20 bp, synthetic construct
  misc_feature 1..20: note = chemically synthesized
  source 1..20: mol_type = other DNA
aatatactctctgtggtttt

SEQ ID NO: 11994 - DNA, 20 bp, synthetic construct
  misc_feature 1..20: note = chemically synthesized
  source 1..20: mol_type = other DNA
gttttaggccattatctctt

SEQ ID NO: 11995 - DNA, 20 bp, synthetic construct
  misc_feature 1..20: note = chemically synthesized
  source 1..20: mol_type = other DNA
attatctcttaagttctcat

SEQ ID NO: 11996 - DNA, 20 bp, synthetic construct
  misc_feature 1..20: note = chemically synthesized
  source 1..20: mol_type = other DNA
ctcttaagttctcattagtg

SEQ ID NO: 11997 - DNA, 20 bp, synthetic construct
  misc_feature 1..20: note = chemically synthesized
  source 1..20: mol_type = other DNA
gtgtagtgaaaaatcctata

SEQ ID NO: 11998 - DNA, 20 bp, synthetic construct
  misc_feature 1..20: note = chemically synthesized
  source 1..20: mol_type = other DNA
tgaaaaatcctataaagcaa

SEQ ID NO: 11999 - DNA, 20 bp, synthetic construct
  misc_feature 1..20: note = chemically synthesized
  source 1..20: mol_type = other DNA
atcctataaagcaacagttt

SEQ ID NO: 12000 - DNA, 20 bp, synthetic construct
  misc_feature 1..20: note = chemically synthesized
  source 1..20: mol_type = other DNA
ataaagcaacagtttcagtg

SEQ ID NO: 12001 - DNA, 20 bp, synthetic construct
  misc_feature 1..20: note = chemically synthesized
  source 1..20: mol_type = other DNA
taaagcaacagtttcagtgc

SEQ ID NO: 12002 - DNA, 20 bp, synthetic construct
  misc_feature 1..20: note = chemically synthesized
  source 1..20: mol_type = other DNA
caacagtttcagtgcaggaa

SEQ ID NO: 12003 - DNA, 20 bp, synthetic construct
  misc_feature 1..20: note = chemically synthesized
  source 1..20: mol_type = other DNA
aatgttatgtaatataatat

SEQ ID NO: 12004 - DNA, 20 bp, synthetic construct
  misc_feature 1..20: note = chemically synthesized
  source 1..20: mol_type = other DNA
aaatcacgcctgtttcatct

SEQ ID NO: 12005 - DNA, 20 bp, synthetic construct
  misc_feature 1..20: note = chemically synthesized
  source 1..20: mol_type = other DNA
cgcctgtttcatctcagcaa

SEQ ID NO: 12006 - DNA, 20 bp, synthetic construct
  misc_feature 1..20: note = chemically synthesized
  source 1..20: mol_type = other DNA
aaaagtattttttttatatt

SEQ ID NO: 12007 - DNA, 20 bp, synthetic construct
  misc_feature 1..20: note = chemically synthesized
  source 1..20: mol_type = other DNA
aaagtattttttttatattc

SEQ ID NO: 12008 - DNA, 20 bp, synthetic construct
  misc_feature 1..20: note = chemically synthesized
  source 1..20: mol_type = other DNA
tttatattcaggtatgtatg

SEQ ID NO: 12009 - DNA, 20 bp, synthetic construct
  misc_feature 1..20: note = chemically synthesized
  source 1..20: mol_type = other DNA
ttatattcaggtatgtatgt

SEQ ID NO: 12010 - DNA, 20 bp, synthetic construct
  misc_feature 1..20: note = chemically synthesized
  source 1..20: mol_type = other DNA
cgatgatgtgtatttatcac

SEQ ID NO: 12011 - DNA, 20 bp, synthetic construct
  misc_feature 1..20: note = chemically synthesized
  source 1..20: mol_type = other DNA
atgtgtatttatcactggat

SEQ ID NO: 12012 - DNA, 20 bp, synthetic construct
  misc_feature 1..20: note = chemically synthesized
  source 1..20: mol_type = other DNA
cactggataagtgtatgtgc

SEQ ID NO: 12013 - DNA, 20 bp, synthetic construct
  misc_feature 1..20: note = chemically synthesized
  source 1..20: mol_type = other DNA
gtatgtgctggctgatgacc

SEQ ID NO: 12014 - DNA, 20 bp, synthetic construct
  misc_feature 1..20: note = chemically synthesized
  source 1..20: mol_type = other DNA
tatgtgctggctgatgaccc

SEQ ID NO: 12015 - DNA, 20 bp, synthetic construct
  misc_feature 1..20: note = chemically synthesized
  source 1..20: mol_type = other DNA
atgtgctggctgatgaccca

SEQ ID NO: 12016 - DNA, 20 bp, synthetic construct
  misc_feature 1..20: note = chemically synthesized
  source 1..20: mol_type = other DNA
tggctgatgacccagggttt

SEQ ID NO: 12017 - DNA, 20 bp, synthetic construct
  misc_feature 1..20: note = chemically synthesized
  source 1..20: mol_type = other DNA
gatgacccagggttttggtg

SEQ ID NO: 12018 - DNA, 20 bp, synthetic construct
  misc_feature 1..20: note = chemically synthesized
  source 1..20: mol_type = other DNA
tggtgtagctcttctatgct

SEQ ID NO: 12019 - DNA, 20 bp, synthetic construct
  misc_feature 1..20: note = chemically synthesized
  source 1..20: mol_type = other DNA
tagctcttctatgctcggta

SEQ ID NO: 12020 - DNA, 20 bp, synthetic construct
  misc_feature 1..20: note = chemically synthesized
  source 1..20: mol_type = other DNA
tctatgctcggtaaagatga

SEQ ID NO: 12021 - DNA, 20 bp, synthetic construct
  misc_feature 1..20: note = chemically synthesized
  source 1..20: mol_type = other DNA
atgctcggtaaagatgatgg

SEQ ID NO: 12022 - DNA, 20 bp, synthetic construct
  misc_feature 1..20: note = chemically synthesized
  source 1..20: mol_type = other DNA
gatggtagaatgctctttac

SEQ ID NO: 12023 - DNA, 20 bp, synthetic construct
  misc_feature 1..20: note = chemically synthesized
  source 1..20: mol_type = other DNA
atgctctttaccagatacta

SEQ ID NO: 12024 - DNA, 20 bp, synthetic construct
  misc_feature 1..20: note = chemically synthesized
  source 1..20: mol_type = other DNA
ctttaccagatactatggat

SEQ ID NO: 12025 - DNA, 20 bp, synthetic construct
  misc_feature 1..20: note = chemically synthesized
  source 1..20: mol_type = other DNA
taattatcttgtataaatgc

SEQ ID NO: 12026 - DNA, 20 bp, synthetic construct
  misc_feature 1..20: note = chemically synthesized
  source 1..20: mol_type = other DNA
aattatcttgtataaatgct

SEQ ID NO: 12027 - DNA, 20 bp, synthetic construct
  misc_feature 1..20: note = chemically synthesized
  source 1..20: mol_type = other DNA
taaatgctaggttcacttct

SEQ ID NO: 12028 - DNA, 20 bp, synthetic construct
  misc_feature 1..20: note = chemically synthesized
  source 1..20: mol_type = other DNA
aaatgctaggttcacttctt

SEQ ID NO: 12029 - DNA, 20 bp, synthetic construct
  misc_feature 1..20: note = chemically synthesized
  source 1..20: mol_type = other DNA
aatgctaggttcacttctta

SEQ ID NO: 12030 - DNA, 20 bp, synthetic construct
  misc_feature 1..20: note = chemically synthesized
  source 1..20: mol_type = other DNA
ttcttagggaatcttattct

SEQ ID NO: 12031 - DNA, 20 bp, synthetic construct
  misc_feature 1..20: note = chemically synthesized
  source 1..20: mol_type = other DNA
ggaatcttattctaagacat

SEQ ID NO: 12032 - DNA, 20 bp, synthetic construct
  misc_feature 1..20: note = chemically synthesized
  source 1..20: mol_type = other DNA
acataagacatgtatttgca

SEQ ID NO: 12033 - DNA, 20 bp, synthetic construct
  misc_feature 1..20: note = chemically synthesized
  source 1..20: mol_type = other DNA
ttgcatggaaaacaactctt

SEQ ID NO: 12034 - DNA, 20 bp, synthetic construct
  misc_feature 1..20: note = chemically synthesized
  source 1..20: mol_type = other DNA
gcatggaaaacaactcttaa

SEQ ID NO: 12035 - DNA, 20 bp, synthetic construct
  misc_feature 1..20: note = chemically synthesized
  source 1..20: mol_type = other DNA
catggaaaacaactcttaag

SEQ ID NO: 12036 - DNA, 20 bp, synthetic construct
  misc_feature 1..20: note = chemically synthesized
  source 1..20: mol_type = other DNA
ggaaaacaactcttaagagg

SEQ ID NO: 12037 - DNA, 20 bp, synthetic construct
  misc_feature 1..20: note = chemically synthesized
  source 1..20: mol_type = other DNA
gaaaacaactcttaagaggc

SEQ ID NO: 12038 - DNA, 20 bp, synthetic construct
  misc_feature 1..20: note = chemically synthesized
  source 1..20: mol_type = other DNA
aaaacaactcttaagaggca

SEQ ID NO: 12039 - DNA, 20 bp, synthetic construct
  misc_feature 1..20: note = chemically synthesized
  source 1..20: mol_type = other DNA
gggactgttttattgactaa

SEQ ID NO: 12040 - DNA, 20 bp, synthetic construct
  misc_feature 1..20: note = chemically synthesized
  source 1..20: mol_type = other DNA
taatagtccacacactgtga

SEQ ID NO: 12041 - DNA, 20 bp, synthetic construct
  misc_feature 1..20: note = chemically synthesized
  source 1..20: mol_type = other DNA
agtccacacactgtgacagc

SEQ ID NO: 12042 - DNA, 20 bp, synthetic construct
  misc_feature 1..20: note = chemically synthesized
  source 1..20: mol_type = other DNA
gtccacacactgtgacagct

SEQ ID NO: 12043 - DNA, 20 bp, synthetic construct
  misc_feature 1..20: note = chemically synthesized
  source 1..20: mol_type = other DNA
tgacagctgggatgtcactg

SEQ ID NO: 12044 - DNA, 20 bp, synthetic construct
  misc_feature 1..20: note = chemically synthesized
  source 1..20: mol_type = other DNA
gctgggatgtcactgtagtt

SEQ ID NO: 12045 - DNA, 20 bp, synthetic construct
  misc_feature 1..20: note = chemically synthesized
  source 1..20: mol_type = other DNA
agacatctttatctgtaact

SEQ ID NO: 12046 - DNA, 20 bp, synthetic construct
  misc_feature 1..20: note = chemically synthesized
  source 1..20: mol_type = other DNA
cagtgctgtttctgacatat

SEQ ID NO: 12047 - DNA, 20 bp, synthetic construct
  misc_feature 1..20: note = chemically synthesized
  source 1..20: mol_type = other DNA
gacatattggccacttaaca

SEQ ID NO: 12048 - DNA, 20 bp, synthetic construct
  misc_feature 1..20: note = chemically synthesized
  source 1..20: mol_type = other DNA
atattggccacttaacatgg

SEQ ID NO: 12049 - DNA, 20 bp, synthetic construct
  misc_feature 1..20: note = chemically synthesized
  source 1..20: mol_type = other DNA
tattggccacttaacatggc

SEQ ID NO: 12050 - DNA, 20 bp, synthetic construct
  misc_feature 1..20: note = chemically synthesized
  source 1..20: mol_type = other DNA
tggccacttaacatggcagg

SEQ ID NO: 12051 - DNA, 20 bp, synthetic construct
  misc_feature 1..20: note = chemically synthesized
  source 1..20: mol_type = other DNA
ttttttctttattttttctt

SEQ ID NO: 12052 - DNA, 20 bp, synthetic construct
  misc_feature 1..20: note = chemically synthesized
  source 1..20: mol_type = other DNA
tttttctttattttttcttt

SEQ ID NO: 12053 - DNA, 20 bp, synthetic construct
  misc_feature 1..20: note = chemically synthesized
  source 1..20: mol_type = other DNA
tctttgggatttttattttt

SEQ ID NO: 12054 - DNA, 20 bp, synthetic construct
  misc_feature 1..20: note = chemically synthesized
  source 1..20: mol_type = other DNA
ttgggatttttattttttgg

SEQ ID NO: 12055 - DNA, 20 bp, synthetic construct
  misc_feature 1..20: note = chemically synthesized
  source 1..20: mol_type = other DNA
tgggatttttattttttggt

SEQ ID NO: 12056 - DNA, 20 bp, synthetic construct
  misc_feature 1..20: note = chemically synthesized
  source 1..20: mol_type = other DNA
tttttattttttggtaggtt

SEQ ID NO: 12057 - DNA, 20 bp, synthetic construct
  misc_feature 1..20: note = chemically synthesized
  source 1..20: mol_type = other DNA
ctgaactcgatccatgacct

SEQ ID NO: 12058 - DNA, 20 bp, synthetic construct
  misc_feature 1..20: note = chemically synthesized
  source 1..20: mol_type = other DNA
aactcgatccatgaccttgg

SEQ ID NO: 12059 - DNA, 20 bp, synthetic construct
  misc_feature 1..20: note = chemically synthesized
  source 1..20: mol_type = other DNA
accttggtagattatgacgt

SEQ ID NO: 12060 - DNA, 20 bp, synthetic construct
  misc_feature 1..20: note = chemically synthesized
  source 1..20: mol_type = other DNA
gattatgacgtcagaaactc

SEQ ID NO: 12061 - DNA, 20 bp, synthetic construct
  misc_feature 1..20: note = chemically synthesized
  source 1..20: mol_type = other DNA
cgtcagaaactctggaaatc

SEQ ID NO: 12062 - DNA, 20 bp, synthetic construct
  misc_feature 1..20: note = chemically synthesized
  source 1..20: mol_type = other DNA
actctggaaatctggcttat

SEQ ID NO: 12063 - DNA, 20 bp, synthetic construct
  misc_feature 1..20: note = chemically synthesized
  source 1..20: mol_type = other DNA
tctggaaatctggcttattg

SEQ ID NO: 12064 - DNA, 20 bp, synthetic construct
  misc_feature 1..20: note = chemically synthesized
  source 1..20: mol_type = other DNA
ctggaaatctggcttattgg

SEQ ID NO: 12065 - DNA, 20 bp, synthetic construct
  misc_feature 1..20: note = chemically synthesized
  source 1..20: mol_type = other DNA
ggaaatctggcttattggag

SEQ ID NO: 12066 - DNA, 20 bp, synthetic construct
  misc_feature 1..20: note = chemically synthesized
  source 1..20: mol_type = other DNA
aaatctggcttattggagga

SEQ ID NO: 12067 - DNA, 20 bp, synthetic construct
  misc_feature 1..20: note = chemically synthesized
  source 1..20: mol_type = other DNA
tctaccttcccctaacctat

SEQ ID NO: 12068 - DNA, 20 bp, synthetic construct
  misc_feature 1..20: note = chemically synthesized
  source 1..20: mol_type = other DNA
ctaccttcccctaacctatc

SEQ ID NO: 12069 - DNA, 20 bp, synthetic construct
  misc_feature 1..20: note = chemically synthesized
  source 1..20: mol_type = other DNA
cccctaacctatcaggttga

SEQ ID NO: 12070 - DNA, 20 bp, synthetic construct
  misc_feature 1..20: note = chemically synthesized
  source 1..20: mol_type = other DNA
ccctaacctatcaggttgat

SEQ ID NO: 12071 - DNA, 20 bp, synthetic construct
  misc_feature 1..20: note = chemically synthesized
  source 1..20: mol_type = other DNA
gataggaattataataatat

SEQ ID NO: 12072 - DNA, 20 bp, synthetic construct
  misc_feature 1..20: note = chemically synthesized
  source 1..20: mol_type = other DNA
aggaattataataatattgg

SEQ ID NO: 12073 - DNA, 20 bp, synthetic construct
  misc_feature 1..20: note = chemically synthesized
  source 1..20: mol_type = other DNA
taatattggtggaatccttt

SEQ ID NO: 12074 - DNA, 20 bp, synthetic construct
  misc_feature 1..20: note = chemically synthesized
  source 1..20: mol_type = other DNA
cagacttcataatcctgtgt

SEQ ID NO: 12075 - DNA, 20 bp, synthetic construct
  misc_feature 1..20: note = chemically synthesized
  source 1..20: mol_type = other DNA
agacttcataatcctgtgta

SEQ ID NO: 12076 - DNA, 20 bp, synthetic construct
  misc_feature 1..20: note = chemically synthesized
  source 1..20: mol_type = other DNA
gtaaggcttatatctgctca

SEQ ID NO: 12077 - DNA, 20 bp, synthetic construct
  misc_feature 1..20: note = chemically synthesized
  source 1..20: mol_type = other DNA
cttatatctgctcaaagtgt

SEQ ID NO: 12078 - DNA, 20 bp, synthetic construct
  misc_feature 1..20: note = chemically synthesized
  source 1..20: mol_type = other DNA
ttatatctgctcaaagtgtt

SEQ ID NO: 12079 - DNA, 20 bp, synthetic construct
  misc_feature 1..20: note = chemically synthesized
  source 1..20: mol_type = other DNA
tatctgctcaaagtgttagg

SEQ ID NO: 12080 - DNA, 20 bp, synthetic construct
  misc_feature 1..20: note = chemically synthesized
  source 1..20: mol_type = other DNA
tcaaagtgttaggcggctaa

SEQ ID NO: 12081 - DNA, 20 bp, synthetic construct
  misc_feature 1..20: note = chemically synthesized
  source 1..20: mol_type = other DNA
gtgttaggcggctaaaagac

SEQ ID NO: 12082 - DNA, 20 bp, synthetic construct
  misc_feature 1..20: note = chemically synthesized
  source 1..20: mol_type = other DNA
taggcggctaaaagaccaga

SEQ ID NO: 12083 - DNA, 20 bp, synthetic construct
  misc_feature 1..20: note = chemically synthesized
  source 1..20: mol_type = other DNA
acatgttgacctgcgcaaca

SEQ ID NO: 12084 - DNA, 20 bp, synthetic construct
  misc_feature 1..20: note = chemically synthesized
  source 1..20: mol_type = other DNA
cacatattgcacttgttctt

SEQ ID NO: 12085 - DNA, 20 bp, synthetic construct
  misc_feature 1..20: note = chemically synthesized
  source 1..20: mol_type = other DNA
atattgcacttgttctttgg

SEQ ID NO: 12086 - DNA, 20 bp, synthetic construct
  misc_feature 1..20: note = chemically synthesized
  source 1..20: mol_type = other DNA
ttctttggaagttaaaataa

SEQ ID NO: 12087 - DNA, 20 bp, synthetic construct
  misc_feature 1..20: note = chemically synthesized
  source 1..20: mol_type = other DNA
agttaaaataaaagttgaat

SEQ ID NO: 12088 - DNA, 20 bp, synthetic construct
  misc_feature 1..20: note = chemically synthesized
  source 1..20: mol_type = other DNA
aaaataaaagttgaataaga

SEQ ID NO: 12089 - DNA, 20 bp, synthetic construct
  misc_feature 1..20: note = chemically synthesized
  source 1..20: mol_type = other DNA
aaataaaagttgaataagaa

SEQ ID NO: 12090 - DNA, 20 bp, synthetic construct
  misc_feature 1..20: note = chemically synthesized
  source 1..20: mol_type = other DNA
aaaagttgaataagaaagga

SEQ ID NO: 12091 - DNA, 20 bp, synthetic construct
  misc_feature 1..20: note = chemically synthesized
  source 1..20: mol_type = other DNA
tgaataagaaaggaaagaaa

SEQ ID NO: 12092 - DNA, 20 bp, synthetic construct
  misc_feature 1..20: note = chemically synthesized
  source 1..20: mol_type = other DNA
aaaaagatttgtcaacttat

SEQ ID NO: 12093 - DNA, 20 bp, synthetic construct
  misc_feature 1..20: note = chemically synthesized
  source 1..20: mol_type = other DNA
gtcaacttatcagtatcttc

SEQ ID NO: 12094 - DNA, 20 bp, synthetic construct
  misc_feature 1..20: note = chemically synthesized
  source 1..20: mol_type = other DNA
ccagttactcacataataat

SEQ ID NO: 12095 - DNA, 20 bp, synthetic construct
  misc_feature 1..20: note = chemically synthesized
  source 1..20: mol_type = other DNA
taagtgacttctctcaatct

SEQ ID NO: 12096 - DNA, 20 bp, synthetic construct
  misc_feature 1..20: note = chemically synthesized
  source 1..20: mol_type = other DNA
aagtgacttctctcaatcta

SEQ ID NO: 12097 - DNA, 20 bp, synthetic construct
  misc_feature 1..20: note = chemically synthesized
  source 1..20: mol_type = other DNA
gacttctctcaatctaagga

SEQ ID NO: 12098 - DNA, 20 bp, synthetic construct
  misc_feature 1..20: note = chemically synthesized
  source 1..20: mol_type = other DNA
acttctctcaatctaaggat

SEQ ID NO: 12099 - DNA, 20 bp, synthetic construct
  misc_feature 1..20: note = chemically synthesized
  source 1..20: mol_type = other DNA
ctctcaatctaaggatgggt

SEQ ID NO: 12100 - DNA, 20 bp, synthetic construct
  misc_feature 1..20: note = chemically synthesized
  source 1..20: mol_type = other DNA
caatctaaggatgggtgaga

SEQ ID NO: 12101 - DNA, 20 bp, synthetic construct
  misc_feature 1..20: note = chemically synthesized
  source 1..20: mol_type = other DNA
tgggtgagaaagatttttat

SEQ ID NO: 12102 - DNA, 20 bp, synthetic construct
  misc_feature 1..20: note = chemically synthesized
  source 1..20: mol_type = other DNA
aaagatttttattggtatgc

SEQ ID NO: 12103 - DNA, 20 bp, synthetic construct
  misc_feature 1..20: note = chemically synthesized
  source 1..20: mol_type = other DNA
tttttattggtatgctggta

SEQ ID NO: 12104 - DNA, 20 bp, synthetic construct
  misc_feature 1..20: note = chemically synthesized
  source 1..20: mol_type = other DNA
tggtatgctggtacagatta

SEQ ID NO: 12105 - DNA, 20 bp, synthetic construct
  misc_feature 1..20: note = chemically synthesized
  source 1..20: mol_type = other DNA
gtatgctggtacagattata

SEQ ID NO: 12106 - DNA, 20 bp, synthetic construct
  misc_feature 1..20: note = chemically synthesized
  source 1..20: mol_type = other DNA
tggtacagattatagagact

SEQ ID NO: 12107 - DNA, 20 bp, synthetic construct
  misc_feature 1..20: note = chemically synthesized
  source 1..20: mol_type = other DNA
ggtacagattatagagactg

SEQ ID NO: 12108 - DNA, 20 bp, synthetic construct
  misc_feature 1..20: note = chemically synthesized
  source 1..20: mol_type = other DNA
agactgaggtgaacccaaat

SEQ ID NO: 12109 - DNA, 20 bp, synthetic construct
  misc_feature 1..20: note = chemically synthesized
  source 1..20: mol_type = other DNA
gactgaggtgaacccaaatt

SEQ ID NO: 12110 - DNA, 20 bp, synthetic construct
  misc_feature 1..20: note = chemically synthesized
  source 1..20: mol_type = other DNA
actgaggtgaacccaaatta

SEQ ID NO: 12111 - DNA, 20 bp, synthetic construct
  misc_feature 1..20: note = chemically synthesized
  source 1..20: mol_type = other DNA
acccaaattagggtctcttt

SEQ ID NO: 12112 - DNA, 20 bp, synthetic construct
  misc_feature 1..20: note = chemically synthesized
  source 1..20: mol_type = other DNA
aaattagggtctctttaaga

SEQ ID NO: 12113 - DNA, 20 bp, synthetic construct
  misc_feature 1..20: note = chemically synthesized
  source 1..20: mol_type = other DNA
aattagggtctctttaagat

SEQ ID NO: 12114 - DNA, 20 bp, synthetic construct
  misc_feature 1..20: note = chemically synthesized
  source 1..20: mol_type = other DNA
attagggtctctttaagata

SEQ ID NO: 12115 - DNA, 20 bp, synthetic construct
  misc_feature 1..20: note = chemically synthesized
  source 1..20: mol_type = other DNA
ttagggtctctttaagatag

SEQ ID NO: 12116 - DNA, 20 bp, synthetic construct
  misc_feature 1..20: note = chemically synthesized
  source 1..20: mol_type = other DNA
ctttaagataggggatctgt

SEQ ID NO: 12117 - DNA, 20 bp, synthetic construct
  misc_feature 1..20: note = chemically synthesized
  source 1..20: mol_type = other DNA
aagataggggatctgtgaga

SEQ ID NO: 12118 - DNA, 20 bp, synthetic construct
  misc_feature 1..20: note = chemically synthesized
  source 1..20: mol_type = other DNA
agataggggatctgtgagat

SEQ ID NO: 12119 - DNA, 20 bp, synthetic construct
  misc_feature 1..20: note = chemically synthesized
  source 1..20: mol_type = other DNA
atctgtgagatgggtgtgta

SEQ ID NO: 12120 - DNA, 20 bp, synthetic construct
  misc_feature 1..20: note = chemically synthesized
  source 1..20: mol_type = other DNA
gatgggtgtgtatagatctt

SEQ ID NO: 12121 - DNA, 20 bp, synthetic construct
  misc_feature 1..20: note = chemically synthesized
  source 1..20: mol_type = other DNA
atagatctttggccatatct

SEQ ID NO: 12122 - DNA, 20 bp, synthetic construct
  misc_feature 1..20: note = chemically synthesized
  source 1..20: mol_type = other DNA
agatctttggccatatctga

SEQ ID NO: 12123 - DNA, 20 bp, synthetic construct
  misc_feature 1..20: note = chemically synthesized
  source 1..20: mol_type = other DNA
tttggccatatctgagagtc

SEQ ID NO: 12124 - DNA, 20 bp, synthetic construct
  misc_feature 1..20: note = chemically synthesized
  source 1..20: mol_type = other DNA
gccatatctgagagtctggt

SEQ ID NO: 12125 - DNA, 20 bp, synthetic construct
  misc_feature 1..20: note = chemically synthesized
  source 1..20: mol_type = other DNA
ccatatctgagagtctggtt

SEQ ID NO: 12126 - DNA, 20 bp, synthetic construct
  misc_feature 1..20: note = chemically synthesized
  source 1..20: mol_type = other DNA
gtctggttgggttccatttg

SEQ ID NO: 12127 - DNA, 20 bp, synthetic construct
  misc_feature 1..20: note = chemically synthesized
  source 1..20: mol_type = other DNA
ctggttgggttccatttgta

SEQ ID NO: 12128 - DNA, 20 bp, synthetic construct
  misc_feature 1..20: note = chemically synthesized
  source 1..20: mol_type = other DNA
atttgtagagcctgaccttt

SEQ ID NO: 12129 - DNA, 20 bp, synthetic construct
  misc_feature 1..20: note = chemically synthesized
  source 1..20: mol_type = other DNA
cctgacctttaagaatgtgt

SEQ ID NO: 12130 - DNA, 20 bp, synthetic construct
  misc_feature 1..20: note = chemically synthesized
  source 1..20: mol_type = other DNA
tgacctttaagaatgtgtca

SEQ ID NO: 12131 - DNA, 20 bp, synthetic construct
  misc_feature 1..20: note = chemically synthesized
  source 1..20: mol_type = other DNA
tttaagaatgtgtcagagac

SEQ ID NO: 12132 - DNA, 20 bp, synthetic construct
  misc_feature 1..20: note = chemically synthesized
  source 1..20: mol_type = other DNA
tgtgtcagagactggtgtct

SEQ ID NO: 12133 - DNA, 20 bp, synthetic construct
  misc_feature 1..20: note = chemically synthesized
  source 1..20: mol_type = other DNA
gactggtgtctaagcccgct

SEQ ID NO: 12134 - DNA, 20 bp, synthetic construct
  misc_feature 1..20: note = chemically synthesized
  source 1..20: mol_type = other DNA
actggtgtctaagcccgcta

SEQ ID NO: 12135 - DNA, 20 bp, synthetic construct
  misc_feature 1..20: note = chemically synthesized
  source 1..20: mol_type = other DNA
aagcccgctaaggcctaaac

SEQ ID NO: 12136 - DNA, 20 bp, synthetic construct
  misc_feature 1..20: note = chemically synthesized
  source 1..20: mol_type = other DNA
aatctctctttttttttttt

SEQ ID NO: 12137 - DNA, 20 bp, synthetic construct
  misc_feature 1..20: note = chemically synthesized
  source 1..20: mol_type = other DNA
tctcttttttttttttgaga

SEQ ID NO: 12138 - DNA, 20 bp, synthetic construct
  misc_feature 1..20: note = chemically synthesized
  source 1..20: mol_type = other DNA
tcttttttttttttgagaca

SEQ ID NO: 12139 - DNA, 20 bp, synthetic construct
  misc_feature 1..20: note = chemically synthesized
  source 1..20: mol_type = other DNA
cagagtcttgttctgtcacc

SEQ ID NO: 12140 - DNA, 20 bp, synthetic construct
  misc_feature 1..20: note = chemically synthesized
  source 1..20: mol_type = other DNA
agagtcttgttctgtcaccc

SEQ ID NO: 12141 - DNA, 20 bp, synthetic construct
  misc_feature 1..20: note = chemically synthesized
  source 1..20: mol_type = other DNA
tcttgttctgtcacccaggc

SEQ ID NO: 12142 - DNA, 20 bp, synthetic construct
  misc_feature 1..20: note = chemically synthesized
  source 1..20: mol_type = other DNA
ttgttctgtcacccaggctg

SEQ ID NO: 12143 - DNA, 20 bp, synthetic construct
  misc_feature 1..20: note = chemically synthesized
  source 1..20: mol_type = other DNA
ctgtcacccaggctggagtg

SEQ ID NO: 12144 - DNA, 20 bp, synthetic construct
  misc_feature 1..20: note = chemically synthesized
  source 1..20: mol_type = other DNA
tcacccaggctggagtgcag

SEQ ID NO: 12145 - DNA, 20 bp, synthetic construct
  misc_feature 1..20: note = chemically synthesized
  source 1..20: mol_type = other DNA
ggagtgcagtggtatgatct

SEQ ID NO: 12146 - DNA, 20 bp, synthetic construct
  misc_feature 1..20: note = chemically synthesized
  source 1..20: mol_type = other DNA
tcactgcaactcctgccttc

SEQ ID NO: 12147 - DNA, 20 bp, synthetic construct
  misc_feature 1..20: note = chemically synthesized
  source 1..20: mol_type = other DNA
cactgcaactcctgccttcc

SEQ ID NO: 12148 - DNA, 20 bp, synthetic construct
  misc_feature 1..20: note = chemically synthesized
  source 1..20: mol_type = other DNA
aactcctgccttccaggttc

SEQ ID NO: 12149 - DNA, 20 bp, synthetic construct
  misc_feature 1..20: note = chemically synthesized
  source 1..20: mol_type = other DNA
ttcaagcaattctccttcct

SEQ ID NO: 12150 - DNA, 20 bp, synthetic construct
  misc_feature 1..20: note = chemically synthesized
  source 1..20: mol_type = other DNA
ttctccttcctcagcctccc

SEQ ID NO: 12151 - DNA, 20 bp, synthetic construct
  misc_feature 1..20: note = chemically synthesized
  source 1..20: mol_type = other DNA
tccttcctcagcctcccaag

SEQ ID NO: 12152 - DNA, 20 bp, synthetic construct
  misc_feature 1..20: note = chemically synthesized
  source 1..20: mol_type = other DNA
tcctcagcctcccaagtagc

SEQ ID NO: 12153 - DNA, 20 bp, synthetic construct
  misc_feature 1..20: note = chemically synthesized
  source 1..20: mol_type = other DNA
cctcagcctcccaagtagct

SEQ ID NO: 12154 - DNA, 20 bp, synthetic construct
  misc_feature 1..20: note = chemically synthesized
  source 1..20: mol_type = other DNA
ctcccaagtagctgggatta

SEQ ID NO: 12155 - DNA, 20 bp, synthetic construct
  misc_feature 1..20: note = chemically synthesized
  source 1..20: mol_type = other DNA
tcccaagtagctgggattac

SEQ ID NO: 12156 - DNA, 20 bp, synthetic construct
  misc_feature 1..20: note = chemically synthesized
  source 1..20: mol_type = other DNA
gtctaatttttgtatttttg

SEQ ID NO: 12157 - DNA, 20 bp, synthetic construct
  misc_feature 1..20: note = chemically synthesized
  source 1..20: mol_type = other DNA
ctaatttttgtatttttgta

SEQ ID NO: 12158 - DNA, 20 bp, synthetic construct
  misc_feature 1..20: note = chemically synthesized
  source 1..20: mol_type = other DNA
tttttgtatttttgtagaga

SEQ ID NO: 12159 - DNA, 20 bp, synthetic construct
  misc_feature 1..20: note = chemically synthesized
  source 1..20: mol_type = other DNA
ttttgtatttttgtagagat

SEQ ID NO: 12160 - DNA, 20 bp, synthetic construct
  misc_feature 1..20: note = chemically synthesized
  source 1..20: mol_type = other DNA
gagatgggatttcaccatgt

SEQ ID NO: 12161 - DNA, 20 bp, synthetic construct
  misc_feature 1..20: note = chemically synthesized
  source 1..20: mol_type = other DNA
tgggatttcaccatgttggc

SEQ ID NO: 12162 - DNA, 20 bp, synthetic construct
  misc_feature 1..20: note = chemically synthesized
  source 1..20: mol_type = other DNA
gggatttcaccatgttggcc

SEQ ID NO: 12163 - DNA, 20 bp, synthetic construct
  misc_feature 1..20: note = chemically synthesized
  source 1..20: mol_type = other DNA
tttcaccatgttggccaggt

SEQ ID NO: 12164 - DNA, 20 bp, synthetic construct
  misc_feature 1..20: note = chemically synthesized
  source 1..20: mol_type = other DNA
tggtcttgaactcttgacct

SEQ ID NO: 12165 - DNA, 20 bp, synthetic construct
  misc_feature 1..20: note = chemically synthesized
  source 1..20: mol_type = other DNA
ggtcttgaactcttgacctc

SEQ ID NO: 12166 - DNA, 20 bp, synthetic construct
  misc_feature 1..20: note = chemically synthesized
  source 1..20: mol_type = other DNA
ctcaggtgatctgcctgcct

SEQ ID NO: 12167 - DNA, 20 bp, synthetic construct
  misc_feature 1..20: note = chemically synthesized
  source 1..20: mol_type = other DNA
gccttggcctcccaaaattc

SEQ ID NO: 12168 - DNA, 20 bp, synthetic construct
  misc_feature 1..20: note = chemically synthesized
  source 1..20: mol_type = other DNA
ccttggcctcccaaaattct

SEQ ID NO: 12169 - DNA, 20 bp, synthetic construct
  misc_feature 1..20: note = chemically synthesized
  source 1..20: mol_type = other DNA
ctcccaaaattctgggatta

SEQ ID NO: 12170 - DNA, 20 bp, synthetic construct
  misc_feature 1..20: note = chemically synthesized
  source 1..20: mol_type = other DNA
tcccaaaattctgggattac

SEQ ID NO: 12171 - DNA, 20 bp, synthetic construct
  misc_feature 1..20: note = chemically synthesized
  source 1..20: mol_type = other DNA
aattctgggattacaggcgt

SEQ ID NO: 12172 - DNA, 20 bp, synthetic construct
  misc_feature 1..20: note = chemically synthesized
  source 1..20: mol_type = other DNA
caggcgtgagccaccactcc

SEQ ID NO: 12173 - DNA, 20 bp, synthetic construct
  misc_feature 1..20: note = chemically synthesized
  source 1..20: mol_type = other DNA
accactcccagcctctaaac

SEQ ID NO: 12174 - DNA, 20 bp, synthetic construct
  misc_feature 1..20: note = chemically synthesized
  source 1..20: mol_type = other DNA
gaatcttaattgctcctcct

SEQ ID NO: 12175 - DNA, 20 bp, synthetic construct
  misc_feature 1..20: note = chemically synthesized
  source 1..20: mol_type = other DNA
taattgctcctcctcagact

SEQ ID NO: 12176 - DNA, 20 bp, synthetic construct
  misc_feature 1..20: note = chemically synthesized
  source 1..20: mol_type = other DNA
aattgctcctcctcagacta

SEQ ID NO: 12177 - DNA, 20 bp, synthetic construct
  misc_feature 1..20: note = chemically synthesized
  source 1..20: mol_type = other DNA
tcctcagactaaggaatatc

SEQ ID NO: 12178 - DNA, 20 bp, synthetic construct
  misc_feature 1..20: note = chemically synthesized
  source 1..20: mol_type = other DNA
cctcagactaaggaatatct

SEQ ID NO: 12179 - DNA, 20 bp, synthetic construct
  misc_feature 1..20: note = chemically synthesized
  source 1..20: mol_type = other DNA
tccccatttatccaaaaacc

SEQ ID NO: 12180 - DNA, 20 bp, synthetic construct
  misc_feature 1..20: note = chemically synthesized
  source 1..20: mol_type = other DNA
ccccatttatccaaaaacca

SEQ ID NO: 12181 - DNA, 20 bp, synthetic construct
  misc_feature 1..20: note = chemically synthesized
  source 1..20: mol_type = other DNA
catttatccaaaaaccaagg

SEQ ID NO: 12182 - DNA, 20 bp, synthetic construct
  misc_feature 1..20: note = chemically synthesized
  source 1..20: mol_type = other DNA
aaaccaaggcagtgttctaa

SEQ ID NO: 12183 - DNA, 20 bp, synthetic construct
  misc_feature 1..20: note = chemically synthesized
  source 1..20: mol_type = other DNA
ttatttcctcttatgctttt

SEQ ID NO: 12184 - DNA, 20 bp, synthetic construct
  misc_feature 1..20: note = chemically synthesized
  source 1..20: mol_type = other DNA
tatttcctcttatgcttttg

SEQ ID NO: 12185 - DNA, 20 bp, synthetic construct
  misc_feature 1..20: note = chemically synthesized
  source 1..20: mol_type = other DNA
cttttgaggcaatatctttt

SEQ ID NO: 12186 - DNA, 20 bp, synthetic construct
  misc_feature 1..20: note = chemically synthesized
  source 1..20: mol_type = other DNA
tttgaggcaatatcttttaa

SEQ ID NO: 12187 - DNA, 20 bp, synthetic construct
  misc_feature 1..20: note = chemically synthesized
  source 1..20: mol_type = other DNA
ataaaactgtttctttacac

SEQ ID NO: 12188 - DNA, 20 bp, synthetic construct
  misc_feature 1..20: note = chemically synthesized
  source 1..20: mol_type = other DNA
ttctttacacaagcaatttc

SEQ ID NO: 12189 - DNA, 20 bp, synthetic construct
  misc_feature 1..20: note = chemically synthesized
  source 1..20: mol_type = other DNA
aagcaatttcaagtgttttc

SEQ ID NO: 12190 - DNA, 20 bp, synthetic construct
  misc_feature 1..20: note = chemically synthesized
  source 1..20: mol_type = other DNA
tgtattttcaaacatttgtt

SEQ ID NO: 12191 - DNA, 20 bp, synthetic construct
  misc_feature 1..20: note = chemically synthesized
  source 1..20: mol_type = other DNA
aataaatgtcataattttta

SEQ ID NO: 12192 - DNA, 20 bp, synthetic construct
  misc_feature 1..20: note = chemically synthesized
  source 1..20: mol_type = other DNA
aaatgtcataatttttaaag

SEQ ID NO: 12193 - DNA, 20 bp, synthetic construct
  misc_feature 1..20: note = chemically synthesized
  source 1..20: mol_type = other DNA
tgtcataatttttaaagtag

SEQ ID NO: 12194 - DNA, 20 bp, synthetic construct
  misc_feature 1..20: note = chemically synthesized
  source 1..20: mol_type = other DNA
gtcataatttttaaagtagt

SEQ ID NO: 12195 - DNA, 20 bp, synthetic construct
  misc_feature 1..20: note = chemically synthesized
  source 1..20: mol_type = other DNA
ttttaaagtagtgggcattt

SEQ ID NO: 12196 - DNA, 20 bp, synthetic construct
  misc_feature 1..20: note = chemically synthesized
  source 1..20: mol_type = other DNA
agtgggcatttaagttaaat

SEQ ID NO: 12197 - DNA, 20 bp, synthetic construct
  misc_feature 1..20: note = chemically synthesized
  source 1..20: mol_type = other DNA
ggcatttaagttaaataagt

SEQ ID NO: 12198 - DNA, 20 bp, synthetic construct
  misc_feature 1..20: note = chemically synthesized
  source 1..20: mol_type = other DNA
catttaagttaaataagtca

SEQ ID NO: 12199 - DNA, 20 bp, synthetic construct
  misc_feature 1..20: note = chemically synthesized
  source 1..20: mol_type = other DNA
gagaataaaactttcctctg

SEQ ID NO: 12200 - DNA, 20 bp, synthetic construct
  misc_feature 1..20: note = chemically synthesized
  source 1..20: mol_type = other DNA
ttcctctgaagattataatc

SEQ ID NO: 12201 - DNA, 20 bp, synthetic construct
  misc_feature 1..20: note = chemically synthesized
  source 1..20: mol_type = other DNA
tcctctgaagattataatct

SEQ ID NO: 12202 - DNA, 20 bp, synthetic construct
  misc_feature 1..20: note = chemically synthesized
  source 1..20: mol_type = other DNA
tctgaagattataatctagg

SEQ ID NO: 12203 - DNA, 20 bp, synthetic construct
  misc_feature 1..20: note = chemically synthesized
  source 1..20: mol_type = other DNA
catacataaaattaataatt

SEQ ID NO: 12204 - DNA, 20 bp, synthetic construct
  misc_feature 1..20: note = chemically synthesized
  source 1..20: mol_type = other DNA
gttaaacaacaaaataattt

SEQ ID NO: 12205 - DNA, 20 bp, synthetic construct
  misc_feature 1..20: note = chemically synthesized
  source 1..20: mol_type = other DNA
aatttcagatattattaact

SEQ ID NO: 12206 - DNA, 20 bp, synthetic construct
  misc_feature 1..20: note = chemically synthesized
  source 1..20: mol_type = other DNA
tattaactaagaatgaaatt

SEQ ID NO: 12207 - DNA, 20 bp, synthetic construct
  misc_feature 1..20: note = chemically synthesized
  source 1..20: mol_type = other DNA
attaactaagaatgaaatta

SEQ ID NO: 12208 - DNA, 20 bp, synthetic construct
  misc_feature 1..20: note = chemically synthesized
  source 1..20: mol_type = other DNA
taactaagaatgaaattaag

SEQ ID NO: 12209 - DNA, 20 bp, synthetic construct
  misc_feature 1..20: note = chemically synthesized
  source 1..20: mol_type = other DNA
taagaatgaaattaaggaga

SEQ ID NO: 12210 - DNA, 20 bp, synthetic construct
  misc_feature 1..20: note = chemically synthesized
  source 1..20: mol_type = other DNA
ttaaggagaaagtattcgaa

SEQ ID NO: 12211 - DNA, 20 bp, synthetic construct
  misc_feature 1..20: note = chemically synthesized
  source 1..20: mol_type = other DNA
aaggagaaagtattcgaaca

SEQ ID NO: 12212 - DNA, 20 bp, synthetic construct
  misc_feature 1..20: note = chemically synthesized
  source 1..20: mol_type = other DNA
aggagaaagtattcgaacag

SEQ ID NO: 12213 - DNA, 20 bp, synthetic construct
  misc_feature 1..20: note = chemically synthesized
  source 1..20: mol_type = other DNA
ttcgaacagaggcaaaatga

SEQ ID NO: 12214 - DNA, 20 bp, synthetic construct
  misc_feature 1..20: note = chemically synthesized
  source 1..20: mol_type = other DNA
gaacagaggcaaaatgacag

SEQ ID NO: 12215 - DNA, 20 bp, synthetic construct
  misc_feature 1..20: note = chemically synthesized
  source 1..20: mol_type = other DNA
aacagaggcaaaatgacaga

SEQ ID NO: 12216 - DNA, 20 bp, synthetic construct
  misc_feature 1..20: note = chemically synthesized
  source 1..20: mol_type = other DNA
atgacagaaggaatctgcca

SEQ ID NO: 12217 - DNA, 20 bp, synthetic construct
  misc_feature 1..20: note = chemically synthesized
  source 1..20: mol_type = other DNA
tgacagaaggaatctgccat

SEQ ID NO: 12218 - DNA, 20 bp, synthetic construct
  misc_feature 1..20: note = chemically synthesized
  source 1..20: mol_type = other DNA
cagaaggaatctgccatggg

SEQ ID NO: 12219 - DNA, 20 bp, synthetic construct
  misc_feature 1..20: note = chemically synthesized
  source 1..20: mol_type = other DNA
agaaggaatctgccatggga

SEQ ID NO: 12220 - DNA, 20 bp, synthetic construct
  misc_feature 1..20: note = chemically synthesized
  source 1..20: mol_type = other DNA
tgggaaggcattgccaaata

SEQ ID NO: 12221 - DNA, 20 bp, synthetic construct
  misc_feature 1..20: note = chemically synthesized
  source 1..20: mol_type = other DNA
aggcattgccaaataaagtt

SEQ ID NO: 12222 - DNA, 20 bp, synthetic construct
  misc_feature 1..20: note = chemically synthesized
  source 1..20: mol_type = other DNA
cattgccaaataaagtttag

SEQ ID NO: 12223 - DNA, 20 bp, synthetic construct
  misc_feature 1..20: note = chemically synthesized
  source 1..20: mol_type = other DNA
ataaagtttagaagctgaaa

SEQ ID NO: 12224 - DNA, 20 bp, synthetic construct
  misc_feature 1..20: note = chemically synthesized
  source 1..20: mol_type = other DNA
aagctgaaatagtaaattca

SEQ ID NO: 12225 - DNA, 20 bp, synthetic construct
  misc_feature 1..20: note = chemically synthesized
  source 1..20: mol_type = other DNA
atagtaaattcaaagctctg

SEQ ID NO: 12226 - DNA, 20 bp, synthetic construct
  misc_feature 1..20: note = chemically synthesized
  source 1..20: mol_type = other DNA
gtaaattcaaagctctgaag

SEQ ID NO: 12227 - DNA, 20 bp, synthetic construct
  misc_feature 1..20: note = chemically synthesized
  source 1..20: mol_type = other DNA
aattcaaagctctgaagcag

SEQ ID NO: 12228 - DNA, 20 bp, synthetic construct
  misc_feature 1..20: note = chemically synthesized
  source 1..20: mol_type = other DNA
aaaacaaactcctgctgtgc

SEQ ID NO: 12229 - DNA, 20 bp, synthetic construct
  misc_feature 1..20: note = chemically synthesized
  source 1..20: mol_type = other DNA
aacaaactcctgctgtgcca

SEQ ID NO: 12230 - DNA, 20 bp, synthetic construct
  misc_feature 1..20: note = chemically synthesized
  source 1..20: mol_type = other DNA
caaactcctgctgtgccaga

SEQ ID NO: 12231 - DNA, 20 bp, synthetic construct
  misc_feature 1..20: note = chemically synthesized
  source 1..20: mol_type = other DNA
ctcctgctgtgccagagagt

SEQ ID NO: 12232 - DNA, 20 bp, synthetic construct
  misc_feature 1..20: note = chemically synthesized
  source 1..20: mol_type = other DNA
ctgtgccagagagttagata

SEQ ID NO: 12233 - DNA, 20 bp, synthetic construct
  misc_feature 1..20: note = chemically synthesized
  source 1..20: mol_type = other DNA
cagagagttagataaagaac

SEQ ID NO: 12234 - DNA, 20 bp, synthetic construct
  misc_feature 1..20: note = chemically synthesized
  source 1..20: mol_type = other DNA
accagtgccgttgatatgta

SEQ ID NO: 12235 - DNA, 20 bp, synthetic construct
  misc_feature 1..20: note = chemically synthesized
  source 1..20: mol_type = other DNA
agtgccgttgatatgtaaag

SEQ ID NO: 12236 - DNA, 20 bp, synthetic construct
  misc_feature 1..20: note = chemically synthesized
  source 1..20: mol_type = other DNA
tgccgttgatatgtaaagtg

SEQ ID NO: 12237 - DNA, 20 bp, synthetic construct
  misc_feature 1..20: note = chemically synthesized
  source 1..20: mol_type = other DNA
ttgatatgtaaagtggagaa

SEQ ID NO: 12238 - DNA, 20 bp, synthetic construct
  misc_feature 1..20: note = chemically synthesized
  source 1..20: mol_type = other DNA
atatgtaaagtggagaatag

SEQ ID NO: 12239 - DNA, 20 bp, synthetic construct
  misc_feature 1..20: note = chemically synthesized
  source 1..20: mol_type = other DNA
tatgtaaagtggagaatagc

SEQ ID NO: 12240 - DNA, 20 bp, synthetic construct
  misc_feature 1..20: note = chemically synthesized
  source 1..20: mol_type = other DNA
gtaaagtggagaatagcagg

SEQ ID NO: 12241 - DNA, 20 bp, synthetic construct
  misc_feature 1..20: note = chemically synthesized
  source 1..20: mol_type = other DNA
aatagcaggtggtattgttt

SEQ ID NO: 12242 - DNA, 20 bp, synthetic construct
  misc_feature 1..20: note = chemically synthesized
  source 1..20: mol_type = other DNA
atagcaggtggtattgtttc

SEQ ID NO: 12243 - DNA, 20 bp, synthetic construct
  misc_feature 1..20: note = chemically synthesized
  source 1..20: mol_type = other DNA
tagcaggtggtattgtttca

SEQ ID NO: 12244 - DNA, 20 bp, synthetic construct
  misc_feature 1..20: note = chemically synthesized
  source 1..20: mol_type = other DNA
caggtggtattgtttcaggg

SEQ ID NO: 12245 - DNA, 20 bp, synthetic construct
  misc_feature 1..20: note = chemically synthesized
  source 1..20: mol_type = other DNA
tttcagggaagcataaacct

SEQ ID NO: 12246 - DNA, 20 bp, synthetic construct
  misc_feature 1..20: note = chemically synthesized
  source 1..20: mol_type = other DNA
ttcagggaagcataaaccta

SEQ ID NO: 12247 - DNA, 20 bp, synthetic construct
  misc_feature 1..20: note = chemically synthesized
  source 1..20: mol_type = other DNA
taaggacataaacttgtcct

SEQ ID NO: 12248 - DNA, 20 bp, synthetic construct
  misc_feature 1..20: note = chemically synthesized
  source 1..20: mol_type = other DNA
ggacataaacttgtcctcag

SEQ ID NO: 12249 - DNA, 20 bp, synthetic construct
  misc_feature 1..20: note = chemically synthesized
  source 1..20: mol_type = other DNA
cataaacttgtcctcagtgg

SEQ ID NO: 12250 - DNA, 20 bp, synthetic construct
  misc_feature 1..20: note = chemically synthesized
  source 1..20: mol_type = other DNA
ataaacttgtcctcagtggt

SEQ ID NO: 12251 - DNA, 20 bp, synthetic construct
  misc_feature 1..20: note = chemically synthesized
  source 1..20: mol_type = other DNA
taaacttgtcctcagtggta

SEQ ID NO: 12252 - DNA, 20 bp, synthetic construct
  misc_feature 1..20: note = chemically synthesized
  source 1..20: mol_type = other DNA
aacttgtcctcagtggtagg

SEQ ID NO: 12253 - DNA, 20 bp, synthetic construct
  misc_feature 1..20: note = chemically synthesized
  source 1..20: mol_type = other DNA
tgtcctcagtggtagggagt

SEQ ID NO: 12254 - DNA, 20 bp, synthetic construct
  misc_feature 1..20: note = chemically synthesized
  source 1..20: mol_type = other DNA
cctcagtggtagggagtgag

SEQ ID NO: 12255 - DNA, 20 bp, synthetic construct
  misc_feature 1..20: note = chemically synthesized
  source 1..20: mol_type = other DNA
tagggagtgagaagccatta

SEQ ID NO: 12256 - DNA, 20 bp, synthetic construct
  misc_feature 1..20: note = chemically synthesized
  source 1..20: mol_type = other DNA
ccattatagaattttaactc

SEQ ID NO: 12257 - DNA, 20 bp, synthetic construct
  misc_feature 1..20: note = chemically synthesized
  source 1..20: mol_type = other DNA
ctggtaatgacataatctct

SEQ ID NO: 12258 - DNA, 20 bp, synthetic construct
  misc_feature 1..20: note = chemically synthesized
  source 1..20: mol_type = other DNA
ctctaagcaacctgtactat

SEQ ID NO: 12259 - DNA, 20 bp, synthetic construct
  misc_feature 1..20: note = chemically synthesized
  source 1..20: mol_type = other DNA
aagcaacctgtactattggc

SEQ ID NO: 12260 - DNA, 20 bp, synthetic construct
  misc_feature 1..20: note = chemically synthesized
  source 1..20: mol_type = other DNA
attggctggattactattct

SEQ ID NO: 12261 - DNA, 20 bp, synthetic construct
  misc_feature 1..20: note = chemically synthesized
  source 1..20: mol_type = other DNA
tcacaactgttttgcttaaa

SEQ ID NO: 12262 - DNA, 20 bp, synthetic construct
  misc_feature 1..20: note = chemically synthesized
  source 1..20: mol_type = other DNA
taaaaagcccttattgcctg

SEQ ID NO: 12263 - DNA, 20 bp, synthetic construct
  misc_feature 1..20: note = chemically synthesized
  source 1..20: mol_type = other DNA
tattgcctgtggacaattat

SEQ ID NO: 12264 - DNA, 20 bp, synthetic construct
  misc_feature 1..20: note = chemically synthesized
  source 1..20: mol_type = other DNA
ctattaaaaatcttgtcatg

SEQ ID NO: 12265 - DNA, 20 bp, synthetic construct
  misc_feature 1..20: note = chemically synthesized
  source 1..20: mol_type = other DNA
ttatgaatttgctttcaatt

SEQ ID NO: 12266 - DNA, 20 bp, synthetic construct
  misc_feature 1..20: note = chemically synthesized
  source 1..20: mol_type = other DNA
tcaattaagttatcttgaat

SEQ ID NO: 12267 - DNA, 20 bp, synthetic construct
  misc_feature 1..20: note = chemically synthesized
  source 1..20: mol_type = other DNA
gaattggcaatatctaaatc

SEQ ID NO: 12268 - DNA, 20 bp, synthetic construct
  misc_feature 1..20: note = chemically synthesized
  source 1..20: mol_type = other DNA
gcaatatctaaatctagata

SEQ ID NO: 12269 - DNA, 20 bp, synthetic construct
  misc_feature 1..20: note = chemically synthesized
  source 1..20: mol_type = other DNA
aaatctagatatagctccct

SEQ ID NO: 12270 - DNA, 20 bp, synthetic construct
  misc_feature 1..20: note = chemically synthesized
  source 1..20: mol_type = other DNA
aatctagatatagctcccta

SEQ ID NO: 12271 - DNA, 20 bp, synthetic construct
  misc_feature 1..20: note = chemically synthesized
  source 1..20: mol_type = other DNA
atctagatatagctccctaa

SEQ ID NO: 12272 - DNA, 20 bp, synthetic construct
  misc_feature 1..20: note = chemically synthesized
  source 1..20: mol_type = other DNA
tctagatatagctccctaag

SEQ ID NO: 12273 - DNA, 20 bp, synthetic construct
  misc_feature 1..20: note = chemically synthesized
  source 1..20: mol_type = other DNA
atatagctccctaaggggta

SEQ ID NO: 12274 - DNA, 20 bp, synthetic construct
  misc_feature 1..20: note = chemically synthesized
  source 1..20: mol_type = other DNA
atagctccctaaggggtaaa

SEQ ID NO: 12275 - DNA, 20 bp, synthetic construct
  misc_feature 1..20: note = chemically synthesized
  source 1..20: mol_type = other DNA
tccttgattccttgatatca

SEQ ID NO: 12276 - DNA, 20 bp, synthetic construct
  misc_feature 1..20: note = chemically synthesized
  source 1..20: mol_type = other DNA
ccttgattccttgatatcaa

SEQ ID NO: 12277 - DNA, 20 bp, synthetic construct
  misc_feature 1..20: note = chemically synthesized
  source 1..20: mol_type = other DNA
cttgattccttgatatcaaa

SEQ ID NO: 12278 - DNA, 20 bp, synthetic construct
  misc_feature 1..20: note = chemically synthesized
  source 1..20: mol_type = other DNA
gattccttgatatcaaaggg

SEQ ID NO: 12279 - DNA, 20 bp, synthetic construct
  misc_feature 1..20: note = chemically synthesized
  source 1..20: mol_type = other DNA
cttgatatcaaagggcagta

SEQ ID NO: 12280 - DNA, 20 bp, synthetic construct
  misc_feature 1..20: note = chemically synthesized
  source 1..20: mol_type = other DNA
atcaaagggcagtatagttt

SEQ ID NO: 12281 - DNA, 20 bp, synthetic construct
  misc_feature 1..20: note = chemically synthesized
  source 1..20: mol_type = other DNA
tcaaagggcagtatagtttt

SEQ ID NO: 12282 - DNA, 20 bp, synthetic construct
  misc_feature 1..20: note = chemically synthesized
  source 1..20: mol_type = other DNA
caaagggcagtatagttttg

SEQ ID NO: 12283 - DNA, 20 bp, synthetic construct
  misc_feature 1..20: note = chemically synthesized
  source 1..20: mol_type = other DNA
aaagggcagtatagttttgg

SEQ ID NO: 12284 - DNA, 20 bp, synthetic construct
  misc_feature 1..20: note = chemically synthesized
  source 1..20: mol_type = other DNA
agggcagtatagttttgggg

SEQ ID NO: 12285 - DNA, 20 bp, synthetic construct
  misc_feature 1..20: note = chemically synthesized
  source 1..20: mol_type = other DNA
gcagtatagttttgggggag

SEQ ID NO: 12286 - DNA, 20 bp, synthetic construct
  misc_feature 1..20: note = chemically synthesized
  source 1..20: mol_type = other DNA
tagttttgggggagaagaaa

SEQ ID NO: 12287 - DNA, 20 bp, synthetic construct
  misc_feature 1..20: note = chemically synthesized
  source 1..20: mol_type = other DNA
gttttgggggagaagaaaaa

SEQ ID NO: 12288 - DNA, 20 bp, synthetic construct
  misc_feature 1..20: note = chemically synthesized
  source 1..20: mol_type = other DNA
tttgggggagaagaaaaaga

SEQ ID NO: 12289 - DNA, 20 bp, synthetic construct
  misc_feature 1..20: note = chemically synthesized
  source 1..20: mol_type = other DNA
tgggggagaagaaaaagaga

SEQ ID NO: 12290 - DNA, 20 bp, synthetic construct
  misc_feature 1..20: note = chemically synthesized
  source 1..20: mol_type = other DNA
ggggagaagaaaaagagaga

SEQ ID NO: 12291 - DNA, 20 bp, synthetic construct
  misc_feature 1..20: note = chemically synthesized
  source 1..20: mol_type = other DNA
ggagaagaaaaagagagaga

SEQ ID NO: 12292 - DNA, 20 bp, synthetic construct
  misc_feature 1..20: note = chemically synthesized
  source 1..20: mol_type = other DNA
aaaagagagagagagaaaaa

SEQ ID NO: 12293 - DNA, 20 bp, synthetic construct
  misc_feature 1..20: note = chemically synthesized
  source 1..20: mol_type = other DNA
aatgcatattaccgacaaat

SEQ ID NO: 12294 - DNA, 20 bp, synthetic construct
  misc_feature 1..20: note = chemically synthesized
  source 1..20: mol_type = other DNA
tgcatattaccgacaaatta

SEQ ID NO: 12295 - DNA, 20 bp, synthetic construct
  misc_feature 1..20: note = chemically synthesized
  source 1..20: mol_type = other DNA
gcatattaccgacaaattag

SEQ ID NO: 12296 - DNA, 20 bp, synthetic construct
  misc_feature 1..20: note = chemically synthesized
  source 1..20: mol_type = other DNA
catattaccgacaaattaga

SEQ ID NO: 12297 - DNA, 20 bp, synthetic construct
  misc_feature 1..20: note = chemically synthesized
  source 1..20: mol_type = other DNA
accgacaaattagagggtga

SEQ ID NO: 12298 - DNA, 20 bp, synthetic construct
  misc_feature 1..20: note = chemically synthesized
  source 1..20: mol_type = other DNA
gacaaattagagggtgatgg

SEQ ID NO: 12299 - DNA, 20 bp, synthetic construct
  misc_feature 1..20: note = chemically synthesized
  source 1..20: mol_type = other DNA
aattagagggtgatggcaga

SEQ ID NO: 12300 - DNA, 20 bp, synthetic construct
  misc_feature 1..20: note = chemically synthesized
  source 1..20: mol_type = other DNA
attagagggtgatggcagat

SEQ ID NO: 12301 - DNA, 20 bp, synthetic construct
  misc_feature 1..20: note = chemically synthesized
  source 1..20: mol_type = other DNA
tagagggtgatggcagatgg

SEQ ID NO: 12302 - DNA, 20 bp, synthetic construct
  misc_feature 1..20: note = chemically synthesized
  source 1..20: mol_type = other DNA
agagggtgatggcagatggg

SEQ ID NO: 12303 - DNA, 20 bp, synthetic construct
  misc_feature 1..20: note = chemically synthesized
  source 1..20: mol_type = other DNA
gggtgatggcagatgggagg

SEQ ID NO: 12304 - DNA, 20 bp, synthetic construct
  misc_feature 1..20: note = chemically synthesized
  source 1..20: mol_type = other DNA
tgatggcagatgggaggcag

SEQ ID NO: 12305 - DNA, 20 bp, synthetic construct
  misc_feature 1..20: note = chemically synthesized
  source 1..20: mol_type = other DNA
tggcagatgggaggcagcag

SEQ ID NO: 12306 - DNA, 20 bp, synthetic construct
  misc_feature 1..20: note = chemically synthesized
  source 1..20: mol_type = other DNA
gaggcagcagaagtacattg

SEQ ID NO: 12307 - DNA, 20 bp, synthetic construct
  misc_feature 1..20: note = chemically synthesized
  source 1..20: mol_type = other DNA
agtacattgcagctcccact

SEQ ID NO: 12308 - DNA, 20 bp, synthetic construct
  misc_feature 1..20: note = chemically synthesized
  source 1..20: mol_type = other DNA
gcagctcccactcggatgca

SEQ ID NO: 12309 - DNA, 20 bp, synthetic construct
  misc_feature 1..20: note = chemically synthesized
  source 1..20: mol_type = other DNA
agctcccactcggatgcaca

SEQ ID NO: 12310 - DNA, 20 bp, synthetic construct
  misc_feature 1..20: note = chemically synthesized
  source 1..20: mol_type = other DNA
tcccactcggatgcacagag

SEQ ID NO: 12311 - DNA, 20 bp, synthetic construct
  misc_feature 1..20: note = chemically synthesized
  source 1..20: mol_type = other DNA
gatgcacagagcagcatgtg

SEQ ID NO: 12312 - DNA, 20 bp, synthetic construct
  misc_feature 1..20: note = chemically synthesized
  source 1..20: mol_type = other DNA
cagcatgtgaagtctcccat

SEQ ID NO: 12313 - DNA, 20 bp, synthetic construct
  misc_feature 1..20: note = chemically synthesized
  source 1..20: mol_type = other DNA
agcatgtgaagtctcccatc

SEQ ID NO: 12314 - DNA, 20 bp, synthetic construct
  misc_feature 1..20: note = chemically synthesized
  source 1..20: mol_type = other DNA
cccatcaggaattttttttg

SEQ ID NO: 12315 - DNA, 20 bp, synthetic construct
  misc_feature 1..20: note = chemically synthesized
  source 1..20: mol_type = other DNA
tttttttgcagaaccacctg

SEQ ID NO: 12316 - DNA, 20 bp, synthetic construct
  misc_feature 1..20: note = chemically synthesized
  source 1..20: mol_type = other DNA
accacctgcagaaataaatc

SEQ ID NO: 12317 - DNA, 20 bp, synthetic construct
  misc_feature 1..20: note = chemically synthesized
  source 1..20: mol_type = other DNA
cctgcagaaataaatcaaga

SEQ ID NO: 12318 - DNA, 20 bp, synthetic construct
  misc_feature 1..20: note = chemically synthesized
  source 1..20: mol_type = other DNA
agaaataaatcaagaaagct

SEQ ID NO: 12319 - DNA, 20 bp, synthetic construct
  misc_feature 1..20: note = chemically synthesized
  source 1..20: mol_type = other DNA
aaataaatcaagaaagctga

SEQ ID NO: 12320 - DNA, 20 bp, synthetic construct
  misc_feature 1..20: note = chemically synthesized
  source 1..20: mol_type = other DNA
agaacgcacacaccctctga

SEQ ID NO: 12321 - DNA, 20 bp, synthetic construct
  misc_feature 1..20: note = chemically synthesized
  source 1..20: mol_type = other DNA
acgcacacaccctctgaaag

SEQ ID NO: 12322 - DNA, 20 bp, synthetic construct
  misc_feature 1..20: note = chemically synthesized
  source 1..20: mol_type = other DNA
cacacaccctctgaaagaag

SEQ ID NO: 12323 - DNA, 20 bp, synthetic construct
  misc_feature 1..20: note = chemically synthesized
  source 1..20: mol_type = other DNA
aaagaagcagattgctcctg

SEQ ID NO: 12324 - DNA, 20 bp, synthetic construct
  misc_feature 1..20: note = chemically synthesized
  source 1..20: mol_type = other DNA
aagaagcagattgctcctgc

SEQ ID NO: 12325 - DNA, 20 bp, synthetic construct
  misc_feature 1..20: note = chemically synthesized
  source 1..20: mol_type = other DNA
cagattgctcctgcaggacc

SEQ ID NO: 12326 - DNA, 20 bp, synthetic construct
  misc_feature 1..20: note = chemically synthesized
  source 1..20: mol_type = other DNA
agattgctcctgcaggaccc

SEQ ID NO: 12327 - DNA, 20 bp, synthetic construct
  misc_feature 1..20: note = chemically synthesized
  source 1..20: mol_type = other DNA
ggaaacaccccaaatattgt

SEQ ID NO: 12328 - DNA, 20 bp, synthetic construct
  misc_feature 1..20: note = chemically synthesized
  source 1..20: mol_type = other DNA
tattgtgagtgcccaaactg

SEQ ID NO: 12329 - DNA, 20 bp, synthetic construct
  misc_feature 1..20: note = chemically synthesized
  source 1..20: mol_type = other DNA
tgtgagtgcccaaactgtgg

SEQ ID NO: 12330 - DNA, 20 bp, synthetic construct
  misc_feature 1..20: note = chemically synthesized
  source 1..20: mol_type = other DNA
gagtgcccaaactgtggaag

SEQ ID NO: 12331 - DNA, 20 bp, synthetic construct
  misc_feature 1..20: note = chemically synthesized
  source 1..20: mol_type = other DNA
cccaaactgtggaagtggaa

SEQ ID NO: 12332 - DNA, 20 bp, synthetic construct
  misc_feature 1..20: note = chemically synthesized
  source 1..20: mol_type = other DNA
ccaaactgtggaagtggaaa

SEQ ID NO: 12333 - DNA, 20 bp, synthetic construct
  misc_feature 1..20: note = chemically synthesized
  source 1..20: mol_type = other DNA
caaactgtggaagtggaaaa

SEQ ID NO: 12334 - DNA, 20 bp, synthetic construct
  misc_feature 1..20: note = chemically synthesized
  source 1..20: mol_type = other DNA
aaactgtggaagtggaaaag

SEQ ID NO: 12335 - DNA, 20 bp, synthetic construct
  misc_feature 1..20: note = chemically synthesized
  source 1..20: mol_type = other DNA
aactgtggaagtggaaaagg

SEQ ID NO: 12336 - DNA, 20 bp, synthetic construct
  misc_feature 1..20: note = chemically synthesized
  source 1..20: mol_type = other DNA
ccccaaacacacatcctcac

SEQ ID NO: 12337 - DNA, 20 bp, synthetic construct
  misc_feature 1..20: note = chemically synthesized
  source 1..20: mol_type = other DNA
cccaaacacacatcctcact

SEQ ID NO: 12338 - DNA, 20 bp, synthetic construct
  misc_feature 1..20: note = chemically synthesized
  source 1..20: mol_type = other DNA
ccaaacacacatcctcactg

SEQ ID NO: 12339 - DNA, 20 bp, synthetic construct
  misc_feature 1..20: note = chemically synthesized
  source 1..20: mol_type = other DNA
catcctcactggggaacctg

SEQ ID NO: 12340 - DNA, 20 bp, synthetic construct
  misc_feature 1..20: note = chemically synthesized
  source 1..20: mol_type = other DNA
cactggggaacctgaagatc

SEQ ID NO: 12341 - DNA, 20 bp, synthetic construct
  misc_feature 1..20: note = chemically synthesized
  source 1..20: mol_type = other DNA
gaacctgaagatctagacca

SEQ ID NO: 12342 - DNA, 20 bp, synthetic construct
  misc_feature 1..20: note = chemically synthesized
  source 1..20: mol_type = other DNA
aacctgaagatctagaccac

SEQ ID NO: 12343 - DNA, 20 bp, synthetic construct
  misc_feature 1..20: note = chemically synthesized
  source 1..20: mol_type = other DNA
cctgaagatctagaccacag

SEQ ID NO: 12344 - DNA, 20 bp, synthetic construct
  misc_feature 1..20: note = chemically synthesized
  source 1..20: mol_type = other DNA
gaagatctagaccacaggag

SEQ ID NO: 12345 - DNA, 20 bp, synthetic construct
  misc_feature 1..20: note = chemically synthesized
  source 1..20: mol_type = other DNA
gagaagattctgaccttacc

SEQ ID NO: 12346 - DNA, 20 bp, synthetic construct
  misc_feature 1..20: note = chemically synthesized
  source 1..20: mol_type = other DNA
gaagattctgaccttacctg

SEQ ID NO: 12347 - DNA, 20 bp, synthetic construct
  misc_feature 1..20: note = chemically synthesized
  source 1..20: mol_type = other DNA
ttctgaccttacctggagct

SEQ ID NO: 12348 - DNA, 20 bp, synthetic construct
  misc_feature 1..20: note = chemically synthesized
  source 1..20: mol_type = other DNA
tacctggagctgagtcaatt

SEQ ID NO: 12349 - DNA, 20 bp, synthetic construct
  misc_feature 1..20: note = chemically synthesized
  source 1..20: mol_type = other DNA
cctggagctgagtcaattta

SEQ ID NO: 12350 - DNA, 20 bp, synthetic construct
  misc_feature 1..20: note = chemically synthesized
  source 1..20: mol_type = other DNA
ctggagctgagtcaatttag

SEQ ID NO: 12351 - DNA, 20 bp, synthetic construct
  misc_feature 1..20: note = chemically synthesized
  source 1..20: mol_type = other DNA
tggagctgagtcaatttaga

SEQ ID NO: 12352 - DNA, 20 bp, synthetic construct
  misc_feature 1..20: note = chemically synthesized
  source 1..20: mol_type = other DNA
ctgagtcaatttagagggcc

SEQ ID NO: 12353 - DNA, 20 bp, synthetic construct
  misc_feature 1..20: note = chemically synthesized
  source 1..20: mol_type = other DNA
ttagagggccaagcaaaata

SEQ ID NO: 12354 - DNA, 20 bp, synthetic construct
  misc_feature 1..20: note = chemically synthesized
  source 1..20: mol_type = other DNA
tagagggccaagcaaaatac

SEQ ID NO: 12355 - DNA, 20 bp, synthetic construct
  misc_feature 1..20: note = chemically synthesized
  source 1..20: mol_type = other DNA
agagggccaagcaaaataca

SEQ ID NO: 12356 - DNA, 20 bp, synthetic construct
  misc_feature 1..20: note = chemically synthesized
  source 1..20: mol_type = other DNA
gagggccaagcaaaatacag

SEQ ID NO: 12357 - DNA, 20 bp, synthetic construct
  misc_feature 1..20: note = chemically synthesized
  source 1..20: mol_type = other DNA
ggccaagcaaaatacagggg

SEQ ID NO: 12358 - DNA, 20 bp, synthetic construct
  misc_feature 1..20: note = chemically synthesized
  source 1..20: mol_type = other DNA
ccaagcaaaatacaggggta

SEQ ID NO: 12359 - DNA, 20 bp, synthetic construct
  misc_feature 1..20: note = chemically synthesized
  source 1..20: mol_type = other DNA
caagcaaaatacaggggtag

SEQ ID NO: 12360 - DNA, 20 bp, synthetic construct
  misc_feature 1..20: note = chemically synthesized
  source 1..20: mol_type = other DNA
gcaaaatacaggggtagagg

SEQ ID NO: 12361 - DNA, 20 bp, synthetic construct
  misc_feature 1..20: note = chemically synthesized
  source 1..20: mol_type = other DNA
aaatacaggggtagaggaag

SEQ ID NO: 12362 - DNA, 20 bp, synthetic construct
  misc_feature 1..20: note = chemically synthesized
  source 1..20: mol_type = other DNA
tacaggggtagaggaagcag

SEQ ID NO: 12363 - DNA, 20 bp, synthetic construct
  misc_feature 1..20: note = chemically synthesized
  source 1..20: mol_type = other DNA
acaggggtagaggaagcagc

SEQ ID NO: 12364 - DNA, 20 bp, synthetic construct
  misc_feature 1..20: note = chemically synthesized
  source 1..20: mol_type = other DNA
ggtagaggaagcagcgggaa

SEQ ID NO: 12365 - DNA, 20 bp, synthetic construct
  misc_feature 1..20: note = chemically synthesized
  source 1..20: mol_type = other DNA
aagcagcgggaaaagccctg

SEQ ID NO: 12366 - DNA, 20 bp, synthetic construct
  misc_feature 1..20: note = chemically synthesized
  source 1..20: mol_type = other DNA
agcagcgggaaaagccctgt

SEQ ID NO: 12367 - DNA, 20 bp, synthetic construct
  misc_feature 1..20: note = chemically synthesized
  source 1..20: mol_type = other DNA
gaaaagccctgtgggctctc

SEQ ID NO: 12368 - DNA, 20 bp, synthetic construct
  misc_feature 1..20: note = chemically synthesized
  source 1..20: mol_type = other DNA
aaaagccctgtgggctctct

SEQ ID NO: 12369 - DNA, 20 bp, synthetic construct
  misc_feature 1..20: note = chemically synthesized
  source 1..20: mol_type = other DNA
tgtgggctctctgggtcccc

SEQ ID NO: 12370 - DNA, 20 bp, synthetic construct
  misc_feature 1..20: note = chemically synthesized
  source 1..20: mol_type = other DNA
gtgggctctctgggtcccct

SEQ ID NO: 12371 - DNA, 20 bp, synthetic construct
  misc_feature 1..20: note = chemically synthesized
  source 1..20: mol_type = other DNA
ggctctctgggtcccctagg

SEQ ID NO: 12372 - DNA, 20 bp, synthetic construct
  misc_feature 1..20: note = chemically synthesized
  source 1..20: mol_type = other DNA
gccatttctgccttgcctca

SEQ ID NO: 12373 - DNA, 20 bp, synthetic construct
  misc_feature 1..20: note = chemically synthesized
  source 1..20: mol_type = other DNA
ccatttctgccttgcctcac

SEQ ID NO: 12374 - DNA, 20 bp, synthetic construct
  misc_feature 1..20: note = chemically synthesized
  source 1..20: mol_type = other DNA
catttctgccttgcctcaca

SEQ ID NO: 12375 - DNA, 20 bp, synthetic construct
  misc_feature 1..20: note = chemically synthesized
  source 1..20: mol_type = other DNA
atttctgccttgcctcacag

SEQ ID NO: 12376 - DNA, 20 bp, synthetic construct
  misc_feature 1..20: note = chemically synthesized
  source 1..20: mol_type = other DNA
cttgcctcacaggggtcatt

SEQ ID NO: 12377 - DNA, 20 bp, synthetic construct
  misc_feature 1..20: note = chemically synthesized
  source 1..20: mol_type = other DNA
ttgcctcacaggggtcattt

SEQ ID NO: 12378 - DNA, 20 bp, synthetic construct
  misc_feature 1..20: note = chemically synthesized
  source 1..20: mol_type = other DNA
gcctcacaggggtcatttgg

SEQ ID NO: 12379 - DNA, 20 bp, synthetic construct
  misc_feature 1..20: note = chemically synthesized
  source 1..20: mol_type = other DNA
cctcacaggggtcatttggg

SEQ ID NO: 12380 - DNA, 20 bp, synthetic construct
  misc_feature 1..20: note = chemically synthesized
  source 1..20: mol_type = other DNA
ctcacaggggtcatttggga

SEQ ID NO: 12381 - DNA, 20 bp, synthetic construct
  misc_feature 1..20: note = chemically synthesized
  source 1..20: mol_type = other DNA
gggtcatttgggagggctgc

SEQ ID NO: 12382 - DNA, 20 bp, synthetic construct
  misc_feature 1..20: note = chemically synthesized
  source 1..20: mol_type = other DNA
gtcatttgggagggctgcca

SEQ ID NO: 12383 - DNA, 20 bp, synthetic construct
  misc_feature 1..20: note = chemically synthesized
  source 1..20: mol_type = other DNA
tcatttgggagggctgccag

SEQ ID NO: 12384 - DNA, 20 bp, synthetic construct
  misc_feature 1..20: note = chemically synthesized
  source 1..20: mol_type = other DNA
gggagggctgccagaggaac

SEQ ID NO: 12385 - DNA, 20 bp, synthetic construct
  misc_feature 1..20: note = chemically synthesized
  source 1..20: mol_type = other DNA
ggagggctgccagaggaact

SEQ ID NO: 12386 - DNA, 20 bp, synthetic construct
  misc_feature 1..20: note = chemically synthesized
  source 1..20: mol_type = other DNA
gctgccagaggaactgggaa

SEQ ID NO: 12387 - DNA, 20 bp, synthetic construct
  misc_feature 1..20: note = chemically synthesized
  source 1..20: mol_type = other DNA
gaggaactgggaaaagatga

SEQ ID NO: 12388 - DNA, 20 bp, synthetic construct
  misc_feature 1..20: note = chemically synthesized
  source 1..20: mol_type = other DNA
aggaactgggaaaagatgac

SEQ ID NO: 12389 - DNA, 20 bp, synthetic construct
  misc_feature 1..20: note = chemically synthesized
  source 1..20: mol_type = other DNA
tgggaaaagatgacaggaaa

SEQ ID NO: 12390 - DNA, 20 bp, synthetic construct
  misc_feature 1..20: note = chemically synthesized
  source 1..20: mol_type = other DNA
ggaaaaagaaaatctccacc

SEQ ID NO: 12391 - DNA, 20 bp, synthetic construct
  misc_feature 1..20: note = chemically synthesized
  source 1..20: mol_type = other DNA
aaagaaaatctccacctggc

SEQ ID NO: 12392 - DNA, 20 bp, synthetic construct
  misc_feature 1..20: note = chemically synthesized
  source 1..20: mol_type = other DNA
aatctccacctggccagatc

SEQ ID NO: 12393 - DNA, 20 bp, synthetic construct
  misc_feature 1..20: note = chemically synthesized
  source 1..20: mol_type = other DNA
atctccacctggccagatct

SEQ ID NO: 12394 - DNA, 20 bp, synthetic construct
  misc_feature 1..20: note = chemically synthesized
  source 1..20: mol_type = other DNA
tctccacctggccagatcta

SEQ ID NO: 12395 - DNA, 20 bp, synthetic construct
  misc_feature 1..20: note = chemically synthesized
  source 1..20: mol_type = other DNA
ctccacctggccagatctag

SEQ ID NO: 12396 - DNA, 20 bp, synthetic construct
  misc_feature 1..20: note = chemically synthesized
  source 1..20: mol_type = other DNA
acctggccagatctaggggc

SEQ ID NO: 12397 - DNA, 20 bp, synthetic construct
  misc_feature 1..20: note = chemically synthesized
  source 1..20: mol_type = other DNA
cctggccagatctaggggct

SEQ ID NO: 12398 - DNA, 20 bp, synthetic construct
  misc_feature 1..20: note = chemically synthesized
  source 1..20: mol_type = other DNA
ggccagatctaggggctggg

SEQ ID NO: 12399 - DNA, 20 bp, synthetic construct
  misc_feature 1..20: note = chemically synthesized
  source 1..20: mol_type = other DNA
cagatctaggggctgggcag

SEQ ID NO: 12400 - DNA, 20 bp, synthetic construct
  misc_feature 1..20: note = chemically synthesized
  source 1..20: mol_type = other DNA
agatctaggggctgggcagt

SEQ ID NO: 12401 - DNA, 20 bp, synthetic construct
  misc_feature 1..20: note = chemically synthesized
  source 1..20: mol_type = other DNA
gatctaggggctgggcagtg

SEQ ID NO: 12402 - DNA, 20 bp, synthetic construct
  misc_feature 1..20: note = chemically synthesized
  source 1..20: mol_type = other DNA
atctaggggctgggcagtgg

SEQ ID NO: 12403 - DNA, 20 bp, synthetic construct
  misc_feature 1..20: note = chemically synthesized
  source 1..20: mol_type = other DNA
tctaggggctgggcagtggg

SEQ ID NO: 12404 - DNA, 20 bp, synthetic construct
  misc_feature 1..20: note = chemically synthesized
  source 1..20: mol_type = other DNA
ctaggggctgggcagtgggg

SEQ ID NO: 12405 - DNA, 20 bp, synthetic construct
  misc_feature 1..20: note = chemically synthesized
  source 1..20: mol_type = other DNA
gggctgggcagtgggggggt

SEQ ID NO: 12406 - DNA, 20 bp, synthetic construct
  misc_feature 1..20: note = chemically synthesized
  source 1..20: mol_type = other DNA
ctgggcagtgggggggttgg

SEQ ID NO: 12407 - DNA, 20 bp, synthetic construct
  misc_feature 1..20: note = chemically synthesized
  source 1..20: mol_type = other DNA
tgggcagtgggggggttggt

SEQ ID NO: 12408 - DNA, 20 bp, synthetic construct
  misc_feature 1..20: note = chemically synthesized
  source 1..20: mol_type = other DNA
gggcagtgggggggttggtg

SEQ ID NO: 12409 - DNA, 20 bp, synthetic construct
  misc_feature 1..20: note = chemically synthesized
  source 1..20: mol_type = other DNA
ggcagtgggggggttggtgg

SEQ ID NO: 12410 - DNA, 20 bp, synthetic construct
  misc_feature 1..20: note = chemically synthesized
  source 1..20: mol_type = other DNA
gcagtgggggggttggtggg

SEQ ID NO: 12411 - DNA, 20 bp, synthetic construct
  misc_feature 1..20: note = chemically synthesized
  source 1..20: mol_type = other DNA
ttggtggggggacatgaatt

SEQ ID NO: 12412 - DNA, 20 bp, synthetic construct
  misc_feature 1..20: note = chemically synthesized
  source 1..20: mol_type = other DNA
ggggacatgaatttggtgtg

SEQ ID NO: 12413 - DNA, 20 bp, synthetic construct
  misc_feature 1..20: note = chemically synthesized
  source 1..20: mol_type = other DNA
atttggtgtgcagactccac

SEQ ID NO: 12414 - DNA, 20 bp, synthetic construct
  misc_feature 1..20: note = chemically synthesized
  source 1..20: mol_type = other DNA
tggtgtgcagactccactgg

SEQ ID NO: 12415 - DNA, 20 bp, synthetic construct
  misc_feature 1..20: note = chemically synthesized
  source 1..20: mol_type = other DNA
ggtgtgcagactccactggc

SEQ ID NO: 12416 - DNA, 20 bp, synthetic construct
  misc_feature 1..20: note = chemically synthesized
  source 1..20: mol_type = other DNA
gtgtgcagactccactggca

SEQ ID NO: 12417 - DNA, 20 bp, synthetic construct
  misc_feature 1..20: note = chemically synthesized
  source 1..20: mol_type = other DNA
tgcagactccactggcaggg

SEQ ID NO: 12418 - DNA, 20 bp, synthetic construct
  misc_feature 1..20: note = chemically synthesized
  source 1..20: mol_type = other DNA
agactccactggcagggaag

SEQ ID NO: 12419 - DNA, 20 bp, synthetic construct
  misc_feature 1..20: note = chemically synthesized
  source 1..20: mol_type = other DNA
gactccactggcagggaagt

SEQ ID NO: 12420 - DNA, 20 bp, synthetic construct
  misc_feature 1..20: note = chemically synthesized
  source 1..20: mol_type = other DNA
ccactggcagggaagtagga

SEQ ID NO: 12421 - DNA, 20 bp, synthetic construct
  misc_feature 1..20: note = chemically synthesized
  source 1..20: mol_type = other DNA
ggaagtaggacagccctact

SEQ ID NO: 12422 - DNA, 20 bp, synthetic construct
  misc_feature 1..20: note = chemically synthesized
  source 1..20: mol_type = other DNA
gacagccctacttggtttcg

SEQ ID NO: 12423 - DNA, 20 bp, synthetic construct
  misc_feature 1..20: note = chemically synthesized
  source 1..20: mol_type = other DNA
gccctacttggtttcgcagc

SEQ ID NO: 12424 - DNA, 20 bp, synthetic construct
  misc_feature 1..20: note = chemically synthesized
  source 1..20: mol_type = other DNA
ctacttggtttcgcagctgg

SEQ ID NO: 12425 - DNA, 20 bp, synthetic construct
  misc_feature 1..20: note = chemically synthesized
  source 1..20: mol_type = other DNA
tggtttcgcagctggtagcc

SEQ ID NO: 12426 - DNA, 20 bp, synthetic construct
  misc_feature 1..20: note = chemically synthesized
  source 1..20: mol_type = other DNA
ggtttcgcagctggtagcct

SEQ ID NO: 12427 - DNA, 20 bp, synthetic construct
  misc_feature 1..20: note = chemically synthesized
  source 1..20: mol_type = other DNA
gtttcgcagctggtagcctg

SEQ ID NO: 12428 - DNA, 20 bp, synthetic construct
  misc_feature 1..20: note = chemically synthesized
  source 1..20: mol_type = other DNA
cgcagctggtagcctggggc

SEQ ID NO: 12429 - DNA, 20 bp, synthetic construct
  misc_feature 1..20: note = chemically synthesized
  source 1..20: mol_type = other DNA
ggtagcctggggcaagttct

SEQ ID NO: 12430 - DNA, 20 bp, synthetic construct
  misc_feature 1..20: note = chemically synthesized
  source 1..20: mol_type = other DNA
agccttgctcactgactgca

SEQ ID NO: 12431 - DNA, 20 bp, synthetic construct
  misc_feature 1..20: note = chemically synthesized
  source 1..20: mol_type = other DNA
gctcactgactgcatggaaa

SEQ ID NO: 12432 - DNA, 20 bp, synthetic construct
  misc_feature 1..20: note = chemically synthesized
  source 1..20: mol_type = other DNA
tgactgcatggaaacagatt

SEQ ID NO: 12433 - DNA, 20 bp, synthetic construct
  misc_feature 1..20: note = chemically synthesized
  source 1..20: mol_type = other DNA
aaacagattcggtgctgttg

SEQ ID NO: 12434 - DNA, 20 bp, synthetic construct
  misc_feature 1..20: note = chemically synthesized
  source 1..20: mol_type = other DNA
aacagattcggtgctgttgc

SEQ ID NO: 12435 - DNA, 20 bp, synthetic construct
  misc_feature 1..20: note = chemically synthesized
  source 1..20: mol_type = other DNA
acagattcggtgctgttgcg

SEQ ID NO: 12436 - DNA, 20 bp, synthetic construct
  misc_feature 1..20: note = chemically synthesized
  source 1..20: mol_type = other DNA
cagattcggtgctgttgcgg

SEQ ID NO: 12437 - DNA, 20 bp, synthetic construct
  misc_feature 1..20: note = chemically synthesized
  source 1..20: mol_type = other DNA
gattcggtgctgttgcgggg

SEQ ID NO: 12438 - DNA, 20 bp, synthetic construct
  misc_feature 1..20: note = chemically synthesized
  source 1..20: mol_type = other DNA
attcggtgctgttgcggggg

SEQ ID NO: 12439 - DNA, 20 bp, synthetic construct
  misc_feature 1..20: note = chemically synthesized
  source 1..20: mol_type = other DNA
ttcggtgctgttgcggggga

SEQ ID NO: 12440 - DNA, 20 bp, synthetic construct
  misc_feature 1..20: note = chemically synthesized
  source 1..20: mol_type = other DNA
ttgcgggggagggtgcacgc

SEQ ID NO: 12441 - DNA, 20 bp, synthetic construct
  misc_feature 1..20: note = chemically synthesized
  source 1..20: mol_type = other DNA
cgggggagggtgcacgctgg

SEQ ID NO: 12442 - DNA, 20 bp, synthetic construct
  misc_feature 1..20: note = chemically synthesized
  source 1..20: mol_type = other DNA
ggagggtgcacgctggaagt

SEQ ID NO: 12443 - DNA, 20 bp, synthetic construct
  misc_feature 1..20: note = chemically synthesized
  source 1..20: mol_type = other DNA
ggaagtgagaccaacctttt

SEQ ID NO: 12444 - DNA, 20 bp, synthetic construct
  misc_feature 1..20: note = chemically synthesized
  source 1..20: mol_type = other DNA
gaccaaccttttgagttgca

SEQ ID NO: 12445 - DNA, 20 bp, synthetic construct
  misc_feature 1..20: note = chemically synthesized
  source 1..20: mol_type = other DNA
accaaccttttgagttgcat

SEQ ID NO: 12446 - DNA, 20 bp, synthetic construct
  misc_feature 1..20: note = chemically synthesized
  source 1..20: mol_type = other DNA
caaccttttgagttgcatgg

SEQ ID NO: 12447 - DNA, 20 bp, synthetic construct
  misc_feature 1..20: note = chemically synthesized
  source 1..20: mol_type = other DNA
cttttgagttgcatgggagc

SEQ ID NO: 12448 - DNA, 20 bp, synthetic construct
  misc_feature 1..20: note = chemically synthesized
  source 1..20: mol_type = other DNA
ttttgagttgcatgggagct

SEQ ID NO: 12449 - DNA, 20 bp, synthetic construct
  misc_feature 1..20: note = chemically synthesized
  source 1..20: mol_type = other DNA
gagttgcatgggagctgggc

SEQ ID NO: 12450 - DNA, 20 bp, synthetic construct
  misc_feature 1..20: note = chemically synthesized
  source 1..20: mol_type = other DNA
tcctgatgacctgcatgaca

SEQ ID NO: 12451 - DNA, 20 bp, synthetic construct
  misc_feature 1..20: note = chemically synthesized
  source 1..20: mol_type = other DNA
tgatgacctgcatgacacag

SEQ ID NO: 12452 - DNA, 20 bp, synthetic construct
  misc_feature 1..20: note = chemically synthesized
  source 1..20: mol_type = other DNA
atgacctgcatgacacagca

SEQ ID NO: 12453 - DNA, 20 bp, synthetic construct
  misc_feature 1..20: note = chemically synthesized
  source 1..20: mol_type = other DNA
tgacctgcatgacacagcag

SEQ ID NO: 12454 - DNA, 20 bp, synthetic construct
  misc_feature 1..20: note = chemically synthesized
  source 1..20: mol_type = other DNA
cctgcatgacacagcagagg

SEQ ID NO: 12455 - DNA, 20 bp, synthetic construct
  misc_feature 1..20: note = chemically synthesized
  source 1..20: mol_type = other DNA
agaggcagccataattgtcc

SEQ ID NO: 12456 - DNA, 20 bp, synthetic construct
  misc_feature 1..20: note = chemically synthesized
  source 1..20: mol_type = other DNA
gaggcagccataattgtcct

SEQ ID NO: 12457 - DNA, 20 bp, synthetic construct
  misc_feature 1..20: note = chemically synthesized
  source 1..20: mol_type = other DNA
ggaacataaatccattgacc

SEQ ID NO: 12458 - DNA, 20 bp, synthetic construct
  misc_feature 1..20: note = chemically synthesized
  source 1..20: mol_type = other DNA
actacacccccatcctccca

SEQ ID NO: 12459 - DNA, 20 bp, synthetic construct
  misc_feature 1..20: note = chemically synthesized
  source 1..20: mol_type = other DNA
acacccccatcctcccacag

SEQ ID NO: 12460 - DNA, 20 bp, synthetic construct
  misc_feature 1..20: note = chemically synthesized
  source 1..20: mol_type = other DNA
ccatcctcccacagtagcca

SEQ ID NO: 12461 - DNA, 20 bp, synthetic construct
  misc_feature 1..20: note = chemically synthesized
  source 1..20: mol_type = other DNA
cctcccacagtagccacaga

SEQ ID NO: 12462 - DNA, 20 bp, synthetic construct
  misc_feature 1..20: note = chemically synthesized
  source 1..20: mol_type = other DNA
agccacagaaagacctgccc

SEQ ID NO: 12463 - DNA, 20 bp, synthetic construct
  misc_feature 1..20: note = chemically synthesized
  source 1..20: mol_type = other DNA
gccacagaaagacctgccca

SEQ ID NO: 12464 - DNA, 20 bp, synthetic construct
  misc_feature 1..20: note = chemically synthesized
  source 1..20: mol_type = other DNA
cacagaaagacctgcccaag

SEQ ID NO: 12465 - DNA, 20 bp, synthetic construct
  misc_feature 1..20: note = chemically synthesized
  source 1..20: mol_type = other DNA
gacctgcccaaggagactct

SEQ ID NO: 12466 - DNA, 20 bp, synthetic construct
  misc_feature 1..20: note = chemically synthesized
  source 1..20: mol_type = other DNA
gcccaaggagactctgagct

SEQ ID NO: 12467 - DNA, 20 bp, synthetic construct
  misc_feature 1..20: note = chemically synthesized
  source 1..20: mol_type = other DNA
actctgagctcagacacgac

SEQ ID NO: 12468 - DNA, 20 bp, synthetic construct
  misc_feature 1..20: note = chemically synthesized
  source 1..20: mol_type = other DNA
ctagtcctgcccccacctga

SEQ ID NO: 12469 - DNA, 20 bp, synthetic construct
  misc_feature 1..20: note = chemically synthesized
  source 1..20: mol_type = other DNA
tggtccttccttactcaccc

SEQ ID NO: 12470 - DNA, 20 bp, synthetic construct
  misc_feature 1..20: note = chemically synthesized
  source 1..20: mol_type = other DNA
tccttccttactcaccctgg

SEQ ID NO: 12471 - DNA, 20 bp, synthetic construct
  misc_feature 1..20: note = chemically synthesized
  source 1..20: mol_type = other DNA
cttactcaccctggtagctg

SEQ ID NO: 12472 - DNA, 20 bp, synthetic construct
  misc_feature 1..20: note = chemically synthesized
  source 1..20: mol_type = other DNA
caccctggtagctgaagaca

SEQ ID NO: 12473 - DNA, 20 bp, synthetic construct
  misc_feature 1..20: note = chemically synthesized
  source 1..20: mol_type = other DNA
accctggtagctgaagacaa

SEQ ID NO: 12474 - DNA, 20 bp, synthetic construct
  misc_feature 1..20: note = chemically synthesized
  source 1..20: mol_type = other DNA
ccctggtagctgaagacaaa

SEQ ID NO: 12475 - DNA, 20 bp, synthetic construct
  misc_feature 1..20: note = chemically synthesized
  source 1..20: mol_type = other DNA
agacaaagggcatatattct

SEQ ID NO: 12476 - DNA, 20 bp, synthetic construct
  misc_feature 1..20: note = chemically synthesized
  source 1..20: mol_type = other DNA
gacaaagggcatatattctt

SEQ ID NO: 12477 - DNA, 20 bp, synthetic construct
  misc_feature 1..20: note = chemically synthesized
  source 1..20: mol_type = other DNA
caaagggcatatattcttgg

SEQ ID NO: 12478 - DNA, 20 bp, synthetic construct
  misc_feature 1..20: note = chemically synthesized
  source 1..20: mol_type = other DNA
gcatatattcttgggagttc

SEQ ID NO: 12479 - DNA, 20 bp, synthetic construct
  misc_feature 1..20: note = chemically synthesized
  source 1..20: mol_type = other DNA
catatattcttgggagttct

SEQ ID NO: 12480 - DNA, 20 bp, synthetic construct
  misc_feature 1..20: note = chemically synthesized
  source 1..20: mol_type = other DNA
atatattcttgggagttcta

SEQ ID NO: 12481 - DNA, 20 bp, synthetic construct
  misc_feature 1..20: note = chemically synthesized
  source 1..20: mol_type = other DNA
ttgggagttctagggtgccc

SEQ ID NO: 12482 - DNA, 20 bp, synthetic construct
  misc_feature 1..20: note = chemically synthesized
  source 1..20: mol_type = other DNA
ctagggtgccccagcccccc

SEQ ID NO: 12483 - DNA, 20 bp, synthetic construct
  misc_feature 1..20: note = chemically synthesized
  source 1..20: mol_type = other DNA
ctgcctctgctgatgctttc

SEQ ID NO: 12484 - DNA, 20 bp, synthetic construct
  misc_feature 1..20: note = chemically synthesized
  source 1..20: mol_type = other DNA
ctctgctgatgctttctaga

SEQ ID NO: 12485 - DNA, 20 bp, synthetic construct
  misc_feature 1..20: note = chemically synthesized
  source 1..20: mol_type = other DNA
ttctagaaagtgccacctcc

SEQ ID NO: 12486 - DNA, 20 bp, synthetic construct
  misc_feature 1..20: note = chemically synthesized
  source 1..20: mol_type = other DNA
tagaaagtgccacctcctgg

SEQ ID NO: 12487 - DNA, 20 bp, synthetic construct
  misc_feature 1..20: note = chemically synthesized
  source 1..20: mol_type = other DNA
agaaagtgccacctcctggc

SEQ ID NO: 12488 - DNA, 20 bp, synthetic construct
  misc_feature 1..20: note = chemically synthesized
  source 1..20: mol_type = other DNA
aaagtgccacctcctggcag

SEQ ID NO: 12489 - DNA, 20 bp, synthetic construct
  misc_feature 1..20: note = chemically synthesized
  source 1..20: mol_type = other DNA
aagtgccacctcctggcagg

SEQ ID NO: 12490 - DNA, 20 bp, synthetic construct
  misc_feature 1..20: note = chemically synthesized
  source 1..20: mol_type = other DNA
cctcctggcaggaggccaac

SEQ ID NO: 12491 - DNA, 20 bp, synthetic construct
  misc_feature 1..20: note = chemically synthesized
  source 1..20: mol_type = other DNA
gaggccaaccagcacaaaaa

SEQ ID NO: 12492 - DNA, 20 bp, synthetic construct
  misc_feature 1..20: note = chemically synthesized
  source 1..20: mol_type = other DNA
atagtgcattgaacaaccaa

SEQ ID NO: 12493 - DNA, 20 bp, synthetic construct
  misc_feature 1..20: note = chemically synthesized
  source 1..20: mol_type = other DNA
tgcattgaacaaccaaaagt

SEQ ID NO: 12494 - DNA, 20 bp, synthetic construct
  misc_feature 1..20: note = chemically synthesized
  source 1..20: mol_type = other DNA
gcattgaacaaccaaaagta

SEQ ID NO: 12495 - DNA, 20 bp, synthetic construct
  misc_feature 1..20: note = chemically synthesized
  source 1..20: mol_type = other DNA
accaaaagtaaggaccctca

SEQ ID NO: 12496 - DNA, 20 bp, synthetic construct
  misc_feature 1..20: note = chemically synthesized
  source 1..20: mol_type = other DNA
caaaagtaaggaccctcaca

SEQ ID NO: 12497 - DNA, 20 bp, synthetic construct
  misc_feature 1..20: note = chemically synthesized
  source 1..20: mol_type = other DNA
tcatcctctgccacctccat

SEQ ID NO: 12498 - DNA, 20 bp, synthetic construct
  misc_feature 1..20: note = chemically synthesized
  source 1..20: mol_type = other DNA
atcctctgccacctccattg

SEQ ID NO: 12499 - DNA, 20 bp, synthetic construct
  misc_feature 1..20: note = chemically synthesized
  source 1..20: mol_type = other DNA
ctctgccacctccattggag

SEQ ID NO: 12500 - DNA, 20 bp, synthetic construct
  misc_feature 1..20: note = chemically synthesized
  source 1..20: mol_type = other DNA
tctgccacctccattggagc

SEQ ID NO: 12501 - DNA, 20 bp, synthetic construct
  misc_feature 1..20: note = chemically synthesized
  source 1..20: mol_type = other DNA
gccacctccattggagcagg

SEQ ID NO: 12502 - DNA, 20 bp, synthetic construct
  misc_feature 1..20: note = chemically synthesized
  source 1..20: mol_type = other DNA
ggagcaggtggttgtatcta

SEQ ID NO: 12503 - DNA, 20 bp, synthetic construct
  misc_feature 1..20: note = chemically synthesized
  source 1..20: mol_type = other DNA
aggtggttgtatctatggct

SEQ ID NO: 12504 - DNA, 20 bp, synthetic construct
  misc_feature 1..20: note = chemically synthesized
  source 1..20: mol_type = other DNA
gtggttgtatctatggctga

SEQ ID NO: 12505 - DNA, 20 bp, synthetic construct
  misc_feature 1..20: note = chemically synthesized
  source 1..20: mol_type = other DNA
atctatggctgagagaccca

SEQ ID NO: 12506 - DNA, 20 bp, synthetic construct
  misc_feature 1..20: note = chemically synthesized
  source 1..20: mol_type = other DNA
atggctgagagacccacaga

SEQ ID NO: 12507 - DNA, 20 bp, synthetic construct
  misc_feature 1..20: note = chemically synthesized
  source 1..20: mol_type = other DNA
ccacagatggttcacgtcac

SEQ ID NO: 12508 - DNA, 20 bp, synthetic construct
  misc_feature 1..20: note = chemically synthesized
  source 1..20: mol_type = other DNA
tcacgtcacaagactctgtg

SEQ ID NO: 12509 - DNA, 20 bp, synthetic construct
  misc_feature 1..20: note = chemically synthesized
  source 1..20: mol_type = other DNA
gactctgtgcagacaaaccc

SEQ ID NO: 12510 - DNA, 20 bp, synthetic construct
  misc_feature 1..20: note = chemically synthesized
  source 1..20: mol_type = other DNA
gtgcagacaaaccccagtac

SEQ ID NO: 12511 - DNA, 20 bp, synthetic construct
  misc_feature 1..20: note = chemically synthesized
  source 1..20: mol_type = other DNA
gacaaaccccagtaccagcc

SEQ ID NO: 12512 - DNA, 20 bp, synthetic construct
  misc_feature 1..20: note = chemically synthesized
  source 1..20: mol_type = other DNA
caaaccccagtaccagcctg

SEQ ID NO: 12513 - DNA, 20 bp, synthetic construct
  misc_feature 1..20: note = chemically synthesized
  source 1..20: mol_type = other DNA
cccagtaccagcctggagtc

SEQ ID NO: 12514 - DNA, 20 bp, synthetic construct
  misc_feature 1..20: note = chemically synthesized
  source 1..20: mol_type = other DNA
agtaccagcctggagtctgg

SEQ ID NO: 12515 - DNA, 20 bp, synthetic construct
  misc_feature 1..20: note = chemically synthesized
  source 1..20: mol_type = other DNA
ctggagtctggtagacctga

SEQ ID NO: 12516 - DNA, 20 bp, synthetic construct
  misc_feature 1..20: note = chemically synthesized
  source 1..20: mol_type = other DNA
tggagtctggtagacctgat

SEQ ID NO: 12517 - DNA, 20 bp, synthetic construct
  misc_feature 1..20: note = chemically synthesized
  source 1..20: mol_type = other DNA
agtctggtagacctgatggg

SEQ ID NO: 12518 - DNA, 20 bp, synthetic construct
  misc_feature 1..20: note = chemically synthesized
  source 1..20: mol_type = other DNA
tggtagacctgatgggtggc

SEQ ID NO: 12519 - DNA, 20 bp, synthetic construct
  misc_feature 1..20: note = chemically synthesized
  source 1..20: mol_type = other DNA
acctgatgggtggctagatc

SEQ ID NO: 12520 - DNA, 20 bp, synthetic construct
  misc_feature 1..20: note = chemically synthesized
  source 1..20: mol_type = other DNA
tgatgggtggctagatccag

SEQ ID NO: 12521 - DNA, 20 bp, synthetic construct
  misc_feature 1..20: note = chemically synthesized
  source 1..20: mol_type = other DNA
atgggtggctagatccagaa

SEQ ID NO: 12522 - DNA, 20 bp, synthetic construct
  misc_feature 1..20: note = chemically synthesized
  source 1..20: mol_type = other DNA
gggtggctagatccagaaga

SEQ ID NO: 12523 - DNA, 20 bp, synthetic construct
  misc_feature 1..20: note = chemically synthesized
  source 1..20: mol_type = other DNA
aagagagataacaatcacta

SEQ ID NO: 12524 - DNA, 20 bp, synthetic construct
  misc_feature 1..20: note = chemically synthesized
  source 1..20: mol_type = other DNA
agataacaatcactacagtt

SEQ ID NO: 12525 - DNA, 20 bp, synthetic construct
  misc_feature 1..20: note = chemically synthesized
  source 1..20: mol_type = other DNA
aatcactacagttcggctct

SEQ ID NO: 12526 - DNA, 20 bp, synthetic construct
  misc_feature 1..20: note = chemically synthesized
  source 1..20: mol_type = other DNA
atcactacagttcggctctc

SEQ ID NO: 12527 - DNA, 20 bp, synthetic construct
  misc_feature 1..20: note = chemically synthesized
  source 1..20: mol_type = other DNA
actacagttcggctctcagg

SEQ ID NO: 12528 - DNA, 20 bp, synthetic construct
  misc_feature 1..20: note = chemically synthesized
  source 1..20: mol_type = other DNA
ctctcaggaagccccacgcc

SEQ ID NO: 12529 - DNA, 20 bp, synthetic construct
  misc_feature 1..20: note = chemically synthesized
  source 1..20: mol_type = other DNA
tctcaggaagccccacgcct

SEQ ID NO: 12530 - DNA, 20 bp, synthetic construct
  misc_feature 1..20: note = chemically synthesized
  source 1..20: mol_type = other DNA
ggaagccccacgcctaggaa

SEQ ID NO: 12531 - DNA, 20 bp, synthetic construct
  misc_feature 1..20: note = chemically synthesized
  source 1..20: mol_type = other DNA
gaagccccacgcctaggaaa

SEQ ID NO: 12532 - DNA, 20 bp, synthetic construct
  misc_feature 1..20: note = chemically synthesized
  source 1..20: mol_type = other DNA
aagccccacgcctaggaaaa

SEQ ID NO: 12533 - DNA, 20 bp, synthetic construct
  misc_feature 1..20: note = chemically synthesized
  source 1..20: mol_type = other DNA
agccccacgcctaggaaaag

SEQ ID NO: 12534 - DNA, 20 bp, synthetic construct
  misc_feature 1..20: note = chemically synthesized
  source 1..20: mol_type = other DNA
gccccacgcctaggaaaagg

SEQ ID NO: 12535 - DNA, 20 bp, synthetic construct
  misc_feature 1..20: note = chemically synthesized
  source 1..20: mol_type = other DNA
aagggggactgtgctacatc

SEQ ID NO: 12536 - DNA, 20 bp, synthetic construct
  misc_feature 1..20: note = chemically synthesized
  source 1..20: mol_type = other DNA
agggggactgtgctacatca

SEQ ID NO: 12537 - DNA, 20 bp, synthetic construct
  misc_feature 1..20: note = chemically synthesized
  source 1..20: mol_type = other DNA
gggggactgtgctacatcaa

SEQ ID NO: 12538 - DNA, 20 bp, synthetic construct
  misc_feature 1..20: note = chemically synthesized
  source 1..20: mol_type = other DNA
tacatcaagggaacacctca

SEQ ID NO: 12539 - DNA, 20 bp, synthetic construct
  misc_feature 1..20: note = chemically synthesized
  source 1..20: mol_type = other DNA
acatcaagggaacacctcat

SEQ ID NO: 12540 - DNA, 20 bp, synthetic construct
  misc_feature 1..20: note = chemically synthesized
  source 1..20: mol_type = other DNA
gggaacacctcatgggacaa

SEQ ID NO: 12541 - DNA, 20 bp, synthetic construct
  misc_feature 1..20: note = chemically synthesized
  source 1..20: mol_type = other DNA
acctcatgggacaaaagtct

SEQ ID NO: 12542 - DNA, 20 bp, synthetic construct
  misc_feature 1..20: note = chemically synthesized
  source 1..20: mol_type = other DNA
gggacaaaagtctcagcctt

SEQ ID NO: 12543 - DNA, 20 bp, synthetic construct
  misc_feature 1..20: note = chemically synthesized
  source 1..20: mol_type = other DNA
ggacaaaagtctcagccttg

SEQ ID NO: 12544 - DNA, 20 bp, synthetic construct
  misc_feature 1..20: note = chemically synthesized
  source 1..20: mol_type = other DNA
aaagtctcagccttgaggcc

SEQ ID NO: 12545 - DNA, 20 bp, synthetic construct
  misc_feature 1..20: note = chemically synthesized
  source 1..20: mol_type = other DNA
ggcctagactttccctctga

SEQ ID NO: 12546 - DNA, 20 bp, synthetic construct
  misc_feature 1..20: note = chemically synthesized
  source 1..20: mol_type = other DNA
cctagactttccctctgaca

SEQ ID NO: 12547 - DNA, 20 bp, synthetic construct
  misc_feature 1..20: note = chemically synthesized
  source 1..20: mol_type = other DNA
ccctctgacagagcctaccc

SEQ ID NO: 12548 - DNA, 20 bp, synthetic construct
  misc_feature 1..20: note = chemically synthesized
  source 1..20: mol_type = other DNA
ctgacagagcctacccaagt

SEQ ID NO: 12549 - DNA, 20 bp, synthetic construct
  misc_feature 1..20: note = chemically synthesized
  source 1..20: mol_type = other DNA
acagagcctacccaagtgag

SEQ ID NO: 12550 - DNA, 20 bp, synthetic construct
  misc_feature 1..20: note = chemically synthesized
  source 1..20: mol_type = other DNA
cagagcctacccaagtgaga

SEQ ID NO: 12551 - DNA, 20 bp, synthetic construct
  misc_feature 1..20: note = chemically synthesized
  source 1..20: mol_type = other DNA
ctacccaagtgagaaggaac

SEQ ID NO: 12552 - DNA, 20 bp, synthetic construct
  misc_feature 1..20: note = chemically synthesized
  source 1..20: mol_type = other DNA
aggaaccagaaaactaactc

SEQ ID NO: 12553 - DNA, 20 bp, synthetic construct
  misc_feature 1..20: note = chemically synthesized
  source 1..20: mol_type = other DNA
actctggtaatatgaaaaac

SEQ ID NO: 12554 - DNA, 20 bp, synthetic construct
  misc_feature 1..20: note = chemically synthesized
  source 1..20: mol_type = other DNA
ctctggtaatatgaaaaaca

SEQ ID NO: 12555 - DNA, 20 bp, synthetic construct
  misc_feature 1..20: note = chemically synthesized
  source 1..20: mol_type = other DNA
caccccccaaaaaatcatac

SEQ ID NO: 12556 - DNA, 20 bp, synthetic construct
  misc_feature 1..20: note = chemically synthesized
  source 1..20: mol_type = other DNA
aaaaaatcatactagctcac

SEQ ID NO: 12557 - DNA, 20 bp, synthetic construct
  misc_feature 1..20: note = chemically synthesized
  source 1..20: mol_type = other DNA
accagcaatgcatccaaacc

SEQ ID NO: 12558 - DNA, 20 bp, synthetic construct
  misc_feature 1..20: note = chemically synthesized
  source 1..20: mol_type = other DNA
agcaatgcatccaaaccaag

SEQ ID NO: 12559 - DNA, 20 bp, synthetic construct
  misc_feature 1..20: note = chemically synthesized
  source 1..20: mol_type = other DNA
gatttacctgaaaaataatt

SEQ ID NO: 12560 - DNA, 20 bp, synthetic construct
  misc_feature 1..20: note = chemically synthesized
  source 1..20: mol_type = other DNA
ttacctgaaaaataattcag

SEQ ID NO: 12561 - DNA, 20 bp, synthetic construct
  misc_feature 1..20: note = chemically synthesized
  source 1..20: mol_type = other DNA
tacctgaaaaataattcaga

SEQ ID NO: 12562 - DNA, 20 bp, synthetic construct
  misc_feature 1..20: note = chemically synthesized
  source 1..20: mol_type = other DNA
tgaaaaataattcagaaggt

SEQ ID NO: 12563 - DNA, 20 bp, synthetic construct
  misc_feature 1..20: note = chemically synthesized
  source 1..20: mol_type = other DNA
aattcagaaggtcagttatt

SEQ ID NO: 12564 - DNA, 20 bp, synthetic construct
  misc_feature 1..20: note = chemically synthesized
  source 1..20: mol_type = other DNA
ggtcagttattaagctaatc

SEQ ID NO: 12565 - DNA, 20 bp, synthetic construct
  misc_feature 1..20: note = chemically synthesized
  source 1..20: mol_type = other DNA
gtcagttattaagctaatca

SEQ ID NO: 12566 - DNA, 20 bp, synthetic construct
  misc_feature 1..20: note = chemically synthesized
  source 1..20: mol_type = other DNA
cagttattaagctaatcaag

SEQ ID NO: 12567 - DNA, 20 bp, synthetic construct
  misc_feature 1..20: note = chemically synthesized
  source 1..20: mol_type = other DNA
agttattaagctaatcaagg

SEQ ID NO: 12568 - DNA, 20 bp, synthetic construct
  misc_feature 1..20: note = chemically synthesized
  source 1..20: mol_type = other DNA
agctaatcaaggaggcatcc

SEQ ID NO: 12569 - DNA, 20 bp, synthetic construct
  misc_feature 1..20: note = chemically synthesized
  source 1..20: mol_type = other DNA
gctaatcaaggaggcatccg

SEQ ID NO: 12570 - DNA, 20 bp, synthetic construct
  misc_feature 1..20: note = chemically synthesized
  source 1..20: mol_type = other DNA
aatcaaggaggcatccgagg

SEQ ID NO: 12571 - DNA, 20 bp, synthetic construct
  misc_feature 1..20: note = chemically synthesized
  source 1..20: mol_type = other DNA
atcaaggaggcatccgagga

SEQ ID NO: 12572 - DNA, 20 bp, synthetic construct
  misc_feature 1..20: note = chemically synthesized
  source 1..20: mol_type = other DNA
ggaggcatccgaggaaggtg

SEQ ID NO: 12573 - DNA, 20 bp, synthetic construct
  misc_feature 1..20: note = chemically synthesized
  source 1..20: mol_type = other DNA
aaaaaccaaaaatatgatac

SEQ ID NO: 12574 - DNA, 20 bp, synthetic construct
  misc_feature 1..20: note = chemically synthesized
  source 1..20: mol_type = other DNA
aaaaatatgatacaagaaat

SEQ ID NO: 12575 - DNA, 20 bp, synthetic construct
  misc_feature 1..20: note = chemically synthesized
  source 1..20: mol_type = other DNA
aaaatatgatacaagaaatg

SEQ ID NO: 12576 - DNA, 20 bp, synthetic construct
  misc_feature 1..20: note = chemically synthesized
  source 1..20: mol_type = other DNA
aaatatgatacaagaaatga

SEQ ID NO: 12577 - DNA, 20 bp, synthetic construct
  misc_feature 1..20: note = chemically synthesized
  source 1..20: mol_type = other DNA
aatatgatacaagaaatgag

SEQ ID NO: 12578 - DNA, 20 bp, synthetic construct
  misc_feature 1..20: note = chemically synthesized
  source 1..20: mol_type = other DNA
tatgatacaagaaatgaggg

SEQ ID NO: 12579 - DNA, 20 bp, synthetic construct
  misc_feature 1..20: note = chemically synthesized
  source 1..20: mol_type = other DNA
gaaatgaggggagaaatctt

SEQ ID NO: 12580 - DNA, 20 bp, synthetic construct
  misc_feature 1..20: note = chemically synthesized
  source 1..20: mol_type = other DNA
aggggagaaatcttcagtta

SEQ ID NO: 12581 - DNA, 20 bp, synthetic construct
  misc_feature 1..20: note = chemically synthesized
  source 1..20: mol_type = other DNA
gggagaaatcttcagttaaa

SEQ ID NO: 12582 - DNA, 20 bp, synthetic construct
  misc_feature 1..20: note = chemically synthesized
  source 1..20: mol_type = other DNA
gaaatcttcagttaaagaga

SEQ ID NO: 12583 - DNA, 20 bp, synthetic construct
  misc_feature 1..20: note = chemically synthesized
  source 1..20: mol_type = other DNA
ataaaaaacattcaaaactt

SEQ ID NO: 12584 - DNA, 20 bp, synthetic construct
  misc_feature 1..20: note = chemically synthesized
  source 1..20: mol_type = other DNA
taaaaaacattcaaaacttc

SEQ ID NO: 12585 - DNA, 20 bp, synthetic construct
  misc_feature 1..20: note = chemically synthesized
  source 1..20: mol_type = other DNA
ttcaaaacttcaggaaacaa

SEQ ID NO: 12586 - DNA, 20 bp, synthetic construct
  misc_feature 1..20: note = chemically synthesized
  source 1..20: mol_type = other DNA
ttcaggaaacaatggatgaa

SEQ ID NO: 12587 - DNA, 20 bp, synthetic construct
  misc_feature 1..20: note = chemically synthesized
  source 1..20: mol_type = other DNA
tggatgaatggatgcactta

SEQ ID NO: 12588 - DNA, 20 bp, synthetic construct
  misc_feature 1..20: note = chemically synthesized
  source 1..20: mol_type = other DNA
tatagaaatgcaaaatgctc

SEQ ID NO: 12589 - DNA, 20 bp, synthetic construct
  misc_feature 1..20: note = chemically synthesized
  source 1..20: mol_type = other DNA
gaaatgcaaaatgctctaga

SEQ ID NO: 12590 - DNA, 20 bp, synthetic construct
  misc_feature 1..20: note = chemically synthesized
  source 1..20: mol_type = other DNA
caaaatgctctagaaagtct

SEQ ID NO: 12591 - DNA, 20 bp, synthetic construct
  misc_feature 1..20: note = chemically synthesized
  source 1..20: mol_type = other DNA
gctctagaaagtctcagcaa

SEQ ID NO: 12592 - DNA, 20 bp, synthetic construct
  misc_feature 1..20: note = chemically synthesized
  source 1..20: mol_type = other DNA
aagtctcagcaatagaatcc

SEQ ID NO: 12593 - DNA, 20 bp, synthetic construct
  misc_feature 1..20: note = chemically synthesized
  source 1..20: mol_type = other DNA
tctcagcaatagaatccaag

SEQ ID NO: 12594 - DNA, 20 bp, synthetic construct
  misc_feature 1..20: note = chemically synthesized
  source 1..20: mol_type = other DNA
cagcaatagaatccaagcag

SEQ ID NO: 12595 - DNA, 20 bp, synthetic construct
  misc_feature 1..20: note = chemically synthesized
  source 1..20: mol_type = other DNA
gaatccaagcagaagaaatt

SEQ ID NO: 12596 - DNA, 20 bp, synthetic construct
  misc_feature 1..20: note = chemically synthesized
  source 1..20: mol_type = other DNA
atccaagcagaagaaattca

SEQ ID NO: 12597 - DNA, 20 bp, synthetic construct
  misc_feature 1..20: note = chemically synthesized
  source 1..20: mol_type = other DNA
cagaagaaattcagagcttg

SEQ ID NO: 12598 - DNA, 20 bp, synthetic construct
  misc_feature 1..20: note = chemically synthesized
  source 1..20: mol_type = other DNA
aaattcagagcttgaagaca

SEQ ID NO: 12599 - DNA, 20 bp, synthetic construct
  misc_feature 1..20: note = chemically synthesized
  source 1..20: mol_type = other DNA
tgaattaacccaatccaaca

SEQ ID NO: 12600 - DNA, 20 bp, synthetic construct
  misc_feature 1..20: note = chemically synthesized
  source 1..20: mol_type = other DNA
aacccaatccaacaaagaca

SEQ ID NO: 12601 - DNA, 20 bp, synthetic construct
  misc_feature 1..20: note = chemically synthesized
  source 1..20: mol_type = other DNA
tccaacaaagacaaagaaaa

SEQ ID NO: 12602 - DNA, 20 bp, synthetic construct
  misc_feature 1..20: note = chemically synthesized
  source 1..20: mol_type = other DNA
aaagacaaagaaaaaagaat

SEQ ID NO: 12603 - DNA, 20 bp, synthetic construct
  misc_feature 1..20: note = chemically synthesized
  source 1..20: mol_type = other DNA
agaataagaaaatatgaaca

SEQ ID NO: 12604 - DNA, 20 bp, synthetic construct
  misc_feature 1..20: note = chemically synthesized
  source 1..20: mol_type = other DNA
aaaatatgaacaaagcctcc

SEQ ID NO: 12605 - DNA, 20 bp, synthetic construct
  misc_feature 1..20: note = chemically synthesized
  source 1..20: mol_type = other DNA
aacaaagcctccaagaaatc

SEQ ID NO: 12606 - DNA, 20 bp, synthetic construct
  misc_feature 1..20: note = chemically synthesized
  source 1..20: mol_type = other DNA
acaaagcctccaagaaatct

SEQ ID NO: 12607 - DNA, 20 bp, synthetic construct
  misc_feature 1..20: note = chemically synthesized
  source 1..20: mol_type = other DNA
tatgttaaacaatcaaacct

SEQ ID NO: 12608 - DNA, 20 bp, synthetic construct
  misc_feature 1..20: note = chemically synthesized
  source 1..20: mol_type = other DNA
caatcaaacctaagaataat

SEQ ID NO: 12609 - DNA, 20 bp, synthetic construct
  misc_feature 1..20: note = chemically synthesized
  source 1..20: mol_type = other DNA
taagaataatcagcattcct

SEQ ID NO: 12610 - DNA, 20 bp, synthetic construct
  misc_feature 1..20: note = chemically synthesized
  source 1..20: mol_type = other DNA
aataatcagcattcctgaga

SEQ ID NO: 12611 - DNA, 20 bp, synthetic construct
  misc_feature 1..20: note = chemically synthesized
  source 1..20: mol_type = other DNA
aatcagcattcctgagaaag

SEQ ID NO: 12612 - DNA, 20 bp, synthetic construct
  misc_feature 1..20: note = chemically synthesized
  source 1..20: mol_type = other DNA
tcagcattcctgagaaagaa

SEQ ID NO: 12613 - DNA, 20 bp, synthetic construct
  misc_feature 1..20: note = chemically synthesized
  source 1..20: mol_type = other DNA
gagaaagaagagaaatctaa

SEQ ID NO: 12614 - DNA, 20 bp, synthetic construct
  misc_feature 1..20: note = chemically synthesized
  source 1..20: mol_type = other DNA
agaagagaaatctaaaagtt

SEQ ID NO: 12615 - DNA, 20 bp, synthetic construct
  misc_feature 1..20: note = chemically synthesized
  source 1..20: mol_type = other DNA
aaaagtttggaaaacttatc

SEQ ID NO: 12616 - DNA, 20 bp, synthetic construct
  misc_feature 1..20: note = chemically synthesized
  source 1..20: mol_type = other DNA
aaagtttggaaaacttatcc

SEQ ID NO: 12617 - DNA, 20 bp, synthetic construct
  misc_feature 1..20: note = chemically synthesized
  source 1..20: mol_type = other DNA
aagtttggaaaacttatcca

SEQ ID NO: 12618 - DNA, 20 bp, synthetic construct
  misc_feature 1..20: note = chemically synthesized
  source 1..20: mol_type = other DNA
acttatccagggaaataatc

SEQ ID NO: 12619 - DNA, 20 bp, synthetic construct
  misc_feature 1..20: note = chemically synthesized
  source 1..20: mol_type = other DNA
cttatccagggaaataatca

SEQ ID NO: 12620 - DNA, 20 bp, synthetic construct
  misc_feature 1..20: note = chemically synthesized
  source 1..20: mol_type = other DNA
gaaaacttcccccaccttgc

SEQ ID NO: 12621 - DNA, 20 bp, synthetic construct
  misc_feature 1..20: note = chemically synthesized
  source 1..20: mol_type = other DNA
aaacttcccccaccttgcta

SEQ ID NO: 12622 - DNA, 20 bp, synthetic construct
  misc_feature 1..20: note = chemically synthesized
  source 1..20: mol_type = other DNA
cccccaccttgctagagacc

SEQ ID NO: 12623 - DNA, 20 bp, synthetic construct
  misc_feature 1..20: note = chemically synthesized
  source 1..20: mol_type = other DNA
agacctagatatccaaatac

SEQ ID NO: 12624 - DNA, 20 bp, synthetic construct
  misc_feature 1..20: note = chemically synthesized
  source 1..20: mol_type = other DNA
cctagatatccaaatacaag

SEQ ID NO: 12625 - DNA, 20 bp, synthetic construct
  misc_feature 1..20: note = chemically synthesized
  source 1..20: mol_type = other DNA
caagaagctcaataaacacc

SEQ ID NO: 12626 - DNA, 20 bp, synthetic construct
  misc_feature 1..20: note = chemically synthesized
  source 1..20: mol_type = other DNA
aagaagctcaataaacacct

SEQ ID NO: 12627 - DNA, 20 bp, synthetic construct
  misc_feature 1..20: note = chemically synthesized
  source 1..20: mol_type = other DNA
attgcaaaaatatcattgcc

SEQ ID NO: 12628 - DNA, 20 bp, synthetic construct
  misc_feature 1..20: note = chemically synthesized
  source 1..20: mol_type = other DNA
ttgcaaaaatatcattgcct

SEQ ID NO: 12629 - DNA, 20 bp, synthetic construct
  misc_feature 1..20: note = chemically synthesized
  source 1..20: mol_type = other DNA
ttgcctaggtacattgtcat

SEQ ID NO: 12630 - DNA, 20 bp, synthetic construct
  misc_feature 1..20: note = chemically synthesized
  source 1..20: mol_type = other DNA
gcctaggtacattgtcatca

SEQ ID NO: 12631 - DNA, 20 bp, synthetic construct
  misc_feature 1..20: note = chemically synthesized
  source 1..20: mol_type = other DNA
cattgtcatcagagtatcca

SEQ ID NO: 12632 - DNA, 20 bp, synthetic construct
  misc_feature 1..20: note = chemically synthesized
  source 1..20: mol_type = other DNA
agagtatccaaagttatcta

SEQ ID NO: 12633 - DNA, 20 bp, synthetic construct
  misc_feature 1..20: note = chemically synthesized
  source 1..20: mol_type = other DNA
tccaaagttatctaaagaca

SEQ ID NO: 12634 - DNA, 20 bp, synthetic construct
  misc_feature 1..20: note = chemically synthesized
  source 1..20: mol_type = other DNA
caaagttatctaaagacaaa

SEQ ID NO: 12635 - DNA, 20 bp, synthetic construct
  misc_feature 1..20: note = chemically synthesized
  source 1..20: mol_type = other DNA
ctaaagacaaagagaatctt

SEQ ID NO: 12636 - DNA, 20 bp, synthetic construct
  misc_feature 1..20: note = chemically synthesized
  source 1..20: mol_type = other DNA
aaagacaaagagaatcttaa

SEQ ID NO: 12637 - DNA, 20 bp, synthetic construct
  misc_feature 1..20: note = chemically synthesized
  source 1..20: mol_type = other DNA
aagagaatcttaagagctgt

SEQ ID NO: 12638 - DNA, 20 bp, synthetic construct
  misc_feature 1..20: note = chemically synthesized
  source 1..20: mol_type = other DNA
agagaatcttaagagctgtg

SEQ ID NO: 12639 - DNA, 20 bp, synthetic construct
  misc_feature 1..20: note = chemically synthesized
  source 1..20: mol_type = other DNA
gagctgtgaggtgaaactac

SEQ ID NO: 12640 - DNA, 20 bp, synthetic construct
  misc_feature 1..20: note = chemically synthesized
  source 1..20: mol_type = other DNA
agctgtgaggtgaaactacc

SEQ ID NO: 12641 - DNA, 20 bp, synthetic construct
  misc_feature 1..20: note = chemically synthesized
  source 1..20: mol_type = other DNA
aactaccaggtaacctatga

SEQ ID NO: 12642 - DNA, 20 bp, synthetic construct
  misc_feature 1..20: note = chemically synthesized
  source 1..20: mol_type = other DNA
acctatgaaagaaaacctat

SEQ ID NO: 12643 - DNA, 20 bp, synthetic construct
  misc_feature 1..20: note = chemically synthesized
  source 1..20: mol_type = other DNA
aagaaaacctatcagattaa

SEQ ID NO: 12644 - DNA, 20 bp, synthetic construct
  misc_feature 1..20: note = chemically synthesized
  source 1..20: mol_type = other DNA
aaaacctatcagattaacag

SEQ ID NO: 12645 - DNA, 20 bp, synthetic construct
  misc_feature 1..20: note = chemically synthesized
  source 1..20: mol_type = other DNA
cagattaacagcagatttct

SEQ ID NO: 12646 - DNA, 20 bp, synthetic construct
  misc_feature 1..20: note = chemically synthesized
  source 1..20: mol_type = other DNA
attaacagcagatttctcag

SEQ ID NO: 12647 - DNA, 20 bp, synthetic construct
  misc_feature 1..20: note = chemically synthesized
  source 1..20: mol_type = other DNA
tttctcagcagaaaccgtaa

SEQ ID NO: 12648 - DNA, 20 bp, synthetic construct
  misc_feature 1..20: note = chemically synthesized
  source 1..20: mol_type = other DNA
tcagcagaaaccgtaaaagc

SEQ ID NO: 12649 - DNA, 20 bp, synthetic construct
  misc_feature 1..20: note = chemically synthesized
  source 1..20: mol_type = other DNA
gcagaaaccgtaaaagctag

SEQ ID NO: 12650 - DNA, 20 bp, synthetic construct
  misc_feature 1..20: note = chemically synthesized
  source 1..20: mol_type = other DNA
gtaaaagctagaagtgaata

SEQ ID NO: 12651 - DNA, 20 bp, synthetic construct
  misc_feature 1..20: note = chemically synthesized
  source 1..20: mol_type = other DNA
agtgaatatggccctatctt

SEQ ID NO: 12652 - DNA, 20 bp, synthetic construct
  misc_feature 1..20: note = chemically synthesized
  source 1..20: mol_type = other DNA
ttcttaaacaaaacaattat

SEQ ID NO: 12653 - DNA, 20 bp, synthetic construct
  misc_feature 1..20: note = chemically synthesized
  source 1..20: mol_type = other DNA
aaacaaaacaattatcagcc

SEQ ID NO: 12654 - DNA, 20 bp, synthetic construct
  misc_feature 1..20: note = chemically synthesized
  source 1..20: mol_type = other DNA
tcagccaagaattttatatc

SEQ ID NO: 12655 - DNA, 20 bp, synthetic construct
  misc_feature 1..20: note = chemically synthesized
  source 1..20: mol_type = other DNA
attttatatccagtgaaact

SEQ ID NO: 12656 - DNA, 20 bp, synthetic construct
  misc_feature 1..20: note = chemically synthesized
  source 1..20: mol_type = other DNA
gaaactaagcttcacaaatg

SEQ ID NO: 12657 - DNA, 20 bp, synthetic construct
  misc_feature 1..20: note = chemically synthesized
  source 1..20: mol_type = other DNA
tcacaaatgaagaaaataca

SEQ ID NO: 12658 - DNA, 20 bp, synthetic construct
  misc_feature 1..20: note = chemically synthesized
  source 1..20: mol_type = other DNA
agaaaatacacagtgttttt

SEQ ID NO: 12659 - DNA, 20 bp, synthetic construct
  misc_feature 1..20: note = chemically synthesized
  source 1..20: mol_type = other DNA
ttttcagaaaaacaaatgct

SEQ ID NO: 12660 - DNA, 20 bp, synthetic construct
  misc_feature 1..20: note = chemically synthesized
  source 1..20: mol_type = other DNA
ttcagaaaaacaaatgctga

SEQ ID NO: 12661 - DNA, 20 bp, synthetic construct
  misc_feature 1..20: note = chemically synthesized
  source 1..20: mol_type = other DNA
aaacaaatgctgagagaatt

SEQ ID NO: 12662 - DNA, 20 bp, synthetic construct
  misc_feature 1..20: note = chemically synthesized
  source 1..20: mol_type = other DNA
tgagagaattcggcactacc

SEQ ID NO: 12663 - DNA, 20 bp, synthetic construct
  misc_feature 1..20: note = chemically synthesized
  source 1..20: mol_type = other DNA
cactaccaagccaacactac

SEQ ID NO: 12664 - DNA, 20 bp, synthetic construct
  misc_feature 1..20: note = chemically synthesized
  source 1..20: mol_type = other DNA
aacactacaagaactgataa

SEQ ID NO: 12665 - DNA, 20 bp, synthetic construct
  misc_feature 1..20: note = chemically synthesized
  source 1..20: mol_type = other DNA
acactacaagaactgataaa

SEQ ID NO: 12666 - DNA, 20 bp, synthetic construct
  misc_feature 1..20: note = chemically synthesized
  source 1..20: mol_type = other DNA
actacaagaactgataaaag

SEQ ID NO: 12667 - DNA, 20 bp, synthetic construct
  misc_feature 1..20: note = chemically synthesized
  source 1..20: mol_type = other DNA
ctaaatcttgaaataaaccc

SEQ ID NO: 12668 - DNA, 20 bp, synthetic construct
  misc_feature 1..20: note = chemically synthesized
  source 1..20: mol_type = other DNA
aatcttgaaataaaccctgg

SEQ ID NO: 12669 - DNA, 20 bp, synthetic construct
  misc_feature 1..20: note = chemically synthesized
  source 1..20: mol_type = other DNA
accctggaagcacatcaaaa

SEQ ID NO: 12670 - DNA, 20 bp, synthetic construct
  misc_feature 1..20: note = chemically synthesized
  source 1..20: mol_type = other DNA
atcaaaacagaacctcttta

SEQ ID NO: 12671 - DNA, 20 bp, synthetic construct
  misc_feature 1..20: note = chemically synthesized
  source 1..20: mol_type = other DNA
tctttaaagcataaatccca

SEQ ID NO: 12672 - DNA, 20 bp, synthetic construct
  misc_feature 1..20: note = chemically synthesized
  source 1..20: mol_type = other DNA
ctttaaagcataaatcccat

SEQ ID NO: 12673 - DNA, 20 bp, synthetic construct
  misc_feature 1..20: note = chemically synthesized
  source 1..20: mol_type = other DNA
ggacatatacaacaaaaata

SEQ ID NO: 12674 - DNA, 20 bp, synthetic construct
  misc_feature 1..20: note = chemically synthesized
  source 1..20: mol_type = other DNA
acaacaaaaatacagataaa

SEQ ID NO: 12675 - DNA, 20 bp, synthetic construct
  misc_feature 1..20: note = chemically synthesized
  source 1..20: mol_type = other DNA
aatacagataaaaagataca

SEQ ID NO: 12676 - DNA, 20 bp, synthetic construct
  misc_feature 1..20: note = chemically synthesized
  source 1..20: mol_type = other DNA
atacagataaaaagatacac

SEQ ID NO: 12677 - DNA, 20 bp, synthetic construct
  misc_feature 1..20: note = chemically synthesized
  source 1..20: mol_type = other DNA
cacaggcaacaaataccacg

SEQ ID NO: 12678 - DNA, 20 bp, synthetic construct
  misc_feature 1..20: note = chemically synthesized
  source 1..20: mol_type = other DNA
gcaacaaataccacgaagaa

SEQ ID NO: 12679 - DNA, 20 bp, synthetic construct
  misc_feature 1..20: note = chemically synthesized
  source 1..20: mol_type = other DNA
aaataccacgaagaatggaa

SEQ ID NO: 12680 - DNA, 20 bp, synthetic construct
  misc_feature 1..20: note = chemically synthesized
  source 1..20: mol_type = other DNA
atactgatgttgaatgtaaa

SEQ ID NO: 12681 - DNA, 20 bp, synthetic construct
  misc_feature 1..20: note = chemically synthesized
  source 1..20: mol_type = other DNA
ggactaaatgctccacttaa

SEQ ID NO: 12682 - DNA, 20 bp, synthetic construct
  misc_feature 1..20: note = chemically synthesized
  source 1..20: mol_type = other DNA
aatgctccacttaaaagata

SEQ ID NO: 12683 - DNA, 20 bp, synthetic construct
  misc_feature 1..20: note = chemically synthesized
  source 1..20: mol_type = other DNA
acttaaaagatacagaattg

SEQ ID NO: 12684 - DNA, 20 bp, synthetic construct
  misc_feature 1..20: note = chemically synthesized
  source 1..20: mol_type = other DNA
tacagaattgcagaatgaat

SEQ ID NO: 12685 - DNA, 20 bp, synthetic construct
  misc_feature 1..20: note = chemically synthesized
  source 1..20: mol_type = other DNA
atgaataagaattcaccaac

SEQ ID NO: 12686 - DNA, 20 bp, synthetic construct
  misc_feature 1..20: note = chemically synthesized
  source 1..20: mol_type = other DNA
aaccagttatctgccgcctt

SEQ ID NO: 12687 - DNA, 20 bp, synthetic construct
  misc_feature 1..20: note = chemically synthesized
  source 1..20: mol_type = other DNA
accagttatctgccgccttc

SEQ ID NO: 12688 - DNA, 20 bp, synthetic construct
  misc_feature 1..20: note = chemically synthesized
  source 1..20: mol_type = other DNA
cagttatctgccgccttcag

SEQ ID NO: 12689 - DNA, 20 bp, synthetic construct
  misc_feature 1..20: note = chemically synthesized
  source 1..20: mol_type = other DNA
aggagactcacctaacacat

SEQ ID NO: 12690 - DNA, 20 bp, synthetic construct
  misc_feature 1..20: note = chemically synthesized
  source 1..20: mol_type = other DNA
ggagactcacctaacacata

SEQ ID NO: 12691 - DNA, 20 bp, synthetic construct
  misc_feature 1..20: note = chemically synthesized
  source 1..20: mol_type = other DNA
ataaggactcacataaactt

SEQ ID NO: 12692 - DNA, 20 bp, synthetic construct
  misc_feature 1..20: note = chemically synthesized
  source 1..20: mol_type = other DNA
taaggactcacataaactta

SEQ ID NO: 12693 - DNA, 20 bp, synthetic construct
  misc_feature 1..20: note = chemically synthesized
  source 1..20: mol_type = other DNA
actcacataaacttaaggta

SEQ ID NO: 12694 - DNA, 20 bp, synthetic construct
  misc_feature 1..20: note = chemically synthesized
  source 1..20: mol_type = other DNA
ctcacataaacttaaggtaa

SEQ ID NO: 12695 - DNA, 20 bp, synthetic construct
  misc_feature 1..20: note = chemically synthesized
  source 1..20: mol_type = other DNA
tcacataaacttaaggtaaa

SEQ ID NO: 12696 - DNA, 20 bp, synthetic construct
  misc_feature 1..20: note = chemically synthesized
  source 1..20: mol_type = other DNA
cacataaacttaaggtaaag

SEQ ID NO: 12697 - DNA, 20 bp, synthetic construct
  misc_feature 1..20: note = chemically synthesized
  source 1..20: mol_type = other DNA
ataaacttaaggtaaagggg

SEQ ID NO: 12698 - DNA, 20 bp, synthetic construct
  misc_feature 1..20: note = chemically synthesized
  source 1..20: mol_type = other DNA
aaaatgacattccacacaaa

SEQ ID NO: 12699 - DNA, 20 bp, synthetic construct
  misc_feature 1..20: note = chemically synthesized
  source 1..20: mol_type = other DNA
tccacacaaatggacaccaa

SEQ ID NO: 12700 - DNA, 20 bp, synthetic construct
  misc_feature 1..20: note = chemically synthesized
  source 1..20: mol_type = other DNA
cacaaatggacaccaaaagc

SEQ ID NO: 12701 - DNA, 20 bp, synthetic construct
  misc_feature 1..20: note = chemically synthesized
  source 1..20: mol_type = other DNA
tggacaccaaaagcgagcca

SEQ ID NO: 12702 - DNA, 20 bp, synthetic construct
  misc_feature 1..20: note = chemically synthesized
  source 1..20: mol_type = other DNA
acaccaaaagcgagccaaag

SEQ ID NO: 12703 - DNA, 20 bp, synthetic construct
  misc_feature 1..20: note = chemically synthesized
  source 1..20: mol_type = other DNA
caaagcagctattcttatgt

SEQ ID NO: 12704 - DNA, 20 bp, synthetic construct
  misc_feature 1..20: note = chemically synthesized
  source 1..20: mol_type = other DNA
gtcagacaaaacaaacttta

SEQ ID NO: 12705 - DNA, 20 bp, synthetic construct
  misc_feature 1..20: note = chemically synthesized
  source 1..20: mol_type = other DNA
caaaacaaactttaaagaaa

SEQ ID NO: 12706 - DNA, 20 bp, synthetic construct
  misc_feature 1..20: note = chemically synthesized
  source 1..20: mol_type = other DNA
aacaaactttaaagaaacag

SEQ ID NO: 12707 - DNA, 20 bp, synthetic construct
  misc_feature 1..20: note = chemically synthesized
  source 1..20: mol_type = other DNA
taaagaaacagcagttaaaa

SEQ ID NO: 12708 - DNA, 20 bp, synthetic construct
  misc_feature 1..20: note = chemically synthesized
  source 1..20: mol_type = other DNA
aacagcagttaaaaaagaca

SEQ ID NO: 12709 - DNA, 20 bp, synthetic construct
  misc_feature 1..20: note = chemically synthesized
  source 1..20: mol_type = other DNA
cagcagttaaaaaagacaaa

SEQ ID NO: 12710 - DNA, 20 bp, synthetic construct
  misc_feature 1..20: note = chemically synthesized
  source 1..20: mol_type = other DNA
agcagttaaaaaagacaaag

SEQ ID NO: 12711 - DNA, 20 bp, synthetic construct
  misc_feature 1..20: note = chemically synthesized
  source 1..20: mol_type = other DNA
gcagttaaaaaagacaaaga

SEQ ID NO: 12712 - DNA, 20 bp, synthetic construct
  misc_feature 1..20: note = chemically synthesized
  source 1..20: mol_type = other DNA
gggacatcatataatgataa

SEQ ID NO: 12713 - DNA, 20 bp, synthetic construct
  misc_feature 1..20: note = chemically synthesized
  source 1..20: mol_type = other DNA
tgataaaagcccttgtccaa

SEQ ID NO: 12714 - DNA, 20 bp, synthetic construct
  misc_feature 1..20: note = chemically synthesized
  source 1..20: mol_type = other DNA
gataaaagcccttgtccaat

SEQ ID NO: 12715 - DNA, 20 bp, synthetic construct
  misc_feature 1..20: note = chemically synthesized
  source 1..20: mol_type = other DNA
taaaagcccttgtccaatgg

SEQ ID NO: 12716 - DNA, 20 bp, synthetic construct
  misc_feature 1..20: note = chemically synthesized
  source 1..20: mol_type = other DNA
aatatatatgcatctaatac

SEQ ID NO: 12717 - DNA, 20 bp, synthetic construct
  misc_feature 1..20: note = chemically synthesized
  source 1..20: mol_type = other DNA
tatatatgcatctaatactg

SEQ ID NO: 12718 - DNA, 20 bp, synthetic construct
  misc_feature 1..20: note = chemically synthesized
  source 1..20: mol_type = other DNA
atttataaaacaattactac

SEQ ID NO: 12719 - DNA, 20 bp, synthetic construct
  misc_feature 1..20: note = chemically synthesized
  source 1..20: mol_type = other DNA
taaaacaattactactagac

SEQ ID NO: 12720 - DNA, 20 bp, synthetic construct
  misc_feature 1..20: note = chemically synthesized
  source 1..20: mol_type = other DNA
acaattactactagactaga

SEQ ID NO: 12721 - DNA, 20 bp, synthetic construct
  misc_feature 1..20: note = chemically synthesized
  source 1..20: mol_type = other DNA
actagacagcaacataataa

SEQ ID NO: 12722 - DNA, 20 bp, synthetic construct
  misc_feature 1..20: note = chemically synthesized
  source 1..20: mol_type = other DNA
agacagcaacataataatag

SEQ ID NO: 12723 - DNA, 20 bp, synthetic construct
  misc_feature 1..20: note = chemically synthesized
  source 1..20: mol_type = other DNA
gacagcaacataataatagt

SEQ ID NO: 12724 - DNA, 20 bp, synthetic construct
  misc_feature 1..20: note = chemically synthesized
  source 1..20: mol_type = other DNA
acagcaacataataatagtg

SEQ ID NO: 12725 - DNA, 20 bp, synthetic construct
  misc_feature 1..20: note = chemically synthesized
  source 1..20: mol_type = other DNA
cagcaacataataatagtgg

SEQ ID NO: 12726 - DNA, 20 bp, synthetic construct
  misc_feature 1..20: note = chemically synthesized
  source 1..20: mol_type = other DNA
caatactccactgactgcac

SEQ ID NO: 12727 - DNA, 20 bp, synthetic construct
  misc_feature 1..20: note = chemically synthesized
  source 1..20: mol_type = other DNA
aatactccactgactgcact

SEQ ID NO: 12728 - DNA, 20 bp, synthetic construct
  misc_feature 1..20: note = chemically synthesized
  source 1..20: mol_type = other DNA
actccactgactgcactagg

SEQ ID NO: 12729 - DNA, 20 bp, synthetic construct
  misc_feature 1..20: note = chemically synthesized
  source 1..20: mol_type = other DNA
ctccactgactgcactaggc

SEQ ID NO: 12730 - DNA, 20 bp, synthetic construct
  misc_feature 1..20: note = chemically synthesized
  source 1..20: mol_type = other DNA
actgcactaggcaggtcatc

SEQ ID NO: 12731 - DNA, 20 bp, synthetic construct
  misc_feature 1..20: note = chemically synthesized
  source 1..20: mol_type = other DNA
cactaggcaggtcatcaaga

SEQ ID NO: 12732 - DNA, 20 bp, synthetic construct
  misc_feature 1..20: note = chemically synthesized
  source 1..20: mol_type = other DNA
ggtcatcaagacagtctaca

SEQ ID NO: 12733 - DNA, 20 bp, synthetic construct
  misc_feature 1..20: note = chemically synthesized
  source 1..20: mol_type = other DNA
gacagtctacaaagaaacaa

SEQ ID NO: 12734 - DNA, 20 bp, synthetic construct
  misc_feature 1..20: note = chemically synthesized
  source 1..20: mol_type = other DNA
acaaagaaacaatggattta

SEQ ID NO: 12735 - DNA, 20 bp, synthetic construct
  misc_feature 1..20: note = chemically synthesized
  source 1..20: mol_type = other DNA
caatggatttaaagaacaaa

SEQ ID NO: 12736 - DNA, 20 bp, synthetic construct
  misc_feature 1..20: note = chemically synthesized
  source 1..20: mol_type = other DNA
taaagaacaaatggacttaa

SEQ ID NO: 12737 - DNA, 20 bp, synthetic construct
  misc_feature 1..20: note = chemically synthesized
  source 1..20: mol_type = other DNA
atggacttaacagatattta

SEQ ID NO: 12738 - DNA, 20 bp, synthetic construct
  misc_feature 1..20: note = chemically synthesized
  source 1..20: mol_type = other DNA
tggacttaacagatatttac

SEQ ID NO: 12739 - DNA, 20 bp, synthetic construct
  misc_feature 1..20: note = chemically synthesized
  source 1..20: mol_type = other DNA
gacattctacccaacaactg

SEQ ID NO: 12740 - DNA, 20 bp, synthetic construct
  misc_feature 1..20: note = chemically synthesized
  source 1..20: mol_type = other DNA
agaatacacattctattcat

SEQ ID NO: 12741 - DNA, 20 bp, synthetic construct
  misc_feature 1..20: note = chemically synthesized
  source 1..20: mol_type = other DNA
acattctattcatcagcaca

SEQ ID NO: 12742 - DNA, 20 bp, synthetic construct
  misc_feature 1..20: note = chemically synthesized
  source 1..20: mol_type = other DNA
cagcacatggaactttctcc

SEQ ID NO: 12743 - DNA, 20 bp, synthetic construct
  misc_feature 1..20: note = chemically synthesized
  source 1..20: mol_type = other DNA
acatggaactttctccaaga

SEQ ID NO: 12744 - DNA, 20 bp, synthetic construct
  misc_feature 1..20: note = chemically synthesized
  source 1..20: mol_type = other DNA
catggaactttctccaagat

SEQ ID NO: 12745 - DNA, 20 bp, synthetic construct
  misc_feature 1..20: note = chemically synthesized
  source 1..20: mol_type = other DNA
catatgatatgccacaaaac

SEQ ID NO: 12746 - DNA, 20 bp, synthetic construct
  misc_feature 1..20: note = chemically synthesized
  source 1..20: mol_type = other DNA
ttaaaaattgaaattatatc

SEQ ID NO: 12747 - DNA, 20 bp, synthetic construct
  misc_feature 1..20: note = chemically synthesized
  source 1..20: mol_type = other DNA
aattatatcaagcactctct

SEQ ID NO: 12748 - DNA, 20 bp, synthetic construct
  misc_feature 1..20: note = chemically synthesized
  source 1..20: mol_type = other DNA
tcaagcactctctcagacca

SEQ ID NO: 12749 - DNA, 20 bp, synthetic construct
  misc_feature 1..20: note = chemically synthesized
  source 1..20: mol_type = other DNA
agcactctctcagaccacag

SEQ ID NO: 12750 - DNA, 20 bp, synthetic construct
  misc_feature 1..20: note = chemically synthesized
  source 1..20: mol_type = other DNA
agaccacagtagaataaaat

SEQ ID NO: 12751 - DNA, 20 bp, synthetic construct
  misc_feature 1..20: note = chemically synthesized
  source 1..20: mol_type = other DNA
aaattggaaatcaactacaa

SEQ ID NO: 12752 - DNA, 20 bp, synthetic construct
  misc_feature 1..20: note = chemically synthesized
  source 1..20: mol_type = other DNA
aattggaaatcaactacaaa

SEQ ID NO: 12753 - DNA, 20 bp, synthetic construct
  misc_feature 1..20: note = chemically synthesized
  source 1..20: mol_type = other DNA
ccttcaaaaccatgcaaata

SEQ ID NO: 12754 - DNA, 20 bp, synthetic construct
  misc_feature 1..20: note = chemically synthesized
  source 1..20: mol_type = other DNA
cttcaaaaccatgcaaatac

SEQ ID NO: 12755 - DNA, 20 bp, synthetic construct
  misc_feature 1..20: note = chemically synthesized
  source 1..20: mol_type = other DNA
ttcaaaaccatgcaaataca

SEQ ID NO: 12756 - DNA, 20 bp, synthetic construct
  misc_feature 1..20: note = chemically synthesized
  source 1..20: mol_type = other DNA
acctgctcctgaatgatcat

SEQ ID NO: 12757 - DNA, 20 bp, synthetic construct
  misc_feature 1..20: note = chemically synthesized
  source 1..20: mol_type = other DNA
cctgctcctgaatgatcatt

SEQ ID NO: 12758 - DNA, 20 bp, synthetic construct
  misc_feature 1..20: note = chemically synthesized
  source 1..20: mol_type = other DNA
attgggtcaacaatgaaatc

SEQ ID NO: 12759 - DNA, 20 bp, synthetic construct
  misc_feature 1..20: note = chemically synthesized
  source 1..20: mol_type = other DNA
ggtcaacaatgaaatcaaga

SEQ ID NO: 12760 - DNA, 20 bp, synthetic construct
  misc_feature 1..20: note = chemically synthesized
  source 1..20: mol_type = other DNA
aaatcatttgctttgaaaac

SEQ ID NO: 12761 - DNA, 20 bp, synthetic construct
  misc_feature 1..20: note = chemically synthesized
  source 1..20: mol_type = other DNA
tttgctttgaaaaccggcac

SEQ ID NO: 12762 - DNA, 20 bp, synthetic construct
  misc_feature 1..20: note = chemically synthesized
  source 1..20: mol_type = other DNA
tttgaaaaccggcacaagac

SEQ ID NO: 12763 - DNA, 20 bp, synthetic construct
  misc_feature 1..20: note = chemically synthesized
  source 1..20: mol_type = other DNA
ttgaaaaccggcacaagaca

SEQ ID NO: 12764 - DNA, 20 bp, synthetic construct
  misc_feature 1..20: note = chemically synthesized
  source 1..20: mol_type = other DNA
ctcgccactcttactcaaca

SEQ ID NO: 12765 - DNA, 20 bp, synthetic construct
  misc_feature 1..20: note = chemically synthesized
  source 1..20: mol_type = other DNA
actcttactcaacatagtat

SEQ ID NO: 12766 - DNA, 20 bp, synthetic construct
  misc_feature 1..20: note = chemically synthesized
  source 1..20: mol_type = other DNA
cttactcaacatagtattgg

SEQ ID NO: 12767 - DNA, 20 bp, synthetic construct
  misc_feature 1..20: note = chemically synthesized
  source 1..20: mol_type = other DNA
atagtattggaagttctcgc

SEQ ID NO: 12768 - DNA, 20 bp, synthetic construct
  misc_feature 1..20: note = chemically synthesized
  source 1..20: mol_type = other DNA
tagtattggaagttctcgcc

SEQ ID NO: 12769 - DNA, 20 bp, synthetic construct
  misc_feature 1..20: note = chemically synthesized
  source 1..20: mol_type = other DNA
gaagttctcgccaggacaat

SEQ ID NO: 12770 - DNA, 20 bp, synthetic construct
  misc_feature 1..20: note = chemically synthesized
  source 1..20: mol_type = other DNA
aagttctcgccaggacaatc

SEQ ID NO: 12771 - DNA, 20 bp, synthetic construct
  misc_feature 1..20: note = chemically synthesized
  source 1..20: mol_type = other DNA
tctcgccaggacaatcaggc

SEQ ID NO: 12772 - DNA, 20 bp, synthetic construct
  misc_feature 1..20: note = chemically synthesized
  source 1..20: mol_type = other DNA
tcgccaggacaatcaggcaa

SEQ ID NO: 12773 - DNA, 20 bp, synthetic construct
  misc_feature 1..20: note = chemically synthesized
  source 1..20: mol_type = other DNA
caggacaatcaggcaagaga

SEQ ID NO: 12774 - DNA, 20 bp, synthetic construct
  misc_feature 1..20: note = chemically synthesized
  source 1..20: mol_type = other DNA
tcaggcaagagaaagaaata

SEQ ID NO: 12775 - DNA, 20 bp, synthetic construct
  misc_feature 1..20: note = chemically synthesized
  source 1..20: mol_type = other DNA
agaaataaagcatattcaaa

SEQ ID NO: 12776 - DNA, 20 bp, synthetic construct
  misc_feature 1..20: note = chemically synthesized
  source 1..20: mol_type = other DNA
gaaataaagcatattcaaat

SEQ ID NO: 12777 - DNA, 20 bp, synthetic construct
  misc_feature 1..20: note = chemically synthesized
  source 1..20: mol_type = other DNA
ataaagcatattcaaatagg

SEQ ID NO: 12778 - DNA, 20 bp, synthetic construct
  misc_feature 1..20: note = chemically synthesized
  source 1..20: mol_type = other DNA
aaagcatattcaaataggaa

SEQ ID NO: 12779 - DNA, 20 bp, synthetic construct
  misc_feature 1..20: note = chemically synthesized
  source 1..20: mol_type = other DNA
agcatattcaaataggaaga

SEQ ID NO: 12780 - DNA, 20 bp, synthetic construct
  misc_feature 1..20: note = chemically synthesized
  source 1..20: mol_type = other DNA
gcatattcaaataggaagag

SEQ ID NO: 12781 - DNA, 20 bp, synthetic construct
  misc_feature 1..20: note = chemically synthesized
  source 1..20: mol_type = other DNA
tattcaaataggaagagagg

SEQ ID NO: 12782 - DNA, 20 bp, synthetic construct
  misc_feature 1..20: note = chemically synthesized
  source 1..20: mol_type = other DNA
agtcaaattgtctctgtttg

SEQ ID NO: 12783 - DNA, 20 bp, synthetic construct
  misc_feature 1..20: note = chemically synthesized
  source 1..20: mol_type = other DNA
agatgacatgattgtatatt

SEQ ID NO: 12784 - DNA, 20 bp, synthetic construct
  misc_feature 1..20: note = chemically synthesized
  source 1..20: mol_type = other DNA
tgacatgattgtatatttag

SEQ ID NO: 12785 - DNA, 20 bp, synthetic construct
  misc_feature 1..20: note = chemically synthesized
  source 1..20: mol_type = other DNA
tttagaagaccctgtcatct

SEQ ID NO: 12786 - DNA, 20 bp, synthetic construct
  misc_feature 1..20: note = chemically synthesized
  source 1..20: mol_type = other DNA
tcatctcagcccaaaatctt

SEQ ID NO: 12787 - DNA, 20 bp, synthetic construct
  misc_feature 1..20: note = chemically synthesized
  source 1..20: mol_type = other DNA
caaaatcttaagctgataaa

SEQ ID NO: 12788 - DNA, 20 bp, synthetic construct
  misc_feature 1..20: note = chemically synthesized
  source 1..20: mol_type = other DNA
cttaagctgataaacagctt

SEQ ID NO: 12789 - DNA, 20 bp, synthetic construct
  misc_feature 1..20: note = chemically synthesized
  source 1..20: mol_type = other DNA
gctgataaacagcttcagca

SEQ ID NO: 12790 - DNA, 20 bp, synthetic construct
  misc_feature 1..20: note = chemically synthesized
  source 1..20: mol_type = other DNA
aacagcttcagcaaagtctc

SEQ ID NO: 12791 - DNA, 20 bp, synthetic construct
  misc_feature 1..20: note = chemically synthesized
  source 1..20: mol_type = other DNA
aaagtctcaagatacaaaat

SEQ ID NO: 12792 - DNA, 20 bp, synthetic construct
  misc_feature 1..20: note = chemically synthesized
  source 1..20: mol_type = other DNA
caagatacaaaatcagtgtg

SEQ ID NO: 12793 - DNA, 20 bp, synthetic construct
  misc_feature 1..20: note = chemically synthesized
  source 1..20: mol_type = other DNA
aatcagtgtgcagaaatcac

SEQ ID NO: 12794 - DNA, 20 bp, synthetic construct
  misc_feature 1..20: note = chemically synthesized
  source 1..20: mol_type = other DNA
gcgttcctatacaccaataa

SEQ ID NO: 12795 - DNA, 20 bp, synthetic construct
  misc_feature 1..20: note = chemically synthesized
  source 1..20: mol_type = other DNA
cctatacaccaataatagac

SEQ ID NO: 12796 - DNA, 20 bp, synthetic construct
  misc_feature 1..20: note = chemically synthesized
  source 1..20: mol_type = other DNA
atacaccaataatagacaag

SEQ ID NO: 12797 - DNA, 20 bp, synthetic construct
  misc_feature 1..20: note = chemically synthesized
  source 1..20: mol_type = other DNA
acaccaataatagacaagca

SEQ ID NO: 12798 - DNA, 20 bp, synthetic construct
  misc_feature 1..20: note = chemically synthesized
  source 1..20: mol_type = other DNA
accaataatagacaagcaga

SEQ ID NO: 12799 - DNA, 20 bp, synthetic construct
  misc_feature 1..20: note = chemically synthesized
  source 1..20: mol_type = other DNA
acaagcagagagccaaatca

SEQ ID NO: 12800 - DNA, 20 bp, synthetic construct
  misc_feature 1..20: note = chemically synthesized
  source 1..20: mol_type = other DNA
caagcagagagccaaatcat

SEQ ID NO: 12801 - DNA, 20 bp, synthetic construct
  misc_feature 1..20: note = chemically synthesized
  source 1..20: mol_type = other DNA
tcccattcacaattgctgca

SEQ ID NO: 12802 - DNA, 20 bp, synthetic construct
  misc_feature 1..20: note = chemically synthesized
  source 1..20: mol_type = other DNA
ccattcacaattgctgcaaa

SEQ ID NO: 12803 - DNA, 20 bp, synthetic construct
  misc_feature 1..20: note = chemically synthesized
  source 1..20: mol_type = other DNA
agagaataaaataaaatacc

SEQ ID NO: 12804 - DNA, 20 bp, synthetic construct
  misc_feature 1..20: note = chemically synthesized
  source 1..20: mol_type = other DNA
tacctagaaatacaacttct

SEQ ID NO: 12805 - DNA, 20 bp, synthetic construct
  misc_feature 1..20: note = chemically synthesized
  source 1..20: mol_type = other DNA
acctagaaatacaacttcta

SEQ ID NO: 12806 - DNA, 20 bp, synthetic construct
  misc_feature 1..20: note = chemically synthesized
  source 1..20: mol_type = other DNA
cctagaaatacaacttctaa

SEQ ID NO: 12807 - DNA, 20 bp, synthetic construct
  misc_feature 1..20: note = chemically synthesized
  source 1..20: mol_type = other DNA
tacaacttctaagggatgtg

SEQ ID NO: 12808 - DNA, 20 bp, synthetic construct
  misc_feature 1..20: note = chemically synthesized
  source 1..20: mol_type = other DNA
gggatgtgaagaacctcttc

SEQ ID NO: 12809 - DNA, 20 bp, synthetic construct
  misc_feature 1..20: note = chemically synthesized
  source 1..20: mol_type = other DNA
ggatgtgaagaacctcttca

SEQ ID NO: 12810 - DNA, 20 bp, synthetic construct
  misc_feature 1..20: note = chemically synthesized
  source 1..20: mol_type = other DNA
atgtgaagaacctcttcaag

SEQ ID NO: 12811 - DNA, 20 bp, synthetic construct
  misc_feature 1..20: note = chemically synthesized
  source 1..20: mol_type = other DNA
gtgaagaacctcttcaagga

SEQ ID NO: 12812 - DNA, 20 bp, synthetic construct
  misc_feature 1..20: note = chemically synthesized
  source 1..20: mol_type = other DNA
ctacaaaccactcactgctc

SEQ ID NO: 12813 - DNA, 20 bp, synthetic construct
  misc_feature 1..20: note = chemically synthesized
  source 1..20: mol_type = other DNA
tacaaaccactcactgctca

SEQ ID NO: 12814 - DNA, 20 bp, synthetic construct
  misc_feature 1..20: note = chemically synthesized
  source 1..20: mol_type = other DNA
cactcactgctcaaggaaat

SEQ ID NO: 12815 - DNA, 20 bp, synthetic construct
  misc_feature 1..20: note = chemically synthesized
  source 1..20: mol_type = other DNA
ctcactgctcaaggaaataa

SEQ ID NO: 12816 - DNA, 20 bp, synthetic construct
  misc_feature 1..20: note = chemically synthesized
  source 1..20: mol_type = other DNA
cactgctcaaggaaataaga

SEQ ID NO: 12817 - DNA, 20 bp, synthetic construct
  misc_feature 1..20: note = chemically synthesized
  source 1..20: mol_type = other DNA
actgctcaaggaaataagag

SEQ ID NO: 12818 - DNA, 20 bp, synthetic construct
  misc_feature 1..20: note = chemically synthesized
  source 1..20: mol_type = other DNA
taagagaggacacaaacaaa

SEQ ID NO: 12819 - DNA, 20 bp, synthetic construct
  misc_feature 1..20: note = chemically synthesized
  source 1..20: mol_type = other DNA
ggaaaaacattccatgctca

SEQ ID NO: 12820 - DNA, 20 bp, synthetic construct
  misc_feature 1..20: note = chemically synthesized
  source 1..20: mol_type = other DNA
aaacattccatgctcataga

SEQ ID NO: 12821 - DNA, 20 bp, synthetic construct
  misc_feature 1..20: note = chemically synthesized
  source 1..20: mol_type = other DNA
attccatgctcatagataga

SEQ ID NO: 12822 - DNA, 20 bp, synthetic construct
  misc_feature 1..20: note = chemically synthesized
  source 1..20: mol_type = other DNA
aagaatcaatatctttaaaa

SEQ ID NO: 12823 - DNA, 20 bp, synthetic construct
  misc_feature 1..20: note = chemically synthesized
  source 1..20: mol_type = other DNA
taaaatggccatactgccca

SEQ ID NO: 12824 - DNA, 20 bp, synthetic construct
  misc_feature 1..20: note = chemically synthesized
  source 1..20: mol_type = other DNA
atactgcccaaagtaattta

SEQ ID NO: 12825 - DNA, 20 bp, synthetic construct
  misc_feature 1..20: note = chemically synthesized
  source 1..20: mol_type = other DNA
gattcaatgctatccccatc

SEQ ID NO: 12826 - DNA, 20 bp, synthetic construct
  misc_feature 1..20: note = chemically synthesized
  source 1..20: mol_type = other DNA
gctaccactgacttttttca

SEQ ID NO: 12827 - DNA, 20 bp, synthetic construct
  misc_feature 1..20: note = chemically synthesized
  source 1..20: mol_type = other DNA
actgacttttttcaaagaat

SEQ ID NO: 12828 - DNA, 20 bp, synthetic construct
  misc_feature 1..20: note = chemically synthesized
  source 1..20: mol_type = other DNA
aaactactttaaatgtcata

SEQ ID NO: 12829 - DNA, 20 bp, synthetic construct
  misc_feature 1..20: note = chemically synthesized
  source 1..20: mol_type = other DNA
aatgtcatatggaatcaaaa

SEQ ID NO: 12830 - DNA, 20 bp, synthetic construct
  misc_feature 1..20: note = chemically synthesized
  source 1..20: mol_type = other DNA
tgtcatatggaatcaaaaaa

SEQ ID NO: 12831 - DNA, 20 bp, synthetic construct
  misc_feature 1..20: note = chemically synthesized
  source 1..20: mol_type = other DNA
gaatcaaaaaagagcccata

SEQ ID NO: 12832 - DNA, 20 bp, synthetic construct
  misc_feature 1..20: note = chemically synthesized
  source 1..20: mol_type = other DNA
aaaaaagagcccatatagcc

SEQ ID NO: 12833 - DNA, 20 bp, synthetic construct
  misc_feature 1..20: note = chemically synthesized
  source 1..20: mol_type = other DNA
ccaagacaatcctaaacaaa

SEQ ID NO: 12834 - DNA, 20 bp, synthetic construct
  misc_feature 1..20: note = chemically synthesized
  source 1..20: mol_type = other DNA
aatcctaaacaaaaagaaca

SEQ ID NO: 12835 - DNA, 20 bp, synthetic construct
  misc_feature 1..20: note = chemically synthesized
  source 1..20: mol_type = other DNA
ctaaacaaaaagaacaaagc

SEQ ID NO: 12836 - DNA, 20 bp, synthetic construct
  misc_feature 1..20: note = chemically synthesized
  source 1..20: mol_type = other DNA
aaacaaaaagaacaaagctg

SEQ ID NO: 12837 - DNA, 20 bp, synthetic construct
  misc_feature 1..20: note = chemically synthesized
  source 1..20: mol_type = other DNA
aacaaaaagaacaaagctgg

SEQ ID NO: 12838 - DNA, 20 bp, synthetic construct
  misc_feature 1..20: note = chemically synthesized
  source 1..20: mol_type = other DNA
ctgacttcaaactatactac

SEQ ID NO: 12839 - DNA, 20 bp, synthetic construct
  misc_feature 1..20: note = chemically synthesized
  source 1..20: mol_type = other DNA
tgacttcaaactatactaca

SEQ ID NO: 12840 - DNA, 20 bp, synthetic construct
  misc_feature 1..20: note = chemically synthesized
  source 1..20: mol_type = other DNA
caaactatactacaaggcta

SEQ ID NO: 12841 - DNA, 20 bp, synthetic construct
  misc_feature 1..20: note = chemically synthesized
  source 1..20: mol_type = other DNA
caaggctacagtaacaaaaa

SEQ ID NO: 12842 - DNA, 20 bp, synthetic construct
  misc_feature 1..20: note = chemically synthesized
  source 1..20: mol_type = other DNA
ctacagtaacaaaaacagca

SEQ ID NO: 12843 - DNA, 20 bp, synthetic construct
  misc_feature 1..20: note = chemically synthesized
  source 1..20: mol_type = other DNA
taacaaaaacagcatggtac

SEQ ID NO: 12844 - DNA, 20 bp, synthetic construct
  misc_feature 1..20: note = chemically synthesized
  source 1..20: mol_type = other DNA
gcatggtactggtaccaaaa

SEQ ID NO: 12845 - DNA, 20 bp, synthetic construct
  misc_feature 1..20: note = chemically synthesized
  source 1..20: mol_type = other DNA
ctggtaccaaaacagatata

SEQ ID NO: 12846 - DNA, 20 bp, synthetic construct
  misc_feature 1..20: note = chemically synthesized
  source 1..20: mol_type = other DNA
accaaaacagatatatagac

SEQ ID NO: 12847 - DNA, 20 bp, synthetic construct
  misc_feature 1..20: note = chemically synthesized
  source 1..20: mol_type = other DNA
aaaacagatatatagaccag

SEQ ID NO: 12848 - DNA, 20 bp, synthetic construct
  misc_feature 1..20: note = chemically synthesized
  source 1..20: mol_type = other DNA
agatatatagaccagtggaa

SEQ ID NO: 12849 - DNA, 20 bp, synthetic construct
  misc_feature 1..20: note = chemically synthesized
  source 1..20: mol_type = other DNA
tatagaccagtggaacagaa

SEQ ID NO: 12850 - DNA, 20 bp, synthetic construct
  misc_feature 1..20: note = chemically synthesized
  source 1..20: mol_type = other DNA
agaccagtggaacagaacag

SEQ ID NO: 12851 - DNA, 20 bp, synthetic construct
  misc_feature 1..20: note = chemically synthesized
  source 1..20: mol_type = other DNA
gtggaacagaacagaagcct

SEQ ID NO: 12852 - DNA, 20 bp, synthetic construct
  misc_feature 1..20: note = chemically synthesized
  source 1..20: mol_type = other DNA
atctttgacaaacatcacaa

SEQ ID NO: 12853 - DNA, 20 bp, synthetic construct
  misc_feature 1..20: note = chemically synthesized
  source 1..20: mol_type = other DNA
gacaaacatcacaaaagcaa

SEQ ID NO: 12854 - DNA, 20 bp, synthetic construct
  misc_feature 1..20: note = chemically synthesized
  source 1..20: mol_type = other DNA
caaacatcacaaaagcaatg

SEQ ID NO: 12855 - DNA, 20 bp, synthetic construct
  misc_feature 1..20: note = chemically synthesized
  source 1..20: mol_type = other DNA
catcacaaaagcaatggaga

SEQ ID NO: 12856 - DNA, 20 bp, synthetic construct
  misc_feature 1..20: note = chemically synthesized
  source 1..20: mol_type = other DNA
agaattccctatttaataaa

SEQ ID NO: 12857 - DNA, 20 bp, synthetic construct
  misc_feature 1..20: note = chemically synthesized
  source 1..20: mol_type = other DNA
ccctatttaataaatggtgc

SEQ ID NO: 12858 - DNA, 20 bp, synthetic construct
  misc_feature 1..20: note = chemically synthesized
  source 1..20: mol_type = other DNA
ataaatggtgctggaaaaac

SEQ ID NO: 12859 - DNA, 20 bp, synthetic construct
  misc_feature 1..20: note = chemically synthesized
  source 1..20: mol_type = other DNA
atggtgctggaaaaactggc

SEQ ID NO: 12860 - DNA, 20 bp, synthetic construct
  misc_feature 1..20: note = chemically synthesized
  source 1..20: mol_type = other DNA
ccttatacaaaaattaactc

SEQ ID NO: 12861 - DNA, 20 bp, synthetic construct
  misc_feature 1..20: note = chemically synthesized
  source 1..20: mol_type = other DNA
cttatacaaaaattaactca

SEQ ID NO: 12862 - DNA, 20 bp, synthetic construct
  misc_feature 1..20: note = chemically synthesized
  source 1..20: mol_type = other DNA
atacaaaaattaactcaagg

SEQ ID NO: 12863 - DNA, 20 bp, synthetic construct
  misc_feature 1..20: note = chemically synthesized
  source 1..20: mol_type = other DNA
aattaactcaaggtggatta

SEQ ID NO: 12864 - DNA, 20 bp, synthetic construct
  misc_feature 1..20: note = chemically synthesized
  source 1..20: mol_type = other DNA
acctaaaaccataaaaatcc

SEQ ID NO: 12865 - DNA, 20 bp, synthetic construct
  misc_feature 1..20: note = chemically synthesized
  source 1..20: mol_type = other DNA
taaaaccataaaaatcctag

SEQ ID NO: 12866 - DNA, 20 bp, synthetic construct
  misc_feature 1..20: note = chemically synthesized
  source 1..20: mol_type = other DNA
aaaaatcctagaagataacc

SEQ ID NO: 12867 - DNA, 20 bp, synthetic construct
  misc_feature 1..20: note = chemically synthesized
  source 1..20: mol_type = other DNA
aaaatcctagaagataacct

SEQ ID NO: 12868 - DNA, 20 bp, synthetic construct
  misc_feature 1..20: note = chemically synthesized
  source 1..20: mol_type = other DNA
ataacctaggcaataccatt

SEQ ID NO: 12869 - DNA, 20 bp, synthetic construct
  misc_feature 1..20: note = chemically synthesized
  source 1..20: mol_type = other DNA
taacctaggcaataccattc

SEQ ID NO: 12870 - DNA, 20 bp, synthetic construct
  misc_feature 1..20: note = chemically synthesized
  source 1..20: mol_type = other DNA
aggcaataccattcaggaca

SEQ ID NO: 12871 - DNA, 20 bp, synthetic construct
  misc_feature 1..20: note = chemically synthesized
  source 1..20: mol_type = other DNA
ggcaataccattcaggacat

SEQ ID NO: 12872 - DNA, 20 bp, synthetic construct
  misc_feature 1..20: note = chemically synthesized
  source 1..20: mol_type = other DNA
taccattcaggacataggca

SEQ ID NO: 12873 - DNA, 20 bp, synthetic construct
  misc_feature 1..20: note = chemically synthesized
  source 1..20: mol_type = other DNA
accattcaggacataggcat

SEQ ID NO: 12874 - DNA, 20 bp, synthetic construct
  misc_feature 1..20: note = chemically synthesized
  source 1..20: mol_type = other DNA
attcacgactaaaacatcaa

SEQ ID NO: 12875 - DNA, 20 bp, synthetic construct
  misc_feature 1..20: note = chemically synthesized
  source 1..20: mol_type = other DNA
catcaaaagcaatgacaaca

SEQ ID NO: 12876 - DNA, 20 bp, synthetic construct
  misc_feature 1..20: note = chemically synthesized
  source 1..20: mol_type = other DNA
atcaaaagcaatgacaacaa

SEQ ID NO: 12877 - DNA, 20 bp, synthetic construct
  misc_feature 1..20: note = chemically synthesized
  source 1..20: mol_type = other DNA
caaaggccaaaattgacata

SEQ ID NO: 12878 - DNA, 20 bp, synthetic construct
  misc_feature 1..20: note = chemically synthesized
  source 1..20: mol_type = other DNA
aaaggccaaaattgacatat

SEQ ID NO: 12879 - DNA, 20 bp, synthetic construct
  misc_feature 1..20: note = chemically synthesized
  source 1..20: mol_type = other DNA
tatgggatctaattaaacta

SEQ ID NO: 12880 - DNA, 20 bp, synthetic construct
  misc_feature 1..20: note = chemically synthesized
  source 1..20: mol_type = other DNA
tgggatctaattaaactaaa

SEQ ID NO: 12881 - DNA, 20 bp, synthetic construct
  misc_feature 1..20: note = chemically synthesized
  source 1..20: mol_type = other DNA
taaactaaagagcttctgca

SEQ ID NO: 12882 - DNA, 20 bp, synthetic construct
  misc_feature 1..20: note = chemically synthesized
  source 1..20: mol_type = other DNA
aaagagcttctgcacagcaa

SEQ ID NO: 12883 - DNA, 20 bp, synthetic construct
  misc_feature 1..20: note = chemically synthesized
  source 1..20: mol_type = other DNA
gcacagcaaaagactatcat

SEQ ID NO: 12884 - DNA, 20 bp, synthetic construct
  misc_feature 1..20: note = chemically synthesized
  source 1..20: mol_type = other DNA
acagcaaaagactatcatca

SEQ ID NO: 12885 - DNA, 20 bp, synthetic construct
  misc_feature 1..20: note = chemically synthesized
  source 1..20: mol_type = other DNA
aagactatcatcagagtgaa

SEQ ID NO: 12886 - DNA, 20 bp, synthetic construct
  misc_feature 1..20: note = chemically synthesized
  source 1..20: mol_type = other DNA
agactatcatcagagtgaac

SEQ ID NO: 12887 - DNA, 20 bp, synthetic construct
  misc_feature 1..20: note = chemically synthesized
  source 1..20: mol_type = other DNA
cagagtgaacaggcaaccta

SEQ ID NO: 12888 - DNA, 20 bp, synthetic construct
  misc_feature 1..20: note = chemically synthesized
  source 1..20: mol_type = other DNA
tgaacaggcaacctacagaa

SEQ ID NO: 12889 - DNA, 20 bp, synthetic construct
  misc_feature 1..20: note = chemically synthesized
  source 1..20: mol_type = other DNA
gaacaggcaacctacagaat

SEQ ID NO: 12890 - DNA, 20 bp, synthetic construct
  misc_feature 1..20: note = chemically synthesized
  source 1..20: mol_type = other DNA
acaggcaacctacagaatgg

SEQ ID NO: 12891 - DNA, 20 bp, synthetic construct
  misc_feature 1..20: note = chemically synthesized
  source 1..20: mol_type = other DNA
tgcaatctatccatctgaca

SEQ ID NO: 12892 - DNA, 20 bp, synthetic construct
  misc_feature 1..20: note = chemically synthesized
  source 1..20: mol_type = other DNA
gcaatctatccatctgacaa

SEQ ID NO: 12893 - DNA, 20 bp, synthetic construct
  misc_feature 1..20: note = chemically synthesized
  source 1..20: mol_type = other DNA
caatctatccatctgacaaa

SEQ ID NO: 12894 - DNA, 20 bp, synthetic construct
  misc_feature 1..20: note = chemically synthesized
  source 1..20: mol_type = other DNA
gctaacatccaaaatctaca

SEQ ID NO: 12895 - DNA, 20 bp, synthetic construct
  misc_feature 1..20: note = chemically synthesized
  source 1..20: mol_type = other DNA
aagaacttcaacaaatttac

SEQ ID NO: 12896 - DNA, 20 bp, synthetic construct
  misc_feature 1..20: note = chemically synthesized
  source 1..20: mol_type = other DNA
aacctaacgaccccatcaaa

SEQ ID NO: 12897 - DNA, 20 bp, synthetic construct
  misc_feature 1..20: note = chemically synthesized
  source 1..20: mol_type = other DNA
ctaacgaccccatcaaaaag

SEQ ID NO: 12898 - DNA, 20 bp, synthetic construct
  misc_feature 1..20: note = chemically synthesized
  source 1..20: mol_type = other DNA
accccatcaaaaagtggaca

SEQ ID NO: 12899 - DNA, 20 bp, synthetic construct
  misc_feature 1..20: note = chemically synthesized
  source 1..20: mol_type = other DNA
ccccatcaaaaagtggacaa

SEQ ID NO: 12900 - DNA, 20 bp, synthetic construct
  misc_feature 1..20: note = chemically synthesized
  source 1..20: mol_type = other DNA
aagtggacaaaggatatgaa

SEQ ID NO: 12901 - DNA, 20 bp, synthetic construct
  misc_feature 1..20: note = chemically synthesized
  source 1..20: mol_type = other DNA
tatgaacagatgcttctcta

SEQ ID NO: 12902 - DNA, 20 bp, synthetic construct
  misc_feature 1..20: note = chemically synthesized
  source 1..20: mol_type = other DNA
gaacagatgcttctctaaag

SEQ ID NO: 12903 - DNA, 20 bp, synthetic construct
  misc_feature 1..20: note = chemically synthesized
  source 1..20: mol_type = other DNA
ctctaaagaagtcatttatg

SEQ ID NO: 12904 - DNA, 20 bp, synthetic construct
  misc_feature 1..20: note = chemically synthesized
  source 1..20: mol_type = other DNA
aagaagtcatttatgtggcc

SEQ ID NO: 12905 - DNA, 20 bp, synthetic construct
  misc_feature 1..20: note = chemically synthesized
  source 1..20: mol_type = other DNA
gtggccaagaaacacatgaa

SEQ ID NO: 12906 - DNA, 20 bp, synthetic construct
  misc_feature 1..20: note = chemically synthesized
  source 1..20: mol_type = other DNA
gccaagaaacacatgaaaag

SEQ ID NO: 12907 - DNA, 20 bp, synthetic construct
  misc_feature 1..20: note = chemically synthesized
  source 1..20: mol_type = other DNA
gaaaagaagctcatcatcac

SEQ ID NO: 12908 - DNA, 20 bp, synthetic construct
  misc_feature 1..20: note = chemically synthesized
  source 1..20: mol_type = other DNA
agctcatcatcactggtcat

SEQ ID NO: 12909 - DNA, 20 bp, synthetic construct
  misc_feature 1..20: note = chemically synthesized
  source 1..20: mol_type = other DNA
ctcatcatcactggtcatta

SEQ ID NO: 12910 - DNA, 20 bp, synthetic construct
  misc_feature 1..20: note = chemically synthesized
  source 1..20: mol_type = other DNA
atgcaaatcaaaaccacaat

SEQ ID NO: 12911 - DNA, 20 bp, synthetic construct
  misc_feature 1..20: note = chemically synthesized
  source 1..20: mol_type = other DNA
aatgagataccatctcatgc

SEQ ID NO: 12912 - DNA, 20 bp, synthetic construct
  misc_feature 1..20: note = chemically synthesized
  source 1..20: mol_type = other DNA
agataccatctcatgccagt

SEQ ID NO: 12913 - DNA, 20 bp, synthetic construct
  misc_feature 1..20: note = chemically synthesized
  source 1..20: mol_type = other DNA
ccatctcatgccagttagaa

SEQ ID NO: 12914 - DNA, 20 bp, synthetic construct
  misc_feature 1..20: note = chemically synthesized
  source 1..20: mol_type = other DNA
ttagaatggcaattattaaa

SEQ ID NO: 12915 - DNA, 20 bp, synthetic construct
  misc_feature 1..20: note = chemically synthesized
  source 1..20: mol_type = other DNA
aatggcaattattaaaaagt

SEQ ID NO: 12916 - DNA, 20 bp, synthetic construct
  misc_feature 1..20: note = chemically synthesized
  source 1..20: mol_type = other DNA
atggcaattattaaaaagtc

SEQ ID NO: 12917 - DNA, 20 bp, synthetic construct
  misc_feature 1..20: note = chemically synthesized
  source 1..20: mol_type = other DNA
attaaaaagtcaggaaacaa

SEQ ID NO: 12918 - DNA, 20 bp, synthetic construct
  misc_feature 1..20: note = chemically synthesized
  source 1..20: mol_type = other DNA
ttaaaaagtcaggaaacaaa

SEQ ID NO: 12919 - DNA, 20 bp, synthetic construct
  misc_feature 1..20: note = chemically synthesized
  source 1..20: mol_type = other DNA
agtcaggaaacaaaaggtgc

SEQ ID NO: 12920 - DNA, 20 bp, synthetic construct
  misc_feature 1..20: note = chemically synthesized
  source 1..20: mol_type = other DNA
tcaggaaacaaaaggtgctg

SEQ ID NO: 12921 - DNA, 20 bp, synthetic construct
  misc_feature 1..20: note = chemically synthesized
  source 1..20: mol_type = other DNA
aggaaacaaaaggtgctgga

SEQ ID NO: 12922 - DNA, 20 bp, synthetic construct
  misc_feature 1..20: note = chemically synthesized
  source 1..20: mol_type = other DNA
ggaaacaaaaggtgctggag

SEQ ID NO: 12923 - DNA, 20 bp, synthetic construct
  misc_feature 1..20: note = chemically synthesized
  source 1..20: mol_type = other DNA
aaaaggtgctggagaggatg

SEQ ID NO: 12924 - DNA, 20 bp, synthetic construct
  misc_feature 1..20: note = chemically synthesized
  source 1..20: mol_type = other DNA
aggtgctggagaggatgtgg

SEQ ID NO: 12925 - DNA, 20 bp, synthetic construct
  misc_feature 1..20: note = chemically synthesized
  source 1..20: mol_type = other DNA
ctggagaggatgtggaagaa

SEQ ID NO: 12926 - DNA, 20 bp, synthetic construct
  misc_feature 1..20: note = chemically synthesized
  source 1..20: mol_type = other DNA
tggagaggatgtggaagaat

SEQ ID NO: 12927 - DNA, 20 bp, synthetic construct
  misc_feature 1..20: note = chemically synthesized
  source 1..20: mol_type = other DNA
gaaaaattttacactgttga

SEQ ID NO: 12928 - DNA, 20 bp, synthetic construct
  misc_feature 1..20: note = chemically synthesized
  source 1..20: mol_type = other DNA
aaaaattttacactgttgat

SEQ ID NO: 12929 - DNA, 20 bp, synthetic construct
  misc_feature 1..20: note = chemically synthesized
  source 1..20: mol_type = other DNA
ctgttgatgggtgtgtaaat

SEQ ID NO: 12930 - DNA, 20 bp, synthetic construct
  misc_feature 1..20: note = chemically synthesized
  source 1..20: mol_type = other DNA
gtaaattagttcaaccattg

SEQ ID NO: 12931 - DNA, 20 bp, synthetic construct
  misc_feature 1..20: note = chemically synthesized
  source 1..20: mol_type = other DNA
aattagttcaaccattgtgg

SEQ ID NO: 12932 - DNA, 20 bp, synthetic construct
  misc_feature 1..20: note = chemically synthesized
  source 1..20: mol_type = other DNA
agttcaaccattgtggaaga

SEQ ID NO: 12933 - DNA, 20 bp, synthetic construct
  misc_feature 1..20: note = chemically synthesized
  source 1..20: mol_type = other DNA
aaccattgtggaagacagtg

SEQ ID NO: 12934 - DNA, 20 bp, synthetic construct
  misc_feature 1..20: note = chemically synthesized
  source 1..20: mol_type = other DNA
agacagtgtggcgattcctc

SEQ ID NO: 12935 - DNA, 20 bp, synthetic construct
  misc_feature 1..20: note = chemically synthesized
  source 1..20: mol_type = other DNA
gacagtgtggcgattcctca

SEQ ID NO: 12936 - DNA, 20 bp, synthetic construct
  misc_feature 1..20: note = chemically synthesized
  source 1..20: mol_type = other DNA
gtggcgattcctcaaggatc

SEQ ID NO: 12937 - DNA, 20 bp, synthetic construct
  misc_feature 1..20: note = chemically synthesized
  source 1..20: mol_type = other DNA
attcctcaaggatctagaac

SEQ ID NO: 12938 - DNA, 20 bp, synthetic construct
  misc_feature 1..20: note = chemically synthesized
  source 1..20: mol_type = other DNA
accagaaatactgtttgacc

SEQ ID NO: 12939 - DNA, 20 bp, synthetic construct
  misc_feature 1..20: note = chemically synthesized
  source 1..20: mol_type = other DNA
tgacccagcaatcccattac

SEQ ID NO: 12940 - DNA, 20 bp, synthetic construct
  misc_feature 1..20: note = chemically synthesized
  source 1..20: mol_type = other DNA
gacccagcaatcccattact

SEQ ID NO: 12941 - DNA, 20 bp, synthetic construct
  misc_feature 1..20: note = chemically synthesized
  source 1..20: mol_type = other DNA
cattactgggtatataccca

SEQ ID NO: 12942 - DNA, 20 bp, synthetic construct
  misc_feature 1..20: note = chemically synthesized
  source 1..20: mol_type = other DNA
tgggtatatacccaaagaat

SEQ ID NO: 12943 - DNA, 20 bp, synthetic construct
  misc_feature 1..20: note = chemically synthesized
  source 1..20: mol_type = other DNA
ttagaaatcattctactata

SEQ ID NO: 12944 - DNA, 20 bp, synthetic construct
  misc_feature 1..20: note = chemically synthesized
  source 1..20: mol_type = other DNA
gtgcacacgtatgtttattg

SEQ ID NO: 12945 - DNA, 20 bp, synthetic construct
  misc_feature 1..20: note = chemically synthesized
  source 1..20: mol_type = other DNA
tattgtggcactattcacaa

SEQ ID NO: 12946 - DNA, 20 bp, synthetic construct
  misc_feature 1..20: note = chemically synthesized
  source 1..20: mol_type = other DNA
tggcactattcacaatagca

SEQ ID NO: 12947 - DNA, 20 bp, synthetic construct
  misc_feature 1..20: note = chemically synthesized
  source 1..20: mol_type = other DNA
tattcacaatagcaaagact

SEQ ID NO: 12948 - DNA, 20 bp, synthetic construct
  misc_feature 1..20: note = chemically synthesized
  source 1..20: mol_type = other DNA
agacttggaaccaacccaaa

SEQ ID NO: 12949 - DNA, 20 bp, synthetic construct
  misc_feature 1..20: note = chemically synthesized
  source 1..20: mol_type = other DNA
gaaccaacccaaatggccat

SEQ ID NO: 12950 - DNA, 20 bp, synthetic construct
  misc_feature 1..20: note = chemically synthesized
  source 1..20: mol_type = other DNA
aatggccatcagcgatataa

SEQ ID NO: 12951 - DNA, 20 bp, synthetic construct
  misc_feature 1..20: note = chemically synthesized
  source 1..20: mol_type = other DNA
catcagcgatataatggata

SEQ ID NO: 12952 - DNA, 20 bp, synthetic construct
  misc_feature 1..20: note = chemically synthesized
  source 1..20: mol_type = other DNA
tataatggataaagaaaatg

SEQ ID NO: 12953 - DNA, 20 bp, synthetic construct
  misc_feature 1..20: note = chemically synthesized
  source 1..20: mol_type = other DNA
aatgtggcacatatacacca

SEQ ID NO: 12954 - DNA, 20 bp, synthetic construct
  misc_feature 1..20: note = chemically synthesized
  source 1..20: mol_type = other DNA
atacaccatggaatactatg

SEQ ID NO: 12955 - DNA, 20 bp, synthetic construct
  misc_feature 1..20: note = chemically synthesized
  source 1..20: mol_type = other DNA
tatgcagccataaaaatgat

SEQ ID NO: 12956 - DNA, 20 bp, synthetic construct
  misc_feature 1..20: note = chemically synthesized
  source 1..20: mol_type = other DNA
atgatgagttcatgtctttg

SEQ ID NO: 12957 - DNA, 20 bp, synthetic construct
  misc_feature 1..20: note = chemically synthesized
  source 1..20: mol_type = other DNA
tgatgagttcatgtctttgc

SEQ ID NO: 12958 - DNA, 20 bp, synthetic construct
  misc_feature 1..20: note = chemically synthesized
  source 1..20: mol_type = other DNA
gatgagttcatgtctttgca

SEQ ID NO: 12959 - DNA, 20 bp, synthetic construct
  misc_feature 1..20: note = chemically synthesized
  source 1..20: mol_type = other DNA
ttcatgtctttgcagggaca

SEQ ID NO: 12960 - DNA, 20 bp, synthetic construct
  misc_feature 1..20: note = chemically synthesized
  source 1..20: mol_type = other DNA
tctttgcagggacatggatg

SEQ ID NO: 12961 - DNA, 20 bp, synthetic construct
  misc_feature 1..20: note = chemically synthesized
  source 1..20: mol_type = other DNA
ctttgcagggacatggatga

SEQ ID NO: 12962 - DNA, 20 bp, synthetic construct
  misc_feature 1..20: note = chemically synthesized
  source 1..20: mol_type = other DNA
tgcagggacatggatgaagg

SEQ ID NO: 12963 - DNA, 20 bp, synthetic construct
  misc_feature 1..20: note = chemically synthesized
  source 1..20: mol_type = other DNA
aaggtggaaaccatcattct

SEQ ID NO: 12964 - DNA, 20 bp, synthetic construct
  misc_feature 1..20: note = chemically synthesized
  source 1..20: mol_type = other DNA
tcattctgagcaaactaaca

SEQ ID NO: 12965 - DNA, 20 bp, synthetic construct
  misc_feature 1..20: note = chemically synthesized
  source 1..20: mol_type = other DNA
cattctgagcaaactaacac

SEQ ID NO: 12966 - DNA, 20 bp, synthetic construct
  misc_feature 1..20: note = chemically synthesized
  source 1..20: mol_type = other DNA
tgagcaaactaacacaggaa

SEQ ID NO: 12967 - DNA, 20 bp, synthetic construct
  misc_feature 1..20: note = chemically synthesized
  source 1..20: mol_type = other DNA
agcaaactaacacaggaaca

SEQ ID NO: 12968 - DNA, 20 bp, synthetic construct
  misc_feature 1..20: note = chemically synthesized
  source 1..20: mol_type = other DNA
caccacacgttctcactcat

SEQ ID NO: 12969 - DNA, 20 bp, synthetic construct
  misc_feature 1..20: note = chemically synthesized
  source 1..20: mol_type = other DNA
cacacgttctcactcataag

SEQ ID NO: 12970 - DNA, 20 bp, synthetic construct
  misc_feature 1..20: note = chemically synthesized
  source 1..20: mol_type = other DNA
acacgttctcactcataagt

SEQ ID NO: 12971 - DNA, 20 bp, synthetic construct
  misc_feature 1..20: note = chemically synthesized
  source 1..20: mol_type = other DNA
acgttctcactcataagtgg

SEQ ID NO: 12972 - DNA, 20 bp, synthetic construct
  misc_feature 1..20: note = chemically synthesized
  source 1..20: mol_type = other DNA
ataagtgggagttgaacaat

SEQ ID NO: 12973 - DNA, 20 bp, synthetic construct
  misc_feature 1..20: note = chemically synthesized
  source 1..20: mol_type = other DNA
agttgaacaatgagaacaca

SEQ ID NO: 12974 - DNA, 20 bp, synthetic construct
  misc_feature 1..20: note = chemically synthesized
  source 1..20: mol_type = other DNA
acaatgagaacacatggaca

SEQ ID NO: 12975 - DNA, 20 bp, synthetic construct
  misc_feature 1..20: note = chemically synthesized
  source 1..20: mol_type = other DNA
caatgagaacacatggacac

SEQ ID NO: 12976 - DNA, 20 bp, synthetic construct
  misc_feature 1..20: note = chemically synthesized
  source 1..20: mol_type = other DNA
aatgagaacacatggacaca

SEQ ID NO: 12977 - DNA, 20 bp, synthetic construct
  misc_feature 1..20: note = chemically synthesized
  source 1..20: mol_type = other DNA
tgagaacacatggacacagg

SEQ ID NO: 12978 - DNA, 20 bp, synthetic construct
  misc_feature 1..20: note = chemically synthesized
  source 1..20: mol_type = other DNA
gagaacacatggacacaggg

SEQ ID NO: 12979 - DNA, 20 bp, synthetic construct
  misc_feature 1..20: note = chemically synthesized
  source 1..20: mol_type = other DNA
agaacacatggacacaggga

SEQ ID NO: 12980 - DNA, 20 bp, synthetic construct
  misc_feature 1..20: note = chemically synthesized
  source 1..20: mol_type = other DNA
gaacacatggacacagggag

SEQ ID NO: 12981 - DNA, 20 bp, synthetic construct
  misc_feature 1..20: note = chemically synthesized
  source 1..20: mol_type = other DNA
gggaggggaacatcacacac

SEQ ID NO: 12982 - DNA, 20 bp, synthetic construct
  misc_feature 1..20: note = chemically synthesized
  source 1..20: mol_type = other DNA
ggaggggaacatcacacacc

SEQ ID NO: 12983 - DNA, 20 bp, synthetic construct
  misc_feature 1..20: note = chemically synthesized
  source 1..20: mol_type = other DNA
gaggggaacatcacacacca

SEQ ID NO: 12984 - DNA, 20 bp, synthetic construct
  misc_feature 1..20: note = chemically synthesized
  source 1..20: mol_type = other DNA
catcacacaccagggcctgt

SEQ ID NO: 12985 - DNA, 20 bp, synthetic construct
  misc_feature 1..20: note = chemically synthesized
  source 1..20: mol_type = other DNA
atcacacaccagggcctgtc

SEQ ID NO: 12986 - DNA, 20 bp, synthetic construct
  misc_feature 1..20: note = chemically synthesized
  source 1..20: mol_type = other DNA
tcacacaccagggcctgtcg

SEQ ID NO: 12987 - DNA, 20 bp, synthetic construct
  misc_feature 1..20: note = chemically synthesized
  source 1..20: mol_type = other DNA
cacacaccagggcctgtcgg

SEQ ID NO: 12988 - DNA, 20 bp, synthetic construct
  misc_feature 1..20: note = chemically synthesized
  source 1..20: mol_type = other DNA
acacaccagggcctgtcggg

SEQ ID NO: 12989 - DNA, 20 bp, synthetic construct
  misc_feature 1..20: note = chemically synthesized
  source 1..20: mol_type = other DNA
accagggcctgtcggggggt

SEQ ID NO: 12990 - DNA, 20 bp, synthetic construct
  misc_feature 1..20: note = chemically synthesized
  source 1..20: mol_type = other DNA
ccagggcctgtcggggggtg

SEQ ID NO: 12991 - DNA, 20 bp, synthetic construct
  misc_feature 1..20: note = chemically synthesized
  source 1..20: mol_type = other DNA
cagggcctgtcggggggtga

SEQ ID NO: 12992 - DNA, 20 bp, synthetic construct
  misc_feature 1..20: note = chemically synthesized
  source 1..20: mol_type = other DNA
agggcctgtcggggggtgag

SEQ ID NO: 12993 - DNA, 20 bp, synthetic construct
  misc_feature 1..20: note = chemically synthesized
  source 1..20: mol_type = other DNA
gggcctgtcggggggtgagg

SEQ ID NO: 12994 - DNA, 20 bp, synthetic construct
  misc_feature 1..20: note = chemically synthesized
  source 1..20: mol_type = other DNA
ctgtcggggggtgagggggt

SEQ ID NO: 12995 - DNA, 20 bp, synthetic construct
  misc_feature 1..20: note = chemically synthesized
  source 1..20: mol_type = other DNA
tgtcggggggtgagggggtt

SEQ ID NO: 12996 - DNA, 20 bp, synthetic construct
  misc_feature 1..20: note = chemically synthesized
  source 1..20: mol_type = other DNA
tcggggggtgagggggttag

SEQ ID NO: 12997 - DNA, 20 bp, synthetic construct
  misc_feature 1..20: note = chemically synthesized
  source 1..20: mol_type = other DNA
ggggggtgagggggttagga

SEQ ID NO: 12998 - DNA, 20 bp, synthetic construct
  misc_feature 1..20: note = chemically synthesized
  source 1..20: mol_type = other DNA
gggggtgagggggttaggag

SEQ ID NO: 12999 - DNA, 20 bp, synthetic construct
  misc_feature 1..20: note = chemically synthesized
  source 1..20: mol_type = other DNA
ggggtgagggggttaggaga

SEQ ID NO: 13000 - DNA, 20 bp, synthetic construct
  misc_feature 1..20: note = chemically synthesized
  source 1..20: mol_type = other DNA
taggagagggataacattaa

SEQ ID NO: 13001 - DNA, 20 bp, synthetic construct
  misc_feature 1..20: note = chemically synthesized
  source 1..20: mol_type = other DNA
attaaaagaaatacctaatg

SEQ ID NO: 13002 - DNA, 20 bp, synthetic construct
  misc_feature 1..20: note = chemically synthesized
  source 1..20: mol_type = other DNA
gaaatacctaatgtagatga

SEQ ID NO: 13003 - DNA, 20 bp, synthetic construct
  misc_feature 1..20: note = chemically synthesized
  source 1..20: mol_type = other DNA
aaatacctaatgtagatgac

SEQ ID NO: 13004 - DNA, 20 bp, synthetic construct
  misc_feature 1..20: note = chemically synthesized
  source 1..20: mol_type = other DNA
taatgtagatgacaggttga

SEQ ID NO: 13005 - DNA, 20 bp, synthetic construct
  misc_feature 1..20: note = chemically synthesized
  source 1..20: mol_type = other DNA
aatgtagatgacaggttgat

SEQ ID NO: 13006 - DNA, 20 bp, synthetic construct
  misc_feature 1..20: note = chemically synthesized
  source 1..20: mol_type = other DNA
agatgacaggttgatgggtg

SEQ ID NO: 13007 - DNA, 20 bp, synthetic construct
  misc_feature 1..20: note = chemically synthesized
  source 1..20: mol_type = other DNA
atgggtgcagcaaaccacca

SEQ ID NO: 13008 - DNA, 20 bp, synthetic construct
  misc_feature 1..20: note = chemically synthesized
  source 1..20: mol_type = other DNA
cacattctgcacatgtatcc

SEQ ID NO: 13009 - DNA, 20 bp, synthetic construct
  misc_feature 1..20: note = chemically synthesized
  source 1..20: mol_type = other DNA
cacatgtatcccagaactta

SEQ ID NO: 13010 - DNA, 20 bp, synthetic construct
  misc_feature 1..20: note = chemically synthesized
  source 1..20: mol_type = other DNA
cccagaacttaaagtataat

SEQ ID NO: 13011 - DNA, 20 bp, synthetic construct
  misc_feature 1..20: note = chemically synthesized
  source 1..20: mol_type = other DNA
ttacttgaactgaccgacaa

SEQ ID NO: 13012 - DNA, 20 bp, synthetic construct
  misc_feature 1..20: note = chemically synthesized
  source 1..20: mol_type = other DNA
acacaacctatcaaaacctc

SEQ ID NO: 13013 - DNA, 20 bp, synthetic construct
  misc_feature 1..20: note = chemically synthesized
  source 1..20: mol_type = other DNA
cacaacctatcaaaacctct

SEQ ID NO: 13014 - DNA, 20 bp, synthetic construct
  misc_feature 1..20: note = chemically synthesized
  source 1..20: mol_type = other DNA
ctatcaaaacctctaggata

SEQ ID NO: 13015 - DNA, 20 bp, synthetic construct
  misc_feature 1..20: note = chemically synthesized
  source 1..20: mol_type = other DNA
aaaacctctaggatacagca

SEQ ID NO: 13016 - DNA, 20 bp, synthetic construct
  misc_feature 1..20: note = chemically synthesized
  source 1..20: mol_type = other DNA
cctctaggatacagcaaaga

SEQ ID NO: 13017 - DNA, 20 bp, synthetic construct
  misc_feature 1..20: note = chemically synthesized
  source 1..20: mol_type = other DNA
tacagcaaagatggtgctaa

SEQ ID NO: 13018 - DNA, 20 bp, synthetic construct
  misc_feature 1..20: note = chemically synthesized
  source 1..20: mol_type = other DNA
acagcaaagatggtgctaaa

SEQ ID NO: 13019 - DNA, 20 bp, synthetic construct
  misc_feature 1..20: note = chemically synthesized
  source 1..20: mol_type = other DNA
caaagatggtgctaaaagga

SEQ ID NO: 13020 - DNA, 20 bp, synthetic construct
  misc_feature 1..20: note = chemically synthesized
  source 1..20: mol_type = other DNA
ggtgctaaaaggaaagttca

SEQ ID NO: 13021 - DNA, 20 bp, synthetic construct
  misc_feature 1..20: note = chemically synthesized
  source 1..20: mol_type = other DNA
agccctaaatgtcgatgtca

SEQ ID NO: 13022 - DNA, 20 bp, synthetic construct
  misc_feature 1..20: note = chemically synthesized
  source 1..20: mol_type = other DNA
ccctaaatgtcgatgtcaaa

SEQ ID NO: 13023 - DNA, 20 bp, synthetic construct
  misc_feature 1..20: note = chemically synthesized
  source 1..20: mol_type = other DNA
gtcgatgtcaaagagtctga

SEQ ID NO: 13024 - DNA, 20 bp, synthetic construct
  misc_feature 1..20: note = chemically synthesized
  source 1..20: mol_type = other DNA
cgatgtcaaagagtctgaaa

SEQ ID NO: 13025 - DNA, 20 bp, synthetic construct
  misc_feature 1..20: note = chemically synthesized
  source 1..20: mol_type = other DNA
gatgtcaaagagtctgaaag

SEQ ID NO: 13026 - DNA, 20 bp, synthetic construct
  misc_feature 1..20: note = chemically synthesized
  source 1..20: mol_type = other DNA
tcaaagagtctgaaagagga

SEQ ID NO: 13027 - DNA, 20 bp, synthetic construct
  misc_feature 1..20: note = chemically synthesized
  source 1..20: mol_type = other DNA
agagtctgaaagaggacaga

SEQ ID NO: 13028 - DNA, 20 bp, synthetic construct
  misc_feature 1..20: note = chemically synthesized
  source 1..20: mol_type = other DNA
agaggacagacagacaatat

SEQ ID NO: 13029 - DNA, 20 bp, synthetic construct
  misc_feature 1..20: note = chemically synthesized
  source 1..20: mol_type = other DNA
gaggacagacagacaatata

SEQ ID NO: 13030 - DNA, 20 bp, synthetic construct
  misc_feature 1..20: note = chemically synthesized
  source 1..20: mol_type = other DNA
acaatataaggtcacaccac

SEQ ID NO: 13031 - DNA, 20 bp, synthetic construct
  misc_feature 1..20: note = chemically synthesized
  source 1..20: mol_type = other DNA
aaggtcacaccacaagaaac

SEQ ID NO: 13032 - DNA, 20 bp, synthetic construct
  misc_feature 1..20: note = chemically synthesized
  source 1..20: mol_type = other DNA
ggtcacaccacaagaaacta

SEQ ID NO: 13033 - DNA, 20 bp, synthetic construct
  misc_feature 1..20: note = chemically synthesized
  source 1..20: mol_type = other DNA
actagagaaacaaaaacaaa

SEQ ID NO: 13034 - DNA, 20 bp, synthetic construct
  misc_feature 1..20: note = chemically synthesized
  source 1..20: mol_type = other DNA
aaacaaacagaaccaaaacc

SEQ ID NO: 13035 - DNA, 20 bp, synthetic construct
  misc_feature 1..20: note = chemically synthesized
  source 1..20: mol_type = other DNA
acagaaccaaaacccagcaa

SEQ ID NO: 13036 - DNA, 20 bp, synthetic construct
  misc_feature 1..20: note = chemically synthesized
  source 1..20: mol_type = other DNA
aaccaaaacccagcaaaaga

SEQ ID NO: 13037 - DNA, 20 bp, synthetic construct
  misc_feature 1..20: note = chemically synthesized
  source 1..20: mol_type = other DNA
accaaaacccagcaaaagaa

SEQ ID NO: 13038 - DNA, 20 bp, synthetic construct
  misc_feature 1..20: note = chemically synthesized
  source 1..20: mol_type = other DNA
ccaaaacccagcaaaagaaa

SEQ ID NO: 13039 - DNA, 20 bp, synthetic construct
  misc_feature 1..20: note = chemically synthesized
  source 1..20: mol_type = other DNA
gcaaaagaaagggaataact

SEQ ID NO: 13040 - DNA, 20 bp, synthetic construct
  misc_feature 1..20: note = chemically synthesized
  source 1..20: mol_type = other DNA
agaaagggaataactaagat

SEQ ID NO: 13041 - DNA, 20 bp, synthetic construct
  misc_feature 1..20: note = chemically synthesized
  source 1..20: mol_type = other DNA
aaagggaataactaagataa

SEQ ID NO: 13042 - DNA, 20 bp, synthetic construct
  misc_feature 1..20: note = chemically synthesized
  source 1..20: mol_type = other DNA
aagggaataactaagataag

SEQ ID NO: 13043 - DNA, 20 bp, synthetic construct
  misc_feature 1..20: note = chemically synthesized
  source 1..20: mol_type = other DNA
gggaataactaagataagag

SEQ ID NO: 13044 - DNA, 20 bp, synthetic construct
  misc_feature 1..20: note = chemically synthesized
  source 1..20: mol_type = other DNA
acaactgcaaaaaaatacaa

SEQ ID NO: 13045 - DNA, 20 bp, synthetic construct
  misc_feature 1..20: note = chemically synthesized
  source 1..20: mol_type = other DNA
caaaagctaaatgaaataaa

SEQ ID NO: 13046 - DNA, 20 bp, synthetic construct
  misc_feature 1..20: note = chemically synthesized
  source 1..20: mol_type = other DNA
agctaaatgaaataaaaagc

SEQ ID NO: 13047 - DNA, 20 bp, synthetic construct
  misc_feature 1..20: note = chemically synthesized
  source 1..20: mol_type = other DNA
taaaaagctggttctttgaa

SEQ ID NO: 13048 - DNA, 20 bp, synthetic construct
  misc_feature 1..20: note = chemically synthesized
  source 1..20: mol_type = other DNA
gaaaagataaataaaactga

SEQ ID NO: 13049 - DNA, 20 bp, synthetic construct
  misc_feature 1..20: note = chemically synthesized
  source 1..20: mol_type = other DNA
aaataaaactgatagaccat

SEQ ID NO: 13050 - DNA, 20 bp, synthetic construct
  misc_feature 1..20: note = chemically synthesized
  source 1..20: mol_type = other DNA
aaaactgatagaccattagc

SEQ ID NO: 13051 - DNA, 20 bp, synthetic construct
  misc_feature 1..20: note = chemically synthesized
  source 1..20: mol_type = other DNA
gaccattagcaagattaacc

SEQ ID NO: 13052 - DNA, 20 bp, synthetic construct
  misc_feature 1..20: note = chemically synthesized
  source 1..20: mol_type = other DNA
ttagcaagattaaccaagaa

SEQ ID NO: 13053 - DNA, 20 bp, synthetic construct
  misc_feature 1..20: note = chemically synthesized
  source 1..20: mol_type = other DNA
agcaagattaaccaagaaaa

SEQ ID NO: 13054 - DNA, 20 bp, synthetic construct
  misc_feature 1..20: note = chemically synthesized
  source 1..20: mol_type = other DNA
gcaagattaaccaagaaaag

SEQ ID NO: 13055 - DNA, 20 bp, synthetic construct
  misc_feature 1..20: note = chemically synthesized
  source 1..20: mol_type = other DNA
aagattaaccaagaaaagag

SEQ ID NO: 13056 - DNA, 20 bp, synthetic construct
  misc_feature 1..20: note = chemically synthesized
  source 1..20: mol_type = other DNA
gattaaccaagaaaagagga

SEQ ID NO: 13057 - DNA, 20 bp, synthetic construct
  misc_feature 1..20: note = chemically synthesized
  source 1..20: mol_type = other DNA
taaccaagaaaagaggagag

SEQ ID NO: 13058 - DNA, 20 bp, synthetic construct
  misc_feature 1..20: note = chemically synthesized
  source 1..20: mol_type = other DNA
gaagtgcaaataaactcaat

SEQ ID NO: 13059 - DNA, 20 bp, synthetic construct
  misc_feature 1..20: note = chemically synthesized
  source 1..20: mol_type = other DNA
aaactcaattagaaacaaaa

SEQ ID NO: 13060 - DNA, 20 bp, synthetic construct
  misc_feature 1..20: note = chemically synthesized
  source 1..20: mol_type = other DNA
aactcaattagaaacaaaac

SEQ ID NO: 13061 - DNA, 20 bp, synthetic construct
  misc_feature 1..20: note = chemically synthesized
  source 1..20: mol_type = other DNA
ctcaattagaaacaaaacag

SEQ ID NO: 13062 - DNA, 20 bp, synthetic construct
  misc_feature 1..20: note = chemically synthesized
  source 1..20: mol_type = other DNA
agatactattactgatacca

SEQ ID NO: 13063 - DNA, 20 bp, synthetic construct
  misc_feature 1..20: note = chemically synthesized
  source 1..20: mol_type = other DNA
ctgataccacagaaatacaa

SEQ ID NO: 13064 - DNA, 20 bp, synthetic construct
  misc_feature 1..20: note = chemically synthesized
  source 1..20: mol_type = other DNA
agaaatacaaaagattattc

SEQ ID NO: 13065 - DNA, 20 bp, synthetic construct
  misc_feature 1..20: note = chemically synthesized
  source 1..20: mol_type = other DNA
gaaatacaaaagattattca

SEQ ID NO: 13066 - DNA, 20 bp, synthetic construct
  misc_feature 1..20: note = chemically synthesized
  source 1..20: mol_type = other DNA
acacctttacatgcataaac

SEQ ID NO: 13067 - DNA, 20 bp, synthetic construct
  misc_feature 1..20: note = chemically synthesized
  source 1..20: mol_type = other DNA
tgcataaactagaaaaccta

SEQ ID NO: 13068 - DNA, 20 bp, synthetic construct
  misc_feature 1..20: note = chemically synthesized
  source 1..20: mol_type = other DNA
gcataaactagaaaacctaa

SEQ ID NO: 13069 - DNA, 20 bp, synthetic construct
  misc_feature 1..20: note = chemically synthesized
  source 1..20: mol_type = other DNA
ataaactagaaaacctaaag

SEQ ID NO: 13070 - DNA, 20 bp, synthetic construct
  misc_feature 1..20: note = chemically synthesized
  source 1..20: mol_type = other DNA
aaaggagacgttcgaattcc

SEQ ID NO: 13071 - DNA, 20 bp, synthetic construct
  misc_feature 1..20: note = chemically synthesized
  source 1..20: mol_type = other DNA
gagacgttcgaattcctgga

SEQ ID NO: 13072 - DNA, 20 bp, synthetic construct
  misc_feature 1..20: note = chemically synthesized
  source 1..20: mol_type = other DNA
ttcgaattcctggaaagata

SEQ ID NO: 13073 - DNA, 20 bp, synthetic construct
  misc_feature 1..20: note = chemically synthesized
  source 1..20: mol_type = other DNA
tcgaattcctggaaagatac

SEQ ID NO: 13074 - DNA, 20 bp, synthetic construct
  misc_feature 1..20: note = chemically synthesized
  source 1..20: mol_type = other DNA
cgaattcctggaaagataca

SEQ ID NO: 13075 - DNA, 20 bp, synthetic construct
  misc_feature 1..20: note = chemically synthesized
  source 1..20: mol_type = other DNA
cctggaaagatacagggctc

SEQ ID NO: 13076 - DNA, 20 bp, synthetic construct
  misc_feature 1..20: note = chemically synthesized
  source 1..20: mol_type = other DNA
aagatacagggctctagctt

SEQ ID NO: 13077 - DNA, 20 bp, synthetic construct
  misc_feature 1..20: note = chemically synthesized
  source 1..20: mol_type = other DNA
tacagggctctagcttaagt

SEQ ID NO: 13078 - DNA, 20 bp, synthetic construct
  misc_feature 1..20: note = chemically synthesized
  source 1..20: mol_type = other DNA
acagggctctagcttaagtc

SEQ ID NO: 13079 - DNA, 20 bp, synthetic construct
  misc_feature 1..20: note = chemically synthesized
  source 1..20: mol_type = other DNA
gggctctagcttaagtcagg

SEQ ID NO: 13080 - DNA, 20 bp, synthetic construct
  misc_feature 1..20: note = chemically synthesized
  source 1..20: mol_type = other DNA
tagcttaagtcaggaagaat

SEQ ID NO: 13081 - DNA, 20 bp, synthetic construct
  misc_feature 1..20: note = chemically synthesized
  source 1..20: mol_type = other DNA
gaagaattagataccctgaa

SEQ ID NO: 13082 - DNA, 20 bp, synthetic construct
  misc_feature 1..20: note = chemically synthesized
  source 1..20: mol_type = other DNA
attagataccctgaacagac

SEQ ID NO: 13083 - DNA, 20 bp, synthetic construct
  misc_feature 1..20: note = chemically synthesized
  source 1..20: mol_type = other DNA
accctgaacagaccagtaat

SEQ ID NO: 13084 - DNA, 20 bp, synthetic construct
  misc_feature 1..20: note = chemically synthesized
  source 1..20: mol_type = other DNA
ctgaacagaccagtaataag

SEQ ID NO: 13085 - DNA, 20 bp, synthetic construct
  misc_feature 1..20: note = chemically synthesized
  source 1..20: mol_type = other DNA
acagaccagtaataagcagc

SEQ ID NO: 13086 - DNA, 20 bp, synthetic construct
  misc_feature 1..20: note = chemically synthesized
  source 1..20: mol_type = other DNA
aaaatttaccaacaacaaaa

SEQ ID NO: 13087 - DNA, 20 bp, synthetic construct
  misc_feature 1..20: note = chemically synthesized
  source 1..20: mol_type = other DNA
ttaccaacaacaaaaaagtc

SEQ ID NO: 13088 - DNA, 20 bp, synthetic construct
  misc_feature 1..20: note = chemically synthesized
  source 1..20: mol_type = other DNA
taccaacaacaaaaaagtcc

SEQ ID NO: 13089 - DNA, 20 bp, synthetic construct
  misc_feature 1..20: note = chemically synthesized
  source 1..20: mol_type = other DNA
acaacaaaaaagtccaggac

SEQ ID NO: 13090 - DNA, 20 bp, synthetic construct
  misc_feature 1..20: note = chemically synthesized
  source 1..20: mol_type = other DNA
caaaaaagtccaggaccaga

SEQ ID NO: 13091 - DNA, 20 bp, synthetic construct
  misc_feature 1..20: note = chemically synthesized
  source 1..20: mol_type = other DNA
tccaggaccagatagattca

SEQ ID NO: 13092 - DNA, 20 bp, synthetic construct
  misc_feature 1..20: note = chemically synthesized
  source 1..20: mol_type = other DNA
gattcacagctgaattctac

SEQ ID NO: 13093 - DNA, 20 bp, synthetic construct
  misc_feature 1..20: note = chemically synthesized
  source 1..20: mol_type = other DNA
tgaattctaccagacattca

SEQ ID NO: 13094 - DNA, 20 bp, synthetic construct
  misc_feature 1..20: note = chemically synthesized
  source 1..20: mol_type = other DNA
attctaccagacattcaaag

SEQ ID NO: 13095 - DNA, 20 bp, synthetic construct
  misc_feature 1..20: note = chemically synthesized
  source 1..20: mol_type = other DNA
attgataccaatcctattga

SEQ ID NO: 13096 - DNA, 20 bp, synthetic construct
  misc_feature 1..20: note = chemically synthesized
  source 1..20: mol_type = other DNA
tcctattgacagtattctac

SEQ ID NO: 13097 - DNA, 20 bp, synthetic construct
  misc_feature 1..20: note = chemically synthesized
  source 1..20: mol_type = other DNA
attgacagtattctacaaga

SEQ ID NO: 13098 - DNA, 20 bp, synthetic construct
  misc_feature 1..20: note = chemically synthesized
  source 1..20: mol_type = other DNA
tgacagtattctacaagata

SEQ ID NO: 13099 - DNA, 20 bp, synthetic construct
  misc_feature 1..20: note = chemically synthesized
  source 1..20: mol_type = other DNA
agtattctacaagatagaga

SEQ ID NO: 13100 - DNA, 20 bp, synthetic construct
  misc_feature 1..20: note = chemically synthesized
  source 1..20: mol_type = other DNA
tattctacaagatagagaaa

SEQ ID NO: 13101 - DNA, 20 bp, synthetic construct
  misc_feature 1..20: note = chemically synthesized
  source 1..20: mol_type = other DNA
ttctacaagatagagaaaga

SEQ ID NO: 13102 - DNA, 20 bp, synthetic construct
  misc_feature 1..20: note = chemically synthesized
  source 1..20: mol_type = other DNA
cctccctaaatcattctatg

SEQ ID NO: 13103 - DNA, 20 bp, synthetic construct
  misc_feature 1..20: note = chemically synthesized
  source 1..20: mol_type = other DNA
cctaaatcattctatgaagc

SEQ ID NO: 13104 - DNA, 20 bp, synthetic construct
  misc_feature 1..20: note = chemically synthesized
  source 1..20: mol_type = other DNA
tatcaccttaataccaaaac

SEQ ID NO: 13105 - DNA, 20 bp, synthetic construct
  misc_feature 1..20: note = chemically synthesized
  source 1..20: mol_type = other DNA
atcaccttaataccaaaact

SEQ ID NO: 13106 - DNA, 20 bp, synthetic construct
  misc_feature 1..20: note = chemically synthesized
  source 1..20: mol_type = other DNA
ccttaataccaaaactggga

SEQ ID NO: 13107 - DNA, 20 bp, synthetic construct
  misc_feature 1..20: note = chemically synthesized
  source 1..20: mol_type = other DNA
accaaaaaaaaaaaacacta

SEQ ID NO: 13108 - DNA, 20 bp, synthetic construct
  misc_feature 1..20: note = chemically synthesized
  source 1..20: mol_type = other DNA
atcaatatccctgatgaaca

SEQ ID NO: 13109 - DNA, 20 bp, synthetic construct
  misc_feature 1..20: note = chemically synthesized
  source 1..20: mol_type = other DNA
caacatccttgacaaaatac

SEQ ID NO: 13110 - DNA, 20 bp, synthetic construct
  misc_feature 1..20: note = chemically synthesized
  source 1..20: mol_type = other DNA
cttgacaaaatactagctaa

SEQ ID NO: 13111 - DNA, 20 bp, synthetic construct
  misc_feature 1..20: note = chemically synthesized
  source 1..20: mol_type = other DNA
tactagctaatagcatccga

SEQ ID NO: 13112 - DNA, 20 bp, synthetic construct
  misc_feature 1..20: note = chemically synthesized
  source 1..20: mol_type = other DNA
gcatatcaaaacccatgatc

SEQ ID NO: 13113 - DNA, 20 bp, synthetic construct
  misc_feature 1..20: note = chemically synthesized
  source 1..20: mol_type = other DNA
tatcaaaacccatgatcaag

SEQ ID NO: 13114 - DNA, 20 bp, synthetic construct
  misc_feature 1..20: note = chemically synthesized
  source 1..20: mol_type = other DNA
atcaaaacccatgatcaagt

SEQ ID NO: 13115 - DNA, 20 bp, synthetic construct
  misc_feature 1..20: note = chemically synthesized
  source 1..20: mol_type = other DNA
tgatcaagtgggtttcatgc

SEQ ID NO: 13116 - DNA, 20 bp, synthetic construct
  misc_feature 1..20: note = chemically synthesized
  source 1..20: mol_type = other DNA
gatcaagtgggtttcatgcg

SEQ ID NO: 13117 - DNA, 20 bp, synthetic construct
  misc_feature 1..20: note = chemically synthesized
  source 1..20: mol_type = other DNA
atcaagtgggtttcatgcga

SEQ ID NO: 13118 - DNA, 20 bp, synthetic construct
  misc_feature 1..20: note = chemically synthesized
  source 1..20: mol_type = other DNA
ggtttcatgcgagggatgca

SEQ ID NO: 13119 - DNA, 20 bp, synthetic construct
  misc_feature 1..20: note = chemically synthesized
  source 1..20: mol_type = other DNA
tcatgcgagggatgcacgga

SEQ ID NO: 13120 - DNA, 20 bp, synthetic construct
  misc_feature 1..20: note = chemically synthesized
  source 1..20: mol_type = other DNA
acggatggtttaacatacgc

SEQ ID NO: 13121 - DNA, 20 bp, synthetic construct
  misc_feature 1..20: note = chemically synthesized
  source 1..20: mol_type = other DNA
tttaacatacgcaagtcaat

SEQ ID NO: 13122 - DNA, 20 bp, synthetic construct
  misc_feature 1..20: note = chemically synthesized
  source 1..20: mol_type = other DNA
taagtgtgatacacaacata

SEQ ID NO: 13123 - DNA, 20 bp, synthetic construct
  misc_feature 1..20: note = chemically synthesized
  source 1..20: mol_type = other DNA
agtgtgatacacaacataaa

SEQ ID NO: 13124 - DNA, 20 bp, synthetic construct
  misc_feature 1..20: note = chemically synthesized
  source 1..20: mol_type = other DNA
atacacaacataaagagaat

SEQ ID NO: 13125 - DNA, 20 bp, synthetic construct
  misc_feature 1..20: note = chemically synthesized
  source 1..20: mol_type = other DNA
aaatcatgtgattatctcaa

SEQ ID NO: 13126 - DNA, 20 bp, synthetic construct
  misc_feature 1..20: note = chemically synthesized
  source 1..20: mol_type = other DNA
tgtgattatctcaatagcca

SEQ ID NO: 13127 - DNA, 20 bp, synthetic construct
  misc_feature 1..20: note = chemically synthesized
  source 1..20: mol_type = other DNA
atcactttatgactaaaact

SEQ ID NO: 13128 - DNA, 20 bp, synthetic construct
  misc_feature 1..20: note = chemically synthesized
  source 1..20: mol_type = other DNA
tgactaaaactcagcaaaat

SEQ ID NO: 13129 - DNA, 20 bp, synthetic construct
  misc_feature 1..20: note = chemically synthesized
  source 1..20: mol_type = other DNA
ctcagcaaaatcggtttaca

SEQ ID NO: 13130 - DNA, 20 bp, synthetic construct
  misc_feature 1..20: note = chemically synthesized
  source 1..20: mol_type = other DNA
tcagcaaaatcggtttacaa

SEQ ID NO: 13131 - DNA, 20 bp, synthetic construct
  misc_feature 1..20: note = chemically synthesized
  source 1..20: mol_type = other DNA
gacatacctcaatgtaataa

SEQ ID NO: 13132 - DNA, 20 bp, synthetic construct
  misc_feature 1..20: note = chemically synthesized
  source 1..20: mol_type = other DNA
tacctcaatgtaataaaagc

SEQ ID NO: 13133 - DNA, 20 bp, synthetic construct
  misc_feature 1..20: note = chemically synthesized
  source 1..20: mol_type = other DNA
aatgtaataaaagccagcta

SEQ ID NO: 13134 - DNA, 20 bp, synthetic construct
  misc_feature 1..20: note = chemically synthesized
  source 1..20: mol_type = other DNA
agccagctatggtaaacaca

SEQ ID NO: 13135 - DNA, 20 bp, synthetic construct
  misc_feature 1..20: note = chemically synthesized
  source 1..20: mol_type = other DNA
acagccaacattatattgaa

SEQ ID NO: 13136 - DNA, 20 bp, synthetic construct
  misc_feature 1..20: note = chemically synthesized
  source 1..20: mol_type = other DNA
cagccaacattatattgaat

SEQ ID NO: 13137 - DNA, 20 bp, synthetic construct
  misc_feature 1..20: note = chemically synthesized
  source 1..20: mol_type = other DNA
acattatattgaatgggaaa

SEQ ID NO: 13138 - DNA, 20 bp, synthetic construct
  misc_feature 1..20: note = chemically synthesized
  source 1..20: mol_type = other DNA
attgaatgggaaaaagttaa

SEQ ID NO: 13139 - DNA, 20 bp, synthetic construct
  misc_feature 1..20: note = chemically synthesized
  source 1..20: mol_type = other DNA
aaagcattctgtctgaaaac

SEQ ID NO: 13140 - DNA, 20 bp, synthetic construct
  misc_feature 1..20: note = chemically synthesized
  source 1..20: mol_type = other DNA
ttctgtctgaaaactggaat

SEQ ID NO: 13141 - DNA, 20 bp, synthetic construct
  misc_feature 1..20: note = chemically synthesized
  source 1..20: mol_type = other DNA
tctgaaaactggaatgagac

SEQ ID NO: 13142 - DNA, 20 bp, synthetic construct
  misc_feature 1..20: note = chemically synthesized
  source 1..20: mol_type = other DNA
ctgaaaactggaatgagaca

SEQ ID NO: 13143 - DNA, 20 bp, synthetic construct
  misc_feature 1..20: note = chemically synthesized
  source 1..20: mol_type = other DNA
acttctctttaacatattac

SEQ ID NO: 13144 - DNA, 20 bp, synthetic construct
  misc_feature 1..20: note = chemically synthesized
  source 1..20: mol_type = other DNA
tctctttaacatattactgg

SEQ ID NO: 13145 - DNA, 20 bp, synthetic construct
  misc_feature 1..20: note = chemically synthesized
  source 1..20: mol_type = other DNA
taacatattactggaagtcc

SEQ ID NO: 13146 - DNA, 20 bp, synthetic construct
  misc_feature 1..20: note = chemically synthesized
  source 1..20: mol_type = other DNA
atattactggaagtcctagc

SEQ ID NO: 13147 - DNA, 20 bp, synthetic construct
  misc_feature 1..20: note = chemically synthesized
  source 1..20: mol_type = other DNA
attactggaagtcctagcaa

SEQ ID NO: 13148 - DNA, 20 bp, synthetic construct
  misc_feature 1..20: note = chemically synthesized
  source 1..20: mol_type = other DNA
gaagtcctagcaagagcaat

SEQ ID NO: 13149 - DNA, 20 bp, synthetic construct
  misc_feature 1..20: note = chemically synthesized
  source 1..20: mol_type = other DNA
cctagcaagagcaatcagac

SEQ ID NO: 13150 - DNA, 20 bp, synthetic construct
  misc_feature 1..20: note = chemically synthesized
  source 1..20: mol_type = other DNA
tagcaagagcaatcagacaa

SEQ ID NO: 13151 - DNA, 20 bp, synthetic construct
  misc_feature 1..20: note = chemically synthesized
  source 1..20: mol_type = other DNA
agcaatcagacaagagaaac

SEQ ID NO: 13152 - DNA, 20 bp, synthetic construct
  misc_feature 1..20: note = chemically synthesized
  source 1..20: mol_type = other DNA
tcagacaagagaaacaagta

SEQ ID NO: 13153 - DNA, 20 bp, synthetic construct
  misc_feature 1..20: note = chemically synthesized
  source 1..20: mol_type = other DNA
aaagcacatccaaattgtta

SEQ ID NO: 13154 - DNA, 20 bp, synthetic construct
  misc_feature 1..20: note = chemically synthesized
  source 1..20: mol_type = other DNA
agcacatccaaattgttaaa

SEQ ID NO: 13155 - DNA, 20 bp, synthetic construct
  misc_feature 1..20: note = chemically synthesized
  source 1..20: mol_type = other DNA
catccaaattgttaaagaga

SEQ ID NO: 13156 - DNA, 20 bp, synthetic construct
  misc_feature 1..20: note = chemically synthesized
  source 1..20: mol_type = other DNA
tgatgatatgattgtgtatg

SEQ ID NO: 13157 - DNA, 20 bp, synthetic construct
  misc_feature 1..20: note = chemically synthesized
  source 1..20: mol_type = other DNA
tgtgtatgtagaaaactcta

SEQ ID NO: 13158 - DNA, 20 bp, synthetic construct
  misc_feature 1..20: note = chemically synthesized
  source 1..20: mol_type = other DNA
aagactcctccaaaaccccc

SEQ ID NO: 13159 - DNA, 20 bp, synthetic construct
  misc_feature 1..20: note = chemically synthesized
  source 1..20: mol_type = other DNA
ctagaactgataaaataatt

SEQ ID NO: 13160 - DNA, 20 bp, synthetic construct
  misc_feature 1..20: note = chemically synthesized
  source 1..20: mol_type = other DNA
actgataaaataattcagca

SEQ ID NO: 13161 - DNA, 20 bp, synthetic construct
  misc_feature 1..20: note = chemically synthesized
  source 1..20: mol_type = other DNA
aaataattcagcaaagtttc

SEQ ID NO: 13162 - DNA, 20 bp, synthetic construct
  misc_feature 1..20: note = chemically synthesized
  source 1..20: mol_type = other DNA
caaaattaacgtacaccaat

SEQ ID NO: 13163 - DNA, 20 bp, synthetic construct
  misc_feature 1..20: note = chemically synthesized
  source 1..20: mol_type = other DNA
tgagttgctttcttacatac

SEQ ID NO: 13164 - DNA, 20 bp, synthetic construct
  misc_feature 1..20: note = chemically synthesized
  source 1..20: mol_type = other DNA
cttacataccagcaatgacc

SEQ ID NO: 13165 - DNA, 20 bp, synthetic construct
  misc_feature 1..20: note = chemically synthesized
  source 1..20: mol_type = other DNA
ataccagcaatgaccaagct

SEQ ID NO: 13166 - DNA, 20 bp, synthetic construct
  misc_feature 1..20: note = chemically synthesized
  source 1..20: mol_type = other DNA
accaagctgagaataaaatc

SEQ ID NO: 13167 - DNA, 20 bp, synthetic construct
  misc_feature 1..20: note = chemically synthesized
  source 1..20: mol_type = other DNA
gaactcaaccccttttacaa

SEQ ID NO: 13168 - DNA, 20 bp, synthetic construct
  misc_feature 1..20: note = chemically synthesized
  source 1..20: mol_type = other DNA
aacaaaacaaaacaaaaact

SEQ ID NO: 13169 - DNA, 20 bp, synthetic construct
  misc_feature 1..20: note = chemically synthesized
  source 1..20: mol_type = other DNA
acaaaacaaaacaaaaactt

SEQ ID NO: 13170 - DNA, 20 bp, synthetic construct
  misc_feature 1..20: note = chemically synthesized
  source 1..20: mol_type = other DNA
ttaggaatatatacctaacc

SEQ ID NO: 13171 - DNA, 20 bp, synthetic construct
  misc_feature 1..20: note = chemically synthesized
  source 1..20: mol_type = other DNA
taggaatatatacctaacca

SEQ ID NO: 13172 - DNA, 20 bp, synthetic construct
  misc_feature 1..20: note = chemically synthesized
  source 1..20: mol_type = other DNA
ggaatatatacctaaccaag

SEQ ID NO: 13173 - DNA, 20 bp, synthetic construct
  misc_feature 1..20: note = chemically synthesized
  source 1..20: mol_type = other DNA
gaatatatacctaaccaagg

SEQ ID NO: 13174 - DNA, 20 bp, synthetic construct
  misc_feature 1..20: note = chemically synthesized
  source 1..20: mol_type = other DNA
atacctaaccaaggaggtga

SEQ ID NO: 13175 - DNA, 20 bp, synthetic construct
  misc_feature 1..20: note = chemically synthesized
  source 1..20: mol_type = other DNA
aggaggtgaaagacatctac

SEQ ID NO: 13176 - DNA, 20 bp, synthetic construct
  misc_feature 1..20: note = chemically synthesized
  source 1..20: mol_type = other DNA
ggaggtgaaagacatctaca

SEQ ID NO: 13177 - DNA, 20 bp, synthetic construct
  misc_feature 1..20: note = chemically synthesized
  source 1..20: mol_type = other DNA
acaaggaaaactacaaaaca

SEQ ID NO: 13178 - DNA, 20 bp, synthetic construct
  misc_feature 1..20: note = chemically synthesized
  source 1..20: mol_type = other DNA
aaactacaaaacacggctga

SEQ ID NO: 13179 - DNA, 20 bp, synthetic construct
  misc_feature 1..20: note = chemically synthesized
  source 1..20: mol_type = other DNA
acggctgaaagtaatcatat

SEQ ID NO: 13180 - DNA, 20 bp, synthetic construct
  misc_feature 1..20: note = chemically synthesized
  source 1..20: mol_type = other DNA
tcatataagacacaaacaaa

SEQ ID NO: 13181 - DNA, 20 bp, synthetic construct
  misc_feature 1..20: note = chemically synthesized
  source 1..20: mol_type = other DNA
ggaaacacatgccattctca

SEQ ID NO: 13182 - DNA, 20 bp, synthetic construct
  misc_feature 1..20: note = chemically synthesized
  source 1..20: mol_type = other DNA
acacatgccattctcataga

SEQ ID NO: 13183 - DNA, 20 bp, synthetic construct
  misc_feature 1..20: note = chemically synthesized
  source 1..20: mol_type = other DNA
cacatgccattctcatagat

SEQ ID NO: 13184 - DNA, 20 bp, synthetic construct
  misc_feature 1..20: note = chemically synthesized
  source 1..20: mol_type = other DNA
atgccattctcatagatggg

SEQ ID NO: 13185 - DNA, 20 bp, synthetic construct
  misc_feature 1..20: note = chemically synthesized
  source 1..20: mol_type = other DNA
tagaatcaatattgtgaaaa

SEQ ID NO: 13186 - DNA, 20 bp, synthetic construct
  misc_feature 1..20: note = chemically synthesized
  source 1..20: mol_type = other DNA
tgtgaaaatggccataatgc

SEQ ID NO: 13187 - DNA, 20 bp, synthetic construct
  misc_feature 1..20: note = chemically synthesized
  source 1..20: mol_type = other DNA
gaaaatggccataatgccag

SEQ ID NO: 13188 - DNA, 20 bp, synthetic construct
  misc_feature 1..20: note = chemically synthesized
  source 1..20: mol_type = other DNA
tcccatcaaaataccaccat

SEQ ID NO: 13189 - DNA, 20 bp, synthetic construct
  misc_feature 1..20: note = chemically synthesized
  source 1..20: mol_type = other DNA
aataccaccattagtcttca

SEQ ID NO: 13190 - DNA, 20 bp, synthetic construct
  misc_feature 1..20: note = chemically synthesized
  source 1..20: mol_type = other DNA
accattagtcttcacagaac

SEQ ID NO: 13191 - DNA, 20 bp, synthetic construct
  misc_feature 1..20: note = chemically synthesized
  source 1..20: mol_type = other DNA
aaacaatcctaaaattctta

SEQ ID NO: 13192 - DNA, 20 bp, synthetic construct
  misc_feature 1..20: note = chemically synthesized
  source 1..20: mol_type = other DNA
aaattcttatggaaccaaaa

SEQ ID NO: 13193 - DNA, 20 bp, synthetic construct
  misc_feature 1..20: note = chemically synthesized
  source 1..20: mol_type = other DNA
attcttatggaaccaaaaaa

SEQ ID NO: 13194 - DNA, 20 bp, synthetic construct
  misc_feature 1..20: note = chemically synthesized
  source 1..20: mol_type = other DNA
caaaaaagagcccaataaac

SEQ ID NO: 13195 - DNA, 20 bp, synthetic construct
  misc_feature 1..20: note = chemically synthesized
  source 1..20: mol_type = other DNA
aaagagcccaataaacaagc

SEQ ID NO: 13196 - DNA, 20 bp, synthetic construct
  misc_feature 1..20: note = chemically synthesized
  source 1..20: mol_type = other DNA
aaacaagcaagtctaaaaaa

SEQ ID NO: 13197 - DNA, 20 bp, synthetic construct
  misc_feature 1..20: note = chemically synthesized
  source 1..20: mol_type = other DNA
taaaaaaaagaacaaatctg

SEQ ID NO: 13198 - DNA, 20 bp, synthetic construct
  misc_feature 1..20: note = chemically synthesized
  source 1..20: mol_type = other DNA
aaaaaaaagaacaaatctga

SEQ ID NO: 13199 - DNA, 20 bp, synthetic construct
  misc_feature 1..20: note = chemically synthesized
  source 1..20: mol_type = other DNA
ctcatttcaaactatacaat

SEQ ID NO: 13200 - DNA, 20 bp, synthetic construct
  misc_feature 1..20: note = chemically synthesized
  source 1..20: mol_type = other DNA
tcatttcaaactatacaata

SEQ ID NO: 13201 - DNA, 20 bp, synthetic construct
  misc_feature 1..20: note = chemically synthesized
  source 1..20: mol_type = other DNA
caaactatacaataaggcca

SEQ ID NO: 13202 - DNA, 20 bp, synthetic construct
  misc_feature 1..20: note = chemically synthesized
  source 1..20: mol_type = other DNA
taaggccatagtcaccaaaa

SEQ ID NO: 13203 - DNA, 20 bp, synthetic construct
  misc_feature 1..20: note = chemically synthesized
  source 1..20: mol_type = other DNA
tcaccaaaacagcatgatgc

SEQ ID NO: 13204 - DNA, 20 bp, synthetic construct
  misc_feature 1..20: note = chemically synthesized
  source 1..20: mol_type = other DNA
gcatgatgctggtgtacaaa

SEQ ID NO: 13205 - DNA, 20 bp, synthetic construct
  misc_feature 1..20: note = chemically synthesized
  source 1..20: mol_type = other DNA
catgatgctggtgtacaaat

SEQ ID NO: 13206 - DNA, 20 bp, synthetic construct
  misc_feature 1..20: note = chemically synthesized
  source 1..20: mol_type = other DNA
caaataggcacatcgaccaa

SEQ ID NO: 13207 - DNA, 20 bp, synthetic construct
  misc_feature 1..20: note = chemically synthesized
  source 1..20: mol_type = other DNA
aggcacatcgaccaatggaa

SEQ ID NO: 13208 - DNA, 20 bp, synthetic construct
  misc_feature 1..20: note = chemically synthesized
  source 1..20: mol_type = other DNA
catcgaccaatggaacagaa

SEQ ID NO: 13209 - DNA, 20 bp, synthetic construct
  misc_feature 1..20: note = chemically synthesized
  source 1..20: mol_type = other DNA
tcgaccaatggaacagaata

SEQ ID NO: 13210 - DNA, 20 bp, synthetic construct
  misc_feature 1..20: note = chemically synthesized
  source 1..20: mol_type = other DNA
atggaacagaatagagaacc

SEQ ID NO: 13211 - DNA, 20 bp, synthetic construct
  misc_feature 1..20: note = chemically synthesized
  source 1..20: mol_type = other DNA
catccaactgatctttgaca

SEQ ID NO: 13212 - DNA, 20 bp, synthetic construct
  misc_feature 1..20: note = chemically synthesized
  source 1..20: mol_type = other DNA
acaaagcaaacaaaaacata

SEQ ID NO: 13213 - DNA, 20 bp, synthetic construct
  misc_feature 1..20: note = chemically synthesized
  source 1..20: mol_type = other DNA
aagcaaacaaaaacataaag

SEQ ID NO: 13214 - DNA, 20 bp, synthetic construct
  misc_feature 1..20: note = chemically synthesized
  source 1..20: mol_type = other DNA
agcaaacaaaaacataaagt

SEQ ID NO: 13215 - DNA, 20 bp, synthetic construct
  misc_feature 1..20: note = chemically synthesized
  source 1..20: mol_type = other DNA
gcaaacaaaaacataaagtg

SEQ ID NO: 13216 - DNA, 20 bp, synthetic construct
  misc_feature 1..20: note = chemically synthesized
  source 1..20: mol_type = other DNA
acaaaaacataaagtgggga

SEQ ID NO: 13217 - DNA, 20 bp, synthetic construct
  misc_feature 1..20: note = chemically synthesized
  source 1..20: mol_type = other DNA
caaaaacataaagtggggaa

SEQ ID NO: 13218 - DNA, 20 bp, synthetic construct
  misc_feature 1..20: note = chemically synthesized
  source 1..20: mol_type = other DNA
aaaaacataaagtggggaaa

SEQ ID NO: 13219 - DNA, 20 bp, synthetic construct
  misc_feature 1..20: note = chemically synthesized
  source 1..20: mol_type = other DNA
agggcaccctattcaacaaa

SEQ ID NO: 13220 - DNA, 20 bp, synthetic construct
  misc_feature 1..20: note = chemically synthesized
  source 1..20: mol_type = other DNA
accctattcaacaaatggtg

SEQ ID NO: 13221 - DNA, 20 bp, synthetic construct
  misc_feature 1..20: note = chemically synthesized
  source 1..20: mol_type = other DNA
ccctattcaacaaatggtgc

SEQ ID NO: 13222 - DNA, 20 bp, synthetic construct
  misc_feature 1..20: note = chemically synthesized
  source 1..20: mol_type = other DNA
cctattcaacaaatggtgcg

SEQ ID NO: 13223 - DNA, 20 bp, synthetic construct
  misc_feature 1..20: note = chemically synthesized
  source 1..20: mol_type = other DNA
ttcaacaaatggtgcgggga

SEQ ID NO: 13224 - DNA, 20 bp, synthetic construct
  misc_feature 1..20: note = chemically synthesized
  source 1..20: mol_type = other DNA
acaaatggtgcggggatagc

SEQ ID NO: 13225 - DNA, 20 bp, synthetic construct
  misc_feature 1..20: note = chemically synthesized
  source 1..20: mol_type = other DNA
atggtgcggggatagctggc

SEQ ID NO: 13226 - DNA, 20 bp, synthetic construct
  misc_feature 1..20: note = chemically synthesized
  source 1..20: mol_type = other DNA
gatagctggcaagctacatg

SEQ ID NO: 13227 - DNA, 20 bp, synthetic construct
  misc_feature 1..20: note = chemically synthesized
  source 1..20: mol_type = other DNA
atagctggcaagctacatgt

SEQ ID NO: 13228 - DNA, 20 bp, synthetic construct
  misc_feature 1..20: note = chemically synthesized
  source 1..20: mol_type = other DNA
agctggcaagctacatgtag

SEQ ID NO: 13229 - DNA, 20 bp, synthetic construct
  misc_feature 1..20: note = chemically synthesized
  source 1..20: mol_type = other DNA
tacatgtaggagaatgaaac

SEQ ID NO: 13230 - DNA, 20 bp, synthetic construct
  misc_feature 1..20: note = chemically synthesized
  source 1..20: mol_type = other DNA
ccttatacaaaaatcaactc

SEQ ID NO: 13231 - DNA, 20 bp, synthetic construct
  misc_feature 1..20: note = chemically synthesized
  source 1..20: mol_type = other DNA
atacaaaaatcaactcaaga

SEQ ID NO: 13232 - DNA, 20 bp, synthetic construct
  misc_feature 1..20: note = chemically synthesized
  source 1..20: mol_type = other DNA
aaatcaactcaagatggatc

SEQ ID NO: 13233 - DNA, 20 bp, synthetic construct
  misc_feature 1..20: note = chemically synthesized
  source 1..20: mol_type = other DNA
aatcaactcaagatggatca

SEQ ID NO: 13234 - DNA, 20 bp, synthetic construct
  misc_feature 1..20: note = chemically synthesized
  source 1..20: mol_type = other DNA
tggatcaaggacttaaatct

SEQ ID NO: 13235 - DNA, 20 bp, synthetic construct
  misc_feature 1..20: note = chemically synthesized
  source 1..20: mol_type = other DNA
ccctgaaactgtaacaattc

SEQ ID NO: 13236 - DNA, 20 bp, synthetic construct
  misc_feature 1..20: note = chemically synthesized
  source 1..20: mol_type = other DNA
acaattctagaaaataacat

SEQ ID NO: 13237 - DNA, 20 bp, synthetic construct
  misc_feature 1..20: note = chemically synthesized
  source 1..20: mol_type = other DNA
ggaaaaacccttctacacat

SEQ ID NO: 13238 - DNA, 20 bp, synthetic construct
  misc_feature 1..20: note = chemically synthesized
  source 1..20: mol_type = other DNA
aacccttctacacattggct

SEQ ID NO: 13239 - DNA, 20 bp, synthetic construct
  misc_feature 1..20: note = chemically synthesized
  source 1..20: mol_type = other DNA
acccttctacacattggctt

SEQ ID NO: 13240 - DNA, 20 bp, synthetic construct
  misc_feature 1..20: note = chemically synthesized
  source 1..20: mol_type = other DNA
ttctacacattggcttagga

SEQ ID NO: 13241 - DNA, 20 bp, synthetic construct
  misc_feature 1..20: note = chemically synthesized
  source 1..20: mol_type = other DNA
tctacacattggcttaggaa

SEQ ID NO: 13242 - DNA, 20 bp, synthetic construct
  misc_feature 1..20: note = chemically synthesized
  source 1..20: mol_type = other DNA
taggaaaggatttcatgacc

SEQ ID NO: 13243 - DNA, 20 bp, synthetic construct
  misc_feature 1..20: note = chemically synthesized
  source 1..20: mol_type = other DNA
aatgcaaatacataaaaaca

SEQ ID NO: 13244 - DNA, 20 bp, synthetic construct
  misc_feature 1..20: note = chemically synthesized
  source 1..20: mol_type = other DNA
ataaaaacaaagaaaatatc

SEQ ID NO: 13245 - DNA, 20 bp, synthetic construct
  misc_feature 1..20: note = chemically synthesized
  source 1..20: mol_type = other DNA
taaaaacaaagaaaatatct

SEQ ID NO: 13246 - DNA, 20 bp, synthetic construct
  misc_feature 1..20: note = chemically synthesized
  source 1..20: mol_type = other DNA
tctgggactaaattaaacta

SEQ ID NO: 13247 - DNA, 20 bp, synthetic construct
  misc_feature 1..20: note = chemically synthesized
  source 1..20: mol_type = other DNA
tgggactaaattaaactaaa

SEQ ID NO: 13248 - DNA, 20 bp, synthetic construct
  misc_feature 1..20: note = chemically synthesized
  source 1..20: mol_type = other DNA
taaactaaagagcttttgca

SEQ ID NO: 13249 - DNA, 20 bp, synthetic construct
  misc_feature 1..20: note = chemically synthesized
  source 1..20: mol_type = other DNA
aaagagcttttgcatggcaa

SEQ ID NO: 13250 - DNA, 20 bp, synthetic construct
  misc_feature 1..20: note = chemically synthesized
  source 1..20: mol_type = other DNA
aagagcttttgcatggcaaa

SEQ ID NO: 13251 - DNA, 20 bp, synthetic construct
  misc_feature 1..20: note = chemically synthesized
  source 1..20: mol_type = other DNA
agcttttgcatggcaaaagg

SEQ ID NO: 13252 - DNA, 20 bp, synthetic construct
  misc_feature 1..20: note = chemically synthesized
  source 1..20: mol_type = other DNA
cttttgcatggcaaaaggaa

SEQ ID NO: 13253 - DNA, 20 bp, synthetic construct
  misc_feature 1..20: note = chemically synthesized
  source 1..20: mol_type = other DNA
atggcaaaaggaagagtctg

SEQ ID NO: 13254 - DNA, 20 bp, synthetic construct
  misc_feature 1..20: note = chemically synthesized
  source 1..20: mol_type = other DNA
ggaagagtctgcagaataaa

SEQ ID NO: 13255 - DNA, 20 bp, synthetic construct
  misc_feature 1..20: note = chemically synthesized
  source 1..20: mol_type = other DNA
cagaataaacagacaaccca

SEQ ID NO: 13256 - DNA, 20 bp, synthetic construct
  misc_feature 1..20: note = chemically synthesized
  source 1..20: mol_type = other DNA
gaataaacagacaacccaca

SEQ ID NO: 13257 - DNA, 20 bp, synthetic construct
  misc_feature 1..20: note = chemically synthesized
  source 1..20: mol_type = other DNA
taaacagacaacccacagag

SEQ ID NO: 13258 - DNA, 20 bp, synthetic construct
  misc_feature 1..20: note = chemically synthesized
  source 1..20: mol_type = other DNA
aaacagacaacccacagagt

SEQ ID NO: 13259 - DNA, 20 bp, synthetic construct
  misc_feature 1..20: note = chemically synthesized
  source 1..20: mol_type = other DNA
acagacaacccacagagtgg

SEQ ID NO: 13260 - DNA, 20 bp, synthetic construct
  misc_feature 1..20: note = chemically synthesized
  source 1..20: mol_type = other DNA
acaatctatacatctgacaa

SEQ ID NO: 13261 - DNA, 20 bp, synthetic construct
  misc_feature 1..20: note = chemically synthesized
  source 1..20: mol_type = other DNA
tctgacaaaagaataatatc

SEQ ID NO: 13262 - DNA, 20 bp, synthetic construct
  misc_feature 1..20: note = chemically synthesized
  source 1..20: mol_type = other DNA
ctgacaaaagaataatatcc

SEQ ID NO: 13263 - DNA, 20 bp, synthetic construct
  misc_feature 1..20: note = chemically synthesized
  source 1..20: mol_type = other DNA
ggctctaaaatgaacacaaa

SEQ ID NO: 13264 - DNA, 20 bp, synthetic construct
  misc_feature 1..20: note = chemically synthesized
  source 1..20: mol_type = other DNA
atgaacacaaatagattatc

SEQ ID NO: 13265 - DNA, 20 bp, synthetic construct
  misc_feature 1..20: note = chemically synthesized
  source 1..20: mol_type = other DNA
taacaaacaatcccaataaa

SEQ ID NO: 13266 - DNA, 20 bp, synthetic construct
  misc_feature 1..20: note = chemically synthesized
  source 1..20: mol_type = other DNA
caaacaatcccaataaaaag

SEQ ID NO: 13267 - DNA, 20 bp, synthetic construct
  misc_feature 1..20: note = chemically synthesized
  source 1..20: mol_type = other DNA
aaacaatcccaataaaaagt

SEQ ID NO: 13268 - DNA, 20 bp, synthetic construct
  misc_feature 1..20: note = chemically synthesized
  source 1..20: mol_type = other DNA
atcccaataaaaagtaggct

SEQ ID NO: 13269 - DNA, 20 bp, synthetic construct
  misc_feature 1..20: note = chemically synthesized
  source 1..20: mol_type = other DNA
tcccaataaaaagtaggcta

SEQ ID NO: 13270 - DNA, 20 bp, synthetic construct
  misc_feature 1..20: note = chemically synthesized
  source 1..20: mol_type = other DNA
aagtaggctaaggacatgaa

SEQ ID NO: 13271 - DNA, 20 bp, synthetic construct
  misc_feature 1..20: note = chemically synthesized
  source 1..20: mol_type = other DNA
ggacatgaacagacaattct

SEQ ID NO: 13272 - DNA, 20 bp, synthetic construct
  misc_feature 1..20: note = chemically synthesized
  source 1..20: mol_type = other DNA
gaacagacaattctcagaaa

SEQ ID NO: 13273 - DNA, 20 bp, synthetic construct
  misc_feature 1..20: note = chemically synthesized
  source 1..20: mol_type = other DNA
ttctcaacatcactaatgat

SEQ ID NO: 13274 - DNA, 20 bp, synthetic construct
  misc_feature 1..20: note = chemically synthesized
  source 1..20: mol_type = other DNA
tctcaacatcactaatgatc

SEQ ID NO: 13275 - DNA, 20 bp, synthetic construct
  misc_feature 1..20: note = chemically synthesized
  source 1..20: mol_type = other DNA
ctcaacatcactaatgatca

SEQ ID NO: 13276 - DNA, 20 bp, synthetic construct
  misc_feature 1..20: note = chemically synthesized
  source 1..20: mol_type = other DNA
atgcaaatcaaaactacaat

SEQ ID NO: 13277 - DNA, 20 bp, synthetic construct
  misc_feature 1..20: note = chemically synthesized
  source 1..20: mol_type = other DNA
aatgagatatctacttactc

SEQ ID NO: 13278 - DNA, 20 bp, synthetic construct
  misc_feature 1..20: note = chemically synthesized
  source 1..20: mol_type = other DNA
tctacttactctagttaaaa

SEQ ID NO: 13279 - DNA, 20 bp, synthetic construct
  misc_feature 1..20: note = chemically synthesized
  source 1..20: mol_type = other DNA
taaaacggctattaacaaaa

SEQ ID NO: 13280 - DNA, 20 bp, synthetic construct
  misc_feature 1..20: note = chemically synthesized
  source 1..20: mol_type = other DNA
acaaaaaagacaaaaaataa

SEQ ID NO: 13281 - DNA, 20 bp, synthetic construct
  misc_feature 1..20: note = chemically synthesized
  source 1..20: mol_type = other DNA
aaaaaataacagatccttgt

SEQ ID NO: 13282 - DNA, 20 bp, synthetic construct
  misc_feature 1..20: note = chemically synthesized
  source 1..20: mol_type = other DNA
aaaaataacagatccttgtg

SEQ ID NO: 13283 - DNA, 20 bp, synthetic construct
  misc_feature 1..20: note = chemically synthesized
  source 1..20: mol_type = other DNA
aacagatccttgtgaggata

SEQ ID NO: 13284 - DNA, 20 bp, synthetic construct
  misc_feature 1..20: note = chemically synthesized
  source 1..20: mol_type = other DNA
cagatccttgtgaggatatg

SEQ ID NO: 13285 - DNA, 20 bp, synthetic construct
  misc_feature 1..20: note = chemically synthesized
  source 1..20: mol_type = other DNA
ccttgtgaggatatggagaa

SEQ ID NO: 13286 - DNA, 20 bp, synthetic construct
  misc_feature 1..20: note = chemically synthesized
  source 1..20: mol_type = other DNA
cttgtgaggatatggagaaa

SEQ ID NO: 13287 - DNA, 20 bp, synthetic construct
  misc_feature 1..20: note = chemically synthesized
  source 1..20: mol_type = other DNA
ttgtgaggatatggagaaaa

SEQ ID NO: 13288 - DNA, 20 bp, synthetic construct
  misc_feature 1..20: note = chemically synthesized
  source 1..20: mol_type = other DNA
aactctttcttacacactgt

SEQ ID NO: 13289 - DNA, 20 bp, synthetic construct
  misc_feature 1..20: note = chemically synthesized
  source 1..20: mol_type = other DNA
tctttcttacacactgttgg

SEQ ID NO: 13290 - DNA, 20 bp, synthetic construct
  misc_feature 1..20: note = chemically synthesized
  source 1..20: mol_type = other DNA
ctttcttacacactgttggt

SEQ ID NO: 13291 - DNA, 20 bp, synthetic construct
  misc_feature 1..20: note = chemically synthesized
  source 1..20: mol_type = other DNA
ctgttggtgggaatgtaaaa

SEQ ID NO: 13292 - DNA, 20 bp, synthetic construct
  misc_feature 1..20: note = chemically synthesized
  source 1..20: mol_type = other DNA
gtaaaatagtacaaccatta

SEQ ID NO: 13293 - DNA, 20 bp, synthetic construct
  misc_feature 1..20: note = chemically synthesized
  source 1..20: mol_type = other DNA
agtacaaccattatggaaaa

SEQ ID NO: 13294 - DNA, 20 bp, synthetic construct
  misc_feature 1..20: note = chemically synthesized
  source 1..20: mol_type = other DNA
ccattatggaaaacagtatg

SEQ ID NO: 13295 - DNA, 20 bp, synthetic construct
  misc_feature 1..20: note = chemically synthesized
  source 1..20: mol_type = other DNA
aaaacagtatgaagatttct

SEQ ID NO: 13296 - DNA, 20 bp, synthetic construct
  misc_feature 1..20: note = chemically synthesized
  source 1..20: mol_type = other DNA
atttctcagtaaactaaaaa

SEQ ID NO: 13297 - DNA, 20 bp, synthetic construct
  misc_feature 1..20: note = chemically synthesized
  source 1..20: mol_type = other DNA
aacagaactatcatacaatc

SEQ ID NO: 13298 - DNA, 20 bp, synthetic construct
  misc_feature 1..20: note = chemically synthesized
  source 1..20: mol_type = other DNA
atacaatccagcaatctcac

SEQ ID NO: 13299 - DNA, 20 bp, synthetic construct
  misc_feature 1..20: note = chemically synthesized
  source 1..20: mol_type = other DNA
caatccagcaatctcactag

SEQ ID NO: 13300 - DNA, 20 bp, synthetic construct
  misc_feature 1..20: note = chemically synthesized
  source 1..20: mol_type = other DNA
actagtggttatttatccaa

SEQ ID NO: 13301 - DNA, 20 bp, synthetic construct
  misc_feature 1..20: note = chemically synthesized
  source 1..20: mol_type = other DNA
gtggttatttatccaaaaga

SEQ ID NO: 13302 - DNA, 20 bp, synthetic construct
  misc_feature 1..20: note = chemically synthesized
  source 1..20: mol_type = other DNA
tggttatttatccaaaagaa

SEQ ID NO: 13303 - DNA, 20 bp, synthetic construct
  misc_feature 1..20: note = chemically synthesized
  source 1..20: mol_type = other DNA
ttatccaaaagaaaggaaat

SEQ ID NO: 13304 - DNA, 20 bp, synthetic construct
  misc_feature 1..20: note = chemically synthesized
  source 1..20: mol_type = other DNA
aaggaaatcagtatatccaa

SEQ ID NO: 13305 - DNA, 20 bp, synthetic construct
  misc_feature 1..20: note = chemically synthesized
  source 1..20: mol_type = other DNA
cattacactcatgtttattg

SEQ ID NO: 13306 - DNA, 20 bp, synthetic construct
  misc_feature 1..20: note = chemically synthesized
  source 1..20: mol_type = other DNA
tattgaagcactattcacaa

SEQ ID NO: 13307 - DNA, 20 bp, synthetic construct
  misc_feature 1..20: note = chemically synthesized
  source 1..20: mol_type = other DNA
aagcactattcacaatagtt

SEQ ID NO: 13308 - DNA, 20 bp, synthetic construct
  misc_feature 1..20: note = chemically synthesized
  source 1..20: mol_type = other DNA
agcactattcacaatagtta

SEQ ID NO: 13309 - DNA, 20 bp, synthetic construct
  misc_feature 1..20: note = chemically synthesized
  source 1..20: mol_type = other DNA
tattcacaatagttaaggtt

SEQ ID NO: 13310 - DNA, 20 bp, synthetic construct
  misc_feature 1..20: note = chemically synthesized
  source 1..20: mol_type = other DNA
attcacaatagttaaggttt

SEQ ID NO: 13311 - DNA, 20 bp, synthetic construct
  misc_feature 1..20: note = chemically synthesized
  source 1..20: mol_type = other DNA
ttaaggtttgggatcaacct

SEQ ID NO: 13312 - DNA, 20 bp, synthetic construct
  misc_feature 1..20: note = chemically synthesized
  source 1..20: mol_type = other DNA
tcaacctaagtgtctatcaa

SEQ ID NO: 13313 - DNA, 20 bp, synthetic construct
  misc_feature 1..20: note = chemically synthesized
  source 1..20: mol_type = other DNA
agtgtctatcaacagatgaa

SEQ ID NO: 13314 - DNA, 20 bp, synthetic construct
  misc_feature 1..20: note = chemically synthesized
  source 1..20: mol_type = other DNA
taaaaaattgtatttttgca

SEQ ID NO: 13315 - DNA, 20 bp, synthetic construct
  misc_feature 1..20: note = chemically synthesized
  source 1..20: mol_type = other DNA
agtactattttgccatgaaa

SEQ ID NO: 13316 - DNA, 20 bp, synthetic construct
  misc_feature 1..20: note = chemically synthesized
  source 1..20: mol_type = other DNA
gaatgaaatcttgtcatttg

SEQ ID NO: 13317 - DNA, 20 bp, synthetic construct
  misc_feature 1..20: note = chemically synthesized
  source 1..20: mol_type = other DNA
tcttgtcatttgtagcaaca

SEQ ID NO: 13318 - DNA, 20 bp, synthetic construct
  misc_feature 1..20: note = chemically synthesized
  source 1..20: mol_type = other DNA
gtcatttgtagcaacatgga

SEQ ID NO: 13319 - DNA, 20 bp, synthetic construct
  misc_feature 1..20: note = chemically synthesized
  source 1..20: mol_type = other DNA
tgtagcaacatggatggaac

SEQ ID NO: 13320 - DNA, 20 bp, synthetic construct
  misc_feature 1..20: note = chemically synthesized
  source 1..20: mol_type = other DNA
tagcaacatggatggaacca

SEQ ID NO: 13321 - DNA, 20 bp, synthetic construct
  misc_feature 1..20: note = chemically synthesized
  source 1..20: mol_type = other DNA
agcaacatggatggaaccag

SEQ ID NO: 13322 - DNA, 20 bp, synthetic construct
  misc_feature 1..20: note = chemically synthesized
  source 1..20: mol_type = other DNA
gaggtcattatgttaattga

SEQ ID NO: 13323 - DNA, 20 bp, synthetic construct
  misc_feature 1..20: note = chemically synthesized
  source 1..20: mol_type = other DNA
tatgttaattgaaagccctg

SEQ ID NO: 13324 - DNA, 20 bp, synthetic construct
  misc_feature 1..20: note = chemically synthesized
  source 1..20: mol_type = other DNA
gttaattgaaagccctgaag

SEQ ID NO: 13325 - DNA, 20 bp, synthetic construct
  misc_feature 1..20: note = chemically synthesized
  source 1..20: mol_type = other DNA
gcagaacaaaaacaaactct

SEQ ID NO: 13326 - DNA, 20 bp, synthetic construct
  misc_feature 1..20: note = chemically synthesized
  source 1..20: mol_type = other DNA
aacaaactcttggtatgcca

SEQ ID NO: 13327 - DNA, 20 bp, synthetic construct
  misc_feature 1..20: note = chemically synthesized
  source 1..20: mol_type = other DNA
caaactcttggtatgccaaa

SEQ ID NO: 13328 - DNA, 20 bp, synthetic construct
  misc_feature 1..20: note = chemically synthesized
  source 1..20: mol_type = other DNA
ctcttggtatgccaaagaga

SEQ ID NO: 13329 - DNA, 20 bp, synthetic construct
  misc_feature 1..20: note = chemically synthesized
  source 1..20: mol_type = other DNA
aaagagatagataataaaat

SEQ ID NO: 13330 - DNA, 20 bp, synthetic construct
  misc_feature 1..20: note = chemically synthesized
  source 1..20: mol_type = other DNA
agatagataataaaataagc

SEQ ID NO: 13331 - DNA, 20 bp, synthetic construct
  misc_feature 1..20: note = chemically synthesized
  source 1..20: mol_type = other DNA
ataataaaataagccagata

SEQ ID NO: 13332 - DNA, 20 bp, synthetic construct
  misc_feature 1..20: note = chemically synthesized
  source 1..20: mol_type = other DNA
taaaataagccagatacaga

SEQ ID NO: 13333 - DNA, 20 bp, synthetic construct
  misc_feature 1..20: note = chemically synthesized
  source 1..20: mol_type = other DNA
cacatgtttttattcatctg

SEQ ID NO: 13334 - DNA, 20 bp, synthetic construct
  misc_feature 1..20: note = chemically synthesized
  source 1..20: mol_type = other DNA
acatgtttttattcatctgt

SEQ ID NO: 13335 - DNA, 20 bp, synthetic construct
  misc_feature 1..20: note = chemically synthesized
  source 1..20: mol_type = other DNA
atgtttttattcatctgtgg

SEQ ID NO: 13336 - DNA, 20 bp, synthetic construct
  misc_feature 1..20: note = chemically synthesized
  source 1..20: mol_type = other DNA
ttcatctgtgggagctaaaa

SEQ ID NO: 13337 - DNA, 20 bp, synthetic construct
  misc_feature 1..20: note = chemically synthesized
  source 1..20: mol_type = other DNA
atctgtgggagctaaaaaag

SEQ ID NO: 13338 - DNA, 20 bp, synthetic construct
  misc_feature 1..20: note = chemically synthesized
  source 1..20: mol_type = other DNA
tctgtgggagctaaaaaagt

SEQ ID NO: 13339 - DNA, 20 bp, synthetic construct
  misc_feature 1..20: note = chemically synthesized
  source 1..20: mol_type = other DNA
agctaaaaaagtgggtctca

SEQ ID NO: 13340 - DNA, 20 bp, synthetic construct
  misc_feature 1..20: note = chemically synthesized
  source 1..20: mol_type = other DNA
taaaaaagtgggtctcatgg

SEQ ID NO: 13341 - DNA, 20 bp, synthetic construct
  misc_feature 1..20: note = chemically synthesized
  source 1..20: mol_type = other DNA
aaaagtgggtctcatggtgg

SEQ ID NO: 13342 - DNA, 20 bp, synthetic construct
  misc_feature 1..20: note = chemically synthesized
  source 1..20: mol_type = other DNA
aagtgggtctcatggtggta

SEQ ID NO: 13343 - DNA, 20 bp, synthetic construct
  misc_feature 1..20: note = chemically synthesized
  source 1..20: mol_type = other DNA
gtgggtctcatggtggtaga

SEQ ID NO: 13344 - DNA, 20 bp, synthetic construct
  misc_feature 1..20: note = chemically synthesized
  source 1..20: mol_type = other DNA
ggtctcatggtggtagagag

SEQ ID NO: 13345 - DNA, 20 bp, synthetic construct
  misc_feature 1..20: note = chemically synthesized
  source 1..20: mol_type = other DNA
ggtggtagagagtagaatga

SEQ ID NO: 13346 - DNA, 20 bp, synthetic construct
  misc_feature 1..20: note = chemically synthesized
  source 1..20: mol_type = other DNA
gagagtagaatgatagttat

SEQ ID NO: 13347 - DNA, 20 bp, synthetic construct
  misc_feature 1..20: note = chemically synthesized
  source 1..20: mol_type = other DNA
gagtagaatgatagttatca

SEQ ID NO: 13348 - DNA, 20 bp, synthetic construct
  misc_feature 1..20: note = chemically synthesized
  source 1..20: mol_type = other DNA
agtagaatgatagttatcag

SEQ ID NO: 13349 - DNA, 20 bp, synthetic construct
  misc_feature 1..20: note = chemically synthesized
  source 1..20: mol_type = other DNA
gaatgatagttatcagaggc

SEQ ID NO: 13350 - DNA, 20 bp, synthetic construct
  misc_feature 1..20: note = chemically synthesized
  source 1..20: mol_type = other DNA
tagttatcagaggctggaaa

SEQ ID NO: 13351 - DNA, 20 bp, synthetic construct
  misc_feature 1..20: note = chemically synthesized
  source 1..20: mol_type = other DNA
tcagaggctggaaaaagtgt

SEQ ID NO: 13352 - DNA, 20 bp, synthetic construct
  misc_feature 1..20: note = chemically synthesized
  source 1..20: mol_type = other DNA
ggaaaaagtgtgagtgtgta

SEQ ID NO: 13353 - DNA, 20 bp, synthetic construct
  misc_feature 1..20: note = chemically synthesized
  source 1..20: mol_type = other DNA
gaaaaagtgtgagtgtgtat

SEQ ID NO: 13354 - DNA, 20 bp, synthetic construct
  misc_feature 1..20: note = chemically synthesized
  source 1..20: mol_type = other DNA
aaaagtgtgagtgtgtatgg

SEQ ID NO: 13355 - DNA, 20 bp, synthetic construct
  misc_feature 1..20: note = chemically synthesized
  source 1..20: mol_type = other DNA
aaagtgtgagtgtgtatggg

SEQ ID NO: 13356 - DNA, 20 bp, synthetic construct
  misc_feature 1..20: note = chemically synthesized
  source 1..20: mol_type = other DNA
aagtgtgagtgtgtatggga

SEQ ID NO: 13357 - DNA, 20 bp, synthetic construct
  misc_feature 1..20: note = chemically synthesized
  source 1..20: mol_type = other DNA
agtgtgagtgtgtatgggag

SEQ ID NO: 13358 - DNA, 20 bp, synthetic construct
  misc_feature 1..20: note = chemically synthesized
  source 1..20: mol_type = other DNA
gtgtgtatgggaggggattt

SEQ ID NO: 13359 - DNA, 20 bp, synthetic construct
  misc_feature 1..20: note = chemically synthesized
  source 1..20: mol_type = other DNA
gtgtatgggaggggatttaa

SEQ ID NO: 13360 - DNA, 20 bp, synthetic construct
  misc_feature 1..20: note = chemically synthesized
  source 1..20: mol_type = other DNA
ggaggggatttaagagatgt

SEQ ID NO: 13361 - DNA, 20 bp, synthetic construct
  misc_feature 1..20: note = chemically synthesized
  source 1..20: mol_type = other DNA
atttaagagatgttggttaa

SEQ ID NO: 13362 - DNA, 20 bp, synthetic construct
  misc_feature 1..20: note = chemically synthesized
  source 1..20: mol_type = other DNA
tttaagagatgttggttaat

SEQ ID NO: 13363 - DNA, 20 bp, synthetic construct
  misc_feature 1..20: note = chemically synthesized
  source 1..20: mol_type = other DNA
ttggttaataggtacaaaca

SEQ ID NO: 13364 - DNA, 20 bp, synthetic construct
  misc_feature 1..20: note = chemically synthesized
  source 1..20: mol_type = other DNA
ttaataggtacaaacacagt

SEQ ID NO: 13365 - DNA, 20 bp, synthetic construct
  misc_feature 1..20: note = chemically synthesized
  source 1..20: mol_type = other DNA
taggtacaaacacagttgga

SEQ ID NO: 13366 - DNA, 20 bp, synthetic construct
  misc_feature 1..20: note = chemically synthesized
  source 1..20: mol_type = other DNA
gtacaaacacagttggatag

SEQ ID NO: 13367 - DNA, 20 bp, synthetic construct
  misc_feature 1..20: note = chemically synthesized
  source 1..20: mol_type = other DNA
tacaaacacagttggataga

SEQ ID NO: 13368 - DNA, 20 bp, synthetic construct
  misc_feature 1..20: note = chemically synthesized
  source 1..20: mol_type = other DNA
cacagttggatagaaggatt

SEQ ID NO: 13369 - DNA, 20 bp, synthetic construct
  misc_feature 1..20: note = chemically synthesized
  source 1..20: mol_type = other DNA
agccataatgtttgatattt

SEQ ID NO: 13370 - DNA, 20 bp, synthetic construct
  misc_feature 1..20: note = chemically synthesized
  source 1..20: mol_type = other DNA
cataatgtttgatatttgag

SEQ ID NO: 13371 - DNA, 20 bp, synthetic construct
  misc_feature 1..20: note = chemically synthesized
  source 1..20: mol_type = other DNA
ataatgtttgatatttgagt

SEQ ID NO: 13372 - DNA, 20 bp, synthetic construct
  misc_feature 1..20: note = chemically synthesized
  source 1..20: mol_type = other DNA
taatgtttgatatttgagta

SEQ ID NO: 13373 - DNA, 20 bp, synthetic construct
  misc_feature 1..20: note = chemically synthesized
  source 1..20: mol_type = other DNA
atatttgagtagggtgacta

SEQ ID NO: 13374 - DNA, 20 bp, synthetic construct
  misc_feature 1..20: note = chemically synthesized
  source 1..20: mol_type = other DNA
atttattatatatttcaaaa

SEQ ID NO: 13375 - DNA, 20 bp, synthetic construct
  misc_feature 1..20: note = chemically synthesized
  source 1..20: mol_type = other DNA
attatatatttcaaaatggc

SEQ ID NO: 13376 - DNA, 20 bp, synthetic construct
  misc_feature 1..20: note = chemically synthesized
  source 1..20: mol_type = other DNA
atttcaaaatggctagaaat

SEQ ID NO: 13377 - DNA, 20 bp, synthetic construct
  misc_feature 1..20: note = chemically synthesized
  source 1..20: mol_type = other DNA
tttcaaaatggctagaaatg

SEQ ID NO: 13378 - DNA, 20 bp, synthetic construct
  misc_feature 1..20: note = chemically synthesized
  source 1..20: mol_type = other DNA
tttgaaattttctcaataca

SEQ ID NO: 13379 - DNA, 20 bp, synthetic construct
  misc_feature 1..20: note = chemically synthesized
  source 1..20: mol_type = other DNA
atagaaatgataaatgctca

SEQ ID NO: 13380 - DNA, 20 bp, synthetic construct
  misc_feature 1..20: note = chemically synthesized
  source 1..20: mol_type = other DNA
atgataaatgctcaaagcaa

SEQ ID NO: 13381 - DNA, 20 bp, synthetic construct
  misc_feature 1..20: note = chemically synthesized
  source 1..20: mol_type = other DNA
caatggatatcctaaatatc

SEQ ID NO: 13382 - DNA, 20 bp, synthetic construct
  misc_feature 1..20: note = chemically synthesized
  source 1..20: mol_type = other DNA
gacttaatcatcacatgttc

SEQ ID NO: 13383 - DNA, 20 bp, synthetic construct
  misc_feature 1..20: note = chemically synthesized
  source 1..20: mol_type = other DNA
acttaatcatcacatgttct

SEQ ID NO: 13384 - DNA, 20 bp, synthetic construct
  misc_feature 1..20: note = chemically synthesized
  source 1..20: mol_type = other DNA
atcacatgttctaggcatgt

SEQ ID NO: 13385 - DNA, 20 bp, synthetic construct
  misc_feature 1..20: note = chemically synthesized
  source 1..20: mol_type = other DNA
gctcccatttgttgactgac

SEQ ID NO: 13386 - DNA, 20 bp, synthetic construct
  misc_feature 1..20: note = chemically synthesized
  source 1..20: mol_type = other DNA
ctcccatttgttgactgact

SEQ ID NO: 13387 - DNA, 20 bp, synthetic construct
  misc_feature 1..20: note = chemically synthesized
  source 1..20: mol_type = other DNA
actgactaggtgaaaatatt

SEQ ID NO: 13388 - DNA, 20 bp, synthetic construct
  misc_feature 1..20: note = chemically synthesized
  source 1..20: mol_type = other DNA
atccctgtttactctgttta

SEQ ID NO: 13389 - DNA, 20 bp, synthetic construct
  misc_feature 1..20: note = chemically synthesized
  source 1..20: mol_type = other DNA
tccctgtttactctgtttat

SEQ ID NO: 13390 - DNA, 20 bp, synthetic construct
  misc_feature 1..20: note = chemically synthesized
  source 1..20: mol_type = other DNA
tctgtttatgggcatattga

SEQ ID NO: 13391 - DNA, 20 bp, synthetic construct
  misc_feature 1..20: note = chemically synthesized
  source 1..20: mol_type = other DNA
ctgtttatgggcatattgaa

SEQ ID NO: 13392 - DNA, 20 bp, synthetic construct
  misc_feature 1..20: note = chemically synthesized
  source 1..20: mol_type = other DNA
tgggcatattgaaaggttat

SEQ ID NO: 13393 - DNA, 20 bp, synthetic construct
  misc_feature 1..20: note = chemically synthesized
  source 1..20: mol_type = other DNA
gggcatattgaaaggttata

SEQ ID NO: 13394 - DNA, 20 bp, synthetic construct
  misc_feature 1..20: note = chemically synthesized
  source 1..20: mol_type = other DNA
tattgaaaggttataaggct

SEQ ID NO: 13395 - DNA, 20 bp, synthetic construct
  misc_feature 1..20: note = chemically synthesized
  source 1..20: mol_type = other DNA
ttgaaaggttataaggctca

SEQ ID NO: 13396 - DNA, 20 bp, synthetic construct
  misc_feature 1..20: note = chemically synthesized
  source 1..20: mol_type = other DNA
gaaaggttataaggctcaga

SEQ ID NO: 13397 - DNA, 20 bp, synthetic construct
  misc_feature 1..20: note = chemically synthesized
  source 1..20: mol_type = other DNA
gttataaggctcagagagac

SEQ ID NO: 13398 - DNA, 20 bp, synthetic construct
  misc_feature 1..20: note = chemically synthesized
  source 1..20: mol_type = other DNA
agagagaccagtattgttga

SEQ ID NO: 13399 - DNA, 20 bp, synthetic construct
  misc_feature 1..20: note = chemically synthesized
  source 1..20: mol_type = other DNA
tttgtctctctcccatattc

SEQ ID NO: 13400 - DNA, 20 bp, synthetic construct
  misc_feature 1..20: note = chemically synthesized
  source 1..20: mol_type = other DNA
tcccatattctggatatata

SEQ ID NO: 13401 - DNA, 20 bp, synthetic construct
  misc_feature 1..20: note = chemically synthesized
  source 1..20: mol_type = other DNA
atatatacagccaaattcaa

SEQ ID NO: 13402 - DNA, 20 bp, synthetic construct
  misc_feature 1..20: note = chemically synthesized
  source 1..20: mol_type = other DNA
ccaaattcaaaagtaattca

SEQ ID NO: 13403 - DNA, 20 bp, synthetic construct
  misc_feature 1..20: note = chemically synthesized
  source 1..20: mol_type = other DNA
caaattcaaaagtaattcac

SEQ ID NO: 13404 - DNA, 20 bp, synthetic construct
  misc_feature 1..20: note = chemically synthesized
  source 1..20: mol_type = other DNA
caaaagtaattcacaggaaa

SEQ ID NO: 13405 - DNA, 20 bp, synthetic construct
  misc_feature 1..20: note = chemically synthesized
  source 1..20: mol_type = other DNA
ggaaaaagtctgatcaatgt

SEQ ID NO: 13406 - DNA, 20 bp, synthetic construct
  misc_feature 1..20: note = chemically synthesized
  source 1..20: mol_type = other DNA
aaaaagtctgatcaatgtga

SEQ ID NO: 13407 - DNA, 20 bp, synthetic construct
  misc_feature 1..20: note = chemically synthesized
  source 1..20: mol_type = other DNA
gcactataaaattactaata

SEQ ID NO: 13408 - DNA, 20 bp, synthetic construct
  misc_feature 1..20: note = chemically synthesized
  source 1..20: mol_type = other DNA
aagttatatttgccaaaata

SEQ ID NO: 13409 - DNA, 20 bp, synthetic construct
  misc_feature 1..20: note = chemically synthesized
  source 1..20: mol_type = other DNA
caaaatatggcactctaact

SEQ ID NO: 13410 - DNA, 20 bp, synthetic construct
  misc_feature 1..20: note = chemically synthesized
  source 1..20: mol_type = other DNA
actctaacttggaaaatgca

SEQ ID NO: 13411 - DNA, 20 bp, synthetic construct
  misc_feature 1..20: note = chemically synthesized
  source 1..20: mol_type = other DNA
ctctaacttggaaaatgcaa

SEQ ID NO: 13412 - DNA, 20 bp, synthetic construct
  misc_feature 1..20: note = chemically synthesized
  source 1..20: mol_type = other DNA
gcaaaggttccttgatatga

SEQ ID NO: 13413 - DNA, 20 bp, synthetic construct
  misc_feature 1..20: note = chemically synthesized
  source 1..20: mol_type = other DNA
ttccttgatatgaaagacac

SEQ ID NO: 13414 - DNA, 20 bp, synthetic construct
  misc_feature 1..20: note = chemically synthesized
  source 1..20: mol_type = other DNA
tatgaaagacacaagacctg

SEQ ID NO: 13415 - DNA, 20 bp, synthetic construct
  misc_feature 1..20: note = chemically synthesized
  source 1..20: mol_type = other DNA
atgaaagacacaagacctga

SEQ ID NO: 13416 - DNA, 20 bp, synthetic construct
  misc_feature 1..20: note = chemically synthesized
  source 1..20: mol_type = other DNA
tcaaaactccctgaccaatc

SEQ ID NO: 13417 - DNA, 20 bp, synthetic construct
  misc_feature 1..20: note = chemically synthesized
  source 1..20: mol_type = other DNA
ccaatctagcacttcctaaa

SEQ ID NO: 13418 - DNA, 20 bp, synthetic construct
  misc_feature 1..20: note = chemically synthesized
  source 1..20: mol_type = other DNA
tccctctacccttcacacat

SEQ ID NO: 13419 - DNA, 20 bp, synthetic construct
  misc_feature 1..20: note = chemically synthesized
  source 1..20: mol_type = other DNA
cctctacccttcacacatga

SEQ ID NO: 13420 - DNA, 20 bp, synthetic construct
  misc_feature 1..20: note = chemically synthesized
  source 1..20: mol_type = other DNA
ccttcacacatgagagtcac

SEQ ID NO: 13421 - DNA, 20 bp, synthetic construct
  misc_feature 1..20: note = chemically synthesized
  source 1..20: mol_type = other DNA
cttcacacatgagagtcacc

SEQ ID NO: 13422 - DNA, 20 bp, synthetic construct
  misc_feature 1..20: note = chemically synthesized
  source 1..20: mol_type = other DNA
acacatgagagtcaccaggt

SEQ ID NO: 13423 - DNA, 20 bp, synthetic construct
  misc_feature 1..20: note = chemically synthesized
  source 1..20: mol_type = other DNA
agagtcaccaggtcagtgca

SEQ ID NO: 13424 - DNA, 20 bp, synthetic construct
  misc_feature 1..20: note = chemically synthesized
  source 1..20: mol_type = other DNA
tttcctcctgttatcttcac

SEQ ID NO: 13425 - DNA, 20 bp, synthetic construct
  misc_feature 1..20: note = chemically synthesized
  source 1..20: mol_type = other DNA
tcctgttatcttcaccagtc

SEQ ID NO: 13426 - DNA, 20 bp, synthetic construct
  misc_feature 1..20: note = chemically synthesized
  source 1..20: mol_type = other DNA
cctgttatcttcaccagtct

SEQ ID NO: 13427 - DNA, 20 bp, synthetic construct
  misc_feature 1..20: note = chemically synthesized
  source 1..20: mol_type = other DNA
tgttatcttcaccagtctgg

SEQ ID NO: 13428 - DNA, 20 bp, synthetic construct
  misc_feature 1..20: note = chemically synthesized
  source 1..20: mol_type = other DNA
ttcaccagtctgggagcttt

SEQ ID NO: 13429 - DNA, 20 bp, synthetic construct
  misc_feature 1..20: note = chemically synthesized
  source 1..20: mol_type = other DNA
ttcttccttctcatctccca

SEQ ID NO: 13430 - DNA, 20 bp, synthetic construct
  misc_feature 1..20: note = chemically synthesized
  source 1..20: mol_type = other DNA
tccttctcatctcccacagt

SEQ ID NO: 13431 - DNA, 20 bp, synthetic construct
  misc_feature 1..20: note = chemically synthesized
  source 1..20: mol_type = other DNA
tgtccatccttcaaattcca

SEQ ID NO: 13432 - DNA, 20 bp, synthetic construct
  misc_feature 1..20: note = chemically synthesized
  source 1..20: mol_type = other DNA
cacagactcactgctcctct

SEQ ID NO: 13433 - DNA, 20 bp, synthetic construct
  misc_feature 1..20: note = chemically synthesized
  source 1..20: mol_type = other DNA
acagactcactgctcctctt

SEQ ID NO: 13434 - DNA, 20 bp, synthetic construct
  misc_feature 1..20: note = chemically synthesized
  source 1..20: mol_type = other DNA
tgaatccattttgtgcacat

SEQ ID NO: 13435 - DNA, 20 bp, synthetic construct
  misc_feature 1..20: note = chemically synthesized
  source 1..20: mol_type = other DNA
atccattttgtgcacataag

SEQ ID NO: 13436 - DNA, 20 bp, synthetic construct
  misc_feature 1..20: note = chemically synthesized
  source 1..20: mol_type = other DNA
ttcccaaaatcttatttcct

SEQ ID NO: 13437 - DNA, 20 bp, synthetic construct
  misc_feature 1..20: note = chemically synthesized
  source 1..20: mol_type = other DNA
acatcctaatgcttatcgtt

SEQ ID NO: 13438 - DNA, 20 bp, synthetic construct
  misc_feature 1..20: note = chemically synthesized
  source 1..20: mol_type = other DNA
cttatcgtttagtattgcaa

SEQ ID NO: 13439 - DNA, 20 bp, synthetic construct
  misc_feature 1..20: note = chemically synthesized
  source 1..20: mol_type = other DNA
cgtttagtattgcaatagca

SEQ ID NO: 13440 - DNA, 20 bp, synthetic construct
  misc_feature 1..20: note = chemically synthesized
  source 1..20: mol_type = other DNA
gtattgcaatagcatagtaa

SEQ ID NO: 13441 - DNA, 20 bp, synthetic construct
  misc_feature 1..20: note = chemically synthesized
  source 1..20: mol_type = other DNA
agtaaaagcttgtatttttg

SEQ ID NO: 13442 - DNA, 20 bp, synthetic construct
  misc_feature 1..20: note = chemically synthesized
  source 1..20: mol_type = other DNA
aaagcttgtatttttgtagc

SEQ ID NO: 13443 - DNA, 20 bp, synthetic construct
  misc_feature 1..20: note = chemically synthesized
  source 1..20: mol_type = other DNA
aagcttgtatttttgtagcc

SEQ ID NO: 13444 - DNA, 20 bp, synthetic construct
  misc_feature 1..20: note = chemically synthesized
  source 1..20: mol_type = other DNA
tagccaggccctgtactatc

SEQ ID NO: 13445 - DNA, 20 bp, synthetic construct
  misc_feature 1..20: note = chemically synthesized
  source 1..20: mol_type = other DNA
ctgtactatctggtctttcc

SEQ ID NO: 13446 - DNA, 20 bp, synthetic construct
  misc_feature 1..20: note = chemically synthesized
  source 1..20: mol_type = other DNA
cttactctcccttctacttc

SEQ ID NO: 13447 - DNA, 20 bp, synthetic construct
  misc_feature 1..20: note = chemically synthesized
  source 1..20: mol_type = other DNA
tactctcccttctacttcca

SEQ ID NO: 13448 - DNA, 20 bp, synthetic construct
  misc_feature 1..20: note = chemically synthesized
  source 1..20: mol_type = other DNA
ctctcccttctacttccaga

SEQ ID NO: 13449 - DNA, 20 bp, synthetic construct
  misc_feature 1..20: note = chemically synthesized
  source 1..20: mol_type = other DNA
cccttctacttccagagagc

SEQ ID NO: 13450 - DNA, 20 bp, synthetic construct
  misc_feature 1..20: note = chemically synthesized
  source 1..20: mol_type = other DNA
ccagagagccagtttcatgc

SEQ ID NO: 13451 - DNA, 20 bp, synthetic construct
  misc_feature 1..20: note = chemically synthesized
  source 1..20: mol_type = other DNA
ccagtttcatgcaagtcacg

SEQ ID NO: 13452 - DNA, 20 bp, synthetic construct
  misc_feature 1..20: note = chemically synthesized
  source 1..20: mol_type = other DNA
tcatgcaagtcacgaagccc

SEQ ID NO: 13453 - DNA, 20 bp, synthetic construct
  misc_feature 1..20: note = chemically synthesized
  source 1..20: mol_type = other DNA
gtcacgaagccctagcttgc

SEQ ID NO: 13454 - DNA, 20 bp, synthetic construct
  misc_feature 1..20: note = chemically synthesized
  source 1..20: mol_type = other DNA
aagccctagcttgctggttt

SEQ ID NO: 13455 - DNA, 20 bp, synthetic construct
  misc_feature 1..20: note = chemically synthesized
  source 1..20: mol_type = other DNA
gcttgctggttttagaattt

SEQ ID NO: 13456 - DNA, 20 bp, synthetic construct
  misc_feature 1..20: note = chemically synthesized
  source 1..20: mol_type = other DNA
tttagaatttaagcctttat

SEQ ID NO: 13457 - DNA, 20 bp, synthetic construct
  misc_feature 1..20: note = chemically synthesized
  source 1..20: mol_type = other DNA
tattagtattctatctccca

SEQ ID NO: 13458 - DNA, 20 bp, synthetic construct
  misc_feature 1..20: note = chemically synthesized
  source 1..20: mol_type = other DNA
agtattctatctcccacgga

SEQ ID NO: 13459 - DNA, 20 bp, synthetic construct
  misc_feature 1..20: note = chemically synthesized
  source 1..20: mol_type = other DNA
tctccaaaaactttcccact

SEQ ID NO: 13460 - DNA, 20 bp, synthetic construct
  misc_feature 1..20: note = chemically synthesized
  source 1..20: mol_type = other DNA
ctccaaaaactttcccactc

SEQ ID NO: 13461 - DNA, 20 bp, synthetic construct
  misc_feature 1..20: note = chemically synthesized
  source 1..20: mol_type = other DNA
tcctaactctaactttattt

SEQ ID NO: 13462 - DNA, 20 bp, synthetic construct
  misc_feature 1..20: note = chemically synthesized
  source 1..20: mol_type = other DNA
tagtgcatgttacattctat

SEQ ID NO: 13463 - DNA, 20 bp, synthetic construct
  misc_feature 1..20: note = chemically synthesized
  source 1..20: mol_type = other DNA
tgcatgttacattctatcag

SEQ ID NO: 13464 - DNA, 20 bp, synthetic construct
  misc_feature 1..20: note = chemically synthesized
  source 1..20: mol_type = other DNA
cacaatgatatcatgtgtct

SEQ ID NO: 13465 - DNA, 20 bp, synthetic construct
  misc_feature 1..20: note = chemically synthesized
  source 1..20: mol_type = other DNA
gatatcatgtgtcttagctt

SEQ ID NO: 13466 - DNA, 20 bp, synthetic construct
  misc_feature 1..20: note = chemically synthesized
  source 1..20: mol_type = other DNA
tcagctaacccatgaaataa

SEQ ID NO: 13467 - DNA, 20 bp, synthetic construct
  misc_feature 1..20: note = chemically synthesized
  source 1..20: mol_type = other DNA
tgaaataatggaatccttca

SEQ ID NO: 13468 - DNA, 20 bp, synthetic construct
  misc_feature 1..20: note = chemically synthesized
  source 1..20: mol_type = other DNA
ataatggaatccttcatgga

SEQ ID NO: 13469 - DNA, 20 bp, synthetic construct
  misc_feature 1..20: note = chemically synthesized
  source 1..20: mol_type = other DNA
aatggaatccttcatggaaa

SEQ ID NO: 13470 - DNA, 20 bp, synthetic construct
  misc_feature 1..20: note = chemically synthesized
  source 1..20: mol_type = other DNA
ggaatccttcatggaaagag

SEQ ID NO: 13471 - DNA, 20 bp, synthetic construct
  misc_feature 1..20: note = chemically synthesized
  source 1..20: mol_type = other DNA
gaatccttcatggaaagagc

SEQ ID NO: 13472 - DNA, 20 bp, synthetic construct
  misc_feature 1..20: note = chemically synthesized
  source 1..20: mol_type = other DNA
aatttcataaaacatgtgac

SEQ ID NO: 13473 - DNA, 20 bp, synthetic construct
  misc_feature 1..20: note = chemically synthesized
  source 1..20: mol_type = other DNA
tcataaaacatgtgacaagc

SEQ ID NO: 13474 - DNA, 20 bp, synthetic construct
  misc_feature 1..20: note = chemically synthesized
  source 1..20: mol_type = other DNA
agctacttcaaaatgtaaat

SEQ ID NO: 13475 - DNA, 20 bp, synthetic construct
  misc_feature 1..20: note = chemically synthesized
  source 1..20: mol_type = other DNA
ctacttcaaaatgtaaataa

SEQ ID NO: 13476 - DNA, 20 bp, synthetic construct
  misc_feature 1..20: note = chemically synthesized
  source 1..20: mol_type = other DNA
taaataagagtaaattaaaa

SEQ ID NO: 13477 - DNA, 20 bp, synthetic construct
  misc_feature 1..20: note = chemically synthesized
  source 1..20: mol_type = other DNA
gtaaattaaaatagtaattc

SEQ ID NO: 13478 - DNA, 20 bp, synthetic construct
  misc_feature 1..20: note = chemically synthesized
  source 1..20: mol_type = other DNA
agtaattctagcctatatct

SEQ ID NO: 13479 - DNA, 20 bp, synthetic construct
  misc_feature 1..20: note = chemically synthesized
  source 1..20: mol_type = other DNA
ctatatcttggatatctatg

SEQ ID NO: 13480 - DNA, 20 bp, synthetic construct
  misc_feature 1..20: note = chemically synthesized
  source 1..20: mol_type = other DNA
ttgtttttgtttttaatgaa

SEQ ID NO: 13481 - DNA, 20 bp, synthetic construct
  misc_feature 1..20: note = chemically synthesized
  source 1..20: mol_type = other DNA
gtaccacaaatctgctttct

SEQ ID NO: 13482 - DNA, 20 bp, synthetic construct
  misc_feature 1..20: note = chemically synthesized
  source 1..20: mol_type = other DNA
taccacaaatctgctttctc

SEQ ID NO: 13483 - DNA, 20 bp, synthetic construct
  misc_feature 1..20: note = chemically synthesized
  source 1..20: mol_type = other DNA
gctttctcaggtaccactaa

SEQ ID NO: 13484 - DNA, 20 bp, synthetic construct
  misc_feature 1..20: note = chemically synthesized
  source 1..20: mol_type = other DNA
ctaacagctccttctttccc

SEQ ID NO: 13485 - DNA, 20 bp, synthetic construct
  misc_feature 1..20: note = chemically synthesized
  source 1..20: mol_type = other DNA
agctccttctttccccggtg

SEQ ID NO: 13486 - DNA, 20 bp, synthetic construct
  misc_feature 1..20: note = chemically synthesized
  source 1..20: mol_type = other DNA
ccggtgcagtaaaaactgcc

SEQ ID NO: 13487 - DNA, 20 bp, synthetic construct
  misc_feature 1..20: note = chemically synthesized
  source 1..20: mol_type = other DNA
cggtgcagtaaaaactgcct

SEQ ID NO: 13488 - DNA, 20 bp, synthetic construct
  misc_feature 1..20: note = chemically synthesized
  source 1..20: mol_type = other DNA
gtgcagtaaaaactgcctag

SEQ ID NO: 13489 - DNA, 20 bp, synthetic construct
  misc_feature 1..20: note = chemically synthesized
  source 1..20: mol_type = other DNA
accattttcccaccccgata

SEQ ID NO: 13490 - DNA, 20 bp, synthetic construct
  misc_feature 1..20: note = chemically synthesized
  source 1..20: mol_type = other DNA
ctccatcatatcatcctcct

SEQ ID NO: 13491 - DNA, 20 bp, synthetic construct
  misc_feature 1..20: note = chemically synthesized
  source 1..20: mol_type = other DNA
tatcatcctccttggaatcc

SEQ ID NO: 13492 - DNA, 20 bp, synthetic construct
  misc_feature 1..20: note = chemically synthesized
  source 1..20: mol_type = other DNA
aacatccacattaattttac

SEQ ID NO: 13493 - DNA, 20 bp, synthetic construct
  misc_feature 1..20: note = chemically synthesized
  source 1..20: mol_type = other DNA
caagcccccatacatttctt

SEQ ID NO: 13494 - DNA, 20 bp, synthetic construct
  misc_feature 1..20: note = chemically synthesized
  source 1..20: mol_type = other DNA
aagcccccatacatttctta

SEQ ID NO: 13495 - DNA, 20 bp, synthetic construct
  misc_feature 1..20: note = chemically synthesized
  source 1..20: mol_type = other DNA
cccccatacatttcttaagg

SEQ ID NO: 13496 - DNA, 20 bp, synthetic construct
  misc_feature 1..20: note = chemically synthesized
  source 1..20: mol_type = other DNA
acatttcttaaggaagctct

SEQ ID NO: 13497 - DNA, 20 bp, synthetic construct
  misc_feature 1..20: note = chemically synthesized
  source 1..20: mol_type = other DNA
ctatgtttctctccatccct

SEQ ID NO: 13498 - DNA, 20 bp, synthetic construct
  misc_feature 1..20: note = chemically synthesized
  source 1..20: mol_type = other DNA
acactttttccttttaacac

SEQ ID NO: 13499 - DNA, 20 bp, synthetic construct
  misc_feature 1..20: note = chemically synthesized
  source 1..20: mol_type = other DNA
actttttccttttaacacaa

SEQ ID NO: 13500 - DNA, 20 bp, synthetic construct
  misc_feature 1..20: note = chemically synthesized
  source 1..20: mol_type = other DNA
tccttttaacacaagagtaa

SEQ ID NO: 13501 - DNA, 20 bp, synthetic construct
  misc_feature 1..20: note = chemically synthesized
  source 1..20: mol_type = other DNA
tttaacacaagagtaaaaga

SEQ ID NO: 13502 - DNA, 20 bp, synthetic construct
  misc_feature 1..20: note = chemically synthesized
  source 1..20: mol_type = other DNA
taacacaagagtaaaagatg

SEQ ID NO: 13503 - DNA, 20 bp, synthetic construct
  misc_feature 1..20: note = chemically synthesized
  source 1..20: mol_type = other DNA
cacaagagtaaaagatggag

SEQ ID NO: 13504 - DNA, 20 bp, synthetic construct
  misc_feature 1..20: note = chemically synthesized
  source 1..20: mol_type = other DNA
attgcaatttttgattactg

SEQ ID NO: 13505 - DNA, 20 bp, synthetic construct
  misc_feature 1..20: note = chemically synthesized
  source 1..20: mol_type = other DNA
agaaaatgtactttattaaa

SEQ ID NO: 13506 - DNA, 20 bp, synthetic construct
  misc_feature 1..20: note = chemically synthesized
  source 1..20: mol_type = other DNA
aaatgtactttattaaacag

SEQ ID NO: 13507 - DNA, 20 bp, synthetic construct
  misc_feature 1..20: note = chemically synthesized
  source 1..20: mol_type = other DNA
aatgtactttattaaacaga

SEQ ID NO: 13508 - DNA, 20 bp, synthetic construct
  misc_feature 1..20: note = chemically synthesized
  source 1..20: mol_type = other DNA
taaacagaaggctttctctc

SEQ ID NO: 13509 - DNA, 20 bp, synthetic construct
  misc_feature 1..20: note = chemically synthesized
  source 1..20: mol_type = other DNA
aaacagaaggctttctctca

SEQ ID NO: 13510 - DNA, 20 bp, synthetic construct
  misc_feature 1..20: note = chemically synthesized
  source 1..20: mol_type = other DNA
gaaggctttctctcaaggcc

SEQ ID NO: 13511 - DNA, 20 bp, synthetic construct
  misc_feature 1..20: note = chemically synthesized
  source 1..20: mol_type = other DNA
ctttctctcaaggccaagcc

SEQ ID NO: 13512 - DNA, 20 bp, synthetic construct
  misc_feature 1..20: note = chemically synthesized
  source 1..20: mol_type = other DNA
ccaagcccagtccccatgtg

SEQ ID NO: 13513 - DNA, 20 bp, synthetic construct
  misc_feature 1..20: note = chemically synthesized
  source 1..20: mol_type = other DNA
agcccagtccccatgtgcag

SEQ ID NO: 13514 - DNA, 20 bp, synthetic construct
  misc_feature 1..20: note = chemically synthesized
  source 1..20: mol_type = other DNA
gcccagtccccatgtgcaga

SEQ ID NO: 13515 - DNA, 20 bp, synthetic construct
  misc_feature 1..20: note = chemically synthesized
  source 1..20: mol_type = other DNA
ccagtccccatgtgcagaag

SEQ ID NO: 13516 - DNA, 20 bp, synthetic construct
  misc_feature 1..20: note = chemically synthesized
  source 1..20: mol_type = other DNA
cagtccccatgtgcagaagg

SEQ ID NO: 13517 - DNA, 20 bp, synthetic construct
  misc_feature 1..20: note = chemically synthesized
  source 1..20: mol_type = other DNA
agtccccatgtgcagaagga

SEQ ID NO: 13518 - DNA, 20 bp, synthetic construct
  misc_feature 1..20: note = chemically synthesized
  source 1..20: mol_type = other DNA
catgtgcagaaggagggtgt

SEQ ID NO: 13519 - DNA, 20 bp, synthetic construct
  misc_feature 1..20: note = chemically synthesized
  source 1..20: mol_type = other DNA
atgtgcagaaggagggtgtc

SEQ ID NO: 13520 - DNA, 20 bp, synthetic construct
  misc_feature 1..20: note = chemically synthesized
  source 1..20: mol_type = other DNA
tgtgcagaaggagggtgtca

SEQ ID NO: 13521 - DNA, 20 bp, synthetic construct
  misc_feature 1..20: note = chemically synthesized
  source 1..20: mol_type = other DNA
gaaggagggtgtcagggtca

SEQ ID NO: 13522 - DNA, 20 bp, synthetic construct
  misc_feature 1..20: note = chemically synthesized
  source 1..20: mol_type = other DNA
aaggagggtgtcagggtcac

SEQ ID NO: 13523 - DNA, 20 bp, synthetic construct
  misc_feature 1..20: note = chemically synthesized
  source 1..20: mol_type = other DNA
tcacaggaacacctgcaaac

SEQ ID NO: 13524 - DNA, 20 bp, synthetic construct
  misc_feature 1..20: note = chemically synthesized
  source 1..20: mol_type = other DNA
caggaacacctgcaaactgg

SEQ ID NO: 13525 - DNA, 20 bp, synthetic construct
  misc_feature 1..20: note = chemically synthesized
  source 1..20: mol_type = other DNA
ggaacacctgcaaactggaa

SEQ ID NO: 13526 - DNA, 20 bp, synthetic construct
  misc_feature 1..20: note = chemically synthesized
  source 1..20: mol_type = other DNA
ctgcaaactggaagagaact

SEQ ID NO: 13527 - DNA, 20 bp, synthetic construct
  misc_feature 1..20: note = chemically synthesized
  source 1..20: mol_type = other DNA
caaactggaagagaactcag

SEQ ID NO: 13528 - DNA, 20 bp, synthetic construct
  misc_feature 1..20: note = chemically synthesized
  source 1..20: mol_type = other DNA
agagaactcagtggtactta

SEQ ID NO: 13529 - DNA, 20 bp, synthetic construct
  misc_feature 1..20: note = chemically synthesized
  source 1..20: mol_type = other DNA
gagaactcagtggtacttat

SEQ ID NO: 13530 - DNA, 20 bp, synthetic construct
  misc_feature 1..20: note = chemically synthesized
  source 1..20: mol_type = other DNA
actcagtggtacttatgggc

SEQ ID NO: 13531 - DNA, 20 bp, synthetic construct
  misc_feature 1..20: note = chemically synthesized
  source 1..20: mol_type = other DNA
ctcagtggtacttatgggcc

SEQ ID NO: 13532 - DNA, 20 bp, synthetic construct
  misc_feature 1..20: note = chemically synthesized
  source 1..20: mol_type = other DNA
tcagtggtacttatgggcca

SEQ ID NO: 13533 - DNA, 20 bp, synthetic construct
  misc_feature 1..20: note = chemically synthesized
  source 1..20: mol_type = other DNA
gtacttatgggccagggcaa

SEQ ID NO: 13534 - DNA, 20 bp, synthetic construct
  misc_feature 1..20: note = chemically synthesized
  source 1..20: mol_type = other DNA
atgggccagggcaatggcga

SEQ ID NO: 13535 - DNA, 20 bp, synthetic construct
  misc_feature 1..20: note = chemically synthesized
  source 1..20: mol_type = other DNA
ggccagggcaatggcgacag

SEQ ID NO: 13536 - DNA, 20 bp, synthetic construct
  misc_feature 1..20: note = chemically synthesized
  source 1..20: mol_type = other DNA
gcaatggcgacagcagacac

SEQ ID NO: 13537 - DNA, 20 bp, synthetic construct
  misc_feature 1..20: note = chemically synthesized
  source 1..20: mol_type = other DNA
cagcagacaccagcttctgc

SEQ ID NO: 13538 - DNA, 20 bp, synthetic construct
  misc_feature 1..20: note = chemically synthesized
  source 1..20: mol_type = other DNA
agcagacaccagcttctgcc

SEQ ID NO: 13539 - DNA, 20 bp, synthetic construct
  misc_feature 1..20: note = chemically synthesized
  source 1..20: mol_type = other DNA
agacaccagcttctgccagg

SEQ ID NO: 13540 - DNA, 20 bp, synthetic construct
  misc_feature 1..20: note = chemically synthesized
  source 1..20: mol_type = other DNA
ctgccaggcagcctgcactt

SEQ ID NO: 13541 - DNA, 20 bp, synthetic construct
  misc_feature 1..20: note = chemically synthesized
  source 1..20: mol_type = other DNA
tgccaggcagcctgcacttc

SEQ ID NO: 13542 - DNA, 20 bp, synthetic construct
  misc_feature 1..20: note = chemically synthesized
  source 1..20: mol_type = other DNA
gccaggcagcctgcacttca

SEQ ID NO: 13543 - DNA, 20 bp, synthetic construct
  misc_feature 1..20: note = chemically synthesized
  source 1..20: mol_type = other DNA
ccaggcagcctgcacttcag

SEQ ID NO: 13544 - DNA, 20 bp, synthetic construct
  misc_feature 1..20: note = chemically synthesized
  source 1..20: mol_type = other DNA
caggggtgaactccttgcca

SEQ ID NO: 13545 - DNA, 20 bp, synthetic construct
  misc_feature 1..20: note = chemically synthesized
  source 1..20: mol_type = other DNA
ggtgaactccttgccaaagt

SEQ ID NO: 13546 - DNA, 20 bp, synthetic construct
  misc_feature 1..20: note = chemically synthesized
  source 1..20: mol_type = other DNA
gaactccttgccaaagtgag

SEQ ID NO: 13547 - DNA, 20 bp, synthetic construct
  misc_feature 1..20: note = chemically synthesized
  source 1..20: mol_type = other DNA
tccttgccaaagtgagtagc

SEQ ID NO: 13548 - DNA, 20 bp, synthetic construct
  misc_feature 1..20: note = chemically synthesized
  source 1..20: mol_type = other DNA
ataatcaccatcacgttacc

SEQ ID NO: 13549 - DNA, 20 bp, synthetic construct
  misc_feature 1..20: note = chemically synthesized
  source 1..20: mol_type = other DNA
taatcaccatcacgttaccc

SEQ ID NO: 13550 - DNA, 20 bp, synthetic construct
  misc_feature 1..20: note = chemically synthesized
  source 1..20: mol_type = other DNA
atcaccatcacgttacccag

SEQ ID NO: 13551 - DNA, 20 bp, synthetic construct
  misc_feature 1..20: note = chemically synthesized
  source 1..20: mol_type = other DNA
tcacgttacccaggagctgt

SEQ ID NO: 13552 - DNA, 20 bp, synthetic construct
  misc_feature 1..20: note = chemically synthesized
  source 1..20: mol_type = other DNA
cacgttacccaggagctgtt

SEQ ID NO: 13553 - DNA, 20 bp, synthetic construct
  misc_feature 1..20: note = chemically synthesized
  source 1..20: mol_type = other DNA
acccaggagctgttaggcaa

SEQ ID NO: 13554 - DNA, 20 bp, synthetic construct
  misc_feature 1..20: note = chemically synthesized
  source 1..20: mol_type = other DNA
gcaaaagacaaaataacaca

SEQ ID NO: 13555 - DNA, 20 bp, synthetic construct
  misc_feature 1..20: note = chemically synthesized
  source 1..20: mol_type = other DNA
caaaagacaaaataacacac

SEQ ID NO: 13556 - DNA, 20 bp, synthetic construct
  misc_feature 1..20: note = chemically synthesized
  source 1..20: mol_type = other DNA
aaataacacacaggcatgtt

SEQ ID NO: 13557 - DNA, 20 bp, synthetic construct
  misc_feature 1..20: note = chemically synthesized
  source 1..20: mol_type = other DNA
taacacacaggcatgttgag

SEQ ID NO: 13558 - DNA, 20 bp, synthetic construct
  misc_feature 1..20: note = chemically synthesized
  source 1..20: mol_type = other DNA
cacacaggcatgttgagtag

SEQ ID NO: 13559 - DNA, 20 bp, synthetic construct
  misc_feature 1..20: note = chemically synthesized
  source 1..20: mol_type = other DNA
aacaaacaaacaaacaaaaa

SEQ ID NO: 13560 - DNA, 20 bp, synthetic construct
  misc_feature 1..20: note = chemically synthesized
  source 1..20: mol_type = other DNA
cggctttatacctacattcc

SEQ ID NO: 13561 - DNA, 20 bp, synthetic construct
  misc_feature 1..20: note = chemically synthesized
  source 1..20: mol_type = other DNA
ccctgacctcaaactgttcc

SEQ ID NO: 13562 - DNA, 20 bp, synthetic construct
  misc_feature 1..20: note = chemically synthesized
  source 1..20: mol_type = other DNA
cctgacctcaaactgttcca

SEQ ID NO: 13563 - DNA, 20 bp, synthetic construct
  misc_feature 1..20: note = chemically synthesized
  source 1..20: mol_type = other DNA
ttgtgcccacccaaaaaatt

SEQ ID NO: 13564 - DNA, 20 bp, synthetic construct
  misc_feature 1..20: note = chemically synthesized
  source 1..20: mol_type = other DNA
cccacccaaaaaattcagat

SEQ ID NO: 13565 - DNA, 20 bp, synthetic construct
  misc_feature 1..20: note = chemically synthesized
  source 1..20: mol_type = other DNA
ccaaaaaattcagatgagct

SEQ ID NO: 13566 - DNA, 20 bp, synthetic construct
  misc_feature 1..20: note = chemically synthesized
  source 1..20: mol_type = other DNA
caaaaaattcagatgagctt

SEQ ID NO: 13567 - DNA, 20 bp, synthetic construct
  misc_feature 1..20: note = chemically synthesized
  source 1..20: mol_type = other DNA
taggttcaattttattctat

SEQ ID NO: 13568 - DNA, 20 bp, synthetic construct
  misc_feature 1..20: note = chemically synthesized
  source 1..20: mol_type = other DNA
cacccccttccccattttac

SEQ ID NO: 13569 - DNA, 20 bp, synthetic construct
  misc_feature 1..20: note = chemically synthesized
  source 1..20: mol_type = other DNA
ccccattttaccagtattat

SEQ ID NO: 13570 - DNA, 20 bp, synthetic construct
  misc_feature 1..20: note = chemically synthesized
  source 1..20: mol_type = other DNA
cccattttaccagtattatt

SEQ ID NO: 13571 - DNA, 20 bp, synthetic construct
  misc_feature 1..20: note = chemically synthesized
  source 1..20: mol_type = other DNA
ctctctccctgtttttcttt

SEQ ID NO: 13572 - DNA, 20 bp, synthetic construct
  misc_feature 1..20: note = chemically synthesized
  source 1..20: mol_type = other DNA
ttgtctaatttttgtaaatg

SEQ ID NO: 13573 - DNA, 20 bp, synthetic construct
  misc_feature 1..20: note = chemically synthesized
  source 1..20: mol_type = other DNA
tttttgtaaatgtagaatgt

SEQ ID NO: 13574 - DNA, 20 bp, synthetic construct
  misc_feature 1..20: note = chemically synthesized
  source 1..20: mol_type = other DNA
atgtagaatgtgagtgctgc

SEQ ID NO: 13575 - DNA, 20 bp, synthetic construct
  misc_feature 1..20: note = chemically synthesized
  source 1..20: mol_type = other DNA
gtagaatgtgagtgctgcaa

SEQ ID NO: 13576 - DNA, 20 bp, synthetic construct
  misc_feature 1..20: note = chemically synthesized
  source 1..20: mol_type = other DNA
gtgagtgctgcaagagttct

SEQ ID NO: 13577 - DNA, 20 bp, synthetic construct
  misc_feature 1..20: note = chemically synthesized
  source 1..20: mol_type = other DNA
agtgctgcaagagttctcag

SEQ ID NO: 13578 - DNA, 20 bp, synthetic construct
  misc_feature 1..20: note = chemically synthesized
  source 1..20: mol_type = other DNA
gtgctgcaagagttctcagc

SEQ ID NO: 13579 - DNA, 20 bp, synthetic construct
  misc_feature 1..20: note = chemically synthesized
  source 1..20: mol_type = other DNA
gctgcaagagttctcagcgg

SEQ ID NO: 13580 - DNA, 20 bp, synthetic construct
  misc_feature 1..20: note = chemically synthesized
  source 1..20: mol_type = other DNA
tttaaaatccccaacaaatt

SEQ ID NO: 13581 - DNA, 20 bp, synthetic construct
  misc_feature 1..20: note = chemically synthesized
  source 1..20: mol_type = other DNA
tccccaacaaattcggaaac

SEQ ID NO: 13582 - DNA, 20 bp, synthetic construct
  misc_feature 1..20: note = chemically synthesized
  source 1..20: mol_type = other DNA
ttcggaaacaagccttcact

SEQ ID NO: 13583 - DNA, 20 bp, synthetic construct
  misc_feature 1..20: note = chemically synthesized
  source 1..20: mol_type = other DNA
tcacttggtcacaatactga

SEQ ID NO: 13584 - DNA, 20 bp, synthetic construct
  misc_feature 1..20: note = chemically synthesized
  source 1..20: mol_type = other DNA
cacttggtcacaatactgat

SEQ ID NO: 13585 - DNA, 20 bp, synthetic construct
  misc_feature 1..20: note = chemically synthesized
  source 1..20: mol_type = other DNA
atgggaaatttaacatattt

SEQ ID NO: 13586 - DNA, 20 bp, synthetic construct
  misc_feature 1..20: note = chemically synthesized
  source 1..20: mol_type = other DNA
aatgtgtcttatttttcttt

SEQ ID NO: 13587 - DNA, 20 bp, synthetic construct
  misc_feature 1..20: note = chemically synthesized
  source 1..20: mol_type = other DNA
tatcatgacccacataaaat

SEQ ID NO: 13588 - DNA, 20 bp, synthetic construct
  misc_feature 1..20: note = chemically synthesized
  source 1..20: mol_type = other DNA
atcatgacccacataaaata

SEQ ID NO: 13589 - DNA, 20 bp, synthetic construct
  misc_feature 1..20: note = chemically synthesized
  source 1..20: mol_type = other DNA
gcatttctatttccttgaaa

SEQ ID NO: 13590 - DNA, 20 bp, synthetic construct
  misc_feature 1..20: note = chemically synthesized
  source 1..20: mol_type = other DNA
aatggactttcatctaccaa

SEQ ID NO: 13591 - DNA, 20 bp, synthetic construct
  misc_feature 1..20: note = chemically synthesized
  source 1..20: mol_type = other DNA
aaatttcattcttctttcac

SEQ ID NO: 13592 - DNA, 20 bp, synthetic construct
  misc_feature 1..20: note = chemically synthesized
  source 1..20: mol_type = other DNA
aattctataatacaattctc

SEQ ID NO: 13593 - DNA, 20 bp, synthetic construct
  misc_feature 1..20: note = chemically synthesized
  source 1..20: mol_type = other DNA
attctataatacaattctct

SEQ ID NO: 13594 - DNA, 20 bp, synthetic construct
  misc_feature 1..20: note = chemically synthesized
  source 1..20: mol_type = other DNA
ttctctgggataaacacatc

SEQ ID NO: 13595 - DNA, 20 bp, synthetic construct
  misc_feature 1..20: note = chemically synthesized
  source 1..20: mol_type = other DNA
gggataaacacatcaagttc

SEQ ID NO: 13596 - DNA, 20 bp, synthetic construct
  misc_feature 1..20: note = chemically synthesized
  source 1..20: mol_type = other DNA
taaacacatcaagttctggc

SEQ ID NO: 13597 - DNA, 20 bp, synthetic construct
  misc_feature 1..20: note = chemically synthesized
  source 1..20: mol_type = other DNA
ttctggcaagatttcctgaa

SEQ ID NO: 13598 - DNA, 20 bp, synthetic construct
  misc_feature 1..20: note = chemically synthesized
  source 1..20: mol_type = other DNA
gcaagatttcctgaaaagtt

SEQ ID NO: 13599 - DNA, 20 bp, synthetic construct
  misc_feature 1..20: note = chemically synthesized
  source 1..20: mol_type = other DNA
cctgaaaagttaagccaatt

SEQ ID NO: 13600 - DNA, 20 bp, synthetic construct
  misc_feature 1..20: note = chemically synthesized
  source 1..20: mol_type = other DNA
ctgaaaagttaagccaattc

SEQ ID NO: 13601 - DNA, 20 bp, synthetic construct
  misc_feature 1..20: note = chemically synthesized
  source 1..20: mol_type = other DNA
gttaagccaattcaggctgt

SEQ ID NO: 13602 - DNA, 20 bp, synthetic construct
  misc_feature 1..20: note = chemically synthesized
  source 1..20: mol_type = other DNA
aagccaattcaggctgttag

SEQ ID NO: 13603 - DNA, 20 bp, synthetic construct
  misc_feature 1..20: note = chemically synthesized
  source 1..20: mol_type = other DNA
tagtagtcctttactgtcac

SEQ ID NO: 13604 - DNA, 20 bp, synthetic construct
  misc_feature 1..20: note = chemically synthesized
  source 1..20: mol_type = other DNA
tcactagttctgaatcatgt

SEQ ID NO: 13605 - DNA, 20 bp, synthetic construct
  misc_feature 1..20: note = chemically synthesized
  source 1..20: mol_type = other DNA
gttctgaatcatgtaagttt

SEQ ID NO: 13606 - DNA, 20 bp, synthetic construct
  misc_feature 1..20: note = chemically synthesized
  source 1..20: mol_type = other DNA
taagttttggttatgctcac

SEQ ID NO: 13607 - DNA, 20 bp, synthetic construct
  misc_feature 1..20: note = chemically synthesized
  source 1..20: mol_type = other DNA
gttttggttatgctcactag

SEQ ID NO: 13608 - DNA, 20 bp, synthetic construct
  misc_feature 1..20: note = chemically synthesized
  source 1..20: mol_type = other DNA
aagtctgctgttctaacatc

SEQ ID NO: 13609 - DNA, 20 bp, synthetic construct
  misc_feature 1..20: note = chemically synthesized
  source 1..20: mol_type = other DNA
aagctcgacccatgatttct

SEQ ID NO: 13610 - DNA, 20 bp, synthetic construct
  misc_feature 1..20: note = chemically synthesized
  source 1..20: mol_type = other DNA
atgatttctgagatctttgt

SEQ ID NO: 13611 - DNA, 20 bp, synthetic construct
  misc_feature 1..20: note = chemically synthesized
  source 1..20: mol_type = other DNA
tctttgttggtctttccaat

SEQ ID NO: 13612 - DNA, 20 bp, synthetic construct
  misc_feature 1..20: note = chemically synthesized
  source 1..20: mol_type = other DNA
ggtctttccaataagattat

SEQ ID NO: 13613 - DNA, 20 bp, synthetic construct
  misc_feature 1..20: note = chemically synthesized
  source 1..20: mol_type = other DNA
tcaattaatgtcaaaatata

SEQ ID NO: 13614 - DNA, 20 bp, synthetic construct
  misc_feature 1..20: note = chemically synthesized
  source 1..20: mol_type = other DNA
aagccaaaaaatcacatcac

SEQ ID NO: 13615 - DNA, 20 bp, synthetic construct
  misc_feature 1..20: note = chemically synthesized
  source 1..20: mol_type = other DNA
cagcacctgaactcaccttg

SEQ ID NO: 13616 - DNA, 20 bp, synthetic construct
  misc_feature 1..20: note = chemically synthesized
  source 1..20: mol_type = other DNA
tgaactcaccttgaagttct

SEQ ID NO: 13617 - DNA, 20 bp, synthetic construct
  misc_feature 1..20: note = chemically synthesized
  source 1..20: mol_type = other DNA
gaactcaccttgaagttctc

SEQ ID NO: 13618 - DNA, 20 bp, synthetic construct
  misc_feature 1..20: note = chemically synthesized
  source 1..20: mol_type = other DNA
aagttctcaggatccacatg

SEQ ID NO: 13619 - DNA, 20 bp, synthetic construct
  misc_feature 1..20: note = chemically synthesized
  source 1..20: mol_type = other DNA
gatccacatgcagcttgtca

SEQ ID NO: 13620 - DNA, 20 bp, synthetic construct
  misc_feature 1..20: note = chemically synthesized
  source 1..20: mol_type = other DNA
acatgcagcttgtcacagtg

SEQ ID NO: 13621 - DNA, 20 bp, synthetic construct
  misc_feature 1..20: note = chemically synthesized
  source 1..20: mol_type = other DNA
ttgtcacagtgcagctcact

SEQ ID NO: 13622 - DNA, 20 bp, synthetic construct
  misc_feature 1..20: note = chemically synthesized
  source 1..20: mol_type = other DNA
acagtgcagctcactcagct

SEQ ID NO: 13623 - DNA, 20 bp, synthetic construct
  misc_feature 1..20: note = chemically synthesized
  source 1..20: mol_type = other DNA
gcagctcactcagcttagca

SEQ ID NO: 13624 - DNA, 20 bp, synthetic construct
  misc_feature 1..20: note = chemically synthesized
  source 1..20: mol_type = other DNA
cagctcactcagcttagcaa

SEQ ID NO: 13625 - DNA, 20 bp, synthetic construct
  misc_feature 1..20: note = chemically synthesized
  source 1..20: mol_type = other DNA
ctcactcagcttagcaaagg

SEQ ID NO: 13626 - DNA, 20 bp, synthetic construct
  misc_feature 1..20: note = chemically synthesized
  source 1..20: mol_type = other DNA
tcactcagcttagcaaaggc

SEQ ID NO: 13627 - DNA, 20 bp, synthetic construct
  misc_feature 1..20: note = chemically synthesized
  source 1..20: mol_type = other DNA
agcttagcaaaggcgggctt

SEQ ID NO: 13628 - DNA, 20 bp, synthetic construct
  misc_feature 1..20: note = chemically synthesized
  source 1..20: mol_type = other DNA
gcttagcaaaggcgggcttg

SEQ ID NO: 13629 - DNA, 20 bp, synthetic construct
  misc_feature 1..20: note = chemically synthesized
  source 1..20: mol_type = other DNA
gaggttgtccatgtttttaa

SEQ ID NO: 13630 - DNA, 20 bp, synthetic construct
  misc_feature 1..20: note = chemically synthesized
  source 1..20: mol_type = other DNA
tgtttttaatagcatctcca

SEQ ID NO: 13631 - DNA, 20 bp, synthetic construct
  misc_feature 1..20: note = chemically synthesized
  source 1..20: mol_type = other DNA
gtttttaatagcatctccaa

SEQ ID NO: 13632 - DNA, 20 bp, synthetic construct
  misc_feature 1..20: note = chemically synthesized
  source 1..20: mol_type = other DNA
tttaatagcatctccaaagg

SEQ ID NO: 13633 - DNA, 20 bp, synthetic construct
  misc_feature 1..20: note = chemically synthesized
  source 1..20: mol_type = other DNA
atagcatctccaaaggaagt

SEQ ID NO: 13634 - DNA, 20 bp, synthetic construct
  misc_feature 1..20: note = chemically synthesized
  source 1..20: mol_type = other DNA
aagtcagcaccttcttgcca

SEQ ID NO: 13635 - DNA, 20 bp, synthetic construct
  misc_feature 1..20: note = chemically synthesized
  source 1..20: mol_type = other DNA
agtcagcaccttcttgccat

SEQ ID NO: 13636 - DNA, 20 bp, synthetic construct
  misc_feature 1..20: note = chemically synthesized
  source 1..20: mol_type = other DNA
cttgccatgggccttgacct

SEQ ID NO: 13637 - DNA, 20 bp, synthetic construct
  misc_feature 1..20: note = chemically synthesized
  source 1..20: mol_type = other DNA
ttgccatgggccttgacctt

SEQ ID NO: 13638 - DNA, 20 bp, synthetic construct
  misc_feature 1..20: note = chemically synthesized
  source 1..20: mol_type = other DNA
tgccatgggccttgaccttg

SEQ ID NO: 13639 - DNA, 20 bp, synthetic construct
  misc_feature 1..20: note = chemically synthesized
  source 1..20: mol_type = other DNA
gccttgaccttggggttgcc

SEQ ID NO: 13640 - DNA, 20 bp, synthetic construct
  misc_feature 1..20: note = chemically synthesized
  source 1..20: mol_type = other DNA
ccttgaccttggggttgccc

SEQ ID NO: 13641 - DNA, 20 bp, synthetic construct
  misc_feature 1..20: note = chemically synthesized
  source 1..20: mol_type = other DNA
gaccttggggttgcccagga

SEQ ID NO: 13642 - DNA, 20 bp, synthetic construct
  misc_feature 1..20: note = chemically synthesized
  source 1..20: mol_type = other DNA
cttggggttgcccaggatgg

SEQ ID NO: 13643 - DNA, 20 bp, synthetic construct
  misc_feature 1..20: note = chemically synthesized
  source 1..20: mol_type = other DNA
tggggttgcccaggatggca

SEQ ID NO: 13644 - DNA, 20 bp, synthetic construct
  misc_feature 1..20: note = chemically synthesized
  source 1..20: mol_type = other DNA
ggggttgcccaggatggcag

SEQ ID NO: 13645 - DNA, 20 bp, synthetic construct
  misc_feature 1..20: note = chemically synthesized
  source 1..20: mol_type = other DNA
gggttgcccaggatggcaga

SEQ ID NO: 13646 - DNA, 20 bp, synthetic construct
  misc_feature 1..20: note = chemically synthesized
  source 1..20: mol_type = other DNA
gttgcccaggatggcagagg

SEQ ID NO: 13647 - DNA, 20 bp, synthetic construct
  misc_feature 1..20: note = chemically synthesized
  source 1..20: mol_type = other DNA
aggatggcagagggagacga

SEQ ID NO: 13648 - DNA, 20 bp, synthetic construct
  misc_feature 1..20: note = chemically synthesized
  source 1..20: mol_type = other DNA
ggatggcagagggagacgac

SEQ ID NO: 13649 - DNA, 20 bp, synthetic construct
  misc_feature 1..20: note = chemically synthesized
  source 1..20: mol_type = other DNA
agggagacgacaggtttcca

SEQ ID NO: 13650 - DNA, 20 bp, synthetic construct
  misc_feature 1..20: note = chemically synthesized
  source 1..20: mol_type = other DNA
caaagctgtcaaaaaatctc

SEQ ID NO: 13651 - DNA, 20 bp, synthetic construct
  misc_feature 1..20: note = chemically synthesized
  source 1..20: mol_type = other DNA
aaagctgtcaaaaaatctct

SEQ ID NO: 13652 - DNA, 20 bp, synthetic construct
  misc_feature 1..20: note = chemically synthesized
  source 1..20: mol_type = other DNA
tgtcaaaaaatctctgggtc

SEQ ID NO: 13653 - DNA, 20 bp, synthetic construct
  misc_feature 1..20: note = chemically synthesized
  source 1..20: mol_type = other DNA
gtcaaaaaatctctgggtcc

SEQ ID NO: 13654 - DNA, 20 bp, synthetic construct
  misc_feature 1..20: note = chemically synthesized
  source 1..20: mol_type = other DNA
tcaaaaaatctctgggtcca

SEQ ID NO: 13655 - DNA, 20 bp, synthetic construct
  misc_feature 1..20: note = chemically synthesized
  source 1..20: mol_type = other DNA
caaaaaatctctgggtccag

SEQ ID NO: 13656 - DNA, 20 bp, synthetic construct
  misc_feature 1..20: note = chemically synthesized
  source 1..20: mol_type = other DNA
tgggtccaggggtaaacaac

SEQ ID NO: 13657 - DNA, 20 bp, synthetic construct
  misc_feature 1..20: note = chemically synthesized
  source 1..20: mol_type = other DNA
gggtccaggggtaaacaacg

SEQ ID NO: 13658 - DNA, 20 bp, synthetic construct
  misc_feature 1..20: note = chemically synthesized
  source 1..20: mol_type = other DNA
gtccaggggtaaacaacgag

SEQ ID NO: 13659 - DNA, 20 bp, synthetic construct
  misc_feature 1..20: note = chemically synthesized
  source 1..20: mol_type = other DNA
tctatgaaatgacaccatat

SEQ ID NO: 13660 - DNA, 20 bp, synthetic construct
  misc_feature 1..20: note = chemically synthesized
  source 1..20: mol_type = other DNA
caccatatcagatacaaaat

SEQ ID NO: 13661 - DNA, 20 bp, synthetic construct
  misc_feature 1..20: note = chemically synthesized
  source 1..20: mol_type = other DNA
ccatatcagatacaaaatta

SEQ ID NO: 13662 - DNA, 20 bp, synthetic construct
  misc_feature 1..20: note = chemically synthesized
  source 1..20: mol_type = other DNA
ttagagatgcaaaaaatctt

SEQ ID NO: 13663 - DNA, 20 bp, synthetic construct
  misc_feature 1..20: note = chemically synthesized
  source 1..20: mol_type = other DNA
tagagatgcaaaaaatcttg

SEQ ID NO: 13664 - DNA, 20 bp, synthetic construct
  misc_feature 1..20: note = chemically synthesized
  source 1..20: mol_type = other DNA
gactttcccaatcaacttgc

SEQ ID NO: 13665 - DNA, 20 bp, synthetic construct
  misc_feature 1..20: note = chemically synthesized
  source 1..20: mol_type = other DNA
actttcccaatcaacttgct

SEQ ID NO: 13666 - DNA, 20 bp, synthetic construct
  misc_feature 1..20: note = chemically synthesized
  source 1..20: mol_type = other DNA
ctttcccaatcaacttgcta

SEQ ID NO: 13667 - DNA, 20 bp, synthetic construct
  misc_feature 1..20: note = chemically synthesized
  source 1..20: mol_type = other DNA
acccttcattcccatgcatt

SEQ ID NO: 13668 - DNA, 20 bp, synthetic construct
  misc_feature 1..20: note = chemically synthesized
  source 1..20: mol_type = other DNA
gaaccaatgcttacctgccc

SEQ ID NO: 13669 - DNA, 20 bp, synthetic construct
  misc_feature 1..20: note = chemically synthesized
  source 1..20: mol_type = other DNA
aaccaatgcttacctgccca

SEQ ID NO: 13670 - DNA, 20 bp, synthetic construct
  misc_feature 1..20: note = chemically synthesized
  source 1..20: mol_type = other DNA
cctgcccaaggcttcacctc

SEQ ID NO: 13671 - DNA, 20 bp, synthetic construct
  misc_feature 1..20: note = chemically synthesized
  source 1..20: mol_type = other DNA
tccacattcatcttgctcca

SEQ ID NO: 13672 - DNA, 20 bp, synthetic construct
  misc_feature 1..20: note = chemically synthesized
  source 1..20: mol_type = other DNA
ccacattcatcttgctccac

SEQ ID NO: 13673 - DNA, 20 bp, synthetic construct
  misc_feature 1..20: note = chemically synthesized
  source 1..20: mol_type = other DNA
attcatcttgctccacaggc

SEQ ID NO: 13674 - DNA, 20 bp, synthetic construct
  misc_feature 1..20: note = chemically synthesized
  source 1..20: mol_type = other DNA
cttgctccacaggctagtga

SEQ ID NO: 13675 - DNA, 20 bp, synthetic construct
  misc_feature 1..20: note = chemically synthesized
  source 1..20: mol_type = other DNA
gctccacaggctagtgacgg

SEQ ID NO: 13676 - DNA, 20 bp, synthetic construct
  misc_feature 1..20: note = chemically synthesized
  source 1..20: mol_type = other DNA
agtgacggcagccttctcct

SEQ ID NO: 13677 - DNA, 20 bp, synthetic construct
  misc_feature 1..20: note = chemically synthesized
  source 1..20: mol_type = other DNA
gacggcagccttctcctcag

SEQ ID NO: 13678 - DNA, 20 bp, synthetic construct
  misc_feature 1..20: note = chemically synthesized
  source 1..20: mol_type = other DNA
agtaaaatgcaccatgatgc

SEQ ID NO: 13679 - DNA, 20 bp, synthetic construct
  misc_feature 1..20: note = chemically synthesized
  source 1..20: mol_type = other DNA
gtaaaatgcaccatgatgcc

SEQ ID NO: 13680 - DNA, 20 bp, synthetic construct
  misc_feature 1..20: note = chemically synthesized
  source 1..20: mol_type = other DNA
tgcaccatgatgccaggcct

SEQ ID NO: 13681 - DNA, 20 bp, synthetic construct
  misc_feature 1..20: note = chemically synthesized
  source 1..20: mol_type = other DNA
caccatgatgccaggcctga

SEQ ID NO: 13682 - DNA, 20 bp, synthetic construct
  misc_feature 1..20: note = chemically synthesized
  source 1..20: mol_type = other DNA
tgccaggcctgagagcttgc

SEQ ID NO: 13683 - DNA, 20 bp, synthetic construct
  misc_feature 1..20: note = chemically synthesized
  source 1..20: mol_type = other DNA
tgagagcttgctagtgattg

SEQ ID NO: 13684 - DNA, 20 bp, synthetic construct
  misc_feature 1..20: note = chemically synthesized
  source 1..20: mol_type = other DNA
gctagtgattgcagctgtgt

SEQ ID NO: 13685 - DNA, 20 bp, synthetic construct
  misc_feature 1..20: note = chemically synthesized
  source 1..20: mol_type = other DNA
agtgattgcagctgtgtcgg

SEQ ID NO: 13686 - DNA, 20 bp, synthetic construct
  misc_feature 1..20: note = chemically synthesized
  source 1..20: mol_type = other DNA
gattgcagctgtgtcggaag

SEQ ID NO: 13687 - DNA, 20 bp, synthetic construct
  misc_feature 1..20: note = chemically synthesized
  source 1..20: mol_type = other DNA
tgtgctgctgcctctctgtc

SEQ ID NO: 13688 - DNA, 20 bp, synthetic construct
  misc_feature 1..20: note = chemically synthesized
  source 1..20: mol_type = other DNA
ccttttattctttactgccg

SEQ ID NO: 13689 - DNA, 20 bp, synthetic construct
  misc_feature 1..20: note = chemically synthesized
  source 1..20: mol_type = other DNA
attctttactgccgaagttc

SEQ ID NO: 13690 - DNA, 20 bp, synthetic construct
  misc_feature 1..20: note = chemically synthesized
  source 1..20: mol_type = other DNA
ttctggccccctgttctcca

SEQ ID NO: 13691 - DNA, 20 bp, synthetic construct
  misc_feature 1..20: note = chemically synthesized
  source 1..20: mol_type = other DNA
ctgttctccatggtacttaa

SEQ ID NO: 13692 - DNA, 20 bp, synthetic construct
  misc_feature 1..20: note = chemically synthesized
  source 1..20: mol_type = other DNA
ccatggtacttaaaagtcat

SEQ ID NO: 13693 - DNA, 20 bp, synthetic construct
  misc_feature 1..20: note = chemically synthesized
  source 1..20: mol_type = other DNA
gtacttaaaagtcattggtc

SEQ ID NO: 13694 - DNA, 20 bp, synthetic construct
  misc_feature 1..20: note = chemically synthesized
  source 1..20: mol_type = other DNA
tacttaaaagtcattggtca

SEQ ID NO: 13695 - DNA, 20 bp, synthetic construct
  misc_feature 1..20: note = chemically synthesized
  source 1..20: mol_type = other DNA
caaggctgacctgtgtccct

SEQ ID NO: 13696 - DNA, 20 bp, synthetic construct
  misc_feature 1..20: note = chemically synthesized
  source 1..20: mol_type = other DNA
aaggctgacctgtgtccctc

SEQ ID NO: 13697 - DNA, 20 bp, synthetic construct
  misc_feature 1..20: note = chemically synthesized
  source 1..20: mol_type = other DNA
aggctgacctgtgtccctca

SEQ ID NO: 13698 - DNA, 20 bp, synthetic construct
  misc_feature 1..20: note = chemically synthesized
  source 1..20: mol_type = other DNA
ggctgacctgtgtccctcag

SEQ ID NO: 13699 - DNA, 20 bp, synthetic construct
  misc_feature 1..20: note = chemically synthesized
  source 1..20: mol_type = other DNA
tgacctgtgtccctcagggg

SEQ ID NO: 13700 - DNA, 20 bp, synthetic construct
  misc_feature 1..20: note = chemically synthesized
  source 1..20: mol_type = other DNA
acctgtgtccctcaggggtg

SEQ ID NO: 13701 - DNA, 20 bp, synthetic construct
  misc_feature 1..20: note = chemically synthesized
  source 1..20: mol_type = other DNA
gtgtccctcaggggtggagt

SEQ ID NO: 13702 - DNA, 20 bp, synthetic construct
  misc_feature 1..20: note = chemically synthesized
  source 1..20: mol_type = other DNA
tgtccctcaggggtggagtc

SEQ ID NO: 13703 - DNA, 20 bp, synthetic construct
  misc_feature 1..20: note = chemically synthesized
  source 1..20: mol_type = other DNA
ctcaggggtggagtcaggtc

SEQ ID NO: 13704 - DNA, 20 bp, synthetic construct
  misc_feature 1..20: note = chemically synthesized
  source 1..20: mol_type = other DNA
caggggtggagtcaggtccg

SEQ ID NO: 13705 - DNA, 20 bp, synthetic construct
  misc_feature 1..20: note = chemically synthesized
  source 1..20: mol_type = other DNA
ggggtggagtcaggtccgga

SEQ ID NO: 13706 - DNA, 20 bp, synthetic construct
  misc_feature 1..20: note = chemically synthesized
  source 1..20: mol_type = other DNA
gggtggagtcaggtccggag

SEQ ID NO: 13707 - DNA, 20 bp, synthetic construct
  misc_feature 1..20: note = chemically synthesized
  source 1..20: mol_type = other DNA
ggtggagtcaggtccggaga

SEQ ID NO: 13708 - DNA, 20 bp, synthetic construct
  misc_feature 1..20: note = chemically synthesized
  source 1..20: mol_type = other DNA
gagtcaggtccggagagggt

SEQ ID NO: 13709 - DNA, 20 bp, synthetic construct
  misc_feature 1..20: note = chemically synthesized
  source 1..20: mol_type = other DNA
tcaggtccggagagggtcag

SEQ ID NO: 13710 - DNA, 20 bp, synthetic construct
  misc_feature 1..20: note = chemically synthesized
  source 1..20: mol_type = other DNA
ccggagagggtcagcagtga

SEQ ID NO: 13711 - DNA, 20 bp, synthetic construct
  misc_feature 1..20: note = chemically synthesized
  source 1..20: mol_type = other DNA
agagggtcagcagtgatgga

SEQ ID NO: 13712 - DNA, 20 bp, synthetic construct
  misc_feature 1..20: note = chemically synthesized
  source 1..20: mol_type = other DNA
agcagtgatggatggacact

SEQ ID NO: 13713 - DNA, 20 bp, synthetic construct
  misc_feature 1..20: note = chemically synthesized
  source 1..20: mol_type = other DNA
aagtttgtgataatgtgtgc

SEQ ID NO: 13714 - DNA, 20 bp, synthetic construct
  misc_feature 1..20: note = chemically synthesized
  source 1..20: mol_type = other DNA
gataatgtgtgctggatcct

SEQ ID NO: 13715 - DNA, 20 bp, synthetic construct
  misc_feature 1..20: note = chemically synthesized
  source 1..20: mol_type = other DNA
ataatgtgtgctggatcctg

SEQ ID NO: 13716 - DNA, 20 bp, synthetic construct
  misc_feature 1..20: note = chemically synthesized
  source 1..20: mol_type = other DNA
atcctgaggctcttttttgt

SEQ ID NO: 13717 - DNA, 20 bp, synthetic construct
  misc_feature 1..20: note = chemically synthesized
  source 1..20: mol_type = other DNA
ctctcccattctccttttcc

SEQ ID NO: 13718 - DNA, 20 bp, synthetic construct
  misc_feature 1..20: note = chemically synthesized
  source 1..20: mol_type = other DNA
cccattctccttttccaaga

SEQ ID NO: 13719 - DNA, 20 bp, synthetic construct
  misc_feature 1..20: note = chemically synthesized
  source 1..20: mol_type = other DNA
ttccaagaaagcctcatata

SEQ ID NO: 13720 - DNA, 20 bp, synthetic construct
  misc_feature 1..20: note = chemically synthesized
  source 1..20: mol_type = other DNA
tccaagaaagcctcatataa

SEQ ID NO: 13721 - DNA, 20 bp, synthetic construct
  misc_feature 1..20: note = chemically synthesized
  source 1..20: mol_type = other DNA
caagaaagcctcatataaag

SEQ ID NO: 13722 - DNA, 20 bp, synthetic construct
  misc_feature 1..20: note = chemically synthesized
  source 1..20: mol_type = other DNA
taaaggagcaaatctcaaaa

SEQ ID NO: 13723 - DNA, 20 bp, synthetic construct
  misc_feature 1..20: note = chemically synthesized
  source 1..20: mol_type = other DNA
aaaggagcaaatctcaaaat

SEQ ID NO: 13724 - DNA, 20 bp, synthetic construct
  misc_feature 1..20: note = chemically synthesized
  source 1..20: mol_type = other DNA
aaatctcaaaataggaaaaa

SEQ ID NO: 13725 - DNA, 20 bp, synthetic construct
  misc_feature 1..20: note = chemically synthesized
  source 1..20: mol_type = other DNA
caaaataggaaaaaaagttt

SEQ ID NO: 13726 - DNA, 20 bp, synthetic construct
  misc_feature 1..20: note = chemically synthesized
  source 1..20: mol_type = other DNA
aggaaaaaaagtttcagcca

SEQ ID NO: 13727 - DNA, 20 bp, synthetic construct
  misc_feature 1..20: note = chemically synthesized
  source 1..20: mol_type = other DNA
cgcatttaacatttgcctta

SEQ ID NO: 13728 - DNA, 20 bp, synthetic construct
  misc_feature 1..20: note = chemically synthesized
  source 1..20: mol_type = other DNA
gcatttaacatttgccttaa

SEQ ID NO: 13729 - DNA, 20 bp, synthetic construct
  misc_feature 1..20: note = chemically synthesized
  source 1..20: mol_type = other DNA
tttaacatttgccttaaagg

SEQ ID NO: 13730 - DNA, 20 bp, synthetic construct
  misc_feature 1..20: note = chemically synthesized
  source 1..20: mol_type = other DNA
atttgccttaaaggtggtga

SEQ ID NO: 13731 - DNA, 20 bp, synthetic construct
  misc_feature 1..20: note = chemically synthesized
  source 1..20: mol_type = other DNA
ggtggtgacagtgacaaaaa

SEQ ID NO: 13732 - DNA, 20 bp, synthetic construct
  misc_feature 1..20: note = chemically synthesized
  source 1..20: mol_type = other DNA
gtggtgacagtgacaaaaac

SEQ ID NO: 13733 - DNA, 20 bp, synthetic construct
  misc_feature 1..20: note = chemically synthesized
  source 1..20: mol_type = other DNA
tggtgacagtgacaaaaaca

SEQ ID NO: 13734 - DNA, 20 bp, synthetic construct
  misc_feature 1..20: note = chemically synthesized
  source 1..20: mol_type = other DNA
acagtgacaaaaacagggcc

SEQ ID NO: 13735 - DNA, 20 bp, synthetic construct
  misc_feature 1..20: note = chemically synthesized
  source 1..20: mol_type = other DNA
cagtgacaaaaacagggcca

SEQ ID NO: 13736 - DNA, 20 bp, synthetic construct
  misc_feature 1..20: note = chemically synthesized
  source 1..20: mol_type = other DNA
acaaaaacagggccaaggaa

SEQ ID NO: 13737 - DNA, 20 bp, synthetic construct
  misc_feature 1..20: note = chemically synthesized
  source 1..20: mol_type = other DNA
gggccaaggaaaagaaaata

SEQ ID NO: 13738 - DNA, 20 bp, synthetic construct
  misc_feature 1..20: note = chemically synthesized
  source 1..20: mol_type = other DNA
agaaaataaagctgttaaaa

SEQ ID NO: 13739 - DNA, 20 bp, synthetic construct
  misc_feature 1..20: note = chemically synthesized
  source 1..20: mol_type = other DNA
tgttaaaacagaatctcacc

SEQ ID NO: 13740 - DNA, 20 bp, synthetic construct
  misc_feature 1..20: note = chemically synthesized
  source 1..20: mol_type = other DNA
aacagaatctcacccagttc

SEQ ID NO: 13741 - DNA, 20 bp, synthetic construct
  misc_feature 1..20: note = chemically synthesized
  source 1..20: mol_type = other DNA
cacccagttctagctctctt

SEQ ID NO: 13742 - DNA, 20 bp, synthetic construct
  misc_feature 1..20: note = chemically synthesized
  source 1..20: mol_type = other DNA
acccagttctagctctctta

SEQ ID NO: 13743 - DNA, 20 bp, synthetic construct
  misc_feature 1..20: note = chemically synthesized
  source 1..20: mol_type = other DNA
ccagttctagctctcttaag

SEQ ID NO: 13744 - DNA, 20 bp, synthetic construct
  misc_feature 1..20: note = chemically synthesized
  source 1..20: mol_type = other DNA
taaacaaaacttctgtacct

SEQ ID NO: 13745 - DNA, 20 bp, synthetic construct
  misc_feature 1..20: note = chemically synthesized
  source 1..20: mol_type = other DNA
cttctgtaccttagtttctc

SEQ ID NO: 13746 - DNA, 20 bp, synthetic construct
  misc_feature 1..20: note = chemically synthesized
  source 1..20: mol_type = other DNA
ttctgtaccttagtttctct

SEQ ID NO: 13747 - DNA, 20 bp, synthetic construct
  misc_feature 1..20: note = chemically synthesized
  source 1..20: mol_type = other DNA
tctgtaccttagtttctcta

SEQ ID NO: 13748 - DNA, 20 bp, synthetic construct
  misc_feature 1..20: note = chemically synthesized
  source 1..20: mol_type = other DNA
tgtaccttagtttctctagg

SEQ ID NO: 13749 - DNA, 20 bp, synthetic construct
  misc_feature 1..20: note = chemically synthesized
  source 1..20: mol_type = other DNA
agggagacaaaaaccgtaca

SEQ ID NO: 13750 - DNA, 20 bp, synthetic construct
  misc_feature 1..20: note = chemically synthesized
  source 1..20: mol_type = other DNA
aaaccgtacatagttccttc

SEQ ID NO: 13751 - DNA, 20 bp, synthetic construct
  misc_feature 1..20: note = chemically synthesized
  source 1..20: mol_type = other DNA
agttccttctagaaactgaa

SEQ ID NO: 13752 - DNA, 20 bp, synthetic construct
  misc_feature 1..20: note = chemically synthesized
  source 1..20: mol_type = other DNA
cttctagaaactgaacagaa

SEQ ID NO: 13753 - DNA, 20 bp, synthetic construct
  misc_feature 1..20: note = chemically synthesized
  source 1..20: mol_type = other DNA
tagaaactgaacagaatagc

SEQ ID NO: 13754 - DNA, 20 bp, synthetic construct
  misc_feature 1..20: note = chemically synthesized
  source 1..20: mol_type = other DNA
aaactgaacagaatagcaag

SEQ ID NO: 13755 - DNA, 20 bp, synthetic construct
  misc_feature 1..20: note = chemically synthesized
  source 1..20: mol_type = other DNA
acagaatagcaagtagtcca

SEQ ID NO: 13756 - DNA, 20 bp, synthetic construct
  misc_feature 1..20: note = chemically synthesized
  source 1..20: mol_type = other DNA
gaatagcaagtagtccacag

SEQ ID NO: 13757 - DNA, 20 bp, synthetic construct
  misc_feature 1..20: note = chemically synthesized
  source 1..20: mol_type = other DNA
aatagcaagtagtccacagt

SEQ ID NO: 13758 - DNA, 20 bp, synthetic construct
  misc_feature 1..20: note = chemically synthesized
  source 1..20: mol_type = other DNA
agtagtccacagtgggacta

SEQ ID NO: 13759 - DNA, 20 bp, synthetic construct
  misc_feature 1..20: note = chemically synthesized
  source 1..20: mol_type = other DNA
ggactaaagccttaatccca

SEQ ID NO: 13760 - DNA, 20 bp, synthetic construct
  misc_feature 1..20: note = chemically synthesized
  source 1..20: mol_type = other DNA
aaagccttaatcccaaagta

SEQ ID NO: 13761 - DNA, 20 bp, synthetic construct
  misc_feature 1..20: note = chemically synthesized
  source 1..20: mol_type = other DNA
aatcccaaagtacagtacct

SEQ ID NO: 13762 - DNA, 20 bp, synthetic construct
  misc_feature 1..20: note = chemically synthesized
  source 1..20: mol_type = other DNA
atcccaaagtacagtacctt

SEQ ID NO: 13763 - DNA, 20 bp, synthetic construct
  misc_feature 1..20: note = chemically synthesized
  source 1..20: mol_type = other DNA
tcccaaagtacagtaccttg

SEQ ID NO: 13764 - DNA, 20 bp, synthetic construct
  misc_feature 1..20: note = chemically synthesized
  source 1..20: mol_type = other DNA
agtaccttggggtgattccc

SEQ ID NO: 13765 - DNA, 20 bp, synthetic construct
  misc_feature 1..20: note = chemically synthesized
  source 1..20: mol_type = other DNA
taccttggggtgattcccta

SEQ ID NO: 13766 - DNA, 20 bp, synthetic construct
  misc_feature 1..20: note = chemically synthesized
  source 1..20: mol_type = other DNA
ccttggggtgattccctaga

SEQ ID NO: 13767 - DNA, 20 bp, synthetic construct
  misc_feature 1..20: note = chemically synthesized
  source 1..20: mol_type = other DNA
cttggggtgattccctagag

SEQ ID NO: 13768 - DNA, 20 bp, synthetic construct
  misc_feature 1..20: note = chemically synthesized
  source 1..20: mol_type = other DNA
gggtgattccctagagagga

SEQ ID NO: 13769 - DNA, 20 bp, synthetic construct
  misc_feature 1..20: note = chemically synthesized
  source 1..20: mol_type = other DNA
gattccctagagaggacaga

SEQ ID NO: 13770 - DNA, 20 bp, synthetic construct
  misc_feature 1..20: note = chemically synthesized
  source 1..20: mol_type = other DNA
cctagagaggacagacagaa

SEQ ID NO: 13771 - DNA, 20 bp, synthetic construct
  misc_feature 1..20: note = chemically synthesized
  source 1..20: mol_type = other DNA
cagacagaaaagattacatc

SEQ ID NO: 13772 - DNA, 20 bp, synthetic construct
  misc_feature 1..20: note = chemically synthesized
  source 1..20: mol_type = other DNA
aagattacatccagtgcttc

SEQ ID NO: 13773 - DNA, 20 bp, synthetic construct
  misc_feature 1..20: note = chemically synthesized
  source 1..20: mol_type = other DNA
gattacatccagtgcttcca

SEQ ID NO: 13774 - DNA, 20 bp, synthetic construct
  misc_feature 1..20: note = chemically synthesized
  source 1..20: mol_type = other DNA
ttttcatttctctatgacca

SEQ ID NO: 13775 - DNA, 20 bp, synthetic construct
  misc_feature 1..20: note = chemically synthesized
  source 1..20: mol_type = other DNA
tttcatttctctatgaccac

SEQ ID NO: 13776 - DNA, 20 bp, synthetic construct
  misc_feature 1..20: note = chemically synthesized
  source 1..20: mol_type = other DNA
ttcatttctctatgaccaca

SEQ ID NO: 13777 - DNA, 20 bp, synthetic construct
  misc_feature 1..20: note = chemically synthesized
  source 1..20: mol_type = other DNA
tcatttctctatgaccacag

SEQ ID NO: 13778 - DNA, 20 bp, synthetic construct
  misc_feature 1..20: note = chemically synthesized
  source 1..20: mol_type = other DNA
tctatgaccacaggggacat

SEQ ID NO: 13779 - DNA, 20 bp, synthetic construct
  misc_feature 1..20: note = chemically synthesized
  source 1..20: mol_type = other DNA
ggggacattggctactttgt

SEQ ID NO: 13780 - DNA, 20 bp, synthetic construct
  misc_feature 1..20: note = chemically synthesized
  source 1..20: mol_type = other DNA
gctactttgtgagtattgcc

SEQ ID NO: 13781 - DNA, 20 bp, synthetic construct
  misc_feature 1..20: note = chemically synthesized
  source 1..20: mol_type = other DNA
ctactttgtgagtattgcct

SEQ ID NO: 13782 - DNA, 20 bp, synthetic construct
  misc_feature 1..20: note = chemically synthesized
  source 1..20: mol_type = other DNA
tactttgtgagtattgcctg

SEQ ID NO: 13783 - DNA, 20 bp, synthetic construct
  misc_feature 1..20: note = chemically synthesized
  source 1..20: mol_type = other DNA
gtcctgcttatacttctcac

SEQ ID NO: 13784 - DNA, 20 bp, synthetic construct
  misc_feature 1..20: note = chemically synthesized
  source 1..20: mol_type = other DNA
tcctgcttatacttctcact

SEQ ID NO: 13785 - DNA, 20 bp, synthetic construct
  misc_feature 1..20: note = chemically synthesized
  source 1..20: mol_type = other DNA
tgcttatacttctcactggg

SEQ ID NO: 13786 - DNA, 20 bp, synthetic construct
  misc_feature 1..20: note = chemically synthesized
  source 1..20: mol_type = other DNA
gcttatacttctcactggga

SEQ ID NO: 13787 - DNA, 20 bp, synthetic construct
  misc_feature 1..20: note = chemically synthesized
  source 1..20: mol_type = other DNA
cttatacttctcactgggaa

SEQ ID NO: 13788 - DNA, 20 bp, synthetic construct
  misc_feature 1..20: note = chemically synthesized
  source 1..20: mol_type = other DNA
tatacttctcactgggaagg

SEQ ID NO: 13789 - DNA, 20 bp, synthetic construct
  misc_feature 1..20: note = chemically synthesized
  source 1..20: mol_type = other DNA
ttctcactgggaagggagct

SEQ ID NO: 13790 - DNA, 20 bp, synthetic construct
  misc_feature 1..20: note = chemically synthesized
  source 1..20: mol_type = other DNA
tcactgggaagggagctgag

SEQ ID NO: 13791 - DNA, 20 bp, synthetic construct
  misc_feature 1..20: note = chemically synthesized
  source 1..20: mol_type = other DNA
taaaatcctaaaattattta

SEQ ID NO: 13792 - DNA, 20 bp, synthetic construct
  misc_feature 1..20: note = chemically synthesized
  source 1..20: mol_type = other DNA
atcctaaaattatttaaagc

SEQ ID NO: 13793 - DNA, 20 bp, synthetic construct
  misc_feature 1..20: note = chemically synthesized
  source 1..20: mol_type = other DNA
agccagaatttgtcatcaaa

SEQ ID NO: 13794 - DNA, 20 bp, synthetic construct
  misc_feature 1..20: note = chemically synthesized
  source 1..20: mol_type = other DNA
ccagaatttgtcatcaaaca

SEQ ID NO: 13795 - DNA, 20 bp, synthetic construct
  misc_feature 1..20: note = chemically synthesized
  source 1..20: mol_type = other DNA
ttgtcatcaaacagagaaaa

SEQ ID NO: 13796 - DNA, 20 bp, synthetic construct
  misc_feature 1..20: note = chemically synthesized
  source 1..20: mol_type = other DNA
aagtgaatcgatatattaat

SEQ ID NO: 13797 - DNA, 20 bp, synthetic construct
  misc_feature 1..20: note = chemically synthesized
  source 1..20: mol_type = other DNA
agtgaatcgatatattaatc

SEQ ID NO: 13798 - DNA, 20 bp, synthetic construct
  misc_feature 1..20: note = chemically synthesized
  source 1..20: mol_type = other DNA
aatcgatatattaatcaggc

SEQ ID NO: 13799 - DNA, 20 bp, synthetic construct
  misc_feature 1..20: note = chemically synthesized
  source 1..20: mol_type = other DNA
atcgatatattaatcaggct

SEQ ID NO: 13800 - DNA, 20 bp, synthetic construct
  misc_feature 1..20: note = chemically synthesized
  source 1..20: mol_type = other DNA
cgatatattaatcaggctag

SEQ ID NO: 13801 - DNA, 20 bp, synthetic construct
  misc_feature 1..20: note = chemically synthesized
  source 1..20: mol_type = other DNA
atattaatcaggctaggagt

SEQ ID NO: 13802 - DNA, 20 bp, synthetic construct
  misc_feature 1..20: note = chemically synthesized
  source 1..20: mol_type = other DNA
tattaatcaggctaggagtc

SEQ ID NO: 13803 - DNA, 20 bp, synthetic construct
  misc_feature 1..20: note = chemically synthesized
  source 1..20: mol_type = other DNA
attaatcaggctaggagtca

SEQ ID NO: 13804 - DNA, 20 bp, synthetic construct
  misc_feature 1..20: note = chemically synthesized
  source 1..20: mol_type = other DNA
gtcagggtatattattcctc

SEQ ID NO: 13805 - DNA, 20 bp, synthetic construct
  misc_feature 1..20: note = chemically synthesized
  source 1..20: mol_type = other DNA
tccccattttgatgacttgc

SEQ ID NO: 13806 - DNA, 20 bp, synthetic construct
  misc_feature 1..20: note = chemically synthesized
  source 1..20: mol_type = other DNA
tgacttgctagctctttact

SEQ ID NO: 13807 - DNA, 20 bp, synthetic construct
  misc_feature 1..20: note = chemically synthesized
  source 1..20: mol_type = other DNA
cttgctagctctttacttgg

SEQ ID NO: 13808 - DNA, 20 bp, synthetic construct
  misc_feature 1..20: note = chemically synthesized
  source 1..20: mol_type = other DNA
tgctagctctttacttggta

SEQ ID NO: 13809 - DNA, 20 bp, synthetic construct
  misc_feature 1..20: note = chemically synthesized
  source 1..20: mol_type = other DNA
ttacttggtagagctgaaac

SEQ ID NO: 13810 - DNA, 20 bp, synthetic construct
  misc_feature 1..20: note = chemically synthesized
  source 1..20: mol_type = other DNA
cttggtagagctgaaactgg

SEQ ID NO: 13811 - DNA, 20 bp, synthetic construct
  misc_feature 1..20: note = chemically synthesized
  source 1..20: mol_type = other DNA
gtagagctgaaactggaagt

SEQ ID NO: 13812 - DNA, 20 bp, synthetic construct
  misc_feature 1..20: note = chemically synthesized
  source 1..20: mol_type = other DNA
tagagctgaaactggaagtt

SEQ ID NO: 13813 - DNA, 20 bp, synthetic construct
  misc_feature 1..20: note = chemically synthesized
  source 1..20: mol_type = other DNA
aaactggaagttgggattta

SEQ ID NO: 13814 - DNA, 20 bp, synthetic construct
  misc_feature 1..20: note = chemically synthesized
  source 1..20: mol_type = other DNA
caattcgatccatgtgcctg

SEQ ID NO: 13815 - DNA, 20 bp, synthetic construct
  misc_feature 1..20: note = chemically synthesized
  source 1..20: mol_type = other DNA
ttgtcattatcctcatattt

SEQ ID NO: 13816 - DNA, 20 bp, synthetic construct
  misc_feature 1..20: note = chemically synthesized
  source 1..20: mol_type = other DNA
tatcctcatattttagaatc

SEQ ID NO: 13817 - DNA, 20 bp, synthetic construct
  misc_feature 1..20: note = chemically synthesized
  source 1..20: mol_type = other DNA
atcctcatattttagaatca

SEQ ID NO: 13818 - DNA, 20 bp, synthetic construct
  misc_feature 1..20: note = chemically synthesized
  source 1..20: mol_type = other DNA
agaatcaaggaataaattca

SEQ ID NO: 13819 - DNA, 20 bp, synthetic construct
  misc_feature 1..20: note = chemically synthesized
  source 1..20: mol_type = other DNA
ttatttaactatcaatgtga

SEQ ID NO: 13820 - DNA, 20 bp, synthetic construct
  misc_feature 1..20: note = chemically synthesized
  source 1..20: mol_type = other DNA
tttaactatcaatgtgacag

SEQ ID NO: 13821 - DNA, 20 bp, synthetic construct
  misc_feature 1..20: note = chemically synthesized
  source 1..20: mol_type = other DNA
aatgtgacagaagtaatgat

SEQ ID NO: 13822 - DNA, 20 bp, synthetic construct
  misc_feature 1..20: note = chemically synthesized
  source 1..20: mol_type = other DNA
atgtgacagaagtaatgatt

SEQ ID NO: 13823 - DNA, 20 bp, synthetic construct
  misc_feature 1..20: note = chemically synthesized
  source 1..20: mol_type = other DNA
tgtgacagaagtaatgattg

SEQ ID NO: 13824 - DNA, 20 bp, synthetic construct
  misc_feature 1..20: note = chemically synthesized
  source 1..20: mol_type = other DNA
gtgacagaagtaatgattgg

SEQ ID NO: 13825 - DNA, 20 bp, synthetic construct
  misc_feature 1..20: note = chemically synthesized
  source 1..20: mol_type = other DNA
agtaatgattgggggaataa

SEQ ID NO: 13826 - DNA, 20 bp, synthetic construct
  misc_feature 1..20: note = chemically synthesized
  source 1..20: mol_type = other DNA
aatgattgggggaataatag

SEQ ID NO: 13827 - DNA, 20 bp, synthetic construct
  misc_feature 1..20: note = chemically synthesized
  source 1..20: mol_type = other DNA
gattgggggaataatagaag

SEQ ID NO: 13828 - DNA, 20 bp, synthetic construct
  misc_feature 1..20: note = chemically synthesized
  source 1..20: mol_type = other DNA
ttgggggaataatagaagca

SEQ ID NO: 13829 - DNA, 20 bp, synthetic construct
  misc_feature 1..20: note = chemically synthesized
  source 1..20: mol_type = other DNA
aagcagagttccacaaattc

SEQ ID NO: 13830 - DNA, 20 bp, synthetic construct
  misc_feature 1..20: note = chemically synthesized
  source 1..20: mol_type = other DNA
cagcattgttaattctataa

SEQ ID NO: 13831 - DNA, 20 bp, synthetic construct
  misc_feature 1..20: note = chemically synthesized
  source 1..20: mol_type = other DNA
tcaccataatctcattgccc

SEQ ID NO: 13832 - DNA, 20 bp, synthetic construct
  misc_feature 1..20: note = chemically synthesized
  source 1..20: mol_type = other DNA
ataatctcattgccccagcc

SEQ ID NO: 13833 - DNA, 20 bp, synthetic construct
  misc_feature 1..20: note = chemically synthesized
  source 1..20: mol_type = other DNA
cccagcccagttcctccttc

SEQ ID NO: 13834 - DNA, 20 bp, synthetic construct
  misc_feature 1..20: note = chemically synthesized
  source 1..20: mol_type = other DNA
tttctttttttttttttttt

SEQ ID NO: 13835 - DNA, 20 bp, synthetic construct
  misc_feature 1..20: note = chemically synthesized
  source 1..20: mol_type = other DNA
ttttttttttttttttgaga

SEQ ID NO: 13836 - DNA, 20 bp, synthetic construct
  misc_feature 1..20: note = chemically synthesized
  source 1..20: mol_type = other DNA
ttttttttttttttgagacg

SEQ ID NO: 13837 - DNA, 20 bp, synthetic construct
  misc_feature 1..20: note = chemically synthesized
  source 1..20: mol_type = other DNA
acggagtctcactctgttgc

SEQ ID NO: 13838 - DNA, 20 bp, synthetic construct
  misc_feature 1..20: note = chemically synthesized
  source 1..20: mol_type = other DNA
gtctcactctgttgccagac

SEQ ID NO: 13839 - DNA, 20 bp, synthetic construct
  misc_feature 1..20: note = chemically synthesized
  source 1..20: mol_type = other DNA
ctcactctgttgccagactg

SEQ ID NO: 13840 - DNA, 20 bp, synthetic construct
  misc_feature 1..20: note = chemically synthesized
  source 1..20: mol_type = other DNA
gttgccagactggagtgcaa

SEQ ID NO: 13841 - DNA, 20 bp, synthetic construct
  misc_feature 1..20: note = chemically synthesized
  source 1..20: mol_type = other DNA
ggagtgcaatggcactatct

SEQ ID NO: 13842 - DNA, 20 bp, synthetic construct
  misc_feature 1..20: note = chemically synthesized
  source 1..20: mol_type = other DNA
tcactgcaaccttcgcctcc

SEQ ID NO: 13843 - DNA, 20 bp, synthetic construct
  misc_feature 1..20: note = chemically synthesized
  source 1..20: mol_type = other DNA
cactgcaaccttcgcctcct

SEQ ID NO: 13844 - DNA, 20 bp, synthetic construct
  misc_feature 1..20: note = chemically synthesized
  source 1..20: mol_type = other DNA
ttcaaacgattctcctgcct

SEQ ID NO: 13845 - DNA, 20 bp, synthetic construct
  misc_feature 1..20: note = chemically synthesized
  source 1..20: mol_type = other DNA
ttctcctgcctcagcctccc

SEQ ID NO: 13846 - DNA, 20 bp, synthetic construct
  misc_feature 1..20: note = chemically synthesized
  source 1..20: mol_type = other DNA
tcctgcctcagcctcccgag

SEQ ID NO: 13847 - DNA, 20 bp, synthetic construct
  misc_feature 1..20: note = chemically synthesized
  source 1..20: mol_type = other DNA
gcctcagcctcccgagcagc

SEQ ID NO: 13848 - DNA, 20 bp, synthetic construct
  misc_feature 1..20: note = chemically synthesized
  source 1..20: mol_type = other DNA
cctcagcctcccgagcagct

SEQ ID NO: 13849 - DNA, 20 bp, synthetic construct
  misc_feature 1..20: note = chemically synthesized
  source 1..20: mol_type = other DNA
ctcccgagcagctgggacta

SEQ ID NO: 13850 - DNA, 20 bp, synthetic construct
  misc_feature 1..20: note = chemically synthesized
  source 1..20: mol_type = other DNA
tcccgagcagctgggactac

SEQ ID NO: 13851 - DNA, 20 bp, synthetic construct
  misc_feature 1..20: note = chemically synthesized
  source 1..20: mol_type = other DNA
caggcgcatgccaccatgcc

SEQ ID NO: 13852 - DNA, 20 bp, synthetic construct
  misc_feature 1..20: note = chemically synthesized
  source 1..20: mol_type = other DNA
ccagctaatttttttatttt

SEQ ID NO: 13853 - DNA, 20 bp, synthetic construct
  misc_feature 1..20: note = chemically synthesized
  source 1..20: mol_type = other DNA
gctaatttttttatttttag

SEQ ID NO: 13854 - DNA, 20 bp, synthetic construct
  misc_feature 1..20: note = chemically synthesized
  source 1..20: mol_type = other DNA
taatttttttatttttagta

SEQ ID NO: 13855 - DNA, 20 bp, synthetic construct
  misc_feature 1..20: note = chemically synthesized
  source 1..20: mol_type = other DNA
ttttttatttttagtagaga

SEQ ID NO: 13856 - DNA, 20 bp, synthetic construct
  misc_feature 1..20: note = chemically synthesized
  source 1..20: mol_type = other DNA
tttttatttttagtagagac

SEQ ID NO: 13857 - DNA, 20 bp, synthetic construct
  misc_feature 1..20: note = chemically synthesized
  source 1..20: mol_type = other DNA
cgggatttcaccatgtttgc

SEQ ID NO: 13858 - DNA, 20 bp, synthetic construct
  misc_feature 1..20: note = chemically synthesized
  source 1..20: mol_type = other DNA
gggatttcaccatgtttgcc

SEQ ID NO: 13859 - DNA, 20 bp, synthetic construct
  misc_feature 1..20: note = chemically synthesized
  source 1..20: mol_type = other DNA
tttcaccatgtttgccagga

SEQ ID NO: 13860 - DNA, 20 bp, synthetic construct
  misc_feature 1..20: note = chemically synthesized
  source 1..20: mol_type = other DNA
tctaccatttctttctccta

SEQ ID NO: 13861 - DNA, 20 bp, synthetic construct
  misc_feature 1..20: note = chemically synthesized
  source 1..20: mol_type = other DNA
tatggctccccttgccccac

SEQ ID NO: 13862 - DNA, 20 bp, synthetic construct
  misc_feature 1..20: note = chemically synthesized
  source 1..20: mol_type = other DNA
tccccttgccccaccagatc

SEQ ID NO: 13863 - DNA, 20 bp, synthetic construct
  misc_feature 1..20: note = chemically synthesized
  source 1..20: mol_type = other DNA
ccccttgccccaccagatct

SEQ ID NO: 13864 - DNA, 20 bp, synthetic construct
  misc_feature 1..20: note = chemically synthesized
  source 1..20: mol_type = other DNA
cctacaatttcctgtatgtt

SEQ ID NO: 13865 - DNA, 20 bp, synthetic construct
  misc_feature 1..20: note = chemically synthesized
  source 1..20: mol_type = other DNA
ctacaatttcctgtatgttc

SEQ ID NO: 13866 - DNA, 20 bp, synthetic construct
  misc_feature 1..20: note = chemically synthesized
  source 1..20: mol_type = other DNA
tttcctgtatgttcaggccc

SEQ ID NO: 13867 - DNA, 20 bp, synthetic construct
  misc_feature 1..20: note = chemically synthesized
  source 1..20: mol_type = other DNA
tcctgtatgttcaggcccta

SEQ ID NO: 13868 - DNA, 20 bp, synthetic construct
  misc_feature 1..20: note = chemically synthesized
  source 1..20: mol_type = other DNA
cctgtatgttcaggccctag

SEQ ID NO: 13869 - DNA, 20 bp, synthetic construct
  misc_feature 1..20: note = chemically synthesized
  source 1..20: mol_type = other DNA
ggttcttcgtctttttcact

SEQ ID NO: 13870 - DNA, 20 bp, synthetic construct
  misc_feature 1..20: note = chemically synthesized
  source 1..20: mol_type = other DNA
tcttcgtctttttcacttag

SEQ ID NO: 13871 - DNA, 20 bp, synthetic construct
  misc_feature 1..20: note = chemically synthesized
  source 1..20: mol_type = other DNA
gtctttttcacttagcagta

SEQ ID NO: 13872 - DNA, 20 bp, synthetic construct
  misc_feature 1..20: note = chemically synthesized
  source 1..20: mol_type = other DNA
cagtatggctcctgtctccc

SEQ ID NO: 13873 - DNA, 20 bp, synthetic construct
  misc_feature 1..20: note = chemically synthesized
  source 1..20: mol_type = other DNA
tggctcctgtctcccaagtc

SEQ ID NO: 13874 - DNA, 20 bp, synthetic construct
  misc_feature 1..20: note = chemically synthesized
  source 1..20: mol_type = other DNA
tctcccaagtcaagtgcctt

SEQ ID NO: 13875 - DNA, 20 bp, synthetic construct
  misc_feature 1..20: note = chemically synthesized
  source 1..20: mol_type = other DNA
ctcccaagtcaagtgccttt

SEQ ID NO: 13876 - DNA, 20 bp, synthetic construct
  misc_feature 1..20: note = chemically synthesized
  source 1..20: mol_type = other DNA
tcccaagtcaagtgcctttg

SEQ ID NO: 13877 - DNA, 20 bp, synthetic construct
  misc_feature 1..20: note = chemically synthesized
  source 1..20: mol_type = other DNA
ctttggggattccatattcc

SEQ ID NO: 13878 - DNA, 20 bp, synthetic construct
  misc_feature 1..20: note = chemically synthesized
  source 1..20: mol_type = other DNA
ttccatattccaagtttact

SEQ ID NO: 13879 - DNA, 20 bp, synthetic construct
  misc_feature 1..20: note = chemically synthesized
  source 1..20: mol_type = other DNA
ccatattccaagtttactaa

SEQ ID NO: 13880 - DNA, 20 bp, synthetic construct
  misc_feature 1..20: note = chemically synthesized
  source 1..20: mol_type = other DNA
aaaaaaaaaaaaaacacttg

SEQ ID NO: 13881 - DNA, 20 bp, synthetic construct
  misc_feature 1..20: note = chemically synthesized
  source 1..20: mol_type = other DNA
aaaaaaaaaacacttgtggc

SEQ ID NO: 13882 - DNA, 20 bp, synthetic construct
  misc_feature 1..20: note = chemically synthesized
  source 1..20: mol_type = other DNA
aaaaaacacttgtggcaagt

SEQ ID NO: 13883 - DNA, 20 bp, synthetic construct
  misc_feature 1..20: note = chemically synthesized
  source 1..20: mol_type = other DNA
ttgcttttctcccatgattc

SEQ ID NO: 13884 - DNA, 20 bp, synthetic construct
  misc_feature 1..20: note = chemically synthesized
  source 1..20: mol_type = other DNA
cttttctcccatgattccag

SEQ ID NO: 13885 - DNA, 20 bp, synthetic construct
  misc_feature 1..20: note = chemically synthesized
  source 1..20: mol_type = other DNA
tgcccaaattgttattattc

SEQ ID NO: 13886 - DNA, 20 bp, synthetic construct
  misc_feature 1..20: note = chemically synthesized
  source 1..20: mol_type = other DNA
gcccaaattgttattattcc

SEQ ID NO: 13887 - DNA, 20 bp, synthetic construct
  misc_feature 1..20: note = chemically synthesized
  source 1..20: mol_type = other DNA
atttctactccattttcttt

SEQ ID NO: 13888 - DNA, 20 bp, synthetic construct
  misc_feature 1..20: note = chemically synthesized
  source 1..20: mol_type = other DNA
ttcttttagctattaaccaa

SEQ ID NO: 13889 - DNA, 20 bp, synthetic construct
  misc_feature 1..20: note = chemically synthesized
  source 1..20: mol_type = other DNA
ttaaccaatggtatctttct

SEQ ID NO: 13890 - DNA, 20 bp, synthetic construct
  misc_feature 1..20: note = chemically synthesized
  source 1..20: mol_type = other DNA
tgagcatatattctaaccat

SEQ ID NO: 13891 - DNA, 20 bp, synthetic construct
  misc_feature 1..20: note = chemically synthesized
  source 1..20: mol_type = other DNA
attctaaccattggctaaca

SEQ ID NO: 13892 - DNA, 20 bp, synthetic construct
  misc_feature 1..20: note = chemically synthesized
  source 1..20: mol_type = other DNA
ttggctaacacagacaaaac

SEQ ID NO: 13893 - DNA, 20 bp, synthetic construct
  misc_feature 1..20: note = chemically synthesized
  source 1..20: mol_type = other DNA
tggctaacacagacaaaacc

SEQ ID NO: 13894 - DNA, 20 bp, synthetic construct
  misc_feature 1..20: note = chemically synthesized
  source 1..20: mol_type = other DNA
cctaaactttttttgtgtca

SEQ ID NO: 13895 - DNA, 20 bp, synthetic construct
  misc_feature 1..20: note = chemically synthesized
  source 1..20: mol_type = other DNA
ctaaactttttttgtgtcac

SEQ ID NO: 13896 - DNA, 20 bp, synthetic construct
  misc_feature 1..20: note = chemically synthesized
  source 1..20: mol_type = other DNA
actttttttgtgtcacaggc

SEQ ID NO: 13897 - DNA, 20 bp, synthetic construct
  misc_feature 1..20: note = chemically synthesized
  source 1..20: mol_type = other DNA
ttttgtgtcacaggccagtt

SEQ ID NO: 13898 - DNA, 20 bp, synthetic construct
  misc_feature 1..20: note = chemically synthesized
  source 1..20: mol_type = other DNA
tgtgtcacaggccagtttgg

SEQ ID NO: 13899 - DNA, 20 bp, synthetic construct
  misc_feature 1..20: note = chemically synthesized
  source 1..20: mol_type = other DNA
aggccagtttggcagactgt

SEQ ID NO: 13900 - DNA, 20 bp, synthetic construct
  misc_feature 1..20: note = chemically synthesized
  source 1..20: mol_type = other DNA
attgcatcaaataatataca

SEQ ID NO: 13901 - DNA, 20 bp, synthetic construct
  misc_feature 1..20: note = chemically synthesized
  source 1..20: mol_type = other DNA
ttgcatcaaataatatacat

SEQ ID NO: 13902 - DNA, 20 bp, synthetic construct
  misc_feature 1..20: note = chemically synthesized
  source 1..20: mol_type = other DNA
gcatcaaataatatacatag

SEQ ID NO: 13903 - DNA, 20 bp, synthetic construct
  misc_feature 1..20: note = chemically synthesized
  source 1..20: mol_type = other DNA
ataatatacataggagtgct

SEQ ID NO: 13904 - DNA, 20 bp, synthetic construct
  misc_feature 1..20: note = chemically synthesized
  source 1..20: mol_type = other DNA
ttacactgaaatatcattat

SEQ ID NO: 13905 - DNA, 20 bp, synthetic construct
  misc_feature 1..20: note = chemically synthesized
  source 1..20: mol_type = other DNA
gacatcaaacattacatttg

SEQ ID NO: 13906 - DNA, 20 bp, synthetic construct
  misc_feature 1..20: note = chemically synthesized
  source 1..20: mol_type = other DNA
caaacattacatttgtggta

SEQ ID NO: 13907 - DNA, 20 bp, synthetic construct
  misc_feature 1..20: note = chemically synthesized
  source 1..20: mol_type = other DNA
ttatatttgcttctttatga

SEQ ID NO: 13908 - DNA, 20 bp, synthetic construct
  misc_feature 1..20: note = chemically synthesized
  source 1..20: mol_type = other DNA
ttgcttctttatgaaagcat

SEQ ID NO: 13909 - DNA, 20 bp, synthetic construct
  misc_feature 1..20: note = chemically synthesized
  source 1..20: mol_type = other DNA
ctttatgaaagcattagatc

SEQ ID NO: 13910 - DNA, 20 bp, synthetic construct
  misc_feature 1..20: note = chemically synthesized
  source 1..20: mol_type = other DNA
tttatgaaagcattagatct

SEQ ID NO: 13911 - DNA, 20 bp, synthetic construct
  misc_feature 1..20: note = chemically synthesized
  source 1..20: mol_type = other DNA
gaaagcattagatctaggat

SEQ ID NO: 13912 - DNA, 20 bp, synthetic construct
  misc_feature 1..20: note = chemically synthesized
  source 1..20: mol_type = other DNA
aaagcattagatctaggatt

SEQ ID NO: 13913 - DNA, 20 bp, synthetic construct
  misc_feature 1..20: note = chemically synthesized
  source 1..20: mol_type = other DNA
tagatctaggattgggtcta

SEQ ID NO: 13914 - DNA, 20 bp, synthetic construct
  misc_feature 1..20: note = chemically synthesized
  source 1..20: mol_type = other DNA
attgggtctacagctacctt

SEQ ID NO: 13915 - DNA, 20 bp, synthetic construct
  misc_feature 1..20: note = chemically synthesized
  source 1..20: mol_type = other DNA
ctacagctaccttaagatcc

SEQ ID NO: 13916 - DNA, 20 bp, synthetic construct
  misc_feature 1..20: note = chemically synthesized
  source 1..20: mol_type = other DNA
cagctaccttaagatccaag

SEQ ID NO: 13917 - DNA, 20 bp, synthetic construct
  misc_feature 1..20: note = chemically synthesized
  source 1..20: mol_type = other DNA
ttaagatccaagtagtgatg

SEQ ID NO: 13918 - DNA, 20 bp, synthetic construct
  misc_feature 1..20: note = chemically synthesized
  source 1..20: mol_type = other DNA
tgaattaaaaatatctgcaa

SEQ ID NO: 13919 - DNA, 20 bp, synthetic construct
  misc_feature 1..20: note = chemically synthesized
  source 1..20: mol_type = other DNA
gaattaaaaatatctgcaat

SEQ ID NO: 13920 - DNA, 20 bp, synthetic construct
  misc_feature 1..20: note = chemically synthesized
  source 1..20: mol_type = other DNA
taaaaatatctgcaatgggc

SEQ ID NO: 13921 - DNA, 20 bp, synthetic construct
  misc_feature 1..20: note = chemically synthesized
  source 1..20: mol_type = other DNA
aaaaatatctgcaatgggcc

SEQ ID NO: 13922 - DNA, 20 bp, synthetic construct
  misc_feature 1..20: note = chemically synthesized
  source 1..20: mol_type = other DNA
tatctgcaatgggccaggcg

SEQ ID NO: 13923 - DNA, 20 bp, synthetic construct
  misc_feature 1..20: note = chemically synthesized
  source 1..20: mol_type = other DNA
ctgcaatgggccaggcgtgg

SEQ ID NO: 13924 - DNA, 20 bp, synthetic construct
  misc_feature 1..20: note = chemically synthesized
  source 1..20: mol_type = other DNA
gtggctcacacctataatcc

SEQ ID NO: 13925 - DNA, 20 bp, synthetic construct
  misc_feature 1..20: note = chemically synthesized
  source 1..20: mol_type = other DNA
cacctataatcccagcactt

SEQ ID NO: 13926 - DNA, 20 bp, synthetic construct
  misc_feature 1..20: note = chemically synthesized
  source 1..20: mol_type = other DNA
acctataatcccagcacttc

SEQ ID NO: 13927 - DNA, 20 bp, synthetic construct
  misc_feature 1..20: note = chemically synthesized
  source 1..20: mol_type = other DNA
ctataatcccagcacttcag

SEQ ID NO: 13928 - DNA, 20 bp, synthetic construct
  misc_feature 1..20: note = chemically synthesized
  source 1..20: mol_type = other DNA
tataatcccagcacttcagg

SEQ ID NO: 13929 - DNA, 20 bp, synthetic construct
  misc_feature 1..20: note = chemically synthesized
  source 1..20: mol_type = other DNA
tcccagcacttcaggaggcc

SEQ ID NO: 13930 - DNA, 20 bp, synthetic construct
  misc_feature 1..20: note = chemically synthesized
  source 1..20: mol_type = other DNA
cccagcacttcaggaggcca

SEQ ID NO: 13931 - DNA, 20 bp, synthetic construct
  misc_feature 1..20: note = chemically synthesized
  source 1..20: mol_type = other DNA
agcacttcaggaggccaagg

SEQ ID NO: 13932 - DNA, 20 bp, synthetic construct
  misc_feature 1..20: note = chemically synthesized
  source 1..20: mol_type = other DNA
gcacttcaggaggccaaggc

SEQ ID NO: 13933 - DNA, 20 bp, synthetic construct
  misc_feature 1..20: note = chemically synthesized
  source 1..20: mol_type = other DNA
cttcaggaggccaaggcggg

SEQ ID NO: 13934 - DNA, 20 bp, synthetic construct
  misc_feature 1..20: note = chemically synthesized
  source 1..20: mol_type = other DNA
ccaaggcgggcagatcatct

SEQ ID NO: 13935 - DNA, 20 bp, synthetic construct
  misc_feature 1..20: note = chemically synthesized
  source 1..20: mol_type = other DNA
caaggcgggcagatcatctg

SEQ ID NO: 13936 - DNA, 20 bp, synthetic construct
  misc_feature 1..20: note = chemically synthesized
  source 1..20: mol_type = other DNA
gcgggcagatcatctgaggt

SEQ ID NO: 13937 - DNA, 20 bp, synthetic construct
  misc_feature 1..20: note = chemically synthesized
  source 1..20: mol_type = other DNA
cgggcagatcatctgaggtc

SEQ ID NO: 13938 - DNA, 20 bp, synthetic construct
  misc_feature 1..20: note = chemically synthesized
  source 1..20: mol_type = other DNA
ggcagatcatctgaggtcag

SEQ ID NO: 13939 - DNA, 20 bp, synthetic construct
  misc_feature 1..20: note = chemically synthesized
  source 1..20: mol_type = other DNA
tcatctgaggtcaggagttc

SEQ ID NO: 13940 - DNA, 20 bp, synthetic construct
  misc_feature 1..20: note = chemically synthesized
  source 1..20: mol_type = other DNA
tgaggtcaggagttcaagac

SEQ ID NO: 13941 - DNA, 20 bp, synthetic construct
  misc_feature 1..20: note = chemically synthesized
  source 1..20: mol_type = other DNA
tcaggagttcaagaccagcc

SEQ ID NO: 13942 - DNA, 20 bp, synthetic construct
  misc_feature 1..20: note = chemically synthesized
  source 1..20: mol_type = other DNA
caagaccagcctggccaaca

SEQ ID NO: 13943 - DNA, 20 bp, synthetic construct
  misc_feature 1..20: note = chemically synthesized
  source 1..20: mol_type = other DNA
tctactaaaaatacaaaaat

SEQ ID NO: 13944 - DNA, 20 bp, synthetic construct
  misc_feature 1..20: note = chemically synthesized
  source 1..20: mol_type = other DNA
taaaaatacaaaaattagac

SEQ ID NO: 13945 - DNA, 20 bp, synthetic construct
  misc_feature 1..20: note = chemically synthesized
  source 1..20: mol_type = other DNA
atacaaaaattagactggca

SEQ ID NO: 13946 - DNA, 20 bp, synthetic construct
  misc_feature 1..20: note = chemically synthesized
  source 1..20: mol_type = other DNA
caaaaattagactggcatgg

SEQ ID NO: 13947 - DNA, 20 bp, synthetic construct
  misc_feature 1..20: note = chemically synthesized
  source 1..20: mol_type = other DNA
aaattagactggcatggtgg

SEQ ID NO: 13948 - DNA, 20 bp, synthetic construct
  misc_feature 1..20: note = chemically synthesized
  source 1..20: mol_type = other DNA
aattagactggcatggtggc

SEQ ID NO: 13949 - DNA, 20 bp, synthetic construct
  misc_feature 1..20: note = chemically synthesized
  source 1..20: mol_type = other DNA
tggcaggtgcctgtaatccc

SEQ ID NO: 13950 - DNA, 20 bp, synthetic construct
  misc_feature 1..20: note = chemically synthesized
  source 1..20: mol_type = other DNA
gcctgtaatccccagctact

SEQ ID NO: 13951 - DNA, 20 bp, synthetic construct
  misc_feature 1..20: note = chemically synthesized
  source 1..20: mol_type = other DNA
cctgtaatccccagctactc

SEQ ID NO: 13952 - DNA, 20 bp, synthetic construct
  misc_feature 1..20: note = chemically synthesized
  source 1..20: mol_type = other DNA
tgtaatccccagctactcag

SEQ ID NO: 13953 - DNA, 20 bp, synthetic construct
  misc_feature 1..20: note = chemically synthesized
  source 1..20: mol_type = other DNA
gtaatccccagctactcagg

SEQ ID NO: 13954 - DNA, 20 bp, synthetic construct
  misc_feature 1..20: note = chemically synthesized
  source 1..20: mol_type = other DNA
ccccagctactcaggaggcc

SEQ ID NO: 13955 - DNA, 20 bp, synthetic construct
  misc_feature 1..20: note = chemically synthesized
  source 1..20: mol_type = other DNA
cccagctactcaggaggcca

SEQ ID NO: 13956 - DNA, 20 bp, synthetic construct
  misc_feature 1..20: note = chemically synthesized
  source 1..20: mol_type = other DNA
agctactcaggaggccaagg

SEQ ID NO: 13957 - DNA, 20 bp, synthetic construct
  misc_feature 1..20: note = chemically synthesized
  source 1..20: mol_type = other DNA
gctactcaggaggccaaggc

SEQ ID NO: 13958 - DNA, 20 bp, synthetic construct
  misc_feature 1..20: note = chemically synthesized
  source 1..20: mol_type = other DNA
tactcaggaggccaaggcag

SEQ ID NO: 13959 - DNA, 20 bp, synthetic construct
  misc_feature 1..20: note = chemically synthesized
  source 1..20: mol_type = other DNA
gcaggagaattgcttgaatg

SEQ ID NO: 13960 - DNA, 20 bp, synthetic construct
  misc_feature 1..20: note = chemically synthesized
  source 1..20: mol_type = other DNA
caggagaattgcttgaatgc

SEQ ID NO: 13961 - DNA, 20 bp, synthetic construct
  misc_feature 1..20: note = chemically synthesized
  source 1..20: mol_type = other DNA
gagaattgcttgaatgcagg

SEQ ID NO: 13962 - DNA, 20 bp, synthetic construct
  misc_feature 1..20: note = chemically synthesized
  source 1..20: mol_type = other DNA
agaattgcttgaatgcagga

SEQ ID NO: 13963 - DNA, 20 bp, synthetic construct
  misc_feature 1..20: note = chemically synthesized
  source 1..20: mol_type = other DNA
gaattgcttgaatgcaggaa

SEQ ID NO: 13964 - DNA, 20 bp, synthetic construct
  misc_feature 1..20: note = chemically synthesized
  source 1..20: mol_type = other DNA
aattgcttgaatgcaggaag

SEQ ID NO: 13965 - DNA, 20 bp, synthetic construct
  misc_feature 1..20: note = chemically synthesized
  source 1..20: mol_type = other DNA
ttgcttgaatgcaggaaggg

SEQ ID NO: 13966 - DNA, 20 bp, synthetic construct
  misc_feature 1..20: note = chemically synthesized
  source 1..20: mol_type = other DNA
tgcttgaatgcaggaagggg

SEQ ID NO: 13967 - DNA, 20 bp, synthetic construct
  misc_feature 1..20: note = chemically synthesized
  source 1..20: mol_type = other DNA
aatgcaggaaggggaggttg

SEQ ID NO: 13968 - DNA, 20 bp, synthetic construct
  misc_feature 1..20: note = chemically synthesized
  source 1..20: mol_type = other DNA
caggaaggggaggttgcagt

SEQ ID NO: 13969 - DNA, 20 bp, synthetic construct
  misc_feature 1..20: note = chemically synthesized
  source 1..20: mol_type = other DNA
gaaatcatgccactgcactc

SEQ ID NO: 13970 - DNA, 20 bp, synthetic construct
  misc_feature 1..20: note = chemically synthesized
  source 1..20: mol_type = other DNA
catgccactgcactccagcc

SEQ ID NO: 13971 - DNA, 20 bp, synthetic construct
  misc_feature 1..20: note = chemically synthesized
  source 1..20: mol_type = other DNA
atgccactgcactccagcct

SEQ ID NO: 13972 - DNA, 20 bp, synthetic construct
  misc_feature 1..20: note = chemically synthesized
  source 1..20: mol_type = other DNA
tgcactccagcctgggcaat

SEQ ID NO: 13973 - DNA, 20 bp, synthetic construct
  misc_feature 1..20: note = chemically synthesized
  source 1..20: mol_type = other DNA
cactccagcctgggcaataa

SEQ ID NO: 13974 - DNA, 20 bp, synthetic construct
  misc_feature 1..20: note = chemically synthesized
  source 1..20: mol_type = other DNA
caaacaaaaacaaaaacaaa

SEQ ID NO: 13975 - DNA, 20 bp, synthetic construct
  misc_feature 1..20: note = chemically synthesized
  source 1..20: mol_type = other DNA
aaaaagatctgcaataccta

SEQ ID NO: 13976 - DNA, 20 bp, synthetic construct
  misc_feature 1..20: note = chemically synthesized
  source 1..20: mol_type = other DNA
gatctgcaatacctatggtg

SEQ ID NO: 13977 - DNA, 20 bp, synthetic construct
  misc_feature 1..20: note = chemically synthesized
  source 1..20: mol_type = other DNA
gtgtagtatgaaaatatctg

SEQ ID NO: 13978 - DNA, 20 bp, synthetic construct
  misc_feature 1..20: note = chemically synthesized
  source 1..20: mol_type = other DNA
ttctctttataactatgcaa

SEQ ID NO: 13979 - DNA, 20 bp, synthetic construct
  misc_feature 1..20: note = chemically synthesized
  source 1..20: mol_type = other DNA
tctctttataactatgcaat

SEQ ID NO: 13980 - DNA, 20 bp, synthetic construct
  misc_feature 1..20: note = chemically synthesized
  source 1..20: mol_type = other DNA
aggtactgatgatgtcattc

SEQ ID NO: 13981 - DNA, 20 bp, synthetic construct
  misc_feature 1..20: note = chemically synthesized
  source 1..20: mol_type = other DNA
tagtttgtcctttgcattca

SEQ ID NO: 13982 - DNA, 20 bp, synthetic construct
  misc_feature 1..20: note = chemically synthesized
  source 1..20: mol_type = other DNA
tttgtcctttgcattcaaag

SEQ ID NO: 13983 - DNA, 20 bp, synthetic construct
  misc_feature 1..20: note = chemically synthesized
  source 1..20: mol_type = other DNA
gtcctttgcattcaaagtag

SEQ ID NO: 13984 - DNA, 20 bp, synthetic construct
  misc_feature 1..20: note = chemically synthesized
  source 1..20: mol_type = other DNA
tagaagaaaatgctaaattt

SEQ ID NO: 13985 - DNA, 20 bp, synthetic construct
  misc_feature 1..20: note = chemically synthesized
  source 1..20: mol_type = other DNA
gctaaatttcagttacatgt

SEQ ID NO: 13986 - DNA, 20 bp, synthetic construct
  misc_feature 1..20: note = chemically synthesized
  source 1..20: mol_type = other DNA
gttacatgtaagtaaaaata

SEQ ID NO: 13987 - DNA, 20 bp, synthetic construct
  misc_feature 1..20: note = chemically synthesized
  source 1..20: mol_type = other DNA
tttttttctataaacttcac

SEQ ID NO: 13988 - DNA, 20 bp, synthetic construct
  misc_feature 1..20: note = chemically synthesized
  source 1..20: mol_type = other DNA
tataaacttcaccagccccc

SEQ ID NO: 13989 - DNA, 20 bp, synthetic construct
  misc_feature 1..20: note = chemically synthesized
  source 1..20: mol_type = other DNA
accagccccctagtgttctg

SEQ ID NO: 13990 - DNA, 20 bp, synthetic construct
  misc_feature 1..20: note = chemically synthesized
  source 1..20: mol_type = other DNA
ccctagtgttctgtggaccc

SEQ ID NO: 13991 - DNA, 20 bp, synthetic construct
  misc_feature 1..20: note = chemically synthesized
  source 1..20: mol_type = other DNA
tgttctgtggaccccagatt

SEQ ID NO: 13992 - DNA, 20 bp, synthetic construct
  misc_feature 1..20: note = chemically synthesized
  source 1..20: mol_type = other DNA
gaccccagattaagacttcc

SEQ ID NO: 13993 - DNA, 20 bp, synthetic construct
  misc_feature 1..20: note = chemically synthesized
  source 1..20: mol_type = other DNA
accccagattaagacttcct

SEQ ID NO: 13994 - DNA, 20 bp, synthetic construct
  misc_feature 1..20: note = chemically synthesized
  source 1..20: mol_type = other DNA
acttcctgggacaaaatata

SEQ ID NO: 13995 - DNA, 20 bp, synthetic construct
  misc_feature 1..20: note = chemically synthesized
  source 1..20: mol_type = other DNA
ctgggacaaaatatatagcc

SEQ ID NO: 13996 - DNA, 20 bp, synthetic construct
  misc_feature 1..20: note = chemically synthesized
  source 1..20: mol_type = other DNA
tgggacaaaatatatagcct

SEQ ID NO: 13997 - DNA, 20 bp, synthetic construct
  misc_feature 1..20: note = chemically synthesized
  source 1..20: mol_type = other DNA
gacaaaatatatagcctagg

SEQ ID NO: 13998 - DNA, 20 bp, synthetic construct
  misc_feature 1..20: note = chemically synthesized
  source 1..20: mol_type = other DNA
aatatatagcctaggaagac

SEQ ID NO: 13999 - DNA, 20 bp, synthetic construct
  misc_feature 1..20: note = chemically synthesized
  source 1..20: mol_type = other DNA
agcctaggaagacaagatcc

SEQ ID NO: 14000 - DNA, 20 bp, synthetic construct
  misc_feature 1..20: note = chemically synthesized
  source 1..20: mol_type = other DNA
gcctaggaagacaagatcct

SEQ ID NO: 14001 - DNA, 20 bp, synthetic construct
  misc_feature 1..20: note = chemically synthesized
  source 1..20: mol_type = other DNA
ggaagacaagatcctaggtt

SEQ ID NO: 14002 - DNA, 20 bp, synthetic construct
  misc_feature 1..20: note = chemically synthesized
  source 1..20: mol_type = other DNA
gacaagatcctaggtttgga

SEQ ID NO: 14003 - DNA, 20 bp, synthetic construct
  misc_feature 1..20: note = chemically synthesized
  source 1..20: mol_type = other DNA
tatttgatccactgaaataa

SEQ ID NO: 14004 - DNA, 20 bp, synthetic construct
  misc_feature 1..20: note = chemically synthesized
  source 1..20: mol_type = other DNA
tgaaataaaagaacaatgac

SEQ ID NO: 14005 - DNA, 20 bp, synthetic construct
  misc_feature 1..20: note = chemically synthesized
  source 1..20: mol_type = other DNA
aagaacaatgactagacaaa

SEQ ID NO: 14006 - DNA, 20 bp, synthetic construct
  misc_feature 1..20: note = chemically synthesized
  source 1..20: mol_type = other DNA
aacaatgactagacaaaaag

SEQ ID NO: 14007 - DNA, 20 bp, synthetic construct
  misc_feature 1..20: note = chemically synthesized
  source 1..20: mol_type = other DNA
tgactagacaaaaagcagct

SEQ ID NO: 14008 - DNA, 20 bp, synthetic construct
  misc_feature 1..20: note = chemically synthesized
  source 1..20: mol_type = other DNA
aaaagcagctcagctgcttg

SEQ ID NO: 14009 - DNA, 20 bp, synthetic construct
  misc_feature 1..20: note = chemically synthesized
  source 1..20: mol_type = other DNA
agctgcttgtagcttgaacc

SEQ ID NO: 14010 - DNA, 20 bp, synthetic construct
  misc_feature 1..20: note = chemically synthesized
  source 1..20: mol_type = other DNA
cttgtagcttgaaccaagct

SEQ ID NO: 14011 - DNA, 20 bp, synthetic construct
  misc_feature 1..20: note = chemically synthesized
  source 1..20: mol_type = other DNA
agcttgaaccaagctgagct

SEQ ID NO: 14012 - DNA, 20 bp, synthetic construct
  misc_feature 1..20: note = chemically synthesized
  source 1..20: mol_type = other DNA
ccaagctgagcttggctact

SEQ ID NO: 14013 - DNA, 20 bp, synthetic construct
  misc_feature 1..20: note = chemically synthesized
  source 1..20: mol_type = other DNA
aagctgagcttggctactca

SEQ ID NO: 14014 - DNA, 20 bp, synthetic construct
  misc_feature 1..20: note = chemically synthesized
  source 1..20: mol_type = other DNA
ctgagcttggctactcagag

SEQ ID NO: 14015 - DNA, 20 bp, synthetic construct
  misc_feature 1..20: note = chemically synthesized
  source 1..20: mol_type = other DNA
cttggctactcagagaagaa

SEQ ID NO: 14016 - DNA, 20 bp, synthetic construct
  misc_feature 1..20: note = chemically synthesized
  source 1..20: mol_type = other DNA
ctcagagaagaacagtcgtt

SEQ ID NO: 14017 - DNA, 20 bp, synthetic construct
  misc_feature 1..20: note = chemically synthesized
  source 1..20: mol_type = other DNA
ataattttttttaaccaatt

SEQ ID NO: 14018 - DNA, 20 bp, synthetic construct
  misc_feature 1..20: note = chemically synthesized
  source 1..20: mol_type = other DNA
ttttttaaccaattaagata

SEQ ID NO: 14019 - DNA, 20 bp, synthetic construct
  misc_feature 1..20: note = chemically synthesized
  source 1..20: mol_type = other DNA
aaccaattaagatacagctc

SEQ ID NO: 14020 - DNA, 20 bp, synthetic construct
  misc_feature 1..20: note = chemically synthesized
  source 1..20: mol_type = other DNA
accaattaagatacagctct

SEQ ID NO: 14021 - DNA, 20 bp, synthetic construct
  misc_feature 1..20: note = chemically synthesized
  source 1..20: mol_type = other DNA
aagatacagctctgggtttt

SEQ ID NO: 14022 - DNA, 20 bp, synthetic construct
  misc_feature 1..20: note = chemically synthesized
  source 1..20: mol_type = other DNA
agatacagctctgggttttc

SEQ ID NO: 14023 - DNA, 20 bp, synthetic construct
  misc_feature 1..20: note = chemically synthesized
  source 1..20: mol_type = other DNA
gatacagctctgggttttca

SEQ ID NO: 14024 - DNA, 20 bp, synthetic construct
  misc_feature 1..20: note = chemically synthesized
  source 1..20: mol_type = other DNA
atacagctctgggttttcag

SEQ ID NO: 14025 - DNA, 20 bp, synthetic construct
  misc_feature 1..20: note = chemically synthesized
  source 1..20: mol_type = other DNA
tacagctctgggttttcagg

SEQ ID NO: 14026 - DNA, 20 bp, synthetic construct
  misc_feature 1..20: note = chemically synthesized
  source 1..20: mol_type = other DNA
ttttcagggggaatttgcta

SEQ ID NO: 14027 - DNA, 20 bp, synthetic construct
  misc_feature 1..20: note = chemically synthesized
  source 1..20: mol_type = other DNA
gggaatttgctacagatcca

SEQ ID NO: 14028 - DNA, 20 bp, synthetic construct
  misc_feature 1..20: note = chemically synthesized
  source 1..20: mol_type = other DNA
tgctacagatccacagtatg

SEQ ID NO: 14029 - DNA, 20 bp, synthetic construct
  misc_feature 1..20: note = chemically synthesized
  source 1..20: mol_type = other DNA
gctacagatccacagtatga

SEQ ID NO: 14030 - DNA, 20 bp, synthetic construct
  misc_feature 1..20: note = chemically synthesized
  source 1..20: mol_type = other DNA
acagatccacagtatgaagg

SEQ ID NO: 14031 - DNA, 20 bp, synthetic construct
  misc_feature 1..20: note = chemically synthesized
  source 1..20: mol_type = other DNA
gatccacagtatgaaggcag

SEQ ID NO: 14032 - DNA, 20 bp, synthetic construct
  misc_feature 1..20: note = chemically synthesized
  source 1..20: mol_type = other DNA
tgaaggcagtggcccttcct

SEQ ID NO: 14033 - DNA, 20 bp, synthetic construct
  misc_feature 1..20: note = chemically synthesized
  source 1..20: mol_type = other DNA
cttcctcagaacttgaatgt

SEQ ID NO: 14034 - DNA, 20 bp, synthetic construct
  misc_feature 1..20: note = chemically synthesized
  source 1..20: mol_type = other DNA
ttcctcagaacttgaatgtg

SEQ ID NO: 14035 - DNA, 20 bp, synthetic construct
  misc_feature 1..20: note = chemically synthesized
  source 1..20: mol_type = other DNA
tcctcagaacttgaatgtga

SEQ ID NO: 14036 - DNA, 20 bp, synthetic construct
  misc_feature 1..20: note = chemically synthesized
  source 1..20: mol_type = other DNA
cagaacttgaatgtgagggt

SEQ ID NO: 14037 - DNA, 20 bp, synthetic construct
  misc_feature 1..20: note = chemically synthesized
  source 1..20: mol_type = other DNA
gtgagggtcagacattgcca

SEQ ID NO: 14038 - DNA, 20 bp, synthetic construct
  misc_feature 1..20: note = chemically synthesized
  source 1..20: mol_type = other DNA
gtcagacattgccaaagtcc

SEQ ID NO: 14039 - DNA, 20 bp, synthetic construct
  misc_feature 1..20: note = chemically synthesized
  source 1..20: mol_type = other DNA
tcagacattgccaaagtcca

SEQ ID NO: 14040 - DNA, 20 bp, synthetic construct
  misc_feature 1..20: note = chemically synthesized
  source 1..20: mol_type = other DNA
attgccaaagtccaaggaat

SEQ ID NO: 14041 - DNA, 20 bp, synthetic construct
  misc_feature 1..20: note = chemically synthesized
  source 1..20: mol_type = other DNA
ttgccaaagtccaaggaata

SEQ ID NO: 14042 - DNA, 20 bp, synthetic construct
  misc_feature 1..20: note = chemically synthesized
  source 1..20: mol_type = other DNA
aaagtccaaggaataaggac

SEQ ID NO: 14043 - DNA, 20 bp, synthetic construct
  misc_feature 1..20: note = chemically synthesized
  source 1..20: mol_type = other DNA
aagtccaaggaataaggacc

SEQ ID NO: 14044 - DNA, 20 bp, synthetic construct
  misc_feature 1..20: note = chemically synthesized
  source 1..20: mol_type = other DNA
gaataaggaccaggtatctc

SEQ ID NO: 14045 - DNA, 20 bp, synthetic construct
  misc_feature 1..20: note = chemically synthesized
  source 1..20: mol_type = other DNA
aataaggaccaggtatctca

SEQ ID NO: 14046 - DNA, 20 bp, synthetic construct
  misc_feature 1..20: note = chemically synthesized
  source 1..20: mol_type = other DNA
ggaccaggtatctcaaggcc

SEQ ID NO: 14047 - DNA, 20 bp, synthetic construct
  misc_feature 1..20: note = chemically synthesized
  source 1..20: mol_type = other DNA
accaggtatctcaaggccaa

SEQ ID NO: 14048 - DNA, 20 bp, synthetic construct
  misc_feature 1..20: note = chemically synthesized
  source 1..20: mol_type = other DNA
gtatctcaaggccaagagtt

SEQ ID NO: 14049 - DNA, 20 bp, synthetic construct
  misc_feature 1..20: note = chemically synthesized
  source 1..20: mol_type = other DNA
atctcaaggccaagagtttg

SEQ ID NO: 14050 - DNA, 20 bp, synthetic construct
  misc_feature 1..20: note = chemically synthesized
  source 1..20: mol_type = other DNA
aaggccaagagtttggagaa

SEQ ID NO: 14051 - DNA, 20 bp, synthetic construct
  misc_feature 1..20: note = chemically synthesized
  source 1..20: mol_type = other DNA
aggccaagagtttggagaac

SEQ ID NO: 14052 - DNA, 20 bp, synthetic construct
  misc_feature 1..20: note = chemically synthesized
  source 1..20: mol_type = other DNA
aacaggtttctccctaaaac

SEQ ID NO: 14053 - DNA, 20 bp, synthetic construct
  misc_feature 1..20: note = chemically synthesized
  source 1..20: mol_type = other DNA
tctccctaaaacaagcccta

SEQ ID NO: 14054 - DNA, 20 bp, synthetic construct
  misc_feature 1..20: note = chemically synthesized
  source 1..20: mol_type = other DNA
ctccctaaaacaagccctat

SEQ ID NO: 14055 - DNA, 20 bp, synthetic construct
  misc_feature 1..20: note = chemically synthesized
  source 1..20: mol_type = other DNA
atcccatcattcttcccatt

SEQ ID NO: 14056 - DNA, 20 bp, synthetic construct
  misc_feature 1..20: note = chemically synthesized
  source 1..20: mol_type = other DNA
cccatcattcttcccattca

SEQ ID NO: 14057 - DNA, 20 bp, synthetic construct
  misc_feature 1..20: note = chemically synthesized
  source 1..20: mol_type = other DNA
cattcttcccattcagagta

SEQ ID NO: 14058 - DNA, 20 bp, synthetic construct
  misc_feature 1..20: note = chemically synthesized
  source 1..20: mol_type = other DNA
cccattcagagtatggacac

SEQ ID NO: 14059 - DNA, 20 bp, synthetic construct
  misc_feature 1..20: note = chemically synthesized
  source 1..20: mol_type = other DNA
tatggacaccagtcttctct

SEQ ID NO: 14060 - DNA, 20 bp, synthetic construct
  misc_feature 1..20: note = chemically synthesized
  source 1..20: mol_type = other DNA
caccagtcttctcttagatt

SEQ ID NO: 14061 - DNA, 20 bp, synthetic construct
  misc_feature 1..20: note = chemically synthesized
  source 1..20: mol_type = other DNA
ccagtcttctcttagattca

SEQ ID NO: 14062 - DNA, 20 bp, synthetic construct
  misc_feature 1..20: note = chemically synthesized
  source 1..20: mol_type = other DNA
cttctcttagattcagagta

SEQ ID NO: 14063 - DNA, 20 bp, synthetic construct
  misc_feature 1..20: note = chemically synthesized
  source 1..20: mol_type = other DNA
ttctcttagattcagagtat

SEQ ID NO: 14064 - DNA, 20 bp, synthetic construct
  misc_feature 1..20: note = chemically synthesized
  source 1..20: mol_type = other DNA
tctcttagattcagagtatg

SEQ ID NO: 14065 - DNA, 20 bp, synthetic construct
  misc_feature 1..20: note = chemically synthesized
  source 1..20: mol_type = other DNA
ttgatcctctcctgctccct

SEQ ID NO: 14066 - DNA, 20 bp, synthetic construct
  misc_feature 1..20: note = chemically synthesized
  source 1..20: mol_type = other DNA
gatcctctcctgctccctcg

SEQ ID NO: 14067 - DNA, 20 bp, synthetic construct
  misc_feature 1..20: note = chemically synthesized
  source 1..20: mol_type = other DNA
ctctcctgctccctcggagc

SEQ ID NO: 14068 - DNA, 20 bp, synthetic construct
  misc_feature 1..20: note = chemically synthesized
  source 1..20: mol_type = other DNA
tgctccctcggagccagttg

SEQ ID NO: 14069 - DNA, 20 bp, synthetic construct
  misc_feature 1..20: note = chemically synthesized
  source 1..20: mol_type = other DNA
ctccctcggagccagttgca

SEQ ID NO: 14070 - DNA, 20 bp, synthetic construct
  misc_feature 1..20: note = chemically synthesized
  source 1..20: mol_type = other DNA
tcttctctccttactgccta

SEQ ID NO: 14071 - DNA, 20 bp, synthetic construct
  misc_feature 1..20: note = chemically synthesized
  source 1..20: mol_type = other DNA
ctccttactgcctatggttc

SEQ ID NO: 14072 - DNA, 20 bp, synthetic construct
  misc_feature 1..20: note = chemically synthesized
  source 1..20: mol_type = other DNA
actgcctatggttccagacc

SEQ ID NO: 14073 - DNA, 20 bp, synthetic construct
  misc_feature 1..20: note = chemically synthesized
  source 1..20: mol_type = other DNA
ttccagacctggcttgcatc

SEQ ID NO: 14074 - DNA, 20 bp, synthetic construct
  misc_feature 1..20: note = chemically synthesized
  source 1..20: mol_type = other DNA
tccagacctggcttgcatcc

SEQ ID NO: 14075 - DNA, 20 bp, synthetic construct
  misc_feature 1..20: note = chemically synthesized
  source 1..20: mol_type = other DNA
ccagacctggcttgcatcca

SEQ ID NO: 14076 - DNA, 20 bp, synthetic construct
  misc_feature 1..20: note = chemically synthesized
  source 1..20: mol_type = other DNA
acccattccatgtttcctta

SEQ ID NO: 14077 - DNA, 20 bp, synthetic construct
  misc_feature 1..20: note = chemically synthesized
  source 1..20: mol_type = other DNA
tccatgtttccttatggcta

SEQ ID NO: 14078 - DNA, 20 bp, synthetic construct
  misc_feature 1..20: note = chemically synthesized
  source 1..20: mol_type = other DNA
ccatgtttccttatggctaa

SEQ ID NO: 14079 - DNA, 20 bp, synthetic construct
  misc_feature 1..20: note = chemically synthesized
  source 1..20: mol_type = other DNA
tgtttccttatggctaaagg

SEQ ID NO: 14080 - DNA, 20 bp, synthetic construct
  misc_feature 1..20: note = chemically synthesized
  source 1..20: mol_type = other DNA
ttccttatggctaaaggtgg

SEQ ID NO: 14081 - DNA, 20 bp, synthetic construct
  misc_feature 1..20: note = chemically synthesized
  source 1..20: mol_type = other DNA
tccttatggctaaaggtggt

SEQ ID NO: 14082 - DNA, 20 bp, synthetic construct
  misc_feature 1..20: note = chemically synthesized
  source 1..20: mol_type = other DNA
ccttatggctaaaggtggta

SEQ ID NO: 14083 - DNA, 20 bp, synthetic construct
  misc_feature 1..20: note = chemically synthesized
  source 1..20: mol_type = other DNA
ttatggctaaaggtggtagg

SEQ ID NO: 14084 - DNA, 20 bp, synthetic construct
  misc_feature 1..20: note = chemically synthesized
  source 1..20: mol_type = other DNA
tatggctaaaggtggtaggg

SEQ ID NO: 14085 - DNA, 20 bp, synthetic construct
  misc_feature 1..20: note = chemically synthesized
  source 1..20: mol_type = other DNA
tggctaaaggtggtagggag

SEQ ID NO: 14086 - DNA, 20 bp, synthetic construct
  misc_feature 1..20: note = chemically synthesized
  source 1..20: mol_type = other DNA
aggtggtagggaggagcttc

SEQ ID NO: 14087 - DNA, 20 bp, synthetic construct
  misc_feature 1..20: note = chemically synthesized
  source 1..20: mol_type = other DNA
ggtagggaggagcttcaaga

SEQ ID NO: 14088 - DNA, 20 bp, synthetic construct
  misc_feature 1..20: note = chemically synthesized
  source 1..20: mol_type = other DNA
gtagggaggagcttcaagaa

SEQ ID NO: 14089 - DNA, 20 bp, synthetic construct
  misc_feature 1..20: note = chemically synthesized
  source 1..20: mol_type = other DNA
aggagcttcaagaaaggtta

SEQ ID NO: 14090 - DNA, 20 bp, synthetic construct
  misc_feature 1..20: note = chemically synthesized
  source 1..20: mol_type = other DNA
aagaaaggttatagcattga

SEQ ID NO: 14091 - DNA, 20 bp, synthetic construct
  misc_feature 1..20: note = chemically synthesized
  source 1..20: mol_type = other DNA
agaaaggttatagcattgaa

SEQ ID NO: 14092 - DNA, 20 bp, synthetic construct
  misc_feature 1..20: note = chemically synthesized
  source 1..20: mol_type = other DNA
ggttatagcattgaaaggcc

SEQ ID NO: 14093 - DNA, 20 bp, synthetic construct
  misc_feature 1..20: note = chemically synthesized
  source 1..20: mol_type = other DNA
gttatagcattgaaaggccc

SEQ ID NO: 14094 - DNA, 20 bp, synthetic construct
  misc_feature 1..20: note = chemically synthesized
  source 1..20: mol_type = other DNA
aaaggcccaggtttgtgtct

SEQ ID NO: 14095 - DNA, 20 bp, synthetic construct
  misc_feature 1..20: note = chemically synthesized
  source 1..20: mol_type = other DNA
caggtttgtgtctcagtaac

SEQ ID NO: 14096 - DNA, 20 bp, synthetic construct
  misc_feature 1..20: note = chemically synthesized
  source 1..20: mol_type = other DNA
aggtttgtgtctcagtaaca

SEQ ID NO: 14097 - DNA, 20 bp, synthetic construct
  misc_feature 1..20: note = chemically synthesized
  source 1..20: mol_type = other DNA
aaggcttataaatcctgact

SEQ ID NO: 14098 - DNA, 20 bp, synthetic construct
  misc_feature 1..20: note = chemically synthesized
  source 1..20: mol_type = other DNA
gcttataaatcctgactcag

SEQ ID NO: 14099 - DNA, 20 bp, synthetic construct
  misc_feature 1..20: note = chemically synthesized
  source 1..20: mol_type = other DNA
ataaatcctgactcagaagt

SEQ ID NO: 14100 - DNA, 20 bp, synthetic construct
  misc_feature 1..20: note = chemically synthesized
  source 1..20: mol_type = other DNA
taaatcctgactcagaagtc

SEQ ID NO: 14101 - DNA, 20 bp, synthetic construct
  misc_feature 1..20: note = chemically synthesized
  source 1..20: mol_type = other DNA
atcctgactcagaagtcagg

SEQ ID NO: 14102 - DNA, 20 bp, synthetic construct
  misc_feature 1..20: note = chemically synthesized
  source 1..20: mol_type = other DNA
tcctgactcagaagtcaggt

SEQ ID NO: 14103 - DNA, 20 bp, synthetic construct
  misc_feature 1..20: note = chemically synthesized
  source 1..20: mol_type = other DNA
ctcagaagtcaggtaggctg

SEQ ID NO: 14104 - DNA, 20 bp, synthetic construct
  misc_feature 1..20: note = chemically synthesized
  source 1..20: mol_type = other DNA
tcagaagtcaggtaggctgc

SEQ ID NO: 14105 - DNA, 20 bp, synthetic construct
  misc_feature 1..20: note = chemically synthesized
  source 1..20: mol_type = other DNA
gaagtcaggtaggctgcggg

SEQ ID NO: 14106 - DNA, 20 bp, synthetic construct
  misc_feature 1..20: note = chemically synthesized
  source 1..20: mol_type = other DNA
attattgcttcgatgcttgt

SEQ ID NO: 14107 - DNA, 20 bp, synthetic construct
  misc_feature 1..20: note = chemically synthesized
  source 1..20: mol_type = other DNA
gcttcgatgcttgttggttc

SEQ ID NO: 14108 - DNA, 20 bp, synthetic construct
  misc_feature 1..20: note = chemically synthesized
  source 1..20: mol_type = other DNA
tgcttcacctgctcattttt

SEQ ID NO: 14109 - DNA, 20 bp, synthetic construct
  misc_feature 1..20: note = chemically synthesized
  source 1..20: mol_type = other DNA
attttatttgtttatcatat

SEQ ID NO: 14110 - DNA, 20 bp, synthetic construct
  misc_feature 1..20: note = chemically synthesized
  source 1..20: mol_type = other DNA
atatgagataccatgaaaaa

SEQ ID NO: 14111 - DNA, 20 bp, synthetic construct
  misc_feature 1..20: note = chemically synthesized
  source 1..20: mol_type = other DNA
gcttttctttcctatattaa

SEQ ID NO: 14112 - DNA, 20 bp, synthetic construct
  misc_feature 1..20: note = chemically synthesized
  source 1..20: mol_type = other DNA
tttcctatattaaaagccca

SEQ ID NO: 14113 - DNA, 20 bp, synthetic construct
  misc_feature 1..20: note = chemically synthesized
  source 1..20: mol_type = other DNA
tatattaaaagcccaaagtt

SEQ ID NO: 14114 - DNA, 20 bp, synthetic construct
  misc_feature 1..20: note = chemically synthesized
  source 1..20: mol_type = other DNA
tattaaaagcccaaagttca

SEQ ID NO: 14115 - DNA, 20 bp, synthetic construct
  misc_feature 1..20: note = chemically synthesized
  source 1..20: mol_type = other DNA
ttaaaagcccaaagttcaga

SEQ ID NO: 14116 - DNA, 20 bp, synthetic construct
  misc_feature 1..20: note = chemically synthesized
  source 1..20: mol_type = other DNA
agcccaaagttcagagagat

SEQ ID NO: 14117 - DNA, 20 bp, synthetic construct
  misc_feature 1..20: note = chemically synthesized
  source 1..20: mol_type = other DNA
gttcagagagataagtgtta

SEQ ID NO: 14118 - DNA, 20 bp, synthetic construct
  misc_feature 1..20: note = chemically synthesized
  source 1..20: mol_type = other DNA
agataagtgttatggccatc

SEQ ID NO: 14119 - DNA, 20 bp, synthetic construct
  misc_feature 1..20: note = chemically synthesized
  source 1..20: mol_type = other DNA
gataagtgttatggccatcc

SEQ ID NO: 14120 - DNA, 20 bp, synthetic construct
  misc_feature 1..20: note = chemically synthesized
  source 1..20: mol_type = other DNA
agtgttatggccatccagga

SEQ ID NO: 14121 - DNA, 20 bp, synthetic construct
  misc_feature 1..20: note = chemically synthesized
  source 1..20: mol_type = other DNA
tatggccatccaggatagat

SEQ ID NO: 14122 - DNA, 20 bp, synthetic construct
  misc_feature 1..20: note = chemically synthesized
  source 1..20: mol_type = other DNA
gccatccaggatagatcaga

SEQ ID NO: 14123 - DNA, 20 bp, synthetic construct
  misc_feature 1..20: note = chemically synthesized
  source 1..20: mol_type = other DNA
ccaggatagatcagaaagat

SEQ ID NO: 14124 - DNA, 20 bp, synthetic construct
  misc_feature 1..20: note = chemically synthesized
  source 1..20: mol_type = other DNA
gatagatcagaaagattaga

SEQ ID NO: 14125 - DNA, 20 bp, synthetic construct
  misc_feature 1..20: note = chemically synthesized
  source 1..20: mol_type = other DNA
gatcagaaagattagacagt

SEQ ID NO: 14126 - DNA, 20 bp, synthetic construct
  misc_feature 1..20: note = chemically synthesized
  source 1..20: mol_type = other DNA
aaagattagacagtcagaaa

SEQ ID NO: 14127 - DNA, 20 bp, synthetic construct
  misc_feature 1..20: note = chemically synthesized
  source 1..20: mol_type = other DNA
agacagtcagaaaaagtaat

SEQ ID NO: 14128 - DNA, 20 bp, synthetic construct
  misc_feature 1..20: note = chemically synthesized
  source 1..20: mol_type = other DNA
agtcagaaaaagtaatcagt

SEQ ID NO: 14129 - DNA, 20 bp, synthetic construct
  misc_feature 1..20: note = chemically synthesized
  source 1..20: mol_type = other DNA
attgtctatataattaaaat

SEQ ID NO: 14130 - DNA, 20 bp, synthetic construct
  misc_feature 1..20: note = chemically synthesized
  source 1..20: mol_type = other DNA
ataaaatctatgtatgtctt

SEQ ID NO: 14131 - DNA, 20 bp, synthetic construct
  misc_feature 1..20: note = chemically synthesized
  source 1..20: mol_type = other DNA
atgtatgtcttaagacattt

SEQ ID NO: 14132 - DNA, 20 bp, synthetic construct
  misc_feature 1..20: note = chemically synthesized
  source 1..20: mol_type = other DNA
tcttaagacatttaagtata

SEQ ID NO: 14133 - DNA, 20 bp, synthetic construct
  misc_feature 1..20: note = chemically synthesized
  source 1..20: mol_type = other DNA
cttaagacatttaagtataa

SEQ ID NO: 14134 - DNA, 20 bp, synthetic construct
  misc_feature 1..20: note = chemically synthesized
  source 1..20: mol_type = other DNA
atttaagtataaaggacttt

SEQ ID NO: 14135 - DNA, 20 bp, synthetic construct
  misc_feature 1..20: note = chemically synthesized
  source 1..20: mol_type = other DNA
aagtataaaggacttttaga

SEQ ID NO: 14136 - DNA, 20 bp, synthetic construct
  misc_feature 1..20: note = chemically synthesized
  source 1..20: mol_type = other DNA
agaaacacccaaattcgatg

SEQ ID NO: 14137 - DNA, 20 bp, synthetic construct
  misc_feature 1..20: note = chemically synthesized
  source 1..20: mol_type = other DNA
aagattaattcctgcctgtt

SEQ ID NO: 14138 - DNA, 20 bp, synthetic construct
  misc_feature 1..20: note = chemically synthesized
  source 1..20: mol_type = other DNA
agattaattcctgcctgttt

SEQ ID NO: 14139 - DNA, 20 bp, synthetic construct
  misc_feature 1..20: note = chemically synthesized
  source 1..20: mol_type = other DNA
ctgcctgtttgggtttgctt

SEQ ID NO: 14140 - DNA, 20 bp, synthetic construct
  misc_feature 1..20: note = chemically synthesized
  source 1..20: mol_type = other DNA
tttagcatttgtaatttctt

SEQ ID NO: 14141 - DNA, 20 bp, synthetic construct
  misc_feature 1..20: note = chemically synthesized
  source 1..20: mol_type = other DNA
gtaatttcttaagttctatg

SEQ ID NO: 14142 - DNA, 20 bp, synthetic construct
  misc_feature 1..20: note = chemically synthesized
  source 1..20: mol_type = other DNA
taatttcttaagttctatgc

SEQ ID NO: 14143 - DNA, 20 bp, synthetic construct
  misc_feature 1..20: note = chemically synthesized
  source 1..20: mol_type = other DNA
tgcaggattctaaaaactgt

SEQ ID NO: 14144 - DNA, 20 bp, synthetic construct
  misc_feature 1..20: note = chemically synthesized
  source 1..20: mol_type = other DNA
gtaagatgcctaatttaaac

SEQ ID NO: 14145 - DNA, 20 bp, synthetic construct
  misc_feature 1..20: note = chemically synthesized
  source 1..20: mol_type = other DNA
taagatgcctaatttaaaca

SEQ ID NO: 14146 - DNA, 20 bp, synthetic construct
  misc_feature 1..20: note = chemically synthesized
  source 1..20: mol_type = other DNA
aatattttcttaaatctttc

SEQ ID NO: 14147 - DNA, 20 bp, synthetic construct
  misc_feature 1..20: note = chemically synthesized
  source 1..20: mol_type = other DNA
tatgacatatgtttaacctg

SEQ ID NO: 14148 - DNA, 20 bp, synthetic construct
  misc_feature 1..20: note = chemically synthesized
  source 1..20: mol_type = other DNA
tgacatatgtttaacctgaa

SEQ ID NO: 14149 - DNA, 20 bp, synthetic construct
  misc_feature 1..20: note = chemically synthesized
  source 1..20: mol_type = other DNA
gtcaaatattgtactgttct

SEQ ID NO: 14150 - DNA, 20 bp, synthetic construct
  misc_feature 1..20: note = chemically synthesized
  source 1..20: mol_type = other DNA
gtactgttcttagatgctat

SEQ ID NO: 14151 - DNA, 20 bp, synthetic construct
  misc_feature 1..20: note = chemically synthesized
  source 1..20: mol_type = other DNA
gtatgaaaaattatataaat

SEQ ID NO: 14152 - DNA, 20 bp, synthetic construct
  misc_feature 1..20: note = chemically synthesized
  source 1..20: mol_type = other DNA
atataaattagattcttgtt

SEQ ID NO: 14153 - DNA, 20 bp, synthetic construct
  misc_feature 1..20: note = chemically synthesized
  source 1..20: mol_type = other DNA
aattagattcttgttaagta

SEQ ID NO: 14154 - DNA, 20 bp, synthetic construct
  misc_feature 1..20: note = chemically synthesized
  source 1..20: mol_type = other DNA
tagattcttgttaagtaaag

SEQ ID NO: 14155 - DNA, 20 bp, synthetic construct
  misc_feature 1..20: note = chemically synthesized
  source 1..20: mol_type = other DNA
agattcttgttaagtaaagt

SEQ ID NO: 14156 - DNA, 20 bp, synthetic construct
  misc_feature 1..20: note = chemically synthesized
  source 1..20: mol_type = other DNA
acttcactgaatgtttttca

SEQ ID NO: 14157 - DNA, 20 bp, synthetic construct
  misc_feature 1..20: note = chemically synthesized
  source 1..20: mol_type = other DNA
tgtttttcatggtattatct

SEQ ID NO: 14158 - DNA, 20 bp, synthetic construct
  misc_feature 1..20: note = chemically synthesized
  source 1..20: mol_type = other DNA
ctttatttttatttttaaaa

SEQ ID NO: 14159 - DNA, 20 bp, synthetic construct
  misc_feature 1..20: note = chemically synthesized
  source 1..20: mol_type = other DNA
tttatttttatttttaaaat

SEQ ID NO: 14160 - DNA, 20 bp, synthetic construct
  misc_feature 1..20: note = chemically synthesized
  source 1..20: mol_type = other DNA
aaaataggaaaaatataaac

SEQ ID NO: 14161 - DNA, 20 bp, synthetic construct
  misc_feature 1..20: note = chemically synthesized
  source 1..20: mol_type = other DNA
aaataggaaaaatataaaca

SEQ ID NO: 14162 - DNA, 20 bp, synthetic construct
  misc_feature 1..20: note = chemically synthesized
  source 1..20: mol_type = other DNA
caaggcttgtaaaccactga

SEQ ID NO: 14163 - DNA, 20 bp, synthetic construct
  misc_feature 1..20: note = chemically synthesized
  source 1..20: mol_type = other DNA
aaggcttgtaaaccactgat

SEQ ID NO: 14164 - DNA, 20 bp, synthetic construct
  misc_feature 1..20: note = chemically synthesized
  source 1..20: mol_type = other DNA
ttgtaaaccactgataggaa

SEQ ID NO: 14165 - DNA, 20 bp, synthetic construct
  misc_feature 1..20: note = chemically synthesized
  source 1..20: mol_type = other DNA
gtaaaccactgataggaaaa

SEQ ID NO: 14166 - DNA, 20 bp, synthetic construct
  misc_feature 1..20: note = chemically synthesized
  source 1..20: mol_type = other DNA
ctgataggaaaagagctgct

SEQ ID NO: 14167 - DNA, 20 bp, synthetic construct
  misc_feature 1..20: note = chemically synthesized
  source 1..20: mol_type = other DNA
tgataggaaaagagctgctt

SEQ ID NO: 14168 - DNA, 20 bp, synthetic construct
  misc_feature 1..20: note = chemically synthesized
  source 1..20: mol_type = other DNA
agctgcttaggattctaaat

SEQ ID NO: 14169 - DNA, 20 bp, synthetic construct
  misc_feature 1..20: note = chemically synthesized
  source 1..20: mol_type = other DNA
gcttaggattctaaattagc

SEQ ID NO: 14170 - DNA, 20 bp, synthetic construct
  misc_feature 1..20: note = chemically synthesized
  source 1..20: mol_type = other DNA
tgtatctaaatctatattct

SEQ ID NO: 14171 - DNA, 20 bp, synthetic construct
  misc_feature 1..20: note = chemically synthesized
  source 1..20: mol_type = other DNA
ctatattctcagaacaaaaa

SEQ ID NO: 14172 - DNA, 20 bp, synthetic construct
  misc_feature 1..20: note = chemically synthesized
  source 1..20: mol_type = other DNA
ctcagaacaaaaatagatgt

SEQ ID NO: 14173 - DNA, 20 bp, synthetic construct
  misc_feature 1..20: note = chemically synthesized
  source 1..20: mol_type = other DNA
atgtaagcaaatgattctac

SEQ ID NO: 14174 - DNA, 20 bp, synthetic construct
  misc_feature 1..20: note = chemically synthesized
  source 1..20: mol_type = other DNA
gattctactagattttgtgt

SEQ ID NO: 14175 - DNA, 20 bp, synthetic construct
  misc_feature 1..20: note = chemically synthesized
  source 1..20: mol_type = other DNA
gtgttagattttgcattatc

SEQ ID NO: 14176 - DNA, 20 bp, synthetic construct
  misc_feature 1..20: note = chemically synthesized
  source 1..20: mol_type = other DNA
tgttagattttgcattatcc

SEQ ID NO: 14177 - DNA, 20 bp, synthetic construct
  misc_feature 1..20: note = chemically synthesized
  source 1..20: mol_type = other DNA
tgcattatccaggaatgact

SEQ ID NO: 14178 - DNA, 20 bp, synthetic construct
  misc_feature 1..20: note = chemically synthesized
  source 1..20: mol_type = other DNA
aggaatgacttggatatcac

SEQ ID NO: 14179 - DNA, 20 bp, synthetic construct
  misc_feature 1..20: note = chemically synthesized
  source 1..20: mol_type = other DNA
atcacaagtcataaattctg

SEQ ID NO: 14180 - DNA, 20 bp, synthetic construct
  misc_feature 1..20: note = chemically synthesized
  source 1..20: mol_type = other DNA
taaattctgtggctgccttg

SEQ ID NO: 14181 - DNA, 20 bp, synthetic construct
  misc_feature 1..20: note = chemically synthesized
  source 1..20: mol_type = other DNA
aaattctgtggctgccttgc

SEQ ID NO: 14182 - DNA, 20 bp, synthetic construct
  misc_feature 1..20: note = chemically synthesized
  source 1..20: mol_type = other DNA
ttctgtggctgccttgcagg

SEQ ID NO: 14183 - DNA, 20 bp, synthetic construct
  misc_feature 1..20: note = chemically synthesized
  source 1..20: mol_type = other DNA
gctgccttgcaggaagcctg

SEQ ID NO: 14184 - DNA, 20 bp, synthetic construct
  misc_feature 1..20: note = chemically synthesized
  source 1..20: mol_type = other DNA
ggaagcctgtggctattttc

SEQ ID NO: 14185 - DNA, 20 bp, synthetic construct
  misc_feature 1..20: note = chemically synthesized
  source 1..20: mol_type = other DNA
tattttctagtgtaattgta

SEQ ID NO: 14186 - DNA, 20 bp, synthetic construct
  misc_feature 1..20: note = chemically synthesized
  source 1..20: mol_type = other DNA
ctagtgtaattgtaaagaat

SEQ ID NO: 14187 - DNA, 20 bp, synthetic construct
  misc_feature 1..20: note = chemically synthesized
  source 1..20: mol_type = other DNA
agtgtaattgtaaagaatga

SEQ ID NO: 14188 - DNA, 20 bp, synthetic construct
  misc_feature 1..20: note = chemically synthesized
  source 1..20: mol_type = other DNA
aattgtaaagaatgagagaa

SEQ ID NO: 14189 - DNA, 20 bp, synthetic construct
  misc_feature 1..20: note = chemically synthesized
  source 1..20: mol_type = other DNA
atgagagaatagaccataac

SEQ ID NO: 14190 - DNA, 20 bp, synthetic construct
  misc_feature 1..20: note = chemically synthesized
  source 1..20: mol_type = other DNA
ttgttttcaacttttatttt

SEQ ID NO: 14191 - DNA, 20 bp, synthetic construct
  misc_feature 1..20: note = chemically synthesized
  source 1..20: mol_type = other DNA
ttcaacttttattttaagtt

SEQ ID NO: 14192 - DNA, 20 bp, synthetic construct
  misc_feature 1..20: note = chemically synthesized
  source 1..20: mol_type = other DNA
tcaacttttattttaagttc

SEQ ID NO: 14193 - DNA, 20 bp, synthetic construct
  misc_feature 1..20: note = chemically synthesized
  source 1..20: mol_type = other DNA
caacttttattttaagttca

SEQ ID NO: 14194 - DNA, 20 bp, synthetic construct
  misc_feature 1..20: note = chemically synthesized
  source 1..20: mol_type = other DNA
aacttttattttaagttcag

SEQ ID NO: 14195 - DNA, 20 bp, synthetic construct
  misc_feature 1..20: note = chemically synthesized
  source 1..20: mol_type = other DNA
taagttcaggggtacatgta

SEQ ID NO: 14196 - DNA, 20 bp, synthetic construct
  misc_feature 1..20: note = chemically synthesized
  source 1..20: mol_type = other DNA
aagttcaggggtacatgtac

SEQ ID NO: 14197 - DNA, 20 bp, synthetic construct
  misc_feature 1..20: note = chemically synthesized
  source 1..20: mol_type = other DNA
gggtacatgtacaggatgtg

SEQ ID NO: 14198 - DNA, 20 bp, synthetic construct
  misc_feature 1..20: note = chemically synthesized
  source 1..20: mol_type = other DNA
ggtacatgtacaggatgtgc

SEQ ID NO: 14199 - DNA, 20 bp, synthetic construct
  misc_feature 1..20: note = chemically synthesized
  source 1..20: mol_type = other DNA
ggatgtgcaggtttgttaca

SEQ ID NO: 14200 - DNA, 20 bp, synthetic construct
  misc_feature 1..20: note = chemically synthesized
  source 1..20: mol_type = other DNA
tacatagataaatgaatgtc

SEQ ID NO: 14201 - DNA, 20 bp, synthetic construct
  misc_feature 1..20: note = chemically synthesized
  source 1..20: mol_type = other DNA
acatagataaatgaatgtca

SEQ ID NO: 14202 - DNA, 20 bp, synthetic construct
  misc_feature 1..20: note = chemically synthesized
  source 1..20: mol_type = other DNA
catagataaatgaatgtcaa

SEQ ID NO: 14203 - DNA, 20 bp, synthetic construct
  misc_feature 1..20: note = chemically synthesized
  source 1..20: mol_type = other DNA
atagataaatgaatgtcaag

SEQ ID NO: 14204 - DNA, 20 bp, synthetic construct
  misc_feature 1..20: note = chemically synthesized
  source 1..20: mol_type = other DNA
tagataaatgaatgtcaagg

SEQ ID NO: 14205 - DNA, 20 bp, synthetic construct
  misc_feature 1..20: note = chemically synthesized
  source 1..20: mol_type = other DNA
tgtcaagggggtttgttgta

SEQ ID NO: 14206 - DNA, 20 bp, synthetic construct
  misc_feature 1..20: note = chemically synthesized
  source 1..20: mol_type = other DNA
gtatagatgatctcatcact

SEQ ID NO: 14207 - DNA, 20 bp, synthetic construct
  misc_feature 1..20: note = chemically synthesized
  source 1..20: mol_type = other DNA
tatagatgatctcatcactc

SEQ ID NO: 14208 - DNA, 20 bp, synthetic construct
  misc_feature 1..20: note = chemically synthesized
  source 1..20: mol_type = other DNA
catcactcaggtattacgct

SEQ ID NO: 14209 - DNA, 20 bp, synthetic construct
  misc_feature 1..20: note = chemically synthesized
  source 1..20: mol_type = other DNA
gtattacgcttagcatccat

SEQ ID NO: 14210 - DNA, 20 bp, synthetic construct
  misc_feature 1..20: note = chemically synthesized
  source 1..20: mol_type = other DNA
tctcaccctccaccctctga

SEQ ID NO: 14211 - DNA, 20 bp, synthetic construct
  misc_feature 1..20: note = chemically synthesized
  source 1..20: mol_type = other DNA
ctcaccctccaccctctgat

SEQ ID NO: 14212 - DNA, 20 bp, synthetic construct
  misc_feature 1..20: note = chemically synthesized
  source 1..20: mol_type = other DNA
ctccaccctctgataggccc

SEQ ID NO: 14213 - DNA, 20 bp, synthetic construct
  misc_feature 1..20: note = chemically synthesized
  source 1..20: mol_type = other DNA
tatgcgttgtttccctctat

SEQ ID NO: 14214 - DNA, 20 bp, synthetic construct
  misc_feature 1..20: note = chemically synthesized
  source 1..20: mol_type = other DNA
gtccatgtgttctcatcatt

SEQ ID NO: 14215 - DNA, 20 bp, synthetic construct
  misc_feature 1..20: note = chemically synthesized
  source 1..20: mol_type = other DNA
gcttctaactgttgctttcg

SEQ ID NO: 14216 - DNA, 20 bp, synthetic construct
  misc_feature 1..20: note = chemically synthesized
  source 1..20: mol_type = other DNA
cctctgcctcatctctcacg

SEQ ID NO: 14217 - DNA, 20 bp, synthetic construct
  misc_feature 1..20: note = chemically synthesized
  source 1..20: mol_type = other DNA
ctcatctctcacgaagtttg

SEQ ID NO: 14218 - DNA, 20 bp, synthetic construct
  misc_feature 1..20: note = chemically synthesized
  source 1..20: mol_type = other DNA
tcatctctcacgaagtttgc

SEQ ID NO: 14219 - DNA, 20 bp, synthetic construct
  misc_feature 1..20: note = chemically synthesized
  source 1..20: mol_type = other DNA
ctctcacgaagtttgcaggt

SEQ ID NO: 14220 - DNA, 20 bp, synthetic construct
  misc_feature 1..20: note = chemically synthesized
  source 1..20: mol_type = other DNA
cgaagtttgcaggtgagttt

SEQ ID NO: 14221 - DNA, 20 bp, synthetic construct
  misc_feature 1..20: note = chemically synthesized
  source 1..20: mol_type = other DNA
gtttgcaggtgagtttgagc

SEQ ID NO: 14222 - DNA, 20 bp, synthetic construct
  misc_feature 1..20: note = chemically synthesized
  source 1..20: mol_type = other DNA
tttgcaggtgagtttgagcc

SEQ ID NO: 14223 - DNA, 20 bp, synthetic construct
  misc_feature 1..20: note = chemically synthesized
  source 1..20: mol_type = other DNA
ttgcaggtgagtttgagcca

SEQ ID NO: 14224 - DNA, 20 bp, synthetic construct
  misc_feature 1..20: note = chemically synthesized
  source 1..20: mol_type = other DNA
ggtgagtttgagccagggct

SEQ ID NO: 14225 - DNA, 20 bp, synthetic construct
  misc_feature 1..20: note = chemically synthesized
  source 1..20: mol_type = other DNA
gtgagtttgagccagggctg

SEQ ID NO: 14226 - DNA, 20 bp, synthetic construct
  misc_feature 1..20: note = chemically synthesized
  source 1..20: mol_type = other DNA
cagggctgaggctcattctc

SEQ ID NO: 14227 - DNA, 20 bp, synthetic construct
  misc_feature 1..20: note = chemically synthesized
  source 1..20: mol_type = other DNA
gggctgaggctcattctcaa

SEQ ID NO: 14228 - DNA, 20 bp, synthetic construct
  misc_feature 1..20: note = chemically synthesized
  source 1..20: mol_type = other DNA
tcaagagtaatctctctctc

SEQ ID NO: 14229 - DNA, 20 bp, synthetic construct
  misc_feature 1..20: note = chemically synthesized
  source 1..20: mol_type = other DNA
aatctctctctctggcaact

SEQ ID NO: 14230 - DNA, 20 bp, synthetic construct
  misc_feature 1..20: note = chemically synthesized
  source 1..20: mol_type = other DNA
tctctctctctggcaacttg

SEQ ID NO: 14231 - DNA, 20 bp, synthetic construct
  misc_feature 1..20: note = chemically synthesized
  source 1..20: mol_type = other DNA
ctctctggcaacttggagca

SEQ ID NO: 14232 - DNA, 20 bp, synthetic construct
  misc_feature 1..20: note = chemically synthesized
  source 1..20: mol_type = other DNA
tcctattgtgtgactgacct

SEQ ID NO: 14233 - DNA, 20 bp, synthetic construct
  misc_feature 1..20: note = chemically synthesized
  source 1..20: mol_type = other DNA
cctattgtgtgactgacctc

SEQ ID NO: 14234 - DNA, 20 bp, synthetic construct
  misc_feature 1..20: note = chemically synthesized
  source 1..20: mol_type = other DNA
tattgtgtgactgacctcgg

SEQ ID NO: 14235 - DNA, 20 bp, synthetic construct
  misc_feature 1..20: note = chemically synthesized
  source 1..20: mol_type = other DNA
ctcgggagccactgtgccta

SEQ ID NO: 14236 - DNA, 20 bp, synthetic construct
  misc_feature 1..20: note = chemically synthesized
  source 1..20: mol_type = other DNA
cactgtgcctaaagtacaac

SEQ ID NO: 14237 - DNA, 20 bp, synthetic construct
  misc_feature 1..20: note = chemically synthesized
  source 1..20: mol_type = other DNA
ctgtgcctaaagtacaacca

SEQ ID NO: 14238 - DNA, 20 bp, synthetic construct
  misc_feature 1..20: note = chemically synthesized
  source 1..20: mol_type = other DNA
gttacttgtgaatgttaatt

SEQ ID NO: 14239 - DNA, 20 bp, synthetic construct
  misc_feature 1..20: note = chemically synthesized
  source 1..20: mol_type = other DNA
acttgtgaatgttaattaag

SEQ ID NO: 14240 - DNA, 20 bp, synthetic construct
  misc_feature 1..20: note = chemically synthesized
  source 1..20: mol_type = other DNA
cttgtgaatgttaattaagc

SEQ ID NO: 14241 - DNA, 20 bp, synthetic construct
  misc_feature 1..20: note = chemically synthesized
  source 1..20: mol_type = other DNA
tgtgaatgttaattaagcag

SEQ ID NO: 14242 - DNA, 20 bp, synthetic construct
  misc_feature 1..20: note = chemically synthesized
  source 1..20: mol_type = other DNA
gtgaatgttaattaagcagg

SEQ ID NO: 14243 - DNA, 20 bp, synthetic construct
  misc_feature 1..20: note = chemically synthesized
  source 1..20: mol_type = other DNA
tgaatgttaattaagcagga

SEQ ID NO: 14244 - DNA, 20 bp, synthetic construct
  misc_feature 1..20: note = chemically synthesized
  source 1..20: mol_type = other DNA
taagcaggagggatctttaa

SEQ ID NO: 14245 - DNA, 20 bp, synthetic construct
  misc_feature 1..20: note = chemically synthesized
  source 1..20: mol_type = other DNA
aagcaggagggatctttaat

SEQ ID NO: 14246 - DNA, 20 bp, synthetic construct
  misc_feature 1..20: note = chemically synthesized
  source 1..20: mol_type = other DNA
gagggatctttaatgggaaa

SEQ ID NO: 14247 - DNA, 20 bp, synthetic construct
  misc_feature 1..20: note = chemically synthesized
  source 1..20: mol_type = other DNA
agggatctttaatgggaaaa

SEQ ID NO: 14248 - DNA, 20 bp, synthetic construct
  misc_feature 1..20: note = chemically synthesized
  source 1..20: mol_type = other DNA
ggatctttaatgggaaaaag

SEQ ID NO: 14249 - DNA, 20 bp, synthetic construct
  misc_feature 1..20: note = chemically synthesized
  source 1..20: mol_type = other DNA
tctttaatgggaaaaaggag

SEQ ID NO: 14250 - DNA, 20 bp, synthetic construct
  misc_feature 1..20: note = chemically synthesized
  source 1..20: mol_type = other DNA
taatgggaaaaaggagtaga

SEQ ID NO: 14251 - DNA, 20 bp, synthetic construct
  misc_feature 1..20: note = chemically synthesized
  source 1..20: mol_type = other DNA
gggaaaaaggagtagaaagc

SEQ ID NO: 14252 - DNA, 20 bp, synthetic construct
  misc_feature 1..20: note = chemically synthesized
  source 1..20: mol_type = other DNA
aaggagtagaaagccagaat

SEQ ID NO: 14253 - DNA, 20 bp, synthetic construct
  misc_feature 1..20: note = chemically synthesized
  source 1..20: mol_type = other DNA
agtagaaagccagaatcagc

SEQ ID NO: 14254 - DNA, 20 bp, synthetic construct
  misc_feature 1..20: note = chemically synthesized
  source 1..20: mol_type = other DNA
tgccacactttcctacatga

SEQ ID NO: 14255 - DNA, 20 bp, synthetic construct
  misc_feature 1..20: note = chemically synthesized
  source 1..20: mol_type = other DNA
gccacactttcctacatgat

SEQ ID NO: 14256 - DNA, 20 bp, synthetic construct
  misc_feature 1..20: note = chemically synthesized
  source 1..20: mol_type = other DNA
ttcctacatgatgggcactg

SEQ ID NO: 14257 - DNA, 20 bp, synthetic construct
  misc_feature 1..20: note = chemically synthesized
  source 1..20: mol_type = other DNA
tcctacatgatgggcactga

SEQ ID NO: 14258 - DNA, 20 bp, synthetic construct
  misc_feature 1..20: note = chemically synthesized
  source 1..20: mol_type = other DNA
ggcactgaaggttaaaactt

SEQ ID NO: 14259 - DNA, 20 bp, synthetic construct
  misc_feature 1..20: note = chemically synthesized
  source 1..20: mol_type = other DNA
aaaacttgagtctgtcaact

SEQ ID NO: 14260 - DNA, 20 bp, synthetic construct
  misc_feature 1..20: note = chemically synthesized
  source 1..20: mol_type = other DNA
tcccattttccgctgaaata

SEQ ID NO: 14261 - DNA, 20 bp, synthetic construct
  misc_feature 1..20: note = chemically synthesized
  source 1..20: mol_type = other DNA
gaaatatagctttactttcc

SEQ ID NO: 14262 - DNA, 20 bp, synthetic construct
  misc_feature 1..20: note = chemically synthesized
  source 1..20: mol_type = other DNA
tcctggtttctttgaccttt

SEQ ID NO: 14263 - DNA, 20 bp, synthetic construct
  misc_feature 1..20: note = chemically synthesized
  source 1..20: mol_type = other DNA
cctggtttctttgacctttt

SEQ ID NO: 14264 - DNA, 20 bp, synthetic construct
  misc_feature 1..20: note = chemically synthesized
  source 1..20: mol_type = other DNA
ctttgaccttttgggacctt

SEQ ID NO: 14265 - DNA, 20 bp, synthetic construct
  misc_feature 1..20: note = chemically synthesized
  source 1..20: mol_type = other DNA
gaccttttgggaccttgagt

SEQ ID NO: 14266 - DNA, 20 bp, synthetic construct
  misc_feature 1..20: note = chemically synthesized
  source 1..20: mol_type = other DNA
tttgggaccttgagtaagta

SEQ ID NO: 14267 - DNA, 20 bp, synthetic construct
  misc_feature 1..20: note = chemically synthesized
  source 1..20: mol_type = other DNA
attttcatgattaaaattct

SEQ ID NO: 14268 - DNA, 20 bp, synthetic construct
  misc_feature 1..20: note = chemically synthesized
  source 1..20: mol_type = other DNA
ttaaaattctaagaaattct

SEQ ID NO: 14269 - DNA, 20 bp, synthetic construct
  misc_feature 1..20: note = chemically synthesized
  source 1..20: mol_type = other DNA
taaaattctaagaaattctt

SEQ ID NO: 14270 - DNA, 20 bp, synthetic construct
  misc_feature 1..20: note = chemically synthesized
  source 1..20: mol_type = other DNA
gcctaatgtatttatgaact

SEQ ID NO: 14271 - DNA, 20 bp, synthetic construct
  misc_feature 1..20: note = chemically synthesized
  source 1..20: mol_type = other DNA
gtatttatgaactaagaaca

SEQ ID NO: 14272 - DNA, 20 bp, synthetic construct
  misc_feature 1..20: note = chemically synthesized
  source 1..20: mol_type = other DNA
agaaataaaacaatactctg

SEQ ID NO: 14273 - DNA, 20 bp, synthetic construct
  misc_feature 1..20: note = chemically synthesized
  source 1..20: mol_type = other DNA
aataaaacaatactctgaag

SEQ ID NO: 14274 - DNA, 20 bp, synthetic construct
  misc_feature 1..20: note = chemically synthesized
  source 1..20: mol_type = other DNA
aacaatactctgaagtagtt

SEQ ID NO: 14275 - DNA, 20 bp, synthetic construct
  misc_feature 1..20: note = chemically synthesized
  source 1..20: mol_type = other DNA
atgtgctttcaatttatata

SEQ ID NO: 14276 - DNA, 20 bp, synthetic construct
  misc_feature 1..20: note = chemically synthesized
  source 1..20: mol_type = other DNA
gtgctttcaatttatataaa

SEQ ID NO: 14277 - DNA, 20 bp, synthetic construct
  misc_feature 1..20: note = chemically synthesized
  source 1..20: mol_type = other DNA
tataaagagttaattcaaat

SEQ ID NO: 14278 - DNA, 20 bp, synthetic construct
  misc_feature 1..20: note = chemically synthesized
  source 1..20: mol_type = other DNA
aattcaaatgagactatttt

SEQ ID NO: 14279 - DNA, 20 bp, synthetic construct
  misc_feature 1..20: note = chemically synthesized
  source 1..20: mol_type = other DNA
aaatgagactattttaagtg

SEQ ID NO: 14280 - DNA, 20 bp, synthetic construct
  misc_feature 1..20: note = chemically synthesized
  source 1..20: mol_type = other DNA
aatgagactattttaagtgc

SEQ ID NO: 14281 - DNA, 20 bp, synthetic construct
  misc_feature 1..20: note = chemically synthesized
  source 1..20: mol_type = other DNA
atgagactattttaagtgca

SEQ ID NO: 14282 - DNA, 20 bp, synthetic construct
  misc_feature 1..20: note = chemically synthesized
  source 1..20: mol_type = other DNA
agggctttgaatcttatgtc

SEQ ID NO: 14283 - DNA, 20 bp, synthetic construct
  misc_feature 1..20: note = chemically synthesized
  source 1..20: mol_type = other DNA
aaaacctctgattatatgct

SEQ ID NO: 14284 - DNA, 20 bp, synthetic construct
  misc_feature 1..20: note = chemically synthesized
  source 1..20: mol_type = other DNA
atatgctaagattccacctc

SEQ ID NO: 14285 - DNA, 20 bp, synthetic construct
  misc_feature 1..20: note = chemically synthesized
  source 1..20: mol_type = other DNA
taagattccacctctagtgc

SEQ ID NO: 14286 - DNA, 20 bp, synthetic construct
  misc_feature 1..20: note = chemically synthesized
  source 1..20: mol_type = other DNA
ccacctctagtgctagaact

SEQ ID NO: 14287 - DNA, 20 bp, synthetic construct
  misc_feature 1..20: note = chemically synthesized
  source 1..20: mol_type = other DNA
cctctagtgctagaactgag

SEQ ID NO: 14288 - DNA, 20 bp, synthetic construct
  misc_feature 1..20: note = chemically synthesized
  source 1..20: mol_type = other DNA
gaactgagaagtccttgact

SEQ ID NO: 14289 - DNA, 20 bp, synthetic construct
  misc_feature 1..20: note = chemically synthesized
  source 1..20: mol_type = other DNA
ttttttaaattctgaaacaa

SEQ ID NO: 14290 - DNA, 20 bp, synthetic construct
  misc_feature 1..20: note = chemically synthesized
  source 1..20: mol_type = other DNA
tctgaaacaacagcaacata

SEQ ID NO: 14291 - DNA, 20 bp, synthetic construct
  misc_feature 1..20: note = chemically synthesized
  source 1..20: mol_type = other DNA
aacaacagcaacataaagct

SEQ ID NO: 14292 - DNA, 20 bp, synthetic construct
  misc_feature 1..20: note = chemically synthesized
  source 1..20: mol_type = other DNA
acaacagcaacataaagcta

SEQ ID NO: 14293 - DNA, 20 bp, synthetic construct
  misc_feature 1..20: note = chemically synthesized
  source 1..20: mol_type = other DNA
ttgcctatgcatgctatctt

SEQ ID NO: 14294 - DNA, 20 bp, synthetic construct
  misc_feature 1..20: note = chemically synthesized
  source 1..20: mol_type = other DNA
tcttcagtactttgattatt

SEQ ID NO: 14295 - DNA, 20 bp, synthetic construct
  misc_feature 1..20: note = chemically synthesized
  source 1..20: mol_type = other DNA
ttagtattgaaactataaca

SEQ ID NO: 14296 - DNA, 20 bp, synthetic construct
  misc_feature 1..20: note = chemically synthesized
  source 1..20: mol_type = other DNA
ataaaaaatgtgtatttctc

SEQ ID NO: 14297 - DNA, 20 bp, synthetic construct
  misc_feature 1..20: note = chemically synthesized
  source 1..20: mol_type = other DNA
aaaaaatgtgtatttctctg

SEQ ID NO: 14298 - DNA, 20 bp, synthetic construct
  misc_feature 1..20: note = chemically synthesized
  source 1..20: mol_type = other DNA
aaatgtgtatttctctggag

SEQ ID NO: 14299 - DNA, 20 bp, synthetic construct
  misc_feature 1..20: note = chemically synthesized
  source 1..20: mol_type = other DNA
aatgtgtatttctctggaga

SEQ ID NO: 14300 - DNA, 20 bp, synthetic construct
  misc_feature 1..20: note = chemically synthesized
  source 1..20: mol_type = other DNA
ctctggagaaggttaaaact

SEQ ID NO: 14301 - DNA, 20 bp, synthetic construct
  misc_feature 1..20: note = chemically synthesized
  source 1..20: mol_type = other DNA
tctggagaaggttaaaactg

SEQ ID NO: 14302 - DNA, 20 bp, synthetic construct
  misc_feature 1..20: note = chemically synthesized
  source 1..20: mol_type = other DNA
agaaggttaaaactgaggat

SEQ ID NO: 14303 - DNA, 20 bp, synthetic construct
  misc_feature 1..20: note = chemically synthesized
  source 1..20: mol_type = other DNA
ggttaaaactgaggattggc

SEQ ID NO: 14304 - DNA, 20 bp, synthetic construct
  misc_feature 1..20: note = chemically synthesized
  source 1..20: mol_type = other DNA
aaaactgaggattggcaagt

SEQ ID NO: 14305 - DNA, 20 bp, synthetic construct
  misc_feature 1..20: note = chemically synthesized
  source 1..20: mol_type = other DNA
ctgaggattggcaagtgagc

SEQ ID NO: 14306 - DNA, 20 bp, synthetic construct
  misc_feature 1..20: note = chemically synthesized
  source 1..20: mol_type = other DNA
tgaggattggcaagtgagca

SEQ ID NO: 14307 - DNA, 20 bp, synthetic construct
  misc_feature 1..20: note = chemically synthesized
  source 1..20: mol_type = other DNA
gcaagtgagcaaggcttaaa

SEQ ID NO: 14308 - DNA, 20 bp, synthetic construct
  misc_feature 1..20: note = chemically synthesized
  source 1..20: mol_type = other DNA
agtgagcaaggcttaaatgg

SEQ ID NO: 14309 - DNA, 20 bp, synthetic construct
  misc_feature 1..20: note = chemically synthesized
  source 1..20: mol_type = other DNA
gagcaaggcttaaatggaag

SEQ ID NO: 14310 - DNA, 20 bp, synthetic construct
  misc_feature 1..20: note = chemically synthesized
  source 1..20: mol_type = other DNA
ggaagaagcaatgatctcgt

SEQ ID NO: 14311 - DNA, 20 bp, synthetic construct
  misc_feature 1..20: note = chemically synthesized
  source 1..20: mol_type = other DNA
gtcagaccaccttcattaac

SEQ ID NO: 14312 - DNA, 20 bp, synthetic construct
  misc_feature 1..20: note = chemically synthesized
  source 1..20: mol_type = other DNA
ttaacgagatcatccatcat

SEQ ID NO: 14313 - DNA, 20 bp, synthetic construct
  misc_feature 1..20: note = chemically synthesized
  source 1..20: mol_type = other DNA
taacgagatcatccatcatg

SEQ ID NO: 14314 - DNA, 20 bp, synthetic construct
  misc_feature 1..20: note = chemically synthesized
  source 1..20: mol_type = other DNA
tcatccatcatgaggaaata

SEQ ID NO: 14315 - DNA, 20 bp, synthetic construct
  misc_feature 1..20: note = chemically synthesized
  source 1..20: mol_type = other DNA
catgaggaaatatggaaaac

SEQ ID NO: 14316 - DNA, 20 bp, synthetic construct
  misc_feature 1..20: note = chemically synthesized
  source 1..20: mol_type = other DNA
atgaggaaatatggaaaacc

SEQ ID NO: 14317 - DNA, 20 bp, synthetic construct
  misc_feature 1..20: note = chemically synthesized
  source 1..20: mol_type = other DNA
cccctctgttttgtgtcact

SEQ ID NO: 14318 - DNA, 20 bp, synthetic construct
  misc_feature 1..20: note = chemically synthesized
  source 1..20: mol_type = other DNA
ccctctgttttgtgtcacta

SEQ ID NO: 14319 - DNA, 20 bp, synthetic construct
  misc_feature 1..20: note = chemically synthesized
  source 1..20: mol_type = other DNA
cctctgttttgtgtcactaa

SEQ ID NO: 14320 - DNA, 20 bp, synthetic construct
  misc_feature 1..20: note = chemically synthesized
  source 1..20: mol_type = other DNA
tgttttgtgtcactaagggt

SEQ ID NO: 14321 - DNA, 20 bp, synthetic construct
  misc_feature 1..20: note = chemically synthesized
  source 1..20: mol_type = other DNA
gttttgtgtcactaagggtg

SEQ ID NO: 14322 - DNA, 20 bp, synthetic construct
  misc_feature 1..20: note = chemically synthesized
  source 1..20: mol_type = other DNA
tgaatgatttttccctcccc

SEQ ID NO: 14323 - DNA, 20 bp, synthetic construct
  misc_feature 1..20: note = chemically synthesized
  source 1..20: mol_type = other DNA
gaatgatttttccctccccc

SEQ ID NO: 14324 - DNA, 20 bp, synthetic construct
  misc_feature 1..20: note = chemically synthesized
  source 1..20: mol_type = other DNA
tccctcccccgggcttcttt

SEQ ID NO: 14325 - DNA, 20 bp, synthetic construct
  misc_feature 1..20: note = chemically synthesized
  source 1..20: mol_type = other DNA
cttttagccatcaataattc

SEQ ID NO: 14326 - DNA, 20 bp, synthetic construct
  misc_feature 1..20: note = chemically synthesized
  source 1..20: mol_type = other DNA
catcaataattctagcccca

SEQ ID NO: 14327 - DNA, 20 bp, synthetic construct
  misc_feature 1..20: note = chemically synthesized
  source 1..20: mol_type = other DNA
atcaataattctagccccac

SEQ ID NO: 14328 - DNA, 20 bp, synthetic construct
  misc_feature 1..20: note = chemically synthesized
  source 1..20: mol_type = other DNA
caataattctagccccacag

SEQ ID NO: 14329 - DNA, 20 bp, synthetic construct
  misc_feature 1..20: note = chemically synthesized
  source 1..20: mol_type = other DNA
cccacaggagtttgttctga

SEQ ID NO: 14330 - DNA, 20 bp, synthetic construct
  misc_feature 1..20: note = chemically synthesized
  source 1..20: mol_type = other DNA
aagtaaacttccacaaccgc

SEQ ID NO: 14331 - DNA, 20 bp, synthetic construct
  misc_feature 1..20: note = chemically synthesized
  source 1..20: mol_type = other DNA
tccacaaccgcaagcttatt

SEQ ID NO: 14332 - DNA, 20 bp, synthetic construct
  misc_feature 1..20: note = chemically synthesized
  source 1..20: mol_type = other DNA
ccacaaccgcaagcttattg

SEQ ID NO: 14333 - DNA, 20 bp, synthetic construct
  misc_feature 1..20: note = chemically synthesized
  source 1..20: mol_type = other DNA
accgcaagcttattgaggct

SEQ ID NO: 14334 - DNA, 20 bp, synthetic construct
  misc_feature 1..20: note = chemically synthesized
  source 1..20: mol_type = other DNA
ccgcaagcttattgaggcta

SEQ ID NO: 14335 - DNA, 20 bp, synthetic construct
  misc_feature 1..20: note = chemically synthesized
  source 1..20: mol_type = other DNA
ttgaggctaaggcatctgtg

SEQ ID NO: 14336 - DNA, 20 bp, synthetic construct
  misc_feature 1..20: note = chemically synthesized
  source 1..20: mol_type = other DNA
tgaggctaaggcatctgtga

SEQ ID NO: 14337 - DNA, 20 bp, synthetic construct
  misc_feature 1..20: note = chemically synthesized
  source 1..20: mol_type = other DNA
gctaaggcatctgtgaagga

SEQ ID NO: 14338 - DNA, 20 bp, synthetic construct
  misc_feature 1..20: note = chemically synthesized
  source 1..20: mol_type = other DNA
cctctaaaccactatgctgc

SEQ ID NO: 14339 - DNA, 20 bp, synthetic construct
  misc_feature 1..20: note = chemically synthesized
  source 1..20: mol_type = other DNA
tctaaaccactatgctgcta

SEQ ID NO: 14340 - DNA, 20 bp, synthetic construct
  misc_feature 1..20: note = chemically synthesized
  source 1..20: mol_type = other DNA
agagcctcttttctgtactc

SEQ ID NO: 14341 - DNA, 20 bp, synthetic construct
  misc_feature 1..20: note = chemically synthesized
  source 1..20: mol_type = other DNA
ttctgtactcaagcctcatt

SEQ ID NO: 14342 - DNA, 20 bp, synthetic construct
  misc_feature 1..20: note = chemically synthesized
  source 1..20: mol_type = other DNA
ctcaagcctcattcagacac

SEQ ID NO: 14343 - DNA, 20 bp, synthetic construct
  misc_feature 1..20: note = chemically synthesized
  source 1..20: mol_type = other DNA
cattcagacactagtgtcac

SEQ ID NO: 14344 - DNA, 20 bp, synthetic construct
  misc_feature 1..20: note = chemically synthesized
  source 1..20: mol_type = other DNA
ttgtattttcttcttcttgc

SEQ ID NO: 14345 - DNA, 20 bp, synthetic construct
  misc_feature 1..20: note = chemically synthesized
  source 1..20: mol_type = other DNA
ttttcttcttcttgctggtt

SEQ ID NO: 14346 - DNA, 20 bp, synthetic construct
  misc_feature 1..20: note = chemically synthesized
  source 1..20: mol_type = other DNA
gctggtttagtcatgttttc

SEQ ID NO: 14347 - DNA, 20 bp, synthetic construct
  misc_feature 1..20: note = chemically synthesized
  source 1..20: mol_type = other DNA
ctggtttagtcatgttttct

SEQ ID NO: 14348 - DNA, 20 bp, synthetic construct
  misc_feature 1..20: note = chemically synthesized
  source 1..20: mol_type = other DNA
ggtttagtcatgttttctgg

SEQ ID NO: 14349 - DNA, 20 bp, synthetic construct
  misc_feature 1..20: note = chemically synthesized
  source 1..20: mol_type = other DNA
agtcatgttttctgggagct

SEQ ID NO: 14350 - DNA, 20 bp, synthetic construct
  misc_feature 1..20: note = chemically synthesized
  source 1..20: mol_type = other DNA
gtcatgttttctgggagctt

SEQ ID NO: 14351 - DNA, 20 bp, synthetic construct
  misc_feature 1..20: note = chemically synthesized
  source 1..20: mol_type = other DNA
tcatgttttctgggagctta

SEQ ID NO: 14352 - DNA, 20 bp, synthetic construct
  misc_feature 1..20: note = chemically synthesized
  source 1..20: mol_type = other DNA
catgttttctgggagcttag

SEQ ID NO: 14353 - DNA, 20 bp, synthetic construct
  misc_feature 1..20: note = chemically synthesized
  source 1..20: mol_type = other DNA
ttgttttgttttctaatcaa

SEQ ID NO: 14354 - DNA, 20 bp, synthetic construct
  misc_feature 1..20: note = chemically synthesized
  source 1..20: mol_type = other DNA
gttttgttttctaatcaaca

SEQ ID NO: 14355 - DNA, 20 bp, synthetic construct
  misc_feature 1..20: note = chemically synthesized
  source 1..20: mol_type = other DNA
tgttttctaatcaacagaga

SEQ ID NO: 14356 - DNA, 20 bp, synthetic construct
  misc_feature 1..20: note = chemically synthesized
  source 1..20: mol_type = other DNA
gttttctaatcaacagagat

SEQ ID NO: 14357 - DNA, 20 bp, synthetic construct
  misc_feature 1..20: note = chemically synthesized
  source 1..20: mol_type = other DNA
aaacccattatttttttctt

SEQ ID NO: 14358 - DNA, 20 bp, synthetic construct
  misc_feature 1..20: note = chemically synthesized
  source 1..20: mol_type = other DNA
attatttttttctttagact

SEQ ID NO: 14359 - DNA, 20 bp, synthetic construct
  misc_feature 1..20: note = chemically synthesized
  source 1..20: mol_type = other DNA
ttatttttttctttagactt

SEQ ID NO: 14360 - DNA, 20 bp, synthetic construct
  misc_feature 1..20: note = chemically synthesized
  source 1..20: mol_type = other DNA
ttttttctttagacttggga

SEQ ID NO: 14361 - DNA, 20 bp, synthetic construct
  misc_feature 1..20: note = chemically synthesized
  source 1..20: mol_type = other DNA
ctttagacttgggatggtga

SEQ ID NO: 14362 - DNA, 20 bp, synthetic construct
  misc_feature 1..20: note = chemically synthesized
  source 1..20: mol_type = other DNA
agacttgggatggtgatagc

SEQ ID NO: 14363 - DNA, 20 bp, synthetic construct
  misc_feature 1..20: note = chemically synthesized
  source 1..20: mol_type = other DNA
gacttgggatggtgatagct

SEQ ID NO: 14364 - DNA, 20 bp, synthetic construct
  misc_feature 1..20: note = chemically synthesized
  source 1..20: mol_type = other DNA
ttgggatggtgatagctggg

SEQ ID NO: 14365 - DNA, 20 bp, synthetic construct
  misc_feature 1..20: note = chemically synthesized
  source 1..20: mol_type = other DNA
tggtgatagctgggcagcgt

SEQ ID NO: 14366 - DNA, 20 bp, synthetic construct
  misc_feature 1..20: note = chemically synthesized
  source 1..20: mol_type = other DNA
gcagcgtcagaaactgtgtg

SEQ ID NO: 14367 - DNA, 20 bp, synthetic construct
  misc_feature 1..20: note = chemically synthesized
  source 1..20: mol_type = other DNA
tcagaaactgtgtgtggata

SEQ ID NO: 14368 - DNA, 20 bp, synthetic construct
  misc_feature 1..20: note = chemically synthesized
  source 1..20: mol_type = other DNA
aactgtgtgtggatatagat

SEQ ID NO: 14369 - DNA, 20 bp, synthetic construct
  misc_feature 1..20: note = chemically synthesized
  source 1..20: mol_type = other DNA
ctgtgtgtggatatagataa

SEQ ID NO: 14370 - DNA, 20 bp, synthetic construct
  misc_feature 1..20: note = chemically synthesized
  source 1..20: mol_type = other DNA
tgtggatatagataagagct

SEQ ID NO: 14371 - DNA, 20 bp, synthetic construct
  misc_feature 1..20: note = chemically synthesized
  source 1..20: mol_type = other DNA
gtggatatagataagagctc

SEQ ID NO: 14372 - DNA, 20 bp, synthetic construct
  misc_feature 1..20: note = chemically synthesized
  source 1..20: mol_type = other DNA
taagagctcaggactatgct

SEQ ID NO: 14373 - DNA, 20 bp, synthetic construct
  misc_feature 1..20: note = chemically synthesized
  source 1..20: mol_type = other DNA
ggactatgctgagctgtgat

SEQ ID NO: 14374 - DNA, 20 bp, synthetic construct
  misc_feature 1..20: note = chemically synthesized
  source 1..20: mol_type = other DNA
gactatgctgagctgtgatg

SEQ ID NO: 14375 - DNA, 20 bp, synthetic construct
  misc_feature 1..20: note = chemically synthesized
  source 1..20: mol_type = other DNA
actatgctgagctgtgatga

SEQ ID NO: 14376 - DNA, 20 bp, synthetic construct
  misc_feature 1..20: note = chemically synthesized
  source 1..20: mol_type = other DNA
tatgctgagctgtgatgagg

SEQ ID NO: 14377 - DNA, 20 bp, synthetic construct
  misc_feature 1..20: note = chemically synthesized
  source 1..20: mol_type = other DNA
atgctgagctgtgatgaggg

SEQ ID NO: 14378 - DNA, 20 bp, synthetic construct
  misc_feature 1..20: note = chemically synthesized
  source 1..20: mol_type = other DNA
tgctgagctgtgatgaggga

SEQ ID NO: 14379 - DNA, 20 bp, synthetic construct
  misc_feature 1..20: note = chemically synthesized
  source 1..20: mol_type = other DNA
gctgagctgtgatgagggag

SEQ ID NO: 14380 - DNA, 20 bp, synthetic construct
  misc_feature 1..20: note = chemically synthesized
  source 1..20: mol_type = other DNA
gctgtgatgagggaggggcc

SEQ ID NO: 14381 - DNA, 20 bp, synthetic construct
  misc_feature 1..20: note = chemically synthesized
  source 1..20: mol_type = other DNA
atgagggaggggcctagcta

SEQ ID NO: 14382 - DNA, 20 bp, synthetic construct
  misc_feature 1..20: note = chemically synthesized
  source 1..20: mol_type = other DNA
tgagggaggggcctagctaa

SEQ ID NO: 14383 - DNA, 20 bp, synthetic construct
  misc_feature 1..20: note = chemically synthesized
  source 1..20: mol_type = other DNA
gggaggggcctagctaaagg

SEQ ID NO: 14384 - DNA, 20 bp, synthetic construct
  misc_feature 1..20: note = chemically synthesized
  source 1..20: mol_type = other DNA
ggggcctagctaaaggcagt

SEQ ID NO: 14385 - DNA, 20 bp, synthetic construct
  misc_feature 1..20: note = chemically synthesized
  source 1..20: mol_type = other DNA
ggcctagctaaaggcagtga

SEQ ID NO: 14386 - DNA, 20 bp, synthetic construct
  misc_feature 1..20: note = chemically synthesized
  source 1..20: mol_type = other DNA
tagctaaaggcagtgagagt

SEQ ID NO: 14387 - DNA, 20 bp, synthetic construct
  misc_feature 1..20: note = chemically synthesized
  source 1..20: mol_type = other DNA
tgctcctgctattgccttct

SEQ ID NO: 14388 - DNA, 20 bp, synthetic construct
  misc_feature 1..20: note = chemically synthesized
  source 1..20: mol_type = other DNA
gccttctcagtccccacgct

SEQ ID NO: 14389 - DNA, 20 bp, synthetic construct
  misc_feature 1..20: note = chemically synthesized
  source 1..20: mol_type = other DNA
cccacgcttggtttctacac

SEQ ID NO: 14390 - DNA, 20 bp, synthetic construct
  misc_feature 1..20: note = chemically synthesized
  source 1..20: mol_type = other DNA
acgcttggtttctacacaag

SEQ ID NO: 14391 - DNA, 20 bp, synthetic construct
  misc_feature 1..20: note = chemically synthesized
  source 1..20: mol_type = other DNA
tttctacacaagtagataca

SEQ ID NO: 14392 - DNA, 20 bp, synthetic construct
  misc_feature 1..20: note = chemically synthesized
  source 1..20: mol_type = other DNA
acacaagtagatacatagaa

SEQ ID NO: 14393 - DNA, 20 bp, synthetic construct
  misc_feature 1..20: note = chemically synthesized
  source 1..20: mol_type = other DNA
cacaagtagatacatagaaa

SEQ ID NO: 14394 - DNA, 20 bp, synthetic construct
  misc_feature 1..20: note = chemically synthesized
  source 1..20: mol_type = other DNA
tagatacatagaaaaggcta

SEQ ID NO: 14395 - DNA, 20 bp, synthetic construct
  misc_feature 1..20: note = chemically synthesized
  source 1..20: mol_type = other DNA
agatacatagaaaaggctat

SEQ ID NO: 14396 - DNA, 20 bp, synthetic construct
  misc_feature 1..20: note = chemically synthesized
  source 1..20: mol_type = other DNA
acatagaaaaggctataggt

SEQ ID NO: 14397 - DNA, 20 bp, synthetic construct
  misc_feature 1..20: note = chemically synthesized
  source 1..20: mol_type = other DNA
aaggctataggttagtgttt

SEQ ID NO: 14398 - DNA, 20 bp, synthetic construct
  misc_feature 1..20: note = chemically synthesized
  source 1..20: mol_type = other DNA
ggctataggttagtgtttga

SEQ ID NO: 14399 - DNA, 20 bp, synthetic construct
  misc_feature 1..20: note = chemically synthesized
  source 1..20: mol_type = other DNA
gtttgagagtcctgcatgat

SEQ ID NO: 14400 - DNA, 20 bp, synthetic construct
  misc_feature 1..20: note = chemically synthesized
  source 1..20: mol_type = other DNA
gtcctgcatgattagttgct

SEQ ID NO: 14401 - DNA, 20 bp, synthetic construct
  misc_feature 1..20: note = chemically synthesized
  source 1..20: mol_type = other DNA
tgtgattatcatcaaaacgt

SEQ ID NO: 14402 - DNA, 20 bp, synthetic construct
  misc_feature 1..20: note = chemically synthesized
  source 1..20: mol_type = other DNA
gtgattatcatcaaaacgtg

SEQ ID NO: 14403 - DNA, 20 bp, synthetic construct
  misc_feature 1..20: note = chemically synthesized
  source 1..20: mol_type = other DNA
tgattatcatcaaaacgtga

SEQ ID NO: 14404 - DNA, 20 bp, synthetic construct
  misc_feature 1..20: note = chemically synthesized
  source 1..20: mol_type = other DNA
tcatcaaaacgtgagggcta

SEQ ID NO: 14405 - DNA, 20 bp, synthetic construct
  misc_feature 1..20: note = chemically synthesized
  source 1..20: mol_type = other DNA
aacgtgagggctaaagtgac

SEQ ID NO: 14406 - DNA, 20 bp, synthetic construct
  misc_feature 1..20: note = chemically synthesized
  source 1..20: mol_type = other DNA
aaagtgaccagataacttgc

SEQ ID NO: 14407 - DNA, 20 bp, synthetic construct
  misc_feature 1..20: note = chemically synthesized
  source 1..20: mol_type = other DNA
accagataacttgcaagtcc

SEQ ID NO: 14408 - DNA, 20 bp, synthetic construct
  misc_feature 1..20: note = chemically synthesized
  source 1..20: mol_type = other DNA
ccagataacttgcaagtcct

SEQ ID NO: 14409 - DNA, 20 bp, synthetic construct
  misc_feature 1..20: note = chemically synthesized
  source 1..20: mol_type = other DNA
acttgcaagtcctaggatac

SEQ ID NO: 14410 - DNA, 20 bp, synthetic construct
  misc_feature 1..20: note = chemically synthesized
  source 1..20: mol_type = other DNA
cttgcaagtcctaggatacc

SEQ ID NO: 14411 - DNA, 20 bp, synthetic construct
  misc_feature 1..20: note = chemically synthesized
  source 1..20: mol_type = other DNA
tacattccaaaaatttaact

SEQ ID NO: 14412 - DNA, 20 bp, synthetic construct
  misc_feature 1..20: note = chemically synthesized
  source 1..20: mol_type = other DNA
aaaaaaaaacaaaaaaaaac

SEQ ID NO: 14413 - DNA, 20 bp, synthetic construct
  misc_feature 1..20: note = chemically synthesized
  source 1..20: mol_type = other DNA
aaaaaaaaaccagtgatcca

SEQ ID NO: 14414 - DNA, 20 bp, synthetic construct
  misc_feature 1..20: note = chemically synthesized
  source 1..20: mol_type = other DNA
aaaccagtgatccatggaca

SEQ ID NO: 14415 - DNA, 20 bp, synthetic construct
  misc_feature 1..20: note = chemically synthesized
  source 1..20: mol_type = other DNA
aaccagtgatccatggacac

SEQ ID NO: 14416 - DNA, 20 bp, synthetic construct
  misc_feature 1..20: note = chemically synthesized
  source 1..20: mol_type = other DNA
accagtgatccatggacaca

SEQ ID NO: 14417 - DNA, 20 bp, synthetic construct
  misc_feature 1..20: note = chemically synthesized
  source 1..20: mol_type = other DNA
cagtgatccatggacacagg

SEQ ID NO: 14418 - DNA, 20 bp, synthetic construct
  misc_feature 1..20: note = chemically synthesized
  source 1..20: mol_type = other DNA
agtgatccatggacacaggg

SEQ ID NO: 14419 - DNA, 20 bp, synthetic construct
  misc_feature 1..20: note = chemically synthesized
  source 1..20: mol_type = other DNA
gtgatccatggacacaggga

SEQ ID NO: 14420 - DNA, 20 bp, synthetic construct
  misc_feature 1..20: note = chemically synthesized
  source 1..20: mol_type = other DNA
tgatccatggacacagggag

SEQ ID NO: 14421 - DNA, 20 bp, synthetic construct
  misc_feature 1..20: note = chemically synthesized
  source 1..20: mol_type = other DNA
gggaggggaacatcacacac

SEQ ID NO: 14422 - DNA, 20 bp, synthetic construct
  misc_feature 1..20: note = chemically synthesized
  source 1..20: mol_type = other DNA
ggaggggaacatcacacact

SEQ ID NO: 14423 - DNA, 20 bp, synthetic construct
  misc_feature 1..20: note = chemically synthesized
  source 1..20: mol_type = other DNA
gaggggaacatcacacactg

SEQ ID NO: 14424 - DNA, 20 bp, synthetic construct
  misc_feature 1..20: note = chemically synthesized
  source 1..20: mol_type = other DNA
catcacacactggggcctgt

SEQ ID NO: 14425 - DNA, 20 bp, synthetic construct
  misc_feature 1..20: note = chemically synthesized
  source 1..20: mol_type = other DNA
atcacacactggggcctgtt

SEQ ID NO: 14426 - DNA, 20 bp, synthetic construct
  misc_feature 1..20: note = chemically synthesized
  source 1..20: mol_type = other DNA
tcacacactggggcctgttg

SEQ ID NO: 14427 - DNA, 20 bp, synthetic construct
  misc_feature 1..20: note = chemically synthesized
  source 1..20: mol_type = other DNA
cacacactggggcctgttgg

SEQ ID NO: 14428 - DNA, 20 bp, synthetic construct
  misc_feature 1..20: note = chemically synthesized
  source 1..20: mol_type = other DNA
acactggggcctgttggggg

SEQ ID NO: 14429 - DNA, 20 bp, synthetic construct
  misc_feature 1..20: note = chemically synthesized
  source 1..20: mol_type = other DNA
cactggggcctgttgggggt

SEQ ID NO: 14430 - DNA, 20 bp, synthetic construct
  misc_feature 1..20: note = chemically synthesized
  source 1..20: mol_type = other DNA
actggggcctgttgggggtg

SEQ ID NO: 14431 - DNA, 20 bp, synthetic construct
  misc_feature 1..20: note = chemically synthesized
  source 1..20: mol_type = other DNA
ctggggcctgttgggggtgg

SEQ ID NO: 14432 - DNA, 20 bp, synthetic construct
  misc_feature 1..20: note = chemically synthesized
  source 1..20: mol_type = other DNA
tggggcctgttgggggtggg

SEQ ID NO: 14433 - DNA, 20 bp, synthetic construct
  misc_feature 1..20: note = chemically synthesized
  source 1..20: mol_type = other DNA
gcctgttgggggtggggggc

SEQ ID NO: 14434 - DNA, 20 bp, synthetic construct
  misc_feature 1..20: note = chemically synthesized
  source 1..20: mol_type = other DNA
cctgttgggggtggggggct

SEQ ID NO: 14435 - DNA, 20 bp, synthetic construct
  misc_feature 1..20: note = chemically synthesized
  source 1..20: mol_type = other DNA
ctgttgggggtggggggcta

SEQ ID NO: 14436 - DNA, 20 bp, synthetic construct
  misc_feature 1..20: note = chemically synthesized
  source 1..20: mol_type = other DNA
tgttgggggtggggggctag

SEQ ID NO: 14437 - DNA, 20 bp, synthetic construct
  misc_feature 1..20: note = chemically synthesized
  source 1..20: mol_type = other DNA
tgggggtggggggctagggg

SEQ ID NO: 14438 - DNA, 20 bp, synthetic construct
  misc_feature 1..20: note = chemically synthesized
  source 1..20: mol_type = other DNA
gggggtggggggctagggga

SEQ ID NO: 14439 - DNA, 20 bp, synthetic construct
  misc_feature 1..20: note = chemically synthesized
  source 1..20: mol_type = other DNA
gtggggggctaggggaagga

SEQ ID NO: 14440 - DNA, 20 bp, synthetic construct
  misc_feature 1..20: note = chemically synthesized
  source 1..20: mol_type = other DNA
ggctaggggaaggatagcat

SEQ ID NO: 14441 - DNA, 20 bp, synthetic construct
  misc_feature 1..20: note = chemically synthesized
  source 1..20: mol_type = other DNA
gctaggggaaggatagcatt

SEQ ID NO: 14442 - DNA, 20 bp, synthetic construct
  misc_feature 1..20: note = chemically synthesized
  source 1..20: mol_type = other DNA
taggggaaggatagcattag

SEQ ID NO: 14443 - DNA, 20 bp, synthetic construct
  misc_feature 1..20: note = chemically synthesized
  source 1..20: mol_type = other DNA
attaggagaaatacctaatg

SEQ ID NO: 14444 - DNA, 20 bp, synthetic construct
  misc_feature 1..20: note = chemically synthesized
  source 1..20: mol_type = other DNA
gaaatacctaatgtagatga

SEQ ID NO: 14445 - DNA, 20 bp, synthetic construct
  misc_feature 1..20: note = chemically synthesized
  source 1..20: mol_type = other DNA
aaatacctaatgtagatgac

SEQ ID NO: 14446 - DNA, 20 bp, synthetic construct
  misc_feature 1..20: note = chemically synthesized
  source 1..20: mol_type = other DNA
taatgtagatgacgggttga

SEQ ID NO: 14447 - DNA, 20 bp, synthetic construct
  misc_feature 1..20: note = chemically synthesized
  source 1..20: mol_type = other DNA
aatgtagatgacgggttgat

SEQ ID NO: 14448 - DNA, 20 bp, synthetic construct
  misc_feature 1..20: note = chemically synthesized
  source 1..20: mol_type = other DNA
agatgacgggttgatgggtg

SEQ ID NO: 14449 - DNA, 20 bp, synthetic construct
  misc_feature 1..20: note = chemically synthesized
  source 1..20: mol_type = other DNA
atgggtgcagcaaaccacca

SEQ ID NO: 14450 - DNA, 20 bp, synthetic construct
  misc_feature 1..20: note = chemically synthesized
  source 1..20: mol_type = other DNA
ccaccatggcacatgtaccc

SEQ ID NO: 14451 - DNA, 20 bp, synthetic construct
  misc_feature 1..20: note = chemically synthesized
  source 1..20: mol_type = other DNA
cacatgtaccccagaactta

SEQ ID NO: 14452 - DNA, 20 bp, synthetic construct
  misc_feature 1..20: note = chemically synthesized
  source 1..20: mol_type = other DNA
cttaaagcatattaaaaaaa

SEQ ID NO: 14453 - DNA, 20 bp, synthetic construct
  misc_feature 1..20: note = chemically synthesized
  source 1..20: mol_type = other DNA
taaaaaaacagtgatcataa

SEQ ID NO: 14454 - DNA, 20 bp, synthetic construct
  misc_feature 1..20: note = chemically synthesized
  source 1..20: mol_type = other DNA
aaaaacagtgatcataaaag

SEQ ID NO: 14455 - DNA, 20 bp, synthetic construct
  misc_feature 1..20: note = chemically synthesized
  source 1..20: mol_type = other DNA
agaagctcaaatttaactat

SEQ ID NO: 14456 - DNA, 20 bp, synthetic construct
  misc_feature 1..20: note = chemically synthesized
  source 1..20: mol_type = other DNA
aagctcaaatttaactataa

SEQ ID NO: 14457 - DNA, 20 bp, synthetic construct
  misc_feature 1..20: note = chemically synthesized
  source 1..20: mol_type = other DNA
tcaaatttaactataagaga

SEQ ID NO: 14458 - DNA, 20 bp, synthetic construct
  misc_feature 1..20: note = chemically synthesized
  source 1..20: mol_type = other DNA
tttaactataagagacggaa

SEQ ID NO: 14459 - DNA, 20 bp, synthetic construct
  misc_feature 1..20: note = chemically synthesized
  source 1..20: mol_type = other DNA
aattcttaactataatctta

SEQ ID NO: 14460 - DNA, 20 bp, synthetic construct
  misc_feature 1..20: note = chemically synthesized
  source 1..20: mol_type = other DNA
tacagaatattctcattgaa

SEQ ID NO: 14461 - DNA, 20 bp, synthetic construct
  misc_feature 1..20: note = chemically synthesized
  source 1..20: mol_type = other DNA
agaatattctcattgaatag

SEQ ID NO: 14462 - DNA, 20 bp, synthetic construct
  misc_feature 1..20: note = chemically synthesized
  source 1..20: mol_type = other DNA
aatagaagtatgcttatcat

SEQ ID NO: 14463 - DNA, 20 bp, synthetic construct
  misc_feature 1..20: note = chemically synthesized
  source 1..20: mol_type = other DNA
tagaagtatgcttatcatta

SEQ ID NO: 14464 - DNA, 20 bp, synthetic construct
  misc_feature 1..20: note = chemically synthesized
  source 1..20: mol_type = other DNA
tatgcttatcattagagatt

SEQ ID NO: 14465 - DNA, 20 bp, synthetic construct
  misc_feature 1..20: note = chemically synthesized
  source 1..20: mol_type = other DNA
cttatcattagagatttgga

SEQ ID NO: 14466 - DNA, 20 bp, synthetic construct
  misc_feature 1..20: note = chemically synthesized
  source 1..20: mol_type = other DNA
tcattagagatttggacagc

SEQ ID NO: 14467 - DNA, 20 bp, synthetic construct
  misc_feature 1..20: note = chemically synthesized
  source 1..20: mol_type = other DNA
cattagagatttggacagcc

SEQ ID NO: 14468 - DNA, 20 bp, synthetic construct
  misc_feature 1..20: note = chemically synthesized
  source 1..20: mol_type = other DNA
agagatttggacagccagga

SEQ ID NO: 14469 - DNA, 20 bp, synthetic construct
  misc_feature 1..20: note = chemically synthesized
  source 1..20: mol_type = other DNA
tttggacagccaggaaagca

SEQ ID NO: 14470 - DNA, 20 bp, synthetic construct
  misc_feature 1..20: note = chemically synthesized
  source 1..20: mol_type = other DNA
gaaagcacagaaaaaaaaaa

SEQ ID NO: 14471 - DNA, 20 bp, synthetic construct
  misc_feature 1..20: note = chemically synthesized
  source 1..20: mol_type = other DNA
aaagcacagaaaaaaaaaaa

SEQ ID NO: 14472 - DNA, 20 bp, synthetic construct
  misc_feature 1..20: note = chemically synthesized
  source 1..20: mol_type = other DNA
agcacagaaaaaaaaaaaag

SEQ ID NO: 14473 - DNA, 20 bp, synthetic construct
  misc_feature 1..20: note = chemically synthesized
  source 1..20: mol_type = other DNA
aaaggagctctgttgcctta

SEQ ID NO: 14474 - DNA, 20 bp, synthetic construct
  misc_feature 1..20: note = chemically synthesized
  source 1..20: mol_type = other DNA
agctctgttgccttatagcc

SEQ ID NO: 14475 - DNA, 20 bp, synthetic construct
  misc_feature 1..20: note = chemically synthesized
  source 1..20: mol_type = other DNA
ctctgttgccttatagccta

SEQ ID NO: 14476 - DNA, 20 bp, synthetic construct
  misc_feature 1..20: note = chemically synthesized
  source 1..20: mol_type = other DNA
tctgttgccttatagcctag

SEQ ID NO: 14477 - DNA, 20 bp, synthetic construct
  misc_feature 1..20: note = chemically synthesized
  source 1..20: mol_type = other DNA
cctcacataacactgatgtc

SEQ ID NO: 14478 - DNA, 20 bp, synthetic construct
  misc_feature 1..20: note = chemically synthesized
  source 1..20: mol_type = other DNA
ctcacataacactgatgtcc

SEQ ID NO: 14479 - DNA, 20 bp, synthetic construct
  misc_feature 1..20: note = chemically synthesized
  source 1..20: mol_type = other DNA
ataacactgatgtccaggcc

SEQ ID NO: 14480 - DNA, 20 bp, synthetic construct
  misc_feature 1..20: note = chemically synthesized
  source 1..20: mol_type = other DNA
taacactgatgtccaggcca

SEQ ID NO: 14481 - DNA, 20 bp, synthetic construct
  misc_feature 1..20: note = chemically synthesized
  source 1..20: mol_type = other DNA
ccaaggccatccttcccatg

SEQ ID NO: 14482 - DNA, 20 bp, synthetic construct
  misc_feature 1..20: note = chemically synthesized
  source 1..20: mol_type = other DNA
ggccatccttcccatgaaga

SEQ ID NO: 14483 - DNA, 20 bp, synthetic construct
  misc_feature 1..20: note = chemically synthesized
  source 1..20: mol_type = other DNA
tcccatgaagatggatgaat

SEQ ID NO: 14484 - DNA, 20 bp, synthetic construct
  misc_feature 1..20: note = chemically synthesized
  source 1..20: mol_type = other DNA
ctatgaaataatgtttactt

SEQ ID NO: 14485 - DNA, 20 bp, synthetic construct
  misc_feature 1..20: note = chemically synthesized
  source 1..20: mol_type = other DNA
tgaaataatgtttactttag

SEQ ID NO: 14486 - DNA, 20 bp, synthetic construct
  misc_feature 1..20: note = chemically synthesized
  source 1..20: mol_type = other DNA
actttagtggcatattgcat

SEQ ID NO: 14487 - DNA, 20 bp, synthetic construct
  misc_feature 1..20: note = chemically synthesized
  source 1..20: mol_type = other DNA
ctttagtggcatattgcatt

SEQ ID NO: 14488 - DNA, 20 bp, synthetic construct
  misc_feature 1..20: note = chemically synthesized
  source 1..20: mol_type = other DNA
ttgcattaggctacctgcct

SEQ ID NO: 14489 - DNA, 20 bp, synthetic construct
  misc_feature 1..20: note = chemically synthesized
  source 1..20: mol_type = other DNA
ttaggctacctgccttggca

SEQ ID NO: 14490 - DNA, 20 bp, synthetic construct
  misc_feature 1..20: note = chemically synthesized
  source 1..20: mol_type = other DNA
ttaattgcttacataaacat

SEQ ID NO: 14491 - DNA, 20 bp, synthetic construct
  misc_feature 1..20: note = chemically synthesized
  source 1..20: mol_type = other DNA
ttacataaacatgagtgctc

SEQ ID NO: 14492 - DNA, 20 bp, synthetic construct
  misc_feature 1..20: note = chemically synthesized
  source 1..20: mol_type = other DNA
agtgctctagttataaattc

SEQ ID NO: 14493 - DNA, 20 bp, synthetic construct
  misc_feature 1..20: note = chemically synthesized
  source 1..20: mol_type = other DNA
ttccagtgtaaaaaacaccc

SEQ ID NO: 14494 - DNA, 20 bp, synthetic construct
  misc_feature 1..20: note = chemically synthesized
  source 1..20: mol_type = other DNA
ggtttcgatattcatctttt

SEQ ID NO: 14495 - DNA, 20 bp, synthetic construct
  misc_feature 1..20: note = chemically synthesized
  source 1..20: mol_type = other DNA
atcttttgagccttttattt

SEQ ID NO: 14496 - DNA, 20 bp, synthetic construct
  misc_feature 1..20: note = chemically synthesized
  source 1..20: mol_type = other DNA
tttgagccttttattttggt

SEQ ID NO: 14497 - DNA, 20 bp, synthetic construct
  misc_feature 1..20: note = chemically synthesized
  source 1..20: mol_type = other DNA
ccttttattttggtcagaac

SEQ ID NO: 14498 - DNA, 20 bp, synthetic construct
  misc_feature 1..20: note = chemically synthesized
  source 1..20: mol_type = other DNA
tttggtcagaacaagttttc

SEQ ID NO: 14499 - DNA, 20 bp, synthetic construct
  misc_feature 1..20: note = chemically synthesized
  source 1..20: mol_type = other DNA
tggtcagaacaagttttcaa

SEQ ID NO: 14500 - DNA, 20 bp, synthetic construct
  misc_feature 1..20: note = chemically synthesized
  source 1..20: mol_type = other DNA
aagttttcaagagcaaatct

SEQ ID NO: 14501 - DNA, 20 bp, synthetic construct
  misc_feature 1..20: note = chemically synthesized
  source 1..20: mol_type = other DNA
tctcagcctacaaaacaaat

SEQ ID NO: 14502 - DNA, 20 bp, synthetic construct
  misc_feature 1..20: note = chemically synthesized
  source 1..20: mol_type = other DNA
aaaacaaatgagtccaattc

SEQ ID NO: 14503 - DNA, 20 bp, synthetic construct
  misc_feature 1..20: note = chemically synthesized
  source 1..20: mol_type = other DNA
atgagtccaattctagaact

SEQ ID NO: 14504 - DNA, 20 bp, synthetic construct
  misc_feature 1..20: note = chemically synthesized
  source 1..20: mol_type = other DNA
tagaactcagtaatcccatc

SEQ ID NO: 14505 - DNA, 20 bp, synthetic construct
  misc_feature 1..20: note = chemically synthesized
  source 1..20: mol_type = other DNA
agaactcagtaatcccatca

SEQ ID NO: 14506 - DNA, 20 bp, synthetic construct
  misc_feature 1..20: note = chemically synthesized
  source 1..20: mol_type = other DNA
tcccatcaaggctctgcctg

SEQ ID NO: 14507 - DNA, 20 bp, synthetic construct
  misc_feature 1..20: note = chemically synthesized
  source 1..20: mol_type = other DNA
ccatcaaggctctgcctgcg

SEQ ID NO: 14508 - DNA, 20 bp, synthetic construct
  misc_feature 1..20: note = chemically synthesized
  source 1..20: mol_type = other DNA
catcaaggctctgcctgcgg

SEQ ID NO: 14509 - DNA, 20 bp, synthetic construct
  misc_feature 1..20: note = chemically synthesized
  source 1..20: mol_type = other DNA
atcaaggctctgcctgcgga

SEQ ID NO: 14510 - DNA, 20 bp, synthetic construct
  misc_feature 1..20: note = chemically synthesized
  source 1..20: mol_type = other DNA
tctgcctgcggagggctaac

SEQ ID NO: 14511 - DNA, 20 bp, synthetic construct
  misc_feature 1..20: note = chemically synthesized
  source 1..20: mol_type = other DNA
gagggctaactagctctatg

SEQ ID NO: 14512 - DNA, 20 bp, synthetic construct
  misc_feature 1..20: note = chemically synthesized
  source 1..20: mol_type = other DNA
agggctaactagctctatgc

SEQ ID NO: 14513 - DNA, 20 bp, synthetic construct
  misc_feature 1..20: note = chemically synthesized
  source 1..20: mol_type = other DNA
taactagctctatgcaggct

SEQ ID NO: 14514 - DNA, 20 bp, synthetic construct
  misc_feature 1..20: note = chemically synthesized
  source 1..20: mol_type = other DNA
ctatgcaggcttagcacttc

SEQ ID NO: 14515 - DNA, 20 bp, synthetic construct
  misc_feature 1..20: note = chemically synthesized
  source 1..20: mol_type = other DNA
ctgatttctttgtgtgtgca

SEQ ID NO: 14516 - DNA, 20 bp, synthetic construct
  misc_feature 1..20: note = chemically synthesized
  source 1..20: mol_type = other DNA
atttctttgtgtgtgcatag

SEQ ID NO: 14517 - DNA, 20 bp, synthetic construct
  misc_feature 1..20: note = chemically synthesized
  source 1..20: mol_type = other DNA
tctttgtgtgtgcatagcag

SEQ ID NO: 14518 - DNA, 20 bp, synthetic construct
  misc_feature 1..20: note = chemically synthesized
  source 1..20: mol_type = other DNA
gtgcatagcagtggatgtgt

SEQ ID NO: 14519 - DNA, 20 bp, synthetic construct
  misc_feature 1..20: note = chemically synthesized
  source 1..20: mol_type = other DNA
agcatacatccttttaatta

SEQ ID NO: 14520 - DNA, 20 bp, synthetic construct
  misc_feature 1..20: note = chemically synthesized
  source 1..20: mol_type = other DNA
ttcaaaattgtaaaattgct

SEQ ID NO: 14521 - DNA, 20 bp, synthetic construct
  misc_feature 1..20: note = chemically synthesized
  source 1..20: mol_type = other DNA
ttgtaaaattgctaagaata

SEQ ID NO: 14522 - DNA, 20 bp, synthetic construct
  misc_feature 1..20: note = chemically synthesized
  source 1..20: mol_type = other DNA
ctaagaatacagcacaaaaa

SEQ ID NO: 14523 - DNA, 20 bp, synthetic construct
  misc_feature 1..20: note = chemically synthesized
  source 1..20: mol_type = other DNA
aatacagcacaaaaacagaa

SEQ ID NO: 14524 - DNA, 20 bp, synthetic construct
  misc_feature 1..20: note = chemically synthesized
  source 1..20: mol_type = other DNA
tacagcacaaaaacagaata

SEQ ID NO: 14525 - DNA, 20 bp, synthetic construct
  misc_feature 1..20: note = chemically synthesized
  source 1..20: mol_type = other DNA
acagcacaaaaacagaatag

SEQ ID NO: 14526 - DNA, 20 bp, synthetic construct
  misc_feature 1..20: note = chemically synthesized
  source 1..20: mol_type = other DNA
aaaaacagaatagaggaata

SEQ ID NO: 14527 - DNA, 20 bp, synthetic construct
  misc_feature 1..20: note = chemically synthesized
  source 1..20: mol_type = other DNA
gaataaagttcctgttttca

SEQ ID NO: 14528 - DNA, 20 bp, synthetic construct
  misc_feature 1..20: note = chemically synthesized
  source 1..20: mol_type = other DNA
tcctgttttcatggacttga

SEQ ID NO: 14529 - DNA, 20 bp, synthetic construct
  misc_feature 1..20: note = chemically synthesized
  source 1..20: mol_type = other DNA
tgttttcatggacttgatag

SEQ ID NO: 14530 - DNA, 20 bp, synthetic construct
  misc_feature 1..20: note = chemically synthesized
  source 1..20: mol_type = other DNA
ttcatggacttgatagtgga

SEQ ID NO: 14531 - DNA, 20 bp, synthetic construct
  misc_feature 1..20: note = chemically synthesized
  source 1..20: mol_type = other DNA
catggacttgatagtggaaa

SEQ ID NO: 14532 - DNA, 20 bp, synthetic construct
  misc_feature 1..20: note = chemically synthesized
  source 1..20: mol_type = other DNA
gaaagagcttgacattaaat

SEQ ID NO: 14533 - DNA, 20 bp, synthetic construct
  misc_feature 1..20: note = chemically synthesized
  source 1..20: mol_type = other DNA
gaaacatgttatataccaat

SEQ ID NO: 14534 - DNA, 20 bp, synthetic construct
  misc_feature 1..20: note = chemically synthesized
  source 1..20: mol_type = other DNA
atgttatataccaatgagat

SEQ ID NO: 14535 - DNA, 20 bp, synthetic construct
  misc_feature 1..20: note = chemically synthesized
  source 1..20: mol_type = other DNA
tgttatataccaatgagatt

SEQ ID NO: 14536 - DNA, 20 bp, synthetic construct
  misc_feature 1..20: note = chemically synthesized
  source 1..20: mol_type = other DNA
accaatgagattaggtgcta

SEQ ID NO: 14537 - DNA, 20 bp, synthetic construct
  misc_feature 1..20: note = chemically synthesized
  source 1..20: mol_type = other DNA
caatgagattaggtgctatg

SEQ ID NO: 14538 - DNA, 20 bp, synthetic construct
  misc_feature 1..20: note = chemically synthesized
  source 1..20: mol_type = other DNA
aaaaaaaaaaaactgaaatg

SEQ ID NO: 14539 - DNA, 20 bp, synthetic construct
  misc_feature 1..20: note = chemically synthesized
  source 1..20: mol_type = other DNA
aaaaaaaaaaactgaaatga

SEQ ID NO: 14540 - DNA, 20 bp, synthetic construct
  misc_feature 1..20: note = chemically synthesized
  source 1..20: mol_type = other DNA
aaaaaaactgaaatgaaggc

SEQ ID NO: 14541 - DNA, 20 bp, synthetic construct
  misc_feature 1..20: note = chemically synthesized
  source 1..20: mol_type = other DNA
aaaaactgaaatgaaggcca

SEQ ID NO: 14542 - DNA, 20 bp, synthetic construct
  misc_feature 1..20: note = chemically synthesized
  source 1..20: mol_type = other DNA
aatgaaggccagagtgtgat

SEQ ID NO: 14543 - DNA, 20 bp, synthetic construct
  misc_feature 1..20: note = chemically synthesized
  source 1..20: mol_type = other DNA
atgaaggccagagtgtgatt

SEQ ID NO: 14544 - DNA, 20 bp, synthetic construct
  misc_feature 1..20: note = chemically synthesized
  source 1..20: mol_type = other DNA
aggccagagtgtgattagga

SEQ ID NO: 14545 - DNA, 20 bp, synthetic construct
  misc_feature 1..20: note = chemically synthesized
  source 1..20: mol_type = other DNA
ggccagagtgtgattaggac

SEQ ID NO: 14546 - DNA, 20 bp, synthetic construct
  misc_feature 1..20: note = chemically synthesized
  source 1..20: mol_type = other DNA
gccagagtgtgattaggaca

SEQ ID NO: 14547 - DNA, 20 bp, synthetic construct
  misc_feature 1..20: note = chemically synthesized
  source 1..20: mol_type = other DNA
gtgtgattaggacagggtga

SEQ ID NO: 14548 - DNA, 20 bp, synthetic construct
  misc_feature 1..20: note = chemically synthesized
  source 1..20: mol_type = other DNA
tgtgattaggacagggtgaa

SEQ ID NO: 14549 - DNA, 20 bp, synthetic construct
  misc_feature 1..20: note = chemically synthesized
  source 1..20: mol_type = other DNA
gtgattaggacagggtgaaa

SEQ ID NO: 14550 - DNA, 20 bp, synthetic construct
  misc_feature 1..20: note = chemically synthesized
  source 1..20: mol_type = other DNA
tgaaagggtatcgctacttt

SEQ ID NO: 14551 - DNA, 20 bp, synthetic construct
  misc_feature 1..20: note = chemically synthesized
  source 1..20: mol_type = other DNA
aagggtatcgctactttaag

SEQ ID NO: 14552 - DNA, 20 bp, synthetic construct
  misc_feature 1..20: note = chemically synthesized
  source 1..20: mol_type = other DNA
tatcgctactttaagtagta

SEQ ID NO: 14553 - DNA, 20 bp, synthetic construct
  misc_feature 1..20: note = chemically synthesized
  source 1..20: mol_type = other DNA
cgctactttaagtagtatgg

SEQ ID NO: 14554 - DNA, 20 bp, synthetic construct
  misc_feature 1..20: note = chemically synthesized
  source 1..20: mol_type = other DNA
gctactttaagtagtatggc

SEQ ID NO: 14555 - DNA, 20 bp, synthetic construct
  misc_feature 1..20: note = chemically synthesized
  source 1..20: mol_type = other DNA
ctttaagtagtatggcagga

SEQ ID NO: 14556 - DNA, 20 bp, synthetic construct
  misc_feature 1..20: note = chemically synthesized
  source 1..20: mol_type = other DNA
gcaggaaagtcctcactata

SEQ ID NO: 14557 - DNA, 20 bp, synthetic construct
  misc_feature 1..20: note = chemically synthesized
  source 1..20: mol_type = other DNA
tcactataaagttaacacct

SEQ ID NO: 14558 - DNA, 20 bp, synthetic construct
  misc_feature 1..20: note = chemically synthesized
  source 1..20: mol_type = other DNA
actataaagttaacacctga

SEQ ID NO: 14559 - DNA, 20 bp, synthetic construct
  misc_feature 1..20: note = chemically synthesized
  source 1..20: mol_type = other DNA
tataaagttaacacctgaga

SEQ ID NO: 14560 - DNA, 20 bp, synthetic construct
  misc_feature 1..20: note = chemically synthesized
  source 1..20: mol_type = other DNA
aacacctgagagagtaccca

SEQ ID NO: 14561 - DNA, 20 bp, synthetic construct
  misc_feature 1..20: note = chemically synthesized
  source 1..20: mol_type = other DNA
agagagtacccatagatgat

SEQ ID NO: 14562 - DNA, 20 bp, synthetic construct
  misc_feature 1..20: note = chemically synthesized
  source 1..20: mol_type = other DNA
gagagtacccatagatgatg

SEQ ID NO: 14563 - DNA, 20 bp, synthetic construct
  misc_feature 1..20: note = chemically synthesized
  source 1..20: mol_type = other DNA
tgaaactatgattaaatatt

SEQ ID NO: 14564 - DNA, 20 bp, synthetic construct
  misc_feature 1..20: note = chemically synthesized
  source 1..20: mol_type = other DNA
gaaactatgattaaatattt

SEQ ID NO: 14565 - DNA, 20 bp, synthetic construct
  misc_feature 1..20: note = chemically synthesized
  source 1..20: mol_type = other DNA
aaactatgattaaatattta

SEQ ID NO: 14566 - DNA, 20 bp, synthetic construct
  misc_feature 1..20: note = chemically synthesized
  source 1..20: mol_type = other DNA
atgattaaatatttagggca

SEQ ID NO: 14567 - DNA, 20 bp, synthetic construct
  misc_feature 1..20: note = chemically synthesized
  source 1..20: mol_type = other DNA
tgattaaatatttagggcat

SEQ ID NO: 14568 - DNA, 20 bp, synthetic construct
  misc_feature 1..20: note = chemically synthesized
  source 1..20: mol_type = other DNA
gattaaatatttagggcata

SEQ ID NO: 14569 - DNA, 20 bp, synthetic construct
  misc_feature 1..20: note = chemically synthesized
  source 1..20: mol_type = other DNA
aatatttagggcatagggaa

SEQ ID NO: 14570 - DNA, 20 bp, synthetic construct
  misc_feature 1..20: note = chemically synthesized
  source 1..20: mol_type = other DNA
tggcaaatgtaaatacccta

SEQ ID NO: 14571 - DNA, 20 bp, synthetic construct
  misc_feature 1..20: note = chemically synthesized
  source 1..20: mol_type = other DNA
tgtaaataccctaaagatgt

SEQ ID NO: 14572 - DNA, 20 bp, synthetic construct
  misc_feature 1..20: note = chemically synthesized
  source 1..20: mol_type = other DNA
ccctaaagatgtaagatgct

SEQ ID NO: 14573 - DNA, 20 bp, synthetic construct
  misc_feature 1..20: note = chemically synthesized
  source 1..20: mol_type = other DNA
gtaagatgcttagaattttc

SEQ ID NO: 14574 - DNA, 20 bp, synthetic construct
  misc_feature 1..20: note = chemically synthesized
  source 1..20: mol_type = other DNA
taagatgcttagaattttca

SEQ ID NO: 14575 - DNA, 20 bp, synthetic construct
  misc_feature 1..20: note = chemically synthesized
  source 1..20: mol_type = other DNA
aattttcaaggaatatcaat

SEQ ID NO: 14576 - DNA, 20 bp, synthetic construct
  misc_feature 1..20: note = chemically synthesized
  source 1..20: mol_type = other DNA
attttcaaggaatatcaata

SEQ ID NO: 14577 - DNA, 20 bp, synthetic construct
  misc_feature 1..20: note = chemically synthesized
  source 1..20: mol_type = other DNA
gaatatcaataaggccaatg

SEQ ID NO: 14578 - DNA, 20 bp, synthetic construct
  misc_feature 1..20: note = chemically synthesized
  source 1..20: mol_type = other DNA
aatatcaataaggccaatgt

SEQ ID NO: 14579 - DNA, 20 bp, synthetic construct
  misc_feature 1..20: note = chemically synthesized
  source 1..20: mol_type = other DNA
caataaggccaatgtaggat

SEQ ID NO: 14580 - DNA, 20 bp, synthetic construct
  misc_feature 1..20: note = chemically synthesized
  source 1..20: mol_type = other DNA
ggccaatgtaggatgagatt

SEQ ID NO: 14581 - DNA, 20 bp, synthetic construct
  misc_feature 1..20: note = chemically synthesized
  source 1..20: mol_type = other DNA
atgtaggatgagattcggtg

SEQ ID NO: 14582 - DNA, 20 bp, synthetic construct
  misc_feature 1..20: note = chemically synthesized
  source 1..20: mol_type = other DNA
tgtaggatgagattcggtga

SEQ ID NO: 14583 - DNA, 20 bp, synthetic construct
  misc_feature 1..20: note = chemically synthesized
  source 1..20: mol_type = other DNA
gtaggatgagattcggtgaa

SEQ ID NO: 14584 - DNA, 20 bp, synthetic construct
  misc_feature 1..20: note = chemically synthesized
  source 1..20: mol_type = other DNA
taggatgagattcggtgaag

SEQ ID NO: 14585 - DNA, 20 bp, synthetic construct
  misc_feature 1..20: note = chemically synthesized
  source 1..20: mol_type = other DNA
ggatgagattcggtgaaggg

SEQ ID NO: 14586 - DNA, 20 bp, synthetic construct
  misc_feature 1..20: note = chemically synthesized
  source 1..20: mol_type = other DNA
ttcggtgaaggggagaataa

SEQ ID NO: 14587 - DNA, 20 bp, synthetic construct
  misc_feature 1..20: note = chemically synthesized
  source 1..20: mol_type = other DNA
tgaaggggagaataaaagat

SEQ ID NO: 14588 - DNA, 20 bp, synthetic construct
  misc_feature 1..20: note = chemically synthesized
  source 1..20: mol_type = other DNA
gagaataaaagatgagatca

SEQ ID NO: 14589 - DNA, 20 bp, synthetic construct
  misc_feature 1..20: note = chemically synthesized
  source 1..20: mol_type = other DNA
aataaaagatgagatcatag

SEQ ID NO: 14590 - DNA, 20 bp, synthetic construct
  misc_feature 1..20: note = chemically synthesized
  source 1..20: mol_type = other DNA
aagtcctaaattataaaatt

SEQ ID NO: 14591 - DNA, 20 bp, synthetic construct
  misc_feature 1..20: note = chemically synthesized
  source 1..20: mol_type = other DNA
agtcctaaattataaaattt

SEQ ID NO: 14592 - DNA, 20 bp, synthetic construct
  misc_feature 1..20: note = chemically synthesized
  source 1..20: mol_type = other DNA
cactaataatacctacatca

SEQ ID NO: 14593 - DNA, 20 bp, synthetic construct
  misc_feature 1..20: note = chemically synthesized
  source 1..20: mol_type = other DNA
ctaataatacctacatcata

SEQ ID NO: 14594 - DNA, 20 bp, synthetic construct
  misc_feature 1..20: note = chemically synthesized
  source 1..20: mol_type = other DNA
tacctacatcatagagttgt

SEQ ID NO: 14595 - DNA, 20 bp, synthetic construct
  misc_feature 1..20: note = chemically synthesized
  source 1..20: mol_type = other DNA
atatatatatttatttatat

SEQ ID NO: 14596 - DNA, 20 bp, synthetic construct
  misc_feature 1..20: note = chemically synthesized
  source 1..20: mol_type = other DNA
atatatatttatttatatga

SEQ ID NO: 14597 - DNA, 20 bp, synthetic construct
  misc_feature 1..20: note = chemically synthesized
  source 1..20: mol_type = other DNA
atatgcatgaacaactattg

SEQ ID NO: 14598 - DNA, 20 bp, synthetic construct
  misc_feature 1..20: note = chemically synthesized
  source 1..20: mol_type = other DNA
atgcatgaacaactattgta

SEQ ID NO: 14599 - DNA, 20 bp, synthetic construct
  misc_feature 1..20: note = chemically synthesized
  source 1..20: mol_type = other DNA
caactattgtagagaattgt

SEQ ID NO: 14600 - DNA, 20 bp, synthetic construct
  misc_feature 1..20: note = chemically synthesized
  source 1..20: mol_type = other DNA
aactattgtagagaattgta

SEQ ID NO: 14601 - DNA, 20 bp, synthetic construct
  misc_feature 1..20: note = chemically synthesized
  source 1..20: mol_type = other DNA
tgtagagaattgtaaggatt

SEQ ID NO: 14602 - DNA, 20 bp, synthetic construct
  misc_feature 1..20: note = chemically synthesized
  source 1..20: mol_type = other DNA
tggttttattataaatgata

SEQ ID NO: 14603 - DNA, 20 bp, synthetic construct
  misc_feature 1..20: note = chemically synthesized
  source 1..20: mol_type = other DNA
ggttttattataaatgatat

SEQ ID NO: 14604 - DNA, 20 bp, synthetic construct
  misc_feature 1..20: note = chemically synthesized
  source 1..20: mol_type = other DNA
taaatgatataggaaactat

SEQ ID NO: 14605 - DNA, 20 bp, synthetic construct
  misc_feature 1..20: note = chemically synthesized
  source 1..20: mol_type = other DNA
atgatataggaaactatcag

SEQ ID NO: 14606 - DNA, 20 bp, synthetic construct
  misc_feature 1..20: note = chemically synthesized
  source 1..20: mol_type = other DNA
ctatcagaagactttgaaca

SEQ ID NO: 14607 - DNA, 20 bp, synthetic construct
  misc_feature 1..20: note = chemically synthesized
  source 1..20: mol_type = other DNA
atcagaagactttgaacaaa

SEQ ID NO: 14608 - DNA, 20 bp, synthetic construct
  misc_feature 1..20: note = chemically synthesized
  source 1..20: mol_type = other DNA
tcagaagactttgaacaaag

SEQ ID NO: 14609 - DNA, 20 bp, synthetic construct
  misc_feature 1..20: note = chemically synthesized
  source 1..20: mol_type = other DNA
tatatgacttacattttgaa

SEQ ID NO: 14610 - DNA, 20 bp, synthetic construct
  misc_feature 1..20: note = chemically synthesized
  source 1..20: mol_type = other DNA
acattttgaaaagactaatt

SEQ ID NO: 14611 - DNA, 20 bp, synthetic construct
  misc_feature 1..20: note = chemically synthesized
  source 1..20: mol_type = other DNA
tttgaaaagactaatttgga

SEQ ID NO: 14612 - DNA, 20 bp, synthetic construct
  misc_feature 1..20: note = chemically synthesized
  source 1..20: mol_type = other DNA
gactaatttggatagtatat

SEQ ID NO: 14613 - DNA, 20 bp, synthetic construct
  misc_feature 1..20: note = chemically synthesized
  source 1..20: mol_type = other DNA
actaatttggatagtatatt

SEQ ID NO: 14614 - DNA, 20 bp, synthetic construct
  misc_feature 1..20: note = chemically synthesized
  source 1..20: mol_type = other DNA
aatttggatagtatattggg

SEQ ID NO: 14615 - DNA, 20 bp, synthetic construct
  misc_feature 1..20: note = chemically synthesized
  source 1..20: mol_type = other DNA
agtatattgggaagaaattg

SEQ ID NO: 14616 - DNA, 20 bp, synthetic construct
  misc_feature 1..20: note = chemically synthesized
  source 1..20: mol_type = other DNA
atattgggaagaaattgtag

SEQ ID NO: 14617 - DNA, 20 bp, synthetic construct
  misc_feature 1..20: note = chemically synthesized
  source 1..20: mol_type = other DNA
tattgggaagaaattgtagt

SEQ ID NO: 14618 - DNA, 20 bp, synthetic construct
  misc_feature 1..20: note = chemically synthesized
  source 1..20: mol_type = other DNA
attgggaagaaattgtagtg

SEQ ID NO: 14619 - DNA, 20 bp, synthetic construct
  misc_feature 1..20: note = chemically synthesized
  source 1..20: mol_type = other DNA
gggaagaaattgtagtgggg

SEQ ID NO: 14620 - DNA, 20 bp, synthetic construct
  misc_feature 1..20: note = chemically synthesized
  source 1..20: mol_type = other DNA
aagaaattgtagtggggcag

SEQ ID NO: 14621 - DNA, 20 bp, synthetic construct
  misc_feature 1..20: note = chemically synthesized
  source 1..20: mol_type = other DNA
aaattgtagtggggcagtgg

SEQ ID NO: 14622 - DNA, 20 bp, synthetic construct
  misc_feature 1..20: note = chemically synthesized
  source 1..20: mol_type = other DNA
ttgtagtggggcagtggtag

SEQ ID NO: 14623 - DNA, 20 bp, synthetic construct
  misc_feature 1..20: note = chemically synthesized
  source 1..20: mol_type = other DNA
tagtggggcagtggtagaag

SEQ ID NO: 14624 - DNA, 20 bp, synthetic construct
  misc_feature 1..20: note = chemically synthesized
  source 1..20: mol_type = other DNA
agtggggcagtggtagaagc

SEQ ID NO: 14625 - DNA, 20 bp, synthetic construct
  misc_feature 1..20: note = chemically synthesized
  source 1..20: mol_type = other DNA
ggggcagtggtagaagcagg

SEQ ID NO: 14626 - DNA, 20 bp, synthetic construct
  misc_feature 1..20: note = chemically synthesized
  source 1..20: mol_type = other DNA
agaagcaggaagattgttat

SEQ ID NO: 14627 - DNA, 20 bp, synthetic construct
  misc_feature 1..20: note = chemically synthesized
  source 1..20: mol_type = other DNA
ggaagattgttatgagtcaa

SEQ ID NO: 14628 - DNA, 20 bp, synthetic construct
  misc_feature 1..20: note = chemically synthesized
  source 1..20: mol_type = other DNA
atgagtcaacagctataatt

SEQ ID NO: 14629 - DNA, 20 bp, synthetic construct
  misc_feature 1..20: note = chemically synthesized
  source 1..20: mol_type = other DNA
tgagtcaacagctataattt

SEQ ID NO: 14630 - DNA, 20 bp, synthetic construct
  misc_feature 1..20: note = chemically synthesized
  source 1..20: mol_type = other DNA
gtcaacagctataatttagg

SEQ ID NO: 14631 - DNA, 20 bp, synthetic construct
  misc_feature 1..20: note = chemically synthesized
  source 1..20: mol_type = other DNA
aacagctataatttaggtgg

SEQ ID NO: 14632 - DNA, 20 bp, synthetic construct
  misc_feature 1..20: note = chemically synthesized
  source 1..20: mol_type = other DNA
tataatttaggtggtggtga

SEQ ID NO: 14633 - DNA, 20 bp, synthetic construct
  misc_feature 1..20: note = chemically synthesized
  source 1..20: mol_type = other DNA
aggtggtggtgacagtgact

SEQ ID NO: 14634 - DNA, 20 bp, synthetic construct
  misc_feature 1..20: note = chemically synthesized
  source 1..20: mol_type = other DNA
gtggtgacagtgacttagac

SEQ ID NO: 14635 - DNA, 20 bp, synthetic construct
  misc_feature 1..20: note = chemically synthesized
  source 1..20: mol_type = other DNA
ggtgacagtgacttagacca

SEQ ID NO: 14636 - DNA, 20 bp, synthetic construct
  misc_feature 1..20: note = chemically synthesized
  source 1..20: mol_type = other DNA
gacagtgacttagaccagag

SEQ ID NO: 14637 - DNA, 20 bp, synthetic construct
  misc_feature 1..20: note = chemically synthesized
  source 1..20: mol_type = other DNA
agtgacttagaccagagtgg

SEQ ID NO: 14638 - DNA, 20 bp, synthetic construct
  misc_feature 1..20: note = chemically synthesized
  source 1..20: mol_type = other DNA
ttagaccagagtggtagcat

SEQ ID NO: 14639 - DNA, 20 bp, synthetic construct
  misc_feature 1..20: note = chemically synthesized
  source 1..20: mol_type = other DNA
agaccagagtggtagcattg

SEQ ID NO: 14640 - DNA, 20 bp, synthetic construct
  misc_feature 1..20: note = chemically synthesized
  source 1..20: mol_type = other DNA
gaccagagtggtagcattgg

SEQ ID NO: 14641 - DNA, 20 bp, synthetic construct
  misc_feature 1..20: note = chemically synthesized
  source 1..20: mol_type = other DNA
gagtggtagcattggaggtg

SEQ ID NO: 14642 - DNA, 20 bp, synthetic construct
  misc_feature 1..20: note = chemically synthesized
  source 1..20: mol_type = other DNA
agtggtagcattggaggtga

SEQ ID NO: 14643 - DNA, 20 bp, synthetic construct
  misc_feature 1..20: note = chemically synthesized
  source 1..20: mol_type = other DNA
gtagcattggaggtgaaggc

SEQ ID NO: 14644 - DNA, 20 bp, synthetic construct
  misc_feature 1..20: note = chemically synthesized
  source 1..20: mol_type = other DNA
tagcattggaggtgaaggca

SEQ ID NO: 14645 - DNA, 20 bp, synthetic construct
  misc_feature 1..20: note = chemically synthesized
  source 1..20: mol_type = other DNA
agcattggaggtgaaggcaa

SEQ ID NO: 14646 - DNA, 20 bp, synthetic construct
  misc_feature 1..20: note = chemically synthesized
  source 1..20: mol_type = other DNA
gcattggaggtgaaggcaag

SEQ ID NO: 14647 - DNA, 20 bp, synthetic construct
  misc_feature 1..20: note = chemically synthesized
  source 1..20: mol_type = other DNA
tggaggtgaaggcaaggggt

SEQ ID NO: 14648 - DNA, 20 bp, synthetic construct
  misc_feature 1..20: note = chemically synthesized
  source 1..20: mol_type = other DNA
atcctttcacgaaaaaccaa

SEQ ID NO: 14649 - DNA, 20 bp, synthetic construct
  misc_feature 1..20: note = chemically synthesized
  source 1..20: mol_type = other DNA
tcctttcacgaaaaaccaac

SEQ ID NO: 14650 - DNA, 20 bp, synthetic construct
  misc_feature 1..20: note = chemically synthesized
  source 1..20: mol_type = other DNA
aaaccaacaggattttctga

SEQ ID NO: 14651 - DNA, 20 bp, synthetic construct
  misc_feature 1..20: note = chemically synthesized
  source 1..20: mol_type = other DNA
accaacaggattttctgaca

SEQ ID NO: 14652 - DNA, 20 bp, synthetic construct
  misc_feature 1..20: note = chemically synthesized
  source 1..20: mol_type = other DNA
ggattttctgacagagaata

SEQ ID NO: 14653 - DNA, 20 bp, synthetic construct
  misc_feature 1..20: note = chemically synthesized
  source 1..20: mol_type = other DNA
tctgacagagaatatggaat

SEQ ID NO: 14654 - DNA, 20 bp, synthetic construct
  misc_feature 1..20: note = chemically synthesized
  source 1..20: mol_type = other DNA
tgttgcactcatgcacactc

SEQ ID NO: 14655 - DNA, 20 bp, synthetic construct
  misc_feature 1..20: note = chemically synthesized
  source 1..20: mol_type = other DNA
ctctagtgcatgctaatttc

SEQ ID NO: 14656 - DNA, 20 bp, synthetic construct
  misc_feature 1..20: note = chemically synthesized
  source 1..20: mol_type = other DNA
gcatgctaatttctggctgt

SEQ ID NO: 14657 - DNA, 20 bp, synthetic construct
  misc_feature 1..20: note = chemically synthesized
  source 1..20: mol_type = other DNA
ttctggctgtgagtatatgt

SEQ ID NO: 14658 - DNA, 20 bp, synthetic construct
  misc_feature 1..20: note = chemically synthesized
  source 1..20: mol_type = other DNA
ctggctgtgagtatatgtca

SEQ ID NO: 14659 - DNA, 20 bp, synthetic construct
  misc_feature 1..20: note = chemically synthesized
  source 1..20: mol_type = other DNA
ctgtgagtatatgtcagagt

SEQ ID NO: 14660 - DNA, 20 bp, synthetic construct
  misc_feature 1..20: note = chemically synthesized
  source 1..20: mol_type = other DNA
tgtgagtatatgtcagagta

SEQ ID NO: 14661 - DNA, 20 bp, synthetic construct
  misc_feature 1..20: note = chemically synthesized
  source 1..20: mol_type = other DNA
atgtcagagtaaggattttg

SEQ ID NO: 14662 - DNA, 20 bp, synthetic construct
  misc_feature 1..20: note = chemically synthesized
  source 1..20: mol_type = other DNA
cagagtaaggattttgaagc

SEQ ID NO: 14663 - DNA, 20 bp, synthetic construct
  misc_feature 1..20: note = chemically synthesized
  source 1..20: mol_type = other DNA
agagtaaggattttgaagct

SEQ ID NO: 14664 - DNA, 20 bp, synthetic construct
  misc_feature 1..20: note = chemically synthesized
  source 1..20: mol_type = other DNA
aaggattttgaagctaggca

SEQ ID NO: 14665 - DNA, 20 bp, synthetic construct
  misc_feature 1..20: note = chemically synthesized
  source 1..20: mol_type = other DNA
attttgaagctaggcaaagt

SEQ ID NO: 14666 - DNA, 20 bp, synthetic construct
  misc_feature 1..20: note = chemically synthesized
  source 1..20: mol_type = other DNA
agctaggcaaagtgagtctt

SEQ ID NO: 14667 - DNA, 20 bp, synthetic construct
  misc_feature 1..20: note = chemically synthesized
  source 1..20: mol_type = other DNA
gctaggcaaagtgagtcttt

SEQ ID NO: 14668 - DNA, 20 bp, synthetic construct
  misc_feature 1..20: note = chemically synthesized
  source 1..20: mol_type = other DNA
tctttgggttgaattttgtc

SEQ ID NO: 14669 - DNA, 20 bp, synthetic construct
  misc_feature 1..20: note = chemically synthesized
  source 1..20: mol_type = other DNA
ctttgggttgaattttgtca

SEQ ID NO: 14670 - DNA, 20 bp, synthetic construct
  misc_feature 1..20: note = chemically synthesized
  source 1..20: mol_type = other DNA
gtcaaggtgtttgttcatca

SEQ ID NO: 14671 - DNA, 20 bp, synthetic construct
  misc_feature 1..20: note = chemically synthesized
  source 1..20: mol_type = other DNA
gttcatcacagtctctacct

SEQ ID NO: 14672 - DNA, 20 bp, synthetic construct
  misc_feature 1..20: note = chemically synthesized
  source 1..20: mol_type = other DNA
cacagtctctacctcagaat

SEQ ID NO: 14673 - DNA, 20 bp, synthetic construct
  misc_feature 1..20: note = chemically synthesized
  source 1..20: mol_type = other DNA
ctcagaattggctttaaaat

SEQ ID NO: 14674 - DNA, 20 bp, synthetic construct
  misc_feature 1..20: note = chemically synthesized
  source 1..20: mol_type = other DNA
gaattggctttaaaattgga

SEQ ID NO: 14675 - DNA, 20 bp, synthetic construct
  misc_feature 1..20: note = chemically synthesized
  source 1..20: mol_type = other DNA
tggctttaaaattggaaagc

SEQ ID NO: 14676 - DNA, 20 bp, synthetic construct
  misc_feature 1..20: note = chemically synthesized
  source 1..20: mol_type = other DNA
ggctttaaaattggaaagct

SEQ ID NO: 14677 - DNA, 20 bp, synthetic construct
  misc_feature 1..20: note = chemically synthesized
  source 1..20: mol_type = other DNA
tttaaaattggaaagctggg

SEQ ID NO: 14678 - DNA, 20 bp, synthetic construct
  misc_feature 1..20: note = chemically synthesized
  source 1..20: mol_type = other DNA
ttaaaattggaaagctgggt

SEQ ID NO: 14679 - DNA, 20 bp, synthetic construct
  misc_feature 1..20: note = chemically synthesized
  source 1..20: mol_type = other DNA
aaattggaaagctgggtggg

SEQ ID NO: 14680 - DNA, 20 bp, synthetic construct
  misc_feature 1..20: note = chemically synthesized
  source 1..20: mol_type = other DNA
gaaagctgggtgggtggata

SEQ ID NO: 14681 - DNA, 20 bp, synthetic construct
  misc_feature 1..20: note = chemically synthesized
  source 1..20: mol_type = other DNA
gggtgggtggatatggaaat

SEQ ID NO: 14682 - DNA, 20 bp, synthetic construct
  misc_feature 1..20: note = chemically synthesized
  source 1..20: mol_type = other DNA
tggaaatgagaaaccatctc

SEQ ID NO: 14683 - DNA, 20 bp, synthetic construct
  misc_feature 1..20: note = chemically synthesized
  source 1..20: mol_type = other DNA
gaaatgagaaaccatctctg

SEQ ID NO: 14684 - DNA, 20 bp, synthetic construct
  misc_feature 1..20: note = chemically synthesized
  source 1..20: mol_type = other DNA
ttgtctacacatcatacctt

SEQ ID NO: 14685 - DNA, 20 bp, synthetic construct
  misc_feature 1..20: note = chemically synthesized
  source 1..20: mol_type = other DNA
acacatcatacctttagcca

SEQ ID NO: 14686 - DNA, 20 bp, synthetic construct
  misc_feature 1..20: note = chemically synthesized
  source 1..20: mol_type = other DNA
cctttagccaaagtgacatc

SEQ ID NO: 14687 - DNA, 20 bp, synthetic construct
  misc_feature 1..20: note = chemically synthesized
  source 1..20: mol_type = other DNA
aagtgacatcaagtatttct

SEQ ID NO: 14688 - DNA, 20 bp, synthetic construct
  misc_feature 1..20: note = chemically synthesized
  source 1..20: mol_type = other DNA
agtatttcttggatgctgac

SEQ ID NO: 14689 - DNA, 20 bp, synthetic construct
  misc_feature 1..20: note = chemically synthesized
  source 1..20: mol_type = other DNA
tatttcttggatgctgacca

SEQ ID NO: 14690 - DNA, 20 bp, synthetic construct
  misc_feature 1..20: note = chemically synthesized
  source 1..20: mol_type = other DNA
atttcttggatgctgaccag

SEQ ID NO: 14691 - DNA, 20 bp, synthetic construct
  misc_feature 1..20: note = chemically synthesized
  source 1..20: mol_type = other DNA
gatgctgaccagaggcttct

SEQ ID NO: 14692 - DNA, 20 bp, synthetic construct
  misc_feature 1..20: note = chemically synthesized
  source 1..20: mol_type = other DNA
ctgaccagaggcttctgagc

SEQ ID NO: 14693 - DNA, 20 bp, synthetic construct
  misc_feature 1..20: note = chemically synthesized
  source 1..20: mol_type = other DNA
tgaccagaggcttctgagcc

SEQ ID NO: 14694 - DNA, 20 bp, synthetic construct
  misc_feature 1..20: note = chemically synthesized
  source 1..20: mol_type = other DNA
gcttctgagccaggcccctc

SEQ ID NO: 14695 - DNA, 20 bp, synthetic construct
  misc_feature 1..20: note = chemically synthesized
  source 1..20: mol_type = other DNA
gagccaggcccctctagctg

SEQ ID NO: 14696 - DNA, 20 bp, synthetic construct
  misc_feature 1..20: note = chemically synthesized
  source 1..20: mol_type = other DNA
agccaggcccctctagctga

SEQ ID NO: 14697 - DNA, 20 bp, synthetic construct
  misc_feature 1..20: note = chemically synthesized
  source 1..20: mol_type = other DNA
caggcccctctagctgaagg

SEQ ID NO: 14698 - DNA, 20 bp, synthetic construct
  misc_feature 1..20: note = chemically synthesized
  source 1..20: mol_type = other DNA
ctctagctgaaggaagttca

SEQ ID NO: 14699 - DNA, 20 bp, synthetic construct
  misc_feature 1..20: note = chemically synthesized
  source 1..20: mol_type = other DNA
aggaagttcacagtttcttt

SEQ ID NO: 14700 - DNA, 20 bp, synthetic construct
  misc_feature 1..20: note = chemically synthesized
  source 1..20: mol_type = other DNA
ggaagttcacagtttcttta

SEQ ID NO: 14701 - DNA, 20 bp, synthetic construct
  misc_feature 1..20: note = chemically synthesized
  source 1..20: mol_type = other DNA
aagttcacagtttctttaag

SEQ ID NO: 14702 - DNA, 20 bp, synthetic construct
  misc_feature 1..20: note = chemically synthesized
  source 1..20: mol_type = other DNA
agttcacagtttctttaagg

SEQ ID NO: 14703 - DNA, 20 bp, synthetic construct
  misc_feature 1..20: note = chemically synthesized
  source 1..20: mol_type = other DNA
gttcacagtttctttaagga

SEQ ID NO: 14704 - DNA, 20 bp, synthetic construct
  misc_feature 1..20: note = chemically synthesized
  source 1..20: mol_type = other DNA
gtttctttaaggagggaaaa

SEQ ID NO: 14705 - DNA, 20 bp, synthetic construct
  misc_feature 1..20: note = chemically synthesized
  source 1..20: mol_type = other DNA
tctttaaggagggaaaatgg

SEQ ID NO: 14706 - DNA, 20 bp, synthetic construct
  misc_feature 1..20: note = chemically synthesized
  source 1..20: mol_type = other DNA
aaggagggaaaatggtagat

SEQ ID NO: 14707 - DNA, 20 bp, synthetic construct
  misc_feature 1..20: note = chemically synthesized
  source 1..20: mol_type = other DNA
agggaaaatggtagataagt

SEQ ID NO: 14708 - DNA, 20 bp, synthetic construct
  misc_feature 1..20: note = chemically synthesized
  source 1..20: mol_type = other DNA
ggaaaatggtagataagtca

SEQ ID NO: 14709 - DNA, 20 bp, synthetic construct
  misc_feature 1..20: note = chemically synthesized
  source 1..20: mol_type = other DNA
tagataagtcagagaacaat

SEQ ID NO: 14710 - DNA, 20 bp, synthetic construct
  misc_feature 1..20: note = chemically synthesized
  source 1..20: mol_type = other DNA
taagtcagagaacaatcaga

SEQ ID NO: 14711 - DNA, 20 bp, synthetic construct
  misc_feature 1..20: note = chemically synthesized
  source 1..20: mol_type = other DNA
caatcagacagaattctgtt

SEQ ID NO: 14712 - DNA, 20 bp, synthetic construct
  misc_feature 1..20: note = chemically synthesized
  source 1..20: mol_type = other DNA
cagacagaattctgttcggt

SEQ ID NO: 14713 - DNA, 20 bp, synthetic construct
  misc_feature 1..20: note = chemically synthesized
  source 1..20: mol_type = other DNA
agacagaattctgttcggtc

SEQ ID NO: 14714 - DNA, 20 bp, synthetic construct
  misc_feature 1..20: note = chemically synthesized
  source 1..20: mol_type = other DNA
gacagaattctgttcggtca

SEQ ID NO: 14715 - DNA, 20 bp, synthetic construct
  misc_feature 1..20: note = chemically synthesized
  source 1..20: mol_type = other DNA
tgttcggtcagggaatttga

SEQ ID NO: 14716 - DNA, 20 bp, synthetic construct
  misc_feature 1..20: note = chemically synthesized
  source 1..20: mol_type = other DNA
gttcggtcagggaatttgat

SEQ ID NO: 14717 - DNA, 20 bp, synthetic construct
  misc_feature 1..20: note = chemically synthesized
  source 1..20: mol_type = other DNA
tgtttgttttcgtttttctt

SEQ ID NO: 14718 - DNA, 20 bp, synthetic construct
  misc_feature 1..20: note = chemically synthesized
  source 1..20: mol_type = other DNA
tgttttcgtttttctttaga

SEQ ID NO: 14719 - DNA, 20 bp, synthetic construct
  misc_feature 1..20: note = chemically synthesized
  source 1..20: mol_type = other DNA
ttttcgtttttctttagaca

SEQ ID NO: 14720 - DNA, 20 bp, synthetic construct
  misc_feature 1..20: note = chemically synthesized
  source 1..20: mol_type = other DNA
ctttagacagagtctcgctc

SEQ ID NO: 14721 - DNA, 20 bp, synthetic construct
  misc_feature 1..20: note = chemically synthesized
  source 1..20: mol_type = other DNA
ttagacagagtctcgctctg

SEQ ID NO: 14722 - DNA, 20 bp, synthetic construct
  misc_feature 1..20: note = chemically synthesized
  source 1..20: mol_type = other DNA
tagacagagtctcgctctgg

SEQ ID NO: 14723 - DNA, 20 bp, synthetic construct
  misc_feature 1..20: note = chemically synthesized
  source 1..20: mol_type = other DNA
cagagtctcgctctggaggc

SEQ ID NO: 14724 - DNA, 20 bp, synthetic construct
  misc_feature 1..20: note = chemically synthesized
  source 1..20: mol_type = other DNA
gagtctcgctctggaggctg

SEQ ID NO: 14725 - DNA, 20 bp, synthetic construct
  misc_feature 1..20: note = chemically synthesized
  source 1..20: mol_type = other DNA
ctctggaggctggagtgcaa

SEQ ID NO: 14726 - DNA, 20 bp, synthetic construct
  misc_feature 1..20: note = chemically synthesized
  source 1..20: mol_type = other DNA
gcaatggcatgatctctgct

SEQ ID NO: 14727 - DNA, 20 bp, synthetic construct
  misc_feature 1..20: note = chemically synthesized
  source 1..20: mol_type = other DNA
cagtgcaaactccacctccc

SEQ ID NO: 14728 - DNA, 20 bp, synthetic construct
  misc_feature 1..20: note = chemically synthesized
  source 1..20: mol_type = other DNA
aaactccacctccccggttc

SEQ ID NO: 14729 - DNA, 20 bp, synthetic construct
  misc_feature 1..20: note = chemically synthesized
  source 1..20: mol_type = other DNA
ttcaagcgattctcctgcct

SEQ ID NO: 14730 - DNA, 20 bp, synthetic construct
  misc_feature 1..20: note = chemically synthesized
  source 1..20: mol_type = other DNA
ttctcctgcctcagcctccc

SEQ ID NO: 14731 - DNA, 20 bp, synthetic construct
  misc_feature 1..20: note = chemically synthesized
  source 1..20: mol_type = other DNA
tcctgcctcagcctcccaag

SEQ ID NO: 14732 - DNA, 20 bp, synthetic construct
  misc_feature 1..20: note = chemically synthesized
  source 1..20: mol_type = other DNA
gcctcagcctcccaagtagt

SEQ ID NO: 14733 - DNA, 20 bp, synthetic construct
  misc_feature 1..20: note = chemically synthesized
  source 1..20: mol_type = other DNA
cctcccaagtagttggatta

SEQ ID NO: 14734 - DNA, 20 bp, synthetic construct
  misc_feature 1..20: note = chemically synthesized
  source 1..20: mol_type = other DNA
ctcccaagtagttggattac

SEQ ID NO: 14735 - DNA, 20 bp, synthetic construct
  misc_feature 1..20: note = chemically synthesized
  source 1..20: mol_type = other DNA
caggctcccgtcaccacgtc

SEQ ID NO: 14736 - DNA, 20 bp, synthetic construct
  misc_feature 1..20: note = chemically synthesized
  source 1..20: mol_type = other DNA
cagctaatttttatattttt

SEQ ID NO: 14737 - DNA, 20 bp, synthetic construct
  misc_feature 1..20: note = chemically synthesized
  source 1..20: mol_type = other DNA
ctaatttttatatttttaag

SEQ ID NO: 14738 - DNA, 20 bp, synthetic construct
  misc_feature 1..20: note = chemically synthesized
  source 1..20: mol_type = other DNA
aatttttatatttttaagca

SEQ ID NO: 14739 - DNA, 20 bp, synthetic construct
  misc_feature 1..20: note = chemically synthesized
  source 1..20: mol_type = other DNA
ttatatttttaagcagagac

SEQ ID NO: 14740 - DNA, 20 bp, synthetic construct
  misc_feature 1..20: note = chemically synthesized
  source 1..20: mol_type = other DNA
tatatttttaagcagagacc

SEQ ID NO: 14741 - DNA, 20 bp, synthetic construct
  misc_feature 1..20: note = chemically synthesized
  source 1..20: mol_type = other DNA
gagaccaggtttcactatgt

SEQ ID NO: 14742 - DNA, 20 bp, synthetic construct
  misc_feature 1..20: note = chemically synthesized
  source 1..20: mol_type = other DNA
ccaggtttcactatgttggc

SEQ ID NO: 14743 - DNA, 20 bp, synthetic construct
  misc_feature 1..20: note = chemically synthesized
  source 1..20: mol_type = other DNA
caggtttcactatgttggct

SEQ ID NO: 14744 - DNA, 20 bp, synthetic construct
  misc_feature 1..20: note = chemically synthesized
  source 1..20: mol_type = other DNA
tttcactatgttggctgggc

SEQ ID NO: 14745 - DNA, 20 bp, synthetic construct
  misc_feature 1..20: note = chemically synthesized
  source 1..20: mol_type = other DNA
ggtgtccaactcctgacctc

SEQ ID NO: 14746 - DNA, 20 bp, synthetic construct
  misc_feature 1..20: note = chemically synthesized
  source 1..20: mol_type = other DNA
ctcaagtgatctgcccacct

SEQ ID NO: 14747 - DNA, 20 bp, synthetic construct
  misc_feature 1..20: note = chemically synthesized
  source 1..20: mol_type = other DNA
gtcccaaactgctgtgatta

SEQ ID NO: 14748 - DNA, 20 bp, synthetic construct
  misc_feature 1..20: note = chemically synthesized
  source 1..20: mol_type = other DNA
tcccaaactgctgtgattac

SEQ ID NO: 14749 - DNA, 20 bp, synthetic construct
  misc_feature 1..20: note = chemically synthesized
  source 1..20: mol_type = other DNA
ccaaactgctgtgattacag

SEQ ID NO: 14750 - DNA, 20 bp, synthetic construct
  misc_feature 1..20: note = chemically synthesized
  source 1..20: mol_type = other DNA
actgctgtgattacaggagt

SEQ ID NO: 14751 - DNA, 20 bp, synthetic construct
  misc_feature 1..20: note = chemically synthesized
  source 1..20: mol_type = other DNA
ggagtgagccaccgcacctc

SEQ ID NO: 14752 - DNA, 20 bp, synthetic construct
  misc_feature 1..20: note = chemically synthesized
  source 1..20: mol_type = other DNA
gagtgagccaccgcacctca

SEQ ID NO: 14753 - DNA, 20 bp, synthetic construct
  misc_feature 1..20: note = chemically synthesized
  source 1..20: mol_type = other DNA
acctcaaggaatttgatgtt

SEQ ID NO: 14754 - DNA, 20 bp, synthetic construct
  misc_feature 1..20: note = chemically synthesized
  source 1..20: mol_type = other DNA
cctcaaggaatttgatgttt

SEQ ID NO: 14755 - DNA, 20 bp, synthetic construct
  misc_feature 1..20: note = chemically synthesized
  source 1..20: mol_type = other DNA
ttaggctgtgacctctgcac

SEQ ID NO: 14756 - DNA, 20 bp, synthetic construct
  misc_feature 1..20: note = chemically synthesized
  source 1..20: mol_type = other DNA
taggctgtgacctctgcact

SEQ ID NO: 14757 - DNA, 20 bp, synthetic construct
  misc_feature 1..20: note = chemically synthesized
  source 1..20: mol_type = other DNA
tgtgacctctgcactaggaa

SEQ ID NO: 14758 - DNA, 20 bp, synthetic construct
  misc_feature 1..20: note = chemically synthesized
  source 1..20: mol_type = other DNA
gacctctgcactaggaatgg

SEQ ID NO: 14759 - DNA, 20 bp, synthetic construct
  misc_feature 1..20: note = chemically synthesized
  source 1..20: mol_type = other DNA
acctctgcactaggaatgga

SEQ ID NO: 14760 - DNA, 20 bp, synthetic construct
  misc_feature 1..20: note = chemically synthesized
  source 1..20: mol_type = other DNA
ctgcactaggaatggaaggt

SEQ ID NO: 14761 - DNA, 20 bp, synthetic construct
  misc_feature 1..20: note = chemically synthesized
  source 1..20: mol_type = other DNA
caccccacccttcgtcctgc

SEQ ID NO: 14762 - DNA, 20 bp, synthetic construct
  misc_feature 1..20: note = chemically synthesized
  source 1..20: mol_type = other DNA
gcaagtacccaatcacactg

SEQ ID NO: 14763 - DNA, 20 bp, synthetic construct
  misc_feature 1..20: note = chemically synthesized
  source 1..20: mol_type = other DNA
aagtacccaatcacactgca

SEQ ID NO: 14764 - DNA, 20 bp, synthetic construct
  misc_feature 1..20: note = chemically synthesized
  source 1..20: mol_type = other DNA
agagccacacctgccttcct

SEQ ID NO: 14765 - DNA, 20 bp, synthetic construct
  misc_feature 1..20: note = chemically synthesized
  source 1..20: mol_type = other DNA
agccacacctgccttcctta

SEQ ID NO: 14766 - DNA, 20 bp, synthetic construct
  misc_feature 1..20: note = chemically synthesized
  source 1..20: mol_type = other DNA
gccacacctgccttccttag

SEQ ID NO: 14767 - DNA, 20 bp, synthetic construct
  misc_feature 1..20: note = chemically synthesized
  source 1..20: mol_type = other DNA
ggcgtgcctccatccctgat

SEQ ID NO: 14768 - DNA, 20 bp, synthetic construct
  misc_feature 1..20: note = chemically synthesized
  source 1..20: mol_type = other DNA
atgagtttttcctccatgtg

SEQ ID NO: 14769 - DNA, 20 bp, synthetic construct
  misc_feature 1..20: note = chemically synthesized
  source 1..20: mol_type = other DNA
ctccatgtgtagaattgaat

SEQ ID NO: 14770 - DNA, 20 bp, synthetic construct
  misc_feature 1..20: note = chemically synthesized
  source 1..20: mol_type = other DNA
catgtgtagaattgaataag

SEQ ID NO: 14771 - DNA, 20 bp, synthetic construct
  misc_feature 1..20: note = chemically synthesized
  source 1..20: mol_type = other DNA
atgtgtagaattgaataaga

SEQ ID NO: 14772 - DNA, 20 bp, synthetic construct
  misc_feature 1..20: note = chemically synthesized
  source 1..20: mol_type = other DNA
gtagaattgaataagaagga

SEQ ID NO: 14773 - DNA, 20 bp, synthetic construct
  misc_feature 1..20: note = chemically synthesized
  source 1..20: mol_type = other DNA
aggatagaattcaatttaac

SEQ ID NO: 14774 - DNA, 20 bp, synthetic construct
  misc_feature 1..20: note = chemically synthesized
  source 1..20: mol_type = other DNA
aattcaatttaacaagcttt

SEQ ID NO: 14775 - DNA, 20 bp, synthetic construct
  misc_feature 1..20: note = chemically synthesized
  source 1..20: mol_type = other DNA
caagctttgagtacttccta

SEQ ID NO: 14776 - DNA, 20 bp, synthetic construct
  misc_feature 1..20: note = chemically synthesized
  source 1..20: mol_type = other DNA
tttgagtacttcctatagcc

SEQ ID NO: 14777 - DNA, 20 bp, synthetic construct
  misc_feature 1..20: note = chemically synthesized
  source 1..20: mol_type = other DNA
ttgagtacttcctatagcct

SEQ ID NO: 14778 - DNA, 20 bp, synthetic construct
  misc_feature 1..20: note = chemically synthesized
  source 1..20: mol_type = other DNA
cattgtgctgacaactatgt

SEQ ID NO: 14779 - DNA, 20 bp, synthetic construct
  misc_feature 1..20: note = chemically synthesized
  source 1..20: mol_type = other DNA
ttgtgctgacaactatgtta

SEQ ID NO: 14780 - DNA, 20 bp, synthetic construct
  misc_feature 1..20: note = chemically synthesized
  source 1..20: mol_type = other DNA
gtgctgacaactatgttaga

SEQ ID NO: 14781 - DNA, 20 bp, synthetic construct
  misc_feature 1..20: note = chemically synthesized
  source 1..20: mol_type = other DNA
gctgacaactatgttagaga

SEQ ID NO: 14782 - DNA, 20 bp, synthetic construct
  misc_feature 1..20: note = chemically synthesized
  source 1..20: mol_type = other DNA
aactatgttagagagagaaa

SEQ ID NO: 14783 - DNA, 20 bp, synthetic construct
  misc_feature 1..20: note = chemically synthesized
  source 1..20: mol_type = other DNA
tgttagagagagaaatagac

SEQ ID NO: 14784 - DNA, 20 bp, synthetic construct
  misc_feature 1..20: note = chemically synthesized
  source 1..20: mol_type = other DNA
acaagctataaacttttcct

SEQ ID NO: 14785 - DNA, 20 bp, synthetic construct
  misc_feature 1..20: note = chemically synthesized
  source 1..20: mol_type = other DNA
caagctataaacttttcctc

SEQ ID NO: 14786 - DNA, 20 bp, synthetic construct
  misc_feature 1..20: note = chemically synthesized
  source 1..20: mol_type = other DNA
aggaccatctacataatttc

SEQ ID NO: 14787 - DNA, 20 bp, synthetic construct
  misc_feature 1..20: note = chemically synthesized
  source 1..20: mol_type = other DNA
ggaccatctacataatttct

SEQ ID NO: 14788 - DNA, 20 bp, synthetic construct
  misc_feature 1..20: note = chemically synthesized
  source 1..20: mol_type = other DNA
caatataaaatgaaaatgaa

SEQ ID NO: 14789 - DNA, 20 bp, synthetic construct
  misc_feature 1..20: note = chemically synthesized
  source 1..20: mol_type = other DNA
tagcccctttgtcaaaaatt

SEQ ID NO: 14790 - DNA, 20 bp, synthetic construct
  misc_feature 1..20: note = chemically synthesized
  source 1..20: mol_type = other DNA
agcccctttgtcaaaaatta

SEQ ID NO: 14791 - DNA, 20 bp, synthetic construct
  misc_feature 1..20: note = chemically synthesized
  source 1..20: mol_type = other DNA
aaaaattaaggatttcatgt

SEQ ID NO: 14792 - DNA, 20 bp, synthetic construct
  misc_feature 1..20: note = chemically synthesized
  source 1..20: mol_type = other DNA
aaaattaaggatttcatgtc

SEQ ID NO: 14793 - DNA, 20 bp, synthetic construct
  misc_feature 1..20: note = chemically synthesized
  source 1..20: mol_type = other DNA
taaggatttcatgtcaggaa

SEQ ID NO: 14794 - DNA, 20 bp, synthetic construct
  misc_feature 1..20: note = chemically synthesized
  source 1..20: mol_type = other DNA
gatttcatgtcaggaacagc

SEQ ID NO: 14795 - DNA, 20 bp, synthetic construct
  misc_feature 1..20: note = chemically synthesized
  source 1..20: mol_type = other DNA
atttcatgtcaggaacagca

SEQ ID NO: 14796 - DNA, 20 bp, synthetic construct
  misc_feature 1..20: note = chemically synthesized
  source 1..20: mol_type = other DNA
aacagcaaggatgttaaacc

SEQ ID NO: 14797 - DNA, 20 bp, synthetic construct
  misc_feature 1..20: note = chemically synthesized
  source 1..20: mol_type = other DNA
caaggatgttaaaccaagca

SEQ ID NO: 14798 - DNA, 20 bp, synthetic construct
  misc_feature 1..20: note = chemically synthesized
  source 1..20: mol_type = other DNA
aaggatgttaaaccaagcat

SEQ ID NO: 14799 - DNA, 20 bp, synthetic construct
  misc_feature 1..20: note = chemically synthesized
  source 1..20: mol_type = other DNA
aggatgttaaaccaagcatg

SEQ ID NO: 14800 - DNA, 20 bp, synthetic construct
  misc_feature 1..20: note = chemically synthesized
  source 1..20: mol_type = other DNA
aaaccaagcatggggccatc

SEQ ID NO: 14801 - DNA, 20 bp, synthetic construct
  misc_feature 1..20: note = chemically synthesized
  source 1..20: mol_type = other DNA
attcatgatacgaaaaaata

SEQ ID NO: 14802 - DNA, 20 bp, synthetic construct
  misc_feature 1..20: note = chemically synthesized
  source 1..20: mol_type = other DNA
tcatgatacgaaaaaataaa

SEQ ID NO: 14803 - DNA, 20 bp, synthetic construct
  misc_feature 1..20: note = chemically synthesized
  source 1..20: mol_type = other DNA
cgaaaaaataaagagtattc

SEQ ID NO: 14804 - DNA, 20 bp, synthetic construct
  misc_feature 1..20: note = chemically synthesized
  source 1..20: mol_type = other DNA
taaagagtattctagttatt

SEQ ID NO: 14805 - DNA, 20 bp, synthetic construct
  misc_feature 1..20: note = chemically synthesized
  source 1..20: mol_type = other DNA
gttatttagccacatatttc

SEQ ID NO: 14806 - DNA, 20 bp, synthetic construct
  misc_feature 1..20: note = chemically synthesized
  source 1..20: mol_type = other DNA
ttagccacatatttcaagtt

SEQ ID NO: 14807 - DNA, 20 bp, synthetic construct
  misc_feature 1..20: note = chemically synthesized
  source 1..20: mol_type = other DNA
cactcaacctaaaacaatgc

SEQ ID NO: 14808 - DNA, 20 bp, synthetic construct
  misc_feature 1..20: note = chemically synthesized
  source 1..20: mol_type = other DNA
taaaacaatgctagtctttc

SEQ ID NO: 14809 - DNA, 20 bp, synthetic construct
  misc_feature 1..20: note = chemically synthesized
  source 1..20: mol_type = other DNA
agtctttctagacccatcca

SEQ ID NO: 14810 - DNA, 20 bp, synthetic construct
  misc_feature 1..20: note = chemically synthesized
  source 1..20: mol_type = other DNA
taattaatttgtgatttaaa

SEQ ID NO: 14811 - DNA, 20 bp, synthetic construct
  misc_feature 1..20: note = chemically synthesized
  source 1..20: mol_type = other DNA
gatttaaatggctcatattc

SEQ ID NO: 14812 - DNA, 20 bp, synthetic construct
  misc_feature 1..20: note = chemically synthesized
  source 1..20: mol_type = other DNA
tcatattccagcctgtgcca

SEQ ID NO: 14813 - DNA, 20 bp, synthetic construct
  misc_feature 1..20: note = chemically synthesized
  source 1..20: mol_type = other DNA
ttatctgtataaatactctt

SEQ ID NO: 14814 - DNA, 20 bp, synthetic construct
  misc_feature 1..20: note = chemically synthesized
  source 1..20: mol_type = other DNA
tatctgtataaatactcttc

SEQ ID NO: 14815 - DNA, 20 bp, synthetic construct
  misc_feature 1..20: note = chemically synthesized
  source 1..20: mol_type = other DNA
cttaatgtttgtgtttatgt

SEQ ID NO: 14816 - DNA, 20 bp, synthetic construct
  misc_feature 1..20: note = chemically synthesized
  source 1..20: mol_type = other DNA
tatgttagatatgcatcatg

SEQ ID NO: 14817 - DNA, 20 bp, synthetic construct
  misc_feature 1..20: note = chemically synthesized
  source 1..20: mol_type = other DNA
aaacatacacttgaaccaaa

SEQ ID NO: 14818 - DNA, 20 bp, synthetic construct
  misc_feature 1..20: note = chemically synthesized
  source 1..20: mol_type = other DNA
aacatacacttgaaccaaaa

SEQ ID NO: 14819 - DNA, 20 bp, synthetic construct
  misc_feature 1..20: note = chemically synthesized
  source 1..20: mol_type = other DNA
atacacttgaaccaaaaagg

SEQ ID NO: 14820 - DNA, 20 bp, synthetic construct
  misc_feature 1..20: note = chemically synthesized
  source 1..20: mol_type = other DNA
ccaaaaaggaagtttttaca

SEQ ID NO: 14821 - DNA, 20 bp, synthetic construct
  misc_feature 1..20: note = chemically synthesized
  source 1..20: mol_type = other DNA
aaatcttctctctgtgctct

SEQ ID NO: 14822 - DNA, 20 bp, synthetic construct
  misc_feature 1..20: note = chemically synthesized
  source 1..20: mol_type = other DNA
tctgtgctcttagcgaaacc

SEQ ID NO: 14823 - DNA, 20 bp, synthetic construct
  misc_feature 1..20: note = chemically synthesized
  source 1..20: mol_type = other DNA
gtgctcttagcgaaaccaag

SEQ ID NO: 14824 - DNA, 20 bp, synthetic construct
  misc_feature 1..20: note = chemically synthesized
  source 1..20: mol_type = other DNA
tgctcttagcgaaaccaagt

SEQ ID NO: 14825 - DNA, 20 bp, synthetic construct
  misc_feature 1..20: note = chemically synthesized
  source 1..20: mol_type = other DNA
gcgaaaccaagtaggctgac

SEQ ID NO: 14826 - DNA, 20 bp, synthetic construct
  misc_feature 1..20: note = chemically synthesized
  source 1..20: mol_type = other DNA
gacaagacatcattcattca

SEQ ID NO: 14827 - DNA, 20 bp, synthetic construct
  misc_feature 1..20: note = chemically synthesized
  source 1..20: mol_type = other DNA
cattcattcacagcgaaacc

SEQ ID NO: 14828 - DNA, 20 bp, synthetic construct
  misc_feature 1..20: note = chemically synthesized
  source 1..20: mol_type = other DNA
tcattcacagcgaaaccgag

SEQ ID NO: 14829 - DNA, 20 bp, synthetic construct
  misc_feature 1..20: note = chemically synthesized
  source 1..20: mol_type = other DNA
gcgaaaccgagtagactgac

SEQ ID NO: 14830 - DNA, 20 bp, synthetic construct
  misc_feature 1..20: note = chemically synthesized
  source 1..20: mol_type = other DNA
gaaaccgagtagactgacaa

SEQ ID NO: 14831 - DNA, 20 bp, synthetic construct
  misc_feature 1..20: note = chemically synthesized
  source 1..20: mol_type = other DNA
aaaccgagtagactgacaag

SEQ ID NO: 14832 - DNA, 20 bp, synthetic construct
  misc_feature 1..20: note = chemically synthesized
  source 1..20: mol_type = other DNA
tcacaaatgaatacaaaaaa

SEQ ID NO: 14833 - DNA, 20 bp, synthetic construct
  misc_feature 1..20: note = chemically synthesized
  source 1..20: mol_type = other DNA
tgaatacaaaaaacagtgtc

SEQ ID NO: 14834 - DNA, 20 bp, synthetic construct
  misc_feature 1..20: note = chemically synthesized
  source 1..20: mol_type = other DNA
aaacagtgtcaagtatacgt

SEQ ID NO: 14835 - DNA, 20 bp, synthetic construct
  misc_feature 1..20: note = chemically synthesized
  source 1..20: mol_type = other DNA
aacagtgtcaagtatacgtg

SEQ ID NO: 14836 - DNA, 20 bp, synthetic construct
  misc_feature 1..20: note = chemically synthesized
  source 1..20: mol_type = other DNA
gtatacgtgaggtcctgtaa

SEQ ID NO: 14837 - DNA, 20 bp, synthetic construct
  misc_feature 1..20: note = chemically synthesized
  source 1..20: mol_type = other DNA
tatacgtgaggtcctgtaat

SEQ ID NO: 14838 - DNA, 20 bp, synthetic construct
  misc_feature 1..20: note = chemically synthesized
  source 1..20: mol_type = other DNA
tgaggtcctgtaatgggtcc

SEQ ID NO: 14839 - DNA, 20 bp, synthetic construct
  misc_feature 1..20: note = chemically synthesized
  source 1..20: mol_type = other DNA
gaggtcctgtaatgggtcct

SEQ ID NO: 14840 - DNA, 20 bp, synthetic construct
  misc_feature 1..20: note = chemically synthesized
  source 1..20: mol_type = other DNA
ctgggcctgcaaaaccctca

SEQ ID NO: 14841 - DNA, 20 bp, synthetic construct
  misc_feature 1..20: note = chemically synthesized
  source 1..20: mol_type = other DNA
ccctcacagctgctaacctc

SEQ ID NO: 14842 - DNA, 20 bp, synthetic construct
  misc_feature 1..20: note = chemically synthesized
  source 1..20: mol_type = other DNA
tcacagctgctaacctcaag

SEQ ID NO: 14843 - DNA, 20 bp, synthetic construct
  misc_feature 1..20: note = chemically synthesized
  source 1..20: mol_type = other DNA
gctgctaacctcaagaagct

SEQ ID NO: 14844 - DNA, 20 bp, synthetic construct
  misc_feature 1..20: note = chemically synthesized
  source 1..20: mol_type = other DNA
gctaacctcaagaagctcag

SEQ ID NO: 14845 - DNA, 20 bp, synthetic construct
  misc_feature 1..20: note = chemically synthesized
  source 1..20: mol_type = other DNA
taacctcaagaagctcagtg

SEQ ID NO: 14846 - DNA, 20 bp, synthetic construct
  misc_feature 1..20: note = chemically synthesized
  source 1..20: mol_type = other DNA
taaatttgttcctttttgta

SEQ ID NO: 14847 - DNA, 20 bp, synthetic construct
  misc_feature 1..20: note = chemically synthesized
  source 1..20: mol_type = other DNA
tcctttttgtatagttcctt

SEQ ID NO: 14848 - DNA, 20 bp, synthetic construct
  misc_feature 1..20: note = chemically synthesized
  source 1..20: mol_type = other DNA
tttgccactgtgaactccta

SEQ ID NO: 14849 - DNA, 20 bp, synthetic construct
  misc_feature 1..20: note = chemically synthesized
  source 1..20: mol_type = other DNA
gccactgtgaactcctacag

SEQ ID NO: 14850 - DNA, 20 bp, synthetic construct
  misc_feature 1..20: note = chemically synthesized
  source 1..20: mol_type = other DNA
ctgtgaactcctacagaagc

SEQ ID NO: 14851 - DNA, 20 bp, synthetic construct
  misc_feature 1..20: note = chemically synthesized
  source 1..20: mol_type = other DNA
tcctacagaagccagcttca

SEQ ID NO: 14852 - DNA, 20 bp, synthetic construct
  misc_feature 1..20: note = chemically synthesized
  source 1..20: mol_type = other DNA
cagcttcaaagccattcttc

SEQ ID NO: 14853 - DNA, 20 bp, synthetic construct
  misc_feature 1..20: note = chemically synthesized
  source 1..20: mol_type = other DNA
cttcaaagccattcttctgg

SEQ ID NO: 14854 - DNA, 20 bp, synthetic construct
  misc_feature 1..20: note = chemically synthesized
  source 1..20: mol_type = other DNA
cctcctgttttttctcccac

SEQ ID NO: 14855 - DNA, 20 bp, synthetic construct
  misc_feature 1..20: note = chemically synthesized
  source 1..20: mol_type = other DNA
cattgtttttcatcctcttg

SEQ ID NO: 14856 - DNA, 20 bp, synthetic construct
  misc_feature 1..20: note = chemically synthesized
  source 1..20: mol_type = other DNA
catcctcttgtagtccttca

SEQ ID NO: 14857 - DNA, 20 bp, synthetic construct
  misc_feature 1..20: note = chemically synthesized
  source 1..20: mol_type = other DNA
gtccttcacagttacccaca

SEQ ID NO: 14858 - DNA, 20 bp, synthetic construct
  misc_feature 1..20: note = chemically synthesized
  source 1..20: mol_type = other DNA
tccttcacagttacccacac

SEQ ID NO: 14859 - DNA, 20 bp, synthetic construct
  misc_feature 1..20: note = chemically synthesized
  source 1..20: mol_type = other DNA
cccacacaggtgaacccttt

SEQ ID NO: 14860 - DNA, 20 bp, synthetic construct
  misc_feature 1..20: note = chemically synthesized
  source 1..20: mol_type = other DNA
gtgaacccttttagctctcc

SEQ ID NO: 14861 - DNA, 20 bp, synthetic construct
  misc_feature 1..20: note = chemically synthesized
  source 1..20: mol_type = other DNA
gaacccttttagctctcctg

SEQ ID NO: 14862 - DNA, 20 bp, synthetic construct
  misc_feature 1..20: note = chemically synthesized
  source 1..20: mol_type = other DNA
aacccttttagctctcctgg

SEQ ID NO: 14863 - DNA, 20 bp, synthetic construct
  misc_feature 1..20: note = chemically synthesized
  source 1..20: mol_type = other DNA
gaggaatgtttctttcctct

SEQ ID NO: 14864 - DNA, 20 bp, synthetic construct
  misc_feature 1..20: note = chemically synthesized
  source 1..20: mol_type = other DNA
aggaatgtttctttcctctc

SEQ ID NO: 14865 - DNA, 20 bp, synthetic construct
  misc_feature 1..20: note = chemically synthesized
  source 1..20: mol_type = other DNA
tgtttctttcctctcaggat

SEQ ID NO: 14866 - DNA, 20 bp, synthetic construct
  misc_feature 1..20: note = chemically synthesized
  source 1..20: mol_type = other DNA
tttctttcctctcaggatca

SEQ ID NO: 14867 - DNA, 20 bp, synthetic construct
  misc_feature 1..20: note = chemically synthesized
  source 1..20: mol_type = other DNA
ctacatcttcctaatgcacc

SEQ ID NO: 14868 - DNA, 20 bp, synthetic construct
  misc_feature 1..20: note = chemically synthesized
  source 1..20: mol_type = other DNA
tcttcctaatgcaccaagac

SEQ ID NO: 14869 - DNA, 20 bp, synthetic construct
  misc_feature 1..20: note = chemically synthesized
  source 1..20: mol_type = other DNA
taatgcaccaagactggcct

SEQ ID NO: 14870 - DNA, 20 bp, synthetic construct
  misc_feature 1..20: note = chemically synthesized
  source 1..20: mol_type = other DNA
ctggcctgagatgtatcctt

SEQ ID NO: 14871 - DNA, 20 bp, synthetic construct
  misc_feature 1..20: note = chemically synthesized
  source 1..20: mol_type = other DNA
ctgagatgtatccttaagat

SEQ ID NO: 14872 - DNA, 20 bp, synthetic construct
  misc_feature 1..20: note = chemically synthesized
  source 1..20: mol_type = other DNA
gagatgtatccttaagatga

SEQ ID NO: 14873 - DNA, 20 bp, synthetic construct
  misc_feature 1..20: note = chemically synthesized
  source 1..20: mol_type = other DNA
tccttaagatgagagcttcc

SEQ ID NO: 14874 - DNA, 20 bp, synthetic construct
  misc_feature 1..20: note = chemically synthesized
  source 1..20: mol_type = other DNA
ttaagatgagagcttcccag

SEQ ID NO: 14875 - DNA, 20 bp, synthetic construct
  misc_feature 1..20: note = chemically synthesized
  source 1..20: mol_type = other DNA
gagcttcccagtagcacccc

SEQ ID NO: 14876 - DNA, 20 bp, synthetic construct
  misc_feature 1..20: note = chemically synthesized
  source 1..20: mol_type = other DNA
ttcccagtagcaccccaagt

SEQ ID NO: 14877 - DNA, 20 bp, synthetic construct
  misc_feature 1..20: note = chemically synthesized
  source 1..20: mol_type = other DNA
tcagatctgaccccgtatgt

SEQ ID NO: 14878 - DNA, 20 bp, synthetic construct
  misc_feature 1..20: note = chemically synthesized
  source 1..20: mol_type = other DNA
tgtgagcatgtgtcctctaa

SEQ ID NO: 14879 - DNA, 20 bp, synthetic construct
  misc_feature 1..20: note = chemically synthesized
  source 1..20: mol_type = other DNA
gcatgtgtcctctaacagca

SEQ ID NO: 14880 - DNA, 20 bp, synthetic construct
  misc_feature 1..20: note = chemically synthesized
  source 1..20: mol_type = other DNA
catgtgtcctctaacagcac

SEQ ID NO: 14881 - DNA, 20 bp, synthetic construct
  misc_feature 1..20: note = chemically synthesized
  source 1..20: mol_type = other DNA
agcacaggccttttgccacc

SEQ ID NO: 14882 - DNA, 20 bp, synthetic construct
  misc_feature 1..20: note = chemically synthesized
  source 1..20: mol_type = other DNA
ccttttgccacctagctgtc

SEQ ID NO: 14883 - DNA, 20 bp, synthetic construct
  misc_feature 1..20: note = chemically synthesized
  source 1..20: mol_type = other DNA
cttttgccacctagctgtcc

SEQ ID NO: 14884 - DNA, 20 bp, synthetic construct
  misc_feature 1..20: note = chemically synthesized
  source 1..20: mol_type = other DNA
ttttgccacctagctgtcca

SEQ ID NO: 14885 - DNA, 20 bp, synthetic construct
  misc_feature 1..20: note = chemically synthesized
  source 1..20: mol_type = other DNA
tttgccacctagctgtccag

SEQ ID NO: 14886 - DNA, 20 bp, synthetic construct
  misc_feature 1..20: note = chemically synthesized
  source 1..20: mol_type = other DNA
tgtccaggggtgccttaaaa

SEQ ID NO: 14887 - DNA, 20 bp, synthetic construct
  misc_feature 1..20: note = chemically synthesized
  source 1..20: mol_type = other DNA
ggtgccttaaaatggcaaac

SEQ ID NO: 14888 - DNA, 20 bp, synthetic construct
  misc_feature 1..20: note = chemically synthesized
  source 1..20: mol_type = other DNA
gtgccttaaaatggcaaaca

SEQ ID NO: 14889 - DNA, 20 bp, synthetic construct
  misc_feature 1..20: note = chemically synthesized
  source 1..20: mol_type = other DNA
ttcatattaatacatgtgta

SEQ ID NO: 14890 - DNA, 20 bp, synthetic construct
  misc_feature 1..20: note = chemically synthesized
  source 1..20: mol_type = other DNA
tctatacacatgtattaata

SEQ ID NO: 14891 - DNA, 20 bp, synthetic construct
  misc_feature 1..20: note = chemically synthesized
  source 1..20: mol_type = other DNA
aagcctgattctgccgcttc

SEQ ID NO: 14892 - DNA, 20 bp, synthetic construct
  misc_feature 1..20: note = chemically synthesized
  source 1..20: mol_type = other DNA
agcctgattctgccgcttct

SEQ ID NO: 14893 - DNA, 20 bp, synthetic construct
  misc_feature 1..20: note = chemically synthesized
  source 1..20: mol_type = other DNA
gattctgccgcttctaggta

SEQ ID NO: 14894 - DNA, 20 bp, synthetic construct
  misc_feature 1..20: note = chemically synthesized
  source 1..20: mol_type = other DNA
ttctgccgcttctaggtata

SEQ ID NO: 14895 - DNA, 20 bp, synthetic construct
  misc_feature 1..20: note = chemically synthesized
  source 1..20: mol_type = other DNA
tctgccgcttctaggtatag

SEQ ID NO: 14896 - DNA, 20 bp, synthetic construct
  misc_feature 1..20: note = chemically synthesized
  source 1..20: mol_type = other DNA
taggtatagaggccacctgc

SEQ ID NO: 14897 - DNA, 20 bp, synthetic construct
  misc_feature 1..20: note = chemically synthesized
  source 1..20: mol_type = other DNA
cacaataactaatcattcta

SEQ ID NO: 14898 - DNA, 20 bp, synthetic construct
  misc_feature 1..20: note = chemically synthesized
  source 1..20: mol_type = other DNA
tgtatatatatatatatatt

SEQ ID NO: 14899 - DNA, 20 bp, synthetic construct
  misc_feature 1..20: note = chemically synthesized
  source 1..20: mol_type = other DNA
gtatatatatatatatattc

SEQ ID NO: 14900 - DNA, 20 bp, synthetic construct
  misc_feature 1..20: note = chemically synthesized
  source 1..20: mol_type = other DNA
attcaggaaataatatattc

SEQ ID NO: 14901 - DNA, 20 bp, synthetic construct
  misc_feature 1..20: note = chemically synthesized
  source 1..20: mol_type = other DNA
gaatatgtcacattctgtct

SEQ ID NO: 14902 - DNA, 20 bp, synthetic construct
  misc_feature 1..20: note = chemically synthesized
  source 1..20: mol_type = other DNA
aatatgtcacattctgtctc

SEQ ID NO: 14903 - DNA, 20 bp, synthetic construct
  misc_feature 1..20: note = chemically synthesized
  source 1..20: mol_type = other DNA
ttttctttatgatgccgttt

SEQ ID NO: 14904 - DNA, 20 bp, synthetic construct
  misc_feature 1..20: note = chemically synthesized
  source 1..20: mol_type = other DNA
tttctttatgatgccgtttg

SEQ ID NO: 14905 - DNA, 20 bp, synthetic construct
  misc_feature 1..20: note = chemically synthesized
  source 1..20: mol_type = other DNA
ctttatgatgccgtttgagg

SEQ ID NO: 14906 - DNA, 20 bp, synthetic construct
  misc_feature 1..20: note = chemically synthesized
  source 1..20: mol_type = other DNA
ttatgatgccgtttgaggtg

SEQ ID NO: 14907 - DNA, 20 bp, synthetic construct
  misc_feature 1..20: note = chemically synthesized
  source 1..20: mol_type = other DNA
tgccgtttgaggtggagttt

SEQ ID NO: 14908 - DNA, 20 bp, synthetic construct
  misc_feature 1..20: note = chemically synthesized
  source 1..20: mol_type = other DNA
gtttgaggtggagttttagt

SEQ ID NO: 14909 - DNA, 20 bp, synthetic construct
  misc_feature 1..20: note = chemically synthesized
  source 1..20: mol_type = other DNA
tttgaggtggagttttagtc

SEQ ID NO: 14910 - DNA, 20 bp, synthetic construct
  misc_feature 1..20: note = chemically synthesized
  source 1..20: mol_type = other DNA
gaggtggagttttagtcagg

SEQ ID NO: 14911 - DNA, 20 bp, synthetic construct
  misc_feature 1..20: note = chemically synthesized
  source 1..20: mol_type = other DNA
tggagttttagtcaggtggt

SEQ ID NO: 14912 - DNA, 20 bp, synthetic construct
  misc_feature 1..20: note = chemically synthesized
  source 1..20: mol_type = other DNA
ttttttgccatctgccctgt

SEQ ID NO: 14913 - DNA, 20 bp, synthetic construct
  misc_feature 1..20: note = chemically synthesized
  source 1..20: mol_type = other DNA
ctgccctgtaagcatcctgc

SEQ ID NO: 14914 - DNA, 20 bp, synthetic construct
  misc_feature 1..20: note = chemically synthesized
  source 1..20: mol_type = other DNA
tgccctgtaagcatcctgct

SEQ ID NO: 14915 - DNA, 20 bp, synthetic construct
  misc_feature 1..20: note = chemically synthesized
  source 1..20: mol_type = other DNA
gccctgtaagcatcctgctg

SEQ ID NO: 14916 - DNA, 20 bp, synthetic construct
  misc_feature 1..20: note = chemically synthesized
  source 1..20: mol_type = other DNA
taagcatcctgctggggacc

SEQ ID NO: 14917 - DNA, 20 bp, synthetic construct
  misc_feature 1..20: note = chemically synthesized
  source 1..20: mol_type = other DNA
catcctgctggggacccaga

SEQ ID NO: 14918 - DNA, 20 bp, synthetic construct
  misc_feature 1..20: note = chemically synthesized
  source 1..20: mol_type = other DNA
atcctgctggggacccagat

SEQ ID NO: 14919 - DNA, 20 bp, synthetic construct
  misc_feature 1..20: note = chemically synthesized
  source 1..20: mol_type = other DNA
cctgctggggacccagatag

SEQ ID NO: 14920 - DNA, 20 bp, synthetic construct
  misc_feature 1..20: note = chemically synthesized
  source 1..20: mol_type = other DNA
ccagataggagtcatcactc

SEQ ID NO: 14921 - DNA, 20 bp, synthetic construct
  misc_feature 1..20: note = chemically synthesized
  source 1..20: mol_type = other DNA
cagataggagtcatcactct

SEQ ID NO: 14922 - DNA, 20 bp, synthetic construct
  misc_feature 1..20: note = chemically synthesized
  source 1..20: mol_type = other DNA
aggagtcatcactctaggct

SEQ ID NO: 14923 - DNA, 20 bp, synthetic construct
  misc_feature 1..20: note = chemically synthesized
  source 1..20: mol_type = other DNA
cactctaggctgagaacatc

SEQ ID NO: 14924 - DNA, 20 bp, synthetic construct
  misc_feature 1..20: note = chemically synthesized
  source 1..20: mol_type = other DNA
actctaggctgagaacatct

SEQ ID NO: 14925 - DNA, 20 bp, synthetic construct
  misc_feature 1..20: note = chemically synthesized
  source 1..20: mol_type = other DNA
aacatctgggcacacaccct

SEQ ID NO: 14926 - DNA, 20 bp, synthetic construct
  misc_feature 1..20: note = chemically synthesized
  source 1..20: mol_type = other DNA
tgggcacacaccctaagcct

SEQ ID NO: 14927 - DNA, 20 bp, synthetic construct
  misc_feature 1..20: note = chemically synthesized
  source 1..20: mol_type = other DNA
cagcatgactcatcatgact

SEQ ID NO: 14928 - DNA, 20 bp, synthetic construct
  misc_feature 1..20: note = chemically synthesized
  source 1..20: mol_type = other DNA
gactcagcattgctgtgctt

SEQ ID NO: 14929 - DNA, 20 bp, synthetic construct
  misc_feature 1..20: note = chemically synthesized
  source 1..20: mol_type = other DNA
cagcattgctgtgcttgagc

SEQ ID NO: 14930 - DNA, 20 bp, synthetic construct
  misc_feature 1..20: note = chemically synthesized
  source 1..20: mol_type = other DNA
cattgctgtgcttgagccag

SEQ ID NO: 14931 - DNA, 20 bp, synthetic construct
  misc_feature 1..20: note = chemically synthesized
  source 1..20: mol_type = other DNA
attgctgtgcttgagccaga

SEQ ID NO: 14932 - DNA, 20 bp, synthetic construct
  misc_feature 1..20: note = chemically synthesized
  source 1..20: mol_type = other DNA
cttgagccagaaggtttgct

SEQ ID NO: 14933 - DNA, 20 bp, synthetic construct
  misc_feature 1..20: note = chemically synthesized
  source 1..20: mol_type = other DNA
gagccagaaggtttgcttag

SEQ ID NO: 14934 - DNA, 20 bp, synthetic construct
  misc_feature 1..20: note = chemically synthesized
  source 1..20: mol_type = other DNA
agccagaaggtttgcttaga

SEQ ID NO: 14935 - DNA, 20 bp, synthetic construct
  misc_feature 1..20: note = chemically synthesized
  source 1..20: mol_type = other DNA
ggtttgcttagaaggttaca

SEQ ID NO: 14936 - DNA, 20 bp, synthetic construct
  misc_feature 1..20: note = chemically synthesized
  source 1..20: mol_type = other DNA
cttagaaggttacacagaac

SEQ ID NO: 14937 - DNA, 20 bp, synthetic construct
  misc_feature 1..20: note = chemically synthesized
  source 1..20: mol_type = other DNA
agaaggttacacagaaccag

SEQ ID NO: 14938 - DNA, 20 bp, synthetic construct
  misc_feature 1..20: note = chemically synthesized
  source 1..20: mol_type = other DNA
gaaggttacacagaaccaga

SEQ ID NO: 14939 - DNA, 20 bp, synthetic construct
  misc_feature 1..20: note = chemically synthesized
  source 1..20: mol_type = other DNA
ggttacacagaaccagaagg

SEQ ID NO: 14940 - DNA, 20 bp, synthetic construct
  misc_feature 1..20: note = chemically synthesized
  source 1..20: mol_type = other DNA
gttacacagaaccagaaggc

SEQ ID NO: 14941 - DNA, 20 bp, synthetic construct
  misc_feature 1..20: note = chemically synthesized
  source 1..20: mol_type = other DNA
ttacacagaaccagaaggcg

SEQ ID NO: 14942 - DNA, 20 bp, synthetic construct
  misc_feature 1..20: note = chemically synthesized
  source 1..20: mol_type = other DNA
tacacagaaccagaaggcgg

SEQ ID NO: 14943 - DNA, 20 bp, synthetic construct
  misc_feature 1..20: note = chemically synthesized
  source 1..20: mol_type = other DNA
acagaaccagaaggcggggg

SEQ ID NO: 14944 - DNA, 20 bp, synthetic construct
  misc_feature 1..20: note = chemically synthesized
  source 1..20: mol_type = other DNA
cagaaccagaaggcgggggt

SEQ ID NO: 14945 - DNA, 20 bp, synthetic construct
  misc_feature 1..20: note = chemically synthesized
  source 1..20: mol_type = other DNA
agaaccagaaggcgggggtg

SEQ ID NO: 14946 - DNA, 20 bp, synthetic construct
  misc_feature 1..20: note = chemically synthesized
  source 1..20: mol_type = other DNA
gggtggggcactgaccccga

SEQ ID NO: 14947 - DNA, 20 bp, synthetic construct
  misc_feature 1..20: note = chemically synthesized
  source 1..20: mol_type = other DNA
ggtggggcactgaccccgac

SEQ ID NO: 14948 - DNA, 20 bp, synthetic construct
  misc_feature 1..20: note = chemically synthesized
  source 1..20: mol_type = other DNA
gtggggcactgaccccgaca

SEQ ID NO: 14949 - DNA, 20 bp, synthetic construct
  misc_feature 1..20: note = chemically synthesized
  source 1..20: mol_type = other DNA
tggggcactgaccccgacag

SEQ ID NO: 14950 - DNA, 20 bp, synthetic construct
  misc_feature 1..20: note = chemically synthesized
  source 1..20: mol_type = other DNA
cactgaccccgacaggggcc

SEQ ID NO: 14951 - DNA, 20 bp, synthetic construct
  misc_feature 1..20: note = chemically synthesized
  source 1..20: mol_type = other DNA
gaccccgacaggggcctggc

SEQ ID NO: 14952 - DNA, 20 bp, synthetic construct
  misc_feature 1..20: note = chemically synthesized
  source 1..20: mol_type = other DNA
tggccagaactgctcatgct

SEQ ID NO: 14953 - DNA, 20 bp, synthetic construct
  misc_feature 1..20: note = chemically synthesized
  source 1..20: mol_type = other DNA
aactgctcatgcttggacta

SEQ ID NO: 14954 - DNA, 20 bp, synthetic construct
  misc_feature 1..20: note = chemically synthesized
  source 1..20: mol_type = other DNA
actgctcatgcttggactat

SEQ ID NO: 14955 - DNA, 20 bp, synthetic construct
  misc_feature 1..20: note = chemically synthesized
  source 1..20: mol_type = other DNA
tgctcatgcttggactatgg

SEQ ID NO: 14956 - DNA, 20 bp, synthetic construct
  misc_feature 1..20: note = chemically synthesized
  source 1..20: mol_type = other DNA
gctcatgcttggactatggg

SEQ ID NO: 14957 - DNA, 20 bp, synthetic construct
  misc_feature 1..20: note = chemically synthesized
  source 1..20: mol_type = other DNA
ggactatgggaggtcactaa

SEQ ID NO: 14958 - DNA, 20 bp, synthetic construct
  misc_feature 1..20: note = chemically synthesized
  source 1..20: mol_type = other DNA
actatgggaggtcactaatg

SEQ ID NO: 14959 - DNA, 20 bp, synthetic construct
  misc_feature 1..20: note = chemically synthesized
  source 1..20: mol_type = other DNA
aggtcactaatggagacaca

SEQ ID NO: 14960 - DNA, 20 bp, synthetic construct
  misc_feature 1..20: note = chemically synthesized
  source 1..20: mol_type = other DNA
ggagacacacagaaatgtaa

SEQ ID NO: 14961 - DNA, 20 bp, synthetic construct
  misc_feature 1..20: note = chemically synthesized
  source 1..20: mol_type = other DNA
gagacacacagaaatgtaac

SEQ ID NO: 14962 - DNA, 20 bp, synthetic construct
  misc_feature 1..20: note = chemically synthesized
  source 1..20: mol_type = other DNA
acagaaatgtaacaggaact

SEQ ID NO: 14963 - DNA, 20 bp, synthetic construct
  misc_feature 1..20: note = chemically synthesized
  source 1..20: mol_type = other DNA
cagaaatgtaacaggaacta

SEQ ID NO: 14964 - DNA, 20 bp, synthetic construct
  misc_feature 1..20: note = chemically synthesized
  source 1..20: mol_type = other DNA
caggaactaaggaaaaactg

SEQ ID NO: 14965 - DNA, 20 bp, synthetic construct
  misc_feature 1..20: note = chemically synthesized
  source 1..20: mol_type = other DNA
aaaactgaagcttatttaat

SEQ ID NO: 14966 - DNA, 20 bp, synthetic construct
  misc_feature 1..20: note = chemically synthesized
  source 1..20: mol_type = other DNA
aactgaagcttatttaatca

SEQ ID NO: 14967 - DNA, 20 bp, synthetic construct
  misc_feature 1..20: note = chemically synthesized
  source 1..20: mol_type = other DNA
aagcttatttaatcagagat

SEQ ID NO: 14968 - DNA, 20 bp, synthetic construct
  misc_feature 1..20: note = chemically synthesized
  source 1..20: mol_type = other DNA
agcttatttaatcagagatg

SEQ ID NO: 14969 - DNA, 20 bp, synthetic construct
  misc_feature 1..20: note = chemically synthesized
  source 1..20: mol_type = other DNA
ttaatcagagatgaggatgc

SEQ ID NO: 14970 - DNA, 20 bp, synthetic construct
  misc_feature 1..20: note = chemically synthesized
  source 1..20: mol_type = other DNA
atcagagatgaggatgctgg

SEQ ID NO: 14971 - DNA, 20 bp, synthetic construct
  misc_feature 1..20: note = chemically synthesized
  source 1..20: mol_type = other DNA
tcagagatgaggatgctgga

SEQ ID NO: 14972 - DNA, 20 bp, synthetic construct
  misc_feature 1..20: note = chemically synthesized
  source 1..20: mol_type = other DNA
cagagatgaggatgctggaa

SEQ ID NO: 14973 - DNA, 20 bp, synthetic construct
  misc_feature 1..20: note = chemically synthesized
  source 1..20: mol_type = other DNA
gatgaggatgctggaaggga

SEQ ID NO: 14974 - DNA, 20 bp, synthetic construct
  misc_feature 1..20: note = chemically synthesized
  source 1..20: mol_type = other DNA
tgaggatgctggaagggata

SEQ ID NO: 14975 - DNA, 20 bp, synthetic construct
  misc_feature 1..20: note = chemically synthesized
  source 1..20: mol_type = other DNA
gaggatgctggaagggatag

SEQ ID NO: 14976 - DNA, 20 bp, synthetic construct
  misc_feature 1..20: note = chemically synthesized
  source 1..20: mol_type = other DNA
aggatgctggaagggataga

SEQ ID NO: 14977 - DNA, 20 bp, synthetic construct
  misc_feature 1..20: note = chemically synthesized
  source 1..20: mol_type = other DNA
gatgctggaagggatagagg

SEQ ID NO: 14978 - DNA, 20 bp, synthetic construct
  misc_feature 1..20: note = chemically synthesized
  source 1..20: mol_type = other DNA
tggaagggatagagggagct

SEQ ID NO: 14979 - DNA, 20 bp, synthetic construct
  misc_feature 1..20: note = chemically synthesized
  source 1..20: mol_type = other DNA
gagggagctgagcttgtaaa

SEQ ID NO: 14980 - DNA, 20 bp, synthetic construct
  misc_feature 1..20: note = chemically synthesized
  source 1..20: mol_type = other DNA
agctgagcttgtaaaaagta

SEQ ID NO: 14981 - DNA, 20 bp, synthetic construct
  misc_feature 1..20: note = chemically synthesized
  source 1..20: mol_type = other DNA
taaaaagtatagtaatcatt

SEQ ID NO: 14982 - DNA, 20 bp, synthetic construct
  misc_feature 1..20: note = chemically synthesized
  source 1..20: mol_type = other DNA
tatagtaatcattcagcaaa

SEQ ID NO: 14983 - DNA, 20 bp, synthetic construct
  misc_feature 1..20: note = chemically synthesized
  source 1..20: mol_type = other DNA
tcattcagcaaatggttttg

SEQ ID NO: 14984 - DNA, 20 bp, synthetic construct
  misc_feature 1..20: note = chemically synthesized
  source 1..20: mol_type = other DNA
aatggttttgaagcacctgc

SEQ ID NO: 14985 - DNA, 20 bp, synthetic construct
  misc_feature 1..20: note = chemically synthesized
  source 1..20: mol_type = other DNA
tggatgctaaacactatttt

SEQ ID NO: 14986 - DNA, 20 bp, synthetic construct
  misc_feature 1..20: note = chemically synthesized
  source 1..20: mol_type = other DNA
tcagtgcttgaatcataaat

SEQ ID NO: 14987 - DNA, 20 bp, synthetic construct
  misc_feature 1..20: note = chemically synthesized
  source 1..20: mol_type = other DNA
acatgtatcttattccccac

SEQ ID NO: 14988 - DNA, 20 bp, synthetic construct
  misc_feature 1..20: note = chemically synthesized
  source 1..20: mol_type = other DNA
atgtatcttattccccacaa

SEQ ID NO: 14989 - DNA, 20 bp, synthetic construct
  misc_feature 1..20: note = chemically synthesized
  source 1..20: mol_type = other DNA
cttattccccacaagagtcc

SEQ ID NO: 14990 - DNA, 20 bp, synthetic construct
  misc_feature 1..20: note = chemically synthesized
  source 1..20: mol_type = other DNA
agagtccaagtaaaaaataa

SEQ ID NO: 14991 - DNA, 20 bp, synthetic construct
  misc_feature 1..20: note = chemically synthesized
  source 1..20: mol_type = other DNA
ttataatgtgctctgtcccc

SEQ ID NO: 14992 - DNA, 20 bp, synthetic construct
  misc_feature 1..20: note = chemically synthesized
  source 1..20: mol_type = other DNA
tataatgtgctctgtccccc

SEQ ID NO: 14993 - DNA, 20 bp, synthetic construct
  misc_feature 1..20: note = chemically synthesized
  source 1..20: mol_type = other DNA
atgtgctctgtcccccaggc

SEQ ID NO: 14994 - DNA, 20 bp, synthetic construct
  misc_feature 1..20: note = chemically synthesized
  source 1..20: mol_type = other DNA
gtgctctgtcccccaggctg

SEQ ID NO: 14995 - DNA, 20 bp, synthetic construct
  misc_feature 1..20: note = chemically synthesized
  source 1..20: mol_type = other DNA
ctgtcccccaggctggagtg

SEQ ID NO: 14996 - DNA, 20 bp, synthetic construct
  misc_feature 1..20: note = chemically synthesized
  source 1..20: mol_type = other DNA
tcccccaggctggagtgcag

SEQ ID NO: 14997 - DNA, 20 bp, synthetic construct
  misc_feature 1..20: note = chemically synthesized
  source 1..20: mol_type = other DNA
ggagtgcagtggcacgatct

SEQ ID NO: 14998 - DNA, 20 bp, synthetic construct
  misc_feature 1..20: note = chemically synthesized
  source 1..20: mol_type = other DNA
tcactgcaacctccgcctcc

SEQ ID NO: 14999 - DNA, 20 bp, synthetic construct
  misc_feature 1..20: note = chemically synthesized
  source 1..20: mol_type = other DNA
cactgcaacctccgcctccc

SEQ ID NO: 15000 - DNA, 20 bp, synthetic construct
  misc_feature 1..20: note = chemically synthesized
  source 1..20: mol_type = other DNA
aacctccgcctcccgggttc

SEQ ID NO: 15001 - DNA, 20 bp, synthetic construct
  misc_feature 1..20: note = chemically synthesized
  source 1..20: mol_type = other DNA
ttcaagcaattctcctgcct

SEQ ID NO: 15002 - DNA, 20 bp, synthetic construct
  misc_feature 1..20: note = chemically synthesized
  source 1..20: mol_type = other DNA
tcctgcctcagccaccctaa

SEQ ID NO: 15003 - DNA, 20 bp, synthetic construct
  misc_feature 1..20: note = chemically synthesized
  source 1..20: mol_type = other DNA
gcctcagccaccctaatagc

SEQ ID NO: 15004 - DNA, 20 bp, synthetic construct
  misc_feature 1..20: note = chemically synthesized
  source 1..20: mol_type = other DNA
cctcagccaccctaatagct

SEQ ID NO: 15005 - DNA, 20 bp, synthetic construct
  misc_feature 1..20: note = chemically synthesized
  source 1..20: mol_type = other DNA
caccctaatagctgggatta

SEQ ID NO: 15006 - DNA, 20 bp, synthetic construct
  misc_feature 1..20: note = chemically synthesized
  source 1..20: mol_type = other DNA
accctaatagctgggattac

SEQ ID NO: 15007 - DNA, 20 bp, synthetic construct
  misc_feature 1..20: note = chemically synthesized
  source 1..20: mol_type = other DNA
acaggtgcacaccaccatgc

SEQ ID NO: 15008 - DNA, 20 bp, synthetic construct
  misc_feature 1..20: note = chemically synthesized
  source 1..20: mol_type = other DNA
caggtgcacaccaccatgcc

SEQ ID NO: 15009 - DNA, 20 bp, synthetic construct
  misc_feature 1..20: note = chemically synthesized
  source 1..20: mol_type = other DNA
gctaatttttgtactttttg

SEQ ID NO: 15010 - DNA, 20 bp, synthetic construct
  misc_feature 1..20: note = chemically synthesized
  source 1..20: mol_type = other DNA
taatttttgtactttttgta

SEQ ID NO: 15011 - DNA, 20 bp, synthetic construct
  misc_feature 1..20: note = chemically synthesized
  source 1..20: mol_type = other DNA
aatttttgtactttttgtag

SEQ ID NO: 15012 - DNA, 20 bp, synthetic construct
  misc_feature 1..20: note = chemically synthesized
  source 1..20: mol_type = other DNA
ttttgtactttttgtagagg

SEQ ID NO: 15013 - DNA, 20 bp, synthetic construct
  misc_feature 1..20: note = chemically synthesized
  source 1..20: mol_type = other DNA
tttgtactttttgtagaggc

SEQ ID NO: 15014 - DNA, 20 bp, synthetic construct
  misc_feature 1..20: note = chemically synthesized
  source 1..20: mol_type = other DNA
ttgtactttttgtagaggca

SEQ ID NO: 15015 - DNA, 20 bp, synthetic construct
  misc_feature 1..20: note = chemically synthesized
  source 1..20: mol_type = other DNA
agggtatcaccatgttgtcc

SEQ ID NO: 15016 - DNA, 20 bp, synthetic construct
  misc_feature 1..20: note = chemically synthesized
  source 1..20: mol_type = other DNA
tatcaccatgttgtccaaga

SEQ ID NO: 15017 - DNA, 20 bp, synthetic construct
  misc_feature 1..20: note = chemically synthesized
  source 1..20: mol_type = other DNA
caagatggtcttgaactcct

SEQ ID NO: 15018 - DNA, 20 bp, synthetic construct
  misc_feature 1..20: note = chemically synthesized
  source 1..20: mol_type = other DNA
gtcttgaactcctgagctcc

SEQ ID NO: 15019 - DNA, 20 bp, synthetic construct
  misc_feature 1..20: note = chemically synthesized
  source 1..20: mol_type = other DNA
ttgaactcctgagctccaag

SEQ ID NO: 15020 - DNA, 20 bp, synthetic construct
  misc_feature 1..20: note = chemically synthesized
  source 1..20: mol_type = other DNA
tccaagcagtccacccacct

SEQ ID NO: 15021 - DNA, 20 bp, synthetic construct
  misc_feature 1..20: note = chemically synthesized
  source 1..20: mol_type = other DNA
ccacccacctcagcctccca

SEQ ID NO: 15022 - DNA, 20 bp, synthetic construct
  misc_feature 1..20: note = chemically synthesized
  source 1..20: mol_type = other DNA
acctcagcctcccaaagtgc

SEQ ID NO: 15023 - DNA, 20 bp, synthetic construct
  misc_feature 1..20: note = chemically synthesized
  source 1..20: mol_type = other DNA
cctcagcctcccaaagtgct

SEQ ID NO: 15024 - DNA, 20 bp, synthetic construct
  misc_feature 1..20: note = chemically synthesized
  source 1..20: mol_type = other DNA
ctcccaaagtgctgggatta

SEQ ID NO: 15025 - DNA, 20 bp, synthetic construct
  misc_feature 1..20: note = chemically synthesized
  source 1..20: mol_type = other DNA
tcccaaagtgctgggattac

SEQ ID NO: 15026 - DNA, 20 bp, synthetic construct
  misc_feature 1..20: note = chemically synthesized
  source 1..20: mol_type = other DNA
agtgctgggattacaggtgt

SEQ ID NO: 15027 - DNA, 20 bp, synthetic construct
  misc_feature 1..20: note = chemically synthesized
  source 1..20: mol_type = other DNA
caggtgtgagacaccatgcc

SEQ ID NO: 15028 - DNA, 20 bp, synthetic construct
  misc_feature 1..20: note = chemically synthesized
  source 1..20: mol_type = other DNA
cccagattttccatatttaa

SEQ ID NO: 15029 - DNA, 20 bp, synthetic construct
  misc_feature 1..20: note = chemically synthesized
  source 1..20: mol_type = other DNA
cagattttccatatttaata

SEQ ID NO: 15030 - DNA, 20 bp, synthetic construct
  misc_feature 1..20: note = chemically synthesized
  source 1..20: mol_type = other DNA
agattttccatatttaatag

SEQ ID NO: 15031 - DNA, 20 bp, synthetic construct
  misc_feature 1..20: note = chemically synthesized
  source 1..20: mol_type = other DNA
atatttaatagaggtattta

SEQ ID NO: 15032 - DNA, 20 bp, synthetic construct
  misc_feature 1..20: note = chemically synthesized
  source 1..20: mol_type = other DNA
tatttaatagaggtatttat

SEQ ID NO: 15033 - DNA, 20 bp, synthetic construct
  misc_feature 1..20: note = chemically synthesized
  source 1..20: mol_type = other DNA
taatagaggtatttatggga

SEQ ID NO: 15034 - DNA, 20 bp, synthetic construct
  misc_feature 1..20: note = chemically synthesized
  source 1..20: mol_type = other DNA
aatagaggtatttatgggat

SEQ ID NO: 15035 - DNA, 20 bp, synthetic construct
  misc_feature 1..20: note = chemically synthesized
  source 1..20: mol_type = other DNA
atagaggtatttatgggatg

SEQ ID NO: 15036 - DNA, 20 bp, synthetic construct
  misc_feature 1..20: note = chemically synthesized
  source 1..20: mol_type = other DNA
tagaggtatttatgggatgg

SEQ ID NO: 15037 - DNA, 20 bp, synthetic construct
  misc_feature 1..20: note = chemically synthesized
  source 1..20: mol_type = other DNA
gtatttatgggatgggggaa

SEQ ID NO: 15038 - DNA, 20 bp, synthetic construct
  misc_feature 1..20: note = chemically synthesized
  source 1..20: mol_type = other DNA
aaagaatgtttctctcactg

SEQ ID NO: 15039 - DNA, 20 bp, synthetic construct
  misc_feature 1..20: note = chemically synthesized
  source 1..20: mol_type = other DNA
tctctcactgtggattattt

SEQ ID NO: 15040 - DNA, 20 bp, synthetic construct
  misc_feature 1..20: note = chemically synthesized
  source 1..20: mol_type = other DNA
tctcactgtggattatttta

SEQ ID NO: 15041 - DNA, 20 bp, synthetic construct
  misc_feature 1..20: note = chemically synthesized
  source 1..20: mol_type = other DNA
tcactgtggattattttaga

SEQ ID NO: 15042 - DNA, 20 bp, synthetic construct
  misc_feature 1..20: note = chemically synthesized
  source 1..20: mol_type = other DNA
ctgtggattattttagagag

SEQ ID NO: 15043 - DNA, 20 bp, synthetic construct
  misc_feature 1..20: note = chemically synthesized
  source 1..20: mol_type = other DNA
gtggattattttagagagtg

SEQ ID NO: 15044 - DNA, 20 bp, synthetic construct
  misc_feature 1..20: note = chemically synthesized
  source 1..20: mol_type = other DNA
ttattttagagagtggagaa

SEQ ID NO: 15045 - DNA, 20 bp, synthetic construct
  misc_feature 1..20: note = chemically synthesized
  source 1..20: mol_type = other DNA
ttagagagtggagaatggtc

SEQ ID NO: 15046 - DNA, 20 bp, synthetic construct
  misc_feature 1..20: note = chemically synthesized
  source 1..20: mol_type = other DNA
tcaagatttttttaaaaatt

SEQ ID NO: 15047 - DNA, 20 bp, synthetic construct
  misc_feature 1..20: note = chemically synthesized
  source 1..20: mol_type = other DNA
tttaaaaattaagaaaacat

SEQ ID NO: 15048 - DNA, 20 bp, synthetic construct
  misc_feature 1..20: note = chemically synthesized
  source 1..20: mol_type = other DNA
aaaattaagaaaacataagt

SEQ ID NO: 15049 - DNA, 20 bp, synthetic construct
  misc_feature 1..20: note = chemically synthesized
  source 1..20: mol_type = other DNA
gaaaacataagttggacctt

SEQ ID NO: 15050 - DNA, 20 bp, synthetic construct
  misc_feature 1..20: note = chemically synthesized
  source 1..20: mol_type = other DNA
atgaaaatttatttttttgt

SEQ ID NO: 15051 - DNA, 20 bp, synthetic construct
  misc_feature 1..20: note = chemically synthesized
  source 1..20: mol_type = other DNA
gaaaatttatttttttgttg

SEQ ID NO: 15052 - DNA, 20 bp, synthetic construct
  misc_feature 1..20: note = chemically synthesized
  source 1..20: mol_type = other DNA
aaaatttatttttttgttgg

SEQ ID NO: 15053 - DNA, 20 bp, synthetic construct
  misc_feature 1..20: note = chemically synthesized
  source 1..20: mol_type = other DNA
acccattctctatctcccat

SEQ ID NO: 15054 - DNA, 20 bp, synthetic construct
  misc_feature 1..20: note = chemically synthesized
  source 1..20: mol_type = other DNA
cccattctctatctcccatc

SEQ ID NO: 15055 - DNA, 20 bp, synthetic construct
  misc_feature 1..20: note = chemically synthesized
  source 1..20: mol_type = other DNA
ccattctctatctcccatca

SEQ ID NO: 15056 - DNA, 20 bp, synthetic construct
  misc_feature 1..20: note = chemically synthesized
  source 1..20: mol_type = other DNA
tctctatctcccatcagggc

SEQ ID NO: 15057 - DNA, 20 bp, synthetic construct
  misc_feature 1..20: note = chemically synthesized
  source 1..20: mol_type = other DNA
ctcccatcagggcaagctgt

SEQ ID NO: 15058 - DNA, 20 bp, synthetic construct
  misc_feature 1..20: note = chemically synthesized
  source 1..20: mol_type = other DNA
tcccatcagggcaagctgta

SEQ ID NO: 15059 - DNA, 20 bp, synthetic construct
  misc_feature 1..20: note = chemically synthesized
  source 1..20: mol_type = other DNA
cagggcaagctgtaaggaac

SEQ ID NO: 15060 - DNA, 20 bp, synthetic construct
  misc_feature 1..20: note = chemically synthesized
  source 1..20: mol_type = other DNA
caagctgtaaggaactggct

SEQ ID NO: 15061 - DNA, 20 bp, synthetic construct
  misc_feature 1..20: note = chemically synthesized
  source 1..20: mol_type = other DNA
gtaaggaactggctaagaca

SEQ ID NO: 15062 - DNA, 20 bp, synthetic construct
  misc_feature 1..20: note = chemically synthesized
  source 1..20: mol_type = other DNA
ggaactggctaagacacagt

SEQ ID NO: 15063 - DNA, 20 bp, synthetic construct
  misc_feature 1..20: note = chemically synthesized
  source 1..20: mol_type = other DNA
ctggctaagacacagtgaga

SEQ ID NO: 15064 - DNA, 20 bp, synthetic construct
  misc_feature 1..20: note = chemically synthesized
  source 1..20: mol_type = other DNA
ggctaagacacagtgagaca

SEQ ID NO: 15065 - DNA, 20 bp, synthetic construct
  misc_feature 1..20: note = chemically synthesized
  source 1..20: mol_type = other DNA
cacagtgagacagagtgact

SEQ ID NO: 15066 - DNA, 20 bp, synthetic construct
  misc_feature 1..20: note = chemically synthesized
  source 1..20: mol_type = other DNA
gagacagagtgacttagtct

SEQ ID NO: 15067 - DNA, 20 bp, synthetic construct
  misc_feature 1..20: note = chemically synthesized
  source 1..20: mol_type = other DNA
gacagagtgacttagtctta

SEQ ID NO: 15068 - DNA, 20 bp, synthetic construct
  misc_feature 1..20: note = chemically synthesized
  source 1..20: mol_type = other DNA
acagagtgacttagtcttag

SEQ ID NO: 15069 - DNA, 20 bp, synthetic construct
  misc_feature 1..20: note = chemically synthesized
  source 1..20: mol_type = other DNA
cttagtcttagaggccccac

SEQ ID NO: 15070 - DNA, 20 bp, synthetic construct
  misc_feature 1..20: note = chemically synthesized
  source 1..20: mol_type = other DNA
ttagaggccccactggtacc

SEQ ID NO: 15071 - DNA, 20 bp, synthetic construct
  misc_feature 1..20: note = chemically synthesized
  source 1..20: mol_type = other DNA
ggccccactggtacccagat

SEQ ID NO: 15072 - DNA, 20 bp, synthetic construct
  misc_feature 1..20: note = chemically synthesized
  source 1..20: mol_type = other DNA
cccactggtacccagatgag

SEQ ID NO: 15073 - DNA, 20 bp, synthetic construct
  misc_feature 1..20: note = chemically synthesized
  source 1..20: mol_type = other DNA
ccactggtacccagatgaga

SEQ ID NO: 15074 - DNA, 20 bp, synthetic construct
  misc_feature 1..20: note = chemically synthesized
  source 1..20: mol_type = other DNA
ggcaccttcatcactcatca

SEQ ID NO: 15075 - DNA, 20 bp, synthetic construct
  misc_feature 1..20: note = chemically synthesized
  source 1..20: mol_type = other DNA
ccttcatcactcatcacagt

SEQ ID NO: 15076 - DNA, 20 bp, synthetic construct
  misc_feature 1..20: note = chemically synthesized
  source 1..20: mol_type = other DNA
tctcctctctcctttctcat

SEQ ID NO: 15077 - DNA, 20 bp, synthetic construct
  misc_feature 1..20: note = chemically synthesized
  source 1..20: mol_type = other DNA
tttctcatcagaaatttcat

SEQ ID NO: 15078 - DNA, 20 bp, synthetic construct
  misc_feature 1..20: note = chemically synthesized
  source 1..20: mol_type = other DNA
cagaaatttcataagtctac

SEQ ID NO: 15079 - DNA, 20 bp, synthetic construct
  misc_feature 1..20: note = chemically synthesized
  source 1..20: mol_type = other DNA
agaaatttcataagtctact

SEQ ID NO: 15080 - DNA, 20 bp, synthetic construct
  misc_feature 1..20: note = chemically synthesized
  source 1..20: mol_type = other DNA
gaaatttcataagtctacta

SEQ ID NO: 15081 - DNA, 20 bp, synthetic construct
  misc_feature 1..20: note = chemically synthesized
  source 1..20: mol_type = other DNA
tttcataagtctactagggt

SEQ ID NO: 15082 - DNA, 20 bp, synthetic construct
  misc_feature 1..20: note = chemically synthesized
  source 1..20: mol_type = other DNA
ttcataagtctactagggtc

SEQ ID NO: 15083 - DNA, 20 bp, synthetic construct
  misc_feature 1..20: note = chemically synthesized
  source 1..20: mol_type = other DNA
ataagtctactagggtcagg

SEQ ID NO: 15084 - DNA, 20 bp, synthetic construct
  misc_feature 1..20: note = chemically synthesized
  source 1..20: mol_type = other DNA
tagggtcaggcagatcacat

SEQ ID NO: 15085 - DNA, 20 bp, synthetic construct
  misc_feature 1..20: note = chemically synthesized
  source 1..20: mol_type = other DNA
tcaggcagatcacataagaa

SEQ ID NO: 15086 - DNA, 20 bp, synthetic construct
  misc_feature 1..20: note = chemically synthesized
  source 1..20: mol_type = other DNA
aggcagatcacataagaaaa

SEQ ID NO: 15087 - DNA, 20 bp, synthetic construct
  misc_feature 1..20: note = chemically synthesized
  source 1..20: mol_type = other DNA
ggcagatcacataagaaaag

SEQ ID NO: 15088 - DNA, 20 bp, synthetic construct
  misc_feature 1..20: note = chemically synthesized
  source 1..20: mol_type = other DNA
cacataagaaaagaggatgc

SEQ ID NO: 15089 - DNA, 20 bp, synthetic construct
  misc_feature 1..20: note = chemically synthesized
  source 1..20: mol_type = other DNA
aagaaaagaggatgccagtt

SEQ ID NO: 15090 - DNA, 20 bp, synthetic construct
  misc_feature 1..20: note = chemically synthesized
  source 1..20: mol_type = other DNA
agaaaagaggatgccagtta

SEQ ID NO: 15091 - DNA, 20 bp, synthetic construct
  misc_feature 1..20: note = chemically synthesized
  source 1..20: mol_type = other DNA
aggatgccagttaaggtctg

SEQ ID NO: 15092 - DNA, 20 bp, synthetic construct
  misc_feature 1..20: note = chemically synthesized
  source 1..20: mol_type = other DNA
tgccagttaaggtctgcagt

SEQ ID NO: 15093 - DNA, 20 bp, synthetic construct
  misc_feature 1..20: note = chemically synthesized
  source 1..20: mol_type = other DNA
ttaaggtctgcagtgagtat

SEQ ID NO: 15094 - DNA, 20 bp, synthetic construct
  misc_feature 1..20: note = chemically synthesized
  source 1..20: mol_type = other DNA
gagcccatccctgatgaatt

SEQ ID NO: 15095 - DNA, 20 bp, synthetic construct
  misc_feature 1..20: note = chemically synthesized
  source 1..20: mol_type = other DNA
agcccatccctgatgaatta

SEQ ID NO: 15096 - DNA, 20 bp, synthetic construct
  misc_feature 1..20: note = chemically synthesized
  source 1..20: mol_type = other DNA
aattaaggcaatcaacactt

SEQ ID NO: 15097 - DNA, 20 bp, synthetic construct
  misc_feature 1..20: note = chemically synthesized
  source 1..20: mol_type = other DNA
attaaggcaatcaacacttt

SEQ ID NO: 15098 - DNA, 20 bp, synthetic construct
  misc_feature 1..20: note = chemically synthesized
  source 1..20: mol_type = other DNA
aaggcaatcaacactttagg

SEQ ID NO: 15099 - DNA, 20 bp, synthetic construct
  misc_feature 1..20: note = chemically synthesized
  source 1..20: mol_type = other DNA
ttaggcagccatgttgccat

SEQ ID NO: 15100 - DNA, 20 bp, synthetic construct
  misc_feature 1..20: note = chemically synthesized
  source 1..20: mol_type = other DNA
aggcagccatgttgccatga

SEQ ID NO: 15101 - DNA, 20 bp, synthetic construct
  misc_feature 1..20: note = chemically synthesized
  source 1..20: mol_type = other DNA
gccatgttgccatgagagat

SEQ ID NO: 15102 - DNA, 20 bp, synthetic construct
  misc_feature 1..20: note = chemically synthesized
  source 1..20: mol_type = other DNA
ccatgttgccatgagagatt

SEQ ID NO: 15103 - DNA, 20 bp, synthetic construct
  misc_feature 1..20: note = chemically synthesized
  source 1..20: mol_type = other DNA
atgttgccatgagagattag

SEQ ID NO: 15104 - DNA, 20 bp, synthetic construct
  misc_feature 1..20: note = chemically synthesized
  source 1..20: mol_type = other DNA
tgttgccatgagagattagg

SEQ ID NO: 15105 - DNA, 20 bp, synthetic construct
  misc_feature 1..20: note = chemically synthesized
  source 1..20: mol_type = other DNA
gttgccatgagagattagga

SEQ ID NO: 15106 - DNA, 20 bp, synthetic construct
  misc_feature 1..20: note = chemically synthesized
  source 1..20: mol_type = other DNA
ttgccatgagagattaggag

SEQ ID NO: 15107 - DNA, 20 bp, synthetic construct
  misc_feature 1..20: note = chemically synthesized
  source 1..20: mol_type = other DNA
gagattaggaggggccaaat

SEQ ID NO: 15108 - DNA, 20 bp, synthetic construct
  misc_feature 1..20: note = chemically synthesized
  source 1..20: mol_type = other DNA
taggaggggccaaatgagcc

SEQ ID NO: 15109 - DNA, 20 bp, synthetic construct
  misc_feature 1..20: note = chemically synthesized
  source 1..20: mol_type = other DNA
cagaaataccacctacttct

SEQ ID NO: 15110 - DNA, 20 bp, synthetic construct
  misc_feature 1..20: note = chemically synthesized
  source 1..20: mol_type = other DNA
cctacttcttagatgatctt

SEQ ID NO: 15111 - DNA, 20 bp, synthetic construct
  misc_feature 1..20: note = chemically synthesized
  source 1..20: mol_type = other DNA
cttcttagatgatcttgagc

SEQ ID NO: 15112 - DNA, 20 bp, synthetic construct
  misc_feature 1..20: note = chemically synthesized
  source 1..20: mol_type = other DNA
gcaagttgcttaacttcttg

SEQ ID NO: 15113 - DNA, 20 bp, synthetic construct
  misc_feature 1..20: note = chemically synthesized
  source 1..20: mol_type = other DNA
ttcttgaagtctctgaaata

SEQ ID NO: 15114 - DNA, 20 bp, synthetic construct
  misc_feature 1..20: note = chemically synthesized
  source 1..20: mol_type = other DNA
tcttgaagtctctgaaatat

SEQ ID NO: 15115 - DNA, 20 bp, synthetic construct
  misc_feature 1..20: note = chemically synthesized
  source 1..20: mol_type = other DNA
tataggatgataatatgtat

SEQ ID NO: 15116 - DNA, 20 bp, synthetic construct
  misc_feature 1..20: note = chemically synthesized
  source 1..20: mol_type = other DNA
tgataatatgtattagctaa

SEQ ID NO: 15117 - DNA, 20 bp, synthetic construct
  misc_feature 1..20: note = chemically synthesized
  source 1..20: mol_type = other DNA
gtattagctaatagaattat

SEQ ID NO: 15118 - DNA, 20 bp, synthetic construct
  misc_feature 1..20: note = chemically synthesized
  source 1..20: mol_type = other DNA
tattagctaatagaattatg

SEQ ID NO: 15119 - DNA, 20 bp, synthetic construct
  misc_feature 1..20: note = chemically synthesized
  source 1..20: mol_type = other DNA
gctaatagaattatgaggat

SEQ ID NO: 15120 - DNA, 20 bp, synthetic construct
  misc_feature 1..20: note = chemically synthesized
  source 1..20: mol_type = other DNA
tagaattatgaggatgagat

SEQ ID NO: 15121 - DNA, 20 bp, synthetic construct
  misc_feature 1..20: note = chemically synthesized
  source 1..20: mol_type = other DNA
tgagattagtttattgtgta

SEQ ID NO: 15122 - DNA, 20 bp, synthetic construct
  misc_feature 1..20: note = chemically synthesized
  source 1..20: mol_type = other DNA
tagtttattgtgtaaagaac

SEQ ID NO: 15123 - DNA, 20 bp, synthetic construct
  misc_feature 1..20: note = chemically synthesized
  source 1..20: mol_type = other DNA
agtttattgtgtaaagaact

SEQ ID NO: 15124 - DNA, 20 bp, synthetic construct
  misc_feature 1..20: note = chemically synthesized
  source 1..20: mol_type = other DNA
gtttattgtgtaaagaacta

SEQ ID NO: 15125 - DNA, 20 bp, synthetic construct
  misc_feature 1..20: note = chemically synthesized
  source 1..20: mol_type = other DNA
tgtgtaaagaactagggaca

SEQ ID NO: 15126 - DNA, 20 bp, synthetic construct
  misc_feature 1..20: note = chemically synthesized
  source 1..20: mol_type = other DNA
ctagggacacagtatatatt

SEQ ID NO: 15127 - DNA, 20 bp, synthetic construct
  misc_feature 1..20: note = chemically synthesized
  source 1..20: mol_type = other DNA
ggacacagtatatattcagt

SEQ ID NO: 15128 - DNA, 20 bp, synthetic construct
  misc_feature 1..20: note = chemically synthesized
  source 1..20: mol_type = other DNA
tcagtaagtgttttctgtta

SEQ ID NO: 15129 - DNA, 20 bp, synthetic construct
  misc_feature 1..20: note = chemically synthesized
  source 1..20: mol_type = other DNA
atatatacatgcaactatta

SEQ ID NO: 15130 - DNA, 20 bp, synthetic construct
  misc_feature 1..20: note = chemically synthesized
  source 1..20: mol_type = other DNA
tacagttgcatgctacctta

SEQ ID NO: 15131 - DNA, 20 bp, synthetic construct
  misc_feature 1..20: note = chemically synthesized
  source 1..20: mol_type = other DNA
atgctaccttaaagaataat

SEQ ID NO: 15132 - DNA, 20 bp, synthetic construct
  misc_feature 1..20: note = chemically synthesized
  source 1..20: mol_type = other DNA
gctaccttaaagaataattg

SEQ ID NO: 15133 - DNA, 20 bp, synthetic construct
  misc_feature 1..20: note = chemically synthesized
  source 1..20: mol_type = other DNA
ctaccttaaagaataattgg

SEQ ID NO: 15134 - DNA, 20 bp, synthetic construct
  misc_feature 1..20: note = chemically synthesized
  source 1..20: mol_type = other DNA
ttaaagaataattggaggta

SEQ ID NO: 15135 - DNA, 20 bp, synthetic construct
  misc_feature 1..20: note = chemically synthesized
  source 1..20: mol_type = other DNA
taattggaggtacagttatt

SEQ ID NO: 15136 - DNA, 20 bp, synthetic construct
  misc_feature 1..20: note = chemically synthesized
  source 1..20: mol_type = other DNA
attggaggtacagttattcg

SEQ ID NO: 15137 - DNA, 20 bp, synthetic construct
  misc_feature 1..20: note = chemically synthesized
  source 1..20: mol_type = other DNA
ttggaggtacagttattcgg

SEQ ID NO: 15138 - DNA, 20 bp, synthetic construct
  misc_feature 1..20: note = chemically synthesized
  source 1..20: mol_type = other DNA
tatttcttgactgttaatgt

SEQ ID NO: 15139 - DNA, 20 bp, synthetic construct
  misc_feature 1..20: note = chemically synthesized
  source 1..20: mol_type = other DNA
ttcttgactgttaatgttgg

SEQ ID NO: 15140 - DNA, 20 bp, synthetic construct
  misc_feature 1..20: note = chemically synthesized
  source 1..20: mol_type = other DNA
ttgactgttaatgttggcag

SEQ ID NO: 15141 - DNA, 20 bp, synthetic construct
  misc_feature 1..20: note = chemically synthesized
  source 1..20: mol_type = other DNA
gttaatgttggcagcagatt

SEQ ID NO: 15142 - DNA, 20 bp, synthetic construct
  misc_feature 1..20: note = chemically synthesized
  source 1..20: mol_type = other DNA
gcttattttacaacactatt

SEQ ID NO: 15143 - DNA, 20 bp, synthetic construct
  misc_feature 1..20: note = chemically synthesized
  source 1..20: mol_type = other DNA
gacctctcacaataattccc

SEQ ID NO: 15144 - DNA, 20 bp, synthetic construct
  misc_feature 1..20: note = chemically synthesized
  source 1..20: mol_type = other DNA
acctctcacaataattccct

SEQ ID NO: 15145 - DNA, 20 bp, synthetic construct
  misc_feature 1..20: note = chemically synthesized
  source 1..20: mol_type = other DNA
ctctcacaataattccctag

SEQ ID NO: 15146 - DNA, 20 bp, synthetic construct
  misc_feature 1..20: note = chemically synthesized
  source 1..20: mol_type = other DNA
ataattccctaggagatatt

SEQ ID NO: 15147 - DNA, 20 bp, synthetic construct
  misc_feature 1..20: note = chemically synthesized
  source 1..20: mol_type = other DNA
ctaggagatatttagacaac

SEQ ID NO: 15148 - DNA, 20 bp, synthetic construct
  misc_feature 1..20: note = chemically synthesized
  source 1..20: mol_type = other DNA
tttgctctctgttcctgtga

SEQ ID NO: 15149 - DNA, 20 bp, synthetic construct
  misc_feature 1..20: note = chemically synthesized
  source 1..20: mol_type = other DNA
tgtgaaagtacccttctact

SEQ ID NO: 15150 - DNA, 20 bp, synthetic construct
  misc_feature 1..20: note = chemically synthesized
  source 1..20: mol_type = other DNA
ctacttagcctacttttgac

SEQ ID NO: 15151 - DNA, 20 bp, synthetic construct
  misc_feature 1..20: note = chemically synthesized
  source 1..20: mol_type = other DNA
ttgaccagtgtgcatgtcac

SEQ ID NO: 15152 - DNA, 20 bp, synthetic construct
  misc_feature 1..20: note = chemically synthesized
  source 1..20: mol_type = other DNA
tgaccagtgtgcatgtcact

SEQ ID NO: 15153 - DNA, 20 bp, synthetic construct
  misc_feature 1..20: note = chemically synthesized
  source 1..20: mol_type = other DNA
tgcatgtcactgggcaatac

SEQ ID NO: 15154 - DNA, 20 bp, synthetic construct
  misc_feature 1..20: note = chemically synthesized
  source 1..20: mol_type = other DNA
ctgggcaatacaagacctct

SEQ ID NO: 15155 - DNA, 20 bp, synthetic construct
  misc_feature 1..20: note = chemically synthesized
  source 1..20: mol_type = other DNA
aatacaagacctctgagctt

SEQ ID NO: 15156 - DNA, 20 bp, synthetic construct
  misc_feature 1..20: note = chemically synthesized
  source 1..20: mol_type = other DNA
aagacctctgagctttggct

SEQ ID NO: 15157 - DNA, 20 bp, synthetic construct
  misc_feature 1..20: note = chemically synthesized
  source 1..20: mol_type = other DNA
acctctgagctttggcttag

SEQ ID NO: 15158 - DNA, 20 bp, synthetic construct
  misc_feature 1..20: note = chemically synthesized
  source 1..20: mol_type = other DNA
cctctgagctttggcttaga

SEQ ID NO: 15159 - DNA, 20 bp, synthetic construct
  misc_feature 1..20: note = chemically synthesized
  source 1..20: mol_type = other DNA
cttagaaggaaatacaataa

SEQ ID NO: 15160 - DNA, 20 bp, synthetic construct
  misc_feature 1..20: note = chemically synthesized
  source 1..20: mol_type = other DNA
tacaataatggctaattttt

SEQ ID NO: 15161 - DNA, 20 bp, synthetic construct
  misc_feature 1..20: note = chemically synthesized
  source 1..20: mol_type = other DNA
ataatggctaatttttgaga

SEQ ID NO: 15162 - DNA, 20 bp, synthetic construct
  misc_feature 1..20: note = chemically synthesized
  source 1..20: mol_type = other DNA
aatggctaatttttgagaaa

SEQ ID NO: 15163 - DNA, 20 bp, synthetic construct
  misc_feature 1..20: note = chemically synthesized
  source 1..20: mol_type = other DNA
atggctaatttttgagaaag

SEQ ID NO: 15164 - DNA, 20 bp, synthetic construct
  misc_feature 1..20: note = chemically synthesized
  source 1..20: mol_type = other DNA
tttttgagaaagaggaactc

SEQ ID NO: 15165 - DNA, 20 bp, synthetic construct
  misc_feature 1..20: note = chemically synthesized
  source 1..20: mol_type = other DNA
aaagaggaactctagcccat

SEQ ID NO: 15166 - DNA, 20 bp, synthetic construct
  misc_feature 1..20: note = chemically synthesized
  source 1..20: mol_type = other DNA
aagaggaactctagcccatc

SEQ ID NO: 15167 - DNA, 20 bp, synthetic construct
  misc_feature 1..20: note = chemically synthesized
  source 1..20: mol_type = other DNA
agaggaactctagcccatca

SEQ ID NO: 15168 - DNA, 20 bp, synthetic construct
  misc_feature 1..20: note = chemically synthesized
  source 1..20: mol_type = other DNA
ggaactctagcccatcaggg

SEQ ID NO: 15169 - DNA, 20 bp, synthetic construct
  misc_feature 1..20: note = chemically synthesized
  source 1..20: mol_type = other DNA
ctagcccatcagggaagaca

SEQ ID NO: 15170 - DNA, 20 bp, synthetic construct
  misc_feature 1..20: note = chemically synthesized
  source 1..20: mol_type = other DNA
tagcccatcagggaagacat

SEQ ID NO: 15171 - DNA, 20 bp, synthetic construct
  misc_feature 1..20: note = chemically synthesized
  source 1..20: mol_type = other DNA
agcccatcagggaagacata

SEQ ID NO: 15172 - DNA, 20 bp, synthetic construct
  misc_feature 1..20: note = chemically synthesized
  source 1..20: mol_type = other DNA
cccatcagggaagacatagg

SEQ ID NO: 15173 - DNA, 20 bp, synthetic construct
  misc_feature 1..20: note = chemically synthesized
  source 1..20: mol_type = other DNA
ggaagacatagggagttctg

SEQ ID NO: 15174 - DNA, 20 bp, synthetic construct
  misc_feature 1..20: note = chemically synthesized
  source 1..20: mol_type = other DNA
gaagacatagggagttctgt

SEQ ID NO: 15175 - DNA, 20 bp, synthetic construct
  misc_feature 1..20: note = chemically synthesized
  source 1..20: mol_type = other DNA
atagggagttctgtaggaat

SEQ ID NO: 15176 - DNA, 20 bp, synthetic construct
  misc_feature 1..20: note = chemically synthesized
  source 1..20: mol_type = other DNA
gagttcttccattcttttta

SEQ ID NO: 15177 - DNA, 20 bp, synthetic construct
  misc_feature 1..20: note = chemically synthesized
  source 1..20: mol_type = other DNA
cttccattctttttacagat

SEQ ID NO: 15178 - DNA, 20 bp, synthetic construct
  misc_feature 1..20: note = chemically synthesized
  source 1..20: mol_type = other DNA
cattctttttacagatgaga

SEQ ID NO: 15179 - DNA, 20 bp, synthetic construct
  misc_feature 1..20: note = chemically synthesized
  source 1..20: mol_type = other DNA
cagatgagaaagacaatgtg

SEQ ID NO: 15180 - DNA, 20 bp, synthetic construct
  misc_feature 1..20: note = chemically synthesized
  source 1..20: mol_type = other DNA
tgaagccccaaatgatttta

SEQ ID NO: 15181 - DNA, 20 bp, synthetic construct
  misc_feature 1..20: note = chemically synthesized
  source 1..20: mol_type = other DNA
agccccaaatgattttaaag

SEQ ID NO: 15182 - DNA, 20 bp, synthetic construct
  misc_feature 1..20: note = chemically synthesized
  source 1..20: mol_type = other DNA
ccaaatgattttaaagtagt

SEQ ID NO: 15183 - DNA, 20 bp, synthetic construct
  misc_feature 1..20: note = chemically synthesized
  source 1..20: mol_type = other DNA
attttaaagtagttagcata

SEQ ID NO: 15184 - DNA, 20 bp, synthetic construct
  misc_feature 1..20: note = chemically synthesized
  source 1..20: mol_type = other DNA
tttaaagtagttagcatatg

SEQ ID NO: 15185 - DNA, 20 bp, synthetic construct
  misc_feature 1..20: note = chemically synthesized
  source 1..20: mol_type = other DNA
gtagttagcatatggagaaa

SEQ ID NO: 15186 - DNA, 20 bp, synthetic construct
  misc_feature 1..20: note = chemically synthesized
  source 1..20: mol_type = other DNA
tatggagaaatggcttgcat

SEQ ID NO: 15187 - DNA, 20 bp, synthetic construct
  misc_feature 1..20: note = chemically synthesized
  source 1..20: mol_type = other DNA
tggcttgcattggtaaaatt

SEQ ID NO: 15188 - DNA, 20 bp, synthetic construct
  misc_feature 1..20: note = chemically synthesized
  source 1..20: mol_type = other DNA
ggcttgcattggtaaaattt

SEQ ID NO: 15189 - DNA, 20 bp, synthetic construct
  misc_feature 1..20: note = chemically synthesized
  source 1..20: mol_type = other DNA
gcttgcattggtaaaatttg

SEQ ID NO: 15190 - DNA, 20 bp, synthetic construct
  misc_feature 1..20: note = chemically synthesized
  source 1..20: mol_type = other DNA
atttggggaaactttgttgt

SEQ ID NO: 15191 - DNA, 20 bp, synthetic construct
  misc_feature 1..20: note = chemically synthesized
  source 1..20: mol_type = other DNA
ggaaactttgttgtcagacc

SEQ ID NO: 15192 - DNA, 20 bp, synthetic construct
  misc_feature 1..20: note = chemically synthesized
  source 1..20: mol_type = other DNA
ctttgttgtcagacccggca

SEQ ID NO: 15193 - DNA, 20 bp, synthetic construct
  misc_feature 1..20: note = chemically synthesized
  source 1..20: mol_type = other DNA
tttgttgtcagacccggcaa

SEQ ID NO: 15194 - DNA, 20 bp, synthetic construct
  misc_feature 1..20: note = chemically synthesized
  source 1..20: mol_type = other DNA
ttgttgtcagacccggcaaa

SEQ ID NO: 15195 - DNA, 20 bp, synthetic construct
  misc_feature 1..20: note = chemically synthesized
  source 1..20: mol_type = other DNA
gttgtcagacccggcaaagg

SEQ ID NO: 15196 - DNA, 20 bp, synthetic construct
  misc_feature 1..20: note = chemically synthesized
  source 1..20: mol_type = other DNA
agacccggcaaagggagatg

SEQ ID NO: 15197 - DNA, 20 bp, synthetic construct
  misc_feature 1..20: note = chemically synthesized
  source 1..20: mol_type = other DNA
acccggcaaagggagatgca

SEQ ID NO: 15198 - DNA, 20 bp, synthetic construct
  misc_feature 1..20: note = chemically synthesized
  source 1..20: mol_type = other DNA
agggagatgcagagaatctg

SEQ ID NO: 15199 - DNA, 20 bp, synthetic construct
  misc_feature 1..20: note = chemically synthesized
  source 1..20: mol_type = other DNA
catttcttgtgtacctatca

SEQ ID NO: 15200 - DNA, 20 bp, synthetic construct
  misc_feature 1..20: note = chemically synthesized
  source 1..20: mol_type = other DNA
gtgtacctatcacagcacca

SEQ ID NO: 15201 - DNA, 20 bp, synthetic construct
  misc_feature 1..20: note = chemically synthesized
  source 1..20: mol_type = other DNA
cagcaccacagcactattcc

SEQ ID NO: 15202 - DNA, 20 bp, synthetic construct
  misc_feature 1..20: note = chemically synthesized
  source 1..20: mol_type = other DNA
ccacagcactattcctagca

SEQ ID NO: 15203 - DNA, 20 bp, synthetic construct
  misc_feature 1..20: note = chemically synthesized
  source 1..20: mol_type = other DNA
gcactattcctagcatagtt

SEQ ID NO: 15204 - DNA, 20 bp, synthetic construct
  misc_feature 1..20: note = chemically synthesized
  source 1..20: mol_type = other DNA
cactattcctagcatagttt

SEQ ID NO: 15205 - DNA, 20 bp, synthetic construct
  misc_feature 1..20: note = chemically synthesized
  source 1..20: mol_type = other DNA
actattcctagcatagttta

SEQ ID NO: 15206 - DNA, 20 bp, synthetic construct
  misc_feature 1..20: note = chemically synthesized
  source 1..20: mol_type = other DNA
ctagcatagtttagggccct

SEQ ID NO: 15207 - DNA, 20 bp, synthetic construct
  misc_feature 1..20: note = chemically synthesized
  source 1..20: mol_type = other DNA
gggccctcagttcttgacgc

SEQ ID NO: 15208 - DNA, 20 bp, synthetic construct
  misc_feature 1..20: note = chemically synthesized
  source 1..20: mol_type = other DNA
cctcagttcttgacgctagt

SEQ ID NO: 15209 - DNA, 20 bp, synthetic construct
  misc_feature 1..20: note = chemically synthesized
  source 1..20: mol_type = other DNA
aatttcacacaaacttaaac

SEQ ID NO: 15210 - DNA, 20 bp, synthetic construct
  misc_feature 1..20: note = chemically synthesized
  source 1..20: mol_type = other DNA
acaaacatatgtatgtttct

SEQ ID NO: 15211 - DNA, 20 bp, synthetic construct
  misc_feature 1..20: note = chemically synthesized
  source 1..20: mol_type = other DNA
caaacatatgtatgtttctg

SEQ ID NO: 15212 - DNA, 20 bp, synthetic construct
  misc_feature 1..20: note = chemically synthesized
  source 1..20: mol_type = other DNA
atgtatgtttctgaggcact

SEQ ID NO: 15213 - DNA, 20 bp, synthetic construct
  misc_feature 1..20: note = chemically synthesized
  source 1..20: mol_type = other DNA
tgtatgtttctgaggcactg

SEQ ID NO: 15214 - DNA, 20 bp, synthetic construct
  misc_feature 1..20: note = chemically synthesized
  source 1..20: mol_type = other DNA
ctgaggcactgaggtcactg

SEQ ID NO: 15215 - DNA, 20 bp, synthetic construct
  misc_feature 1..20: note = chemically synthesized
  source 1..20: mol_type = other DNA
tgaggcactgaggtcactgc

SEQ ID NO: 15216 - DNA, 20 bp, synthetic construct
  misc_feature 1..20: note = chemically synthesized
  source 1..20: mol_type = other DNA
actgaggtcactgcaggatg

SEQ ID NO: 15217 - DNA, 20 bp, synthetic construct
  misc_feature 1..20: note = chemically synthesized
  source 1..20: mol_type = other DNA
aggtcactgcaggatgaaga

SEQ ID NO: 15218 - DNA, 20 bp, synthetic construct
  misc_feature 1..20: note = chemically synthesized
  source 1..20: mol_type = other DNA
gtcactgcaggatgaagacg

SEQ ID NO: 15219 - DNA, 20 bp, synthetic construct
  misc_feature 1..20: note = chemically synthesized
  source 1..20: mol_type = other DNA
caggatgaagacggagccaa

SEQ ID NO: 15220 - DNA, 20 bp, synthetic construct
  misc_feature 1..20: note = chemically synthesized
  source 1..20: mol_type = other DNA
aggatgaagacggagccaat

SEQ ID NO: 15221 - DNA, 20 bp, synthetic construct
  misc_feature 1..20: note = chemically synthesized
  source 1..20: mol_type = other DNA
tgaagacggagccaatgggt

SEQ ID NO: 15222 - DNA, 20 bp, synthetic construct
  misc_feature 1..20: note = chemically synthesized
  source 1..20: mol_type = other DNA
acggagccaatgggttagac

SEQ ID NO: 15223 - DNA, 20 bp, synthetic construct
  misc_feature 1..20: note = chemically synthesized
  source 1..20: mol_type = other DNA
gagccaatgggttagaccag

SEQ ID NO: 15224 - DNA, 20 bp, synthetic construct
  misc_feature 1..20: note = chemically synthesized
  source 1..20: mol_type = other DNA
gccaatgggttagaccagaa

SEQ ID NO: 15225 - DNA, 20 bp, synthetic construct
  misc_feature 1..20: note = chemically synthesized
  source 1..20: mol_type = other DNA
ataaacactccctttaacca

SEQ ID NO: 15226 - DNA, 20 bp, synthetic construct
  misc_feature 1..20: note = chemically synthesized
  source 1..20: mol_type = other DNA
actccctttaaccaaagttg

SEQ ID NO: 15227 - DNA, 20 bp, synthetic construct
  misc_feature 1..20: note = chemically synthesized
  source 1..20: mol_type = other DNA
accaaagttgcagcttgacc

SEQ ID NO: 15228 - DNA, 20 bp, synthetic construct
  misc_feature 1..20: note = chemically synthesized
  source 1..20: mol_type = other DNA
ccaaagttgcagcttgacca

SEQ ID NO: 15229 - DNA, 20 bp, synthetic construct
  misc_feature 1..20: note = chemically synthesized
  source 1..20: mol_type = other DNA
caaagttgcagcttgaccaa

SEQ ID NO: 15230 - DNA, 20 bp, synthetic construct
  misc_feature 1..20: note = chemically synthesized
  source 1..20: mol_type = other DNA
aaagttgcagcttgaccaag

SEQ ID NO: 15231 - DNA, 20 bp, synthetic construct
  misc_feature 1..20: note = chemically synthesized
  source 1..20: mol_type = other DNA
gcagcttgaccaaggggtca

SEQ ID NO: 15232 - DNA, 20 bp, synthetic construct
  misc_feature 1..20: note = chemically synthesized
  source 1..20: mol_type = other DNA
cagcttgaccaaggggtcaa

SEQ ID NO: 15233 - DNA, 20 bp, synthetic construct
  misc_feature 1..20: note = chemically synthesized
  source 1..20: mol_type = other DNA
agcttgaccaaggggtcaaa

SEQ ID NO: 15234 - DNA, 20 bp, synthetic construct
  misc_feature 1..20: note = chemically synthesized
  source 1..20: mol_type = other DNA
caaggggtcaaagggtaatt

SEQ ID NO: 15235 - DNA, 20 bp, synthetic construct
  misc_feature 1..20: note = chemically synthesized
  source 1..20: mol_type = other DNA
aaggggtcaaagggtaattt

SEQ ID NO: 15236 - DNA, 20 bp, synthetic construct
  misc_feature 1..20: note = chemically synthesized
  source 1..20: mol_type = other DNA
gggtcaaagggtaatttggg

SEQ ID NO: 15237 - DNA, 20 bp, synthetic construct
  misc_feature 1..20: note = chemically synthesized
  source 1..20: mol_type = other DNA
ggtcaaagggtaatttgggc

SEQ ID NO: 15238 - DNA, 20 bp, synthetic construct
  misc_feature 1..20: note = chemically synthesized
  source 1..20: mol_type = other DNA
aagggtaatttgggcaggca

SEQ ID NO: 15239 - DNA, 20 bp, synthetic construct
  misc_feature 1..20: note = chemically synthesized
  source 1..20: mol_type = other DNA
agggtaatttgggcaggcat

SEQ ID NO: 15240 - DNA, 20 bp, synthetic construct
  misc_feature 1..20: note = chemically synthesized
  source 1..20: mol_type = other DNA
tttgggcaggcatgggcctt

SEQ ID NO: 15241 - DNA, 20 bp, synthetic construct
  misc_feature 1..20: note = chemically synthesized
  source 1..20: mol_type = other DNA
catgggccttcagttttctc

SEQ ID NO: 15242 - DNA, 20 bp, synthetic construct
  misc_feature 1..20: note = chemically synthesized
  source 1..20: mol_type = other DNA
tatgacaatctctgtaaccc

SEQ ID NO: 15243 - DNA, 20 bp, synthetic construct
  misc_feature 1..20: note = chemically synthesized
  source 1..20: mol_type = other DNA
tgacaatctctgtaacccaa

SEQ ID NO: 15244 - DNA, 20 bp, synthetic construct
  misc_feature 1..20: note = chemically synthesized
  source 1..20: mol_type = other DNA
gagaaaatctctttattctg

SEQ ID NO: 15245 - DNA, 20 bp, synthetic construct
  misc_feature 1..20: note = chemically synthesized
  source 1..20: mol_type = other DNA
ttctccctcaaactttcctg

SEQ ID NO: 15246 - DNA, 20 bp, synthetic construct
  misc_feature 1..20: note = chemically synthesized
  source 1..20: mol_type = other DNA
ttcctgaagaaatgcaatta

SEQ ID NO: 15247 - DNA, 20 bp, synthetic construct
  misc_feature 1..20: note = chemically synthesized
  source 1..20: mol_type = other DNA
gaagaaatgcaattatggtt

SEQ ID NO: 15248 - DNA, 20 bp, synthetic construct
  misc_feature 1..20: note = chemically synthesized
  source 1..20: mol_type = other DNA
aagaaatgcaattatggttg

SEQ ID NO: 15249 - DNA, 20 bp, synthetic construct
  misc_feature 1..20: note = chemically synthesized
  source 1..20: mol_type = other DNA
aaatgcaattatggttgagg

SEQ ID NO: 15250 - DNA, 20 bp, synthetic construct
  misc_feature 1..20: note = chemically synthesized
  source 1..20: mol_type = other DNA
caattatggttgaggaagta

SEQ ID NO: 15251 - DNA, 20 bp, synthetic construct
  misc_feature 1..20: note = chemically synthesized
  source 1..20: mol_type = other DNA
ggaagtatggtctgcaactg

SEQ ID NO: 15252 - DNA, 20 bp, synthetic construct
  misc_feature 1..20: note = chemically synthesized
  source 1..20: mol_type = other DNA
tatggtctgcaactgtggct

SEQ ID NO: 15253 - DNA, 20 bp, synthetic construct
  misc_feature 1..20: note = chemically synthesized
  source 1..20: mol_type = other DNA
gaccacaacttccaatcgac

SEQ ID NO: 15254 - DNA, 20 bp, synthetic construct
  misc_feature 1..20: note = chemically synthesized
  source 1..20: mol_type = other DNA
cacaacttccaatcgacaag

SEQ ID NO: 15255 - DNA, 20 bp, synthetic construct
  misc_feature 1..20: note = chemically synthesized
  source 1..20: mol_type = other DNA
ttccaatcgacaagaagtaa

SEQ ID NO: 15256 - DNA, 20 bp, synthetic construct
  misc_feature 1..20: note = chemically synthesized
  source 1..20: mol_type = other DNA
aatcgacaagaagtaaaagt

SEQ ID NO: 15257 - DNA, 20 bp, synthetic construct
  misc_feature 1..20: note = chemically synthesized
  source 1..20: mol_type = other DNA
cgacaagaagtaaaagtaag

SEQ ID NO: 15258 - DNA, 20 bp, synthetic construct
  misc_feature 1..20: note = chemically synthesized
  source 1..20: mol_type = other DNA
aagaagtaaaagtaagaagc

SEQ ID NO: 15259 - DNA, 20 bp, synthetic construct
  misc_feature 1..20: note = chemically synthesized
  source 1..20: mol_type = other DNA
agaagtaaaagtaagaagca

SEQ ID NO: 15260 - DNA, 20 bp, synthetic construct
  misc_feature 1..20: note = chemically synthesized
  source 1..20: mol_type = other DNA
gaagtaaaagtaagaagcaa

SEQ ID NO: 15261 - DNA, 20 bp, synthetic construct
  misc_feature 1..20: note = chemically synthesized
  source 1..20: mol_type = other DNA
aaagtaagaagcaagggcca

SEQ ID NO: 15262 - DNA, 20 bp, synthetic construct
  misc_feature 1..20: note = chemically synthesized
  source 1..20: mol_type = other DNA
aagtaagaagcaagggccac

SEQ ID NO: 15263 - DNA, 20 bp, synthetic construct
  misc_feature 1..20: note = chemically synthesized
  source 1..20: mol_type = other DNA
agtaagaagcaagggccaca

SEQ ID NO: 15264 - DNA, 20 bp, synthetic construct
  misc_feature 1..20: note = chemically synthesized
  source 1..20: mol_type = other DNA
aagaagcaagggccacaggg

SEQ ID NO: 15265 - DNA, 20 bp, synthetic construct
  misc_feature 1..20: note = chemically synthesized
  source 1..20: mol_type = other DNA
agaagcaagggccacagggc

SEQ ID NO: 15266 - DNA, 20 bp, synthetic construct
  misc_feature 1..20: note = chemically synthesized
  source 1..20: mol_type = other DNA
ttctcgcatccacaatatct

SEQ ID NO: 15267 - DNA, 20 bp, synthetic construct
  misc_feature 1..20: note = chemically synthesized
  source 1..20: mol_type = other DNA
tctgagtttgtgttttgctg

SEQ ID NO: 15268 - DNA, 20 bp, synthetic construct
  misc_feature 1..20: note = chemically synthesized
  source 1..20: mol_type = other DNA
tgtggaaaaaacactgtctt

SEQ ID NO: 15269 - DNA, 20 bp, synthetic construct
  misc_feature 1..20: note = chemically synthesized
  source 1..20: mol_type = other DNA
tggaaaaaacactgtcttca

SEQ ID NO: 15270 - DNA, 20 bp, synthetic construct
  misc_feature 1..20: note = chemically synthesized
  source 1..20: mol_type = other DNA
ggaaaaaacactgtcttcag

SEQ ID NO: 15271 - DNA, 20 bp, synthetic construct
  misc_feature 1..20: note = chemically synthesized
  source 1..20: mol_type = other DNA
aaaaacactgtcttcagagg

SEQ ID NO: 15272 - DNA, 20 bp, synthetic construct
  misc_feature 1..20: note = chemically synthesized
  source 1..20: mol_type = other DNA
aacactgtcttcagaggtag

SEQ ID NO: 15273 - DNA, 20 bp, synthetic construct
  misc_feature 1..20: note = chemically synthesized
  source 1..20: mol_type = other DNA
gtcttcagaggtagcagaac

SEQ ID NO: 15274 - DNA, 20 bp, synthetic construct
  misc_feature 1..20: note = chemically synthesized
  source 1..20: mol_type = other DNA
tcttcagaggtagcagaact

SEQ ID NO: 15275 - DNA, 20 bp, synthetic construct
  misc_feature 1..20: note = chemically synthesized
  source 1..20: mol_type = other DNA
gcagaactgggtctacatcc

SEQ ID NO: 15276 - DNA, 20 bp, synthetic construct
  misc_feature 1..20: note = chemically synthesized
  source 1..20: mol_type = other DNA
tacatcctagccttactact

SEQ ID NO: 15277 - DNA, 20 bp, synthetic construct
  misc_feature 1..20: note = chemically synthesized
  source 1..20: mol_type = other DNA
atcctagccttactacttgg

SEQ ID NO: 15278 - DNA, 20 bp, synthetic construct
  misc_feature 1..20: note = chemically synthesized
  source 1..20: mol_type = other DNA
ttactacttggtggttctgt

SEQ ID NO: 15279 - DNA, 20 bp, synthetic construct
  misc_feature 1..20: note = chemically synthesized
  source 1..20: mol_type = other DNA
acttggtggttctgtaagct

SEQ ID NO: 15280 - DNA, 20 bp, synthetic construct
  misc_feature 1..20: note = chemically synthesized
  source 1..20: mol_type = other DNA
atttcatgtctttgattttc

SEQ ID NO: 15281 - DNA, 20 bp, synthetic construct
  misc_feature 1..20: note = chemically synthesized
  source 1..20: mol_type = other DNA
gtctttgattttcgagtccc

SEQ ID NO: 15282 - DNA, 20 bp, synthetic construct
  misc_feature 1..20: note = chemically synthesized
  source 1..20: mol_type = other DNA
ttttcgagtccccagttaat

SEQ ID NO: 15283 - DNA, 20 bp, synthetic construct
  misc_feature 1..20: note = chemically synthesized
  source 1..20: mol_type = other DNA
ttcgagtccccagttaataa

SEQ ID NO: 15284 - DNA, 20 bp, synthetic construct
  misc_feature 1..20: note = chemically synthesized
  source 1..20: mol_type = other DNA
taataagagctcatgtaatg

SEQ ID NO: 15285 - DNA, 20 bp, synthetic construct
  misc_feature 1..20: note = chemically synthesized
  source 1..20: mol_type = other DNA
aagagctcatgtaatgtaga

SEQ ID NO: 15286 - DNA, 20 bp, synthetic construct
  misc_feature 1..20: note = chemically synthesized
  source 1..20: mol_type = other DNA
agctcatgtaatgtagacag

SEQ ID NO: 15287 - DNA, 20 bp, synthetic construct
  misc_feature 1..20: note = chemically synthesized
  source 1..20: mol_type = other DNA
gctcatgtaatgtagacagt

SEQ ID NO: 15288 - DNA, 20 bp, synthetic construct
  misc_feature 1..20: note = chemically synthesized
  source 1..20: mol_type = other DNA
tcatgtaatgtagacagtag

SEQ ID NO: 15289 - DNA, 20 bp, synthetic construct
  misc_feature 1..20: note = chemically synthesized
  source 1..20: mol_type = other DNA
atgtaatgtagacagtagga

SEQ ID NO: 15290 - DNA, 20 bp, synthetic construct
  misc_feature 1..20: note = chemically synthesized
  source 1..20: mol_type = other DNA
atgtagacagtaggagagct

SEQ ID NO: 15291 - DNA, 20 bp, synthetic construct
  misc_feature 1..20: note = chemically synthesized
  source 1..20: mol_type = other DNA
attactaattgtctacttat

SEQ ID NO: 15292 - DNA, 20 bp, synthetic construct
  misc_feature 1..20: note = chemically synthesized
  source 1..20: mol_type = other DNA
tattagcttgtgctttcaat

SEQ ID NO: 15293 - DNA, 20 bp, synthetic construct
  misc_feature 1..20: note = chemically synthesized
  source 1..20: mol_type = other DNA
aataagttgatctacactac

SEQ ID NO: 15294 - DNA, 20 bp, synthetic construct
  misc_feature 1..20: note = chemically synthesized
  source 1..20: mol_type = other DNA
gatctacactacaagtacat

SEQ ID NO: 15295 - DNA, 20 bp, synthetic construct
  misc_feature 1..20: note = chemically synthesized
  source 1..20: mol_type = other DNA
atctacactacaagtacatt

SEQ ID NO: 15296 - DNA, 20 bp, synthetic construct
  misc_feature 1..20: note = chemically synthesized
  source 1..20: mol_type = other DNA
tgggctcctcatcaataaat

SEQ ID NO: 15297 - DNA, 20 bp, synthetic construct
  misc_feature 1..20: note = chemically synthesized
  source 1..20: mol_type = other DNA
gggctcctcatcaataaatg

SEQ ID NO: 15298 - DNA, 20 bp, synthetic construct
  misc_feature 1..20: note = chemically synthesized
  source 1..20: mol_type = other DNA
tgaggtaataatctacttct

SEQ ID NO: 15299 - DNA, 20 bp, synthetic construct
  misc_feature 1..20: note = chemically synthesized
  source 1..20: mol_type = other DNA
aataatctacttctgagtat

SEQ ID NO: 15300 - DNA, 20 bp, synthetic construct
  misc_feature 1..20: note = chemically synthesized
  source 1..20: mol_type = other DNA
ctacttctgagtattggtgt

SEQ ID NO: 15301 - DNA, 20 bp, synthetic construct
  misc_feature 1..20: note = chemically synthesized
  source 1..20: mol_type = other DNA
gtattggtgtgagtaaaact

SEQ ID NO: 15302 - DNA, 20 bp, synthetic construct
  misc_feature 1..20: note = chemically synthesized
  source 1..20: mol_type = other DNA
aaacttcttttttttttttt

SEQ ID NO: 15303 - DNA, 20 bp, synthetic construct
  misc_feature 1..20: note = chemically synthesized
  source 1..20: mol_type = other DNA
ttctttttttttttttgaga

SEQ ID NO: 15304 - DNA, 20 bp, synthetic construct
  misc_feature 1..20: note = chemically synthesized
  source 1..20: mol_type = other DNA
ctttttttttttttgagatg

SEQ ID NO: 15305 - DNA, 20 bp, synthetic construct
  misc_feature 1..20: note = chemically synthesized
  source 1..20: mol_type = other DNA
tggagtctcactctgtcgcc

SEQ ID NO: 15306 - DNA, 20 bp, synthetic construct
  misc_feature 1..20: note = chemically synthesized
  source 1..20: mol_type = other DNA
ggagtctcactctgtcgcct

SEQ ID NO: 15307 - DNA, 20 bp, synthetic construct
  misc_feature 1..20: note = chemically synthesized
  source 1..20: mol_type = other DNA
tctcactctgtcgcctaggc

SEQ ID NO: 15308 - DNA, 20 bp, synthetic construct
  misc_feature 1..20: note = chemically synthesized
  source 1..20: mol_type = other DNA
tcactctgtcgcctaggctg

SEQ ID NO: 15309 - DNA, 20 bp, synthetic construct
  misc_feature 1..20: note = chemically synthesized
  source 1..20: mol_type = other DNA
ctgtcgcctaggctggagtg

SEQ ID NO: 15310 - DNA, 20 bp, synthetic construct
  misc_feature 1..20: note = chemically synthesized
  source 1..20: mol_type = other DNA
tcgcctaggctggagtgcag

SEQ ID NO: 15311 - DNA, 20 bp, synthetic construct
  misc_feature 1..20: note = chemically synthesized
  source 1..20: mol_type = other DNA
ggagtgcagtggtgcaatct

SEQ ID NO: 15312 - DNA, 20 bp, synthetic construct
  misc_feature 1..20: note = chemically synthesized
  source 1..20: mol_type = other DNA
tcactgcaacctccacctcc

SEQ ID NO: 15313 - DNA, 20 bp, synthetic construct
  misc_feature 1..20: note = chemically synthesized
  source 1..20: mol_type = other DNA
cactgcaacctccacctcct

SEQ ID NO: 15314 - DNA, 20 bp, synthetic construct
  misc_feature 1..20: note = chemically synthesized
  source 1..20: mol_type = other DNA
aacctccacctcctgggttc

SEQ ID NO: 15315 - DNA, 20 bp, synthetic construct
  misc_feature 1..20: note = chemically synthesized
  source 1..20: mol_type = other DNA
ttcaagtgattctcctgcct

SEQ ID NO: 15316 - DNA, 20 bp, synthetic construct
  misc_feature 1..20: note = chemically synthesized
  source 1..20: mol_type = other DNA
ttctcctgcctcagcctcct

SEQ ID NO: 15317 - DNA, 20 bp, synthetic construct
  misc_feature 1..20: note = chemically synthesized
  source 1..20: mol_type = other DNA
tcctgcctcagcctcctgag

SEQ ID NO: 15318 - DNA, 20 bp, synthetic construct
  misc_feature 1..20: note = chemically synthesized
  source 1..20: mol_type = other DNA
gcctcagcctcctgagtagc

SEQ ID NO: 15319 - DNA, 20 bp, synthetic construct
  misc_feature 1..20: note = chemically synthesized
  source 1..20: mol_type = other DNA
cctcagcctcctgagtagct

SEQ ID NO: 15320 - DNA, 20 bp, synthetic construct
  misc_feature 1..20: note = chemically synthesized
  source 1..20: mol_type = other DNA
ctcctgagtagctgggatta

SEQ ID NO: 15321 - DNA, 20 bp, synthetic construct
  misc_feature 1..20: note = chemically synthesized
  source 1..20: mol_type = other DNA
tagacgcgtgccaccacacc

SEQ ID NO: 15322 - DNA, 20 bp, synthetic construct
  misc_feature 1..20: note = chemically synthesized
  source 1..20: mol_type = other DNA
ggctgattttttgtattttt

SEQ ID NO: 15323 - DNA, 20 bp, synthetic construct
  misc_feature 1..20: note = chemically synthesized
  source 1..20: mol_type = other DNA
tgattttttgtattttttag

SEQ ID NO: 15324 - DNA, 20 bp, synthetic construct
  misc_feature 1..20: note = chemically synthesized
  source 1..20: mol_type = other DNA
attttttgtattttttagta

SEQ ID NO: 15325 - DNA, 20 bp, synthetic construct
  misc_feature 1..20: note = chemically synthesized
  source 1..20: mol_type = other DNA
ttttgtattttttagtagag

SEQ ID NO: 15326 - DNA, 20 bp, synthetic construct
  misc_feature 1..20: note = chemically synthesized
  source 1..20: mol_type = other DNA
tttgtattttttagtagaga

SEQ ID NO: 15327 - DNA, 20 bp, synthetic construct
  misc_feature 1..20: note = chemically synthesized
  source 1..20: mol_type = other DNA
ttgtattttttagtagagaa

SEQ ID NO: 15328 - DNA, 20 bp, synthetic construct
  misc_feature 1..20: note = chemically synthesized
  source 1..20: mol_type = other DNA
tgtattttttagtagagaag

SEQ ID NO: 15329 - DNA, 20 bp, synthetic construct
  misc_feature 1..20: note = chemically synthesized
  source 1..20: mol_type = other DNA
gagaaggggtttcaccatgt

SEQ ID NO: 15330 - DNA, 20 bp, synthetic construct
  misc_feature 1..20: note = chemically synthesized
  source 1..20: mol_type = other DNA
aggggtttcaccatgttggc

SEQ ID NO: 15331 - DNA, 20 bp, synthetic construct
  misc_feature 1..20: note = chemically synthesized
  source 1..20: mol_type = other DNA
ggggtttcaccatgttggcc

SEQ ID NO: 15332 - DNA, 20 bp, synthetic construct
  misc_feature 1..20: note = chemically synthesized
  source 1..20: mol_type = other DNA
tttcaccatgttggccaggc

SEQ ID NO: 15333 - DNA, 20 bp, synthetic construct
  misc_feature 1..20: note = chemically synthesized
  source 1..20: mol_type = other DNA
ccatgttggccaggctggtc

SEQ ID NO: 15334 - DNA, 20 bp, synthetic construct
  misc_feature 1..20: note = chemically synthesized
  source 1..20: mol_type = other DNA
tggtctggaactcctgacct

SEQ ID NO: 15335 - DNA, 20 bp, synthetic construct
  misc_feature 1..20: note = chemically synthesized
  source 1..20: mol_type = other DNA
ggtctggaactcctgacctc

SEQ ID NO: 15336 - DNA, 20 bp, synthetic construct
  misc_feature 1..20: note = chemically synthesized
  source 1..20: mol_type = other DNA
ctcaggtgatccaattgcct

SEQ ID NO: 15337 - DNA, 20 bp, synthetic construct
  misc_feature 1..20: note = chemically synthesized
  source 1..20: mol_type = other DNA
ccaattgccttggcctccca

SEQ ID NO: 15338 - DNA, 20 bp, synthetic construct
  misc_feature 1..20: note = chemically synthesized
  source 1..20: mol_type = other DNA
gccttggcctcccaaagtgc

SEQ ID NO: 15339 - DNA, 20 bp, synthetic construct
  misc_feature 1..20: note = chemically synthesized
  source 1..20: mol_type = other DNA
ccttggcctcccaaagtgct

SEQ ID NO: 15340 - DNA, 20 bp, synthetic construct
  misc_feature 1..20: note = chemically synthesized
  source 1..20: mol_type = other DNA
ctcccaaagtgctgggatta

SEQ ID NO: 15341 - DNA, 20 bp, synthetic construct
  misc_feature 1..20: note = chemically synthesized
  source 1..20: mol_type = other DNA
tcccaaagtgctgggattac

SEQ ID NO: 15342 - DNA, 20 bp, synthetic construct
  misc_feature 1..20: note = chemically synthesized
  source 1..20: mol_type = other DNA
aggcatgtaatcccatatat

SEQ ID NO: 15343 - DNA, 20 bp, synthetic construct
  misc_feature 1..20: note = chemically synthesized
  source 1..20: mol_type = other DNA
catatatgagccaccgtgcc

SEQ ID NO: 15344 - DNA, 20 bp, synthetic construct
  misc_feature 1..20: note = chemically synthesized
  source 1..20: mol_type = other DNA
gataaacttaaatttgattc

SEQ ID NO: 15345 - DNA, 20 bp, synthetic construct
  misc_feature 1..20: note = chemically synthesized
  source 1..20: mol_type = other DNA
atttgattctagcatatact

SEQ ID NO: 15346 - DNA, 20 bp, synthetic construct
  misc_feature 1..20: note = chemically synthesized
  source 1..20: mol_type = other DNA
ctagcatatactaagtactc

SEQ ID NO: 15347 - DNA, 20 bp, synthetic construct
  misc_feature 1..20: note = chemically synthesized
  source 1..20: mol_type = other DNA
agcatatactaagtactcaa

SEQ ID NO: 15348 - DNA, 20 bp, synthetic construct
  misc_feature 1..20: note = chemically synthesized
  source 1..20: mol_type = other DNA
gcatatactaagtactcaag

SEQ ID NO: 15349 - DNA, 20 bp, synthetic construct
  misc_feature 1..20: note = chemically synthesized
  source 1..20: mol_type = other DNA
caagaggtgttacttatcat

SEQ ID NO: 15350 - DNA, 20 bp, synthetic construct
  misc_feature 1..20: note = chemically synthesized
  source 1..20: mol_type = other DNA
cttatcattagtattaatta

SEQ ID NO: 15351 - DNA, 20 bp, synthetic construct
  misc_feature 1..20: note = chemically synthesized
  source 1..20: mol_type = other DNA
gttcaataatacatatctca

SEQ ID NO: 15352 - DNA, 20 bp, synthetic construct
  misc_feature 1..20: note = chemically synthesized
  source 1..20: mol_type = other DNA
acagaattaccatatgtaat

SEQ ID NO: 15353 - DNA, 20 bp, synthetic construct
  misc_feature 1..20: note = chemically synthesized
  source 1..20: mol_type = other DNA
gattattaaatatcataaaa

SEQ ID NO: 15354 - DNA, 20 bp, synthetic construct
  misc_feature 1..20: note = chemically synthesized
  source 1..20: mol_type = other DNA
ataaaatggcacctgacata

SEQ ID NO: 15355 - DNA, 20 bp, synthetic construct
  misc_feature 1..20: note = chemically synthesized
  source 1..20: mol_type = other DNA
aatggcacctgacatataga

SEQ ID NO: 15356 - DNA, 20 bp, synthetic construct
  misc_feature 1..20: note = chemically synthesized
  source 1..20: mol_type = other DNA
cctgacatatagaaagattt

SEQ ID NO: 15357 - DNA, 20 bp, synthetic construct
  misc_feature 1..20: note = chemically synthesized
  source 1..20: mol_type = other DNA
acatatagaaagatttcagt

SEQ ID NO: 15358 - DNA, 20 bp, synthetic construct
  misc_feature 1..20: note = chemically synthesized
  source 1..20: mol_type = other DNA
acttctctttcatttacctc

SEQ ID NO: 15359 - DNA, 20 bp, synthetic construct
  misc_feature 1..20: note = chemically synthesized
  source 1..20: mol_type = other DNA
atttcctcgtgtctctcatg

SEQ ID NO: 15360 - DNA, 20 bp, synthetic construct
  misc_feature 1..20: note = chemically synthesized
  source 1..20: mol_type = other DNA
cgtgtctctcatgtggtttc

SEQ ID NO: 15361 - DNA, 20 bp, synthetic construct
  misc_feature 1..20: note = chemically synthesized
  source 1..20: mol_type = other DNA
tttccctctcaactcctgtg

SEQ ID NO: 15362 - DNA, 20 bp, synthetic construct
  misc_feature 1..20: note = chemically synthesized
  source 1..20: mol_type = other DNA
tcctaaaaatttctcatgtt

SEQ ID NO: 15363 - DNA, 20 bp, synthetic construct
  misc_feature 1..20: note = chemically synthesized
  source 1..20: mol_type = other DNA
atttctcatgttcagaacct

SEQ ID NO: 15364 - DNA, 20 bp, synthetic construct
  misc_feature 1..20: note = chemically synthesized
  source 1..20: mol_type = other DNA
tttctcatgttcagaacctt

SEQ ID NO: 15365 - DNA, 20 bp, synthetic construct
  misc_feature 1..20: note = chemically synthesized
  source 1..20: mol_type = other DNA
accttgggcttccatgtttc

SEQ ID NO: 15366 - DNA, 20 bp, synthetic construct
  misc_feature 1..20: note = chemically synthesized
  source 1..20: mol_type = other DNA
gggcttccatgtttccagtg

SEQ ID NO: 15367 - DNA, 20 bp, synthetic construct
  misc_feature 1..20: note = chemically synthesized
  source 1..20: mol_type = other DNA
ttccatgtttccagtgaagt

SEQ ID NO: 15368 - DNA, 20 bp, synthetic construct
  misc_feature 1..20: note = chemically synthesized
  source 1..20: mol_type = other DNA
ccagtgaagtcagatttttt

SEQ ID NO: 15369 - DNA, 20 bp, synthetic construct
  misc_feature 1..20: note = chemically synthesized
  source 1..20: mol_type = other DNA
tgaagtcagatttttttaga

SEQ ID NO: 15370 - DNA, 20 bp, synthetic construct
  misc_feature 1..20: note = chemically synthesized
  source 1..20: mol_type = other DNA
tcagatttttttagatggca

SEQ ID NO: 15371 - DNA, 20 bp, synthetic construct
  misc_feature 1..20: note = chemically synthesized
  source 1..20: mol_type = other DNA
ttagatggcaaagttgctgt

SEQ ID NO: 15372 - DNA, 20 bp, synthetic construct
  misc_feature 1..20: note = chemically synthesized
  source 1..20: mol_type = other DNA
aatttcatctgtgccctgct

SEQ ID NO: 15373 - DNA, 20 bp, synthetic construct
  misc_feature 1..20: note = chemically synthesized
  source 1..20: mol_type = other DNA
atttcatctgtgccctgctt

SEQ ID NO: 15374 - DNA, 20 bp, synthetic construct
  misc_feature 1..20: note = chemically synthesized
  source 1..20: mol_type = other DNA
ttcatctgtgccctgcttag

SEQ ID NO: 15375 - DNA, 20 bp, synthetic construct
  misc_feature 1..20: note = chemically synthesized
  source 1..20: mol_type = other DNA
aggagcttaatctttaatga

SEQ ID NO: 15376 - DNA, 20 bp, synthetic construct
  misc_feature 1..20: note = chemically synthesized
  source 1..20: mol_type = other DNA
cttaatctttaatgaaagct

SEQ ID NO: 15377 - DNA, 20 bp, synthetic construct
  misc_feature 1..20: note = chemically synthesized
  source 1..20: mol_type = other DNA
agctaagctttcattaaaaa

SEQ ID NO: 15378 - DNA, 20 bp, synthetic construct
  misc_feature 1..20: note = chemically synthesized
  source 1..20: mol_type = other DNA
ttcattaaaaaaagtctaac

SEQ ID NO: 15379 - DNA, 20 bp, synthetic construct
  misc_feature 1..20: note = chemically synthesized
  source 1..20: mol_type = other DNA
gctgcattcgactttgactg

SEQ ID NO: 15380 - DNA, 20 bp, synthetic construct
  misc_feature 1..20: note = chemically synthesized
  source 1..20: mol_type = other DNA
gcattcgactttgactgcag

SEQ ID NO: 15381 - DNA, 20 bp, synthetic construct
  misc_feature 1..20: note = chemically synthesized
  source 1..20: mol_type = other DNA
tcgactttgactgcagcagc

SEQ ID NO: 15382 - DNA, 20 bp, synthetic construct
  misc_feature 1..20: note = chemically synthesized
  source 1..20: mol_type = other DNA
ctttgactgcagcagctggt

SEQ ID NO: 15383 - DNA, 20 bp, synthetic construct
  misc_feature 1..20: note = chemically synthesized
  source 1..20: mol_type = other DNA
tgactgcagcagctggttag

SEQ ID NO: 15384 - DNA, 20 bp, synthetic construct
  misc_feature 1..20: note = chemically synthesized
  source 1..20: mol_type = other DNA
gactgcagcagctggttaga

SEQ ID NO: 15385 - DNA, 20 bp, synthetic construct
  misc_feature 1..20: note = chemically synthesized
  source 1..20: mol_type = other DNA
agctggttagaaggttctac

SEQ ID NO: 15386 - DNA, 20 bp, synthetic construct
  misc_feature 1..20: note = chemically synthesized
  source 1..20: mol_type = other DNA
ctggttagaaggttctactg

SEQ ID NO: 15387 - DNA, 20 bp, synthetic construct
  misc_feature 1..20: note = chemically synthesized
  source 1..20: mol_type = other DNA
tggttagaaggttctactgg

SEQ ID NO: 15388 - DNA, 20 bp, synthetic construct
  misc_feature 1..20: note = chemically synthesized
  source 1..20: mol_type = other DNA
gttagaaggttctactggag

SEQ ID NO: 15389 - DNA, 20 bp, synthetic construct
  misc_feature 1..20: note = chemically synthesized
  source 1..20: mol_type = other DNA
ttagaaggttctactggagg

SEQ ID NO: 15390 - DNA, 20 bp, synthetic construct
  misc_feature 1..20: note = chemically synthesized
  source 1..20: mol_type = other DNA
tagaaggttctactggagga

SEQ ID NO: 15391 - DNA, 20 bp, synthetic construct
  misc_feature 1..20: note = chemically synthesized
  source 1..20: mol_type = other DNA
gttctactggaggagggtcc

SEQ ID NO: 15392 - DNA, 20 bp, synthetic construct
  misc_feature 1..20: note = chemically synthesized
  source 1..20: mol_type = other DNA
gcccattgctaaattaacat

SEQ ID NO: 15393 - DNA, 20 bp, synthetic construct
  misc_feature 1..20: note = chemically synthesized
  source 1..20: mol_type = other DNA
cccattgctaaattaacatc

SEQ ID NO: 15394 - DNA, 20 bp, synthetic construct
  misc_feature 1..20: note = chemically synthesized
  source 1..20: mol_type = other DNA
ctaaattaacatcaggctct

SEQ ID NO: 15395 - DNA, 20 bp, synthetic construct
  misc_feature 1..20: note = chemically synthesized
  source 1..20: mol_type = other DNA
ttaacatcaggctctgagac

SEQ ID NO: 15396 - DNA, 20 bp, synthetic construct
  misc_feature 1..20: note = chemically synthesized
  source 1..20: mol_type = other DNA
acatcaggctctgagactgg

SEQ ID NO: 15397 - DNA, 20 bp, synthetic construct
  misc_feature 1..20: note = chemically synthesized
  source 1..20: mol_type = other DNA
gactggcagtatatctctaa

SEQ ID NO: 15398 - DNA, 20 bp, synthetic construct
  misc_feature 1..20: note = chemically synthesized
  source 1..20: mol_type = other DNA
tggcagtatatctctaacag

SEQ ID NO: 15399 - DNA, 20 bp, synthetic construct
  misc_feature 1..20: note = chemically synthesized
  source 1..20: mol_type = other DNA
cagtggttgatgctatcttc

SEQ ID NO: 15400 - DNA, 20 bp, synthetic construct
  misc_feature 1..20: note = chemically synthesized
  source 1..20: mol_type = other DNA
tggaacttgcctgctacatt

SEQ ID NO: 15401 - DNA, 20 bp, synthetic construct
  misc_feature 1..20: note = chemically synthesized
  source 1..20: mol_type = other DNA
tgagaccactgacccataca

SEQ ID NO: 15402 - DNA, 20 bp, synthetic construct
  misc_feature 1..20: note = chemically synthesized
  source 1..20: mol_type = other DNA
gagaccactgacccatacat

SEQ ID NO: 15403 - DNA, 20 bp, synthetic construct
  misc_feature 1..20: note = chemically synthesized
  source 1..20: mol_type = other DNA
accactgacccatacatagg

SEQ ID NO: 15404 - DNA, 20 bp, synthetic construct
  misc_feature 1..20: note = chemically synthesized
  source 1..20: mol_type = other DNA
acccatacataggaagccca

SEQ ID NO: 15405 - DNA, 20 bp, synthetic construct
  misc_feature 1..20: note = chemically synthesized
  source 1..20: mol_type = other DNA
atagctctgtcctgaactgt

SEQ ID NO: 15406 - DNA, 20 bp, synthetic construct
  misc_feature 1..20: note = chemically synthesized
  source 1..20: mol_type = other DNA
tagctctgtcctgaactgtt

SEQ ID NO: 15407 - DNA, 20 bp, synthetic construct
  misc_feature 1..20: note = chemically synthesized
  source 1..20: mol_type = other DNA
gtcctgaactgttaggccac

SEQ ID NO: 15408 - DNA, 20 bp, synthetic construct
  misc_feature 1..20: note = chemically synthesized
  source 1..20: mol_type = other DNA
gaactgttaggccactggtc

SEQ ID NO: 15409 - DNA, 20 bp, synthetic construct
  misc_feature 1..20: note = chemically synthesized
  source 1..20: mol_type = other DNA
actgttaggccactggtcca

SEQ ID NO: 15410 - DNA, 20 bp, synthetic construct
  misc_feature 1..20: note = chemically synthesized
  source 1..20: mol_type = other DNA
tgttaggccactggtccaga

SEQ ID NO: 15411 - DNA, 20 bp, synthetic construct
  misc_feature 1..20: note = chemically synthesized
  source 1..20: mol_type = other DNA
gatcctcataataaccctat

SEQ ID NO: 15412 - DNA, 20 bp, synthetic construct
  misc_feature 1..20: note = chemically synthesized
  source 1..20: mol_type = other DNA
ctcataataaccctatgaga

SEQ ID NO: 15413 - DNA, 20 bp, synthetic construct
  misc_feature 1..20: note = chemically synthesized
  source 1..20: mol_type = other DNA
caattattactcttacttta

SEQ ID NO: 15414 - DNA, 20 bp, synthetic construct
  misc_feature 1..20: note = chemically synthesized
  source 1..20: mol_type = other DNA
agatgatgatcctgaaaaca

SEQ ID NO: 15415 - DNA, 20 bp, synthetic construct
  misc_feature 1..20: note = chemically synthesized
  source 1..20: mol_type = other DNA
gatgatgatcctgaaaacat

SEQ ID NO: 15416 - DNA, 20 bp, synthetic construct
  misc_feature 1..20: note = chemically synthesized
  source 1..20: mol_type = other DNA
tgatgatcctgaaaacatag

SEQ ID NO: 15417 - DNA, 20 bp, synthetic construct
  misc_feature 1..20: note = chemically synthesized
  source 1..20: mol_type = other DNA
atcctgaaaacataggagtc

SEQ ID NO: 15418 - DNA, 20 bp, synthetic construct
  misc_feature 1..20: note = chemically synthesized
  source 1..20: mol_type = other DNA
tcctgaaaacataggagtca

SEQ ID NO: 15419 - DNA, 20 bp, synthetic construct
  misc_feature 1..20: note = chemically synthesized
  source 1..20: mol_type = other DNA
ggagtcaaggcacttgcccc

SEQ ID NO: 15420 - DNA, 20 bp, synthetic construct
  misc_feature 1..20: note = chemically synthesized
  source 1..20: mol_type = other DNA
tcaaggcacttgcccctagc

SEQ ID NO: 15421 - DNA, 20 bp, synthetic construct
  misc_feature 1..20: note = chemically synthesized
  source 1..20: mol_type = other DNA
caaggcacttgcccctagct

SEQ ID NO: 15422 - DNA, 20 bp, synthetic construct
  misc_feature 1..20: note = chemically synthesized
  source 1..20: mol_type = other DNA
aaggcacttgcccctagctg

SEQ ID NO: 15423 - DNA, 20 bp, synthetic construct
  misc_feature 1..20: note = chemically synthesized
  source 1..20: mol_type = other DNA
aggcacttgcccctagctgg

SEQ ID NO: 15424 - DNA, 20 bp, synthetic construct
  misc_feature 1..20: note = chemically synthesized
  source 1..20: mol_type = other DNA
cttgcccctagctgggggta

SEQ ID NO: 15425 - DNA, 20 bp, synthetic construct
  misc_feature 1..20: note = chemically synthesized
  source 1..20: mol_type = other DNA
ttgcccctagctgggggtat

SEQ ID NO: 15426 - DNA, 20 bp, synthetic construct
  misc_feature 1..20: note = chemically synthesized
  source 1..20: mol_type = other DNA
tgcccctagctgggggtata

SEQ ID NO: 15427 - DNA, 20 bp, synthetic construct
  misc_feature 1..20: note = chemically synthesized
  source 1..20: mol_type = other DNA
gcccctagctgggggtatag

SEQ ID NO: 15428 - DNA, 20 bp, synthetic construct
  misc_feature 1..20: note = chemically synthesized
  source 1..20: mol_type = other DNA
ccctagctgggggtataggg

SEQ ID NO: 15429 - DNA, 20 bp, synthetic construct
  misc_feature 1..20: note = chemically synthesized
  source 1..20: mol_type = other DNA
tagctgggggtataggggag

SEQ ID NO: 15430 - DNA, 20 bp, synthetic construct
  misc_feature 1..20: note = chemically synthesized
  source 1..20: mol_type = other DNA
tataggggagcagtcccatg

SEQ ID NO: 15431 - DNA, 20 bp, synthetic construct
  misc_feature 1..20: note = chemically synthesized
  source 1..20: mol_type = other DNA
aggggagcagtcccatgtag

SEQ ID NO: 15432 - DNA, 20 bp, synthetic construct
  misc_feature 1..20: note = chemically synthesized
  source 1..20: mol_type = other DNA
ggagcagtcccatgtagtag

SEQ ID NO: 15433 - DNA, 20 bp, synthetic construct
  misc_feature 1..20: note = chemically synthesized
  source 1..20: mol_type = other DNA
ccatgtctgccctctactca

SEQ ID NO: 15434 - DNA, 20 bp, synthetic construct
  misc_feature 1..20: note = chemically synthesized
  source 1..20: mol_type = other DNA
tactcatggtctatctctcc

SEQ ID NO: 15435 - DNA, 20 bp, synthetic construct
  misc_feature 1..20: note = chemically synthesized
  source 1..20: mol_type = other DNA
ggtctatctctcctggctcc

SEQ ID NO: 15436 - DNA, 20 bp, synthetic construct
  misc_feature 1..20: note = chemically synthesized
  source 1..20: mol_type = other DNA
gtctatctctcctggctcct

SEQ ID NO: 15437 - DNA, 20 bp, synthetic construct
  misc_feature 1..20: note = chemically synthesized
  source 1..20: mol_type = other DNA
ctatctctcctggctcctgg

SEQ ID NO: 15438 - DNA, 20 bp, synthetic construct
  misc_feature 1..20: note = chemically synthesized
  source 1..20: mol_type = other DNA
ctcctggctcctgggagtca

SEQ ID NO: 15439 - DNA, 20 bp, synthetic construct
  misc_feature 1..20: note = chemically synthesized
  source 1..20: mol_type = other DNA
tgggagtcatggactccacc

SEQ ID NO: 15440 - DNA, 20 bp, synthetic construct
  misc_feature 1..20: note = chemically synthesized
  source 1..20: mol_type = other DNA
cctgacctaaccacctatct

SEQ ID NO: 15441 - DNA, 20 bp, synthetic construct
  misc_feature 1..20: note = chemically synthesized
  source 1..20: mol_type = other DNA
aaccacctatctgagcctgc

SEQ ID NO: 15442 - DNA, 20 bp, synthetic construct
  misc_feature 1..20: note = chemically synthesized
  source 1..20: mol_type = other DNA
ctgccagcctataacccatc

SEQ ID NO: 15443 - DNA, 20 bp, synthetic construct
  misc_feature 1..20: note = chemically synthesized
  source 1..20: mol_type = other DNA
tgccagcctataacccatct

SEQ ID NO: 15444 - DNA, 20 bp, synthetic construct
  misc_feature 1..20: note = chemically synthesized
  source 1..20: mol_type = other DNA
ataacccatctgggccctga

SEQ ID NO: 15445 - DNA, 20 bp, synthetic construct
  misc_feature 1..20: note = chemically synthesized
  source 1..20: mol_type = other DNA
cccatctgggccctgatagc

SEQ ID NO: 15446 - DNA, 20 bp, synthetic construct
  misc_feature 1..20: note = chemically synthesized
  source 1..20: mol_type = other DNA
atctgggccctgatagctgg

SEQ ID NO: 15447 - DNA, 20 bp, synthetic construct
  misc_feature 1..20: note = chemically synthesized
  source 1..20: mol_type = other DNA
gggccctgatagctggtggc

SEQ ID NO: 15448 - DNA, 20 bp, synthetic construct
  misc_feature 1..20: note = chemically synthesized
  source 1..20: mol_type = other DNA
tgaccccaccccaccctccc

SEQ ID NO: 15449 - DNA, 20 bp, synthetic construct
  misc_feature 1..20: note = chemically synthesized
  source 1..20: mol_type = other DNA
accctccctggaacctctga

SEQ ID NO: 15450 - DNA, 20 bp, synthetic construct
  misc_feature 1..20: note = chemically synthesized
  source 1..20: mol_type = other DNA
gaacctctgatagacacatc

SEQ ID NO: 15451 - DNA, 20 bp, synthetic construct
  misc_feature 1..20: note = chemically synthesized
  source 1..20: mol_type = other DNA
gatagacacatctggcacac

SEQ ID NO: 15452 - DNA, 20 bp, synthetic construct
  misc_feature 1..20: note = chemically synthesized
  source 1..20: mol_type = other DNA
atctggcacaccagctcgca

SEQ ID NO: 15453 - DNA, 20 bp, synthetic construct
  misc_feature 1..20: note = chemically synthesized
  source 1..20: mol_type = other DNA
ccagctcgcaaagtcaccgt

SEQ ID NO: 15454 - DNA, 20 bp, synthetic construct
  misc_feature 1..20: note = chemically synthesized
  source 1..20: mol_type = other DNA
cagctcgcaaagtcaccgtg

SEQ ID NO: 15455 - DNA, 20 bp, synthetic construct
  misc_feature 1..20: note = chemically synthesized
  source 1..20: mol_type = other DNA
agctcgcaaagtcaccgtga

SEQ ID NO: 15456 - DNA, 20 bp, synthetic construct
  misc_feature 1..20: note = chemically synthesized
  source 1..20: mol_type = other DNA
gtgagggtcttgtgtttgct

SEQ ID NO: 15457 - DNA, 20 bp, synthetic construct
  misc_feature 1..20: note = chemically synthesized
  source 1..20: mol_type = other DNA
gtcaaaattccttgaaatcc

SEQ ID NO: 15458 - DNA, 20 bp, synthetic construct
  misc_feature 1..20: note = chemically synthesized
  source 1..20: mol_type = other DNA
ttccttgaaatccaagtcct

SEQ ID NO: 15459 - DNA, 20 bp, synthetic construct
  misc_feature 1..20: note = chemically synthesized
  source 1..20: mol_type = other DNA
ccttgaaatccaagtcctta

SEQ ID NO: 15460 - DNA, 20 bp, synthetic construct
  misc_feature 1..20: note = chemically synthesized
  source 1..20: mol_type = other DNA
gactcctgctcccaaattta

SEQ ID NO: 15461 - DNA, 20 bp, synthetic construct
  misc_feature 1..20: note = chemically synthesized
  source 1..20: mol_type = other DNA
tgctcccaaatttacagtca

SEQ ID NO: 15462 - DNA, 20 bp, synthetic construct
  misc_feature 1..20: note = chemically synthesized
  source 1..20: mol_type = other DNA
tacagtcatagacttcttca

SEQ ID NO: 15463 - DNA, 20 bp, synthetic construct
  misc_feature 1..20: note = chemically synthesized
  source 1..20: mol_type = other DNA
atggctgtctcctttatcca

SEQ ID NO: 15464 - DNA, 20 bp, synthetic construct
  misc_feature 1..20: note = chemically synthesized
  source 1..20: mol_type = other DNA
atccatctgatcctcctcat

SEQ ID NO: 15465 - DNA, 20 bp, synthetic construct
  misc_feature 1..20: note = chemically synthesized
  source 1..20: mol_type = other DNA
tctgatcctcctcatcagtg

SEQ ID NO: 15466 - DNA, 20 bp, synthetic construct
  misc_feature 1..20: note = chemically synthesized
  source 1..20: mol_type = other DNA
tcctcctcatcagtgcagca

SEQ ID NO: 15467 - DNA, 20 bp, synthetic construct
  misc_feature 1..20: note = chemically synthesized
  source 1..20: mol_type = other DNA
cctcctcatcagtgcagcac

SEQ ID NO: 15468 - DNA, 20 bp, synthetic construct
  misc_feature 1..20: note = chemically synthesized
  source 1..20: mol_type = other DNA
ctcctcatcagtgcagcaca

SEQ ID NO: 15469 - DNA, 20 bp, synthetic construct
  misc_feature 1..20: note = chemically synthesized
  source 1..20: mol_type = other DNA
cagtgcagcacagggcccat

SEQ ID NO: 15470 - DNA, 20 bp, synthetic construct
  misc_feature 1..20: note = chemically synthesized
  source 1..20: mol_type = other DNA
tgcagcacagggcccatgag

SEQ ID NO: 15471 - DNA, 20 bp, synthetic construct
  misc_feature 1..20: note = chemically synthesized
  source 1..20: mol_type = other DNA
agcacagggcccatgagcag

SEQ ID NO: 15472 - DNA, 20 bp, synthetic construct
  misc_feature 1..20: note = chemically synthesized
  source 1..20: mol_type = other DNA
gggcccatgagcagtagctg

SEQ ID NO: 15473 - DNA, 20 bp, synthetic construct
  misc_feature 1..20: note = chemically synthesized
  source 1..20: mol_type = other DNA
gcccatgagcagtagctgca

SEQ ID NO: 15474 - DNA, 20 bp, synthetic construct
  misc_feature 1..20: note = chemically synthesized
  source 1..20: mol_type = other DNA
agtagctgcagagtctcaca

SEQ ID NO: 15475 - DNA, 20 bp, synthetic construct
  misc_feature 1..20: note = chemically synthesized
  source 1..20: mol_type = other DNA
gtagctgcagagtctcacat

SEQ ID NO: 15476 - DNA, 20 bp, synthetic construct
  misc_feature 1..20: note = chemically synthesized
  source 1..20: mol_type = other DNA
tgcagagtctcacataggtc

SEQ ID NO: 15477 - DNA, 20 bp, synthetic construct
  misc_feature 1..20: note = chemically synthesized
  source 1..20: mol_type = other DNA
gcctctgacatgtccgacct

SEQ ID NO: 15478 - DNA, 20 bp, synthetic construct
  misc_feature 1..20: note = chemically synthesized
  source 1..20: mol_type = other DNA
cctctgacatgtccgacctt

SEQ ID NO: 15479 - DNA, 20 bp, synthetic construct
  misc_feature 1..20: note = chemically synthesized
  source 1..20: mol_type = other DNA
ggcaaatgcttgactcttct

SEQ ID NO: 15480 - DNA, 20 bp, synthetic construct
  misc_feature 1..20: note = chemically synthesized
  source 1..20: mol_type = other DNA
atgcttgactcttctgagct

SEQ ID NO: 15481 - DNA, 20 bp, synthetic construct
  misc_feature 1..20: note = chemically synthesized
  source 1..20: mol_type = other DNA
ttctgagctcagtcttgtca

SEQ ID NO: 15482 - DNA, 20 bp, synthetic construct
  misc_feature 1..20: note = chemically synthesized
  source 1..20: mol_type = other DNA
agtcttgtcatggcaaaata

SEQ ID NO: 15483 - DNA, 20 bp, synthetic construct
  misc_feature 1..20: note = chemically synthesized
  source 1..20: mol_type = other DNA
tggcaaaataaagataataa

SEQ ID NO: 15484 - DNA, 20 bp, synthetic construct
  misc_feature 1..20: note = chemically synthesized
  source 1..20: mol_type = other DNA
ataataatagtgttttttta

SEQ ID NO: 15485 - DNA, 20 bp, synthetic construct
  misc_feature 1..20: note = chemically synthesized
  source 1..20: mol_type = other DNA
aataatagtgtttttttatg

SEQ ID NO: 15486 - DNA, 20 bp, synthetic construct
  misc_feature 1..20: note = chemically synthesized
  source 1..20: mol_type = other DNA
atagtgtttttttatggagt

SEQ ID NO: 15487 - DNA, 20 bp, synthetic construct
  misc_feature 1..20: note = chemically synthesized
  source 1..20: mol_type = other DNA
tttttttatggagttagcgt

SEQ ID NO: 15488 - DNA, 20 bp, synthetic construct
  misc_feature 1..20: note = chemically synthesized
  source 1..20: mol_type = other DNA
ttttttatggagttagcgtg

SEQ ID NO: 15489 - DNA, 20 bp, synthetic construct
  misc_feature 1..20: note = chemically synthesized
  source 1..20: mol_type = other DNA
ttatggagttagcgtgagga

SEQ ID NO: 15490 - DNA, 20 bp, synthetic construct
  misc_feature 1..20: note = chemically synthesized
  source 1..20: mol_type = other DNA
agcgtgaggatggaaaacaa

SEQ ID NO: 15491 - DNA, 20 bp, synthetic construct
  misc_feature 1..20: note = chemically synthesized
  source 1..20: mol_type = other DNA
aaaacaatagcaaaattgat

SEQ ID NO: 15492 - DNA, 20 bp, synthetic construct
  misc_feature 1..20: note = chemically synthesized
  source 1..20: mol_type = other DNA
caaaattgattagactataa

SEQ ID NO: 15493 - DNA, 20 bp, synthetic construct
  misc_feature 1..20: note = chemically synthesized
  source 1..20: mol_type = other DNA
aaaattgattagactataaa

SEQ ID NO: 15494 - DNA, 20 bp, synthetic construct
  misc_feature 1..20: note = chemically synthesized
  source 1..20: mol_type = other DNA
ctataaaaggtctcaacaaa

SEQ ID NO: 15495 - DNA, 20 bp, synthetic construct
  misc_feature 1..20: note = chemically synthesized
  source 1..20: mol_type = other DNA
taaaaggtctcaacaaatag

SEQ ID NO: 15496 - DNA, 20 bp, synthetic construct
  misc_feature 1..20: note = chemically synthesized
  source 1..20: mol_type = other DNA
aaggtctcaacaaatagtag

SEQ ID NO: 15497 - DNA, 20 bp, synthetic construct
  misc_feature 1..20: note = chemically synthesized
  source 1..20: mol_type = other DNA
aattttcccttacctataat

SEQ ID NO: 15498 - DNA, 20 bp, synthetic construct
  misc_feature 1..20: note = chemically synthesized
  source 1..20: mol_type = other DNA
ttttcccttacctataataa

SEQ ID NO: 15499 - DNA, 20 bp, synthetic construct
  misc_feature 1..20: note = chemically synthesized
  source 1..20: mol_type = other DNA
ctcttattatattcttctta

SEQ ID NO: 15500 - DNA, 20 bp, synthetic construct
  misc_feature 1..20: note = chemically synthesized
  source 1..20: mol_type = other DNA
tattcttcttatagtgattc

SEQ ID NO: 15501 - DNA, 20 bp, synthetic construct
  misc_feature 1..20: note = chemically synthesized
  source 1..20: mol_type = other DNA
tatagtgattctggatatta

SEQ ID NO: 15502 - DNA, 20 bp, synthetic construct
  misc_feature 1..20: note = chemically synthesized
  source 1..20: mol_type = other DNA
agtgattctggatattaaag

SEQ ID NO: 15503 - DNA, 20 bp, synthetic construct
  misc_feature 1..20: note = chemically synthesized
  source 1..20: mol_type = other DNA
gtgattctggatattaaagt

SEQ ID NO: 15504 - DNA, 20 bp, synthetic construct
  misc_feature 1..20: note = chemically synthesized
  source 1..20: mol_type = other DNA
ctggatattaaagtgggaat

SEQ ID NO: 15505 - DNA, 20 bp, synthetic construct
  misc_feature 1..20: note = chemically synthesized
  source 1..20: mol_type = other DNA
tggatattaaagtgggaatg

SEQ ID NO: 15506 - DNA, 20 bp, synthetic construct
  misc_feature 1..20: note = chemically synthesized
  source 1..20: mol_type = other DNA
ggatattaaagtgggaatga

SEQ ID NO: 15507 - DNA, 20 bp, synthetic construct
  misc_feature 1..20: note = chemically synthesized
  source 1..20: mol_type = other DNA
gatattaaagtgggaatgag

SEQ ID NO: 15508 - DNA, 20 bp, synthetic construct
  misc_feature 1..20: note = chemically synthesized
  source 1..20: mol_type = other DNA
attaaagtgggaatgagggg

SEQ ID NO: 15509 - DNA, 20 bp, synthetic construct
  misc_feature 1..20: note = chemically synthesized
  source 1..20: mol_type = other DNA
ttaaagtgggaatgaggggc

SEQ ID NO: 15510 - DNA, 20 bp, synthetic construct
  misc_feature 1..20: note = chemically synthesized
  source 1..20: mol_type = other DNA
tgaggggcaggccactaacg

SEQ ID NO: 15511 - DNA, 20 bp, synthetic construct
  misc_feature 1..20: note = chemically synthesized
  source 1..20: mol_type = other DNA
ggggcaggccactaacgaag

SEQ ID NO: 15512 - DNA, 20 bp, synthetic construct
  misc_feature 1..20: note = chemically synthesized
  source 1..20: mol_type = other DNA
aacgaagaagatgtttctca

SEQ ID NO: 15513 - DNA, 20 bp, synthetic construct
  misc_feature 1..20: note = chemically synthesized
  source 1..20: mol_type = other DNA
gaagaagatgtttctcaaag

SEQ ID NO: 15514 - DNA, 20 bp, synthetic construct
  misc_feature 1..20: note = chemically synthesized
  source 1..20: mol_type = other DNA
aagaagccattctccccaca

SEQ ID NO: 15515 - DNA, 20 bp, synthetic construct
  misc_feature 1..20: note = chemically synthesized
  source 1..20: mol_type = other DNA
tctccccacatagatcatct

SEQ ID NO: 15516 - DNA, 20 bp, synthetic construct
  misc_feature 1..20: note = chemically synthesized
  source 1..20: mol_type = other DNA
ccccacatagatcatctcag

SEQ ID NO: 15517 - DNA, 20 bp, synthetic construct
  misc_feature 1..20: note = chemically synthesized
  source 1..20: mol_type = other DNA
cccacatagatcatctcagc

SEQ ID NO: 15518 - DNA, 20 bp, synthetic construct
  misc_feature 1..20: note = chemically synthesized
  source 1..20: mol_type = other DNA
ccacatagatcatctcagca

SEQ ID NO: 15519 - DNA, 20 bp, synthetic construct
  misc_feature 1..20: note = chemically synthesized
  source 1..20: mol_type = other DNA
tagatcatctcagcagggtt

SEQ ID NO: 15520 - DNA, 20 bp, synthetic construct
  misc_feature 1..20: note = chemically synthesized
  source 1..20: mol_type = other DNA
agatcatctcagcagggttc

SEQ ID NO: 15521 - DNA, 20 bp, synthetic construct
  misc_feature 1..20: note = chemically synthesized
  source 1..20: mol_type = other DNA
tcatctcagcagggttcagg

SEQ ID NO: 15522 - DNA, 20 bp, synthetic construct
  misc_feature 1..20: note = chemically synthesized
  source 1..20: mol_type = other DNA
cagcagggttcaggaagata

SEQ ID NO: 15523 - DNA, 20 bp, synthetic construct
  misc_feature 1..20: note = chemically synthesized
  source 1..20: mol_type = other DNA
agcagggttcaggaagataa

SEQ ID NO: 15524 - DNA, 20 bp, synthetic construct
  misc_feature 1..20: note = chemically synthesized
  source 1..20: mol_type = other DNA
cagggttcaggaagataaag

SEQ ID NO: 15525 - DNA, 20 bp, synthetic construct
  misc_feature 1..20: note = chemically synthesized
  source 1..20: mol_type = other DNA
agggttcaggaagataaagg

SEQ ID NO: 15526 - DNA, 20 bp, synthetic construct
  misc_feature 1..20: note = chemically synthesized
  source 1..20: mol_type = other DNA
caggaagataaaggaggatc

SEQ ID NO: 15527 - DNA, 20 bp, synthetic construct
  misc_feature 1..20: note = chemically synthesized
  source 1..20: mol_type = other DNA
aggaagataaaggaggatca

SEQ ID NO: 15528 - DNA, 20 bp, synthetic construct
  misc_feature 1..20: note = chemically synthesized
  source 1..20: mol_type = other DNA
ataaaggaggatcaaggtcg

SEQ ID NO: 15529 - DNA, 20 bp, synthetic construct
  misc_feature 1..20: note = chemically synthesized
  source 1..20: mol_type = other DNA
taaaggaggatcaaggtcga

SEQ ID NO: 15530 - DNA, 20 bp, synthetic construct
  misc_feature 1..20: note = chemically synthesized
  source 1..20: mol_type = other DNA
aggaggatcaaggtcgaagg

SEQ ID NO: 15531 - DNA, 20 bp, synthetic construct
  misc_feature 1..20: note = chemically synthesized
  source 1..20: mol_type = other DNA
ggaggatcaaggtcgaaggt

SEQ ID NO: 15532 - DNA, 20 bp, synthetic construct
  misc_feature 1..20: note = chemically synthesized
  source 1..20: mol_type = other DNA
caaggtcgaaggtaggaact

SEQ ID NO: 15533 - DNA, 20 bp, synthetic construct
  misc_feature 1..20: note = chemically synthesized
  source 1..20: mol_type = other DNA
aaggtcgaaggtaggaacta

SEQ ID NO: 15534 - DNA, 20 bp, synthetic construct
  misc_feature 1..20: note = chemically synthesized
  source 1..20: mol_type = other DNA
gtcgaaggtaggaactaagg

SEQ ID NO: 15535 - DNA, 20 bp, synthetic construct
  misc_feature 1..20: note = chemically synthesized
  source 1..20: mol_type = other DNA
taggaactaaggaagaacac

SEQ ID NO: 15536 - DNA, 20 bp, synthetic construct
  misc_feature 1..20: note = chemically synthesized
  source 1..20: mol_type = other DNA
aggaactaaggaagaacact

SEQ ID NO: 15537 - DNA, 20 bp, synthetic construct
  misc_feature 1..20: note = chemically synthesized
  source 1..20: mol_type = other DNA
actaaggaagaacactgggc

SEQ ID NO: 15538 - DNA, 20 bp, synthetic construct
  misc_feature 1..20: note = chemically synthesized
  source 1..20: mol_type = other DNA
aaggaagaacactgggcaag

SEQ ID NO: 15539 - DNA, 20 bp, synthetic construct
  misc_feature 1..20: note = chemically synthesized
  source 1..20: mol_type = other DNA
gaacactgggcaagtggatc

SEQ ID NO: 15540 - DNA, 20 bp, synthetic construct
  misc_feature 1..20: note = chemically synthesized
  source 1..20: mol_type = other DNA
aacactgggcaagtggatcc

SEQ ID NO: 15541 - DNA, 20 bp, synthetic construct
  misc_feature 1..20: note = chemically synthesized
  source 1..20: mol_type = other DNA
tccaggttgtccaacgctga

SEQ ID NO: 15542 - DNA, 20 bp, synthetic construct
  misc_feature 1..20: note = chemically synthesized
  source 1..20: mol_type = other DNA
aggttgtccaacgctgaaag

SEQ ID NO: 15543 - DNA, 20 bp, synthetic construct
  misc_feature 1..20: note = chemically synthesized
  source 1..20: mol_type = other DNA
ggttgtccaacgctgaaagt

SEQ ID NO: 15544 - DNA, 20 bp, synthetic construct
  misc_feature 1..20: note = chemically synthesized
  source 1..20: mol_type = other DNA
aacgctgaaagtaggaatct

SEQ ID NO: 15545 - DNA, 20 bp, synthetic construct
  misc_feature 1..20: note = chemically synthesized
  source 1..20: mol_type = other DNA
gaaagtaggaatctaagcac

SEQ ID NO: 15546 - DNA, 20 bp, synthetic construct
  misc_feature 1..20: note = chemically synthesized
  source 1..20: mol_type = other DNA
ggaatctaagcactagtctc

SEQ ID NO: 15547 - DNA, 20 bp, synthetic construct
  misc_feature 1..20: note = chemically synthesized
  source 1..20: mol_type = other DNA
aagcactagtctctggatgc

SEQ ID NO: 15548 - DNA, 20 bp, synthetic construct
  misc_feature 1..20: note = chemically synthesized
  source 1..20: mol_type = other DNA
agcactagtctctggatgct

SEQ ID NO: 15549 - DNA, 20 bp, synthetic construct
  misc_feature 1..20: note = chemically synthesized
  source 1..20: mol_type = other DNA
cactagtctctggatgctag

SEQ ID NO: 15550 - DNA, 20 bp, synthetic construct
  misc_feature 1..20: note = chemically synthesized
  source 1..20: mol_type = other DNA
actagtctctggatgctagg

SEQ ID NO: 15551 - DNA, 20 bp, synthetic construct
  misc_feature 1..20: note = chemically synthesized
  source 1..20: mol_type = other DNA
ctagtctctggatgctagga

SEQ ID NO: 15552 - DNA, 20 bp, synthetic construct
  misc_feature 1..20: note = chemically synthesized
  source 1..20: mol_type = other DNA
atgctaggagggcctctgca

SEQ ID NO: 15553 - DNA, 20 bp, synthetic construct
  misc_feature 1..20: note = chemically synthesized
  source 1..20: mol_type = other DNA
tgctaggagggcctctgcat

SEQ ID NO: 15554 - DNA, 20 bp, synthetic construct
  misc_feature 1..20: note = chemically synthesized
  source 1..20: mol_type = other DNA
gcatgggtaactctttcaac

SEQ ID NO: 15555 - DNA, 20 bp, synthetic construct
  misc_feature 1..20: note = chemically synthesized
  source 1..20: mol_type = other DNA
gggtaactctttcaactagc

SEQ ID NO: 15556 - DNA, 20 bp, synthetic construct
  misc_feature 1..20: note = chemically synthesized
  source 1..20: mol_type = other DNA
ggtaactctttcaactagcc

SEQ ID NO: 15557 - DNA, 20 bp, synthetic construct
  misc_feature 1..20: note = chemically synthesized
  source 1..20: mol_type = other DNA
gtaactctttcaactagcca

SEQ ID NO: 15558 - DNA, 20 bp, synthetic construct
  misc_feature 1..20: note = chemically synthesized
  source 1..20: mol_type = other DNA
taactctttcaactagccag

SEQ ID NO: 15559 - DNA, 20 bp, synthetic construct
  misc_feature 1..20: note = chemically synthesized
  source 1..20: mol_type = other DNA
tctttcaactagccaggggc

SEQ ID NO: 15560 - DNA, 20 bp, synthetic construct
  misc_feature 1..20: note = chemically synthesized
  source 1..20: mol_type = other DNA
actagccaggggctggactg

SEQ ID NO: 15561 - DNA, 20 bp, synthetic construct
  misc_feature 1..20: note = chemically synthesized
  source 1..20: mol_type = other DNA
tagccaggggctggactgtg

SEQ ID NO: 15562 - DNA, 20 bp, synthetic construct
  misc_feature 1..20: note = chemically synthesized
  source 1..20: mol_type = other DNA
gactgtggagaaaccatttc

SEQ ID NO: 15563 - DNA, 20 bp, synthetic construct
  misc_feature 1..20: note = chemically synthesized
  source 1..20: mol_type = other DNA
gtggagaaaccatttccaga

SEQ ID NO: 15564 - DNA, 20 bp, synthetic construct
  misc_feature 1..20: note = chemically synthesized
  source 1..20: mol_type = other DNA
gagaaaccatttccagatag

SEQ ID NO: 15565 - DNA, 20 bp, synthetic construct
  misc_feature 1..20: note = chemically synthesized
  source 1..20: mol_type = other DNA
aaccatttccagatagaagt

SEQ ID NO: 15566 - DNA, 20 bp, synthetic construct
  misc_feature 1..20: note = chemically synthesized
  source 1..20: mol_type = other DNA
accatttccagatagaagtg

SEQ ID NO: 15567 - DNA, 20 bp, synthetic construct
  misc_feature 1..20: note = chemically synthesized
  source 1..20: mol_type = other DNA
catttccagatagaagtgag

SEQ ID NO: 15568 - DNA, 20 bp, synthetic construct
  misc_feature 1..20: note = chemically synthesized
  source 1..20: mol_type = other DNA
agatagaagtgaggagattc

SEQ ID NO: 15569 - DNA, 20 bp, synthetic construct
  misc_feature 1..20: note = chemically synthesized
  source 1..20: mol_type = other DNA
tagaagtgaggagattccag

SEQ ID NO: 15570 - DNA, 20 bp, synthetic construct
  misc_feature 1..20: note = chemically synthesized
  source 1..20: mol_type = other DNA
agaagtgaggagattccagc

SEQ ID NO: 15571 - DNA, 20 bp, synthetic construct
  misc_feature 1..20: note = chemically synthesized
  source 1..20: mol_type = other DNA
gattccagcaggaaacactt

SEQ ID NO: 15572 - DNA, 20 bp, synthetic construct
  misc_feature 1..20: note = chemically synthesized
  source 1..20: mol_type = other DNA
ttccagcaggaaacacttaa

SEQ ID NO: 15573 - DNA, 20 bp, synthetic construct
  misc_feature 1..20: note = chemically synthesized
  source 1..20: mol_type = other DNA
ccagcaggaaacacttaaga

SEQ ID NO: 15574 - DNA, 20 bp, synthetic construct
  misc_feature 1..20: note = chemically synthesized
  source 1..20: mol_type = other DNA
cagcaggaaacacttaagag

SEQ ID NO: 15575 - DNA, 20 bp, synthetic construct
  misc_feature 1..20: note = chemically synthesized
  source 1..20: mol_type = other DNA
aacacttaagagaggatccc

SEQ ID NO: 15576 - DNA, 20 bp, synthetic construct
  misc_feature 1..20: note = chemically synthesized
  source 1..20: mol_type = other DNA
acttaagagaggatccctgg

SEQ ID NO: 15577 - DNA, 20 bp, synthetic construct
  misc_feature 1..20: note = chemically synthesized
  source 1..20: mol_type = other DNA
agagaggatccctggaagtt

SEQ ID NO: 15578 - DNA, 20 bp, synthetic construct
  misc_feature 1..20: note = chemically synthesized
  source 1..20: mol_type = other DNA
gagaggatccctggaagttc

SEQ ID NO: 15579 - DNA, 20 bp, synthetic construct
  misc_feature 1..20: note = chemically synthesized
  source 1..20: mol_type = other DNA
agaggatccctggaagttcg

SEQ ID NO: 15580 - DNA, 20 bp, synthetic construct
  misc_feature 1..20: note = chemically synthesized
  source 1..20: mol_type = other DNA
ggatccctggaagttcgggg

SEQ ID NO: 15581 - DNA, 20 bp, synthetic construct
  misc_feature 1..20: note = chemically synthesized
  source 1..20: mol_type = other DNA
gatccctggaagttcggggc

SEQ ID NO: 15582 - DNA, 20 bp, synthetic construct
  misc_feature 1..20: note = chemically synthesized
  source 1..20: mol_type = other DNA
tccctggaagttcggggcag

SEQ ID NO: 15583 - DNA, 20 bp, synthetic construct
  misc_feature 1..20: note = chemically synthesized
  source 1..20: mol_type = other DNA
ccctggaagttcggggcagg

SEQ ID NO: 15584 - DNA, 20 bp, synthetic construct
  misc_feature 1..20: note = chemically synthesized
  source 1..20: mol_type = other DNA
aggaggctccctgtcacatg

SEQ ID NO: 15585 - DNA, 20 bp, synthetic construct
  misc_feature 1..20: note = chemically synthesized
  source 1..20: mol_type = other DNA
ggaggctccctgtcacatga

SEQ ID NO: 15586 - DNA, 20 bp, synthetic construct
  misc_feature 1..20: note = chemically synthesized
  source 1..20: mol_type = other DNA
tcacatgaaggaaacctgct

SEQ ID NO: 15587 - DNA, 20 bp, synthetic construct
  misc_feature 1..20: note = chemically synthesized
  source 1..20: mol_type = other DNA
tgaaggaaacctgctcagcg

SEQ ID NO: 15588 - DNA, 20 bp, synthetic construct
  misc_feature 1..20: note = chemically synthesized
  source 1..20: mol_type = other DNA
gaaggaaacctgctcagcgt

SEQ ID NO: 15589 - DNA, 20 bp, synthetic construct
  misc_feature 1..20: note = chemically synthesized
  source 1..20: mol_type = other DNA
aacctgctcagcgtaggctc

SEQ ID NO: 15590 - DNA, 20 bp, synthetic construct
  misc_feature 1..20: note = chemically synthesized
  source 1..20: mol_type = other DNA
acctgctcagcgtaggctct

SEQ ID NO: 15591 - DNA, 20 bp, synthetic construct
  misc_feature 1..20: note = chemically synthesized
  source 1..20: mol_type = other DNA
tcttccctactcttatccaa

SEQ ID NO: 15592 - DNA, 20 bp, synthetic construct
  misc_feature 1..20: note = chemically synthesized
  source 1..20: mol_type = other DNA
cttccctactcttatccaat

SEQ ID NO: 15593 - DNA, 20 bp, synthetic construct
  misc_feature 1..20: note = chemically synthesized
  source 1..20: mol_type = other DNA
ttccctactcttatccaatg

SEQ ID NO: 15594 - DNA, 20 bp, synthetic construct
  misc_feature 1..20: note = chemically synthesized
  source 1..20: mol_type = other DNA
ccaatggggcttctgatttt

SEQ ID NO: 15595 - DNA, 20 bp, synthetic construct
  misc_feature 1..20: note = chemically synthesized
  source 1..20: mol_type = other DNA
tggggcttctgattttaagc

SEQ ID NO: 15596 - DNA, 20 bp, synthetic construct
  misc_feature 1..20: note = chemically synthesized
  source 1..20: mol_type = other DNA
attttaagccagtcttcaca

SEQ ID NO: 15597 - DNA, 20 bp, synthetic construct
  misc_feature 1..20: note = chemically synthesized
  source 1..20: mol_type = other DNA
agccagtcttcacaaagccc

SEQ ID NO: 15598 - DNA, 20 bp, synthetic construct
  misc_feature 1..20: note = chemically synthesized
  source 1..20: mol_type = other DNA
agccccagatttctacatgc

SEQ ID NO: 15599 - DNA, 20 bp, synthetic construct
  misc_feature 1..20: note = chemically synthesized
  source 1..20: mol_type = other DNA
ccccagatttctacatgctg

SEQ ID NO: 15600 - DNA, 20 bp, synthetic construct
  misc_feature 1..20: note = chemically synthesized
  source 1..20: mol_type = other DNA
ctacatgctggagccctgaa

SEQ ID NO: 15601 - DNA, 20 bp, synthetic construct
  misc_feature 1..20: note = chemically synthesized
  source 1..20: mol_type = other DNA
tacatgctggagccctgaat

SEQ ID NO: 15602 - DNA, 20 bp, synthetic construct
  misc_feature 1..20: note = chemically synthesized
  source 1..20: mol_type = other DNA
atgctggagccctgaatggg

SEQ ID NO: 15603 - DNA, 20 bp, synthetic construct
  misc_feature 1..20: note = chemically synthesized
  source 1..20: mol_type = other DNA
tgctggagccctgaatgggc

SEQ ID NO: 15604 - DNA, 20 bp, synthetic construct
  misc_feature 1..20: note = chemically synthesized
  source 1..20: mol_type = other DNA
tggagccctgaatgggcagg

SEQ ID NO: 15605 - DNA, 20 bp, synthetic construct
  misc_feature 1..20: note = chemically synthesized
  source 1..20: mol_type = other DNA
tgaatgggcaggaagcattg

SEQ ID NO: 15606 - DNA, 20 bp, synthetic construct
  misc_feature 1..20: note = chemically synthesized
  source 1..20: mol_type = other DNA
attgcggtttccatttcatt

SEQ ID NO: 15607 - DNA, 20 bp, synthetic construct
  misc_feature 1..20: note = chemically synthesized
  source 1..20: mol_type = other DNA
tgcggtttccatttcattca

SEQ ID NO: 15608 - DNA, 20 bp, synthetic construct
  misc_feature 1..20: note = chemically synthesized
  source 1..20: mol_type = other DNA
tttcataccctgcttcccca

SEQ ID NO: 15609 - DNA, 20 bp, synthetic construct
  misc_feature 1..20: note = chemically synthesized
  source 1..20: mol_type = other DNA
ataatctgattcatgcaacc

SEQ ID NO: 15610 - DNA, 20 bp, synthetic construct
  misc_feature 1..20: note = chemically synthesized
  source 1..20: mol_type = other DNA
ttcatgcaaccaagaattat

SEQ ID NO: 15611 - DNA, 20 bp, synthetic construct
  misc_feature 1..20: note = chemically synthesized
  source 1..20: mol_type = other DNA
catgcaaccaagaattatga

SEQ ID NO: 15612 - DNA, 20 bp, synthetic construct
  misc_feature 1..20: note = chemically synthesized
  source 1..20: mol_type = other DNA
tgcaaccaagaattatgaga

SEQ ID NO: 15613 - DNA, 20 bp, synthetic construct
  misc_feature 1..20: note = chemically synthesized
  source 1..20: mol_type = other DNA
aagaattatgagagagcctt

SEQ ID NO: 15614 - DNA, 20 bp, synthetic construct
  misc_feature 1..20: note = chemically synthesized
  source 1..20: mol_type = other DNA
agagagccttcagtcatgcc

SEQ ID NO: 15615 - DNA, 20 bp, synthetic construct
  misc_feature 1..20: note = chemically synthesized
  source 1..20: mol_type = other DNA
gagagccttcagtcatgcct

SEQ ID NO: 15616 - DNA, 20 bp, synthetic construct
  misc_feature 1..20: note = chemically synthesized
  source 1..20: mol_type = other DNA
atttattgttgtgcatatga

SEQ ID NO: 15617 - DNA, 20 bp, synthetic construct
  misc_feature 1..20: note = chemically synthesized
  source 1..20: mol_type = other DNA
tttattgttgtgcatatgat

SEQ ID NO: 15618 - DNA, 20 bp, synthetic construct
  misc_feature 1..20: note = chemically synthesized
  source 1..20: mol_type = other DNA
ttattgttgtgcatatgatg

SEQ ID NO: 15619 - DNA, 20 bp, synthetic construct
  misc_feature 1..20: note = chemically synthesized
  source 1..20: mol_type = other DNA
ttgttgtgcatatgatgggg

SEQ ID NO: 15620 - DNA, 20 bp, synthetic construct
  misc_feature 1..20: note = chemically synthesized
  source 1..20: mol_type = other DNA
ttgtgcatatgatggggtag

SEQ ID NO: 15621 - DNA, 20 bp, synthetic construct
  misc_feature 1..20: note = chemically synthesized
  source 1..20: mol_type = other DNA
catatgatggggtagcagac

SEQ ID NO: 15622 - DNA, 20 bp, synthetic construct
  misc_feature 1..20: note = chemically synthesized
  source 1..20: mol_type = other DNA
agcagacaagaaaacgttaa

SEQ ID NO: 15623 - DNA, 20 bp, synthetic construct
  misc_feature 1..20: note = chemically synthesized
  source 1..20: mol_type = other DNA
acaagaaaacgttaacagca

SEQ ID NO: 15624 - DNA, 20 bp, synthetic construct
  misc_feature 1..20: note = chemically synthesized
  source 1..20: mol_type = other DNA
gttaacagcatagactttct

SEQ ID NO: 15625 - DNA, 20 bp, synthetic construct
  misc_feature 1..20: note = chemically synthesized
  source 1..20: mol_type = other DNA
taacagcatagactttctca

SEQ ID NO: 15626 - DNA, 20 bp, synthetic construct
  misc_feature 1..20: note = chemically synthesized
  source 1..20: mol_type = other DNA
agactttctcagagctatat

SEQ ID NO: 15627 - DNA, 20 bp, synthetic construct
  misc_feature 1..20: note = chemically synthesized
  source 1..20: mol_type = other DNA
ttctcagagctatatgagtt

SEQ ID NO: 15628 - DNA, 20 bp, synthetic construct
  misc_feature 1..20: note = chemically synthesized
  source 1..20: mol_type = other DNA
tctcagagctatatgagttt

SEQ ID NO: 15629 - DNA, 20 bp, synthetic construct
  misc_feature 1..20: note = chemically synthesized
  source 1..20: mol_type = other DNA
tatgagtttgggaattaatc

SEQ ID NO: 15630 - DNA, 20 bp, synthetic construct
  misc_feature 1..20: note = chemically synthesized
  source 1..20: mol_type = other DNA
gtttgggaattaatcaagac

SEQ ID NO: 15631 - DNA, 20 bp, synthetic construct
  misc_feature 1..20: note = chemically synthesized
  source 1..20: mol_type = other DNA
atcaagaccagccttttgct

SEQ ID NO: 15632 - DNA, 20 bp, synthetic construct
  misc_feature 1..20: note = chemically synthesized
  source 1..20: mol_type = other DNA
tcaagaccagccttttgctc

SEQ ID NO: 15633 - DNA, 20 bp, synthetic construct
  misc_feature 1..20: note = chemically synthesized
  source 1..20: mol_type = other DNA
caagaccagccttttgctca

SEQ ID NO: 15634 - DNA, 20 bp, synthetic construct
  misc_feature 1..20: note = chemically synthesized
  source 1..20: mol_type = other DNA
gaccagccttttgctcaggg

SEQ ID NO: 15635 - DNA, 20 bp, synthetic construct
  misc_feature 1..20: note = chemically synthesized
  source 1..20: mol_type = other DNA
ctcagggtagaaatccccta

SEQ ID NO: 15636 - DNA, 20 bp, synthetic construct
  misc_feature 1..20: note = chemically synthesized
  source 1..20: mol_type = other DNA
tcagggtagaaatcccctat

SEQ ID NO: 15637 - DNA, 20 bp, synthetic construct
  misc_feature 1..20: note = chemically synthesized
  source 1..20: mol_type = other DNA
cagggtagaaatcccctata

SEQ ID NO: 15638 - DNA, 20 bp, synthetic construct
  misc_feature 1..20: note = chemically synthesized
  source 1..20: mol_type = other DNA
tatagggatttattcaatga

SEQ ID NO: 15639 - DNA, 20 bp, synthetic construct
  misc_feature 1..20: note = chemically synthesized
  source 1..20: mol_type = other DNA
atagggatttattcaatgat

SEQ ID NO: 15640 - DNA, 20 bp, synthetic construct
  misc_feature 1..20: note = chemically synthesized
  source 1..20: mol_type = other DNA
tttattcaatgatgggttaa

SEQ ID NO: 15641 - DNA, 20 bp, synthetic construct
  misc_feature 1..20: note = chemically synthesized
  source 1..20: mol_type = other DNA
tgggttaaaagctttctata

SEQ ID NO: 15642 - DNA, 20 bp, synthetic construct
  misc_feature 1..20: note = chemically synthesized
  source 1..20: mol_type = other DNA
ttaaaagctttctatatggt

SEQ ID NO: 15643 - DNA, 20 bp, synthetic construct
  misc_feature 1..20: note = chemically synthesized
  source 1..20: mol_type = other DNA
taaaagctttctatatggtg

SEQ ID NO: 15644 - DNA, 20 bp, synthetic construct
  misc_feature 1..20: note = chemically synthesized
  source 1..20: mol_type = other DNA
aaagctttctatatggtgag

SEQ ID NO: 15645 - DNA, 20 bp, synthetic construct
  misc_feature 1..20: note = chemically synthesized
  source 1..20: mol_type = other DNA
tctatatggtgaggagctca

SEQ ID NO: 15646 - DNA, 20 bp, synthetic construct
  misc_feature 1..20: note = chemically synthesized
  source 1..20: mol_type = other DNA
gaggagctcacagattttcc

SEQ ID NO: 15647 - DNA, 20 bp, synthetic construct
  misc_feature 1..20: note = chemically synthesized
  source 1..20: mol_type = other DNA
ttccaagcccttgcttttgc

SEQ ID NO: 15648 - DNA, 20 bp, synthetic construct
  misc_feature 1..20: note = chemically synthesized
  source 1..20: mol_type = other DNA
aagcccttgcttttgctaga

SEQ ID NO: 15649 - DNA, 20 bp, synthetic construct
  misc_feature 1..20: note = chemically synthesized
  source 1..20: mol_type = other DNA
gtttatgaaattcttacaca

SEQ ID NO: 15650 - DNA, 20 bp, synthetic construct
  misc_feature 1..20: note = chemically synthesized
  source 1..20: mol_type = other DNA
tatgaaattcttacacacag

SEQ ID NO: 15651 - DNA, 20 bp, synthetic construct
  misc_feature 1..20: note = chemically synthesized
  source 1..20: mol_type = other DNA
acagaagaatcttctaatcc

SEQ ID NO: 15652 - DNA, 20 bp, synthetic construct
  misc_feature 1..20: note = chemically synthesized
  source 1..20: mol_type = other DNA
cagaagaatcttctaatcct

SEQ ID NO: 15653 - DNA, 20 bp, synthetic construct
  misc_feature 1..20: note = chemically synthesized
  source 1..20: mol_type = other DNA
tataacttgattccctattc

SEQ ID NO: 15654 - DNA, 20 bp, synthetic construct
  misc_feature 1..20: note = chemically synthesized
  source 1..20: mol_type = other DNA
aacttgattccctattccag

SEQ ID NO: 15655 - DNA, 20 bp, synthetic construct
  misc_feature 1..20: note = chemically synthesized
  source 1..20: mol_type = other DNA
gataatattcccatattctg

SEQ ID NO: 15656 - DNA, 20 bp, synthetic construct
  misc_feature 1..20: note = chemically synthesized
  source 1..20: mol_type = other DNA
ttcatgcatttgttaaataa

SEQ ID NO: 15657 - DNA, 20 bp, synthetic construct
  misc_feature 1..20: note = chemically synthesized
  source 1..20: mol_type = other DNA
tcatgcatttgttaaataat

SEQ ID NO: 15658 - DNA, 20 bp, synthetic construct
  misc_feature 1..20: note = chemically synthesized
  source 1..20: mol_type = other DNA
catttgttaaataataggca

SEQ ID NO: 15659 - DNA, 20 bp, synthetic construct
  misc_feature 1..20: note = chemically synthesized
  source 1..20: mol_type = other DNA
taaataataggcatagtgac

SEQ ID NO: 15660 - DNA, 20 bp, synthetic construct
  misc_feature 1..20: note = chemically synthesized
  source 1..20: mol_type = other DNA
ataggcatagtgacaagtgc

SEQ ID NO: 15661 - DNA, 20 bp, synthetic construct
  misc_feature 1..20: note = chemically synthesized
  source 1..20: mol_type = other DNA
gacaagtgccagaactctaa

SEQ ID NO: 15662 - DNA, 20 bp, synthetic construct
  misc_feature 1..20: note = chemically synthesized
  source 1..20: mol_type = other DNA
ccagaactctaacagtcaac

SEQ ID NO: 15663 - DNA, 20 bp, synthetic construct
  misc_feature 1..20: note = chemically synthesized
  source 1..20: mol_type = other DNA
agaactctaacagtcaacca

SEQ ID NO: 15664 - DNA, 20 bp, synthetic construct
  misc_feature 1..20: note = chemically synthesized
  source 1..20: mol_type = other DNA
aactctaacagtcaaccaga

SEQ ID NO: 15665 - DNA, 20 bp, synthetic construct
  misc_feature 1..20: note = chemically synthesized
  source 1..20: mol_type = other DNA
aacagtcaaccagagagcca

SEQ ID NO: 15666 - DNA, 20 bp, synthetic construct
  misc_feature 1..20: note = chemically synthesized
  source 1..20: mol_type = other DNA
ccacagttttcaacttcaca

SEQ ID NO: 15667 - DNA, 20 bp, synthetic construct
  misc_feature 1..20: note = chemically synthesized
  source 1..20: mol_type = other DNA
caaagttaaccatctaactg

SEQ ID NO: 15668 - DNA, 20 bp, synthetic construct
  misc_feature 1..20: note = chemically synthesized
  source 1..20: mol_type = other DNA
gttaaccatctaactgaaga

SEQ ID NO: 15669 - DNA, 20 bp, synthetic construct
  misc_feature 1..20: note = chemically synthesized
  source 1..20: mol_type = other DNA
aaccatctaactgaagacag

SEQ ID NO: 15670 - DNA, 20 bp, synthetic construct
  misc_feature 1..20: note = chemically synthesized
  source 1..20: mol_type = other DNA
accaccaccccttctccaca

SEQ ID NO: 15671 - DNA, 20 bp, synthetic construct
  misc_feature 1..20: note = chemically synthesized
  source 1..20: mol_type = other DNA
caccccttctccacatggtg

SEQ ID NO: 15672 - DNA, 20 bp, synthetic construct
  misc_feature 1..20: note = chemically synthesized
  source 1..20: mol_type = other DNA
ggtgtagtctttcctgatgt

SEQ ID NO: 15673 - DNA, 20 bp, synthetic construct
  misc_feature 1..20: note = chemically synthesized
  source 1..20: mol_type = other DNA
gtgtagtctttcctgatgtc

SEQ ID NO: 15674 - DNA, 20 bp, synthetic construct
  misc_feature 1..20: note = chemically synthesized
  source 1..20: mol_type = other DNA
tgtagtctttcctgatgtca

SEQ ID NO: 15675 - DNA, 20 bp, synthetic construct
  misc_feature 1..20: note = chemically synthesized
  source 1..20: mol_type = other DNA
tttcctgatgtcagggatgt

SEQ ID NO: 15676 - DNA, 20 bp, synthetic construct
  misc_feature 1..20: note = chemically synthesized
  source 1..20: mol_type = other DNA
ttcctgatgtcagggatgtt

SEQ ID NO: 15677 - DNA, 20 bp, synthetic construct
  misc_feature 1..20: note = chemically synthesized
  source 1..20: mol_type = other DNA
gatgtcagggatgttaggct

SEQ ID NO: 15678 - DNA, 20 bp, synthetic construct
  misc_feature 1..20: note = chemically synthesized
  source 1..20: mol_type = other DNA
atgtcagggatgttaggctc

SEQ ID NO: 15679 - DNA, 20 bp, synthetic construct
  misc_feature 1..20: note = chemically synthesized
  source 1..20: mol_type = other DNA
cagggatgttaggctcaggt

SEQ ID NO: 15680 - DNA, 20 bp, synthetic construct
  misc_feature 1..20: note = chemically synthesized
  source 1..20: mol_type = other DNA
agggatgttaggctcaggtt

SEQ ID NO: 15681 - DNA, 20 bp, synthetic construct
  misc_feature 1..20: note = chemically synthesized
  source 1..20: mol_type = other DNA
atgttaggctcaggttagga

SEQ ID NO: 15682 - DNA, 20 bp, synthetic construct
  misc_feature 1..20: note = chemically synthesized
  source 1..20: mol_type = other DNA
taggctcaggttaggaaagt

SEQ ID NO: 15683 - DNA, 20 bp, synthetic construct
  misc_feature 1..20: note = chemically synthesized
  source 1..20: mol_type = other DNA
ggaaagtcagactatcatcc

SEQ ID NO: 15684 - DNA, 20 bp, synthetic construct
  misc_feature 1..20: note = chemically synthesized
  source 1..20: mol_type = other DNA
aaagtcagactatcatccca

SEQ ID NO: 15685 - DNA, 20 bp, synthetic construct
  misc_feature 1..20: note = chemically synthesized
  source 1..20: mol_type = other DNA
gtcagactatcatcccagag

SEQ ID NO: 15686 - DNA, 20 bp, synthetic construct
  misc_feature 1..20: note = chemically synthesized
  source 1..20: mol_type = other DNA
tcagactatcatcccagagc

SEQ ID NO: 15687 - DNA, 20 bp, synthetic construct
  misc_feature 1..20: note = chemically synthesized
  source 1..20: mol_type = other DNA
tatcatcccagagcaggaca

SEQ ID NO: 15688 - DNA, 20 bp, synthetic construct
  misc_feature 1..20: note = chemically synthesized
  source 1..20: mol_type = other DNA
gagcaggacacagacgaata

SEQ ID NO: 15689 - DNA, 20 bp, synthetic construct
  misc_feature 1..20: note = chemically synthesized
  source 1..20: mol_type = other DNA
acgaataaagtgtaattttt

SEQ ID NO: 15690 - DNA, 20 bp, synthetic construct
  misc_feature 1..20: note = chemically synthesized
  source 1..20: mol_type = other DNA
agtgtaattttttagtcact

SEQ ID NO: 15691 - DNA, 20 bp, synthetic construct
  misc_feature 1..20: note = chemically synthesized
  source 1..20: mol_type = other DNA
gtgtaattttttagtcactt

SEQ ID NO: 15692 - DNA, 20 bp, synthetic construct
  misc_feature 1..20: note = chemically synthesized
  source 1..20: mol_type = other DNA
ttttagtcacttaggaaaaa

SEQ ID NO: 15693 - DNA, 20 bp, synthetic construct
  misc_feature 1..20: note = chemically synthesized
  source 1..20: mol_type = other DNA
tagtcacttaggaaaaacag

SEQ ID NO: 15694 - DNA, 20 bp, synthetic construct
  misc_feature 1..20: note = chemically synthesized
  source 1..20: mol_type = other DNA
aggaaaaacagtggaatgca

SEQ ID NO: 15695 - DNA, 20 bp, synthetic construct
  misc_feature 1..20: note = chemically synthesized
  source 1..20: mol_type = other DNA
gaaaaacagtggaatgcaaa

SEQ ID NO: 15696 - DNA, 20 bp, synthetic construct
  misc_feature 1..20: note = chemically synthesized
  source 1..20: mol_type = other DNA
agtaaaaaatgctttctgaa

SEQ ID NO: 15697 - DNA, 20 bp, synthetic construct
  misc_feature 1..20: note = chemically synthesized
  source 1..20: mol_type = other DNA
tgctttctgaatggataact

SEQ ID NO: 15698 - DNA, 20 bp, synthetic construct
  misc_feature 1..20: note = chemically synthesized
  source 1..20: mol_type = other DNA
tctgaatggataacttggcc

SEQ ID NO: 15699 - DNA, 20 bp, synthetic construct
  misc_feature 1..20: note = chemically synthesized
  source 1..20: mol_type = other DNA
ctgaatggataacttggcct

SEQ ID NO: 15700 - DNA, 20 bp, synthetic construct
  misc_feature 1..20: note = chemically synthesized
  source 1..20: mol_type = other DNA
gaatggataacttggcctgg

SEQ ID NO: 15701 - DNA, 20 bp, synthetic construct
  misc_feature 1..20: note = chemically synthesized
  source 1..20: mol_type = other DNA
aatggataacttggcctggg

SEQ ID NO: 15702 - DNA, 20 bp, synthetic construct
  misc_feature 1..20: note = chemically synthesized
  source 1..20: mol_type = other DNA
aacttggcctgggaggcctt

SEQ ID NO: 15703 - DNA, 20 bp, synthetic construct
  misc_feature 1..20: note = chemically synthesized
  source 1..20: mol_type = other DNA
ttggcctgggaggcctttgg

SEQ ID NO: 15704 - DNA, 20 bp, synthetic construct
  misc_feature 1..20: note = chemically synthesized
  source 1..20: mol_type = other DNA
gcctgggaggcctttggaag

SEQ ID NO: 15705 - DNA, 20 bp, synthetic construct
  misc_feature 1..20: note = chemically synthesized
  source 1..20: mol_type = other DNA
ctgggaggcctttggaagca

SEQ ID NO: 15706 - DNA, 20 bp, synthetic construct
  misc_feature 1..20: note = chemically synthesized
  source 1..20: mol_type = other DNA
aggcctttggaagcagagac

SEQ ID NO: 15707 - DNA, 20 bp, synthetic construct
  misc_feature 1..20: note = chemically synthesized
  source 1..20: mol_type = other DNA
gcctttggaagcagagactg

SEQ ID NO: 15708 - DNA, 20 bp, synthetic construct
  misc_feature 1..20: note = chemically synthesized
  source 1..20: mol_type = other DNA
tttaaacatctttgtatccc

SEQ ID NO: 15709 - DNA, 20 bp, synthetic construct
  misc_feature 1..20: note = chemically synthesized
  source 1..20: mol_type = other DNA
atctttgtatccccagcatc

SEQ ID NO: 15710 - DNA, 20 bp, synthetic construct
  misc_feature 1..20: note = chemically synthesized
  source 1..20: mol_type = other DNA
tatccccagcatccagcata

SEQ ID NO: 15711 - DNA, 20 bp, synthetic construct
  misc_feature 1..20: note = chemically synthesized
  source 1..20: mol_type = other DNA
catccagcatacagactgcc

SEQ ID NO: 15712 - DNA, 20 bp, synthetic construct
  misc_feature 1..20: note = chemically synthesized
  source 1..20: mol_type = other DNA
ccagcatacagactgccaag

SEQ ID NO: 15713 - DNA, 20 bp, synthetic construct
  misc_feature 1..20: note = chemically synthesized
  source 1..20: mol_type = other DNA
acatgtcaataaatatttat

SEQ ID NO: 15714 - DNA, 20 bp, synthetic construct
  misc_feature 1..20: note = chemically synthesized
  source 1..20: mol_type = other DNA
gtcaataaatatttattgga

SEQ ID NO: 15715 - DNA, 20 bp, synthetic construct
  misc_feature 1..20: note = chemically synthesized
  source 1..20: mol_type = other DNA
ataaatatttattggatagt

SEQ ID NO: 15716 - DNA, 20 bp, synthetic construct
  misc_feature 1..20: note = chemically synthesized
  source 1..20: mol_type = other DNA
tatttattggatagtgagca

SEQ ID NO: 15717 - DNA, 20 bp, synthetic construct
  misc_feature 1..20: note = chemically synthesized
  source 1..20: mol_type = other DNA
atagtgagcaaagacataat

SEQ ID NO: 15718 - DNA, 20 bp, synthetic construct
  misc_feature 1..20: note = chemically synthesized
  source 1..20: mol_type = other DNA
tagtgagcaaagacataatt

SEQ ID NO: 15719 - DNA, 20 bp, synthetic construct
  misc_feature 1..20: note = chemically synthesized
  source 1..20: mol_type = other DNA
atctcaattctactatttgc

SEQ ID NO: 15720 - DNA, 20 bp, synthetic construct
  misc_feature 1..20: note = chemically synthesized
  source 1..20: mol_type = other DNA
tcaattctactatttgctag

SEQ ID NO: 15721 - DNA, 20 bp, synthetic construct
  misc_feature 1..20: note = chemically synthesized
  source 1..20: mol_type = other DNA
tagtttatgtttgtgtgtgt

SEQ ID NO: 15722 - DNA, 20 bp, synthetic construct
  misc_feature 1..20: note = chemically synthesized
  source 1..20: mol_type = other DNA
gtttatgtttgtgtgtgtga

SEQ ID NO: 15723 - DNA, 20 bp, synthetic construct
  misc_feature 1..20: note = chemically synthesized
  source 1..20: mol_type = other DNA
gtgtgtgagagtgtatgctt

SEQ ID NO: 15724 - DNA, 20 bp, synthetic construct
  misc_feature 1..20: note = chemically synthesized
  source 1..20: mol_type = other DNA
gtgagagtgtatgcttgagc

SEQ ID NO: 15725 - DNA, 20 bp, synthetic construct
  misc_feature 1..20: note = chemically synthesized
  source 1..20: mol_type = other DNA
agtgtatgcttgagcaagtt

SEQ ID NO: 15726 - DNA, 20 bp, synthetic construct
  misc_feature 1..20: note = chemically synthesized
  source 1..20: mol_type = other DNA
tgtatgcttgagcaagttga

SEQ ID NO: 15727 - DNA, 20 bp, synthetic construct
  misc_feature 1..20: note = chemically synthesized
  source 1..20: mol_type = other DNA
gtatgcttgagcaagttgag

SEQ ID NO: 15728 - DNA, 20 bp, synthetic construct
  misc_feature 1..20: note = chemically synthesized
  source 1..20: mol_type = other DNA
tgcttgagcaagttgagagg

SEQ ID NO: 15729 - DNA, 20 bp, synthetic construct
  misc_feature 1..20: note = chemically synthesized
  source 1..20: mol_type = other DNA
agaggtagtttttttaactg

SEQ ID NO: 15730 - DNA, 20 bp, synthetic construct
  misc_feature 1..20: note = chemically synthesized
  source 1..20: mol_type = other DNA
tttttttaactgtagtaaaa

SEQ ID NO: 15731 - DNA, 20 bp, synthetic construct
  misc_feature 1..20: note = chemically synthesized
  source 1..20: mol_type = other DNA
ttttttaactgtagtaaaat

SEQ ID NO: 15732 - DNA, 20 bp, synthetic construct
  misc_feature 1..20: note = chemically synthesized
  source 1..20: mol_type = other DNA
tttttaactgtagtaaaatg

SEQ ID NO: 15733 - DNA, 20 bp, synthetic construct
  misc_feature 1..20: note = chemically synthesized
  source 1..20: mol_type = other DNA
tagtaaaatggggataataa

SEQ ID NO: 15734 - DNA, 20 bp, synthetic construct
  misc_feature 1..20: note = chemically synthesized
  source 1..20: mol_type = other DNA
taataatagtatctacctga

SEQ ID NO: 15735 - DNA, 20 bp, synthetic construct
  misc_feature 1..20: note = chemically synthesized
  source 1..20: mol_type = other DNA
gtatctacctgaaagaatcc

SEQ ID NO: 15736 - DNA, 20 bp, synthetic construct
  misc_feature 1..20: note = chemically synthesized
  source 1..20: mol_type = other DNA
atctacctgaaagaatccaa

SEQ ID NO: 15737 - DNA, 20 bp, synthetic construct
  misc_feature 1..20: note = chemically synthesized
  source 1..20: mol_type = other DNA
taaatatgattaattatgca

SEQ ID NO: 15738 - DNA, 20 bp, synthetic construct
  misc_feature 1..20: note = chemically synthesized
  source 1..20: mol_type = other DNA
attatgcaaagcactaatta

SEQ ID NO: 15739 - DNA, 20 bp, synthetic construct
  misc_feature 1..20: note = chemically synthesized
  source 1..20: mol_type = other DNA
gcactaattacagtctctga

SEQ ID NO: 15740 - DNA, 20 bp, synthetic construct
  misc_feature 1..20: note = chemically synthesized
  source 1..20: mol_type = other DNA
tgatagccttcaataaatgt

SEQ ID NO: 15741 - DNA, 20 bp, synthetic construct
  misc_feature 1..20: note = chemically synthesized
  source 1..20: mol_type = other DNA
gtcagttatttttattatta

SEQ ID NO: 15742 - DNA, 20 bp, synthetic construct
  misc_feature 1..20: note = chemically synthesized
  source 1..20: mol_type = other DNA
tatttttattattacagtta

SEQ ID NO: 15743 - DNA, 20 bp, synthetic construct
  misc_feature 1..20: note = chemically synthesized
  source 1..20: mol_type = other DNA
ttattacagttaaagatgaa

SEQ ID NO: 15744 - DNA, 20 bp, synthetic construct
  misc_feature 1..20: note = chemically synthesized
  source 1..20: mol_type = other DNA
tattacagttaaagatgaat

SEQ ID NO: 15745 - DNA, 20 bp, synthetic construct
  misc_feature 1..20: note = chemically synthesized
  source 1..20: mol_type = other DNA
gttaaagatgaatgggcata

SEQ ID NO: 15746 - DNA, 20 bp, synthetic construct
  misc_feature 1..20: note = chemically synthesized
  source 1..20: mol_type = other DNA
agatgaatgggcataaagta

SEQ ID NO: 15747 - DNA, 20 bp, synthetic construct
  misc_feature 1..20: note = chemically synthesized
  source 1..20: mol_type = other DNA
gggcataaagtacagaacac

SEQ ID NO: 15748 - DNA, 20 bp, synthetic construct
  misc_feature 1..20: note = chemically synthesized
  source 1..20: mol_type = other DNA
agaacactagttttcacctg

SEQ ID NO: 15749 - DNA, 20 bp, synthetic construct
  misc_feature 1..20: note = chemically synthesized
  source 1..20: mol_type = other DNA
cactagttttcacctgcagc

SEQ ID NO: 15750 - DNA, 20 bp, synthetic construct
  misc_feature 1..20: note = chemically synthesized
  source 1..20: mol_type = other DNA
acctgcagcaagaatgattg

SEQ ID NO: 15751 - DNA, 20 bp, synthetic construct
  misc_feature 1..20: note = chemically synthesized
  source 1..20: mol_type = other DNA
tgcagttaaacaaaaaatac

SEQ ID NO: 15752 - DNA, 20 bp, synthetic construct
  misc_feature 1..20: note = chemically synthesized
  source 1..20: mol_type = other DNA
aaaatactagcaaacatttc

SEQ ID NO: 15753 - DNA, 20 bp, synthetic construct
  misc_feature 1..20: note = chemically synthesized
  source 1..20: mol_type = other DNA
aatactagcaaacatttcta

SEQ ID NO: 15754 - DNA, 20 bp, synthetic construct
  misc_feature 1..20: note = chemically synthesized
  source 1..20: mol_type = other DNA
actagcaaacatttctagag

SEQ ID NO: 15755 - DNA, 20 bp, synthetic construct
  misc_feature 1..20: note = chemically synthesized
  source 1..20: mol_type = other DNA
gcaaacatttctagagtagt

SEQ ID NO: 15756 - DNA, 20 bp, synthetic construct
  misc_feature 1..20: note = chemically synthesized
  source 1..20: mol_type = other DNA
ctagagtagttagcatttat

SEQ ID NO: 15757 - DNA, 20 bp, synthetic construct
  misc_feature 1..20: note = chemically synthesized
  source 1..20: mol_type = other DNA
tttgcatgtattaactcact

SEQ ID NO: 15758 - DNA, 20 bp, synthetic construct
  misc_feature 1..20: note = chemically synthesized
  source 1..20: mol_type = other DNA
ttgcatgtattaactcactc

SEQ ID NO: 15759 - DNA, 20 bp, synthetic construct
  misc_feature 1..20: note = chemically synthesized
  source 1..20: mol_type = other DNA
gtattaactcactcgggctg

SEQ ID NO: 15760 - DNA, 20 bp, synthetic construct
  misc_feature 1..20: note = chemically synthesized
  source 1..20: mol_type = other DNA
gggctgcagaacaatcttat

SEQ ID NO: 15761 - DNA, 20 bp, synthetic construct
  misc_feature 1..20: note = chemically synthesized
  source 1..20: mol_type = other DNA
tgtaatcatgcttataatcc

SEQ ID NO: 15762 - DNA, 20 bp, synthetic construct
  misc_feature 1..20: note = chemically synthesized
  source 1..20: mol_type = other DNA
tgcttataatcccagcactt

SEQ ID NO: 15763 - DNA, 20 bp, synthetic construct
  misc_feature 1..20: note = chemically synthesized
  source 1..20: mol_type = other DNA
ttataatcccagcactttgg

SEQ ID NO: 15764 - DNA, 20 bp, synthetic construct
  misc_feature 1..20: note = chemically synthesized
  source 1..20: mol_type = other DNA
tataatcccagcactttgga

SEQ ID NO: 15765 - DNA, 20 bp, synthetic construct
  misc_feature 1..20: note = chemically synthesized
  source 1..20: mol_type = other DNA
tcccagcactttggaaggct

SEQ ID NO: 15766 - DNA, 20 bp, synthetic construct
  misc_feature 1..20: note = chemically synthesized
  source 1..20: mol_type = other DNA
cccagcactttggaaggctg

SEQ ID NO: 15767 - DNA, 20 bp, synthetic construct
  misc_feature 1..20: note = chemically synthesized
  source 1..20: mol_type = other DNA
agcactttggaaggctgagg

SEQ ID NO: 15768 - DNA, 20 bp, synthetic construct
  misc_feature 1..20: note = chemically synthesized
  source 1..20: mol_type = other DNA
gcactttggaaggctgaggt

SEQ ID NO: 15769 - DNA, 20 bp, synthetic construct
  misc_feature 1..20: note = chemically synthesized
  source 1..20: mol_type = other DNA
ctttggaaggctgaggtggg

SEQ ID NO: 15770 - DNA, 20 bp, synthetic construct
  misc_feature 1..20: note = chemically synthesized
  source 1..20: mol_type = other DNA
ctgaggtgggcagattgctt

SEQ ID NO: 15771 - DNA, 20 bp, synthetic construct
  misc_feature 1..20: note = chemically synthesized
  source 1..20: mol_type = other DNA
tgggcagattgcttgagctc

SEQ ID NO: 15772 - DNA, 20 bp, synthetic construct
  misc_feature 1..20: note = chemically synthesized
  source 1..20: mol_type = other DNA
ggcagattgcttgagctccg

SEQ ID NO: 15773 - DNA, 20 bp, synthetic construct
  misc_feature 1..20: note = chemically synthesized
  source 1..20: mol_type = other DNA
ttgcttgagctccggagtct

SEQ ID NO: 15774 - DNA, 20 bp, synthetic construct
  misc_feature 1..20: note = chemically synthesized
  source 1..20: mol_type = other DNA
ctaccaaaaatacaaaaaat

SEQ ID NO: 15775 - DNA, 20 bp, synthetic construct
  misc_feature 1..20: note = chemically synthesized
  source 1..20: mol_type = other DNA
caaaaatacaaaaaattagc

SEQ ID NO: 15776 - DNA, 20 bp, synthetic construct
  misc_feature 1..20: note = chemically synthesized
  source 1..20: mol_type = other DNA
aaaaatacaaaaaattagcg

SEQ ID NO: 15777 - DNA, 20 bp, synthetic construct
  misc_feature 1..20: note = chemically synthesized
  source 1..20: mol_type = other DNA
tacaaaaaattagcgaggta

SEQ ID NO: 15778 - DNA, 20 bp, synthetic construct
  misc_feature 1..20: note = chemically synthesized
  source 1..20: mol_type = other DNA
aaaaaattagcgaggtatgg

SEQ ID NO: 15779 - DNA, 20 bp, synthetic construct
  misc_feature 1..20: note = chemically synthesized
  source 1..20: mol_type = other DNA
ggtatggtggtgtgtacctg

SEQ ID NO: 15780 - DNA, 20 bp, synthetic construct
  misc_feature 1..20: note = chemically synthesized
  source 1..20: mol_type = other DNA
gtggtgtgtacctgtggttc

SEQ ID NO: 15781 - DNA, 20 bp, synthetic construct
  misc_feature 1..20: note = chemically synthesized
  source 1..20: mol_type = other DNA
tacctgtggttccagctact

SEQ ID NO: 15782 - DNA, 20 bp, synthetic construct
  misc_feature 1..20: note = chemically synthesized
  source 1..20: mol_type = other DNA
acctgtggttccagctactc

SEQ ID NO: 15783 - DNA, 20 bp, synthetic construct
  misc_feature 1..20: note = chemically synthesized
  source 1..20: mol_type = other DNA
ttccagctactcaggatgtt

SEQ ID NO: 15784 - DNA, 20 bp, synthetic construct
  misc_feature 1..20: note = chemically synthesized
  source 1..20: mol_type = other DNA
tccagctactcaggatgttg

SEQ ID NO: 15785 - DNA, 20 bp, synthetic construct
  misc_feature 1..20: note = chemically synthesized
  source 1..20: mol_type = other DNA
agctactcaggatgttgagg

SEQ ID NO: 15786 - DNA, 20 bp, synthetic construct
  misc_feature 1..20: note = chemically synthesized
  source 1..20: mol_type = other DNA
gctactcaggatgttgaggt

SEQ ID NO: 15787 - DNA, 20 bp, synthetic construct
  misc_feature 1..20: note = chemically synthesized
  source 1..20: mol_type = other DNA
tactcaggatgttgaggtgg

SEQ ID NO: 15788 - DNA, 20 bp, synthetic construct
  misc_feature 1..20: note = chemically synthesized
  source 1..20: mol_type = other DNA
actcaggatgttgaggtggg

SEQ ID NO: 15789 - DNA, 20 bp, synthetic construct
  misc_feature 1..20: note = chemically synthesized
  source 1..20: mol_type = other DNA
ttgaggtgggaggaccgctt

SEQ ID NO: 15790 - DNA, 20 bp, synthetic construct
  misc_feature 1..20: note = chemically synthesized
  source 1..20: mol_type = other DNA
gtgggaggaccgcttgagcc

SEQ ID NO: 15791 - DNA, 20 bp, synthetic construct
  misc_feature 1..20: note = chemically synthesized
  source 1..20: mol_type = other DNA
tgggaggaccgcttgagcct

SEQ ID NO: 15792 - DNA, 20 bp, synthetic construct
  misc_feature 1..20: note = chemically synthesized
  source 1..20: mol_type = other DNA
gaggaccgcttgagcctggg

SEQ ID NO: 15793 - DNA, 20 bp, synthetic construct
  misc_feature 1..20: note = chemically synthesized
  source 1..20: mol_type = other DNA
cgcttgagcctgggaagtgc

SEQ ID NO: 15794 - DNA, 20 bp, synthetic construct
  misc_feature 1..20: note = chemically synthesized
  source 1..20: mol_type = other DNA
agcctgggaagtgcaagttg

SEQ ID NO: 15795 - DNA, 20 bp, synthetic construct
  misc_feature 1..20: note = chemically synthesized
  source 1..20: mol_type = other DNA
tgggaagtgcaagttgcagt

SEQ ID NO: 15796 - DNA, 20 bp, synthetic construct
  misc_feature 1..20: note = chemically synthesized
  source 1..20: mol_type = other DNA
agtgcaagttgcagtgagcc

SEQ ID NO: 15797 - DNA, 20 bp, synthetic construct
  misc_feature 1..20: note = chemically synthesized
  source 1..20: mol_type = other DNA
tttgccactacactcccatt

SEQ ID NO: 15798 - DNA, 20 bp, synthetic construct
  misc_feature 1..20: note = chemically synthesized
  source 1..20: mol_type = other DNA
ttgccactacactcccattt

SEQ ID NO: 15799 - DNA, 20 bp, synthetic construct
  misc_feature 1..20: note = chemically synthesized
  source 1..20: mol_type = other DNA
ctacactcccatttgggtga

SEQ ID NO: 15800 - DNA, 20 bp, synthetic construct
  misc_feature 1..20: note = chemically synthesized
  source 1..20: mol_type = other DNA
acactcccatttgggtgaca

SEQ ID NO: 15801 - DNA, 20 bp, synthetic construct
  misc_feature 1..20: note = chemically synthesized
  source 1..20: mol_type = other DNA
tcccatttgggtgacagagt

SEQ ID NO: 15802 - DNA, 20 bp, synthetic construct
  misc_feature 1..20: note = chemically synthesized
  source 1..20: mol_type = other DNA
ttaaaaaaccctccatttta

SEQ ID NO: 15803 - DNA, 20 bp, synthetic construct
  misc_feature 1..20: note = chemically synthesized
  source 1..20: mol_type = other DNA
aaccctccattttacagatg

SEQ ID NO: 15804 - DNA, 20 bp, synthetic construct
  misc_feature 1..20: note = chemically synthesized
  source 1..20: mol_type = other DNA
attttacagatgaagaaact

SEQ ID NO: 15805 - DNA, 20 bp, synthetic construct
  misc_feature 1..20: note = chemically synthesized
  source 1..20: mol_type = other DNA
aactgagtcatacaactact

SEQ ID NO: 15806 - DNA, 20 bp, synthetic construct
  misc_feature 1..20: note = chemically synthesized
  source 1..20: mol_type = other DNA
ctgagtcatacaactactaa

SEQ ID NO: 15807 - DNA, 20 bp, synthetic construct
  misc_feature 1..20: note = chemically synthesized
  source 1..20: mol_type = other DNA
tacaactactaagagaaact

SEQ ID NO: 15808 - DNA, 20 bp, synthetic construct
  misc_feature 1..20: note = chemically synthesized
  source 1..20: mol_type = other DNA
aaactgagtcactaatcact

SEQ ID NO: 15809 - DNA, 20 bp, synthetic construct
  misc_feature 1..20: note = chemically synthesized
  source 1..20: mol_type = other DNA
aactgagtcactaatcactc

SEQ ID NO: 15810 - DNA, 20 bp, synthetic construct
  misc_feature 1..20: note = chemically synthesized
  source 1..20: mol_type = other DNA
tgagtcactaatcactcagg

SEQ ID NO: 15811 - DNA, 20 bp, synthetic construct
  misc_feature 1..20: note = chemically synthesized
  source 1..20: mol_type = other DNA
cactaatcactcaggtggtc

SEQ ID NO: 15812 - DNA, 20 bp, synthetic construct
  misc_feature 1..20: note = chemically synthesized
  source 1..20: mol_type = other DNA
tcactcaggtggtctggctc

SEQ ID NO: 15813 - DNA, 20 bp, synthetic construct
  misc_feature 1..20: note = chemically synthesized
  source 1..20: mol_type = other DNA
atctctgctctatactgccc

SEQ ID NO: 15814 - DNA, 20 bp, synthetic construct
  misc_feature 1..20: note = chemically synthesized
  source 1..20: mol_type = other DNA
tactgcccaagacttttata

SEQ ID NO: 15815 - DNA, 20 bp, synthetic construct
  misc_feature 1..20: note = chemically synthesized
  source 1..20: mol_type = other DNA
cccaagacttttataaagtc

SEQ ID NO: 15816 - DNA, 20 bp, synthetic construct
  misc_feature 1..20: note = chemically synthesized
  source 1..20: mol_type = other DNA
ccaagacttttataaagtca

SEQ ID NO: 15817 - DNA, 20 bp, synthetic construct
  misc_feature 1..20: note = chemically synthesized
  source 1..20: mol_type = other DNA
caagacttttataaagtcaa

SEQ ID NO: 15818 - DNA, 20 bp, synthetic construct
  misc_feature 1..20: note = chemically synthesized
  source 1..20: mol_type = other DNA
cttttataaagtcaagggtt

SEQ ID NO: 15819 - DNA, 20 bp, synthetic construct
  misc_feature 1..20: note = chemically synthesized
  source 1..20: mol_type = other DNA
aagggttgagtcactgaaat

SEQ ID NO: 15820 - DNA, 20 bp, synthetic construct
  misc_feature 1..20: note = chemically synthesized
  source 1..20: mol_type = other DNA
gagtcactgaaatgagttat

SEQ ID NO: 15821 - DNA, 20 bp, synthetic construct
  misc_feature 1..20: note = chemically synthesized
  source 1..20: mol_type = other DNA
agtcactgaaatgagttatt

SEQ ID NO: 15822 - DNA, 20 bp, synthetic construct
  misc_feature 1..20: note = chemically synthesized
  source 1..20: mol_type = other DNA
actgaaatgagttattggga

SEQ ID NO: 15823 - DNA, 20 bp, synthetic construct
  misc_feature 1..20: note = chemically synthesized
  source 1..20: mol_type = other DNA
gagttattgggatggctgtg

SEQ ID NO: 15824 - DNA, 20 bp, synthetic construct
  misc_feature 1..20: note = chemically synthesized
  source 1..20: mol_type = other DNA
agttattgggatggctgtgt

SEQ ID NO: 15825 - DNA, 20 bp, synthetic construct
  misc_feature 1..20: note = chemically synthesized
  source 1..20: mol_type = other DNA
tattgggatggctgtgtggg

SEQ ID NO: 15826 - DNA, 20 bp, synthetic construct
  misc_feature 1..20: note = chemically synthesized
  source 1..20: mol_type = other DNA
attgggatggctgtgtggga

SEQ ID NO: 15827 - DNA, 20 bp, synthetic construct
  misc_feature 1..20: note = chemically synthesized
  source 1..20: mol_type = other DNA
ttgggatggctgtgtgggaa

SEQ ID NO: 15828 - DNA, 20 bp, synthetic construct
  misc_feature 1..20: note = chemically synthesized
  source 1..20: mol_type = other DNA
ggctgtgtgggaagggtgct

SEQ ID NO: 15829 - DNA, 20 bp, synthetic construct
  misc_feature 1..20: note = chemically synthesized
  source 1..20: mol_type = other DNA
gggtgctaagttctttccta

SEQ ID NO: 15830 - DNA, 20 bp, synthetic construct
  misc_feature 1..20: note = chemically synthesized
  source 1..20: mol_type = other DNA
ggtgctaagttctttcctaa

SEQ ID NO: 15831 - DNA, 20 bp, synthetic construct
  misc_feature 1..20: note = chemically synthesized
  source 1..20: mol_type = other DNA
gttctttcctaaaggtatgt

SEQ ID NO: 15832 - DNA, 20 bp, synthetic construct
  misc_feature 1..20: note = chemically synthesized
  source 1..20: mol_type = other DNA
taaaggtatgtgagaataca

SEQ ID NO: 15833 - DNA, 20 bp, synthetic construct
  misc_feature 1..20: note = chemically synthesized
  source 1..20: mol_type = other DNA
aaaggtatgtgagaatacaa

SEQ ID NO: 15834 - DNA, 20 bp, synthetic construct
  misc_feature 1..20: note = chemically synthesized
  source 1..20: mol_type = other DNA
gtatgtgagaatacaaagga

SEQ ID NO: 15835 - DNA, 20 bp, synthetic construct
  misc_feature 1..20: note = chemically synthesized
  source 1..20: mol_type = other DNA
tgtgagaatacaaaggaaag

SEQ ID NO: 15836 - DNA, 20 bp, synthetic construct
  misc_feature 1..20: note = chemically synthesized
  source 1..20: mol_type = other DNA
tcctttttacacacgtgaac

SEQ ID NO: 15837 - DNA, 20 bp, synthetic construct
  misc_feature 1..20: note = chemically synthesized
  source 1..20: mol_type = other DNA
gtgcatgcaaatctgacact

SEQ ID NO: 15838 - DNA, 20 bp, synthetic construct
  misc_feature 1..20: note = chemically synthesized
  source 1..20: mol_type = other DNA
catgcaaatctgacactcag

SEQ ID NO: 15839 - DNA, 20 bp, synthetic construct
  misc_feature 1..20: note = chemically synthesized
  source 1..20: mol_type = other DNA
atgcaaatctgacactcagt

SEQ ID NO: 15840 - DNA, 20 bp, synthetic construct
  misc_feature 1..20: note = chemically synthesized
  source 1..20: mol_type = other DNA
aatctgacactcagtgggcc

SEQ ID NO: 15841 - DNA, 20 bp, synthetic construct
  misc_feature 1..20: note = chemically synthesized
  source 1..20: mol_type = other DNA
atctgacactcagtgggcct

SEQ ID NO: 15842 - DNA, 20 bp, synthetic construct
  misc_feature 1..20: note = chemically synthesized
  source 1..20: mol_type = other DNA
acactcagtgggcctgggtg

SEQ ID NO: 15843 - DNA, 20 bp, synthetic construct
  misc_feature 1..20: note = chemically synthesized
  source 1..20: mol_type = other DNA
cactcagtgggcctgggtga

SEQ ID NO: 15844 - DNA, 20 bp, synthetic construct
  misc_feature 1..20: note = chemically synthesized
  source 1..20: mol_type = other DNA
cagtgggcctgggtgaaggt

SEQ ID NO: 15845 - DNA, 20 bp, synthetic construct
  misc_feature 1..20: note = chemically synthesized
  source 1..20: mol_type = other DNA
tgagaattttattgctgaat

SEQ ID NO: 15846 - DNA, 20 bp, synthetic construct
  misc_feature 1..20: note = chemically synthesized
  source 1..20: mol_type = other DNA
agaattttattgctgaatga

SEQ ID NO: 15847 - DNA, 20 bp, synthetic construct
  misc_feature 1..20: note = chemically synthesized
  source 1..20: mol_type = other DNA
tattgctgaatgagagcctc

SEQ ID NO: 15848 - DNA, 20 bp, synthetic construct
  misc_feature 1..20: note = chemically synthesized
  source 1..20: mol_type = other DNA
attgctgaatgagagcctct

SEQ ID NO: 15849 - DNA, 20 bp, synthetic construct
  misc_feature 1..20: note = chemically synthesized
  source 1..20: mol_type = other DNA
ttgctgaatgagagcctctg

SEQ ID NO: 15850 - DNA, 20 bp, synthetic construct
  misc_feature 1..20: note = chemically synthesized
  source 1..20: mol_type = other DNA
agcctctggggacatcttgc

SEQ ID NO: 15851 - DNA, 20 bp, synthetic construct
  misc_feature 1..20: note = chemically synthesized
  source 1..20: mol_type = other DNA
gggacatcttgccagtcaat

SEQ ID NO: 15852 - DNA, 20 bp, synthetic construct
  misc_feature 1..20: note = chemically synthesized
  source 1..20: mol_type = other DNA
tcttgccagtcaatgagtct

SEQ ID NO: 15853 - DNA, 20 bp, synthetic construct
  misc_feature 1..20: note = chemically synthesized
  source 1..20: mol_type = other DNA
cttgccagtcaatgagtctc

SEQ ID NO: 15854 - DNA, 20 bp, synthetic construct
  misc_feature 1..20: note = chemically synthesized
  source 1..20: mol_type = other DNA
ctcaggttcaatttccttct

SEQ ID NO: 15855 - DNA, 20 bp, synthetic construct
  misc_feature 1..20: note = chemically synthesized
  source 1..20: mol_type = other DNA
ttcaatttccttctcagtct

SEQ ID NO: 15856 - DNA, 20 bp, synthetic construct
  misc_feature 1..20: note = chemically synthesized
  source 1..20: mol_type = other DNA
caatttccttctcagtcttg

SEQ ID NO: 15857 - DNA, 20 bp, synthetic construct
  misc_feature 1..20: note = chemically synthesized
  source 1..20: mol_type = other DNA
ccttctcagtcttggagtaa

SEQ ID NO: 15858 - DNA, 20 bp, synthetic construct
  misc_feature 1..20: note = chemically synthesized
  source 1..20: mol_type = other DNA
tctcagtcttggagtaacag

SEQ ID NO: 15859 - DNA, 20 bp, synthetic construct
  misc_feature 1..20: note = chemically synthesized
  source 1..20: mol_type = other DNA
aagctcatgcatttaataaa

SEQ ID NO: 15860 - DNA, 20 bp, synthetic construct
  misc_feature 1..20: note = chemically synthesized
  source 1..20: mol_type = other DNA
cggaaattttgtattgaaat

SEQ ID NO: 15861 - DNA, 20 bp, synthetic construct
  misc_feature 1..20: note = chemically synthesized
  source 1..20: mol_type = other DNA
gaaattttgtattgaaatga

SEQ ID NO: 15862 - DNA, 20 bp, synthetic construct
  misc_feature 1..20: note = chemically synthesized
  source 1..20: mol_type = other DNA
tgtattgaaatgagagccat

SEQ ID NO: 15863 - DNA, 20 bp, synthetic construct
  misc_feature 1..20: note = chemically synthesized
  source 1..20: mol_type = other DNA
ccattggaaatcatttactc

SEQ ID NO: 15864 - DNA, 20 bp, synthetic construct
  misc_feature 1..20: note = chemically synthesized
  source 1..20: mol_type = other DNA
tccagactcctacttataaa

SEQ ID NO: 15865 - DNA, 20 bp, synthetic construct
  misc_feature 1..20: note = chemically synthesized
  source 1..20: mol_type = other DNA
cagactcctacttataaaaa

SEQ ID NO: 15866 - DNA, 20 bp, synthetic construct
  misc_feature 1..20: note = chemically synthesized
  source 1..20: mol_type = other DNA
tacttataaaaagagaaact

SEQ ID NO: 15867 - DNA, 20 bp, synthetic construct
  misc_feature 1..20: note = chemically synthesized
  source 1..20: mol_type = other DNA
acttataaaaagagaaactg

SEQ ID NO: 15868 - DNA, 20 bp, synthetic construct
  misc_feature 1..20: note = chemically synthesized
  source 1..20: mol_type = other DNA
taaaaagagaaactgaggct

SEQ ID NO: 15869 - DNA, 20 bp, synthetic construct
  misc_feature 1..20: note = chemically synthesized
  source 1..20: mol_type = other DNA
aaaagagaaactgaggctca

SEQ ID NO: 15870 - DNA, 20 bp, synthetic construct
  misc_feature 1..20: note = chemically synthesized
  source 1..20: mol_type = other DNA
agagaaactgaggctcagag

SEQ ID NO: 15871 - DNA, 20 bp, synthetic construct
  misc_feature 1..20: note = chemically synthesized
  source 1..20: mol_type = other DNA
gagaaactgaggctcagaga

SEQ ID NO: 15872 - DNA, 20 bp, synthetic construct
  misc_feature 1..20: note = chemically synthesized
  source 1..20: mol_type = other DNA
agaaactgaggctcagagaa

SEQ ID NO: 15873 - DNA, 20 bp, synthetic construct
  misc_feature 1..20: note = chemically synthesized
  source 1..20: mol_type = other DNA
aactgaggctcagagaaggg

SEQ ID NO: 15874 - DNA, 20 bp, synthetic construct
  misc_feature 1..20: note = chemically synthesized
  source 1..20: mol_type = other DNA
actgaggctcagagaagggt

SEQ ID NO: 15875 - DNA, 20 bp, synthetic construct
  misc_feature 1..20: note = chemically synthesized
  source 1..20: mol_type = other DNA
ctgaggctcagagaagggtg

SEQ ID NO: 15876 - DNA, 20 bp, synthetic construct
  misc_feature 1..20: note = chemically synthesized
  source 1..20: mol_type = other DNA
gagaagggtggggactttct

SEQ ID NO: 15877 - DNA, 20 bp, synthetic construct
  misc_feature 1..20: note = chemically synthesized
  source 1..20: mol_type = other DNA
gggactttctcagtatgaca

SEQ ID NO: 15878 - DNA, 20 bp, synthetic construct
  misc_feature 1..20: note = chemically synthesized
  source 1..20: mol_type = other DNA
cagtatgacatggaaatgat

SEQ ID NO: 15879 - DNA, 20 bp, synthetic construct
  misc_feature 1..20: note = chemically synthesized
  source 1..20: mol_type = other DNA
agtatgacatggaaatgatc

SEQ ID NO: 15880 - DNA, 20 bp, synthetic construct
  misc_feature 1..20: note = chemically synthesized
  source 1..20: mol_type = other DNA
gacatggaaatgatcaggct

SEQ ID NO: 15881 - DNA, 20 bp, synthetic construct
  misc_feature 1..20: note = chemically synthesized
  source 1..20: mol_type = other DNA
aatgatcaggcttggattca

SEQ ID NO: 15882 - DNA, 20 bp, synthetic construct
  misc_feature 1..20: note = chemically synthesized
  source 1..20: mol_type = other DNA
aaagctcctgactttctgtc

SEQ ID NO: 15883 - DNA, 20 bp, synthetic construct
  misc_feature 1..20: note = chemically synthesized
  source 1..20: mol_type = other DNA
ctttctgtctagtgtatgtg

SEQ ID NO: 15884 - DNA, 20 bp, synthetic construct
  misc_feature 1..20: note = chemically synthesized
  source 1..20: mol_type = other DNA
ctgtctagtgtatgtgcagt

SEQ ID NO: 15885 - DNA, 20 bp, synthetic construct
  misc_feature 1..20: note = chemically synthesized
  source 1..20: mol_type = other DNA
gccccttttcctctaactga

SEQ ID NO: 15886 - DNA, 20 bp, synthetic construct
  misc_feature 1..20: note = chemically synthesized
  source 1..20: mol_type = other DNA
ccttttcctctaactgaaag

SEQ ID NO: 15887 - DNA, 20 bp, synthetic construct
  misc_feature 1..20: note = chemically synthesized
  source 1..20: mol_type = other DNA
cttttcctctaactgaaaga

SEQ ID NO: 15888 - DNA, 20 bp, synthetic construct
  misc_feature 1..20: note = chemically synthesized
  source 1..20: mol_type = other DNA
ctgaaagaaggaaaaaaaaa

SEQ ID NO: 15889 - DNA, 20 bp, synthetic construct
  misc_feature 1..20: note = chemically synthesized
  source 1..20: mol_type = other DNA
ggaacccaaaatattctaca

SEQ ID NO: 15890 - DNA, 20 bp, synthetic construct
  misc_feature 1..20: note = chemically synthesized
  source 1..20: mol_type = other DNA
tctacatagtttccatgtca

SEQ ID NO: 15891 - DNA, 20 bp, synthetic construct
  misc_feature 1..20: note = chemically synthesized
  source 1..20: mol_type = other DNA
catagtttccatgtcacagc

SEQ ID NO: 15892 - DNA, 20 bp, synthetic construct
  misc_feature 1..20: note = chemically synthesized
  source 1..20: mol_type = other DNA
atagtttccatgtcacagcc

SEQ ID NO: 15893 - DNA, 20 bp, synthetic construct
  misc_feature 1..20: note = chemically synthesized
  source 1..20: mol_type = other DNA
tagtttccatgtcacagcca

SEQ ID NO: 15894 - DNA, 20 bp, synthetic construct
  misc_feature 1..20: note = chemically synthesized
  source 1..20: mol_type = other DNA
ttccatgtcacagccagggc

SEQ ID NO: 15895 - DNA, 20 bp, synthetic construct
  misc_feature 1..20: note = chemically synthesized
  source 1..20: mol_type = other DNA
tccatgtcacagccagggct

SEQ ID NO: 15896 - DNA, 20 bp, synthetic construct
  misc_feature 1..20: note = chemically synthesized
  source 1..20: mol_type = other DNA
atgtcacagccagggctggg

SEQ ID NO: 15897 - DNA, 20 bp, synthetic construct
  misc_feature 1..20: note = chemically synthesized
  source 1..20: mol_type = other DNA
tatcatttaaatgcataaat

SEQ ID NO: 15898 - DNA, 20 bp, synthetic construct
  misc_feature 1..20: note = chemically synthesized
  source 1..20: mol_type = other DNA
ataaataagcaaaccctgct

SEQ ID NO: 15899 - DNA, 20 bp, synthetic construct
  misc_feature 1..20: note = chemically synthesized
  source 1..20: mol_type = other DNA
taaataagcaaaccctgctc

SEQ ID NO: 15900 - DNA, 20 bp, synthetic construct
  misc_feature 1..20: note = chemically synthesized
  source 1..20: mol_type = other DNA
aagcaaaccctgctcgggaa

SEQ ID NO: 15901 - DNA, 20 bp, synthetic construct
  misc_feature 1..20: note = chemically synthesized
  source 1..20: mol_type = other DNA
agcaaaccctgctcgggaat

SEQ ID NO: 15902 - DNA, 20 bp, synthetic construct
  misc_feature 1..20: note = chemically synthesized
  source 1..20: mol_type = other DNA
caaaccctgctcgggaatgg

SEQ ID NO: 15903 - DNA, 20 bp, synthetic construct
  misc_feature 1..20: note = chemically synthesized
  source 1..20: mol_type = other DNA
aaaccctgctcgggaatggg

SEQ ID NO: 15904 - DNA, 20 bp, synthetic construct
  misc_feature 1..20: note = chemically synthesized
  source 1..20: mol_type = other DNA
aaccctgctcgggaatggga

SEQ ID NO: 15905 - DNA, 20 bp, synthetic construct
  misc_feature 1..20: note = chemically synthesized
  source 1..20: mol_type = other DNA
ccctgctcgggaatgggagg

SEQ ID NO: 15906 - DNA, 20 bp, synthetic construct
  misc_feature 1..20: note = chemically synthesized
  source 1..20: mol_type = other DNA
ctgctcgggaatgggaggga

SEQ ID NO: 15907 - DNA, 20 bp, synthetic construct
  misc_feature 1..20: note = chemically synthesized
  source 1..20: mol_type = other DNA
ggaatgggagggagagtctc

SEQ ID NO: 15908 - DNA, 20 bp, synthetic construct
  misc_feature 1..20: note = chemically synthesized
  source 1..20: mol_type = other DNA
aatgggagggagagtctctg

SEQ ID NO: 15909 - DNA, 20 bp, synthetic construct
  misc_feature 1..20: note = chemically synthesized
  source 1..20: mol_type = other DNA
ctctggagtccaccccttct

SEQ ID NO: 15910 - DNA, 20 bp, synthetic construct
  misc_feature 1..20: note = chemically synthesized
  source 1..20: mol_type = other DNA
agtccaccccttctcggccc

SEQ ID NO: 15911 - DNA, 20 bp, synthetic construct
  misc_feature 1..20: note = chemically synthesized
  source 1..20: mol_type = other DNA
ccttctcggccctggctctg

SEQ ID NO: 15912 - DNA, 20 bp, synthetic construct
  misc_feature 1..20: note = chemically synthesized
  source 1..20: mol_type = other DNA
ctcggccctggctctgcaga

SEQ ID NO: 15913 - DNA, 20 bp, synthetic construct
  misc_feature 1..20: note = chemically synthesized
  source 1..20: mol_type = other DNA
ctctgcagatagtgctatca

SEQ ID NO: 15914 - DNA, 20 bp, synthetic construct
  misc_feature 1..20: note = chemically synthesized
  source 1..20: mol_type = other DNA
tagtgctatcaaagccctga

SEQ ID NO: 15915 - DNA, 20 bp, synthetic construct
  misc_feature 1..20: note = chemically synthesized
  source 1..20: mol_type = other DNA
gtgctatcaaagccctgaca

SEQ ID NO: 15916 - DNA, 20 bp, synthetic construct
  misc_feature 1..20: note = chemically synthesized
  source 1..20: mol_type = other DNA
gacagagccctgcccattgc

SEQ ID NO: 15917 - DNA, 20 bp, synthetic construct
  misc_feature 1..20: note = chemically synthesized
  source 1..20: mol_type = other DNA
acagagccctgcccattgct

SEQ ID NO: 15918 - DNA, 20 bp, synthetic construct
  misc_feature 1..20: note = chemically synthesized
  source 1..20: mol_type = other DNA
ccctgcccattgctgggcct

SEQ ID NO: 15919 - DNA, 20 bp, synthetic construct
  misc_feature 1..20: note = chemically synthesized
  source 1..20: mol_type = other DNA
ctgcccattgctgggccttg

SEQ ID NO: 15920 - DNA, 20 bp, synthetic construct
  misc_feature 1..20: note = chemically synthesized
  source 1..20: mol_type = other DNA
ccattgctgggccttggagt

SEQ ID NO: 15921 - DNA, 20 bp, synthetic construct
  misc_feature 1..20: note = chemically synthesized
  source 1..20: mol_type = other DNA
tgctgggccttggagtgagt

SEQ ID NO: 15922 - DNA, 20 bp, synthetic construct
  misc_feature 1..20: note = chemically synthesized
  source 1..20: mol_type = other DNA
ggccttggagtgagtcagcc

SEQ ID NO: 15923 - DNA, 20 bp, synthetic construct
  misc_feature 1..20: note = chemically synthesized
  source 1..20: mol_type = other DNA
cttggagtgagtcagcctag

SEQ ID NO: 15924 - DNA, 20 bp, synthetic construct
  misc_feature 1..20: note = chemically synthesized
  source 1..20: mol_type = other DNA
tggagtgagtcagcctagta

SEQ ID NO: 15925 - DNA, 20 bp, synthetic construct
  misc_feature 1..20: note = chemically synthesized
  source 1..20: mol_type = other DNA
gagtgagtcagcctagtaga

SEQ ID NO: 15926 - DNA, 20 bp, synthetic construct
  misc_feature 1..20: note = chemically synthesized
  source 1..20: mol_type = other DNA
agtgagtcagcctagtagag

SEQ ID NO: 15927 - DNA, 20 bp, synthetic construct
  misc_feature 1..20: note = chemically synthesized
  source 1..20: mol_type = other DNA
gagtcagcctagtagagagg

SEQ ID NO: 15928 - DNA, 20 bp, synthetic construct
  misc_feature 1..20: note = chemically synthesized
  source 1..20: mol_type = other DNA
agtcagcctagtagagaggc

SEQ ID NO: 15929 - DNA, 20 bp, synthetic construct
  misc_feature 1..20: note = chemically synthesized
  source 1..20: mol_type = other DNA
gtcagcctagtagagaggca

SEQ ID NO: 15930 - DNA, 20 bp, synthetic construct
  misc_feature 1..20: note = chemically synthesized
  source 1..20: mol_type = other DNA
gcctagtagagaggcagggc

SEQ ID NO: 15931 - DNA, 20 bp, synthetic construct
  misc_feature 1..20: note = chemically synthesized
  source 1..20: mol_type = other DNA
aggcagggcaagccatctca

SEQ ID NO: 15932 - DNA, 20 bp, synthetic construct
  misc_feature 1..20: note = chemically synthesized
  source 1..20: mol_type = other DNA
caagccatctcatagctgct

SEQ ID NO: 15933 - DNA, 20 bp, synthetic construct
  misc_feature 1..20: note = chemically synthesized
  source 1..20: mol_type = other DNA
gccatctcatagctgctgag

SEQ ID NO: 15934 - DNA, 20 bp, synthetic construct
  misc_feature 1..20: note = chemically synthesized
  source 1..20: mol_type = other DNA
ccatctcatagctgctgagt

SEQ ID NO: 15935 - DNA, 20 bp, synthetic construct
  misc_feature 1..20: note = chemically synthesized
  source 1..20: mol_type = other DNA
atctcatagctgctgagtgg

SEQ ID NO: 15936 - DNA, 20 bp, synthetic construct
  misc_feature 1..20: note = chemically synthesized
  source 1..20: mol_type = other DNA
ctcatagctgctgagtggga

SEQ ID NO: 15937 - DNA, 20 bp, synthetic construct
  misc_feature 1..20: note = chemically synthesized
  source 1..20: mol_type = other DNA
catagctgctgagtgggaga

SEQ ID NO: 15938 - DNA, 20 bp, synthetic construct
  misc_feature 1..20: note = chemically synthesized
  source 1..20: mol_type = other DNA
ctgctgagtgggagagagaa

SEQ ID NO: 15939 - DNA, 20 bp, synthetic construct
  misc_feature 1..20: note = chemically synthesized
  source 1..20: mol_type = other DNA
tgctgagtgggagagagaaa

SEQ ID NO: 15940 - DNA, 20 bp, synthetic construct
  misc_feature 1..20: note = chemically synthesized
  source 1..20: mol_type = other DNA
gctgagtgggagagagaaaa

SEQ ID NO: 15941 - DNA, 20 bp, synthetic construct
  misc_feature 1..20: note = chemically synthesized
  source 1..20: mol_type = other DNA
gggctcattgtctataaact

SEQ ID NO: 15942 - DNA, 20 bp, synthetic construct
  misc_feature 1..20: note = chemically synthesized
  source 1..20: mol_type = other DNA
ggctcattgtctataaactc

SEQ ID NO: 15943 - DNA, 20 bp, synthetic construct
  misc_feature 1..20: note = chemically synthesized
  source 1..20: mol_type = other DNA
ttgtctataaactcaggtca

SEQ ID NO: 15944 - DNA, 20 bp, synthetic construct
  misc_feature 1..20: note = chemically synthesized
  source 1..20: mol_type = other DNA
gctattcttattctcacact

SEQ ID NO: 15945 - DNA, 20 bp, synthetic construct
  misc_feature 1..20: note = chemically synthesized
  source 1..20: mol_type = other DNA
cttattctcacactaagaaa

SEQ ID NO: 15946 - DNA, 20 bp, synthetic construct
  misc_feature 1..20: note = chemically synthesized
  source 1..20: mol_type = other DNA
ctcacactaagaaaaagaat

SEQ ID NO: 15947 - DNA, 20 bp, synthetic construct
  misc_feature 1..20: note = chemically synthesized
  source 1..20: mol_type = other DNA
ctgcgtcccctcttgtgtac

SEQ ID NO: 15948 - DNA, 20 bp, synthetic construct
  misc_feature 1..20: note = chemically synthesized
  source 1..20: mol_type = other DNA
tgcgtcccctcttgtgtact

SEQ ID NO: 15949 - DNA, 20 bp, synthetic construct
  misc_feature 1..20: note = chemically synthesized
  source 1..20: mol_type = other DNA
gcgtcccctcttgtgtactg

SEQ ID NO: 15950 - DNA, 20 bp, synthetic construct
  misc_feature 1..20: note = chemically synthesized
  source 1..20: mol_type = other DNA
tcttgtgtactggggtcccc

SEQ ID NO: 15951 - DNA, 20 bp, synthetic construct
  misc_feature 1..20: note = chemically synthesized
  source 1..20: mol_type = other DNA
ttgtgtactggggtccccaa

SEQ ID NO: 15952 - DNA, 20 bp, synthetic construct
  misc_feature 1..20: note = chemically synthesized
  source 1..20: mol_type = other DNA
ggtccccaagagctctctaa

SEQ ID NO: 15953 - DNA, 20 bp, synthetic construct
  misc_feature 1..20: note = chemically synthesized
  source 1..20: mol_type = other DNA
caagagctctctaaaagtga

SEQ ID NO: 15954 - DNA, 20 bp, synthetic construct
  misc_feature 1..20: note = chemically synthesized
  source 1..20: mol_type = other DNA
gctctctaaaagtgatggca

SEQ ID NO: 15955 - DNA, 20 bp, synthetic construct
  misc_feature 1..20: note = chemically synthesized
  source 1..20: mol_type = other DNA
tgatggcaaagtcattgcgc

SEQ ID NO: 15956 - DNA, 20 bp, synthetic construct
  misc_feature 1..20: note = chemically synthesized
  source 1..20: mol_type = other DNA
ctgcatttgtctccacacac

SEQ ID NO: 15957 - DNA, 20 bp, synthetic construct
  misc_feature 1..20: note = chemically synthesized
  source 1..20: mol_type = other DNA
ttgtctccacacaccagtca

SEQ ID NO: 15958 - DNA, 20 bp, synthetic construct
  misc_feature 1..20: note = chemically synthesized
  source 1..20: mol_type = other DNA
atggacaataaccctcctcc

SEQ ID NO: 15959 - DNA, 20 bp, synthetic construct
  misc_feature 1..20: note = chemically synthesized
  source 1..20: mol_type = other DNA
tggacaataaccctcctccc

SEQ ID NO: 15960 - DNA, 20 bp, synthetic construct
  misc_feature 1..20: note = chemically synthesized
  source 1..20: mol_type = other DNA
cttgtctttgtataatactc

SEQ ID NO: 15961 - DNA, 20 bp, synthetic construct
  misc_feature 1..20: note = chemically synthesized
  source 1..20: mol_type = other DNA
gtataatactcaagtaattt

SEQ ID NO: 15962 - DNA, 20 bp, synthetic construct
  misc_feature 1..20: note = chemically synthesized
  source 1..20: mol_type = other DNA
ttctgttattcctgtttcaa

SEQ ID NO: 15963 - DNA, 20 bp, synthetic construct
  misc_feature 1..20: note = chemically synthesized
  source 1..20: mol_type = other DNA
ttattcctgtttcaatggct

SEQ ID NO: 15964 - DNA, 20 bp, synthetic construct
  misc_feature 1..20: note = chemically synthesized
  source 1..20: mol_type = other DNA
ttcctgtttcaatggcttag

SEQ ID NO: 15965 - DNA, 20 bp, synthetic construct
  misc_feature 1..20: note = chemically synthesized
  source 1..20: mol_type = other DNA
tttcaatggcttagtagaaa

SEQ ID NO: 15966 - DNA, 20 bp, synthetic construct
  misc_feature 1..20: note = chemically synthesized
  source 1..20: mol_type = other DNA
gttttcccataaattgacaa

SEQ ID NO: 15967 - DNA, 20 bp, synthetic construct
  misc_feature 1..20: note = chemically synthesized
  source 1..20: mol_type = other DNA
atttcacatcaatgtctata

SEQ ID NO: 15968 - DNA, 20 bp, synthetic construct
  misc_feature 1..20: note = chemically synthesized
  source 1..20: mol_type = other DNA
tttcacatcaatgtctatat

SEQ ID NO: 15969 - DNA, 20 bp, synthetic construct
  misc_feature 1..20: note = chemically synthesized
  source 1..20: mol_type = other DNA
ctttatattgttactactct

SEQ ID NO: 15970 - DNA, 20 bp, synthetic construct
  misc_feature 1..20: note = chemically synthesized
  source 1..20: mol_type = other DNA
atattgttactactctaaga

SEQ ID NO: 15971 - DNA, 20 bp, synthetic construct
  misc_feature 1..20: note = chemically synthesized
  source 1..20: mol_type = other DNA
actctaagaaagttacaaca

SEQ ID NO: 15972 - DNA, 20 bp, synthetic construct
  misc_feature 1..20: note = chemically synthesized
  source 1..20: mol_type = other DNA
agttacaacatggtgaatac

SEQ ID NO: 15973 - DNA, 20 bp, synthetic construct
  misc_feature 1..20: note = chemically synthesized
  source 1..20: mol_type = other DNA
ttacaacatggtgaatacaa

SEQ ID NO: 15974 - DNA, 20 bp, synthetic construct
  misc_feature 1..20: note = chemically synthesized
  source 1..20: mol_type = other DNA
aacatggtgaatacaagaga

SEQ ID NO: 15975 - DNA, 20 bp, synthetic construct
  misc_feature 1..20: note = chemically synthesized
  source 1..20: mol_type = other DNA
atacaagagaaagctattac

SEQ ID NO: 15976 - DNA, 20 bp, synthetic construct
  misc_feature 1..20: note = chemically synthesized
  source 1..20: mol_type = other DNA
agagaaagctattacaagtc

SEQ ID NO: 15977 - DNA, 20 bp, synthetic construct
  misc_feature 1..20: note = chemically synthesized
  source 1..20: mol_type = other DNA
attacaagtccagaaaataa

SEQ ID NO: 15978 - DNA, 20 bp, synthetic construct
  misc_feature 1..20: note = chemically synthesized
  source 1..20: mol_type = other DNA
aaaataaaagttatcatctt

SEQ ID NO: 15979 - DNA, 20 bp, synthetic construct
  misc_feature 1..20: note = chemically synthesized
  source 1..20: mol_type = other DNA
aaataaaagttatcatcttg

SEQ ID NO: 15980 - DNA, 20 bp, synthetic construct
  misc_feature 1..20: note = chemically synthesized
  source 1..20: mol_type = other DNA
aagttatcatcttgaggcct

SEQ ID NO: 15981 - DNA, 20 bp, synthetic construct
  misc_feature 1..20: note = chemically synthesized
  source 1..20: mol_type = other DNA
atcttgaggcctcagctttc

SEQ ID NO: 15982 - DNA, 20 bp, synthetic construct
  misc_feature 1..20: note = chemically synthesized
  source 1..20: mol_type = other DNA
tcttgaggcctcagctttct

SEQ ID NO: 15983 - DNA, 20 bp, synthetic construct
  misc_feature 1..20: note = chemically synthesized
  source 1..20: mol_type = other DNA
attaatctaacaattatgaa

SEQ ID NO: 15984 - DNA, 20 bp, synthetic construct
  misc_feature 1..20: note = chemically synthesized
  source 1..20: mol_type = other DNA
taacaattatgaacagcaat

SEQ ID NO: 15985 - DNA, 20 bp, synthetic construct
  misc_feature 1..20: note = chemically synthesized
  source 1..20: mol_type = other DNA
gcaatgagataatgtgtaca

SEQ ID NO: 15986 - DNA, 20 bp, synthetic construct
  misc_feature 1..20: note = chemically synthesized
  source 1..20: mol_type = other DNA
gataatgtgtacaaagtacc

SEQ ID NO: 15987 - DNA, 20 bp, synthetic construct
  misc_feature 1..20: note = chemically synthesized
  source 1..20: mol_type = other DNA
acaaagtacccagacctatg

SEQ ID NO: 15988 - DNA, 20 bp, synthetic construct
  misc_feature 1..20: note = chemically synthesized
  source 1..20: mol_type = other DNA
aagtacccagacctatgtgg

SEQ ID NO: 15989 - DNA, 20 bp, synthetic construct
  misc_feature 1..20: note = chemically synthesized
  source 1..20: mol_type = other DNA
gtacccagacctatgtggta

SEQ ID NO: 15990 - DNA, 20 bp, synthetic construct
  misc_feature 1..20: note = chemically synthesized
  source 1..20: mol_type = other DNA
gacctatgtggtagagcatc

SEQ ID NO: 15991 - DNA, 20 bp, synthetic construct
  misc_feature 1..20: note = chemically synthesized
  source 1..20: mol_type = other DNA
acctatgtggtagagcatca

SEQ ID NO: 15992 - DNA, 20 bp, synthetic construct
  misc_feature 1..20: note = chemically synthesized
  source 1..20: mol_type = other DNA
tatgtggtagagcatcaagg

SEQ ID NO: 15993 - DNA, 20 bp, synthetic construct
  misc_feature 1..20: note = chemically synthesized
  source 1..20: mol_type = other DNA
agcatcaaggaagcgcattg

SEQ ID NO: 15994 - DNA, 20 bp, synthetic construct
  misc_feature 1..20: note = chemically synthesized
  source 1..20: mol_type = other DNA
catcaaggaagcgcattgcg

SEQ ID NO: 15995 - DNA, 20 bp, synthetic construct
  misc_feature 1..20: note = chemically synthesized
  source 1..20: mol_type = other DNA
caaggaagcgcattgcggag

SEQ ID NO: 15996 - DNA, 20 bp, synthetic construct
  misc_feature 1..20: note = chemically synthesized
  source 1..20: mol_type = other DNA
gtttttgtattctgtttcgt

SEQ ID NO: 15997 - DNA, 20 bp, synthetic construct
  misc_feature 1..20: note = chemically synthesized
  source 1..20: mol_type = other DNA
tttttgtattctgtttcgtg

SEQ ID NO: 15998 - DNA, 20 bp, synthetic construct
  misc_feature 1..20: note = chemically synthesized
  source 1..20: mol_type = other DNA
tgtattctgtttcgtgaggc

SEQ ID NO: 15999 - DNA, 20 bp, synthetic construct
  misc_feature 1..20: note = chemically synthesized
  source 1..20: mol_type = other DNA
gtattctgtttcgtgaggca

SEQ ID NO: 16000 - DNA, 20 bp, synthetic construct
  misc_feature 1..20: note = chemically synthesized
  source 1..20: mol_type = other DNA
caaggtttcactctgctgtc

SEQ ID NO: 16001 - DNA, 20 bp, synthetic construct
  misc_feature 1..20: note = chemically synthesized
  source 1..20: mol_type = other DNA
aaggtttcactctgctgtcc

SEQ ID NO: 16002 - DNA, 20 bp, synthetic construct
  misc_feature 1..20: note = chemically synthesized
  source 1..20: mol_type = other DNA
tttcactctgctgtccaggc

SEQ ID NO: 16003 - DNA, 20 bp, synthetic construct
  misc_feature 1..20: note = chemically synthesized
  source 1..20: mol_type = other DNA
tcactctgctgtccaggctg

SEQ ID NO: 16004 - DNA, 20 bp, synthetic construct
  misc_feature 1..20: note = chemically synthesized
  source 1..20: mol_type = other DNA
ctgctgtccaggctggagtg

SEQ ID NO: 16005 - DNA, 20 bp, synthetic construct
  misc_feature 1..20: note = chemically synthesized
  source 1..20: mol_type = other DNA
ctgtccaggctggagtgcag

SEQ ID NO: 16006 - DNA, 20 bp, synthetic construct
  misc_feature 1..20: note = chemically synthesized
  source 1..20: mol_type = other DNA
ccaggctggagtgcagtggc

SEQ ID NO: 16007 - DNA, 20 bp, synthetic construct
  misc_feature 1..20: note = chemically synthesized
  source 1..20: mol_type = other DNA
ggcaagatcatgtctcactg

SEQ ID NO: 16008 - DNA, 20 bp, synthetic construct
  misc_feature 1..20: note = chemically synthesized
  source 1..20: mol_type = other DNA
cactgcagccttgacctcct

SEQ ID NO: 16009 - DNA, 20 bp, synthetic construct
  misc_feature 1..20: note = chemically synthesized
  source 1..20: mol_type = other DNA
agccttgacctcctgagctc

SEQ ID NO: 16010 - DNA, 20 bp, synthetic construct
  misc_feature 1..20: note = chemically synthesized
  source 1..20: mol_type = other DNA
gccttgacctcctgagctca

SEQ ID NO: 16011 - DNA, 20 bp, synthetic construct
  misc_feature 1..20: note = chemically synthesized
  source 1..20: mol_type = other DNA
ccttgacctcctgagctcaa

SEQ ID NO: 16012 - DNA, 20 bp, synthetic construct
  misc_feature 1..20: note = chemically synthesized
  source 1..20: mol_type = other DNA
ctcaagggatcctcccattt

SEQ ID NO: 16013 - DNA, 20 bp, synthetic construct
  misc_feature 1..20: note = chemically synthesized
  source 1..20: mol_type = other DNA
tcctcccatttcggcctcct

SEQ ID NO: 16014 - DNA, 20 bp, synthetic construct
  misc_feature 1..20: note = chemically synthesized
  source 1..20: mol_type = other DNA
tcccatttcggcctcctgag

SEQ ID NO: 16015 - DNA, 20 bp, synthetic construct
  misc_feature 1..20: note = chemically synthesized
  source 1..20: mol_type = other DNA
atttcggcctcctgagtagc

SEQ ID NO: 16016 - DNA, 20 bp, synthetic construct
  misc_feature 1..20: note = chemically synthesized
  source 1..20: mol_type = other DNA
tttcggcctcctgagtagct

SEQ ID NO: 16017 - DNA, 20 bp, synthetic construct
  misc_feature 1..20: note = chemically synthesized
  source 1..20: mol_type = other DNA
ctcctgagtagctgggacta

SEQ ID NO: 16018 - DNA, 20 bp, synthetic construct
  misc_feature 1..20: note = chemically synthesized
  source 1..20: mol_type = other DNA
tcctgagtagctgggactac

SEQ ID NO: 16019 - DNA, 20 bp, synthetic construct
  misc_feature 1..20: note = chemically synthesized
  source 1..20: mol_type = other DNA
acaggtgtacatcacatgcc

SEQ ID NO: 16020 - DNA, 20 bp, synthetic construct
  misc_feature 1..20: note = chemically synthesized
  source 1..20: mol_type = other DNA
ctaatttttttttttttttt

SEQ ID NO: 16021 - DNA, 20 bp, synthetic construct
  misc_feature 1..20: note = chemically synthesized
  source 1..20: mol_type = other DNA
attttttttttttttttaag

SEQ ID NO: 16022 - DNA, 20 bp, synthetic construct
  misc_feature 1..20: note = chemically synthesized
  source 1..20: mol_type = other DNA
tttttttttttttttaagta

SEQ ID NO: 16023 - DNA, 20 bp, synthetic construct
  misc_feature 1..20: note = chemically synthesized
  source 1..20: mol_type = other DNA
ttttttttttaagtagagac

SEQ ID NO: 16024 - DNA, 20 bp, synthetic construct
  misc_feature 1..20: note = chemically synthesized
  source 1..20: mol_type = other DNA
tttttttttaagtagagacg

SEQ ID NO: 16025 - DNA, 20 bp, synthetic construct
  misc_feature 1..20: note = chemically synthesized
  source 1..20: mol_type = other DNA
cgaggtcttgctatgttgtc

SEQ ID NO: 16026 - DNA, 20 bp, synthetic construct
  misc_feature 1..20: note = chemically synthesized
  source 1..20: mol_type = other DNA
gaggtcttgctatgttgtcc

SEQ ID NO: 16027 - DNA, 20 bp, synthetic construct
  misc_feature 1..20: note = chemically synthesized
  source 1..20: mol_type = other DNA
caggataatatcaaactctt

SEQ ID NO: 16028 - DNA, 20 bp, synthetic construct
  misc_feature 1..20: note = chemically synthesized
  source 1..20: mol_type = other DNA
aatatcaaactcttgagctc

SEQ ID NO: 16029 - DNA, 20 bp, synthetic construct
  misc_feature 1..20: note = chemically synthesized
  source 1..20: mol_type = other DNA
atcaaactcttgagctcaag

SEQ ID NO: 16030 - DNA, 20 bp, synthetic construct
  misc_feature 1..20: note = chemically synthesized
  source 1..20: mol_type = other DNA
tcctcccacttctacctctc

SEQ ID NO: 16031 - DNA, 20 bp, synthetic construct
  misc_feature 1..20: note = chemically synthesized
  source 1..20: mol_type = other DNA
cacttctacctctcaagtgc

SEQ ID NO: 16032 - DNA, 20 bp, synthetic construct
  misc_feature 1..20: note = chemically synthesized
  source 1..20: mol_type = other DNA
cctctcaagtgctggaatta

SEQ ID NO: 16033 - DNA, 20 bp, synthetic construct
  misc_feature 1..20: note = chemically synthesized
  source 1..20: mol_type = other DNA
agtgctggaattacagacat

SEQ ID NO: 16034 - DNA, 20 bp, synthetic construct
  misc_feature 1..20: note = chemically synthesized
  source 1..20: mol_type = other DNA
cagacatgagccaccactcc

SEQ ID NO: 16035 - DNA, 20 bp, synthetic construct
  misc_feature 1..20: note = chemically synthesized
  source 1..20: mol_type = other DNA
gagccaccactcctggcttg

SEQ ID NO: 16036 - DNA, 20 bp, synthetic construct
  misc_feature 1..20: note = chemically synthesized
  source 1..20: mol_type = other DNA
actaattcctgacactactt

SEQ ID NO: 16037 - DNA, 20 bp, synthetic construct
  misc_feature 1..20: note = chemically synthesized
  source 1..20: mol_type = other DNA
ctaattcctgacactacttg

SEQ ID NO: 16038 - DNA, 20 bp, synthetic construct
  misc_feature 1..20: note = chemically synthesized
  source 1..20: mol_type = other DNA
taattcctgacactacttga

SEQ ID NO: 16039 - DNA, 20 bp, synthetic construct
  misc_feature 1..20: note = chemically synthesized
  source 1..20: mol_type = other DNA
tgacactacttgagggatac

SEQ ID NO: 16040 - DNA, 20 bp, synthetic construct
  misc_feature 1..20: note = chemically synthesized
  source 1..20: mol_type = other DNA
actacttgagggatactaga

SEQ ID NO: 16041 - DNA, 20 bp, synthetic construct
  misc_feature 1..20: note = chemically synthesized
  source 1..20: mol_type = other DNA
acttgagggatactagacag

SEQ ID NO: 16042 - DNA, 20 bp, synthetic construct
  misc_feature 1..20: note = chemically synthesized
  source 1..20: mol_type = other DNA
cacatctttaatataccaaa

SEQ ID NO: 16043 - DNA, 20 bp, synthetic construct
  misc_feature 1..20: note = chemically synthesized
  source 1..20: mol_type = other DNA
acatctttaatataccaaat

SEQ ID NO: 16044 - DNA, 20 bp, synthetic construct
  misc_feature 1..20: note = chemically synthesized
  source 1..20: mol_type = other DNA
atataccaaatgggtgactg

SEQ ID NO: 16045 - DNA, 20 bp, synthetic construct
  misc_feature 1..20: note = chemically synthesized
  source 1..20: mol_type = other DNA
tataccaaatgggtgactgt

SEQ ID NO: 16046 - DNA, 20 bp, synthetic construct
  misc_feature 1..20: note = chemically synthesized
  source 1..20: mol_type = other DNA
ataccaaatgggtgactgta

SEQ ID NO: 16047 - DNA, 20 bp, synthetic construct
  misc_feature 1..20: note = chemically synthesized
  source 1..20: mol_type = other DNA
aaatgggtgactgtagggtt

SEQ ID NO: 16048 - DNA, 20 bp, synthetic construct
  misc_feature 1..20: note = chemically synthesized
  source 1..20: mol_type = other DNA
atgggtgactgtagggttga

SEQ ID NO: 16049 - DNA, 20 bp, synthetic construct
  misc_feature 1..20: note = chemically synthesized
  source 1..20: mol_type = other DNA
tgggtgactgtagggttgag

SEQ ID NO: 16050 - DNA, 20 bp, synthetic construct
  misc_feature 1..20: note = chemically synthesized
  source 1..20: mol_type = other DNA
gggtgactgtagggttgaga

SEQ ID NO: 16051 - DNA, 20 bp, synthetic construct
  misc_feature 1..20: note = chemically synthesized
  source 1..20: mol_type = other DNA
gtgactgtagggttgagagg

SEQ ID NO: 16052 - DNA, 20 bp, synthetic construct
  misc_feature 1..20: note = chemically synthesized
  source 1..20: mol_type = other DNA
tgtagggttgagagggagat

SEQ ID NO: 16053 - DNA, 20 bp, synthetic construct
  misc_feature 1..20: note = chemically synthesized
  source 1..20: mol_type = other DNA
ttcaatgttttatgaccaaa

SEQ ID NO: 16054 - DNA, 20 bp, synthetic construct
  misc_feature 1..20: note = chemically synthesized
  source 1..20: mol_type = other DNA
tcaatgttttatgaccaaaa

SEQ ID NO: 16055 - DNA, 20 bp, synthetic construct
  misc_feature 1..20: note = chemically synthesized
  source 1..20: mol_type = other DNA
atgaccaaaaaggcttaaat

SEQ ID NO: 16056 - DNA, 20 bp, synthetic construct
  misc_feature 1..20: note = chemically synthesized
  source 1..20: mol_type = other DNA
tgaccaaaaaggcttaaatc

SEQ ID NO: 16057 - DNA, 20 bp, synthetic construct
  misc_feature 1..20: note = chemically synthesized
  source 1..20: mol_type = other DNA
aaaaggcttaaatcaggcac

SEQ ID NO: 16058 - DNA, 20 bp, synthetic construct
  misc_feature 1..20: note = chemically synthesized
  source 1..20: mol_type = other DNA
gcttaaatcaggcacaagct

SEQ ID NO: 16059 - DNA, 20 bp, synthetic construct
  misc_feature 1..20: note = chemically synthesized
  source 1..20: mol_type = other DNA
cttaaatcaggcacaagctt

SEQ ID NO: 16060 - DNA, 20 bp, synthetic construct
  misc_feature 1..20: note = chemically synthesized
  source 1..20: mol_type = other DNA
gcttaggtcttttcaactgt

SEQ ID NO: 16061 - DNA, 20 bp, synthetic construct
  misc_feature 1..20: note = chemically synthesized
  source 1..20: mol_type = other DNA
cttaggtcttttcaactgtg

SEQ ID NO: 16062 - DNA, 20 bp, synthetic construct
  misc_feature 1..20: note = chemically synthesized
  source 1..20: mol_type = other DNA
gtcttttcaactgtgaggac

SEQ ID NO: 16063 - DNA, 20 bp, synthetic construct
  misc_feature 1..20: note = chemically synthesized
  source 1..20: mol_type = other DNA
aactgtgaggaccggactga

SEQ ID NO: 16064 - DNA, 20 bp, synthetic construct
  misc_feature 1..20: note = chemically synthesized
  source 1..20: mol_type = other DNA
aggaccggactgaaagtgtg

SEQ ID NO: 16065 - DNA, 20 bp, synthetic construct
  misc_feature 1..20: note = chemically synthesized
  source 1..20: mol_type = other DNA
ggactgaaagtgtgcagttc

SEQ ID NO: 16066 - DNA, 20 bp, synthetic construct
  misc_feature 1..20: note = chemically synthesized
  source 1..20: mol_type = other DNA
gactgaaagtgtgcagttca

SEQ ID NO: 16067 - DNA, 20 bp, synthetic construct
  misc_feature 1..20: note = chemically synthesized
  source 1..20: mol_type = other DNA
gtgtgcagttcaaggccctg

SEQ ID NO: 16068 - DNA, 20 bp, synthetic construct
  misc_feature 1..20: note = chemically synthesized
  source 1..20: mol_type = other DNA
agttgctgtttaactgttcc

SEQ ID NO: 16069 - DNA, 20 bp, synthetic construct
  misc_feature 1..20: note = chemically synthesized
  source 1..20: mol_type = other DNA
gttgctgtttaactgttccc

SEQ ID NO: 16070 - DNA, 20 bp, synthetic construct
  misc_feature 1..20: note = chemically synthesized
  source 1..20: mol_type = other DNA
gctgtttaactgttcccagg

SEQ ID NO: 16071 - DNA, 20 bp, synthetic construct
  misc_feature 1..20: note = chemically synthesized
  source 1..20: mol_type = other DNA
gtttaactgttcccaggtgg

SEQ ID NO: 16072 - DNA, 20 bp, synthetic construct
  misc_feature 1..20: note = chemically synthesized
  source 1..20: mol_type = other DNA
cccaggtggaagtctcttca

SEQ ID NO: 16073 - DNA, 20 bp, synthetic construct
  misc_feature 1..20: note = chemically synthesized
  source 1..20: mol_type = other DNA
aagtctcttcaaagaaccac

SEQ ID NO: 16074 - DNA, 20 bp, synthetic construct
  misc_feature 1..20: note = chemically synthesized
  source 1..20: mol_type = other DNA
caaagaaccactggtgcaaa

SEQ ID NO: 16075 - DNA, 20 bp, synthetic construct
  misc_feature 1..20: note = chemically synthesized
  source 1..20: mol_type = other DNA
aaagaaccactggtgcaaaa

SEQ ID NO: 16076 - DNA, 20 bp, synthetic construct
  misc_feature 1..20: note = chemically synthesized
  source 1..20: mol_type = other DNA
aagaaccactggtgcaaaaa

SEQ ID NO: 16077 - DNA, 20 bp, synthetic construct
  misc_feature 1..20: note = chemically synthesized
  source 1..20: mol_type = other DNA
ggtgcaaaaagggaactacc

SEQ ID NO: 16078 - DNA, 20 bp, synthetic construct
  misc_feature 1..20: note = chemically synthesized
  source 1..20: mol_type = other DNA
gtgcaaaaagggaactacct

SEQ ID NO: 16079 - DNA, 20 bp, synthetic construct
  misc_feature 1..20: note = chemically synthesized
  source 1..20: mol_type = other DNA
tgcaaaaagggaactacctg

SEQ ID NO: 16080 - DNA, 20 bp, synthetic construct
  misc_feature 1..20: note = chemically synthesized
  source 1..20: mol_type = other DNA
ctggggataaatatttcctc

SEQ ID NO: 16081 - DNA, 20 bp, synthetic construct
  misc_feature 1..20: note = chemically synthesized
  source 1..20: mol_type = other DNA
ggataaatatttcctccaga

SEQ ID NO: 16082 - DNA, 20 bp, synthetic construct
  misc_feature 1..20: note = chemically synthesized
  source 1..20: mol_type = other DNA
gataaatatttcctccagaa

SEQ ID NO: 16083 - DNA, 20 bp, synthetic construct
  misc_feature 1..20: note = chemically synthesized
  source 1..20: mol_type = other DNA
ataaatatttcctccagaaa

SEQ ID NO: 16084 - DNA, 20 bp, synthetic construct
  misc_feature 1..20: note = chemically synthesized
  source 1..20: mol_type = other DNA
taaatatttcctccagaaag

SEQ ID NO: 16085 - DNA, 20 bp, synthetic construct
  misc_feature 1..20: note = chemically synthesized
  source 1..20: mol_type = other DNA
aaatatttcctccagaaagg

SEQ ID NO: 16086 - DNA, 20 bp, synthetic construct
  misc_feature 1..20: note = chemically synthesized
  source 1..20: mol_type = other DNA
atttcctccagaaaggggga

SEQ ID NO: 16087 - DNA, 20 bp, synthetic construct
  misc_feature 1..20: note = chemically synthesized
  source 1..20: mol_type = other DNA
tccagaaagggggaaagtgc

SEQ ID NO: 16088 - DNA, 20 bp, synthetic construct
  misc_feature 1..20: note = chemically synthesized
  source 1..20: mol_type = other DNA
agtgcaagctcccctaccaa

SEQ ID NO: 16089 - DNA, 20 bp, synthetic construct
  misc_feature 1..20: note = chemically synthesized
  source 1..20: mol_type = other DNA
agctcccctaccaaaagcac

SEQ ID NO: 16090 - DNA, 20 bp, synthetic construct
  misc_feature 1..20: note = chemically synthesized
  source 1..20: mol_type = other DNA
gctcccctaccaaaagcacc

SEQ ID NO: 16091 - DNA, 20 bp, synthetic construct
  misc_feature 1..20: note = chemically synthesized
  source 1..20: mol_type = other DNA
ccctaccaaaagcaccaggc

SEQ ID NO: 16092 - DNA, 20 bp, synthetic construct
  misc_feature 1..20: note = chemically synthesized
  source 1..20: mol_type = other DNA
gtccttgtctattttccctg

SEQ ID NO: 16093 - DNA, 20 bp, synthetic construct
  misc_feature 1..20: note = chemically synthesized
  source 1..20: mol_type = other DNA
tattttccctgaagttctca

SEQ ID NO: 16094 - DNA, 20 bp, synthetic construct
  misc_feature 1..20: note = chemically synthesized
  source 1..20: mol_type = other DNA
cctgaagttctcaaagaaat

SEQ ID NO: 16095 - DNA, 20 bp, synthetic construct
  misc_feature 1..20: note = chemically synthesized
  source 1..20: mol_type = other DNA
tgagacccttgtttaccttt

SEQ ID NO: 16096 - DNA, 20 bp, synthetic construct
  misc_feature 1..20: note = chemically synthesized
  source 1..20: mol_type = other DNA
cccttgtttacctttaagat

SEQ ID NO: 16097 - DNA, 20 bp, synthetic construct
  misc_feature 1..20: note = chemically synthesized
  source 1..20: mol_type = other DNA
cttgtttacctttaagatta

SEQ ID NO: 16098 - DNA, 20 bp, synthetic construct
  misc_feature 1..20: note = chemically synthesized
  source 1..20: mol_type = other DNA
gtttacctttaagattagag

SEQ ID NO: 16099 - DNA, 20 bp, synthetic construct
  misc_feature 1..20: note = chemically synthesized
  source 1..20: mol_type = other DNA
tttacctttaagattagaga

SEQ ID NO: 16100 - DNA, 20 bp, synthetic construct
  misc_feature 1..20: note = chemically synthesized
  source 1..20: mol_type = other DNA
aagattagagaaggcttgaa

SEQ ID NO: 16101 - DNA, 20 bp, synthetic construct
  misc_feature 1..20: note = chemically synthesized
  source 1..20: mol_type = other DNA
agagaaggcttgaaaagttt

SEQ ID NO: 16102 - DNA, 20 bp, synthetic construct
  misc_feature 1..20: note = chemically synthesized
  source 1..20: mol_type = other DNA
aaaagtttgagctgtgcctt

SEQ ID NO: 16103 - DNA, 20 bp, synthetic construct
  misc_feature 1..20: note = chemically synthesized
  source 1..20: mol_type = other DNA
aagtttgagctgtgcctttg

SEQ ID NO: 16104 - DNA, 20 bp, synthetic construct
  misc_feature 1..20: note = chemically synthesized
  source 1..20: mol_type = other DNA
agtttgagctgtgcctttgg

SEQ ID NO: 16105 - DNA, 20 bp, synthetic construct
  misc_feature 1..20: note = chemically synthesized
  source 1..20: mol_type = other DNA
acttttctcctttgttgacc

SEQ ID NO: 16106 - DNA, 20 bp, synthetic construct
  misc_feature 1..20: note = chemically synthesized
  source 1..20: mol_type = other DNA
tctcctttgttgaccaagtt

SEQ ID NO: 16107 - DNA, 20 bp, synthetic construct
  misc_feature 1..20: note = chemically synthesized
  source 1..20: mol_type = other DNA
cagctctcctgtatgcttcc

SEQ ID NO: 16108 - DNA, 20 bp, synthetic construct
  misc_feature 1..20: note = chemically synthesized
  source 1..20: mol_type = other DNA
agctctcctgtatgcttcca

SEQ ID NO: 16109 - DNA, 20 bp, synthetic construct
  misc_feature 1..20: note = chemically synthesized
  source 1..20: mol_type = other DNA
cttccaaggtctgttgcatc

SEQ ID NO: 16110 - DNA, 20 bp, synthetic construct
  misc_feature 1..20: note = chemically synthesized
  source 1..20: mol_type = other DNA
tccaaggtctgttgcatcaa

SEQ ID NO: 16111 - DNA, 20 bp, synthetic construct
  misc_feature 1..20: note = chemically synthesized
  source 1..20: mol_type = other DNA
aggtctgttgcatcaagagt

SEQ ID NO: 16112 - DNA, 20 bp, synthetic construct
  misc_feature 1..20: note = chemically synthesized
  source 1..20: mol_type = other DNA
tgcatcaagagtgagaattg

SEQ ID NO: 16113 - DNA, 20 bp, synthetic construct
  misc_feature 1..20: note = chemically synthesized
  source 1..20: mol_type = other DNA
gcatcaagagtgagaattga

SEQ ID NO: 16114 - DNA, 20 bp, synthetic construct
  misc_feature 1..20: note = chemically synthesized
  source 1..20: mol_type = other DNA
agagtgagaattgaaggtct

SEQ ID NO: 16115 - DNA, 20 bp, synthetic construct
  misc_feature 1..20: note = chemically synthesized
  source 1..20: mol_type = other DNA
gtgagaattgaaggtcttag

SEQ ID NO: 16116 - DNA, 20 bp, synthetic construct
  misc_feature 1..20: note = chemically synthesized
  source 1..20: mol_type = other DNA
gaattgaaggtcttagaagc

SEQ ID NO: 16117 - DNA, 20 bp, synthetic construct
  misc_feature 1..20: note = chemically synthesized
  source 1..20: mol_type = other DNA
aattgaaggtcttagaagct

SEQ ID NO: 16118 - DNA, 20 bp, synthetic construct
  misc_feature 1..20: note = chemically synthesized
  source 1..20: mol_type = other DNA
ggtcttagaagctgggatct

SEQ ID NO: 16119 - DNA, 20 bp, synthetic construct
  misc_feature 1..20: note = chemically synthesized
  source 1..20: mol_type = other DNA
agaagctgggatctcagatg

SEQ ID NO: 16120 - DNA, 20 bp, synthetic construct
  misc_feature 1..20: note = chemically synthesized
  source 1..20: mol_type = other DNA
gaagctgggatctcagatgt

SEQ ID NO: 16121 - DNA, 20 bp, synthetic construct
  misc_feature 1..20: note = chemically synthesized
  source 1..20: mol_type = other DNA
aagctgggatctcagatgta

SEQ ID NO: 16122 - DNA, 20 bp, synthetic construct
  misc_feature 1..20: note = chemically synthesized
  source 1..20: mol_type = other DNA
gggatctcagatgtagggaa

SEQ ID NO: 16123 - DNA, 20 bp, synthetic construct
  misc_feature 1..20: note = chemically synthesized
  source 1..20: mol_type = other DNA
gatctcagatgtagggaaaa

SEQ ID NO: 16124 - DNA, 20 bp, synthetic construct
  misc_feature 1..20: note = chemically synthesized
  source 1..20: mol_type = other DNA
atctcagatgtagggaaaag

SEQ ID NO: 16125 - DNA, 20 bp, synthetic construct
  misc_feature 1..20: note = chemically synthesized
  source 1..20: mol_type = other DNA
ctcagatgtagggaaaagag

SEQ ID NO: 16126 - DNA, 20 bp, synthetic construct
  misc_feature 1..20: note = chemically synthesized
  source 1..20: mol_type = other DNA
tttcctgttcactcactgtt

SEQ ID NO: 16127 - DNA, 20 bp, synthetic construct
  misc_feature 1..20: note = chemically synthesized
  source 1..20: mol_type = other DNA
gttcactcactgttaagata

SEQ ID NO: 16128 - DNA, 20 bp, synthetic construct
  misc_feature 1..20: note = chemically synthesized
  source 1..20: mol_type = other DNA
atggctgaaattttttgatc

SEQ ID NO: 16129 - DNA, 20 bp, synthetic construct
  misc_feature 1..20: note = chemically synthesized
  source 1..20: mol_type = other DNA
ttttgatctagtcatctaca

SEQ ID NO: 16130 - DNA, 20 bp, synthetic construct
  misc_feature 1..20: note = chemically synthesized
  source 1..20: mol_type = other DNA
tctagtcatctacaaagcat

SEQ ID NO: 16131 - DNA, 20 bp, synthetic construct
  misc_feature 1..20: note = chemically synthesized
  source 1..20: mol_type = other DNA
catctacaaagcatgagttg

SEQ ID NO: 16132 - DNA, 20 bp, synthetic construct
  misc_feature 1..20: note = chemically synthesized
  source 1..20: mol_type = other DNA
atctacaaagcatgagttgt

SEQ ID NO: 16133 - DNA, 20 bp, synthetic construct
  misc_feature 1..20: note = chemically synthesized
  source 1..20: mol_type = other DNA
acaaagcatgagttgtgggt

SEQ ID NO: 16134 - DNA, 20 bp, synthetic construct
  misc_feature 1..20: note = chemically synthesized
  source 1..20: mol_type = other DNA
cttttgacttcctttgacat

SEQ ID NO: 16135 - DNA, 20 bp, synthetic construct
  misc_feature 1..20: note = chemically synthesized
  source 1..20: mol_type = other DNA
tttgacatcagaatataacc

SEQ ID NO: 16136 - DNA, 20 bp, synthetic construct
  misc_feature 1..20: note = chemically synthesized
  source 1..20: mol_type = other DNA
ttgacatcagaatataacct

SEQ ID NO: 16137 - DNA, 20 bp, synthetic construct
  misc_feature 1..20: note = chemically synthesized
  source 1..20: mol_type = other DNA
aacctaggaattgattactt

SEQ ID NO: 16138 - DNA, 20 bp, synthetic construct
  misc_feature 1..20: note = chemically synthesized
  source 1..20: mol_type = other DNA
aggaattgattacttaagtg

SEQ ID NO: 16139 - DNA, 20 bp, synthetic construct
  misc_feature 1..20: note = chemically synthesized
  source 1..20: mol_type = other DNA
ggaattgattacttaagtga

SEQ ID NO: 16140 - DNA, 20 bp, synthetic construct
  misc_feature 1..20: note = chemically synthesized
  source 1..20: mol_type = other DNA
ttgattacttaagtgaaggc

SEQ ID NO: 16141 - DNA, 20 bp, synthetic construct
  misc_feature 1..20: note = chemically synthesized
  source 1..20: mol_type = other DNA
tgattacttaagtgaaggca

SEQ ID NO: 16142 - DNA, 20 bp, synthetic construct
  misc_feature 1..20: note = chemically synthesized
  source 1..20: mol_type = other DNA
taagtgaaggcaaggtactt

SEQ ID NO: 16143 - DNA, 20 bp, synthetic construct
  misc_feature 1..20: note = chemically synthesized
  source 1..20: mol_type = other DNA
gaaggcaaggtactttggtc

SEQ ID NO: 16144 - DNA, 20 bp, synthetic construct
  misc_feature 1..20: note = chemically synthesized
  source 1..20: mol_type = other DNA
gcaaggtactttggtctgga

SEQ ID NO: 16145 - DNA, 20 bp, synthetic construct
  misc_feature 1..20: note = chemically synthesized
  source 1..20: mol_type = other DNA
caaggtactttggtctggac

SEQ ID NO: 16146 - DNA, 20 bp, synthetic construct
  misc_feature 1..20: note = chemically synthesized
  source 1..20: mol_type = other DNA
tggacaggaacattttgaac

SEQ ID NO: 16147 - DNA, 20 bp, synthetic construct
  misc_feature 1..20: note = chemically synthesized
  source 1..20: mol_type = other DNA
ggacaggaacattttgaaca

SEQ ID NO: 16148 - DNA, 20 bp, synthetic construct
  misc_feature 1..20: note = chemically synthesized
  source 1..20: mol_type = other DNA
caggaacattttgaacaagg

SEQ ID NO: 16149 - DNA, 20 bp, synthetic construct
  misc_feature 1..20: note = chemically synthesized
  source 1..20: mol_type = other DNA
aggaacattttgaacaaggt

SEQ ID NO: 16150 - DNA, 20 bp, synthetic construct
  misc_feature 1..20: note = chemically synthesized
  source 1..20: mol_type = other DNA
ggaacattttgaacaaggta

SEQ ID NO: 16151 - DNA, 20 bp, synthetic construct
  misc_feature 1..20: note = chemically synthesized
  source 1..20: mol_type = other DNA
aacattttgaacaaggtagg

SEQ ID NO: 16152 - DNA, 20 bp, synthetic construct
  misc_feature 1..20: note = chemically synthesized
  source 1..20: mol_type = other DNA
ttttgaacaaggtagggaga

SEQ ID NO: 16153 - DNA, 20 bp, synthetic construct
  misc_feature 1..20: note = chemically synthesized
  source 1..20: mol_type = other DNA
aaggtagggagacagctatg

SEQ ID NO: 16154 - DNA, 20 bp, synthetic construct
  misc_feature 1..20: note = chemically synthesized
  source 1..20: mol_type = other DNA
aggtagggagacagctatga

SEQ ID NO: 16155 - DNA, 20 bp, synthetic construct
  misc_feature 1..20: note = chemically synthesized
  source 1..20: mol_type = other DNA
agggagacagctatgaaggc

SEQ ID NO: 16156 - DNA, 20 bp, synthetic construct
  misc_feature 1..20: note = chemically synthesized
  source 1..20: mol_type = other DNA
tatttatacatttaaacaaa

SEQ ID NO: 16157 - DNA, 20 bp, synthetic construct
  misc_feature 1..20: note = chemically synthesized
  source 1..20: mol_type = other DNA
atacatttaaacaaaaagta

SEQ ID NO: 16158 - DNA, 20 bp, synthetic construct
  misc_feature 1..20: note = chemically synthesized
  source 1..20: mol_type = other DNA
acatttaaacaaaaagtata

SEQ ID NO: 16159 - DNA, 20 bp, synthetic construct
  misc_feature 1..20: note = chemically synthesized
  source 1..20: mol_type = other DNA
taaacaaaaagtatagagcg

SEQ ID NO: 16160 - DNA, 20 bp, synthetic construct
  misc_feature 1..20: note = chemically synthesized
  source 1..20: mol_type = other DNA
tagagcgtagtataatttgt

SEQ ID NO: 16161 - DNA, 20 bp, synthetic construct
  misc_feature 1..20: note = chemically synthesized
  source 1..20: mol_type = other DNA
tagtataatttgtaagtgct

SEQ ID NO: 16162 - DNA, 20 bp, synthetic construct
  misc_feature 1..20: note = chemically synthesized
  source 1..20: mol_type = other DNA
agtataatttgtaagtgctc

SEQ ID NO: 16163 - DNA, 20 bp, synthetic construct
  misc_feature 1..20: note = chemically synthesized
  source 1..20: mol_type = other DNA
gtataatttgtaagtgctca

SEQ ID NO: 16164 - DNA, 20 bp, synthetic construct
  misc_feature 1..20: note = chemically synthesized
  source 1..20: mol_type = other DNA
tgctcagggctgtgtgtgta

SEQ ID NO: 16165 - DNA, 20 bp, synthetic construct
  misc_feature 1..20: note = chemically synthesized
  source 1..20: mol_type = other DNA
gattgtttgaaatgaaacta

SEQ ID NO: 16166 - DNA, 20 bp, synthetic construct
  misc_feature 1..20: note = chemically synthesized
  source 1..20: mol_type = other DNA
tgtttgaaatgaaactaaag

SEQ ID NO: 16167 - DNA, 20 bp, synthetic construct
  misc_feature 1..20: note = chemically synthesized
  source 1..20: mol_type = other DNA
gtttgaaatgaaactaaagt

SEQ ID NO: 16168 - DNA, 20 bp, synthetic construct
  misc_feature 1..20: note = chemically synthesized
  source 1..20: mol_type = other DNA
ttgaaatgaaactaaagtgg

SEQ ID NO: 16169 - DNA, 20 bp, synthetic construct
  misc_feature 1..20: note = chemically synthesized
  source 1..20: mol_type = other DNA
ctactgcccccttaaccctg

SEQ ID NO: 16170 - DNA, 20 bp, synthetic construct
  misc_feature 1..20: note = chemically synthesized
  source 1..20: mol_type = other DNA
tggtccctacactaccctgc

SEQ ID NO: 16171 - DNA, 20 bp, synthetic construct
  misc_feature 1..20: note = chemically synthesized
  source 1..20: mol_type = other DNA
acactaccctgcaagactct

SEQ ID NO: 16172 - DNA, 20 bp, synthetic construct
  misc_feature 1..20: note = chemically synthesized
  source 1..20: mol_type = other DNA
ctgcaagactcttagctgct

SEQ ID NO: 16173 - DNA, 20 bp, synthetic construct
  misc_feature 1..20: note = chemically synthesized
  source 1..20: mol_type = other DNA
tagctgcttagcttaattgt

SEQ ID NO: 16174 - DNA, 20 bp, synthetic construct
  misc_feature 1..20: note = chemically synthesized
  source 1..20: mol_type = other DNA
agctgcttagcttaattgtg

SEQ ID NO: 16175 - DNA, 20 bp, synthetic construct
  misc_feature 1..20: note = chemically synthesized
  source 1..20: mol_type = other DNA
gcttaattgtgaggctgatt

SEQ ID NO: 16176 - DNA, 20 bp, synthetic construct
  misc_feature 1..20: note = chemically synthesized
  source 1..20: mol_type = other DNA
cttaattgtgaggctgattt

SEQ ID NO: 16177 - DNA, 20 bp, synthetic construct
  misc_feature 1..20: note = chemically synthesized
  source 1..20: mol_type = other DNA
ttaattgtgaggctgatttg

SEQ ID NO: 16178 - DNA, 20 bp, synthetic construct
  misc_feature 1..20: note = chemically synthesized
  source 1..20: mol_type = other DNA
tgtgaggctgatttggggca

SEQ ID NO: 16179 - DNA, 20 bp, synthetic construct
  misc_feature 1..20: note = chemically synthesized
  source 1..20: mol_type = other DNA
caacatcctcataataactt

SEQ ID NO: 16180 - DNA, 20 bp, synthetic construct
  misc_feature 1..20: note = chemically synthesized
  source 1..20: mol_type = other DNA
aattttataaaatatcacaa

SEQ ID NO: 16181 - DNA, 20 bp, synthetic construct
  misc_feature 1..20: note = chemically synthesized
  source 1..20: mol_type = other DNA
attttataaaatatcacaat

SEQ ID NO: 16182 - DNA, 20 bp, synthetic construct
  misc_feature 1..20: note = chemically synthesized
  source 1..20: mol_type = other DNA
ttttataaaatatcacaata

SEQ ID NO: 16183 - DNA, 20 bp, synthetic construct
  misc_feature 1..20: note = chemically synthesized
  source 1..20: mol_type = other DNA
tatcacaatagggtcatgtt

SEQ ID NO: 16184 - DNA, 20 bp, synthetic construct
  misc_feature 1..20: note = chemically synthesized
  source 1..20: mol_type = other DNA
cacaatagggtcatgttcag

SEQ ID NO: 16185 - DNA, 20 bp, synthetic construct
  misc_feature 1..20: note = chemically synthesized
  source 1..20: mol_type = other DNA
acaatagggtcatgttcagt

SEQ ID NO: 16186 - DNA, 20 bp, synthetic construct
  misc_feature 1..20: note = chemically synthesized
  source 1..20: mol_type = other DNA
caatagggtcatgttcagta

SEQ ID NO: 16187 - DNA, 20 bp, synthetic construct
  misc_feature 1..20: note = chemically synthesized
  source 1..20: mol_type = other DNA
agtagggtgatatataaaat

SEQ ID NO: 16188 - DNA, 20 bp, synthetic construct
  misc_feature 1..20: note = chemically synthesized
  source 1..20: mol_type = other DNA
ggtgatatataaaattagac

SEQ ID NO: 16189 - DNA, 20 bp, synthetic construct
  misc_feature 1..20: note = chemically synthesized
  source 1..20: mol_type = other DNA
atataaaattagacaagcca

SEQ ID NO: 16190 - DNA, 20 bp, synthetic construct
  misc_feature 1..20: note = chemically synthesized
  source 1..20: mol_type = other DNA
aattagacaagccatagttt

SEQ ID NO: 16191 - DNA, 20 bp, synthetic construct
  misc_feature 1..20: note = chemically synthesized
  source 1..20: mol_type = other DNA
tttgaataaatatatgacaa

SEQ ID NO: 16192 - DNA, 20 bp, synthetic construct
  misc_feature 1..20: note = chemically synthesized
  source 1..20: mol_type = other DNA
ttgaataaatatatgacaaa

SEQ ID NO: 16193 - DNA, 20 bp, synthetic construct
  misc_feature 1..20: note = chemically synthesized
  source 1..20: mol_type = other DNA
ggcaatttaattatctttat

SEQ ID NO: 16194 - DNA, 20 bp, synthetic construct
  misc_feature 1..20: note = chemically synthesized
  source 1..20: mol_type = other DNA
tttaattatctttatgagtt

SEQ ID NO: 16195 - DNA, 20 bp, synthetic construct
  misc_feature 1..20: note = chemically synthesized
  source 1..20: mol_type = other DNA
taattatctttatgagtttg

SEQ ID NO: 16196 - DNA, 20 bp, synthetic construct
  misc_feature 1..20: note = chemically synthesized
  source 1..20: mol_type = other DNA
aattatctttatgagtttgg

SEQ ID NO: 16197 - DNA, 20 bp, synthetic construct
  misc_feature 1..20: note = chemically synthesized
  source 1..20: mol_type = other DNA
tttatgagtttggaggtatc

SEQ ID NO: 16198 - DNA, 20 bp, synthetic construct
  misc_feature 1..20: note = chemically synthesized
  source 1..20: mol_type = other DNA
gaggtatccagtatgaaatt

SEQ ID NO: 16199 - DNA, 20 bp, synthetic construct
  misc_feature 1..20: note = chemically synthesized
  source 1..20: mol_type = other DNA
tttagataatacctgccttc

SEQ ID NO: 16200 - DNA, 20 bp, synthetic construct
  misc_feature 1..20: note = chemically synthesized
  source 1..20: mol_type = other DNA
ctgccttctagtgttgaaat

SEQ ID NO: 16201 - DNA, 20 bp, synthetic construct
  misc_feature 1..20: note = chemically synthesized
  source 1..20: mol_type = other DNA
atgcatcaatgaacttatta

SEQ ID NO: 16202 - DNA, 20 bp, synthetic construct
  misc_feature 1..20: note = chemically synthesized
  source 1..20: mol_type = other DNA
aatgaacttattatagttcc

SEQ ID NO: 16203 - DNA, 20 bp, synthetic construct
  misc_feature 1..20: note = chemically synthesized
  source 1..20: mol_type = other DNA
ttattatagttcctagcaca

SEQ ID NO: 16204 - DNA, 20 bp, synthetic construct
  misc_feature 1..20: note = chemically synthesized
  source 1..20: mol_type = other DNA
tatagttcctagcacaaagt

SEQ ID NO: 16205 - DNA, 20 bp, synthetic construct
  misc_feature 1..20: note = chemically synthesized
  source 1..20: mol_type = other DNA
atgtatttatctgttattaa

SEQ ID NO: 16206 - DNA, 20 bp, synthetic construct
  misc_feature 1..20: note = chemically synthesized
  source 1..20: mol_type = other DNA
tgtatttatctgttattaat

SEQ ID NO: 16207 - DNA, 20 bp, synthetic construct
  misc_feature 1..20: note = chemically synthesized
  source 1..20: mol_type = other DNA
tgttattaataggaatctta

SEQ ID NO: 16208 - DNA, 20 bp, synthetic construct
  misc_feature 1..20: note = chemically synthesized
  source 1..20: mol_type = other DNA
gttattaataggaatcttat

SEQ ID NO: 16209 - DNA, 20 bp, synthetic construct
  misc_feature 1..20: note = chemically synthesized
  source 1..20: mol_type = other DNA
aatccttattaataactatg

SEQ ID NO: 16210 - DNA, 20 bp, synthetic construct
  misc_feature 1..20: note = chemically synthesized
  source 1..20: mol_type = other DNA
ccttattaataactatgaag

SEQ ID NO: 16211 - DNA, 20 bp, synthetic construct
  misc_feature 1..20: note = chemically synthesized
  source 1..20: mol_type = other DNA
cttattaataactatgaagc

SEQ ID NO: 16212 - DNA, 20 bp, synthetic construct
  misc_feature 1..20: note = chemically synthesized
  source 1..20: mol_type = other DNA
tatgaagcaggtatttattt

SEQ ID NO: 16213 - DNA, 20 bp, synthetic construct
  misc_feature 1..20: note = chemically synthesized
  source 1..20: mol_type = other DNA
ggtatttatttgagttttcc

SEQ ID NO: 16214 - DNA, 20 bp, synthetic construct
  misc_feature 1..20: note = chemically synthesized
  source 1..20: mol_type = other DNA
tttatttgagttttccaagt

SEQ ID NO: 16215 - DNA, 20 bp, synthetic construct
  misc_feature 1..20: note = chemically synthesized
  source 1..20: mol_type = other DNA
ttgagttttccaagtgagtt

SEQ ID NO: 16216 - DNA, 20 bp, synthetic construct
  misc_feature 1..20: note = chemically synthesized
  source 1..20: mol_type = other DNA
ttttccaagtgagttaagta

SEQ ID NO: 16217 - DNA, 20 bp, synthetic construct
  misc_feature 1..20: note = chemically synthesized
  source 1..20: mol_type = other DNA
aagtatagcttgtaatactt

SEQ ID NO: 16218 - DNA, 20 bp, synthetic construct
  misc_feature 1..20: note = chemically synthesized
  source 1..20: mol_type = other DNA
agtatagcttgtaatactta

SEQ ID NO: 16219 - DNA, 20 bp, synthetic construct
  misc_feature 1..20: note = chemically synthesized
  source 1..20: mol_type = other DNA
aatacttaaggaaatatcca

SEQ ID NO: 16220 - DNA, 20 bp, synthetic construct
  misc_feature 1..20: note = chemically synthesized
  source 1..20: mol_type = other DNA
atacttaaggaaatatccac

SEQ ID NO: 16221 - DNA, 20 bp, synthetic construct
  misc_feature 1..20: note = chemically synthesized
  source 1..20: mol_type = other DNA
ggaaatatccacaggttaca

SEQ ID NO: 16222 - DNA, 20 bp, synthetic construct
  misc_feature 1..20: note = chemically synthesized
  source 1..20: mol_type = other DNA
atatccacaggttacatagc

SEQ ID NO: 16223 - DNA, 20 bp, synthetic construct
  misc_feature 1..20: note = chemically synthesized
  source 1..20: mol_type = other DNA
tacatagctagtatataact

SEQ ID NO: 16224 - DNA, 20 bp, synthetic construct
  misc_feature 1..20: note = chemically synthesized
  source 1..20: mol_type = other DNA
tataaaacattctaacaata

SEQ ID NO: 16225 - DNA, 20 bp, synthetic construct
  misc_feature 1..20: note = chemically synthesized
  source 1..20: mol_type = other DNA
tatataaactaaaaaactga

SEQ ID NO: 16226 - DNA, 20 bp, synthetic construct
  misc_feature 1..20: note = chemically synthesized
  source 1..20: mol_type = other DNA
atataaactaaaaaactgaa

SEQ ID NO: 16227 - DNA, 20 bp, synthetic construct
  misc_feature 1..20: note = chemically synthesized
  source 1..20: mol_type = other DNA
tataaactaaaaaactgaaa

SEQ ID NO: 16228 - DNA, 20 bp, synthetic construct
  misc_feature 1..20: note = chemically synthesized
  source 1..20: mol_type = other DNA
ctcaatatcacttcttcact

SEQ ID NO: 16229 - DNA, 20 bp, synthetic construct
  misc_feature 1..20: note = chemically synthesized
  source 1..20: mol_type = other DNA
cttcttcacttagaaaaaac

SEQ ID NO: 16230 - DNA, 20 bp, synthetic construct
  misc_feature 1..20: note = chemically synthesized
  source 1..20: mol_type = other DNA
cacttagaaaaaaccagcct

SEQ ID NO: 16231 - DNA, 20 bp, synthetic construct
  misc_feature 1..20: note = chemically synthesized
  source 1..20: mol_type = other DNA
tcctttcaaaatatacttct

SEQ ID NO: 16232 - DNA, 20 bp, synthetic construct
  misc_feature 1..20: note = chemically synthesized
  source 1..20: mol_type = other DNA
aaaatatacttctgagaaat

SEQ ID NO: 16233 - DNA, 20 bp, synthetic construct
  misc_feature 1..20: note = chemically synthesized
  source 1..20: mol_type = other DNA
aatatacttctgagaaatga

SEQ ID NO: 16234 - DNA, 20 bp, synthetic construct
  misc_feature 1..20: note = chemically synthesized
  source 1..20: mol_type = other DNA
tatacttctgagaaatgaga

SEQ ID NO: 16235 - DNA, 20 bp, synthetic construct
  misc_feature 1..20: note = chemically synthesized
  source 1..20: mol_type = other DNA
tacttctgagaaatgagaga

SEQ ID NO: 16236 - DNA, 20 bp, synthetic construct
  misc_feature 1..20: note = chemically synthesized
  source 1..20: mol_type = other DNA
tgagaaatgagagagagaaa

SEQ ID NO: 16237 - DNA, 20 bp, synthetic construct
  misc_feature 1..20: note = chemically synthesized
  source 1..20: mol_type = other DNA
gagaaatgagagagagaaat

SEQ ID NO: 16238 - DNA, 20 bp, synthetic construct
  misc_feature 1..20: note = chemically synthesized
  source 1..20: mol_type = other DNA
agaaatgagagagagaaatg

SEQ ID NO: 16239 - DNA, 20 bp, synthetic construct
  misc_feature 1..20: note = chemically synthesized
  source 1..20: mol_type = other DNA
aaatgagagagagaaatggg

SEQ ID NO: 16240 - DNA, 20 bp, synthetic construct
  misc_feature 1..20: note = chemically synthesized
  source 1..20: mol_type = other DNA
aatgagagagagaaatgggg

SEQ ID NO: 16241 - DNA, 20 bp, synthetic construct
  misc_feature 1..20: note = chemically synthesized
  source 1..20: mol_type = other DNA
atgagagagagaaatgggga

SEQ ID NO: 16242 - DNA, 20 bp, synthetic construct
  misc_feature 1..20: note = chemically synthesized
  source 1..20: mol_type = other DNA
agagagagaaatggggaggg

SEQ ID NO: 16243 - DNA, 20 bp, synthetic construct
  misc_feature 1..20: note = chemically synthesized
  source 1..20: mol_type = other DNA
gagagaaatggggagggtag

SEQ ID NO: 16244 - DNA, 20 bp, synthetic construct
  misc_feature 1..20: note = chemically synthesized
  source 1..20: mol_type = other DNA
agagaaatggggagggtaga

SEQ ID NO: 16245 - DNA, 20 bp, synthetic construct
  misc_feature 1..20: note = chemically synthesized
  source 1..20: mol_type = other DNA
gaaatggggagggtagaagg

SEQ ID NO: 16246 - DNA, 20 bp, synthetic construct
  misc_feature 1..20: note = chemically synthesized
  source 1..20: mol_type = other DNA
aaatggggagggtagaagga

SEQ ID NO: 16247 - DNA, 20 bp, synthetic construct
  misc_feature 1..20: note = chemically synthesized
  source 1..20: mol_type = other DNA
tggggagggtagaaggaagg

SEQ ID NO: 16248 - DNA, 20 bp, synthetic construct
  misc_feature 1..20: note = chemically synthesized
  source 1..20: mol_type = other DNA
gagggtagaaggaaggaaga

SEQ ID NO: 16249 - DNA, 20 bp, synthetic construct
  misc_feature 1..20: note = chemically synthesized
  source 1..20: mol_type = other DNA
agggtagaaggaaggaagat

SEQ ID NO: 16250 - DNA, 20 bp, synthetic construct
  misc_feature 1..20: note = chemically synthesized
  source 1..20: mol_type = other DNA
gggtagaaggaaggaagata

SEQ ID NO: 16251 - DNA, 20 bp, synthetic construct
  misc_feature 1..20: note = chemically synthesized
  source 1..20: mol_type = other DNA
agaaggaaggaagatagggt

SEQ ID NO: 16252 - DNA, 20 bp, synthetic construct
  misc_feature 1..20: note = chemically synthesized
  source 1..20: mol_type = other DNA
aaggaaggaagatagggtaa

SEQ ID NO: 16253 - DNA, 20 bp, synthetic construct
  misc_feature 1..20: note = chemically synthesized
  source 1..20: mol_type = other DNA
aaggaagatagggtaagaga

SEQ ID NO: 16254 - DNA, 20 bp, synthetic construct
  misc_feature 1..20: note = chemically synthesized
  source 1..20: mol_type = other DNA
aggaagatagggtaagagac

SEQ ID NO: 16255 - DNA, 20 bp, synthetic construct
  misc_feature 1..20: note = chemically synthesized
  source 1..20: mol_type = other DNA
ggaagatagggtaagagaca

SEQ ID NO: 16256 - DNA, 20 bp, synthetic construct
  misc_feature 1..20: note = chemically synthesized
  source 1..20: mol_type = other DNA
agatagggtaagagacaggg

SEQ ID NO: 16257 - DNA, 20 bp, synthetic construct
  misc_feature 1..20: note = chemically synthesized
  source 1..20: mol_type = other DNA
gatagggtaagagacaggga

SEQ ID NO: 16258 - DNA, 20 bp, synthetic construct
  misc_feature 1..20: note = chemically synthesized
  source 1..20: mol_type = other DNA
tagggtaagagacagggaag

SEQ ID NO: 16259 - DNA, 20 bp, synthetic construct
  misc_feature 1..20: note = chemically synthesized
  source 1..20: mol_type = other DNA
agggtaagagacagggaagg

SEQ ID NO: 16260 - DNA, 20 bp, synthetic construct
  misc_feature 1..20: note = chemically synthesized
  source 1..20: mol_type = other DNA
aagagacagggaaggaggtg

SEQ ID NO: 16261 - DNA, 20 bp, synthetic construct
  misc_feature 1..20: note = chemically synthesized
  source 1..20: mol_type = other DNA
agagacagggaaggaggtgt

SEQ ID NO: 16262 - DNA, 20 bp, synthetic construct
  misc_feature 1..20: note = chemically synthesized
  source 1..20: mol_type = other DNA
gagacagggaaggaggtgtg

SEQ ID NO: 16263 - DNA, 20 bp, synthetic construct
  misc_feature 1..20: note = chemically synthesized
  source 1..20: mol_type = other DNA
cagggaaggaggtgtgggga

SEQ ID NO: 16264 - DNA, 20 bp, synthetic construct
  misc_feature 1..20: note = chemically synthesized
  source 1..20: mol_type = other DNA
ttcttttctctgtctcttga

SEQ ID NO: 16265 - DNA, 20 bp, synthetic construct
  misc_feature 1..20: note = chemically synthesized
  source 1..20: mol_type = other DNA
cttttctctgtctcttgaaa

SEQ ID NO: 16266 - DNA, 20 bp, synthetic construct
  misc_feature 1..20: note = chemically synthesized
  source 1..20: mol_type = other DNA
ctttccattacattgaatca

SEQ ID NO: 16267 - DNA, 20 bp, synthetic construct
  misc_feature 1..20: note = chemically synthesized
  source 1..20: mol_type = other DNA
tttccattacattgaatcaa

SEQ ID NO: 16268 - DNA, 20 bp, synthetic construct
  misc_feature 1..20: note = chemically synthesized
  source 1..20: mol_type = other DNA
aaaggtaatgttgccatttc

SEQ ID NO: 16269 - DNA, 20 bp, synthetic construct
  misc_feature 1..20: note = chemically synthesized
  source 1..20: mol_type = other DNA
atttctggactcttgaaata

SEQ ID NO: 16270 - DNA, 20 bp, synthetic construct
  misc_feature 1..20: note = chemically synthesized
  source 1..20: mol_type = other DNA
ctggactcttgaaataaaga

SEQ ID NO: 16271 - DNA, 20 bp, synthetic construct
  misc_feature 1..20: note = chemically synthesized
  source 1..20: mol_type = other DNA
gatgtatgaaataattttga

SEQ ID NO: 16272 - DNA, 20 bp, synthetic construct
  misc_feature 1..20: note = chemically synthesized
  source 1..20: mol_type = other DNA
gaaataattttgaaagtcta

SEQ ID NO: 16273 - DNA, 20 bp, synthetic construct
  misc_feature 1..20: note = chemically synthesized
  source 1..20: mol_type = other DNA
ctatggcattttcaaaatgc

SEQ ID NO: 16274 - DNA, 20 bp, synthetic construct
  misc_feature 1..20: note = chemically synthesized
  source 1..20: mol_type = other DNA
tatggcattttcaaaatgca

SEQ ID NO: 16275 - DNA, 20 bp, synthetic construct
  misc_feature 1..20: note = chemically synthesized
  source 1..20: mol_type = other DNA
caaggtgatgtcttactaac

SEQ ID NO: 16276 - DNA, 20 bp, synthetic construct
  misc_feature 1..20: note = chemically synthesized
  source 1..20: mol_type = other DNA
actagcctttgctttattat

SEQ ID NO: 16277 - DNA, 20 bp, synthetic construct
  misc_feature 1..20: note = chemically synthesized
  source 1..20: mol_type = other DNA
ctttgctttattattagaaa

SEQ ID NO: 16278 - DNA, 20 bp, synthetic construct
  misc_feature 1..20: note = chemically synthesized
  source 1..20: mol_type = other DNA
tttgctttattattagaaat

SEQ ID NO: 16279 - DNA, 20 bp, synthetic construct
  misc_feature 1..20: note = chemically synthesized
  source 1..20: mol_type = other DNA
ttgctttattattagaaatg

SEQ ID NO: 16280 - DNA, 20 bp, synthetic construct
  misc_feature 1..20: note = chemically synthesized
  source 1..20: mol_type = other DNA
ctttattattagaaatgggg

SEQ ID NO: 16281 - DNA, 20 bp, synthetic construct
  misc_feature 1..20: note = chemically synthesized
  source 1..20: mol_type = other DNA
attattagaaatggggaagt

SEQ ID NO: 16282 - DNA, 20 bp, synthetic construct
  misc_feature 1..20: note = chemically synthesized
  source 1..20: mol_type = other DNA
tagaaatggggaagtgagta

SEQ ID NO: 16283 - DNA, 20 bp, synthetic construct
  misc_feature 1..20: note = chemically synthesized
  source 1..20: mol_type = other DNA
agtgagtatagacattttat

SEQ ID NO: 16284 - DNA, 20 bp, synthetic construct
  misc_feature 1..20: note = chemically synthesized
  source 1..20: mol_type = other DNA
gtgagtatagacattttatc

SEQ ID NO: 16285 - DNA, 20 bp, synthetic construct
  misc_feature 1..20: note = chemically synthesized
  source 1..20: mol_type = other DNA
gagtatagacattttatcag

SEQ ID NO: 16286 - DNA, 20 bp, synthetic construct
  misc_feature 1..20: note = chemically synthesized
  source 1..20: mol_type = other DNA
cattttatcaggagatatat

SEQ ID NO: 16287 - DNA, 20 bp, synthetic construct
  misc_feature 1..20: note = chemically synthesized
  source 1..20: mol_type = other DNA
attttatcaggagatatatt

SEQ ID NO: 16288 - DNA, 20 bp, synthetic construct
  misc_feature 1..20: note = chemically synthesized
  source 1..20: mol_type = other DNA
tcaggagatatattaggaaa

SEQ ID NO: 16289 - DNA, 20 bp, synthetic construct
  misc_feature 1..20: note = chemically synthesized
  source 1..20: mol_type = other DNA
caggagatatattaggaaaa

SEQ ID NO: 16290 - DNA, 20 bp, synthetic construct
  misc_feature 1..20: note = chemically synthesized
  source 1..20: mol_type = other DNA
aggagatatattaggaaaaa

SEQ ID NO: 16291 - DNA, 20 bp, synthetic construct
  misc_feature 1..20: note = chemically synthesized
  source 1..20: mol_type = other DNA
atattaggaaaaagggaaac

SEQ ID NO: 16292 - DNA, 20 bp, synthetic construct
  misc_feature 1..20: note = chemically synthesized
  source 1..20: mol_type = other DNA
attaggaaaaagggaaactg

SEQ ID NO: 16293 - DNA, 20 bp, synthetic construct
  misc_feature 1..20: note = chemically synthesized
  source 1..20: mol_type = other DNA
aaaagggaaactggagaaac

SEQ ID NO: 16294 - DNA, 20 bp, synthetic construct
  misc_feature 1..20: note = chemically synthesized
  source 1..20: mol_type = other DNA
aaagggaaactggagaaact

SEQ ID NO: 16295 - DNA, 20 bp, synthetic construct
  misc_feature 1..20: note = chemically synthesized
  source 1..20: mol_type = other DNA
agggaaactggagaaactgg

SEQ ID NO: 16296 - DNA, 20 bp, synthetic construct
  misc_feature 1..20: note = chemically synthesized
  source 1..20: mol_type = other DNA
gggaaactggagaaactggg

SEQ ID NO: 16297 - DNA, 20 bp, synthetic construct
  misc_feature 1..20: note = chemically synthesized
  source 1..20: mol_type = other DNA
gaaactggagaaactgggag

SEQ ID NO: 16298 - DNA, 20 bp, synthetic construct
  misc_feature 1..20: note = chemically synthesized
  source 1..20: mol_type = other DNA
gagaaactgggaggagtatc

SEQ ID NO: 16299 - DNA, 20 bp, synthetic construct
  misc_feature 1..20: note = chemically synthesized
  source 1..20: mol_type = other DNA
tccagatgtcctgtccctgt

SEQ ID NO: 16300 - DNA, 20 bp, synthetic construct
  misc_feature 1..20: note = chemically synthesized
  source 1..20: mol_type = other DNA
ccagatgtcctgtccctgta

SEQ ID NO: 16301 - DNA, 20 bp, synthetic construct
  misc_feature 1..20: note = chemically synthesized
  source 1..20: mol_type = other DNA
gatgtcctgtccctgtaagg

SEQ ID NO: 16302 - DNA, 20 bp, synthetic construct
  misc_feature 1..20: note = chemically synthesized
  source 1..20: mol_type = other DNA
atgtcctgtccctgtaaggt

SEQ ID NO: 16303 - DNA, 20 bp, synthetic construct
  misc_feature 1..20: note = chemically synthesized
  source 1..20: mol_type = other DNA
tgtcctgtccctgtaaggtg

SEQ ID NO: 16304 - DNA, 20 bp, synthetic construct
  misc_feature 1..20: note = chemically synthesized
  source 1..20: mol_type = other DNA
gtcctgtccctgtaaggtgg

SEQ ID NO: 16305 - DNA, 20 bp, synthetic construct
  misc_feature 1..20: note = chemically synthesized
  source 1..20: mol_type = other DNA
gggcacccaccttcaatcaa

SEQ ID NO: 16306 - DNA, 20 bp, synthetic construct
  misc_feature 1..20: note = chemically synthesized
  source 1..20: mol_type = other DNA
ggcacccaccttcaatcaaa

SEQ ID NO: 16307 - DNA, 20 bp, synthetic construct
  misc_feature 1..20: note = chemically synthesized
  source 1..20: mol_type = other DNA
gcacccaccttcaatcaaaa

SEQ ID NO: 16308 - DNA, 20 bp, synthetic construct
  misc_feature 1..20: note = chemically synthesized
  source 1..20: mol_type = other DNA
tccttaacaacttccttgct

SEQ ID NO: 16309 - DNA, 20 bp, synthetic construct
  misc_feature 1..20: note = chemically synthesized
  source 1..20: mol_type = other DNA
ccttaacaacttccttgctt

SEQ ID NO: 16310 - DNA, 20 bp, synthetic construct
  misc_feature 1..20: note = chemically synthesized
  source 1..20: mol_type = other DNA
cttaacaacttccttgcttg

SEQ ID NO: 16311 - DNA, 20 bp, synthetic construct
  misc_feature 1..20: note = chemically synthesized
  source 1..20: mol_type = other DNA
tgcttggggctccaccatct

SEQ ID NO: 16312 - DNA, 20 bp, synthetic construct
  misc_feature 1..20: note = chemically synthesized
  source 1..20: mol_type = other DNA
gctccaccatcttggaccat

SEQ ID NO: 16313 - DNA, 20 bp, synthetic construct
  misc_feature 1..20: note = chemically synthesized
  source 1..20: mol_type = other DNA
atcttggaccattagctcca

SEQ ID NO: 16314 - DNA, 20 bp, synthetic construct
  misc_feature 1..20: note = chemically synthesized
  source 1..20: mol_type = other DNA
tcttggaccattagctccac

SEQ ID NO: 16315 - DNA, 20 bp, synthetic construct
  misc_feature 1..20: note = chemically synthesized
  source 1..20: mol_type = other DNA
cacaggtatcttcttccctc

SEQ ID NO: 16316 - DNA, 20 bp, synthetic construct
  misc_feature 1..20: note = chemically synthesized
  source 1..20: mol_type = other DNA
aggtatcttcttccctctag

SEQ ID NO: 16317 - DNA, 20 bp, synthetic construct
  misc_feature 1..20: note = chemically synthesized
  source 1..20: mol_type = other DNA
cttccctctagtggtcataa

SEQ ID NO: 16318 - DNA, 20 bp, synthetic construct
  misc_feature 1..20: note = chemically synthesized
  source 1..20: mol_type = other DNA
ccctctagtggtcataacag

SEQ ID NO: 16319 - DNA, 20 bp, synthetic construct
  misc_feature 1..20: note = chemically synthesized
  source 1..20: mol_type = other DNA
agtggtcataacagcagctt

SEQ ID NO: 16320 - DNA, 20 bp, synthetic construct
  misc_feature 1..20: note = chemically synthesized
  source 1..20: mol_type = other DNA
cagcttcagctacctctcta

SEQ ID NO: 16321 - DNA, 20 bp, synthetic construct
  misc_feature 1..20: note = chemically synthesized
  source 1..20: mol_type = other DNA
gcttcagctacctctctaaa

SEQ ID NO: 16322 - DNA, 20 bp, synthetic construct
  misc_feature 1..20: note = chemically synthesized
  source 1..20: mol_type = other DNA
acctctctaaagagtcctgc

SEQ ID NO: 16323 - DNA, 20 bp, synthetic construct
  misc_feature 1..20: note = chemically synthesized
  source 1..20: mol_type = other DNA
ctaaagagtcctgccagata

SEQ ID NO: 16324 - DNA, 20 bp, synthetic construct
  misc_feature 1..20: note = chemically synthesized
  source 1..20: mol_type = other DNA
taaagagtcctgccagatat

SEQ ID NO: 16325 - DNA, 20 bp, synthetic construct
  misc_feature 1..20: note = chemically synthesized
  source 1..20: mol_type = other DNA
gagtcctgccagatataggt

SEQ ID NO: 16326 - DNA, 20 bp, synthetic construct
  misc_feature 1..20: note = chemically synthesized
  source 1..20: mol_type = other DNA
agtcctgccagatataggtc

SEQ ID NO: 16327 - DNA, 20 bp, synthetic construct
  misc_feature 1..20: note = chemically synthesized
  source 1..20: mol_type = other DNA
aaatataatccactaataaa

SEQ ID NO: 16328 - DNA, 20 bp, synthetic construct
  misc_feature 1..20: note = chemically synthesized
  source 1..20: mol_type = other DNA
atataatccactaataaaaa

SEQ ID NO: 16329 - DNA, 20 bp, synthetic construct
  misc_feature 1..20: note = chemically synthesized
  source 1..20: mol_type = other DNA
aaagagaaacattttgactg

SEQ ID NO: 16330 - DNA, 20 bp, synthetic construct
  misc_feature 1..20: note = chemically synthesized
  source 1..20: mol_type = other DNA
taacattctcactctttcat

SEQ ID NO: 16331 - DNA, 20 bp, synthetic construct
  misc_feature 1..20: note = chemically synthesized
  source 1..20: mol_type = other DNA
ctctttcatcagtaatcact

SEQ ID NO: 16332 - DNA, 20 bp, synthetic construct
  misc_feature 1..20: note = chemically synthesized
  source 1..20: mol_type = other DNA
tctttcatcagtaatcactc

SEQ ID NO: 16333 - DNA, 20 bp, synthetic construct
  misc_feature 1..20: note = chemically synthesized
  source 1..20: mol_type = other DNA
tcaggttattctgtgaccaa

SEQ ID NO: 16334 - DNA, 20 bp, synthetic construct
  misc_feature 1..20: note = chemically synthesized
  source 1..20: mol_type = other DNA
attctgtgaccaacagactg

SEQ ID NO: 16335 - DNA, 20 bp, synthetic construct
  misc_feature 1..20: note = chemically synthesized
  source 1..20: mol_type = other DNA
ttctgtgaccaacagactgt

SEQ ID NO: 16336 - DNA, 20 bp, synthetic construct
  misc_feature 1..20: note = chemically synthesized
  source 1..20: mol_type = other DNA
caacagactgtgggaaaaat

SEQ ID NO: 16337 - DNA, 20 bp, synthetic construct
  misc_feature 1..20: note = chemically synthesized
  source 1..20: mol_type = other DNA
acagactgtgggaaaaatca

SEQ ID NO: 16338 - DNA, 20 bp, synthetic construct
  misc_feature 1..20: note = chemically synthesized
  source 1..20: mol_type = other DNA
gactgtgggaaaaatcagag

SEQ ID NO: 16339 - DNA, 20 bp, synthetic construct
  misc_feature 1..20: note = chemically synthesized
  source 1..20: mol_type = other DNA
actgtgggaaaaatcagaga

SEQ ID NO: 16340 - DNA, 20 bp, synthetic construct
  misc_feature 1..20: note = chemically synthesized
  source 1..20: mol_type = other DNA
tgtgggaaaaatcagagaag

SEQ ID NO: 16341 - DNA, 20 bp, synthetic construct
  misc_feature 1..20: note = chemically synthesized
  source 1..20: mol_type = other DNA
gtgggaaaaatcagagaagg

SEQ ID NO: 16342 - DNA, 20 bp, synthetic construct
  misc_feature 1..20: note = chemically synthesized
  source 1..20: mol_type = other DNA
ggaggcatcctcatgcttac

SEQ ID NO: 16343 - DNA, 20 bp, synthetic construct
  misc_feature 1..20: note = chemically synthesized
  source 1..20: mol_type = other DNA
agcctaaactgaaattgcta

SEQ ID NO: 16344 - DNA, 20 bp, synthetic construct
  misc_feature 1..20: note = chemically synthesized
  source 1..20: mol_type = other DNA
ctaaactgaaattgctatag

SEQ ID NO: 16345 - DNA, 20 bp, synthetic construct
  misc_feature 1..20: note = chemically synthesized
  source 1..20: mol_type = other DNA
aaactgaaattgctatagca

SEQ ID NO: 16346 - DNA, 20 bp, synthetic construct
  misc_feature 1..20: note = chemically synthesized
  source 1..20: mol_type = other DNA
attgctatagcagagtgaac

SEQ ID NO: 16347 - DNA, 20 bp, synthetic construct
  misc_feature 1..20: note = chemically synthesized
  source 1..20: mol_type = other DNA
gctatagcagagtgaaccag

SEQ ID NO: 16348 - DNA, 20 bp, synthetic construct
  misc_feature 1..20: note = chemically synthesized
  source 1..20: mol_type = other DNA
ctatagcagagtgaaccaga

SEQ ID NO: 16349 - DNA, 20 bp, synthetic construct
  misc_feature 1..20: note = chemically synthesized
  source 1..20: mol_type = other DNA
agagtgaaccagaaggttta

SEQ ID NO: 16350 - DNA, 20 bp, synthetic construct
  misc_feature 1..20: note = chemically synthesized
  source 1..20: mol_type = other DNA
gtttacagatattttccaca

SEQ ID NO: 16351 - DNA, 20 bp, synthetic construct
  misc_feature 1..20: note = chemically synthesized
  source 1..20: mol_type = other DNA
ttacagatattttccacaaa

SEQ ID NO: 16352 - DNA, 20 bp, synthetic construct
  misc_feature 1..20: note = chemically synthesized
  source 1..20: mol_type = other DNA
atattttccacaaagagtaa

SEQ ID NO: 16353 - DNA, 20 bp, synthetic construct
  misc_feature 1..20: note = chemically synthesized
  source 1..20: mol_type = other DNA
tattttccacaaagagtaaa

SEQ ID NO: 16354 - DNA, 20 bp, synthetic construct
  misc_feature 1..20: note = chemically synthesized
  source 1..20: mol_type = other DNA
cacaaagagtaaaaggattg

SEQ ID NO: 16355 - DNA, 20 bp, synthetic construct
  misc_feature 1..20: note = chemically synthesized
  source 1..20: mol_type = other DNA
aaaaggattgaagccttctc

SEQ ID NO: 16356 - DNA, 20 bp, synthetic construct
  misc_feature 1..20: note = chemically synthesized
  source 1..20: mol_type = other DNA
gccttctccagatcaatgca

SEQ ID NO: 16357 - DNA, 20 bp, synthetic construct
  misc_feature 1..20: note = chemically synthesized
  source 1..20: mol_type = other DNA
ccttctccagatcaatgcat

SEQ ID NO: 16358 - DNA, 20 bp, synthetic construct
  misc_feature 1..20: note = chemically synthesized
  source 1..20: mol_type = other DNA
caatgcataggaaataataa

SEQ ID NO: 16359 - DNA, 20 bp, synthetic construct
  misc_feature 1..20: note = chemically synthesized
  source 1..20: mol_type = other DNA
catattatgacgaacaacat

SEQ ID NO: 16360 - DNA, 20 bp, synthetic construct
  misc_feature 1..20: note = chemically synthesized
  source 1..20: mol_type = other DNA
atattatgacgaacaacatt

SEQ ID NO: 16361 - DNA, 20 bp, synthetic construct
  misc_feature 1..20: note = chemically synthesized
  source 1..20: mol_type = other DNA
atgacgaacaacattaggat

SEQ ID NO: 16362 - DNA, 20 bp, synthetic construct
  misc_feature 1..20: note = chemically synthesized
  source 1..20: mol_type = other DNA
gtccatatcaatttttaatc

SEQ ID NO: 16363 - DNA, 20 bp, synthetic construct
  misc_feature 1..20: note = chemically synthesized
  source 1..20: mol_type = other DNA
tcaatttttaatccagtcat

SEQ ID NO: 16364 - DNA, 20 bp, synthetic construct
  misc_feature 1..20: note = chemically synthesized
  source 1..20: mol_type = other DNA
ttttaatccagtcataagca

SEQ ID NO: 16365 - DNA, 20 bp, synthetic construct
  misc_feature 1..20: note = chemically synthesized
  source 1..20: mol_type = other DNA
tcataagcacagactacgtg

SEQ ID NO: 16366 - DNA, 20 bp, synthetic construct
  misc_feature 1..20: note = chemically synthesized
  source 1..20: mol_type = other DNA
agactacgtgaagcacgtcc

SEQ ID NO: 16367 - DNA, 20 bp, synthetic construct
  misc_feature 1..20: note = chemically synthesized
  source 1..20: mol_type = other DNA
acgtgaagcacgtccaagtg

SEQ ID NO: 16368 - DNA, 20 bp, synthetic construct
  misc_feature 1..20: note = chemically synthesized
  source 1..20: mol_type = other DNA
cgtgaagcacgtccaagtga

SEQ ID NO: 16369 - DNA, 20 bp, synthetic construct
  misc_feature 1..20: note = chemically synthesized
  source 1..20: mol_type = other DNA
gaagcacgtccaagtgaagg

SEQ ID NO: 16370 - DNA, 20 bp, synthetic construct
  misc_feature 1..20: note = chemically synthesized
  source 1..20: mol_type = other DNA
aagcacgtccaagtgaaggc

SEQ ID NO: 16371 - DNA, 20 bp, synthetic construct
  misc_feature 1..20: note = chemically synthesized
  source 1..20: mol_type = other DNA
gcacgtccaagtgaaggcag

SEQ ID NO: 16372 - DNA, 20 bp, synthetic construct
  misc_feature 1..20: note = chemically synthesized
  source 1..20: mol_type = other DNA
caagtgaaggcaggagaaat

SEQ ID NO: 16373 - DNA, 20 bp, synthetic construct
  misc_feature 1..20: note = chemically synthesized
  source 1..20: mol_type = other DNA
agtgaaggcaggagaaatga

SEQ ID NO: 16374 - DNA, 20 bp, synthetic construct
  misc_feature 1..20: note = chemically synthesized
  source 1..20: mol_type = other DNA
gtgaaggcaggagaaatgag

SEQ ID NO: 16375 - DNA, 20 bp, synthetic construct
  misc_feature 1..20: note = chemically synthesized
  source 1..20: mol_type = other DNA
gaaggcaggagaaatgagag

SEQ ID NO: 16376 - DNA, 20 bp, synthetic construct
  misc_feature 1..20: note = chemically synthesized
  source 1..20: mol_type = other DNA
gcaggagaaatgagaggagc

SEQ ID NO: 16377 - DNA, 20 bp, synthetic construct
  misc_feature 1..20: note = chemically synthesized
  source 1..20: mol_type = other DNA
gagaaatgagaggagcaaga

SEQ ID NO: 16378 - DNA, 20 bp, synthetic construct
  misc_feature 1..20: note = chemically synthesized
  source 1..20: mol_type = other DNA
gaaatgagaggagcaagaaa

SEQ ID NO: 16379 - DNA, 20 bp, synthetic construct
  misc_feature 1..20: note = chemically synthesized
  source 1..20: mol_type = other DNA
aaatgagaggagcaagaaag

SEQ ID NO: 16380 - DNA, 20 bp, synthetic construct
  misc_feature 1..20: note = chemically synthesized
  source 1..20: mol_type = other DNA
atgagaggagcaagaaagag

SEQ ID NO: 16381 - DNA, 20 bp, synthetic construct
  misc_feature 1..20: note = chemically synthesized
  source 1..20: mol_type = other DNA
gaaagaggagccatttgatc

SEQ ID NO: 16382 - DNA, 20 bp, synthetic construct
  misc_feature 1..20: note = chemically synthesized
  source 1..20: mol_type = other DNA
aggagccatttgatcaagaa

SEQ ID NO: 16383 - DNA, 20 bp, synthetic construct
  misc_feature 1..20: note = chemically synthesized
  source 1..20: mol_type = other DNA
agccatttgatcaagaatag

SEQ ID NO: 16384 - DNA, 20 bp, synthetic construct
  misc_feature 1..20: note = chemically synthesized
  source 1..20: mol_type = other DNA
ttgatcaagaatagcagaaa

SEQ ID NO: 16385 - DNA, 20 bp, synthetic construct
  misc_feature 1..20: note = chemically synthesized
  source 1..20: mol_type = other DNA
tgatcaagaatagcagaaaa

SEQ ID NO: 16386 - DNA, 20 bp, synthetic construct
  misc_feature 1..20: note = chemically synthesized
  source 1..20: mol_type = other DNA
caagaatagcagaaaaagga

SEQ ID NO: 16387 - DNA, 20 bp, synthetic construct
  misc_feature 1..20: note = chemically synthesized
  source 1..20: mol_type = other DNA
aagaatagcagaaaaaggaa

SEQ ID NO: 16388 - DNA, 20 bp, synthetic construct
  misc_feature 1..20: note = chemically synthesized
  source 1..20: mol_type = other DNA
atagcagaaaaaggaaaggc

SEQ ID NO: 16389 - DNA, 20 bp, synthetic construct
  misc_feature 1..20: note = chemically synthesized
  source 1..20: mol_type = other DNA
acaaatgattgtcatgccaa

SEQ ID NO: 16390 - DNA, 20 bp, synthetic construct
  misc_feature 1..20: note = chemically synthesized
  source 1..20: mol_type = other DNA
tgattgtcatgccaacagta

SEQ ID NO: 16391 - DNA, 20 bp, synthetic construct
  misc_feature 1..20: note = chemically synthesized
  source 1..20: mol_type = other DNA
tacagataactctgctaata

SEQ ID NO: 16392 - DNA, 20 bp, synthetic construct
  misc_feature 1..20: note = chemically synthesized
  source 1..20: mol_type = other DNA
acagataactctgctaataa

SEQ ID NO: 16393 - DNA, 20 bp, synthetic construct
  misc_feature 1..20: note = chemically synthesized
  source 1..20: mol_type = other DNA
gataactctgctaataaagg

SEQ ID NO: 16394 - DNA, 20 bp, synthetic construct
  misc_feature 1..20: note = chemically synthesized
  source 1..20: mol_type = other DNA
taactctgctaataaaggta

SEQ ID NO: 16395 - DNA, 20 bp, synthetic construct
  misc_feature 1..20: note = chemically synthesized
  source 1..20: mol_type = other DNA
aactctgctaataaaggtag

SEQ ID NO: 16396 - DNA, 20 bp, synthetic construct
  misc_feature 1..20: note = chemically synthesized
  source 1..20: mol_type = other DNA
ataaaggtagaggcataata

SEQ ID NO: 16397 - DNA, 20 bp, synthetic construct
  misc_feature 1..20: note = chemically synthesized
  source 1..20: mol_type = other DNA
taaaggtagaggcataatac

SEQ ID NO: 16398 - DNA, 20 bp, synthetic construct
  misc_feature 1..20: note = chemically synthesized
  source 1..20: mol_type = other DNA
aggtagaggcataatacagg

SEQ ID NO: 16399 - DNA, 20 bp, synthetic construct
  misc_feature 1..20: note = chemically synthesized
  source 1..20: mol_type = other DNA
tagaggcataatacaggtag

SEQ ID NO: 16400 - DNA, 20 bp, synthetic construct
  misc_feature 1..20: note = chemically synthesized
  source 1..20: mol_type = other DNA
aggcataatacaggtagtag

SEQ ID NO: 16401 - DNA, 20 bp, synthetic construct
  misc_feature 1..20: note = chemically synthesized
  source 1..20: mol_type = other DNA
ggtagtagcagatatctaca

SEQ ID NO: 16402 - DNA, 20 bp, synthetic construct
  misc_feature 1..20: note = chemically synthesized
  source 1..20: mol_type = other DNA
agtagcagatatctacatag

SEQ ID NO: 16403 - DNA, 20 bp, synthetic construct
  misc_feature 1..20: note = chemically synthesized
  source 1..20: mol_type = other DNA
agatatctacatagtagtta

SEQ ID NO: 16404 - DNA, 20 bp, synthetic construct
  misc_feature 1..20: note = chemically synthesized
  source 1..20: mol_type = other DNA
gatatctacatagtagttaa

SEQ ID NO: 16405 - DNA, 20 bp, synthetic construct
  misc_feature 1..20: note = chemically synthesized
  source 1..20: mol_type = other DNA
tacatagtagttaaaggaca

SEQ ID NO: 16406 - DNA, 20 bp, synthetic construct
  misc_feature 1..20: note = chemically synthesized
  source 1..20: mol_type = other DNA
tagttaaaggacatggccat

SEQ ID NO: 16407 - DNA, 20 bp, synthetic construct
  misc_feature 1..20: note = chemically synthesized
  source 1..20: mol_type = other DNA
aaaggacatggccatcagta

SEQ ID NO: 16408 - DNA, 20 bp, synthetic construct
  misc_feature 1..20: note = chemically synthesized
  source 1..20: mol_type = other DNA
ggacatggccatcagtacag

SEQ ID NO: 16409 - DNA, 20 bp, synthetic construct
  misc_feature 1..20: note = chemically synthesized
  source 1..20: mol_type = other DNA
tcagtacagaagattccata

SEQ ID NO: 16410 - DNA, 20 bp, synthetic construct
  misc_feature 1..20: note = chemically synthesized
  source 1..20: mol_type = other DNA
cagtacagaagattccataa

SEQ ID NO: 16411 - DNA, 20 bp, synthetic construct
  misc_feature 1..20: note = chemically synthesized
  source 1..20: mol_type = other DNA
gtacagaagattccataaag

SEQ ID NO: 16412 - DNA, 20 bp, synthetic construct
  misc_feature 1..20: note = chemically synthesized
  source 1..20: mol_type = other DNA
attccataaaggagaaccta

SEQ ID NO: 16413 - DNA, 20 bp, synthetic construct
  misc_feature 1..20: note = chemically synthesized
  source 1..20: mol_type = other DNA
tccataaaggagaacctaaa

SEQ ID NO: 16414 - DNA, 20 bp, synthetic construct
  misc_feature 1..20: note = chemically synthesized
  source 1..20: mol_type = other DNA
ccataaaggagaacctaaag

SEQ ID NO: 16415 - DNA, 20 bp, synthetic construct
  misc_feature 1..20: note = chemically synthesized
  source 1..20: mol_type = other DNA
taaaggagaacctaaagagg

SEQ ID NO: 16416 - DNA, 20 bp, synthetic construct
  misc_feature 1..20: note = chemically synthesized
  source 1..20: mol_type = other DNA
aaagaggaagaataatttgt

SEQ ID NO: 16417 - DNA, 20 bp, synthetic construct
  misc_feature 1..20: note = chemically synthesized
  source 1..20: mol_type = other DNA
gaggaagaataatttgtcag

SEQ ID NO: 16418 - DNA, 20 bp, synthetic construct
  misc_feature 1..20: note = chemically synthesized
  source 1..20: mol_type = other DNA
ataatttgtcagaagcttaa

SEQ ID NO: 16419 - DNA, 20 bp, synthetic construct
  misc_feature 1..20: note = chemically synthesized
  source 1..20: mol_type = other DNA
aagcttaaaagctgaactct

SEQ ID NO: 16420 - DNA, 20 bp, synthetic construct
  misc_feature 1..20: note = chemically synthesized
  source 1..20: mol_type = other DNA
agcttaaaagctgaactctg

SEQ ID NO: 16421 - DNA, 20 bp, synthetic construct
  misc_feature 1..20: note = chemically synthesized
  source 1..20: mol_type = other DNA
ctacaatatccttttgactg

SEQ ID NO: 16422 - DNA, 20 bp, synthetic construct
  misc_feature 1..20: note = chemically synthesized
  source 1..20: mol_type = other DNA
aatatccttttgactgtgga

SEQ ID NO: 16423 - DNA, 20 bp, synthetic construct
  misc_feature 1..20: note = chemically synthesized
  source 1..20: mol_type = other DNA
atatccttttgactgtggaa

SEQ ID NO: 16424 - DNA, 20 bp, synthetic construct
  misc_feature 1..20: note = chemically synthesized
  source 1..20: mol_type = other DNA
tatccttttgactgtggaaa

SEQ ID NO: 16425 - DNA, 20 bp, synthetic construct
  misc_feature 1..20: note = chemically synthesized
  source 1..20: mol_type = other DNA
ccttttgactgtggaaaggg

SEQ ID NO: 16426 - DNA, 20 bp, synthetic construct
  misc_feature 1..20: note = chemically synthesized
  source 1..20: mol_type = other DNA
gactgtggaaagggtggtga

SEQ ID NO: 16427 - DNA, 20 bp, synthetic construct
  misc_feature 1..20: note = chemically synthesized
  source 1..20: mol_type = other DNA
actgtggaaagggtggtgaa

SEQ ID NO: 16428 - DNA, 20 bp, synthetic construct
  misc_feature 1..20: note = chemically synthesized
  source 1..20: mol_type = other DNA
tggaaagggtggtgaaagga

SEQ ID NO: 16429 - DNA, 20 bp, synthetic construct
  misc_feature 1..20: note = chemically synthesized
  source 1..20: mol_type = other DNA
gggtggtgaaaggaaagttc

SEQ ID NO: 16430 - DNA, 20 bp, synthetic construct
  misc_feature 1..20: note = chemically synthesized
  source 1..20: mol_type = other DNA
ggtggtgaaaggaaagttca

SEQ ID NO: 16431 - DNA, 20 bp, synthetic construct
  misc_feature 1..20: note = chemically synthesized
  source 1..20: mol_type = other DNA
aggaaagttcaaggacattt

SEQ ID NO: 16432 - DNA, 20 bp, synthetic construct
  misc_feature 1..20: note = chemically synthesized
  source 1..20: mol_type = other DNA
caaggacatttgagccaaca

SEQ ID NO: 16433 - DNA, 20 bp, synthetic construct
  misc_feature 1..20: note = chemically synthesized
  source 1..20: mol_type = other DNA
aggacatttgagccaacata

SEQ ID NO: 16434 - DNA, 20 bp, synthetic construct
  misc_feature 1..20: note = chemically synthesized
  source 1..20: mol_type = other DNA
gacatttgagccaacataga

SEQ ID NO: 16435 - DNA, 20 bp, synthetic construct
  misc_feature 1..20: note = chemically synthesized
  source 1..20: mol_type = other DNA
acatttgagccaacatagag

SEQ ID NO: 16436 - DNA, 20 bp, synthetic construct
  misc_feature 1..20: note = chemically synthesized
  source 1..20: mol_type = other DNA
gccaacatagagaggaacat

SEQ ID NO: 16437 - DNA, 20 bp, synthetic construct
  misc_feature 1..20: note = chemically synthesized
  source 1..20: mol_type = other DNA
catagagaggaacattggct

SEQ ID NO: 16438 - DNA, 20 bp, synthetic construct
  misc_feature 1..20: note = chemically synthesized
  source 1..20: mol_type = other DNA
gagaggaacattggcttggt

SEQ ID NO: 16439 - DNA, 20 bp, synthetic construct
  misc_feature 1..20: note = chemically synthesized
  source 1..20: mol_type = other DNA
agaggaacattggcttggtg

SEQ ID NO: 16440 - DNA, 20 bp, synthetic construct
  misc_feature 1..20: note = chemically synthesized
  source 1..20: mol_type = other DNA
gaggaacattggcttggtga

SEQ ID NO: 16441 - DNA, 20 bp, synthetic construct
  misc_feature 1..20: note = chemically synthesized
  source 1..20: mol_type = other DNA
atatctgtcctgatgttgtc

SEQ ID NO: 16442 - DNA, 20 bp, synthetic construct
  misc_feature 1..20: note = chemically synthesized
  source 1..20: mol_type = other DNA
tatctgtcctgatgttgtcc

SEQ ID NO: 16443 - DNA, 20 bp, synthetic construct
  misc_feature 1..20: note = chemically synthesized
  source 1..20: mol_type = other DNA
tgtcctgatgttgtccagga

SEQ ID NO: 16444 - DNA, 20 bp, synthetic construct
  misc_feature 1..20: note = chemically synthesized
  source 1..20: mol_type = other DNA
tgatacccatataaataacg

SEQ ID NO: 16445 - DNA, 20 bp, synthetic construct
  misc_feature 1..20: note = chemically synthesized
  source 1..20: mol_type = other DNA
atacccatataaataacgta

SEQ ID NO: 16446 - DNA, 20 bp, synthetic construct
  misc_feature 1..20: note = chemically synthesized
  source 1..20: mol_type = other DNA
tataaataacgtagagaaaa

SEQ ID NO: 16447 - DNA, 20 bp, synthetic construct
  misc_feature 1..20: note = chemically synthesized
  source 1..20: mol_type = other DNA
ataaataacgtagagaaaac

SEQ ID NO: 16448 - DNA, 20 bp, synthetic construct
  misc_feature 1..20: note = chemically synthesized
  source 1..20: mol_type = other DNA
aaataacgtagagaaaacag

SEQ ID NO: 16449 - DNA, 20 bp, synthetic construct
  misc_feature 1..20: note = chemically synthesized
  source 1..20: mol_type = other DNA
aataacgtagagaaaacagg

SEQ ID NO: 16450 - DNA, 20 bp, synthetic construct
  misc_feature 1..20: note = chemically synthesized
  source 1..20: mol_type = other DNA
ataacgtagagaaaacagga

SEQ ID NO: 16451 - DNA, 20 bp, synthetic construct
  misc_feature 1..20: note = chemically synthesized
  source 1..20: mol_type = other DNA
taacgtagagaaaacaggag

SEQ ID NO: 16452 - DNA, 20 bp, synthetic construct
  misc_feature 1..20: note = chemically synthesized
  source 1..20: mol_type = other DNA
gtagagaaaacaggagggga

SEQ ID NO: 16453 - DNA, 20 bp, synthetic construct
  misc_feature 1..20: note = chemically synthesized
  source 1..20: mol_type = other DNA
agagaaaacaggaggggata

SEQ ID NO: 16454 - DNA, 20 bp, synthetic construct
  misc_feature 1..20: note = chemically synthesized
  source 1..20: mol_type = other DNA
aacaggaggggatagagatc

SEQ ID NO: 16455 - DNA, 20 bp, synthetic construct
  misc_feature 1..20: note = chemically synthesized
  source 1..20: mol_type = other DNA
aggggatagagatctagaca

SEQ ID NO: 16456 - DNA, 20 bp, synthetic construct
  misc_feature 1..20: note = chemically synthesized
  source 1..20: mol_type = other DNA
gggatagagatctagacaaa

SEQ ID NO: 16457 - DNA, 20 bp, synthetic construct
  misc_feature 1..20: note = chemically synthesized
  source 1..20: mol_type = other DNA
ggatagagatctagacaaag

SEQ ID NO: 16458 - DNA, 20 bp, synthetic construct
  misc_feature 1..20: note = chemically synthesized
  source 1..20: mol_type = other DNA
atctagacaaagaggcatca

SEQ ID NO: 16459 - DNA, 20 bp, synthetic construct
  misc_feature 1..20: note = chemically synthesized
  source 1..20: mol_type = other DNA
agacaaagaggcatcaaaga

SEQ ID NO: 16460 - DNA, 20 bp, synthetic construct
  misc_feature 1..20: note = chemically synthesized
  source 1..20: mol_type = other DNA
gacaaagaggcatcaaagat

SEQ ID NO: 16461 - DNA, 20 bp, synthetic construct
  misc_feature 1..20: note = chemically synthesized
  source 1..20: mol_type = other DNA
acaaagaggcatcaaagata

SEQ ID NO: 16462 - DNA, 20 bp, synthetic construct
  misc_feature 1..20: note = chemically synthesized
  source 1..20: mol_type = other DNA
tcaaagatagggatgtttgt

SEQ ID NO: 16463 - DNA, 20 bp, synthetic construct
  misc_feature 1..20: note = chemically synthesized
  source 1..20: mol_type = other DNA
caaagatagggatgtttgta

SEQ ID NO: 16464 - DNA, 20 bp, synthetic construct
  misc_feature 1..20: note = chemically synthesized
  source 1..20: mol_type = other DNA
ggatgtttgtaaggatgaaa

SEQ ID NO: 16465 - DNA, 20 bp, synthetic construct
  misc_feature 1..20: note = chemically synthesized
  source 1..20: mol_type = other DNA
aaatagaacgttttttgcgt

SEQ ID NO: 16466 - DNA, 20 bp, synthetic construct
  misc_feature 1..20: note = chemically synthesized
  source 1..20: mol_type = other DNA
ttttttgcgttagtcaccgt

SEQ ID NO: 16467 - DNA, 20 bp, synthetic construct
  misc_feature 1..20: note = chemically synthesized
  source 1..20: mol_type = other DNA
tttttgcgttagtcaccgtg

SEQ ID NO: 16468 - DNA, 20 bp, synthetic construct
  misc_feature 1..20: note = chemically synthesized
  source 1..20: mol_type = other DNA
ttagtcaccgtgaggatgac

SEQ ID NO: 16469 - DNA, 20 bp, synthetic construct
  misc_feature 1..20: note = chemically synthesized
  source 1..20: mol_type = other DNA
caccgtgaggatgaccggta

SEQ ID NO: 16470 - DNA, 20 bp, synthetic construct
  misc_feature 1..20: note = chemically synthesized
  source 1..20: mol_type = other DNA
accgtgaggatgaccggtaa

SEQ ID NO: 16471 - DNA, 20 bp, synthetic construct
  misc_feature 1..20: note = chemically synthesized
  source 1..20: mol_type = other DNA
gatgaccggtaaaggcaatg

SEQ ID NO: 16472 - DNA, 20 bp, synthetic construct
  misc_feature 1..20: note = chemically synthesized
  source 1..20: mol_type = other DNA
tgaccggtaaaggcaatgca

SEQ ID NO: 16473 - DNA, 20 bp, synthetic construct
  misc_feature 1..20: note = chemically synthesized
  source 1..20: mol_type = other DNA
gaccggtaaaggcaatgcag

SEQ ID NO: 16474 - DNA, 20 bp, synthetic construct
  misc_feature 1..20: note = chemically synthesized
  source 1..20: mol_type = other DNA
ataataattgtgtgtattca

SEQ ID NO: 16475 - DNA, 20 bp, synthetic construct
  misc_feature 1..20: note = chemically synthesized
  source 1..20: mol_type = other DNA
taataattgtgtgtattcat

SEQ ID NO: 16476 - DNA, 20 bp, synthetic construct
  misc_feature 1..20: note = chemically synthesized
  source 1..20: mol_type = other DNA
aataattgtgtgtattcatg

SEQ ID NO: 16477 - DNA, 20 bp, synthetic construct
  misc_feature 1..20: note = chemically synthesized
  source 1..20: mol_type = other DNA
tggggtacaacatgatgctt

SEQ ID NO: 16478 - DNA, 20 bp, synthetic construct
  misc_feature 1..20: note = chemically synthesized
  source 1..20: mol_type = other DNA
tgtacgtgtacaatattaaa

SEQ ID NO: 16479 - DNA, 20 bp, synthetic construct
  misc_feature 1..20: note = chemically synthesized
  source 1..20: mol_type = other DNA
acaatattaaatggttaaat

SEQ ID NO: 16480 - DNA, 20 bp, synthetic construct
  misc_feature 1..20: note = chemically synthesized
  source 1..20: mol_type = other DNA
caatattaaatggttaaata

SEQ ID NO: 16481 - DNA, 20 bp, synthetic construct
  misc_feature 1..20: note = chemically synthesized
  source 1..20: mol_type = other DNA
cttcacatacttattttttg

SEQ ID NO: 16482 - DNA, 20 bp, synthetic construct
  misc_feature 1..20: note = chemically synthesized
  source 1..20: mol_type = other DNA
acactcttcattcaaaaatc

SEQ ID NO: 16483 - DNA, 20 bp, synthetic construct
  misc_feature 1..20: note = chemically synthesized
  source 1..20: mol_type = other DNA
tcattcaaaaatctggaaca

SEQ ID NO: 16484 - DNA, 20 bp, synthetic construct
  misc_feature 1..20: note = chemically synthesized
  source 1..20: mol_type = other DNA
agttaaaatgtcatatgtgt

SEQ ID NO: 16485 - DNA, 20 bp, synthetic construct
  misc_feature 1..20: note = chemically synthesized
  source 1..20: mol_type = other DNA
gttaaaatgtcatatgtgtc

SEQ ID NO: 16486 - DNA, 20 bp, synthetic construct
  misc_feature 1..20: note = chemically synthesized
  source 1..20: mol_type = other DNA
atgtcatatgtgtcaggatg

SEQ ID NO: 16487 - DNA, 20 bp, synthetic construct
  misc_feature 1..20: note = chemically synthesized
  source 1..20: mol_type = other DNA
tatgtgtcaggatgcagtaa

SEQ ID NO: 16488 - DNA, 20 bp, synthetic construct
  misc_feature 1..20: note = chemically synthesized
  source 1..20: mol_type = other DNA
tcaggatgcagtaatagatt

SEQ ID NO: 16489 - DNA, 20 bp, synthetic construct
  misc_feature 1..20: note = chemically synthesized
  source 1..20: mol_type = other DNA
atcatgaataatgatcaatc

SEQ ID NO: 16490 - DNA, 20 bp, synthetic construct
  misc_feature 1..20: note = chemically synthesized
  source 1..20: mol_type = other DNA
tcatgaataatgatcaatcg

SEQ ID NO: 16491 - DNA, 20 bp, synthetic construct
  misc_feature 1..20: note = chemically synthesized
  source 1..20: mol_type = other DNA
cgaggaaaacctatgaaaat

SEQ ID NO: 16492 - DNA, 20 bp, synthetic construct
  misc_feature 1..20: note = chemically synthesized
  source 1..20: mol_type = other DNA
ctatgaaaatgagaaaattt

SEQ ID NO: 16493 - DNA, 20 bp, synthetic construct
  misc_feature 1..20: note = chemically synthesized
  source 1..20: mol_type = other DNA
atgaaaatgagaaaattttg

SEQ ID NO: 16494 - DNA, 20 bp, synthetic construct
  misc_feature 1..20: note = chemically synthesized
  source 1..20: mol_type = other DNA
aaaaatatcttgatcacttt

SEQ ID NO: 16495 - DNA, 20 bp, synthetic construct
  misc_feature 1..20: note = chemically synthesized
  source 1..20: mol_type = other DNA
aaatatcttgatcacttttg

SEQ ID NO: 16496 - DNA, 20 bp, synthetic construct
  misc_feature 1..20: note = chemically synthesized
  source 1..20: mol_type = other DNA
aatatcttgatcacttttgg

SEQ ID NO: 16497 - DNA, 20 bp, synthetic construct
  misc_feature 1..20: note = chemically synthesized
  source 1..20: mol_type = other DNA
tcttgatcacttttggaggt

SEQ ID NO: 16498 - DNA, 20 bp, synthetic construct
  misc_feature 1..20: note = chemically synthesized
  source 1..20: mol_type = other DNA
cttgatcacttttggaggtc

SEQ ID NO: 16499 - DNA, 20 bp, synthetic construct
  misc_feature 1..20: note = chemically synthesized
  source 1..20: mol_type = other DNA
acttttggaggtcaggaatt

SEQ ID NO: 16500 - DNA, 20 bp, synthetic construct
  misc_feature 1..20: note = chemically synthesized
  source 1..20: mol_type = other DNA
gaattcagattcatttttct

SEQ ID NO: 16501 - DNA, 20 bp, synthetic construct
  misc_feature 1..20: note = chemically synthesized
  source 1..20: mol_type = other DNA
ttcatttttctcggcctgta

SEQ ID NO: 16502 - DNA, 20 bp, synthetic construct
  misc_feature 1..20: note = chemically synthesized
  source 1..20: mol_type = other DNA
aagaacttgaaattgcatta

SEQ ID NO: 16503 - DNA, 20 bp, synthetic construct
  misc_feature 1..20: note = chemically synthesized
  source 1..20: mol_type = other DNA
aacttgaaattgcattatag

SEQ ID NO: 16504 - DNA, 20 bp, synthetic construct
  misc_feature 1..20: note = chemically synthesized
  source 1..20: mol_type = other DNA
aattgcattatagcagaatg

SEQ ID NO: 16505 - DNA, 20 bp, synthetic construct
  misc_feature 1..20: note = chemically synthesized
  source 1..20: mol_type = other DNA
attgcattatagcagaatgt

SEQ ID NO: 16506 - DNA, 20 bp, synthetic construct
  misc_feature 1..20: note = chemically synthesized
  source 1..20: mol_type = other DNA
tatagcagaatgtaggcctt

SEQ ID NO: 16507 - DNA, 20 bp, synthetic construct
  misc_feature 1..20: note = chemically synthesized
  source 1..20: mol_type = other DNA
agcagaatgtaggccttgag

SEQ ID NO: 16508 - DNA, 20 bp, synthetic construct
  misc_feature 1..20: note = chemically synthesized
  source 1..20: mol_type = other DNA
aggccttgagtggattgatg

SEQ ID NO: 16509 - DNA, 20 bp, synthetic construct
  misc_feature 1..20: note = chemically synthesized
  source 1..20: mol_type = other DNA
ccttgagtggattgatgtgg

SEQ ID NO: 16510 - DNA, 20 bp, synthetic construct
  misc_feature 1..20: note = chemically synthesized
  source 1..20: mol_type = other DNA
gattgatgtggaagcaaaac

SEQ ID NO: 16511 - DNA, 20 bp, synthetic construct
  misc_feature 1..20: note = chemically synthesized
  source 1..20: mol_type = other DNA
agcaaaacaagccacaaata

SEQ ID NO: 16512 - DNA, 20 bp, synthetic construct
  misc_feature 1..20: note = chemically synthesized
  source 1..20: mol_type = other DNA
tgacttgtgccattaatttt

SEQ ID NO: 16513 - DNA, 20 bp, synthetic construct
  misc_feature 1..20: note = chemically synthesized
  source 1..20: mol_type = other DNA
cttgtgccattaattttaag

SEQ ID NO: 16514 - DNA, 20 bp, synthetic construct
  misc_feature 1..20: note = chemically synthesized
  source 1..20: mol_type = other DNA
aagcagtttcatatgaaacg

SEQ ID NO: 16515 - DNA, 20 bp, synthetic construct
  misc_feature 1..20: note = chemically synthesized
  source 1..20: mol_type = other DNA
agcagtttcatatgaaacgt

SEQ ID NO: 16516 - DNA, 20 bp, synthetic construct
  misc_feature 1..20: note = chemically synthesized
  source 1..20: mol_type = other DNA
gtttctttattgctacgtca

SEQ ID NO: 16517 - DNA, 20 bp, synthetic construct
  misc_feature 1..20: note = chemically synthesized
  source 1..20: mol_type = other DNA
ctttattgctacgtcacagt

SEQ ID NO: 16518 - DNA, 20 bp, synthetic construct
  misc_feature 1..20: note = chemically synthesized
  source 1..20: mol_type = other DNA
acgtcacagtcagatgttca

SEQ ID NO: 16519 - DNA, 20 bp, synthetic construct
  misc_feature 1..20: note = chemically synthesized
  source 1..20: mol_type = other DNA
agtcagatgttcatggtcct

SEQ ID NO: 16520 - DNA, 20 bp, synthetic construct
  misc_feature 1..20: note = chemically synthesized
  source 1..20: mol_type = other DNA
ggtcctgagtgctctcctcc

SEQ ID NO: 16521 - DNA, 20 bp, synthetic construct
  misc_feature 1..20: note = chemically synthesized
  source 1..20: mol_type = other DNA
cctgagtgctctcctccaag

SEQ ID NO: 16522 - DNA, 20 bp, synthetic construct
  misc_feature 1..20: note = chemically synthesized
  source 1..20: mol_type = other DNA
gagtgctctcctccaagcag

SEQ ID NO: 16523 - DNA, 20 bp, synthetic construct
  misc_feature 1..20: note = chemically synthesized
  source 1..20: mol_type = other DNA
agtgctctcctccaagcagt

SEQ ID NO: 16524 - DNA, 20 bp, synthetic construct
  misc_feature 1..20: note = chemically synthesized
  source 1..20: mol_type = other DNA
ctctcctccaagcagtgggc

SEQ ID NO: 16525 - DNA, 20 bp, synthetic construct
  misc_feature 1..20: note = chemically synthesized
  source 1..20: mol_type = other DNA
tctcctccaagcagtgggcc

SEQ ID NO: 16526 - DNA, 20 bp, synthetic construct
  misc_feature 1..20: note = chemically synthesized
  source 1..20: mol_type = other DNA
tcctccaagcagtgggccag

SEQ ID NO: 16527 - DNA, 20 bp, synthetic construct
  misc_feature 1..20: note = chemically synthesized
  source 1..20: mol_type = other DNA
caagcagtgggccaggagtc

SEQ ID NO: 16528 - DNA, 20 bp, synthetic construct
  misc_feature 1..20: note = chemically synthesized
  source 1..20: mol_type = other DNA
aagcagtgggccaggagtcc

SEQ ID NO: 16529 - DNA, 20 bp, synthetic construct
  misc_feature 1..20: note = chemically synthesized
  source 1..20: mol_type = other DNA
tgtgattgactttatcattt

SEQ ID NO: 16530 - DNA, 20 bp, synthetic construct
  misc_feature 1..20: note = chemically synthesized
  source 1..20: mol_type = other DNA
atcttttactttctgccaca

SEQ ID NO: 16531 - DNA, 20 bp, synthetic construct
  misc_feature 1..20: note = chemically synthesized
  source 1..20: mol_type = other DNA
cttttactttctgccacata

SEQ ID NO: 16532 - DNA, 20 bp, synthetic construct
  misc_feature 1..20: note = chemically synthesized
  source 1..20: mol_type = other DNA
ttttactttctgccacatag

SEQ ID NO: 16533 - DNA, 20 bp, synthetic construct
  misc_feature 1..20: note = chemically synthesized
  source 1..20: mol_type = other DNA
tactttctgccacatagagg

SEQ ID NO: 16534 - DNA, 20 bp, synthetic construct
  misc_feature 1..20: note = chemically synthesized
  source 1..20: mol_type = other DNA
actttctgccacatagagga

SEQ ID NO: 16535 - DNA, 20 bp, synthetic construct
  misc_feature 1..20: note = chemically synthesized
  source 1..20: mol_type = other DNA
ctttctgccacatagaggaa

SEQ ID NO: 16536 - DNA, 20 bp, synthetic construct
  misc_feature 1..20: note = chemically synthesized
  source 1..20: mol_type = other DNA
ctgccacatagaggaaggga

SEQ ID NO: 16537 - DNA, 20 bp, synthetic construct
  misc_feature 1..20: note = chemically synthesized
  source 1..20: mol_type = other DNA
gccacatagaggaagggaaa

SEQ ID NO: 16538 - DNA, 20 bp, synthetic construct
  misc_feature 1..20: note = chemically synthesized
  source 1..20: mol_type = other DNA
gaggaagggaaagagaatga

SEQ ID NO: 16539 - DNA, 20 bp, synthetic construct
  misc_feature 1..20: note = chemically synthesized
  source 1..20: mol_type = other DNA
gaagggaaagagaatgatag

SEQ ID NO: 16540 - DNA, 20 bp, synthetic construct
  misc_feature 1..20: note = chemically synthesized
  source 1..20: mol_type = other DNA
aagggaaagagaatgataga

SEQ ID NO: 16541 - DNA, 20 bp, synthetic construct
  misc_feature 1..20: note = chemically synthesized
  source 1..20: mol_type = other DNA
agggaaagagaatgatagaa

SEQ ID NO: 16542 - DNA, 20 bp, synthetic construct
  misc_feature 1..20: note = chemically synthesized
  source 1..20: mol_type = other DNA
gatagaagggcactctgcct

SEQ ID NO: 16543 - DNA, 20 bp, synthetic construct
  misc_feature 1..20: note = chemically synthesized
  source 1..20: mol_type = other DNA
atagaagggcactctgcctt

SEQ ID NO: 16544 - DNA, 20 bp, synthetic construct
  misc_feature 1..20: note = chemically synthesized
  source 1..20: mol_type = other DNA
tagaagggcactctgcctta

SEQ ID NO: 16545 - DNA, 20 bp, synthetic construct
  misc_feature 1..20: note = chemically synthesized
  source 1..20: mol_type = other DNA
gaagggcactctgccttagg

SEQ ID NO: 16546 - DNA, 20 bp, synthetic construct
  misc_feature 1..20: note = chemically synthesized
  source 1..20: mol_type = other DNA
ttattatctccacattattt

SEQ ID NO: 16547 - DNA, 20 bp, synthetic construct
  misc_feature 1..20: note = chemically synthesized
  source 1..20: mol_type = other DNA
cacattattttagtcacaac

SEQ ID NO: 16548 - DNA, 20 bp, synthetic construct
  misc_feature 1..20: note = chemically synthesized
  source 1..20: mol_type = other DNA
tttagtcacaaccagtcaca

SEQ ID NO: 16549 - DNA, 20 bp, synthetic construct
  misc_feature 1..20: note = chemically synthesized
  source 1..20: mol_type = other DNA
tcacaaccagtcacatggcc

SEQ ID NO: 16550 - DNA, 20 bp, synthetic construct
  misc_feature 1..20: note = chemically synthesized
  source 1..20: mol_type = other DNA
cacatggccaagttaattgc

SEQ ID NO: 16551 - DNA, 20 bp, synthetic construct
  misc_feature 1..20: note = chemically synthesized
  source 1..20: mol_type = other DNA
acatggccaagttaattgca

SEQ ID NO: 16552 - DNA, 20 bp, synthetic construct
  misc_feature 1..20: note = chemically synthesized
  source 1..20: mol_type = other DNA
catggccaagttaattgcaa

SEQ ID NO: 16553 - DNA, 20 bp, synthetic construct
  misc_feature 1..20: note = chemically synthesized
  source 1..20: mol_type = other DNA
aagttaattgcaagggctgt

SEQ ID NO: 16554 - DNA, 20 bp, synthetic construct
  misc_feature 1..20: note = chemically synthesized
  source 1..20: mol_type = other DNA
aagggctgttggaaattgtt

SEQ ID NO: 16555 - DNA, 20 bp, synthetic construct
  misc_feature 1..20: note = chemically synthesized
  source 1..20: mol_type = other DNA
ggctgttggaaattgttgag

SEQ ID NO: 16556 - DNA, 20 bp, synthetic construct
  misc_feature 1..20: note = chemically synthesized
  source 1..20: mol_type = other DNA
tgttgagaagtatattgatt

SEQ ID NO: 16557 - DNA, 20 bp, synthetic construct
  misc_feature 1..20: note = chemically synthesized
  source 1..20: mol_type = other DNA
tgtttctgacatactgtgtc

SEQ ID NO: 16558 - DNA, 20 bp, synthetic construct
  misc_feature 1..20: note = chemically synthesized
  source 1..20: mol_type = other DNA
tgacatactgtgtccggaat

SEQ ID NO: 16559 - DNA, 20 bp, synthetic construct
  misc_feature 1..20: note = chemically synthesized
  source 1..20: mol_type = other DNA
catactgtgtccggaattgg

SEQ ID NO: 16560 - DNA, 20 bp, synthetic construct
  misc_feature 1..20: note = chemically synthesized
  source 1..20: mol_type = other DNA
atactgtgtccggaattggt

SEQ ID NO: 16561 - DNA, 20 bp, synthetic construct
  misc_feature 1..20: note = chemically synthesized
  source 1..20: mol_type = other DNA
gtccggaattggtgggttct

SEQ ID NO: 16562 - DNA, 20 bp, synthetic construct
  misc_feature 1..20: note = chemically synthesized
  source 1..20: mol_type = other DNA
ttcttggtttcactgacttc

SEQ ID NO: 16563 - DNA, 20 bp, synthetic construct
  misc_feature 1..20: note = chemically synthesized
  source 1..20: mol_type = other DNA
tttcactgacttcaagaatg

SEQ ID NO: 16564 - DNA, 20 bp, synthetic construct
  misc_feature 1..20: note = chemically synthesized
  source 1..20: mol_type = other DNA
actgacttcaagaatgaagc

SEQ ID NO: 16565 - DNA, 20 bp, synthetic construct
  misc_feature 1..20: note = chemically synthesized
  source 1..20: mol_type = other DNA
ctgacttcaagaatgaagcc

SEQ ID NO: 16566 - DNA, 20 bp, synthetic construct
  misc_feature 1..20: note = chemically synthesized
  source 1..20: mol_type = other DNA
tgacttcaagaatgaagccg

SEQ ID NO: 16567 - DNA, 20 bp, synthetic construct
  misc_feature 1..20: note = chemically synthesized
  source 1..20: mol_type = other DNA
aatgaagccggggaccctcg

SEQ ID NO: 16568 - DNA, 20 bp, synthetic construct
  misc_feature 1..20: note = chemically synthesized
  source 1..20: mol_type = other DNA
aagccggggaccctcgtggt

SEQ ID NO: 16569 - DNA, 20 bp, synthetic construct
  misc_feature 1..20: note = chemically synthesized
  source 1..20: mol_type = other DNA
gaccctcgtggtgagtgtta

SEQ ID NO: 16570 - DNA, 20 bp, synthetic construct
  misc_feature 1..20: note = chemically synthesized
  source 1..20: mol_type = other DNA
ggtgagtgttacagttctta

SEQ ID NO: 16571 - DNA, 20 bp, synthetic construct
  misc_feature 1..20: note = chemically synthesized
  source 1..20: mol_type = other DNA
gtgagtgttacagttcttaa

SEQ ID NO: 16572 - DNA, 20 bp, synthetic construct
  misc_feature 1..20: note = chemically synthesized
  source 1..20: mol_type = other DNA
gttcttaaaggctgcgtgtg

SEQ ID NO: 16573 - DNA, 20 bp, synthetic construct
  misc_feature 1..20: note = chemically synthesized
  source 1..20: mol_type = other DNA
tcttaaaggctgcgtgtgtg

SEQ ID NO: 16574 - DNA, 20 bp, synthetic construct
  misc_feature 1..20: note = chemically synthesized
  source 1..20: mol_type = other DNA
agtttgttcgttctgatgtt

SEQ ID NO: 16575 - DNA, 20 bp, synthetic construct
  misc_feature 1..20: note = chemically synthesized
  source 1..20: mol_type = other DNA
ttctgatgtttggatgtgtt

SEQ ID NO: 16576 - DNA, 20 bp, synthetic construct
  misc_feature 1..20: note = chemically synthesized
  source 1..20: mol_type = other DNA
ctgatgtttggatgtgttcg

SEQ ID NO: 16577 - DNA, 20 bp, synthetic construct
  misc_feature 1..20: note = chemically synthesized
  source 1..20: mol_type = other DNA
tcggagtttcttccttctga

SEQ ID NO: 16578 - DNA, 20 bp, synthetic construct
  misc_feature 1..20: note = chemically synthesized
  source 1..20: mol_type = other DNA
cggagtttcttccttctgat

SEQ ID NO: 16579 - DNA, 20 bp, synthetic construct
  misc_feature 1..20: note = chemically synthesized
  source 1..20: mol_type = other DNA
tcttccttctgatgggttcg

SEQ ID NO: 16580 - DNA, 20 bp, synthetic construct
  misc_feature 1..20: note = chemically synthesized
  source 1..20: mol_type = other DNA
tgatgggttcgtggtctcgc

SEQ ID NO: 16581 - DNA, 20 bp, synthetic construct
  misc_feature 1..20: note = chemically synthesized
  source 1..20: mol_type = other DNA
ggttcgtggtctcgctggct

SEQ ID NO: 16582 - DNA, 20 bp, synthetic construct
  misc_feature 1..20: note = chemically synthesized
  source 1..20: mol_type = other DNA
gttcgtggtctcgctggctc

SEQ ID NO: 16583 - DNA, 20 bp, synthetic construct
  misc_feature 1..20: note = chemically synthesized
  source 1..20: mol_type = other DNA
tcgtggtctcgctggctcag

SEQ ID NO: 16584 - DNA, 20 bp, synthetic construct
  misc_feature 1..20: note = chemically synthesized
  source 1..20: mol_type = other DNA
gtctcgctggctcaggagtg

SEQ ID NO: 16585 - DNA, 20 bp, synthetic construct
  misc_feature 1..20: note = chemically synthesized
  source 1..20: mol_type = other DNA
ctggctcaggagtgaagctg

SEQ ID NO: 16586 - DNA, 20 bp, synthetic construct
  misc_feature 1..20: note = chemically synthesized
  source 1..20: mol_type = other DNA
agtgaagctgcagaccttca

SEQ ID NO: 16587 - DNA, 20 bp, synthetic construct
  misc_feature 1..20: note = chemically synthesized
  source 1..20: mol_type = other DNA
gaccttcacagtgaacgttc

SEQ ID NO: 16588 - DNA, 20 bp, synthetic construct
  misc_feature 1..20: note = chemically synthesized
  source 1..20: mol_type = other DNA
cagtgaacgttccagctctt

SEQ ID NO: 16589 - DNA, 20 bp, synthetic construct
  misc_feature 1..20: note = chemically synthesized
  source 1..20: mol_type = other DNA
agtgaacgttccagctctta

SEQ ID NO: 16590 - DNA, 20 bp, synthetic construct
  misc_feature 1..20: note = chemically synthesized
  source 1..20: mol_type = other DNA
gaacgttccagctcttaagg

SEQ ID NO: 16591 - DNA, 20 bp, synthetic construct
  misc_feature 1..20: note = chemically synthesized
  source 1..20: mol_type = other DNA
agctcttaaggcggcgcctc

SEQ ID NO: 16592 - DNA, 20 bp, synthetic construct
  misc_feature 1..20: note = chemically synthesized
  source 1..20: mol_type = other DNA
ctcttaaggcggcgcctctg

SEQ ID NO: 16593 - DNA, 20 bp, synthetic construct
  misc_feature 1..20: note = chemically synthesized
  source 1..20: mol_type = other DNA
ctggagttgttcgttcctcc

SEQ ID NO: 16594 - DNA, 20 bp, synthetic construct
  misc_feature 1..20: note = chemically synthesized
  source 1..20: mol_type = other DNA
gagttgttcgttcctcccgg

SEQ ID NO: 16595 - DNA, 20 bp, synthetic construct
  misc_feature 1..20: note = chemically synthesized
  source 1..20: mol_type = other DNA
agttgttcgttcctcccggt

SEQ ID NO: 16596 - DNA, 20 bp, synthetic construct
  misc_feature 1..20: note = chemically synthesized
  source 1..20: mol_type = other DNA
cgttcctcccggtgggttcg

SEQ ID NO: 16597 - DNA, 20 bp, synthetic construct
  misc_feature 1..20: note = chemically synthesized
  source 1..20: mol_type = other DNA
cggtgggttcgtggtctcgc

SEQ ID NO: 16598 - DNA, 20 bp, synthetic construct
  misc_feature 1..20: note = chemically synthesized
  source 1..20: mol_type = other DNA
ttcgtggtctcgctggcttc

SEQ ID NO: 16599 - DNA, 20 bp, synthetic construct
  misc_feature 1..20: note = chemically synthesized
  source 1..20: mol_type = other DNA
cgtggtctcgctggcttcaa

SEQ ID NO: 16600 - DNA, 20 bp, synthetic construct
  misc_feature 1..20: note = chemically synthesized
  source 1..20: mol_type = other DNA
tctcgctggcttcaagagtg

SEQ ID NO: 16601 - DNA, 20 bp, synthetic construct
  misc_feature 1..20: note = chemically synthesized
  source 1..20: mol_type = other DNA
tggcttcaagagtgaagctg

SEQ ID NO: 16602 - DNA, 20 bp, synthetic construct
  misc_feature 1..20: note = chemically synthesized
  source 1..20: mol_type = other DNA
agtgaagctgcagaccttcg

SEQ ID NO: 16603 - DNA, 20 bp, synthetic construct
  misc_feature 1..20: note = chemically synthesized
  source 1..20: mol_type = other DNA
aagctgcagaccttcgcggt

SEQ ID NO: 16604 - DNA, 20 bp, synthetic construct
  misc_feature 1..20: note = chemically synthesized
  source 1..20: mol_type = other DNA
gaccttcgcggtgagcgtta

SEQ ID NO: 16605 - DNA, 20 bp, synthetic construct
  misc_feature 1..20: note = chemically synthesized
  source 1..20: mol_type = other DNA
ggtgagcgttacagctcata

SEQ ID NO: 16606 - DNA, 20 bp, synthetic construct
  misc_feature 1..20: note = chemically synthesized
  source 1..20: mol_type = other DNA
gtgagcgttacagctcataa

SEQ ID NO: 16607 - DNA, 20 bp, synthetic construct
  misc_feature 1..20: note = chemically synthesized
  source 1..20: mol_type = other DNA
agcgttacagctcataaagg

SEQ ID NO: 16608 - DNA, 20 bp, synthetic construct
  misc_feature 1..20: note = chemically synthesized
  source 1..20: mol_type = other DNA
tacagctcataaaggcagtg

SEQ ID NO: 16609 - DNA, 20 bp, synthetic construct
  misc_feature 1..20: note = chemically synthesized
  source 1..20: mol_type = other DNA
aaaggcagtgtagacccaaa

SEQ ID NO: 16610 - DNA, 20 bp, synthetic construct
  misc_feature 1..20: note = chemically synthesized
  source 1..20: mol_type = other DNA
gcagtgtagacccaaacagt

SEQ ID NO: 16611 - DNA, 20 bp, synthetic construct
  misc_feature 1..20: note = chemically synthesized
  source 1..20: mol_type = other DNA
gtgtagacccaaacagtgag

SEQ ID NO: 16612 - DNA, 20 bp, synthetic construct
  misc_feature 1..20: note = chemically synthesized
  source 1..20: mol_type = other DNA
tagacccaaacagtgagcag

SEQ ID NO: 16613 - DNA, 20 bp, synthetic construct
  misc_feature 1..20: note = chemically synthesized
  source 1..20: mol_type = other DNA
cccaaacagtgagcagcagc

SEQ ID NO: 16614 - DNA, 20 bp, synthetic construct
  misc_feature 1..20: note = chemically synthesized
  source 1..20: mol_type = other DNA
cagcagcaagatttattgca

SEQ ID NO: 16615 - DNA, 20 bp, synthetic construct
  misc_feature 1..20: note = chemically synthesized
  source 1..20: mol_type = other DNA
gcagcaagatttattgcaaa

SEQ ID NO: 16616 - DNA, 20 bp, synthetic construct
  misc_feature 1..20: note = chemically synthesized
  source 1..20: mol_type = other DNA
agatttattgcaaagagcga

SEQ ID NO: 16617 - DNA, 20 bp, synthetic construct
  misc_feature 1..20: note = chemically synthesized
  source 1..20: mol_type = other DNA
ttgcaaagagcgaaagaaca

SEQ ID NO: 16618 - DNA, 20 bp, synthetic construct
  misc_feature 1..20: note = chemically synthesized
  source 1..20: mol_type = other DNA
gcgaaagaacaaagcttcca

SEQ ID NO: 16619 - DNA, 20 bp, synthetic construct
  misc_feature 1..20: note = chemically synthesized
  source 1..20: mol_type = other DNA
agaacaaagcttccacagtg

SEQ ID NO: 16620 - DNA, 20 bp, synthetic construct
  misc_feature 1..20: note = chemically synthesized
  source 1..20: mol_type = other DNA
acaaagcttccacagtgtgg

SEQ ID NO: 16621 - DNA, 20 bp, synthetic construct
  misc_feature 1..20: note = chemically synthesized
  source 1..20: mol_type = other DNA
caaagcttccacagtgtgga

SEQ ID NO: 16622 - DNA, 20 bp, synthetic construct
  misc_feature 1..20: note = chemically synthesized
  source 1..20: mol_type = other DNA
aaagcttccacagtgtggaa

SEQ ID NO: 16623 - DNA, 20 bp, synthetic construct
  misc_feature 1..20: note = chemically synthesized
  source 1..20: mol_type = other DNA
aagcttccacagtgtggaag

SEQ ID NO: 16624 - DNA, 20 bp, synthetic construct
  misc_feature 1..20: note = chemically synthesized
  source 1..20: mol_type = other DNA
cacagtgtggaaggggaccc

SEQ ID NO: 16625 - DNA, 20 bp, synthetic construct
  misc_feature 1..20: note = chemically synthesized
  source 1..20: mol_type = other DNA
agtgtggaaggggacccgag

SEQ ID NO: 16626 - DNA, 20 bp, synthetic construct
  misc_feature 1..20: note = chemically synthesized
  source 1..20: mol_type = other DNA
gtgtggaaggggacccgagc

SEQ ID NO: 16627 - DNA, 20 bp, synthetic construct
  misc_feature 1..20: note = chemically synthesized
  source 1..20: mol_type = other DNA
cccgagcgggttgccactgc

SEQ ID NO: 16628 - DNA, 20 bp, synthetic construct
  misc_feature 1..20: note = chemically synthesized
  source 1..20: mol_type = other DNA
gcgggttgccactgctggct

SEQ ID NO: 16629 - DNA, 20 bp, synthetic construct
  misc_feature 1..20: note = chemically synthesized
  source 1..20: mol_type = other DNA
cgggttgccactgctggctc

SEQ ID NO: 16630 - DNA, 20 bp, synthetic construct
  misc_feature 1..20: note = chemically synthesized
  source 1..20: mol_type = other DNA
gttgccactgctggctcggg

SEQ ID NO: 16631 - DNA, 20 bp, synthetic construct
  misc_feature 1..20: note = chemically synthesized
  source 1..20: mol_type = other DNA
cctgcttttattctcttatc

SEQ ID NO: 16632 - DNA, 20 bp, synthetic construct
  misc_feature 1..20: note = chemically synthesized
  source 1..20: mol_type = other DNA
cccacccacatcctgctgat

SEQ ID NO: 16633 - DNA, 20 bp, synthetic construct
  misc_feature 1..20: note = chemically synthesized
  source 1..20: mol_type = other DNA
acccacatcctgctgattgg

SEQ ID NO: 16634 - DNA, 20 bp, synthetic construct
  misc_feature 1..20: note = chemically synthesized
  source 1..20: mol_type = other DNA
ccacatcctgctgattggta

SEQ ID NO: 16635 - DNA, 20 bp, synthetic construct
  misc_feature 1..20: note = chemically synthesized
  source 1..20: mol_type = other DNA
tcctgctgattggtagagcc

SEQ ID NO: 16636 - DNA, 20 bp, synthetic construct
  misc_feature 1..20: note = chemically synthesized
  source 1..20: mol_type = other DNA
tgctgattggtagagcccag

SEQ ID NO: 16637 - DNA, 20 bp, synthetic construct
  misc_feature 1..20: note = chemically synthesized
  source 1..20: mol_type = other DNA
agcccagtggtctgttttga

SEQ ID NO: 16638 - DNA, 20 bp, synthetic construct
  misc_feature 1..20: note = chemically synthesized
  source 1..20: mol_type = other DNA
gcccagtggtctgttttgac

SEQ ID NO: 16639 - DNA, 20 bp, synthetic construct
  misc_feature 1..20: note = chemically synthesized
  source 1..20: mol_type = other DNA
cccagtggtctgttttgaca

SEQ ID NO: 16640 - DNA, 20 bp, synthetic construct
  misc_feature 1..20: note = chemically synthesized
  source 1..20: mol_type = other DNA
tgttttgacagggcactgat

SEQ ID NO: 16641 - DNA, 20 bp, synthetic construct
  misc_feature 1..20: note = chemically synthesized
  source 1..20: mol_type = other DNA
ttggtgcatttacaatccat

SEQ ID NO: 16642 - DNA, 20 bp, synthetic construct
  misc_feature 1..20: note = chemically synthesized
  source 1..20: mol_type = other DNA
tgcatttacaatccatgagc

SEQ ID NO: 16643 - DNA, 20 bp, synthetic construct
  misc_feature 1..20: note = chemically synthesized
  source 1..20: mol_type = other DNA
caatccatgagctagacaca

SEQ ID NO: 16644 - DNA, 20 bp, synthetic construct
  misc_feature 1..20: note = chemically synthesized
  source 1..20: mol_type = other DNA
aatccatgagctagacacaa

SEQ ID NO: 16645 - DNA, 20 bp, synthetic construct
  misc_feature 1..20: note = chemically synthesized
  source 1..20: mol_type = other DNA
aaggttctccacgtccccac

SEQ ID NO: 16646 - DNA, 20 bp, synthetic construct
  misc_feature 1..20: note = chemically synthesized
  source 1..20: mol_type = other DNA
tctccacgtccccaccagat

SEQ ID NO: 16647 - DNA, 20 bp, synthetic construct
  misc_feature 1..20: note = chemically synthesized
  source 1..20: mol_type = other DNA
cacgtccccaccagattagc

SEQ ID NO: 16648 - DNA, 20 bp, synthetic construct
  misc_feature 1..20: note = chemically synthesized
  source 1..20: mol_type = other DNA
cccaccagattagctagata

SEQ ID NO: 16649 - DNA, 20 bp, synthetic construct
  misc_feature 1..20: note = chemically synthesized
  source 1..20: mol_type = other DNA
caccagattagctagataca

SEQ ID NO: 16650 - DNA, 20 bp, synthetic construct
  misc_feature 1..20: note = chemically synthesized
  source 1..20: mol_type = other DNA
agatacagagtgtccacaca

SEQ ID NO: 16651 - DNA, 20 bp, synthetic construct
  misc_feature 1..20: note = chemically synthesized
  source 1..20: mol_type = other DNA
gatacagagtgtccacacaa

SEQ ID NO: 16652 - DNA, 20 bp, synthetic construct
  misc_feature 1..20: note = chemically synthesized
  source 1..20: mol_type = other DNA
tgtccacacaaaggttctcc

SEQ ID NO: 16653 - DNA, 20 bp, synthetic construct
  misc_feature 1..20: note = chemically synthesized
  source 1..20: mol_type = other DNA
aaggttctccaagtccccac

SEQ ID NO: 16654 - DNA, 20 bp, synthetic construct
  misc_feature 1..20: note = chemically synthesized
  source 1..20: mol_type = other DNA
ggttctccaagtccccacca

SEQ ID NO: 16655 - DNA, 20 bp, synthetic construct
  misc_feature 1..20: note = chemically synthesized
  source 1..20: mol_type = other DNA
tctccaagtccccaccagag

SEQ ID NO: 16656 - DNA, 20 bp, synthetic construct
  misc_feature 1..20: note = chemically synthesized
  source 1..20: mol_type = other DNA
caagtccccaccagagtagc

SEQ ID NO: 16657 - DNA, 20 bp, synthetic construct
  misc_feature 1..20: note = chemically synthesized
  source 1..20: mol_type = other DNA
cccaccagagtagctagata

SEQ ID NO: 16658 - DNA, 20 bp, synthetic construct
  misc_feature 1..20: note = chemically synthesized
  source 1..20: mol_type = other DNA
caccagagtagctagataca

SEQ ID NO: 16659 - DNA, 20 bp, synthetic construct
  misc_feature 1..20: note = chemically synthesized
  source 1..20: mol_type = other DNA
gctagatacagagtgttgat

SEQ ID NO: 16660 - DNA, 20 bp, synthetic construct
  misc_feature 1..20: note = chemically synthesized
  source 1..20: mol_type = other DNA
ttggtgcattcacaaaccct

SEQ ID NO: 16661 - DNA, 20 bp, synthetic construct
  misc_feature 1..20: note = chemically synthesized
  source 1..20: mol_type = other DNA
tgcattcacaaaccctgagc

SEQ ID NO: 16662 - DNA, 20 bp, synthetic construct
  misc_feature 1..20: note = chemically synthesized
  source 1..20: mol_type = other DNA
cacaaaccctgagctagaca

SEQ ID NO: 16663 - DNA, 20 bp, synthetic construct
  misc_feature 1..20: note = chemically synthesized
  source 1..20: mol_type = other DNA
acaaaccctgagctagacac

SEQ ID NO: 16664 - DNA, 20 bp, synthetic construct
  misc_feature 1..20: note = chemically synthesized
  source 1..20: mol_type = other DNA
caaaccctgagctagacaca

SEQ ID NO: 16665 - DNA, 20 bp, synthetic construct
  misc_feature 1..20: note = chemically synthesized
  source 1..20: mol_type = other DNA
gctagacacagggtgctgat

SEQ ID NO: 16666 - DNA, 20 bp, synthetic construct
  misc_feature 1..20: note = chemically synthesized
  source 1..20: mol_type = other DNA
ttggtgtgtttacaaacctt

SEQ ID NO: 16667 - DNA, 20 bp, synthetic construct
  misc_feature 1..20: note = chemically synthesized
  source 1..20: mol_type = other DNA
tgtgtttacaaaccttgagc

SEQ ID NO: 16668 - DNA, 20 bp, synthetic construct
  misc_feature 1..20: note = chemically synthesized
  source 1..20: mol_type = other DNA
tacaaaccttgagctagata

SEQ ID NO: 16669 - DNA, 20 bp, synthetic construct
  misc_feature 1..20: note = chemically synthesized
  source 1..20: mol_type = other DNA
tgagctagatacagactgcc

SEQ ID NO: 16670 - DNA, 20 bp, synthetic construct
  misc_feature 1..20: note = chemically synthesized
  source 1..20: mol_type = other DNA
gctagatacagactgccgag

SEQ ID NO: 16671 - DNA, 20 bp, synthetic construct
  misc_feature 1..20: note = chemically synthesized
  source 1..20: mol_type = other DNA
gtggtgtatttacaatccct

SEQ ID NO: 16672 - DNA, 20 bp, synthetic construct
  misc_feature 1..20: note = chemically synthesized
  source 1..20: mol_type = other DNA
tgtatttacaatccctgagc

SEQ ID NO: 16673 - DNA, 20 bp, synthetic construct
  misc_feature 1..20: note = chemically synthesized
  source 1..20: mol_type = other DNA
caatccctgagctagacata

SEQ ID NO: 16674 - DNA, 20 bp, synthetic construct
  misc_feature 1..20: note = chemically synthesized
  source 1..20: mol_type = other DNA
aatccctgagctagacataa

SEQ ID NO: 16675 - DNA, 20 bp, synthetic construct
  misc_feature 1..20: note = chemically synthesized
  source 1..20: mol_type = other DNA
aaggttctccacgtccccac

SEQ ID NO: 16676 - DNA, 20 bp, synthetic construct
  misc_feature 1..20: note = chemically synthesized
  source 1..20: mol_type = other DNA
ggttctccacgtccccacca

SEQ ID NO: 16677 - DNA, 20 bp, synthetic construct
  misc_feature 1..20: note = chemically synthesized
  source 1..20: mol_type = other DNA
tctccacgtccccaccagag

SEQ ID NO: 16678 - DNA, 20 bp, synthetic construct
  misc_feature 1..20: note = chemically synthesized
  source 1..20: mol_type = other DNA
cacgtccccaccagagtagc

SEQ ID NO: 16679 - DNA, 20 bp, synthetic construct
  misc_feature 1..20: note = chemically synthesized
  source 1..20: mol_type = other DNA
cccaccagagtagctagata

SEQ ID NO: 16680 - DNA, 20 bp, synthetic construct
  misc_feature 1..20: note = chemically synthesized
  source 1..20: mol_type = other DNA
caccagagtagctagataca

SEQ ID NO: 16681 - DNA, 20 bp, synthetic construct
  misc_feature 1..20: note = chemically synthesized
  source 1..20: mol_type = other DNA
gctagatacagagtgttgat

SEQ ID NO: 16682 - DNA, 20 bp, synthetic construct
  misc_feature 1..20: note = chemically synthesized
  source 1..20: mol_type = other DNA
ttggtgcattcacaaaccct

SEQ ID NO: 16683 - DNA, 20 bp, synthetic construct
  misc_feature 1..20: note = chemically synthesized
  source 1..20: mol_type = other DNA
tgcattcacaaaccctgagc

SEQ ID NO: 16684 - DNA, 20 bp, synthetic construct
  misc_feature 1..20: note = chemically synthesized
  source 1..20: mol_type = other DNA
cacaaaccctgagctagaca

SEQ ID NO: 16685 - DNA, 20 bp, synthetic construct
  misc_feature 1..20: note = chemically synthesized
  source 1..20: mol_type = other DNA
acaaaccctgagctagacac

SEQ ID NO: 16686 - DNA, 20 bp, synthetic construct
  misc_feature 1..20: note = chemically synthesized
  source 1..20: mol_type = other DNA
caaaccctgagctagacaca

SEQ ID NO: 16687 - DNA, 20 bp, synthetic construct
  misc_feature 1..20: note = chemically synthesized
  source 1..20: mol_type = other DNA
gctagacacagggtgctgat

SEQ ID NO: 16688 - DNA, 20 bp, synthetic construct
  misc_feature 1..20: note = chemically synthesized
  source 1..20: mol_type = other DNA
ttggtgtgtttacaaacctt

SEQ ID NO: 16689 - DNA, 20 bp, synthetic construct
  misc_feature 1..20: note = chemically synthesized
  source 1..20: mol_type = other DNA
tgtgtttacaaaccttgagc

SEQ ID NO: 16690 - DNA, 20 bp, synthetic construct
  misc_feature 1..20: note = chemically synthesized
  source 1..20: mol_type = other DNA
tacaaaccttgagctagata

SEQ ID NO: 16691 - DNA, 20 bp, synthetic construct
  misc_feature 1..20: note = chemically synthesized
  source 1..20: mol_type = other DNA
gctagatacagactgccgat

SEQ ID NO: 16692 - DNA, 20 bp, synthetic construct
  misc_feature 1..20: note = chemically synthesized
  source 1..20: mol_type = other DNA
ttggtgtatttacaatccct

SEQ ID NO: 16693 - DNA, 20 bp, synthetic construct
  misc_feature 1..20: note = chemically synthesized
  source 1..20: mol_type = other DNA
tgtatttacaatccctgagc

SEQ ID NO: 16694 - DNA, 20 bp, synthetic construct
  misc_feature 1..20: note = chemically synthesized
  source 1..20: mol_type = other DNA
caatccctgagctagacata

SEQ ID NO: 16695 - DNA, 20 bp, synthetic construct
  misc_feature 1..20: note = chemically synthesized
  source 1..20: mol_type = other DNA
aatccctgagctagacataa

SEQ ID NO: 16696 - DNA, 20 bp, synthetic construct
  misc_feature 1..20: note = chemically synthesized
  source 1..20: mol_type = other DNA
gctagacataaaggttctcc

SEQ ID NO: 16697 - DNA, 20 bp, synthetic construct
  misc_feature 1..20: note = chemically synthesized
  source 1..20: mol_type = other DNA
ctagacataaaggttctcca

SEQ ID NO: 16698 - DNA, 20 bp, synthetic construct
  misc_feature 1..20: note = chemically synthesized
  source 1..20: mol_type = other DNA
aaggttctccaaggccccac

SEQ ID NO: 16699 - DNA, 20 bp, synthetic construct
  misc_feature 1..20: note = chemically synthesized
  source 1..20: mol_type = other DNA
ggttctccaaggccccacca

SEQ ID NO: 16700 - DNA, 20 bp, synthetic construct
  misc_feature 1..20: note = chemically synthesized
  source 1..20: mol_type = other DNA
tctccaaggccccaccagag

SEQ ID NO: 16701 - DNA, 20 bp, synthetic construct
  misc_feature 1..20: note = chemically synthesized
  source 1..20: mol_type = other DNA
caaggccccaccagagtagc

SEQ ID NO: 16702 - DNA, 20 bp, synthetic construct
  misc_feature 1..20: note = chemically synthesized
  source 1..20: mol_type = other DNA
gccccaccagagtagctaga

SEQ ID NO: 16703 - DNA, 20 bp, synthetic construct
  misc_feature 1..20: note = chemically synthesized
  source 1..20: mol_type = other DNA
cccaccagagtagctagata

SEQ ID NO: 16704 - DNA, 20 bp, synthetic construct
  misc_feature 1..20: note = chemically synthesized
  source 1..20: mol_type = other DNA
tagctagatagagtgttgat

SEQ ID NO: 16705 - DNA, 20 bp, synthetic construct
  misc_feature 1..20: note = chemically synthesized
  source 1..20: mol_type = other DNA
ttggtgcattcacaaaccct

SEQ ID NO: 16706 - DNA, 20 bp, synthetic construct
  misc_feature 1..20: note = chemically synthesized
  source 1..20: mol_type = other DNA
tgcattcacaaaccctgagc

SEQ ID NO: 16707 - DNA, 20 bp, synthetic construct
  misc_feature 1..20: note = chemically synthesized
  source 1..20: mol_type = other DNA
cacaaaccctgagctagaca

SEQ ID NO: 16708 - DNA, 20 bp, synthetic construct
  misc_feature 1..20: note = chemically synthesized
  source 1..20: mol_type = other DNA
acaaaccctgagctagacac

SEQ ID NO: 16709 - DNA, 20 bp, synthetic construct
  misc_feature 1..20: note = chemically synthesized
  source 1..20: mol_type = other DNA
caaaccctgagctagacaca

SEQ ID NO: 16710 - DNA, 20 bp, synthetic construct
  misc_feature 1..20: note = chemically synthesized
  source 1..20: mol_type = other DNA
gctagacacagggtgctgat

SEQ ID NO: 16711 - DNA, 20 bp, synthetic construct
  misc_feature 1..20: note = chemically synthesized
  source 1..20: mol_type = other DNA
ttggtgtgtttacaaacctt

SEQ ID NO: 16712 - DNA, 20 bp, synthetic construct
  misc_feature 1..20: note = chemically synthesized
  source 1..20: mol_type = other DNA
tgtgtttacaaaccttgagc

SEQ ID NO: 16713 - DNA, 20 bp, synthetic construct
  misc_feature 1..20: note = chemically synthesized
  source 1..20: mol_type = other DNA
tacaaaccttgagctagata

SEQ ID NO: 16714 - DNA, 20 bp, synthetic construct
  misc_feature 1..20: note = chemically synthesized
  source 1..20: mol_type = other DNA
caaaccttgagctagataca

SEQ ID NO: 16715 - DNA, 20 bp, synthetic construct
  misc_feature 1..20: note = chemically synthesized
  source 1..20: mol_type = other DNA
gctagatacagagtgccaat

SEQ ID NO: 16716 - DNA, 20 bp, synthetic construct
  misc_feature 1..20: note = chemically synthesized
  source 1..20: mol_type = other DNA
tgtatttacaatcccttatc

SEQ ID NO: 16717 - DNA, 20 bp, synthetic construct
  misc_feature 1..20: note = chemically synthesized
  source 1..20: mol_type = other DNA
acaatcccttatctagacat

SEQ ID NO: 16718 - DNA, 20 bp, synthetic construct
  misc_feature 1..20: note = chemically synthesized
  source 1..20: mol_type = other DNA
caatcccttatctagacata

SEQ ID NO: 16719 - DNA, 20 bp, synthetic construct
  misc_feature 1..20: note = chemically synthesized
  source 1..20: mol_type = other DNA
aatcccttatctagacataa

SEQ ID NO: 16720 - DNA, 20 bp, synthetic construct
  misc_feature 1..20: note = chemically synthesized
  source 1..20: mol_type = other DNA
ataagggttcttcgcatccc

SEQ ID NO: 16721 - DNA, 20 bp, synthetic construct
  misc_feature 1..20: note = chemically synthesized
  source 1..20: mol_type = other DNA
cttcgcatccccagcaaact

SEQ ID NO: 16722 - DNA, 20 bp, synthetic construct
  misc_feature 1..20: note = chemically synthesized
  source 1..20: mol_type = other DNA
ttcgcatccccagcaaactc

SEQ ID NO: 16723 - DNA, 20 bp, synthetic construct
  misc_feature 1..20: note = chemically synthesized
  source 1..20: mol_type = other DNA
cgcatccccagcaaactcag

SEQ ID NO: 16724 - DNA, 20 bp, synthetic construct
  misc_feature 1..20: note = chemically synthesized
  source 1..20: mol_type = other DNA
ccccagcaaactcaggagcc

SEQ ID NO: 16725 - DNA, 20 bp, synthetic construct
  misc_feature 1..20: note = chemically synthesized
  source 1..20: mol_type = other DNA
agcaaactcaggagcctagc

SEQ ID NO: 16726 - DNA, 20 bp, synthetic construct
  misc_feature 1..20: note = chemically synthesized
  source 1..20: mol_type = other DNA
ggagcctagccggcttcacc

SEQ ID NO: 16727 - DNA, 20 bp, synthetic construct
  misc_feature 1..20: note = chemically synthesized
  source 1..20: mol_type = other DNA
gcctagccggcttcacccag

SEQ ID NO: 16728 - DNA, 20 bp, synthetic construct
  misc_feature 1..20: note = chemically synthesized
  source 1..20: mol_type = other DNA
cacccagtggatcccgcacc

SEQ ID NO: 16729 - DNA, 20 bp, synthetic construct
  misc_feature 1..20: note = chemically synthesized
  source 1..20: mol_type = other DNA
acccagtggatcccgcacct

SEQ ID NO: 16730 - DNA, 20 bp, synthetic construct
  misc_feature 1..20: note = chemically synthesized
  source 1..20: mol_type = other DNA
tggatcccgcacctgggctg

SEQ ID NO: 16731 - DNA, 20 bp, synthetic construct
  misc_feature 1..20: note = chemically synthesized
  source 1..20: mol_type = other DNA
ggatcccgcacctgggctgc

SEQ ID NO: 16732 - DNA, 20 bp, synthetic construct
  misc_feature 1..20: note = chemically synthesized
  source 1..20: mol_type = other DNA
gatcccgcacctgggctgca

SEQ ID NO: 16733 - DNA, 20 bp, synthetic construct
  misc_feature 1..20: note = chemically synthesized
  source 1..20: mol_type = other DNA
atcccgcacctgggctgcag

SEQ ID NO: 16734 - DNA, 20 bp, synthetic construct
  misc_feature 1..20: note = chemically synthesized
  source 1..20: mol_type = other DNA
tcccgcacctgggctgcagg

SEQ ID NO: 16735 - DNA, 20 bp, synthetic construct
  misc_feature 1..20: note = chemically synthesized
  source 1..20: mol_type = other DNA
ccgcacctgggctgcagggg

SEQ ID NO: 16736 - DNA, 20 bp, synthetic construct
  misc_feature 1..20: note = chemically synthesized
  source 1..20: mol_type = other DNA
ctgcagggggagctgcctgc

SEQ ID NO: 16737 - DNA, 20 bp, synthetic construct
  misc_feature 1..20: note = chemically synthesized
  source 1..20: mol_type = other DNA
tgccgtgcgcccgcactctt

SEQ ID NO: 16738 - DNA, 20 bp, synthetic construct
  misc_feature 1..20: note = chemically synthesized
  source 1..20: mol_type = other DNA
cgcccgcactcttcagccct

SEQ ID NO: 16739 - DNA, 20 bp, synthetic construct
  misc_feature 1..20: note = chemically synthesized
  source 1..20: mol_type = other DNA
gcccgcactcttcagccctt

SEQ ID NO: 16740 - DNA, 20 bp, synthetic construct
  misc_feature 1..20: note = chemically synthesized
  source 1..20: mol_type = other DNA
cgcactcttcagcccttggg

SEQ ID NO: 16741 - DNA, 20 bp, synthetic construct
  misc_feature 1..20: note = chemically synthesized
  source 1..20: mol_type = other DNA
ttcagcccttgggtggtcga

SEQ ID NO: 16742 - DNA, 20 bp, synthetic construct
  misc_feature 1..20: note = chemically synthesized
  source 1..20: mol_type = other DNA
tcagcccttgggtggtcgat

SEQ ID NO: 16743 - DNA, 20 bp, synthetic construct
  misc_feature 1..20: note = chemically synthesized
  source 1..20: mol_type = other DNA
ccttgggtggtcgatgggac

SEQ ID NO: 16744 - DNA, 20 bp, synthetic construct
  misc_feature 1..20: note = chemically synthesized
  source 1..20: mol_type = other DNA
cttgggtggtcgatgggact

SEQ ID NO: 16745 - DNA, 20 bp, synthetic construct
  misc_feature 1..20: note = chemically synthesized
  source 1..20: mol_type = other DNA
gtcgatgggactgggtgccc

SEQ ID NO: 16746 - DNA, 20 bp, synthetic construct
  misc_feature 1..20: note = chemically synthesized
  source 1..20: mol_type = other DNA
cgatgggactgggtgccctg

SEQ ID NO: 16747 - DNA, 20 bp, synthetic construct
  misc_feature 1..20: note = chemically synthesized
  source 1..20: mol_type = other DNA
tgggactgggtgccctggag

SEQ ID NO: 16748 - DNA, 20 bp, synthetic construct
  misc_feature 1..20: note = chemically synthesized
  source 1..20: mol_type = other DNA
gggactgggtgccctggagc

SEQ ID NO: 16749 - DNA, 20 bp, synthetic construct
  misc_feature 1..20: note = chemically synthesized
  source 1..20: mol_type = other DNA
ggactgggtgccctggagca

SEQ ID NO: 16750 - DNA, 20 bp, synthetic construct
  misc_feature 1..20: note = chemically synthesized
  source 1..20: mol_type = other DNA
gactgggtgccctggagcag

SEQ ID NO: 16751 - DNA, 20 bp, synthetic construct
  misc_feature 1..20: note = chemically synthesized
  source 1..20: mol_type = other DNA
actgggtgccctggagcagg

SEQ ID NO: 16752 - DNA, 20 bp, synthetic construct
  misc_feature 1..20: note = chemically synthesized
  source 1..20: mol_type = other DNA
gggtgccctggagcaggggg

SEQ ID NO: 16753 - DNA, 20 bp, synthetic construct
  misc_feature 1..20: note = chemically synthesized
  source 1..20: mol_type = other DNA
gagcagggggcggcgctcgt

SEQ ID NO: 16754 - DNA, 20 bp, synthetic construct
  misc_feature 1..20: note = chemically synthesized
  source 1..20: mol_type = other DNA
agggggcggcgctcgtcggc

SEQ ID NO: 16755 - DNA, 20 bp, synthetic construct
  misc_feature 1..20: note = chemically synthesized
  source 1..20: mol_type = other DNA
gggggcggcgctcgtcggcg

SEQ ID NO: 16756 - DNA, 20 bp, synthetic construct
  misc_feature 1..20: note = chemically synthesized
  source 1..20: mol_type = other DNA
cggcgctcgtcggcgaggct

SEQ ID NO: 16757 - DNA, 20 bp, synthetic construct
  misc_feature 1..20: note = chemically synthesized
  source 1..20: mol_type = other DNA
ggcgctcgtcggcgaggctc

SEQ ID NO: 16758 - DNA, 20 bp, synthetic construct
  misc_feature 1..20: note = chemically synthesized
  source 1..20: mol_type = other DNA
tcggcgaggctcgggccgca

SEQ ID NO: 16759 - DNA, 20 bp, synthetic construct
  misc_feature 1..20: note = chemically synthesized
  source 1..20: mol_type = other DNA
cggcgaggctcgggccgcac

SEQ ID NO: 16760 - DNA, 20 bp, synthetic construct
  misc_feature 1..20: note = chemically synthesized
  source 1..20: mol_type = other DNA
gcgaggctcgggccgcacag

SEQ ID NO: 16761 - DNA, 20 bp, synthetic construct
  misc_feature 1..20: note = chemically synthesized
  source 1..20: mol_type = other DNA
gggccgcacaggagcccatg

SEQ ID NO: 16762 - DNA, 20 bp, synthetic construct
  misc_feature 1..20: note = chemically synthesized
  source 1..20: mol_type = other DNA
ggccgcacaggagcccatga

SEQ ID NO: 16763 - DNA, 20 bp, synthetic construct
  misc_feature 1..20: note = chemically synthesized
  source 1..20: mol_type = other DNA
cgcacaggagcccatgaagg

SEQ ID NO: 16764 - DNA, 20 bp, synthetic construct
  misc_feature 1..20: note = chemically synthesized
  source 1..20: mol_type = other DNA
gcacaggagcccatgaaggt

SEQ ID NO: 16765 - DNA, 20 bp, synthetic construct
  misc_feature 1..20: note = chemically synthesized
  source 1..20: mol_type = other DNA
cacaggagcccatgaaggtg

SEQ ID NO: 16766 - DNA, 20 bp, synthetic construct
  misc_feature 1..20: note = chemically synthesized
  source 1..20: mol_type = other DNA
caggagcccatgaaggtggg

SEQ ID NO: 16767 - DNA, 20 bp, synthetic construct
  misc_feature 1..20: note = chemically synthesized
  source 1..20: mol_type = other DNA
aggagcccatgaaggtgggg

SEQ ID NO: 16768 - DNA, 20 bp, synthetic construct
  misc_feature 1..20: note = chemically synthesized
  source 1..20: mol_type = other DNA
cccatgaaggtggggaggct

SEQ ID NO: 16769 - DNA, 20 bp, synthetic construct
  misc_feature 1..20: note = chemically synthesized
  source 1..20: mol_type = other DNA
ccatgaaggtggggaggctc

SEQ ID NO: 16770 - DNA, 20 bp, synthetic construct
  misc_feature 1..20: note = chemically synthesized
  source 1..20: mol_type = other DNA
aaggtggggaggctcaggca

SEQ ID NO: 16771 - DNA, 20 bp, synthetic construct
  misc_feature 1..20: note = chemically synthesized
  source 1..20: mol_type = other DNA
ggctcaggcatggcgcgctg

SEQ ID NO: 16772 - DNA, 20 bp, synthetic construct
  misc_feature 1..20: note = chemically synthesized
  source 1..20: mol_type = other DNA
gctcaggcatggcgcgctgc

SEQ ID NO: 16773 - DNA, 20 bp, synthetic construct
  misc_feature 1..20: note = chemically synthesized
  source 1..20: mol_type = other DNA
catggcgcgctgcaggtccc

SEQ ID NO: 16774 - DNA, 20 bp, synthetic construct
  misc_feature 1..20: note = chemically synthesized
  source 1..20: mol_type = other DNA
aggtcccgagccctgccccg

SEQ ID NO: 16775 - DNA, 20 bp, synthetic construct
  misc_feature 1..20: note = chemically synthesized
  source 1..20: mol_type = other DNA
ggtcccgagccctgccccgc

SEQ ID NO: 16776 - DNA, 20 bp, synthetic construct
  misc_feature 1..20: note = chemically synthesized
  source 1..20: mol_type = other DNA
cccgagccctgccccgcagg

SEQ ID NO: 16777 - DNA, 20 bp, synthetic construct
  misc_feature 1..20: note = chemically synthesized
  source 1..20: mol_type = other DNA
ccgagccctgccccgcagga

SEQ ID NO: 16778 - DNA, 20 bp, synthetic construct
  misc_feature 1..20: note = chemically synthesized
  source 1..20: mol_type = other DNA
agccctgccccgcaggaagg

SEQ ID NO: 16779 - DNA, 20 bp, synthetic construct
  misc_feature 1..20: note = chemically synthesized
  source 1..20: mol_type = other DNA
tgccccgcaggaaggcagct

SEQ ID NO: 16780 - DNA, 20 bp, synthetic construct
  misc_feature 1..20: note = chemically synthesized
  source 1..20: mol_type = other DNA
gccccgcaggaaggcagcta

SEQ ID NO: 16781 - DNA, 20 bp, synthetic construct
  misc_feature 1..20: note = chemically synthesized
  source 1..20: mol_type = other DNA
gcaggaaggcagctaaggcc

SEQ ID NO: 16782 - DNA, 20 bp, synthetic construct
  misc_feature 1..20: note = chemically synthesized
  source 1..20: mol_type = other DNA
gaaggcagctaaggcccggc

SEQ ID NO: 16783 - DNA, 20 bp, synthetic construct
  misc_feature 1..20: note = chemically synthesized
  source 1..20: mol_type = other DNA
aaggcagctaaggcccggcg

SEQ ID NO: 16784 - DNA, 20 bp, synthetic construct
  misc_feature 1..20: note = chemically synthesized
  source 1..20: mol_type = other DNA
ctaaggcccggcgaggaatt

SEQ ID NO: 16785 - DNA, 20 bp, synthetic construct
  misc_feature 1..20: note = chemically synthesized
  source 1..20: mol_type = other DNA
gcccggcgaggaattgagca

SEQ ID NO: 16786 - DNA, 20 bp, synthetic construct
  misc_feature 1..20: note = chemically synthesized
  source 1..20: mol_type = other DNA
cggcgaggaattgagcacag

SEQ ID NO: 16787 - DNA, 20 bp, synthetic construct
  misc_feature 1..20: note = chemically synthesized
  source 1..20: mol_type = other DNA
gaattgagcacagcagctgc

SEQ ID NO: 16788 - DNA, 20 bp, synthetic construct
  misc_feature 1..20: note = chemically synthesized
  source 1..20: mol_type = other DNA
gagcacagcagctgctggcc

SEQ ID NO: 16789 - DNA, 20 bp, synthetic construct
  misc_feature 1..20: note = chemically synthesized
  source 1..20: mol_type = other DNA
agcacagcagctgctggccc

SEQ ID NO: 16790 - DNA, 20 bp, synthetic construct
  misc_feature 1..20: note = chemically synthesized
  source 1..20: mol_type = other DNA
cagctgctggcccaggtgct

SEQ ID NO: 16791 - DNA, 20 bp, synthetic construct
  misc_feature 1..20: note = chemically synthesized
  source 1..20: mol_type = other DNA
gctaagcccctcactgcccg

SEQ ID NO: 16792 - DNA, 20 bp, synthetic construct
  misc_feature 1..20: note = chemically synthesized
  source 1..20: mol_type = other DNA
agcccctcactgcccgcggc

SEQ ID NO: 16793 - DNA, 20 bp, synthetic construct
  misc_feature 1..20: note = chemically synthesized
  source 1..20: mol_type = other DNA
ccctcactgcccgcggccgg

SEQ ID NO: 16794 - DNA, 20 bp, synthetic construct
  misc_feature 1..20: note = chemically synthesized
  source 1..20: mol_type = other DNA
cctcactgcccgcggccggt

SEQ ID NO: 16795 - DNA, 20 bp, synthetic construct
  misc_feature 1..20: note = chemically synthesized
  source 1..20: mol_type = other DNA
ctcactgcccgcggccggtg

SEQ ID NO: 16796 - DNA, 20 bp, synthetic construct
  misc_feature 1..20: note = chemically synthesized
  source 1..20: mol_type = other DNA
ctgcccgcggccggtggggc

SEQ ID NO: 16797 - DNA, 20 bp, synthetic construct
  misc_feature 1..20: note = chemically synthesized
  source 1..20: mol_type = other DNA
ccgcggccggtggggccggc

SEQ ID NO: 16798 - DNA, 20 bp, synthetic construct
  misc_feature 1..20: note = chemically synthesized
  source 1..20: mol_type = other DNA
cggccggtggggccggctgg

SEQ ID NO: 16799 - DNA, 20 bp, synthetic construct
  misc_feature 1..20: note = chemically synthesized
  source 1..20: mol_type = other DNA
tggggccggctggcggctcc

SEQ ID NO: 16800 - DNA, 20 bp, synthetic construct
  misc_feature 1..20: note = chemically synthesized
  source 1..20: mol_type = other DNA
ccggctggcggctccgagtg

SEQ ID NO: 16801 - DNA, 20 bp, synthetic construct
  misc_feature 1..20: note = chemically synthesized
  source 1..20: mol_type = other DNA
cggctggcggctccgagtgc

SEQ ID NO: 16802 - DNA, 20 bp, synthetic construct
  misc_feature 1..20: note = chemically synthesized
  source 1..20: mol_type = other DNA
ggctggcggctccgagtgcg

SEQ ID NO: 16803 - DNA, 20 bp, synthetic construct
  misc_feature 1..20: note = chemically synthesized
  source 1..20: mol_type = other DNA
ggctccgagtgcggggtcct

SEQ ID NO: 16804 - DNA, 20 bp, synthetic construct
  misc_feature 1..20: note = chemically synthesized
  source 1..20: mol_type = other DNA
ctccgagtgcggggtcctcg

SEQ ID NO: 16805 - DNA, 20 bp, synthetic construct
  misc_feature 1..20: note = chemically synthesized
  source 1..20: mol_type = other DNA
cctcggagcccatgcccacc

SEQ ID NO: 16806 - DNA, 20 bp, synthetic construct
  misc_feature 1..20: note = chemically synthesized
  source 1..20: mol_type = other DNA
tgcccacccggaactccctc

SEQ ID NO: 16807 - DNA, 20 bp, synthetic construct
  misc_feature 1..20: note = chemically synthesized
  source 1..20: mol_type = other DNA
acccggaactccctcaagca

SEQ ID NO: 16808 - DNA, 20 bp, synthetic construct
  misc_feature 1..20: note = chemically synthesized
  source 1..20: mol_type = other DNA
actccctcaagcacggcgca

SEQ ID NO: 16809 - DNA, 20 bp, synthetic construct
  misc_feature 1..20: note = chemically synthesized
  source 1..20: mol_type = other DNA
ctcaagcacggcgcacagcc

SEQ ID NO: 16810 - DNA, 20 bp, synthetic construct
  misc_feature 1..20: note = chemically synthesized
  source 1..20: mol_type = other DNA
gtctgtccctccacacctcc

SEQ ID NO: 16811 - DNA, 20 bp, synthetic construct
  misc_feature 1..20: note = chemically synthesized
  source 1..20: mol_type = other DNA
gtccctccacacctcctggc

SEQ ID NO: 16812 - DNA, 20 bp, synthetic construct
  misc_feature 1..20: note = chemically synthesized
  source 1..20: mol_type = other DNA
tccacacctcctggcaagct

SEQ ID NO: 16813 - DNA, 20 bp, synthetic construct
  misc_feature 1..20: note = chemically synthesized
  source 1..20: mol_type = other DNA
ccacacctcctggcaagctg

SEQ ID NO: 16814 - DNA, 20 bp, synthetic construct
  misc_feature 1..20: note = chemically synthesized
  source 1..20: mol_type = other DNA
cacacctcctggcaagctga

SEQ ID NO: 16815 - DNA, 20 bp, synthetic construct
  misc_feature 1..20: note = chemically synthesized
  source 1..20: mol_type = other DNA
cacctcctggcaagctgagg

SEQ ID NO: 16816 - DNA, 20 bp, synthetic construct
  misc_feature 1..20: note = chemically synthesized
  source 1..20: mol_type = other DNA
tcctggcaagctgagggagc

SEQ ID NO: 16817 - DNA, 20 bp, synthetic construct
  misc_feature 1..20: note = chemically synthesized
  source 1..20: mol_type = other DNA
caagctgagggagccggctc

SEQ ID NO: 16818 - DNA, 20 bp, synthetic construct
  misc_feature 1..20: note = chemically synthesized
  source 1..20: mol_type = other DNA
gagggagccggctctggcct

SEQ ID NO: 16819 - DNA, 20 bp, synthetic construct
  misc_feature 1..20: note = chemically synthesized
  source 1..20: mol_type = other DNA
gagccggctctggccttggc

SEQ ID NO: 16820 - DNA, 20 bp, synthetic construct
  misc_feature 1..20: note = chemically synthesized
  source 1..20: mol_type = other DNA
ggctctggccttggccagcc

SEQ ID NO: 16821 - DNA, 20 bp, synthetic construct
  misc_feature 1..20: note = chemically synthesized
  source 1..20: mol_type = other DNA
tggccttggccagcccagaa

SEQ ID NO: 16822 - DNA, 20 bp, synthetic construct
  misc_feature 1..20: note = chemically synthesized
  source 1..20: mol_type = other DNA
ggccttggccagcccagaaa

SEQ ID NO: 16823 - DNA, 20 bp, synthetic construct
  misc_feature 1..20: note = chemically synthesized
  source 1..20: mol_type = other DNA
gccttggccagcccagaaaa

SEQ ID NO: 16824 - DNA, 20 bp, synthetic construct
  misc_feature 1..20: note = chemically synthesized
  source 1..20: mol_type = other DNA
agcccagaaaagggctccca

SEQ ID NO: 16825 - DNA, 20 bp, synthetic construct
  misc_feature 1..20: note = chemically synthesized
  source 1..20: mol_type = other DNA
agaaaagggctcccacagtg

SEQ ID NO: 16826 - DNA, 20 bp, synthetic construct
  misc_feature 1..20: note = chemically synthesized
  source 1..20: mol_type = other DNA
aaagggctcccacagtgcag

SEQ ID NO: 16827 - DNA, 20 bp, synthetic construct
  misc_feature 1..20: note = chemically synthesized
  source 1..20: mol_type = other DNA
ggctcccacagtgcagcggc

SEQ ID NO: 16828 - DNA, 20 bp, synthetic construct
  misc_feature 1..20: note = chemically synthesized
  source 1..20: mol_type = other DNA
cacagtgcagcggccggctg

SEQ ID NO: 16829 - DNA, 20 bp, synthetic construct
  misc_feature 1..20: note = chemically synthesized
  source 1..20: mol_type = other DNA
acagtgcagcggccggctga

SEQ ID NO: 16830 - DNA, 20 bp, synthetic construct
  misc_feature 1..20: note = chemically synthesized
  source 1..20: mol_type = other DNA
cagtgcagcggccggctgaa

SEQ ID NO: 16831 - DNA, 20 bp, synthetic construct
  misc_feature 1..20: note = chemically synthesized
  source 1..20: mol_type = other DNA
ggccggctgaagggctcctc

SEQ ID NO: 16832 - DNA, 20 bp, synthetic construct
  misc_feature 1..20: note = chemically synthesized
  source 1..20: mol_type = other DNA
ctcctcaagtgccaccaatg

SEQ ID NO: 16833 - DNA, 20 bp, synthetic construct
  misc_feature 1..20: note = chemically synthesized
  source 1..20: mol_type = other DNA
tcctcaagtgccaccaatgt

SEQ ID NO: 16834 - DNA, 20 bp, synthetic construct
  misc_feature 1..20: note = chemically synthesized
  source 1..20: mol_type = other DNA
ctcaagtgccaccaatgtgg

SEQ ID NO: 16835 - DNA, 20 bp, synthetic construct
  misc_feature 1..20: note = chemically synthesized
  source 1..20: mol_type = other DNA
gtgccaccaatgtgggagcc

SEQ ID NO: 16836 - DNA, 20 bp, synthetic construct
  misc_feature 1..20: note = chemically synthesized
  source 1..20: mol_type = other DNA
tgccaccaatgtgggagccc

SEQ ID NO: 16837 - DNA, 20 bp, synthetic construct
  misc_feature 1..20: note = chemically synthesized
  source 1..20: mol_type = other DNA
caccaatgtgggagcccagg

SEQ ID NO: 16838 - DNA, 20 bp, synthetic construct
  misc_feature 1..20: note = chemically synthesized
  source 1..20: mol_type = other DNA
ccaatgtgggagcccaggca

SEQ ID NO: 16839 - DNA, 20 bp, synthetic construct
  misc_feature 1..20: note = chemically synthesized
  source 1..20: mol_type = other DNA
caatgtgggagcccaggcag

SEQ ID NO: 16840 - DNA, 20 bp, synthetic construct
  misc_feature 1..20: note = chemically synthesized
  source 1..20: mol_type = other DNA
atgtgggagcccaggcagag

SEQ ID NO: 16841 - DNA, 20 bp, synthetic construct
  misc_feature 1..20: note = chemically synthesized
  source 1..20: mol_type = other DNA
tgtgggagcccaggcagagg

SEQ ID NO: 16842 - DNA, 20 bp, synthetic construct
  misc_feature 1..20: note = chemically synthesized
  source 1..20: mol_type = other DNA
gcccaggcagaggaggcgcc

SEQ ID NO: 16843 - DNA, 20 bp, synthetic construct
  misc_feature 1..20: note = chemically synthesized
  source 1..20: mol_type = other DNA
ccaggcagaggaggcgccaa

SEQ ID NO: 16844 - DNA, 20 bp, synthetic construct
  misc_feature 1..20: note = chemically synthesized
  source 1..20: mol_type = other DNA
gcagaggaggcgccaagagc

SEQ ID NO: 16845 - DNA, 20 bp, synthetic construct
  misc_feature 1..20: note = chemically synthesized
  source 1..20: mol_type = other DNA
aggaggcgccaagagcgagc

SEQ ID NO: 16846 - DNA, 20 bp, synthetic construct
  misc_feature 1..20: note = chemically synthesized
  source 1..20: mol_type = other DNA
ggaggcgccaagagcgagcg

SEQ ID NO: 16847 - DNA, 20 bp, synthetic construct
  misc_feature 1..20: note = chemically synthesized
  source 1..20: mol_type = other DNA
gaggcgccaagagcgagcga

SEQ ID NO: 16848 - DNA, 20 bp, synthetic construct
  misc_feature 1..20: note = chemically synthesized
  source 1..20: mol_type = other DNA
caagagcgagcgagggctgt

SEQ ID NO: 16849 - DNA, 20 bp, synthetic construct
  misc_feature 1..20: note = chemically synthesized
  source 1..20: mol_type = other DNA
aagagcgagcgagggctgtg

SEQ ID NO: 16850 - DNA, 20 bp, synthetic construct
  misc_feature 1..20: note = chemically synthesized
  source 1..20: mol_type = other DNA
gcgagggctgtgaggactgc

SEQ ID NO: 16851 - DNA, 20 bp, synthetic construct
  misc_feature 1..20: note = chemically synthesized
  source 1..20: mol_type = other DNA
cacctctcaatactaatcac

SEQ ID NO: 16852 - DNA, 20 bp, synthetic construct
  misc_feature 1..20: note = chemically synthesized
  source 1..20: mol_type = other DNA
caatactaatcactagtaat

SEQ ID NO: 16853 - DNA, 20 bp, synthetic construct
  misc_feature 1..20: note = chemically synthesized
  source 1..20: mol_type = other DNA
ccctgtgcttccaaaaataa

SEQ ID NO: 16854 - DNA, 20 bp, synthetic construct
  misc_feature 1..20: note = chemically synthesized
  source 1..20: mol_type = other DNA
cctgtgcttccaaaaataac

SEQ ID NO: 16855 - DNA, 20 bp, synthetic construct
  misc_feature 1..20: note = chemically synthesized
  source 1..20: mol_type = other DNA
ggaatattattgtaaaatca

SEQ ID NO: 16856 - DNA, 20 bp, synthetic construct
  misc_feature 1..20: note = chemically synthesized
  source 1..20: mol_type = other DNA
gaatattattgtaaaatcaa

SEQ ID NO: 16857 - DNA, 20 bp, synthetic construct
  misc_feature 1..20: note = chemically synthesized
  source 1..20: mol_type = other DNA
ccatatgttttattatgttt

SEQ ID NO: 16858 - DNA, 20 bp, synthetic construct
  misc_feature 1..20: note = chemically synthesized
  source 1..20: mol_type = other DNA
tatgttttattatgtttaag

SEQ ID NO: 16859 - DNA, 20 bp, synthetic construct
  misc_feature 1..20: note = chemically synthesized
  source 1..20: mol_type = other DNA
tatgtttaagcagtaaaaat

SEQ ID NO: 16860 - DNA, 20 bp, synthetic construct
  misc_feature 1..20: note = chemically synthesized
  source 1..20: mol_type = other DNA
taagcagtaaaaataagacc

SEQ ID NO: 16861 - DNA, 20 bp, synthetic construct
  misc_feature 1..20: note = chemically synthesized
  source 1..20: mol_type = other DNA
agcagtaaaaataagacctg

SEQ ID NO: 16862 - DNA, 20 bp, synthetic construct
  misc_feature 1..20: note = chemically synthesized
  source 1..20: mol_type = other DNA
aataagacctggagtgcaaa

SEQ ID NO: 16863 - DNA, 20 bp, synthetic construct
  misc_feature 1..20: note = chemically synthesized
  source 1..20: mol_type = other DNA
ccaaatgctgtaatacttca

SEQ ID NO: 16864 - DNA, 20 bp, synthetic construct
  misc_feature 1..20: note = chemically synthesized
  source 1..20: mol_type = other DNA
tgtaatacttcatggaatct

SEQ ID NO: 16865 - DNA, 20 bp, synthetic construct
  misc_feature 1..20: note = chemically synthesized
  source 1..20: mol_type = other DNA
ccccaaattatgtcttattt

SEQ ID NO: 16866 - DNA, 20 bp, synthetic construct
  misc_feature 1..20: note = chemically synthesized
  source 1..20: mol_type = other DNA
ccaaattatgtcttatttca

SEQ ID NO: 16867 - DNA, 20 bp, synthetic construct
  misc_feature 1..20: note = chemically synthesized
  source 1..20: mol_type = other DNA
ttatttcagagcaaataact

SEQ ID NO: 16868 - DNA, 20 bp, synthetic construct
  misc_feature 1..20: note = chemically synthesized
  source 1..20: mol_type = other DNA
tatttcagagcaaataactt

SEQ ID NO: 16869 - DNA, 20 bp, synthetic construct
  misc_feature 1..20: note = chemically synthesized
  source 1..20: mol_type = other DNA
attattattgtataatgatt

SEQ ID NO: 16870 - DNA, 20 bp, synthetic construct
  misc_feature 1..20: note = chemically synthesized
  source 1..20: mol_type = other DNA
tattattgtataatgattca

SEQ ID NO: 16871 - DNA, 20 bp, synthetic construct
  misc_feature 1..20: note = chemically synthesized
  source 1..20: mol_type = other DNA
atgattcagagcatgtattc

SEQ ID NO: 16872 - DNA, 20 bp, synthetic construct
  misc_feature 1..20: note = chemically synthesized
  source 1..20: mol_type = other DNA
gattcagagcatgtattcta

SEQ ID NO: 16873 - DNA, 20 bp, synthetic construct
  misc_feature 1..20: note = chemically synthesized
  source 1..20: mol_type = other DNA
attctagagccaaatatcat

SEQ ID NO: 16874 - DNA, 20 bp, synthetic construct
  misc_feature 1..20: note = chemically synthesized
  source 1..20: mol_type = other DNA
agttgaattatgccctctgt

SEQ ID NO: 16875 - DNA, 20 bp, synthetic construct
  misc_feature 1..20: note = chemically synthesized
  source 1..20: mol_type = other DNA
gaattatgccctctgtcagt

SEQ ID NO: 16876 - DNA, 20 bp, synthetic construct
  misc_feature 1..20: note = chemically synthesized
  source 1..20: mol_type = other DNA
ttatgccctctgtcagttag

SEQ ID NO: 16877 - DNA, 20 bp, synthetic construct
  misc_feature 1..20: note = chemically synthesized
  source 1..20: mol_type = other DNA
agttagtagccacttcatct

SEQ ID NO: 16878 - DNA, 20 bp, synthetic construct
  misc_feature 1..20: note = chemically synthesized
  source 1..20: mol_type = other DNA
ttcatcttggaatattactt

SEQ ID NO: 16879 - DNA, 20 bp, synthetic construct
  misc_feature 1..20: note = chemically synthesized
  source 1..20: mol_type = other DNA
tcatcttggaatattacttt

SEQ ID NO: 16880 - DNA, 20 bp, synthetic construct
  misc_feature 1..20: note = chemically synthesized
  source 1..20: mol_type = other DNA
catcttggaatattacttta

SEQ ID NO: 16881 - DNA, 20 bp, synthetic construct
  misc_feature 1..20: note = chemically synthesized
  source 1..20: mol_type = other DNA
tactttagggccctgtgcct

SEQ ID NO: 16882 - DNA, 20 bp, synthetic construct
  misc_feature 1..20: note = chemically synthesized
  source 1..20: mol_type = other DNA
gcctcagtttcctcctctta

SEQ ID NO: 16883 - DNA, 20 bp, synthetic construct
  misc_feature 1..20: note = chemically synthesized
  source 1..20: mol_type = other DNA
cctcagtttcctcctcttaa

SEQ ID NO: 16884 - DNA, 20 bp, synthetic construct
  misc_feature 1..20: note = chemically synthesized
  source 1..20: mol_type = other DNA
ctcagtttcctcctcttaaa

SEQ ID NO: 16885 - DNA, 20 bp, synthetic construct
  misc_feature 1..20: note = chemically synthesized
  source 1..20: mol_type = other DNA
cctcttaaagggtattacaa

SEQ ID NO: 16886 - DNA, 20 bp, synthetic construct
  misc_feature 1..20: note = chemically synthesized
  source 1..20: mol_type = other DNA
agggtattacaatagtactt

SEQ ID NO: 16887 - DNA, 20 bp, synthetic construct
  misc_feature 1..20: note = chemically synthesized
  source 1..20: mol_type = other DNA
gggtattacaatagtacttg

SEQ ID NO: 16888 - DNA, 20 bp, synthetic construct
  misc_feature 1..20: note = chemically synthesized
  source 1..20: mol_type = other DNA
ttacaatagtacttgaggca

SEQ ID NO: 16889 - DNA, 20 bp, synthetic construct
  misc_feature 1..20: note = chemically synthesized
  source 1..20: mol_type = other DNA
acaatagtacttgaggcaca

SEQ ID NO: 16890 - DNA, 20 bp, synthetic construct
  misc_feature 1..20: note = chemically synthesized
  source 1..20: mol_type = other DNA
taaatgaaataatatatcaa

SEQ ID NO: 16891 - DNA, 20 bp, synthetic construct
  misc_feature 1..20: note = chemically synthesized
  source 1..20: mol_type = other DNA
tatcaacagtgtcttgtgta

SEQ ID NO: 16892 - DNA, 20 bp, synthetic construct
  misc_feature 1..20: note = chemically synthesized
  source 1..20: mol_type = other DNA
cagtgtcttgtgtatagtat

SEQ ID NO: 16893 - DNA, 20 bp, synthetic construct
  misc_feature 1..20: note = chemically synthesized
  source 1..20: mol_type = other DNA
ctattacttttatactatcc

SEQ ID NO: 16894 - DNA, 20 bp, synthetic construct
  misc_feature 1..20: note = chemically synthesized
  source 1..20: mol_type = other DNA
ttttatactatcctagtgtg

SEQ ID NO: 16895 - DNA, 20 bp, synthetic construct
  misc_feature 1..20: note = chemically synthesized
  source 1..20: mol_type = other DNA
actatcctagtgtgtagatt

SEQ ID NO: 16896 - DNA, 20 bp, synthetic construct
  misc_feature 1..20: note = chemically synthesized
  source 1..20: mol_type = other DNA
ctatcctagtgtgtagattg

SEQ ID NO: 16897 - DNA, 20 bp, synthetic construct
  misc_feature 1..20: note = chemically synthesized
  source 1..20: mol_type = other DNA
tagtgtgtagattgaggatg

SEQ ID NO: 16898 - DNA, 20 bp, synthetic construct
  misc_feature 1..20: note = chemically synthesized
  source 1..20: mol_type = other DNA
agtgtgtagattgaggatgt

SEQ ID NO: 16899 - DNA, 20 bp, synthetic construct
  misc_feature 1..20: note = chemically synthesized
  source 1..20: mol_type = other DNA
gtgtgtagattgaggatgta

SEQ ID NO: 16900 - DNA, 20 bp, synthetic construct
  misc_feature 1..20: note = chemically synthesized
  source 1..20: mol_type = other DNA
tgtgtagattgaggatgtag

SEQ ID NO: 16901 - DNA, 20 bp, synthetic construct
  misc_feature 1..20: note = chemically synthesized
  source 1..20: mol_type = other DNA
agattgaggatgtaggggct

SEQ ID NO: 16902 - DNA, 20 bp, synthetic construct
  misc_feature 1..20: note = chemically synthesized
  source 1..20: mol_type = other DNA
attgaggatgtaggggctta

SEQ ID NO: 16903 - DNA, 20 bp, synthetic construct
  misc_feature 1..20: note = chemically synthesized
  source 1..20: mol_type = other DNA
ggatgtaggggcttagagca

SEQ ID NO: 16904 - DNA, 20 bp, synthetic construct
  misc_feature 1..20: note = chemically synthesized
  source 1..20: mol_type = other DNA
gggcttagagcaaagacatg

SEQ ID NO: 16905 - DNA, 20 bp, synthetic construct
  misc_feature 1..20: note = chemically synthesized
  source 1..20: mol_type = other DNA
ggcttagagcaaagacatga

SEQ ID NO: 16906 - DNA, 20 bp, synthetic construct
  misc_feature 1..20: note = chemically synthesized
  source 1..20: mol_type = other DNA
aaagacatgaaggtcacata

SEQ ID NO: 16907 - DNA, 20 bp, synthetic construct
  misc_feature 1..20: note = chemically synthesized
  source 1..20: mol_type = other DNA
aagacatgaaggtcacatat

SEQ ID NO: 16908 - DNA, 20 bp, synthetic construct
  misc_feature 1..20: note = chemically synthesized
  source 1..20: mol_type = other DNA
acatgaaggtcacatatggg

SEQ ID NO: 16909 - DNA, 20 bp, synthetic construct
  misc_feature 1..20: note = chemically synthesized
  source 1..20: mol_type = other DNA
aggtcacatatgggtagaca

SEQ ID NO: 16910 - DNA, 20 bp, synthetic construct
  misc_feature 1..20: note = chemically synthesized
  source 1..20: mol_type = other DNA
ggtcacatatgggtagacat

SEQ ID NO: 16911 - DNA, 20 bp, synthetic construct
  misc_feature 1..20: note = chemically synthesized
  source 1..20: mol_type = other DNA
tgggtagacatgggaataaa

SEQ ID NO: 16912 - DNA, 20 bp, synthetic construct
  misc_feature 1..20: note = chemically synthesized
  source 1..20: mol_type = other DNA
agacatgggaataaatagat

SEQ ID NO: 16913 - DNA, 20 bp, synthetic construct
  misc_feature 1..20: note = chemically synthesized
  source 1..20: mol_type = other DNA
atagatgagatgacattgtc

SEQ ID NO: 16914 - DNA, 20 bp, synthetic construct
  misc_feature 1..20: note = chemically synthesized
  source 1..20: mol_type = other DNA
tagatgagatgacattgtca

SEQ ID NO: 16915 - DNA, 20 bp, synthetic construct
  misc_feature 1..20: note = chemically synthesized
  source 1..20: mol_type = other DNA
gacattgtcaaggattacac

SEQ ID NO: 16916 - DNA, 20 bp, synthetic construct
  misc_feature 1..20: note = chemically synthesized
  source 1..20: mol_type = other DNA
tacacgagtctttctctgca

SEQ ID NO: 16917 - DNA, 20 bp, synthetic construct
  misc_feature 1..20: note = chemically synthesized
  source 1..20: mol_type = other DNA
cgagtctttctctgcaaagc

SEQ ID NO: 16918 - DNA, 20 bp, synthetic construct
  misc_feature 1..20: note = chemically synthesized
  source 1..20: mol_type = other DNA
gagtctttctctgcaaagcg

SEQ ID NO: 16919 - DNA, 20 bp, synthetic construct
  misc_feature 1..20: note = chemically synthesized
  source 1..20: mol_type = other DNA
agtctttctctgcaaagcga

SEQ ID NO: 16920 - DNA, 20 bp, synthetic construct
  misc_feature 1..20: note = chemically synthesized
  source 1..20: mol_type = other DNA
ctttctctgcaaagcgaggg

SEQ ID NO: 16921 - DNA, 20 bp, synthetic construct
  misc_feature 1..20: note = chemically synthesized
  source 1..20: mol_type = other DNA
tttctctgcaaagcgaggga

SEQ ID NO: 16922 - DNA, 20 bp, synthetic construct
  misc_feature 1..20: note = chemically synthesized
  source 1..20: mol_type = other DNA
tctgcaaagcgagggaaggt

SEQ ID NO: 16923 - DNA, 20 bp, synthetic construct
  misc_feature 1..20: note = chemically synthesized
  source 1..20: mol_type = other DNA
gagggaaggttagtctcttt

SEQ ID NO: 16924 - DNA, 20 bp, synthetic construct
  misc_feature 1..20: note = chemically synthesized
  source 1..20: mol_type = other DNA
gggaaggttagtctctttca

SEQ ID NO: 16925 - DNA, 20 bp, synthetic construct
  misc_feature 1..20: note = chemically synthesized
  source 1..20: mol_type = other DNA
gtctctttcagagaacatca

SEQ ID NO: 16926 - DNA, 20 bp, synthetic construct
  misc_feature 1..20: note = chemically synthesized
  source 1..20: mol_type = other DNA
tctttcagagaacatcatgg

SEQ ID NO: 16927 - DNA, 20 bp, synthetic construct
  misc_feature 1..20: note = chemically synthesized
  source 1..20: mol_type = other DNA
catggcagaaacattttttc

SEQ ID NO: 16928 - DNA, 20 bp, synthetic construct
  misc_feature 1..20: note = chemically synthesized
  source 1..20: mol_type = other DNA
tggcagaaacattttttcaa

SEQ ID NO: 16929 - DNA, 20 bp, synthetic construct
  misc_feature 1..20: note = chemically synthesized
  source 1..20: mol_type = other DNA
ccatgcattttacgtccatg

SEQ ID NO: 16930 - DNA, 20 bp, synthetic construct
  misc_feature 1..20: note = chemically synthesized
  source 1..20: mol_type = other DNA
atgtagttgcaaacaatgcc

SEQ ID NO: 16931 - DNA, 20 bp, synthetic construct
  misc_feature 1..20: note = chemically synthesized
  source 1..20: mol_type = other DNA
tagttgcaaacaatgccaag

SEQ ID NO: 16932 - DNA, 20 bp, synthetic construct
  misc_feature 1..20: note = chemically synthesized
  source 1..20: mol_type = other DNA
tgccaagtagaactccaatc

SEQ ID NO: 16933 - DNA, 20 bp, synthetic construct
  misc_feature 1..20: note = chemically synthesized
  source 1..20: mol_type = other DNA
ccaagtagaactccaatcca

SEQ ID NO: 16934 - DNA, 20 bp, synthetic construct
  misc_feature 1..20: note = chemically synthesized
  source 1..20: mol_type = other DNA
tagaactccaatccagagct

SEQ ID NO: 16935 - DNA, 20 bp, synthetic construct
  misc_feature 1..20: note = chemically synthesized
  source 1..20: mol_type = other DNA
aactccaatccagagctaag

SEQ ID NO: 16936 - DNA, 20 bp, synthetic construct
  misc_feature 1..20: note = chemically synthesized
  source 1..20: mol_type = other DNA
actccaatccagagctaagt

SEQ ID NO: 16937 - DNA, 20 bp, synthetic construct
  misc_feature 1..20: note = chemically synthesized
  source 1..20: mol_type = other DNA
ctccaatccagagctaagtg

SEQ ID NO: 16938 - DNA, 20 bp, synthetic construct
  misc_feature 1..20: note = chemically synthesized
  source 1..20: mol_type = other DNA
tccagagctaagtggggctg

SEQ ID NO: 16939 - DNA, 20 bp, synthetic construct
  misc_feature 1..20: note = chemically synthesized
  source 1..20: mol_type = other DNA
ccagagctaagtggggctgt

SEQ ID NO: 16940 - DNA, 20 bp, synthetic construct
  misc_feature 1..20: note = chemically synthesized
  source 1..20: mol_type = other DNA
gggaactatgtaccaattga

SEQ ID NO: 16941 - DNA, 20 bp, synthetic construct
  misc_feature 1..20: note = chemically synthesized
  source 1..20: mol_type = other DNA
ggacatgctgctttttgact

SEQ ID NO: 16942 - DNA, 20 bp, synthetic construct
  misc_feature 1..20: note = chemically synthesized
  source 1..20: mol_type = other DNA
acatgctgctttttgactca

SEQ ID NO: 16943 - DNA, 20 bp, synthetic construct
  misc_feature 1..20: note = chemically synthesized
  source 1..20: mol_type = other DNA
catgctgctttttgactcag

SEQ ID NO: 16944 - DNA, 20 bp, synthetic construct
  misc_feature 1..20: note = chemically synthesized
  source 1..20: mol_type = other DNA
gctgctttttgactcagagg

SEQ ID NO: 16945 - DNA, 20 bp, synthetic construct
  misc_feature 1..20: note = chemically synthesized
  source 1..20: mol_type = other DNA
tttttgactcagaggtggat

SEQ ID NO: 16946 - DNA, 20 bp, synthetic construct
  misc_feature 1..20: note = chemically synthesized
  source 1..20: mol_type = other DNA
tttgactcagaggtggataa

SEQ ID NO: 16947 - DNA, 20 bp, synthetic construct
  misc_feature 1..20: note = chemically synthesized
  source 1..20: mol_type = other DNA
agacaaaactcttttcttct

SEQ ID NO: 16948 - DNA, 20 bp, synthetic construct
  misc_feature 1..20: note = chemically synthesized
  source 1..20: mol_type = other DNA
ttcttcttagatgtactaaa

SEQ ID NO: 16949 - DNA, 20 bp, synthetic construct
  misc_feature 1..20: note = chemically synthesized
  source 1..20: mol_type = other DNA
ttcttagatgtactaaaaag

SEQ ID NO: 16950 - DNA, 20 bp, synthetic construct
  misc_feature 1..20: note = chemically synthesized
  source 1..20: mol_type = other DNA
tagatgtactaaaaagtagt

SEQ ID NO: 16951 - DNA, 20 bp, synthetic construct
  misc_feature 1..20: note = chemically synthesized
  source 1..20: mol_type = other DNA
gtactaaaaagtagttagtc

SEQ ID NO: 16952 - DNA, 20 bp, synthetic construct
  misc_feature 1..20: note = chemically synthesized
  source 1..20: mol_type = other DNA
ctaaaaagtagttagtctgg

SEQ ID NO: 16953 - DNA, 20 bp, synthetic construct
  misc_feature 1..20: note = chemically synthesized
  source 1..20: mol_type = other DNA
gtagttagtctggaagtatt

SEQ ID NO: 16954 - DNA, 20 bp, synthetic construct
  misc_feature 1..20: note = chemically synthesized
  source 1..20: mol_type = other DNA
gttagtctggaagtatttag

SEQ ID NO: 16955 - DNA, 20 bp, synthetic construct
  misc_feature 1..20: note = chemically synthesized
  source 1..20: mol_type = other DNA
ttagtctggaagtatttaga

SEQ ID NO: 16956 - DNA, 20 bp, synthetic construct
  misc_feature 1..20: note = chemically synthesized
  source 1..20: mol_type = other DNA
tggaagtatttagaaggctt

SEQ ID NO: 16957 - DNA, 20 bp, synthetic construct
  misc_feature 1..20: note = chemically synthesized
  source 1..20: mol_type = other DNA
gaagtatttagaaggctttg

SEQ ID NO: 16958 - DNA, 20 bp, synthetic construct
  misc_feature 1..20: note = chemically synthesized
  source 1..20: mol_type = other DNA
agtatttagaaggctttgga

SEQ ID NO: 16959 - DNA, 20 bp, synthetic construct
  misc_feature 1..20: note = chemically synthesized
  source 1..20: mol_type = other DNA
gtatttagaaggctttggag

SEQ ID NO: 16960 - DNA, 20 bp, synthetic construct
  misc_feature 1..20: note = chemically synthesized
  source 1..20: mol_type = other DNA
ggagaggaatgtgattttat

SEQ ID NO: 16961 - DNA, 20 bp, synthetic construct
  misc_feature 1..20: note = chemically synthesized
  source 1..20: mol_type = other DNA
gagaggaatgtgattttatc

SEQ ID NO: 16962 - DNA, 20 bp, synthetic construct
  misc_feature 1..20: note = chemically synthesized
  source 1..20: mol_type = other DNA
tttatcaggtaaatcaaaaa

SEQ ID NO: 16963 - DNA, 20 bp, synthetic construct
  misc_feature 1..20: note = chemically synthesized
  source 1..20: mol_type = other DNA
tatcaggtaaatcaaaaata

SEQ ID NO: 16964 - DNA, 20 bp, synthetic construct
  misc_feature 1..20: note = chemically synthesized
  source 1..20: mol_type = other DNA
atcaggtaaatcaaaaatag

SEQ ID NO: 16965 - DNA, 20 bp, synthetic construct
  misc_feature 1..20: note = chemically synthesized
  source 1..20: mol_type = other DNA
aaaatagaggctatttctga

SEQ ID NO: 16966 - DNA, 20 bp, synthetic construct
  misc_feature 1..20: note = chemically synthesized
  source 1..20: mol_type = other DNA
atagaggctatttctgaaag

SEQ ID NO: 16967 - DNA, 20 bp, synthetic construct
  misc_feature 1..20: note = chemically synthesized
  source 1..20: mol_type = other DNA
ctatttctgaaagaagcaac

SEQ ID NO: 16968 - DNA, 20 bp, synthetic construct
  misc_feature 1..20: note = chemically synthesized
  source 1..20: mol_type = other DNA
tgaaagaagcaactagaacc

SEQ ID NO: 16969 - DNA, 20 bp, synthetic construct
  misc_feature 1..20: note = chemically synthesized
  source 1..20: mol_type = other DNA
aactagaaccaagttacaca

SEQ ID NO: 16970 - DNA, 20 bp, synthetic construct
  misc_feature 1..20: note = chemically synthesized
  source 1..20: mol_type = other DNA
aatgtacatatatttttgac

SEQ ID NO: 16971 - DNA, 20 bp, synthetic construct
  misc_feature 1..20: note = chemically synthesized
  source 1..20: mol_type = other DNA
tgtacatatatttttgacta

SEQ ID NO: 16972 - DNA, 20 bp, synthetic construct
  misc_feature 1..20: note = chemically synthesized
  source 1..20: mol_type = other DNA
acatatatttttgactagag

SEQ ID NO: 16973 - DNA, 20 bp, synthetic construct
  misc_feature 1..20: note = chemically synthesized
  source 1..20: mol_type = other DNA
aaatttgtataaaatatttg

SEQ ID NO: 16974 - DNA, 20 bp, synthetic construct
  misc_feature 1..20: note = chemically synthesized
  source 1..20: mol_type = other DNA
aatttgtataaaatatttgc

SEQ ID NO: 16975 - DNA, 20 bp, synthetic construct
  misc_feature 1..20: note = chemically synthesized
  source 1..20: mol_type = other DNA
tgtataaaatatttgcaggt

SEQ ID NO: 16976 - DNA, 20 bp, synthetic construct
  misc_feature 1..20: note = chemically synthesized
  source 1..20: mol_type = other DNA
taaaatatttgcaggtaagt

SEQ ID NO: 16977 - DNA, 20 bp, synthetic construct
  misc_feature 1..20: note = chemically synthesized
  source 1..20: mol_type = other DNA
aaaatatttgcaggtaagtt

SEQ ID NO: 16978 - DNA, 20 bp, synthetic construct
  misc_feature 1..20: note = chemically synthesized
  source 1..20: mol_type = other DNA
agttaggtaatgcaacattt

SEQ ID NO: 16979 - DNA, 20 bp, synthetic construct
  misc_feature 1..20: note = chemically synthesized
  source 1..20: mol_type = other DNA
aatgcaacatttgagactct

SEQ ID NO: 16980 - DNA, 20 bp, synthetic construct
  misc_feature 1..20: note = chemically synthesized
  source 1..20: mol_type = other DNA
catttgagactctaagtttg

SEQ ID NO: 16981 - DNA, 20 bp, synthetic construct
  misc_feature 1..20: note = chemically synthesized
  source 1..20: mol_type = other DNA
atttgagactctaagtttgt

SEQ ID NO: 16982 - DNA, 20 bp, synthetic construct
  misc_feature 1..20: note = chemically synthesized
  source 1..20: mol_type = other DNA
ctctaagtttgtgggaaact

SEQ ID NO: 16983 - DNA, 20 bp, synthetic construct
  misc_feature 1..20: note = chemically synthesized
  source 1..20: mol_type = other DNA
tgggaaacttagaactgttt

SEQ ID NO: 16984 - DNA, 20 bp, synthetic construct
  misc_feature 1..20: note = chemically synthesized
  source 1..20: mol_type = other DNA
aatgctatgaaatgattttg

SEQ ID NO: 16985 - DNA, 20 bp, synthetic construct
  misc_feature 1..20: note = chemically synthesized
  source 1..20: mol_type = other DNA
atgattttgcagatttttct

SEQ ID NO: 16986 - DNA, 20 bp, synthetic construct
  misc_feature 1..20: note = chemically synthesized
  source 1..20: mol_type = other DNA
agatttttctgagatgttta

SEQ ID NO: 16987 - DNA, 20 bp, synthetic construct
  misc_feature 1..20: note = chemically synthesized
  source 1..20: mol_type = other DNA
tctgagatgtttatagtgat

SEQ ID NO: 16988 - DNA, 20 bp, synthetic construct
  misc_feature 1..20: note = chemically synthesized
  source 1..20: mol_type = other DNA
agatgtttatagtgataagt

SEQ ID NO: 16989 - DNA, 20 bp, synthetic construct
  misc_feature 1..20: note = chemically synthesized
  source 1..20: mol_type = other DNA
ataagtgagaatatatgaca

SEQ ID NO: 16990 - DNA, 20 bp, synthetic construct
  misc_feature 1..20: note = chemically synthesized
  source 1..20: mol_type = other DNA
tatctctttgtaacttacca

SEQ ID NO: 16991 - DNA, 20 bp, synthetic construct
  misc_feature 1..20: note = chemically synthesized
  source 1..20: mol_type = other DNA
ctctttgtaacttaccacag

SEQ ID NO: 16992 - DNA, 20 bp, synthetic construct
  misc_feature 1..20: note = chemically synthesized
  source 1..20: mol_type = other DNA
gatttgtattattttatgtg

SEQ ID NO: 16993 - DNA, 20 bp, synthetic construct
  misc_feature 1..20: note = chemically synthesized
  source 1..20: mol_type = other DNA
ttattttatgtgaagaaact

SEQ ID NO: 16994 - DNA, 20 bp, synthetic construct
  misc_feature 1..20: note = chemically synthesized
  source 1..20: mol_type = other DNA
atgtgaagaaactcagaata

SEQ ID NO: 16995 - DNA, 20 bp, synthetic construct
  misc_feature 1..20: note = chemically synthesized
  source 1..20: mol_type = other DNA
gtgaagaaactcagaatatg

SEQ ID NO: 16996 - DNA, 20 bp, synthetic construct
  misc_feature 1..20: note = chemically synthesized
  source 1..20: mol_type = other DNA
tctcaaattatcacttttat

SEQ ID NO: 16997 - DNA, 20 bp, synthetic construct
  misc_feature 1..20: note = chemically synthesized
  source 1..20: mol_type = other DNA
ctcaaattatcacttttata

SEQ ID NO: 16998 - DNA, 20 bp, synthetic construct
  misc_feature 1..20: note = chemically synthesized
  source 1..20: mol_type = other DNA
cttattttctttatgtaaac

SEQ ID NO: 16999 - DNA, 20 bp, synthetic construct
  misc_feature 1..20: note = chemically synthesized
  source 1..20: mol_type = other DNA
atctcttctcattttctatc

SEQ ID NO: 17000 - DNA, 20 bp, synthetic construct
  misc_feature 1..20: note = chemically synthesized
  source 1..20: mol_type = other DNA
tctcttctcattttctatca

SEQ ID NO: 17001 - DNA, 20 bp, synthetic construct
  misc_feature 1..20: note = chemically synthesized
  source 1..20: mol_type = other DNA
cattttctatcaaggattaa

SEQ ID NO: 17002 - DNA, 20 bp, synthetic construct
  misc_feature 1..20: note = chemically synthesized
  source 1..20: mol_type = other DNA
tctccaactttttgtatcta

SEQ ID NO: 17003 - DNA, 20 bp, synthetic construct
  misc_feature 1..20: note = chemically synthesized
  source 1..20: mol_type = other DNA
ctccaactttttgtatctac

SEQ ID NO: 17004 - DNA, 20 bp, synthetic construct
  misc_feature 1..20: note = chemically synthesized
  source 1..20: mol_type = other DNA
ctaccttcatttatatttta

SEQ ID NO: 17005 - DNA, 20 bp, synthetic construct
  misc_feature 1..20: note = chemically synthesized
  source 1..20: mol_type = other DNA
ccttcatttatattttaaag

SEQ ID NO: 17006 - DNA, 20 bp, synthetic construct
  misc_feature 1..20: note = chemically synthesized
  source 1..20: mol_type = other DNA
cttcatttatattttaaagt

SEQ ID NO: 17007 - DNA, 20 bp, synthetic construct
  misc_feature 1..20: note = chemically synthesized
  source 1..20: mol_type = other DNA
atttatattttaaagtaggt

SEQ ID NO: 17008 - DNA, 20 bp, synthetic construct
  misc_feature 1..20: note = chemically synthesized
  source 1..20: mol_type = other DNA
caaatgcattttaacactcc

SEQ ID NO: 17009 - DNA, 20 bp, synthetic construct
  misc_feature 1..20: note = chemically synthesized
  source 1..20: mol_type = other DNA
tgcattttaacactccaaga

SEQ ID NO: 17010 - DNA, 20 bp, synthetic construct
  misc_feature 1..20: note = chemically synthesized
  source 1..20: mol_type = other DNA
ttaacactccaagatagatt

SEQ ID NO: 17011 - DNA, 20 bp, synthetic construct
  misc_feature 1..20: note = chemically synthesized
  source 1..20: mol_type = other DNA
tttagattaaaacatctaac

SEQ ID NO: 17012 - DNA, 20 bp, synthetic construct
  misc_feature 1..20: note = chemically synthesized
  source 1..20: mol_type = other DNA
ttagattaaaacatctaacc

SEQ ID NO: 17013 - DNA, 20 bp, synthetic construct
  misc_feature 1..20: note = chemically synthesized
  source 1..20: mol_type = other DNA
ttccgttattgtaacatgat

SEQ ID NO: 17014 - DNA, 20 bp, synthetic construct
  misc_feature 1..20: note = chemically synthesized
  source 1..20: mol_type = other DNA
tccgttattgtaacatgatg

SEQ ID NO: 17015 - DNA, 20 bp, synthetic construct
  misc_feature 1..20: note = chemically synthesized
  source 1..20: mol_type = other DNA
cgttattgtaacatgatgag

SEQ ID NO: 17016 - DNA, 20 bp, synthetic construct
  misc_feature 1..20: note = chemically synthesized
  source 1..20: mol_type = other DNA
tgtaacatgatgaggagaca

SEQ ID NO: 17017 - DNA, 20 bp, synthetic construct
  misc_feature 1..20: note = chemically synthesized
  source 1..20: mol_type = other DNA
acatgatgaggagacatgga

SEQ ID NO: 17018 - DNA, 20 bp, synthetic construct
  misc_feature 1..20: note = chemically synthesized
  source 1..20: mol_type = other DNA
ttctgctaatttctccttta

SEQ ID NO: 17019 - DNA, 20 bp, synthetic construct
  misc_feature 1..20: note = chemically synthesized
  source 1..20: mol_type = other DNA
cctttaaagtcacttcacat

SEQ ID NO: 17020 - DNA, 20 bp, synthetic construct
  misc_feature 1..20: note = chemically synthesized
  source 1..20: mol_type = other DNA
attagttatctcttacatat

SEQ ID NO: 17021 - DNA, 20 bp, synthetic construct
  misc_feature 1..20: note = chemically synthesized
  source 1..20: mol_type = other DNA
atctcttacatatgagtccc

SEQ ID NO: 17022 - DNA, 20 bp, synthetic construct
  misc_feature 1..20: note = chemically synthesized
  source 1..20: mol_type = other DNA
tcttacatatgagtccctgg

SEQ ID NO: 17023 - DNA, 20 bp, synthetic construct
  misc_feature 1..20: note = chemically synthesized
  source 1..20: mol_type = other DNA
atatgagtccctggcagtgt

SEQ ID NO: 17024 - DNA, 20 bp, synthetic construct
  misc_feature 1..20: note = chemically synthesized
  source 1..20: mol_type = other DNA
cattccttttcatgacccta

SEQ ID NO: 17025 - DNA, 20 bp, synthetic construct
  misc_feature 1..20: note = chemically synthesized
  source 1..20: mol_type = other DNA
aaatatactgcatttttcta

SEQ ID NO: 17026 - DNA, 20 bp, synthetic construct
  misc_feature 1..20: note = chemically synthesized
  source 1..20: mol_type = other DNA
atttcaacctacacaaatta

SEQ ID NO: 17027 - DNA, 20 bp, synthetic construct
  misc_feature 1..20: note = chemically synthesized
  source 1..20: mol_type = other DNA
tttcaacctacacaaattat

SEQ ID NO: 17028 - DNA, 20 bp, synthetic construct
  misc_feature 1..20: note = chemically synthesized
  source 1..20: mol_type = other DNA
tgcatgcctttatccctaat

SEQ ID NO: 17029 - DNA, 20 bp, synthetic construct
  misc_feature 1..20: note = chemically synthesized
  source 1..20: mol_type = other DNA
gcatgcctttatccctaatt

SEQ ID NO: 17030 - DNA, 20 bp, synthetic construct
  misc_feature 1..20: note = chemically synthesized
  source 1..20: mol_type = other DNA
ttatccctaattaggctaca

SEQ ID NO: 17031 - DNA, 20 bp, synthetic construct
  misc_feature 1..20: note = chemically synthesized
  source 1..20: mol_type = other DNA
ggctacacagctgtttaaat

SEQ ID NO: 17032 - DNA, 20 bp, synthetic construct
  misc_feature 1..20: note = chemically synthesized
  source 1..20: mol_type = other DNA
gctacacagctgtttaaatt

SEQ ID NO: 17033 - DNA, 20 bp, synthetic construct
  misc_feature 1..20: note = chemically synthesized
  source 1..20: mol_type = other DNA
gctgtttaaattaggaatta

SEQ ID NO: 17034 - DNA, 20 bp, synthetic construct
  misc_feature 1..20: note = chemically synthesized
  source 1..20: mol_type = other DNA
ttaggaattacagatttcgc

SEQ ID NO: 17035 - DNA, 20 bp, synthetic construct
  misc_feature 1..20: note = chemically synthesized
  source 1..20: mol_type = other DNA
agataattgtatatctgata

SEQ ID NO: 17036 - DNA, 20 bp, synthetic construct
  misc_feature 1..20: note = chemically synthesized
  source 1..20: mol_type = other DNA
attgtatatctgatacagat

SEQ ID NO: 17037 - DNA, 20 bp, synthetic construct
  misc_feature 1..20: note = chemically synthesized
  source 1..20: mol_type = other DNA
ttgtatatctgatacagatt

SEQ ID NO: 17038 - DNA, 20 bp, synthetic construct
  misc_feature 1..20: note = chemically synthesized
  source 1..20: mol_type = other DNA
attaggcatttaataaattt

SEQ ID NO: 17039 - DNA, 20 bp, synthetic construct
  misc_feature 1..20: note = chemically synthesized
  source 1..20: mol_type = other DNA
atttaataaattttggtgaa

SEQ ID NO: 17040 - DNA, 20 bp, synthetic construct
  misc_feature 1..20: note = chemically synthesized
  source 1..20: mol_type = other DNA
tttaataaattttggtgaat

SEQ ID NO: 17041 - DNA, 20 bp, synthetic construct
  misc_feature 1..20: note = chemically synthesized
  source 1..20: mol_type = other DNA
attgttcctcaaacatttgt

SEQ ID NO: 17042 - DNA, 20 bp, synthetic construct
  misc_feature 1..20: note = chemically synthesized
  source 1..20: mol_type = other DNA
cactatgatacctacttatt

SEQ ID NO: 17043 - DNA, 20 bp, synthetic construct
  misc_feature 1..20: note = chemically synthesized
  source 1..20: mol_type = other DNA
atacctacttattgagaatc

SEQ ID NO: 17044 - DNA, 20 bp, synthetic construct
  misc_feature 1..20: note = chemically synthesized
  source 1..20: mol_type = other DNA
cttattgagaatcaagtaaa

SEQ ID NO: 17045 - DNA, 20 bp, synthetic construct
  misc_feature 1..20: note = chemically synthesized
  source 1..20: mol_type = other DNA
tattgagaatcaagtaaata

SEQ ID NO: 17046 - DNA, 20 bp, synthetic construct
  misc_feature 1..20: note = chemically synthesized
  source 1..20: mol_type = other DNA
atcaagtaaatagagatatt

SEQ ID NO: 17047 - DNA, 20 bp, synthetic construct
  misc_feature 1..20: note = chemically synthesized
  source 1..20: mol_type = other DNA
agagatattcagacacatta

SEQ ID NO: 17048 - DNA, 20 bp, synthetic construct
  misc_feature 1..20: note = chemically synthesized
  source 1..20: mol_type = other DNA
agatattcagacacattaca

SEQ ID NO: 17049 - DNA, 20 bp, synthetic construct
  misc_feature 1..20: note = chemically synthesized
  source 1..20: mol_type = other DNA
tattcagacacattacagag

SEQ ID NO: 17050 - DNA, 20 bp, synthetic construct
  misc_feature 1..20: note = chemically synthesized
  source 1..20: mol_type = other DNA
agtatatacttacaaactca

SEQ ID NO: 17051 - DNA, 20 bp, synthetic construct
  misc_feature 1..20: note = chemically synthesized
  source 1..20: mol_type = other DNA
ctcaaagtatttgacacccc

SEQ ID NO: 17052 - DNA, 20 bp, synthetic construct
  misc_feature 1..20: note = chemically synthesized
  source 1..20: mol_type = other DNA
tcaaagtatttgacacccct

SEQ ID NO: 17053 - DNA, 20 bp, synthetic construct
  misc_feature 1..20: note = chemically synthesized
  source 1..20: mol_type = other DNA
atgaaacacttttgaatata

SEQ ID NO: 17054 - DNA, 20 bp, synthetic construct
  misc_feature 1..20: note = chemically synthesized
  source 1..20: mol_type = other DNA
ataaacattgccaatgcatg

SEQ ID NO: 17055 - DNA, 20 bp, synthetic construct
  misc_feature 1..20: note = chemically synthesized
  source 1..20: mol_type = other DNA
acattgccaatgcatgcaga

SEQ ID NO: 17056 - DNA, 20 bp, synthetic construct
  misc_feature 1..20: note = chemically synthesized
  source 1..20: mol_type = other DNA
ttgccaatgcatgcagaaag

SEQ ID NO: 17057 - DNA, 20 bp, synthetic construct
  misc_feature 1..20: note = chemically synthesized
  source 1..20: mol_type = other DNA
atgcagaaagaagcttaatg

SEQ ID NO: 17058 - DNA, 20 bp, synthetic construct
  misc_feature 1..20: note = chemically synthesized
  source 1..20: mol_type = other DNA
tacatatactttcatgaaca

SEQ ID NO: 17059 - DNA, 20 bp, synthetic construct
  misc_feature 1..20: note = chemically synthesized
  source 1..20: mol_type = other DNA
aacatcctttccctttctgt

SEQ ID NO: 17060 - DNA, 20 bp, synthetic construct
  misc_feature 1..20: note = chemically synthesized
  source 1..20: mol_type = other DNA
catcctttccctttctgtta

SEQ ID NO: 17061 - DNA, 20 bp, synthetic construct
  misc_feature 1..20: note = chemically synthesized
  source 1..20: mol_type = other DNA
acctgccttcatccatccct

SEQ ID NO: 17062 - DNA, 20 bp, synthetic construct
  misc_feature 1..20: note = chemically synthesized
  source 1..20: mol_type = other DNA
tcccttggatatgatacctt

SEQ ID NO: 17063 - DNA, 20 bp, synthetic construct
  misc_feature 1..20: note = chemically synthesized
  source 1..20: mol_type = other DNA
ccccacacccaaatcttcaa

SEQ ID NO: 17064 - DNA, 20 bp, synthetic construct
  misc_feature 1..20: note = chemically synthesized
  source 1..20: mol_type = other DNA
acacccaaatcttcaacaga

SEQ ID NO: 17065 - DNA, 20 bp, synthetic construct
  misc_feature 1..20: note = chemically synthesized
  source 1..20: mol_type = other DNA
cttcaacagacagaaatgta

SEQ ID NO: 17066 - DNA, 20 bp, synthetic construct
  misc_feature 1..20: note = chemically synthesized
  source 1..20: mol_type = other DNA
aagtcccgtttaatgtgtga

SEQ ID NO: 17067 - DNA, 20 bp, synthetic construct
  misc_feature 1..20: note = chemically synthesized
  source 1..20: mol_type = other DNA
atgaactaaatattctatct

SEQ ID NO: 17068 - DNA, 20 bp, synthetic construct
  misc_feature 1..20: note = chemically synthesized
  source 1..20: mol_type = other DNA
ctatctcagtattcatctga

SEQ ID NO: 17069 - DNA, 20 bp, synthetic construct
  misc_feature 1..20: note = chemically synthesized
  source 1..20: mol_type = other DNA
tcagtattcatctgacagca

SEQ ID NO: 17070 - DNA, 20 bp, synthetic construct
  misc_feature 1..20: note = chemically synthesized
  source 1..20: mol_type = other DNA
cagtattcatctgacagcat

SEQ ID NO: 17071 - DNA, 20 bp, synthetic construct
  misc_feature 1..20: note = chemically synthesized
  source 1..20: mol_type = other DNA
tattcatctgacagcatagg

SEQ ID NO: 17072 - DNA, 20 bp, synthetic construct
  misc_feature 1..20: note = chemically synthesized
  source 1..20: mol_type = other DNA
attcatctgacagcatagga

SEQ ID NO: 17073 - DNA, 20 bp, synthetic construct
  misc_feature 1..20: note = chemically synthesized
  source 1..20: mol_type = other DNA
tcatctgacagcataggaag

SEQ ID NO: 17074 - DNA, 20 bp, synthetic construct
  misc_feature 1..20: note = chemically synthesized
  source 1..20: mol_type = other DNA
atctgacagcataggaagga

SEQ ID NO: 17075 - DNA, 20 bp, synthetic construct
  misc_feature 1..20: note = chemically synthesized
  source 1..20: mol_type = other DNA
taccacatattgtgtttcta

SEQ ID NO: 17076 - DNA, 20 bp, synthetic construct
  misc_feature 1..20: note = chemically synthesized
  source 1..20: mol_type = other DNA
ttgtgtttctatggccgaat

SEQ ID NO: 17077 - DNA, 20 bp, synthetic construct
  misc_feature 1..20: note = chemically synthesized
  source 1..20: mol_type = other DNA
tttctatggccgaatcagct

SEQ ID NO: 17078 - DNA, 20 bp, synthetic construct
  misc_feature 1..20: note = chemically synthesized
  source 1..20: mol_type = other DNA
ttctatggccgaatcagctt

SEQ ID NO: 17079 - DNA, 20 bp, synthetic construct
  misc_feature 1..20: note = chemically synthesized
  source 1..20: mol_type = other DNA
agcttaggttctacattgtg

SEQ ID NO: 17080 - DNA, 20 bp, synthetic construct
  misc_feature 1..20: note = chemically synthesized
  source 1..20: mol_type = other DNA
ggttctacattgtgtggttt

SEQ ID NO: 17081 - DNA, 20 bp, synthetic construct
  misc_feature 1..20: note = chemically synthesized
  source 1..20: mol_type = other DNA
ataaattacttaacctacct

SEQ ID NO: 17082 - DNA, 20 bp, synthetic construct
  misc_feature 1..20: note = chemically synthesized
  source 1..20: mol_type = other DNA
attacttaacctacctaagt

SEQ ID NO: 17083 - DNA, 20 bp, synthetic construct
  misc_feature 1..20: note = chemically synthesized
  source 1..20: mol_type = other DNA
ttacttaacctacctaagta

SEQ ID NO: 17084 - DNA, 20 bp, synthetic construct
  misc_feature 1..20: note = chemically synthesized
  source 1..20: mol_type = other DNA
taagtaaggcacctacgtgt

SEQ ID NO: 17085 - DNA, 20 bp, synthetic construct
  misc_feature 1..20: note = chemically synthesized
  source 1..20: mol_type = other DNA
cgtgtcagtctcttcatgtg

SEQ ID NO: 17086 - DNA, 20 bp, synthetic construct
  misc_feature 1..20: note = chemically synthesized
  source 1..20: mol_type = other DNA
tcagtctcttcatgtgtagt

SEQ ID NO: 17087 - DNA, 20 bp, synthetic construct
  misc_feature 1..20: note = chemically synthesized
  source 1..20: mol_type = other DNA
cagtctcttcatgtgtagtc

SEQ ID NO: 17088 - DNA, 20 bp, synthetic construct
  misc_feature 1..20: note = chemically synthesized
  source 1..20: mol_type = other DNA
tagtcaggaattataatgaa

SEQ ID NO: 17089 - DNA, 20 bp, synthetic construct
  misc_feature 1..20: note = chemically synthesized
  source 1..20: mol_type = other DNA
ttataatgaaaagtaactcg

SEQ ID NO: 17090 - DNA, 20 bp, synthetic construct
  misc_feature 1..20: note = chemically synthesized
  source 1..20: mol_type = other DNA
cgaagtatttttgtgataat

SEQ ID NO: 17091 - DNA, 20 bp, synthetic construct
  misc_feature 1..20: note = chemically synthesized
  source 1..20: mol_type = other DNA
gtatttttgtgataatcagt

SEQ ID NO: 17092 - DNA, 20 bp, synthetic construct
  misc_feature 1..20: note = chemically synthesized
  source 1..20: mol_type = other DNA
gataaaaatgtgaacctctt

SEQ ID NO: 17093 - DNA, 20 bp, synthetic construct
  misc_feature 1..20: note = chemically synthesized
  source 1..20: mol_type = other DNA
atgtgaacctcttaagacac

SEQ ID NO: 17094 - DNA, 20 bp, synthetic construct
  misc_feature 1..20: note = chemically synthesized
  source 1..20: mol_type = other DNA
attatatactgaactcatgt

SEQ ID NO: 17095 - DNA, 20 bp, synthetic construct
  misc_feature 1..20: note = chemically synthesized
  source 1..20: mol_type = other DNA
ttatatactgaactcatgtg

SEQ ID NO: 17096 - DNA, 20 bp, synthetic construct
  misc_feature 1..20: note = chemically synthesized
  source 1..20: mol_type = other DNA
actgaactcatgtgaggatc

SEQ ID NO: 17097 - DNA, 20 bp, synthetic construct
  misc_feature 1..20: note = chemically synthesized
  source 1..20: mol_type = other DNA
gaggatccagtttctatatc

SEQ ID NO: 17098 - DNA, 20 bp, synthetic construct
  misc_feature 1..20: note = chemically synthesized
  source 1..20: mol_type = other DNA
aggatccagtttctatatct

SEQ ID NO: 17099 - DNA, 20 bp, synthetic construct
  misc_feature 1..20: note = chemically synthesized
  source 1..20: mol_type = other DNA
ctaggcttttcaaactacct

SEQ ID NO: 17100 - DNA, 20 bp, synthetic construct
  misc_feature 1..20: note = chemically synthesized
  source 1..20: mol_type = other DNA
aggcttttcaaactacctta

SEQ ID NO: 17101 - DNA, 20 bp, synthetic construct
  misc_feature 1..20: note = chemically synthesized
  source 1..20: mol_type = other DNA
atacttgtatatcttccttg

SEQ ID NO: 17102 - DNA, 20 bp, synthetic construct
  misc_feature 1..20: note = chemically synthesized
  source 1..20: mol_type = other DNA
tacttgtatatcttccttgt

SEQ ID NO: 17103 - DNA, 20 bp, synthetic construct
  misc_feature 1..20: note = chemically synthesized
  source 1..20: mol_type = other DNA
gtatatcttccttgtaggta

SEQ ID NO: 17104 - DNA, 20 bp, synthetic construct
  misc_feature 1..20: note = chemically synthesized
  source 1..20: mol_type = other DNA
atatcttccttgtaggtata

SEQ ID NO: 17105 - DNA, 20 bp, synthetic construct
  misc_feature 1..20: note = chemically synthesized
  source 1..20: mol_type = other DNA
atagagtaaaatactaactt

SEQ ID NO: 17106 - DNA, 20 bp, synthetic construct
  misc_feature 1..20: note = chemically synthesized
  source 1..20: mol_type = other DNA
tagagtaaaatactaacttc

SEQ ID NO: 17107 - DNA, 20 bp, synthetic construct
  misc_feature 1..20: note = chemically synthesized
  source 1..20: mol_type = other DNA
taaaatactaacttcaggtt

SEQ ID NO: 17108 - DNA, 20 bp, synthetic construct
  misc_feature 1..20: note = chemically synthesized
  source 1..20: mol_type = other DNA
catattataatttacattgc

SEQ ID NO: 17109 - DNA, 20 bp, synthetic construct
  misc_feature 1..20: note = chemically synthesized
  source 1..20: mol_type = other DNA
ttttattttctgttccttat

SEQ ID NO: 17110 - DNA, 20 bp, synthetic construct
  misc_feature 1..20: note = chemically synthesized
  source 1..20: mol_type = other DNA
tccttattggtcaatacttt

SEQ ID NO: 17111 - DNA, 20 bp, synthetic construct
  misc_feature 1..20: note = chemically synthesized
  source 1..20: mol_type = other DNA
ttggtcaatacttttggatc

SEQ ID NO: 17112 - DNA, 20 bp, synthetic construct
  misc_feature 1..20: note = chemically synthesized
  source 1..20: mol_type = other DNA
tggatccagctgttcaactg

SEQ ID NO: 17113 - DNA, 20 bp, synthetic construct
  misc_feature 1..20: note = chemically synthesized
  source 1..20: mol_type = other DNA
taacacttgataataatgcc

SEQ ID NO: 17114 - DNA, 20 bp, synthetic construct
  misc_feature 1..20: note = chemically synthesized
  source 1..20: mol_type = other DNA
acacttgataataatgccaa

SEQ ID NO: 17115 - DNA, 20 bp, synthetic construct
  misc_feature 1..20: note = chemically synthesized
  source 1..20: mol_type = other DNA
cacttgataataatgccaag

SEQ ID NO: 17116 - DNA, 20 bp, synthetic construct
  misc_feature 1..20: note = chemically synthesized
  source 1..20: mol_type = other DNA
tgataataatgccaagaggc

SEQ ID NO: 17117 - DNA, 20 bp, synthetic construct
  misc_feature 1..20: note = chemically synthesized
  source 1..20: mol_type = other DNA
gataataatgccaagaggct

SEQ ID NO: 17118 - DNA, 20 bp, synthetic construct
  misc_feature 1..20: note = chemically synthesized
  source 1..20: mol_type = other DNA
ataataatgccaagaggctg

SEQ ID NO: 17119 - DNA, 20 bp, synthetic construct
  misc_feature 1..20: note = chemically synthesized
  source 1..20: mol_type = other DNA
taatgccaagaggctggggt

SEQ ID NO: 17120 - DNA, 20 bp, synthetic construct
  misc_feature 1..20: note = chemically synthesized
  source 1..20: mol_type = other DNA
aagaggctggggtgagctat

SEQ ID NO: 17121 - DNA, 20 bp, synthetic construct
  misc_feature 1..20: note = chemically synthesized
  source 1..20: mol_type = other DNA
gaggctggggtgagctataa

SEQ ID NO: 17122 - DNA, 20 bp, synthetic construct
  misc_feature 1..20: note = chemically synthesized
  source 1..20: mol_type = other DNA
aggctggggtgagctataag

SEQ ID NO: 17123 - DNA, 20 bp, synthetic construct
  misc_feature 1..20: note = chemically synthesized
  source 1..20: mol_type = other DNA
gctggggtgagctataagag

SEQ ID NO: 17124 - DNA, 20 bp, synthetic construct
  misc_feature 1..20: note = chemically synthesized
  source 1..20: mol_type = other DNA
ggtgagctataagaggagtc

SEQ ID NO: 17125 - DNA, 20 bp, synthetic construct
  misc_feature 1..20: note = chemically synthesized
  source 1..20: mol_type = other DNA
gtgagctataagaggagtca

SEQ ID NO: 17126 - DNA, 20 bp, synthetic construct
  misc_feature 1..20: note = chemically synthesized
  source 1..20: mol_type = other DNA
taagaggagtcaaggctaat

SEQ ID NO: 17127 - DNA, 20 bp, synthetic construct
  misc_feature 1..20: note = chemically synthesized
  source 1..20: mol_type = other DNA
ggagtcaaggctaatcagta

SEQ ID NO: 17128 - DNA, 20 bp, synthetic construct
  misc_feature 1..20: note = chemically synthesized
  source 1..20: mol_type = other DNA
tcaaggctaatcagtacagc

SEQ ID NO: 17129 - DNA, 20 bp, synthetic construct
  misc_feature 1..20: note = chemically synthesized
  source 1..20: mol_type = other DNA
aaggctaatcagtacagcaa

SEQ ID NO: 17130 - DNA, 20 bp, synthetic construct
  misc_feature 1..20: note = chemically synthesized
  source 1..20: mol_type = other DNA
aggctaatcagtacagcaag

SEQ ID NO: 17131 - DNA, 20 bp, synthetic construct
  misc_feature 1..20: note = chemically synthesized
  source 1..20: mol_type = other DNA
gtacagcaagaggaatgaat

SEQ ID NO: 17132 - DNA, 20 bp, synthetic construct
  misc_feature 1..20: note = chemically synthesized
  source 1..20: mol_type = other DNA
cagcaagaggaatgaataag

SEQ ID NO: 17133 - DNA, 20 bp, synthetic construct
  misc_feature 1..20: note = chemically synthesized
  source 1..20: mol_type = other DNA
aagaggaatgaataagaagc

SEQ ID NO: 17134 - DNA, 20 bp, synthetic construct
  misc_feature 1..20: note = chemically synthesized
  source 1..20: mol_type = other DNA
aatgaataagaagctagata

SEQ ID NO: 17135 - DNA, 20 bp, synthetic construct
  misc_feature 1..20: note = chemically synthesized
  source 1..20: mol_type = other DNA
atgaataagaagctagataa

SEQ ID NO: 17136 - DNA, 20 bp, synthetic construct
  misc_feature 1..20: note = chemically synthesized
  source 1..20: mol_type = other DNA
tgaataagaagctagataaa

SEQ ID NO: 17137 - DNA, 20 bp, synthetic construct
  misc_feature 1..20: note = chemically synthesized
  source 1..20: mol_type = other DNA
aagaagctagataaagggaa

SEQ ID NO: 17138 - DNA, 20 bp, synthetic construct
  misc_feature 1..20: note = chemically synthesized
  source 1..20: mol_type = other DNA
gctagataaagggaacggcg

SEQ ID NO: 17139 - DNA, 20 bp, synthetic construct
  misc_feature 1..20: note = chemically synthesized
  source 1..20: mol_type = other DNA
ctagataaagggaacggcgt

SEQ ID NO: 17140 - DNA, 20 bp, synthetic construct
  misc_feature 1..20: note = chemically synthesized
  source 1..20: mol_type = other DNA
agataaagggaacggcgtgg

SEQ ID NO: 17141 - DNA, 20 bp, synthetic construct
  misc_feature 1..20: note = chemically synthesized
  source 1..20: mol_type = other DNA
gataaagggaacggcgtggg

SEQ ID NO: 17142 - DNA, 20 bp, synthetic construct
  misc_feature 1..20: note = chemically synthesized
  source 1..20: mol_type = other DNA
ataaagggaacggcgtggga

SEQ ID NO: 17143 - DNA, 20 bp, synthetic construct
  misc_feature 1..20: note = chemically synthesized
  source 1..20: mol_type = other DNA
ggcgtgggagggtgtttcct

SEQ ID NO: 17144 - DNA, 20 bp, synthetic construct
  misc_feature 1..20: note = chemically synthesized
  source 1..20: mol_type = other DNA
gcgtgggagggtgtttcctg

SEQ ID NO: 17145 - DNA, 20 bp, synthetic construct
  misc_feature 1..20: note = chemically synthesized
  source 1..20: mol_type = other DNA
cgtgggagggtgtttcctga

SEQ ID NO: 17146 - DNA, 20 bp, synthetic construct
  misc_feature 1..20: note = chemically synthesized
  source 1..20: mol_type = other DNA
tttcctgagggaatattcat

SEQ ID NO: 17147 - DNA, 20 bp, synthetic construct
  misc_feature 1..20: note = chemically synthesized
  source 1..20: mol_type = other DNA
gggaatattcatgagacaaa

SEQ ID NO: 17148 - DNA, 20 bp, synthetic construct
  misc_feature 1..20: note = chemically synthesized
  source 1..20: mol_type = other DNA
gaatattcatgagacaaaca

SEQ ID NO: 17149 - DNA, 20 bp, synthetic construct
  misc_feature 1..20: note = chemically synthesized
  source 1..20: mol_type = other DNA
catgagacaaacagagaata

SEQ ID NO: 17150 - DNA, 20 bp, synthetic construct
  misc_feature 1..20: note = chemically synthesized
  source 1..20: mol_type = other DNA
aaacagagaataaagaaatg

SEQ ID NO: 17151 - DNA, 20 bp, synthetic construct
  misc_feature 1..20: note = chemically synthesized
  source 1..20: mol_type = other DNA
aacagagaataaagaaatga

SEQ ID NO: 17152 - DNA, 20 bp, synthetic construct
  misc_feature 1..20: note = chemically synthesized
  source 1..20: mol_type = other DNA
acagagaataaagaaatgaa

SEQ ID NO: 17153 - DNA, 20 bp, synthetic construct
  misc_feature 1..20: note = chemically synthesized
  source 1..20: mol_type = other DNA
aagggaatgtaaatataata

SEQ ID NO: 17154 - DNA, 20 bp, synthetic construct
  misc_feature 1..20: note = chemically synthesized
  source 1..20: mol_type = other DNA
agggaatgtaaatataatat

SEQ ID NO: 17155 - DNA, 20 bp, synthetic construct
  misc_feature 1..20: note = chemically synthesized
  source 1..20: mol_type = other DNA
atataggcatgttaatatac

SEQ ID NO: 17156 - DNA, 20 bp, synthetic construct
  misc_feature 1..20: note = chemically synthesized
  source 1..20: mol_type = other DNA
gttaatatacaagtgatttc

SEQ ID NO: 17157 - DNA, 20 bp, synthetic construct
  misc_feature 1..20: note = chemically synthesized
  source 1..20: mol_type = other DNA
atatacaagtgatttctaga

SEQ ID NO: 17158 - DNA, 20 bp, synthetic construct
  misc_feature 1..20: note = chemically synthesized
  source 1..20: mol_type = other DNA
tttctagaaagtgcatgaat

SEQ ID NO: 17159 - DNA, 20 bp, synthetic construct
  misc_feature 1..20: note = chemically synthesized
  source 1..20: mol_type = other DNA
tagaaagtgcatgaataaga

SEQ ID NO: 17160 - DNA, 20 bp, synthetic construct
  misc_feature 1..20: note = chemically synthesized
  source 1..20: mol_type = other DNA
aagtgcatgaataagacagc

SEQ ID NO: 17161 - DNA, 20 bp, synthetic construct
  misc_feature 1..20: note = chemically synthesized
  source 1..20: mol_type = other DNA
gcatgaataagacagctaga

SEQ ID NO: 17162 - DNA, 20 bp, synthetic construct
  misc_feature 1..20: note = chemically synthesized
  source 1..20: mol_type = other DNA
gaataagacagctagaaaga

SEQ ID NO: 17163 - DNA, 20 bp, synthetic construct
  misc_feature 1..20: note = chemically synthesized
  source 1..20: mol_type = other DNA
aagacagctagaaagataga

SEQ ID NO: 17164 - DNA, 20 bp, synthetic construct
  misc_feature 1..20: note = chemically synthesized
  source 1..20: mol_type = other DNA
gctagaaagatagaaagacc

SEQ ID NO: 17165 - DNA, 20 bp, synthetic construct
  misc_feature 1..20: note = chemically synthesized
  source 1..20: mol_type = other DNA
cttaaaatgtgaatgtgaaa

SEQ ID NO: 17166 - DNA, 20 bp, synthetic construct
  misc_feature 1..20: note = chemically synthesized
  source 1..20: mol_type = other DNA
atgtgaatgtgaaacagttc

SEQ ID NO: 17167 - DNA, 20 bp, synthetic construct
  misc_feature 1..20: note = chemically synthesized
  source 1..20: mol_type = other DNA
aatgtgaaacagttctggct

SEQ ID NO: 17168 - DNA, 20 bp, synthetic construct
  misc_feature 1..20: note = chemically synthesized
  source 1..20: mol_type = other DNA
tgtgaaacagttctggctga

SEQ ID NO: 17169 - DNA, 20 bp, synthetic construct
  misc_feature 1..20: note = chemically synthesized
  source 1..20: mol_type = other DNA
tctggctgagagaaatatct

SEQ ID NO: 17170 - DNA, 20 bp, synthetic construct
  misc_feature 1..20: note = chemically synthesized
  source 1..20: mol_type = other DNA
ctggctgagagaaatatctc

SEQ ID NO: 17171 - DNA, 20 bp, synthetic construct
  misc_feature 1..20: note = chemically synthesized
  source 1..20: mol_type = other DNA
tgagagaaatatctcaggaa

SEQ ID NO: 17172 - DNA, 20 bp, synthetic construct
  misc_feature 1..20: note = chemically synthesized
  source 1..20: mol_type = other DNA
tctcaggaatggccatgttc

SEQ ID NO: 17173 - DNA, 20 bp, synthetic construct
  misc_feature 1..20: note = chemically synthesized
  source 1..20: mol_type = other DNA
ctcaggaatggccatgttcc

SEQ ID NO: 17174 - DNA, 20 bp, synthetic construct
  misc_feature 1..20: note = chemically synthesized
  source 1..20: mol_type = other DNA
aatggccatgttccaggctt

SEQ ID NO: 17175 - DNA, 20 bp, synthetic construct
  misc_feature 1..20: note = chemically synthesized
  source 1..20: mol_type = other DNA
atggccatgttccaggcttc

SEQ ID NO: 17176 - DNA, 20 bp, synthetic construct
  misc_feature 1..20: note = chemically synthesized
  source 1..20: mol_type = other DNA
tggccatgttccaggcttca

SEQ ID NO: 17177 - DNA, 20 bp, synthetic construct
  misc_feature 1..20: note = chemically synthesized
  source 1..20: mol_type = other DNA
ccatgttccaggcttcaggg

SEQ ID NO: 17178 - DNA, 20 bp, synthetic construct
  misc_feature 1..20: note = chemically synthesized
  source 1..20: mol_type = other DNA
catgttccaggcttcagggt

SEQ ID NO: 17179 - DNA, 20 bp, synthetic construct
  misc_feature 1..20: note = chemically synthesized
  source 1..20: mol_type = other DNA
cttcagggtaggacccatgc

SEQ ID NO: 17180 - DNA, 20 bp, synthetic construct
  misc_feature 1..20: note = chemically synthesized
  source 1..20: mol_type = other DNA
ttcagggtaggacccatgcc

SEQ ID NO: 17181 - DNA, 20 bp, synthetic construct
  misc_feature 1..20: note = chemically synthesized
  source 1..20: mol_type = other DNA
tcagggtaggacccatgcca

SEQ ID NO: 17182 - DNA, 20 bp, synthetic construct
  misc_feature 1..20: note = chemically synthesized
  source 1..20: mol_type = other DNA
ctgcctcctgtccctatcat

SEQ ID NO: 17183 - DNA, 20 bp, synthetic construct
  misc_feature 1..20: note = chemically synthesized
  source 1..20: mol_type = other DNA
tgcctcctgtccctatcatt

SEQ ID NO: 17184 - DNA, 20 bp, synthetic construct
  misc_feature 1..20: note = chemically synthesized
  source 1..20: mol_type = other DNA
cctcctgtccctatcattag

SEQ ID NO: 17185 - DNA, 20 bp, synthetic construct
  misc_feature 1..20: note = chemically synthesized
  source 1..20: mol_type = other DNA
ctcctgtccctatcattagg

SEQ ID NO: 17186 - DNA, 20 bp, synthetic construct
  misc_feature 1..20: note = chemically synthesized
  source 1..20: mol_type = other DNA
tgtccctatcattaggaggc

SEQ ID NO: 17187 - DNA, 20 bp, synthetic construct
  misc_feature 1..20: note = chemically synthesized
  source 1..20: mol_type = other DNA
gtccctatcattaggaggcc

SEQ ID NO: 17188 - DNA, 20 bp, synthetic construct
  misc_feature 1..20: note = chemically synthesized
  source 1..20: mol_type = other DNA
tccctatcattaggaggcca

SEQ ID NO: 17189 - DNA, 20 bp, synthetic construct
  misc_feature 1..20: note = chemically synthesized
  source 1..20: mol_type = other DNA
ctatcattaggaggccaggg

SEQ ID NO: 17190 - DNA, 20 bp, synthetic construct
  misc_feature 1..20: note = chemically synthesized
  source 1..20: mol_type = other DNA
tatcattaggaggccagggt

SEQ ID NO: 17191 - DNA, 20 bp, synthetic construct
  misc_feature 1..20: note = chemically synthesized
  source 1..20: mol_type = other DNA
tcattaggaggccagggtgg

SEQ ID NO: 17192 - DNA, 20 bp, synthetic construct
  misc_feature 1..20: note = chemically synthesized
  source 1..20: mol_type = other DNA
cattaggaggccagggtggg

SEQ ID NO: 17193 - DNA, 20 bp, synthetic construct
  misc_feature 1..20: note = chemically synthesized
  source 1..20: mol_type = other DNA
ccagggtgggaggattgctt

SEQ ID NO: 17194 - DNA, 20 bp, synthetic construct
  misc_feature 1..20: note = chemically synthesized
  source 1..20: mol_type = other DNA
cagggtgggaggattgcttg

SEQ ID NO: 17195 - DNA, 20 bp, synthetic construct
  misc_feature 1..20: note = chemically synthesized
  source 1..20: mol_type = other DNA
gtgggaggattgcttgaggt

SEQ ID NO: 17196 - DNA, 20 bp, synthetic construct
  misc_feature 1..20: note = chemically synthesized
  source 1..20: mol_type = other DNA
tgggaggattgcttgaggtt

SEQ ID NO: 17197 - DNA, 20 bp, synthetic construct
  misc_feature 1..20: note = chemically synthesized
  source 1..20: mol_type = other DNA
gattgcttgaggttaggaat

SEQ ID NO: 17198 - DNA, 20 bp, synthetic construct
  misc_feature 1..20: note = chemically synthesized
  source 1..20: mol_type = other DNA
ttgcttgaggttaggaattg

SEQ ID NO: 17199 - DNA, 20 bp, synthetic construct
  misc_feature 1..20: note = chemically synthesized
  source 1..20: mol_type = other DNA
gcttgaggttaggaattgga

SEQ ID NO: 17200 - DNA, 20 bp, synthetic construct
  misc_feature 1..20: note = chemically synthesized
  source 1..20: mol_type = other DNA
tgaggttaggaattggagag

SEQ ID NO: 17201 - DNA, 20 bp, synthetic construct
  misc_feature 1..20: note = chemically synthesized
  source 1..20: mol_type = other DNA
taggaattggagagcagcct

SEQ ID NO: 17202 - DNA, 20 bp, synthetic construct
  misc_feature 1..20: note = chemically synthesized
  source 1..20: mol_type = other DNA
tttacaaaaaataaaaacat

SEQ ID NO: 17203 - DNA, 20 bp, synthetic construct
  misc_feature 1..20: note = chemically synthesized
  source 1..20: mol_type = other DNA
caaaaaataaaaacattagc

SEQ ID NO: 17204 - DNA, 20 bp, synthetic construct
  misc_feature 1..20: note = chemically synthesized
  source 1..20: mol_type = other DNA
aaaaaataaaaacattagct

SEQ ID NO: 17205 - DNA, 20 bp, synthetic construct
  misc_feature 1..20: note = chemically synthesized
  source 1..20: mol_type = other DNA
ataaaaacattagctaggtg

SEQ ID NO: 17206 - DNA, 20 bp, synthetic construct
  misc_feature 1..20: note = chemically synthesized
  source 1..20: mol_type = other DNA
aaaacattagctaggtgcag

SEQ ID NO: 17207 - DNA, 20 bp, synthetic construct
  misc_feature 1..20: note = chemically synthesized
  source 1..20: mol_type = other DNA
ggtgcagtggcataaacctg

SEQ ID NO: 17208 - DNA, 20 bp, synthetic construct
  misc_feature 1..20: note = chemically synthesized
  source 1..20: mol_type = other DNA
gtggcataaacctgtagtcc

SEQ ID NO: 17209 - DNA, 20 bp, synthetic construct
  misc_feature 1..20: note = chemically synthesized
  source 1..20: mol_type = other DNA
tggcataaacctgtagtcct

SEQ ID NO: 17210 - DNA, 20 bp, synthetic construct
  misc_feature 1..20: note = chemically synthesized
  source 1..20: mol_type = other DNA
tgtagtcctaggtactcaaa

SEQ ID NO: 17211 - DNA, 20 bp, synthetic construct
  misc_feature 1..20: note = chemically synthesized
  source 1..20: mol_type = other DNA
tcctaggtactcaaaaagct

SEQ ID NO: 17212 - DNA, 20 bp, synthetic construct
  misc_feature 1..20: note = chemically synthesized
  source 1..20: mol_type = other DNA
cctaggtactcaaaaagctg

SEQ ID NO: 17213 - DNA, 20 bp, synthetic construct
  misc_feature 1..20: note = chemically synthesized
  source 1..20: mol_type = other DNA
aggtactcaaaaagctgagg

SEQ ID NO: 17214 - DNA, 20 bp, synthetic construct
  misc_feature 1..20: note = chemically synthesized
  source 1..20: mol_type = other DNA
tactcaaaaagctgaggaag

SEQ ID NO: 17215 - DNA, 20 bp, synthetic construct
  misc_feature 1..20: note = chemically synthesized
  source 1..20: mol_type = other DNA
actcaaaaagctgaggaaga

SEQ ID NO: 17216 - DNA, 20 bp, synthetic construct
  misc_feature 1..20: note = chemically synthesized
  source 1..20: mol_type = other DNA
ctgaggaagaaggattgctt

SEQ ID NO: 17217 - DNA, 20 bp, synthetic construct
  misc_feature 1..20: note = chemically synthesized
  source 1..20: mol_type = other DNA
gaagaaggattgcttgagcc

SEQ ID NO: 17218 - DNA, 20 bp, synthetic construct
  misc_feature 1..20: note = chemically synthesized
  source 1..20: mol_type = other DNA
aagaaggattgcttgagccc

SEQ ID NO: 17219 - DNA, 20 bp, synthetic construct
  misc_feature 1..20: note = chemically synthesized
  source 1..20: mol_type = other DNA
ttgcttgagcccaggatttc

SEQ ID NO: 17220 - DNA, 20 bp, synthetic construct
  misc_feature 1..20: note = chemically synthesized
  source 1..20: mol_type = other DNA
tgcttgagcccaggatttca

SEQ ID NO: 17221 - DNA, 20 bp, synthetic construct
  misc_feature 1..20: note = chemically synthesized
  source 1..20: mol_type = other DNA
agcccaggatttcaaggctg

SEQ ID NO: 17222 - DNA, 20 bp, synthetic construct
  misc_feature 1..20: note = chemically synthesized
  source 1..20: mol_type = other DNA
caggatttcaaggctgcagt

SEQ ID NO: 17223 - DNA, 20 bp, synthetic construct
  misc_feature 1..20: note = chemically synthesized
  source 1..20: mol_type = other DNA
aaggctgcagtgagctgtga

SEQ ID NO: 17224 - DNA, 20 bp, synthetic construct
  misc_feature 1..20: note = chemically synthesized
  source 1..20: mol_type = other DNA
gtgatggcaccactgcactc

SEQ ID NO: 17225 - DNA, 20 bp, synthetic construct
  misc_feature 1..20: note = chemically synthesized
  source 1..20: mol_type = other DNA
ggcaccactgcactccagcc

SEQ ID NO: 17226 - DNA, 20 bp, synthetic construct
  misc_feature 1..20: note = chemically synthesized
  source 1..20: mol_type = other DNA
gcaccactgcactccagcct

SEQ ID NO: 17227 - DNA, 20 bp, synthetic construct
  misc_feature 1..20: note = chemically synthesized
  source 1..20: mol_type = other DNA
ctgcactccagcctgggcaa

SEQ ID NO: 17228 - DNA, 20 bp, synthetic construct
  misc_feature 1..20: note = chemically synthesized
  source 1..20: mol_type = other DNA
gcactccagcctgggcaaca

SEQ ID NO: 17229 - DNA, 20 bp, synthetic construct
  misc_feature 1..20: note = chemically synthesized
  source 1..20: mol_type = other DNA
tccagcctgggcaacagagc

SEQ ID NO: 17230 - DNA, 20 bp, synthetic construct
  misc_feature 1..20: note = chemically synthesized
  source 1..20: mol_type = other DNA
aaataaataaataaataaat

SEQ ID NO: 17231 - DNA, 20 bp, synthetic construct
  misc_feature 1..20: note = chemically synthesized
  source 1..20: mol_type = other DNA
ataaataaataaataagctt

SEQ ID NO: 17232 - DNA, 20 bp, synthetic construct
  misc_feature 1..20: note = chemically synthesized
  source 1..20: mol_type = other DNA
taaataagctttagccacac

SEQ ID NO: 17233 - DNA, 20 bp, synthetic construct
  misc_feature 1..20: note = chemically synthesized
  source 1..20: mol_type = other DNA
aagctttagccacaccagac

SEQ ID NO: 17234 - DNA, 20 bp, synthetic construct
  misc_feature 1..20: note = chemically synthesized
  source 1..20: mol_type = other DNA
agtaacattgtgtattttta

SEQ ID NO: 17235 - DNA, 20 bp, synthetic construct
  misc_feature 1..20: note = chemically synthesized
  source 1..20: mol_type = other DNA
gtaacattgtgtatttttaa

SEQ ID NO: 17236 - DNA, 20 bp, synthetic construct
  misc_feature 1..20: note = chemically synthesized
  source 1..20: mol_type = other DNA
aaggactgcattaataaatt

SEQ ID NO: 17237 - DNA, 20 bp, synthetic construct
  misc_feature 1..20: note = chemically synthesized
  source 1..20: mol_type = other DNA
aggactgcattaataaattt

SEQ ID NO: 17238 - DNA, 20 bp, synthetic construct
  misc_feature 1..20: note = chemically synthesized
  source 1..20: mol_type = other DNA
ggactgcattaataaatttg

SEQ ID NO: 17239 - DNA, 20 bp, synthetic construct
  misc_feature 1..20: note = chemically synthesized
  source 1..20: mol_type = other DNA
gactgcattaataaatttgg

SEQ ID NO: 17240 - DNA, 20 bp, synthetic construct
  misc_feature 1..20: note = chemically synthesized
  source 1..20: mol_type = other DNA
ttaataaatttgggggttta

SEQ ID NO: 17241 - DNA, 20 bp, synthetic construct
  misc_feature 1..20: note = chemically synthesized
  source 1..20: mol_type = other DNA
aaatttgggggtttacagaa

SEQ ID NO: 17242 - DNA, 20 bp, synthetic construct
  misc_feature 1..20: note = chemically synthesized
  source 1..20: mol_type = other DNA
tttgggggtttacagaatgg

SEQ ID NO: 17243 - DNA, 20 bp, synthetic construct
  misc_feature 1..20: note = chemically synthesized
  source 1..20: mol_type = other DNA
ttgggggtttacagaatggc

SEQ ID NO: 17244 - DNA, 20 bp, synthetic construct
  misc_feature 1..20: note = chemically synthesized
  source 1..20: mol_type = other DNA
ggggtttacagaatggcagg

SEQ ID NO: 17245 - DNA, 20 bp, synthetic construct
  misc_feature 1..20: note = chemically synthesized
  source 1..20: mol_type = other DNA
gaatggcaggtagttatcct

SEQ ID NO: 17246 - DNA, 20 bp, synthetic construct
  misc_feature 1..20: note = chemically synthesized
  source 1..20: mol_type = other DNA
aatggcaggtagttatcctt

SEQ ID NO: 17247 - DNA, 20 bp, synthetic construct
  misc_feature 1..20: note = chemically synthesized
  source 1..20: mol_type = other DNA
ggcaggtagttatccttggg

SEQ ID NO: 17248 - DNA, 20 bp, synthetic construct
  misc_feature 1..20: note = chemically synthesized
  source 1..20: mol_type = other DNA
ttgggaagacaatatgctga

SEQ ID NO: 17249 - DNA, 20 bp, synthetic construct
  misc_feature 1..20: note = chemically synthesized
  source 1..20: mol_type = other DNA
tgggaagacaatatgctgat

SEQ ID NO: 17250 - DNA, 20 bp, synthetic construct
  misc_feature 1..20: note = chemically synthesized
  source 1..20: mol_type = other DNA
gggaagacaatatgctgatg

SEQ ID NO: 17251 - DNA, 20 bp, synthetic construct
  misc_feature 1..20: note = chemically synthesized
  source 1..20: mol_type = other DNA
tactgccctgactaaactca

SEQ ID NO: 17252 - DNA, 20 bp, synthetic construct
  misc_feature 1..20: note = chemically synthesized
  source 1..20: mol_type = other DNA
tgactaaactcacagtatga

SEQ ID NO: 17253 - DNA, 20 bp, synthetic construct
  misc_feature 1..20: note = chemically synthesized
  source 1..20: mol_type = other DNA
actaaactcacagtatgaca

SEQ ID NO: 17254 - DNA, 20 bp, synthetic construct
  misc_feature 1..20: note = chemically synthesized
  source 1..20: mol_type = other DNA
gtgctgacttgataattcct

SEQ ID NO: 17255 - DNA, 20 bp, synthetic construct
  misc_feature 1..20: note = chemically synthesized
  source 1..20: mol_type = other DNA
gctgacttgataattcctca

SEQ ID NO: 17256 - DNA, 20 bp, synthetic construct
  misc_feature 1..20: note = chemically synthesized
  source 1..20: mol_type = other DNA
gacttgataattcctcagag

SEQ ID NO: 17257 - DNA, 20 bp, synthetic construct
  misc_feature 1..20: note = chemically synthesized
  source 1..20: mol_type = other DNA
attcctcagagcagatctct

SEQ ID NO: 17258 - DNA, 20 bp, synthetic construct
  misc_feature 1..20: note = chemically synthesized
  source 1..20: mol_type = other DNA
tcctcagagcagatctctaa

SEQ ID NO: 17259 - DNA, 20 bp, synthetic construct
  misc_feature 1..20: note = chemically synthesized
  source 1..20: mol_type = other DNA
ctcagagcagatctctaaga

SEQ ID NO: 17260 - DNA, 20 bp, synthetic construct
  misc_feature 1..20: note = chemically synthesized
  source 1..20: mol_type = other DNA
cagatctctaagagagctta

SEQ ID NO: 17261 - DNA, 20 bp, synthetic construct
  misc_feature 1..20: note = chemically synthesized
  source 1..20: mol_type = other DNA
agacacaacgcctgcttcac

SEQ ID NO: 17262 - DNA, 20 bp, synthetic construct
  misc_feature 1..20: note = chemically synthesized
  source 1..20: mol_type = other DNA
gacacaacgcctgcttcaca

SEQ ID NO: 17263 - DNA, 20 bp, synthetic construct
  misc_feature 1..20: note = chemically synthesized
  source 1..20: mol_type = other DNA
gcctgcttcacaaggttctc

SEQ ID NO: 17264 - DNA, 20 bp, synthetic construct
  misc_feature 1..20: note = chemically synthesized
  source 1..20: mol_type = other DNA
cttcacaaggttctcaagta

SEQ ID NO: 17265 - DNA, 20 bp, synthetic construct
  misc_feature 1..20: note = chemically synthesized
  source 1..20: mol_type = other DNA
ctcaagtatggcaaacttgt

SEQ ID NO: 17266 - DNA, 20 bp, synthetic construct
  misc_feature 1..20: note = chemically synthesized
  source 1..20: mol_type = other DNA
agtatggcaaacttgtcagt

SEQ ID NO: 17267 - DNA, 20 bp, synthetic construct
  misc_feature 1..20: note = chemically synthesized
  source 1..20: mol_type = other DNA
gtatggcaaacttgtcagtc

SEQ ID NO: 17268 - DNA, 20 bp, synthetic construct
  misc_feature 1..20: note = chemically synthesized
  source 1..20: mol_type = other DNA
tatggcaaacttgtcagtca

SEQ ID NO: 17269 - DNA, 20 bp, synthetic construct
  misc_feature 1..20: note = chemically synthesized
  source 1..20: mol_type = other DNA
gcaaacttgtcagtcagggt

SEQ ID NO: 17270 - DNA, 20 bp, synthetic construct
  misc_feature 1..20: note = chemically synthesized
  source 1..20: mol_type = other DNA
ttgtcagtcagggtgagact

SEQ ID NO: 17271 - DNA, 20 bp, synthetic construct
  misc_feature 1..20: note = chemically synthesized
  source 1..20: mol_type = other DNA
tgtcagtcagggtgagactg

SEQ ID NO: 17272 - DNA, 20 bp, synthetic construct
  misc_feature 1..20: note = chemically synthesized
  source 1..20: mol_type = other DNA
gtcagggtgagactgaggat

SEQ ID NO: 17273 - DNA, 20 bp, synthetic construct
  misc_feature 1..20: note = chemically synthesized
  source 1..20: mol_type = other DNA
tcagggtgagactgaggatg

SEQ ID NO: 17274 - DNA, 20 bp, synthetic construct
  misc_feature 1..20: note = chemically synthesized
  source 1..20: mol_type = other DNA
tgagactgaggatgaggtct

SEQ ID NO: 17275 - DNA, 20 bp, synthetic construct
  misc_feature 1..20: note = chemically synthesized
  source 1..20: mol_type = other DNA
agactgaggatgaggtctaa

SEQ ID NO: 17276 - DNA, 20 bp, synthetic construct
  misc_feature 1..20: note = chemically synthesized
  source 1..20: mol_type = other DNA
tgaggtctaagagacttgtc

SEQ ID NO: 17277 - DNA, 20 bp, synthetic construct
  misc_feature 1..20: note = chemically synthesized
  source 1..20: mol_type = other DNA
ggtctaagagacttgtctgg

SEQ ID NO: 17278 - DNA, 20 bp, synthetic construct
  misc_feature 1..20: note = chemically synthesized
  source 1..20: mol_type = other DNA
tggaagctgcacttgtttga

SEQ ID NO: 17279 - DNA, 20 bp, synthetic construct
  misc_feature 1..20: note = chemically synthesized
  source 1..20: mol_type = other DNA
ggaagctgcacttgtttgaa

SEQ ID NO: 17280 - DNA, 20 bp, synthetic construct
  misc_feature 1..20: note = chemically synthesized
  source 1..20: mol_type = other DNA
aaaggacactgattttactt

SEQ ID NO: 17281 - DNA, 20 bp, synthetic construct
  misc_feature 1..20: note = chemically synthesized
  source 1..20: mol_type = other DNA
ggacactgattttacttcag

SEQ ID NO: 17282 - DNA, 20 bp, synthetic construct
  misc_feature 1..20: note = chemically synthesized
  source 1..20: mol_type = other DNA
taaatgtccttatatatcac

SEQ ID NO: 17283 - DNA, 20 bp, synthetic construct
  misc_feature 1..20: note = chemically synthesized
  source 1..20: mol_type = other DNA
gtccttatatatcactggat

SEQ ID NO: 17284 - DNA, 20 bp, synthetic construct
  misc_feature 1..20: note = chemically synthesized
  source 1..20: mol_type = other DNA
cttatatatcactggatcag

SEQ ID NO: 17285 - DNA, 20 bp, synthetic construct
  misc_feature 1..20: note = chemically synthesized
  source 1..20: mol_type = other DNA
ttatatatcactggatcagc

SEQ ID NO: 17286 - DNA, 20 bp, synthetic construct
  misc_feature 1..20: note = chemically synthesized
  source 1..20: mol_type = other DNA
tatatcactggatcagcagg

SEQ ID NO: 17287 - DNA, 20 bp, synthetic construct
  misc_feature 1..20: note = chemically synthesized
  source 1..20: mol_type = other DNA
gatgctgacttaataattga

SEQ ID NO: 17288 - DNA, 20 bp, synthetic construct
  misc_feature 1..20: note = chemically synthesized
  source 1..20: mol_type = other DNA
atgctgacttaataattgaa

SEQ ID NO: 17289 - DNA, 20 bp, synthetic construct
  misc_feature 1..20: note = chemically synthesized
  source 1..20: mol_type = other DNA
attgaaaggattttcaaact

SEQ ID NO: 17290 - DNA, 20 bp, synthetic construct
  misc_feature 1..20: note = chemically synthesized
  source 1..20: mol_type = other DNA
gaaaggattttcaaactaag

SEQ ID NO: 17291 - DNA, 20 bp, synthetic construct
  misc_feature 1..20: note = chemically synthesized
  source 1..20: mol_type = other DNA
aagttgtaaaatataatata

SEQ ID NO: 17292 - DNA, 20 bp, synthetic construct
  misc_feature 1..20: note = chemically synthesized
  source 1..20: mol_type = other DNA
agttgtaaaatataatatat

SEQ ID NO: 17293 - DNA, 20 bp, synthetic construct
  misc_feature 1..20: note = chemically synthesized
  source 1..20: mol_type = other DNA
gcataaatatacatttactt

SEQ ID NO: 17294 - DNA, 20 bp, synthetic construct
  misc_feature 1..20: note = chemically synthesized
  source 1..20: mol_type = other DNA
atacatttacttaagaaaat

SEQ ID NO: 17295 - DNA, 20 bp, synthetic construct
  misc_feature 1..20: note = chemically synthesized
  source 1..20: mol_type = other DNA
ttgatttttgactattgata

SEQ ID NO: 17296 - DNA, 20 bp, synthetic construct
  misc_feature 1..20: note = chemically synthesized
  source 1..20: mol_type = other DNA
tgatttttgactattgatac

SEQ ID NO: 17297 - DNA, 20 bp, synthetic construct
  misc_feature 1..20: note = chemically synthesized
  source 1..20: mol_type = other DNA
ctattgatacaggctgttta

SEQ ID NO: 17298 - DNA, 20 bp, synthetic construct
  misc_feature 1..20: note = chemically synthesized
  source 1..20: mol_type = other DNA
acaggctgtttaaagatcaa

SEQ ID NO: 17299 - DNA, 20 bp, synthetic construct
  misc_feature 1..20: note = chemically synthesized
  source 1..20: mol_type = other DNA
caggctgtttaaagatcaat

SEQ ID NO: 17300 - DNA, 20 bp, synthetic construct
  misc_feature 1..20: note = chemically synthesized
  source 1..20: mol_type = other DNA
gtcatcccttgctaacatat

SEQ ID NO: 17301 - DNA, 20 bp, synthetic construct
  misc_feature 1..20: note = chemically synthesized
  source 1..20: mol_type = other DNA
gctaacatatgagtaaactt

SEQ ID NO: 17302 - DNA, 20 bp, synthetic construct
  misc_feature 1..20: note = chemically synthesized
  source 1..20: mol_type = other DNA
cacttcttcttatttataat

SEQ ID NO: 17303 - DNA, 20 bp, synthetic construct
  misc_feature 1..20: note = chemically synthesized
  source 1..20: mol_type = other DNA
aattagatacctctgtttct

SEQ ID NO: 17304 - DNA, 20 bp, synthetic construct
  misc_feature 1..20: note = chemically synthesized
  source 1..20: mol_type = other DNA
tcgctatcataccttatttt

SEQ ID NO: 17305 - DNA, 20 bp, synthetic construct
  misc_feature 1..20: note = chemically synthesized
  source 1..20: mol_type = other DNA
attttcagcacatcgcccct

SEQ ID NO: 17306 - DNA, 20 bp, synthetic construct
  misc_feature 1..20: note = chemically synthesized
  source 1..20: mol_type = other DNA
tacacatttacacattgttg

SEQ ID NO: 17307 - DNA, 20 bp, synthetic construct
  misc_feature 1..20: note = chemically synthesized
  source 1..20: mol_type = other DNA
acacatttacacattgttgt

SEQ ID NO: 17308 - DNA, 20 bp, synthetic construct
  misc_feature 1..20: note = chemically synthesized
  source 1..20: mol_type = other DNA
gctgtcttcttataacaatc

SEQ ID NO: 17309 - DNA, 20 bp, synthetic construct
  misc_feature 1..20: note = chemically synthesized
  source 1..20: mol_type = other DNA
tcttataacaatcaagaaaa

SEQ ID NO: 17310 - DNA, 20 bp, synthetic construct
  misc_feature 1..20: note = chemically synthesized
  source 1..20: mol_type = other DNA
cgctatgttttttactctta

SEQ ID NO: 17311 - DNA, 20 bp, synthetic construct
  misc_feature 1..20: note = chemically synthesized
  source 1..20: mol_type = other DNA
tactcttacagacatccttt

SEQ ID NO: 17312 - DNA, 20 bp, synthetic construct
  misc_feature 1..20: note = chemically synthesized
  source 1..20: mol_type = other DNA
tcttacagacatcctttcag

SEQ ID NO: 17313 - DNA, 20 bp, synthetic construct
  misc_feature 1..20: note = chemically synthesized
  source 1..20: mol_type = other DNA
gacatcctttcagtggtcaa

SEQ ID NO: 17314 - DNA, 20 bp, synthetic construct
  misc_feature 1..20: note = chemically synthesized
  source 1..20: mol_type = other DNA
catcctttcagtggtcaata

SEQ ID NO: 17315 - DNA, 20 bp, synthetic construct
  misc_feature 1..20: note = chemically synthesized
  source 1..20: mol_type = other DNA
ttcagtggtcaatagagatg

SEQ ID NO: 17316 - DNA, 20 bp, synthetic construct
  misc_feature 1..20: note = chemically synthesized
  source 1..20: mol_type = other DNA
agatgcagctttcctaaatg

SEQ ID NO: 17317 - DNA, 20 bp, synthetic construct
  misc_feature 1..20: note = chemically synthesized
  source 1..20: mol_type = other DNA
cctaaatgtagtttgtatgt

SEQ ID NO: 17318 - DNA, 20 bp, synthetic construct
  misc_feature 1..20: note = chemically synthesized
  source 1..20: mol_type = other DNA
tgttagcacaatgtgcattt

SEQ ID NO: 17319 - DNA, 20 bp, synthetic construct
  misc_feature 1..20: note = chemically synthesized
  source 1..20: mol_type = other DNA
gcattttagaccaaacaaca

SEQ ID NO: 17320 - DNA, 20 bp, synthetic construct
  misc_feature 1..20: note = chemically synthesized
  source 1..20: mol_type = other DNA
cattttagaccaaacaacaa

SEQ ID NO: 17321 - DNA, 20 bp, synthetic construct
  misc_feature 1..20: note = chemically synthesized
  source 1..20: mol_type = other DNA
gaccaaacaacaaaggcaac

SEQ ID NO: 17322 - DNA, 20 bp, synthetic construct
  misc_feature 1..20: note = chemically synthesized
  source 1..20: mol_type = other DNA
cagaaaacgacgtttctaaa

SEQ ID NO: 17323 - DNA, 20 bp, synthetic construct
  misc_feature 1..20: note = chemically synthesized
  source 1..20: mol_type = other DNA
taaactctgtatgccaactt

SEQ ID NO: 17324 - DNA, 20 bp, synthetic construct
  misc_feature 1..20: note = chemically synthesized
  source 1..20: mol_type = other DNA
acaaataaataaattttaca

SEQ ID NO: 17325 - DNA, 20 bp, synthetic construct
  misc_feature 1..20: note = chemically synthesized
  source 1..20: mol_type = other DNA
aaataaataaattttacaca

SEQ ID NO: 17326 - DNA, 20 bp, synthetic construct
  misc_feature 1..20: note = chemically synthesized
  source 1..20: mol_type = other DNA
ccccccacgtcctactttca

SEQ ID NO: 17327 - DNA, 20 bp, synthetic construct
  misc_feature 1..20: note = chemically synthesized
  source 1..20: mol_type = other DNA
cgcacaataactgaatcctt

SEQ ID NO: 17328 - DNA, 20 bp, synthetic construct
  misc_feature 1..20: note = chemically synthesized
  source 1..20: mol_type = other DNA
gcacaataactgaatccttc

SEQ ID NO: 17329 - DNA, 20 bp, synthetic construct
  misc_feature 1..20: note = chemically synthesized
  source 1..20: mol_type = other DNA
acaataactgaatccttcag

SEQ ID NO: 17330 - DNA, 20 bp, synthetic construct
  misc_feature 1..20: note = chemically synthesized
  source 1..20: mol_type = other DNA
ataactgaatccttcaggag

SEQ ID NO: 17331 - DNA, 20 bp, synthetic construct
  misc_feature 1..20: note = chemically synthesized
  source 1..20: mol_type = other DNA
cttcaggagtagtcatttat

SEQ ID NO: 17332 - DNA, 20 bp, synthetic construct
  misc_feature 1..20: note = chemically synthesized
  source 1..20: mol_type = other DNA
ttatttttcctgcatccaaa

SEQ ID NO: 17333 - DNA, 20 bp, synthetic construct
  misc_feature 1..20: note = chemically synthesized
  source 1..20: mol_type = other DNA
tatttttcctgcatccaaat

SEQ ID NO: 17334 - DNA, 20 bp, synthetic construct
  misc_feature 1..20: note = chemically synthesized
  source 1..20: mol_type = other DNA
tccaaatgggccttctaatt

SEQ ID NO: 17335 - DNA, 20 bp, synthetic construct
  misc_feature 1..20: note = chemically synthesized
  source 1..20: mol_type = other DNA
caaatgggccttctaatttg

SEQ ID NO: 17336 - DNA, 20 bp, synthetic construct
  misc_feature 1..20: note = chemically synthesized
  source 1..20: mol_type = other DNA
tggagaaatactgcattatt

SEQ ID NO: 17337 - DNA, 20 bp, synthetic construct
  misc_feature 1..20: note = chemically synthesized
  source 1..20: mol_type = other DNA
aatactgcattatttagctt

SEQ ID NO: 17338 - DNA, 20 bp, synthetic construct
  misc_feature 1..20: note = chemically synthesized
  source 1..20: mol_type = other DNA
cattatttagctttagtttt

SEQ ID NO: 17339 - DNA, 20 bp, synthetic construct
  misc_feature 1..20: note = chemically synthesized
  source 1..20: mol_type = other DNA
atttagctttagttttcagt

SEQ ID NO: 17340 - DNA, 20 bp, synthetic construct
  misc_feature 1..20: note = chemically synthesized
  source 1..20: mol_type = other DNA
gtattttcttatcaaatctc

SEQ ID NO: 17341 - DNA, 20 bp, synthetic construct
  misc_feature 1..20: note = chemically synthesized
  source 1..20: mol_type = other DNA
tcaaatctctggaatatttt

SEQ ID NO: 17342 - DNA, 20 bp, synthetic construct
  misc_feature 1..20: note = chemically synthesized
  source 1..20: mol_type = other DNA
aaatctctggaatattttca

SEQ ID NO: 17343 - DNA, 20 bp, synthetic construct
  misc_feature 1..20: note = chemically synthesized
  source 1..20: mol_type = other DNA
ttttcagagtgctcactgtc

SEQ ID NO: 17344 - DNA, 20 bp, synthetic construct
  misc_feature 1..20: note = chemically synthesized
  source 1..20: mol_type = other DNA
cagatgtaaaataaatatga

SEQ ID NO: 17345 - DNA, 20 bp, synthetic construct
  misc_feature 1..20: note = chemically synthesized
  source 1..20: mol_type = other DNA
ataaatatgaaagatttctt

SEQ ID NO: 17346 - DNA, 20 bp, synthetic construct
  misc_feature 1..20: note = chemically synthesized
  source 1..20: mol_type = other DNA
tatgaaagatttcttaagtg

SEQ ID NO: 17347 - DNA, 20 bp, synthetic construct
  misc_feature 1..20: note = chemically synthesized
  source 1..20: mol_type = other DNA
gaaagatttcttaagtgaag

SEQ ID NO: 17348 - DNA, 20 bp, synthetic construct
  misc_feature 1..20: note = chemically synthesized
  source 1..20: mol_type = other DNA
aagatttcttaagtgaagca

SEQ ID NO: 17349 - DNA, 20 bp, synthetic construct
  misc_feature 1..20: note = chemically synthesized
  source 1..20: mol_type = other DNA
gatttcttaagtgaagcaga

SEQ ID NO: 17350 - DNA, 20 bp, synthetic construct
  misc_feature 1..20: note = chemically synthesized
  source 1..20: mol_type = other DNA
taagtgaagcagagagaatt

SEQ ID NO: 17351 - DNA, 20 bp, synthetic construct
  misc_feature 1..20: note = chemically synthesized
  source 1..20: mol_type = other DNA
gaagcagagagaatttagaa

SEQ ID NO: 17352 - DNA, 20 bp, synthetic construct
  misc_feature 1..20: note = chemically synthesized
  source 1..20: mol_type = other DNA
agaatggaataattatatac

SEQ ID NO: 17353 - DNA, 20 bp, synthetic construct
  misc_feature 1..20: note = chemically synthesized
  source 1..20: mol_type = other DNA
gaatggaataattatatact

SEQ ID NO: 17354 - DNA, 20 bp, synthetic construct
  misc_feature 1..20: note = chemically synthesized
  source 1..20: mol_type = other DNA
tatatactgggttctgaaca

SEQ ID NO: 17355 - DNA, 20 bp, synthetic construct
  misc_feature 1..20: note = chemically synthesized
  source 1..20: mol_type = other DNA
tctgaacatggactttcaat

SEQ ID NO: 17356 - DNA, 20 bp, synthetic construct
  misc_feature 1..20: note = chemically synthesized
  source 1..20: mol_type = other DNA
acatggactttcaatcagaa

SEQ ID NO: 17357 - DNA, 20 bp, synthetic construct
  misc_feature 1..20: note = chemically synthesized
  source 1..20: mol_type = other DNA
tcaatcagaaaagaaaatat

SEQ ID NO: 17358 - DNA, 20 bp, synthetic construct
  misc_feature 1..20: note = chemically synthesized
  source 1..20: mol_type = other DNA
atcagaaaagaaaatattag

SEQ ID NO: 17359 - DNA, 20 bp, synthetic construct
  misc_feature 1..20: note = chemically synthesized
  source 1..20: mol_type = other DNA
gaaaagaaaatattagaagc

SEQ ID NO: 17360 - DNA, 20 bp, synthetic construct
  misc_feature 1..20: note = chemically synthesized
  source 1..20: mol_type = other DNA
atattagaagcaagctcaac

SEQ ID NO: 17361 - DNA, 20 bp, synthetic construct
  misc_feature 1..20: note = chemically synthesized
  source 1..20: mol_type = other DNA
ctcaacgagaacttaaaaat

SEQ ID NO: 17362 - DNA, 20 bp, synthetic construct
  misc_feature 1..20: note = chemically synthesized
  source 1..20: mol_type = other DNA
aacgagaacttaaaaattgg

SEQ ID NO: 17363 - DNA, 20 bp, synthetic construct
  misc_feature 1..20: note = chemically synthesized
  source 1..20: mol_type = other DNA
aacttaaaaattggaagaaa

SEQ ID NO: 17364 - DNA, 20 bp, synthetic construct
  misc_feature 1..20: note = chemically synthesized
  source 1..20: mol_type = other DNA
ttaaaaattggaagaaacag

SEQ ID NO: 17365 - DNA, 20 bp, synthetic construct
  misc_feature 1..20: note = chemically synthesized
  source 1..20: mol_type = other DNA
ttggaagaaacagcagtctt

SEQ ID NO: 17366 - DNA, 20 bp, synthetic construct
  misc_feature 1..20: note = chemically synthesized
  source 1..20: mol_type = other DNA
ggaagaaacagcagtcttca

SEQ ID NO: 17367 - DNA, 20 bp, synthetic construct
  misc_feature 1..20: note = chemically synthesized
  source 1..20: mol_type = other DNA
aagaaacagcagtcttcaga

SEQ ID NO: 17368 - DNA, 20 bp, synthetic construct
  misc_feature 1..20: note = chemically synthesized
  source 1..20: mol_type = other DNA
agaaacagcagtcttcagag

SEQ ID NO: 17369 - DNA, 20 bp, synthetic construct
  misc_feature 1..20: note = chemically synthesized
  source 1..20: mol_type = other DNA
gaggaatgaatgcaactttt

SEQ ID NO: 17370 - DNA, 20 bp, synthetic construct
  misc_feature 1..20: note = chemically synthesized
  source 1..20: mol_type = other DNA
atgaatgcaacttttgagat

SEQ ID NO: 17371 - DNA, 20 bp, synthetic construct
  misc_feature 1..20: note = chemically synthesized
  source 1..20: mol_type = other DNA
ttttgagattagtttcctat

SEQ ID NO: 17372 - DNA, 20 bp, synthetic construct
  misc_feature 1..20: note = chemically synthesized
  source 1..20: mol_type = other DNA
tttgagattagtttcctata

SEQ ID NO: 17373 - DNA, 20 bp, synthetic construct
  misc_feature 1..20: note = chemically synthesized
  source 1..20: mol_type = other DNA
tgagattagtttcctataag

SEQ ID NO: 17374 - DNA, 20 bp, synthetic construct
  misc_feature 1..20: note = chemically synthesized
  source 1..20: mol_type = other DNA
ttagtttcctataaggagat

SEQ ID NO: 17375 - DNA, 20 bp, synthetic construct
  misc_feature 1..20: note = chemically synthesized
  source 1..20: mol_type = other DNA
aggagatcagctgcaaatac

SEQ ID NO: 17376 - DNA, 20 bp, synthetic construct
  misc_feature 1..20: note = chemically synthesized
  source 1..20: mol_type = other DNA
atcagctgcaaatactagcg

SEQ ID NO: 17377 - DNA, 20 bp, synthetic construct
  misc_feature 1..20: note = chemically synthesized
  source 1..20: mol_type = other DNA
tgcaaatactagcgcagaac

SEQ ID NO: 17378 - DNA, 20 bp, synthetic construct
  misc_feature 1..20: note = chemically synthesized
  source 1..20: mol_type = other DNA
aaatactagcgcagaactag

SEQ ID NO: 17379 - DNA, 20 bp, synthetic construct
  misc_feature 1..20: note = chemically synthesized
  source 1..20: mol_type = other DNA
tactagcgcagaactagcag

SEQ ID NO: 17380 - DNA, 20 bp, synthetic construct
  misc_feature 1..20: note = chemically synthesized
  source 1..20: mol_type = other DNA
cgcagaactagcagtagatg

SEQ ID NO: 17381 - DNA, 20 bp, synthetic construct
  misc_feature 1..20: note = chemically synthesized
  source 1..20: mol_type = other DNA
gtcatcccctgttacactaa

SEQ ID NO: 17382 - DNA, 20 bp, synthetic construct
  misc_feature 1..20: note = chemically synthesized
  source 1..20: mol_type = other DNA
tcccctgttacactaatagc

SEQ ID NO: 17383 - DNA, 20 bp, synthetic construct
  misc_feature 1..20: note = chemically synthesized
  source 1..20: mol_type = other DNA
cctgttacactaatagcaag

SEQ ID NO: 17384 - DNA, 20 bp, synthetic construct
  misc_feature 1..20: note = chemically synthesized
  source 1..20: mol_type = other DNA
gttacactaatagcaagtgg

SEQ ID NO: 17385 - DNA, 20 bp, synthetic construct
  misc_feature 1..20: note = chemically synthesized
  source 1..20: mol_type = other DNA
taatagcaagtggtagactg

SEQ ID NO: 17386 - DNA, 20 bp, synthetic construct
  misc_feature 1..20: note = chemically synthesized
  source 1..20: mol_type = other DNA
gcaagtggtagactgcggtt

SEQ ID NO: 17387 - DNA, 20 bp, synthetic construct
  misc_feature 1..20: note = chemically synthesized
  source 1..20: mol_type = other DNA
tgcggttcagacccaatgaa

SEQ ID NO: 17388 - DNA, 20 bp, synthetic construct
  misc_feature 1..20: note = chemically synthesized
  source 1..20: mol_type = other DNA
cagacccaatgaacagcata

SEQ ID NO: 17389 - DNA, 20 bp, synthetic construct
  misc_feature 1..20: note = chemically synthesized
  source 1..20: mol_type = other DNA
aaagacttacaaacactttg

SEQ ID NO: 17390 - DNA, 20 bp, synthetic construct
  misc_feature 1..20: note = chemically synthesized
  source 1..20: mol_type = other DNA
gacttacaaacactttgaag

SEQ ID NO: 17391 - DNA, 20 bp, synthetic construct
  misc_feature 1..20: note = chemically synthesized
  source 1..20: mol_type = other DNA
aaacactttgaagaagattg

SEQ ID NO: 17392 - DNA, 20 bp, synthetic construct
  misc_feature 1..20: note = chemically synthesized
  source 1..20: mol_type = other DNA
aacactttgaagaagattga

SEQ ID NO: 17393 - DNA, 20 bp, synthetic construct
  misc_feature 1..20: note = chemically synthesized
  source 1..20: mol_type = other DNA
actttgaagaagattgaagg

SEQ ID NO: 17394 - DNA, 20 bp, synthetic construct
  misc_feature 1..20: note = chemically synthesized
  source 1..20: mol_type = other DNA
gaaggaagaaactattccat

SEQ ID NO: 17395 - DNA, 20 bp, synthetic construct
  misc_feature 1..20: note = chemically synthesized
  source 1..20: mol_type = other DNA
aatataacattacctttgcc

SEQ ID NO: 17396 - DNA, 20 bp, synthetic construct
  misc_feature 1..20: note = chemically synthesized
  source 1..20: mol_type = other DNA
attatcaaaactatttcatg

SEQ ID NO: 17397 - DNA, 20 bp, synthetic construct
  misc_feature 1..20: note = chemically synthesized
  source 1..20: mol_type = other DNA
aactatttcatgaagtgaaa

SEQ ID NO: 17398 - DNA, 20 bp, synthetic construct
  misc_feature 1..20: note = chemically synthesized
  source 1..20: mol_type = other DNA
tcatgaagtgaaaaagtctc

SEQ ID NO: 17399 - DNA, 20 bp, synthetic construct
  misc_feature 1..20: note = chemically synthesized
  source 1..20: mol_type = other DNA
agtctcgagattttttatgt

SEQ ID NO: 17400 - DNA, 20 bp, synthetic construct
  misc_feature 1..20: note = chemically synthesized
  source 1..20: mol_type = other DNA
ctcgagattttttatgtgag

SEQ ID NO: 17401 - DNA, 20 bp, synthetic construct
  misc_feature 1..20: note = chemically synthesized
  source 1..20: mol_type = other DNA
agattttttatgtgagaagc

SEQ ID NO: 17402 - DNA, 20 bp, synthetic construct
  misc_feature 1..20: note = chemically synthesized
  source 1..20: mol_type = other DNA
attttttatgtgagaagcaa

SEQ ID NO: 17403 - DNA, 20 bp, synthetic construct
  misc_feature 1..20: note = chemically synthesized
  source 1..20: mol_type = other DNA
ttttttatgtgagaagcaag

SEQ ID NO: 17404 - DNA, 20 bp, synthetic construct
  misc_feature 1..20: note = chemically synthesized
  source 1..20: mol_type = other DNA
tttttatgtgagaagcaaga

SEQ ID NO: 17405 - DNA, 20 bp, synthetic construct
  misc_feature 1..20: note = chemically synthesized
  source 1..20: mol_type = other DNA
ttttatgtgagaagcaagag

SEQ ID NO: 17406 - DNA, 20 bp, synthetic construct
  misc_feature 1..20: note = chemically synthesized
  source 1..20: mol_type = other DNA
gtgagaagcaagaggggaaa

SEQ ID NO: 17407 - DNA, 20 bp, synthetic construct
  misc_feature 1..20: note = chemically synthesized
  source 1..20: mol_type = other DNA
agcaagaggggaaatagaaa

SEQ ID NO: 17408 - DNA, 20 bp, synthetic construct
  misc_feature 1..20: note = chemically synthesized
  source 1..20: mol_type = other DNA
gcaagaggggaaatagaaat

SEQ ID NO: 17409 - DNA, 20 bp, synthetic construct
  misc_feature 1..20: note = chemically synthesized
  source 1..20: mol_type = other DNA
agaggggaaatagaaatggg

SEQ ID NO: 17410 - DNA, 20 bp, synthetic construct
  misc_feature 1..20: note = chemically synthesized
  source 1..20: mol_type = other DNA
ggtggtgatatctaaattta

SEQ ID NO: 17411 - DNA, 20 bp, synthetic construct
  misc_feature 1..20: note = chemically synthesized
  source 1..20: mol_type = other DNA
gtgatatctaaatttatagt

SEQ ID NO: 17412 - DNA, 20 bp, synthetic construct
  misc_feature 1..20: note = chemically synthesized
  source 1..20: mol_type = other DNA
ttatagttggttattttttt

SEQ ID NO: 17413 - DNA, 20 bp, synthetic construct
  misc_feature 1..20: note = chemically synthesized
  source 1..20: mol_type = other DNA
tagttggttatttttttcag

SEQ ID NO: 17414 - DNA, 20 bp, synthetic construct
  misc_feature 1..20: note = chemically synthesized
  source 1..20: mol_type = other DNA
ttttttcagaagaaaaatgt

SEQ ID NO: 17415 - DNA, 20 bp, synthetic construct
  misc_feature 1..20: note = chemically synthesized
  source 1..20: mol_type = other DNA
tttttcagaagaaaaatgtc

SEQ ID NO: 17416 - DNA, 20 bp, synthetic construct
  misc_feature 1..20: note = chemically synthesized
  source 1..20: mol_type = other DNA
tttcagaagaaaaatgtcag

SEQ ID NO: 17417 - DNA, 20 bp, synthetic construct
  misc_feature 1..20: note = chemically synthesized
  source 1..20: mol_type = other DNA
aaaaatgtcaggagacaaaa

SEQ ID NO: 17418 - DNA, 20 bp, synthetic construct
  misc_feature 1..20: note = chemically synthesized
  source 1..20: mol_type = other DNA
atgtcaggagacaaaataga

SEQ ID NO: 17419 - DNA, 20 bp, synthetic construct
  misc_feature 1..20: note = chemically synthesized
  source 1..20: mol_type = other DNA
caggagacaaaatagaaagc

SEQ ID NO: 17420 - DNA, 20 bp, synthetic construct
  misc_feature 1..20: note = chemically synthesized
  source 1..20: mol_type = other DNA
agacaaaatagaaagctgga

SEQ ID NO: 17421 - DNA, 20 bp, synthetic construct
  misc_feature 1..20: note = chemically synthesized
  source 1..20: mol_type = other DNA
caaaatagaaagctggaaag

SEQ ID NO: 17422 - DNA, 20 bp, synthetic construct
  misc_feature 1..20: note = chemically synthesized
  source 1..20: mol_type = other DNA
agaaagctggaaagaagaaa

SEQ ID NO: 17423 - DNA, 20 bp, synthetic construct
  misc_feature 1..20: note = chemically synthesized
  source 1..20: mol_type = other DNA
tggaaagaagaaaaagtatt

SEQ ID NO: 17424 - DNA, 20 bp, synthetic construct
  misc_feature 1..20: note = chemically synthesized
  source 1..20: mol_type = other DNA
aagaagaaaaagtattaagt

SEQ ID NO: 17425 - DNA, 20 bp, synthetic construct
  misc_feature 1..20: note = chemically synthesized
  source 1..20: mol_type = other DNA
aaaaagtattaagttagttt

SEQ ID NO: 17426 - DNA, 20 bp, synthetic construct
  misc_feature 1..20: note = chemically synthesized
  source 1..20: mol_type = other DNA
aagtattaagttagtttcag

SEQ ID NO: 17427 - DNA, 20 bp, synthetic construct
  misc_feature 1..20: note = chemically synthesized
  source 1..20: mol_type = other DNA
aagttagtttcagcagacaa

SEQ ID NO: 17428 - DNA, 20 bp, synthetic construct
  misc_feature 1..20: note = chemically synthesized
  source 1..20: mol_type = other DNA
agttagtttcagcagacaat

SEQ ID NO: 17429 - DNA, 20 bp, synthetic construct
  misc_feature 1..20: note = chemically synthesized
  source 1..20: mol_type = other DNA
tagtttcagcagacaatggg

SEQ ID NO: 17430 - DNA, 20 bp, synthetic construct
  misc_feature 1..20: note = chemically synthesized
  source 1..20: mol_type = other DNA
tttcagcagacaatgggaag

SEQ ID NO: 17431 - DNA, 20 bp, synthetic construct
  misc_feature 1..20: note = chemically synthesized
  source 1..20: mol_type = other DNA
ttcagcagacaatgggaaga

SEQ ID NO: 17432 - DNA, 20 bp, synthetic construct
  misc_feature 1..20: note = chemically synthesized
  source 1..20: mol_type = other DNA
gacaatgggaagaaggaaaa

SEQ ID NO: 17433 - DNA, 20 bp, synthetic construct
  misc_feature 1..20: note = chemically synthesized
  source 1..20: mol_type = other DNA
acaatgggaagaaggaaaac

SEQ ID NO: 17434 - DNA, 20 bp, synthetic construct
  misc_feature 1..20: note = chemically synthesized
  source 1..20: mol_type = other DNA
caatgggaagaaggaaaacg

SEQ ID NO: 17435 - DNA, 20 bp, synthetic construct
  misc_feature 1..20: note = chemically synthesized
  source 1..20: mol_type = other DNA
gggaagaaggaaaacggggc

SEQ ID NO: 17436 - DNA, 20 bp, synthetic construct
  misc_feature 1..20: note = chemically synthesized
  source 1..20: mol_type = other DNA
ggaagaaggaaaacggggct

SEQ ID NO: 17437 - DNA, 20 bp, synthetic construct
  misc_feature 1..20: note = chemically synthesized
  source 1..20: mol_type = other DNA
gaaaacggggctgggatatc

SEQ ID NO: 17438 - DNA, 20 bp, synthetic construct
  misc_feature 1..20: note = chemically synthesized
  source 1..20: mol_type = other DNA
ctgggatatctggcttccac

SEQ ID NO: 17439 - DNA, 20 bp, synthetic construct
  misc_feature 1..20: note = chemically synthesized
  source 1..20: mol_type = other DNA
tctggcttccacgagatgat

SEQ ID NO: 17440 - DNA, 20 bp, synthetic construct
  misc_feature 1..20: note = chemically synthesized
  source 1..20: mol_type = other DNA
gaaatgtgtttgctgctatt

SEQ ID NO: 17441 - DNA, 20 bp, synthetic construct
  misc_feature 1..20: note = chemically synthesized
  source 1..20: mol_type = other DNA
gtttgctgctatttagctgt

SEQ ID NO: 17442 - DNA, 20 bp, synthetic construct
  misc_feature 1..20: note = chemically synthesized
  source 1..20: mol_type = other DNA
agtctgtatcacacgccttt

SEQ ID NO: 17443 - DNA, 20 bp, synthetic construct
  misc_feature 1..20: note = chemically synthesized
  source 1..20: mol_type = other DNA
ctgtatcacacgccttttag

SEQ ID NO: 17444 - DNA, 20 bp, synthetic construct
  misc_feature 1..20: note = chemically synthesized
  source 1..20: mol_type = other DNA
cttttagtagtaaaatatgc

SEQ ID NO: 17445 - DNA, 20 bp, synthetic construct
  misc_feature 1..20: note = chemically synthesized
  source 1..20: mol_type = other DNA
gtaaaatatgccagtctact

SEQ ID NO: 17446 - DNA, 20 bp, synthetic construct
  misc_feature 1..20: note = chemically synthesized
  source 1..20: mol_type = other DNA
taaaatatgccagtctacta

SEQ ID NO: 17447 - DNA, 20 bp, synthetic construct
  misc_feature 1..20: note = chemically synthesized
  source 1..20: mol_type = other DNA
aaaatatgccagtctactaa

SEQ ID NO: 17448 - DNA, 20 bp, synthetic construct
  misc_feature 1..20: note = chemically synthesized
  source 1..20: mol_type = other DNA
taagggaaattacatttcat

SEQ ID NO: 17449 - DNA, 20 bp, synthetic construct
  misc_feature 1..20: note = chemically synthesized
  source 1..20: mol_type = other DNA
ggaaattacatttcatgagt

SEQ ID NO: 17450 - DNA, 20 bp, synthetic construct
  misc_feature 1..20: note = chemically synthesized
  source 1..20: mol_type = other DNA
tttcatgagtaagcttccta

SEQ ID NO: 17451 - DNA, 20 bp, synthetic construct
  misc_feature 1..20: note = chemically synthesized
  source 1..20: mol_type = other DNA
gagtaagcttcctaaagttc

SEQ ID NO: 17452 - DNA, 20 bp, synthetic construct
  misc_feature 1..20: note = chemically synthesized
  source 1..20: mol_type = other DNA
agttctagatatttgctgtt

SEQ ID NO: 17453 - DNA, 20 bp, synthetic construct
  misc_feature 1..20: note = chemically synthesized
  source 1..20: mol_type = other DNA
tttgctgtttagcctcacac

SEQ ID NO: 17454 - DNA, 20 bp, synthetic construct
  misc_feature 1..20: note = chemically synthesized
  source 1..20: mol_type = other DNA
cacaagtttgcttactaatc

SEQ ID NO: 17455 - DNA, 20 bp, synthetic construct
  misc_feature 1..20: note = chemically synthesized
  source 1..20: mol_type = other DNA
agtttgcttactaatcaagc

SEQ ID NO: 17456 - DNA, 20 bp, synthetic construct
  misc_feature 1..20: note = chemically synthesized
  source 1..20: mol_type = other DNA
taatcaagcaagatcctttt

SEQ ID NO: 17457 - DNA, 20 bp, synthetic construct
  misc_feature 1..20: note = chemically synthesized
  source 1..20: mol_type = other DNA
atcaagcaagatccttttca

SEQ ID NO: 17458 - DNA, 20 bp, synthetic construct
  misc_feature 1..20: note = chemically synthesized
  source 1..20: mol_type = other DNA
aagatccttttcagagtaac

SEQ ID NO: 17459 - DNA, 20 bp, synthetic construct
  misc_feature 1..20: note = chemically synthesized
  source 1..20: mol_type = other DNA
tttcagagtaactagtttca

SEQ ID NO: 17460 - DNA, 20 bp, synthetic construct
  misc_feature 1..20: note = chemically synthesized
  source 1..20: mol_type = other DNA
gagtaactagtttcaaagta

SEQ ID NO: 17461 - DNA, 20 bp, synthetic construct
  misc_feature 1..20: note = chemically synthesized
  source 1..20: mol_type = other DNA
gtaactagtttcaaagtatg

SEQ ID NO: 17462 - DNA, 20 bp, synthetic construct
  misc_feature 1..20: note = chemically synthesized
  source 1..20: mol_type = other DNA
ttattcaaattcacctttat

SEQ ID NO: 17463 - DNA, 20 bp, synthetic construct
  misc_feature 1..20: note = chemically synthesized
  source 1..20: mol_type = other DNA
tccaactgcacatttttctt

SEQ ID NO: 17464 - DNA, 20 bp, synthetic construct
  misc_feature 1..20: note = chemically synthesized
  source 1..20: mol_type = other DNA
agatgaactgtatttgaccc

SEQ ID NO: 17465 - DNA, 20 bp, synthetic construct
  misc_feature 1..20: note = chemically synthesized
  source 1..20: mol_type = other DNA
gtatttgacccaagctgctt

SEQ ID NO: 17466 - DNA, 20 bp, synthetic construct
  misc_feature 1..20: note = chemically synthesized
  source 1..20: mol_type = other DNA
cttgactatttctgaaatca

SEQ ID NO: 17467 - DNA, 20 bp, synthetic construct
  misc_feature 1..20: note = chemically synthesized
  source 1..20: mol_type = other DNA
aatcatagttactcttcttt

SEQ ID NO: 17468 - DNA, 20 bp, synthetic construct
  misc_feature 1..20: note = chemically synthesized
  source 1..20: mol_type = other DNA
cttcctgtattctttttctt

SEQ ID NO: 17469 - DNA, 20 bp, synthetic construct
  misc_feature 1..20: note = chemically synthesized
  source 1..20: mol_type = other DNA
ttctttttcttcagcatcac

SEQ ID NO: 17470 - DNA, 20 bp, synthetic construct
  misc_feature 1..20: note = chemically synthesized
  source 1..20: mol_type = other DNA
cactggcattccctctttat

SEQ ID NO: 17471 - DNA, 20 bp, synthetic construct
  misc_feature 1..20: note = chemically synthesized
  source 1..20: mol_type = other DNA
actggcattccctctttatt

SEQ ID NO: 17472 - DNA, 20 bp, synthetic construct
  misc_feature 1..20: note = chemically synthesized
  source 1..20: mol_type = other DNA
taaaaatttctcgctcacat

SEQ ID NO: 17473 - DNA, 20 bp, synthetic construct
  misc_feature 1..20: note = chemically synthesized
  source 1..20: mol_type = other DNA
ttaaaattgaatctaactct

SEQ ID NO: 17474 - DNA, 20 bp, synthetic construct
  misc_feature 1..20: note = chemically synthesized
  source 1..20: mol_type = other DNA
taaaattgaatctaactctg

SEQ ID NO: 17475 - DNA, 20 bp, synthetic construct
  misc_feature 1..20: note = chemically synthesized
  source 1..20: mol_type = other DNA
atctaactctgaggaaaaaa

SEQ ID NO: 17476 - DNA, 20 bp, synthetic construct
  misc_feature 1..20: note = chemically synthesized
  source 1..20: mol_type = other DNA
actctgaggaaaaaaaagtg

SEQ ID NO: 17477 - DNA, 20 bp, synthetic construct
  misc_feature 1..20: note = chemically synthesized
  source 1..20: mol_type = other DNA
aaaaagtgtggatataaaac

SEQ ID NO: 17478 - DNA, 20 bp, synthetic construct
  misc_feature 1..20: note = chemically synthesized
  source 1..20: mol_type = other DNA
aaaagtgtggatataaaacc

SEQ ID NO: 17479 - DNA, 20 bp, synthetic construct
  misc_feature 1..20: note = chemically synthesized
  source 1..20: mol_type = other DNA
aaagtgtggatataaaacca

SEQ ID NO: 17480 - DNA, 20 bp, synthetic construct
  misc_feature 1..20: note = chemically synthesized
  source 1..20: mol_type = other DNA
ataaaaccagggttcctttt

SEQ ID NO: 17481 - DNA, 20 bp, synthetic construct
  misc_feature 1..20: note = chemically synthesized
  source 1..20: mol_type = other DNA
ccagggttccttttcagtaa

SEQ ID NO: 17482 - DNA, 20 bp, synthetic construct
  misc_feature 1..20: note = chemically synthesized
  source 1..20: mol_type = other DNA
cagggttccttttcagtaat

SEQ ID NO: 17483 - DNA, 20 bp, synthetic construct
  misc_feature 1..20: note = chemically synthesized
  source 1..20: mol_type = other DNA
gggttccttttcagtaatgg

SEQ ID NO: 17484 - DNA, 20 bp, synthetic construct
  misc_feature 1..20: note = chemically synthesized
  source 1..20: mol_type = other DNA
gttccttttcagtaatggga

SEQ ID NO: 17485 - DNA, 20 bp, synthetic construct
  misc_feature 1..20: note = chemically synthesized
  source 1..20: mol_type = other DNA
ttccttttcagtaatgggag

SEQ ID NO: 17486 - DNA, 20 bp, synthetic construct
  misc_feature 1..20: note = chemically synthesized
  source 1..20: mol_type = other DNA
tttcagtaatgggagaggcc

SEQ ID NO: 17487 - DNA, 20 bp, synthetic construct
  misc_feature 1..20: note = chemically synthesized
  source 1..20: mol_type = other DNA
tgggagaggcccagaaatcc

SEQ ID NO: 17488 - DNA, 20 bp, synthetic construct
  misc_feature 1..20: note = chemically synthesized
  source 1..20: mol_type = other DNA
ggagaggcccagaaatccta

SEQ ID NO: 17489 - DNA, 20 bp, synthetic construct
  misc_feature 1..20: note = chemically synthesized
  source 1..20: mol_type = other DNA
ccagaaatcctagagatctt

SEQ ID NO: 17490 - DNA, 20 bp, synthetic construct
  misc_feature 1..20: note = chemically synthesized
  source 1..20: mol_type = other DNA
agatcttgagattctgaaat

SEQ ID NO: 17491 - DNA, 20 bp, synthetic construct
  misc_feature 1..20: note = chemically synthesized
  source 1..20: mol_type = other DNA
gatcttgagattctgaaata

SEQ ID NO: 17492 - DNA, 20 bp, synthetic construct
  misc_feature 1..20: note = chemically synthesized
  source 1..20: mol_type = other DNA
atcttgagattctgaaataa

SEQ ID NO: 17493 - DNA, 20 bp, synthetic construct
  misc_feature 1..20: note = chemically synthesized
  source 1..20: mol_type = other DNA
agattctgaaataagggctc

SEQ ID NO: 17494 - DNA, 20 bp, synthetic construct
  misc_feature 1..20: note = chemically synthesized
  source 1..20: mol_type = other DNA
ggctcaagccctactctgcc

SEQ ID NO: 17495 - DNA, 20 bp, synthetic construct
  misc_feature 1..20: note = chemically synthesized
  source 1..20: mol_type = other DNA
gccctactctgcccagaaaa

SEQ ID NO: 17496 - DNA, 20 bp, synthetic construct
  misc_feature 1..20: note = chemically synthesized
  source 1..20: mol_type = other DNA
ccctactctgcccagaaaat

SEQ ID NO: 17497 - DNA, 20 bp, synthetic construct
  misc_feature 1..20: note = chemically synthesized
  source 1..20: mol_type = other DNA
aatgcttctttgaatctgct

SEQ ID NO: 17498 - DNA, 20 bp, synthetic construct
  misc_feature 1..20: note = chemically synthesized
  source 1..20: mol_type = other DNA
ggtcttgatgctataaatga

SEQ ID NO: 17499 - DNA, 20 bp, synthetic construct
  misc_feature 1..20: note = chemically synthesized
  source 1..20: mol_type = other DNA
gtcttgatgctataaatgat

SEQ ID NO: 17500 - DNA, 20 bp, synthetic construct
  misc_feature 1..20: note = chemically synthesized
  source 1..20: mol_type = other DNA
taaatgataggattcacgaa

SEQ ID NO: 17501 - DNA, 20 bp, synthetic construct
  misc_feature 1..20: note = chemically synthesized
  source 1..20: mol_type = other DNA
aatgataggattcacgaatg

SEQ ID NO: 17502 - DNA, 20 bp, synthetic construct
  misc_feature 1..20: note = chemically synthesized
  source 1..20: mol_type = other DNA
atgataggattcacgaatgg

SEQ ID NO: 17503 - DNA, 20 bp, synthetic construct
  misc_feature 1..20: note = chemically synthesized
  source 1..20: mol_type = other DNA
taggattcacgaatggagga

SEQ ID NO: 17504 - DNA, 20 bp, synthetic construct
  misc_feature 1..20: note = chemically synthesized
  source 1..20: mol_type = other DNA
ggattcacgaatggaggaaa

SEQ ID NO: 17505 - DNA, 20 bp, synthetic construct
  misc_feature 1..20: note = chemically synthesized
  source 1..20: mol_type = other DNA
cgaatggaggaaagagaaaa

SEQ ID NO: 17506 - DNA, 20 bp, synthetic construct
  misc_feature 1..20: note = chemically synthesized
  source 1..20: mol_type = other DNA
gaggaaagagaaaatggaca

SEQ ID NO: 17507 - DNA, 20 bp, synthetic construct
  misc_feature 1..20: note = chemically synthesized
  source 1..20: mol_type = other DNA
gagaaaatggacatagctca

SEQ ID NO: 17508 - DNA, 20 bp, synthetic construct
  misc_feature 1..20: note = chemically synthesized
  source 1..20: mol_type = other DNA
atggacatagctcatggtaa

SEQ ID NO: 17509 - DNA, 20 bp, synthetic construct
  misc_feature 1..20: note = chemically synthesized
  source 1..20: mol_type = other DNA
tggacatagctcatggtaat

SEQ ID NO: 17510 - DNA, 20 bp, synthetic construct
  misc_feature 1..20: note = chemically synthesized
  source 1..20: mol_type = other DNA
ggacatagctcatggtaatg

SEQ ID NO: 17511 - DNA, 20 bp, synthetic construct
  misc_feature 1..20: note = chemically synthesized
  source 1..20: mol_type = other DNA
catggtaatggggaccacat

SEQ ID NO: 17512 - DNA, 20 bp, synthetic construct
  misc_feature 1..20: note = chemically synthesized
  source 1..20: mol_type = other DNA
atggtaatggggaccacatg

SEQ ID NO: 17513 - DNA, 20 bp, synthetic construct
  misc_feature 1..20: note = chemically synthesized
  source 1..20: mol_type = other DNA
ccaaacctgtgaatgaatga

SEQ ID NO: 17514 - DNA, 20 bp, synthetic construct
  misc_feature 1..20: note = chemically synthesized
  source 1..20: mol_type = other DNA
aatgaatgacagtcccatca

SEQ ID NO: 17515 - DNA, 20 bp, synthetic construct
  misc_feature 1..20: note = chemically synthesized
  source 1..20: mol_type = other DNA
atcacagtgatgtgaaatac

SEQ ID NO: 17516 - DNA, 20 bp, synthetic construct
  misc_feature 1..20: note = chemically synthesized
  source 1..20: mol_type = other DNA
tcacagtgatgtgaaatact

SEQ ID NO: 17517 - DNA, 20 bp, synthetic construct
  misc_feature 1..20: note = chemically synthesized
  source 1..20: mol_type = other DNA
tgatgtgaaatactaggaca

SEQ ID NO: 17518 - DNA, 20 bp, synthetic construct
  misc_feature 1..20: note = chemically synthesized
  source 1..20: mol_type = other DNA
atactaggacacagctaata

SEQ ID NO: 17519 - DNA, 20 bp, synthetic construct
  misc_feature 1..20: note = chemically synthesized
  source 1..20: mol_type = other DNA
tactaggacacagctaatat

SEQ ID NO: 17520 - DNA, 20 bp, synthetic construct
  misc_feature 1..20: note = chemically synthesized
  source 1..20: mol_type = other DNA
ctaggacacagctaatatgg

SEQ ID NO: 17521 - DNA, 20 bp, synthetic construct
  misc_feature 1..20: note = chemically synthesized
  source 1..20: mol_type = other DNA
acagctaatatgggagacac

SEQ ID NO: 17522 - DNA, 20 bp, synthetic construct
  misc_feature 1..20: note = chemically synthesized
  source 1..20: mol_type = other DNA
atatgggagacacaagtgtt

SEQ ID NO: 17523 - DNA, 20 bp, synthetic construct
  misc_feature 1..20: note = chemically synthesized
  source 1..20: mol_type = other DNA
atgggagacacaagtgttga

SEQ ID NO: 17524 - DNA, 20 bp, synthetic construct
  misc_feature 1..20: note = chemically synthesized
  source 1..20: mol_type = other DNA
gacacaagtgttgagagatt

SEQ ID NO: 17525 - DNA, 20 bp, synthetic construct
  misc_feature 1..20: note = chemically synthesized
  source 1..20: mol_type = other DNA
agatttagcttcctcttgtc

SEQ ID NO: 17526 - DNA, 20 bp, synthetic construct
  misc_feature 1..20: note = chemically synthesized
  source 1..20: mol_type = other DNA
gcaatgcccatcactgtctt

SEQ ID NO: 17527 - DNA, 20 bp, synthetic construct
  misc_feature 1..20: note = chemically synthesized
  source 1..20: mol_type = other DNA
caatgcccatcactgtcttg

SEQ ID NO: 17528 - DNA, 20 bp, synthetic construct
  misc_feature 1..20: note = chemically synthesized
  source 1..20: mol_type = other DNA
cccatcactgtcttgaggat

SEQ ID NO: 17529 - DNA, 20 bp, synthetic construct
  misc_feature 1..20: note = chemically synthesized
  source 1..20: mol_type = other DNA
tgtcttgaggattagtatat

SEQ ID NO: 17530 - DNA, 20 bp, synthetic construct
  misc_feature 1..20: note = chemically synthesized
  source 1..20: mol_type = other DNA
tgaggattagtatataagaa

SEQ ID NO: 17531 - DNA, 20 bp, synthetic construct
  misc_feature 1..20: note = chemically synthesized
  source 1..20: mol_type = other DNA
atataagaaaagatgatgat

SEQ ID NO: 17532 - DNA, 20 bp, synthetic construct
  misc_feature 1..20: note = chemically synthesized
  source 1..20: mol_type = other DNA
ataagaaaagatgatgatta

SEQ ID NO: 17533 - DNA, 20 bp, synthetic construct
  misc_feature 1..20: note = chemically synthesized
  source 1..20: mol_type = other DNA
tgatgattagagcatctaaa

SEQ ID NO: 17534 - DNA, 20 bp, synthetic construct
  misc_feature 1..20: note = chemically synthesized
  source 1..20: mol_type = other DNA
gattagagcatctaaaaaga

SEQ ID NO: 17535 - DNA, 20 bp, synthetic construct
  misc_feature 1..20: note = chemically synthesized
  source 1..20: mol_type = other DNA
agcatctaaaaagacagtca

SEQ ID NO: 17536 - DNA, 20 bp, synthetic construct
  misc_feature 1..20: note = chemically synthesized
  source 1..20: mol_type = other DNA
atctaaaaagacagtcaaag

SEQ ID NO: 17537 - DNA, 20 bp, synthetic construct
  misc_feature 1..20: note = chemically synthesized
  source 1..20: mol_type = other DNA
gtcaaagaagtctgaataat

SEQ ID NO: 17538 - DNA, 20 bp, synthetic construct
  misc_feature 1..20: note = chemically synthesized
  source 1..20: mol_type = other DNA
tatgtgattaaacgtgatat

SEQ ID NO: 17539 - DNA, 20 bp, synthetic construct
  misc_feature 1..20: note = chemically synthesized
  source 1..20: mol_type = other DNA
gattaaacgtgatatcagca

SEQ ID NO: 17540 - DNA, 20 bp, synthetic construct
  misc_feature 1..20: note = chemically synthesized
  source 1..20: mol_type = other DNA
attaaacgtgatatcagcac

SEQ ID NO: 17541 - DNA, 20 bp, synthetic construct
  misc_feature 1..20: note = chemically synthesized
  source 1..20: mol_type = other DNA
aacgtgatatcagcacaggc

SEQ ID NO: 17542 - DNA, 20 bp, synthetic construct
  misc_feature 1..20: note = chemically synthesized
  source 1..20: mol_type = other DNA
cgagttttatgacatcttga

SEQ ID NO: 17543 - DNA, 20 bp, synthetic construct
  misc_feature 1..20: note = chemically synthesized
  source 1..20: mol_type = other DNA
agttttatgacatcttgatg

SEQ ID NO: 17544 - DNA, 20 bp, synthetic construct
  misc_feature 1..20: note = chemically synthesized
  source 1..20: mol_type = other DNA
gttttatgacatcttgatgg

SEQ ID NO: 17545 - DNA, 20 bp, synthetic construct
  misc_feature 1..20: note = chemically synthesized
  source 1..20: mol_type = other DNA
gatggaggcaaaatgtgtgc

SEQ ID NO: 17546 - DNA, 20 bp, synthetic construct
  misc_feature 1..20: note = chemically synthesized
  source 1..20: mol_type = other DNA
tggaggcaaaatgtgtgcaa

SEQ ID NO: 17547 - DNA, 20 bp, synthetic construct
  misc_feature 1..20: note = chemically synthesized
  source 1..20: mol_type = other DNA
ggaggcaaaatgtgtgcaag

SEQ ID NO: 17548 - DNA, 20 bp, synthetic construct
  misc_feature 1..20: note = chemically synthesized
  source 1..20: mol_type = other DNA
gaggcaaaatgtgtgcaaga

SEQ ID NO: 17549 - DNA, 20 bp, synthetic construct
  misc_feature 1..20: note = chemically synthesized
  source 1..20: mol_type = other DNA
aaaatgtgtgcaagagggca

SEQ ID NO: 17550 - DNA, 20 bp, synthetic construct
  misc_feature 1..20: note = chemically synthesized
  source 1..20: mol_type = other DNA
aaatgtgtgcaagagggcac

SEQ ID NO: 17551 - DNA, 20 bp, synthetic construct
  misc_feature 1..20: note = chemically synthesized
  source 1..20: mol_type = other DNA
agggcacgggaaccacaata

SEQ ID NO: 17552 - DNA, 20 bp, synthetic construct
  misc_feature 1..20: note = chemically synthesized
  source 1..20: mol_type = other DNA
gggcacgggaaccacaatat

SEQ ID NO: 17553 - DNA, 20 bp, synthetic construct
  misc_feature 1..20: note = chemically synthesized
  source 1..20: mol_type = other DNA
cacgggaaccacaatatggg

SEQ ID NO: 17554 - DNA, 20 bp, synthetic construct
  misc_feature 1..20: note = chemically synthesized
  source 1..20: mol_type = other DNA
gggaaccacaatatgggtag

SEQ ID NO: 17555 - DNA, 20 bp, synthetic construct
  misc_feature 1..20: note = chemically synthesized
  source 1..20: mol_type = other DNA
aaccacaatatgggtagcag

SEQ ID NO: 17556 - DNA, 20 bp, synthetic construct
  misc_feature 1..20: note = chemically synthesized
  source 1..20: mol_type = other DNA
ccacaatatgggtagcagta

SEQ ID NO: 17557 - DNA, 20 bp, synthetic construct
  misc_feature 1..20: note = chemically synthesized
  source 1..20: mol_type = other DNA
tatgggtagcagtagagtga

SEQ ID NO: 17558 - DNA, 20 bp, synthetic construct
  misc_feature 1..20: note = chemically synthesized
  source 1..20: mol_type = other DNA
gcagtagagtgaaagaatta

SEQ ID NO: 17559 - DNA, 20 bp, synthetic construct
  misc_feature 1..20: note = chemically synthesized
  source 1..20: mol_type = other DNA
cagtagagtgaaagaattat

SEQ ID NO: 17560 - DNA, 20 bp, synthetic construct
  misc_feature 1..20: note = chemically synthesized
  source 1..20: mol_type = other DNA
tgaaagaattatgggcaaaa

SEQ ID NO: 17561 - DNA, 20 bp, synthetic construct
  misc_feature 1..20: note = chemically synthesized
  source 1..20: mol_type = other DNA
atggacataaaacctctcat

SEQ ID NO: 17562 - DNA, 20 bp, synthetic construct
  misc_feature 1..20: note = chemically synthesized
  source 1..20: mol_type = other DNA
aaacctctcatcagtacccc

SEQ ID NO: 17563 - DNA, 20 bp, synthetic construct
  misc_feature 1..20: note = chemically synthesized
  source 1..20: mol_type = other DNA
ccagtcctatgttcatcact

SEQ ID NO: 17564 - DNA, 20 bp, synthetic construct
  misc_feature 1..20: note = chemically synthesized
  source 1..20: mol_type = other DNA
cagtcctatgttcatcactc

SEQ ID NO: 17565 - DNA, 20 bp, synthetic construct
  misc_feature 1..20: note = chemically synthesized
  source 1..20: mol_type = other DNA
tatgttcatcactcgggaat

SEQ ID NO: 17566 - DNA, 20 bp, synthetic construct
  misc_feature 1..20: note = chemically synthesized
  source 1..20: mol_type = other DNA
ttcatcactcgggaattggt

SEQ ID NO: 17567 - DNA, 20 bp, synthetic construct
  misc_feature 1..20: note = chemically synthesized
  source 1..20: mol_type = other DNA
ctcgggaattggtaagaatg

SEQ ID NO: 17568 - DNA, 20 bp, synthetic construct
  misc_feature 1..20: note = chemically synthesized
  source 1..20: mol_type = other DNA
gtaagaatgcagttgtacct

SEQ ID NO: 17569 - DNA, 20 bp, synthetic construct
  misc_feature 1..20: note = chemically synthesized
  source 1..20: mol_type = other DNA
agaatgcagttgtacctcag

SEQ ID NO: 17570 - DNA, 20 bp, synthetic construct
  misc_feature 1..20: note = chemically synthesized
  source 1..20: mol_type = other DNA
agttgtacctcagtggtgtg

SEQ ID NO: 17571 - DNA, 20 bp, synthetic construct
  misc_feature 1..20: note = chemically synthesized
  source 1..20: mol_type = other DNA
gtacctcagtggtgtgcgga

SEQ ID NO: 17572 - DNA, 20 bp, synthetic construct
  misc_feature 1..20: note = chemically synthesized
  source 1..20: mol_type = other DNA
gtgtgcggatggcaatgaaa

SEQ ID NO: 17573 - DNA, 20 bp, synthetic construct
  misc_feature 1..20: note = chemically synthesized
  source 1..20: mol_type = other DNA
ggatggcaatgaaacagtca

SEQ ID NO: 17574 - DNA, 20 bp, synthetic construct
  misc_feature 1..20: note = chemically synthesized
  source 1..20: mol_type = other DNA
gatggcaatgaaacagtcat

SEQ ID NO: 17575 - DNA, 20 bp, synthetic construct
  misc_feature 1..20: note = chemically synthesized
  source 1..20: mol_type = other DNA
aaacagtcataggccaaaac

SEQ ID NO: 17576 - DNA, 20 bp, synthetic construct
  misc_feature 1..20: note = chemically synthesized
  source 1..20: mol_type = other DNA
agtcataggccaaaacaagc

SEQ ID NO: 17577 - DNA, 20 bp, synthetic construct
  misc_feature 1..20: note = chemically synthesized
  source 1..20: mol_type = other DNA
caagatacctgattctacaa

SEQ ID NO: 17578 - DNA, 20 bp, synthetic construct
  misc_feature 1..20: note = chemically synthesized
  source 1..20: mol_type = other DNA
atacctgattctacaatggc

SEQ ID NO: 17579 - DNA, 20 bp, synthetic construct
  misc_feature 1..20: note = chemically synthesized
  source 1..20: mol_type = other DNA
caatggccagtgaatgaatg

SEQ ID NO: 17580 - DNA, 20 bp, synthetic construct
  misc_feature 1..20: note = chemically synthesized
  source 1..20: mol_type = other DNA
aatggccagtgaatgaatga

SEQ ID NO: 17581 - DNA, 20 bp, synthetic construct
  misc_feature 1..20: note = chemically synthesized
  source 1..20: mol_type = other DNA
ccagtgaatgaatgaaggat

SEQ ID NO: 17582 - DNA, 20 bp, synthetic construct
  misc_feature 1..20: note = chemically synthesized
  source 1..20: mol_type = other DNA
cagtgaatgaatgaaggatt

SEQ ID NO: 17583 - DNA, 20 bp, synthetic construct
  misc_feature 1..20: note = chemically synthesized
  source 1..20: mol_type = other DNA
gaatgaaggattgggtgaaa

SEQ ID NO: 17584 - DNA, 20 bp, synthetic construct
  misc_feature 1..20: note = chemically synthesized
  source 1..20: mol_type = other DNA
aatgaaggattgggtgaaac

SEQ ID NO: 17585 - DNA, 20 bp, synthetic construct
  misc_feature 1..20: note = chemically synthesized
  source 1..20: mol_type = other DNA
gaaggattgggtgaaacagg

SEQ ID NO: 17586 - DNA, 20 bp, synthetic construct
  misc_feature 1..20: note = chemically synthesized
  source 1..20: mol_type = other DNA
attgggtgaaacaggcagca

SEQ ID NO: 17587 - DNA, 20 bp, synthetic construct
  misc_feature 1..20: note = chemically synthesized
  source 1..20: mol_type = other DNA
ttgggtgaaacaggcagcat

SEQ ID NO: 17588 - DNA, 20 bp, synthetic construct
  misc_feature 1..20: note = chemically synthesized
  source 1..20: mol_type = other DNA
cagcatgggcaatctccctc

SEQ ID NO: 17589 - DNA, 20 bp, synthetic construct
  misc_feature 1..20: note = chemically synthesized
  source 1..20: mol_type = other DNA
tgggcaatctccctctggtc

SEQ ID NO: 17590 - DNA, 20 bp, synthetic construct
  misc_feature 1..20: note = chemically synthesized
  source 1..20: mol_type = other DNA
gcaatctccctctggtctag

SEQ ID NO: 17591 - DNA, 20 bp, synthetic construct
  misc_feature 1..20: note = chemically synthesized
  source 1..20: mol_type = other DNA
atctccctctggtctagcag

SEQ ID NO: 17592 - DNA, 20 bp, synthetic construct
  misc_feature 1..20: note = chemically synthesized
  source 1..20: mol_type = other DNA
tctccctctggtctagcagc

SEQ ID NO: 17593 - DNA, 20 bp, synthetic construct
  misc_feature 1..20: note = chemically synthesized
  source 1..20: mol_type = other DNA
tggtctagcagcaggacacc

SEQ ID NO: 17594 - DNA, 20 bp, synthetic construct
  misc_feature 1..20: note = chemically synthesized
  source 1..20: mol_type = other DNA
ggtctagcagcaggacaccc

SEQ ID NO: 17595 - DNA, 20 bp, synthetic construct
  misc_feature 1..20: note = chemically synthesized
  source 1..20: mol_type = other DNA
cagcaggacacccaggactg

SEQ ID NO: 17596 - DNA, 20 bp, synthetic construct
  misc_feature 1..20: note = chemically synthesized
  source 1..20: mol_type = other DNA
agcaggacacccaggactgt

SEQ ID NO: 17597 - DNA, 20 bp, synthetic construct
  misc_feature 1..20: note = chemically synthesized
  source 1..20: mol_type = other DNA
acccaggactgtgggcattg

SEQ ID NO: 17598 - DNA, 20 bp, synthetic construct
  misc_feature 1..20: note = chemically synthesized
  source 1..20: mol_type = other DNA
attgtagtgaatgtcatccc

SEQ ID NO: 17599 - DNA, 20 bp, synthetic construct
  misc_feature 1..20: note = chemically synthesized
  source 1..20: mol_type = other DNA
ttgtagtgaatgtcatccca

SEQ ID NO: 17600 - DNA, 20 bp, synthetic construct
  misc_feature 1..20: note = chemically synthesized
  source 1..20: mol_type = other DNA
atcccaaggtccgtgtctgc

SEQ ID NO: 17601 - DNA, 20 bp, synthetic construct
  misc_feature 1..20: note = chemically synthesized
  source 1..20: mol_type = other DNA
aaggtccgtgtctgccagca

SEQ ID NO: 17602 - DNA, 20 bp, synthetic construct
  misc_feature 1..20: note = chemically synthesized
  source 1..20: mol_type = other DNA
tccgtgtctgccagcatagc

SEQ ID NO: 17603 - DNA, 20 bp, synthetic construct
  misc_feature 1..20: note = chemically synthesized
  source 1..20: mol_type = other DNA
ccgtgtctgccagcatagcc

SEQ ID NO: 17604 - DNA, 20 bp, synthetic construct
  misc_feature 1..20: note = chemically synthesized
  source 1..20: mol_type = other DNA
tgtctgccagcatagccagg

SEQ ID NO: 17605 - DNA, 20 bp, synthetic construct
  misc_feature 1..20: note = chemically synthesized
  source 1..20: mol_type = other DNA
ctgccagcatagccaggaag

SEQ ID NO: 17606 - DNA, 20 bp, synthetic construct
  misc_feature 1..20: note = chemically synthesized
  source 1..20: mol_type = other DNA
catagccaggaagtagtaca

SEQ ID NO: 17607 - DNA, 20 bp, synthetic construct
  misc_feature 1..20: note = chemically synthesized
  source 1..20: mol_type = other DNA
atagccaggaagtagtacat

SEQ ID NO: 17608 - DNA, 20 bp, synthetic construct
  misc_feature 1..20: note = chemically synthesized
  source 1..20: mol_type = other DNA
ggaagtagtacatgggctca

SEQ ID NO: 17609 - DNA, 20 bp, synthetic construct
  misc_feature 1..20: note = chemically synthesized
  source 1..20: mol_type = other DNA
aagtagtacatgggctcatg

SEQ ID NO: 17610 - DNA, 20 bp, synthetic construct
  misc_feature 1..20: note = chemically synthesized
  source 1..20: mol_type = other DNA
agtagtacatgggctcatgg

SEQ ID NO: 17611 - DNA, 20 bp, synthetic construct
  misc_feature 1..20: note = chemically synthesized
  source 1..20: mol_type = other DNA
aggctgtgatcattccaaat

SEQ ID NO: 17612 - DNA, 20 bp, synthetic construct
  misc_feature 1..20: note = chemically synthesized
  source 1..20: mol_type = other DNA
ggctgtgatcattccaaatg

SEQ ID NO: 17613 - DNA, 20 bp, synthetic construct
  misc_feature 1..20: note = chemically synthesized
  source 1..20: mol_type = other DNA
tgatcattccaaatgaggac

SEQ ID NO: 17614 - DNA, 20 bp, synthetic construct
  misc_feature 1..20: note = chemically synthesized
  source 1..20: mol_type = other DNA
tcattccaaatgaggacaag

SEQ ID NO: 17615 - DNA, 20 bp, synthetic construct
  misc_feature 1..20: note = chemically synthesized
  source 1..20: mol_type = other DNA
attccaaatgaggacaagaa

SEQ ID NO: 17616 - DNA, 20 bp, synthetic construct
  misc_feature 1..20: note = chemically synthesized
  source 1..20: mol_type = other DNA
agaagagtgccatttccaaa

SEQ ID NO: 17617 - DNA, 20 bp, synthetic construct
  misc_feature 1..20: note = chemically synthesized
  source 1..20: mol_type = other DNA
gaagagtgccatttccaaaa

SEQ ID NO: 17618 - DNA, 20 bp, synthetic construct
  misc_feature 1..20: note = chemically synthesized
  source 1..20: mol_type = other DNA
agtgccatttccaaaaagga

SEQ ID NO: 17619 - DNA, 20 bp, synthetic construct
  misc_feature 1..20: note = chemically synthesized
  source 1..20: mol_type = other DNA
tgccatttccaaaaaggacg

SEQ ID NO: 17620 - DNA, 20 bp, synthetic construct
  misc_feature 1..20: note = chemically synthesized
  source 1..20: mol_type = other DNA
catttccaaaaaggacggag

SEQ ID NO: 17621 - DNA, 20 bp, synthetic construct
  misc_feature 1..20: note = chemically synthesized
  source 1..20: mol_type = other DNA
ttccaaaaaggacggagaag

SEQ ID NO: 17622 - DNA, 20 bp, synthetic construct
  misc_feature 1..20: note = chemically synthesized
  source 1..20: mol_type = other DNA
ggacggagaagtagatgaca

SEQ ID NO: 17623 - DNA, 20 bp, synthetic construct
  misc_feature 1..20: note = chemically synthesized
  source 1..20: mol_type = other DNA
cggagaagtagatgacaaag

SEQ ID NO: 17624 - DNA, 20 bp, synthetic construct
  misc_feature 1..20: note = chemically synthesized
  source 1..20: mol_type = other DNA
ggagaagtagatgacaaaga

SEQ ID NO: 17625 - DNA, 20 bp, synthetic construct
  misc_feature 1..20: note = chemically synthesized
  source 1..20: mol_type = other DNA
gtagatgacaaagaaggaca

SEQ ID NO: 17626 - DNA, 20 bp, synthetic construct
  misc_feature 1..20: note = chemically synthesized
  source 1..20: mol_type = other DNA
agatgacaaagaaggacata

SEQ ID NO: 17627 - DNA, 20 bp, synthetic construct
  misc_feature 1..20: note = chemically synthesized
  source 1..20: mol_type = other DNA
caaagaaggacatagagatc

SEQ ID NO: 17628 - DNA, 20 bp, synthetic construct
  misc_feature 1..20: note = chemically synthesized
  source 1..20: mol_type = other DNA
agaaggacatagagatccgg

SEQ ID NO: 17629 - DNA, 20 bp, synthetic construct
  misc_feature 1..20: note = chemically synthesized
  source 1..20: mol_type = other DNA
tccggtagtgaactgcctct

SEQ ID NO: 17630 - DNA, 20 bp, synthetic construct
  misc_feature 1..20: note = chemically synthesized
  source 1..20: mol_type = other DNA
agtgaactgcctctgagccc

SEQ ID NO: 17631 - DNA, 20 bp, synthetic construct
  misc_feature 1..20: note = chemically synthesized
  source 1..20: mol_type = other DNA
gaactgcctctgagcccaag

SEQ ID NO: 17632 - DNA, 20 bp, synthetic construct
  misc_feature 1..20: note = chemically synthesized
  source 1..20: mol_type = other DNA
tgcctctgagcccaagaagc

SEQ ID NO: 17633 - DNA, 20 bp, synthetic construct
  misc_feature 1..20: note = chemically synthesized
  source 1..20: mol_type = other DNA
tctgagcccaagaagccagt

SEQ ID NO: 17634 - DNA, 20 bp, synthetic construct
  misc_feature 1..20: note = chemically synthesized
  source 1..20: mol_type = other DNA
agcccaagaagccagtcagc

SEQ ID NO: 17635 - DNA, 20 bp, synthetic construct
  misc_feature 1..20: note = chemically synthesized
  source 1..20: mol_type = other DNA
ccaagaagccagtcagcaag

SEQ ID NO: 17636 - DNA, 20 bp, synthetic construct
  misc_feature 1..20: note = chemically synthesized
  source 1..20: mol_type = other DNA
caagaagccagtcagcaaga

SEQ ID NO: 17637 - DNA, 20 bp, synthetic construct
  misc_feature 1..20: note = chemically synthesized
  source 1..20: mol_type = other DNA
aagaagccagtcagcaagaa

SEQ ID NO: 17638 - DNA, 20 bp, synthetic construct
  misc_feature 1..20: note = chemically synthesized
  source 1..20: mol_type = other DNA
agaagccagtcagcaagaag

SEQ ID NO: 17639 - DNA, 20 bp, synthetic construct
  misc_feature 1..20: note = chemically synthesized
  source 1..20: mol_type = other DNA
gccagtcagcaagaaggggc

SEQ ID NO: 17640 - DNA, 20 bp, synthetic construct
  misc_feature 1..20: note = chemically synthesized
  source 1..20: mol_type = other DNA
agcactgttgttataccaca

SEQ ID NO: 17641 - DNA, 20 bp, synthetic construct
  misc_feature 1..20: note = chemically synthesized
  source 1..20: mol_type = other DNA
actgttgttataccacatgg

SEQ ID NO: 17642 - DNA, 20 bp, synthetic construct
  misc_feature 1..20: note = chemically synthesized
  source 1..20: mol_type = other DNA
ctgttgttataccacatggt

SEQ ID NO: 17643 - DNA, 20 bp, synthetic construct
  misc_feature 1..20: note = chemically synthesized
  source 1..20: mol_type = other DNA
ataccacatggtaggttttg

SEQ ID NO: 17644 - DNA, 20 bp, synthetic construct
  misc_feature 1..20: note = chemically synthesized
  source 1..20: mol_type = other DNA
taccacatggtaggttttgc

SEQ ID NO: 17645 - DNA, 20 bp, synthetic construct
  misc_feature 1..20: note = chemically synthesized
  source 1..20: mol_type = other DNA
cacatggtaggttttgcagg

SEQ ID NO: 17646 - DNA, 20 bp, synthetic construct
  misc_feature 1..20: note = chemically synthesized
  source 1..20: mol_type = other DNA
catggtaggttttgcaggtg

SEQ ID NO: 17647 - DNA, 20 bp, synthetic construct
  misc_feature 1..20: note = chemically synthesized
  source 1..20: mol_type = other DNA
ggtaggttttgcaggtggag

SEQ ID NO: 17648 - DNA, 20 bp, synthetic construct
  misc_feature 1..20: note = chemically synthesized
  source 1..20: mol_type = other DNA
caggtggagaagatattttt

SEQ ID NO: 17649 - DNA, 20 bp, synthetic construct
  misc_feature 1..20: note = chemically synthesized
  source 1..20: mol_type = other DNA
aggtggagaagatatttttt

SEQ ID NO: 17650 - DNA, 20 bp, synthetic construct
  misc_feature 1..20: note = chemically synthesized
  source 1..20: mol_type = other DNA
ggtggagaagatatttttta

SEQ ID NO: 17651 - DNA, 20 bp, synthetic construct
  misc_feature 1..20: note = chemically synthesized
  source 1..20: mol_type = other DNA
gtggagaagatattttttag

SEQ ID NO: 17652 - DNA, 20 bp, synthetic construct
  misc_feature 1..20: note = chemically synthesized
  source 1..20: mol_type = other DNA
tttaggggtgatgacctcca

SEQ ID NO: 17653 - DNA, 20 bp, synthetic construct
  misc_feature 1..20: note = chemically synthesized
  source 1..20: mol_type = other DNA
ggtgatgacctccaaagatg

SEQ ID NO: 17654 - DNA, 20 bp, synthetic construct
  misc_feature 1..20: note = chemically synthesized
  source 1..20: mol_type = other DNA
tttctctcacaatcttcttg

SEQ ID NO: 17655 - DNA, 20 bp, synthetic construct
  misc_feature 1..20: note = chemically synthesized
  source 1..20: mol_type = other DNA
atcttcttgtagcacatcat

SEQ ID NO: 17656 - DNA, 20 bp, synthetic construct
  misc_feature 1..20: note = chemically synthesized
  source 1..20: mol_type = other DNA
tcttcttgtagcacatcatc

SEQ ID NO: 17657 - DNA, 20 bp, synthetic construct
  misc_feature 1..20: note = chemically synthesized
  source 1..20: mol_type = other DNA
tcaaaacttaaatatttttc

SEQ ID NO: 17658 - DNA, 20 bp, synthetic construct
  misc_feature 1..20: note = chemically synthesized
  source 1..20: mol_type = other DNA
tctcatacttaattaattgt

SEQ ID NO: 17659 - DNA, 20 bp, synthetic construct
  misc_feature 1..20: note = chemically synthesized
  source 1..20: mol_type = other DNA
aattgtaagcctgtactcac

SEQ ID NO: 17660 - DNA, 20 bp, synthetic construct
  misc_feature 1..20: note = chemically synthesized
  source 1..20: mol_type = other DNA
attgtaagcctgtactcaca

SEQ ID NO: 17661 - DNA, 20 bp, synthetic construct
  misc_feature 1..20: note = chemically synthesized
  source 1..20: mol_type = other DNA
gtactcacaaggcctttccc

SEQ ID NO: 17662 - DNA, 20 bp, synthetic construct
  misc_feature 1..20: note = chemically synthesized
  source 1..20: mol_type = other DNA
ataacaaataacaaaaatca

SEQ ID NO: 17663 - DNA, 20 bp, synthetic construct
  misc_feature 1..20: note = chemically synthesized
  source 1..20: mol_type = other DNA
caaataacaaaaatcatggt

SEQ ID NO: 17664 - DNA, 20 bp, synthetic construct
  misc_feature 1..20: note = chemically synthesized
  source 1..20: mol_type = other DNA
aataattccaattcactatg

SEQ ID NO: 17665 - DNA, 20 bp, synthetic construct
  misc_feature 1..20: note = chemically synthesized
  source 1..20: mol_type = other DNA
tcatcttacgtctgtgctca

SEQ ID NO: 17666 - DNA, 20 bp, synthetic construct
  misc_feature 1..20: note = chemically synthesized
  source 1..20: mol_type = other DNA
gtgctcatagccttgactct

SEQ ID NO: 17667 - DNA, 20 bp, synthetic construct
  misc_feature 1..20: note = chemically synthesized
  source 1..20: mol_type = other DNA
ccttgactcttggtcccaaa

SEQ ID NO: 17668 - DNA, 20 bp, synthetic construct
  misc_feature 1..20: note = chemically synthesized
  source 1..20: mol_type = other DNA
cttgactcttggtcccaaat

SEQ ID NO: 17669 - DNA, 20 bp, synthetic construct
  misc_feature 1..20: note = chemically synthesized
  source 1..20: mol_type = other DNA
tcctcctattatttatcata

SEQ ID NO: 17670 - DNA, 20 bp, synthetic construct
  misc_feature 1..20: note = chemically synthesized
  source 1..20: mol_type = other DNA
cctcctattatttatcatat

SEQ ID NO: 17671 - DNA, 20 bp, synthetic construct
  misc_feature 1..20: note = chemically synthesized
  source 1..20: mol_type = other DNA
cccttactgtgttactatcc

SEQ ID NO: 17672 - DNA, 20 bp, synthetic construct
  misc_feature 1..20: note = chemically synthesized
  source 1..20: mol_type = other DNA
actgtgttactatccaagtt

SEQ ID NO: 17673 - DNA, 20 bp, synthetic construct
  misc_feature 1..20: note = chemically synthesized
  source 1..20: mol_type = other DNA
tgttactatccaagttgagt

SEQ ID NO: 17674 - DNA, 20 bp, synthetic construct
  misc_feature 1..20: note = chemically synthesized
  source 1..20: mol_type = other DNA
attttttctcttgaaactaa

SEQ ID NO: 17675 - DNA, 20 bp, synthetic construct
  misc_feature 1..20: note = chemically synthesized
  source 1..20: mol_type = other DNA
ttttttctcttgaaactaat

SEQ ID NO: 17676 - DNA, 20 bp, synthetic construct
  misc_feature 1..20: note = chemically synthesized
  source 1..20: mol_type = other DNA
ttctcttgaaactaatggga

SEQ ID NO: 17677 - DNA, 20 bp, synthetic construct
  misc_feature 1..20: note = chemically synthesized
  source 1..20: mol_type = other DNA
actaatgggacagctgtatt

SEQ ID NO: 17678 - DNA, 20 bp, synthetic construct
  misc_feature 1..20: note = chemically synthesized
  source 1..20: mol_type = other DNA
ctaatgggacagctgtattt

SEQ ID NO: 17679 - DNA, 20 bp, synthetic construct
  misc_feature 1..20: note = chemically synthesized
  source 1..20: mol_type = other DNA
tgtatttaggattaaccact

SEQ ID NO: 17680 - DNA, 20 bp, synthetic construct
  misc_feature 1..20: note = chemically synthesized
  source 1..20: mol_type = other DNA
gtatttaggattaaccactg

SEQ ID NO: 17681 - DNA, 20 bp, synthetic construct
  misc_feature 1..20: note = chemically synthesized
  source 1..20: mol_type = other DNA
tgaggaaaatgcttattcaa

SEQ ID NO: 17682 - DNA, 20 bp, synthetic construct
  misc_feature 1..20: note = chemically synthesized
  source 1..20: mol_type = other DNA
cttattcaatagaaatgact

SEQ ID NO: 17683 - DNA, 20 bp, synthetic construct
  misc_feature 1..20: note = chemically synthesized
  source 1..20: mol_type = other DNA
gtgatcaatgttgctatctc

SEQ ID NO: 17684 - DNA, 20 bp, synthetic construct
  misc_feature 1..20: note = chemically synthesized
  source 1..20: mol_type = other DNA
atcaatgttgctatctcaag

SEQ ID NO: 17685 - DNA, 20 bp, synthetic construct
  misc_feature 1..20: note = chemically synthesized
  source 1..20: mol_type = other DNA
atctcaagtggactgtgaat

SEQ ID NO: 17686 - DNA, 20 bp, synthetic construct
  misc_feature 1..20: note = chemically synthesized
  source 1..20: mol_type = other DNA
tcaagtggactgtgaataag

SEQ ID NO: 17687 - DNA, 20 bp, synthetic construct
  misc_feature 1..20: note = chemically synthesized
  source 1..20: mol_type = other DNA
aagtggactgtgaataagaa

SEQ ID NO: 17688 - DNA, 20 bp, synthetic construct
  misc_feature 1..20: note = chemically synthesized
  source 1..20: mol_type = other DNA
ctgtgaataagaagagaacc

SEQ ID NO: 17689 - DNA, 20 bp, synthetic construct
  misc_feature 1..20: note = chemically synthesized
  source 1..20: mol_type = other DNA
aataagaagagaacccagcc

SEQ ID NO: 17690 - DNA, 20 bp, synthetic construct
  misc_feature 1..20: note = chemically synthesized
  source 1..20: mol_type = other DNA
ataagaagagaacccagcct

SEQ ID NO: 17691 - DNA, 20 bp, synthetic construct
  misc_feature 1..20: note = chemically synthesized
  source 1..20: mol_type = other DNA
agaacccagcctgggcaaca

SEQ ID NO: 17692 - DNA, 20 bp, synthetic construct
  misc_feature 1..20: note = chemically synthesized
  source 1..20: mol_type = other DNA
cccagcctgggcaacatagc

SEQ ID NO: 17693 - DNA, 20 bp, synthetic construct
  misc_feature 1..20: note = chemically synthesized
  source 1..20: mol_type = other DNA
cctgcctccaccaaaaaaaa

SEQ ID NO: 17694 - DNA, 20 bp, synthetic construct
  misc_feature 1..20: note = chemically synthesized
  source 1..20: mol_type = other DNA
ctccaccaaaaaaaaaagaa

SEQ ID NO: 17695 - DNA, 20 bp, synthetic construct
  misc_feature 1..20: note = chemically synthesized
  source 1..20: mol_type = other DNA
aaaaaagaaaagataaaaat

SEQ ID NO: 17696 - DNA, 20 bp, synthetic construct
  misc_feature 1..20: note = chemically synthesized
  source 1..20: mol_type = other DNA
aagaaaagataaaaattagc

SEQ ID NO: 17697 - DNA, 20 bp, synthetic construct
  misc_feature 1..20: note = chemically synthesized
  source 1..20: mol_type = other DNA
agaaaagataaaaattagct

SEQ ID NO: 17698 - DNA, 20 bp, synthetic construct
  misc_feature 1..20: note = chemically synthesized
  source 1..20: mol_type = other DNA
agataaaaattagctgggca

SEQ ID NO: 17699 - DNA, 20 bp, synthetic construct
  misc_feature 1..20: note = chemically synthesized
  source 1..20: mol_type = other DNA
gataaaaattagctgggcac

SEQ ID NO: 17700 - DNA, 20 bp, synthetic construct
  misc_feature 1..20: note = chemically synthesized
  source 1..20: mol_type = other DNA
ataaaaattagctgggcaca

SEQ ID NO: 17701 - DNA, 20 bp, synthetic construct
  misc_feature 1..20: note = chemically synthesized
  source 1..20: mol_type = other DNA
taaaaattagctgggcacag

SEQ ID NO: 17702 - DNA, 20 bp, synthetic construct
  misc_feature 1..20: note = chemically synthesized
  source 1..20: mol_type = other DNA
cacaggggcacacatcacct

SEQ ID NO: 17703 - DNA, 20 bp, synthetic construct
  misc_feature 1..20: note = chemically synthesized
  source 1..20: mol_type = other DNA
gggcacacatcacctgagcc

SEQ ID NO: 17704 - DNA, 20 bp, synthetic construct
  misc_feature 1..20: note = chemically synthesized
  source 1..20: mol_type = other DNA
ggcacacatcacctgagccc

SEQ ID NO: 17705 - DNA, 20 bp, synthetic construct
  misc_feature 1..20: note = chemically synthesized
  source 1..20: mol_type = other DNA
tcacctgagcccaggactgt

SEQ ID NO: 17706 - DNA, 20 bp, synthetic construct
  misc_feature 1..20: note = chemically synthesized
  source 1..20: mol_type = other DNA
cacctgagcccaggactgtg

SEQ ID NO: 17707 - DNA, 20 bp, synthetic construct
  misc_feature 1..20: note = chemically synthesized
  source 1..20: mol_type = other DNA
agcccaggactgtgaggctg

SEQ ID NO: 17708 - DNA, 20 bp, synthetic construct
  misc_feature 1..20: note = chemically synthesized
  source 1..20: mol_type = other DNA
gcccaggactgtgaggctgc

SEQ ID NO: 17709 - DNA, 20 bp, synthetic construct
  misc_feature 1..20: note = chemically synthesized
  source 1..20: mol_type = other DNA
cccaggactgtgaggctgca

SEQ ID NO: 17710 - DNA, 20 bp, synthetic construct
  misc_feature 1..20: note = chemically synthesized
  source 1..20: mol_type = other DNA
caggactgtgaggctgcagg

SEQ ID NO: 17711 - DNA, 20 bp, synthetic construct
  misc_feature 1..20: note = chemically synthesized
  source 1..20: mol_type = other DNA
gctgcagggagctatgattg

SEQ ID NO: 17712 - DNA, 20 bp, synthetic construct
  misc_feature 1..20: note = chemically synthesized
  source 1..20: mol_type = other DNA
atgattgcagcactgctctc

SEQ ID NO: 17713 - DNA, 20 bp, synthetic construct
  misc_feature 1..20: note = chemically synthesized
  source 1..20: mol_type = other DNA
tgcagcactgctctccagcc

SEQ ID NO: 17714 - DNA, 20 bp, synthetic construct
  misc_feature 1..20: note = chemically synthesized
  source 1..20: mol_type = other DNA
gcagcactgctctccagcct

SEQ ID NO: 17715 - DNA, 20 bp, synthetic construct
  misc_feature 1..20: note = chemically synthesized
  source 1..20: mol_type = other DNA
ctgctctccagcctgggcaa

SEQ ID NO: 17716 - DNA, 20 bp, synthetic construct
  misc_feature 1..20: note = chemically synthesized
  source 1..20: mol_type = other DNA
gctctccagcctgggcaacg

SEQ ID NO: 17717 - DNA, 20 bp, synthetic construct
  misc_feature 1..20: note = chemically synthesized
  source 1..20: mol_type = other DNA
tccagcctgggcaacggagt

SEQ ID NO: 17718 - DNA, 20 bp, synthetic construct
  misc_feature 1..20: note = chemically synthesized
  source 1..20: mol_type = other DNA
aataaaataaaataaaacga

SEQ ID NO: 17719 - DNA, 20 bp, synthetic construct
  misc_feature 1..20: note = chemically synthesized
  source 1..20: mol_type = other DNA
gaaaataactcatctattgt

SEQ ID NO: 17720 - DNA, 20 bp, synthetic construct
  misc_feature 1..20: note = chemically synthesized
  source 1..20: mol_type = other DNA
tcatctattgtgagtttcca

SEQ ID NO: 17721 - DNA, 20 bp, synthetic construct
  misc_feature 1..20: note = chemically synthesized
  source 1..20: mol_type = other DNA
agaaatctgaacacctgaac

SEQ ID NO: 17722 - DNA, 20 bp, synthetic construct
  misc_feature 1..20: note = chemically synthesized
  source 1..20: mol_type = other DNA
aatctgaacacctgaacaag

SEQ ID NO: 17723 - DNA, 20 bp, synthetic construct
  misc_feature 1..20: note = chemically synthesized
  source 1..20: mol_type = other DNA
atctgaacacctgaacaagt

SEQ ID NO: 17724 - DNA, 20 bp, synthetic construct
  misc_feature 1..20: note = chemically synthesized
  source 1..20: mol_type = other DNA
aacacctgaacaagtgggta

SEQ ID NO: 17725 - DNA, 20 bp, synthetic construct
  misc_feature 1..20: note = chemically synthesized
  source 1..20: mol_type = other DNA
cctgaacaagtgggtaaagt

SEQ ID NO: 17726 - DNA, 20 bp, synthetic construct
  misc_feature 1..20: note = chemically synthesized
  source 1..20: mol_type = other DNA
taaagttagtaaactcattt

SEQ ID NO: 17727 - DNA, 20 bp, synthetic construct
  misc_feature 1..20: note = chemically synthesized
  source 1..20: mol_type = other DNA
gttagtaaactcattttaga

SEQ ID NO: 17728 - DNA, 20 bp, synthetic construct
  misc_feature 1..20: note = chemically synthesized
  source 1..20: mol_type = other DNA
ttagtaaactcattttagaa

SEQ ID NO: 17729 - DNA, 20 bp, synthetic construct
  misc_feature 1..20: note = chemically synthesized
  source 1..20: mol_type = other DNA
tttagaaaggtgtaattact

SEQ ID NO: 17730 - DNA, 20 bp, synthetic construct
  misc_feature 1..20: note = chemically synthesized
  source 1..20: mol_type = other DNA
agaaaggtgtaattactcag

SEQ ID NO: 17731 - DNA, 20 bp, synthetic construct
  misc_feature 1..20: note = chemically synthesized
  source 1..20: mol_type = other DNA
gtgtaattactcagtggact

SEQ ID NO: 17732 - DNA, 20 bp, synthetic construct
  misc_feature 1..20: note = chemically synthesized
  source 1..20: mol_type = other DNA
tgtaattactcagtggactt

SEQ ID NO: 17733 - DNA, 20 bp, synthetic construct
  misc_feature 1..20: note = chemically synthesized
  source 1..20: mol_type = other DNA
tactcagtggacttgggact

SEQ ID NO: 17734 - DNA, 20 bp, synthetic construct
  misc_feature 1..20: note = chemically synthesized
  source 1..20: mol_type = other DNA
cagtggacttgggactcagc

SEQ ID NO: 17735 - DNA, 20 bp, synthetic construct
  misc_feature 1..20: note = chemically synthesized
  source 1..20: mol_type = other DNA
caagttccctatgctgcaaa

SEQ ID NO: 17736 - DNA, 20 bp, synthetic construct
  misc_feature 1..20: note = chemically synthesized
  source 1..20: mol_type = other DNA
ccctatgctgcaaaaagtct

SEQ ID NO: 17737 - DNA, 20 bp, synthetic construct
  misc_feature 1..20: note = chemically synthesized
  source 1..20: mol_type = other DNA
gctgcaaaaagtctgagttt

SEQ ID NO: 17738 - DNA, 20 bp, synthetic construct
  misc_feature 1..20: note = chemically synthesized
  source 1..20: mol_type = other DNA
aagtctgagttttggcacat

SEQ ID NO: 17739 - DNA, 20 bp, synthetic construct
  misc_feature 1..20: note = chemically synthesized
  source 1..20: mol_type = other DNA
agtctgagttttggcacatt

SEQ ID NO: 17740 - DNA, 20 bp, synthetic construct
  misc_feature 1..20: note = chemically synthesized
  source 1..20: mol_type = other DNA
gtctgagttttggcacatta

SEQ ID NO: 17741 - DNA, 20 bp, synthetic construct
  misc_feature 1..20: note = chemically synthesized
  source 1..20: mol_type = other DNA
attagggacaaacatgaaaa

SEQ ID NO: 17742 - DNA, 20 bp, synthetic construct
  misc_feature 1..20: note = chemically synthesized
  source 1..20: mol_type = other DNA
ttagggacaaacatgaaaat

SEQ ID NO: 17743 - DNA, 20 bp, synthetic construct
  misc_feature 1..20: note = chemically synthesized
  source 1..20: mol_type = other DNA
agggacaaacatgaaaatag

SEQ ID NO: 17744 - DNA, 20 bp, synthetic construct
  misc_feature 1..20: note = chemically synthesized
  source 1..20: mol_type = other DNA
tgaaaataggagactcatgt

SEQ ID NO: 17745 - DNA, 20 bp, synthetic construct
  misc_feature 1..20: note = chemically synthesized
  source 1..20: mol_type = other DNA
aaataggagactcatgttgg

SEQ ID NO: 17746 - DNA, 20 bp, synthetic construct
  misc_feature 1..20: note = chemically synthesized
  source 1..20: mol_type = other DNA
ctcatgttggaagctcataa

SEQ ID NO: 17747 - DNA, 20 bp, synthetic construct
  misc_feature 1..20: note = chemically synthesized
  source 1..20: mol_type = other DNA
gctcataacggaaatatttt

SEQ ID NO: 17748 - DNA, 20 bp, synthetic construct
  misc_feature 1..20: note = chemically synthesized
  source 1..20: mol_type = other DNA
ctcataacggaaatatttta

SEQ ID NO: 17749 - DNA, 20 bp, synthetic construct
  misc_feature 1..20: note = chemically synthesized
  source 1..20: mol_type = other DNA
taaggacatacttctacaat

SEQ ID NO: 17750 - DNA, 20 bp, synthetic construct
  misc_feature 1..20: note = chemically synthesized
  source 1..20: mol_type = other DNA
aaggacatacttctacaatg

SEQ ID NO: 17751 - DNA, 20 bp, synthetic construct
  misc_feature 1..20: note = chemically synthesized
  source 1..20: mol_type = other DNA
aggacatacttctacaatga

SEQ ID NO: 17752 - DNA, 20 bp, synthetic construct
  misc_feature 1..20: note = chemically synthesized
  source 1..20: mol_type = other DNA
tacaatgagggcctccacaa

SEQ ID NO: 17753 - DNA, 20 bp, synthetic construct
  misc_feature 1..20: note = chemically synthesized
  source 1..20: mol_type = other DNA
cacaaaagcctaatacttgt

SEQ ID NO: 17754 - DNA, 20 bp, synthetic construct
  misc_feature 1..20: note = chemically synthesized
  source 1..20: mol_type = other DNA
caaaagcctaatacttgtta

SEQ ID NO: 17755 - DNA, 20 bp, synthetic construct
  misc_feature 1..20: note = chemically synthesized
  source 1..20: mol_type = other DNA
cctaatacttgttagagtca

SEQ ID NO: 17756 - DNA, 20 bp, synthetic construct
  misc_feature 1..20: note = chemically synthesized
  source 1..20: mol_type = other DNA
tgttagagtcatagattcgt

SEQ ID NO: 17757 - DNA, 20 bp, synthetic construct
  misc_feature 1..20: note = chemically synthesized
  source 1..20: mol_type = other DNA
ttcgtaagtatgttgatctg

SEQ ID NO: 17758 - DNA, 20 bp, synthetic construct
  misc_feature 1..20: note = chemically synthesized
  source 1..20: mol_type = other DNA
tcgtaagtatgttgatctga

SEQ ID NO: 17759 - DNA, 20 bp, synthetic construct
  misc_feature 1..20: note = chemically synthesized
  source 1..20: mol_type = other DNA
cgtaagtatgttgatctgaa

SEQ ID NO: 17760 - DNA, 20 bp, synthetic construct
  misc_feature 1..20: note = chemically synthesized
  source 1..20: mol_type = other DNA
tatgttgatctgaagggcaa

SEQ ID NO: 17761 - DNA, 20 bp, synthetic construct
  misc_feature 1..20: note = chemically synthesized
  source 1..20: mol_type = other DNA
ctgaagggcaatagtaatat

SEQ ID NO: 17762 - DNA, 20 bp, synthetic construct
  misc_feature 1..20: note = chemically synthesized
  source 1..20: mol_type = other DNA
aagggcaatagtaatatcgg

SEQ ID NO: 17763 - DNA, 20 bp, synthetic construct
  misc_feature 1..20: note = chemically synthesized
  source 1..20: mol_type = other DNA
gcaatagtaatatcggaagt

SEQ ID NO: 17764 - DNA, 20 bp, synthetic construct
  misc_feature 1..20: note = chemically synthesized
  source 1..20: mol_type = other DNA
aatatcggaagttggtaatt

SEQ ID NO: 17765 - DNA, 20 bp, synthetic construct
  misc_feature 1..20: note = chemically synthesized
  source 1..20: mol_type = other DNA
gttaataaacttcacacaac

SEQ ID NO: 17766 - DNA, 20 bp, synthetic construct
  misc_feature 1..20: note = chemically synthesized
  source 1..20: mol_type = other DNA
aaacttcacacaaccagttc

SEQ ID NO: 17767 - DNA, 20 bp, synthetic construct
  misc_feature 1..20: note = chemically synthesized
  source 1..20: mol_type = other DNA
aacttcacacaaccagttct

SEQ ID NO: 17768 - DNA, 20 bp, synthetic construct
  misc_feature 1..20: note = chemically synthesized
  source 1..20: mol_type = other DNA
acttcacacaaccagttcta

SEQ ID NO: 17769 - DNA, 20 bp, synthetic construct
  misc_feature 1..20: note = chemically synthesized
  source 1..20: mol_type = other DNA
acacaaccagttctagggaa

SEQ ID NO: 17770 - DNA, 20 bp, synthetic construct
  misc_feature 1..20: note = chemically synthesized
  source 1..20: mol_type = other DNA
accagttctagggaaaagat

SEQ ID NO: 17771 - DNA, 20 bp, synthetic construct
  misc_feature 1..20: note = chemically synthesized
  source 1..20: mol_type = other DNA
agggaaaagataagcactcc

SEQ ID NO: 17772 - DNA, 20 bp, synthetic construct
  misc_feature 1..20: note = chemically synthesized
  source 1..20: mol_type = other DNA
ggaaaagataagcactccca

SEQ ID NO: 17773 - DNA, 20 bp, synthetic construct
  misc_feature 1..20: note = chemically synthesized
  source 1..20: mol_type = other DNA
aaaagataagcactcccaga

SEQ ID NO: 17774 - DNA, 20 bp, synthetic construct
  misc_feature 1..20: note = chemically synthesized
  source 1..20: mol_type = other DNA
gcactcccagagagaaaata

SEQ ID NO: 17775 - DNA, 20 bp, synthetic construct
  misc_feature 1..20: note = chemically synthesized
  source 1..20: mol_type = other DNA
tacggcaactatgttgctga

SEQ ID NO: 17776 - DNA, 20 bp, synthetic construct
  misc_feature 1..20: note = chemically synthesized
  source 1..20: mol_type = other DNA
cggcaactatgttgctgatg

SEQ ID NO: 17777 - DNA, 20 bp, synthetic construct
  misc_feature 1..20: note = chemically synthesized
  source 1..20: mol_type = other DNA
tgctgatggagacaatctta

SEQ ID NO: 17778 - DNA, 20 bp, synthetic construct
  misc_feature 1..20: note = chemically synthesized
  source 1..20: mol_type = other DNA
tctaatcattatgaatctgt

SEQ ID NO: 17779 - DNA, 20 bp, synthetic construct
  misc_feature 1..20: note = chemically synthesized
  source 1..20: mol_type = other DNA
gaatctgtaagactcgtatt

SEQ ID NO: 17780 - DNA, 20 bp, synthetic construct
  misc_feature 1..20: note = chemically synthesized
  source 1..20: mol_type = other DNA
tcgtattgagaaaaattcac

SEQ ID NO: 17781 - DNA, 20 bp, synthetic construct
  misc_feature 1..20: note = chemically synthesized
  source 1..20: mol_type = other DNA
cgtattgagaaaaattcaca

SEQ ID NO: 17782 - DNA, 20 bp, synthetic construct
  misc_feature 1..20: note = chemically synthesized
  source 1..20: mol_type = other DNA
aaaattcacaaggatcctca

SEQ ID NO: 17783 - DNA, 20 bp, synthetic construct
  misc_feature 1..20: note = chemically synthesized
  source 1..20: mol_type = other DNA
aaattcacaaggatcctcat

SEQ ID NO: 17784 - DNA, 20 bp, synthetic construct
  misc_feature 1..20: note = chemically synthesized
  source 1..20: mol_type = other DNA
aattcacaaggatcctcata

SEQ ID NO: 17785 - DNA, 20 bp, synthetic construct
  misc_feature 1..20: note = chemically synthesized
  source 1..20: mol_type = other DNA
gatcctcatagggaactatg

SEQ ID NO: 17786 - DNA, 20 bp, synthetic construct
  misc_feature 1..20: note = chemically synthesized
  source 1..20: mol_type = other DNA
tttataattacacttttaca

SEQ ID NO: 17787 - DNA, 20 bp, synthetic construct
  misc_feature 1..20: note = chemically synthesized
  source 1..20: mol_type = other DNA
aattacacttttacaaagtc

SEQ ID NO: 17788 - DNA, 20 bp, synthetic construct
  misc_feature 1..20: note = chemically synthesized
  source 1..20: mol_type = other DNA
atttttgttgttgtgatacc

SEQ ID NO: 17789 - DNA, 20 bp, synthetic construct
  misc_feature 1..20: note = chemically synthesized
  source 1..20: mol_type = other DNA
tgtgataccaagaaattttg

SEQ ID NO: 17790 - DNA, 20 bp, synthetic construct
  misc_feature 1..20: note = chemically synthesized
  source 1..20: mol_type = other DNA
gataccaagaaattttgtag

SEQ ID NO: 17791 - DNA, 20 bp, synthetic construct
  misc_feature 1..20: note = chemically synthesized
  source 1..20: mol_type = other DNA
ataccaagaaattttgtagc

SEQ ID NO: 17792 - DNA, 20 bp, synthetic construct
  misc_feature 1..20: note = chemically synthesized
  source 1..20: mol_type = other DNA
aaattttgtagcaggtttat

SEQ ID NO: 17793 - DNA, 20 bp, synthetic construct
  misc_feature 1..20: note = chemically synthesized
  source 1..20: mol_type = other DNA
aattttgtagcaggtttatt

SEQ ID NO: 17794 - DNA, 20 bp, synthetic construct
  misc_feature 1..20: note = chemically synthesized
  source 1..20: mol_type = other DNA
gcaggtttattgggaaaaca

SEQ ID NO: 17795 - DNA, 20 bp, synthetic construct
  misc_feature 1..20: note = chemically synthesized
  source 1..20: mol_type = other DNA
aggtttattgggaaaacaaa

SEQ ID NO: 17796 - DNA, 20 bp, synthetic construct
  misc_feature 1..20: note = chemically synthesized
  source 1..20: mol_type = other DNA
gggaaaacaaagagaactac

SEQ ID NO: 17797 - DNA, 20 bp, synthetic construct
  misc_feature 1..20: note = chemically synthesized
  source 1..20: mol_type = other DNA
ggaaaacaaagagaactaca

SEQ ID NO: 17798 - DNA, 20 bp, synthetic construct
  misc_feature 1..20: note = chemically synthesized
  source 1..20: mol_type = other DNA
gaaaacaaagagaactacaa

SEQ ID NO: 17799 - DNA, 20 bp, synthetic construct
  misc_feature 1..20: note = chemically synthesized
  source 1..20: mol_type = other DNA
agagaactacaagggaaact

SEQ ID NO: 17800 - DNA, 20 bp, synthetic construct
  misc_feature 1..20: note = chemically synthesized
  source 1..20: mol_type = other DNA
caattgattctgtatgtgtc

SEQ ID NO: 17801 - DNA, 20 bp, synthetic construct
  misc_feature 1..20: note = chemically synthesized
  source 1..20: mol_type = other DNA
attgattctgtatgtgtcca

SEQ ID NO: 17802 - DNA, 20 bp, synthetic construct
  misc_feature 1..20: note = chemically synthesized
  source 1..20: mol_type = other DNA
tattactaccgacacctttg

SEQ ID NO: 17803 - DNA, 20 bp, synthetic construct
  misc_feature 1..20: note = chemically synthesized
  source 1..20: mol_type = other DNA
gacacctttgaagtgtaatt

SEQ ID NO: 17804 - DNA, 20 bp, synthetic construct
  misc_feature 1..20: note = chemically synthesized
  source 1..20: mol_type = other DNA
agtgtaattcagtaaaaatg

SEQ ID NO: 17805 - DNA, 20 bp, synthetic construct
  misc_feature 1..20: note = chemically synthesized
  source 1..20: mol_type = other DNA
ttttattttataaaaaccta

SEQ ID NO: 17806 - DNA, 20 bp, synthetic construct
  misc_feature 1..20: note = chemically synthesized
  source 1..20: mol_type = other DNA
acaataataattatatgttt

SEQ ID NO: 17807 - DNA, 20 bp, synthetic construct
  misc_feature 1..20: note = chemically synthesized
  source 1..20: mol_type = other DNA
aattatatgtttcagaattt

SEQ ID NO: 17808 - DNA, 20 bp, synthetic construct
  misc_feature 1..20: note = chemically synthesized
  source 1..20: mol_type = other DNA
tgtttcagaattttggcaca

SEQ ID NO: 17809 - DNA, 20 bp, synthetic construct
  misc_feature 1..20: note = chemically synthesized
  source 1..20: mol_type = other DNA
catagtaacatctctaatat

SEQ ID NO: 17810 - DNA, 20 bp, synthetic construct
  misc_feature 1..20: note = chemically synthesized
  source 1..20: mol_type = other DNA
tctctaatataagcaattat

SEQ ID NO: 17811 - DNA, 20 bp, synthetic construct
  misc_feature 1..20: note = chemically synthesized
  source 1..20: mol_type = other DNA
ctaatataagcaattattgg

SEQ ID NO: 17812 - DNA, 20 bp, synthetic construct
  misc_feature 1..20: note = chemically synthesized
  source 1..20: mol_type = other DNA
aatataagcaattattggtg

SEQ ID NO: 17813 - DNA, 20 bp, synthetic construct
  misc_feature 1..20: note = chemically synthesized
  source 1..20: mol_type = other DNA
tataagcaattattggtgga

SEQ ID NO: 17814 - DNA, 20 bp, synthetic construct
  misc_feature 1..20: note = chemically synthesized
  source 1..20: mol_type = other DNA
taagcaattattggtggaga

SEQ ID NO: 17815 - DNA, 20 bp, synthetic construct
  misc_feature 1..20: note = chemically synthesized
  source 1..20: mol_type = other DNA
caattattggtggagagaga

SEQ ID NO: 17816 - DNA, 20 bp, synthetic construct
  misc_feature 1..20: note = chemically synthesized
  source 1..20: mol_type = other DNA
tattggtggagagagatgga

SEQ ID NO: 17817 - DNA, 20 bp, synthetic construct
  misc_feature 1..20: note = chemically synthesized
  source 1..20: mol_type = other DNA
ttggtggagagagatggaca

SEQ ID NO: 17818 - DNA, 20 bp, synthetic construct
  misc_feature 1..20: note = chemically synthesized
  source 1..20: mol_type = other DNA
tggtggagagagatggacag

SEQ ID NO: 17819 - DNA, 20 bp, synthetic construct
  misc_feature 1..20: note = chemically synthesized
  source 1..20: mol_type = other DNA
ggagagagatggacagagga

SEQ ID NO: 17820 - DNA, 20 bp, synthetic construct
  misc_feature 1..20: note = chemically synthesized
  source 1..20: mol_type = other DNA
gagagagatggacagaggaa

SEQ ID NO: 17821 - DNA, 20 bp, synthetic construct
  misc_feature 1..20: note = chemically synthesized
  source 1..20: mol_type = other DNA
gatggacagaggaaaggtga

SEQ ID NO: 17822 - DNA, 20 bp, synthetic construct
  misc_feature 1..20: note = chemically synthesized
  source 1..20: mol_type = other DNA
atggacagaggaaaggtgaa

SEQ ID NO: 17823 - DNA, 20 bp, synthetic construct
  misc_feature 1..20: note = chemically synthesized
  source 1..20: mol_type = other DNA
aaaggtgaaaggacttttga

SEQ ID NO: 17824 - DNA, 20 bp, synthetic construct
  misc_feature 1..20: note = chemically synthesized
  source 1..20: mol_type = other DNA
aaggtgaaaggacttttgaa

SEQ ID NO: 17825 - DNA, 20 bp, synthetic construct
  misc_feature 1..20: note = chemically synthesized
  source 1..20: mol_type = other DNA
aggtgaaaggacttttgaaa

SEQ ID NO: 17826 - DNA, 20 bp, synthetic construct
  misc_feature 1..20: note = chemically synthesized
  source 1..20: mol_type = other DNA
ttttgaaagggctgctactt

SEQ ID NO: 17827 - DNA, 20 bp, synthetic construct
  misc_feature 1..20: note = chemically synthesized
  source 1..20: mol_type = other DNA
tttgaaagggctgctacttc

SEQ ID NO: 17828 - DNA, 20 bp, synthetic construct
  misc_feature 1..20: note = chemically synthesized
  source 1..20: mol_type = other DNA
ttgaaagggctgctacttca

SEQ ID NO: 17829 - DNA, 20 bp, synthetic construct
  misc_feature 1..20: note = chemically synthesized
  source 1..20: mol_type = other DNA
tgaaagggctgctacttcag

SEQ ID NO: 17830 - DNA, 20 bp, synthetic construct
  misc_feature 1..20: note = chemically synthesized
  source 1..20: mol_type = other DNA
actgttgataacaaaaatgt

SEQ ID NO: 17831 - DNA, 20 bp, synthetic construct
  misc_feature 1..20: note = chemically synthesized
  source 1..20: mol_type = other DNA
tgataacaaaaatgtcagtc

SEQ ID NO: 17832 - DNA, 20 bp, synthetic construct
  misc_feature 1..20: note = chemically synthesized
  source 1..20: mol_type = other DNA
gataacaaaaatgtcagtct

SEQ ID NO: 17833 - DNA, 20 bp, synthetic construct
  misc_feature 1..20: note = chemically synthesized
  source 1..20: mol_type = other DNA
aaatgtcagtctaggcactg

SEQ ID NO: 17834 - DNA, 20 bp, synthetic construct
  misc_feature 1..20: note = chemically synthesized
  source 1..20: mol_type = other DNA
tgtcagtctaggcactgcag

SEQ ID NO: 17835 - DNA, 20 bp, synthetic construct
  misc_feature 1..20: note = chemically synthesized
  source 1..20: mol_type = other DNA
cagtctaggcactgcagtag

SEQ ID NO: 17836 - DNA, 20 bp, synthetic construct
  misc_feature 1..20: note = chemically synthesized
  source 1..20: mol_type = other DNA
gtctaggcactgcagtagca

SEQ ID NO: 17837 - DNA, 20 bp, synthetic construct
  misc_feature 1..20: note = chemically synthesized
  source 1..20: mol_type = other DNA
tagcagagactatgttcata

SEQ ID NO: 17838 - DNA, 20 bp, synthetic construct
  misc_feature 1..20: note = chemically synthesized
  source 1..20: mol_type = other DNA
ccactgaattatgacctgca

SEQ ID NO: 17839 - DNA, 20 bp, synthetic construct
  misc_feature 1..20: note = chemically synthesized
  source 1..20: mol_type = other DNA
gacctgcatagtgcttaatg

SEQ ID NO: 17840 - DNA, 20 bp, synthetic construct
  misc_feature 1..20: note = chemically synthesized
  source 1..20: mol_type = other DNA
ctgcatagtgcttaatgtgg

SEQ ID NO: 17841 - DNA, 20 bp, synthetic construct
  misc_feature 1..20: note = chemically synthesized
  source 1..20: mol_type = other DNA
gcagaacttatctaccgcca

SEQ ID NO: 17842 - DNA, 20 bp, synthetic construct
  misc_feature 1..20: note = chemically synthesized
  source 1..20: mol_type = other DNA
cagaacttatctaccgccac

SEQ ID NO: 17843 - DNA, 20 bp, synthetic construct
  misc_feature 1..20: note = chemically synthesized
  source 1..20: mol_type = other DNA
gaacttatctaccgccacag

SEQ ID NO: 17844 - DNA, 20 bp, synthetic construct
  misc_feature 1..20: note = chemically synthesized
  source 1..20: mol_type = other DNA
agtgatgtgtatatcattat

SEQ ID NO: 17845 - DNA, 20 bp, synthetic construct
  misc_feature 1..20: note = chemically synthesized
  source 1..20: mol_type = other DNA
accttccaatgttgccttat

SEQ ID NO: 17846 - DNA, 20 bp, synthetic construct
  misc_feature 1..20: note = chemically synthesized
  source 1..20: mol_type = other DNA
cttccaatgttgccttataa

SEQ ID NO: 17847 - DNA, 20 bp, synthetic construct
  misc_feature 1..20: note = chemically synthesized
  source 1..20: mol_type = other DNA
aatgttgccttataagagaa

SEQ ID NO: 17848 - DNA, 20 bp, synthetic construct
  misc_feature 1..20: note = chemically synthesized
  source 1..20: mol_type = other DNA
taatgccaaaatttgttgta

SEQ ID NO: 17849 - DNA, 20 bp, synthetic construct
  misc_feature 1..20: note = chemically synthesized
  source 1..20: mol_type = other DNA
aatgccaaaatttgttgtac

SEQ ID NO: 17850 - DNA, 20 bp, synthetic construct
  misc_feature 1..20: note = chemically synthesized
  source 1..20: mol_type = other DNA
caaaatttgttgtacaggat

SEQ ID NO: 17851 - DNA, 20 bp, synthetic construct
  misc_feature 1..20: note = chemically synthesized
  source 1..20: mol_type = other DNA
aaatttgttgtacaggataa

SEQ ID NO: 17852 - DNA, 20 bp, synthetic construct
  misc_feature 1..20: note = chemically synthesized
  source 1..20: mol_type = other DNA
ataagagctaaccacttatt

SEQ ID NO: 17853 - DNA, 20 bp, synthetic construct
  misc_feature 1..20: note = chemically synthesized
  source 1..20: mol_type = other DNA
tatttggatctactgtcacc

SEQ ID NO: 17854 - DNA, 20 bp, synthetic construct
  misc_feature 1..20: note = chemically synthesized
  source 1..20: mol_type = other DNA
atctactgtcacccagataa

SEQ ID NO: 17855 - DNA, 20 bp, synthetic construct
  misc_feature 1..20: note = chemically synthesized
  source 1..20: mol_type = other DNA
ctgtcacccagataatggac

SEQ ID NO: 17856 - DNA, 20 bp, synthetic construct
  misc_feature 1..20: note = chemically synthesized
  source 1..20: mol_type = other DNA
cacccagataatggaccaga

SEQ ID NO: 17857 - DNA, 20 bp, synthetic construct
  misc_feature 1..20: note = chemically synthesized
  source 1..20: mol_type = other DNA
cccagataatggaccagatg

SEQ ID NO: 17858 - DNA, 20 bp, synthetic construct
  misc_feature 1..20: note = chemically synthesized
  source 1..20: mol_type = other DNA
ccagataatggaccagatgg

SEQ ID NO: 17859 - DNA, 20 bp, synthetic construct
  misc_feature 1..20: note = chemically synthesized
  source 1..20: mol_type = other DNA
gataatggaccagatggagg

SEQ ID NO: 17860 - DNA, 20 bp, synthetic construct
  misc_feature 1..20: note = chemically synthesized
  source 1..20: mol_type = other DNA
atggaccagatggaggaagc

SEQ ID NO: 17861 - DNA, 20 bp, synthetic construct
  misc_feature 1..20: note = chemically synthesized
  source 1..20: mol_type = other DNA
ggaccagatggaggaagccg

SEQ ID NO: 17862 - DNA, 20 bp, synthetic construct
  misc_feature 1..20: note = chemically synthesized
  source 1..20: mol_type = other DNA
gaccagatggaggaagccgg

SEQ ID NO: 17863 - DNA, 20 bp, synthetic construct
  misc_feature 1..20: note = chemically synthesized
  source 1..20: mol_type = other DNA
ccagatggaggaagccggag

SEQ ID NO: 17864 - DNA, 20 bp, synthetic construct
  misc_feature 1..20: note = chemically synthesized
  source 1..20: mol_type = other DNA
cagatggaggaagccggagg

SEQ ID NO: 17865 - DNA, 20 bp, synthetic construct
  misc_feature 1..20: note = chemically synthesized
  source 1..20: mol_type = other DNA
gcctgattattcttaaacta

SEQ ID NO: 17866 - DNA, 20 bp, synthetic construct
  misc_feature 1..20: note = chemically synthesized
  source 1..20: mol_type = other DNA
tagtcgtgttttcaaaacct

SEQ ID NO: 17867 - DNA, 20 bp, synthetic construct
  misc_feature 1..20: note = chemically synthesized
  source 1..20: mol_type = other DNA
ttcaaaacctgagctgcgtt

SEQ ID NO: 17868 - DNA, 20 bp, synthetic construct
  misc_feature 1..20: note = chemically synthesized
  source 1..20: mol_type = other DNA
tcaaaacctgagctgcgttt

SEQ ID NO: 17869 - DNA, 20 bp, synthetic construct
  misc_feature 1..20: note = chemically synthesized
  source 1..20: mol_type = other DNA
tgagctgcgtttgggacatg

SEQ ID NO: 17870 - DNA, 20 bp, synthetic construct
  misc_feature 1..20: note = chemically synthesized
  source 1..20: mol_type = other DNA
gtttgggacatgcggatgca

SEQ ID NO: 17871 - DNA, 20 bp, synthetic construct
  misc_feature 1..20: note = chemically synthesized
  source 1..20: mol_type = other DNA
tttgggacatgcggatgcac

SEQ ID NO: 17872 - DNA, 20 bp, synthetic construct
  misc_feature 1..20: note = chemically synthesized
  source 1..20: mol_type = other DNA
ttgggacatgcggatgcaca

SEQ ID NO: 17873 - DNA, 20 bp, synthetic construct
  misc_feature 1..20: note = chemically synthesized
  source 1..20: mol_type = other DNA
agggttttattaaaactgtg

SEQ ID NO: 17874 - DNA, 20 bp, synthetic construct
  misc_feature 1..20: note = chemically synthesized
  source 1..20: mol_type = other DNA
taaaactgtgtggtaattac

SEQ ID NO: 17875 - DNA, 20 bp, synthetic construct
  misc_feature 1..20: note = chemically synthesized
  source 1..20: mol_type = other DNA
aaaactgtgtggtaattact

SEQ ID NO: 17876 - DNA, 20 bp, synthetic construct
  misc_feature 1..20: note = chemically synthesized
  source 1..20: mol_type = other DNA
aaactgtgtggtaattactg

SEQ ID NO: 17877 - DNA, 20 bp, synthetic construct
  misc_feature 1..20: note = chemically synthesized
  source 1..20: mol_type = other DNA
tgtggtaattactggggaaa

SEQ ID NO: 17878 - DNA, 20 bp, synthetic construct
  misc_feature 1..20: note = chemically synthesized
  source 1..20: mol_type = other DNA
aaatagttaatacaatttat

SEQ ID NO: 17879 - DNA, 20 bp, synthetic construct
  misc_feature 1..20: note = chemically synthesized
  source 1..20: mol_type = other DNA
aagtatattttattgaccta

SEQ ID NO: 17880 - DNA, 20 bp, synthetic construct
  misc_feature 1..20: note = chemically synthesized
  source 1..20: mol_type = other DNA
atattttattgacctaaaga

SEQ ID NO: 17881 - DNA, 20 bp, synthetic construct
  misc_feature 1..20: note = chemically synthesized
  source 1..20: mol_type = other DNA
agccctctatttaacatctg

SEQ ID NO: 17882 - DNA, 20 bp, synthetic construct
  misc_feature 1..20: note = chemically synthesized
  source 1..20: mol_type = other DNA
tatttaacatctgcagtctc

SEQ ID NO: 17883 - DNA, 20 bp, synthetic construct
  misc_feature 1..20: note = chemically synthesized
  source 1..20: mol_type = other DNA
atctgcagtctctagcaaaa

SEQ ID NO: 17884 - DNA, 20 bp, synthetic construct
  misc_feature 1..20: note = chemically synthesized
  source 1..20: mol_type = other DNA
ctctagcaaaacagctacgc

SEQ ID NO: 17885 - DNA, 20 bp, synthetic construct
  misc_feature 1..20: note = chemically synthesized
  source 1..20: mol_type = other DNA
gctacgctggcatttaattg

SEQ ID NO: 17886 - DNA, 20 bp, synthetic construct
  misc_feature 1..20: note = chemically synthesized
  source 1..20: mol_type = other DNA
gcatttaattgtggcaaatt

SEQ ID NO: 17887 - DNA, 20 bp, synthetic construct
  misc_feature 1..20: note = chemically synthesized
  source 1..20: mol_type = other DNA
tttaattgtggcaaatttgg

SEQ ID NO: 17888 - DNA, 20 bp, synthetic construct
  misc_feature 1..20: note = chemically synthesized
  source 1..20: mol_type = other DNA
tgtggcaaatttggtagtac

SEQ ID NO: 17889 - DNA, 20 bp, synthetic construct
  misc_feature 1..20: note = chemically synthesized
  source 1..20: mol_type = other DNA
gtccacatacccaaatattc

SEQ ID NO: 17890 - DNA, 20 bp, synthetic construct
  misc_feature 1..20: note = chemically synthesized
  source 1..20: mol_type = other DNA
tccacatacccaaatattcc

SEQ ID NO: 17891 - DNA, 20 bp, synthetic construct
  misc_feature 1..20: note = chemically synthesized
  source 1..20: mol_type = other DNA
ccacatacccaaatattcca

SEQ ID NO: 17892 - DNA, 20 bp, synthetic construct
  misc_feature 1..20: note = chemically synthesized
  source 1..20: mol_type = other DNA
acatacccaaatattccagg

SEQ ID NO: 17893 - DNA, 20 bp, synthetic construct
  misc_feature 1..20: note = chemically synthesized
  source 1..20: mol_type = other DNA
cccaaatattccagggagaa

SEQ ID NO: 17894 - DNA, 20 bp, synthetic construct
  misc_feature 1..20: note = chemically synthesized
  source 1..20: mol_type = other DNA
agggagaatagttgccctaa

SEQ ID NO: 17895 - DNA, 20 bp, synthetic construct
  misc_feature 1..20: note = chemically synthesized
  source 1..20: mol_type = other DNA
gaatagttgccctaatagtt

SEQ ID NO: 17896 - DNA, 20 bp, synthetic construct
  misc_feature 1..20: note = chemically synthesized
  source 1..20: mol_type = other DNA
aatagttgccctaatagttt

SEQ ID NO: 17897 - DNA, 20 bp, synthetic construct
  misc_feature 1..20: note = chemically synthesized
  source 1..20: mol_type = other DNA
atagttgccctaatagttta

SEQ ID NO: 17898 - DNA, 20 bp, synthetic construct
  misc_feature 1..20: note = chemically synthesized
  source 1..20: mol_type = other DNA
agttgccctaatagtttagg

SEQ ID NO: 17899 - DNA, 20 bp, synthetic construct
  misc_feature 1..20: note = chemically synthesized
  source 1..20: mol_type = other DNA
taatagtttagggagtctcc

SEQ ID NO: 17900 - DNA, 20 bp, synthetic construct
  misc_feature 1..20: note = chemically synthesized
  source 1..20: mol_type = other DNA
tagaatgtgatacatgacaa

SEQ ID NO: 17901 - DNA, 20 bp, synthetic construct
  misc_feature 1..20: note = chemically synthesized
  source 1..20: mol_type = other DNA
atgtgatacatgacaaaagt

SEQ ID NO: 17902 - DNA, 20 bp, synthetic construct
  misc_feature 1..20: note = chemically synthesized
  source 1..20: mol_type = other DNA
gtgatacatgacaaaagtga

SEQ ID NO: 17903 - DNA, 20 bp, synthetic construct
  misc_feature 1..20: note = chemically synthesized
  source 1..20: mol_type = other DNA
aaaagtgagagtcataactt

SEQ ID NO: 17904 - DNA, 20 bp, synthetic construct
  misc_feature 1..20: note = chemically synthesized
  source 1..20: mol_type = other DNA
agtgagagtcataactttag

SEQ ID NO: 17905 - DNA, 20 bp, synthetic construct
  misc_feature 1..20: note = chemically synthesized
  source 1..20: mol_type = other DNA
ttagtggaatttatcactct

SEQ ID NO: 17906 - DNA, 20 bp, synthetic construct
  misc_feature 1..20: note = chemically synthesized
  source 1..20: mol_type = other DNA
tagtggaatttatcactctc

SEQ ID NO: 17907 - DNA, 20 bp, synthetic construct
  misc_feature 1..20: note = chemically synthesized
  source 1..20: mol_type = other DNA
ggaatttatcactctcaggc

SEQ ID NO: 17908 - DNA, 20 bp, synthetic construct
  misc_feature 1..20: note = chemically synthesized
  source 1..20: mol_type = other DNA
ttatcactctcaggcaagca

SEQ ID NO: 17909 - DNA, 20 bp, synthetic construct
  misc_feature 1..20: note = chemically synthesized
  source 1..20: mol_type = other DNA
atcactctcaggcaagcata

SEQ ID NO: 17910 - DNA, 20 bp, synthetic construct
  misc_feature 1..20: note = chemically synthesized
  source 1..20: mol_type = other DNA
tcactctcaggcaagcatag

SEQ ID NO: 17911 - DNA, 20 bp, synthetic construct
  misc_feature 1..20: note = chemically synthesized
  source 1..20: mol_type = other DNA
ggcaagcatagaggccccct

SEQ ID NO: 17912 - DNA, 20 bp, synthetic construct
  misc_feature 1..20: note = chemically synthesized
  source 1..20: mol_type = other DNA
gcaagcatagaggccccctg

SEQ ID NO: 17913 - DNA, 20 bp, synthetic construct
  misc_feature 1..20: note = chemically synthesized
  source 1..20: mol_type = other DNA
caagcatagaggccccctga

SEQ ID NO: 17914 - DNA, 20 bp, synthetic construct
  misc_feature 1..20: note = chemically synthesized
  source 1..20: mol_type = other DNA
ctgagggatgcaaaaatgac

SEQ ID NO: 17915 - DNA, 20 bp, synthetic construct
  misc_feature 1..20: note = chemically synthesized
  source 1..20: mol_type = other DNA
ctgttctcttgcccctttct

SEQ ID NO: 17916 - DNA, 20 bp, synthetic construct
  misc_feature 1..20: note = chemically synthesized
  source 1..20: mol_type = other DNA
tgcccctttctgagtgcctt

SEQ ID NO: 17917 - DNA, 20 bp, synthetic construct
  misc_feature 1..20: note = chemically synthesized
  source 1..20: mol_type = other DNA
cctttggactgattctttga

SEQ ID NO: 17918 - DNA, 20 bp, synthetic construct
  misc_feature 1..20: note = chemically synthesized
  source 1..20: mol_type = other DNA
ttctttgacagcaactatcc

SEQ ID NO: 17919 - DNA, 20 bp, synthetic construct
  misc_feature 1..20: note = chemically synthesized
  source 1..20: mol_type = other DNA
ctttgacagcaactatccca

SEQ ID NO: 17920 - DNA, 20 bp, synthetic construct
  misc_feature 1..20: note = chemically synthesized
  source 1..20: mol_type = other DNA
gcaactatcccagagtcctc

SEQ ID NO: 17921 - DNA, 20 bp, synthetic construct
  misc_feature 1..20: note = chemically synthesized
  source 1..20: mol_type = other DNA
aactatcccagagtcctcaa

SEQ ID NO: 17922 - DNA, 20 bp, synthetic construct
  misc_feature 1..20: note = chemically synthesized
  source 1..20: mol_type = other DNA
agagtcctcaagagtttctg

SEQ ID NO: 17923 - DNA, 20 bp, synthetic construct
  misc_feature 1..20: note = chemically synthesized
  source 1..20: mol_type = other DNA
gagtcctcaagagtttctga

SEQ ID NO: 17924 - DNA, 20 bp, synthetic construct
  misc_feature 1..20: note = chemically synthesized
  source 1..20: mol_type = other DNA
aagagtttctgaaggtaaca

SEQ ID NO: 17925 - DNA, 20 bp, synthetic construct
  misc_feature 1..20: note = chemically synthesized
  source 1..20: mol_type = other DNA
ggtaacatagatccatcatc

SEQ ID NO: 17926 - DNA, 20 bp, synthetic construct
  misc_feature 1..20: note = chemically synthesized
  source 1..20: mol_type = other DNA
taacatagatccatcatcca

SEQ ID NO: 17927 - DNA, 20 bp, synthetic construct
  misc_feature 1..20: note = chemically synthesized
  source 1..20: mol_type = other DNA
caacttgccatgctgacaaa

SEQ ID NO: 17928 - DNA, 20 bp, synthetic construct
  misc_feature 1..20: note = chemically synthesized
  source 1..20: mol_type = other DNA
tgccatgctgacaaaaagct

SEQ ID NO: 17929 - DNA, 20 bp, synthetic construct
  misc_feature 1..20: note = chemically synthesized
  source 1..20: mol_type = other DNA
gccatgctgacaaaaagctt

SEQ ID NO: 17930 - DNA, 20 bp, synthetic construct
  misc_feature 1..20: note = chemically synthesized
  source 1..20: mol_type = other DNA
caaaaagcttaggaactgtt

SEQ ID NO: 17931 - DNA, 20 bp, synthetic construct
  misc_feature 1..20: note = chemically synthesized
  source 1..20: mol_type = other DNA
aaaaagcttaggaactgttc

SEQ ID NO: 17932 - DNA, 20 bp, synthetic construct
  misc_feature 1..20: note = chemically synthesized
  source 1..20: mol_type = other DNA
tgttcaggaaaccatttata

SEQ ID NO: 17933 - DNA, 20 bp, synthetic construct
  misc_feature 1..20: note = chemically synthesized
  source 1..20: mol_type = other DNA
ataaagacataaactaaaat

SEQ ID NO: 17934 - DNA, 20 bp, synthetic construct
  misc_feature 1..20: note = chemically synthesized
  source 1..20: mol_type = other DNA
aagacataaactaaaatgag

SEQ ID NO: 17935 - DNA, 20 bp, synthetic construct
  misc_feature 1..20: note = chemically synthesized
  source 1..20: mol_type = other DNA
aactaaaatgagaagacaaa

SEQ ID NO: 17936 - DNA, 20 bp, synthetic construct
  misc_feature 1..20: note = chemically synthesized
  source 1..20: mol_type = other DNA
ctaaaatgagaagacaaaaa

SEQ ID NO: 17937 - DNA, 20 bp, synthetic construct
  misc_feature 1..20: note = chemically synthesized
  source 1..20: mol_type = other DNA
gaagacaaaaagagaatatt

SEQ ID NO: 17938 - DNA, 20 bp, synthetic construct
  misc_feature 1..20: note = chemically synthesized
  source 1..20: mol_type = other DNA
atattaagatcgtgttaaaa

SEQ ID NO: 17939 - DNA, 20 bp, synthetic construct
  misc_feature 1..20: note = chemically synthesized
  source 1..20: mol_type = other DNA
aagatcgtgttaaaaaagaa

SEQ ID NO: 17940 - DNA, 20 bp, synthetic construct
  misc_feature 1..20: note = chemically synthesized
  source 1..20: mol_type = other DNA
aaaaagaacagtcttccgtt

SEQ ID NO: 17941 - DNA, 20 bp, synthetic construct
  misc_feature 1..20: note = chemically synthesized
  source 1..20: mol_type = other DNA
aacagtcttccgtttagttc

SEQ ID NO: 17942 - DNA, 20 bp, synthetic construct
  misc_feature 1..20: note = chemically synthesized
  source 1..20: mol_type = other DNA
tttagttccagataatctgc

SEQ ID NO: 17943 - DNA, 20 bp, synthetic construct
  misc_feature 1..20: note = chemically synthesized
  source 1..20: mol_type = other DNA
ctgcaagtgccctgtacaat

SEQ ID NO: 17944 - DNA, 20 bp, synthetic construct
  misc_feature 1..20: note = chemically synthesized
  source 1..20: mol_type = other DNA
gccccaaaattgtgttccta

SEQ ID NO: 17945 - DNA, 20 bp, synthetic construct
  misc_feature 1..20: note = chemically synthesized
  source 1..20: mol_type = other DNA
ccaaaattgtgttcctatag

SEQ ID NO: 17946 - DNA, 20 bp, synthetic construct
  misc_feature 1..20: note = chemically synthesized
  source 1..20: mol_type = other DNA
tataccaaaataaatattta

SEQ ID NO: 17947 - DNA, 20 bp, synthetic construct
  misc_feature 1..20: note = chemically synthesized
  source 1..20: mol_type = other DNA
tatttaaagtcaactgacaa

SEQ ID NO: 17948 - DNA, 20 bp, synthetic construct
  misc_feature 1..20: note = chemically synthesized
  source 1..20: mol_type = other DNA
atttaaagtcaactgacaat

SEQ ID NO: 17949 - DNA, 20 bp, synthetic construct
  misc_feature 1..20: note = chemically synthesized
  source 1..20: mol_type = other DNA
taaagtcaactgacaatggg

SEQ ID NO: 17950 - DNA, 20 bp, synthetic construct
  misc_feature 1..20: note = chemically synthesized
  source 1..20: mol_type = other DNA
aactgacaatgggaagccat

SEQ ID NO: 17951 - DNA, 20 bp, synthetic construct
  misc_feature 1..20: note = chemically synthesized
  source 1..20: mol_type = other DNA
caatgggaagccatgagatg

SEQ ID NO: 17952 - DNA, 20 bp, synthetic construct
  misc_feature 1..20: note = chemically synthesized
  source 1..20: mol_type = other DNA
acaaaatatctgaaaaatct

SEQ ID NO: 17953 - DNA, 20 bp, synthetic construct
  misc_feature 1..20: note = chemically synthesized
  source 1..20: mol_type = other DNA
tctgaaaaatctcagctttt

SEQ ID NO: 17954 - DNA, 20 bp, synthetic construct
  misc_feature 1..20: note = chemically synthesized
  source 1..20: mol_type = other DNA
acttttttatatcttacctt

SEQ ID NO: 17955 - DNA, 20 bp, synthetic construct
  misc_feature 1..20: note = chemically synthesized
  source 1..20: mol_type = other DNA
accttaagtacaaattaaaa

SEQ ID NO: 17956 - DNA, 20 bp, synthetic construct
  misc_feature 1..20: note = chemically synthesized
  source 1..20: mol_type = other DNA
ttaagtacaaattaaaatgg

SEQ ID NO: 17957 - DNA, 20 bp, synthetic construct
  misc_feature 1..20: note = chemically synthesized
  source 1..20: mol_type = other DNA
aagtacaaattaaaatggaa

SEQ ID NO: 17958 - DNA, 20 bp, synthetic construct
  misc_feature 1..20: note = chemically synthesized
  source 1..20: mol_type = other DNA
agtacaaattaaaatggaag

SEQ ID NO: 17959 - DNA, 20 bp, synthetic construct
  misc_feature 1..20: note = chemically synthesized
  source 1..20: mol_type = other DNA
acaaattaaaatggaagagg

SEQ ID NO: 17960 - DNA, 20 bp, synthetic construct
  misc_feature 1..20: note = chemically synthesized
  source 1..20: mol_type = other DNA
attaaaatggaagaggtggc

SEQ ID NO: 17961 - DNA, 20 bp, synthetic construct
  misc_feature 1..20: note = chemically synthesized
  source 1..20: mol_type = other DNA
ttaaaatggaagaggtggcc

SEQ ID NO: 17962 - DNA, 20 bp, synthetic construct
  misc_feature 1..20: note = chemically synthesized
  source 1..20: mol_type = other DNA
atggaagaggtggccaggca

SEQ ID NO: 17963 - DNA, 20 bp, synthetic construct
  misc_feature 1..20: note = chemically synthesized
  source 1..20: mol_type = other DNA
ggaagaggtggccaggcaca

SEQ ID NO: 17964 - DNA, 20 bp, synthetic construct
  misc_feature 1..20: note = chemically synthesized
  source 1..20: mol_type = other DNA
gaagaggtggccaggcacag

SEQ ID NO: 17965 - DNA, 20 bp, synthetic construct
  misc_feature 1..20: note = chemically synthesized
  source 1..20: mol_type = other DNA
gaggctcatgcctgtaatcc

SEQ ID NO: 17966 - DNA, 20 bp, synthetic construct
  misc_feature 1..20: note = chemically synthesized
  source 1..20: mol_type = other DNA
tgcctgtaatcctagcactt

SEQ ID NO: 17967 - DNA, 20 bp, synthetic construct
  misc_feature 1..20: note = chemically synthesized
  source 1..20: mol_type = other DNA
ctgtaatcctagcactttgg

SEQ ID NO: 17968 - DNA, 20 bp, synthetic construct
  misc_feature 1..20: note = chemically synthesized
  source 1..20: mol_type = other DNA
tgtaatcctagcactttgga

SEQ ID NO: 17969 - DNA, 20 bp, synthetic construct
  misc_feature 1..20: note = chemically synthesized
  source 1..20: mol_type = other DNA
tcctagcactttggaaggct

SEQ ID NO: 17970 - DNA, 20 bp, synthetic construct
  misc_feature 1..20: note = chemically synthesized
  source 1..20: mol_type = other DNA
cctagcactttggaaggctg

SEQ ID NO: 17971 - DNA, 20 bp, synthetic construct
  misc_feature 1..20: note = chemically synthesized
  source 1..20: mol_type = other DNA
agcactttggaaggctgagg

SEQ ID NO: 17972 - DNA, 20 bp, synthetic construct
  misc_feature 1..20: note = chemically synthesized
  source 1..20: mol_type = other DNA
ggaaggctgaggtggatcac

SEQ ID NO: 17973 - DNA, 20 bp, synthetic construct
  misc_feature 1..20: note = chemically synthesized
  source 1..20: mol_type = other DNA
gaaggctgaggtggatcacg

SEQ ID NO: 17974 - DNA, 20 bp, synthetic construct
  misc_feature 1..20: note = chemically synthesized
  source 1..20: mol_type = other DNA
gctgaggtggatcacgaggt

SEQ ID NO: 17975 - DNA, 20 bp, synthetic construct
  misc_feature 1..20: note = chemically synthesized
  source 1..20: mol_type = other DNA
gaggtggatcacgaggtcag

SEQ ID NO: 17976 - DNA, 20 bp, synthetic construct
  misc_feature 1..20: note = chemically synthesized
  source 1..20: mol_type = other DNA
gatcacgaggtcagcagttt

SEQ ID NO: 17977 - DNA, 20 bp, synthetic construct
  misc_feature 1..20: note = chemically synthesized
  source 1..20: mol_type = other DNA
cgaggtcagcagtttgagac

SEQ ID NO: 17978 - DNA, 20 bp, synthetic construct
  misc_feature 1..20: note = chemically synthesized
  source 1..20: mol_type = other DNA
tcagcagtttgagactagcc

SEQ ID NO: 17979 - DNA, 20 bp, synthetic construct
  misc_feature 1..20: note = chemically synthesized
  source 1..20: mol_type = other DNA
tgagactagcctggccaaca

SEQ ID NO: 17980 - DNA, 20 bp, synthetic construct
  misc_feature 1..20: note = chemically synthesized
  source 1..20: mol_type = other DNA
tctactaaaaatacaaaaat

SEQ ID NO: 17981 - DNA, 20 bp, synthetic construct
  misc_feature 1..20: note = chemically synthesized
  source 1..20: mol_type = other DNA
ctaaaaatacaaaaattagc

SEQ ID NO: 17982 - DNA, 20 bp, synthetic construct
  misc_feature 1..20: note = chemically synthesized
  source 1..20: mol_type = other DNA
taaaaatacaaaaattagct

SEQ ID NO: 17983 - DNA, 20 bp, synthetic construct
  misc_feature 1..20: note = chemically synthesized
  source 1..20: mol_type = other DNA
atacaaaaattagctgggtg

SEQ ID NO: 17984 - DNA, 20 bp, synthetic construct
  misc_feature 1..20: note = chemically synthesized
  source 1..20: mol_type = other DNA
caaaaattagctgggtgtgg

SEQ ID NO: 17985 - DNA, 20 bp, synthetic construct
  misc_feature 1..20: note = chemically synthesized
  source 1..20: mol_type = other DNA
aattagctgggtgtggtggt

SEQ ID NO: 17986 - DNA, 20 bp, synthetic construct
  misc_feature 1..20: note = chemically synthesized
  source 1..20: mol_type = other DNA
gtggtgagcgcctgtaatcc

SEQ ID NO: 17987 - DNA, 20 bp, synthetic construct
  misc_feature 1..20: note = chemically synthesized
  source 1..20: mol_type = other DNA
cgcctgtaatcccagctact

SEQ ID NO: 17988 - DNA, 20 bp, synthetic construct
  misc_feature 1..20: note = chemically synthesized
  source 1..20: mol_type = other DNA
gcctgtaatcccagctactc

SEQ ID NO: 17989 - DNA, 20 bp, synthetic construct
  misc_feature 1..20: note = chemically synthesized
  source 1..20: mol_type = other DNA
ctgtaatcccagctactcgg

SEQ ID NO: 17990 - DNA, 20 bp, synthetic construct
  misc_feature 1..20: note = chemically synthesized
  source 1..20: mol_type = other DNA
tgtaatcccagctactcggg

SEQ ID NO: 17991 - DNA, 20 bp, synthetic construct
  misc_feature 1..20: note = chemically synthesized
  source 1..20: mol_type = other DNA
tcccagctactcgggaggct

SEQ ID NO: 17992 - DNA, 20 bp, synthetic construct
  misc_feature 1..20: note = chemically synthesized
  source 1..20: mol_type = other DNA
cccagctactcgggaggctg

SEQ ID NO: 17993 - DNA, 20 bp, synthetic construct
  misc_feature 1..20: note = chemically synthesized
  source 1..20: mol_type = other DNA
agctactcgggaggctgagg

SEQ ID NO: 17994 - DNA, 20 bp, synthetic construct
  misc_feature 1..20: note = chemically synthesized
  source 1..20: mol_type = other DNA
gctactcgggaggctgaggc

SEQ ID NO: 17995 - DNA, 20 bp, synthetic construct
  misc_feature 1..20: note = chemically synthesized
  source 1..20: mol_type = other DNA
tactcgggaggctgaggcag

SEQ ID NO: 17996 - DNA, 20 bp, synthetic construct
  misc_feature 1..20: note = chemically synthesized
  source 1..20: mol_type = other DNA
gagaattgctttaaaaaaac

SEQ ID NO: 17997 - DNA, 20 bp, synthetic construct
  misc_feature 1..20: note = chemically synthesized
  source 1..20: mol_type = other DNA
agaattgctttaaaaaaact

SEQ ID NO: 17998 - DNA, 20 bp, synthetic construct
  misc_feature 1..20: note = chemically synthesized
  source 1..20: mol_type = other DNA
gaattgctttaaaaaaactg

SEQ ID NO: 17999 - DNA, 20 bp, synthetic construct
  misc_feature 1..20: note = chemically synthesized
  source 1..20: mol_type = other DNA
attgctttaaaaaaactggg

SEQ ID NO: 18000 - DNA, 20 bp, synthetic construct
  misc_feature 1..20: note = chemically synthesized
  source 1..20: mol_type = other DNA
gctttaaaaaaactggggag

SEQ ID NO: 18001 - DNA, 20 bp, synthetic construct
  misc_feature 1..20: note = chemically synthesized
  source 1..20: mol_type = other DNA
tttaaaaaaactggggagca

SEQ ID NO: 18002 - DNA, 20 bp, synthetic construct
  misc_feature 1..20: note = chemically synthesized
  source 1..20: mol_type = other DNA
ttaaaaaaactggggagcag

SEQ ID NO: 18003 - DNA, 20 bp, synthetic construct
  misc_feature 1..20: note = chemically synthesized
  source 1..20: mol_type = other DNA
ctggggagcagaggtcgtcg

SEQ ID NO: 18004 - DNA, 20 bp, synthetic construct
  misc_feature 1..20: note = chemically synthesized
  source 1..20: mol_type = other DNA
ggagcagaggtcgtcgcagt

SEQ ID NO: 18005 - DNA, 20 bp, synthetic construct
  misc_feature 1..20: note = chemically synthesized
  source 1..20: mol_type = other DNA
agaggtcgtcgcagtgagcc

SEQ ID NO: 18006 - DNA, 20 bp, synthetic construct
  misc_feature 1..20: note = chemically synthesized
  source 1..20: mol_type = other DNA
aagattgtgccactgcacta

SEQ ID NO: 18007 - DNA, 20 bp, synthetic construct
  misc_feature 1..20: note = chemically synthesized
  source 1..20: mol_type = other DNA
tgtgccactgcactacagcc

SEQ ID NO: 18008 - DNA, 20 bp, synthetic construct
  misc_feature 1..20: note = chemically synthesized
  source 1..20: mol_type = other DNA
gtgccactgcactacagcct

SEQ ID NO: 18009 - DNA, 20 bp, synthetic construct
  misc_feature 1..20: note = chemically synthesized
  source 1..20: mol_type = other DNA
gcactacagcctgggcgaca

SEQ ID NO: 18010 - DNA, 20 bp, synthetic construct
  misc_feature 1..20: note = chemically synthesized
  source 1..20: mol_type = other DNA
tacagcctgggcgacaaagc

SEQ ID NO: 18011 - DNA, 20 bp, synthetic construct
  misc_feature 1..20: note = chemically synthesized
  source 1..20: mol_type = other DNA
acagcctgggcgacaaagca

SEQ ID NO: 18012 - DNA, 20 bp, synthetic construct
  misc_feature 1..20: note = chemically synthesized
  source 1..20: mol_type = other DNA
tctcaaaaaaaaaaaaaaaa

SEQ ID NO: 18013 - DNA, 20 bp, synthetic construct
  misc_feature 1..20: note = chemically synthesized
  source 1..20: mol_type = other DNA
ctcaaaaaaaaaaaaaaaaa

SEQ ID NO: 18014 - DNA, 20 bp, synthetic construct
  misc_feature 1..20: note = chemically synthesized
  source 1..20: mol_type = other DNA
aaaaaaaaaaaaaaaaggtt

SEQ ID NO: 18015 - DNA, 20 bp, synthetic construct
  misc_feature 1..20: note = chemically synthesized
  source 1..20: mol_type = other DNA
aaaaaaaaaaaaaaggtttg

SEQ ID NO: 18016 - DNA, 20 bp, synthetic construct
  misc_feature 1..20: note = chemically synthesized
  source 1..20: mol_type = other DNA
aaaaaaaaaaaaggtttgga

SEQ ID NO: 18017 - DNA, 20 bp, synthetic construct
  misc_feature 1..20: note = chemically synthesized
  source 1..20: mol_type = other DNA
aaaggtttggagagaaacat

SEQ ID NO: 18018 - DNA, 20 bp, synthetic construct
  misc_feature 1..20: note = chemically synthesized
  source 1..20: mol_type = other DNA
aaggtttggagagaaacatt

SEQ ID NO: 18019 - DNA, 20 bp, synthetic construct
  misc_feature 1..20: note = chemically synthesized
  source 1..20: mol_type = other DNA
ggagagaaacattgggaaac

SEQ ID NO: 18020 - DNA, 20 bp, synthetic construct
  misc_feature 1..20: note = chemically synthesized
  source 1..20: mol_type = other DNA
gagagaaacattgggaaact

SEQ ID NO: 18021 - DNA, 20 bp, synthetic construct
  misc_feature 1..20: note = chemically synthesized
  source 1..20: mol_type = other DNA
actaggacaaattttgctct

SEQ ID NO: 18022 - DNA, 20 bp, synthetic construct
  misc_feature 1..20: note = chemically synthesized
  source 1..20: mol_type = other DNA
caaattttgctctcagtaaa

SEQ ID NO: 18023 - DNA, 20 bp, synthetic construct
  misc_feature 1..20: note = chemically synthesized
  source 1..20: mol_type = other DNA
ttttgctctcagtaaaaaga

SEQ ID NO: 18024 - DNA, 20 bp, synthetic construct
  misc_feature 1..20: note = chemically synthesized
  source 1..20: mol_type = other DNA
cagtaaaaagaaagatctca

SEQ ID NO: 18025 - DNA, 20 bp, synthetic construct
  misc_feature 1..20: note = chemically synthesized
  source 1..20: mol_type = other DNA
agtaaaaagaaagatctcaa

SEQ ID NO: 18026 - DNA, 20 bp, synthetic construct
  misc_feature 1..20: note = chemically synthesized
  source 1..20: mol_type = other DNA
taaaaagaaagatctcaaag

SEQ ID NO: 18027 - DNA, 20 bp, synthetic construct
  misc_feature 1..20: note = chemically synthesized
  source 1..20: mol_type = other DNA
aagaaagatctcaaaggaga

SEQ ID NO: 18028 - DNA, 20 bp, synthetic construct
  misc_feature 1..20: note = chemically synthesized
  source 1..20: mol_type = other DNA
gatctcaaaggagatagaca

SEQ ID NO: 18029 - DNA, 20 bp, synthetic construct
  misc_feature 1..20: note = chemically synthesized
  source 1..20: mol_type = other DNA
ctcaaaggagatagacaaag

SEQ ID NO: 18030 - DNA, 20 bp, synthetic construct
  misc_feature 1..20: note = chemically synthesized
  source 1..20: mol_type = other DNA
aaaggagatagacaaagaag

SEQ ID NO: 18031 - DNA, 20 bp, synthetic construct
  misc_feature 1..20: note = chemically synthesized
  source 1..20: mol_type = other DNA
aaggagatagacaaagaagc

SEQ ID NO: 18032 - DNA, 20 bp, synthetic construct
  misc_feature 1..20: note = chemically synthesized
  source 1..20: mol_type = other DNA
gatagacaaagaagcaggca

SEQ ID NO: 18033 - DNA, 20 bp, synthetic construct
  misc_feature 1..20: note = chemically synthesized
  source 1..20: mol_type = other DNA
aaagaagcaggcacagatgt

SEQ ID NO: 18034 - DNA, 20 bp, synthetic construct
  misc_feature 1..20: note = chemically synthesized
  source 1..20: mol_type = other DNA
agaagcaggcacagatgtaa

SEQ ID NO: 18035 - DNA, 20 bp, synthetic construct
  misc_feature 1..20: note = chemically synthesized
  source 1..20: mol_type = other DNA
gaagcaggcacagatgtaag

SEQ ID NO: 18036 - DNA, 20 bp, synthetic construct
  misc_feature 1..20: note = chemically synthesized
  source 1..20: mol_type = other DNA
caggcacagatgtaagagga

SEQ ID NO: 18037 - DNA, 20 bp, synthetic construct
  misc_feature 1..20: note = chemically synthesized
  source 1..20: mol_type = other DNA
acagatgtaagaggatagca

SEQ ID NO: 18038 - DNA, 20 bp, synthetic construct
  misc_feature 1..20: note = chemically synthesized
  source 1..20: mol_type = other DNA
atttacaaaaaaacaatgaa

SEQ ID NO: 18039 - DNA, 20 bp, synthetic construct
  misc_feature 1..20: note = chemically synthesized
  source 1..20: mol_type = other DNA
tttacaaaaaaacaatgaaa

SEQ ID NO: 18040 - DNA, 20 bp, synthetic construct
  misc_feature 1..20: note = chemically synthesized
  source 1..20: mol_type = other DNA
ttacaaaaaaacaatgaaaa

SEQ ID NO: 18041 - DNA, 20 bp, synthetic construct
  misc_feature 1..20: note = chemically synthesized
  source 1..20: mol_type = other DNA
caaaaaaacaatgaaaaggg

SEQ ID NO: 18042 - DNA, 20 bp, synthetic construct
  misc_feature 1..20: note = chemically synthesized
  source 1..20: mol_type = other DNA
acaatgaaaagggaagttta

SEQ ID NO: 18043 - DNA, 20 bp, synthetic construct
  misc_feature 1..20: note = chemically synthesized
  source 1..20: mol_type = other DNA
caatgaaaagggaagtttat

SEQ ID NO: 18044 - DNA, 20 bp, synthetic construct
  misc_feature 1..20: note = chemically synthesized
  source 1..20: mol_type = other DNA
atgaaaagggaagtttatag

SEQ ID NO: 18045 - DNA, 20 bp, synthetic construct
  misc_feature 1..20: note = chemically synthesized
  source 1..20: mol_type = other DNA
aaaagggaagtttataggag

SEQ ID NO: 18046 - DNA, 20 bp, synthetic construct
  misc_feature 1..20: note = chemically synthesized
  source 1..20: mol_type = other DNA
gtttataggagtggatacta

SEQ ID NO: 18047 - DNA, 20 bp, synthetic construct
  misc_feature 1..20: note = chemically synthesized
  source 1..20: mol_type = other DNA
tataggagtggatactatgg

SEQ ID NO: 18048 - DNA, 20 bp, synthetic construct
  misc_feature 1..20: note = chemically synthesized
  source 1..20: mol_type = other DNA
ataggagtggatactatggt

SEQ ID NO: 18049 - DNA, 20 bp, synthetic construct
  misc_feature 1..20: note = chemically synthesized
  source 1..20: mol_type = other DNA
tggatactatggtaggttaa

SEQ ID NO: 18050 - DNA, 20 bp, synthetic construct
  misc_feature 1..20: note = chemically synthesized
  source 1..20: mol_type = other DNA
taggttaatagtgaaaaata

SEQ ID NO: 18051 - DNA, 20 bp, synthetic construct
  misc_feature 1..20: note = chemically synthesized
  source 1..20: mol_type = other DNA
attatcaattaatataaaca

SEQ ID NO: 18052 - DNA, 20 bp, synthetic construct
  misc_feature 1..20: note = chemically synthesized
  source 1..20: mol_type = other DNA
tatcaattaatataaacata

SEQ ID NO: 18053 - DNA, 20 bp, synthetic construct
  misc_feature 1..20: note = chemically synthesized
  source 1..20: mol_type = other DNA
atcaattaatataaacatag

SEQ ID NO: 18054 - DNA, 20 bp, synthetic construct
  misc_feature 1..20: note = chemically synthesized
  source 1..20: mol_type = other DNA
acatagaggtgttgattgtt

SEQ ID NO: 18055 - DNA, 20 bp, synthetic construct
  misc_feature 1..20: note = chemically synthesized
  source 1..20: mol_type = other DNA
catagaggtgttgattgttt

SEQ ID NO: 18056 - DNA, 20 bp, synthetic construct
  misc_feature 1..20: note = chemically synthesized
  source 1..20: mol_type = other DNA
atagaggtgttgattgtttg

SEQ ID NO: 18057 - DNA, 20 bp, synthetic construct
  misc_feature 1..20: note = chemically synthesized
  source 1..20: mol_type = other DNA
tgttgattgtttggggcaac

SEQ ID NO: 18058 - DNA, 20 bp, synthetic construct
  misc_feature 1..20: note = chemically synthesized
  source 1..20: mol_type = other DNA
gttgattgtttggggcaact

SEQ ID NO: 18059 - DNA, 20 bp, synthetic construct
  misc_feature 1..20: note = chemically synthesized
  source 1..20: mol_type = other DNA
gtttggggcaactaggtctt

SEQ ID NO: 18060 - DNA, 20 bp, synthetic construct
  misc_feature 1..20: note = chemically synthesized
  source 1..20: mol_type = other DNA
tattgacaatttcaacataa

SEQ ID NO: 18061 - DNA, 20 bp, synthetic construct
  misc_feature 1..20: note = chemically synthesized
  source 1..20: mol_type = other DNA
tgacaatttcaacataatgg

SEQ ID NO: 18062 - DNA, 20 bp, synthetic construct
  misc_feature 1..20: note = chemically synthesized
  source 1..20: mol_type = other DNA
aatgaatgcctaatgactgt

SEQ ID NO: 18063 - DNA, 20 bp, synthetic construct
  misc_feature 1..20: note = chemically synthesized
  source 1..20: mol_type = other DNA
cctaatgactgtgagacaaa

SEQ ID NO: 18064 - DNA, 20 bp, synthetic construct
  misc_feature 1..20: note = chemically synthesized
  source 1..20: mol_type = other DNA
atgactgtgagacaaaaagt

SEQ ID NO: 18065 - DNA, 20 bp, synthetic construct
  misc_feature 1..20: note = chemically synthesized
  source 1..20: mol_type = other DNA
gacaaaaagtgagtaaaaaa

SEQ ID NO: 18066 - DNA, 20 bp, synthetic construct
  misc_feature 1..20: note = chemically synthesized
  source 1..20: mol_type = other DNA
aaaagtgagtaaaaaacagc

SEQ ID NO: 18067 - DNA, 20 bp, synthetic construct
  misc_feature 1..20: note = chemically synthesized
  source 1..20: mol_type = other DNA
aaagtgagtaaaaaacagct

SEQ ID NO: 18068 - DNA, 20 bp, synthetic construct
  misc_feature 1..20: note = chemically synthesized
  source 1..20: mol_type = other DNA
gagtaaaaaacagctgggca

SEQ ID NO: 18069 - DNA, 20 bp, synthetic construct
  misc_feature 1..20: note = chemically synthesized
  source 1..20: mol_type = other DNA
taaaaaacagctgggcacgg

SEQ ID NO: 18070 - DNA, 20 bp, synthetic construct
  misc_feature 1..20: note = chemically synthesized
  source 1..20: mol_type = other DNA
gtggctcatgcctataatcc

SEQ ID NO: 18071 - DNA, 20 bp, synthetic construct
  misc_feature 1..20: note = chemically synthesized
  source 1..20: mol_type = other DNA
tgcctataatcccagcactt

SEQ ID NO: 18072 - DNA, 20 bp, synthetic construct
  misc_feature 1..20: note = chemically synthesized
  source 1..20: mol_type = other DNA
gcctataatcccagcacttt

SEQ ID NO: 18073 - DNA, 20 bp, synthetic construct
  misc_feature 1..20: note = chemically synthesized
  source 1..20: mol_type = other DNA
ctataatcccagcactttgg

SEQ ID NO: 18074 - DNA, 20 bp, synthetic construct
  misc_feature 1..20: note = chemically synthesized
  source 1..20: mol_type = other DNA
tataatcccagcactttggg

SEQ ID NO: 18075 - DNA, 20 bp, synthetic construct
  misc_feature 1..20: note = chemically synthesized
  source 1..20: mol_type = other DNA
tcccagcactttgggaggcc

SEQ ID NO: 18076 - DNA, 20 bp, synthetic construct
  misc_feature 1..20: note = chemically synthesized
  source 1..20: mol_type = other DNA
cccagcactttgggaggccg

SEQ ID NO: 18077 - DNA, 20 bp, synthetic construct
  misc_feature 1..20: note = chemically synthesized
  source 1..20: mol_type = other DNA
cagcactttgggaggccgag

SEQ ID NO: 18078 - DNA, 20 bp, synthetic construct
  misc_feature 1..20: note = chemically synthesized
  source 1..20: mol_type = other DNA
agcactttgggaggccgagg

SEQ ID NO: 18079 - DNA, 20 bp, synthetic construct
  misc_feature 1..20: note = chemically synthesized
  source 1..20: mol_type = other DNA
gcactttgggaggccgagga

SEQ ID NO: 18080 - DNA, 20 bp, synthetic construct
  misc_feature 1..20: note = chemically synthesized
  source 1..20: mol_type = other DNA
ctttgggaggccgaggaggg

SEQ ID NO: 18081 - DNA, 20 bp, synthetic construct
  misc_feature 1..20: note = chemically synthesized
  source 1..20: mol_type = other DNA
ccgaggagggtggatcactt

SEQ ID NO: 18082 - DNA, 20 bp, synthetic construct
  misc_feature 1..20: note = chemically synthesized
  source 1..20: mol_type = other DNA
gagggtggatcacttgagtt

SEQ ID NO: 18083 - DNA, 20 bp, synthetic construct
  misc_feature 1..20: note = chemically synthesized
  source 1..20: mol_type = other DNA
agggtggatcacttgagttc

SEQ ID NO: 18084 - DNA, 20 bp, synthetic construct
  misc_feature 1..20: note = chemically synthesized
  source 1..20: mol_type = other DNA
ggtggatcacttgagttcag

SEQ ID NO: 18085 - DNA, 20 bp, synthetic construct
  misc_feature 1..20: note = chemically synthesized
  source 1..20: mol_type = other DNA
tcacttgagttcaggagttc

SEQ ID NO: 18086 - DNA, 20 bp, synthetic construct
  misc_feature 1..20: note = chemically synthesized
  source 1..20: mol_type = other DNA
tgagttcaggagttcgagac

SEQ ID NO: 18087 - DNA, 20 bp, synthetic construct
  misc_feature 1..20: note = chemically synthesized
  source 1..20: mol_type = other DNA
ttcaggagttcgagaccagc

SEQ ID NO: 18088 - DNA, 20 bp, synthetic construct
  misc_feature 1..20: note = chemically synthesized
  source 1..20: mol_type = other DNA
tcaggagttcgagaccagct

SEQ ID NO: 18089 - DNA, 20 bp, synthetic construct
  misc_feature 1..20: note = chemically synthesized
  source 1..20: mol_type = other DNA
cgagaccagctgggccaaca

SEQ ID NO: 18090 - DNA, 20 bp, synthetic construct
  misc_feature 1..20: note = chemically synthesized
  source 1..20: mol_type = other DNA
actactataattacaaaaat

SEQ ID NO: 18091 - DNA, 20 bp, synthetic construct
  misc_feature 1..20: note = chemically synthesized
  source 1..20: mol_type = other DNA
ctataattacaaaaataagc

SEQ ID NO: 18092 - DNA, 20 bp, synthetic construct
  misc_feature 1..20: note = chemically synthesized
  source 1..20: mol_type = other DNA
tataattacaaaaataagcc

SEQ ID NO: 18093 - DNA, 20 bp, synthetic construct
  misc_feature 1..20: note = chemically synthesized
  source 1..20: mol_type = other DNA
ttacaaaaataagccaggtg

SEQ ID NO: 18094 - DNA, 20 bp, synthetic construct
  misc_feature 1..20: note = chemically synthesized
  source 1..20: mol_type = other DNA
caaaaataagccaggtgtgg

SEQ ID NO: 18095 - DNA, 20 bp, synthetic construct
  misc_feature 1..20: note = chemically synthesized
  source 1..20: mol_type = other DNA
gtggcacatgatcataatcc

SEQ ID NO: 18096 - DNA, 20 bp, synthetic construct
  misc_feature 1..20: note = chemically synthesized
  source 1..20: mol_type = other DNA
gatcataatcccagctactc

SEQ ID NO: 18097 - DNA, 20 bp, synthetic construct
  misc_feature 1..20: note = chemically synthesized
  source 1..20: mol_type = other DNA
tcataatcccagctactctg

SEQ ID NO: 18098 - DNA, 20 bp, synthetic construct
  misc_feature 1..20: note = chemically synthesized
  source 1..20: mol_type = other DNA
cataatcccagctactctgg

SEQ ID NO: 18099 - DNA, 20 bp, synthetic construct
  misc_feature 1..20: note = chemically synthesized
  source 1..20: mol_type = other DNA
tcccagctactctggaggct

SEQ ID NO: 18100 - DNA, 20 bp, synthetic construct
  misc_feature 1..20: note = chemically synthesized
  source 1..20: mol_type = other DNA
cccagctactctggaggctg

SEQ ID NO: 18101 - DNA, 20 bp, synthetic construct
  misc_feature 1..20: note = chemically synthesized
  source 1..20: mol_type = other DNA
tactctggaggctgaggcat

SEQ ID NO: 18102 - DNA, 20 bp, synthetic construct
  misc_feature 1..20: note = chemically synthesized
  source 1..20: mol_type = other DNA
catgagaatcccctgaaccc

SEQ ID NO: 18103 - DNA, 20 bp, synthetic construct
  misc_feature 1..20: note = chemically synthesized
  source 1..20: mol_type = other DNA
gagaatcccctgaaccctgg

SEQ ID NO: 18104 - DNA, 20 bp, synthetic construct
  misc_feature 1..20: note = chemically synthesized
  source 1..20: mol_type = other DNA
gaatcccctgaaccctggtg

SEQ ID NO: 18105 - DNA, 20 bp, synthetic construct
  misc_feature 1..20: note = chemically synthesized
  source 1..20: mol_type = other DNA
aatcccctgaaccctggtgg

SEQ ID NO: 18106 - DNA, 20 bp, synthetic construct
  misc_feature 1..20: note = chemically synthesized
  source 1..20: mol_type = other DNA
tcccctgaaccctggtggag

SEQ ID NO: 18107 - DNA, 20 bp, synthetic construct
  misc_feature 1..20: note = chemically synthesized
  source 1..20: mol_type = other DNA
cccctgaaccctggtggagg

SEQ ID NO: 18108 - DNA, 20 bp, synthetic construct
  misc_feature 1..20: note = chemically synthesized
  source 1..20: mol_type = other DNA
aaccctggtggaggaggtcg

SEQ ID NO: 18109 - DNA, 20 bp, synthetic construct
  misc_feature 1..20: note = chemically synthesized
  source 1..20: mol_type = other DNA
ctggtggaggaggtcgcagt

SEQ ID NO: 18110 - DNA, 20 bp, synthetic construct
  misc_feature 1..20: note = chemically synthesized
  source 1..20: mol_type = other DNA
ggaggaggtcgcagtgagct

SEQ ID NO: 18111 - DNA, 20 bp, synthetic construct
  misc_feature 1..20: note = chemically synthesized
  source 1..20: mol_type = other DNA
gagatcgcaccactgcactc

SEQ ID NO: 18112 - DNA, 20 bp, synthetic construct
  misc_feature 1..20: note = chemically synthesized
  source 1..20: mol_type = other DNA
cgcaccactgcactctagcc

SEQ ID NO: 18113 - DNA, 20 bp, synthetic construct
  misc_feature 1..20: note = chemically synthesized
  source 1..20: mol_type = other DNA
gcaccactgcactctagcct

SEQ ID NO: 18114 - DNA, 20 bp, synthetic construct
  misc_feature 1..20: note = chemically synthesized
  source 1..20: mol_type = other DNA
ctgcactctagcctgggcaa

SEQ ID NO: 18115 - DNA, 20 bp, synthetic construct
  misc_feature 1..20: note = chemically synthesized
  source 1..20: mol_type = other DNA
gcactctagcctgggcaaca

SEQ ID NO: 18116 - DNA, 20 bp, synthetic construct
  misc_feature 1..20: note = chemically synthesized
  source 1..20: mol_type = other DNA
caacagagaaaaatctgtta

SEQ ID NO: 18117 - DNA, 20 bp, synthetic construct
  misc_feature 1..20: note = chemically synthesized
  source 1..20: mol_type = other DNA
acagagaaaaatctgttaaa

SEQ ID NO: 18118 - DNA, 20 bp, synthetic construct
  misc_feature 1..20: note = chemically synthesized
  source 1..20: mol_type = other DNA
agagaaaaatctgttaaaga

SEQ ID NO: 18119 - DNA, 20 bp, synthetic construct
  misc_feature 1..20: note = chemically synthesized
  source 1..20: mol_type = other DNA
agaaaaatctgttaaagaga

SEQ ID NO: 18120 - DNA, 20 bp, synthetic construct
  misc_feature 1..20: note = chemically synthesized
  source 1..20: mol_type = other DNA
aaaaatctgttaaagagaga

SEQ ID NO: 18121 - DNA, 20 bp, synthetic construct
  misc_feature 1..20: note = chemically synthesized
  source 1..20: mol_type = other DNA
aaatctgttaaagagagaga

SEQ ID NO: 18122 - DNA, 20 bp, synthetic construct
  misc_feature 1..20: note = chemically synthesized
  source 1..20: mol_type = other DNA
tgttaaagagagagagagaa

SEQ ID NO: 18123 - DNA, 20 bp, synthetic construct
  misc_feature 1..20: note = chemically synthesized
  source 1..20: mol_type = other DNA
aagagagagagagaaaagaa

SEQ ID NO: 18124 - DNA, 20 bp, synthetic construct
  misc_feature 1..20: note = chemically synthesized
  source 1..20: mol_type = other DNA
gagagagagaaaagaaaagt

SEQ ID NO: 18125 - DNA, 20 bp, synthetic construct
  misc_feature 1..20: note = chemically synthesized
  source 1..20: mol_type = other DNA
aagaaaagtgagtaaaaaac

SEQ ID NO: 18126 - DNA, 20 bp, synthetic construct
  misc_feature 1..20: note = chemically synthesized
  source 1..20: mol_type = other DNA
aaagtgagtaaaaaacaaga

SEQ ID NO: 18127 - DNA, 20 bp, synthetic construct
  misc_feature 1..20: note = chemically synthesized
  source 1..20: mol_type = other DNA
gagtaaaaaacaagaaagta

SEQ ID NO: 18128 - DNA, 20 bp, synthetic construct
  misc_feature 1..20: note = chemically synthesized
  source 1..20: mol_type = other DNA
ttattttatttatattgtta

SEQ ID NO: 18129 - DNA, 20 bp, synthetic construct
  misc_feature 1..20: note = chemically synthesized
  source 1..20: mol_type = other DNA
tttatttatattgttatggt

SEQ ID NO: 18130 - DNA, 20 bp, synthetic construct
  misc_feature 1..20: note = chemically synthesized
  source 1..20: mol_type = other DNA
ttatttatattgttatggtg

SEQ ID NO: 18131 - DNA, 20 bp, synthetic construct
  misc_feature 1..20: note = chemically synthesized
  source 1..20: mol_type = other DNA
attgttatggtgaggaaatt

SEQ ID NO: 18132 - DNA, 20 bp, synthetic construct
  misc_feature 1..20: note = chemically synthesized
  source 1..20: mol_type = other DNA
atggtgaggaaattgagcct

SEQ ID NO: 18133 - DNA, 20 bp, synthetic construct
  misc_feature 1..20: note = chemically synthesized
  source 1..20: mol_type = other DNA
gaggaaattgagccttagac

SEQ ID NO: 18134 - DNA, 20 bp, synthetic construct
  misc_feature 1..20: note = chemically synthesized
  source 1..20: mol_type = other DNA
aattgagccttagacaagtt

SEQ ID NO: 18135 - DNA, 20 bp, synthetic construct
  misc_feature 1..20: note = chemically synthesized
  source 1..20: mol_type = other DNA
ccttagacaagttaagcaat

SEQ ID NO: 18136 - DNA, 20 bp, synthetic construct
  misc_feature 1..20: note = chemically synthesized
  source 1..20: mol_type = other DNA
acaagttaagcaattagcct

SEQ ID NO: 18137 - DNA, 20 bp, synthetic construct
  misc_feature 1..20: note = chemically synthesized
  source 1..20: mol_type = other DNA
cgcaactaatatgtgtcata

SEQ ID NO: 18138 - DNA, 20 bp, synthetic construct
  misc_feature 1..20: note = chemically synthesized
  source 1..20: mol_type = other DNA
gcaactaatatgtgtcataa

SEQ ID NO: 18139 - DNA, 20 bp, synthetic construct
  misc_feature 1..20: note = chemically synthesized
  source 1..20: mol_type = other DNA
gtcataaaggaattcaaaca

SEQ ID NO: 18140 - DNA, 20 bp, synthetic construct
  misc_feature 1..20: note = chemically synthesized
  source 1..20: mol_type = other DNA
tcataaaggaattcaaacac

SEQ ID NO: 18141 - DNA, 20 bp, synthetic construct
  misc_feature 1..20: note = chemically synthesized
  source 1..20: mol_type = other DNA
gtttatctaacccaaaaccc

SEQ ID NO: 18142 - DNA, 20 bp, synthetic construct
  misc_feature 1..20: note = chemically synthesized
  source 1..20: mol_type = other DNA
ctcaaccaatgtccatcaaa

SEQ ID NO: 18143 - DNA, 20 bp, synthetic construct
  misc_feature 1..20: note = chemically synthesized
  source 1..20: mol_type = other DNA
caatgtccatcaaatggaaa

SEQ ID NO: 18144 - DNA, 20 bp, synthetic construct
  misc_feature 1..20: note = chemically synthesized
  source 1..20: mol_type = other DNA
gcttcccgtatttgaatcct

SEQ ID NO: 18145 - DNA, 20 bp, synthetic construct
  misc_feature 1..20: note = chemically synthesized
  source 1..20: mol_type = other DNA
atccttggcttttcttacct

SEQ ID NO: 18146 - DNA, 20 bp, synthetic construct
  misc_feature 1..20: note = chemically synthesized
  source 1..20: mol_type = other DNA
ggcttttcttacctgagcca

SEQ ID NO: 18147 - DNA, 20 bp, synthetic construct
  misc_feature 1..20: note = chemically synthesized
  source 1..20: mol_type = other DNA
gagccacagttttctctttg

SEQ ID NO: 18148 - DNA, 20 bp, synthetic construct
  misc_feature 1..20: note = chemically synthesized
  source 1..20: mol_type = other DNA
gttttctctttgcggtttct

SEQ ID NO: 18149 - DNA, 20 bp, synthetic construct
  misc_feature 1..20: note = chemically synthesized
  source 1..20: mol_type = other DNA
tctgagcatgacctgaatat

SEQ ID NO: 18150 - DNA, 20 bp, synthetic construct
  misc_feature 1..20: note = chemically synthesized
  source 1..20: mol_type = other DNA
ttggttgtttgctatatcct

SEQ ID NO: 18151 - DNA, 20 bp, synthetic construct
  misc_feature 1..20: note = chemically synthesized
  source 1..20: mol_type = other DNA
tatttactcttaattctgat

SEQ ID NO: 18152 - DNA, 20 bp, synthetic construct
  misc_feature 1..20: note = chemically synthesized
  source 1..20: mol_type = other DNA
tttactcttaattctgatga

SEQ ID NO: 18153 - DNA, 20 bp, synthetic construct
  misc_feature 1..20: note = chemically synthesized
  source 1..20: mol_type = other DNA
ttgttacacaaacaactctc

SEQ ID NO: 18154 - DNA, 20 bp, synthetic construct
  misc_feature 1..20: note = chemically synthesized
  source 1..20: mol_type = other DNA
tgttacacaaacaactctca

SEQ ID NO: 18155 - DNA, 20 bp, synthetic construct
  misc_feature 1..20: note = chemically synthesized
  source 1..20: mol_type = other DNA
gttacacaaacaactctcaa

SEQ ID NO: 18156 - DNA, 20 bp, synthetic construct
  misc_feature 1..20: note = chemically synthesized
  source 1..20: mol_type = other DNA
ttacacaaacaactctcaag

SEQ ID NO: 18157 - DNA, 20 bp, synthetic construct
  misc_feature 1..20: note = chemically synthesized
  source 1..20: mol_type = other DNA
caactctcaaggggttattc

SEQ ID NO: 18158 - DNA, 20 bp, synthetic construct
  misc_feature 1..20: note = chemically synthesized
  source 1..20: mol_type = other DNA
tattctagctcatttccaca

SEQ ID NO: 18159 - DNA, 20 bp, synthetic construct
  misc_feature 1..20: note = chemically synthesized
  source 1..20: mol_type = other DNA
attctagctcatttccacat

SEQ ID NO: 18160 - DNA, 20 bp, synthetic construct
  misc_feature 1..20: note = chemically synthesized
  source 1..20: mol_type = other DNA
tcatttccacataggatatt

SEQ ID NO: 18161 - DNA, 20 bp, synthetic construct
  misc_feature 1..20: note = chemically synthesized
  source 1..20: mol_type = other DNA
catttccacataggatattt

SEQ ID NO: 18162 - DNA, 20 bp, synthetic construct
  misc_feature 1..20: note = chemically synthesized
  source 1..20: mol_type = other DNA
ccacataggatatttgggaa

SEQ ID NO: 18163 - DNA, 20 bp, synthetic construct
  misc_feature 1..20: note = chemically synthesized
  source 1..20: mol_type = other DNA
ttctcttttcctccccaacc

SEQ ID NO: 18164 - DNA, 20 bp, synthetic construct
  misc_feature 1..20: note = chemically synthesized
  source 1..20: mol_type = other DNA
tctcttttcctccccaacct

SEQ ID NO: 18165 - DNA, 20 bp, synthetic construct
  misc_feature 1..20: note = chemically synthesized
  source 1..20: mol_type = other DNA
ttttcctccccaacctggga

SEQ ID NO: 18166 - DNA, 20 bp, synthetic construct
  misc_feature 1..20: note = chemically synthesized
  source 1..20: mol_type = other DNA
tccccaacctgggaaagatc

SEQ ID NO: 18167 - DNA, 20 bp, synthetic construct
  misc_feature 1..20: note = chemically synthesized
  source 1..20: mol_type = other DNA
ccccaacctgggaaagatct

SEQ ID NO: 18168 - DNA, 20 bp, synthetic construct
  misc_feature 1..20: note = chemically synthesized
  source 1..20: mol_type = other DNA
aagatctgggccattgaaac

SEQ ID NO: 18169 - DNA, 20 bp, synthetic construct
  misc_feature 1..20: note = chemically synthesized
  source 1..20: mol_type = other DNA
gccattgaaactggtcccca

SEQ ID NO: 18170 - DNA, 20 bp, synthetic construct
  misc_feature 1..20: note = chemically synthesized
  source 1..20: mol_type = other DNA
catggcctttattttttctt

SEQ ID NO: 18171 - DNA, 20 bp, synthetic construct
  misc_feature 1..20: note = chemically synthesized
  source 1..20: mol_type = other DNA
ggcctttattttttctttgg

SEQ ID NO: 18172 - DNA, 20 bp, synthetic construct
  misc_feature 1..20: note = chemically synthesized
  source 1..20: mol_type = other DNA
gcctttattttttctttgga

SEQ ID NO: 18173 - DNA, 20 bp, synthetic construct
  misc_feature 1..20: note = chemically synthesized
  source 1..20: mol_type = other DNA
ctttattttttctttggaag

SEQ ID NO: 18174 - DNA, 20 bp, synthetic construct
  misc_feature 1..20: note = chemically synthesized
  source 1..20: mol_type = other DNA
ttattttttctttggaagga

SEQ ID NO: 18175 - DNA, 20 bp, synthetic construct
  misc_feature 1..20: note = chemically synthesized
  source 1..20: mol_type = other DNA
tctttggaaggagagtctct

SEQ ID NO: 18176 - DNA, 20 bp, synthetic construct
  misc_feature 1..20: note = chemically synthesized
  source 1..20: mol_type = other DNA
tttggaaggagagtctctaa

SEQ ID NO: 18177 - DNA, 20 bp, synthetic construct
  misc_feature 1..20: note = chemically synthesized
  source 1..20: mol_type = other DNA
ggaaggagagtctctaagag

SEQ ID NO: 18178 - DNA, 20 bp, synthetic construct
  misc_feature 1..20: note = chemically synthesized
  source 1..20: mol_type = other DNA
agaagttgtgtctctaacat

SEQ ID NO: 18179 - DNA, 20 bp, synthetic construct
  misc_feature 1..20: note = chemically synthesized
  source 1..20: mol_type = other DNA
ttgtgtctctaacatcagat

SEQ ID NO: 18180 - DNA, 20 bp, synthetic construct
  misc_feature 1..20: note = chemically synthesized
  source 1..20: mol_type = other DNA
tgtgtctctaacatcagatg

SEQ ID NO: 18181 - DNA, 20 bp, synthetic construct
  misc_feature 1..20: note = chemically synthesized
  source 1..20: mol_type = other DNA
agatgaggcatgaccgaaat

SEQ ID NO: 18182 - DNA, 20 bp, synthetic construct
  misc_feature 1..20: note = chemically synthesized
  source 1..20: mol_type = other DNA
gaccgaaatgagtcactctc

SEQ ID NO: 18183 - DNA, 20 bp, synthetic construct
  misc_feature 1..20: note = chemically synthesized
  source 1..20: mol_type = other DNA
gtcactctcaagtgttccat

SEQ ID NO: 18184 - DNA, 20 bp, synthetic construct
  misc_feature 1..20: note = chemically synthesized
  source 1..20: mol_type = other DNA
ctcaagtgttccattggtct

SEQ ID NO: 18185 - DNA, 20 bp, synthetic construct
  misc_feature 1..20: note = chemically synthesized
  source 1..20: mol_type = other DNA
caagtgttccattggtctta

SEQ ID NO: 18186 - DNA, 20 bp, synthetic construct
  misc_feature 1..20: note = chemically synthesized
  source 1..20: mol_type = other DNA
gtgttccattggtcttagag

SEQ ID NO: 18187 - DNA, 20 bp, synthetic construct
  misc_feature 1..20: note = chemically synthesized
  source 1..20: mol_type = other DNA
tgttccattggtcttagagt

SEQ ID NO: 18188 - DNA, 20 bp, synthetic construct
  misc_feature 1..20: note = chemically synthesized
  source 1..20: mol_type = other DNA
tccattggtcttagagtggg

SEQ ID NO: 18189 - DNA, 20 bp, synthetic construct
  misc_feature 1..20: note = chemically synthesized
  source 1..20: mol_type = other DNA
tggtcttagagtgggaagac

SEQ ID NO: 18190 - DNA, 20 bp, synthetic construct
  misc_feature 1..20: note = chemically synthesized
  source 1..20: mol_type = other DNA
tttgtaaatgttaacatttg

SEQ ID NO: 18191 - DNA, 20 bp, synthetic construct
  misc_feature 1..20: note = chemically synthesized
  source 1..20: mol_type = other DNA
caaccctttacaaaatcctt

SEQ ID NO: 18192 - DNA, 20 bp, synthetic construct
  misc_feature 1..20: note = chemically synthesized
  source 1..20: mol_type = other DNA
tcgtcttgatgattattcat

SEQ ID NO: 18193 - DNA, 20 bp, synthetic construct
  misc_feature 1..20: note = chemically synthesized
  source 1..20: mol_type = other DNA
aaaactcactaccctaccct

SEQ ID NO: 18194 - DNA, 20 bp, synthetic construct
  misc_feature 1..20: note = chemically synthesized
  source 1..20: mol_type = other DNA
ctatctcattcatatatatg

SEQ ID NO: 18195 - DNA, 20 bp, synthetic construct
  misc_feature 1..20: note = chemically synthesized
  source 1..20: mol_type = other DNA
tatctcattcatatatatgt

SEQ ID NO: 18196 - DNA, 20 bp, synthetic construct
  misc_feature 1..20: note = chemically synthesized
  source 1..20: mol_type = other DNA
gtgggtttcatttaattatt

SEQ ID NO: 18197 - DNA, 20 bp, synthetic construct
  misc_feature 1..20: note = chemically synthesized
  source 1..20: mol_type = other DNA
ttatttagtatatgtatata

SEQ ID NO: 18198 - DNA, 20 bp, synthetic construct
  misc_feature 1..20: note = chemically synthesized
  source 1..20: mol_type = other DNA
actatcaatatatgtatgca

SEQ ID NO: 18199 - DNA, 20 bp, synthetic construct
  misc_feature 1..20: note = chemically synthesized
  source 1..20: mol_type = other DNA
ctatcaatatatgtatgcat

SEQ ID NO: 18200 - DNA, 20 bp, synthetic construct
  misc_feature 1..20: note = chemically synthesized
  source 1..20: mol_type = other DNA
tgtgtgtatatatatattca

SEQ ID NO: 18201 - DNA, 20 bp, synthetic construct
  misc_feature 1..20: note = chemically synthesized
  source 1..20: mol_type = other DNA
tgtatatatatattcacaga

SEQ ID NO: 18202 - DNA, 20 bp, synthetic construct
  misc_feature 1..20: note = chemically synthesized
  source 1..20: mol_type = other DNA
tatatatatattcacagaca

SEQ ID NO: 18203 - DNA, 20 bp, synthetic construct
  misc_feature 1..20: note = chemically synthesized
  source 1..20: mol_type = other DNA
tatatattcacagacagaga

SEQ ID NO: 18204 - DNA, 20 bp, synthetic construct
  misc_feature 1..20: note = chemically synthesized
  source 1..20: mol_type = other DNA
tattcacagacagagacagt

SEQ ID NO: 18205 - DNA, 20 bp, synthetic construct
  misc_feature 1..20: note = chemically synthesized
  source 1..20: mol_type = other DNA
ttcacagacagagacagtga

SEQ ID NO: 18206 - DNA, 20 bp, synthetic construct
  misc_feature 1..20: note = chemically synthesized
  source 1..20: mol_type = other DNA
cacagacagagacagtgaga

SEQ ID NO: 18207 - DNA, 20 bp, synthetic construct
  misc_feature 1..20: note = chemically synthesized
  source 1..20: mol_type = other DNA
cagacagagacagtgagaga

SEQ ID NO: 18208 - DNA, 20 bp, synthetic construct
  misc_feature 1..20: note = chemically synthesized
  source 1..20: mol_type = other DNA
gacagagacagtgagagaga

SEQ ID NO: 18209 - DNA, 20 bp, synthetic construct
  misc_feature 1..20: note = chemically synthesized
  source 1..20: mol_type = other DNA
cagagacagtgagagagaga

SEQ ID NO: 18210 - DNA, 20 bp, synthetic construct
  misc_feature 1..20: note = chemically synthesized
  source 1..20: mol_type = other DNA
gagacagtgagagagagaga

SEQ ID NO: 18211 - DNA, 20 bp, synthetic construct
  misc_feature 1..20: note = chemically synthesized
  source 1..20: mol_type = other DNA
taatatctactccttatatt

SEQ ID NO: 18212 - DNA, 20 bp, synthetic construct
  misc_feature 1..20: note = chemically synthesized
  source 1..20: mol_type = other DNA
aatatctactccttatattt

SEQ ID NO: 18213 - DNA, 20 bp, synthetic construct
  misc_feature 1..20: note = chemically synthesized
  source 1..20: mol_type = other DNA
ttatatttaggtctgatctc

SEQ ID NO: 18214 - DNA, 20 bp, synthetic construct
  misc_feature 1..20: note = chemically synthesized
  source 1..20: mol_type = other DNA
agaataaaataaccatatat

SEQ ID NO: 18215 - DNA, 20 bp, synthetic construct
  misc_feature 1..20: note = chemically synthesized
  source 1..20: mol_type = other DNA
attcatacataatttttttc

SEQ ID NO: 18216 - DNA, 20 bp, synthetic construct
  misc_feature 1..20: note = chemically synthesized
  source 1..20: mol_type = other DNA
aatttttttctagatgtata

SEQ ID NO: 18217 - DNA, 20 bp, synthetic construct
  misc_feature 1..20: note = chemically synthesized
  source 1..20: mol_type = other DNA
atatctgcattaaaaaccct

SEQ ID NO: 18218 - DNA, 20 bp, synthetic construct
  misc_feature 1..20: note = chemically synthesized
  source 1..20: mol_type = other DNA
ccctaagacttctttcctga

SEQ ID NO: 18219 - DNA, 20 bp, synthetic construct
  misc_feature 1..20: note = chemically synthesized
  source 1..20: mol_type = other DNA
cctaagacttctttcctgat

SEQ ID NO: 18220 - DNA, 20 bp, synthetic construct
  misc_feature 1..20: note = chemically synthesized
  source 1..20: mol_type = other DNA
gatgggtgaaccaatatcaa

SEQ ID NO: 18221 - DNA, 20 bp, synthetic construct
  misc_feature 1..20: note = chemically synthesized
  source 1..20: mol_type = other DNA
ccttattgaacataataatc

SEQ ID NO: 18222 - DNA, 20 bp, synthetic construct
  misc_feature 1..20: note = chemically synthesized
  source 1..20: mol_type = other DNA
taatccagatgttgtcatat

SEQ ID NO: 18223 - DNA, 20 bp, synthetic construct
  misc_feature 1..20: note = chemically synthesized
  source 1..20: mol_type = other DNA
tctgaaatctcttttttcat

SEQ ID NO: 18224 - DNA, 20 bp, synthetic construct
  misc_feature 1..20: note = chemically synthesized
  source 1..20: mol_type = other DNA
ttttcattggattatgtgct

SEQ ID NO: 18225 - DNA, 20 bp, synthetic construct
  misc_feature 1..20: note = chemically synthesized
  source 1..20: mol_type = other DNA
tatgtgctgagtttctattt

SEQ ID NO: 18226 - DNA, 20 bp, synthetic construct
  misc_feature 1..20: note = chemically synthesized
  source 1..20: mol_type = other DNA
gtgctgagtttctatttaag

SEQ ID NO: 18227 - DNA, 20 bp, synthetic construct
  misc_feature 1..20: note = chemically synthesized
  source 1..20: mol_type = other DNA
agtttctatttaagtagtct

SEQ ID NO: 18228 - DNA, 20 bp, synthetic construct
  misc_feature 1..20: note = chemically synthesized
  source 1..20: mol_type = other DNA
ttaagtagtctaagatcgtg

SEQ ID NO: 18229 - DNA, 20 bp, synthetic construct
  misc_feature 1..20: note = chemically synthesized
  source 1..20: mol_type = other DNA
atctcaaaacatgtcaaatt

SEQ ID NO: 18230 - DNA, 20 bp, synthetic construct
  misc_feature 1..20: note = chemically synthesized
  source 1..20: mol_type = other DNA
acatgtcaaattcagtcttt

SEQ ID NO: 18231 - DNA, 20 bp, synthetic construct
  misc_feature 1..20: note = chemically synthesized
  source 1..20: mol_type = other DNA
tcagtctttcagatttaaaa

SEQ ID NO: 18232 - DNA, 20 bp, synthetic construct
  misc_feature 1..20: note = chemically synthesized
  source 1..20: mol_type = other DNA
cataatatatgtgacactcg

SEQ ID NO: 18233 - DNA, 20 bp, synthetic construct
  misc_feature 1..20: note = chemically synthesized
  source 1..20: mol_type = other DNA
atatatgtgacactcgcagc

SEQ ID NO: 18234 - DNA, 20 bp, synthetic construct
  misc_feature 1..20: note = chemically synthesized
  source 1..20: mol_type = other DNA
tactatcacctgtttatact

SEQ ID NO: 18235 - DNA, 20 bp, synthetic construct
  misc_feature 1..20: note = chemically synthesized
  source 1..20: mol_type = other DNA
actatcacctgtttatactt

SEQ ID NO: 18236 - DNA, 20 bp, synthetic construct
  misc_feature 1..20: note = chemically synthesized
  source 1..20: mol_type = other DNA
ctatcacctgtttatactta

SEQ ID NO: 18237 - DNA, 20 bp, synthetic construct
  misc_feature 1..20: note = chemically synthesized
  source 1..20: mol_type = other DNA
tatcacctgtttatacttag

SEQ ID NO: 18238 - DNA, 20 bp, synthetic construct
  misc_feature 1..20: note = chemically synthesized
  source 1..20: mol_type = other DNA
taaatatcctctcatatatt

SEQ ID NO: 18239 - DNA, 20 bp, synthetic construct
  misc_feature 1..20: note = chemically synthesized
  source 1..20: mol_type = other DNA
aaatatcctctcatatattc

SEQ ID NO: 18240 - DNA, 20 bp, synthetic construct
  misc_feature 1..20: note = chemically synthesized
  source 1..20: mol_type = other DNA
atcctctcatatattcaggt

SEQ ID NO: 18241 - DNA, 20 bp, synthetic construct
  misc_feature 1..20: note = chemically synthesized
  source 1..20: mol_type = other DNA
attttgccaaaacgtgattt

SEQ ID NO: 18242 - DNA, 20 bp, synthetic construct
  misc_feature 1..20: note = chemically synthesized
  source 1..20: mol_type = other DNA
ttttgccaaaacgtgatttt

SEQ ID NO: 18243 - DNA, 20 bp, synthetic construct
  misc_feature 1..20: note = chemically synthesized
  source 1..20: mol_type = other DNA
aaacgtgattttaggtcata

SEQ ID NO: 18244 - DNA, 20 bp, synthetic construct
  misc_feature 1..20: note = chemically synthesized
  source 1..20: mol_type = other DNA
atacagcaataaatgcattc

SEQ ID NO: 18245 - DNA, 20 bp, synthetic construct
  misc_feature 1..20: note = chemically synthesized
  source 1..20: mol_type = other DNA
gcattccagaattcattttg

SEQ ID NO: 18246 - DNA, 20 bp, synthetic construct
  misc_feature 1..20: note = chemically synthesized
  source 1..20: mol_type = other DNA
tttgcagaacctgttgattc

SEQ ID NO: 18247 - DNA, 20 bp, synthetic construct
  misc_feature 1..20: note = chemically synthesized
  source 1..20: mol_type = other DNA
acctgttgattctagacttg

SEQ ID NO: 18248 - DNA, 20 bp, synthetic construct
  misc_feature 1..20: note = chemically synthesized
  source 1..20: mol_type = other DNA
ttgattctagacttgtagct

SEQ ID NO: 18249 - DNA, 20 bp, synthetic construct
  misc_feature 1..20: note = chemically synthesized
  source 1..20: mol_type = other DNA
attctagacttgtagctaag

SEQ ID NO: 18250 - DNA, 20 bp, synthetic construct
  misc_feature 1..20: note = chemically synthesized
  source 1..20: mol_type = other DNA
gacttgtagctaagaagtga

SEQ ID NO: 18251 - DNA, 20 bp, synthetic construct
  misc_feature 1..20: note = chemically synthesized
  source 1..20: mol_type = other DNA
gtagctaagaagtgacggct

SEQ ID NO: 18252 - DNA, 20 bp, synthetic construct
  misc_feature 1..20: note = chemically synthesized
  source 1..20: mol_type = other DNA
tggtaaataaccatatcata

SEQ ID NO: 18253 - DNA, 20 bp, synthetic construct
  misc_feature 1..20: note = chemically synthesized
  source 1..20: mol_type = other DNA
aaataaccatatcataaagt

SEQ ID NO: 18254 - DNA, 20 bp, synthetic construct
  misc_feature 1..20: note = chemically synthesized
  source 1..20: mol_type = other DNA
gtcagttctctttgtactca

SEQ ID NO: 18255 - DNA, 20 bp, synthetic construct
  misc_feature 1..20: note = chemically synthesized
  source 1..20: mol_type = other DNA
cagtaaaacaaaacttctga

SEQ ID NO: 18256 - DNA, 20 bp, synthetic construct
  misc_feature 1..20: note = chemically synthesized
  source 1..20: mol_type = other DNA
caaaacttctgaaagatttt

SEQ ID NO: 18257 - DNA, 20 bp, synthetic construct
  misc_feature 1..20: note = chemically synthesized
  source 1..20: mol_type = other DNA
acttctgaaagattttaagt

SEQ ID NO: 18258 - DNA, 20 bp, synthetic construct
  misc_feature 1..20: note = chemically synthesized
  source 1..20: mol_type = other DNA
ttttaagtgagtgacatttt

SEQ ID NO: 18259 - DNA, 20 bp, synthetic construct
  misc_feature 1..20: note = chemically synthesized
  source 1..20: mol_type = other DNA
gacattttcagtgcttaaaa

SEQ ID NO: 18260 - DNA, 20 bp, synthetic construct
  misc_feature 1..20: note = chemically synthesized
  source 1..20: mol_type = other DNA
cattttcagtgcttaaaatg

SEQ ID NO: 18261 - DNA, 20 bp, synthetic construct
  misc_feature 1..20: note = chemically synthesized
  source 1..20: mol_type = other DNA
ttaaaatggagcttaacata

SEQ ID NO: 18262 - DNA, 20 bp, synthetic construct
  misc_feature 1..20: note = chemically synthesized
  source 1..20: mol_type = other DNA
aaatggagcttaacatatag

SEQ ID NO: 18263 - DNA, 20 bp, synthetic construct
  misc_feature 1..20: note = chemically synthesized
  source 1..20: mol_type = other DNA
aatggagcttaacatatagt

SEQ ID NO: 18264 - DNA, 20 bp, synthetic construct
  misc_feature 1..20: note = chemically synthesized
  source 1..20: mol_type = other DNA
cttaacatatagtgggtgct

SEQ ID NO: 18265 - DNA, 20 bp, synthetic construct
  misc_feature 1..20: note = chemically synthesized
  source 1..20: mol_type = other DNA
acatatagtgggtgctcagt

SEQ ID NO: 18266 - DNA, 20 bp, synthetic construct
  misc_feature 1..20: note = chemically synthesized
  source 1..20: mol_type = other DNA
agtgggtgctcagtaagtac

SEQ ID NO: 18267 - DNA, 20 bp, synthetic construct
  misc_feature 1..20: note = chemically synthesized
  source 1..20: mol_type = other DNA
gtgctcagtaagtactagtt

SEQ ID NO: 18268 - DNA, 20 bp, synthetic construct
  misc_feature 1..20: note = chemically synthesized
  source 1..20: mol_type = other DNA
tgaatgctattcttgtgatc

SEQ ID NO: 18269 - DNA, 20 bp, synthetic construct
  misc_feature 1..20: note = chemically synthesized
  source 1..20: mol_type = other DNA
tattcttgtgatcaagccat

SEQ ID NO: 18270 - DNA, 20 bp, synthetic construct
  misc_feature 1..20: note = chemically synthesized
  source 1..20: mol_type = other DNA
tgatcaagccattggttttg

SEQ ID NO: 18271 - DNA, 20 bp, synthetic construct
  misc_feature 1..20: note = chemically synthesized
  source 1..20: mol_type = other DNA
ttggttttgtagccaaattg

SEQ ID NO: 18272 - DNA, 20 bp, synthetic construct
  misc_feature 1..20: note = chemically synthesized
  source 1..20: mol_type = other DNA
cctctacatctgtttgtaat

SEQ ID NO: 18273 - DNA, 20 bp, synthetic construct
  misc_feature 1..20: note = chemically synthesized
  source 1..20: mol_type = other DNA
tctgtttgtaataagattac

SEQ ID NO: 18274 - DNA, 20 bp, synthetic construct
  misc_feature 1..20: note = chemically synthesized
  source 1..20: mol_type = other DNA
tgtaataagattactagttc

SEQ ID NO: 18275 - DNA, 20 bp, synthetic construct
  misc_feature 1..20: note = chemically synthesized
  source 1..20: mol_type = other DNA
atctccttttctttattgtt

SEQ ID NO: 18276 - DNA, 20 bp, synthetic construct
  misc_feature 1..20: note = chemically synthesized
  source 1..20: mol_type = other DNA
tctaatttttacatcaatca

SEQ ID NO: 18277 - DNA, 20 bp, synthetic construct
  misc_feature 1..20: note = chemically synthesized
  source 1..20: mol_type = other DNA
tttttacatcaatcatggtt

SEQ ID NO: 18278 - DNA, 20 bp, synthetic construct
  misc_feature 1..20: note = chemically synthesized
  source 1..20: mol_type = other DNA
tttacatcaatcatggttca

SEQ ID NO: 18279 - DNA, 20 bp, synthetic construct
  misc_feature 1..20: note = chemically synthesized
  source 1..20: mol_type = other DNA
gaaaaatccataacaacatc

SEQ ID NO: 18280 - DNA, 20 bp, synthetic construct
  misc_feature 1..20: note = chemically synthesized
  source 1..20: mol_type = other DNA
aaatccataacaacatcaag

SEQ ID NO: 18281 - DNA, 20 bp, synthetic construct
  misc_feature 1..20: note = chemically synthesized
  source 1..20: mol_type = other DNA
ccataacaacatcaagaaga

SEQ ID NO: 18282 - DNA, 20 bp, synthetic construct
  misc_feature 1..20: note = chemically synthesized
  source 1..20: mol_type = other DNA
tcaagaagaaagattttttg

SEQ ID NO: 18283 - DNA, 20 bp, synthetic construct
  misc_feature 1..20: note = chemically synthesized
  source 1..20: mol_type = other DNA
tcttttctttcctctctttt

SEQ ID NO: 18284 - DNA, 20 bp, synthetic construct
  misc_feature 1..20: note = chemically synthesized
  source 1..20: mol_type = other DNA
ttctttcctctcttttgaga

SEQ ID NO: 18285 - DNA, 20 bp, synthetic construct
  misc_feature 1..20: note = chemically synthesized
  source 1..20: mol_type = other DNA
cagtgtcttgctctgtcacc

SEQ ID NO: 18286 - DNA, 20 bp, synthetic construct
  misc_feature 1..20: note = chemically synthesized
  source 1..20: mol_type = other DNA
agtgtcttgctctgtcaccc

SEQ ID NO: 18287 - DNA, 20 bp, synthetic construct
  misc_feature 1..20: note = chemically synthesized
  source 1..20: mol_type = other DNA
tgtcttgctctgtcacccag

SEQ ID NO: 18288 - DNA, 20 bp, synthetic construct
  misc_feature 1..20: note = chemically synthesized
  source 1..20: mol_type = other DNA
gtcttgctctgtcacccagg

SEQ ID NO: 18289 - DNA, 20 bp, synthetic construct
  misc_feature 1..20: note = chemically synthesized
  source 1..20: mol_type = other DNA
tcttgctctgtcacccagga

SEQ ID NO: 18290 - DNA, 20 bp, synthetic construct
  misc_feature 1..20: note = chemically synthesized
  source 1..20: mol_type = other DNA
ttgctctgtcacccaggagg

SEQ ID NO: 18291 - DNA, 20 bp, synthetic construct
  misc_feature 1..20: note = chemically synthesized
  source 1..20: mol_type = other DNA
ctgtcacccaggagggagtg

SEQ ID NO: 18292 - DNA, 20 bp, synthetic construct
  misc_feature 1..20: note = chemically synthesized
  source 1..20: mol_type = other DNA
tcacccaggagggagtgcag

SEQ ID NO: 18293 - DNA, 20 bp, synthetic construct
  misc_feature 1..20: note = chemically synthesized
  source 1..20: mol_type = other DNA
ccaggagggagtgcagtggt

SEQ ID NO: 18294 - DNA, 20 bp, synthetic construct
  misc_feature 1..20: note = chemically synthesized
  source 1..20: mol_type = other DNA
ggagtgcagtggtgagatca

SEQ ID NO: 18295 - DNA, 20 bp, synthetic construct
  misc_feature 1..20: note = chemically synthesized
  source 1..20: mol_type = other DNA
ggtgagatcatagtttactg

SEQ ID NO: 18296 - DNA, 20 bp, synthetic construct
  misc_feature 1..20: note = chemically synthesized
  source 1..20: mol_type = other DNA
tcatagtttactgcagcctc

SEQ ID NO: 18297 - DNA, 20 bp, synthetic construct
  misc_feature 1..20: note = chemically synthesized
  source 1..20: mol_type = other DNA
ttactgcagcctcaagcttt

SEQ ID NO: 18298 - DNA, 20 bp, synthetic construct
  misc_feature 1..20: note = chemically synthesized
  source 1..20: mol_type = other DNA
tactgcagcctcaagctttt

SEQ ID NO: 18299 - DNA, 20 bp, synthetic construct
  misc_feature 1..20: note = chemically synthesized
  source 1..20: mol_type = other DNA
agcctcaagcttttaggctt

SEQ ID NO: 18300 - DNA, 20 bp, synthetic construct
  misc_feature 1..20: note = chemically synthesized
  source 1..20: mol_type = other DNA
cttaagtgatttttacacct

SEQ ID NO: 18301 - DNA, 20 bp, synthetic construct
  misc_feature 1..20: note = chemically synthesized
  source 1..20: mol_type = other DNA
ttacacctcagcctcccaaa

SEQ ID NO: 18302 - DNA, 20 bp, synthetic construct
  misc_feature 1..20: note = chemically synthesized
  source 1..20: mol_type = other DNA
ccaaatagctgtgaccacat

SEQ ID NO: 18303 - DNA, 20 bp, synthetic construct
  misc_feature 1..20: note = chemically synthesized
  source 1..20: mol_type = other DNA
aatagctgtgaccacatgag

SEQ ID NO: 18304 - DNA, 20 bp, synthetic construct
  misc_feature 1..20: note = chemically synthesized
  source 1..20: mol_type = other DNA
tagctgtgaccacatgagaa

SEQ ID NO: 18305 - DNA, 20 bp, synthetic construct
  misc_feature 1..20: note = chemically synthesized
  source 1..20: mol_type = other DNA
ttatgtgtttttttccttct

SEQ ID NO: 18306 - DNA, 20 bp, synthetic construct
  misc_feature 1..20: note = chemically synthesized
  source 1..20: mol_type = other DNA
ttttttccttcttagtactt

SEQ ID NO: 18307 - DNA, 20 bp, synthetic construct
  misc_feature 1..20: note = chemically synthesized
  source 1..20: mol_type = other DNA
cttcttagtactttggctgc

SEQ ID NO: 18308 - DNA, 20 bp, synthetic construct
  misc_feature 1..20: note = chemically synthesized
  source 1..20: mol_type = other DNA
ttagtactttggctgcaagt

SEQ ID NO: 18309 - DNA, 20 bp, synthetic construct
  misc_feature 1..20: note = chemically synthesized
  source 1..20: mol_type = other DNA
tttggctgcaagtgagtctc

SEQ ID NO: 18310 - DNA, 20 bp, synthetic construct
  misc_feature 1..20: note = chemically synthesized
  source 1..20: mol_type = other DNA
ttggctgcaagtgagtctca

SEQ ID NO: 18311 - DNA, 20 bp, synthetic construct
  misc_feature 1..20: note = chemically synthesized
  source 1..20: mol_type = other DNA
ctgcaagtgagtctcaaggt

SEQ ID NO: 18312 - DNA, 20 bp, synthetic construct
  misc_feature 1..20: note = chemically synthesized
  source 1..20: mol_type = other DNA
taagatgttttaaccactta

SEQ ID NO: 18313 - DNA, 20 bp, synthetic construct
  misc_feature 1..20: note = chemically synthesized
  source 1..20: mol_type = other DNA
tattctcccattccaatgaa

SEQ ID NO: 18314 - DNA, 20 bp, synthetic construct
  misc_feature 1..20: note = chemically synthesized
  source 1..20: mol_type = other DNA
tgttgatgtctaaatacacc

SEQ ID NO: 18315 - DNA, 20 bp, synthetic construct
  misc_feature 1..20: note = chemically synthesized
  source 1..20: mol_type = other DNA
gatctatctatactactaaa

SEQ ID NO: 18316 - DNA, 20 bp, synthetic construct
  misc_feature 1..20: note = chemically synthesized
  source 1..20: mol_type = other DNA
tatctatactactaaatagc

SEQ ID NO: 18317 - DNA, 20 bp, synthetic construct
  misc_feature 1..20: note = chemically synthesized
  source 1..20: mol_type = other DNA
tagctagaccaatacatgaa

SEQ ID NO: 18318 - DNA, 20 bp, synthetic construct
  misc_feature 1..20: note = chemically synthesized
  source 1..20: mol_type = other DNA
agaaactcttattctcaata

SEQ ID NO: 18319 - DNA, 20 bp, synthetic construct
  misc_feature 1..20: note = chemically synthesized
  source 1..20: mol_type = other DNA
gtaccccaacaataatatat

SEQ ID NO: 18320 - DNA, 20 bp, synthetic construct
  misc_feature 1..20: note = chemically synthesized
  source 1..20: mol_type = other DNA
ttatcttctttgtgtcttat

SEQ ID NO: 18321 - DNA, 20 bp, synthetic construct
  misc_feature 1..20: note = chemically synthesized
  source 1..20: mol_type = other DNA
ttatcagttatgttaccata

SEQ ID NO: 18322 - DNA, 20 bp, synthetic construct
  misc_feature 1..20: note = chemically synthesized
  source 1..20: mol_type = other DNA
tatcagttatgttaccatat

SEQ ID NO: 18323 - DNA, 20 bp, synthetic construct
  misc_feature 1..20: note = chemically synthesized
  source 1..20: mol_type = other DNA
cagttatgttaccatatagg

SEQ ID NO: 18324 - DNA, 20 bp, synthetic construct
  misc_feature 1..20: note = chemically synthesized
  source 1..20: mol_type = other DNA
gttatgttaccatataggaa

SEQ ID NO: 18325 - DNA, 20 bp, synthetic construct
  misc_feature 1..20: note = chemically synthesized
  source 1..20: mol_type = other DNA
tgttaccatataggaagaga

SEQ ID NO: 18326 - DNA, 20 bp, synthetic construct
  misc_feature 1..20: note = chemically synthesized
  source 1..20: mol_type = other DNA
aggaagagaaagaaaattat

SEQ ID NO: 18327 - DNA, 20 bp, synthetic construct
  misc_feature 1..20: note = chemically synthesized
  source 1..20: mol_type = other DNA
gtaccatctcacatctatgc

SEQ ID NO: 18328 - DNA, 20 bp, synthetic construct
  misc_feature 1..20: note = chemically synthesized
  source 1..20: mol_type = other DNA
taccatctcacatctatgca

SEQ ID NO: 18329 - DNA, 20 bp, synthetic construct
  misc_feature 1..20: note = chemically synthesized
  source 1..20: mol_type = other DNA
tcacatctatgcaaggcaaa

SEQ ID NO: 18330 - DNA, 20 bp, synthetic construct
  misc_feature 1..20: note = chemically synthesized
  source 1..20: mol_type = other DNA
cacatctatgcaaggcaaat

SEQ ID NO: 18331 - DNA, 20 bp, synthetic construct
  misc_feature 1..20: note = chemically synthesized
  source 1..20: mol_type = other DNA
tgcaaggcaaataggactaa

SEQ ID NO: 18332 - DNA, 20 bp, synthetic construct
  misc_feature 1..20: note = chemically synthesized
  source 1..20: mol_type = other DNA
ggcaaataggactaatagta

SEQ ID NO: 18333 - DNA, 20 bp, synthetic construct
  misc_feature 1..20: note = chemically synthesized
  source 1..20: mol_type = other DNA
gcaaataggactaatagtac

SEQ ID NO: 18334 - DNA, 20 bp, synthetic construct
  misc_feature 1..20: note = chemically synthesized
  source 1..20: mol_type = other DNA
caaataggactaatagtaca

SEQ ID NO: 18335 - DNA, 20 bp, synthetic construct
  misc_feature 1..20: note = chemically synthesized
  source 1..20: mol_type = other DNA
aggactaatagtacagggac

SEQ ID NO: 18336 - DNA, 20 bp, synthetic construct
  misc_feature 1..20: note = chemically synthesized
  source 1..20: mol_type = other DNA
ggactaatagtacagggaca

SEQ ID NO: 18337 - DNA, 20 bp, synthetic construct
  misc_feature 1..20: note = chemically synthesized
  source 1..20: mol_type = other DNA
tagtacagggacaaggctga

SEQ ID NO: 18338 - DNA, 20 bp, synthetic construct
  misc_feature 1..20: note = chemically synthesized
  source 1..20: mol_type = other DNA
agtacagggacaaggctgaa

SEQ ID NO: 18339 - DNA, 20 bp, synthetic construct
  misc_feature 1..20: note = chemically synthesized
  source 1..20: mol_type = other DNA
tacagggacaaggctgaaag

SEQ ID NO: 18340 - DNA, 20 bp, synthetic construct
  misc_feature 1..20: note = chemically synthesized
  source 1..20: mol_type = other DNA
aggctgaaaggagacatttt

SEQ ID NO: 18341 - DNA, 20 bp, synthetic construct
  misc_feature 1..20: note = chemically synthesized
  source 1..20: mol_type = other DNA
ggctgaaaggagacatttta

SEQ ID NO: 18342 - DNA, 20 bp, synthetic construct
  misc_feature 1..20: note = chemically synthesized
  source 1..20: mol_type = other DNA
aaggagacattttaaggttg

SEQ ID NO: 18343 - DNA, 20 bp, synthetic construct
  misc_feature 1..20: note = chemically synthesized
  source 1..20: mol_type = other DNA
aggagacattttaaggttga

SEQ ID NO: 18344 - DNA, 20 bp, synthetic construct
  misc_feature 1..20: note = chemically synthesized
  source 1..20: mol_type = other DNA
attttaaggttgaaggtatg

SEQ ID NO: 18345 - DNA, 20 bp, synthetic construct
  misc_feature 1..20: note = chemically synthesized
  source 1..20: mol_type = other DNA
atgcagtaaaacttgttttc

SEQ ID NO: 18346 - DNA, 20 bp, synthetic construct
  misc_feature 1..20: note = chemically synthesized
  source 1..20: mol_type = other DNA
gcagtaaaacttgttttctg

SEQ ID NO: 18347 - DNA, 20 bp, synthetic construct
  misc_feature 1..20: note = chemically synthesized
  source 1..20: mol_type = other DNA
ttttctggagattacgttga

SEQ ID NO: 18348 - DNA, 20 bp, synthetic construct
  misc_feature 1..20: note = chemically synthesized
  source 1..20: mol_type = other DNA
tctggagattacgttgaaag

SEQ ID NO: 18349 - DNA, 20 bp, synthetic construct
  misc_feature 1..20: note = chemically synthesized
  source 1..20: mol_type = other DNA
gattacgttgaaagaagtta

SEQ ID NO: 18350 - DNA, 20 bp, synthetic construct
  misc_feature 1..20: note = chemically synthesized
  source 1..20: mol_type = other DNA
acgttgaaagaagttacagt

SEQ ID NO: 18351 - DNA, 20 bp, synthetic construct
  misc_feature 1..20: note = chemically synthesized
  source 1..20: mol_type = other DNA
ttacagtcagtcaatctaat

SEQ ID NO: 18352 - DNA, 20 bp, synthetic construct
  misc_feature 1..20: note = chemically synthesized
  source 1..20: mol_type = other DNA
tacagtcagtcaatctaatg

SEQ ID NO: 18353 - DNA, 20 bp, synthetic construct
  misc_feature 1..20: note = chemically synthesized
  source 1..20: mol_type = other DNA
cagtcaatctaatgaggttg

SEQ ID NO: 18354 - DNA, 20 bp, synthetic construct
  misc_feature 1..20: note = chemically synthesized
  source 1..20: mol_type = other DNA
tcaatctaatgaggttgtag

SEQ ID NO: 18355 - DNA, 20 bp, synthetic construct
  misc_feature 1..20: note = chemically synthesized
  source 1..20: mol_type = other DNA
ttgtagaagatgaaacaact

SEQ ID NO: 18356 - DNA, 20 bp, synthetic construct
  misc_feature 1..20: note = chemically synthesized
  source 1..20: mol_type = other DNA
agaagatgaaacaactaagc

SEQ ID NO: 18357 - DNA, 20 bp, synthetic construct
  misc_feature 1..20: note = chemically synthesized
  source 1..20: mol_type = other DNA
aacaactaagctggtgctcc

SEQ ID NO: 18358 - DNA, 20 bp, synthetic construct
  misc_feature 1..20: note = chemically synthesized
  source 1..20: mol_type = other DNA
gtaatgacttgatacctgcg

SEQ ID NO: 18359 - DNA, 20 bp, synthetic construct
  misc_feature 1..20: note = chemically synthesized
  source 1..20: mol_type = other DNA
gcgaagtgtctaaatatgta

SEQ ID NO: 18360 - DNA, 20 bp, synthetic construct
  misc_feature 1..20: note = chemically synthesized
  source 1..20: mol_type = other DNA
gaagtgtctaaatatgtata

SEQ ID NO: 18361 - DNA, 20 bp, synthetic construct
  misc_feature 1..20: note = chemically synthesized
  source 1..20: mol_type = other DNA
aagtgtctaaatatgtatag

SEQ ID NO: 18362 - DNA, 20 bp, synthetic construct
  misc_feature 1..20: note = chemically synthesized
  source 1..20: mol_type = other DNA
gtgtctaaatatgtatagag

SEQ ID NO: 18363 - DNA, 20 bp, synthetic construct
  misc_feature 1..20: note = chemically synthesized
  source 1..20: mol_type = other DNA
gtatagaggagttgataata

SEQ ID NO: 18364 - DNA, 20 bp, synthetic construct
  misc_feature 1..20: note = chemically synthesized
  source 1..20: mol_type = other DNA
aatatagaccaattgcactt

SEQ ID NO: 18365 - DNA, 20 bp, synthetic construct
  misc_feature 1..20: note = chemically synthesized
  source 1..20: mol_type = other DNA
atatagaccaattgcacttt

SEQ ID NO: 18366 - DNA, 20 bp, synthetic construct
  misc_feature 1..20: note = chemically synthesized
  source 1..20: mol_type = other DNA
ttgcactttgggcccctgct

SEQ ID NO: 18367 - DNA, 20 bp, synthetic construct
  misc_feature 1..20: note = chemically synthesized
  source 1..20: mol_type = other DNA
actttgggcccctgctgagt

SEQ ID NO: 18368 - DNA, 20 bp, synthetic construct
  misc_feature 1..20: note = chemically synthesized
  source 1..20: mol_type = other DNA
gtgtcaactaaacaaaacga

SEQ ID NO: 18369 - DNA, 20 bp, synthetic construct
  misc_feature 1..20: note = chemically synthesized
  source 1..20: mol_type = other DNA
tgtcaactaaacaaaacgat

SEQ ID NO: 18370 - DNA, 20 bp, synthetic construct
  misc_feature 1..20: note = chemically synthesized
  source 1..20: mol_type = other DNA
taggaaattgtatttcccca

SEQ ID NO: 18371 - DNA, 20 bp, synthetic construct
  misc_feature 1..20: note = chemically synthesized
  source 1..20: mol_type = other DNA
gtatttccccaaagacattt

SEQ ID NO: 18372 - DNA, 20 bp, synthetic construct
  misc_feature 1..20: note = chemically synthesized
  source 1..20: mol_type = other DNA
attttggaaacgttctcctt

SEQ ID NO: 18373 - DNA, 20 bp, synthetic construct
  misc_feature 1..20: note = chemically synthesized
  source 1..20: mol_type = other DNA
acgttctccttcagcaccaa

SEQ ID NO: 18374 - DNA, 20 bp, synthetic construct
  misc_feature 1..20: note = chemically synthesized
  source 1..20: mol_type = other DNA
ttctccttcagcaccaatgg

SEQ ID NO: 18375 - DNA, 20 bp, synthetic construct
  misc_feature 1..20: note = chemically synthesized
  source 1..20: mol_type = other DNA
tcagcaccaatggtagcacc

SEQ ID NO: 18376 - DNA, 20 bp, synthetic construct
  misc_feature 1..20: note = chemically synthesized
  source 1..20: mol_type = other DNA
gaactgaccatccaacttcc

SEQ ID NO: 18377 - DNA, 20 bp, synthetic construct
  misc_feature 1..20: note = chemically synthesized
  source 1..20: mol_type = other DNA
ccaatctctttcctccatca

SEQ ID NO: 18378 - DNA, 20 bp, synthetic construct
  misc_feature 1..20: note = chemically synthesized
  source 1..20: mol_type = other DNA
tctttcctccatcatggaaa

SEQ ID NO: 18379 - DNA, 20 bp, synthetic construct
  misc_feature 1..20: note = chemically synthesized
  source 1..20: mol_type = other DNA
aaacagccctgcatattcaa

SEQ ID NO: 18380 - DNA, 20 bp, synthetic construct
  misc_feature 1..20: note = chemically synthesized
  source 1..20: mol_type = other DNA
agccctgcatattcaaaagt

SEQ ID NO: 18381 - DNA, 20 bp, synthetic construct
  misc_feature 1..20: note = chemically synthesized
  source 1..20: mol_type = other DNA
gtccctctcttatacctcgt

SEQ ID NO: 18382 - DNA, 20 bp, synthetic construct
  misc_feature 1..20: note = chemically synthesized
  source 1..20: mol_type = other DNA
ccctctcttatacctcgtca

SEQ ID NO: 18383 - DNA, 20 bp, synthetic construct
  misc_feature 1..20: note = chemically synthesized
  source 1..20: mol_type = other DNA
ctctcttatacctcgtcaga

SEQ ID NO: 18384 - DNA, 20 bp, synthetic construct
  misc_feature 1..20: note = chemically synthesized
  source 1..20: mol_type = other DNA
gtcatattcacaatccacaa

SEQ ID NO: 18385 - DNA, 20 bp, synthetic construct
  misc_feature 1..20: note = chemically synthesized
  source 1..20: mol_type = other DNA
tcatattcacaatccacaac

SEQ ID NO: 18386 - DNA, 20 bp, synthetic construct
  misc_feature 1..20: note = chemically synthesized
  source 1..20: mol_type = other DNA
ttcacaatccacaacaggcc

SEQ ID NO: 18387 - DNA, 20 bp, synthetic construct
  misc_feature 1..20: note = chemically synthesized
  source 1..20: mol_type = other DNA
aacaggcccagataaccgtt

SEQ ID NO: 18388 - DNA, 20 bp, synthetic construct
  misc_feature 1..20: note = chemically synthesized
  source 1..20: mol_type = other DNA
agataaccgttcagtgatgc

SEQ ID NO: 18389 - DNA, 20 bp, synthetic construct
  misc_feature 1..20: note = chemically synthesized
  source 1..20: mol_type = other DNA
agtgatgctggtcatcactg

SEQ ID NO: 18390 - DNA, 20 bp, synthetic construct
  misc_feature 1..20: note = chemically synthesized
  source 1..20: mol_type = other DNA
atgctggtcatcactgaaga

SEQ ID NO: 18391 - DNA, 20 bp, synthetic construct
  misc_feature 1..20: note = chemically synthesized
  source 1..20: mol_type = other DNA
attgaatcttcctttcttct

SEQ ID NO: 18392 - DNA, 20 bp, synthetic construct
  misc_feature 1..20: note = chemically synthesized
  source 1..20: mol_type = other DNA
ttcttcttggacgtaaattg

SEQ ID NO: 18393 - DNA, 20 bp, synthetic construct
  misc_feature 1..20: note = chemically synthesized
  source 1..20: mol_type = other DNA
tcttcttggacgtaaattgc

SEQ ID NO: 18394 - DNA, 20 bp, synthetic construct
  misc_feature 1..20: note = chemically synthesized
  source 1..20: mol_type = other DNA
attgaaaaaactataacttg

SEQ ID NO: 18395 - DNA, 20 bp, synthetic construct
  misc_feature 1..20: note = chemically synthesized
  source 1..20: mol_type = other DNA
aactataacttgaagtttca

SEQ ID NO: 18396 - DNA, 20 bp, synthetic construct
  misc_feature 1..20: note = chemically synthesized
  source 1..20: mol_type = other DNA
tataacttgaagtttcatag

SEQ ID NO: 18397 - DNA, 20 bp, synthetic construct
  misc_feature 1..20: note = chemically synthesized
  source 1..20: mol_type = other DNA
acttgaagtttcatagcaga

SEQ ID NO: 18398 - DNA, 20 bp, synthetic construct
  misc_feature 1..20: note = chemically synthesized
  source 1..20: mol_type = other DNA
gaagtttcatagcagaaagt

SEQ ID NO: 18399 - DNA, 20 bp, synthetic construct
  misc_feature 1..20: note = chemically synthesized
  source 1..20: mol_type = other DNA
aagttggcatctttctcact

SEQ ID NO: 18400 - DNA, 20 bp, synthetic construct
  misc_feature 1..20: note = chemically synthesized
  source 1..20: mol_type = other DNA
gcatctttctcactaagcat

SEQ ID NO: 18401 - DNA, 20 bp, synthetic construct
  misc_feature 1..20: note = chemically synthesized
  source 1..20: mol_type = other DNA
ctaagcatgagaaaaactaa

SEQ ID NO: 18402 - DNA, 20 bp, synthetic construct
  misc_feature 1..20: note = chemically synthesized
  source 1..20: mol_type = other DNA
aagcatgagaaaaactaaca

SEQ ID NO: 18403 - DNA, 20 bp, synthetic construct
  misc_feature 1..20: note = chemically synthesized
  source 1..20: mol_type = other DNA
actaacagagttttaatttg

SEQ ID NO: 18404 - DNA, 20 bp, synthetic construct
  misc_feature 1..20: note = chemically synthesized
  source 1..20: mol_type = other DNA
ctaacagagttttaatttga

SEQ ID NO: 18405 - DNA, 20 bp, synthetic construct
  misc_feature 1..20: note = chemically synthesized
  source 1..20: mol_type = other DNA
taacagagttttaatttgaa

SEQ ID NO: 18406 - DNA, 20 bp, synthetic construct
  misc_feature 1..20: note = chemically synthesized
  source 1..20: mol_type = other DNA
agttttaatttgaagggcct

SEQ ID NO: 18407 - DNA, 20 bp, synthetic construct
  misc_feature 1..20: note = chemically synthesized
  source 1..20: mol_type = other DNA
ttgaagggccttagccaact

SEQ ID NO: 18408 - DNA, 20 bp, synthetic construct
  misc_feature 1..20: note = chemically synthesized
  source 1..20: mol_type = other DNA
ggccttagccaacttagctg

SEQ ID NO: 18409 - DNA, 20 bp, synthetic construct
  misc_feature 1..20: note = chemically synthesized
  source 1..20: mol_type = other DNA
agctgaagtcccttccacct

SEQ ID NO: 18410 - DNA, 20 bp, synthetic construct
  misc_feature 1..20: note = chemically synthesized
  source 1..20: mol_type = other DNA
agtcccttccacctaagata

SEQ ID NO: 18411 - DNA, 20 bp, synthetic construct
  misc_feature 1..20: note = chemically synthesized
  source 1..20: mol_type = other DNA
cacctaagataaagctgtaa

SEQ ID NO: 18412 - DNA, 20 bp, synthetic construct
  misc_feature 1..20: note = chemically synthesized
  source 1..20: mol_type = other DNA
cctaagataaagctgtaaaa

SEQ ID NO: 18413 - DNA, 20 bp, synthetic construct
  misc_feature 1..20: note = chemically synthesized
  source 1..20: mol_type = other DNA
ctaagataaagctgtaaaag

SEQ ID NO: 18414 - DNA, 20 bp, synthetic construct
  misc_feature 1..20: note = chemically synthesized
  source 1..20: mol_type = other DNA
aagataaagctgtaaaagag

SEQ ID NO: 18415 - DNA, 20 bp, synthetic construct
  misc_feature 1..20: note = chemically synthesized
  source 1..20: mol_type = other DNA
ataaagctgtaaaagaggag

SEQ ID NO: 18416 - DNA, 20 bp, synthetic construct
  misc_feature 1..20: note = chemically synthesized
  source 1..20: mol_type = other DNA
agaggagcagatgtataatt

SEQ ID NO: 18417 - DNA, 20 bp, synthetic construct
  misc_feature 1..20: note = chemically synthesized
  source 1..20: mol_type = other DNA
cagatgtataatttagatat

SEQ ID NO: 18418 - DNA, 20 bp, synthetic construct
  misc_feature 1..20: note = chemically synthesized
  source 1..20: mol_type = other DNA
gatgtataatttagatattg

SEQ ID NO: 18419 - DNA, 20 bp, synthetic construct
  misc_feature 1..20: note = chemically synthesized
  source 1..20: mol_type = other DNA
gtataatttagatattggag

SEQ ID NO: 18420 - DNA, 20 bp, synthetic construct
  misc_feature 1..20: note = chemically synthesized
  source 1..20: mol_type = other DNA
ttagatattggagcagcatg

SEQ ID NO: 18421 - DNA, 20 bp, synthetic construct
  misc_feature 1..20: note = chemically synthesized
  source 1..20: mol_type = other DNA
gcagtatcaaaatacctcat

SEQ ID NO: 18422 - DNA, 20 bp, synthetic construct
  misc_feature 1..20: note = chemically synthesized
  source 1..20: mol_type = other DNA
aaaatacctcatgagcacca

SEQ ID NO: 18423 - DNA, 20 bp, synthetic construct
  misc_feature 1..20: note = chemically synthesized
  source 1..20: mol_type = other DNA
atacctcatgagcaccaaag

SEQ ID NO: 18424 - DNA, 20 bp, synthetic construct
  misc_feature 1..20: note = chemically synthesized
  source 1..20: mol_type = other DNA
aagaagccatatatttttca

SEQ ID NO: 18425 - DNA, 20 bp, synthetic construct
  misc_feature 1..20: note = chemically synthesized
  source 1..20: mol_type = other DNA
ttcttccaaaataacttaca

SEQ ID NO: 18426 - DNA, 20 bp, synthetic construct
  misc_feature 1..20: note = chemically synthesized
  source 1..20: mol_type = other DNA
tccaaaataacttacaaaga

SEQ ID NO: 18427 - DNA, 20 bp, synthetic construct
  misc_feature 1..20: note = chemically synthesized
  source 1..20: mol_type = other DNA
gacagtctttcctctgtcat

SEQ ID NO: 18428 - DNA, 20 bp, synthetic construct
  misc_feature 1..20: note = chemically synthesized
  source 1..20: mol_type = other DNA
ctgtcataagaacctgcacc

SEQ ID NO: 18429 - DNA, 20 bp, synthetic construct
  misc_feature 1..20: note = chemically synthesized
  source 1..20: mol_type = other DNA
tgtcataagaacctgcaccc

SEQ ID NO: 18430 - DNA, 20 bp, synthetic construct
  misc_feature 1..20: note = chemically synthesized
  source 1..20: mol_type = other DNA
ataagaacctgcacccaggt

SEQ ID NO: 18431 - DNA, 20 bp, synthetic construct
  misc_feature 1..20: note = chemically synthesized
  source 1..20: mol_type = other DNA
tgcacccaggtcagcaaatc

SEQ ID NO: 18432 - DNA, 20 bp, synthetic construct
  misc_feature 1..20: note = chemically synthesized
  source 1..20: mol_type = other DNA
cccaggtcagcaaatcaaga

SEQ ID NO: 18433 - DNA, 20 bp, synthetic construct
  misc_feature 1..20: note = chemically synthesized
  source 1..20: mol_type = other DNA
caaatcaagatggaaatgat

SEQ ID NO: 18434 - DNA, 20 bp, synthetic construct
  misc_feature 1..20: note = chemically synthesized
  source 1..20: mol_type = other DNA
aaatcaagatggaaatgatc

SEQ ID NO: 18435 - DNA, 20 bp, synthetic construct
  misc_feature 1..20: note = chemically synthesized
  source 1..20: mol_type = other DNA
aatcaagatggaaatgatcg

SEQ ID NO: 18436 - DNA, 20 bp, synthetic construct
  misc_feature 1..20: note = chemically synthesized
  source 1..20: mol_type = other DNA
accaacacactaataaacat

SEQ ID NO: 18437 - DNA, 20 bp, synthetic construct
  misc_feature 1..20: note = chemically synthesized
  source 1..20: mol_type = other DNA
ccaacacactaataaacatt

SEQ ID NO: 18438 - DNA, 20 bp, synthetic construct
  misc_feature 1..20: note = chemically synthesized
  source 1..20: mol_type = other DNA
aataaacattaggaacttac

SEQ ID NO: 18439 - DNA, 20 bp, synthetic construct
  misc_feature 1..20: note = chemically synthesized
  source 1..20: mol_type = other DNA
ataaacattaggaacttact

SEQ ID NO: 18440 - DNA, 20 bp, synthetic construct
  misc_feature 1..20: note = chemically synthesized
  source 1..20: mol_type = other DNA
gaacttactgggcacattat

SEQ ID NO: 18441 - DNA, 20 bp, synthetic construct
  misc_feature 1..20: note = chemically synthesized
  source 1..20: mol_type = other DNA
actgggcacattatgagaaa

SEQ ID NO: 18442 - DNA, 20 bp, synthetic construct
  misc_feature 1..20: note = chemically synthesized
  source 1..20: mol_type = other DNA
tgggcacattatgagaaaca

SEQ ID NO: 18443 - DNA, 20 bp, synthetic construct
  misc_feature 1..20: note = chemically synthesized
  source 1..20: mol_type = other DNA
gggcacattatgagaaacag

SEQ ID NO: 18444 - DNA, 20 bp, synthetic construct
  misc_feature 1..20: note = chemically synthesized
  source 1..20: mol_type = other DNA
gcacattatgagaaacagag

SEQ ID NO: 18445 - DNA, 20 bp, synthetic construct
  misc_feature 1..20: note = chemically synthesized
  source 1..20: mol_type = other DNA
atgagaaacagaggagtctt

SEQ ID NO: 18446 - DNA, 20 bp, synthetic construct
  misc_feature 1..20: note = chemically synthesized
  source 1..20: mol_type = other DNA
tgagaaacagaggagtcttt

SEQ ID NO: 18447 - DNA, 20 bp, synthetic construct
  misc_feature 1..20: note = chemically synthesized
  source 1..20: mol_type = other DNA
gagaaacagaggagtctttg

SEQ ID NO: 18448 - DNA, 20 bp, synthetic construct
  misc_feature 1..20: note = chemically synthesized
  source 1..20: mol_type = other DNA
agaaacagaggagtctttgg

SEQ ID NO: 18449 - DNA, 20 bp, synthetic construct
  misc_feature 1..20: note = chemically synthesized
  source 1..20: mol_type = other DNA
aggagtctttgggggataac

SEQ ID NO: 18450 - DNA, 20 bp, synthetic construct
  misc_feature 1..20: note = chemically synthesized
  source 1..20: mol_type = other DNA
ttgggggataaccagatttt

SEQ ID NO: 18451 - DNA, 20 bp, synthetic construct
  misc_feature 1..20: note = chemically synthesized
  source 1..20: mol_type = other DNA
ttaagatttgtgtttatact

SEQ ID NO: 18452 - DNA, 20 bp, synthetic construct
  misc_feature 1..20: note = chemically synthesized
  source 1..20: mol_type = other DNA
gtgtttatactcagtatcaa

SEQ ID NO: 18453 - DNA, 20 bp, synthetic construct
  misc_feature 1..20: note = chemically synthesized
  source 1..20: mol_type = other DNA
agcttaaacattgtactcaa

SEQ ID NO: 18454 - DNA, 20 bp, synthetic construct
  misc_feature 1..20: note = chemically synthesized
  source 1..20: mol_type = other DNA
atagcatataattttgctta

SEQ ID NO: 18455 - DNA, 20 bp, synthetic construct
  misc_feature 1..20: note = chemically synthesized
  source 1..20: mol_type = other DNA
attttgcttacagcatgcat

SEQ ID NO: 18456 - DNA, 20 bp, synthetic construct
  misc_feature 1..20: note = chemically synthesized
  source 1..20: mol_type = other DNA
ttttgcttacagcatgcatt

SEQ ID NO: 18457 - DNA, 20 bp, synthetic construct
  misc_feature 1..20: note = chemically synthesized
  source 1..20: mol_type = other DNA
gcatgcattgggtaaataat

SEQ ID NO: 18458 - DNA, 20 bp, synthetic construct
  misc_feature 1..20: note = chemically synthesized
  source 1..20: mol_type = other DNA
aatcggttttacaattgatt

SEQ ID NO: 18459 - DNA, 20 bp, synthetic construct
  misc_feature 1..20: note = chemically synthesized
  source 1..20: mol_type = other DNA
acaattgattcagtatgaaa

SEQ ID NO: 18460 - DNA, 20 bp, synthetic construct
  misc_feature 1..20: note = chemically synthesized
  source 1..20: mol_type = other DNA
gtatgaaaaagttttaatac

SEQ ID NO: 18461 - DNA, 20 bp, synthetic construct
  misc_feature 1..20: note = chemically synthesized
  source 1..20: mol_type = other DNA
tatgaaaaagttttaataca

SEQ ID NO: 18462 - DNA, 20 bp, synthetic construct
  misc_feature 1..20: note = chemically synthesized
  source 1..20: mol_type = other DNA
agttttaatacaaggacata

SEQ ID NO: 18463 - DNA, 20 bp, synthetic construct
  misc_feature 1..20: note = chemically synthesized
  source 1..20: mol_type = other DNA
gcgcctacacctattttttt

SEQ ID NO: 18464 - DNA, 20 bp, synthetic construct
  misc_feature 1..20: note = chemically synthesized
  source 1..20: mol_type = other DNA
ctatttttttaagcattcca

SEQ ID NO: 18465 - DNA, 20 bp, synthetic construct
  misc_feature 1..20: note = chemically synthesized
  source 1..20: mol_type = other DNA
tttttaagcattccatagat

SEQ ID NO: 18466 - DNA, 20 bp, synthetic construct
  misc_feature 1..20: note = chemically synthesized
  source 1..20: mol_type = other DNA
tcccaatataaaactttact

SEQ ID NO: 18467 - DNA, 20 bp, synthetic construct
  misc_feature 1..20: note = chemically synthesized
  source 1..20: mol_type = other DNA
cccaatataaaactttactc

SEQ ID NO: 18468 - DNA, 20 bp, synthetic construct
  misc_feature 1..20: note = chemically synthesized
  source 1..20: mol_type = other DNA
atataaaactttactcaggc

SEQ ID NO: 18469 - DNA, 20 bp, synthetic construct
  misc_feature 1..20: note = chemically synthesized
  source 1..20: mol_type = other DNA
tataaaactttactcaggcc

SEQ ID NO: 18470 - DNA, 20 bp, synthetic construct
  misc_feature 1..20: note = chemically synthesized
  source 1..20: mol_type = other DNA
aactttactcaggccgggcg

SEQ ID NO: 18471 - DNA, 20 bp, synthetic construct
  misc_feature 1..20: note = chemically synthesized
  source 1..20: mol_type = other DNA
tttactcaggccgggcgcgg

SEQ ID NO: 18472 - DNA, 20 bp, synthetic construct
  misc_feature 1..20: note = chemically synthesized
  source 1..20: mol_type = other DNA
gtggctcacgcctgtaatcc

SEQ ID NO: 18473 - DNA, 20 bp, synthetic construct
  misc_feature 1..20: note = chemically synthesized
  source 1..20: mol_type = other DNA
cgcctgtaatcccagcactt

SEQ ID NO: 18474 - DNA, 20 bp, synthetic construct
  misc_feature 1..20: note = chemically synthesized
  source 1..20: mol_type = other DNA
gcctgtaatcccagcacttt

SEQ ID NO: 18475 - DNA, 20 bp, synthetic construct
  misc_feature 1..20: note = chemically synthesized
  source 1..20: mol_type = other DNA
ctgtaatcccagcactttgg

SEQ ID NO: 18476 - DNA, 20 bp, synthetic construct
  misc_feature 1..20: note = chemically synthesized
  source 1..20: mol_type = other DNA
tgtaatcccagcactttggg

SEQ ID NO: 18477 - DNA, 20 bp, synthetic construct
  misc_feature 1..20: note = chemically synthesized
  source 1..20: mol_type = other DNA
tcccagcactttgggaggcc

SEQ ID NO: 18478 - DNA, 20 bp, synthetic construct
  misc_feature 1..20: note = chemically synthesized
  source 1..20: mol_type = other DNA
cccagcactttgggaggccg

SEQ ID NO: 18479 - DNA, 20 bp, synthetic construct
  misc_feature 1..20: note = chemically synthesized
  source 1..20: mol_type = other DNA
agcactttgggaggccgagg

SEQ ID NO: 18480 - DNA, 20 bp, synthetic construct
  misc_feature 1..20: note = chemically synthesized
  source 1..20: mol_type = other DNA
gcactttgggaggccgaggc

SEQ ID NO: 18481 - DNA, 20 bp, synthetic construct
  misc_feature 1..20: note = chemically synthesized
  source 1..20: mol_type = other DNA
ctttgggaggccgaggcggg

SEQ ID NO: 18482 - DNA, 20 bp, synthetic construct
  misc_feature 1..20: note = chemically synthesized
  source 1..20: mol_type = other DNA
ggccgaggcgggtggatcac

SEQ ID NO: 18483 - DNA, 20 bp, synthetic construct
  misc_feature 1..20: note = chemically synthesized
  source 1..20: mol_type = other DNA
gccgaggcgggtggatcacg

SEQ ID NO: 18484 - DNA, 20 bp, synthetic construct
  misc_feature 1..20: note = chemically synthesized
  source 1..20: mol_type = other DNA
aggcgggtggatcacgaggt

SEQ ID NO: 18485 - DNA, 20 bp, synthetic construct
  misc_feature 1..20: note = chemically synthesized
  source 1..20: mol_type = other DNA
ggcgggtggatcacgaggtc

SEQ ID NO: 18486 - DNA, 20 bp, synthetic construct
  misc_feature 1..20: note = chemically synthesized
  source 1..20: mol_type = other DNA
cgggtggatcacgaggtcgg

SEQ ID NO: 18487 - DNA, 20 bp, synthetic construct
  misc_feature 1..20: note = chemically synthesized
  source 1..20: mol_type = other DNA
gatcacgaggtcgggagatc

SEQ ID NO: 18488 - DNA, 20 bp, synthetic construct
  misc_feature 1..20: note = chemically synthesized
  source 1..20: mol_type = other DNA
tcgggagatcgagaccatcc

SEQ ID NO: 18489 - DNA, 20 bp, synthetic construct
  misc_feature 1..20: note = chemically synthesized
  source 1..20: mol_type = other DNA
cgagaccatcctggctaaca

SEQ ID NO: 18490 - DNA, 20 bp, synthetic construct
  misc_feature 1..20: note = chemically synthesized
  source 1..20: mol_type = other DNA
gaaaccccgtctctactaaa

SEQ ID NO: 18491 - DNA, 20 bp, synthetic construct
  misc_feature 1..20: note = chemically synthesized
  source 1..20: mol_type = other DNA
aaaagacaaaaaaatttgcc

SEQ ID NO: 18492 - DNA, 20 bp, synthetic construct
  misc_feature 1..20: note = chemically synthesized
  source 1..20: mol_type = other DNA
acaaaaaaatttgcctggcg

SEQ ID NO: 18493 - DNA, 20 bp, synthetic construct
  misc_feature 1..20: note = chemically synthesized
  source 1..20: mol_type = other DNA
aaaaaatttgcctggcgtgg

SEQ ID NO: 18494 - DNA, 20 bp, synthetic construct
  misc_feature 1..20: note = chemically synthesized
  source 1..20: mol_type = other DNA
aaatttgcctggcgtggtgg

SEQ ID NO: 18495 - DNA, 20 bp, synthetic construct
  misc_feature 1..20: note = chemically synthesized
  source 1..20: mol_type = other DNA
aatttgcctggcgtggtggc

SEQ ID NO: 18496 - DNA, 20 bp, synthetic construct
  misc_feature 1..20: note = chemically synthesized
  source 1..20: mol_type = other DNA
ggcgtggtggcgggcgcctg

SEQ ID NO: 18497 - DNA, 20 bp, synthetic construct
  misc_feature 1..20: note = chemically synthesized
  source 1..20: mol_type = other DNA
gtggcgggcgcctgtagtcc

SEQ ID NO: 18498 - DNA, 20 bp, synthetic construct
  misc_feature 1..20: note = chemically synthesized
  source 1..20: mol_type = other DNA
cgcctgtagtcccagctact

SEQ ID NO: 18499 - DNA, 20 bp, synthetic construct
  misc_feature 1..20: note = chemically synthesized
  source 1..20: mol_type = other DNA
gcctgtagtcccagctactc

SEQ ID NO: 18500 - DNA, 20 bp, synthetic construct
  misc_feature 1..20: note = chemically synthesized
  source 1..20: mol_type = other DNA
ctgtagtcccagctactcgg

SEQ ID NO: 18501 - DNA, 20 bp, synthetic construct
  misc_feature 1..20: note = chemically synthesized
  source 1..20: mol_type = other DNA
tgtagtcccagctactcggg

SEQ ID NO: 18502 - DNA, 20 bp, synthetic construct
  misc_feature 1..20: note = chemically synthesized
  source 1..20: mol_type = other DNA
tcccagctactcgggaggct

SEQ ID NO: 18503 - DNA, 20 bp, synthetic construct
  misc_feature 1..20: note = chemically synthesized
  source 1..20: mol_type = other DNA
cccagctactcgggaggctg

SEQ ID NO: 18504 - DNA, 20 bp, synthetic construct
  misc_feature 1..20: note = chemically synthesized
  source 1..20: mol_type = other DNA
agctactcgggaggctgagg

SEQ ID NO: 18505 - DNA, 20 bp, synthetic construct
  misc_feature 1..20: note = chemically synthesized
  source 1..20: mol_type = other DNA
gctactcgggaggctgaggc

SEQ ID NO: 18506 - DNA, 20 bp, synthetic construct
  misc_feature 1..20: note = chemically synthesized
  source 1..20: mol_type = other DNA
tactcgggaggctgaggcag

SEQ ID NO: 18507 - DNA, 20 bp, synthetic construct
  misc_feature 1..20: note = chemically synthesized
  source 1..20: mol_type = other DNA
gggaggctgaggcaggagaa

SEQ ID NO: 18508 - DNA, 20 bp, synthetic construct
  misc_feature 1..20: note = chemically synthesized
  source 1..20: mol_type = other DNA
gcaggagaatggcgtgaacc

SEQ ID NO: 18509 - DNA, 20 bp, synthetic construct
  misc_feature 1..20: note = chemically synthesized
  source 1..20: mol_type = other DNA
caggagaatggcgtgaaccc

SEQ ID NO: 18510 - DNA, 20 bp, synthetic construct
  misc_feature 1..20: note = chemically synthesized
  source 1..20: mol_type = other DNA
ggagaatggcgtgaacccgg

SEQ ID NO: 18511 - DNA, 20 bp, synthetic construct
  misc_feature 1..20: note = chemically synthesized
  source 1..20: mol_type = other DNA
gagaatggcgtgaacccggg

SEQ ID NO: 18512 - DNA, 20 bp, synthetic construct
  misc_feature 1..20: note = chemically synthesized
  source 1..20: mol_type = other DNA
aatggcgtgaacccgggagg

SEQ ID NO: 18513 - DNA, 20 bp, synthetic construct
  misc_feature 1..20: note = chemically synthesized
  source 1..20: mol_type = other DNA
tggcgtgaacccgggaggca

SEQ ID NO: 18514 - DNA, 20 bp, synthetic construct
  misc_feature 1..20: note = chemically synthesized
  source 1..20: mol_type = other DNA
aacccgggaggcagagcttg

SEQ ID NO: 18515 - DNA, 20 bp, synthetic construct
  misc_feature 1..20: note = chemically synthesized
  source 1..20: mol_type = other DNA
cgggaggcagagcttgcagt

SEQ ID NO: 18516 - DNA, 20 bp, synthetic construct
  misc_feature 1..20: note = chemically synthesized
  source 1..20: mol_type = other DNA
ggcagagcttgcagtgagct

SEQ ID NO: 18517 - DNA, 20 bp, synthetic construct
  misc_feature 1..20: note = chemically synthesized
  source 1..20: mol_type = other DNA
gagatcacgccactgcactc

SEQ ID NO: 18518 - DNA, 20 bp, synthetic construct
  misc_feature 1..20: note = chemically synthesized
  source 1..20: mol_type = other DNA
cacgccactgcactccagcc

SEQ ID NO: 18519 - DNA, 20 bp, synthetic construct
  misc_feature 1..20: note = chemically synthesized
  source 1..20: mol_type = other DNA
acgccactgcactccagcct

SEQ ID NO: 18520 - DNA, 20 bp, synthetic construct
  misc_feature 1..20: note = chemically synthesized
  source 1..20: mol_type = other DNA
ctgcactccagcctgggcga

SEQ ID NO: 18521 - DNA, 20 bp, synthetic construct
  misc_feature 1..20: note = chemically synthesized
  source 1..20: mol_type = other DNA
gcactccagcctgggcgaca

SEQ ID NO: 18522 - DNA, 20 bp, synthetic construct
  misc_feature 1..20: note = chemically synthesized
  source 1..20: mol_type = other DNA
tccagcctgggcgacagagc

SEQ ID NO: 18523 - DNA, 20 bp, synthetic construct
  misc_feature 1..20: note = chemically synthesized
  source 1..20: mol_type = other DNA
ctcaaaaacaaaacaaaaca

SEQ ID NO: 18524 - DNA, 20 bp, synthetic construct
  misc_feature 1..20: note = chemically synthesized
  source 1..20: mol_type = other DNA
aaagcaaaaaaaactttact

SEQ ID NO: 18525 - DNA, 20 bp, synthetic construct
  misc_feature 1..20: note = chemically synthesized
  source 1..20: mol_type = other DNA
aaaaaaaactttactcagtg

SEQ ID NO: 18526 - DNA, 20 bp, synthetic construct
  misc_feature 1..20: note = chemically synthesized
  source 1..20: mol_type = other DNA
aaactttactcagtgaagtc

SEQ ID NO: 18527 - DNA, 20 bp, synthetic construct
  misc_feature 1..20: note = chemically synthesized
  source 1..20: mol_type = other DNA
actttactcagtgaagtcca

SEQ ID NO: 18528 - DNA, 20 bp, synthetic construct
  misc_feature 1..20: note = chemically synthesized
  source 1..20: mol_type = other DNA
actcagtgaagtccagagca

SEQ ID NO: 18529 - DNA, 20 bp, synthetic construct
  misc_feature 1..20: note = chemically synthesized
  source 1..20: mol_type = other DNA
atttgttgcaaacaaatcac

SEQ ID NO: 18530 - DNA, 20 bp, synthetic construct
  misc_feature 1..20: note = chemically synthesized
  source 1..20: mol_type = other DNA
gaaaatgtacctgtaaaatg

SEQ ID NO: 18531 - DNA, 20 bp, synthetic construct
  misc_feature 1..20: note = chemically synthesized
  source 1..20: mol_type = other DNA
atgtggatgccacatatttt

SEQ ID NO: 18532 - DNA, 20 bp, synthetic construct
  misc_feature 1..20: note = chemically synthesized
  source 1..20: mol_type = other DNA
tgtggatgccacatattttt

SEQ ID NO: 18533 - DNA, 20 bp, synthetic construct
  misc_feature 1..20: note = chemically synthesized
  source 1..20: mol_type = other DNA
atgccacatatttttaggtc

SEQ ID NO: 18534 - DNA, 20 bp, synthetic construct
  misc_feature 1..20: note = chemically synthesized
  source 1..20: mol_type = other DNA
ccacatatttttaggtctgg

SEQ ID NO: 18535 - DNA, 20 bp, synthetic construct
  misc_feature 1..20: note = chemically synthesized
  source 1..20: mol_type = other DNA
cacatatttttaggtctgga

SEQ ID NO: 18536 - DNA, 20 bp, synthetic construct
  misc_feature 1..20: note = chemically synthesized
  source 1..20: mol_type = other DNA
ttgcattatcataaaatctc

SEQ ID NO: 18537 - DNA, 20 bp, synthetic construct
  misc_feature 1..20: note = chemically synthesized
  source 1..20: mol_type = other DNA
ttatcataaaatctctagtt

SEQ ID NO: 18538 - DNA, 20 bp, synthetic construct
  misc_feature 1..20: note = chemically synthesized
  source 1..20: mol_type = other DNA
ctttaactgaaaactgaacc

SEQ ID NO: 18539 - DNA, 20 bp, synthetic construct
  misc_feature 1..20: note = chemically synthesized
  source 1..20: mol_type = other DNA
tttaactgaaaactgaaccc

SEQ ID NO: 18540 - DNA, 20 bp, synthetic construct
  misc_feature 1..20: note = chemically synthesized
  source 1..20: mol_type = other DNA
taactgaaaactgaacccag

SEQ ID NO: 18541 - DNA, 20 bp, synthetic construct
  misc_feature 1..20: note = chemically synthesized
  source 1..20: mol_type = other DNA
aactgaaaactgaacccagg

SEQ ID NO: 18542 - DNA, 20 bp, synthetic construct
  misc_feature 1..20: note = chemically synthesized
  source 1..20: mol_type = other DNA
tgaaaactgaacccaggagg

SEQ ID NO: 18543 - DNA, 20 bp, synthetic construct
  misc_feature 1..20: note = chemically synthesized
  source 1..20: mol_type = other DNA
aaaactgaacccaggaggca

SEQ ID NO: 18544 - DNA, 20 bp, synthetic construct
  misc_feature 1..20: note = chemically synthesized
  source 1..20: mol_type = other DNA
aaactgaacccaggaggcag

SEQ ID NO: 18545 - DNA, 20 bp, synthetic construct
  misc_feature 1..20: note = chemically synthesized
  source 1..20: mol_type = other DNA
aacccaggaggcagaggttg

SEQ ID NO: 18546 - DNA, 20 bp, synthetic construct
  misc_feature 1..20: note = chemically synthesized
  source 1..20: mol_type = other DNA
caggaggcagaggttgcagt

SEQ ID NO: 18547 - DNA, 20 bp, synthetic construct
  misc_feature 1..20: note = chemically synthesized
  source 1..20: mol_type = other DNA
ggcagaggttgcagtcagcc

SEQ ID NO: 18548 - DNA, 20 bp, synthetic construct
  misc_feature 1..20: note = chemically synthesized
  source 1..20: mol_type = other DNA
ggttgcagtcagccgagatc

SEQ ID NO: 18549 - DNA, 20 bp, synthetic construct
  misc_feature 1..20: note = chemically synthesized
  source 1..20: mol_type = other DNA
gttgcagtcagccgagatca

SEQ ID NO: 18550 - DNA, 20 bp, synthetic construct
  misc_feature 1..20: note = chemically synthesized
  source 1..20: mol_type = other DNA
cactgaaaacttcctttctc

SEQ ID NO: 18551 - DNA, 20 bp, synthetic construct
  misc_feature 1..20: note = chemically synthesized
  source 1..20: mol_type = other DNA
gaaaacttcctttctccaga

SEQ ID NO: 18552 - DNA, 20 bp, synthetic construct
  misc_feature 1..20: note = chemically synthesized
  source 1..20: mol_type = other DNA
tgtctcattttcttcttcca

SEQ ID NO: 18553 - DNA, 20 bp, synthetic construct
  misc_feature 1..20: note = chemically synthesized
  source 1..20: mol_type = other DNA
cttcttccatggaatattcc

SEQ ID NO: 18554 - DNA, 20 bp, synthetic construct
  misc_feature 1..20: note = chemically synthesized
  source 1..20: mol_type = other DNA
ttcttccatggaatattcca

SEQ ID NO: 18555 - DNA, 20 bp, synthetic construct
  misc_feature 1..20: note = chemically synthesized
  source 1..20: mol_type = other DNA
tccaaggaatattctttgaa

SEQ ID NO: 18556 - DNA, 20 bp, synthetic construct
  misc_feature 1..20: note = chemically synthesized
  source 1..20: mol_type = other DNA
aaggaatattctttgaaaag

SEQ ID NO: 18557 - DNA, 20 bp, synthetic construct
  misc_feature 1..20: note = chemically synthesized
  source 1..20: mol_type = other DNA
tctttgaaaagcagaatatt

SEQ ID NO: 18558 - DNA, 20 bp, synthetic construct
  misc_feature 1..20: note = chemically synthesized
  source 1..20: mol_type = other DNA
tttgaaaagcagaatattca

SEQ ID NO: 18559 - DNA, 20 bp, synthetic construct
  misc_feature 1..20: note = chemically synthesized
  source 1..20: mol_type = other DNA
aaaagcagaatattcagagt

SEQ ID NO: 18560 - DNA, 20 bp, synthetic construct
  misc_feature 1..20: note = chemically synthesized
  source 1..20: mol_type = other DNA
aagcagaatattcagagtga

SEQ ID NO: 18561 - DNA, 20 bp, synthetic construct
  misc_feature 1..20: note = chemically synthesized
  source 1..20: mol_type = other DNA
agcagaatattcagagtgag

SEQ ID NO: 18562 - DNA, 20 bp, synthetic construct
  misc_feature 1..20: note = chemically synthesized
  source 1..20: mol_type = other DNA
agaatattcagagtgagagg

SEQ ID NO: 18563 - DNA, 20 bp, synthetic construct
  misc_feature 1..20: note = chemically synthesized
  source 1..20: mol_type = other DNA
atattcagagtgagaggaag

SEQ ID NO: 18564 - DNA, 20 bp, synthetic construct
  misc_feature 1..20: note = chemically synthesized
  source 1..20: mol_type = other DNA
attcagagtgagaggaagta

SEQ ID NO: 18565 - DNA, 20 bp, synthetic construct
  misc_feature 1..20: note = chemically synthesized
  source 1..20: mol_type = other DNA
tcagagtgagaggaagtaga

SEQ ID NO: 18566 - DNA, 20 bp, synthetic construct
  misc_feature 1..20: note = chemically synthesized
  source 1..20: mol_type = other DNA
aggaagtagagagatatatt

SEQ ID NO: 18567 - DNA, 20 bp, synthetic construct
  misc_feature 1..20: note = chemically synthesized
  source 1..20: mol_type = other DNA
ggaagtagagagatatattt

SEQ ID NO: 18568 - DNA, 20 bp, synthetic construct
  misc_feature 1..20: note = chemically synthesized
  source 1..20: mol_type = other DNA
agtagagagatatatttagg

SEQ ID NO: 18569 - DNA, 20 bp, synthetic construct
  misc_feature 1..20: note = chemically synthesized
  source 1..20: mol_type = other DNA
agatatatttaggtagaatc

SEQ ID NO: 18570 - DNA, 20 bp, synthetic construct
  misc_feature 1..20: note = chemically synthesized
  source 1..20: mol_type = other DNA
gatatatttaggtagaatct

SEQ ID NO: 18571 - DNA, 20 bp, synthetic construct
  misc_feature 1..20: note = chemically synthesized
  source 1..20: mol_type = other DNA
ggtagaatctgggcatattg

SEQ ID NO: 18572 - DNA, 20 bp, synthetic construct
  misc_feature 1..20: note = chemically synthesized
  source 1..20: mol_type = other DNA
gtagaatctgggcatattga

SEQ ID NO: 18573 - DNA, 20 bp, synthetic construct
  misc_feature 1..20: note = chemically synthesized
  source 1..20: mol_type = other DNA
tagaatctgggcatattgaa

SEQ ID NO: 18574 - DNA, 20 bp, synthetic construct
  misc_feature 1..20: note = chemically synthesized
  source 1..20: mol_type = other DNA
aatctgggcatattgaaggg

SEQ ID NO: 18575 - DNA, 20 bp, synthetic construct
  misc_feature 1..20: note = chemically synthesized
  source 1..20: mol_type = other DNA
gggaagacatcaataattca

SEQ ID NO: 18576 - DNA, 20 bp, synthetic construct
  misc_feature 1..20: note = chemically synthesized
  source 1..20: mol_type = other DNA
aagacatcaataattcacag

SEQ ID NO: 18577 - DNA, 20 bp, synthetic construct
  misc_feature 1..20: note = chemically synthesized
  source 1..20: mol_type = other DNA
atcaataattcacagtagcc

SEQ ID NO: 18578 - DNA, 20 bp, synthetic construct
  misc_feature 1..20: note = chemically synthesized
  source 1..20: mol_type = other DNA
tcaataattcacagtagcca

SEQ ID NO: 18579 - DNA, 20 bp, synthetic construct
  misc_feature 1..20: note = chemically synthesized
  source 1..20: mol_type = other DNA
aattcacagtagccaaggaa

SEQ ID NO: 18580 - DNA, 20 bp, synthetic construct
  misc_feature 1..20: note = chemically synthesized
  source 1..20: mol_type = other DNA
ccaaggaatagaaacaatac

SEQ ID NO: 18581 - DNA, 20 bp, synthetic construct
  misc_feature 1..20: note = chemically synthesized
  source 1..20: mol_type = other DNA
acaatacaagtatctatcaa

SEQ ID NO: 18582 - DNA, 20 bp, synthetic construct
  misc_feature 1..20: note = chemically synthesized
  source 1..20: mol_type = other DNA
aaaatgtcttatatatgtga

SEQ ID NO: 18583 - DNA, 20 bp, synthetic construct
  misc_feature 1..20: note = chemically synthesized
  source 1..20: mol_type = other DNA
gaatattatttatctataaa

SEQ ID NO: 18584 - DNA, 20 bp, synthetic construct
  misc_feature 1..20: note = chemically synthesized
  source 1..20: mol_type = other DNA
tattatttatctataaaaag

SEQ ID NO: 18585 - DNA, 20 bp, synthetic construct
  misc_feature 1..20: note = chemically synthesized
  source 1..20: mol_type = other DNA
attatttatctataaaaagt

SEQ ID NO: 18586 - DNA, 20 bp, synthetic construct
  misc_feature 1..20: note = chemically synthesized
  source 1..20: mol_type = other DNA
aaaccttaaaaaactatcct

SEQ ID NO: 18587 - DNA, 20 bp, synthetic construct
  misc_feature 1..20: note = chemically synthesized
  source 1..20: mol_type = other DNA
aaaactatcctaagtgcaat

SEQ ID NO: 18588 - DNA, 20 bp, synthetic construct
  misc_feature 1..20: note = chemically synthesized
  source 1..20: mol_type = other DNA
gtgcaataagtcatacgcaa

SEQ ID NO: 18589 - DNA, 20 bp, synthetic construct
  misc_feature 1..20: note = chemically synthesized
  source 1..20: mol_type = other DNA
ttgtctgatttcacttacat

SEQ ID NO: 18590 - DNA, 20 bp, synthetic construct
  misc_feature 1..20: note = chemically synthesized
  source 1..20: mol_type = other DNA
tttcacttacatgagctatc

SEQ ID NO: 18591 - DNA, 20 bp, synthetic construct
  misc_feature 1..20: note = chemically synthesized
  source 1..20: mol_type = other DNA
cttacatgagctatctagaa

SEQ ID NO: 18592 - DNA, 20 bp, synthetic construct
  misc_feature 1..20: note = chemically synthesized
  source 1..20: mol_type = other DNA
ttacatgagctatctagaat

SEQ ID NO: 18593 - DNA, 20 bp, synthetic construct
  misc_feature 1..20: note = chemically synthesized
  source 1..20: mol_type = other DNA
atctagaataggcaaattca

SEQ ID NO: 18594 - DNA, 20 bp, synthetic construct
  misc_feature 1..20: note = chemically synthesized
  source 1..20: mol_type = other DNA
ctagaataggcaaattcata

SEQ ID NO: 18595 - DNA, 20 bp, synthetic construct
  misc_feature 1..20: note = chemically synthesized
  source 1..20: mol_type = other DNA
ggcaaattcatagagacaaa

SEQ ID NO: 18596 - DNA, 20 bp, synthetic construct
  misc_feature 1..20: note = chemically synthesized
  source 1..20: mol_type = other DNA
aaattcatagagacaaaaag

SEQ ID NO: 18597 - DNA, 20 bp, synthetic construct
  misc_feature 1..20: note = chemically synthesized
  source 1..20: mol_type = other DNA
catagagacaaaaagtagat

SEQ ID NO: 18598 - DNA, 20 bp, synthetic construct
  misc_feature 1..20: note = chemically synthesized
  source 1..20: mol_type = other DNA
agagacaaaaagtagattag

SEQ ID NO: 18599 - DNA, 20 bp, synthetic construct
  misc_feature 1..20: note = chemically synthesized
  source 1..20: mol_type = other DNA
aaaagtagattagaagttac

SEQ ID NO: 18600 - DNA, 20 bp, synthetic construct
  misc_feature 1..20: note = chemically synthesized
  source 1..20: mol_type = other DNA
aagtagattagaagttacca

SEQ ID NO: 18601 - DNA, 20 bp, synthetic construct
  misc_feature 1..20: note = chemically synthesized
  source 1..20: mol_type = other DNA
gattagaagttaccagagtg

SEQ ID NO: 18602 - DNA, 20 bp, synthetic construct
  misc_feature 1..20: note = chemically synthesized
  source 1..20: mol_type = other DNA
attagaagttaccagagtgt

SEQ ID NO: 18603 - DNA, 20 bp, synthetic construct
  misc_feature 1..20: note = chemically synthesized
  source 1..20: mol_type = other DNA
agaagttaccagagtgtagg

SEQ ID NO: 18604 - DNA, 20 bp, synthetic construct
  misc_feature 1..20: note = chemically synthesized
  source 1..20: mol_type = other DNA
accagagtgtaggaagaaca

SEQ ID NO: 18605 - DNA, 20 bp, synthetic construct
  misc_feature 1..20: note = chemically synthesized
  source 1..20: mol_type = other DNA
agtgtaggaagaacatggat

SEQ ID NO: 18606 - DNA, 20 bp, synthetic construct
  misc_feature 1..20: note = chemically synthesized
  source 1..20: mol_type = other DNA
gtgtaggaagaacatggatt

SEQ ID NO: 18607 - DNA, 20 bp, synthetic construct
  misc_feature 1..20: note = chemically synthesized
  source 1..20: mol_type = other DNA
tgtaggaagaacatggattg

SEQ ID NO: 18608 - DNA, 20 bp, synthetic construct
  misc_feature 1..20: note = chemically synthesized
  source 1..20: mol_type = other DNA
taggaagaacatggattggg

SEQ ID NO: 18609 - DNA, 20 bp, synthetic construct
  misc_feature 1..20: note = chemically synthesized
  source 1..20: mol_type = other DNA
gagtaactgattaatcaata

SEQ ID NO: 18610 - DNA, 20 bp, synthetic construct
  misc_feature 1..20: note = chemically synthesized
  source 1..20: mol_type = other DNA
gtaactgattaatcaatata

SEQ ID NO: 18611 - DNA, 20 bp, synthetic construct
  misc_feature 1..20: note = chemically synthesized
  source 1..20: mol_type = other DNA
atcaatatagagtttttatt

SEQ ID NO: 18612 - DNA, 20 bp, synthetic construct
  misc_feature 1..20: note = chemically synthesized
  source 1..20: mol_type = other DNA
tttggtgtaatacaaaattt

SEQ ID NO: 18613 - DNA, 20 bp, synthetic construct
  misc_feature 1..20: note = chemically synthesized
  source 1..20: mol_type = other DNA
gtaatacaaaattttagaaa

SEQ ID NO: 18614 - DNA, 20 bp, synthetic construct
  misc_feature 1..20: note = chemically synthesized
  source 1..20: mol_type = other DNA
atacaaaattttagaaatag

SEQ ID NO: 18615 - DNA, 20 bp, synthetic construct
  misc_feature 1..20: note = chemically synthesized
  source 1..20: mol_type = other DNA
caaaattttagaaatagtgg

SEQ ID NO: 18616 - DNA, 20 bp, synthetic construct
  misc_feature 1..20: note = chemically synthesized
  source 1..20: mol_type = other DNA
gtggtggtgattgcacaaca

SEQ ID NO: 18617 - DNA, 20 bp, synthetic construct
  misc_feature 1..20: note = chemically synthesized
  source 1..20: mol_type = other DNA
cacaacatggcaaatgtaat

SEQ ID NO: 18618 - DNA, 20 bp, synthetic construct
  misc_feature 1..20: note = chemically synthesized
  source 1..20: mol_type = other DNA
actgcattatacattataaa

SEQ ID NO: 18619 - DNA, 20 bp, synthetic construct
  misc_feature 1..20: note = chemically synthesized
  source 1..20: mol_type = other DNA
ctgcattatacattataaaa

SEQ ID NO: 18620 - DNA, 20 bp, synthetic construct
  misc_feature 1..20: note = chemically synthesized
  source 1..20: mol_type = other DNA
tatacattataaaaaggcta

SEQ ID NO: 18621 - DNA, 20 bp, synthetic construct
  misc_feature 1..20: note = chemically synthesized
  source 1..20: mol_type = other DNA
acattataaaaaggctaaag

SEQ ID NO: 18622 - DNA, 20 bp, synthetic construct
  misc_feature 1..20: note = chemically synthesized
  source 1..20: mol_type = other DNA
attcattaaatttattgtga

SEQ ID NO: 18623 - DNA, 20 bp, synthetic construct
  misc_feature 1..20: note = chemically synthesized
  source 1..20: mol_type = other DNA
ttcattaaatttattgtgaa

SEQ ID NO: 18624 - DNA, 20 bp, synthetic construct
  misc_feature 1..20: note = chemically synthesized
  source 1..20: mol_type = other DNA
attgtgaaaggtttaaaaac

SEQ ID NO: 18625 - DNA, 20 bp, synthetic construct
  misc_feature 1..20: note = chemically synthesized
  source 1..20: mol_type = other DNA
tgtgaaaggtttaaaaacaa

SEQ ID NO: 18626 - DNA, 20 bp, synthetic construct
  misc_feature 1..20: note = chemically synthesized
  source 1..20: mol_type = other DNA
aggtttaaaaacaagagttt

SEQ ID NO: 18627 - DNA, 20 bp, synthetic construct
  misc_feature 1..20: note = chemically synthesized
  source 1..20: mol_type = other DNA
ggtttaaaaacaagagtttg

SEQ ID NO: 18628 - DNA, 20 bp, synthetic construct
  misc_feature 1..20: note = chemically synthesized
  source 1..20: mol_type = other DNA
tgaggttaaaaattatgtct

SEQ ID NO: 18629 - DNA, 20 bp, synthetic construct
  misc_feature 1..20: note = chemically synthesized
  source 1..20: mol_type = other DNA
tgtctaagataaaatattaa

SEQ ID NO: 18630 - DNA, 20 bp, synthetic construct
  misc_feature 1..20: note = chemically synthesized
  source 1..20: mol_type = other DNA
aaagatttattccacatgtg

SEQ ID NO: 18631 - DNA, 20 bp, synthetic construct
  misc_feature 1..20: note = chemically synthesized
  source 1..20: mol_type = other DNA
aagatttattccacatgtgc

SEQ ID NO: 18632 - DNA, 20 bp, synthetic construct
  misc_feature 1..20: note = chemically synthesized
  source 1..20: mol_type = other DNA
acaactatatatatacatac

SEQ ID NO: 18633 - DNA, 20 bp, synthetic construct
  misc_feature 1..20: note = chemically synthesized
  source 1..20: mol_type = other DNA
caactatatatatacatact

SEQ ID NO: 18634 - DNA, 20 bp, synthetic construct
  misc_feature 1..20: note = chemically synthesized
  source 1..20: mol_type = other DNA
tatatatacatactaggata

SEQ ID NO: 18635 - DNA, 20 bp, synthetic construct
  misc_feature 1..20: note = chemically synthesized
  source 1..20: mol_type = other DNA
ataaagtctcttatatctta

SEQ ID NO: 18636 - DNA, 20 bp, synthetic construct
  misc_feature 1..20: note = chemically synthesized
  source 1..20: mol_type = other DNA
atttatttgattttaataaa

SEQ ID NO: 18637 - DNA, 20 bp, synthetic construct
  misc_feature 1..20: note = chemically synthesized
  source 1..20: mol_type = other DNA
tttgattttaataaatagaa

SEQ ID NO: 18638 - DNA, 20 bp, synthetic construct
  misc_feature 1..20: note = chemically synthesized
  source 1..20: mol_type = other DNA
ttgattttaataaatagaat

SEQ ID NO: 18639 - DNA, 20 bp, synthetic construct
  misc_feature 1..20: note = chemically synthesized
  source 1..20: mol_type = other DNA
ttttaataaatagaatagga

SEQ ID NO: 18640 - DNA, 20 bp, synthetic construct
  misc_feature 1..20: note = chemically synthesized
  source 1..20: mol_type = other DNA
ttgactcaacaatttcactt

SEQ ID NO: 18641 - DNA, 20 bp, synthetic construct
  misc_feature 1..20: note = chemically synthesized
  source 1..20: mol_type = other DNA
gactcaacaatttcacttga

SEQ ID NO: 18642 - DNA, 20 bp, synthetic construct
  misc_feature 1..20: note = chemically synthesized
  source 1..20: mol_type = other DNA
caacaatttcacttgagaga

SEQ ID NO: 18643 - DNA, 20 bp, synthetic construct
  misc_feature 1..20: note = chemically synthesized
  source 1..20: mol_type = other DNA
ttcacttgagagaaagaatc

SEQ ID NO: 18644 - DNA, 20 bp, synthetic construct
  misc_feature 1..20: note = chemically synthesized
  source 1..20: mol_type = other DNA
ttgagagaaagaatcaagca

SEQ ID NO: 18645 - DNA, 20 bp, synthetic construct
  misc_feature 1..20: note = chemically synthesized
  source 1..20: mol_type = other DNA
aatcaagcatagattatttt

SEQ ID NO: 18646 - DNA, 20 bp, synthetic construct
  misc_feature 1..20: note = chemically synthesized
  source 1..20: mol_type = other DNA
agattattttcagttccata

SEQ ID NO: 18647 - DNA, 20 bp, synthetic construct
  misc_feature 1..20: note = chemically synthesized
  source 1..20: mol_type = other DNA
cctcctcaaatatctatgat

SEQ ID NO: 18648 - DNA, 20 bp, synthetic construct
  misc_feature 1..20: note = chemically synthesized
  source 1..20: mol_type = other DNA
tctatgattggacatctgtg

SEQ ID NO: 18649 - DNA, 20 bp, synthetic construct
  misc_feature 1..20: note = chemically synthesized
  source 1..20: mol_type = other DNA
ctatgattggacatctgtga

SEQ ID NO: 18650 - DNA, 20 bp, synthetic construct
  misc_feature 1..20: note = chemically synthesized
  source 1..20: mol_type = other DNA
gtgaaggcatgccgcaaatc

SEQ ID NO: 18651 - DNA, 20 bp, synthetic construct
  misc_feature 1..20: note = chemically synthesized
  source 1..20: mol_type = other DNA
tgaaggcatgccgcaaatct

SEQ ID NO: 18652 - DNA, 20 bp, synthetic construct
  misc_feature 1..20: note = chemically synthesized
  source 1..20: mol_type = other DNA
gaaggcatgccgcaaatcta

SEQ ID NO: 18653 - DNA, 20 bp, synthetic construct
  misc_feature 1..20: note = chemically synthesized
  source 1..20: mol_type = other DNA
aaatctagggtaactaacat

SEQ ID NO: 18654 - DNA, 20 bp, synthetic construct
  misc_feature 1..20: note = chemically synthesized
  source 1..20: mol_type = other DNA
attcttgttatttactcatc

SEQ ID NO: 18655 - DNA, 20 bp, synthetic construct
  misc_feature 1..20: note = chemically synthesized
  source 1..20: mol_type = other DNA
tatttactcatctggtaatt

SEQ ID NO: 18656 - DNA, 20 bp, synthetic construct
  misc_feature 1..20: note = chemically synthesized
  source 1..20: mol_type = other DNA
tcatctggtaattcagaatt

SEQ ID NO: 18657 - DNA, 20 bp, synthetic construct
  misc_feature 1..20: note = chemically synthesized
  source 1..20: mol_type = other DNA
cttcctatttatgtttgtat

SEQ ID NO: 18658 - DNA, 20 bp, synthetic construct
  misc_feature 1..20: note = chemically synthesized
  source 1..20: mol_type = other DNA
tatgtttgtatcagattatc

SEQ ID NO: 18659 - DNA, 20 bp, synthetic construct
  misc_feature 1..20: note = chemically synthesized
  source 1..20: mol_type = other DNA
tcagattatctggctctaac

SEQ ID NO: 18660 - DNA, 20 bp, synthetic construct
  misc_feature 1..20: note = chemically synthesized
  source 1..20: mol_type = other DNA
ttgatatattatctcacgtt

SEQ ID NO: 18661 - DNA, 20 bp, synthetic construct
  misc_feature 1..20: note = chemically synthesized
  source 1..20: mol_type = other DNA
atatattatctcacgtttgg

SEQ ID NO: 18662 - DNA, 20 bp, synthetic construct
  misc_feature 1..20: note = chemically synthesized
  source 1..20: mol_type = other DNA
tcacgtttggcagtattttt

SEQ ID NO: 18663 - DNA, 20 bp, synthetic construct
  misc_feature 1..20: note = chemically synthesized
  source 1..20: mol_type = other DNA
ttggactgctattttaaaac

SEQ ID NO: 18664 - DNA, 20 bp, synthetic construct
  misc_feature 1..20: note = chemically synthesized
  source 1..20: mol_type = other DNA
tggactgctattttaaaact

SEQ ID NO: 18665 - DNA, 20 bp, synthetic construct
  misc_feature 1..20: note = chemically synthesized
  source 1..20: mol_type = other DNA
ttttaaaactgggtctactt

SEQ ID NO: 18666 - DNA, 20 bp, synthetic construct
  misc_feature 1..20: note = chemically synthesized
  source 1..20: mol_type = other DNA
tacttcagtgaatgacaccc

SEQ ID NO: 18667 - DNA, 20 bp, synthetic construct
  misc_feature 1..20: note = chemically synthesized
  source 1..20: mol_type = other DNA
aatgacacccaagaaaaacc

SEQ ID NO: 18668 - DNA, 20 bp, synthetic construct
  misc_feature 1..20: note = chemically synthesized
  source 1..20: mol_type = other DNA
ggatctatcctgctttctcc

SEQ ID NO: 18669 - DNA, 20 bp, synthetic construct
  misc_feature 1..20: note = chemically synthesized
  source 1..20: mol_type = other DNA
gatctatcctgctttctcct

SEQ ID NO: 18670 - DNA, 20 bp, synthetic construct
  misc_feature 1..20: note = chemically synthesized
  source 1..20: mol_type = other DNA
tatcctgctttctcctagga

SEQ ID NO: 18671 - DNA, 20 bp, synthetic construct
  misc_feature 1..20: note = chemically synthesized
  source 1..20: mol_type = other DNA
ctgctttctcctaggatagt

SEQ ID NO: 18672 - DNA, 20 bp, synthetic construct
  misc_feature 1..20: note = chemically synthesized
  source 1..20: mol_type = other DNA
acttattctctgaccttctt

SEQ ID NO: 18673 - DNA, 20 bp, synthetic construct
  misc_feature 1..20: note = chemically synthesized
  source 1..20: mol_type = other DNA
cttattctctgaccttcttt

SEQ ID NO: 18674 - DNA, 20 bp, synthetic construct
  misc_feature 1..20: note = chemically synthesized
  source 1..20: mol_type = other DNA
tctttgggtgtcatctgctt

SEQ ID NO: 18675 - DNA, 20 bp, synthetic construct
  misc_feature 1..20: note = chemically synthesized
  source 1..20: mol_type = other DNA
ttactatgactcttcatgat

SEQ ID NO: 18676 - DNA, 20 bp, synthetic construct
  misc_feature 1..20: note = chemically synthesized
  source 1..20: mol_type = other DNA
tactatgactcttcatgatc

SEQ ID NO: 18677 - DNA, 20 bp, synthetic construct
  misc_feature 1..20: note = chemically synthesized
  source 1..20: mol_type = other DNA
actcttcatgatcaggcaaa

SEQ ID NO: 18678 - DNA, 20 bp, synthetic construct
  misc_feature 1..20: note = chemically synthesized
  source 1..20: mol_type = other DNA
gaatgatttttttaattatt

SEQ ID NO: 18679 - DNA, 20 bp, synthetic construct
  misc_feature 1..20: note = chemically synthesized
  source 1..20: mol_type = other DNA
agctaatattttgtttttaa

SEQ ID NO: 18680 - DNA, 20 bp, synthetic construct
  misc_feature 1..20: note = chemically synthesized
  source 1..20: mol_type = other DNA
atattttgtttttaaaagtc

SEQ ID NO: 18681 - DNA, 20 bp, synthetic construct
  misc_feature 1..20: note = chemically synthesized
  source 1..20: mol_type = other DNA
tttttaaaagtctagttcta

SEQ ID NO: 18682 - DNA, 20 bp, synthetic construct
  misc_feature 1..20: note = chemically synthesized
  source 1..20: mol_type = other DNA
ttattattttgactcattct

SEQ ID NO: 18683 - DNA, 20 bp, synthetic construct
  misc_feature 1..20: note = chemically synthesized
  source 1..20: mol_type = other DNA
ataatgattcttcttattta

SEQ ID NO: 18684 - DNA, 20 bp, synthetic construct
  misc_feature 1..20: note = chemically synthesized
  source 1..20: mol_type = other DNA
atttatagacaatacataat

SEQ ID NO: 18685 - DNA, 20 bp, synthetic construct
  misc_feature 1..20: note = chemically synthesized
  source 1..20: mol_type = other DNA
atcagtgactgcctttcttt

SEQ ID NO: 18686 - DNA, 20 bp, synthetic construct
  misc_feature 1..20: note = chemically synthesized
  source 1..20: mol_type = other DNA
tttggcactgcctttcttcc

SEQ ID NO: 18687 - DNA, 20 bp, synthetic construct
  misc_feature 1..20: note = chemically synthesized
  source 1..20: mol_type = other DNA
cctttcttccaagaacatgt

SEQ ID NO: 18688 - DNA, 20 bp, synthetic construct
  misc_feature 1..20: note = chemically synthesized
  source 1..20: mol_type = other DNA
aagaacatgtcagaaattga

SEQ ID NO: 18689 - DNA, 20 bp, synthetic construct
  misc_feature 1..20: note = chemically synthesized
  source 1..20: mol_type = other DNA
cctgtaaaccttattatatt

SEQ ID NO: 18690 - DNA, 20 bp, synthetic construct
  misc_feature 1..20: note = chemically synthesized
  source 1..20: mol_type = other DNA
catttccactttcctaaatt

SEQ ID NO: 18691 - DNA, 20 bp, synthetic construct
  misc_feature 1..20: note = chemically synthesized
  source 1..20: mol_type = other DNA
ccattttataaataatattg

SEQ ID NO: 18692 - DNA, 20 bp, synthetic construct
  misc_feature 1..20: note = chemically synthesized
  source 1..20: mol_type = other DNA
taaaacatcaatgaattatg

SEQ ID NO: 18693 - DNA, 20 bp, synthetic construct
  misc_feature 1..20: note = chemically synthesized
  source 1..20: mol_type = other DNA
atgaattatgcagcttcttt

SEQ ID NO: 18694 - DNA, 20 bp, synthetic construct
  misc_feature 1..20: note = chemically synthesized
  source 1..20: mol_type = other DNA
aattatgcagcttctttcag

SEQ ID NO: 18695 - DNA, 20 bp, synthetic construct
  misc_feature 1..20: note = chemically synthesized
  source 1..20: mol_type = other DNA
cagtagctttccatgactcc

SEQ ID NO: 18696 - DNA, 20 bp, synthetic construct
  misc_feature 1..20: note = chemically synthesized
  source 1..20: mol_type = other DNA
tagctttccatgactccgag

SEQ ID NO: 18697 - DNA, 20 bp, synthetic construct
  misc_feature 1..20: note = chemically synthesized
  source 1..20: mol_type = other DNA
gctttccatgactccgagta

SEQ ID NO: 18698 - DNA, 20 bp, synthetic construct
  misc_feature 1..20: note = chemically synthesized
  source 1..20: mol_type = other DNA
aaactcttatgatgaccaat

SEQ ID NO: 18699 - DNA, 20 bp, synthetic construct
  misc_feature 1..20: note = chemically synthesized
  source 1..20: mol_type = other DNA
aactcttatgatgaccaata

SEQ ID NO: 18700 - DNA, 20 bp, synthetic construct
  misc_feature 1..20: note = chemically synthesized
  source 1..20: mol_type = other DNA
aaggccattccttccctctt

SEQ ID NO: 18701 - DNA, 20 bp, synthetic construct
  misc_feature 1..20: note = chemically synthesized
  source 1..20: mol_type = other DNA
ccctcttcagcctcttctca

SEQ ID NO: 18702 - DNA, 20 bp, synthetic construct
  misc_feature 1..20: note = chemically synthesized
  source 1..20: mol_type = other DNA
tcaaagcaaacaccctcttc

SEQ ID NO: 18703 - DNA, 20 bp, synthetic construct
  misc_feature 1..20: note = chemically synthesized
  source 1..20: mol_type = other DNA
aagcaaacaccctcttccag

SEQ ID NO: 18704 - DNA, 20 bp, synthetic construct
  misc_feature 1..20: note = chemically synthesized
  source 1..20: mol_type = other DNA
ttccctaatataaaccaacc

SEQ ID NO: 18705 - DNA, 20 bp, synthetic construct
  misc_feature 1..20: note = chemically synthesized
  source 1..20: mol_type = other DNA
taatataaaccaacctagct

SEQ ID NO: 18706 - DNA, 20 bp, synthetic construct
  misc_feature 1..20: note = chemically synthesized
  source 1..20: mol_type = other DNA
aatataaaccaacctagctg

SEQ ID NO: 18707 - DNA, 20 bp, synthetic construct
  misc_feature 1..20: note = chemically synthesized
  source 1..20: mol_type = other DNA
ggtctccacacacactcctt

SEQ ID NO: 18708 - DNA, 20 bp, synthetic construct
  misc_feature 1..20: note = chemically synthesized
  source 1..20: mol_type = other DNA
cacacacactccttcagtct

SEQ ID NO: 18709 - DNA, 20 bp, synthetic construct
  misc_feature 1..20: note = chemically synthesized
  source 1..20: mol_type = other DNA
attcttgtctgtattttcac

SEQ ID NO: 18710 - DNA, 20 bp, synthetic construct
  misc_feature 1..20: note = chemically synthesized
  source 1..20: mol_type = other DNA
ttgtctgtattttcaccagt

SEQ ID NO: 18711 - DNA, 20 bp, synthetic construct
  misc_feature 1..20: note = chemically synthesized
  source 1..20: mol_type = other DNA
gttagtttctaatccatttt

SEQ ID NO: 18712 - DNA, 20 bp, synthetic construct
  misc_feature 1..20: note = chemically synthesized
  source 1..20: mol_type = other DNA
ttagtttctaatccattttc

SEQ ID NO: 18713 - DNA, 20 bp, synthetic construct
  misc_feature 1..20: note = chemically synthesized
  source 1..20: mol_type = other DNA
tctaatccattttcaggtct

SEQ ID NO: 18714 - DNA, 20 bp, synthetic construct
  misc_feature 1..20: note = chemically synthesized
  source 1..20: mol_type = other DNA
ccattttcaggtctcagctg

SEQ ID NO: 18715 - DNA, 20 bp, synthetic construct
  misc_feature 1..20: note = chemically synthesized
  source 1..20: mol_type = other DNA
cattttcaggtctcagctga

SEQ ID NO: 18716 - DNA, 20 bp, synthetic construct
  misc_feature 1..20: note = chemically synthesized
  source 1..20: mol_type = other DNA
attttcaggtctcagctgaa

SEQ ID NO: 18717 - DNA, 20 bp, synthetic construct
  misc_feature 1..20: note = chemically synthesized
  source 1..20: mol_type = other DNA
cagctgaagggacactttct

SEQ ID NO: 18718 - DNA, 20 bp, synthetic construct
  misc_feature 1..20: note = chemically synthesized
  source 1..20: mol_type = other DNA
agctgaagggacactttctc

SEQ ID NO: 18719 - DNA, 20 bp, synthetic construct
  misc_feature 1..20: note = chemically synthesized
  source 1..20: mol_type = other DNA
gctgaagggacactttctca

SEQ ID NO: 18720 - DNA, 20 bp, synthetic construct
  misc_feature 1..20: note = chemically synthesized
  source 1..20: mol_type = other DNA
gggaatcttacccttatttc

SEQ ID NO: 18721 - DNA, 20 bp, synthetic construct
  misc_feature 1..20: note = chemically synthesized
  source 1..20: mol_type = other DNA
ttatttcaagccataacctc

SEQ ID NO: 18722 - DNA, 20 bp, synthetic construct
  misc_feature 1..20: note = chemically synthesized
  source 1..20: mol_type = other DNA
cataacctcaagcctttttt

SEQ ID NO: 18723 - DNA, 20 bp, synthetic construct
  misc_feature 1..20: note = chemically synthesized
  source 1..20: mol_type = other DNA
tgagacccacactctccatt

SEQ ID NO: 18724 - DNA, 20 bp, synthetic construct
  misc_feature 1..20: note = chemically synthesized
  source 1..20: mol_type = other DNA
ttctgctttatgattaatca

SEQ ID NO: 18725 - DNA, 20 bp, synthetic construct
  misc_feature 1..20: note = chemically synthesized
  source 1..20: mol_type = other DNA
cacagcacttgttttaaatt

SEQ ID NO: 18726 - DNA, 20 bp, synthetic construct
  misc_feature 1..20: note = chemically synthesized
  source 1..20: mol_type = other DNA
ttggatttcttttattcttt

SEQ ID NO: 18727 - DNA, 20 bp, synthetic construct
  misc_feature 1..20: note = chemically synthesized
  source 1..20: mol_type = other DNA
tttgagtccccacttatttg

SEQ ID NO: 18728 - DNA, 20 bp, synthetic construct
  misc_feature 1..20: note = chemically synthesized
  source 1..20: mol_type = other DNA
cccacttatttgaagacttt

SEQ ID NO: 18729 - DNA, 20 bp, synthetic construct
  misc_feature 1..20: note = chemically synthesized
  source 1..20: mol_type = other DNA
acttatttgaagactttaag

SEQ ID NO: 18730 - DNA, 20 bp, synthetic construct
  misc_feature 1..20: note = chemically synthesized
  source 1..20: mol_type = other DNA
tttgaagactttaagaagaa

SEQ ID NO: 18731 - DNA, 20 bp, synthetic construct
  misc_feature 1..20: note = chemically synthesized
  source 1..20: mol_type = other DNA
tctcttatatcatttttgct

SEQ ID NO: 18732 - DNA, 20 bp, synthetic construct
  misc_feature 1..20: note = chemically synthesized
  source 1..20: mol_type = other DNA
ttatatcatttttgcttagc

SEQ ID NO: 18733 - DNA, 20 bp, synthetic construct
  misc_feature 1..20: note = chemically synthesized
  source 1..20: mol_type = other DNA
tatatcatttttgcttagca

SEQ ID NO: 18734 - DNA, 20 bp, synthetic construct
  misc_feature 1..20: note = chemically synthesized
  source 1..20: mol_type = other DNA
cttagcaaggtgacccataa

SEQ ID NO: 18735 - DNA, 20 bp, synthetic construct
  misc_feature 1..20: note = chemically synthesized
  source 1..20: mol_type = other DNA
tgcccttaaaaaattaacca

SEQ ID NO: 18736 - DNA, 20 bp, synthetic construct
  misc_feature 1..20: note = chemically synthesized
  source 1..20: mol_type = other DNA
gcccttaaaaaattaaccaa

SEQ ID NO: 18737 - DNA, 20 bp, synthetic construct
  misc_feature 1..20: note = chemically synthesized
  source 1..20: mol_type = other DNA
ccaaaggaatgattaaatat

SEQ ID NO: 18738 - DNA, 20 bp, synthetic construct
  misc_feature 1..20: note = chemically synthesized
  source 1..20: mol_type = other DNA
aaggaatgattaaatattag

SEQ ID NO: 18739 - DNA, 20 bp, synthetic construct
  misc_feature 1..20: note = chemically synthesized
  source 1..20: mol_type = other DNA
tagtggtgtttccacgaaaa

SEQ ID NO: 18740 - DNA, 20 bp, synthetic construct
  misc_feature 1..20: note = chemically synthesized
  source 1..20: mol_type = other DNA
agtggtgtttccacgaaaat

SEQ ID NO: 18741 - DNA, 20 bp, synthetic construct
  misc_feature 1..20: note = chemically synthesized
  source 1..20: mol_type = other DNA
ttccacgaaaataggcacat

SEQ ID NO: 18742 - DNA, 20 bp, synthetic construct
  misc_feature 1..20: note = chemically synthesized
  source 1..20: mol_type = other DNA
tccacgaaaataggcacatg

SEQ ID NO: 18743 - DNA, 20 bp, synthetic construct
  misc_feature 1..20: note = chemically synthesized
  source 1..20: mol_type = other DNA
ggcacatgaggaatgattta

SEQ ID NO: 18744 - DNA, 20 bp, synthetic construct
  misc_feature 1..20: note = chemically synthesized
  source 1..20: mol_type = other DNA
aacacaaacccttttaaaca

SEQ ID NO: 18745 - DNA, 20 bp, synthetic construct
  misc_feature 1..20: note = chemically synthesized
  source 1..20: mol_type = other DNA
acacaaacccttttaaacat

SEQ ID NO: 18746 - DNA, 20 bp, synthetic construct
  misc_feature 1..20: note = chemically synthesized
  source 1..20: mol_type = other DNA
taggatatgtacaaataaat

SEQ ID NO: 18747 - DNA, 20 bp, synthetic construct
  misc_feature 1..20: note = chemically synthesized
  source 1..20: mol_type = other DNA
aggatatgtacaaataaatt

SEQ ID NO: 18748 - DNA, 20 bp, synthetic construct
  misc_feature 1..20: note = chemically synthesized
  source 1..20: mol_type = other DNA
tgtacaaataaattaggcaa

SEQ ID NO: 18749 - DNA, 20 bp, synthetic construct
  misc_feature 1..20: note = chemically synthesized
  source 1..20: mol_type = other DNA
aataaattaggcaaaagtat

SEQ ID NO: 18750 - DNA, 20 bp, synthetic construct
  misc_feature 1..20: note = chemically synthesized
  source 1..20: mol_type = other DNA
ttaggcaaaagtataagaaa

SEQ ID NO: 18751 - DNA, 20 bp, synthetic construct
  misc_feature 1..20: note = chemically synthesized
  source 1..20: mol_type = other DNA
aaaagatataaataaacctg

SEQ ID NO: 18752 - DNA, 20 bp, synthetic construct
  misc_feature 1..20: note = chemically synthesized
  source 1..20: mol_type = other DNA
gatataaataaacctgaagt

SEQ ID NO: 18753 - DNA, 20 bp, synthetic construct
  misc_feature 1..20: note = chemically synthesized
  source 1..20: mol_type = other DNA
taaataaacctgaagtcagc

SEQ ID NO: 18754 - DNA, 20 bp, synthetic construct
  misc_feature 1..20: note = chemically synthesized
  source 1..20: mol_type = other DNA
aaataaacctgaagtcagca

SEQ ID NO: 18755 - DNA, 20 bp, synthetic construct
  misc_feature 1..20: note = chemically synthesized
  source 1..20: mol_type = other DNA
aataaacctgaagtcagcaa

SEQ ID NO: 18756 - DNA, 20 bp, synthetic construct
  misc_feature 1..20: note = chemically synthesized
  source 1..20: mol_type = other DNA
gaagtcagcaagggctttga

SEQ ID NO: 18757 - DNA, 20 bp, synthetic construct
  misc_feature 1..20: note = chemically synthesized
  source 1..20: mol_type = other DNA
cagcaagggctttgatagta

SEQ ID NO: 18758 - DNA, 20 bp, synthetic construct
  misc_feature 1..20: note = chemically synthesized
  source 1..20: mol_type = other DNA
atagtatggctccaatactt

SEQ ID NO: 18759 - DNA, 20 bp, synthetic construct
  misc_feature 1..20: note = chemically synthesized
  source 1..20: mol_type = other DNA
gtatggctccaatacttcag

SEQ ID NO: 18760 - DNA, 20 bp, synthetic construct
  misc_feature 1..20: note = chemically synthesized
  source 1..20: mol_type = other DNA
ctccaatacttcagtagata

SEQ ID NO: 18761 - DNA, 20 bp, synthetic construct
  misc_feature 1..20: note = chemically synthesized
  source 1..20: mol_type = other DNA
taataaaataatgtatatgt

SEQ ID NO: 18762 - DNA, 20 bp, synthetic construct
  misc_feature 1..20: note = chemically synthesized
  source 1..20: mol_type = other DNA
aagcttttaaattgtgtata

SEQ ID NO: 18763 - DNA, 20 bp, synthetic construct
  misc_feature 1..20: note = chemically synthesized
  source 1..20: mol_type = other DNA
ttttaaattgtgtatatagc

SEQ ID NO: 18764 - DNA, 20 bp, synthetic construct
  misc_feature 1..20: note = chemically synthesized
  source 1..20: mol_type = other DNA
tgtgtatatagcaagacaaa

SEQ ID NO: 18765 - DNA, 20 bp, synthetic construct
  misc_feature 1..20: note = chemically synthesized
  source 1..20: mol_type = other DNA
tagcaagacaaacagaaaac

SEQ ID NO: 18766 - DNA, 20 bp, synthetic construct
  misc_feature 1..20: note = chemically synthesized
  source 1..20: mol_type = other DNA
agcaagacaaacagaaaact

SEQ ID NO: 18767 - DNA, 20 bp, synthetic construct
  misc_feature 1..20: note = chemically synthesized
  source 1..20: mol_type = other DNA
gtacactaaaaataaaacac

SEQ ID NO: 18768 - DNA, 20 bp, synthetic construct
  misc_feature 1..20: note = chemically synthesized
  source 1..20: mol_type = other DNA
acactaaaaataaaacacta

SEQ ID NO: 18769 - DNA, 20 bp, synthetic construct
  misc_feature 1..20: note = chemically synthesized
  source 1..20: mol_type = other DNA
cttcttaaaatcaattataa

SEQ ID NO: 18770 - DNA, 20 bp, synthetic construct
  misc_feature 1..20: note = chemically synthesized
  source 1..20: mol_type = other DNA
ttcttaaaatcaattataaa

SEQ ID NO: 18771 - DNA, 20 bp, synthetic construct
  misc_feature 1..20: note = chemically synthesized
  source 1..20: mol_type = other DNA
aattataaaaggatgaaaat

SEQ ID NO: 18772 - DNA, 20 bp, synthetic construct
  misc_feature 1..20: note = chemically synthesized
  source 1..20: mol_type = other DNA
atatatgatcaaataaatcc

SEQ ID NO: 18773 - DNA, 20 bp, synthetic construct
  misc_feature 1..20: note = chemically synthesized
  source 1..20: mol_type = other DNA
atgatcaaataaatcctagt

SEQ ID NO: 18774 - DNA, 20 bp, synthetic construct
  misc_feature 1..20: note = chemically synthesized
  source 1..20: mol_type = other DNA
taaatcctagtgagatttcc

SEQ ID NO: 18775 - DNA, 20 bp, synthetic construct
  misc_feature 1..20: note = chemically synthesized
  source 1..20: mol_type = other DNA
ccaagttgctgcaacaaatt

SEQ ID NO: 18776 - DNA, 20 bp, synthetic construct
  misc_feature 1..20: note = chemically synthesized
  source 1..20: mol_type = other DNA
tgagatcacttgtgatttat

SEQ ID NO: 18777 - DNA, 20 bp, synthetic construct
  misc_feature 1..20: note = chemically synthesized
  source 1..20: mol_type = other DNA
aaataaattgaatatacaaa

SEQ ID NO: 18778 - DNA, 20 bp, synthetic construct
  misc_feature 1..20: note = chemically synthesized
  source 1..20: mol_type = other DNA
aataaattgaatatacaaaa

SEQ ID NO: 18779 - DNA, 20 bp, synthetic construct
  misc_feature 1..20: note = chemically synthesized
  source 1..20: mol_type = other DNA
atatacaaaaaggaaaatat

SEQ ID NO: 18780 - DNA, 20 bp, synthetic construct
  misc_feature 1..20: note = chemically synthesized
  source 1..20: mol_type = other DNA
tcagattatatttcatctat

SEQ ID NO: 18781 - DNA, 20 bp, synthetic construct
  misc_feature 1..20: note = chemically synthesized
  source 1..20: mol_type = other DNA
atttcatctattggacatat

SEQ ID NO: 18782 - DNA, 20 bp, synthetic construct
  misc_feature 1..20: note = chemically synthesized
  source 1..20: mol_type = other DNA
atatcagaaatgtttctatc

SEQ ID NO: 18783 - DNA, 20 bp, synthetic construct
  misc_feature 1..20: note = chemically synthesized
  source 1..20: mol_type = other DNA
aaatgtttctatccagcatt

SEQ ID NO: 18784 - DNA, 20 bp, synthetic construct
  misc_feature 1..20: note = chemically synthesized
  source 1..20: mol_type = other DNA
atgtttctatccagcattta

SEQ ID NO: 18785 - DNA, 20 bp, synthetic construct
  misc_feature 1..20: note = chemically synthesized
  source 1..20: mol_type = other DNA
gtttctatccagcatttaga

SEQ ID NO: 18786 - DNA, 20 bp, synthetic construct
  misc_feature 1..20: note = chemically synthesized
  source 1..20: mol_type = other DNA
ccagcatttagagagaacac

SEQ ID NO: 18787 - DNA, 20 bp, synthetic construct
  misc_feature 1..20: note = chemically synthesized
  source 1..20: mol_type = other DNA
tagagagaacacaagatcaa

SEQ ID NO: 18788 - DNA, 20 bp, synthetic construct
  misc_feature 1..20: note = chemically synthesized
  source 1..20: mol_type = other DNA
aatacattaactcatgaaat

SEQ ID NO: 18789 - DNA, 20 bp, synthetic construct
  misc_feature 1..20: note = chemically synthesized
  source 1..20: mol_type = other DNA
taactcatgaaatgagcaac

SEQ ID NO: 18790 - DNA, 20 bp, synthetic construct
  misc_feature 1..20: note = chemically synthesized
  source 1..20: mol_type = other DNA
aactcatgaaatgagcaact

SEQ ID NO: 18791 - DNA, 20 bp, synthetic construct
  misc_feature 1..20: note = chemically synthesized
  source 1..20: mol_type = other DNA
aactaggaaatttatgaatt

SEQ ID NO: 18792 - DNA, 20 bp, synthetic construct
  misc_feature 1..20: note = chemically synthesized
  source 1..20: mol_type = other DNA
ctaggaaatttatgaattta

SEQ ID NO: 18793 - DNA, 20 bp, synthetic construct
  misc_feature 1..20: note = chemically synthesized
  source 1..20: mol_type = other DNA
aggaaatttatgaatttaga

SEQ ID NO: 18794 - DNA, 20 bp, synthetic construct
  misc_feature 1..20: note = chemically synthesized
  source 1..20: mol_type = other DNA
gtctctactgtaaaacttta

SEQ ID NO: 18795 - DNA, 20 bp, synthetic construct
  misc_feature 1..20: note = chemically synthesized
  source 1..20: mol_type = other DNA
atgacattgtatcattttga

SEQ ID NO: 18796 - DNA, 20 bp, synthetic construct
  misc_feature 1..20: note = chemically synthesized
  source 1..20: mol_type = other DNA
atcattttgaaagaaaactc

SEQ ID NO: 18797 - DNA, 20 bp, synthetic construct
  misc_feature 1..20: note = chemically synthesized
  source 1..20: mol_type = other DNA
aagaaaactcaagacaccaa

SEQ ID NO: 18798 - DNA, 20 bp, synthetic construct
  misc_feature 1..20: note = chemically synthesized
  source 1..20: mol_type = other DNA
tgcaaaaaaaaattgacaaa

SEQ ID NO: 18799 - DNA, 20 bp, synthetic construct
  misc_feature 1..20: note = chemically synthesized
  source 1..20: mol_type = other DNA
gcaaaaaaaaattgacaaat

SEQ ID NO: 18800 - DNA, 20 bp, synthetic construct
  misc_feature 1..20: note = chemically synthesized
  source 1..20: mol_type = other DNA
aatgggatctaattaaatta

SEQ ID NO: 18801 - DNA, 20 bp, synthetic construct
  misc_feature 1..20: note = chemically synthesized
  source 1..20: mol_type = other DNA
tgggatctaattaaattaaa

SEQ ID NO: 18802 - DNA, 20 bp, synthetic construct
  misc_feature 1..20: note = chemically synthesized
  source 1..20: mol_type = other DNA
taaattaaagagcttctgca

SEQ ID NO: 18803 - DNA, 20 bp, synthetic construct
  misc_feature 1..20: note = chemically synthesized
  source 1..20: mol_type = other DNA
aaagagcttctgcacagcaa

SEQ ID NO: 18804 - DNA, 20 bp, synthetic construct
  misc_feature 1..20: note = chemically synthesized
  source 1..20: mol_type = other DNA
acagcaaaagaaactatcat

SEQ ID NO: 18805 - DNA, 20 bp, synthetic construct
  misc_feature 1..20: note = chemically synthesized
  source 1..20: mol_type = other DNA
agcaaaagaaactatcatca

SEQ ID NO: 18806 - DNA, 20 bp, synthetic construct
  misc_feature 1..20: note = chemically synthesized
  source 1..20: mol_type = other DNA
gaaactatcatcagagataa

SEQ ID NO: 18807 - DNA, 20 bp, synthetic construct
  misc_feature 1..20: note = chemically synthesized
  source 1..20: mol_type = other DNA
cagagataacagacaaccta

SEQ ID NO: 18808 - DNA, 20 bp, synthetic construct
  misc_feature 1..20: note = chemically synthesized
  source 1..20: mol_type = other DNA
ataacagacaacctacagaa

SEQ ID NO: 18809 - DNA, 20 bp, synthetic construct
  misc_feature 1..20: note = chemically synthesized
  source 1..20: mol_type = other DNA
acagacaacctacagaatag

SEQ ID NO: 18810 - DNA, 20 bp, synthetic construct
  misc_feature 1..20: note = chemically synthesized
  source 1..20: mol_type = other DNA
gcaatttctccatctgacaa

SEQ ID NO: 18811 - DNA, 20 bp, synthetic construct
  misc_feature 1..20: note = chemically synthesized
  source 1..20: mol_type = other DNA
tctgacaaaagtctaatatc

SEQ ID NO: 18812 - DNA, 20 bp, synthetic construct
  misc_feature 1..20: note = chemically synthesized
  source 1..20: mol_type = other DNA
tgacaaaagtctaatatctg

SEQ ID NO: 18813 - DNA, 20 bp, synthetic construct
  misc_feature 1..20: note = chemically synthesized
  source 1..20: mol_type = other DNA
gtctaatatctggagtctat

SEQ ID NO: 18814 - DNA, 20 bp, synthetic construct
  misc_feature 1..20: note = chemically synthesized
  source 1..20: mol_type = other DNA
tctaatatctggagtctatg

SEQ ID NO: 18815 - DNA, 20 bp, synthetic construct
  misc_feature 1..20: note = chemically synthesized
  source 1..20: mol_type = other DNA
aggaactaaaacaaatttac

SEQ ID NO: 18816 - DNA, 20 bp, synthetic construct
  misc_feature 1..20: note = chemically synthesized
  source 1..20: mol_type = other DNA
aaaaaaacaaccccattaaa

SEQ ID NO: 18817 - DNA, 20 bp, synthetic construct
  misc_feature 1..20: note = chemically synthesized
  source 1..20: mol_type = other DNA
aaaacaaccccattaaaaag

SEQ ID NO: 18818 - DNA, 20 bp, synthetic construct
  misc_feature 1..20: note = chemically synthesized
  source 1..20: mol_type = other DNA
aaacaaccccattaaaaagt

SEQ ID NO: 18819 - DNA, 20 bp, synthetic construct
  misc_feature 1..20: note = chemically synthesized
  source 1..20: mol_type = other DNA
aacaaccccattaaaaagtg

SEQ ID NO: 18820 - DNA, 20 bp, synthetic construct
  misc_feature 1..20: note = chemically synthesized
  source 1..20: mol_type = other DNA
aaagtggggaatgacatgaa

SEQ ID NO: 18821 - DNA, 20 bp, synthetic construct
  misc_feature 1..20: note = chemically synthesized
  source 1..20: mol_type = other DNA
catgaatagacacttctcta

SEQ ID NO: 18822 - DNA, 20 bp, synthetic construct
  misc_feature 1..20: note = chemically synthesized
  source 1..20: mol_type = other DNA
gaatagacacttctctaaag

SEQ ID NO: 18823 - DNA, 20 bp, synthetic construct
  misc_feature 1..20: note = chemically synthesized
  source 1..20: mol_type = other DNA
ataaacatatgaaaaaaaaa

SEQ ID NO: 18824 - DNA, 20 bp, synthetic construct
  misc_feature 1..20: note = chemically synthesized
  source 1..20: mol_type = other DNA
aaaaaaaagctcaaccttac

SEQ ID NO: 18825 - DNA, 20 bp, synthetic construct
  misc_feature 1..20: note = chemically synthesized
  source 1..20: mol_type = other DNA
agctcaaccttactggtcat

SEQ ID NO: 18826 - DNA, 20 bp, synthetic construct
  misc_feature 1..20: note = chemically synthesized
  source 1..20: mol_type = other DNA
aatgcaaatcaaaaccacaa

SEQ ID NO: 18827 - DNA, 20 bp, synthetic construct
  misc_feature 1..20: note = chemically synthesized
  source 1..20: mol_type = other DNA
atgcaaatcaaaaccacaat

SEQ ID NO: 18828 - DNA, 20 bp, synthetic construct
  misc_feature 1..20: note = chemically synthesized
  source 1..20: mol_type = other DNA
aatgggataccatctcacac

SEQ ID NO: 18829 - DNA, 20 bp, synthetic construct
  misc_feature 1..20: note = chemically synthesized
  source 1..20: mol_type = other DNA
ggataccatctcacaccagt

SEQ ID NO: 18830 - DNA, 20 bp, synthetic construct
  misc_feature 1..20: note = chemically synthesized
  source 1..20: mol_type = other DNA
ccatctcacaccagtcagaa

SEQ ID NO: 18831 - DNA, 20 bp, synthetic construct
  misc_feature 1..20: note = chemically synthesized
  source 1..20: mol_type = other DNA
tcagaatggcaattattaaa

SEQ ID NO: 18832 - DNA, 20 bp, synthetic construct
  misc_feature 1..20: note = chemically synthesized
  source 1..20: mol_type = other DNA
atggcaattattaaaaagtc

SEQ ID NO: 18833 - DNA, 20 bp, synthetic construct
  misc_feature 1..20: note = chemically synthesized
  source 1..20: mol_type = other DNA
attaaaaagtcaagaaacaa

SEQ ID NO: 18834 - DNA, 20 bp, synthetic construct
  misc_feature 1..20: note = chemically synthesized
  source 1..20: mol_type = other DNA
agtcaagaaacaacagttgc

SEQ ID NO: 18835 - DNA, 20 bp, synthetic construct
  misc_feature 1..20: note = chemically synthesized
  source 1..20: mol_type = other DNA
aagaaacaacagttgctggc

SEQ ID NO: 18836 - DNA, 20 bp, synthetic construct
  misc_feature 1..20: note = chemically synthesized
  source 1..20: mol_type = other DNA
agaaacaacagttgctggca

SEQ ID NO: 18837 - DNA, 20 bp, synthetic construct
  misc_feature 1..20: note = chemically synthesized
  source 1..20: mol_type = other DNA
aacagttgctggcaaggttg

SEQ ID NO: 18838 - DNA, 20 bp, synthetic construct
  misc_feature 1..20: note = chemically synthesized
  source 1..20: mol_type = other DNA
cagttgctggcaaggttgca

SEQ ID NO: 18839 - DNA, 20 bp, synthetic construct
  misc_feature 1..20: note = chemically synthesized
  source 1..20: mol_type = other DNA
gttgctggcaaggttgcaga

SEQ ID NO: 18840 - DNA, 20 bp, synthetic construct
  misc_feature 1..20: note = chemically synthesized
  source 1..20: mol_type = other DNA
ctggcaaggttgcagagaga

SEQ ID NO: 18841 - DNA, 20 bp, synthetic construct
  misc_feature 1..20: note = chemically synthesized
  source 1..20: mol_type = other DNA
tggcaaggttgcagagagaa

SEQ ID NO: 18842 - DNA, 20 bp, synthetic construct
  misc_feature 1..20: note = chemically synthesized
  source 1..20: mol_type = other DNA
aggttgcagagagaaaggaa

SEQ ID NO: 18843 - DNA, 20 bp, synthetic construct
  misc_feature 1..20: note = chemically synthesized
  source 1..20: mol_type = other DNA
gaatgcttttacactgttaa

SEQ ID NO: 18844 - DNA, 20 bp, synthetic construct
  misc_feature 1..20: note = chemically synthesized
  source 1..20: mol_type = other DNA
aatgcttttacactgttaac

SEQ ID NO: 18845 - DNA, 20 bp, synthetic construct
  misc_feature 1..20: note = chemically synthesized
  source 1..20: mol_type = other DNA
tgcttttacactgttaacgg

SEQ ID NO: 18846 - DNA, 20 bp, synthetic construct
  misc_feature 1..20: note = chemically synthesized
  source 1..20: mol_type = other DNA
cttttacactgttaacggga

SEQ ID NO: 18847 - DNA, 20 bp, synthetic construct
  misc_feature 1..20: note = chemically synthesized
  source 1..20: mol_type = other DNA
ctgttaacgggagagtaaat

SEQ ID NO: 18848 - DNA, 20 bp, synthetic construct
  misc_feature 1..20: note = chemically synthesized
  source 1..20: mol_type = other DNA
gtaaattagttcaaacattg

SEQ ID NO: 18849 - DNA, 20 bp, synthetic construct
  misc_feature 1..20: note = chemically synthesized
  source 1..20: mol_type = other DNA
aattagttcaaacattgtgg

SEQ ID NO: 18850 - DNA, 20 bp, synthetic construct
  misc_feature 1..20: note = chemically synthesized
  source 1..20: mol_type = other DNA
ttagttcaaacattgtggaa

SEQ ID NO: 18851 - DNA, 20 bp, synthetic construct
  misc_feature 1..20: note = chemically synthesized
  source 1..20: mol_type = other DNA
agttcaaacattgtggaaga

SEQ ID NO: 18852 - DNA, 20 bp, synthetic construct
  misc_feature 1..20: note = chemically synthesized
  source 1..20: mol_type = other DNA
aaacattgtggaagagagtg

SEQ ID NO: 18853 - DNA, 20 bp, synthetic construct
  misc_feature 1..20: note = chemically synthesized
  source 1..20: mol_type = other DNA
gagagtgtagcctttcctca

SEQ ID NO: 18854 - DNA, 20 bp, synthetic construct
  misc_feature 1..20: note = chemically synthesized
  source 1..20: mol_type = other DNA
gtagcctttcctcaaagatg

SEQ ID NO: 18855 - DNA, 20 bp, synthetic construct
  misc_feature 1..20: note = chemically synthesized
  source 1..20: mol_type = other DNA
gcctttcctcaaagatgtag

SEQ ID NO: 18856 - DNA, 20 bp, synthetic construct
  misc_feature 1..20: note = chemically synthesized
  source 1..20: mol_type = other DNA
tttcctcaaagatgtagaag

SEQ ID NO: 18857 - DNA, 20 bp, synthetic construct
  misc_feature 1..20: note = chemically synthesized
  source 1..20: mol_type = other DNA
agcagaaataccacttgact

SEQ ID NO: 18858 - DNA, 20 bp, synthetic construct
  misc_feature 1..20: note = chemically synthesized
  source 1..20: mol_type = other DNA
tgactcagcaatctcattac

SEQ ID NO: 18859 - DNA, 20 bp, synthetic construct
  misc_feature 1..20: note = chemically synthesized
  source 1..20: mol_type = other DNA
gactcagcaatctcattact

SEQ ID NO: 18860 - DNA, 20 bp, synthetic construct
  misc_feature 1..20: note = chemically synthesized
  source 1..20: mol_type = other DNA
cattactgggtatataccca

SEQ ID NO: 18861 - DNA, 20 bp, synthetic construct
  misc_feature 1..20: note = chemically synthesized
  source 1..20: mol_type = other DNA
attactgggtatatacccaa

SEQ ID NO: 18862 - DNA, 20 bp, synthetic construct
  misc_feature 1..20: note = chemically synthesized
  source 1..20: mol_type = other DNA
atcaatctattataaaaata

SEQ ID NO: 18863 - DNA, 20 bp, synthetic construct
  misc_feature 1..20: note = chemically synthesized
  source 1..20: mol_type = other DNA
tcaatctattataaaaatac

SEQ ID NO: 18864 - DNA, 20 bp, synthetic construct
  misc_feature 1..20: note = chemically synthesized
  source 1..20: mol_type = other DNA
aggcatgcttatgttcattg

SEQ ID NO: 18865 - DNA, 20 bp, synthetic construct
  misc_feature 1..20: note = chemically synthesized
  source 1..20: mol_type = other DNA
cattgcagcattattcataa

SEQ ID NO: 18866 - DNA, 20 bp, synthetic construct
  misc_feature 1..20: note = chemically synthesized
  source 1..20: mol_type = other DNA
cagcattattcataatagcc

SEQ ID NO: 18867 - DNA, 20 bp, synthetic construct
  misc_feature 1..20: note = chemically synthesized
  source 1..20: mol_type = other DNA
tattcataatagccaagatg

SEQ ID NO: 18868 - DNA, 20 bp, synthetic construct
  misc_feature 1..20: note = chemically synthesized
  source 1..20: mol_type = other DNA
acccaaatgtccatcaatga

SEQ ID NO: 18869 - DNA, 20 bp, synthetic construct
  misc_feature 1..20: note = chemically synthesized
  source 1..20: mol_type = other DNA
ccaaatgtccatcaatgata

SEQ ID NO: 18870 - DNA, 20 bp, synthetic construct
  misc_feature 1..20: note = chemically synthesized
  source 1..20: mol_type = other DNA
aatgtccatcaatgatagag

SEQ ID NO: 18871 - DNA, 20 bp, synthetic construct
  misc_feature 1..20: note = chemically synthesized
  source 1..20: mol_type = other DNA
catcaatgatagagtggata

SEQ ID NO: 18872 - DNA, 20 bp, synthetic construct
  misc_feature 1..20: note = chemically synthesized
  source 1..20: mol_type = other DNA
tagagtggataaagaaaacg

SEQ ID NO: 18873 - DNA, 20 bp, synthetic construct
  misc_feature 1..20: note = chemically synthesized
  source 1..20: mol_type = other DNA
aacgtggtacatatatacca

SEQ ID NO: 18874 - DNA, 20 bp, synthetic construct
  misc_feature 1..20: note = chemically synthesized
  source 1..20: mol_type = other DNA
atataccatggaatactata

SEQ ID NO: 18875 - DNA, 20 bp, synthetic construct
  misc_feature 1..20: note = chemically synthesized
  source 1..20: mol_type = other DNA
gaatactatacagccataaa

SEQ ID NO: 18876 - DNA, 20 bp, synthetic construct
  misc_feature 1..20: note = chemically synthesized
  source 1..20: mol_type = other DNA
aatactatacagccataaaa

SEQ ID NO: 18877 - DNA, 20 bp, synthetic construct
  misc_feature 1..20: note = chemically synthesized
  source 1..20: mol_type = other DNA
tatacagccataaaaaggaa

SEQ ID NO: 18878 - DNA, 20 bp, synthetic construct
  misc_feature 1..20: note = chemically synthesized
  source 1..20: mol_type = other DNA
atacagccataaaaaggaaa

SEQ ID NO: 18879 - DNA, 20 bp, synthetic construct
  misc_feature 1..20: note = chemically synthesized
  source 1..20: mol_type = other DNA
gaaaaggattgtgttccttg

SEQ ID NO: 18880 - DNA, 20 bp, synthetic construct
  misc_feature 1..20: note = chemically synthesized
  source 1..20: mol_type = other DNA
aaaaggattgtgttccttgc

SEQ ID NO: 18881 - DNA, 20 bp, synthetic construct
  misc_feature 1..20: note = chemically synthesized
  source 1..20: mol_type = other DNA
aaaggattgtgttccttgca

SEQ ID NO: 18882 - DNA, 20 bp, synthetic construct
  misc_feature 1..20: note = chemically synthesized
  source 1..20: mol_type = other DNA
gttccttgcagggacatgaa

SEQ ID NO: 18883 - DNA, 20 bp, synthetic construct
  misc_feature 1..20: note = chemically synthesized
  source 1..20: mol_type = other DNA
tccttgcagggacatgaatg

SEQ ID NO: 18884 - DNA, 20 bp, synthetic construct
  misc_feature 1..20: note = chemically synthesized
  source 1..20: mol_type = other DNA
tgcagggacatgaatggagc

SEQ ID NO: 18885 - DNA, 20 bp, synthetic construct
  misc_feature 1..20: note = chemically synthesized
  source 1..20: mol_type = other DNA
agggacatgaatggagctgg

SEQ ID NO: 18886 - DNA, 20 bp, synthetic construct
  misc_feature 1..20: note = chemically synthesized
  source 1..20: mol_type = other DNA
ttatcctcatcaaactaaca

SEQ ID NO: 18887 - DNA, 20 bp, synthetic construct
  misc_feature 1..20: note = chemically synthesized
  source 1..20: mol_type = other DNA
tatcctcatcaaactaacac

SEQ ID NO: 18888 - DNA, 20 bp, synthetic construct
  misc_feature 1..20: note = chemically synthesized
  source 1..20: mol_type = other DNA
tcatcaaactaacacaggaa

SEQ ID NO: 18889 - DNA, 20 bp, synthetic construct
  misc_feature 1..20: note = chemically synthesized
  source 1..20: mol_type = other DNA
caaacacacatgttctcaca

SEQ ID NO: 18890 - DNA, 20 bp, synthetic construct
  misc_feature 1..20: note = chemically synthesized
  source 1..20: mol_type = other DNA
cacatgttctcacacagaaa

SEQ ID NO: 18891 - DNA, 20 bp, synthetic construct
  misc_feature 1..20: note = chemically synthesized
  source 1..20: mol_type = other DNA
acatgttctcacacagaaat

SEQ ID NO: 18892 - DNA, 20 bp, synthetic construct
  misc_feature 1..20: note = chemically synthesized
  source 1..20: mol_type = other DNA
atgttctcacacagaaatgg

SEQ ID NO: 18893 - DNA, 20 bp, synthetic construct
  misc_feature 1..20: note = chemically synthesized
  source 1..20: mol_type = other DNA
acacagaaatgggagctgaa

SEQ ID NO: 18894 - DNA, 20 bp, synthetic construct
  misc_feature 1..20: note = chemically synthesized
  source 1..20: mol_type = other DNA
agaaatgggagctgaacagt

SEQ ID NO: 18895 - DNA, 20 bp, synthetic construct
  misc_feature 1..20: note = chemically synthesized
  source 1..20: mol_type = other DNA
agctgaacagtgagaacaca

SEQ ID NO: 18896 - DNA, 20 bp, synthetic construct
  misc_feature 1..20: note = chemically synthesized
  source 1..20: mol_type = other DNA
tgagaacacatggacacttg

SEQ ID NO: 18897 - DNA, 20 bp, synthetic construct
  misc_feature 1..20: note = chemically synthesized
  source 1..20: mol_type = other DNA
gagaacacatggacacttgt

SEQ ID NO: 18898 - DNA, 20 bp, synthetic construct
  misc_feature 1..20: note = chemically synthesized
  source 1..20: mol_type = other DNA
agaacacatggacacttgtg

SEQ ID NO: 18899 - DNA, 20 bp, synthetic construct
  misc_feature 1..20: note = chemically synthesized
  source 1..20: mol_type = other DNA
cttgtggggaacaacacaca

SEQ ID NO: 18900 - DNA, 20 bp, synthetic construct
  misc_feature 1..20: note = chemically synthesized
  source 1..20: mol_type = other DNA
ttgtggggaacaacacacac

SEQ ID NO: 18901 - DNA, 20 bp, synthetic construct
  misc_feature 1..20: note = chemically synthesized
  source 1..20: mol_type = other DNA
tgtggggaacaacacacaca

SEQ ID NO: 18902 - DNA, 20 bp, synthetic construct
  misc_feature 1..20: note = chemically synthesized
  source 1..20: mol_type = other DNA
gtggggaacaacacacacag

SEQ ID NO: 18903 - DNA, 20 bp, synthetic construct
  misc_feature 1..20: note = chemically synthesized
  source 1..20: mol_type = other DNA
aacacacacaggggcctgtc

SEQ ID NO: 18904 - DNA, 20 bp, synthetic construct
  misc_feature 1..20: note = chemically synthesized
  source 1..20: mol_type = other DNA
acacacaggggcctgtccgg

SEQ ID NO: 18905 - DNA, 20 bp, synthetic construct
  misc_feature 1..20: note = chemically synthesized
  source 1..20: mol_type = other DNA
cacaggggcctgtccggtag

SEQ ID NO: 18906 - DNA, 20 bp, synthetic construct
  misc_feature 1..20: note = chemically synthesized
  source 1..20: mol_type = other DNA
acaggggcctgtccggtagt

SEQ ID NO: 18907 - DNA, 20 bp, synthetic construct
  misc_feature 1..20: note = chemically synthesized
  source 1..20: mol_type = other DNA
ggggcctgtccggtagtggg

SEQ ID NO: 18908 - DNA, 20 bp, synthetic construct
  misc_feature 1..20: note = chemically synthesized
  source 1..20: mol_type = other DNA
gggcctgtccggtagtgggt

SEQ ID NO: 18909 - DNA, 20 bp, synthetic construct
  misc_feature 1..20: note = chemically synthesized
  source 1..20: mol_type = other DNA
ggcctgtccggtagtgggtg

SEQ ID NO: 18910 - DNA, 20 bp, synthetic construct
  misc_feature 1..20: note = chemically synthesized
  source 1..20: mol_type = other DNA
cctgtccggtagtgggtggg

SEQ ID NO: 18911 - DNA, 20 bp, synthetic construct
  misc_feature 1..20: note = chemically synthesized
  source 1..20: mol_type = other DNA
ctgtccggtagtgggtgggg

SEQ ID NO: 18912 - DNA, 20 bp, synthetic construct
  misc_feature 1..20: note = chemically synthesized
  source 1..20: mol_type = other DNA
gtccggtagtgggtggggag

SEQ ID NO: 18913 - DNA, 20 bp, synthetic construct
  misc_feature 1..20: note = chemically synthesized
  source 1..20: mol_type = other DNA
ccggtagtgggtggggagga

SEQ ID NO: 18914 - DNA, 20 bp, synthetic construct
  misc_feature 1..20: note = chemically synthesized
  source 1..20: mol_type = other DNA
cggtagtgggtggggaggag

SEQ ID NO: 18915 - DNA, 20 bp, synthetic construct
  misc_feature 1..20: note = chemically synthesized
  source 1..20: mol_type = other DNA
ggtagtgggtggggaggaga

SEQ ID NO: 18916 - DNA, 20 bp, synthetic construct
  misc_feature 1..20: note = chemically synthesized
  source 1..20: mol_type = other DNA
tagtgggtggggaggagagg

SEQ ID NO: 18917 - DNA, 20 bp, synthetic construct
  misc_feature 1..20: note = chemically synthesized
  source 1..20: mol_type = other DNA
gtgggtggggaggagaggga

SEQ ID NO: 18918 - DNA, 20 bp, synthetic construct
  misc_feature 1..20: note = chemically synthesized
  source 1..20: mol_type = other DNA
ggggaggagagggagagcac

SEQ ID NO: 18919 - DNA, 20 bp, synthetic construct
  misc_feature 1..20: note = chemically synthesized
  source 1..20: mol_type = other DNA
gggaggagagggagagcacc

SEQ ID NO: 18920 - DNA, 20 bp, synthetic construct
  misc_feature 1..20: note = chemically synthesized
  source 1..20: mol_type = other DNA
aggagagggagagcaccagg

SEQ ID NO: 18921 - DNA, 20 bp, synthetic construct
  misc_feature 1..20: note = chemically synthesized
  source 1..20: mol_type = other DNA
agggagagcaccaggaagaa

SEQ ID NO: 18922 - DNA, 20 bp, synthetic construct
  misc_feature 1..20: note = chemically synthesized
  source 1..20: mol_type = other DNA
ggaagaatagctaacgaatg

SEQ ID NO: 18923 - DNA, 20 bp, synthetic construct
  misc_feature 1..20: note = chemically synthesized
  source 1..20: mol_type = other DNA
acgaatgcagcaaacctgca

SEQ ID NO: 18924 - DNA, 20 bp, synthetic construct
  misc_feature 1..20: note = chemically synthesized
  source 1..20: mol_type = other DNA
cacatcctgcacatgtgccc

SEQ ID NO: 18925 - DNA, 20 bp, synthetic construct
  misc_feature 1..20: note = chemically synthesized
  source 1..20: mol_type = other DNA
gaacttaaaatatattatgt

SEQ ID NO: 18926 - DNA, 20 bp, synthetic construct
  misc_feature 1..20: note = chemically synthesized
  source 1..20: mol_type = other DNA
aatatattatgttggtacaa

SEQ ID NO: 18927 - DNA, 20 bp, synthetic construct
  misc_feature 1..20: note = chemically synthesized
  source 1..20: mol_type = other DNA
tacctttgcacctacctaat

SEQ ID NO: 18928 - DNA, 20 bp, synthetic construct
  misc_feature 1..20: note = chemically synthesized
  source 1..20: mol_type = other DNA
tgcacctacctaataagttg

SEQ ID NO: 18929 - DNA, 20 bp, synthetic construct
  misc_feature 1..20: note = chemically synthesized
  source 1..20: mol_type = other DNA
gcacctacctaataagttga

SEQ ID NO: 18930 - DNA, 20 bp, synthetic construct
  misc_feature 1..20: note = chemically synthesized
  source 1..20: mol_type = other DNA
ttttaaaaaaaaaaaaaaaa

SEQ ID NO: 18931 - DNA, 20 bp, synthetic construct
  misc_feature 1..20: note = chemically synthesized
  source 1..20: mol_type = other DNA
tttaaaaaaaaaaaaaaaaa

SEQ ID NO: 18932 - DNA, 20 bp, synthetic construct
  misc_feature 1..20: note = chemically synthesized
  source 1..20: mol_type = other DNA
aaggaaaatctaccctgaaa

SEQ ID NO: 18933 - DNA, 20 bp, synthetic construct
  misc_feature 1..20: note = chemically synthesized
  source 1..20: mol_type = other DNA
ggaaaatctaccctgaaata

SEQ ID NO: 18934 - DNA, 20 bp, synthetic construct
  misc_feature 1..20: note = chemically synthesized
  source 1..20: mol_type = other DNA
aaatctaccctgaaatagag

SEQ ID NO: 18935 - DNA, 20 bp, synthetic construct
  misc_feature 1..20: note = chemically synthesized
  source 1..20: mol_type = other DNA
ccctgaaatagagtagtttt

SEQ ID NO: 18936 - DNA, 20 bp, synthetic construct
  misc_feature 1..20: note = chemically synthesized
  source 1..20: mol_type = other DNA
atagagtagttttgagatta

SEQ ID NO: 18937 - DNA, 20 bp, synthetic construct
  misc_feature 1..20: note = chemically synthesized
  source 1..20: mol_type = other DNA
gagtagttttgagattatag

SEQ ID NO: 18938 - DNA, 20 bp, synthetic construct
  misc_feature 1..20: note = chemically synthesized
  source 1..20: mol_type = other DNA
gtagttttgagattatagta

SEQ ID NO: 18939 - DNA, 20 bp, synthetic construct
  misc_feature 1..20: note = chemically synthesized
  source 1..20: mol_type = other DNA
tgctataattcatctttata

SEQ ID NO: 18940 - DNA, 20 bp, synthetic construct
  misc_feature 1..20: note = chemically synthesized
  source 1..20: mol_type = other DNA
catctttatatggccaaaac

SEQ ID NO: 18941 - DNA, 20 bp, synthetic construct
  misc_feature 1..20: note = chemically synthesized
  source 1..20: mol_type = other DNA
attgcacatttttccttctg

SEQ ID NO: 18942 - DNA, 20 bp, synthetic construct
  misc_feature 1..20: note = chemically synthesized
  source 1..20: mol_type = other DNA
ttgcacatttttccttctgt

SEQ ID NO: 18943 - DNA, 20 bp, synthetic construct
  misc_feature 1..20: note = chemically synthesized
  source 1..20: mol_type = other DNA
atttttccttctgtaggctt

SEQ ID NO: 18944 - DNA, 20 bp, synthetic construct
  misc_feature 1..20: note = chemically synthesized
  source 1..20: mol_type = other DNA
tctgtaggctttggttgaac

SEQ ID NO: 18945 - DNA, 20 bp, synthetic construct
  misc_feature 1..20: note = chemically synthesized
  source 1..20: mol_type = other DNA
aggctttggttgaactagac

SEQ ID NO: 18946 - DNA, 20 bp, synthetic construct
  misc_feature 1..20: note = chemically synthesized
  source 1..20: mol_type = other DNA
ccacttgactcttcctaaaa

SEQ ID NO: 18947 - DNA, 20 bp, synthetic construct
  misc_feature 1..20: note = chemically synthesized
  source 1..20: mol_type = other DNA
tcttcctaaaatggtacttt

SEQ ID NO: 18948 - DNA, 20 bp, synthetic construct
  misc_feature 1..20: note = chemically synthesized
  source 1..20: mol_type = other DNA
actttcagttcttatgaata

SEQ ID NO: 18949 - DNA, 20 bp, synthetic construct
  misc_feature 1..20: note = chemically synthesized
  source 1..20: mol_type = other DNA
ctttcagttcttatgaatac

SEQ ID NO: 18950 - DNA, 20 bp, synthetic construct
  misc_feature 1..20: note = chemically synthesized
  source 1..20: mol_type = other DNA
accatattttccctgattat

SEQ ID NO: 18951 - DNA, 20 bp, synthetic construct
  misc_feature 1..20: note = chemically synthesized
  source 1..20: mol_type = other DNA
ccatattttccctgattatt

SEQ ID NO: 18952 - DNA, 20 bp, synthetic construct
  misc_feature 1..20: note = chemically synthesized
  source 1..20: mol_type = other DNA
catattttccctgattatta

SEQ ID NO: 18953 - DNA, 20 bp, synthetic construct
  misc_feature 1..20: note = chemically synthesized
  source 1..20: mol_type = other DNA
tgttttatctccatattcaa

SEQ ID NO: 18954 - DNA, 20 bp, synthetic construct
  misc_feature 1..20: note = chemically synthesized
  source 1..20: mol_type = other DNA
tcaatagtattccactttcc

SEQ ID NO: 18955 - DNA, 20 bp, synthetic construct
  misc_feature 1..20: note = chemically synthesized
  source 1..20: mol_type = other DNA
actttcctagtatctctcaa

SEQ ID NO: 18956 - DNA, 20 bp, synthetic construct
  misc_feature 1..20: note = chemically synthesized
  source 1..20: mol_type = other DNA
tcctagtatctctcaataga

SEQ ID NO: 18957 - DNA, 20 bp, synthetic construct
  misc_feature 1..20: note = chemically synthesized
  source 1..20: mol_type = other DNA
cctagtatctctcaatagat

SEQ ID NO: 18958 - DNA, 20 bp, synthetic construct
  misc_feature 1..20: note = chemically synthesized
  source 1..20: mol_type = other DNA
ctcaatagataggtaaatta

SEQ ID NO: 18959 - DNA, 20 bp, synthetic construct
  misc_feature 1..20: note = chemically synthesized
  source 1..20: mol_type = other DNA
tagatatatctccctcgata

SEQ ID NO: 18960 - DNA, 20 bp, synthetic construct
  misc_feature 1..20: note = chemically synthesized
  source 1..20: mol_type = other DNA
tttatcaattgatcaattga

SEQ ID NO: 18961 - DNA, 20 bp, synthetic construct
  misc_feature 1..20: note = chemically synthesized
  source 1..20: mol_type = other DNA
cattgtattattgttccatg

SEQ ID NO: 18962 - DNA, 20 bp, synthetic construct
  misc_feature 1..20: note = chemically synthesized
  source 1..20: mol_type = other DNA
ttccatgtagcttttcactt

SEQ ID NO: 18963 - DNA, 20 bp, synthetic construct
  misc_feature 1..20: note = chemically synthesized
  source 1..20: mol_type = other DNA
tagcttttcactttagataa

SEQ ID NO: 18964 - DNA, 20 bp, synthetic construct
  misc_feature 1..20: note = chemically synthesized
  source 1..20: mol_type = other DNA
ttcactttagataatagtta

SEQ ID NO: 18965 - DNA, 20 bp, synthetic construct
  misc_feature 1..20: note = chemically synthesized
  source 1..20: mol_type = other DNA
agcctatctaacactgatac

SEQ ID NO: 18966 - DNA, 20 bp, synthetic construct
  misc_feature 1..20: note = chemically synthesized
  source 1..20: mol_type = other DNA
cctatctaacactgatacaa

SEQ ID NO: 18967 - DNA, 20 bp, synthetic construct
  misc_feature 1..20: note = chemically synthesized
  source 1..20: mol_type = other DNA
aacactgatacaagagatat

SEQ ID NO: 18968 - DNA, 20 bp, synthetic construct
  misc_feature 1..20: note = chemically synthesized
  source 1..20: mol_type = other DNA
acactgatacaagagatatt

SEQ ID NO: 18969 - DNA, 20 bp, synthetic construct
  misc_feature 1..20: note = chemically synthesized
  source 1..20: mol_type = other DNA
agagatattgggtataaaat

SEQ ID NO: 18970 - DNA, 20 bp, synthetic construct
  misc_feature 1..20: note = chemically synthesized
  source 1..20: mol_type = other DNA
gctcctttccaattactcaa

SEQ ID NO: 18971 - DNA, 20 bp, synthetic construct
  misc_feature 1..20: note = chemically synthesized
  source 1..20: mol_type = other DNA
ctcctttccaattactcaaa

SEQ ID NO: 18972 - DNA, 20 bp, synthetic construct
  misc_feature 1..20: note = chemically synthesized
  source 1..20: mol_type = other DNA
ttccaattactcaaaaggcc

SEQ ID NO: 18973 - DNA, 20 bp, synthetic construct
  misc_feature 1..20: note = chemically synthesized
  source 1..20: mol_type = other DNA
caaaaggcccagaaatcatg

SEQ ID NO: 18974 - DNA, 20 bp, synthetic construct
  misc_feature 1..20: note = chemically synthesized
  source 1..20: mol_type = other DNA
agatcacaaaattctgaaaa

SEQ ID NO: 18975 - DNA, 20 bp, synthetic construct
  misc_feature 1..20: note = chemically synthesized
  source 1..20: mol_type = other DNA
gatcacaaaattctgaaaaa

SEQ ID NO: 18976 - DNA, 20 bp, synthetic construct
  misc_feature 1..20: note = chemically synthesized
  source 1..20: mol_type = other DNA
atcacaaaattctgaaaaaa

SEQ ID NO: 18977 - DNA, 20 bp, synthetic construct
  misc_feature 1..20: note = chemically synthesized
  source 1..20: mol_type = other DNA
aaattctgaaaaaagggctc

SEQ ID NO: 18978 - DNA, 20 bp, synthetic construct
  misc_feature 1..20: note = chemically synthesized
  source 1..20: mol_type = other DNA
ggctcaagccattctgtgcc

SEQ ID NO: 18979 - DNA, 20 bp, synthetic construct
  misc_feature 1..20: note = chemically synthesized
  source 1..20: mol_type = other DNA
gccattctgtgcccagaaaa

SEQ ID NO: 18980 - DNA, 20 bp, synthetic construct
  misc_feature 1..20: note = chemically synthesized
  source 1..20: mol_type = other DNA
ccattctgtgcccagaaaat

SEQ ID NO: 18981 - DNA, 20 bp, synthetic construct
  misc_feature 1..20: note = chemically synthesized
  source 1..20: mol_type = other DNA
ataggcgaacaatgcttctt

SEQ ID NO: 18982 - DNA, 20 bp, synthetic construct
  misc_feature 1..20: note = chemically synthesized
  source 1..20: mol_type = other DNA
aatgcttctttggatctgct

SEQ ID NO: 18983 - DNA, 20 bp, synthetic construct
  misc_feature 1..20: note = chemically synthesized
  source 1..20: mol_type = other DNA
tggtttgatgctgtatataa

SEQ ID NO: 18984 - DNA, 20 bp, synthetic construct
  misc_feature 1..20: note = chemically synthesized
  source 1..20: mol_type = other DNA
ggtttgatgctgtatataat

SEQ ID NO: 18985 - DNA, 20 bp, synthetic construct
  misc_feature 1..20: note = chemically synthesized
  source 1..20: mol_type = other DNA
gtttgatgctgtatataata

SEQ ID NO: 18986 - DNA, 20 bp, synthetic construct
  misc_feature 1..20: note = chemically synthesized
  source 1..20: mol_type = other DNA
tatataatagggttcatgaa

SEQ ID NO: 18987 - DNA, 20 bp, synthetic construct
  misc_feature 1..20: note = chemically synthesized
  source 1..20: mol_type = other DNA
tataatagggttcatgaatg

SEQ ID NO: 18988 - DNA, 20 bp, synthetic construct
  misc_feature 1..20: note = chemically synthesized
  source 1..20: mol_type = other DNA
ataatagggttcatgaatgg

SEQ ID NO: 18989 - DNA, 20 bp, synthetic construct
  misc_feature 1..20: note = chemically synthesized
  source 1..20: mol_type = other DNA
gggttcatgaatggaggaaa

SEQ ID NO: 18990 - DNA, 20 bp, synthetic construct
  misc_feature 1..20: note = chemically synthesized
  source 1..20: mol_type = other DNA
tgaatggaggaaaaagaaat

SEQ ID NO: 18991 - DNA, 20 bp, synthetic construct
  misc_feature 1..20: note = chemically synthesized
  source 1..20: mol_type = other DNA
aggaaaaagaaatgagtcat

SEQ ID NO: 18992 - DNA, 20 bp, synthetic construct
  misc_feature 1..20: note = chemically synthesized
  source 1..20: mol_type = other DNA
agaaatgagtcattagctca

SEQ ID NO: 18993 - DNA, 20 bp, synthetic construct
  misc_feature 1..20: note = chemically synthesized
  source 1..20: mol_type = other DNA
acggtaatgtgcaccacatg

SEQ ID NO: 18994 - DNA, 20 bp, synthetic construct
  misc_feature 1..20: note = chemically synthesized
  source 1..20: mol_type = other DNA
tttcccaaacctgtgaatga

SEQ ID NO: 18995 - DNA, 20 bp, synthetic construct
  misc_feature 1..20: note = chemically synthesized
  source 1..20: mol_type = other DNA
aatgaaagtctcactgatca

SEQ ID NO: 18996 - DNA, 20 bp, synthetic construct
  misc_feature 1..20: note = chemically synthesized
  source 1..20: mol_type = other DNA
tcacggtgatgtgaaatacc

SEQ ID NO: 18997 - DNA, 20 bp, synthetic construct
  misc_feature 1..20: note = chemically synthesized
  source 1..20: mol_type = other DNA
tgatgtgaaataccaagaca

SEQ ID NO: 18998 - DNA, 20 bp, synthetic construct
  misc_feature 1..20: note = chemically synthesized
  source 1..20: mol_type = other DNA
ataccaagacacagctgata

SEQ ID NO: 18999 - DNA, 20 bp, synthetic construct
  misc_feature 1..20: note = chemically synthesized
  source 1..20: mol_type = other DNA
taccaagacacagctgatat

SEQ ID NO: 19000 - DNA, 20 bp, synthetic construct
  misc_feature 1..20: note = chemically synthesized
  source 1..20: mol_type = other DNA
ccaagacacagctgatatgg

SEQ ID NO: 19001 - DNA, 20 bp, synthetic construct
  misc_feature 1..20: note = chemically synthesized
  source 1..20: mol_type = other DNA
atatgggagacacacatgtt

SEQ ID NO: 19002 - DNA, 20 bp, synthetic construct
  misc_feature 1..20: note = chemically synthesized
  source 1..20: mol_type = other DNA
atgggagacacacatgttga

SEQ ID NO: 19003 - DNA, 20 bp, synthetic construct
  misc_feature 1..20: note = chemically synthesized
  source 1..20: mol_type = other DNA
gacacacatgttgagagctt

SEQ ID NO: 19004 - DNA, 20 bp, synthetic construct
  misc_feature 1..20: note = chemically synthesized
  source 1..20: mol_type = other DNA
agctttggcttgctcttttc

SEQ ID NO: 19005 - DNA, 20 bp, synthetic construct
  misc_feature 1..20: note = chemically synthesized
  source 1..20: mol_type = other DNA
ctttggcttgctcttttctg

SEQ ID NO: 19006 - DNA, 20 bp, synthetic construct
  misc_feature 1..20: note = chemically synthesized
  source 1..20: mol_type = other DNA
tttggcttgctcttttctgg

SEQ ID NO: 19007 - DNA, 20 bp, synthetic construct
  misc_feature 1..20: note = chemically synthesized
  source 1..20: mol_type = other DNA
gcaatacctttaactgtttt

SEQ ID NO: 19008 - DNA, 20 bp, synthetic construct
  misc_feature 1..20: note = chemically synthesized
  source 1..20: mol_type = other DNA
caatacctttaactgtttta

SEQ ID NO: 19009 - DNA, 20 bp, synthetic construct
  misc_feature 1..20: note = chemically synthesized
  source 1..20: mol_type = other DNA
cctttaactgttttaaggat

SEQ ID NO: 19010 - DNA, 20 bp, synthetic construct
  misc_feature 1..20: note = chemically synthesized
  source 1..20: mol_type = other DNA
ctttaactgttttaaggatc

SEQ ID NO: 19011 - DNA, 20 bp, synthetic construct
  misc_feature 1..20: note = chemically synthesized
  source 1..20: mol_type = other DNA
tgttttaaggatcaggatat

SEQ ID NO: 19012 - DNA, 20 bp, synthetic construct
  misc_feature 1..20: note = chemically synthesized
  source 1..20: mol_type = other DNA
taaggatcaggatataagaa

SEQ ID NO: 19013 - DNA, 20 bp, synthetic construct
  misc_feature 1..20: note = chemically synthesized
  source 1..20: mol_type = other DNA
atataagaaaagacaatgat

SEQ ID NO: 19014 - DNA, 20 bp, synthetic construct
  misc_feature 1..20: note = chemically synthesized
  source 1..20: mol_type = other DNA
ataagaaaagacaatgatca

SEQ ID NO: 19015 - DNA, 20 bp, synthetic construct
  misc_feature 1..20: note = chemically synthesized
  source 1..20: mol_type = other DNA
aagacaatgatcagagcgtc

SEQ ID NO: 19016 - DNA, 20 bp, synthetic construct
  misc_feature 1..20: note = chemically synthesized
  source 1..20: mol_type = other DNA
agacaatgatcagagcgtct

SEQ ID NO: 19017 - DNA, 20 bp, synthetic construct
  misc_feature 1..20: note = chemically synthesized
  source 1..20: mol_type = other DNA
caatgatcagagcgtctagg

SEQ ID NO: 19018 - DNA, 20 bp, synthetic construct
  misc_feature 1..20: note = chemically synthesized
  source 1..20: mol_type = other DNA
agcgtctaggaagaaaatca

SEQ ID NO: 19019 - DNA, 20 bp, synthetic construct
  misc_feature 1..20: note = chemically synthesized
  source 1..20: mol_type = other DNA
aggaagaaaatcaaagcaac

SEQ ID NO: 19020 - DNA, 20 bp, synthetic construct
  misc_feature 1..20: note = chemically synthesized
  source 1..20: mol_type = other DNA
gaaaatcaaagcaaccagaa

SEQ ID NO: 19021 - DNA, 20 bp, synthetic construct
  misc_feature 1..20: note = chemically synthesized
  source 1..20: mol_type = other DNA
atcaaagcaaccagaatagc

SEQ ID NO: 19022 - DNA, 20 bp, synthetic construct
  misc_feature 1..20: note = chemically synthesized
  source 1..20: mol_type = other DNA
tcaaagcaaccagaatagct

SEQ ID NO: 19023 - DNA, 20 bp, synthetic construct
  misc_feature 1..20: note = chemically synthesized
  source 1..20: mol_type = other DNA
caaccagaatagctgggtat

SEQ ID NO: 19024 - DNA, 20 bp, synthetic construct
  misc_feature 1..20: note = chemically synthesized
  source 1..20: mol_type = other DNA
taagtgattgaatgtaatat

SEQ ID NO: 19025 - DNA, 20 bp, synthetic construct
  misc_feature 1..20: note = chemically synthesized
  source 1..20: mol_type = other DNA
gattgaatgtaatatcagca

SEQ ID NO: 19026 - DNA, 20 bp, synthetic construct
  misc_feature 1..20: note = chemically synthesized
  source 1..20: mol_type = other DNA
attgaatgtaatatcagcac

SEQ ID NO: 19027 - DNA, 20 bp, synthetic construct
  misc_feature 1..20: note = chemically synthesized
  source 1..20: mol_type = other DNA
aatgtaatatcagcacaggc

SEQ ID NO: 19028 - DNA, 20 bp, synthetic construct
  misc_feature 1..20: note = chemically synthesized
  source 1..20: mol_type = other DNA
atatcagcacaggcaagttt

SEQ ID NO: 19029 - DNA, 20 bp, synthetic construct
  misc_feature 1..20: note = chemically synthesized
  source 1..20: mol_type = other DNA
tatcagcacaggcaagtttc

SEQ ID NO: 19030 - DNA, 20 bp, synthetic construct
  misc_feature 1..20: note = chemically synthesized
  source 1..20: mol_type = other DNA
caagtttcaggacatcttga

SEQ ID NO: 19031 - DNA, 20 bp, synthetic construct
  misc_feature 1..20: note = chemically synthesized
  source 1..20: mol_type = other DNA
agtttcaggacatcttgatg

SEQ ID NO: 19032 - DNA, 20 bp, synthetic construct
  misc_feature 1..20: note = chemically synthesized
  source 1..20: mol_type = other DNA
ggacatcttgatggagaaaa

SEQ ID NO: 19033 - DNA, 20 bp, synthetic construct
  misc_feature 1..20: note = chemically synthesized
  source 1..20: mol_type = other DNA
gacatcttgatggagaaaaa

SEQ ID NO: 19034 - DNA, 20 bp, synthetic construct
  misc_feature 1..20: note = chemically synthesized
  source 1..20: mol_type = other DNA
cttgatggagaaaaaaggtg

SEQ ID NO: 19035 - DNA, 20 bp, synthetic construct
  misc_feature 1..20: note = chemically synthesized
  source 1..20: mol_type = other DNA
gatggagaaaaaaggtgtgg

SEQ ID NO: 19036 - DNA, 20 bp, synthetic construct
  misc_feature 1..20: note = chemically synthesized
  source 1..20: mol_type = other DNA
tggagaaaaaaggtgtggaa

SEQ ID NO: 19037 - DNA, 20 bp, synthetic construct
  misc_feature 1..20: note = chemically synthesized
  source 1..20: mol_type = other DNA
aaaaggtgtggaagagaaca

SEQ ID NO: 19038 - DNA, 20 bp, synthetic construct
  misc_feature 1..20: note = chemically synthesized
  source 1..20: mol_type = other DNA
aaaggtgtggaagagaacat

SEQ ID NO: 19039 - DNA, 20 bp, synthetic construct
  misc_feature 1..20: note = chemically synthesized
  source 1..20: mol_type = other DNA
agaacatgggaatgacaata

SEQ ID NO: 19040 - DNA, 20 bp, synthetic construct
  misc_feature 1..20: note = chemically synthesized
  source 1..20: mol_type = other DNA
gaacatgggaatgacaatat

SEQ ID NO: 19041 - DNA, 20 bp, synthetic construct
  misc_feature 1..20: note = chemically synthesized
  source 1..20: mol_type = other DNA
catgggaatgacaatatggg

SEQ ID NO: 19042 - DNA, 20 bp, synthetic construct
  misc_feature 1..20: note = chemically synthesized
  source 1..20: mol_type = other DNA
aatgacaatatgggaagcaa

SEQ ID NO: 19043 - DNA, 20 bp, synthetic construct
  misc_feature 1..20: note = chemically synthesized
  source 1..20: mol_type = other DNA
tgacaatatgggaagcaatg

SEQ ID NO: 19044 - DNA, 20 bp, synthetic construct
  misc_feature 1..20: note = chemically synthesized
  source 1..20: mol_type = other DNA
caatatgggaagcaatggag

SEQ ID NO: 19045 - DNA, 20 bp, synthetic construct
  misc_feature 1..20: note = chemically synthesized
  source 1..20: mol_type = other DNA
tatgggaagcaatggagtgg

SEQ ID NO: 19046 - DNA, 20 bp, synthetic construct
  misc_feature 1..20: note = chemically synthesized
  source 1..20: mol_type = other DNA
aagcaatggagtggcagaat

SEQ ID NO: 19047 - DNA, 20 bp, synthetic construct
  misc_feature 1..20: note = chemically synthesized
  source 1..20: mol_type = other DNA
gcaatggagtggcagaattg

SEQ ID NO: 19048 - DNA, 20 bp, synthetic construct
  misc_feature 1..20: note = chemically synthesized
  source 1..20: mol_type = other DNA
caatggagtggcagaattgg

SEQ ID NO: 19049 - DNA, 20 bp, synthetic construct
  misc_feature 1..20: note = chemically synthesized
  source 1..20: mol_type = other DNA
agtggcagaattggaggcac

SEQ ID NO: 19050 - DNA, 20 bp, synthetic construct
  misc_feature 1..20: note = chemically synthesized
  source 1..20: mol_type = other DNA
gtggcagaattggaggcacg

SEQ ID NO: 19051 - DNA, 20 bp, synthetic construct
  misc_feature 1..20: note = chemically synthesized
  source 1..20: mol_type = other DNA
tggcagaattggaggcacga

SEQ ID NO: 19052 - DNA, 20 bp, synthetic construct
  misc_feature 1..20: note = chemically synthesized
  source 1..20: mol_type = other DNA
ttggaggcacgagggataaa

SEQ ID NO: 19053 - DNA, 20 bp, synthetic construct
  misc_feature 1..20: note = chemically synthesized
  source 1..20: mol_type = other DNA
gataaaaagtccctcataaa

SEQ ID NO: 19054 - DNA, 20 bp, synthetic construct
  misc_feature 1..20: note = chemically synthesized
  source 1..20: mol_type = other DNA
aagtccctcataaatagcca

SEQ ID NO: 19055 - DNA, 20 bp, synthetic construct
  misc_feature 1..20: note = chemically synthesized
  source 1..20: mol_type = other DNA
ccacagttctatcttcaccc

SEQ ID NO: 19056 - DNA, 20 bp, synthetic construct
  misc_feature 1..20: note = chemically synthesized
  source 1..20: mol_type = other DNA
ttctatcttcacccaagatt

SEQ ID NO: 19057 - DNA, 20 bp, synthetic construct
  misc_feature 1..20: note = chemically synthesized
  source 1..20: mol_type = other DNA
tatcttcacccaagatttag

SEQ ID NO: 19058 - DNA, 20 bp, synthetic construct
  misc_feature 1..20: note = chemically synthesized
  source 1..20: mol_type = other DNA
cacccaagatttagtagaaa

SEQ ID NO: 19059 - DNA, 20 bp, synthetic construct
  misc_feature 1..20: note = chemically synthesized
  source 1..20: mol_type = other DNA
tagtagaaatagttatacct

SEQ ID NO: 19060 - DNA, 20 bp, synthetic construct
  misc_feature 1..20: note = chemically synthesized
  source 1..20: mol_type = other DNA
tagaaatagttatacctgag

SEQ ID NO: 19061 - DNA, 20 bp, synthetic construct
  misc_feature 1..20: note = chemically synthesized
  source 1..20: mol_type = other DNA
agttatacctgagaagcatg

SEQ ID NO: 19062 - DNA, 20 bp, synthetic construct
  misc_feature 1..20: note = chemically synthesized
  source 1..20: mol_type = other DNA
gcatgtggatgataatgaaa

SEQ ID NO: 19063 - DNA, 20 bp, synthetic construct
  misc_feature 1..20: note = chemically synthesized
  source 1..20: mol_type = other DNA
ggatgataatgaaacggtca

SEQ ID NO: 19064 - DNA, 20 bp, synthetic construct
  misc_feature 1..20: note = chemically synthesized
  source 1..20: mol_type = other DNA
gatgataatgaaacggtcat

SEQ ID NO: 19065 - DNA, 20 bp, synthetic construct
  misc_feature 1..20: note = chemically synthesized
  source 1..20: mol_type = other DNA
aaacggtcataggccattga

SEQ ID NO: 19066 - DNA, 20 bp, synthetic construct
  misc_feature 1..20: note = chemically synthesized
  source 1..20: mol_type = other DNA
aacggtcataggccattgac

SEQ ID NO: 19067 - DNA, 20 bp, synthetic construct
  misc_feature 1..20: note = chemically synthesized
  source 1..20: mol_type = other DNA
cggtcataggccattgacag

SEQ ID NO: 19068 - DNA, 20 bp, synthetic construct
  misc_feature 1..20: note = chemically synthesized
  source 1..20: mol_type = other DNA
aggagaatacctgattctgc

SEQ ID NO: 19069 - DNA, 20 bp, synthetic construct
  misc_feature 1..20: note = chemically synthesized
  source 1..20: mol_type = other DNA
agaatacctgattctgcaag

SEQ ID NO: 19070 - DNA, 20 bp, synthetic construct
  misc_feature 1..20: note = chemically synthesized
  source 1..20: mol_type = other DNA
ctgattctgcaagtggataa

SEQ ID NO: 19071 - DNA, 20 bp, synthetic construct
  misc_feature 1..20: note = chemically synthesized
  source 1..20: mol_type = other DNA
tgattctgcaagtggataat

SEQ ID NO: 19072 - DNA, 20 bp, synthetic construct
  misc_feature 1..20: note = chemically synthesized
  source 1..20: mol_type = other DNA
attctgcaagtggataatgg

SEQ ID NO: 19073 - DNA, 20 bp, synthetic construct
  misc_feature 1..20: note = chemically synthesized
  source 1..20: mol_type = other DNA
ctgcaagtggataatgggag

SEQ ID NO: 19074 - DNA, 20 bp, synthetic construct
  misc_feature 1..20: note = chemically synthesized
  source 1..20: mol_type = other DNA
agtggataatgtaaacctgc

SEQ ID NO: 19075 - DNA, 20 bp, synthetic construct
  misc_feature 1..20: note = chemically synthesized
  source 1..20: mol_type = other DNA
ggataatgtaaacctgcaag

SEQ ID NO: 19076 - DNA, 20 bp, synthetic construct
  misc_feature 1..20: note = chemically synthesized
  source 1..20: mol_type = other DNA
taatgtaaacctgcaagaag

SEQ ID NO: 19077 - DNA, 20 bp, synthetic construct
  misc_feature 1..20: note = chemically synthesized
  source 1..20: mol_type = other DNA
aatgtaaacctgcaagaagc

SEQ ID NO: 19078 - DNA, 20 bp, synthetic construct
  misc_feature 1..20: note = chemically synthesized
  source 1..20: mol_type = other DNA
cctgcaagaagcaggcccca

SEQ ID NO: 19079 - DNA, 20 bp, synthetic construct
  misc_feature 1..20: note = chemically synthesized
  source 1..20: mol_type = other DNA
cctctttgtgattcatccac

SEQ ID NO: 19080 - DNA, 20 bp, synthetic construct
  misc_feature 1..20: note = chemically synthesized
  source 1..20: mol_type = other DNA
catccacaagacgcccatta

SEQ ID NO: 19081 - DNA, 20 bp, synthetic construct
  misc_feature 1..20: note = chemically synthesized
  source 1..20: mol_type = other DNA
ccacaagacgcccattacag

SEQ ID NO: 19082 - DNA, 20 bp, synthetic construct
  misc_feature 1..20: note = chemically synthesized
  source 1..20: mol_type = other DNA
cacaagacgcccattacagt

SEQ ID NO: 19083 - DNA, 20 bp, synthetic construct
  misc_feature 1..20: note = chemically synthesized
  source 1..20: mol_type = other DNA
gcccattacagtgggcatca

SEQ ID NO: 19084 - DNA, 20 bp, synthetic construct
  misc_feature 1..20: note = chemically synthesized
  source 1..20: mol_type = other DNA
atcatggtcaatttcaccat

SEQ ID NO: 19085 - DNA, 20 bp, synthetic construct
  misc_feature 1..20: note = chemically synthesized
  source 1..20: mol_type = other DNA
tcatggtcaatttcaccatg

SEQ ID NO: 19086 - DNA, 20 bp, synthetic construct
  misc_feature 1..20: note = chemically synthesized
  source 1..20: mol_type = other DNA
ttcaccatgaggtcttgcct

SEQ ID NO: 19087 - DNA, 20 bp, synthetic construct
  misc_feature 1..20: note = chemically synthesized
  source 1..20: mol_type = other DNA
catgaggtcttgcctcagtg

SEQ ID NO: 19088 - DNA, 20 bp, synthetic construct
  misc_feature 1..20: note = chemically synthesized
  source 1..20: mol_type = other DNA
aggtcttgcctcagtgtggc

SEQ ID NO: 19089 - DNA, 20 bp, synthetic construct
  misc_feature 1..20: note = chemically synthesized
  source 1..20: mol_type = other DNA
ggtcttgcctcagtgtggca

SEQ ID NO: 19090 - DNA, 20 bp, synthetic construct
  misc_feature 1..20: note = chemically synthesized
  source 1..20: mol_type = other DNA
gcctcagtgtggcaaggaaa

SEQ ID NO: 19091 - DNA, 20 bp, synthetic construct
  misc_feature 1..20: note = chemically synthesized
  source 1..20: mol_type = other DNA
tgtggcaaggaaacagtaca

SEQ ID NO: 19092 - DNA, 20 bp, synthetic construct
  misc_feature 1..20: note = chemically synthesized
  source 1..20: mol_type = other DNA
gtggcaaggaaacagtacat

SEQ ID NO: 19093 - DNA, 20 bp, synthetic construct
  misc_feature 1..20: note = chemically synthesized
  source 1..20: mol_type = other DNA
aaacagtacatgggttcgtg

SEQ ID NO: 19094 - DNA, 20 bp, synthetic construct
  misc_feature 1..20: note = chemically synthesized
  source 1..20: mol_type = other DNA
acatgggttcgtgaagactg

SEQ ID NO: 19095 - DNA, 20 bp, synthetic construct
  misc_feature 1..20: note = chemically synthesized
  source 1..20: mol_type = other DNA
agactgtggtcatgcttgat

SEQ ID NO: 19096 - DNA, 20 bp, synthetic construct
  misc_feature 1..20: note = chemically synthesized
  source 1..20: mol_type = other DNA
gactgtggtcatgcttgatg

SEQ ID NO: 19097 - DNA, 20 bp, synthetic construct
  misc_feature 1..20: note = chemically synthesized
  source 1..20: mol_type = other DNA
tgtggtcatgcttgatgagg

SEQ ID NO: 19098 - DNA, 20 bp, synthetic construct
  misc_feature 1..20: note = chemically synthesized
  source 1..20: mol_type = other DNA
tggtcatgcttgatgaggta

SEQ ID NO: 19099 - DNA, 20 bp, synthetic construct
  misc_feature 1..20: note = chemically synthesized
  source 1..20: mol_type = other DNA
ggtcatgcttgatgaggtag

SEQ ID NO: 19100 - DNA, 20 bp, synthetic construct
  misc_feature 1..20: note = chemically synthesized
  source 1..20: mol_type = other DNA
tcatgcttgatgaggtagag

SEQ ID NO: 19101 - DNA, 20 bp, synthetic construct
  misc_feature 1..20: note = chemically synthesized
  source 1..20: mol_type = other DNA
tagaggagcttgccattgcc

SEQ ID NO: 19102 - DNA, 20 bp, synthetic construct
  misc_feature 1..20: note = chemically synthesized
  source 1..20: mol_type = other DNA
aggagcttgccattgccaag

SEQ ID NO: 19103 - DNA, 20 bp, synthetic construct
  misc_feature 1..20: note = chemically synthesized
  source 1..20: mol_type = other DNA
ggagcttgccattgccaaga

SEQ ID NO: 19104 - DNA, 20 bp, synthetic construct
  misc_feature 1..20: note = chemically synthesized
  source 1..20: mol_type = other DNA
aagaaggacgcacacataaa

SEQ ID NO: 19105 - DNA, 20 bp, synthetic construct
  misc_feature 1..20: note = chemically synthesized
  source 1..20: mol_type = other DNA
ggacgcacacataaacagca

SEQ ID NO: 19106 - DNA, 20 bp, synthetic construct
  misc_feature 1..20: note = chemically synthesized
  source 1..20: mol_type = other DNA
cgcacacataaacagcaaag

SEQ ID NO: 19107 - DNA, 20 bp, synthetic construct
  misc_feature 1..20: note = chemically synthesized
  source 1..20: mol_type = other DNA
gcacacataaacagcaaaga

SEQ ID NO: 19108 - DNA, 20 bp, synthetic construct
  misc_feature 1..20: note = chemically synthesized
  source 1..20: mol_type = other DNA
cacacataaacagcaaagaa

SEQ ID NO: 19109 - DNA, 20 bp, synthetic construct
  misc_feature 1..20: note = chemically synthesized
  source 1..20: mol_type = other DNA
acacataaacagcaaagaag

SEQ ID NO: 19110 - DNA, 20 bp, synthetic construct
  misc_feature 1..20: note = chemically synthesized
  source 1..20: mol_type = other DNA
ataaacagcaaagaagggga

SEQ ID NO: 19111 - DNA, 20 bp, synthetic construct
  misc_feature 1..20: note = chemically synthesized
  source 1..20: mol_type = other DNA
aaacagcaaagaaggggatg

SEQ ID NO: 19112 - DNA, 20 bp, synthetic construct
  misc_feature 1..20: note = chemically synthesized
  source 1..20: mol_type = other DNA
caaagaaggggatggagatc

SEQ ID NO: 19113 - DNA, 20 bp, synthetic construct
  misc_feature 1..20: note = chemically synthesized
  source 1..20: mol_type = other DNA
ggggatggagatcgagtgat

SEQ ID NO: 19114 - DNA, 20 bp, synthetic construct
  misc_feature 1..20: note = chemically synthesized
  source 1..20: mol_type = other DNA
atcgagtgataagttgcctc

SEQ ID NO: 19115 - DNA, 20 bp, synthetic construct
  misc_feature 1..20: note = chemically synthesized
  source 1..20: mol_type = other DNA
aagttgcctccagtactgaa

SEQ ID NO: 19116 - DNA, 20 bp, synthetic construct
  misc_feature 1..20: note = chemically synthesized
  source 1..20: mol_type = other DNA
tgcctccagtactgaaaagc

SEQ ID NO: 19117 - DNA, 20 bp, synthetic construct
  misc_feature 1..20: note = chemically synthesized
  source 1..20: mol_type = other DNA
gcctccagtactgaaaagcc

SEQ ID NO: 19118 - DNA, 20 bp, synthetic construct
  misc_feature 1..20: note = chemically synthesized
  source 1..20: mol_type = other DNA
tccagtactgaaaagccagg

SEQ ID NO: 19119 - DNA, 20 bp, synthetic construct
  misc_feature 1..20: note = chemically synthesized
  source 1..20: mol_type = other DNA
tgaaaagccaggcagcaaaa

SEQ ID NO: 19120 - DNA, 20 bp, synthetic construct
  misc_feature 1..20: note = chemically synthesized
  source 1..20: mol_type = other DNA
gaaaagccaggcagcaaaaa

SEQ ID NO: 19121 - DNA, 20 bp, synthetic construct
  misc_feature 1..20: note = chemically synthesized
  source 1..20: mol_type = other DNA
aaagccaggcagcaaaaaag

SEQ ID NO: 19122 - DNA, 20 bp, synthetic construct
  misc_feature 1..20: note = chemically synthesized
  source 1..20: mol_type = other DNA
gagccgcattgtgtgttcac

SEQ ID NO: 19123 - DNA, 20 bp, synthetic construct
  misc_feature 1..20: note = chemically synthesized
  source 1..20: mol_type = other DNA
ccgcattgtgtgttcacaag

SEQ ID NO: 19124 - DNA, 20 bp, synthetic construct
  misc_feature 1..20: note = chemically synthesized
  source 1..20: mol_type = other DNA
attgtgtgttcacaagtggc

SEQ ID NO: 19125 - DNA, 20 bp, synthetic construct
  misc_feature 1..20: note = chemically synthesized
  source 1..20: mol_type = other DNA
gtgtgttcacaagtggcaag

SEQ ID NO: 19126 - DNA, 20 bp, synthetic construct
  misc_feature 1..20: note = chemically synthesized
  source 1..20: mol_type = other DNA
acaagtggcaagtagcttta

SEQ ID NO: 19127 - DNA, 20 bp, synthetic construct
  misc_feature 1..20: note = chemically synthesized
  source 1..20: mol_type = other DNA
cactgaaatccctgccttat

SEQ ID NO: 19128 - DNA, 20 bp, synthetic construct
  misc_feature 1..20: note = chemically synthesized
  source 1..20: mol_type = other DNA
cttgtgaaactgtatttctg

SEQ ID NO: 19129 - DNA, 20 bp, synthetic construct
  misc_feature 1..20: note = chemically synthesized
  source 1..20: mol_type = other DNA
tcaatcctaatattcatatt

SEQ ID NO: 19130 - DNA, 20 bp, synthetic construct
  misc_feature 1..20: note = chemically synthesized
  source 1..20: mol_type = other DNA
catatttagcaataatttat

SEQ ID NO: 19131 - DNA, 20 bp, synthetic construct
  misc_feature 1..20: note = chemically synthesized
  source 1..20: mol_type = other DNA
aatgtgcaacaattttctta

SEQ ID NO: 19132 - DNA, 20 bp, synthetic construct
  misc_feature 1..20: note = chemically synthesized
  source 1..20: mol_type = other DNA
gtgcaacaattttcttatag

SEQ ID NO: 19133 - DNA, 20 bp, synthetic construct
  misc_feature 1..20: note = chemically synthesized
  source 1..20: mol_type = other DNA
gcaacaattttcttatagaa

SEQ ID NO: 19134 - DNA, 20 bp, synthetic construct
  misc_feature 1..20: note = chemically synthesized
  source 1..20: mol_type = other DNA
atagaagagcaatacattta

SEQ ID NO: 19135 - DNA, 20 bp, synthetic construct
  misc_feature 1..20: note = chemically synthesized
  source 1..20: mol_type = other DNA
aatacatttatagactgtgc

SEQ ID NO: 19136 - DNA, 20 bp, synthetic construct
  misc_feature 1..20: note = chemically synthesized
  source 1..20: mol_type = other DNA
tacatttatagactgtgcta

SEQ ID NO: 19137 - DNA, 20 bp, synthetic construct
  misc_feature 1..20: note = chemically synthesized
  source 1..20: mol_type = other DNA
ttatagactgtgctagagat

SEQ ID NO: 19138 - DNA, 20 bp, synthetic construct
  misc_feature 1..20: note = chemically synthesized
  source 1..20: mol_type = other DNA
tatagactgtgctagagata

SEQ ID NO: 19139 - DNA, 20 bp, synthetic construct
  misc_feature 1..20: note = chemically synthesized
  source 1..20: mol_type = other DNA
aggaatgatgatcatttctt

SEQ ID NO: 19140 - DNA, 20 bp, synthetic construct
  misc_feature 1..20: note = chemically synthesized
  source 1..20: mol_type = other DNA
ttcttcagttatgaataatt

SEQ ID NO: 19141 - DNA, 20 bp, synthetic construct
  misc_feature 1..20: note = chemically synthesized
  source 1..20: mol_type = other DNA
ttcagttatgaataattaag

SEQ ID NO: 19142 - DNA, 20 bp, synthetic construct
  misc_feature 1..20: note = chemically synthesized
  source 1..20: mol_type = other DNA
ttatgaataattaagtagtt

SEQ ID NO: 19143 - DNA, 20 bp, synthetic construct
  misc_feature 1..20: note = chemically synthesized
  source 1..20: mol_type = other DNA
aaatgcatcatgcccctctg

SEQ ID NO: 19144 - DNA, 20 bp, synthetic construct
  misc_feature 1..20: note = chemically synthesized
  source 1..20: mol_type = other DNA
ctgcacaatgtttgaaccaa

SEQ ID NO: 19145 - DNA, 20 bp, synthetic construct
  misc_feature 1..20: note = chemically synthesized
  source 1..20: mol_type = other DNA
ttgaaccaatagtaacaaaa

SEQ ID NO: 19146 - DNA, 20 bp, synthetic construct
  misc_feature 1..20: note = chemically synthesized
  source 1..20: mol_type = other DNA
aaccaatagtaacaaaaaag

SEQ ID NO: 19147 - DNA, 20 bp, synthetic construct
  misc_feature 1..20: note = chemically synthesized
  source 1..20: mol_type = other DNA
accaatagtaacaaaaaaga

SEQ ID NO: 19148 - DNA, 20 bp, synthetic construct
  misc_feature 1..20: note = chemically synthesized
  source 1..20: mol_type = other DNA
agaaggcaaatatatgcaat

SEQ ID NO: 19149 - DNA, 20 bp, synthetic construct
  misc_feature 1..20: note = chemically synthesized
  source 1..20: mol_type = other DNA
aattagataataattgtaca

SEQ ID NO: 19150 - DNA, 20 bp, synthetic construct
  misc_feature 1..20: note = chemically synthesized
  source 1..20: mol_type = other DNA
tacatagttaacctgctgct

SEQ ID NO: 19151 - DNA, 20 bp, synthetic construct
  misc_feature 1..20: note = chemically synthesized
  source 1..20: mol_type = other DNA
gcttagcttaattgcatatt

SEQ ID NO: 19152 - DNA, 20 bp, synthetic construct
  misc_feature 1..20: note = chemically synthesized
  source 1..20: mol_type = other DNA
tatgtttcacaatcatgata

SEQ ID NO: 19153 - DNA, 20 bp, synthetic construct
  misc_feature 1..20: note = chemically synthesized
  source 1..20: mol_type = other DNA
tcacaatcatgatatagaca

SEQ ID NO: 19154 - DNA, 20 bp, synthetic construct
  misc_feature 1..20: note = chemically synthesized
  source 1..20: mol_type = other DNA
atatagacatagtgttttgt

SEQ ID NO: 19155 - DNA, 20 bp, synthetic construct
  misc_feature 1..20: note = chemically synthesized
  source 1..20: mol_type = other DNA
ttagaaaacttttctttgtt

SEQ ID NO: 19156 - DNA, 20 bp, synthetic construct
  misc_feature 1..20: note = chemically synthesized
  source 1..20: mol_type = other DNA
ttctttgtttagttttgaaa

SEQ ID NO: 19157 - DNA, 20 bp, synthetic construct
  misc_feature 1..20: note = chemically synthesized
  source 1..20: mol_type = other DNA
aatagaatgttaatgtttta

SEQ ID NO: 19158 - DNA, 20 bp, synthetic construct
  misc_feature 1..20: note = chemically synthesized
  source 1..20: mol_type = other DNA
gttttatggaattctaacaa

SEQ ID NO: 19159 - DNA, 20 bp, synthetic construct
  misc_feature 1..20: note = chemically synthesized
  source 1..20: mol_type = other DNA
ggaattctaacaaaagccat

SEQ ID NO: 19160 - DNA, 20 bp, synthetic construct
  misc_feature 1..20: note = chemically synthesized
  source 1..20: mol_type = other DNA
caaaagccatgagccctctg

SEQ ID NO: 19161 - DNA, 20 bp, synthetic construct
  misc_feature 1..20: note = chemically synthesized
  source 1..20: mol_type = other DNA
aaagccatgagccctctgtg

SEQ ID NO: 19162 - DNA, 20 bp, synthetic construct
  misc_feature 1..20: note = chemically synthesized
  source 1..20: mol_type = other DNA
gagccctctgtggagaaaaa

SEQ ID NO: 19163 - DNA, 20 bp, synthetic construct
  misc_feature 1..20: note = chemically synthesized
  source 1..20: mol_type = other DNA
ctgtggagaaaaatggacaa

SEQ ID NO: 19164 - DNA, 20 bp, synthetic construct
  misc_feature 1..20: note = chemically synthesized
  source 1..20: mol_type = other DNA
tggagaaaaatggacaaaag

SEQ ID NO: 19165 - DNA, 20 bp, synthetic construct
  misc_feature 1..20: note = chemically synthesized
  source 1..20: mol_type = other DNA
ggagaaaaatggacaaaagc

SEQ ID NO: 19166 - DNA, 20 bp, synthetic construct
  misc_feature 1..20: note = chemically synthesized
  source 1..20: mol_type = other DNA
aaagcaggtgacgtcacatt

SEQ ID NO: 19167 - DNA, 20 bp, synthetic construct
  misc_feature 1..20: note = chemically synthesized
  source 1..20: mol_type = other DNA
aatattcacacgttttcctg

SEQ ID NO: 19168 - DNA, 20 bp, synthetic construct
  misc_feature 1..20: note = chemically synthesized
  source 1..20: mol_type = other DNA
ttttcctgaagctaatccat

SEQ ID NO: 19169 - DNA, 20 bp, synthetic construct
  misc_feature 1..20: note = chemically synthesized
  source 1..20: mol_type = other DNA
agcaccacatttgaaacttc

SEQ ID NO: 19170 - DNA, 20 bp, synthetic construct
  misc_feature 1..20: note = chemically synthesized
  source 1..20: mol_type = other DNA
cctgccttgaaacatgtgtt

SEQ ID NO: 19171 - DNA, 20 bp, synthetic construct
  misc_feature 1..20: note = chemically synthesized
  source 1..20: mol_type = other DNA
aaacatgtgttgagatgaaa

SEQ ID NO: 19172 - DNA, 20 bp, synthetic construct
  misc_feature 1..20: note = chemically synthesized
  source 1..20: mol_type = other DNA
agatgaaaaagtctgtgctt

SEQ ID NO: 19173 - DNA, 20 bp, synthetic construct
  misc_feature 1..20: note = chemically synthesized
  source 1..20: mol_type = other DNA
gatgaaaaagtctgtgcttt

SEQ ID NO: 19174 - DNA, 20 bp, synthetic construct
  misc_feature 1..20: note = chemically synthesized
  source 1..20: mol_type = other DNA
aaagtctgtgctttaggtgt

SEQ ID NO: 19175 - DNA, 20 bp, synthetic construct
  misc_feature 1..20: note = chemically synthesized
  source 1..20: mol_type = other DNA
gctttaggtgttggtcatcc

SEQ ID NO: 19176 - DNA, 20 bp, synthetic construct
  misc_feature 1..20: note = chemically synthesized
  source 1..20: mol_type = other DNA
taggtgttggtcatcccaga

SEQ ID NO: 19177 - DNA, 20 bp, synthetic construct
  misc_feature 1..20: note = chemically synthesized
  source 1..20: mol_type = other DNA
ggtgttggtcatcccagatg

SEQ ID NO: 19178 - DNA, 20 bp, synthetic construct
  misc_feature 1..20: note = chemically synthesized
  source 1..20: mol_type = other DNA
atggagtatgttctcctatg

SEQ ID NO: 19179 - DNA, 20 bp, synthetic construct
  misc_feature 1..20: note = chemically synthesized
  source 1..20: mol_type = other DNA
ctcttcgctgcatctaacat

SEQ ID NO: 19180 - DNA, 20 bp, synthetic construct
  misc_feature 1..20: note = chemically synthesized
  source 1..20: mol_type = other DNA
ttcgctgcatctaacataag

SEQ ID NO: 19181 - DNA, 20 bp, synthetic construct
  misc_feature 1..20: note = chemically synthesized
  source 1..20: mol_type = other DNA
tcgctgcatctaacataaga

SEQ ID NO: 19182 - DNA, 20 bp, synthetic construct
  misc_feature 1..20: note = chemically synthesized
  source 1..20: mol_type = other DNA
ctgcatctaacataagaagg

SEQ ID NO: 19183 - DNA, 20 bp, synthetic construct
  misc_feature 1..20: note = chemically synthesized
  source 1..20: mol_type = other DNA
gcatctaacataagaaggaa

SEQ ID NO: 19184 - DNA, 20 bp, synthetic construct
  misc_feature 1..20: note = chemically synthesized
  source 1..20: mol_type = other DNA
catctaacataagaaggaag

SEQ ID NO: 19185 - DNA, 20 bp, synthetic construct
  misc_feature 1..20: note = chemically synthesized
  source 1..20: mol_type = other DNA
tcattccttattcctgttcc

SEQ ID NO: 19186 - DNA, 20 bp, synthetic construct
  misc_feature 1..20: note = chemically synthesized
  source 1..20: mol_type = other DNA
ctatgctgtcattttcttgc

SEQ ID NO: 19187 - DNA, 20 bp, synthetic construct
  misc_feature 1..20: note = chemically synthesized
  source 1..20: mol_type = other DNA
tgtcattttcttgctggaat

SEQ ID NO: 19188 - DNA, 20 bp, synthetic construct
  misc_feature 1..20: note = chemically synthesized
  source 1..20: mol_type = other DNA
gtcattttcttgctggaata

SEQ ID NO: 19189 - DNA, 20 bp, synthetic construct
  misc_feature 1..20: note = chemically synthesized
  source 1..20: mol_type = other DNA
acccattcctgctctatttg

SEQ ID NO: 19190 - DNA, 20 bp, synthetic construct
  misc_feature 1..20: note = chemically synthesized
  source 1..20: mol_type = other DNA
tcctgctctatttgaagact

SEQ ID NO: 19191 - DNA, 20 bp, synthetic construct
  misc_feature 1..20: note = chemically synthesized
  source 1..20: mol_type = other DNA
ctctatttgaagactcagtt

SEQ ID NO: 19192 - DNA, 20 bp, synthetic construct
  misc_feature 1..20: note = chemically synthesized
  source 1..20: mol_type = other DNA
gttcagacactcacttctca

SEQ ID NO: 19193 - DNA, 20 bp, synthetic construct
  misc_feature 1..20: note = chemically synthesized
  source 1..20: mol_type = other DNA
tcacttctcaaagactattc

SEQ ID NO: 19194 - DNA, 20 bp, synthetic construct
  misc_feature 1..20: note = chemically synthesized
  source 1..20: mol_type = other DNA
acttctcaaagactattcaa

SEQ ID NO: 19195 - DNA, 20 bp, synthetic construct
  misc_feature 1..20: note = chemically synthesized
  source 1..20: mol_type = other DNA
cttctcaaagactattcaag

SEQ ID NO: 19196 - DNA, 20 bp, synthetic construct
  misc_feature 1..20: note = chemically synthesized
  source 1..20: mol_type = other DNA
gactattcaagaggccaaat

SEQ ID NO: 19197 - DNA, 20 bp, synthetic construct
  misc_feature 1..20: note = chemically synthesized
  source 1..20: mol_type = other DNA
ctattcaagaggccaaatta

SEQ ID NO: 19198 - DNA, 20 bp, synthetic construct
  misc_feature 1..20: note = chemically synthesized
  source 1..20: mol_type = other DNA
attcaagaggccaaattaga

SEQ ID NO: 19199 - DNA, 20 bp, synthetic construct
  misc_feature 1..20: note = chemically synthesized
  source 1..20: mol_type = other DNA
aattagagagtttatgtatg

SEQ ID NO: 19200 - DNA, 20 bp, synthetic construct
  misc_feature 1..20: note = chemically synthesized
  source 1..20: mol_type = other DNA
gtatgtggaaatcacttccc

SEQ ID NO: 19201 - DNA, 20 bp, synthetic construct
  misc_feature 1..20: note = chemically synthesized
  source 1..20: mol_type = other DNA
atgtggaaatcacttcccca

SEQ ID NO: 19202 - DNA, 20 bp, synthetic construct
  misc_feature 1..20: note = chemically synthesized
  source 1..20: mol_type = other DNA
gtttcctctttccaaatact

SEQ ID NO: 19203 - DNA, 20 bp, synthetic construct
  misc_feature 1..20: note = chemically synthesized
  source 1..20: mol_type = other DNA
tcctctttccaaatactcag

SEQ ID NO: 19204 - DNA, 20 bp, synthetic construct
  misc_feature 1..20: note = chemically synthesized
  source 1..20: mol_type = other DNA
tctcccctccctcctctgtc

SEQ ID NO: 19205 - DNA, 20 bp, synthetic construct
  misc_feature 1..20: note = chemically synthesized
  source 1..20: mol_type = other DNA
ctcccctccctcctctgtct

SEQ ID NO: 19206 - DNA, 20 bp, synthetic construct
  misc_feature 1..20: note = chemically synthesized
  source 1..20: mol_type = other DNA
cccctccctcctctgtctgg

SEQ ID NO: 19207 - DNA, 20 bp, synthetic construct
  misc_feature 1..20: note = chemically synthesized
  source 1..20: mol_type = other DNA
ctccctcctctgtctgggag

SEQ ID NO: 19208 - DNA, 20 bp, synthetic construct
  misc_feature 1..20: note = chemically synthesized
  source 1..20: mol_type = other DNA
cctcctctgtctgggagaag

SEQ ID NO: 19209 - DNA, 20 bp, synthetic construct
  misc_feature 1..20: note = chemically synthesized
  source 1..20: mol_type = other DNA
ctcctctgtctgggagaagc

SEQ ID NO: 19210 - DNA, 20 bp, synthetic construct
  misc_feature 1..20: note = chemically synthesized
  source 1..20: mol_type = other DNA
tcctctgtctgggagaagca

SEQ ID NO: 19211 - DNA, 20 bp, synthetic construct
  misc_feature 1..20: note = chemically synthesized
  source 1..20: mol_type = other DNA
ggacgctcaaccaatgtcct

SEQ ID NO: 19212 - DNA, 20 bp, synthetic construct
  misc_feature 1..20: note = chemically synthesized
  source 1..20: mol_type = other DNA
accaatgtcctcggaacttt

SEQ ID NO: 19213 - DNA, 20 bp, synthetic construct
  misc_feature 1..20: note = chemically synthesized
  source 1..20: mol_type = other DNA
ccaatgtcctcggaactttc

SEQ ID NO: 19214 - DNA, 20 bp, synthetic construct
  misc_feature 1..20: note = chemically synthesized
  source 1..20: mol_type = other DNA
gaactttcaggtatttctcc

SEQ ID NO: 19215 - DNA, 20 bp, synthetic construct
  misc_feature 1..20: note = chemically synthesized
  source 1..20: mol_type = other DNA
aactttcaggtatttctcca

SEQ ID NO: 19216 - DNA, 20 bp, synthetic construct
  misc_feature 1..20: note = chemically synthesized
  source 1..20: mol_type = other DNA
ttcaggtatttctccaagga

SEQ ID NO: 19217 - DNA, 20 bp, synthetic construct
  misc_feature 1..20: note = chemically synthesized
  source 1..20: mol_type = other DNA
gtatttctccaaggatggat

SEQ ID NO: 19218 - DNA, 20 bp, synthetic construct
  misc_feature 1..20: note = chemically synthesized
  source 1..20: mol_type = other DNA
tctccaaggatggatgagaa

SEQ ID NO: 19219 - DNA, 20 bp, synthetic construct
  misc_feature 1..20: note = chemically synthesized
  source 1..20: mol_type = other DNA
ctccaatgccacctctacat

SEQ ID NO: 19220 - DNA, 20 bp, synthetic construct
  misc_feature 1..20: note = chemically synthesized
  source 1..20: mol_type = other DNA
tccaatgccacctctacatt

SEQ ID NO: 19221 - DNA, 20 bp, synthetic construct
  misc_feature 1..20: note = chemically synthesized
  source 1..20: mol_type = other DNA
ccacctctacattgggatgc

SEQ ID NO: 19222 - DNA, 20 bp, synthetic construct
  misc_feature 1..20: note = chemically synthesized
  source 1..20: mol_type = other DNA
cacctctacattgggatgcc

SEQ ID NO: 19223 - DNA, 20 bp, synthetic construct
  misc_feature 1..20: note = chemically synthesized
  source 1..20: mol_type = other DNA
gacttaattatgtgaccctt

SEQ ID NO: 19224 - DNA, 20 bp, synthetic construct
  misc_feature 1..20: note = chemically synthesized
  source 1..20: mol_type = other DNA
acttaattatgtgacccttc

SEQ ID NO: 19225 - DNA, 20 bp, synthetic construct
  misc_feature 1..20: note = chemically synthesized
  source 1..20: mol_type = other DNA
atgtgacccttcaggaccct

SEQ ID NO: 19226 - DNA, 20 bp, synthetic construct
  misc_feature 1..20: note = chemically synthesized
  source 1..20: mol_type = other DNA
cccttcaggaccctaagcat

SEQ ID NO: 19227 - DNA, 20 bp, synthetic construct
  misc_feature 1..20: note = chemically synthesized
  source 1..20: mol_type = other DNA
ggaccctaagcatcagtaca

SEQ ID NO: 19228 - DNA, 20 bp, synthetic construct
  misc_feature 1..20: note = chemically synthesized
  source 1..20: mol_type = other DNA
gtctgtctcaatacaatgca

SEQ ID NO: 19229 - DNA, 20 bp, synthetic construct
  misc_feature 1..20: note = chemically synthesized
  source 1..20: mol_type = other DNA
tcaatacaatgcaaagtatt

SEQ ID NO: 19230 - DNA, 20 bp, synthetic construct
  misc_feature 1..20: note = chemically synthesized
  source 1..20: mol_type = other DNA
aatacaatgcaaagtattga

SEQ ID NO: 19231 - DNA, 20 bp, synthetic construct
  misc_feature 1..20: note = chemically synthesized
  source 1..20: mol_type = other DNA
tgcaaagtattgagagatac

SEQ ID NO: 19232 - DNA, 20 bp, synthetic construct
  misc_feature 1..20: note = chemically synthesized
  source 1..20: mol_type = other DNA
tgagagatactagttgaatg

SEQ ID NO: 19233 - DNA, 20 bp, synthetic construct
  misc_feature 1..20: note = chemically synthesized
  source 1..20: mol_type = other DNA
gagagatactagttgaatgc

SEQ ID NO: 19234 - DNA, 20 bp, synthetic construct
  misc_feature 1..20: note = chemically synthesized
  source 1..20: mol_type = other DNA
agagatactagttgaatgca

SEQ ID NO: 19235 - DNA, 20 bp, synthetic construct
  misc_feature 1..20: note = chemically synthesized
  source 1..20: mol_type = other DNA
ggtcacatgtgtctttgtcc

SEQ ID NO: 19236 - DNA, 20 bp, synthetic construct
  misc_feature 1..20: note = chemically synthesized
  source 1..20: mol_type = other DNA
tcacatgtgtctttgtcctg

SEQ ID NO: 19237 - DNA, 20 bp, synthetic construct
  misc_feature 1..20: note = chemically synthesized
  source 1..20: mol_type = other DNA
tgttgtcttttctgatactt

SEQ ID NO: 19238 - DNA, 20 bp, synthetic construct
  misc_feature 1..20: note = chemically synthesized
  source 1..20: mol_type = other DNA
gttgtcttttctgatacttt

SEQ ID NO: 19239 - DNA, 20 bp, synthetic construct
  misc_feature 1..20: note = chemically synthesized
  source 1..20: mol_type = other DNA
ttctgatactttgggaaaat

SEQ ID NO: 19240 - DNA, 20 bp, synthetic construct
  misc_feature 1..20: note = chemically synthesized
  source 1..20: mol_type = other DNA
ggaaaatcagttctgatcca

SEQ ID NO: 19241 - DNA, 20 bp, synthetic construct
  misc_feature 1..20: note = chemically synthesized
  source 1..20: mol_type = other DNA
gaaaatcagttctgatccac

SEQ ID NO: 19242 - DNA, 20 bp, synthetic construct
  misc_feature 1..20: note = chemically synthesized
  source 1..20: mol_type = other DNA
ctgatccacaggaacctcaa

SEQ ID NO: 19243 - DNA, 20 bp, synthetic construct
  misc_feature 1..20: note = chemically synthesized
  source 1..20: mol_type = other DNA
aacctcaatggatctattaa

SEQ ID NO: 19244 - DNA, 20 bp, synthetic construct
  misc_feature 1..20: note = chemically synthesized
  source 1..20: mol_type = other DNA
caatggatctattaatagcc

SEQ ID NO: 19245 - DNA, 20 bp, synthetic construct
  misc_feature 1..20: note = chemically synthesized
  source 1..20: mol_type = other DNA
tattaatagccaagtaaatg

SEQ ID NO: 19246 - DNA, 20 bp, synthetic construct
  misc_feature 1..20: note = chemically synthesized
  source 1..20: mol_type = other DNA
attaatagccaagtaaatga

SEQ ID NO: 19247 - DNA, 20 bp, synthetic construct
  misc_feature 1..20: note = chemically synthesized
  source 1..20: mol_type = other DNA
ttaatagccaagtaaatgaa

SEQ ID NO: 19248 - DNA, 20 bp, synthetic construct
  misc_feature 1..20: note = chemically synthesized
  source 1..20: mol_type = other DNA
aatcactgcccatttcatac

SEQ ID NO: 19249 - DNA, 20 bp, synthetic construct
  misc_feature 1..20: note = chemically synthesized
  source 1..20: mol_type = other DNA
atcactgcccatttcatacc

SEQ ID NO: 19250 - DNA, 20 bp, synthetic construct
  misc_feature 1..20: note = chemically synthesized
  source 1..20: mol_type = other DNA
tgcccatttcataccaggtt

SEQ ID NO: 19251 - DNA, 20 bp, synthetic construct
  misc_feature 1..20: note = chemically synthesized
  source 1..20: mol_type = other DNA
gcccatttcataccaggttc

SEQ ID NO: 19252 - DNA, 20 bp, synthetic construct
  misc_feature 1..20: note = chemically synthesized
  source 1..20: mol_type = other DNA
atttcataccaggttcagga

SEQ ID NO: 19253 - DNA, 20 bp, synthetic construct
  misc_feature 1..20: note = chemically synthesized
  source 1..20: mol_type = other DNA
taaattttcaacatttactt

SEQ ID NO: 19254 - DNA, 20 bp, synthetic construct
  misc_feature 1..20: note = chemically synthesized
  source 1..20: mol_type = other DNA
ttcaacatttactttagata

SEQ ID NO: 19255 - DNA, 20 bp, synthetic construct
  misc_feature 1..20: note = chemically synthesized
  source 1..20: mol_type = other DNA
aacatttactttagatacag

SEQ ID NO: 19256 - DNA, 20 bp, synthetic construct
  misc_feature 1..20: note = chemically synthesized
  source 1..20: mol_type = other DNA
acatttactttagatacagt

SEQ ID NO: 19257 - DNA, 20 bp, synthetic construct
  misc_feature 1..20: note = chemically synthesized
  source 1..20: mol_type = other DNA
agatacagtgggtacttgtg

SEQ ID NO: 19258 - DNA, 20 bp, synthetic construct
  misc_feature 1..20: note = chemically synthesized
  source 1..20: mol_type = other DNA
gatacagtgggtacttgtgc

SEQ ID NO: 19259 - DNA, 20 bp, synthetic construct
  misc_feature 1..20: note = chemically synthesized
  source 1..20: mol_type = other DNA
acttgtgcaggttttttaca

SEQ ID NO: 19260 - DNA, 20 bp, synthetic construct
  misc_feature 1..20: note = chemically synthesized
  source 1..20: mol_type = other DNA
ttacatggatatattgcatg

SEQ ID NO: 19261 - DNA, 20 bp, synthetic construct
  misc_feature 1..20: note = chemically synthesized
  source 1..20: mol_type = other DNA
catggatatattgcatgcag

SEQ ID NO: 19262 - DNA, 20 bp, synthetic construct
  misc_feature 1..20: note = chemically synthesized
  source 1..20: mol_type = other DNA
gatatattgcatgcagtggt

SEQ ID NO: 19263 - DNA, 20 bp, synthetic construct
  misc_feature 1..20: note = chemically synthesized
  source 1..20: mol_type = other DNA
gtggtgagcatactatccaa

SEQ ID NO: 19264 - DNA, 20 bp, synthetic construct
  misc_feature 1..20: note = chemically synthesized
  source 1..20: mol_type = other DNA
gcatctctccctgccccttg

SEQ ID NO: 19265 - DNA, 20 bp, synthetic construct
  misc_feature 1..20: note = chemically synthesized
  source 1..20: mol_type = other DNA
tctctccctgccccttgtag

SEQ ID NO: 19266 - DNA, 20 bp, synthetic construct
  misc_feature 1..20: note = chemically synthesized
  source 1..20: mol_type = other DNA
ctgccccttgtagtagtttc

SEQ ID NO: 19267 - DNA, 20 bp, synthetic construct
  misc_feature 1..20: note = chemically synthesized
  source 1..20: mol_type = other DNA
ccccttgtagtagtttcaag

SEQ ID NO: 19268 - DNA, 20 bp, synthetic construct
  misc_feature 1..20: note = chemically synthesized
  source 1..20: mol_type = other DNA
atccacgtgtactcaatgtt

SEQ ID NO: 19269 - DNA, 20 bp, synthetic construct
  misc_feature 1..20: note = chemically synthesized
  source 1..20: mol_type = other DNA
tttagcttccacttataaat

SEQ ID NO: 19270 - DNA, 20 bp, synthetic construct
  misc_feature 1..20: note = chemically synthesized
  source 1..20: mol_type = other DNA
cacttataaatgagaatata

SEQ ID NO: 19271 - DNA, 20 bp, synthetic construct
  misc_feature 1..20: note = chemically synthesized
  source 1..20: mol_type = other DNA
tgttcttgcgttaatttgct

SEQ ID NO: 19272 - DNA, 20 bp, synthetic construct
  misc_feature 1..20: note = chemically synthesized
  source 1..20: mol_type = other DNA
gttcttgcgttaatttgctt

SEQ ID NO: 19273 - DNA, 20 bp, synthetic construct
  misc_feature 1..20: note = chemically synthesized
  source 1..20: mol_type = other DNA
cgttaatttgcttaggatta

SEQ ID NO: 19274 - DNA, 20 bp, synthetic construct
  misc_feature 1..20: note = chemically synthesized
  source 1..20: mol_type = other DNA
ttgcttaggattatagcctc

SEQ ID NO: 19275 - DNA, 20 bp, synthetic construct
  misc_feature 1..20: note = chemically synthesized
  source 1..20: mol_type = other DNA
gctccacccatgttgctgaa

SEQ ID NO: 19276 - DNA, 20 bp, synthetic construct
  misc_feature 1..20: note = chemically synthesized
  source 1..20: mol_type = other DNA
ctccacccatgttgctgaaa

SEQ ID NO: 19277 - DNA, 20 bp, synthetic construct
  misc_feature 1..20: note = chemically synthesized
  source 1..20: mol_type = other DNA
catttgttcttattgccaca

SEQ ID NO: 19278 - DNA, 20 bp, synthetic construct
  misc_feature 1..20: note = chemically synthesized
  source 1..20: mol_type = other DNA
ttgttcttattgccacatag

SEQ ID NO: 19279 - DNA, 20 bp, synthetic construct
  misc_feature 1..20: note = chemically synthesized
  source 1..20: mol_type = other DNA
ttcttattgccacatagtgg

SEQ ID NO: 19280 - DNA, 20 bp, synthetic construct
  misc_feature 1..20: note = chemically synthesized
  source 1..20: mol_type = other DNA
gtggtggtgtatatgtacca

SEQ ID NO: 19281 - DNA, 20 bp, synthetic construct
  misc_feature 1..20: note = chemically synthesized
  source 1..20: mol_type = other DNA
tttatcccgtccgcctttga

SEQ ID NO: 19282 - DNA, 20 bp, synthetic construct
  misc_feature 1..20: note = chemically synthesized
  source 1..20: mol_type = other DNA
gtccgcctttgatagacacc

SEQ ID NO: 19283 - DNA, 20 bp, synthetic construct
  misc_feature 1..20: note = chemically synthesized
  source 1..20: mol_type = other DNA
tccgcctttgatagacacct

SEQ ID NO: 19284 - DNA, 20 bp, synthetic construct
  misc_feature 1..20: note = chemically synthesized
  source 1..20: mol_type = other DNA
cctttgatagacacctaggc

SEQ ID NO: 19285 - DNA, 20 bp, synthetic construct
  misc_feature 1..20: note = chemically synthesized
  source 1..20: mol_type = other DNA
tttgtatttgctattctaaa

SEQ ID NO: 19286 - DNA, 20 bp, synthetic construct
  misc_feature 1..20: note = chemically synthesized
  source 1..20: mol_type = other DNA
tgctattctaaacagcatta

SEQ ID NO: 19287 - DNA, 20 bp, synthetic construct
  misc_feature 1..20: note = chemically synthesized
  source 1..20: mol_type = other DNA
cagcattacagtgaacatgc

SEQ ID NO: 19288 - DNA, 20 bp, synthetic construct
  misc_feature 1..20: note = chemically synthesized
  source 1..20: mol_type = other DNA
aacatgcaagtgcatgtgtc

SEQ ID NO: 19289 - DNA, 20 bp, synthetic construct
  misc_feature 1..20: note = chemically synthesized
  source 1..20: mol_type = other DNA
tgcaagtgcatgtgtctagt

SEQ ID NO: 19290 - DNA, 20 bp, synthetic construct
  misc_feature 1..20: note = chemically synthesized
  source 1..20: mol_type = other DNA
tctaatgctctgttttccta

SEQ ID NO: 19291 - DNA, 20 bp, synthetic construct
  misc_feature 1..20: note = chemically synthesized
  source 1..20: mol_type = other DNA
ttttcctatggatatatacc

SEQ ID NO: 19292 - DNA, 20 bp, synthetic construct
  misc_feature 1..20: note = chemically synthesized
  source 1..20: mol_type = other DNA
tcctatggatatatacccag

SEQ ID NO: 19293 - DNA, 20 bp, synthetic construct
  misc_feature 1..20: note = chemically synthesized
  source 1..20: mol_type = other DNA
tatggatatatacccagtag

SEQ ID NO: 19294 - DNA, 20 bp, synthetic construct
  misc_feature 1..20: note = chemically synthesized
  source 1..20: mol_type = other DNA
atggatatatacccagtagc

SEQ ID NO: 19295 - DNA, 20 bp, synthetic construct
  misc_feature 1..20: note = chemically synthesized
  source 1..20: mol_type = other DNA
gggattgctgtgtcaaattg

SEQ ID NO: 19296 - DNA, 20 bp, synthetic construct
  misc_feature 1..20: note = chemically synthesized
  source 1..20: mol_type = other DNA
tcaaattgtagctctgctta

SEQ ID NO: 19297 - DNA, 20 bp, synthetic construct
  misc_feature 1..20: note = chemically synthesized
  source 1..20: mol_type = other DNA
gctctgcttaaagttctttg

SEQ ID NO: 19298 - DNA, 20 bp, synthetic construct
  misc_feature 1..20: note = chemically synthesized
  source 1..20: mol_type = other DNA
actctccaaactgttttctg

SEQ ID NO: 19299 - DNA, 20 bp, synthetic construct
  misc_feature 1..20: note = chemically synthesized
  source 1..20: mol_type = other DNA
ctccaaactgttttctgcag

SEQ ID NO: 19300 - DNA, 20 bp, synthetic construct
  misc_feature 1..20: note = chemically synthesized
  source 1..20: mol_type = other DNA
catccccatcatcattgtat

SEQ ID NO: 19301 - DNA, 20 bp, synthetic construct
  misc_feature 1..20: note = chemically synthesized
  source 1..20: mol_type = other DNA
taagtgttcccttttctcca

SEQ ID NO: 19302 - DNA, 20 bp, synthetic construct
  misc_feature 1..20: note = chemically synthesized
  source 1..20: mol_type = other DNA
ccttttctccatagcctcat

SEQ ID NO: 19303 - DNA, 20 bp, synthetic construct
  misc_feature 1..20: note = chemically synthesized
  source 1..20: mol_type = other DNA
cctcatgagaatctgttttt

SEQ ID NO: 19304 - DNA, 20 bp, synthetic construct
  misc_feature 1..20: note = chemically synthesized
  source 1..20: mol_type = other DNA
gttttttggctttttaaaaa

SEQ ID NO: 19305 - DNA, 20 bp, synthetic construct
  misc_feature 1..20: note = chemically synthesized
  source 1..20: mol_type = other DNA
ttaaaaatagctattctgac

SEQ ID NO: 19306 - DNA, 20 bp, synthetic construct
  misc_feature 1..20: note = chemically synthesized
  source 1..20: mol_type = other DNA
atagctattctgactggtat

SEQ ID NO: 19307 - DNA, 20 bp, synthetic construct
  misc_feature 1..20: note = chemically synthesized
  source 1..20: mol_type = other DNA
ctattctgactggtatgaga

SEQ ID NO: 19308 - DNA, 20 bp, synthetic construct
  misc_feature 1..20: note = chemically synthesized
  source 1..20: mol_type = other DNA
gtatgagatagtatctcttg

SEQ ID NO: 19309 - DNA, 20 bp, synthetic construct
  misc_feature 1..20: note = chemically synthesized
  source 1..20: mol_type = other DNA
ttgatttgcatttctctcat

SEQ ID NO: 19310 - DNA, 20 bp, synthetic construct
  misc_feature 1..20: note = chemically synthesized
  source 1..20: mol_type = other DNA
tcatttttgtatatatttgt

SEQ ID NO: 19311 - DNA, 20 bp, synthetic construct
  misc_feature 1..20: note = chemically synthesized
  source 1..20: mol_type = other DNA
ctgcctgtatgtcttctctt

SEQ ID NO: 19312 - DNA, 20 bp, synthetic construct
  misc_feature 1..20: note = chemically synthesized
  source 1..20: mol_type = other DNA
cctgtatgtcttctcttgag

SEQ ID NO: 19313 - DNA, 20 bp, synthetic construct
  misc_feature 1..20: note = chemically synthesized
  source 1..20: mol_type = other DNA
tgtatgtcttctcttgagaa

SEQ ID NO: 19314 - DNA, 20 bp, synthetic construct
  misc_feature 1..20: note = chemically synthesized
  source 1..20: mol_type = other DNA
tcttgagaagagtctgttcg

SEQ ID NO: 19315 - DNA, 20 bp, synthetic construct
  misc_feature 1..20: note = chemically synthesized
  source 1..20: mol_type = other DNA
ggattttgcccatttttaaa

SEQ ID NO: 19316 - DNA, 20 bp, synthetic construct
  misc_feature 1..20: note = chemically synthesized
  source 1..20: mol_type = other DNA
tgatatgttcgaattcctta

SEQ ID NO: 19317 - DNA, 20 bp, synthetic construct
  misc_feature 1..20: note = chemically synthesized
  source 1..20: mol_type = other DNA
tccttatagattctgaatat

SEQ ID NO: 19318 - DNA, 20 bp, synthetic construct
  misc_feature 1..20: note = chemically synthesized
  source 1..20: mol_type = other DNA
tctgaatattagaccttttc

SEQ ID NO: 19319 - DNA, 20 bp, synthetic construct
  misc_feature 1..20: note = chemically synthesized
  source 1..20: mol_type = other DNA
ttagaccttttccagatgca

SEQ ID NO: 19320 - DNA, 20 bp, synthetic construct
  misc_feature 1..20: note = chemically synthesized
  source 1..20: mol_type = other DNA
ccagatgcacagtttgtgaa

SEQ ID NO: 19321 - DNA, 20 bp, synthetic construct
  misc_feature 1..20: note = chemically synthesized
  source 1..20: mol_type = other DNA
gaatagtttctcctatcctg

SEQ ID NO: 19322 - DNA, 20 bp, synthetic construct
  misc_feature 1..20: note = chemically synthesized
  source 1..20: mol_type = other DNA
tctcctatcctgtagattgt

SEQ ID NO: 19323 - DNA, 20 bp, synthetic construct
  misc_feature 1..20: note = chemically synthesized
  source 1..20: mol_type = other DNA
ttgtcagtttactctgttga

SEQ ID NO: 19324 - DNA, 20 bp, synthetic construct
  misc_feature 1..20: note = chemically synthesized
  source 1..20: mol_type = other DNA
tgatagtttcttctgctgca

SEQ ID NO: 19325 - DNA, 20 bp, synthetic construct
  misc_feature 1..20: note = chemically synthesized
  source 1..20: mol_type = other DNA
tagtttcttctgctgcacag

SEQ ID NO: 19326 - DNA, 20 bp, synthetic construct
  misc_feature 1..20: note = chemically synthesized
  source 1..20: mol_type = other DNA
tattattattattatacttt

SEQ ID NO: 19327 - DNA, 20 bp, synthetic construct
  misc_feature 1..20: note = chemically synthesized
  source 1..20: mol_type = other DNA
tattattatactttaagttc

SEQ ID NO: 19328 - DNA, 20 bp, synthetic construct
  misc_feature 1..20: note = chemically synthesized
  source 1..20: mol_type = other DNA
attattatactttaagttct

SEQ ID NO: 19329 - DNA, 20 bp, synthetic construct
  misc_feature 1..20: note = chemically synthesized
  source 1..20: mol_type = other DNA
ttattatactttaagttcta

SEQ ID NO: 19330 - DNA, 20 bp, synthetic construct
  misc_feature 1..20: note = chemically synthesized
  source 1..20: mol_type = other DNA
gggtacatgtgcgcaacgtg

SEQ ID NO: 19331 - DNA, 20 bp, synthetic construct
  misc_feature 1..20: note = chemically synthesized
  source 1..20: mol_type = other DNA
ggtacatgtgcgcaacgtgc

SEQ ID NO: 19332 - DNA, 20 bp, synthetic construct
  misc_feature 1..20: note = chemically synthesized
  source 1..20: mol_type = other DNA
tatgtatacatgtgccatgt

SEQ ID NO: 19333 - DNA, 20 bp, synthetic construct
  misc_feature 1..20: note = chemically synthesized
  source 1..20: mol_type = other DNA
cattaactcatcatttacat

SEQ ID NO: 19334 - DNA, 20 bp, synthetic construct
  misc_feature 1..20: note = chemically synthesized
  source 1..20: mol_type = other DNA
attaactcatcatttacatt

SEQ ID NO: 19335 - DNA, 20 bp, synthetic construct
  misc_feature 1..20: note = chemically synthesized
  source 1..20: mol_type = other DNA
cccccacccccaccccacaa

SEQ ID NO: 19336 - DNA, 20 bp, synthetic construct
  misc_feature 1..20: note = chemically synthesized
  source 1..20: mol_type = other DNA
ccccacccccaccccacaac

SEQ ID NO: 19337 - DNA, 20 bp, synthetic construct
  misc_feature 1..20: note = chemically synthesized
  source 1..20: mol_type = other DNA
ccccaccccacaacaggccc

SEQ ID NO: 19338 - DNA, 20 bp, synthetic construct
  misc_feature 1..20: note = chemically synthesized
  source 1..20: mol_type = other DNA
atgttccccttcctctgtcc

SEQ ID NO: 19339 - DNA, 20 bp, synthetic construct
  misc_feature 1..20: note = chemically synthesized
  source 1..20: mol_type = other DNA
attgttcaattcccacctat

SEQ ID NO: 19340 - DNA, 20 bp, synthetic construct
  misc_feature 1..20: note = chemically synthesized
  source 1..20: mol_type = other DNA
ttcaattcccacctataagt

SEQ ID NO: 19341 - DNA, 20 bp, synthetic construct
  misc_feature 1..20: note = chemically synthesized
  source 1..20: mol_type = other DNA
cacctataagtgagaacatg

SEQ ID NO: 19342 - DNA, 20 bp, synthetic construct
  misc_feature 1..20: note = chemically synthesized
  source 1..20: mol_type = other DNA
aagtgagaacatgtggtatt

SEQ ID NO: 19343 - DNA, 20 bp, synthetic construct
  misc_feature 1..20: note = chemically synthesized
  source 1..20: mol_type = other DNA
ttggttttttgtccttgtga

SEQ ID NO: 19344 - DNA, 20 bp, synthetic construct
  misc_feature 1..20: note = chemically synthesized
  source 1..20: mol_type = other DNA
tgtccttgtgatagtttgct

SEQ ID NO: 19345 - DNA, 20 bp, synthetic construct
  misc_feature 1..20: note = chemically synthesized
  source 1..20: mol_type = other DNA
tgatagtttgctgagaatga

SEQ ID NO: 19346 - DNA, 20 bp, synthetic construct
  misc_feature 1..20: note = chemically synthesized
  source 1..20: mol_type = other DNA
ttgctgagaatgatggtttc

SEQ ID NO: 19347 - DNA, 20 bp, synthetic construct
  misc_feature 1..20: note = chemically synthesized
  source 1..20: mol_type = other DNA
gcttcatccatgtccctaca

SEQ ID NO: 19348 - DNA, 20 bp, synthetic construct
  misc_feature 1..20: note = chemically synthesized
  source 1..20: mol_type = other DNA
cttcatccatgtccctacaa

SEQ ID NO: 19349 - DNA, 20 bp, synthetic construct
  misc_feature 1..20: note = chemically synthesized
  source 1..20: mol_type = other DNA
catgaactcatcatttttta

SEQ ID NO: 19350 - DNA, 20 bp, synthetic construct
  misc_feature 1..20: note = chemically synthesized
  source 1..20: mol_type = other DNA
catcattttttatggctgca

SEQ ID NO: 19351 - DNA, 20 bp, synthetic construct
  misc_feature 1..20: note = chemically synthesized
  source 1..20: mol_type = other DNA
tatggctgcatagtattcca

SEQ ID NO: 19352 - DNA, 20 bp, synthetic construct
  misc_feature 1..20: note = chemically synthesized
  source 1..20: mol_type = other DNA
ttaatccattctatcattgt

SEQ ID NO: 19353 - DNA, 20 bp, synthetic construct
  misc_feature 1..20: note = chemically synthesized
  source 1..20: mol_type = other DNA
ttctatcattgttggacatt

SEQ ID NO: 19354 - DNA, 20 bp, synthetic construct
  misc_feature 1..20: note = chemically synthesized
  source 1..20: mol_type = other DNA
tctatcattgttggacattt

SEQ ID NO: 19355 - DNA, 20 bp, synthetic construct
  misc_feature 1..20: note = chemically synthesized
  source 1..20: mol_type = other DNA
tcattgttggacatttgggt

SEQ ID NO: 19356 - DNA, 20 bp, synthetic construct
  misc_feature 1..20: note = chemically synthesized
  source 1..20: mol_type = other DNA
tggacatttgggttggttcc

SEQ ID NO: 19357 - DNA, 20 bp, synthetic construct
  misc_feature 1..20: note = chemically synthesized
  source 1..20: mol_type = other DNA
caagtctttgttattgtgaa

SEQ ID NO: 19358 - DNA, 20 bp, synthetic construct
  misc_feature 1..20: note = chemically synthesized
  source 1..20: mol_type = other DNA
ctttgttattgtgaatagtg

SEQ ID NO: 19359 - DNA, 20 bp, synthetic construct
  misc_feature 1..20: note = chemically synthesized
  source 1..20: mol_type = other DNA
ttgtgaatagtgaagctctt

SEQ ID NO: 19360 - DNA, 20 bp, synthetic construct
  misc_feature 1..20: note = chemically synthesized
  source 1..20: mol_type = other DNA
gtgaagctctttagtttaat

SEQ ID NO: 19361 - DNA, 20 bp, synthetic construct
  misc_feature 1..20: note = chemically synthesized
  source 1..20: mol_type = other DNA
tgaagctctttagtttaatt

SEQ ID NO: 19362 - DNA, 20 bp, synthetic construct
  misc_feature 1..20: note = chemically synthesized
  source 1..20: mol_type = other DNA
ctttgcattgcaattgcttt

SEQ ID NO: 19363 - DNA, 20 bp, synthetic construct
  misc_feature 1..20: note = chemically synthesized
  source 1..20: mol_type = other DNA
tttgcattgcaattgctttt

SEQ ID NO: 19364 - DNA, 20 bp, synthetic construct
  misc_feature 1..20: note = chemically synthesized
  source 1..20: mol_type = other DNA
ttgcattgcaattgcttttg

SEQ ID NO: 19365 - DNA, 20 bp, synthetic construct
  misc_feature 1..20: note = chemically synthesized
  source 1..20: mol_type = other DNA
tgcattgcaattgcttttgg

SEQ ID NO: 19366 - DNA, 20 bp, synthetic construct
  misc_feature 1..20: note = chemically synthesized
  source 1..20: mol_type = other DNA
tgcaattgcttttgggggct

SEQ ID NO: 19367 - DNA, 20 bp, synthetic construct
  misc_feature 1..20: note = chemically synthesized
  source 1..20: mol_type = other DNA
cttagccaaaaatgcactgc

SEQ ID NO: 19368 - DNA, 20 bp, synthetic construct
  misc_feature 1..20: note = chemically synthesized
  source 1..20: mol_type = other DNA
ccaaaaatgcactgccagtg

SEQ ID NO: 19369 - DNA, 20 bp, synthetic construct
  misc_feature 1..20: note = chemically synthesized
  source 1..20: mol_type = other DNA
caaaaatgcactgccagtgc

SEQ ID NO: 19370 - DNA, 20 bp, synthetic construct
  misc_feature 1..20: note = chemically synthesized
  source 1..20: mol_type = other DNA
aatgcactgccagtgcaggt

SEQ ID NO: 19371 - DNA, 20 bp, synthetic construct
  misc_feature 1..20: note = chemically synthesized
  source 1..20: mol_type = other DNA
tgccagtgcaggtaagattt

SEQ ID NO: 19372 - DNA, 20 bp, synthetic construct
  misc_feature 1..20: note = chemically synthesized
  source 1..20: mol_type = other DNA
agatttgagatcttacattt

SEQ ID NO: 19373 - DNA, 20 bp, synthetic construct
  misc_feature 1..20: note = chemically synthesized
  source 1..20: mol_type = other DNA
ttaagttttgaattcatttt

SEQ ID NO: 19374 - DNA, 20 bp, synthetic construct
  misc_feature 1..20: note = chemically synthesized
  source 1..20: mol_type = other DNA
tttcagttgatttctctaaa

SEQ ID NO: 19375 - DNA, 20 bp, synthetic construct
  misc_feature 1..20: note = chemically synthesized
  source 1..20: mol_type = other DNA
ttgatttctctaaatggtgt

SEQ ID NO: 19376 - DNA, 20 bp, synthetic construct
  misc_feature 1..20: note = chemically synthesized
  source 1..20: mol_type = other DNA
tgatttctctaaatggtgta

SEQ ID NO: 19377 - DNA, 20 bp, synthetic construct
  misc_feature 1..20: note = chemically synthesized
  source 1..20: mol_type = other DNA
ttctctaaatggtgtaaggt

SEQ ID NO: 19378 - DNA, 20 bp, synthetic construct
  misc_feature 1..20: note = chemically synthesized
  source 1..20: mol_type = other DNA
tctctaaatggtgtaaggta

SEQ ID NO: 19379 - DNA, 20 bp, synthetic construct
  misc_feature 1..20: note = chemically synthesized
  source 1..20: mol_type = other DNA
ctctaaatggtgtaaggtaa

SEQ ID NO: 19380 - DNA, 20 bp, synthetic construct
  misc_feature 1..20: note = chemically synthesized
  source 1..20: mol_type = other DNA
aatggtgtaaggtaagggtc

SEQ ID NO: 19381 - DNA, 20 bp, synthetic construct
  misc_feature 1..20: note = chemically synthesized
  source 1..20: mol_type = other DNA
tagtttcattcttctgcata

SEQ ID NO: 19382 - DNA, 20 bp, synthetic construct
  misc_feature 1..20: note = chemically synthesized
  source 1..20: mol_type = other DNA
ttcattcttctgcatatggc

SEQ ID NO: 19383 - DNA, 20 bp, synthetic construct
  misc_feature 1..20: note = chemically synthesized
  source 1..20: mol_type = other DNA
atatggctagccacgtattc

SEQ ID NO: 19384 - DNA, 20 bp, synthetic construct
  misc_feature 1..20: note = chemically synthesized
  source 1..20: mol_type = other DNA
gctagccacgtattccagca

SEQ ID NO: 19385 - DNA, 20 bp, synthetic construct
  misc_feature 1..20: note = chemically synthesized
  source 1..20: mol_type = other DNA
cgtattccagcacagtttat

SEQ ID NO: 19386 - DNA, 20 bp, synthetic construct
  misc_feature 1..20: note = chemically synthesized
  source 1..20: mol_type = other DNA
ttccagcacagtttattgga

SEQ ID NO: 19387 - DNA, 20 bp, synthetic construct
  misc_feature 1..20: note = chemically synthesized
  source 1..20: mol_type = other DNA
tccagcacagtttattggat

SEQ ID NO: 19388 - DNA, 20 bp, synthetic construct
  misc_feature 1..20: note = chemically synthesized
  source 1..20: mol_type = other DNA
agcacagtttattggatagg

SEQ ID NO: 19389 - DNA, 20 bp, synthetic construct
  misc_feature 1..20: note = chemically synthesized
  source 1..20: mol_type = other DNA
ttcccgctgcttgtttttgt

SEQ ID NO: 19390 - DNA, 20 bp, synthetic construct
  misc_feature 1..20: note = chemically synthesized
  source 1..20: mol_type = other DNA
tgtttttgtcagtgttgttg

SEQ ID NO: 19391 - DNA, 20 bp, synthetic construct
  misc_feature 1..20: note = chemically synthesized
  source 1..20: mol_type = other DNA
ttgtcagtgttgttgaagat

SEQ ID NO: 19392 - DNA, 20 bp, synthetic construct
  misc_feature 1..20: note = chemically synthesized
  source 1..20: mol_type = other DNA
cagtgttgttgaagatcaga

SEQ ID NO: 19393 - DNA, 20 bp, synthetic construct
  misc_feature 1..20: note = chemically synthesized
  source 1..20: mol_type = other DNA
atcagatggttgtaactatg

SEQ ID NO: 19394 - DNA, 20 bp, synthetic construct
  misc_feature 1..20: note = chemically synthesized
  source 1..20: mol_type = other DNA
aactatgtagctttattttt

SEQ ID NO: 19395 - DNA, 20 bp, synthetic construct
  misc_feature 1..20: note = chemically synthesized
  source 1..20: mol_type = other DNA
agttttctattgtgtttcct

SEQ ID NO: 19396 - DNA, 20 bp, synthetic construct
  misc_feature 1..20: note = chemically synthesized
  source 1..20: mol_type = other DNA
tgtaacaatatcatgctgtt

SEQ ID NO: 19397 - DNA, 20 bp, synthetic construct
  misc_feature 1..20: note = chemically synthesized
  source 1..20: mol_type = other DNA
gtaacaatatcatgctgttt

SEQ ID NO: 19398 - DNA, 20 bp, synthetic construct
  misc_feature 1..20: note = chemically synthesized
  source 1..20: mol_type = other DNA
taacaatatcatgctgtttg

SEQ ID NO: 19399 - DNA, 20 bp, synthetic construct
  misc_feature 1..20: note = chemically synthesized
  source 1..20: mol_type = other DNA
tcatgctgtttggggtactg

SEQ ID NO: 19400 - DNA, 20 bp, synthetic construct
  misc_feature 1..20: note = chemically synthesized
  source 1..20: mol_type = other DNA
ggtactgtggccttataatg

SEQ ID NO: 19401 - DNA, 20 bp, synthetic construct
  misc_feature 1..20: note = chemically synthesized
  source 1..20: mol_type = other DNA
tctttctttttttatttttt

SEQ ID NO: 19402 - DNA, 20 bp, synthetic construct
  misc_feature 1..20: note = chemically synthesized
  source 1..20: mol_type = other DNA
tttctttttttattttttca

SEQ ID NO: 19403 - DNA, 20 bp, synthetic construct
  misc_feature 1..20: note = chemically synthesized
  source 1..20: mol_type = other DNA
cagagtttcactctgtcacc

SEQ ID NO: 19404 - DNA, 20 bp, synthetic construct
  misc_feature 1..20: note = chemically synthesized
  source 1..20: mol_type = other DNA
agagtttcactctgtcaccc

SEQ ID NO: 19405 - DNA, 20 bp, synthetic construct
  misc_feature 1..20: note = chemically synthesized
  source 1..20: mol_type = other DNA
tttcactctgtcacccaggc

SEQ ID NO: 19406 - DNA, 20 bp, synthetic construct
  misc_feature 1..20: note = chemically synthesized
  source 1..20: mol_type = other DNA
tcactctgtcacccaggctg

SEQ ID NO: 19407 - DNA, 20 bp, synthetic construct
  misc_feature 1..20: note = chemically synthesized
  source 1..20: mol_type = other DNA
ctgtcacccaggctggagtg

SEQ ID NO: 19408 - DNA, 20 bp, synthetic construct
  misc_feature 1..20: note = chemically synthesized
  source 1..20: mol_type = other DNA
tcacccaggctggagtgcag

SEQ ID NO: 19409 - DNA, 20 bp, synthetic construct
  misc_feature 1..20: note = chemically synthesized
  source 1..20: mol_type = other DNA
ggagtgcagtggtgcgatct

SEQ ID NO: 19410 - DNA, 20 bp, synthetic construct
  misc_feature 1..20: note = chemically synthesized
  source 1..20: mol_type = other DNA
ctcactgcaccgtctgcctc

SEQ ID NO: 19411 - DNA, 20 bp, synthetic construct
  misc_feature 1..20: note = chemically synthesized
  source 1..20: mol_type = other DNA
cactgcaccgtctgcctcca

SEQ ID NO: 19412 - DNA, 20 bp, synthetic construct
  misc_feature 1..20: note = chemically synthesized
  source 1..20: mol_type = other DNA
accgtctgcctccagagttc

SEQ ID NO: 19413 - DNA, 20 bp, synthetic construct
  misc_feature 1..20: note = chemically synthesized
  source 1..20: mol_type = other DNA
ttcaagcaattctcctgcct

SEQ ID NO: 19414 - DNA, 20 bp, synthetic construct
  misc_feature 1..20: note = chemically synthesized
  source 1..20: mol_type = other DNA
ttctcctgcctcagccttcc

SEQ ID NO: 19415 - DNA, 20 bp, synthetic construct
  misc_feature 1..20: note = chemically synthesized
  source 1..20: mol_type = other DNA
tcctgcctcagccttccgag

SEQ ID NO: 19416 - DNA, 20 bp, synthetic construct
  misc_feature 1..20: note = chemically synthesized
  source 1..20: mol_type = other DNA
gcctcagccttccgagtagc

SEQ ID NO: 19417 - DNA, 20 bp, synthetic construct
  misc_feature 1..20: note = chemically synthesized
  source 1..20: mol_type = other DNA
cctcagccttccgagtagct

SEQ ID NO: 19418 - DNA, 20 bp, synthetic construct
  misc_feature 1..20: note = chemically synthesized
  source 1..20: mol_type = other DNA
cttccgagtagctgggatta

SEQ ID NO: 19419 - DNA, 20 bp, synthetic construct
  misc_feature 1..20: note = chemically synthesized
  source 1..20: mol_type = other DNA
gattacagcccccaccacca

SEQ ID NO: 19420 - DNA, 20 bp, synthetic construct
  misc_feature 1..20: note = chemically synthesized
  source 1..20: mol_type = other DNA
acagcccccaccaccacagc

SEQ ID NO: 19421 - DNA, 20 bp, synthetic construct
  misc_feature 1..20: note = chemically synthesized
  source 1..20: mol_type = other DNA
gccggctaattttgtatttt

SEQ ID NO: 19422 - DNA, 20 bp, synthetic construct
  misc_feature 1..20: note = chemically synthesized
  source 1..20: mol_type = other DNA
ggctaattttgtatttttag

SEQ ID NO: 19423 - DNA, 20 bp, synthetic construct
  misc_feature 1..20: note = chemically synthesized
  source 1..20: mol_type = other DNA
ctaattttgtatttttagta

SEQ ID NO: 19424 - DNA, 20 bp, synthetic construct
  misc_feature 1..20: note = chemically synthesized
  source 1..20: mol_type = other DNA
ttttgtatttttagtagaga

SEQ ID NO: 19425 - DNA, 20 bp, synthetic construct
  misc_feature 1..20: note = chemically synthesized
  source 1..20: mol_type = other DNA
cagtgtttcaccatgttgac

SEQ ID NO: 19426 - DNA, 20 bp, synthetic construct
  misc_feature 1..20: note = chemically synthesized
  source 1..20: mol_type = other DNA
agtgtttcaccatgttgacc

SEQ ID NO: 19427 - DNA, 20 bp, synthetic construct
  misc_feature 1..20: note = chemically synthesized
  source 1..20: mol_type = other DNA
tttcaccatgttgaccaggc

SEQ ID NO: 19428 - DNA, 20 bp, synthetic construct
  misc_feature 1..20: note = chemically synthesized
  source 1..20: mol_type = other DNA
tggtcttgaactcctgacct

SEQ ID NO: 19429 - DNA, 20 bp, synthetic construct
  misc_feature 1..20: note = chemically synthesized
  source 1..20: mol_type = other DNA
ggtcttgaactcctgacctc

SEQ ID NO: 19430 - DNA, 20 bp, synthetic construct
  misc_feature 1..20: note = chemically synthesized
  source 1..20: mol_type = other DNA
ctcaggtgatacacccacct

SEQ ID NO: 19431 - DNA, 20 bp, synthetic construct
  misc_feature 1..20: note = chemically synthesized
  source 1..20: mol_type = other DNA
acacccacctcagcccccta

SEQ ID NO: 19432 - DNA, 20 bp, synthetic construct
  misc_feature 1..20: note = chemically synthesized
  source 1..20: mol_type = other DNA
acctcagccccctaaagtgc

SEQ ID NO: 19433 - DNA, 20 bp, synthetic construct
  misc_feature 1..20: note = chemically synthesized
  source 1..20: mol_type = other DNA
ctcagccccctaaagtgcta

SEQ ID NO: 19434 - DNA, 20 bp, synthetic construct
  misc_feature 1..20: note = chemically synthesized
  source 1..20: mol_type = other DNA
cccctaaagtgctagagtta

SEQ ID NO: 19435 - DNA, 20 bp, synthetic construct
  misc_feature 1..20: note = chemically synthesized
  source 1..20: mol_type = other DNA
ccctaaagtgctagagttac

SEQ ID NO: 19436 - DNA, 20 bp, synthetic construct
  misc_feature 1..20: note = chemically synthesized
  source 1..20: mol_type = other DNA
agtgctagagttacaggcgt

SEQ ID NO: 19437 - DNA, 20 bp, synthetic construct
  misc_feature 1..20: note = chemically synthesized
  source 1..20: mol_type = other DNA
caggcgtgagccaccgtgcc

SEQ ID NO: 19438 - DNA, 20 bp, synthetic construct
  misc_feature 1..20: note = chemically synthesized
  source 1..20: mol_type = other DNA
gagccaccgtgcctggcctg

SEQ ID NO: 19439 - DNA, 20 bp, synthetic construct
  misc_feature 1..20: note = chemically synthesized
  source 1..20: mol_type = other DNA
cgtgcctggcctgtagtttc

SEQ ID NO: 19440 - DNA, 20 bp, synthetic construct
  misc_feature 1..20: note = chemically synthesized
  source 1..20: mol_type = other DNA
cctggcctgtagtttcaagt

SEQ ID NO: 19441 - DNA, 20 bp, synthetic construct
  misc_feature 1..20: note = chemically synthesized
  source 1..20: mol_type = other DNA
ctggcctgtagtttcaagtc

SEQ ID NO: 19442 - DNA, 20 bp, synthetic construct
  misc_feature 1..20: note = chemically synthesized
  source 1..20: mol_type = other DNA
gcctgtagtttcaagtcagg

SEQ ID NO: 19443 - DNA, 20 bp, synthetic construct
  misc_feature 1..20: note = chemically synthesized
  source 1..20: mol_type = other DNA
tagtttcaagtcaggtggtg

SEQ ID NO: 19444 - DNA, 20 bp, synthetic construct
  misc_feature 1..20: note = chemically synthesized
  source 1..20: mol_type = other DNA
caattttgttctttctgctt

SEQ ID NO: 19445 - DNA, 20 bp, synthetic construct
  misc_feature 1..20: note = chemically synthesized
  source 1..20: mol_type = other DNA
ttaagattgctttgcctgtt

SEQ ID NO: 19446 - DNA, 20 bp, synthetic construct
  misc_feature 1..20: note = chemically synthesized
  source 1..20: mol_type = other DNA
taagattgctttgcctgttc

SEQ ID NO: 19447 - DNA, 20 bp, synthetic construct
  misc_feature 1..20: note = chemically synthesized
  source 1..20: mol_type = other DNA
ttgcctgttcaggctctttt

SEQ ID NO: 19448 - DNA, 20 bp, synthetic construct
  misc_feature 1..20: note = chemically synthesized
  source 1..20: mol_type = other DNA
gttccatatgaattttaaac

SEQ ID NO: 19449 - DNA, 20 bp, synthetic construct
  misc_feature 1..20: note = chemically synthesized
  source 1..20: mol_type = other DNA
ctagtttttctaatactgtg

SEQ ID NO: 19450 - DNA, 20 bp, synthetic construct
  misc_feature 1..20: note = chemically synthesized
  source 1..20: mol_type = other DNA
aatactgtgaagaatgacat

SEQ ID NO: 19451 - DNA, 20 bp, synthetic construct
  misc_feature 1..20: note = chemically synthesized
  source 1..20: mol_type = other DNA
tgaagaatgacattggtaat

SEQ ID NO: 19452 - DNA, 20 bp, synthetic construct
  misc_feature 1..20: note = chemically synthesized
  source 1..20: mol_type = other DNA
gaatgacattggtaattgga

SEQ ID NO: 19453 - DNA, 20 bp, synthetic construct
  misc_feature 1..20: note = chemically synthesized
  source 1..20: mol_type = other DNA
atgaatgtctaaattgcttt

SEQ ID NO: 19454 - DNA, 20 bp, synthetic construct
  misc_feature 1..20: note = chemically synthesized
  source 1..20: mol_type = other DNA
aatgtctaaattgctttgag

SEQ ID NO: 19455 - DNA, 20 bp, synthetic construct
  misc_feature 1..20: note = chemically synthesized
  source 1..20: mol_type = other DNA
ctaaattgctttgagcagta

SEQ ID NO: 19456 - DNA, 20 bp, synthetic construct
  misc_feature 1..20: note = chemically synthesized
  source 1..20: mol_type = other DNA
tattgattcttccaatccat

SEQ ID NO: 19457 - DNA, 20 bp, synthetic construct
  misc_feature 1..20: note = chemically synthesized
  source 1..20: mol_type = other DNA
attcttccaatccatgagcc

SEQ ID NO: 19458 - DNA, 20 bp, synthetic construct
  misc_feature 1..20: note = chemically synthesized
  source 1..20: mol_type = other DNA
ttccaatccatgagcctgga

SEQ ID NO: 19459 - DNA, 20 bp, synthetic construct
  misc_feature 1..20: note = chemically synthesized
  source 1..20: mol_type = other DNA
gtgttgtttctgatttcttt

SEQ ID NO: 19460 - DNA, 20 bp, synthetic construct
  misc_feature 1..20: note = chemically synthesized
  source 1..20: mol_type = other DNA
ttgtttctgatttctttcag

SEQ ID NO: 19461 - DNA, 20 bp, synthetic construct
  misc_feature 1..20: note = chemically synthesized
  source 1..20: mol_type = other DNA
tttctttcagcagtgttttg

SEQ ID NO: 19462 - DNA, 20 bp, synthetic construct
  misc_feature 1..20: note = chemically synthesized
  source 1..20: mol_type = other DNA
gtgttttgtagttctccttg

SEQ ID NO: 19463 - DNA, 20 bp, synthetic construct
  misc_feature 1..20: note = chemically synthesized
  source 1..20: mol_type = other DNA
gttttgtagttctccttgta

SEQ ID NO: 19464 - DNA, 20 bp, synthetic construct
  misc_feature 1..20: note = chemically synthesized
  source 1..20: mol_type = other DNA
aaaccatatgatcatctcaa

SEQ ID NO: 19465 - DNA, 20 bp, synthetic construct
  misc_feature 1..20: note = chemically synthesized
  source 1..20: mol_type = other DNA
tatgatcatctcaatagact

SEQ ID NO: 19466 - DNA, 20 bp, synthetic construct
  misc_feature 1..20: note = chemically synthesized
  source 1..20: mol_type = other DNA
ttcatgataaaaacctccaa

SEQ ID NO: 19467 - DNA, 20 bp, synthetic construct
  misc_feature 1..20: note = chemically synthesized
  source 1..20: mol_type = other DNA
gataaaaacctccaacagac

SEQ ID NO: 19468 - DNA, 20 bp, synthetic construct
  misc_feature 1..20: note = chemically synthesized
  source 1..20: mol_type = other DNA
ataaaaacctccaacagact

SEQ ID NO: 19469 - DNA, 20 bp, synthetic construct
  misc_feature 1..20: note = chemically synthesized
  source 1..20: mol_type = other DNA
ctccaacagactaggcatca

SEQ ID NO: 19470 - DNA, 20 bp, synthetic construct
  misc_feature 1..20: note = chemically synthesized
  source 1..20: mol_type = other DNA
tccaacagactaggcatcaa

SEQ ID NO: 19471 - DNA, 20 bp, synthetic construct
  misc_feature 1..20: note = chemically synthesized
  source 1..20: mol_type = other DNA
atcaaaggaacatacctcaa

SEQ ID NO: 19472 - DNA, 20 bp, synthetic construct
  misc_feature 1..20: note = chemically synthesized
  source 1..20: mol_type = other DNA
aacatacctcaaaagaataa

SEQ ID NO: 19473 - DNA, 20 bp, synthetic construct
  misc_feature 1..20: note = chemically synthesized
  source 1..20: mol_type = other DNA
ataaccaaaaccatactgaa

SEQ ID NO: 19474 - DNA, 20 bp, synthetic construct
  misc_feature 1..20: note = chemically synthesized
  source 1..20: mol_type = other DNA
taaccaaaaccatactgaat

SEQ ID NO: 19475 - DNA, 20 bp, synthetic construct
  misc_feature 1..20: note = chemically synthesized
  source 1..20: mol_type = other DNA
aaaccatactgaatgggcaa

SEQ ID NO: 19476 - DNA, 20 bp, synthetic construct
  misc_feature 1..20: note = chemically synthesized
  source 1..20: mol_type = other DNA
catactgaatgggcaaaagc

SEQ ID NO: 19477 - DNA, 20 bp, synthetic construct
  misc_feature 1..20: note = chemically synthesized
  source 1..20: mol_type = other DNA
ttctcctcgaaaactgcaac

SEQ ID NO: 19478 - DNA, 20 bp, synthetic construct
  misc_feature 1..20: note = chemically synthesized
  source 1..20: mol_type = other DNA
ctcgaaaactgcaacaagac

SEQ ID NO: 19479 - DNA, 20 bp, synthetic construct
  misc_feature 1..20: note = chemically synthesized
  source 1..20: mol_type = other DNA
tcgaaaactgcaacaagaca

SEQ ID NO: 19480 - DNA, 20 bp, synthetic construct
  misc_feature 1..20: note = chemically synthesized
  source 1..20: mol_type = other DNA
attcccattctcaccactcc

SEQ ID NO: 19481 - DNA, 20 bp, synthetic construct
  misc_feature 1..20: note = chemically synthesized
  source 1..20: mol_type = other DNA
actcctagtgaacataaaat

SEQ ID NO: 19482 - DNA, 20 bp, synthetic construct
  misc_feature 1..20: note = chemically synthesized
  source 1..20: mol_type = other DNA
cctagtgaacataaaattgg

SEQ ID NO: 19483 - DNA, 20 bp, synthetic construct
  misc_feature 1..20: note = chemically synthesized
  source 1..20: mol_type = other DNA
ataaaattggaagtcctaac

SEQ ID NO: 19484 - DNA, 20 bp, synthetic construct
  misc_feature 1..20: note = chemically synthesized
  source 1..20: mol_type = other DNA
taaaattggaagtcctaacc

SEQ ID NO: 19485 - DNA, 20 bp, synthetic construct
  misc_feature 1..20: note = chemically synthesized
  source 1..20: mol_type = other DNA
aaaattggaagtcctaacca

SEQ ID NO: 19486 - DNA, 20 bp, synthetic construct
  misc_feature 1..20: note = chemically synthesized
  source 1..20: mol_type = other DNA
gaagtcctaaccagggcaat

SEQ ID NO: 19487 - DNA, 20 bp, synthetic construct
  misc_feature 1..20: note = chemically synthesized
  source 1..20: mol_type = other DNA
aagtcctaaccagggcaatc

SEQ ID NO: 19488 - DNA, 20 bp, synthetic construct
  misc_feature 1..20: note = chemically synthesized
  source 1..20: mol_type = other DNA
cctaaccagggcaatcaggc

SEQ ID NO: 19489 - DNA, 20 bp, synthetic construct
  misc_feature 1..20: note = chemically synthesized
  source 1..20: mol_type = other DNA
taaccagggcaatcaggcga

SEQ ID NO: 19490 - DNA, 20 bp, synthetic construct
  misc_feature 1..20: note = chemically synthesized
  source 1..20: mol_type = other DNA
cagggcaatcaggcgagaga

SEQ ID NO: 19491 - DNA, 20 bp, synthetic construct
  misc_feature 1..20: note = chemically synthesized
  source 1..20: mol_type = other DNA
gcaatcaggcgagagaaaga

SEQ ID NO: 19492 - DNA, 20 bp, synthetic construct
  misc_feature 1..20: note = chemically synthesized
  source 1..20: mol_type = other DNA
aggcgagagaaagaaagaaa

SEQ ID NO: 19493 - DNA, 20 bp, synthetic construct
  misc_feature 1..20: note = chemically synthesized
  source 1..20: mol_type = other DNA
agaaagaaatggcatcaaaa

SEQ ID NO: 19494 - DNA, 20 bp, synthetic construct
  misc_feature 1..20: note = chemically synthesized
  source 1..20: mol_type = other DNA
gaaagaaatggcatcaaaat

SEQ ID NO: 19495 - DNA, 20 bp, synthetic construct
  misc_feature 1..20: note = chemically synthesized
  source 1..20: mol_type = other DNA
tggcatcaaaataggacaat

SEQ ID NO: 19496 - DNA, 20 bp, synthetic construct
  misc_feature 1..20: note = chemically synthesized
  source 1..20: mol_type = other DNA
tgatgatatgactctatact

SEQ ID NO: 19497 - DNA, 20 bp, synthetic construct
  misc_feature 1..20: note = chemically synthesized
  source 1..20: mol_type = other DNA
tctatacttagaaaatccta

SEQ ID NO: 19498 - DNA, 20 bp, synthetic construct
  misc_feature 1..20: note = chemically synthesized
  source 1..20: mol_type = other DNA
aatcctacagattcttccaa

SEQ ID NO: 19499 - DNA, 20 bp, synthetic construct
  misc_feature 1..20: note = chemically synthesized
  source 1..20: mol_type = other DNA
atcctacagattcttccaaa

SEQ ID NO: 19500 - DNA, 20 bp, synthetic construct
  misc_feature 1..20: note = chemically synthesized
  source 1..20: mol_type = other DNA
agattcttccaaaaggctgc

SEQ ID NO: 19501 - DNA, 20 bp, synthetic construct
  misc_feature 1..20: note = chemically synthesized
  source 1..20: mol_type = other DNA
ctagaactgataaacaattt

SEQ ID NO: 19502 - DNA, 20 bp, synthetic construct
  misc_feature 1..20: note = chemically synthesized
  source 1..20: mol_type = other DNA
aactgataaacaattttagc

SEQ ID NO: 19503 - DNA, 20 bp, synthetic construct
  misc_feature 1..20: note = chemically synthesized
  source 1..20: mol_type = other DNA
actgataaacaattttagca

SEQ ID NO: 19504 - DNA, 20 bp, synthetic construct
  misc_feature 1..20: note = chemically synthesized
  source 1..20: mol_type = other DNA
aaacaattttagcaaggttt

SEQ ID NO: 19505 - DNA, 20 bp, synthetic construct
  misc_feature 1..20: note = chemically synthesized
  source 1..20: mol_type = other DNA
aacaattttagcaaggtttc

SEQ ID NO: 19506 - DNA, 20 bp, synthetic construct
  misc_feature 1..20: note = chemically synthesized
  source 1..20: mol_type = other DNA
acaaaatcacatacaaaaat

SEQ ID NO: 19507 - DNA, 20 bp, synthetic construct
  misc_feature 1..20: note = chemically synthesized
  source 1..20: mol_type = other DNA
aaatcacatacaaaaatcag

SEQ ID NO: 19508 - DNA, 20 bp, synthetic construct
  misc_feature 1..20: note = chemically synthesized
  source 1..20: mol_type = other DNA
tagcatttccatacaccaat

SEQ ID NO: 19509 - DNA, 20 bp, synthetic construct
  misc_feature 1..20: note = chemically synthesized
  source 1..20: mol_type = other DNA
agcatttccatacaccaata

SEQ ID NO: 19510 - DNA, 20 bp, synthetic construct
  misc_feature 1..20: note = chemically synthesized
  source 1..20: mol_type = other DNA
ttccatacaccaataaggcc

SEQ ID NO: 19511 - DNA, 20 bp, synthetic construct
  misc_feature 1..20: note = chemically synthesized
  source 1..20: mol_type = other DNA
tccatacaccaataaggccc

SEQ ID NO: 19512 - DNA, 20 bp, synthetic construct
  misc_feature 1..20: note = chemically synthesized
  source 1..20: mol_type = other DNA
acaccaataaggcccaggct

SEQ ID NO: 19513 - DNA, 20 bp, synthetic construct
  misc_feature 1..20: note = chemically synthesized
  source 1..20: mol_type = other DNA
accaataaggcccaggctga

SEQ ID NO: 19514 - DNA, 20 bp, synthetic construct
  misc_feature 1..20: note = chemically synthesized
  source 1..20: mol_type = other DNA
cccaggctgagagtcaaatc

SEQ ID NO: 19515 - DNA, 20 bp, synthetic construct
  misc_feature 1..20: note = chemically synthesized
  source 1..20: mol_type = other DNA
atcgagaacacaatcccatt

SEQ ID NO: 19516 - DNA, 20 bp, synthetic construct
  misc_feature 1..20: note = chemically synthesized
  source 1..20: mol_type = other DNA
gaacacaatcccattaagaa

SEQ ID NO: 19517 - DNA, 20 bp, synthetic construct
  misc_feature 1..20: note = chemically synthesized
  source 1..20: mol_type = other DNA
tcccattaagaacagccaca

SEQ ID NO: 19518 - DNA, 20 bp, synthetic construct
  misc_feature 1..20: note = chemically synthesized
  source 1..20: mol_type = other DNA
cacaaagaaaatgaaatacc

SEQ ID NO: 19519 - DNA, 20 bp, synthetic construct
  misc_feature 1..20: note = chemically synthesized
  source 1..20: mol_type = other DNA
acaaagaaaatgaaatacct

SEQ ID NO: 19520 - DNA, 20 bp, synthetic construct
  misc_feature 1..20: note = chemically synthesized
  source 1..20: mol_type = other DNA
tttattgaaatttaaaaccc

SEQ ID NO: 19521 - DNA, 20 bp, synthetic construct
  misc_feature 1..20: note = chemically synthesized
  source 1..20: mol_type = other DNA
attgaaatttaaaacccaag

SEQ ID NO: 19522 - DNA, 20 bp, synthetic construct
  misc_feature 1..20: note = chemically synthesized
  source 1..20: mol_type = other DNA
ttgaaatttaaaacccaagc

SEQ ID NO: 19523 - DNA, 20 bp, synthetic construct
  misc_feature 1..20: note = chemically synthesized
  source 1..20: mol_type = other DNA
tttaaaacccaagcaggcac

SEQ ID NO: 19524 - DNA, 20 bp, synthetic construct
  misc_feature 1..20: note = chemically synthesized
  source 1..20: mol_type = other DNA
aaacccaagcaggcactaga

SEQ ID NO: 19525 - DNA, 20 bp, synthetic construct
  misc_feature 1..20: note = chemically synthesized
  source 1..20: mol_type = other DNA
tatcattactacgtgaatat

SEQ ID NO: 19526 - DNA, 20 bp, synthetic construct
  misc_feature 1..20: note = chemically synthesized
  source 1..20: mol_type = other DNA
cgtgaatattagtgtgctat

SEQ ID NO: 19527 - DNA, 20 bp, synthetic construct
  misc_feature 1..20: note = chemically synthesized
  source 1..20: mol_type = other DNA
tgaatattagtgtgctatga

SEQ ID NO: 19528 - DNA, 20 bp, synthetic construct
  misc_feature 1..20: note = chemically synthesized
  source 1..20: mol_type = other DNA
agacacatcaaataaatttc

SEQ ID NO: 19529 - DNA, 20 bp, synthetic construct
  misc_feature 1..20: note = chemically synthesized
  source 1..20: mol_type = other DNA
gacacatcaaataaatttct

SEQ ID NO: 19530 - DNA, 20 bp, synthetic construct
  misc_feature 1..20: note = chemically synthesized
  source 1..20: mol_type = other DNA
atcaaataaatttctgggat

SEQ ID NO: 19531 - DNA, 20 bp, synthetic construct
  misc_feature 1..20: note = chemically synthesized
  source 1..20: mol_type = other DNA
tcaaataaatttctgggatc

SEQ ID NO: 19532 - DNA, 20 bp, synthetic construct
  misc_feature 1..20: note = chemically synthesized
  source 1..20: mol_type = other DNA
caaataaatttctgggatca

SEQ ID NO: 19533 - DNA, 20 bp, synthetic construct
  misc_feature 1..20: note = chemically synthesized
  source 1..20: mol_type = other DNA
tgggatcagggaacattttc

SEQ ID NO: 19534 - DNA, 20 bp, synthetic construct
  misc_feature 1..20: note = chemically synthesized
  source 1..20: mol_type = other DNA
gatcagggaacattttccag

SEQ ID NO: 19535 - DNA, 20 bp, synthetic construct
  misc_feature 1..20: note = chemically synthesized
  source 1..20: mol_type = other DNA
ttccagaagaaatgctactt

SEQ ID NO: 19536 - DNA, 20 bp, synthetic construct
  misc_feature 1..20: note = chemically synthesized
  source 1..20: mol_type = other DNA
gaagaaatgctacttaagct

SEQ ID NO: 19537 - DNA, 20 bp, synthetic construct
  misc_feature 1..20: note = chemically synthesized
  source 1..20: mol_type = other DNA
agaattaaatgctactatat

SEQ ID NO: 19538 - DNA, 20 bp, synthetic construct
  misc_feature 1..20: note = chemically synthesized
  source 1..20: mol_type = other DNA
attaaatgctactatattag

SEQ ID NO: 19539 - DNA, 20 bp, synthetic construct
  misc_feature 1..20: note = chemically synthesized
  source 1..20: mol_type = other DNA
atgctactatattagtagtg

SEQ ID NO: 19540 - DNA, 20 bp, synthetic construct
  misc_feature 1..20: note = chemically synthesized
  source 1..20: mol_type = other DNA
ctactatattagtagtgtag

SEQ ID NO: 19541 - DNA, 20 bp, synthetic construct
  misc_feature 1..20: note = chemically synthesized
  source 1..20: mol_type = other DNA
attagtagtgtagtagtatt

SEQ ID NO: 19542 - DNA, 20 bp, synthetic construct
  misc_feature 1..20: note = chemically synthesized
  source 1..20: mol_type = other DNA
agtagtgtagtagtatttgg

SEQ ID NO: 19543 - DNA, 20 bp, synthetic construct
  misc_feature 1..20: note = chemically synthesized
  source 1..20: mol_type = other DNA
gtagtgtagtagtatttggt

SEQ ID NO: 19544 - DNA, 20 bp, synthetic construct
  misc_feature 1..20: note = chemically synthesized
  source 1..20: mol_type = other DNA
tagtgtagtagtatttggtg

SEQ ID NO: 19545 - DNA, 20 bp, synthetic construct
  misc_feature 1..20: note = chemically synthesized
  source 1..20: mol_type = other DNA
tgtagtagtatttggtgggg

SEQ ID NO: 19546 - DNA, 20 bp, synthetic construct
  misc_feature 1..20: note = chemically synthesized
  source 1..20: mol_type = other DNA
ggtagtgcaatcattgcgta

SEQ ID NO: 19547 - DNA, 20 bp, synthetic construct
  misc_feature 1..20: note = chemically synthesized
  source 1..20: mol_type = other DNA
gtagtgcaatcattgcgtac

SEQ ID NO: 19548 - DNA, 20 bp, synthetic construct
  misc_feature 1..20: note = chemically synthesized
  source 1..20: mol_type = other DNA
aatcattgcgtacaggtgaa

SEQ ID NO: 19549 - DNA, 20 bp, synthetic construct
  misc_feature 1..20: note = chemically synthesized
  source 1..20: mol_type = other DNA
gaacaaacacaaaacgaaac

SEQ ID NO: 19550 - DNA, 20 bp, synthetic construct
  misc_feature 1..20: note = chemically synthesized
  source 1..20: mol_type = other DNA
cgaaacaagtaaacaaatta

SEQ ID NO: 19551 - DNA, 20 bp, synthetic construct
  misc_feature 1..20: note = chemically synthesized
  source 1..20: mol_type = other DNA
aaagtttgtaaaatgtacat

SEQ ID NO: 19552 - DNA, 20 bp, synthetic construct
  misc_feature 1..20: note = chemically synthesized
  source 1..20: mol_type = other DNA
tgtaaaatgtacattggtaa

SEQ ID NO: 19553 - DNA, 20 bp, synthetic construct
  misc_feature 1..20: note = chemically synthesized
  source 1..20: mol_type = other DNA
gtaaaatgtacattggtaat

SEQ ID NO: 19554 - DNA, 20 bp, synthetic construct
  misc_feature 1..20: note = chemically synthesized
  source 1..20: mol_type = other DNA
taaaatgtacattggtaatg

SEQ ID NO: 19555 - DNA, 20 bp, synthetic construct
  misc_feature 1..20: note = chemically synthesized
  source 1..20: mol_type = other DNA
atgtacattggtaatggggc

SEQ ID NO: 19556 - DNA, 20 bp, synthetic construct
  misc_feature 1..20: note = chemically synthesized
  source 1..20: mol_type = other DNA
ttttattcaaaatatacatt

SEQ ID NO: 19557 - DNA, 20 bp, synthetic construct
  misc_feature 1..20: note = chemically synthesized
  source 1..20: mol_type = other DNA
tttattcaaaatatacatta

SEQ ID NO: 19558 - DNA, 20 bp, synthetic construct
  misc_feature 1..20: note = chemically synthesized
  source 1..20: mol_type = other DNA
attcaaaatatacattaagg

SEQ ID NO: 19559 - DNA, 20 bp, synthetic construct
  misc_feature 1..20: note = chemically synthesized
  source 1..20: mol_type = other DNA
gaacaacaatacatgaaaaa

SEQ ID NO: 19560 - DNA, 20 bp, synthetic construct
  misc_feature 1..20: note = chemically synthesized
  source 1..20: mol_type = other DNA
caatacatgaaaaaaagctt

SEQ ID NO: 19561 - DNA, 20 bp, synthetic construct
  misc_feature 1..20: note = chemically synthesized
  source 1..20: mol_type = other DNA
atacatgaaaaaaagcttga

SEQ ID NO: 19562 - DNA, 20 bp, synthetic construct
  misc_feature 1..20: note = chemically synthesized
  source 1..20: mol_type = other DNA
cttgagagaaaatgaatctg

SEQ ID NO: 19563 - DNA, 20 bp, synthetic construct
  misc_feature 1..20: note = chemically synthesized
  source 1..20: mol_type = other DNA
gagagaaaatgaatctgtag

SEQ ID NO: 19564 - DNA, 20 bp, synthetic construct
  misc_feature 1..20: note = chemically synthesized
  source 1..20: mol_type = other DNA
agaaaatgaatctgtagtag

SEQ ID NO: 19565 - DNA, 20 bp, synthetic construct
  misc_feature 1..20: note = chemically synthesized
  source 1..20: mol_type = other DNA
aaatgaatctgtagtagtag

SEQ ID NO: 19566 - DNA, 20 bp, synthetic construct
  misc_feature 1..20: note = chemically synthesized
  source 1..20: mol_type = other DNA
aatgaatctgtagtagtagc

SEQ ID NO: 19567 - DNA, 20 bp, synthetic construct
  misc_feature 1..20: note = chemically synthesized
  source 1..20: mol_type = other DNA
aaacattttgacattaccat

SEQ ID NO: 19568 - DNA, 20 bp, synthetic construct
  misc_feature 1..20: note = chemically synthesized
  source 1..20: mol_type = other DNA
aacattttgacattaccata

SEQ ID NO: 19569 - DNA, 20 bp, synthetic construct
  misc_feature 1..20: note = chemically synthesized
  source 1..20: mol_type = other DNA
acattttgacattaccataa

SEQ ID NO: 19570 - DNA, 20 bp, synthetic construct
  misc_feature 1..20: note = chemically synthesized
  source 1..20: mol_type = other DNA
taagggaatgaatataaaac

SEQ ID NO: 19571 - DNA, 20 bp, synthetic construct
  misc_feature 1..20: note = chemically synthesized
  source 1..20: mol_type = other DNA
agggaatgaatataaaacaa

SEQ ID NO: 19572 - DNA, 20 bp, synthetic construct
  misc_feature 1..20: note = chemically synthesized
  source 1..20: mol_type = other DNA
gggaatgaatataaaacaag

SEQ ID NO: 19573 - DNA, 20 bp, synthetic construct
  misc_feature 1..20: note = chemically synthesized
  source 1..20: mol_type = other DNA
tataaaacaagaggtatgat

SEQ ID NO: 19574 - DNA, 20 bp, synthetic construct
  misc_feature 1..20: note = chemically synthesized
  source 1..20: mol_type = other DNA
tatgatgagtacttataatc

SEQ ID NO: 19575 - DNA, 20 bp, synthetic construct
  misc_feature 1..20: note = chemically synthesized
  source 1..20: mol_type = other DNA
gatgagtacttataatcaag

SEQ ID NO: 19576 - DNA, 20 bp, synthetic construct
  misc_feature 1..20: note = chemically synthesized
  source 1..20: mol_type = other DNA
aatcaagtagttattgttta

SEQ ID NO: 19577 - DNA, 20 bp, synthetic construct
  misc_feature 1..20: note = chemically synthesized
  source 1..20: mol_type = other DNA
gttattgtttaaagttacta

SEQ ID NO: 19578 - DNA, 20 bp, synthetic construct
  misc_feature 1..20: note = chemically synthesized
  source 1..20: mol_type = other DNA
gtttaaagttactatggcta

SEQ ID NO: 19579 - DNA, 20 bp, synthetic construct
  misc_feature 1..20: note = chemically synthesized
  source 1..20: mol_type = other DNA
agttactatggctacagtat

SEQ ID NO: 19580 - DNA, 20 bp, synthetic construct
  misc_feature 1..20: note = chemically synthesized
  source 1..20: mol_type = other DNA
ctacagtatgagaaacatgt

SEQ ID NO: 19581 - DNA, 20 bp, synthetic construct
  misc_feature 1..20: note = chemically synthesized
  source 1..20: mol_type = other DNA
gtatgagaaacatgttggaa

SEQ ID NO: 19582 - DNA, 20 bp, synthetic construct
  misc_feature 1..20: note = chemically synthesized
  source 1..20: mol_type = other DNA
tatgagaaacatgttggaaa

SEQ ID NO: 19583 - DNA, 20 bp, synthetic construct
  misc_feature 1..20: note = chemically synthesized
  source 1..20: mol_type = other DNA
atgagaaacatgttggaaaa

SEQ ID NO: 19584 - DNA, 20 bp, synthetic construct
  misc_feature 1..20: note = chemically synthesized
  source 1..20: mol_type = other DNA
tgagaaacatgttggaaaag

SEQ ID NO: 19585 - DNA, 20 bp, synthetic construct
  misc_feature 1..20: note = chemically synthesized
  source 1..20: mol_type = other DNA
gagaaacatgttggaaaagg

SEQ ID NO: 19586 - DNA, 20 bp, synthetic construct
  misc_feature 1..20: note = chemically synthesized
  source 1..20: mol_type = other DNA
gaaacatgttggaaaagggg

SEQ ID NO: 19587 - DNA, 20 bp, synthetic construct
  misc_feature 1..20: note = chemically synthesized
  source 1..20: mol_type = other DNA
atgttggaaaagggggagaa

SEQ ID NO: 19588 - DNA, 20 bp, synthetic construct
  misc_feature 1..20: note = chemically synthesized
  source 1..20: mol_type = other DNA
tgttggaaaagggggagaac

SEQ ID NO: 19589 - DNA, 20 bp, synthetic construct
  misc_feature 1..20: note = chemically synthesized
  source 1..20: mol_type = other DNA
aaaagggggagaacaggtaa

SEQ ID NO: 19590 - DNA, 20 bp, synthetic construct
  misc_feature 1..20: note = chemically synthesized
  source 1..20: mol_type = other DNA
agggggagaacaggtaaaag

SEQ ID NO: 19591 - DNA, 20 bp, synthetic construct
  misc_feature 1..20: note = chemically synthesized
  source 1..20: mol_type = other DNA
agaacaggtaaaagaagtat

SEQ ID NO: 19592 - DNA, 20 bp, synthetic construct
  misc_feature 1..20: note = chemically synthesized
  source 1..20: mol_type = other DNA
gaacaggtaaaagaagtatc

SEQ ID NO: 19593 - DNA, 20 bp, synthetic construct
  misc_feature 1..20: note = chemically synthesized
  source 1..20: mol_type = other DNA
atacacgtgtcaaattgtgt

SEQ ID NO: 19594 - DNA, 20 bp, synthetic construct
  misc_feature 1..20: note = chemically synthesized
  source 1..20: mol_type = other DNA
cgtgtcaaattgtgttggtg

SEQ ID NO: 19595 - DNA, 20 bp, synthetic construct
  misc_feature 1..20: note = chemically synthesized
  source 1..20: mol_type = other DNA
tgtgttggtgtggttttgac

SEQ ID NO: 19596 - DNA, 20 bp, synthetic construct
  misc_feature 1..20: note = chemically synthesized
  source 1..20: mol_type = other DNA
tggttttgactagttgttat

SEQ ID NO: 19597 - DNA, 20 bp, synthetic construct
  misc_feature 1..20: note = chemically synthesized
  source 1..20: mol_type = other DNA
ttttgactagttgttatcag

SEQ ID NO: 19598 - DNA, 20 bp, synthetic construct
  misc_feature 1..20: note = chemically synthesized
  source 1..20: mol_type = other DNA
ctagttgttatcagtagcat

SEQ ID NO: 19599 - DNA, 20 bp, synthetic construct
  misc_feature 1..20: note = chemically synthesized
  source 1..20: mol_type = other DNA
ttgttatcagtagcattaga

SEQ ID NO: 19600 - DNA, 20 bp, synthetic construct
  misc_feature 1..20: note = chemically synthesized
  source 1..20: mol_type = other DNA
tgttatcagtagcattagaa

SEQ ID NO: 19601 - DNA, 20 bp, synthetic construct
  misc_feature 1..20: note = chemically synthesized
  source 1..20: mol_type = other DNA
tagcattagaaaggcttgaa

SEQ ID NO: 19602 - DNA, 20 bp, synthetic construct
  misc_feature 1..20: note = chemically synthesized
  source 1..20: mol_type = other DNA
cattagaaaggcttgaatag

SEQ ID NO: 19603 - DNA, 20 bp, synthetic construct
  misc_feature 1..20: note = chemically synthesized
  source 1..20: mol_type = other DNA
ttagaaaggcttgaatagaa

SEQ ID NO: 19604 - DNA, 20 bp, synthetic construct
  misc_feature 1..20: note = chemically synthesized
  source 1..20: mol_type = other DNA
agaaaggcttgaatagaaga

SEQ ID NO: 19605 - DNA, 20 bp, synthetic construct
  misc_feature 1..20: note = chemically synthesized
  source 1..20: mol_type = other DNA
agaagagagattctatgact

SEQ ID NO: 19606 - DNA, 20 bp, synthetic construct
  misc_feature 1..20: note = chemically synthesized
  source 1..20: mol_type = other DNA
agagattctatgacttagaa

SEQ ID NO: 19607 - DNA, 20 bp, synthetic construct
  misc_feature 1..20: note = chemically synthesized
  source 1..20: mol_type = other DNA
ctatgacttagaatagaact

SEQ ID NO: 19608 - DNA, 20 bp, synthetic construct
  misc_feature 1..20: note = chemically synthesized
  source 1..20: mol_type = other DNA
agaatagaactgagtgattg

SEQ ID NO: 19609 - DNA, 20 bp, synthetic construct
  misc_feature 1..20: note = chemically synthesized
  source 1..20: mol_type = other DNA
gaatagaactgagtgattga

SEQ ID NO: 19610 - DNA, 20 bp, synthetic construct
  misc_feature 1..20: note = chemically synthesized
  source 1..20: mol_type = other DNA
tagaactgagtgattgaagg

SEQ ID NO: 19611 - DNA, 20 bp, synthetic construct
  misc_feature 1..20: note = chemically synthesized
  source 1..20: mol_type = other DNA
aactgagtgattgaaggtag

SEQ ID NO: 19612 - DNA, 20 bp, synthetic construct
  misc_feature 1..20: note = chemically synthesized
  source 1..20: mol_type = other DNA
tgattgaaggtagtagatta

SEQ ID NO: 19613 - DNA, 20 bp, synthetic construct
  misc_feature 1..20: note = chemically synthesized
  source 1..20: mol_type = other DNA
attgaaggtagtagattaaa

SEQ ID NO: 19614 - DNA, 20 bp, synthetic construct
  misc_feature 1..20: note = chemically synthesized
  source 1..20: mol_type = other DNA
aaggtagtagattaaagaga

SEQ ID NO: 19615 - DNA, 20 bp, synthetic construct
  misc_feature 1..20: note = chemically synthesized
  source 1..20: mol_type = other DNA
gtagtagattaaagagaaag

SEQ ID NO: 19616 - DNA, 20 bp, synthetic construct
  misc_feature 1..20: note = chemically synthesized
  source 1..20: mol_type = other DNA
gattaaagagaaagaagcgt

SEQ ID NO: 19617 - DNA, 20 bp, synthetic construct
  misc_feature 1..20: note = chemically synthesized
  source 1..20: mol_type = other DNA
gtaatgccacctgaatttct

SEQ ID NO: 19618 - DNA, 20 bp, synthetic construct
  misc_feature 1..20: note = chemically synthesized
  source 1..20: mol_type = other DNA
aatttctgagttttgctgaa

SEQ ID NO: 19619 - DNA, 20 bp, synthetic construct
  misc_feature 1..20: note = chemically synthesized
  source 1..20: mol_type = other DNA
tttctgagttttgctgaatg

SEQ ID NO: 19620 - DNA, 20 bp, synthetic construct
  misc_feature 1..20: note = chemically synthesized
  source 1..20: mol_type = other DNA
tctgagttttgctgaatgga

SEQ ID NO: 19621 - DNA, 20 bp, synthetic construct
  misc_feature 1..20: note = chemically synthesized
  source 1..20: mol_type = other DNA
gagttttgctgaatggagag

SEQ ID NO: 19622 - DNA, 20 bp, synthetic construct
  misc_feature 1..20: note = chemically synthesized
  source 1..20: mol_type = other DNA
agtagttccattgacttcca

SEQ ID NO: 19623 - DNA, 20 bp, synthetic construct
  misc_feature 1..20: note = chemically synthesized
  source 1..20: mol_type = other DNA
ttgacttccatagttatcac

SEQ ID NO: 19624 - DNA, 20 bp, synthetic construct
  misc_feature 1..20: note = chemically synthesized
  source 1..20: mol_type = other DNA
acttccatagttatcacaag

SEQ ID NO: 19625 - DNA, 20 bp, synthetic construct
  misc_feature 1..20: note = chemically synthesized
  source 1..20: mol_type = other DNA
tgactttattcactaatcaa

SEQ ID NO: 19626 - DNA, 20 bp, synthetic construct
  misc_feature 1..20: note = chemically synthesized
  source 1..20: mol_type = other DNA
atcaacagttatttattgat

SEQ ID NO: 19627 - DNA, 20 bp, synthetic construct
  misc_feature 1..20: note = chemically synthesized
  source 1..20: mol_type = other DNA
attggtcattgtacattaat

SEQ ID NO: 19628 - DNA, 20 bp, synthetic construct
  misc_feature 1..20: note = chemically synthesized
  source 1..20: mol_type = other DNA
tgttttacatgctgactttg

SEQ ID NO: 19629 - DNA, 20 bp, synthetic construct
  misc_feature 1..20: note = chemically synthesized
  source 1..20: mol_type = other DNA
tacatgctgactttgtagaa

SEQ ID NO: 19630 - DNA, 20 bp, synthetic construct
  misc_feature 1..20: note = chemically synthesized
  source 1..20: mol_type = other DNA
ctgactttgtagaaaagatg

SEQ ID NO: 19631 - DNA, 20 bp, synthetic construct
  misc_feature 1..20: note = chemically synthesized
  source 1..20: mol_type = other DNA
gactttgtagaaaagatgaa

SEQ ID NO: 19632 - DNA, 20 bp, synthetic construct
  misc_feature 1..20: note = chemically synthesized
  source 1..20: mol_type = other DNA
gtagaaaagatgaagagaat

SEQ ID NO: 19633 - DNA, 20 bp, synthetic construct
  misc_feature 1..20: note = chemically synthesized
  source 1..20: mol_type = other DNA
gaagagaatcagtttcaatg

SEQ ID NO: 19634 - DNA, 20 bp, synthetic construct
  misc_feature 1..20: note = chemically synthesized
  source 1..20: mol_type = other DNA
tcaatgaagtgctttgcaca

SEQ ID NO: 19635 - DNA, 20 bp, synthetic construct
  misc_feature 1..20: note = chemically synthesized
  source 1..20: mol_type = other DNA
caatgaagtgctttgcacaa

SEQ ID NO: 19636 - DNA, 20 bp, synthetic construct
  misc_feature 1..20: note = chemically synthesized
  source 1..20: mol_type = other DNA
gctttgcacaaaggataccc

SEQ ID NO: 19637 - DNA, 20 bp, synthetic construct
  misc_feature 1..20: note = chemically synthesized
  source 1..20: mol_type = other DNA
tttgcacaaaggataccctg

SEQ ID NO: 19638 - DNA, 20 bp, synthetic construct
  misc_feature 1..20: note = chemically synthesized
  source 1..20: mol_type = other DNA
catatcattttcttttctaa

SEQ ID NO: 19639 - DNA, 20 bp, synthetic construct
  misc_feature 1..20: note = chemically synthesized
  source 1..20: mol_type = other DNA
ctaacagtttcattaacata

SEQ ID NO: 19640 - DNA, 20 bp, synthetic construct
  misc_feature 1..20: note = chemically synthesized
  source 1..20: mol_type = other DNA
taacagtttcattaacatat

SEQ ID NO: 19641 - DNA, 20 bp, synthetic construct
  misc_feature 1..20: note = chemically synthesized
  source 1..20: mol_type = other DNA
gtttcattaacatataggta

SEQ ID NO: 19642 - DNA, 20 bp, synthetic construct
  misc_feature 1..20: note = chemically synthesized
  source 1..20: mol_type = other DNA
cattaacatataggtaaaga

SEQ ID NO: 19643 - DNA, 20 bp, synthetic construct
  misc_feature 1..20: note = chemically synthesized
  source 1..20: mol_type = other DNA
attaacatataggtaaagac

SEQ ID NO: 19644 - DNA, 20 bp, synthetic construct
  misc_feature 1..20: note = chemically synthesized
  source 1..20: mol_type = other DNA
acaggatatcataattgaca

SEQ ID NO: 19645 - DNA, 20 bp, synthetic construct
  misc_feature 1..20: note = chemically synthesized
  source 1..20: mol_type = other DNA
atatcataattgacatagta

SEQ ID NO: 19646 - DNA, 20 bp, synthetic construct
  misc_feature 1..20: note = chemically synthesized
  source 1..20: mol_type = other DNA
acatagtacagtgtcattaa

SEQ ID NO: 19647 - DNA, 20 bp, synthetic construct
  misc_feature 1..20: note = chemically synthesized
  source 1..20: mol_type = other DNA
catagtacagtgtcattaat

SEQ ID NO: 19648 - DNA, 20 bp, synthetic construct
  misc_feature 1..20: note = chemically synthesized
  source 1..20: mol_type = other DNA
agtgtcattaataggttaat

SEQ ID NO: 19649 - DNA, 20 bp, synthetic construct
  misc_feature 1..20: note = chemically synthesized
  source 1..20: mol_type = other DNA
gtgtcattaataggttaatc

SEQ ID NO: 19650 - DNA, 20 bp, synthetic construct
  misc_feature 1..20: note = chemically synthesized
  source 1..20: mol_type = other DNA
aataggttaatcaggtcatg

SEQ ID NO: 19651 - DNA, 20 bp, synthetic construct
  misc_feature 1..20: note = chemically synthesized
  source 1..20: mol_type = other DNA
gttaatcaggtcatgtggta

SEQ ID NO: 19652 - DNA, 20 bp, synthetic construct
  misc_feature 1..20: note = chemically synthesized
  source 1..20: mol_type = other DNA
aatcaggtcatgtggtaaag

SEQ ID NO: 19653 - DNA, 20 bp, synthetic construct
  misc_feature 1..20: note = chemically synthesized
  source 1..20: mol_type = other DNA
atcaggtcatgtggtaaagt

SEQ ID NO: 19654 - DNA, 20 bp, synthetic construct
  misc_feature 1..20: note = chemically synthesized
  source 1..20: mol_type = other DNA
aggtcatgtggtaaagtggg

SEQ ID NO: 19655 - DNA, 20 bp, synthetic construct
  misc_feature 1..20: note = chemically synthesized
  source 1..20: mol_type = other DNA
ggtcatgtggtaaagtggga

SEQ ID NO: 19656 - DNA, 20 bp, synthetic construct
  misc_feature 1..20: note = chemically synthesized
  source 1..20: mol_type = other DNA
gtaaagtgggaaggctgaat

SEQ ID NO: 19657 - DNA, 20 bp, synthetic construct
  misc_feature 1..20: note = chemically synthesized
  source 1..20: mol_type = other DNA
taaagtgggaaggctgaata

SEQ ID NO: 19658 - DNA, 20 bp, synthetic construct
  misc_feature 1..20: note = chemically synthesized
  source 1..20: mol_type = other DNA
taaggatattattttgtttt

SEQ ID NO: 19659 - DNA, 20 bp, synthetic construct
  misc_feature 1..20: note = chemically synthesized
  source 1..20: mol_type = other DNA
aggatattattttgttttta

SEQ ID NO: 19660 - DNA, 20 bp, synthetic construct
  misc_feature 1..20: note = chemically synthesized
  source 1..20: mol_type = other DNA
ttttgtttttagagaattta

SEQ ID NO: 19661 - DNA, 20 bp, synthetic construct
  misc_feature 1..20: note = chemically synthesized
  source 1..20: mol_type = other DNA
tttgtttttagagaatttaa

SEQ ID NO: 19662 - DNA, 20 bp, synthetic construct
  misc_feature 1..20: note = chemically synthesized
  source 1..20: mol_type = other DNA
gtttttagagaatttaaagg

SEQ ID NO: 19663 - DNA, 20 bp, synthetic construct
  misc_feature 1..20: note = chemically synthesized
  source 1..20: mol_type = other DNA
cctccttattaaaaatatga

SEQ ID NO: 19664 - DNA, 20 bp, synthetic construct
  misc_feature 1..20: note = chemically synthesized
  source 1..20: mol_type = other DNA
ccttattaaaaatatgacag

SEQ ID NO: 19665 - DNA, 20 bp, synthetic construct
  misc_feature 1..20: note = chemically synthesized
  source 1..20: mol_type = other DNA
ttattaaaaatatgacagaa

SEQ ID NO: 19666 - DNA, 20 bp, synthetic construct
  misc_feature 1..20: note = chemically synthesized
  source 1..20: mol_type = other DNA
aaaatatgacagaagagtga

SEQ ID NO: 19667 - DNA, 20 bp, synthetic construct
  misc_feature 1..20: note = chemically synthesized
  source 1..20: mol_type = other DNA
tatgacagaagagtgatagc

SEQ ID NO: 19668 - DNA, 20 bp, synthetic construct
  misc_feature 1..20: note = chemically synthesized
  source 1..20: mol_type = other DNA
cagaagagtgatagctggtt

SEQ ID NO: 19669 - DNA, 20 bp, synthetic construct
  misc_feature 1..20: note = chemically synthesized
  source 1..20: mol_type = other DNA
atagctggtttggtttaatg

SEQ ID NO: 19670 - DNA, 20 bp, synthetic construct
  misc_feature 1..20: note = chemically synthesized
  source 1..20: mol_type = other DNA
ggtttggtttaatgaagtat

SEQ ID NO: 19671 - DNA, 20 bp, synthetic construct
  misc_feature 1..20: note = chemically synthesized
  source 1..20: mol_type = other DNA
gaagtattggcttgtgccct

SEQ ID NO: 19672 - DNA, 20 bp, synthetic construct
  misc_feature 1..20: note = chemically synthesized
  source 1..20: mol_type = other DNA
gtattggcttgtgccctcag

SEQ ID NO: 19673 - DNA, 20 bp, synthetic construct
  misc_feature 1..20: note = chemically synthesized
  source 1..20: mol_type = other DNA
tattggcttgtgccctcaga

SEQ ID NO: 19674 - DNA, 20 bp, synthetic construct
  misc_feature 1..20: note = chemically synthesized
  source 1..20: mol_type = other DNA
attggcttgtgccctcagaa

SEQ ID NO: 19675 - DNA, 20 bp, synthetic construct
  misc_feature 1..20: note = chemically synthesized
  source 1..20: mol_type = other DNA
ctgtgtatcttttatcatga

SEQ ID NO: 19676 - DNA, 20 bp, synthetic construct
  misc_feature 1..20: note = chemically synthesized
  source 1..20: mol_type = other DNA
tatcatgaaagttgatattt

SEQ ID NO: 19677 - DNA, 20 bp, synthetic construct
  misc_feature 1..20: note = chemically synthesized
  source 1..20: mol_type = other DNA
tcatgaaagttgatatttca

SEQ ID NO: 19678 - DNA, 20 bp, synthetic construct
  misc_feature 1..20: note = chemically synthesized
  source 1..20: mol_type = other DNA
atttcagagcactaataact

SEQ ID NO: 19679 - DNA, 20 bp, synthetic construct
  misc_feature 1..20: note = chemically synthesized
  source 1..20: mol_type = other DNA
cttagtttccttctatgtaa

SEQ ID NO: 19680 - DNA, 20 bp, synthetic construct
  misc_feature 1..20: note = chemically synthesized
  source 1..20: mol_type = other DNA
ccttctatgtaaaagatgaa

SEQ ID NO: 19681 - DNA, 20 bp, synthetic construct
  misc_feature 1..20: note = chemically synthesized
  source 1..20: mol_type = other DNA
gtctcaatgaaataaaatgc

SEQ ID NO: 19682 - DNA, 20 bp, synthetic construct
  misc_feature 1..20: note = chemically synthesized
  source 1..20: mol_type = other DNA
tcaatgaaataaaatgctag

SEQ ID NO: 19683 - DNA, 20 bp, synthetic construct
  misc_feature 1..20: note = chemically synthesized
  source 1..20: mol_type = other DNA
aaataaaatgctagtggatt

SEQ ID NO: 19684 - DNA, 20 bp, synthetic construct
  misc_feature 1..20: note = chemically synthesized
  source 1..20: mol_type = other DNA
gtggattcagatcaccctct

SEQ ID NO: 19685 - DNA, 20 bp, synthetic construct
  misc_feature 1..20: note = chemically synthesized
  source 1..20: mol_type = other DNA
attttctttaaacaaccatg

SEQ ID NO: 19686 - DNA, 20 bp, synthetic construct
  misc_feature 1..20: note = chemically synthesized
  source 1..20: mol_type = other DNA
ttttctttaaacaaccatga

SEQ ID NO: 19687 - DNA, 20 bp, synthetic construct
  misc_feature 1..20: note = chemically synthesized
  source 1..20: mol_type = other DNA
taaacaaccatgaaggcacc

SEQ ID NO: 19688 - DNA, 20 bp, synthetic construct
  misc_feature 1..20: note = chemically synthesized
  source 1..20: mol_type = other DNA
aaccatgaaggcaccaagaa

SEQ ID NO: 19689 - DNA, 20 bp, synthetic construct
  misc_feature 1..20: note = chemically synthesized
  source 1..20: mol_type = other DNA
ccatgaaggcaccaagaaca

SEQ ID NO: 19690 - DNA, 20 bp, synthetic construct
  misc_feature 1..20: note = chemically synthesized
  source 1..20: mol_type = other DNA
agagaattcaacgtctaaac

SEQ ID NO: 19691 - DNA, 20 bp, synthetic construct
  misc_feature 1..20: note = chemically synthesized
  source 1..20: mol_type = other DNA
ttcaacgtctaaaccagttt

SEQ ID NO: 19692 - DNA, 20 bp, synthetic construct
  misc_feature 1..20: note = chemically synthesized
  source 1..20: mol_type = other DNA
tcaacgtctaaaccagttta

SEQ ID NO: 19693 - DNA, 20 bp, synthetic construct
  misc_feature 1..20: note = chemically synthesized
  source 1..20: mol_type = other DNA
aaacatatttcccaataatt

SEQ ID NO: 19694 - DNA, 20 bp, synthetic construct
  misc_feature 1..20: note = chemically synthesized
  source 1..20: mol_type = other DNA
aacatatttcccaataattt

SEQ ID NO: 19695 - DNA, 20 bp, synthetic construct
  misc_feature 1..20: note = chemically synthesized
  source 1..20: mol_type = other DNA
aatttgggcttctttcatct

SEQ ID NO: 19696 - DNA, 20 bp, synthetic construct
  misc_feature 1..20: note = chemically synthesized
  source 1..20: mol_type = other DNA
gaaacaacactgcttatcca

SEQ ID NO: 19697 - DNA, 20 bp, synthetic construct
  misc_feature 1..20: note = chemically synthesized
  source 1..20: mol_type = other DNA
caacactgcttatccaaagt

SEQ ID NO: 19698 - DNA, 20 bp, synthetic construct
  misc_feature 1..20: note = chemically synthesized
  source 1..20: mol_type = other DNA
agcacctccttatacctatt

SEQ ID NO: 19699 - DNA, 20 bp, synthetic construct
  misc_feature 1..20: note = chemically synthesized
  source 1..20: mol_type = other DNA
cctccttatacctattcagt

SEQ ID NO: 19700 - DNA, 20 bp, synthetic construct
  misc_feature 1..20: note = chemically synthesized
  source 1..20: mol_type = other DNA
ctccttatacctattcagtg

SEQ ID NO: 19701 - DNA, 20 bp, synthetic construct
  misc_feature 1..20: note = chemically synthesized
  source 1..20: mol_type = other DNA
tcaacccaccatatacacaa

SEQ ID NO: 19702 - DNA, 20 bp, synthetic construct
  misc_feature 1..20: note = chemically synthesized
  source 1..20: mol_type = other DNA
caacccaccatatacacaaa

SEQ ID NO: 19703 - DNA, 20 bp, synthetic construct
  misc_feature 1..20: note = chemically synthesized
  source 1..20: mol_type = other DNA
catatacacaaaaggcatgc

SEQ ID NO: 19704 - DNA, 20 bp, synthetic construct
  misc_feature 1..20: note = chemically synthesized
  source 1..20: mol_type = other DNA
ccagtgatgctgctccatca

SEQ ID NO: 19705 - DNA, 20 bp, synthetic construct
  misc_feature 1..20: note = chemically synthesized
  source 1..20: mol_type = other DNA
ttccttatttctcacacatg

SEQ ID NO: 19706 - DNA, 20 bp, synthetic construct
  misc_feature 1..20: note = chemically synthesized
  source 1..20: mol_type = other DNA
cttatttctcacacatgtgg

SEQ ID NO: 19707 - DNA, 20 bp, synthetic construct
  misc_feature 1..20: note = chemically synthesized
  source 1..20: mol_type = other DNA
ttatttctcacacatgtggc

SEQ ID NO: 19708 - DNA, 20 bp, synthetic construct
  misc_feature 1..20: note = chemically synthesized
  source 1..20: mol_type = other DNA
tgtggcaggtaattaaacta

SEQ ID NO: 19709 - DNA, 20 bp, synthetic construct
  misc_feature 1..20: note = chemically synthesized
  source 1..20: mol_type = other DNA
ggtaattaaactatggcttg

SEQ ID NO: 19710 - DNA, 20 bp, synthetic construct
  misc_feature 1..20: note = chemically synthesized
  source 1..20: mol_type = other DNA
taaactatggcttgaagtcc

SEQ ID NO: 19711 - DNA, 20 bp, synthetic construct
  misc_feature 1..20: note = chemically synthesized
  source 1..20: mol_type = other DNA
atggcttgaagtcctggcct

SEQ ID NO: 19712 - DNA, 20 bp, synthetic construct
  misc_feature 1..20: note = chemically synthesized
  source 1..20: mol_type = other DNA
cttgaagtcctggccttggc

SEQ ID NO: 19713 - DNA, 20 bp, synthetic construct
  misc_feature 1..20: note = chemically synthesized
  source 1..20: mol_type = other DNA
tggccttggccagttaaact

SEQ ID NO: 19714 - DNA, 20 bp, synthetic construct
  misc_feature 1..20: note = chemically synthesized
  source 1..20: mol_type = other DNA
gccttggccagttaaactaa

SEQ ID NO: 19715 - DNA, 20 bp, synthetic construct
  misc_feature 1..20: note = chemically synthesized
  source 1..20: mol_type = other DNA
tcaaatgtatcactgtaaaa

SEQ ID NO: 19716 - DNA, 20 bp, synthetic construct
  misc_feature 1..20: note = chemically synthesized
  source 1..20: mol_type = other DNA
atgtatcactgtaaaacaga

SEQ ID NO: 19717 - DNA, 20 bp, synthetic construct
  misc_feature 1..20: note = chemically synthesized
  source 1..20: mol_type = other DNA
gatagcctatcctcaaaatt

SEQ ID NO: 19718 - DNA, 20 bp, synthetic construct
  misc_feature 1..20: note = chemically synthesized
  source 1..20: mol_type = other DNA
tatcctcaaaatttagatat

SEQ ID NO: 19719 - DNA, 20 bp, synthetic construct
  misc_feature 1..20: note = chemically synthesized
  source 1..20: mol_type = other DNA
ctcaaaatttagatatcaga

SEQ ID NO: 19720 - DNA, 20 bp, synthetic construct
  misc_feature 1..20: note = chemically synthesized
  source 1..20: mol_type = other DNA
tcaaaatttagatatcagat

SEQ ID NO: 19721 - DNA, 20 bp, synthetic construct
  misc_feature 1..20: note = chemically synthesized
  source 1..20: mol_type = other DNA
caaaatttagatatcagatg

SEQ ID NO: 19722 - DNA, 20 bp, synthetic construct
  misc_feature 1..20: note = chemically synthesized
  source 1..20: mol_type = other DNA
cagatggggatataatatcg

SEQ ID NO: 19723 - DNA, 20 bp, synthetic construct
  misc_feature 1..20: note = chemically synthesized
  source 1..20: mol_type = other DNA
gcagtaacttgtgattacca

SEQ ID NO: 19724 - DNA, 20 bp, synthetic construct
  misc_feature 1..20: note = chemically synthesized
  source 1..20: mol_type = other DNA
cagcaacttgtgatgtccca

SEQ ID NO: 19725 - DNA, 20 bp, synthetic construct
  misc_feature 1..20: note = chemically synthesized
  source 1..20: mol_type = other DNA
cccacagcttctgttctaca

SEQ ID NO: 19726 - DNA, 20 bp, synthetic construct
  misc_feature 1..20: note = chemically synthesized
  source 1..20: mol_type = other DNA
cagcttctgttctacaaaga

SEQ ID NO: 19727 - DNA, 20 bp, synthetic construct
  misc_feature 1..20: note = chemically synthesized
  source 1..20: mol_type = other DNA
agcttctgttctacaaagat

SEQ ID NO: 19728 - DNA, 20 bp, synthetic construct
  misc_feature 1..20: note = chemically synthesized
  source 1..20: mol_type = other DNA
ttctacaaagatgggaaaca

SEQ ID NO: 19729 - DNA, 20 bp, synthetic construct
  misc_feature 1..20: note = chemically synthesized
  source 1..20: mol_type = other DNA
tctacaaagatgggaaacaa

SEQ ID NO: 19730 - DNA, 20 bp, synthetic construct
  misc_feature 1..20: note = chemically synthesized
  source 1..20: mol_type = other DNA
acaaagatgggaaacaaagg

SEQ ID NO: 19731 - DNA, 20 bp, synthetic construct
  misc_feature 1..20: note = chemically synthesized
  source 1..20: mol_type = other DNA
caaagatgggaaacaaaggc

SEQ ID NO: 19732 - DNA, 20 bp, synthetic construct
  misc_feature 1..20: note = chemically synthesized
  source 1..20: mol_type = other DNA
aaacaaaggcaggctttcct

SEQ ID NO: 19733 - DNA, 20 bp, synthetic construct
  misc_feature 1..20: note = chemically synthesized
  source 1..20: mol_type = other DNA
ggcaggctttcctcagctac

SEQ ID NO: 19734 - DNA, 20 bp, synthetic construct
  misc_feature 1..20: note = chemically synthesized
  source 1..20: mol_type = other DNA
caggctttcctcagctacaa

SEQ ID NO: 19735 - DNA, 20 bp, synthetic construct
  misc_feature 1..20: note = chemically synthesized
  source 1..20: mol_type = other DNA
aggctttcctcagctacaag

SEQ ID NO: 19736 - DNA, 20 bp, synthetic construct
  misc_feature 1..20: note = chemically synthesized
  source 1..20: mol_type = other DNA
gctacaagaggttctgcatc

SEQ ID NO: 19737 - DNA, 20 bp, synthetic construct
  misc_feature 1..20: note = chemically synthesized
  source 1..20: mol_type = other DNA
caagaggttctgcatcaaga

SEQ ID NO: 19738 - DNA, 20 bp, synthetic construct
  misc_feature 1..20: note = chemically synthesized
  source 1..20: mol_type = other DNA
ctgcatcaagatagcaaatc

SEQ ID NO: 19739 - DNA, 20 bp, synthetic construct
  misc_feature 1..20: note = chemically synthesized
  source 1..20: mol_type = other DNA
atcaagatagcaaatcaaga

SEQ ID NO: 19740 - DNA, 20 bp, synthetic construct
  misc_feature 1..20: note = chemically synthesized
  source 1..20: mol_type = other DNA
tcaagatagcaaatcaagat

SEQ ID NO: 19741 - DNA, 20 bp, synthetic construct
  misc_feature 1..20: note = chemically synthesized
  source 1..20: mol_type = other DNA
agatgggaattatccgaaat

SEQ ID NO: 19742 - DNA, 20 bp, synthetic construct
  misc_feature 1..20: note = chemically synthesized
  source 1..20: mol_type = other DNA
cgaaatgagatttttccatt

SEQ ID NO: 19743 - DNA, 20 bp, synthetic construct
  misc_feature 1..20: note = chemically synthesized
  source 1..20: mol_type = other DNA
gatttttccattaagatgcc

SEQ ID NO: 19744 - DNA, 20 bp, synthetic construct
  misc_feature 1..20: note = chemically synthesized
  source 1..20: mol_type = other DNA
taagatgcctagatgtatta

SEQ ID NO: 19745 - DNA, 20 bp, synthetic construct
  misc_feature 1..20: note = chemically synthesized
  source 1..20: mol_type = other DNA
tagatgtattatagacctca

SEQ ID NO: 19746 - DNA, 20 bp, synthetic construct
  misc_feature 1..20: note = chemically synthesized
  source 1..20: mol_type = other DNA
tagacctcatggtcacatat

SEQ ID NO: 19747 - DNA, 20 bp, synthetic construct
  misc_feature 1..20: note = chemically synthesized
  source 1..20: mol_type = other DNA
agacctcatggtcacatata

SEQ ID NO: 19748 - DNA, 20 bp, synthetic construct
  misc_feature 1..20: note = chemically synthesized
  source 1..20: mol_type = other DNA
tcatggtcacatataaggaa

SEQ ID NO: 19749 - DNA, 20 bp, synthetic construct
  misc_feature 1..20: note = chemically synthesized
  source 1..20: mol_type = other DNA
atggtcacatataaggaaca

SEQ ID NO: 19750 - DNA, 20 bp, synthetic construct
  misc_feature 1..20: note = chemically synthesized
  source 1..20: mol_type = other DNA
tcacatataaggaacagaga

SEQ ID NO: 19751 - DNA, 20 bp, synthetic construct
  misc_feature 1..20: note = chemically synthesized
  source 1..20: mol_type = other DNA
taaggaacagagaaagtctt

SEQ ID NO: 19752 - DNA, 20 bp, synthetic construct
  misc_feature 1..20: note = chemically synthesized
  source 1..20: mol_type = other DNA
ggaacagagaaagtctttgg

SEQ ID NO: 19753 - DNA, 20 bp, synthetic construct
  misc_feature 1..20: note = chemically synthesized
  source 1..20: mol_type = other DNA
tttggtagataactgacttt

SEQ ID NO: 19754 - DNA, 20 bp, synthetic construct
  misc_feature 1..20: note = chemically synthesized
  source 1..20: mol_type = other DNA
ttggtagataactgactttt

SEQ ID NO: 19755 - DNA, 20 bp, synthetic construct
  misc_feature 1..20: note = chemically synthesized
  source 1..20: mol_type = other DNA
ataactgacttttaggattt

SEQ ID NO: 19756 - DNA, 20 bp, synthetic construct
  misc_feature 1..20: note = chemically synthesized
  source 1..20: mol_type = other DNA
ttaggatttgagtttatatt

SEQ ID NO: 19757 - DNA, 20 bp, synthetic construct
  misc_feature 1..20: note = chemically synthesized
  source 1..20: mol_type = other DNA
taacttgaacattatactct

SEQ ID NO: 19758 - DNA, 20 bp, synthetic construct
  misc_feature 1..20: note = chemically synthesized
  source 1..20: mol_type = other DNA
ttgaacattatactctgaga

SEQ ID NO: 19759 - DNA, 20 bp, synthetic construct
  misc_feature 1..20: note = chemically synthesized
  source 1..20: mol_type = other DNA
tgaacattatactctgagat

SEQ ID NO: 19760 - DNA, 20 bp, synthetic construct
  misc_feature 1..20: note = chemically synthesized
  source 1..20: mol_type = other DNA
ttttccccttttgaaatttg

SEQ ID NO: 19761 - DNA, 20 bp, synthetic construct
  misc_feature 1..20: note = chemically synthesized
  source 1..20: mol_type = other DNA
atcctgtttcacaattaaat

SEQ ID NO: 19762 - DNA, 20 bp, synthetic construct
  misc_feature 1..20: note = chemically synthesized
  source 1..20: mol_type = other DNA
tcacaattaaatcagtctaa

SEQ ID NO: 19763 - DNA, 20 bp, synthetic construct
  misc_feature 1..20: note = chemically synthesized
  source 1..20: mol_type = other DNA
caattaaatcagtctaaaag

SEQ ID NO: 19764 - DNA, 20 bp, synthetic construct
  misc_feature 1..20: note = chemically synthesized
  source 1..20: mol_type = other DNA
atcagtctaaaagaagcttt

SEQ ID NO: 19765 - DNA, 20 bp, synthetic construct
  misc_feature 1..20: note = chemically synthesized
  source 1..20: mol_type = other DNA
taaaagaagcttttagtaca

SEQ ID NO: 19766 - DNA, 20 bp, synthetic construct
  misc_feature 1..20: note = chemically synthesized
  source 1..20: mol_type = other DNA
ctcctcccaccacaattttt

SEQ ID NO: 19767 - DNA, 20 bp, synthetic construct
  misc_feature 1..20: note = chemically synthesized
  source 1..20: mol_type = other DNA
caccacaattttttagtcat

SEQ ID NO: 19768 - DNA, 20 bp, synthetic construct
  misc_feature 1..20: note = chemically synthesized
  source 1..20: mol_type = other DNA
tccatttctctcaacattgt

SEQ ID NO: 19769 - DNA, 20 bp, synthetic construct
  misc_feature 1..20: note = chemically synthesized
  source 1..20: mol_type = other DNA
cattgttggtcttcctaata

SEQ ID NO: 19770 - DNA, 20 bp, synthetic construct
  misc_feature 1..20: note = chemically synthesized
  source 1..20: mol_type = other DNA
ttgttggtcttcctaatata

SEQ ID NO: 19771 - DNA, 20 bp, synthetic construct
  misc_feature 1..20: note = chemically synthesized
  source 1..20: mol_type = other DNA
gttggtcttcctaatataga

SEQ ID NO: 19772 - DNA, 20 bp, synthetic construct
  misc_feature 1..20: note = chemically synthesized
  source 1..20: mol_type = other DNA
ttcctaatatagagagttta

SEQ ID NO: 19773 - DNA, 20 bp, synthetic construct
  misc_feature 1..20: note = chemically synthesized
  source 1..20: mol_type = other DNA
ctaatatagagagtttacag

SEQ ID NO: 19774 - DNA, 20 bp, synthetic construct
  misc_feature 1..20: note = chemically synthesized
  source 1..20: mol_type = other DNA
agagagtttacagtagatgt

SEQ ID NO: 19775 - DNA, 20 bp, synthetic construct
  misc_feature 1..20: note = chemically synthesized
  source 1..20: mol_type = other DNA
agagtttacagtagatgtca

SEQ ID NO: 19776 - DNA, 20 bp, synthetic construct
  misc_feature 1..20: note = chemically synthesized
  source 1..20: mol_type = other DNA
tttacagtagatgtcagaga

SEQ ID NO: 19777 - DNA, 20 bp, synthetic construct
  misc_feature 1..20: note = chemically synthesized
  source 1..20: mol_type = other DNA
gatgtcagagaaagtattta

SEQ ID NO: 19778 - DNA, 20 bp, synthetic construct
  misc_feature 1..20: note = chemically synthesized
  source 1..20: mol_type = other DNA
agagaaagtatttatggcaa

SEQ ID NO: 19779 - DNA, 20 bp, synthetic construct
  misc_feature 1..20: note = chemically synthesized
  source 1..20: mol_type = other DNA
tttccctctgaacatatata

SEQ ID NO: 19780 - DNA, 20 bp, synthetic construct
  misc_feature 1..20: note = chemically synthesized
  source 1..20: mol_type = other DNA
taaagtatatataacttgtg

SEQ ID NO: 19781 - DNA, 20 bp, synthetic construct
  misc_feature 1..20: note = chemically synthesized
  source 1..20: mol_type = other DNA
atgtctcatatttttcattc

SEQ ID NO: 19782 - DNA, 20 bp, synthetic construct
  misc_feature 1..20: note = chemically synthesized
  source 1..20: mol_type = other DNA
tcatatttttcattctagaa

SEQ ID NO: 19783 - DNA, 20 bp, synthetic construct
  misc_feature 1..20: note = chemically synthesized
  source 1..20: mol_type = other DNA
ctatattttctatttttgaa

SEQ ID NO: 19784 - DNA, 20 bp, synthetic construct
  misc_feature 1..20: note = chemically synthesized
  source 1..20: mol_type = other DNA
atattttctatttttgaata

SEQ ID NO: 19785 - DNA, 20 bp, synthetic construct
  misc_feature 1..20: note = chemically synthesized
  source 1..20: mol_type = other DNA
gccttgacccttcctattat

SEQ ID NO: 19786 - DNA, 20 bp, synthetic construct
  misc_feature 1..20: note = chemically synthesized
  source 1..20: mol_type = other DNA
ccttgacccttcctattatt

SEQ ID NO: 19787 - DNA, 20 bp, synthetic construct
  misc_feature 1..20: note = chemically synthesized
  source 1..20: mol_type = other DNA
acccttcctattattaggcc

SEQ ID NO: 19788 - DNA, 20 bp, synthetic construct
  misc_feature 1..20: note = chemically synthesized
  source 1..20: mol_type = other DNA
cccttcctattattaggcca

SEQ ID NO: 19789 - DNA, 20 bp, synthetic construct
  misc_feature 1..20: note = chemically synthesized
  source 1..20: mol_type = other DNA
ccttcctattattaggccaa

SEQ ID NO: 19790 - DNA, 20 bp, synthetic construct
  misc_feature 1..20: note = chemically synthesized
  source 1..20: mol_type = other DNA
ctattattaggccaagggaa

SEQ ID NO: 19791 - DNA, 20 bp, synthetic construct
  misc_feature 1..20: note = chemically synthesized
  source 1..20: mol_type = other DNA
aagtatgttaaaatcatctg

SEQ ID NO: 19792 - DNA, 20 bp, synthetic construct
  misc_feature 1..20: note = chemically synthesized
  source 1..20: mol_type = other DNA
gtatgttaaaatcatctgaa

SEQ ID NO: 19793 - DNA, 20 bp, synthetic construct
  misc_feature 1..20: note = chemically synthesized
  source 1..20: mol_type = other DNA
ctcactttttacttttttac

SEQ ID NO: 19794 - DNA, 20 bp, synthetic construct
  misc_feature 1..20: note = chemically synthesized
  source 1..20: mol_type = other DNA
ttacttttttacgagctgac

SEQ ID NO: 19795 - DNA, 20 bp, synthetic construct
  misc_feature 1..20: note = chemically synthesized
  source 1..20: mol_type = other DNA
cttttttacgagctgacaag

SEQ ID NO: 19796 - DNA, 20 bp, synthetic construct
  misc_feature 1..20: note = chemically synthesized
  source 1..20: mol_type = other DNA
gagctgacaagaagcttgtc

SEQ ID NO: 19797 - DNA, 20 bp, synthetic construct
  misc_feature 1..20: note = chemically synthesized
  source 1..20: mol_type = other DNA
agctgacaagaagcttgtct

SEQ ID NO: 19798 - DNA, 20 bp, synthetic construct
  misc_feature 1..20: note = chemically synthesized
  source 1..20: mol_type = other DNA
ttgtctaggtttttccttct

SEQ ID NO: 19799 - DNA, 20 bp, synthetic construct
  misc_feature 1..20: note = chemically synthesized
  source 1..20: mol_type = other DNA
ttttccttctaagatttttt

SEQ ID NO: 19800 - DNA, 20 bp, synthetic construct
  misc_feature 1..20: note = chemically synthesized
  source 1..20: mol_type = other DNA
tttccttctaagattttttt

SEQ ID NO: 19801 - DNA, 20 bp, synthetic construct
  misc_feature 1..20: note = chemically synthesized
  source 1..20: mol_type = other DNA
tctaagatttttttgggcaa

SEQ ID NO: 19802 - DNA, 20 bp, synthetic construct
  misc_feature 1..20: note = chemically synthesized
  source 1..20: mol_type = other DNA
tttgggcaaaagaatattta

SEQ ID NO: 19803 - DNA, 20 bp, synthetic construct
  misc_feature 1..20: note = chemically synthesized
  source 1..20: mol_type = other DNA
gggcaaaagaatatttatag

SEQ ID NO: 19804 - DNA, 20 bp, synthetic construct
  misc_feature 1..20: note = chemically synthesized
  source 1..20: mol_type = other DNA
aagaatatttatagaagaat

SEQ ID NO: 19805 - DNA, 20 bp, synthetic construct
  misc_feature 1..20: note = chemically synthesized
  source 1..20: mol_type = other DNA
agaatatttatagaagaatg

SEQ ID NO: 19806 - DNA, 20 bp, synthetic construct
  misc_feature 1..20: note = chemically synthesized
  source 1..20: mol_type = other DNA
atttatagaagaatgaggta

SEQ ID NO: 19807 - DNA, 20 bp, synthetic construct
  misc_feature 1..20: note = chemically synthesized
  source 1..20: mol_type = other DNA
aaatacacttttataaaatc

SEQ ID NO: 19808 - DNA, 20 bp, synthetic construct
  misc_feature 1..20: note = chemically synthesized
  source 1..20: mol_type = other DNA
ataaaatccagacatcctgc

SEQ ID NO: 19809 - DNA, 20 bp, synthetic construct
  misc_feature 1..20: note = chemically synthesized
  source 1..20: mol_type = other DNA
taaaatccagacatcctgca

SEQ ID NO: 19810 - DNA, 20 bp, synthetic construct
  misc_feature 1..20: note = chemically synthesized
  source 1..20: mol_type = other DNA
ggaatgtattgaaaattaaa

SEQ ID NO: 19811 - DNA, 20 bp, synthetic construct
  misc_feature 1..20: note = chemically synthesized
  source 1..20: mol_type = other DNA
ctcttattgaaatactctgt

SEQ ID NO: 19812 - DNA, 20 bp, synthetic construct
  misc_feature 1..20: note = chemically synthesized
  source 1..20: mol_type = other DNA
aagtgacttacgactgtatt

SEQ ID NO: 19813 - DNA, 20 bp, synthetic construct
  misc_feature 1..20: note = chemically synthesized
  source 1..20: mol_type = other DNA
aaaatattaaatgcaaatca

SEQ ID NO: 19814 - DNA, 20 bp, synthetic construct
  misc_feature 1..20: note = chemically synthesized
  source 1..20: mol_type = other DNA
ttaaatgcaaatcatggccc

SEQ ID NO: 19815 - DNA, 20 bp, synthetic construct
  misc_feature 1..20: note = chemically synthesized
  source 1..20: mol_type = other DNA
aaatgcaaatcatggcccta

SEQ ID NO: 19816 - DNA, 20 bp, synthetic construct
  misc_feature 1..20: note = chemically synthesized
  source 1..20: mol_type = other DNA
atgcaaatcatggccctaga

SEQ ID NO: 19817 - DNA, 20 bp, synthetic construct
  misc_feature 1..20: note = chemically synthesized
  source 1..20: mol_type = other DNA
ccctagagagtaccctaact

SEQ ID NO: 19818 - DNA, 20 bp, synthetic construct
  misc_feature 1..20: note = chemically synthesized
  source 1..20: mol_type = other DNA
cctagagagtaccctaactc

SEQ ID NO: 19819 - DNA, 20 bp, synthetic construct
  misc_feature 1..20: note = chemically synthesized
  source 1..20: mol_type = other DNA
ctagagagtaccctaactca

SEQ ID NO: 19820 - DNA, 20 bp, synthetic construct
  misc_feature 1..20: note = chemically synthesized
  source 1..20: mol_type = other DNA
gagagtaccctaactcaggg

SEQ ID NO: 19821 - DNA, 20 bp, synthetic construct
  misc_feature 1..20: note = chemically synthesized
  source 1..20: mol_type = other DNA
gagtaccctaactcagggta

SEQ ID NO: 19822 - DNA, 20 bp, synthetic construct
  misc_feature 1..20: note = chemically synthesized
  source 1..20: mol_type = other DNA
agtaccctaactcagggtag

SEQ ID NO: 19823 - DNA, 20 bp, synthetic construct
  misc_feature 1..20: note = chemically synthesized
  source 1..20: mol_type = other DNA
ccctaactcagggtagagga

SEQ ID NO: 19824 - DNA, 20 bp, synthetic construct
  misc_feature 1..20: note = chemically synthesized
  source 1..20: mol_type = other DNA
tcagggtagaggacagttaa

SEQ ID NO: 19825 - DNA, 20 bp, synthetic construct
  misc_feature 1..20: note = chemically synthesized
  source 1..20: mol_type = other DNA
accaacacttacttatttaa

SEQ ID NO: 19826 - DNA, 20 bp, synthetic construct
  misc_feature 1..20: note = chemically synthesized
  source 1..20: mol_type = other DNA
taaaagtaaatttaaaatgt

SEQ ID NO: 19827 - DNA, 20 bp, synthetic construct
  misc_feature 1..20: note = chemically synthesized
  source 1..20: mol_type = other DNA
cttatcactatatttgccat

SEQ ID NO: 19828 - DNA, 20 bp, synthetic construct
  misc_feature 1..20: note = chemically synthesized
  source 1..20: mol_type = other DNA
gaataatgaaaattttaaat

SEQ ID NO: 19829 - DNA, 20 bp, synthetic construct
  misc_feature 1..20: note = chemically synthesized
  source 1..20: mol_type = other DNA
tttaaataagaatttatttc

SEQ ID NO: 19830 - DNA, 20 bp, synthetic construct
  misc_feature 1..20: note = chemically synthesized
  source 1..20: mol_type = other DNA
taaataagaatttatttcta

SEQ ID NO: 19831 - DNA, 20 bp, synthetic construct
  misc_feature 1..20: note = chemically synthesized
  source 1..20: mol_type = other DNA
ttttttacacttgtgtgcat

SEQ ID NO: 19832 - DNA, 20 bp, synthetic construct
  misc_feature 1..20: note = chemically synthesized
  source 1..20: mol_type = other DNA
tatgcacaaatgtgcacact

SEQ ID NO: 19833 - DNA, 20 bp, synthetic construct
  misc_feature 1..20: note = chemically synthesized
  source 1..20: mol_type = other DNA
atgcacaaatgtgcacactg

SEQ ID NO: 19834 - DNA, 20 bp, synthetic construct
  misc_feature 1..20: note = chemically synthesized
  source 1..20: mol_type = other DNA
aaatgtgcacactgaggcaa

SEQ ID NO: 19835 - DNA, 20 bp, synthetic construct
  misc_feature 1..20: note = chemically synthesized
  source 1..20: mol_type = other DNA
actgaggcaaaagtttttca

SEQ ID NO: 19836 - DNA, 20 bp, synthetic construct
  misc_feature 1..20: note = chemically synthesized
  source 1..20: mol_type = other DNA
tgaggcaaaagtttttcata

SEQ ID NO: 19837 - DNA, 20 bp, synthetic construct
  misc_feature 1..20: note = chemically synthesized
  source 1..20: mol_type = other DNA
ccttttcctcaaatttcact

SEQ ID NO: 19838 - DNA, 20 bp, synthetic construct
  misc_feature 1..20: note = chemically synthesized
  source 1..20: mol_type = other DNA
cttttcctcaaatttcactg

SEQ ID NO: 19839 - DNA, 20 bp, synthetic construct
  misc_feature 1..20: note = chemically synthesized
  source 1..20: mol_type = other DNA
ttcctcaaatttcactgagg

SEQ ID NO: 19840 - DNA, 20 bp, synthetic construct
  misc_feature 1..20: note = chemically synthesized
  source 1..20: mol_type = other DNA
ttcactgaggtggctaattt

SEQ ID NO: 19841 - DNA, 20 bp, synthetic construct
  misc_feature 1..20: note = chemically synthesized
  source 1..20: mol_type = other DNA
tcactgaggtggctaatttc

SEQ ID NO: 19842 - DNA, 20 bp, synthetic construct
  misc_feature 1..20: note = chemically synthesized
  source 1..20: mol_type = other DNA
ctaatttcaggtgcatttga

SEQ ID NO: 19843 - DNA, 20 bp, synthetic construct
  misc_feature 1..20: note = chemically synthesized
  source 1..20: mol_type = other DNA
atttcaggtgcatttgaaag

SEQ ID NO: 19844 - DNA, 20 bp, synthetic construct
  misc_feature 1..20: note = chemically synthesized
  source 1..20: mol_type = other DNA
ttgaaagaagaatttaaata

SEQ ID NO: 19845 - DNA, 20 bp, synthetic construct
  misc_feature 1..20: note = chemically synthesized
  source 1..20: mol_type = other DNA
aatttaaatatagacttttt

SEQ ID NO: 19846 - DNA, 20 bp, synthetic construct
  misc_feature 1..20: note = chemically synthesized
  source 1..20: mol_type = other DNA
tagactttttcagttccata

SEQ ID NO: 19847 - DNA, 20 bp, synthetic construct
  misc_feature 1..20: note = chemically synthesized
  source 1..20: mol_type = other DNA
tcagttccatatggtctatt

SEQ ID NO: 19848 - DNA, 20 bp, synthetic construct
  misc_feature 1..20: note = chemically synthesized
  source 1..20: mol_type = other DNA
tctattcagtgttctgtcac

SEQ ID NO: 19849 - DNA, 20 bp, synthetic construct
  misc_feature 1..20: note = chemically synthesized
  source 1..20: mol_type = other DNA
tctgtcaccagacttctcct

SEQ ID NO: 19850 - DNA, 20 bp, synthetic construct
  misc_feature 1..20: note = chemically synthesized
  source 1..20: mol_type = other DNA
aagatatgcccccaacccta

SEQ ID NO: 19851 - DNA, 20 bp, synthetic construct
  misc_feature 1..20: note = chemically synthesized
  source 1..20: mol_type = other DNA
atgcccccaaccctatggta

SEQ ID NO: 19852 - DNA, 20 bp, synthetic construct
  misc_feature 1..20: note = chemically synthesized
  source 1..20: mol_type = other DNA
aaccctatggtaaagtactt

SEQ ID NO: 19853 - DNA, 20 bp, synthetic construct
  misc_feature 1..20: note = chemically synthesized
  source 1..20: mol_type = other DNA
taaagtacttaagtccttgt

SEQ ID NO: 19854 - DNA, 20 bp, synthetic construct
  misc_feature 1..20: note = chemically synthesized
  source 1..20: mol_type = other DNA
tgagtgacaacattgtcttc

SEQ ID NO: 19855 - DNA, 20 bp, synthetic construct
  misc_feature 1..20: note = chemically synthesized
  source 1..20: mol_type = other DNA
gtatacccttgctctttgct

SEQ ID NO: 19856 - DNA, 20 bp, synthetic construct
  misc_feature 1..20: note = chemically synthesized
  source 1..20: mol_type = other DNA
acccttgctctttgctaaga

SEQ ID NO: 19857 - DNA, 20 bp, synthetic construct
  misc_feature 1..20: note = chemically synthesized
  source 1..20: mol_type = other DNA
tctttgctaagaaagaactc

SEQ ID NO: 19858 - DNA, 20 bp, synthetic construct
  misc_feature 1..20: note = chemically synthesized
  source 1..20: mol_type = other DNA
ctttgctaagaaagaactcc

SEQ ID NO: 19859 - DNA, 20 bp, synthetic construct
  misc_feature 1..20: note = chemically synthesized
  source 1..20: mol_type = other DNA
caggctttcatttttcattc

SEQ ID NO: 19860 - DNA, 20 bp, synthetic construct
  misc_feature 1..20: note = chemically synthesized
  source 1..20: mol_type = other DNA
tatgtctgtgtctgattctc

SEQ ID NO: 19861 - DNA, 20 bp, synthetic construct
  misc_feature 1..20: note = chemically synthesized
  source 1..20: mol_type = other DNA
gtgtctgattctccagatcc

SEQ ID NO: 19862 - DNA, 20 bp, synthetic construct
  misc_feature 1..20: note = chemically synthesized
  source 1..20: mol_type = other DNA
ttaactactaaacctatgtt

SEQ ID NO: 19863 - DNA, 20 bp, synthetic construct
  misc_feature 1..20: note = chemically synthesized
  source 1..20: mol_type = other DNA
ctaaacctatgtttagataa

SEQ ID NO: 19864 - DNA, 20 bp, synthetic construct
  misc_feature 1..20: note = chemically synthesized
  source 1..20: mol_type = other DNA
taaacctatgtttagataaa

SEQ ID NO: 19865 - DNA, 20 bp, synthetic construct
  misc_feature 1..20: note = chemically synthesized
  source 1..20: mol_type = other DNA
acctatgtttagataaaagg

SEQ ID NO: 19866 - DNA, 20 bp, synthetic construct
  misc_feature 1..20: note = chemically synthesized
  source 1..20: mol_type = other DNA
aatgccatattgtatttgct

SEQ ID NO: 19867 - DNA, 20 bp, synthetic construct
  misc_feature 1..20: note = chemically synthesized
  source 1..20: mol_type = other DNA
tttgcttggttttgatgctg

SEQ ID NO: 19868 - DNA, 20 bp, synthetic construct
  misc_feature 1..20: note = chemically synthesized
  source 1..20: mol_type = other DNA
ggttttgatgctgtagatga

SEQ ID NO: 19869 - DNA, 20 bp, synthetic construct
  misc_feature 1..20: note = chemically synthesized
  source 1..20: mol_type = other DNA
gttttgatgctgtagatgac

SEQ ID NO: 19870 - DNA, 20 bp, synthetic construct
  misc_feature 1..20: note = chemically synthesized
  source 1..20: mol_type = other DNA
ttttgatgctgtagatgaca

SEQ ID NO: 19871 - DNA, 20 bp, synthetic construct
  misc_feature 1..20: note = chemically synthesized
  source 1..20: mol_type = other DNA
gtagatgacagggttcatta

SEQ ID NO: 19872 - DNA, 20 bp, synthetic construct
  misc_feature 1..20: note = chemically synthesized
  source 1..20: mol_type = other DNA
tagatgacagggttcattaa

SEQ ID NO: 19873 - DNA, 20 bp, synthetic construct
  misc_feature 1..20: note = chemically synthesized
  source 1..20: mol_type = other DNA
gatgacagggttcattaaag

SEQ ID NO: 19874 - DNA, 20 bp, synthetic construct
  misc_feature 1..20: note = chemically synthesized
  source 1..20: mol_type = other DNA
atgacagggttcattaaagg

SEQ ID NO: 19875 - DNA, 20 bp, synthetic construct
  misc_feature 1..20: note = chemically synthesized
  source 1..20: mol_type = other DNA
cagggttcattaaaggagga

SEQ ID NO: 19876 - DNA, 20 bp, synthetic construct
  misc_feature 1..20: note = chemically synthesized
  source 1..20: mol_type = other DNA
gggttcattaaaggaggaaa

SEQ ID NO: 19877 - DNA, 20 bp, synthetic construct
  misc_feature 1..20: note = chemically synthesized
  source 1..20: mol_type = other DNA
ggttcattaaaggaggaaag

SEQ ID NO: 19878 - DNA, 20 bp, synthetic construct
  misc_feature 1..20: note = chemically synthesized
  source 1..20: mol_type = other DNA
tcattaaaggaggaaagagg

SEQ ID NO: 19879 - DNA, 20 bp, synthetic construct
  misc_feature 1..20: note = chemically synthesized
  source 1..20: mol_type = other DNA
ttaaaggaggaaagaggaag

SEQ ID NO: 19880 - DNA, 20 bp, synthetic construct
  misc_feature 1..20: note = chemically synthesized
  source 1..20: mol_type = other DNA
agatgtaactcatgataatg

SEQ ID NO: 19881 - DNA, 20 bp, synthetic construct
  misc_feature 1..20: note = chemically synthesized
  source 1..20: mol_type = other DNA
atgataatgtggacaacctc

SEQ ID NO: 19882 - DNA, 20 bp, synthetic construct
  misc_feature 1..20: note = chemically synthesized
  source 1..20: mol_type = other DNA
tcaaacccatcactgtaaca

SEQ ID NO: 19883 - DNA, 20 bp, synthetic construct
  misc_feature 1..20: note = chemically synthesized
  source 1..20: mol_type = other DNA
aacccatcactgtaacatag

SEQ ID NO: 19884 - DNA, 20 bp, synthetic construct
  misc_feature 1..20: note = chemically synthesized
  source 1..20: mol_type = other DNA
atcactgtaacatagaagat

SEQ ID NO: 19885 - DNA, 20 bp, synthetic construct
  misc_feature 1..20: note = chemically synthesized
  source 1..20: mol_type = other DNA
agataagaacacaactaatg

SEQ ID NO: 19886 - DNA, 20 bp, synthetic construct
  misc_feature 1..20: note = chemically synthesized
  source 1..20: mol_type = other DNA
gataagaacacaactaatgt

SEQ ID NO: 19887 - DNA, 20 bp, synthetic construct
  misc_feature 1..20: note = chemically synthesized
  source 1..20: mol_type = other DNA
taagaacacaactaatgtgg

SEQ ID NO: 19888 - DNA, 20 bp, synthetic construct
  misc_feature 1..20: note = chemically synthesized
  source 1..20: mol_type = other DNA
cacaactaatgtgggagata

SEQ ID NO: 19889 - DNA, 20 bp, synthetic construct
  misc_feature 1..20: note = chemically synthesized
  source 1..20: mol_type = other DNA
acaactaatgtgggagatac

SEQ ID NO: 19890 - DNA, 20 bp, synthetic construct
  misc_feature 1..20: note = chemically synthesized
  source 1..20: mol_type = other DNA
atgtgggagatacaggtatt

SEQ ID NO: 19891 - DNA, 20 bp, synthetic construct
  misc_feature 1..20: note = chemically synthesized
  source 1..20: mol_type = other DNA
tgtgggagatacaggtattg

SEQ ID NO: 19892 - DNA, 20 bp, synthetic construct
  misc_feature 1..20: note = chemically synthesized
  source 1..20: mol_type = other DNA
gtgggagatacaggtattga

SEQ ID NO: 19893 - DNA, 20 bp, synthetic construct
  misc_feature 1..20: note = chemically synthesized
  source 1..20: mol_type = other DNA
gatacaggtattgagggctt

SEQ ID NO: 19894 - DNA, 20 bp, synthetic construct
  misc_feature 1..20: note = chemically synthesized
  source 1..20: mol_type = other DNA
ggctttggctctctcttcac

SEQ ID NO: 19895 - DNA, 20 bp, synthetic construct
  misc_feature 1..20: note = chemically synthesized
  source 1..20: mol_type = other DNA
tttggctctctcttcaccag

SEQ ID NO: 19896 - DNA, 20 bp, synthetic construct
  misc_feature 1..20: note = chemically synthesized
  source 1..20: mol_type = other DNA
accagaagcaatgcctatga

SEQ ID NO: 19897 - DNA, 20 bp, synthetic construct
  misc_feature 1..20: note = chemically synthesized
  source 1..20: mol_type = other DNA
gcaatgcctatgacagtatt

SEQ ID NO: 19898 - DNA, 20 bp, synthetic construct
  misc_feature 1..20: note = chemically synthesized
  source 1..20: mol_type = other DNA
cctatgacagtattaagaat

SEQ ID NO: 19899 - DNA, 20 bp, synthetic construct
  misc_feature 1..20: note = chemically synthesized
  source 1..20: mol_type = other DNA
cagtattaagaattagaata

SEQ ID NO: 19900 - DNA, 20 bp, synthetic construct
  misc_feature 1..20: note = chemically synthesized
  source 1..20: mol_type = other DNA
agtattaagaattagaatat

SEQ ID NO: 19901 - DNA, 20 bp, synthetic construct
  misc_feature 1..20: note = chemically synthesized
  source 1..20: mol_type = other DNA
tattaagaattagaatatag

SEQ ID NO: 19902 - DNA, 20 bp, synthetic construct
  misc_feature 1..20: note = chemically synthesized
  source 1..20: mol_type = other DNA
taagaattagaatataggag

SEQ ID NO: 19903 - DNA, 20 bp, synthetic construct
  misc_feature 1..20: note = chemically synthesized
  source 1..20: mol_type = other DNA
agaattagaatataggagaa

SEQ ID NO: 19904 - DNA, 20 bp, synthetic construct
  misc_feature 1..20: note = chemically synthesized
  source 1..20: mol_type = other DNA
gaattagaatataggagaag

SEQ ID NO: 19905 - DNA, 20 bp, synthetic construct
  misc_feature 1..20: note = chemically synthesized
  source 1..20: mol_type = other DNA
atataggagaagaggatgat

SEQ ID NO: 19906 - DNA, 20 bp, synthetic construct
  misc_feature 1..20: note = chemically synthesized
  source 1..20: mol_type = other DNA
aggagaagaggatgatcaga

SEQ ID NO: 19907 - DNA, 20 bp, synthetic construct
  misc_feature 1..20: note = chemically synthesized
  source 1..20: mol_type = other DNA
aagaggatgatcagacagtc

SEQ ID NO: 19908 - DNA, 20 bp, synthetic construct
  misc_feature 1..20: note = chemically synthesized
  source 1..20: mol_type = other DNA
agaggatgatcagacagtct

SEQ ID NO: 19909 - DNA, 20 bp, synthetic construct
  misc_feature 1..20: note = chemically synthesized
  source 1..20: mol_type = other DNA
ggatgatcagacagtctagg

SEQ ID NO: 19910 - DNA, 20 bp, synthetic construct
  misc_feature 1..20: note = chemically synthesized
  source 1..20: mol_type = other DNA
acagtctaggaagattgtta

SEQ ID NO: 19911 - DNA, 20 bp, synthetic construct
  misc_feature 1..20: note = chemically synthesized
  source 1..20: mol_type = other DNA
agtctaggaagattgttaaa

SEQ ID NO: 19912 - DNA, 20 bp, synthetic construct
  misc_feature 1..20: note = chemically synthesized
  source 1..20: mol_type = other DNA
tgttaaagagatcaaaatta

SEQ ID NO: 19913 - DNA, 20 bp, synthetic construct
  misc_feature 1..20: note = chemically synthesized
  source 1..20: mol_type = other DNA
gttaaagagatcaaaattac

SEQ ID NO: 19914 - DNA, 20 bp, synthetic construct
  misc_feature 1..20: note = chemically synthesized
  source 1..20: mol_type = other DNA
ttaaagagatcaaaattaca

SEQ ID NO: 19915 - DNA, 20 bp, synthetic construct
  misc_feature 1..20: note = chemically synthesized
  source 1..20: mol_type = other DNA
gagatcaaaattacagggta

SEQ ID NO: 19916 - DNA, 20 bp, synthetic construct
  misc_feature 1..20: note = chemically synthesized
  source 1..20: mol_type = other DNA
tacagggtaaagtctattga

SEQ ID NO: 19917 - DNA, 20 bp, synthetic construct
  misc_feature 1..20: note = chemically synthesized
  source 1..20: mol_type = other DNA
aagtctattgaaagttatgt

SEQ ID NO: 19918 - DNA, 20 bp, synthetic construct
  misc_feature 1..20: note = chemically synthesized
  source 1..20: mol_type = other DNA
attgaaagttatgtcagcac

SEQ ID NO: 19919 - DNA, 20 bp, synthetic construct
  misc_feature 1..20: note = chemically synthesized
  source 1..20: mol_type = other DNA
aaagttatgtcagcacaagc

SEQ ID NO: 19920 - DNA, 20 bp, synthetic construct
  misc_feature 1..20: note = chemically synthesized
  source 1..20: mol_type = other DNA
aagccagtctcatgatttct

SEQ ID NO: 19921 - DNA, 20 bp, synthetic construct
  misc_feature 1..20: note = chemically synthesized
  source 1..20: mol_type = other DNA
ccagtctcatgatttcttgg

SEQ ID NO: 19922 - DNA, 20 bp, synthetic construct
  misc_feature 1..20: note = chemically synthesized
  source 1..20: mol_type = other DNA
agtctcatgatttcttggtg

SEQ ID NO: 19923 - DNA, 20 bp, synthetic construct
  misc_feature 1..20: note = chemically synthesized
  source 1..20: mol_type = other DNA
gtctcatgatttcttggtgg

SEQ ID NO: 19924 - DNA, 20 bp, synthetic construct
  misc_feature 1..20: note = chemically synthesized
  source 1..20: mol_type = other DNA
tcatgatttcttggtggagg

SEQ ID NO: 19925 - DNA, 20 bp, synthetic construct
  misc_feature 1..20: note = chemically synthesized
  source 1..20: mol_type = other DNA
gatttcttggtggaggcaga

SEQ ID NO: 19926 - DNA, 20 bp, synthetic construct
  misc_feature 1..20: note = chemically synthesized
  source 1..20: mol_type = other DNA
gaaagcacgtgtgataacat

SEQ ID NO: 19927 - DNA, 20 bp, synthetic construct
  misc_feature 1..20: note = chemically synthesized
  source 1..20: mol_type = other DNA
ttgcaatatgaaaatgaaaa

SEQ ID NO: 19928 - DNA, 20 bp, synthetic construct
  misc_feature 1..20: note = chemically synthesized
  source 1..20: mol_type = other DNA
tgaaaaaagacgcaaaatta

SEQ ID NO: 19929 - DNA, 20 bp, synthetic construct
  misc_feature 1..20: note = chemically synthesized
  source 1..20: mol_type = other DNA
gaaaaaagacgcaaaattac

SEQ ID NO: 19930 - DNA, 20 bp, synthetic construct
  misc_feature 1..20: note = chemically synthesized
  source 1..20: mol_type = other DNA
aaaagacgcaaaattacagg

SEQ ID NO: 19931 - DNA, 20 bp, synthetic construct
  misc_feature 1..20: note = chemically synthesized
  source 1..20: mol_type = other DNA
aaagacgcaaaattacaggc

SEQ ID NO: 19932 - DNA, 20 bp, synthetic construct
  misc_feature 1..20: note = chemically synthesized
  source 1..20: mol_type = other DNA
acgcaaaattacaggcagga

SEQ ID NO: 19933 - DNA, 20 bp, synthetic construct
  misc_feature 1..20: note = chemically synthesized
  source 1..20: mol_type = other DNA
aggatggatacaaaacccct

SEQ ID NO: 19934 - DNA, 20 bp, synthetic construct
  misc_feature 1..20: note = chemically synthesized
  source 1..20: mol_type = other DNA
cactcctaacgctatgactc

SEQ ID NO: 19935 - DNA, 20 bp, synthetic construct
  misc_feature 1..20: note = chemically synthesized
  source 1..20: mol_type = other DNA
taacgctatgactctagtat

SEQ ID NO: 19936 - DNA, 20 bp, synthetic construct
  misc_feature 1..20: note = chemically synthesized
  source 1..20: mol_type = other DNA
gctatgactctagtattggt

SEQ ID NO: 19937 - DNA, 20 bp, synthetic construct
  misc_feature 1..20: note = chemically synthesized
  source 1..20: mol_type = other DNA
gactctagtattggtgagaa

SEQ ID NO: 19938 - DNA, 20 bp, synthetic construct
  misc_feature 1..20: note = chemically synthesized
  source 1..20: mol_type = other DNA
tctagtattggtgagaatgg

SEQ ID NO: 19939 - DNA, 20 bp, synthetic construct
  misc_feature 1..20: note = chemically synthesized
  source 1..20: mol_type = other DNA
gagaatggaagcatatctca

SEQ ID NO: 19940 - DNA, 20 bp, synthetic construct
  misc_feature 1..20: note = chemically synthesized
  source 1..20: mol_type = other DNA
agaatggaagcatatctcaa

SEQ ID NO: 19941 - DNA, 20 bp, synthetic construct
  misc_feature 1..20: note = chemically synthesized
  source 1..20: mol_type = other DNA
aagcatatctcaaaggattg

SEQ ID NO: 19942 - DNA, 20 bp, synthetic construct
  misc_feature 1..20: note = chemically synthesized
  source 1..20: mol_type = other DNA
atatctcaaaggattgcgga

SEQ ID NO: 19943 - DNA, 20 bp, synthetic construct
  misc_feature 1..20: note = chemically synthesized
  source 1..20: mol_type = other DNA
aaacaatcatatgccattgc

SEQ ID NO: 19944 - DNA, 20 bp, synthetic construct
  misc_feature 1..20: note = chemically synthesized
  source 1..20: mol_type = other DNA
aacaatcatatgccattgcc

SEQ ID NO: 19945 - DNA, 20 bp, synthetic construct
  misc_feature 1..20: note = chemically synthesized
  source 1..20: mol_type = other DNA
caatcatatgccattgccag

SEQ ID NO: 19946 - DNA, 20 bp, synthetic construct
  misc_feature 1..20: note = chemically synthesized
  source 1..20: mol_type = other DNA
aatcatatgccattgccagg

SEQ ID NO: 19947 - DNA, 20 bp, synthetic construct
  misc_feature 1..20: note = chemically synthesized
  source 1..20: mol_type = other DNA
atcatatgccattgccagga

SEQ ID NO: 19948 - DNA, 20 bp, synthetic construct
  misc_feature 1..20: note = chemically synthesized
  source 1..20: mol_type = other DNA
gagggaacctgattccacaa

SEQ ID NO: 19949 - DNA, 20 bp, synthetic construct
  misc_feature 1..20: note = chemically synthesized
  source 1..20: mol_type = other DNA
gaacctgattccacaacaga

SEQ ID NO: 19950 - DNA, 20 bp, synthetic construct
  misc_feature 1..20: note = chemically synthesized
  source 1..20: mol_type = other DNA
aacctgattccacaacagaa

SEQ ID NO: 19951 - DNA, 20 bp, synthetic construct
  misc_feature 1..20: note = chemically synthesized
  source 1..20: mol_type = other DNA
acctgattccacaacagaaa

SEQ ID NO: 19952 - DNA, 20 bp, synthetic construct
  misc_feature 1..20: note = chemically synthesized
  source 1..20: mol_type = other DNA
ctgattccacaacagaaagg

SEQ ID NO: 19953 - DNA, 20 bp, synthetic construct
  misc_feature 1..20: note = chemically synthesized
  source 1..20: mol_type = other DNA
caacagaaagggagtgaata

SEQ ID NO: 19954 - DNA, 20 bp, synthetic construct
  misc_feature 1..20: note = chemically synthesized
  source 1..20: mol_type = other DNA
agaaagggagtgaataaagt

SEQ ID NO: 19955 - DNA, 20 bp, synthetic construct
  misc_feature 1..20: note = chemically synthesized
  source 1..20: mol_type = other DNA
gagtgaataaagtaagcctg

SEQ ID NO: 19956 - DNA, 20 bp, synthetic construct
  misc_feature 1..20: note = chemically synthesized
  source 1..20: mol_type = other DNA
agtgaataaagtaagcctgt

SEQ ID NO: 19957 - DNA, 20 bp, synthetic construct
  misc_feature 1..20: note = chemically synthesized
  source 1..20: mol_type = other DNA
gaataaagtaagcctgtagg

SEQ ID NO: 19958 - DNA, 20 bp, synthetic construct
  misc_feature 1..20: note = chemically synthesized
  source 1..20: mol_type = other DNA
taaagtaagcctgtaggaag

SEQ ID NO: 19959 - DNA, 20 bp, synthetic construct
  misc_feature 1..20: note = chemically synthesized
  source 1..20: mol_type = other DNA
atctccctgtgattcaccca

SEQ ID NO: 19960 - DNA, 20 bp, synthetic construct
  misc_feature 1..20: note = chemically synthesized
  source 1..20: mol_type = other DNA
tctccctgtgattcacccat

SEQ ID NO: 19961 - DNA, 20 bp, synthetic construct
  misc_feature 1..20: note = chemically synthesized
  source 1..20: mol_type = other DNA
cacccataggatgcccatta

SEQ ID NO: 19962 - DNA, 20 bp, synthetic construct
  misc_feature 1..20: note = chemically synthesized
  source 1..20: mol_type = other DNA
ccataggatgcccattacag

SEQ ID NO: 19963 - DNA, 20 bp, synthetic construct
  misc_feature 1..20: note = chemically synthesized
  source 1..20: mol_type = other DNA
cataggatgcccattacagt

SEQ ID NO: 19964 - DNA, 20 bp, synthetic construct
  misc_feature 1..20: note = chemically synthesized
  source 1..20: mol_type = other DNA
gcccattacagtaggcatcg

SEQ ID NO: 19965 - DNA, 20 bp, synthetic construct
  misc_feature 1..20: note = chemically synthesized
  source 1..20: mol_type = other DNA
atcgtggtcaatgtcaccat

SEQ ID NO: 19966 - DNA, 20 bp, synthetic construct
  misc_feature 1..20: note = chemically synthesized
  source 1..20: mol_type = other DNA
tcgtggtcaatgtcaccatg

SEQ ID NO: 19967 - DNA, 20 bp, synthetic construct
  misc_feature 1..20: note = chemically synthesized
  source 1..20: mol_type = other DNA
accatgaggtctgtgcctgc

SEQ ID NO: 19968 - DNA, 20 bp, synthetic construct
  misc_feature 1..20: note = chemically synthesized
  source 1..20: mol_type = other DNA
gaggtctgtgcctgccagca

SEQ ID NO: 19969 - DNA, 20 bp, synthetic construct
  misc_feature 1..20: note = chemically synthesized
  source 1..20: mol_type = other DNA
tctgtgcctgccagcatggt

SEQ ID NO: 19970 - DNA, 20 bp, synthetic construct
  misc_feature 1..20: note = chemically synthesized
  source 1..20: mol_type = other DNA
ctgtgcctgccagcatggtg

SEQ ID NO: 19971 - DNA, 20 bp, synthetic construct
  misc_feature 1..20: note = chemically synthesized
  source 1..20: mol_type = other DNA
tgcctgccagcatggtgagg

SEQ ID NO: 19972 - DNA, 20 bp, synthetic construct
  misc_feature 1..20: note = chemically synthesized
  source 1..20: mol_type = other DNA
ctgccagcatggtgaggaag

SEQ ID NO: 19973 - DNA, 20 bp, synthetic construct
  misc_feature 1..20: note = chemically synthesized
  source 1..20: mol_type = other DNA
catggtgaggaagtagtaca

SEQ ID NO: 19974 - DNA, 20 bp, synthetic construct
  misc_feature 1..20: note = chemically synthesized
  source 1..20: mol_type = other DNA
atggtgaggaagtagtacat

SEQ ID NO: 19975 - DNA, 20 bp, synthetic construct
  misc_feature 1..20: note = chemically synthesized
  source 1..20: mol_type = other DNA
aagtagtacatgggctcatg

SEQ ID NO: 19976 - DNA, 20 bp, synthetic construct
  misc_feature 1..20: note = chemically synthesized
  source 1..20: mol_type = other DNA
acatgggctcatgaagactg

SEQ ID NO: 19977 - DNA, 20 bp, synthetic construct
  misc_feature 1..20: note = chemically synthesized
  source 1..20: mol_type = other DNA
agactgtggtcatgcttgat

SEQ ID NO: 19978 - DNA, 20 bp, synthetic construct
  misc_feature 1..20: note = chemically synthesized
  source 1..20: mol_type = other DNA
gactgtggtcatgcttgatg

SEQ ID NO: 19979 - DNA, 20 bp, synthetic construct
  misc_feature 1..20: note = chemically synthesized
  source 1..20: mol_type = other DNA
tgtggtcatgcttgatgagg

SEQ ID NO: 19980 - DNA, 20 bp, synthetic construct
  misc_feature 1..20: note = chemically synthesized
  source 1..20: mol_type = other DNA
tggtcatgcttgatgaggta

SEQ ID NO: 19981 - DNA, 20 bp, synthetic construct
  misc_feature 1..20: note = chemically synthesized
  source 1..20: mol_type = other DNA
ggtcatgcttgatgaggtag

SEQ ID NO: 19982 - DNA, 20 bp, synthetic construct
  misc_feature 1..20: note = chemically synthesized
  source 1..20: mol_type = other DNA
tcatgcttgatgaggtagag

SEQ ID NO: 19983 - DNA, 20 bp, synthetic construct
  misc_feature 1..20: note = chemically synthesized
  source 1..20: mol_type = other DNA
tagaggagcatgccattgcc

SEQ ID NO: 19984 - DNA, 20 bp, synthetic construct
  misc_feature 1..20: note = chemically synthesized
  source 1..20: mol_type = other DNA
aggagcatgccattgcccag

SEQ ID NO: 19985 - DNA, 20 bp, synthetic construct
  misc_feature 1..20: note = chemically synthesized
  source 1..20: mol_type = other DNA
ggagcatgccattgcccaga

SEQ ID NO: 19986 - DNA, 20 bp, synthetic construct
  misc_feature 1..20: note = chemically synthesized
  source 1..20: mol_type = other DNA
cagaaggatgcacacataaa

SEQ ID NO: 19987 - DNA, 20 bp, synthetic construct
  misc_feature 1..20: note = chemically synthesized
  source 1..20: mol_type = other DNA
ggatgcacacataaacagca

SEQ ID NO: 19988 - DNA, 20 bp, synthetic construct
  misc_feature 1..20: note = chemically synthesized
  source 1..20: mol_type = other DNA
tgcacacataaacagcaaag

SEQ ID NO: 19989 - DNA, 20 bp, synthetic construct
  misc_feature 1..20: note = chemically synthesized
  source 1..20: mol_type = other DNA
gcacacataaacagcaaaga

SEQ ID NO: 19990 - DNA, 20 bp, synthetic construct
  misc_feature 1..20: note = chemically synthesized
  source 1..20: mol_type = other DNA
cacacataaacagcaaagaa

SEQ ID NO: 19991 - DNA, 20 bp, synthetic construct
  misc_feature 1..20: note = chemically synthesized
  source 1..20: mol_type = other DNA
acacataaacagcaaagaag

SEQ ID NO: 19992 - DNA, 20 bp, synthetic construct
  misc_feature 1..20: note = chemically synthesized
  source 1..20: mol_type = other DNA
ataaacagcaaagaagggga

SEQ ID NO: 19993 - DNA, 20 bp, synthetic construct
  misc_feature 1..20: note = chemically synthesized
  source 1..20: mol_type = other DNA
aaacagcaaagaaggggatg

SEQ ID NO: 19994 - DNA, 20 bp, synthetic construct
  misc_feature 1..20: note = chemically synthesized
  source 1..20: mol_type = other DNA
caaagaaggggatggagatc

SEQ ID NO: 19995 - DNA, 20 bp, synthetic construct
  misc_feature 1..20: note = chemically synthesized
  source 1..20: mol_type = other DNA
ggggatggagatccagtgat

SEQ ID NO: 19996 - DNA, 20 bp, synthetic construct
  misc_feature 1..20: note = chemically synthesized
  source 1..20: mol_type = other DNA
atccagtgatgagctgcctc

SEQ ID NO: 19997 - DNA, 20 bp, synthetic construct
  misc_feature 1..20: note = chemically synthesized
  source 1..20: mol_type = other DNA
tgatgagctgcctccagccc

SEQ ID NO: 19998 - DNA, 20 bp, synthetic construct
  misc_feature 1..20: note = chemically synthesized
  source 1..20: mol_type = other DNA
gagctgcctccagccctgga

SEQ ID NO: 19999 - DNA, 20 bp, synthetic construct
  misc_feature 1..20: note = chemically synthesized
  source 1..20: mol_type = other DNA
tgcctccagccctggaaagc

SEQ ID NO: 20000 - DNA, 20 bp, synthetic construct
  misc_feature 1..20: note = chemically synthesized
  source 1..20: mol_type = other DNA
tccagccctggaaagccagt

SEQ ID NO: 20001 - DNA, 20 bp, synthetic construct
  misc_feature 1..20: note = chemically synthesized
  source 1..20: mol_type = other DNA
tggaaagccagtcagcaaaa

SEQ ID NO: 20002 - DNA, 20 bp, synthetic construct
  misc_feature 1..20: note = chemically synthesized
  source 1..20: mol_type = other DNA
ggaaagccagtcagcaaaaa

SEQ ID NO: 20003 - DNA, 20 bp, synthetic construct
  misc_feature 1..20: note = chemically synthesized
  source 1..20: mol_type = other DNA
gaaagccagtcagcaaaaaa

SEQ ID NO: 20004 - DNA, 20 bp, synthetic construct
  misc_feature 1..20: note = chemically synthesized
  source 1..20: mol_type = other DNA
aaagccagtcagcaaaaaag

SEQ ID NO: 20005 - DNA, 20 bp, synthetic construct
  misc_feature 1..20: note = chemically synthesized
  source 1..20: mol_type = other DNA
agtcagcaaaaaaggggctg

SEQ ID NO: 20006 - DNA, 20 bp, synthetic construct
  misc_feature 1..20: note = chemically synthesized
  source 1..20: mol_type = other DNA
aaaaggggctgcagtaatat

SEQ ID NO: 20007 - DNA, 20 bp, synthetic construct
  misc_feature 1..20: note = chemically synthesized
  source 1..20: mol_type = other DNA
aaaggggctgcagtaatatt

SEQ ID NO: 20008 - DNA, 20 bp, synthetic construct
  misc_feature 1..20: note = chemically synthesized
  source 1..20: mol_type = other DNA
tgcagtaatattgggccaca

SEQ ID NO: 20009 - DNA, 20 bp, synthetic construct
  misc_feature 1..20: note = chemically synthesized
  source 1..20: mol_type = other DNA
gggccacatagtgtatccac

SEQ ID NO: 20010 - DNA, 20 bp, synthetic construct
  misc_feature 1..20: note = chemically synthesized
  source 1..20: mol_type = other DNA
acatagtgtatccaccggta

SEQ ID NO: 20011 - DNA, 20 bp, synthetic construct
  misc_feature 1..20: note = chemically synthesized
  source 1..20: mol_type = other DNA
gtgtatccaccggtaaagat

SEQ ID NO: 20012 - DNA, 20 bp, synthetic construct
  misc_feature 1..20: note = chemically synthesized
  source 1..20: mol_type = other DNA
atttcttgaaaccttgaaac

SEQ ID NO: 20013 - DNA, 20 bp, synthetic construct
  misc_feature 1..20: note = chemically synthesized
  source 1..20: mol_type = other DNA
tttcttgaaaccttgaaacc

SEQ ID NO: 20014 - DNA, 20 bp, synthetic construct
  misc_feature 1..20: note = chemically synthesized
  source 1..20: mol_type = other DNA
tcttgaaaccttgaaaccag

SEQ ID NO: 20015 - DNA, 20 bp, synthetic construct
  misc_feature 1..20: note = chemically synthesized
  source 1..20: mol_type = other DNA
gagcctccaatcttcctgct

SEQ ID NO: 20016 - DNA, 20 bp, synthetic construct
  misc_feature 1..20: note = chemically synthesized
  source 1..20: mol_type = other DNA
gcctccaatcttcctgcttg

SEQ ID NO: 20017 - DNA, 20 bp, synthetic construct
  misc_feature 1..20: note = chemically synthesized
  source 1..20: mol_type = other DNA
cctgcttggagatgattaac

SEQ ID NO: 20018 - DNA, 20 bp, synthetic construct
  misc_feature 1..20: note = chemically synthesized
  source 1..20: mol_type = other DNA
actctgcaactattttcctg

SEQ ID NO: 20019 - DNA, 20 bp, synthetic construct
  misc_feature 1..20: note = chemically synthesized
  source 1..20: mol_type = other DNA
ctgcaactattttcctgaag

SEQ ID NO: 20020 - DNA, 20 bp, synthetic construct
  misc_feature 1..20: note = chemically synthesized
  source 1..20: mol_type = other DNA
actattttcctgaagaagaa

SEQ ID NO: 20021 - DNA, 20 bp, synthetic construct
  misc_feature 1..20: note = chemically synthesized
  source 1..20: mol_type = other DNA
ctgaagaagaatagcatgta

SEQ ID NO: 20022 - DNA, 20 bp, synthetic construct
  misc_feature 1..20: note = chemically synthesized
  source 1..20: mol_type = other DNA
agaatagcatgtacagacta

SEQ ID NO: 20023 - DNA, 20 bp, synthetic construct
  misc_feature 1..20: note = chemically synthesized
  source 1..20: mol_type = other DNA
actatggttttttccctaat

SEQ ID NO: 20024 - DNA, 20 bp, synthetic construct
  misc_feature 1..20: note = chemically synthesized
  source 1..20: mol_type = other DNA
ccctaattagaaaaaatact

SEQ ID NO: 20025 - DNA, 20 bp, synthetic construct
  misc_feature 1..20: note = chemically synthesized
  source 1..20: mol_type = other DNA
tagaaaaaatactgagttaa

SEQ ID NO: 20026 - DNA, 20 bp, synthetic construct
  misc_feature 1..20: note = chemically synthesized
  source 1..20: mol_type = other DNA
atattatccgcaactatttt

SEQ ID NO: 20027 - DNA, 20 bp, synthetic construct
  misc_feature 1..20: note = chemically synthesized
  source 1..20: mol_type = other DNA
tattatccgcaactattttg

SEQ ID NO: 20028 - DNA, 20 bp, synthetic construct
  misc_feature 1..20: note = chemically synthesized
  source 1..20: mol_type = other DNA
attatccgcaactattttga

SEQ ID NO: 20029 - DNA, 20 bp, synthetic construct
  misc_feature 1..20: note = chemically synthesized
  source 1..20: mol_type = other DNA
cttataaatatttgcaacaa

SEQ ID NO: 20030 - DNA, 20 bp, synthetic construct
  misc_feature 1..20: note = chemically synthesized
  source 1..20: mol_type = other DNA
ataacataaatatacataaa

SEQ ID NO: 20031 - DNA, 20 bp, synthetic construct
  misc_feature 1..20: note = chemically synthesized
  source 1..20: mol_type = other DNA
tacataaatggataataatc

SEQ ID NO: 20032 - DNA, 20 bp, synthetic construct
  misc_feature 1..20: note = chemically synthesized
  source 1..20: mol_type = other DNA
aaatggataataatctggct

SEQ ID NO: 20033 - DNA, 20 bp, synthetic construct
  misc_feature 1..20: note = chemically synthesized
  source 1..20: mol_type = other DNA
tgctgtgattactgaccatt

SEQ ID NO: 20034 - DNA, 20 bp, synthetic construct
  misc_feature 1..20: note = chemically synthesized
  source 1..20: mol_type = other DNA
tacatttcacgattatgatg

SEQ ID NO: 20035 - DNA, 20 bp, synthetic construct
  misc_feature 1..20: note = chemically synthesized
  source 1..20: mol_type = other DNA
tttcacgattatgatgaaga

SEQ ID NO: 20036 - DNA, 20 bp, synthetic construct
  misc_feature 1..20: note = chemically synthesized
  source 1..20: mol_type = other DNA
tatgatgaagacagtttttt

SEQ ID NO: 20037 - DNA, 20 bp, synthetic construct
  misc_feature 1..20: note = chemically synthesized
  source 1..20: mol_type = other DNA
gacagttttttcagttaatg

SEQ ID NO: 20038 - DNA, 20 bp, synthetic construct
  misc_feature 1..20: note = chemically synthesized
  source 1..20: mol_type = other DNA
gcagtttttctcattttttt

SEQ ID NO: 20039 - DNA, 20 bp, synthetic construct
  misc_feature 1..20: note = chemically synthesized
  source 1..20: mol_type = other DNA
tttttttggaaattgaatgt

SEQ ID NO: 20040 - DNA, 20 bp, synthetic construct
  misc_feature 1..20: note = chemically synthesized
  source 1..20: mol_type = other DNA
tgtcagtgttttatgcacta

SEQ ID NO: 20041 - DNA, 20 bp, synthetic construct
  misc_feature 1..20: note = chemically synthesized
  source 1..20: mol_type = other DNA
tcaccatcactaccaatgaa

SEQ ID NO: 20042 - DNA, 20 bp, synthetic construct
  misc_feature 1..20: note = chemically synthesized
  source 1..20: mol_type = other DNA
gaacggctttgtcactctaa

SEQ ID NO: 20043 - DNA, 20 bp, synthetic construct
  misc_feature 1..20: note = chemically synthesized
  source 1..20: mol_type = other DNA
tgtcactctaacagttactt

SEQ ID NO: 20044 - DNA, 20 bp, synthetic construct
  misc_feature 1..20: note = chemically synthesized
  source 1..20: mol_type = other DNA
ctctaacagttacttgagct

SEQ ID NO: 20045 - DNA, 20 bp, synthetic construct
  misc_feature 1..20: note = chemically synthesized
  source 1..20: mol_type = other DNA
agttacttgagcttggccac

SEQ ID NO: 20046 - DNA, 20 bp, synthetic construct
  misc_feature 1..20: note = chemically synthesized
  source 1..20: mol_type = other DNA
ttacttgagcttggccacca

SEQ ID NO: 20047 - DNA, 20 bp, synthetic construct
  misc_feature 1..20: note = chemically synthesized
  source 1..20: mol_type = other DNA
gagcttggccaccagagttg

SEQ ID NO: 20048 - DNA, 20 bp, synthetic construct
  misc_feature 1..20: note = chemically synthesized
  source 1..20: mol_type = other DNA
gccaccagagttgtggatca

SEQ ID NO: 20049 - DNA, 20 bp, synthetic construct
  misc_feature 1..20: note = chemically synthesized
  source 1..20: mol_type = other DNA
cagagttgtggatcacagac

SEQ ID NO: 20050 - DNA, 20 bp, synthetic construct
  misc_feature 1..20: note = chemically synthesized
  source 1..20: mol_type = other DNA
tgtggatcacagactagacg

SEQ ID NO: 20051 - DNA, 20 bp, synthetic construct
  misc_feature 1..20: note = chemically synthesized
  source 1..20: mol_type = other DNA
acagactagacgcagctaac

SEQ ID NO: 20052 - DNA, 20 bp, synthetic construct
  misc_feature 1..20: note = chemically synthesized
  source 1..20: mol_type = other DNA
gactagacgcagctaacaag

SEQ ID NO: 20053 - DNA, 20 bp, synthetic construct
  misc_feature 1..20: note = chemically synthesized
  source 1..20: mol_type = other DNA
tagacgcagctaacaagcag

SEQ ID NO: 20054 - DNA, 20 bp, synthetic construct
  misc_feature 1..20: note = chemically synthesized
  source 1..20: mol_type = other DNA
agacgcagctaacaagcagc

SEQ ID NO: 20055 - DNA, 20 bp, synthetic construct
  misc_feature 1..20: note = chemically synthesized
  source 1..20: mol_type = other DNA
ctaacaagcagcgggcttgt

SEQ ID NO: 20056 - DNA, 20 bp, synthetic construct
  misc_feature 1..20: note = chemically synthesized
  source 1..20: mol_type = other DNA
taacaagcagcgggcttgtt

SEQ ID NO: 20057 - DNA, 20 bp, synthetic construct
  misc_feature 1..20: note = chemically synthesized
  source 1..20: mol_type = other DNA
cagcgggcttgttaggcatg

SEQ ID NO: 20058 - DNA, 20 bp, synthetic construct
  misc_feature 1..20: note = chemically synthesized
  source 1..20: mol_type = other DNA
gcttgttaggcatgcagcct

SEQ ID NO: 20059 - DNA, 20 bp, synthetic construct
  misc_feature 1..20: note = chemically synthesized
  source 1..20: mol_type = other DNA
tgaatcaaattcgctttttt

SEQ ID NO: 20060 - DNA, 20 bp, synthetic construct
  misc_feature 1..20: note = chemically synthesized
  source 1..20: mol_type = other DNA
gaatcaaattcgcttttttc

SEQ ID NO: 20061 - DNA, 20 bp, synthetic construct
  misc_feature 1..20: note = chemically synthesized
  source 1..20: mol_type = other DNA
attcgcttttttcaggtcct

SEQ ID NO: 20062 - DNA, 20 bp, synthetic construct
  misc_feature 1..20: note = chemically synthesized
  source 1..20: mol_type = other DNA
ttcgcttttttcaggtcctc

SEQ ID NO: 20063 - DNA, 20 bp, synthetic construct
  misc_feature 1..20: note = chemically synthesized
  source 1..20: mol_type = other DNA
ttcaggtcctcaggtgattc

SEQ ID NO: 20064 - DNA, 20 bp, synthetic construct
  misc_feature 1..20: note = chemically synthesized
  source 1..20: mol_type = other DNA
ttccagtgcaaaacaatgtc

SEQ ID NO: 20065 - DNA, 20 bp, synthetic construct
  misc_feature 1..20: note = chemically synthesized
  source 1..20: mol_type = other DNA
tccagtgcaaaacaatgtct

SEQ ID NO: 20066 - DNA, 20 bp, synthetic construct
  misc_feature 1..20: note = chemically synthesized
  source 1..20: mol_type = other DNA
tgtctgggcatcactgctat

SEQ ID NO: 20067 - DNA, 20 bp, synthetic construct
  misc_feature 1..20: note = chemically synthesized
  source 1..20: mol_type = other DNA
tcatacctaatccatctttc

SEQ ID NO: 20068 - DNA, 20 bp, synthetic construct
  misc_feature 1..20: note = chemically synthesized
  source 1..20: mol_type = other DNA
acctaatccatctttcgaga

SEQ ID NO: 20069 - DNA, 20 bp, synthetic construct
  misc_feature 1..20: note = chemically synthesized
  source 1..20: mol_type = other DNA
aaccttttaatgcttccatc

SEQ ID NO: 20070 - DNA, 20 bp, synthetic construct
  misc_feature 1..20: note = chemically synthesized
  source 1..20: mol_type = other DNA
atgtttctttcaccatttac

SEQ ID NO: 20071 - DNA, 20 bp, synthetic construct
  misc_feature 1..20: note = chemically synthesized
  source 1..20: mol_type = other DNA
atttcccataattaaatact

SEQ ID NO: 20072 - DNA, 20 bp, synthetic construct
  misc_feature 1..20: note = chemically synthesized
  source 1..20: mol_type = other DNA
cccataattaaatacttagc

SEQ ID NO: 20073 - DNA, 20 bp, synthetic construct
  misc_feature 1..20: note = chemically synthesized
  source 1..20: mol_type = other DNA
tccatcaactccaaactcct

SEQ ID NO: 20074 - DNA, 20 bp, synthetic construct
  misc_feature 1..20: note = chemically synthesized
  source 1..20: mol_type = other DNA
ccatcaactccaaactcctg

SEQ ID NO: 20075 - DNA, 20 bp, synthetic construct
  misc_feature 1..20: note = chemically synthesized
  source 1..20: mol_type = other DNA
aaactcctgaggaactgttg

SEQ ID NO: 20076 - DNA, 20 bp, synthetic construct
  misc_feature 1..20: note = chemically synthesized
  source 1..20: mol_type = other DNA
gaactgttgcagttctgtaa

SEQ ID NO: 20077 - DNA, 20 bp, synthetic construct
  misc_feature 1..20: note = chemically synthesized
  source 1..20: mol_type = other DNA
aactgttgcagttctgtaac

SEQ ID NO: 20078 - DNA, 20 bp, synthetic construct
  misc_feature 1..20: note = chemically synthesized
  source 1..20: mol_type = other DNA
gtaaaattataatgtttcca

SEQ ID NO: 20079 - DNA, 20 bp, synthetic construct
  misc_feature 1..20: note = chemically synthesized
  source 1..20: mol_type = other DNA
ttataatgtttccacagcct

SEQ ID NO: 20080 - DNA, 20 bp, synthetic construct
  misc_feature 1..20: note = chemically synthesized
  source 1..20: mol_type = other DNA
tataatgtttccacagccta

SEQ ID NO: 20081 - DNA, 20 bp, synthetic construct
  misc_feature 1..20: note = chemically synthesized
  source 1..20: mol_type = other DNA
tttccacagcctaaggatgc

SEQ ID NO: 20082 - DNA, 20 bp, synthetic construct
  misc_feature 1..20: note = chemically synthesized
  source 1..20: mol_type = other DNA
cactactgtttctgttttct

SEQ ID NO: 20083 - DNA, 20 bp, synthetic construct
  misc_feature 1..20: note = chemically synthesized
  source 1..20: mol_type = other DNA
tttcttggttgccacgatcc

SEQ ID NO: 20084 - DNA, 20 bp, synthetic construct
  misc_feature 1..20: note = chemically synthesized
  source 1..20: mol_type = other DNA
tcttggttgccacgatccaa

SEQ ID NO: 20085 - DNA, 20 bp, synthetic construct
  misc_feature 1..20: note = chemically synthesized
  source 1..20: mol_type = other DNA
cttggttgccacgatccaag

SEQ ID NO: 20086 - DNA, 20 bp, synthetic construct
  misc_feature 1..20: note = chemically synthesized
  source 1..20: mol_type = other DNA
ttggttgccacgatccaaga

SEQ ID NO: 20087 - DNA, 20 bp, synthetic construct
  misc_feature 1..20: note = chemically synthesized
  source 1..20: mol_type = other DNA
tggttgccacgatccaagag

SEQ ID NO: 20088 - DNA, 20 bp, synthetic construct
  misc_feature 1..20: note = chemically synthesized
  source 1..20: mol_type = other DNA
gccacgatccaagaggggta

SEQ ID NO: 20089 - DNA, 20 bp, synthetic construct
  misc_feature 1..20: note = chemically synthesized
  source 1..20: mol_type = other DNA
ccacgatccaagaggggtat

SEQ ID NO: 20090 - DNA, 20 bp, synthetic construct
  misc_feature 1..20: note = chemically synthesized
  source 1..20: mol_type = other DNA
acgatccaagaggggtatgg

SEQ ID NO: 20091 - DNA, 20 bp, synthetic construct
  misc_feature 1..20: note = chemically synthesized
  source 1..20: mol_type = other DNA
tccaagaggggtatgggaga

SEQ ID NO: 20092 - DNA, 20 bp, synthetic construct
  misc_feature 1..20: note = chemically synthesized
  source 1..20: mol_type = other DNA
aagaggggtatgggagaaag

SEQ ID NO: 20093 - DNA, 20 bp, synthetic construct
  misc_feature 1..20: note = chemically synthesized
  source 1..20: mol_type = other DNA
aggggtatgggagaaagaag

SEQ ID NO: 20094 - DNA, 20 bp, synthetic construct
  misc_feature 1..20: note = chemically synthesized
  source 1..20: mol_type = other DNA
agaaagaagaagcttattac

SEQ ID NO: 20095 - DNA, 20 bp, synthetic construct
  misc_feature 1..20: note = chemically synthesized
  source 1..20: mol_type = other DNA
gcttattaccagctctgctg

SEQ ID NO: 20096 - DNA, 20 bp, synthetic construct
  misc_feature 1..20: note = chemically synthesized
  source 1..20: mol_type = other DNA
ctgctgcagtcttatttaac

SEQ ID NO: 20097 - DNA, 20 bp, synthetic construct
  misc_feature 1..20: note = chemically synthesized
  source 1..20: mol_type = other DNA
gtcttatttaacgagaaatt

SEQ ID NO: 20098 - DNA, 20 bp, synthetic construct
  misc_feature 1..20: note = chemically synthesized
  source 1..20: mol_type = other DNA
taacgagaaattcagaatcc

SEQ ID NO: 20099 - DNA, 20 bp, synthetic construct
  misc_feature 1..20: note = chemically synthesized
  source 1..20: mol_type = other DNA
acgagaaattcagaatcctg

SEQ ID NO: 20100 - DNA, 20 bp, synthetic construct
  misc_feature 1..20: note = chemically synthesized
  source 1..20: mol_type = other DNA
cgagaaattcagaatcctgg

SEQ ID NO: 20101 - DNA, 20 bp, synthetic construct
  misc_feature 1..20: note = chemically synthesized
  source 1..20: mol_type = other DNA
aaattcagaatcctggaggc

SEQ ID NO: 20102 - DNA, 20 bp, synthetic construct
  misc_feature 1..20: note = chemically synthesized
  source 1..20: mol_type = other DNA
gaatcctggaggcaagtctt

SEQ ID NO: 20103 - DNA, 20 bp, synthetic construct
  misc_feature 1..20: note = chemically synthesized
  source 1..20: mol_type = other DNA
ggaggcaagtctttagcacc

SEQ ID NO: 20104 - DNA, 20 bp, synthetic construct
  misc_feature 1..20: note = chemically synthesized
  source 1..20: mol_type = other DNA
ggcaagtctttagcacctag

SEQ ID NO: 20105 - DNA, 20 bp, synthetic construct
  misc_feature 1..20: note = chemically synthesized
  source 1..20: mol_type = other DNA
tagcagttttcttcataaaa

SEQ ID NO: 20106 - DNA, 20 bp, synthetic construct
  misc_feature 1..20: note = chemically synthesized
  source 1..20: mol_type = other DNA
ttttcttcataaaatggcct

SEQ ID NO: 20107 - DNA, 20 bp, synthetic construct
  misc_feature 1..20: note = chemically synthesized
  source 1..20: mol_type = other DNA
cctcagtatcaaaaataaat

SEQ ID NO: 20108 - DNA, 20 bp, synthetic construct
  misc_feature 1..20: note = chemically synthesized
  source 1..20: mol_type = other DNA
tatcaaaaataaatcagaat

SEQ ID NO: 20109 - DNA, 20 bp, synthetic construct
  misc_feature 1..20: note = chemically synthesized
  source 1..20: mol_type = other DNA
caaaaataaatcagaatcag

SEQ ID NO: 20110 - DNA, 20 bp, synthetic construct
  misc_feature 1..20: note = chemically synthesized
  source 1..20: mol_type = other DNA
cagaatcagaagaaatcaca

SEQ ID NO: 20111 - DNA, 20 bp, synthetic construct
  misc_feature 1..20: note = chemically synthesized
  source 1..20: mol_type = other DNA
caaagcatttcatattgtat

SEQ ID NO: 20112 - DNA, 20 bp, synthetic construct
  misc_feature 1..20: note = chemically synthesized
  source 1..20: mol_type = other DNA
aaagcatttcatattgtata

SEQ ID NO: 20113 - DNA, 20 bp, synthetic construct
  misc_feature 1..20: note = chemically synthesized
  source 1..20: mol_type = other DNA
ttctgatgctacctctgtat

SEQ ID NO: 20114 - DNA, 20 bp, synthetic construct
  misc_feature 1..20: note = chemically synthesized
  source 1..20: mol_type = other DNA
acctctgtatcagctcctgt

SEQ ID NO: 20115 - DNA, 20 bp, synthetic construct
  misc_feature 1..20: note = chemically synthesized
  source 1..20: mol_type = other DNA
ctgtatcagctcctgtgagt

SEQ ID NO: 20116 - DNA, 20 bp, synthetic construct
  misc_feature 1..20: note = chemically synthesized
  source 1..20: mol_type = other DNA
tgtatcagctcctgtgagtc

SEQ ID NO: 20117 - DNA, 20 bp, synthetic construct
  misc_feature 1..20: note = chemically synthesized
  source 1..20: mol_type = other DNA
gtcaggattactaacttact

SEQ ID NO: 20118 - DNA, 20 bp, synthetic construct
  misc_feature 1..20: note = chemically synthesized
  source 1..20: mol_type = other DNA
gagattgaaatcaccaacac

SEQ ID NO: 20119 - DNA, 20 bp, synthetic construct
  misc_feature 1..20: note = chemically synthesized
  source 1..20: mol_type = other DNA
agattgaaatcaccaacact

SEQ ID NO: 20120 - DNA, 20 bp, synthetic construct
  misc_feature 1..20: note = chemically synthesized
  source 1..20: mol_type = other DNA
gattgaaatcaccaacacta

SEQ ID NO: 20121 - DNA, 20 bp, synthetic construct
  misc_feature 1..20: note = chemically synthesized
  source 1..20: mol_type = other DNA
taaatcacattgaattcata

SEQ ID NO: 20122 - DNA, 20 bp, synthetic construct
  misc_feature 1..20: note = chemically synthesized
  source 1..20: mol_type = other DNA
atcacattgaattcatatag

SEQ ID NO: 20123 - DNA, 20 bp, synthetic construct
  misc_feature 1..20: note = chemically synthesized
  source 1..20: mol_type = other DNA
aaatgttgttctaccttcga

SEQ ID NO: 20124 - DNA, 20 bp, synthetic construct
  misc_feature 1..20: note = chemically synthesized
  source 1..20: mol_type = other DNA
atccttcatgcttaaaaaca

SEQ ID NO: 20125 - DNA, 20 bp, synthetic construct
  misc_feature 1..20: note = chemically synthesized
  source 1..20: mol_type = other DNA
catgcttaaaaacacagatt

SEQ ID NO: 20126 - DNA, 20 bp, synthetic construct
  misc_feature 1..20: note = chemically synthesized
  source 1..20: mol_type = other DNA
atgcttaaaaacacagattg

SEQ ID NO: 20127 - DNA, 20 bp, synthetic construct
  misc_feature 1..20: note = chemically synthesized
  source 1..20: mol_type = other DNA
aaaaacacagattgaggaat

SEQ ID NO: 20128 - DNA, 20 bp, synthetic construct
  misc_feature 1..20: note = chemically synthesized
  source 1..20: mol_type = other DNA
aaacacagattgaggaataa

SEQ ID NO: 20129 - DNA, 20 bp, synthetic construct
  misc_feature 1..20: note = chemically synthesized
  source 1..20: mol_type = other DNA
aacacagattgaggaataag

SEQ ID NO: 20130 - DNA, 20 bp, synthetic construct
  misc_feature 1..20: note = chemically synthesized
  source 1..20: mol_type = other DNA
ttgaggaataagaggatgta

SEQ ID NO: 20131 - DNA, 20 bp, synthetic construct
  misc_feature 1..20: note = chemically synthesized
  source 1..20: mol_type = other DNA
aataagaggatgtacggaat

SEQ ID NO: 20132 - DNA, 20 bp, synthetic construct
  misc_feature 1..20: note = chemically synthesized
  source 1..20: mol_type = other DNA
ataagaggatgtacggaatg

SEQ ID NO: 20133 - DNA, 20 bp, synthetic construct
  misc_feature 1..20: note = chemically synthesized
  source 1..20: mol_type = other DNA
aggatgtacggaatgaggta

SEQ ID NO: 20134 - DNA, 20 bp, synthetic construct
  misc_feature 1..20: note = chemically synthesized
  source 1..20: mol_type = other DNA
ggatgtacggaatgaggtat

SEQ ID NO: 20135 - DNA, 20 bp, synthetic construct
  misc_feature 1..20: note = chemically synthesized
  source 1..20: mol_type = other DNA
atgtacggaatgaggtatag

SEQ ID NO: 20136 - DNA, 20 bp, synthetic construct
  misc_feature 1..20: note = chemically synthesized
  source 1..20: mol_type = other DNA
tgtacggaatgaggtatagg

SEQ ID NO: 20137 - DNA, 20 bp, synthetic construct
  misc_feature 1..20: note = chemically synthesized
  source 1..20: mol_type = other DNA
acggaatgaggtataggagg

SEQ ID NO: 20138 - DNA, 20 bp, synthetic construct
  misc_feature 1..20: note = chemically synthesized
  source 1..20: mol_type = other DNA
ggaatgaggtataggaggaa

SEQ ID NO: 20139 - DNA, 20 bp, synthetic construct
  misc_feature 1..20: note = chemically synthesized
  source 1..20: mol_type = other DNA
gaggtataggaggaagagaa

SEQ ID NO: 20140 - DNA, 20 bp, synthetic construct
  misc_feature 1..20: note = chemically synthesized
  source 1..20: mol_type = other DNA
gtataggaggaagagaatgg

SEQ ID NO: 20141 - DNA, 20 bp, synthetic construct
  misc_feature 1..20: note = chemically synthesized
  source 1..20: mol_type = other DNA
ggaggaagagaatggcagat

SEQ ID NO: 20142 - DNA, 20 bp, synthetic construct
  misc_feature 1..20: note = chemically synthesized
  source 1..20: mol_type = other DNA
aggaagagaatggcagatta

SEQ ID NO: 20143 - DNA, 20 bp, synthetic construct
  misc_feature 1..20: note = chemically synthesized
  source 1..20: mol_type = other DNA
agagaatggcagattagaga

SEQ ID NO: 20144 - DNA, 20 bp, synthetic construct
  misc_feature 1..20: note = chemically synthesized
  source 1..20: mol_type = other DNA
gagaatggcagattagagaa

SEQ ID NO: 20145 - DNA, 20 bp, synthetic construct
  misc_feature 1..20: note = chemically synthesized
  source 1..20: mol_type = other DNA
agattagagaaaggacaaat

SEQ ID NO: 20146 - DNA, 20 bp, synthetic construct
  misc_feature 1..20: note = chemically synthesized
  source 1..20: mol_type = other DNA
aattggtgacacatattctg

SEQ ID NO: 20147 - DNA, 20 bp, synthetic construct
  misc_feature 1..20: note = chemically synthesized
  source 1..20: mol_type = other DNA
attggtgacacatattctga

SEQ ID NO: 20148 - DNA, 20 bp, synthetic construct
  misc_feature 1..20: note = chemically synthesized
  source 1..20: mol_type = other DNA
ttggtgacacatattctgaa

SEQ ID NO: 20149 - DNA, 20 bp, synthetic construct
  misc_feature 1..20: note = chemically synthesized
  source 1..20: mol_type = other DNA
catattctgaagggtaaaca

SEQ ID NO: 20150 - DNA, 20 bp, synthetic construct
  misc_feature 1..20: note = chemically synthesized
  source 1..20: mol_type = other DNA
attctgaagggtaaacatag

SEQ ID NO: 20151 - DNA, 20 bp, synthetic construct
  misc_feature 1..20: note = chemically synthesized
  source 1..20: mol_type = other DNA
tgaagggtaaacatagaaga

SEQ ID NO: 20152 - DNA, 20 bp, synthetic construct
  misc_feature 1..20: note = chemically synthesized
  source 1..20: mol_type = other DNA
attaaaattttttttaatta

SEQ ID NO: 20153 - DNA, 20 bp, synthetic construct
  misc_feature 1..20: note = chemically synthesized
  source 1..20: mol_type = other DNA
aaaaataaaaaatttttaaa

SEQ ID NO: 20154 - DNA, 20 bp, synthetic construct
  misc_feature 1..20: note = chemically synthesized
  source 1..20: mol_type = other DNA
ataaaaaatttttaaaaaga

SEQ ID NO: 20155 - DNA, 20 bp, synthetic construct
  misc_feature 1..20: note = chemically synthesized
  source 1..20: mol_type = other DNA
aaaaagaaagccataaaatc

SEQ ID NO: 20156 - DNA, 20 bp, synthetic construct
  misc_feature 1..20: note = chemically synthesized
  source 1..20: mol_type = other DNA
aaaagaaagccataaaatct

SEQ ID NO: 20157 - DNA, 20 bp, synthetic construct
  misc_feature 1..20: note = chemically synthesized
  source 1..20: mol_type = other DNA
tcctttaaaaaaaattgtgt

SEQ ID NO: 20158 - DNA, 20 bp, synthetic construct
  misc_feature 1..20: note = chemically synthesized
  source 1..20: mol_type = other DNA
cctttaaaaaaaattgtgta

SEQ ID NO: 20159 - DNA, 20 bp, synthetic construct
  misc_feature 1..20: note = chemically synthesized
  source 1..20: mol_type = other DNA
aaattgtgtaaggatcaaac

SEQ ID NO: 20160 - DNA, 20 bp, synthetic construct
  misc_feature 1..20: note = chemically synthesized
  source 1..20: mol_type = other DNA
taaggatcaaactagatttc

SEQ ID NO: 20161 - DNA, 20 bp, synthetic construct
  misc_feature 1..20: note = chemically synthesized
  source 1..20: mol_type = other DNA
aggatcaaactagatttcca

SEQ ID NO: 20162 - DNA, 20 bp, synthetic construct
  misc_feature 1..20: note = chemically synthesized
  source 1..20: mol_type = other DNA
aaactagatttccagagcac

SEQ ID NO: 20163 - DNA, 20 bp, synthetic construct
  misc_feature 1..20: note = chemically synthesized
  source 1..20: mol_type = other DNA
gtactttttaaaatgtttgt

SEQ ID NO: 20164 - DNA, 20 bp, synthetic construct
  misc_feature 1..20: note = chemically synthesized
  source 1..20: mol_type = other DNA
ttaaaaaacaataacgtctt

SEQ ID NO: 20165 - DNA, 20 bp, synthetic construct
  misc_feature 1..20: note = chemically synthesized
  source 1..20: mol_type = other DNA
aaaaaacaataacgtcttta

SEQ ID NO: 20166 - DNA, 20 bp, synthetic construct
  misc_feature 1..20: note = chemically synthesized
  source 1..20: mol_type = other DNA
aataacgtctttagagaaat

SEQ ID NO: 20167 - DNA, 20 bp, synthetic construct
  misc_feature 1..20: note = chemically synthesized
  source 1..20: mol_type = other DNA
taaaacacttgaaaccaaaa

SEQ ID NO: 20168 - DNA, 20 bp, synthetic construct
  misc_feature 1..20: note = chemically synthesized
  source 1..20: mol_type = other DNA
acacttgaaaccaaaaaaga

SEQ ID NO: 20169 - DNA, 20 bp, synthetic construct
  misc_feature 1..20: note = chemically synthesized
  source 1..20: mol_type = other DNA
aagttttttattatatttat

SEQ ID NO: 20170 - DNA, 20 bp, synthetic construct
  misc_feature 1..20: note = chemically synthesized
  source 1..20: mol_type = other DNA
ttttttattatatttatgag

SEQ ID NO: 20171 - DNA, 20 bp, synthetic construct
  misc_feature 1..20: note = chemically synthesized
  source 1..20: mol_type = other DNA
tgagcagaaaaaaatgttta

SEQ ID NO: 20172 - DNA, 20 bp, synthetic construct
  misc_feature 1..20: note = chemically synthesized
  source 1..20: mol_type = other DNA
tcatatctccctccatctct

SEQ ID NO: 20173 - DNA, 20 bp, synthetic construct
  misc_feature 1..20: note = chemically synthesized
  source 1..20: mol_type = other DNA
tctccctccatctctaagct

SEQ ID NO: 20174 - DNA, 20 bp, synthetic construct
  misc_feature 1..20: note = chemically synthesized
  source 1..20: mol_type = other DNA
ctccctccatctctaagctt

SEQ ID NO: 20175 - DNA, 20 bp, synthetic construct
  misc_feature 1..20: note = chemically synthesized
  source 1..20: mol_type = other DNA
ctctaagcttgggtcattaa

SEQ ID NO: 20176 - DNA, 20 bp, synthetic construct
  misc_feature 1..20: note = chemically synthesized
  source 1..20: mol_type = other DNA
aagcttgggtcattaaaagt

SEQ ID NO: 20177 - DNA, 20 bp, synthetic construct
  misc_feature 1..20: note = chemically synthesized
  source 1..20: mol_type = other DNA
ttgggtcattaaaagtaaga

SEQ ID NO: 20178 - DNA, 20 bp, synthetic construct
  misc_feature 1..20: note = chemically synthesized
  source 1..20: mol_type = other DNA
tgggtcattaaaagtaagac

SEQ ID NO: 20179 - DNA, 20 bp, synthetic construct
  misc_feature 1..20: note = chemically synthesized
  source 1..20: mol_type = other DNA
gggtcattaaaagtaagaca

SEQ ID NO: 20180 - DNA, 20 bp, synthetic construct
  misc_feature 1..20: note = chemically synthesized
  source 1..20: mol_type = other DNA
tcattaaaagtaagacaggg

SEQ ID NO: 20181 - DNA, 20 bp, synthetic construct
  misc_feature 1..20: note = chemically synthesized
  source 1..20: mol_type = other DNA
cattaaaagtaagacaggga

SEQ ID NO: 20182 - DNA, 20 bp, synthetic construct
  misc_feature 1..20: note = chemically synthesized
  source 1..20: mol_type = other DNA
aagtaagacagggaaggtta

SEQ ID NO: 20183 - DNA, 20 bp, synthetic construct
  misc_feature 1..20: note = chemically synthesized
  source 1..20: mol_type = other DNA
gggaaggttatggtacctca

SEQ ID NO: 20184 - DNA, 20 bp, synthetic construct
  misc_feature 1..20: note = chemically synthesized
  source 1..20: mol_type = other DNA
tggtacctcaaagaaaatga

SEQ ID NO: 20185 - DNA, 20 bp, synthetic construct
  misc_feature 1..20: note = chemically synthesized
  source 1..20: mol_type = other DNA
ggtacctcaaagaaaatgaa

SEQ ID NO: 20186 - DNA, 20 bp, synthetic construct
  misc_feature 1..20: note = chemically synthesized
  source 1..20: mol_type = other DNA
atgaaaggtaaatcatgtct

SEQ ID NO: 20187 - DNA, 20 bp, synthetic construct
  misc_feature 1..20: note = chemically synthesized
  source 1..20: mol_type = other DNA
gtaaatcatgtctgagattt

SEQ ID NO: 20188 - DNA, 20 bp, synthetic construct
  misc_feature 1..20: note = chemically synthesized
  source 1..20: mol_type = other DNA
taaatcatgtctgagatttt

SEQ ID NO: 20189 - DNA, 20 bp, synthetic construct
  misc_feature 1..20: note = chemically synthesized
  source 1..20: mol_type = other DNA
tctgagattttgggaataaa

SEQ ID NO: 20190 - DNA, 20 bp, synthetic construct
  misc_feature 1..20: note = chemically synthesized
  source 1..20: mol_type = other DNA
gggaataaaaagaaacacaa

SEQ ID NO: 20191 - DNA, 20 bp, synthetic construct
  misc_feature 1..20: note = chemically synthesized
  source 1..20: mol_type = other DNA
aataaaaagaaacacaaaag

SEQ ID NO: 20192 - DNA, 20 bp, synthetic construct
  misc_feature 1..20: note = chemically synthesized
  source 1..20: mol_type = other DNA
aaaagaagcctgcccaacac

SEQ ID NO: 20193 - DNA, 20 bp, synthetic construct
  misc_feature 1..20: note = chemically synthesized
  source 1..20: mol_type = other DNA
aaagaagcctgcccaacact

SEQ ID NO: 20194 - DNA, 20 bp, synthetic construct
  misc_feature 1..20: note = chemically synthesized
  source 1..20: mol_type = other DNA
gaagcctgcccaacactggg

SEQ ID NO: 20195 - DNA, 20 bp, synthetic construct
  misc_feature 1..20: note = chemically synthesized
  source 1..20: mol_type = other DNA
ggaagccgttgatatttacc

SEQ ID NO: 20196 - DNA, 20 bp, synthetic construct
  misc_feature 1..20: note = chemically synthesized
  source 1..20: mol_type = other DNA
aagccgttgatatttaccca

SEQ ID NO: 20197 - DNA, 20 bp, synthetic construct
  misc_feature 1..20: note = chemically synthesized
  source 1..20: mol_type = other DNA
agccgttgatatttacccag

SEQ ID NO: 20198 - DNA, 20 bp, synthetic construct
  misc_feature 1..20: note = chemically synthesized
  source 1..20: mol_type = other DNA
cgttgatatttacccagagg

SEQ ID NO: 20199 - DNA, 20 bp, synthetic construct
  misc_feature 1..20: note = chemically synthesized
  source 1..20: mol_type = other DNA
gttgatatttacccagaggc

SEQ ID NO: 20200 - DNA, 20 bp, synthetic construct
  misc_feature 1..20: note = chemically synthesized
  source 1..20: mol_type = other DNA
tttacccagaggcaggcgtg

SEQ ID NO: 20201 - DNA, 20 bp, synthetic construct
  misc_feature 1..20: note = chemically synthesized
  source 1..20: mol_type = other DNA
ttacccagaggcaggcgtgt

SEQ ID NO: 20202 - DNA, 20 bp, synthetic construct
  misc_feature 1..20: note = chemically synthesized
  source 1..20: mol_type = other DNA
tacccagaggcaggcgtgtg

SEQ ID NO: 20203 - DNA, 20 bp, synthetic construct
  misc_feature 1..20: note = chemically synthesized
  source 1..20: mol_type = other DNA
aggcaggcgtgtggggattc

SEQ ID NO: 20204 - DNA, 20 bp, synthetic construct
  misc_feature 1..20: note = chemically synthesized
  source 1..20: mol_type = other DNA
ggcaggcgtgtggggattct

SEQ ID NO: 20205 - DNA, 20 bp, synthetic construct
  misc_feature 1..20: note = chemically synthesized
  source 1..20: mol_type = other DNA
caggcgtgtggggattctag

SEQ ID NO: 20206 - DNA, 20 bp, synthetic construct
  misc_feature 1..20: note = chemically synthesized
  source 1..20: mol_type = other DNA
ggcgtgtggggattctagga

SEQ ID NO: 20207 - DNA, 20 bp, synthetic construct
  misc_feature 1..20: note = chemically synthesized
  source 1..20: mol_type = other DNA
tgtggggattctaggagagc

SEQ ID NO: 20208 - DNA, 20 bp, synthetic construct
  misc_feature 1..20: note = chemically synthesized
  source 1..20: mol_type = other DNA
ctagatactgtcatcaaact

SEQ ID NO: 20209 - DNA, 20 bp, synthetic construct
  misc_feature 1..20: note = chemically synthesized
  source 1..20: mol_type = other DNA
tagatactgtcatcaaactg

SEQ ID NO: 20210 - DNA, 20 bp, synthetic construct
  misc_feature 1..20: note = chemically synthesized
  source 1..20: mol_type = other DNA
atcaaactgaggcccactat

SEQ ID NO: 20211 - DNA, 20 bp, synthetic construct
  misc_feature 1..20: note = chemically synthesized
  source 1..20: mol_type = other DNA
aaactgaggcccactataag

SEQ ID NO: 20212 - DNA, 20 bp, synthetic construct
  misc_feature 1..20: note = chemically synthesized
  source 1..20: mol_type = other DNA
cccactataagcagtgtcac

SEQ ID NO: 20213 - DNA, 20 bp, synthetic construct
  misc_feature 1..20: note = chemically synthesized
  source 1..20: mol_type = other DNA
cactataagcagtgtcacca

SEQ ID NO: 20214 - DNA, 20 bp, synthetic construct
  misc_feature 1..20: note = chemically synthesized
  source 1..20: mol_type = other DNA
aagcagtgtcaccagagatg

SEQ ID NO: 20215 - DNA, 20 bp, synthetic construct
  misc_feature 1..20: note = chemically synthesized
  source 1..20: mol_type = other DNA
catactgtatgcatgctccc

SEQ ID NO: 20216 - DNA, 20 bp, synthetic construct
  misc_feature 1..20: note = chemically synthesized
  source 1..20: mol_type = other DNA
atactgtatgcatgctccca

SEQ ID NO: 20217 - DNA, 20 bp, synthetic construct
  misc_feature 1..20: note = chemically synthesized
  source 1..20: mol_type = other DNA
gctcccaaggctgcactatg

SEQ ID NO: 20218 - DNA, 20 bp, synthetic construct
  misc_feature 1..20: note = chemically synthesized
  source 1..20: mol_type = other DNA
ctatgtggcaaaattccatt

SEQ ID NO: 20219 - DNA, 20 bp, synthetic construct
  misc_feature 1..20: note = chemically synthesized
  source 1..20: mol_type = other DNA
gtggcaaaattccattcaga

SEQ ID NO: 20220 - DNA, 20 bp, synthetic construct
  misc_feature 1..20: note = chemically synthesized
  source 1..20: mol_type = other DNA
aaaattccattcagatggct

SEQ ID NO: 20221 - DNA, 20 bp, synthetic construct
  misc_feature 1..20: note = chemically synthesized
  source 1..20: mol_type = other DNA
cagatggcttagctattaac

SEQ ID NO: 20222 - DNA, 20 bp, synthetic construct
  misc_feature 1..20: note = chemically synthesized
  source 1..20: mol_type = other DNA
cttagctattaacaagtgtt

SEQ ID NO: 20223 - DNA, 20 bp, synthetic construct
  misc_feature 1..20: note = chemically synthesized
  source 1..20: mol_type = other DNA
aagtgttaagaaaattatac

SEQ ID NO: 20224 - DNA, 20 bp, synthetic construct
  misc_feature 1..20: note = chemically synthesized
  source 1..20: mol_type = other DNA
tgttaagaaaattatactag

SEQ ID NO: 20225 - DNA, 20 bp, synthetic construct
  misc_feature 1..20: note = chemically synthesized
  source 1..20: mol_type = other DNA
gaaaattatactagaagcac

SEQ ID NO: 20226 - DNA, 20 bp, synthetic construct
  misc_feature 1..20: note = chemically synthesized
  source 1..20: mol_type = other DNA
tatactagaagcacaagaac

SEQ ID NO: 20227 - DNA, 20 bp, synthetic construct
  misc_feature 1..20: note = chemically synthesized
  source 1..20: mol_type = other DNA
agcacaagaactagtttttc

SEQ ID NO: 20228 - DNA, 20 bp, synthetic construct
  misc_feature 1..20: note = chemically synthesized
  source 1..20: mol_type = other DNA
agaactagtttttctggata

SEQ ID NO: 20229 - DNA, 20 bp, synthetic construct
  misc_feature 1..20: note = chemically synthesized
  source 1..20: mol_type = other DNA
gaactagtttttctggataa

SEQ ID NO: 20230 - DNA, 20 bp, synthetic construct
  misc_feature 1..20: note = chemically synthesized
  source 1..20: mol_type = other DNA
ctagtttttctggataaagg

SEQ ID NO: 20231 - DNA, 20 bp, synthetic construct
  misc_feature 1..20: note = chemically synthesized
  source 1..20: mol_type = other DNA
agtttttctggataaaggtg

SEQ ID NO: 20232 - DNA, 20 bp, synthetic construct
  misc_feature 1..20: note = chemically synthesized
  source 1..20: mol_type = other DNA
ttttctggataaaggtggag

SEQ ID NO: 20233 - DNA, 20 bp, synthetic construct
  misc_feature 1..20: note = chemically synthesized
  source 1..20: mol_type = other DNA
ggataaaggtggagcagcta

SEQ ID NO: 20234 - DNA, 20 bp, synthetic construct
  misc_feature 1..20: note = chemically synthesized
  source 1..20: mol_type = other DNA
agctatggctgtgaaattga

SEQ ID NO: 20235 - DNA, 20 bp, synthetic construct
  misc_feature 1..20: note = chemically synthesized
  source 1..20: mol_type = other DNA
gctatggctgtgaaattgat

SEQ ID NO: 20236 - DNA, 20 bp, synthetic construct
  misc_feature 1..20: note = chemically synthesized
  source 1..20: mol_type = other DNA
atggctgtgaaattgatagg

SEQ ID NO: 20237 - DNA, 20 bp, synthetic construct
  misc_feature 1..20: note = chemically synthesized
  source 1..20: mol_type = other DNA
ttgataggcagctctcaact

SEQ ID NO: 20238 - DNA, 20 bp, synthetic construct
  misc_feature 1..20: note = chemically synthesized
  source 1..20: mol_type = other DNA
caactcagaacataaatgtt

SEQ ID NO: 20239 - DNA, 20 bp, synthetic construct
  misc_feature 1..20: note = chemically synthesized
  source 1..20: mol_type = other DNA
taaatgtttagtgatttcct

SEQ ID NO: 20240 - DNA, 20 bp, synthetic construct
  misc_feature 1..20: note = chemically synthesized
  source 1..20: mol_type = other DNA
aaatgtttagtgatttccta

SEQ ID NO: 20241 - DNA, 20 bp, synthetic construct
  misc_feature 1..20: note = chemically synthesized
  source 1..20: mol_type = other DNA
ttagtgatttcctaaggatc

SEQ ID NO: 20242 - DNA, 20 bp, synthetic construct
  misc_feature 1..20: note = chemically synthesized
  source 1..20: mol_type = other DNA
tagtgatttcctaaggatct

SEQ ID NO: 20243 - DNA, 20 bp, synthetic construct
  misc_feature 1..20: note = chemically synthesized
  source 1..20: mol_type = other DNA
agtgatttcctaaggatctg

SEQ ID NO: 20244 - DNA, 20 bp, synthetic construct
  misc_feature 1..20: note = chemically synthesized
  source 1..20: mol_type = other DNA
gaactgatatatcatatatg

SEQ ID NO: 20245 - DNA, 20 bp, synthetic construct
  misc_feature 1..20: note = chemically synthesized
  source 1..20: mol_type = other DNA
tatatcatatatgaagatat

SEQ ID NO: 20246 - DNA, 20 bp, synthetic construct
  misc_feature 1..20: note = chemically synthesized
  source 1..20: mol_type = other DNA
atgaagatataagcaacctg

SEQ ID NO: 20247 - DNA, 20 bp, synthetic construct
  misc_feature 1..20: note = chemically synthesized
  source 1..20: mol_type = other DNA
tgaagatataagcaacctgt

SEQ ID NO: 20248 - DNA, 20 bp, synthetic construct
  misc_feature 1..20: note = chemically synthesized
  source 1..20: mol_type = other DNA
aagatataagcaacctgtag

SEQ ID NO: 20249 - DNA, 20 bp, synthetic construct
  misc_feature 1..20: note = chemically synthesized
  source 1..20: mol_type = other DNA
ctccattcaccaataccatc

SEQ ID NO: 20250 - DNA, 20 bp, synthetic construct
  misc_feature 1..20: note = chemically synthesized
  source 1..20: mol_type = other DNA
tccattcaccaataccatct

SEQ ID NO: 20251 - DNA, 20 bp, synthetic construct
  misc_feature 1..20: note = chemically synthesized
  source 1..20: mol_type = other DNA
tcaccaataccatctgggac

SEQ ID NO: 20252 - DNA, 20 bp, synthetic construct
  misc_feature 1..20: note = chemically synthesized
  source 1..20: mol_type = other DNA
caataccatctgggacaagt

SEQ ID NO: 20253 - DNA, 20 bp, synthetic construct
  misc_feature 1..20: note = chemically synthesized
  source 1..20: mol_type = other DNA
agttggaaaatgactatttt

SEQ ID NO: 20254 - DNA, 20 bp, synthetic construct
  misc_feature 1..20: note = chemically synthesized
  source 1..20: mol_type = other DNA
ggaaaatgactattttgagt

SEQ ID NO: 20255 - DNA, 20 bp, synthetic construct
  misc_feature 1..20: note = chemically synthesized
  source 1..20: mol_type = other DNA
atgactattttgagtcagca

SEQ ID NO: 20256 - DNA, 20 bp, synthetic construct
  misc_feature 1..20: note = chemically synthesized
  source 1..20: mol_type = other DNA
attttgagtcagcacagaat

SEQ ID NO: 20257 - DNA, 20 bp, synthetic construct
  misc_feature 1..20: note = chemically synthesized
  source 1..20: mol_type = other DNA
tgagtcagcacagaattggt

SEQ ID NO: 20258 - DNA, 20 bp, synthetic construct
  misc_feature 1..20: note = chemically synthesized
  source 1..20: mol_type = other DNA
ccacacaactgcactgtgtt

SEQ ID NO: 20259 - DNA, 20 bp, synthetic construct
  misc_feature 1..20: note = chemically synthesized
  source 1..20: mol_type = other DNA
gttctaaataaccatgtaat

SEQ ID NO: 20260 - DNA, 20 bp, synthetic construct
  misc_feature 1..20: note = chemically synthesized
  source 1..20: mol_type = other DNA
aaataaccatgtaataagca

SEQ ID NO: 20261 - DNA, 20 bp, synthetic construct
  misc_feature 1..20: note = chemically synthesized
  source 1..20: mol_type = other DNA
aataagcacagtctgctctt

SEQ ID NO: 20262 - DNA, 20 bp, synthetic construct
  misc_feature 1..20: note = chemically synthesized
  source 1..20: mol_type = other DNA
aagcacagtctgctcttaag

SEQ ID NO: 20263 - DNA, 20 bp, synthetic construct
  misc_feature 1..20: note = chemically synthesized
  source 1..20: mol_type = other DNA
ctcttaagaagctctcaata

SEQ ID NO: 20264 - DNA, 20 bp, synthetic construct
  misc_feature 1..20: note = chemically synthesized
  source 1..20: mol_type = other DNA
aagctctcaatatggcctat

SEQ ID NO: 20265 - DNA, 20 bp, synthetic construct
  misc_feature 1..20: note = chemically synthesized
  source 1..20: mol_type = other DNA
tatggcctatgagtttataa

SEQ ID NO: 20266 - DNA, 20 bp, synthetic construct
  misc_feature 1..20: note = chemically synthesized
  source 1..20: mol_type = other DNA
attctcccttcaattttatg

SEQ ID NO: 20267 - DNA, 20 bp, synthetic construct
  misc_feature 1..20: note = chemically synthesized
  source 1..20: mol_type = other DNA
attgcccttgaatgtctcaa

SEQ ID NO: 20268 - DNA, 20 bp, synthetic construct
  misc_feature 1..20: note = chemically synthesized
  source 1..20: mol_type = other DNA
ttgcccttgaatgtctcaac

SEQ ID NO: 20269 - DNA, 20 bp, synthetic construct
  misc_feature 1..20: note = chemically synthesized
  source 1..20: mol_type = other DNA
atccataatgctgaaaactt

SEQ ID NO: 20270 - DNA, 20 bp, synthetic construct
  misc_feature 1..20: note = chemically synthesized
  source 1..20: mol_type = other DNA
tgaaaacttgagaaaaatca

SEQ ID NO: 20271 - DNA, 20 bp, synthetic construct
  misc_feature 1..20: note = chemically synthesized
  source 1..20: mol_type = other DNA
ttgagaaaaatcatagatct

SEQ ID NO: 20272 - DNA, 20 bp, synthetic construct
  misc_feature 1..20: note = chemically synthesized
  source 1..20: mol_type = other DNA
atctaagccctgcttcattc

SEQ ID NO: 20273 - DNA, 20 bp, synthetic construct
  misc_feature 1..20: note = chemically synthesized
  source 1..20: mol_type = other DNA
gcttcattctagcttcattc

SEQ ID NO: 20274 - DNA, 20 bp, synthetic construct
  misc_feature 1..20: note = chemically synthesized
  source 1..20: mol_type = other DNA
ttcacatgatgatatatttc

SEQ ID NO: 20275 - DNA, 20 bp, synthetic construct
  misc_feature 1..20: note = chemically synthesized
  source 1..20: mol_type = other DNA
tgatatatttctagatgaat

SEQ ID NO: 20276 - DNA, 20 bp, synthetic construct
  misc_feature 1..20: note = chemically synthesized
  source 1..20: mol_type = other DNA
gaataagattcctatacttg

SEQ ID NO: 20277 - DNA, 20 bp, synthetic construct
  misc_feature 1..20: note = chemically synthesized
  source 1..20: mol_type = other DNA
cttgtagcaacactctcacc

SEQ ID NO: 20278 - DNA, 20 bp, synthetic construct
  misc_feature 1..20: note = chemically synthesized
  source 1..20: mol_type = other DNA
ccaagatgcataaatacata

SEQ ID NO: 20279 - DNA, 20 bp, synthetic construct
  misc_feature 1..20: note = chemically synthesized
  source 1..20: mol_type = other DNA
caagatgcataaatacatac

SEQ ID NO: 20280 - DNA, 20 bp, synthetic construct
  misc_feature 1..20: note = chemically synthesized
  source 1..20: mol_type = other DNA
cataaatacatacaggtcca

SEQ ID NO: 20281 - DNA, 20 bp, synthetic construct
  misc_feature 1..20: note = chemically synthesized
  source 1..20: mol_type = other DNA
acatacaggtccatggaaaa

SEQ ID NO: 20282 - DNA, 20 bp, synthetic construct
  misc_feature 1..20: note = chemically synthesized
  source 1..20: mol_type = other DNA
aaagttgtcatgctcacttt

SEQ ID NO: 20283 - DNA, 20 bp, synthetic construct
  misc_feature 1..20: note = chemically synthesized
  source 1..20: mol_type = other DNA
gaacataatttgaatgttac

SEQ ID NO: 20284 - DNA, 20 bp, synthetic construct
  misc_feature 1..20: note = chemically synthesized
  source 1..20: mol_type = other DNA
atttgaatgttaccagatac

SEQ ID NO: 20285 - DNA, 20 bp, synthetic construct
  misc_feature 1..20: note = chemically synthesized
  source 1..20: mol_type = other DNA
tttgaatgttaccagataca

SEQ ID NO: 20286 - DNA, 20 bp, synthetic construct
  misc_feature 1..20: note = chemically synthesized
  source 1..20: mol_type = other DNA
ttgaatgttaccagatacaa

SEQ ID NO: 20287 - DNA, 20 bp, synthetic construct
  misc_feature 1..20: note = chemically synthesized
  source 1..20: mol_type = other DNA
gaatgttaccagatacaagg

SEQ ID NO: 20288 - DNA, 20 bp, synthetic construct
  misc_feature 1..20: note = chemically synthesized
  source 1..20: mol_type = other DNA
ttaccagatacaagggagta

SEQ ID NO: 20289 - DNA, 20 bp, synthetic construct
  misc_feature 1..20: note = chemically synthesized
  source 1..20: mol_type = other DNA
taccagatacaagggagtaa

SEQ ID NO: 20290 - DNA, 20 bp, synthetic construct
  misc_feature 1..20: note = chemically synthesized
  source 1..20: mol_type = other DNA
ccagatacaagggagtaaag

SEQ ID NO: 20291 - DNA, 20 bp, synthetic construct
  misc_feature 1..20: note = chemically synthesized
  source 1..20: mol_type = other DNA
atacaagggagtaaaggaga

SEQ ID NO: 20292 - DNA, 20 bp, synthetic construct
  misc_feature 1..20: note = chemically synthesized
  source 1..20: mol_type = other DNA
acaagggagtaaaggagaca

SEQ ID NO: 20293 - DNA, 20 bp, synthetic construct
  misc_feature 1..20: note = chemically synthesized
  source 1..20: mol_type = other DNA
caagggagtaaaggagacag

SEQ ID NO: 20294 - DNA, 20 bp, synthetic construct
  misc_feature 1..20: note = chemically synthesized
  source 1..20: mol_type = other DNA
aagggagtaaaggagacaga

SEQ ID NO: 20295 - DNA, 20 bp, synthetic construct
  misc_feature 1..20: note = chemically synthesized
  source 1..20: mol_type = other DNA
aggagacagagggaactttg

SEQ ID NO: 20296 - DNA, 20 bp, synthetic construct
  misc_feature 1..20: note = chemically synthesized
  source 1..20: mol_type = other DNA
agagggaactttgtagtatg

SEQ ID NO: 20297 - DNA, 20 bp, synthetic construct
  misc_feature 1..20: note = chemically synthesized
  source 1..20: mol_type = other DNA
gggaactttgtagtatgaag

SEQ ID NO: 20298 - DNA, 20 bp, synthetic construct
  misc_feature 1..20: note = chemically synthesized
  source 1..20: mol_type = other DNA
ggaactttgtagtatgaaga

SEQ ID NO: 20299 - DNA, 20 bp, synthetic construct
  misc_feature 1..20: note = chemically synthesized
  source 1..20: mol_type = other DNA
tttgtagtatgaagaaggaa

SEQ ID NO: 20300 - DNA, 20 bp, synthetic construct
  misc_feature 1..20: note = chemically synthesized
  source 1..20: mol_type = other DNA
tagtatgaagaaggaacaga

SEQ ID NO: 20301 - DNA, 20 bp, synthetic construct
  misc_feature 1..20: note = chemically synthesized
  source 1..20: mol_type = other DNA
agtatgaagaaggaacagac

SEQ ID NO: 20302 - DNA, 20 bp, synthetic construct
  misc_feature 1..20: note = chemically synthesized
  source 1..20: mol_type = other DNA
tgaagaaggaacagacagga

SEQ ID NO: 20303 - DNA, 20 bp, synthetic construct
  misc_feature 1..20: note = chemically synthesized
  source 1..20: mol_type = other DNA
aacagacaggaaagatctgt

SEQ ID NO: 20304 - DNA, 20 bp, synthetic construct
  misc_feature 1..20: note = chemically synthesized
  source 1..20: mol_type = other DNA
aggaaagatctgttagcctc

SEQ ID NO: 20305 - DNA, 20 bp, synthetic construct
  misc_feature 1..20: note = chemically synthesized
  source 1..20: mol_type = other DNA
ctgttagcctcaagaaaatg

SEQ ID NO: 20306 - DNA, 20 bp, synthetic construct
  misc_feature 1..20: note = chemically synthesized
  source 1..20: mol_type = other DNA
cctcaagaaaatgtagtaaa

SEQ ID NO: 20307 - DNA, 20 bp, synthetic construct
  misc_feature 1..20: note = chemically synthesized
  source 1..20: mol_type = other DNA
taaatagtgaatctattata

SEQ ID NO: 20308 - DNA, 20 bp, synthetic construct
  misc_feature 1..20: note = chemically synthesized
  source 1..20: mol_type = other DNA
attatacagtctacataaac

SEQ ID NO: 20309 - DNA, 20 bp, synthetic construct
  misc_feature 1..20: note = chemically synthesized
  source 1..20: mol_type = other DNA
cagtctacataaacaagtga

SEQ ID NO: 20310 - DNA, 20 bp, synthetic construct
  misc_feature 1..20: note = chemically synthesized
  source 1..20: mol_type = other DNA
gtctacataaacaagtgaaa

SEQ ID NO: 20311 - DNA, 20 bp, synthetic construct
  misc_feature 1..20: note = chemically synthesized
  source 1..20: mol_type = other DNA
tctacataaacaagtgaaag

SEQ ID NO: 20312 - DNA, 20 bp, synthetic construct
  misc_feature 1..20: note = chemically synthesized
  source 1..20: mol_type = other DNA
tcctactctgccctccttct

SEQ ID NO: 20313 - DNA, 20 bp, synthetic construct
  misc_feature 1..20: note = chemically synthesized
  source 1..20: mol_type = other DNA
actctgccctccttctgagt

SEQ ID NO: 20314 - DNA, 20 bp, synthetic construct
  misc_feature 1..20: note = chemically synthesized
  source 1..20: mol_type = other DNA
tgccctccttctgagttgga

SEQ ID NO: 20315 - DNA, 20 bp, synthetic construct
  misc_feature 1..20: note = chemically synthesized
  source 1..20: mol_type = other DNA
cctccttctgagttggatgg

SEQ ID NO: 20316 - DNA, 20 bp, synthetic construct
  misc_feature 1..20: note = chemically synthesized
  source 1..20: mol_type = other DNA
atgtgtccccgcaccttcct

SEQ ID NO: 20317 - DNA, 20 bp, synthetic construct
  misc_feature 1..20: note = chemically synthesized
  source 1..20: mol_type = other DNA
tgtgtccccgcaccttccta

SEQ ID NO: 20318 - DNA, 20 bp, synthetic construct
  misc_feature 1..20: note = chemically synthesized
  source 1..20: mol_type = other DNA
tgtccccgcaccttcctaag

SEQ ID NO: 20319 - DNA, 20 bp, synthetic construct
  misc_feature 1..20: note = chemically synthesized
  source 1..20: mol_type = other DNA
cccgcaccttcctaaggaga

SEQ ID NO: 20320 - DNA, 20 bp, synthetic construct
  misc_feature 1..20: note = chemically synthesized
  source 1..20: mol_type = other DNA
ccgcaccttcctaaggagat

SEQ ID NO: 20321 - DNA, 20 bp, synthetic construct
  misc_feature 1..20: note = chemically synthesized
  source 1..20: mol_type = other DNA
aaggagatgggccctgtctc

SEQ ID NO: 20322 - DNA, 20 bp, synthetic construct
  misc_feature 1..20: note = chemically synthesized
  source 1..20: mol_type = other DNA
ccctgtctctagaatttttc

SEQ ID NO: 20323 - DNA, 20 bp, synthetic construct
  misc_feature 1..20: note = chemically synthesized
  source 1..20: mol_type = other DNA
gtctctagaatttttctagt

SEQ ID NO: 20324 - DNA, 20 bp, synthetic construct
  misc_feature 1..20: note = chemically synthesized
  source 1..20: mol_type = other DNA
tgactactcatgccatctct

SEQ ID NO: 20325 - DNA, 20 bp, synthetic construct
  misc_feature 1..20: note = chemically synthesized
  source 1..20: mol_type = other DNA
actactcatgccatctctta

SEQ ID NO: 20326 - DNA, 20 bp, synthetic construct
  misc_feature 1..20: note = chemically synthesized
  source 1..20: mol_type = other DNA
actcatgccatctcttagag

SEQ ID NO: 20327 - DNA, 20 bp, synthetic construct
  misc_feature 1..20: note = chemically synthesized
  source 1..20: mol_type = other DNA
cagttcttcaaacaaacaca

SEQ ID NO: 20328 - DNA, 20 bp, synthetic construct
  misc_feature 1..20: note = chemically synthesized
  source 1..20: mol_type = other DNA
cacatgcatgtgtgtgtttc

SEQ ID NO: 20329 - DNA, 20 bp, synthetic construct
  misc_feature 1..20: note = chemically synthesized
  source 1..20: mol_type = other DNA
acatgcatgtgtgtgtttca

SEQ ID NO: 20330 - DNA, 20 bp, synthetic construct
  misc_feature 1..20: note = chemically synthesized
  source 1..20: mol_type = other DNA
catgcatgtgtgtgtttcaa

SEQ ID NO: 20331 - DNA, 20 bp, synthetic construct
  misc_feature 1..20: note = chemically synthesized
  source 1..20: mol_type = other DNA
atgcatgtgtgtgtttcaag

SEQ ID NO: 20332 - DNA, 20 bp, synthetic construct
  misc_feature 1..20: note = chemically synthesized
  source 1..20: mol_type = other DNA
gtgtttcaaggggtgttgtt

SEQ ID NO: 20333 - DNA, 20 bp, synthetic construct
  misc_feature 1..20: note = chemically synthesized
  source 1..20: mol_type = other DNA
taaattgttatatgttaaaa

SEQ ID NO: 20334 - DNA, 20 bp, synthetic construct
  misc_feature 1..20: note = chemically synthesized
  source 1..20: mol_type = other DNA
acttttctttctataaattt

SEQ ID NO: 20335 - DNA, 20 bp, synthetic construct
  misc_feature 1..20: note = chemically synthesized
  source 1..20: mol_type = other DNA
cttttctttctataaatttc

SEQ ID NO: 20336 - DNA, 20 bp, synthetic construct
  misc_feature 1..20: note = chemically synthesized
  source 1..20: mol_type = other DNA
ttctataaatttcaggatct

SEQ ID NO: 20337 - DNA, 20 bp, synthetic construct
  misc_feature 1..20: note = chemically synthesized
  source 1..20: mol_type = other DNA
tataaatttcaggatcttag

SEQ ID NO: 20338 - DNA, 20 bp, synthetic construct
  misc_feature 1..20: note = chemically synthesized
  source 1..20: mol_type = other DNA
taaatttcaggatcttagca

SEQ ID NO: 20339 - DNA, 20 bp, synthetic construct
  misc_feature 1..20: note = chemically synthesized
  source 1..20: mol_type = other DNA
ttcaggatcttagcagagtg

SEQ ID NO: 20340 - DNA, 20 bp, synthetic construct
  misc_feature 1..20: note = chemically synthesized
  source 1..20: mol_type = other DNA
aggatcttagcagagtgcag

SEQ ID NO: 20341 - DNA, 20 bp, synthetic construct
  misc_feature 1..20: note = chemically synthesized
  source 1..20: mol_type = other DNA
cttagcagagtgcagaagct

SEQ ID NO: 20342 - DNA, 20 bp, synthetic construct
  misc_feature 1..20: note = chemically synthesized
  source 1..20: mol_type = other DNA
gtgcagaagctcagcctgtt

SEQ ID NO: 20343 - DNA, 20 bp, synthetic construct
  misc_feature 1..20: note = chemically synthesized
  source 1..20: mol_type = other DNA
tgcagaagctcagcctgttt

SEQ ID NO: 20344 - DNA, 20 bp, synthetic construct
  misc_feature 1..20: note = chemically synthesized
  source 1..20: mol_type = other DNA
aagctcagcctgtttaggtt

SEQ ID NO: 20345 - DNA, 20 bp, synthetic construct
  misc_feature 1..20: note = chemically synthesized
  source 1..20: mol_type = other DNA
attgtctttaatcttcaaaa

SEQ ID NO: 20346 - DNA, 20 bp, synthetic construct
  misc_feature 1..20: note = chemically synthesized
  source 1..20: mol_type = other DNA
tctttaatcttcaaaaaagt

SEQ ID NO: 20347 - DNA, 20 bp, synthetic construct
  misc_feature 1..20: note = chemically synthesized
  source 1..20: mol_type = other DNA
aaaaaagtgagtcctccatt

SEQ ID NO: 20348 - DNA, 20 bp, synthetic construct
  misc_feature 1..20: note = chemically synthesized
  source 1..20: mol_type = other DNA
gtgagtcctccatttggccc

SEQ ID NO: 20349 - DNA, 20 bp, synthetic construct
  misc_feature 1..20: note = chemically synthesized
  source 1..20: mol_type = other DNA
ctccatttggccccagtcct

SEQ ID NO: 20350 - DNA, 20 bp, synthetic construct
  misc_feature 1..20: note = chemically synthesized
  source 1..20: mol_type = other DNA
tccatttggccccagtcctg

SEQ ID NO: 20351 - DNA, 20 bp, synthetic construct
  misc_feature 1..20: note = chemically synthesized
  source 1..20: mol_type = other DNA
ccatttggccccagtcctga

SEQ ID NO: 20352 - DNA, 20 bp, synthetic construct
  misc_feature 1..20: note = chemically synthesized
  source 1..20: mol_type = other DNA
ccccagtcctgagggcctga

SEQ ID NO: 20353 - DNA, 20 bp, synthetic construct
  misc_feature 1..20: note = chemically synthesized
  source 1..20: mol_type = other DNA
agtcctgagggcctgacagt

SEQ ID NO: 20354 - DNA, 20 bp, synthetic construct
  misc_feature 1..20: note = chemically synthesized
  source 1..20: mol_type = other DNA
gtcctgagggcctgacagtt

SEQ ID NO: 20355 - DNA, 20 bp, synthetic construct
  misc_feature 1..20: note = chemically synthesized
  source 1..20: mol_type = other DNA
agttgggactacccaactct

SEQ ID NO: 20356 - DNA, 20 bp, synthetic construct
  misc_feature 1..20: note = chemically synthesized
  source 1..20: mol_type = other DNA
ctcagatttctattgtccac

SEQ ID NO: 20357 - DNA, 20 bp, synthetic construct
  misc_feature 1..20: note = chemically synthesized
  source 1..20: mol_type = other DNA
tcctcctgccttctccaacc

SEQ ID NO: 20358 - DNA, 20 bp, synthetic construct
  misc_feature 1..20: note = chemically synthesized
  source 1..20: mol_type = other DNA
ttcaatccaatttgctttct

SEQ ID NO: 20359 - DNA, 20 bp, synthetic construct
  misc_feature 1..20: note = chemically synthesized
  source 1..20: mol_type = other DNA
tgctttcttagatcttaatt

SEQ ID NO: 20360 - DNA, 20 bp, synthetic construct
  misc_feature 1..20: note = chemically synthesized
  source 1..20: mol_type = other DNA
taatttggctgcccttttct

SEQ ID NO: 20361 - DNA, 20 bp, synthetic construct
  misc_feature 1..20: note = chemically synthesized
  source 1..20: mol_type = other DNA
ctaagcctttcaactcgatt

SEQ ID NO: 20362 - DNA, 20 bp, synthetic construct
  misc_feature 1..20: note = chemically synthesized
  source 1..20: mol_type = other DNA
agaattttttgtctactctt

SEQ ID NO: 20363 - DNA, 20 bp, synthetic construct
  misc_feature 1..20: note = chemically synthesized
  source 1..20: mol_type = other DNA
aattttttgtctactcttca

SEQ ID NO: 20364 - DNA, 20 bp, synthetic construct
  misc_feature 1..20: note = chemically synthesized
  source 1..20: mol_type = other DNA
tcaacaaaaaatcctctgaa

SEQ ID NO: 20365 - DNA, 20 bp, synthetic construct
  misc_feature 1..20: note = chemically synthesized
  source 1..20: mol_type = other DNA
caacaaaaaatcctctgaac

SEQ ID NO: 20366 - DNA, 20 bp, synthetic construct
  misc_feature 1..20: note = chemically synthesized
  source 1..20: mol_type = other DNA
aaaaaatcctctgaacagga

SEQ ID NO: 20367 - DNA, 20 bp, synthetic construct
  misc_feature 1..20: note = chemically synthesized
  source 1..20: mol_type = other DNA
ataaaaaataaacgtaaaat

SEQ ID NO: 20368 - DNA, 20 bp, synthetic construct
  misc_feature 1..20: note = chemically synthesized
  source 1..20: mol_type = other DNA
aacgtaaaataagccctttc

SEQ ID NO: 20369 - DNA, 20 bp, synthetic construct
  misc_feature 1..20: note = chemically synthesized
  source 1..20: mol_type = other DNA
tttctggataaacaaaaact

SEQ ID NO: 20370 - DNA, 20 bp, synthetic construct
  misc_feature 1..20: note = chemically synthesized
  source 1..20: mol_type = other DNA
aaactgagttgatttcaact

SEQ ID NO: 20371 - DNA, 20 bp, synthetic construct
  misc_feature 1..20: note = chemically synthesized
  source 1..20: mol_type = other DNA
aagttgaaaccaaatgacca

SEQ ID NO: 20372 - DNA, 20 bp, synthetic construct
  misc_feature 1..20: note = chemically synthesized
  source 1..20: mol_type = other DNA
gaatctacataaaatgacaa

SEQ ID NO: 20373 - DNA, 20 bp, synthetic construct
  misc_feature 1..20: note = chemically synthesized
  source 1..20: mol_type = other DNA
acataaaatgacaaaagcac

SEQ ID NO: 20374 - DNA, 20 bp, synthetic construct
  misc_feature 1..20: note = chemically synthesized
  source 1..20: mol_type = other DNA
aaatgacaaaagcaccagta

SEQ ID NO: 20375 - DNA, 20 bp, synthetic construct
  misc_feature 1..20: note = chemically synthesized
  source 1..20: mol_type = other DNA
gacaaaagcaccagtaaaga

SEQ ID NO: 20376 - DNA, 20 bp, synthetic construct
  misc_feature 1..20: note = chemically synthesized
  source 1..20: mol_type = other DNA
taaagatagtcatgtcatta

SEQ ID NO: 20377 - DNA, 20 bp, synthetic construct
  misc_feature 1..20: note = chemically synthesized
  source 1..20: mol_type = other DNA
agatagtcatgtcattatag

SEQ ID NO: 20378 - DNA, 20 bp, synthetic construct
  misc_feature 1..20: note = chemically synthesized
  source 1..20: mol_type = other DNA
gaatgtattacaataaaaaa

SEQ ID NO: 20379 - DNA, 20 bp, synthetic construct
  misc_feature 1..20: note = chemically synthesized
  source 1..20: mol_type = other DNA
aaaaaatagaattgcattgc

SEQ ID NO: 20380 - DNA, 20 bp, synthetic construct
  misc_feature 1..20: note = chemically synthesized
  source 1..20: mol_type = other DNA
tatttaccaataactgaaca

SEQ ID NO: 20381 - DNA, 20 bp, synthetic construct
  misc_feature 1..20: note = chemically synthesized
  source 1..20: mol_type = other DNA
atttaccaataactgaacaa

SEQ ID NO: 20382 - DNA, 20 bp, synthetic construct
  misc_feature 1..20: note = chemically synthesized
  source 1..20: mol_type = other DNA
ttaccaataactgaacaaag

SEQ ID NO: 20383 - DNA, 20 bp, synthetic construct
  misc_feature 1..20: note = chemically synthesized
  source 1..20: mol_type = other DNA
taccaataactgaacaaagg

SEQ ID NO: 20384 - DNA, 20 bp, synthetic construct
  misc_feature 1..20: note = chemically synthesized
  source 1..20: mol_type = other DNA
aataactgaacaaaggaggt

SEQ ID NO: 20385 - DNA, 20 bp, synthetic construct
  misc_feature 1..20: note = chemically synthesized
  source 1..20: mol_type = other DNA
aaaggaggtgagtgataaca

SEQ ID NO: 20386 - DNA, 20 bp, synthetic construct
  misc_feature 1..20: note = chemically synthesized
  source 1..20: mol_type = other DNA
gagtgataacaaagctgttt

SEQ ID NO: 20387 - DNA, 20 bp, synthetic construct
  misc_feature 1..20: note = chemically synthesized
  source 1..20: mol_type = other DNA
aacaaagctgttttggaatg

SEQ ID NO: 20388 - DNA, 20 bp, synthetic construct
  misc_feature 1..20: note = chemically synthesized
  source 1..20: mol_type = other DNA
agaaatattctctgaaaaaa

SEQ ID NO: 20389 - DNA, 20 bp, synthetic construct
  misc_feature 1..20: note = chemically synthesized
  source 1..20: mol_type = other DNA
aaaagctataaacatctaca

SEQ ID NO: 20390 - DNA, 20 bp, synthetic construct
  misc_feature 1..20: note = chemically synthesized
  source 1..20: mol_type = other DNA
aaacatctacatagaaaaat

SEQ ID NO: 20391 - DNA, 20 bp, synthetic construct
  misc_feature 1..20: note = chemically synthesized
  source 1..20: mol_type = other DNA
atctacatagaaaaatgagt

SEQ ID NO: 20392 - DNA, 20 bp, synthetic construct
  misc_feature 1..20: note = chemically synthesized
  source 1..20: mol_type = other DNA
agaatgcacaatgacacatg

SEQ ID NO: 20393 - DNA, 20 bp, synthetic construct
  misc_feature 1..20: note = chemically synthesized
  source 1..20: mol_type = other DNA
acaatgacacatgcagttct

SEQ ID NO: 20394 - DNA, 20 bp, synthetic construct
  misc_feature 1..20: note = chemically synthesized
  source 1..20: mol_type = other DNA
aattatacttatgccaatcc

SEQ ID NO: 20395 - DNA, 20 bp, synthetic construct
  misc_feature 1..20: note = chemically synthesized
  source 1..20: mol_type = other DNA
attatacttatgccaatcca

SEQ ID NO: 20396 - DNA, 20 bp, synthetic construct
  misc_feature 1..20: note = chemically synthesized
  source 1..20: mol_type = other DNA
ttatacttatgccaatccaa

SEQ ID NO: 20397 - DNA, 20 bp, synthetic construct
  misc_feature 1..20: note = chemically synthesized
  source 1..20: mol_type = other DNA
ttatgccaatccaagggtcc

SEQ ID NO: 20398 - DNA, 20 bp, synthetic construct
  misc_feature 1..20: note = chemically synthesized
  source 1..20: mol_type = other DNA
ccaatccaagggtcccagat

SEQ ID NO: 20399 - DNA, 20 bp, synthetic construct
  misc_feature 1..20: note = chemically synthesized
  source 1..20: mol_type = other DNA
tagaaaacctaaatctatca

SEQ ID NO: 20400 - DNA, 20 bp, synthetic construct
  misc_feature 1..20: note = chemically synthesized
  source 1..20: mol_type = other DNA
ccttaaatactctttcaaaa

SEQ ID NO: 20401 - DNA, 20 bp, synthetic construct
  misc_feature 1..20: note = chemically synthesized
  source 1..20: mol_type = other DNA
aaaaaaaaaaatctgtgctg

SEQ ID NO: 20402 - DNA, 20 bp, synthetic construct
  misc_feature 1..20: note = chemically synthesized
  source 1..20: mol_type = other DNA
aaaaaaaaaatctgtgctgt

SEQ ID NO: 20403 - DNA, 20 bp, synthetic construct
  misc_feature 1..20: note = chemically synthesized
  source 1..20: mol_type = other DNA
tgctgtaggatatcccacct

SEQ ID NO: 20404 - DNA, 20 bp, synthetic construct
  misc_feature 1..20: note = chemically synthesized
  source 1..20: mol_type = other DNA
tcagctgtgatctttacctc

SEQ ID NO: 20405 - DNA, 20 bp, synthetic construct
  misc_feature 1..20: note = chemically synthesized
  source 1..20: mol_type = other DNA
cagctgtgatctttacctct

SEQ ID NO: 20406 - DNA, 20 bp, synthetic construct
  misc_feature 1..20: note = chemically synthesized
  source 1..20: mol_type = other DNA
ctgtgatctttacctctagg

SEQ ID NO: 20407 - DNA, 20 bp, synthetic construct
  misc_feature 1..20: note = chemically synthesized
  source 1..20: mol_type = other DNA
tttacctctaggcagacctc

SEQ ID NO: 20408 - DNA, 20 bp, synthetic construct
  misc_feature 1..20: note = chemically synthesized
  source 1..20: mol_type = other DNA
ccttcttatatgctttcctt

SEQ ID NO: 20409 - DNA, 20 bp, synthetic construct
  misc_feature 1..20: note = chemically synthesized
  source 1..20: mol_type = other DNA
tccttgagtgcatctcacat

SEQ ID NO: 20410 - DNA, 20 bp, synthetic construct
  misc_feature 1..20: note = chemically synthesized
  source 1..20: mol_type = other DNA
ttgagtgcatctcacatcag

SEQ ID NO: 20411 - DNA, 20 bp, synthetic construct
  misc_feature 1..20: note = chemically synthesized
  source 1..20: mol_type = other DNA
gagtgcatctcacatcagaa

SEQ ID NO: 20412 - DNA, 20 bp, synthetic construct
  misc_feature 1..20: note = chemically synthesized
  source 1..20: mol_type = other DNA
gtgcatctcacatcagaaga

SEQ ID NO: 20413 - DNA, 20 bp, synthetic construct
  misc_feature 1..20: note = chemically synthesized
  source 1..20: mol_type = other DNA
gcatctcacatcagaagaga

SEQ ID NO: 20414 - DNA, 20 bp, synthetic construct
  misc_feature 1..20: note = chemically synthesized
  source 1..20: mol_type = other DNA
catctcacatcagaagagag

SEQ ID NO: 20415 - DNA, 20 bp, synthetic construct
  misc_feature 1..20: note = chemically synthesized
  source 1..20: mol_type = other DNA
agaggaatcattccatattc

SEQ ID NO: 20416 - DNA, 20 bp, synthetic construct
  misc_feature 1..20: note = chemically synthesized
  source 1..20: mol_type = other DNA
tcattccatattcaagttcc

SEQ ID NO: 20417 - DNA, 20 bp, synthetic construct
  misc_feature 1..20: note = chemically synthesized
  source 1..20: mol_type = other DNA
tcctggcactcacccactca

SEQ ID NO: 20418 - DNA, 20 bp, synthetic construct
  misc_feature 1..20: note = chemically synthesized
  source 1..20: mol_type = other DNA
ctcacccactcacagtattg

SEQ ID NO: 20419 - DNA, 20 bp, synthetic construct
  misc_feature 1..20: note = chemically synthesized
  source 1..20: mol_type = other DNA
tcacagtattgtggctaaaa

SEQ ID NO: 20420 - DNA, 20 bp, synthetic construct
  misc_feature 1..20: note = chemically synthesized
  source 1..20: mol_type = other DNA
cacagtattgtggctaaaat

SEQ ID NO: 20421 - DNA, 20 bp, synthetic construct
  misc_feature 1..20: note = chemically synthesized
  source 1..20: mol_type = other DNA
aacctattcctgtcctcttt

SEQ ID NO: 20422 - DNA, 20 bp, synthetic construct
  misc_feature 1..20: note = chemically synthesized
  source 1..20: mol_type = other DNA
acctattcctgtcctctttg

SEQ ID NO: 20423 - DNA, 20 bp, synthetic construct
  misc_feature 1..20: note = chemically synthesized
  source 1..20: mol_type = other DNA
tcctgtcctctttgaggact

SEQ ID NO: 20424 - DNA, 20 bp, synthetic construct
  misc_feature 1..20: note = chemically synthesized
  source 1..20: mol_type = other DNA
tcctctttgaggactcagtt

SEQ ID NO: 20425 - DNA, 20 bp, synthetic construct
  misc_feature 1..20: note = chemically synthesized
  source 1..20: mol_type = other DNA
cagttcagatcattcactca

SEQ ID NO: 20426 - DNA, 20 bp, synthetic construct
  misc_feature 1..20: note = chemically synthesized
  source 1..20: mol_type = other DNA
ttcactcacagacctctcat

SEQ ID NO: 20427 - DNA, 20 bp, synthetic construct
  misc_feature 1..20: note = chemically synthesized
  source 1..20: mol_type = other DNA
tcactcacagacctctcatg

SEQ ID NO: 20428 - DNA, 20 bp, synthetic construct
  misc_feature 1..20: note = chemically synthesized
  source 1..20: mol_type = other DNA
tctcatgaggcctcatttta

SEQ ID NO: 20429 - DNA, 20 bp, synthetic construct
  misc_feature 1..20: note = chemically synthesized
  source 1..20: mol_type = other DNA
cattttaaagcttatgcatg

SEQ ID NO: 20430 - DNA, 20 bp, synthetic construct
  misc_feature 1..20: note = chemically synthesized
  source 1..20: mol_type = other DNA
atgtggaaatcacctcccct

SEQ ID NO: 20431 - DNA, 20 bp, synthetic construct
  misc_feature 1..20: note = chemically synthesized
  source 1..20: mol_type = other DNA
tcccctgagtttcatctttc

SEQ ID NO: 20432 - DNA, 20 bp, synthetic construct
  misc_feature 1..20: note = chemically synthesized
  source 1..20: mol_type = other DNA
gtttcatctttctagcatct

SEQ ID NO: 20433 - DNA, 20 bp, synthetic construct
  misc_feature 1..20: note = chemically synthesized
  source 1..20: mol_type = other DNA
tttcatctttctagcatctc

SEQ ID NO: 20434 - DNA, 20 bp, synthetic construct
  misc_feature 1..20: note = chemically synthesized
  source 1..20: mol_type = other DNA
tcatctttctagcatctcag

SEQ ID NO: 20435 - DNA, 20 bp, synthetic construct
  misc_feature 1..20: note = chemically synthesized
  source 1..20: mol_type = other DNA
ccttccctctcttctctgtt

SEQ ID NO: 20436 - DNA, 20 bp, synthetic construct
  misc_feature 1..20: note = chemically synthesized
  source 1..20: mol_type = other DNA
cttccctctcttctctgttc

SEQ ID NO: 20437 - DNA, 20 bp, synthetic construct
  misc_feature 1..20: note = chemically synthesized
  source 1..20: mol_type = other DNA
tccctctcttctctgttcgg

SEQ ID NO: 20438 - DNA, 20 bp, synthetic construct
  misc_feature 1..20: note = chemically synthesized
  source 1..20: mol_type = other DNA
ccctctcttctctgttcggg

SEQ ID NO: 20439 - DNA, 20 bp, synthetic construct
  misc_feature 1..20: note = chemically synthesized
  source 1..20: mol_type = other DNA
tcttctctgttcgggaggaa

SEQ ID NO: 20440 - DNA, 20 bp, synthetic construct
  misc_feature 1..20: note = chemically synthesized
  source 1..20: mol_type = other DNA
cttctctgttcgggaggaac

SEQ ID NO: 20441 - DNA, 20 bp, synthetic construct
  misc_feature 1..20: note = chemically synthesized
  source 1..20: mol_type = other DNA
ttctctgttcgggaggaaca

SEQ ID NO: 20442 - DNA, 20 bp, synthetic construct
  misc_feature 1..20: note = chemically synthesized
  source 1..20: mol_type = other DNA
ggccccacaactgatgtcct

SEQ ID NO: 20443 - DNA, 20 bp, synthetic construct
  misc_feature 1..20: note = chemically synthesized
  source 1..20: mol_type = other DNA
gccccacaactgatgtcctc

SEQ ID NO: 20444 - DNA, 20 bp, synthetic construct
  misc_feature 1..20: note = chemically synthesized
  source 1..20: mol_type = other DNA
actgatgtcctcgggatttt

SEQ ID NO: 20445 - DNA, 20 bp, synthetic construct
  misc_feature 1..20: note = chemically synthesized
  source 1..20: mol_type = other DNA
ctgatgtcctcgggattttc

SEQ ID NO: 20446 - DNA, 20 bp, synthetic construct
  misc_feature 1..20: note = chemically synthesized
  source 1..20: mol_type = other DNA
ggattttcaggtgtttcctg

SEQ ID NO: 20447 - DNA, 20 bp, synthetic construct
  misc_feature 1..20: note = chemically synthesized
  source 1..20: mol_type = other DNA
ttcaggtgtttcctgaagaa

SEQ ID NO: 20448 - DNA, 20 bp, synthetic construct
  misc_feature 1..20: note = chemically synthesized
  source 1..20: mol_type = other DNA
tcaggtgtttcctgaagaat

SEQ ID NO: 20449 - DNA, 20 bp, synthetic construct
  misc_feature 1..20: note = chemically synthesized
  source 1..20: mol_type = other DNA
caggtgtttcctgaagaatg

SEQ ID NO: 20450 - DNA, 20 bp, synthetic construct
  misc_feature 1..20: note = chemically synthesized
  source 1..20: mol_type = other DNA
tgtttcctgaagaatggggt

SEQ ID NO: 20451 - DNA, 20 bp, synthetic construct
  misc_feature 1..20: note = chemically synthesized
  source 1..20: mol_type = other DNA
gtttcctgaagaatggggtg

SEQ ID NO: 20452 - DNA, 20 bp, synthetic construct
  misc_feature 1..20: note = chemically synthesized
  source 1..20: mol_type = other DNA
aaaatttgaaattcaaaaac

SEQ ID NO: 20453 - DNA, 20 bp, synthetic construct
  misc_feature 1..20: note = chemically synthesized
  source 1..20: mol_type = other DNA
attcaaaaaccagctgatgt

SEQ ID NO: 20454 - DNA, 20 bp, synthetic construct
  misc_feature 1..20: note = chemically synthesized
  source 1..20: mol_type = other DNA
aaaaaccagctgatgtaaga

SEQ ID NO: 20455 - DNA, 20 bp, synthetic construct
  misc_feature 1..20: note = chemically synthesized
  source 1..20: mol_type = other DNA
aaaaccagctgatgtaagat

SEQ ID NO: 20456 - DNA, 20 bp, synthetic construct
  misc_feature 1..20: note = chemically synthesized
  source 1..20: mol_type = other DNA
aaaccagctgatgtaagata

SEQ ID NO: 20457 - DNA, 20 bp, synthetic construct
  misc_feature 1..20: note = chemically synthesized
  source 1..20: mol_type = other DNA
ctgatgtaagatagggatac

SEQ ID NO: 20458 - DNA, 20 bp, synthetic construct
  misc_feature 1..20: note = chemically synthesized
  source 1..20: mol_type = other DNA
tgatgtaagatagggatacc

SEQ ID NO: 20459 - DNA, 20 bp, synthetic construct
  misc_feature 1..20: note = chemically synthesized
  source 1..20: mol_type = other DNA
gatgtaagatagggatacca

SEQ ID NO: 20460 - DNA, 20 bp, synthetic construct
  misc_feature 1..20: note = chemically synthesized
  source 1..20: mol_type = other DNA
aagatagggataccagggct

SEQ ID NO: 20461 - DNA, 20 bp, synthetic construct
  misc_feature 1..20: note = chemically synthesized
  source 1..20: mol_type = other DNA
agggcttggttatgtgaccc

SEQ ID NO: 20462 - DNA, 20 bp, synthetic construct
  misc_feature 1..20: note = chemically synthesized
  source 1..20: mol_type = other DNA
gggcttggttatgtgaccca

SEQ ID NO: 20463 - DNA, 20 bp, synthetic construct
  misc_feature 1..20: note = chemically synthesized
  source 1..20: mol_type = other DNA
gcttggttatgtgacccaag

SEQ ID NO: 20464 - DNA, 20 bp, synthetic construct
  misc_feature 1..20: note = chemically synthesized
  source 1..20: mol_type = other DNA
cttggttatgtgacccaagg

SEQ ID NO: 20465 - DNA, 20 bp, synthetic construct
  misc_feature 1..20: note = chemically synthesized
  source 1..20: mol_type = other DNA
ttatgtgacccaaggaggct

SEQ ID NO: 20466 - DNA, 20 bp, synthetic construct
  misc_feature 1..20: note = chemically synthesized
  source 1..20: mol_type = other DNA
ggaggctcagcatcataact

SEQ ID NO: 20467 - DNA, 20 bp, synthetic construct
  misc_feature 1..20: note = chemically synthesized
  source 1..20: mol_type = other DNA
tcataacttagtttatttga

SEQ ID NO: 20468 - DNA, 20 bp, synthetic construct
  misc_feature 1..20: note = chemically synthesized
  source 1..20: mol_type = other DNA
cataacttagtttatttgaa

SEQ ID NO: 20469 - DNA, 20 bp, synthetic construct
  misc_feature 1..20: note = chemically synthesized
  source 1..20: mol_type = other DNA
ataacttagtttatttgaaa

SEQ ID NO: 20470 - DNA, 20 bp, synthetic construct
  misc_feature 1..20: note = chemically synthesized
  source 1..20: mol_type = other DNA
cttagtttatttgaaagggt

SEQ ID NO: 20471 - DNA, 20 bp, synthetic construct
  misc_feature 1..20: note = chemically synthesized
  source 1..20: mol_type = other DNA
ttagtttatttgaaagggtt

SEQ ID NO: 20472 - DNA, 20 bp, synthetic construct
  misc_feature 1..20: note = chemically synthesized
  source 1..20: mol_type = other DNA
tagtttatttgaaagggtta

SEQ ID NO: 20473 - DNA, 20 bp, synthetic construct
  misc_feature 1..20: note = chemically synthesized
  source 1..20: mol_type = other DNA
agtttatttgaaagggttag

SEQ ID NO: 20474 - DNA, 20 bp, synthetic construct
  misc_feature 1..20: note = chemically synthesized
  source 1..20: mol_type = other DNA
ttgaaagggttaggggatat

SEQ ID NO: 20475 - DNA, 20 bp, synthetic construct
  misc_feature 1..20: note = chemically synthesized
  source 1..20: mol_type = other DNA
taggggatatcggttgtctt

SEQ ID NO: 20476 - DNA, 20 bp, synthetic construct
  misc_feature 1..20: note = chemically synthesized
  source 1..20: mol_type = other DNA
aggggatatcggttgtcttc

SEQ ID NO: 20477 - DNA, 20 bp, synthetic construct
  misc_feature 1..20: note = chemically synthesized
  source 1..20: mol_type = other DNA
ggggatatcggttgtcttca

SEQ ID NO: 20478 - DNA, 20 bp, synthetic construct
  misc_feature 1..20: note = chemically synthesized
  source 1..20: mol_type = other DNA
agggatcatatgtacctcta

SEQ ID NO: 20479 - DNA, 20 bp, synthetic construct
  misc_feature 1..20: note = chemically synthesized
  source 1..20: mol_type = other DNA
gggatcatatgtacctctac

SEQ ID NO: 20480 - DNA, 20 bp, synthetic construct
  misc_feature 1..20: note = chemically synthesized
  source 1..20: mol_type = other DNA
atatgtacctctacgggtcc

SEQ ID NO: 20481 - DNA, 20 bp, synthetic construct
  misc_feature 1..20: note = chemically synthesized
  source 1..20: mol_type = other DNA
atgtacctctacgggtccta

SEQ ID NO: 20482 - DNA, 20 bp, synthetic construct
  misc_feature 1..20: note = chemically synthesized
  source 1..20: mol_type = other DNA
ttttgtctttcctgttactt

SEQ ID NO: 20483 - DNA, 20 bp, synthetic construct
  misc_feature 1..20: note = chemically synthesized
  source 1..20: mol_type = other DNA
taaaatttgttcttatctac

SEQ ID NO: 20484 - DNA, 20 bp, synthetic construct
  misc_feature 1..20: note = chemically synthesized
  source 1..20: mol_type = other DNA
cttatctactggaacttcaa

SEQ ID NO: 20485 - DNA, 20 bp, synthetic construct
  misc_feature 1..20: note = chemically synthesized
  source 1..20: mol_type = other DNA
aacttcaatggatctgttaa

SEQ ID NO: 20486 - DNA, 20 bp, synthetic construct
  misc_feature 1..20: note = chemically synthesized
  source 1..20: mol_type = other DNA
tggatctgttaatagtcatg

SEQ ID NO: 20487 - DNA, 20 bp, synthetic construct
  misc_feature 1..20: note = chemically synthesized
  source 1..20: mol_type = other DNA
tcatgcagattcatgacatt

SEQ ID NO: 20488 - DNA, 20 bp, synthetic construct
  misc_feature 1..20: note = chemically synthesized
  source 1..20: mol_type = other DNA
tttttttttttttttttttt

SEQ ID NO: 20489 - DNA, 20 bp, synthetic construct
  misc_feature 1..20: note = chemically synthesized
  source 1..20: mol_type = other DNA
tttttttttttttttttaga

SEQ ID NO: 20490 - DNA, 20 bp, synthetic construct
  misc_feature 1..20: note = chemically synthesized
  source 1..20: mol_type = other DNA
tttttttttttttttagata

SEQ ID NO: 20491 - DNA, 20 bp, synthetic construct
  misc_feature 1..20: note = chemically synthesized
  source 1..20: mol_type = other DNA
atagagtctcactctgtcgc

SEQ ID NO: 20492 - DNA, 20 bp, synthetic construct
  misc_feature 1..20: note = chemically synthesized
  source 1..20: mol_type = other DNA
tagagtctcactctgtcgcc

SEQ ID NO: 20493 - DNA, 20 bp, synthetic construct
  misc_feature 1..20: note = chemically synthesized
  source 1..20: mol_type = other DNA
gtctcactctgtcgccaggc

SEQ ID NO: 20494 - DNA, 20 bp, synthetic construct
  misc_feature 1..20: note = chemically synthesized
  source 1..20: mol_type = other DNA
ctcactctgtcgccaggctg

SEQ ID NO: 20495 - DNA, 20 bp, synthetic construct
  misc_feature 1..20: note = chemically synthesized
  source 1..20: mol_type = other DNA
tctgtcgccaggctggagtg

SEQ ID NO: 20496 - DNA, 20 bp, synthetic construct
  misc_feature 1..20: note = chemically synthesized
  source 1..20: mol_type = other DNA
gtcgccaggctggagtgcag

SEQ ID NO: 20497 - DNA, 20 bp, synthetic construct
  misc_feature 1..20: note = chemically synthesized
  source 1..20: mol_type = other DNA
ggagtgcagtagcacaatct

SEQ ID NO: 20498 - DNA, 20 bp, synthetic construct
  misc_feature 1..20: note = chemically synthesized
  source 1..20: mol_type = other DNA
tcactgcaaactccacctcc

SEQ ID NO: 20499 - DNA, 20 bp, synthetic construct
  misc_feature 1..20: note = chemically synthesized
  source 1..20: mol_type = other DNA
cactgcaaactccacctccc

SEQ ID NO: 20500 - DNA, 20 bp, synthetic construct
  misc_feature 1..20: note = chemically synthesized
  source 1..20: mol_type = other DNA
aaactccacctcccaggttc

SEQ ID NO: 20501 - DNA, 20 bp, synthetic construct
  misc_feature 1..20: note = chemically synthesized
  source 1..20: mol_type = other DNA
ttcaagtgattctcctgcca

SEQ ID NO: 20502 - DNA, 20 bp, synthetic construct
  misc_feature 1..20: note = chemically synthesized
  source 1..20: mol_type = other DNA
ttctcctgccacagcctcct

SEQ ID NO: 20503 - DNA, 20 bp, synthetic construct
  misc_feature 1..20: note = chemically synthesized
  source 1..20: mol_type = other DNA
tcctgccacagcctcctgag

SEQ ID NO: 20504 - DNA, 20 bp, synthetic construct
  misc_feature 1..20: note = chemically synthesized
  source 1..20: mol_type = other DNA
gccacagcctcctgagaagc

SEQ ID NO: 20505 - DNA, 20 bp, synthetic construct
  misc_feature 1..20: note = chemically synthesized
  source 1..20: mol_type = other DNA
ccacagcctcctgagaagct

SEQ ID NO: 20506 - DNA, 20 bp, synthetic construct
  misc_feature 1..20: note = chemically synthesized
  source 1..20: mol_type = other DNA
ctcctgagaagctgggacta

SEQ ID NO: 20507 - DNA, 20 bp, synthetic construct
  misc_feature 1..20: note = chemically synthesized
  source 1..20: mol_type = other DNA
ctgagaagctgggactacag

SEQ ID NO: 20508 - DNA, 20 bp, synthetic construct
  misc_feature 1..20: note = chemically synthesized
  source 1..20: mol_type = other DNA
cagtagcgcgtcaccacacc

SEQ ID NO: 20509 - DNA, 20 bp, synthetic construct
  misc_feature 1..20: note = chemically synthesized
  source 1..20: mol_type = other DNA
ccagctaatttttgtatttt

SEQ ID NO: 20510 - DNA, 20 bp, synthetic construct
  misc_feature 1..20: note = chemically synthesized
  source 1..20: mol_type = other DNA
gctaatttttgtatttttag

SEQ ID NO: 20511 - DNA, 20 bp, synthetic construct
  misc_feature 1..20: note = chemically synthesized
  source 1..20: mol_type = other DNA
ttttgtatttttagtagaca

SEQ ID NO: 20512 - DNA, 20 bp, synthetic construct
  misc_feature 1..20: note = chemically synthesized
  source 1..20: mol_type = other DNA
tttgtatttttagtagacac

SEQ ID NO: 20513 - DNA, 20 bp, synthetic construct
  misc_feature 1..20: note = chemically synthesized
  source 1..20: mol_type = other DNA
ttgtatttttagtagacacg

SEQ ID NO: 20514 - DNA, 20 bp, synthetic construct
  misc_feature 1..20: note = chemically synthesized
  source 1..20: mol_type = other DNA
gacacggggtttcaccatat

SEQ ID NO: 20515 - DNA, 20 bp, synthetic construct
  misc_feature 1..20: note = chemically synthesized
  source 1..20: mol_type = other DNA
cggggtttcaccatattggc

SEQ ID NO: 20516 - DNA, 20 bp, synthetic construct
  misc_feature 1..20: note = chemically synthesized
  source 1..20: mol_type = other DNA
ggggtttcaccatattggcc

SEQ ID NO: 20517 - DNA, 20 bp, synthetic construct
  misc_feature 1..20: note = chemically synthesized
  source 1..20: mol_type = other DNA
tttcaccatattggccagga

SEQ ID NO: 20518 - DNA, 20 bp, synthetic construct
  misc_feature 1..20: note = chemically synthesized
  source 1..20: mol_type = other DNA
acctcgtgatccaccctcct

SEQ ID NO: 20519 - DNA, 20 bp, synthetic construct
  misc_feature 1..20: note = chemically synthesized
  source 1..20: mol_type = other DNA
ccaccctccttggcctccca

SEQ ID NO: 20520 - DNA, 20 bp, synthetic construct
  misc_feature 1..20: note = chemically synthesized
  source 1..20: mol_type = other DNA
tccttggcctcccaaagtgc

SEQ ID NO: 20521 - DNA, 20 bp, synthetic construct
  misc_feature 1..20: note = chemically synthesized
  source 1..20: mol_type = other DNA
ccttggcctcccaaagtgct

SEQ ID NO: 20522 - DNA, 20 bp, synthetic construct
  misc_feature 1..20: note = chemically synthesized
  source 1..20: mol_type = other DNA
ctcccaaagtgctgggattg

SEQ ID NO: 20523 - DNA, 20 bp, synthetic construct
  misc_feature 1..20: note = chemically synthesized
  source 1..20: mol_type = other DNA
tcccaaagtgctgggattgc

SEQ ID NO: 20524 - DNA, 20 bp, synthetic construct
  misc_feature 1..20: note = chemically synthesized
  source 1..20: mol_type = other DNA
agtgctgggattgcaggtgt

SEQ ID NO: 20525 - DNA, 20 bp, synthetic construct
  misc_feature 1..20: note = chemically synthesized
  source 1..20: mol_type = other DNA
caggtgtgagtcactgcgcc

SEQ ID NO: 20526 - DNA, 20 bp, synthetic construct
  misc_feature 1..20: note = chemically synthesized
  source 1..20: mol_type = other DNA
cactgcgcccggctgacatt

SEQ ID NO: 20527 - DNA, 20 bp, synthetic construct
  misc_feature 1..20: note = chemically synthesized
  source 1..20: mol_type = other DNA
tcttaaaattatattacttg

SEQ ID NO: 20528 - DNA, 20 bp, synthetic construct
  misc_feature 1..20: note = chemically synthesized
  source 1..20: mol_type = other DNA
ccctttttttttttttttgc

SEQ ID NO: 20529 - DNA, 20 bp, synthetic construct
  misc_feature 1..20: note = chemically synthesized
  source 1..20: mol_type = other DNA
ttttttgccagatacacaat

SEQ ID NO: 20530 - DNA, 20 bp, synthetic construct
  misc_feature 1..20: note = chemically synthesized
  source 1..20: mol_type = other DNA
tttttgccagatacacaatg

SEQ ID NO: 20531 - DNA, 20 bp, synthetic construct
  misc_feature 1..20: note = chemically synthesized
  source 1..20: mol_type = other DNA
tttgccagatacacaatgag

SEQ ID NO: 20532 - DNA, 20 bp, synthetic construct
  misc_feature 1..20: note = chemically synthesized
  source 1..20: mol_type = other DNA
cagatacacaatgaggagca

SEQ ID NO: 20533 - DNA, 20 bp, synthetic construct
  misc_feature 1..20: note = chemically synthesized
  source 1..20: mol_type = other DNA
aggagcatagtctttattca

SEQ ID NO: 20534 - DNA, 20 bp, synthetic construct
  misc_feature 1..20: note = chemically synthesized
  source 1..20: mol_type = other DNA
ctttattcacagaatgtaaa

SEQ ID NO: 20535 - DNA, 20 bp, synthetic construct
  misc_feature 1..20: note = chemically synthesized
  source 1..20: mol_type = other DNA
tgtaaatagtgtgtaatata

SEQ ID NO: 20536 - DNA, 20 bp, synthetic construct
  misc_feature 1..20: note = chemically synthesized
  source 1..20: mol_type = other DNA
agtgtgtaatataaagaaaa

SEQ ID NO: 20537 - DNA, 20 bp, synthetic construct
  misc_feature 1..20: note = chemically synthesized
  source 1..20: mol_type = other DNA
atagttaccacaaattttca

SEQ ID NO: 20538 - DNA, 20 bp, synthetic construct
  misc_feature 1..20: note = chemically synthesized
  source 1..20: mol_type = other DNA
atagcactatcattactgca

SEQ ID NO: 20539 - DNA, 20 bp, synthetic construct
  misc_feature 1..20: note = chemically synthesized
  source 1..20: mol_type = other DNA
cactatcattactgcataga

SEQ ID NO: 20540 - DNA, 20 bp, synthetic construct
  misc_feature 1..20: note = chemically synthesized
  source 1..20: mol_type = other DNA
tatcattactgcatagatgg

SEQ ID NO: 20541 - DNA, 20 bp, synthetic construct
  misc_feature 1..20: note = chemically synthesized
  source 1..20: mol_type = other DNA
gcatagatggtagcatgcta

SEQ ID NO: 20542 - DNA, 20 bp, synthetic construct
  misc_feature 1..20: note = chemically synthesized
  source 1..20: mol_type = other DNA
catagatggtagcatgctaa

SEQ ID NO: 20543 - DNA, 20 bp, synthetic construct
  misc_feature 1..20: note = chemically synthesized
  source 1..20: mol_type = other DNA
atagatggtagcatgctaaa

SEQ ID NO: 20544 - DNA, 20 bp, synthetic construct
  misc_feature 1..20: note = chemically synthesized
  source 1..20: mol_type = other DNA
agatggtagcatgctaaagg

SEQ ID NO: 20545 - DNA, 20 bp, synthetic construct
  misc_feature 1..20: note = chemically synthesized
  source 1..20: mol_type = other DNA
agcatgctaaagggagccca

SEQ ID NO: 20546 - DNA, 20 bp, synthetic construct
  misc_feature 1..20: note = chemically synthesized
  source 1..20: mol_type = other DNA
tgctaaagggagcccacaga

SEQ ID NO: 20547 - DNA, 20 bp, synthetic construct
  misc_feature 1..20: note = chemically synthesized
  source 1..20: mol_type = other DNA
gagcccacagaaagcatctt

SEQ ID NO: 20548 - DNA, 20 bp, synthetic construct
  misc_feature 1..20: note = chemically synthesized
  source 1..20: mol_type = other DNA
agcccacagaaagcatcttt

SEQ ID NO: 20549 - DNA, 20 bp, synthetic construct
  misc_feature 1..20: note = chemically synthesized
  source 1..20: mol_type = other DNA
gcccacagaaagcatctttg

SEQ ID NO: 20550 - DNA, 20 bp, synthetic construct
  misc_feature 1..20: note = chemically synthesized
  source 1..20: mol_type = other DNA
cacagaaagcatctttgggg

SEQ ID NO: 20551 - DNA, 20 bp, synthetic construct
  misc_feature 1..20: note = chemically synthesized
  source 1..20: mol_type = other DNA
acagaaagcatctttggggc

SEQ ID NO: 20552 - DNA, 20 bp, synthetic construct
  misc_feature 1..20: note = chemically synthesized
  source 1..20: mol_type = other DNA
cagaaagcatctttggggca

SEQ ID NO: 20553 - DNA, 20 bp, synthetic construct
  misc_feature 1..20: note = chemically synthesized
  source 1..20: mol_type = other DNA
agaaagcatctttggggcag

SEQ ID NO: 20554 - DNA, 20 bp, synthetic construct
  misc_feature 1..20: note = chemically synthesized
  source 1..20: mol_type = other DNA
ggcaggggaaaatttctcaa

SEQ ID NO: 20555 - DNA, 20 bp, synthetic construct
  misc_feature 1..20: note = chemically synthesized
  source 1..20: mol_type = other DNA
tctcaaaagaaatattattt

SEQ ID NO: 20556 - DNA, 20 bp, synthetic construct
  misc_feature 1..20: note = chemically synthesized
  source 1..20: mol_type = other DNA
taagctaataattgaaaaac

SEQ ID NO: 20557 - DNA, 20 bp, synthetic construct
  misc_feature 1..20: note = chemically synthesized
  source 1..20: mol_type = other DNA
aagctaataattgaaaaaca

SEQ ID NO: 20558 - DNA, 20 bp, synthetic construct
  misc_feature 1..20: note = chemically synthesized
  source 1..20: mol_type = other DNA
ctaataattgaaaaacaagg

SEQ ID NO: 20559 - DNA, 20 bp, synthetic construct
  misc_feature 1..20: note = chemically synthesized
  source 1..20: mol_type = other DNA
taataattgaaaaacaagga

SEQ ID NO: 20560 - DNA, 20 bp, synthetic construct
  misc_feature 1..20: note = chemically synthesized
  source 1..20: mol_type = other DNA
aacaaggaaggtaacaaata

SEQ ID NO: 20561 - DNA, 20 bp, synthetic construct
  misc_feature 1..20: note = chemically synthesized
  source 1..20: mol_type = other DNA
aacaaatatagtgtttgtat

SEQ ID NO: 20562 - DNA, 20 bp, synthetic construct
  misc_feature 1..20: note = chemically synthesized
  source 1..20: mol_type = other DNA
aaatatagtgtttgtataag

SEQ ID NO: 20563 - DNA, 20 bp, synthetic construct
  misc_feature 1..20: note = chemically synthesized
  source 1..20: mol_type = other DNA
aatatagtgtttgtataagt

SEQ ID NO: 20564 - DNA, 20 bp, synthetic construct
  misc_feature 1..20: note = chemically synthesized
  source 1..20: mol_type = other DNA
atatagtgtttgtataagtg

SEQ ID NO: 20565 - DNA, 20 bp, synthetic construct
  misc_feature 1..20: note = chemically synthesized
  source 1..20: mol_type = other DNA
gtgtttgtataagtggggta

SEQ ID NO: 20566 - DNA, 20 bp, synthetic construct
  misc_feature 1..20: note = chemically synthesized
  source 1..20: mol_type = other DNA
taagtggggtacagtttata

SEQ ID NO: 20567 - DNA, 20 bp, synthetic construct
  misc_feature 1..20: note = chemically synthesized
  source 1..20: mol_type = other DNA
aagtggggtacagtttataa

SEQ ID NO: 20568 - DNA, 20 bp, synthetic construct
  misc_feature 1..20: note = chemically synthesized
  source 1..20: mol_type = other DNA
tggggtacagtttataaagg

SEQ ID NO: 20569 - DNA, 20 bp, synthetic construct
  misc_feature 1..20: note = chemically synthesized
  source 1..20: mol_type = other DNA
ataaaggaagaaaaaataca

SEQ ID NO: 20570 - DNA, 20 bp, synthetic construct
  misc_feature 1..20: note = chemically synthesized
  source 1..20: mol_type = other DNA
taaaggaagaaaaaatacac

SEQ ID NO: 20571 - DNA, 20 bp, synthetic construct
  misc_feature 1..20: note = chemically synthesized
  source 1..20: mol_type = other DNA
aagaaaaaatacacaggcta

SEQ ID NO: 20572 - DNA, 20 bp, synthetic construct
  misc_feature 1..20: note = chemically synthesized
  source 1..20: mol_type = other DNA
agaaaaaatacacaggctat

SEQ ID NO: 20573 - DNA, 20 bp, synthetic construct
  misc_feature 1..20: note = chemically synthesized
  source 1..20: mol_type = other DNA
gaaaaaatacacaggctatg

SEQ ID NO: 20574 - DNA, 20 bp, synthetic construct
  misc_feature 1..20: note = chemically synthesized
  source 1..20: mol_type = other DNA
aaatacacaggctatgggga

SEQ ID NO: 20575 - DNA, 20 bp, synthetic construct
  misc_feature 1..20: note = chemically synthesized
  source 1..20: mol_type = other DNA
atacacaggctatggggaaa

SEQ ID NO: 20576 - DNA, 20 bp, synthetic construct
  misc_feature 1..20: note = chemically synthesized
  source 1..20: mol_type = other DNA
aaatatgacaaactcaaatc

SEQ ID NO: 20577 - DNA, 20 bp, synthetic construct
  misc_feature 1..20: note = chemically synthesized
  source 1..20: mol_type = other DNA
atatgacaaactcaaatcaa

SEQ ID NO: 20578 - DNA, 20 bp, synthetic construct
  misc_feature 1..20: note = chemically synthesized
  source 1..20: mol_type = other DNA
aactcaaatcaagagaattc

SEQ ID NO: 20579 - DNA, 20 bp, synthetic construct
  misc_feature 1..20: note = chemically synthesized
  source 1..20: mol_type = other DNA
tcaaatcaagagaattctag

SEQ ID NO: 20580 - DNA, 20 bp, synthetic construct
  misc_feature 1..20: note = chemically synthesized
  source 1..20: mol_type = other DNA
aaatcaagagaattctagca

SEQ ID NO: 20581 - DNA, 20 bp, synthetic construct
  misc_feature 1..20: note = chemically synthesized
  source 1..20: mol_type = other DNA
caagagaattctagcagagc

SEQ ID NO: 20582 - DNA, 20 bp, synthetic construct
  misc_feature 1..20: note = chemically synthesized
  source 1..20: mol_type = other DNA
gccagaataacaaaacatgt

SEQ ID NO: 20583 - DNA, 20 bp, synthetic construct
  misc_feature 1..20: note = chemically synthesized
  source 1..20: mol_type = other DNA
atgtgagaaaattgaacaca

SEQ ID NO: 20584 - DNA, 20 bp, synthetic construct
  misc_feature 1..20: note = chemically synthesized
  source 1..20: mol_type = other DNA
gtgagaaaattgaacacaaa

SEQ ID NO: 20585 - DNA, 20 bp, synthetic construct
  misc_feature 1..20: note = chemically synthesized
  source 1..20: mol_type = other DNA
ttgaacacaaagagaatctg

SEQ ID NO: 20586 - DNA, 20 bp, synthetic construct
  misc_feature 1..20: note = chemically synthesized
  source 1..20: mol_type = other DNA
aacacaaagagaatctgtgg

SEQ ID NO: 20587 - DNA, 20 bp, synthetic construct
  misc_feature 1..20: note = chemically synthesized
  source 1..20: mol_type = other DNA
gagaatctgtggtagcctgt

SEQ ID NO: 20588 - DNA, 20 bp, synthetic construct
  misc_feature 1..20: note = chemically synthesized
  source 1..20: mol_type = other DNA
tattattattattatacttt

SEQ ID NO: 20589 - DNA, 20 bp, synthetic construct
  misc_feature 1..20: note = chemically synthesized
  source 1..20: mol_type = other DNA
tattattatactttaagttt

SEQ ID NO: 20590 - DNA, 20 bp, synthetic construct
  misc_feature 1..20: note = chemically synthesized
  source 1..20: mol_type = other DNA
attattatactttaagtttt

SEQ ID NO: 20591 - DNA, 20 bp, synthetic construct
  misc_feature 1..20: note = chemically synthesized
  source 1..20: mol_type = other DNA
ttattatactttaagtttta

SEQ ID NO: 20592 - DNA, 20 bp, synthetic construct
  misc_feature 1..20: note = chemically synthesized
  source 1..20: mol_type = other DNA
gggtacatgtgcacaatgtg

SEQ ID NO: 20593 - DNA, 20 bp, synthetic construct
  misc_feature 1..20: note = chemically synthesized
  source 1..20: mol_type = other DNA
ggtacatgtgcacaatgtgc

SEQ ID NO: 20594 - DNA, 20 bp, synthetic construct
  misc_feature 1..20: note = chemically synthesized
  source 1..20: mol_type = other DNA
tatgtatacatgtgccatgt

SEQ ID NO: 20595 - DNA, 20 bp, synthetic construct
  misc_feature 1..20: note = chemically synthesized
  source 1..20: mol_type = other DNA
gcacccattaacttgtcact

SEQ ID NO: 20596 - DNA, 20 bp, synthetic construct
  misc_feature 1..20: note = chemically synthesized
  source 1..20: mol_type = other DNA
attaacttgtcacttagcat

SEQ ID NO: 20597 - DNA, 20 bp, synthetic construct
  misc_feature 1..20: note = chemically synthesized
  source 1..20: mol_type = other DNA
ttaacttgtcacttagcatt

SEQ ID NO: 20598 - DNA, 20 bp, synthetic construct
  misc_feature 1..20: note = chemically synthesized
  source 1..20: mol_type = other DNA
cccttccccccacctcacaa

SEQ ID NO: 20599 - DNA, 20 bp, synthetic construct
  misc_feature 1..20: note = chemically synthesized
  source 1..20: mol_type = other DNA
ccccacctcacaacagtccc

SEQ ID NO: 20600 - DNA, 20 bp, synthetic construct
  misc_feature 1..20: note = chemically synthesized
  source 1..20: mol_type = other DNA
ccacctcacaacagtccccg

SEQ ID NO: 20601 - DNA, 20 bp, synthetic construct
  misc_feature 1..20: note = chemically synthesized
  source 1..20: mol_type = other DNA
attgttcaattcccacctat

SEQ ID NO: 20602 - DNA, 20 bp, synthetic construct
  misc_feature 1..20: note = chemically synthesized
  source 1..20: mol_type = other DNA
ttcaattcccacctatgagt

SEQ ID NO: 20603 - DNA, 20 bp, synthetic construct
  misc_feature 1..20: note = chemically synthesized
  source 1..20: mol_type = other DNA
cacctatgagtgagaacatg

SEQ ID NO: 20604 - DNA, 20 bp, synthetic construct
  misc_feature 1..20: note = chemically synthesized
  source 1..20: mol_type = other DNA
gagtgagaacatgcagtgct

SEQ ID NO: 20605 - DNA, 20 bp, synthetic construct
  misc_feature 1..20: note = chemically synthesized
  source 1..20: mol_type = other DNA
ttggttttttgtccttgcga

SEQ ID NO: 20606 - DNA, 20 bp, synthetic construct
  misc_feature 1..20: note = chemically synthesized
  source 1..20: mol_type = other DNA
tgtccttgcgatagtttgct

SEQ ID NO: 20607 - DNA, 20 bp, synthetic construct
  misc_feature 1..20: note = chemically synthesized
  source 1..20: mol_type = other DNA
cgatagtttgctgagaatga

SEQ ID NO: 20608 - DNA, 20 bp, synthetic construct
  misc_feature 1..20: note = chemically synthesized
  source 1..20: mol_type = other DNA
ttgctgagaatgatggtttc

SEQ ID NO: 20609 - DNA, 20 bp, synthetic construct
  misc_feature 1..20: note = chemically synthesized
  source 1..20: mol_type = other DNA
catgaactcttcatttttta

SEQ ID NO: 20610 - DNA, 20 bp, synthetic construct
  misc_feature 1..20: note = chemically synthesized
  source 1..20: mol_type = other DNA
cttcattttttatggctgca

SEQ ID NO: 20611 - DNA, 20 bp, synthetic construct
  misc_feature 1..20: note = chemically synthesized
  source 1..20: mol_type = other DNA
tatggctgcatagtattcca

SEQ ID NO: 20612 - DNA, 20 bp, synthetic construct
  misc_feature 1..20: note = chemically synthesized
  source 1..20: mol_type = other DNA
tgtgccacattttcttaatt

SEQ ID NO: 20613 - DNA, 20 bp, synthetic construct
  misc_feature 1..20: note = chemically synthesized
  source 1..20: mol_type = other DNA
ttaattcagtctatcattgt

SEQ ID NO: 20614 - DNA, 20 bp, synthetic construct
  misc_feature 1..20: note = chemically synthesized
  source 1..20: mol_type = other DNA
gtctatcattgttggacatt

SEQ ID NO: 20615 - DNA, 20 bp, synthetic construct
  misc_feature 1..20: note = chemically synthesized
  source 1..20: mol_type = other DNA
tctatcattgttggacattt

SEQ ID NO: 20616 - DNA, 20 bp, synthetic construct
  misc_feature 1..20: note = chemically synthesized
  source 1..20: mol_type = other DNA
tcattgttggacatttgggt

SEQ ID NO: 20617 - DNA, 20 bp, synthetic construct
  misc_feature 1..20: note = chemically synthesized
  source 1..20: mol_type = other DNA
tggacatttgggttggttcc

SEQ ID NO: 20618 - DNA, 20 bp, synthetic construct
  misc_feature 1..20: note = chemically synthesized
  source 1..20: mol_type = other DNA
caagtctttgctattgtgaa

SEQ ID NO: 20619 - DNA, 20 bp, synthetic construct
  misc_feature 1..20: note = chemically synthesized
  source 1..20: mol_type = other DNA
tgctattgtgaatagtgcca

SEQ ID NO: 20620 - DNA, 20 bp, synthetic construct
  misc_feature 1..20: note = chemically synthesized
  source 1..20: mol_type = other DNA
tacgtgtgcatgtgtcttta

SEQ ID NO: 20621 - DNA, 20 bp, synthetic construct
  misc_feature 1..20: note = chemically synthesized
  source 1..20: mol_type = other DNA
gtgtgcatgtgtctttatag

SEQ ID NO: 20622 - DNA, 20 bp, synthetic construct
  misc_feature 1..20: note = chemically synthesized
  source 1..20: mol_type = other DNA
cagcatgatttataatccgt

SEQ ID NO: 20623 - DNA, 20 bp, synthetic construct
  misc_feature 1..20: note = chemically synthesized
  source 1..20: mol_type = other DNA
agcatgatttataatccgtt

SEQ ID NO: 20624 - DNA, 20 bp, synthetic construct
  misc_feature 1..20: note = chemically synthesized
  source 1..20: mol_type = other DNA
taatccgttgggtatatacc

SEQ ID NO: 20625 - DNA, 20 bp, synthetic construct
  misc_feature 1..20: note = chemically synthesized
  source 1..20: mol_type = other DNA
gttgggtatatacccagtaa

SEQ ID NO: 20626 - DNA, 20 bp, synthetic construct
  misc_feature 1..20: note = chemically synthesized
  source 1..20: mol_type = other DNA
ttgggtatatacccagtaat

SEQ ID NO: 20627 - DNA, 20 bp, synthetic construct
  misc_feature 1..20: note = chemically synthesized
  source 1..20: mol_type = other DNA
gtatatacccagtaatggga

SEQ ID NO: 20628 - DNA, 20 bp, synthetic construct
  misc_feature 1..20: note = chemically synthesized
  source 1..20: mol_type = other DNA
atacccagtaatgggatggc

SEQ ID NO: 20629 - DNA, 20 bp, synthetic construct
  misc_feature 1..20: note = chemically synthesized
  source 1..20: mol_type = other DNA
tacccagtaatgggatggct

SEQ ID NO: 20630 - DNA, 20 bp, synthetic construct
  misc_feature 1..20: note = chemically synthesized
  source 1..20: mol_type = other DNA
aatgggatggctgggtcaaa

SEQ ID NO: 20631 - DNA, 20 bp, synthetic construct
  misc_feature 1..20: note = chemically synthesized
  source 1..20: mol_type = other DNA
gctgggtcaaatggtatttc

SEQ ID NO: 20632 - DNA, 20 bp, synthetic construct
  misc_feature 1..20: note = chemically synthesized
  source 1..20: mol_type = other DNA
tcaaatggtatttctagttc

SEQ ID NO: 20633 - DNA, 20 bp, synthetic construct
  misc_feature 1..20: note = chemically synthesized
  source 1..20: mol_type = other DNA
atttctagttctagatccct

SEQ ID NO: 20634 - DNA, 20 bp, synthetic construct
  misc_feature 1..20: note = chemically synthesized
  source 1..20: mol_type = other DNA
tttctagttctagatccctg

SEQ ID NO: 20635 - DNA, 20 bp, synthetic construct
  misc_feature 1..20: note = chemically synthesized
  source 1..20: mol_type = other DNA
cgccacactgacttccacaa

SEQ ID NO: 20636 - DNA, 20 bp, synthetic construct
  misc_feature 1..20: note = chemically synthesized
  source 1..20: mol_type = other DNA
gacttccacaatggttgaac

SEQ ID NO: 20637 - DNA, 20 bp, synthetic construct
  misc_feature 1..20: note = chemically synthesized
  source 1..20: mol_type = other DNA
acaatggttgaactagttta

SEQ ID NO: 20638 - DNA, 20 bp, synthetic construct
  misc_feature 1..20: note = chemically synthesized
  source 1..20: mol_type = other DNA
aactagtttacagtcccacc

SEQ ID NO: 20639 - DNA, 20 bp, synthetic construct
  misc_feature 1..20: note = chemically synthesized
  source 1..20: mol_type = other DNA
ctagtttacagtcccaccaa

SEQ ID NO: 20640 - DNA, 20 bp, synthetic construct
  misc_feature 1..20: note = chemically synthesized
  source 1..20: mol_type = other DNA
cagtcccaccaagagtgtaa

SEQ ID NO: 20641 - DNA, 20 bp, synthetic construct
  misc_feature 1..20: note = chemically synthesized
  source 1..20: mol_type = other DNA
ctatttctccacatcctctc

SEQ ID NO: 20642 - DNA, 20 bp, synthetic construct
  misc_feature 1..20: note = chemically synthesized
  source 1..20: mol_type = other DNA
ttaatgattgccattctaac

SEQ ID NO: 20643 - DNA, 20 bp, synthetic construct
  misc_feature 1..20: note = chemically synthesized
  source 1..20: mol_type = other DNA
attgccattctaactggtgt

SEQ ID NO: 20644 - DNA, 20 bp, synthetic construct
  misc_feature 1..20: note = chemically synthesized
  source 1..20: mol_type = other DNA
ccattctaactggtgtgaga

SEQ ID NO: 20645 - DNA, 20 bp, synthetic construct
  misc_feature 1..20: note = chemically synthesized
  source 1..20: mol_type = other DNA
tgtgagatggtatctctttg

SEQ ID NO: 20646 - DNA, 20 bp, synthetic construct
  misc_feature 1..20: note = chemically synthesized
  source 1..20: mol_type = other DNA
tgatttgcattgtgacgtgt

SEQ ID NO: 20647 - DNA, 20 bp, synthetic construct
  misc_feature 1..20: note = chemically synthesized
  source 1..20: mol_type = other DNA
attgtgacgtgttagtttta

SEQ ID NO: 20648 - DNA, 20 bp, synthetic construct
  misc_feature 1..20: note = chemically synthesized
  source 1..20: mol_type = other DNA
ttcttaacatttttttgatg

SEQ ID NO: 20649 - DNA, 20 bp, synthetic construct
  misc_feature 1..20: note = chemically synthesized
  source 1..20: mol_type = other DNA
aacatttttttgatgaagca

SEQ ID NO: 20650 - DNA, 20 bp, synthetic construct
  misc_feature 1..20: note = chemically synthesized
  source 1..20: mol_type = other DNA
tgatgaagcacagtgtctga

SEQ ID NO: 20651 - DNA, 20 bp, synthetic construct
  misc_feature 1..20: note = chemically synthesized
  source 1..20: mol_type = other DNA
gatgaagcacagtgtctgaa

SEQ ID NO: 20652 - DNA, 20 bp, synthetic construct
  misc_feature 1..20: note = chemically synthesized
  source 1..20: mol_type = other DNA
atgaagcacagtgtctgaaa

SEQ ID NO: 20653 - DNA, 20 bp, synthetic construct
  misc_feature 1..20: note = chemically synthesized
  source 1..20: mol_type = other DNA
aagcacagtgtctgaaaggg

SEQ ID NO: 20654 - DNA, 20 bp, synthetic construct
  misc_feature 1..20: note = chemically synthesized
  source 1..20: mol_type = other DNA
cacagtgtctgaaagggtgg

SEQ ID NO: 20655 - DNA, 20 bp, synthetic construct
  misc_feature 1..20: note = chemically synthesized
  source 1..20: mol_type = other DNA
gaaagggtggtagcccaatc

SEQ ID NO: 20656 - DNA, 20 bp, synthetic construct
  misc_feature 1..20: note = chemically synthesized
  source 1..20: mol_type = other DNA
aatcaagtgacattaaaaac

SEQ ID NO: 20657 - DNA, 20 bp, synthetic construct
  misc_feature 1..20: note = chemically synthesized
  source 1..20: mol_type = other DNA
tgacattaaaaaccagaaca

SEQ ID NO: 20658 - DNA, 20 bp, synthetic construct
  misc_feature 1..20: note = chemically synthesized
  source 1..20: mol_type = other DNA
aaccagaacacagctaatgt

SEQ ID NO: 20659 - DNA, 20 bp, synthetic construct
  misc_feature 1..20: note = chemically synthesized
  source 1..20: mol_type = other DNA
acagctaatgtgagaaatac

SEQ ID NO: 20660 - DNA, 20 bp, synthetic construct
  misc_feature 1..20: note = chemically synthesized
  source 1..20: mol_type = other DNA
atgtgagaaatacaagtatt

SEQ ID NO: 20661 - DNA, 20 bp, synthetic construct
  misc_feature 1..20: note = chemically synthesized
  source 1..20: mol_type = other DNA
tgtgagaaatacaagtattt

SEQ ID NO: 20662 - DNA, 20 bp, synthetic construct
  misc_feature 1..20: note = chemically synthesized
  source 1..20: mol_type = other DNA
gtgagaaatacaagtattta

SEQ ID NO: 20663 - DNA, 20 bp, synthetic construct
  misc_feature 1..20: note = chemically synthesized
  source 1..20: mol_type = other DNA
aatacaagtatttagggcct

SEQ ID NO: 20664 - DNA, 20 bp, synthetic construct
  misc_feature 1..20: note = chemically synthesized
  source 1..20: mol_type = other DNA
ccttagtctgctccttgtct

SEQ ID NO: 20665 - DNA, 20 bp, synthetic construct
  misc_feature 1..20: note = chemically synthesized
  source 1..20: mol_type = other DNA
cttagtctgctccttgtctg

SEQ ID NO: 20666 - DNA, 20 bp, synthetic construct
  misc_feature 1..20: note = chemically synthesized
  source 1..20: mol_type = other DNA
gcaattcccatgaccttctt

SEQ ID NO: 20667 - DNA, 20 bp, synthetic construct
  misc_feature 1..20: note = chemically synthesized
  source 1..20: mol_type = other DNA
caattcccatgaccttctta

SEQ ID NO: 20668 - DNA, 20 bp, synthetic construct
  misc_feature 1..20: note = chemically synthesized
  source 1..20: mol_type = other DNA
cccatgaccttcttaaggat

SEQ ID NO: 20669 - DNA, 20 bp, synthetic construct
  misc_feature 1..20: note = chemically synthesized
  source 1..20: mol_type = other DNA
cttcttaaggatcagaatgt

SEQ ID NO: 20670 - DNA, 20 bp, synthetic construct
  misc_feature 1..20: note = chemically synthesized
  source 1..20: mol_type = other DNA
tcttaaggatcagaatgtaa

SEQ ID NO: 20671 - DNA, 20 bp, synthetic construct
  misc_feature 1..20: note = chemically synthesized
  source 1..20: mol_type = other DNA
aggatcagaatgtaagagat

SEQ ID NO: 20672 - DNA, 20 bp, synthetic construct
  misc_feature 1..20: note = chemically synthesized
  source 1..20: mol_type = other DNA
ggatcagaatgtaagagata

SEQ ID NO: 20673 - DNA, 20 bp, synthetic construct
  misc_feature 1..20: note = chemically synthesized
  source 1..20: mol_type = other DNA
agaatgtaagagataaggat

SEQ ID NO: 20674 - DNA, 20 bp, synthetic construct
  misc_feature 1..20: note = chemically synthesized
  source 1..20: mol_type = other DNA
aagagataaggataagcaca

SEQ ID NO: 20675 - DNA, 20 bp, synthetic construct
  misc_feature 1..20: note = chemically synthesized
  source 1..20: mol_type = other DNA
taaggataagcacaaagtcc

SEQ ID NO: 20676 - DNA, 20 bp, synthetic construct
  misc_feature 1..20: note = chemically synthesized
  source 1..20: mol_type = other DNA
aagcacaaagtccaagaaac

SEQ ID NO: 20677 - DNA, 20 bp, synthetic construct
  misc_feature 1..20: note = chemically synthesized
  source 1..20: mol_type = other DNA
agtccaagaaaccagttgat

SEQ ID NO: 20678 - DNA, 20 bp, synthetic construct
  misc_feature 1..20: note = chemically synthesized
  source 1..20: mol_type = other DNA
aagaaaccagttgatgagac

SEQ ID NO: 20679 - DNA, 20 bp, synthetic construct
  misc_feature 1..20: note = chemically synthesized
  source 1..20: mol_type = other DNA
agaaaccagttgatgagacc

SEQ ID NO: 20680 - DNA, 20 bp, synthetic construct
  misc_feature 1..20: note = chemically synthesized
  source 1..20: mol_type = other DNA
agttgatgagaccaggacta

SEQ ID NO: 20681 - DNA, 20 bp, synthetic construct
  misc_feature 1..20: note = chemically synthesized
  source 1..20: mol_type = other DNA
gttgatgagaccaggactat

SEQ ID NO: 20682 - DNA, 20 bp, synthetic construct
  misc_feature 1..20: note = chemically synthesized
  source 1..20: mol_type = other DNA
gagaccaggactataggata

SEQ ID NO: 20683 - DNA, 20 bp, synthetic construct
  misc_feature 1..20: note = chemically synthesized
  source 1..20: mol_type = other DNA
ctataggataaagtctatta

SEQ ID NO: 20684 - DNA, 20 bp, synthetic construct
  misc_feature 1..20: note = chemically synthesized
  source 1..20: mol_type = other DNA
tataggataaagtctattaa

SEQ ID NO: 20685 - DNA, 20 bp, synthetic construct
  misc_feature 1..20: note = chemically synthesized
  source 1..20: mol_type = other DNA
tattaaaggtgatgtctgca

SEQ ID NO: 20686 - DNA, 20 bp, synthetic construct
  misc_feature 1..20: note = chemically synthesized
  source 1..20: mol_type = other DNA
attaaaggtgatgtctgcac

SEQ ID NO: 20687 - DNA, 20 bp, synthetic construct
  misc_feature 1..20: note = chemically synthesized
  source 1..20: mol_type = other DNA
aaggtgatgtctgcacaggc

SEQ ID NO: 20688 - DNA, 20 bp, synthetic construct
  misc_feature 1..20: note = chemically synthesized
  source 1..20: mol_type = other DNA
caggccagtttgatcacatc

SEQ ID NO: 20689 - DNA, 20 bp, synthetic construct
  misc_feature 1..20: note = chemically synthesized
  source 1..20: mol_type = other DNA
cagtttgatcacatctggtg

SEQ ID NO: 20690 - DNA, 20 bp, synthetic construct
  misc_feature 1..20: note = chemically synthesized
  source 1..20: mol_type = other DNA
agtttgatcacatctggtgc

SEQ ID NO: 20691 - DNA, 20 bp, synthetic construct
  misc_feature 1..20: note = chemically synthesized
  source 1..20: mol_type = other DNA
ttgatcacatctggtgcagg

SEQ ID NO: 20692 - DNA, 20 bp, synthetic construct
  misc_feature 1..20: note = chemically synthesized
  source 1..20: mol_type = other DNA
tcacatctggtgcaggcaga

SEQ ID NO: 20693 - DNA, 20 bp, synthetic construct
  misc_feature 1..20: note = chemically synthesized
  source 1..20: mol_type = other DNA
tctggtgcaggcagaaagca

SEQ ID NO: 20694 - DNA, 20 bp, synthetic construct
  misc_feature 1..20: note = chemically synthesized
  source 1..20: mol_type = other DNA
ctggtgcaggcagaaagcat

SEQ ID NO: 20695 - DNA, 20 bp, synthetic construct
  misc_feature 1..20: note = chemically synthesized
  source 1..20: mol_type = other DNA
ggtgcaggcagaaagcatgg

SEQ ID NO: 20696 - DNA, 20 bp, synthetic construct
  misc_feature 1..20: note = chemically synthesized
  source 1..20: mol_type = other DNA
tgcaggcagaaagcatggga

SEQ ID NO: 20697 - DNA, 20 bp, synthetic construct
  misc_feature 1..20: note = chemically synthesized
  source 1..20: mol_type = other DNA
gcaggcagaaagcatgggag

SEQ ID NO: 20698 - DNA, 20 bp, synthetic construct
  misc_feature 1..20: note = chemically synthesized
  source 1..20: mol_type = other DNA
agaaagcatgggagaggaca

SEQ ID NO: 20699 - DNA, 20 bp, synthetic construct
  misc_feature 1..20: note = chemically synthesized
  source 1..20: mol_type = other DNA
gaaagcatgggagaggacat

SEQ ID NO: 20700 - DNA, 20 bp, synthetic construct
  misc_feature 1..20: note = chemically synthesized
  source 1..20: mol_type = other DNA
gggagaggacatgggattga

SEQ ID NO: 20701 - DNA, 20 bp, synthetic construct
  misc_feature 1..20: note = chemically synthesized
  source 1..20: mol_type = other DNA
agaggacatgggattgacag

SEQ ID NO: 20702 - DNA, 20 bp, synthetic construct
  misc_feature 1..20: note = chemically synthesized
  source 1..20: mol_type = other DNA
gaggacatgggattgacagt

SEQ ID NO: 20703 - DNA, 20 bp, synthetic construct
  misc_feature 1..20: note = chemically synthesized
  source 1..20: mol_type = other DNA
aggacatgggattgacagta

SEQ ID NO: 20704 - DNA, 20 bp, synthetic construct
  misc_feature 1..20: note = chemically synthesized
  source 1..20: mol_type = other DNA
ggacatgggattgacagtag

SEQ ID NO: 20705 - DNA, 20 bp, synthetic construct
  misc_feature 1..20: note = chemically synthesized
  source 1..20: mol_type = other DNA
ggattgacagtaggggaatc

SEQ ID NO: 20706 - DNA, 20 bp, synthetic construct
  misc_feature 1..20: note = chemically synthesized
  source 1..20: mol_type = other DNA
attgacagtaggggaatcca

SEQ ID NO: 20707 - DNA, 20 bp, synthetic construct
  misc_feature 1..20: note = chemically synthesized
  source 1..20: mol_type = other DNA
tgacagtaggggaatccaga

SEQ ID NO: 20708 - DNA, 20 bp, synthetic construct
  misc_feature 1..20: note = chemically synthesized
  source 1..20: mol_type = other DNA
gacagtaggggaatccagag

SEQ ID NO: 20709 - DNA, 20 bp, synthetic construct
  misc_feature 1..20: note = chemically synthesized
  source 1..20: mol_type = other DNA
acagtaggggaatccagaga

SEQ ID NO: 20710 - DNA, 20 bp, synthetic construct
  misc_feature 1..20: note = chemically synthesized
  source 1..20: mol_type = other DNA
tccagagagggtgatgatta

SEQ ID NO: 20711 - DNA, 20 bp, synthetic construct
  misc_feature 1..20: note = chemically synthesized
  source 1..20: mol_type = other DNA
ccagagagggtgatgattat

SEQ ID NO: 20712 - DNA, 20 bp, synthetic construct
  misc_feature 1..20: note = chemically synthesized
  source 1..20: mol_type = other DNA
gtgatgattatgggcacaat

SEQ ID NO: 20713 - DNA, 20 bp, synthetic construct
  misc_feature 1..20: note = chemically synthesized
  source 1..20: mol_type = other DNA
aatcccctcatttgaacccc

SEQ ID NO: 20714 - DNA, 20 bp, synthetic construct
  misc_feature 1..20: note = chemically synthesized
  source 1..20: mol_type = other DNA
cagatctatcttcaccacct

SEQ ID NO: 20715 - DNA, 20 bp, synthetic construct
  misc_feature 1..20: note = chemically synthesized
  source 1..20: mol_type = other DNA
tatcttcaccaccttagcat

SEQ ID NO: 20716 - DNA, 20 bp, synthetic construct
  misc_feature 1..20: note = chemically synthesized
  source 1..20: mol_type = other DNA
ttcaccaccttagcattggt

SEQ ID NO: 20717 - DNA, 20 bp, synthetic construct
  misc_feature 1..20: note = chemically synthesized
  source 1..20: mol_type = other DNA
caccttagcattggtgagaa

SEQ ID NO: 20718 - DNA, 20 bp, synthetic construct
  misc_feature 1..20: note = chemically synthesized
  source 1..20: mol_type = other DNA
ccttagcattggtgagaatg

SEQ ID NO: 20719 - DNA, 20 bp, synthetic construct
  misc_feature 1..20: note = chemically synthesized
  source 1..20: mol_type = other DNA
cttagcattggtgagaatgg

SEQ ID NO: 20720 - DNA, 20 bp, synthetic construct
  misc_feature 1..20: note = chemically synthesized
  source 1..20: mol_type = other DNA
gtgagaatggaggtgtatct

SEQ ID NO: 20721 - DNA, 20 bp, synthetic construct
  misc_feature 1..20: note = chemically synthesized
  source 1..20: mol_type = other DNA
tgagaatggaggtgtatctc

SEQ ID NO: 20722 - DNA, 20 bp, synthetic construct
  misc_feature 1..20: note = chemically synthesized
  source 1..20: mol_type = other DNA
gagaatggaggtgtatctca

SEQ ID NO: 20723 - DNA, 20 bp, synthetic construct
  misc_feature 1..20: note = chemically synthesized
  source 1..20: mol_type = other DNA
agaatggaggtgtatctcag

SEQ ID NO: 20724 - DNA, 20 bp, synthetic construct
  misc_feature 1..20: note = chemically synthesized
  source 1..20: mol_type = other DNA
aggtgtatctcaggggatta

SEQ ID NO: 20725 - DNA, 20 bp, synthetic construct
  misc_feature 1..20: note = chemically synthesized
  source 1..20: mol_type = other DNA
gattatggatgccaataaaa

SEQ ID NO: 20726 - DNA, 20 bp, synthetic construct
  misc_feature 1..20: note = chemically synthesized
  source 1..20: mol_type = other DNA
ggatgccaataaaacagtca

SEQ ID NO: 20727 - DNA, 20 bp, synthetic construct
  misc_feature 1..20: note = chemically synthesized
  source 1..20: mol_type = other DNA
gatgccaataaaacagtcat

SEQ ID NO: 20728 - DNA, 20 bp, synthetic construct
  misc_feature 1..20: note = chemically synthesized
  source 1..20: mol_type = other DNA
aaacagtcatgggccatgat

SEQ ID NO: 20729 - DNA, 20 bp, synthetic construct
  misc_feature 1..20: note = chemically synthesized
  source 1..20: mol_type = other DNA
ggccatgatgagcaacactc

SEQ ID NO: 20730 - DNA, 20 bp, synthetic construct
  misc_feature 1..20: note = chemically synthesized
  source 1..20: mol_type = other DNA
caacactctggactccacga

SEQ ID NO: 20731 - DNA, 20 bp, synthetic construct
  misc_feature 1..20: note = chemically synthesized
  source 1..20: mol_type = other DNA
acactctggactccacgata

SEQ ID NO: 20732 - DNA, 20 bp, synthetic construct
  misc_feature 1..20: note = chemically synthesized
  source 1..20: mol_type = other DNA
actctggactccacgataga

SEQ ID NO: 20733 - DNA, 20 bp, synthetic construct
  misc_feature 1..20: note = chemically synthesized
  source 1..20: mol_type = other DNA
ctctggactccacgatagag

SEQ ID NO: 20734 - DNA, 20 bp, synthetic construct
  misc_feature 1..20: note = chemically synthesized
  source 1..20: mol_type = other DNA
tctggactccacgatagaga

SEQ ID NO: 20735 - DNA, 20 bp, synthetic construct
  misc_feature 1..20: note = chemically synthesized
  source 1..20: mol_type = other DNA
tggactccacgatagagagg

SEQ ID NO: 20736 - DNA, 20 bp, synthetic construct
  misc_feature 1..20: note = chemically synthesized
  source 1..20: mol_type = other DNA
actccacgatagagagggag

SEQ ID NO: 20737 - DNA, 20 bp, synthetic construct
  misc_feature 1..20: note = chemically synthesized
  source 1..20: mol_type = other DNA
acgatagagagggagtggat

SEQ ID NO: 20738 - DNA, 20 bp, synthetic construct
  misc_feature 1..20: note = chemically synthesized
  source 1..20: mol_type = other DNA
tagagagggagtggattaga

SEQ ID NO: 20739 - DNA, 20 bp, synthetic construct
  misc_feature 1..20: note = chemically synthesized
  source 1..20: mol_type = other DNA
agagagggagtggattagat

SEQ ID NO: 20740 - DNA, 20 bp, synthetic construct
  misc_feature 1..20: note = chemically synthesized
  source 1..20: mol_type = other DNA
gggagtggattagataggcc

SEQ ID NO: 20741 - DNA, 20 bp, synthetic construct
  misc_feature 1..20: note = chemically synthesized
  source 1..20: mol_type = other DNA
gagtggattagataggcctg

SEQ ID NO: 20742 - DNA, 20 bp, synthetic construct
  misc_feature 1..20: note = chemically synthesized
  source 1..20: mol_type = other DNA
agtggattagataggcctgg

SEQ ID NO: 20743 - DNA, 20 bp, synthetic construct
  misc_feature 1..20: note = chemically synthesized
  source 1..20: mol_type = other DNA
ggattagataggcctggagg

SEQ ID NO: 20744 - DNA, 20 bp, synthetic construct
  misc_feature 1..20: note = chemically synthesized
  source 1..20: mol_type = other DNA
ttagataggcctggaggaag

SEQ ID NO: 20745 - DNA, 20 bp, synthetic construct
  misc_feature 1..20: note = chemically synthesized
  source 1..20: mol_type = other DNA
tagataggcctggaggaagc

SEQ ID NO: 20746 - DNA, 20 bp, synthetic construct
  misc_feature 1..20: note = chemically synthesized
  source 1..20: mol_type = other DNA
cctggaggaagcaggctcca

SEQ ID NO: 20747 - DNA, 20 bp, synthetic construct
  misc_feature 1..20: note = chemically synthesized
  source 1..20: mol_type = other DNA
tggctcattttcctgtgatc

SEQ ID NO: 20748 - DNA, 20 bp, synthetic construct
  misc_feature 1..20: note = chemically synthesized
  source 1..20: mol_type = other DNA
tcattttcctgtgatctagc

SEQ ID NO: 20749 - DNA, 20 bp, synthetic construct
  misc_feature 1..20: note = chemically synthesized
  source 1..20: mol_type = other DNA
attttcctgtgatctagcca

SEQ ID NO: 20750 - DNA, 20 bp, synthetic construct
  misc_feature 1..20: note = chemically synthesized
  source 1..20: mol_type = other DNA
tgatctagccagagaacacc

SEQ ID NO: 20751 - DNA, 20 bp, synthetic construct
  misc_feature 1..20: note = chemically synthesized
  source 1..20: mol_type = other DNA
gatctagccagagaacacca

SEQ ID NO: 20752 - DNA, 20 bp, synthetic construct
  misc_feature 1..20: note = chemically synthesized
  source 1..20: mol_type = other DNA
tagccagagaacaccaagga

SEQ ID NO: 20753 - DNA, 20 bp, synthetic construct
  misc_feature 1..20: note = chemically synthesized
  source 1..20: mol_type = other DNA
ccagagaacaccaaggacag

SEQ ID NO: 20754 - DNA, 20 bp, synthetic construct
  misc_feature 1..20: note = chemically synthesized
  source 1..20: mol_type = other DNA
gacagtggacattgttgtca

SEQ ID NO: 20755 - DNA, 20 bp, synthetic construct
  misc_feature 1..20: note = chemically synthesized
  source 1..20: mol_type = other DNA
attgttgtcaaagttacacc

SEQ ID NO: 20756 - DNA, 20 bp, synthetic construct
  misc_feature 1..20: note = chemically synthesized
  source 1..20: mol_type = other DNA
ttgttgtcaaagttacacca

SEQ ID NO: 20757 - DNA, 20 bp, synthetic construct
  misc_feature 1..20: note = chemically synthesized
  source 1..20: mol_type = other DNA
caaagttacaccaaggtcta

SEQ ID NO: 20758 - DNA, 20 bp, synthetic construct
  misc_feature 1..20: note = chemically synthesized
  source 1..20: mol_type = other DNA
acaccaaggtctatggctgc

SEQ ID NO: 20759 - DNA, 20 bp, synthetic construct
  misc_feature 1..20: note = chemically synthesized
  source 1..20: mol_type = other DNA
aaggtctatggctgccagta

SEQ ID NO: 20760 - DNA, 20 bp, synthetic construct
  misc_feature 1..20: note = chemically synthesized
  source 1..20: mol_type = other DNA
tctatggctgccagtatagt

SEQ ID NO: 20761 - DNA, 20 bp, synthetic construct
  misc_feature 1..20: note = chemically synthesized
  source 1..20: mol_type = other DNA
tatggctgccagtatagtca

SEQ ID NO: 20762 - DNA, 20 bp, synthetic construct
  misc_feature 1..20: note = chemically synthesized
  source 1..20: mol_type = other DNA
tggctgccagtatagtcaga

SEQ ID NO: 20763 - DNA, 20 bp, synthetic construct
  misc_feature 1..20: note = chemically synthesized
  source 1..20: mol_type = other DNA
ctgccagtatagtcagagag

SEQ ID NO: 20764 - DNA, 20 bp, synthetic construct
  misc_feature 1..20: note = chemically synthesized
  source 1..20: mol_type = other DNA
tatagtcagagagtagtaca

SEQ ID NO: 20765 - DNA, 20 bp, synthetic construct
  misc_feature 1..20: note = chemically synthesized
  source 1..20: mol_type = other DNA
atagtcagagagtagtacac

SEQ ID NO: 20766 - DNA, 20 bp, synthetic construct
  misc_feature 1..20: note = chemically synthesized
  source 1..20: mol_type = other DNA
gagtagtacacgggctcatg

SEQ ID NO: 20767 - DNA, 20 bp, synthetic construct
  misc_feature 1..20: note = chemically synthesized
  source 1..20: mol_type = other DNA
gtagtacacgggctcatgaa

SEQ ID NO: 20768 - DNA, 20 bp, synthetic construct
  misc_feature 1..20: note = chemically synthesized
  source 1..20: mol_type = other DNA
acacgggctcatgaagagtg

SEQ ID NO: 20769 - DNA, 20 bp, synthetic construct
  misc_feature 1..20: note = chemically synthesized
  source 1..20: mol_type = other DNA
gagtgcagtcttctctgata

SEQ ID NO: 20770 - DNA, 20 bp, synthetic construct
  misc_feature 1..20: note = chemically synthesized
  source 1..20: mol_type = other DNA
gtgcagtcttctctgataaa

SEQ ID NO: 20771 - DNA, 20 bp, synthetic construct
  misc_feature 1..20: note = chemically synthesized
  source 1..20: mol_type = other DNA
tgcagtcttctctgataaag

SEQ ID NO: 20772 - DNA, 20 bp, synthetic construct
  misc_feature 1..20: note = chemically synthesized
  source 1..20: mol_type = other DNA
cagtcttctctgataaagag

SEQ ID NO: 20773 - DNA, 20 bp, synthetic construct
  misc_feature 1..20: note = chemically synthesized
  source 1..20: mol_type = other DNA
agtcttctctgataaagagg

SEQ ID NO: 20774 - DNA, 20 bp, synthetic construct
  misc_feature 1..20: note = chemically synthesized
  source 1..20: mol_type = other DNA
tcttctctgataaagaggag

SEQ ID NO: 20775 - DNA, 20 bp, synthetic construct
  misc_feature 1..20: note = chemically synthesized
  source 1..20: mol_type = other DNA
cttctctgataaagaggagg

SEQ ID NO: 20776 - DNA, 20 bp, synthetic construct
  misc_feature 1..20: note = chemically synthesized
  source 1..20: mol_type = other DNA
aggaggaggctgccattgcc

SEQ ID NO: 20777 - DNA, 20 bp, synthetic construct
  misc_feature 1..20: note = chemically synthesized
  source 1..20: mol_type = other DNA
ggaggaggctgccattgcca

SEQ ID NO: 20778 - DNA, 20 bp, synthetic construct
  misc_feature 1..20: note = chemically synthesized
  source 1..20: mol_type = other DNA
gctgccattgccaaggactg

SEQ ID NO: 20779 - DNA, 20 bp, synthetic construct
  misc_feature 1..20: note = chemically synthesized
  source 1..20: mol_type = other DNA
tgccattgccaaggactgta

SEQ ID NO: 20780 - DNA, 20 bp, synthetic construct
  misc_feature 1..20: note = chemically synthesized
  source 1..20: mol_type = other DNA
tgccaaggactgtagagaca

SEQ ID NO: 20781 - DNA, 20 bp, synthetic construct
  misc_feature 1..20: note = chemically synthesized
  source 1..20: mol_type = other DNA
ctgtagagacatagatgata

SEQ ID NO: 20782 - DNA, 20 bp, synthetic construct
  misc_feature 1..20: note = chemically synthesized
  source 1..20: mol_type = other DNA
tagagacatagatgataaag

SEQ ID NO: 20783 - DNA, 20 bp, synthetic construct
  misc_feature 1..20: note = chemically synthesized
  source 1..20: mol_type = other DNA
agagacatagatgataaaga

SEQ ID NO: 20784 - DNA, 20 bp, synthetic construct
  misc_feature 1..20: note = chemically synthesized
  source 1..20: mol_type = other DNA
agacatagatgataaagaag

SEQ ID NO: 20785 - DNA, 20 bp, synthetic construct
  misc_feature 1..20: note = chemically synthesized
  source 1..20: mol_type = other DNA
atagatgataaagaaggaga

SEQ ID NO: 20786 - DNA, 20 bp, synthetic construct
  misc_feature 1..20: note = chemically synthesized
  source 1..20: mol_type = other DNA
aaagaaggagatagaactcc

SEQ ID NO: 20787 - DNA, 20 bp, synthetic construct
  misc_feature 1..20: note = chemically synthesized
  source 1..20: mol_type = other DNA
aagaaggagatagaactcca

SEQ ID NO: 20788 - DNA, 20 bp, synthetic construct
  misc_feature 1..20: note = chemically synthesized
  source 1..20: mol_type = other DNA
ctccaaggatgaaatctctc

SEQ ID NO: 20789 - DNA, 20 bp, synthetic construct
  misc_feature 1..20: note = chemically synthesized
  source 1..20: mol_type = other DNA
ggatgaaatctctccagacc

SEQ ID NO: 20790 - DNA, 20 bp, synthetic construct
  misc_feature 1..20: note = chemically synthesized
  source 1..20: mol_type = other DNA
gaaatctctccagacctgga

SEQ ID NO: 20791 - DNA, 20 bp, synthetic construct
  misc_feature 1..20: note = chemically synthesized
  source 1..20: mol_type = other DNA
tctctccagacctggaaagc

SEQ ID NO: 20792 - DNA, 20 bp, synthetic construct
  misc_feature 1..20: note = chemically synthesized
  source 1..20: mol_type = other DNA
tccagacctggaaagccagt

SEQ ID NO: 20793 - DNA, 20 bp, synthetic construct
  misc_feature 1..20: note = chemically synthesized
  source 1..20: mol_type = other DNA
ccagacctggaaagccagtg

SEQ ID NO: 20794 - DNA, 20 bp, synthetic construct
  misc_feature 1..20: note = chemically synthesized
  source 1..20: mol_type = other DNA
agacctggaaagccagtgag

SEQ ID NO: 20795 - DNA, 20 bp, synthetic construct
  misc_feature 1..20: note = chemically synthesized
  source 1..20: mol_type = other DNA
tggaaagccagtgaggagaa

SEQ ID NO: 20796 - DNA, 20 bp, synthetic construct
  misc_feature 1..20: note = chemically synthesized
  source 1..20: mol_type = other DNA
ggaaagccagtgaggagaaa

SEQ ID NO: 20797 - DNA, 20 bp, synthetic construct
  misc_feature 1..20: note = chemically synthesized
  source 1..20: mol_type = other DNA
gaaagccagtgaggagaaaa

SEQ ID NO: 20798 - DNA, 20 bp, synthetic construct
  misc_feature 1..20: note = chemically synthesized
  source 1..20: mol_type = other DNA
aaagccagtgaggagaaaag

SEQ ID NO: 20799 - DNA, 20 bp, synthetic construct
  misc_feature 1..20: note = chemically synthesized
  source 1..20: mol_type = other DNA
gccagtgaggagaaaagggg

SEQ ID NO: 20800 - DNA, 20 bp, synthetic construct
  misc_feature 1..20: note = chemically synthesized
  source 1..20: mol_type = other DNA
agtgaggagaaaaggggcag

SEQ ID NO: 20801 - DNA, 20 bp, synthetic construct
  misc_feature 1..20: note = chemically synthesized
  source 1..20: mol_type = other DNA
gagaaaaggggcagcagtaa

SEQ ID NO: 20802 - DNA, 20 bp, synthetic construct
  misc_feature 1..20: note = chemically synthesized
  source 1..20: mol_type = other DNA
aaaaggggcagcagtaatgg

SEQ ID NO: 20803 - DNA, 20 bp, synthetic construct
  misc_feature 1..20: note = chemically synthesized
  source 1..20: mol_type = other DNA
aaaggggcagcagtaatggt

SEQ ID NO: 20804 - DNA, 20 bp, synthetic construct
  misc_feature 1..20: note = chemically synthesized
  source 1..20: mol_type = other DNA
agcagtaatggtgggtgaca

SEQ ID NO: 20805 - DNA, 20 bp, synthetic construct
  misc_feature 1..20: note = chemically synthesized
  source 1..20: mol_type = other DNA
agtaatggtgggtgacatgg

SEQ ID NO: 20806 - DNA, 20 bp, synthetic construct
  misc_feature 1..20: note = chemically synthesized
  source 1..20: mol_type = other DNA
gggtgacatggtggatacct

SEQ ID NO: 20807 - DNA, 20 bp, synthetic construct
  misc_feature 1..20: note = chemically synthesized
  source 1..20: mol_type = other DNA
ggtgacatggtggatacctg

SEQ ID NO: 20808 - DNA, 20 bp, synthetic construct
  misc_feature 1..20: note = chemically synthesized
  source 1..20: mol_type = other DNA
tgacatggtggatacctgag

SEQ ID NO: 20809 - DNA, 20 bp, synthetic construct
  misc_feature 1..20: note = chemically synthesized
  source 1..20: mol_type = other DNA
ggagaaacaaacaaacaaaa

SEQ ID NO: 20810 - DNA, 20 bp, synthetic construct
  misc_feature 1..20: note = chemically synthesized
  source 1..20: mol_type = other DNA
aaacaaacaaaacagctctc

SEQ ID NO: 20811 - DNA, 20 bp, synthetic construct
  misc_feature 1..20: note = chemically synthesized
  source 1..20: mol_type = other DNA
aacaaaacagctctctagac

SEQ ID NO: 20812 - DNA, 20 bp, synthetic construct
  misc_feature 1..20: note = chemically synthesized
  source 1..20: mol_type = other DNA
ctctctagaccagcactatg

SEQ ID NO: 20813 - DNA, 20 bp, synthetic construct
  misc_feature 1..20: note = chemically synthesized
  source 1..20: mol_type = other DNA
tctagaccagcactatgtgg

SEQ ID NO: 20814 - DNA, 20 bp, synthetic construct
  misc_feature 1..20: note = chemically synthesized
  source 1..20: mol_type = other DNA
ctatgtggtggaaatataat

SEQ ID NO: 20815 - DNA, 20 bp, synthetic construct
  misc_feature 1..20: note = chemically synthesized
  source 1..20: mol_type = other DNA
atgtggtggaaatataatta

SEQ ID NO: 20816 - DNA, 20 bp, synthetic construct
  misc_feature 1..20: note = chemically synthesized
  source 1..20: mol_type = other DNA
atatgtgatgttaaatgttc

SEQ ID NO: 20817 - DNA, 20 bp, synthetic construct
  misc_feature 1..20: note = chemically synthesized
  source 1..20: mol_type = other DNA
tgtgatgttaaatgttctgg

SEQ ID NO: 20818 - DNA, 20 bp, synthetic construct
  misc_feature 1..20: note = chemically synthesized
  source 1..20: mol_type = other DNA
tgttctggtagtcacattaa

SEQ ID NO: 20819 - DNA, 20 bp, synthetic construct
  misc_feature 1..20: note = chemically synthesized
  source 1..20: mol_type = other DNA
gttctggtagtcacattaaa

SEQ ID NO: 20820 - DNA, 20 bp, synthetic construct
  misc_feature 1..20: note = chemically synthesized
  source 1..20: mol_type = other DNA
tctggtagtcacattaaaag

SEQ ID NO: 20821 - DNA, 20 bp, synthetic construct
  misc_feature 1..20: note = chemically synthesized
  source 1..20: mol_type = other DNA
gtcacattaaaaggagtaaa

SEQ ID NO: 20822 - DNA, 20 bp, synthetic construct
  misc_feature 1..20: note = chemically synthesized
  source 1..20: mol_type = other DNA
attaaaaggagtaaaaagaa

SEQ ID NO: 20823 - DNA, 20 bp, synthetic construct
  misc_feature 1..20: note = chemically synthesized
  source 1..20: mol_type = other DNA
aaaaggagtaaaaagaaaag

SEQ ID NO: 20824 - DNA, 20 bp, synthetic construct
  misc_feature 1..20: note = chemically synthesized
  source 1..20: mol_type = other DNA
aaaagtggtaaaattaatat

SEQ ID NO: 20825 - DNA, 20 bp, synthetic construct
  misc_feature 1..20: note = chemically synthesized
  source 1..20: mol_type = other DNA
aatattagtatgtcttattt

SEQ ID NO: 20826 - DNA, 20 bp, synthetic construct
  misc_feature 1..20: note = chemically synthesized
  source 1..20: mol_type = other DNA
caaaaatattatcattttaa

SEQ ID NO: 20827 - DNA, 20 bp, synthetic construct
  misc_feature 1..20: note = chemically synthesized
  source 1..20: mol_type = other DNA
ttatcattttaatagataat

SEQ ID NO: 20828 - DNA, 20 bp, synthetic construct
  misc_feature 1..20: note = chemically synthesized
  source 1..20: mol_type = other DNA
tcagcataaaaatcatatat

SEQ ID NO: 20829 - DNA, 20 bp, synthetic construct
  misc_feature 1..20: note = chemically synthesized
  source 1..20: mol_type = other DNA
cataaaaatcatatatgaga

SEQ ID NO: 20830 - DNA, 20 bp, synthetic construct
  misc_feature 1..20: note = chemically synthesized
  source 1..20: mol_type = other DNA
tagttcccacgatttttttt

SEQ ID NO: 20831 - DNA, 20 bp, synthetic construct
  misc_feature 1..20: note = chemically synthesized
  source 1..20: mol_type = other DNA
ggtacaaattcttcaaaatc

SEQ ID NO: 20832 - DNA, 20 bp, synthetic construct
  misc_feature 1..20: note = chemically synthesized
  source 1..20: mol_type = other DNA
aaatcgagtgtttacactta

SEQ ID NO: 20833 - DNA, 20 bp, synthetic construct
  misc_feature 1..20: note = chemically synthesized
  source 1..20: mol_type = other DNA
cttacagaaaattctgactc

SEQ ID NO: 20834 - DNA, 20 bp, synthetic construct
  misc_feature 1..20: note = chemically synthesized
  source 1..20: mol_type = other DNA
aaattctgactcaagctaac

SEQ ID NO: 20835 - DNA, 20 bp, synthetic construct
  misc_feature 1..20: note = chemically synthesized
  source 1..20: mol_type = other DNA
ctaaccagatgctactgttt

SEQ ID NO: 20836 - DNA, 20 bp, synthetic construct
  misc_feature 1..20: note = chemically synthesized
  source 1..20: mol_type = other DNA
ccagatgctactgttttgga

SEQ ID NO: 20837 - DNA, 20 bp, synthetic construct
  misc_feature 1..20: note = chemically synthesized
  source 1..20: mol_type = other DNA
tgctactgttttggacagca

SEQ ID NO: 20838 - DNA, 20 bp, synthetic construct
  misc_feature 1..20: note = chemically synthesized
  source 1..20: mol_type = other DNA
tgttttggacagcacagctc

SEQ ID NO: 20839 - DNA, 20 bp, synthetic construct
  misc_feature 1..20: note = chemically synthesized
  source 1..20: mol_type = other DNA
agactatacgacttcatcct

SEQ ID NO: 20840 - DNA, 20 bp, synthetic construct
  misc_feature 1..20: note = chemically synthesized
  source 1..20: mol_type = other DNA
ttcatcctcagtttcgactc

SEQ ID NO: 20841 - DNA, 20 bp, synthetic construct
  misc_feature 1..20: note = chemically synthesized
  source 1..20: mol_type = other DNA
gctgctttctaccacccttt

SEQ ID NO: 20842 - DNA, 20 bp, synthetic construct
  misc_feature 1..20: note = chemically synthesized
  source 1..20: mol_type = other DNA
tgcttcatcaaaaaaatgtt

SEQ ID NO: 20843 - DNA, 20 bp, synthetic construct
  misc_feature 1..20: note = chemically synthesized
  source 1..20: mol_type = other DNA
tttaaaactaacacatatat

SEQ ID NO: 20844 - DNA, 20 bp, synthetic construct
  misc_feature 1..20: note = chemically synthesized
  source 1..20: mol_type = other DNA
aactaacacatatattggaa

SEQ ID NO: 20845 - DNA, 20 bp, synthetic construct
  misc_feature 1..20: note = chemically synthesized
  source 1..20: mol_type = other DNA
aacacatatattggaaaaga

SEQ ID NO: 20846 - DNA, 20 bp, synthetic construct
  misc_feature 1..20: note = chemically synthesized
  source 1..20: mol_type = other DNA
aagaaagtctcctctctcac

SEQ ID NO: 20847 - DNA, 20 bp, synthetic construct
  misc_feature 1..20: note = chemically synthesized
  source 1..20: mol_type = other DNA
ctcactagctattttttaaa

SEQ ID NO: 20848 - DNA, 20 bp, synthetic construct
  misc_feature 1..20: note = chemically synthesized
  source 1..20: mol_type = other DNA
ctattttttaaatggtgtga

SEQ ID NO: 20849 - DNA, 20 bp, synthetic construct
  misc_feature 1..20: note = chemically synthesized
  source 1..20: mol_type = other DNA
tattttttaaatggtgtgat

SEQ ID NO: 20850 - DNA, 20 bp, synthetic construct
  misc_feature 1..20: note = chemically synthesized
  source 1..20: mol_type = other DNA
tttaaaaacctttctaccac

SEQ ID NO: 20851 - DNA, 20 bp, synthetic construct
  misc_feature 1..20: note = chemically synthesized
  source 1..20: mol_type = other DNA
agatttcctatcctaatttc

SEQ ID NO: 20852 - DNA, 20 bp, synthetic construct
  misc_feature 1..20: note = chemically synthesized
  source 1..20: mol_type = other DNA
gatttcctatcctaatttct

SEQ ID NO: 20853 - DNA, 20 bp, synthetic construct
  misc_feature 1..20: note = chemically synthesized
  source 1..20: mol_type = other DNA
atatgatacaatatcatgct

SEQ ID NO: 20854 - DNA, 20 bp, synthetic construct
  misc_feature 1..20: note = chemically synthesized
  source 1..20: mol_type = other DNA
tatgatacaatatcatgctt

SEQ ID NO: 20855 - DNA, 20 bp, synthetic construct
  misc_feature 1..20: note = chemically synthesized
  source 1..20: mol_type = other DNA
atgatacaatatcatgcttg

SEQ ID NO: 20856 - DNA, 20 bp, synthetic construct
  misc_feature 1..20: note = chemically synthesized
  source 1..20: mol_type = other DNA
atatcatgcttggggttata

SEQ ID NO: 20857 - DNA, 20 bp, synthetic construct
  misc_feature 1..20: note = chemically synthesized
  source 1..20: mol_type = other DNA
gggttatacagatgtaatta

SEQ ID NO: 20858 - DNA, 20 bp, synthetic construct
  misc_feature 1..20: note = chemically synthesized
  source 1..20: mol_type = other DNA
gttgctgatctattgacttt

SEQ ID NO: 20859 - DNA, 20 bp, synthetic construct
  misc_feature 1..20: note = chemically synthesized
  source 1..20: mol_type = other DNA
ttgactttgagttaattgaa

SEQ ID NO: 20860 - DNA, 20 bp, synthetic construct
  misc_feature 1..20: note = chemically synthesized
  source 1..20: mol_type = other DNA
tgactttgagttaattgaaa

SEQ ID NO: 20861 - DNA, 20 bp, synthetic construct
  misc_feature 1..20: note = chemically synthesized
  source 1..20: mol_type = other DNA
taattgaaaaggaaattact

SEQ ID NO: 20862 - DNA, 20 bp, synthetic construct
  misc_feature 1..20: note = chemically synthesized
  source 1..20: mol_type = other DNA
aattgaaaaggaaattactc

SEQ ID NO: 20863 - DNA, 20 bp, synthetic construct
  misc_feature 1..20: note = chemically synthesized
  source 1..20: mol_type = other DNA
attgaaaaggaaattactca

SEQ ID NO: 20864 - DNA, 20 bp, synthetic construct
  misc_feature 1..20: note = chemically synthesized
  source 1..20: mol_type = other DNA
ttgaaaaggaaattactcag

SEQ ID NO: 20865 - DNA, 20 bp, synthetic construct
  misc_feature 1..20: note = chemically synthesized
  source 1..20: mol_type = other DNA
ggaaattactcaggggaacc

SEQ ID NO: 20866 - DNA, 20 bp, synthetic construct
  misc_feature 1..20: note = chemically synthesized
  source 1..20: mol_type = other DNA
ggaacctagtctaattccat

SEQ ID NO: 20867 - DNA, 20 bp, synthetic construct
  misc_feature 1..20: note = chemically synthesized
  source 1..20: mol_type = other DNA
ctaattccatgagcccctaa

SEQ ID NO: 20868 - DNA, 20 bp, synthetic construct
  misc_feature 1..20: note = chemically synthesized
  source 1..20: mol_type = other DNA
attccatgagcccctaaaag

SEQ ID NO: 20869 - DNA, 20 bp, synthetic construct
  misc_feature 1..20: note = chemically synthesized
  source 1..20: mol_type = other DNA
tccatgagcccctaaaagca

SEQ ID NO: 20870 - DNA, 20 bp, synthetic construct
  misc_feature 1..20: note = chemically synthesized
  source 1..20: mol_type = other DNA
ctaaaagcagagttttcacc

SEQ ID NO: 20871 - DNA, 20 bp, synthetic construct
  misc_feature 1..20: note = chemically synthesized
  source 1..20: mol_type = other DNA
aaagcagagttttcaccaag

SEQ ID NO: 20872 - DNA, 20 bp, synthetic construct
  misc_feature 1..20: note = chemically synthesized
  source 1..20: mol_type = other DNA
gcagagttttcaccaagtag

SEQ ID NO: 20873 - DNA, 20 bp, synthetic construct
  misc_feature 1..20: note = chemically synthesized
  source 1..20: mol_type = other DNA
cagagttttcaccaagtagt

SEQ ID NO: 20874 - DNA, 20 bp, synthetic construct
  misc_feature 1..20: note = chemically synthesized
  source 1..20: mol_type = other DNA
gagttttcaccaagtagtag

SEQ ID NO: 20875 - DNA, 20 bp, synthetic construct
  misc_feature 1..20: note = chemically synthesized
  source 1..20: mol_type = other DNA
ttcaccaagtagtaggagaa

SEQ ID NO: 20876 - DNA, 20 bp, synthetic construct
  misc_feature 1..20: note = chemically synthesized
  source 1..20: mol_type = other DNA
tcaccaagtagtaggagaat

SEQ ID NO: 20877 - DNA, 20 bp, synthetic construct
  misc_feature 1..20: note = chemically synthesized
  source 1..20: mol_type = other DNA
ccaagtagtaggagaatagg

SEQ ID NO: 20878 - DNA, 20 bp, synthetic construct
  misc_feature 1..20: note = chemically synthesized
  source 1..20: mol_type = other DNA
gtagtaggagaataggaagc

SEQ ID NO: 20879 - DNA, 20 bp, synthetic construct
  misc_feature 1..20: note = chemically synthesized
  source 1..20: mol_type = other DNA
gccagacatattcaaaattt

SEQ ID NO: 20880 - DNA, 20 bp, synthetic construct
  misc_feature 1..20: note = chemically synthesized
  source 1..20: mol_type = other DNA
gacatattcaaaatttgaga

SEQ ID NO: 20881 - DNA, 20 bp, synthetic construct
  misc_feature 1..20: note = chemically synthesized
  source 1..20: mol_type = other DNA
acatattcaaaatttgagaa

SEQ ID NO: 20882 - DNA, 20 bp, synthetic construct
  misc_feature 1..20: note = chemically synthesized
  source 1..20: mol_type = other DNA
caaaatttgagaaaggttca

SEQ ID NO: 20883 - DNA, 20 bp, synthetic construct
  misc_feature 1..20: note = chemically synthesized
  source 1..20: mol_type = other DNA
aaaatttgagaaaggttcat

SEQ ID NO: 20884 - DNA, 20 bp, synthetic construct
  misc_feature 1..20: note = chemically synthesized
  source 1..20: mol_type = other DNA
tttgagaaaggttcatgggt

SEQ ID NO: 20885 - DNA, 20 bp, synthetic construct
  misc_feature 1..20: note = chemically synthesized
  source 1..20: mol_type = other DNA
aaggttcatgggtcagttgc

SEQ ID NO: 20886 - DNA, 20 bp, synthetic construct
  misc_feature 1..20: note = chemically synthesized
  source 1..20: mol_type = other DNA
cagttgctggtttgaaatat

SEQ ID NO: 20887 - DNA, 20 bp, synthetic construct
  misc_feature 1..20: note = chemically synthesized
  source 1..20: mol_type = other DNA
agttgctggtttgaaatata

SEQ ID NO: 20888 - DNA, 20 bp, synthetic construct
  misc_feature 1..20: note = chemically synthesized
  source 1..20: mol_type = other DNA
ttgctggtttgaaatataag

SEQ ID NO: 20889 - DNA, 20 bp, synthetic construct
  misc_feature 1..20: note = chemically synthesized
  source 1..20: mol_type = other DNA
tgctggtttgaaatataagg

SEQ ID NO: 20890 - DNA, 20 bp, synthetic construct
  misc_feature 1..20: note = chemically synthesized
  source 1..20: mol_type = other DNA
gaaatataaggaggtcacaa

SEQ ID NO: 20891 - DNA, 20 bp, synthetic construct
  misc_feature 1..20: note = chemically synthesized
  source 1..20: mol_type = other DNA
atataaggaggtcacaaaag

SEQ ID NO: 20892 - DNA, 20 bp, synthetic construct
  misc_feature 1..20: note = chemically synthesized
  source 1..20: mol_type = other DNA
tataaggaggtcacaaaaga

SEQ ID NO: 20893 - DNA, 20 bp, synthetic construct
  misc_feature 1..20: note = chemically synthesized
  source 1..20: mol_type = other DNA
ggtcacaaaagaaggaatgc

SEQ ID NO: 20894 - DNA, 20 bp, synthetic construct
  misc_feature 1..20: note = chemically synthesized
  source 1..20: mol_type = other DNA
cacaaaagaaggaatgcaag

SEQ ID NO: 20895 - DNA, 20 bp, synthetic construct
  misc_feature 1..20: note = chemically synthesized
  source 1..20: mol_type = other DNA
gaaggaatgcaagaagcccc

SEQ ID NO: 20896 - DNA, 20 bp, synthetic construct
  misc_feature 1..20: note = chemically synthesized
  source 1..20: mol_type = other DNA
aaggaatgcaagaagcccct

SEQ ID NO: 20897 - DNA, 20 bp, synthetic construct
  misc_feature 1..20: note = chemically synthesized
  source 1..20: mol_type = other DNA
atgcaagaagcccctaggta

SEQ ID NO: 20898 - DNA, 20 bp, synthetic construct
  misc_feature 1..20: note = chemically synthesized
  source 1..20: mol_type = other DNA
agaagcccctaggtacagaa

SEQ ID NO: 20899 - DNA, 20 bp, synthetic construct
  misc_feature 1..20: note = chemically synthesized
  source 1..20: mol_type = other DNA
gaagcccctaggtacagaac

SEQ ID NO: 20900 - DNA, 20 bp, synthetic construct
  misc_feature 1..20: note = chemically synthesized
  source 1..20: mol_type = other DNA
taggtacagaacgggcatcc

SEQ ID NO: 20901 - DNA, 20 bp, synthetic construct
  misc_feature 1..20: note = chemically synthesized
  source 1..20: mol_type = other DNA
agaacgggcatcctagctaa

SEQ ID NO: 20902 - DNA, 20 bp, synthetic construct
  misc_feature 1..20: note = chemically synthesized
  source 1..20: mol_type = other DNA
aaaacaaaaacaaaaacaaa

SEQ ID NO: 20903 - DNA, 20 bp, synthetic construct
  misc_feature 1..20: note = chemically synthesized
  source 1..20: mol_type = other DNA
aaacaaaaacaaaaacaaac

SEQ ID NO: 20904 - DNA, 20 bp, synthetic construct
  misc_feature 1..20: note = chemically synthesized
  source 1..20: mol_type = other DNA
aacaaaaacaaaaacaaaca

SEQ ID NO: 20905 - DNA, 20 bp, synthetic construct
  misc_feature 1..20: note = chemically synthesized
  source 1..20: mol_type = other DNA
acaaaaacaaacagggactt

SEQ ID NO: 20906 - DNA, 20 bp, synthetic construct
  misc_feature 1..20: note = chemically synthesized
  source 1..20: mol_type = other DNA
aaaaacaaacagggacttca

SEQ ID NO: 20907 - DNA, 20 bp, synthetic construct
  misc_feature 1..20: note = chemically synthesized
  source 1..20: mol_type = other DNA
caaacagggacttcagagtt

SEQ ID NO: 20908 - DNA, 20 bp, synthetic construct
  misc_feature 1..20: note = chemically synthesized
  source 1..20: mol_type = other DNA
acagggacttcagagttcag

SEQ ID NO: 20909 - DNA, 20 bp, synthetic construct
  misc_feature 1..20: note = chemically synthesized
  source 1..20: mol_type = other DNA
gggacttcagagttcagcag

SEQ ID NO: 20910 - DNA, 20 bp, synthetic construct
  misc_feature 1..20: note = chemically synthesized
  source 1..20: mol_type = other DNA
ggacttcagagttcagcagt

SEQ ID NO: 20911 - DNA, 20 bp, synthetic construct
  misc_feature 1..20: note = chemically synthesized
  source 1..20: mol_type = other DNA
agtaggaaactgaactctga

SEQ ID NO: 20912 - DNA, 20 bp, synthetic construct
  misc_feature 1..20: note = chemically synthesized
  source 1..20: mol_type = other DNA
ggaaactgaactctgacagc

SEQ ID NO: 20913 - DNA, 20 bp, synthetic construct
  misc_feature 1..20: note = chemically synthesized
  source 1..20: mol_type = other DNA
gaaactgaactctgacagcc

SEQ ID NO: 20914 - DNA, 20 bp, synthetic construct
  misc_feature 1..20: note = chemically synthesized
  source 1..20: mol_type = other DNA
actctgacagccgggtgcaa

SEQ ID NO: 20915 - DNA, 20 bp, synthetic construct
  misc_feature 1..20: note = chemically synthesized
  source 1..20: mol_type = other DNA
ccgggtgcaatggctcattc

SEQ ID NO: 20916 - DNA, 20 bp, synthetic construct
  misc_feature 1..20: note = chemically synthesized
  source 1..20: mol_type = other DNA
ctcattcaagcctgtaatcc

SEQ ID NO: 20917 - DNA, 20 bp, synthetic construct
  misc_feature 1..20: note = chemically synthesized
  source 1..20: mol_type = other DNA
agcctgtaatcccagcactt

SEQ ID NO: 20918 - DNA, 20 bp, synthetic construct
  misc_feature 1..20: note = chemically synthesized
  source 1..20: mol_type = other DNA
gcctgtaatcccagcacttt

SEQ ID NO: 20919 - DNA, 20 bp, synthetic construct
  misc_feature 1..20: note = chemically synthesized
  source 1..20: mol_type = other DNA
ctgtaatcccagcactttgg

SEQ ID NO: 20920 - DNA, 20 bp, synthetic construct
  misc_feature 1..20: note = chemically synthesized
  source 1..20: mol_type = other DNA
tgtaatcccagcactttggg

SEQ ID NO: 20921 - DNA, 20 bp, synthetic construct
  misc_feature 1..20: note = chemically synthesized
  source 1..20: mol_type = other DNA
tcccagcactttgggaggcc

SEQ ID NO: 20922 - DNA, 20 bp, synthetic construct
  misc_feature 1..20: note = chemically synthesized
  source 1..20: mol_type = other DNA
cccagcactttgggaggcca

SEQ ID NO: 20923 - DNA, 20 bp, synthetic construct
  misc_feature 1..20: note = chemically synthesized
  source 1..20: mol_type = other DNA
agcactttgggaggccaagg

SEQ ID NO: 20924 - DNA, 20 bp, synthetic construct
  misc_feature 1..20: note = chemically synthesized
  source 1..20: mol_type = other DNA
gcactttgggaggccaaggc

SEQ ID NO: 20925 - DNA, 20 bp, synthetic construct
  misc_feature 1..20: note = chemically synthesized
  source 1..20: mol_type = other DNA
ctttgggaggccaaggcggg

SEQ ID NO: 20926 - DNA, 20 bp, synthetic construct
  misc_feature 1..20: note = chemically synthesized
  source 1..20: mol_type = other DNA
ccaaggcgggcggatcacct

SEQ ID NO: 20927 - DNA, 20 bp, synthetic construct
  misc_feature 1..20: note = chemically synthesized
  source 1..20: mol_type = other DNA
caaggcgggcggatcacctg

SEQ ID NO: 20928 - DNA, 20 bp, synthetic construct
  misc_feature 1..20: note = chemically synthesized
  source 1..20: mol_type = other DNA
gcgggcggatcacctgaggt

SEQ ID NO: 20929 - DNA, 20 bp, synthetic construct
  misc_feature 1..20: note = chemically synthesized
  source 1..20: mol_type = other DNA
cgggcggatcacctgaggtc

SEQ ID NO: 20930 - DNA, 20 bp, synthetic construct
  misc_feature 1..20: note = chemically synthesized
  source 1..20: mol_type = other DNA
ggcggatcacctgaggtcag

SEQ ID NO: 20931 - DNA, 20 bp, synthetic construct
  misc_feature 1..20: note = chemically synthesized
  source 1..20: mol_type = other DNA
tcacctgaggtcaggagttc

SEQ ID NO: 20932 - DNA, 20 bp, synthetic construct
  misc_feature 1..20: note = chemically synthesized
  source 1..20: mol_type = other DNA
tgaggtcaggagttccagac

SEQ ID NO: 20933 - DNA, 20 bp, synthetic construct
  misc_feature 1..20: note = chemically synthesized
  source 1..20: mol_type = other DNA
tcaggagttccagaccagcc

SEQ ID NO: 20934 - DNA, 20 bp, synthetic construct
  misc_feature 1..20: note = chemically synthesized
  source 1..20: mol_type = other DNA
ccagaccagcctggccaaca

SEQ ID NO: 20935 - DNA, 20 bp, synthetic construct
  misc_feature 1..20: note = chemically synthesized
  source 1..20: mol_type = other DNA
ctaccaaaaaatataaaaat

SEQ ID NO: 20936 - DNA, 20 bp, synthetic construct
  misc_feature 1..20: note = chemically synthesized
  source 1..20: mol_type = other DNA
caaaaaatataaaaattagc

SEQ ID NO: 20937 - DNA, 20 bp, synthetic construct
  misc_feature 1..20: note = chemically synthesized
  source 1..20: mol_type = other DNA
aaaaaatataaaaattagcc

SEQ ID NO: 20938 - DNA, 20 bp, synthetic construct
  misc_feature 1..20: note = chemically synthesized
  source 1..20: mol_type = other DNA
atataaaaattagccaggtg

SEQ ID NO: 20939 - DNA, 20 bp, synthetic construct
  misc_feature 1..20: note = chemically synthesized
  source 1..20: mol_type = other DNA
aaattagccaggtgtggttg

SEQ ID NO: 20940 - DNA, 20 bp, synthetic construct
  misc_feature 1..20: note = chemically synthesized
  source 1..20: mol_type = other DNA
ggtgtggttgcagttgcctg

SEQ ID NO: 20941 - DNA, 20 bp, synthetic construct
  misc_feature 1..20: note = chemically synthesized
  source 1..20: mol_type = other DNA
gttgcagttgcctgtagttc

SEQ ID NO: 20942 - DNA, 20 bp, synthetic construct
  misc_feature 1..20: note = chemically synthesized
  source 1..20: mol_type = other DNA
tgcctgtagttccagctact

SEQ ID NO: 20943 - DNA, 20 bp, synthetic construct
  misc_feature 1..20: note = chemically synthesized
  source 1..20: mol_type = other DNA
gcctgtagttccagctactt

SEQ ID NO: 20944 - DNA, 20 bp, synthetic construct
  misc_feature 1..20: note = chemically synthesized
  source 1..20: mol_type = other DNA
ttccagctacttgggaaact

SEQ ID NO: 20945 - DNA, 20 bp, synthetic construct
  misc_feature 1..20: note = chemically synthesized
  source 1..20: mol_type = other DNA
tccagctacttgggaaactg

SEQ ID NO: 20946 - DNA, 20 bp, synthetic construct
  misc_feature 1..20: note = chemically synthesized
  source 1..20: mol_type = other DNA
agctacttgggaaactgagg

SEQ ID NO: 20947 - DNA, 20 bp, synthetic construct
  misc_feature 1..20: note = chemically synthesized
  source 1..20: mol_type = other DNA
gctacttgggaaactgaggc

SEQ ID NO: 20948 - DNA, 20 bp, synthetic construct
  misc_feature 1..20: note = chemically synthesized
  source 1..20: mol_type = other DNA
tacttgggaaactgaggcag

SEQ ID NO: 20949 - DNA, 20 bp, synthetic construct
  misc_feature 1..20: note = chemically synthesized
  source 1..20: mol_type = other DNA
gcaggagaattgcttgaacc

SEQ ID NO: 20950 - DNA, 20 bp, synthetic construct
  misc_feature 1..20: note = chemically synthesized
  source 1..20: mol_type = other DNA
caggagaattgcttgaaccc

SEQ ID NO: 20951 - DNA, 20 bp, synthetic construct
  misc_feature 1..20: note = chemically synthesized
  source 1..20: mol_type = other DNA
ggagaattgcttgaacccgg

SEQ ID NO: 20952 - DNA, 20 bp, synthetic construct
  misc_feature 1..20: note = chemically synthesized
  source 1..20: mol_type = other DNA
gagaattgcttgaacccggg

SEQ ID NO: 20953 - DNA, 20 bp, synthetic construct
  misc_feature 1..20: note = chemically synthesized
  source 1..20: mol_type = other DNA
ttgcttgaacccgggaggca

SEQ ID NO: 20954 - DNA, 20 bp, synthetic construct
  misc_feature 1..20: note = chemically synthesized
  source 1..20: mol_type = other DNA
tgcttgaacccgggaggcac

SEQ ID NO: 20955 - DNA, 20 bp, synthetic construct
  misc_feature 1..20: note = chemically synthesized
  source 1..20: mol_type = other DNA
aacccgggaggcacaggttg

SEQ ID NO: 20956 - DNA, 20 bp, synthetic construct
  misc_feature 1..20: note = chemically synthesized
  source 1..20: mol_type = other DNA
acccgggaggcacaggttgc

SEQ ID NO: 20957 - DNA, 20 bp, synthetic construct
  misc_feature 1..20: note = chemically synthesized
  source 1..20: mol_type = other DNA
cccgggaggcacaggttgca

SEQ ID NO: 20958 - DNA, 20 bp, synthetic construct
  misc_feature 1..20: note = chemically synthesized
  source 1..20: mol_type = other DNA
cgggaggcacaggttgcagg

SEQ ID NO: 20959 - DNA, 20 bp, synthetic construct
  misc_feature 1..20: note = chemically synthesized
  source 1..20: mol_type = other DNA
aggcacaggttgcagggagc

SEQ ID NO: 20960 - DNA, 20 bp, synthetic construct
  misc_feature 1..20: note = chemically synthesized
  source 1..20: mol_type = other DNA
gcacaggttgcagggagcaa

SEQ ID NO: 20961 - DNA, 20 bp, synthetic construct
  misc_feature 1..20: note = chemically synthesized
  source 1..20: mol_type = other DNA
gagattgtgccactgcactc

SEQ ID NO: 20962 - DNA, 20 bp, synthetic construct
  misc_feature 1..20: note = chemically synthesized
  source 1..20: mol_type = other DNA
agattgtgccactgcactcc

SEQ ID NO: 20963 - DNA, 20 bp, synthetic construct
  misc_feature 1..20: note = chemically synthesized
  source 1..20: mol_type = other DNA
tgtgccactgcactccaggc

SEQ ID NO: 20964 - DNA, 20 bp, synthetic construct
  misc_feature 1..20: note = chemically synthesized
  source 1..20: mol_type = other DNA
gtgccactgcactccaggct

SEQ ID NO: 20965 - DNA, 20 bp, synthetic construct
  misc_feature 1..20: note = chemically synthesized
  source 1..20: mol_type = other DNA
ctgcactccaggctgggtga

SEQ ID NO: 20966 - DNA, 20 bp, synthetic construct
  misc_feature 1..20: note = chemically synthesized
  source 1..20: mol_type = other DNA
gcactccaggctgggtgaca

SEQ ID NO: 20967 - DNA, 20 bp, synthetic construct
  misc_feature 1..20: note = chemically synthesized
  source 1..20: mol_type = other DNA
tccaggctgggtgacagagc

SEQ ID NO: 20968 - DNA, 20 bp, synthetic construct
  misc_feature 1..20: note = chemically synthesized
  source 1..20: mol_type = other DNA
tcaaaaaaaaaaaaaaaaaa

SEQ ID NO: 20969 - DNA, 20 bp, synthetic construct
  misc_feature 1..20: note = chemically synthesized
  source 1..20: mol_type = other DNA
aaaaaaaaaaaagaaaaaaa

SEQ ID NO: 20970 - DNA, 20 bp, synthetic construct
  misc_feature 1..20: note = chemically synthesized
  source 1..20: mol_type = other DNA
aaaagaaaaaaaaagaaact

SEQ ID NO: 20971 - DNA, 20 bp, synthetic construct
  misc_feature 1..20: note = chemically synthesized
  source 1..20: mol_type = other DNA
gactacaatctgaatgaacg

SEQ ID NO: 20972 - DNA, 20 bp, synthetic construct
  misc_feature 1..20: note = chemically synthesized
  source 1..20: mol_type = other DNA
tacaatctgaatgaacgtgg

SEQ ID NO: 20973 - DNA, 20 bp, synthetic construct
  misc_feature 1..20: note = chemically synthesized
  source 1..20: mol_type = other DNA
cgtggaagcgaattcttccc

SEQ ID NO: 20974 - DNA, 20 bp, synthetic construct
  misc_feature 1..20: note = chemically synthesized
  source 1..20: mol_type = other DNA
tggaagcgaattcttcccca

SEQ ID NO: 20975 - DNA, 20 bp, synthetic construct
  misc_feature 1..20: note = chemically synthesized
  source 1..20: mol_type = other DNA
gaattcttccccagagcctt

SEQ ID NO: 20976 - DNA, 20 bp, synthetic construct
  misc_feature 1..20: note = chemically synthesized
  source 1..20: mol_type = other DNA
cttccccagagcctttggat

SEQ ID NO: 20977 - DNA, 20 bp, synthetic construct
  misc_feature 1..20: note = chemically synthesized
  source 1..20: mol_type = other DNA
tccccagagcctttggataa

SEQ ID NO: 20978 - DNA, 20 bp, synthetic construct
  misc_feature 1..20: note = chemically synthesized
  source 1..20: mol_type = other DNA
agagcctttggataagagcc

SEQ ID NO: 20979 - DNA, 20 bp, synthetic construct
  misc_feature 1..20: note = chemically synthesized
  source 1..20: mol_type = other DNA
atttgaccttatgataccct

SEQ ID NO: 20980 - DNA, 20 bp, synthetic construct
  misc_feature 1..20: note = chemically synthesized
  source 1..20: mol_type = other DNA
tgaccttatgataccctaag

SEQ ID NO: 20981 - DNA, 20 bp, synthetic construct
  misc_feature 1..20: note = chemically synthesized
  source 1..20: mol_type = other DNA
accttatgataccctaagca

SEQ ID NO: 20982 - DNA, 20 bp, synthetic construct
  misc_feature 1..20: note = chemically synthesized
  source 1..20: mol_type = other DNA
gataccctaagcagagaact

SEQ ID NO: 20983 - DNA, 20 bp, synthetic construct
  misc_feature 1..20: note = chemically synthesized
  source 1..20: mol_type = other DNA
cctaagcagagaactcagtt

SEQ ID NO: 20984 - DNA, 20 bp, synthetic construct
  misc_feature 1..20: note = chemically synthesized
  source 1..20: mol_type = other DNA
gagaactcagttaagcctat

SEQ ID NO: 20985 - DNA, 20 bp, synthetic construct
  misc_feature 1..20: note = chemically synthesized
  source 1..20: mol_type = other DNA
gaactcagttaagcctatga

SEQ ID NO: 20986 - DNA, 20 bp, synthetic construct
  misc_feature 1..20: note = chemically synthesized
  source 1..20: mol_type = other DNA
cagttaagcctatgagagtg

SEQ ID NO: 20987 - DNA, 20 bp, synthetic construct
  misc_feature 1..20: note = chemically synthesized
  source 1..20: mol_type = other DNA
cctatgagagtgcagaccta

SEQ ID NO: 20988 - DNA, 20 bp, synthetic construct
  misc_feature 1..20: note = chemically synthesized
  source 1..20: mol_type = other DNA
taataaactaataatgtttg

SEQ ID NO: 20989 - DNA, 20 bp, synthetic construct
  misc_feature 1..20: note = chemically synthesized
  source 1..20: mol_type = other DNA
taaactaataatgtttgaag

SEQ ID NO: 20990 - DNA, 20 bp, synthetic construct
  misc_feature 1..20: note = chemically synthesized
  source 1..20: mol_type = other DNA
aataatgtttgaagcagctc

SEQ ID NO: 20991 - DNA, 20 bp, synthetic construct
  misc_feature 1..20: note = chemically synthesized
  source 1..20: mol_type = other DNA
gtttgaagcagctcaagttg

SEQ ID NO: 20992 - DNA, 20 bp, synthetic construct
  misc_feature 1..20: note = chemically synthesized
  source 1..20: mol_type = other DNA
cagtaatttatgtataacaa

SEQ ID NO: 20993 - DNA, 20 bp, synthetic construct
  misc_feature 1..20: note = chemically synthesized
  source 1..20: mol_type = other DNA
aacaatagaaaactaatgca

SEQ ID NO: 20994 - DNA, 20 bp, synthetic construct
  misc_feature 1..20: note = chemically synthesized
  source 1..20: mol_type = other DNA
actattatccatattttatt

SEQ ID NO: 20995 - DNA, 20 bp, synthetic construct
  misc_feature 1..20: note = chemically synthesized
  source 1..20: mol_type = other DNA
tattatccatattttattaa

SEQ ID NO: 20996 - DNA, 20 bp, synthetic construct
  misc_feature 1..20: note = chemically synthesized
  source 1..20: mol_type = other DNA
catattttattaagagttta

SEQ ID NO: 20997 - DNA, 20 bp, synthetic construct
  misc_feature 1..20: note = chemically synthesized
  source 1..20: mol_type = other DNA
tattttattaagagtttata

SEQ ID NO: 20998 - DNA, 20 bp, synthetic construct
  misc_feature 1..20: note = chemically synthesized
  source 1..20: mol_type = other DNA
ctataataaactaatattta

SEQ ID NO: 20999 - DNA, 20 bp, synthetic construct
  misc_feature 1..20: note = chemically synthesized
  source 1..20: mol_type = other DNA
tataataaactaatatttac

SEQ ID NO: 21000 - DNA, 20 bp, synthetic construct
  misc_feature 1..20: note = chemically synthesized
  source 1..20: mol_type = other DNA
ataataaactaatatttaca

SEQ ID NO: 21001 - DNA, 20 bp, synthetic construct
  misc_feature 1..20: note = chemically synthesized
  source 1..20: mol_type = other DNA
gtatcatttatctattatca

SEQ ID NO: 21002 - DNA, 20 bp, synthetic construct
  misc_feature 1..20: note = chemically synthesized
  source 1..20: mol_type = other DNA
cacagaattgtcacatcaca

SEQ ID NO: 21003 - DNA, 20 bp, synthetic construct
  misc_feature 1..20: note = chemically synthesized
  source 1..20: mol_type = other DNA
tcacatcacaaagccctgta

SEQ ID NO: 21004 - DNA, 20 bp, synthetic construct
  misc_feature 1..20: note = chemically synthesized
  source 1..20: mol_type = other DNA
cacaaagccctgtatagcat

SEQ ID NO: 21005 - DNA, 20 bp, synthetic construct
  misc_feature 1..20: note = chemically synthesized
  source 1..20: mol_type = other DNA
aaagccctgtatagcatcag

SEQ ID NO: 21006 - DNA, 20 bp, synthetic construct
  misc_feature 1..20: note = chemically synthesized
  source 1..20: mol_type = other DNA
ttatttttcactctaatgca

SEQ ID NO: 21007 - DNA, 20 bp, synthetic construct
  misc_feature 1..20: note = chemically synthesized
  source 1..20: mol_type = other DNA
aatgcatggttcaacttatt

SEQ ID NO: 21008 - DNA, 20 bp, synthetic construct
  misc_feature 1..20: note = chemically synthesized
  source 1..20: mol_type = other DNA
atgcatggttcaacttattt

SEQ ID NO: 21009 - DNA, 20 bp, synthetic construct
  misc_feature 1..20: note = chemically synthesized
  source 1..20: mol_type = other DNA
atggttcaacttatttaggc

SEQ ID NO: 21010 - DNA, 20 bp, synthetic construct
  misc_feature 1..20: note = chemically synthesized
  source 1..20: mol_type = other DNA
tggttcaacttatttaggct

SEQ ID NO: 21011 - DNA, 20 bp, synthetic construct
  misc_feature 1..20: note = chemically synthesized
  source 1..20: mol_type = other DNA
caacttatttaggctgggct

SEQ ID NO: 21012 - DNA, 20 bp, synthetic construct
  misc_feature 1..20: note = chemically synthesized
  source 1..20: mol_type = other DNA
ttatttaggctgggcttggc

SEQ ID NO: 21013 - DNA, 20 bp, synthetic construct
  misc_feature 1..20: note = chemically synthesized
  source 1..20: mol_type = other DNA
tatttaggctgggcttggct

SEQ ID NO: 21014 - DNA, 20 bp, synthetic construct
  misc_feature 1..20: note = chemically synthesized
  source 1..20: mol_type = other DNA
ttaggctgggcttggctggg

SEQ ID NO: 21015 - DNA, 20 bp, synthetic construct
  misc_feature 1..20: note = chemically synthesized
  source 1..20: mol_type = other DNA
tcatttctgcaccatctgct

SEQ ID NO: 21016 - DNA, 20 bp, synthetic construct
  misc_feature 1..20: note = chemically synthesized
  source 1..20: mol_type = other DNA
catttctgcaccatctgctc

SEQ ID NO: 21017 - DNA, 20 bp, synthetic construct
  misc_feature 1..20: note = chemically synthesized
  source 1..20: mol_type = other DNA
gcaccatctgctcaggtaca

SEQ ID NO: 21018 - DNA, 20 bp, synthetic construct
  misc_feature 1..20: note = chemically synthesized
  source 1..20: mol_type = other DNA
caccatctgctcaggtacat

SEQ ID NO: 21019 - DNA, 20 bp, synthetic construct
  misc_feature 1..20: note = chemically synthesized
  source 1..20: mol_type = other DNA
accatctgctcaggtacata

SEQ ID NO: 21020 - DNA, 20 bp, synthetic construct
  misc_feature 1..20: note = chemically synthesized
  source 1..20: mol_type = other DNA
ctgctcaggtacatagggtg

SEQ ID NO: 21021 - DNA, 20 bp, synthetic construct
  misc_feature 1..20: note = chemically synthesized
  source 1..20: mol_type = other DNA
tgccctctctaactaaaccc

SEQ ID NO: 21022 - DNA, 20 bp, synthetic construct
  misc_feature 1..20: note = chemically synthesized
  source 1..20: mol_type = other DNA
gatgtctcttttgcatcacc

SEQ ID NO: 21023 - DNA, 20 bp, synthetic construct
  misc_feature 1..20: note = chemically synthesized
  source 1..20: mol_type = other DNA
cttttgcatcacccagactt

SEQ ID NO: 21024 - DNA, 20 bp, synthetic construct
  misc_feature 1..20: note = chemically synthesized
  source 1..20: mol_type = other DNA
ccagactttagcataaaact

SEQ ID NO: 21025 - DNA, 20 bp, synthetic construct
  misc_feature 1..20: note = chemically synthesized
  source 1..20: mol_type = other DNA
tactgtttacattcttttac

SEQ ID NO: 21026 - DNA, 20 bp, synthetic construct
  misc_feature 1..20: note = chemically synthesized
  source 1..20: mol_type = other DNA
acattcttttactagtctct

SEQ ID NO: 21027 - DNA, 20 bp, synthetic construct
  misc_feature 1..20: note = chemically synthesized
  source 1..20: mol_type = other DNA
ttttactagtctctcagacc

SEQ ID NO: 21028 - DNA, 20 bp, synthetic construct
  misc_feature 1..20: note = chemically synthesized
  source 1..20: mol_type = other DNA
tactagtctctcagacctag

SEQ ID NO: 21029 - DNA, 20 bp, synthetic construct
  misc_feature 1..20: note = chemically synthesized
  source 1..20: mol_type = other DNA
ctagtggctctaactcattg

SEQ ID NO: 21030 - DNA, 20 bp, synthetic construct
  misc_feature 1..20: note = chemically synthesized
  source 1..20: mol_type = other DNA
actcattgtagtaaaaaaca

SEQ ID NO: 21031 - DNA, 20 bp, synthetic construct
  misc_feature 1..20: note = chemically synthesized
  source 1..20: mol_type = other DNA
ctaacattgcttactttact

SEQ ID NO: 21032 - DNA, 20 bp, synthetic construct
  misc_feature 1..20: note = chemically synthesized
  source 1..20: mol_type = other DNA
gtgttgtattaacacaccaa

SEQ ID NO: 21033 - DNA, 20 bp, synthetic construct
  misc_feature 1..20: note = chemically synthesized
  source 1..20: mol_type = other DNA
tattaacacaccaatggccc

SEQ ID NO: 21034 - DNA, 20 bp, synthetic construct
  misc_feature 1..20: note = chemically synthesized
  source 1..20: mol_type = other DNA
taacacaccaatggccctgg

SEQ ID NO: 21035 - DNA, 20 bp, synthetic construct
  misc_feature 1..20: note = chemically synthesized
  source 1..20: mol_type = other DNA
aatggccctggaagcaatga

SEQ ID NO: 21036 - DNA, 20 bp, synthetic construct
  misc_feature 1..20: note = chemically synthesized
  source 1..20: mol_type = other DNA
tggccctggaagcaatgaca

SEQ ID NO: 21037 - DNA, 20 bp, synthetic construct
  misc_feature 1..20: note = chemically synthesized
  source 1..20: mol_type = other DNA
gagtttgacatattgattgt

SEQ ID NO: 21038 - DNA, 20 bp, synthetic construct
  misc_feature 1..20: note = chemically synthesized
  source 1..20: mol_type = other DNA
agtttgacatattgattgta

SEQ ID NO: 21039 - DNA, 20 bp, synthetic construct
  misc_feature 1..20: note = chemically synthesized
  source 1..20: mol_type = other DNA
cacattgatcactaactgac

SEQ ID NO: 21040 - DNA, 20 bp, synthetic construct
  misc_feature 1..20: note = chemically synthesized
  source 1..20: mol_type = other DNA
tgctgattgttaaactgact

SEQ ID NO: 21041 - DNA, 20 bp, synthetic construct
  misc_feature 1..20: note = chemically synthesized
  source 1..20: mol_type = other DNA
gctgattgttaaactgactt

SEQ ID NO: 21042 - DNA, 20 bp, synthetic construct
  misc_feature 1..20: note = chemically synthesized
  source 1..20: mol_type = other DNA
attgttaaactgacttaggt

SEQ ID NO: 21043 - DNA, 20 bp, synthetic construct
  misc_feature 1..20: note = chemically synthesized
  source 1..20: mol_type = other DNA
taaactgacttaggtaagaa

SEQ ID NO: 21044 - DNA, 20 bp, synthetic construct
  misc_feature 1..20: note = chemically synthesized
  source 1..20: mol_type = other DNA
aatattactaatatactaat

SEQ ID NO: 21045 - DNA, 20 bp, synthetic construct
  misc_feature 1..20: note = chemically synthesized
  source 1..20: mol_type = other DNA
atactaattggctaatatat

SEQ ID NO: 21046 - DNA, 20 bp, synthetic construct
  misc_feature 1..20: note = chemically synthesized
  source 1..20: mol_type = other DNA
taatatataagctgaaaatg

SEQ ID NO: 21047 - DNA, 20 bp, synthetic construct
  misc_feature 1..20: note = chemically synthesized
  source 1..20: mol_type = other DNA
aatatataagctgaaaatgt

SEQ ID NO: 21048 - DNA, 20 bp, synthetic construct
  misc_feature 1..20: note = chemically synthesized
  source 1..20: mol_type = other DNA
tatataagctgaaaatgtgg

SEQ ID NO: 21049 - DNA, 20 bp, synthetic construct
  misc_feature 1..20: note = chemically synthesized
  source 1..20: mol_type = other DNA
ctgaaaatgtgggagctaca

SEQ ID NO: 21050 - DNA, 20 bp, synthetic construct
  misc_feature 1..20: note = chemically synthesized
  source 1..20: mol_type = other DNA
aaaatgtgggagctacaaag

SEQ ID NO: 21051 - DNA, 20 bp, synthetic construct
  misc_feature 1..20: note = chemically synthesized
  source 1..20: mol_type = other DNA
aatgtgggagctacaaagta

SEQ ID NO: 21052 - DNA, 20 bp, synthetic construct
  misc_feature 1..20: note = chemically synthesized
  source 1..20: mol_type = other DNA
atgtgggagctacaaagtag

SEQ ID NO: 21053 - DNA, 20 bp, synthetic construct
  misc_feature 1..20: note = chemically synthesized
  source 1..20: mol_type = other DNA
gtgggagctacaaagtagag

SEQ ID NO: 21054 - DNA, 20 bp, synthetic construct
  misc_feature 1..20: note = chemically synthesized
  source 1..20: mol_type = other DNA
tgggagctacaaagtagagg

SEQ ID NO: 21055 - DNA, 20 bp, synthetic construct
  misc_feature 1..20: note = chemically synthesized
  source 1..20: mol_type = other DNA
gagctacaaagtagaggagg

SEQ ID NO: 21056 - DNA, 20 bp, synthetic construct
  misc_feature 1..20: note = chemically synthesized
  source 1..20: mol_type = other DNA
ctacaaagtagaggaggaag

SEQ ID NO: 21057 - DNA, 20 bp, synthetic construct
  misc_feature 1..20: note = chemically synthesized
  source 1..20: mol_type = other DNA
tacaaagtagaggaggaaga

SEQ ID NO: 21058 - DNA, 20 bp, synthetic construct
  misc_feature 1..20: note = chemically synthesized
  source 1..20: mol_type = other DNA
aaagtagaggaggaagaagg

SEQ ID NO: 21059 - DNA, 20 bp, synthetic construct
  misc_feature 1..20: note = chemically synthesized
  source 1..20: mol_type = other DNA
tagaggaggaagaaggcaga

SEQ ID NO: 21060 - DNA, 20 bp, synthetic construct
  misc_feature 1..20: note = chemically synthesized
  source 1..20: mol_type = other DNA
agaggaggaagaaggcagaa

SEQ ID NO: 21061 - DNA, 20 bp, synthetic construct
  misc_feature 1..20: note = chemically synthesized
  source 1..20: mol_type = other DNA
gaggaggaagaaggcagaaa

SEQ ID NO: 21062 - DNA, 20 bp, synthetic construct
  misc_feature 1..20: note = chemically synthesized
  source 1..20: mol_type = other DNA
aagaaggcagaaagggaaca

SEQ ID NO: 21063 - DNA, 20 bp, synthetic construct
  misc_feature 1..20: note = chemically synthesized
  source 1..20: mol_type = other DNA
agaaggcagaaagggaacat

SEQ ID NO: 21064 - DNA, 20 bp, synthetic construct
  misc_feature 1..20: note = chemically synthesized
  source 1..20: mol_type = other DNA
aggcagaaagggaacatagg

SEQ ID NO: 21065 - DNA, 20 bp, synthetic construct
  misc_feature 1..20: note = chemically synthesized
  source 1..20: mol_type = other DNA
aagggaacataggtggatgt

SEQ ID NO: 21066 - DNA, 20 bp, synthetic construct
  misc_feature 1..20: note = chemically synthesized
  source 1..20: mol_type = other DNA
gaacataggtggatgtaaga

SEQ ID NO: 21067 - DNA, 20 bp, synthetic construct
  misc_feature 1..20: note = chemically synthesized
  source 1..20: mol_type = other DNA
acataggtggatgtaagata

SEQ ID NO: 21068 - DNA, 20 bp, synthetic construct
  misc_feature 1..20: note = chemically synthesized
  source 1..20: mol_type = other DNA
gatgtaagatagagaaaact

SEQ ID NO: 21069 - DNA, 20 bp, synthetic construct
  misc_feature 1..20: note = chemically synthesized
  source 1..20: mol_type = other DNA
aagatagagaaaactgagcc

SEQ ID NO: 21070 - DNA, 20 bp, synthetic construct
  misc_feature 1..20: note = chemically synthesized
  source 1..20: mol_type = other DNA
gatagagaaaactgagccta

SEQ ID NO: 21071 - DNA, 20 bp, synthetic construct
  misc_feature 1..20: note = chemically synthesized
  source 1..20: mol_type = other DNA
tgagcctagagaactgcatc

SEQ ID NO: 21072 - DNA, 20 bp, synthetic construct
  misc_feature 1..20: note = chemically synthesized
  source 1..20: mol_type = other DNA
agcctagagaactgcatcaa

SEQ ID NO: 21073 - DNA, 20 bp, synthetic construct
  misc_feature 1..20: note = chemically synthesized
  source 1..20: mol_type = other DNA
gcctagagaactgcatcaag

SEQ ID NO: 21074 - DNA, 20 bp, synthetic construct
  misc_feature 1..20: note = chemically synthesized
  source 1..20: mol_type = other DNA
ctagagaactgcatcaagag

SEQ ID NO: 21075 - DNA, 20 bp, synthetic construct
  misc_feature 1..20: note = chemically synthesized
  source 1..20: mol_type = other DNA
tagagaactgcatcaagagg

SEQ ID NO: 21076 - DNA, 20 bp, synthetic construct
  misc_feature 1..20: note = chemically synthesized
  source 1..20: mol_type = other DNA
gagaactgcatcaagaggag

SEQ ID NO: 21077 - DNA, 20 bp, synthetic construct
  misc_feature 1..20: note = chemically synthesized
  source 1..20: mol_type = other DNA
agaactgcatcaagaggagg

SEQ ID NO: 21078 - DNA, 20 bp, synthetic construct
  misc_feature 1..20: note = chemically synthesized
  source 1..20: mol_type = other DNA
aactgcatcaagaggaggag

SEQ ID NO: 21079 - DNA, 20 bp, synthetic construct
  misc_feature 1..20: note = chemically synthesized
  source 1..20: mol_type = other DNA
ctgcatcaagaggaggagga

SEQ ID NO: 21080 - DNA, 20 bp, synthetic construct
  misc_feature 1..20: note = chemically synthesized
  source 1..20: mol_type = other DNA
tgcatcaagaggaggaggag

SEQ ID NO: 21081 - DNA, 20 bp, synthetic construct
  misc_feature 1..20: note = chemically synthesized
  source 1..20: mol_type = other DNA
atcaagaggaggaggagagg

SEQ ID NO: 21082 - DNA, 20 bp, synthetic construct
  misc_feature 1..20: note = chemically synthesized
  source 1..20: mol_type = other DNA
gaggaggaggagaggtagta

SEQ ID NO: 21083 - DNA, 20 bp, synthetic construct
  misc_feature 1..20: note = chemically synthesized
  source 1..20: mol_type = other DNA
ggaggaggagaggtagtata

SEQ ID NO: 21084 - DNA, 20 bp, synthetic construct
  misc_feature 1..20: note = chemically synthesized
  source 1..20: mol_type = other DNA
agaggtagtatagagaccta

SEQ ID NO: 21085 - DNA, 20 bp, synthetic construct
  misc_feature 1..20: note = chemically synthesized
  source 1..20: mol_type = other DNA
gaggtagtatagagacctac

SEQ ID NO: 21086 - DNA, 20 bp, synthetic construct
  misc_feature 1..20: note = chemically synthesized
  source 1..20: mol_type = other DNA
atagagacctacaggtgtca

SEQ ID NO: 21087 - DNA, 20 bp, synthetic construct
  misc_feature 1..20: note = chemically synthesized
  source 1..20: mol_type = other DNA
ccaccctgcacattcactcc

SEQ ID NO: 21088 - DNA, 20 bp, synthetic construct
  misc_feature 1..20: note = chemically synthesized
  source 1..20: mol_type = other DNA
accctgcacattcactccca

SEQ ID NO: 21089 - DNA, 20 bp, synthetic construct
  misc_feature 1..20: note = chemically synthesized
  source 1..20: mol_type = other DNA
tgcacattcactcccagagt

SEQ ID NO: 21090 - DNA, 20 bp, synthetic construct
  misc_feature 1..20: note = chemically synthesized
  source 1..20: mol_type = other DNA
ttcctctcctgcctcttcca

SEQ ID NO: 21091 - DNA, 20 bp, synthetic construct
  misc_feature 1..20: note = chemically synthesized
  source 1..20: mol_type = other DNA
tccaaagaaaatttctattg

SEQ ID NO: 21092 - DNA, 20 bp, synthetic construct
  misc_feature 1..20: note = chemically synthesized
  source 1..20: mol_type = other DNA
ccaaagaaaatttctattgt

SEQ ID NO: 21093 - DNA, 20 bp, synthetic construct
  misc_feature 1..20: note = chemically synthesized
  source 1..20: mol_type = other DNA
gaaaatttctattgtaggaa

SEQ ID NO: 21094 - DNA, 20 bp, synthetic construct
  misc_feature 1..20: note = chemically synthesized
  source 1..20: mol_type = other DNA
tgtaggaaaagtgttcttaa

SEQ ID NO: 21095 - DNA, 20 bp, synthetic construct
  misc_feature 1..20: note = chemically synthesized
  source 1..20: mol_type = other DNA
aaagtgttcttaatagcgct

SEQ ID NO: 21096 - DNA, 20 bp, synthetic construct
  misc_feature 1..20: note = chemically synthesized
  source 1..20: mol_type = other DNA
cttaatagcgctgagctaac

SEQ ID NO: 21097 - DNA, 20 bp, synthetic construct
  misc_feature 1..20: note = chemically synthesized
  source 1..20: mol_type = other DNA
gctgagctaacaagaacttc

SEQ ID NO: 21098 - DNA, 20 bp, synthetic construct
  misc_feature 1..20: note = chemically synthesized
  source 1..20: mol_type = other DNA
agaacttctagatatcaact

SEQ ID NO: 21099 - DNA, 20 bp, synthetic construct
  misc_feature 1..20: note = chemically synthesized
  source 1..20: mol_type = other DNA
gaactcttaattattcatgt

SEQ ID NO: 21100 - DNA, 20 bp, synthetic construct
  misc_feature 1..20: note = chemically synthesized
  source 1..20: mol_type = other DNA
taaaactactgtttttattt

SEQ ID NO: 21101 - DNA, 20 bp, synthetic construct
  misc_feature 1..20: note = chemically synthesized
  source 1..20: mol_type = other DNA
aaactactgtttttatttca

SEQ ID NO: 21102 - DNA, 20 bp, synthetic construct
  misc_feature 1..20: note = chemically synthesized
  source 1..20: mol_type = other DNA
atttcagagttaacatttgc

SEQ ID NO: 21103 - DNA, 20 bp, synthetic construct
  misc_feature 1..20: note = chemically synthesized
  source 1..20: mol_type = other DNA
tttcagagttaacatttgct

SEQ ID NO: 21104 - DNA, 20 bp, synthetic construct
  misc_feature 1..20: note = chemically synthesized
  source 1..20: mol_type = other DNA
cagagttaacatttgctagg

SEQ ID NO: 21105 - DNA, 20 bp, synthetic construct
  misc_feature 1..20: note = chemically synthesized
  source 1..20: mol_type = other DNA
aggaagttgaacttttatgt

SEQ ID NO: 21106 - DNA, 20 bp, synthetic construct
  misc_feature 1..20: note = chemically synthesized
  source 1..20: mol_type = other DNA
gaagttgaacttttatgttg

SEQ ID NO: 21107 - DNA, 20 bp, synthetic construct
  misc_feature 1..20: note = chemically synthesized
  source 1..20: mol_type = other DNA
aagttgaacttttatgttgg

SEQ ID NO: 21108 - DNA, 20 bp, synthetic construct
  misc_feature 1..20: note = chemically synthesized
  source 1..20: mol_type = other DNA
atgttggaggttgatacacc

SEQ ID NO: 21109 - DNA, 20 bp, synthetic construct
  misc_feature 1..20: note = chemically synthesized
  source 1..20: mol_type = other DNA
ttggaggttgatacacccgg

SEQ ID NO: 21110 - DNA, 20 bp, synthetic construct
  misc_feature 1..20: note = chemically synthesized
  source 1..20: mol_type = other DNA
gatacacccggcagaatctg

SEQ ID NO: 21111 - DNA, 20 bp, synthetic construct
  misc_feature 1..20: note = chemically synthesized
  source 1..20: mol_type = other DNA
cccggcagaatctgtagata

SEQ ID NO: 21112 - DNA, 20 bp, synthetic construct
  misc_feature 1..20: note = chemically synthesized
  source 1..20: mol_type = other DNA
accctcttgcaacaactatg

SEQ ID NO: 21113 - DNA, 20 bp, synthetic construct
  misc_feature 1..20: note = chemically synthesized
  source 1..20: mol_type = other DNA
ctcttgcaacaactatgtgg

SEQ ID NO: 21114 - DNA, 20 bp, synthetic construct
  misc_feature 1..20: note = chemically synthesized
  source 1..20: mol_type = other DNA
ttgcaacaactatgtggtgg

SEQ ID NO: 21115 - DNA, 20 bp, synthetic construct
  misc_feature 1..20: note = chemically synthesized
  source 1..20: mol_type = other DNA
gcaacaactatgtggtggaa

SEQ ID NO: 21116 - DNA, 20 bp, synthetic construct
  misc_feature 1..20: note = chemically synthesized
  source 1..20: mol_type = other DNA
tatgtggtggaagagaatcc

SEQ ID NO: 21117 - DNA, 20 bp, synthetic construct
  misc_feature 1..20: note = chemically synthesized
  source 1..20: mol_type = other DNA
gtggtggaagagaatccaag

SEQ ID NO: 21118 - DNA, 20 bp, synthetic construct
  misc_feature 1..20: note = chemically synthesized
  source 1..20: mol_type = other DNA
ggaagagaatccaagaagat

SEQ ID NO: 21119 - DNA, 20 bp, synthetic construct
  misc_feature 1..20: note = chemically synthesized
  source 1..20: mol_type = other DNA
accttcattccattctccca

SEQ ID NO: 21120 - DNA, 20 bp, synthetic construct
  misc_feature 1..20: note = chemically synthesized
  source 1..20: mol_type = other DNA
ttccattctcccatagtcac

SEQ ID NO: 21121 - DNA, 20 bp, synthetic construct
  misc_feature 1..20: note = chemically synthesized
  source 1..20: mol_type = other DNA
ccattctcccatagtcacta

SEQ ID NO: 21122 - DNA, 20 bp, synthetic construct
  misc_feature 1..20: note = chemically synthesized
  source 1..20: mol_type = other DNA
atagtcactagagcctgacc

SEQ ID NO: 21123 - DNA, 20 bp, synthetic construct
  misc_feature 1..20: note = chemically synthesized
  source 1..20: mol_type = other DNA
tagtcactagagcctgacct

SEQ ID NO: 21124 - DNA, 20 bp, synthetic construct
  misc_feature 1..20: note = chemically synthesized
  source 1..20: mol_type = other DNA
agtcactagagcctgacctg

SEQ ID NO: 21125 - DNA, 20 bp, synthetic construct
  misc_feature 1..20: note = chemically synthesized
  source 1..20: mol_type = other DNA
tagagcctgacctggggtat

SEQ ID NO: 21126 - DNA, 20 bp, synthetic construct
  misc_feature 1..20: note = chemically synthesized
  source 1..20: mol_type = other DNA
gacctggggtatcagaaatt

SEQ ID NO: 21127 - DNA, 20 bp, synthetic construct
  misc_feature 1..20: note = chemically synthesized
  source 1..20: mol_type = other DNA
acctggggtatcagaaatta

SEQ ID NO: 21128 - DNA, 20 bp, synthetic construct
  misc_feature 1..20: note = chemically synthesized
  source 1..20: mol_type = other DNA
cctggggtatcagaaattaa

SEQ ID NO: 21129 - DNA, 20 bp, synthetic construct
  misc_feature 1..20: note = chemically synthesized
  source 1..20: mol_type = other DNA
ctggggtatcagaaattaag

SEQ ID NO: 21130 - DNA, 20 bp, synthetic construct
  misc_feature 1..20: note = chemically synthesized
  source 1..20: mol_type = other DNA
ggggtatcagaaattaaggg

SEQ ID NO: 21131 - DNA, 20 bp, synthetic construct
  misc_feature 1..20: note = chemically synthesized
  source 1..20: mol_type = other DNA
ggtatcagaaattaagggga

SEQ ID NO: 21132 - DNA, 20 bp, synthetic construct
  misc_feature 1..20: note = chemically synthesized
  source 1..20: mol_type = other DNA
gtatcagaaattaaggggag

SEQ ID NO: 21133 - DNA, 20 bp, synthetic construct
  misc_feature 1..20: note = chemically synthesized
  source 1..20: mol_type = other DNA
taaggggagaggtaattgct

SEQ ID NO: 21134 - DNA, 20 bp, synthetic construct
  misc_feature 1..20: note = chemically synthesized
  source 1..20: mol_type = other DNA
gagaggtaattgctgagtcc

SEQ ID NO: 21135 - DNA, 20 bp, synthetic construct
  misc_feature 1..20: note = chemically synthesized
  source 1..20: mol_type = other DNA
gtaattgctgagtcctggtg

SEQ ID NO: 21136 - DNA, 20 bp, synthetic construct
  misc_feature 1..20: note = chemically synthesized
  source 1..20: mol_type = other DNA
ctgagtcctggtgtagaaat

SEQ ID NO: 21137 - DNA, 20 bp, synthetic construct
  misc_feature 1..20: note = chemically synthesized
  source 1..20: mol_type = other DNA
ggtgtagaaattggtttaaa

SEQ ID NO: 21138 - DNA, 20 bp, synthetic construct
  misc_feature 1..20: note = chemically synthesized
  source 1..20: mol_type = other DNA
tggtttaaatggtatctctg

SEQ ID NO: 21139 - DNA, 20 bp, synthetic construct
  misc_feature 1..20: note = chemically synthesized
  source 1..20: mol_type = other DNA
gtatctctgaagactgctaa

SEQ ID NO: 21140 - DNA, 20 bp, synthetic construct
  misc_feature 1..20: note = chemically synthesized
  source 1..20: mol_type = other DNA
tatctctgaagactgctaac

SEQ ID NO: 21141 - DNA, 20 bp, synthetic construct
  misc_feature 1..20: note = chemically synthesized
  source 1..20: mol_type = other DNA
atctctgaagactgctaaca

SEQ ID NO: 21142 - DNA, 20 bp, synthetic construct
  misc_feature 1..20: note = chemically synthesized
  source 1..20: mol_type = other DNA
tgctaacagggttaatttgt

SEQ ID NO: 21143 - DNA, 20 bp, synthetic construct
  misc_feature 1..20: note = chemically synthesized
  source 1..20: mol_type = other DNA
gctaacagggttaatttgtg

SEQ ID NO: 21144 - DNA, 20 bp, synthetic construct
  misc_feature 1..20: note = chemically synthesized
  source 1..20: mol_type = other DNA
ttgtattcaaaattgttccc

SEQ ID NO: 21145 - DNA, 20 bp, synthetic construct
  misc_feature 1..20: note = chemically synthesized
  source 1..20: mol_type = other DNA
cccagtatctgtcttgatgc

SEQ ID NO: 21146 - DNA, 20 bp, synthetic construct
  misc_feature 1..20: note = chemically synthesized
  source 1..20: mol_type = other DNA
ctgtcttgatgctggataat

SEQ ID NO: 21147 - DNA, 20 bp, synthetic construct
  misc_feature 1..20: note = chemically synthesized
  source 1..20: mol_type = other DNA
tgtcttgatgctggataatt

SEQ ID NO: 21148 - DNA, 20 bp, synthetic construct
  misc_feature 1..20: note = chemically synthesized
  source 1..20: mol_type = other DNA
atgctggataattaggctac

SEQ ID NO: 21149 - DNA, 20 bp, synthetic construct
  misc_feature 1..20: note = chemically synthesized
  source 1..20: mol_type = other DNA
tgctggataattaggctact

SEQ ID NO: 21150 - DNA, 20 bp, synthetic construct
  misc_feature 1..20: note = chemically synthesized
  source 1..20: mol_type = other DNA
ctactgggatattttttttc

SEQ ID NO: 21151 - DNA, 20 bp, synthetic construct
  misc_feature 1..20: note = chemically synthesized
  source 1..20: mol_type = other DNA
attttttttcaagcctcctt

SEQ ID NO: 21152 - DNA, 20 bp, synthetic construct
  misc_feature 1..20: note = chemically synthesized
  source 1..20: mol_type = other DNA
tttttttcaagcctcctttg

SEQ ID NO: 21153 - DNA, 20 bp, synthetic construct
  misc_feature 1..20: note = chemically synthesized
  source 1..20: mol_type = other DNA
ttttcaagcctcctttggag

SEQ ID NO: 21154 - DNA, 20 bp, synthetic construct
  misc_feature 1..20: note = chemically synthesized
  source 1..20: mol_type = other DNA
tttcaagcctcctttggaga

SEQ ID NO: 21155 - DNA, 20 bp, synthetic construct
  misc_feature 1..20: note = chemically synthesized
  source 1..20: mol_type = other DNA
caagcctcctttggagaagg

SEQ ID NO: 21156 - DNA, 20 bp, synthetic construct
  misc_feature 1..20: note = chemically synthesized
  source 1..20: mol_type = other DNA
gcctcctttggagaaggaag

SEQ ID NO: 21157 - DNA, 20 bp, synthetic construct
  misc_feature 1..20: note = chemically synthesized
  source 1..20: mol_type = other DNA
cctcctttggagaaggaagt

SEQ ID NO: 21158 - DNA, 20 bp, synthetic construct
  misc_feature 1..20: note = chemically synthesized
  source 1..20: mol_type = other DNA
ttggagaaggaagtgggctc

SEQ ID NO: 21159 - DNA, 20 bp, synthetic construct
  misc_feature 1..20: note = chemically synthesized
  source 1..20: mol_type = other DNA
gctccagaactgtgttctta

SEQ ID NO: 21160 - DNA, 20 bp, synthetic construct
  misc_feature 1..20: note = chemically synthesized
  source 1..20: mol_type = other DNA
ccccatattttctttgcaaa

SEQ ID NO: 21161 - DNA, 20 bp, synthetic construct
  misc_feature 1..20: note = chemically synthesized
  source 1..20: mol_type = other DNA
ttttctttgcaaaaagaaaa

SEQ ID NO: 21162 - DNA, 20 bp, synthetic construct
  misc_feature 1..20: note = chemically synthesized
  source 1..20: mol_type = other DNA
gcaaaaagaaaacagaattg

SEQ ID NO: 21163 - DNA, 20 bp, synthetic construct
  misc_feature 1..20: note = chemically synthesized
  source 1..20: mol_type = other DNA
aacagaattgtagcttcatc

SEQ ID NO: 21164 - DNA, 20 bp, synthetic construct
  misc_feature 1..20: note = chemically synthesized
  source 1..20: mol_type = other DNA
ttgtagcttcatccagcaca

SEQ ID NO: 21165 - DNA, 20 bp, synthetic construct
  misc_feature 1..20: note = chemically synthesized
  source 1..20: mol_type = other DNA
tagcttcatccagcacatgg

SEQ ID NO: 21166 - DNA, 20 bp, synthetic construct
  misc_feature 1..20: note = chemically synthesized
  source 1..20: mol_type = other DNA
gtatgattccccacctcaaa

SEQ ID NO: 21167 - DNA, 20 bp, synthetic construct
  misc_feature 1..20: note = chemically synthesized
  source 1..20: mol_type = other DNA
tgattccccacctcaaaaag

SEQ ID NO: 21168 - DNA, 20 bp, synthetic construct
  misc_feature 1..20: note = chemically synthesized
  source 1..20: mol_type = other DNA
ctcaaaaagaagataccgtg

SEQ ID NO: 21169 - DNA, 20 bp, synthetic construct
  misc_feature 1..20: note = chemically synthesized
  source 1..20: mol_type = other DNA
tttgttattccttaaccctg

SEQ ID NO: 21170 - DNA, 20 bp, synthetic construct
  misc_feature 1..20: note = chemically synthesized
  source 1..20: mol_type = other DNA
tccttaaccctgtagccaat

SEQ ID NO: 21171 - DNA, 20 bp, synthetic construct
  misc_feature 1..20: note = chemically synthesized
  source 1..20: mol_type = other DNA
gccaataagctcactcaact

SEQ ID NO: 21172 - DNA, 20 bp, synthetic construct
  misc_feature 1..20: note = chemically synthesized
  source 1..20: mol_type = other DNA
aagctcactcaacttagaca

SEQ ID NO: 21173 - DNA, 20 bp, synthetic construct
  misc_feature 1..20: note = chemically synthesized
  source 1..20: mol_type = other DNA
cctcacacttaatcttttct

SEQ ID NO: 21174 - DNA, 20 bp, synthetic construct
  misc_feature 1..20: note = chemically synthesized
  source 1..20: mol_type = other DNA
atcttttcttggtttcaaat

SEQ ID NO: 21175 - DNA, 20 bp, synthetic construct
  misc_feature 1..20: note = chemically synthesized
  source 1..20: mol_type = other DNA
tgttatatatactcacaaat

SEQ ID NO: 21176 - DNA, 20 bp, synthetic construct
  misc_feature 1..20: note = chemically synthesized
  source 1..20: mol_type = other DNA
cacaaatgagtgctgctgat

SEQ ID NO: 21177 - DNA, 20 bp, synthetic construct
  misc_feature 1..20: note = chemically synthesized
  source 1..20: mol_type = other DNA
tgctgataagttctttcaaa

SEQ ID NO: 21178 - DNA, 20 bp, synthetic construct
  misc_feature 1..20: note = chemically synthesized
  source 1..20: mol_type = other DNA
gataagttctttcaaacagt

SEQ ID NO: 21179 - DNA, 20 bp, synthetic construct
  misc_feature 1..20: note = chemically synthesized
  source 1..20: mol_type = other DNA
taagcttgttttctgtctct

SEQ ID NO: 21180 - DNA, 20 bp, synthetic construct
  misc_feature 1..20: note = chemically synthesized
  source 1..20: mol_type = other DNA
cttgttttctgtctcttggt

SEQ ID NO: 21181 - DNA, 20 bp, synthetic construct
  misc_feature 1..20: note = chemically synthesized
  source 1..20: mol_type = other DNA
tctcttggtaagtcttgccc

SEQ ID NO: 21182 - DNA, 20 bp, synthetic construct
  misc_feature 1..20: note = chemically synthesized
  source 1..20: mol_type = other DNA
ggtaagtcttgcccaagaat

SEQ ID NO: 21183 - DNA, 20 bp, synthetic construct
  misc_feature 1..20: note = chemically synthesized
  source 1..20: mol_type = other DNA
taagtcttgcccaagaatca

SEQ ID NO: 21184 - DNA, 20 bp, synthetic construct
  misc_feature 1..20: note = chemically synthesized
  source 1..20: mol_type = other DNA
agaatcagagttactgcttc

SEQ ID NO: 21185 - DNA, 20 bp, synthetic construct
  misc_feature 1..20: note = chemically synthesized
  source 1..20: mol_type = other DNA
aatcagagttactgcttctg

SEQ ID NO: 21186 - DNA, 20 bp, synthetic construct
  misc_feature 1..20: note = chemically synthesized
  source 1..20: mol_type = other DNA
cttctggagcaatataaatc

SEQ ID NO: 21187 - DNA, 20 bp, synthetic construct
  misc_feature 1..20: note = chemically synthesized
  source 1..20: mol_type = other DNA
aagtttaaaaaattttattt

SEQ ID NO: 21188 - DNA, 20 bp, synthetic construct
  misc_feature 1..20: note = chemically synthesized
  source 1..20: mol_type = other DNA
aattttatttaagtgtcctg

SEQ ID NO: 21189 - DNA, 20 bp, synthetic construct
  misc_feature 1..20: note = chemically synthesized
  source 1..20: mol_type = other DNA
tgtcctgtagtaatgttaaa

SEQ ID NO: 21190 - DNA, 20 bp, synthetic construct
  misc_feature 1..20: note = chemically synthesized
  source 1..20: mol_type = other DNA
gtcctgtagtaatgttaaaa

SEQ ID NO: 21191 - DNA, 20 bp, synthetic construct
  misc_feature 1..20: note = chemically synthesized
  source 1..20: mol_type = other DNA
tcctgtagtaatgttaaaaa

SEQ ID NO: 21192 - DNA, 20 bp, synthetic construct
  misc_feature 1..20: note = chemically synthesized
  source 1..20: mol_type = other DNA
cctgtagtaatgttaaaaag

SEQ ID NO: 21193 - DNA, 20 bp, synthetic construct
  misc_feature 1..20: note = chemically synthesized
  source 1..20: mol_type = other DNA
gtaatgttaaaaaggggaca

SEQ ID NO: 21194 - DNA, 20 bp, synthetic construct
  misc_feature 1..20: note = chemically synthesized
  source 1..20: mol_type = other DNA
atgttaaaaaggggacatgg

SEQ ID NO: 21195 - DNA, 20 bp, synthetic construct
  misc_feature 1..20: note = chemically synthesized
  source 1..20: mol_type = other DNA
gttaaaaaggggacatggtg

SEQ ID NO: 21196 - DNA, 20 bp, synthetic construct
  misc_feature 1..20: note = chemically synthesized
  source 1..20: mol_type = other DNA
ttaaaaaggggacatggtgg

SEQ ID NO: 21197 - DNA, 20 bp, synthetic construct
  misc_feature 1..20: note = chemically synthesized
  source 1..20: mol_type = other DNA
tggaggtattctttaatccc

SEQ ID NO: 21198 - DNA, 20 bp, synthetic construct
  misc_feature 1..20: note = chemically synthesized
  source 1..20: mol_type = other DNA
acttgaatacaatcatctca

SEQ ID NO: 21199 - DNA, 20 bp, synthetic construct
  misc_feature 1..20: note = chemically synthesized
  source 1..20: mol_type = other DNA
acaatcatctcatagtctgt

SEQ ID NO: 21200 - DNA, 20 bp, synthetic construct
  misc_feature 1..20: note = chemically synthesized
  source 1..20: mol_type = other DNA
aatcatctcatagtctgtca

SEQ ID NO: 21201 - DNA, 20 bp, synthetic construct
  misc_feature 1..20: note = chemically synthesized
  source 1..20: mol_type = other DNA
tcatagtctgtcagagaaat

SEQ ID NO: 21202 - DNA, 20 bp, synthetic construct
  misc_feature 1..20: note = chemically synthesized
  source 1..20: mol_type = other DNA
catagtctgtcagagaaata

SEQ ID NO: 21203 - DNA, 20 bp, synthetic construct
  misc_feature 1..20: note = chemically synthesized
  source 1..20: mol_type = other DNA
tgtcagagaaataaggatct

SEQ ID NO: 21204 - DNA, 20 bp, synthetic construct
  misc_feature 1..20: note = chemically synthesized
  source 1..20: mol_type = other DNA
gagaatttctattgtctcat

SEQ ID NO: 21205 - DNA, 20 bp, synthetic construct
  misc_feature 1..20: note = chemically synthesized
  source 1..20: mol_type = other DNA
cttaaatcctaaatttatcc

SEQ ID NO: 21206 - DNA, 20 bp, synthetic construct
  misc_feature 1..20: note = chemically synthesized
  source 1..20: mol_type = other DNA
cctaaatttatcctggaact

SEQ ID NO: 21207 - DNA, 20 bp, synthetic construct
  misc_feature 1..20: note = chemically synthesized
  source 1..20: mol_type = other DNA
ctggaacttagcccaactat

SEQ ID NO: 21208 - DNA, 20 bp, synthetic construct
  misc_feature 1..20: note = chemically synthesized
  source 1..20: mol_type = other DNA
caactatgagattttaaaat

SEQ ID NO: 21209 - DNA, 20 bp, synthetic construct
  misc_feature 1..20: note = chemically synthesized
  source 1..20: mol_type = other DNA
atgagattttaaaatgagta

SEQ ID NO: 21210 - DNA, 20 bp, synthetic construct
  misc_feature 1..20: note = chemically synthesized
  source 1..20: mol_type = other DNA
tgagattttaaaatgagtat

SEQ ID NO: 21211 - DNA, 20 bp, synthetic construct
  misc_feature 1..20: note = chemically synthesized
  source 1..20: mol_type = other DNA
aaatgagtatgggtgcaatg

SEQ ID NO: 21212 - DNA, 20 bp, synthetic construct
  misc_feature 1..20: note = chemically synthesized
  source 1..20: mol_type = other DNA
ggtgcaatgtggtgaaccat

SEQ ID NO: 21213 - DNA, 20 bp, synthetic construct
  misc_feature 1..20: note = chemically synthesized
  source 1..20: mol_type = other DNA
gtgcaatgtggtgaaccatg

SEQ ID NO: 21214 - DNA, 20 bp, synthetic construct
  misc_feature 1..20: note = chemically synthesized
  source 1..20: mol_type = other DNA
tgcaatgtggtgaaccatga

SEQ ID NO: 21215 - DNA, 20 bp, synthetic construct
  misc_feature 1..20: note = chemically synthesized
  source 1..20: mol_type = other DNA
gaaccatgagggtcacattt

SEQ ID NO: 21216 - DNA, 20 bp, synthetic construct
  misc_feature 1..20: note = chemically synthesized
  source 1..20: mol_type = other DNA
tggtgcctgacatttcacat

SEQ ID NO: 21217 - DNA, 20 bp, synthetic construct
  misc_feature 1..20: note = chemically synthesized
  source 1..20: mol_type = other DNA
cctgacatttcacatcagtt

SEQ ID NO: 21218 - DNA, 20 bp, synthetic construct
  misc_feature 1..20: note = chemically synthesized
  source 1..20: mol_type = other DNA
cctgaactgcattctgctca

SEQ ID NO: 21219 - DNA, 20 bp, synthetic construct
  misc_feature 1..20: note = chemically synthesized
  source 1..20: mol_type = other DNA
ctgaactgcattctgctcat

SEQ ID NO: 21220 - DNA, 20 bp, synthetic construct
  misc_feature 1..20: note = chemically synthesized
  source 1..20: mol_type = other DNA
tcataggtcttcctaaatgt

SEQ ID NO: 21221 - DNA, 20 bp, synthetic construct
  misc_feature 1..20: note = chemically synthesized
  source 1..20: mol_type = other DNA
taggtcttcctaaatgtaag

SEQ ID NO: 21222 - DNA, 20 bp, synthetic construct
  misc_feature 1..20: note = chemically synthesized
  source 1..20: mol_type = other DNA
cttcctaaatgtaagcagaa

SEQ ID NO: 21223 - DNA, 20 bp, synthetic construct
  misc_feature 1..20: note = chemically synthesized
  source 1..20: mol_type = other DNA
cctaaatgtaagcagaatag

SEQ ID NO: 21224 - DNA, 20 bp, synthetic construct
  misc_feature 1..20: note = chemically synthesized
  source 1..20: mol_type = other DNA
aaatgtaagcagaatagtag

SEQ ID NO: 21225 - DNA, 20 bp, synthetic construct
  misc_feature 1..20: note = chemically synthesized
  source 1..20: mol_type = other DNA
aatgtaagcagaatagtagt

SEQ ID NO: 21226 - DNA, 20 bp, synthetic construct
  misc_feature 1..20: note = chemically synthesized
  source 1..20: mol_type = other DNA
tagtaggaaatcatgattaa

SEQ ID NO: 21227 - DNA, 20 bp, synthetic construct
  misc_feature 1..20: note = chemically synthesized
  source 1..20: mol_type = other DNA
aggaaatcatgattaaaagt

SEQ ID NO: 21228 - DNA, 20 bp, synthetic construct
  misc_feature 1..20: note = chemically synthesized
  source 1..20: mol_type = other DNA
catgattaaaagtcagtctc

SEQ ID NO: 21229 - DNA, 20 bp, synthetic construct
  misc_feature 1..20: note = chemically synthesized
  source 1..20: mol_type = other DNA
taaaagtcagtctctggaaa

SEQ ID NO: 21230 - DNA, 20 bp, synthetic construct
  misc_feature 1..20: note = chemically synthesized
  source 1..20: mol_type = other DNA
tcagtctctggaaatggctt

SEQ ID NO: 21231 - DNA, 20 bp, synthetic construct
  misc_feature 1..20: note = chemically synthesized
  source 1..20: mol_type = other DNA
ttgtgtgtcctctttgtact

SEQ ID NO: 21232 - DNA, 20 bp, synthetic construct
  misc_feature 1..20: note = chemically synthesized
  source 1..20: mol_type = other DNA
ctttgtactaagttaaaatt

SEQ ID NO: 21233 - DNA, 20 bp, synthetic construct
  misc_feature 1..20: note = chemically synthesized
  source 1..20: mol_type = other DNA
tttgtactaagttaaaattt

SEQ ID NO: 21234 - DNA, 20 bp, synthetic construct
  misc_feature 1..20: note = chemically synthesized
  source 1..20: mol_type = other DNA
actaagttaaaatttaggtc

SEQ ID NO: 21235 - DNA, 20 bp, synthetic construct
  misc_feature 1..20: note = chemically synthesized
  source 1..20: mol_type = other DNA
aatttaggtctggattgatt

SEQ ID NO: 21236 - DNA, 20 bp, synthetic construct
  misc_feature 1..20: note = chemically synthesized
  source 1..20: mol_type = other DNA
atttaggtctggattgattt

SEQ ID NO: 21237 - DNA, 20 bp, synthetic construct
  misc_feature 1..20: note = chemically synthesized
  source 1..20: mol_type = other DNA
tttaggtctggattgattta

SEQ ID NO: 21238 - DNA, 20 bp, synthetic construct
  misc_feature 1..20: note = chemically synthesized
  source 1..20: mol_type = other DNA
ttaggtctggattgatttag

SEQ ID NO: 21239 - DNA, 20 bp, synthetic construct
  misc_feature 1..20: note = chemically synthesized
  source 1..20: mol_type = other DNA
aggtctggattgatttaggg

SEQ ID NO: 21240 - DNA, 20 bp, synthetic construct
  misc_feature 1..20: note = chemically synthesized
  source 1..20: mol_type = other DNA
ccatgctttgaacttaaaat

SEQ ID NO: 21241 - DNA, 20 bp, synthetic construct
  misc_feature 1..20: note = chemically synthesized
  source 1..20: mol_type = other DNA
catgctttgaacttaaaatg

SEQ ID NO: 21242 - DNA, 20 bp, synthetic construct
  misc_feature 1..20: note = chemically synthesized
  source 1..20: mol_type = other DNA
ctttgaacttaaaatgaggt

SEQ ID NO: 21243 - DNA, 20 bp, synthetic construct
  misc_feature 1..20: note = chemically synthesized
  source 1..20: mol_type = other DNA
tttgaacttaaaatgaggtg

SEQ ID NO: 21244 - DNA, 20 bp, synthetic construct
  misc_feature 1..20: note = chemically synthesized
  source 1..20: mol_type = other DNA
gaacttaaaatgaggtgagg

SEQ ID NO: 21245 - DNA, 20 bp, synthetic construct
  misc_feature 1..20: note = chemically synthesized
  source 1..20: mol_type = other DNA
ttaaaatgaggtgaggtagt

SEQ ID NO: 21246 - DNA, 20 bp, synthetic construct
  misc_feature 1..20: note = chemically synthesized
  source 1..20: mol_type = other DNA
aggtgaggtagtaagaccct

SEQ ID NO: 21247 - DNA, 20 bp, synthetic construct
  misc_feature 1..20: note = chemically synthesized
  source 1..20: mol_type = other DNA
tgagataactgatttaattt

SEQ ID NO: 21248 - DNA, 20 bp, synthetic construct
  misc_feature 1..20: note = chemically synthesized
  source 1..20: mol_type = other DNA
gagataactgatttaatttc

SEQ ID NO: 21249 - DNA, 20 bp, synthetic construct
  misc_feature 1..20: note = chemically synthesized
  source 1..20: mol_type = other DNA
aggctgccctcccatttcat

SEQ ID NO: 21250 - DNA, 20 bp, synthetic construct
  misc_feature 1..20: note = chemically synthesized
  source 1..20: mol_type = other DNA
ctgccctcccatttcattag

SEQ ID NO: 21251 - DNA, 20 bp, synthetic construct
  misc_feature 1..20: note = chemically synthesized
  source 1..20: mol_type = other DNA
tgccctcccatttcattagt

SEQ ID NO: 21252 - DNA, 20 bp, synthetic construct
  misc_feature 1..20: note = chemically synthesized
  source 1..20: mol_type = other DNA
aggtatattgaccctctcac

SEQ ID NO: 21253 - DNA, 20 bp, synthetic construct
  misc_feature 1..20: note = chemically synthesized
  source 1..20: mol_type = other DNA
tatattgaccctctcactgg

SEQ ID NO: 21254 - DNA, 20 bp, synthetic construct
  misc_feature 1..20: note = chemically synthesized
  source 1..20: mol_type = other DNA
cataaatatgactctattcc

SEQ ID NO: 21255 - DNA, 20 bp, synthetic construct
  misc_feature 1..20: note = chemically synthesized
  source 1..20: mol_type = other DNA
cctggaaacatcacttatct

SEQ ID NO: 21256 - DNA, 20 bp, synthetic construct
  misc_feature 1..20: note = chemically synthesized
  source 1..20: mol_type = other DNA
aaacatcacttatcttagaa

SEQ ID NO: 21257 - DNA, 20 bp, synthetic construct
  misc_feature 1..20: note = chemically synthesized
  source 1..20: mol_type = other DNA
cttatcttagaacagatata

SEQ ID NO: 21258 - DNA, 20 bp, synthetic construct
  misc_feature 1..20: note = chemically synthesized
  source 1..20: mol_type = other DNA
agatataaagtaatttcctg

SEQ ID NO: 21259 - DNA, 20 bp, synthetic construct
  misc_feature 1..20: note = chemically synthesized
  source 1..20: mol_type = other DNA
taatttcctgcagactgccc

SEQ ID NO: 21260 - DNA, 20 bp, synthetic construct
  misc_feature 1..20: note = chemically synthesized
  source 1..20: mol_type = other DNA
atttcctgcagactgcccca

SEQ ID NO: 21261 - DNA, 20 bp, synthetic construct
  misc_feature 1..20: note = chemically synthesized
  source 1..20: mol_type = other DNA
cctgcagactgccccagagt

SEQ ID NO: 21262 - DNA, 20 bp, synthetic construct
  misc_feature 1..20: note = chemically synthesized
  source 1..20: mol_type = other DNA
ctgcagactgccccagagtt

SEQ ID NO: 21263 - DNA, 20 bp, synthetic construct
  misc_feature 1..20: note = chemically synthesized
  source 1..20: mol_type = other DNA
ttgggataaaatctcatgtg

SEQ ID NO: 21264 - DNA, 20 bp, synthetic construct
  misc_feature 1..20: note = chemically synthesized
  source 1..20: mol_type = other DNA
ctcatgtgaagtgacactgt

SEQ ID NO: 21265 - DNA, 20 bp, synthetic construct
  misc_feature 1..20: note = chemically synthesized
  source 1..20: mol_type = other DNA
atgtgaagtgacactgttgg

SEQ ID NO: 21266 - DNA, 20 bp, synthetic construct
  misc_feature 1..20: note = chemically synthesized
  source 1..20: mol_type = other DNA
gtgaagtgacactgttggtg

SEQ ID NO: 21267 - DNA, 20 bp, synthetic construct
  misc_feature 1..20: note = chemically synthesized
  source 1..20: mol_type = other DNA
tgaagtgacactgttggtgg

SEQ ID NO: 21268 - DNA, 20 bp, synthetic construct
  misc_feature 1..20: note = chemically synthesized
  source 1..20: mol_type = other DNA
tgacactgttggtggaggat

SEQ ID NO: 21269 - DNA, 20 bp, synthetic construct
  misc_feature 1..20: note = chemically synthesized
  source 1..20: mol_type = other DNA
gttggtggaggataagcctc

SEQ ID NO: 21270 - DNA, 20 bp, synthetic construct
  misc_feature 1..20: note = chemically synthesized
  source 1..20: mol_type = other DNA
tggtggaggataagcctcca

SEQ ID NO: 21271 - DNA, 20 bp, synthetic construct
  misc_feature 1..20: note = chemically synthesized
  source 1..20: mol_type = other DNA
gaggataagcctccagagaa

SEQ ID NO: 21272 - DNA, 20 bp, synthetic construct
  misc_feature 1..20: note = chemically synthesized
  source 1..20: mol_type = other DNA
aggataagcctccagagaat

SEQ ID NO: 21273 - DNA, 20 bp, synthetic construct
  misc_feature 1..20: note = chemically synthesized
  source 1..20: mol_type = other DNA
agaatgggaacaactattat

SEQ ID NO: 21274 - DNA, 20 bp, synthetic construct
  misc_feature 1..20: note = chemically synthesized
  source 1..20: mol_type = other DNA
ctattatcagccaacactca

SEQ ID NO: 21275 - DNA, 20 bp, synthetic construct
  misc_feature 1..20: note = chemically synthesized
  source 1..20: mol_type = other DNA
agccaacactcaaagtcacc

SEQ ID NO: 21276 - DNA, 20 bp, synthetic construct
  misc_feature 1..20: note = chemically synthesized
  source 1..20: mol_type = other DNA
acactcaaagtcaccaagct

SEQ ID NO: 21277 - DNA, 20 bp, synthetic construct
  misc_feature 1..20: note = chemically synthesized
  source 1..20: mol_type = other DNA
cactcaaagtcaccaagctt

SEQ ID NO: 21278 - DNA, 20 bp, synthetic construct
  misc_feature 1..20: note = chemically synthesized
  source 1..20: mol_type = other DNA
actcaaagtcaccaagctta

SEQ ID NO: 21279 - DNA, 20 bp, synthetic construct
  misc_feature 1..20: note = chemically synthesized
  source 1..20: mol_type = other DNA
ctcaaagtcaccaagcttag

SEQ ID NO: 21280 - DNA, 20 bp, synthetic construct
  misc_feature 1..20: note = chemically synthesized
  source 1..20: mol_type = other DNA
gtcaccaagcttaggggcac

SEQ ID NO: 21281 - DNA, 20 bp, synthetic construct
  misc_feature 1..20: note = chemically synthesized
  source 1..20: mol_type = other DNA
tcaccaagcttaggggcact

SEQ ID NO: 21282 - DNA, 20 bp, synthetic construct
  misc_feature 1..20: note = chemically synthesized
  source 1..20: mol_type = other DNA
accaagcttaggggcactgg

SEQ ID NO: 21283 - DNA, 20 bp, synthetic construct
  misc_feature 1..20: note = chemically synthesized
  source 1..20: mol_type = other DNA
ccaagcttaggggcactggg

SEQ ID NO: 21284 - DNA, 20 bp, synthetic construct
  misc_feature 1..20: note = chemically synthesized
  source 1..20: mol_type = other DNA
agcttaggggcactgggagg

SEQ ID NO: 21285 - DNA, 20 bp, synthetic construct
  misc_feature 1..20: note = chemically synthesized
  source 1..20: mol_type = other DNA
ttaggggcactgggaggaag

SEQ ID NO: 21286 - DNA, 20 bp, synthetic construct
  misc_feature 1..20: note = chemically synthesized
  source 1..20: mol_type = other DNA
taggggcactgggaggaagt

SEQ ID NO: 21287 - DNA, 20 bp, synthetic construct
  misc_feature 1..20: note = chemically synthesized
  source 1..20: mol_type = other DNA
gggcactgggaggaagtagg

SEQ ID NO: 21288 - DNA, 20 bp, synthetic construct
  misc_feature 1..20: note = chemically synthesized
  source 1..20: mol_type = other DNA
ggcactgggaggaagtaggc

SEQ ID NO: 21289 - DNA, 20 bp, synthetic construct
  misc_feature 1..20: note = chemically synthesized
  source 1..20: mol_type = other DNA
gcactgggaggaagtaggca

SEQ ID NO: 21290 - DNA, 20 bp, synthetic construct
  misc_feature 1..20: note = chemically synthesized
  source 1..20: mol_type = other DNA
atatcttctatttccttaaa

SEQ ID NO: 21291 - DNA, 20 bp, synthetic construct
  misc_feature 1..20: note = chemically synthesized
  source 1..20: mol_type = other DNA
ctctcattcatgtattttct

SEQ ID NO: 21292 - DNA, 20 bp, synthetic construct
  misc_feature 1..20: note = chemically synthesized
  source 1..20: mol_type = other DNA
ttcctgctgtattgcctgtg

SEQ ID NO: 21293 - DNA, 20 bp, synthetic construct
  misc_feature 1..20: note = chemically synthesized
  source 1..20: mol_type = other DNA
gctgtattgcctgtgaagta

SEQ ID NO: 21294 - DNA, 20 bp, synthetic construct
  misc_feature 1..20: note = chemically synthesized
  source 1..20: mol_type = other DNA
tgaagtaaagtatcatgtca

SEQ ID NO: 21295 - DNA, 20 bp, synthetic construct
  misc_feature 1..20: note = chemically synthesized
  source 1..20: mol_type = other DNA
agtaaagtatcatgtcacag

SEQ ID NO: 21296 - DNA, 20 bp, synthetic construct
  misc_feature 1..20: note = chemically synthesized
  source 1..20: mol_type = other DNA
atgtcacagcagcataatct

SEQ ID NO: 21297 - DNA, 20 bp, synthetic construct
  misc_feature 1..20: note = chemically synthesized
  source 1..20: mol_type = other DNA
acagcagcataatctcagat

SEQ ID NO: 21298 - DNA, 20 bp, synthetic construct
  misc_feature 1..20: note = chemically synthesized
  source 1..20: mol_type = other DNA
cagcagcataatctcagatt

SEQ ID NO: 21299 - DNA, 20 bp, synthetic construct
  misc_feature 1..20: note = chemically synthesized
  source 1..20: mol_type = other DNA
cagcataatctcagattggg

SEQ ID NO: 21300 - DNA, 20 bp, synthetic construct
  misc_feature 1..20: note = chemically synthesized
  source 1..20: mol_type = other DNA
agcataatctcagattggga

SEQ ID NO: 21301 - DNA, 20 bp, synthetic construct
  misc_feature 1..20: note = chemically synthesized
  source 1..20: mol_type = other DNA
acctccatctcctgtaataa

SEQ ID NO: 21302 - DNA, 20 bp, synthetic construct
  misc_feature 1..20: note = chemically synthesized
  source 1..20: mol_type = other DNA
aataaaagccttctttgatg

SEQ ID NO: 21303 - DNA, 20 bp, synthetic construct
  misc_feature 1..20: note = chemically synthesized
  source 1..20: mol_type = other DNA
ttgatgcagtgtttcctgac

SEQ ID NO: 21304 - DNA, 20 bp, synthetic construct
  misc_feature 1..20: note = chemically synthesized
  source 1..20: mol_type = other DNA
tgatgcagtgtttcctgaca

SEQ ID NO: 21305 - DNA, 20 bp, synthetic construct
  misc_feature 1..20: note = chemically synthesized
  source 1..20: mol_type = other DNA
gatgcagtgtttcctgacaa

SEQ ID NO: 21306 - DNA, 20 bp, synthetic construct
  misc_feature 1..20: note = chemically synthesized
  source 1..20: mol_type = other DNA
cctgacaagggtcatccgct

SEQ ID NO: 21307 - DNA, 20 bp, synthetic construct
  misc_feature 1..20: note = chemically synthesized
  source 1..20: mol_type = other DNA
tcacataacacaatatttat

SEQ ID NO: 21308 - DNA, 20 bp, synthetic construct
  misc_feature 1..20: note = chemically synthesized
  source 1..20: mol_type = other DNA
atatctgtgctgaaaatact

SEQ ID NO: 21309 - DNA, 20 bp, synthetic construct
  misc_feature 1..20: note = chemically synthesized
  source 1..20: mol_type = other DNA
tatctgtgctgaaaatactc

SEQ ID NO: 21310 - DNA, 20 bp, synthetic construct
  misc_feature 1..20: note = chemically synthesized
  source 1..20: mol_type = other DNA
ctgtgctgaaaatactcagg

SEQ ID NO: 21311 - DNA, 20 bp, synthetic construct
  misc_feature 1..20: note = chemically synthesized
  source 1..20: mol_type = other DNA
tactcaggcagccacattat

SEQ ID NO: 21312 - DNA, 20 bp, synthetic construct
  misc_feature 1..20: note = chemically synthesized
  source 1..20: mol_type = other DNA
ttaaaatgaaaatatttttc

SEQ ID NO: 21313 - DNA, 20 bp, synthetic construct
  misc_feature 1..20: note = chemically synthesized
  source 1..20: mol_type = other DNA
tttctggtcttcctattcct

SEQ ID NO: 21314 - DNA, 20 bp, synthetic construct
  misc_feature 1..20: note = chemically synthesized
  source 1..20: mol_type = other DNA
tcttcctattccttggctct

SEQ ID NO: 21315 - DNA, 20 bp, synthetic construct
  misc_feature 1..20: note = chemically synthesized
  source 1..20: mol_type = other DNA
tattccttggctcttggtct

SEQ ID NO: 21316 - DNA, 20 bp, synthetic construct
  misc_feature 1..20: note = chemically synthesized
  source 1..20: mol_type = other DNA
ttggctcttggtctgagctc

SEQ ID NO: 21317 - DNA, 20 bp, synthetic construct
  misc_feature 1..20: note = chemically synthesized
  source 1..20: mol_type = other DNA
tggtctgagctctggcatca

SEQ ID NO: 21318 - DNA, 20 bp, synthetic construct
  misc_feature 1..20: note = chemically synthesized
  source 1..20: mol_type = other DNA
ctgctgccttatattacata

SEQ ID NO: 21319 - DNA, 20 bp, synthetic construct
  misc_feature 1..20: note = chemically synthesized
  source 1..20: mol_type = other DNA
cttatattacatatggcata

SEQ ID NO: 21320 - DNA, 20 bp, synthetic construct
  misc_feature 1..20: note = chemically synthesized
  source 1..20: mol_type = other DNA
ttatattacatatggcatat

SEQ ID NO: 21321 - DNA, 20 bp, synthetic construct
  misc_feature 1..20: note = chemically synthesized
  source 1..20: mol_type = other DNA
tattacatatggcatatagg

SEQ ID NO: 21322 - DNA, 20 bp, synthetic construct
  misc_feature 1..20: note = chemically synthesized
  source 1..20: mol_type = other DNA
attacatatggcatatagga

SEQ ID NO: 21323 - DNA, 20 bp, synthetic construct
  misc_feature 1..20: note = chemically synthesized
  source 1..20: mol_type = other DNA
catataggaaggcaacattc

SEQ ID NO: 21324 - DNA, 20 bp, synthetic construct
  misc_feature 1..20: note = chemically synthesized
  source 1..20: mol_type = other DNA
aggcaacattcaagtataat

SEQ ID NO: 21325 - DNA, 20 bp, synthetic construct
  misc_feature 1..20: note = chemically synthesized
  source 1..20: mol_type = other DNA
agcttatatcgctaacgatt

SEQ ID NO: 21326 - DNA, 20 bp, synthetic construct
  misc_feature 1..20: note = chemically synthesized
  source 1..20: mol_type = other DNA
gcttatatcgctaacgattc

SEQ ID NO: 21327 - DNA, 20 bp, synthetic construct
  misc_feature 1..20: note = chemically synthesized
  source 1..20: mol_type = other DNA
tatatcgctaacgattcagg

SEQ ID NO: 21328 - DNA, 20 bp, synthetic construct
  misc_feature 1..20: note = chemically synthesized
  source 1..20: mol_type = other DNA
atatcgctaacgattcagga

SEQ ID NO: 21329 - DNA, 20 bp, synthetic construct
  misc_feature 1..20: note = chemically synthesized
  source 1..20: mol_type = other DNA
attcaggaaggtctctatcc

SEQ ID NO: 21330 - DNA, 20 bp, synthetic construct
  misc_feature 1..20: note = chemically synthesized
  source 1..20: mol_type = other DNA
ttcaggaaggtctctatcct

SEQ ID NO: 21331 - DNA, 20 bp, synthetic construct
  misc_feature 1..20: note = chemically synthesized
  source 1..20: mol_type = other DNA
taggatttttgctgtttgtt

SEQ ID NO: 21332 - DNA, 20 bp, synthetic construct
  misc_feature 1..20: note = chemically synthesized
  source 1..20: mol_type = other DNA
atttttgctgtttgttgagt

SEQ ID NO: 21333 - DNA, 20 bp, synthetic construct
  misc_feature 1..20: note = chemically synthesized
  source 1..20: mol_type = other DNA
taagtctgtgctgacaatac

SEQ ID NO: 21334 - DNA, 20 bp, synthetic construct
  misc_feature 1..20: note = chemically synthesized
  source 1..20: mol_type = other DNA
cttttttttttttttctgtg

SEQ ID NO: 21335 - DNA, 20 bp, synthetic construct
  misc_feature 1..20: note = chemically synthesized
  source 1..20: mol_type = other DNA
agtttgattctattatctgt

SEQ ID NO: 21336 - DNA, 20 bp, synthetic construct
  misc_feature 1..20: note = chemically synthesized
  source 1..20: mol_type = other DNA
tctattatctgtcagccttc

SEQ ID NO: 21337 - DNA, 20 bp, synthetic construct
  misc_feature 1..20: note = chemically synthesized
  source 1..20: mol_type = other DNA
ggattccacaattatctccg

SEQ ID NO: 21338 - DNA, 20 bp, synthetic construct
  misc_feature 1..20: note = chemically synthesized
  source 1..20: mol_type = other DNA
atcctttaactcatcctcta

SEQ ID NO: 21339 - DNA, 20 bp, synthetic construct
  misc_feature 1..20: note = chemically synthesized
  source 1..20: mol_type = other DNA
tcctttaactcatcctctac

SEQ ID NO: 21340 - DNA, 20 bp, synthetic construct
  misc_feature 1..20: note = chemically synthesized
  source 1..20: mol_type = other DNA
tcatcctctacaggctctga

SEQ ID NO: 21341 - DNA, 20 bp, synthetic construct
  misc_feature 1..20: note = chemically synthesized
  source 1..20: mol_type = other DNA
attttatatgccaatttgac

SEQ ID NO: 21342 - DNA, 20 bp, synthetic construct
  misc_feature 1..20: note = chemically synthesized
  source 1..20: mol_type = other DNA
ttttatatgccaatttgact

SEQ ID NO: 21343 - DNA, 20 bp, synthetic construct
  misc_feature 1..20: note = chemically synthesized
  source 1..20: mol_type = other DNA
atgccaatttgactgggcca

SEQ ID NO: 21344 - DNA, 20 bp, synthetic construct
  misc_feature 1..20: note = chemically synthesized
  source 1..20: mol_type = other DNA
tgccaatttgactgggccat

SEQ ID NO: 21345 - DNA, 20 bp, synthetic construct
  misc_feature 1..20: note = chemically synthesized
  source 1..20: mol_type = other DNA
gccaatttgactgggccatg

SEQ ID NO: 21346 - DNA, 20 bp, synthetic construct
  misc_feature 1..20: note = chemically synthesized
  source 1..20: mol_type = other DNA
atatttgtcaaacattattc

SEQ ID NO: 21347 - DNA, 20 bp, synthetic construct
  misc_feature 1..20: note = chemically synthesized
  source 1..20: mol_type = other DNA
attattctagatgtttttgt

SEQ ID NO: 21348 - DNA, 20 bp, synthetic construct
  misc_feature 1..20: note = chemically synthesized
  source 1..20: mol_type = other DNA
ttattctagatgtttttgtg

SEQ ID NO: 21349 - DNA, 20 bp, synthetic construct
  misc_feature 1..20: note = chemically synthesized
  source 1..20: mol_type = other DNA
tattctagatgtttttgtga

SEQ ID NO: 21350 - DNA, 20 bp, synthetic construct
  misc_feature 1..20: note = chemically synthesized
  source 1..20: mol_type = other DNA
tgtttttgtgagggtgtttt

SEQ ID NO: 21351 - DNA, 20 bp, synthetic construct
  misc_feature 1..20: note = chemically synthesized
  source 1..20: mol_type = other DNA
gtttttgtgagggtgttttt

SEQ ID NO: 21352 - DNA, 20 bp, synthetic construct
  misc_feature 1..20: note = chemically synthesized
  source 1..20: mol_type = other DNA
ttgtgagggtgtttttaggc

SEQ ID NO: 21353 - DNA, 20 bp, synthetic construct
  misc_feature 1..20: note = chemically synthesized
  source 1..20: mol_type = other DNA
ggcaagattaacatttaaat

SEQ ID NO: 21354 - DNA, 20 bp, synthetic construct
  misc_feature 1..20: note = chemically synthesized
  source 1..20: mol_type = other DNA
aagattaacatttaaatcgg

SEQ ID NO: 21355 - DNA, 20 bp, synthetic construct
  misc_feature 1..20: note = chemically synthesized
  source 1..20: mol_type = other DNA
aacatttaaatcggtagacc

SEQ ID NO: 21356 - DNA, 20 bp, synthetic construct
  misc_feature 1..20: note = chemically synthesized
  source 1..20: mol_type = other DNA
atttaaatcggtagaccaag

SEQ ID NO: 21357 - DNA, 20 bp, synthetic construct
  misc_feature 1..20: note = chemically synthesized
  source 1..20: mol_type = other DNA
ttaaatcggtagaccaagta

SEQ ID NO: 21358 - DNA, 20 bp, synthetic construct
  misc_feature 1..20: note = chemically synthesized
  source 1..20: mol_type = other DNA
aatcggtagaccaagtagag

SEQ ID NO: 21359 - DNA, 20 bp, synthetic construct
  misc_feature 1..20: note = chemically synthesized
  source 1..20: mol_type = other DNA
ggtagaccaagtagagcaga

SEQ ID NO: 21360 - DNA, 20 bp, synthetic construct
  misc_feature 1..20: note = chemically synthesized
  source 1..20: mol_type = other DNA
gcagatggtccttcctattg

SEQ ID NO: 21361 - DNA, 20 bp, synthetic construct
  misc_feature 1..20: note = chemically synthesized
  source 1..20: mol_type = other DNA
cagatggtccttcctattgc

SEQ ID NO: 21362 - DNA, 20 bp, synthetic construct
  misc_feature 1..20: note = chemically synthesized
  source 1..20: mol_type = other DNA
atggtccttcctattgcagg

SEQ ID NO: 21363 - DNA, 20 bp, synthetic construct
  misc_feature 1..20: note = chemically synthesized
  source 1..20: mol_type = other DNA
tgcaggcggcttcctccaat

SEQ ID NO: 21364 - DNA, 20 bp, synthetic construct
  misc_feature 1..20: note = chemically synthesized
  source 1..20: mol_type = other DNA
caatcagttgaaaacctgaa

SEQ ID NO: 21365 - DNA, 20 bp, synthetic construct
  misc_feature 1..20: note = chemically synthesized
  source 1..20: mol_type = other DNA
gaaaacctgaatagaacaaa

SEQ ID NO: 21366 - DNA, 20 bp, synthetic construct
  misc_feature 1..20: note = chemically synthesized
  source 1..20: mol_type = other DNA
agtctgacccttccccaaat

SEQ ID NO: 21367 - DNA, 20 bp, synthetic construct
  misc_feature 1..20: note = chemically synthesized
  source 1..20: mol_type = other DNA
tctgacccttccccaaatca

SEQ ID NO: 21368 - DNA, 20 bp, synthetic construct
  misc_feature 1..20: note = chemically synthesized
  source 1..20: mol_type = other DNA
tgacccttccccaaatcaga

SEQ ID NO: 21369 - DNA, 20 bp, synthetic construct
  misc_feature 1..20: note = chemically synthesized
  source 1..20: mol_type = other DNA
agagaattattccttattga

SEQ ID NO: 21370 - DNA, 20 bp, synthetic construct
  misc_feature 1..20: note = chemically synthesized
  source 1..20: mol_type = other DNA
cttattgatggccttcaaac

SEQ ID NO: 21371 - DNA, 20 bp, synthetic construct
  misc_feature 1..20: note = chemically synthesized
  source 1..20: mol_type = other DNA
atggccttcaaactggaatc

SEQ ID NO: 21372 - DNA, 20 bp, synthetic construct
  misc_feature 1..20: note = chemically synthesized
  source 1..20: mol_type = other DNA
tagacctttttttctgcctt

SEQ ID NO: 21373 - DNA, 20 bp, synthetic construct
  misc_feature 1..20: note = chemically synthesized
  source 1..20: mol_type = other DNA
actgaaacatcaaaacttcc

SEQ ID NO: 21374 - DNA, 20 bp, synthetic construct
  misc_feature 1..20: note = chemically synthesized
  source 1..20: mol_type = other DNA
ctgaaacatcaaaacttcct

SEQ ID NO: 21375 - DNA, 20 bp, synthetic construct
  misc_feature 1..20: note = chemically synthesized
  source 1..20: mol_type = other DNA
atcaaaacttcctgggtctg

SEQ ID NO: 21376 - DNA, 20 bp, synthetic construct
  misc_feature 1..20: note = chemically synthesized
  source 1..20: mol_type = other DNA
ttcctgggtctgaagcctga

SEQ ID NO: 21377 - DNA, 20 bp, synthetic construct
  misc_feature 1..20: note = chemically synthesized
  source 1..20: mol_type = other DNA
gtctgaagcctgatggcttt

SEQ ID NO: 21378 - DNA, 20 bp, synthetic construct
  misc_feature 1..20: note = chemically synthesized
  source 1..20: mol_type = other DNA
tctgaagcctgatggctttt

SEQ ID NO: 21379 - DNA, 20 bp, synthetic construct
  misc_feature 1..20: note = chemically synthesized
  source 1..20: mol_type = other DNA
cctgatggcttttgggttgc

SEQ ID NO: 21380 - DNA, 20 bp, synthetic construct
  misc_feature 1..20: note = chemically synthesized
  source 1..20: mol_type = other DNA
ccatcaatcctcctgtttcc

SEQ ID NO: 21381 - DNA, 20 bp, synthetic construct
  misc_feature 1..20: note = chemically synthesized
  source 1..20: mol_type = other DNA
catcaatcctcctgtttccc

SEQ ID NO: 21382 - DNA, 20 bp, synthetic construct
  misc_feature 1..20: note = chemically synthesized
  source 1..20: mol_type = other DNA
cctcctgtttcccaggcctt

SEQ ID NO: 21383 - DNA, 20 bp, synthetic construct
  misc_feature 1..20: note = chemically synthesized
  source 1..20: mol_type = other DNA
gtttcccaggccttcagact

SEQ ID NO: 21384 - DNA, 20 bp, synthetic construct
  misc_feature 1..20: note = chemically synthesized
  source 1..20: mol_type = other DNA
ccaggccttcagacttggac

SEQ ID NO: 21385 - DNA, 20 bp, synthetic construct
  misc_feature 1..20: note = chemically synthesized
  source 1..20: mol_type = other DNA
caggccttcagacttggact

SEQ ID NO: 21386 - DNA, 20 bp, synthetic construct
  misc_feature 1..20: note = chemically synthesized
  source 1..20: mol_type = other DNA
ttggactgggactaaactac

SEQ ID NO: 21387 - DNA, 20 bp, synthetic construct
  misc_feature 1..20: note = chemically synthesized
  source 1..20: mol_type = other DNA
tggactgggactaaactacc

SEQ ID NO: 21388 - DNA, 20 bp, synthetic construct
  misc_feature 1..20: note = chemically synthesized
  source 1..20: mol_type = other DNA
ctaaactaccaggctctctt

SEQ ID NO: 21389 - DNA, 20 bp, synthetic construct
  misc_feature 1..20: note = chemically synthesized
  source 1..20: mol_type = other DNA
atgactcactctgcatatct

SEQ ID NO: 21390 - DNA, 20 bp, synthetic construct
  misc_feature 1..20: note = chemically synthesized
  source 1..20: mol_type = other DNA
tgactcactctgcatatctt

SEQ ID NO: 21391 - DNA, 20 bp, synthetic construct
  misc_feature 1..20: note = chemically synthesized
  source 1..20: mol_type = other DNA
catctgctatttccttatat

SEQ ID NO: 21392 - DNA, 20 bp, synthetic construct
  misc_feature 1..20: note = chemically synthesized
  source 1..20: mol_type = other DNA
atctgctatttccttatatt

SEQ ID NO: 21393 - DNA, 20 bp, synthetic construct
  misc_feature 1..20: note = chemically synthesized
  source 1..20: mol_type = other DNA
gctatttccttatattaggt

SEQ ID NO: 21394 - DNA, 20 bp, synthetic construct
  misc_feature 1..20: note = chemically synthesized
  source 1..20: mol_type = other DNA
cttatattaggttggtgcaa

SEQ ID NO: 21395 - DNA, 20 bp, synthetic construct
  misc_feature 1..20: note = chemically synthesized
  source 1..20: mol_type = other DNA
ggttggtgcaacagtaattg

SEQ ID NO: 21396 - DNA, 20 bp, synthetic construct
  misc_feature 1..20: note = chemically synthesized
  source 1..20: mol_type = other DNA
gccattatttttttttaatg

SEQ ID NO: 21397 - DNA, 20 bp, synthetic construct
  misc_feature 1..20: note = chemically synthesized
  source 1..20: mol_type = other DNA
attcaatttttttaattttt

SEQ ID NO: 21398 - DNA, 20 bp, synthetic construct
  misc_feature 1..20: note = chemically synthesized
  source 1..20: mol_type = other DNA
ttttttaatttttaagttct

SEQ ID NO: 21399 - DNA, 20 bp, synthetic construct
  misc_feature 1..20: note = chemically synthesized
  source 1..20: mol_type = other DNA
tttttaatttttaagttctg

SEQ ID NO: 21400 - DNA, 20 bp, synthetic construct
  misc_feature 1..20: note = chemically synthesized
  source 1..20: mol_type = other DNA
taagttctgaggtacatgtg

SEQ ID NO: 21401 - DNA, 20 bp, synthetic construct
  misc_feature 1..20: note = chemically synthesized
  source 1..20: mol_type = other DNA
aagttctgaggtacatgtgc

SEQ ID NO: 21402 - DNA, 20 bp, synthetic construct
  misc_feature 1..20: note = chemically synthesized
  source 1..20: mol_type = other DNA
aggtacatgtgcaggatgtg

SEQ ID NO: 21403 - DNA, 20 bp, synthetic construct
  misc_feature 1..20: note = chemically synthesized
  source 1..20: mol_type = other DNA
ggtacatgtgcaggatgtgc

SEQ ID NO: 21404 - DNA, 20 bp, synthetic construct
  misc_feature 1..20: note = chemically synthesized
  source 1..20: mol_type = other DNA
acatacgtaaatgtgtgcaa

SEQ ID NO: 21405 - DNA, 20 bp, synthetic construct
  misc_feature 1..20: note = chemically synthesized
  source 1..20: mol_type = other DNA
tacgtaaatgtgtgcaatgg

SEQ ID NO: 21406 - DNA, 20 bp, synthetic construct
  misc_feature 1..20: note = chemically synthesized
  source 1..20: mol_type = other DNA
gtacctatcaacccatcacc

SEQ ID NO: 21407 - DNA, 20 bp, synthetic construct
  misc_feature 1..20: note = chemically synthesized
  source 1..20: mol_type = other DNA
tacctatcaacccatcacct

SEQ ID NO: 21408 - DNA, 20 bp, synthetic construct
  misc_feature 1..20: note = chemically synthesized
  source 1..20: mol_type = other DNA
caacccatcacctaggtgtt

SEQ ID NO: 21409 - DNA, 20 bp, synthetic construct
  misc_feature 1..20: note = chemically synthesized
  source 1..20: mol_type = other DNA
catcacctaggtgttaagcc

SEQ ID NO: 21410 - DNA, 20 bp, synthetic construct
  misc_feature 1..20: note = chemically synthesized
  source 1..20: mol_type = other DNA
gtgttaagcccagcatgcat

SEQ ID NO: 21411 - DNA, 20 bp, synthetic construct
  misc_feature 1..20: note = chemically synthesized
  source 1..20: mol_type = other DNA
caccacaccccatgccctga

SEQ ID NO: 21412 - DNA, 20 bp, synthetic construct
  misc_feature 1..20: note = chemically synthesized
  source 1..20: mol_type = other DNA
accacaccccatgccctgac

SEQ ID NO: 21413 - DNA, 20 bp, synthetic construct
  misc_feature 1..20: note = chemically synthesized
  source 1..20: mol_type = other DNA
ccccatgccctgacaggctc

SEQ ID NO: 21414 - DNA, 20 bp, synthetic construct
  misc_feature 1..20: note = chemically synthesized
  source 1..20: mol_type = other DNA
gtgttctcattctcattgtt

SEQ ID NO: 21415 - DNA, 20 bp, synthetic construct
  misc_feature 1..20: note = chemically synthesized
  source 1..20: mol_type = other DNA
attgttcagctcccacttct

SEQ ID NO: 21416 - DNA, 20 bp, synthetic construct
  misc_feature 1..20: note = chemically synthesized
  source 1..20: mol_type = other DNA
ttcagctcccacttctaagt

SEQ ID NO: 21417 - DNA, 20 bp, synthetic construct
  misc_feature 1..20: note = chemically synthesized
  source 1..20: mol_type = other DNA
cacttctaagtgagaacatg

SEQ ID NO: 21418 - DNA, 20 bp, synthetic construct
  misc_feature 1..20: note = chemically synthesized
  source 1..20: mol_type = other DNA
aagtgagaacatgtggtgtt

SEQ ID NO: 21419 - DNA, 20 bp, synthetic construct
  misc_feature 1..20: note = chemically synthesized
  source 1..20: mol_type = other DNA
ttggttttctgttcctgcat

SEQ ID NO: 21420 - DNA, 20 bp, synthetic construct
  misc_feature 1..20: note = chemically synthesized
  source 1..20: mol_type = other DNA
gttcctgcattagtttactg

SEQ ID NO: 21421 - DNA, 20 bp, synthetic construct
  misc_feature 1..20: note = chemically synthesized
  source 1..20: mol_type = other DNA
cattagtttactgaagataa

SEQ ID NO: 21422 - DNA, 20 bp, synthetic construct
  misc_feature 1..20: note = chemically synthesized
  source 1..20: mol_type = other DNA
ttactgaagataatggcttt

SEQ ID NO: 21423 - DNA, 20 bp, synthetic construct
  misc_feature 1..20: note = chemically synthesized
  source 1..20: mol_type = other DNA
tttcggctccatccatgtcc

SEQ ID NO: 21424 - DNA, 20 bp, synthetic construct
  misc_feature 1..20: note = chemically synthesized
  source 1..20: mol_type = other DNA
gctccatccatgtcccagca

SEQ ID NO: 21425 - DNA, 20 bp, synthetic construct
  misc_feature 1..20: note = chemically synthesized
  source 1..20: mol_type = other DNA
ctccatccatgtcccagcaa

SEQ ID NO: 21426 - DNA, 20 bp, synthetic construct
  misc_feature 1..20: note = chemically synthesized
  source 1..20: mol_type = other DNA
tccatccatgtcccagcaaa

SEQ ID NO: 21427 - DNA, 20 bp, synthetic construct
  misc_feature 1..20: note = chemically synthesized
  source 1..20: mol_type = other DNA
catgatctcatcccttttta

SEQ ID NO: 21428 - DNA, 20 bp, synthetic construct
  misc_feature 1..20: note = chemically synthesized
  source 1..20: mol_type = other DNA
atctcatccctttttatggt

SEQ ID NO: 21429 - DNA, 20 bp, synthetic construct
  misc_feature 1..20: note = chemically synthesized
  source 1..20: mol_type = other DNA
catccctttttatggttaga

SEQ ID NO: 21430 - DNA, 20 bp, synthetic construct
  misc_feature 1..20: note = chemically synthesized
  source 1..20: mol_type = other DNA
tatggttagatagtatttca

SEQ ID NO: 21431 - DNA, 20 bp, synthetic construct
  misc_feature 1..20: note = chemically synthesized
  source 1..20: mol_type = other DNA
tttaaattgtctatcattga

SEQ ID NO: 21432 - DNA, 20 bp, synthetic construct
  misc_feature 1..20: note = chemically synthesized
  source 1..20: mol_type = other DNA
gtctatcattgatggccatt

SEQ ID NO: 21433 - DNA, 20 bp, synthetic construct
  misc_feature 1..20: note = chemically synthesized
  source 1..20: mol_type = other DNA
tctatcattgatggccattt

SEQ ID NO: 21434 - DNA, 20 bp, synthetic construct
  misc_feature 1..20: note = chemically synthesized
  source 1..20: mol_type = other DNA
tatgtctttgctattgtgaa

SEQ ID NO: 21435 - DNA, 20 bp, synthetic construct
  misc_feature 1..20: note = chemically synthesized
  source 1..20: mol_type = other DNA
acatacatgtgcatgtatct

SEQ ID NO: 21436 - DNA, 20 bp, synthetic construct
  misc_feature 1..20: note = chemically synthesized
  source 1..20: mol_type = other DNA
atgtgcatgtatcttagtaa

SEQ ID NO: 21437 - DNA, 20 bp, synthetic construct
  misc_feature 1..20: note = chemically synthesized
  source 1..20: mol_type = other DNA
tagaatgatttatactcctt

SEQ ID NO: 21438 - DNA, 20 bp, synthetic construct
  misc_feature 1..20: note = chemically synthesized
  source 1..20: mol_type = other DNA
agaatgatttatactccttt

SEQ ID NO: 21439 - DNA, 20 bp, synthetic construct
  misc_feature 1..20: note = chemically synthesized
  source 1..20: mol_type = other DNA
tactcctttaggtatatacc

SEQ ID NO: 21440 - DNA, 20 bp, synthetic construct
  misc_feature 1..20: note = chemically synthesized
  source 1..20: mol_type = other DNA
tttaggtatatacccagtaa

SEQ ID NO: 21441 - DNA, 20 bp, synthetic construct
  misc_feature 1..20: note = chemically synthesized
  source 1..20: mol_type = other DNA
ttaggtatatacccagtaat

SEQ ID NO: 21442 - DNA, 20 bp, synthetic construct
  misc_feature 1..20: note = chemically synthesized
  source 1..20: mol_type = other DNA
atacccagtaatgggattgt

SEQ ID NO: 21443 - DNA, 20 bp, synthetic construct
  misc_feature 1..20: note = chemically synthesized
  source 1..20: mol_type = other DNA
tacccagtaatgggattgtg

SEQ ID NO: 21444 - DNA, 20 bp, synthetic construct
  misc_feature 1..20: note = chemically synthesized
  source 1..20: mol_type = other DNA
aatgggattgtgaggtcaaa

SEQ ID NO: 21445 - DNA, 20 bp, synthetic construct
  misc_feature 1..20: note = chemically synthesized
  source 1..20: mol_type = other DNA
gtgaggtcaaatggtatttc

SEQ ID NO: 21446 - DNA, 20 bp, synthetic construct
  misc_feature 1..20: note = chemically synthesized
  source 1..20: mol_type = other DNA
atttctggttctaaatcttt

SEQ ID NO: 21447 - DNA, 20 bp, synthetic construct
  misc_feature 1..20: note = chemically synthesized
  source 1..20: mol_type = other DNA
tttctggttctaaatctttg

SEQ ID NO: 21448 - DNA, 20 bp, synthetic construct
  misc_feature 1..20: note = chemically synthesized
  source 1..20: mol_type = other DNA
tgccacactgtcttccacaa

SEQ ID NO: 21449 - DNA, 20 bp, synthetic construct
  misc_feature 1..20: note = chemically synthesized
  source 1..20: mol_type = other DNA
gtcttccacaatggttgaat

SEQ ID NO: 21450 - DNA, 20 bp, synthetic construct
  misc_feature 1..20: note = chemically synthesized
  source 1..20: mol_type = other DNA
acaatggttgaattagttta

SEQ ID NO: 21451 - DNA, 20 bp, synthetic construct
  misc_feature 1..20: note = chemically synthesized
  source 1..20: mol_type = other DNA
ttagtttacagtcccaccaa

SEQ ID NO: 21452 - DNA, 20 bp, synthetic construct
  misc_feature 1..20: note = chemically synthesized
  source 1..20: mol_type = other DNA
cagtcccaccaacagtgtaa

SEQ ID NO: 21453 - DNA, 20 bp, synthetic construct
  misc_feature 1..20: note = chemically synthesized
  source 1..20: mol_type = other DNA
ctatttctctgcaaccttgc

SEQ ID NO: 21454 - DNA, 20 bp, synthetic construct
  misc_feature 1..20: note = chemically synthesized
  source 1..20: mol_type = other DNA
ttaaaaaccaccattctgac

SEQ ID NO: 21455 - DNA, 20 bp, synthetic construct
  misc_feature 1..20: note = chemically synthesized
  source 1..20: mol_type = other DNA
accaccattctgactggtgt

SEQ ID NO: 21456 - DNA, 20 bp, synthetic construct
  misc_feature 1..20: note = chemically synthesized
  source 1..20: mol_type = other DNA
ccattctgactggtgtcaga

SEQ ID NO: 21457 - DNA, 20 bp, synthetic construct
  misc_feature 1..20: note = chemically synthesized
  source 1..20: mol_type = other DNA
tgtcagatggtatttcattg

SEQ ID NO: 21458 - DNA, 20 bp, synthetic construct
  misc_feature 1..20: note = chemically synthesized
  source 1..20: mol_type = other DNA
atttgcatttctctaatgat

SEQ ID NO: 21459 - DNA, 20 bp, synthetic construct
  misc_feature 1..20: note = chemically synthesized
  source 1..20: mol_type = other DNA
ctctaatgatcagtgacatt

SEQ ID NO: 21460 - DNA, 20 bp, synthetic construct
  misc_feature 1..20: note = chemically synthesized
  source 1..20: mol_type = other DNA
gacttttttcgtatgtttct

SEQ ID NO: 21461 - DNA, 20 bp, synthetic construct
  misc_feature 1..20: note = chemically synthesized
  source 1..20: mol_type = other DNA
ccacataaatgtcttctttt

SEQ ID NO: 21462 - DNA, 20 bp, synthetic construct
  misc_feature 1..20: note = chemically synthesized
  source 1..20: mol_type = other DNA
cataaatgtcttcttttgag

SEQ ID NO: 21463 - DNA, 20 bp, synthetic construct
  misc_feature 1..20: note = chemically synthesized
  source 1..20: mol_type = other DNA
gtcctttgcccactttttaa

SEQ ID NO: 21464 - DNA, 20 bp, synthetic construct
  misc_feature 1..20: note = chemically synthesized
  source 1..20: mol_type = other DNA
tcctttgcccactttttaat

SEQ ID NO: 21465 - DNA, 20 bp, synthetic construct
  misc_feature 1..20: note = chemically synthesized
  source 1..20: mol_type = other DNA
cctttgcccactttttaatg

SEQ ID NO: 21466 - DNA, 20 bp, synthetic construct
  misc_feature 1..20: note = chemically synthesized
  source 1..20: mol_type = other DNA
tttcttttgtaaatatgtct

SEQ ID NO: 21467 - DNA, 20 bp, synthetic construct
  misc_feature 1..20: note = chemically synthesized
  source 1..20: mol_type = other DNA
aaatatgtctaagttcctca

SEQ ID NO: 21468 - DNA, 20 bp, synthetic construct
  misc_feature 1..20: note = chemically synthesized
  source 1..20: mol_type = other DNA
tctaagttcctcatagattc

SEQ ID NO: 21469 - DNA, 20 bp, synthetic construct
  misc_feature 1..20: note = chemically synthesized
  source 1..20: mol_type = other DNA
tcctcatagattctggatat

SEQ ID NO: 21470 - DNA, 20 bp, synthetic construct
  misc_feature 1..20: note = chemically synthesized
  source 1..20: mol_type = other DNA
tctggatattagacctttgt

SEQ ID NO: 21471 - DNA, 20 bp, synthetic construct
  misc_feature 1..20: note = chemically synthesized
  source 1..20: mol_type = other DNA
gatattagacctttgtcaga

SEQ ID NO: 21472 - DNA, 20 bp, synthetic construct
  misc_feature 1..20: note = chemically synthesized
  source 1..20: mol_type = other DNA
atattagacctttgtcagat

SEQ ID NO: 21473 - DNA, 20 bp, synthetic construct
  misc_feature 1..20: note = chemically synthesized
  source 1..20: mol_type = other DNA
ttagacctttgtcagatggg

SEQ ID NO: 21474 - DNA, 20 bp, synthetic construct
  misc_feature 1..20: note = chemically synthesized
  source 1..20: mol_type = other DNA
tttgtcagatgggtagattg

SEQ ID NO: 21475 - DNA, 20 bp, synthetic construct
  misc_feature 1..20: note = chemically synthesized
  source 1..20: mol_type = other DNA
agaaattttctcccattctg

SEQ ID NO: 21476 - DNA, 20 bp, synthetic construct
  misc_feature 1..20: note = chemically synthesized
  source 1..20: mol_type = other DNA
gaaattttctcccattctgt

SEQ ID NO: 21477 - DNA, 20 bp, synthetic construct
  misc_feature 1..20: note = chemically synthesized
  source 1..20: mol_type = other DNA
ttgcctgttcgctctgatga

SEQ ID NO: 21478 - DNA, 20 bp, synthetic construct
  misc_feature 1..20: note = chemically synthesized
  source 1..20: mol_type = other DNA
tgatagtttattttgctgtt

SEQ ID NO: 21479 - DNA, 20 bp, synthetic construct
  misc_feature 1..20: note = chemically synthesized
  source 1..20: mol_type = other DNA
tagtttattttgctgtttag

SEQ ID NO: 21480 - DNA, 20 bp, synthetic construct
  misc_feature 1..20: note = chemically synthesized
  source 1..20: mol_type = other DNA
attgtatttttctttatttt

SEQ ID NO: 21481 - DNA, 20 bp, synthetic construct
  misc_feature 1..20: note = chemically synthesized
  source 1..20: mol_type = other DNA
tttttctttattttgagatg

SEQ ID NO: 21482 - DNA, 20 bp, synthetic construct
  misc_feature 1..20: note = chemically synthesized
  source 1..20: mol_type = other DNA
tctcactctttcacccatgc

SEQ ID NO: 21483 - DNA, 20 bp, synthetic construct
  misc_feature 1..20: note = chemically synthesized
  source 1..20: mol_type = other DNA
tcactctttcacccatgcta

SEQ ID NO: 21484 - DNA, 20 bp, synthetic construct
  misc_feature 1..20: note = chemically synthesized
  source 1..20: mol_type = other DNA
ctttcacccatgctagagtg

SEQ ID NO: 21485 - DNA, 20 bp, synthetic construct
  misc_feature 1..20: note = chemically synthesized
  source 1..20: mol_type = other DNA
tcacccatgctagagtgcag

SEQ ID NO: 21486 - DNA, 20 bp, synthetic construct
  misc_feature 1..20: note = chemically synthesized
  source 1..20: mol_type = other DNA
agagtgcagtggtgcgatct

SEQ ID NO: 21487 - DNA, 20 bp, synthetic construct
  misc_feature 1..20: note = chemically synthesized
  source 1..20: mol_type = other DNA
tcactgcaacctctgcctcc

SEQ ID NO: 21488 - DNA, 20 bp, synthetic construct
  misc_feature 1..20: note = chemically synthesized
  source 1..20: mol_type = other DNA
cactgcaacctctgcctcct

SEQ ID NO: 21489 - DNA, 20 bp, synthetic construct
  misc_feature 1..20: note = chemically synthesized
  source 1..20: mol_type = other DNA
aacctctgcctcctgggttc

SEQ ID NO: 21490 - DNA, 20 bp, synthetic construct
  misc_feature 1..20: note = chemically synthesized
  source 1..20: mol_type = other DNA
ttcaagcaattctcctgcct

SEQ ID NO: 21491 - DNA, 20 bp, synthetic construct
  misc_feature 1..20: note = chemically synthesized
  source 1..20: mol_type = other DNA
ttctcctgcctcagcctcct

SEQ ID NO: 21492 - DNA, 20 bp, synthetic construct
  misc_feature 1..20: note = chemically synthesized
  source 1..20: mol_type = other DNA
tcctgcctcagcctcctgag

SEQ ID NO: 21493 - DNA, 20 bp, synthetic construct
  misc_feature 1..20: note = chemically synthesized
  source 1..20: mol_type = other DNA
cctcagcctcctgagtagct

SEQ ID NO: 21494 - DNA, 20 bp, synthetic construct
  misc_feature 1..20: note = chemically synthesized
  source 1..20: mol_type = other DNA
ctcctgagtagctgagatta

SEQ ID NO: 21495 - DNA, 20 bp, synthetic construct
  misc_feature 1..20: note = chemically synthesized
  source 1..20: mol_type = other DNA
tcctgagtagctgagattac

SEQ ID NO: 21496 - DNA, 20 bp, synthetic construct
  misc_feature 1..20: note = chemically synthesized
  source 1..20: mol_type = other DNA
caggtacgcaccaccatacc

SEQ ID NO: 21497 - DNA, 20 bp, synthetic construct
  misc_feature 1..20: note = chemically synthesized
  source 1..20: mol_type = other DNA
cagcacattttttgtatttt

SEQ ID NO: 21498 - DNA, 20 bp, synthetic construct
  misc_feature 1..20: note = chemically synthesized
  source 1..20: mol_type = other DNA
cacattttttgtatttttag

SEQ ID NO: 21499 - DNA, 20 bp, synthetic construct
  misc_feature 1..20: note = chemically synthesized
  source 1..20: mol_type = other DNA
cattttttgtatttttagta

SEQ ID NO: 21500 - DNA, 20 bp, synthetic construct
  misc_feature 1..20: note = chemically synthesized
  source 1..20: mol_type = other DNA
ttttgtatttttagtagaga

SEQ ID NO: 21501 - DNA, 20 bp, synthetic construct
  misc_feature 1..20: note = chemically synthesized
  source 1..20: mol_type = other DNA
ttgtatttttagtagagatg

SEQ ID NO: 21502 - DNA, 20 bp, synthetic construct
  misc_feature 1..20: note = chemically synthesized
  source 1..20: mol_type = other DNA
gagatggagtttcaccatgt

SEQ ID NO: 21503 - DNA, 20 bp, synthetic construct
  misc_feature 1..20: note = chemically synthesized
  source 1..20: mol_type = other DNA
tggagtttcaccatgttggc

SEQ ID NO: 21504 - DNA, 20 bp, synthetic construct
  misc_feature 1..20: note = chemically synthesized
  source 1..20: mol_type = other DNA
ggagtttcaccatgttggcc

SEQ ID NO: 21505 - DNA, 20 bp, synthetic construct
  misc_feature 1..20: note = chemically synthesized
  source 1..20: mol_type = other DNA
gctcttatactccccacctc

SEQ ID NO: 21506 - DNA, 20 bp, synthetic construct
  misc_feature 1..20: note = chemically synthesized
  source 1..20: mol_type = other DNA
ctcaagtgatccacccacct

SEQ ID NO: 21507 - DNA, 20 bp, synthetic construct
  misc_feature 1..20: note = chemically synthesized
  source 1..20: mol_type = other DNA
ccacccaccttggcctccca

SEQ ID NO: 21508 - DNA, 20 bp, synthetic construct
  misc_feature 1..20: note = chemically synthesized
  source 1..20: mol_type = other DNA
accttggcctcccaaagtgc

SEQ ID NO: 21509 - DNA, 20 bp, synthetic construct
  misc_feature 1..20: note = chemically synthesized
  source 1..20: mol_type = other DNA
ccttggcctcccaaagtgct

SEQ ID NO: 21510 - DNA, 20 bp, synthetic construct
  misc_feature 1..20: note = chemically synthesized
  source 1..20: mol_type = other DNA
ctcccaaagtgctgggatta

SEQ ID NO: 21511 - DNA, 20 bp, synthetic construct
  misc_feature 1..20: note = chemically synthesized
  source 1..20: mol_type = other DNA
tcccaaagtgctgggattac

SEQ ID NO: 21512 - DNA, 20 bp, synthetic construct
  misc_feature 1..20: note = chemically synthesized
  source 1..20: mol_type = other DNA
agtgctgggattacaggcgt

SEQ ID NO: 21513 - DNA, 20 bp, synthetic construct
  misc_feature 1..20: note = chemically synthesized
  source 1..20: mol_type = other DNA
gccaccatgcccgatctctt

SEQ ID NO: 21514 - DNA, 20 bp, synthetic construct
  misc_feature 1..20: note = chemically synthesized
  source 1..20: mol_type = other DNA
cccgatctctttagtttaat

SEQ ID NO: 21515 - DNA, 20 bp, synthetic construct
  misc_feature 1..20: note = chemically synthesized
  source 1..20: mol_type = other DNA
tttaattagatctcatttga

SEQ ID NO: 21516 - DNA, 20 bp, synthetic construct
  misc_feature 1..20: note = chemically synthesized
  source 1..20: mol_type = other DNA
tctttgcctgtgtctatgtc

SEQ ID NO: 21517 - DNA, 20 bp, synthetic construct
  misc_feature 1..20: note = chemically synthesized
  source 1..20: mol_type = other DNA
gcctgtgtctatgtccggaa

SEQ ID NO: 21518 - DNA, 20 bp, synthetic construct
  misc_feature 1..20: note = chemically synthesized
  source 1..20: mol_type = other DNA
atgtccggaatggtattgcc

SEQ ID NO: 21519 - DNA, 20 bp, synthetic construct
  misc_feature 1..20: note = chemically synthesized
  source 1..20: mol_type = other DNA
tgtccggaatggtattgcct

SEQ ID NO: 21520 - DNA, 20 bp, synthetic construct
  misc_feature 1..20: note = chemically synthesized
  source 1..20: mol_type = other DNA
attgcctaggttttcttcta

SEQ ID NO: 21521 - DNA, 20 bp, synthetic construct
  misc_feature 1..20: note = chemically synthesized
  source 1..20: mol_type = other DNA
gttttcttctaaagttttta

SEQ ID NO: 21522 - DNA, 20 bp, synthetic construct
  misc_feature 1..20: note = chemically synthesized
  source 1..20: mol_type = other DNA
ttctaaagtttttatagttt

SEQ ID NO: 21523 - DNA, 20 bp, synthetic construct
  misc_feature 1..20: note = chemically synthesized
  source 1..20: mol_type = other DNA
tctaaagtttttatagtttt

SEQ ID NO: 21524 - DNA, 20 bp, synthetic construct
  misc_feature 1..20: note = chemically synthesized
  source 1..20: mol_type = other DNA
tagttttgggttttacactt

SEQ ID NO: 21525 - DNA, 20 bp, synthetic construct
  misc_feature 1..20: note = chemically synthesized
  source 1..20: mol_type = other DNA
ttaagtctttaatgcatctt

SEQ ID NO: 21526 - DNA, 20 bp, synthetic construct
  misc_feature 1..20: note = chemically synthesized
  source 1..20: mol_type = other DNA
tcttgagttaatttatgtat

SEQ ID NO: 21527 - DNA, 20 bp, synthetic construct
  misc_feature 1..20: note = chemically synthesized
  source 1..20: mol_type = other DNA
ttaatttatgtataagatgt

SEQ ID NO: 21528 - DNA, 20 bp, synthetic construct
  misc_feature 1..20: note = chemically synthesized
  source 1..20: mol_type = other DNA
taatttatgtataagatgta

SEQ ID NO: 21529 - DNA, 20 bp, synthetic construct
  misc_feature 1..20: note = chemically synthesized
  source 1..20: mol_type = other DNA
tttatgtataagatgtaagg

SEQ ID NO: 21530 - DNA, 20 bp, synthetic construct
  misc_feature 1..20: note = chemically synthesized
  source 1..20: mol_type = other DNA
ttatgtataagatgtaagga

SEQ ID NO: 21531 - DNA, 20 bp, synthetic construct
  misc_feature 1..20: note = chemically synthesized
  source 1..20: mol_type = other DNA
tatgtataagatgtaaggaa

SEQ ID NO: 21532 - DNA, 20 bp, synthetic construct
  misc_feature 1..20: note = chemically synthesized
  source 1..20: mol_type = other DNA
atgtataagatgtaaggaag

SEQ ID NO: 21533 - DNA, 20 bp, synthetic construct
  misc_feature 1..20: note = chemically synthesized
  source 1..20: mol_type = other DNA
taagatgtaaggaaggggtc

SEQ ID NO: 21534 - DNA, 20 bp, synthetic construct
  misc_feature 1..20: note = chemically synthesized
  source 1..20: mol_type = other DNA
cagtttcaattttctgcata

SEQ ID NO: 21535 - DNA, 20 bp, synthetic construct
  misc_feature 1..20: note = chemically synthesized
  source 1..20: mol_type = other DNA
ttcaattttctgcatatggc

SEQ ID NO: 21536 - DNA, 20 bp, synthetic construct
  misc_feature 1..20: note = chemically synthesized
  source 1..20: mol_type = other DNA
attttctgcatatggctagc

SEQ ID NO: 21537 - DNA, 20 bp, synthetic construct
  misc_feature 1..20: note = chemically synthesized
  source 1..20: mol_type = other DNA
atatggctagccagttctcc

SEQ ID NO: 21538 - DNA, 20 bp, synthetic construct
  misc_feature 1..20: note = chemically synthesized
  source 1..20: mol_type = other DNA
tcccagcacaatttataaaa

SEQ ID NO: 21539 - DNA, 20 bp, synthetic construct
  misc_feature 1..20: note = chemically synthesized
  source 1..20: mol_type = other DNA
cccagcacaatttataaaat

SEQ ID NO: 21540 - DNA, 20 bp, synthetic construct
  misc_feature 1..20: note = chemically synthesized
  source 1..20: mol_type = other DNA
ccagcacaatttataaaata

SEQ ID NO: 21541 - DNA, 20 bp, synthetic construct
  misc_feature 1..20: note = chemically synthesized
  source 1..20: mol_type = other DNA
tccccattacttgtttttac

SEQ ID NO: 21542 - DNA, 20 bp, synthetic construct
  misc_feature 1..20: note = chemically synthesized
  source 1..20: mol_type = other DNA
ccccattacttgtttttacc

SEQ ID NO: 21543 - DNA, 20 bp, synthetic construct
  misc_feature 1..20: note = chemically synthesized
  source 1..20: mol_type = other DNA
tgtttttaccaggtttgttg

SEQ ID NO: 21544 - DNA, 20 bp, synthetic construct
  misc_feature 1..20: note = chemically synthesized
  source 1..20: mol_type = other DNA
ttaccaggtttgttgaagat

SEQ ID NO: 21545 - DNA, 20 bp, synthetic construct
  misc_feature 1..20: note = chemically synthesized
  source 1..20: mol_type = other DNA
tgttgaagatcagattgttt

SEQ ID NO: 21546 - DNA, 20 bp, synthetic construct
  misc_feature 1..20: note = chemically synthesized
  source 1..20: mol_type = other DNA
atcagattgtttcagatgcg

SEQ ID NO: 21547 - DNA, 20 bp, synthetic construct
  misc_feature 1..20: note = chemically synthesized
  source 1..20: mol_type = other DNA
agatgcgcggtcttacttct

SEQ ID NO: 21548 - DNA, 20 bp, synthetic construct
  misc_feature 1..20: note = chemically synthesized
  source 1..20: mol_type = other DNA
agttctccattctgttccat

SEQ ID NO: 21549 - DNA, 20 bp, synthetic construct
  misc_feature 1..20: note = chemically synthesized
  source 1..20: mol_type = other DNA
ctccattctgttccattagt

SEQ ID NO: 21550 - DNA, 20 bp, synthetic construct
  misc_feature 1..20: note = chemically synthesized
  source 1..20: mol_type = other DNA
cattagtcagtgtgtctgtt

SEQ ID NO: 21551 - DNA, 20 bp, synthetic construct
  misc_feature 1..20: note = chemically synthesized
  source 1..20: mol_type = other DNA
tcagtgtgtctgtttggtat

SEQ ID NO: 21552 - DNA, 20 bp, synthetic construct
  misc_feature 1..20: note = chemically synthesized
  source 1..20: mol_type = other DNA
gtatcagtaccatgctgttt

SEQ ID NO: 21553 - DNA, 20 bp, synthetic construct
  misc_feature 1..20: note = chemically synthesized
  source 1..20: mol_type = other DNA
cagtaccatgctgtttcagt

SEQ ID NO: 21554 - DNA, 20 bp, synthetic construct
  misc_feature 1..20: note = chemically synthesized
  source 1..20: mol_type = other DNA
agttagttactgtcaccttg

SEQ ID NO: 21555 - DNA, 20 bp, synthetic construct
  misc_feature 1..20: note = chemically synthesized
  source 1..20: mol_type = other DNA
tcaccttgtagtataatttg

SEQ ID NO: 21556 - DNA, 20 bp, synthetic construct
  misc_feature 1..20: note = chemically synthesized
  source 1..20: mol_type = other DNA
cttgtagtataatttgaagt

SEQ ID NO: 21557 - DNA, 20 bp, synthetic construct
  misc_feature 1..20: note = chemically synthesized
  source 1..20: mol_type = other DNA
ttgtagtataatttgaagtt

SEQ ID NO: 21558 - DNA, 20 bp, synthetic construct
  misc_feature 1..20: note = chemically synthesized
  source 1..20: mol_type = other DNA
tcctgttgattctatttttc

SEQ ID NO: 21559 - DNA, 20 bp, synthetic construct
  misc_feature 1..20: note = chemically synthesized
  source 1..20: mol_type = other DNA
ctgttgattctatttttctg

SEQ ID NO: 21560 - DNA, 20 bp, synthetic construct
  misc_feature 1..20: note = chemically synthesized
  source 1..20: mol_type = other DNA
ctggagaaccatgactaaca

SEQ ID NO: 21561 - DNA, 20 bp, synthetic construct
  misc_feature 1..20: note = chemically synthesized
  source 1..20: mol_type = other DNA
tggagaaccatgactaacat

SEQ ID NO: 21562 - DNA, 20 bp, synthetic construct
  misc_feature 1..20: note = chemically synthesized
  source 1..20: mol_type = other DNA
ggagaaccatgactaacata

SEQ ID NO: 21563 - DNA, 20 bp, synthetic construct
  misc_feature 1..20: note = chemically synthesized
  source 1..20: mol_type = other DNA
acatagggccatctattttt

SEQ ID NO: 21564 - DNA, 20 bp, synthetic construct
  misc_feature 1..20: note = chemically synthesized
  source 1..20: mol_type = other DNA
catagggccatctatttttg

SEQ ID NO: 21565 - DNA, 20 bp, synthetic construct
  misc_feature 1..20: note = chemically synthesized
  source 1..20: mol_type = other DNA
gactaatcactgtcatctgt

SEQ ID NO: 21566 - DNA, 20 bp, synthetic construct
  misc_feature 1..20: note = chemically synthesized
  source 1..20: mol_type = other DNA
atcactgtcatctgtcagtt

SEQ ID NO: 21567 - DNA, 20 bp, synthetic construct
  misc_feature 1..20: note = chemically synthesized
  source 1..20: mol_type = other DNA
actgtcatctgtcagtttgg

SEQ ID NO: 21568 - DNA, 20 bp, synthetic construct
  misc_feature 1..20: note = chemically synthesized
  source 1..20: mol_type = other DNA
ggtggcatgtacttgaaatc

SEQ ID NO: 21569 - DNA, 20 bp, synthetic construct
  misc_feature 1..20: note = chemically synthesized
  source 1..20: mol_type = other DNA
gtggcatgtacttgaaatct

SEQ ID NO: 21570 - DNA, 20 bp, synthetic construct
  misc_feature 1..20: note = chemically synthesized
  source 1..20: mol_type = other DNA
tggcatgtacttgaaatcta

SEQ ID NO: 21571 - DNA, 20 bp, synthetic construct
  misc_feature 1..20: note = chemically synthesized
  source 1..20: mol_type = other DNA
ataaaataaattttgtctat

SEQ ID NO: 21572 - DNA, 20 bp, synthetic construct
  misc_feature 1..20: note = chemically synthesized
  source 1..20: mol_type = other DNA
taataacaatgactgtgtct

SEQ ID NO: 21573 - DNA, 20 bp, synthetic construct
  misc_feature 1..20: note = chemically synthesized
  source 1..20: mol_type = other DNA
aataacaatgactgtgtcta

SEQ ID NO: 21574 - DNA, 20 bp, synthetic construct
  misc_feature 1..20: note = chemically synthesized
  source 1..20: mol_type = other DNA
aatgactgtgtctaaggatt

SEQ ID NO: 21575 - DNA, 20 bp, synthetic construct
  misc_feature 1..20: note = chemically synthesized
  source 1..20: mol_type = other DNA
atgactgtgtctaaggattt

SEQ ID NO: 21576 - DNA, 20 bp, synthetic construct
  misc_feature 1..20: note = chemically synthesized
  source 1..20: mol_type = other DNA
ttaggctataaaatcaaaaa

SEQ ID NO: 21577 - DNA, 20 bp, synthetic construct
  misc_feature 1..20: note = chemically synthesized
  source 1..20: mol_type = other DNA
acagatttacattctttaat

SEQ ID NO: 21578 - DNA, 20 bp, synthetic construct
  misc_feature 1..20: note = chemically synthesized
  source 1..20: mol_type = other DNA
ttacattctttaattggaca

SEQ ID NO: 21579 - DNA, 20 bp, synthetic construct
  misc_feature 1..20: note = chemically synthesized
  source 1..20: mol_type = other DNA
acattctttaattggacatg

SEQ ID NO: 21580 - DNA, 20 bp, synthetic construct
  misc_feature 1..20: note = chemically synthesized
  source 1..20: mol_type = other DNA
taattggacatggagacctc

SEQ ID NO: 21581 - DNA, 20 bp, synthetic construct
  misc_feature 1..20: note = chemically synthesized
  source 1..20: mol_type = other DNA
aattggacatggagacctct

SEQ ID NO: 21582 - DNA, 20 bp, synthetic construct
  misc_feature 1..20: note = chemically synthesized
  source 1..20: mol_type = other DNA
aatttaatactcatataatc

SEQ ID NO: 21583 - DNA, 20 bp, synthetic construct
  misc_feature 1..20: note = chemically synthesized
  source 1..20: mol_type = other DNA
taatactcatataatctagt

SEQ ID NO: 21584 - DNA, 20 bp, synthetic construct
  misc_feature 1..20: note = chemically synthesized
  source 1..20: mol_type = other DNA
cctataaaaatctgcatctc

SEQ ID NO: 21585 - DNA, 20 bp, synthetic construct
  misc_feature 1..20: note = chemically synthesized
  source 1..20: mol_type = other DNA
aaaaatctgcatctctggtg

SEQ ID NO: 21586 - DNA, 20 bp, synthetic construct
  misc_feature 1..20: note = chemically synthesized
  source 1..20: mol_type = other DNA
aaaatctgcatctctggtga

SEQ ID NO: 21587 - DNA, 20 bp, synthetic construct
  misc_feature 1..20: note = chemically synthesized
  source 1..20: mol_type = other DNA
gcatctctggtgaaggaacc

SEQ ID NO: 21588 - DNA, 20 bp, synthetic construct
  misc_feature 1..20: note = chemically synthesized
  source 1..20: mol_type = other DNA
cccagcaattatttgttaat

SEQ ID NO: 21589 - DNA, 20 bp, synthetic construct
  misc_feature 1..20: note = chemically synthesized
  source 1..20: mol_type = other DNA
cagcaattatttgttaatga

SEQ ID NO: 21590 - DNA, 20 bp, synthetic construct
  misc_feature 1..20: note = chemically synthesized
  source 1..20: mol_type = other DNA
agcaattatttgttaatgag

SEQ ID NO: 21591 - DNA, 20 bp, synthetic construct
  misc_feature 1..20: note = chemically synthesized
  source 1..20: mol_type = other DNA
atttgttaatgagaggaata

SEQ ID NO: 21592 - DNA, 20 bp, synthetic construct
  misc_feature 1..20: note = chemically synthesized
  source 1..20: mol_type = other DNA
aagttcatcttccccttatc

SEQ ID NO: 21593 - DNA, 20 bp, synthetic construct
  misc_feature 1..20: note = chemically synthesized
  source 1..20: mol_type = other DNA
tagtataaattcattttata

SEQ ID NO: 21594 - DNA, 20 bp, synthetic construct
  misc_feature 1..20: note = chemically synthesized
  source 1..20: mol_type = other DNA
agtataaattcattttatat

SEQ ID NO: 21595 - DNA, 20 bp, synthetic construct
  misc_feature 1..20: note = chemically synthesized
  source 1..20: mol_type = other DNA
tataaattcattttatatgg

SEQ ID NO: 21596 - DNA, 20 bp, synthetic construct
  misc_feature 1..20: note = chemically synthesized
  source 1..20: mol_type = other DNA
ataaattcattttatatggg

SEQ ID NO: 21597 - DNA, 20 bp, synthetic construct
  misc_feature 1..20: note = chemically synthesized
  source 1..20: mol_type = other DNA
ttcattttatatgggaggaa

SEQ ID NO: 21598 - DNA, 20 bp, synthetic construct
  misc_feature 1..20: note = chemically synthesized
  source 1..20: mol_type = other DNA
aaagtgatctgtaaactcat

SEQ ID NO: 21599 - DNA, 20 bp, synthetic construct
  misc_feature 1..20: note = chemically synthesized
  source 1..20: mol_type = other DNA
ttagaccatacatatttttt

SEQ ID NO: 21600 - DNA, 20 bp, synthetic construct
  misc_feature 1..20: note = chemically synthesized
  source 1..20: mol_type = other DNA
tattttttcagtgtgtctct

SEQ ID NO: 21601 - DNA, 20 bp, synthetic construct
  misc_feature 1..20: note = chemically synthesized
  source 1..20: mol_type = other DNA
acgtcttcttaatcatttct

SEQ ID NO: 21602 - DNA, 20 bp, synthetic construct
  misc_feature 1..20: note = chemically synthesized
  source 1..20: mol_type = other DNA
ttcttaatcatttctaagat

SEQ ID NO: 21603 - DNA, 20 bp, synthetic construct
  misc_feature 1..20: note = chemically synthesized
  source 1..20: mol_type = other DNA
aatcatttctaagattggct

SEQ ID NO: 21604 - DNA, 20 bp, synthetic construct
  misc_feature 1..20: note = chemically synthesized
  source 1..20: mol_type = other DNA
tctaagattggcttagtcta

SEQ ID NO: 21605 - DNA, 20 bp, synthetic construct
  misc_feature 1..20: note = chemically synthesized
  source 1..20: mol_type = other DNA
agtctacagaaatgcacact

SEQ ID NO: 21606 - DNA, 20 bp, synthetic construct
  misc_feature 1..20: note = chemically synthesized
  source 1..20: mol_type = other DNA
actcaaattaaatattctta

SEQ ID NO: 21607 - DNA, 20 bp, synthetic construct
  misc_feature 1..20: note = chemically synthesized
  source 1..20: mol_type = other DNA
ttatggtatgttatcccttc

SEQ ID NO: 21608 - DNA, 20 bp, synthetic construct
  misc_feature 1..20: note = chemically synthesized
  source 1..20: mol_type = other DNA
ccttcaagcccatactacac

SEQ ID NO: 21609 - DNA, 20 bp, synthetic construct
  misc_feature 1..20: note = chemically synthesized
  source 1..20: mol_type = other DNA
aagtatattattatttgaaa

SEQ ID NO: 21610 - DNA, 20 bp, synthetic construct
  misc_feature 1..20: note = chemically synthesized
  source 1..20: mol_type = other DNA
atattattatttgaaaaaga

SEQ ID NO: 21611 - DNA, 20 bp, synthetic construct
  misc_feature 1..20: note = chemically synthesized
  source 1..20: mol_type = other DNA
tattattatttgaaaaagaa

SEQ ID NO: 21612 - DNA, 20 bp, synthetic construct
  misc_feature 1..20: note = chemically synthesized
  source 1..20: mol_type = other DNA
attatttgaaaaagaaagga

SEQ ID NO: 21613 - DNA, 20 bp, synthetic construct
  misc_feature 1..20: note = chemically synthesized
  source 1..20: mol_type = other DNA
gaaaaagaaaggatggtatt

SEQ ID NO: 21614 - DNA, 20 bp, synthetic construct
  misc_feature 1..20: note = chemically synthesized
  source 1..20: mol_type = other DNA
aagaaaggatggtatttggc

SEQ ID NO: 21615 - DNA, 20 bp, synthetic construct
  misc_feature 1..20: note = chemically synthesized
  source 1..20: mol_type = other DNA
agaaaggatggtatttggca

SEQ ID NO: 21616 - DNA, 20 bp, synthetic construct
  misc_feature 1..20: note = chemically synthesized
  source 1..20: mol_type = other DNA
gaaaggatggtatttggcaa

SEQ ID NO: 21617 - DNA, 20 bp, synthetic construct
  misc_feature 1..20: note = chemically synthesized
  source 1..20: mol_type = other DNA
atgtatattcttttacacct

SEQ ID NO: 21618 - DNA, 20 bp, synthetic construct
  misc_feature 1..20: note = chemically synthesized
  source 1..20: mol_type = other DNA
ttagatttcccataactaca

SEQ ID NO: 21619 - DNA, 20 bp, synthetic construct
  misc_feature 1..20: note = chemically synthesized
  source 1..20: mol_type = other DNA
atggtacttatttatcttaa

SEQ ID NO: 21620 - DNA, 20 bp, synthetic construct
  misc_feature 1..20: note = chemically synthesized
  source 1..20: mol_type = other DNA
tggtacttatttatcttaat

SEQ ID NO: 21621 - DNA, 20 bp, synthetic construct
  misc_feature 1..20: note = chemically synthesized
  source 1..20: mol_type = other DNA
ccatgaaatttattcctcat

SEQ ID NO: 21622 - DNA, 20 bp, synthetic construct
  misc_feature 1..20: note = chemically synthesized
  source 1..20: mol_type = other DNA
catgaaatttattcctcatg

SEQ ID NO: 21623 - DNA, 20 bp, synthetic construct
  misc_feature 1..20: note = chemically synthesized
  source 1..20: mol_type = other DNA
catgaggtccttctctatat

SEQ ID NO: 21624 - DNA, 20 bp, synthetic construct
  misc_feature 1..20: note = chemically synthesized
  source 1..20: mol_type = other DNA
tataagttatattcttcttt

SEQ ID NO: 21625 - DNA, 20 bp, synthetic construct
  misc_feature 1..20: note = chemically synthesized
  source 1..20: mol_type = other DNA
tttcagtcttgaatgatgaa

SEQ ID NO: 21626 - DNA, 20 bp, synthetic construct
  misc_feature 1..20: note = chemically synthesized
  source 1..20: mol_type = other DNA
aatgatgaaaagctgaatta

SEQ ID NO: 21627 - DNA, 20 bp, synthetic construct
  misc_feature 1..20: note = chemically synthesized
  source 1..20: mol_type = other DNA
atgatgaaaagctgaattac

SEQ ID NO: 21628 - DNA, 20 bp, synthetic construct
  misc_feature 1..20: note = chemically synthesized
  source 1..20: mol_type = other DNA
ttacaggcttcacctgctgt

SEQ ID NO: 21629 - DNA, 20 bp, synthetic construct
  misc_feature 1..20: note = chemically synthesized
  source 1..20: mol_type = other DNA
caggcttcacctgctgtaag

SEQ ID NO: 21630 - DNA, 20 bp, synthetic construct
  misc_feature 1..20: note = chemically synthesized
  source 1..20: mol_type = other DNA
aggcttcacctgctgtaaga

SEQ ID NO: 21631 - DNA, 20 bp, synthetic construct
  misc_feature 1..20: note = chemically synthesized
  source 1..20: mol_type = other DNA
cttcacctgctgtaagaagg

SEQ ID NO: 21632 - DNA, 20 bp, synthetic construct
  misc_feature 1..20: note = chemically synthesized
  source 1..20: mol_type = other DNA
gctgtaagaaggtggttcac

SEQ ID NO: 21633 - DNA, 20 bp, synthetic construct
  misc_feature 1..20: note = chemically synthesized
  source 1..20: mol_type = other DNA
aaggtggttcaccagtttgt

SEQ ID NO: 21634 - DNA, 20 bp, synthetic construct
  misc_feature 1..20: note = chemically synthesized
  source 1..20: mol_type = other DNA
tcaccagtttgttagtccac

SEQ ID NO: 21635 - DNA, 20 bp, synthetic construct
  misc_feature 1..20: note = chemically synthesized
  source 1..20: mol_type = other DNA
tatgaatacaaattcatgtg

SEQ ID NO: 21636 - DNA, 20 bp, synthetic construct
  misc_feature 1..20: note = chemically synthesized
  source 1..20: mol_type = other DNA
aattcatgtgcagtgtttcc

SEQ ID NO: 21637 - DNA, 20 bp, synthetic construct
  misc_feature 1..20: note = chemically synthesized
  source 1..20: mol_type = other DNA
attcatgtgcagtgtttcct

SEQ ID NO: 21638 - DNA, 20 bp, synthetic construct
  misc_feature 1..20: note = chemically synthesized
  source 1..20: mol_type = other DNA
tcatgtgcagtgtttcctag

SEQ ID NO: 21639 - DNA, 20 bp, synthetic construct
  misc_feature 1..20: note = chemically synthesized
  source 1..20: mol_type = other DNA
gtgcagtgtttcctaggaga

SEQ ID NO: 21640 - DNA, 20 bp, synthetic construct
  misc_feature 1..20: note = chemically synthesized
  source 1..20: mol_type = other DNA
ctaggagatagtgttataaa

SEQ ID NO: 21641 - DNA, 20 bp, synthetic construct
  misc_feature 1..20: note = chemically synthesized
  source 1..20: mol_type = other DNA
taggagatagtgttataaat

SEQ ID NO: 21642 - DNA, 20 bp, synthetic construct
  misc_feature 1..20: note = chemically synthesized
  source 1..20: mol_type = other DNA
ttcctaactaacttttattt

SEQ ID NO: 21643 - DNA, 20 bp, synthetic construct
  misc_feature 1..20: note = chemically synthesized
  source 1..20: mol_type = other DNA
tcctaactaacttttatttt

SEQ ID NO: 21644 - DNA, 20 bp, synthetic construct
  misc_feature 1..20: note = chemically synthesized
  source 1..20: mol_type = other DNA
actaacttttattttaggtt

SEQ ID NO: 21645 - DNA, 20 bp, synthetic construct
  misc_feature 1..20: note = chemically synthesized
  source 1..20: mol_type = other DNA
ctaacttttattttaggttc

SEQ ID NO: 21646 - DNA, 20 bp, synthetic construct
  misc_feature 1..20: note = chemically synthesized
  source 1..20: mol_type = other DNA
aacttttattttaggttcag

SEQ ID NO: 21647 - DNA, 20 bp, synthetic construct
  misc_feature 1..20: note = chemically synthesized
  source 1..20: mol_type = other DNA
tattttaggttcaggagtac

SEQ ID NO: 21648 - DNA, 20 bp, synthetic construct
  misc_feature 1..20: note = chemically synthesized
  source 1..20: mol_type = other DNA
ttttaggttcaggagtacaa

SEQ ID NO: 21649 - DNA, 20 bp, synthetic construct
  misc_feature 1..20: note = chemically synthesized
  source 1..20: mol_type = other DNA
taggttcaggagtacaagag

SEQ ID NO: 21650 - DNA, 20 bp, synthetic construct
  misc_feature 1..20: note = chemically synthesized
  source 1..20: mol_type = other DNA
aggttcaggagtacaagagc

SEQ ID NO: 21651 - DNA, 20 bp, synthetic construct
  misc_feature 1..20: note = chemically synthesized
  source 1..20: mol_type = other DNA
catatttaaacttgtgtcac

SEQ ID NO: 21652 - DNA, 20 bp, synthetic construct
  misc_feature 1..20: note = chemically synthesized
  source 1..20: mol_type = other DNA
atatttaaacttgtgtcacg

SEQ ID NO: 21653 - DNA, 20 bp, synthetic construct
  misc_feature 1..20: note = chemically synthesized
  source 1..20: mol_type = other DNA
tatttaaacttgtgtcacga

SEQ ID NO: 21654 - DNA, 20 bp, synthetic construct
  misc_feature 1..20: note = chemically synthesized
  source 1..20: mol_type = other DNA
tgtcacgagggtttgttgta

SEQ ID NO: 21655 - DNA, 20 bp, synthetic construct
  misc_feature 1..20: note = chemically synthesized
  source 1..20: mol_type = other DNA
agattatgtcatcactcact

SEQ ID NO: 21656 - DNA, 20 bp, synthetic construct
  misc_feature 1..20: note = chemically synthesized
  source 1..20: mol_type = other DNA
gattatgtcatcactcactc

SEQ ID NO: 21657 - DNA, 20 bp, synthetic construct
  misc_feature 1..20: note = chemically synthesized
  source 1..20: mol_type = other DNA
tcatcactcactcaggtatt

SEQ ID NO: 21658 - DNA, 20 bp, synthetic construct
  misc_feature 1..20: note = chemically synthesized
  source 1..20: mol_type = other DNA
actcactcaggtattaagcc

SEQ ID NO: 21659 - DNA, 20 bp, synthetic construct
  misc_feature 1..20: note = chemically synthesized
  source 1..20: mol_type = other DNA
tttcaccctccatcctccaa

SEQ ID NO: 21660 - DNA, 20 bp, synthetic construct
  misc_feature 1..20: note = chemically synthesized
  source 1..20: mol_type = other DNA
ttcaccctccatcctccaat

SEQ ID NO: 21661 - DNA, 20 bp, synthetic construct
  misc_feature 1..20: note = chemically synthesized
  source 1..20: mol_type = other DNA
ctccatcctccaataggccc

SEQ ID NO: 21662 - DNA, 20 bp, synthetic construct
  misc_feature 1..20: note = chemically synthesized
  source 1..20: mol_type = other DNA
gtccatgtgttctcatcatt

SEQ ID NO: 21663 - DNA, 20 bp, synthetic construct
  misc_feature 1..20: note = chemically synthesized
  source 1..20: mol_type = other DNA
atcatttagctcccactcat

SEQ ID NO: 21664 - DNA, 20 bp, synthetic construct
  misc_feature 1..20: note = chemically synthesized
  source 1..20: mol_type = other DNA
tttagctcccactcataagt

SEQ ID NO: 21665 - DNA, 20 bp, synthetic construct
  misc_feature 1..20: note = chemically synthesized
  source 1..20: mol_type = other DNA
cactcataagtgagaacacg

SEQ ID NO: 21666 - DNA, 20 bp, synthetic construct
  misc_feature 1..20: note = chemically synthesized
  source 1..20: mol_type = other DNA
aagtgagaacacgtggtatt

SEQ ID NO: 21667 - DNA, 20 bp, synthetic construct
  misc_feature 1..20: note = chemically synthesized
  source 1..20: mol_type = other DNA
tgttcctgtattaatttgct

SEQ ID NO: 21668 - DNA, 20 bp, synthetic construct
  misc_feature 1..20: note = chemically synthesized
  source 1..20: mol_type = other DNA
gttcctgtattaatttgcta

SEQ ID NO: 21669 - DNA, 20 bp, synthetic construct
  misc_feature 1..20: note = chemically synthesized
  source 1..20: mol_type = other DNA
taatttgctaaggcttctaa

SEQ ID NO: 21670 - DNA, 20 bp, synthetic construct
  misc_feature 1..20: note = chemically synthesized
  source 1..20: mol_type = other DNA
ctaaggcttctaatagtaca

SEQ ID NO: 21671 - DNA, 20 bp, synthetic construct
  misc_feature 1..20: note = chemically synthesized
  source 1..20: mol_type = other DNA
tagtacatagcattttacca

SEQ ID NO: 21672 - DNA, 20 bp, synthetic construct
  misc_feature 1..20: note = chemically synthesized
  source 1..20: mol_type = other DNA
agtacatagcattttaccac

SEQ ID NO: 21673 - DNA, 20 bp, synthetic construct
  misc_feature 1..20: note = chemically synthesized
  source 1..20: mol_type = other DNA
acatagcattttaccacagg

SEQ ID NO: 21674 - DNA, 20 bp, synthetic construct
  misc_feature 1..20: note = chemically synthesized
  source 1..20: mol_type = other DNA
ttttaccacaggaagacttg

SEQ ID NO: 21675 - DNA, 20 bp, synthetic construct
  misc_feature 1..20: note = chemically synthesized
  source 1..20: mol_type = other DNA
tttaccacaggaagacttgt

SEQ ID NO: 21676 - DNA, 20 bp, synthetic construct
  misc_feature 1..20: note = chemically synthesized
  source 1..20: mol_type = other DNA
taccacaggaagacttgtag

SEQ ID NO: 21677 - DNA, 20 bp, synthetic construct
  misc_feature 1..20: note = chemically synthesized
  source 1..20: mol_type = other DNA
ggaagacttgtaggagatca

SEQ ID NO: 21678 - DNA, 20 bp, synthetic construct
  misc_feature 1..20: note = chemically synthesized
  source 1..20: mol_type = other DNA
gacttgtaggagatcacaga

SEQ ID NO: 21679 - DNA, 20 bp, synthetic construct
  misc_feature 1..20: note = chemically synthesized
  source 1..20: mol_type = other DNA
gtttatgttgattgttacaa

SEQ ID NO: 21680 - DNA, 20 bp, synthetic construct
  misc_feature 1..20: note = chemically synthesized
  source 1..20: mol_type = other DNA
tttatgttgattgttacaat

SEQ ID NO: 21681 - DNA, 20 bp, synthetic construct
  misc_feature 1..20: note = chemically synthesized
  source 1..20: mol_type = other DNA
ttgttacaatgggttttgaa

SEQ ID NO: 21682 - DNA, 20 bp, synthetic construct
  misc_feature 1..20: note = chemically synthesized
  source 1..20: mol_type = other DNA
ttgaatagaaaaacatgtct

SEQ ID NO: 21683 - DNA, 20 bp, synthetic construct
  misc_feature 1..20: note = chemically synthesized
  source 1..20: mol_type = other DNA
aatagaaaaacatgtctgag

SEQ ID NO: 21684 - DNA, 20 bp, synthetic construct
  misc_feature 1..20: note = chemically synthesized
  source 1..20: mol_type = other DNA
ctgagtggatttccaccatg

SEQ ID NO: 21685 - DNA, 20 bp, synthetic construct
  misc_feature 1..20: note = chemically synthesized
  source 1..20: mol_type = other DNA
atgtagccttctgtataact

SEQ ID NO: 21686 - DNA, 20 bp, synthetic construct
  misc_feature 1..20: note = chemically synthesized
  source 1..20: mol_type = other DNA
ccttctgtataactaagttt

SEQ ID NO: 21687 - DNA, 20 bp, synthetic construct
  misc_feature 1..20: note = chemically synthesized
  source 1..20: mol_type = other DNA
ctaagtttgagataattatt

SEQ ID NO: 21688 - DNA, 20 bp, synthetic construct
  misc_feature 1..20: note = chemically synthesized
  source 1..20: mol_type = other DNA
ctgtgtctgtattcatccta

SEQ ID NO: 21689 - DNA, 20 bp, synthetic construct
  misc_feature 1..20: note = chemically synthesized
  source 1..20: mol_type = other DNA
ttcatcctacagcatcttct

SEQ ID NO: 21690 - DNA, 20 bp, synthetic construct
  misc_feature 1..20: note = chemically synthesized
  source 1..20: mol_type = other DNA
cagcatcttctcagtgaatt

SEQ ID NO: 21691 - DNA, 20 bp, synthetic construct
  misc_feature 1..20: note = chemically synthesized
  source 1..20: mol_type = other DNA
ttagtttcacacttactttc

SEQ ID NO: 21692 - DNA, 20 bp, synthetic construct
  misc_feature 1..20: note = chemically synthesized
  source 1..20: mol_type = other DNA
tttcacacttactttcaagt

SEQ ID NO: 21693 - DNA, 20 bp, synthetic construct
  misc_feature 1..20: note = chemically synthesized
  source 1..20: mol_type = other DNA
cagaaatgaacttcttaaac

SEQ ID NO: 21694 - DNA, 20 bp, synthetic construct
  misc_feature 1..20: note = chemically synthesized
  source 1..20: mol_type = other DNA
agaaatgaacttcttaaaca

SEQ ID NO: 21695 - DNA, 20 bp, synthetic construct
  misc_feature 1..20: note = chemically synthesized
  source 1..20: mol_type = other DNA
gaaatgaacttcttaaacaa

SEQ ID NO: 21696 - DNA, 20 bp, synthetic construct
  misc_feature 1..20: note = chemically synthesized
  source 1..20: mol_type = other DNA
ttcataaatcattcaccaaa

SEQ ID NO: 21697 - DNA, 20 bp, synthetic construct
  misc_feature 1..20: note = chemically synthesized
  source 1..20: mol_type = other DNA
gtcaactttcctgccatttt

SEQ ID NO: 21698 - DNA, 20 bp, synthetic construct
  misc_feature 1..20: note = chemically synthesized
  source 1..20: mol_type = other DNA
tcaactttcctgccattttt

SEQ ID NO: 21699 - DNA, 20 bp, synthetic construct
  misc_feature 1..20: note = chemically synthesized
  source 1..20: mol_type = other DNA
aggttccatttcctgtattt

SEQ ID NO: 21700 - DNA, 20 bp, synthetic construct
  misc_feature 1..20: note = chemically synthesized
  source 1..20: mol_type = other DNA
catttcctgtattttagaaa

SEQ ID NO: 21701 - DNA, 20 bp, synthetic construct
  misc_feature 1..20: note = chemically synthesized
  source 1..20: mol_type = other DNA
tttcctgtattttagaaaaa

SEQ ID NO: 21702 - DNA, 20 bp, synthetic construct
  misc_feature 1..20: note = chemically synthesized
  source 1..20: mol_type = other DNA
ttcctgtattttagaaaaag

SEQ ID NO: 21703 - DNA, 20 bp, synthetic construct
  misc_feature 1..20: note = chemically synthesized
  source 1..20: mol_type = other DNA
ctgtattttagaaaaagagg

SEQ ID NO: 21704 - DNA, 20 bp, synthetic construct
  misc_feature 1..20: note = chemically synthesized
  source 1..20: mol_type = other DNA
gaggcagctcttctacctaa

SEQ ID NO: 21705 - DNA, 20 bp, synthetic construct
  misc_feature 1..20: note = chemically synthesized
  source 1..20: mol_type = other DNA
ttctacctaacagtattttc

SEQ ID NO: 21706 - DNA, 20 bp, synthetic construct
  misc_feature 1..20: note = chemically synthesized
  source 1..20: mol_type = other DNA
tattttccagttttaaatat

SEQ ID NO: 21707 - DNA, 20 bp, synthetic construct
  misc_feature 1..20: note = chemically synthesized
  source 1..20: mol_type = other DNA
ttccagttttaaatattagt

SEQ ID NO: 21708 - DNA, 20 bp, synthetic construct
  misc_feature 1..20: note = chemically synthesized
  source 1..20: mol_type = other DNA
ccagttttaaatattagtta

SEQ ID NO: 21709 - DNA, 20 bp, synthetic construct
  misc_feature 1..20: note = chemically synthesized
  source 1..20: mol_type = other DNA
gttttaaatattagttagag

SEQ ID NO: 21710 - DNA, 20 bp, synthetic construct
  misc_feature 1..20: note = chemically synthesized
  source 1..20: mol_type = other DNA
agattcacatatctataact

SEQ ID NO: 21711 - DNA, 20 bp, synthetic construct
  misc_feature 1..20: note = chemically synthesized
  source 1..20: mol_type = other DNA
tgagatgatataattattaa

SEQ ID NO: 21712 - DNA, 20 bp, synthetic construct
  misc_feature 1..20: note = chemically synthesized
  source 1..20: mol_type = other DNA
atataattattaatagcctt

SEQ ID NO: 21713 - DNA, 20 bp, synthetic construct
  misc_feature 1..20: note = chemically synthesized
  source 1..20: mol_type = other DNA
tattaatagcctttggttat

SEQ ID NO: 21714 - DNA, 20 bp, synthetic construct
  misc_feature 1..20: note = chemically synthesized
  source 1..20: mol_type = other DNA
aagtgaaactcaactgaaac

SEQ ID NO: 21715 - DNA, 20 bp, synthetic construct
  misc_feature 1..20: note = chemically synthesized
  source 1..20: mol_type = other DNA
agtgaaactcaactgaaact

SEQ ID NO: 21716 - DNA, 20 bp, synthetic construct
  misc_feature 1..20: note = chemically synthesized
  source 1..20: mol_type = other DNA
ggctgaacaaaacaaattac

SEQ ID NO: 21717 - DNA, 20 bp, synthetic construct
  misc_feature 1..20: note = chemically synthesized
  source 1..20: mol_type = other DNA
tgaacaaaacaaattacaag

SEQ ID NO: 21718 - DNA, 20 bp, synthetic construct
  misc_feature 1..20: note = chemically synthesized
  source 1..20: mol_type = other DNA
aacaaaacaaattacaagaa

SEQ ID NO: 21719 - DNA, 20 bp, synthetic construct
  misc_feature 1..20: note = chemically synthesized
  source 1..20: mol_type = other DNA
acaaaacaaattacaagaag

SEQ ID NO: 21720 - DNA, 20 bp, synthetic construct
  misc_feature 1..20: note = chemically synthesized
  source 1..20: mol_type = other DNA
aaaacaaattacaagaagag

SEQ ID NO: 21721 - DNA, 20 bp, synthetic construct
  misc_feature 1..20: note = chemically synthesized
  source 1..20: mol_type = other DNA
ttacaagaagaggagtttat

SEQ ID NO: 21722 - DNA, 20 bp, synthetic construct
  misc_feature 1..20: note = chemically synthesized
  source 1..20: mol_type = other DNA
tacaagaagaggagtttatt

SEQ ID NO: 21723 - DNA, 20 bp, synthetic construct
  misc_feature 1..20: note = chemically synthesized
  source 1..20: mol_type = other DNA
aagaggagtttattaggctg

SEQ ID NO: 21724 - DNA, 20 bp, synthetic construct
  misc_feature 1..20: note = chemically synthesized
  source 1..20: mol_type = other DNA
taggctgtggaatcaaaaaa

SEQ ID NO: 21725 - DNA, 20 bp, synthetic construct
  misc_feature 1..20: note = chemically synthesized
  source 1..20: mol_type = other DNA
aaactgtcctccttgtcact

SEQ ID NO: 21726 - DNA, 20 bp, synthetic construct
  misc_feature 1..20: note = chemically synthesized
  source 1..20: mol_type = other DNA
tcctccttgtcactgagtct

SEQ ID NO: 21727 - DNA, 20 bp, synthetic construct
  misc_feature 1..20: note = chemically synthesized
  source 1..20: mol_type = other DNA
cctccttgtcactgagtctc

SEQ ID NO: 21728 - DNA, 20 bp, synthetic construct
  misc_feature 1..20: note = chemically synthesized
  source 1..20: mol_type = other DNA
cactgagtctcaggaaaaca

SEQ ID NO: 21729 - DNA, 20 bp, synthetic construct
  misc_feature 1..20: note = chemically synthesized
  source 1..20: mol_type = other DNA
gtctcaggaaaacatggaat

SEQ ID NO: 21730 - DNA, 20 bp, synthetic construct
  misc_feature 1..20: note = chemically synthesized
  source 1..20: mol_type = other DNA
ctcaggaaaacatggaatca

SEQ ID NO: 21731 - DNA, 20 bp, synthetic construct
  misc_feature 1..20: note = chemically synthesized
  source 1..20: mol_type = other DNA
aacatggaatcagagatttg

SEQ ID NO: 21732 - DNA, 20 bp, synthetic construct
  misc_feature 1..20: note = chemically synthesized
  source 1..20: mol_type = other DNA
tttactctaaatatttatta

SEQ ID NO: 21733 - DNA, 20 bp, synthetic construct
  misc_feature 1..20: note = chemically synthesized
  source 1..20: mol_type = other DNA
taaatatttattatagtttg

SEQ ID NO: 21734 - DNA, 20 bp, synthetic construct
  misc_feature 1..20: note = chemically synthesized
  source 1..20: mol_type = other DNA
acattgtcattaacaattct

SEQ ID NO: 21735 - DNA, 20 bp, synthetic construct
  misc_feature 1..20: note = chemically synthesized
  source 1..20: mol_type = other DNA
caattctaagcattgcattt

SEQ ID NO: 21736 - DNA, 20 bp, synthetic construct
  misc_feature 1..20: note = chemically synthesized
  source 1..20: mol_type = other DNA
ttttagtaattctacaacaa

SEQ ID NO: 21737 - DNA, 20 bp, synthetic construct
  misc_feature 1..20: note = chemically synthesized
  source 1..20: mol_type = other DNA
ttgaaaaattctttttaaaa

SEQ ID NO: 21738 - DNA, 20 bp, synthetic construct
  misc_feature 1..20: note = chemically synthesized
  source 1..20: mol_type = other DNA
ttaaaaaagttcttctactg

SEQ ID NO: 21739 - DNA, 20 bp, synthetic construct
  misc_feature 1..20: note = chemically synthesized
  source 1..20: mol_type = other DNA
aaaagttcttctactgcggt

SEQ ID NO: 21740 - DNA, 20 bp, synthetic construct
  misc_feature 1..20: note = chemically synthesized
  source 1..20: mol_type = other DNA
aaagttcttctactgcggtt

SEQ ID NO: 21741 - DNA, 20 bp, synthetic construct
  misc_feature 1..20: note = chemically synthesized
  source 1..20: mol_type = other DNA
agttcttctactgcggttag

SEQ ID NO: 21742 - DNA, 20 bp, synthetic construct
  misc_feature 1..20: note = chemically synthesized
  source 1..20: mol_type = other DNA
ttctactgcggttaggagtt

SEQ ID NO: 21743 - DNA, 20 bp, synthetic construct
  misc_feature 1..20: note = chemically synthesized
  source 1..20: mol_type = other DNA
ctactgcggttaggagtttg

SEQ ID NO: 21744 - DNA, 20 bp, synthetic construct
  misc_feature 1..20: note = chemically synthesized
  source 1..20: mol_type = other DNA
ggagatacaatgcaaaatat

SEQ ID NO: 21745 - DNA, 20 bp, synthetic construct
  misc_feature 1..20: note = chemically synthesized
  source 1..20: mol_type = other DNA
atgcaaaatatcagttttca

SEQ ID NO: 21746 - DNA, 20 bp, synthetic construct
  misc_feature 1..20: note = chemically synthesized
  source 1..20: mol_type = other DNA
tgcaaaatatcagttttcat

SEQ ID NO: 21747 - DNA, 20 bp, synthetic construct
  misc_feature 1..20: note = chemically synthesized
  source 1..20: mol_type = other DNA
gcaaaatatcagttttcata

SEQ ID NO: 21748 - DNA, 20 bp, synthetic construct
  misc_feature 1..20: note = chemically synthesized
  source 1..20: mol_type = other DNA
ttcatagggaacaatatttt

SEQ ID NO: 21749 - DNA, 20 bp, synthetic construct
  misc_feature 1..20: note = chemically synthesized
  source 1..20: mol_type = other DNA
catagggaacaatatttttg

SEQ ID NO: 21750 - DNA, 20 bp, synthetic construct
  misc_feature 1..20: note = chemically synthesized
  source 1..20: mol_type = other DNA
agggaacaatatttttggag

SEQ ID NO: 21751 - DNA, 20 bp, synthetic construct
  misc_feature 1..20: note = chemically synthesized
  source 1..20: mol_type = other DNA
gaacaatatttttggagtag

SEQ ID NO: 21752 - DNA, 20 bp, synthetic construct
  misc_feature 1..20: note = chemically synthesized
  source 1..20: mol_type = other DNA
aacaatatttttggagtaga

SEQ ID NO: 21753 - DNA, 20 bp, synthetic construct
  misc_feature 1..20: note = chemically synthesized
  source 1..20: mol_type = other DNA
caatatttttggagtagaag

SEQ ID NO: 21754 - DNA, 20 bp, synthetic construct
  misc_feature 1..20: note = chemically synthesized
  source 1..20: mol_type = other DNA
aatatttttggagtagaagg

SEQ ID NO: 21755 - DNA, 20 bp, synthetic construct
  misc_feature 1..20: note = chemically synthesized
  source 1..20: mol_type = other DNA
tatttttggagtagaaggag

SEQ ID NO: 21756 - DNA, 20 bp, synthetic construct
  misc_feature 1..20: note = chemically synthesized
  source 1..20: mol_type = other DNA
gtagaaggaggagaaatttt

SEQ ID NO: 21757 - DNA, 20 bp, synthetic construct
  misc_feature 1..20: note = chemically synthesized
  source 1..20: mol_type = other DNA
ggaggagaaattttcagaaa

SEQ ID NO: 21758 - DNA, 20 bp, synthetic construct
  misc_feature 1..20: note = chemically synthesized
  source 1..20: mol_type = other DNA
gagaaattttcagaaaaaga

SEQ ID NO: 21759 - DNA, 20 bp, synthetic construct
  misc_feature 1..20: note = chemically synthesized
  source 1..20: mol_type = other DNA
aaattttcagaaaaagaaag

SEQ ID NO: 21760 - DNA, 20 bp, synthetic construct
  misc_feature 1..20: note = chemically synthesized
  source 1..20: mol_type = other DNA
aattttcagaaaaagaaagt

SEQ ID NO: 21761 - DNA, 20 bp, synthetic construct
  misc_feature 1..20: note = chemically synthesized
  source 1..20: mol_type = other DNA
aaaaagaaagtaggtactac

SEQ ID NO: 21762 - DNA, 20 bp, synthetic construct
  misc_feature 1..20: note = chemically synthesized
  source 1..20: mol_type = other DNA
agtaggtactacaagcatga

SEQ ID NO: 21763 - DNA, 20 bp, synthetic construct
  misc_feature 1..20: note = chemically synthesized
  source 1..20: mol_type = other DNA
ctacaagcatgacggaatac

SEQ ID NO: 21764 - DNA, 20 bp, synthetic construct
  misc_feature 1..20: note = chemically synthesized
  source 1..20: mol_type = other DNA
tacaagcatgacggaataca

SEQ ID NO: 21765 - DNA, 20 bp, synthetic construct
  misc_feature 1..20: note = chemically synthesized
  source 1..20: mol_type = other DNA
atgacggaatacaaggcaaa

SEQ ID NO: 21766 - DNA, 20 bp, synthetic construct
  misc_feature 1..20: note = chemically synthesized
  source 1..20: mol_type = other DNA
acggaatacaaggcaaaaag

SEQ ID NO: 21767 - DNA, 20 bp, synthetic construct
  misc_feature 1..20: note = chemically synthesized
  source 1..20: mol_type = other DNA
gaatacaaggcaaaaagtag

SEQ ID NO: 21768 - DNA, 20 bp, synthetic construct
  misc_feature 1..20: note = chemically synthesized
  source 1..20: mol_type = other DNA
ggcaaaaagtagaagccact

SEQ ID NO: 21769 - DNA, 20 bp, synthetic construct
  misc_feature 1..20: note = chemically synthesized
  source 1..20: mol_type = other DNA
gcaaaaagtagaagccacta

SEQ ID NO: 21770 - DNA, 20 bp, synthetic construct
  misc_feature 1..20: note = chemically synthesized
  source 1..20: mol_type = other DNA
aaagtagaagccactaagga

SEQ ID NO: 21771 - DNA, 20 bp, synthetic construct
  misc_feature 1..20: note = chemically synthesized
  source 1..20: mol_type = other DNA
ccactaaggatagtctactg

SEQ ID NO: 21772 - DNA, 20 bp, synthetic construct
  misc_feature 1..20: note = chemically synthesized
  source 1..20: mol_type = other DNA
ctaaggatagtctactgtag

SEQ ID NO: 21773 - DNA, 20 bp, synthetic construct
  misc_feature 1..20: note = chemically synthesized
  source 1..20: mol_type = other DNA
aaggatagtctactgtagtg

SEQ ID NO: 21774 - DNA, 20 bp, synthetic construct
  misc_feature 1..20: note = chemically synthesized
  source 1..20: mol_type = other DNA
tagtggagtaccattcacac

SEQ ID NO: 21775 - DNA, 20 bp, synthetic construct
  misc_feature 1..20: note = chemically synthesized
  source 1..20: mol_type = other DNA
taccattcacactggcctta

SEQ ID NO: 21776 - DNA, 20 bp, synthetic construct
  misc_feature 1..20: note = chemically synthesized
  source 1..20: mol_type = other DNA
attcacactggccttatagt

SEQ ID NO: 21777 - DNA, 20 bp, synthetic construct
  misc_feature 1..20: note = chemically synthesized
  source 1..20: mol_type = other DNA
cacactggccttatagttag

SEQ ID NO: 21778 - DNA, 20 bp, synthetic construct
  misc_feature 1..20: note = chemically synthesized
  source 1..20: mol_type = other DNA
aattaaaaatgttatgccct

SEQ ID NO: 21779 - DNA, 20 bp, synthetic construct
  misc_feature 1..20: note = chemically synthesized
  source 1..20: mol_type = other DNA
ttaaaaatgttatgcccttg

SEQ ID NO: 21780 - DNA, 20 bp, synthetic construct
  misc_feature 1..20: note = chemically synthesized
  source 1..20: mol_type = other DNA
taaaaatgttatgcccttgg

SEQ ID NO: 21781 - DNA, 20 bp, synthetic construct
  misc_feature 1..20: note = chemically synthesized
  source 1..20: mol_type = other DNA
aaaaatgttatgcccttgga

SEQ ID NO: 21782 - DNA, 20 bp, synthetic construct
  misc_feature 1..20: note = chemically synthesized
  source 1..20: mol_type = other DNA
ttatattaaatttccccatc

SEQ ID NO: 21783 - DNA, 20 bp, synthetic construct
  misc_feature 1..20: note = chemically synthesized
  source 1..20: mol_type = other DNA
aaatttccccatcaagaaaa

SEQ ID NO: 21784 - DNA, 20 bp, synthetic construct
  misc_feature 1..20: note = chemically synthesized
  source 1..20: mol_type = other DNA
aatatttttatgaataaaat

SEQ ID NO: 21785 - DNA, 20 bp, synthetic construct
  misc_feature 1..20: note = chemically synthesized
  source 1..20: mol_type = other DNA
tttatgaataaaataagttg

SEQ ID NO: 21786 - DNA, 20 bp, synthetic construct
  misc_feature 1..20: note = chemically synthesized
  source 1..20: mol_type = other DNA
aataaaataagttgtggatg

SEQ ID NO: 21787 - DNA, 20 bp, synthetic construct
  misc_feature 1..20: note = chemically synthesized
  source 1..20: mol_type = other DNA
aaaataagttgtggatgtag

SEQ ID NO: 21788 - DNA, 20 bp, synthetic construct
  misc_feature 1..20: note = chemically synthesized
  source 1..20: mol_type = other DNA
aataagttgtggatgtagta

SEQ ID NO: 21789 - DNA, 20 bp, synthetic construct
  misc_feature 1..20: note = chemically synthesized
  source 1..20: mol_type = other DNA
ggatgtagtagagcataatt

SEQ ID NO: 21790 - DNA, 20 bp, synthetic construct
  misc_feature 1..20: note = chemically synthesized
  source 1..20: mol_type = other DNA
gatgtagtagagcataatta

SEQ ID NO: 21791 - DNA, 20 bp, synthetic construct
  misc_feature 1..20: note = chemically synthesized
  source 1..20: mol_type = other DNA
atgtagtagagcataattaa

SEQ ID NO: 21792 - DNA, 20 bp, synthetic construct
  misc_feature 1..20: note = chemically synthesized
  source 1..20: mol_type = other DNA
ataattaagggacacatgtt

SEQ ID NO: 21793 - DNA, 20 bp, synthetic construct
  misc_feature 1..20: note = chemically synthesized
  source 1..20: mol_type = other DNA
gttttatgaatgattgaaaa

SEQ ID NO: 21794 - DNA, 20 bp, synthetic construct
  misc_feature 1..20: note = chemically synthesized
  source 1..20: mol_type = other DNA
ttttatgaatgattgaaaac

SEQ ID NO: 21795 - DNA, 20 bp, synthetic construct
  misc_feature 1..20: note = chemically synthesized
  source 1..20: mol_type = other DNA
atgcactcacactcacaatt

SEQ ID NO: 21796 - DNA, 20 bp, synthetic construct
  misc_feature 1..20: note = chemically synthesized
  source 1..20: mol_type = other DNA
cacactcacaatttagtatt

SEQ ID NO: 21797 - DNA, 20 bp, synthetic construct
  misc_feature 1..20: note = chemically synthesized
  source 1..20: mol_type = other DNA
agtattcagactgtgttgct

SEQ ID NO: 21798 - DNA, 20 bp, synthetic construct
  misc_feature 1..20: note = chemically synthesized
  source 1..20: mol_type = other DNA
gtattcagactgtgttgctc

SEQ ID NO: 21799 - DNA, 20 bp, synthetic construct
  misc_feature 1..20: note = chemically synthesized
  source 1..20: mol_type = other DNA
actgtgttgctcaggtgaca

SEQ ID NO: 21800 - DNA, 20 bp, synthetic construct
  misc_feature 1..20: note = chemically synthesized
  source 1..20: mol_type = other DNA
ctcaggtgacatggcgtgac

SEQ ID NO: 21801 - DNA, 20 bp, synthetic construct
  misc_feature 1..20: note = chemically synthesized
  source 1..20: mol_type = other DNA
tcaggtgacatggcgtgaca

SEQ ID NO: 21802 - DNA, 20 bp, synthetic construct
  misc_feature 1..20: note = chemically synthesized
  source 1..20: mol_type = other DNA
caaggataaaaaacatgata

SEQ ID NO: 21803 - DNA, 20 bp, synthetic construct
  misc_feature 1..20: note = chemically synthesized
  source 1..20: mol_type = other DNA
agctgatttttttatatgtt

SEQ ID NO: 21804 - DNA, 20 bp, synthetic construct
  misc_feature 1..20: note = chemically synthesized
  source 1..20: mol_type = other DNA
aattacatctcttaatgaaa

SEQ ID NO: 21805 - DNA, 20 bp, synthetic construct
  misc_feature 1..20: note = chemically synthesized
  source 1..20: mol_type = other DNA
taatgaaacagaatataaat

SEQ ID NO: 21806 - DNA, 20 bp, synthetic construct
  misc_feature 1..20: note = chemically synthesized
  source 1..20: mol_type = other DNA
aatgaaacagaatataaata

SEQ ID NO: 21807 - DNA, 20 bp, synthetic construct
  misc_feature 1..20: note = chemically synthesized
  source 1..20: mol_type = other DNA
cagaatataaataaggattg

SEQ ID NO: 21808 - DNA, 20 bp, synthetic construct
  misc_feature 1..20: note = chemically synthesized
  source 1..20: mol_type = other DNA
taaggattgcagtttttctt

SEQ ID NO: 21809 - DNA, 20 bp, synthetic construct
  misc_feature 1..20: note = chemically synthesized
  source 1..20: mol_type = other DNA
gattgcagtttttcttaagt

SEQ ID NO: 21810 - DNA, 20 bp, synthetic construct
  misc_feature 1..20: note = chemically synthesized
  source 1..20: mol_type = other DNA
tcttaagttggactctctat

SEQ ID NO: 21811 - DNA, 20 bp, synthetic construct
  misc_feature 1..20: note = chemically synthesized
  source 1..20: mol_type = other DNA
actctctatgagcaatacct

SEQ ID NO: 21812 - DNA, 20 bp, synthetic construct
  misc_feature 1..20: note = chemically synthesized
  source 1..20: mol_type = other DNA
tctatgagcaatacctgaga

SEQ ID NO: 21813 - DNA, 20 bp, synthetic construct
  misc_feature 1..20: note = chemically synthesized
  source 1..20: mol_type = other DNA
ctatgagcaatacctgagat

SEQ ID NO: 21814 - DNA, 20 bp, synthetic construct
  misc_feature 1..20: note = chemically synthesized
  source 1..20: mol_type = other DNA
tatgagcaatacctgagata

SEQ ID NO: 21815 - DNA, 20 bp, synthetic construct
  misc_feature 1..20: note = chemically synthesized
  source 1..20: mol_type = other DNA
aatttattaatgaatgctct

SEQ ID NO: 21816 - DNA, 20 bp, synthetic construct
  misc_feature 1..20: note = chemically synthesized
  source 1..20: mol_type = other DNA
atttattaatgaatgctctc

SEQ ID NO: 21817 - DNA, 20 bp, synthetic construct
  misc_feature 1..20: note = chemically synthesized
  source 1..20: mol_type = other DNA
ttattaatgaatgctctcag

SEQ ID NO: 21818 - DNA, 20 bp, synthetic construct
  misc_feature 1..20: note = chemically synthesized
  source 1..20: mol_type = other DNA
taatgaatgctctcaggaga

SEQ ID NO: 21819 - DNA, 20 bp, synthetic construct
  misc_feature 1..20: note = chemically synthesized
  source 1..20: mol_type = other DNA
aatgaatgctctcaggagac

SEQ ID NO: 21820 - DNA, 20 bp, synthetic construct
  misc_feature 1..20: note = chemically synthesized
  source 1..20: mol_type = other DNA
atgaatgctctcaggagaca

SEQ ID NO: 21821 - DNA, 20 bp, synthetic construct
  misc_feature 1..20: note = chemically synthesized
  source 1..20: mol_type = other DNA
gaatgctctcaggagacagg

SEQ ID NO: 21822 - DNA, 20 bp, synthetic construct
  misc_feature 1..20: note = chemically synthesized
  source 1..20: mol_type = other DNA
gctctcaggagacagggagc

SEQ ID NO: 21823 - DNA, 20 bp, synthetic construct
  misc_feature 1..20: note = chemically synthesized
  source 1..20: mol_type = other DNA
aggagacagggagcaagtaa

SEQ ID NO: 21824 - DNA, 20 bp, synthetic construct
  misc_feature 1..20: note = chemically synthesized
  source 1..20: mol_type = other DNA
agacagggagcaagtaaaag

SEQ ID NO: 21825 - DNA, 20 bp, synthetic construct
  misc_feature 1..20: note = chemically synthesized
  source 1..20: mol_type = other DNA
gggagcaagtaaaagcagtg

SEQ ID NO: 21826 - DNA, 20 bp, synthetic construct
  misc_feature 1..20: note = chemically synthesized
  source 1..20: mol_type = other DNA
gcaagtaaaagcagtgtgga

SEQ ID NO: 21827 - DNA, 20 bp, synthetic construct
  misc_feature 1..20: note = chemically synthesized
  source 1..20: mol_type = other DNA
caagtaaaagcagtgtggac

SEQ ID NO: 21828 - DNA, 20 bp, synthetic construct
  misc_feature 1..20: note = chemically synthesized
  source 1..20: mol_type = other DNA
aagtaaaagcagtgtggaca

SEQ ID NO: 21829 - DNA, 20 bp, synthetic construct
  misc_feature 1..20: note = chemically synthesized
  source 1..20: mol_type = other DNA
agtaaaagcagtgtggacag

SEQ ID NO: 21830 - DNA, 20 bp, synthetic construct
  misc_feature 1..20: note = chemically synthesized
  source 1..20: mol_type = other DNA
aaaagcagtgtggacagggg

SEQ ID NO: 21831 - DNA, 20 bp, synthetic construct
  misc_feature 1..20: note = chemically synthesized
  source 1..20: mol_type = other DNA
aaagcagtgtggacagggga

SEQ ID NO: 21832 - DNA, 20 bp, synthetic construct
  misc_feature 1..20: note = chemically synthesized
  source 1..20: mol_type = other DNA
agcagtgtggacaggggaag

SEQ ID NO: 21833 - DNA, 20 bp, synthetic construct
  misc_feature 1..20: note = chemically synthesized
  source 1..20: mol_type = other DNA
gcagtgtggacaggggaagg

SEQ ID NO: 21834 - DNA, 20 bp, synthetic construct
  misc_feature 1..20: note = chemically synthesized
  source 1..20: mol_type = other DNA
tgtggacaggggaaggaggt

SEQ ID NO: 21835 - DNA, 20 bp, synthetic construct
  misc_feature 1..20: note = chemically synthesized
  source 1..20: mol_type = other DNA
gacaggggaaggaggtaagc

SEQ ID NO: 21836 - DNA, 20 bp, synthetic construct
  misc_feature 1..20: note = chemically synthesized
  source 1..20: mol_type = other DNA
aggtaagcaagtgcatactg

SEQ ID NO: 21837 - DNA, 20 bp, synthetic construct
  misc_feature 1..20: note = chemically synthesized
  source 1..20: mol_type = other DNA
aagcaagtgcatactgaagc

SEQ ID NO: 21838 - DNA, 20 bp, synthetic construct
  misc_feature 1..20: note = chemically synthesized
  source 1..20: mol_type = other DNA
gcaagtgcatactgaagctg

SEQ ID NO: 21839 - DNA, 20 bp, synthetic construct
  misc_feature 1..20: note = chemically synthesized
  source 1..20: mol_type = other DNA
tgcatactgaagctggagct

SEQ ID NO: 21840 - DNA, 20 bp, synthetic construct
  misc_feature 1..20: note = chemically synthesized
  source 1..20: mol_type = other DNA
ctgaagctggagcttagctt

SEQ ID NO: 21841 - DNA, 20 bp, synthetic construct
  misc_feature 1..20: note = chemically synthesized
  source 1..20: mol_type = other DNA
aagctggagcttagcttcag

SEQ ID NO: 21842 - DNA, 20 bp, synthetic construct
  misc_feature 1..20: note = chemically synthesized
  source 1..20: mol_type = other DNA
agctggagcttagcttcaga

SEQ ID NO: 21843 - DNA, 20 bp, synthetic construct
  misc_feature 1..20: note = chemically synthesized
  source 1..20: mol_type = other DNA
ggagcttagcttcagaaggc

SEQ ID NO: 21844 - DNA, 20 bp, synthetic construct
  misc_feature 1..20: note = chemically synthesized
  source 1..20: mol_type = other DNA
agcttagcttcagaaggcaa

SEQ ID NO: 21845 - DNA, 20 bp, synthetic construct
  misc_feature 1..20: note = chemically synthesized
  source 1..20: mol_type = other DNA
gcttagcttcagaaggcaag

SEQ ID NO: 21846 - DNA, 20 bp, synthetic construct
  misc_feature 1..20: note = chemically synthesized
  source 1..20: mol_type = other DNA
cttagcttcagaaggcaaga

SEQ ID NO: 21847 - DNA, 20 bp, synthetic construct
  misc_feature 1..20: note = chemically synthesized
  source 1..20: mol_type = other DNA
gcttcagaaggcaagagggt

SEQ ID NO: 21848 - DNA, 20 bp, synthetic construct
  misc_feature 1..20: note = chemically synthesized
  source 1..20: mol_type = other DNA
agagggtcagtatttgccta

SEQ ID NO: 21849 - DNA, 20 bp, synthetic construct
  misc_feature 1..20: note = chemically synthesized
  source 1..20: mol_type = other DNA
ttgcctatggcctgctacct

SEQ ID NO: 21850 - DNA, 20 bp, synthetic construct
  misc_feature 1..20: note = chemically synthesized
  source 1..20: mol_type = other DNA
tgcctatggcctgctaccta

SEQ ID NO: 21851 - DNA, 20 bp, synthetic construct
  misc_feature 1..20: note = chemically synthesized
  source 1..20: mol_type = other DNA
cctatggcctgctacctaag

SEQ ID NO: 21852 - DNA, 20 bp, synthetic construct
  misc_feature 1..20: note = chemically synthesized
  source 1..20: mol_type = other DNA
atggcctgctacctaaggag

SEQ ID NO: 21853 - DNA, 20 bp, synthetic construct
  misc_feature 1..20: note = chemically synthesized
  source 1..20: mol_type = other DNA
tggcctgctacctaaggagc

SEQ ID NO: 21854 - DNA, 20 bp, synthetic construct
  misc_feature 1..20: note = chemically synthesized
  source 1..20: mol_type = other DNA
ggcctgctacctaaggagca

SEQ ID NO: 21855 - DNA, 20 bp, synthetic construct
  misc_feature 1..20: note = chemically synthesized
  source 1..20: mol_type = other DNA
gcctgctacctaaggagcag

SEQ ID NO: 21856 - DNA, 20 bp, synthetic construct
  misc_feature 1..20: note = chemically synthesized
  source 1..20: mol_type = other DNA
gcaggggccattttcttcat

SEQ ID NO: 21857 - DNA, 20 bp, synthetic construct
  misc_feature 1..20: note = chemically synthesized
  source 1..20: mol_type = other DNA
ttcataagacatttcctgct

SEQ ID NO: 21858 - DNA, 20 bp, synthetic construct
  misc_feature 1..20: note = chemically synthesized
  source 1..20: mol_type = other DNA
aagacatttcctgctgagtt

SEQ ID NO: 21859 - DNA, 20 bp, synthetic construct
  misc_feature 1..20: note = chemically synthesized
  source 1..20: mol_type = other DNA
gagttgagaacaacaacctg

SEQ ID NO: 21860 - DNA, 20 bp, synthetic construct
  misc_feature 1..20: note = chemically synthesized
  source 1..20: mol_type = other DNA
tgagaacaacaacctgcaga

SEQ ID NO: 21861 - DNA, 20 bp, synthetic construct
  misc_feature 1..20: note = chemically synthesized
  source 1..20: mol_type = other DNA
gaacaacaacctgcagaaag

SEQ ID NO: 21862 - DNA, 20 bp, synthetic construct
  misc_feature 1..20: note = chemically synthesized
  source 1..20: mol_type = other DNA
aaagcagaaacatgaacaat

SEQ ID NO: 21863 - DNA, 20 bp, synthetic construct
  misc_feature 1..20: note = chemically synthesized
  source 1..20: mol_type = other DNA
gcagaaacatgaacaatgag

SEQ ID NO: 21864 - DNA, 20 bp, synthetic construct
  misc_feature 1..20: note = chemically synthesized
  source 1..20: mol_type = other DNA
caatgagcagccaacattca

SEQ ID NO: 21865 - DNA, 20 bp, synthetic construct
  misc_feature 1..20: note = chemically synthesized
  source 1..20: mol_type = other DNA
aatgagcagccaacattcac

SEQ ID NO: 21866 - DNA, 20 bp, synthetic construct
  misc_feature 1..20: note = chemically synthesized
  source 1..20: mol_type = other DNA
gcacaattctgtaaaatgat

SEQ ID NO: 21867 - DNA, 20 bp, synthetic construct
  misc_feature 1..20: note = chemically synthesized
  source 1..20: mol_type = other DNA
cacaattctgtaaaatgatc

SEQ ID NO: 21868 - DNA, 20 bp, synthetic construct
  misc_feature 1..20: note = chemically synthesized
  source 1..20: mol_type = other DNA
acaattctgtaaaatgatcg

SEQ ID NO: 21869 - DNA, 20 bp, synthetic construct
  misc_feature 1..20: note = chemically synthesized
  source 1..20: mol_type = other DNA
atgatcggggtaaaacacca

SEQ ID NO: 21870 - DNA, 20 bp, synthetic construct
  misc_feature 1..20: note = chemically synthesized
  source 1..20: mol_type = other DNA
cataaacaatatcttctata

SEQ ID NO: 21871 - DNA, 20 bp, synthetic construct
  misc_feature 1..20: note = chemically synthesized
  source 1..20: mol_type = other DNA
tcccctctcttgtctcactg

SEQ ID NO: 21872 - DNA, 20 bp, synthetic construct
  misc_feature 1..20: note = chemically synthesized
  source 1..20: mol_type = other DNA
tattatttttgctctgatta

SEQ ID NO: 21873 - DNA, 20 bp, synthetic construct
  misc_feature 1..20: note = chemically synthesized
  source 1..20: mol_type = other DNA
gctctgattaaagtataatt

SEQ ID NO: 21874 - DNA, 20 bp, synthetic construct
  misc_feature 1..20: note = chemically synthesized
  source 1..20: mol_type = other DNA
agacataacctccctctttt

SEQ ID NO: 21875 - DNA, 20 bp, synthetic construct
  misc_feature 1..20: note = chemically synthesized
  source 1..20: mol_type = other DNA
gacataacctccctcttttt

SEQ ID NO: 21876 - DNA, 20 bp, synthetic construct
  misc_feature 1..20: note = chemically synthesized
  source 1..20: mol_type = other DNA
tttttaggatattttaaatt

SEQ ID NO: 21877 - DNA, 20 bp, synthetic construct
  misc_feature 1..20: note = chemically synthesized
  source 1..20: mol_type = other DNA
ggatattttaaattgagtta

SEQ ID NO: 21878 - DNA, 20 bp, synthetic construct
  misc_feature 1..20: note = chemically synthesized
  source 1..20: mol_type = other DNA
gatattttaaattgagttat

SEQ ID NO: 21879 - DNA, 20 bp, synthetic construct
  misc_feature 1..20: note = chemically synthesized
  source 1..20: mol_type = other DNA
tgggtcccttcctaactcat

SEQ ID NO: 21880 - DNA, 20 bp, synthetic construct
  misc_feature 1..20: note = chemically synthesized
  source 1..20: mol_type = other DNA
tcagacaattttaatcaaat

SEQ ID NO: 21881 - DNA, 20 bp, synthetic construct
  misc_feature 1..20: note = chemically synthesized
  source 1..20: mol_type = other DNA
aatgacattgttgtattctt

SEQ ID NO: 21882 - DNA, 20 bp, synthetic construct
  misc_feature 1..20: note = chemically synthesized
  source 1..20: mol_type = other DNA
atgacattgttgtattcttt

SEQ ID NO: 21883 - DNA, 20 bp, synthetic construct
  misc_feature 1..20: note = chemically synthesized
  source 1..20: mol_type = other DNA
ggaaatttacacttattaca

SEQ ID NO: 21884 - DNA, 20 bp, synthetic construct
  misc_feature 1..20: note = chemically synthesized
  source 1..20: mol_type = other DNA
ttacacttattacatggaat

SEQ ID NO: 21885 - DNA, 20 bp, synthetic construct
  misc_feature 1..20: note = chemically synthesized
  source 1..20: mol_type = other DNA
atggaatcagaatgtatgta

SEQ ID NO: 21886 - DNA, 20 bp, synthetic construct
  misc_feature 1..20: note = chemically synthesized
  source 1..20: mol_type = other DNA
aatcagaatgtatgtacaga

SEQ ID NO: 21887 - DNA, 20 bp, synthetic construct
  misc_feature 1..20: note = chemically synthesized
  source 1..20: mol_type = other DNA
aatcattcttcaaaaaaatg

SEQ ID NO: 21888 - DNA, 20 bp, synthetic construct
  misc_feature 1..20: note = chemically synthesized
  source 1..20: mol_type = other DNA
cctatttttttttgttcctt

SEQ ID NO: 21889 - DNA, 20 bp, synthetic construct
  misc_feature 1..20: note = chemically synthesized
  source 1..20: mol_type = other DNA
gttccttcagacctttttca

SEQ ID NO: 21890 - DNA, 20 bp, synthetic construct
  misc_feature 1..20: note = chemically synthesized
  source 1..20: mol_type = other DNA
tcagacctttttcatagcaa

SEQ ID NO: 21891 - DNA, 20 bp, synthetic construct
  misc_feature 1..20: note = chemically synthesized
  source 1..20: mol_type = other DNA
cagacctttttcatagcaaa

SEQ ID NO: 21892 - DNA, 20 bp, synthetic construct
  misc_feature 1..20: note = chemically synthesized
  source 1..20: mol_type = other DNA
gacctttttcatagcaaaag

SEQ ID NO: 21893 - DNA, 20 bp, synthetic construct
  misc_feature 1..20: note = chemically synthesized
  source 1..20: mol_type = other DNA
acctttttcatagcaaaagg

SEQ ID NO: 21894 - DNA, 20 bp, synthetic construct
  misc_feature 1..20: note = chemically synthesized
  source 1..20: mol_type = other DNA
cctttttcatagcaaaagga

SEQ ID NO: 21895 - DNA, 20 bp, synthetic construct
  misc_feature 1..20: note = chemically synthesized
  source 1..20: mol_type = other DNA
ttcatagcaaaaggagggtg

SEQ ID NO: 21896 - DNA, 20 bp, synthetic construct
  misc_feature 1..20: note = chemically synthesized
  source 1..20: mol_type = other DNA
tcatagcaaaaggagggtga

SEQ ID NO: 21897 - DNA, 20 bp, synthetic construct
  misc_feature 1..20: note = chemically synthesized
  source 1..20: mol_type = other DNA
aactgtctcttccactaatt

SEQ ID NO: 21898 - DNA, 20 bp, synthetic construct
  misc_feature 1..20: note = chemically synthesized
  source 1..20: mol_type = other DNA
tctcttccactaatttggac

SEQ ID NO: 21899 - DNA, 20 bp, synthetic construct
  misc_feature 1..20: note = chemically synthesized
  source 1..20: mol_type = other DNA
ttccactaatttggactagt

SEQ ID NO: 21900 - DNA, 20 bp, synthetic construct
  misc_feature 1..20: note = chemically synthesized
  source 1..20: mol_type = other DNA
actaatttggactagtcagc

SEQ ID NO: 21901 - DNA, 20 bp, synthetic construct
  misc_feature 1..20: note = chemically synthesized
  source 1..20: mol_type = other DNA
tttggactagtcagccagcg

SEQ ID NO: 21902 - DNA, 20 bp, synthetic construct
  misc_feature 1..20: note = chemically synthesized
  source 1..20: mol_type = other DNA
gtcagccagcgtagatatct

SEQ ID NO: 21903 - DNA, 20 bp, synthetic construct
  misc_feature 1..20: note = chemically synthesized
  source 1..20: mol_type = other DNA
tcagccagcgtagatatctg

SEQ ID NO: 21904 - DNA, 20 bp, synthetic construct
  misc_feature 1..20: note = chemically synthesized
  source 1..20: mol_type = other DNA
ccagcgtagatatctgagga

SEQ ID NO: 21905 - DNA, 20 bp, synthetic construct
  misc_feature 1..20: note = chemically synthesized
  source 1..20: mol_type = other DNA
tctgaggatggcctcaacat

SEQ ID NO: 21906 - DNA, 20 bp, synthetic construct
  misc_feature 1..20: note = chemically synthesized
  source 1..20: mol_type = other DNA
tgaggatggcctcaacattg

SEQ ID NO: 21907 - DNA, 20 bp, synthetic construct
  misc_feature 1..20: note = chemically synthesized
  source 1..20: mol_type = other DNA
gatggcctcaacattggagc

SEQ ID NO: 21908 - DNA, 20 bp, synthetic construct
  misc_feature 1..20: note = chemically synthesized
  source 1..20: mol_type = other DNA
tcaacattggagctagcaac

SEQ ID NO: 21909 - DNA, 20 bp, synthetic construct
  misc_feature 1..20: note = chemically synthesized
  source 1..20: mol_type = other DNA
caacattggagctagcaact

SEQ ID NO: 21910 - DNA, 20 bp, synthetic construct
  misc_feature 1..20: note = chemically synthesized
  source 1..20: mol_type = other DNA
aacattggagctagcaacta

SEQ ID NO: 21911 - DNA, 20 bp, synthetic construct
  misc_feature 1..20: note = chemically synthesized
  source 1..20: mol_type = other DNA
attggagctagcaactaggg

SEQ ID NO: 21912 - DNA, 20 bp, synthetic construct
  misc_feature 1..20: note = chemically synthesized
  source 1..20: mol_type = other DNA
ggagctagcaactagggtag

SEQ ID NO: 21913 - DNA, 20 bp, synthetic construct
  misc_feature 1..20: note = chemically synthesized
  source 1..20: mol_type = other DNA
agcaactagggtagtagaat

SEQ ID NO: 21914 - DNA, 20 bp, synthetic construct
  misc_feature 1..20: note = chemically synthesized
  source 1..20: mol_type = other DNA
tagggtagtagaataagaat

SEQ ID NO: 21915 - DNA, 20 bp, synthetic construct
  misc_feature 1..20: note = chemically synthesized
  source 1..20: mol_type = other DNA
gggtagtagaataagaatga

SEQ ID NO: 21916 - DNA, 20 bp, synthetic construct
  misc_feature 1..20: note = chemically synthesized
  source 1..20: mol_type = other DNA
agtagaataagaatgagagc

SEQ ID NO: 21917 - DNA, 20 bp, synthetic construct
  misc_feature 1..20: note = chemically synthesized
  source 1..20: mol_type = other DNA
gaataagaatgagagcaaga

SEQ ID NO: 21918 - DNA, 20 bp, synthetic construct
  misc_feature 1..20: note = chemically synthesized
  source 1..20: mol_type = other DNA
taagaatgagagcaagatag

SEQ ID NO: 21919 - DNA, 20 bp, synthetic construct
  misc_feature 1..20: note = chemically synthesized
  source 1..20: mol_type = other DNA
aagaatgagagcaagataga

SEQ ID NO: 21920 - DNA, 20 bp, synthetic construct
  misc_feature 1..20: note = chemically synthesized
  source 1..20: mol_type = other DNA
gaatgagagcaagatagaag

SEQ ID NO: 21921 - DNA, 20 bp, synthetic construct
  misc_feature 1..20: note = chemically synthesized
  source 1..20: mol_type = other DNA
aatgagagcaagatagaagg

SEQ ID NO: 21922 - DNA, 20 bp, synthetic construct
  misc_feature 1..20: note = chemically synthesized
  source 1..20: mol_type = other DNA
ttctcacatttttttgttac

SEQ ID NO: 21923 - DNA, 20 bp, synthetic construct
  misc_feature 1..20: note = chemically synthesized
  source 1..20: mol_type = other DNA
tttttttgttacaagtttgt

SEQ ID NO: 21924 - DNA, 20 bp, synthetic construct
  misc_feature 1..20: note = chemically synthesized
  source 1..20: mol_type = other DNA
ttttgttacaagtttgtcag

SEQ ID NO: 21925 - DNA, 20 bp, synthetic construct
  misc_feature 1..20: note = chemically synthesized
  source 1..20: mol_type = other DNA
tttgttacaagtttgtcaga

SEQ ID NO: 21926 - DNA, 20 bp, synthetic construct
  misc_feature 1..20: note = chemically synthesized
  source 1..20: mol_type = other DNA
tttgtcagaaggtactgcct

SEQ ID NO: 21927 - DNA, 20 bp, synthetic construct
  misc_feature 1..20: note = chemically synthesized
  source 1..20: mol_type = other DNA
ttgtcagaaggtactgcctt

SEQ ID NO: 21928 - DNA, 20 bp, synthetic construct
  misc_feature 1..20: note = chemically synthesized
  source 1..20: mol_type = other DNA
tgtcagaaggtactgccttg

SEQ ID NO: 21929 - DNA, 20 bp, synthetic construct
  misc_feature 1..20: note = chemically synthesized
  source 1..20: mol_type = other DNA
ctgccttggggaataaatat

SEQ ID NO: 21930 - DNA, 20 bp, synthetic construct
  misc_feature 1..20: note = chemically synthesized
  source 1..20: mol_type = other DNA
ggggaataaatatgagttta

SEQ ID NO: 21931 - DNA, 20 bp, synthetic construct
  misc_feature 1..20: note = chemically synthesized
  source 1..20: mol_type = other DNA
aatatgagtttatggttttt

SEQ ID NO: 21932 - DNA, 20 bp, synthetic construct
  misc_feature 1..20: note = chemically synthesized
  source 1..20: mol_type = other DNA
acaaattcattataatttga

SEQ ID NO: 21933 - DNA, 20 bp, synthetic construct
  misc_feature 1..20: note = chemically synthesized
  source 1..20: mol_type = other DNA
aaattcattataatttgatg

SEQ ID NO: 21934 - DNA, 20 bp, synthetic construct
  misc_feature 1..20: note = chemically synthesized
  source 1..20: mol_type = other DNA
aattcattataatttgatgg

SEQ ID NO: 21935 - DNA, 20 bp, synthetic construct
  misc_feature 1..20: note = chemically synthesized
  source 1..20: mol_type = other DNA
attcattataatttgatgga

SEQ ID NO: 21936 - DNA, 20 bp, synthetic construct
  misc_feature 1..20: note = chemically synthesized
  source 1..20: mol_type = other DNA
tcattataatttgatggagg

SEQ ID NO: 21937 - DNA, 20 bp, synthetic construct
  misc_feature 1..20: note = chemically synthesized
  source 1..20: mol_type = other DNA
cattataatttgatggaggg

SEQ ID NO: 21938 - DNA, 20 bp, synthetic construct
  misc_feature 1..20: note = chemically synthesized
  source 1..20: mol_type = other DNA
ttataatttgatggagggag

SEQ ID NO: 21939 - DNA, 20 bp, synthetic construct
  misc_feature 1..20: note = chemically synthesized
  source 1..20: mol_type = other DNA
tataatttgatggagggagg

SEQ ID NO: 21940 - DNA, 20 bp, synthetic construct
  misc_feature 1..20: note = chemically synthesized
  source 1..20: mol_type = other DNA
tggagggaggaggaaccaac

SEQ ID NO: 21941 - DNA, 20 bp, synthetic construct
  misc_feature 1..20: note = chemically synthesized
  source 1..20: mol_type = other DNA
gaggaaccaactagactgtt

SEQ ID NO: 21942 - DNA, 20 bp, synthetic construct
  misc_feature 1..20: note = chemically synthesized
  source 1..20: mol_type = other DNA
aactagactgttgagatgat

SEQ ID NO: 21943 - DNA, 20 bp, synthetic construct
  misc_feature 1..20: note = chemically synthesized
  source 1..20: mol_type = other DNA
ctgttgagatgataagtaat

SEQ ID NO: 21944 - DNA, 20 bp, synthetic construct
  misc_feature 1..20: note = chemically synthesized
  source 1..20: mol_type = other DNA
tgttgagatgataagtaatt

SEQ ID NO: 21945 - DNA, 20 bp, synthetic construct
  misc_feature 1..20: note = chemically synthesized
  source 1..20: mol_type = other DNA
agtaattaggtcactgatca

SEQ ID NO: 21946 - DNA, 20 bp, synthetic construct
  misc_feature 1..20: note = chemically synthesized
  source 1..20: mol_type = other DNA
aattaggtcactgatcaaag

SEQ ID NO: 21947 - DNA, 20 bp, synthetic construct
  misc_feature 1..20: note = chemically synthesized
  source 1..20: mol_type = other DNA
gaagattatattcttttttg

SEQ ID NO: 21948 - DNA, 20 bp, synthetic construct
  misc_feature 1..20: note = chemically synthesized
  source 1..20: mol_type = other DNA
aagattatattcttttttgc

SEQ ID NO: 21949 - DNA, 20 bp, synthetic construct
  misc_feature 1..20: note = chemically synthesized
  source 1..20: mol_type = other DNA
cttttttgcaggaaaattcc

SEQ ID NO: 21950 - DNA, 20 bp, synthetic construct
  misc_feature 1..20: note = chemically synthesized
  source 1..20: mol_type = other DNA
gcaggaaaattcctggactt

SEQ ID NO: 21951 - DNA, 20 bp, synthetic construct
  misc_feature 1..20: note = chemically synthesized
  source 1..20: mol_type = other DNA
gacttcagtgaccaaattta

SEQ ID NO: 21952 - DNA, 20 bp, synthetic construct
  misc_feature 1..20: note = chemically synthesized
  source 1..20: mol_type = other DNA
acttcagtgaccaaatttat

SEQ ID NO: 21953 - DNA, 20 bp, synthetic construct
  misc_feature 1..20: note = chemically synthesized
  source 1..20: mol_type = other DNA
ataggttcccattgtttgta

SEQ ID NO: 21954 - DNA, 20 bp, synthetic construct
  misc_feature 1..20: note = chemically synthesized
  source 1..20: mol_type = other DNA
attgtttgtatggacacctg

SEQ ID NO: 21955 - DNA, 20 bp, synthetic construct
  misc_feature 1..20: note = chemically synthesized
  source 1..20: mol_type = other DNA
tgtttgtatggacacctgca

SEQ ID NO: 21956 - DNA, 20 bp, synthetic construct
  misc_feature 1..20: note = chemically synthesized
  source 1..20: mol_type = other DNA
acacctgcagagaaattcat

SEQ ID NO: 21957 - DNA, 20 bp, synthetic construct
  misc_feature 1..20: note = chemically synthesized
  source 1..20: mol_type = other DNA
acctgcagagaaattcataa

SEQ ID NO: 21958 - DNA, 20 bp, synthetic construct
  misc_feature 1..20: note = chemically synthesized
  source 1..20: mol_type = other DNA
gcagagaaattcataagagt

SEQ ID NO: 21959 - DNA, 20 bp, synthetic construct
  misc_feature 1..20: note = chemically synthesized
  source 1..20: mol_type = other DNA
aattcataagagttggaaat

SEQ ID NO: 21960 - DNA, 20 bp, synthetic construct
  misc_feature 1..20: note = chemically synthesized
  source 1..20: mol_type = other DNA
gttggaaattagatttgaca

SEQ ID NO: 21961 - DNA, 20 bp, synthetic construct
  misc_feature 1..20: note = chemically synthesized
  source 1..20: mol_type = other DNA
accatgaaataaacatatgt

SEQ ID NO: 21962 - DNA, 20 bp, synthetic construct
  misc_feature 1..20: note = chemically synthesized
  source 1..20: mol_type = other DNA
aacatatgttagttacatta

SEQ ID NO: 21963 - DNA, 20 bp, synthetic construct
  misc_feature 1..20: note = chemically synthesized
  source 1..20: mol_type = other DNA
ttacattatagacataccaa

SEQ ID NO: 21964 - DNA, 20 bp, synthetic construct
  misc_feature 1..20: note = chemically synthesized
  source 1..20: mol_type = other DNA
agacataccaatagatgcct

SEQ ID NO: 21965 - DNA, 20 bp, synthetic construct
  misc_feature 1..20: note = chemically synthesized
  source 1..20: mol_type = other DNA
gacataccaatagatgccta

SEQ ID NO: 21966 - DNA, 20 bp, synthetic construct
  misc_feature 1..20: note = chemically synthesized
  source 1..20: mol_type = other DNA
gtattgttatcacaataatt

SEQ ID NO: 21967 - DNA, 20 bp, synthetic construct
  misc_feature 1..20: note = chemically synthesized
  source 1..20: mol_type = other DNA
ttgttatcacaataatttag

SEQ ID NO: 21968 - DNA, 20 bp, synthetic construct
  misc_feature 1..20: note = chemically synthesized
  source 1..20: mol_type = other DNA
tatcacaataatttagtgga

SEQ ID NO: 21969 - DNA, 20 bp, synthetic construct
  misc_feature 1..20: note = chemically synthesized
  source 1..20: mol_type = other DNA
caataatttagtggaaagct

SEQ ID NO: 21970 - DNA, 20 bp, synthetic construct
  misc_feature 1..20: note = chemically synthesized
  source 1..20: mol_type = other DNA
ataatttagtggaaagctta

SEQ ID NO: 21971 - DNA, 20 bp, synthetic construct
  misc_feature 1..20: note = chemically synthesized
  source 1..20: mol_type = other DNA
ttagagaaatattccgttta

SEQ ID NO: 21972 - DNA, 20 bp, synthetic construct
  misc_feature 1..20: note = chemically synthesized
  source 1..20: mol_type = other DNA
tagagaaatattccgtttac

SEQ ID NO: 21973 - DNA, 20 bp, synthetic construct
  misc_feature 1..20: note = chemically synthesized
  source 1..20: mol_type = other DNA
aaatttgtacaaactacatt

SEQ ID NO: 21974 - DNA, 20 bp, synthetic construct
  misc_feature 1..20: note = chemically synthesized
  source 1..20: mol_type = other DNA
gtacaaactacatttagcta

SEQ ID NO: 21975 - DNA, 20 bp, synthetic construct
  misc_feature 1..20: note = chemically synthesized
  source 1..20: mol_type = other DNA
acaaactacatttagctaaa

SEQ ID NO: 21976 - DNA, 20 bp, synthetic construct
  misc_feature 1..20: note = chemically synthesized
  source 1..20: mol_type = other DNA
actacatttagctaaagagt

SEQ ID NO: 21977 - DNA, 20 bp, synthetic construct
  misc_feature 1..20: note = chemically synthesized
  source 1..20: mol_type = other DNA
ctacatttagctaaagagtt

SEQ ID NO: 21978 - DNA, 20 bp, synthetic construct
  misc_feature 1..20: note = chemically synthesized
  source 1..20: mol_type = other DNA
tagctaaagagttgggctta

SEQ ID NO: 21979 - DNA, 20 bp, synthetic construct
  misc_feature 1..20: note = chemically synthesized
  source 1..20: mol_type = other DNA
gctaaagagttgggcttaaa

SEQ ID NO: 21980 - DNA, 20 bp, synthetic construct
  misc_feature 1..20: note = chemically synthesized
  source 1..20: mol_type = other DNA
ttgggcttaaagagatacct

SEQ ID NO: 21981 - DNA, 20 bp, synthetic construct
  misc_feature 1..20: note = chemically synthesized
  source 1..20: mol_type = other DNA
tgggcttaaagagatacctt

SEQ ID NO: 21982 - DNA, 20 bp, synthetic construct
  misc_feature 1..20: note = chemically synthesized
  source 1..20: mol_type = other DNA
gggcttaaagagatacctta

SEQ ID NO: 21983 - DNA, 20 bp, synthetic construct
  misc_feature 1..20: note = chemically synthesized
  source 1..20: mol_type = other DNA
agataccttagggaaacttg

SEQ ID NO: 21984 - DNA, 20 bp, synthetic construct
  misc_feature 1..20: note = chemically synthesized
  source 1..20: mol_type = other DNA
attttaacacctattttacc

SEQ ID NO: 21985 - DNA, 20 bp, synthetic construct
  misc_feature 1..20: note = chemically synthesized
  source 1..20: mol_type = other DNA
cctattttaccaagtcatat

SEQ ID NO: 21986 - DNA, 20 bp, synthetic construct
  misc_feature 1..20: note = chemically synthesized
  source 1..20: mol_type = other DNA
agtcatatgagcatgcatgc

SEQ ID NO: 21987 - DNA, 20 bp, synthetic construct
  misc_feature 1..20: note = chemically synthesized
  source 1..20: mol_type = other DNA
tgagcatgcatgctagatat

SEQ ID NO: 21988 - DNA, 20 bp, synthetic construct
  misc_feature 1..20: note = chemically synthesized
  source 1..20: mol_type = other DNA
tttgctctcctgctaaatat

SEQ ID NO: 21989 - DNA, 20 bp, synthetic construct
  misc_feature 1..20: note = chemically synthesized
  source 1..20: mol_type = other DNA
tgctctcctgctaaatatta

SEQ ID NO: 21990 - DNA, 20 bp, synthetic construct
  misc_feature 1..20: note = chemically synthesized
  source 1..20: mol_type = other DNA
ttagagtttttacattctgt

SEQ ID NO: 21991 - DNA, 20 bp, synthetic construct
  misc_feature 1..20: note = chemically synthesized
  source 1..20: mol_type = other DNA
agagtttttacattctgtga

SEQ ID NO: 21992 - DNA, 20 bp, synthetic construct
  misc_feature 1..20: note = chemically synthesized
  source 1..20: mol_type = other DNA
gtgagagtgactgtgatgat

SEQ ID NO: 21993 - DNA, 20 bp, synthetic construct
  misc_feature 1..20: note = chemically synthesized
  source 1..20: mol_type = other DNA
gagagtgactgtgatgattg

SEQ ID NO: 21994 - DNA, 20 bp, synthetic construct
  misc_feature 1..20: note = chemically synthesized
  source 1..20: mol_type = other DNA
tgactgtgatgattggagat

SEQ ID NO: 21995 - DNA, 20 bp, synthetic construct
  misc_feature 1..20: note = chemically synthesized
  source 1..20: mol_type = other DNA
gactgtgatgattggagatc

SEQ ID NO: 21996 - DNA, 20 bp, synthetic construct
  misc_feature 1..20: note = chemically synthesized
  source 1..20: mol_type = other DNA
gagatcaggttccaattcta

SEQ ID NO: 21997 - DNA, 20 bp, synthetic construct
  misc_feature 1..20: note = chemically synthesized
  source 1..20: mol_type = other DNA
agatcaggttccaattctat

SEQ ID NO: 21998 - DNA, 20 bp, synthetic construct
  misc_feature 1..20: note = chemically synthesized
  source 1..20: mol_type = other DNA
tcaggttccaattctatggg

SEQ ID NO: 21999 - DNA, 20 bp, synthetic construct
  misc_feature 1..20: note = chemically synthesized
  source 1..20: mol_type = other DNA
ccaattctatgggtagtaaa

SEQ ID NO: 22000 - DNA, 20 bp, synthetic construct
  misc_feature 1..20: note = chemically synthesized
  source 1..20: mol_type = other DNA
caattctatgggtagtaaaa

SEQ ID NO: 22001 - DNA, 20 bp, synthetic construct
  misc_feature 1..20: note = chemically synthesized
  source 1..20: mol_type = other DNA
ctatgggtagtaaaaaggtg

SEQ ID NO: 22002 - DNA, 20 bp, synthetic construct
  misc_feature 1..20: note = chemically synthesized
  source 1..20: mol_type = other DNA
ggtagtaaaaaggtgaagaa

SEQ ID NO: 22003 - DNA, 20 bp, synthetic construct
  misc_feature 1..20: note = chemically synthesized
  source 1..20: mol_type = other DNA
aatggcattctgaatctgct

SEQ ID NO: 22004 - DNA, 20 bp, synthetic construct
  misc_feature 1..20: note = chemically synthesized
  source 1..20: mol_type = other DNA
ggtcttgacactatatgtta

SEQ ID NO: 22005 - DNA, 20 bp, synthetic construct
  misc_feature 1..20: note = chemically synthesized
  source 1..20: mol_type = other DNA
gtcttgacactatatgttat

SEQ ID NO: 22006 - DNA, 20 bp, synthetic construct
  misc_feature 1..20: note = chemically synthesized
  source 1..20: mol_type = other DNA
ctatatgttataggattcat

SEQ ID NO: 22007 - DNA, 20 bp, synthetic construct
  misc_feature 1..20: note = chemically synthesized
  source 1..20: mol_type = other DNA
tatgttataggattcattag

SEQ ID NO: 22008 - DNA, 20 bp, synthetic construct
  misc_feature 1..20: note = chemically synthesized
  source 1..20: mol_type = other DNA
tgttataggattcattagtg

SEQ ID NO: 22009 - DNA, 20 bp, synthetic construct
  misc_feature 1..20: note = chemically synthesized
  source 1..20: mol_type = other DNA
gttataggattcattagtgg

SEQ ID NO: 22010 - DNA, 20 bp, synthetic construct
  misc_feature 1..20: note = chemically synthesized
  source 1..20: mol_type = other DNA
ttataggattcattagtgga

SEQ ID NO: 22011 - DNA, 20 bp, synthetic construct
  misc_feature 1..20: note = chemically synthesized
  source 1..20: mol_type = other DNA
ggattcattagtggagggaa

SEQ ID NO: 22012 - DNA, 20 bp, synthetic construct
  misc_feature 1..20: note = chemically synthesized
  source 1..20: mol_type = other DNA
ttagtggagggaacagaaaa

SEQ ID NO: 22013 - DNA, 20 bp, synthetic construct
  misc_feature 1..20: note = chemically synthesized
  source 1..20: mol_type = other DNA
tagtggagggaacagaaaat

SEQ ID NO: 22014 - DNA, 20 bp, synthetic construct
  misc_feature 1..20: note = chemically synthesized
  source 1..20: mol_type = other DNA
gagggaacagaaaataggca

SEQ ID NO: 22015 - DNA, 20 bp, synthetic construct
  misc_feature 1..20: note = chemically synthesized
  source 1..20: mol_type = other DNA
aaataggcatagctcataat

SEQ ID NO: 22016 - DNA, 20 bp, synthetic construct
  misc_feature 1..20: note = chemically synthesized
  source 1..20: mol_type = other DNA
aataggcatagctcataatg

SEQ ID NO: 22017 - DNA, 20 bp, synthetic construct
  misc_feature 1..20: note = chemically synthesized
  source 1..20: mol_type = other DNA
ataatgaggtgaacaatatg

SEQ ID NO: 22018 - DNA, 20 bp, synthetic construct
  misc_feature 1..20: note = chemically synthesized
  source 1..20: mol_type = other DNA
tgctttccaaaacgatgaat

SEQ ID NO: 22019 - DNA, 20 bp, synthetic construct
  misc_feature 1..20: note = chemically synthesized
  source 1..20: mol_type = other DNA
ctttccaaaacgatgaatca

SEQ ID NO: 22020 - DNA, 20 bp, synthetic construct
  misc_feature 1..20: note = chemically synthesized
  source 1..20: mol_type = other DNA
atcactgtgacataaaaaac

SEQ ID NO: 22021 - DNA, 20 bp, synthetic construct
  misc_feature 1..20: note = chemically synthesized
  source 1..20: mol_type = other DNA
tcactgtgacataaaaaacc

SEQ ID NO: 22022 - DNA, 20 bp, synthetic construct
  misc_feature 1..20: note = chemically synthesized
  source 1..20: mol_type = other DNA
tgacataaaaaaccaggaca

SEQ ID NO: 22023 - DNA, 20 bp, synthetic construct
  misc_feature 1..20: note = chemically synthesized
  source 1..20: mol_type = other DNA
cataaaaaaccaggacacag

SEQ ID NO: 22024 - DNA, 20 bp, synthetic construct
  misc_feature 1..20: note = chemically synthesized
  source 1..20: mol_type = other DNA
aaaccaggacacagcagata

SEQ ID NO: 22025 - DNA, 20 bp, synthetic construct
  misc_feature 1..20: note = chemically synthesized
  source 1..20: mol_type = other DNA
aaccaggacacagcagatat

SEQ ID NO: 22026 - DNA, 20 bp, synthetic construct
  misc_feature 1..20: note = chemically synthesized
  source 1..20: mol_type = other DNA
ccaggacacagcagatatgg

SEQ ID NO: 22027 - DNA, 20 bp, synthetic construct
  misc_feature 1..20: note = chemically synthesized
  source 1..20: mol_type = other DNA
cacagcagatatgggagaca

SEQ ID NO: 22028 - DNA, 20 bp, synthetic construct
  misc_feature 1..20: note = chemically synthesized
  source 1..20: mol_type = other DNA
acagcagatatgggagacac

SEQ ID NO: 22029 - DNA, 20 bp, synthetic construct
  misc_feature 1..20: note = chemically synthesized
  source 1..20: mol_type = other DNA
atatgggagacacaggtaat

SEQ ID NO: 22030 - DNA, 20 bp, synthetic construct
  misc_feature 1..20: note = chemically synthesized
  source 1..20: mol_type = other DNA
atgggagacacaggtaatga

SEQ ID NO: 22031 - DNA, 20 bp, synthetic construct
  misc_feature 1..20: note = chemically synthesized
  source 1..20: mol_type = other DNA
gacacaggtaatgagagcct

SEQ ID NO: 22032 - DNA, 20 bp, synthetic construct
  misc_feature 1..20: note = chemically synthesized
  source 1..20: mol_type = other DNA
agccttggccctctcctctc

SEQ ID NO: 22033 - DNA, 20 bp, synthetic construct
  misc_feature 1..20: note = chemically synthesized
  source 1..20: mol_type = other DNA
ccttggccctctcctctctg

SEQ ID NO: 22034 - DNA, 20 bp, synthetic construct
  misc_feature 1..20: note = chemically synthesized
  source 1..20: mol_type = other DNA
cttggccctctcctctctgg

SEQ ID NO: 22035 - DNA, 20 bp, synthetic construct
  misc_feature 1..20: note = chemically synthesized
  source 1..20: mol_type = other DNA
tcctctctggaggcaatgct

SEQ ID NO: 22036 - DNA, 20 bp, synthetic construct
  misc_feature 1..20: note = chemically synthesized
  source 1..20: mol_type = other DNA
cctctctggaggcaatgctc

SEQ ID NO: 22037 - DNA, 20 bp, synthetic construct
  misc_feature 1..20: note = chemically synthesized
  source 1..20: mol_type = other DNA
tctggaggcaatgctcagga

SEQ ID NO: 22038 - DNA, 20 bp, synthetic construct
  misc_feature 1..20: note = chemically synthesized
  source 1..20: mol_type = other DNA
gcaatgctcaggacagtctt

SEQ ID NO: 22039 - DNA, 20 bp, synthetic construct
  misc_feature 1..20: note = chemically synthesized
  source 1..20: mol_type = other DNA
cagtcttgagtatcaacaca

SEQ ID NO: 22040 - DNA, 20 bp, synthetic construct
  misc_feature 1..20: note = chemically synthesized
  source 1..20: mol_type = other DNA
agtcttgagtatcaacacat

SEQ ID NO: 22041 - DNA, 20 bp, synthetic construct
  misc_feature 1..20: note = chemically synthesized
  source 1..20: mol_type = other DNA
tcttgagtatcaacacatag

SEQ ID NO: 22042 - DNA, 20 bp, synthetic construct
  misc_feature 1..20: note = chemically synthesized
  source 1..20: mol_type = other DNA
gtatcaacacataggagatg

SEQ ID NO: 22043 - DNA, 20 bp, synthetic construct
  misc_feature 1..20: note = chemically synthesized
  source 1..20: mol_type = other DNA
acataggagatgaagataat

SEQ ID NO: 22044 - DNA, 20 bp, synthetic construct
  misc_feature 1..20: note = chemically synthesized
  source 1..20: mol_type = other DNA
atgaagataatcagataatc

SEQ ID NO: 22045 - DNA, 20 bp, synthetic construct
  misc_feature 1..20: note = chemically synthesized
  source 1..20: mol_type = other DNA
gataatccagcacaaatata

SEQ ID NO: 22046 - DNA, 20 bp, synthetic construct
  misc_feature 1..20: note = chemically synthesized
  source 1..20: mol_type = other DNA
agcacaaatataaagactac

SEQ ID NO: 22047 - DNA, 20 bp, synthetic construct
  misc_feature 1..20: note = chemically synthesized
  source 1..20: mol_type = other DNA
aaatataaagactacaagca

SEQ ID NO: 22048 - DNA, 20 bp, synthetic construct
  misc_feature 1..20: note = chemically synthesized
  source 1..20: mol_type = other DNA
ataaagactacaagcacagc

SEQ ID NO: 22049 - DNA, 20 bp, synthetic construct
  misc_feature 1..20: note = chemically synthesized
  source 1..20: mol_type = other DNA
taaagactacaagcacagct

SEQ ID NO: 22050 - DNA, 20 bp, synthetic construct
  misc_feature 1..20: note = chemically synthesized
  source 1..20: mol_type = other DNA
actacaagcacagctgggta

SEQ ID NO: 22051 - DNA, 20 bp, synthetic construct
  misc_feature 1..20: note = chemically synthesized
  source 1..20: mol_type = other DNA
caagcacagctgggtacagt

SEQ ID NO: 22052 - DNA, 20 bp, synthetic construct
  misc_feature 1..20: note = chemically synthesized
  source 1..20: mol_type = other DNA
cagctgggtacagtcggttg

SEQ ID NO: 22053 - DNA, 20 bp, synthetic construct
  misc_feature 1..20: note = chemically synthesized
  source 1..20: mol_type = other DNA
agctgggtacagtcggttga

SEQ ID NO: 22054 - DNA, 20 bp, synthetic construct
  misc_feature 1..20: note = chemically synthesized
  source 1..20: mol_type = other DNA
tgggtacagtcggttgaagg

SEQ ID NO: 22055 - DNA, 20 bp, synthetic construct
  misc_feature 1..20: note = chemically synthesized
  source 1..20: mol_type = other DNA
cagtcggttgaaggtggtat

SEQ ID NO: 22056 - DNA, 20 bp, synthetic construct
  misc_feature 1..20: note = chemically synthesized
  source 1..20: mol_type = other DNA
ggttgaaggtggtatcagca

SEQ ID NO: 22057 - DNA, 20 bp, synthetic construct
  misc_feature 1..20: note = chemically synthesized
  source 1..20: mol_type = other DNA
gttgaaggtggtatcagcac

SEQ ID NO: 22058 - DNA, 20 bp, synthetic construct
  misc_feature 1..20: note = chemically synthesized
  source 1..20: mol_type = other DNA
aaggtggtatcagcacaggc

SEQ ID NO: 22059 - DNA, 20 bp, synthetic construct
  misc_feature 1..20: note = chemically synthesized
  source 1..20: mol_type = other DNA
aggcgagtttaatgacatcc

SEQ ID NO: 22060 - DNA, 20 bp, synthetic construct
  misc_feature 1..20: note = chemically synthesized
  source 1..20: mol_type = other DNA
agtttaatgacatcctggtg

SEQ ID NO: 22061 - DNA, 20 bp, synthetic construct
  misc_feature 1..20: note = chemically synthesized
  source 1..20: mol_type = other DNA
gtttaatgacatcctggtga

SEQ ID NO: 22062 - DNA, 20 bp, synthetic construct
  misc_feature 1..20: note = chemically synthesized
  source 1..20: mol_type = other DNA
taatgacatcctggtgaagg

SEQ ID NO: 22063 - DNA, 20 bp, synthetic construct
  misc_feature 1..20: note = chemically synthesized
  source 1..20: mol_type = other DNA
tgaaggcagaatgcatgtga

SEQ ID NO: 22064 - DNA, 20 bp, synthetic construct
  misc_feature 1..20: note = chemically synthesized
  source 1..20: mol_type = other DNA
agaatgcatgtgaaagaaca

SEQ ID NO: 22065 - DNA, 20 bp, synthetic construct
  misc_feature 1..20: note = chemically synthesized
  source 1..20: mol_type = other DNA
gaatgcatgtgaaagaacat

SEQ ID NO: 22066 - DNA, 20 bp, synthetic construct
  misc_feature 1..20: note = chemically synthesized
  source 1..20: mol_type = other DNA
atgcatgtgaaagaacatgg

SEQ ID NO: 22067 - DNA, 20 bp, synthetic construct
  misc_feature 1..20: note = chemically synthesized
  source 1..20: mol_type = other DNA
agaacatgggagtgacaata

SEQ ID NO: 22068 - DNA, 20 bp, synthetic construct
  misc_feature 1..20: note = chemically synthesized
  source 1..20: mol_type = other DNA
agtgacaatacagaaaaaaa

SEQ ID NO: 22069 - DNA, 20 bp, synthetic construct
  misc_feature 1..20: note = chemically synthesized
  source 1..20: mol_type = other DNA
tgacaatacagaaaaaaata

SEQ ID NO: 22070 - DNA, 20 bp, synthetic construct
  misc_feature 1..20: note = chemically synthesized
  source 1..20: mol_type = other DNA
gacaatacagaaaaaaatag

SEQ ID NO: 22071 - DNA, 20 bp, synthetic construct
  misc_feature 1..20: note = chemically synthesized
  source 1..20: mol_type = other DNA
acaatacagaaaaaaataga

SEQ ID NO: 22072 - DNA, 20 bp, synthetic construct
  misc_feature 1..20: note = chemically synthesized
  source 1..20: mol_type = other DNA
caatacagaaaaaaatagag

SEQ ID NO: 22073 - DNA, 20 bp, synthetic construct
  misc_feature 1..20: note = chemically synthesized
  source 1..20: mol_type = other DNA
aaaaaatagaggggcctgat

SEQ ID NO: 22074 - DNA, 20 bp, synthetic construct
  misc_feature 1..20: note = chemically synthesized
  source 1..20: mol_type = other DNA
aaaaatagaggggcctgatt

SEQ ID NO: 22075 - DNA, 20 bp, synthetic construct
  misc_feature 1..20: note = chemically synthesized
  source 1..20: mol_type = other DNA
aaaatagaggggcctgattg

SEQ ID NO: 22076 - DNA, 20 bp, synthetic construct
  misc_feature 1..20: note = chemically synthesized
  source 1..20: mol_type = other DNA
aaatagaggggcctgattgg

SEQ ID NO: 22077 - DNA, 20 bp, synthetic construct
  misc_feature 1..20: note = chemically synthesized
  source 1..20: mol_type = other DNA
gggcctgattgggggaacaa

SEQ ID NO: 22078 - DNA, 20 bp, synthetic construct
  misc_feature 1..20: note = chemically synthesized
  source 1..20: mol_type = other DNA
acggatacaaatcccctcat

SEQ ID NO: 22079 - DNA, 20 bp, synthetic construct
  misc_feature 1..20: note = chemically synthesized
  source 1..20: mol_type = other DNA
aatcccctcatcagaactcc

SEQ ID NO: 22080 - DNA, 20 bp, synthetic construct
  misc_feature 1..20: note = chemically synthesized
  source 1..20: mol_type = other DNA
cagcccaatcttcactactc

SEQ ID NO: 22081 - DNA, 20 bp, synthetic construct
  misc_feature 1..20: note = chemically synthesized
  source 1..20: mol_type = other DNA
aatcttcactactcgagtat

SEQ ID NO: 22082 - DNA, 20 bp, synthetic construct
  misc_feature 1..20: note = chemically synthesized
  source 1..20: mol_type = other DNA
ttcactactcgagtattagt

SEQ ID NO: 22083 - DNA, 20 bp, synthetic construct
  misc_feature 1..20: note = chemically synthesized
  source 1..20: mol_type = other DNA
tactcgagtattagtaagta

SEQ ID NO: 22084 - DNA, 20 bp, synthetic construct
  misc_feature 1..20: note = chemically synthesized
  source 1..20: mol_type = other DNA
ctcgagtattagtaagtaca

SEQ ID NO: 22085 - DNA, 20 bp, synthetic construct
  misc_feature 1..20: note = chemically synthesized
  source 1..20: mol_type = other DNA
tcgagtattagtaagtacag

SEQ ID NO: 22086 - DNA, 20 bp, synthetic construct
  misc_feature 1..20: note = chemically synthesized
  source 1..20: mol_type = other DNA
gtaagtacagaggtatatct

SEQ ID NO: 22087 - DNA, 20 bp, synthetic construct
  misc_feature 1..20: note = chemically synthesized
  source 1..20: mol_type = other DNA
aagtacagaggtatatctaa

SEQ ID NO: 22088 - DNA, 20 bp, synthetic construct
  misc_feature 1..20: note = chemically synthesized
  source 1..20: mol_type = other DNA
agtacagaggtatatctaag

SEQ ID NO: 22089 - DNA, 20 bp, synthetic construct
  misc_feature 1..20: note = chemically synthesized
  source 1..20: mol_type = other DNA
gtacagaggtatatctaaga

SEQ ID NO: 22090 - DNA, 20 bp, synthetic construct
  misc_feature 1..20: note = chemically synthesized
  source 1..20: mol_type = other DNA
aggtatatctaagagggttg

SEQ ID NO: 22091 - DNA, 20 bp, synthetic construct
  misc_feature 1..20: note = chemically synthesized
  source 1..20: mol_type = other DNA
atatctaagagggttgcaga

SEQ ID NO: 22092 - DNA, 20 bp, synthetic construct
  misc_feature 1..20: note = chemically synthesized
  source 1..20: mol_type = other DNA
ggttgcagatggcaataaaa

SEQ ID NO: 22093 - DNA, 20 bp, synthetic construct
  misc_feature 1..20: note = chemically synthesized
  source 1..20: mol_type = other DNA
agatggcaataaaacggtca

SEQ ID NO: 22094 - DNA, 20 bp, synthetic construct
  misc_feature 1..20: note = chemically synthesized
  source 1..20: mol_type = other DNA
gatggcaataaaacggtcat

SEQ ID NO: 22095 - DNA, 20 bp, synthetic construct
  misc_feature 1..20: note = chemically synthesized
  source 1..20: mol_type = other DNA
aataaaacggtcataggcca

SEQ ID NO: 22096 - DNA, 20 bp, synthetic construct
  misc_feature 1..20: note = chemically synthesized
  source 1..20: mol_type = other DNA
aaacggtcataggccatggc

SEQ ID NO: 22097 - DNA, 20 bp, synthetic construct
  misc_feature 1..20: note = chemically synthesized
  source 1..20: mol_type = other DNA
cggtcataggccatggcaag

SEQ ID NO: 22098 - DNA, 20 bp, synthetic construct
  misc_feature 1..20: note = chemically synthesized
  source 1..20: mol_type = other DNA
ggccatggcaagcagaatgc

SEQ ID NO: 22099 - DNA, 20 bp, synthetic construct
  misc_feature 1..20: note = chemically synthesized
  source 1..20: mol_type = other DNA
gcaagcagaatgccagactc

SEQ ID NO: 22100 - DNA, 20 bp, synthetic construct
  misc_feature 1..20: note = chemically synthesized
  source 1..20: mol_type = other DNA
gcagaatgccagactcgaga

SEQ ID NO: 22101 - DNA, 20 bp, synthetic construct
  misc_feature 1..20: note = chemically synthesized
  source 1..20: mol_type = other DNA
cagaatgccagactcgagaa

SEQ ID NO: 22102 - DNA, 20 bp, synthetic construct
  misc_feature 1..20: note = chemically synthesized
  source 1..20: mol_type = other DNA
atgccagactcgagaaagga

SEQ ID NO: 22103 - DNA, 20 bp, synthetic construct
  misc_feature 1..20: note = chemically synthesized
  source 1..20: mol_type = other DNA
cagactcgagaaaggaaagt

SEQ ID NO: 22104 - DNA, 20 bp, synthetic construct
  misc_feature 1..20: note = chemically synthesized
  source 1..20: mol_type = other DNA
gaaaggaaagtgagtgtata

SEQ ID NO: 22105 - DNA, 20 bp, synthetic construct
  misc_feature 1..20: note = chemically synthesized
  source 1..20: mol_type = other DNA
aggaaagtgagtgtataaag

SEQ ID NO: 22106 - DNA, 20 bp, synthetic construct
  misc_feature 1..20: note = chemically synthesized
  source 1..20: mol_type = other DNA
ggaaagtgagtgtataaagt

SEQ ID NO: 22107 - DNA, 20 bp, synthetic construct
  misc_feature 1..20: note = chemically synthesized
  source 1..20: mol_type = other DNA
gtgagtgtataaagtaggcc

SEQ ID NO: 22108 - DNA, 20 bp, synthetic construct
  misc_feature 1..20: note = chemically synthesized
  source 1..20: mol_type = other DNA
tgagtgtataaagtaggcct

SEQ ID NO: 22109 - DNA, 20 bp, synthetic construct
  misc_feature 1..20: note = chemically synthesized
  source 1..20: mol_type = other DNA
gtataaagtaggcctgggaa

SEQ ID NO: 22110 - DNA, 20 bp, synthetic construct
  misc_feature 1..20: note = chemically synthesized
  source 1..20: mol_type = other DNA
taaagtaggcctgggaaaag

SEQ ID NO: 22111 - DNA, 20 bp, synthetic construct
  misc_feature 1..20: note = chemically synthesized
  source 1..20: mol_type = other DNA
aaagtaggcctgggaaaagc

SEQ ID NO: 22112 - DNA, 20 bp, synthetic construct
  misc_feature 1..20: note = chemically synthesized
  source 1..20: mol_type = other DNA
cttccaatctccctgtgatc

SEQ ID NO: 22113 - DNA, 20 bp, synthetic construct
  misc_feature 1..20: note = chemically synthesized
  source 1..20: mol_type = other DNA
caatctccctgtgatccagc

SEQ ID NO: 22114 - DNA, 20 bp, synthetic construct
  misc_feature 1..20: note = chemically synthesized
  source 1..20: mol_type = other DNA
atctccctgtgatccagcca

SEQ ID NO: 22115 - DNA, 20 bp, synthetic construct
  misc_feature 1..20: note = chemically synthesized
  source 1..20: mol_type = other DNA
tctccctgtgatccagccag

SEQ ID NO: 22116 - DNA, 20 bp, synthetic construct
  misc_feature 1..20: note = chemically synthesized
  source 1..20: mol_type = other DNA
tgatccagccagaggactcc

SEQ ID NO: 22117 - DNA, 20 bp, synthetic construct
  misc_feature 1..20: note = chemically synthesized
  source 1..20: mol_type = other DNA
ccagaggactcccagcaccg

SEQ ID NO: 22118 - DNA, 20 bp, synthetic construct
  misc_feature 1..20: note = chemically synthesized
  source 1..20: mol_type = other DNA
cagaggactcccagcaccgt

SEQ ID NO: 22119 - DNA, 20 bp, synthetic construct
  misc_feature 1..20: note = chemically synthesized
  source 1..20: mol_type = other DNA
tcccagcaccgtgggcattg

SEQ ID NO: 22120 - DNA, 20 bp, synthetic construct
  misc_feature 1..20: note = chemically synthesized
  source 1..20: mol_type = other DNA
agcaccgtgggcattgtggt

SEQ ID NO: 22121 - DNA, 20 bp, synthetic construct
  misc_feature 1..20: note = chemically synthesized
  source 1..20: mol_type = other DNA
gcaccgtgggcattgtggtc

SEQ ID NO: 22122 - DNA, 20 bp, synthetic construct
  misc_feature 1..20: note = chemically synthesized
  source 1..20: mol_type = other DNA
caccgtgggcattgtggtca

SEQ ID NO: 22123 - DNA, 20 bp, synthetic construct
  misc_feature 1..20: note = chemically synthesized
  source 1..20: mol_type = other DNA
gtgggcattgtggtcagggc

SEQ ID NO: 22124 - DNA, 20 bp, synthetic construct
  misc_feature 1..20: note = chemically synthesized
  source 1..20: mol_type = other DNA
attgtggtcagggccagccc

SEQ ID NO: 22125 - DNA, 20 bp, synthetic construct
  misc_feature 1..20: note = chemically synthesized
  source 1..20: mol_type = other DNA
ttgtggtcagggccagcccc

SEQ ID NO: 22126 - DNA, 20 bp, synthetic construct
  misc_feature 1..20: note = chemically synthesized
  source 1..20: mol_type = other DNA
cagggccagccccaggtctg

SEQ ID NO: 22127 - DNA, 20 bp, synthetic construct
  misc_feature 1..20: note = chemically synthesized
  source 1..20: mol_type = other DNA
ggccagccccaggtctgtgg

SEQ ID NO: 22128 - DNA, 20 bp, synthetic construct
  misc_feature 1..20: note = chemically synthesized
  source 1..20: mol_type = other DNA
agccccaggtctgtggcagc

SEQ ID NO: 22129 - DNA, 20 bp, synthetic construct
  misc_feature 1..20: note = chemically synthesized
  source 1..20: mol_type = other DNA
caggtctgtggcagccagca

SEQ ID NO: 22130 - DNA, 20 bp, synthetic construct
  misc_feature 1..20: note = chemically synthesized
  source 1..20: mol_type = other DNA
tctgtggcagccagcatggc

SEQ ID NO: 22131 - DNA, 20 bp, synthetic construct
  misc_feature 1..20: note = chemically synthesized
  source 1..20: mol_type = other DNA
tggcagccagcatggccaga

SEQ ID NO: 22132 - DNA, 20 bp, synthetic construct
  misc_feature 1..20: note = chemically synthesized
  source 1..20: mol_type = other DNA
cagccagcatggccagaaag

SEQ ID NO: 22133 - DNA, 20 bp, synthetic construct
  misc_feature 1..20: note = chemically synthesized
  source 1..20: mol_type = other DNA
catggccagaaagaagtaca

SEQ ID NO: 22134 - DNA, 20 bp, synthetic construct
  misc_feature 1..20: note = chemically synthesized
  source 1..20: mol_type = other DNA
atggccagaaagaagtacat

SEQ ID NO: 22135 - DNA, 20 bp, synthetic construct
  misc_feature 1..20: note = chemically synthesized
  source 1..20: mol_type = other DNA
aagaagtacatgggctcatg

SEQ ID NO: 22136 - DNA, 20 bp, synthetic construct
  misc_feature 1..20: note = chemically synthesized
  source 1..20: mol_type = other DNA
agattgtgatcttccttaat

SEQ ID NO: 22137 - DNA, 20 bp, synthetic construct
  misc_feature 1..20: note = chemically synthesized
  source 1..20: mol_type = other DNA
ttgtgatcttccttaatgag

SEQ ID NO: 22138 - DNA, 20 bp, synthetic construct
  misc_feature 1..20: note = chemically synthesized
  source 1..20: mol_type = other DNA
tgatcttccttaatgagaag

SEQ ID NO: 22139 - DNA, 20 bp, synthetic construct
  misc_feature 1..20: note = chemically synthesized
  source 1..20: mol_type = other DNA
gatcttccttaatgagaaga

SEQ ID NO: 22140 - DNA, 20 bp, synthetic construct
  misc_feature 1..20: note = chemically synthesized
  source 1..20: mol_type = other DNA
tcttccttaatgagaagaag

SEQ ID NO: 22141 - DNA, 20 bp, synthetic construct
  misc_feature 1..20: note = chemically synthesized
  source 1..20: mol_type = other DNA
cttccttaatgagaagaagg

SEQ ID NO: 22142 - DNA, 20 bp, synthetic construct
  misc_feature 1..20: note = chemically synthesized
  source 1..20: mol_type = other DNA
ttccttaatgagaagaagga

SEQ ID NO: 22143 - DNA, 20 bp, synthetic construct
  misc_feature 1..20: note = chemically synthesized
  source 1..20: mol_type = other DNA
aggagggtgccattgccaaa

SEQ ID NO: 22144 - DNA, 20 bp, synthetic construct
  misc_feature 1..20: note = chemically synthesized
  source 1..20: mol_type = other DNA
ggagggtgccattgccaaaa

SEQ ID NO: 22145 - DNA, 20 bp, synthetic construct
  misc_feature 1..20: note = chemically synthesized
  source 1..20: mol_type = other DNA
ggtgccattgccaaaaagga

SEQ ID NO: 22146 - DNA, 20 bp, synthetic construct
  misc_feature 1..20: note = chemically synthesized
  source 1..20: mol_type = other DNA
ggatggatatatacatgaac

SEQ ID NO: 22147 - DNA, 20 bp, synthetic construct
  misc_feature 1..20: note = chemically synthesized
  source 1..20: mol_type = other DNA
atacatgaacaagaaaaata

SEQ ID NO: 22148 - DNA, 20 bp, synthetic construct
  misc_feature 1..20: note = chemically synthesized
  source 1..20: mol_type = other DNA
acaagaaaaatacggaaatc

SEQ ID NO: 22149 - DNA, 20 bp, synthetic construct
  misc_feature 1..20: note = chemically synthesized
  source 1..20: mol_type = other DNA
aaatacggaaatccagtgat

SEQ ID NO: 22150 - DNA, 20 bp, synthetic construct
  misc_feature 1..20: note = chemically synthesized
  source 1..20: mol_type = other DNA
tccagtgatgagcttcctcc

SEQ ID NO: 22151 - DNA, 20 bp, synthetic construct
  misc_feature 1..20: note = chemically synthesized
  source 1..20: mol_type = other DNA
tgatgagcttcctccaagcc

SEQ ID NO: 22152 - DNA, 20 bp, synthetic construct
  misc_feature 1..20: note = chemically synthesized
  source 1..20: mol_type = other DNA
ttcctccaagcctggaaaac

SEQ ID NO: 22153 - DNA, 20 bp, synthetic construct
  misc_feature 1..20: note = chemically synthesized
  source 1..20: mol_type = other DNA
aagcctggaaaaccagtcaa

SEQ ID NO: 22154 - DNA, 20 bp, synthetic construct
  misc_feature 1..20: note = chemically synthesized
  source 1..20: mol_type = other DNA
agcctggaaaaccagtcaat

SEQ ID NO: 22155 - DNA, 20 bp, synthetic construct
  misc_feature 1..20: note = chemically synthesized
  source 1..20: mol_type = other DNA
ctggaaaaccagtcaatagg

SEQ ID NO: 22156 - DNA, 20 bp, synthetic construct
  misc_feature 1..20: note = chemically synthesized
  source 1..20: mol_type = other DNA
tggaaaaccagtcaatagga

SEQ ID NO: 22157 - DNA, 20 bp, synthetic construct
  misc_feature 1..20: note = chemically synthesized
  source 1..20: mol_type = other DNA
ggaaaaccagtcaataggaa

SEQ ID NO: 22158 - DNA, 20 bp, synthetic construct
  misc_feature 1..20: note = chemically synthesized
  source 1..20: mol_type = other DNA
aaccagtcaataggaaggga

SEQ ID NO: 22159 - DNA, 20 bp, synthetic construct
  misc_feature 1..20: note = chemically synthesized
  source 1..20: mol_type = other DNA
accagtcaataggaagggat

SEQ ID NO: 22160 - DNA, 20 bp, synthetic construct
  misc_feature 1..20: note = chemically synthesized
  source 1..20: mol_type = other DNA
cagtcaataggaagggatgg

SEQ ID NO: 22161 - DNA, 20 bp, synthetic construct
  misc_feature 1..20: note = chemically synthesized
  source 1..20: mol_type = other DNA
gaagggatgggagctgccgc

SEQ ID NO: 22162 - DNA, 20 bp, synthetic construct
  misc_feature 1..20: note = chemically synthesized
  source 1..20: mol_type = other DNA
gctgccgctggacgacatcc

SEQ ID NO: 22163 - DNA, 20 bp, synthetic construct
  misc_feature 1..20: note = chemically synthesized
  source 1..20: mol_type = other DNA
ctgccgctggacgacatcct

SEQ ID NO: 22164 - DNA, 20 bp, synthetic construct
  misc_feature 1..20: note = chemically synthesized
  source 1..20: mol_type = other DNA
gacgacatcctgggtttata

SEQ ID NO: 22165 - DNA, 20 bp, synthetic construct
  misc_feature 1..20: note = chemically synthesized
  source 1..20: mol_type = other DNA
gacatcctgggtttatatag

SEQ ID NO: 22166 - DNA, 20 bp, synthetic construct
  misc_feature 1..20: note = chemically synthesized
  source 1..20: mol_type = other DNA
ttctgtttctgttattacca

SEQ ID NO: 22167 - DNA, 20 bp, synthetic construct
  misc_feature 1..20: note = chemically synthesized
  source 1..20: mol_type = other DNA
tctgttattaccacagtgca

SEQ ID NO: 22168 - DNA, 20 bp, synthetic construct
  misc_feature 1..20: note = chemically synthesized
  source 1..20: mol_type = other DNA
cagtgcacagttctaccttc

SEQ ID NO: 22169 - DNA, 20 bp, synthetic construct
  misc_feature 1..20: note = chemically synthesized
  source 1..20: mol_type = other DNA
agtgcacagttctaccttca

SEQ ID NO: 22170 - DNA, 20 bp, synthetic construct
  misc_feature 1..20: note = chemically synthesized
  source 1..20: mol_type = other DNA
cacttcgactatatcattct

SEQ ID NO: 22171 - DNA, 20 bp, synthetic construct
  misc_feature 1..20: note = chemically synthesized
  source 1..20: mol_type = other DNA
attctcagaattttttccta

SEQ ID NO: 22172 - DNA, 20 bp, synthetic construct
  misc_feature 1..20: note = chemically synthesized
  source 1..20: mol_type = other DNA
gataataatgacatcaatat

SEQ ID NO: 22173 - DNA, 20 bp, synthetic construct
  misc_feature 1..20: note = chemically synthesized
  source 1..20: mol_type = other DNA
tgtttctcaaaatacattct

SEQ ID NO: 22174 - DNA, 20 bp, synthetic construct
  misc_feature 1..20: note = chemically synthesized
  source 1..20: mol_type = other DNA
gtttctcaaaatacattctc

SEQ ID NO: 22175 - DNA, 20 bp, synthetic construct
  misc_feature 1..20: note = chemically synthesized
  source 1..20: mol_type = other DNA
tttctcaaaatacattctca

SEQ ID NO: 22176 - DNA, 20 bp, synthetic construct
  misc_feature 1..20: note = chemically synthesized
  source 1..20: mol_type = other DNA
gtattcttaactgcacattc

SEQ ID NO: 22177 - DNA, 20 bp, synthetic construct
  misc_feature 1..20: note = chemically synthesized
  source 1..20: mol_type = other DNA
tattcttaactgcacattcc

SEQ ID NO: 22178 - DNA, 20 bp, synthetic construct
  misc_feature 1..20: note = chemically synthesized
  source 1..20: mol_type = other DNA
tacctacgtaatcaaattct

SEQ ID NO: 22179 - DNA, 20 bp, synthetic construct
  misc_feature 1..20: note = chemically synthesized
  source 1..20: mol_type = other DNA
cctacgtaatcaaattcttg

SEQ ID NO: 22180 - DNA, 20 bp, synthetic construct
  misc_feature 1..20: note = chemically synthesized
  source 1..20: mol_type = other DNA
tcaactgtttatatgcattt

SEQ ID NO: 22181 - DNA, 20 bp, synthetic construct
  misc_feature 1..20: note = chemically synthesized
  source 1..20: mol_type = other DNA
atgcatttaagcattctctt

SEQ ID NO: 22182 - DNA, 20 bp, synthetic construct
  misc_feature 1..20: note = chemically synthesized
  source 1..20: mol_type = other DNA
aactgttacccttaactatg

SEQ ID NO: 22183 - DNA, 20 bp, synthetic construct
  misc_feature 1..20: note = chemically synthesized
  source 1..20: mol_type = other DNA
ccttaactatgcagatttta

SEQ ID NO: 22184 - DNA, 20 bp, synthetic construct
  misc_feature 1..20: note = chemically synthesized
  source 1..20: mol_type = other DNA
tttaaagaattcgtattcta

SEQ ID NO: 22185 - DNA, 20 bp, synthetic construct
  misc_feature 1..20: note = chemically synthesized
  source 1..20: mol_type = other DNA
ttaaagaattcgtattctat

SEQ ID NO: 22186 - DNA, 20 bp, synthetic construct
  misc_feature 1..20: note = chemically synthesized
  source 1..20: mol_type = other DNA
taaagaattcgtattctatg

SEQ ID NO: 22187 - DNA, 20 bp, synthetic construct
  misc_feature 1..20: note = chemically synthesized
  source 1..20: mol_type = other DNA
tcgtattctatggggcattc

SEQ ID NO: 22188 - DNA, 20 bp, synthetic construct
  misc_feature 1..20: note = chemically synthesized
  source 1..20: mol_type = other DNA
cgtattctatggggcattca

SEQ ID NO: 22189 - DNA, 20 bp, synthetic construct
  misc_feature 1..20: note = chemically synthesized
  source 1..20: mol_type = other DNA
gtattctatggggcattcaa

SEQ ID NO: 22190 - DNA, 20 bp, synthetic construct
  misc_feature 1..20: note = chemically synthesized
  source 1..20: mol_type = other DNA
tattctatggggcattcaag

SEQ ID NO: 22191 - DNA, 20 bp, synthetic construct
  misc_feature 1..20: note = chemically synthesized
  source 1..20: mol_type = other DNA
ggggcattcaaggggatttc

SEQ ID NO: 22192 - DNA, 20 bp, synthetic construct
  misc_feature 1..20: note = chemically synthesized
  source 1..20: mol_type = other DNA
cattcaaggggatttccaga

SEQ ID NO: 22193 - DNA, 20 bp, synthetic construct
  misc_feature 1..20: note = chemically synthesized
  source 1..20: mol_type = other DNA
agctaacactaatttttttc

SEQ ID NO: 22194 - DNA, 20 bp, synthetic construct
  misc_feature 1..20: note = chemically synthesized
  source 1..20: mol_type = other DNA
taaacctgtaattgccttca

SEQ ID NO: 22195 - DNA, 20 bp, synthetic construct
  misc_feature 1..20: note = chemically synthesized
  source 1..20: mol_type = other DNA
acctgtaattgccttcacag

SEQ ID NO: 22196 - DNA, 20 bp, synthetic construct
  misc_feature 1..20: note = chemically synthesized
  source 1..20: mol_type = other DNA
tccacattttcctgcatgta

SEQ ID NO: 22197 - DNA, 20 bp, synthetic construct
  misc_feature 1..20: note = chemically synthesized
  source 1..20: mol_type = other DNA
taaagacttacctgaattat

SEQ ID NO: 22198 - DNA, 20 bp, synthetic construct
  misc_feature 1..20: note = chemically synthesized
  source 1..20: mol_type = other DNA
cttacctgaattatcagcta

SEQ ID NO: 22199 - DNA, 20 bp, synthetic construct
  misc_feature 1..20: note = chemically synthesized
  source 1..20: mol_type = other DNA
attatcagctaaagtctcaa

SEQ ID NO: 22200 - DNA, 20 bp, synthetic construct
  misc_feature 1..20: note = chemically synthesized
  source 1..20: mol_type = other DNA
agctaaagtctcaacagcct

SEQ ID NO: 22201 - DNA, 20 bp, synthetic construct
  misc_feature 1..20: note = chemically synthesized
  source 1..20: mol_type = other DNA
aaagtctcaacagcctaaga

SEQ ID NO: 22202 - DNA, 20 bp, synthetic construct
  misc_feature 1..20: note = chemically synthesized
  source 1..20: mol_type = other DNA
ctcaacagcctaagaaagaa

SEQ ID NO: 22203 - DNA, 20 bp, synthetic construct
  misc_feature 1..20: note = chemically synthesized
  source 1..20: mol_type = other DNA
cagcctaagaaagaaaagtg

SEQ ID NO: 22204 - DNA, 20 bp, synthetic construct
  misc_feature 1..20: note = chemically synthesized
  source 1..20: mol_type = other DNA
agcctaagaaagaaaagtgt

SEQ ID NO: 22205 - DNA, 20 bp, synthetic construct
  misc_feature 1..20: note = chemically synthesized
  source 1..20: mol_type = other DNA
ctaagaaagaaaagtgtggg

SEQ ID NO: 22206 - DNA, 20 bp, synthetic construct
  misc_feature 1..20: note = chemically synthesized
  source 1..20: mol_type = other DNA
aagaaagaaaagtgtgggaa

SEQ ID NO: 22207 - DNA, 20 bp, synthetic construct
  misc_feature 1..20: note = chemically synthesized
  source 1..20: mol_type = other DNA
aaactctgccactaccactg

SEQ ID NO: 22208 - DNA, 20 bp, synthetic construct
  misc_feature 1..20: note = chemically synthesized
  source 1..20: mol_type = other DNA
ctgccactaccactgtagct

SEQ ID NO: 22209 - DNA, 20 bp, synthetic construct
  misc_feature 1..20: note = chemically synthesized
  source 1..20: mol_type = other DNA
tgccactaccactgtagcta

SEQ ID NO: 22210 - DNA, 20 bp, synthetic construct
  misc_feature 1..20: note = chemically synthesized
  source 1..20: mol_type = other DNA
ccactaccactgtagctaag

SEQ ID NO: 22211 - DNA, 20 bp, synthetic construct
  misc_feature 1..20: note = chemically synthesized
  source 1..20: mol_type = other DNA
ctaccactgtagctaaggag

SEQ ID NO: 22212 - DNA, 20 bp, synthetic construct
  misc_feature 1..20: note = chemically synthesized
  source 1..20: mol_type = other DNA
cactgtagctaaggagcagt

SEQ ID NO: 22213 - DNA, 20 bp, synthetic construct
  misc_feature 1..20: note = chemically synthesized
  source 1..20: mol_type = other DNA
agctaaggagcagtcagatt

SEQ ID NO: 22214 - DNA, 20 bp, synthetic construct
  misc_feature 1..20: note = chemically synthesized
  source 1..20: mol_type = other DNA
aaggagcagtcagattgaga

SEQ ID NO: 22215 - DNA, 20 bp, synthetic construct
  misc_feature 1..20: note = chemically synthesized
  source 1..20: mol_type = other DNA
ggagcagtcagattgagaaa

SEQ ID NO: 22216 - DNA, 20 bp, synthetic construct
  misc_feature 1..20: note = chemically synthesized
  source 1..20: mol_type = other DNA
cagattgagaaagagacact

SEQ ID NO: 22217 - DNA, 20 bp, synthetic construct
  misc_feature 1..20: note = chemically synthesized
  source 1..20: mol_type = other DNA
agaaagagacacttggcctc

SEQ ID NO: 22218 - DNA, 20 bp, synthetic construct
  misc_feature 1..20: note = chemically synthesized
  source 1..20: mol_type = other DNA
cacttggcctccagatttca

SEQ ID NO: 22219 - DNA, 20 bp, synthetic construct
  misc_feature 1..20: note = chemically synthesized
  source 1..20: mol_type = other DNA
ggcctccagatttcatggac

SEQ ID NO: 22220 - DNA, 20 bp, synthetic construct
  misc_feature 1..20: note = chemically synthesized
  source 1..20: mol_type = other DNA
cagatttcatggactagtga

SEQ ID NO: 22221 - DNA, 20 bp, synthetic construct
  misc_feature 1..20: note = chemically synthesized
  source 1..20: mol_type = other DNA
agatttcatggactagtgat

SEQ ID NO: 22222 - DNA, 20 bp, synthetic construct
  misc_feature 1..20: note = chemically synthesized
  source 1..20: mol_type = other DNA
gatttcatggactagtgatg

SEQ ID NO: 22223 - DNA, 20 bp, synthetic construct
  misc_feature 1..20: note = chemically synthesized
  source 1..20: mol_type = other DNA
catggactagtgatggggaa

SEQ ID NO: 22224 - DNA, 20 bp, synthetic construct
  misc_feature 1..20: note = chemically synthesized
  source 1..20: mol_type = other DNA
ggggaacagacattcacgat

(The sequence listing continues in the following parts.)

1-56. (canceled)

57. A method of increasing the level of fetal hemoglobin (HbF) in a human cell by genome editing, wherein the method comprises introducing into the cell (i) Cas9 endonuclease or a polynucleotide encoding a Cas9 endonuclease; and (ii) one or more guide RNAs or one or more polynucleotides encoding the one or more guide RNAs, each comprising a spacer sequence that is complementary to the one or more loci within the δβ-globin region of human chromosome 11, and wherein one of the one or more gRNAs comprise a spacer sequence selected from the group consisting of a corresponding RNA sequence of any one of SEQ ID NOs: 161,203; 161,204; 161,205; 161,206; 161,207; 161,213; 161,215; 161,216; 161,217; 161,218; 161,220; 161,221; 161,222; 161,224; 161,230; 161,231; 161,309; 161,233; 161,235; 161,236; 161,237; 161,240; 161,241; 161,243; 161,245; 161,250; 161,252; 161,254; 161,255; 161,256; 161,257; 161,258; 161,259; 161,262; 161,265; 161,267; 161,269; 161,271; 161,272; 161,273; 161,274; 161,275; 161,278; 161,279; 161,280; 161,281; 161,283; 161,287; 161,311; 161,294; 161,295; 161,296; 161,297; 161,298; 161,299; 161,300; 161,303; and 161,312.

58. The method of claim 57, wherein one of the one or more gRNAs comprise a spacer sequence selected from the group consisting of a corresponding RNA sequence of any one of SEQ ID NOs: 161,205; 161,206; 161,207; 161,217; 161,230; 161,231; 161,241; 161,254; 161,255; 161,259; 161,269; 161,275; 161,310; and 161,311.

59. The method of claim 57, wherein one of the one or more loci consists of a sequence that is complementary to a nucleic acid sequence of any one of SEQ ID NOs: 161,203; 161,204; 161,205; 161,206; 161,207; 161,213; 161,215; 161,216; 161,217; 161,218; 161,220; 161,221; 161,222; 161,224; 161,230; 161,231; 161,309; 161,233; 161,235; 161,236; 161,237; 161,240; 161,241; 161,243; 161,245; 161,250; 161,252; 161,254; 161,255; 161,256; 161,257; 161,258; 161,259; 161,262; 161,265; 161,267; 161,269; 161,271; 161,272; 161,273; 161,274; 161,275; 161,278; 161,279; 161,280; 161,281; 161,283; 161,287; 161,311; 161,294; 161,295; 161,296; 161,297; 161,298; 161,299; 161,300; 161,303; and 161,312.

60. The method of claim 57, wherein one of the one or more loci consists of a sequence that is complementary to a nucleic acid sequence of any one of SEQ ID NOs: 161,205; 161,206; 161,207; 161,217; 161,230; 161,231; 161,241; 161,254; 161,255; 161,259; 161,269; 161,275; 161,310; and 161,311.

61. The method of claim 57, wherein the one or more guide RNAs are single-molecule guide RNAs.

62. The method of claim 57, wherein the method comprises introducing into the cell (i) a polynucleotide encoding the Cas9 endonuclease, or (ii) an RNP comprising the Cas9 endonuclease.

63. The method of claim 57, wherein the polynucleotide encoding the Cas9 endonuclease and the one or more polynucleotides encoding the one or more guide RNAs are in a single vector.

64. The method of claim 57, wherein the human cell is an isolated progenitor cell.

65. The method of claim 64, wherein the isolated progenitor cell is a hematopoietic progenitor cell.

66. The method of claim 65, wherein the hematopoietic progenitor cell is capable of giving rise to cells of the erythroid lineage.

67. The method of claim 64, wherein the isolated progenitor cell is an induced pluripotent stem cell.

68. The method of claim 57, wherein the human cell is derived from a human patient having a β-hemoglobinopathy.

69. The method of claim 68, wherein the cell is derived from a human patient having sickle cell disease, sickle cell trait, hemoglobin C disease, hemoglobin C trait, hemoglobin S/C disease, hemoglobin D disease, hemoglobin E disease, or a thalassemia.

70. The method of claim 57, wherein the method comprises introducing into the cell a nucleic acid comprising a nucleotide sequence encoding the one or more guide RNAs.

71. The method of claim 57, wherein the Cas9 endonuclease effects a double-strand break (DSB) at the one or more loci within the δβ-globin region of human chromosome 11, causing deletions or insertions of chromosomal DNA at the one or more loci, to produce a modified human cell.

72. The method of claim 71, wherein modified cell has increased expression of the γ-globin gene, resulting in an increased level of HbF, relative to an unmodified cell.

73. The method of claim 57, wherein the one or more loci are proximal to a boundary of the Corfu long deletion or the Corfu small deletion.

74. A method of ameliorating a β-hemoglobinopathy in a human patient comprising administering to such patient human cells produced by the method of claim 57.

75. A guide ribonucleic acid (gRNA) comprising a spacer sequence selected from the group consisting of a corresponding RNA sequence of SEQ ID NOs: 161,203; 161,204; 161,205; 161,206; 161,207; 161,213; 161,215; 161,216; 161,217; 161,218; 161,220; 161,221; 161,222; 161,224; 161,230; 161,231; 161,309; 161,233; 161,235; 161,236; 161,237; 161,240; 161,241; 161,243; 161,245; 161,250; 161,252; 161,254; 161,255; 161,256; 161,257; 161,258; 161,259; 161,262; 161,265; 161,267; 161,269; 161,271; 161,272; 161,273; 161,274; 161,275; 161,278; 161,279; 161,280; 161,281; 161,283; 161,287; 161,311; 161,294; 161,295; 161,296; 161,297; 161,298; 161,299; 161,300; 161,303; and 161,312.

76. The gRNA of claim 76, wherein the gRNA is a single-molecule guide RNA (sgRNA).
